United States Patent Application Publication US 2011/0183924 A1 - sequence listing, part 33

SEQ ID NO: 75374 - DNA, 3122 bp, Homo sapiens
ctgtgtccagttgcacccagggaggcagtggtgtctggctcatggggccacgagaacttgatgaagcacgcagaacccagagcccgtccacagctattcttgctgtggtcgggactcggctcatctgggctttgccataggctctgtgacttttggcaaatccctagtcctctaatctttcctactggtcagtgacgtgatgcctcccctcttcgccctgcctcgtcccccatccccacaggctcagtgtggtcttggtgggaccgggtagcgtttccatgaagaatgaaatacgctttcctgagcacgcacagcctgcatcgtcacggccccactcccgtctgagctcactctctgcaggactcccaaggacaaatcatgtgtcgcctcttgcctgtgaaagcccagagcgttcagaatacatgtgggaacactaatgttgctggtgtctcctgtttaacagatgacatcccaaaaaagaagatagcaagcgttttcaggcccccctcccccgatgtcctcgcatacttggacttcagcgtgtcaaccactgggatattagcgggagtgaaggtaggtcctctgaaatcttgtttgcttcagcccctagaaatcaggaggagtggacagaaaggatgtcagatgcagatttaaactgacaggtccttcttatgcaaagcacaaagcaacaattttgcttcttaagatttgtgttaaataccaataaatgctaagatgtgattagcctgagagtaatgcgttttctgatgcattatggttatgtctaaactttctgatttatgactgtctagcttacaggaactggtggctttgaagaatctcttaccttgctgggagtcaatagctcaattaaaatttttcaggcggggcgtggtggctcacgcctgtaatcccagcacttcgggaggccgaggcgggtggatcacaagatcaagagatggagaccatcctggccaacgtggtgaaaccccgtctctactaaaaatacaaaaaattagctgggcatggtggcaggtgcctctaatcccagatactcaggaggctgaggcaggagaattgcttgaacccgggaggcagaggttgcagtgagccgagattgtgccattgcactccagcctgggcgacagagcaagactctgcctcaaaaaaaaaaaaaagaaaaaaattttaaaaattcattaccctgaaattttgtttcaaagatttttagtgtaccatttcttgggtattatttaggttatatggggatttgagccaaccgtcttttaaggaaataaatatgatgtttggtagttcggagctatggtctagccatgtgaacagcggacactgccatccaccctctcccctcctgaatttcatttcactttttttttttgaactttattttactcttaagatgtcgcacgcggccacaagcgccttatgccgctccataaagctgcagtgtgagctgtacccctcgcggcagatcgccatctgcctcgacccctactgtggccttggttttgccctgtggtgtctgtgcaggtgagtgcagggcccctgctgcctgccaggtgggagcagctcgtgtggctcttaggaaccttggccttctaaggcaccttttctgggtgctcaggaagccgatgagatgtgtgtgagtgggtttgtttggggatgaagtgggttggagtctgagtctgaaattgagtgaaaatacatttttcattaaatacactgtccgttatcagtacttgggaagaatctgcttgattccttcaaacactagaaagtggcgatccgtctctagaagtgaatgcctctggagtggtgtccccggatcctctccaagtgttcggagcagagctcagaaccccgtgcctgccatcccccaaccttcaccctgtggcatgttttccaccaaacccccccacttggcgtcagaacagaaatcatgcccctgttgtggctggaaaagaagtgttcttgaggaagggaagagtggagtgcccagggtgctgggtgggcgggcggagcctcacgagccttccctctcgcagtgtctactcgggacaccaatcagtgctggtgcccccgctggagctggagagcaacgtgtccctgtggctgtcggccgtcagccagtacaaggcccgcgtcaccttctgctcctactctgtgatggagatgtgcaccaagggcctaggcgcacagacgggtgtcctcaggatgaagggggtgaacctgtcatgtgtgcgcacgtgcatggtggtcgccgaggagcggcccaggattgcgctgacccagtccttctccaagctcttcaaggacctgggcctgccggcccgcgccgtaagcaccacgttcgggtgcagggtcaacgtggccatctgcctccaggtgaggtgcctggggcctgcggttctcgaaagctggctgttggcagcatggagacccagtttcccagttgttaatgtgccgttttgtagccgcctgatctatttctccttctctgggcctttgatatctcatttccatgtaacattttagcttcaagggttttatttttaaagatgttctattctagttggagaaaggcttatttggaaaaaaaacacattgtttttgaacagtgactaataactgtaagactctctaagttagatataaaacacagctaagttcttaaagcaagattgaacttactgttttaagatatctagcaatattaaattgaaacattaataaatgtggtaatttgtgttgactcaaattcatttctgaaaccatgaaatgtcttattaaaaggaagcaccaagtttcaggccaggagtggtggctcatgcctataatcccagcactttgggaggctgaggcaggcggattacctgaggtcaggaattcgagaccagcctggacaatatgatgagaccccgtctctactaaaaatacaaaaattagctggctggtggtgcgcgcctgttgtcccggctacttgggaggttgaggcacaagaatcgcttgaacctggcaagaggaggttgcagcgagccaagatctcaccactgcactccagcctgggtgacagagcgagaccctgtctcaaaaaaaaaaaa

SEQ ID NO: 75375 - DNA, 3752 bp, Homo sapiens
tcacacaaccaggaagaataagagtggcccctgtgacatttggttctttagagggacagggacagagagaagacaagtaacccatctactggcaagaacgtttcttacccgatgacccatgtgacatttggttttagagggatagggacagatagaagacaagttatccatctactggcagaacgtttcttacctgatgctgtcataggatctgacttagtttcatcttgatgaacgatggtggtgcatacagtgtgtgcttgctggtctgtggtcagatgtgtatcagggcccctcccagctttgaagctcagatcccagtcctggattctcaagtatggccacactgtagcttgatgtaaacactaggtttagcttactgggtgccaggggcttgctgggttcagggaggacctaaacgaaatgtagagtgagctgctgtgagcacatggggtgggtggcgagtgcatgcgggtggcggcacttgggaccgcagcgtggttggggtgtccctgccattcatggcaggtgtgctgtggaaaggttgacatcctgactgttgtcaacagaccctcagagtgatcatttccaacgtcatgatctgccctttcagacattactacctgtgtagtaaattttgtactgaaattgttccctttatttttagggttcgtttggtagaacggggttctccgcacagcctgccattgatggagtctggaaagatcctccccggcgtgaaggtcatcatcgcacacaccgagaccaaaggacccttgggagactcacacctgggagagatctgggtaagcagcccccacaatgccaccgggtactacaccgtttacggggaggaggcgcttcatgccgaccacttcagtgcccggctgagttttggagacacacagaccatctgggcaaggaccggctaccttggcttccttcggcgaacagagctcactgatgccagtggagggcggcacgatgcactgtatgtggttgggtctctggatgaaactctggagctcagaggcatgcggtaccaccccatcgacattgagacctctgtcatccgagcacacaggagcatcgctgagtgtgccgtattcacctggaccaacctgctggtggtggtggtggagctggatgggctagagcaggatgccctggacctggtggccctggtgaccaacgtggtgctggaggagcactacctggtcgtgggagtggtggtcatcgtggacccaggggtgatccctatcaactctcggggtgagaagcagcgcatgcacctgcgggacggcttcctggctgaccagctggaccccatctatgtcgcctacaacatgtgagcgcagcacaccggcccaggtgccggagatgaatgagccccagcagtccaaggtgtgatgtgggaagacaccgcagagctcactcaccgggactcgcccttcctgtgctcttacagatccctctcaacaatccccgcatctccttttagaaagcacttcctgaattatttaaagaaatattttgaatctgccaagtacatttacaaaaacacggatgctggtattttaacagatggagagacaaggaaaggaaaggaaaggcctggcatgggcattgtgaggaatcacaggcaccgaggttgttctctgctgtactgcaagtttgcactttctttaggctaaaaatatagttcctgatttttaaaattcagttatttattcccacttcaaatgacaagttcatatatagaatttacgggagaaacttgagaccatttacggggagaaacttgattctgggaagatagcagagtacaaaccagctgcctcacttctgtttcacagggaggctgatggaaaaaggaagcaagctggacccatcctccctgctcacagagggcactgtggtcacacacagtgcctcctctgccagttcctttattgaaagaggtgtgctggctggccacggtggcttacacctgtaatcccagcactttgggaggccgaggcgagcagatcacgaggtcaggagaccgagaccatcctggctaacatggtgaaaccctgtctctactaaaaatacaaaaaattagccgggtgtggtggtgggcgcctgtagtcccagctacttgggaggctgaggcaggagaatggtatgaaccagggaggcggagcttgcagtgagccgagatcacgctactgcactccagcctgggtgacagcacgagatgccgtcttaaaaaaacaaaaaagaggtgtgctgcttgtcagcatgtattgtcacggacactcaataagtgccattttggactgtcaaatttagatgctttgtttcagaaagataagccagcatttagttttaaatcactttcctggtttgtaacttgatgctgtttagttaaattgctagttttcctaacactacaatattaattcttctcgtggaagtgtactgatttattatttttattccaagtcagcagatttggaagcattgtggtaaagtctaaggttttcatatccatagtgctgtttggtgagtaccggcagtacagttgaggggagcagggaacagcattgccccgtattgaaggtggagatggttacattcttcactgctttttgcattttgagttgtgtgcctataaaatttggccaaaccattttattattttgttcaaacttgactaagctgagtgatctaaaattatacagaacctaaatcaaagaagagaatgtaaagtcctttagttacttctaagaatttgaagtcaagcacgaatctaagacatagattatttttatatagctaatgaagagtatgttacgaaattgttgggtttttgaggtatctgagggtggcaaattttgtgaatcatgcatgcttcacagaaacaaccaggtttttccagaattagtctggatcagtgcctaacaaagctgttattaattctccacacatgagtctggctaactgggccagctctcatgttttactcctgtctggctacaaatagcactgtgcatagtagccctgtttccccatggtgttggactgtggtaaagtatgttgtgacatactggaattctaataatcctgttgtaagtatgtacagaatctatgtaacttattgttgacatacagaggtttgggaagtagtctaatggacattccttacaatagaatggctgggaagggaaagaaaaaaaaaaaaaaactacctaactccaatcttaatgttgtagttttatagcaaacaaaaattgtcagctttttgtattgaaaggtcagtggtggtaagacaaggtgtcttgtaaattaagattttaagaagtgcattaaaatgttttagaattactctgggaattctgtatatcacactaaaatttttatatcattatgttaataaaagttattgactttgtaattctgcattttgaaatgtgtgaaaagggtctttaaattaccccgaataggttgtatcttattttgctttttttctgactataaaagcagttatgcttatagcataaaatctagaaagcacattaaagtataaagaaaattaaaatttcttataattctacctctgagtaaacagcagcattcgtatgtaacataaaccctctcagggatttattttttctttttaaaaattttttacaaaattaggatcaagtgcttttttaaataatttgcttttgtacttaataaattatagactttaaaatctattacat

SEQ ID NO: 75376 - DNA, 5553 bp, Homo sapiens
ctgtgtccagttgcacccagggaggcagtggtgtctggctcatggggccacgagaacttgatgaagcacgcagaacccagagcccgtccacagctattcttgctgtggtcgggactcggctcatctgggctttgccataggctctgtgacttttggcaaatccctagtcctctaatctttcctactggtcagtgacgtgatgcctcccctcttcgccctgcctcgtcccccatccccacaggctcagtgtggtcttggtgggaccgggtagcgtttccatgaagaatgaaatacgctttcctgagcacgcacagcctgcatcgtcacggccccactcccgtctgagctcactctctgcaggactcccaaggacaaatcatgtgtcgcctcttgcctgtgaaagcccagagcgttcagaatacatgtgggaacactaatgttgctggtgtctcctgtttaacagatgacatcccaaaaaagaagatagcaagcgttttcaggcccccctcccccgatgtcctcgcatacttggacttcagcgtgtcaaccactgggatattagcgggagtgaaggtaggtcctctgaaatcttgtttgcttcagcccctagaaatcaggaggagtggacagaaaggatgtcagatgcagatttaaactgacaggtccttcttatgcaaagcacaaagcaacaattttgcttcttaagatttgtgttaaataccaataaatgctaagatgtgattagcctgagagtaatgcgttttctgatgcattatggttatgtctaaactttctgatttatgactgtctagcttacaggaactggtggctttgaagaatctcttaccttgctgggagtcaatagctcaattaaaatttttcaggcggggcgtggtggctcacgcctgtaatcccagcacttcgggaggccgaggcgggtggatcacaagatcaagagatggagaccatcctggccaacgtggtgaaaccccgtctctactaaaaatacaaaaaattagctgggcatggtggcaggtgcctctaatcccagatactcaggaggctgaggcaggagaattgcttgaacccgggaggcagaggttgcagtgagccgagattgtgccattgcactccagcctgggcgacagagcaagactctgcctcaaaaaaaaaaaaaagaaaaaaattttaaaaattcattaccctgaaattttgtttcaaagatttttagtgtaccatttcttgggtattatttaggttatatggggatttgagccaaccgtcttttaaggaaataaatatgatgtttggtagttcggagctatggtctagccatgtgaacagcggacactgccatccaccctctcccctcctgaatttcatttcactttttttttttgaactttattttactcttaagatgtcgcacgcggccacaagcgccttatgccgctccataaagctgcagtgtgagctgtacccctcgcggcagatcgccatctgcctcgacccctactgtggccttggttttgccctgtggtgtctgtgcaggtgagtgcagggcccctgctgcctgccaggtgggagcagctcgtgtggctcttaggaaccttggccttctaaggcaccttttctgggtgctcaggaagccgatgagatgtgtgtgagtgggtttgtttggggatgaagtgggttggagtctgagtctgaaattgagtgaaaatacatttttcattaaatacactgtccgttatcagtacttgggaagaatctgcttgattccttcaaacactagaaagtggcgatccgtctctagaagtgaatgcctctggagtggtgtccccggatcctctccaagtgttcggagcagagctcagaaccccgtgcctgccatcccccaaccttcaccctgtggcatgttttccaccaaacccccccacttggcgtcagaacagaaatcatgcccctgttgtggctggaaaagaagtgttcttgaggaagggaagagtggagtgcccagggtgctgggtgggcgggcggagcctcacgagccttccctctcgcagtgtctactcgggacaccaatcagtgctggtgcccccgctggagctggagagcaacgtgtccctgtggctgtcggccgtcagccagtacaaggcccgcgtcaccttctgctcctactctgtgatggagatgtgcaccaagggcctaggcgcacagacgggtgtcctcaggatgaagggggtgaacctgtcatgtgtgcgcacgtgcatggtggtcgccgaggagcggcccaggattgcgctgacccagtccttctccaagctcttcaaggacctgggcctgccggcccgcgccgtaagcaccacgttcgggtgcagggtcaacgtggccatctgcctccagggcacagctggcccggaccccacaaccgtctacgtggacatgcgggcactgcgccatgacagggttcgtttggtagaacggggttctccgcacagcctgccattgatggagtctggaaagatcctccccggcgtgaaggtcatcatcgcacacaccgagaccaaaggacccttgggagactcacacctgggagagatctgggtaagcagcccccacaatgccaccgggtactacaccgtttacggggaggaggcgcttcatgccgaccacttcagtgcccggctgagttttggagacacacagaccatctgggcaaggaccggctaccttggcttccttcggcgaacagagctcactgatgccagtggagggcggcacgatgcactgtatgtggttgggtctctggatgaaactctggagctcagaggcatgcggtaccaccccatcgacattgagacctctgtcatccgagcacacaggagcatcgctgagtgtgccgtattcacctggaccaacctgctggtggtggtggtggagctggatgggctagagcaggatgccctggacctggtggccctggtgaccaacgtggtgctggaggagcactacctggtcgtgggagtggtggtcatcgtggacccaggggtgatccctatcaactctcggggtgagaagcagcgcatgcacctgcgggacggcttcctggctgaccagctggaccccatctatgtcgcctacaacatgtgagcgcagcacaccggcccaggtgccggagatgaatgagccccagcagtccaaggtgtgatgtgggaagacaccgcagagctcactcaccgggactcgcccttcctgtgctcttacagatccctctcaacaatccccgcatctccttttagaaagcacttcctgaattatttaaagaaatattttgaatctgccaagtacatttacaaaaacacggatgctggtattttaacagatggagagacaaggaaaggaaaggaaaggcctggcatgggcattgtgaggaatcacaggcaccgaggttgttctctgctgtactgcaagtttgcactttctttaggctaaaaatatagttcctgatttttaaaattcagttatttattcccacttcaaatgacaagttcatatatagaatttacgggagaaacttgagaccatttacggggagaaacttgattctgggaagatagcagagtacaaaccagctgcctcacttctgtttcacagggaggctgatggaaaaaggaagcaagctggacccatcctccctgctcacagagggcactgtggtcacacacagtgcctcctctgccagttcctttattgaaagaggtgtgctggctggccacggtggcttacacctgtaatcccagcactttgggaggccgaggcgagcagatcacgaggtcaggagaccgagaccatcctggctaacatggtgaaaccctgtctctactaaaaatacaaaaaattagccgggtgtggtggtgggcgcctgtagtcccagctacttgggaggctgaggcaggagaatggtatgaaccagggaggcggagcttgcagtgagccgagatcacgctactgcactccagcctgggtgacagcacgagatgccgtcttaaaaaaacaaaaaagaggtgtgctgcttgtcagcatgtattgtcacggacactcaataagtgccattttggactgtcaaatttagatgctttgtttcagaaagataagccagcatttagttttaaatcactttcctggtttgtaacttgatgctgtttagttaaattgctagttttcctaacactacaatattaattcttctcgtggaagtgtactgatttattatttttattccaagtcagcagatttggaagcattgtggtaaagtctaaggttttcatatccatagtgctgtttggtgagtaccggcagtacagttgaggggagcagggaacagcattgccccgtattgaaggtggagatggttacattcttcactgctttttgcattttgagttgtgtgcctataaaatttggccaaaccattttattattttgttcaaacttgactaagctgagtgatctaaaattatacagaacctaaatcaaagaagagaatgtaaagtcctttagttacttctaagaatttgaagtcaagcacgaatctaagacatagattatttttatatagctaatgaagagtatgttacgaaattgttgggtttttgaggtatctgagggtggcaaattttgtgaatcatgcatgcttcacagaaacaaccaggtttttccagaattagtctggatcagtgcctaacaaagctgttattaattctccacacatgagtctggctaactgggccagctctcatgttttactcctgtctggctacaaatagcactgtgcatagtagccctgtttccccatggtgttggactgtggtaaagtatgttgtgacatactggaattctaataatcctgttgtaagtatgtacagaatctatgtaacttattgttgacatacagaggtttgggaagtagtctaatggacattccttacaatagaatggctgggaagggaaagaaaaaaaaaaaaaaactacctaactccaatcttaatgttgtagttttatagcaaacaaaaattgtcagctttttgtattgaaaggtcagtggtggtaagacaaggtgtcttgtaaattaagattttaagaagtgcattaaaatgttttagaattactctgggaattctgtatatcacactaaaatttttatatcattatgttaataaaagttattgactttgtaattctgcattttgaaatgtgtgaaaagggtctttaaattaccccgaataggttgtatcttattttgctttttttctgactataaaagcagttatgcttatagcataaaatctagaaagcacattaaagtataaagaaaattaaaatttcttataattctacctctgagtaaacagcagcattcgtatgtaacataaaccctctcagggatttattttttctttttaaaaattttttacaaaattaggatcaagtgcttttttaaataatttgcttttgtacttaataaattatagactttaaaatctattacat

SEQ ID NO: 75377 - DNA, 2801 bp, Homo sapiens
ctgtgtccagttgcacccagggaggcagtggtgtctggctcatggggccacgagaacttgatgaagcacgcagaacccagagcccgtccacagctattcttgctgtggtcgggactcggctcatctgggctttgccataggctctgtgacttttggcaaatccctagtcctctaatctttcctactggtcagtgacgtgatgcctcccctcttcgccctgcctcgtcccccatccccacaggctcagtgtggtcttggtgggaccgggtagcgtttccatgaagaatgaaatacgctttcctgagcacgcacagcctgcatcgtcacggccccactcccgtctgagctcactctctgcaggactcccaaggacaaatcatgtgtcgcctcttgcctgtgaaagcccagagcgttcagaatacatgtgggaacactaatgttgctggtgtctcctgtttaacagatgacatcccaaaaaagaagatagcaagcgttttcaggcccccctcccccgatgtcctcgcatacttggacttcagcgtgtcaaccactgggatattagcgggagtgaaggtaggtcctctgaaatcttgtttgcttcagcccctagaaatcaggaggagtggacagaaaggatgtcagatgcagatttaaactgacaggtccttcttatgcaaagcacaaagcaacaattttgcttcttaagatttgtgttaaataccaataaatgctaagatgtgattagcctgagagtaatgcgttttctgatgcattatggttatgtctaaactttctgatttatgactgtctagcttacaggaactggtggctttgaagaatctcttaccttgctgggagtcaatagctcaattaaaatttttcaggcggggcgtggtggctcacgcctgtaatcccagcacttcgggaggccgaggcgggtggatcacaagatcaagagatggagaccatcctggccaacgtggtgaaaccccgtctctactaaaaatacaaaaaattagctgggcatggtggcaggtgcctgtaatcccagcactttgggaggccgaggcgagcagatcacgaggtcaggagaccgagaccatcctggctaacatggtgaaaccctgtctctactaaaaatacaaaaaattagccgggtgtggtggtgggcgcctgtagtcccagctacttgggaggctgaggcaggagaatggtatgaaccagggaggcggagcttgcagtgagccgagatcacgctactgcactccagcctgggtgacagcacgagatgccgtcttaaaaaaacaaaaaagaggtgtgctgcttgtcagcatgtattgtcacggacactcaataagtgccattttggactgtcaaatttagatgctttgtttcagaaagataagccagcatttagttttaaatcactttcctggtttgtaacttgatgctgtttagttaaattgctagttttcctaacactacaatattaattcttctcgtggaagtgtactgatttattatttttattccaagtcagcagatttggaagcattgtggtaaagtctaaggttttcatatccatagtgctgtttggtgagtaccggcagtacagttgaggggagcagggaacagcattgccccgtattgaaggtggagatggttacattcttcactgctttttgcattttgagttgtgtgcctataaaatttggccaaaccattttattattttgttcaaacttgactaagctgagtgatctaaaattatacagaacctaaatcaaagaagagaatgtaaagtcctttagttacttctaagaatttgaagtcaagcacgaatctaagacatagattatttttatatagctaatgaagagtatgttacgaaattgttgggtttttgaggtatctgagggtggcaaattttgtgaatcatgcatgcttcacagaaacaaccaggtttttccagaattagtctggatcagtgcctaacaaagctgttattaattctccacacatgagtctggctaactgggccagctctcatgttttactcctgtctggctacaaatagcactgtgcatagtagccctgtttccccatggtgttggactgtggtaaagtatgttgtgacatactggaattctaataatcctgttgtaagtatgtacagaatctatgtaacttattgttgacatacagaggtttgggaagtagtctaatggacattccttacaatagaatggctgggaagggaaagaaaaaaaaaaaaaaactacctaactccaatcttaatgttgtagttttatagcaaacaaaaattgtcagctttttgtattgaaaggtcagtggtggtaagacaaggtgtcttgtaaattaagattttaagaagtgcattaaaatgttttagaattactctgggaattctgtatatcacactaaaatttttatatcattatgttaataaaagttattgactttgtaattctgcattttgaaatgtgtgaaaagggtctttaaattaccccgaataggttgtatcttattttgctttttttctgactataaaagcagttatgcttatagcataaaatctagaaagcacattaaagtataaagaaaattaaaatttcttataattctacctctgagtaaacagcagcattcgtatgtaacataaaccctctcagggatttattttttctttttaaaaattttttacaaaattaggatcaagtgcttttttaaataatttgcttttgtacttaataaattatagactttaaaatctattacat

SEQ ID NO: 75378 - DNA, 2923 bp, Homo sapiens
tcacacaaccaggaagaataagagtggcccctgtgacatttggttctttagagggacagggacagagagaagacaagtaacccatctactggcaagaacgtttcttacccgatgacccatgtgacatttggttttagagggatagggacagatagaagacaagttatccatctactggcagaacgtttcttacctgatgctgtcataggatctgacttagtttcatcttgatgaacgatggtggtgcatacagtgtgtgcttgctggtctgtggtcagatgtgtatcagggcccctcccagctttgaagctcagatcccagtcctggattctcaagtatggccacactgtagcttgatgtaaacactaggtttagcttactgggtgccaggggcttgctgggttcagggaggacctaaacgaaatgtagagtgagctgctgtgagcacatggggtgggtggcgagtgcatgcgggtggcggcacttgggaccgcagcgtggttggggtgtccctgccattcatggcaggtgtgctgtggaaaggttgacatcctgactgttgtcaacagaccctcagagtgatcatttccaacgtcatgatctgccctttcagacattactacctgtgtagtaaattttgtactgaaattgttccctttatttttagggttcgtttggtagaacggggttctccgcacagcctgccattgatggagtctggaaagatcctccccggcgtgaaggtcatcatcgcacacaccgagaccaaaggacccttgggagactcacacctgggagagatctgggtaagcagcccccacaatgccaccgggtactacaccgtttacggggaggaggcgcttcatgccgaccacttcagtgcccggctgagttttggagacacacagaccatctgggcaaggaccggctaccttggcttccttcggcgaacagagctcactgatgccagtggagggcggcacgatgcactgtatgtggttgggtctctggatgaaactctggagctcagaggcatgcggtaccaccccatcgacattgagacctctgtcatccgagcacacaggagcatcgctgagtgtgccgtattcacctggaccaacctgctggtggtggtggtggagctggatgggctagagcaggatgccctggacctggtggccctggtgaccaacgtggtgctggaggagcactacctggtcgtgggagtggtggtcatcgtggacccaggggtgatccctatcaactctcggggtgagaagcagcgcatgcacctgcgggacggcttcctggctgaccagctggaccccatctatgtcgcctacaacatgtgagcgcagcacaccggcccaggtgccggagatgaatgagccccagcagtccaaggtgtgatgtgggaagacaccgcagagctcactcaccgggactcgcccttcctgtgctcttacagatccctctcaacaatccccgcatctccttttagaaagcacttcctgaattatttaaagaaatattttgaatctgccaagtacatttacaaaaacacggatgctggtattttaacagatggagagacaaggaaaggaaaggaaaggcctggcatgggcattgtgaggaatcacaggcaccgaggttgttctctgctgtactgcaagtttgcactttctttaggctaaaaatatagttcctgatttttaaaattcagttatttattcccacttcaaatgacaagttcatatatagaatttacgggagaaacttgagaccatttacggggagaaacttgattctgggaagatagcagagtacaaaccagctgcctcacttctgtttcacagggaggctgatggaaaaaggaagcaagctggacccatcctccctgctcacagagggcactgtggtcacacacagtgcctcctctgccagttcctttattgaaagaggtgtgctggctggccacggtggcttacacctgtaatcccagcactttgggaggccgaggcgagcagatcacgaggtcaggagaccgagaccatcctggctaacatggtgaaaccctgtctctactaaaaatacaaaaaattagccgggtgtggtggtgggcgcctgtagtcccagctacttgggaggctgaggcaggagaatggtatgaaccagggaggcggagcttgcagtgagccgagatcacgctactgcactccagcctgggtgacagcacgagatgccgtcttaaaaaaacaaaaaagaggtgtgctgcttgtcagcatgtattgtcacggacactcaataagtgccattttggactgtcaaatttagatgctttgtttcagaaagataagccagcatttagttttaaatcactttcctggtttgtaacttgatgctgtttagttaaattgctagttttcctaacactacaatattaattcttctcgtggaagtgtactgatttattatttttattccaagtcagcagatttggaagcattgtggtaaagtctaaggttttcatatccatagtgctgtttggtgagtaccggcagtacagttgaggggagcagggaacagcattgccccgtattgaaggtggagatggttacattcttcactgctttttgcattttgagttgtgtgcctataaaatttggccaaaccattttattattttgttcaaacttgactaagctgagtgatctaaaattatacagaacctaaatcaaagaagagaatgtaaagtcctttagttacttctaagaatttgaagtcaagcacgaatctaagacatagattatttttatatagctaatgaagagtatgttacgaaatattatgcttgcggttattgtgatcattatacctgttccacactatttgacaaggacagtgatgcatgcacaccccgcgg

SEQ ID NO: 75379 - DNA, 512 bp, Homo sapiens
tgctttctgtgcctgtaatttaacttagttcataaaataagagacaatgaatattatccgccccgacttcgttcagtgttttctggagcattattcttggccagtggatgtctcgtgacagaatctgaactcggtggttggtaacacatcacattcttgtcctctgggcccaccagatctgggtaagcagcccccacaatgccaccgggtactacaccgtttacggggaggaggcgcttcatgccgaccacttcagtgcccggctgagttttggagacacacagaccatctgggcaaggaccggctaccttggcttccttcggcgaacagagctcactgatgccagtggaggtgaggggttgtggtgaagccctgcgtgagtgctgtgcggggaggacctgggctccccaagagcttagtcacctgctagcacacctcactccttgctgtggtctggtattgctccttgtggggggaagatgttctgacagcagttttctctgaaaatactg

SEQ ID NO: 75380 - DNA, 3102 bp, Homo sapiens
attttaatgtcactgaatcaagagagtctcgtgtcatgttttctttaacaagggacatagctctcctccttccagatcctccccggcgtgaaggtcatcatcgcacacaccgagaccaaaggacccttgggagactcacacctgggagagatctgggtaagcagcccccacaatgccaccgggtactacaccgtttacggggaggaggcgcttcatgccgaccacttcagtgcccggctgagttttggagacacacagaccatctgggcaaggaccggctaccttggcttccttcggcgaacagagctcactgatgccagtggagggcggcacgatgcactgtatgtggttgggtctctggatgaaactctggagctcagaggcatgcggtaccaccccatcgacattgagacctctgtcatccgagcacacaggagcatcgctgagtgtgccgtattcacctggaccaacctgctggtggtggtggtggagctggatgggctagagcaggatgccctggacctggtggccctggtgaccaacgtggtgctggaggagcactacctggtcgtgggagtggtggtcatcgtggacccaggggtgatccctatcaactctcggggtgagaagcagcgcatgcacctgcgggacggcttcctggctgaccagctggaccccatctatgtcgcctacaacatgtgagcgcagcacaccggcccaggtgccggagatgaatgagccccagcagtccaaggtgtgatgtgggaagacaccgcagagctcactcaccgggactcgcccttcctgtgctcttacagatccctctcaacaatccccgcatctccttttagaaagcacttcctgaattatttaaagaaatattttgaatctgccaagtacatttacaaaaacacggatgctggtattttaacagatggagagacaaggaaaggaaaggaaaggcctggcatgggcattgtgaggaatcacaggcaccgaggttgttctctgctgtactgcaagtttgcactttctttaggctaaaaatatagttcctgatttttaaaattcagttatttattcccacttcaaatgacaagttcatatatagaatttacgggagaaacttgagaccatttacggggagaaacttgattctgggaagatagcagagtacaaaccagctgcctcacttctgtttcacagggaggctgatggaaaaaggaagcaagctggacccatcctccctgctcacagagggcactgtggtcacacacagtgcctcctctgccagttcctttattgaaagaggtgtgctggctggccacggtggcttacacctgtaatcccagcactttgggaggccgaggcgagcagatcacgaggtcaggagaccgagaccatcctggctaacatggtgaaaccctgtctctactaaaaatacaaaaaattagccgggtgtggtggtgggcgcctgtagtcccagctacttgggaggctgaggcaggagaatggtatgaaccagggaggcggagcttgcagtgagccgagatcacgctactgcactccagcctgggtgacagcacgagatgccgtcttaaaaaaacaaaaaagaggtgtgctgcttgtcagcatgtattgtcacggacactcaataagtgccattttggactgtcaaatttagatgctttgtttcagaaagataagccagcatttagttttaaatcactttcctggtttgtaacttgatgctgtttagttaaattgctagttttcctaacactacaatattaattcttctcgtggaagtgtactgatttattatttttattccaagtcagcagatttggaagcattgtggtaaagtctaaggttttcatatccatagtgctgtttggtgagtaccggcagtacagttgaggggagcagggaacagcattgccccgtattgaaggtggagatggttacattcttcactgctttttgcattttgagttgtgtgcctataaaatttggccaaaccattttattattttgttcaaacttgactaagctgagtgatctaaaattatacagaacctaaatcaaagaagagaatgtaaagtcctttagttacttctaagaatttgaagtcaagcacgaatctaagacatagattatttttatatagctaatgaagagtatgttacgaaattgttgggtttttgaggtatctgagggtggcaaattttgtgaatcatgcatgcttcacagaaacaaccaggtttttccagaattagtctggatcagtgcctaacaaagctgttattaattctccacacatgagtctggctaactgggccagctctcatgttttactcctgtctggctacaaatagcactgtgcatagtagccctgtttccccatggtgttggactgtggtaaagtatgttgtgacatactggaattctaataatcctgttgtaagtatgtacagaatctatgtaacttattgttgacatacagaggtttgggaagtagtctaatggacattccttacaatagaatggctgggaagggaaagaaaaaaaaaaaaaaactacctaactccaatcttaatgttgtagttttatagcaaacaaaaattgtcagctttttgtattgaaaggtcagtggtggtaagacaaggtgtcttgtaaattaagattttaagaagtgcattaaaatgttttagaattactctgggaattctgtatatcacactaaaatttttatatcattatgttaataaaagttattgactttgtaattctgcattttgaaatgtgtgaaaagggtctttaaattaccccgaataggttgtatcttattttgctttttttctgactataaaagcagttatgcttatagcataaaatctagaaagcacattaaagtataaagaaaattaaaatttcttataattctacctctgagtaaacagcagcattcgtatgtaacataaaccctctcagggatttattttttctttttaaaaattttttacaaaattaggatcaagtgcttttttaaataatttgcttttgtacttaataaattatagactttaaaatctattacat

SEQ ID NO: 75381 - DNA, 1094 bp, Homo sapiens
cccacgcgtcgcggacgcgtgggctccggaaaggcgtttgggatgccaacgatgaggctgctgtcatttgtggtgttggctctatttgctgtcactcaagcagaggaaggagccaggcttttggcttccaaatcactgctgaacagatacgccgtggagggacgagacctgaccttgcagtacaacatctacaatgttggctcaagtgctgcattagacgtggaactatctgatgattccttccctccagaagactttggcattgtgtctggaatgctcaatgtcaaatgggaccggattgcccctgctagcaatgtctcccacactgtggtcctgcgccctctcaaggctggttatttcaacttcacctcggcaacaattacttacctggcccaggaggatgggcccgttgtgattggctctaccagtgcacctggacagggaggaatcctggctcagcgggagtttgacaggcgattctcccctcattttctggactgggcagcctttggggtcatgacccttccctccatcggcatccccctgctattgtggtactccagcaagaggaaatatgacactcccaaaacgaagaagaactgattggggcttccacagccctcctctcccaagaaatccaggctcctctcccaagaaatccaggtgctttccagactccaaagggtatcttaaatgcaatctcttctctcttagcccttggccactttctcctggatcctgccctgctctcagccatagtgaaggaccagccctaggagtctgcgagagcctccttggttccatcgtgaagccataaacaggaatgcctttggcaatagccttgagcctagagggccctctgatgccccactgaggtgctgttggtttattgctggcaacgtgaattctctcaggggtctaggaggggcattttggagactgcctgacaccacccctatcccctgcctccccctctcagaagagggtggaagatgaaatgaaagctatgggactcttggaggatacccagtgtctattctgggttagagaagtgcttactaaggggttttctaataaaaacaaatgccacattg

SEQ ID NO: 75382 - DNA, 705 bp, Homo sapiens
  misc_feature (152)..(152): n is a, c, g, or t
tggctggaaggggtccctatgggggggcggaaaggcgccacatgaaaggggcggggccaatggccgcccacggggaaggagtcaaaaaagcccctctgcccagttgggcgcggggggggagcggatgagcgcttgaggagggagagagaganagacaccgagagcgagagagagagatagagagagaagaggagcccaaacgaagaagaactgattggggcttccacagccctcctctcccaagaaatccaggctcctctcccaagaaatccaggtgctttccagactccaaagggtatcttaaatgcaatctcttctctcttagcccttggccactttctcctggatcctgccctgctctcagccatagtgaaggaccagccctaggagtctgcgagagcctccttggttccatcgtgaagccataaacaggaatgcctttggcaatagccttgagcctagagggccctctgatgccccactgaggtgctgttggtttattgctggcaacgtgaattctctcaggggtctaggaggggcattttggagactgcctgacaccacccctatcccctgcctccccctctcagaagagggtggaagatgaaatgaaagctatgggactcttggaggatacccagtgtctattctgggttagagaagtgcttactaaggggttttctaataaaaacaaatgccacattg

SEQ ID NO: 75383 - DNA, 973 bp, Homo sapiens
  misc_feature (21)..(21): n is a, c, g, or t
  misc_feature (905)..(905): n is a, c, g, or t
  misc_feature (908)..(910): n is a, c, g, or t
  misc_feature (923)..(923): n is a, c, g, or t
  misc_feature (973)..(973): n is a, c, g, or t
cggcagtaactctaagcgggnaggtagcgaggctgggtggctccggaaaggcgttgggatgccaacgatgaggctgctgtcatttgtggtgttggctctatttgctgtcactcaagcagaggaaggagccaggcttttggcttccaaatcactgctgaacagatacgccgtggagggacgagacctgaccttgcagtacaacatctacaatgttggctcaagtgctgcattagacgtggaactatctgatgattccttccctccagaagactttggcattgtgtctggaatgctcaatgtcaaatgggaccggattgcccctgctagcaatgtctcccacactgtggtcctgcgccctctcaaggctggttatttcaacttcacctcggcaacaattacttacctggcccaggaggatgggcccgttgtgattggctctaccagtgcacctggacagggaggaatcctggctcagcgggagtttgacaggcgattctcccctcattttctggactgggcagcctttggggtcatgacccttccctccatcggcatccccctgctattgtggtactccagcaagaggaaatatgacactcccaaaacgaagaagaactgattggggcttccacagccctcctctcccaagaaatccaggctcctctcccaagaaatccaggtgctttccagactccaaagggtatcttaaatgcaatctcttctctcttagcccttggccactttctcctggatcctgccctgctctcagccatagtgaaggaccagccctaggagtctgcgagagcctccttggttccatcgtgaagccataaacaggaatgcctttggcaatagccttgagcctagagggccctctgaggggggggtttggggcgggagaccanggnnnggggttggggggncccttctgtcccctaagggggaaaaaatgtctggccccttgttagagggn

SEQ ID NO: 75384 - DNA, 841 bp, Homo sapiens
  misc_feature (769)..(769): n is a, c, g, or t
  misc_feature (805)..(805): n is a, c, g, or t
  misc_feature (837)..(837): n is a, c, g, or t
cagtgcttatttccggctttcggatgctgacgctctcttcctgtctttgtggctccggaaaggcgttgggatgccaacgatgaggctgctgtcatttgtggtgttggctctatttgctgtcactcaagcagaggaaggagccaggcttttggcttccaaatcactgctgaacagatacgccgtggagggacgagacctgaccttgcagtacaacatctacaatgttggctcaagtgctgcattagacgtggaactatctgatgattccttccctccagaagactttggcattgtgtctggaatgctcaatgtcaaatgggaccggattgcccctgctagcaatgtctcccacactgtggtcctgcgccctctcaaggctggttatttcaacttcacctcggcaacaattacttacctggcccaggaggatgggcccgttgtgattggctctaccagtgcacctggacagggaggaatcctggctcagcgggagtttgacaggcgattctcccctcattttctggactgggcagcctttggggtcatgacccttccctccatcggcatccccctgctattgtggtactccagcaagaggaaatatgacactcccaaaacgaagaagaactgattggggcttccacagccctcctctcccaagaaatccaggctcctctcccaagaaatccaggtgctttccagactccaaagggtatcttaaatgcaatctcttctctcttagcccttggcaacgtgaaatcttcttcanggggtctaaggaaggggcattttttggaaaactggncttgaaaccaaccccttaatcccctgggcttncccc

SEQ ID NO: 75385 - DNA, 1019 bp, Homo sapiens
ggggcagaggtgattgacccccgcccccccgcccgtgggaccaagaaagatgaggctgctgtcatttgtggtgttggctctatttgctgtcactcaagcagaggaaggagccaggcttttggcttccaaatcactgctgaacagatacgccgtggagggacgagacctgaccttgcagtacaacatctacaatgttggctcaagtgctgcattagacgtggaactatctgatgattccttccctccagaagactttggcattgtgtctggaatgctcaatgtcaaatgggaccggattgcccctgctagcaatgtctcccacactgtggtcctgcgccctctcaaggctggttatttcaacttcacctcggcaacaattacttacctggcccaggaggatgggcccgttgtgattggctctaccagtgcacctggacagggaggaatcctggctcagcgggagtttgacaggcgattctcccctcattttctggactgggcagcctttggggtcatgacccttccctccatcggcatccccctgctattgtggtactccagcaagaggaaatatgacactcccaaaacgaagaagaactgattggggcttccacagccctcctctcccaagaaatccaggctcctctcccaagaaatccaggtgctttccagactccaaagggtatcttaaatgcaatctcttctctcttagcccttggccactttctcctggatcctgccctgctctcagccatagtgaaggaccagccctaggagtctgcgagagcctccttggttccatcgtgaagccataaacaggaatgcctttggcaatagccttgagcctagagggccctcctaaggctctgatccctgaggctgtgtaatgcgcacggattctccggcagaggctggaaggtgaccctcctgtcccttaaggggagacagggctggcaccttggagcgcggtataacgtacaaatgttggaggtcccggtacgcctcatccttaatatgat

SEQ ID NO: 75386 - DNA, 497 bp, Homo sapiens
cagtgcttatttccggctttcggatgctgacgctctcttcctgtctttgtggctccggaaaggcgttgggatgccaacgatgaggctgctgtcatttgtggtgttggctctatttgctgtcactcaagcagaggaaggagccaggcttttggcttccaaatcactgctgaacagatacgccgtggagggacgagacctgaccttgcagtacaacatctacaatgttggctcaagtgctgcattagacgtggaactatctgatgattccttccctccagaagactttggcattgtgtctggaatgctcaatgtcaaatgggaccggattgcccctgctagcaatgtctcccacactgtggtcctgcgccctctcaaggctggttatttcaacttcacctcggcaacaattacttacctggcccaggaggatgggcccgttgtggtgtgatggcccaccatgcactgacaggaggtctgctcacggatttgcgtctccc

SEQ ID NO: 75387 - DNA, 169 bp, Homo sapiens
aaagaaattataaaaatttttttagaacccctatcccctgcctccccctctcagaagagggtggaagatgaaatgaaagctatgggactcttggaggatacccagtgtctattctgggttagagaagtgcttactaaggggttttctaataaaaacaaatgccacattg

SEQ ID NO: 75388 - DNA, 1105 bp, Homo sapiens
cgggctaggtaacgaggctgggttgtgctttgtggctccggaaaggcgttgggatgccaacgatgaggctgctgtcatttgtggtgttggctctatttgctgtcactcaagcagaggaaggagccaggcttttggcttccaaatcactgctgaacagatacgccgtggagggacgagacctgaccttgcagtacaacatctacaatgttggctcaagtgctgcattagacgtggaactatctgatgattccttccctccagaagactttggcattgtgtctggaatgctcaatgtcaaatgggaccggattgcccctgctagcaatgtctcccacactgtggtcctgcgccctctcaaggctggttatttcaacttcacctcggcaacaattacttacctggcccaggaggatgggcccgttgtgattggctctaccagtgcacctggacagggaggaatcctggctcagcgggagtttgacaggcgattctcccctcattttctggactgggcagcctttggggtcatgacccttccctccatcggcatccccctgctattgtggtactccagcaagaggaaatatgacactcccaaaacgaagaagaactgattggggcttccacagccctcctctcccaagaaatccaggctcctctcccaagaaatccaggtgctttccagactccaaagggtatcttaaatgcaatctcttctctcttagcccttggccactttctcctggatcctgccctgctctcagccatagtgaaggaccagccctaggagtctgcgagagcctccttggttccatcgtgaagccataaacaggaatgcctttggcaatagccttgagcctagagggccctctgatgccccactgaggtgctgttggtttattgctggcaacgtgaattctctcaggggtctaggaggggcattttggagactgcctgacaccacccctatcccctgcctccccctctcagaagagggtggaagatgaaatgaaagctatgggactcttggaggatacccagtgtctattctgggttagagaagtgcttactaaggggttttctaataaaaacaaatgccacattg

SEQ ID NO: 75389 - DNA, 1110 bp, Homo sapiens
  misc_feature (21)..(21): n is a, c, g, or t
cggcagtaactctaagcgggnaggtagcgaggctgggtggctccggaaaggcgttgggatgccaacgatgaggctgctgtcatttgtggtgttggctctatttgctgtcactcaagcagaggaaggagccaggcttttggcttccaaatcactgctgaacagatacgccgtggagggacgagacctgaccttgcagtacaacatctacaatgttggctcaagtgctgcattagacgtggaactatctgatgattccttccctccagaagactttggcattgtgtctggaatgctcaatgtcaaatgggaccggattgcccctgctagcaatgtctcccacactgtggtcctgcgccctctcaaggctggttatttcaacttcacctcggcaacaattacttacctggcccaggaggatgggcccgttgtgattggctctaccagtgcacctggacagggaggaatcctggctcagcgggagtttgacaggcgattctcccctcattttctggactgggcagcctttggggtcatgacccttccctccatcggcatccccctgctattgtggtactccagcaagaggaaatatgacactcccaaaacgaagaagaactgattggggcttccacagccctcctctcccaagaaatccaggctcctctcccaagaaatccaggtgctttccagactccaaagggtatcttaaatgcaatctcttctctcttagcccttggccactttctcctggatcctgccctgctctcagccatagtgaaggaccagccctaggagtctgcgagagcctccttggttccatcgtgaagccataaacaggaatgcctttggcaatagccttgagcctagagggccctctgatgccccactgaggtgctgttggtttattgctggcaacgtgaattctctcaggggtctaggaggggcattttggagactgcctgacaccacccctatcccctgcctccccctctcagaagagggtggaagatgaaatgaaagctatgggactcttggaggatacccagtgtctattctgggttagagaagtgcttactaaggggttttctaataaaaacaaatgccacattg

SEQ ID NO: 75390 - DNA, 1087 bp, Homo sapiens
tcggctaggtacgaggctgggtttaaattcggccgatgccaacgatgaggctgctgtcatttgtggtgttggctctatttgctgtcactcaagcagaggaaggagccaggcttttggcttccaaatcactgctgaacagatacgccgtggagggacgagacctgaccttgcagtacaacatctacaatgttggctcaagtgctgcattagacgtggaactatctgatgattccttccctccagaagactttggcattgtgtctggaatgctcaatgtcaaatgggaccggattgcccctgctagcaatgtctcccacactgtggtcctgcgccctctcaaggctggttatttcaacttcacctcggcaacaattacttacctggcccaggaggatgggcccgttgtgattggctctaccagtgcacctggacagggaggaatcctggctcagcgggagtttgacaggcgattctcccctcattttctggactgggcagcctttggggtcatgacccttccctccatcggcatccccctgctattgtggtactccagcaagaggaaatatgacactcccaaaacgaagaagaactgattggggcttccacagccctcctctcccaagaaatccaggctcctctcccaagaaatccaggtgctttccagactccaaagggtatcttaaatgcaatctcttctctcttagcccttggccactttctcctggatcctgccctgctctcagccatagtgaaggaccagccctaggagtctgcgagagcctccttggttccatcgtgaagccataaacaggaatgcctttggcaatagccttgagcctagagggccctctgatgccccactgaggtgctgttggtttattgctggcaacgtgaattctctcaggggtctaggaggggcattttggagactgcctgacaccacccctatcccctgcctccccctctcagaagagggtggaagatgaaatgaaagctatgggactcttggaggatacccagtgtctattctgggttagagaagtgcttactaaggggttttctaataaaaacaaatgccacattg

SEQ ID NO: 75391 - DNA, 1086 bp, Homo sapiens
ccacgcgtcgcggacgcgtgggtcgacccacgcgtccgcaacgatgaggctgctgtcatttgtggtgttggctctatttgctgtcactcaagcagaggaaggagccaggcttttggcttccaaatcactgctgaacagatacgccgtggagggacgagacctgaccttgcagtacaacatctacaatgttggctcaagtgctgcattagacgtggaactatctgatgattccttccctccagaagactttggcattgtgtctggaatgctcaatgtcaaatgggaccggattgcccctgctagcaatgtctcccacactgtggtcctgcgccctctcaaggctggttatttcaacttcacctcggcaacaattacttacctggcccaggaggatgggcccgttgtgattggctctaccagtgcacctggacagggaggaatcctggctcagcgggagtttgacaggcgattctcccctcattttctggactgggcagcctttggggtcatgacccttccctccatcggcatccccctgctattgtggtactccagcaagaggaaatatgacactcccaaaacgaagaagaactgattggggcttccacagccctcctctcccaagaaatccaggctcctctcccaagaaatccaggtgctttccagactccaaagggtatcttaaatgcaatctcttctctcttagcccttggccactttctcctggatcctgccctgctctcagccatagtgaaggaccagccctaggagtctgcgagagcctccttggttccatcgtgaagccataaacaggaatgcctttggcaatagccttgagcctagagggccctctgatgccccactgaggtgctgttggtttattgctggcaacgtgaattctctcaggggtctaggaggggcattttggagactgcctgacaccacccctatcccctgcctccccctctcagaagagggtggaagatgaaatgaaagctatgggactcttggaggatacccagtgtctattctgggttagagaagtgcttactaaggggttttctaataaaaacaaatgccacattg

SEQ ID NO: 75392 - DNA, 1085 bp, Homo sapiens
gatctagaactagtctccggaaaggcgtttgggatgccaacgatgaggctgctgtcatttgtggtgttggctctatttgctgtcactcaagcagaggaaggagccaggcttttggcttccaaatcactgctgaacagatacgccgtggagggacgagacctgaccttgcagtacaacatctacaatgttggctcaagtgctgcattagacgtggaactatctgatgattccttccctccagaagactttggcattgtgtctggaatgctcaatgtcaaatgggaccggattgcccctgctagcaatgtctcccacactgtggtcctgcgccctctcaaggctggttatttcaacttcacctcggcaacaattacttacctggcccaggaggatgggcccgttgtgattggctctaccagtgcacctggacagggaggaatcctggctcagcgggagtttgacaggcgattctcccctcattttctggactgggcagcctttggggtcatgacccttccctccatcggcatccccctgctattgtggtactccagcaagaggaaatatgacactcccaaaacgaagaagaactgattggggcttccacagccctcctctcccaagaaatccaggctcctctcccaagaaatccaggtgctttccagactccaaagggtatcttaaatgcaatctcttctctcttagcccttggccactttctcctggatcctgccctgctctcagccatagtgaaggaccagccctaggagtctgcgagagcctccttggttccatcgtgaagccataaacaggaatgcctttggcaatagccttgagcctagagggccctctgatgccccactgaggtgctgttggtttattgctggcaacgtgaattctctcaggggtctaggaggggcattttggagactgcctgacaccacccctatcccctgcctccccctctcagaagagggtggaagatgaaatgaaagctatgggactcttggaggatacccagtgtctattctgggttagagaagtgcttactaaggggttttctaataaaaacaaatgccacattg

SEQ ID NO: 75393 - DNA, 1373 bp, Homo sapiens
cccacgcgtcgcggacgcgtgggctccggaaaggcgtttgggatgccaacgatgaggctgctgtcatttgtggtgttggctctatttgctgtcactcaagcagaggaaggagccaggcttttggcttccaaatcactgctgaacagatacgccgtggagggacgagacctgaccttgcagtacaacatctacaatgttggctcaagtgctgcattagacgtggaactatctgatgattccttccctccagaagactttggcattgtgtctggaatgctcaatgtcaaatgggaccggattgcccctgctagcaatgtctcccacactgtggtcctgcgccctctcaaggctggttatttcaacttcacctcggcaacaattacttacctggcccaggaggatgggcccgttgtgattggctctaccagtgcacctggacagggaggaatcctggctcagcgggagtttgacaggcgattctcccctcattttctggactgggcagcctttggggtcatgacccttccctccatcggcatccccctgctattgtggtactccagcaagaggaaatatgacactcccaaaacgaagaagaactgattggggcttccacagccctcctctcccaagaaatccaggctcctctcccaagaaatccaggtgctttccagactccaaagggtatcttaaatgcaatctcttctctcttagcccttggccactttctcctggatcctgccctgctctcagccatagtgaaggaccagccctaggagtctgcgagagcctccttggttccatcgtgaagccataaacaggaatgcctttggcaatagccttgagcctagagggccctctgatgccccactgaggtgctgttggtttattgctggcaacgtgaattctctcaggggtctaggaggggcattttggagactgcctgacaccacccctatcccctgcctccccctctcagaagagggtggaagatgaaatgaaagctatgggactcttggaggatacccagtgtctattctgggttagagaagtgcttactaaggggttttctaataaaaacaaatgccacattgaaaaaaaaaaaaaaaaaaaaaaaaaaaaaatgtttggggcgcggcctcgggccctgaaaaaaaggttttctaaaaccccctcctggtgggcggccgcggcggcccccaaggtggggtattggtgaacactgtgtggcaaaagaggggtgttcccaagggagaaccgtgtggccagagagacatggtgcgtgtgggtttctcttccccaaaattaaaaaagcggcgcgggggaaacccgggcggtttttgaccaactcccgagatggcggttcggaggga

SEQ ID NO: 75394 - DNA, 1125 bp, Homo sapiens
gcgtcagctgaggcctcagcccatgtccccgagactcacgcagccttctcatgtactgtagtggtgtcctcatgccgctggtccctcaaatcagccccaggaccgagtgatttccgcatcctgactcatgtgctgacacgtatacgggccggcgtgtggacgacgacatgacgcgttgacagacaccatatactgattgtagatcgtcgtgcagattaacatagaactatctaggaatgattccgtatccccatcacagaaagaccatatggcaattggtgtctcggaatgctcaagtgtcgaagtgggaccgggagttgctcgcccttgcgtacctgctagcaatgtctcccacactgtggtcctgcgccctctcaaggctggttatttcaacttcacctcggcaacaattacttacctggcccaggaggatgggcccgttgtgattggctctaccagtgcacctggacagggaggaatcctggctcagcgggagtttgacaggcgattctcccctcattttctggactgggcagcctttggggtcatgacccttccctccatcggcatccccctgctattgtggtactccagcaagaggaaatatgacactcccaaaacgaagaagaactgattggggcttccacagccctcctctcccaagaaatccaggctcctctcccaagaaatccaggtgctttccagactccaaagggtatcttaaatgcaatctcttctctcttagcccttggccactttctcctggatcctgccctgctctcagccatagtgaaggaccagccctaggagtctgcgagagcctccttggttccatcgtgaagccataaacaggaatgcctttggcaatagccttgagcctagagggccctctgatgccccactgaggtgctgttggtttattgctggcaacgtgaattctctcaggggtctaggaggggcattttggagactgcctgacaccacccctatcccctgcctccccctctcagaagagggtggaagatgaaatgaaagctatgggactcttggaggatacccagtgtctattctgggttagagaagtgcttactaaggggttttctaataaaaacaaatgccacattg

SEQ ID NO: 75395 - DNA, 1114 bp, Homo sapiens
gatctagaactagtctccggaaaggcgtttgggatgccaacgatgaggctgctgtcatttgtggtgttggctctatttgctgtcactcaagcagaggaaggagccaggcttttggcttccaaatcactgctgaacagatacgccgtggagggacgagacctgaccttgcagtacaacatctacaatgttggctcaagtgctgcattagacgtggaactatctgatgattccttccctccagaagactttggcattgtgtctggaatgctcaatgtcaaatgggaccggattgccccgtatcctcttggcacttggtgatgaagggtcggggggcagggagagccttgcctgcaaagcagcaggggtacttcaaataggctggatatgtgtggctgtcctcctgtcatctctctggataagatggagcaagagagattggctctaccagtgcacctggacagggaggaatcctggctcagcgggagtttgacaggcgattctcccctcattttctggactgggcagcctttggggtcatgacccttccctccatcggcatccccctgctattgtggtactccagcaagaggaaatatgacactcccaaaacgaagaagaactgattggggcttccacagccctcctctcccaagaaatccaggctcctctcccaagaaatccaggtgctttccagactccaaagggtatcttaaatgcaatctcttctctcttagcccttggccactttctcctggatcctgccctgctctcagccatagtgaaggaccagccctaggagtctgcgagagcctccttggttccatcgtgaagccataaacaggaatgcctttggcaatagccttgagcctagagggccctctgatgccccactgaggtgctgttggtttattgctggcaacgtgaattctctcaggggtctaggaggggcattttggagactgcctgacaccacccctatcccctgcctccccctctcagaagagggtggaagatgaaatgaaagctatgggactcttggaggatacccagtgtctattctgggttagagaagtgcttactaaggggttttctaataaaaacaaatgccacattg

SEQ ID NO: 75396 - DNA, 719 bp, Homo sapiens
gatcaccccgccaaccaccgccccacccaaggctaaggtattggctctaccagtgcacctggacagggaggaatcctggctcagcgggagtttgacaggcgattctcccctcattttctggactgggcagcctttggggtcatgacccttccctccatcggcatccccctgctattgtggtactccagcaagaggaaatatgacactcccaaaacgaagaagaactgattggggcttccacagccctcctctcccaagaaatccaggctcctctcccaagaaatccaggtgctttccagactccaaagggtatcttaaatgcaatctcttctctcttagcccttggccactttctcctggatcctgccctgctctcagccatagtgaaggaccagccctaggagtctgcgagagcctccttggttccatcgtgaagccataaacaggaatgcctttggcaatagccttgagcctagagggccctctgatgccccactgaggtgctgttggtttattgctggcaacgtgaattctctcaggggtctaggaggggcattttggagactgcctgacaccacccctatcccctgcctccccctctcagaagagggtggaagatgaaatgaaagctatgggactcttggaggatacccagtgtctattctgggttagagaagtgcttactaaggggttttctaataaaaacaaatgccacattg

SEQ ID NO: 75397 - DNA, 1020 bp, Homo sapiens
  misc_feature (895)..(895): n is a, c, g, or t
  misc_feature (923)..(923): n is a, c, g, or t
  misc_feature (925)..(925): n is a, c, g, or t
  misc_feature (957)..(958): n is a, c, g, or t
  misc_feature (965)..(965): n is a, c, g, or t
cccacgcgtcgcggacgcgtgggctccggaaaggcgtttgggatgccaacgatgaggctgctgtcatttgtggtgttggctctatttgctgtcactcaagcagaggaaggagccaggcttttggcttccaaatcactgctgaacagatacgccgtggagggacgagacctgaccttgcagtacaacatctacaatgttggctcaagtgctgcattagacgtggaactatctgatgattccttccctccagaagactttggcattgtgtctggaatgctcaatgtcaaatgggaccggattgcccctgctagcaatgtctcccacactgtggtcctgcgccctctcaaggctggttatttcaacttcacctcggcaacaattacttacctggcccaggaggatgggcccgttgtgattggctctaccagtgcacctggacagggaggaatcctggctcagcgggagtttgacaggcgattctcccctcattttctggactgggcagcctttggggtcatgacccttccctccatcggcatccccctgctattgtggtactccagcaagaggaaatatgacactcccaaaacgaagaagaactgattggggcttccacagccctcctctcccaagaaatccaggctcctctcccaagaaatccaggtgctttccagactccaaagggtatcttaaatgcaatctcttctctcttagcccttggccactttctcctggatcctgccctgctctcagccatagtgaaggaccagccctaggagtctgcgagagcctccttggttccatcgtgaagccataaacaggaatgcctttggcaatagccttgagcctagagggccctctgagtggggtggttttgcggcgggattcccaggcnaggagggtttgggagggggcacctttcngntcccccaaagggaggaaaaaggctgggacccnntgggagnaggttcacaccaaaaagctttgggggggcttcttcggcaggttgtgtacattctc

SEQ ID NO: 75398 - DNA, 1001 bp, Homo sapiens
  misc_feature (933)..(933): n is a, c, g, or t
cccacgcgtcgcggacgcgtgggctccggaaaggcgtttgggatgccaacgatgaggctgctgtcatttgtggtgttggctctatttgctgtcactcaagcagaggaaggagccaggcttttggcttccaaatcactgctgaacagatacgccgtggagggacgagacctgaccttgcagtacaacatctacaatgttggctcaagtgctgcattagacgtggaactatctgatgattccttccctccagaagactttggcattgtgtctggaatgctcaatgtcaaatgggaccggattgcccctgctagcaatgtctcccacactgtggtcctgcgccctctcaaggctggttatttcaacttcacctcggcaacaattacttacctggcccaggaggatgggcccgttgtgattggctctaccagtgcacctggacagggaggaatcctggctcagcgggagtttgacaggcgattctcccctcattttctggactgggcagcctttggggtcatgacccttccctccatcggcatccccctgctattgtggtactccagcaagaggaaatatgacactcccaaaacgaagaagaactgattggggcttccacagccctcctctcccaagaaatccaggctcctctcccaagaaatccaggtgctttccagactccaaagggtatcttaaatgcaatctcttctctcttagcccttggccactttctcctggatcctgccctgctctcagccatagtgaaggaccagccctaggagtctgcgagagcctccttggttccatcgtgaagccataaacaggaatgcctttggcaatagccttgagcctagagggccctctaaaggccttggatgccatgaggtgtgtggttatgggacgggatctccggcagggggttgggaggggcacctntctggtccctaagggggggagagcgggcgggcccctctcgggtccggtttcccacaaggcgcttccgc

SEQ ID NO: 75399 - DNA, 753 bp, Homo sapiens
cctttctcagagtagatgaggtggaacttcatgaggtggacttcccttaatgtcgttcttttcttcttttcagattggctctaccagtgcacctggacagggaggaatcctggctcagcgggagtttgacaggcgattctcccctcattttctggactgggcagcctttggggtcatgacccttccctccatcggcatccccctgctattgtggtactccagcaagaggaaatatgacactcccaaaacgaagaagaactgattggggcttccacagccctcctctcccaagaaatccaggctcctctcccaagaaatccaggtgctttccagactccaaagggtatcttaaatgcaatctcttctctcttagcccttggccactttctcctggatcctgccctgctctcagccatagtgaaggaccagccctaggagtctgcgagagcctccttggttccatcgtgaagccataaacaggaatgcctttggcaatagccttgagcctagagggccctctgatgccccactgaggtgctgttggtttattgctggcaacgtgaattctctcaggggtctaggaggggcattttggagactgcctgacaccacccctatcccctgcctccccctctcagaagagggtggaagatgaaatgaaagctatgggactcttggaggatacccagtgtctattctgggttagagaagtgcttactaaggggttttctaataaaaacaaatgccacattg

SEQ ID NO: 75400 - DNA, 568 bp, Homo sapiens
cggcgttatgaggatccccaaaaatgcggactcaagtcaagaggaaatatgacactcccaaaacgaagaagaactgattggggcttccacagccctcctctcccaagaaatccaggctcctctcccaagaaatccaggtgctttccagactccaaagggtatcttaaatgcaatctcttctctcttagcccttggccactttctcctggatcctgccctgctctcagccatagtgaaggaccagccctaggagtctgcgagagcctccttggttccatcgtgaagccataaacaggaatgcctttggcaatagccttgagcctagagggccctctgatgccccactgaggtgctgttggtttattgctggcaacgtgaattctctcaggggtctaggaggggcattttggagactgcctgacaccacccctatcccctgcctccccctctcagaagagggtggaagatgaaatgaaagctatgggactcttggaggatacccagtgtctattctgggttagagaagtgcttactaaggggttttctaataaaaacaaatgccacattg

SEQ ID NO: 75401 - DNA, 1012 bp, Homo sapiens
  misc_feature (944)..(944): n is a, c, g, or t
cgggctaggtaacgaggctgggttgtgctttgtggctccggaaaggcgttgggatgccaacgatgaggctgctgtcatttgtggtgttggctctatttgctgtcactcaagcagaggaaggagccaggcttttggcttccaaatcactgctgaacagatacgccgtggagggacgagacctgaccttgcagtacaacatctacaatgttggctcaagtgctgcattagacgtggaactatctgatgattccttccctccagaagactttggcattgtgtctggaatgctcaatgtcaaatgggaccggattgcccctgctagcaatgtctcccacactgtggtcctgcgccctctcaaggctggttatttcaacttcacctcggcaacaattacttacctggcccaggaggatgggcccgttgtgattggctctaccagtgcacctggacagggaggaatcctggctcagcgggagtttgacaggcgattctcccctcattttctggactgggcagcctttggggtcatgacccttccctccatcggcatccccctgctattgtggtactccagcaagaggaaatatgacactcccaaaacgaagaagaactgattggggcttccacagccctcctctcccaagaaatccaggctcctctcccaagaaatccaggtgctttccagactccaaagggtatcttaaatgcaatctcttctctcttagcccttggccactttctcctggatcctgccctgctctcagccatagtgaaggaccagccctaggagtctgcgagagcctccttggttccatcgtgaagccataaacaggaatgcctttggcaatagccttgagcctagagggccctctaaaggccttggatgccatgaggtgtgtggttatgggacgggatctccggcagggggttgggaggggcacctntctggtccctaagggggggagagcgggcgggcccctctcgggtccggtttcccacaaggcgcttccgc

SEQ ID NO: 75402 - DNA, 871 bp, Homo sapiens
cagtgcttatttccggctttcggatgctgacgctctcttcctgtctttgtggctccggaaaggcgttgggatgccaacgatgaggctgctgtcatttgtggtgttggctctatttgctgtcactcaagcagaggaaggagccaggcttttggcttccaaatcactgctgaacagatacgccgtggagggacgagacctgaccttgcagtacaacatctacaatgttggctcaagtgctgcattagacgtggaactatctgatgattccttccctccagaagactttggcattgtgtctggaatgctcaatgtcaaatgggaccggattgcccctgctagcaatgtctcccacactgtggtcctgcgccctctcaaggctggttatttcaacttcacctcggcaacaattacttacctggcccaggaggatgggcccgttgtgattggctctaccagtgcacctggacagggaggaatcctggctcagcgggagtttgacaggcgattctcccctcattttctggactgggcagcctttggggtcatgacccttccctccatcggcatccccctgctattgtggtactccagcaagaggaaatatgacactcccaaaacgaagaagaactgattggggcttccacagccctcctctcccaagaaatccaggctcctctcccaagaaatccagttaagtgtctgtccatggcccagtagtttcacctctgttgcccccagaatagctttgggatgtccaaggaacagctgtcctgatgtgggccatttaagagaaatggcatagactaatttttctttaggcttgatgttaccacacatctggggtgacagtgtcattctgggatcgcacagg

SEQ ID NO: 75403 - DNA, 425 bp, Homo sapiens
  misc_feature (37)..(37): n is a, c, g, or t
  misc_feature (41)..(41): n is a, c, g, or t
atttaagataccctttggagtctggaaagcacctggntttnttgggagaggaccactttctcctggatcctgccctgctctcagccatagtgaaggaccagccctaggagtctgcgagagcctccttggttccatcgtgaagccataaacaggaatgcctttggcaatagccttgagcctagagggccctctgatgccccactgaggtgctgttggtttattgctggcaacgtgaattctctcaggggtctaggaggggcattttggagactgcctgacaccacccctatcccctgcctccccctctcagaagagggtggaagatgaaatgaaagctatgggactcttggaggatacccagtgtctattctgggttagagaagtgcttactaaggggttttctaataaaaacaaatgccacattg

SEQ ID NO: 75404 - DNA, 637 bp, Homo sapiens
cccacgcgtcgcggacgcgtgggctccggaaaggcgtttgggatgccaacgatgaggctgctgtcatttgtggtgttggctctatttgctgtcactcaagcagaggaaggagccaggcttttggcttccaaatcactgctgaacagatacgccgtggagggacgagacctgaccttgcagtacaacatctacaatgttggctcaagtgctgcattagacgtggaactatctgatgattccttccctccagaagactttggcattgtgtctggaatgctcaatgtcaaatgggaccggattgcccctgctagcaatgtctcccacactgtggtcctgcgccctctcaaggctggttatttcaacttcacctcggcaacaattacttacctggcccaggaggatgggcccgttgtgattggctctaccagtgcacctggacagggaggaatcctggctcagcgggagtttgacaggcgattctcccctcattttctggactgggcagcctttggggtcatgacccttccctccatcggcatccccctgctattgtggtactccagcaagaggaaatatgacactcccaaacgcctttccggagccacaaagacaggaagagagccgtggggtaggaggt

SEQ ID NO: 75405 - DNA, 1122 bp, Homo sapiens
cagtgcttatttccggctttcggatgctgacgctctcttcctgtctttgtggctccggaaaggcgttgggatgccaacgatgaggctgctgtcatttgtggtgttggctctatttgctgtcactcaagcagaggaaggagccaggcttttggcttccaaatcactgctgaacagatacgccgtggagggacgagacctgaccttgcagtacaacatctacaatgttggctcaagtgctgcattagacgtggaactatctgatgattccttccctccagaagactttggcattgtgtctggaatgctcaatgtcaaatgggaccggattgcccctgctagcaatgtctcccacactgtggtcctgcgccctctcaaggctggttatttcaacttcacctcggcaacaattacttacctggcccaggaggatgggcccgttgtgattggctctaccagtgcacctggacagggaggaatcctggctcagcgggagtttgacaggcgattctcccctcattttctggactgggcagcctttggggtcatgacccttccctccatcggcatccccctgctattgtggtactccagcaagaggaaatatgacactcccaaaacgaagaagaactgattggggcttccacagccctcctctcccaagaaatccaggctcctctcccaagaaatccaggtgctttccagactccaaagggtatcttaaatgcaatctcttctctcttagcccttggccactttctcctggatcctgccctgctctcagccatagtgaaggaccagccctaggagtctgcgagagcctccttggttccatcgtgaagccataaacaggaatgcctttggcaatagccttgagcctagagggccctctgatgccccactgaggtgctgttggtttattgctggcaacgtgaattctctcaggggtctaggaggggcattttggagactgcctgacaccacccctatcccctgcctccccctctcagaagagggtggaagatgaaatgaaagctatgggactcttggaggatacccagtgtctattctgggttagagaagtgcttactaaggggttttctaataaaaacaaatgccacattg

SEQ ID NO: 75406 - DNA, 835 bp, Homo sapiens
cagtgcttatttccggctttcggatgctgacgctctcttcctgtctttgtggctccggaaaggcgttgggatgccaacgatgaggctgctgtcatttgtggtgttggctctatttgctgtcactcaagcagaggaaggagccaggcttttggcttccaaatcactgctgaacagatacgccgtggagggacgagacctgaccttgcagtacaacatctacaatgttggctcaagtgctgcattagacgtggaactatctgatgattccttccctccagaagactttggcattgtgtctggaatgctcaatgtcaaatgggaccggattgcccctgctagcaatgtctcccacactgtggtcctgcgccctctcaaggctggttatttcaacttcacctcggcaacaattacttacctggcccaggaggatgggcccgttgtgattggctctaccagtgcacctggacagggaggaatcctggctcagcgggagtttgacaggcgattctcccctcattttctggactgggcagcctttggggtcatgacccttccctccatcggcatccccctgctattgtggtactccagcaagaggaaatatgacactcccaaaacgaagaagaactgattggggcttccacagccctcctctcccaagaaatccaggctcctctcccaagaaatccaggtgctttccagactccaaagggtatcttaaatgcaatctcttctctcttagcccttgggggcgcccgtctcgccaatgagaccacctgggttgaggacctggtctcttagcaaaggaggctggactcccaggcctccaccattt

SEQ ID NO: 75407 - DNA, 1017 bp, Homo sapiens
  misc_feature (21)..(21): n is a, c, g, or t
  misc_feature (949)..(949): n is a, c, g, or t
cggcagtaactctaagcgggnaggtagcgaggctgggtggctccggaaaggcgttgggatgccaacgatgaggctgctgtcatttgtggtgttggctctatttgctgtcactcaagcagaggaaggagccaggcttttggcttccaaatcactgctgaacagatacgccgtggagggacgagacctgaccttgcagtacaacatctacaatgttggctcaagtgctgcattagacgtggaactatctgatgattccttccctccagaagactttggcattgtgtctggaatgctcaatgtcaaatgggaccggattgcccctgctagcaatgtctcccacactgtggtcctgcgccctctcaaggctggttatttcaacttcacctcggcaacaattacttacctggcccaggaggatgggcccgttgtgattggctctaccagtgcacctggacagggaggaatcctggctcagcgggagtttgacaggcgattctcccctcattttctggactgggcagcctttggggtcatgacccttccctccatcggcatccccctgctattgtggtactccagcaagaggaaatatgacactcccaaaacgaagaagaactgattggggcttccacagccctcctctcccaagaaatccaggctcctctcccaagaaatccaggtgctttccagactccaaagggtatcttaaatgcaatctcttctctcttagcccttggccactttctcctggatcctgccctgctctcagccatagtgaaggaccagccctaggagtctgcgagagcctccttggttccatcgtgaagccataaacaggaatgcctttggcaatagccttgagcctagagggccctctaaaggccttggatgccatgaggtgtgtggttatgggacgggatctccggcagggggttgggaggggcacctntctggtccctaagggggggagagcgggcgggcccctctcgggtccggtttcccacaaggcgcttccgc

SEQ ID NO: 75408 - DNA, 1013 bp, Homo sapiens
  misc_feature (888)..(888): n is a, c, g, or t
  misc_feature (916)..(916): n is a, c, g, or t
  misc_feature (918)..(918): n is a, c, g, or t
  misc_feature (950)..(951): n is a, c, g, or t
  misc_feature (958)..(958): n is a, c, g, or t
tcggctaggtacgaggctgggtttaaattcggccgatgccaacgatgaggctgctgtcatttgtggtgttggctctatttgctgtcactcaagcagaggaaggagccaggcttttggcttccaaatcactgctgaacagatacgccgtggagggacgagacctgaccttgcagtacaacatctacaatgttggctcaagtgctgcattagacgtggaactatctgatgattccttccctccagaagactttggcattgtgtctggaatgctcaatgtcaaatgggaccggattgcccctgctagcaatgtctcccacactgtggtcctgcgccctctcaaggctggttatttcaacttcacctcggcaacaattacttacctggcccaggaggatgggcccgttgtgattggctctaccagtgcacctggacagggaggaatcctggctcagcgggagtttgacaggcgattctcccctcattttctggactgggcagcctttggggtcatgacccttccctccatcggcatccccctgctattgtggtactccagcaagaggaaatatgacactcccaaaacgaagaagaactgattggggcttccacagccctcctctcccaagaaatccaggctcctctcccaagaaatccaggtgctttccagactccaaagggtatcttaaatgcaatctcttctctcttagcccttggccactttctcctggatcctgccctgctctcagccatagtgaaggaccagccctaggagtctgcgagagcctccttggttccatcgtgaagccataaacaggaatgcctttggcaatagccttgagcctagagggccctctgagtggggtggttttgcggcgggattcccaggcnaggagggtttgggagggggcacctttcngntcccccaaagggaggaaaaaggctgggacccnntgggagnaggttcacaccaaaaagctttgggggggcttcttcggcaggttgtgtacattctc

SEQ ID NO: 75409 - DNA, 749 bp, Homo sapiens
cagtgcttatttccggctttcggatgctgacgctctcttcctgtctttgtggctccggaaaggcgttgggatgccaacgatgaggctgctgtcatttgtggtgttggctctatttgctgtcactcaagcagaggaaggagccaggcttttggcttccaaatcactgctgaacagatacgccgtggagggacgagacctgaccttgcagtacaacatctacaatgttggctcaagtgctgcattagacgtggaactatctgatgattccttccctccagaagactttggcattgtgtctggaatgctcaatgtcaaatgggaccggattgcccctgctagcaatgtctcccacactgtggtcctgcgccctctcaaggctggttatttcaacttcacctcggcaacaattacttacctggcccaggaggatgggcccgttgtgattggctctaccagtgcacctggacagggaggaatcctggctcagcgggagtttgacaggcgattctcccctcattttgtaagctttctagtgttctctctcatcagttccttggtatgagaatgcccttttggttctggaccctcttggcttccacagatttgttttgttggttggttcttgccctgtgtgttttttggtgtctgatatagatactcatcaaatagattgatttagccatgtccagagatttttggcaatgagatcacaattgccaaaaccataaaactgacttaagtagagtccc

SEQ ID NO: 75410 - DNA, 626 bp, Homo sapiens
cagtgcttatttccggctttcggatgctgacgctctcttcctgtctttgtggctccggaaaggcgttgggatgccaacgatgaggctgctgtcatttgtggtgttggctctatttgctgtcactcaagcagaggaaggagccaggcttttggcttccaaatcactgctgaacagatacgccgtggagggacgagacctgaccttgcagtacaacatctacaatgttggctcaagtgctgcattagacgtggaactatctgatgattccttccctccagaagactttggcattgtgtctggaatgctcaatgtcaaatgggaccggattgccccccactttctcctggatcctgccctgctctcagccatagtgaaggaccagccctaggagttgatgccccactgaggtgctgttggtttattgctggcaacgtgaattctctcaggggtctaggaggggcattttggagactgcctgacaccacccctatcccctgcctccccctctcagaagagggtggaagatgaaatgaaagctatgggactcttggaggatacccagtgtctattctgggttagagaagtgcttactaaggggttttctaataaaaacaaatgccacattg

SEQ ID NO: 75411 - DNA, 1279 bp, Homo sapiens
cagtgcttatttccggctttcggatgctgacgctctcttcctgtctttgtggctccggaaaggcgttgggatgccaacggtaagtccggaggcttagggcgtccgaacgggagaggcgagagcctcgtgtccgcgcatcaccccgtggctgggggttagctaggggagggcgggaagggcagaggacgcggtggctggaggacgtgtaaccttgcaagaggcgggaggcggggggcatgaggctgctgtcatttgtggtgttggctctatttgctgtcactcaagcagaggaaggagccaggcttttggcttccaaatcactgctgaacagatacgccgtggagggacgagacctgaccttgcagtacaacatctacaatgttggctcaagtgctgcattagacgtggaactatctgatgattccttccctccagaagactttggcattgtgtctggaatgctcaatgtcaaatgggaccggattgcccctgctagcaatgtctcccacactgtggtcctgcgccctctcaaggctggttatttcaacttcacctcggcaacaattacttacctggcccaggaggatgggcccgttgtgattggctctaccagtgcacctggacagggaggaatcctggctcagcgggagtttgacaggcgattctcccctcattttctggactgggcagcctttggggtcatgacccttccctccatcggcatccccctgctattgtggtactccagcaagaggaaatatgacactcccaaaacgaagaagaactgattggggcttccacagccctcctctcccaagaaatccaggctcctctcccaagaaatccaggtgctttccagactccaaagggtatcttaaatgcaatctcttctctcttagcccttggccactttctcctggatcctgccctgctctcagccatagtgaaggaccagccctaggagtctgcgagagcctccttggttccatcgtgaagccataaacaggaatgcctttggcaatagccttgagcctagagggccctctgatgccccactgaggtgctgttggtttattgctggcaacgtgaattctctcaggggtctaggaggggcattttggagactgcctgacaccacccctatcccctgcctccccctctcagaagagggtggaagatgaaatgaaagctatgggactcttggaggatacccagtgtctattctgggttagagaagtgcttactaaggggttttctaataaaaacaaatgccacattg

SEQ ID NO: 75412 - DNA, 1092 bp, Homo sapiens
ggggcagaggtgattgacccccgcccccccgcccgtgggaccaagaaagatgaggctgctgtcatttgtggtgttggctctatttgctgtcactcaagcagaggaaggagccaggcttttggcttccaaatcactgctgaacagatacgccgtggagggacgagacctgaccttgcagtacaacatctacaatgttggctcaagtgctgcattagacgtggaactatctgatgattccttccctccagaagactttggcattgtgtctggaatgctcaatgtcaaatgggaccggattgcccctgctagcaatgtctcccacactgtggtcctgcgccctctcaaggctggttatttcaacttcacctcggcaacaattacttacctggcccaggaggatgggcccgttgtgattggctctaccagtgcacctggacagggaggaatcctggctcagcgggagtttgacaggcgattctcccctcattttctggactgggcagcctttggggtcatgacccttccctccatcggcatccccctgctattgtggtactccagcaagaggaaatatgacactcccaaaacgaagaagaactgattggggcttccacagccctcctctcccaagaaatccaggctcctctcccaagaaatccaggtgctttccagactccaaagggtatcttaaatgcaatctcttctctcttagcccttggccactttctcctggatcctgccctgctctcagccatagtgaaggaccagccctaggagtctgcgagagcctccttggttccatcgtgaagccataaacaggaatgcctttggcaatagccttgagcctagagggccctctgatgccccactgaggtgctgttggtttattgctggcaacgtgaattctctcaggggtctaggaggggcattttggagactgcctgacaccacccctatcccctgcctccccctctcagaagagggtggaagatgaaatgaaagctatgggactcttggaggatacccagtgtctattctgggttagagaagtgcttactaaggggttttctaataaaaacaaatgccacattg

SEQ ID NO: 75413 - DNA, 1067 bp, Homo sapiens
  misc_feature (10)..(10): n is a, c, g, or t
gtgctgcacnaaaggatgccaacgatgaggctgctgtcatttgtggtgttggctctatttgctgtcactcaagcagaggaaggagccaggcttttggcttccaaatcactgctgaacagatacgccgtggagggacgagacctgaccttgcagtacaacatctacaatgttggctcaagtgctgcattagacgtggaactatctgatgattccttccctccagaagactttggcattgtgtctggaatgctcaatgtcaaatgggaccggattgcccctgctagcaatgtctcccacactgtggtcctgcgccctctcaaggctggttatttcaacttcacctcggcaacaattacttacctggcccaggaggatgggcccgttgtgattggctctaccagtgcacctggacagggaggaatcctggctcagcgggagtttgacaggcgattctcccctcattttctggactgggcagcctttggggtcatgacccttccctccatcggcatccccctgctattgtggtactccagcaagaggaaatatgacactcccaaaacgaagaagaactgattggggcttccacagccctcctctcccaagaaatccaggctcctctcccaagaaatccaggtgctttccagactccaaagggtatcttaaatgcaatctcttctctcttagcccttggccactttctcctggatcctgccctgctctcagccatagtgaaggaccagccctaggagtctgcgagagcctccttggttccatcgtgaagccataaacaggaatgcctttggcaatagccttgagcctagagggccctctgatgccccactgaggtgctgttggtttattgctggcaacgtgaattctctcaggggtctaggaggggcattttggagactgcctgacaccacccctatcccctgcctccccctctcagaagagggtggaagatgaaatgaaagctatgggactcttggaggatacccagtgtctattctgggttagagaagtgcttactaaggggttttctaataaaaacaaatgccacattg

SEQ ID NO: 75414 - DNA, 988 bp, Homo sapiens
atgccaacgatgaggctgctgtcatttcactgctgaacagatacgccgtggagggacgagacctgaccttgcagtacaacatctacaatgttggctcaagtgctgcattagacgtggaactatctgatgattccttccctccagaagactttggcattgtgtctggaatgctcaatgtcaaatgggaccggattgcccctgctagcaatgtctcccacactgtggtcctgcgccctctcaaggctggttatttcaacttcacctcggcaacaattacttacctggcccaggaggatgggcccgttgtgattggctctaccagtgcacctggacagggaggaatcctggctcagcgggagtttgacaggcgattctcccctcattttctggactgggcagcctttggggtcatgacccttccctccatcggcatccccctgctattgtggtactccagcaagaggaaatatgacactcccaaaacgaagaagaactgattggggcttccacagccctcctctcccaagaaatccaggctcctctcccaagaaatccaggtgctttccagactccaaagggtatcttaaatgcaatctcttctctcttagcccttggccactttctcctggatcctgccctgctctcagccatagtgaaggaccagccctaggagtctgcgagagcctccttggttccatcgtgaagccataaacaggaatgcctttggcaatagccttgagcctagagggccctctgatgccccactgaggtgctgttggtttattgctggcaacgtgaattctctcaggggtctaggaggggcattttggagactgcctgacaccacccctatcccctgcctccccctctcagaagagggtggaagatgaaatgaaagctatgggactcttggaggatacccagtgtctattctgggttagagaagtgcttactaaggggttttctaataaaaacaaatgccacattg

SEQ ID NO: 75415 - DNA, 779 bp, Homo sapiens
ataacaggagatccgggaattccgggatctcaagctggttatttcaacttcacctcggcaacaattacttacctggcccaggaggatgggcccgttgtgattggctctaccagtgcacctggacagggaggaatcctggctcagcgggagtttgacaggcgattctcccctcattttctggactgggcagcctttggggtcatgacccttccctccatcggcatccccctgctattgtggtactccagcaagaggaaatatgacactcccaaaacgaagaagaactgattggggcttccacagccctcctctcccaagaaatccaggctcctctcccaagaaatccaggtgctttccagactccaaagggtatcttaaatgcaatctcttctctcttagcccttggccactttctcctggatcctgccctgctctcagccatagtgaaggaccagccctaggagtctgcgagagcctccttggttccatcgtgaagccataaacaggaatgcctttggcaatagccttgagcctagagggccctctgatgccccactgaggtgctgttggtttattgctggcaacgtgaattctctcaggggtctaggaggggcattttggagactgcctgacaccacccctatcccctgcctccccctctcagaagagggtggaagatgaaatgaaagctatgggactcttggaggatacccagtgtctattctgggttagagaagtgcttactaaggggttttctaataaaaacaaatgccacattg

SEQ ID NO: 75416 - DNA, 877 bp, Homo sapiens
gatctagaactagtctccggaaaggcgtttgggatgccaacgatgaggctgctgtcatttgtggtgttggctctatttgctgtcactcaagcagaggaaggagccaggcttttggcttccaaatcactgctgaacagatacgccgtggagggacgagacctgaccttgcagtacaacatctacaatgttggctcaagattggctctaccagtgcacctggacagggaggaatcctggctcagcgggagtttgacaggcgattctcccctcattttctggactgggcagcctttggggtcatgacccttccctccatcggcatccccctgctattgtggtactccagcaagaggaaatatgacactcccaaaacgaagaagaactgattggggcttccacagccctcctctcccaagaaatccaggctcctctcccaagaaatccaggtgctttccagactccaaagggtatcttaaatgcaatctcttctctcttagcccttggccactttctcctggatcctgccctgctctcagccatagtgaaggaccagccctaggagtctgcgagagcctccttggttccatcgtgaagccataaacaggaatgcctttggcaatagccttgagcctagagggccctctgatgccccactgaggtgctgttggtttattgctggcaacgtgaattctctcaggggtctaggaggggcattttggagactgcctgacaccacccctatcccctgcctccccctctcagaagagggtggaagatgaaatgaaagctatgggactcttggaggatacccagtgtctattctgggttagagaagtgcttactaaggggttttctaataaaaacaaatgccacattg

SEQ ID NO: 75417 - DNA, 1236 bp, Homo sapiens
cagtgcttatttccggctttcggatgctgacgctctcttcctgtctttgtggctccggaaaggcgttgggatgccaacgatgaggctgctgtcatttgtggtgttggctctatttgctgtcactcaagcagaggaaggagccaggcttttggcttccaaatcactgctgaacagatacgccgtggagggacgagacctgaccttgcagtacaacatctacaatgttggctcaagtgctgcattagacgtggaactatctgatgattccttccctccagaagactttggcattgtgtctggaatgctcaatgtcaaatgggaccggattgcccctgctagcaatgtctcccacactgtggtcctgcgccctctcaaggctggttatttcaacttcacctcggcaacaattacttacctggcccaggaggatgggcccgttgtgattggctctaccagtgcacctggacagggaggaatcctggctcaatgtcacaatgggaccggattgcccctgctagcaatgtctcccacactgtggtcctgcgccctctcaaggctggttatttcaacttcacctcggcaacaattacttacctggcccaggaggatgggcccgttgtgattggctcattttctggactgggcagcctttggggtcatgacccttccctccatcggcatccccctgctattgtggtactccagcaagaggaaatatgacactcccaaaacgaagaagaactgattggggcttccacagccctcctctcccaagaaatccaggctcctctcccaagaaatccaggtgctttccagactccaaagggtatcttaaatgcaatctcttctctcttagcccttggccactttctcctggatcctgccctgctctcagccatagtgaaggaccagccctaggagtctgcgagagcctccttggttccatcgtgaagccataaacaggaatgcctttggcaatagccttgagcctagagggccctctgatgccccactgaggtgctgttggtttattgctggcaacgtgaattctctcaggggtctaggaggggcattttggagactgcctgacaccacccctatcccctgcctccccctctcagaagagggtggaagatgaaatgaaagctatgggactcttggaggatacccagtgtctattctgggttagagaagtgcttactaaggggttttctaataaaaacaaatgccacattg

SEQ ID NO: 75418 - DNA, 1012 bp, Homo sapiens
  misc_feature (10)..(10): n is a, c, g, or t
gtgctgcacnaaaggatgccaacgatgaggctgctgtcatttgtggtgttggctctatttgctgtcactcaagcagaggaaggagccaggcttttggcttccaaatcactgctgaacagatacgccgtggagggacgagacctgaccttgcagtacaacatctacaatgttggctcaagtgctgcattagacgtggaactatctgatgattccttccctccagaagactttggcattgtgtctggaatgctcaatgtcaaatgggaccggattgcccctgctagcaatgtctcccacactgtggtcctgcgccctctcaaggctggttatttcaacttcacctcggcaacaattacttacctggcccaggaggatgggcccgttgtgattggctctaccagtgcacctggacagggaggaatcctggctcagcgggagtttgacaggcgattctcccctcattttctggactgggcagcctttggggtcatgacccttccctccatcggcatccccctgctattgtggtactccagcaagaggaaatatgacactcccagctcctctcccaagaaatccaggtgctttccagactccaaagggtatcttaaatgcaatctcttctctcttagcccttggccactttctcctggatcctgccctgctctcagccatagtgaaggaccagccctaggagtctgcgagagcctccttggttccatcgtgaagccataaacaggaatgcctttggcaatagccttgagcctagagggccctctgatgccccactgaggtgctgttggtttattgctggcaacgtgaattctctcaggggtctaggaggggcattttggagactgcctgacaccacccctatcccctgcctccccctctcagaagagggtggaagatgaaatgaaagctatgggactcttggaggatacccagtgtctattctgggttagagaagtgcttactaaggggttttctaataaaaacaaatgccacattg

SEQ ID NO: 75419 - DNA, 650 bp, Homo sapiens
  misc_feature (17)..(17): n is a, c, g, or t
aagatgtggtgcatgantttcacctcaatgactacaggtctgtaaaagatgtggtggaagctgccagccacattgagcagagaggaggaacagagacccggacggcatttggcattgaatttgcacgctcagaggctttccaaaacgaagaagaactgattggggcttccacagccctcctctcccaagaaatccaggctcctctcccaagaaatccaggtgctttccagactccaaagggtatcttaaatgcaatctcttctctcttagcccttggccactttctcctggatcctgccctgctctcagccatagtgaaggaccagccctaggagtctgcgagagcctccttggttccatcgtgaagccataaacaggaatgcctttggcaatagccttgagcctagagggccctctgatgccccactgaggtgctgttggtttattgctggcaacgtgaattctctcaggggtctaggaggggcattttggagactgcctgacaccacccctatcccctgcctccccctctcagaagagggtggaagatgaaatgaaagctatgggactcttggaggatacccagtgtctattctgggttagagaagtgcttactaaggggttttctaataaaaacaaatgccacattg

SEQ ID NO: 75420 - DNA, 790 bp, Homo sapiens
cccacgcgtcgcggacgcgtgggctccggaaaggcgtttgggatgccaacgatgaggctgctgtcatttgtggtgttggctctatttgctgtcactcaagcagaggaaggagccaggcttttggcttccaaatcactgctgaacagatacgccgtggagggacgagacctgaccttgcagtacaacatctacaatgttggctcaagtgctgcattagacgtggaactatctgatgattccttccctccagaagactttggcattgtgtctggaatgctcaatgtcaaatgggaccggattgcccctgctagcaatgtctcccacactgtggtcctgcgccctctcaaggctggttatttcaacttcacctcggcaacaattacttacctggcccaggaggatgggcccgttgtgattggctctaccagtgcacctggacagggaggaatcctggctcagcgggagtttgacaggcgattctcccctcattttctggactgggcagcctttggggtcatgacccttccctccatcggcatccccctgctattgtggtactccagcaagaggaaatatgacactcccaaaacgaagaagaactgattggggcttccacagccctcctctcccaagaaatccaggctcagcgggagtttgacaggcgattctcccctcattttctggactggcagcctttggggtcatgacccttccctccatcggcatccacctgctattgtgtacaccagcaagaggaaatatgacacttgcattaagagggccgagctca

SEQ ID NO: 75421 - DNA, 921 bp, Homo sapiens
cccacgcgtcgcggacgcgtgggctccggaaaggcgtttgggatgccaacgatgaggctgctgtcatttgtggtgttggctctatttgctgtcactcaagcagaggaaggagccaggcttttggcttccaaatcactgctgaacagatacgccgtggagggacgagacctgaccttgcagtacaacatctacaatgttggctcaagtgctgcattagacgtggaactatctgatgattccttccctccagaagactttggcattgtgtctggaatgctcaatgtcaaatgggaccggattgcccctgctagcaatgtctcccacactgtggtcctgcgccctctcaaggctggttatttcaacttcacctcggcaacaattacttacctggcccaggaggatgggcccgttgtgaaccaacctcaggactctttggttctacctggtagttgatgggttaatagacataaaatcaaaggctttgctgccactttggaataaagttgtttgcagtgtgctccaaactcttggcttcctctccaagacaaaggaatgtggaccagactcaacccctcctctaataatgtacatttgggtagggctttatacttcattatatatttttgctatttcatttgagcctcacattaaccctgtgaagtagtggatttttgctggaggattaagtaaatgattaccaagggtaagtcattccacgcacaccttgccctgtagagggaccagtggtggtgagcaacttcactctttgcagagtctgaggctcagacagaagaatttggctttaatttcagttgcatgcctggcctaccttgtttaatatatgttctccatggggtatttctcaggtcttctggctcctaggtactcctctttataacacactaagagagaatcatccaa

SEQ ID NO: 75422 - DNA, 324 bp, Homo sapiens
caaaaagagagtggcaaggacttaaaagtggaaacgtgatttcaaatatgggagagataaaaagaatttgaaagagttagtggagtatagaaaggtgaatgccaagtgccaaaagggagcctgcctggcaatcccagatgggctcattacctgaatgtgccccttactacaaaggagagtggaaggggctcttgtgttcattcctgaaagcatgtatgttgcactccatattctctctacattctggaacaccatggtgccttccctagcctgttctagcagaagcagaaaatgctccagattcatggacaccagaaacatgga

SEQ ID NO: 75423 - DNA, 466 bp, Homo sapiens
aatactggttttggatcacctactattggtaacaaaagcagttctttctcaatatgtgggttacttttaaacatttagaaaattctcatccttaagtaaatttatttcaggacaaagttacaaatctgcaaaagccagtttatacttataaactaagattaagtaaaatagcatttattgatcacaatgtttcagtagatattaaatgatcagtttcagttattgtgtgtgcccattgatggtacttgaaatatgaaccagttatctaaggaacttatgagaaaactttggtttctcaaattatttaaaaaactgcacttgtgctatattagtgcagtcacttttgctttttgttttattgtctttactgttgcatgttttttacaaatcaagagtgtcatatttatgaattttaaagatatttaattcattattaaatctcagttcactccaaagaaaaatgttg

SEQ ID NO: 75424 - DNA, 2246 bp, Homo sapiens
cgtccggcgcggagacggtggagtctccgcactgtcggcggggagctttctcttgcataccctcgcttaggctggccggggtgtcacttctgcctccctgccctccagaccatggacggctccttcgtccagcacagtgtgagggttctgcaggagctcaacaagcagcgggagaagggccagtactgcgacgccactctggacgtggggggcctggtgtttaaggcacactggagtgtccttgcctgctgcagtcactttttccagagcctctacggggatggctcagggggcagtgtcgtcctccctgctggcttcgctgagatctttggcctcttgttggactttttctacactggtcacctcgctctcacctcagggaaccgggatcaggtgctcctggcagccagggagttgcgagtgccagaggccgtagagctgtgccagagcttcaagcccaaaacttcagtgggacaggcagcaggtggccagagtgggctggggccccctgcctcccagaatgtgaacagccacgtcaaggagccggcaggcttggaagaagaggaagtttcgaggactctgggtctagtccccagggatcaggagcccagaggcagtcatagtcctcagaggccccagctccattccccagctcagagtgagggcccctcctccctctgtgggaaactgaagcaggccttgaagccttgtccccttgaggacaagaaacccgaggactgcaaagtgcccccaaggcccttagaggctgaaggtgcccagctgcagggcggcagtaatgagtgggaagtggtggttcaagtggaggatgatggggatggcgattacatgtctgagcctgaggctgtgctgaccaggaggaagtcaaatgtaatccgaaagccctgtgcagctgagccagccctgagcgcgggctccctagcagctgagcctgctgagaacagaaaaggtacagcggtgccggtcgaatgccccacatgtcataaaaagttcctcagcaaatattatctaaaagtccacaacaggaaacatactggggagaaaccctttgagtgtcccaaatgtgggaagtgttactttcggaaggagaacctcctggagcatgaagcccggaattgcatgaaccgctcggaacaggtcttcacgtgctctgtgtgccaggagacattccgccgaaggatggagctgcgggtgcacatggtgtctcacacaggggagatgccctacaagtgttcctcctgctcccagcagttcatgcagaagaaggacttgcagagccacatgatcaaacttcatggagcccccaagccccatgcatgccccacctgtgccaagtgcttcctgtctcggacagagctgcagctgcatgaagctttcaagcaccgtggtgagaagctgtttgtgtgtgaggagtgtgggcaccgggcctcgagccggaatggcctgcagatgcacatcaaggccaagcacaggaatgagaggccacacgtatgtgagttctgcagccacgccttcacccaaaaggccaatctcaacatgcacctgcgcacacacacgggtgagaagcccttccagtgccacctctgtggcaagaccttccgaacccaagccagcctggacaagcacaaccgcacccacaccggggaaaggcccttcagttgcgagttctgtgaacagcgcttcactgagaaggggcccctcctgaggcacgtggccagccgccatcaggagggccggccccacttctgccagatatgcggcaagaccttcaaagccgtggagcaactgcgtgtgcacgtcagacggcacaagggggtgaggaagtttgagtgcaccgagtgtggctacaagtttacccgacaggcccacctgcggaggcacatggagatccacgaccgggtagagaactacaacccgcggcagcgcaagctccgcaacctgatcatcgaggacgagaagatggtggtggtggcgctgcagccgcctgcagagctggaggtgggctcggcggaggtcattgtggagtccctggcccagggcggcctggcctcccagctccccggccagagactgtgtgcagaggagagcttcaccggcccaggtgtcctggagccctccctcatcatcacagctgctgtccccgaggactgtgacacatagcccattctggccaccagagcccacttggccccacccctcaataaaccgtgtggctttggactctcgta

SEQ ID NO: 75425 - DNA, 1930 bp, Homo sapiens
  misc_feature (53)..(53): n is a, c, g, or t
  misc_feature (56)..(56): n is a, c, g, or t
tcctctagagcggacgcctactactactactactactaagctgcgagaagacnacngaatgggggaaccgggatcaggtgctcctggcagccagggagttgcgagtgccagaggccgtagagctgtgccagagcttcaagcccaaaacttcagtgggacaggcagcaggtggccagagtgggctggggccccctgcctcccagaatgtgaacagccacgtcaaggagccggcaggcttggaagaagaggaagtttcgaggactctgggtctagtccccagggatcaggagcccagaggcagtcatagtcctcagaggccccagctccattccccagctcagagtgagggcccctcctccctctgtgggaaactgaagcaggccttgaagccttgtccccttgaggacaagaaacccgaggactgcaaagtgcccccaaggcccttagaggctgaaggtgcccagctgcagggcggcagtaatgagtgggaagtggtggttcaagtggaggatgatggggatggcgattacatgtctgagcctgaggctgtgctgaccaggaggaagtcaaatgtaatccgaaagccctgtgcagctgagccagccctgagcgcgggctccctagcagctgagcctgctgagaacagaaaaggtacagcggtgccggtcgaatgccccacatgtcataaaaagttcctcagcaaatattatctaaaagtccacaacaggaaacatactggggagaaaccctttgagtgtcccaaatgtgggaagtgttactttcggaaggagaacctcctggagcatgaagcccggaattgcatgaaccgctcggaacaggtcttcacgtgctctgtgtgccaggagacattccgccgaaggatggagctgcgggtgcacatggtgtctcacacaggggagatgccctacaagtgttcctcctgctcccagcagttcatgcagaagaaggacttgcagagccacatgatcaaacttcatggagcccccaagccccatgcatgccccacctgtgccaagtgcttcctgtctcggacagagctgcagctgcatgaagctttcaagcaccgtggtgagaagctgtttgtgtgtgaggagtgtgggcaccgggcctcgagccggaatggcctgcagatgcacatcaaggccaagcacaggaatgagaggccacacgtatgtgagttctgcagccacgccttcacccaaaaggccaatctcaacatgcacctgcgcacacacacgggtgagaagcccttccagtgccacctctgtggcaagaccttccgaacccaagccagcctggacaagcacaaccgcacccacaccggggaaaggcccttcagttgcgagttctgtgaacagcgcttcactgagaaggggcccctcctgaggcacgtggccagccgccatcaggagggccggccccacttctgccagatatgcggcaagaccttcaaagccgtggagcaactgcgtgtgcacgtcagacggcacaagggggtgaggaagtttgagtgcaccgagtgtggctacaagtttacccgacaggcccacctgcggaggcacatggagatccacgaccgggtagagaactacaacccgcggcagcgcaagctccgcaacctgatcatcgaggacgagaagatggtggtggtggcgctgcagccgcctgcagagctggaggtgggctcggcggaggtcattgtggagtccctggcccagggcggcctggcctcccagctccccggccagagactgtgtgcagaggagagcttcaccggcccaggtgtcctggagccctccctcatcatcacagctgctgtccccgaggactgtgacacatagcccattctggccaccagagcccacttggccccacccctcaataaaccgtgtggctttggactctcgta

SEQ ID NO: 75426 - DNA, 1574 bp, Homo sapiens
cgtccggcgcggagacggtggagtctccgcactgtcggcggggtacgcatagccgggcactaggttcgtgggctgtggaggcgacggagcagggggccagtggggccagctcagggaggacctgcctggtgggaagtggtggttcaagtggaggatgatggggatggcgattacatgtctgagcctgaggctgtgctgaccaggaggaagtcaaatgtaatccgaaagccctgtgcagctgagccagccctgagcgcgggctccctagcagctgagcctgctgagaacagaaaaggtacagcggtgccggtcgaatgccccacatgtcataaaaagttcctcagcaaatattatctaaaagtccacaacaggaaacatactggggagaaaccctttgagtgtcccaaatgtgggaagtgttactttcggaaggagaacctcctggagcatgaagcccggaattgcatgaaccgctcggaacaggtcttcacgtgctctgtgtgccaggagacattccgccgaaggatggagctgcgggtgcacatggtgtctcacacaggggagatgccctacaagtgttcctcctgctcccagcagttcatgcagaagaaggacttgcagagccacatgatcaaacttcatggagcccccaagccccatgcatgccccacctgtgccaagtgcttcctgtctcggacagagctgcagctgcatgaagctttcaagcaccgtggtgagaagctgtttgtgtgtgaggagtgtgggcaccgggcctcgagccggaatggcctgcagatgcacatcaaggccaagcacaggaatgagaggccacacgtatgtgagttctgcagccacgccttcacccaaaaggccaatctcaacatgcacctgcgcacacacacgggtgagaagcccttccagtgccacctctgtggcaagaccttccgaacccaagccagcctggacaagcacaaccgcacccacaccggggaaaggcccttcagttgcgagttctgtgaacagcgcttcactgagaaggggcccctcctgaggcacgtggccagccgccatcaggagggccggccccacttctgccagatatgcggcaagaccttcaaagccgtggagcaactgcgtgtgcacgtcagacggcacaagggggtgaggaagtttgagtgcaccgagtgtggctacaagtttacccgacaggcccacctgcggaggcacatggagatccacgaccgggtagagaactacaacccgcggcagcgcaagctccgcaacctgatcatcgaggacgagaagatggtggtggtggcgctgcagccgcctgcagagctggaggtgggctcggcggaggtcattgtggagtccctggcccagggcggcctggcctcccagctccccggccagagactgtgtgcagaggagagcttcaccggcccaggtgtcctggagccctccctcatcatcacagctgctgtccccgaggactgtgacacatagcccattctggccaccagagcccacttggccccacccctcaataaaccgtgtggctttggactctcgta

SEQ ID NO: 75427 - DNA, 1281 bp, Homo sapiens
gtgtgcggtgggcttgcagcactcagtgatggtcaggccaggcaggttatgtgttgccctctcccaccctagcgtccccaccctccccaggcagactcttcccagcagcaagcggaagcccgggcagaggctgctgtcataggcagaggcccccgctgatgccggccctgcttgcccctcacactgccaggtcttcacgtgctctgtgtgccaggagacattccgccgaaggatggagctgcgggtgcacatggtgtctcacacaggggagatgccctacaagtgttcctcctgctcccagcagttcatgcagaagaaggacttgcagagccacatgatcaaacttcatggagcccccaagccccatgcatgccccacctgtgccaagtgcttcctgtctcggacagagctgcagctgcatgaagctttcaagcaccgtggtgagaagctgtttgtgtgtgaggagtgtgggcaccgggcctcgagccggaatggcctgcagatgcacatcaaggccaagcacaggaatgagaggccacacgtatgtgagttctgcagccacgccttcacccaaaaggccaatctcaacatgcacctgcgcacacacacgggtgagaagcccttccagtgccacctctgtggcaagaccttccgaacccaagccagcctggacaagcacaaccgcacccacaccggggaaaggcccttcagttgcgagttctgtgaacagcgcttcactgagaaggggcccctcctgaggcacgtggccagccgccatcaggagggccggccccacttctgccagatatgcggcaagaccttcaaagccgtggagcaactgcgtgtgcacgtcagacggcacaagggggtgaggaagtttgagtgcaccgagtgtggctacaagtttacccgacaggcccacctgcggaggcacatggagatccacgaccgggtagagaactacaacccgcggcagcgcaagctccgcaacctgatcatcgaggacgagaagatggtggtggtggcgctgcagccgcctgcagagctggaggtgggctcggcggaggtcattgtggagtccctggcccagggcggcctggcctcccagctccccggccagagactgtgtgcagaggagagcttcaccggcccaggtgtcctggagccctccctcatcatcacagctgctgtccccgaggactgtgacacatagcccattctggccaccagagcccacttggccccacccctcaataaaccgtgtggctttggactctcgta

SEQ ID NO: 75428 - DNA, 2755 bp, Homo sapiens
  misc_feature (2297)..(2297): n is a, c, g, or t
cgtccggcgcggagacggtggagtctccgcactgtcggcggggagctttctcttgcataccctcgcttaggctggccggggtgtcacttctgcctccctgccctccagaccatggacggctccttcgtccagcacagtgtgagggttctgcaggagctcaacaagcagcgggagaagggccagtactgcgacgccactctggacgtggggggcctggtgtttaaggcacactggagtgtccttgcctgctgcagtcactttttccagagcctctacggggatggctcagggggcagtgtcgtcctccctgctggcttcgctgagatctttggcctcttgttggactttttctacactggtcacctcgctctcacctcagggaaccgggatcaggtgctcctggcagccagggagttgcgagtgccagaggccgtagagctgtgccagagcttcaagcccaaaacttcagtgggacaggcagcaggtggccagagtgggctggggccccctgcctcccagaatgtgaacagccacgtcaaggagccggcaggcttggaagaagaggaagtttcgaggactctgggtctagtccccagggatcaggagcccagaggcagtcatagtcctcagaggccccagctccattccccagctcagagtgagggcccctcctccctctgtgggaaactgaagcaggccttgaagccttgtccccttgaggacaagaaacccgaggactgcaaagtgcccccaaggcccttagaggctgaaggtgcccagctgcagggcggcagtaatgagtgggaagtggtggttcaagtggaggatgatggggatggcgattacatgtctgagcctgaggctgtgctgaccaggaggaagtcaaatgtaatccgaaagccctgtgcagctgagccagccctgagcgcgggctccctagcagctgagcctgctgagaacagaaaaggtacagcggtgccggtcgaatgccccacatgtcataaaaagttcctcagcaaatattatctaaaagtccacaacaggaaacatactggggagaaaccctttgagtgtcccaaatgtgggaagtgttactttcggaaggagaacctcctggagcatgaagcccggaattgcatgaaccgctcggaacaggtcttcacgtgctctgtgtgccaggagacattccgccgaaggatggagctgcgggtgcacatggtgtctcacacaggggagatgccctacaagtgttcctcctgctcccagcagttcatgcagaagaaggacttgcagagccacatgatcaaacttcatggagcccccaagccccatgcatgccccacctgtgccaagtgcttcctgtctcggacagagctgcagctgcatgaagctttcaagcaccgtggtgagaagctgtttgtgtgtgaggagtgtgggcaccgggcctcgagccggaatggcctgcagatgcacatcaaggccaagcacaggaatgagaggccacacgtatgtgagttctgcagccacgccttcacccaaaaggccaatctcaacatgcacctgcgcacacacacgggtgagaagcccttccagtgccacctctgtggcaagaccttccgaacccaagccagcctggacaagcacaaccgcacccacaccggggaaaggcccttcagttgcgagttctgtgaacagcgcttcactgagaaggggcccctcctgaggcacgtggccagccgccatcaggagggccggccccacttctgccagatatgcggcaagaccttcaaagccgtggagcaactgcgtgtgcacgtcagacggcacaagggggtgaggaagtttgagtgcaccgagtgtggctacaagtttacccgacaggcccacctgcggaggcacatggagatccacgaccgggtagagaactacaacccgcggcagcgcaagctccgcaacctgatcatcgaggacgagaagatggtggtggtggcgctgcagccgcctgcagagctggaggtgggctcggcggaggtcattgtggagtccctggcccagggcggcctggcctcccagctccccggccagagactgtgtgcagaggagagcttcaccggcccaggtgtcctggagccctccctcatcatcacagctgctgtccccgaggactgtgacacatagcccattctggccaccagagcccacttggccccacccctcaataaaccgtgtggctttggactctcgtaaaaaaaaaaaaaaaaaaaaaaaaaaaaaaaaaaaaaaaaaaaaaaaaaaanacaaaaaacaaaaaaggggcggggcgcgcaacaaaaatctcaatccccggaagggcgccacaaacacggccagcccccaccagcagagcacgaacaacacagaggcgggcccaacagaaaggggcggcggtatactcaaaacgacacgcagcgcggcgcgcaccgacacaccaacgcaacagaccggagaaaaagccggcaccacgcaggcggacaacccacgcggcagcacagcgcccaccccctcccctccctcgcgagcggcgggccacgcacaccacactgaggtgagaccaacaccaacaccaccaccacaaccgcacagaccacgtgcacaaccccaccgcacggcgcgcccaaccactccacccccacccacccacacggatagacacaacggtcggagcaaccgcacacccgccccccactctacccgccgcaaccccgcgcaccaacct

SEQ ID NO: 75429 - DNA, 2333 bp, Homo sapiens
cgtccggcgcggagacggtggagtctccgcactgtcggcggggtacgcatagccgggcactaggttcgtgggctgtggaggcgacggagcagggggccagtggggccagctcagggaggacctgcctgggagctttctcttgcataccctcgcttaggctggccggggtgtcacttctgcctccctgccctccagaccatggacggctccttcgtccagcacagtgtgagggttctgcaggagctcaacaagcagcgggagaagggccagtactgcgacgccactctggacgtggggggcctggtgtttaaggcacactggagtgtccttgcctgctgcagtcactttttccagagcctctacggggatggctcagggggcagtgtcgtcctccctgctggcttcgctgagatctttggcctcttgttggactttttctacactggtcacctcgctctcacctcagggaaccgggatcaggtgctcctggcagccagggagttgcgagtgccagaggccgtagagctgtgccagagcttcaagcccaaaacttcagtgggacaggcagcaggtggccagagtgggctggggccccctgcctcccagaatgtgaacagccacgtcaaggagccggcaggcttggaagaagaggaagtttcgaggactctgggtctagtccccagggatcaggagcccagaggcagtcatagtcctcagaggccccagctccattccccagctcagagtgagggcccctcctccctctgtgggaaactgaagcaggccttgaagccttgtccccttgaggacaagaaacccgaggactgcaaagtgcccccaaggcccttagaggctgaaggtgcccagctgcagggcggcagtaatgagtgggaagtggtggttcaagtggaggatgatggggatggcgattacatgtctgagcctgaggctgtgctgaccaggaggaagtcaaatgtaatccgaaagccctgtgcagctgagccagccctgagcgcgggctccctagcagctgagcctgctgagaacagaaaaggtacagcggtgccggtcgaatgccccacatgtcataaaaagttcctcagcaaatattatctaaaagtccacaacaggaaacatactggggagaaaccctttgagtgtcccaaatgtgggaagtgttactttcggaaggagaacctcctggagcatgaagcccggaattgcatgaaccgctcggaacaggtcttcacgtgctctgtgtgccaggagacattccgccgaaggatggagctgcgggtgcacatggtgtctcacacaggggagatgccctacaagtgttcctcctgctcccagcagttcatgcagaagaaggacttgcagagccacatgatcaaacttcatggagcccccaagccccatgcatgccccacctgtgccaagtgcttcctgtctcggacagagctgcagctgcatgaagctttcaagcaccgtggtgagaagctgtttgtgtgtgaggagtgtgggcaccgggcctcgagccggaatggcctgcagatgcacatcaaggccaagcacaggaatgagaggccacacgtatgtgagttctgcagccacgccttcacccaaaaggccaatctcaacatgcacctgcgcacacacacgggtgagaagcccttccagtgccacctctgtggcaagaccttccgaacccaagccagcctggacaagcacaaccgcacccacaccggggaaaggcccttcagttgcgagttctgtgaacagcgcttcactgagaaggggcccctcctgaggcacgtggccagccgccatcaggagggccggccccacttctgccagatatgcggcaagaccttcaaagccgtggagcaactgcgtgtgcacgtcagacggcacaagggggtgaggaagtttgagtgcaccgagtgtggctacaagtttacccgacaggcccacctgcggaggcacatggagatccacgaccgggtagagaactacaacccgcggcagcgcaagctccgcaacctgatcatcgaggacgagaagatggtggtggtggcgctgcagccgcctgcagagctggaggtgggctcggcggaggtcattgtggagtccctggcccagggcggcctggcctcccagctccccggccagagactgtgtgcagaggagagcttcaccggcccaggtgtcctggagccctccctcatcatcacagctgctgtccccgaggactgtgacacatagcccattctggccaccagagcccacttggccccacccctcaataaaccgtgtggctttggactctcgta

SEQ ID NO: 75430 - DNA, 2267 bp, Homo sapiens
cgtccggcgcggagacggtggagtctccgcactgtcggcggggtacgcatagccgggcactaggagctttctcttgcataccctcgcttaggctggccggggtgtcacttctgcctccctgccctccagaccatggacggctccttcgtccagcacagtgtgagggttctgcaggagctcaacaagcagcgggagaagggccagtactgcgacgccactctggacgtggggggcctggtgtttaaggcacactggagtgtccttgcctgctgcagtcactttttccagagcctctacggggatggctcagggggcagtgtcgtcctccctgctggcttcgctgagatctttggcctcttgttggactttttctacactggtcacctcgctctcacctcagggaaccgggatcaggtgctcctggcagccagggagttgcgagtgccagaggccgtagagctgtgccagagcttcaagcccaaaacttcagtgggacaggcagcaggtggccagagtgggctggggccccctgcctcccagaatgtgaacagccacgtcaaggagccggcaggcttggaagaagaggaagtttcgaggactctgggtctagtccccagggatcaggagcccagaggcagtcatagtcctcagaggccccagctccattccccagctcagagtgagggcccctcctccctctgtgggaaactgaagcaggccttgaagccttgtccccttgaggacaagaaacccgaggactgcaaagtgcccccaaggcccttagaggctgaaggtgcccagctgcagggcggcagtaatgagtgggaagtggtggttcaagtggaggatgatggggatggcgattacatgtctgagcctgaggctgtgctgaccaggaggaagtcaaatgtaatccgaaagccctgtgcagctgagccagccctgagcgcgggctccctagcagctgagcctgctgagaacagaaaaggtacagcggtgccggtcgaatgccccacatgtcataaaaagttcctcagcaaatattatctaaaagtccacaacaggaaacatactggggagaaaccctttgagtgtcccaaatgtgggaagtgttactttcggaaggagaacctcctggagcatgaagcccggaattgcatgaaccgctcggaacaggtcttcacgtgctctgtgtgccaggagacattccgccgaaggatggagctgcgggtgcacatggtgtctcacacaggggagatgccctacaagtgttcctcctgctcccagcagttcatgcagaagaaggacttgcagagccacatgatcaaacttcatggagcccccaagccccatgcatgccccacctgtgccaagtgcttcctgtctcggacagagctgcagctgcatgaagctttcaagcaccgtggtgagaagctgtttgtgtgtgaggagtgtgggcaccgggcctcgagccggaatggcctgcagatgcacatcaaggccaagcacaggaatgagaggccacacgtatgtgagttctgcagccacgccttcacccaaaaggccaatctcaacatgcacctgcgcacacacacgggtgagaagcccttccagtgccacctctgtggcaagaccttccgaacccaagccagcctggacaagcacaaccgcacccacaccggggaaaggcccttcagttgcgagttctgtgaacagcgcttcactgagaaggggcccctcctgaggcacgtggccagccgccatcaggagggccggccccacttctgccagatatgcggcaagaccttcaaagccgtggagcaactgcgtgtgcacgtcagacggcacaagggggtgaggaagtttgagtgcaccgagtgtggctacaagtttacccgacaggcccacctgcggaggcacatggagatccacgaccgggtagagaactacaacccgcggcagcgcaagctccgcaacctgatcatcgaggacgagaagatggtggtggtggcgctgcagccgcctgcagagctggaggtgggctcggcggaggtcattgtggagtccctggcccagggcggcctggcctcccagctccccggccagagactgtgtgcagaggagagcttcaccggcccaggtgtcctggagccctccctcatcatcacagctgctgtccccgaggactgtgacacatagcccattctggccaccagagcccacttggccccacccctcaataaaccgtgtggctttggactctcgta

SEQ ID NO: 75431 - DNA, 1757 bp, Homo sapiens
cccgggccctttctctgaatggggaagcactggggatacgtgagccaagaggtactgaggtctgacttaaaggtccttctggctcctgaactgaaacctgtgggggaggcagtcacggagcggggagaccagatgggcagctcccctggctacctgggagaagctgttgccagccttggtgggccagtggagtcaggtgaggatctggccatgggtttgaagctctgggaagactgagttgcttctccaatagtcaggacccaagatctgtttctgccttcagacagaatgcggtcagctgggcctccctgtcggcctctgtgctggccagatccatggcagcctcttaggacctgtgtgagcttcttgccactgcactctcccttgcagagtctccatgctgggggaggcttctgggcttgtccctgcaccttaaccagccggtgtcacctgagaacacttgttccccttagaagggacccagagggggccctgggtgagggagagatgggaaaccctctcagcccccccacccctgtggcttctcctggcaggaaacatactggggagaaaccctttgagtgtcccaaatgtgggaagtgttactttcggaaggagaacctcctggagcatgaagcccggaattgcatgaaccgctcggaacaggtcttcacgtgctctgtgtgccaggagacattccgccgaaggatggagctgcgggtgcacatggtgtctcacacaggggagatgccctacaagtgttcctcctgctcccagcagttcatgcagaagaaggacttgcagagccacatgatcaaacttcatggagcccccaagccccatgcatgccccacctgtgccaagtgcttcctgtctcggacagagctgcagctgcatgaagctttcaagcaccgtggtgagaagctgtttgtgtgtgaggagtgtgggcaccgggcctcgagccggaatggcctgcagatgcacatcaaggccaagcacaggaatgagaggccacacgtatgtgagttctgcagccacgccttcacccaaaaggccaatctcaacatgcacctgcgcacacacacgggtgagaagcccttccagtgccacctctgtggcaagaccttccgaacccaagccagcctggacaagcacaaccgcacccacaccggggaaaggcccttcagttgcgagttctgtgaacagcgcttcactgagaaggggcccctcctgaggcacgtggccagccgccatcaggagggccggccccacttctgccagatatgcggcaagaccttcaaagccgtggagcaactgcgtgtgcacgtcagacggcacaagggggtgaggaagtttgagtgcaccgagtgtggctacaagtttacccgacaggcccacctgcggaggcacatggagatccacgaccgggtagagaactacaacccgcggcagcgcaagctccgcaacctgatcatcgaggacgagaagatggtggtggtggcgctgcagccgcctgcagagctggaggtgggctcggcggaggtcattgtggagtccctggcccagggcggcctggcctcccagctccccggccagagactgtgtgcagaggagagcttcaccggcccaggtgtcctggagccctccctcatcatcacagctgctgtccccgaggactgtgacacatagcccattctggccaccagagcccacttggccccacccctcaataaaccgtgtggctttggactctcgta

SEQ ID NO: 75432 - DNA, 2716 bp, Homo sapiens
  misc_feature (2258)..(2258): n is a, c, g, or t
cgtccggcgcggagacggtggagtctccgcactgtcggcggggagctttctcttgcataccctcgcttaggctggccggggtgtcacttctgcctccctgccctccagaccatggacggctccttcgtccagcacagtgtgagggttctgcaggagctcaacaagcagcgggagaagggccagtactgcgacgccactctggacgtggggggcctggtgtttaaggcacactggagtgtccttgcctgctgcagtcactttttccagagcctctacggggatggctcagggggcagtgtcgtcctccctgctggcttcgctgagatctttggcctcttgttggactttttctacactggtcacctcgctctcacctcagggaaccgggatcaggtgctcctggcagccagggagttgcgagtgccagaggccgtagagctgtgccagagcttcaagcccaaaacttcagtgggacaggcagcaggtggccagagtgggctggggccccctgcctcccagaatgtgaacagccacgtcaaggagccggcaggcttggaagaagaggaagtttcgaggactctgggtctagtccccagggatcaggagcccagaggcagtcatagtcctcagaggccccagctccattccccagctcagagtgagggcccctcctccctctgtgggaaactgaagcaggccttgaagccttgtccccttgaggacaagaaacccgaggactgcaaagtgcccccaaggcccttagaggctgaaggtgcccagctgcagggcggcagtaatgagtgggaagtggtggttcaagtggaggatgatggggatggcgattacatgtctgagcctgaggctgtgctgaccaggaggaagtcaaatgtaatccgaaagccctgtgcagctgagccagccctgagcgcgggctccctagcagctgagcctgctgagaacagaaaaggtacagcggtgccggtcgaatgccccacatgtcataaaaagttcctcagcaaatattatctaaaagtccacaacaggaaacatactggggagaaaccctttgagtgtcccaaatgtgggaagtgttactttcggaaggagaacctcctggagcatgaagcccggaattgcatgaaccgctcggaacaggtcttcacgtgctctgtgtgccaggagacattccgccgaaggatggagctgcgggtgcacatggtgtctcacacaggggagatgccctacaagtgttcctcctgctcccagcagttcatgcagaagaaggacttgcagagccacatgatcaaacttcatggagcccccaagccccatgcatgccccacctgtgccaagtgcttcctgtctcggacagagctgcagctgcatgaagctttcaagcaccgtggtgagaagctgtttgtgtgtgaggagtgtgggcaccgggcctcgagccggaatggcctgcagatgcacatcaaggccaagcacaggaatgagaggccacacgtatgtgagttctgcagccacgccttcacccaaaaggccaatctcaacatgcacctgcgcacacacacgggtgagaagcccttccagtgccacctctgtggcaagaccttccgaacccaagccagcctggacaagcacaaccgcacccacaccggggaaaggcccttcagttgcgagttctgtgaacagcgcttcactgagaaggggcccctcctgaggcacgtggccagccgccatcaggagggccggccccacttctgccagatatgcggcaagaccttcaaagccgtggagcaactgcgtgtgcacgtcagacggcacaagggggtgaggaagtttgagtgcaccgagtgtggctacaagtttacccgacaggcccacctgcggaggcacatggagatccacgaccgggtagagaactacaacccgcggcagcgcaagctccgcaacctgatcatcgaggacgagaagatggtggtggtggcgctgcagccgcctgcagagctggaggtgggctcggcggaggtcattgtggagtccctggcccagggcggcctggcctcccagctccccggccagagactgtgtgcagaggagagcttcaccggcccaggtgtcctggagccctccctcatcatcacagctgctgtccccgaggactgtgacacatagcccattctggccaccagagcccacttggccccacccctcaataaaccgtgtggctttggactctcgtaaaaaaaaaaaanacaaaaaacaaaaaaggggcggggcgcgcaacaaaaatctcaatccccggaagggcgccacaaacacggccagcccccaccagcagagcacgaacaacacagaggcgggcccaacagaaaggggcggcggtatactcaaaacgacacgcagcgcggcgcgcaccgacacaccaacgcaacagaccggagaaaaagccggcaccacgcaggcggacaacccacgcggcagcacagcgcccaccccctcccctccctcgcgagcggcgggccacgcacaccacactgaggtgagaccaacaccaacaccaccaccacaaccgcacagaccacgtgcacaaccccaccgcacggcgcgcccaaccactccacccccacccacccacacggatagacacaacggtcggagcaaccgcacacccgccccccactctacccgccgcaaccccgcgcaccaacct

SEQ ID NO: 75433 - DNA, 737 bp, Homo sapiens
ggtggggacacaggtcctgagggcggaagggacaggcataggagggactctgtgggaggcatttggggttggctttcctaggcccctggcccacctccaccttggctttggagaaggggagccgctacaggggatggcagctgggaaaggccccctggccacccccagcaaccccactgctggcttctgtgtcagggcccgccgaaacccaggcccactcttcctagaggcctgtcagcagccactagggccagggactgtgggtgaggccactcggaccctgcccccagtctgtctgggcctgagaagggcctggtgtgcggtgggcttgcagcactcagtgatggtcaggccaggcaggttatgtgttgccctctcccaccctagcgtccccaccctccccaggcagactcttcccagcagcaagcggaagcccgggcagaggctgctgtcataggcagaggcccccgctgatgccggccctgcttgcccctcacactgccaggtcttcacgtgctctgtgtgccaggagacattccgccgaaggatggagctgcgggtgcacatggtgtctcacacaggggagatgccctacaaggtcaggcttggcctgtctccagggccagggttgggtggccccaggatccttcctgctgagccctttacgtggggtgctgtcaggcacctccctcacagtagctgtcagggagcctgccttccctgccttccctgccttt

SEQ ID NO: 75434 - DNA, 4638 bp, Homo sapiens
agggttcacaggtcagagttgactccctgaaaagtgcagccggtttgaaatgcaagatggcggcggcgtggcgctgagaggcgcggcggcccctgcaggagaagacagactgctgctttggacctgttggtaatgatggcctgagctaaacatctaactagaagggatacccttccatttcaaagaacagaatgctaaggaagctgtggcaagtgattggagttgtgcttcaaaaatttcagaaattcagcagtattttatctgccaacaataagctctttacttgattgcaccatgagaaagctgctaatgagacttgttgagcacaaaaatggacttgaagaaccaaaagccattgttttcaaatgaagaacactgaacagttttaagcctcgatgctttttaatcaccactgagcttttcctcataacatcagaatggcaagcaggcgaaaatcaacaacaccttgcatggtccttgccagtgaacaagatccagaccttgagttgatatcagatttggatgaaggtcctcctgtgcttacacctgtagaaaacaccagagcagagagtatctcaagtgatgaagaggttcatgaatctgtggattcagacaatcagcaaaataaaaaagttgaaggtggatatgaatgtaaatattgtacttttcaaactccagatctaaatatgtttacttttcatgtggattcggaacatcccaatgtagtgctaaattcatcctatgtttgtgtcgaatgcaattttcttaccaaaaggtatgatgcactttctgagcataatctgaaatatcacccaggagaagagaattttaagttgactatggtgaaacgtaataaccagacaatctttgaacaaacaataaatgatctgacttttgatggtagttttgttaaagaggagaatgcagagcaagcagaatctacagaagtttcttcttcgggaatatctatcagtaaaactcctatcatgaaaatgatgaaaaataaagtggaaaataaacggattgcagttcatcataactcagttgaggacgttcctgaagagaaagagaatgaaatcaaaccagaccgtgaagaaattgtagaaaatccaagttcttcagcttctgaatctaatacaagtacttccattgtaaacagaatacatccaagtactgccagcacggtagtgacaccagcagcagttcttcctggattggcacaggtgataactgctgtatctgctcagcagaattctaatttgattcccaaagtcttaatccctgttaatagcattcccacctacaatgctgcattggataacaatccccttttacttaacacctacaacaagttcccttacccaacaatgtcagaaattacagttctttctgctcaagcaaaatatacagaggaacagatcaagatatggttttcagcccaacgtttaaaacatggtgttagttggactcccgaggaagtagaggaggcaagaaggaaacaattcaatggaacagtgcatactgtacctcagaccataactgttattcctacacacatttccacagggagtaatggtttaccatctattttacagacatgccaaatagttggtcagcctggtctggtccttactcaagtggctggaacaaacaccttgccagttacagcacctatagccttgacagtggcaggcgttccaagtcaaaataatatacagaaaagtcaggtacctgctgctcagcctactgcagaaacaaagccagcaacagcagcagttccaacttctcaaagtgtcaaacatgaaactgcattggtaaaccctgattcatttggcattcgggcaaaaaagacaaaagagcaactggcagaattaaaagttagctaccttaaaaatcagtttccccatgattcagaaattatcagacttatgaaaataacaggcctgacgaaaggagagattaaaaaatggtttagtgacacaaggtacaaccagagaaattcaaagagtaatcagtgcttacatctcaacaatgattcctctaccaccattattatagactccagtgatgaaaccacggaatccccaactgttggtactgcacagcctaagcaatcctggaatccttttcctgactttactccccaaaagtttaaagagaaaactgcagagcagcttcgtgtccttcaggcaagttttctcaacagctctgtacttacagatgaagaattaaataggttaagggcacaaaccaaacttaccagaagagaaatcgatgcttggtttacagagaagaagaaatcaaaagctttaaaggaagagaaaatggaaatagatgaaagtaatgcaggtagttccaaagaagaagctggagaaacttctcctgcagatgaatctggtgcacctaagtcagggagtacaggcaagatatgtaaaaaaacacctgagcagctgcacatgcttaagagtgcatttgtccggacacagtggccatcaccagaagagtatgacaagttggccaaagaaagcgggcttgctagaacagacatagttagttggtttggggacacccgttatgcttggaagaatggaaacttgaaatggtactactactatcagagcgccaattcaagtagtatgaatggtctgtcttcccttaggaaaagagggagagggagacccaaaggacggggaagaggaagaccgcgtgggcggcctagaggaagcaaaagaattaacaactgggacaggggaccatcactcataaaatttaaaactggaactgcaatacttaaggattattacctgaagcacaagtttcttaatgagcaagaccttgatgaacttgttaacaaatcacatatgggctatgagcaggtcagagagtggtttgcagaaagacagagaagatcagaattaggtatagaattatttgaggaaaatgaggaggaagatgaagttattgatgaccaggaagaggatgaagaagaaacagatgatagtgacacttgggaacctccacgacatgtgaaacggaagctgtctaaatcagatgactgaaatctgcctaaaacgttgaaggagaatcaattcttcaactcaagatgtctgatttactgtgaatttgcccaatctttgatgacattgaaaacgttttggggcatacacactcaaaaagcaggatccaatacccaaaagaaatggaacttaatgttgtgccaaagttaaactactgcagttggtggaagttctgcaatgtaaatagaacactaattaaaaaacaacttgtaaaaatgcaatttaaattttaatacagtacatttttcttctaatatgatggagacattctgaatcttagactttctgagggggtttaatgaccactagagcttgtcctcatattcagtccagtttaatactgtatgtctagtaagatgggctatatattgcctctattctttgagatgtgattaagcttagaactttgaccaaaaattttacagtaaaaattgttagaaatgggtaaaaaaaaaaaaaaaaaaaaaccctgatttattactatgtcttatttatcagaccctgcactaagattaaaagttgtgcatgggcttatacaatttcaaatgtaaaaacagcctatttatatatgttgaaacaataagattttatggtttcactggcccttaataattggatccttcattaaacacatccatgaataccactgtttctactgttacttgttccattagaagctgatttgctttttattaaactgcaggaaattaattctgaagaaggaaaagaaactgacatggtaatttggatagggtgaagctttgaaataaatactgcaccaaaaatgtgaaaaagaatcacgtagtaaatgtatacttagtgttttcttacaatcgtggaaatcagaaatgtttatacaggtgtcagatcagaatttttaagagttatctttcagtgaaattttataacagtttcagtgaatagagaaaaaattctgaactgatcataatgagttaaaagttagcttttcacttatgaatcatgggagtgttaactgttaactcttgccgtatcaggagactgaaagttcatactaatttacaaactttgtaaagactggtgctgttcattcatattgggaagaaccctttcttttgtgaccataggaccatttttcaaaatgcgctttcttcgtagaagaaatgttcagtttaattagctttggattttaacatgtttttctgaatgaccagatgtaggcttagccagtttattttctctaatttaatggataataaatattaagctcttggttaaatgtttttcagccattgaaaatgttatgaaaaagccttgaatatgcatgctgctttcatttttataaactttttattttttaactatagctttattagtaattccaaaatgctgcaatgtagctgatttcctcactcagacagctggctttgtgggtggcttttttcatactactgttaacttttttaaaaaagaagcaatgtaaagaccgtaatgcactaagctttttttttttcttttacacgtttaaaaacttcttaaagcactctgtaatataatgattaaattgctcccttttataaac

SEQ ID NO: 75435 - DNA, 1291 bp, Homo sapiens
cgcttcctcgttgcccccgccgcgggcgcgagatggattccgggtgctggttgttcggcggcgagttcgaggactcggtgttcgaggagaggccggagcggcggtcaggaccgcccgcgtcctactgcgccaagctctgcgagccgcagtggttttatgaagaaacagaaagcagtgatgatgttgaagtgctgactctcaagaaattcaaaggagacctggcctacagacgacaagagtatcagaaagcactgcaggagtattccagtatctctgaaaaattgtcatcaaccaattttgccatgaaaagggatgtccaggaaggtcaggctcggtgtctggctcacctgggtaggcatatggaggcgctggagattgctgcaaacttggaaaataaagcaaccaacacagaccatttaaccacggtactctacctccagcttgctatttgttcaagtttgcagaacttggagaaaacaattttctgcctgcagaaactgatttctttgcatccttttaatccttggaactggggcaaattggcagaggcttacctgaatctggggccagctctttcagcagcacttgcgtcatctcagaaacagcacagtttcacctcaagtgacaaaactatcaaatccttctttccacactcaggaaaagactgtcttttgtgttttcctgaaaccttgcctgagagctctttattttctgtggaagcgaatagcagtaatagccagaaaaatgagaaagctctgacaaatatccaaaactgtatggcagaaaagagagaaacagtgttgatagagactcagctgaaagcatgtgcctcttttatacgaaccaggcttctgcttcagtttacccaacctcagcaaacatcgtttgctttggagaggaacttaaggactcagcaggaaattgaagataaaatgaaagggttcagcttcaaagaagacactttgctgttgatagctgaggttatgggagaagatatcccagaaaaaataaaagatgaagttcacccagaggtgaagtgtgttggctccgtagccctgactgccttggtgactgtatcctcagaagaatttgaagacaagtggttcagaaagatcaaagaccatttctgtccatttgaaaatcagttccatacagagatacaaatcttggcttagtgggttataaaaaacaaaaccacaaatatcttgtactgtattaattgtccttgtttacttcagacaggatccattgctaatcatggagtataaatgattatttatgttttataaaa

SEQ ID NO: 75436 - DNA, 1701 bp, Homo sapiens
  misc_feature (751)..(751): n is a, c, g, or t
  misc_feature (753)..(753): n is a, c, g, or t
  misc_feature (778)..(780): n is a, c, g, or t
  misc_feature (809)..(809): n is a, c, g, or t
  misc_feature (817)..(817): n is a, c, g, or t
  misc_feature (829)..(829): n is a, c, g, or t
  misc_feature (833)..(833): n is a, c, g, or t
  misc_feature (839)..(840): n is a, c, g, or t
  misc_feature (847)..(847): n is a, c, g, or t
  misc_feature (849)..(850): n is a, c, g, or t
  misc_feature (872)..(872): n is a, c, g, or t
  misc_feature (881)..(881): n is a, c, g, or t
  misc_feature (888)..(889): n is a, c, g, or t
  misc_feature (893)..(894): n is a, c, g, or t
  misc_feature (901)..(901): n is a, c, g, or t
  misc_feature (903)..(903): n is a, c, g, or t
  misc_feature (948)..(948): n is a, c, g, or t
  misc_feature (951)..(951): n is a, c, g, or t
  misc_feature (954)..(954): n is a, c, g, or t
  misc_feature (964)..(964): n is a, c, g, or t
  misc_feature (985)..(985): n is a, c, g, or t
  misc_feature (987)..(988): n is a, c, g, or t
  misc_feature (993)..(993): n is a, c, g, or t
  misc_feature (1005)..(1005): n is a, c, g, or t
  misc_feature (1017)..(1017): n is a, c, g, or t
ttcagtgtgtgcgtgtgttttaaatatgttctactttgatcatttcattttgttctatgagttctgcagtgactcagaagttccatgatactataactggagtaattttgctgtatttttagccatgtcctccaagcctcccagtatatgctgtgatctttgccaaacagaatctgatcagtgttacaggggaaatgatgtgtgaggctctacaaggagagggtctccagggcccacacctgagtcatgccttgaagcaacctcagcacacttagcctcccagtgattctgtgcaagtctgtctcaatcttttgagcttatgttagttctttgggggaaaaaaaatagaaacaacttctgaatagggcagtatgtttggggcagctttgtgaatacatatctaaaattacctccatttgccattttttaaatcaattttttttcaagcaatcagattcttttctcctagaggagctgtgggcaagaaaactaatgaattctacatccttctcatcacctggtttaaattgttttctgctctgagtaaacagtaattactgtttaagtacatctcagcagaattttatcccaattgcaacagttcatgttcctcctaatgtaatctctgcggaggaaatgatcgtcaagggaagcaggctgacctgctcacgggatggcgttcttacaatctgcatcttatgtaatggtgattctgtgtgcctgtgtcataattattggaatattattttangnttttttttttttgagacggagtctnnntctgtcgcccaggctggagtgcagtggcncgatctcngctcactgcaanctcncctccnnggttcangnnattctgcctcagtctcccaagnagctgggantacaggnncccnncaccacncncagctaatttttttttgtatttttagtagagacggggtttcactnttngcnaggatggttnatctcctgaccttgtgatccncnngcctnggcctcccaaantgctgggattanaggcgtgagccactgcacccagcctattctatgcattttttaacattacaatttattttgtgccatgttctgacttttaagtcattaaatcgtcttgaaaatgaggaggaagatgaagttattgatgaccaggaagaggatgaagaagaaacagatgatagtgacacttgggaacctccacgacatgtgaaacggaagctgtctaaatcagatgactgaaatctgcctaaaacgttgaaggagaatcaattcttcaactcaagatgtctgatttactgtgaatttgcccaatctttgatgacattgaaaacgttttggggcatacacactcaaaaagcaggatccaatacccaaaagaaatggaacttaatgttgtgccaaagttaaactactgcagttggtggaagttctgcaatgtaaatagaacactaattaaaaaacaacttgtaaaaatgcaatttaaattttaatacagtacatttttcttctaatatgatggagacattctgaatcttagactttctgagggggtttaatgaccactagagcttgtcctcatattcagtccagtttaatactgtatgtctagtaagatgggctatatattgcctctattctttgagatgtgattaagcttagaactttgaccaaaaattttacagtaaaaattgttagaaatgggta

SEQ ID NO: 75437 - DNA, 433 bp, Homo sapiens
cgcttcctcgttgcccccgccgcgggcgcgagatggattccgggtgctggttgttcggcggcgagttcgaggactcggtgttcgaggagaggccggagcggcggtcaggaccgcccgcgtcctactgcgccaagctctgcgagccgcagtggttttatgaagaaacagaaagcagtgatgatgttgaagtgctgactctcaagaaattcaaaggagacctggcctacagacgacaagagtatcagaaagcactgcaggagtattccagtatctctgaaaaattgtcatcaaccaattttgccatgaaaagggatgtccaggaaggtcaggctcggtgtctggctcacctgggtaggcatatggaggcgctggagattgctgcaaacttggaaaataaagcaactcgaaagccccaagcggggtaccgagctcg

SEQ ID NO: 75438 - DNA, 509 bp, Homo sapiens
aagatcgggcacagtcagggtggtatggccatagacggataactacttctgaacaaacatcttttcaatgtgttgggaatgtcccctggctgctcaagtattttctgcctttgaatgaaagccttcgcagttgataactagcattccatgtctctgcctcttttattgggacagtttttttttttcctcctgttataggttatgggagaagatatcccagaaaaaataaaagatgaagttcacccagaggtgaagtgtgttggctccgtagccctgactgccttggtgactgtatcctcagaagaatttgaagacaagtggttcagaaagatcaaagaccatttctgtccatttgaaaatcagttccatacagagatacaaatcttggcttagtgggttataaaaaacaaaaccacaaatatcttgtactgtattaattgtccttgtttacttcagacaggatccattgctaatcatggagtataaatgattatttatgttttataaaa

SEQ ID NO: 75439 - DNA, 461 bp, Homo sapiens
  misc_feature (24)..(24): n is a, c, g, or t
  misc_feature (26)..(28): n is a, c, g, or t
  misc_feature (420)..(420): n is a, c, g, or t
ttaaggccaacgaggccacttttnannntgtaatttcctttagggattcattttaaaacattttaaaatttattttaatgtaggtgattggagttgtgcttcaaaaatttcagaaattcagcagtattttatctgccaacaataagctctttacttgattgcaccatgagaaagctgctaatgagacttgttgagcacaaaaatggacttgaagaaccaaaagccattgttttcaaatgaagaacactgaacagttttaagcctcgatgctttttaatcaccactgagcttttcctcataacatcagaatggcaagcaggcgaaaatcaacaacaccttgcatggtccttgccagtgaacaagatccagaccttgagttgatatcagatttggatgaaggtcctcctgtgcttacacctncacgggtcggttcttttgtaaaagtatgtaacctataacgt

SEQ ID NO: 75440 - DNA, 388 bp, Homo sapiens
  misc_feature (39)..(39): n is a, c, g, or t
cagataccctcaattatttacaacatacctaatatttcntcccccgtaggtgttgcgcagagatttctcaaaaaataaaagatgaagttcacccagaggtgaagtgtgttggctccgtagccctgactgccttggtgactgtatcctcagaagaatttgaagacaagtggttcagaaagatcaaagaccatttctgtccatttgaaaatcagttccatacagagatacaaatcttggcttagtgggttataaaaaacaaaaccacaaatatcttgtactgtattaattgtccttgtttacttcagacaggatccattgctaatcatggagtataaatgattatttatgttttataaaactggcttctgtctcaaatgatttctactgc

SEQ ID NO: 75441 - DNA, 539 bp, Homo sapiens
aagatcgggcacagtcagggtggtatggccatagacggataactacttctgaacaaacatcttttcaatgtgttgggaatgtcccctggctgctcaagtattttctgcctttgaatgaaagccttcgcagttgataactagcattccatgtctctgcctcttttattgggacagtttttttttttcctcctgttataggttatgggagaagatatcccagaaaaaataaaagatgaagttcacccagaggtgaagtgtgttggctccgtagccctgactgccttggtgactgtatcctcagaagaatttgaagacaagtggttcagaaagatcaaagaccatttctgtccatttgaaaatcagttccatacagagatacaaatcttggcttagtgggttataaaaaacaaaaccacaaatatcttgtactgtattaattgtccttgtttacttcagacaggatccattgctaatcatggagtataaatgattatttatgttttataaaactggcttctgtctcaaatgatttctactgc

SEQ ID NO: 75442 - DNA, 4733 bp, Homo sapiens
agggttcacaggtcagagttgactccctgaaaagtgcagccggtttgaaatgcaagatggcggcggcgtggcgctgagaggcgcggcggcccctgcaggtagtggcgcgagccggctccgcgaccagcgggcccggagactctgggctgcgggtgggaactggagcgcagagtccgcggccggcacgggaaaggagaagacagactgctgctttggacctgttggtaatgatggcctgagctaaacatctaactagaagggatacccttccatttcaaagaacagaatgctaaggaagctgtggcaagtgattggagttgtgcttcaaaaatttcagaaattcagcagtattttatctgccaacaataagctctttacttgattgcaccatgagaaagctgctaatgagacttgttgagcacaaaaatggacttgaagaaccaaaagccattgttttcaaatgaagaacactgaacagttttaagcctcgatgctttttaatcaccactgagcttttcctcataacatcagaatggcaagcaggcgaaaatcaacaacaccttgcatggtccttgccagtgaacaagatccagaccttgagttgatatcagatttggatgaaggtcctcctgtgcttacacctgtagaaaacaccagagcagagagtatctcaagtgatgaagaggttcatgaatctgtggattcagacaatcagcaaaataaaaaagttgaaggtggatatgaatgtaaatattgtacttttcaaactccagatctaaatatgtttacttttcatgtggattcggaacatcccaatgtagtgctaaattcatcctatgtttgtgtcgaatgcaattttcttaccaaaaggtatgatgcactttctgagcataatctgaaatatcacccaggagaagagaattttaagttgactatggtgaaacgtaataaccagacaatctttgaacaaacaataaatgatctgacttttgatggtagttttgttaaagaggagaatgcagagcaagcagaatctacagaagtttcttcttcgggaatatctatcagtaaaactcctatcatgaaaatgatgaaaaataaagtggaaaataaacggattgcagttcatcataactcagttgaggacgttcctgaagagaaagagaatgaaatcaaaccagaccgtgaagaaattgtagaaaatccaagttcttcagcttctgaatctaatacaagtacttccattgtaaacagaatacatccaagtactgccagcacggtagtgacaccagcagcagttcttcctggattggcacaggtgataactgctgtatctgctcagcagaattctaatttgattcccaaagtcttaatccctgttaatagcattcccacctacaatgctgcattggataacaatccccttttacttaacacctacaacaagttcccttacccaacaatgtcagaaattacagttctttctgctcaagcaaaatatacagaggaacagatcaagatatggttttcagcccaacgtttaaaacatggtgttagttggactcccgaggaagtagaggaggcaagaaggaaacaattcaatggaacagtgcatactgtacctcagaccataactgttattcctacacacatttccacagggagtaatggtttaccatctattttacagacatgccaaatagttggtcagcctggtctggtccttactcaagtggctggaacaaacaccttgccagttacagcacctatagccttgacagtggcaggcgttccaagtcaaaataatatacagaaaagtcaggtacctgctgctcagcctactgcagaaacaaagccagcaacagcagcagttccaacttctcaaagtgtcaaacatgaaactgcattggtaaaccctgattcatttggcattcgggcaaaaaagacaaaagagcaactggcagaattaaaagttagctaccttaaaaatcagtttccccatgattcagaaattatcagacttatgaaaataacaggcctgacgaaaggagagattaaaaaatggtttagtgacacaaggtacaaccagagaaattcaaagagtaatcagtgcttacatctcaacaatgattcctctaccaccattattatagactccagtgatgaaaccacggaatccccaactgttggtactgcacagcctaagcaatcctggaatccttttcctgactttactccccaaaagtttaaagagaaaactgcagagcagcttcgtgtccttcaggcaagttttctcaacagctctgtacttacagatgaagaattaaataggttaagggcacaaaccaaacttaccagaagagaaatcgatgcttggtttacagagaagaagaaatcaaaagctttaaaggaagagaaaatggaaatagatgaaagtaatgcaggtagttccaaagaagaagctggagaaacttctcctgcagatgaatctggtgcacctaagtcagggagtacaggcaagatatgtaaaaaaacacctgagcagctgcacatgcttaagagtgcatttgtccggacacagtggccatcaccagaagagtatgacaagttggccaaagaaagcgggcttgctagaacagacatagttagttggtttggggacacccgttatgcttggaagaatggaaacttgaaatggtactactactatcagagcgccaattcaagtagtatgaatggtctgtcttcccttaggaaaagagggagagggagacccaaaggacggggaagaggaagaccgcgtgggcggcctagaggaagcaaaagaattaacaactgggacaggggaccatcactcataaaatttaaaactggaactgcaatacttaaggattattacctgaagcacaagtttcttaatgagcaagaccttgatgaacttgttaacaaatcacatatgggctatgagcaggtcagagagtggtttgcagaaagacagagaagatcagaattaggtatagaattatttgaggaaaatgaggaggaagatgaagttattgatgaccaggaagaggatgaagaagaaacagatgatagtgacacttgggaacctccacgacatgtgaaacggaagctgtctaaatcagatgactgaaatctgcctaaaacgttgaaggagaatcaattcttcaactcaagatgtctgatttactgtgaatttgcccaatctttgatgacattgaaaacgttttggggcatacacactcaaaaagcaggatccaatacccaaaagaaatggaacttaatgttgtgccaaagttaaactactgcagttggtggaagttctgcaatgtaaatagaacactaattaaaaaacaacttgtaaaaatgcaatttaaattttaatacagtacatttttcttctaatatgatggagacattctgaatcttagactttctgagggggtttaatgaccactagagcttgtcctcatattcagtccagtttaatactgtatgtctagtaagatgggctatatattgcctctattctttgagatgtgattaagcttagaactttgaccaaaaattttacagtaaaaattgttagaaatgggtaaaaaaaaaaaaaaaaaaaaaccctgatttattactatgtcttatttatcagaccctgcactaagattaaaagttgtgcatgggcttatacaatttcaaatgtaaaaacagcctatttatatatgttgaaacaataagattttatggtttcactggcccttaataattggatccttcattaaacacatccatgaataccactgtttctactgttacttgttccattagaagctgatttgctttttattaaactgcaggaaattaattctgaagaaggaaaagaaactgacatggtaatttggatagggtgaagctttgaaataaatactgcaccaaaaatgtgaaaaagaatcacgtagtaaatgtatacttagtgttttcttacaatcgtggaaatcagaaatgtttatacaggtgtcagatcagaatttttaagagttatctttcagtgaaattttataacagtttcagtgaatagagaaaaaattctgaactgatcataatgagttaaaagttagcttttcacttatgaatcatgggagtgttaactgttaactcttgccgtatcaggagactgaaagttcatactaatttacaaactttgtaaagactggtgctgttcattcatattgggaagaaccctttcttttgtgaccataggaccatttttcaaaatgcgctttcttcgtagaagaaatgttcagtttaattagctttggattttaacatgtttttctgaatgaccagatgtaggcttagccagtttattttctctaatttaatggataataaatattaagctcttggttaaatgtttttcagccattgaaaatgttatgaaaaagccttgaatatgcatgctgctttcatttttataaactttttattttttaactatagctttattagtaattccaaaatgctgcaatgtagctgatttcctcactcagacagctggctttgtgggtggcttttttcatactactgttaacttttttaaaaaagaagcaatgtaaagaccgtaatgcactaagctttttttttttcttttacacgtttaaaaacttcttaaagcactctgtaatataatgattaaattgctcccttttataaac

SEQ ID NO: 75443 - DNA, 4931 bp, Homo sapiens
agggttcacaggtcagagttgactccctgaaaagtgcagccggtttgaaatgcaagatggcggcggcgtggcgctgagaggcgcggcggcccctgcaggagaagacagactgctgctttggacctgttggtaatgatggcctgagctaaacatctaactagaagggatacccttccatttcaaagaacagaatgctaaggaagctgtggcaagtgattggagttgtgcttcaaaaatttcagaaattcagcagtattttatctgccaacaataagctctttacttgattgcaccatgagaaagctgctaatgagacttgttgagcacaaaaatggacttgaagaaccaaaagccattgttttcaaatgaagaacactgaacagttttaagcctcgatgctttttaatcaccactgagcttttcctcataacatcagaatggcaagcaggcgaaaatcaacaacaccttgcatggtccttgccagtgaacaagatccagaccttgagttgatatcagatttggatgaaggtcctcctgtgcttacacctgtagaaaacaccagagcagagagtatctcaagtgatgaagaggttcatgaatctgtggattcagacaatcagcaaaataaaaaagttgaaggtggatatgaatgtaaatattgtacttttcaaactccagatctaaatatgtttacttttcatgtggattcggaacatcccaatgtagtgctaaattcatcctatgtttgtgtcgaatgcaattttcttaccaaaaggtatgatgcactttctgagcataatctgaaatatcacccaggagaagagaattttaagttgactatggtgaaacgtaataaccagacaatctttgaacaaacaataaatgatctgacttttgatggtagttttgttaaagaggagaatgcagagcaagcagaatctacagaagtttcttcttcgggaatatctatcagtaaaactcctatcatgaaaatgatgaaaaataaagtggaaaataaacggattgcagttcatcataactcagttgaggacgttcctgaagagaaagagaatgaaatcaaaccagaccgtgaagaaattgtagaaaatccaagttcttcagcttctgaatctaatacaagtacttccattgtaaacagaatacatccaagtactgccagcacggtagtgacaccagcagcagttcttcctggattggcacaggtgataactgctgtatctgctcagcagaattctaatttgattcccaaagtcttaatccctgttaatagcattcccacctacaatgctgcattggataacaatccccttttacttaacacctacaacaagttcccttacccaacaatgtcagaaattacagttctttctgctcaagcaaaatatacagaggaacagatcaagatatggttttcagcccaacgtttaaaacatggtgttagttggactcccgaggaagtagaggaggcaagaaggaaacaattcaatggaacagtgcatactgtacctcagaccataactgttattcctacacacatttccacagggagtaatggtttaccatctattttacagacatgccaaatagttggtcagcctggtctggtccttactcaagtggctggaacaaacaccttgccagttacagcacctatagccttgacagtggcaggcgttccaagtcaaaataatatacagaaaagtcaggtacctgctgctcagcctactgcagaaacaaagccagcaacagcagcagttccaacttctcaaagtgtcaaacatgaaactgcattggtaaaccctgattcatttggcattcgggcaaaaaagacaaaagagcaactggcagaattaaaagttagctaccttaaaaatcagtttccccatgattcagaaattatcagacttatgaaaataacaggcctgacgaaaggagagattaaaaaatggtttagtgacacaaggtacaaccagagaaattcaaagagtaatcagtgcttacatctcaacaatgattcctctaccaccattattatagactccagtgatgaaaccacggaatccccaactgttggtactgcacagcctaagcaatcctggaatccttttcctgactttactccccaaaagtttaaagagaaaactgcagagcagcttcgtgtccttcaggcaagttttctcaacagctctgtacttacagatgaagaattaaataggttaagggcacaaaccaaacttaccagaagagaaatcgatgcttggtttacagagaagaagaaatcaaaagctttaaaggaagagaaaatggaaatagatgaaagtaatgcaggtagttccaaagaagaagctggagaaacttctcctgcagatgaatctggtgcacctaagtcagggagtacaggcaagatatgtaaaaaaacacctgagcagctgcacatgcttaagagtgcatttgtccggacacagtggccatcaccagaagagtatgacaagttggccaaagaaagcgggcttgctagaacagacatagttagttggtttggggacacccgttatgcttggaagaatggaaacttgaaatggtactactactatcagagcgccaattcaagtagtatgaatggtctgtcttcccttaggaaaagagggagagggagacccaaaggacggggaagaggaagaccgcgtgggcggcctagaggaagcaaaagaattaacaactgggacaggggaccatcactcataaaatttaaaactggaactgcaatacttaaggattattacctgaagcacaagtttcttaatgagcaagaccttgatgaacttgttaacaaatcacatatgggctatgagcaggtcagagagtggtttgcagaaagacagagaagatcagaattaggtatagaattatttgaggaaaatgaggaggaagatgaagttattgatgaccaggaagaggatgaagaagaaacagatgatagtgacacttgggaacctccacgacatgtgaaacggaagctgtctaaatcagatgactgaaatctgcctaaaacgttgaaggagaatcaattcttcaactcaagatgtctgatttactgtgaatttgcccaatctttgatgacattgaaaacgttttggggcatacacactcaaaaagcaggatccaatacccaaaagaaatggaacttaatgttgtgccaaagttaaactactgcagttggtggaagttctgcaatgtaaatagaacactaattaaaaaacaacttgtaaaaatgcaatttaaattttaatacagtacatttttcttctaatatgatggagacattctgaatcttagactttctgagggggtttaatgaccactagagcttgtcctcatattcagtccagtttaatactgtatgtctagtaagatgggctatatattgcctctattctttgagatgtgattaagcttagaactttgaccaaaaattttacagtaaaaattgttagaaatgggtaaaaaaaaaaaaaaaaaaaaaccctgatttattactatgtcttatttatcagaccctgcactaagattaaaagttgtgcatgggcttatacaatttcaaatgtaaaaacagcctatttatatatgttgaaacaataagattttatggtttcactggcccttaataattggatccttcattaaacacatccatgaataccactgtttctactgttacttgttccattagaagctgatttgctttttattaaactgcaggaaattaattctgaagaaggaaaagaaactgacatggtaatttggatagggtgaagctttgaaataaatactgcaccaaaaatgtgaaaaagaatcacgtagtaaatgtatacttagtgttttcttacaatcgtggaaatcagaaatgtttatacaggtgtcagatcagaatttttaagagttatctttcagtgaaattttataacagtttcagtgaatagagaaaaaattctgaactgatcataatgagttaaaagttagcttttcacttatgaatcatgggagtgttaactgttaactcttgccgtatcaggagactgaaagttcatactaatttacaaactttgtaaagactggtgctgttcattcatattgggaagaaccctttcttttgtgaccataggaccatttttcaaaatgcgctttcttcgtagaagaaatgttcagtttaattagctttggattttaacatgtttttctgaatgaccagatgtaggcttagccagtttattttctctaatttaatggataataaatattaagctcttggttaaatgtttttcagccattgaaaatgttatgaaaaagccttgaatatgcatgctgctttcatttttataaactttttattttttaactatagctttattagtaattccaaaatgctgcaatgtagctgatttcctcactcagacagctggctttgtgggtggcttttttcatactactgttaacttttttaaaaaagaagcaatgtaaagaccgtaatgcactaagctttttttttttcttttacacgtttaaaaacttcttaaagcactctgtaatataatgattaaattgctcccttttataaacattgctaatgtggtctgagttttgtttgacaataattttaatgttctcaaaatttgaaatgtcaagtattagaaatgaagcctttgaatatagttgtttcccttgcaatatgttaactctgtgtagctgtatataactattaatttccctcatctcttttataggcctgataaaactcttctctgacgtttgctagcttttaaatatatttatttgacagagcaaaagaaccctcttctggttgattgtgaccttgaatacaaaataaaagtagtgattagtagtttacagtg

SEQ ID NO: 75444 - DNA, 2669 bp, Homo sapiens
cacgcgtcgcggacgcgtgggtcgacccacgcgtcaaatcaaaagctttaaaggaagagaaaatggaaatagatgaaagtaatgcaggtagttccaaagaagaagctggagaaacttctcctgcagatgaatctggtgcacctaagtcagggagtacaggcaagatatgtaaaaaaacacctgagcagctgcacatgcttaagagtgcatttgtccggacacagtggccatcaccagaagagtatgacaagttggccaaagaaagcgggcttgctagaacagacatagttagttggtttggggacacccgttatgcttggaagaatggaaacttgaaatggtactactactatcagagcgccaattcaagtagtatgaatggtctgtcttcccttaggaaaagagggagagggagacccaaaggacggggaagaggaagaccgcgtgggcggcctagaggaagcaaaagaattaacaactgggacaggggaccatcactcataaaatttaaaactggaactgcaatacttaaggattattacctgaagcacaagtttcttaatgagcaagaccttgatgaacttgttaacaaatcacatatgggctatgagcaggtcagagagtggtttgcagaaagacagagaagatcagaattaggtatagaattatttgaggaaaatgaggaggaagatgaagttattgatgaccaggaagaggatgaagaagaaacagatgatagtgacacttgggaacctccacgacatgtgaaacggaagctgtctaaatcagatgactgaaatctgcctaaaacgttgaaggagaatcaattcttcaactcaagatgtctgatttactgtgaatttgcccaatctttgatgacattgaaaacgttttggggcatacacactcaaaaagcaggatccaatacccaaaagaaatggaacttaatgttgtgccaaagttaaactactgcagttggtggaagttctgcaatgtaaatagaacactaattaaaaaacaacttgtaaaaatgcaatttaaattttaatacagtacatttttcttctaatatgatggagacattctgaatcttagactttctgagggggtttaatgaccactagagcttgtcctcatattcagtccagtttaatactgtatgtctagtaagatgggctatatattgcctctattctttgagatgtgattaagcttagaactttgaccaaaaattttacagtaaaaattgttagaaatgggtaaaaaaaaaaaaaaaaaaaaaccctgatttattactatgtcttatttatcagaccctgcactaagattaaaagttgtgcatgggcttatacaatttcaaatgtaaaaacagcctatttatatatgttgaaacaataagattttatggtttcactggcccttaataattggatccttcattaaacacatccatgaataccactgtttctactgttacttgttccattagaagctgatttgctttttattaaactgcaggaaattaattctgaagaaggaaaagaaactgacatggtaatttggatagggtgaagctttgaaataaatactgcaccaaaaatgtgaaaaagaatcacgtagtaaatgtatacttagtgttttcttacaatcgtggaaatcagaaatgtttatacaggtgtcagatcagaatttttaagagttatctttcagtgaaattttataacagtttcagtgaatagagaaaaaattctgaactgatcataatgagttaaaagttagcttttcacttatgaatcatgggagtgttaactgttaactcttgccgtatcaggagactgaaagttcatactaatttacaaactttgtaaagactggtgctgttcattcatattgggaagaaccctttcttttgtgaccataggaccatttttcaaaatgcgctttcttcgtagaagaaatgttcagtttaattagctttggattttaacatgtttttctgaatgaccagatgtaggcttagccagtttattttctctaatttaatggataataaatattaagctcttggttaaatgtttttcagccattgaaaatgttatgaaaaagccttgaatatgcatgctgctttcatttttataaactttttattttttaactatagctttattagtaattccaaaatgctgcaatgtagctgatttcctcactcagacagctggctttgtgggtggcttttttcatactactgttaacttttttaaaaaagaagcaatgtaaagaccgtaatgcactaagctttttttttttcttttacacgtttaaaaacttcttaaagcactctgtaatataatgattaaattgctcccttttataaacattgctaatgtggtctgagttttgtttgacaataattttaatgttctcaaaatttgaaatgtcaagtattagaaatgaagcctttgaatatagttgtttcccttgcaatatgttaactctgtgtagctgtatataactattaatttccctcatctcttttataggcctgataaaactcttctctgacgtttgctagcttttaaatatatttatttgacagagcaaaagaaccctcttctggttgattgtgaccttgaatacaaaataaaagtagtgattagtagtttacagtg

SEQ ID NO: 75445 - DNA, 1354 bp, Homo sapiens
agggttcacaggtcagagttgactccctgaaaagtgcagccggtttgaaatgcaagatggcggcggcgtggcgctgagaggcgcggcggcccctgcaggagaagacagactgctgctttggacctgttggtaatgatggcctgagctaaacatctaactagaagggatacccttccatttcaaagaacagaatgctaaggaagctgtggcaatggttttatgaagaaacagaaagcagtgatgatgttgaagtgctgactctcaagaaattcaaaggagacctggcctacagacgacaagagtatcagaaagcactgcaggagtattccagtatctctgaaaaattgtcatcaaccaattttgccatgaaaagggatgtccaggaaggtcaggctcggtgtctggctcacctgggtaggcatatggaggcgctggagattgctgcaaacttggaaaataaagcaaccaacacagaccatttaaccacggtactctacctccagcttgctatttgttcaagtttgcagaacttggagaaaacaattttctgcctgcagaaactgatttctttgcatccttttaatccttggaactggggcaaattggcagaggcttacctgaatctggggccagctctttcagcagcacttgcgtcatctcagaaacagcacagtttcacctcaagtgacaaaactatcaaatccttctttccacactcaggaaaagactgtcttttgtgttttcctgaaaccttgcctgagagctctttattttctgtggaagcgaatagcagtaatagccagaaaaatgagaaagctctgacaaatatccaaaactgtatggcagaaaagagagaaacagtgttgatagagactcagctgaaagcatgtgcctcttttatacgaaccaggcttctgcttcagtttacccaacctcagcaaacatcgtttgctttggagaggaacttaaggactcagcaggaaattgaagataaaatgaaagggttcagcttcaaagaagacactttgctgttgatagctgaggttatgggagaagatatcccagaaaaaataaaagatgaagttcacccagaggtgaagtgtgttggctccgtagccctgactgccttggtgactgtatcctcagaagaatttgaagacaagtggttcagaaagatcaaagaccatttctgtccatttgaaaatcagttccatacagagatacaaatcttggcttagtgggttataaaaaacaaaaccacaaatatcttgtactgtattaattgtccttgtttacttcagacaggatccattgctaatcatggagtataaatgattatttatgttttataaaa

SEQ ID NO: 75446 - DNA, 1103 bp, Homo sapiens
ccctgtagagatgctaccgcagggataccctgagcctacagactacaagagtatcagaaagcactgcaggagtattccagtatctctgaaaaattgtcatcaaccaattttgccatgaaaagggatgtccaggaaggtcaggctcggtgtctggctcacctgggtaggcatatggaggcgctggagattgctgcaaacttggaaaataaagcaaccaacacagaccatttaaccacggtactctacctccagcttgctatttgttcaagtttgcagaacttggagaaaacaattttctgcctgcagaaactgatttctttgcatccttttaatccttggaactggggcaaattggcagaggcttacctgaatctggggccagctctttcagcagcacttgcgtcatctcagaaacagcacagtttcacctcaagtgacaaaactatcaaatccttctttccacactcaggaaaagactgtcttttgtgttttcctgaaaccttgcctgagagctctttattttctgtggaagcgaatagcagtaatagccagaaaaatgagaaagctctgacaaatatccaaaactgtatggcagaaaagagagaaacagtgttgatagagactcagctgaaagcatgtgcctcttttatacgaaccaggcttctgcttcagtttacccaacctcagcaaacatcgtttgctttggagaggaacttaaggactcagcaggaaattgaagataaaatgaaagggttcagcttcaaagaagacactttgctgttgatagctgaggttatgggagaagatatcccagaaaaaataaaagatgaagttcacccagaggtgaagtgtgttggctccgtagccctgactgccttggtgactgtatcctcagaagaatttgaagacaagtggttcagaaagatcaaagaccatttctgtccatttgaaaatcagttccatacagagatacaaatcttggcttagtgggttataaaaaacaaaaccacaaatatcttgtactgtattaattgtccttgtttacttcagacaggatccattgctaatcatggagtataaatgattatttatgttttataaaa

SEQ ID NO: 75447 - DNA, 2081 bp, Homo sapiens
agggttcacaggtcagagttgactccctgaaaagtgcagccggtttgaaatgcaagatggcggcggcgtggcgctgagaggcgcggcggcccctgcaggagaagacagactgctgctttggacctgttggtaatgatggcctgagctaaacatctaactagaagggatacccttccatttcaaagaacagaatgctaaggaagctgtggcaactgcctaaaacgttgaaggagaatcaattcttcaactcaagatgtctgatttactgtgaatttgcccaatctttgatgacattgaaaacgttttggggcatacacactcaaaaagcaggatccaatacccaaaagaaatggaacttaatgttgtgccaaagttaaactactgcagttggtggaagttctgcaatgtaaatagaacactaattaaaaaacaacttgtaaaaatgcaatttaaattttaatacagtacatttttcttctaatatgatggagacattctgaatcttagactttctgagggggtttaatgaccactagagcttgtcctcatattcagtccagtttaatactgtatgtctagtaagatgggctatatattgcctctattctttgagatgtgattaagcttagaactttgaccaaaaattttacagtaaaaattgttagaaatgggtaaaaaaaaaaaaaaaaaaaaaccctgatttattactatgtcttatttatcagaccctgcactaagattaaaagttgtgcatgggcttatacaatttcaaatgtaaaaacagcctatttatatatgttgaaacaataagattttatggtttcactggcccttaataattggatccttcattaaacacatccatgaataccactgtttctactgttacttgttccattagaagctgatttgctttttattaaactgcaggaaattaattctgaagaaggaaaagaaactgacatggtaatttggatagggtgaagctttgaaataaatactgcaccaaaaatgtgaaaaagaatcacgtagtaaatgtatacttagtgttttcttacaatcgtggaaatcagaaatgtttatacaggtgtcagatcagaatttttaagagttatctttcagtgaaattttataacagtttcagtgaatagagaaaaaattctgaactgatcataatgagttaaaagttagcttttcacttatgaatcatgggagtgttaactgttaactcttgccgtatcaggagactgaaagttcatactaatttacaaactttgtaaagactggtgctgttcattcatattgggaagaaccctttcttttgtgaccataggaccatttttcaaaatgcgctttcttcgtagaagaaatgttcagtttaattagctttggattttaacatgtttttctgaatgaccagatgtaggcttagccagtttattttctctaatttaatggataataaatattaagctcttggttaaatgtttttcagccattgaaaatgttatgaaaaagccttgaatatgcatgctgctttcatttttataaactttttattttttaactatagctttattagtaattccaaaatgctgcaatgtagctgatttcctcactcagacagctggctttgtgggtggcttttttcatactactgttaacttttttaaaaaagaagcaatgtaaagaccgtaatgcactaagctttttttttttcttttacacgtttaaaaacttcttaaagcactctgtaatataatgattaaattgctcccttttataaacattgctaatgtggtctgagttttgtttgacaataattttaatgttctcaaaatttgaaatgtcaagtattagaaatgaagcctttgaatatagttgtttcccttgcaatatgttaactctgtgtagctgtatataactattaatttccctcatctcttttataggcctgataaaactcttctctgacgtttgctagcttttaaatatatttatttgacagagcaaaagaaccctcttctggttgattgtgaccttgaatacaaaataaaagtagtgattagtagtttacagtg

SEQ ID NO: 75448 - DNA, 1293 bp, Homo sapiens
cgcttcctcgttgcccccgccgcgggcgcgagatggattccgggtgctggttgttcggcggcgagttcgaggactcggtgttcgaggagaggccggagcggcggtcaggaccgcccgcgtcctactgcgccaagctctgcgagccgcagtggttttatgaagaaacagaaagcagtgatgatgttgaagtgctgactctcaagaaattcaaaggagacctggcctacagacgacaagagtatcagaaagcactgcaggagtattccagtatctctgaaaaattgtcatcaaccaattttgccatgaaaagggatgtccaggaaggtcaggctcggtgtctggctcacctgggtaggcatatggaggcgctggagattgctgcaaacttggaaaataaagcaaccaacacagaccatttaaccacggtactctacctccagcttgctatttgttcaagtttgcagaacttggagaaaacaattttctgcctgcagaaactgatttctttgcatccttttaatccttggaactggggcaaattggcagaggcttacctgaatctggggccagctctttcagcagcacttgcgtcatctcagaaacagcacagtttcacctcaagtgacaaaactatcaaatccttctttccacactcaggaaaagactgtcttttgtgttttcctgaaaccttgcctgagagctctttattttctgtggaagcgaatagcagtaatagccagaaaaatgagaaagctctgacaaatatccaaaactgtatggcagaaaagagagaaacagtgttgatagagactcagctgaaagcatgtgcctcttttatacgaaccaggcttctgcttcagtttacccaacctcagcaaacatcgtttgctttggagaggaacttaaggactcagcaggaaattgaagataaaatgaaagggttcagcttcaaagaagacactttgctgttgatagctgaggtgagtgtatccctcgggtttatgtgaaacgaagcatcatagatattttccctggctctgatagcattttttataaagcagggccaaatttaatctactgaaggacttgtctccctcctctgtgtgccttttgatcactcagcaatcaccaaggcggcctcttgatcggcattcccctgcagcgtgcgggaccgcaggggctgtgtttcatgtacttgtcagtgcttgttagcacctgcctgcctgaacatcatcaatgcccaataattgtttgtttcagtgctgaataaatgaatgaatgaatgcttaatat

SEQ ID NO: 75449 - DNA, 3955 bp, Homo sapiens
agggttcacaggtcagagttgactccctgaaaagtgcagccggtttgaaatgcaagatggcggcggcgtggcgctgagaggcgcggcggcccctgcaggagaagacagactgctgctttggacctgttggtaatgatggcctgagctaaacatctaactagaagggatacccttccatttcaaagaacagaatgctaaggaagctgtggcaagtgattggagttgtgcttcaaaaatttcagaaattcagcagtattttatctgccaacaataagctctttacttgattgcaccatgagaaagctgctaatgagacttgttgagcacaaaaatggacttgaagaaccaaaagccattgttttcaaatgaagaacactgaacagttttaagcctcgatgctttttaatcaccactgagcttttcctcataacatcagaatggcaagcaggcgaaaatcaacaacaccttgcatggtccttgccagtgaacaagatccagaccttgagttgatatcagatttggatgaaggtcctcctgtgcttacacctgtagaaaacaccagagcagagagtatctcaagtgatgaagaggttcatgaatctgtggattcagacaatcagcaaaataaaaaagttgaaggtggatatgaatgtaaatattgtacttttcaaactccagatctaaatatgtttacttttcatgtggattcggaacatcccaatgtagtgctaaattcatcctatgtttgtgtcgaatgcaattttcttaccaaaaggtatgatgcactttctgagcataatctgaaatatcacccaggagaagagaattttaagttgactatggtgaaacgtaataaccagacaatctttgaacaaacaataaatgatctgacttttgatggtagttttgttaaagaggagaatgcagagcaagcagaatctacagaagtttcttcttcgggaatatctatcagtaaaactcctatcatgaaaatgatgaaaaataaagtggaaaataaacggattgcagttcatcataactcagttgaggacgttcctgaagagaaagagaatgaaatcaaaccagaccgtgaagaaattgtagaaaatccaagttcttcagcttctgaatctaatacaagtacttccattgtaaacagaatacatccaagtactgccagcacggtagtgacaccagcagcagttcttcctggattggcacaggtgataactgctgtatctgctcagcagaattctaatttgattcccaaagtcttaatccctgttaatagcattcccacctacaatgctgcattggataacaatccccttttacttaacacctacaacaagttcccttacccaacaatgtcagaaattacagttctttctgctcaagcaaaatatacagaggaacagatcaagatatggttttcagcccaacgtttaaaacatggtgttagttggactcccgaggaagtagaggaggcaagaaggaaacaattcaatggaacagtgcatactgtacctcagaccataactgttattcctacacacatttccacagggagtaatggtttaccatctattttacagacatgccaaatagttggtcagcctggtctggtccttactcaagtggctggaacaaacaccttgccagttacagcacctatagccttgacagtggcaggcgttccaagtcaaaataatatacagaaaagtcaggtacctgctgctcagcctactgcagaaacaaagccagcaacagcagcagttccaacttctcaaagtgtcaaacatgaaactgcattggtaaaccctgattcatttggcattcgggcaaaaaagacaaaagagcaactggcagaattaaaagttagctaccttaaaaatcagtttccccatgattcagaaattatcagacttatgaaaataacaggcctgacgaaaggagagattaaaaaatggtttagtgacacaaggtacaaccagagaaattcaaagagtaatcagtgcttacatctcaacaatgattcctctaccaccattattatagactccagtgatgaaaccacggaatccccaactgttggtactgcacagcctaagcaatcctggaatccttttcctgactttactccccaaaagtttaaagagaaaactgcagagcagcttcgtgtccttcaggcaagttttctcaacagctctgtacttacagatgaagaattaaataggttaagggcacaaaccaaacttaccagaagagaaatcgatgcttggtttacagagaagaagaaatcaaaagctttaaaggaagagaaaatggaaatagatgaaagtaatgcaggtagttccaaagaagaagctggagaaacttctcctgcagatgaatctggtgcacctaagtcagggagtacaggcaagatatgtaaaaaaacacctgagcagctgcacatgcttaagagtgcatttgtccggacacagtggccatcaccagaagagtatgacaagttggccaaagaaagcgggcttgctagaacagacatagttagttggtttggggacacccgttatgcttggaagaatggaaacttgaaatggtactactactatcagagcgccaattcaagtagtatgaatggtctgtcttcccttaggaaaagagggagagggagacccaaaggacggggaagaggaagaccgcgtgggcggcctagaggaagcaaaagaattaacaactgggacaggggaccatcactcataaaatttaaaactggaactgcaatacttaaggattattacctgaagcacaagtttcttaatgagcaagaccttgatgaacttgttaacaaatcacatatgggctatgagcaggtcagagagtggtttgcagaaagacagagaagatcagaattaggtatagaattatttgaggaaaatgaggaggaagatgaagttattgatgaccaggaagaggatgaagaagaaacagatgatagtgacacttgggaacctccacgacatgtgaaacggaagctgtctaaatcagatgactgaaatgtaagttaagaaaatttttaatctgcgtatatgttcatcaaccacatacattttgaacagtcaccttgttgtatcagtcatcttcatttttgatattttctgaagtagtttttcttttccctaataagactaggtaccactagtatagctaagagataaatgattatcatgtgtagttttattattattatgtagagtttaatgtcttaattattatttttcatatgaattgggttttttttactttgttttgaaggaaagttacccaatctctatgaagggagactggcaggcaggttgaggggattcacaaacaaatactaaagataactaaaatgtattttattgcaatgcccccttcactaaagcttcattttttgcctatttaaggaaataattcaaaaatgaaaactaaaaagaaggggaaaagtacaccaaaggaaagacttaccacagggttgaggattgtgcagttttaggaaactaggtgaaaatgggtatcttttcatcttcattgcattgctcccaaaactttactagacttttaactagagtttaaaatgctttatgtatttatgaaattactcagtatctttttagtaatttataaaattactcaatatctttttctgttaaaagtcaaaggtctgttttaggccatatataaattcatgtttgcttaggcggcatctgtctttgaaaactgtgatataaattatttctgttttagagatcaaaaggcaaataacagatttgatataaacccaattgcttaaaatatcttttcattctttggtataaaacaaacctgctaccagcactaacattgtatttgatttaaagtatatctctgtagtcttaaaaatgcaaataaatatggcttaaatttgaaa

SEQ ID NO: 75450 - DNA, 1034 bp, Homo sapiens
cgcttcctcgttgcccccgccgcgggcgcgagatggattccgggtgctggttgttcggcggcgagttcgaggactcggtgttcgaggagaggccggagcggcggtcaggaccgcccgcgtcctactgcgccaagctctgcgagccgcagtggttttatgaagaaacagaaagcagtgatgatgttgaagtgctgactctcaagaaattcaaaggagacctggcctacagacgacaagagtatcagaaagcactgcaggagtattccagtatctctgaaaaattgtcatcaaccaattttgccatgaaaagggatgtccaggaaggtcaggctcggtgtctggctcacctgggtaggcatatggaggcgctggagattgctgcaaacttggaaaataaagcaaccaacacagaccatttaaccacggtactctacctccagcttgctatttgttcaagtttgcagaacttggagaaaacaattttctgcctgcagaaactgatttctttgcatccttttaatccttggaactggggcaaattggcagaggcttacctgaatctggggccagctctttcagcagcacttgcgtcatctcagaaacagcacagtttcacctcaagtgacaaaactatcaaatccttctttccacactcaggaaaagactgtcttttgtgttttcctgaaaccttgcctgagagctctttattttctgtggaagcgaatagcagtaatagccagaaaaatgagaaagctctgacaaatatccaaaactgtatggcagaaaagagagaaacagtgttgatagagactcagctgaaagcatgtgcctcttttatacgaaccaggcttctgcttcagtttacccaacctcagcaaacatcgtttgctttggagaggaacttaaggactcagcaggaaattgaagataaaatgaaagggttcagcttcaaagaagacactatagcgtaggtgatacgtcgcaggttatggacatgacatatcccagtagatcatagtaacagtgacatatgc

SEQ ID NO: 75451 - DNA, 3978 bp, Homo sapiens
agggttcacaggtcagagttgactccctgaaaagtgcagccggtttgaaatgcaagatggcggcggcgtggcgctgagaggcgcggcggcccctgcaggagaagacagactgctgctttggacctgttggtaatgatggcctgagctaaacatctaactagaagggatacccttccatttcaaagaacagaatgctaaggaagctgtggcaagtgattggagttgtgcttcaaaaatttcagaaattcagcagtattttatctgccaacaataagctctttacttgattgcaccatgagaaagctgctaatgagacttgttgagcacaaaaatggacttgaagaaccaaaagccattgttttcaaatgaagaacactgaacagttttaagcctcgatgctttttaatcaccactgagcttttcctcataacatcagaatggcaagcaggcgaaaatcaacaacaccttgcatggtccttgccagtgaacaagatccagaccttgagttgatatcagatttggatgaaggtcctcctgtgcttacacctgtagaaaacaccagagcagagagtatctcaagtgatgaagaggttcatgaatctgtggattcagacaatcagcaaaataaaaaagttgaaggtggatatgaatgtaaatattgtacttttcaaactccagatctaaatatgtttacttttcatgtggattcggaacatcccaatgtagtgctaaattcatcctatgtttgtgtcgaatgcaattttcttaccaaaaggtatgatgcactttctgagcataatctgaaatatcacccaggagaagagaattttaagttgactatggtgaaacgtaataaccagacaatctttgaacaaacaataaatgatctgacttttgatggtagttttgttaaagaggagaatgcagagcaagcagaatctacagaagtttcttcttcgggaatatctatcagtaaaactcctatcatgaaaatgatgaaaaataaagtggaaaataaacggattgcagttcatcataactcagttgaggacgttcctgaagagaaagagaatgaaatcaaaccagaccgtgaagaaattgtagaaaatccaagttcttcagcttctgaatctaatacaagtacttccattgtaaacagaatacatccaagtactgccagcacggtagtgacaccagcagcagttcttcctggattggcacaggtgataactgctgtatctgctcagcagaattctaatttgattcccaaagtcttaatccctgttaatagcattcccacctacaatgctgcattggataacaatccccttttacttaacacctacaacaagttcccttacccaacaatgtcagaaattacagttctttctgctcaagcaaaatatacagaggaacagatcaagatatggttttcagcccaacgtttaaaacatggtgttagttggactcccgaggaagtagaggaggcaagaaggaaacaattcaatggaacagtgcatactgtacctcagaccataactgttattcctacacacatttccacagggagtaatggtttaccatctattttacagacatgccaaatagttggtcagcctggtctggtccttactcaagtggctggaacaaacaccttgccagttacagcacctatagccttgacagtggcaggcgttccaagtcaaaataatatacagaaaagtcaggtacctgctgctcagcctactgcagaaacaaagccagcaacagcagcagttccaacttctcaaagtgtcaaacatgaaactgcattggtaaaccctgattcatttggcattcgggcaaaaaagacaaaagagcaactggcagaattaaaagttagctaccttaaaaatcagtttccccatgattcagaaattatcagacttatgaaaataacaggcctgacgaaaggagagattaaaaaatggtttagtgacacaaggtacaaccagagaaattcaaagagtaatcagtgcttacatctcaacaatgattcctctaccaccattattatagactccagtgatgaaaccacggaatccccaactgttggtactgcacagcctaagcaatcctggaatccttttcctgactttactccccaaaagtttaaagagaaaactgcagagcagcttcgtgtccttcaggcaagttttctcaacagctctgtacttacagatgaagaattaaataggttaagggcacaaaccaaacttaccagaagagaaatcgatgcttggtttacagagaagaagaaatcaaaagctttaaaggaagagaaaatggaaatagatgaaagtaatgcaggtagttccaaagaagaagctggagaaacttctcctgcagatgaatctggtgcacctaagtcagggagtacaggcaagatatgtaaaaaaacacctgagcagctgcacatgcttaagagtgcatttgtccggacacagtggccatcaccagaagagtatgacaagttggccaaagaaagcgggcttgctagaacagacatagttagttggtttggggacacccgttatgcttggaagaatggaaacttgaaatggtactactactatcagagcgccaattcaagtagtatgaatggtctgtcttcccttaggaaaagagggagagggagacccaaaggacggggaagaggaagaccgcgtgggcggcctagaggaagcaaaagaattaacaactgggacaggggaccatcactcataaaatttaaaactggaactgcaatacttaaggattattacctgaagcacaagtttcttaatgagcaagaccttgatgaacttgttaacaaatcacatatgggctatgagcaggtcagagagtggtttgcagaaagacagagaagatcagaattaggtatagaattatttgaggaaaatgaggaggaagatgaagttattgatgaccaggaagaggatgaagaagaaacagatgatagtgacacttgggaacctccacgacatgtgaaacggaagctgtctaaatcagatgactgaaatgtaagttaagaaaatttttaatctgcgtatatgttcatcaaccacatacattttgaacagtcaccttgttgtatcagtcatcttcatttttgatattttctgaagtagtttttcttttccctaataagactaggtaccactagtatagctaagagataaatgattatcatgtgtagttttattattattatgtagagtttaatgtcttaattattatttttcatatgaattgggttttttttactttgttttgaaggaaagttacccaatctctatgaagggagactggcaggcaggttgaggggattcacaaacaaatactaaagataactaaaatgtattttattgcaatgcccccttcactaaagcttcattttttgcctatttaaggaaataattcaaaaatgaaaactaaaaagaaggggaaaagtacaccaaaggaaagacttaccacagggttgaggattgtgcagttttaggaaactaggtgaaaatgggtatcttttcatcttcattgcattgctcccaaaactttactagacttttaactagagtttaaaatgctttatgtatttatgaaattactcagtatctttttagtaatttataaaattactcaatatctttttctgttaaaagtcaaaggtctgttttaggccatatataaattcatgtttgcttaggcggcatctgtctttgaaaactgtgatataaattatttctgttttagagatcaaaaggcaaataacagatttgatataaacccaattgcttaaaatatcttttcattctttggtataaaacaaacctgctaccagcactaacattgtatttgatttaaagtatatctctgtagtcttaaaaatgcaaataaatatggcttaaatttgaaaaaaaaaataaataaaaactcgaa

SEQ ID NO: 75452 - DNA, 412 bp, Homo sapiens
gtttaatcaattatattatgggaaattgcttctgaatatgaggtggaaaagcatagctcactctgtaataggctattttcatgatttcaagtggttttatgaagaaacagaaagcagtgatgatgttgaagtgctgactctcaagaaattcaaaggagacctggcctacagacgacaagagtatcaggtagaattcaacatatggtgcttgaagtgggctcttgttttatcagttatggcatatgtaaataacagtgtaccaagttagtgtggtgtttatgaagatgagtttaatcttttgtgatgtgtgtttataatctgaggctcccaagtttccgttcttttctgcttggctctgtatgatttgtttgttttctgtaactccaacaaaaggatctctttggggtccttg

SEQ ID NO: 75453 - DNA, 596 bp, Homo sapiens
tccaagtcggaagctttagggattgaaatgatagttctagtgagggtgggtacctgctttttaacctggtgggacttgcagccgactcaatacctgggctttctgaacatttcctcgcggctttcctttatctggaagcgttgggacttttcgccacgcattgagacttttcggtttttcaggcttctgcttcagtttacccaacctcagcaaacatcgtttgctttggagaggaacttaaggactcagcaggaaattgaagataaaatgaaagggttcagcttcaaagaagacactttgctgttgatagctgaggtgagtgtatccctcgggtttatgtgaaacgaagcatcatagatattttccctggctctgatagcattttttataaagcagggccaaatttaatctactgaaggacttgtctccctcctctgtgtgccttttgatcactcagcaatcaccaaggcggcctcttgatcggcattcccctgcagcgtgcgggaccgcaggggctgtgtttcatgtacttgtcagtgcttgttagcacctgcctgcctgaacatcatcaatgcccaataattgtttgtttcagt

SEQ ID NO: 75454 - DNA, 1356 bp, Homo sapiens
agggttcacaggtcagagttgactccctgaaaagtgcagccggtttgaaatgcaagatggcggcggcgtggcgctgagaggcgcggcggcccctgcaggagaagacagactgctgctttggacctgttggtaatgatggcctgagctaaacatctaactagaagggatacccttccatttcaaagaacagaatgctaaggaagctgtggcaatggttttatgaagaaacagaaagcagtgatgatgttgaagtgctgactctcaagaaattcaaaggagacctggcctacagacgacaagagtatcagaaagcactgcaggagtattccagtatctctgaaaaattgtcatcaaccaattttgccatgaaaagggatgtccaggaaggtcaggctcggtgtctggctcacctgggtaggcatatggaggcgctggagattgctgcaaacttggaaaataaagcaaccaacacagaccatttaaccacggtactctacctccagcttgctatttgttcaagtttgcagaacttggagaaaacaattttctgcctgcagaaactgatttctttgcatccttttaatccttggaactggggcaaattggcagaggcttacctgaatctggggccagctctttcagcagcacttgcgtcatctcagaaacagcacagtttcacctcaagtgacaaaactatcaaatccttctttccacactcaggaaaagactgtcttttgtgttttcctgaaaccttgcctgagagctctttattttctgtggaagcgaatagcagtaatagccagaaaaatgagaaagctctgacaaatatccaaaactgtatggcagaaaagagagaaacagtgttgatagagactcagctgaaagcatgtgcctcttttatacgaaccaggcttctgcttcagtttacccaacctcagcaaacatcgtttgctttggagaggaacttaaggactcagcaggaaattgaagataaaatgaaagggttcagcttcaaagaagacactttgctgttgatagctgaggtgagtgtatccctcgggtttatgtgaaacgaagcatcatagatattttccctggctctgatagcattttttataaagcagggccaaatttaatctactgaaggacttgtctccctcctctgtgtgccttttgatcactcagcaatcaccaaggcggcctcttgatcggcattcccctgcagcgtgcgggaccgcaggggctgtgtttcatgtacttgtcagtgcttgttagcacctgcctgcctgaacatcatcaatgcccaataattgtttgtttcagtgctgaataaatgaatgaatgaatgcttaatat

SEQ ID NO: 75455 - DNA, 4781 bp, Homo sapiens
gcctaagcgacaacgcgagactccgtctcaaaaaaaaaaaaaaaatcagacttccacttgaagcaattgcatcttttaggattaatgtggctcagcggagctctgctgtgcttttaggattactgtggctcagcggagctctgcacaaagggtccgcgactgggatgggggtggggagtgaacgtcaaggggcccaggagcgctcgagcgtccaaggcccggcgtgtggagcagctggagggagaagacagactgctgctttggacctgttggtaatgatggcctgagctaaacatctaactagaagggatacccttccatttcaaagaacagaatgctaaggaagctgtggcaagtgattggagttgtgcttcaaaaatttcagaaattcagcagtattttatctgccaacaataagctctttacttgattgcaccatgagaaagctgctaatgagacttgttgagcacaaaaatggacttgaagaaccaaaagccattgttttcaaatgaagaacactgaacagttttaagcctcgatgctttttaatcaccactgagcttttcctcataacatcagaatggcaagcaggcgaaaatcaacaacaccttgcatggtccttgccagtgaacaagatccagaccttgagttgatatcagatttggatgaaggtcctcctgtgcttacacctgtagaaaacaccagagcagagagtatctcaagtgatgaagaggttcatgaatctgtggattcagacaatcagcaaaataaaaaagttgaaggtggatatgaatgtaaatattgtacttttcaaactccagatctaaatatgtttacttttcatgtggattcggaacatcccaatgtagtgctaaattcatcctatgtttgtgtcgaatgcaattttcttaccaaaaggtatgatgcactttctgagcataatctgaaatatcacccaggagaagagaattttaagttgactatggtgaaacgtaataaccagacaatctttgaacaaacaataaatgatctgacttttgatggtagttttgttaaagaggagaatgcagagcaagcagaatctacagaagtttcttcttcgggaatatctatcagtaaaactcctatcatgaaaatgatgaaaaataaagtggaaaataaacggattgcagttcatcataactcagttgaggacgttcctgaagagaaagagaatgaaatcaaaccagaccgtgaagaaattgtagaaaatccaagttcttcagcttctgaatctaatacaagtacttccattgtaaacagaatacatccaagtactgccagcacggtagtgacaccagcagcagttcttcctggattggcacaggtgataactgctgtatctgctcagcagaattctaatttgattcccaaagtcttaatccctgttaatagcattcccacctacaatgctgcattggataacaatccccttttacttaacacctacaacaagttcccttacccaacaatgtcagaaattacagttctttctgctcaagcaaaatatacagaggaacagatcaagatatggttttcagcccaacgtttaaaacatggtgttagttggactcccgaggaagtagaggaggcaagaaggaaacaattcaatggaacagtgcatactgtacctcagaccataactgttattcctacacacatttccacagggagtaatggtttaccatctattttacagacatgccaaatagttggtcagcctggtctggtccttactcaagtggctggaacaaacaccttgccagttacagcacctatagccttgacagtggcaggcgttccaagtcaaaataatatacagaaaagtcaggtacctgctgctcagcctactgcagaaacaaagccagcaacagcagcagttccaacttctcaaagtgtcaaacatgaaactgcattggtaaaccctgattcatttggcattcgggcaaaaaagacaaaagagcaactggcagaattaaaagttagctaccttaaaaatcagtttccccatgattcagaaattatcagacttatgaaaataacaggcctgacgaaaggagagattaaaaaatggtttagtgacacaaggtacaaccagagaaattcaaagagtaatcagtgcttacatctcaacaatgattcctctaccaccattattatagactccagtgatgaaaccacggaatccccaactgttggtactgcacagcctaagcaatcctggaatccttttcctgactttactccccaaaagtttaaagagaaaactgcagagcagcttcgtgtccttcaggcaagttttctcaacagctctgtacttacagatgaagaattaaataggttaagggcacaaaccaaacttaccagaagagaaatcgatgcttggtttacagagaagaagaaatcaaaagctttaaaggaagagaaaatggaaatagatgaaagtaatgcaggtagttccaaagaagaagctggagaaacttctcctgcagatgaatctggtgcacctaagtcagggagtacaggcaagatatgtaaaaaaacacctgagcagctgcacatgcttaagagtgcatttgtccggacacagtggccatcaccagaagagtatgacaagttggccaaagaaagcgggcttgctagaacagacatagttagttggtttggggacacccgttatgcttggaagaatggaaacttgaaatggtactactactatcagagcgccaattcaagtagtatgaatggtctgtcttcccttaggaaaagagggagagggagacccaaaggacggggaagaggaagaccgcgtgggcggcctagaggaagcaaaagaattaacaactgggacaggggaccatcactcataaaatttaaaactggaactgcaatacttaaggattattacctgaagcacaagtttcttaatgagcaagaccttgatgaacttgttaacaaatcacatatgggctatgagcaggtcagagagtggtttgcagaaagacagagaagatcagaattaggtatagaattatttgaggaaaatgaggaggaagatgaagttattgatgaccaggaagaggatgaagaagaaacagatgatagtgacacttgggaacctccacgacatgtgaaacggaagctgtctaaatcagatgactgaaatctgcctaaaacgttgaaggagaatcaattcttcaactcaagatgtctgatttactgtgaatttgcccaatctttgatgacattgaaaacgttttggggcatacacactcaaaaagcaggatccaatacccaaaagaaatggaacttaatgttgtgccaaagttaaactactgcagttggtggaagttctgcaatgtaaatagaacactaattaaaaaacaacttgtaaaaatgcaatttaaattttaatacagtacatttttcttctaatatgatggagacattctgaatcttagactttctgagggggtttaatgaccactagagcttgtcctcatattcagtccagtttaatactgtatgtctagtaagatgggctatatattgcctctattctttgagatgtgattaagcttagaactttgaccaaaaattttacagtaaaaattgttagaaatgggtaaaaaaaaaaaaaaaaaaaaaccctgatttattactatgtcttatttatcagaccctgcactaagattaaaagttgtgcatgggcttatacaatttcaaatgtaaaaacagcctatttatatatgttgaaacaataagattttatggtttcactggcccttaataattggatccttcattaaacacatccatgaataccactgtttctactgttacttgttccattagaagctgatttgctttttattaaactgcaggaaattaattctgaagaaggaaaagaaactgacatggtaatttggatagggtgaagctttgaaataaatactgcaccaaaaatgtgaaaaagaatcacgtagtaaatgtatacttagtgttttcttacaatcgtggaaatcagaaatgtttatacaggtgtcagatcagaatttttaagagttatctttcagtgaaattttataacagtttcagtgaatagagaaaaaattctgaactgatcataatgagttaaaagttagcttttcacttatgaatcatgggagtgttaactgttaactcttgccgtatcaggagactgaaagttcatactaatttacaaactttgtaaagactggtgctgttcattcatattgggaagaaccctttcttttgtgaccataggaccatttttcaaaatgcgctttcttcgtagaagaaatgttcagtttaattagctttggattttaacatgtttttctgaatgaccagatgtaggcttagccagtttattttctctaatttaatggataataaatattaagctcttggttaaatgtttttcagccattgaaaatgttatgaaaaagccttgaatatgcatgctgctttcatttttataaactttttattttttaactatagctttattagtaattccaaaatgctgcaatgtagctgatttcctcactcagacagctggctttgtgggtggcttttttcatactactgttaacttttttaaaaaagaagcaatgtaaagaccgtaatgcactaagctttttttttttcttttacacgtttaaaaacttcttaaagcactctgtaatataatgattaaattgctcccttttataaac

SEQ ID NO: 75456 - DNA, 4509 bp, Homo sapiens
  misc_feature (24)..(24): n is a, c, g, or t
  misc_feature (26)..(28): n is a, c, g, or t
ttaaggccaacgaggccacttttnannntgtaatttcctttagggattcattttaaaacattttaaaatttattttaatgtaggtgattggagttgtgcttcaaaaatttcagaaattcagcagtattttatctgccaacaataagctctttacttgattgcaccatgagaaagctgctaatgagacttgttgagcacaaaaatggacttgaagaaccaaaagccattgttttcaaatgaagaacactgaacagttttaagcctcgatgctttttaatcaccactgagcttttcctcataacatcagaatggcaagcaggcgaaaatcaacaacaccttgcatggtccttgccagtgaacaagatccagaccttgagttgatatcagatttggatgaaggtcctcctgtgcttacacctgtagaaaacaccagagcagagagtatctcaagtgatgaagaggttcatgaatctgtggattcagacaatcagcaaaataaaaaagttgaaggtggatatgaatgtaaatattgtacttttcaaactccagatctaaatatgtttacttttcatgtggattcggaacatcccaatgtagtgctaaattcatcctatgtttgtgtcgaatgcaattttcttaccaaaaggtatgatgcactttctgagcataatctgaaatatcacccaggagaagagaattttaagttgactatggtgaaacgtaataaccagacaatctttgaacaaacaataaatgatctgacttttgatggtagttttgttaaagaggagaatgcagagcaagcagaatctacagaagtttcttcttcgggaatatctatcagtaaaactcctatcatgaaaatgatgaaaaataaagtggaaaataaacggattgcagttcatcataactcagttgaggacgttcctgaagagaaagagaatgaaatcaaaccagaccgtgaagaaattgtagaaaatccaagttcttcagcttctgaatctaatacaagtacttccattgtaaacagaatacatccaagtactgccagcacggtagtgacaccagcagcagttcttcctggattggcacaggtgataactgctgtatctgctcagcagaattctaatttgattcccaaagtcttaatccctgttaatagcattcccacctacaatgctgcattggataacaatccccttttacttaacacctacaacaagttcccttacccaacaatgtcagaaattacagttctttctgctcaagcaaaatatacagaggaacagatcaagatatggttttcagcccaacgtttaaaacatggtgttagttggactcccgaggaagtagaggaggcaagaaggaaacaattcaatggaacagtgcatactgtacctcagaccataactgttattcctacacacatttccacagggagtaatggtttaccatctattttacagacatgccaaatagttggtcagcctggtctggtccttactcaagtggctggaacaaacaccttgccagttacagcacctatagccttgacagtggcaggcgttccaagtcaaaataatatacagaaaagtcaggtacctgctgctcagcctactgcagaaacaaagccagcaacagcagcagttccaacttctcaaagtgtcaaacatgaaactgcattggtaaaccctgattcatttggcattcgggcaaaaaagacaaaagagcaactggcagaattaaaagttagctaccttaaaaatcagtttccccatgattcagaaattatcagacttatgaaaataacaggcctgacgaaaggagagattaaaaaatggtttagtgacacaaggtacaaccagagaaattcaaagagtaatcagtgcttacatctcaacaatgattcctctaccaccattattatagactccagtgatgaaaccacggaatccccaactgttggtactgcacagcctaagcaatcctggaatccttttcctgactttactccccaaaagtttaaagagaaaactgcagagcagcttcgtgtccttcaggcaagttttctcaacagctctgtacttacagatgaagaattaaataggttaagggcacaaaccaaacttaccagaagagaaatcgatgcttggtttacagagaagaagaaatcaaaagctttaaaggaagagaaaatggaaatagatgaaagtaatgcaggtagttccaaagaagaagctggagaaacttctcctgcagatgaatctggtgcacctaagtcagggagtacaggcaagatatgtaaaaaaacacctgagcagctgcacatgcttaagagtgcatttgtccggacacagtggccatcaccagaagagtatgacaagttggccaaagaaagcgggcttgctagaacagacatagttagttggtttggggacacccgttatgcttggaagaatggaaacttgaaatggtactactactatcagagcgccaattcaagtagtatgaatggtctgtcttcccttaggaaaagagggagagggagacccaaaggacggggaagaggaagaccgcgtgggcggcctagaggaagcaaaagaattaacaactgggacaggggaccatcactcataaaatttaaaactggaactgcaatacttaaggattattacctgaagcacaagtttcttaatgagcaagaccttgatgaacttgttaacaaatcacatatgggctatgagcaggtcagagagtggtttgcagaaagacagagaagatcagaattaggtatagaattatttgaggaaaatgaggaggaagatgaagttattgatgaccaggaagaggatgaagaagaaacagatgatagtgacacttgggaacctccacgacatgtgaaacggaagctgtctaaatcagatgactgaaatctgcctaaaacgttgaaggagaatcaattcttcaactcaagatgtctgatttactgtgaatttgcccaatctttgatgacattgaaaacgttttggggcatacacactcaaaaagcaggatccaatacccaaaagaaatggaacttaatgttgtgccaaagttaaactactgcagttggtggaagttctgcaatgtaaatagaacactaattaaaaaacaacttgtaaaaatgcaatttaaattttaatacagtacatttttcttctaatatgatggagacattctgaatcttagactttctgagggggtttaatgaccactagagcttgtcctcatattcagtccagtttaatactgtatgtctagtaagatgggctatatattgcctctattctttgagatgtgattaagcttagaactttgaccaaaaattttacagtaaaaattgttagaaatgggtaaaaaaaaaaaaaaaaaaaaaccctgatttattactatgtcttatttatcagaccctgcactaagattaaaagttgtgcatgggcttatacaatttcaaatgtaaaaacagcctatttatatatgttgaaacaataagattttatggtttcactggcccttaataattggatccttcattaaacacatccatgaataccactgtttctactgttacttgttccattagaagctgatttgctttttattaaactgcaggaaattaattctgaagaaggaaaagaaactgacatggtaatttggatagggtgaagctttgaaataaatactgcaccaaaaatgtgaaaaagaatcacgtagtaaatgtatacttagtgttttcttacaatcgtggaaatcagaaatgtttatacaggtgtcagatcagaatttttaagagttatctttcagtgaaattttataacagtttcagtgaatagagaaaaaattctgaactgatcataatgagttaaaagttagcttttcacttatgaatcatgggagtgttaactgttaactcttgccgtatcaggagactgaaagttcatactaatttacaaactttgtaaagactggtgctgttcattcatattgggaagaaccctttcttttgtgaccataggaccatttttcaaaatgcgctttcttcgtagaagaaatgttcagtttaattagctttggattttaacatgtttttctgaatgaccagatgtaggcttagccagtttattttctctaatttaatggataataaatattaagctcttggttaaatgtttttcagccattgaaaatgttatgaaaaagccttgaatatgcatgctgctttcatttttataaactttttattttttaactatagctttattagtaattccaaaatgctgcaatgtagctgatttcctcactcagacagctggctttgtgggtggcttttttcatactactgttaacttttttaaaaaagaagcaatgtaaagaccgtaatgcactaagctttttttttttcttttacacgtttaaaaacttcttaaagcactctgtaatataatgattaaattgctcccttttataaac

SEQ ID NO: 75457 - DNA, 3524 bp, Homo sapiens
agggttcacaggtcagagttgactccctgaaaagtgcagccggtttgaaatgcaagatggcggcggcgtggcgctgagaggcgcggcggcccctgcaggagaagacagactgctgctttggacctgttggtaatgatggcctgagctaaacatctaactagaagggatacccttccatttcaaagaacagaatgctaaggaagctgtggcaagtgattggagttgtgcttcaaaaatttcagaaattcagcagtattttatctgccaacaataagctctttacttgattgcaccatgagaaagctgctaatgagacttgttgagcacaaaaatggacttgaagaaccaaaagccattgttttcaaatgaagaacactgaacagttttaagcctcgatgctttttaatcaccactgagcttttcctcataacatcagaatggcaagcaggcgaaaatcaacaacaccttgcatggtccttgccagtgaacaagatccagaccttgagttgatatcagatttggatgaaggtcctcctgtgcttacacctgtagaaaacaccagagcagagagtatctcaagtgatgaagaggttcatgaatctgtggattcagacaatcagcaaaataaaaaagttgaaggtggatatgaatgtaaatattgtacttttcaaactccagatctaaatatgtttacttttcatgtggattcggaacatcccaatgtagtgctaaattcatcctatgtttgtgtcgaatgcaattttcttaccaaaaggtatgatgcactttctgagcataatctgaaatatcacccaggagaagagaattttaagttgactatggtgaaacgtaataaccagacaatctttgaacaaacaataaatgatctgacttttgatggtagttttgttaaagaggagaatgcagagcaagcagaatctacagaagtttcttcttcgggaatatctatcagtaaaactcctatcatgaaaatgatgaaaaataaagtggaaaataaacggattgcagttcatcataactcagttgaggacgttcctgaagagaaagagaatgaaatcaaaccagaccgtgaagaaattgtagaaaatccaagttcttcagcttctgaatctaatacaagtacttccattgtaaacagaatacatccaagtactgccagcacggtagtgacaccagcagcagttcttcctggattggcacaggtgataactgctgtatctgctcagcagaattctaatttgattcccaaagtcttaatccctgttaatagcattcccacctacaatgctgcattggataacaatccccttttacttaacacctacaacaagttcccttacccaacaatgtcagaaattacagttctttctgctcaagcaaaatatacagaggaacagatcaagatatggttttcagcccaacgtttaaaacatggtgttagttggactcccgaggaagtagaggaggcaagaaggaaacaattcaatggaacagtgcatactgtacctcagaccataactgttattcctacacacatttccacagggagtaatggtttaccatctattttacagacatgccaaatagttggtcagcctggtctggtccttactcaagtggctggaacaaacaccttgccagttacagcacctatagccttgacagtggcaggcgttccaagtcaaaataatatacagaaaagtcaggtacctgctgctcagcctactgcagaaacaaagccagcaacagcagcagttccaacttctcaaagtgtcaaacatgaaactgcattggtaaaccctgattcatttggcattcgggcaaaaaagacaaaagagcaactggcagaattaaaagttagctaccttaaaaatcagtttccccatgattcagaaattatcagacttatgaaaataacaggcctgacgaaaggagagattaaaaaatggtttagtgacacaaggtacaaccagagaaattcaaagagtaatcagtgcttacatctcaacaatgattcctctaccaccattattatagactccagtgatgaaaccacggaatccccaactgttggtactgcacagcctaagcaatcctggaatccttttcctgactttactccccaaaagtttaaagagaaaactgcagagcagcttcgtgtccttcaggcaagttttctcaacagctctgtacttacagatgaagaattaaataggttaagggcacaaaccaaacttaccagaagagaaatcgatgcttggtttacagagaagaagaaatcaaaagctttaaaggaagagaaaatggaaatagatgaaagtaatgcaggtagttccaaagaagaagctggagaaacttctcctgcagatgaatctggtgcacctaagtcagggagtacaggcaagatatgtaaaaaaacacctgagcagctgcacatgcttaagagtgcatttgtccggacacagtggccatcaccagaagagtatgacaagttggccaaagaaagcgggcttgctagaacagacatagttagttggtttggggacacccgttatgcttggaagaatggaaacttgaaatggtactactactatcagagcgccaattcaagtagtatgaatggtctgtcttcccttaggaaaagagggagagggagacccaaaggacggggaagaggaagaccgcgtgggcggcctagaggaagcaaaagaattaacaactgggacaggggaccatcactcataaaatttaaaactggaactgcaatacttaaggattattacctgaagcacaagtttcttaatgagcaagaccttgatgaacttgttaacaaatcacatatgggctatgagcaggtcagagagtggtttgcagaaagacagagaagatcagaattaggtatagaattatttgaggaaaatgaggaggaagatgaagttattgatgaccaggaagaggatgaagaagaaacagatgatagtgacacttgggaacctccacgacatgtgaaacggaagctgtctaaatcagatgactgaaatctgcctaaaacgttgaaggagaatcaattcttcaactcaagatgtctgatttactgtgaatttgcccaatctttgatgacattgaaaacgttttggggcatacacactcaaaaagcaggatccaatacccaaaagaaatggaacttaatgttgtgccaaagttaaactactgcagttggtggaagttctgcaatgtaaatagaacactaattaaaaaacaacttgtaaaaatgcaatttaaattttaatacagtacatttttcttctaatatgatggagacattctgaatcttagactttctgagggggtttaatgaccactagagcttgtcctcatattcagtccagtttaatactgtatgtctagtaagatgggctatatattgcctctattctttgagatgtgattaagcttagaactttgaccaaaaattttacagtaaaaattgttagaaatgggta

SEQ ID NO: 75458 - DNA, 1692 bp, Homo sapiens
cgcttcctcgttgcccccgccgcgggcgcgagatggattccgggtgctggttgttcggcggcgagttcgaggactcggtgttcgaggagaggccggagcggcggtcaggaccgcccgcgtcctactgcgccaagctctgcgagccgcagtggttttatgaagaaacagaaagcagtgatgatgttgaagtgctgactctcaagaaattcaaaggagacctggcctacagacgacaagagtatcagaaagcactgcaggagtattccagtatctctgaaaaattgtcatcaaccaattttgccatgaaaagggatgtccaggaaggtcaggctcggtgtctggctcacctgggtaggcatatggaggcgctggagattgctgcaaacttggaaaataaagcaaccaacacagaccatttaaccacggtactctacctccagcttgctatttgttcaagtttgcagaacttggagaaaacaattttctgcctgcagaaactgatttctttgcatccttttaatccttggaactggggcaaattggcagaggcttacctgaatctggggccagctctttcagcagcacttgcgtcatctcagaaacagcacagtttcacctcaagtgacaaaactatcaaatccttctttccacactcaggaaaagactgtcttttgtgttttcctgaaaccttgcctgagagctctttattttctgtggaagcgaatagcagtaatagccagaaaaatgagaaagctctgacaaatatccaaaactgtatggcagaaaagagagaaacagtgttgatagagactcagctgaaagcatgtgcctcttttatacgaaccaggcttctgcttcagtttacccaacctcagcaaacatcgtttgctttggagaggaacttaaggactcagcaggaaattgaagataaaatgaaagggttcagcttcaaagaagacactttgctgttgatagctgaggttatgggagaagatatcccagaaaaaataaaagatgaagttcacccagaggtgaagtgtgttggctccgtagccctgactgccttggtgactgtatcctcagaagaatttgaagacaagtggttcagaaagatcaaagaccatttctgtccatttgaaaatcagttccatacagagatacaaatcttggcttagtgggttataaaaaacaaaaccacaaatatcttgtactgtattaattgtccttgtttacttcagacaggatccattgctaatcatggagtataaatgattatttatgttttataaaaaaaaaaaaaaaaaaaaaaaaaaaaaaaaaaaaaaaaagggggggggcgccaaaaaaatcccccgggggggcccaatgggggccccgtttttggaaaccaggggggccccataataagaggggcggcctatataaaagcccagacgacagtggccgcggttggttaaaaccaaaccggtcgcgggacgtgagcaacaccgtgcgagcggggggacaactccggaggagagacgaccccctacatttgcgggggggggaacactgcgtgccaccaaaaccccctcacagaaaattaagacgccccgcggcgaaactaacaacgctcgcgcgtcaaggccgtgcaacccacgggaaaatgccgcgggcgtgaaatggcctacggaaatgatcggaacattttcc

SEQ ID NO: 75459 - DNA, 1321 bp, Homo sapiens
cgcttcctcgttgcccccgccgcgggcgcgagatggattccgggtgctggttgttcggcggcgagttcgaggactcggtgttcgaggagaggccggagcggcggtcaggaccgcccgcgtcctactgcgccaagctctgcgagccgcagtggttttatgaagaaacagaaagcagtgatgatgttgaagtgctgactctcaagaaattcaaaggagacctggcctacagacgacaagagtatcagaaagcactgcaggagtattccagtatctctgaaaaattgtcatcaaccaattttgccatgaaaagggatgtccaggaaggtcaggctcggtgtctggctcacctgggtaggcatatggaggcgctggagattgctgcaaacttggaaaataaagcaaccaacacagaccatttaaccacggtactctacctccagcttgctatttgttcaagtttgcagaacttggagaaaacaattttctgcctgcagaaactgatttctttgcatccttttaatccttggaactggggcaaattggcagaggcttacctgaatctggggccagctctttcagcagcacttgcgtcatctcagaaacagcacagtttcacctcaagtgacaaaactatcaaatccttctttccacactcaggaaaagactgtcttttgtgttttcctgaaaccttgcctgagagctctttattttctgtggaagcgaatagcagtaatagccagaaaaatgagaaagctctgacaaatatccaaaactgtatggcagaaaagagagaaacagtgttgatagagactcagctgaaagcatgtgcctcttttatacgaaccaggcttctgcttcagtttacccaacctcagcaaacatcgtttgctttggagaggaacttaaggactcagcaggaaattgaagataaaatgaaagggttcagcttcaaagaagacactttgctgttgatagctgaggttatgggagaagatatcccagaaaaaataaaagatgaagttcacccagaggtgaagtgtgttggctccgtagccctgactgccttggtgactgtatcctcagaagaatttgaagacaagtggttcagaaagatcaaagaccatttctgtccatttgaaaatcagttccatacagagatacaaatcttggcttagtgggttataaaaaacaaaaccacaaatatcttgtactgtattaattgtccttgtttacttcagacaggatccattgctaatcatggagtataaatgattatttatgttttataaaactggcttctgtctcaaatgatttctactgc

SEQ ID NO: 75460 - DNA, 1386 bp, Homo sapiens
  misc_feature (1111)..(1111): n is a, c, g, or t
  misc_feature (1118)..(1118): n is a, c, g, or t
cgcttcctcgttgcccccgccgcgggcgcgagatggattccgggtgctggttgttcggcggcgagttcgaggactcggtgttcgaggagaggccggagcggcggtcaggaccgcccgcgtcctactgcgccaagctctgcgagccgcagtggttttatgaagaaacagaaagcagtgatgatgttgaagtgctgactctcaagaaattcaaaggagacctggcctacagacgacaagagtatcagaaagcactgcaggagtattccagtatctctgaaaaattgtcatcaaccaattttgccatgaaaagggatgtccaggaaggtcaggctcggtgtctggctcacctgggtaggcatatggaggcgctggagattgctgcaaacttggaaaataaagcaaccaacacagaccatttaaccacggtactctacctccagcttgctatttgttcaagtttgcagaacttggagaaaacaattttctgcctgcagaaactgatttctttgcatccttttaatccttggaactggggcaaattggcagaggcttacctgaatctggggccagctctttcagcagcacttgcgtcatctcagaaacagcacagtttcacctcaagtgacaaaactatcaaatccttctttccacactcaggaaaagactgtcttttgtgttttcctgaaaccttgcctgagagctctttattttctgtggaagcgaatagcagtaatagccagaaaaatgagaaagctctgacaaatatccaaaactgtatggcagaaaagagagaaacagtgttgatagagactcagctgaaagcatgtgcctcttttatacgaaccaggcttctgcttcagtttacccaacctcagcaaacatcgtttgctttggagaggaacttaaggactcagcaggaaattgaagataaaatgaaagggttcagcttcaaagaagacactttgctgttgatagctgagtatggaaagatatccaaaaaaaaaaaaaaaaaattttttcaaaaaaaaaaaaaaaaaaaggggggaaaaattttggggaaaaaaaaggggttttttttccccaaacccccccccccccaagaggaaagggnggtttgnaaaaaggtttgggttgtgttggctccgtagccctgactgccttggtgactgtatcctcagaagaatttgaagacaagtggttcagaaagatcaaagaccatttctgtccatttgaaaatcagttccatacagagatacaaatcttggcttagtgggttataaaaaacaaaaccacaaatatcttgtactgtattaattgtccttgtttacttcagacaggatccattgctaatcatggagtataaatgattatttatgttttataaaa

SEQ ID NO: 75461 - DNA, 1212 bp, Homo sapiens
cgcttcctcgttgcccccgccgcgggcgcgagatggattccgggtgctggttgttcggcggcgagttcgaggactcggtgttcgaggagaggccggagcggcggtcaggaccgcccgcgtcctactgcgccaagctctgcgagccgcagtggttttatgaagaaacagaaagcagtgatgatgttgaagtgctgactctcaagaaattcaaaggagacctggcctacagacgacaagagtatcagaaagcactgcaggagtattccagtatctctgaaaaattgtcatcaaccaattttgccatgaaaagggatgtccaggaaggtcaggctcggtgtctggctcacctgggtaggcatatggaggcgctggagattgctgcaaacttggaaaataaagcaaccaacacagaccatttaaccacggtactctacctccagcttgctatttgttcaagtttgcagaacttggagaaaacaattttctgcctgcagaaactgatttctttgcatccttttaatccttggaactggggcaaattggcagaggcttacctgaatctggggccagctctttcagcagcacttgcgtcatctcagaaacagcacagtttcacctcaagtgacaaaactatcaaatccttctttccacactcaggaaaagactgtcttttgtgttttcctgaaaccttgcctgagagctctttattttctgtggaagcgaatagcagtaatagccagaaaaatgagaaagctctgacaaatatccaaaactgtatggcagaaaagagagaaacagtgttgatagagactcagctgaaagcatgtgcctcttttatacgaaccaggcttctgcttcagtttacccaacctcagcaaacatcgtttgctttggagaggaacttaaggactcagcaggaaattgaagataaaatgaaagggttcagcttcaaagaagacactttgctgttgatagctgagggccaaatttaatctactgaaggacttgtctccctcctctgtgtgccttttgatcactcagcaatcaccaaggcggcctcttgatcggcattcccctgcagcgtgcgggaccgcaggggctgtgtttcatgtacttgtcagtgcttgttagcacctgcctgcctgaacatcatcaatgcccaataattgtttgtttcagtgctgaataaatgaatgaatgaatgcttaatat

SEQ ID NO: 75462 - DNA, 848 bp, Homo sapiens
cgcttcctcgttgcccccgccgcgggcgcgagatggattccgggtgctggttgttcggcggcgagttcgaggactcggtgttcgaggagaggccggagcggcggtcaggaccgcccgcgtcctactgcgccaagctctgcgagccgcagtggttttatgaagaaacagaaagcagtgatgatgttgaagtgctgactctcaagaaattcaaaggagacctggcctacagacgacaagagtatcagaaagcactgcaggagtattccagtatctctgaaaaattgtcatcaaccaattttgccatgaaaagggatgtccaggaaggtcaggctcggtgtctggctcacctgggtaggcatatggaggcgctggagattgctgcaaacttggaaaataaagcaaccaacacagaccatttaaccacggtactctacctccagcttgctatttgttcaagtttgcagaacttggagaaaagagagaaacagtgttgatagagactcagctgaaagcatgtgcctcttttatacgaaccaggttatgggagaagatatcccagaaaaaataaaagatgaagttcacccagaggtgaagtgtgttggctccgtagccctgactgccttggtgactgtatcctcagaagaatttgaagacaagtggttcagaaagatcaaagaccatttctgtccatttgaaaatcagttccatacagagatacaaatcttggcttagtgggttataaaaaacaaaaccacaaatatcttgtactgtattaattgtccttgtttacttcagacaggatccattgctaatcatggagtataaatgattatttatgttttataaaa

SEQ ID NO: 75463 - DNA, 675 bp, Homo sapiens
accaaatgcaacctcactgtattttcatggacttactggttccaaggctttcttggtggcttgactaagtccataactaatttctacttctgtagaaactagaaattttaagttcccaggattcataggaaggagggcactgcatttggtgaggccagggaataacaggccaggaaaagagactcagttgttccagaaacaaaaatgtatatatttacaaattgtaaatgtcacaactacaggcaagcatcttgagggttttacactatttttaattttttttattattgccaaagaaaaatatatgcactatagggcaatcagaacctacagatttgcaaaagaaagaaaataaaaaccatgcatattttcatcacttagttaataatttggagtatatccttcctgaccttttgctatgcctatttaattaaaaaatggaatgatgtgatttctatagcctggttctcctcactcaaaaacatatcatggttatgtctgtgttgttacttacatttctacaatatcattcttaacagttgcataatatttccttgtattaaagtattaccattttccaccaagtgattcccctattgttggacatggagattgcttttaatttattgttttggataaatttgttgctttggtcaacattcttgcatccacatt

SEQ ID NO: 75464 - DNA, 665 bp, Homo sapiens
ctttgatgtcacaatctgacctgtgggtattaatctggtcacagctgctcacagactagatggcaaggtccaggggactagcacaggaagatgtggaagagaagtgaccatcaacccaagatcaaagcagaggatggacctctggtgggccagttcgaggttctgggttcagttccagaacctgccatgccacatcctctagagctgtcagaatttgagagcttcccagtgtttcaggacattaggcttcacatcagggaagtgggagctcaattggtcaagaaagtcaatgccgtctttcagctggacatcaccaaaaatgggaagaccattttgcggtggaccattgatctgaagaatggttctggggacatgtatccgggacctgccaggctcccagcagacactgtctttacaatcccggagtctgtctttatggagctggttttgggcaaaatgaacccgcagaaggctttccttgccggaaagttcaaagtgagtggcaaggttctgcttagctggaagctggaaagggttttcaaagactgggctaaattttaagcatgcaaaaataccaaggaagaacttctcttcgatgataatgtcgagtggaaatcatgcttaatctgaagattaaagtaaaaagtatccaatatttttactca

SEQ ID NO: 75465 - DNA, 758 bp, Homo sapiens
ctttgatgtcacaatctgacctgtgggtattaatctggtcacagctgctcacagactagatggcaaggtccaggggactagcacaggaagatgtggaagagaagtgaccatcaacccaagatcaaagcagaggatggacctctggtgggccagttcgaggttctgggttcagttccagaacctgccatgccacatcctctagagctgtcagaatttgagagcttcccagtgtttcaggacattaggcttcacatcagggaagtgggagctcaattggtcaagaaagtcaatgccgtctttcagctggacatcaccaaaaatgggaagaccattttgcggtggaccattgatctgaagaatggttctggggacatgtatccgggacctgccaggctcccagcagacactgtctttacaatcccggagtctgtctttatggagctggttttgggcaaaatgaacccgcagaaggctttccttgccggaaagttcaaagtgagtggcaaggttctgcttagctggaagctggaaagggttttcaaagactgggctaaattttaagcatgcaaaaataccaaggaagaacttctcttcgatgataatgtcgagtggaaatcatgcttaatctgaagattaaagtaaaaagtatccaatatttttactcaaattcttcctattcaagtttaattgattttcctgttgatgggtaaattttcagggagggttctgaagcagtaaaaagcgttgtagtgcatcaa

SEQ ID NO: 75466 - DNA, 893 bp, Homo sapiens
agcctcgcctcgccccgcgccgcgcgcgttgccagggtgatcaggtgactcccggttcgcggcgctgggagcggccgtgacgtcaggcgcccggctgctcctcacttgctctgagacaggtgcggcaagtctactgcgggctggtccgggctcctcaggttcagacccgaccgttatccagtcggttcgtggagaggagaggtgcactttacaggtccccgatgaaccaagagaaccctccaccatatccaggccctggtccaacggccccatacccaccttatccaccacaaccaatgggtccaggacctatggggggaccctacccacctcctcaagggtacccctaccaaggatacccacagtacggctggcagggtggacctcaggagcctcctaaaaccacagtgtatgtggtagaagaccaaagaagagatgagctaggaccatccacctgcctcacagcctgctggacggctctctgttgctgctgtctctgggacatgctcacctgaccagaccagcccagccgtcctgtcctgccagctctgctgccacctctgacaggtgtgcctgcccccatctcttctgattgctgttaacaaatgactagctttgcacagacacctctaccttcagcactatgggattctagattaatgggggttgctactgtttaattcagtgacttgatctttttaatgtccaaaatccatttcttattgatctttaaagatgtgctaaatgacttttttggccaaaggcttagttgtgaaaaatataatttttaaattatacattcaaggtagtggccaaatgtaacacatcaatcatggaatgatttctctgctaacagccgcctgtatgtttcaataaatttgtccaaagctcaa

SEQ ID NO: 75467 - DNA, 953 bp, Homo sapiens
agcctcgcctcgccccgcgccgcgcgcgttgccagggtgatcaggtgactcccggttcgcggcgctgggagcggccgtgacgtcaggcgcccggctgctcctcacttgctctgagacaggtgcggcaagtctactgcgggctggtccgggctcctcaggttcagacccgaccgttatccagtcggttcgtggagaggagaggtgcactttacaggtccccgatgaaccaagagaaccctccaccatatccaggccctggtccaacggccccatacccaccttatccaccacaaccaatgggtccaggacctatggggggaccctacccacctcctcaagggtacccctaccaaggatacccacagtacggctggcagggtggacctcaggagcctcctaaaaccacagtgtatgtggtagaagaccaaagaagagatgagctaggaccatccacctgcctcacagcctgctggacggctctctgttgctgctgtctctgggacatgctcacctgaccagaccagcccagccgtcctgtcctgccagctctgctgccacctctgacaggtgtgcctgcccccatctcttctgattgctgttaacaaatgactagctttgcacagacacctctaccttcagcactatgggattctagattaatgggggttgctactgtttaattcagtgacttgatctttttaatgtccaaaatccatttcttattgatctttaaagatgtgctaaatgacttttttggccaaaggcttagttgtgaaaaatataatttttaaattatacattcaaggtagtggccaaatgtaacacatcaatcatggaatgatttctctgctaacagccgcctgtatgtttcaataaatttgtccaaagctcaaaaaaaacaacagactccccaggctggatcccgccaaaggggccaaaccttccaggggaac

SEQ ID NO: 75468 - DNA, 686 bp, Homo sapiens
agcctcgcctcgccccgcgccgcgcgcgttgccagggtgatcaggtgactcccggttcgcggcgctgggagcggccgtgacgtcaggcgcccggctgctcctcacttgctctgagacaggtgcggcaagtctactgcgggctggtccgggctcctcaggttcagacccgaccgttatccagtcggttcgtggagaggagagtgtatgtggtagaagaccaaagaagagatgagctaggaccatccacctgcctcacagcctgctggacggctctctgttgctgctgtctctgggacatgctcacctgaccagaccagcccagccgtcctgtcctgccagctctgctgccacctctgacaggtgtgcctgcccccatctcttctgattgctgttaacaaatgactagctttgcacagacacctctaccttcagcactatgggattctagattaatgggggttgctactgtttaattcagtgacttgatctttttaatgtccaaaatccatttcttattgatctttaaagatgtgctaaatgacttttttggccaaaggcttagttgtgaaaaatataatttttaaattatacattcaaggtagtggccaaatgtaacacatcaatcatggaatgatttctctgctaacagccgcctgtatgtttcaataaatttgtccaaagctcaa

SEQ ID NO: 75469 - DNA, 717 bp, Homo sapiens
agcctcgcctcgccccgcgccgcgcgcgttgccagggtgatcaggtgactcccggttcgcggcgctgggagcggccgtgacgtcaggcgcccggctgctcctcacttgctctgagacaggtgcggcaagtctactgcgggctggtccgggctcctcaggttcagacccgaccgttatccagtcggttcgtggagaggagagtgtatgtggtagaagaccaaagaagagatgagctaggaccatccacctgcctcacagcctgctggacggctctctgttgctgctgtctctgggacatgctcacctgaccagaccagcccagccgtcctgtcctgccagctctgctgccacctctgacaggtgtgcctgcccccatctcttctgattgctgttaacaaatgactagctttgcacagacacctctaccttcagcactatgggattctagattaatgggggttgctactgtttaattcagtgacttgatctttttaatgtccaaaatccatttcttattgatctttaaagatgtgctaaatgacttttttggccaaaggcttagttgtgaaaaatataatttttaaattatacattcaaggtagtggccaaatgtaacacatcaatcatggaatgatttctctgctaacagccgcctgtatgtttcaataaatttgtccaaagctcaacaacaaaaaaaaaatggcctcgctggcccta

SEQ ID NO: 75470 - DNA, 588 bp, Homo sapiens
agcctcgcctcgccccgcgccgcgcgcgttgccagggtgatcaggtgactcccggttcgcggcgctgggagcggccgtgacgtcaggcgcccggctgctcctcacttgctctgagacaggtgcggcaagtctactgcgggctggtccgggctcctcaggttcagacccgaccgttatccagtcggttcgtggagaggagaggtgcactttacaggtccccgatgaaccaagagaaccctccaccatatccaggccctggtccaacggccccatacccaccttatccaccacaaccaatgggtccaggacctatggggggaccctacccacctcctcaagggtacccctaccaaggatacccacagtacggctggcagggtggacctcaggagcctcctaaaaccacagtgtacgtgatagaacgggaaaggaagatggacagcgggtgtcaggcagtcctggctgcttgctgggctgctctctgctgctgctgcctcctggacaacttgaactgagcagctaagatccgagtatttccctacagccctgctacctcctgttacaggaataaacaactactgttgcaca

SEQ ID NO: 75471 - DNA, 754 bp, Homo sapiens
ttagcaggtgtgtacacaagccatgacaatagacagcggacaagaagacaagcatggttagagtgcactttacaggtccccgatgaaccaagagaaccctccaccatatccaggccctggtccaacggccccatacccaccttatccaccacaaccaatgggtccaggacctatggggggaccctacccacctcctcaagggtacccctaccaaggatacccacagtacggctggcagggtggacctcaggagcctcctaaaaccacagtgtatgtggtagaagaccaaagaagagatgagctaggaccatccacctgcctcacagcctgctggacggctctctgttgctgctgtctctgggacatgctcacctgaccagaccagcccagccgtcctgtcctgccagctctgctgccacctctgacaggtgtgcctgcccccatctcttctgattgctgttaacaaatgactagctttgcacagacacctctaccttcagcactatgggattctagattaatgggggttgctactgtttaattcagtgacttgatctttttaatgtccaaaatccatttcttattgatctttaaagatgtgctaaatgacttttttggccaaaggcttagttgtgaaaaatataatttttaaattatacattcaaggtagtggccaaatgtaacacatcaatcatggaatgatttctctgctaacagccgcctgtatgtttcaataaatttgtccaaagctcaa

SEQ ID NO: 75472 - DNA, 1207 bp, Homo sapiens
  misc_feature (1073)..(1073): n is a, c, g, or t
  misc_feature (1207)..(1207): n is a, c, g, or t
agcctcgcctcgccccgcgccgcgcgcgttgccagggtgatcaggtgactcccggttcgcggcgctgggagcggccgtgacgtcaggcgcccggctgctcctcacttgctctgagacaggtgcggcaagtctactgcgggctggtccgggctcctcaggttcagacccgaccgttatccagtcggttcgtggagaggagaggtgcactttacaggtccccgatgaaccaagagaaccctccaccatatccaggccctggtccaacggccccatacccaccttatccaccacaaccaatgggtccaggacctatggggggaccctacccacctcctcaagggtacccctaccaaggatacccacagtacggctggcagggtggacctcaggagcctcctaaaaccacagtgtatgtggtagaagaccaaagaagagatgagctaggaccatccacctgcctcacagcctgctggacggctctctgttgctgctgtctctgggacatgctcacctgaccagaccagcccagccgtcctgtcctgccagctctgctgccacctctgacaggtgtgcctgcccccatctcttctgattgctgttaacaaatgactagctttgcacagacacctctaccttcagcactatgggattctagattaatgggggttgctactgtttaattcagtgacttgatctttttaatgtccaaaatccatttcttattgatctttaaagatgtgctaaatgacttttttggccaaaggcttagttgtgaaaaatataatttttaaattatacattcaaggtagtggccaaatgtaacacatcaatcatggaatgatttctctgctaacagccgcctgtatgtttcaataaatttgtccaaagctcaaaacacaaaaataccccagaaaaatactatatacaaaatccctcccataccaacctatatgtaacccccccgtttccatccttttctttcccccgctgaaccccttgtcacgtttcctcacctttcgtcccccccccccctattaccccccctccgccccctcccccctgtcttgtctgtnttttttccccactatccagttccaccgcccgccggatactaattcgcgacacttgtctccattttgcgttgttatccccccaacaagatggtccccgctgccccacggcgccctccggcgacgtcacgcccccn

SEQ ID NO: 75473 - DNA, 530 bp, Homo sapiens
ccctcacctcgttcttgtgtaatagatgctaatatattaaattcgtgtatgtggtagaagaccaaagaagagatgagctaggaccatccacctgcctcacagcctgctggacggctctctgttgctgctgtctctgggacatgctcacctgaccagaccagcccagccgtcctgtcctgccagctctgctgccacctctgacaggtgtgcctgcccccatctcttctgattgctgttaacaaatgactagctttgcacagacacctctaccttcagcactatgggattctagattaatgggggttgctactgtttaattcagtgacttgatctttttaatgtccaaaatccatttcttattgatctttaaagatgtgctaaatgacttttttggccaaaggcttagttgtgaaaaatataatttttaaattatacattcaaggtagtggccaaatgtaacacatcaatcatggaatgatttctctgctaacagccgcctgtatgtttcaataaatttgtccaaagctcaa

SEQ ID NO: 75474 - DNA, 538 bp, Homo sapiens
tgcgacttgcgtcagtcactcctctggacccacgtctaaactccatcacctagtgtatgtggtagaagaccaaagaagagatgagctaggaccatccacctgcctcacagcctgctggacggctctctgttgctgctgtctctgggacatgctcacctgaccagaccagcccagccgtcctgtcctgccagctctgctgccacctctgacaggtgtgcctgcccccatctcttctgattgctgttaacaaatgactagctttgcacagacacctctaccttcagcactatgggattctagattaatgggggttgctactgtttaattcagtgacttgatctttttaatgtccaaaatccatttcttattgatctttaaagatgtgctaaatgacttttttggccaaaggcttagttgtgaaaaatataatttttaaattatacattcaaggtagtggccaaatgtaacacatcaatcatggaatgatttctctgctaacagccgcctgtatgtttcaataaatttgtccaaagctcaa

SEQ ID NO: 75475 - DNA, 544 bp, Homo sapiens
atctagcggatctactgagcaagctggaggttggactcagtagcctcctaaaaccacagtgtatgtggtagaagaccaaagaagagatgagctaggaccatccacctgcctcacagcctgctggacggctctctgttgctgctgtctctgggacatgctcacctgaccagaccagcccagccgtcctgtcctgccagctctgctgccacctctgacaggtgtgcctgcccccatctcttctgattgctgttaacaaatgactagctttgcacagacacctctaccttcagcactatgggattctagattaatgggggttgctactgtttaattcagtgacttgatctttttaatgtccaaaatccatttcttattgatctttaaagatgtgctaaatgacttttttggccaaaggcttagttgtgaaaaatataatttttaaattatacattcaaggtagtggccaaatgtaacacatcaatcatggaatgatttctctgctaacagccgcctgtatgtttcaataaatttgtccaaagctcaa

SEQ ID NO: 75476 - DNA, 860 bp, Homo sapiens
agcctcgcctcgccccgcgccgcgcgcgttgccagggtgatcaggtgactcccggttcgcggcgctgggagcggccgtgacgtcaggcgcccggctgctcctcacttgctctgagacaggtgcggcaagtctactgcgggctggtccgggctcctcaggttcagacccgaccgttatccagtcggttcgtggagaggagaggtgcactttacaggtccccgatgaaccaagagaaccctccaccatatccaggccctggtccaacggccccatacccaccttatccaccacaaccaatgggtccaggacctatggggggaccctacccacctcctcaagggtacccctaccaaggatacccacagtacggctggcagggtggacctcaggagcctcctaaaaccacagtaggaccatccacctgcctcacagcctgctggacggctctctgttgctgctgtctctgggacatgctcacctgaccagaccagcccagccgtcctgtcctgccagctctgctgccacctctgacaggtgtgcctgcccccatctcttctgattgctgttaacaaatgactagctttgcacagacacctctaccttcagcactatgggattctagattaatgggggttgctactgtttaattcagtgacttgatctttttaatgtccaaaatccatttcttattgatctttaaagatgtgctaaatgacttttttggccaaaggcttagttgtgaaaaatataatttttaaattatacattcaaggtagtggccaaatgtaacacatcaatcatggaatgatttctctgctaacagccgcctgtatgtttcaataaatttgtccaaagctcaa

SEQ ID NO: 75477 - DNA, 516 bp, Homo sapiens
cgcccgaatcaacgcgcgaaaaggtagcagggccccacccttgtgttgcggcagagacaacagataggaccatccacctgcctcacagcctgctggacggctctctgttgctgctgtctctgggacatgctcacctgaccagaccagcccagccgtcctgtcctgccagctctgctgccacctctgacaggtgtgcctgcccccatctcttctgattgctgttaacaaatgactagctttgcacagacacctctaccttcagcactatgggattctagattaatgggggttgctactgtttaattcagtgacttgatctttttaatgtccaaaatccatttcttattgatctttaaagatgtgctaaatgacttttttggccaaaggcttagttgtgaaaaatataatttttaaattatacattcaaggtagtggccaaatgtaacacatcaatcatggaatgatttctctgctaacagccgcctgtatgtttcaataaatttgtccaaagctcaa

SEQ ID NO: 75478 - DNA, 707 bp, Homo sapiens
ggcgcttggaggccgagcagttgggggcggggctcgtgctgtgacgcaagcctcgcctcgccccgcgccgcgcgcgttgccagggtgatcaggtgactcccggttcgcggcgctgggagcggccgtgacgtcaggcgcccggctgctcctcacttgctctgagacaggtgcggcaagtctactgcgggctggtccgggctcctcaggttcagacccgaccgttatccagtcggttcgtggagaggagaggtgaggtgcagcggacctggcccgacccagctgggaccagggcggggatcaggcacggacagggcgcgtccccgggctccctggggagcgccctgagaactggggggcacccgggctggcctggctcaggcaggggttcgcgcagcccctggggaggggcagggaggcagggaagctgctgccgccagctggatccctcccggcgccccgcggctactctggggctcctggtcgccgcgccgcgcgtctcggcggtggactcacagggtctccgcgtcgctgcggttctcgtctcacgaggagtcggcgggctcggagcggggctcgccacaccccgtcccgggggacgtccgcgggaggcttctggatttcttcgccttgggctgcgatttctgaggcgctgctctgcctattccgagctgggccagccgggggcagggggcaggtcgcgagtcccg

SEQ ID NO: 75479 - DNA, 744 bp, Homo sapiens
agtgatgaaggacaacacaatatattcctctagtccaatccccaccgtttcagtgcactttacaggtccccgatgaaccaagagaaccctccaccatatccaggccctggtccaacggccccatacccaccttatccaccacaaccaatgggtccaggacctatggggggaccctacccacctcctcaagggtacccctaccaaggatacccacagtacggctggcagggtggacctcaggagcctcctaaaaccacagtgtatgtggtagaagaccaaagaagagatgagctaggaccatccacctgcctcacagcctgctggacggctctctgttgctgctgtctctgggacatgctcacctgaccagaccagcccagccgtcctgtcctgccagctctgctgccacctctgacaggtgtgcctgcccccatctcttctgattgctgttaacaaatgactagctttgcacagacacctctaccttcagcactatgggattctagattaatgggggttgctactgtttaattcagtgacttgatctttttaatgtccaaaatccatttcttattgatctttaaagatgtgctaaatgacttttttggccaaaggcttagttgtgaaaaatataatttttaaattatacattcaaggtagtggccaaatgtaacacatcaatcatggaatgatttctctgctaacagccgcctgtatgtttcaataaatttgtccaaagctcaa

SEQ ID NO: 75480 - DNA, 924 bp, Homo sapiens
agcctcgcctcgccccgcgccgcgcgcgttgccagggtgatcaggtgactcccggttcgcggcgctgggagcggccgtgacgtcaggcgcccggctgctcctcacttgctctgagacaggtgcggcaagtctactgcgggctggtccgggctcctcaggttcagacccgaccgttatccagtcggttcgtggagaggagaggtgcactttacaggtccccgatgaaccaagagaaccctccaccatatccaggccctggtccaacggccccatacccaccttatccaccacaaccaatgggtccaggacctatggggggaccctacccacctcctcaagggtacccctaccaaggatacccacagtacggctggcagggtggacctcaggagcctcctaaaaccacagtgtatgtggtagaagaccaaagaagagatgagctaggaccatccacctgcctcacagcctgctggacggctctctgttgctgctgtctctgggacatgctcacctgaccagaccagcccagccgtcctgtcctgccagctctgctgccacctctgacaggtgtgcctgcccccatctcttctgattgctgttaacaaatgactagctttgcacagacacctctaccttcagcactatgggattctagattaatgggggttgctactgtttaattcagtgacttgatctttttaatgtccaaaatccatttcttattgatctttaaagatgtgctaaatgacttttttggccaaaggcttagttgtgaaaaatataatttttaaattatacattcaaggtagtggccaaatgtaacacatcaatcatggaatgatttctctgctaacagccgcctgtatgtttcaataaatttgtccaaagctcaacaacaaaaaaaaaatggcctcgctggcccta

SEQ ID NO: 75481 - DNA, 1094 bp, Homo sapiens
agcctcgcctcgccccgcgccgcgcgcgttgccagggtgatcaggtgactcccggttcgcggcgctgggagcggccgtgacgtcaggcgcccggctgctcctcacttgctctgagacaggtgcggcaagtctactgcgggctggtccgggctcctcaggttcagacccgaccgttatccagtcggttcgtggagaggagaggtgcactttacaggtccccgatgaaccaagagaaccctccaccatatccaggccctggtccaacggccccatacccaccttatccaccacaaccaatgggtccaggacctatggggggaccctacccacctcctcaagggtacccctaccaaggatacccacagtacggctggcagggtggacctcaggagcctcctaaaaccacagtgtatgtggtagaagaccaaagaagagatgagctaggaccatccacctgcctcacagcctgctggacggctctctgttgctgctgtctctgggacatgctcacctgaccagaccagcccagccgtcctgtcctgccagctctgctgccacctctgacaggtgtgcctgcccccatctcttctgattgctgttaacaaatgactagctttgcacagacacctctaccttcagcactatgggattctagattaatgggggttgctactgtttaattcagtgacttgatctttttaatgtccaaaatccatttcttattgatctttaaagatgtgctaaatgacttttttggccaaaggcttagttgtgaaaaatataatttttaaattatacattcaaggtagtggccaaatgtaacacatcaatcatggaatgatttctctgctaacagccgcctgtatgtttcaataaatttgtccaaagctcaaaaaaaaaaagcgaggcgaatcaatggacccgggggccacattacgcatcacaagagtatgtacaggggaccaagtagtgcgttaaagggcaagccggataacaagcggctggaaacgcacgggtattggaagacagccgttgggaaaggaagtcagatagagggaaaaagttggagcagcccggagtcaatttatacacaa

SEQ ID NO: 75482 - DNA, 293 bp, Homo sapiens
cccagaactaggaatcagagtatatggtacagggattcctggctcttagcaatgtcatgggcaactctagtatctatacagctgggaaggactcaaacaaaagggttattaggggaattcaacttccaccttgataaagccgctaaacaggttaccagcctcctgaaaagccaatatgggataagcacagaacttaccaccgtggagtcctctctgactttttgtcctgcttggttctctccccaaagatgagtgccctcaaaagaccccaaccatttctcttcctttgagaa

SEQ ID NO: 75483 - DNA, 481 bp, Homo sapiens
atcaagtgctgctgaaagaataaagagaaatgagcccaagtcagcagctacaggagaaatagaaagggccccatgacatgctgctgactaccaatttggcaatgaaactggctggcatcaagccatggatccaccacatgcccgtgaagaagttcctgccggaggaaacattcatgacacaggacaccaaggctgccaaatgggagacagaaccccttgaaggcctaggatttctgttcaaaagatgataaagtattgttttacattgttacattgctgctttacattgctgctgttttacattgttatttctgcgtacctctaaccttttcctacaatgggcaaaggttatgcaaatagcttacagcaagactcttgctgggtctgtgctctattacccctctctggcaccatggggctgccttggtgcgtcccccacatacaaggaaaaattaggtttataatatcttgattttgtaga

SEQ ID NO: 75484 - DNA, 341 bp, Homo sapiens
tgaggtttgggaatgaaaaatcagtaattaccgaagtggcatattatgacctcaatttgttttctaaatattctgaaaattattaaaaaaaaaaaaaccactaaaattcccttcttatgcctcttcaattgtgcaagaaaatttcatgggctgggttcacatctatgctcccatcagccttacatatatagaacacactgtaattatagatccaagatatttttatcccagtttgagatatattctgaacaattaaatgtccaggaatacattttttctagtacctatgtttttcagagttctaaaggattatttttcgctgggcacagtggctcatgcct

SEQ ID NO: 75485 - DNA, 202 bp, Homo sapiens
tgtctccaaaaaaaaaaaaaaaaaaaaaaaaaagtaatcacaccagagaggcagtgaaatgtgagagcgggtacatcctaccccttcccccacctcaagctgagtaatccacctgctgtattgtatagactctagatagagtgtggccaaagtagctgtaaattaacctcttaatgttgtcatagggataactcatatcctg

SEQ ID NO: 75486 - DNA, 993 bp, Homo sapiens
agcgggctgaggcaggagaatcactcgaggttcttgaatcacttgaggcagaggttgcggtgagccaagatcacgccaatgcattccagcctgggcgacagagcaagactccgtctcaaaacaaaacaaagaaaaggccgggagcagtggctcacgcctgtaatcccaacacttgtgggagatcaaggcaggcagatcacctgagtttgggagttcaagaccagcctgaccaacattgttagtagagcaaaacgtcgtctctactaaaaatacaaaaattgggcaggcttggtggcgtgtgactgtagtcctagctactcgggaggctgaggcaggagaattgcttgaacctggaaggtggagggtgcagtgagccgagatcgtaccactgcactccagcctgagcgacagagtgagtctccatctcaaaacataaataaataaaataaaataaaggaactctaggagtggtcaagtaaaagtatagagcagggatgggatggatgaggttatggactaaattgtatcttcccacctccctcccaaatgcagaggttgaagccctgactcccagcgtgagtgtttttggaggtaggcccttgagggaggtaattaaggttaaatgagatcttaagggtggggccccctactctgagaggactggtatcccaataagaagagagaggccggggcttgtggctcatgcctgtaatcccagcgctttgggaggccaggcaggaggatcgcttgagccaggagctcaagaccagcctgggcaacatagtgagaccccatctctacaaaaaaaatccgaaaagtagcctgggcacaggagcacgcacctgttagccccagctactcaggaggctgaggcgggaggatcgcatgagcctgggaggttgagactgcaatgagccgggattgtgccactgcactccagcctgagcaagagagacagaccttgtctcagagaaaaaaaaaaaaaaaaaaaag

SEQ ID NO: 75487 - DNA, 1069 bp, Homo sapiens
agcgggtgggagagcgggcttctgggactccgctaagaactcccgttgctcgctcacgtcgcccgcgttgcccatacccttcgactgcctgcgcagccctgtgtcactgagctccactgctgactccaaatcaccacaaaagcagaccacggcgcgttgcaccgaggttcggtcacgcgctgtagagcgcgagcgacgtattcggggaatactcgagggccaccgcgaggcagtgcgacgcgtgaggtgtacgggggagctgcgagtggaccgatggtctgtacctatatcattcgctgtacgtatgatgcgacaacatcgtcgctcgtgctatctagagaaaatgacaaaaaattgggcaggcttggtggcgtgtgactgtagtcctagctactcgggaggctgaggcaggagaattgcttgaacctggaaggtggagggtgcagtgagccgagatcgtaccactgcactccagcctgagcgacagagtgagtctccatctcaaaacataaataaataaaataaaataaaggaactctaggagtggtcaagtaaaagtatagagcagggatgggatggatgaggttatggactaaattgtatcttcccacctccctcccaaatgcagaggttgaagccctgactcccagcgtgagtgtttttggaggtaggcccttgagggaggtaattaaggttaaatgagatcttaagggtggggccccctactctgagaggactggtatcccaataagaagagagaggccggggcttgtggctcatgcctgtaatcccagcgctttgggaggccaggcaggaggatcgcttgagccaggagctcaagaccagcctgggcaacatagtgagaccccatctctacaaaaaaaatccgaaaagtagcctgggcacaggagcacgcacctgttagccccagctactcaggaggctgaggcgggaggatcgcatgagcctgggaggttgagactgcaatgagccgggattgtgccactgcactccagcctgagcaagagagacagaccttgtctcagagaaaaaaaaaaaaaaaaaaaag

SEQ ID NO: 75488 - DNA, 127 bp, Homo sapiens
caagctttgcggggtggggaggtgggagcacggaggacgaagcttgacgcaggggctgagacgaaaagagaacccgagagctaggggagcgtgcaggcagtggctggtgcccagaaagtggggggtg

SEQ ID NO: 75489 - DNA, 299 bp, Homo sapiens
tctaccttccattcactctctaaccagcttccatttctctttaccagaatgactccgtcaagcatctactcccctgctccctgtctccaacttgctccatctcttcttccccttcttacctcacatttgtcagagaaagcttcctgacttggaactctgggcccagactctctttccagcttccctgctagccctctgctcaacagatcctgtgttccagccaaaacaaacttcttgtcattcccaaaagactctgccttttcccattccattatgtttccactagtccttccttgcca

SEQ ID NO: 75490 - DNA, 505 bp, Homo sapiens
gagggtgtggtgttctaggataagtggtcaactcctcgcttctgccatgacactgcccatgctcttcttgtattctgtaccaagctccatgatactggcttcatccttgtctaaatgaattgtattattttcatttattgcttatgttacatcattcattcaaccattattttattgagtgtctaataaaataaggcaattctcttatacggcatattctattacaggcactattctaaagttttaaaatatataatttagttagttctcatgacactttatcaaataggtactcttattttccctggatgaagacaaaaggactgaggtacagagactgaagtaactcactcagggtcacaatgagaggctccagtgtccattgaccgcctccctcttctgtgtcactacaacggatcaagtgctgagccaagaactggggatgcaagataacttttgcttattggaagagttttcttttgttcctcaaactcagctcctctct

SEQ ID NO: 75491 - DNA, 390 bp, Homo sapiens
ttgcctatgacttatcaattaacccttggtgtccctagaatccaaaataaagaataaatgtatgtaaaaggataattggagacttagaatctcttcctcaagattttatctggttaatgactatcacaggtgggctgttctttttattcttggaagaacatactctattccggaggggaaaatatcaaattagttcagcctgctacctgctcccatagaagatgggggaagctggctctttcatcggtgttttcgtctgtagccgcccccttccccaaccttgagttgatttaaaaggatggaagaaagtaccgtgctacctccaatgctgtcattcagtgttcaccccaggcagtgtgctagacacattcctggactaaatcctttagt

SEQ ID NO: 75492 - DNA, 737 bp, Homo sapiens
agcagagtgatttgttcctatattaatttaggtaggagaaaatgtagacttagtgaagttgaagatctttgtccagtgtccacatggcctctcttttaaccacaaatctcaacccactgatgaccaagtgccatgcattaacaatgagtgataagagagaagactgctgggttcaattccagaggttgttagaggcaaacctctcactttatttctcaaagttgtactacatagatgactacaacatttcataaagattttctgtttggggagccaggaacccctcttggttttcaagcccagatggccatagtaaattgtctatgattcacagcaaagaaactaatcctgtatatagaacctacacaggaacaagatgtgctccacttgttagtctccattctgacttgatgagttagcttttggaaaaatgtaatttatgaagtagatatatttcatgaactaaaataactatgtgttaggtatggtatgcaaattaagcatatatatccatatatatcctatataaatatggagtgatatgtagatataaacataagcatagacacgcacaaaaaagacatagtacggaacagtggttgaaagcttggcttctgagtcagactgcattctgtgacaattttcttcacttacaaattaattttattttcatcttcagtgcatttaaaggcagaacaaaacaaccctgctccccattcccctgcaaaaaagaaaaa

SEQ ID NO: 75493 - DNA, 294 bp, Homo sapiens
ctgtgtatatttagtatctttcattaagaagactggttgatatttgccttcagctaatttatagaaaggatgatcatcaatgtctctagttttcttctaagtggcttgtctgtgcaggtacatataaaaattcaactatacaaatagctggacagttgagtctcaactatgaaaatcttttctgggatcaagatctaagaagttggtgtgtgtatgagtgcaacccatcattctatcccctaaaaatctggggtttctcagcccaaacattctcactagtaaagtcaagtttca

SEQ ID NO: 75494 - DNA, 415 bp, Homo sapiens
acaatgtggaaccagtccctactcagcgtacctgctgtcaggacattgtaaatgacgtcagctctgatggctcagaagatccagcagagttcagcagaggagacagctgtgcccattcagaaacagagaacaacattgtaagttggaatgctcttattttgccacctgtccccgagggctgtgctgagaagacaatgtggtctccacctggcattcctttagacagcccgacagaggtccttcagcagccccgggaaacctgaggacatgcaaacaaccagtcatgttccaacttcaagccggtaactgcacacaacaggcctgggagcgaactgtgtgaaggaccttaattcaaatcagagaaaatcattatttatttttttgtagtagtaatgtcatatgaatgtatcttaaa

SEQ ID NO: 75495 - DNA, 499 bp, Homo sapiens
atttccttccaggcatgtttaagttatagactttgagtatattttctcaaagggggttctatgtaagagactatttcttaatatagttcctagcttggaattgctcttgctggtttaagctgagcttattttattacagacttcacaacaataacgttttccttcactagtcagtacacaagatggtcttcatttccagtttggaatcccacactatcagagcctgagacaaggactagtatgcagttagtttgtttgggaggtgattccaggaagtgggaatgagagatcagtcagcctgcaacacgaaggaggaaaagtcaatataaggatgaatttggcaattggccgtttcatgcaactggggctaaattttgcttggctctctaagaaatgtaaagaatgcctcccgtaattgctcacctcaagtatttattcattggctctcatgctccattggttgtccatgagaactttagccctccctcgctgcagcaca

SEQ ID NO: 75496 - DNA, 426 bp, Homo sapiens
gagtgactgtttaatgaaatattatggtgaatcaggtgggatttgcagacttctacctaagtagaagtcttttagctgttgtattagtgtgtttttcaggctgctgataaaatgtacccgagattgggcaatttaaaaaagaaagaagtttgttggacttacagttccacatggctggagaggcctcacaatcatggtggaaggcaaggagaagcaagtcacatcttacatggatagcaacaggcaaaaagagagcttgtgcacggaaactccccttttaaaaccatcagatctcatgagactcattcactatcatgagaacagcacaggaaagatttccccctccccataattcaatcaactcccactgggttcctcccatgacatgtgggaattgtgggagttacaattcaagatgagatttgg

SEQ ID NO: 75497 - DNA, 3643 bp, Homo sapiens
  misc_feature (972)..(972): n is a, c, g, or t
  misc_feature (1321)..(1322): n is a, c, g, or t
  misc_feature (2767)..(2767): n is a, c, g, or t
  misc_feature (3026)..(3027): n is a, c, g, or t
  misc_feature (3099)..(3099): n is a, c, g, or t
  misc_feature (3377)..(3377): n is a, c, g, or t
  misc_feature (3639)..(3639): n is a, c, g, or t
  misc_feature (3641)..(3643): n is a, c, g, or t
gtaagtggatcccagcatccttggcaatagggttttaggtggagtctatctggctttcagagaagagttaggaaaacatttttattcccagcctgtgtcccatgggcacaagcaaatcccaaattctcctcctgaaccctcccaatttgtctctacagactctcttcttgtttttgttttctcatggctgaccttgtgtctggcctaagaaagttagggagggggctttatcagccctgagccctatgtggtagaagagacttcagagacggatgagaaggagagtcctcaagatcaagttgcttctcgatgtcaccaacacatccccttctgccacgtctttgttttcttgtacctcttccatgagctacaaggaacatctgaggctttgaaacaagctcacactgttcccccaaatgagacggggaagccccttgggtgagggaggagcagctcagactctgcttcctgctctgctccaggctcctctggtgactggccctgcctgactccacctggggtgggaccagcatgtgtggagaaagagccctggtggcctgtcctgaatttggctaaatcgagctgccagttgaagccaagcctcccccgggccaggctgcagggaaataagaagagagggagcctcagggcagactcctgagctgcgtcctggctctgaagtcaccggctgtatgaggctgtgggcacagcatgtgggacacagcacggaggatagtgactgatgcagagctggagaaatagggagattcacccctggggctctgcatcgcaggaaaggggcagtgcaaaaagtgtgtaattatagagagggtaagactaccaaacactttatatctaatataagacttaccattaactatttctaagtgtgcaatttagtgttgtgtaaccatcacactatccatttccagaactttttcctcttaccatattaaacctctgtacccaatnaacagtaactcactccttctccccataacccttagcacacaacattctacattctgtctctatgtaactggctattctaactatcttttataaatggaattatatgataattatccttttgtgtctggcttatttcagttagcataatatctttaaggttcatccattttgcacgatgtattggaattttattccttgttaaggttgaataacattttaattgtagatacacctcatttgcctacccacttatctttcaatggactttttggttgtttccattttttggctagtgtgagtaatgcttctctgaacatcagagtacaaatatttcttcaaatttctttcnnttctatgtggagtatgtccagaagtggaattgctggatcaaatggtaatttattgtttaattttttgagaaacagccacaccactttttacagtggctataacatttcccattcccatcaagtgtgtgaggtggtgtaacatgtggttttgatttgcatatctctaactattcatgatgctgaggaactttgcatgggcttattggatatttgtatatcttccttggagaaaactccattttaatcctttgttcattttttaattgggtttttggatgtctgctgttgttgacttgtagcttttcatgtattctggaaattaatttcttatcacacatataatttgcaaatatttttatcatttcatgggttgcctttttaccttcctgataatgttcttcgatatacaaaaggttttgatttttgtgaagtccaatttatcaattttatttgttgcctatgcttttgttgttacaaccaagaaatcattgtgaaatccagtatcatggaccttttcttctaagagttgtatagtttttgctcttacatttagatctttcatgtattgtgggttaatttttgcacatggtgttaggtaaaggttccactcttcttgcccttggatatccagcttttccaatatcatttggtgagaacactgtcccttccccattgaacgatcttggcacactcgaagaaatcatttggccatatatgcaagcatttctttctagttattatatttcattaatttctatgtcctcctttatgccagtaccacactgtattgattactggggctttgtagtaaatgctgaaatcagaagtgtgagtcctccagcttcattcttcctcttcaaagctgtgtgtctatttagagtcatgagatgcaatataaattttaggacagatttttctttttctgcaaaaatgtcactgagattctgataagaattgtattgaatctgcagctcactttgggtagcactgtcctcctaaccaaattgagtcttccaattcatgaaaacaaaatgtctttcaatttattgatgtcttctttcatttctttcagcaatattttgtagatttcgggtataatcatttcacctctttggttaaacttattcctaaatattttattctttttgatgttaatagaaattgaatttttttttcttaatttcccttcagattgttcatggttagtgtattgaaatacaactgatgtttgaatgttgattttgtattgtgcaacattactgaatttatttattagtcctaatagatttgttccatctttaggattttctacatataagttcaagttatctgtaaacagaaataattttactccttccttccaatttgaatgtcttttttaaaattcttgcctaatttttctgactagacctttcaatattatattgaataaaagtgtcaaaagnaaagctttcagtctttctctattgagtatgatgttagcattgggtttttcacatatgcctttatgttgaggtggtttccttccattcttagaatgtttttattatgaaaaaatactgaatttcatcaattacttttattgattcaatcttattactgattatagttctattcatatatttgtgtgtttctaagagtttgtctacttcatataggttatccaatttattagcatacaattatttatactacttcataatnnttattttattagaatggtagtaatcgcttcatttttctttttttttttttttttttttttttgaagagaganggacaggctctcactctgtaggccaccctaggatggaatacagtggtgtgtctatggctcactgcagcctcaacctcctgggctcaagcaattctccttcttcagcctcccaagatgctaggactacaggtgtgtcaccatgcccagctaattggttttttatttttgtagagacagcatctcccagggttaactatgctggcccaaacacttggtctcaagaaatccttccgctgtgacctcccaaagtgctaggattaaaacacgacccaccatgntcagagtccattttcatttctgattttagtaattttaaacttttctctttttttcttagtcaatctagttaatggttgtcaattttgttgattttattttgaagaatcaacttttggtttcagtaatttcctctattatttttccattctccattttatttatatccactctaatccttattatttccctcattcactgtgcttgggtttagtttgttcttctttcatatcctgaagtattaaagtaggttgttgacctgantnnn

SEQ ID NO: 75498 - DNA, 371 bp, Homo sapiens
tgttggagatgggaggagaaagggaggaaagggagtagagaaggccacacacaatcttaaattcaatatttcactcccgttaaagataagctgtttataagctccagtgtagggcatgtaattctatgtaaaaactctgtggttcctcttcccacatgtaaatcatgatcactctacattctgctctctgggagccctcaaggcaaagagacaacaagactcgagaccacagaaaggacttatcacaagtctttgtggtagctgaggagtgccccctacagactgatatgcacaatgcaagcagatgaagaggaaagaactgagcagcagtatttcaggattctcaataaggcatcaatgaaaaaaggtaa

SEQ ID NO: 75499 - DNA, 758 bp, Homo sapiens
cccattttactctgtcctgtgtcctgactgaagcgacaaggtgtgtctgcagctgtgctcacacctggaggaaacctcaatggtgtgagtaaattgtaaatgtttacttattatgggttattttattatttatgaagtatgtattttgatttcattctactgacaacacaataaaccaggacatgatgaccctagcagcacatcctctttcctgtgtcaagaagcatcgtccggggaggtgagaagaagacagtcctccctagaattgaagaaccagggagaaccagatgggctgggcagatcaagcacaaacctgagatccaactgtccctcttatgcgcctgggtttcttcactggacaccagtatgagtcaactttcctgtaaagcagaacaagcacgagattggaccatgttagaggaggaatggtgtcatctccacttctggagagatcactgtccccgtgtttgggggaaggaccaagcctcactcccatgcagagaagaagctctgactgtaactgcacctgtggagaggtgaggacctgtcccctctacaccgatggccagagcctccagagtggggccaggcttttccctcagctgtgtcctgtcaggtttatctaggcctcaaagaatagaccctggacattgcctctggcaatgtgagctggacacacacccagatgtaaggtagccctgccaagtatcctggggttgccagtagttctgggtgctcagtgtctggagcggagggtg

SEQ ID NO: 75500 - DNA, 702 bp, Homo sapiens
acagaaaaaaaaagatagttgacatattcaaagaactacatattataatagcttttcagaggaaaaaaagcttgctttttaaaaatatgttttaattttgaaatacttttatatttacagaagagttgcatagagagtacaaagagattccatatacctttcacctagcatcacttagtgttaataccttatataatcatgtacttttattagaactaggaaattaacactaagtaaattacactatatattagagttcaccaattttcccaatgttctttttcttttctggtatcaaactcatgatactgtgctgcatttagttgtcatgtttcagtctcttccaatctgtgaccatttttccatttttttctcatttttcacgacttacacttttgaagaaaactggtcagatattttttcagaagtccatcaatttgtgtttttcgaatgttttctcgtaattatactgaggttacgcatttggggctagaaacccgcagaagtgatgtgattttcacatagcgtcttaactggaggtacatttattttataaaaataatacagaataacaaggaagactatacaagatggtgaagttaacactgtgggacaaaactgtctttcttaaatatgattattacatttgaaaccaaagaataactgaaattagacaataaaataacaaaggaaagaatctga

SEQ ID NO: 75501 - DNA, 380 bp, Homo sapiens
ctcactgcaacctctgcctcacagcttcaagcaattctcgtgcctcaggctctcaagtagctgggattaatttttatatttttaatagagatgggttttaccatgttggccaggctggtcttgaactcctgacctcaagtgatccacccacatctgcctcccaaagtgctgggattggacttcattatcttcaaatatgtctatcaagacatagaagggattacaaatatttctttttacttttttgttttttgagtcagggtctactctgtcgccgaggctggagtgcaggggcgcaataatggctcactacagcctcgacctcctgggctcaagtgattctcccatgcaactgggactacagggatgcaccaccacac

SEQ ID NO: 75502 - DNA, 421 bp, Homo sapiens
tctaaacataaactagatgtccaacaattcaattcaattctgacactatctttgtcagaatccacagatttaagggttcaatcctacaagactgcctcctcttgagttcctctgcccggccgccccactgtctgggaagtgagaagcgcctctgcctagccgcccaccatctgggaagtgaggagcacctctgcccggccgccccacaccaccgccgccatctgggaagtgaggagtgcctctgcctggcccccgcaacgtctgggaagtgaggagcgcctttgcgcggctgctgtgcgaccctccaagtgtgaagtgacagccttgtgtgtgatctttctgccctccccaagtttgcattttcgacattaaagtttacttttcaattaaaatttttaaattggagaatatataatttaaa

SEQ ID NO: 75503 - DNA, 407 bp, Homo sapiens
attgcctcatctataaaatggggacaataatcctacctatttcatagggctattgggaggagggaaagagatgctatacatgtataaaacttttagcatagtatctggcaaataaagtgcccatgaaattttagctagagactctttttcttcaagagtgattctaaaacacactgtttgcccccctttcccactcaaccgttgactctcttcctagccttaaacttcatgtccagaactttttctaattttttatttttggaattgtggttaaaaaaatacataacataaaagttaccacctagtgtccatcagtggataaaaaatctggggtgtatatatgcagatgaatactgttcagcttcaaaagataagggaatcctgtcatttgcagcaacatggatgac

SEQ ID NO: 75504 - DNA, 673 bp, Homo sapiens
catgatgtatgtacctttaaggaagagaaaaccagatcactgtgatactctcttttagatgaagtaaaaattagactaagctgtagtgtagatagaattgaagcaccttcactttggttggcattagtcaactggtgagtgaggagatatatatatatatatatatgtatgtatgagcatgtgcatctgtggtgaagaaatgaggaattagttatgcctgctgctagttgactacagtaaatatgcattaaaaagaaataccaagtacacacatatcagaaactgatttgttccttttattactgttggccatatattaagaaggggagatggttctagtttaattaacccagttgagtgtagcagatggggcagaatgtctttcagcgataagacaattcagaaatggcaccagatgttggaagctgtccctggtggtgtttgagtgcagcccagatgttccagtcccacctggctagtttctaagcactgcggcctaagcagctgtgatgtaacctatataatgttcacataacactaaaagcaccatcattgaactgctgtagacttctaaggttgtgactgttaagaggtgaaatctttaaggacagacaaaaataaggacgactatttaaagtttcagatattggtctgtttcactaaagttgagaaa

SEQ ID NO: 75505 - DNA, 362 bp, Homo sapiens
gtcctatcctggaggaaaagcctattaagatgcttatactcaatgctgcaagcagcaggaagacatgccagctgttcagcaagggctttgttcttgcttatcattggcaaatggtagaaatttcaataattttttcaacatttacctgtttttttatatggattgctatttgttttattgggcttggatgtacacttgtctgtaatgagtggacgagaaatgttgtgaatatacttagtcttttaaacctggaaggtgctgagcaaatgaggaagttcagagcctatgaataactctgtctacccccttcctgtcacacagtgtatgcttgttttttcttttcttttctggcaaaaaaaaaa

SEQ ID NO: 75506 - DNA, 340 bp, Homo sapiens
aggaaaatgcagttaagtgctagaagcagggttcctgatctatttgaatccagccaaagaatcctcagaaatttgtaattgatttgctcaagtatgaaatgtagatctgagttggcaaactttccgtaaagggccaagtggtaaatatttttggctttgtaggacattggtctctgtcacaagtactttcaaaaacaggtggcaagctgcattggctcacaggccagagtttgctgacccctgatctacattgtttttccttctaaatattacctgattatcttagcttcttggcaaacatgctaggccggatggagcagaggtttctgttacatgctgt

SEQ ID NO: 75507 - DNA, 3279 bp, Homo sapiens
gtcggctccagttagagctcgggtctcctcgccacagctccgagtctttcgttctgggaggcccaggcggcttcgcgttctgagaataaacagaacctctgttgctctgcgacttgcaggcactgggagattcgtagctaagacgccagggcatcccggaagctgggaaatgggactgttgacattcagggatgtggccgtagaattctctttggaggagtgggaacacctggaaccagctcagaagaatttgtatcaggatgtgatgttagaaaactacagaaacctggtctctctgggtcttgttgtctctaagccggacctgatcacctttttggaacaaaggaaagagccttggaatgtgaagagtgaggagacagtagccatccagccagatgtgttttcgcattataacaaggacctgttgacagagcactgcacagaagcttcattccaaaaagtgatatcgaggagacatgggagctgtgatcttgagaatttacatttaagaaaaaggtggaaaagggaggagtgtgaagggcacaatggatgttatgatgaaaagacttttaaatatgatcaatttgatgaatcctctgttgaaagtttgtttcaccagcaaatactttcttcttgtgccaaaagctataactttgatcaatataggaaggtctttactcattcatcattgcttaatcaacaagaggaaatagatatttggggaaaacatcacatatatgataaaacttcagtgttatttaggcaggtctctactctaaatagttaccgaaatgtttttattggagagaaaaattatcattgcaataattctgaaaaaaccttgaaccaaagctcaagccctaaaaatcatcaggaaaattattttctagaaaaacaatacaaatgtaaagaatttgaggaagtctttcttcagagtatgcatgggcaagagaaacaagaacagtcttacaaatgtaataaatgtgtagaagtttgtacccagtcattaaaacatattcaacatcagaccatccatatcagagaaaactcatatagctataacaaatatgataaagatcttagtcagtcatcaaatcttagaaagcagataatccataatgaagagaaaccatacaaatgtgaaaaatgtggggatagcttaaaccatagtttgcaccttactcaacatcagatcattcctaccgaagagaaaccctataaatggaaagaatgtggcaaggtctttaaccttaactgtagtttataccttactaaacagcagcaaattgatactggagaaaacctttacaaatgtaaagcatgtagcaaatcttttactcgttcctccaatcttattgtgcatcagagaattcacactggagagaaaccatacaaatgtaaagaatgtggcaaagcctttcgctgtagttcataccttactaaacataagcgaattcatactggagagaaaccttataaatgtaaagaatgtggaaaagcttttaaccgtagttcatgccttactcaacatcagacaactcatacaggagaaaaactttacaaatgtaaagtatgtagcaaatcttatgctcgttcttcaaatcttattatgcatcagagagttcatactggagagaagccttataaatgtaaagaatgtggcaaagtctttagccgtagttcttgccttactcaacatcggaaaattcatactggagaaaatctttacaaatgcaaagtatgtgctaaaccttttacttgtttctcaaatcttattgtgcatgagagaattcatactggagagaaaccctataaatgtaaagaatgtggcaaagcctttccttatagttcacaccttattcgacattatcgaattcatactggagaaaaaccatacaaatgtaaagcatgtagcaaatcttttagtgactcctcaggtctttctgtgcatcggcgaactcatactggagagaaaccctatacatgtaaagaatgtggcaaagcctttagttatagttcagatgttattcagcatcggagaattcatactggccagagaccctacaaatgtgaagaatgtggcaaagccttcaactataggtcatacctcactacacatcagagaagtcatactggagagagaccctacaaatgtgaagaatgtggcaaagccttcaactctaggtcatacctcactacacatcggagaagacatactggagagagaccctacaaatgtgatgaatgtggtaaagccttcagctataggtcatacctcactacacatcggagaagtcatagtggagagagaccctacaaatgtgaagaatgtggcaaagcctttaactctaggtcatacctcattgcacatcagagaagtcatactagagaaaaactttaaaaatgtaaaacatggagcagattttttacttgttacccatgtcttattgtgcatcagataatttatatgggagtgaaaccctacaaatgttaagaatgtggcataacctttaactattttcaagccttacacaatagcagagaatataaactgaaaaaatccatacaaatattaaaaatgtggcaaattattttaaactgtgctcaacccttactcaagataatccatactagagaaacactatagatgtaaaaatgtgaaaagttttattcaaaatatcaaacttatgagtcacctaggggttcatagaaaaaggaagtttgcagatgcaataaatgtgaggaagtatttaataaaaaatgaagtctaaatgtgtcagagaatttatgtgagaaaggactaaagcacagacactttcagcctttatactaaataagagtattttttgtacagaataatctaaaggcaaaataattagataatttatttgcttatatgttttaaagtagcaagaacattgatgttttgacaggtatatttcatagatacttcatttgtatttacagtatttgaggtttttggaaagcaaatattatttatataattcagctttcaaatctgttgctgcttttccttaatccgtggtgttcatgtgaaaatatgtgttctgtttttttttctgcatcagaacaatgtgaggtcattctacgttaatatcattaatatcagcatttttcatggaagtttaatgccaaatgtaaaacacatgaaaatttttaaaaatatgctctttgtgtttgaataaagtagtaatgcacgtaaacatatacgtgtttagagctcttttctatattaaagtaagagggatattctgaatt

SEQ ID NO: 75508 - DNA, 2632 bp, Homo sapiens
gtcggctccagttagagctcgggtctcctcgccacagctccgagtctttcgttctgggaggcccaggcggcttcgcgttctgagaataaacagaacctctgttgctctgcgacttgcaggcactgggagattcgtagctaagacgccagggcatcccggaagctgggaaatgggactgttgacattcagggatgtggccgtagaattctctttggaggagtgggaacacctggaaccagctcagaagaatttgtatcaggatgtgatgttagaaaactacagaaacctggtctctctgggtcttgttgtctctaagccggacctgatcacctttttggaacaaaggaaagagccttggaatgtgaagagtgaggagacagtagccatccagccagatgtgttttcgcattataacaaggacctgttgacagagcactgcacagaagcttcattccaaaaagtgatatcgaggagacatgggagctgtgatcttgagaatttacatttaagaaaaaggtggaaaagggaggagtgtgaagggcacaatggatgttatgatgaaaagacttttaaatatgatcaatttgatgaatcctctgttgaaagtttgtttcaccagcaaatactttcttcttgtgccaaaagctataactttgatcaatataggaaggtctttactcattcatcattgcttaatcaacaagaggaaatagatatttggggaaaacatcacatatatgataaaacttcagtgttatttaggcaggtctctactctaaatagttaccgaaatgtttttattggagagaaaaattatcattgcaataattctgaaaaaaccttgaaccaaagctcaagccctaaaaatcatcaggaaaattattttctagaaaaacaatacaaatgtaaagaatttgaggaagtctttcttcagagtatgcatgggcaagagaaacaagaacagtcttacaaatgtaataaatgtgtagaagtttgtacccagtcattaaaacatattcaacatcagaccatccatatcagagaaaactcatatagctataacaaatatgataaagatcttagtcagtcatcaaatcttagaaagcagataatccataatgaagagaaaccatacaaatgtgaaaaatgtggggatagcttaaaccatagtttgcaccttactcaacatcagatcattcctaccgaagagaaaccctataaatggaaagaatgtggcaaggtctttaaccttaactgtagtttataccttactaaacagcagcaaattgatactggagaaaacctttacaaatgtaaagcatgtagcaaatcttttactcgttcctccaatcttattgtgcatcagagaattcacactggagagaaaccatacaaatgtaaagaatgtggcaaagcctttcgctgtagttcataccttactaaacataagcgaattcatactggagagaaaccttataaatgtaaagaatgtggaaaagcttttaaccgtagttcatgccttactcaacatcagacaactcatacaggagaaaaacatacaaatgtaaagcatgtagcaaatcttttagtgactcctcaggtctttctgtgcatcggcgaactcatactggagagaaaccctatacatgtaaagaatgtggcaaagcctttagttatagttcagatgttattcagcatcggagaattcatactggccagagaccctacaaatgtgaagaatgtggcaaagccttcaactataggtcatacctcattgcacatcagagaagtcatactagagaaaaactttaaaaatgtaaaacatggagcagattttttacttgttacccatgtcttattgtgcatcagataatttatatgggagtgaaaccctacaaatgttaagaatgtggcataacctttaactattttcaagccttacacaatagcagagaatataaactgaaaaaatccatacaaatattaaaaatgtggcaaattattttaaactgtgctcaacccttactcaagataatccatactagagaaacactatagatgtaaaaatgtgaaaagttttattcaaaatatcaaacttatgagtcacctaggggttcatagaaaaaggaagtttgcagatgcaataaatgtgaggaagtatttaataaaaaatgaagtctaaatgtgtcagagaatttatgtgagaaaggactaaagcacagacactttcagcctttatactaaataagagtattttttgtacagaataatctaaaggcaaaataattagataatttatttgcttatatgttttaaagtagcaagaacattgatgttttgacaggtatatttcatagatacttcatttgtatttacagtatttgaggtttttggaaagcaaatattatttatataattcagctttcaaatctgttgctgcttttccttaatccgtggtgttcatgtgaaaatatgtgttctgtttttttttctgcatcagaacaatgtgaggtcattctacgttaatatcattaatatcagcatttttcatggaagtttaatgccaaatgtaaaacacatgaaaatttttaaaaatatgctctttgtgtttgaataaagtagtaatgcacgt

SEQ ID NO: 75509 - DNA, 3221 bp, Homo sapiens
gtcggctccagttagagctcgggtctcctcgccacagctccgagtctttcgttctgggaggcccaggcggcttcgcgttctgagaataaacagaacctctgttgctctgcgacttgcaggcactgggagattcgtagctaagacgccagggcatcccggaagctgggaaatgggactgttgacattcagggatgtggccgtagaattctctttggaggagtgggaacacctggaaccagctcagaagaatttgtatcaggatgtgatgttagaaaactacagaaacctggtctctctgggtcttgttgtctctaagccggacctgatcacctttttggaacaaaggaaagagccttggaatgtgaagagtgaggagacagtagccatccagccagatgtgttttcgcattataacaaggacctgttgacagagcactgcacagaagcttcattccaaaaagtgatatcgaggagacatgggagctgtgatcttgagaatttacatttaagaaaaaggtggaaaagggaggagtgtgaagggcacaatggatgttatgatgaaaagacttttaaatatgatcaatttgatgaatcctctgttgaaagtttgtttcaccagcaaatactttcttcttgtgccaaaagctataactttgatcaatataggaaggtctttactcattcatcattgcttaatcaacaagaggaaatagatatttggggaaaacatcacatatatgataaaacttcagtgttatttaggcaggtctctactctaaatagttaccgaaatgtttttattggagagaaaaattatcattgcaataattctgaaaaaaccttgaaccaaagctcaagccctaaaaatcatcaggaaaattattttctagaaaaacaatacaaatgtaaagaatttgaggaagtctttcttcagagtatgcatgggcaagagaaacaagaacagtcttacaaatgtaataaatgtgtagaagtttgtacccagtcattaaaacatattcaacatcagaccatccatatcagagaaaactcatatagctataacaaatatgataaagatcttagtcagtcatcaaatcttagaaagcagataatccataatgaagagaaaccatacaaatgtgaaaaatgtggggatagcttaaaccatagtttgcaccttactcaacatcagatcattcctaccgaagagaaaccctataaatggaaagaatgtggcaaggtctttaaccttaactgtagtttataccttactaaacagcagcaaattgatactggagaaaacctttacaaatgtaaagcatgtagcaaatcttttactcgttcctccaatcttattgtgcatcagagaattcacactggagagaaaccatacaaatgtaaagaatgtggcaaagcctttcgctgtagttcataccttactaaacataagcgaattcatactggagagaaaccttataaatgtaaagaatgtggaaaagcttttaaccgtagttcatgccttactcaacatcagacaactcatacaggagaaaaactttacaaatgtaaagtatgtagcaaatcttatgctcgttcttcaaatcttattatgcatcagagagttcatactggagagaagccttataaatgtaaagaatgtggcaaagtctttagccgtagttcttgccttactcaacatcggaaaattcatactggagaaaatctttacaaatgcaaagtatgtgctaaaccttttacttgtttctcaaatcttattgtgcatgagagaattcatactggagagaaaccctataaatgtaaagaatgtggcaaagcctttccttatagttcacaccttattcgacattatcgaattcatactggagaaaaaccatacaaatgtaaagcatgtagcaaatcttttagtgactcctcaggtctttctgtgcatcggcgaactcatactggagagaaaccctatacatgtaaagaatgtggcaaagcctttagttatagttcagatgttattcagcatcggagaattcatactggccagagaccctacaaatgtgaagaatgtggcaaagccttcaactataggtcatacctcactacacatcagagaagtcatactggagagagaccctacaaatgtgaagaatgtggcaaagccttcaactctaggtcatacctcactacacatcggagaagacatactggagagagaccctacaaatgtgatgaatgtggtaaagccttcagctataggtcatacctcactacacatcggagaagtcatagtggagagagaccctacaaatgtgaagaatgtggcaaagcctttaactctaggtcatacctcattgcacatcagagaagtcatactagagaaaaactttaaaaatgtaaaacatggagcagattttttacttgttacccatgtcttattgtgcatcagataatttatatgggagtgaaaccctacaaatgttaagaatgtggcataacctttaactattttcaagccttacacaatagcagagaatataaactgaaaaaatccatacaaatattaaaaatgtggcaaattattttaaactgtgctcaacccttactcaagataatccatactagagaaacactatagatgtaaaaatgtgaaaagttttattcaaaatatcaaacttatgagtcacctaggggttcatagaaaaaggaagtttgcagatgcaataaatgtgaggaagtatttaataaaaaatgaagtctaaatgtgtcagagaatttatgtgagaaaggactaaagcacagacactttcagcctttatactaaataagagtattttttgtacagaataatctaaaggcaaaataattagataatttatttgcttatatgttttaaagtagcaagaacattgatgttttgacaggtatatttcatagatacttcatttgtatttacagtatttgaggtttttggaaagcaaatattatttatataattcagctttcaaatctgttgctgcttttccttaatccgtggtgttcatgtgaaaatatgtgttctgtttttttttctgcatcagaacaatgtgaggtcattctacgttaatatcattaatatcagcatttttcatggaagtttaatgccaaatgtaaaacacatgaaaatttttaaaaatatgctctttgtgtttgaataaagtagtaatgcacgt

SEQ ID NO: 75510 - DNA, 2969 bp, Homo sapiens
gtcggctccagttagagctcgggtctcctcgccacagctccgagtctttcgttctgggaggcccaggcggcttcgcgttctgagaataaacagaacctctgttgctctgcgacttgcaggcactgggagattcgtagctaagacgccagggcatcccggaagctgggaaatgggactgttgacattcagggatgtggccgtagaattctctttggaggagtgggaacacctggaaccagctcagaagaatttgtatcaggatgtgatgttagaaaactacagaaacctggtctctctgggtcttgttgtctctaagccggacctgatcacctttttggaacaaaggaaagagccttggaatgtgaagagtgaggagacagtagccatccagccagatgtgttttcgcattataacaaggacctgttgacagagcactgcacagaagcttcattccaaaaagtgatatcgaggagacatgggagctgtgatcttgagaatttacatttaagaaaaaggtggaaaagggaggagtgtgaagggcacaatggatgttatgatgaaaagacttttaaatatgatcaatttgatgaatcctctgttgaaagtttgtttcaccagcaaatactttcttcttgtgccaaaagctataactttgatcaatataggaaggtctttactcattcatcattgcttaatcaacaagaggaaatagatatttggggaaaacatcacatatatgataaaacttcagtgttatttaggcaggtctctactctaaatagttaccgaaatgtttttattggagagaaaaattatcattgcaataattctgaaaaaaccttgaaccaaagctcaagccctaaaaatcatcaggaaaattattttctagaaaaacaatacaaatgtaaagaatttgaggaagtctttcttcagagtatgcatgggcaagagaaacaagaacagtcttacaaatgtaataaatgtgtagaagtttgtacccagtcattaaaacatattcaacatcagaccatccatatcagagaaaactcatatagctataacaaatatgataaagatcttagtcagtcatcaaatcttagaaagcagataatccataatgaagagaaaccatacaaatgtgaaaaatgtggggatagcttaaaccatagtttgcaccttactcaacatcagatcattcctaccgaagagaaaccctataaatggaaagaatgtggcaaggtctttaaccttaactgtagtttataccttactaaacagcagcaaattgatactggagaaaacctttacaaatgtaaagcatgtagcaaatcttttactcgttcctccaatcttattgtgcatcagagaattcacactggagagaaaccatacaaatgtaaagaatgtggcaaagcctttcgctgtagttcataccttactaaacataagcgaattcatactggagagaaaccttataaatgtaaagaatgtggaaaagcttttaaccgtagttcatgccttactcaacatcagacaactcatacaggagaaaaactttacaaatgtaaagtatgtagcaaatcttatgctcgttcttcaaatcttattatgcatcagagagttcatactggagagaagccttataaatgtaaagaatgtggcaaagtctttagccgtagttcttgccttactcaacatcggaaaattcatactggagaaaatctttacaaatgcaaagtatgtgctaaaccttttacttgtttctcaaatcttattgtgcatgagagaattcatactggagagaaaccctataaatgtaaagaatgtggcaaagcctttccttatagttcacaccttattcgacattatcgaattcatactggagaaaaaccatacaaatgtaaagcatgtagcaaatcttttagtgactcctcaggtctttctgtgcatcggcgaactcatactggagagaaaccctatacatgtaaagaatgtggcaaagcctttagttatagttcagatgttattcagcatcggagaattcatactggccagagaccctacaaatgtgaagaatgtggcaaagccttcaactataggtcatacctcattgcacatcagagaagtcatactagagaaaaactttaaaaatgtaaaacatggagcagattttttacttgttacccatgtcttattgtgcatcagataatttatatgggagtgaaaccctacaaatgttaagaatgtggcataacctttaactattttcaagccttacacaatagcagagaatataaactgaaaaaatccatacaaatattaaaaatgtggcaaattattttaaactgtgctcaacccttactcaagataatccatactagagaaacactatagatgtaaaaatgtgaaaagttttattcaaaatatcaaacttatgagtcacctaggggttcatagaaaaaggaagtttgcagatgcaataaatgtgaggaagtatttaataaaaaatgaagtctaaatgtgtcagagaatttatgtgagaaaggactaaagcacagacactttcagcctttatactaaataagagtattttttgtacagaataatctaaaggcaaaataattagataatttatttgcttatatgttttaaagtagcaagaacattgatgttttgacaggtatatttcatagatacttcatttgtatttacagtatttgaggtttttggaaagcaaatattatttatataattcagctttcaaatctgttgctgcttttccttaatccgtggtgttcatgtgaaaatatgtgttctgtttttttttctgcatcagaacaatgtgaggtcattctacgttaatatcattaatatcagcatttttcatggaagtttaatgccaaatgtaaaacacatgaaaatttttaaaaatatgctctttgtgtttgaataaagtagtaatgcacgt

SEQ ID NO: 75511 - DNA, 762 bp, Homo sapiens
gtgttttgtgttatggatcgacaattttgtcggttctttgtagcgactaaccagtgccatgtttgttgattggatctcctttatcactctgatggtcaacagaccccacccacaactcttgctgcctccatacaccttgctattttcatttatcatgtgttggaacctaaaaacaaaactaagcacatgggaattatgcatggaatatgaataaatgggcactgcatatgcggctgagatgctgtcctacaaagaaagcacatgctcttcatggtattaactttgactttggcaattttctgcctgagagggcttgggctggaacttctgtactcatatgtcactgaagtcctgctaactccacaccccacggcatgtggatgcaaggctcccaccatggcctagctttctgacagcctttagtgagcgtgccccatgttctgtgcactcgacattgctggaaatggcccctcttctgcttgtttcgggactgtgctagacagctgaagttgtcatattgtgactctgtatagaagaggctttatcacattttacttttcatgaattctagctaatgcctttgattgtactgtgtacttttttgagacaaggactgcctaccttttctttttatcttcctaatagtctagcatagctcttgaggtacagtgctcaacactgtctgtttccttgctttgaaacatattatgtttttatttattatgttatttattaaacaaagcctttaaaggaataaaacaa

SEQ ID NO: 75512 - DNA, 566 bp, Homo sapiens
gctgcagctccggtggaaataataagatataaaccacgaggttgttatttgcatagaaatagcatggagccccaggcagcaagggagaaggacacagggatgatttgtctaaaattttaatgaaaacttttgctgaggcagagatttttaaaaactttctttctccctgcttttccccttccttcccctaccccccaaaccccatcattgattttacttaacatggttcagtttgaagagaaaaggttgacactccacatatcatactcccataatgcagcaacctgtaaattgtttcttcctttaatagatatgaagctgaagagacatgcattttcaacttaatacattgcatgtgtgcgcctggctttatggctatactccatcttgggcatacacatgatgttgcctgtcattagcctgtttttaattagtttacaccttcctatcttttgcttccaaagactcttactttttaaaggatttctttttatagccaacagtagtaaccttcatataaaataaatattttctggtgttttcctgtttttttacttttggtggtt

SEQ ID NO: 75513 - DNA, 840 bp, Homo sapiens
aaagaataaagtgatgaagtcaacaggtgttattaaaaaatgtgaataacaggaaaatgttttgttgtttgttttgttttgtctttgaagtctttcacagactagatttgaaggtttatgaaggatagggcaaaattttctaaggaaagttgcatcctatgacctcaggctgacttcaagtaagagtggatttgataaaggcattgtctttcttagagtatgtgcatcttggcagaggagcctggagaggcagtatagaaggattgttttagatgttggatctctgtaacctgcatttacattttgttgagccgttgtcatttgggggaaaacacgaaaaagaaaagatcattatcatgctactataatgcacatcacatagaattgcaatgatttgttggttgttcattccagtccaagaactgtgagtttctccagccaaaggtcttgtatttattgatctttctgtcccacaggcctaaaacagcagttggcccatggacagtttaataaatgtttgctgactaatagatagggtatctaaaatcttttccatggccttatctctggagattaaaattttccagcacttgtctataaaagatgtctatgcgtaactgtagggaagacattgtaatttctgaagaggaggagcaaaccgacaaggttattgtagcattgattataatgcatggtagcagtctattctcagacctttagatgcctatttacctgatgcactggcaccaatgcccccattttggtgtgccatcttcccttcaccacttgggacaacacagataataaaatcagctccaaaagctaacccatggtggatcc

SEQ ID NO: 75514 - DNA, 334 bp, Homo sapiens
gaattccccccccccccccccccccatagggtatctaaaatcttttccatggccttatctctggagattaaaattttccagcacttgtctataaaagatgtctatgcgtaactgtagggaagacattgtaatttctgaagaggaggagcaaaccgacaaggttattgtagcattgattataatgcatggtagcagtctattctcagacctttagatgcctatttacctgatgcactggcaccaatgcccccattttggtgtgccatcttcccttcaccacttgggacaacacagataataaaatcagctccaaaagctaacccatggtggatcc

SEQ ID NO: 75515 - DNA, 446 bp, Homo sapiens
tgaattagaaacagcaattgatggtggactttcactttggtctacacagtgctttgtgttatcagctgttgccacctcttcccacagtagaactctcaactcctagacatgactggttgaccagccgttccccaggaggatgtatgttccaccttgacctgtgtttggcaggcagtttccaaggtaccccacattgaggcagtgacccagcaccttcaccactgggttctttattcctgattatcaaaagtcagactactgctctgtggtaactgcatctcgtttggttgccatcactggatgcttggagtagccatgtgaacgttattactgtacacacttgggacagctccagggattttgtgtgtgtgaagttgcagaaaggaagaatgtccccatgctggggagaattaagcatgtcacctaattgtgtaacaagatgactt

SEQ ID NO: 75516 - DNA, 632 bp, Homo sapiens
gccgagctcttgggttactgcaacctccgccttcctggcttaagcaatttttgtgcctcagcctcccaagtatctgagattacaggcgtgtgccaccacacccagctattttttattttttatttttagtagagatggggtttcgccatgttggccagactggtctggaactcctggcctcaagtggtcctcccacctcggcctctcaaagtgctgggattacaggcgtgagccaccacgtttagctgagtataattttaaatagccctatgtgacaagtggctactttattggacagtgtagatctaagattaattcctcaactgttttgcactcaacaaagacatacctctgagttggcaaccagcagggtggataacgggccagtggtgataaaatcaaagaataggtaatgaaacaatcatccagttaacaatcagcaaggttcttcagagcctaattaatgtttaattctaaataaattgcaacaattaagaaaagtagtgtttttgtagttctttattgcatttgcagaagagtactgtattttgtgagaattgggaaatgtgttttaaagagatgtgtgaggaggaaaatctttcttcctcatctttacagtggttaggttcaga

SEQ ID NO: 75517 - DNA, 689 bp, Homo sapiens
tttgccctcgagtccagatttcggcacgaggtttaaatttcttgagacagagtctcactctgtcacctaggcgggagtacagtggcgagctcttgggttactgcaacctccgccttcctggtctcaagcgatcctcctgccttagcctcccaaagtgctgggattacaggtgtgagccactgcgcccgaccaagtctcagtttctaaatttataaaaatcaggagtgcaaaccagagcaagatttgtcaaagtctccagacacccagacatttgttactttcagctattgcagcttcatccttctgatataattttaaatagccctatgtgacaagtggctactttattggacagtgtagatctaagattaattcctcaactgttttgcactcaacaaagacatacctctgagttggcaaccagcagggtggataacgggccagtggtgataaaatcaaagaataggtaatgaaacaatcatccagttaacaatcagcaaggttcttcagagcctaattaatgtttaattctaaataaattgcaacaattaagaaaagtagtgtttttgtagttctttattgcatttgcagaagagtactgtattttgtgagaattgggaaatgtgttttaaagagatgtgtgaggaggaaaatctttcttcctcatctttacagtggttaggttcaga

SEQ ID NO: 75518 - DNA, 417 bp, Homo sapiens
  misc_feature (39)..(39): n is a, c, g, or t
  misc_feature (412)..(412): n is a, c, g, or t
tctttgcttgtctaaattctttagatataattattaacncagtcctttctccctttaaaagttactccaacttacactgctgtttattaagtgtaggtattgttttgagaagcttttatttcacacccaataaaagtgtgcaggattcctcttgttccagccttaccttcccgatgatcctagcacatacttgtgtgtatatacagacatgttacagtgccaagtgtacttcctactgtggtgtgatttaaaaaattgaaataccctaaactggaagaactcctcaaggtctaaactgcgcccggcctaagctaagtgttttaatacatgacctcactgacacttcacagtaggcctgtgaagtaagcataaagaagagctacagataagtttagggacccagacaggaacnccgga

SEQ ID NO: 75519 - DNA, 1075 bp, Homo sapiens
gatctgctatgttgcccacactagtctcaaactcctggtctcaagcgatcctcctgccttagcctcccaaagtgctgggattacaggtgtgagccactgcgcccgaccaagtctcagtttctaaatttataaaaatcaggagtgcaaaccagagcaagatttgtcaaagtctccagacacccagacatttgttactttcagctattgcagcttcatccttctgagtacatgagttagtgggcaagcccaacatttaaatttctttaaatggaagaaagaaagtggataagatagaaaaatcagggtgttgcactttattaagtgtaggtattgttttgagaagcttttatttcacacccaataaaagtgtgcaggattcctcttgttccagccttaccttcccgatgatcctagcacatacttgtgtgtatatacagacatgttacagtgccaagtgtacttcctactgtggtgtgatttaaaaaattgaaataccctaaactggaagaactcctcaaggtctaaactgccgaatcgaacttcctattgtaatggaaatgttctatagctgtactatctagtaccgtagccactagccacatgtagctgttgagcacttgaaatgtgtctagtgtgacgaagaattaagaattttagtgggattacaggcgtgagccaccacgtttagctgagtataattttaaatagccctatgtgacaagtggctactttattggacagtgtagatctaagattaattcctcaactgttttgcactcaacaaagacatacctctgagttggcaaccagcagggtggataacgggccagtggtgataaaatcaaagaataggtaatgaaacaatcatccagttaacaatcagcaaggttcttcagagcctaattaatgtttaattctaaataaattgcaacaattaagaaaagtagtgtttttgtagttctttattgcatttgcagaagagtactgtattttgtgagaattgggaaatgtgttttaaagagatgtgtgaggaggaaaatctttcttcctcatctttacagtggttaggttcaga

SEQ ID NO: 75520 - DNA, 837 bp, Homo sapiens
gatctgctatgttgcccacactagtctcaaactcctggtctcaagcgatcctcctgccttagcctcccaaagtgctgggattacaggtgtgagccactgcgcccgaccaagtctcagtttctaaatttataaaaatcaggagtgcaaaccagagcaagatttgtcaaagtctccagacacccagacatttgttactttcagctattgcagcttcatccttctgagtacatgagttagtgggcaagcccaacatttaaatttctttaaatggaagaaagaaagtggataagatagaaaaatcagggtgttgcactttattaagtgtaggtattgttttgagaagcttttatttcacacccaataaaagtgtgcaggattcctcttgttccagccttaccttcccgatgatcctagcacatacttgtgtgtatatacagacatgttacagtgccaagtgtacttcctactgtggtgtgatttaaaaaattgaaataccctaaactggaagaactcctcaaggtctaaactgccgaatcgaacttcctattgtaatggaaatgttctatagctgtactatctagtaccgtagccactagccacatgtagctgttgagcacttgaaatgtgtctagtgtgacgaagaattaagaattttagctgggcgcggtggcttacgcctgtaatcccagcactttgggaggccaaggtgggtggatcaccaggtcagaagatcgagaccatcccggctaacatggtgaaaccccatctctactgaaaaatacaaaataattagccgggcgtggtggcgtgcacctgtagtcccagctactcgggagg

SEQ ID NO: 75521 - DNA, 372 bp, Homo sapiens
gcaaaagccctcacttggtttcccttccacatcttctggtgtgaagctttaaaatatgttgctattgataatataaaataatatttgtactagaaacatgcatgtataaagttatttgccgatttgcaaacaacacaatgcacctttcctacactgttattcacaaggaccctggaaaaggtagaggcatcattagcccaaatttattttattttatttattttgagatggagttttgctcttgatgcccaggctggagtgcaatggcacgcgcgatcttggctcaccgcaacctccacctcccgggttcaagcaattctcctgcctcagcctcctgagtagctgagattacaggcatgtgccaccacacct

SEQ ID NO: 75522 - DNA, 798 bp, Homo sapiens
aaaacggaggataaattattgaaaaagtaattcagccaaattttacagaaccgaaggacacgattttccagatttgaagacgccactgagtgcccaacatagtggatgaaaatagacccataccaaaagacatgttgttatgaaacaaaagagacaaaaggaatctgttacaatgatgaaagtagcttttcaaatgacaactgcacagcaggcaatgagggaaaccactccaaattggagcaagttagaaggctctgggagagatttttttcaacaagatgaaactgataaagtacctaatacatttgaatgtattgagagttgatagaaatggggaaacacgtggaggtgaattgtatatagaaaagtgaggaaatgaaaaatcaaacagttttcatgagcaaattttaaaaatcctctagaataaagtagattatttagggaattacatccctcaactgtgaatattatttacataataaaaataaatactgaatatcattaaaagtaaatactgaatattgatctaactaaaattacagtataattcttttgggggcacatgtttatggttaggactggaatggtggaacatgcctaatcattatctgtggccatgagtatgatagttacagaagcacactaaatatcagaagaattagttaaagcaattcaaaagtgttgcctctagggagcagaaaatggggtgagcatggcagagagatactgttgtttttaattagtcttgtagaacaatttctctttttaatgtataaatatatgagtttagtaataagc

SEQ ID NO: 75523 - DNA, 206 bp, Homo sapiens
gcagttacaaagagaactagtggaaactgatgtcattcacaatacctttggaaattagcctggaccctctaccttcgtaaagcatgctgcctgaaagcgctccgtgaaaggatgattttttgtaaacttttatttttattaaaagagaaaaagatagtttacatcttggtaaggctgagaatggtcacttataaaaatgttgaaaa

SEQ ID NO: 75524 - DNA, 702 bp, Homo sapiens
ctccgtcttaaaaaaaaaaaaaaaaaaaaaaaaaaaaaaaaaaaaattgattgaatgttcagtccattttcttattagtcatgttccacccccaaaatgaagaggggggataagacgctgtgtgcgtagaagtatcaagttggacagaactgtatttagaaagagatgctggaagtctggaaagggctgcccatctgtatagttgacctcaatatatggtcgtctgtatagttggtcaactatatatggtcaactatacagctataaaatatggttgaccacaataaggcactgattaaattcaaaatcataagatacacgcactcagatttattcagacaaattgttcctcttcctgaaagatgtttttttaagtctgaaatttcaataagaaaaggattctaatcatttcaaagatctttttttaaaaaaaccttctttccccttcccacctcccccaatccttcttagtatatagatgaaaactccagccacccagccccaacttgacaggttcattttgtctccacctgggttgtgcaatatggtaacttctgtccttatgtagttattaaccacttggaatgtgattagtcccaatacagaagctctgtgcacaccagatttctaagacgtgtacaacaaaaggaatggaaaacatcacattatattttaatattgattatgtgttaaaatgatatt

SEQ ID NO: 75525 - DNA, 316 bp, Homo sapiens
tttttagtagagacggggtttcaccgtgttggtcaggctggtctcgaactcctgacctccagtgatccacccgcctcggcctcccaaaatgctgggattacaggcgtgagccactgcgcctggcccattatatatctttgaatatttcatttaagccttgtatataatacattcccaacaaatgattgttgaataatgaataaaagggatctatttagtgcattatggcattcttgtaggacgttgtattcgggttctccagagagacagaaccaataggatatatacagcatacagatatatgagaggggattta

SEQ ID NO: 75526 - DNA, 344 bp, Homo sapiens
taaatttatttatatagagttgtttgagctccttatacattttggttatcaatcccctgacagatgagtggtttgcatagtttctctcattctgtcagctgtgtcttcattttgatattgttttgctctgcagaagattttcaacttagtgttatcagttttgtcaatttttaatttgattaactgtgattttgaggtattattcaaaaaagttttgcctagaccaatgtccttcagattttttccaaagttttcttgtaatagcttcgtagattgaggtcttaaattttagtctttagtatatttggatttttttttttttttgagacagaatcatgctgtgt

SEQ ID NO: 75527 - DNA, 391 bp, Homo sapiens
ttccctgcttggggggtttgaataggctgatttccagactcgaggctgtcatatagcctttttgtttttcctggtagttttctgattttttttttttaatctttaattcatagaaaacagtttacttccatccaaattaggtgggaatttttttaaaccatatgtagacacaaaagagatattccttgccaactagtgacacatggcagatgaagacagagtgggagatacacttccggttcacaacagcacttctgagcagtttgtgcttaaccctttaggggagcatttgtgctcagaaccctggaatagcaggacagtgccagggccacacagagactcagtctggaaagagcctgcctaactgcagatggagcctgaaccctgcgct

SEQ ID NO: 75528 - DNA, 455 bp, Homo sapiens
gtgactgtgagtgggtacaggcttccttctggggtgatgaaagtattctggaactcagtggtggttgtacatcattgtgaatgtactaagtgccactgaattgctcacttgaaaatgattttttttttttttttttttttgagaccgggtctcgctctgctgcccaggcgggagtgtggtggtgcaatcatagctcactgcagccttgaactcccaggctcaagtgatcctccactttagcctctcgagtacctgggaccacaggcgcgtgccaccatgcttggctaatattttgtatttttagtagagatgaggttttgacacgttgcccaggctgatctcgaactcttggactcaagcaatgtacccacctcggcctcccaaagtgctaggattaaggcatgagtcagtcttaaaatggctaattttatgtcatgcaaatcttatccccatca

SEQ ID NO: 75529 - DNA, 413 bp, Homo sapiens
taaatgcacgaatgtatttcacttcctcttaaagcaaatacaaagtagggctgatattaactaccaaaatgacaaactttcatatgactgacctacatgcacacacagttagaataaacaccagggaagaggcccagacagtgacctcaggagttcaggcaagcaagggaaaactggaggctgggccaaagagtcttcacagaagagtggtgctctggtgtggaggaagtaataatctgagtcttcaagagagtgccagagtagtggagtgtcctcccggaggggtgggagtgatgctgggagttaactgagcccatccattgagcttggaagcccaagctaaagatctagacctctcattacttcccaatcagtgacaaagggagtgttttgaagccatgttagcccccaca

SEQ ID NO: 75530 - DNA, 344 bp, Homo sapiens
aataaacttctgttgttttaagccacctagttgtggtcacttgttatggcagcctttggaaaccaacacacccgcacatggcgtgtttaacgcaggctgatacaaccttaagaaaggaatggatgtggtcatcagcaatctccaatacctacagcaaatgggaagacagggaaggaccagaggtgtaggtaaagcaaaaagccacaggtcattaggaagtgatgctccaactgggcatggaaaaggagtttggagttaggaacacgacagatctgtctggacaaggatccagatctctcctagggggaaggaggggcaactaggacagtttttgtgtctgtggg

SEQ ID NO: 75531 - DNA, 412 bp, Homo sapiens
agaacctcagtggatctcagagagagccccagactgagggaagcatggatggatggagaaggatgcctcgctggggactgctgctgctgctctggggctcctgtacctttggtctcccgacagacaccaccacctttaaacgcttcatccgaaagttctacacagagtttgatcggcgtaacaaccgcattggcttcgccttggcccgctgaggccctctgccacccaggcaggccctgccttcagccctggcccagagctggaacactctctgagatgcccctctgcctgggcttatgccctcagatggagacattggatgtggagctcctgctggatgcgtgccctgacccctgcaccagcccttccctgctttgaggacaaagagaataaagacttcatgttcacagcc

SEQ ID NO: 75532 - DNA, 1393 bp, Homo sapiens
  misc_feature (2)..(2): n is a, c, g, or t
tnttccagaggattatgtaaccaaatccaagcacacaccactcaccacacaacagcaagtaagctgagaggatcttcctcaagagaatgccctcaatccgagaaagcctgaaggaacgaggtgtggacatggccaggcttggtcccgagtggagccaacccatgaagaggctgacacttggcaacaccacctcctccgtgatcctcaccaactacatggacacccagtactatggcgagattggcatcggcaccccaccccagaccttcaaagtcgtctttgacactggttcgtccaatgtttgggtgccctcctccaagtgcagccgtctctacactgcctgtgtgtatcacaagctcttcgatgcttcggattcctccagctacaagcacaatggaacagaactcaccctccgctattcaacagggacagtcagtggctttctcagccaggacatcatcaccgtgggtggaatcacggtgacacagatgtttggagaggtcacggagatgcccgccttacccttcatgctggccgagtttgatggggttgtgggcatgggcttcattgaacaggccattggcagggtcacccctatcttcgacaacatcatctcccaaggggtgctaaaagaggacgtcttctctttctactacaacagagattccgagaattcccaatcgctgggaggacagattgtgctgggaggcagcgacccccagcattacgaagggaatttccactatatcaacctcatcaagactggtgtctggcagattcaaatgaagggggtgtctgtggggtcatccaccttgctctgtgaagacggctgcctggcattggtagacaccggtgcatcctacatctcaggttctaccagctccatagagaagctcatggaggccttgggagccaagaagaggctgtttgattatgtcgtgaagtgtaacgagggccctacactccccgacatctctttccacctgggaggcaaagaatacacgctcaccagcgcggactatgtatttcaggaatcctacagtagtaaaaagctgtgcacactggccatccacgccatggatatcccgccacccactggacccacctgggccctgggggccaccttcatccgaaagttctacacagagtttgatcggcgtaacaaccgcattggcttcgccttggcccgctgaggccctctgccacccaggcaggccctgccttcagccctggcccagagctggaacactctctgagatgcccctctgcctgggcttatgccctcagatggagacattggatgtggagctcctgctggatgcgtgccctgacccctgcaccagcccttccctgctttgaggacaaagagaataaagacttcatgttcacagcc

SEQ ID NO: 75533 - DNA, 1465 bp, Homo sapiens
agaacctcagtggatctcagagagagccccagactgagggaagcatggatggatggagaaggatgcctcgctggggactgctgctgctgctctggggctcctgtacctttggtctcccgacagacaccaccacctttaaacggatcttcctcaagagaatgccctcaatccgagaaagcctgaaggaacgaggtgtggacatggccaggcttggtcccgagtggagccaacccatgaagaggctgacacttggcaacaccacctcctccgtgatcctcaccaactacatggacacccagtactatggcgagattggcatcggcaccccaccccagaccttcaaagtcgtctttgacactggttcgtccaatgtttgggtgccctcctccaagtgcagccgtctctacactgcctgtgtgtatcacaagctcttcgatgcttcggattcctccagctacaagcacaatggaacagaactcaccctccgctattcaacagggacagtcagtggctttctcagccaggacatcatcaccgtgggtggaatcacggtgacacagatgtttggagaggtcacggagatgcccgccttacccttcatgctggccgagtttgatggggttgtgggcatgggcttcattgaacaggccattggcagggtcacccctatcttcgacaacatcatctcccaaggggtgctaaaagaggacgtcttctctttctactacaacagagattccgagaattcccaatcgctgggaggacagattgtgctgggaggcagcgacccccagcattacgaagggaatttccactatatcaacctcatcaagactggtgtctggcagattcaaatgaagggggtgtctgtggggtcatccaccttgctctgtgaagacggctgcctggcattggtagacaccggtgcatcctacatctcaggttctaccagctccatagagaagctcatggaggccttgggagccaagaagaggctgtttgattatgtcgtgaagtgtaacgagggccctacactccccgacatctctttccacctgggaggcaaagaatacacgctcaccagcgcggactatgtatttcaggaatcctacagtagtaaaaagctgtgcacactggccatccacgccatggatatcccgccacccactggacccacctgggccctgggggccaccttcatccgaaagttctacacagagtttgatcggcgtaacaaccgcattggcttcgccttggcccgctgaggccctctgccacccaggcaggccctgccttcagccctggcccagagctggaacactctctgagatgcccctctgcctgggcttatgccctcagatggagacattggatgtggagctcctgctggatgcgtgccctgacccctgcaccagcccttccctgctttgaggacaaagagaataaagacttcatgttcacagcc

SEQ ID NO: 75534 - DNA, 2188 bp, Homo sapiens
  misc_feature (1541)..(1541): n is a, c, g, or t
  misc_feature (1544)..(1544): n is a, c, g, or t
agaacctcagtggatctcagagagagccccagactgagggaagcatggatggatggagaaggatgcctcgctggggactgctgctgctgctctggggctcctgtacctttggtctcccgacagacaccaccacctttaaacggatcttcctcaagagaatgccctcaatccgagaaagcctgaaggaacgaggtgtggacatggccaggcttggtcccgagtggagccaacccatgaagaggctgacacttggcaacaccacctcctccgtgatcctcaccaactacatggacacccagtactatggcgagattggcatcggcaccccaccccagaccttcaaagtcgtctttgacactggttcgtccaatgtttgggtgccctcctccaagtgcagccgtctctacactgcctgtgtgtatcacaagctcttcgatgcttcggattcctccagctacaagcacaatggaacagaactcaccctccgctattcaacagggacagtcagtggctttctcagccaggacatcatcaccgtgggtggaatcacggtgacacagatgtttggagaggtcacggagatgcccgccttacccttcatgctggccgagtttgatggggttgtgggcatgggcttcattgaacaggccattggcagggtcacccctatcttcgacaacatcatctcccaaggggtgctaaaagaggacgtcttctctttctactacaacagagattccgagaattcccaatcgctgggaggacagattgtgctgggaggcagcgacccccagcattacgaagggaatttccactatatcaacctcatcaagactggtgtctggcagattcaaatgaagggggtgtctgtggggtcatccaccttgctctgtgaagacggctgcctggcattggtagacaccggtgcatcctacatctcaggttctaccagctccatagagaagctcatggaggccttgggagccaagaagaggctgtttgattatgtcgtgaagtgtaacgagggccctacactccccgacatctctttccacctgggaggcaaagaatacacgctcaccagcgcggactatgtatttcaggaatcctacagtagtaaaaagctgtgcacactggccatccacgccatggatatcccgccacccactggacccacctgggccctgggggccaccttcatccgaaagttctacacagagtttgatcggcgtaacaaccgcattggcttcgccttggcccgctgaggccctctgccacccaggcaggccctgccttcagccctggcccagagctggaacactctctgagatgcccctctgcctgggcttatgccctcagatggagacattggatgtggagctcctgctggatgcgtgccctgacccctgcaccagcccttccctgctttgaggacaaagagaataaagacttcatgttcacagccaaaaaaaaaaaaaaaaaaaaaaaaaaaaaaaaaaaaaaaaaaaaaaaaaaaaaaaaaaaaaaaaaaaaaaaaaaanaanaaaaaaaaaaaaaaaaaaaaaaaaaaaaataggggggggggcgcgggccgggaaacacagtcaagtgggggggcgcgcgggagcccacaagatcaggagaaaaagacagtcgtaccaaacgacagatcgaacgcgacgcagacaactggggactgacgaaacgcagggagggacgctaaacacatcccaaacaacaaaaagccgaggggtcgagaacaacagctagctaggatgacacaaacaacagaacgacgaggaaccacagtgaagacaagagagatgctcataataacagcgagaaagaacacacaagtcccagtcatataacaaaacgccacacgggagcggagcagaaaacgaaagagacggagaaacacaggaagaaaacacacaagacagagacgaaggacaagcgggaggcagaacagaagacacgagaggggagagagcagagcagaaaggacccacgcaaacacgggaggcaaccgaggaagggagtgaagacgggcgagagatgcgagaccagaaaaggaggggcgtcggctaaaggacgacaagtctagagacgggagcagaaccacacaggcgagcagccggaggggacagcagcctcagaaagggaaataagaaagccagagacgcag

SEQ ID NO: 75535 - DNA, 855 bp, Homo sapiens
gcaggaagaggaggacacctccagtgctagtccgatgaattgggtcaagcaccggtctcaacacatccacgctctgtgagctctggtttcctcacctgtgaagaagggctaataacacccagtatgcaaggcaggcggtggaaccgaatcccagccatgcaacttgtgtgctgtgcaacgatggcaagttaacctgagcctgtttcctcatgagaaatgattaccttggaagctgcttctaacaatgtgactagaacctttaggaaaaacacatagcacaagcttgccacagaagagaggctcaacaaatagaaaaacttgatttccagcgctcttgttgggaataaatggaagtcactgtgaatattgcatactgccgagaagaggaaaaaaatcaagtttcttgcctaggactttctgtgcagctcctatgtcttagaagatgtgtttggctcccttttgtgaaaggcttttccttcagtttatttacctgtgtgaacagaattcaaaattctttcatcatttcgctaaagctcagtgaggagtgtcaactccacaagccaaaaagcctaatcctacgttggcagccagattacacacatctgaaattgaaccaccagaaataccatacccagaaaatcatttgatctgtgaactgaatcctgtgagggttccgggcctcctcaaggcagaaagggttcaatttgaaaggcggttattagccctgtcccatgagagggagcgggagatccacatctttcctgggagcctcgtgccttgcacacaccatcgaaaacctgttcatctgcactggaagcagcatgcaaataaaacgttttggctctataaaaaaag

SEQ ID NO: 75536 - DNA, 471 bp, Homo sapiens
gccaccacgcccagtctcatttctattctatgaatatttccatacatttttcctttcttgtacaccctgctctcttagccaccttcttgaaataatcgactgttgaactgttagtacttccctgaagaccaataatttccagattaatcgtgtttactccgtggatcactattataagtaatttaaatggatttctactaactgtgtgtgtgtgtaaatactagcaatactagcaaccaccattctttggtatgtctttgttaattttcttaagagttagtagagaattttgtcccagtcttactttctgtatcctatgggagatgaactaaactgccttattcactctaatcacttcatttgaaattcagtaagcctctctaatttcaaacactggcatcagcaagtcggtgagcatttgtgagcacacatttgtagatgtgtgtttttttaaaggcaaaaaaaaaaaaa

SEQ ID NO: 75537 - DNA, 426 bp, Homo sapiens
gacacaggccacatcacattgagtaccatggatttatgggtcagcattgccccctaagtcccaaggaaggggaaagacttagcaagctcaacctcatgtgattcacaaagggtttctttctgcatttgtattgactcagaataggacccagtacagagaatccactgttatctatgggtgtcattccttcagaaagaatgtacagtaaaattggctatttcatgctatgcaaacaaaatgaaactagtttgaagttgcaaagtgtctcccctcttgcgcccacgtagtcatccaagaaggaaactcctttcttgccttgatattcaccaggcctacctagatagaacttgacaaattggcctaacttcatctccgctgctattgttatatatttgctttactgaatctatgtcctatgtcagtcag

SEQ ID NO: 75538 - DNA, 753 bp, Homo sapiens
cacccgccatggcctcccaaagtgctgggattacaggcgtgagccaccgtgcccggccagaaaatacattctttacagcaaatgttataggttaaggagacagttcctgggtttagctgtgaaactgtttaggattttctttaagtggtgttcccaagagcttttttctggtaagttggaggctataggcaaagcgtctaggagcttgttgttttttgctatggaaggccagctttgggatctatatacatgggcatgtttctcaatggagtggtcacaggattctcttctcagaactctgcctgaaacctttccggtgtgttttgtcttcaactttttcctagctatcctattagcctgtaaatatgtcagcagacaatgtgtttggaagaaacaaggtgtacaacttcacaaagcaagttttttctggtctgagacttactgtgtgcaggaagtctcgtgagaatatacttagaaaatcacacttatctggaaattcaataagtcatattaaaaatatacaatttcttgaactcaggactagcctgaaaatccaaaatgcatgtagagttgacatgttgacatatgtctatgtcctctgtttttatttaagcctcatttatttctcccttgccatgcccatttgggattttctttgcccagcatatgtgccataaacagaacaaatggatccagggtatacctctaataacctttatctaaatagaatacatttaacctgtcaattatatg

SEQ ID NO: 75539 - DNA, 2673 bp, Homo sapiens
agccctctgcaggcatttgctctgggctccaggacgaactcctcgtcagctggtgcgtctgggttgggacagtgaaaatgtttagtgtcattggcgacaaatacacatacaggggatcccagtaggtaggctggtgcattggaggggcaggagcaagcccgacataggtgtgtgcacacacataggagtagctggccacatgtgtgtgtactttaaggagagactttagttttgggtttttttttttttttggttcctggggtaaattttctgttgaacatttttccctcctatttagttttttttcttttgcatttttaaaaatttgaacataaaaagtataaagaatcaaatctttgaaaggaccgaggcgtgcagcggacagcagatggatcccgcggccagcagctgcatgaggagcctccagcccccagcccctgtctggggctgccttcgaaacccccactcggaaggcaatggggcctcagggctaccccactacccgcccaccccgttctccttccaccagaaaccagacttcctggcgacagcgacggcagcgtaccctgacttctcagcctcctgcctggcagccaccccacacagcctgccccaggaggagcacatcttcactgagcagcaccccgctttcccacagtcccccaactggcacttccctgtctcagacgcccggcgcaggcccaactcaggcccggcagggggttccaaggaaatggggaccagcagcctgggcctggtggacaccacaggaggcccaggcgatgactacggggtgcttgggagcactgccaatgagacagagaagaaatcatccaggcggagaaaggagagttcagacaaccaggagaacagagggaagccggagggcagcagcaaagcccgcaaggagaggacggccttcaccaaggagcagctgcgagagctggaggcagagtttgcccatcataactacctgactcggctccgcagatatgagattgcggtaaacctggacctctctgagcgccaggtcaaagtgtggttccagaaccgaaggatgaagtggaagcgtgtgaagggaggtcagcccatctcccccaatgggcaggaccctgaggatggggactccacagcctctccaagttcagagtgagattctgcatggaggaaaaatgactaaggactgagccccctacccaactacccccaccccaatcccaccttcaccctcttccttccccagccagggcagcctctccacatctttccctgactcttggatatgaaactgcccagcattcctgggagtcttaggattttctaggaagttctgtccagcctcttagcagcctcttccctagggcctttgctcccacactctcatggaatcagacagagatcctaccgggccggatgaatctggaaacagcttcagagatactgcttctcagcgtctcttggctgccacccatgcctcctcctaccgctgttctcctaggtcagccaggcctcctcctggtctggacaccacctggcctggtgggagaggagctttggaaccagctggcgactcggaaagtaaatgcttcaaaaggaaggaaatgacagagacacacgcccttgcccaccttcctctgtaggctgcacatctgaggctttggggccccttagttgtcccgaaaccccaagaaaaatcagaatgaggagagtcaaggacagcaactcagctgctgcaagccagaaacacatccctgtctccaaatttgttggctaagtggagacacttctgagaactgactagagaagacaagaaaaatagcccgatgtaggtttcggtgtccccatataggccccgtccacacaggcttgactgggtggacaagaatgaacccatgacagcacctgctgcttcaaaatcaaaatcaatttagggatacagcaggggctgttgggctgtgctccagagaaaaggagcagctactccttttaaatccacgatttctggattgaaaacctgtccagatgctgagttgttgggctgaacaactaggagctgaaaacaacgtagaggctggaaagtgtcccctgcattctggaggggaggggagataataaggagggctgctgggtgagggcctggagatgtggaaccctggagtggaaggttctccagtgacagtgtcctgtgactgcaaaaggggacaagaaaatccctcttcctccatgggatggatttaagctcttgctgtgtgttctacaaatgctgttattgtgggaggaaatgctaggtttttgtgtgtggactgcccagacctcagccaggtcttctggagatgacatttgaggactgatggccaaagagcatgggggactgaagccctggctgcctcagcgctctgtctcccaacaccagctggtgttgcagagggaggtcaacgtgagtttggatctcttgtacgcagatgtaatcattcacatgtaaaaataaccccacctccccaccccaaaaagggcaagagctgtggaaaatgattgccaaatgagatggctggttagagcatgattttttctaaagcatacttcatatattttcttaagattacatcaagctaattgtgcgagctcaattcactttgtaagaaaactctcggagaaataaaatcaataaaaagc

SEQ ID NO: 75540 - DNA, 2493 bp, Homo sapiens
agccctctgcaggcatttgctctgggctccaggacgaactcctcgtcagctggtgcgtctgggttgggacagtgaaaatgtttagtgtcattggcgacaaatacacatacaggggatcccagtaggtaggctggtgcattggaggggcaggagcaagcccgacataggtgtgtgcacacacataggagtagctggccacatgtgtgtgtactttaaggagagactttagttttgggtttttttttttttttggttcctggggtaaattttctgttgaacatttttccctcctatttagttttttttcttttgcatttttaaaaatttgaacataaaaagtataaagaatcaaatctttgaaaggaccgaggcgtgcagcggacagcagatggatcccgcggccagcagctgcatgaggagcctccagcccccagcccctgtctggggctgccttcgaaacccccactcggaaggcaatggggcctcagggctaccccactacccgcccaccccgttctccttccaccagaaaccagacttcctggcgacagcgacggcagcgtaccctgacttctcagcctcctgcctggcagccaccccacacagcctgccccaggaggagcacatcttcaatgagacagagaagaaatcatccaggcggagaaaggagagttcagacaaccaggagaacagagggaagccggagggcagcagcaaagcccgcaaggagaggacggccttcaccaaggagcagctgcgagagctggaggcagagtttgcccatcataactacctgactcggctccgcagatatgagattgcggtaaacctggacctctctgagcgccaggtcaaagtgtggttccagaaccgaaggatgaagtggaagcgtgtgaagggaggtcagcccatctcccccaatgggcaggaccctgaggatggggactccacagcctctccaagttcagagtgagattctgcatggaggaaaaatgactaaggactgagccccctacccaactacccccaccccaatcccaccttcaccctcttccttccccagccagggcagcctctccacatctttccctgactcttggatatgaaactgcccagcattcctgggagtcttaggattttctaggaagttctgtccagcctcttagcagcctcttccctagggcctttgctcccacactctcatggaatcagacagagatcctaccgggccggatgaatctggaaacagcttcagagatactgcttctcagcgtctcttggctgccacccatgcctcctcctaccgctgttctcctaggtcagccaggcctcctcctggtctggacaccacctggcctggtgggagaggagctttggaaccagctggcgactcggaaagtaaatgcttcaaaaggaaggaaatgacagagacacacgcccttgcccaccttcctctgtaggctgcacatctgaggctttggggccccttagttgtcccgaaaccccaagaaaaatcagaatgaggagagtcaaggacagcaactcagctgctgcaagccagaaacacatccctgtctccaaatttgttggctaagtggagacacttctgagaactgactagagaagacaagaaaaatagcccgatgtaggtttcggtgtccccatataggccccgtccacacaggcttgactgggtggacaagaatgaacccatgacagcacctgctgcttcaaaatcaaaatcaatttagggatacagcaggggctgttgggctgtgctccagagaaaaggagcagctactccttttaaatccacgatttctggattgaaaacctgtccagatgctgagttgttgggctgaacaactaggagctgaaaacaacgtagaggctggaaagtgtcccctgcattctggaggggaggggagataataaggagggctgctgggtgagggcctggagatgtggaaccctggagtggaaggttctccagtgacagtgtcctgtgactgcaaaaggggacaagaaaatccctcttcctccatgggatggatttaagctcttgctgtgtgttctacaaatgctgttattgtgggaggaaatgctaggtttttgtgtgtggactgcccagacctcagccaggtcttctggagatgacatttgaggactgatggccaaagagcatgggggactgaagccctggctgcctcagcgctctgtctcccaacaccagctggtgttgcagagggaggtcaacgtgagtttggatctcttgtacgcagatgtaatcattcacatgtaaaaataaccccacctccccaccccaaaaagggcaagagctgtggaaaatgattgccaaatgagatggctggttagagcatgattttttctaaagcatacttcatatattttcttaagattacatcaagctaattgtgcgagctcaattcactttgtaagaaaactctcggagaaataaaatcaataaaaagc

SEQ ID NO: 75541 - DNA, 4734 bp, Homo sapiens
  misc_feature (1075)..(1075): n is a, c, g, or t
  misc_feature (1204)..(1204): n is a, c, g, or t
  misc_feature (2660)..(2660): n is a, c, g, or t
  misc_feature (3523)..(3523): n is a, c, g, or t
  misc_feature (3527)..(3527): n is a, c, g, or t
  misc_feature (3539)..(3539): n is a, c, g, or t
  misc_feature (3592)..(3592): n is a, c, g, or t
  misc_feature (3595)..(3595): n is a, c, g, or t
  misc_feature (3602)..(3602): n is a, c, g, or t
  misc_feature (3631)..(3631): n is a, c, g, or t
  misc_feature (3634)..(3634): n is a, c, g, or t
  misc_feature (3944)..(3944): n is a, c, g, or t
  misc_feature (4171)..(4171): n is a, c, g, or t
  misc_feature (4406)..(4406): n is a, c, g, or t
  misc_feature (4484)..(4484): n is a, c, g, or t
  misc_feature (4547)..(4547): n is a, c, g, or t
  misc_feature (4556)..(4556): n is a, c, g, or t
  misc_feature (4607)..(4607): n is a, c, g, or t
  misc_feature (4620)..(4620): n is a, c, g, or t
  misc_feature (4624)..(4624): n is a, c, g, or t
agccctctgcaggcatttgctctgggctccaggacgaactcctcgtcagctggtgcgtctgggttgggacagtgaaaatgtttagtgtcattggcgacaaatacacatacaggggatcccagtaggtaggctggtgcattggaggggcaggagcaagcccgacataggtgtgtgcacacacataggagtagctggccacatgtgtgtgtactttaaggagagactttagttttgggtttttttttttttttggttcctggggtaaattttctgttgaacatttttccctcctatttagttttttttcttttgcatttttaaaaatttgaacataaaaagtataaagaatcaaatctttgaaaggaccgaggcgtgcagcggacagcagatggatcccgcggccagcagctgcatgaggagcctccagcccccagcccctgtctggggctgccttcgaaacccccactcggaaggcaatggggcctcagggctaccccactacccgcccaccccgttctccttccaccagaaaccagacttcctggcgacagcgacggcagcgtaccctgacttctcagcctcctgcctggcagccaccccacacagcctgccccaggaggagcacatcttcactgagcagcaccccgctttcccacagtcccccaactggcacttccctgtctcagacgcccggcgcaggcccaactcaggcccggcagggggttccaaggaaatggggaccagcagcctgggcctggtggacaccacaggaggcccaggcgatgactacggggtgcttgggagcactgccaatgagacagagaagaaatcatccaggcggagaaaggagagttcaggtaggtggctcaggagcagctgatcattcctttactgtgtgaccctggggaagttactcaccctctctgtgcctaggtgctctgagcatgaatttctgtctagtccatccaaatgcaggagactggaccagttacctttggggtttcttccactgagagttctaggattctctggtgatggggaccatgtctgtgtcccagcactcctgggccccagnaagggtgtccagcaagagaatgaaacaggatcagccaggatttggaggacacgtgaaatggatcctctgggtgcagactggcgagggctggtgaggggctttcctgaatcaggctgccattgagtcatnctcctccccaccatgctttggccagccccaagtggtcctagagccacagggctcgcttaccagggaagttcagctgaggttaaggctctgagagctaagactgaagctgggaccctgggtggccacccaaagccaagaccctatgtgtccaggagcctagaggcagagaagcaggcctgcggctgggatgggagaatcaaggggtgagggggagatggagggctgaggtttggggcagactgcccaccagatatcaccctgcggagctgggccatgtccaggccaaggggacagacaactcagcatgctgagatctggctgaccccccaggaaggcagccccgcaaggagctgcaagggatgggcagcctctgagagagtcagggaggcaggcagccaagggagtccgtgctggagtcccagaggctggaggatgagattggcctatttgttaagattccagctaaagcccttctcttccccagggtggggacctgctgcttcctcacctccccaccaggccctccctggttgctcactatacctgtccaccttttgtctggttccttgtcccggcctcgttcagaacaaagcagtgaccaagcctcctgcccgtgctgccctgttttcctcctgacagccgccctcaggggcacgcctgtctgtcggagcctgtagaggaccttcccatggggctaaccagggcaggacagaaaagaaggacaccaaccaacaggtgggaatgctttgtgctttgctttataagcacagctttcccgagtttctgctcttagccaagcccaggaatgctctgagatgaataaaggggtctcacccaagaaagctcaaactgagaggaagaagaggcctgcagaggtgtgtcagcagtgggatgtgccctgatggggaggcttaaggtgccatgggatactgacgtcagctcttttgagtcccacgggtttgggagatggggacagcaggttttattagtaccttgattctctcaatctgcaaaatgaaagactgaaagttggtgagaacacagaaagaatggggtcaaactagagtgagcagctcatctccatttgcccaggacttttccagttttagcactgaaaatcctgtcgtaggaaaccccacagtcccaggcaaacagaagaattggtcaccctagaagtgagctcaaaccccaggcttcaggcccccggtatcacccccttcagtagatttcaaatgcagtcctcattttgaaatgatgtttggtctgtctgcttgaagaagccccttcttcaatgggagataggaactctagcagccctcatggctgctaaatagaagggccctttaaaccgccagccagttagatccccatcccgaaaattaactcatcctgcccctggtaggaaatgtgctaaggatgagaagcaactctcagcgacttggctctgaacctggtngaagagctttccccttggtggcggcacgcagcactgtggctccttcctctctgccactttccagagaactgacagccaagggcattgggaagggatagcaaagccaagagcctgctgggctcaggcagaatcttccagcattccgagtctcagcaaaacccaaatgcaccagctctctttttggcgagtggccgatggccctgcaatgcagagagaccattcacactaagcagctggccacccaggagtacagggacaccctcggctgaacggcctgcatgcttcagggtcagactttggtggagggaggttcccatccgcaggggccctgggcttccctaagggtcccctcaggagcaccagcagcagatgaggcagggcccagtgagctgactctcactcatccccctgtgattccagacaaactcactgttcagcatggaaatctttattgccgcaatgcttgcatcctcctttggaatttaactgaaggggaggaaggaggcaagaaagatcagctttgtaagagcccaaagaagggggaaagtgacgcaaggctcatgacctactccaggaatctggaattcagctcagaaaaggcaaacccacagagagccccccacccaaccctgccaatcctgagtctataattggatcccctctccaaaattgtgatattttgttcattatcaattttttgcattacttttgatttttacaaatattgccttaaaatattcttttttttttttttttgagatggagtctcactctaacgcccatgctggagtgcagtggcatagtttcaattcactgcaacctctgccccttgggttcaagcaattctcctgtctcagcctccngagnagctgggattanaggcgcacgccccctctcccggctaatttttgtatttttagtagagtcggggnttnaccatgntggtcaggatggtctcaaactcctgaccncgngatcagcccacctcggcctcccaaagtgctggcatgcgccaccgtgcccggccttccttaaaatattattgatcttgactacagaggggttgggcatgcccttgcatttgggcctccccaagtccaggctgagtggtccctggaaggttaaccagcattgatcagaaacgcgttttccatagttcttcccagccagacagacaggctgcagtgtcagcacggcaacttttggctgcatgactttggaaaagttcataacttcttccagcctttgtttccctggctgtaaaatgggcatatagcagtagcnccttccatagagagtctctctgtgaaggttagatgcagtgatccatgagattaactctgtgcctggcacatagtaagagttcaataaatagcagctgtaaatggtattaggcccatatttcctgaaccagccttcagaatataaggtctgacaaatatttctatatttatggggatggtggaattgaatatttcaattatgctgtctcagaaattcctgagtctagngaacttctggcaatcattttgttccagttgtcatcaggagcatggagctcagagacctgccggagaggttatggggtgagttgggcctggcaaatgcaccccatattgagtggctgagaagcctccagaaatggaaagtttattgtaagaggaatgttctctgcgcttccttcctcctttgccatctccttcaactgctccccgctcactcccagtagaatctggagctgatctnctcaaagaaattatcaagaaagcaagggttggccgggcgcggtggctcatgcctataatcccagcactttgggaggcngagccaggcggatcacctgaggccaggagttcaagactgacctggccaacatggtgaaacccnatctctacnaaaaatacaaaaaaaaaaaaaaaaattagccaggtgtggtggcaggcaccngtaaatcccagcnactngggaagctgaggcaggagaatagcttgaacttgggaggtggagattgcagtgagcagagatcacgccactgcacttcattcagcctgggtgacagagcgggactacatca

SEQ ID NO: 75542 - DNA, 2196 bp, Homo sapiens
agccctctgcaggcatttgctctgggctccaggacgaactcctcgtcagctgaaaccagacttcctggcgacagcgacggcagcgtaccctgacttctcagcctcctgcctggcagccaccccacacagcctgccccaggaggagcacatcttcactgagcagcaccccgctttcccacagtcccccaactggcacttccctgtctcagacgcccggcgcaggcccaactcaggcccggcagggggttccaaggaaatggggaccagcagcctgggcctggtggacaccacaggaggcccaggcgatgactacggggtgcttgggagcactgccaatgagacagagaagaaatcatccaggcggagaaaggagagttcagacaaccaggagaacagagggaagccggagggcagcagcaaagcccgcaaggagaggacggccttcaccaaggagcagctgcgagagctggaggcagagtttgcccatcataactacctgactcggctccgcagatatgagattgcggtaaacctggacctctctgagcgccaggtcaaagtgtggttccagaaccgaaggatgaagtggaagcgtgtgaagggaggtcagcccatctcccccaatgggcaggaccctgaggatggggactccacagcctctccaagttcagagtgagattctgcatggaggaaaaatgactaaggactgagccccctacccaactacccccaccccaatcccaccttcaccctcttccttccccagccagggcagcctctccacatctttccctgactcttggatatgaaactgcccagcattcctgggagtcttaggattttctaggaagttctgtccagcctcttagcagcctcttccctagggcctttgctcccacactctcatggaatcagacagagatcctaccgggccggatgaatctggaaacagcttcagagatactgcttctcagcgtctcttggctgccacccatgcctcctcctaccgctgttctcctaggtcagccaggcctcctcctggtctggacaccacctggcctggtgggagaggagctttggaaccagctggcgactcggaaagtaaatgcttcaaaaggaaggaaatgacagagacacacgcccttgcccaccttcctctgtaggctgcacatctgaggctttggggccccttagttgtcccgaaaccccaagaaaaatcagaatgaggagagtcaaggacagcaactcagctgctgcaagccagaaacacatccctgtctccaaatttgttggctaagtggagacacttctgagaactgactagagaagacaagaaaaatagcccgatgtaggtttcggtgtccccatataggccccgtccacacaggcttgactgggtggacaagaatgaacccatgacagcacctgctgcttcaaaatcaaaatcaatttagggatacagcaggggctgttgggctgtgctccagagaaaaggagcagctactccttttaaatccacgatttctggattgaaaacctgtccagatgctgagttgttgggctgaacaactaggagctgaaaacaacgtagaggctggaaagtgtcccctgcattctggaggggaggggagataataaggagggctgctgggtgagggcctggagatgtggaaccctggagtggaaggttctccagtgacagtgtcctgtgactgcaaaaggggacaagaaaatccctcttcctccatgggatggatttaagctcttgctgtgtgttctacaaatgctgttattgtgggaggaaatgctaggtttttgtgtgtggactgcccagacctcagccaggtcttctggagatgacatttgaggactgatggccaaagagcatgggggactgaagccctggctgcctcagcgctctgtctcccaacaccagctggtgttgcagagggaggtcaacgtgagtttggatctcttgtacgcagatgtaatcattcacatgtaaaaataaccccacctccccaccccaaaaagggcaagagctgtggaaaatgattgccaaatgagatggctggttagagcatgattttttctaaagcatacttcatatattttcttaagattacatcaagctaattgtgcgagctcaattcactttgtaagaaaactctcggagaaataaaatcaataaaaagc

SEQ ID NO: 75543 - DNA, 2500 bp, Homo sapiens
agccctctgcaggcatttgctctgggctccaggacgaactcctcgtcagctggtgcgtctgggttgggacagtgaaaatgtttagtgtcattggcgacaaatacacatacaggggatcccagtaggtaggctggtgcattggaggggcaggagcaagcccgacataggtgtgtgcacacacataggagtagctggccacatgtgtgtgtactttaaggagagactttagttttgggtttttttttttttttggttcctggggtaaattttctgttgaacatttttccctcctatttagttttttttcttttgcatttttaaaaatttgaacataaaaagtataaagaatcaaatctttgaaaggaccgaggcgtgcagcggacagcagatggatcccgcggccagcagctgcatgaggagcctccagcccccagcccctgtctggggctgccttcgaaacccccactcggaaggcaatggggcctcagggctaccccactacccgcccaccccgttctccttccaccagaaaccagacttcctggcgacagcgacggcagcgtaccctgacttctcagcctcctgcctggcagccaccccacacagcctgccccaggaggagcacatcttcactgagcagcaccccgctttcccacagtcccccaactggcacttccctgtctcagacgcccggcgcaggcccaactcaggcccggcagggggttccaaggaaatggggaccagcagcctgggcctggtggacaccacaggaggcccaggcgatgactacggggtgcttgggagcactgccaatgagacagagaagaaatcatccaggcggagaaaggagagttcaggtcaaagtgtggttccagaaccgaaggatgaagtggaagcgtgtgaagggaggtcagcccatctcccccaatgggcaggaccctgaggatggggactccacagcctctccaagttcagagtgagattctgcatggaggaaaaatgactaaggactgagccccctacccaactacccccaccccaatcccaccttcaccctcttccttccccagccagggcagcctctccacatctttccctgactcttggatatgaaactgcccagcattcctgggagtcttaggattttctaggaagttctgtccagcctcttagcagcctcttccctagggcctttgctcccacactctcatggaatcagacagagatcctaccgggccggatgaatctggaaacagcttcagagatactgcttctcagcgtctcttggctgccacccatgcctcctcctaccgctgttctcctaggtcagccaggcctcctcctggtctggacaccacctggcctggtgggagaggagctttggaaccagctggcgactcggaaagtaaatgcttcaaaaggaaggaaatgacagagacacacgcccttgcccaccttcctctgtaggctgcacatctgaggctttggggccccttagttgtcccgaaaccccaagaaaaatcagaatgaggagagtcaaggacagcaactcagctgctgcaagccagaaacacatccctgtctccaaatttgttggctaagtggagacacttctgagaactgactagagaagacaagaaaaatagcccgatgtaggtttcggtgtccccatataggccccgtccacacaggcttgactgggtggacaagaatgaacccatgacagcacctgctgcttcaaaatcaaaatcaatttagggatacagcaggggctgttgggctgtgctccagagaaaaggagcagctactccttttaaatccacgatttctggattgaaaacctgtccagatgctgagttgttgggctgaacaactaggagctgaaaacaacgtagaggctggaaagtgtcccctgcattctggaggggaggggagataataaggagggctgctgggtgagggcctggagatgtggaaccctggagtggaaggttctccagtgacagtgtcctgtgactgcaaaaggggacaagaaaatccctcttcctccatgggatggatttaagctcttgctgtgtgttctacaaatgctgttattgtgggaggaaatgctaggtttttgtgtgtggactgcccagacctcagccaggtcttctggagatgacatttgaggactgatggccaaagagcatgggggactgaagccctggctgcctcagcgctctgtctcccaacaccagctggtgttgcagagggaggtcaacgtgagtttggatctcttgtacgcagatgtaatcattcacatgtaaaaataaccccacctccccaccccaaaaagggcaagagctgtggaaaatgattgccaaatgagatggctggttagagcatgattttttctaaagcatacttcatatattttcttaagattacatcaagctaattgtgcgagctcaattcactttgtaagaaaactctcggagaaataaaatcaataaaaagc

SEQ ID NO: 75544 - DNA, 756 bp, Homo sapiens
gaattgagggagttataggcagaggaggatcctagctccagccataagaactgggagagccgcctgctgctccagaagacctgcccacctccacagaaatgctagcccttcagaccttctggtcagtgaactgggaccagctctgactaaggatgccttccatggcctgggactcgagttcttcagaaccaagaggctaactgggcttcctccaagaagggaccaggggctagaagcagaagttggcatcagcaaacatttctggaatctaccaaagggaggcccaggcagaaccccttcctcagtctcccttcccctcttccccccagccttgaagaggttgatcctttgtgctgtgtctcttagccctttcatcggggatgcccagaggcaacagcccaggctggaggttctcttccccttcctagaggaggaagtgaccaagtttgaaggcggcagaaatggccacacagccaagaagagcccatgcaactcagtccaggattttactgggtcagtgacattggtggaagccttcatgcctcctcattccacagcacttcctcctatgttgaccttaaacactggcttcccactgatacagactgggatgagctgagggcagtctcatttactgtcaagagttgtatttttgtattgtcctttttgccaagtctacatgtgttgactctgtaatggatttatgtagcccacttcagtctgcaaataaagcaaagtaactggaaaaaaaaaaaa

SEQ ID NO: 75545 - DNA, 1611 bp, Homo sapiens
tttatttatttatttatttatttatttatttatttatttatttatagagacaagggcttgccatgttacccaggctggtcttgaactcttgagctcgagcgatccccacctcccaaagtgctgggcttacaggtgtaagccatcatgtccagccgttcagatattctagttgaattggagttggtgggctagtacaccttctaaattaaatgagtaaaggatttagaatggtgcctgacacacagtaggtgctacattcatgttagctactattataaacctttcctgcctctgactttcagggtcttgcccaccaccagcgatgcccagcccttggtagagcttgaaccaccttctataaacaggatggcggtggagagacaggcccagtccctgagcccatgaggagtgtggccccttcaggcccaaagatggggaacatcactgcagacaactcctcgatgagctgtaccatcgaccataccatccaccagacgctggccccggtggtctatgttaccgtgctggtggtgggcttcccggccaactgcctgtccctctacttcggctacctgcagatcaaggcccggaacgagctgggcgtgtacctgtgcaacctgacggtggccgacctcttctacatctgctcgctgcccttctggctgcagtacgtgctgcagcacgacaactggtctcacggcgacctgtcctgccaggtgtgcggcatcctcctgtacgagaacatctacatcagcgtgggcttcctctgctgcatctccgtggaccgctacctggctgtggcccatcccttccgcttccaccagttccggaccctgaaggcggccgtcggcgtcagcgtggtcatctgggccaaggagctgctgaccagcatctacttcctgatgcacgaggaggtcatcgaggacgagaaccagcaccgcgtgtgctttgagcactaccccatccaggcatggcagcgcgccatcaactactaccgcttcctggtgggcttcctcttccccatctgcctgctgctggcgtcctaccagggcatcctgcgcgccgtgcgccggagccacggcacccagaagagccgcaaggaccagatccagcggctggtgctcagcaccgtggtcatcttcctggcctgcttcctgccctaccacgtgttgctgctggtgcgcagcgtctgggaggccagctgcgacttcgccaagggcgttttcaacgcctaccacttctccctcctgctcaccagcttcaactgcgtcgccgaccccgtgctctactgcttcgtcagcgagaccacccaccgggacctggcccgcctccgcggggcctgcctggccttcctcacctgctccaggaccggccgggccagggaggcctacccgctgggtgcccccgaggcctccgggaaaagcggggcccagggtgaggagcccgagctgttgaccaagctccacccggccttccagacccctaactcgccagggtcgggcgggttccccacgggcaggttggcctagcctgggtcctccgcgggtggctccacgtgaggcctgagcttcagcccacggcctcagggctgccgcctcctgcttccctcgc

SEQ ID NO: 75546 - DNA, 1557 bp, Homo sapiens
tttatttatttatttatttatttatttatttatttatttatttatagagacaagggcttgccatgttacccaggctggtcttgaactcttgagctcgagcgatccccacctcccaaagtgctgggcttacaggtgtaagccatcatgtccagccgttcagatattctagttgaattggagttggtgggctagtacaccttctaaattaaatgagtaaaggatttagaatggtgcctgacacacagtaggtgctacattcatgttagctactattataaacctttcctgcctctgactttcagggtcttgcccaccaccagcgatgcccagcccttggtagagcttgaaccaccttctataaacaggatggcggtggagagacaggcccagtccctgagcccatgaggagtgtggccccttcaggcccaaagatggggaacatcactgcagacaactcctcgatgagctgtaccatcgaccataccatccaccagacgctggccccggtggtctatgttaccgtgctggtggtgggcttcccggccaactgcctgtccctctacttcggctacctgcagatcaaggcccggaacgagctgggcgtgtacctgtgcaacctgacggtggccgacctcttctacatctgctcgctgcccttctggctgcagtacgtgctgcagcacgacaactggtctcacggcgacctgtcctgccaggtgtgcggcatcctcctgtacgagaacatctacatcagcgtgggcttcctctgctgcatctccgtggaccgctacctggctgtggcccatcccttccgcttccaccagttccggaccctgaaggcggccgtcggcgtcagcgtggtcatctgggccaaggagctgctgaccagcatctacttcctgatgcacgaggaggtcatcgaggacgagaaccagcaccgcgtgtgctttgagcactaccccatccaggcatggcagcgcgccatcaactactaccgcttcctggtgggcttcctcttccccccagccttgaagaggttgatcctttgtgctgtgtctcttagccctttcatcggggatgcccagaggcaacagcccaggctggaggtgccccagggaagggtgctcacagtggtcccagggctacacttggctttgactgcacagcccctgctcagatccttgtggagggtgtccgatgacttggggaggttctcttccccttcctagaggaggaagtgaccaagtttgaaggcggcagaaatggccacacagccaagaagagcccatgcaactcagtccaggattttactgggtcagtgacattggtggaagccttcatgcctcctcattccacagcacttcctcctatgttgaccttaaacactggcttcccactgatacagactgggatgagctgagggcagtctcatttactgtcaagagttgtatttttgtattgtcctttttgccaagtctacatgtgttgactctgtaatggatttatgtagcccacttcagtctgcaaataaagcaaagtaactggaaaaaaaaaaaa

SEQ ID NO: 75547 - DNA, 860 bp, Homo sapiens
gaattgagggagttataggcagaggaggatcctagctccagccataagaactgggagagccgcctgctgctccagaagacctgcccacctccacagaaatgctagcccttcagaccttctggtcagtgaactgggaccagctctgactaaggatgccttccatggcctgggactcgagttcttcagaaccaagaggctaactgggcttcctccaagaagggaccaggggctagaagcagaagttggcatcagcaaacatttctggaatctaccaaagggaggcccaggcagaaccccttcctcagtctcccttcccctcttccccccagccttgaagaggttgatcctttgtgctgtgtctcttagccctttcatcggggatgcccagaggcaacagcccaggctggaggtgccccagggaagggtgctcacagtggtcccagggctacacttggctttgactgcacagcccctgctcagatccttgtggagggtgtccgatgacttggggaggttctcttccccttcctagaggaggaagtgaccaagtttgaaggcggcagaaatggccacacagccaagaagagcccatgcaactcagtccaggattttactgggtcagtgacattggtggaagccttcatgcctcctcattccacagcacttcctcctatgttgaccttaaacactggcttcccactgatacagactgggatgagctgagggcagtctcatttactgtcaagagttgtatttttgtattgtcctttttgccaagtctacatgtgttgactctgtaatggatttatgtagcccacttcagtctgcaaataaagcaaagtaactggaaaaaaaaaaaa

SEQ ID NO: 75548 - DNA, 1453 bp, Homo sapiens
tttatttatttatttatttatttatttatttatttatttatttatagagacaagggcttgccatgttacccaggctggtcttgaactcttgagctcgagcgatccccacctcccaaagtgctgggcttacaggtgtaagccatcatgtccagccgttcagatattctagttgaattggagttggtgggctagtacaccttctaaattaaatgagtaaaggatttagaatggtgcctgacacacagtaggtgctacattcatgttagctactattataaacctttcctgcctctgactttcagggtcttgcccaccaccagcgatgcccagcccttggtagagcttgaaccaccttctataaacaggatggcggtggagagacaggcccagtccctgagcccatgaggagtgtggccccttcaggcccaaagatggggaacatcactgcagacaactcctcgatgagctgtaccatcgaccataccatccaccagacgctggccccggtggtctatgttaccgtgctggtggtgggcttcccggccaactgcctgtccctctacttcggctacctgcagatcaaggcccggaacgagctgggcgtgtacctgtgcaacctgacggtggccgacctcttctacatctgctcgctgcccttctggctgcagtacgtgctgcagcacgacaactggtctcacggcgacctgtcctgccaggtgtgcggcatcctcctgtacgagaacatctacatcagcgtgggcttcctctgctgcatctccgtggaccgctacctggctgtggcccatcccttccgcttccaccagttccggaccctgaaggcggccgtcggcgtcagcgtggtcatctgggccaaggagctgctgaccagcatctacttcctgatgcacgaggaggtcatcgaggacgagaaccagcaccgcgtgtgctttgagcactaccccatccaggcatggcagcgcgccatcaactactaccgcttcctggtgggcttcctcttccccccagccttgaagaggttgatcctttgtgctgtgtctcttagccctttcatcggggatgcccagaggcaacagcccaggctggaggttctcttccccttcctagaggaggaagtgaccaagtttgaaggcggcagaaatggccacacagccaagaagagcccatgcaactcagtccaggattttactgggtcagtgacattggtggaagccttcatgcctcctcattccacagcacttcctcctatgttgaccttaaacactggcttcccactgatacagactgggatgagctgagggcagtctcatttactgtcaagagttgtatttttgtattgtcctttttgccaagtctacatgtgttgactctgtaatggatttatgtagcccacttcagtctgcaaataaagcaaagtaactggaaaaaaaaaaaa

SEQ ID NO: 75549 - DNA, 1167 bp, Homo sapiens
  misc_feature (781)..(781): n is a, c, g, or t
ccaatgagaatggagaaggtccaggacacgtgggtgggggaagctgagcgctgagaccaagggctaaagctgggagactgaaaaaatgcagaccgccggggcattattcatttctccagctctgatccgctgttgtaccaggggtctaatcaggcctgtgtctgcctccttcttgaatagcccagtgaattcatctaaacagccttcctacagcaacttcccactccaggtggccagacgggagttccagaccagtgttgtctcccgggacattgacacagcagccaagtttattggtgctggggcagccacagttggtgtggctggttcaggggctggcattggaaccgtgtttggcagcttgatcattggctatgccaggaacccgtctctcaagcagcagctcttctcctatgccattcttggctttgccctgtctgaggccatggggcttttctgtttgatggtcgccttcctcatcctcttcgccatgtgaggctccatggggggtcaccggcctgttgctactgcaactccacaccattcttggtgctggggtgtgttaagctttaccattaaacacaacgtttctctaaaaaaaaaaaaaaaagggcggccggtcgctgtggatatggatgccattagaagggtctacaccagatggctctctattgaaaaacttgaaactgctttctcaatgcacttgttttttcgtcacctaacgtggaatgtgacttgacgtatcacaatgtatactctcgagatcctaattatctgaatncgtcatatcgtatgggaatagaaatctccacagcctgaatatctggaaatggttgtgcccttatttcgccaaaggcgatgaagcaaagataccccctggaaggcccagggacacgggacacagacgggggccctaactccatgcggaccaggatcggggaatggtggaaacattccacacagcttatcactataacgccatacgccaggacctgaaccgcgaaacctcggggaaggttgagtatgccccggtggcgcccaaagcgtgacaggtccatgccagttcgggggggcgggaccaaccacgacaagataaaacccacgggtcacaggacacagcctggaaggaaagcagcgcggccgacaactggacagggacactcccac

SEQ ID NO: 75550 - DNA, 925 bp, Homo sapiens
ccaatgagaatggagaaggtccaggacacgtgggtgggggaagctgagcgctgagaccaagggctaaagctgggagactgaaaaaatgcagaccgccggggcattattcatttctccagctctgatccgctgttgtaccaggggtctaatcaggcctgtgtctgcctccttcttgaatagcccagtgaattcatctaaacagccttcctacagcaacttcccactccaggtggccagacgggagttccagaccagtgttgtctcccgggacattgacacagcagccaagtttattggtgctggggcagccacagttggtgtggctggttcaggggctggcattggaaccgtgtttggcagcttgatcattggctatgccaggaacccgtctctcaagcagcagctcttctcctatgccattcttggctttgccctgtctgaggccatggggcttttctgtttgatggtcgccttcctcatcctcttcgccatgtgaggctccatggggggtcaccggcctgttgctactgcaactccacaccattcttggtgctggggtgtgttaagctttaccattaaacacaacgtttctctaaaaaaaagtaattgctgtgtgacgatgatgacgatgatgatgaagaggattgttggttgcggctgccggtgctaatgatttgttgagacacaagttgggagacagcgccggagaaattaaactgagaactccggcaaaaggaacaaccgtcagcagagtgggagagaccacacataataacgccgggggagacggggtgtcctcaacacgggagccgagcacaggcacacggcgaacataggatgtccccagaggtggcacggcgcccaattagtgtggtcacacaccagacccagcgcggtaaattaagagggagaaccatcacaacac

SEQ ID NO: 75551 - DNA, 706 bp, Homo sapiens
gcacgagcccagctgctcgggaggctgaggcaggagaatcgcttgagcccgggatgtggaggttgcagtgagctgagattgcaccattgcactccagcctggccaacagagcaagactccatctcaaaaaaaaaaaaaaaaaactcgagactagttctctctctcctcgtgccgaattcggcacgagggaagctgagcgctgagaccaagggctaaagctgggagactgaaacatccgctgttgtaccaggggtctaatcaggcctgtgtctgcctccttcttgaatagcccagtgaattcatctaaacagccttcctacagcaacttcccactccaggtggccagacgggagttccagaccagtgttgtctcccgggacattgacacagcagccaagtttattggtgctggggcagccacagttggtgtggctggttcaggggctggcattggaaccgtgtttggcagcttgatcattggctatgccaggaacccgtctctcaagcagcagctcttctcctatgccattcttggctttgccctgtctgaggccatggggcttttctgtttgatggtcgccttcctcatcctcttcgccatgtgaggctccatggggggtcaccggcctgttgctactgcaactccacaccattcttggtgctggggtgtgttaagctttaccattaaacacaacgtttctctaaa

SEQ ID NO: 75552 - DNA, 746 bp, Homo sapiens
ccaatgagaatggagaaggtccaggacacgtgggtgggggaagctgagcgctgagaccaagggctaaagctgggagactgaaaaaatgcagaccgccggggcattattcatttctccagctctgatccgctgttgtaccaggggtctaatcaggcctgtgtctgcctccttcttgaatagcccagtgaattcatctaaacagccttcctacagcaacttcccactccaggtggccagacgggagttccagaccagtgttgtctcccgggacattgacacagcagccaagtttattggtgctggggcagccacagttggtgtggctggttcaggggctggcattggaaccgtgtttggcagcttgatcattggctatgccaggaacccgtctctcaagcagcagctcttctcctatgccattcttggctttgccctgtctgaggccatggggcttttctgtttgatggtcgccttcctcatcctcttcgccatgtgaggctccatggggggtcaccggcctgttgctactgcaactccacaccattcttggtgctggggtgtgttaagctttaccattaaacacaacgtttctctaaatatatatctatacataatcatgtcggcccgcttggcccatcgactttagacttggcctgcttttgcatcgcgccgaattttggctcattggccaattggcctatagtgggccgatacaattcactggccgcgtttaccgtgtgactggt

SEQ ID NO: 75553 - DNA, 654 bp, Homo sapiens
  misc_feature (654)..(654): n is a, c, g, or t
ccaatgagaatggagaaggtccaggacacgtgggtgggggaagctgagcgctgagaccaagggctaaagctgggagactgaaaaaatgcagaccgccggggcattattcatttctccagctctgatccgctgttgtaccaggggtctaatcaggcctgtgtctgcctccttcttgaatagcccagtgaattcatctaaacagccttcctacagcaacttcccactccaggtggccagacgggagttccagaccagtgttgtctcccgggacattgacacagcagccaagtttattggtgctggggcagccacagttggtgtggctggttcaggggctggcattggaaccgtgtttggcagcttgatcattggctatgccaggaacccgtctctcaagcagcagctcttctcctatgccattcttggctttgccctgtctgaggccatggggcttttctgtttgatggtcgccttcctcatcctcttcgccatgtgaggctccatggggggtcaccggcctgttgctactgcaactccacaccattcttggtgctggggtgtgttaagctttaccattaaacacaacgtttctctaaataaatatatttaattgcgccgcatttcaggctacttgcctcgccctgcgggtcgttn

SEQ ID NO: 75554 - DNA, 757 bp, Homo sapiens
  misc_feature (4)..(4): n is a, c, g, or t
ctanacggggggggggctgggagactgaaaaaatgcagaccgccggggcattattcatttctccagctctgatccgctgttgtaccaggggtctaatcaggcctgtgtctgcctccttcttgaatagcccagtgaattcatctaaacagccttcctacagcaacttcccactccaggtggccagacgggagttccagaccagtgttgtctcccgggacattgacacagcagccaagtttattggtgctggggcagccacagttggtgtggctggttcaggggctggcattggaaccgtgtttggcagcttgatcattggctatgccaggaacccgtctctcaagcagcagctcttctcctatgccattcttggctttgccctgtctgaggccatggggcttttctgtttgatggtcgccttcctcatcctcttcgccatgtgaggctccatggggggtcaccggcctgttgctactgcaactccacaccattcttggtgctggggtgtgttaagctttaccattaaacacaacgtttctctaaagtgttttgaacaaaaattggacaagacctggaccctgtcgggcgccttgtccaataaaatttaaattcaggcaggttttgttgcggcccaatttcagctacttggccattggcctttaggggaggggtaacaaattagggcctgggtttaacacggggtgacgtggaaaacctgcgtccccaactttgctttgggcccctttccccagtgggt

SEQ ID NO: 75555 - DNA, 770 bp, Homo sapiens
ctgtatcttttaagacttctccagatgattccaccgtgcagccaagtttgagaaccactgcactaaaaattatttcaaaaaagccatgttacagatggctctccttggatggctattccagtcggtttccggggctgactggcccactccatttagggtgtgtagctgtgagtgtattttagcagaataaaatttcccccatctgattacttggtgatctgggtataaacctttcctgtacctgctttggtattagtgtgggttcttgttccattctgagaagctgattaaagctgtgcccaaagaagtgaactttggtttggttttgaatggtgaaggttgccactgctgactatatcaagctattgagacagctgtctctggggcaggcctatctgataggaacaggaataaattgaccttgaaatacattgaacttattctgtttatgaaatctgtagtcatttttgacagctcagcaattaggattttttttccttgactgatttggtaggatgtggctttctgattttacagaatccgctgttgtaccaggggtctaatcaggcctgtgtctgcctccttcttgaatagcccagtgaattcatctaaacaggtaagggaggaatagctctcttaggaatgttcccaaggcccaggatggtggctcacacctgtaatcccagctctttgagaggctgaggcgagaggatcacttgagcccagttgttcaagaccagcctgggcaacacagtgaaaccccatctcta

SEQ ID NO: 75556 - DNA, 312 bp, Homo sapiens
aactctacaggagcttacccgactagcctgacatgccttcctacagcaacttcccactccaggtggccagacgggagttccagaccagtgttgtctcccgggacattgacacagcagccaagtttattggtgctggggcagccacagttggtgtggctggttcaggggctggcattggaaccgtgtttggcagcttgatcattggctatgccaggaacccgtctctcaagcagcagctcttctcctatgccattcttggctttgccctgtctgggctagtcggggagtcggggctgtcgggctactacgtgt

SEQ ID NO: 75557 - DNA, 1165 bp, Homo sapiens
ccaatgagaatggagaaggtccaggacacgtgggtgggggaagctgagcgctgagaccaagggctaaagctgggaggtgagtctgtcaccttgagccgggcgagcgctgtgggccaagcaggggttgcagggcagtaggagtgcaggtgacttggggccgggagccagcaataggcagggttgtgggctgggcagtgtggaggggtatttccccccagtgctgggagaggctatggcaatctagatatggccttatcaatgaatgttaattaccaacggtaatgaacgattgactgcctcggctggggcgggtcggggactgctgtgtaagatgggcaggatcctgcgcgacacctgcccagtatccgcctccagtcttcccgagagaccattccctttcgcaacatttccttcctggggcttgggcacatttccttgacttccgatctccatgactttgctttgaagacccactgctctgtccctctgacctctaatgccctcctcagctggggcacggtgcaaggaagagcgtggtctagggaggacggacgggggtgaaggggacgaccaaaggtcgtcattataagcaaacaaccagggtctcagtgggattattattactattttttccccctctgcagactgaaaaaatgcagaccgccggggcattattcatttctccagctctgatccgctgttgtaccaggggtctaatcaggcctgtgtctgcctccttcttgaatagcccagtgaattcatctaaacagccttcctacagcaacttcccactccaggtggccagacgggagttccagaccagtgttgtctcccgggacattgacacagcagccaagtttattggtgctggggcagccacagttggtgtggctggttcaggggctggcattggaaccgtgtttggcagcttgatcattggctatgccaggaacccgtctctcaagcagcagctcttctcctatgccattcttggctttgccctgtctgaggccatggggcttttctgtttgatggtcgccttcctcatcctcttcgccatgtgaggctccatggggggtcaccggcctgttgctactgcaactccacaccattcttggtgctggggtgtgttaagctttaccattaaacacaacgtttctctaaa

SEQ ID NO: 75558 - DNA, 858 bp, Homo sapiens
ccaatgagaatggagaaggtccaggacacgtgggtgggggaagctgagcgctgagaccaagggctaaagctgggaggtgagtctgtcaccttgagccgggcgagcgctgtgggccaagcaggggttgcagggcagtaggagtgcaggtgacttggggccgggagccagcaataggcagggttgtgggctgggcagtgtggaggggtatttccccccagtgctgggagaggctatggcaatctagatatggccttatcaatgaatgttaattaccaacggtaatgaacgattgactgcctcggctggggcgggtcggggactgctgtgtaagatgggcaggatcctgcgcgacacctgcccagatgtggctttctgattttacagaatccgctgttgtaccaggggtctaatcaggcctgtgtctgcctccttcttgaatagcccagtgaattcatctaaacagccttcctacagcaacttcccactccaggtggccagacgggagttccagaccagtgttgtctcccgggacattgacacagcagccaagtttattggtgctggggcagccacagttggtgtggctggttcaggggctggcattggaaccgtgtttggcagcttgatcattggctatgccaggaacccgtctctcaagcagcagctcttctcctatgccattcttggctttgccctgtctgaggccatggggcttttctgtttgatggtcgccttcctcatcctcttcgccatgtgaggctccatggggggtcaccggcctgttgctactgcaactccacaccattcttggtgctggggtgtgttaagctttaccattaaacacaacgtttctctaaa

SEQ ID NO: 75559 - DNA, 1011 bp, Homo sapiens
ctgtatcttttaagacttctccagatgattccaccgtgcagccaagtttgagaaccactgcactaaaaattatttcaaaaaagccatgttacagatggctctccttggatggctattccagtcggtttccggggctgactggcccactccatttagggtgtgtagctgtgagtgtattttagcagaataaaatttcccccatctgattacttggtgatctgggtataaacctttcctgtacctgctttggtattagtgtgggttcttgttccattctgagaagctgattaaagctgtgcccaaagaagtgaactttggtttggttttgaatggtgaaggttgccactgctgactatatcaagctattgagacagctgtctctggggcaggcctatctgataggaacaggaataaattgaccttgaaatacattgaacttattctgtttatgaaatctgtagtcatttttgacagctcagcaattaggattttttttccttgactgatttggtaggatgtggctttctgattttacagaatccgctgttgtaccaggggtctaatcaggcctgtgtctgcctccttcttgaatagcccagtgaattcatctaaacagccttcctacagcaacttcccactccaggtggccagacgggagttccagaccagtgttgtctcccgggacattgacacagcagccaagtttattggtgctggggcagccacagttggtgtggctggttcaggggctggcattggaaccgtgtttggcagcttgatcattggctatgccaggaacccgtctctcaagcagcagctcttctcctatgccattcttggctttgccctgtctgaggccatggggcttttctgtttgatggtcgccttcctcatcctcttcgccatgtgaggctccatggggggtcaccggcctgttgctactgcaactccacaccattcttggtgctggggtgtgttaagctttaccattaaacacaacgtttctctaaa

SEQ ID NO: 75560 - DNA, 653 bp, Homo sapiens
ccaatgagaatggagaaggtccaggacacgtgggtgggggaagctgagcgctgagaccaagggctaaagctgggagactgaaaaaatgcagaccgccggggcattattcatttctccagctctgatccgctgttgtaccaggggtctaatcaggcctgtgtctgcctccttcttgaatagcccagtgaattcatctaaacagccttcctacagcaacttcccactccaggtggccagacgggagttccagaccagtgttgtctcccgggacattgacacagcagccaagtttattggtgctggggcagccacagttggtgtggctggttcaggggctggcattggaaccgtgtttggcagcttgatcattggctatgccaggaacccgtctctcaagcagcagctcttctcctatgccattcttggctttgccctgtctgaggccatggggcttttctgtttgatggtcgccttcctcatcctcttcgccatgtgaggctccatggggggtcaccggcctgttgctactgcaactccacaccattcttggtgctggggtgtgttaagctttaccattaaacacaacgtttctctaaaaaaaaaaaaaaaaaaaaaaaaaaaaaaaaaaaaaaaaggggggggggcaaaaaaaa

SEQ ID NO: 75561 - DNA, 564 bp, Homo sapiens
ccaatgagaatggagaaggtccaggacacgtgggtgggggaagctgagcgctgagaccaagggctaaagctgggagactgaaaaaatgcagaccgccggggcattattcatttctccagctctgatccgctgttgtaccaggggtctaatcaggcctgtgtctgcctccttcttgaatagcccagtgaattcatctaaacagccttcctacagcaacttcccactccaggtggccagacgggagttccagaccagtgttgtctcccgggacattgacacagcagccaagtttattggtgctggggcagccacagttggtgtggctggttcaggggctggcattggaaccgtgtttggcagcttgatcattggctatgccaggaacccgtctctcaagcagcagctcttctcctatgccattcttggctttgccctgtctgaggccatggggcttttctgtttgatggtcgccttcctcatcctcttcgccatgtgaggctccatggaccattcttggtgctggggtgtgttaagctttaccattaaacacaacgtttctctaaa

SEQ ID NO: 75562 - DNA, 556 bp, Homo sapiens
  misc_feature (51)..(51): n is a, c, g, or t
atcgagtcggtaccaagttgtgtaggaaggctgtttagatgaattcactgnggctattcaagaggaggcagacacaggctgattagacccctggtacaacagcggatcagagctggagaaatgaataatgccccggcggtctgcattttttcagtctgcacccttcctacagcaacttcccactccaggtggccagacgggagttccagaccagtgttgtctcccgggacattgacacagcagccaagtttattggtgctggggcagccacagttggtgtggctggttcaggggctggcattggaaccgtgtttggcagcttgatcattggctatgccaggaacccgtctctcaagcagcagctcttctcctatgccattcttggctttgccctgtctgaggccatggggcttttctgtttgatggtcgccttcctcatcctcttcgccatgtgaggctccatggggggtcaccggcctgttgctactgcaactccacaccattcttggtgctggggtgtgttaagctttaccattaaacacaacgtttctctaaa

SEQ ID NO: 75563 - DNA, 1221 bp, Homo sapiens
ccaatgagaatggagaaggtccaggacacgtgggtgggggaagctgagcgctgagaccaagggctaaagctgggaggtgagtctgtcaccttgagccgggcgagcgctgtgggccaagcaggggttgcagggcagtaggagtgcaggtgacttggggccgggagccagcaataggcagggttgtgggctgggcagtgtggaggggtatttccccccagtgctgggagaggctatggcaatctagatatggccttatcaatgaatgttaattaccaacggtaatgaacgattgactgcctcggctggggcgggtcggggactgctgtgtaagatgggcaggatcctgcgcgacacctgcccagtatccgcctccagtcttcccgagagaccattccctttcgcaacatttccttcctggggcttgggcacatttccttgacttccgatctccatgactttgctttgaagacccactgctctgtccctctgacctctaatgccctcctcagctggggcacggtgcaaggaagagcgtggtctagggaggacggacgggggtgaaggggacgaccaaaggtcgtcattataagcaaacaaccagggtctcagtgggattattattactattttttccccctctgcagactgaaaaaatgcagaccgccggggcattattcatttctccagctctgatccgctgttgtaccaggggtctaatcaggcctgtgtctgcctccttcttgaatagcccagtgaattcatctaaacagccttcctacagcaacttcccactccaggtggccagacgggagttccagaccagtgttgtctcccgggacattgacacagcagccaagtttattggtgctggggcagccacagttggtgtggctggttcaggggctggcattggaaccgtgtttggcagcttgatcattggctatgccaggaacccgtctctcaagcagcagctcttctcctatgccattcttggctttgccctgtctgaggccatggggcttttctgtttgatggtcgccttcctcatcctcttcgccatgtgaggctccatggggggtcaccggcctgttgctactgcaactccacaccattcttggtgctggggtgtgttaagctttaccattaaacacaacgtttctctaaaaaaaaaaaaaaaaaaaaaaaaaaaaaaaaaaaaaaaaggggggggggcaaaaaaaa

SEQ ID NO: 75564 - DNA, 498 bp, Homo sapiens
ccaatgagaatggagaaggtccaggacacgtgggtgggggaagctgagcgctgagaccaagggctaaagctgggaggtgagtctgtcaccttgagccgggcgagcgctgtgggccaagcaggggttgcagggcagtaggagtgcagactgaaaaaatgcagaccgccggggcattattcatttctccagctctgatccgctgttgtaccaggggtctaatcaggcctgtgtctgcctccttcttgaatagcccagtgaattcatctaaacagccttcctacagcaacttcccactccaggtggccagacgggagttccagaccagtgttgtctcccgggacattgacacagcagccaagtttattggtgctggggcagccacagttggtgtggctggttcaggggctggcattggaaccgtgtttggcagcttgatcattggctatgccaggaacccgtctctcaaccaagcaaccctggtaccgagctgatcactgc

SEQ ID NO: 75565 - DNA, 401 bp, Homo sapiens
tccagcctggctcacttaaacttaccaggttggcccactctgcttgtccatccaaatccccaggatctgtgcaggctaggccctctcccaggagtaacagtccccattcacctcaccctcctgtgtcctcccctcccctcaccccttcctctccctcaactggcaatgatctctgtccctcccaggaacccgtctctcaagcagcagctcttctcctatgccattcttggctttgccctgtctgaggccatggggcttttctgtttgatggtcgccttcctcatcctcttcgccatgtgaggctccatggggggtcaccggcctgttgctactgcaactccacaccattcttggtgctggggtgtgttaagctttaccattaaacacaacgtttctctaaa

SEQ ID NO: 75566 - DNA, 882 bp, Homo sapiens
ccaatgagaatggagaaggtccaggacacgtgggtgggggaagctgagcgctgagaccaagggctaaagctgggaggtgagtctgtcaccttgagccgggcgagcgctgtgggccaagcaggggttgcagggcagtaggagtgcaggtgacttggggccgggagccagcaataggcagggttgtgggctgggcagtgtggaggggtatttccccccagtgctgggagaggctatggcaatctagatatggccttatcaatgaatgttaattaccaacggtaatgaacgattgactgcctcggctggggcgggtcggggactgctgtgtaagatgggcaggatcctgcgcgacacctgcccagtatccgcctccagtcttcccgagagaccattccctttcgcaacatttccttcctggggcttgggcacatttccttgacttccgatctccatgactttgctttgaagacccactgctctgtccctctgacctctaatgccctcctcagctggggcacggtgcaaggaagagcgtggtctagggaggacggacgggggtgaaggggacgaccaaaggtcgtcattataagcaaacaaccagggtctcagtgggattattattactattttttccccctctgcagactgaaaaaatgcagaccgccggggcattattcatttctccagctctggtaaggtgccgcgccgcggtgctctgtagtaccaggtgtatggtgtggacgccatcagtgtttaatgaatgaacccagggagcttggcgtcctgatgatgtaggctctttgaggtggtgtaggatgtgatgaaggtaacccctgttatctgggcctgtgaacaagctatcttggttggaatgtggtcaga

SEQ ID NO: 75567 - DNA, 597 bp, Homo sapiens
ccaatgagaatggagaaggtccaggacacgtgggtgggggaagctgagcgctgagaccaagggctaaagctgggagactgaaaaaatgcagaccgccggggcattattcatttctccagctctgatccgctgttgtaccaggggtctaatcaggcctgtgtctgcctccttcttgaatagcccagtgaattcatctaaacagccttcctacagcaacttcccactccaggtggccagacgggagttccagaccagtgttgtctcccgggacattgacacagcagccaagtttattggtgctggggcagccacagttggtgtggctggttcaggggctggcattggaaccgtgtttggcagcttgatcattggctatgccaggaacccgtctctcaagcagcagctcttctcctatgccattcttggctttgccctgtctgaggccatggggcttttctgtttgatggtcgccttcctcatcctcttcgccatgtgaggctccatggggggtcaccggcctgttgctactgcaactccacaccattcttggtgctggggtgtgttaagctttaccattaaacacaacgtttctctaaa

SEQ ID NO: 75568 - DNA, 667 bp, Homo sapiens
ccaatgagaatggagaaggtccaggacacgtgggtgggggaagctgagcgctgagaccaagggctaaagctgggaggtgagtctgtcaccttgagccgggcgagcgctgtgggccaagcaggggttgcagggcagtaggagtgcagactgaaaaaatgcagaccgccggggcattattcatttctccagctctgatccgctgttgtaccaggggtctaatcaggcctgtgtctgcctccttcttgaatagcccagtgaattcatctaaacagccttcctacagcaacttcccactccaggtggccagacgggagttccagaccagtgttgtctcccgggacattgacacagcagccaagtttattggtgctggggcagccacagttggtgtggctggttcaggggctggcattggaaccgtgtttggcagcttgatcattggctatgccaggaacccgtctctcaagcagcagctcttctcctatgccattcttggctttgccctgtctgaggccatggggcttttctgtttgatggtcgccttcctcatcctcttcgccatgtgaggctccatggggggtcaccggcctgttgctactgcaactccacaccattcttggtgctggggtgtgttaagctttaccattaaacacaacgtttctctaaa

SEQ ID NO: 75569 - DNA, 586 bp, Homo sapiens
gcgcgacaaccccgacgtgtcggaaacttaggctaggtacgaggcctggtttgaatcggccgaggactgaaaaaatgcagaccgccggggcattattcatttctccagctctgatccgctgttgtaccaggggtctaatcaggcctgtgtctgcctccttcttgaatagcccagtgaattcatctaaacagccttcctacagcaacttcccactccaggtggccagacgggagttccagaccagtgttgtctcccgggacattgacacagcagccaagtttattggtgctggggcagccacagttggtgtggctggttcaggggctggcattggaaccgtgtttggcagcttgatcattggctatgccaggaacccgtctctcaagcagcagctcttctcctatgccattcttggctttgccctgtctgaggccatggggcttttctgtttgatggtcgccttcctcatcctcttcgccatgtgaggctccatggggggtcaccggcctgttgctactgcaactccacaccattcttggtgctggggtgtgttaagctttaccattaaacacaacgtttctctaaa

SEQ ID NO: 75570 - DNA, 599 bp, Homo sapiens
cctagtcctgtctgctgtctgacaacagactctaagactaattcccagcatactctgcaatcagagtattctgcatttaccaggcagtttgccaacagtttcagagctcaggtgggtggggtgaaggaggtagagtcagccacctgtccttatgccatactatctctctgctatctcgcctgccttgcttctctttctagccttccttcctacagcaacttcccactccaggtggccagacgggagttccagaccagtgttgtctcccgggacattgacacagcagccaagtttattggtgctggggcagccacagttggtgtggctggttcaggggctggcattggaaccgtgtttggcagcttgatcattggctatgccaggaacccgtctctcaagcagcagctcttctcctatgccattcttggctttgccctgtctgaggccatggggcttttctgtttgatggtcgccttcctcatcctcttcgccatgtgaggctccatggggggtcaccggcctgttgctactgcaactccacaccattcttggtgctggggtgtgttaagctttaccattaaacacaacgtttctctaaa

SEQ ID NO: 75571 - DNA, 1169 bp, Homo sapiens
  misc_feature (783)..(783): n is a, c, g, or t
cctagtcctgtctgctgtctgacaacagactctaagactaattcccagcatactctgcaatcagagtattctgcatttaccaggcagtttgccaacagtttcagagctcaggtgggtggggtgaaggaggtagagtcagccacctgtccttatgccatactatctctctgctatctcgcctgccttgcttctctttctagccttccttcctacagcaacttcccactccaggtggccagacgggagttccagaccagtgttgtctcccgggacattgacacagcagccaagtttattggtgctggggcagccacagttggtgtggctggttcaggggctggcattggaaccgtgtttggcagcttgatcattggctatgccaggaacccgtctctcaagcagcagctcttctcctatgccattcttggctttgccctgtctgaggccatggggcttttctgtttgatggtcgccttcctcatcctcttcgccatgtgaggctccatggggggtcaccggcctgttgctactgcaactccacaccattcttggtgctggggtgtgttaagctttaccattaaacacaacgtttctctaaaaaaaaaaaaaaaagggcggccggtcgctgtggatatggatgccattagaagggtctacaccagatggctctctattgaaaaacttgaaactgctttctcaatgcacttgttttttcgtcacctaacgtggaatgtgacttgacgtatcacaatgtatactctcgagatcctaattatctgaatncgtcatatcgtatgggaatagaaatctccacagcctgaatatctggaaatggttgtgcccttatttcgccaaaggcgatgaagcaaagataccccctggaaggcccagggacacgggacacagacgggggccctaactccatgcggaccaggatcggggaatggtggaaacattccacacagcttatcactataacgccatacgccaggacctgaaccgcgaaacctcggggaaggttgagtatgccccggtggcgcccaaagcgtgacaggtccatgccagttcgggggggcgggaccaaccacgacaagataaaacccacgggtcacaggacacagcctggaaggaaagcagcgcggccgacaactggacagggacactcccac

SEQ ID NO: 75572 - DNA, 380 bp, Homo sapiens
ccaatgagaatggagaaggtccaggacacgtgggtgggggaagctgagcgctgagaccaagggctaaagctgggagactgaaaaaatgcagaccgccggggcattattcatttctccagctctgatccgctgttgtaccaggggtctaatcaggcctgtgtctgcctccttcttgatacggctgcgagaagacgacagaagggagagcacaagaggaagagagagaccctcactgctggggagtccctgccacactcagtcccccaccacactgaatctcccctcctcacagtttccatgtagaccccttgaagaggggaggggcctagggagccgcaccttgtcatgtaccatcaataaagtaccctgtgctcaacctt

SEQ ID NO: 75573 - DNA, 729 bp, Homo sapiens
ccaatgagaatggagaaggtccaggacacgtgggtgggggaagctgagcgctgagaccaagggctaaagctgggagactgaaaaaatgcagaccgccggggcattattcatttctccagctctgatccgctgttgtaccaggggtctaatcaggcctgtgtctgcctccttcttgaatagcccagtgaattcatctaaacagccttcctacagcaacttcccactccaggtggccagacgggagttccagaccagtgttgtctcccgggacattgacacagcagccaagtttattggtgctggggcagccacagttggtgtggctggttcaggggctggcattggaaccgtgtttggcagcttgatcattggctatgccaggaacccgtctctcaagcagcagctcttctcctatgccattcttggctttgccctgtctgaggccatggggcttttctgtttgatggtcgccttcctcatcctcttcgccatgtgaggctccatggggggtcaccggcctgttgctactgcaactccacaccattcttggtgctggggtgtgttaagctttaccattaaacacaacgtttctctaaaaaagcctaccgacgatcaccccctacaccacctgtgcacgagccctccacgggctctctgagaagacgtctcctgcaggacccccggccggatggggccccgcgggggcccccaacggcgccgacacggcac

SEQ ID NO: 75574 - DNA, 1010 bp, Homo sapiens
ccaatgagaatggagaaggtccaggacacgtgggtgggggaagctgagcgctgagaccaagggctaaagctgggagactgaaaaaatgcagaccgccggggcattattcatttctccagctctgatccgctgttgtaccaggggtctaatcaggcctgtgtctgcctccttcttgaatagcccagtgaattcatctaaacagccttcctacagcaacttcccactccaggtggccagacgggagttccagaccagtgttgtctcccgggacattgacacagcagccaagtttattggtgctggggcagccacagttggtgtggctggttcaggggctggcattggaaccgtgtttggcagcttgatcattggctatgccaggaacccgtctctcaagcagcagctcttctcctatgccattcttggctttgccctgtctgaggccatggggcttttctgtttgatggtcgccttcctcatcctcttcgccatgtgaggctccatggggggtcaccggcctgttgctactgcaactccacaccattcttggtgctggggtgtgttaagctttaccattaaacacaacgtttctctaaaaaaaaaaaaaaaaaaaaaaaaaaaaaaaagtgggtgcggcgcgcgcccgcgcggcccctcggaagaaagcctttatagaaaccacattgcgcggtggggcgcgcgcgggggccaccaggagaggaagagggaaacacggggccacaaagagggtgtgtactccaatgaggagaaactcgcggggacaagagaaagagaggggcggggaattctcccaccacaaataaaaagaggcgccgggggggaaaaacacggagagcggttttctgtgaaaaaaaattctccagagagagggggagtattggcagggggggcccatatacggggggaactcttatataaccgggggagactccccaagggagaagctagcgaaaaatccaaaatttatacgccccgcacggggggacgcg

SEQ ID NO: 75575 - DNA, 723 bp, Homo sapiens
ccaatgagaatggagaaggtccaggacacgtgggtgggggaagctgagcgctgagaccaagggctaaagctgggaggtgagtctgtcaccttgagccgggcgagcgctgtgggccaagcaggggttgcagggcagtaggagtgcagactgaaaaaatgcagaccgccggggcattattcatttctccagctctgatccgctgttgtaccaggggtctaatcaggcctgtgtctgcctccttcttgaatagcccagtgaattcatctaaacagccttcctacagcaacttcccactccaggtggccagacgggagttccagaccagtgttgtctcccgggacattgacacagcagccaagtttattggtgctggggcagccacagttggtgtggctggttcaggggctggcattggaaccgtgtttggcagcttgatcattggctatgccaggaacccgtctctcaagcagcagctcttctcctatgccattcttggctttgccctgtctgaggccatggggcttttctgtttgatggtcgccttcctcatcctcttcgccatgtgaggctccatggggggtcaccggcctgttgctactgcaactccacaccattcttggtgctggggtgtgttaagctttaccattaaacacaacgtttctctaaaaaaaaaaaaaaaaaaaaaaaaaaaaaaaaaaaaaaaaggggggggggcaaaaaaaa

SEQ ID NO: 75576 - DNA, 479 bp, Homo sapiens
ccaatgagaatggagaaggtccaggacacgtgggtgggggaagctgagcgctgagaccaagggctaaagctgggagactgaaaaaatgcagaccgccggggcattattcatttctccagctctgatccgctgttgtaccaggggtctaatcaggcctgtgtctgcctccttcttgaatagcccagtgaattcatctaaacagccttcctacagcaacttcccactccaggtggccagacgggagttccagaccagtgttgtctcccgggacattgacacagcagccaagtttattggtgctggggcagccacagttggtgtggctggttcaggggctggcattggaaccgtgtttggcagcttgatcattggctatgccaggaacccgtctctcaagcagcagctcttctcctatgccattcttggctttgccctgtctgggctagtcggggagtcggggctgtcgggctactacgtgt

SEQ ID NO: 75577 - DNA, 932 bp, Homo sapiens
ccaatgagaatggagaaggtccaggacacgtgggtgggggaagctgagcgctgagaccaagggctaaagctgggagactgaaaaaatgcagaccgccggggcattattcatttctccagctctgccttcctacagcaacttcccactccaggtggccagacgggagttccagaccagtgttgtctcccgggacattgacacagcagccaagtttattggtgctggggcagccacagttggtgtggctggttcaggggctggcattggaaccgtgtttggcagcttgatcattggctatgccaggaacccgtctctcaagcagcagctcttctcctatgccattcttggctttgccctgtctgaggccatggggcttttctgtttgatggtcgccttcctcatcctcttcgccatgtgaggctccatggggggtcaccggcctgttgctactgcaactccacaccattcttggtgctggggtgtgttaagctttaccattaaacacaacgtttctctaaaaaaaaaaaaaaaaaaaaaaaaaaaaaaaagtgggtgcggcgcgcgcccgcgcggcccctcggaagaaagcctttatagaaaccacattgcgcggtggggcgcgcgcgggggccaccaggagaggaagagggaaacacggggccacaaagagggtgtgtactccaatgaggagaaactcgcggggacaagagaaagagaggggcggggaattctcccaccacaaataaaaagaggcgccgggggggaaaaacacggagagcggttttctgtgaaaaaaaattctccagagagagggggagtattggcagggggggcccatatacggggggaactcttatataaccgggggagactccccaagggagaagctagcgaaaaatccaaaatttatacgccccgcacggggggacgcg

SEQ ID NO: 75578 - DNA, 814 bp, Homo sapiens
tccagcctggctcacttaaacttaccaggttggcccactctgcttgtccatccaaatccccaggatctgtgcaggctaggccctctcccaggagtaacagtccccattcacctcaccctcctgtgtcctcccctcccctcaccccttcctctccctcaactggcaatgatctctgtccctcccaggaacccgtctctcaagcagcagctcttctcctatgccattcttggctttgccctgtctgaggccatggggcttttctgtttgatggtcgccttcctcatcctcttcgccatgtgaggctccatggggggtcaccggcctgttgctactgcaactccacaccattcttggtgctggggtgtgttaagctttaccattaaacacaacgtttctctaaaaaaaaaaaaaaaaaaaaaaaaaaaaaaaagtgggtgcggcgcgcgcccgcgcggcccctcggaagaaagcctttatagaaaccacattgcgcggtggggcgcgcgcgggggccaccaggagaggaagagggaaacacggggccacaaagagggtgtgtactccaatgaggagaaactcgcggggacaagagaaagagaggggcggggaattctcccaccacaaataaaaagaggcgccgggggggaaaaacacggagagcggttttctgtgaaaaaaaattctccagagagagggggagtattggcagggggggcccatatacggggggaactcttatataaccgggggagactccccaagggagaagctagcgaaaaatccaaaatttatacgccccgcacggggggacgcg

SEQ ID NO: 75579 - DNA, 2552 bp, Homo sapiens
  misc_feature (1262)..(1262): n is a, c, g, or t
gagaaaagctcagtccccagtttgagtcagagtagggaccatgctgtcccaggttcaaggataaaaaccatcaggcccaagtgccatccatagtccatctccagagtcttcctccacaaactgggattcatccccgctgaaaaagcacaatctaacagcaagggaacaaaaaaaccatgctatcacataatactatgatgaagcagagaaaacagcaagcaacagccatcatgaaggaagtccatggaaatgatgttgatggcatggacctgggcaaaaaggtcagcatccccagagacatcatgttggaagaattatcccatctcagtaaccgtggtgccaggctatttaagatgcgtcaaagaagatctgacaaatacacatttgaaaatttccagtatcaatctagagcacaaataaatcacagtattgctatgcagaatgggaaagtggatggaagtaacttggaaggtggttcgcagcaagcccccttgactcctcccaacaccccagatccacgaagccctccaaatccagacaacattgctccaggatattctggaccactgaaggaaattcctcctgaaaaattcaacaccacagctgtccctaagtactatcaatctccctgggaacaagccattagcaatgatccggagcttttagaggctttatatcctaaacttttcaagcctgaaggaaaggcagaactgcctgattacaggagctttaacagggttgccacaccatttggaggttttgaaaaagcatcaagaatggttaaatttaaagttccagattttgagctactattgctaacagatcccaggtttatgtcctttgtcaatcccctttctggcagacggtcctttaataggactcctaagggatggatatctgagaatattcctatagtgataacaaccgaacctacagatgataccactgtaccagaatcagaagacctatgaaaagaaagttgtatgtgccacataaaactctgaatataaaagttgctgttctactattttaactactggcaaagccacttgcatttttcattagtagcaacaatagcaatttagtgattttccttttctgacattcaatttcaatctcagatcaaatactaataaacaattagaaatcttactttaaaaaacttataactcacttgtcttcattcataattttgttttcacctggtttaaagaatccagatattttactgcaaaagttcagatggaaaagtaattgacagnttcacctttgtctcattttatatgatttattacagtgtaagtttttcaagtggaatctagaatcaaaatacagggagagatatgaagacctattcagagtttcatctggggatgaaagctatggaagatgatgtacaaatgttattgatggagaaaatggttgggtgtgtcctttctggtgaccatgagaaaataatatgtcttgatgaagtcttttcattagtcactcttagaattctaaagtgctttgcacttttcaatatgttttgaatcattaggtaatttattctggatgatattctccaaaattcaattcagttattatattcatttagcattaagtcaaggagactgagaatgactcaagggacgtcatagtaccatagttttaaggaccaaggtgtgcccagaattcaagtttcacaaatcccaatgctgtgcattgattatgttcaactttatgtgtgcattcttagaagagtaagaacaaataaagtacaccgtaatatacatataaatacattcatgtttgtgagagaaggaaagagtaagtaatttgaattggcagctttctttgctaaatctttaaattctgttaagatcctcaagtaactggggagtacatgctttaggacacaaacaaaaacaaagggcatgaaagtatctgaaagcaatgtagcacatatctatcgtaatatatgtaatatattgacataaaagacacaaactaatataaagttatagttatatcttaaaatataattgaagaagcatatgacatataacttatagaaatcagtatcaattcctcccatttcaattcagttaagacttctgtgatagatgtttatagcagagaagaaatgtctcatcaatagaaaactatcagataaagtttaggagataggaagaaggactgtgtgtagtaatgaaaataccaagttgcaacattacatgtttacaaaaaaaaatctgtgtttgtagtgtggaagttggtgactgttttaatcatcatctagacttgttaagtagaaaaattttaaaaatttgcttatgaaaatataacccccagaaagtaacaatgacaaagtattatatttatatatattattgtagagaatttgtatatttttaaagatgtcttaagatatcttaattttatttataagttttggtgtttacctgttttaaaatgataatgttggcatctgtgataaactatcaatgaggctcccatcatgccattttttgttcattttaatctttaaaaaataaaaattaggcatatta

SEQ ID NO: 75580 - DNA, 727 bp, Homo sapiens
  misc_feature (708)..(708): n is a, c, g, or t
gagaaaagctcagtccccagtttgagtcagagtagggaccatgctgtcccaggttcaaggataaaaaccatcaggcccaagtgccatccatagtccatctccagagtcttcctccacaaactgggattcatccccgctgaaaaagcacaatctaacagcaagggaacaaaaaaaccatgctatcacataatactatgatgaagcagagaaaacagcaagcaacagccatcatgaaggaagtccatggaaatgatgttgatggcatggacctgggcaaaaaggtcagcatccccagagacatcatgttggaagaattatcccatctcagtaaccgtggtgccaggctatttaagatgcgtcaaagaagatctgacaaatacacatttgaaaatttccagtatcaatctagagcacaaataaatcacagtattgctatgcagaatgggaaagtggatggaagtaacttggaaggtggttcgcagcaagcccccttgactcctcccaacaccccagatccacgaagccctccaaatccagacaacattgctccaggatattctggaccactgaaggaaattcctcctgaaaaattcaacaccacagctgtccctaagtactatcaatctccctgggaacaagccattagcaatgatccggagcttttagaggctttatatcctaaacttttcaagccttgaagaaaagcanacttgcttgataccagagc

SEQ ID NO: 75581 - DNA, 2728 bp, Homo sapiens
  misc_feature (1262)..(1262): n is a, c, g, or t
gagaaaagctcagtccccagtttgagtcagagtagggaccatgctgtcccaggttcaaggataaaaaccatcaggcccaagtgccatccatagtccatctccagagtcttcctccacaaactgggattcatccccgctgaaaaagcacaatctaacagcaagggaacaaaaaaaccatgctatcacataatactatgatgaagcagagaaaacagcaagcaacagccatcatgaaggaagtccatggaaatgatgttgatggcatggacctgggcaaaaaggtcagcatccccagagacatcatgttggaagaattatcccatctcagtaaccgtggtgccaggctatttaagatgcgtcaaagaagatctgacaaatacacatttgaaaatttccagtatcaatctagagcacaaataaatcacagtattgctatgcagaatgggaaagtggatggaagtaacttggaaggtggttcgcagcaagcccccttgactcctcccaacaccccagatccacgaagccctccaaatccagacaacattgctccaggatattctggaccactgaaggaaattcctcctgaaaaattcaacaccacagctgtccctaagtactatcaatctccctgggaacaagccattagcaatgatccggagcttttagaggctttatatcctaaacttttcaagcctgaaggaaaggcagaactgcctgattacaggagctttaacagggttgccacaccatttggaggttttgaaaaagcatcaagaatggttaaatttaaagttccagattttgagctactattgctaacagatcccaggtttatgtcctttgtcaatcccctttctggcagacggtcctttaataggactcctaagggatggatatctgagaatattcctatagtgataacaaccgaacctacagatgataccactgtaccagaatcagaagacctatgaaaagaaagttgtatgtgccacataaaactctgaatataaaagttgctgttctactattttaactactggcaaagccacttgcatttttcattagtagcaacaatagcaatttagtgattttccttttctgacattcaatttcaatctcagatcaaatactaataaacaattagaaatcttactttaaaaaacttataactcacttgtcttcattcataattttgttttcacctggtttaaagaatccagatattttactgcaaaagttcagatggaaaagtaattgacagnttcacctttgtctcattttatatgatttattacagtgtaagtttttcaagtggaatctagaatcaaaatacagggagagatatgaagacctattcagagtttcatctggggatgaaagctatggaagatgatgtacaaatgttattgatggagaaaatggttgggtgtgtcctttctggtgaccatgagaaaataatatgtcttgatgaagtcttttcattagtcactcttagaattctaaagtgctttgcacttttcaatatgttttgaatcattaggtaatttattctggatgatattctccaaaattcaattcagttattatattcatttagcattaagtcaaggagactgagaatgactcaagggacgtcatagtaccatagttttaaggaccaaggtgtgcccagaattcaagtttcacaaatcccaatgctgtgcattgattatgttcaactttatgtgtgcattcttagaagagtaagaacaaataaagtacaccgtaatatacatataaatacattcatgtttgtgagagaaggaaagagtaagtaatttgaattggcagctttctttgctaaatctttaaattctgttaagatcctcaagtaactggggagtacatgctttaggacacaaacaaaaacaaagggcatgaaagtatctgaaagcaatgtagcacatatctatcgtaatatatgtaatatattgacataaaagacacaaactaatataaagttatagttatatcttaaaatataattgaagaagcatatgacatataacttatagaaatcagtatcaattcctcccatttcaattcagttaagacttctgtgatagatgtttatagcagagaagaaatgtctcatcaatagaaaactatcagataaagtttaggagataggaagaaggactgtgtgtagtaatgaaaataccaagttgcaacattacatgtttacaaaaaaaaatctgtgtttgtagtgtggaagttggtgactgttttaatcatcatctagacttgttaagtagaaaaattttaaaaatttgcttatgaaaatataacccccagaaagtaacaatgacaaagtattatatttatatatattattgtagagaatttgtatatttttaaagatgtcttaagatatcttaattttatttataagttttggtgtttacctgttttaaaatgataatgttggcatctgtgataaactatcaatgaggctcccatcatgccattttttgttcattttaatctttaaaaaataaaaattaggcatattacaaaaataaaaaaaaaaaaaaaactgtgggggccggccacaaaaagtttaaaacatcgtggggggcgggccaaagtaggaaacggtaagggccagaaaacggaaagagggggttccccaaaaaacgcgggacggagtggaaacacaggtcggacagggaacaagggcggcgaaagg

SEQ ID NO: 75582 - DNA, 2912 bp, Homo sapiens
  misc_feature (1446)..(1446): n is a, c, g, or t
agtggttcccaatccccacatttaaaatggaatgtttggtttatttaaagtaaataggctattttttcttactgggtctggcttctctggcccttcgcatacgtgtgtctgctgagtgttcctgcatgtaagaattaagaccaagggaggggagagagaaacccacacataaacaatgcactaaagatcactgaactgtttaaacatttccacttgccagtttaatttcttgaagactgttgcttgtttggaatgtttcttgtcactgattttaaggttgcatctggaaaagactaaaggcttcagtcccctcccaccaccagaaaaaccacaatctaacagcaagggaacaaaaaaaccatgctatcacataatactatgatgaagcagagaaaacagcaagcaacagccatcatgaaggaagtccatggaaatgatgttgatggcatggacctgggcaaaaaggtcagcatccccagagacatcatgttggaagaattatcccatctcagtaaccgtggtgccaggctatttaagatgcgtcaaagaagatctgacaaatacacatttgaaaatttccagtatcaatctagagcacaaataaatcacagtattgctatgcagaatgggaaagtggatggaagtaacttggaaggtggttcgcagcaagcccccttgactcctcccaacaccccagatccacgaagccctccaaatccagacaacattgctccaggatattctggaccactgaaggaaattcctcctgaaaaattcaacaccacagctgtccctaagtactatcaatctccctgggaacaagccattagcaatgatccggagcttttagaggctttatatcctaaacttttcaagcctgaaggaaaggcagaactgcctgattacaggagctttaacagggttgccacaccatttggaggttttgaaaaagcatcaagaatggttaaatttaaagttccagattttgagctactattgctaacagatcccaggtttatgtcctttgtcaatcccctttctggcagacggtcctttaataggactcctaagggatggatatctgagaatattcctatagtgataacaaccgaacctacagatgataccactgtaccagaatcagaagacctatgaaaagaaagttgtatgtgccacataaaactctgaatataaaagttgctgttctactattttaactactggcaaagccacttgcatttttcattagtagcaacaatagcaatttagtgattttccttttctgacattcaatttcaatctcagatcaaatactaataaacaattagaaatcttactttaaaaaacttataactcacttgtcttcattcataattttgttttcacctggtttaaagaatccagatattttactgcaaaagttcagatggaaaagtaattgacagnttcacctttgtctcattttatatgatttattacagtgtaagtttttcaagtggaatctagaatcaaaatacagggagagatatgaagacctattcagagtttcatctggggatgaaagctatggaagatgatgtacaaatgttattgatggagaaaatggttgggtgtgtcctttctggtgaccatgagaaaataatatgtcttgatgaagtcttttcattagtcactcttagaattctaaagtgctttgcacttttcaatatgttttgaatcattaggtaatttattctggatgatattctccaaaattcaattcagttattatattcatttagcattaagtcaaggagactgagaatgactcaagggacgtcatagtaccatagttttaaggaccaaggtgtgcccagaattcaagtttcacaaatcccaatgctgtgcattgattatgttcaactttatgtgtgcattcttagaagagtaagaacaaataaagtacaccgtaatatacatataaatacattcatgtttgtgagagaaggaaagagtaagtaatttgaattggcagctttctttgctaaatctttaaattctgttaagatcctcaagtaactggggagtacatgctttaggacacaaacaaaaacaaagggcatgaaagtatctgaaagcaatgtagcacatatctatcgtaatatatgtaatatattgacataaaagacacaaactaatataaagttatagttatatcttaaaatataattgaagaagcatatgacatataacttatagaaatcagtatcaattcctcccatttcaattcagttaagacttctgtgatagatgtttatagcagagaagaaatgtctcatcaatagaaaactatcagataaagtttaggagataggaagaaggactgtgtgtagtaatgaaaataccaagttgcaacattacatgtttacaaaaaaaaatctgtgtttgtagtgtggaagttggtgactgttttaatcatcatctagacttgttaagtagaaaaattttaaaaatttgcttatgaaaatataacccccagaaagtaacaatgacaaagtattatatttatatatattattgtagagaatttgtatatttttaaagatgtcttaagatatcttaattttatttataagttttggtgtttacctgttttaaaatgataatgttggcatctgtgataaactatcaatgaggctcccatcatgccattttttgttcattttaatctttaaaaaataaaaattaggcatattacaaaaataaaaaaaaaaaaaaaactgtgggggccggccacaaaaagtttaaaacatcgtggggggcgggccaaagtaggaaacggtaagggccagaaaacggaaagagggggttccccaaaaaacgcgggacggagtggaaacacaggtcggacagggaacaagggcggcgaaagg

SEQ ID NO: 75583 - DNA, 1153 bp, Homo sapiens
gagaaaagctcagtccccagtttgagtcagagtagggaccatgctgtcccaggttcaaggataaaaaccatcaggcccaagtgccatccatagtccatctccagagtcttcctccacaaactgggattcatccccgctgaaaaagcacaatctaacagcaagggaacaaaaaaaccatgctatcacataatactatgatgaagcagagaaaacagcaagcaacagccatcatgaaggaagtccatggaaatgatgttgatggcatggacctgggcaaaaaggtcagcatccccagagacatcatgttggaagaattatcccatctcagtaaccgtggtgccaggctatttaagatgcgtcaaagaagatctgacaaatacacatttgaaaatttccagtatcaatctagagcacaaataaatcacagtattgctatgcagaatgggaaagtggatggaagtaacttggaaggtggttcgcagcaagcccccttgactcctcccaacaccccagatccacgaagccctccaaatccagacaacattgctccaggatattctggaccactgaaggaaattcctcctgaaaaattcaacaccacagctgtccctaagtactatcaatctccctgggaacaagccattagcaatgatccggagcttttagaggctttatatcctaaacttttcaagcctgaaggaaaggcagaactgcctgattacaggagctttaacagggttgccacaccatttggaggttttgaaaaagcatcaagaatggttaaatttaaagttccagattttgagctactattgctaacagatcccaggtttatgtcctttgtcaatcccctttctggcagacggtcctttaataggactcctaagggatggatatctgagaatattcctatagtgataacaaccgaacctacagatgataccactgtaccagaatcagaagacctatgaaaagaaagttgtatgtgccacataaaactctgaatataaaagttgctgttctactattttaactactggcaaagccacttgcatttttcattagtagcaacaatagcaatttagtgattttccttttctgacattcaatttcaatctcagatcaaatactaataaacaattagaaatcttac

SEQ ID NO: 75584 - DNA, 574 bp, Homo sapiens
gagaaaagctcagtccccagtttgagtcagagtagggaccatgctgtcccaggttcaaggataaaaaccatcaggcccaagtgccatccatagtccatctccagagtcttcctccacaaactgggattcatccccgctgaaaaagcacaatctaacagcaagggaacaaaaaaaccatgctatcacataatactatgatgaagcagagaaaacagcaagcaacagccatcatgaaggaagtccatggaaatgatgttgatggcatggacctgggcaaaaaggtcagcatccccagagacatcatgttggaagaattatcccatctcagtaaccgtggtgccaggctatttaagatgcgtcaaagaagatctgacaaatacacatttgaaaatttccagtatcaatctagagcacaaataaatcacagtattgctatgcagaatgggaaagtggatggaagtaacttggaaggtggtcgacaccccttgatctccacaccagtcagggctcaaccaaaaattcccggttttggccaggggattccctaaataaccattcctatttttcccgggaa

SEQ ID NO: 75585 - DNA, 2064 bp, Homo sapiens
  misc_feature (598)..(598): n is a, c, g, or t
tagcggtacctctctcccagaaaaggcagctgaaggaaaggcagaactgcctgattacaggagctttaacagggttgccacaccatttggaggttttgaaaaagcatcaagaatggttaaatttaaagttccagattttgagctactattgctaacagatcccaggtttatgtcctttgtcaatcccctttctggcagacggtcctttaataggactcctaagggatggatatctgagaatattcctatagtgataacaaccgaacctacagatgataccactgtaccagaatcagaagacctatgaaaagaaagttgtatgtgccacataaaactctgaatataaaagttgctgttctactattttaactactggcaaagccacttgcatttttcattagtagcaacaatagcaatttagtgattttccttttctgacattcaatttcaatctcagatcaaatactaataaacaattagaaatcttactttaaaaaacttataactcacttgtcttcattcataattttgttttcacctggtttaaagaatccagatattttactgcaaaagttcagatggaaaagtaattgacagnttcacctttgtctcattttatatgatttattacagtgtaagtttttcaagtggaatctagaatcaaaatacagggagagatatgaagacctattcagagtttcatctggggatgaaagctatggaagatgatgtacaaatgttattgatggagaaaatggttgggtgtgtcctttctggtgaccatgagaaaataatatgtcttgatgaagtcttttcattagtcactcttagaattctaaagtgctttgcacttttcaatatgttttgaatcattaggtaatttattctggatgatattctccaaaattcaattcagttattatattcatttagcattaagtcaaggagactgagaatgactcaagggacgtcatagtaccatagttttaaggaccaaggtgtgcccagaattcaagtttcacaaatcccaatgctgtgcattgattatgttcaactttatgtgtgcattcttagaagagtaagaacaaataaagtacaccgtaatatacatataaatacattcatgtttgtgagagaaggaaagagtaagtaatttgaattggcagctttctttgctaaatctttaaattctgttaagatcctcaagtaactggggagtacatgctttaggacacaaacaaaaacaaagggcatgaaagtatctgaaagcaatgtagcacatatctatcgtaatatatgtaatatattgacataaaagacacaaactaatataaagttatagttatatcttaaaatataattgaagaagcatatgacatataacttatagaaatcagtatcaattcctcccatttcaattcagttaagacttctgtgatagatgtttatagcagagaagaaatgtctcatcaatagaaaactatcagataaagtttaggagataggaagaaggactgtgtgtagtaatgaaaataccaagttgcaacattacatgtttacaaaaaaaaatctgtgtttgtagtgtggaagttggtgactgttttaatcatcatctagacttgttaagtagaaaaattttaaaaatttgcttatgaaaatataacccccagaaagtaacaatgacaaagtattatatttatatatattattgtagagaatttgtatatttttaaagatgtcttaagatatcttaattttatttataagttttggtgtttacctgttttaaaatgataatgttggcatctgtgataaactatcaatgaggctcccatcatgccattttttgttcattttaatctttaaaaaataaaaattaggcatattacaaaaataaaaaaaaaaaaaaaactgtgggggccggccacaaaaagtttaaaacatcgtggggggcgggccaaagtaggaaacggtaagggccagaaaacggaaagagggggttccccaaaaaacgcgggacggagtggaaacacaggtcggacagggaacaagggcggcgaaagg

SEQ ID NO: 75586 - DNA, 973 bp, Homo sapiens
attttctcttttcaggcaaagcaaatactaatgctatttctgtaaccacagatcaagagaacagtatgcgtaacatcttatgcctaaagttccttgtttgtgttgagaaaaagcctcagcatatacaattatgcataaaataaactttcatagcatgccatccaacttatttgttattcgatgtaagcatggagaaacctgcttaagtctttttttgttttaagtggaaacaaaaaagaactgcacagggaaatggtccacagtaaggctctttgccctttaagtgaagatccttgggctctggaagacaaatgacaggtggattaaagatccgtcaatctttctatgcctggggaaccctccaaccctgtaagacttgatctttgtatggctgagggtggggctggctgtccattaaattaccacatactgaaattgccagagaaatgtgatgggttctgacgtttatacagcacttcatacttttagatccatgagagactagcatttttctatcaggattcatggatgtgattccacttacgataaaagctgctagaggtggaaaccccgcagcttttcctactgactttcttttgtcgggagctctgtggccttccagagaccactgagaaggaccagctccatgcacaagaaggtgatcaattttgcaaaagacaaaaatcttaaccatttccagaaactactagttatattaggcacgttttaaaaacttaaacaaaataaaggccatcccaaaccctgggctgttgtcgggttattttgcagcagggttgtgttcaaaatcttcctttgactccctgagactttatcttcttcttgcagaataagatggaaagccaatcagtgtttgctgtaatgtaatacagaatagtgccaatctggaaataacctaaatgtccaacattaaggaaatggcttaataaactattaatagcaacaaaaataatat

SEQ ID NO: 75587 - DNA, 591 bp, Homo sapiens
tgaatggttctgtctcactggggttccaggagccactggggtacaaaaaaactcctgcggctagctccgtgtctgcccaaacagctgcccagttttgtgcttgaaacccagggccccagtggtgtaggcacacgagggaatctcctgatgtgcagattgcaaaaaccgtgggaaaagcgtagtaacccagctgggtaacacagttcctcacagcttccattggctgggggaagggaggtccctggccccttgcacttcctgggtggagcatcaccccatcttgcttctgctcgctctccacgggttggacccactgcctaaccatttccagtgagatgaactggttacctcagttggagatacagaaatcaccagccttctgagttggtctcgctgggagctgcagaccagagctgttcctatttagccatcttggcccctccccccttgaaaattccatttctttaatagatatagggctattgaggctatttctccttaaatgaacctagatagtttgtgtgcagctgtcaaggaatttgtccattttatctaagttgtcatatttatctatataaagtttttcataat

SEQ ID NO: 75588 - DNA, 715 bp, Homo sapiens
atttctacggtgtcttaaattataactacacaaaattaacacactaactctgtcacttatttacaccaataaaagtctgtttccaaacaagaaagctgcactgggtatatgtatatgggtgtttatgtgatttagatgactggcatatttttaaaaactgtccaaaggagtttgaagtcataattttaatgtagcaggaaaagataaagtcattctcccatatttccttaatgttcagatgctatgtgttgtatgacatgatgtatataatgtaagttactaaaactttttttggaagagaaaaagctagagtagcagatatgcacactaaaaggcaaaaatctggttttacaagttttataataaaaaaggtggcaagatgaacgtttttttaacttagaactaaatttaagcttaacttttacagcaatctttagaaaattttgctatatggtctttcttgaagattatttgtaattttgtataattgatttagaaattcccatcaaattttaaaattcagagttctagataaaaccatcaattatctgaaatcctttctcagtcaagactgcccatgaagccaagtgccttatttgatcctataagcttcactgaaaatcagcagagtctttattaatttataaatgatgggcatgattaactggtctcaagtttgctcacaattctgaacccttgaaatcactgaaatacc

SEQ ID NO: 75589 - DNA, 354 bp, Homo sapiens
gataccttaatctaaattttatcttaatttttatttttatttcattgtctaaatttttatctaaaattttttctagctctttattacaccaagacagcttcacatttttatttatatattgtacatctcatgtaaggaattaccgtatataagctagtgtcataacttaagtagccacattcattcagtatgttttatgttttctctctgactggatctctgatacattctttcctgttctagctgcttttatgcaaaagggcattatatgtttgtcaatcaaccaggcttctgtgactgtttagaagaattatgtaaatatataatcctgtgcctgttcactttgccatgttt

SEQ ID NO: 75590 - DNA, 531 bp, Homo sapiens
agactcatgaaattgctgtgtgaccttgggcaagtcacttaccctgtctggatcaacatttctcctgctgccaagtgtgggagcctggctgggtctttctcagcagaagttgtttccaggtgtgctcaagtgccttcctctagcagagcacagaaagctagaatacccccagggagacagggatgccaagagtagaccagagctgggacccacagacagaacctccacctgcctgctgcccactgagctgggacctggtcaccttggattttagccggcctctttctggctataacaggcagagtcggagctgcctcccaccccagtcagaagcctggcaccccctctgcttcggccagatgtgctggctgactccgacttccgaccagcactcagctggcctctggggattctagctccacaaccaggccgtgaggctggagaaactggcagttattgctgtcaaaagcctgttctctcaactgctgtcaataaaattaaagatacagatttgctgccatgtgaccagca

SEQ ID NO: 75591 - DNA, 592 bp, Homo sapiens
tttaaataaaacagaattagcaaacttttgtgactgtagagaacgaagacaaaaatttagtcctaataagctctcccaccttccaggcaaaatcttttagaccctagttctaaccggtatgtaaagctaagaaaaataatttccaaaatgaactcttgaaatttgaatggaaaaaaactgcctttagttctgaggtttgttaataagcaatattttacatagaaatcttaaggaatgaaattagctccgataccccagtgtttcgaggaaagggaatatgttttacttttgagcaggttagtataagaatcacactcagccaggtttcttaggcccaagtgagcctcagaacctgaaaaggggaaaaagaaggcatcttggggcataatggaagctgaggttcccccctcctctacccgctgctgggaccaacatcacatctccttcccatatgaaatggctatatgctattacagaaaagactagataagagaaagtgaatctggaatacatgaattgcttttttgccatccccaacttgtttggcttttaataaactggcatggctttcaatatcctttcctttatctac

SEQ ID NO: 75592 - DNA, 814 bp, Homo sapiens
tttaaataaaacagaattagcaaacttttgtgactgtagagaacgaagacaaaaatttagtcctaataagctctcccaccttccaggcaaaatcttttagaccctagttctaaccggtatgtaaagctaagaaaaataatttccaaaatgaactcttgaaatttgaatggaaaaaaactgcctttagttctgaggtttgttaataagcaatattttacatagaaatcttaaggaatgaaattagctccgataccccagtgtttcgaggaaagggaatatgttttacttttgagcaggttagtataagaatcacactcagccaggtttcttaggcccaagtgagcctcagaacctgaaaaggggaaaaagaaggcatcttggggcataatggaagctgaggttcccccctcctctacccgctgctgggaccaacatcacatctccttcccatatgaaatggctatatgctattacagaaaagactagataagagaaagtgaatctggaatacatgaattgcttttttgccatccccaaccttgctgagctttcatcagacctgccatgccttcacaacctcttaccttccccaacataagccaacaaccgaagccatgtcgcagaagatatatatgtaaatgtatgcacacatgtgtatgtgtgtgagtatatatgtacacacacatatgcatatactttatgtatatatttgctttggtatatatgctttaaatatatatatttatatatgcatatatacctgtagttctcaaaaatatcaccagtagcccaaatttgcctttatttcaggagt

SEQ ID NO: 75593 - DNA, 148 bp, Homo sapiens
ctccgttcccccgtccccatcctccatccccgtctcccatcgccgtccccccgtccccgtcccccgtccccgtcccccctgtccctgtcccccttcccccgacccctcccagatcctggggaccaataaagcccgcagcgggtctcgg

SEQ ID NO: 75594 - DNA, 842 bp, Homo sapiens
ggagcgtctctgcccggccgcccatcgtctgaaatgtggggagcgcctctgcaccgccgccccatctgggatgtgaggagcgcctctgccctgccgtgaccccgtctgggagctaaaattcaagtaatggactatttggatgatagtgtgcccggaattggttccttccgatattcttggtctcgctgactttaacaatgaagcctcagaccaccgcgcacagtccagtgttaagacagggcatgaggaccagctccactggaaacaccagccagcgtcttaaccggggaggaaggaaggtgtgtgctgggcaagtggggcatgtgacaaagtggaactgaagtggccgtcgcttgcctttaggccagcaggttcctcagcagcctttgctcataggctggcttaactatgatcctgctgtgggaagataaaaaaactgaccgaaggagataggctgagtaatggctccctcaagatgtccatatttcatccctggaacctgtgaatacatttctttatgtggcaaaagggactttgtggctgtgattaaactaagaaccttgaaatgaggagattctccgggatcgtccagatgcatcaaatgtaacaagaaggagtcagagtcaggctagaagccgctatgctgctggctttgaaggcagatgaaggggccaaggaattagggtggtctctagaatctggaaaaggcaatgaaattgattctcccctagagctttcagaaggaatgcagccttgcccacaccttcattttagaccagtgaaactgatttcagacttctgactgccagaactgtaagataataaatgtatattgtttgaag

SEQ ID NO: 75595 - DNA, 436 bp, Homo sapiens
gcgggggaggggggtcaataacttgtgagtaatccattagtcttttaaacggctttattgagatataattcacttacacaatttgccagttcaaattgtgcagttcagtggttcttattgtattcagagttgcacaatactagtattttaaaaaagaattttatccaaaattccttggatttttatctgtgtacctaatgtgcaacggaatagagtgaggactgctttgaggccttcacccccaagtaactgtgtagctgaggaggccgactaataaataattctactatcaatataaaagtgctacatcaaaaatgtatacattgggtaggattgtatagatacgtcacttgcactgtgtagtttactcaacacaattcagagtagggttggttttgttaaaatgcagattctgggtcctgctcctgagattctg

SEQ ID NO: 75596 - DNA, 241 bp, Homo sapiens
tgcaaataccaaggaaccactagtggatcattaggaaccatctgtacttatgacagggcggtgggataactttcaaaagcaaacaaacgaaactagtagacttgaagacttaggttccagctttagctctgacattagtgtgtatcttatcttaggcatgccaacctccctggtcttcatctgtgcactagagataataatgcctcataaggtggttataataataattgggtgattgtat

SEQ ID NO: 75597 - DNA, 466 bp, Homo sapiens
aaactactgtaaaaagatggcataaaatattttaaaatggtatacctgtataggacacttaccattaatggaagcctgtaggactggaagttgatctgggtgagtcagtgagtgagtggtaagcgcatgtgaaggtctaggacattactgtacactacttgatacggtttggctctgtgtccccacccaaatctcatctcaaattgtaatccttacatgtcagaggggcctggtgggaggtgactgaatcatgggggcagacttcctccttactgttctttttatagtgagctctcatgagatctgggggtttaaaagtatgtggcttgctctctctctctctctctcaagctttgtcatggttagatgtgccttgcttccccttcaccttctgtcatgattgtaagtttcctgagggctcctcaggcatacggaactgtcagtcaattaaacctcttttctttat

SEQ ID NO: 75598 - DNA, 402 bp, Homo sapiens
gtgaagttaagcagcaagggctgagaaccgctgctccagagaggccaggaggtctggtcagaggctggggccccagcccccaggcacctctctgtgtcagtttccctggagaagtcatgagtttgaagagtaggcagaggccaggtgtcatcactgagtcactcatcaatggccaatgagagtgcaaagggtagctctgagcacaggatgtgtagcaagactcctgggttcagctcccagtcccaccactgccaagtgggggatccttagcaaggtacttaccttttttctgcctctgtttctacgcctgcaaaatgggcacaataatgtcagattcatgaggataatgaggactaaattagttaattcctataagctgcttctaaacgtattacttataaa

SEQ ID NO: 75599 - DNA, 310 bp, Homo sapiens
tattcagtgaaacctttatatcccttatggtcctccatcttcaagaaaggtagaatggactaaaggtcttttaaaaacacacctcaccaagctcagccaccaactttaaaaggactggataatacttttaccactttcccttctcagaattcaggcctgtcctcggaatgctacaaggcacagcccatttaagctcctgtatagacgctcctttttattaggccccagtctcattccagacaccagaccaacttagactgtgcctcaaaacaaacaaacaaacaaacaaacttgtcatccctactatttt

SEQ ID NO: 75600 - DNA, 428 bp, Homo sapiens
aactggatttattatacttcatatcacaaaaatgccgacttggaggttttacgtagctttaatttagtgttaagatattagttctcaacatcaagaaactatgtgattttaagtatttctgtaactaactttccaagcagttaggatgtagagttcagttattctttttattctttgatagcagtgttgttttctttgattacatatacatatatttgatctgtaaatatgtttgtatgtatgtgtgttacataaatatgcatgtgacaattaattccattctccctagaataaggctggaactaattgactgtaagcagactatcctgctcattatctattaggttatactcaaagtcttttaaccagtgcattaacatgttttaaccaagtttattggctttaccaataaatttaccaattcattt

SEQ ID NO: 75601 - DNA, 597 bp, Homo sapiens
tacaaattttaggtgaccaaactgattttagtgacctcaatcctaaaatctaagccatttgtttagcttttaatgacattttataatgttaaagggaggactttggagctgttatctcatctagagattgtttggaacatatgtcttccagaataggttgataagctcacaatcatttattgctacgtttttgtttttgttttgagacaaggtctcactccgtcacccaggctggagtgcagtggcatgatcatagctcactgcagcctcgacctcccgggctcaagcaatcctctcacttcagcctcctgagtagctgggactacagggaggcactaccatgccctgctaatttttggatttttttgtagagacaaggtctcactatgttgcccaggctggtctcaaactcctggtctcaagcgatcctcttgccttgtcttcccaaagtgctgggattacagatgtgagccaccacacctggcctcatttctatattttgaaacacggtatgatccattctagaattctagttgttatgttgacatttttctttgaataatcttaactttgcttaaataaattaaagatttcaat

SEQ ID NO: 75602 - DNA, 418 bp, Homo sapiens
tgtaaaataaaacacaggtacagaaaaccataaaaaagcaagtatagcttagtgaatgtagggcaaacacccttgtaacaataatccaggtcaagaaatagagctttaacagccagcccagaatccctttctttgtcccatccctgttacatcgtcttccctccaaaaatgagatgattattagcaccagaaaaggaaaaaaaaagagcacaaggaagggaaatgtaatccttgtttaccattggttcaaccatgatcatattgataataatcgcataactgaaacactgtatatggacttaatcataactttttaatatatattacaatttttaatcatgcgggatacaacaccagagggacgagcctttgagctttttggtcccaactgaatgttggggtaaatattgggagggaa

SEQ ID NO: 75603 - DNA, 386 bp, Homo sapiens
cccaatattttgacagtatttaatataatatgaacaaatacaaactgagtggtgagcttgttgaggaataacaaataattcacttaaacttgataagccagtttgattgttttatttcactaaaatatgatatgatttattttatattgcctaaaacttggtgccttttataatcatcaggatctggtaaatgacagaactaacatacataatttatgtaaagtgtggtcaattggagagagatatatatttatatatatttattaaatttttcaagctctgtattgtggtaaacaaaaacatcattactttttccagtagtcctaagtaagaaagcatccattcataacattgtggataatttttcattaaaattccagtaacta

SEQ ID NO: 75604 - DNA, 485 bp, Homo sapiens
gagagctagcaccattaccctggcttataaattatcttcagaaaatatttgaaagtggtaactattagtacagactgttttgttcatttgtttgtttgtttgcagctgatacattcctcaatggcaaaacctttacctccacctcggtttttattctccctaatgtgttccacttccaaaggtaactaacaaagacaccctatattccgaaatctccctcctcccccatctgccaactggatgctgagacccagggtggccttgcggctgatgtgttaaggacagcagtgcctctgtcagcctacatccctgaatgactccatggacccaaacacccactcaccactcccactttggccagctaggtacaaatacatggaactttctatgagcaggtaacaaacatcctttatgttaagtcactgagattctgggatgcctctattaaagagctaatgtcaccttaattacaattgtaaattaaa

SEQ ID NO: 75605 - DNA, 2130 bp, Homo sapiens
  misc_feature (840)..(840): n is a, c, g, or t
cgcggccgccgccccctcctcctccggcacacgcgcacgcaggtgcagccctcgctgcgccggccacctgcgcgcggacgccccgctcggccccgcgaccctccgccgcccgacgtctggccgtgcaggccgggaggggacgggtaggaggtggcgggtggccccgggcgcggcgctgccttcgatggcccaacccccttattcacgagccgcggccgtgactctgcccggtgacgtggggaggccgaactttacgtaacccgcccggcgccccacgcgtgccggcacagggcatatctggggcccggaggcccaggcttggggaaggggctccagtcacggtgttgcccacgggccacagcctacccgcaccgcgccgctctctttaactcagttactgccagtgatagtgacccagtcagtgtgtgtggacgcggcctgccttctgtcccaggccccttgtgaccaagggcttacccttgaaagaaggcagtagggaggttgggacggagccagaggtcagacgcctaggctcaggtcggggctggggactcagagggcagggtcagggcctaagctcgattgcctgtgggttgggggtccccaccaattctggaatgagcccaaactgagacgcaggggacctgagttctaggcctggctctgccgtggcttgctgaccttggagaattggagaagcttgtgccctgctggaaagtgggatggcagtacccgcttcatctagtagtcggggagatcaagagaggtatgggacctgaagaggatggcagactgtgcagtgcggtgcacaccggtctccaggttgttttcaccctcctntctcctcccaggagctaacgtgtaagcaaacatgtttggatagagggctggtgccacgccccaggctcaccccgcccgcacagccgtcgtccacccctcccctttcttacagataaagctgaggctcggccagggactgtgatatacccacatccccggaactaggtgatcgcggtgcaggaaccaggtgtgccttcgcgggatccatgccttgaggcccaggaacgccccgccgccagcatgccgtgggacgcgcggcggcctgggggtggcgcggacggcgggcccgaggcctcgggcgcggcgcgctcgcgagcgcagaagcagtgccgcaagtcgtcgttcgccttctaccaggcggtgcgcgacctgctacccgtgtggctgctggaggatatgcgcgccagcgaggccttccactgggacgagcgcgggcgcgccgccgcctactcgccctctgaggcgctgctctacgcgctcgtgcacgaccaccaagcgtacgcgcattacctgctggccacgttcccgcggcgcgcgctcgcaccgcccagtgccggcttccgctgctgcgcggctcccgggccgcacgtggcgctggcagtgcgctacaaccgcgtgggcattctgcgccgcatcctgcgcaccttgcgcgacttcccggccgaggagcgggcgcgcgtgctggaccggcgtggctgcagccgcgtggagggcggtggcacgtcgctgcacgtggcctgtgagctggcgcgccccgagtgcctcttcctgctgctgggccacggcgcctcgcccggtctgcgggacggcggcggcctcacgcctctcgagctgctgctgcgccagctgggccgcgacgccggggccactccctccgccgccggagcccccgcctcagctcccggggagccgcgccagcgccgcctgctgctgctggacctcctggcgctgtacacccccgtgggtgccgccggctcggcccgccaggagctgctgggcgaccggccgcgctggcagcggctgctgggtgaggacaagttccagtggctggcgggcctggcgccgccctcgctcttcgcgcgcgccatgcaggtgctggtcaccgccatctctccaggccgcttccccgaggccctggacgagctgccgctgcccccattcctgcagccgttggacctcactggcaaaggctaggcccggagcaccctaggcgctggattttgggacaaaactatttttcagagcgttgtaccggcactttatatatattgatctctgtacggcaaaaaa

SEQ ID NO: 75606 - DNA, 1238 bp, Homo sapiens
  misc_feature (840)..(840): n is a, c, g, or t
cgcggccgccgccccctcctcctccggcacacgcgcacgcaggtgcagccctcgctgcgccggccacctgcgcgcggacgccccgctcggccccgcgaccctccgccgcccgacgtctggccgtgcaggccgggaggggacgggtaggaggtggcgggtggccccgggcgcggcgctgccttcgatggcccaacccccttattcacgagccgcggccgtgactctgcccggtgacgtggggaggccgaactttacgtaacccgcccggcgccccacgcgtgccggcacagggcatatctggggcccggaggcccaggcttggggaaggggctccagtcacggtgttgcccacgggccacagcctacccgcaccgcgccgctctctttaactcagttactgccagtgatagtgacccagtcagtgtgtgtggacgcggcctgccttctgtcccaggccccttgtgaccaagggcttacccttgaaagaaggcagtagggaggttgggacggagccagaggtcagacgcctaggctcaggtcggggctggggactcagagggcagggtcagggcctaagctcgattgcctgtgggttgggggtccccaccaattctggaatgagcccaaactgagacgcaggggacctgagttctaggcctggctctgccgtggcttgctgaccttggagaattggagaagcttgtgccctgctggaaagtgggatggcagtacccgcttcatctagtagtcggggagatcaagagaggtatgggacctgaagaggatggcagactgtgcagtgcggtgcacaccggtctccaggttgttttcaccctcctntctcctcccaggagctaacgtataaagctgaggctcggccagggactgtgatatacccacatccccggaactaggtgatcgcggtgcaggaaccaggtgtgccttcgcgggatccatgccttgaggccctgctgggtgaggacaagttccagtggctggcgggcctggcgccgccctcgctcttcgcgcgcgccatgcaggtgctggtcaccgccatctctccaggccgcttccccgaggccctggacgagctgccgctgcccccattcctgcagccgttggacctcactggcaaaggctaggcccggagcaccctaggcgctggattttgggacaaaactatttttcagagcgttgtaccggcactttatatatattgatctctgtacggcaaaaaa

SEQ ID NO: 75607 - DNA, 2039 bp, Homo sapiens
  misc_feature (840)..(840): n is a, c, g, or t
cgcggccgccgccccctcctcctccggcacacgcgcacgcaggtgcagccctcgctgcgccggccacctgcgcgcggacgccccgctcggccccgcgaccctccgccgcccgacgtctggccgtgcaggccgggaggggacgggtaggaggtggcgggtggccccgggcgcggcgctgccttcgatggcccaacccccttattcacgagccgcggccgtgactctgcccggtgacgtggggaggccgaactttacgtaacccgcccggcgccccacgcgtgccggcacagggcatatctggggcccggaggcccaggcttggggaaggggctccagtcacggtgttgcccacgggccacagcctacccgcaccgcgccgctctctttaactcagttactgccagtgatagtgacccagtcagtgtgtgtggacgcggcctgccttctgtcccaggccccttgtgaccaagggcttacccttgaaagaaggcagtagggaggttgggacggagccagaggtcagacgcctaggctcaggtcggggctggggactcagagggcagggtcagggcctaagctcgattgcctgtgggttgggggtccccaccaattctggaatgagcccaaactgagacgcaggggacctgagttctaggcctggctctgccgtggcttgctgaccttggagaattggagaagcttgtgccctgctggaaagtgggatggcagtacccgcttcatctagtagtcggggagatcaagagaggtatgggacctgaagaggatggcagactgtgcagtgcggtgcacaccggtctccaggttgttttcaccctcctntctcctcccaggagctaacgtataaagctgaggctcggccagggactgtgatatacccacatccccggaactaggtgatcgcggtgcaggaaccaggtgtgccttcgcgggatccatgccttgaggcccaggaacgccccgccgccagcatgccgtgggacgcgcggcggcctgggggtggcgcggacggcgggcccgaggcctcgggcgcggcgcgctcgcgagcgcagaagcagtgccgcaagtcgtcgttcgccttctaccaggcggtgcgcgacctgctacccgtgtggctgctggaggatatgcgcgccagcgaggccttccactgggacgagcgcgggcgcgccgccgcctactcgccctctgaggcgctgctctacgcgctcgtgcacgaccaccaagcgtacgcgcattacctgctggccacgttcccgcggcgcgcgctcgcaccgcccagtgccggcttccgctgctgcgcggctcccgggccgcacgtggcgctggcagtgcgctacaaccgcgtgggcattctgcgccgcatcctgcgcaccttgcgcgacttcccggccgaggagcgggcgcgcgtgctggaccggcgtggctgcagccgcgtggagggcggtggcacgtcgctgcacgtggcctgtgagctggcgcgccccgagtgcctcttcctgctgctgggccacggcgcctcgcccggtctgcgggacggcggcggcctcacgcctctcgagctgctgctgcgccagctgggccgcgacgccggggccactccctccgccgccggagcccccgcctcagctcccggggagccgcgccagcgccgcctgctgctgctggacctcctggcgctgtacacccccgtgggtgccgccggctcggcccgccaggagctgctgggcgaccggccgcgctggcagcggctgctgggtgaggacaagttccagtggctggcgggcctggcgccgccctcgctcttcgcgcgcgccatgcaggtgctggtcaccgccatctctccaggccgcttccccgaggccctggacgagctgccgctgcccccattcctgcagccgttggacctcactggcaaaggctaggcccggagcaccctaggcgctggattttgggacaaaactatttttcagagcgttgtaccggcactttatatatattgatctctgtacggcaaaaaa

SEQ ID NO: 75608 - DNA, 1390 bp, Homo sapiens
cgccgcccgccgcccgccgccggcgacggcaccgccgccctgcgatccggccgcggcggctcagagcgcggctgcggcgggcgcgggcggcggtggctccctcccgtgcgtccgtcgtgggacctttgcccgctcgcccgcgggggacagcgcgcgctccggtccgcggcaggggcggggacgcccggcctgtggcccccgcgccccccatgataaagctgaggctcggccagggactgtgatatacccacatccccggaactaggtgatcgcggtgcaggaaccaggtgtgccttcgcgggatccatgccttgaggcccaggaacgccccgccgccagcatgccgtgggacgcgcggcggcctgggggtggcgcggacggcgggcccgaggcctcgggcgcggcgcgctcgcgagcgcagaagcagtgccgcaagtcgtcgttcgccttctaccaggcggtgcgcgacctgctacccgtgtggctgctggaggatatgcgcgccagcgaggccttccactgggacgagcgcgggcgcgccgccgcctactcgccctctgaggcgctgctctacgcgctcgtgcacgaccaccaagcgtacgcgcattacctgctggccacgttcccgcggcgcgcgctcgcaccgcccagtgccggcttccgctgctgcgcggctcccgggccgcacgtggcgctggcagtgcgctacaaccgcgtgggcattctgcgccgcatcctgcgcaccttgcgcgacttcccggccgaggagcgggcgcgcgtgctggaccggcgtggctgcagccgcgtggagggcggtggcacgtcgctgcacgtggcctgtgagctggcgcgccccgagtgcctcttcctgctgctgggccacggcgcctcgcccggtctgcgggacggcggcggcctcacgcctctcgagctgctgctgcgccagctgggccgcgacgccggggccactccctccgccgccggagcccccgcctcagctcccggggagccgcgccagcgccgcctgctgctgctggacctcctggcgctgtacacccccgtgggtgccgccggctcggcccgccaggagctgctgggcgaccggccgcgctggcagcggctgctgggtgaggacaagttccagtggctggcgggcctggcgccgccctcgctcttcgcgcgcgccatgcaggtgctggtcaccgccatctctccaggccgcttccccgaggccctggacgagctgccgctgcccccattcctgcagccgttggacctcactggcaaaggctaggcccggagcaccctaggcgctggattttgggacaaaactatttttcagagcgttgtaccggcactttatatatattgatctctgtacggcaaaaaa

SEQ ID NO: 75609 - DNA, 1942 bp, Homo sapiens
  misc_feature (840)..(840): n is a, c, g, or t
cgcggccgccgccccctcctcctccggcacacgcgcacgcaggtgcagccctcgctgcgccggccacctgcgcgcggacgccccgctcggccccgcgaccctccgccgcccgacgtctggccgtgcaggccgggaggggacgggtaggaggtggcgggtggccccgggcgcggcgctgccttcgatggcccaacccccttattcacgagccgcggccgtgactctgcccggtgacgtggggaggccgaactttacgtaacccgcccggcgccccacgcgtgccggcacagggcatatctggggcccggaggcccaggcttggggaaggggctccagtcacggtgttgcccacgggccacagcctacccgcaccgcgccgctctctttaactcagttactgccagtgatagtgacccagtcagtgtgtgtggacgcggcctgccttctgtcccaggccccttgtgaccaagggcttacccttgaaagaaggcagtagggaggttgggacggagccagaggtcagacgcctaggctcaggtcggggctggggactcagagggcagggtcagggcctaagctcgattgcctgtgggttgggggtccccaccaattctggaatgagcccaaactgagacgcaggggacctgagttctaggcctggctctgccgtggcttgctgaccttggagaattggagaagcttgtgccctgctggaaagtgggatggcagtacccgcttcatctagtagtcggggagatcaagagaggtatgggacctgaagaggatggcagactgtgcagtgcggtgcacaccggtctccaggttgttttcaccctcctntctcctcccaggagctaacgtataaagctgaggctcggccagggactgtgatatacccacatccccggaactaggtgatcgcggtgcaggaaccaggtgtgccttcgcgggatccatgccttgaggcccaggaacgccccgccgccagcatgccgtgggacgcgcggcggcctgggggtggcgcggacggcgggcccgaggcctcgggcgcggcgcgctcgcgagcgcagaagcagtgccgcaagtcgtcgttcgccttctaccaggcggtgcgcgacctgctacccgtgtggctgctggaggatatgcgcgccagcgaggccttccactgggacgagcgcgggcgcgccgccgcctactcgccctctgaggcgctgctctacgcgctcgtgcacgaccaccaagcgtacgcgcattacctgctggccacgttcccgcggcgcgcgctcgcaccgcccagtgccggcttccgctgctgcgcggctcccgggccgcacgtggcgctggcagtgcgctacaaccgcgtgggcattctgcgccgcatcctgcgcaccttgcgcgacttcccggccgaggagcgggcgcgcgtgctggaccggcgtggctgcagccgcgtggagggcggtggcacgtcgctgcacgtggcctgtgagctggcgcgccccgagtgcctcttcctgctgctgggccacggcgcctcgcccggtctgcgggacggcggcggcctcacgcctctcgagtgctgctggacctcctggcgctgtacacccccgtgggtgccgccggctcggcccgccaggagctgctgggcgaccggccgcgctggcagcggctgctgggtgaggacaagttccagtggctggcgggcctggcgccgccctcgctcttcgcgcgcgccatgcaggtgctggtcaccgccatctctccaggccgcttccccgaggccctggacgagctgccgctgcccccattcctgcagccgttggacctcactggcaaaggctaggcccggagcaccctaggcgctggattttgggacaaaactatttttcagagcgttgtaccggcactttatatatattgatctctgtacggcaaaaaa

SEQ ID NO: 75610 - DNA, 427 bp, Homo sapiens
aacatttttttaaaaaacagtaattatgggaagaaaggtgtatacgcatgctggacagccaaatgggtggattgtagggaacatgtgcctttttttcttggctgatgagcattcaaactcctatttagaggaaatgccctttgttttactgaaaataagagctctacctcttcttacagaaagcaagggactctagacattctcttttcctaggagagttagccattattcaaagctgaggagttgagagtctgcgttggtgacatatagcaaaacccaaactaatgttcctgtggtgtgaccctgactgtgttctctatcctgacttcttttgttttctgctcattttctaagtctgattctcccatcttcctgacagttatgtgagatactaaatattcttccaataaatttcgcttaagataag

SEQ ID NO: 75611 - DNA, 672 bp, Homo sapiens
ggcacgacacacttaggctaggtacgaggcatggtggttaatcggccgaggcagccagcccggcccgcccgcgcccgtccgcagccgcccgccagacgcgcccagtatgagggagatcgtgcacatccaggccggccagtgcggcaaccagatcggggccaagttctgggaagtcatcagtgatgagcatggcatcgaccccagcggcaactacgtgggcgactcggacttgcagctggagcggatcagcgtctactacaacgaggcctcttctcacaagtacgtgcctcgagccattctggtggacctggaacccggaaccatggacagtgtccgctcaggggcctttggacatctcttcaggcctgacaatttcatctttggtcagagtggggccggcaacaactgggccaagggtcactacacggagggggcggagctggtggattcggtcctggatgtggtgcggaaggagtgtgaaaactgcgactgcctgcagggcttccagctgacccactcgctggggggcggcacgggctccggcatgggttggggccacggtgggctccatcgagccaaaggttgccggtgagggaggtatccccggacccgtcattcattgaaccaccctttcaggcggtccgttggcccttcaacccctaaaggtgtcaa

SEQ ID NO: 75612 - DNA, 691 bp, Homo sapiens
agactgagtgcatcccacgggctgcaggaattcggcacgagggcaacgcacggccatccaggagctgttcaagcgcatctccgagcagttcacggccatgttccggcgcaaggccttcctgcactggtacacgggcgagggcatggacgagatggagttcaccgaggccgagagcaacatgaacgacctggtgtccgagtaccagcagtaccaggacgccacggccgaggaagaggttcgaggaggaggctgaggaggaggtggcctagagccttcagtcactggggaaagcagggaagcagtgtgaactctttattcactcccagcctgtcctgtggcctgtcccactgtgtgcacttgctgttttccctgtccacatccatgctgtacagacaccaccattaaagcattttcatagtgaaaaaaaaaaaaaaacaaagaaacaaagaaacaacaagaacacaagaaaacaaaaaaacaacaaaaaacccgcgaggcgggtcattttctgcggcggcggcggagaaaaagagggggccaagaaagggcggccggggcgagcaaggggagggaccaggacgcccagagtagtgggagacaaaggggggaaaaacgggggaggaccacaaaaagggggggggaaaaacatcgagaaacgcgaggaacacgggataagagacgggagaaaagg

SEQ ID NO: 75613 - DNA, 627 bp, Homo sapiens
ggcactctgcgcgcccgctcttctgctgctgtttgtctacttcctcctgcttccccgccgccgccgccgccatcatgagggaaatcgtgcacttgcaggccgggcagtgcggcaaccaaatcggcgccaagtttgggaggtgatcagcgatgagcacggcatcgaccccacgggcacctaccacggggacagcgacctgcagctggaacgcatcaacgtgtactacaatgaggccaccggcggcaagcacggccatccaggagctgttcaagcgcatctccgagcagttcacggccatgttccggcgcaaggccttcctgcactggtacacgggcgagggcatggacgagatggagttcaccgaggccgagagcaacatgaacgacctggtgtccgagtaccagcagtaccaggacgccacggccgaggaagaggttcgaggaggaggctgaggaggaggtggcctagagccttcagtcactggggaaagcagggaagcagtgtgaactctttattcactcccagcctgtcctgtggcctgtcccactgtgtgcacttgctgttttccctgtccacatccatgctgtacagacaccaccattaaagcattttcatagtgaaaaaaaa

SEQ ID NO: 75614 - DNA, 428 bp, Homo sapiens
agactgagtgcatcccacgggctgcaggaattcggcacgagggcaacgcacggccatccaggagctgttcaagcgcatctccgagcagttcacggccatgttccggcgcaaggccttcctgcactggtacacgggcgagggcatggacgagatggagttcaccgaggccgagagcaacatgaacgacctggtgtccgagtaccagcagtaccaggacgccacggccgaggaagaggttcgaggaggaggctgaggaggaggtggcctagagccttcagtcactggggaaagcagggaagcagtgtgaactctttattcactcccagcctgtcctgtggcctgtcccactgtgtgcacttgctgttttccctgtccacatccatgctgtacagacaccaccattaaagcattttcatagtgaaaaaaaa

SEQ ID NO: 75615 - DNA, 1752 bp, Homo sapiens
  misc_feature (4)..(5): n is a, c, g, or t
  misc_feature (15)..(16): n is a, c, g, or t
  misc_feature (31)..(32): n is a, c, g, or t
gatnnccttaattannaattaatcctccccnncccccccccccccccggagcagccagcccggcccgcccgcgcccgtccgcagccgcccgccagacgcgcccagtatgagggagatcgtgcacatccaggccggccagtgcggcaaccagatcggggccaagttctgggaagtcatcagtgatgagcatggcatcgaccccagcggcaactacgtgggcgactcggacttgcagctggagcggatcagcgtctactacaacgaggcctcttctcacaagtacgtgcctcgagccattctggtggacctggaacccggaaccatggacagtgtccgctcaggggcctttggacatctcttcaggcctgacaatttcatctttggtcagagtggggccggcaacaactgggccaagggtcactacacggagggggcggagctggtggattcggtcctggatgtggtgcggaaggagtgtgaaaactgcgactgcctgcagggcttccagctgacccactcgctggggggcggcacgggctccggcatgggcacgttgctcatcagcaaggtgcgtgaggagtatcccgaccgcatcatgaacaccttcagcgtcgtgccctcacccaaggtgtcagacacggtggtggagccctacaacgccacgctgtccatccaccagctggtggagaacacggatgagacctactgcatcgacaacgaggcgctctacgacatctgcttccgcaccctcaagctggccacgcccacctacggggacctcaaccacctggtatcggccaccatgagcggagtcaccacctccttgcgcttcccgggccagctcaacgctgacctgcgcaagctggccgtcaacatggtgcccttcccgcgcctgcacttcttcatgcccggcttcgcccccctcacagcccggggcagccagcagtaccgggccctgaccgtgcccgagctcacccagcagatgttcgatgccaagaacatgatggccgcctgcgacccgcgccacggccgctacctgacggtggccaccgtgttccggggccgcatgtccatgaaggaggtggacgagcagatgctggccatccagagcaagaacagcagctacttcgtggagtggatccccaacaacgtgaaggtggccgtgtgtgacatcccgccccgcggcctcaagatgtcctccaccttcatcggcaacagcacggccatccaggagctgttcaagcgcatctccgagcagttcacggccatgttccggcgcaaggccttcctgcactggtacacgggcgagggcatggacgagatggagttcaccgaggccgagagcaacatgaacgacctggtgtccgagtaccagcagtaccaggacgccacggccgaggaagagggcgagatgtacgaagacgacgaggaggagtcggaggcccagggccccaagtgaagctgctcgcagctggagtgagaggcaggtggcggccggggccgaagccagcagtgtctaaacccccggagccatctcgctgccgacaccctgctttcccctcgccctagggctcccttgccgccctcctgcagtatttatggcctcgtcctccccacctaggccacgtgtgagctgctcctgtctctgtcttattgcagctccaggcctgacgttttacggttttgttttttactggtttgtgtttatattttcggggatacttaataaatctattgctgtcagataccctt

SEQ ID NO: 75616 - DNA, 2305 bp, Homo sapiens
  misc_feature (4)..(5): n is a, c, g, or t
  misc_feature (15)..(16): n is a, c, g, or t
  misc_feature (31)..(32): n is a, c, g, or t
  misc_feature (1815)..(1815): n is a, c, g, or t
gatnnccttaattannaattaatcctccccnncccccccccccccccggagcagccagcccggcccgcccgcgcccgtccgcagccgcccgccagacgcgcccagtatgagggagatcgtgcacatccaggccggccagtgcggcaaccagatcggggccaagttctgggaagtcatcagtgatgagcatggcatcgaccccagcggcaactacgtgggcgactcggacttgcagctggagcggatcagcgtctactacaacgaggcctcttctcacaagtacgtgcctcgagccattctggtggacctggaacccggaaccatggacagtgtccgctcaggggcctttggacatctcttcaggcctgacaatttcatctttggtcagagtggggccggcaacaactgggccaagggtcactacacggagggggcggagctggtggattcggtcctggatgtggtgcggaaggagtgtgaaaactgcgactgcctgcagggcttccagctgacccactcgctggggggcggcacgggctccggcatgggcacgttgctcatcagcaaggtgcgtgaggagtatcccgaccgcatcatgaacaccttcagcgtcgtgccctcacccaaggtgtcagacacggtggtggagccctacaacgccacgctgtccatccaccagctggtggagaacacggatgagacctactgcatcgacaacgaggcgctctacgacatctgcttccgcaccctcaagctggccacgcccacctacggggacctcaaccacctggtatcggccaccatgagcggagtcaccacctccttgcgcttcccgggccagctcaacgctgacctgcgcaagctggccgtcaacatggtgcccttcccgcgcctgcacttcttcatgcccggcttcgcccccctcacagcccggggcagccagcagtaccgggccctgaccgtgcccgagctcacccagcagatgttcgatgccaagaacatgatggccgcctgcgacccgcgccacggccgctacctgacggtggccaccgtgttccggggccgcatgtccatgaaggaggtggacgagcagatgctggccatccagagcaagaacagcagctacttcgtggagtggatccccaacaacgtgaaggtggccgtgtgtgacatcccgccccgcggcctcaagatgtcctccaccttcatcggcaacagcacggccatccaggagctgttcaagcgcatctccgagcagttcacggccatgttccggcgcaaggccttcctgcactggtacacgggcgagggcatggacgagatggagttcaccgaggccgagagcaacatgaacgacctggtgtccgagtaccagcagtaccaggacgccacggccgaggaagagggcgagatgtacgaagacgacgaggaggagtcggaggcccagggccccaagtgaagctgctcgcagctggagtgagaggcaggtggcggccggggccgaagccagcagtgtctaaacccccggagccatctcgctgccgacaccctgctttcccctcgccctagggctcccttgccgccctcctgcagtatttatggcctcgtcctccccacctaggccacgtgtgagctgctcctgtctctgtcttattgcagctccaggcctgacgttttacggttttgttttttactggtttgtgtttatattttcggggatacttaataaatctattgctgtcagatacccttaaaaaaaaaaaaaaaaaaaaaaaaaaaaaaaaaaaaaaaaaaaaaaaaaaaaaaaaaaaaaanaaaaggggggcgcgccgccctcatagatattcctctccccgggggggcccccgtgttctcccgcctccccccgtcttttgctgtctccacagggggccccccatattgtgggctgcgctttttttatcacctcgtccgcggcgcgccgccccgctctttttatcacacccgcttctcccgcgggggcacaacaggtggcctcccctgcggcgcccctccctgtgtggcgagccggcccccctctcctctcgcgggcgggcgctcacccctctcgtgggcacaccccttctccctcctcgggcgcttttacactccacccccacgcgctatccctcccccccccccttctccccccgcgtgctacccccccccgcccctccccccccccccgcctcccctctctctccccccgccccgccccgcccccccttctcggctccccctcgcccctctccttccccctgcccaccctttcttttcccccgcgcct

SEQ ID NO: 75617 - DNA, 1978 bp, Homo sapiens
  misc_feature (4)..(5): n is a, c, g, or t
  misc_feature (15)..(16): n is a, c, g, or t
  misc_feature (31)..(32): n is a, c, g, or t
  misc_feature (1815)..(1815): n is a, c, g, or t
gatnnccttaattannaattaatcctccccnncccccccccccccccggagcagccagcccggcccgcccgcgcccgtccgcagccgcccgccagacgcgcccagtatgagggagatcgtgcacatccaggccggccagtgcggcaaccagatcggggccaagttctgggaagtcatcagtgatgagcatggcatcgaccccagcggcaactacgtgggcgactcggacttgcagctggagcggatcagcgtctactacaacgaggcctcttctcacaagtacgtgcctcgagccattctggtggacctggaacccggaaccatggacagtgtccgctcaggggcctttggacatctcttcaggcctgacaatttcatctttggtcagagtggggccggcaacaactgggccaagggtcactacacggagggggcggagctggtggattcggtcctggatgtggtgcggaaggagtgtgaaaactgcgactgcctgcagggcttccagctgacccactcgctggggggcggcacgggctccggcatgggcacgttgctcatcagcaaggtgcgtgaggagtatcccgaccgcatcatgaacaccttcagcgtcgtgccctcacccaaggtgtcagacacggtggtggagccctacaacgccacgctgtccatccaccagctggtggagaacacggatgagacctactgcatcgacaacgaggcgctctacgacatctgcttccgcaccctcaagctggccacgcccacctacggggacctcaaccacctggtatcggccaccatgagcggagtcaccacctccttgcgcttcccgggccagctcaacgctgacctgcgcaagctggccgtcaacatggtgcccttcccgcgcctgcacttcttcatgcccggcttcgcccccctcacagcccggggcagccagcagtaccgggccctgaccgtgcccgagctcacccagcagatgttcgatgccaagaacatgatggccgcctgcgacccgcgccacggccgctacctgacggtggccaccgtgttccggggccgcatgtccatgaaggaggtggacgagcagatgctggccatccagagcaagaacagcagctacttcgtggagtggatccccaacaacgtgaaggtggccgtgtgtgacatcccgccccgcggcctcaagatgtcctccaccttcatcggcaacagcacggccatccaggagctgttcaagcgcatctccgagcagttcacggccatgttccggcgcaaggccttcctgcactggtacacgggcgagggcatggacgagatggagttcaccgaggccgagagcaacatgaacgacctggtgtccgagtaccagcagtaccaggacgccacggccgaggaagagggcgagatgtacgaagacgacgaggaggagtcggaggcccagggccccaagtgaagctgctcgcagctggagtgagaggcaggtggcggccggggccgaagccagcagtgtctaaacccccggagccatctcgctgccgacaccctgctttcccctcgccctagggctcccttgccgccctcctgcagtatttatggcctcgtcctccccacctaggccacgtgtgagctgctcctgtctctgtcttattgcagctccaggcctgacgttttacggttttgttttttactggtttgtgtttatattttcggggatacttaataaatctattgctgtcagatacccttaaaaaaaaaaaaaaaaaaaaaaaaaaaaaaaaaaaaaaaaaaaaaaaaaaaaaaaaaaaaaanaaaaaaaaaaaaaaaaaaaaaaaaaaaaaaaaaaaaacaatcactgggccggtgtttaacaacgttgtgatattggaaaacctttgggttaccccaattaaattccttggaacaaaattcctcttttccaagttggcgtaccggccccaccttttgcctttcc

SEQ ID NO: 75618 - DNA, 1836 bp, Homo sapiens
  misc_feature (4)..(5): n is a, c, g, or t
  misc_feature (15)..(16): n is a, c, g, or t
  misc_feature (31)..(32): n is a, c, g, or t
gatnnccttaattannaattaatcctccccnncccccccccccccccggagcagccagcccggcccgcccgcgcccgtccgcagccgcccgccagacgcgcccagtatgagggagatcgtgcacatccaggccggccagtgcggcaaccagatcggggccaagttctgggaagtcatcagtgatgagcatggcatcgaccccagcggcaactacgtgggcgactcggacttgcagctggagcggatcagcgtctactacaacgaggcctcttctcacaagtacgtgcctcgagccattctggtggacctggaacccggaaccatggacagtgtccgctcaggggcctttggacatctcttcaggcctgacaatttcatctttggtcagagtggggccggcaacaactgggccaagggtcactacacggagggggcggagctggtggattcggtcctggatgtggtgcggaaggagtgtgaaaactgcgactgcctgcagggcttccagctgacccactcgctggggggcggcacgggctccggcatgggcacgttgctcatcagcaaggtgcgtgaggagtatcccgaccgcatcatgaacaccttcagcgtcgtgccctcacccaaggtgtcagacacggtggtggagccctacaacgccacgctgtccatccaccagctggtggagaacacggatgagacctactgcatcgacaacgaggcgctctacgacatctgcttccgcaccctcaagctggccacgcccacctacggggacctcaaccacctggtatcggccaccatgagcggagtcaccacctccttgcgcttcccgggccagctcaacgctgacctgcgcaagctggccgtcaacatggtgcccttcccgcgcctgcacttcttcatgcccggcttcgcccccctcacagcccggggcagccagcagtaccgggccctgaccgtgcccgagctcacccagcagatgttcgatgccaagaacatgatggccgcctgcgacccgcgccacggccgctacctgacggtggccaccgtgttccggggccgcatgtccatgaaggaggtggacgagcagatgctggccatccagagcaagaacagcagctacttcgtggagtggatccccaacaacgtgaaggtggccgtgtgtgacatcccgccccgcggcctcaagatgtcctccaccttcatcggcaacagcacggccatccaggagctgttcaagcgcatctccgagcagttcacggccatgttccggcgcaaggccttcctgcactggtacacgggcgagggcatggacgagatggagttcaccgaggccgagagcaacatgaacgacctggtgtccgagtaccagcagtaccaggacgccacggccgaggaagagggcgagatgtacgaagacgacgaggaggagtcggaggcccagggccccaagtgaagctgctcgcagctggagtgagaggcaggtggcggccggggccgaagccagcagtgtctaaacccccggagccatctcgctgccgacaccctgctttcccctcgccctagggctcccttgccgccctcctgcagtatttatggcctcgtcctccccacctaggccacgtgtgagctgctcctgtctctgtcttattgcagctccaggcctgacgttttacggttttgttttttactggtttgtgtttatattttcggggatacttaataaatctattgctgtcagatacccttaaagtagttcaacaaatcaaaaacgaaagactaataacatagaggataagggctttaaaggcggggggggaaaaaacatcgctc

SEQ ID NO: 75619 - DNA, 1603 bp, Homo sapiens
  misc_feature (4)..(5): n is a, c, g, or t
  misc_feature (15)..(16): n is a, c, g, or t
  misc_feature (31)..(32): n is a, c, g, or t
gatnnccttaattannaattaatcctccccnncccccccccccccccggagcagccagcccggcccgcccgcgcccgtccgcagccgcccgccagacgcgcccagtatgagggagatcgtgcacatccaggccggccagtgcggcaaccagatcggggccaagttctgggaagtcatcagtgatgagcatggcatcgaccccagcggcaactacgtgggcgactcggacttgcagctggagcggatcagcgtctactacaacgaggcctcttctcacaagtacgtgcctcgagccattctggtggacctggaacccggaaccatggacagtgtccgctcaggggcctttggacatctcttcaggcctgacaatttcatctttggtcagagtggggccggcaacaactgggccaagggtcactacacggagggggcggagctggtggattcggtcctggatgtggtgcggaaggagtgtgaaaactgcgactgcctgcagggcttccagctgacccactcgctggggggcggcacgggctccggcatgggcacgttgctcatcagcaaggtgcgtgaggagtatcccgaccgcatcatgaacaccttcagcgtcgtgccctcacccaaggtgtcagacacggtggtggagccctacaacgccacgctgtccatccaccagctggtggagaacacggatgagacctactgcatcgacaacgaggcgctctacgacatctgcttccgcaccctcaagctggccacgcccacctacggggacctcaaccacctggtatcggccaccatgagcggagtcaccacctccttgcgcttcccgggccagctcaacgctgacctgcgcaagctggccgtcaacatggtgcccttcccgcgcctgcacttcttcatgcccggcttcgcccccctcacagcccggggcagccagcagtaccgggccctgaccgtgcccgagctcacccagcagatgttcgatgccaagaacatgatggccgcctgcgacccgcgccacggccgctacctgacggtggccaccgtgttccggggccgcatgtccatgaaggaggtggatgagcaaatgcttaatgtccaaaacaaaaacagcagctattttgttgagtggatccccaacaatgtgaaaacggctgtctgtgacatcccaccccgcggcctcaagatgtcctccaccttcatcggcaacagcacggccatccaggagctgttcaagcgcatctccgagcagttcacggccatgttccggcgcaaggccttcctgcactggtacacgggcgagggcatggacgagatggagttcaccgaggccgagagcaacatgaatgacctggtgtccgagtaccagcagtaccaggatgccacagccgaggaggagggcgagttcgaggaggaggctgaggaggaggtggcctagagccttcagtcactggggaaagcagggaagcagtgtgaactctttattcactcccagcctgtcctgtggcctgtcccactgtgtgcacttgctgttttccctgtccacatccatgctgtacagacaccaccattaaagcattttcatagtgaaaaaaaa

SEQ ID NO: 75620 - DNA, 1697 bp, Homo sapiens
  misc_feature (4)..(5): n is a, c, g, or t
  misc_feature (15)..(16): n is a, c, g, or t
  misc_feature (31)..(32): n is a, c, g, or t
gatnnccttaattannaattaatcctccccnncccccccccccccccggagcagccagcccggcccgcccgcgcccgtccgcagccgcccgccagacgcgcccagtatgagggagatcgtgcacatccaggccggccagtgcggcaaccagatcggggccaagttctgggaagtcatcagtgatgagcatggcatcgaccccagcggcaactacgtgggcgactcggacttgcagctggagcggatcagcgtctactacaacgaggcctcttctcacaagtacgtgcctcgagccattctggtggacctggaacccggaaccatggacagtgtccgctcaggggcctttggacatctcttcaggcctgacaatttcatctttggtcagagtggggccggcaacaactgggccaagggtcactacacggagggggcggagctggtggattcggtcctggatgtggtgcggaaggagtgtgaaaactgcgactgcctgcagggcttccagctgacccactcgctggggggcggcacgggctccggcatgggcacgttgctcatcagcaaggtgcgtgaggagtatcccgaccgcatcatgaacaccttcagcgtcgtgccctcacccaaggtgtcagacacggtggtggagccctacaacgccacgctgtccatccaccagctggtggagaacacggatgagacctactgcatcgacaacgaggcgctctacgacatctgcttccgcaccctcaagctggccacgcccacctacggggacctcaaccacctggtatcggccaccatgagcggagtcaccacctccttgcgcttcccgggccagctcaacgctgacctgcgcaagctggccgtcaacatggtgcccttcccgcgcctgcacttcttcatgcccggcttcgcccccctcacagcccggggcagccagcagtaccgggccctgaccgtgcccgagctcacccagcagatgttcgatgccaagaacatgatggccgcatgtccatgaaggaggtggacgagcagatgctggccatccagagcaagaacagcagctacttcgtggagtggatccccaacaacgtgaaggtggccgtgtgtgacatcccgccccgcggcctcaagatgtcctccaccttcatcggcaacagcacggccatccaggagctgttcaagcgcatctccgagcagttcacggccatgttccggcgcaaggccttcctgcactggtacacgggcgagggcatggacgagatggagttcaccgaggccgagagcaacatgaacgacctggtgtccgagtaccagcagtaccaggacgccacggccgaggaagagggcgagatgtacgaagacgacgaggaggagtcggaggcccagggccccaagtgaagctgctcgcagctggagtgagaggcaggtggcggccggggccgaagccagcagtgtctaaacccccggagccatctcgctgccgacaccctgctttcccctcgccctagggctcccttgccgccctcctgcagtatttatggcctcgtcctccccacctaggccacgtgtgagctgctcctgtctctgtcttattgcagctccaggcctgacgttttacggttttgttttttactggtttgtgtttatattttcggggatacttaataaatctattgctgtcagataccctt

SEQ ID NO: 75621 - DNA, 2024 bp, Homo sapiens
  misc_feature (4)..(5): n is a, c, g, or t
  misc_feature (15)..(16): n is a, c, g, or t
  misc_feature (31)..(32): n is a, c, g, or t
gatnnccttaattannaattaatcctccccnncccccccccccccccggagcagccagcccggcccgcccgcgcccgtccgcagccgcccgccagacgcgcccagtatgagggagatcgtgcacatccaggccggccagtgcggcaaccagatcggggccaagttctgggaagtcatcagtgatgagcatggcatcgaccccagcggcaactacgtgggcgactcggacttgcagctggagcggatcagcgtctactacaacgaggcctcttctcacaagtacgtgcctcgagccattctggtggacctggaacccggaaccatggacagtgtccgctcaggggcctttggacatctcttcaggcctgacaatttcatctttggtcagagtggggccggcaacaactgggccaagggtcactacacggagggggcggagctggtggattcggtcctggatgtggtgcggaaggagtgtgaaaactgcgactgcctgcagggcttccagctgacccactcgctggggggcggcacgggctccggcatgggcacgttgctcatcagcaaggtgcgtgaggagtatcccgaccgcatcatgaacaccttcagcgtcgtgccctcacccaaggtgtcagacacggtggtggagccctacaacgccacgctgtccatccaccagctggtggagaacacggatgagacctactgcatcgacaacgaggcgctctacgacatctgcttccgcaccctcaagctggccacgcccacctacggggacctcaaccacctggtatcggccaccatgagcggagtcaccacctccttgcgcttcccgggccagctcaacgctgacctgcgcaagctggccgtcaacatggtgcccttcccgcgcctgcacttcttcatgcccggcttcgcccccctcacagcccggggcagccagcagtaccgggccctgaccgtgcccgagctcacccagcagatgttcgatgccaagaacatgatggccgcctgcgacccgcgccacggccgctacctgacggtggccaccgtgttccggggccgcatgtccatgaaggaggtggacgagcagatgctggccatccagagcaagaacagcagctacttcgtggagtggatccccaacaacgtgaaggtggccgtgtgtgacatcccgccccgcggcctcaagatgtcctccaccttcatcggcaacagcacggccatccaggagctgttcaagcgcatctccgagcagttcacggccatgttccggcgcaaggccttcctgcactggtacacgggcgagggcatggacgagatggagttcaccgaggccgagagcaacatgaacgacctggtgtccgagtaccagcagtaccaggacgccacggccgaggaagaggaatgacggggaggaagcttttgaggatgaggaagaggagatcgatggatagtcggaatagagccgccccaactcagatcctacaacacgcaagttccttcttgaaccctggtgcctcctaccctatggccctgaatggtgcactggtttaattgtgttggtgtcggcccctcacaaatgcagccaagtcatgtaattagtcatctggaacaaagactaaaaacagcagagaattgcgggttctacccagtcagaagatcacaccatggagactttctactagaggacttgaaagagaactgaggggccacaaaataaacttcaccttccattaagtgttcaagcatgtctgcaaattaggagggagttagaaacagtctttttcatcctttgtgatgaagcctgaaattgtgccgtgttgccttatatgaatatgcagtatgggactttgaaataatgattcatataaatactaaaaaaaaaagaggggggggcggttaagtttcgggggagcaagttaggaaccgttttgaaagagggccaaggggagaaaaagaggggggggtaaagggggggaaaaggggggttggagacctgtgggaggaaccaaaagggaaaa

SEQ ID NO: 75622 - DNA, 1824 bp, Homo sapiens
  misc_feature (4)..(5): n is a, c, g, or t
  misc_feature (15)..(16): n is a, c, g, or t
  misc_feature (31)..(32): n is a, c, g, or t
  misc_feature (1661)..(1661): n is a, c, g, or t
gatnnccttaattannaattaatcctccccnncccccccccccccccggagcagccagcccggcccgcccgcgcccgtccgcagccgcccgccagacgcgcccagtatgagggagatcgtgcacatccaggccggccagtgcggcaaccagatcggggccaagttctgggaagtcatcagtgatgagcatggcatcgaccccagcggcaactacgtgggcgactcggacttgcagctggagcggatcagcgtctactacaacgaggcctcttctcacaagtacgtgcctcgagccattctggtggacctggaacccggaaccatggacagtgtccgctcaggggcctttggacatctcttcaggcctgacaatttcatctttggtcagagtggggccggcaacaactgggccaagggtcactacacggagggggcggagctggtggattcggtcctggatgtggtgcggaaggagtgtgaaaactgcgactgcctgcagggcttccagctgacccactcgctggggggcggcacgggctccggcatgggcacgttgctcatcagcaaggtgcgtgaggagtatcccgaccgcatcatgaacaccttcagcgtcgtgccctcacccaaggtgtcagacacggtggtggagccctacaacgccacgctgtccatccaccagctggtggagaacacggatgagacctactgcatcgacaacgaggcgctctacgacatctgcttccgcaccctcaagctggccacgcccacctacggggacctcaaccacctggtatcggccaccatgagcggagtcaccacctccttgcgcttcccgggccagctcaacgctgacctgcgcaagctggccgtcaacatggtgcccttcccgcgcctgcacttcttcatgcccggcttcgcccccctcacagcccggggcagccagcagtaccgggccctgaccgtgcccgagctcacccagcagatgttcgatgccaagaacatgatggccgcctgcgacccgcgccacggccgctacctgacggtggccaccgtgttccggggccgcatgtccatgaaggaggtggacgagcagatgctggccatccagagcaagaacagcagctacttcgtggagtggatccccaacaacgtgaaggtggccgtgtgtgacatcccgccccgcggcctcaagatgtcctccaccttcatcggcaacagcacggccatccaggagctgttcaagcgcatctccgagcagttcacggccatgttccggcgcaaggccttcctgcactggtacacgggcgagggcatggacgagatggagttcaccgaggccgagagcaacatgaacgacctggtgtccgagtaccagcagtaccaggacgccacggccgaggaagaggttcgaggaggaggctgaggaggaggtggcctagagccttcagtcactggggaaagcagggaagcagtgtgaactctttattcactcccagcctgtcctgtggcctgtcccactgtgtgcacttgctgttttccctgtccacatccatgctgtacagacaccaccattaaagcattttcatagtgaaaaaaaaaaaaaaaaaaaaaaaaaaaaaaaaaaaaaaaaaaaaaaaaaaaaaaaaaaaaaaaaaaaaaanaaaaaaaaaaaaaaaaaaaaaaaaaaaaaaaaaaaaacaatcactgggccggtgtttaacaacgttgtgatattggaaaacctttgggttaccccaattaaattccttggaacaaaattcctcttttccaagttggcgtaccggccccaccttttgcctttcc

SEQ ID NO: 75623 - DNA, 1861 bp, Homo sapiens
  misc_feature (4)..(5): n is a, c, g, or t
  misc_feature (15)..(16): n is a, c, g, or t
  misc_feature (31)..(32): n is a, c, g, or t
gatnnccttaattannaattaatcctccccnncccccccccccccccggagcagccagcccggcccgcccgcgcccgtccgcagccgcccgccagacgcgcccagtatgagggagatcgtgcacatccaggccggccagtgcggcaaccagatcggggccaagttctgggaagtcatcagtgatgagcatggcatcgaccccagcggcaactacgtgggcgactcggacttgcagctggagcggatcagcgtctactacaacgaggcctcttctcacaagtacgtgcctcgagccattctggtggacctggaacccggaaccatggacagtgtccgctcaggggcctttggacatctcttcaggcctgacaatttcatctttggtcagagtggggccggcaacaactgggccaagggtcactacacggagggggcggagctggtggattcggtcctggatgtggtgcggaaggagtgtgaaaactgcgactgcctgcagggcttccagctgacccactcgctggggggcggcacgggctccggcatgggcacgttgctcatcagcaaggtgcgtgaggagtatcccgaccgcatcatgaacaccttcagcgtcgtgccctcacccaaggtgtcagacacggtggtggagccctacaacgccacgctgtccatccaccagctggtggagaacacggatgagacctactgcatcgacaacgaggcgctctacgacatctgcttccgcaccctcaagctggccacgcccacctacggggacctcaaccacctggtatcggccaccatgagcggagtcaccacctccttgcgcttcccgggccagctcaacgctgacctgcgcaagctggccgtcaacatggtgcccttcccgcgcctgcacttcttcatgcccggcttcgcccccctcacagcccggggcagccagcagtaccgggccctgaccgtgcccgagctcacccagcagatgttcgatgccaagaacatgatggccgcctgcgacccgcgccacggccgctacctgacggtggccaccgtgttccggggccgcatgtccatgaaggaggtggacgagcagatgctggccatccagagcaagaacagcagctacttcgtggagtggatccccaacaacgtgaaggtggccgtgtgtgacatcccgccccgcggcctcaagatgtcctccaccttcatcggcaacagcacggccatccaggagctgttcaagcgcatctccgagcagttcacggccatgttccggcgcaaggccttcctgcactggtacacgggcgagggcatggacgagatggagttcaccgaggccgagagcaacatgaacgacctggtgtccgagtaccagcagtaccaggacgccacggccgaggaagaggttcgaggaggaggctgaggaggaggtggcctagagccttcagtcactggggaaagcagggaagcagtgtgaactctttattcactcccagcctgtcctgtggcctgtcccactgtgtgcacttgctgttttccctgtccacatccatgctgtacagacaccaccattaaagcattttcatagtgaaaaaaaaaaaaaaacaaagaaacaaagaaacaacaagaacacaagaaaacaaaaaaacaacaaaaaacccgcgaggcgggtcattttctgcggcggcggcggagaaaaagagggggccaagaaagggcggccggggcgagcaaggggagggaccaggacgcccagagtagtgggagacaaaggggggaaaaacgggggaggaccacaaaaagggggggggaaaaacatcgagaaacgcgaggaacacgggataagagacgggagaaaagg

SEQ ID NO: 75624 - DNA, 1598 bp, Homo sapiens
  misc_feature (4)..(5): n is a, c, g, or t
  misc_feature (15)..(16): n is a, c, g, or t
  misc_feature (31)..(32): n is a, c, g, or t
gatnnccttaattannaattaatcctccccnncccccccccccccccggagcagccagcccggcccgcccgcgcccgtccgcagccgcccgccagacgcgcccagtatgagggagatcgtgcacatccaggccggccagtgcggcaaccagatcggggccaagttctgggaagtcatcagtgatgagcatggcatcgaccccagcggcaactacgtgggcgactcggacttgcagctggagcggatcagcgtctactacaacgaggcctcttctcacaagtacgtgcctcgagccattctggtggacctggaacccggaaccatggacagtgtccgctcaggggcctttggacatctcttcaggcctgacaatttcatctttggtcagagtggggccggcaacaactgggccaagggtcactacacggagggggcggagctggtggattcggtcctggatgtggtgcggaaggagtgtgaaaactgcgactgcctgcagggcttccagctgacccactcgctggggggcggcacgggctccggcatgggcacgttgctcatcagcaaggtgcgtgaggagtatcccgaccgcatcatgaacaccttcagcgtcgtgccctcacccaaggtgtcagacacggtggtggagccctacaacgccacgctgtccatccaccagctggtggagaacacggatgagacctactgcatcgacaacgaggcgctctacgacatctgcttccgcaccctcaagctggccacgcccacctacggggacctcaaccacctggtatcggccaccatgagcggagtcaccacctccttgcgcttcccgggccagctcaacgctgacctgcgcaagctggccgtcaacatggtgcccttcccgcgcctgcacttcttcatgcccggcttcgcccccctcacagcccggggcagccagcagtaccgggccctgaccgtgcccgagctcacccagcagatgttcgatgccaagaacatgatggccgcctgcgacccgcgccacggccgctacctgacggtggccaccgtgttccggggccgcatgtccatgaaggaggtggacgagcagatgctggccatccagagcaagaacagcagctacttcgtggagtggatccccaacaacgtgaaggtggccgtgtgtgacatcccgccccgcggcctcaagatgtcctccaccttcatcggcaacagcacggccatccaggagctgttcaagcgcatctccgagcagttcacggccatgttccggcgcaaggccttcctgcactggtacacgggcgagggcatggacgagatggagttcaccgaggccgagagcaacatgaacgacctggtgtccgagtaccagcagtaccaggacgccacggccgaggaagaggttcgaggaggaggctgaggaggaggtggcctagagccttcagtcactggggaaagcagggaagcagtgtgaactctttattcactcccagcctgtcctgtggcctgtcccactgtgtgcacttgctgttttccctgtccacatccatgctgtacagacaccaccattaaagcattttcatagtgaaaaaaaa

SEQ ID NO: 75625 - DNA, 1595 bp, Homo sapiens
  misc_feature (4)..(5): n is a, c, g, or t
  misc_feature (15)..(16): n is a, c, g, or t
  misc_feature (31)..(32): n is a, c, g, or t
gatnnccttaattannaattaatcctccccnncccccccccccccccggagcagccagcccggcccgcccgcgcccgtccgcagccgcccgccagacgcgcccagtatgagggagatcgtgcacatccaggccggccagtgcggcaaccagatcggggccaagttctgggaagtcatcagtgatgagcatggcatcgaccccagcggcaactacgtgggcgactcggacttgcagctggagcggatcagcgtctactacaacgaggcctcttctcacaagtacgtgcctcgagccattctggtggacctggaacccggaaccatggacagtgtccgctcaggggcctttggacatctcttcaggcctgacaatttcatctttggtcagagtggggccggcaacaactgggccaagggtcactacacggagggggcggagctggtggattcggtcctggatgtggtgcggaaggagtgtgaaaactgcgactgcctgcagggcttccagctgacccactcgctggggggcggcacgggctccggcatgggcacgttgctcatcagcaaggtgcgtgaggagtatcccgaccgcatcatgaacaccttcagcgtcgtgccctcacccaaggtgtcagacacggtggtggagccctacaacgccacgctgtccatccaccagctggtggagaacacggatgagacctactgcatcgacaacgaggcgctctacgacatctgcttccgcaccctcaagctggccacgcccacctacggggacctcaaccacctggtatcggccaccatgagcggagtcaccacctccttgcgcttcccgggccagctcaacgctgacctgcgcaagctggccgtcaacatggtgcccttcccgcgcctgcacttcttcatgcccggcttcgcccccctcacagcccggggcagccagcagtaccgggccctgaccgtgcccgagctcacccagcagatgttcgatgccaagaacatgatggccgcctgcgacccgcgccacggccgctacctgacggtggccaccgtgttccggggccgcatgtccatgaaggaggtggacgagcagatgctggccatccagagcaagaacagcagctacttcgtggagtggatccccaacaacgtgaaggtggccgtgtgtgacatcccgccccgcggcctcaagatgtcctccaccttcatcggcaacagcacggccatccaggagctgttcaagcgcatctccgagcagttcacggccatgttccggcgcaaggccttcctgcactggtacacgggcgagggcatggacgagatggagttcaccgaggccgagagcaacatgaacgacctggtgtccgagtaccagcagtaccaggacgccacggccgaggaagaggttcgaggaggaggctgaggaggaggtggcctagagccttcagtcactggggaaagcagggaagcagtgtgaactctttattcactcccagcctgtcctgtggcctgtcccactgtgtgcacttgctgttttccctgtccacatccatgctgttgtctgctgcagggggatcctcaagagcagccagcac

SEQ ID NO: 75626 - DNA, 1653 bp, Homo sapiens
  misc_feature (4)..(5): n is a, c, g, or t
  misc_feature (15)..(16): n is a, c, g, or t
  misc_feature (31)..(32): n is a, c, g, or t
  misc_feature (1407)..(1407): n is a, c, g, or t
gatnnccttaattannaattaatcctccccnncccccccccccccccggagcagccagcccggcccgcccgcgcccgtccgcagccgcccgccagacgcgcccagtatgagggagatcgtgcacatccaggccggccagtgcggcaaccagatcggggccaagttctgggaagtcatcagtgatgagcatggcatcgaccccagcggcaactacgtgggcgactcggacttgcagctggagcggatcagcgtctactacaacgaggcctcttctcacaagtacgtgcctcgagccattctggtggacctggaacccggaaccatggacagtgtccgctcaggggcctttggacatctcttcaggcctgacaatttcatctttggtcagagtggggccggcaacaactgggccaagggtcactacacggagggggcggagctggtggattcggtcctggatgtggtgcggaaggagtgtgaaaactgcgactgcctgcagggcttccagctgacccactcgctggggggcggcacgggctccggcatgggcacgttgctcatcagcaaggtgcgtgaggagtatcccgaccgcatcatgaacaccttcagcgtcgtgccctcacccaaggtgtcagacacggtggtggagccctacaacgccacgctgtccatccaccagctggtggagaacacggatgagacctactgcatcgacaacgaggcgctctacgacatctgcttccgcaccctcaagctggccacgcccacctacggggacctcaaccacctggtatcggccaccatgagcggagtcaccacctccttgcgcttcccgggccagctcaacgctgacctgcgcaagctggccgtcaacatggtgcccttcccgcgcctgcacttcttcatgcccggcttcgcccccctcacagcccggggcagccagcagtaccgggccctgaccgtgcccgagctcacccagcagatgttcgatgccaagaacatgatggccgcctgcgacccgcgccacggccgctacctgacggtggccaccgtgttccggggccgcatgtccatgaaggaggtggacgagcagatgctggccatccagagcaagaacagcagctacttcgtggagtggatccccaacaacgtgaaggtggccgtgtgtgacatcccgccccgcggcctcaagatgtcctccaccttcatcggcaacagcacggccatccaggagctgttcaagcgcatctccgagcagttcacggccatgttccggcgcaaggccttcctgcactggtacacgggcgagggcatggacgagatggagttcaccgaggccgagagcaacatgaacgacctggtgtccgagtaccagcagtaccaggacgccacggccgaggaagaggncgaacaaggggagttcgaggaggaggagggcgaggacgaggcttaaaaacttctcagatcaatcgtgcatccttagtgaacttctgttgtcctcaagcatggtctttctacttgtaaactatggtgctcagttttgcctctgttagaaattcacactgttgatgtaatgatgtggaactcctctaaaaattacagtattgtctgtgaaggtatctatactaataaaaaaagcatgtgtagaaaaaa

SEQ ID NO: 75627 - DNA, 1805 bp, Homo sapiens
gggcatctcttgagaacaaagagatgcccctccctgccccacagtgtgctcgtgtggctgctgtggggcagggaggggcatctcttgagaacaaaagatccatttctcgactttccaaagctggagagcttcttgagagaaaagagagagacaggtacaggtccacgccacccacacacagccctgtgcacacagaccggacacaggcgtccacagttctgggaagtcatcagtgatgagcatggcatcgaccccagcggcaactacgtgggcgactcggacttgcagctggagcggatcagcgtctactacaacgaggcctcttctcacaagtacgtgcctcgagccattctggtggacctggaacccggaaccatggacagtgtccgctcaggggcctttggacatctcttcaggcctgacaatttcatctttggtcagagtggggccggcaacaactgggccaagggtcactacacggagggggcggagctggtggattcggtcctggatgtggtgcggaaggagtgtgaaaactgcgactgcctgcagggcttccagctgacccactcgctggggggcggcacgggctccggcatgggcacgttgctcatcagcaaggtgcgtgaggagtatcccgaccgcatcatgaacaccttcagcgtcgtgccctcacccaaggtgtcagacacggtggtggagccctacaacgccacgctgtccatccaccagctggtggagaacacggatgagacctactgcatcgacaacgaggcgctctacgacatctgcttccgcaccctcaagctggccacgcccacctacggggacctcaaccacctggtatcggccaccatgagcggagtcaccacctccttgcgcttcccgggccagctcaacgctgacctgcgcaagctggccgtcaacatggtgcccttcccgcgcctgcacttcttcatgcccggcttcgcccccctcacagcccggggcagccagcagtaccgggccctgaccgtgcccgagctcacccagcagatgttcgatgccaagaacatgatggccgcctgcgacccgcgccacggccgctacctgacggtggccaccgtgttccggggccgcatgtccatgaaggaggtggacgagcagatgctggccatccagagcaagaacagcagctacttcgtggagtggatccccaacaacgtgaaggtggccgtgtgtgacatcccgccccgcggcctcaagatgtcctccaccttcatcggcaacagcacggccatccaggagctgttcaagcgcatctccgagcagttcacggccatgttccggcgcaaggccttcctgcactggtacacgggcgagggcatggacgagatggagttcaccgaggccgagagcaacatgaacgacctggtgtccgagtaccagcagtaccaggacgccacggccgaggaagagggcgagatgtacgaagacgacgaggaggagtcggaggcccagggccccaagtgaagctgctcgcagctggagtgagaggcaggtggcggccggggccgaagccagcagtgtctaaacccccggagccatctcgctgccgacaccctgctttcccctcgccctagggctcccttgccgccctcctgcagtatttatggcctcgtcctccccacctaggccacgtgtgagctgctcctgtctctgtcttattgcagctccaggcctgacgttttacggttttgttttttactggtttgtgtttatattttcggggatacttaataaatctattgctgtcagataccctt

SEQ ID NO: 75628 - DNA, 1887 bp, Homo sapiens
aggagctggctgccctgaggctgcaaaacttcttccctcgtggagacagggaggcacctcagacactcaccccggactcccttgaacagggacagggaggaaccccaggcagctagaccccagcagcagccacacgagcacactgtggggcagggaggggcatctcttgagaacaaaagatccatttctcgactttccaaagctggagagcttcttgagagaaaagagagagacaggtacaggtccacgccacccacacacagccctgtgcacacagaccggacacaggcgtccacagttctgggaagtcatcagtgatgagcatggcatcgaccccagcggcaactacgtgggcgactcggacttgcagctggagcggatcagcgtctactacaacgaggcctcttctcacaagtacgtgcctcgagccattctggtggacctggaacccggaaccatggacagtgtccgctcaggggcctttggacatctcttcaggcctgacaatttcatctttggtcagagtggggccggcaacaactgggccaagggtcactacacggagggggcggagctggtggattcggtcctggatgtggtgcggaaggagtgtgaaaactgcgactgcctgcagggcttccagctgacccactcgctggggggcggcacgggctccggcatgggcacgttgctcatcagcaaggtgcgtgaggagtatcccgaccgcatcatgaacaccttcagcgtcgtgccctcacccaaggtgtcagacacggtggtggagccctacaacgccacgctgtccatccaccagctggtggagaacacggatgagacctactgcatcgacaacgaggcgctctacgacatctgcttccgcaccctcaagctggccacgcccacctacggggacctcaaccacctggtatcggccaccatgagcggagtcaccacctccttgcgcttcccgggccagctcaacgctgacctgcgcaagctggccgtcaacatggtgcccttcccgcgcctgcacttcttcatgcccggcttcgcccccctcacagcccggggcagccagcagtaccgggccctgaccgtgcccgagctcacccagcagatgttcgatgccaagaacatgatggccgcctgcgacccgcgccacggccgctacctgacggtggccaccgtgttccggggccgcatgtccatgaaggaggtggacgagcagatgctggccatccagagcaagaacagcagctacttcgtggagtggatccccaacaacgtgaaggtggccgtgtgtgacatcccgccccgcggcctcaagatgtcctccaccttcatcggcaacagcacggccatccaggagctgttcaagcgcatctccgagcagttcacggccatgttccggcgcaaggccttcctgcactggtacacgggcgagggcatggacgagatggagttcaccgaggccgagagcaacatgaacgacctggtgtccgagtaccagcagtaccaggacgccacggccgaggaagagggcgagatgtacgaagacgacgaggaggagtcggaggcccagggccccaagtgaagctgctcgcagctggagtgagaggcaggtggcggccggggccgaagccagcagtgtctaaacccccggagccatctcgctgccgacaccctgctttcccctcgccctagggctcccttgccgccctcctgcagtatttatggcctcgtcctccccacctaggccacgtgtgagctgctcctgtctctgtcttattgcagctccaggcctgacgttttacggttttgttttttactggtttgtgtttatattttcggggatacttaataaatctattgctgtcagataccctt

SEQ ID NO: 75629 - DNA, 1629 bp, Homo sapiens
cctgtccactctgagatgcctggaagggggctcagtgcagttctgggaagtcatcagtgatgagcatggcatcgaccccagcggcaactacgtgggcgactcggacttgcagctggagcggatcagcgtctactacaacgaggcctcttctcacaagtacgtgcctcgagccattctggtggacctggaacccggaaccatggacagtgtccgctcaggggcctttggacatctcttcaggcctgacaatttcatctttggtcagagtggggccggcaacaactgggccaagggtcactacacggagggggcggagctggtggattcggtcctggatgtggtgcggaaggagtgtgaaaactgcgactgcctgcagggcttccagctgacccactcgctggggggcggcacgggctccggcatgggcacgttgctcatcagcaaggtgcgtgaggagtatcccgaccgcatcatgaacaccttcagcgtcgtgccctcacccaaggtgtcagacacggtggtggagccctacaacgccacgctgtccatccaccagctggtggagaacacggatgagacctactgcatcgacaacgaggcgctctacgacatctgcttccgcaccctcaagctggccacgcccacctacggggacctcaaccacctggtatcggccaccatgagcggagtcaccacctccttgcgcttcccgggccagctcaacgctgacctgcgcaagctggccgtcaacatggtgcccttcccgcgcctgcacttcttcatgcccggcttcgcccccctcacagcccggggcagccagcagtaccgggccctgaccgtgcccgagctcacccagcagatgttcgatgccaagaacatgatggccgcctgcgacccgcgccacggccgctacctgacggtggccaccgtgttccggggccgcatgtccatgaaggaggtggacgagcagatgctggccatccagagcaagaacagcagctacttcgtggagtggatccccaacaacgtgaaggtggccgtgtgtgacatcccgccccgcggcctcaagatgtcctccaccttcatcggcaacagcacggccatccaggagctgttcaagcgcatctccgagcagttcacggccatgttccggcgcaaggccttcctgcactggtacacgggcgagggcatggacgagatggagttcaccgaggccgagagcaacatgaacgacctggtgtccgagtaccagcagtaccaggacgccacggccgaggaagagggcgagatgtacgaagacgacgaggaggagtcggaggcccagggccccaagtgaagctgctcgcagctggagtgagaggcaggtggcggccggggccgaagccagcagtgtctaaacccccggagccatctcgctgccgacaccctgctttcccctcgccctagggctcccttgccgccctcctgcagtatttatggcctcgtcctccccacctaggccacgtgtgagctgctcctgtctctgtcttattgcagctccaggcctgacgttttacggttttgttttttactggtttgtgtttatattttcggggatacttaataaatctattgctgtcagataccctt

SEQ ID NO: 75630 - DNA, 2005 bp, Homo sapiens
  misc_feature (4)..(5): n is a, c, g, or t
  misc_feature (15)..(16): n is a, c, g, or t
  misc_feature (31)..(32): n is a, c, g, or t
gatnnccttaattannaattaatcctccccnncccccccccccccccggagcagccagcccggcccgcccgcgcccgtccgcagccgcccgccagacgcgcccagtatgagggagatcgtgcacatccaggccggccagtgcggcaaccagatcggggccaagttctgggaagtcatcagtgatgagcatggcatcgaccccagcggcaactacgtgggcgactcggacttgcagctggagcggatcagcgtctactacaacgaggcctcttagacagtctcgatatgttgcccaggctggtctcgaactcctggactcaagcgatccacctgccttggcctcccaaagtgttgggagtgcagacacgagcccctgcatctggtggacgtctgactgaatcctgcctgtcctgctccgtcctgtcctgctccgtccttaaacacagtgaggcttaagggtgaagaaagttgctgaagcttgcctttggtccaggactctgacttcagagtacaggctcttaggatctcacaagtacgtgcctcgagccattctggtggacctggaacccggaaccatggacagtgtccgctcaggggcctttggacatctcttcaggcctgacaatttcatctttggtcagagtggggccggcaacaactgggccaagggtcactacacggagggggcggagctggtggattcggtcctggatgtggtgcggaaggagtgtgaaaactgcgactgcctgcagggcttccagctgacccactcgctggggggcggcacgggctccggcatgggcacgttgctcatcagcaaggtgcgtgaggagtatcccgaccgcatcatgaacaccttcagcgtcgtgccctcacccaaggtgtcagacacggtggtggagccctacaacgccacgctgtccatccaccagctggtggagaacacggatgagacctactgcatcgacaacgaggcgctctacgacatctgcttccgcaccctcaagctggccacgcccacctacggggacctcaaccacctggtatcggccaccatgagcggagtcaccacctccttgcgcttcccgggccagctcaacgctgacctgcgcaagctggccgtcaacatggtgcccttcccgcgcctgcacttcttcatgcccggcttcgcccccctcacagcccggggcagccagcagtaccgggccctgaccgtgcccgagctcacccagcagatgttcgatgccaagaacatgatggccgcctgcgacccgcgccacggccgctacctgacggtggccaccgtgttccggggccgcatgtccatgaaggaggtggacgagcagatgctggccatccagagcaagaacagcagctacttcgtggagtggatccccaacaacgtgaaggtggccgtgtgtgacatcccgccccgcggcctcaagatgtcctccaccttcatcggcaacagcacggccatccaggagctgttcaagcgcatctccgagcagttcacggccatgttccggcgcaaggccttcctgcactggtacacgggcgagggcatggacgagatggagttcaccgaggccgagagcaacatgaacgacctggtgtccgagtaccagcagtaccaggacgccacggccgaggaagagggcgagatgtacgaagacgacgaggaggagtcggaggcccagggccccaagtgaagctgctcgcagctggagtgagaggcaggtggcggccggggccgaagccagcagtgtctaaacccccggagccatctcgctgccgacaccctgctttcccctcgccctagggctcccttgccgccctcctgcagtatttatggcctcgtcctccccacctaggccacgtgtgagctgctcctgtctctgtcttattgcagctccaggcctgacgttttacggttttgttttttactggtttgtgtttatattttcggggatacttaataaatctattgctgtcagataccctt

SEQ ID NO: 75631 - DNA, 1695 bp, Homo sapiens
  misc_feature (4)..(5): n is a, c, g, or t
  misc_feature (15)..(16): n is a, c, g, or t
  misc_feature (31)..(32): n is a, c, g, or t
gatnnccttaattannaattaatcctccccnncccccccccccccccggagcagccagcccggcccgcccgcgcccgtccgcagccgcccgccagacgcgcccagtatgagggagatcgtgcacatccaggccggccagtgcggcaaccagatcggggccaagttctgggaagtcatcagtgatgagcatggcatcgaccccagcggcaactacgtgggcgactcggacttgcagctggagcggatcagcgtctactacaacgaggcctcttctcacaagtacgtgcctcgagccattctggtggacctggaacccggaaccatggacagtgtccgctcaggggcctttggacatctcttcaggcctgacaatttcatctttggtcagagtggggccggcaacaactgggccaagggtcactacacggagggggcggagctggtggattcggtcctggatgtggtgcggaaggagtgtgaaaactgcgactgcctgcagggcttccagctgacccactcgctggggggcggcacgggctccggcatgggcacgttgctcatcagcaaggtgcgtgaggagtatcccgaccgcatcatgaacaccttcagcgtcgtgccctcacccaaggtgtcagacacggtggtggagccctacaacgccacgctgtccatccaccagctggtggagaacacggatgagacctactgcatcgacaacgaggcgctctacgacatctgcttccgcaccctcaagctggccacgcccacctacggggacctcaaccacctggtatcggccaccatgagcggagtcaccacctccttgcgcttcccgggccagctcaacgctgacctgcgcaagctggccgtcaacatggtgcccttcccgcgcctgcacttcttcatgcccggcttcgcccccctcacagcccggggcagccagcagtaccgggccctgaccgtgcccgagctcacccagcagatgttcgatgccaagaacatgatggccgcctgcgacccgcgccacggccgctacctgacggtggccaccgtgttccggggccgcatgtccatgaaggaggtggatgagcaaatgcttaatgtccaaaacaaaaacagcagctattttgttgagtggatccccaacaatgtgaaaacggctgtctgtgacatcccaccccgcggcctcaagatgtcctccaccttcatcggcaacagcacggccatccaggagctgttcaagcgcatctccgagcagttcacggccatgttccggcgcaaggccttcctgcactggtacacgggcgagggcatggacgagatggagttcaccgaggccgagagcaacatgaatgacctggtgtccgagtaccagcagtaccaggatgccacagccgaggaggagggcgagttcgaggaggaggctgaggaggaggtggcctagagccttcagtcactggggaaagcagggaagcagtgtgaactctttattcactcccagcctgtcctgtggcctgtcccactgtgtgcacttgctgttttccctgtccacatccatgctgtacagacaccaccattaaagcattttcatagtgaaaaaaaatgtggtttcgctttgcccattccttccagtaggccctccgggtgctgttgccgaatgtcagggggtagttgtcctgcatggctgcggggaga

SEQ ID NO: 75632 - DNA, 1998 bp, Homo sapiens
  misc_feature (4)..(5): n is a, c, g, or t
  misc_feature (15)..(16): n is a, c, g, or t
  misc_feature (31)..(32): n is a, c, g, or t
gatnnccttaattannaattaatcctccccnncccccccccccccccggagcagccagcccggcccgcccgcgcccgtccgcagccgcccgccagacgcgcccagtatgagggagatcgtgcacatccaggccggccagtgcggcaaccagatcggggccaagttctgggaagtcatcagtgatgagcatggcatcgaccccagcggcaactacgtgggcgactcggacttgcagctggagcggatcagcgtctactacaacgaggcctcttctcacaagtacgtgcctcgagccattctggtggacctggaacccggaaccatggacagtgtccgctcaggggcctttggacatctcttcaggcctgacaatttcatctttgcacatccagctggtagatgccaactcgcatccagcccccagctgccagggattctggggtggctgtttgggctcctggcactgccagtcggaaggaaggtatgctggagcaggagggctgatccattcacccaggatcccctcaggaggcagagcctcgctctgctgtgaccccaagttctcaagaccctgtccagagccctcgtcctgagcactcagcagcatcggctcagggaagccacggcgggtcagagtggggccggcaacaactgggccaagggtcactacacggagggggcggagctggtggattcggtcctggatgtggtgcggaaggagtgtgaaaactgcgactgcctgcagggcttccagctgacccactcgctggggggcggcacgggctccggcatgggcacgttgctcatcagcaaggtgcgtgaggagtatcccgaccgcatcatgaacaccttcagcgtcgtgccctcacccaaggtgtcagacacggtggtggagccctacaacgccacgctgtccatccaccagctggtggagaacacggatgagacctactgcatcgacaacgaggcgctctacgacatctgcttccgcaccctcaagctggccacgcccacctacggggacctcaaccacctggtatcggccaccatgagcggagtcaccacctccttgcgcttcccgggccagctcaacgctgacctgcgcaagctggccgtcaacatggtgcccttcccgcgcctgcacttcttcatgcccggcttcgcccccctcacagcccggggcagccagcagtaccgggccctgaccgtgcccgagctcacccagcagatgttcgatgccaagaacatgatggccgcctgcgacccgcgccacggccgctacctgacggtggccaccgtgttccggggccgcatgtccatgaaggaggtggacgagcagatgctggccatccagagcaagaacagcagctacttcgtggagtggatccccaacaacgtgaaggtggccgtgtgtgacatcccgccccgcggcctcaagatgtcctccaccttcatcggcaacagcacggccatccaggagctgttcaagcgcatctccgagcagttcacggccatgttccggcgcaaggccttcctgcactggtacacgggcgagggcatggacgagatggagttcaccgaggccgagagcaacatgaacgacctggtgtccgagtaccagcagtaccaggacgccacggccgaggaagagggcgagatgtacgaagacgacgaggaggagtcggaggcccagggccccaagtgaagctgctcgcagctggagtgagaggcaggtggcggccggggccgaagccagcagtgtctaaacccccggagccatctcgctgccgacaccctgctttcccctcgccctagggctcccttgccgccctcctgcagtatttatggcctcgtcctccccacctaggccacgtgtgagctgctcctgtctctgtcttattgcagctccaggcctgacgttttacggttttgttttttactggtttgtgtttatattttcggggatacttaataaatctattgctgtcagataccctt

SEQ ID NO: 75633 - DNA, 1711 bp, Homo sapiens
  misc_feature (4)..(5): n is a, c, g, or t
  misc_feature (15)..(16): n is a, c, g, or t
  misc_feature (31)..(32): n is a, c, g, or t
gatnnccttaattannaattaatcctccccnncccccccccccccccggagcagccagcccggcccgcccgcgcccgtccgcagccgcccgccagacgcgcccagtatgagggagatcgtgcacatccaggccggccagtgcggcaaccagatcggggccaagttctgggaagtcatcagtgatgagcatggcatcgaccccagcggcaactacgtgggcgactcggacttgcagctggagcggatcagcgtctactacaacgaggcctcttctcacaagtacgtgcctcgagccattctggtggacctggaacccggaaccatggacagtgtccgctcaggggcctttggacatctcttcaggcctgacaatttcatctttggtcagagtggggccggcaacaactgggccaagggtcactacacggaaggagtgtgaaaactgcgactgcctgcagggcttccagctgacccactcgctggggggcggcacgggctccggcatgggcacgttgctcatcagcaaggtgcgtgaggagtatcccgaccgcatcatgaacaccttcagcgtcgtgccctcacccaaggtgtcagacacggtggtggagccctacaacgccacgctgtccatccaccagctggtggagaacacggatgagacctactgcatcgacaacgaggcgctctacgacatctgcttccgcaccctcaagctggccacgcccacctacggggacctcaaccacctggtatcggccaccatgagcggagtcaccacctccttgcgcttcccgggccagctcaacgctgacctgcgcaagctggccgtcaacatggtgcccttcccgcgcctgcacttcttcatgcccggcttcgcccccctcacagcccggggcagccagcagtaccgggccctgaccgtgcccgagctcacccagcagatgttcgatgccaagaacatgatggccgcctgcgacccgcgccacggccgctacctgacggtggccaccgtgttccggggccgcatgtccatgaaggaggtggacgagcagatgctggccatccagagcaagaacagcagctacttcgtggagtggatccccaacaacgtgaaggtggccgtgtgtgacatcccgccccgcggcctcaagatgtcctccaccttcatcggcaacagcacggccatccaggagctgttcaagcgcatctccgagcagttcacggccatgttccggcgcaaggccttcctgcactggtacacgggcgagggcatggacgagatggagttcaccgaggccgagagcaacatgaacgacctggtgtccgagtaccagcagtaccaggacgccacggccgaggaagagggcgagatgtacgaagacgacgaggaggagtcggaggcccagggccccaagtgaagctgctcgcagctggagtgagaggcaggtggcggccggggccgaagccagcagtgtctaaacccccggagccatctcgctgccgacaccctgctttcccctcgccctagggctcccttgccgccctcctgcagtatttatggcctcgtcctccccacctaggccacgtgtgagctgctcctgtctctgtcttattgcagctccaggcctgacgttttacggttttgttttttactggtttgtgtttatattttcggggatacttaataaatctattgctgtcagataccctt

SEQ ID NO: 75634 - DNA, 1764 bp, Homo sapiens
  misc_feature (4)..(5): n is a, c, g, or t
  misc_feature (15)..(16): n is a, c, g, or t
  misc_feature (31)..(32): n is a, c, g, or t
  misc_feature (395)..(395): n is a, c, g, or t
  misc_feature (398)..(398): n is a, c, g, or t
  misc_feature (401)..(401): n is a, c, g, or t
  misc_feature (405)..(405): n is a, c, g, or t
  misc_feature (408)..(411): n is a, c, g, or t
  misc_feature (421)..(421): n is a, c, g, or t
  misc_feature (425)..(425): n is a, c, g, or t
  misc_feature (431)..(437): n is a, c, g, or t
  misc_feature (440)..(440): n is a, c, g, or t
  misc_feature (446)..(446): n is a, c, g, or t
  misc_feature (454)..(454): n is a, c, g, or t
  misc_feature (519)..(519): n is a, c, g, or t
gatnnccttaattannaattaatcctccccnncccccccccccccccggagcagccagcccggcccgcccgcgcccgtccgcagccgcccgccagacgcgcccagtatgagggagatcgtgcacatccaggccggccagtgcggcaaccagatcggggccaagttctgggaagtcatcagtgatgagcatggcatcgaccccagcggcaactacgtgggcgactcggacttgcagctggagcggatcagcgtctactacaacgaggcctcttctcacaagtacgtgcctcgagccattctggtggacctggaacccggaaccatggacagtgtccgctcaggggcctttggacatctcttcaggcctgacaatttcatctttgcaaaatggggcnggnaanaaanaannnnaaagatcacnaaanaggaannnnnnnaanaaatgnattcggtnctaagaaaataataaaagaaaaagaaaaaaaaaaacataaaaaataaaaaaaaaaagctatccangctgacccactcgctggggggcggcacgggctccggcatgggcacgttgctcatcagcaaggtgcgtgaggagtatcccgaccgcatcatgaacaccttcagcgtcgtgccctcacccaaggtgtcagacacggtggtggagccctacaacgccacgctgtccatccaccagctggtggagaacacggatgagacctactgcatcgacaacgaggcgctctacgacatctgcttccgcaccctcaagctggccacgcccacctacggggacctcaaccacctggtatcggccaccatgagcggagtcaccacctccttgcgcttcccgggccagctcaacgctgacctgcgcaagctggccgtcaacatggtgcccttcccgcgcctgcacttcttcatgcccggcttcgcccccctcacagcccggggcagccagcagtaccgggccctgaccgtgcccgagctcacccagcagatgttcgatgccaagaacatgatggccgcctgcgacccgcgccacggccgctacctgacggtggccaccgtgttccggggccgcatgtccatgaaggaggtggacgagcagatgctggccatccagagcaagaacagcagctacttcgtggagtggatccccaacaacgtgaaggtggccgtgtgtgacatcccgccccgcggcctcaagatgtcctccaccttcatcggcaacagcacggccatccaggagctgttcaagcgcatctccgagcagttcacggccatgttccggcgcaaggccttcctgcactggtacacgggcgagggcatggacgagatggagttcaccgaggccgagagcaacatgaacgacctggtgtccgagtaccagcagtaccaggacgccacggccgaggaagagggcgagatgtacgaagacgacgaggaggagtcggaggcccagggccccaagtgaagctgctcgcagctggagtgagaggcaggtggcggccggggccgaagccagcagtgtctaaacccccggagccatctcgctgccgacaccctgctttcccctcgccctagggctcccttgccgccctcctgcagtatttatggcctcgtcctccccacctaggccacgtgtgagctgctcctgtctctgtcttattgcagctccaggcctgacgttttacggttttgttttttactggtttgtgtttatattttcggggatacttaataaatctattgctgtcagataccctt

SEQ ID NO: 75635 - DNA, 1606 bp, Homo sapiens
  misc_feature (4)..(5): n is a, c, g, or t
  misc_feature (15)..(16): n is a, c, g, or t
  misc_feature (31)..(32): n is a, c, g, or t
gatnnccttaattannaattaatcctccccnncccccccccccccccggagcagccagcccggcccgcccgcgcccgtccgcagccgcccgccagacgcgcccagtatgagggagatcgtgcacatccaggccggccagtgcggcaaccagatcggggccaagttctgggaagtcatcagtgatgagcatggcatcgaccccagcggcaactacgtgggcgactcggacttgcagctggagcggatcagcgtctactacaacgaggcctcttctcacaagtacgtgcctcgagccattctggtggacctggaacccggaaccatggacagtgtccgctcaggggcctttggacatctcttcaggcctgacaatttcatctttggtcagagtggggccggcaacaactgggccaagggtcactacacggagggggcggagctggtggattcggtcctggatgtggtgcgtgccctcacccaaggtgtcagacacggtggtggagccctacaacgccacgctgtccatccaccagctggtggagaacacggatgagacctactgcatcgacaacgaggcgctctacgacatctgcttccgcaccctcaagctggccacgcccacctacggggacctcaaccacctggtatcggccaccatgagcggagtcaccacctccttgcgcttcccgggccagctcaacgctgacctgcgcaagctggccgtcaacatggtgcccttcccgcgcctgcacttcttcatgcccggcttcgcccccctcacagcccggggcagccagcagtaccgggccctgaccgtgcccgagctcacccagcagatgttcgatgccaagaacatgatggccgcctgcgacccgcgccacggccgctacctgacggtggccaccgtgttccggggccgcatgtccatgaaggaggtggacgagcagatgctggccatccagagcaagaacagcagctacttcgtggagtggatccccaacaacgtgaaggtggccgtgtgtgacatcccgccccgcggcctcaagatgtcctccaccttcatcggcaacagcacggccatccaggagctgttcaagcgcatctccgagcagttcacggccatgttccggcgcaaggccttcctgcactggtacacgggcgagggcatggacgagatggagttcaccgaggccgagagcaacatgaacgacctggtgtccgagtaccagcagtaccaggacgccacggccgaggaagagggcgagatgtacgaagacgacgaggaggagtcggaggcccagggccccaagtgaagctgctcgcagctggagtgagaggcaggtggcggccggggccgaagccagcagtgtctaaacccccggagccatctcgctgccgacaccctgctttcccctcgccctagggctcccttgccgccctcctgcagtatttatggcctcgtcctccccacctaggccacgtgtgagctgctcctgtctctgtcttattgcagctccaggcctgacgttttacggttttgttttttactggtttgtgtttatattttcggggatacttaataaatctattgctgtcagataccctt

SEQ ID NO: 75636 - DNA, 1244 bp, Homo sapiens
aggaattacggctagtacgagccgggatgtaatcgagcgagcacgttgctcatcagcaaggtgcgtgaggagtatcccgaccgcatcatgaacaccttcagcgtcgtgccctcacccaaggtgtcagacacggtggtggagccctacaacgccacgctgtccatccaccagctggtggagaacacggatgagacctactgcatcgacaacgaggcgctctacgacatctgcttccgcaccctcaagctggccacgcccacctacggggacctcaaccacctggtatcggccaccatgagcggagtcaccacctccttgcgcttcccgggccagctcaacgctgacctgcgcaagctggccgtcaacatggtgcccttcccgcgcctgcacttcttcatgcccggcttcgcccccctcacagcccggggcagccagcagtaccgggccctgaccgtgcccgagctcacccagcagatgttcgatgccaagaacatgatggccgcctgcgacccgcgccacggccgctacctgacggtggccaccgtgttccggggccgcatgtccatgaaggaggtggacgagcagatgctggccatccagagcaagaacagcagctacttcgtggagtggatccccaacaacgtgaaggtggccgtgtgtgacatcccgccccgcggcctcaagatgtcctccaccttcatcggcaacagcacggccatccaggagctgttcaagcgcatctccgagcagttcacggccatgttccggcgcaaggccttcctgcactggtacacgggcgagggcatggacgagatggagttcaccgaggccgagagcaacatgaacgacctggtgtccgagtaccagcagtaccaggacgccacggccgaggaagagggcgagatgtacgaagacgacgaggaggagtcggaggcccagggccccaagtgaagctgctcgcagctggagtgagaggcaggtggcggccggggccgaagccagcagtgtctaaacccccggagccatctcgctgccgacaccctgctttcccctcgccctagggctcccttgccgccctcctgcagtatttatggcctcgtcctccccacctaggccacgtgtgagctgctcctgtctctgtcttattgcagctccaggcctgacgttttacggttttgttttttactggtttgtgtttatattttcggggatacttaataaatctattgctgtcagataccctt

SEQ ID NO: 75637 - DNA, 1465 bp, Homo sapiens
  misc_feature (4)..(5): n is a, c, g, or t
  misc_feature (15)..(16): n is a, c, g, or t
  misc_feature (31)..(32): n is a, c, g, or t
gatnnccttaattannaattaatcctccccnncccccccccccccccggagcagccagcccggcccgcccgcgcccgtccgcagccgcccgccagacgcgcccagtatgagggagatcgtgcacatccaggccggccagtgcggcaaccagatcggggccaagttctgggaagtcatcagtgatgagcatggcatcgaccccagcggcaactacgtgggcgactcggacttgcagctggagcggatcagcgtctactacaacgaggcctcttctcacaagtacgtgcctcgagccattctggtggacctggaacccggaaccatggacagtgtccgctcaggggcctttggacatctcttcaggcctgacaatttcatctttggtcagagtggggccggcaacaactgggccaagggtcactacacggagggggcggagctggtggattcggtcctggatgtggtgcctggccacgcccacctacggggacctcaaccacctggtatcggccaccatgagcggagtcaccacctccttgcgcttcccgggccagctcaacgctgacctgcgcaagctggccgtcaacatggtgcccttcccgcgcctgcacttcttcatgcccggcttcgcccccctcacagcccggggcagccagcagtaccgggccctgaccgtgcccgagctcacccagcagatgttcgatgccaagaacatgatggccgcctgcgacccgcgccacggccgctacctgacggtggccaccgtgttccggggccgcatgtccatgaaggaggtggacgagcagatgctggccatccagagcaagaacagcagctacttcgtggagtggatccccaacaacgtgaaggtggccgtgtgtgacatcccgccccgcggcctcaagatgtcctccaccttcatcggcaacagcacggccatccaggagctgttcaagcgcatctccgagcagttcacggccatgttccggcgcaaggccttcctgcactggtacacgggcgagggcatggacgagatggagttcaccgaggccgagagcaacatgaacgacctggtgtccgagtaccagcagtaccaggacgccacggccgaggaagagggcgagatgtacgaagacgacgaggaggagtcggaggcccagggccccaagtgaagctgctcgcagctggagtgagaggcaggtggcggccggggccgaagccagcagtgtctaaacccccggagccatctcgctgccgacaccctgctttcccctcgccctagggctcccttgccgccctcctgcagtatttatggcctcgtcctccccacctaggccacgtgtgagctgctcctgtctctgtcttattgcagctccaggcctgacgttttacggttttgttttttactggtttgtgtttatattttcggggatacttaataaatctattgctgtcagataccctt

SEQ ID NO: 75638 - DNA, 1562 bp, Homo sapiens
  misc_feature (4)..(5): n is a, c, g, or t
  misc_feature (15)..(16): n is a, c, g, or t
  misc_feature (31)..(32): n is a, c, g, or t
gatnnccttaattannaattaatcctccccnncccccccccccccccggagcagccagcccggcccgcccgcgcccgtccgcagccgcccgccagacgcgcccagtatgagggagatcgtgcacatccaggccggccagtgcggcaaccagatcggggccaagttctgggaagtcatcagtgatgagcatggcatcgaccccagcggcaactacgtgggcgactcggacttgcagctggagcggatcagcgtctactacaacgaggcctcttctcacaagtacgtgcctcgagccattctggtggacctggaacccggaaccatggacagtgtccgctcaggggcctttggacatctcttcaggcctgacaatttcatctttggtcagagtggggccggcaacaactgggccaagggtcactacacggaaggagtgtgaaaactgcgactgcctgcagggcttccagctgacccactcgctggggggcggcacgggctccggcatgggcacgttgctcatcagcaaggtgcgtgaggagtatcccgaccgcatcatgaacaccttcagcgtcgtgccctcacccaaggtgtcagacacggtggtggagccctacaacgccacgctgtccatccaccagctggtggagaacacggatgagacctactgcatcgacaacgaggcgctctacgacatctgcttccgcaccctcaagctggccacgcccacctacggggacctcaaccacctggtatcggccaccatgagcggagtcaccacctccttgcgcttcccgggccagctcaacgctgacctgcgcaagctggccgtcaacatggtgcccttcccgcgcctgcacttcttcatgcccggcttcgcccccctcacagcccggggcagccagcagtaccgggccctgaccgtgcccgagctcacccagcagatgttcgatgccaagaacatgatggccgcctgcgacccgcgccacggccgctacctgacggtggccaccgtgttccggggccgcatgtccatgaaggaggtggatgagcaaatgcttaatgtccaaaacaaaaacagcagctattttgttgagtggatccccaacaatgtgaaaacggctgtctgtgacatcccaccccgcggcctcaagatgtcctccaccttcatcggcaacagcacggccatccaggagctgttcaagcgcatctccgagcagttcacggccatgttccggcgcaaggccttcctgcactggtacacgggcgagggcatggacgagatggagttcaccgaggccgagagcaacatgaatgacctggtgtccgagtaccagcagtaccaggatgccacagccgaggaggagggcgagttcgaggaggaggctgaggaggaggtggcctagagccttcagtcactggggaaagcagggaagcagtgtgaactctttattcactcccagcctgtcctgtggcctgtcccactgtgtgcacttgctgttttccctgtccacatccatgctgtacagacaccaccattaaagcattttcatagtgaaaaaaaa

SEQ ID NO: 75639 - DNA, 630 bp, Homo sapiens
gctcaagatgtcctccaccttcatcgggaggccgcggggcgggatgtcacacacggcccgcggcctcaagatgtcctccaccttcatcggcaacagcacggccatccaggagctgttcaagcgcatctccgagcagttcacggccatgttccggcgcaaggccttcctgcactggtacacgggcgagggcatggacgagatggagttcaccgaggccgagagcaacatgaacgacctggtgtccgagtaccagcagtaccaggacgccacggccgaggaagagggcgagatgtacgaagacgacgaggaggagtcggaggcccagggccccaagtgaagctgctcgcagctggagtgagaggcaggtggcggccggggccgaagccagcagtgtctaaacccccggagccatctcgctgccgacaccctgctttcccctcgccctagggctcccttgccgccctcctgcagtatttatggcctcgtcctccccacctaggccacgtgtgagctgctcctgtctctgtcttattgcagctccaggcctgacgttttacggttttgttttttactggtttgtgtttatattttcggggatacttaataaatctattgctgtcagataccctt

SEQ ID NO: 75640 - DNA, 1105 bp, Homo sapiens
  misc_feature (4)..(5): n is a, c, g, or t
  misc_feature (15)..(16): n is a, c, g, or t
  misc_feature (31)..(32): n is a, c, g, or t
  misc_feature (713)..(713): n is a, c, g, or t
  misc_feature (732)..(732): n is a, c, g, or t
gatnnccttaattannaattaatcctccccnncccccccccccccccggagcagccagcccggcccgcccgcgcccgtccgcagccgcccgccagacgcgcccagtatgagggagatcgtgcacatccaggccggccagtgcggcaaccagatcggggccaagttctgggaagtcatcagtgatgagcatggcatcgaccccagcggcaactacgtgggcgactcggacttgcagctggagcggatcagcgtctactacaacgaggcctcttctcacaagtacgtgcctcgagccattctggtggacctggaacccggaaccatggacagtgtccgctcaggggcctttggacatctcttcaggcctgacaatttcatctttggtcagagtggggccggcaacaactgggccaagggtcactacacggagggggcggagctggtggattcggtcctggatgtggtgcggaaggagtgtgaaaactgcgactgcctgcagggcttccagctgacccactcgctggggggcggcacgggctccggcatgggcacgttgctcatcagcaaggtgcgtgaggagtatcccgaccgcatcatgaacaccttcagcgtcgtgccctcacccaaggtgtcagacacggtggtggagccctacaacgccacgctgtccatccaccagctggtggagaacacggatgagacctactggcaanttttcccccggggaaaaanccaaaaaaccccgggaaaaggggccccggggcccctccctttaaacgggaaacccaaaatctgcttccgcaccctcaagctggccacgcccacctacggggacctcaaccacctggtatcggccaccatgagcggagtcaccacctccttgcgcttcccgggccagctcaacgctgacctgcgcaagctggccgtcaacatgggtgggccccccccttttttttttttttttctcccccccaccccccaccccccccccgggggggggggggcccccccgggggggccccccccccccctttttttgggggcccccaaaaaaaaccccttttttcttccttttccatggccccgggcttcgccccccctcaca

SEQ ID NO: 75641 - DNA, 956 bp, Homo sapiens
  misc_feature (4)..(5): n is a, c, g, or t
  misc_feature (15)..(16): n is a, c, g, or t
  misc_feature (31)..(32): n is a, c, g, or t
gatnnccttaattannaattaatcctccccnncccccccccccccccggagcagccagcccggcccgcccgcgcccgtccgcagccgcccgccagacgcgcccagtatgagggagatcgtgcacatccaggccggccagtgcggcaaccagatcggggccaagttctgggaagtcatcagtgatgagcatggcatcgaccccagcggcaactacgtgggcgactcggacttgcagctggagcggatcagcgtctactacaacgaggcctcttctcacaagtacgtgcctcgagccattctggtggacctggaacccggaaccatggacagtgtccgctcaggggcctttggacatctcttcaggcctgacaatttcatctttgctgggcattggaggcccagagaaagggttctgtggggagaacagaaaccactcatgcatttcaagtggaatgaagtgtaaagcagacagaagcttacagaattgctagagagctggtgagacagaacggggcctccagaggactccggggtccaggagcacgaggccttgctgcggtcaagagatcaggacgttcccatgcctgtgtcctggggttgggccgtggatgccacgttcccacgtctgtgtcctggggcggggccgtggatgccacgttcccacgtctgtgtcctggggcggggccgtggatgccacgttcccacgtctgtgtcctggggcggggccgtggatgccacgttcccacgcctgtgtcctggggcggggccgtggatgccacgttcccacgcctgtgtcctggggcggggccgtggatgccacgttcccatgcctgtgtcctggggcggggccgtggatgccacgttcccatgcctgtgtcctggggcggggccgtggatgccacgttcccatgtctgtgtcctggggcggggccgtggacgcgccacagaaacaggag

SEQ ID NO: 75642 - DNA, 1101 bp, Homo sapiens
  misc_feature (4)..(5): n is a, c, g, or t
  misc_feature (15)..(16): n is a, c, g, or t
  misc_feature (31)..(32): n is a, c, g, or t
gatnnccttaattannaattaatcctccccnncccccccccccccccggagcagccagcccggcccgcccgcgcccgtccgcagccgcccgccagacgcgcccagtatgagggagatcgtgcacatccaggccggccagtgcggcaaccagatcggggccaagttctgggaagtcatcagtgatgagcatggcatcgaccccagcggcaactacgtgggcgactcggacttgcagctggagcggatcagcgtctactacaacgaggcctcttctcacaagtacgtgcctcgagccattctggtggacctggaacccggaaccatggacagtgtccgctcaggggcctttggacatctcttcaggcctgacaatttcatctttggtaagttccccctgctccaagctctgatggcagaccccatcacaggcaagcccaggtcggtggacggggacggctgtgagaaacaaggaatggtcagctcctcacatgatcctgaatggtgggaactcatctctccattttacagctgggcattggaggcccagagaaagggttctgtggggagaacagaaaccactcatgcatttcaagtggaatgaagtgtaaagcagacagaagcttacagaattgctagagagctggtgagacagaacggggcctccagaggactccggggtccaggagcacgaggccttgctgcggtcaagagatcaggacgttcccatgcctgtgtcctggggttgggccgtggatgccacgttcccacgtctgtgtcctggggcggggccgtggatgccacgttcccacgtctgtgtcctggggcggggccgtggatgccacgttcccacgtctgtgtcctggggcggggccgtggatgccacgttcccacgcctgtgtcctggggcggggccgtggatgccacgttcccacgcctgtgtcctggggcggggccgtggatgccacgttcccatgcctgtgtcctggggcggggccgtggatgccacgttcccatgcctgtgtcctggggcggggccgtggatgccacgttcccatgtctgtgtcctggggcggggccgtggacgcgccacagaaacaggag

SEQ ID NO: 75643 - DNA, 388 bp, Homo sapiens
aataagccttctcactgacttatgccccaatcccttgagtacttttaatgttaaagtcaagaataaaatgcctttgaaaaaataaaattgaactattctttagttagacaactcattagtacatttactcttatctcccccaccattatatttaggtgttgcattatccctgggatcttttctgcataattgtcttagtagatgctattcttaagtataaggatgcataaataatattggtacaatggaatgaatttaagtgatttaaattctaaatgtacattattttcacaactaagcaaaatatataacgtatccttaaacttgtatttgacaactttttcaactcaagtggatattttacaataaaaatgtgttacctggatct

SEQ ID NO: 75644 - DNA, 725 bp, Homo sapiens
gcaattactaaatacagaattacttgtctctaaaatataaattttataaaagtctaagaccatgactgaaactaggtttccaaatcgctttgcccataaacaaaaagtactttataattgaaaaactacataaaagaatattttgaaaattagaactgtgtctcatacataaagtaactgcttttcaccagattatttggttaaccggtatacccatgttgcccactgtttcttgtagcagaaatttacttaaattaactactttttttaattgtaaaacattctcttatttttaaacaaacattattagctatatgctgcatattgttaaatactggagacgaaacatgattaacatccattcattcccatttcttggactttcccaaatttatacatttcaaaaacaccaaaattacctggtctagtaatcatggacatgaagatgtgtaacgaatccctttttatatgctgggcacagtgtgaggcactttacagacattgactcatttaatccttaatcccttcacaaatgccagtgttaatttcttcactttactgttcaggaagctgagacttcagttaatatgtttaaggttacggtgagattgactcctaggtctgtatgattataaagtccacaatgtgtatcatatatttatcatcagtttgcctagaattgtattgaaatactttttcaaaataaaatgagcacatctggaaaa

SEQ ID NO: 75645 - DNA, 351 bp, Homo sapiens
cttggtagaaaggataatggtttggagacagagttctattcctgccagcattgacactgtgtctgaaaagccagcatcgacactgtgtctgcaaatccctcagctattctgagtctccgttttctccctgtgagatggagatcataaaatccgcctcatccttaggattattctcctgaagctacaataaggcctgaggcattgtacgctggaagaaacgtgtattaatagcaacttctgtcccaccccatcccccaacacgtcgatcccctccggagcataaaactttcccccagcatctgacctgcccaggccaccctagcacctaggagcgtgaattcctgatgcggg

SEQ ID NO: 75646 - DNA, 458 bp, Homo sapiens
ttcatcagcaaactatcatttatacctctgtatattcctgtaatctgtccctttctttccatctattattaccttagtctaaggaatcatcatattttccctggatcatcatcataacctcctgctaattcctaaattttttaacatgccacatcagactcaaatcctttaaaaacataacaaatcactaaatttccctgcataatatctgtctatctgtctataattccccccttatcttctgcatagcatacaattatgatcaagatcattttcatttattcatgttcccactaaaatgtgtatgtagccaggcatgaaggcacatacatgtagtcacagctacttgggaggctgaggcaggagaatggtgtgaacccaggaggcggagcttgcagtgagccgagatcgcgccactccactccagcctgggcgacacagcgaaactcgttctcaaa

SEQ ID NO: 75647 - DNA, 701 bp, Homo sapiens
acagggaggatttggatatatcacagaaaccaacatccagttgatgtgacgactcttctagagtccttcccacaaggaagattgtgacatttcactggtcctgaacccactcaggtgaagtgactttgctttcttctccttgacaacaggtgatgtggtgccaaatacctgagaccaaatcaaaggccttatgatgactcttgtacctggagccaggaggagcaggctggtgactctcatccctgattatttccatgggtgttattgtgacatttacctttgcccacctgttgagtgatttgataatttttcctagtaatagcccacagatgacattttaaattatacctgggtcaaaaacctcacttattttactcttgtgtcttaacagtgtcctcaaataggattctaacatatctttggacccatcatctaggttatgtgactctcctctcctgcatgaacactgcttccaatgaagagtgtagagtttgtaagcactgaatccaaatggcctgattttattgtctaggcctttcaacaggaggcaatgtgacatacgtctggcaccatcatttaggtgatatgactctcttctcctgcctggacagtctccacaagaagcattatgtcatacagctgggcccagtgcccaagttttgtgacttttctattacacgtctgtaaagaaaatattggaa

SEQ ID NO: 75648 - DNA, 544 bp, Homo sapiens
cctatctagcagggactgagtgagatggtacattgtatatttatcaaaagatgcttccagtttcaccttggcctgggcaactgcagacagtcttcttggatgatgcttgtgactcttcccgcaacacctgagtggcccctcatggttgggtacatgggtcccaaagctgagcctgaagtcgatgctgggaactgagtcaccaagggcatggatgcttccatcaaggcagacaagatttaaaaacctagtttcagtggcactaatgagaccaatagcaaacccaacctgggacgtcttaggagactggtcacaatttccatttctctctctgctcggcgtttttgcacaatcatgaagagtttggagagcaggaggaggcctcaaaaaggacatcctgagcttcttgatagtgtgtccgttgaaggcctcatcacttaattataaagaaaagttttgttattaatttgtctcctaagattaaatggatcatatttatcattaggtgctttttaaaaaataaaatttactcctatttattttgatt

SEQ ID NO: 75649 - DNA, 166 bp, Homo sapiens
ccccctctctctcttcctcctgctctggccacgtaagatgtgcctgcctccccttcaccttctgccatgattgtaagtttcttgaggcctccccaggagcagaagctgctatgcttcctgtatagcccatggaaccatgaaccaattaaaacctcttttctttatg

SEQ ID NO: 75650 - DNA, 442 bp, Homo sapiens
tggggcagtgtgagatgacgggaccagagcacgttcctggctgcagaggccacaagtcacgctgtctctgagagtggaatgtcaccatcgcccaggtggggatttttgtgtgttttgttcactgctgtacacccagcccccagcacagcgcctgtccaggacaagtgcccagtaaacacttgggaagcaatgcaagcgtcctcccagcagctcctgcaaacagacccccgacccaagcccttccttctgcctccactgccaccactgctgctcatctctgctggcacagaagtctcttccctggtcttccagaaatcccctctccacactcagccagagggagctattaaaactgcgggccagcccacatcagtccacagcaaagtcctctctaagggatctctgttgcttggagaataaaccctcggattccttccttggc

SEQ ID NO: 75651 - DNA, 378 bp, Homo sapiens
gtaattaccacttaccctggtcaatgggtccgagagattccccttgtaggcagggctgtggccagggtgctcacctggcccccaggaggtcccatgggcactgtctggccgggcttcatggctgacattccaggtcctcccagcagctcctgcaaacagacccccgacccaagcccttccttctgcctccactgccaccactgctgctcatctctgctggcacagaagtctcttccctggtcttccagaaatcccctctccacactcagccagagggagctattaaaactgcgggccagcccacatcagtccacagcaaagtcctctctaagggatctctgttgcttggagaataaaccctcggattccttccttggc

SEQ ID NO: 75652 - DNA, 1819 bp, Homo sapiens
tggggcagtgtgagatgacgggaccagagcacgttcctggctgcagaggccacaagtcacgctgtctctgagagtggaatgtcaccatcgcccaggtggggatttttgtgtgttttgttcactgctgtacacccagcccccagcacagcgcctgtccaggacaagtgcccagtaaacacttgggaagcaatgcaagcgtcctcccagcagctcctgcaaacagacccccgacccaagcccttccttctgcctccactgccaccactgctgctcatctctgctggcacagaagtctcttccctggtcttccagaaatcccctctccacactcagccagagggagctattaaaactgcgggccagcccacatcagtccacagcaaagtcctctctaagggatctctgttgcttggagaataaaccctcggattccttccttggctctcggggcctcctctctgacctccctctgtctcctctcccagccttcctcctcactcaccctccagccatgctggcttcctccttgctcctgaaacagcctgaggcccacactgccccgggccctttgcactggctgtttcctctgcctggagcacttctcctaggcatccacagggctccctcccacaactccttcgggtgcccacatgggaagccatccctgaccacccccccgacttccttctgagcaaggtagggtctttctacctagtcatgagggcagggatttttgtctgttgtgttctctgtgtgcccccagtgccatcccagtgcctggcagatggtaagtgctcgacacacattggctgactgcctgaatgaacaactctatgagccgatggcagataaggacactgaggtcctctggggtaggtgaccagcccaaggccacacagctggtctgagattaggccaggagaggagcccgggttggtcacatcctggagttggcgtcttggaaactgcatcaggagaataacaaagatgagacgcaggctctaacaagtggataccagtgactctcgccccgccagccccagccctgcagccttgggcccttccaggagtcatggtctgcctgcctggggcattccaggcttcgacccaggtcctgcactttctattttgagcctcttagtcctgaggactgtgtgttcccagcaggcggcgcgggccagaggctgagcctgggtgtggctgtcaccctatctggggccagagacccagattcccgggcccttaacctgttggctgctgagggctctggcataagccctgttccctgcttgattgtctccccttcaagcccctgccctggtatcgtatcggcccatctcaccttggattatatccctgtttggccccatttgaatcctggctctgcccctttccagcaatgtgaccttgggcaagtcacttcatctctctgggtctcagtttcttcatctgggaaatggggacaataagagtacctgtctctggccatgtgtggtgactcatgcctgtaaccccagcgctttgggaagccgaggcgagagaattgcttgagaccaggagtttgagatcagccctgggcaacatagtgagacccctgtctctacaaaattctaaaaaaattagccgggtgtggtggtgtgtgcctgtagtcccagctattctagaggctgaggcgggaggattgcttgagcccaggagtttgaggctgcagtgagctatgattatgcccctgcacatcagcctgggtgatagattgaggccccatctctaaaaataacaatactaataataaataaaaatgaaaatgagtacctgtctt

SEQ ID NO: 75653 - DNA, 813 bp, Homo sapiens
tggggcagtgtgagatgacgggaccagagcacgttcctggctgcagaggccacaagtcacgctgtctctgagagtggaatgtcaccatcgcccaggtggggatttttgtgtgttttgttcactgctgtacacccagcccccagcacagcgcctgtccaggacaagtgcccagtaaacacttgggaagcaatgcaagcgtcctcccagcagctcctgcaaacagacccccgacccaagcccttccttctgcctccactgccaccactgctgctcatctctgctggcacagaagtctcttccctggtcttccagaaatcccctctccacactcagccagagggagctattaaaactgcgggccagcccacatcagtccacagcaaagtcctctctaagggatctctgttgcttggagaataaaccctcggattccttccttggctctcggggcctcctctctgacctccctctgtctcctctcccagccttcctcctcactcaccctccagccatgctggcttcctccttgctcctgaaacagcctgaggcccacactgccccgggccctttgcactggctgtttcctctgcctggagcacttctcctaggcatccacagggctccctcccacaactccttcgggtgcccacatgggaagccatccctgaccacccccccgacttccttctgagcaaggtagggtctttctacctagtcatgagggcagggatttttgtctgttgtgttctctgtgtgcccccactggattacaatagccatctaattgggatccctgtgccagcagagatgagc

SEQ ID NO: 75654 - DNA, 533 bp, Homo sapiens
cacagctgggatgtggcagagctggggttccagctcctgttcccattgctggacagctgccacatctggcacccaatttaggaccccgcggggaggcccaagccccgggggtggcgggggatcctagaggaaagtggcaaggccaggaccctggagcagagccagtggaatgtcaccatcgcccaggtggggatttttgtgtgttttgttcactgctgtacacccagcccccagcacagcgcctgtccaggacaagtgcccagtaaacacttgggaagcaatgcaagcgtcctcccagcagctcctgcaaacagacccccgacccaagcccttccttctgcctccactgccaccactgctgctcatctctgctggcacagaagtctcttccctggtcttccagaaatcccctctccacactcagccagagggagctattaaaactgcgggccagcccacatcagtccacagcaaagtcctctctaagggatctctgttgcttggagaataaaccctcggattccttccttggc

SEQ ID NO: 75655 - DNA, 1783 bp, Homo sapiens
acagtcacatcctactgaacatcatcctgttctctgggtggaatgtcaccatcgcccaggtggggatttttgtgtgttttgttcactgctgtacacccagcccccagcacagcgcctgtccaggacaagtgcccagtaaacacttgggaagcaatgcaagcgtcctcccagcagctcctgcaaacagacccccgacccaagcccttccttctgcctccactgccaccactgctgctcatctctgctggcacagaagtctcttccctggtcttccagaaatcccctctccacactcagccagagggagctattaaaactgcgggccagcccacatcagtccacagcaaagtcctctctaagggatctctgttgcttggagaataaaccctcggattccttccttggctctcggggcctcctctctgacctccctctgtctcctctcccagccttcctcctcactcaccctccagccatgctggcttcctccttgctcctgaaacagcctgaggcccacactgccccgggccctttgcactggctgtttcctctgcctggagcacttctcctaggcatccacagggctccctcccacaactccttcgggtgcccacatgggaagccatccctgaccacccccccgacttccttctgagcaaggtagggtctttctacctagtcatgagggcagggatttttgtctgttgtgttctctgtgtgcccccagtgccatcccagtgcctggcagatggtaagtgctcgacacacattggctgactgcctgaatgaacaactctatgagccgatggcagataaggacactgaggtcctctggggtaggtgaccagcccaaggccacacagctggtctgagattaggccaggagaggagcccgggttggtcacatcctggagttggcgtcttggaaactgcatcaggagaataacaaagatgagacgcaggctctaacaagtggataccagtgactctcgccccgccagccccagccctgcagccttgggcccttccaggagtcatggtctgcctgcctggggcattccaggcttcgacccaggtcctgcactttctattttgagcctcttagtcctgaggactgtgtgttcccagcaggcggcgcgggccagaggctgagcctgggtgtggctgtcaccctatctggggccagagacccagattcccgggcccttaacctgttggctgctgagggctctggcataagccctgttccctgcttgattgtctccccttcaagcccctgccctggtatcgtatcggcccatctcaccttggattatatccctgtttggccccatttgaatcctggctctgcccctttccagcaatgtgaccttgggcaagtcacttcatctctctgggtctcagtttcttcatctgggaaatggggacaataagagtacctgtctctggccatgtgtggtgactcatgcctgtaaccccagcgctttgggaagccgaggcgagagaattgcttgagaccaggagtttgagatcagccctgggcaacatagtgagacccctgtctctacaaaattctaaaaaaattagccgggtgtggtggtgtgtgcctgtagtcccagctattctagaggctgaggcgggaggattgcttgagcccaggagtttgaggctgcagtgagctatgattatgcccctgcacatcagcctgggtgatagattgaggccccatctctaaaaataacaatactaataataaataaaaatgaaaatgagtacctgtctt

SEQ ID NO: 75656 - DNA, 928 bp, Homo sapiens
caggcaaaagctcctacggacgggagctagccctcagtccgcccgagctgtggttgtgggcgctggacaagtccaaggcgcctcctcccaatatggacagccgctacaacagcactgcgggcatcggggacttgaaccagctgagcgctgccatcccggccacgcgggtggaggtgtccgtgtcctgcagaaatcttcttgacagagacacattttctaaatctgatccaatttgtgtcttatatgtacaaggagttggaaataaagaatggagagagtttggaagaactgaagtaattgataatactttaaatcctgattttgtaagaaagtttattctggactacttttttgaagaaagagagaatcttcgttttgacttgtatgatgttgattcaaagagccccaacttatccaaacatgactttctgggacaagtgttttgtacattgggagagatcgttggttcacagggaagtcgcctggaaaaaccaatagtaggaattccagggaagaaatgtggtacaatcatacttacagcagaggaattaaactgttgcagggatgccgttttgatgcaattttgtgcgaacaaattggacaagaaggacttctttggaaaatcagatcctttccttgtattttatcgaagtaatgaagatggcagttttacaatttgtcacaagacagaagttgtcaaaaacactctaaatccagtatggcaagcattcaagatctcagtcagagcattatgtaatggagactatgacagaacaatcaaagtagaggtgtatgactgggaccgagatggaagtcatgatttcattggagaatttacaacaagctatagggaactttctagagggcagtcacaattcaacgtatatgaggtgtgatcccaaaagaaaggaaaaaaaggggtcctcta

SEQ ID NO: 75657 - DNA, 1127 bp, Homo sapiens
caggcaaaagctcctacggacgggagctagccctcagtccgcccgagctgtggttgtgggcgctggacaagtccaaggcgcctcctcccaatatggacagccgctacaacagcactgcgggcatcggggacttgaaccagctgagcgctgccatcccggccacgcgggtggaggtgtccgtgtcctgcagaaatcttcttgacagagacacattttctaaatctgatccaatttgtgtcttatatgtacaaggagttggaaataaagaatggagagagtttggaagaactgaagtaattgataatactttaaatcctgattttgtaagaaagtttattctggactacttttttgaagaaagagagaatcttcgttttgacttgtatgatgttgattcaaagagccccaacttatccaaacatgactttctgggacaagtgttttgtacattgggagagatcgttggttcacagggaagtcgcctggaaaaaccaatagtaggaattccagggaagaaatgtggtacaatcatacttacagcagaggaattaaactgttgcagggatgccgttttgatgcaattttgtgcgaacaaattggacaagaaggacttctttggaaaatcagatcctttccttgtattttatcgaagtaatgaagatggcagttttacaatttgtcacaagacagaagttgtcaaaaacactctaaatccagtatggcaagcattcaagatctcagtcagagcattatgtaatggagactatgacagaacaatcaaagtagaggtgtatgactgggaccgagatggaagtcatgatttcattggagaatttacaacaagctatagggaactttctagagggcagtcacaattcaacgtatatgagagtgcttgttcctcaaattatctggaagaattgcggaattcttcaaatctcaagatcaaacattacctttctcctccaaacaacctgctccatatttaatagaataaccattgaaccatctgaaaaatttgtgatcttgccagtgacgcccaacatccttactggtgcatgttttcctgtagaatttgttcaattagggctttctgaaatacacaataaataatacgtggaatgaat

SEQ ID NO: 75658 - DNA, 556 bp, Homo sapiens
  misc_feature (456)..(456): n is a, c, g, or t
  misc_feature (518)..(518): n is a, c, g, or t
  misc_feature (539)..(539): n is a, c, g, or t
caggcaaaagctcctacggacgggagctagccctcagtccgcccgagctgtggttgtgggcgctggacaagtccaaggcgcctcctcccaatatggacagccgctacaacagcactgcgggcatcggggacttgaaccagctgagcgctgccatcccggccacgcgggtggaggtgtccgtgtcctgcagaaatcttcttgacagagacacattttctaaatctgatccaatttgtgtcttatatgtacaaggagttggaaataaagaatggagagagtttggaagaactgaagtaattgataatactttaaatcctgattttgtaagaaagtttattctggactacttttttgaagaaagagagaatcttcgttttgacttgatgatgttgattcaaagagccccaacttatccaacatgacttttggacaaagtgtttgtcttggagagatcgntggttacaggggaagtcgctggaaaccaatagtaggacttttgctgggtccgactcgaatcnaatatggcatagctgttctgntgaaatgtatccgtaca

SEQ ID NO: 75659 - DNA, 418 bp, Homo sapiens
cctcaagcccccaaattctgtatgccttaacaaatactggaaattactctaaggaaatgaatagaataagactcagactactgcttggagcaatcagcatctctgctctttctggctatttgagtgcactggtacgggctgtcctttcttctcccaacttcccttagagcctctgaattattttctcacgaacctcatggaaatagattgctctgttaaatacattgcttaggttttagcacattaaaacataccctgttctatatgatccatgatgcaagctaaattggtgctccttctccaaagacataaaactgttttcaaagttcttaagggagacagagtgaaacagtccttgtctctgtgttttcagcgaagttgccaccatgctaccagcaagaagccatctgtgttatgt

SEQ ID NO: 75660 - DNA, 3047 bp, Homo sapiens
ggaaggaggcgggaggaggagttgccgagaggagaaggcgagcgcggcagtcgcgccggcgctgggcgaggaagcggagccgggccgcctccggaaaatggctccaaaggttaaatgaagcaggaaaaatacatagatgcagccttgcagcctctccagatgtttggggataatattccagatagaaatattgatcccttggattaggtaactagtcataatgaagaaaattagtcttaaaaccttacggaaatcttttaacttgaataaaagtaaagaagaaactgatttcatggtagtacaacaaccatcgctagccagtgactttggaaaagatgattccttatttggtagctgctatggtaaagatatggccagctgcgatatcaacggtgaagatgaaaaaggcggaaaaaacagatcaaaaagcgagagcctgatgggtacgctaaaaaggcggctttctgcaaaacagaagtcaaaaggcaaggcgggcacaccctctgggagctctgccgacgaggacaccttctcctcctcctcagcacccatagtctttaaagacgtgagagctcagaggccgataaggtccacgtcgctccgcagccatcactacagtcccgcgccgtggcctctgcggcccacaaactccgaggagacctgcatcaagatggaggtgagagtcaaggccttggttcactcttccagcccgagtccagccctgaatggcgtccggaaggatttccacgacctccagtctgagaccacgtgccaggagcaagccaattcactgaagagctcggcttctcataatggagacctgcatcttcacctggatgaacatgtgcctgtcgttattggacttatgcctcaggactacattcagtatactgtgcctttagatgaggggatgtatcctttggaaggatcacggagctattgtctggacagctcttctcccatggaagtctctgcggttcctcctcaagtgggagggcgcgctttccccgaggatgagagtcaggtagaccaggacctagttgtcgccccagagatcttcgtggatcagtccgtgaatggcttgttgattggcaccacgggagtcatgttgcagagcccgagagcgggtcacgatgatgtccctccactctcaccattgctacctccaatgcagaataatcaaatccaaaggaacttcagtggactcactggcacagaagcccacgtggctgaaagtatgcgctgtcatttgaattttgatccgaactctgctcctggggttgcaagagtttatgactcagtgcaaagtagtggtcccatggttgtgacaagccttacagaggagctgaaaaaacttgcaaagcaaggatggtactggggaccaatcacacgttgggaggcagaagggaagctagcaaacgtgccagatggttcttttcttgttcgggacagttctgacgaccgttaccttttaagcttgagctttcgctcccatggtaaaacacttcacactagaattgagcactcaaatggtaggtttagcttttatgaacagccagatgtggaaggacatacgtccatagttgatctaattgagcattcaatcagggactctgaaaatggagctttttgttattcaaggtctcggctgcctggatctgcaacttaccccgtcagactgaccaacccagtgtcccggttcatgcaggtgcgctcgttgcagtacctgtgtcgttttgttatacgtcagtataccagaatagacttaattcagaaactgcctttgccaaacaaaatgaaggattatttacaggagaagcactactgaaagattgagaaccctgcatcttgcactttgggaataagaacaagagattgaaatacagtttacaaactttcattgccatcaaaatcttttgctgccataactatttcagttttatgtgtaaaagagtcatcagtttgtttaggggtggggaagtgtcagcaaggtgtcttgggtttattttggttctttaaaaaagggaagtcttgaggttttagaggtgtgaattatgtttcatcaatgtgcagaataatcacaatgtgaattatcaaattctcctcaatgccccccccgcccagtcctttgctgctatccactgtgatttttatgcattaaaagcacatttcatgtgtattcaaccctaagtaaagttgaatgaaacttaacagaatggaaattgctatgtctttttaaatggtccattttcaaaagacagtgttgaataaacatacctgtgtgataaaacacagaatttacatatacactgaagatgagtttttaatctcttactttaaaaagatttatttagaatcgtgaattgacataatcttgggtaatggaacggagatctgcaacatatcttttaacaacacttttttctaaattatttctaaggttgtgctaattcttttggttgtgaaaagttgaatttttctgttgccttcgttttcatcttctagtttgtctattttaataaatggccttacattaaaaaattgtaaagaaatgtataccaccaatttagaaattgttgccttttctgtaattaaactcgggtacaaattggcataacatgaaaacctatggaactagaattattattaaagaaatattagatgatcatagcttcctgtgatagcatttttttgtgtgttacctatccttttggtaaaatgttttatctgtgatttctttagcttagtcaacattttcttgggtgaacttgattgtcaactaattttcataaatggactggattctcttgcaacattaatgtttataaaaagttttaaattgatttgaatagaaagaaaacattgttttaaagttggatttatatttttcttctatgtagttactataaaagtgtgctggatttgaccaatccttacccccactataaagagaacccgtgatgactttagtttaaaaattgtggaaattgtggagcaatttttctcacaatgtgagaaaaattctaaaccatattagataatgtgga

SEQ ID NO: 75661 - DNA, 3003 bp, Homo sapiens
gcttgcagtgagccgagatcacgccactgcactccagcctgggcgaaagaaaaatggctccaaaggttaaatgaagcaggaaaaatacatagatgcagccttgcagcctctccagatgtttggggataatattccagatagaaatattgatcccttggattaggtaactagtcataatgaagaaaattagtcttaaaaccttacggaaatcttttaacttgaataaaagtaaagaagaaactgatttcatggtagtacaacaaccatcgctagccagtgactttggaaaagatgattccttatttggtagctgctatggtaaagatatggccagctgcgatatcaacggtgaagatgaaaaaggcggaaaaaacagatcaaaaagcgagagcctgatgggtacgctaaaaaggcggctttctgcaaaacagaagtcaaaaggcaaggcgggcacaccctctgggagctctgccgacgaggacaccttctcctcctcctcagcacccatagtctttaaagacgtgagagctcagaggccgataaggtccacgtcgctccgcagccatcactacagtcccgcgccgtggcctctgcggcccacaaactccgaggagacctgcatcaagatggaggtgagagtcaaggccttggttcactcttccagcccgagtccagccctgaatggcgtccggaaggatttccacgacctccagtctgagaccacgtgccaggagcaagccaattcactgaagagctcggcttctcataatggagacctgcatcttcacctggatgaacatgtgcctgtcgttattggacttatgcctcaggactacattcagtatactgtgcctttagatgaggggatgtatcctttggaaggatcacggagctattgtctggacagctcttctcccatggaagtctctgcggttcctcctcaagtgggagggcgcgctttccccgaggatgagagtcaggtagaccaggacctagttgtcgccccagagatcttcgtggatcagtccgtgaatggcttgttgattggcaccacgggagtcatgttgcagagcccgagagcgggtcacgatgatgtccctccactctcaccattgctacctccaatgcagaataatcaaatccaaaggaacttcagtggactcactggcacagaagcccacgtggctgaaagtatgcgctgtcatttgaattttgatccgaactctgctcctggggttgcaagagtttatgactcagtgcaaagtagtggtcccatggttgtgacaagccttacagaggagctgaaaaaacttgcaaagcaaggatggtactggggaccaatcacacgttgggaggcagaagggaagctagcaaacgtgccagatggttcttttcttgttcgggacagttctgacgaccgttaccttttaagcttgagctttcgctcccatggtaaaacacttcacactagaattgagcactcaaatggtaggtttagcttttatgaacagccagatgtggaaggacatacgtccatagttgatctaattgagcattcaatcagggactctgaaaatggagctttttgttattcaaggtctcggctgcctggatctgcaacttaccccgtcagactgaccaacccagtgtcccggttcatgcaggtgcgctcgttgcagtacctgtgtcgttttgttatacgtcagtataccagaatagacttaattcagaaactgcctttgccaaacaaaatgaaggattatttacaggagaagcactactgaaagattgagaaccctgcatcttgcactttgggaataagaacaagagattgaaatacagtttacaaactttcattgccatcaaaatcttttgctgccataactatttcagttttatgtgtaaaagagtcatcagtttgtttaggggtggggaagtgtcagcaaggtgtcttgggtttattttggttctttaaaaaagggaagtcttgaggttttagaggtgtgaattatgtttcatcaatgtgcagaataatcacaatgtgaattatcaaattctcctcaatgccccccccgcccagtcctttgctgctatccactgtgatttttatgcattaaaagcacatttcatgtgtattcaaccctaagtaaagttgaatgaaacttaacagaatggaaattgctatgtctttttaaatggtccattttcaaaagacagtgttgaataaacatacctgtgtgataaaacacagaatttacatatacactgaagatgagtttttaatctcttactttaaaaagatttatttagaatcgtgaattgacataatcttgggtaatggaacggagatctgcaacatatcttttaacaacacttttttctaaattatttctaaggttgtgctaattcttttggttgtgaaaagttgaatttttctgttgccttcgttttcatcttctagtttgtctattttaataaatggccttacattaaaaaattgtaaagaaatgtataccaccaatttagaaattgttgccttttctgtaattaaactcgggtacaaattggcataacatgaaaacctatggaactagaattattattaaagaaatattagatgatcatagcttcctgtgatagcatttttttgtgtgttacctatccttttggtaaaatgttttatctgtgatttctttagcttagtcaacattttcttgggtgaacttgattgtcaactaattttcataaatggactggattctcttgcaacattaatgtttataaaaagttttaaattgatttgaatagaaagaaaacattgttttaaagttggatttatatttttcttctatgtagttactataaaagtgtgctggatttgaccaatccttacccccactataaagagaacccgtgatgactttagtttaaaaattgtggaaattgtggagcaatttttctcacaatgtgagaaaaattctaaaccatattagataatgtgga

SEQ ID NO: 75662 - DNA, 514 bp, Homo sapiens
atggtcctgttagaaaaggaaaacttctgttatatttctaattgtatctctggtagagtagagtagggctaagtgcaaagtggcacaaatttgcaacagaaaaggaactattttacgttcttttgaataggtaatgcattcacatggttcaaaattgggaaaataaaaatgtctcttatccttgcctcccaggtactcagttcccttccatggaggcaaggtagtcttttgtgtcaccttccagagctattctataaacatataagcaaaaaagaaaatgattaggctgggtgtggtagctcacgcctgtaatcctagcactttgggaggctgatacgggaggattgcttgagaccaggagtttgagaccagcctgggtgacagacatagtgagactgtctcttaaaaaaaaaaaagaaagaaaagaaaaaacaattaaaaaaaattatatctcaataaagcagttttgtaaaaaaaaaaaaaaaaaaaaaacccaaactatttctatagtata

SEQ ID NO: 75663 - DNA, 465 bp, Homo sapiens
agatcaaggtgctgatctggtgtctggggagggcctgctttctggttcagagatagtgtcttcttgcagtggcctcacatggcagaaggggtgagctgactcccttgggtctctttcataaaggcactaatactattcataagagttccactctcatgacctgatcacctctcaaaagttcccatctacaaatactatcacattgggggtaaggtctcaacatataaattttgtggggacacagacattcaaaccatagcagggtgcaaaataaaataatcataacaagaaagggattttggctatgaaaaagcagaatagttgaaagtaagtattcaaaagaaaagatagaaaataattgatgaccatagtacaaaaagatggaaaaatgtgagagagaggaaaatctgaggattcattctgaaagtccaacatccagcaagaatggagggcaggaaattatca

SEQ ID NO: 75664 - DNA, 685 bp, Homo sapiens
cctccccagtggacccaaaccagcgcatacttggtgtgtggagatgggagacaaaggacagatctaggagccttgaaggatcaccagccaccgaccctccatcagggccaactgggcaggaaagggaacattgcagacctgatttcccgacgatgtcaccctgtcctccctccttgcttcttgctctgctaactcaactctgccttcctctttttcattcttctactctgccctatatggaggacaaatggacaccaggggtgctaaccttattggtgcctgccccagcctaccccaggtgccagcagactctcgtgcacaggaggctcccacagttatggagccaggaaagaatttctctgcactggatggactgtatattgagattaaaaattatattccttatattcctgcttatatcaatgctctctctgtaaaacctcttcctagcctcatttctctcaactgatcttgtttaggcgttgtattccttttatttactctttgcttgactgcttcctcctaaccctctacccactagcactctacttcctaaagctgttgtgtcattaactctgttggatcaactctctgggaaaagattctgttaatgtaagtgcacttactccctggatgttgtcactagtctagtggcttttgctaaataaacctttcttatttctag

SEQ ID NO: 75665 - DNA, 1037 bp, Homo sapiens
tgattcctgtgcctcagcctcctgagtagctgggattacaggcgcacatcaccatgcctggctaatttttgtgttttcagtagagacgggattttgccatgttggccaggctggtctggaactcctgacctcaagtgatccagctgctccagcctcccaaagtgctgggattacaggcgtgagccaccacacccggcctagcacccgttttttaataggagaattatagaatcatttgctctgcttactttattcaaatgttcttctgaagcaataaacccattcattttgtcaaaaaaaaaaaaaaaaaaaaaaaaaaaaaaaaaaaaaaaaaaaaaaaaaaaaaaaaaaaacaaaaaaaaaaaaaaaaaaaaaaaaaaaaaaaaaaaaaaaaaaaaaaaaaaaaaaaaaaaaagaaaggagggggggggcggcgaaaactcccccgcgggggggccaacccccctatttaacaggcgccctccaataagtgagtctattaatttaactaagccagcgcggcgcggtcataacaaacagacgtgctgagaaggcaaacacacaccccaagccagctaggtcgtgtgatgaaaggccaccaccacctatgcgggggggatgacacagtagggacccccaaccatacagtagtaactaccagcacggggaaaaaaaaaagcaagtatgtatgtgggtacaaaacccgccctaatgagtcgagtggacacaaagtctggctgtggctttatttttctcttatactatcttctagcgtgcttctgtctccattatacataagccccttagccactactaacaggactaagtcgaatagcagacgaatgcacacgtagacacagactgagaacggtagtaacgatcaatatcagtaagaaaaactgaaacacacaaggaggcaagaaataacatatcacgaccgcatagaacaagctgaacactcaagacacaacaaaaacatcagactatgacgtacagtacaaatagctaaagtaaacgcatgagagatacgagaacag

SEQ ID NO: 75666 - DNA, 458 bp, Homo sapiens
tgattcctgtgcctcagcctcctgagtagctgggattacaggcgcacatcaccatgcctggctaatttttgtgttttcagtagagacgggattttgccatgttggccaggctggtctggaactcctgacctcaagtgatccagctgctccagcctcccaaagtgctgggattacaggcgtgagccaccacacccggcctagcacccgttttttaataggagaattatagaatcatttgctctgcttactttattcaaatgttcttctgaagcaataaacccattcattttgtcaaccaaattgttgaaattagttctaccagaaccaattgttttattgatatgaaaggaaagtttggttttttttccccctttttttttgagacagagcctcactctgtcacccaggctatggtacagtattgcaatctcagctcactgcaacctctgcctcctgag

SEQ ID NO: 75667 - DNA, 396 bp, Homo sapiens
cccttgctttcgtctcccctgttgtgcttgaattttcctagagactcctgacatagggactgaggcttgcaattctttgagctgtaatcccttgttatttacttggagcatcgttgctgtgttggtactgtgtcgggggagagaaagaattctacagccctgtgattagatctgtctttcagtgagcctgagttgggtatttccctttcccaggtcgatgaggcccctggtaaaacccccgtgggatgggttcttgtaaagtattttcccttgaaggaaatccttcttaaggagaacagagagctctgggcttattccaacacggctatttctccgccccaacccctcaaccccaaagggaaagaggagaggatttttcttcaggttccatagtgg

SEQ ID NO: 75668 - DNA, 508 bp, Homo sapiens
tcgattaccctcccaagagtgaaagtgatccacacgggcatgatttgcttggattttggcgcaatgcctgcatttcagagaagcatgagcacaaacaaggtctggagacaatagttcctgttctgagtgaaccatgaacttaaaaaaaaaaaaatactgtctctctcagagcctcagtttccatgtctgtgaaatgggagcagtggtcataataggtggtgagcatcaaaagaagccatgtgggctgggcacagtggctcacgcatataatcccagaactttgggaggccatggcggcagggtcgcttgagcccaggagttccaacatcagccctggaaacagagcaagaccccatctctacaaaaaacaaacaaaattagccaggcatggtggtgtgtgcctgtaatcccagcaacttggaaggctgagtttggaggattacttgaacctgagagttcaaggctatagtgagacatgatcatgccactgcactccagcctgggcaac

SEQ ID NO: 75669 - DNA, 519 bp, Homo sapiens
gatgtcatgtcacttataacccaatgtcctttgaaagatctctttttttaagttctgtgggtttgaatatttcccactggaggagggtctctggaaacctcaggagtctaaggaataactccgcctgattcttaaaagctagtcacgtgtgctaacattggtttccagaactcagcgtcttgactcattggacaggcattttccctctgtgtgtctgtggagactgttgtgaaggaggatccccttaggatttgtgattatttttattttattaatttaatttaatttttttcatttttaaaatttattttattatttattatttactttattttctttgagacctagtttcactctgtcacccagactggggtgcagtggtgcaatcttggctcactgcaacttttgccccccaggagaatcgcttgaacctgggaggcgtaggttgcagtgagccgagatcacaccactgtactccagcctgggctacaagagcgaaactccatttcaaaaaaaaaa

SEQ ID NO: 75670 - DNA, 407 bp, Homo sapiens
caaaacaaacacagttagtaagtaaaatgagtgcatgtgattttttttaaaggaaactatcaaattattctaaatataaaaattttaaacgaaatttaaaacagtgagacttggccgggcactgtggctcacacctgtcatcccagcactttgggaggccgaggcaggtgtatcacttgaggtcagaagtttgagaccagcctggccaacatggtgaaaccccatctctactaaaaatacaaaaaaattagccgggcgtggtggtgggtgcctgtaatcccagctactcgggaagctcaggcaggagaatcgcttgaacctgggaggcgtaggttgcagtgagccgagatcacaccactgtactccagcctgggctacaagagcgaaactccatttcaaaaaaaaaa

SEQ ID NO: 75671 - DNA, 800 bp, Homo sapiens
ttggttgggtgggtgggttttctaaataggtatcaagacaatgggtcaggtaacatttggttcaaatgaatacaagtatataaaagggtttattctggaaacactgcccactgtatcccttaacagaagtattttacaaaatctggtccacggaccacctacttcagaatcagcagtgaaaaatgtagattcctgggcccaaccccaggtgtagtgaatcagaatctctggggatagaacaaagcttttgctatttaacaactctaaataattctgcatactctgatgttccaaaacaaccaggaggtggggatatttgtctcttcctctgcctaccttatctttgcatgtcaaattctgcagctcctattacctaccatactttctctttaggcctctgagaaaaccttgaaacagggtcagtaagtaggcaagggtttgaggttttaaggagctcccaatccctctattgtttggagggcatttggtccatcagaaccaggttgccactccttgtttacctgtcttacgttgcccgtcatggcaaagcagtagacgtcagagactccaggcaagtggaacactaaaaatataacaaacatggaaaactacaagccacttaatatttgcaaaacaaattgatgttctttgaaaggaaaatatccattgtagaagatgagaagtaaacattctgtacagtgtttataatagaccacctatggctacaatggtcatgatctcaccctacgtttctccgggaaataacattaccaggatatgctaagtattatgtggatggg

SEQ ID NO: 75672 - DNA, 362 bp, Homo sapiens
aaagatgttgttccactgtcttctggtctccattatttttctgatgagaagacatcaatcattcaaatcacaattcccttatatgtaatgtgtcatttttctctgacagctttcaaaatatctttagttttctgcaacttgctgacaatgtgccaggtgtgtgcaatgcaattctgacattacctagagtgaggtcaaatttcacaagttaagggtacagtcttccataagagctcccttattttgttataggtagttaggcatgagtggggcacgtgagggctctcccccagccactaggaatgtcaggtgatggttcagcaattatcacattgactctctaaaagtgacaaattggtagc

SEQ ID NO: 75673 - DNA, 403 bp, Homo sapiens
gactattacatattttggaaatatttttaaacaattaagaaaaaagtgataaaaaatttccttattaaattagcaaagatccaaaatgaaagattatcccaatatttttgttaaatagatactttttttgttagacactgctggtgggaatataaatacaatgtttcttagtataatgtttctaaagggcaaattgttagagaagtctgagaacaaatgctctgccttttttaagaattgacagataaaatggtatgtatttttcatgtacaacatgatgttttaaagtatttgcacattgtggaatggttaaatttagccagttacctcacagaggtttttttgtgtgtgaaaacacttaatatccactttctttgcatttttcaagaatacagtatattgt

SEQ ID NO: 75674 - DNA, 276 bp, Homo sapiens
  misc_feature (206)..(206): n is a, c, g, or t
  misc_feature (219)..(219): n is a, c, g, or t
aaattaacaagataaacctcagaaacgttacaaatatatgaaaattaaaatacagactgctgaacaactaatgtgtaagtgaagaaattgaaaggaaaattaaaaaaaacaagacaaagataaaaacaaacaaaattcgtcgggcgtagtaatgcatatctgtaatccccgctactcgggaggctgaggcaggcgaatcgctggancctgcgaggtganggttgccttgagccaagatagcaccactgcactctgccttcaaaaacagaaccaaca

SEQ ID NO: 75675 - DNA, 877 bp, Homo sapiens
accgggcaagtctctgcggggtgggaccctgtcccaggacgcaggattggcgctgagctcgggatctctgtgtgcacctgcatcgctggtaggaggacgcccaggaaccaaggagtgaggcaggagcagcccccggcatcatcactcccagtgacccaggaagggatttgtgcttttttccctgcggctctgggcactgcagagttagaggtcctggtccccggggatggagggagggggtatatcagcgggcacagagcatgtccagtgacgcacaaaccacggctgccctctggtgcgtcgggttccttgtggggggatcaccaggcaggagagagcaccaccgtcctggcaggtacaacagaccccagccagagggtggaggcggggccgcggctgcacagggggcatgtggggaattcaggtgatctgcgtggacacctcatggtggccctggccagctgtcactaaatgggcagctacggcaggccccgctggacatggcatggtggcagggtgccagagccctcggtaggaaggactgggtcacagcactaagtgaactgctgttgtctgcagagacataactgagggtgagggtccgggctgggtaatggaaggagggggaaacggctcaagggggctagcatgggcgcagcagccactgcactggggccatgatcacagagtcattgcccagaagcatagctccggggcactgggccatgctcgtgacttggtgaatgagtgaatgggtgagtgaatgagcttcacagatttccacagtgaagagaacccttagagtgtctgatccgcccctccatttgcaaagcacagatctggaaactggacggccccaaactgagtccaagtcctg

SEQ ID NO: 75676 - DNA, 318 bp, Homo sapiens
  misc_feature (307)..(307): n is a, c, g, or t
aggtagacactaaaaataacttctgagcatttatattaactttaccctacctataacatggttatcctgcaatatgtaaatatactatttctttacacagaattaaaggccatctcatttgtaattagagccaaaaagagcaaagtaattttacatataatttggtacacatccttacagctataaatactgaaaaggaattagtagtgtctacctagaaaaataacttctgagaagatgatttctatgaagataaacattaaggaaatcttcagaaaagggaaaaccctgtcctactttatggtgntggaattctct

SEQ ID NO: 75677 - DNA, 479 bp, Homo sapiens
tgattgcctgtctcaccaccagtttctctccttactactgcagctgggtatttaagtagctctttatttaaaaaatggaaatgaacagatatagtctttcttttccctgggcagttgctgactctggattcctctgtggaatattatactcttaagaactatctgtagatgactctccttttgcaaaggcaaagcagaaattaattaaccattaaccaaataatcacattggcatcatccacagaattgtaatattctctggggcacaggatacttcttttttcatccccacgcccattataaataccttttatacatgcatgcagaatgaaaaaggaccatgggcccatgtcagtattttcagcttcacccaacactaaaatagcaactatttccagtcattttttgcatacaaaagacacacatacacagtaaatttggggggagcaggttgttgcttttataaactgcatggtatg

SEQ ID NO: 75678 - DNA, 403 bp, Homo sapiens
aatcttagttcagttatcaccacatgataatctgattctcagtcagcctgtgtcttcacctcttccactaagtggtggcaagttttcaacactactgcagaatttaggccctgaaaatgctgtgacactactggtgtttgcagtaacagaacataaaattcttatccattccctacggccatccgtgcttactagtgtgacagaagcattagtgtctatgattttccctttccactggccatgcccgtatgttcctctctgcccactggctttagcagatgtcttgagtgcaccatgtccattcatagtagggattgattcaagatactttgatctctatgatcctccaccagatgtcagttgtgttgatgtagataccaacactatttctcagattggtaca

SEQ ID NO: 75679 - DNA, 204 bp, Homo sapiens
atttttaaaagcagtttgcttaaaatagagtatgtaagccagatttactttgtgactgttttttaaatgcagaataaaacatgccattactgaagaacatggacaaactgctccagagtatatgttcttcgtttacagaatggaaagctaaagcaggaacatgcaatatgaatttatattataaataaacaaattactgctttt

SEQ ID NO: 75680 - DNA, 273 bp, Homo sapiens
cacaaatcatctaacccctgaagaaaagcatttcctcccaggggcatctttccatctctgagtcctgttgtgcctgctgacactagcaaactctcattccccatctgaatgaggcatttttatttttgaagatggcctatttggaaaatccctaaaacagtgtttcccaaacccaggatctgtggcccactgagggtttgttgttatattcttaagtgtctacaagaagtttatatgtacgttcatattcctaagcttttaaaaaacaaacag

SEQ ID NO: 75681 - DNA, 387 bp, Homo sapiens
tttttgtgttgtgtgtagagactgggttttgccatgtgcccaggctggtcttgaactcctcggcttaagcgatcctcctgccttgacttcacaaagtgcttgagttacaggtgtgagctaccacgcctggccatgttttcttgtgtgaaggatctgtttagttttatatctttctgtggctcatatctaatttagttgacagtacctgtgggtcactaggtagacattgctagcagacgtttagaaatgaaatactagagcttgggaaaaagttgatatttgagatagagacttgaagaacattagcagagagttggtagttaaggtctgtgagctggtgagcaattcaaataaaagcagaagagaagaggaagacaagggtcaaac

SEQ ID NO: 75682 - DNA, 318 bp, Homo sapiens
aaaaaagtgcaagacttatatattgaaaactgcaagatactgttgaaagaaattgttaaagacctaaacgaatggaaagacatcctgtattcatgaaatggaagatttagcattgttcaaatggcaatatctttgcaaagcaatctgtagattaagtacaatctctatagaattcaacctgtcttttttgcagaaatgaatagggaacccagaatagccaaaataatttttttaaagatttcttatttcaaaacttactacagagctatagtaaccaaaatgttgtgatacaggcataaagacagacataaagaccaa

SEQ ID NO: 75683 - DNA, 1350 bp, Homo sapiens
  misc_feature (18)..(18): n is a, c, g, or t
  misc_feature (75)..(75): n is a, c, g, or t
  misc_feature (90)..(90): n is a, c, g, or t
  misc_feature (328)..(328): n is a, c, g, or t
  misc_feature (332)..(333): n is a, c, g, or t
ggcgcacccaccccagangccgcctggcaccaagcgcaccgccgctgccgcactttccacttgtattgatcaccnctcagccccgcgcancggctcgcccgagcggaccgcggccagcgcgccacccttggcagccccggagcagtcgggctccgggaggaaacaccttgggagcgccctgtccggggtgccctctgcgctctgcagtgtctttctttctgcctgggaggaggaggaggaggaggaagaggaggaggaggaggaggaggaggaggaggaagaggaggaggaggaggaggacgtctggtcccggctgggaggtggacancggnngcagcagcagccgccgccgccgccgccgctgccgccgccgccggaaagggagaggcaggagagcccgagacttggaaaccccaaagtgtccgcgaccctgcacggcaggctcccttccagcttcatgggcaaagtgtggaaacagcagatgtaccctcagtacgccacctactattacccccagtatctgcaagccaagcagtctctggtcccagcccaccccatggcccctcccagtcccagcaccaccagcagtaataacaacagtagcagcagtagcaactcaggatgggatcagctcagcaaaacgaacctctatatccgaggactgcctccccacaccaccgaccaggacctggtgaagctctgtcaaccatatgggaaaatagtctccacaaaggcaattttggataagacaacgaacaaatgcaaaggttatggttttgtcgactttgacagccctgcagcagctcaaaaagctgtgtctgccctgaaggccagtggggttcaagctcaaatggcaaagcaacaggaacaagatcctaccaacctctacatttctaatttgccactctccatggatgagcaagaactagaaaatatgctcaaaccatttggacaagttatttctacaaggatactacgtgattccagtggtacaagtcgtggtgttggctttgctaggatggaatcaacagaaaaatgtgaagctgttattggtcattttaatggaaaatttattaagacaccaccaggagtttctgcccccacagaacctttattgtgtaagtttgctgatggaggacagaaaaagagacagaacccaaacaaatacatccctaatggaagaccatggcatagagaaggagaggtgagacttactggaatgacacttacttacgacccaactacagctgctatacaaaacggattttatccttcaccatacagtattgctacaaaccgaatgatcactcaaacttctattacaccctatatgtatctcctgtatctgcc

SEQ ID NO: 75684 - DNA, 914 bp, Homo sapiens
aggaaggattacactgttccagtttttagggagaaaggtttaccaaaccgatggccttaaatgattttcgctccttgatattatcatcttgaaggacagtctctggtcccagcccaccccatggcccctcccagtcccagcaccaccagcagtaataacaacagtagcagcagtagcaactcaggatgggatcagctcagcaaaacgaacctctatatccgaggactgcctccccacaccaccgaccaggacctggtgaagctctgtcaaccatatgggaaaatagtctccacaaaggcaattttggataagacaacgaacaaatgcaaaggttatggttttgtcgactttgacagccctgcagcagctcaaaaagctgtgtctgccctgaaggccagtggggttcaagctcaaatggcaaagcaacaggaacaagatcctaccaacctctacatttctaatttgccactctccatggatgagcaagaactagaaaatatgctcaaaccatttggacaagttatttctacaaggatactacgtgattccagtggtacaagtcgtggtgttggctttgctaggatggaatcaacagaaaaatgtgaagctgttattggtcattttaatggaaaatttattaagacaccaccaggagtttctgcccccacagaacctttattgtgtaagtttgctgatggaggacagaaaaagagacagaacccaaacaaatacatccctaatggaagaccatggcatagagaaggagaggtgagacttactggaatgacacttacttacgacccaactacagctgctatacaaaacggattttatccttcaccatacagtattgctacaaaccgaatgatcactcaaacttctattacaccctatatgtatctcctgtatctgcc

SEQ ID NO: 75685 - DNA, 3207 bp, Homo sapiens
atttctcaggagaacttatggcttcagaatcacagctcggtttttaagatggacataacctgtacgaccttctgatgggctttcaactttgaactggatgtggacacttttctctcagatgacagaattactccaacttcccctttgcagttgcttcctttccttgaaggtagctgtatcttattttctttaaaaagctttttcttccaaagccacttgccatgccgaccgtcattagcgcatctgtggctccaaggacagcggctgagccccggtccccagggccagttcctcacccggcccagagcaaggccactgaggctgggggtggaaacccaagtggcatctattcagccatcatcagccgcaattttcctattatcggagtgaaagagaagacattcgagcaacttcacaagaaatgtctagaaaagaaagttctttatgtggaccctgagttcccaccggatgagacctctctcttttatagccagaagttccccatccagttcgtctggaagagacctccggaaatttgcgagaatccccgatttatcattgatggagccaacagaactgacatctgtcaaggagagctaggggactgctggtttctcgcagccattgcctgcctgaccctgaaccagcaccttcttttccgagtcataccccatgatcaaagtttcatcgaaaactacgcagggatcttccacttccagttctggcgctatggagagtgggtggacgtggttatagatgactgcctgccaacgtacaacaatcaactggttttcaccaagtccaaccaccgcaatgagttctggagtgctctgctggagaaggcttatgctaagctccatggttcctacgaagctctgaaaggtgggaacaccacagaggccatggaggacttcacaggaggggtggcagagttttttgagatcagggatgctcctagtgacatgtacaagatcatgaagaaagccatcgagagaggctccctcatgggctgctccattgatgatggcacgaacatgacctatggaacctctccttctggtctgaacatgggggagttgattgcacggatggtaaggaatatggataactcactgctccaggactcagacctcgaccccagaggctcagatgaaagaccgacccggacaatcattccggttcagtatgagacaagaatggcctgcgggctggtcagaggtcacgcctactctgtcacggggctggatgaggtcccgttcaaaggtgagaaagtgaagctggtgcggctgcggaatccgtggggccaggtggagtggaacggttcttggagtgatagatggaaggactggagctttgtggacaaagatgagaaggcccgtctgcagcaccaggtcactgaggatggagagttctggatgtcctatgaggatttcatctaccatttcacaaagttggagatctgcaacctcacggccgatgctctgcagtctgacaagcttcagacctggacagtgtctgtgaacgagggccgctgggtacggggttgctctgccggaggctgccgcaacttcccagatactttctggaccaaccctcagtaccgtctgaagctcctggaggaggacgatgaccctgatgactcggaggtgatttgcagcttcctggtggccctgatgcagaagaaccggcggaaggaccggaagctaggggccagtctcttcaccattggcttcgccatctacgaggtagatgcacgggaacaagcagcacctgcagaaggacttcttcctgtacaacgcctccaaggccaggagcaaaacctacatcaacatgcgggaggtgtcccagcgcttccgcctgcctcccagcgagtacgtcatcgtgccctccacctacgagccccaccaggagggggaattcatcctccgggtcttctctgaaaagaggaacctctctgaggaagttgaaaataccatctccgtggatcggccagtgcccatcatcttcgtttcggacagagcaaacagcaacaaggagctgggtgtggaccaggagtcagaggagggcaaaggcaaaacaagccctgataagcaaaagcagtccccacagccacagcctggcagctctgatcaggaaagtgaggaacagcaacaattccggaacattttcaagcagatagcaggagatgacatggagatctgtgcagatgagctcaagaaggtccttaacacagtcgtgaacaaacacaaggacctgaagacacacgggttcacactggagtcctgccgtagcatgattgcgctcatggatacagatggctctggaaagctcaacctgcaggagttccaccacctctggaacaagattaaggcctggcagaaaattttcaaacactatgacacagaccagtccggcaccatcaacagctacgagatgcgaaatgcagtcaacgacgcaggattccacctcaacaaccagctctatgacatcattaccatgcggtacgcagacaaacacatgaacatcgactttgacagtttcatctgctgcttcgttaggctggagggcatgttcagagcttttcatgcatttgacaaggatggagatggtatcatcaagctcaacgttctggagtggctgcagctcaccatgtatgcctgaaccaggctgggcctcatccaaagccatgcaggatcactccaggatttcagtttcaccctctatttccaaagccatttacctcaaaggacccagcagctacacccctacaggcttccaggcacctcatcagtcatgttcctcctccattttaccccctacccatccttgatcggtcatgcctagcctgaccctttagtaaagcaatgaggtaggaagaacaaacccttgtccctttgccatgtggaggaaagtgcctgcctctggtccgagccgcctcggttctgaagcgagtgctcctgcttaccttgctctaggctgtctgcagaagcacctgccggtggcactcagcacctccttgtgctagagccctccatcaccttcacgctgtcccaccatgggccaggaaccaaaccagcactgggttctactgctgtggggtaaactaactcagtggaatagggctggttactttgggctgtccaactcataagtttggctgcattttgaaaaaagctgatctaaataaaggcatgtgtatggctggtc

SEQ ID NO: 75686 - DNA, 2949 bp, Homo sapiens
atttctcaggagaacttatggcttcagaatcacagctcggtttttaagatggacataacctgtacgaccttctgatgggctttcaactttgaactggatgtggacacttttctctcagatgacagaattactccaacttcccctttgcagttgcttcctttccttgaaggtagctgtatcttattttctttaaaaagctttttcttccaaagccacttgccatgccgaccgtcattagcgcatctgtggctccaaggacagcggctgagccccggtccccagggccagttcctcacccggcccagagcaaggccactgaggctgggggtggaaacccaagtggcatctattcagccatcatcagccgcaattttcctattatcggagtgaaagagaagacattcgagcaacttcacaagaaatgtctagaaaagaaagttctttatgtggaccctgagttcccaccggatgagacctctctcttttatagccagaagttccccatccagttcgtctggaagagacctccggaaatttgcgagaatccccgatttatcattgatggagccaacagaactgacatctgtcaaggagagctaggggactgctggtttctcgcagccattgcctgcctgaccctgaaccagcaccttcttttccgagtcataccccatgatcaaagtttcatcgaaaactacgcagggatcttccacttccagttctggcgctatggagagtgggtggacgtggttatagatgactgcctgccaacgtacaacaatcaactggttttcaccaagtccaaccaccgcaatgagttctggagtgctctgctggagaaggcttatgctaagctccatggttcctacgaagctctgaaaggtgggaacaccacagaggccatggaggacttcacaggaggggtggcagagttttttgagatcagggatgctcctagtgacatgtacaagatcatgaagaaagccatcgagagaggctccctcatgggctgctccattgatacaatcattccggttcagtatgagacaagaatggcctgcgggctggtcagaggtcacgcctactctgtcacggggctggatgaggtcccgttcaaaggtgagaaagtgaagctggtgcggctgcggaatccgtggggccaggtggagtggaacggttcttggagtgatagatggaaggactggagctttgtggacaaagatgagaaggcccgtctgcagcaccaggtcactgaggatggagagttctggatgtcctatgaggatttcatctaccatttcacaaagttggagatctgcaacctcacggccgatgctctgcagtctgacaagcttcagacctggacagtgtctgtgaacgagggccgctgggtacggggttgctctgccggaggctgccgcaacttcccagatactttctggaccaaccctcagtaccgtctgaagctcctggaggaggacgatgaccctgatgactcggaggtgatttgcagcttcctggtggccctgatgcagaagaaccggcggaaggaccggaagctaggggccagtctcttcaccattggcttcgccatctacgaggtagatgcacgggaacaagcagcacctgcagaaggacttcttcctgtacaacgcctccaaggccaggagcaaaacctacatcaacatgcgggaggtgtcccagcgcttccgcctgcctcccagcgagtacgtcatcgtgccctccacctacgagccccaccaggagggggaattcatcctccgggtcttctctgaaaagaggaacctctctgaggaagttgaaaataccatctccgtggatcggccagtgccacagcctggcagctctgatcaggaaagtgaggaacagcaacaattccggaacattttcaagcagatagcaggagatgacatggagatctgtgcagatgagctcaagaaggtccttaacacagtcgtgaacaaacacaaggacctgaagacacacgggttcacactggagtcctgccgtagcatgattgcgctcatggatacagatggctctggaaagctcaacctgcaggagttccaccacctctggaacaagattaaggcctggcagaaaattttcaaacactatgacacagaccagtccggcaccatcaacagctacgagatgcgaaatgcagtcaacgacgcaggattccacctcaacaaccagctctatgacatcattaccatgcggtacgcagacaaacacatgaacatcgactttgacagtttcatctgctgcttcgttaggctggagggcatgttcagagcttttcatgcatttgacaaggatggagatggtatcatcaagctcaacgttctggagtggctgcagctcaccatgtatgcctgaaccaggctgggcctcatccaaagccatgcaggatcactccaggatttcagtttcaccctctatttccaaagccatttacctcaaaggacccagcagctacacccctacaggcttccaggcacctcatcagtcatgttcctcctccattttaccccctacccatccttgatcggtcatgcctagcctgaccctttagtaaagcaatgaggtaggaagaacaaacccttgtccctttgccatgtggaggaaagtgcctgcctctggtccgagccgcctcggttctgaagcgagtgctcctgcttaccttgctctaggctgtctgcagaagcacctgccggtggcactcagcacctccttgtgctagagccctccatcaccttcacgctgtcccaccatgggccaggaaccaaaccagcactgggttctactgctgtggggtaaactaactcagtggaatagggctggttactttgggctgtccaactcataagtttggctgcattttgaaaaaagctgatctaaataaaggcatgtgtatggctggtc

SEQ ID NO: 75687 - DNA, 3258 bp, Homo sapiens
cggaggcagaggtttcagtgagccaagattgcaccagtgcactgcagcctggcgacagagtgagactccgtctcaaaaaaatacctatctatctatctgtctatctactgttattcttacctggtcatttcctttttgtttcacaggaaatttgcgagaatccccgatttatcattgatggagccaacagaactgacatctgtcaaggagagctaggggactgctggtttctcgcagccattgcctgcctgaccctgaaccagcaccttcttttccgagtcataccccatgatcaaagtttcatcgaaaactacgcagggatcttccacttccagttctggcgctatggagagtgggtggacgtggttatagatgactgcctgccaacgtacaacaatcaactggttttcaccaagtccaaccaccgcaatgagttctggagtgctctgctggagaaggcttatgctaagctccatggttcctacgaagctctgaaaggtgggaacaccacagaggccatggaggacttcacaggaggggtggcagagttttttgagatcagggatgctcctagtgacatgtacaagatcatgaagaaagccatcgagagaggctccctcatgggctgctccattgatgatggcacgaacatgacctatggaacctctccttctggtctgaacatgggggagttgattgcacggatggtaaggaatatggataactcactgctccaggactcagacctcgaccccagaggctcagatgaaagaccgacccggacaatcattccggttcagtatgagacaagaatggcctgcgggctggtcagaggtcacgcctactctgtcacggggctggatgaggtcccgttcaaaggtgagaaagtgaagctggtgcggctgcggaatccgtggggccaggtggagtggaacggttcttggagtgatagatggaaggactggagctttgtggacaaagatgagaaggcccgtctgcagcaccaggtcactgaggatggagagttctggatgtcctatgaggatttcatctaccatttcacaaagttggagatctgcaacctcacggccgatgctctgcagtctgacaagcttcagacctggacagtgtctgtgaacgagggccgctgggtacggggttgctctgccggaggctgccgcaacttcccagatactttctggaccaaccctcagtaccgtctgaagctcctggaggaggacgatgaccctgatgactcggaggtgatttgcagcttcctggtggccctgatgcagaagaaccggcggaaggaccggaagctaggggccagtctcttcaccattggcttcgccatctacgaggtgttcccaaagaggtatagcagcagcagcggccagcagttgtgtgcagcactacccagggggccccgagtctgtctgtggctcgtcgagaagcttcctggtggggtttgtgggcaggactgtgataggagagggccttgcctgtgttatttccactgcagagcaggtgcctcagggcattgcatgacccatgactaccacccccaggatgtgcactttctccctcgcaccagacactgcacgtcacacacatgcctttgcacactcaccctcctccacgcttacagccacacacacagtcacacagacgcgttctgagggtggctgcccgcttgggatggaggaatcacttccctcagaacccagccaagtcctctaggcctccttgggggtccttccagcctgaggggcttcggagctgaggagcagctgttctgagatgcacgggaacaagcagcacctgcagaaggacttcttcctgtacaacgcctccaaggccaggagcaaaacctacatcaacatgcgggaggtgtcccagcgcttccgcctgcctcccagcgagtacgtcatcgtgccctccacctacgagccccaccaggagggggaattcatcctccgggtcttctctgaaaagaggaacctctctgaggaagttgaaaataccatctccgtggatcggccagtgcccatcatcttcgtttcggacagagcaaacagcaacaaggagctgggtgtggaccaggagtcagaggagggcaaaggcaaaacaagccctgataagcaaaagcagtccccacagccacagcctggcagctctgatcaggaaagtgaggaacagcaacaattccggaacattttcaagcagatagcaggagatgacatggagatctgtgcagatgagctcaagaaggtccttaacacagtcgtgaacaaacacaaggacctgaagacacacgggttcacactggagtcctgccgtagcatgattgcgctcatggatacagatggctctggaaagctcaacctgcaggagttccaccacctctggaacaagattaaggcctggcagaaaattttcaaacactatgacacagaccagtccggcaccatcaacagctacgagatgcgaaatgcagtcaacgacgcaggattccacctcaacaaccagctctatgacatcattaccatgcggtacgcagacaaacacatgaacatcgactttgacagtttcatctgctgcttcgttaggctggagggcatgttcagagcttttcatgcatttgacaaggatggagatggtatcatcaagctcaacgttctggagtggctgcagctcaccatgtatgcctgaaccaggctgggcctcatccaaagccatgcaggatcactccaggatttcagtttcaccctctatttccaaagccatttacctcaaaggacccagcagctacacccctacaggcttccaggcacctcatcagtcatgttcctcctccattttaccccctacccatccttgatcggtcatgcctagcctgaccctttagtaaagcaatgaggtaggaagaacaaacccttgtccctttgccatgtggaggaaagtgcctgcctctggtccgagccgcctcggttctgaagcgagtgctcctgcttaccttgctctaggctgtctgcagaagcacctgccggtggcactcagcacctccttgtgctagagccctccatcaccttcacgctgtcccaccatgggccaggaaccaaaccagcactgggttctactgctgtggggtaaactaactcagtggaatagggctggttactttgggctgtccaactcataagtttggctgcattttgaaaaaagctgatctaaataaaggcatgtgtatggctggtc

SEQ ID NO: 75688 - DNA, 1875 bp, Homo sapiens
atttctcaggagaacttatggcttcagaatcacagctcggtttttaagatggacataacctgtacgaccttctgatgggctttcaactttgaactggatgtggacacttttctctcagatgacagaattactccaacttcccctttgcagttgcttcctttccttgaaggtagctgtatcttattttctttaaaaagctttttcttccaaagccacttgccatgccgaccgtcattagcgcatctgtggctccaaggacagcggctgagccccggtccccagggccagttcctcacccggcccagagcaaggccactgaggctgggggtggaaacccaagtggcatctattcagccatcatcagccgcaattttcctattatcggagtgaaagagaagacattcgagcaacttcacaagaaatgtctagaaaagaaagttctttatgtggaccctgagttcccaccggatgagacctctctcttttatagccagaagttccccatccagttcgtctggaagagacctccggaaatttgcgagaatccccgatttatcattgatggagccaacagaactgacatctgtcaaggagagctaggggactgctggtttctcgcagccattgcctgcctgaccctgaaccagcaccttcttttccgagtcataccccatgatcaaagtttcatcgaaaactacgcagggatcttccacttccagttctggcgctatggagagtgggtggacgtggttatagatgactgcctgccaacgtacaacaatcaactggttttcaccaagtccaaccaccgcaatgagttctggagtgctctgctggagaaggcttatgctaagctccatggttcctacgaagctctgaaaggtgggaacaccacagaggccatggaggacttcacaggaggggtggcagagttttttgagatcagggatgctcctagtgacatgtacaagatcatgaagaaagccatcgagagaggctccctcatgggctgctccattgatgatggcacgaacatgacctatggaacctctccttctggtctgaacatgggggagttgattgcacggatggtaaggaatatggataactcactgctccaggactcagacctcgaccccagaggctcagatgaaagaccgacccggacaatcattccggttcagtatgagacaagaatggcctgcgggctggtcagaggtcacgcctactctgtcacggggctggatgaggtcccgttcaaaggtgagaaagtgaagctggtgcggctgcggaatccgtggggccaggtggagtggaacggttcttggagtgatagatggaaggactggagctttgtggacaaagatgagaaggcccgtctgcagcaccaggtcactgaggatggagagttctggatgtcctatgaggatttcatctaccatttcacaaagttggagatctgcaacctcacggccgatgctctgcagtctgacaagcttcagacctggacagtgtctgtgaacgagggccgctgggtacggggttgctctgccggaggctgccgcaacttcccaggtgggagatgctcttgatggggggagggtctaagccgaaaaagttccaggcagaagaagcctaactagtgcttattaagtctctctgttccagacgtccactatcttattaaaccttccctgttttactgagaaggaaaccaccatgctgagaagtttgcaatagggagctggtagcaactttgaagcaggaaactgtgggaacaatgcagatgctgcttgacttacgatgaggttatgtccagataagcccatccatctttgaaaataccctaagtgaaaagtgcattcaatatgccta

SEQ ID NO: 75689 - DNA, 406 bp, Homo sapiens
tcccccgaagctcataacggcaggatgttcctgagaaaattgcctcttagaagatagagaggagatggccaagccctaagttaggcagactcaggaggaaaggtctgacccaccccctgccattccccagcacacttgtgattaatctccttggccagagccaggcagaacaccctcgcgtaagagatttgccccccagccccgtcccagccctcagcaagacagaagattccctttccagagaggctgcagagcatgagagctctttctgtgtgcttaaggtcccgttcaaaggtgagaaagtgaagctggtgcggctgcggaatccgtggggccaggtggagtggaacggttcttggagtgataggtaggtgaggggaccccacgggattggcggtggcgggga

SEQ ID NO: 75690 - DNA, 783 bp, Homo sapiens
atttctcaggagaacttatggcttcagaatcacagctcggtttttaagatggacataacctgtacgaccttctgatgggctttcaactttgaactggatgtggacacttttctctcagatgacagaattactccaacttcccctttgcagttgcttcctttccttgaaggtagctgtatcttattttctttaaaaagctttttcttccaaagccacttgccatgccgaccgtcattagcgcatctgtggctccaaggacagcggctgagccccggtccccagggccagttcctcacccggcccagagcaaggccactgaggctgggggtggaaacccaagtggcatctattcagccatcatcagccgcaattttcctattatcggagtgaaagagaagacattcgagcaacttcacaagaaatgtctagaaaagaaagttctttatgtggaccctgagttcccaccggatgagacctctctcttttatagccagaagttccccatccagttcgtctggaagagacctccggtgagtagcttcctgcttgctggctgggttttccccccacggaggagtcctctcactcagcactccggcagctcagctgtgcacatgggcactgggggaaggatcctggcagcagctctgctgggctctgtctttaagtgtgaagcagggaggagaggaacaggtctcagatatttcaccaaatctcagcaaaatccagagggagagcgcaggaggtggggctgattcttatgctctggctctttctctctga

SEQ ID NO: 75691 - DNA, 3642 bp, Homo sapiens
atttctcaggagaacttatggcttcagaatcacagctcggtttttaagatggacataacctgtacgaccttctgatgggctttcaactttgaactggatgtggacacttttctctcagatgacagaattactccaacttcccctttgcagttgcttcctttccttgaaggtagctgtatcttattttctttaaaaagctttttcttccaaagccacttgccatgccgaccgtcattagcgcatctgtggctccaaggacagcggctgagccccggtccccagggccagttcctcacccggcccagagcaaggccactgaggctgggggtggaaacccaagtggcatctattcagccatcatcagccgcaattttcctattatcggagtgaaagagaagacattcgagcaacttcacaagaaatgtctagaaaagaaagttctttatgtggaccctgagttcccaccggatgagacctctctcttttatagccagaagttccccatccagttcgtctggaagagacctccggaaatttgcgagaatccccgatttatcattgatggagccaacagaactgacatctgtcaaggagagctaggggactgctggtttctcgcagccattgcctgcctgaccctgaaccagcaccttcttttccgagtcataccccatgatcaaagtttcatcgaaaactacgcagggatcttccacttccagttctggcgctatggagagtgggtggacgtggttatagatgactgcctgccaacgtacaacaatcaactggttttcaccaagtccaaccaccgcaatgagttctggagtgctctgctggagaaggcttatgctaagctccatggttcctacgaagctctgaaaggtgggaacaccacagaggccatggaggacttcacaggaggggtggcagagttttttgagatcagggatgctcctagtgacatgtacaagatcatgaagaaagccatcgagagaggctccctcatgggctgctccattgatgatggcacgaacatgacctatggaacctctccttctggtctgaacatgggggagttgattgcacggatggtaaggaatatggataactcactgctccaggactcagacctcgaccccagaggctcagatgaaagaccgacccggacaatcattccggttcagtatgagacaagaatggcctgcgggctggtcagaggtcacgcctactctgtcacggggctggatgaggtcccgttcaaaggtgagaaagtgaagctggtgcggctgcggaatccgtggggccaggtggagtggaacggttcttggagtgatagatggaaggactggagctttgtggacaaagatgagaaggcccgtctgcagcaccaggtcactgaggatggagagttctggatgtcctatgaggatttcatctaccatttcacaaagttggagatctgcaacctcacggccgatgctctgcagtctgacaagcttcagacctggacagtgtctgtgaacgagggccgctgggtacggggttgctctgccggaggctgccgcaacttcccagatactttctggaccaaccctcagtaccgtctgaagctcctggaggaggacgatgaccctgatgactcggaggtgatttgcagcttcctggtggccctgatgcagaagaaccggcggaaggaccggaagctaggggccagtctcttcaccattggcttcgccatctacgaggtgttcccaaagaggtatagcagcagcagcggccagcagttgtgtgcagcactacccagggggccccgagtctgtctgtggctcgtcgagaagcttcctggtggggtttgtgggcaggactgtgataggagagggccttgcctgtgttatttccactgcagagcaggtgcctcagggcattgcatgacccatgactaccacccccaggatgtgcactttctccctcgcaccagacactgcacgtcacacacatgcctttgcacactcaccctcctccacgcttacagccacacacacagtcacacagacgcgttctgagggtggctgcccgcttgggatggaggaatcacttccctcagaacccagccaagtcctctaggcctccttgggggtccttccagcctgaggggcttcggagctgaggagcagctgttctgagatgcacgggaacaagcagcacctgcagaaggacttcttcctgtacaacgcctccaaggccaggagcaaaacctacatcaacatgcgggaggtgtcccagcgcttccgcctgcctcccagcgagtacgtcatcgtgccctccacctacgagccccaccaggagggggaattcatcctccgggtcttctctgaaaagaggaacctctctgaggaagttgaaaataccatctccgtggatcggccagtgcccatcatcttcgtttcggacagagcaaacagcaacaaggagctgggtgtggaccaggagtcagaggagggcaaaggcaaaacaagccctgataagcaaaagcagtccccacagccacagcctggcagctctgatcaggaaagtgaggaacagcaacaattccggaacattttcaagcagatagcaggagatgacatggagatctgtgcagatgagctcaagaaggtccttaacacagtcgtgaacaaacacaaggacctgaagacacacgggttcacactggagtcctgccgtagcatgattgcgctcatggatacagatggctctggaaagctcaacctgcaggagttccaccacctctggaacaagattaaggcctggcagaaaattttcaaacactatgacacagaccagtccggcaccatcaacagctacgagatgcgaaatgcagtcaacgacgcaggattccacctcaacaaccagctctatgacatcattaccatgcggtacgcagacaaacacatgaacatcgactttgacagtttcatctgctgcttcgttaggctggagggcatgttcagagcttttcatgcatttgacaaggatggagatggtatcatcaagctcaacgttctggagtggctgcagctcaccatgtatgcctgaaccaggctgggcctcatccaaagccatgcaggatcactccaggatttcagtttcaccctctatttccaaagccatttacctcaaaggacccagcagctacacccctacaggcttccaggcacctcatcagtcatgttcctcctccattttaccccctacccatccttgatcggtcatgcctagcctgaccctttagtaaagcaatgaggtaggaagaacaaacccttgtccctttgccatgtggaggaaagtgcctgcctctggtccgagccgcctcggttctgaagcgagtgctcctgcttaccttgctctaggctgtctgcagaagcacctgccggtggcactcagcacctccttgtgctagagccctccatcaccttcacgctgtcccaccatgggccaggaaccaaaccagcactgggttctactgctgtggggtaaactaactcagtggaatagggctggttactttgggctgtccaactcataagtttggctgcattttgaaaaaagctgatctaaataaaggcatgtgtatggctggtc

SEQ ID NO: 75692 - DNA, 3528 bp, Homo sapiens
atttctcaggagaacttatggcttcagaatcacagctcggtttttaagatggacataacctgtacgaccttctgatgggctttcaactttgaactggatgtggacacttttctctcagatgacagaattactccaacttcccctttgcagttgcttcctttccttgaaggtagctgtatcttattttctttaaaaagctttttcttccaaagccacttgccatgccgaccgtcattagcgcatctgtggctccaaggacagcggctgagccccggtccccagggccagttcctcacccggcccagagcaaggccactgaggctgggggtggaaacccaagtggcatctattcagccatcatcagccgcaattttcctattatcggagtgaaagagaagacattcgagcaacttcacaagaaatgtctagaaaagaaagttctttatgtggaccctgagttcccaccggatgagacctctctcttttatagccagaagttccccatccagttcgtctggaagagacctccggaaatttgcgagaatccccgatttatcattgatggagccaacagaactgacatctgtcaaggagagctaggggactgctggtttctcgcagccattgcctgcctgaccctgaaccagcaccttcttttccgagtcataccccatgatcaaagtttcatcgaaaactacgcagggatcttccacttccagttctggcgctatggagagtgggtggacgtggttatagatgactgcctgccaacgtacaacaatcaactggttttcaccaagtccaaccaccgcaatgagttctggagtgctctgctggagaaggcttatgctaagctccatggttcctacgaagctctgaaaggtgggaacaccacagaggccatggaggacttcacaggaggggtggcagagttttttgagatcagggatgctcctagtgacatgtacaagatcatgaagaaagccatcgagagaggctccctcatgggctgctccattgatgatggcacgaacatgacctatggaacctctccttctggtctgaacatgggggagttgattgcacggatggtaaggaatatggataactcactgctccaggactcagacctcgaccccagaggctcagatgaaagaccgacccggacaatcattccggttcagtatgagacaagaatggcctgcgggctggtcagaggtcacgcctactctgtcacggggctggatgaggtcccgttcaaaggtgagaaagtgaagctggtgcggctgcggaatccgtggggccaggtggagtggaacggttcttggagtgatagatggaaggactggagctttgtggacaaagatgagaaggcccgtctgcagcaccaggtcactgaggatggagagttctggatgtcctatgaggatttcatctaccatttcacaaagttggagatctgcaacctcacggccgatgctctgcagtctgacaagcttcagacctggacagtgtctgtgaacgagggccgctgggtacggggttgctctgccggaggctgccgcaacttcccagatactttctggaccaaccctcagtaccgtctgaagctcctggaggaggacgatgaccctgatgactcggaggtgatttgcagcttcctggtggccctgatgcagaagaaccggcggaaggaccggaagctaggggccagtctcttcaccattggcttcgccatctacgaggtgttcccaaagaggtatagcagcagcagcggccagcagttgtgtgcagcactacccagggggccccgagtctgtctgtggctcgtcgagaagcttcctggtggggtttgtgggcaggactgtgataggagagggccttgcctgtgttatttccactgcagagcaggtgcctcagggcattgcatgacccatgactaccacccccaggatgtgcactttctccctcgcaccagacactgcacgtcacacacatgcctttgcacactcaccctcctccacgcttacagccacacacacagtcacacagacgcgttctgagggtggctgcccgcttgggatggaggaatcacttccctcagaacccagccaagtcctctaggcctccttgggggtccttccagcctgaggggcttcggagctgaggagcagctgttctgagatgcacgggaacaagcagcacctgcagaaggacttcttcctgtacaacgcctccaaggccaggagcaaaacctacatcaacatgcgggaggtgtcccagcgcttccgcctgcctcccagcgagtacgtcatcgtgccctccacctacgagccccaccaggagggggaattcatcctccgggtcttctctgaaaagaggaacctctctgaggaagttgaaaataccatctccgtggatcggccagtgccacagcctggcagctctgatcaggaaagtgaggaacagcaacaattccggaacattttcaagcagatagcaggagatgacatggagatctgtgcagatgagctcaagaaggtccttaacacagtcgtgaacaaacacaaggacctgaagacacacgggttcacactggagtcctgccgtagcatgattgcgctcatggatacagatggctctggaaagctcaacctgcaggagttccaccacctctggaacaagattaaggcctggcagaaaattttcaaacactatgacacagaccagtccggcaccatcaacagctacgagatgcgaaatgcagtcaacgacgcaggattccacctcaacaaccagctctatgacatcattaccatgcggtacgcagacaaacacatgaacatcgactttgacagtttcatctgctgcttcgttaggctggagggcatgttcagagcttttcatgcatttgacaaggatggagatggtatcatcaagctcaacgttctggagtggctgcagctcaccatgtatgcctgaaccaggctgggcctcatccaaagccatgcaggatcactccaggatttcagtttcaccctctatttccaaagccatttacctcaaaggacccagcagctacacccctacaggcttccaggcacctcatcagtcatgttcctcctccattttaccccctacccatccttgatcggtcatgcctagcctgaccctttagtaaagcaatgaggtaggaagaacaaacccttgtccctttgccatgtggaggaaagtgcctgcctctggtccgagccgcctcggttctgaagcgagtgctcctgcttaccttgctctaggctgtctgcagaagcacctgccggtggcactcagcacctccttgtgctagagccctccatcaccttcacgctgtcccaccatgggccaggaaccaaaccagcactgggttctactgctgtggggtaaactaactcagtggaatagggctggttactttgggctgtccaactcataagtttggctgcattttgaaaaaagctgatctaaataaaggcatgtgtatggctggtc

SEQ ID NO: 75693 - DNA, 3122 bp, Homo sapiens
gccttgtgtagcgggagggggagctaggaagcagctgagggcagaatccaggagggcctggctgcgggggaatgaagcctccgccttcgcaggcaaaagcctttaaatacgggctcaggcccgggactcagagtgtaacgcgtggcagcctgagggaggggcgtgcgccgagagggagctcagatcgagcggggcgcgggtggagaagctgcggcggcgcggcccgtaggaaggtgctgtccgaacgatcgggataggagcggtccctgcgcttgctgctgggaagtggtacaatcatgtttgaaattaagaagatctgttgcatcggtgcaggctatgttggaggacccacatgtagtgtcattgctcatatgtgtcctgaaatcagggtaacggttgttgatgtcaatgaatcaagaatcaatgcgtggaattctcctacacttcctatttatgagccaggactaaaagaagtggtagaatcctgtcgaggaaaaaatctttttttttctaccaatattgatgatgccatcaaagaagctgatcttgtatttatttctgtgaatactccaacaaaaacctatggaatggggaaaggccgggcagcagatctgaagtatattgaagcttgtgctagacgcattgtgcaaaactcaaatgggtacaaaattgtgactgagaaaagcacagttccagtgcgggcagcagaaagtatccgtcgcatatttgatgcaaacacaaaacccaacttgaatttacaggtgctgtccaaccctgagtttctggcagagggaacagccatcaaggacctaaagaacccagacagagtactgattggaggggatgaaactccagagggccagagagctgtgcaggccctgtgtgctgtatatgagcactgggttcccagagaaaagatcctcaccactaatacttggtcttcagagctttccaaactggcagcaaatgcttttcttgcccagagaataagcagcattaactccataagtgctctgtgtgaagcaacaggagctgatgtagaagaggtagcaacagcgattggaatggaccagagaattggaaacaagtttctaaaagccagtgttgggtttggtgggagctgtttccaaaaggatgttctgaatttggtttatctctgtgaggctctgaatttgccagaagtagctcgttattggcagcaggtcatagacatgaatgactaccagaggaggaggtttgcttcccggatcatagatagtctgtttaatacagtaactgataagaagatagctattttgggatttgcattcaaaaaggacactggtgatacaagagaatcttctagtatatatattagcaaatatttgatggatgaaggtgcacatctacatatatatgatccaaaagtacctagggaacaaatagttgtggatctttctcatccaggtgtttcagaggatgaccaagtgtcccggctcgtgaccatttccaaggatccatatgaagcatgtgatggtgcccatgctgttgttatttgcactgagtgggacatgtttaaggaattggattatgaacgcattcataaaaaaatgctaaagccagcctttatcttcgatggacggcgtgtcctggatgggctccacaatgaactacaaaccattggcttccagattgaaacaattggcaaaaaggtgtcttcaaagagaattccatatgctccttctggtgaaattccgaagtttagtcttcaagatccacctaacaagaaacctaaagtgtagagattgccatttttatttgtgattttttttttttttttggtacttcaggatagcaaatatctatctgctattaaatggtaaatgaaccaagtgtttttttttgttttttttttgagacagagtctcactgttgcccaggctggagtgcagtggtgcaatctcggctcactgcaagctctgcttcccaggttcacgccattctcctggctcagcctcccaagtagctgggactacaggcacccgccacagtgcctggctaattttttgtatttttagtagagacagggtttcaccatgtgagccaggatggtctcaatctcctgaccttgtgaaccacccgtctcggcctcccaaagtgctgggattacaggtgtgagccaccacgcctggcccatgaaccaagtgtttttaaggaaacaaaactatttttttaatcatcagatttatactagctatatggatattagcatatctggtaattatgaatctagaatttttttacatatttttataatactgttagctcagttattggatgagtgaaagataatcatgttggttttaatagtgtcaatttttgtaaaataaaaattaaacttcaaactctttactttataaattgtccataggccacactttaatatcacattataaagggaaggacagtcttcattcctcctggttattggtttgtttgtcattaaagatatattttgaatccatgaaattgctatgctaaacagcctttacatgtatggtctggttaaagttcctttgttccttttgttttaataaaatgtgtcactgattttttagctcaaaatcatcactgttaatttccagtcaccccaaatatggttaaaagattttttttttaatcatgaagagaaaattagtagcatttctttctctccccattatttattggttttcctcactaatcttttttttttagtccaaaagccaaaaatatttatcttggttttacattttaatttccattcttaattgtaatttttttctttaaataaggaaaccaatataatctcatgtataaaaacttaaatattttacaagttacatatagcatcattctaaaataagaattttttttgttttctgtctgcttttttcttatgtctcttgttgagttttatattttcagtggttatttttgcttgtgttagatcattattgcattaaacatcccaggtctcatccttcaggaattttgcagttcaatgagaagagggagacaaatataaagatgaggacagaagcatctctacagatgaaaattacataaataaaacattctccatcaacaaataaaaggtgtaa

SEQ ID NO: 75694 - DNA, 2014 bp, Homo sapiens
gaggatcccgcgtgatccggtacagctcgtatggggagaggtcatagacatgaatgactaccagaggaggaggtttgcttcccggatcatagatagtctgtttaatacagtaactgataagaagatagctattttgggatttgcattcaaaaaggacactggtgatacaagagaatcttctagtatatatattagcaaatatttgatggatgaaggtgcacatctacatatatatgatccaaaagtacctagggaacaaatagttgtggatctttctcatccaggtgtttcagaggatgaccaagtgtcccggctcgtgaccatttccaaggatccatatgaagcatgtgatggtgcccatgctgttgttatttgcactgagtgggacatgtttaaggaattggattatgaacgcattcataaaaaaatgctaaagccagcctttatcttcgatggacggcgtgtcctggatgggctccacaatgaactacaaaccattggcttccagattgaaacaattggcaaaaaggtgtcttcaaagagaattccatatgctccttctggtgaaattccgaagtttagtcttcaagatccacctaacaagaaacctaaagtgtagagattgccatttttatttgtgattttttttttttttttggtacttcaggatagcaaatatctatctgctattaaatggtaaatgaaccaagtgtttttttttgttttttttttgagacagagtctcactgttgcccaggctggagtgcagtggtgcaatctcggctcactgcaagctctgcttcccaggttcacgccattctcctggctcagcctcccaagtagctgggactacaggcacccgccacagtgcctggctaattttttgtatttttagtagagacagggtttcaccatgtgagccaggatggtctcaatctcctgaccttgtgaaccacccgtctcggcctcccaaagtgctgggattacaggtgtgagccaccacgcctggcccatgaaccaagtgtttttaaggaaacaaaactatttttttaatcatcagatttatactagctatatggatattagcatatctggtaattatgaatctagaatttttttacatatttttataatactgttagctcagttattggatgagtgaaagataatcatgttggttttaatagtgtcaatttttgtaaaataaaaattaaacttcaaactctttactttataaattgtccataggccacactttaatatcacattataaagggaaggacagtcttcattcctcctggttattggtttgtttgtcattaaagatatattttgaatccatgaaattgctatgctaaacagcctttacatgtatggtctggttaaagttcctttgttccttttgttttaataaaatgtgtcactgattttttagctcaaaatcatcactgttaatttccagtcaccccaaatatggttaaaagattttttttttaatcatgaagagaaaattagtagcatttctttctctccccattatttattggttttcctcactaatcttttttttttagtccaaaagccaaaaatatttatcttggttttacattttaatttccattcttaattgtaatttttttctttaaataaggaaaccaatataatctcatgtataaaaacttaaatattttacaagttacatatagcatcattctaaaataagaattttttttgttttctgtctgcttttttcttatgtctcttgttgagttttatattttcagtggttatttttgcttgtgttagatcattattaaaatatatccaatgtccctttgatacttgtgctctgctgagaatgtacagtttgcattaaacatcccaggtctcatccttcaggaattttgcagttcaatgagaagagggagacaaatataaagatgaggacagaagcatctctacagatgaaaattacataaataaaacattctccatcaacaaataaaaggtgtaa

SEQ ID NO: 75695 - DNA, 514 bp, Homo sapiens
ctaaggaaggttttactttgattctttactttctaaatattaggtcattataatctttgtggctccccttcagtaatatcagttactgtaattatttccatatgtttcatgctagtgcagctgagaacaggctaggtcatccaattggaatgttattttttaaatcactatttccataattcctcagagcgaatgtaggaaatctttccagatatctgtcaccttgacagtttttataaagtataattaatgtacaatattatttctttaaattttctgttttcaatactagaacagtcttactgttttccttctagtacaatcatgtttgaaattaagaagatctgttgcatcggtgcaggctatgttggaggacccacatgtagtgtcattgctcatatgtgtcctgaaatcagggtaacggttgttgatgtcaatgaatcaagaatcaatgcgtggaattctcctacacttcctatttatgaggtaaacatattaaacatctctttgtttt

SEQ ID NO: 75696 - DNA, 386 bp, Homo sapiens
gtggcacataattgactactttgagggagtcaggtgtggggaatggcaggagtgagaaagtctagatatgaatattacgatggagtacagattaattctaggaacaaaaaatagggaagaaaccaaagatctctcatagcaactcagacaacttgagaatccttttctaagaaaaaaatctagattccccctgctcccatttcagtacattataaattcttacacttatataattgttaatagttctcttaaattttatttttttttcagattgaaacaattggcaaaaaggtgtcttcaaagagaattccatatgctccttctggtgaaattccgaagtttagtcttcaagatccacctaacaagaaacctaaagtgtagagatt

SEQ ID NO: 75697 - DNA, 3176 bp, Homo sapiens
gccttgtgtagcgggagggggagctaggaagcagctgagggcagaatccaggagggcctggctgcgggggaatgaagcctccgccttcgcaggcaaaagcctttaaatacgggctcaggcccgggactcagagtgtaacgcgtggcagcctgagggaggggcgtgcgccgagagggagctcagatcgagcggggcgcgggtggagaagctgcggcggcgcggcccgtaggaaggtgctgtccgaacgatcgggataggagcggtccctgcgcttgctgctgggaagtggtacaatcatgtttgaaattaagaagatctgttgcatcggtgcaggctatgttggaggacccacatgtagtgtcattgctcatatgtgtcctgaaatcagggtaacggttgttgatgtcaatgaatcaagaatcaatgcgtggaattctcctacacttcctatttatgagccaggactaaaagaagtggtagaatcctgtcgaggaaaaaatctttttttttctaccaatattgatgatgccatcaaagaagctgatcttgtatttatttctgtgaatactccaacaaaaacctatggaatggggaaaggccgggcagcagatctgaagtatattgaagcttgtgctagacgcattgtgcaaaactcaaatgggtacaaaattgtgactgagaaaagcacagttccagtgcgggcagcagaaagtatccgtcgcatatttgatgcaaacacaaaacccaacttgaatttacaggtgctgtccaaccctgagtttctggcagagggaacagccatcaaggacctaaagaacccagacagagtactgattggaggggatgaaactccagagggccagagagctgtgcaggccctgtgtgctgtatatgagcactgggttcccagagaaaagatcctcaccactaatacttggtcttcagagctttccaaactggcagcaaatgcttttcttgcccagagaataagcagcattaactccataagtgctctgtgtgaagcaacaggagctgatgtagaagaggtagcaacagcgattggaatggaccagagaattggaaacaagtttctaaaagccagtgttgggtttggtgggagctgtttccaaaaggatgttctgaatttggtttatctctgtgaggctctgaatttgccagaagtagctcgttattggcagcaggtcatagacatgaatgactaccagaggaggaggtttgcttcccggatcatagatagtctgtttaatacagtaactgataagaagatagctattttgggatttgcattcaaaaaggacactggtgatacaagagaatcttctagtatatatattagcaaatatttgatggatgaaggtgcacatctacatatatatgatccaaaagtacctagggaacaaatagttgtggatctttctcatccaggtgtttcagaggatgaccaagtgtcccggctcgtgaccatttccaaggatccatatgaagcatgtgatggtgcccatgctgttgttatttgcactgagtgggacatgtttaaggaattggattatgaacgcattcataaaaaaatgctaaagccagcctttatcttcgatggacggcgtgtcctggatgggctccacaatgaactacaaaccattggcttccagattgaaacaattggcaaaaaggtgtcttcaaagagaattccatatgctccttctggtgaaattccgaagtttagtcttcaagatccacctaacaagaaacctaaagtgtagagattgccatttttatttgtgattttttttttttttttggtacttcaggatagcaaatatctatctgctattaaatggtaaatgaaccaagtgtttttttttgttttttttttgagacagagtctcactgttgcccaggctggagtgcagtggtgcaatctcggctcactgcaagctctgcttcccaggttcacgccattctcctggctcagcctcccaagtagctgggactacaggcacccgccacagtgcctggctaattttttgtatttttagtagagacagggtttcaccatgtgagccaggatggtctcaatctcctgaccttgtgaaccacccgtctcggcctcccaaagtgctgggattacaggtgtgagccaccacgcctggcccatgaaccaagtgtttttaaggaaacaaaactatttttttaatcatcagatttatactagctatatggatattagcatatctggtaattatgaatctagaatttttttacatatttttataatactgttagctcagttattggatgagtgaaagataatcatgttggttttaatagtgtcaatttttgtaaaataaaaattaaacttcaaactctttactttataaattgtccataggccacactttaatatcacattataaagggaaggacagtcttcattcctcctggttattggtttgtttgtcattaaagatatattttgaatccatgaaattgctatgctaaacagcctttacatgtatggtctggttaaagttcctttgttccttttgttttaataaaatgtgtcactgattttttagctcaaaatcatcactgttaatttccagtcaccccaaatatggttaaaagattttttttttaatcatgaagagaaaattagtagcatttctttctctccccattatttattggttttcctcactaatcttttttttttagtccaaaagccaaaaatatttatcttggttttacattttaatttccattcttaattgtaatttttttctttaaataaggaaaccaatataatctcatgtataaaaacttaaatattttacaagttacatatagcatcattctaaaataagaattttttttgttttctgtctgcttttttcttatgtctcttgttgagttttatattttcagtggttatttttgcttgtgttagatcattattaaaatatatccaatgtccctttgatacttgtgctctgctgagaatgtacagtttgcattaaacatcccaggtctcatccttcaggaattttgcagttcaatgagaagagggagacaaatataaagatgaggacagaagcatctctacagatgaaaattacataaataaaacattctccatcaacaaataaaaggtgtaa

SEQ ID NO: 75698 - DNA, 3072 bp, Homo sapiens
gccttgtgtagcgggagggggagctaggaagcagctgagggcagaatccaggagggcctggctgcgggggaatgaagcctccgccttcgcaggcaaaagcctttaaatacgggctcaggcccgggactcagagtgtaacgcgtggcagcctgagggaggggcgtgcgccgagagggagctcagatcgagcggggcgcgggtggagaagctgcggcggcgcggcccgtaggaaggtgctgtccgaacgatcgggataggagcggtccctgcgcttgctgctgggaagtggtacaatcatgtttgaaattaagaagatctgttgcatcggtgcaggctatgttggaggacccacatgtagtgtcattgctcatatgtgtcctgaaatcagggtaacggttgttgatgtcaatgaatcaagaatcaatgcgtggaattctcctacacttcctatttatgagccaggactaaaagaagtggtagaatcctgtcgaggaaaaaatctttttttttctaccaatattgatgatgccatcaaagaagctgatcttgtatttatttctgtgaatactccaacaaaaacctatggaatggggaaaggccgggcagcagatctgaagtatattgaagcttgtgctagacgcattgtgcaaaactcaaatgggtacaaaattgtgactgagaaaagcacagttccagtgcgggcagcagaaagtatccgtcgcatatttgatgcaaacacaaaacccaacttgaatttacaggtgctgtccaaccctgagtttctggcagagggaacagccatcaaggacctaaagaacccagacagagtactgattggaggggatgaaactccagagggccagagagctgtgcaggccctgtgtgctgtatatgagcactgggttcccagagaaaagatcctcaccactaatacttggtcttcagagctttccaaactggcagcaaatgcttttcttgcccagagaataagcagcattaactccataagtgctctgtgtgaagcaacaggagctgatgtagaagaggtagcaacagcgattggaatggaccagagaattggaaacaagtttctaaaagccagtgttgggtttggtgggagctgtttccaaaaggatgttctgaatttggtttatctctgtgaggctctgaatttgccagaagtagctcgttattggcagcaggtcatagacatgaatgactaccagaggaggaggtttgcttcccggatcatagatagtctgtttaatacagtaactgataagaagatagctattttgggatttgcattcaaaaaggacactggtgatacaagagaatcttctagtatatatattagcaaatatttgatggatgaaggtgcacatctacatatatatgatccaaaagtacctagggaacaaatagttgtggatctttctcatccaggtgtttcagaggatgaccaagtgtcccggctcgtgaccatttccaaggatccatatgaagcatgtgatggtgcccatgctgttgttatttgcactgagtgggacatgtttaaggaattggattatgaacgcattcataaaaaaatgctaaagccagcctttatcttcgatggacggcgtgtcctggatgggctccacaatgaactacaaaccattggcttccagattgaaacaattggcaaaaaggtgtcttcaaagagaattccatatgctccttctggtgaaattccgaagtttagtcttcaagatccacctaacaagaaacctaaagtgtagagattgccatttttatttgtgattttttttttttttttggtacttcaggatagcaaatatctatctgctattaaatggtaaatgaaccaagtgtttttttttgttttttttttgagacagagtctcactgttgcccaggctggagtgcagtggtgcaatctcggctcactgcaagctctgcttcccaggttcacgccattctcctggctcagcctcccaagtagctgggactacaggcacccgccacagtgcctggctaattttttgtatttttagtagagacagggtttcaccatgtgagccaggatggtctcaatctcctgaccttgtgaaccacccgtctcggcctcccaaagtgctgggattacaggtgtgagccaccacgcctggcccatgaaccaagtgtttttaaggaaacaaaactatttttttaatcatcagatttatactagctatatggatattagcatatctggtaattatgaatctagaatttttttacatatttttataatactgttagctcagttattggatgagtgaaagataatcatgttggttttaatagtgtcaatttttgtaaaataaaaattaaacttcaaactctttactttataaattgtccataggccacactttaatatcacattataaagggaaggacagtcttcattcctcctggttattggtttgtttgtcattaaagatatattttgaatccatgaaattgctatgctaaacagcctttacatgtatggtctggttaaagttcctttgttccttttgttttaataaaatgtgtcacctgaagaaaaaaaaaaaaaaaaaaaaaaaaaaaaaaacaacaaaaaaaacaacaacaaagcaacaaaacaagaaacaacaacaacaaaaaacaaagaacaaagaacaaacacacaaaaagacaacaacacacagaggcgagccgcgcacacccaccattaacgaaacacgggggggcgggccccctcattataaaggcgggcgggacgcatcatatgatcgccgacaaatcacatagataggaggagagagcgctcccaaccaaggctgatgatcgtcgataaagcagcagcgaccctgcttcataaatcaacaacaagaacaaccaacatagctgaatctaaggatacgaaaaaacaccaaatgatgggggggaggcctgaggaaaaaccacccagagtacgatgcgacaggaacaacaatcgtggggagaggaacaacaaccggaaaaatgagagcattaaaaaaccaggaaaaaaaaagcaga

SEQ ID NO: 75699 - DNA, 906 bp, Homo sapiens
acaccctgaagactgctaatttttgcatgcatatgattttcacatgaatggatgaaaatactaaaatctcttccccctggaattgtctaattgccccgaccctactctaacagcaactagtgggtgggggcggtggagactcctgccattctctgtggcaccccacttccctggaagctcagtcggcctccgtctgctcacgtattggcacggttgtcttccaaacccatcgatgccggaacatgggtcaggaagaacacagtcagctctctggtgctttccatagcgttcctttttgccaggcttctgagatttttaaataacggaagcaacatctgcctctgaattagctgacaatgggaaacacacattgcagagattatcttaatgtatagcaaatcaaggaaaacaaaactttgacttaaccattggtttcagcttcctatcccaccaagccaccaacttcgtttcacttctctttcttctctctctggccccatgtgctcccttggtggagacatgaaggagcaggcaagtggcctgcagggggaccccgggatgctttgcccacttgacaggtagaggagctaaggccctcagcatggaacaggttcccaggctcacagaggaaggtggtggcaacacggagacttctcggtcacctggaacacaccccgctgtggacaccccctctgggactttttttctgcctctccccttaggattttgcaattcttttcaaaccagtgtcacaaaactttaaaaaaaaaaaaaaaaacaaaaaggatttcacaactcttagctgtcagagtttccttctacttcttctactttctctttttcttcgctcagtagacatgtatgaggcagaaggccagggctgggcgctgtgggagattcagagag

SEQ ID NO: 75700 - DNA, 547 bp, Homo sapiens
agcaattgataactgatacagaagccaccgaaaggagcaagctaagtcctagggaaaaatgttgccaggcgttcggtcttctcagagtgatagctgcttattagaaagaaaccaactttgactgtcaccttctctgccacttgcactccgttaaacccagagactggcagatgcctttcagcacagccgcactctgcctcccctcccttcctcccagactcctgtctgagacagaacagtatctttgagaacccgagggcaaaatcctctgcaggagtaggaggcggctcttaaacagccccaggcgatgtggaaggtgggcggaggctgagctattgcactgctccccaaatcccagtgcctggctgcacccccacacctgaaacctgcctaccctggtttaagcctcccccagccttcctggtgaagacccctcatggattcttgttactctcaggattgtgcaataaacccttctccttcacgcagagtagacgtgacgggaaagtctatttctggcctgactgtattgcatcttgtttgacac

SEQ ID NO: 75701 - DNA, 417 bp, Homo sapiens
tttctgggctttagctagggttacttttctcactgcagaatcccctgtggccatggccctgtagggccctcaaagatcctgcaccctggattcagaatccagtgaattcatctgggtagggtccccaggacacattggtagggaatatccccagagaggacctaagagttccaaagtggtaggagtactctaagcctggtagttcgtagagctgggcccaagtccggttttggccactgaatggcaatggaacaattgatgagtaccattgttctctctgtgcctcaatttctatatctgtaacatgaggggatttgaccatatggtctttttacatctctttcaactctgctatttgattccccttcagtgtgccacacatctcacaacctcactttccatcccaagattgagctt

SEQ ID NO: 75702 - DNA, 826 bp, Homo sapiens
ctcaccccactttagtccttagtccttaactgctggcaaccactaatctcttgtccatgtttataatattgtcatttcaagaatattataaaaacggaaccattagcatgtagctttttaggattggcctttttttttcactcagcacaagtgtctgaagactcattcaggttgttgtgcatatcaatagtgtatccctttttattgctgagcagtattctatggtatgaatgtatgatggttcggacatatgggttgtttcctattttaggctgttatgaatgaagctgctctgaacattcatgtatagatttttgtgtatacaggtattttttagaaaatagagataagccaggcatggtgatgtgtacctatagtcccagctactctggaggctgaggcaggagaatctcttgagcccaggggttcaagatgagcctgggcaacattttggagatcctgtctacaaaaaaaaaaagatggaggtagttttttgtaatggcaagattgtacattagaagatagaaaagtaggttttgcatcttactagggaagatacatgtatatttctctccctttggactgatcatttaagttgtttcaatttccttatcaagaaactggcataatatatgttctgcctacatcccagggtggttgtatagataaactgagataatatatggcctcctcccaagtaactgggattataggtgcgtgccaccacgctgggccaatttttgtattttcagtagagacggggtttcactgtgttggccaggctggtcttgaactcctgacctcaagtgatcttcccaccttggcc

SEQ ID NO: 75703 - DNA, 803 bp, Homo sapiens
agcggtgatacggtgttcatgacattctaagtacaaagaacatttatataaagtactctgagagcaaatgttattagagtactttaaatacatttaaagcatgggttgcatatgttattatgcagctctgcttactaaaatagaatgtgattttatatatataaccaattgtggcagacactgttgccagctcacccgtttcccatgccccatcctcattcccttttcttcctgactaaagaggctagaagagctaaatgcatgttttcccaggcttcattgcagtagaggtggcactgtgacactgttctgcagataagatgtaaacagaagtcagctgggatggtttctgagggtgctatgcttttcctatcagagaggtttgttctagttactattgctgcatgaaaaactatccaaaacacgcatttactgtggcacaaaaggtcaattttattatacccttggatcctgtaggtaagaaattcaggcttggcctggtggctcacacctgtaatcccagcactttgggaggccaaggagggcggaccacttgaggttaggagttcgagaccagcctggccaacatagcaaaaccccctctctactaaaaatacaaaaaaattagccaggcatggtggtttgtgcctgtaatcccagctactcaggaagctgaggcaggagaatgacttgaacccaggaggcaaaggttgcagtgagccaagatagcatcactgcactccagcctgggtgacagagagagattccgtcttaaaaaaaaaaaaaaattcagacagggcaca

SEQ ID NO: 75704 - DNA, 391 bp, Homo sapiens
agccctccagtgtcctgcagagaggcactcttgccaagtgtcattgatgacgcagctgaaaaccagaaacatttcactttccagccacgagactgcagcaatctgctctttggactgcacttagggaaaccgaggcccagataactgacccctcaaaagcccccaggacggcaaaatcaaaggggctgaggtgctctgaacagccccagcaaattaaaccacctaactttgcgctactcccactgccctgaagcagcctgtggtgggaggtgggggtggatacagtgttacaaagagaaacctgagttgtagccatagattgctaatcagtaacaaaatatccctctaaacccagtcctgccttgaacccacaggctcaggatggtaaata

SEQ ID NO: 75705 - DNA, 330 bp, Homo sapiens
ggaccaggagcctgctgtctggctctggctgccctgtttgtcgggtttcctcacggtatggcagctgccttcctaagaagatgcccctcctccatggagagtctcacgtgggcaggaaccaaggcctgagattcccagccaaattccacttggcagccgtgtgaacgaacactccagtcgagccacaggggcaaaccgtctccaccgagctctgcccaagttacagattcatgagctagactgtggtgattttaagccactaagttttgggtggttgtttgcagcaacagccaccaggctccggctttcaccttctgttactgcagggtg

SEQ ID NO: 75706 - DNA, 901 bp, Homo sapiens
ttcaattctttgtttagaatgtttacattcttactcagtagctgaggaagatctgactcttagagaacaggatattttggtcttgcaactgatttccagggtggaagttaagatggtcccagtataactgagttattgattattaatggtaggaagatataggagatggcgcaattattaagggaaagcattatatttattttttggtagaggtggggtctcactatttgcccaggctggtcttgagttcccgagctcaagccttcttcccatcttggcctctcaaagtgctgggattactagcattgcattttagaatggcatatcagaaataggaattctagtagtgtgtatctgtgggaaacgggggagtattctaagagtaggaaatcggatgccaggaaaacacctcaggatacagccccggaggaaggtatccagctgttcttcgggtgaaaaagatgaagaaacagtcctttgggaacaggctgatggatatagcaacttgaagtcatggaaacagcgctccattgatccttctctcagccctgcctcagtttagtatgtgtttttctttggttgtctgagccagttttttaatatctcactatttctcatttctgtaacttcctcttaatcagcttgttcacaggaggagggcagtggtggtgtgggggttgagggcagggaagtggagggttaggattagagagatcagagtaggatcaacagtggtaggagcaggaccacactccagtggagcagtgcagggccagccaggctgctgatgtcatgaattggatggaatgtaaagctggtgttcctacaaagcactctggttaagatggcagtttatgtggacagagactggaaagcgccccttccatctactctccctccc

SEQ ID NO: 75707 - DNA, 781 bp, Homo sapiens
tcaggctggtctcgaactcctgacctcaggtggtcctcccgcctcggcctcacaaagtgctgggataacaggcgtgagccaccgggcccggccctgcaaacaaatatttgaaaattgcagtttggattgcgttttccccacatattggtaaattttgcttgaggaaacgaaagacttaggattcaggaaaaatttatttcatgacattctggtgcatcagtattgcaatttggaatgtctgatcctggttaaatctcaaatcggctccagcaaagcatgttttgtttcagaatagtttgcttttttacctgtggattttaatatgctttttgtgggtttgcttatgcctgccgagttaccaggcttcaaatcgtaataggatgaagctaaaactagtaattggtgtaacataaaatgccttgtaagagacagtgaatgtggtgtttggagttgttgggaatgatcactagtttaaaccgaaattattccttccttcaaattttactttagtttttaaggaacctgtctaatgtgttttcccggctactcaggcagaaatgaaagacaaatgtaatagacacatgtaaatttaattgaaaatcttattctcggcttcagagaagttgaaagttttaccaaacgtcttcagtccggtgtctggcacatagtagtgccaaatatttgtacaataaataaaagaccaatcacaccttattgtttaaacatcttgttttgcggaaagcttctttaatttcttaataaacaaatttacttttgaaat

SEQ ID NO: 75708 - DNA, 555 bp, Homo sapiens
catgatatggagactgagctgaaaggatttcctcctctatgttcatcatagcttttaatttaattttactcaccttactttggctcgagaccctcagtcacctctgttcaggaggcagagcagttctttaccatcaattgtgataggcacggggaaccaggctgagagaatgaagtgcctcctacagctactttgaaaagtaagtatcttagaacttgattatttaaaataatagtaattttaaatactttgatgttgattttaatatccctttcttacaatatatgttccaatattttattatctaaatattcatattatataaattatacttataattactgtataaataattaatgttcattaacagcaaactttttattatggcaaaatctaataacgactcttgccaacacattaagttgtagtcattctatttttaagtagctattaaattctttaaaaaagattttttaataaaggagagctctaaaagtttatattaacttaattttaaccaatacaaaagataactttgtaaaaaaagaaaaagtc

SEQ ID NO: 75709 - DNA, 1650 bp, Homo sapiens
gagcctgaaaacctccgcgccaccgctgcgctctttacaaaggccccgggcgcgagaggacgtgctctgccagccagtgggaaggcaggccgcgcgcgcgggagcgcgggaggatcggcggctcgcggtcactggtccctggctcggttccccgcaccccggggctcacacttacccgcgcggaggagcagcggccgggtgtccacccccatcctgcgcccagtctcctcgattcccctcgctctgagccgggagagccgaacagctgaagagagttcactgactccccagccccaggtgggccttgtgcacatcatgaccagttttgaagatgctgacacagaagagacagtaacttgtctccagatgacggtttaccatcctggccagttgcagtgtggaatatttcagtcaataagttttaacagagagaaactcccttccagcgaagtggtgaaatttggccgaaattccaacatctgtcattatacttttcaggacaaacaggtttcccgagttcagttttctctgcagctgtttaaaaaattcaacagctcagttctctcctttgaaataaaaaatatgagtaaaaagaccaatctgatcgtggacagcagagagctgggctacctaaataaaatggacctgccatacaggtgcatggtcagattcggagagtatcagtttctgatggagaaggaagatggcgagtcattggaattttttgagactcaatttattttatctccaagatcactcttgcaagaaaacaactggccaccacacaggcccataccggagtatggcacttactcgctctgctcctcccaaagcagttctccgacagaaatggatgaaaatgagtcatgaacacagaaagtctaagaggagaaatatgatggatgaagagctctgtagatgctgtatagacactaaataagagttgattagggtagtatattatagtcatctgttatgctgtgaaatttggaattcagtattatcattttgaagtctgtaaattgtgttagtcattaacttagtcacctgttgtattctggatctacacaaaattattttaactgctcttattaatctgtgaggattaatatacaaaaagtatcctttgagatgaagtcgtgttctcaaaataaggttatattattttctttttctgcttgattttcatcttgtgttttgctttgtttttgtaaggaaccatctcttggtttggtcacatcagttcacaacagccatttgttttcaaggtcaaggctccaggcaggttgttactggtgtttgcagcctgtcagtacttgcagtactggaataggttctaggctagtgtctgcgcgtcactgtggttttagcatgggaggacttatttgagaaatactaccttacttttctatgatttctttttacagagttatagtgtgtttactcctaagatgacagttctctttgtctatattcagcatctaagacaaatatttaaacattttaaagaaccactgtgttaagtttaggattatttacttaccaaattagaagtttgacttttatgtgttatacacaatcttaaaatttcacgaattcacctttttaatagtatccatgtacataataaaatcaaagtttaattagcca

SEQ ID NO: 75710 - DNA, 2713 bp, Homo sapiens
gagcctgaaaacctccgcgccaccgctgcgctctttacaaaggccccgggcgcgagaggacgtgctctgccagccagtgggaaggcaggccgcgcgcgcgggagcgcgggaggatcggcggctcgcggtcactggtccctggctcggttccccgcaccccggggctcacacttacccgcgcggaggagcagcggccgggtgtccacccccatcctgcgcccagtctcctcgattcccctcgctctgagccgggagagccgaacagctgaagagagttcactgactccccagccccaggtgggccttgtgcacatcatgaccagttttgaagatgctgacacagaagagacagtaacttgtctccagatgacggtttaccatcctggccagttgcagtgtggaatatttcagtcaataagttttaacagagagaaactcccttccagcgaagtggtgaaatttggccgaaattccaacatctgtcattatacttttcaggacaaacaggtttcccgagttcagttttctctgcagctgtttaaaaaattcaacagctcagttctctcctttgaaataaaaaatatgagtaaaaagaccaatctgatcgtggacagcagagagctgggctacctaaataaaatggacctgccatacaggtgcatggtcagattcggagagtatcagtttctgatggagaaggaagatggcgagtcattggaattttttgagactcaatttattttatctccaagatcactcttgcaagaaaacaactggccaccacacaggcccataccggagtatggcacttactcgctctgctcctcccaaagcagttctccgacagaaatggatgaaaatgagtcatgaacacagaaagtctaagaggagaaatatgatggatgaagagctctgtagatgctgtatagacactaaataagagttgattagggtagtatattatagtcatctgttatgctgtgaaatttggaattcagtattatcattttgaagtctgtaaattgtgttagtcattaacttagtcacctgttgtattctggatctacacaaaattattttaactgctcttattaatctgtgaggattaatatacaaaaagtatcctttgagatgaagtcgtgttctcaaaataaggttatattattttctttttctgcttgattttcatcttgtgttttgctttgtttttgtaaggaaccatctcttggtttggtcacatcagttcacaacagccatttgttttcaaggtcaaggctccaggcaggttgttactggtgtttgcagcctgtcagtacttgcagtactggaataggttctaggctagtgtctgcgcgtcactgtggttttagcatgggaggacttatttgagaaatactaccttacttttctatgatttctttttacagagttatagtgtgtttactcctaagatgacagttctctttgtctatattcagcatctaagacaaatatttaaacattttaaagaaccactgtgttaagtttaggattatttacttaccaaattagaagtttgacttttatgtgttatacacaatcttaaaatttcacgaattcacctttttaatagtatccatgtacataataaaatcaaagtttaattagccattttctttgaatttttttctaaataagggaaataactgttcttgggccactttacagagataaatgtatgtgaatgtttatgataaacgcttaaatatttctaaaatgttaacttcaaaaaagtctttttcagttcttaaataaaaatttttttatttaagatacttattcgacttatcttaactaaggtagctatgaatgttaagtagatgaggtaaccattcagttaagttaaattgtagcattgccaggtagtgaggctcactgtacaattttccaggtaaatgaaatttcctgtagtaagaggtccgtatttttgtaacagccttttaaaaatgcttttgggaaccctccagcctcttaccaaaagaggctttaaacctcatcttgattcagactgtcagtctattcctgggcagtagtatgtgatgtccagcaccctaaccccgactccccagccctgggactattccagtagagtgaaatatttgtccctgtacaaagtggcctgaatgactgttggagttcctgtgtctggttttcctgtttattccctgtgatgcccagagtaatggcccatccaaagatgtccagatgtccatgtgctagtctccagaacttgtaactgtgttgttatgtggcaaaggggaatgaaggctgcagatggaagtaaaatagattatgctggattatctgggtgtgcccaattgatcaccggatccgtaaaagtggaagagaggcagatcaggatgtcagcgtgatgaggtgtgagacagacttgacttgctgttgctgggaggaaggggaggtcatgagccaaggaatgtggacagtctcttgaagctggaaagtgtgcattggacatctggaagccagaaaagacaaagaaatatccagaaaggaacaaagtcttgtggacaccttgattttggtccagtgagaatatgtttgacttgttaacctacaaaactttatgatgataaatttgtgttggtcgtaagccactaaatcacagtaatttgttatagcagcagatagaaaactaatatactccctttaatat

SEQ ID NO: 75711 - DNA, 4201 bp, Homo sapiens
gagcctgaaaacctccgcgccaccgctgcgctctttacaaaggccccgggcgcgagaggacgtgctctgccagccagtgggaaggcaggccgcgcgcgcgggagcgcgggaggatcggcggctcgcggtcactggtccctggctcggttccccgcaccccggggctcacacttacccgcgcggaggagcagcggccgggtgtccacccccatcctgcgcccagtctcctcgattcccctcgctctgagccgggagagccgaacagctgaagagagttcactgactccccagccccaggtgggccttgtgcacatcatgaccagttttgaagatgctgacacagaagagacagtaacttgtctccagatgacggtttaccatcctggccagttgcagtgtggaatatttcagtcaataagttttaacagagagaaactcccttccagcgaagtggtgaaatttggccgaaattccaacatctgtcattatacttttcaggacaaacaggtttcccgagttcagttttctctgcagctgtttaaaaaattcaacagctcagttctctcctttgaaataaaaaatatgagtaaaaagaccaatctgatcgtggacagcagagagctgggctacctaaataaaatggacctgccatacaggtgcatggtcagattcggagagtatcagtttctgatggagaaggaagatggcgagtcattggaattttttgagactcaatttattttatctccaagatcactcttgcaagaaaacaactggccaccacacaggcccataccggagtatggcacttactcgctctgctcctcccaaagcagttctccgacagaaatggatgaaaatgagtcatgaacacagaaagtctaagaggagaaatatgatggatgaagagctctgtagatgctgtatagacactaaataagagttgattagggtagtatattatagtcatctgttatgctgtgaaatttggaattcagtattatcattttgaagtctgtaaattgtgttagtcattaacttagtcacctgttgtattctggatctacacaaaattattttaactgctcttattaatctgtgaggattaatatacaaaaagtatcctttgagatgaagtcgtgttctcaaaataaggttatattattttctttttctgcttgattttcatcttgtgttttgctttgtttttgtaaggaaccatctcttggtttggtcacatcagttcacaacagccatttgttttcaaggtcaaggctccaggcaggttgttactggtgtttgcagcctgtcagtacttgcagtactggaataggttctaggctagtgtctgcgcgtcactgtggttttagcatgggaggacttatttgagaaatactaccttacttttctatgatttctttttacagagttatagtgtgtttactcctaagatgacagttctctttgtctatattcagcatctaagacaaatatttaaacattttaaagaaccactgtgttaagtttaggattatttacttaccaaattagaagtttgacttttatgtgttatacacaatcttaaaatttcacgaattcacctttttaatagtatccatgtacataataaaatcaaagtttaattagccattttctttgaatttttttctaaataagggaaataactgttcttgggccactttacagagataaatgtatgtgaatgtttatgataaacgcttaaatatttctaaaatgttaacttcaaaaaagtctttttcagttcttaaataaaaatttttttatttaagatacttattcgacttatcttaactaaggtagctatgaatgttaagtagatgaggtaaccattcagttaagttaaattgtagcattgccaggtagtgaggctcactgtacaattttccaggtaaatgaaatttcctgtagtaagaggtccgtatttttgtaacagccttttaaaaatgcttttgggaaccctccagcctcttaccaaaagaggctttaaacctcatcttgattcagactgtcagtctattcctgggcagtagtatgtgatgtccagcaccctaaccccgactccccagccctgggactattccagtagagtgaaatatttgtccctgtacaaagtggcctgaatgactgttggagttcctgtgtctggttttcctgtttattccctgtgatgcccagagtaatggcccatccaaagatgtccagatgtccatgtgctagtctccagaacttgtaactgtgttgttatgtggcaaaggggaatgaaggctgcagatggaagtaaaatagattatgctggattatctgggtgtgcccaattgatcaccggatccgtaaaagtggaagagaggcagatcaggatgtcagcgtgatgaggtgtgagacagacttgacttgctgttgctgggaggaaggggaggtcatgagccaaggaatgtggacagtctcttgaagctggaaagtgtgcattggacatctggaagccagaaaagacaaagaaatatccagaaaggaacaaagtcttgtggacaccttgattttggtccagtgagaatatgtttgacttgttaacctacaaaactttatgatgataaatttgtgttggtcgtaagccactaaatcacagtaatttgttatagcagcagatagaaaactaatatactccctttaatataaggttatctactattgattctttctaggattttagcttctggtctgatgtgggtttacagccagatcacccggcttgaattgcttacagtgtgtagtctcatggtaaaggcgttctatgagtgaagtgtatatactttaatgtgtgtatactgtcacattttgactattttggaagactttcacctctgtttcttgtctttgaggctgatgaatgtgtttctaagttataaatttaatattaagggattcatgtattattgttattggatccaaacaatgtgttaagtaatatttagggccagaaaaatcttgtacagaataatgatttctcctaatgtaaatcttggaaagggttttgttcaacttgagaaatattaaattttttgttctattttcttttcttcaaagattggcaaaggagagagtgggttgctaaaagtttatattgttctccaaagaatagaaacactttccatagcccaactccggtagtaaataataatgaacgctttaataatgaaagagcaattggttagtattagaattgttttgattacaaagttagcatctctgcctgagctacccaaccccaaagcggggttgttagaggaaagctaccatatttcatagaaccgaggaaggaatgcagcagacctcaggtgagattcgaatgctctggctctgaccctcaatgcatattggctccatggccacctgtagctcccaagttttacacgttattgatcccccaaagagacctgatctcttgatttcagttccagggacgggtcagcttgggtcaggtgcccaccccttcaccaatcaacttgtctcaggtaacgcagtcacattatataatggctgctctggtcagtgatcatgtggatagatacagcattttctcaaaaaaatggtcacaggggtgggggtggggcaaacaaaaatattggtgtttgatacaaggtactgaagctaagatgtgaaaccttccatatacactttaaggacttctttgtccctggaaagtgatttttctggggctccttaggtagagaggtgtattaatggtgccagtgttagaatccttggcagtctcttcttgaacctgcaactccagtggttaaatctcataggccatataaccattttctagagaattctgttcctactatctaatgcagtaactgacttaaaagtaagtattactgttagactctaacataagtggtggtatttgttttaatggaggtgggatcaggtatgtgttcacttaagctttacattaaaaaaaaatttatatgtgtaaataaatatatatgccttgtagaaaaattagccataatcttactaccagaagagaactactgttaactttgtgtgtgtgtatatgtggtggatggttttatgttacctcctggctctttttatgtttccaattctctaacacttgtttaattaattacttatattattaagataacaggct

SEQ ID NO: 75712 - DNA, 1447 bp, Homo sapiens
agactgagctgctccttgtgggaactgctgatgttttgacaaaagaaagagggaaggtggaactacacagtggcttttaagtttctgcttggaagtgggccttgtgcacatcatgaccagttttgaagatgctgacacagaagagacagtaacttgtctccagatgacggtttaccatcctggccagttgcagtgtggaatatttcagtcaataagttttaacagagagaaactcccttccagcgaagtggtgaaatttggccgaaattccaacatctgtcattatacttttcaggacaaacaggtttcccgagttcagttttctctgcagctgtttaaaaaattcaacagctcagttctctcctttgaaataaaaaatatgagtaaaaagaccaatctgatcgtggacagcagagagctgggctacctaaataaaatggacctgccatacaggtgcatggtcagattcggagagtatcagtttctgatggagaaggaagatggcgagtcattggaattttttgagactcaatttattttatctccaagatcactcttgcaagaaaacaactggccaccacacaggcccataccggagtatggcacttactcgctctgctcctcccaaagcagttctccgacagaaatggatgaaaatgagtcatgaacacagaaagtctaagaggagaaatatgatggatgaagagctctgtagatgctgtatagacactaaataagagttgattagggtagtatattatagtcatctgttatgctgtgaaatttggaattcagtattatcattttgaagtctgtaaattgtgttagtcattaacttagtcacctgttgtattctggatctacacaaaattattttaactgctcttattaatctgtgaggattaatatacaaaaagtatcctttgagatgaagtcgtgttctcaaaataaggttatattattttctttttctgcttgattttcatcttgtgttttgctttgtttttgtaaggaaccatctcttggtttggtcacatcagttcacaacagccatttgttttcaaggtcaaggctccaggcaggttgttactggtgtttgcagcctgtcagtacttgcagtactggaataggttctaggctagtgtctgcgcgtcactgtggttttagcatgggaggacttatttgagaaatactaccttacttttctatgatttctttttacagagttatagtgtgtttactcctaagatgacagttctctttgtctatattcagcatctaagacaaatatttaaacattttaaagaaccactgtgttaagtttaggattatttacttaccaaattagaagtttgacttttatgtgttatacacaatcttaaaatttcacgaattcacctttttaatagtatccatgtacataataaaatcaaagtttaattagcca

SEQ ID NO: 75713 - DNA, 1809 bp, Homo sapiens
gagcctgaaaacctccgcgccaccgctgcgctctttacaaaggccccgggcgcgagaggacgtgctctgccagccagtgggaaggcaggccgcgcgcgcgggagcgcgggaggatcggcggctcgcggtcactggtccctggctcggttccccgcaccccggggctcacacttacccgcgcggaggagcagcggccgggtgtccacccccatcctgcgcccagtctcctcgattcccctcgctctgagccgggagagccgaacagctgaagagagttcactgactccccagccccaggtgggccttgtgcacatcatgaccagttttgaagatgctgacacagaagagacagtaacttgtctccagatgacggtttaccatcctggccagttgcagtgtggaatatttcagtcaataagttttaacagagagaaactcccttccagcgaagtggtgaaatttggccgaaattccaacatctgtcattatacttttcaggacaaacaggtttcccgagttcagttttctctgcagctgtttaaaaaattcaacagctcagttctctcctttgaaataaaaaatatgagtaaaaagaccaatctgatcgtggacagcagagagctgggctacctaaataaaatggacctgccatacaggtgcatggtcagattcggagagtatcagtttctgatggagaaggaagatggcgagtcattggaattttttgagactcaatttattttatctccaagatcactcttgcaagaaaacaactggccaccacacaggcccataccggagtatggcacttactcgctctgctcctcccaaagcagttctccgacagaaatggatgaaaatgagtcatgaacacagaaagtctaagaggagaaatatgatggatgaagagctctgtagatgctgtatagacactaaataagagttgattagggtagtatattatagtcatctgttatgctgtgaaatttggaattcagtattatcattttgaagtctgtaaattgtgttagtcattaacttagtcacctgttgtattctggatctacacaaaattattttaactgctcttattaatctgtgaggattaatatacaaaaagtatcctttgagatgaagtcgtgttctcaaaataaggttatattattttctttttctgcttgattttcatcttgtgttttgctttgtttttgtaaggaaccatctcttggtttggtcacatcagttcacaacagccatttgttttcaaggtcaaggctccaggcaggttgttactggtgtttgcagcctgtcagtacttgcagtactggaataggttctaggctagtgtctgcgcgtcactgtggttttagcatgggaggacttatttgagaaatactaccttacttttctatgatttctttttacagagttatagtgtgtttactcctaagatgacagttctctttgtctatattcagcatctaagacaaatatttaaacattttaaagaaccactgtgttaagtttaggattatttacttaccaaattagaagtttgacttttatgtgttatacacaatcttaaaatttcacgaattcacctttttaatagtatccatgtacataataaaatcaaagtttaattagccattttctttgaatttttttctaaataagggaaataactgttcttgggccactttacagagataaatgtatgtgaatgtttatgataaacgcttaaatatttctaaaatgttaacttcaaaaaagtctttttcagttcttaaataaaaatttttttattta

SEQ ID NO: 75714 - DNA, 556 bp, Homo sapiens
gtcacatcttacatggatggcagcaggcaaagagagagcctgtgcatggaaactcccccttataaaaccatcagatcttgtgatacttattcactatcacaagaacagcatgggaaagacctatccccatgattcaattacctcctatcaggtcccttccacaacatgtgggactcgtgggagctataattcaagatgagattggggtggggacacagccaaaccatatcactgtcagagtttgctgtggttttataccttcataagataggtgaatgcatccatcagctcaggctctgatatagtgcagtaacaaatgacctaaaaaatctcagtggcttattggaagaagggttggtttttttgctaatattaactgtcctttatgtatctgtcttcggctcttccctctgggacccagactgagctgctccttgtgggaactgctgatgttttgacaaaagaaagagggaaggtggaactacacagtggcttttaagtttctgcttggaagtaagtcactgccattcatgtttcattgacatggttgttaatg

SEQ ID NO: 75715 - DNA, 402 bp, Homo sapiens
gagcagctcctaaggaagccgacttggcttctgttcctgggaaaagcggatcaagaaactcgctgaagaccactatttacagatgagccacagcagagctgcttaattcactcaataacaaaccttaattgctcaaaacaaagcagctaagtctctttagagtgcttcaaaggcccttcacattgtaacttgcagtataaaatgtatgcaatatttccaaaaaagaaaaaaaattcagaatcaaggataaagttagaactttaccttaatcttcttttaaagagtttttttccccatctccccctctaattaggtcaaaatttagatgttattatgatctaactacaatctgtttattttactgcctttttaaaagaaaagagacatttgtgccttaatcct

SEQ ID NO: 75716 - DNA, 476 bp, Homo sapiens
ccctatgagagagatggtatcattgtcctcacatcacagaagctggaaaagaggctttgaaatttagtaatatctatattcaaaaccaactggactccaaaggtcacacttaactagtgcatttacctagaaaaaacttaattaataggtagtgaataattaactgaattaatctgtgcagaaagagtaatcttgctcttcaccatcataatgtgtattttataccatctgccatagatattgaacataccatcagcacaattctactcaaaaacaaacagaaaacataatgcttataataaaaaggacttccaaaatcaaccgaaggcctgaaacctggtaagcacagtctataagaagtgccagtatattgtcttaattttcaataagtagcacagcgcaaaggtattgcaagccatatggattttgacaaccgtgctttaataactttggaaaagccttactacttgttaaaa

SEQ ID NO: 75717 - DNA, 834 bp, Homo sapiens
  misc_feature (56)..(56): n is a, c, g, or t
  misc_feature (185)..(185): n is a, c, g, or t
  misc_feature (827)..(827): n is a, c, g, or t
gattccacctacctcctaagtgaaggcttccgtccctggagaggaggcggcgcctngtatcggccttcgtcctccgcgggactgcggcgccaagatgagtggagaggagaacccagccagcaagcccacgccggtgcaggacgtacagggcgacgggcgctggatgtccctgcaccatcggttcntggctgacagcaaagataaggaacccgaagtcgtcttcatcggggactccttggtccagctcatgcaccagtgcgagatctggcgcgagtctttctctcctctgcatgcacttaactttggcattggtggtgacggcacacagcatgtactgtggcggctggagaatggggagctggaacacatccggcccaagattgtggtggtctgggtgggcaccaacaaccacggacacacagcagagcaggtgactggtggcatcaaggccattgtgcaactggtgaatgagcgacagcccaggcccgggttgtggtgctgggcctgcttccgcgaggccaacatcccaacccacttcgggagaagaaccgacaggtgaacgagctggtacgggcggcactggctggccaccctcgggcccacttcctagatgccgaccctggctttgtgcactcagatggcaccatcagccatcatgacatgtatgattacctgcatctgagccgcctgggctacacacctgtttgccggctctgcactccctgcttctgcgtctgctgcccaagaccagggccaaggtgctcccctgctggagcccgcaccctaacatcctgctgccttcccacaacattaaactctccttcctnagtgaaa

SEQ ID NO: 75718 - DNA, 761 bp, Homo sapiens
  misc_feature (56)..(56): n is a, c, g, or t
  misc_feature (185)..(185): n is a, c, g, or t
  misc_feature (754)..(754): n is a, c, g, or t
gattccacctacctcctaagtgaaggcttccgtccctggagaggaggcggcgcctngtatcggccttcgtcctccgcgggactgcggcgccaagatgagtggagaggagaacccagccagcaagcccacgccggtgcaggacgtacagggcgacgggcgctggatgtccctgcaccatcggttcntggctgacagcaaagataaggaacccgaagtcgtcttcatcggggactccttggtccagctcatgcaccagtgcgagatctggcgcgagtctttctctcctctgcatgcacttaactttggcattggtggtgacggcacacagcatgtactgtggcggctggagaatggggagctggaacacatccggcccaagattgtggtggtctgggtgggcaccaacaaccacggacacacagcagagcagcctgcttccgcgaggccaacatcccaacccacttcgggagaagaaccgacaggtgaacgagctggtacgggcggcactggctggccaccctcgggcccacttcctagatgccgaccctggctttgtgcactcagatggcaccatcagccatcatgacatgtatgattacctgcatctgagccgcctgggctacacacctgtttgccggctctgcactccctgcttctgcgtctgctgcccaagaccagggccaaggtgctcccctgctggagcccgcaccctaacatcctgctgccttcccacaacattaaactctccttcctnagtgaaa

SEQ ID NO: 75719 - DNA, 2372 bp, Homo sapiens
tccggcgtggtgcgcaggcgcggtatcccccctcccccgccagctcgaccccggtgtggtgcgcaggcgcagtctgcgcagggactggcgggactgcgcggcggcaacagcagacatgtcgggggtccggggcctgtcgcggctgctgagcgctcggcgcctggcgctggccaaggcgtggccaacagtgttgcaaacaggaacccgaggttttcacttcactgttgatgggaacaagagggcatctgctaaagtttcagattccatttctgctcagtatccagtagtggatcatgaatttgatgcagtggtggtaggcgctggaggggcaggcttgcgagctgcatttggcctttctgaggcagggtttaatacagcatgtgttaccaagctgtttcctaccaggtcacacactgttgcagcacagggaggaatcaatgctgctctggggaacatggaggaggacaactggaggtggcatttctacgacaccgtgaagggctccgactggctgggggaccaggatgccatccactacatgacggagcaggcccccgccgccgtggtcgagctagaaaattatggcatgccgtttagcagaactgaagatgggaagatttatcagcgtgcatttggtggacagagcctcaagtttggaaagggcgggcaggcccatcggtgctgctgtgtggctgatcggactggccactcgctattgcacaccttatatggaaggtctctgcgatatgataccagctattttgtggagtattttgccttggatctcctgatggagaatggggagtgccgtggtgtcatcgcactgtgcatagaggacgggtccatccatcgcataagagcaaagaacactgttgttgccacaggaggctacgggcgcacctacttcagctgcacgtctgcccacaccagcactggcgacggcacggccatgatcaccagggcaggccttccttgccaggacctagagtttgttcagttccaccccacaggcatatatggtgctggttgtctcattacggaaggatgtcgtggagagggaggcattctcattaacagtcaaggcgaaaggtttatggagcgatacgcccctgtcgcgaaggacctggcgtctagagatgtggtgtctcggtccatgactctggagatccgagaaggaagaggctgtggccctgagaaagatcacgtctacctgcagctgcaccacctacctccagagcagctggccacgcgcctgcctggcatttcagagacagccatgatcttcgctggcgtggacgtcacgaaggagccgatccctgtcctccccaccgtgcattataacatgggcggcattcccaccaactacaaggggcaggtcctgaggcacgtgaatggccaggatcagattgtgcccggcctgtacgcctgtggggaggccgcctgtgcctcggtacatggtgccaaccgcctcggggcaaactcgctcttggacctggttgtctttggtcgggcatgtgccctgagcatcgaagagtcatgcaggcctggagataaagtccctccaattaaaccaaacgctggggaagaatctgtcatgaatcttgacaaattgagatttgctgatggaagcataagaacatcggaactgcgactcagcatgcagaagtcaatgcaaaatcatgctgccgtgttccgtgtgggaagcgtgttgcaagaaggttgtgggaaaatcagcaagctctatggagacctaaagcacctgaagacgttcgaccggggaatggtctggaacacggacctggtggagaccctggagctgcagaacctgatgctgtgtgcgctgcagaccatctacggagcagaggcacggaaggagtcacggggcgcgcatgccagggaagactacaaggtgcggattgatgagtacgattactccaagcccatccaggggcaacagaagaagccctttgaggagcactggaggaagcacaccctgtcctatgtggacgttggcactgggaaggtcactctggaatatagacccgtgatcgacaaaactttgaacgaggctgactgtgccaccgtcccgccagccattcgctcctactgatgagacaagatgtggtgatgacagaatcagcttttgtaattatgtataatagctcatgcatgtgtccatgtcataactgtcttcatacgcttctgcactctggggaagaaggagtacattgaagggagattggcacctagtggctgggagcttgccaggaacccagtggccagggagcgtggcacttacctttgtcccttgcttcattcttgtgagatgataaaactgggcacagctcttaaataaaatataaatgaacaaa

SEQ ID NO: 75720 - DNA, 911 bp, Homo sapiens
tccggcgtggtgcgcaggcgcggtatcccccctcccccgccagctcgaccccggtgtggtgcgcaggcgcagtctgcgcagggactggcgggactgcgcggcggcaacagcagacatgtcgggggtccggggcctgtcgcggctgctgagcgctcggcgcctggcgctggccaaggcgtggccaacagtgttgcaaacaggaacccgaggttttcacttcactgttgatgggaacaagagggcatctgctaaagtttcagattccatttctgctcagtatccagtagtggatcatgaatttgatgcagtggtggtaggcgctggaggggcaggcttgcgagctgcatttggcctttctgaggcagggtttaatacagcatgtgttaccaagctgtttcctaccaggtcacacactgttgcagcacagggaggaatcaatgctgctctggggaacatggaggaggacaactggaggtggcatttctacgacaccgtgaagggctccgactggctgggggaccaggatgccatccactacatgacggagcaggcccccgccgccgtggtcgagctagaaaattatggcatgccgtttagcagaactgaagatgggaagatttatcagcgtgcatttggtggacagagcctcaagtttggaaagggcgggcaggcccatcggtgctgctgtgtggctgatcggactggccactcgctattgcacaccttatatggaaggtctctgcgatatgataccagctattttgtggagtattttgccttggatctcctgatggagaatggggagtgccgtggtgtcatcgcactgtgcatagaggacgggtccatccatcgcataagagcaaagaacactgttgttgccacagggtaggaatctcatttctactttattt

SEQ ID NO: 75721 - DNA, 2414 bp, Homo sapiens
  misc_feature (2388)..(2388): n is a, c, g, or t
tccggcgtggtgcgcaggcgcggtatcccccctcccccgccagctcgaccccggtgtggtgcgcaggcgcagtctgcgcagggactggcgggactgcgcggcggcaacagcagacatgtcgggggtccggggcctgtcgcggctgctgagcgctcggcgcctggcgctggccaaggcgtggccaacagtgttgcaaacaggaacccgaggttttcacttcactgttgatgggaacaagagggcatctgctaaagtttcagattccatttctgctcagtatccagtagtggatcatgaatttgatgcagtggtggtaggcgctggaggggcaggcttgcgagctgcatttggcctttctgaggcagggtttaatacagcatgtgttaccaagctgtttcctaccaggtcacacactgttgcagcacagggaggaatcaatgctgctctggggaacatggaggaggacaactggaggtggcatttctacgacaccgtgaagggctccgactggctgggggaccaggatgccatccactacatgacggagcaggcccccgccgccgtggtcgagctagaaaattatggcatgccgtttagcagaactgaagatgggaagatttatcagcgtgcatttggtggacagagcctcaagtttggaaagggcgggcaggcccatcggtgctgctgtgtggctgatcggactggccactcgctattgcacaccttatatggaaggtctctgcgatatgataccagctattttgtggagtattttgccttggatctcctgatggagaatggggagtgccgtggtgtcatcgcactgtgcatagaggacgggtccatccatcgcataagagcaaagaacactgttgttgccacaggaggctacgggcgcacctacttcagctgcacgtctgcccacaccagcactggcgacggcacggccatgatcaccagggcaggccttccttgccaggacctagagtttgttcagttccaccccacaggcatatatggtgctggttgtctcattacggaaggatgtcgtggagagggaggcattctcattaacagtcaaggcgaaaggtttatggagcgatacgcccctgtcgcgaaggacctggcgtctagagatgtggtgtctcggtccatgactctggagatccgagaaggaagaggctgtggccctgagaaagatcacgtctacctgcagctgcaccacctacctccagagcagctggccacgcgcctgcctggcatttcagagacagccatgatcttcgctggcgtggacgtcacgaaggagccgatccctgtcctccccaccgtgcattataacatgggcggcattcccaccaactacaaggggcaggtcctgaggcacgtgaatggccaggatcagattgtgcccggcctgtacgcctgtggggaggccgcctgtgcctcggtacatggtgccaaccgcctcggggcaaactcgctcttggacctggttgtctttggtcgggcatgtgccctgagcatcgaagagtcatgcaggcctggagataaagtccctccaattaaaccaaacgctggggaagaatctgtcatgaatcttgacaaattgagatttgctgatggaagcataagaacatcggaactgcgactcagcatgcagaagtcaatgcaaaatcatgctgccgtgttccgtgtgggaagcgtgttgcaagaaggttgtgggaaaatcagcaagctctatggagacctaaagcacctgaagacgttcgaccggggaatggtctggaacacggacctggtggagaccctggagctgcagaacctgatgctgtgtgcgctgcagaccatctacggagcagaggcacggaaggagtcacggggcgcgcatgccagggaagactacaaggtgcggattgatgagtacgattactccaagcccatccaggggcaacagaagaagccctttgaggagcactggaggaagcacaccctgtcctatgtggacgttggcactgggaaggtcactctggaatatagacccgtgatcgacaaaactttgaacgaggctgactgtgccaccgtcccgccagccattcgctcctactgatgagacaagatgtggtgatgacagaatcagcttttgtaattatgtataatagctcatgcatgtgtccatgtcataactgtcttcatacgcttctgcactctggggaagaaggagtacattgaagggagattggcacctagtggctgggagcttgccaggaacccagtggccagggagcgtggcacttacctttgtcccttgcttcattcttgtgagatgataaaactgggcacagctcttaaataaaatataaatgaacaaaaaaaaaagaaaaaaanagaaggaataattcaggtgcgaaaaa

SEQ ID NO: 75722 - DNA, 2764 bp, Homo sapiens
tccggcgtggtgcgcaggcgcggtatcccccctcccccgccagctcgaccccggtgtggtgcgcaggcgcagtctgcgcagggactggcgggactgcgcggcggcaacagcagacatgtcgggggtccggggcctgtcgcggctgctgagcgctcggcgcctggcgctggccaaggcgtggccaacagtgttgcaaacaggaacccgaggttttcacttcactgttgatgggaacaagagggcatctgctaaagtttcagattccatttctgctcagtatccagtagtggatcatgaatttgatgcagtggtggtaggcgctggaggggcaggcttgcgagctgcatttggcctttctgaggcagggtttaatacagcatgtgttaccaagctgtttcctaccaggtcacacactgttgcagcacagggaggaatcaatgctgctctggggaacatggaggaggacaactggaggtggcatttctacgacaccgtgaagggctccgactggctgggggaccaggatgccatccactacatgacggagcaggcccccgccgccgtggtcgagctagaaaattatggcatgccgtttagcagaactgaagatgggaagatttatcagcgtgcatttggtggacagagcctcaagtttggaaagggcgggcaggcccatcggtgctgctgtgtggctgatcggactggccactcgctattgcacaccttatatggaaggtctctgcgatatgataccagctattttgtggagtattttgccttggatctcctgatggagaatggggagtgccgtggtgtcatcgcactgtgcatagaggacgggtccatccatcgcataagagcaaagaacactgttgttgccacaggaggctacgggcgcacctacttcagctgcacgtctgcccacaccagcactggcgacggcacggccatgatcaccagggcaggccttccttgccaggacctagagtttgttcagttccaccccacaggcatatatggtgctggttgtctcattacggaaggatgtcgtggagagggaggcattctcattaacagtcaaggcgaaaggtttatggagcgatacgcccctgtcgcgaaggacctggcgtctagagatgtggtgtctcggtccatgactctggagatccgagaaggaagaggctgtggccctgagaaagatcacgtctacctgcagctgcaccacctacctccagagcagctggccacgcgcctgcctggcatttcagagacagccatgatcttcgctggcgtggacgtcacgaaggagccgatccctgtcctccccaccgtgcattataacatgggcggcattcccaccaactacaaggggcaggtcctgaggcacgtgaatggccaggatcagattgtgcccggcctgtacgcctgtggggaggccgcctgtgcctcggtacatggtgccaaccgcctcggggcaaactcgctcttggacctggttgtctttggtcgggcatgtgccctgagcatcgaagagtcatgcaggcctggagataaagtccctccaattaaaccaaacgctggggaagaatctgtcatgaatcttgacaaattgagatttgctgatggaagcataagaacatcggaactgcgactcagcatgcagaagtcaatgcaaaatcatgctgccgtgttccgtgtgggaagcgtgttgcaagaaggttgtgggaaaatcagcaagctctatggagacctaaagcacctgaagacgttcgaccggggaatggtctggaacacggacctggtggagaccctggagctgcagaacctgatgctgtgtgcgctgcagaccatctacggagcagaggcacggaaggagtcacggggcgcgcatgccagggaagactacaaggtgcggattgatgagtacgattactccaagcccatccaggggcaacagaagaagccctttgaggagcactggaggaagcacaccctgtcctatgtggacgttggcactgggaaggtcactctggaatatagacccgtgatcgacaaaactttgaacgaggctgactgtgccaccgtcccgccagccattcgctcctactgatgagacaagatgtggtgatgacagaatcagcttttgtaattatgtataatagctcatgcatgtgtccatgtcataactgtcttcatacgcttctgcactctggggaagaaggagtacattgaagggagattggcacctagtggctgggagcttgccaggaacccagtggccagggagcgtggcacttacctttgtcccttgcttcattcttgtgagatgataaaactgggcacagctcttaaataaaatataaatgaacaaactttcttttatttccaaatccatttgaaatattttactgttgtgactttagtcatatttgttgacctaaaaatcaaatgtaatctttgtattgtgttacatcaaaatccagatattttgtatagtttcttttttctttttcttttcttttttttttttgagacaggatcggtgcagtagtacaatcacagctcactgcagcctcaaactcctgggcagctcaggtgatcttcctgactcagccttctgagtagttggggctacaggtgtgcaccaccatgcccagctcatttattttgtaattgtagggacagggtctcactgtgttgcctaggctggtctcaagtgatcctccctccttggcctcccaaggtgctggaattataggtgtga

SEQ ID NO: 75723 - DNA, 2318 bp, Homo sapiens
tccggcgtggtgcgcaggcgcggtatcccccctcccccgccagctcgaccccggtgtggtgcgcaggcgcagtctgcgcagggactggcgggactgcgcggcggcaacagcagacatgtcgggggtccggggcctgtcgcggctgctgagcgctcggcgcctggcgctggccaaggcgtggccaacagtgttgcaaacaggaacccgaggttttcacttcactgttgatgggaacaagagggcatctgctaaagtttcagattccatttctgctcagtatccagtagtggatcatgaatttgatgcagtggtggtaggcgctggaggggcaggcttgcgagctgcatttggcctttctgaggcagggtttaatacagcatgtgttaccaagctgtttcctaccaggtcacacactgttgcagcacagggaggaatcaatgctgctctggggaacatggaggaggacaactggaggtggcatttctacgacaccgtgaagggctccgactggctgggggaccaggatgccatccactacatgacggagcaggcccccgccgccgtggtcgagctagaaaattatggcatgccgtttagcagaactgaagatgggaagatttatcagcgtgcatttggtggacagagcctcaagtttggaaagggcgggcaggcccatcggtgctgctgtgtggctgatcggactggccactcgctattgcacaccttatatggaaggtctctgcgatatgataccagctattttgtggagtattttgccttggatctcctgatggagaatggggagtgccgtggtgtcatcgcactgtgcatagaggacgggtccatccatcgcataagagcaaagaacactgttgttgccacaggaggctacgggcgcacctacttcagctgcacgtctgcccacaccagcactggcgacggcacggccatgatcaccagggcaggccttccttgccaggacctagagtttgttcagttccaccccacaggcatatatggtgctggttgtctcattacggaaggatgtcgtggagagggaggcattctcattaacagtcaaggcgaaaggtttatggagcgatacgcccctgtcgcgaaggacctggcgtctagagatgtggtgtctcggtccatgactctggagatccgagaaggaagaggctgtggccctgagaaagatcacgtctacctgcagctgcaccacctacctccagagcagctggccacgcgcctgcctggcatttcagagacagccatgatcttcgctggcgtggacgtcacgaaggagccgatccctgtcctccccaccgtgcattataacatgggcggcattcccaccaactacaaggggcaggtcctgaggcacgtgaatggccaggatcagattgtgcccggcctgtacgcctgtggggaggccgcctgtgcctcggtacatggtgccaaccgcctcggggcaaactcgctcttggacctggttgtctttggtcgggcatgtgccctgagcatcgaagagtcatgcaggcctggagataaagtccctccaattaaaccaaacgctggggaagaatctgtcatgaatcttgacaaattgagatttgctgatggaagcataagaacatcggaactgcgactcagcatgcagaagtcaatgcaaaatcatgctgccgtgttccgtgtgggaagcgtgttgcaagaaggttgtgggaaaatcagcaagctctatggagacctaaagcacctgaagacgttcgaccggggaatggtctggaacacggacctggtggagaccctggagctgcagaacctgatgctgtgtgcgctgcagaccatctacggagcagaggcacggaaggagtcacggggcgcgcatgccagggaagactacaaggtgcggattgatgagtacgattactccaagcccatccaggggcaacagaagaagccctttgaggagcactggaggaagcacaccctgtcctatgtggacgttggcactgggaaggtcactctggaatatagacccgtgatcgactgatgagacaagatgtggtgatgacagaatcagcttttgtaattatgtataatagctcatgcatgtgtccatgtcataactgtcttcatacgcttctgcactctggggaagaaggagtacattgaagggagattggcacctagtggctgggagcttgccaggaacccagtggccagggagcgtggcacttacctttgtcccttgcttcattcttgtgagatgataaaactgggcacagctcttaaataaaatataaatgaacaaa

SEQ ID NO: 75724 - DNA, 1545 bp, Homo sapiens
tccggcgtggtgcgcaggcgcggtatcccccctcccccgccagctcgaccccggtgtggtgcgcaggcgcagtctgcgcagggactggcgggactgcgcggcggcaacagcagacatgtcgggggtccggggcctgtcgcggctgctgagcgctcggcgcctggcgctggccaaggcgtggccaacagtgttgcaaacaggaacccgaggttttcacttcactgttgatgggaacaagagggcatctgctaaagtttcagattccatttctgctcagtatccagtagtggatcatgaatttgatgcagtggtggtaggcgctggaggggcaggcttgcgagctgcatttggcctttctgaggcagggtttaatacagcatgtgttaccaagctgtttcctaccaggtcacacactgttgcagcacagggaggaatcaatgctgctctggggaacatggaggaggacaactggaggtggcatttctacgacaccgtgaagggctccgactggctgggggaccaggatgccatccactacatgacggagcaggcccccgccgccgtggtcgagctagaaaattatggcatgccgtttagcagaactgaagatgggaagatttatcagcgtgcatttggtggacagagcctcaagtttggaaagggcgggcaggcccatcggtgctgctgtgtggctgatcggactggccactcgctattgcacaccttatatggaaggtctctgcgatatgataccagctattttgtggagtattttgccttggatctcctgatggagaatggggagtgccgtggtgtcatcgcactgtgcatagaggacgggtccatccatcgcataagagcaaagaacactgttgttgccacaggaggctacgggcgcacctacttcagctgcacgtctgcccacaccagcactggcgacggcacggccatgatcaccagggcaggccttccttgccaggacctagagtttgttcagttccaccccacaggcatatatggtgctggttgtctcattacggaaggatgtcgtggagagggaggcattctcattaacagtcaaggcgaaaggtttatggagcgatacgcccctgtcgcgaaggacctggcgtctagagatgtggtgtctcggtccatgactctggagatccgagaaggaagaggctgtggccctgagaaagatcacgtctacctgcagctgcaccacctacctccagagcagctggccacgcgcctgcctggcatttcagagacagccatgatcttcgctggcgtggacgtcacgaaggagccgatccctgtcctccccaccgtgcattataacatgggcggcattcccaccaactacaaggggcaggtgatggtgctggctcctcccccacagctggaaagaaggctgggacgacggggcccacctcgcagttgtctctttagatcttacaggaaaagatagatgtttccttcaagaaagtactgtattgttttctagattgcactttaaatttctattaccggaggatggagggg

SEQ ID NO: 75725 - DNA, 2310 bp, Homo sapiens
ggcgaggtgcaacccaagccaatcattgatcggggcgtcctgcgtcctgcttagccgcgctgtctgtggcgctcgagcgcctggtgctggaccatatggtcgtaggccagacagatgttgcagatagcaggaacccgaggtttacagattcagcgtgtggatgtgatgcgagagaggcatctgcttacagtttcatcatttccatttctgctcagtatccagtagtggatcatgaatttgatgcagtggtggtaggcgctggaggggcaggcttgcgagctgcatttggcctttctgaggcagggtttaatacagcatgtgttaccaagctgtttcctaccaggtcacacactgttgcagcacagggaggaatcaatgctgctctggggaacatggaggaggacaactggaggtggcatttctacgacaccgtgaagggctccgactggctgggggaccaggatgccatccactacatgacggagcaggcccccgccgccgtggtcgagctagaaaattatggcatgccgtttagcagaactgaagatgggaagatttatcagcgtgcatttggtggacagagcctcaagtttggaaagggcgggcaggcccatcggtgctgctgtgtggctgatcggactggccactcgctattgcacaccttatatggaaggtctctgcgatatgataccagctattttgtggagtattttgccttggatctcctgatggagaatggggagtgccgtggtgtcatcgcactgtgcatagaggacgggtccatccatcgcataagagcaaagaacactgttgttgccacaggaggctacgggcgcacctacttcagctgcacgtctgcccacaccagcactggcgacggcacggccatgatcaccagggcaggccttccttgccaggacctagagtttgttcagttccaccccacaggcatatatggtgctggttgtctcattacggaaggatgtcgtggagagggaggcattctcattaacagtcaaggcgaaaggtttatggagcgatacgcccctgtcgcgaaggacctggcgtctagagatgtggtgtctcggtccatgactctggagatccgagaaggaagaggctgtggccctgagaaagatcacgtctacctgcagctgcaccacctacctccagagcagctggccacgcgcctgcctggcatttcagagacagccatgatcttcgctggcgtggacgtcacgaaggagccgatccctgtcctccccaccgtgcattataacatgggcggcattcccaccaactacaaggggcaggtcctgaggcacgtgaatggccaggatcagattgtgcccggcctgtacgcctgtggggaggccgcctgtgcctcggtacatggtgccaaccgcctcggggcaaactcgctcttggacctggttgtctttggtcgggcatgtgccctgagcatcgaagagtcatgcaggcctggagataaagtccctccaattaaaccaaacgctggggaagaatctgtcatgaatcttgacaaattgagatttgctgatggaagcataagaacatcggaactgcgactcagcatgcagaagtcaatgcaaaatcatgctgccgtgttccgtgtgggaagcgtgttgcaagaaggttgtgggaaaatcagcaagctctatggagacctaaagcacctgaagacgttcgaccggggaatggtctggaacacggacctggtggagaccctggagctgcagaacctgatgctgtgtgcgctgcagaccatctacggagcagaggcacggaaggagtcacggggcgcgcatgccagggaagactacaaggtgcggattgatgagtacgattactccaagcccatccaggggcaacagaagaagccctttgaggagcactggaggaagcacaccctgtcctatgtggacgttggcactgggaaggtcactctggaatatagacccgtgatcgacaaaactttgaacgaggctgactgtgccaccgtcccgccagccattcgctcctactgatgagacaagatgtggtgatgacagaatcagcttttgtaattatgtataatagctcatgcatgtgtccatgtcataactgtcttcatacgcttctgcactctggggaagaaggagtacattgaagggagattggcacctagtggctgggagcttgccaggaacccagtggccagggagcgtggcacttacctttgtcccttgcttcattcttgtgagatgataaaactgggcacagctcttaaataaaatataaatgaacaaa

SEQ ID NO: 75726 - DNA, 2190 bp, Homo sapiens
ccctgtgtctccaccacgcagatgaggagactgaggctaaggatggaatcactgggcgagtcggggaggggttgtgatctggaatctgtcgggtctcgctgctcctctgctgaggtcagccctcactgggagtcactgtgtgagtagttggctttctctgaatccccccagcgggtggatttgggcctggaagacaaagttggcgctcctgtttgtggcttgtaaggagtggttggtgtttccagggaggaatcaatgctgctctggggaacatggaggaggacaactggaggtggcatttctacgacaccgtgaagggctccgactggctgggggaccaggatgccatccactacatgacggagcaggcccccgccgccgtggtcgagctagaaaattatggcatgccgtttagcagaactgaagatgggaagatttatcagcgtgcatttggtggacagagcctcaagtttggaaagggcgggcaggcccatcggtgctgctgtgtggctgatcggactggccactcgctattgcacaccttatatggaaggtctctgcgatatgataccagctattttgtggagtattttgccttggatctcctgatggagaatggggagtgccgtggtgtcatcgcactgtgcatagaggacgggtccatccatcgcataagagcaaagaacactgttgttgccacaggaggctacgggcgcacctacttcagctgcacgtctgcccacaccagcactggcgacggcacggccatgatcaccagggcaggccttccttgccaggacctagagtttgttcagttccaccccacaggcatatatggtgctggttgtctcattacggaaggatgtcgtggagagggaggcattctcattaacagtcaaggcgaaaggtttatggagcgatacgcccctgtcgcgaaggacctggcgtctagagatgtggtgtctcggtccatgactctggagatccgagaaggaagaggctgtggccctgagaaagatcacgtctacctgcagctgcaccacctacctccagagcagctggccacgcgcctgcctggcatttcagagacagccatgatcttcgctggcgtggacgtcacgaaggagccgatccctgtcctccccaccgtgcattataacatgggcggcattcccaccaactacaaggggcaggtcctgaggcacgtgaatggccaggatcagattgtgcccggcctgtacgcctgtggggaggccgcctgtgcctcggtacatggtgccaaccgcctcggggcaaactcgctcttggacctggttgtctttggtcgggcatgtgccctgagcatcgaagagtcatgcaggcctggagataaagtccctccaattaaaccaaacgctggggaagaatctgtcatgaatcttgacaaattgagatttgctgatggaagcataagaacatcggaactgcgactcagcatgcagaagtcaatgcaaaatcatgctgccgtgttccgtgtgggaagcgtgttgcaagaaggttgtgggaaaatcagcaagctctatggagacctaaagcacctgaagacgttcgaccggggaatggtctggaacacggacctggtggagaccctggagctgcagaacctgatgctgtgtgcgctgcagaccatctacggagcagaggcacggaaggagtcacggggcgcgcatgccagggaagactacaaggtgcggattgatgagtacgattactccaagcccatccaggggcaacagaagaagccctttgaggagcactggaggaagcacaccctgtcctatgtggacgttggcactgggaaggtcactctggaatatagacccgtgatcgacaaaactttgaacgaggctgactgtgccaccgtcccgccagccattcgctcctactgatgagacaagatgtggtgatgacagaatcagcttttgtaattatgtataatagctcatgcatgtgtccatgtcataactgtcttcatacgcttctgcactctggggaagaaggagtacattgaagggagattggcacctagtggctgggagcttgccaggaacccagtggccagggagcgtggcacttacctttgtcccttgcttcattcttgtgagatgataaaactgggcacagctcttaaataaaatataaatgaacaaa

SEQ ID NO: 75727 - DNA, 2297 bp, Homo sapiens
tccggcgtggtgcgcaggcgcggtatcccccctcccccgccagctcgaccccggtgtggtgcgcaggcgcagtctgcgcagggactggcgggactgcgcggcggcaacagcagacatgtcgggggtccggggcctgtcgcggctgctgagcgctcggcgcctggcgctggccaaggcgtggccaacagtgttgcaaacaggaacccgaggttttcacttcactgttgatgggaacaagagggcatctgctaaagtttcagattccatttctgctcagtatccagtagtggatcatgaatttgatgcagtggtggtaggcgctggaggggcaggcttgcgagctgcatttggcctttctgaggcagggtttaatacagcatgtgttaccaagctgtttcctaccaggtcacacactgttgcagcacagggaggaatcaatgctgctctggggaacatggaggaggacaactggaggtggcatttctacgacaccgtgctagaaaattatggcatgccgtttagcagaactgaagatgggaagatttatcagcgtgcatttggtggacagagcctcaagtttggaaagggcgggcaggcccatcggtgctgctgtgtggctgatcggactggccactcgctattgcacaccttatatggaaggtctctgcgatatgataccagctattttgtggagtattttgccttggatctcctgatggagaatggggagtgccgtggtgtcatcgcactgtgcatagaggacgggtccatccatcgcataagagcaaagaacactgttgttgccacaggaggctacgggcgcacctacttcagctgcacgtctgcccacaccagcactggcgacggcacggccatgatcaccagggcaggccttccttgccaggacctagagtttgttcagttccaccccacaggcatatatggtgctggttgtctcattacggaaggatgtcgtggagagggaggcattctcattaacagtcaaggcgaaaggtttatggagcgatacgcccctgtcgcgaaggacctggcgtctagagatgtggtgtctcggtccatgactctggagatccgagaaggaagaggctgtggccctgagaaagatcacgtctacctgcagctgcaccacctacctccagagcagctggccacgcgcctgcctggcatttcagagacagccatgatcttcgctggcgtggacgtcacgaaggagccgatccctgtcctccccaccgtgcattataacatgggcggcattcccaccaactacaaggggcaggtcctgaggcacgtgaatggccaggatcagattgtgcccggcctgtacgcctgtggggaggccgcctgtgcctcggtacatggtgccaaccgcctcggggcaaactcgctcttggacctggttgtctttggtcgggcatgtgccctgagcatcgaagagtcatgcaggcctggagataaagtccctccaattaaaccaaacgctggggaagaatctgtcatgaatcttgacaaattgagatttgctgatggaagcataagaacatcggaactgcgactcagcatgcagaagtcaatgcaaaatcatgctgccgtgttccgtgtgggaagcgtgttgcaagaaggttgtgggaaaatcagcaagctctatggagacctaaagcacctgaagacgttcgaccggggaatggtctggaacacggacctggtggagaccctggagctgcagaacctgatgctgtgtgcgctgcagaccatctacggagcagaggcacggaaggagtcacggggcgcgcatgccagggaagactacaaggtgcggattgatgagtacgattactccaagcccatccaggggcaacagaagaagccctttgaggagcactggaggaagcacaccctgtcctatgtggacgttggcactgggaaggtcactctggaatatagacccgtgatcgacaaaactttgaacgaggctgactgtgccaccgtcccgccagccattcgctcctactgatgagacaagatgtggtgatgacagaatcagcttttgtaattatgtataatagctcatgcatgtgtccatgtcataactgtcttcatacgcttctgcactctggggaagaaggagtacattgaagggagattggcacctagtggctgggagcttgccaggaacccagtggccagggagcgtggcacttacctttgtcccttgcttcattcttgtgagatgataaaactgggcacagctcttaaataaaatataaatgaacaaa

SEQ ID NO: 75728 - DNA, 2087 bp, Homo sapiens
gggcttgcaaattagtatttagcgtctatctgacagcccgtgttctaatcacgagccatgtgttcaccgatgctgtgtcctagctacgtcacacatctgttgctccaaaggcatgaatcactgctgctctgccgtagacctggcagcgaggcatgattgcgcaggcttggcaatatttctacggaccacttgcttgaaggcgcgtcctccgcaccctggcctagggcgagaccaggcgatgctcgatactactacatgacggagcaggcccccgccgccgtggtcgctagaaaattatggcatgccgtttagcagaactgaagatgggaagatttatcagcgtgcatttggtggacagagcctcaagtttggaaagggcgggcaggcccatcggtgctgctgtgtggctgatcggactggccactcgctattgcacaccttatatggaaggtctctgcgatatgataccagctattttgtggagtattttgccttggatctcctgatggagaatggggagtgccgtggtgtcatcgcactgtgcatagaggacgggtccatccatcgcataagagcaaagaacactgttgttgccacaggaggctacgggcgcacctacttcagctgcacgtctgcccacaccagcactggcgacggcacggccatgatcaccagggcaggccttccttgccaggacctagagtttgttcagttccaccccacaggcatatatggtgctggttgtctcattacggaaggatgtcgtggagagggaggcattctcattaacagtcaaggcgaaaggtttatggagcgatacgcccctgtcgcgaaggacctggcgtctagagatgtggtgtctcggtccatgactctggagatccgagaaggaagaggctgtggccctgagaaagatcacgtctacctgcagctgcaccacctacctccagagcagctggccacgcgcctgcctggcatttcagagacagccatgatcttcgctggcgtggacgtcacgaaggagccgatccctgtcctccccaccgtgcattataacatgggcggcattcccaccaactacaaggggcaggtcctgaggcacgtgaatggccaggatcagattgtgcccggcctgtacgcctgtggggaggccgcctgtgcctcggtacatggtgccaaccgcctcggggcaaactcgctcttggacctggttgtctttggtcgggcatgtgccctgagcatcgaagagtcatgcaggcctggagataaagtccctccaattaaaccaaacgctggggaagaatctgtcatgaatcttgacaaattgagatttgctgatggaagcataagaacatcggaactgcgactcagcatgcagaagtcaatgcaaaatcatgctgccgtgttccgtgtgggaagcgtgttgcaagaaggttgtgggaaaatcagcaagctctatggagacctaaagcacctgaagacgttcgaccggggaatggtctggaacacggacctggtggagaccctggagctgcagaacctgatgctgtgtgcgctgcagaccatctacggagcagaggcacggaaggagtcacggggcgcgcatgccagggaagactacaaggtgcggattgatgagtacgattactccaagcccatccaggggcaacagaagaagccctttgaggagcactggaggaagcacaccctgtcctatgtggacgttggcactgggaaggtcactctggaatatagacccgtgatcgacaaaactttgaacgaggctgactgtgccaccgtcccgccagccattcgctcctactgatgagacaagatgtggtgatgacagaatcagcttttgtaattatgtataatagctcatgcatgtgtccatgtcataactgtcttcatacgcttctgcactctggggaagaaggagtacattgaagggagattggcacctagtggctgggagcttgccaggaacccagtggccagggagcgtggcacttacctttgtcccttgcttcattcttgtgagatgataaaactgggcacagctcttaaataaaatataaatgaacaaa

SEQ ID NO: 75729 - DNA, 1941 bp, Homo sapiens
tccggcgtggtgcgcaggcgcggtatcccccctcccccgccagctcgaccccggtgtggtgcgcaggcgcagtctgcgcagggactggcgggactgcgcggcggcaacagcagacatgtcgggggtccggggcctgtcgcggctgctgagcgctcggcgcctggcgctggccaaggcgtggccaacagtgttgcaaacaggaacccgaggttttcacttcactgttgatgggaacaagagggcatctgctaaagtttcagattccatttctgctcagtatccagtagtggatcatgaatttgatgcagtggtggtaggcgctggaggggcaggcttgcgagctgcatttggcctttctgaggcagggtttaatacagcatgtgttaccaagctgtttcctaccaggtcacacactgttgcagcacagggaggaatcaatgctgctctggggaacatggaggaggacaactggaggtggcatttctacgacaccgtgcagcactggcgacggcacggccatgatcaccagggcaggccttccttgccaggacctagagtttgttcagttccaccccacaggcatatatggtgctggttgtctcattacggaaggatgtcgtggagagggaggcattctcattaacagtcaaggcgaaaggtttatggagcgatacgcccctgtcgcgaaggacctggcgtctagagatgtggtgtctcggtccatgactctggagatccgagaaggaagaggctgtggccctgagaaagatcacgtctacctgcagctgcaccacctacctccagagcagctggccacgcgcctgcctggcatttcagagacagccatgatcttcgctggcgtggacgtcacgaaggagccgatccctgtcctccccaccgtgcattataacatgggcggcattcccaccaactacaaggggcaggtcctgaggcacgtgaatggccaggatcagattgtgcccggcctgtacgcctgtggggaggccgcctgtgcctcggtacatggtgccaaccgcctcggggcaaactcgctcttggacctggttgtctttggtcgggcatgtgccctgagcatcgaagagtcatgcaggcctggagataaagtccctccaattaaaccaaacgctggggaagaatctgtcatgaatcttgacaaattgagatttgctgatggaagcataagaacatcggaactgcgactcagcatgcagaagtcaatgcaaaatcatgctgccgtgttccgtgtgggaagcgtgttgcaagaaggttgtgggaaaatcagcaagctctatggagacctaaagcacctgaagacgttcgaccggggaatggtctggaacacggacctggtggagaccctggagctgcagaacctgatgctgtgtgcgctgcagaccatctacggagcagaggcacggaaggagtcacggggcgcgcatgccagggaagactacaaggtgcggattgatgagtacgattactccaagcccatccaggggcaacagaagaagccctttgaggagcactggaggaagcacaccctgtcctatgtggacgttggcactgggaaggtcactctggaatatagacccgtgatcgacaaaactttgaacgaggctgactgtgccaccgtcccgccagccattcgctcctactgatgagacaagatgtggtgatgacagaatcagcttttgtaattatgtataatagctcatgcatgtgtccatgtcataactgtcttcatacgcttctgcactctggggaagaaggagtacattgaagggagattggcacctagtggctgggagcttgccaggaacccagtggccagggagcgtggcacttacctttgtcccttgcttcattcttgtgagatgataaaactgggcacagctcttaaataaaatataaatgaacaaa

SEQ ID NO: 75730 - DNA, 1274 bp, Homo sapiens
ggacgcgtgggtcgaccacgcgtcgctggcgtctagagatgtggtgtctcggtccatgactctggagatccgagaaggaagaggctgtggccctgagaaagatcacgtctacctgcagctgcaccacctacctccagagcagctggccacgcgcctgcctggcatttcagagacagccatgatcttcgctggcgtggacgtcacgaaggagccgatccctgtcctccccaccgtgcattataacatgggcggcattcccaccaactacaaggggcaggtcctgaggcacgtgaatggccaggatcagattgtgcccggcctgtacgcctgtggggaggccgcctgtgcctcggtacatggtgccaaccgcctcggggcaaactcgctcttggacctggttgtctttggtcgggcatgtgccctgagcatcgaagagtcatgcaggcctggagataaagtccctccaattaaaccaaacgctggggaagaatctgtcatgaatcttgacaaattgagatttgctgatggaagcataagaacatcggaactgcgactcagcatgcagaagtcaatgcaaaatcatgctgccgtgttccgtgtgggaagcgtgttgcaagaaggttgtgggaaaatcagcaagctctatggagacctaaagcacctgaagacgttcgaccggggaatggtctggaacacggacctggtggagaccctggagctgcagaacctgatgctgtgtgcgctgcagaccatctacggagcagaggcacggaaggagtcacggggcgcgcatgccagggaagactacaaggtgcggattgatgagtacgattactccaagcccatccaggggcaacagaagaagccctttgaggagcactggaggaagcacaccctgtcctatgtggacgttggcactgggaaggtcactctggaatatagacccgtgatcgacaaaactttgaacgaggctgactgtgccaccgtcccgccagccattcgctcctactgatgagacaagatgtggtgatgacagaatcagcttttgtaattatgtataatagctcatgcatgtgtccatgtcataactgtcttcatacgcttctgcactctggggaagaaggagtacattgaagggagattggcacctagtggctgggagcttgccaggaacccagtggccagggagcgtggcacttacctttgtcccttgcttcattcttgtgagatgataaaactgggcacagctcttaaataaaatataaatgaacaaa

SEQ ID NO: 75731 - DNA, 139 bp, Homo sapiens
attgcacaccttatatggaagggtaaggccgcccccgtccacctgagacaggacacgtagtgctggggcttatggtgacagtggggaatgggttagcgtgcccagtgagtcagccagagattacgtaaaaagcaacaga

SEQ ID NO: 75732 - DNA, 372 bp, Homo sapiens
agctgcagaacctgatgctgtgtgcgctgcagaccatctacggagcagaggcacggaaggagtcacggggcgcgcatgccagggaagactacaaggtgggccttctcaccacgcccacctgcacctgccttttcctgccacctggtgggactcagccccacccctgcattttctctgcattttctttcgttgccccaaaagtaaatccaaaaaatgcctttttcccccctggtaactttgatccctgggttctcgccatcttctggatcactgtgaccttttccttgctttgggtcggcatccactgatgccagcagtggcatctccaagccaatgtgctttgctgttagaaggccaaggttagaagtgcag

SEQ ID NO: 75733 - DNA, 496 bp, Homo sapiens
tccggcgtggtgcgcaggcgcggtatcccccctcccccgccagctcgaccccggtgtggtgcgcaggcgcagtctgcgcagggactggcgggactgcgcggcggcaacagcagacatgtcgggggtccggggcctgtcgcggctgctgagcgctcggcgcctggcgctggccaaggcgtggccaacagtgttgcaaacaggaacccgaggttttcacttcactgttgatgggaacaagagggcatctgctaaagtttcagattccatttctgctcagtatccagtagtggatcatgaatttgatgcagtggtggtaggcgctggaggggcaggcttgcgagctgcatttggcctttctgaggcagggtttaatacagcatgtgttaccaagctgtttcctaccaggtcacacactgttgcagcacaggtaagagaaaggtgccccactgtgctcccactccgtgcaggtcccgcgcagcctcgcactttctacctg

SEQ ID NO: 75734 - DNA, 2795 bp, Homo sapiens
tccggcgtggtgcgcaggcgcggtatcccccctcccccgccagctcgaccccggtgtggtgcgcaggcgcagtctgcgcagggactggcgggactgcgcggcggcaacagcagacatgtcgggggtccggggcctgtcgcggctgctgagcgctcggcgcctggcgctggccaaggcgtggccaacagtgttgcaaacaggaacccgaggttttcacttcactgttgatgggaacaagagggcatctgctaaagtttcagattccatttctgctcagtatccagtagtggatcatgaatttgatgcagtggtggtaggcgctggaggggcaggcttgcgagctgcatttggcctttctgaggcagggtttaatacagcatgtgttaccaagctgtttcctaccaggtcacacactgttgcagcacagggaggaatcaatgctgctctggggaacatggaggaggacaactggaggtggcatttctacgacaccgtgaagggctccgactggctgggggaccaggatgccatccactacatgacggagcaggcccccgccgccgtggtcgagctagaaaattatggcatgccgtttagcagaactgaagatgggaagatttatcagcgtgcatttggtggacagagcctcaagtttggaaagggcgggcaggcccatcggtgctgctgtgtggctgatcggactggccactcgctattgcacaccttatatggaaggtctctgcgatatgataccagctattttgtggagtattttgccttggatctcctgatggagaatggggagtgccgtggtgtcatcgcactgtgcatagaggacgggtccatccatcgcataagagcaaagaacactgttgttgccacaggaggctacgggcgcacctacttcagctgcacgtctgcccacaccagcactggcgacggcacggccatgatcaccagggcaggccttccttgccaggacctagagtttgttcagttccaccccacaggcatatatggtgctggttgtctcattacggaaggatgtcgtggagagggaggcattctcattaacagtcaaggcgaaaggtttatggagcgatacgcccctgtcgcgaaggacctggcgtctagagatgtggtgtctcggtccatgactctggagatccgagaaggaaggtgcgtgtgatttaccaccagcactgtctgagcgggcacacgggccggggttgcttctgtgagtttcagcaccgctcgccctcaccttcgtgtgcaggcgcatgtgcacagccacctctcttagctgccggcaggcgtctgttagtctgcgatattttcctaaagacctacattttgaaaattttagccagtttctttctcaaatctgtggaacagagtttctcttagtgtgtgtgagtatgtgacggagtatgggagagagagacacacacccaacctgaagtcggcatgtgagccttgggtgttgtgtctgatacccacagatgttttttggcagctttcaaagtgtgtgggttatttggctttcagtaaaacagtttgcagctctttcattgcctgaccctgttctttaatgtaatgacatttgctaaatatctgctggtatggcctttagaggttttacatttttatattaaaaaaacagagaagtcaggcgtgagccaccacgcctggcctacttccctctctctgacctgcagcacagacaccctgttggggaaggtgggctggtggaggcatgggcaccttgacatttcacctgaaatcttcctttccacaggtcctgaggcacgtgaatggccaggatcagattgtgcccggcctgtacgcctgtggggaggccgcctgtgcctcggtacatggtgccaaccgcctcggggcaaactcgctcttggacctggttgtctttggtcgggcatgtgccctgagcatcgaagagtcatgcaggcctggagataaagtccctccaattaaaccaaacgctggggaagaatctgtcatgaatcttgacaaattgagatttgctgatggaagcataagaacatcggaactgcgactcagcatgcagaagtcaatgcaaaatcatgctgccgtgttccgtgtgggaagcgtgttgcaagaaggttgtgggaaaatcagcaagctctatggagacctaaagcacctgaagacgttcgaccggggaatggtctggaacacggacctggtggagaccctggagctgcagaacctgatgctgtgtgcgctgcagaccatctacggagcagaggcacggaaggagtcacggggcgcgcatgccagggaagactacaaggtgcggattgatgagtacgattactccaagcccatccaggggcaacagaagaagccctttgaggagcactggaggaagcacaccctgtcctatgtggacgttggcactgggaaggtcactctggaatatagacccgtgatcgacaaaactttgaacgaggctgactgtgccaccgtcccgccagccattcgctcctactgatgagacaagatgtggtgatgacagaatcagcttttgtaattatgtataatagctcatgcatgtgtccatgtcataactgtcttcatacgcttctgcactctggggaagaaggagtacattgaagggagattggcacctagtggctgggagcttgccaggaacccagtggccagggagcgtggcacttacctttgtcccttgcttcattcttgtgagatgataaaactgggcacagctcttaaataaaatataaatgaacaaa

SEQ ID NO: 75735 - DNA, 2129 bp, Homo sapiens
tccggcgtggtgcgcaggcgcggtatcccccctcccccgccagctcgaccccggtgtggtgcgcaggcgcagtctgcgcagggactggcgggactgcgcggcggcaacagcagacatgtcgggggtccggggcctgtcgcggctgctgagcgctcggcgcctggcgctggccaaggcgtggccaacagtgttgcaaacaggaacccgaggttttcacttcactgttgatgggaacaagagggcatctgctaaagtttcagattccatttctgctcagtatccagtagtggatcatgaatttgatgcagtggtggtaggcgctggaggggcaggcttgcgagctgcatttggcctttctgaggcagggtttaatacagcatgtgttaccaagctgtttcctaccaggtcacacactgttgcagcacagggaggaatcaatgctgctctggggaacatggaggaggacaactggaggtggcatttctacgacaccgtgaagggctccgactggctgggggaccaggatgccatccactacatgacggagcaggcccccgccgccgtggtcgagctagaaaattatggcatgccgtttagcagaactgaagatgggaagatttatcagcgtgcatttggtggacagagcctcaagtttggaaagggcgggcaggcccatcggtgctgctgtgtggctgatcggactggccactcgctattgcacaccttatatggaaggtctctgcgatatgataccagctattttgtggagtattttgccttggatctcctgatggagaatggggagtgccgtggtgtcatcgcactgtgcatagaggacgggtccatccatcgcataagagcaaagaacactgttgttgccacaggaggctacgggcgcacctacttcagctgcacgtctgcccacaccagcactggcgacggcacggccatgatcaccagggcaggccttccttgccaggacctagagtttgttcagttccaccccacaggcatatatggtgctggttgtctcattacggaaggatgtcgtggagagggaggcattctcattaacagtcaaggcgaaaggtttatggagcgatacgcccctgtcgcgaaggacctggcgtctagagatgtggtgtctcggtccatgactctggagatccgagaaggaagaggctgtggccctgagaaagatcacgtctacctgcagctgcaccacctacctccagagcagctggccacgcgcctgcctggcatttcagagacagccatgatcttcgctggcgtggacgtcacgaaggagccgatccctgtcctccccaccgtgcattataacatgggcggcattcccaccaactacaaggggcaggtcctgaggcacgtgaatggccaggatcagattgtgcccggcctgtacgcctgtggggaggccgcctgtgcctcggtacatggtgccaaccgcctcggggcaaactcgctcttggacctggttgtctttggtcgggcatgtgccctgagcatcgaagagtcatgcaggcctggagataaagtccctccaattaaaccaaacgctggggaagaatctgtcatgaatcttgacaaattgagatttgctgatggaagcataagaacatcggaactgcgactcagcatgcagaaggtgcggattgatgagtacgattactccaagcccatccaggggcaacagaagaagccctttgaggagcactggaggaagcacaccctgtcctatgtggacgttggcactgggaaggtcactctggaatatagacccgtgatcgacaaaactttgaacgaggctgactgtgccaccgtcccgccagccattcgctcctactgatgagacaagatgtggtgatgacagaatcagcttttgtaattatgtataatagctcatgcatgtgtccatgtcataactgtcttcatacgcttctgcactctggggaagaaggagtacattgaagggagattggcacctagtggctgggagcttgccaggaacccagtggccagggagcgtggcacttacctttgtcccttgcttcattcttgtgagatgataaaactgggcacagctcttaaataaaatataaatgaacaaa

SEQ ID NO: 75736 - DNA, 2156 bp, Homo sapiens
tccggcgtggtgcgcaggcgcggtatcccccctcccccgccagctcgaccccggtgtggtgcgcaggcgcagtctgcgcagggactggcgggactgcgcggcggcaacagcagacatgtcgggggtccggggcctgtcgcggctgctgagcgctcggcgcctggcgctggccaaggcgtggccaacagtgttgcaaacaggaacccgaggttttcacttcactgttgatgggaacaagagggcatctgctaaagtttcagattccatttctgctcagtatccagtagtggatcatgaatttgatgcagtggtggtaggcgctggaggggcaggcttgcgagctgcatttggcctttctgaggcagggtttaatacagcatgtgttaccaagctgtttcctaccaggtcacacactgttgcagcacagggaggaatcaatgctgctctggggaacatggaggaggacaactggaggtggcatttctacgacaccgtgaagggctccgactggctgggggaccaggatgccatccactacatgacggagcaggcccccgccgccgtggtcgagctagaaaattatggcatgccgtttagcagaactgaagatgggaagatttatcagcgtgcatttggtggacagagcctcaagtttggaaagggcgggcaggcccatcggtgctgctgtgtggctgatcggactggccactcgctattgcacaccttatatggaaggtctctgcgatatgataccagctattttgtggagtattttgccttggatctcctgatggagaatggggagtgccgtggtgtcatcgcactgtgcatagaggacgggtccatccatcgcataagagcaaagaacactgttgttgccacaggaggctacgggcgcacctacttcagctgcacgtctgcccacaccagcactggcgacggcacggccatgatcaccagggcaggccttccttgccaggacctagagtttgttcagttccaccccacaggcatatatggtgctggttgtctcattacggaaggatgtcgtggagagggaggcattctcattaacagtcaaggcgaaaggtttatggagcgatacgcccctgtcgcgaaggacctggcgtctagagatgtggtgtctcggtccatgactctggagatccgagaaggaagaggctgtggccctgagaaagatcacgtctacctgcagctgcaccacctacctccagagcagctggccacgcgcctgcctggcatttcagagacagccatgatcttcgctggcgtggacgtcacgaaggagccgatccctgtcctccccaccgtgcattataacatgggcggcattcccaccaactacaaggggcaggtcctgaggcacgtgaatggccaggatcagattgtgcccggcctgtacgcctgtggggaggccgcctgtgcctcggtacatggtgccaaccgcctcggggcaaactcgctcttggacctggttgtctttggtcgggcatgtgccctgagcatcgaagagtcatgcaggcctggagataaagtccctccaattaaaccaaacgctggggaagaatctgtcatgaatcttgacaaattgagatttgctgatggaagcataagaacatcggaactgcgactcagcatgcagaaggtaagagcctggactcgctctggagtgagcaggagggctgcatacctggccctgcactggttttgttttttaaaaactagatctagggggatgcaggtgcagttttgtgtggatgtactgggaggtggtggagtctgggcttttcatgtacccgtcacacaagtcgtgtgtgttgtacccagtaggtaattgttcaaccccacccctcccgctttttggagctcccagtctctgctactccactccatgtgtccatgtgtactcaccattcagcttccacttccaagtgagaatgtgtgacacttgaccttctgagtcacttcacttaggatagtgacctcctgttccatccgtgtggctgcagaagacatgattgcgttctttttttatggccgagtagtatttcatggtatatatgtaccacattttcttcatctggtcatccgttgatgggcacttaggttgattccatgactttgctgttgtgact

SEQ ID NO: 75737 - DNA, 1330 bp, Homo sapiens
tccggcgtggtgcgcaggcgcggtatcccccctcccccgccagctcgaccccggtgtggtgcgcaggcgcagtctgcgcagggactggcgggactgcgcggcggcaacagcagacatgtcgggggtccggggcctgtcgcggctgctgagcgctcggcgcctggcgctggccaaggcgtggccaacagtgttgcaaacaggaacccgaggttttcacttcactgttgatgggaacaagagggcatctgctaaagtttcagattccatttctgctcagtatccagtagtggatcatgaatttgatgcagtggtggtaggcgctggaggggcaggcttgcgagctgcatttggcctttctgaggcagggtttaatacagcatgtgttaccaagctgtttcctaccaggtcacacactgttgcagcacagggaggaatcaatgctgctctggggaacatggaggaggacaactggaggtggcatttctacgacaccgtgaagggctccgactggctgggggaccaggatgccatccactacatgacggagcaggcccccgccgccgtggtcgagctagaaaattatggcatgccgtttagcagaactgaagatgggaagatttatcagcgtgcatttggtggacagagcctcaagtttggaaagggcgggcaggcccatcggtgctgctgtgtggctgatcggactggccactcgctattgcacaccttatatggaaggtctctgcgatatgataccagctattttgtggagtattttgccttggatctcctgatggagaatggggagtgccgtggtgtcatcgcactgtgcatagaggacgggtccatccatcgcataagagcaaagaacactgttgttgccacaggaggctacgggcgcacctacttcagctgcacgtctgcccacaccagcactggcgacggcacggccatgatcaccagggcaggccttccttgccaggacctagagtttgttcagttccaccccacagagagacactgatctaggacctacattaatatctcgtagggcttgggaacttagtattactatctttccattacagcaacgtcagttctctctacatttcactgaaatttatccctccaactctctgtaacttgcattcatttgtttctgactgtaccctctgggagctacacacggtttttctaacataatagcacccaggatttctttgccagcctaagtcacacagtcatctttccaaactaagtattcctttttccaagtactatgtttttccaaaataagtattcgaggaacaaacgggcaattcactttgcctat

SEQ ID NO: 75738 - DNA, 2228 bp, Homo sapiens
tccggcgtggtgcgcaggcgcggtatcccccctcccccgccagctcgaccccggtgtggtgcgcaggcgcagtctgcgcagggactggcgggactgcgcggcggcaacagcagacatgtcgggggtccggggcctgtcgcggctgctgagcgctcggcgcctggcgctggccaaggcgtggccaacagtgttgcaaacaggaacccgaggttttcacttcactgttgatgggaacaagagggcatctgctaaagtttcagattccatttctgctcagtatccagtagtggatcatgaatttgatgcagtggtggtaggcgctggaggggcaggcttgcgagctgcatttggcctttctgaggcagggtttaatacagcatgtgttaccaagctgtttcctaccaggtcacacactgttgcagcacagctagaaaattatggcatgccgtttagcagaactgaagatgggaagatttatcagcgtgcatttggtggacagagcctcaagtttggaaagggcgggcaggcccatcggtgctgctgtgtggctgatcggactggccactcgctattgcacaccttatatggaaggtctctgcgatatgataccagctattttgtggagtattttgccttggatctcctgatggagaatggggagtgccgtggtgtcatcgcactgtgcatagaggacgggtccatccatcgcataagagcaaagaacactgttgttgccacaggaggctacgggcgcacctacttcagctgcacgtctgcccacaccagcactggcgacggcacggccatgatcaccagggcaggccttccttgccaggacctagagtttgttcagttccaccccacaggcatatatggtgctggttgtctcattacggaaggatgtcgtggagagggaggcattctcattaacagtcaaggcgaaaggtttatggagcgatacgcccctgtcgcgaaggacctggcgtctagagatgtggtgtctcggtccatgactctggagatccgagaaggaagaggctgtggccctgagaaagatcacgtctacctgcagctgcaccacctacctccagagcagctggccacgcgcctgcctggcatttcagagacagccatgatcttcgctggcgtggacgtcacgaaggagccgatccctgtcctccccaccgtgcattataacatgggcggcattcccaccaactacaaggggcaggtcctgaggcacgtgaatggccaggatcagattgtgcccggcctgtacgcctgtggggaggccgcctgtgcctcggtacatggtgccaaccgcctcggggcaaactcgctcttggacctggttgtctttggtcgggcatgtgccctgagcatcgaagagtcatgcaggcctggagataaagtccctccaattaaaccaaacgctggggaagaatctgtcatgaatcttgacaaattgagatttgctgatggaagcataagaacatcggaactgcgactcagcatgcagaagtcaatgcaaaatcatgctgccgtgttccgtgtgggaagcgtgttgcaagaaggttgtgggaaaatcagcaagctctatggagacctaaagcacctgaagacgttcgaccggggaatggtctggaacacggacctggtggagaccctggagctgcagaacctgatgctgtgtgcgctgcagaccatctacggagcagaggcacggaaggagtcacggggcgcgcatgccagggaagactacaaggtgcggattgatgagtacgattactccaagcccatccaggggcaacagaagaagccctttgaggagcactggaggaagcacaccctgtcctatgtggacgttggcactgggaaggtcactctggaatatagacccgtgatcgacaaaactttgaacgaggctgactgtgccaccgtcccgccagccattcgctcctactgatgagacaagatgtggtgatgacagaatcagcttttgtaattatgtataatagctcatgcatgtgtccatgtcataactgtcttcatacgcttctgcactctggggaagaaggagtacattgaagggagattggcacctagtggctgggagcttgccaggaacccagtggccagggagcgtggcacttacctttgtcccttgcttcattcttgtgagatgataaaactgggcacagctcttaaataaaatataaatgaacaaa

SEQ ID NO: 75739 - DNA, 1834 bp, Homo sapiens
acccacgctgtcgggcccccgccgccgtggtcgctagaaaattatggcatgccgtttagcagaactgaagatgggaagatttatcagcgtgcatttggtggacagagcctcaagtttggaaagggcgggcaggcccatcggtgctgctgtgtggctgatcggactggccactcgctattgcacaccttatatggaaggtctctgcgatatgataccagctattttgtggagtattttgccttggatctcctgatggagaatggggagtgccgtggtgtcatcgcactgtgcatagaggacgggtccatccatcgcataagagcaaagaacactgttgttgccacaggaggctacgggcgcacctacttcagctgcacgtctgcccacaccagcactggcgacggcacggccatgatcaccagggcaggccttccttgccaggacctagagtttgttcagttccaccccacaggcatatatggtgctggttgtctcattacggaaggatgtcgtggagagggaggcattctcattaacagtcaaggcgaaaggtttatggagcgatacgcccctgtcgcgaaggacctggcgtctagagatgtggtgtctcggtccatgactctggagatccgagaaggaagaggctgtggccctgagaaagatcacgtctacctgcagctgcaccacctacctccagagcagctggccacgcgcctgcctggcatttcagagacagccatgatcttcgctggcgtggacgtcacgaaggagccgatccctgtcctccccaccgtgcattataacatgggcggcattcccaccaactacaaggggcaggtcctgaggcacgtgaatggccaggatcagattgtgcccggcctgtacgcctgtggggaggccgcctgtgcctcggtacatggtgccaaccgcctcggggcaaactcgctcttggacctggttgtctttggtcgggcatgtgccctgagcatcgaagagtcatgcaggcctggagataaagtccctccaattaaaccaaacgctggggaagaatctgtcatgaatcttgacaaattgagatttgctgatggaagcataagaacatcggaactgcgactcagcatgcagaagtcaatgcaaaatcatgctgccgtgttccgtgtgggaagcgtgttgcaagaaggttgtgggaaaatcagcaagctctatggagacctaaagcacctgaagacgttcgaccggggaatggtctggaacacggacctggtggagaccctggagctgcagaacctgatgctgtgtgcgctgcagaccatctacggagcagaggcacggaaggagtcacggggcgcgcatgccagggaagactacaaggtgcggattgatgagtacgattactccaagcccatccaggggcaacagaagaagccctttgaggagcactggaggaagcacaccctgtcctatgtggacgttggcactgggaaggtcactctggaatatagacccgtgatcgacaaaactttgaacgaggctgactgtgccaccgtcccgccagccattcgctcctactgatgagacaagatgtggtgatgacagaatcagcttttgtaattatgtataatagctcatgcatgtgtccatgtcataactgtcttcatacgcttctgcactctggggaagaaggagtacattgaagggagattggcacctagtggctgggagcttgccaggaacccagtggccagggagcgtggcacttacctttgtcccttgcttcattcttgtgagatgataaaactgggcacagctcttaaataaaatataaatgaacaaa

SEQ ID NO: 75740 - DNA, 1702 bp, Homo sapiens
  misc_feature (35)..(35): n is a, c, g, or t
  misc_feature (51)..(51): n is a, c, g, or t
ggctaggtgagtgccgcggtttaatcggcacaggncactcgctattgcatnaccttatatggaaggtctctgcgatatgataccagctattttgtggagtattttgccttggatctcctgatggagaatggggagtgccgtggtgtcatcgcactgtgcatagaggacgggtccatccatcgcataagagcaaagaacactgttgttgccacaggaggctacgggcgcacctacttcagctgcacgtctgcccacaccagcactggcgacggcacggccatgatcaccagggcaggccttccttgccaggacctagagtttgttcagttccaccccacaggcatatatggtgctggttgtctcattacggaaggatgtcgtggagagggaggcattctcattaacagtcaaggcgaaaggtttatggagcgatacgcccctgtcgcgaaggacctggcgtctagagatgtggtgtctcggtccatgactctggagatccgagaaggaagaggctgtggccctgagaaagatcacgtctacctgcagctgcaccacctacctccagagcagctggccacgcgcctgcctggcatttcagagacagccatgatcttcgctggcgtggacgtcacgaaggagccgatccctgtcctccccaccgtgcattataacatgggcggcattcccaccaactacaaggggcaggtcctgaggcacgtgaatggccaggatcagattgtgcccggcctgtacgcctgtggggaggccgcctgtgcctcggtacatggtgccaaccgcctcggggcaaactcgctcttggacctggttgtctttggtcgggcatgtgccctgagcatcgaagagtcatgcaggcctggagataaagtccctccaattaaaccaaacgctggggaagaatctgtcatgaatcttgacaaattgagatttgctgatggaagcataagaacatcggaactgcgactcagcatgcagaagtcaatgcaaaatcatgctgccgtgttccgtgtgggaagcgtgttgcaagaaggttgtgggaaaatcagcaagctctatggagacctaaagcacctgaagacgttcgaccggggaatggtctggaacacggacctggtggagaccctggagctgcagaacctgatgctgtgtgcgctgcagaccatctacggagcagaggcacggaaggagtcacggggcgcgcatgccagggaagactacaaggtgcggattgatgagtacgattactccaagcccatccaggggcaacagaagaagccctttgaggagcactggaggaagcacaccctgtcctatgtggacgttggcactgggaaggtcactctggaatatagacccgtgatcgacaaaactttgaacgaggctgactgtgccaccgtcccgccagccattcgctcctactgatgagacaagatgtggtgatgacagaatcagcttttgtaattatgtataatagctcatgcatgtgtccatgtcataactgtcttcatacgcttctgcactctggggaagaaggagtacattgaagggagattggcacctagtggctgggagcttgccaggaacccagtggccagggagcgtggcacttacctttgtcccttgcttcattcttgtgagatgataaaactgggcacagctcttaaataaaatataaatgaacaaa

SEQ ID NO: 75741 - DNA, 1134 bp, Homo sapiens
agctcctcctagtgtgtatcaccacagggctgctggcttgtgtcacgttcaccaccagaccccgcgtcaggagtcccgccaggggtgtggagaggcagcgctgcctggttggccgtggagctgtatggaacatggtgcctcacaggcagtctgcttggagtcctggaccctggctgtatcctgctggaaaggatgtgtgtgggtctaagatgtgtatgtaatagaaacatttatttattcagaagctttagtcaaaacttcatttttaagtttggagtaataaactcatagtctgaatttcctaatttttctgtttaatttatgtaacttttaagtgaaatgcaaaacaacaggtctaaaagttaagcagttcttggtatggctgcttctatggattaaaagtttacaaataatattttgtgccacagtcaatgcaaaatcatgctgccgtgttccgtgtgggaagcgtgttgcaagaaggttgtgggaaaatcagcaagctctatggagacctaaagcacctgaagacgttcgaccggggaatggtctggaacacggacctggtggagaccctggagctgcagaacctgatgctgtgtgcgctgcagaccatctacggagcagaggcacggaaggagtcacggggcgcgcatgccagggaagactacaaggtgcggattgatgagtacgattactccaagcccatccaggggcaacagaagaagccctttgaggagcactggaggaagcacaccctgtcctatgtggacgttggcactgggaaggtcactctggaatatagacccgtgatcgacaaaactttgaacgaggctgactgtgccaccgtcccgccagccattcgctcctactgatgagacaagatgtggtgatgacagaatcagcttttgtaattatgtataatagctcatgcatgtgtccatgtcataactgtcttcatacgcttctgcactctggggaagaaggagtacattgaagggagattggcacctagtggctgggagcttgccaggaacccagtggccagggagcgtggcacttacctttgtcccttgcttcattcttgtgagatgataaaactgggcacagctcttaaataaaatataaatgaacaaa

SEQ ID NO: 75742 - DNA, 705 bp, Homo sapiens
gaaagatacactacaactaggtgtggtttattcagcaaatgcaaggctggttcaatatttgaaaatcaaccaatgttatctgcaattttgacagactaaagaaaaaataaaacaccacaggatcatatcagttgatgcggcaaaagcatttgaccagatcaaacatccatttataataataactctcagaaaactagagctagaagaaaactttctcaacctaaaaaacgaggaaccacaaattaactaaagctagcatcacacttgatggctaaagtctcaatgcttttcccctaaaatcaggaccaaggcaagtgtgtctgatctccccactgctattcaacatagtactgggaatcctggccattacaataatgtaagaaaagaaaagctatacaaattggaaagaaaaaataaatctatccttatttgcagattgcatggttgtctagatagaaaatcccaaggaatctaaaaaaaaaaaatcttaaaactaataagtgggtttagcaggatcacaaaatgcaaagccaacacataaatatcaaccatattacgtattagccaaaaacaattggaaactgaaataaaaaacataatgttatttacagttgctccaaaaaagctccccactactattcaacatagtactgggaatcctggccattacagtaatgtaagaaaagaaaaggcatacaaattgga

SEQ ID NO: 75743 - DNA, 256 bp, Homo sapiens
catttgagtacacctcctctattagattctttcatacatatcccaagcacttgatatactttatagcctaggaatacagaagtaacttttgtgtcttcaaagcagttttaaaaatacatgcctttgtgagaaatgagctttaaaaacagtgctacatttgtatgatatattgggaatacagaacctaagaatctttactaaggagataatggtaactagactacctagactgccatctgcaacaagaatctgctaa

SEQ ID NO: 75744 - DNA, 144 bp, Homo sapiens
tcatagataccaaacataataatgcaaataaagtatggggaagtatttatatcatatgtaaacaatatataaggaaaatgcaccaaagaaataagcatatatacctgaaacaagctaagggagggccatgcataaattgttggc

SEQ ID NO: 75745 - DNA, 520 bp, Homo sapiens
caggttggagcccctttccctctcccctgcatgtccatcgcaggcttcaatgtgtctggcaggcaggaaaattgaagtgcgaatttgagtgaccgtctgtacgtccaaaatggaaaatggcattcatcagactacttctttctcttatttcatgtgtaactccttaacagaaaacaactgctgcacacggagggccttatcagacacaggacagggaccacagtattagcactcaagtgctcatagcctttcccccaccaagcccatccattctgtgcactgttggccccaggggagacaaggtaattttctcccttcctggtcatcttggggcccagaccaccagctggagaaatgatgcagagagagcagatgagaaagctgaaatactgcaagttgaaatgactcgtcctagatcccaggtctagtgaagagtgagcaccagaaatcacatgtactagactaccagcagtcagatataatcagcccccaaatctcctgtggttcactatatataaaa

SEQ ID NO: 75746 - DNA, 2575 bp, Homo sapiens
  misc_feature (506)..(506): n is a, c, g, or t
  misc_feature (1938)..(1938): n is a, c, g, or t
  misc_feature (1993)..(1993): n is a, c, g, or t
  misc_feature (1995)..(1997): n is a, c, g, or t
  misc_feature (2008)..(2009): n is a, c, g, or t
  misc_feature (2017)..(2017): n is a, c, g, or t
  misc_feature (2539)..(2539): n is a, c, g, or t
aagcttgcgcgccatgtaaggtaaagtgactgattctatagcaatccaattgttcctttgtctgcccgtttacatataacaatgttgtcaatgtttgattgaaaatacctagcaggcgacacacacacctagctcctcaggcggagagcacccctttcttggccacccgggtatcccccagggagtacggggctcaaaacacccttttggagaacaaggtggaagcaaatttcaggaagtaaaacttcctgaaataaaataaaatatcgaatgccttgagacccatacattttcaggttttcctaattaaagcaattactttccaccacccctccaacctggaatcaccaacttggttagagaaactgatttttcttttttctttttttttcccaaaagagtacatctgatcattttagcctgcaactaatgatagagatattagggctagttaaccacagttttacaagactcctctcccgcgtgtgggccattgtcatgctgtnggtcccgcccacctgaaaggtctccccgccccgactggggtttgttgttgaagaaggagaatccccggaaaggctgagtctccagctcaaggtcaaaacgtccaaggccgaaagccctccagtttcccctggacaccttgctcctgcttctgctacgaccttctgggaacgcgaatttctcattttcttcttaaattgccattttcgctttaggagatgaatgttttcctttggctgttttggcaatgactctgaattaaagcgatgctaacgcctcttttccccctaattgttaaaagctatggactgcaggaagatggtccgcttctcttacagtgtgatttggatcatggccatttctaaagcctttgaactgggattagttgccgggctgggccatcaggaatttgctcgtccatctcggggagacctggccttcagagatgacagcatttggccccaggaggagcctgcaattcggcctcggtcttcccagcgtgtgctgcccatgggaatacagcacagtaaggagctaaacagaacctgctgcctgaatgggggaacctgcatgctggagtccttttgtgcctgccctccctccttctacggacggaactgtgagcacgatgtgcgcaaagagaactgtgggtctgtgccccatgacacctggctgcccaagaagtgttccctgtgtaaatgctggcacggtcagctccgctgctttcctcaggcatttctacccggctgtgatggccttgtgatggatgagcacctcgtggcttccaggactccagaactaccaccgtctgcacgtactaccacttttatgctagctggcatctgcctttctatacaaagctactattaatcgacattgacctatttccagaaatacaattttagatattatgcaaatttcatgacccgtaaaggctgctgctacaatgtcctaactgaaagatgatcatttgtagttgccttaaaataatgaatacatttccaaaacggtctctaacatttccttacagaactaactacttcttacctctttgccctgccctctcccaaaaaactacttcttttttcaaaagaaagtcagccatatctccattgtgcccaagtccagtgtttcttttttttttttgagacggagtctcactctgtcacccaggctggactgcaatgacgcgatctcggttcactgcaacctccgcatccggggttcaagccattctcctgcctcagcctcccaagtagctgggattacaggcatgtgtcaccatgccggctaatttttttgtattttagtagagacgggggtttcaccatattggccagctggtctcgaactctgaccttgtgatccatcgctcgcctctcgagtgctgagattacacacgtgagcaactgtgcaaggcctggtgtttcttgntacatgtaattctaccaaggtcttcttaatatgttcttttaaatgattgaattanannntcagattattnnagactaantctaatgtggaccttagaatacagttttgagtagagttgatcaaaatcaattaaaatagtctctttaaaaggaaagaaaacatctttaaggggaggaaccagagtgctgaaggaatggaagtccatctgcgtgtgtgcagggagactgggtaggaaagaggaagcaaatagaagagagaggttgaaaaacaaaatgggttacttgattggtgattaggtggtggtagagaagcaagtaaaaaggctaaatggaagggcaagtttccatcatctatagaaagctatgtaagacaaggactcccctttttttcccaaaggcattgtaaaaagaatgaagtctccttagaaaaaaaattatacctcaatgtccccaacaagattgcttaataaattgtgtttcctccaagctattcaattcttttaactgttgtagaagagaaaatgttcacaatatatttagttgtaaaccaagtgatcaaactacatattgtaaagcccatttttaaaatacattgtatatangtgtatgcacagtaaaaatggaaactatattgacct

SEQ ID NO: 75747 - DNA, 578 bp, Homo sapiens
agctccagcctcttaaggcacagatttggccataaagtttgttaaatgattttccgatttggtatattttcatgttttctttagccatttgattcacataggtctaatgaggtgttgatttaaaatacagaaatacatccctattgtgtgcttaacaaaactatgtccatttgataggaaggtaagagttaacctctgtatggatgttttgtgaactgctataattgacttatttatttattagcttgtctccactaccagaaaccgcatcatctgacttaatgagctttcatctgcagtacctataattgtagggtatcttggggttctctgagattcccacatttgtcagtattcctggttttttgggaaatactattctttattctcttcaaagcttggaatctataagctgtggaagagatactaaattgatttcttgtgaagatttagtaggcatgatttctatatttaagatgcaatccttgggaggctgaggcaggagaatcgtttgaatccggaaggcagaggttgcagtgagccaagattgcgccactacactccagcgtgggtgacag

SEQ ID NO: 75748 - DNA, 368 bp, Homo sapiens
cctgttgatttctgggagggctctctccttggcatgtagaagtggccttggggagaaggcggggccggccagggtttctactcctgcctcatggagacccgcctcagatgcccagcactgcgactgctgcacagccacgaggctgagccgctgcggatgcatgcgtgacttaggaatgtgtgctggtgtgtttgccacagcaacaggatgaggaaagcacagctccaagagaggtgggagctcatccacctggggaagcatgagcaggagcaggaagggtcactctgggactgtgctcatgggaccctgagatgcagcagaaagagcagtgtgaggagcaaagtgacgctgcctgcaggtgctgtcca

SEQ ID NO: 75749 - DNA, 1597 bp, Homo sapiens
ttaaaatgtttataattacatattttataattaaaatgtttataattacatattttataattacatattttataaagtatttataattacatattttataattaaagtatttataattacatattttataattaaagtatttataattacatattttataattcaatattttataaatagttaaaaagacgaggaaaaaattaaaaagacgaggttattgatctcaggaattgtatttgccaagtgagaaggaaaaaatattcacaaaggcttgtacatactttgatcctgaggaacacctctggtgtcttcatgtgccacatagtcttcctcactgactgtctgcctttgcaaggcaaggctctccggtaggcctcgagatgaaataacaagtcctttatttcactcagcctgccaggagtggagaaggaatggctagggagtcctagccccaggggcttcatggcaatacggaccccagatgtctccctggagctctgccaggatccattcaaggccaagaaagtatgattgggagaggaggggtggagatgtagattcctaacaattctgtgacccagcatacatgtatgctctttaggctcttaagcatccttatttttccaaatataatatccaacaatcccaagtgtagtaaaaacccaagggtttctcctgccacatccactcacttcaaactctgattttaaacactggcaatatccagtcagagcctccaagctgagctctagaaagagaaagctgcaaaaaacctgtgcaacaaaacttgcactcatattactgacaagggtagatataaaacagcgcattcttttccatgacactgaagagcaaagaagagtgtaacttgggggcaataagaaattggaggtcaccacctcccaaatcctacatgaggtctatttggaaaagacctccttttttaattcaaaaatccttcaacctccaccattctttcataaagcttcacattctcttggtgaagcccactgttaaaatgcacaggcgttacctggaaaaggaaacacatagccttaacaatattcttctgtactgaactgaagagtgagaaagagtctatggagctataatacggtagtgtatgaatctggtactcaaggaaagtctgttggataatggatggatggatggatggatggatgggtgggtgagcgaataaatgagtggataaatgaggggtcagttttgagagtgagagaaacatggaaattagactcaaatcccaaggcaccacatggaatagttccaggaatagttctgcaagagtttccctgatgagctataagcagcaaaaatttagtgagtgttcaaactgaaaggaggcctggaattgtggcttaatttggagggaaagagggagtccaagattcccagtgcttatttgttgatatctatctagtgctgaaaagaaaaaaaaatagccacaaatccaaaatgattgtgcagtcacatggtacccactgcccagttccttgaccagtgtccctcatacaaagggcccctgatgagctcagaatgtctttgttgtactgaataaagtttgaagaacaaggga

SEQ ID NO: 75750 - DNA, 495 bp, Homo sapiens
gtaatgtctaagaaaggatgctgtcatggttactggagagtctgtgggcgctacagaatggcacctgctccaggatggagcagagcaagactcgtgggctgaattctttggcttgtgagttccacttaacaccaattgcagggctccacatgtagggaccccaagtctccaccctggattttcatgccatcccctccaccccctcaaagcaatttcttaattataaaaagaaaactttctagaggcaatcaacctgaaactttgctattatattttcattaacaatgcagcttcagcagagtaaattgccccttacctgggcctaaataggaagagtgaccacctttggatattcaggagttaacaaacccagggtacccagtaataacaaacacatagccccaaaccagttgttactcagatgactctgtatttattccatttattagtttgtgacatgaaaataaaaagataaatcactggctgatagtgttt

SEQ ID NO: 75751 - DNA, 1359 bp, Homo sapiens
acacatcttatttactgtcagtttccaatgtagtataaaaatgcacacaccagttaaataagaagacctgccaagcaactcagtaaagctgatataataaaatcccagaaaaataaactctttttctcatttgagagactttaaaagtaacttcttgtatggtaaaaattataggcaggctttccagaagttcacacaaccagctaacctgaatgcacaaggaactatctgtgtagagtcaaaggcaattctaaaatagtagtgtagagttctgggggatgtcagagaaaaaacttgtcaaaatcattgagcacttactctgaactctactaaatctatcaggagttaatgtatattgttccagtcattttattttgcttttacacacatatttatatacacatgaaatatatatagaatatctacaaatcatttcattaataaattatacagtgtaattcagccactagcttttttcattcaaatgtgagctcaaatgtgacctgtcacctgtttctgtatgtcctgttagctaagaatggcttttatgtttttgaatggttagaaaaaataagtctaaagaaaaataacatttcatgactagtgaaaattacacaaaatttgaatttcagtgttgcactataacagcagagctgcatatttacaactgagaccatatggcctatgacctacaaatgctttaaatatttactatctagctctttccctaagcagcctgaggtaatctgtgaaaatggttcgctactcacttgacccggagaaccccacgaaatcatgcaaatcaagaggttccaatcttcgtgttcactttaagaacactcgtgaaactgctcaggccatcaagggtatgcatatacaaaaagccacgaagtatctgaaagatgtcactttacagaaacagtgtgtaccattccgacgttacaatggtggagttggcaggtgtgcgcaggccaagcaatggggctggacacaaggtcggtggcccaaaaagagtgctgaatttttgctgcacatgcttaaaaacgcagagagtaatgctgaacttaagggtttagatgtagattctctggtcattgagcatatccaagtgaacaaagcacctaagatgcgccgccggacctacagagctcatggtcggattaacccatacatgagctctccctgccacattgagatgatccttacggaaaaggaacagattgttcctaaaccagaagaggaggttgcccagaagaaaaagatatcccagaagaaactgaagaaacaaaaacttatggcacgggagtaaattcagcattaaaataaatgtaattaaaaggaaaaataaaaaataaaaat

SEQ ID NO: 75752 - DNA, 355 bp, Homo sapiens
cccaggaggctgaggcaggagaatcgcctgaacccgggaggcagaggttgcagtgagccgggattgtgccactgcactccagcctggtgacagagcgagagttcatccagacacacacatatatatataatttccaaacaggctttactaaaccccctgaggtctcatgacacagtagaaaatcatgatttagtagaaagagcatggtcgtaggaatccagtagatcagtagacctgagttagagtcccaaatctgccactttcaatctgtatggcctcaggcaagttacttaacctttctgtctctctgtttctttataaaatggagataataatagtaacttcttcataggag

SEQ ID NO: 75753 - DNA, 479 bp, Homo sapiens
cttaatttacaagacactaagggctcctcacccaaccccctttcgtaaggagttggcctgggtaaacagatcctcagcatttcaaaggagcctaattaactgataaggtacgaacaccaacaatatatgaagttcccaggaattttctccaagagataacaacataaaaccttgagttcgtgtctggcgtagaccctatatctaattataatgaaagatttagaatcttgcacctggtactgttgctcttcttgtaaccatttgtcttttaagttgtttatcactctgtaaccattttgattcttttgattcttgcatgtttttacttctgtagaattattacatttaagtccccctccccttcctaaacctaagtataaaagttaatcgagccccttcctcgtggccgaaagaattttgagcattagctgtctctttggccgccggcttaataaaggactcttaattcgtctcaaagt

SEQ ID NO: 75754 - DNA, 694 bp, Homo sapiens
tgcagggggttctgtgggggtcttgtgtcacaggctgcacaaagactttcctcaaactaatattcagggatttctgtcctgcagggtggggaggtggcagctgcctgccctgccaaggatcttgctgtggacgaaatatctgggggttagggggacagttgtagcatctgctggcattcgggtgcctcccaggacctgggagctgactctacagagaggtctggtgccaagccaggcaccttcctgagttctcaggactcccacctctgccccaagggctttgggcagggacctaaaggggaaagagtcctggatccatctctagccaaatcacaccccagagccagaggcctggggacctccttgccttccccgtcccccacagcaaggtcaacactactacgccttagccacccgtcaccctgctgactgcgacttccctctgcagcacagggcaggcagccacctatgccccacaagacggaacccgggaggggagtagagggcaccagggaatgctgtgagggacttcagggtgggcaaatgcagaagggagccagtgtcgcccctaccccatcccacagccatttttctctcgggttctacccaccactgtgtcggatttttcttaaataaatggaagcggtcagactggaggtgggggcagcagctcccatgaacagagagtacatgg

SEQ ID NO: 75755 - DNA, 425 bp, Homo sapiens
  misc_feature (283)..(283): n is a, c, g, or t
  misc_feature (307)..(307): n is a, c, g, or t
ccctagatctcaataaggaatagcccaataaaaactggcaaaattggcggggcatggtggcttacacgcctgtaatcctagcgctttgggaggctgaggcaggtggatcacgaggtcaggagatagagaccagcgtggccaacatggtgaaaccccatctctactactaaaaatacgaaaaagtagcagggcgtggtggtgcatacctgtaatcccagctactcaggagactgagacaggagaatcgcctgaacccaggaggcagaggttgcagtgagctganattgtgccaccacactccagctgnggcaatagagcatcttctcttcaggctttctgacttcaggtggggacaggaagtgacaaagatggtttgattgaaaagccaggaagttagctcaggtgtggtggctcacgcctgtaat

SEQ ID NO: 75756 - DNA, 459 bp, Homo sapiens
gtcccccgccactattgtgtgtgtgtgtgtgtgtgtgttggtctcactgtcactcaggctggaatacagtggcccaatcctaactcactgcagtctcaaactcctggggttcaagcaatcctcttgccttagcttcccaagtagctgcgactgcagacatgtaccaccatgcctggctacttttttaatttttgtagagatggtgtctcactatgtttaccaggctggtcctggactcctggcctcaagtgatcttccatggcacttggcctctcactctctttttccttggggaaagggcagagtgatggtgctatagtggcttccatctgcaaagccaggacaggcaggcatcttctcttcaggctttctgacttcaggtggggacaggaagtgacaaagatggtttgattgaaaagccaggaagttagctcaggtgtggtggctcacgcctgtaat

SEQ ID NO: 75757 - DNA, 427 bp, Homo sapiens
tgaagaagacaattatgatggataaattggttctattgcagtttttttcttgtctataaagcagctgtccccggcctttttggcaccagggaccagtttcatggcagacagtttttccatggtgggtggggtatggtttcaggatgattcaagtgcattacatttatcatttgattattataaggagtgtgcaaactagacacctcacatgcgcagttcacaatagggttcacgtgcctttgagaatctaatgccaccactgatctgacaggaggcagaactcaggtggtaatgcttacttgcccactgcagctcaccttctgctttgcagcccagttcctaacaggccatagactcttgggttgggggtgactgaggacccctgctataaagcattaagccccttgtacacaattcactcctttta

SEQ ID NO: 75758 - DNA, 221 bp, Homo sapiens
gtggatcactactattgttttttttactgttacttttaagtataagtttccaactttatgaacatttctaatatttcaatgtgtttaccatttatataaaacataagcattatattttattagatgtgtatcccaattgtgctgcttattttccctttgttgaaccaaaatgtcttaaggaataaatgtgaaacagtttcctattttaaatttgaacaccg

SEQ ID NO: 75759 - DNA, 421 bp, Homo sapiens
ggcagacacctgtaatcccagctacttgggaggcagaaggtggagaatcacttaaacctggcaggcggaggttgcagtgagctgagagtgcaccattgcactctagtctgggtgacgagtggaactccgtctcaaaaacaaagaaaaacagaaaagaaaatccctaactcctaacttgtttgctataataagttatatattgatgtttattcactgcttaaatgaagcaaattaaaataatctttaatttttaaatcccttaatgttatattaattgattaactatcattctgttacccaacagtatacttgaccaatgtttttaacataaaggactactttacagaaaacaaacttacgaatattaagcagcagctgtttgaagtattcatttacttgataggttttattaatatgtgtg

SEQ ID NO: 75760 - DNA, 494 bp, Homo sapiens
  misc_feature (489)..(489): n is a, c, g, or t
tagaggatccccctagttttagaagtttcaatagcaccatgacggaactagagacagccatgggcatgatcatagacgtcttttcccgatattcgggcagcgagggcagcacgcagaccctgaccaagggggagctcaaggtgctgatggagaaggagctaccaggcttcctgcagagtggaaaagacaaggatgccgtggataaattgctcaaggacctggacgccaatggagatgcccaggtggacttcagtgagttcatcgtgttcgtggctgcaatcacgtctgcctgtcacaagtactttgagaaggcaggactcaaatgatgccctggagatgtcacagattcctggcagagccatggtcccaggcttcccaaaagtgtttgttggcaattattcccctaggctgagcctgctcatgtacctctgattaataaatgcttatgaaatgacttctaaaactaggggtacaggctcgattcgtatntgtta

SEQ ID NO: 75761 - DNA, 561 bp, Homo sapiens
  misc_feature (556)..(556): n is a, c, g, or t
ctgtgtcaatatgaggctgccttataaagcaccaagaggctgccagtgggacattttctcggccctgccagcccccaggaggaaggtgggtctgaatctagcaccatgacggaactagagacagccatgggcatgatcatagacgtcttttcccgatattcgggcagcgagggcagcacgcagaccctgaccaagggggagctcaaggtgctgatggagaaggagctaccaggcttcctgcagagtggaaaagacaaggatgccgtggataaattgctcaaggacctggacgccaatggagatgcccaggtggacttcagtgagttcatcgtgttcgtggctgcaatcacgtctgcctgtcacaagtactttgagaaggcaggactcaaatgatgccctggagatgtcacagattcctggcagagccatggtcccaggcttcccaaaagtgtttgttggcaattattcccctaggctgagcctgctcatgtacctctgattaataaatgcttatgaaatgacttctaaaactaggggtacaggctcgattcgtatntgtta

SEQ ID NO: 75762 - DNA, 897 bp, Homo sapiens
tagaggatccccctagttttagaagtttcaatagcattttctcggccctgccagcccccaggaggaaggtgggtctgaatctagcaccatgacggaactagagacagccatgggcatgatcatagacgtcttttcccgatattcgggcagcgagggcagcacgcagaccctgaccaagggggagctcaaggtgctgatggagaaggagctaccaggcttcctgcagagtggaaaagacaaggatgccgtggataaattgctcaaggacctggacgccaatggagatgcccaggtggacttcagtgagttcatcgtgttcgtggctgcaatcacgtctgcctgtcacaagtactttgagaaggcaggactcaaatgatgccctggagatgtcacagattcctggcagagccatggtcccaggcttcccaaaagtgtttgttggcaattattcccctaggctgagcctgctcatgtacctctgattaataaatgcttatgaaatgaacttctcctggtctcagagaaactggttatttccttaaaacctcagtgtcctctccccacaaaacagaattcactaattaaacttgtcatttcattactcattgcctgcctgcagtggtgagacagatgaagaagacaaggcagtcgataaaaatccatttgttggccatcttctgagtgcccactgagacacagtcccacctttggccgtgtgaatgccaccatgtcctggacccaagggaggctcgggtacacacatccatgtatttattcatctacttcgtaattcatttagtcggtcacgtagccactcattgaacctgggcccctccatctctccaaacagcatgttttcttcaagtaacatactgtttggagagtctccgtcgaact

SEQ ID NO: 75763 - DNA, 497 bp, Homo sapiens
  misc_feature (21)..(21): n is a, c, g, or t
tcagagctcggtaccatctgntcgaccaggaggaaggtgggtctgaatctagcaccatgacggaactagagacagccatgggcatgatcatagacgtcttttcccgatattcgggcagcgagggcagcacgcagaccctgaccaagggggagctcaaggtgctgatggagaaggagctaccaggcttcctgcagagtggaaaagacaaggatgccgtggataaattgctcaaggacctggacgccaatggagatgcccaggtggacttcagtgagttcatcgtgttcgtggctgcaatcacgtctgcctgtcacaagtactttgagaaggcaggactcaaatgatgccctggagatgtcacagattcctggcagagccatggtcccaggcttcccaaaagtgtttgttggcaattattcccctaggctgagcctgctcatgtacctctgattaataaatgcttatgaaatgaaaaaaaaaaaacaaagaaaaaaaaa

SEQ ID NO: 75764 - DNA, 495 bp, Homo sapiens
cagctcgtacccaattagcatggccaggaggaaggtgggtctgaatctagcaccatgacggaactagagacagccatgggcatgatcatagacgtcttttcccgatattcgggcagcgagggcagcacgcagaccctgaccaagggggagctcaaggtgctgatggagaaggagctaccaggcttcctgcagagtggaaaagacaaggatgccgtggataaattgctcaaggacctggacgccaatggagatgcccaggtggacttcagtgagttcatcgtgttcgtggctgcaatcacgtctgcctgtcacaagtactttgagaaggcaggactcaaatgatgccctggagatgtcacagattcctggcagagccatggtcccaggcttcccaaaagtgtttgttggcaattattcccctaggctgagcctgctcatgtacctctgattaataaatgcttatgaaatgaaaaaaaaaaaacaaagaaaaaaaaa

SEQ ID NO: 75765 - DNA, 664 bp, Homo sapiens
gcaaagactggatgcatttcctgagaacaaccatcactgtaaagcactttacaaatccaaagacaacccccggcaaaaactcaaaatgaaactccctctcgcagagcacaattccaattcgctctaaaaacattacaagttagttcatgtcatgccagatagctgaaggcagctcacaagttcttaaggccaggaatgccatgtgtctgctatgcacagctggccctggccctgagcctgaatgacagcaaaggtgacgcagatgtgggtgccctgctcctgcccagcagcagtgcttggtggaggctgaggccctgcacaggcaccctcactgctgaccttgagcctctctctcctctagagtggaaaagacaaggatgccgtggataaattgctcaaggacctggacgccaatggagatgcccaggtggacttcagtgagttcatcgtgttcgtggctgcaatcacgtctgcctgtcacaagtactttgagaaggcaggactcaaatgatgccctggagatgtcacagattcctggcagagccatggtcccaggcttcccaaaagtgtttgttggcaattattcccctaggctgagcctgctcatgtacctctgattaataaatgcttatgaaatgaaaaaaaaaaaacaaagaaaaaaaaa

SEQ ID NO: 75766 - DNA, 263 bp, Homo sapiens
tagaggatccccctagttttagaagtttcaatagcacctagttataaagtccccaggctgcaatcacgtctgcctgtcacaagtactttgagaaggcaggactcaaatgatgccctggagatgtcacagattcctggcagagccatggtcccaggcttcccaaaagtgtttgttggcaattattcccctaggctgagcctgctcatgtacctctgattaataaatgcttatgaaatgaaaaaaaaaaaacaaagaaaaaaaaa

SEQ ID NO: 75767 - DNA, 546 bp, Homo sapiens
ctgtgtcaatatgaggctgccttataaagcaccaagaggctgccagtgggacattttctcggccctgccagcccccaggaggaaggtgggtctgaatctagcaccatgacggaactagagacagccatgggcatgatcatagacgtcttttcccgatattcgggcagcgagggcagcacgcagaccctgaccaagggggagctcaaggtgctgatggagaaggagctaccaggcttcctgcagagtggaaaagacaaggatgccgtggataaattgctcaaggacctggacgccaatggagatgcccaggtggacttcagtgagttcatcgtgttcgtggctgcaatcacgtctgcctgtcacaagtactttgagaaggcaggactcaaatgatgccctggagatgtcacagattcctggcagagccatggtcccaggcttcccaaaagtgtttgttggcaattattcccctaggctgagcctgctcatgtacctctgattaataaatgcttatgaaatgaaaaaaaaaaaacaaagaaaaaaaaa

SEQ ID NO: 75768 - DNA, 914 bp, Homo sapiens
ctgtgtcaatatgaggctgccttataaagcaccaagaggctgccagtgggacattttctcggccctgccagcccccaggaggaaggtgggtctgaatctagcaccatgacggaactagagacagccatgggcatgatcatagacgtcttttcccgatattcgggcagcgagggcagcacgcagaccctgaccaagggggagctcaaggtgctgatggagaaggagctaccaggcttcctgcagagtggaaaagacaaggatgccgtggataaattgctcaaggacctggacgccaatggagatgcccaggtggacttcagtgagttcatcgtgttcgtggctgcaatcacgtctgcctgtcacaagtactttgagaaggcaggactcaaatgatgccctggagatgtcacagattcctggcagagccatggtcccaggcttcccaaaagtgtttgttggcaattattcccctaggctgagcctgctcatgtacctctgattaataaatgcttatgaaatgaacttctcctggtctcagagaaactggttatttccttaaaacctcagtgtcctctccccacaaaacagaattcactaattaaacttgtcatttcattactcattgcctgcctgcagtggtgagacagatgaagaagacaaggcagtcgataaaaatccatttgttggccatcttctgagtgcccactgagacacagtcccacctttggccgtgtgaatgccaccatgtcctggacccaagggaggctcgggtacacacatccatgtatttattcatctacttcgtaattcatttagtcggtcacgtagccactcattgaacctgggcccctccatctctccaaacagcatgttttcttcaagtaacatactgtttggagagtctccgtcgaact

SEQ ID NO: 75769 - DNA, 500 bp, Homo sapiens
cccactccagagtatccccgaaacacagccaggaggaaggtgggtctgaatctagcaccatgacggaactagagacagccatgggcatgatcatagacgtcttttcccgatattcgggcagcgagggcagcacgcagaccctgaccaagggggagctcaaggtgctgatggagaaggagctaccaggcttcctgcagagtggaaaagacaaggatgccgtggataaattgctcaaggacctggacgccaatggagatgcccaggtggacttcagtgagttcatcgtgttcgtggctgcaatcacgtctgcctgtcacaagtactttgagaaggcaggactcaaatgatgccctggagatgtcacagattcctggcagagccatggtcccaggcttcccaaaagtgtttgttggcaattattcccctaggctgagcctgctcatgtacctctgattaataaatgcttatgaaatgaaaaaaaaaaaacaaagaaaaaaaaa

SEQ ID NO: 75770 - DNA, 616 bp, Homo sapiens
acacccctccccacatcaagcccgaatgatatttcctattcgcctacacaattctccgatccgtccctaacaaactaggaggcgtcccttgccctattactatccatcctcatcctagcaataatcgccggtcacgagatatctcgtgaccggcgattatatctgaatatggaccatgacggaactagagacagccatgggcatgatcatagacgtcttttcccgatattcgggcagcgagggcagcacgcagaccctgaccaagggggagctcaaggtgctgatggagaaggagctaccaggcttcctgcagagtggaaaagacaaggatgccgtggataaattgctcaaggacctggacgccaatggagatgcccaggtggacttcagtgagttcatcgtgttcgtggctgcaatcacgtctgcctgtcacaagtactttgagaaggcaggactcaaatgatgccctggagatgtcacagattcctggcagagccatggtcccaggcttcccaaaagtgtttgttggcaattattcccctaggctgagcctgctcatgtacctctgattaataaatgcttatgaaatgaaaaaaaaaaaacaaagaaaaaaaaa

SEQ ID NO: 75771 - DNA, 4650 bp, Homo sapiens
cgttttcttcgttgcgtacgattgtgctccgttggtgttctcagcagggatctgattctatcgcccaggaccacaccgcagcgtaactgcaggcctctcagcgaaaaagggggaaagcaaagacccgggtgtgcatcctcttcctcggcttccgcccctttccggcggagtggagatcctattcagaggggccggtctctctaaatatgccccaggatgaccgagcggccgccgagcgaggcggctcgcagtgacccccagctagagggacgggacgcggccgaggccagcatggcccccccgcacctggtcctgctgaacggcgtcgccaaggagacgagccgcgcggccgcagcggagcccccagtcatcgaactgggcgcgcgcggaggcccggggggcggccctgccggtgggggcggcgccgcgagagacttaaagggccgcgacgcggcgacggccgaagcgcgccatcgggtgcccaccaccgagctgtgcagacctcccgggcccgccccggcccccgcgcccgcctcggttacagcggagctgcccggcgacggccgcatggtgcagctgagtcctcccgcgctggctgcccccgccgcccccggccgcgcgctgctctacagcctcagccagccgctggcctctctcggcagcgggttctttggggagccggatgccttccctatgttcaccaccaacaatcgagtgaagaggagaccttccccctatgagatggagattactgatggtccccacaccaaagttgtgcggcgtatcttcaccaacagccgggagcgatggcggcagcagaatgtgaacggggcctttgccgagctccgcaagctgatccccacacatcccccggacaagaagctcagcaagaatgagatcctccgcctggccatgaagtatatcaacttcttggccaagctgctcaatgaccaggaggaggagggcacccagcgggccaagactggcaaggaccctgtggtgggggctggtgggggtggaggtgggggagggggcggcgcgcccccagatgacctcctgcaagacgtgctttcccccaactccagctgcggcagctccctggatggggcagccagcccggacagctacacggaggagcccgcgcccaagcacacggcccgcagcctccatcctgccatgctgcctgccgccgatggagccggccctcggtgatgggtctgggccaccaggatcagccaggagggcgttcttaggctgctgggatggtgggcttcagggcaggtggggtgagaattgggcggctctgaagcaaggcggtggacttgaactttcctggatgtctgaactttgggaagcctttactgaccctggggctggcttttctgtttcctgtaccagtaggagatcagaaaaatggagcaaagtggtaggtactttttgtgaagacggcacggtcttccctcttccctcagtcccaaatccttcccaagtaagaggctggagttgtcactgcttttggcctggagtttgggatccctgtctttcctaagacctggggttgtcagctctcatctgaggcatccagcagtctctgccttgcctttagcccctcccaagctggctggggtggcctgtgtggccacttctgtccatatttataggtacccaatagctgcccatttcgtgagccccatcttcacccaggcctatgttgatccatccagcttgccagatgctgcagagtcacaagcctcgaggtgccttcttcagggcctggttgaagaagatgatcagtggacagtctgctctagatgagctgggccggagggtcaggaaacccagtcgcccttacttcttgccctggggatcaaagttctgctttctccccaatgagacttgccttcctaagcctgtggctgtggagaccatgtctgcagccctgagaaagccctgtcgggctttgtgtgaaggcagagaaagggacaatgatagtagagtgatatggagcaagagatattttgggcatgtgggcttcaactcctcgacatcactgttcatgctggcgagtgaatgccagtgtgctgatgggcgtacgctggtgctgagtagatgcgcagccccatctgtgcattctcctggatgcttagagggatttctttgctgtaagatgtctgtttgctgatggtctggtctatgttccgaattgagcacaaaacctgtcctatgaatgctttgcatttggaatttttgcttgacttcagttattggtggaatctttagcgctcaataggaccaggatccagcctcacttctagggtatgggaaatccaatcagagaccaggccctggctaagacccaaacatatgcacattcacttagcagaaccttaaacacccctcagttgtgcagcttttggtcatcaagggtgcgtctgggaggttggtttaatgcaatagaagtgctcccctctgaaagttgtacatgaaatttttgtaaatcacatccttatccttcatcttttaaagaaataaccactgcaagtccttttgtaaagtgaagaatccttttgtagaatgaaccactgccccttcattgatttcctgtgtcaatccagatggtgggatgtggttttcttaaggtgaggcctgtctgtgacctgcatctaagcccatgggacaaattgcacagaagtcctgtatgtctgtcattgtacccttaagtcaccctagccctctccctctaggctctgccttcgaggtcagaggagagatagcctgtggccctgtcctgccatgcaagaactcatcactgtggctgtctggaaagcccccccttatagtttgggcttcagcctagtggcttgtcctcaccatgatggggccctaattcagccatgtacagacagagaatatgtctgctcctttccccttccttttaagtaaggtccaattctcgagcttggggcaacattgttcacctttgtagcactcaggctctccattcaatttcaggctccccagatcatgttttggtgaaaattagggttggttcctttccaacgtttggaagatcctgtgaggagccccatctgtctaaagatagagtcattgctgtaggatctaaggctgtttgcttcaccgtggattcgcttgagttaggaatgagaagtagccacagtatggatgggtggatgggttttatgagatggatcacatattttattaagaactcaaacttctggctccctcttctttcagacttgccatgtgactctggcttggcctatctcctagggctatggtgtggactgaatgggatcatgaaagtagacagttttgagaacgtaaagaactttttcttttccctcaatctcaatcctgcagtggggtttcgcagcctgagtccacgacctaggcagtaggccggtgtgcctgactgcccagcatttgggtaatttagattgtaaaccgctttggcctgagttattgagattgtcctcatttctccagattatctatttgtgtgtgtgtgtgtgtgtgtgtgagagacggtgtcttgttctgtcactcaggctggagtacagtggtgccatcattgctgtctgcagccttgaactctgggctcaagcaatcctctcacctcagcctcccgagtagggaggaccacaggtgtgagccaccacacctggctaatttttacttttttttttttttggtagagatggagtcttgctatattgcccaggctggtcttgaagtcctggcttcaggcaattctcctgcctttgcctccagaagcactgggatcacaggtgtcagccattgcacccagcccagattgtcttaatttctatcttgttccaaggccagggacagtaataagaatggaaaagagatatgggaacactggcagactgtgtaaaatgtaatgcaactacccaaaacaagcctggtaggaaagggcaagtctttaggtctttgtaagaactaaagaagatctgtaatttttattttcaccctctgtaccccatgaccttatccttcctctccttccttgttacccatgaaaaactggcaacattccaagaatagcatctgtacaaaggggaaagaacataaaggtaaaacaaaacaaaacaacattttgagaacaaagatgaccataaccactgaagggaatcacatcttttaagacaaattcatattcttttatttgttatggcagatgacaagatggtacaacctttattcttttccaaaataaaacaaagggcacagcatctgtagtcagccgacaactatttcggccttttgggggtgggtctggccgtacttgtgatttcgatggtacgtgaccctctgctgaagacttgccccctgcccgtgtacatagtgcattgtttctgtgggcgggcccagcactttccgtcaacgttgtactgtatgtgatgaattgcgttggtctctgcatttttctgcagaagaggagtaaccgctccaggtaccttgacctttgtacagcccagaggccaacactgtgggtgtgtgactctttagcaaaaaaaacccatgtggtgatgatgtgtctatatatgtgaggatgtatcgggaagatttctaaataaaagttttacaaaggggaaaaaaaaa

SEQ ID NO: 75772 - DNA, 507 bp, Homo sapiens
tgggccctgatcccaggcctgaggcctagggtggggaggcaggaacacccctcttctccggtagaggcgaggatggtggtgctgttccctggtgggtttggtacttgtgcaggcttggggcttctccagggtgttgtgctggtgtgggcccagaagagagaccagaggctgggtctaagggcctgaggctgttttcatctaagaaattctctgtatgggggattgggtctgcttgagacctgtccccaggaagaatctcctggggtcttctgtcttgttctggcacaggtggaaatattctggctgtctggcaactgcagatgaggatttcctgttgggggctataagcagggtctccgtagtacaaagagagaggagctgtagtcgtcaaatactctagaacgattcagtctaaaatctccctcctccttcattctccccaaataaaaacaaacaaaatctctcgggcgttcctttctgtaatccaaatcaagtgatgcagcttag

SEQ ID NO: 75773 - DNA, 547 bp, Homo sapiens
tcggcggctgctctgcccggaggcccgcctgtgcctaggtgtttgaggggttcgttggtgagtgggaggctcctccaggcttgaagctgagcagcgctcgccgaggccggcgccttcgagccggtagctgcgggcttcggttcccgctgcactccggcttcatccatttctgatcgcccaggaccacaccgcagcgtaactgcaggcctctcagcgaaaaagggggaaagcaaagacccgggtgtgcatcctcttcctcggcttccgcccctttccggcggagtggagatcctattcagaggggccggtctctctaaatatgccccaggtggaaatattctggctgtctggcaactgcagatgaggatttcctgttgggggctataagcagggtctccgtagtacaaagagagaggagctgtagtcgtcaaatactctagaacgattcagtctaaaatctccctcctccttcattctccccaaataaaaacaaacaaaatctctcgggcgttcctttctgtaatccaaatcaagtgatgcagcttag

SEQ ID NO: 75774 - DNA, 4434 bp, Homo sapiens
cgctcaggaccgggcctcaaaatggccacacgcgtacccccgtagcggaaaaacatcgcccaggaccacaccgcagcgtaactgcaggcctctcagcgaaaaagggggaaagcaaagacccgggtgtgcatcctcttcctcggcttccgcccctttccggcggagtggagatcctattcagaggggccggtctctctaaatatgccccagcgggttctttggggagccggatgccttccctatgttcaccaccaacaatcgagtgaagaggagaccttccccctatgagatggagattactgatggcactgaccctcagggattccctgcacttcctcccaagtcttccttagagtctggagtctgcttcctccctgcaatggagtcatcaagggttttctccgaggtccctacacagtaggctccccttgtctcccgttaacacattctgggcttagacctggagttcccttcctgacatcatggattctaccttgccccctggattccccgagaagggccttggcactgctcctttgaggtccccacaccaaagttgtgcggcgtatcttcaccaacagccgggagcgatggcggcagcagaatgtgaacggggcctttgccgagctccgcaagctgatccccacacatcccccggacaagaagctcagcaagaatgagatcctccgcctggccatgaagtatatcaacttcttggccaagctgctcaatgaccaggaggaggagggcacccagcgggccaagactggcaaggaccctgtggtgggggctggtgggggtggaggtgggggagggggcggcgcgcccccagatgacctcctgcaagacgtgctttcccccaactccagctgcggcagctccctggatggggcagccagcccggacagctacacggaggagcccgcgcccaagcacacggcccgcagcctccatcctgccatgctgcctgccgccgatggagccggccctcggtgatgggtctgggccaccaggatcagccaggagggcgttcttaggctgctgggatggtgggcttcagggcaggtggggtgagaattgggcggctctgaagcaaggcggtggacttgaactttcctggatgtctgaactttgggaagcctttactgaccctggggctggcttttctgtttcctgtaccagtaggagatcagaaaaatggagcaaagtggtaggtactttttgtgaagacggcacggtcttccctcttccctcagtcccaaatccttcccaagtaagaggctggagttgtcactgcttttggcctggagtttgggatccctgtctttcctaagacctggggttgtcagctctcatctgaggcatccagcagtctctgccttgcctttagcccctcccaagctggctggggtggcctgtgtggccacttctgtccatatttataggtacccaatagctgcccatttcgtgagccccatcttcacccaggcctatgttgatccatccagcttgccagatgctgcagagtcacaagcctcgaggtgccttcttcagggcctggttgaagaagatgatcagtggacagtctgctctagatgagctgggccggagggtcaggaaacccagtcgcccttacttcttgccctggggatcaaagttctgctttctccccaatgagacttgccttcctaagcctgtggctgtggagaccatgtctgcagccctgagaaagccctgtcgggctttgtgtgaaggcagagaaagggacaatgatagtagagtgatatggagcaagagatattttgggcatgtgggcttcaactcctcgacatcactgttcatgctggcgagtgaatgccagtgtgctgatgggcgtacgctggtgctgagtagatgcgcagccccatctgtgcattctcctggatgcttagagggatttctttgctgtaagatgtctgtttgctgatggtctggtctatgttccgaattgagcacaaaacctgtcctatgaatgctttgcatttggaatttttgcttgacttcagttattggtggaatctttagcgctcaataggaccaggatccagcctcacttctagggtatgggaaatccaatcagagaccaggccctggctaagacccaaacatatgcacattcacttagcagaaccttaaacacccctcagttgtgcagcttttggtcatcaagggtgcgtctgggaggttggtttaatgcaatagaagtgctcccctctgaaagttgtacatgaaatttttgtaaatcacatccttatccttcatcttttaaagaaataaccactgcaagtccttttgtaaagtgaagaatccttttgtagaatgaaccactgccccttcattgatttcctgtgtcaatccagatggtgggatgtggttttcttaaggtgaggcctgtctgtgacctgcatctaagcccatgggacaaattgcacagaagtcctgtatgtctgtcattgtacccttaagtcaccctagccctctccctctaggctctgccttcgaggtcagaggagagatagcctgtggccctgtcctgccatgcaagaactcatcactgtggctgtctggaaagcccccccttatagtttgggcttcagcctagtggcttgtcctcaccatgatggggccctaattcagccatgtacagacagagaatatgtctgctcctttccccttccttttaagtaaggtccaattctcgagcttggggcaacattgttcacctttgtagcactcaggctctccattcaatttcaggctccccagatcatgttttggtgaaaattagggttggttcctttccaacgtttggaagatcctgtgaggagccccatctgtctaaagatagagtcattgctgtaggatctaaggctgtttgcttcaccgtggattcgcttgagttaggaatgagaagtagccacagtatggatgggtggatgggttttatgagatggatcacatattttattaagaactcaaacttctggctccctcttctttcagacttgccatgtgactctggcttggcctatctcctagggctatggtgtggactgaatgggatcatgaaagtagacagttttgagaacgtaaagaactttttcttttccctcaatctcaatcctgcagtggggtttcgcagcctgagtccacgacctaggcagtaggccggtgtgcctgactgcccagcatttgggtaatttagattgtaaaccgctttggcctgagttattgagattgtcctcatttctccagattatctatttgtgtgtgtgtgtgtgtgtgtgtgagagacggtgtcttgttctgtcactcaggctggagtacagtggtgccatcattgctgtctgcagccttgaactctgggctcaagcaatcctctcacctcagcctcccgagtagggaggaccacaggtgtgagccaccacacctggctaatttttacttttttttttttttggtagagatggagtcttgctatattgcccaggctggtcttgaagtcctggcttcaggcaattctcctgcctttgcctccagaagcactgggatcacaggtgtcagccattgcacccagcccagattgtcttaatttctatcttgttccaaggccagggacagtaataagaatggaaaagagatatgggaacactggcagactgtgtaaaatgtaatgcaactacccaaaacaagcctggtaggaaagggcaagtctttaggtctttgtaagaactaaagaagatctgtaatttttattttcaccctctgtaccccatgaccttatccttcctctccttccttgttacccatgaaaaactggcaacattccaagaatagcatctgtacaaaggggaaagaacataaaggtaaaacaaaacaaaacaacattttgagaacaaagatgaccataaccactgaagggaatcacatcttttaagacaaattcatattcttttatttgttatggcagatgacaagatggtacaacctttattcttttccaaaataaaacaaagggcacagcatctgtagtcagccgacaactatttcggccttttgggggtgggtctggccgtacttgtgatttcgatggtacgtgaccctctgctgaagacttgccccctgcccgtgtacatagtgcattgtttctgtgggcgggcccagcactttccgtcaacgttgtactgtatgtgatgaattgcgttggtctctgcatttttctgcagaagaggagtaaccgctccaggtaccttgacctttgtacagcccagaggccaacactgtgggtgtgtgactctttagcaaaaaaaacccatgtggtgatgatgtgtctatatatgtgaggatgtatcgggaagatttctaaataaaagttttacaaaggggaaaaaaaaa

SEQ ID NO: 75775 - DNA, 5011 bp, Homo sapiens
gcccgggactatcccttcgcggtgtagcggcagccggagacctggctgaggaggcaaccgcgtagacacctccctgcttagaaaacaaacactgaaccagaccgatcccagttggagggttcgaaaatgttccagacagcctgtcgggaggggttgttgttgctgttggactaaatagctattcctgattggtcatgtatagggttttttaaggcgggtggggggaggagggggtagaggaaaggctccaaacacctgcaggttgggggcggaaagctgtttgcgattccctggactggttggtcggggacaggaggtaattcccagccattgacccccatttctctctctccctccctcttgccctgcctctttctctccacccctatctttcctggaaactcgctttgggcgcggcagatcgcccaggaccacaccgcagcgtaactgcaggcctctcagcgaaaaagggggaaagcaaagacccgggtgtgcatcctcttcctcggcttccgcccctttccggcggagtggagatcctattcagaggggccggtctctctaaatatgccccaggatgaccgagcggccgccgagcgaggcggctcgcagtgacccccagctagagggacgggacgcggccgaggccagcatggcccccccgcacctggtcctgctgaacggcgtcgccaaggagacgagccgcgcggccgcagcggagcccccagtcatcgaactgggcgcgcgcggaggcccggggggcggccctgccggtgggggcggcgccgcgagagacttaaagggccgcgacgcggcgacggccgaagcgcgccatcgggtgcccaccaccgagctgtgcagacctcccgggcccgccccggcccccgcgcccgcctcggttacagcggagctgcccggcgacggccgcatggtgcagctgagtcctcccgcgctggctgcccccgccgcccccggccgcgcgctgctctacagcctcagccagccgctggcctctctcggcagcgggttctttggggagccggatgccttccctatgttcaccaccaacaatcgagtgaagaggagaccttccccctatgagatggagattactgatggtccccacaccaaagttgtgcggcgtatcttcaccaacagccgggagcgatggcggcagcagaatgtgaacggggcctttgccgagctccgcaagctgatccccacacatcccccggacaagaagctcagcaagaatgagatcctccgcctggccatgaagtatatcaacttcttggccaagctgctcaatgaccaggaggaggagggcacccagcgggccaagactggcaaggaccctgtggtgggggctggtgggggtggaggtgggggagggggcggcgcgcccccagatgacctcctgcaagacgtgctttcccccaactccagctgcggcagctccctggatggggcagccagcccggacagctacacggaggagcccgcgcccaagcacacggcccgcagcctccatcctgccatgctgcctgccgccgatggagccggccctcggtgatgggtctgggccaccaggatcagccaggagggcgttcttaggctgctgggatggtgggcttcagggcaggtggggtgagaattgggcggctctgaagcaaggcggtggacttgaactttcctggatgtctgaactttgggaagcctttactgaccctggggctggcttttctgtttcctgtaccagtaggagatcagaaaaatggagcaaagtggtaggtactttttgtgaagacggcacggtcttccctcttccctcagtcccaaatccttcccaagtaagaggctggagttgtcactgcttttggcctggagtttgggatccctgtctttcctaagacctggggttgtcagctctcatctgaggcatccagcagtctctgccttgcctttagcccctcccaagctggctggggtggcctgtgtggccacttctgtccatatttataggtacccaatagctgcccatttcgtgagccccatcttcacccaggcctatgttgatccatccagcttgccagatgctgcagagtcacaagcctcgaggtgccttcttcagggcctggttgaagaagatgatcagtggacagtctgctctagatgagctgggccggagggtcaggaaacccagtcgcccttacttcttgccctggggatcaaagttctgctttctccccaatgagacttgccttcctaagcctgtggctgtggagaccatgtctgcagccctgagaaagccctgtcgggctttgtgtgaaggcagagaaagggacaatgatagtagagtgatatggagcaagagatattttgggcatgtgggcttcaactcctcgacatcactgttcatgctggcgagtgaatgccagtgtgctgatgggcgtacgctggtgctgagtagatgcgcagccccatctgtgcattctcctggatgcttagagggatttctttgctgtaagatgtctgtttgctgatggtctggtctatgttccgaattgagcacaaaacctgtcctatgaatgctttgcatttggaatttttgcttgacttcagttattggtggaatctttagcgctcaataggaccaggatccagcctcacttctagggtatgggaaatccaatcagagaccaggccctggctaagacccaaacatatgcacattcacttagcagaaccttaaacacccctcagttgtgcagcttttggtcatcaagggtgcgtctgggaggttggtttaatgcaatagaagtgctcccctctgaaagttgtacatgaaatttttgtaaatcacatccttatccttcatcttttaaagaaataaccactgcaagtccttttgtaaagtgaagaatccttttgtagaatgaaccactgccccttcattgatttcctgtgtcaatccagatggtgggatgtggttttcttaaggtgaggcctgtctgtgacctgcatctaagcccatgggacaaattgcacagaagtcctgtatgtctgtcattgtacccttaagtcaccctagccctctccctctaggctctgccttcgaggtcagaggagagatagcctgtggccctgtcctgccatgcaagaactcatcactgtggctgtctggaaagcccccccttatagtttgggcttcagcctagtggcttgtcctcaccatgatggggccctaattcagccatgtacagacagagaatatgtctgctcctttccccttccttttaagtaaggtccaattctcgagcttggggcaacattgttcacctttgtagcactcaggctctccattcaatttcaggctccccagatcatgttttggtgaaaattagggttggttcctttccaacgtttggaagatcctgtgaggagccccatctgtctaaagatagagtcattgctgtaggatctaaggctgtttgcttcaccgtggattcgcttgagttaggaatgagaagtagccacagtatggatgggtggatgggttttatgagatggatcacatattttattaagaactcaaacttctggctccctcttctttcagacttgccatgtgactctggcttggcctatctcctagggctatggtgtggactgaatgggatcatgaaagtagacagttttgagaacgtaaagaactttttcttttccctcaatctcaatcctgcagtggggtttcgcagcctgagtccacgacctaggcagtaggccggtgtgcctgactgcccagcatttgggtaatttagattgtaaaccgctttggcctgagttattgagattgtcctcatttctccagattatctatttgtgtgtgtgtgtgtgtgtgtgtgagagacggtgtcttgttctgtcactcaggctggagtacagtggtgccatcattgctgtctgcagccttgaactctgggctcaagcaatcctctcacctcagcctcccgagtagggaggaccacaggtgtgagccaccacacctggctaatttttacttttttttttttttggtagagatggagtcttgctatattgcccaggctggtcttgaagtcctggcttcaggcaattctcctgcctttgcctccagaagcactgggatcacaggtgtcagccattgcacccagcccagattgtcttaatttctatcttgttccaaggccagggacagtaataagaatggaaaagagatatgggaacactggcagactgtgtaaaatgtaatgcaactacccaaaacaagcctggtaggaaagggcaagtctttaggtctttgtaagaactaaagaagatctgtaatttttattttcaccctctgtaccccatgaccttatccttcctctccttccttgttacccatgaaaaactggcaacattccaagaatagcatctgtacaaaggggaaagaacataaaggtaaaacaaaacaaaacaacattttgagaacaaagatgaccataaccactgaagggaatcacatcttttaagacaaattcatattcttttatttgttatggcagatgacaagatggtacaacctttattcttttccaaaataaaacaaagggcacagcatctgtagtcagccgacaactatttcggccttttgggggtgggtctggccgtacttgtgatttcgatggtacgtgaccctctgctgaagacttgccccctgcccgtgtacatagtgcattgtttctgtgggcgggcccagcactttccgtcaacgttgtactgtatgtgatgaattgcgttggtctctgcatttttctgcagaagaggagtaaccgctccaggtaccttgacctttgtacagcccagaggccaacactgtgggtgtgtgactctttagcaaaaaaaacccatgtggtgatgatgtgtctatatatgtgaggatgtatcgggaagatttctaaataaaagttttacaaaggggaaaaaaaaa

SEQ ID NO: 75776 - DNA, 4163 bp, Homo sapiens
agtcagagtcactttctgtaaatggtacttaggtaggcgcgtccgcctcggttacagcggagctgcccggcgacggccgcatggtgcagctgagtcctcccgcgctggctgcccccgccgcccccggccgcgcgctgctctacagcctcagccagccgctggcctctctcggcagcgggttctttggggagccggatgccttccctatgttcaccaccaacaatcgagtgaagaggagaccttccccctatgagatggagattactgatggtccccacaccaaagttgtgcggcgtatcttcaccaacagccgggagcgatggcggcagcagaatgtgaacggggcctttgccgagctccgcaagctgatccccacacatcccccggacaagaagctcagcaagaatgagatcctccgcctggccatgaagtatatcaacttcttggccaagctgctcaatgaccaggaggaggagggcacccagcgggccaagactggcaaggaccctgtggtgggggctggtgggggtggaggtgggggagggggcggcgcgcccccagatgacctcctgcaagacgtgctttcccccaactccagctgcggcagctccctggatggggcagccagcccggacagctacacggaggagcccgcgcccaagcacacggcccgcagcctccatcctgccatgctgcctgccgccgatggagccggccctcggtgatgggtctgggccaccaggatcagccaggagggcgttcttaggctgctgggatggtgggcttcagggcaggtggggtgagaattgggcggctctgaagcaaggcggtggacttgaactttcctggatgtctgaactttgggaagcctttactgaccctggggctggcttttctgtttcctgtaccagtaggagatcagaaaaatggagcaaagtggtaggtactttttgtgaagacggcacggtcttccctcttccctcagtcccaaatccttcccaagtaagaggctggagttgtcactgcttttggcctggagtttgggatccctgtctttcctaagacctggggttgtcagctctcatctgaggcatccagcagtctctgccttgcctttagcccctcccaagctggctggggtggcctgtgtggccacttctgtccatatttataggtacccaatagctgcccatttcgtgagccccatcttcacccaggcctatgttgatccatccagcttgccagatgctgcagagtcacaagcctcgaggtgccttcttcagggcctggttgaagaagatgatcagtggacagtctgctctagatgagctgggccggagggtcaggaaacccagtcgcccttacttcttgccctggggatcaaagttctgctttctccccaatgagacttgccttcctaagcctgtggctgtggagaccatgtctgcagccctgagaaagccctgtcgggctttgtgtgaaggcagagaaagggacaatgatagtagagtgatatggagcaagagatattttgggcatgtgggcttcaactcctcgacatcactgttcatgctggcgagtgaatgccagtgtgctgatgggcgtacgctggtgctgagtagatgcgcagccccatctgtgcattctcctggatgcttagagggatttctttgctgtaagatgtctgtttgctgatggtctggtctatgttccgaattgagcacaaaacctgtcctatgaatgctttgcatttggaatttttgcttgacttcagttattggtggaatctttagcgctcaataggaccaggatccagcctcacttctagggtatgggaaatccaatcagagaccaggccctggctaagacccaaacatatgcacattcacttagcagaaccttaaacacccctcagttgtgcagcttttggtcatcaagggtgcgtctgggaggttggtttaatgcaatagaagtgctcccctctgaaagttgtacatgaaatttttgtaaatcacatccttatccttcatcttttaaagaaataaccactgcaagtccttttgtaaagtgaagaatccttttgtagaatgaaccactgccccttcattgatttcctgtgtcaatccagatggtgggatgtggttttcttaaggtgaggcctgtctgtgacctgcatctaagcccatgggacaaattgcacagaagtcctgtatgtctgtcattgtacccttaagtcaccctagccctctccctctaggctctgccttcgaggtcagaggagagatagcctgtggccctgtcctgccatgcaagaactcatcactgtggctgtctggaaagcccccccttatagtttgggcttcagcctagtggcttgtcctcaccatgatggggccctaattcagccatgtacagacagagaatatgtctgctcctttccccttccttttaagtaaggtccaattctcgagcttggggcaacattgttcacctttgtagcactcaggctctccattcaatttcaggctccccagatcatgttttggtgaaaattagggttggttcctttccaacgtttggaagatcctgtgaggagccccatctgtctaaagatagagtcattgctgtaggatctaaggctgtttgcttcaccgtggattcgcttgagttaggaatgagaagtagccacagtatggatgggtggatgggttttatgagatggatcacatattttattaagaactcaaacttctggctccctcttctttcagacttgccatgtgactctggcttggcctatctcctagggctatggtgtggactgaatgggatcatgaaagtagacagttttgagaacgtaaagaactttttcttttccctcaatctcaatcctgcagtggggtttcgcagcctgagtccacgacctaggcagtaggccggtgtgcctgactgcccagcatttgggtaatttagattgtaaaccgctttggcctgagttattgagattgtcctcatttctccagattatctatttgtgtgtgtgtgtgtgtgtgtgtgagagacggtgtcttgttctgtcactcaggctggagtacagtggtgccatcattgctgtctgcagccttgaactctgggctcaagcaatcctctcacctcagcctcccgagtagggaggaccacaggtgtgagccaccacacctggctaatttttacttttttttttttttggtagagatggagtcttgctatattgcccaggctggtcttgaagtcctggcttcaggcaattctcctgcctttgcctccagaagcactgggatcacaggtgtcagccattgcacccagcccagattgtcttaatttctatcttgttccaaggccagggacagtaataagaatggaaaagagatatgggaacactggcagactgtgtaaaatgtaatgcaactacccaaaacaagcctggtaggaaagggcaagtctttaggtctttgtaagaactaaagaagatctgtaatttttattttcaccctctgtaccccatgaccttatccttcctctccttccttgttacccatgaaaaactggcaacattccaagaatagcatctgtacaaaggggaaagaacataaaggtaaaacaaaacaaaacaacattttgagaacaaagatgaccataaccactgaagggaatcacatcttttaagacaaattcatattcttttatttgttatggcagatgacaagatggtacaacctttattcttttccaaaataaaacaaagggcacagcatctgtagtcagccgacaactatttcggccttttgggggtgggtctggccgtacttgtgatttcgatggtacgtgaccctctgctgaagacttgccccctgcccgtgtacatagtgcattgtttctgtgggcgggcccagcactttccgtcaacgttgtactgtatgtgatgaattgcgttggtctctgcatttttctgcagaagaggagtaaccgctccaggtaccttgacctttgtacagcccagaggccaacactgtgggtgtgtgactctttagcaaaaaaaacccatgtggtgatgatgtgtctatatatgtgaggatgtatcgggaagatttctaaataaaagttttacaaaggggaaaaaaaaa

SEQ ID NO: 75777 - DNA, 766 bp, Homo sapiens
acagtttgagaaagaggataccatacaggaaagaaatacacagaagtcaaattgcagagacacagacattctgatcactgtgtacatgtgatgaaactataagaggctggtgaaagaagtatagaaaagattagcagaagaggtttcagagcttatgcagtgctaggaacaataactttcaaccagtgaaattaaagacttgatatttcacaaggaattcattagagcacccagaagaggggtcttgcctccatagtggtaaataatttgccccagactaaaggctgcactggtcttgcctaacatacattaaattcaagaaccaaaagcaccaaactatctcctagtgacttaactatgaatcagaacacagctcaagacaattaaaagaatacaaaattacctagcatcccaaaatgtaaaatttataatgtgtggcacccaataaaaaattatcaagtatgcaaaaaatggaaaaataaataaatctggatgaagaagaaagtgaatcaatttaaactaatccagatttgaaatagatattagatttgacacacaaagacattaaagcagttacaatattggaatttgaaattttcaaaatgttaagtaaaacccggaaagttatggaaaacattcatctctttcatttcaagacacaaaaacaacagtgtattagattaatattatactggagtcttctaatggaagattagacatttgaggactaagctcgaactttttatcttgcccaaattcctaccta

SEQ ID NO: 75778 - DNA, 454 bp, Homo sapiens
gttctctcagcaacgtgggtggcaggttatgctacccatataatgtattgtagttggctctccacacttgtcagggttagtgttcaaccattcggaaaattttcccattgttctatcatgtgaaccaagactagtgtagaattcccaataacttacaaaaaaaggattaattagaaagtttgaaatttgattacttattgttttaatacagtactatgtattttagtattttatctataattagaattgttttttagtcaaaataatgtatcaaaatcaaaacttcatcttattttttaatagattttacagaaatttgtatactgaatcctgcctcttttttttgtattaacactgtttccatcttaagcattttgctttagatggaccatagctcttggcagctagtgcatttttagcaaataatactgtttctagtaagagttgcagagaa

SEQ ID NO: 75779 - DNA, 1332 bp, Homo sapiens
cagtttcagggcctgagtccccatgccctgctctatgggggtgcgggggtgtcatgtcttgcactttccccagcaacctgccacccccctaccctgtgagaacaagcccctctcattctgtgtcccttgactccacgacggcggctgccttgtccacgaggcagggattctcatctctggtgcagcccctgtcctcaccactctgggcttgtgctgttcttggtcccttatcttgttgtcacagggctaaccctccccacacacctggctgtcccctgccccacagctcctaggccagggcctgtccctgcccctaacacgcagcccctcggttcctcttaccctcttcttggaccctacgccatttctgggtaatcagaaagctcagagatggtctccaggtgaccccccagtctgtccctctccctgaatccagagcgctgcagtcacagtagaggcaattgctgtcattccgcggcccatgacagcctggcggcccgtacccctcccccatgatcccctgcacagacaggcccacgtgtgtccccagatgcctgaatcactgctgacggctggggacctggcggccgtgggctcctggggagccactggggagggggtggcggccgcgtctcgcctccacgggaacacctgcggacataaataggcagccagcagaggcagcagcacagagccaccaagcagtgctgcatacggggtccacctgtgtgcaccaggatgcctgacaccatgctgcccgcctgcttcctcggcctactggccttctcctccgcgtgctacttccagaactgcccgaggggcggcaagagggccatgtccgacctggagctgagacagtgcctcccctgcggccccgggggcaaaggccgctgcttcgggcccagcatctgctgcgcggacgagctgggctgcttcgtgggcacggctgaggcgctgcgctgccaggaggagaactacctgccgtcgccctgccagtccggccagaaggcgtgcgggagcgggggccgctgcgccgccttcggcgtttgctgcaacgacgagagctgcgtgaccgagcccgagtgccgcgagggctttcaccgccgcgcccgcgccagcgaccggagcaacgccacgcagctggacgggccggccggggccttgctgctgcggctggtgcagctggccggggcgcccgagcccttcgagcccgcccagcccgacgcctactgagccccgcgctcgtcccaccggcgcgctcttcgcgcccgcccctgcagcacggacaataaacctccgccaatgcacggcctcgcgtctgtctcagtctct

SEQ ID NO: 75780 - DNA, 144 bp, Homo sapiens
tttatgattatattctcttagaaaattaacaatggcagttcaaatttcaaattagatttaaggactaacctctgattatttatcttgtccaaattcctacccaaggggtctggggagtcatgccctacaaatcatggattctca

SEQ ID NO: 75781 - DNA, 687 bp, Homo sapiens
ctcttatttaaaccaaattgcattgcactaatcccacagcatgctctttgaggacccagctctgatagggcttctgaggtgccagaaacctccagctggaatatcctgccttcaggacacatcagacatctggctgttcattagtccaatgttacaagtcctgcagtccacctcccattctatctggctccctgctctaccagagacaaatccaccagagccataacagatgcgctgccgggtccccatcagcatctgcactgagacctaccacgggacaaaccaatgatgaaaaaaccaaagtccagaaaatgaaaatggtctcagagagactggccaatcctatttggggtcctctagaaaattctcccatcactcttccctgtcctaccatttccacatattgatcatgacttggtgcttcgtttttctgcccctgcactagaacacaaactccacaaaggcaaggagtttatcttgttcttgatgaatcccaggcacttaaggaagtatttgttcgataattagttgttgagtgagtgaataaatgcacctgtcctagcattttgtgggtaggttctgccaccattgtcttgtactctcaaagtcttatcaaaattgctgtaaatcatgcctaaaatgagacatgagtttgccaccaaaaatgtgaattaatttgccaggaaa

SEQ ID NO: 75782 - DNA, 1678 bp, Homo sapiens
aggccggaagtgaccgccctttgccactccccctgcctcctctccgcctttaacttctcgggaagatgaggcagtttggcatctgtggccgagttgctgttgccgggtgatagttggagcggagacttagcataatggcagaacctgtttctccactgaagcactttgtgctggctaagaaggcgattactgcaatctttgaccagttactggagtttgttactgaaggatcacattttgttgaagcaacatataagaatccggaacttgatcgaatagccactgaagatgatctggtagaaatgcaaggatataaagacaagctttccatcattggtgaggtgctatctcggagacacatgaaggtggcattttttggcaggacaagcagtgggaagagctctgttatcaatgcaatgttgtgggataaagttctccctagtgggattggccatataaccaattgcttcctaagtgttgaaggaactgatggagataaagcctatcttatgacagaaggatcagatgaaaaaaagagtgtgaagacagttaatcaactggcccatgcccttcacatggacaaagatttgaaagctggctgtcttgtacgtgtgttttggccaaaagcaaaatgtgccctcttgagagatgacctggtgttagtagacagtccaggcacagatgtcactacagagctggatagctggattgataagttttgcctagatgctgatgtctttgttttggtcgcaaactctgaatcaacactaatgaatacggaaaaacacttttttcacaaggtgaatgagcggctttccaagcctaatattttcattctcaataatcgttgggatgcctctgcatcagagccagaatatatggaagacgtacgcagacagcacatggaaagatgcctgcatttcttggtggaggagctcaaagttgtaaatgctttagaagcacagaatcgtatcttctttgtttcagcaaaggaagttcttagtgctagaaagcaaaaagcacaggggatgccagaaagtggtgtggcacttgctgaaggatttcatgcaagattacaggaatttcagaattttgaacaaatctttgaggagtgtatctcgcagtcagcagtgaaaacaaagttcgaacagcacactatcagagctaaacagatactagctactgtgaaaaacataatggattcagtaaacctggcagctgaagataaaaggcattattcagtggaagagagggaagaccaaattgatagactggactttattcgaaaccagatgaaccttttaacactggatgttaagaaaaaaatcaaggaggttaccgaggaggtggcaaacaaagtttcatgtgcaatgacagatgaaatttgtcgactgtctgttttggttgatgaattttgttcagagtttcatcctaatccagatgtattaaaaatatataaaagtgaattaaataagcacatagaggatggtatgggaagaaatttggctgatcgatgcaccgatgaagtaaacgccttagtgcttcagacccagcaagaaattattgaaaatttgaagccattacttccagctggtatacaggataaactacatacactgatcccttgcaagaaatttgatctcagttataatctaaattaccacaagttatgttcaga

SEQ ID NO: 75783 - DNA, 883 bp, Homo sapiens
ggaaggaagtctaatgccttgcttactagccctgccttaggggaacatcctgaagtctccctggagagtgtgaattgacttcttacattaatatcatgcatattcacctgtcctatagctttctgaagccatttcctttctttggtctatattttcaacttttgctattacagtacaattcttaagaggaaaaagggcaaacctgtaaggcattgcattgtttcccaattcagctggaggggagcctcctagactccagggaactctgctccaagtaggttgtgtgtgggcaatgaatgttatctaaaacctgaagactctgagcactgctgaaggtgcaaagatgcagtagagatggactctgtcctctagaagcttaaagtctagttgaatagatgacataatccattcagcaaacacttattaagcatgtgtgtgtttgaggcacggtgacagcacagcaatgattaagctgcaatcctgactttctaaggagactgcaatgaatggttaagtaagaaatatgaaacaagtcaggcagtacagtgaacttcccagtgaataatataaacagttaagtggtgcttagaaaatagaggaatcactgtgagctaggatggcttgggaaggctttaaggaggtggtaagcttaagcaaaacccccaaatctcagctgcttcttacattcatagaattttccaggttctagaataaagcacaaaccatttcaaggaaatgtaaatttctcagttggagcaactctcgtgctctctcttcagtcagttgccgtggctgctgcttcatccagcccttctccctctcccactccgtgccattgcatcagtctgacatactccaagaacaaaaagtataaaaaatgact

SEQ ID NO: 75784 - DNA, 179 bp, Homo sapiens
agaaccctcaaataatttttagaattcttacctaatatgtaaaagtctgcatgactcttaacaatgagtcacatccattgattttacagggattttagttcgtaatccagaaagtaataatcagggattttattttaatcaggcatcaatccagattcactgttatactgaaatatcaa

SEQ ID NO: 75785 - DNA, 367 bp, Homo sapiens
ctacagagctgagacattctttctgggttaagcttgttgggaggcactcctgtgtctctctcccgctcctacccatcttgctgagtatgccaaggatgcaagtccctgaccacactttacctcacaaccatttctcagggttgtgtttgcagaaagcaatcttcagtgataaggtaatgtctctctccaggaaaaagagcaggcttattataaaagaggtgggttccccaagctcagtgcttttcacttgtgacacaagccactacctgcatgtaggctcctccacactgtccccgtgggactgacacgaacatgaagatcacattgcctactctgctgtgcataataaaattctttgtctctgaca

SEQ ID NO: 75786 - DNA, 763 bp, Homo sapiens
  misc_feature (595)..(595): n is a, c, g, or t
  misc_feature (598)..(598): n is a, c, g, or t
  misc_feature (607)..(607): n is a, c, g, or t
  misc_feature (609)..(609): n is a, c, g, or t
  misc_feature (613)..(614): n is a, c, g, or t
  misc_feature (618)..(618): n is a, c, g, or t
  misc_feature (626)..(626): n is a, c, g, or t
  misc_feature (630)..(630): n is a, c, g, or t
  misc_feature (637)..(637): n is a, c, g, or t
  misc_feature (645)..(645): n is a, c, g, or t
  misc_feature (654)..(654): n is a, c, g, or t
  misc_feature (665)..(665): n is a, c, g, or t
  misc_feature (671)..(671): n is a, c, g, or t
  misc_feature (689)..(689): n is a, c, g, or t
  misc_feature (741)..(741): n is a, c, g, or t
ctcgcgagcgcctgccgtttctcggggcgggacgggggggcggggactgggcggagaggcgcgtgctgctgcgtgcgtgcgcgcgcgccgcgggcgggccagtgaaaccggcggccctggcacgtgacctaggaccggctcaccgggtcgcttggtggctccgtctgtctgtccgtccgcccgcgggtgccatcatggcggacgcggccagtcaggtgctcctgggctccggtctcaccatcctgtcccagccgctcatgtacgtgaaagtgctcatccaggtgggatatgagcctcttcctccaacaataggacgaaatatttttgggcggcaagtgtgtcagcttcctggtctctttagttatgctcagcacattgccagtatcgatgggaggcgcgggttgttcacaggcttaactccaagactgtgttcgggagtccttggaactgtggtccatggtaaagttttacagcattaccaggagagtgacaagggtgaggagttaggacctggaaatgtacagaaagaagtctcatcttcctttgaccacgttatcaaggagacaactcgagagatgatcgctcgttgtggtgntanggtgatgananatgnnttgnatgtgatnactntgagatntatggtanagttgattnggagagaatgnaagtantgtggagtttgtgattgnataataaggatgtatggggaagaggggattgtaggatttttgggcggtgttnttggtgcggttgtacgtgagat

SEQ ID NO: 75787 - DNA, 2890 bp, Homo sapiens
  misc_feature (2648)..(2649): n is a, c, g, or t
  misc_feature (2652)..(2652): n is a, c, g, or t
  misc_feature (2654)..(2654): n is a, c, g, or t
ctcgcgagcgcctgccgtttctcggggcgggacgggggggcggggactgggcggagaggcgcgtgctgctgcgtgcgtgcgcgcgcgccgcgggcgggccagtgaaaccggcggccctggcacgtgacctaggaccggctcaccgggtcgcttggtggctccgtctgtctgtccgtccgcccgcgggtgccatcatggcggacgcggccagtcaggtgctcctgggctccggtctcaccatcctgtcccagccgctcatgtacgtgaaagtgctcatccaggtgggatatgagcctcttcctccaacaataggacgaaatatttttgggcggcaagtgtgtcagcttcctggtctctttagttatgctcagcacattgccagtatcgatgggaggcgcgggttgttcacaggcttaactccaagactgtgttcgggagtccttggaactgtggtccatggtaaagttttacagcattaccaggagagtgacaagggtgaggagttaggacctggaaatgtacagaaagaagtctcatcttcctttgaccacgttatcaaggagacaactcgagagatgatcgctcgttctgctgctaccctcatcacacatcccttccatgtgatcactctgagatctatggtacagttcattggcagagaatccaagtactgtggactttgtgattccataataaccatctatcgggaagagggcattctaggatttttcgcgggtcttgttcctcgccttctaggtgacatcctttctttgtggctgtgtaactcactggcctacctcgtcaatacctatgcactggacagtggggtttctaccatgaatgaaatgaagagttattctcaagctgtcacaggattttttgcgagtatgttgacctatccctttgtgcttgtctccaatcttatggctgtcaacaactgtggtcttgctggtggatgccctccttactccccaatatatacgtcttggatagactgttggtgcatgctacaaaaagaggggaatatgagccgaggaaatagcttatttttccggaaggtcccctttgggaagacttattgttgtgacctgaaaatgttaatttgaagatgtggggcagggacagtgacatttctgtagtcccagatgcacagaattatgggagagaatgttgatttctatacagtgtggcgcgcttttttaataatcatttaatcttgggaaaattcaggtgtttggtgtctgccttttttgttcttttttccagcacaacataacttaccactgatactccccctttagttattctgaattaggatatttttgctccaaattcttattttacttaaccagaagggaaaaaaagttgtattttcctgaagctacaggcactttgtcatgtgatttttgagtctcaatttaaggctttgtaaaatgaagagtagaattccaagaaaaatgagaaataattttgtaaaacttaacaaaatcactaaattaaactatatgggaggttatgaattactttttcttgggtagaccctaaaatgtcagtagcatgcaccagaatctgactcccattatgcttctaagcacatttcattgaccttgtctctcatacttcaagaaaaggacagtacattgctacattaccctagaaagtctgtgtgaggatctgccccttcagtctgttattgcaaagtaataaaatgtcacctacagggagcctctgagcctactctagttcaagaggctacctgaaaaaaaataaataagataaagggtcagcaacaacaaagaaaaagacaattacagaaaataagcaagatttggaaaggaagtataatggcacttttttcctcaaaggaagttcttgttttcacataaaatatgaaaagcagatcctgcaggagtaacccccttctttaagagccaagtatttgccagtgcttaaattacaccataccgttctaattatatataatcttttgttcttcagttttttgttttgtttcctttttgttattgttgccgaaggtgagtagttttgcatttctgatgacagccttggaaagtatatttgtaactccatgtctggtaatgccaacccaagtcgacatgggtcttaggacactgaccacctcacatgccataccctcagttaagcatgttaacatttataggaggaaaaaaatcactttgggagaaaataaaattcaactcaagcataaagcttctgtttactcaggccttctaaaaagcaggttaaaatgctctaaaatgagaaagcctgtggtttcacttatttatataactcactgggacattgccaaatgagtaagcacttaattcgctgcttctgagacttctctgtcaaaacagccccactgataatattagacagaacgagaatgcaggggtctcttccctcccctggggtttaggaagctcatgaggagctcggcttaaaatgtctttgatgtctcttcctttgtctcaaaaagtaatgtcaattttatatactatttcaatattactatctgcatttgttttaatataaaaatgtttgctgcctacctttttctcccaaaaaatctttaagtaaagatgatctgggaaaatgaaaaaaaaaaaaaaaaaaaaaaaaannaananaaaaaaaatccttaataaaaaataaattcaatataataagatccttaacttaatatagaatctataacaaaaaaaaaaatttttggcccttttgggccaattaatttttaaatctggcgatttttttcttgggcgccaaatctgggctttttggaacaatcccccttggggggggtatttaaaatctaatgcgcgggtttatcgttgtctgtgccttgggttcccccatttttttt

SEQ ID NO: 75788 - DNA, 2190 bp, Homo sapiens
  misc_feature (1255)..(1256): n is a, c, g, or t
  misc_feature (1259)..(1259): n is a, c, g, or t
  misc_feature (1261)..(1261): n is a, c, g, or t
ctcgcgagcgcctgccgtttctcggggcgggacgggggggcggggactgggcggagaggcgcgtgctgctgcgtgcgtgcgcgcgcgccgcgggcgggccagtgaaaccggcggccctggcacgtgacctaggaccggctcaccgggtcgcttggtggctccgtctgtctgtccgtccgcccgcgggtgccatcatggcggacgcggccagtcaggtgctcctgggctccggtctcaccatcctgtcccagccgctcatgtacgtgaaagtgctcatccaggtgggatatgagcctcttcctccaacaataggacgaaatatttttgggcggcaagtgtgtcagcttcctggtctctttagttatgctcagcacattgccagtatcgatgggaggcgcgggttgttcacaggcttaactccaagactgtgttcgggagtccttggaactgtggtccatggtaaagttttacagcattaccaggagagtgacaagggtgaggagttaggacctggaaatgtacagaaagaagtctcatcttcctttgaccacgttatcaaggagacaactcgagagatgatcgctcgttctgctgctaccctcatcacacatcccttccatgtgatcactctgagatctatggtacagttcattggcagagaatccaagtactgtggactttgtgattccataataaccatctatcgggaagagggcattctaggatttttcgcgggtcttgttcctcgccttctaggtgacatcctttctttgtggctgtgtaactcactggcctacctcgtcaatacctatgcactggacagtggggtttctaccatgaatgaaatgaagagttattctcaagctgtcacaggattttttgcgagtatgttgacctatccctttgtgcttgtctccaatcttatggctgtcaacaactgtggtcttgctggtggatgccctccttactccccaatatatacgtcttggatagactgttggtgcatgctacaaaaagaggggaatatgagccgaggaaatagcttatttttccggaaggtcccctttgggaagacttattgttgtgacctgaaaatgttaatttgaagatgtggggcagggacagtgacatttctgtagtcccagatgcacagaattatgggagagaatgttgatttctatacagtgtggcgcgcttttttaataatcatttaatcttgggaaaattcaaaaaaaaaaaaaaaaaaaaaaaaaannaananaaaaaaaaggggggggggtaaaaaatccccgggggggcatttacggtaaccagaactttgtgtaaacaaggtgggcccctatagagggggtcggttataaataagatcaggcagtggggacgatgattatacacaccgttgtggtgacgttgggaaaacacgcggtagagttgcagaacttttgtgaaaagcgaacccaaaacatttgtgctgggggtgacacagatacatgtgggagacaacattacccactaacgaagagatgtaaaagaggcctaacgggaagcaatataaaagtttgaaggaggtgatatcgatgggctaaacataccacgggcatatctcgcgcgacggcagaacaacgttcgcagaacccgggaggaatcgcattacggacacgacttattatcacccgcggccgcattcacaacaacgacggagctacgaaaagcaaactcagaactagcccagacacaagaagaacgacacaccacgacctagaacacagacacagacagagaccaaacatagcacaaccacagatgaagacaacaacacagacacgaccacaccaagcacacacacagagacaaagcacagcaacacaaaacaacaacaaccacaaaacacaagagacagaacgaagaagcacagacgcaagaggagagcgaacgtgaaagcgcagagaaaggaaaggactaacagagacaacgaaaagaggagagaagaaacgagaggcagagacaaacacgaccgggagagaagcgggagacacaacgagaaagacaaagagagaggccgagagcgcaagaagaaaagaagagacaagcgagaacgaaaagcaaagaaggagaaagagaaagagagaaaagcaagaggagcgaagacggcacaagggaaagacggaggaaaaaaaacagcacaggaag

SEQ ID NO: 75789 - DNA, 2600 bp, Homo sapiens
ctcgcgagcgcctgccgtttctcggggcgggacgggggggcggggactgggcggagaggcgcgtgctgctgcgtgcgtgcgcgcgcgccgcgggcgggccagtgaaaccggcggccctggcacgtgacctaggaccggctcaccgggtcgcttggtggctccgtctgtctgtccgtccgcccgcgggtgccatcatggcggacgcggccagtcaggtgctcctgggctccggtctcaccatcctgtcccagccgctcatgtgggatatgagcctcttcctccaacaataggacgaaatatttttgggcggcaagtgtgtcagcttcctggtctctttagttatgctcagcacattgccagtatcgatgggaggcgcgggttgttcacaggcttaactccaagactgtgttcgggagtccttggaactgtggtccatggtaaagttttacagcattaccaggagagtgacaagggtgaggagttaggacctggaaatgtacagaaagaagtctcatcttcctttgaccacgttatcaaggagacaactcgagagatgatcgctcgttctgctgctaccctcatcacacatcccttccatgtgatcactctgagatctatggtacagttcattggcagagaatccaagtactgtggactttgtgattccataataaccatctatcgggaagagggcattctaggatttttcgcgggtcttgttcctcgccttctaggtgacatcctttctttgtggctgtgtaactcactggcctacctcgtcaatacctatgcactggacagtggggtttctaccatgaatgaaatgaagagttattctcaagctgtcacaggattttttgcgagtatgttgacctatccctttgtgcttgtctccaatcttatggctgtcaacaactgtggtcttgctggtggatgccctccttactccccaatatatacgtcttggatagactgttggtgcatgctacaaaaagaggggaatatgagccgaggaaatagcttatttttccggaaggtcccctttgggaagacttattgttgtgacctgaaaatgttaatttgaagatgtggggcagggacagtgacatttctgtagtcccagatgcacagaattatgggagagaatgttgatttctatacagtgtggcgcgcttttttaataatcatttaatcttgggaaaattcaggtgtttggtgtctgccttttttgttcttttttccagcacaacataacttaccactgatactccccctttagttattctgaattaggatatttttgctccaaattcttattttacttaaccagaagggaaaaaaagttgtattttcctgaagctacaggcactttgtcatgtgatttttgagtctcaatttaaggctttgtaaaatgaagagtagaattccaagaaaaatgagaaataattttgtaaaacttaacaaaatcactaaattaaactatatgggaggttatgaattactttttcttgggtagaccctaaaatgtcagtagcatgcaccagaatctgactcccattatgcttctaagcacatttcattgaccttgtctctcatacttcaagaaaaggacagtacattgctacattaccctagaaagtctgtgtgaggatctgccccttcagtctgttattgcaaagtaataaaatgtcacctacagggagcctctgagcctactctagttcaagaggctacctgaaaaaaaataaataagataaagggtcagcaacaacaaagaaaaagacaattacagaaaataagcaagatttggaaaggaagtataatggcacttttttcctcaaaggaagttcttgttttcacataaaatatgaaaagcagatcctgcaggagtaacccccttctttaagagccaagtatttgccagtgcttaaattacaccataccgttctaattatatataatcttttgttcttcagttttttgttttgtttcctttttgttattgttgccgaaggtgagtagttttgcatttctgatgacagccttggaaagtatatttgtaactccatgtctggtaatgccaacccaagtcgacatgggtcttaggacactgaccacctcacatgccataccctcagttaagcatgttaacatttataggaggaaaaaaatcactttgggagaaaataaaattcaactcaagcataaagcttctgtttactcaggccttctaaaaagcaggttaaaatgctctaaaatgagaaagcctgtggtttcacttatttatataactcactgggacattgccaaatgagtaagcacttaattcgctgcttctgagacttctctgtcaaaacagccccactgataatattagacagaacgagaatgcaggggtctcttccctcccctggggtttaggaagctcatgaggagctcggcttaaaatgtctttgatgtctcttcctttgtctcaaaaagtaatgtcaattttatatactatttcaatattactatctgcatttgttttaatataaaaatgtttgctgcctacctttttctcccaaaaaatctttaagtaaagatgatctgggaaaatg

SEQ ID NO: 75790 - DNA, 1427 bp, Homo sapiens
ctcgcgagcgcctgccgtttctcggggcgggacgggggggcggggactgggcggagaggcgcgtgctgctgcgtgcgtgcgcgcgcgccgcgggcgggccagtgaaaccggcggccctggcacgtgacctaggaccggctcaccgggtcgcttggtggctccgtctgtctgtccgtccgcccgcgggtgccatcatggcggacgcggccagtcaggtgctcctgggctccggtctcaccatcctgtcccagccgctcatgtacgtgaaagtgctcatccaggtgggatatgagcctcttcctccaacaataggacgaaatatttttgggcggcaagtgtgtcagcttcctggtctctttagttatgctcagcacattgccagtatcgatgggaggcgcgggttgttcacaggcttaactccaagactgtgttcgggagtccttggaactgtggtccatggtaaagttttacagcattaccaggagagtgacaagggtgaggagttaggacctggaaatgtacagaaagaagtctcatcttcctttgaccacgttatcaaggagacaactcgagagatgatcgctcgttctgctgctaccctcatcacacatcccttccatgtgatcactctgagatctatggtacagttcattggcagagaatccaagtactgtggactttgtgattccataataaccatctatcgggaagagggcattctaggatttttcgcgggtcttgttcctcgccttctaggtgacatcctttctttgtggctgtgtaactcactggcctacctcgtcaatacctatgcactggacagtggggtttctaccatgaatgaaatgaagagttattctcaagctgtcacaggattttttgcgagtatgttgacctatccctttgtgcttgtctccaatcttatggctgtcaacaactgtggtcttgctggtggatgccctccttactccccaatatatacgtcttggatagactgttggtgcatgctacaaaaagaggggaatatgagccgaggaaatagcttatttttccggaaggtcccctttgggaagacttattgttgtgacctgaaaatgttaatttgaagatgtggggcagggacagtgacatttctgtagtcccagatgcacagaattatgggagagtctccgtcgaactagttcgacggagactctctacattgttttttttttgagacaaggtcttgctgtcacctaggcagaagtgcagtggcacaatcatagctcactgcagcctcaatctccccagcccaagcaatcctctcaccctagcctcctgggaataccagcctgcaccaccatgcccacttttttaaactgaatttttactagagacaaggtcttgctatgttgcccaggagctagggtgagagtctccgtcgaact

SEQ ID NO: 75791 - DNA, 2542 bp, Homo sapiens
ctcgcgagcgcctgccgtttctcggggcgggacgggggggcggggactgggcggagaggcgcgtgctgctgcgtgcgtgcgcgcgcgccgcgggcgggccagtgaaaccggcggccctggcacgtgacctaggaccggctcaccgggtcgcttggtggctccgtctgtctgtccgtccgcccgcgggtgccatcatggcggacgcggccagtcaggtgctcctgggctccggtctcaccatcctgtcccagccgctcatgtgggatatgagcctcttcctccaacaataggacgaaatatttttgggcggcaagtgtgtcagcttcctggtctctttagttatgctcagcacattgccagtatcgatgggaggcgcgggttgttcacaggcttaactccaagactgtgttcgggagtccttggaactgtggtccatggtaaagttttacagcattaccaggagagtgacaagggtgaggagttaggacctggaaatgtacagaaagaagtctcatcttcctttgaccacgttatcaaggagtgatcactctgagatctatggtacagttcattggcagagaatccaagtactgtggactttgtgattccataataaccatctatcgggaagagggcattctaggatttttcgcgggtcttgttcctcgccttctaggtgacatcctttctttgtggctgtgtaactcactggcctacctcgtcaatacctatgcactggacagtggggtttctaccatgaatgaaatgaagagttattctcaagctgtcacaggattttttgcgagtatgttgacctatccctttgtgcttgtctccaatcttatggctgtcaacaactgtggtcttgctggtggatgccctccttactccccaatatatacgtcttggatagactgttggtgcatgctacaaaaagaggggaatatgagccgaggaaatagcttatttttccggaaggtcccctttgggaagacttattgttgtgacctgaaaatgttaatttgaagatgtggggcagggacagtgacatttctgtagtcccagatgcacagaattatgggagagaatgttgatttctatacagtgtggcgcgcttttttaataatcatttaatcttgggaaaattcaggtgtttggtgtctgccttttttgttcttttttccagcacaacataacttaccactgatactccccctttagttattctgaattaggatatttttgctccaaattcttattttacttaaccagaagggaaaaaaagttgtattttcctgaagctacaggcactttgtcatgtgatttttgagtctcaatttaaggctttgtaaaatgaagagtagaattccaagaaaaatgagaaataattttgtaaaacttaacaaaatcactaaattaaactatatgggaggttatgaattactttttcttgggtagaccctaaaatgtcagtagcatgcaccagaatctgactcccattatgcttctaagcacatttcattgaccttgtctctcatacttcaagaaaaggacagtacattgctacattaccctagaaagtctgtgtgaggatctgccccttcagtctgttattgcaaagtaataaaatgtcacctacagggagcctctgagcctactctagttcaagaggctacctgaaaaaaaataaataagataaagggtcagcaacaacaaagaaaaagacaattacagaaaataagcaagatttggaaaggaagtataatggcacttttttcctcaaaggaagttcttgttttcacataaaatatgaaaagcagatcctgcaggagtaacccccttctttaagagccaagtatttgccagtgcttaaattacaccataccgttctaattatatataatcttttgttcttcagttttttgttttgtttcctttttgttattgttgccgaaggtgagtagttttgcatttctgatgacagccttggaaagtatatttgtaactccatgtctggtaatgccaacccaagtcgacatgggtcttaggacactgaccacctcacatgccataccctcagttaagcatgttaacatttataggaggaaaaaaatcactttgggagaaaataaaattcaactcaagcataaagcttctgtttactcaggccttctaaaaagcaggttaaaatgctctaaaatgagaaagcctgtggtttcacttatttatataactcactgggacattgccaaatgagtaagcacttaattcgctgcttctgagacttctctgtcaaaacagccccactgataatattagacagaacgagaatgcaggggtctcttccctcccctggggtttaggaagctcatgaggagctcggcttaaaatgtctttgatgtctcttcctttgtctcaaaaagtaatgtcaattttatatactatttcaatattactatctgcatttgttttaatataaaaatgtttgctgcctacctttttctcccaaaaaatctttaagtaaagatgatctgggaaaatg

SEQ ID NO: 75792 - DNA, 2367 bp, Homo sapiens
ctcgcgagcgcctgccgtttctcggggcgggacgggggggcggggactgggcggagaggcgcgtgctgctgcgtgcgtgcgcgcgcgccgcgggcgggccagtgaaaccggcggccctggcacgtgacctaggaccggctcaccgggtcgcttggtggctccgtctgtctgtccgtccgcccgcgggtgccatcatggcggacgcggccagtcaggtgctcctgggctccggtctcaccatcctgtcccagccgctcatgtacgtgaaagtgctcatccaggtgggatatgagcctcttcctccaacaataggacgaaatatttttgggcggcaagtgtgtcagcttcctggtctctttagttatgtgatcactctgagatctatggtacagttcattggcagagaatccaagtactgtggactttgtgattccataataaccatctatcgggaagagggcattctaggatttttcgcgggtcttgttcctcgccttctaggtgacatcctttctttgtggctgtgtaactcactggcctacctcgtcaatacctatgcactggacagtggggtttctaccatgaatgaaatgaagagttattctcaagctgtcacaggattttttgcgagtatgttgacctatccctttgtgcttgtctccaatcttatggctgtcaacaactgtggtcttgctggtggatgccctccttactccccaatatatacgtcttggatagactgttggtgcatgctacaaaaagaggggaatatgagccgaggaaatagcttatttttccggaaggtcccctttgggaagacttattgttgtgacctgaaaatgttaatttgaagatgtggggcagggacagtgacatttctgtagtcccagatgcacagaattatgggagagaatgttgatttctatacagtgtggcgcgcttttttaataatcatttaatcttgggaaaattcaggtgtttggtgtctgccttttttgttcttttttccagcacaacataacttaccactgatactccccctttagttattctgaattaggatatttttgctccaaattcttattttacttaaccagaagggaaaaaaagttgtattttcctgaagctacaggcactttgtcatgtgatttttgagtctcaatttaaggctttgtaaaatgaagagtagaattccaagaaaaatgagaaataattttgtaaaacttaacaaaatcactaaattaaactatatgggaggttatgaattactttttcttgggtagaccctaaaatgtcagtagcatgcaccagaatctgactcccattatgcttctaagcacatttcattgaccttgtctctcatacttcaagaaaaggacagtacattgctacattaccctagaaagtctgtgtgaggatctgccccttcagtctgttattgcaaagtaataaaatgtcacctacagggagcctctgagcctactctagttcaagaggctacctgaaaaaaaataaataagataaagggtcagcaacaacaaagaaaaagacaattacagaaaataagcaagatttggaaaggaagtataatggcacttttttcctcaaaggaagttcttgttttcacataaaatatgaaaagcagatcctgcaggagtaacccccttctttaagagccaagtatttgccagtgcttaaattacaccataccgttctaattatatataatcttttgttcttcagttttttgttttgtttcctttttgttattgttgccgaaggtgagtagttttgcatttctgatgacagccttggaaagtatatttgtaactccatgtctggtaatgccaacccaagtcgacatgggtcttaggacactgaccacctcacatgccataccctcagttaagcatgttaacatttataggaggaaaaaaatcactttgggagaaaataaaattcaactcaagcataaagcttctgtttactcaggccttctaaaaagcaggttaaaatgctctaaaatgagaaagcctgtggtttcacttatttatataactcactgggacattgccaaatgagtaagcacttaattcgctgcttctgagacttctctgtcaaaacagccccactgataatattagacagaacgagaatgcaggggtctcttccctcccctggggtttaggaagctcatgaggagctcggcttaaaatgtctttgatgtctcttcctttgtctcaaaaagtaatgtcaattttatatactatttcaatattactatctgcatttgttttaatataaaaatgtttgctgcctacctttttctcccaaaaaatctttaagtaaagatgatctgggaaaatg

SEQ ID NO: 75793 - DNA, 2595 bp, Homo sapiens
taattttcagagtatctccccatacggattttgaatatcataaataccctgtgagataggcaggacagctataattagtatcactttagagattaaaaaacattgatgctctgagagtttcatctgctgcctgtcacatcgctgctgagtgctggagctggcatttgaagctggtcttcaatccgtggggaaatgctcttcccactattccatgctgcctcacctaggtcacccagaccctagaaatgtggtttttgatgcctctcatctgtatctgtacttgggaccattcttgctttgtaatttttctcgtcttttgctctgccaaatatgaatatcagatagcttagcaaaatcatttttttaagctagtcaaagcaaaacaatatttaagtctcttctgcaaagcacctcgcaaatcttttgcctccctgcttacagttatgaatagtaaggtgagccactgagggtatagccgacctgcattttaaacataggaacaaaagtcactggagatcagcttcaagtacagctgtgttaacgagaatgaactaggtatgcgggctggattctggtgtttgattccttttttacttccctagaatgttttgtgacctctaattatttgacaaacatttgtactgaagagcctgtcatgttactgatcacattttttggttcttatttttattgtttcttcatgtaggggtcttgttcctcgccttctaggtgacatcctttctttgtggctgtgtaactcactggcctacctcgtcaatacctatgcactggacagtggggtttctaccatgaatgaaatgaagagttattctcaagctgtcacaggattttttgcgagtatgttgacctatccctttgtgcttgtctccaatcttatggctgtcaacaactgtggtcttgctggtggatgccctccttactccccaatatatacgtcttggatagactgttggtgcatgctacaaaaagaggggaatatgagccgaggaaatagcttatttttccggaaggtcccctttgggaagacttattgttgtgacctgaaaatgttaatttgaagatgtggggcagggacagtgacatttctgtagtcccagatgcacagaattatgggagagaatgttgatttctatacagtgtggcgcgcttttttaataatcatttaatcttgggaaaattcaggtgtttggtgtctgccttttttgttcttttttccagcacaacataacttaccactgatactccccctttagttattctgaattaggatatttttgctccaaattcttattttacttaaccagaagggaaaaaaagttgtattttcctgaagctacaggcactttgtcatgtgatttttgagtctcaatttaaggctttgtaaaatgaagagtagaattccaagaaaaatgagaaataattttgtaaaacttaacaaaatcactaaattaaactatatgggaggttatgaattactttttcttgggtagaccctaaaatgtcagtagcatgcaccagaatctgactcccattatgcttctaagcacatttcattgaccttgtctctcatacttcaagaaaaggacagtacattgctacattaccctagaaagtctgtgtgaggatctgccccttcagtctgttattgcaaagtaataaaatgtcacctacagggagcctctgagcctactctagttcaagaggctacctgaaaaaaaataaataagataaagggtcagcaacaacaaagaaaaagacaattacagaaaataagcaagatttggaaaggaagtataatggcacttttttcctcaaaggaagttcttgttttcacataaaatatgaaaagcagatcctgcaggagtaacccccttctttaagagccaagtatttgccagtgcttaaattacaccataccgttctaattatatataatcttttgttcttcagttttttgttttgtttcctttttgttattgttgccgaaggtgagtagttttgcatttctgatgacagccttggaaagtatatttgtaactccatgtctggtaatgccaacccaagtcgacatgggtcttaggacactgaccacctcacatgccataccctcagttaagcatgttaacatttataggaggaaaaaaatcactttgggagaaaataaaattcaactcaagcataaagcttctgtttactcaggccttctaaaaagcaggttaaaatgctctaaaatgagaaagcctgtggtttcacttatttatataactcactgggacattgccaaatgagtaagcacttaattcgctgcttctgagacttctctgtcaaaacagccccactgataatattagacagaacgagaatgcaggggtctcttccctcccctggggtttaggaagctcatgaggagctcggcttaaaatgtctttgatgtctcttcctttgtctcaaaaagtaatgtcaattttatatactatttcaatattactatctgcatttgttttaatataaaaatgtttgctgcctacctttttctcccaaaaaatctttaagtaaagatgatctgggaaaatg

SEQ ID NO: 75794 - DNA, 2122 bp, Homo sapiens
  misc_feature (1187)..(1188): n is a, c, g, or t
  misc_feature (1191)..(1191): n is a, c, g, or t
  misc_feature (1193)..(1193): n is a, c, g, or t
ctcgcgagcgcctgccgtttctcggggcgggacgggggggcggggactgggcggagaggcgcgtgctgctgcgtgcgtgcgcgcgcgccgcgggcgggccagtgaaaccggcggccctggcacgtgacctaggaccggctcaccgggtcgcttggtggctccgtctgtctgtccgtccgcccgcgggtgccatcatggcggacgcggccagtcaggtgctcctgggctccggtctcaccatcctgtcccagccgctcatgtacgtgaaagtgctcatccaggtgggatatgagcctcttcctccaacaataggacgaaatatttttgggcggcaagtgtgtcagcttcctggtctctttagttatgctcagcacattgccagtatcgatgggaggcgcgggttgttcacaggcttaactccaagactgtgttcgggagtccttggaactgtggtccatggtaaagttttacagcattaccaggagagtgacaagggtgaggagttaggacctggaaatgtacagaaagaagtctcatcttcctttgaccacgttatcaaggagacaactcgagagatgatcgctcgttctgctgctaccctcatcacacatcccttccatgtgatcactctgagatctatggtacagttcattggcagagaatccaagtactgtggactttgtgattccataataaccatctatcgggaagagggcattctaggatttttcgcgggtcttgttcctcgccttctaggtgacatcctttctttgtggctgtgtaactcactggcctacctcgtcaatacctatgcactggacagtggggtttctaccatgaatgaaatgaagagttattctcaagctgtcacaggatcttgctggtggatgccctccttactccccaatatatacgtcttggatagactgttggtgcatgctacaaaaagaggggaatatgagccgaggaaatagcttatttttccggaaggtcccctttgggaagacttattgttgtgacctgaaaatgttaatttgaagatgtggggcagggacagtgacatttctgtagtcccagatgcacagaattatgggagagaatgttgatttctatacagtgtggcgcgcttttttaataatcatttaatcttgggaaaattcaaaaaaaaaaaaaaaaaaaaaaaaaannaananaaaaaaaaggggggggggtaaaaaatccccgggggggcatttacggtaaccagaactttgtgtaaacaaggtgggcccctatagagggggtcggttataaataagatcaggcagtggggacgatgattatacacaccgttgtggtgacgttgggaaaacacgcggtagagttgcagaacttttgtgaaaagcgaacccaaaacatttgtgctgggggtgacacagatacatgtgggagacaacattacccactaacgaagagatgtaaaagaggcctaacgggaagcaatataaaagtttgaaggaggtgatatcgatgggctaaacataccacgggcatatctcgcgcgacggcagaacaacgttcgcagaacccgggaggaatcgcattacggacacgacttattatcacccgcggccgcattcacaacaacgacggagctacgaaaagcaaactcagaactagcccagacacaagaagaacgacacaccacgacctagaacacagacacagacagagaccaaacatagcacaaccacagatgaagacaacaacacagacacgaccacaccaagcacacacacagagacaaagcacagcaacacaaaacaacaacaaccacaaaacacaagagacagaacgaagaagcacagacgcaagaggagagcgaacgtgaaagcgcagagaaaggaaaggactaacagagacaacgaaaagaggagagaagaaacgagaggcagagacaaacacgaccgggagagaagcgggagacacaacgagaaagacaaagagagaggccgagagcgcaagaagaaaagaagagacaagcgagaacgaaaagcaaagaaggagaaagagaaagagagaaaagcaagaggagcgaagacggcacaagggaaagacggaggaaaaaaaacagcacaggaag

SEQ ID NO: 75795 - DNA, 2096 bp, Homo sapiens
ttcagaggatcccccaacgctctcacagtcttctgtgaaatatcatccatctaatcttgatgctgtcgcagatggtggtgacacaagttattgacaaactactgccaaatggtgcacaatattttgtaaaaagtacccagtagccccatttcatacaatgtacctaaattatgcagtaacttggcatcatcgttccctccttgttgctgtgtaattagtcagtgttgccacagtgtgtggcgctgatggagatgtcagaaccgagaacacttaaccttctttgattgtttttcaagttttaagacttcgatcccccctatgtgagcagcgttccaacgcgctcacaggattttttgcgagtatgttgacctatccctttgtgcttgtctccaatcttatggctgtcaacaactgtggtcttgctggtggatgccctccttactccccaatatatacgtcttggatagactgttggtgcatgctacaaaaagaggggaatatgagccgaggaaatagcttatttttccggaaggtcccctttgggaagacttattgttgtgacctgaaaatgttaatttgaagatgtggggcagggacagtgacatttctgtagtcccagatgcacagaattatgggagagaatgttgatttctatacagtgtggcgcgcttttttaataatcatttaatcttgggaaaattcaggtgtttggtgtctgccttttttgttcttttttccagcacaacataacttaccactgatactccccctttagttattctgaattaggatatttttgctccaaattcttattttacttaaccagaagggaaaaaaagttgtattttcctgaagctacaggcactttgtcatgtgatttttgagtctcaatttaaggctttgtaaaatgaagagtagaattccaagaaaaatgagaaataattttgtaaaacttaacaaaatcactaaattaaactatatgggaggttatgaattactttttcttgggtagaccctaaaatgtcagtagcatgcaccagaatctgactcccattatgcttctaagcacatttcattgaccttgtctctcatacttcaagaaaaggacagtacattgctacattaccctagaaagtctgtgtgaggatctgccccttcagtctgttattgcaaagtaataaaatgtcacctacagggagcctctgagcctactctagttcaagaggctacctgaaaaaaaataaataagataaagggtcagcaacaacaaagaaaaagacaattacagaaaataagcaagatttggaaaggaagtataatggcacttttttcctcaaaggaagttcttgttttcacataaaatatgaaaagcagatcctgcaggagtaacccccttctttaagagccaagtatttgccagtgcttaaattacaccataccgttctaattatatataatcttttgttcttcagttttttgttttgtttcctttttgttattgttgccgaaggtgagtagttttgcatttctgatgacagccttggaaagtatatttgtaactccatgtctggtaatgccaacccaagtcgacatgggtcttaggacactgaccacctcacatgccataccctcagttaagcatgttaacatttataggaggaaaaaaatcactttgggagaaaataaaattcaactcaagcataaagcttctgtttactcaggccttctaaaaagcaggttaaaatgctctaaaatgagaaagcctgtggtttcacttatttatataactcactgggacattgccaaatgagtaagcacttaattcgctgcttctgagacttctctgtcaaaacagccccactgataatattagacagaacgagaatgcaggggtctcttccctcccctggggtttaggaagctcatgaggagctcggcttaaaatgtctttgatgtctcttcctttgtctcaaaaagtaatgtcaattttatatactatttcaatattactatctgcatttgttttaatataaaaatgtttgctgcctacctttttctcccaaaaaatctttaagtaaagatgatctgggaaaatg

SEQ ID NO: 75796 - DNA, 2000 bp, Homo sapiens
gcagtgagccgagattgcaccactgcactacagcctgggcaacagagcgagactccatctcaaaaaagaaaaacaaagaaataaatgaaagctagcacttactgaatgttaggcactgttctacatgactcatttgctaagccagctggaaagtggcaaagccagaatccaacctgggcgttctgtctgcccagagtaagaacttaataaggagaaattgtagttagttcatagtagctcagcctttcagagaatactaatccttgttctgtagtgatagtcccagttttgtcctagatttagtcacgtctcccaattggacctctctgctgatttggattggctgatctcatctcgctagatattatttgtgttttgttttgttttgttttccagggggaatatgagccgaggaaatagcttatttttccggaaggtcccctttgggaagacttattgttgtgacctgaaaatgttaatttgaagatgtggggcagggacagtgacatttctgtagtcccagatgcacagaattatgggagagaatgttgatttctatacagtgtggcgcgcttttttaataatcatttaatcttgggaaaattcaggtgtttggtgtctgccttttttgttcttttttccagcacaacataacttaccactgatactccccctttagttattctgaattaggatatttttgctccaaattcttattttacttaaccagaagggaaaaaaagttgtattttcctgaagctacaggcactttgtcatgtgatttttgagtctcaatttaaggctttgtaaaatgaagagtagaattccaagaaaaatgagaaataattttgtaaaacttaacaaaatcactaaattaaactatatgggaggttatgaattactttttcttgggtagaccctaaaatgtcagtagcatgcaccagaatctgactcccattatgcttctaagcacatttcattgaccttgtctctcatacttcaagaaaaggacagtacattgctacattaccctagaaagtctgtgtgaggatctgccccttcagtctgttattgcaaagtaataaaatgtcacctacagggagcctctgagcctactctagttcaagaggctacctgaaaaaaaataaataagataaagggtcagcaacaacaaagaaaaagacaattacagaaaataagcaagatttggaaaggaagtataatggcacttttttcctcaaaggaagttcttgttttcacataaaatatgaaaagcagatcctgcaggagtaacccccttctttaagagccaagtatttgccagtgcttaaattacaccataccgttctaattatatataatcttttgttcttcagttttttgttttgtttcctttttgttattgttgccgaaggtgagtagttttgcatttctgatgacagccttggaaagtatatttgtaactccatgtctggtaatgccaacccaagtcgacatgggtcttaggacactgaccacctcacatgccataccctcagttaagcatgttaacatttataggaggaaaaaaatcactttgggagaaaataaaattcaactcaagcataaagcttctgtttactcaggccttctaaaaagcaggttaaaatgctctaaaatgagaaagcctgtggtttcacttatttatataactcactgggacattgccaaatgagtaagcacttaattcgctgcttctgagacttctctgtcaaaacagccccactgataatattagacagaacgagaatgcaggggtctcttccctcccctggggtttaggaagctcatgaggagctcggcttaaaatgtctttgatgtctcttcctttgtctcaaaaagtaatgtcaattttatatactatttcaatattactatctgcatttgttttaatataaaaatgtttgctgcctacctttttctcccaaaaaatctttaagtaaagatgatctgggaaaatg

SEQ ID NO: 75797 - DNA, 1634 bp, Homo sapiens
  misc_feature (5)..(5): n is a, c, g, or t
  misc_feature (25)..(25): n is a, c, g, or t
  misc_feature (28)..(28): n is a, c, g, or t
cgttngatccctccctcagccgganaantaggggaatatgagccgaggaaatagcttatttttccggaaggtcccctttgggaagacttattgttgtgacctgaaaatgttaatttgaagatgtggggcagggacagtgacatttctgtagtcccagatgcacagaattatgggagagaatgttgatttctatacagtgtggcgcgcttttttaataatcatttaatcttgggaaaattcaggtgtttggtgtctgccttttttgttcttttttccagcacaacataacttaccactgatactccccctttagttattctgaattaggatatttttgctccaaattcttattttacttaaccagaagggaaaaaaagttgtattttcctgaagctacaggcactttgtcatgtgatttttgagtctcaatttaaggctttgtaaaatgaagagtagaattccaagaaaaatgagaaataattttgtaaaacttaacaaaatcactaaattaaactatatgggaggttatgaattactttttcttgggtagaccctaaaatgtcagtagcatgcaccagaatctgactcccattatgcttctaagcacatttcattgaccttgtctctcatacttcaagaaaaggacagtacattgctacattaccctagaaagtctgtgtgaggatctgccccttcagtctgttattgcaaagtaataaaatgtcacctacagggagcctctgagcctactctagttcaagaggctacctgaaaaaaaataaataagataaagggtcagcaacaacaaagaaaaagacaattacagaaaataagcaagatttggaaaggaagtataatggcacttttttcctcaaaggaagttcttgttttcacataaaatatgaaaagcagatcctgcaggagtaacccccttctttaagagccaagtatttgccagtgcttaaattacaccataccgttctaattatatataatcttttgttcttcagttttttgttttgtttcctttttgttattgttgccgaaggtgagtagttttgcatttctgatgacagccttggaaagtatatttgtaactccatgtctggtaatgccaacccaagtcgacatgggtcttaggacactgaccacctcacatgccataccctcagttaagcatgttaacatttataggaggaaaaaaatcactttgggagaaaataaaattcaactcaagcataaagcttctgtttactcaggccttctaaaaagcaggttaaaatgctctaaaatgagaaagcctgtggtttcacttatttatataactcactgggacattgccaaatgagtaagcacttaattcgctgcttctgagacttctctgtcaaaacagccccactgataatattagacagaacgagaatgcaggggtctcttccctcccctggggtttaggaagctcatgaggagctcggcttaaaatgtctttgatgtctcttcctttgtctcaaaaagtaatgtcaattttatatactatttcaatattactatctgcatttgttttaatataaaaatgtttgctgcctacctttttctcccaaaaaatctttaagtaaagatgatctgggaaaatg

SEQ ID NO: 75798 - DNA, 1708 bp, Homo sapiens
ttggatagactgtcggctcatattcccctctttttgtagcatgcaccaacaagtctatccaagacgtatatattggggagtaaggagggcatccaccagcaagaggggaatatgagccgaggaaatagcttatttttccggaaggtcccctttgggaagacttattgttgtgacctgaaaatgttaatttgaagatgtggggcagggacagtgacatttctgtagtcccagatgcacagaattatgggagagaatgttgatttctatacagtgtggcgcgcttttttaataatcatttaatcttgggaaaattcaggtgtttggtgtctgccttttttgttcttttttccagcacaacataacttaccactgatactccccctttagttattctgaattaggatatttttgctccaaattcttattttacttaaccagaagggaaaaaaagttgtattttcctgaagctacaggcactttgtcatgtgatttttgagtctcaatttaaggctttgtaaaatgaagagtagaattccaagaaaaatgagaaataattttgtaaaacttaacaaaatcactaaattaaactatatgggaggttatgaattactttttcttgggtagaccctaaaatgtcagtagcatgcaccagaatctgactcccattatgcttctaagcacatttcattgaccttgtctctcatacttcaagaaaaggacagtacattgctacattaccctagaaagtctgtgtgaggatctgccccttcagtctgttattgcaaagtaataaaatgtcacctacagggagcctctgagcctactctagttcaagaggctacctgaaaaaaaataaataagataaagggtcagcaacaacaaagaaaaagacaattacagaaaataagcaagatttggaaaggaagtataatggcacttttttcctcaaaggaagttcttgttttcacataaaatatgaaaagcagatcctgcaggagtaacccccttctttaagagccaagtatttgccagtgcttaaattacaccataccgttctaattatatataatcttttgttcttcagttttttgttttgtttcctttttgttattgttgccgaaggtgagtagttttgcatttctgatgacagccttggaaagtatatttgtaactccatgtctggtaatgccaacccaagtcgacatgggtcttaggacactgaccacctcacatgccataccctcagttaagcatgttaacatttataggaggaaaaaaatcactttgggagaaaataaaattcaactcaagcataaagcttctgtttactcaggccttctaaaaagcaggttaaaatgctctaaaatgagaaagcctgtggtttcacttatttatataactcactgggacattgccaaatgagtaagcacttaattcgctgcttctgagacttctctgtcaaaacagccccactgataatattagacagaacgagaatgcaggggtctcttccctcccctggggtttaggaagctcatgaggagctcggcttaaaatgtctttgatgtctcttcctttgtctcaaaaagtaatgtcaattttatatactatttcaatattactatctgcatttgttttaatataaaaatgtttgctgcctacctttttctcccaaaaaatctttaagtaaagatgatctgggaaaatg

SEQ ID NO: 75799 - DNA, 1635 bp, Homo sapiens
ttggaccctctagctgaaagaggaaatagccggggaatatgagccgaggaaatagcttatttttccggaaggtcccctttgggaagacttattgttgtgacctgaaaatgttaatttgaagatgtggggcagggacagtgacatttctgtagtcccagatgcacagaattatgggagagaatgttgatttctatacagtgtggcgcgcttttttaataatcatttaatcttgggaaaattcaggtgtttggtgtctgccttttttgttcttttttccagcacaacataacttaccactgatactccccctttagttattctgaattaggatatttttgctccaaattcttattttacttaaccagaagggaaaaaaagttgtattttcctgaagctacaggcactttgtcatgtgatttttgagtctcaatttaaggctttgtaaaatgaagagtagaattccaagaaaaatgagaaataattttgtaaaacttaacaaaatcactaaattaaactatatgggaggttatgaattactttttcttgggtagaccctaaaatgtcagtagcatgcaccagaatctgactcccattatgcttctaagcacatttcattgaccttgtctctcatacttcaagaaaaggacagtacattgctacattaccctagaaagtctgtgtgaggatctgccccttcagtctgttattgcaaagtaataaaatgtcacctacagggagcctctgagcctactctagttcaagaggctacctgaaaaaaaataaataagataaagggtcagcaacaacaaagaaaaagacaattacagaaaataagcaagatttggaaaggaagtataatggcacttttttcctcaaaggaagttcttgttttcacataaaatatgaaaagcagatcctgcaggagtaacccccttctttaagagccaagtatttgccagtgcttaaattacaccataccgttctaattatatataatcttttgttcttcagttttttgttttgtttcctttttgttattgttgccgaaggtgagtagttttgcatttctgatgacagccttggaaagtatatttgtaactccatgtctggtaatgccaacccaagtcgacatgggtcttaggacactgaccacctcacatgccataccctcagttaagcatgttaacatttataggaggaaaaaaatcactttgggagaaaataaaattcaactcaagcataaagcttctgtttactcaggccttctaaaaagcaggttaaaatgctctaaaatgagaaagcctgtggtttcacttatttatataactcactgggacattgccaaatgagtaagcacttaattcgctgcttctgagacttctctgtcaaaacagccccactgataatattagacagaacgagaatgcaggggtctcttccctcccctggggtttaggaagctcatgaggagctcggcttaaaatgtctttgatgtctcttcctttgtctcaaaaagtaatgtcaattttatatactatttcaatattactatctgcatttgttttaatataaaaatgtttgctgcctacctttttctcccaaaaaatctttaagtaaagatgatctgggaaaatg

SEQ ID NO: 75800 - DNA, 928 bp, Homo sapiens
  misc_feature (857)..(857): n is a, c, g, or t
  misc_feature (861)..(861): n is a, c, g, or t
  misc_feature (876)..(877): n is a, c, g, or t
  misc_feature (915)..(915): n is a, c, g, or t
ctcgcgagcgcctgccgtttctcggggcgggacgggggggcggggactgggcggagaggcgcgtgctgctgcgtgcgtgcgcgcgcgccgcgggcgggccagtgaaaccggcggccctggcacgtgacctaggaccggctcaccgggtcgcttggtggctccgtctgtctgtccgtccgcccgcgggtgccatcatggcggacgcggccagtcaggtgctcctgggctccggtctcaccatcctgtcccagccgctcatgtacgtgaaagtgctcatccaggtgggatatgagcctcttcctccaacaataggacgaaatatttttgggcggcaagtgtgtcagcttcctggtctctttagttatgctcagcacattgccagtatcgatgggaggcgcgggttgttcacaggcttaactccaagactgtgttcgggagtccttggaactgtggtccatggtaaagttttacagcattaccaggagagtgacaagggtgaggagttaggacctggaaatgtacagaaagaagtctcatcttcctttgaccacgttatcaaggagacaactcgagagatgatcgctcgttctgctgctaccctcatcacacatcccttccatgtgatcactctgagatctatggtacagttcattggcagagaatccaagtactgtggactttgtgattccataataaccatctatcgggaagagggcattctaggatttttcgcgggtcttgttcctcgccttctaggtgacatcctttctttgtggctgtgtaactcactggcctacctcgtcaatacctatgcactggacagtggggggtttctttccaatgaattgaaatgaagngttnttcttcaaagtttgnnaaaggttttttgggggagtttttttggacccttccccngggggttgggttc

SEQ ID NO: 75801 - DNA, 198 bp, Homo sapiens
ttcacatgacactgtaataaccctaatcatcctttttctttttttctatagcattaccaggagagtgacaagggtgaggtatgttggagctgatttctaagcatgagggcctttcccttgcaagttgttactgcttttggggcctcttttggagaaaagccaagtagtcagtctcctattcatctcagtgagtgttgt

SEQ ID NO: 75802 - DNA, 558 bp, Homo sapiens
acagttactgggttgtagtcacaaaacaaaattgttctcttctcccaaaaatgtgagtagagactaaatggagcctgtcatttatctagaatgatgtcagactctccaaaatcacttaccaataagagagcaacttaataatctcaataaaggcctcatattttttatttcagcttaatgactttgttggtgacctttcctgtttctttatttttttctcttacctgtaaaattgagaaaacaacagaagcctgctttgcagagaaattttgagaagtaactataatagaacattgagatccatgagtgaaaagtatgataaaatgacaatgaatgagatctttcacatcccattcaaactcttcttgactccagccagggcaggagggctgtgtcattcactttcttatcctataccacgatatccacccacattccttctcacaggcatttgagtgtcatttgtttagatttcagaagtgtgtgttgattgtttctagacaactcgagagatgatcgctcgttctgctgctaccctcatcacacatcccttccatg

SEQ ID NO: 75803 - DNA, 2622 bp, Homo sapiens
ctcgcgagcgcctgccgtttctcggggcgggacgggggggcggggactgggcggagaggcgcgtgctgctgcgtgcgtgcgcgcgcgccgcgggcgggccagtgaaaccggcggccctggcacgtgacctaggaccggctcaccgggtcgcttggtggctccgtctgtctgtccgtccgcccgcgggtgccatcatggcggacgcggccagtcaggtgctcctgggctccggtctcaccatcctgtcccagccgctcatgtacgtgaaagtgctcatccaggtgggatatgagcctcttcctccaacaataggacgaaatatttttgggcggcaagtgtgtcagcttcctggtctctttagttatgctcagcacattgccagtatcgatgggaggcgcgggttgttcacaggcttaactccaagactgtgttcgggagtccttggaactgtggtccatggtaaagttttacagcattaccaggagagtgacaagggtgaggagttaggacctggaaatgtacagaaagaagtctcatcttcctttgaccacgttatcaaggagacaactcgagagatgatcgctcgttctgctgctaccctcatcacacatcccttccatgtgatcactctgagatctatggtacagttcattggcagagaatccaagtactgtggactttgtgattccataataaccatctatcgggaagagggcattctaggatttttcgcgggtcttgttcctcgccttctaggtgacatcctttctttgtggctgtgtaactcactggcctacctcgtcaatacctatgcactggacagtggggtttctaccatgaatgaaatgaagagttattctcaagctgtcacaggattttttgcgagtatgttgacctatccctttgtgcttgtctccaatcttatggctgtcaacaactgtggtcttgctggtggatgccctccttactccccaatatatacgtcttggatagactgttggtgcatgctacaaaaagaggggaatatgagccgaggaaatagcttatttttccggaaggtcccctttgggaagacttattgttgtgacctgaaaatgttaatttgaagatgtggggcagggacagtgacatttctgtagtcccagatgcacagaattatgggagagaatgttgatttctatacagtgtggcgcgcttttttaataatcatttaatcttgggaaaattcaggtgtttggtgtctgccttttttgttcttttttccagcacaacataacttaccactgatactccccctttagttattctgaattaggatatttttgctccaaattcttattttacttaaccagaagggaaaaaaagttgtattttcctgaagctacaggcactttgtcatgtgatttttgagtctcaatttaaggctttgtaaaatgaagagtagaattccaagaaaaatgagaaataattttgtaaaacttaacaaaatcactaaattaaactatatgggaggttatgaattactttttcttgggtagaccctaaaatgtcagtagcatgcaccagaatctgactcccattatgcttctaagcacatttcattgaccttgtctctcatacttcaagaaaaggacagtacattgctacattaccctagaaagtctgtgtgaggatctgccccttcagtctgttattgcaaagtaataaaatgtcacctacagggagcctctgagcctactctagttcaagaggctacctgaaaaaaaataaataagataaagggtcagcaacaacaaagaaaaagacaattacagaaaataagcaagatttggaaaggaagtataatggcacttttttcctcaaaggaagttcttgttttcacataaaatatgaaaagcagatcctgcaggagtaacccccttctttaagagccaagtatttgccagtgcttaaattacaccataccgttctaattatatataatcttttgttcttcagttttttgttttgtttcctttttgttattgttgccgaaggtgagtagttttgcatttctgatgacagccttggaaagtatatttgtaactccatgtctggtaatgccaacccaagtcgacatgggtcttaggacactgaccacctcacatgccataccctcagttaagcatgttaacatttataggaggaaaaaaatcactttgggagaaaataaaattcaactcaagcataaagcttctgtttactcaggccttctaaaaagcaggttaaaatgctctaaaatgagaaagcctgtggtttcacttatttatataactcactgggacattgccaaatgagtaagcacttaattcgctgcttctgagacttctctgtcaaaacagccccactgataatattagacagaacgagaatgcaggggtctcttccctcccctggggtttaggaagctcatgaggagctcggcttaaaatgtctttgatgtctcttcctttgtctcaaaaagtaatgtcaattttatatactatttcaatattactatctgcatttgttttaatataaaaatgtttgctgcctacctttttctcccaaaaaatctttaagtaaagatgatctgggaaaatg

SEQ ID NO: 75804 - DNA, 1489 bp, Homo sapiens
ctcgcgagcgcctgccgtttctcggggcgggacgggggggcggggactgggcggagaggcgcgtgctgctgcgtgcgtgcgcgcgcgccgcgggcgggccagtgaaaccggcggccctggcacgtgacctaggaccggctcaccgggtcgcttggtggctccgtctgtctgtccgtccgcccgcgggtgccatcatggcggacgcggccagtcaggtgctcctgggctccggtctcaccatcctgtcccagccgctcatgtacgtgaaagtgctcatccaggtgggatatgagcctcttcctccaacaataggacgaaatatttttgggcggcaagtgtgtcagcttcctggtctctttagttatgctcagcacattgccagtatcgatgggaggcgcgggttgttcacaggcttaactccaagactgtgttcgggagtccttggaactgtggtccatggtaaagttttacagcattaccaggagagtgacaagggtgaggagttaggacctggaaatgtacagaaagaagtctcatcttcctttgaccacgttatcaaggagacaactcgagagatgatcgctcgttctgctgctaccctcatcacacatcccttccatgtgatcactctgagatctatggtacagttcattggcagagaatccaagtactgtggactttgtgattccataataaccatctatcgggaagagggcattctaggatttttcgcgggtcttgttcctcgccttctaggtgacatcctttctttgtggctgtgtaactcactggcctacctcgtcaatacctatgcactggacagtggggtttctaccatgaatgaaatgaagagttattctcaagctgtcacaggattttttgcgagtatgttgacctatccctttgtgcttgtctccaatcttatggctgtcaacaactgtggtcttgctggtggatgccctccttactccccaatatatacgtcttggatagactgttggtgcatgctacaaaaagaggggaatatgagccgaggaaatagcttatttttccggaaggtcccctttgggaagacttattgttgtgacctgaaaatgttaatttgaagatgtggggcagggacagtgacatttctgtagtcccagatgcacagaattatgggagagaatgttgatttctatacagtgtggcgcgcttttttaataatcatttaatcttgggaaaattcaggtgtttggtgtctgccttttttgttcttttttccagcacaacataacttaccactgatactccccctttagttattctgaattaggatatttttgctccaaattcttattttacttaaccagaagggaaaaaaagttgtattttcctgaagctacaggcactttgtcatgtgatttttgagtctcaatttaaggctttgtaaaatgaagagtagaattccaagaaaaagtaattcataacctcccatatagtttaattt

SEQ ID NO: 75805 - DNA, 2484 bp, Homo sapiens
ccgtgtggatagggctggtacgagactgggttaatcggcagagggcgggtgccatcatggcggacgcggccagtcaggtgctcctgggctccggtctcaccatcctgtcccagccgctcatgtacgtgaaagtgctcatccaggtgggatatgagcctcttcctccaacaataggacgaaatatttttgggcggcaagtgtgtcagcttcctggtctctttagttatgctcagcacattgccagtatcgatgggaggcgcgggttgttcacaggcttaactccaagactgtgttcgggagtccttggaactgtggtccatggtaaagttttacagcattaccaggagagtgacaagggtgaggagttaggacctggaaatgtacagaaagaagtctcatcttcctttgaccacgttatcaaggagacaactcgagagatgatcgctcgttctgctgctaccctcatcacacatcccttccatgtgatcactctgagatctatggtacagttcattggcagagaatccaagtactgtggactttgtgattccataataaccatctatcgggaagagggcattctaggatttttcgcgggtcttgttcctcgccttctaggtgacatcctttctttgtggctgtgtaactcactggcctacctcgtcaatacctatgcactggacagtggggtttctaccatgaatgaaatgaagagttattctcaagctgtcacaggattttttgcgagtatgttgacctatccctttgtgcttgtctccaatcttatggctgtcaacaactgtggtcttgctggtggatgccctccttactccccaatatatacgtcttggatagactgttggtgcatgctacaaaaagaggggaatatgagccgaggaaatagcttatttttccggaaggtcccctttgggaagacttattgttgtgacctgaaaatgttaatttgaagatgtggggcagggacagtgacatttctgtagtcccagatgcacagaattatgggagagaatgttgatttctatacagtgtggcgcgcttttttaataatcatttaatcttgggaaaattcaggtgtttggtgtctgccttttttgttcttttttccagcacaacataacttaccactgatactccccctttagttattctgaattaggatatttttgctccaaattcttattttacttaaccagaagggaaaaaaagttgtattttcctgaagctacaggcactttgtcatgtgatttttgagtctcaatttaaggctttgtaaaatgaagagtagaattccaagaaaaatgagaaataattttgtaaaacttaacaaaatcactaaattaaactatatgggaggttatgaattactttttcttgggtagaccctaaaatgtcagtagcatgcaccagaatctgactcccattatgcttctaagcacatttcattgaccttgtctctcatacttcaagaaaaggacagtacattgctacattaccctagaaagtctgtgtgaggatctgccccttcagtctgttattgcaaagtaataaaatgtcacctacagggagcctctgagcctactctagttcaagaggctacctgaaaaaaaataaataagataaagggtcagcaacaacaaagaaaaagacaattacagaaaataagcaagatttggaaaggaagtataatggcacttttttcctcaaaggaagttcttgttttcacataaaatatgaaaagcagatcctgcaggagtaacccccttctttaagagccaagtatttgccagtgcttaaattacaccataccgttctaattatatataatcttttgttcttcagttttttgttttgtttcctttttgttattgttgccgaaggtgagtagttttgcatttctgatgacagccttggaaagtatatttgtaactccatgtctggtaatgccaacccaagtcgacatgggtcttaggacactgaccacctcacatgccataccctcagttaagcatgttaacatttataggaggaaaaaaatcactttgggagaaaataaaattcaactcaagcataaagcttctgtttactcaggccttctaaaaagcaggttaaaatgctctaaaatgagaaagcctgtggtttcacttatttatataactcactgggacattgccaaatgagtaagcacttaattcgctgcttctgagacttctctgtcaaaacagccccactgataatattagacagaacgagaatgcaggggtctcttccctcccctggggtttaggaagctcatgaggagctcggcttaaaatgtctttgatgtctcttcctttgtctcaaaaagtaatgtcaattttatatactatttcaatattactatctgcatttgttttaatataaaaatgtttgctgcctacctttttctcccaaaaaatctttaagtaaagatgatctgggaaaatg

SEQ ID NO: 75806 - DNA, 2595 bp, Homo sapiens
ctcgcgagcgcctgccgtttctcggggcgggacgggggggcggggactgggcggagaggcgcgtgctgctgcgtgcgtgcgcgcgcgccgcgggcgggccagtgaaaccggcggccctggcacgtgacctaggaccggctcaccgggtcgcttggtggctccgtctgtctgtccgtccgcccgcgggtgccatcatggcggacgcggccagtcaggtgctcctgggctccggtctcaccatcctgtcccagccgctcatgtacgtgaaagtgctcatccaggtgggatatgagcctcttcctccaacaataggacgaaatatttttgggcggcaagtgtgtcagcttcctggtctctttagttatgctcagcacattgccagtatcgatgggaggcgcgggttgttcacaggcttaactccaagactgtgttcgggagtccttggaactgtggtccatggtaaagttttacaggagttaggacctggaaatgtacagaaagaagtctcatcttcctttgaccacgttatcaaggagacaactcgagagatgatcgctcgttctgctgctaccctcatcacacatcccttccatgtgatcactctgagatctatggtacagttcattggcagagaatccaagtactgtggactttgtgattccataataaccatctatcgggaagagggcattctaggatttttcgcgggtcttgttcctcgccttctaggtgacatcctttctttgtggctgtgtaactcactggcctacctcgtcaatacctatgcactggacagtggggtttctaccatgaatgaaatgaagagttattctcaagctgtcacaggattttttgcgagtatgttgacctatccctttgtgcttgtctccaatcttatggctgtcaacaactgtggtcttgctggtggatgccctccttactccccaatatatacgtcttggatagactgttggtgcatgctacaaaaagaggggaatatgagccgaggaaatagcttatttttccggaaggtcccctttgggaagacttattgttgtgacctgaaaatgttaatttgaagatgtggggcagggacagtgacatttctgtagtcccagatgcacagaattatgggagagaatgttgatttctatacagtgtggcgcgcttttttaataatcatttaatcttgggaaaattcaggtgtttggtgtctgccttttttgttcttttttccagcacaacataacttaccactgatactccccctttagttattctgaattaggatatttttgctccaaattcttattttacttaaccagaagggaaaaaaagttgtattttcctgaagctacaggcactttgtcatgtgatttttgagtctcaatttaaggctttgtaaaatgaagagtagaattccaagaaaaatgagaaataattttgtaaaacttaacaaaatcactaaattaaactatatgggaggttatgaattactttttcttgggtagaccctaaaatgtcagtagcatgcaccagaatctgactcccattatgcttctaagcacatttcattgaccttgtctctcatacttcaagaaaaggacagtacattgctacattaccctagaaagtctgtgtgaggatctgccccttcagtctgttattgcaaagtaataaaatgtcacctacagggagcctctgagcctactctagttcaagaggctacctgaaaaaaaataaataagataaagggtcagcaacaacaaagaaaaagacaattacagaaaataagcaagatttggaaaggaagtataatggcacttttttcctcaaaggaagttcttgttttcacataaaatatgaaaagcagatcctgcaggagtaacccccttctttaagagccaagtatttgccagtgcttaaattacaccataccgttctaattatatataatcttttgttcttcagttttttgttttgtttcctttttgttattgttgccgaaggtgagtagttttgcatttctgatgacagccttggaaagtatatttgtaactccatgtctggtaatgccaacccaagtcgacatgggtcttaggacactgaccacctcacatgccataccctcagttaagcatgttaacatttataggaggaaaaaaatcactttgggagaaaataaaattcaactcaagcataaagcttctgtttactcaggccttctaaaaagcaggttaaaatgctctaaaatgagaaagcctgtggtttcacttatttatataactcactgggacattgccaaatgagtaagcacttaattcgctgcttctgagacttctctgtcaaaacagccccactgataatattagacagaacgagaatgcaggggtctcttccctcccctggggtttaggaagctcatgaggagctcggcttaaaatgtctttgatgtctcttcctttgtctcaaaaagtaatgtcaattttatatactatttcaatattactatctgcatttgttttaatataaaaatgtttgctgcctacctttttctcccaaaaaatctttaagtaaagatgatctgggaaaatg

SEQ ID NO: 75807 - DNA, 2501 bp, Homo sapiens
ctcgcgagcgcctgccgtttctcggggcgggacgggggggcggggactgggcggagaggcgcgtgctgctgcgtgcgtgcgcgcgcgccgcgggcgggccagtgaaaccggcggccctggcacgtgacctaggaccggctcaccgggtcgcttggtggctccgtctgtctgtccgtccgcccgcgggtgccatcatggcggacgcggccagtcaggtgctcctgggctccggtctcaccatcctgtcccagccgctcatgtacgtgaaagtgctcatccaggtgggatatgagcctcttcctccaacaataggacgaaatatttttgggcggcaagtgtgtcagcttcctggtctctttagttatgctcagcacattgccagtatcgatgggaggcgcgggttgttcacaggcttaactccaagactgtgttcgggagtccttggaactgtggtccatggtaaagttttacagcattaccaggagagtgacaagggtgagtgatcactctgagatctatggtacagttcattggcagagaatccaagtactgtggactttgtgattccataataaccatctatcgggaagagggcattctaggatttttcgcgggtcttgttcctcgccttctaggtgacatcctttctttgtggctgtgtaactcactggcctacctcgtcaatacctatgcactggacagtggggtttctaccatgaatgaaatgaagagttattctcaagctgtcacaggattttttgcgagtatgttgacctatccctttgtgcttgtctccaatcttatggctgtcaacaactgtggtcttgctggtggatgccctccttactccccaatatatacgtcttggatagactgttggtgcatgctacaaaaagaggggaatatgagccgaggaaatagcttatttttccggaaggtcccctttgggaagacttattgttgtgacctgaaaatgttaatttgaagatgtggggcagggacagtgacatttctgtagtcccagatgcacagaattatgggagagaatgttgatttctatacagtgtggcgcgcttttttaataatcatttaatcttgggaaaattcaggtgtttggtgtctgccttttttgttcttttttccagcacaacataacttaccactgatactccccctttagttattctgaattaggatatttttgctccaaattcttattttacttaaccagaagggaaaaaaagttgtattttcctgaagctacaggcactttgtcatgtgatttttgagtctcaatttaaggctttgtaaaatgaagagtagaattccaagaaaaatgagaaataattttgtaaaacttaacaaaatcactaaattaaactatatgggaggttatgaattactttttcttgggtagaccctaaaatgtcagtagcatgcaccagaatctgactcccattatgcttctaagcacatttcattgaccttgtctctcatacttcaagaaaaggacagtacattgctacattaccctagaaagtctgtgtgaggatctgccccttcagtctgttattgcaaagtaataaaatgtcacctacagggagcctctgagcctactctagttcaagaggctacctgaaaaaaaataaataagataaagggtcagcaacaacaaagaaaaagacaattacagaaaataagcaagatttggaaaggaagtataatggcacttttttcctcaaaggaagttcttgttttcacataaaatatgaaaagcagatcctgcaggagtaacccccttctttaagagccaagtatttgccagtgcttaaattacaccataccgttctaattatatataatcttttgttcttcagttttttgttttgtttcctttttgttattgttgccgaaggtgagtagttttgcatttctgatgacagccttggaaagtatatttgtaactccatgtctggtaatgccaacccaagtcgacatgggtcttaggacactgaccacctcacatgccataccctcagttaagcatgttaacatttataggaggaaaaaaatcactttgggagaaaataaaattcaactcaagcataaagcttctgtttactcaggccttctaaaaagcaggttaaaatgctctaaaatgagaaagcctgtggtttcacttatttatataactcactgggacattgccaaatgagtaagcacttaattcgctgcttctgagacttctctgtcaaaacagccccactgataatattagacagaacgagaatgcaggggtctcttccctcccctggggtttaggaagctcatgaggagctcggcttaaaatgtctttgatgtctcttcctttgtctcaaaaagtaatgtcaattttatatactatttcaatattactatctgcatttgttttaatataaaaatgtttgctgcctacctttttctcccaaaaaatctttaagtaaagatgatctgggaaaatg

SEQ ID NO: 75808 - DNA, 2554 bp, Homo sapiens
ctcgcgagcgcctgccgtttctcggggcgggacgggggggcggggactgggcggagaggcgcgtgctgctgcgtgcgtgcgcgcgcgccgcgggcgggccagtgaaaccggcggccctggcacgtgacctaggaccggctcaccgggtcgcttggtggctccgtctgtctgtccgtccgcccgcgggtgccatcatggcggacgcggccagtcaggtgctcctgggctccggtctcaccatcctgtcccagccgctcatgtacgtgaaagtgctcatccaggtgggatatgagcctcttcctccaacaataggacgaaatatttttgggcggcaagtgtgtcagcttcctggtctctttagttatgctcagcacattgccagtatcgatgggaggcgcgggttgttcacaggcttaactccaagactgtgttcgggagtccttggaactgtggtccatggtaaagttttacagcattaccaggagagtgacaagggtgaggagttaggacctggaaatgtacagaaagaagtctcatcttcctttgaccacgttatcaaggagacaactcgagagatgatcgctcgttctgctgctaccctcatcacacatcccttccatgtgatcactctgagatctatggtacagttcattggcagagaatccaagtactgtggactttgtgattccataataaccatctatcgggaagagggcattctaggatttttcgcgggtcttgttcctcgccttctaggtgacatcctttctttgtggctgtgtaactcactggcctacctcgtcaatacctatgcactggacagtggggtttctaccatgaatgaaatgaagagttattctcaagctgtcacaggatcttgctggtggatgccctccttactccccaatatatacgtcttggatagactgttggtgcatgctacaaaaagaggggaatatgagccgaggaaatagcttatttttccggaaggtcccctttgggaagacttattgttgtgacctgaaaatgttaatttgaagatgtggggcagggacagtgacatttctgtagtcccagatgcacagaattatgggagagaatgttgatttctatacagtgtggcgcgcttttttaataatcatttaatcttgggaaaattcaggtgtttggtgtctgccttttttgttcttttttccagcacaacataacttaccactgatactccccctttagttattctgaattaggatatttttgctccaaattcttattttacttaaccagaagggaaaaaaagttgtattttcctgaagctacaggcactttgtcatgtgatttttgagtctcaatttaaggctttgtaaaatgaagagtagaattccaagaaaaatgagaaataattttgtaaaacttaacaaaatcactaaattaaactatatgggaggttatgaattactttttcttgggtagaccctaaaatgtcagtagcatgcaccagaatctgactcccattatgcttctaagcacatttcattgaccttgtctctcatacttcaagaaaaggacagtacattgctacattaccctagaaagtctgtgtgaggatctgccccttcagtctgttattgcaaagtaataaaatgtcacctacagggagcctctgagcctactctagttcaagaggctacctgaaaaaaaataaataagataaagggtcagcaacaacaaagaaaaagacaattacagaaaataagcaagatttggaaaggaagtataatggcacttttttcctcaaaggaagttcttgttttcacataaaatatgaaaagcagatcctgcaggagtaacccccttctttaagagccaagtatttgccagtgcttaaattacaccataccgttctaattatatataatcttttgttcttcagttttttgttttgtttcctttttgttattgttgccgaaggtgagtagttttgcatttctgatgacagccttggaaagtatatttgtaactccatgtctggtaatgccaacccaagtcgacatgggtcttaggacactgaccacctcacatgccataccctcagttaagcatgttaacatttataggaggaaaaaaatcactttgggagaaaataaaattcaactcaagcataaagcttctgtttactcaggccttctaaaaagcaggttaaaatgctctaaaatgagaaagcctgtggtttcacttatttatataactcactgggacattgccaaatgagtaagcacttaattcgctgcttctgagacttctctgtcaaaacagccccactgataatattagacagaacgagaatgcaggggtctcttccctcccctggggtttaggaagctcatgaggagctcggcttaaaatgtctttgatgtctcttcctttgtctcaaaaagtaatgtcaattttatatactatttcaatattactatctgcatttgttttaatataaaaatgtttgctgcctacctttttctcccaaaaaatctttaagtaaagatgatctgggaaaatg

SEQ ID NO: 75809 - DNA, 2031 bp, Homo sapiens
ctcgcgagcgcctgccgtttctcggggcgggacgggggggcggggactgggcggagaggcgcgtgctgctgcgtgcgtgcgcgcgcgccgcgggcgggccagtgaaaccggcggccctggcacgtgacctaggaccggctcaccgggtcgcttggtggctccgtctgtctgtccgtccgcccgcgggtgccatcatggcggacgcggccagtcaggtgctcctgggctccggtctcaccatcctgtcccagccgctcatgtacgtgaaagtgctcatccaggtgggatatgagcctcttcctccaacaataggacgaaatatttttgggcggcaagtgtgtcagcttcctggtctctttagttatgcttctaagcacatttcattgaccttgtctctcatacttcaagaaaaggacagtacaaaagaggggaatatgagccgaggaaatagcttatttttccggaaggtcccctttgggaagacttattgttgtgacctgaaaatgttaatttgaagatgtggggcagggacagtgacatttctgtagtcccagatgcacagaattatgggagagaatgttgatttctatacagtgtggcgcgcttttttaataatcatttaatcttgggaaaattcaggtgtttggtgtctgccttttttgttcttttttccagcacaacataacttaccactgatactccccctttagttattctgaattaggatatttttgctccaaattcttattttacttaaccagaagggaaaaaaagttgtattttcctgaagctacaggcactttgtcatgtgatttttgagtctcaatttaaggctttgtaaaatgaagagtagaattccaagaaaaatgagaaataattttgtaaaacttaacaaaatcactaaattaaactatatgggaggttatgaattactttttcttgggtagaccctaaaatgtcagtagcatgcaccagaatctgactcccattatgcttctaagcacatttcattgaccttgtctctcatacttcaagaaaaggacagtacattgctacattaccctagaaagtctgtgtgaggatctgccccttcagtctgttattgcaaagtaataaaatgtcacctacagggagcctctgagcctactctagttcaagaggctacctgaaaaaaaataaataagataaagggtcagcaacaacaaagaaaaagacaattacagaaaataagcaagatttggaaaggaagtataatggcacttttttcctcaaaggaagttcttgttttcacataaaatatgaaaagcagatcctgcaggagtaacccccttctttaagagccaagtatttgccagtgcttaaattacaccataccgttctaattatatataatcttttgttcttcagttttttgttttgtttcctttttgttattgttgccgaaggtgagtagttttgcatttctgatgacagccttggaaagtatatttgtaactccatgtctggtaatgccaacccaagtcgacatgggtcttaggacactgaccacctcacatgccataccctcagttaagcatgttaacatttataggaggaaaaaaatcactttgggagaaaataaaattcaactcaagcataaagcttctgtttactcaggccttctaaaaagcaggttaaaatgctctaaaatgagaaagcctgtggtttcacttatttatataactcactgggacattgccaaatgagtaagcacttaattcgctgcttctgagacttctctgtcaaaacagccccactgataatattagacagaacgagaatgcaggggtctcttccctcccctggggtttaggaagctcatgaggagctcggcttaaaatgtctttgatgtctcttcctttgtctcaaaaagtaatgtcaattttatatactatttcaatattactatctgcatttgttttaatataaaaatgtttgctgcctacctttttctcccaaaaaatctttaagtaaagatgatctgggaaaatg

SEQ ID NO: 75810 - DNA, 786 bp, Homo sapiens
ctcgcgagcgcctgccgtttctcggggcgggacgggggggcggggactgggcggagaggcgcgtgctgctgcgtgcgtgcgcgcgcgccgcgggcgggccagtgaaaccggcggccctggcacgtgacctaggaccggctcaccgggtcgcttggtggctccgtctgtctgtccgtccgcccgcgggtgccatcatggcggacgcggccagtcaggtgctcctgggctccggtctcaccatcctgtcccagccgctcatgtacgtgaaagtgctcatccaggtgggatatgagcctcttcctccaacaataggacgaaatatttttgggcggcaagtgtgtcagcttcctggtctctttagttatgctcagcacattgccagtatcgatgggaggcgcgggttgttcacaggcttaactccaagactgtgttcgggagtccttggaactgtggtccatggtaaagttttacagcattaccaggagagtgacaagggtgaggagttaggacctggaaatgtacagaaagaagtctcatcttcctttgaccacgttatcaaggagacagaacgagaatgcaggggtctcttccctcccctggggtttaggaagctcatgaggagctcggcttaaaatgtctttgatgtctcttcctttgtctcaaaaagtaatgtcaattttatatactatttcaatattactatctgcatttgttttaatataaaaatgtttgctgcctacctttttctcccaaaaaatctttaagtaaagatgatctgggaaaatg

SEQ ID NO: 75811 - DNA, 1348 bp, Homo sapiens
  misc_feature (6)..(8): n is a, c, g, or t
ggccgnnnagagaacctgtaaacgctctcggaattatggcggcggtggatatccgagacaatctgctgggaatttcttgggttgacagctcttggatccctattttgaacagtggtagtgtcctggattacttttcagaaagaagtaatcctttttatgacagaacatgtaataatgaagtggtcaaaatgcagaggctaacattagaacacttgaatcagatggttggaatcgagtacatccttttgcatgctcaagagcccattcttttcatcattcggaagcaacagcggcagtcccctgcccaagttatcccactagctgattactatatcattgctggagtgatctatcaggcaccagacttgggatcagttataaactctagagtgcttactgcagtgcatggtattcagtcagcttttgatgaagctatgtcatactgtcgatatcatccttccaaagggtattggtggcacttcaaagatcatgaagagcaagataaagtcagacctaaagccaaaaggaaagaagaaccaagctctatttttcagagacaacgtgtggatgctttacttttagacctcagacaaaaatttccacccaaatttgtgcagctaaagcctggagaaaagcctgttccagtggatcaaacaaagaaagaggcagaacctataccagaaactgtaaaacctgaggagaaggagaccacaaagaatgtacaacagacagtgagtgctaaaggcccccctgaaaaacggatgagacttcagtgagtactggacaaaagagaagcctggaagactcctcatgctagttatcatacctcagtactgtggctcttgagctttgaagtactttattgtaaccttcttatttgtatggaatgcgcttattttttgaaaggatattaggccggatgtggtggctcacgcctgtaatcccagcactttgggaggccatggcgggtggatcacttgaggtcagaagttcaagaccagcctgaccaatatggtgaaaccccgtctctactaaaaatacaaaaattagccgggcgtggtggcgggcgcccatagtcccagctactcgggaggctgagacaggagacttgcttgaacccgggaggtggaggttgccctgagctgattatcatgctgttgcactccagcttgggcgacagagcgagactttgtctcaaaaaagaagaaaagatattattcccatcatgatttcttgtgaatatttgttatatgtcttctgtaacctttcctctcccggacttgagcaacctacacactcacatgtttactggtagatatgtttaaaagcaaaataaaggtatttgtat

SEQ ID NO: 75812 - DNA, 348 bp, Homo sapiens
gtttgttggattggattctttctatttttctaatcctttatcattttgttttctttcccatagacaatctgctgggaatttcttgggttgacagctcttggatccctattttgaacagtggtagtgtcctggattacttttcagaaagaagtaatcctttttatgacagaacatgtaataatgaagtggtcaaaatgcagaggctaacattagaacacttgaatcagatggttggaatcgagtacatccttttgcatgctcaagagcccattcttttcatcattcggaagcaacagcggcagtcccctgcccaaggtaaaatgtgtaaactttaggcattgttttctt

SEQ ID NO: 75813 - DNA, 2209 bp, Homo sapiens
ggaggtcccattccttccttcttttggtcggttctgagtgtcagctgtctactggggatctgctaaggctaagaggcaaagataggcaagtcactcccctgacctcaagaaactcccagtctacaggcgaagatacaccacccaccggtagagtcgctggaccagaatattaggtgttccagtcaaagtcacccagatttgccaaaagacctggcacaaatgtcacttccactatgaagtcccactgacttccatatacaagacaatctgctgggaatttcttgggttgacagctcttggatccctattttgaacagtggtagtgtcctggattacttttcagaaagaagtaatcctttttatgacagaacatgtaataatgaagtggtcaaaatgcagaggctaacattagaacacttgaatcagatggttggaatcgagtacatccttttgcatgctcaagagcccattcttttcatcattcggaagcaacagcggcagtcccctgcccaagttatcccactagctgattactatatcattgctggagtgatctatcaggcaccagacttgggatcagttataaactctagagtgcttactgcagtgcatggtattcagtcagcttttgatgaagctatgtcatactgtcgatatcatccttccaaagggtattggtggcacttcaaagatcatgaagagcaagataaagtcagacctaaagccaaaaggaaagaagaaccaagctctatttttcagagacaacgtgtggatgctttacttttagacctcagacaaaaatttccacccaaatttgtgcagctaaagcctggagaaaagcctgttccagtggatcaaacaaagaaagaggcagaacctataccagaaactgtaaaacctgaggagaaggagaccacaaagaatgtacaacagacagtgagtgctaaaggcccccctgaaaaacggatgagacttcagtgagtactggacaaaagagaagcctggaagactcctcatgctagttatcatacctcagtactgtggctcttgagctttgaagtactttattgtaaccttcttatttgtatggaatgcgcttattttttgaaaggatattaggccggatgtggtggctcacgcctgtaatcccagcactttgggaggccatggcgggtggatcacttgaggtcagaagttcaagaccagcctgaccaatatggtgaaaccccgtctctactaaaaatacaaaaattagccgggcgtggtggcgggcgcccatagtcccagctactcgggaggctgagacaggagacttgcttgaacccgggaggtggaggttgccctgagctgattatcatgctgttgcactccagcttgggcgacagagcgagactttgtctcaaaaaagaagaaaagatattattcccatcatgatttcttgtgaatatttgttatatgtcttctgtaacctttcctctcccggacttgagcaacctacacactcacatgtttactggtagatatgtttaaaagcaaaataaaggtatttgtatatattgcttcatcatgacttttttcttcatcataactgatatttttcagatgcactttgaagacataaaggatgttaaagtagtaactaagcatatttctttttgttcagttacataatcctcagtattaaaataaacagttgctgacattttggaagatgaagaaaaggaaaaacctcactcaccaataccattaccctataaatactgtaacagtgttgtgaattttaatcttattctgtgtgtagatacttcttttttcaataaagaaaaggaattttattttttttaaagttatggaggctgagaagtccagcattgattggctccatctggtgagggccttcttgctggtaggaagtctgcaaagtccctaggcagcacagggtatctcatggcaagggggctgagtgtgcttgctgcatgtagatgcttttaaaactgtactttaatcattcctttcgtacaattttactttattatatctgttgtaagcttttccccatgtttatgtagtttttatagactgttttagtgtccgaatttctgtaaatgattgtatctcagttttctttctgtcttatatttgggatttttcccagtttacattattttatataagactgctgtgattatatctttgtataatgcctttt

SEQ ID NO: 75814 - DNA, 2310 bp, Homo sapiens
  misc_feature (6)..(8): n is a, c, g, or t
ggccgnnnagagaacctgtaaacgctctcggaattatggcggcggtggatatccgagacaatctgctgggaatttcttgggttgacagctcttggatccctattttgaacagtggtagtgtcctggattacttttcagaaagaagtaatcctttttatgacagaacatgtaataatgaagtggtcaaaatgcagaggctaacattagaacacttgaatcagatggttggaatcgagtacatccttttgcatgctcaagagcccattcttttcatcattcggaagcaacagcggcagtcccctgcccaagttatcccactagctgattactatatcattgctggagtgatctatcaggcaccagacttgggatcagttataaactctagagtggtaagtgtcttcacattctttaagcactaaagaaaacttttaattagctaccttgcttccagtaatcaaactagagctcctctgccttgtgtaagttgctataaagtattgactattagaatgtcttgaactttggttactgtgagccaagtcggtgctcaaagtatatttcatagtctcaattatatagtaatttaggttctgaaaaataggttctgtctttgcatatgtaatatttgtgagtatttactttggaaagtttggtcgacctaatgataaatttagagtttattttccttttacaagcttactgcagtgcatggtattcagtcagcttttgatgaagctatgtcatactgtcgatatcatccttccaaagggtattggtggcacttcaaagatcatgaagagcaagataaagtcagacctaaagccaaaaggaaagaagaaccaagctctatttttcagagacaacgtgtggatgctttacttttagacctcagacaaaaatttccacccaaatttgtgcagctaaagcctggagaaaagcctgttccagtggatcaaacaaagaaagaggcagaacctataccagaaactgtaaaacctgaggagaaggagaccacaaagaatgtacaacagacagtgagtgctaaaggcccccctgaaaaacggatgagacttcagtgagtactggacaaaagagaagcctggaagactcctcatgctagttatcatacctcagtactgtggctcttgagctttgaagtactttattgtaaccttcttatttgtatggaatgcgcttattttttgaaaggatattaggccggatgtggtggctcacgcctgtaatcccagcactttgggaggccatggcgggtggatcacttgaggtcagaagttcaagaccagcctgaccaatatggtgaaaccccgtctctactaaaaatacaaaaattagccgggcgtggtggcgggcgcccatagtcccagctactcgggaggctgagacaggagacttgcttgaacccgggaggtggaggttgccctgagctgattatcatgctgttgcactccagcttgggcgacagagcgagactttgtctcaaaaaagaagaaaagatattattcccatcatgatttcttgtgaatatttgttatatgtcttctgtaacctttcctctcccggacttgagcaacctacacactcacatgtttactggtagatatgtttaaaagcaaaataaaggtatttgtatatattgcttcatcatgacttttttcttcatcataactgatatttttcagatgcactttgaagacataaaggatgttaaagtagtaactaagcatatttctttttgttcagttacataatcctcagtattaaaataaacagttgctgacattttggaagatgaagaaaaggaaaaacctcactcaccaataccattaccctataaatactgtaacagtgttgtgaattttaatcttattctgtgtgtagatacttcttttttcaataaagaaaaggaattttattttttttaaagttatggaggctgagaagtccagcattgattggctccatctggtgagggccttcttgctggtaggaagtctgcaaagtccctaggcagcacagggtatctcatggcaagggggctgagtgtgcttgctgcatgtagatgcttttaaaactgtactttaatcattcctttcgtacaattttactttattatatctgttgtaagcttttccccatgtttatgtagtttttatagactgttttagtgtccgaatttctgtaaatgattgtatctcagttttctttctgtcttatatttgggatttttcccagtttacattattttatataagactgctgtgattatatctttgtataatgcctttt

SEQ ID NO: 75815 - DNA, 1936 bp, Homo sapiens
atatggtagcttgagtttgtgaaacctgcatttccatttgttgctagtaggttttgtgagaaaagaccatttaatacacttaaaataacaaaggtaatttcaagccaataatttggattgtgtgatttaggtaattatgaaaaactttagctttaaaactcttacggttgtgcgtgcttatataccaaaactgaagtatctttaaaagacatatgtatcagcttaaatgttagaatttaacttcagttaagagggagagttaacaacacttctgtatatgtgctgtgtttaccttattttgggaattatctttggtatagcagccattaaaaataatgaagtttgggtatattcatggtggataaagatttgtaaaatatgagacaccaaactaagtaggcaatgttttgatttggacttcgtattttaatagataaagtcagacctaaagccaaaaggaaagaagaaccaagctctatttttcagagacaacgtgtggatgctttacttttagacctcagacaaaaatttccacccaaatttgtgcagctaaagcctggagaaaagcctgttccagtggatcaaacaaagaaagaggcagaacctataccagaaactgtaaaacctgaggagaaggagaccacaaagaatgtacaacagacagtgagtgctaaaggcccccctgaaaaacggatgagacttcagtgagtactggacaaaagagaagcctggaagactcctcatgctagttatcatacctcagtactgtggctcttgagctttgaagtactttattgtaaccttcttatttgtatggaatgcgcttattttttgaaaggatattaggccggatgtggtggctcacgcctgtaatcccagcactttgggaggccatggcgggtggatcacttgaggtcagaagttcaagaccagcctgaccaatatggtgaaaccccgtctctactaaaaatacaaaaattagccgggcgtggtggcgggcgcccatagtcccagctactcgggaggctgagacaggagacttgcttgaacccgggaggtggaggttgccctgagctgattatcatgctgttgcactccagcttgggcgacagagcgagactttgtctcaaaaaagaagaaaagatattattcccatcatgatttcttgtgaatatttgttatatgtcttctgtaacctttcctctcccggacttgagcaacctacacactcacatgtttactggtagatatgtttaaaagcaaaataaaggtatttgtatatattgcttcatcatgacttttttcttcatcataactgatatttttcagatgcactttgaagacataaaggatgttaaagtagtaactaagcatatttctttttgttcagttacataatcctcagtattaaaataaacagttgctgacattttggaagatgaagaaaaggaaaaacctcactcaccaataccattaccctataaatactgtaacagtgttgtgaattttaatcttattctgtgtgtagatacttcttttttcaataaagaaaaggaattttattttttttaaagttatggaggctgagaagtccagcattgattggctccatctggtgagggccttcttgctggtaggaagtctgcaaagtccctaggcagcacagggtatctcatggcaagggggctgagtgtgcttgctgcatgtagatgcttttaaaactgtactttaatcattcctttcgtacaattttactttattatatctgttgtaagcttttccccatgtttatgtagtttttatagactgttttagtgtccgaatttctgtaaatgattgtatctcagttttctttctgtcttatatttgggatttttcccagtttacattattttatataagactgctgtgattatatctttgtataatgcctttt

SEQ ID NO: 75816 - DNA, 883 bp, Homo sapiens
  misc_feature (6)..(8): n is a, c, g, or t
ggccgnnnagagaacctgtaaacgctctcggaattatggcggcggtggatatccgagacaatctgctgggaatttcttgggttgacagctcttggatccctattttgaacagtggtagtgtcctggattacttttcagaaagaagtaatcctttttatgacagaacatgtaataatgaagtggtcaaaatgcagaggctaacattagaacacttgaatcagatggttggaatcgagtacatccttttgcatgctcaagagcccattcttttcatcattcggaagcaacagcggcagtcccctgcccaagttatcccactagctgattactatatcattgctggagtgatctatcaggcaccagacttgggatcagttataaactctagagtgcttactgcagtgcatggtattcagtcagcttttgatgaagctatgtcatactgtcgatatcatccttccaaagggtattggtggcacttcaaagatcatgaagagcaaggtaagtagaacatccataccctcctaaaacactttttgatcctctgagaatgaagctgttttctttaggaaaatggctgttgatcttttctaagtgtgtttcactttttcatgggatgatggctttgttgcagctgagattcatgtaactagatgtggtaataatagctttcacataggaacagatgcaagttcactctgttagttaactggtagtctttgttaaggtgattcaaggttttaaaatatttggggccaggtgtggtggctcactcctgtaatcccagcactttggaatgccaaggcaggtggatcacctgagcctaggagttcaagatcagcttgggcaacatagtgaaacctggtctctacaaaaaaaaaaa

SEQ ID NO: 75817 - DNA, 2004 bp, Homo sapiens
  misc_feature (6)..(8): n is a, c, g, or t
ggccgnnnagagaacctgtaaacgctctcggaattatggcggcggtggatatccgagacaatctgctgggaatttcttgggttgacagctcttggatccctattttgaacagtggtagtgtcctggattacttttcagaaagaagtaatcctttttatgacagaacatgtaataatgaagtggtcaaaatgcagaggctaacattagaacacttgaatcagatggttggaatcgagtacatccttttgcatgctcaagagcccattcttttcatcattcggaagcaacagcggcagtcccctgcccaagttatcccactagctgattactatatcattgctggagtgatctatcaggcaccagacttgggatcagttataaactctagagtgcttactgcagtgcatggtattcagtcagcttttgatgaagctatgtcatactgtcgatatcatccttccaaagggtattggtggcacttcaaagatcatgaagagcaagataaagtcagacctaaagccaaaaggaaagaagaaccaagctctatttttcagagacaacgtgtggatgctttacttttagacctcagacaaaaatttccacccaaatttgtgcagctaaagcctggagaaaagcctgttccagtggatcaaacaaagaaagaggcagaacctataccagaaactgtaaaacctgaggagaaggagaccacaaagaatgtacaacagacagtgagtgctaaaggcccccctgaaaaacggatgagacttcagtgagtactggacaaaagagaagcctggaagactcctcatgctagttatcatacctcagtactgtggctcttgagctttgaagtactttattgtaaccttcttatttgtatggaatgcgcttattttttgaaaggatattaggccggatgtggtggctcacgcctgtaatcccagcactttgggaggccatggcgggtggatcacttgaggtcagaagttcaagaccagcctgaccaatatggtgaaaccccgtctctactaaaaatacaaaaattagccgggcgtggtggcgggcgcccatagtcccagctactcgggaggctgagacaggagacttgcttgaacccgggaggtggaggttgccctgagctgattatcatgctgttgcactccagcttgggcgacagagcgagactttgtctcaaaaaagaagaaaagatattattcccatcatgatttcttgtgaatatttgttatatgtcttctgtaacctttcctctcccggacttgagcaacctacacactcacatgtttactggtagatatgtttaaaagcaaaataaaggtatttgtatatattgcttcatcatgacttttttcttcatcataactgatatttttcagatgcactttgaagacataaaggatgttaaagtagtaactaagcatatttctttttgttcagttacataatcctcagtattaaaataaacagttgctgacattttggaagatgaagaaaaggaaaaacctcactcaccaataccattaccctataaatactgtaacagtgttgtgaattttaatcttattctgtgtgtagatacttcttttttcaataaagaaaaggaattttattttttttaaagttatggaggctgagaagtccagcattgattggctccatctggtgagggccttcttgctggtaggaagtctgcaaagtccctaggcagcacagggtatctcatggcaagggggctgagtgtgcttgctgcatgtagatgcttttaaaactgtactttaatcattcctttcgtacaattttactttattatatctgttgtaagcttttccccatgtttatgtagtttttatagactgttttagtgtccgaatttctgtaaatgattgtatctcagttttctttctgtcttatatttgggatttttcccagtttacattattttatataagactgctgtgattatatctttgtataatgcctttt

SEQ ID NO: 75818 - DNA, 1189 bp, Homo sapiens
  misc_feature (6)..(8): n is a, c, g, or t
ggccgnnnagagaacctgtaaacgctctcggaattatggcggcggtggatatccgagacaatctgctgggaatttcttgggttgacagctcttggatccctattttgaacagtggtagtgtcctggattacttttcagaaagaagtaatcctttttatgacagaacatgtaataatgaagtggtcaaaatgcagaggctaacattagaacacttgaatcagatggttggaatcgagtacatccttttgcatgctcaagagcccattcttttcatcattcggaagcaacagcggcagtcccctgcccaagttatcccactagctgattactatatcattgctggagtgatctatcaggcaccagacttgggatcagttataaactctagagtggtaagtgtcttcacattctttaagcactaaagaaaacttttaattagctaccttgcttccagtaatcaaactagagctcctctgccttgtgtaagttgctataaagtattgactattagaatgtcttgaactttggttactgtgagccaagtcggtgctcaaagtatatttcatagtctcaattatatagtaatttaggttctgaaaaataggttctgtctttgcatatgtaatatttgtgagtatttactttggaaagtttggtcgacctaatgataaatttagagtttattttccttttacaagcttactgcagtgcatggtattcagtcagcttttgatgaagctatgtcatactgtcgatatcatccttccaaagggtattggtggcacttcaaagatcatgaagagcaaggtaagtagaacatccataccctcctaaaacactttttgatcctctgagaatgaagctgttttctttaggaaaatggctgttgatcttttctaagtgtgtttcactttttcatgggatgatggctttgttgcagctgagattcatgtaactagatgtggtaataatagctttcacataggaacagatgcaagttcactctgttagttaactggtagtctttgttaaggtgattcaaggttttaaaatatttggggccaggtgtggtggctcactcctgtaatcccagcactttggaatgccaaggcaggtggatcacctgagcctaggagttcaagatcagcttgggcaacatagtgaaacctggtctctacaaaaaaaaaaa

SEQ ID NO: 75819 - DNA, 898 bp, Homo sapiens
ttcagtgtgtgcgtgtgttttaaatatgttctactttgatcatttcattttgttctatgagttctgcagtgactcagaagttccatgatactataactggagtaattttgctgtatttttagccatgtcctccaagcctcccagtatatgctgtgatctttgccaaacagaatctgatcagtgttacaggggaaatgatgtgtgaggctctacaaggagagggtctccagggcccacacctgagtcatgccttgaagcaacctcagcacacttagcctcccagtgattctgtgcaagtctgtctcaatcttttgagcttatgttagttctttgggggaaaaaaaatagaaacaacttctgaatagggcagtatgtttggggcagctttgtgaatacatatctaaaattacctccatttgccattttttaaatcaattttttttcaagcaatcagattcttttctcctagaggagctgtgggcaagaaaactaatgaattctacatccttctcatcacctggtttaaattgttttctgctctgagtaaacagtaattactgtttaagtacatctcagcagaattttatcccaattgcaacagttcatgttcctcctaatgtaatctctgcagaggaaatgatcgtcaagggaagcaggctgacctgctcacgggatggcgttcttacaatctgcatcttatgtaatggtgattctgtgtgcctgtgtcataattattggaatattattttatgcttttttttttttgagacggagtctcgctctgtcgcccaggctggagtgcagtggcacgatctcagctcactgcaagctcccctcccaggttcacgccattctgcctcagtctcccaagtagctgggactacaggttcccgccacc

SEQ ID NO: 75820 - DNA, 328 bp, Homo sapiens
gccaagatggccgaataggaacagctccggtctacagctcccagcgtgagcaatgcagaagacaggggttaggaaactgttgcctatgggctgaatttggcttgctgtctgcttttagagaccaggatgaatctgaaggctatggtggttattttctaatccaaaaaccagaagcagtactattcaatgagggctctggtaacaaggcctgtgatgtcatcagcaaccaatcagagcttctgaactgcacgtctcacattcagtgttaacatactgagttgatgtaattccaacaaaaaaaaaataaaaagatatgtgctgttttatt

SEQ ID NO: 75821 - DNA, 335 bp, Homo sapiens
ttactatgaaagtttataaaggtcatggtgaagggaagagaaacgcagctggagcccactggcctccctgagttgaggagaaagcactgggaatccaagaagtccacagcagctagagttcacagagagtgtcagagaggacaatgcttggcaaagagaaaactccagaggcatgctgaggacatcctttaggtagtcaactgagtaccgatcagcagagccgtgtgagaaaactaatcaagctgcaaaagacacccaaaaagattacaggaaacaaaccctggtgtgtacataggacaaaaataatgcctatcccctccagacagagggaaaac

SEQ ID NO: 75822 - DNA, 365 bp, Homo sapiens
agtgcctttactttgttaattcaatacaattattttcctaatctcaacttggccactaaataacggtgtgtccttgggctattcactcaacttgtccaagtcacagttttcatacttttaaaaagagtgttgaactaatattgattattcaggccaggcacagtgactcacacctgtaatcccagcaatctgggaggctaaggtgggcaggtcacttgaggtaaagagttcgagaccagcctggccaacatggtaaaactctgtctctactaaaaatacaaaaaatttgctggacatggtggcagacgcttgtaatcccagctacttgggaggctgaggcaggagaattgcttgagtctgggagg

SEQ ID NO: 75823 - DNA, 398 bp, Homo sapiens
atggatggggtgggaaaggagacaaaagtattggtagcagaaattaagatgtagctttaaaaggcaggattaggaggtttagataatattacactggacattaggtaaattagatttacatcatagctgtattcttgtctgactgtgtgtcctcagacaagtctcttcatttctaaaaacctcagtttctatatctgaaagcaaatattggatagcacaatatccaaattacaatatccaaacctccttttaatcttctgtaccaggctacaccaaattaaacgtaaagttttttccttacatgtccacccaataatataattgaatttgaactgcaattttggaatatatacatttgaactgatctaaaattcttaaattacaacacatactcacct

SEQ ID NO: 75824 - DNA, 808 bp, Homo sapiens
ccgcgggcgtcgtcggccatgagcgagttgccgggcgacgtgcgggcgtttctgcgggagcacccgagcctgcggctccagacggacgcccgcaaggtgaggtgcatcctgacaggtcacgagctgccctgccgcctgccggagctccaggtctacacccgcggcaaaaagtaccagcggctggtccgcgcctccccggccttcgactatgcagagttcgagccgcacatcgtgcccagcaccaagaacccgcaccagttgttctgcaaactcaccctgcggcacatcaacaagtgcccagaacacgtgctgaggcacacccagggccggcggtaccagcgagctctgtgtaaatatgaagaatgtcagaagcaaggggtggagtacgtgcctgcctgcctggtgcaccggaggaggaggagggaggaccagatggacggtgacgggcctcgcccgcgggaagccttctgggagcccacatccagtgatgaggggggagctgcaagtgatgacagcatgacagacctgtacccacctgagctattcaccagaaaggaccttggaagcacggaggatggggatggcactgatgactttttgacagacaaagaggatgagaaggcaaagcccccaagagagaaggccactgatgagggcaggagagagacgaccgtgtaccgagggctggtccagaagcgcgggaagaagcagttgggctcgttgaaaaagaagttcaagagtcatcaccgcaaacccaagagcttcagctcctgtaaacagccaggttaataaaagcacatgccgtgaa

SEQ ID NO: 75825 - DNA, 861 bp, Homo sapiens
ccgcgggcgtcgtcggccatgagcgagttgccgggcgacgtgcgggcgtttctgcgggagcacccgagcctgcggctccagacggacgcccgcaaggtgaggtgcatcctgacaggtcacgagctgccctgccgcctgccggagctccaggtctacacccgcggcaaaaagtaccagcggctggtccgcgcctccccggccttcgactatgcagagttcgagccgcacatcgtgcccagcaccaagaacccgcaccagttgttctgcaaactcaccctgcggcacatcaacaagtgcccagaacacgtgctgaggcacacccagggccggcggtaccagcgagctctgtgtaaatatgaagaatgtcagaagcaaggggtggagtacgtgcctgcctgcctggtgcaccggaggaggaggagggaggaccagatggacggtgacgggcctcgcccgcgggaagccttctgggagcccacatccagtgatgaggggggagctgcaagtgatgacagcatgacagacctgtacccacctgagctattcaccagaaaggaccttggaagcacggaggatggggatggcactgatgactttttgacagacaaagaggatgagaaggcaaagcccccaagagagaaggccactgatgagggcaggagagagacgaccgtgtaccgagggctggtccagaagcgcgggaagaagcagttgggctcgttgaaaaagaagttcaagagtcatcaccgcaaacccaagagcttcagctcctgtaaacagccaggttaataaaagcacatgccgtgaacaacaaaaaaacccaacaacacacaacaacaacccacacaccaaccacaacca

SEQ ID NO: 75826 - DNA, 810 bp, Homo sapiens
ctgcaagtgatgacagcatgacagacctgtacccacgtaagcagaacgggccctgcttctccctgaccctctactgtcagcagggagcagactgtggtgctgcctcccctgcaaaggtggcagcgaactcagcctaaaataactgtcagccaatccctgtgttcctcccagctgagctattcaccagaaaggaccttggaagcacggaggatggggatggcactgatgactttttgacagacaaagaggatgagaaggcaaagcccccaagagagaaggccactgatgagggcaggagagagacgaccgtgtaccgagggctggtccagaagcgcgggaaggtgagctgtcacctcctctgttagtgtggcagtggcttcccctagtgatggttttccatttgtttaaaaaaagaaaactgaacctttttcacaagtgaaatcccaagccaacaacacacaagaaccatagaagccgaggccgctggctggcggaaggccgtgagtgcctaccattgcttcccagccagccccttgtggaagccaggctctgtggaccacggtcaagaccactggtttgtgaggacaccctcctacctcagactatgagctgtggcgtgtttgtccttacccctgggcacagggacctgattactagccaccacctttgcctttgccatcagggcaggagtggagacttccccgcctttggtagataagcaggaccaaggccaaaagaggacaaggtcctaatgagtgtgtggcattgcactgtactcctctgaggccctgctgagcggggtctaatcct

SEQ ID NO: 75827 - DNA, 316 bp, Homo sapiens
ggaggttgcagtgagccgagatcgcgccattgcactccagcctgggcgacaagagcgaaactctgtctcaaaaaaagaaagaaattttccctacttaggaaagaaagaagacaattaaagaaaaactacctggttgagtctcaacttctcctttgtggcacttggaatgaatatctgtgcacatccccagctggtatctatctttgtccagcagcctgggagccacagagggtgaatgtgtgtcacttccctctttgctcaaggcccagagcagcgcctggcagtgcaaatgctcttggccaacagttgaatgagt

SEQ ID NO: 75828 - DNA, 811 bp, Homo sapiens
actgaaacagtaacagttcatcaaaagacagttatcccagatacgcttccaagagtggcaatcagttttcctaaagagtcaaagaaaagagtgagaattgtgggaagtgggagactagaaggacagacccatttggaaacaggaagtggttcaaggaacttaggatttggaatataggaaaagaaatggggaaacatacccatgccttctcttctctgtagacatccaatttgaacctactccagattagtaggaagtaaaatcattatctgatgttctgtggccacatggaaaatacattggtagttgcaaccagactagagtcaacattgagaaaccaatagaaccactaacttgggctggtgaggcacagctactggtcaaaacctgcccaggaggcccagtaccactcacagtcaggatcggggtcatggtaggggaaggtcagctagcttactgcagcccatctctgatggggaggtgaggacttccagccctgggctgctcattcacctcccctctggagcagtaaacagggaagtagcaagaagctaagctccttttgttaggcattgttaattcctccaaggtgaccattgatgtattttttattcagtaacttagcatatatgtgtgtgcacaattaatagttatatataataaaagtgaatatattaaaatttaaaaaaataaattatgatcattgcacaattctgtgactatactacaaaccattaaaatgtatactttaaatgggtgttttttatgttatttatgtgattatgtctcaataaagatgttttaaaaccat

SEQ ID NO: 75829 - DNA, 347 bp, Homo sapiens
gctcttcattggacccagtgatcaccaaatccttcaagcataaaatggccatgtgattatctccttcctctcaggatgaaaggcagacaataacatgtgatttatgttcctcaggaaaggacatgctataaactagagaacttgggaaagaggaagtacatgaattaacatgcaggcacatggtggcatgtgcctgtggtgccagctactgggcaggctgagtggcagcattgtttgagcccaggaggtgcaggctatggtgaactgagatcgtactactgcactccagcctggttaacagaatgagaccctgtctgtctttctctctctctctctctctctcacac

SEQ ID NO: 75830 - DNA, 520 bp, Homo sapiens
cccaccctcagactcacttgccggtgaccaagtctggctcacaacatcagacatttctttcctttaggaggatttagattttagaggtcctaattcagtctggactctggtttcatacaatagaatctggcagtggtaaacttaaccatatggggaatggatcagaagagtatgaagtaacccagcaaaaggctggcatcttgcaaaggtggatggagccaagactcttctgagatttcataagtggctttgctgcctgaaacaaagaatagccaaatgaagggatgagcagttttccagcaatgatttgtccaagtaaaatcatggtaccatccaacattgcgagacatctgcagggtgagagctacagcaacgcctctgacaaatggaatgctgaacttgagacatgatttatgcaactatttctcacctctttattccacattccaatcttaggataacatttaaaatcttaatgttgttttcaggaatagccaataaaataaatcggctctgcaaa

SEQ ID NO: 75831 - DNA, 1281 bp, Homo sapiens
gaggggaagatgggttctgcatggagccactccagggacttttcttctgtctcacagcctgacaatcacctctagctgttctcagtcccattctcatcaatgacctcgtctcctgattttgtacaatatctaggtgaccttctcttctttccatcttcaaacgcttgatcattgatgctcccttttctcttctctctcctcctgggaaaagagaaggaccaacatccccctttcccttcctcctgtgctgtcccgacccctctgagacctggctctagcagtaagtccctctctcttctgcagcaccagcctctgcccatccctgccctctgcacacaaagctctcacattgtctgcactttaagaacttttgtggcaaaccctggcaaatcctgccacttgtttccactcttctcaaatggctttgaggtcatcattgacctatcccatttgaccctgtcctgtatctgatgttgtaccctttctccttgatcccactctggcaactctcccactcccctttcttggatcaactgtcttgctcctcagtcttgatcaatgcctccttctctctctttagccttggccctttttggccagggaaataaatgtgaaatacataaagcttcattttatcttatgattatagctatgttgatgttacccaagacctaaaagtcacactctctaattacacttccctcctgtgttctgggtcctcttggaccagtccttactctggctcccctcctggatgtctcccagacttctaattagaattactgtttcctatatcaagctaattatctttcccaccaacctcctccatccttgggtgaaagcatcacttggttgcaaaagtcagaaatctgggtttcattcttgcggtaggtagaataatgcccccaggccccaggttttgacatccgaatccctgggactttgcagatgtgattcagtttaggattttgagatggggagattatctgggagagcctgatgtcatcataaggttcttataagagggaggcaggagggttagagtgagtagtaagagatgcaacagtggaagcaagaggttggggtgatgtggccacaagcccaggagtgctgacagacatcagaagctggaagggacaaggaatggtttctcctctggagcctccagaaagaaccagccctgctgacaccttgattttagccttggaagactcattttggacttctgaccttgaacgttgtaagagaataaatttacatattttaaactggaatgtttat

SEQ ID NO: 75832 - DNA, 626 bp, Homo sapiens
gcagaaaccccagcaaattcttacaggggttagtcatgcagttatacattttcattctgggatttctaggggcttaataaaattccttcattggatcatttaatccaacataaattatttccctacacctactttatacttgctccctgatttcataccagtgagtatagcctgatgtaactaaacattctgaattttcagtgatacccagagaagagtgtgataaccaattctctcaaaagcgatttactgcaaatattttcatttacagtaagtccttacttaacattgtggatatgttcttggaaacagtgactttaagccaaacgaggtactgtgtggcttcataactcaactctttttcctatcaattagactatgggaaaactggtttcgtatgcattatgtccttttgcttaaagtggtagtttccaagaacctatcaatgacattaagtgaggacttattgtaatctgatatctgcgggtggataatttaaggaacacatacatagttaagcctgtaaactgctgcaagttccagatattatcagttctatttctccacaattacaattccagttttggggtttctttttgctcattaaatttgaaaagccaattcca

SEQ ID NO: 75833 - DNA, 592 bp, Homo sapiens
taggcgataactgccgtccttctctgctgtctgcccctaccttgggccccaaatggctcagcactaaagtgccttgagcaggctccagcccaaaggtggcctccatggttaccacttcccactctgctgccctgcctcgctttcctcctcggccttcccggatggatgacagatgtcattcccaggttccctaacactcaagcctagcccctcagtttctagcaagcatcaagcttcactgtgtgtctagcctctcaggagtcagacctgagaagtatagcttggtggaaattcagtggcagggaagaaagaaggaaggaaagaagaccctgagctggattcatacacatcatcgcaattcatccacaccacagtcctgtaagaaggctgcaaaacatacagcagaaaggatggcttgaaggcaattgatgtttgtaaaaaaatccacaacaggatccaagctgaagaggtgaacacgtcagcctggtgggacaattctcagcatgtgcaaacataggtaaattctagcctatgttacattaaaaacaatgtcagtgcattttttcatgttaaagtttttttcaaagctaaa

SEQ ID NO: 75834 - DNA, 360 bp, Homo sapiens
aaccaagaaggttacaaccttgacaaagtctctcattaccttcctcctcttgtgtcttttttctccacattatctgttgcgtatctactatagaaggctgcaaaacatacagcagaaaggatggcttgaaggcaattgatgtttgtaaaaaaatccacaacaggatccaagctgaagaggtgaacacgtcagcctggtgggacaattctcagcatgtgcaaacataggtaaattctagcctatgttacattaaaaacaatgtcagtgcattttttcatgttaaagtttttttcaaagctaaagtgtgttccttgttgtgctgaccacaaacgagttttaagagttttgaaagtctggcaa

SEQ ID NO: 75835 - DNA, 2208 bp, Homo sapiens
  misc_feature (3)..(3): n is a, c, g, or t
  misc_feature (5)..(6): n is a, c, g, or t
  misc_feature (8)..(9): n is a, c, g, or t
  misc_feature (573)..(573): n is a, c, g, or t
  misc_feature (646)..(646): n is a, c, g, or t
  misc_feature (1154)..(1155): n is a, c, g, or t
  misc_feature (1433)..(1433): n is a, c, g, or t
  misc_feature (1747)..(1747): n is a, c, g, or t
  misc_feature (1758)..(1759): n is a, c, g, or t
gtntnntnntgagattgcagcagcactttagtcacattgtcaggctccacttctgattctagttctcttgctacttccaccacatatgcggtgacctcttcccctgatgtcttagacccctcaaaatcattccatggattccatggaatggactccttaaacatggaatccactccttacaaagtccagttaatgttgatactttaatctcctcccatgaatcacaaatactctgaatggcatctagaagggtgaatccttttgaggtttcactttacttttcccaaatccatcagatgaaatactatctatggtagctatagtcttataaaatgtattccttaaacaataaggcttgaaagtcggcttccgttgagcaccaagcaagatggcagcctccgagacagttaggccaaggcttcaatttgattacccgccgccagctacccggcactgtagggccttctggcttctgttccacttgaacagatacgagtcgtcacagatctcgttagtctcatccgccaatgcttcggcttcatttctgccctcctaggcccctacctgaagcgnctcctgccccgggcggagagcgtgcgcctggtgagagagaacgaccgcctcagagttaaagtagaagagagangagttgctgagaattctatggtcatcagtaatggtgacactaatctatcacttagaaaagcaaagaagcgggcatttcagttagaggaggatgaagaaactgaaccagattacaaatattcaaagaagcattggaagaggcaagaaaacaataacaataatgagaaggtctttgatctggaaccaaaagctgtcacagatcagactgccagccaaaaaaaaagaaaaaaaagaaaaaagaaagcccactgtggcacagcaggtgatgataacaaagagaccaaaagaaaatcaccaaagaaaaaggagaaatgtgaatataaaaaaaaaggccaagaatcccaagtctcctgaagtacaggcagtaaaagactgggccaatcagagatgtagttctccaaaaggttctgctagaaacagccttgttaaagccaaaaggaaacgtagtgtaagcgtttgctcaaaagagagtcccagttcctcctcggagtctgagtcttgtgatgaanntatcagtgatggtcccagcacagtcactttggaggccagaaattcctcagagaaattaccgactgagttatcaaaggaaggaccctctaccaaaaatacaactgcagacaaactgggtataaaatctggctttagcttacccccagcaagggcaagacctctggaacaacatcttcctatttcagactctagttcagagtcagatgaccaatgcttgatgtcatcaagcaccctggagtgtgctgcgggtttcttaaagacagtaggcctttttgcangaagaggttgtccgggcccagagttgtcatgacagactgtaggtgctgctggatggaggcgttcttgctcaaatggtggcggacaggctcctggtcctcctctcagtgtgtctctccccaccagtttaggaagaagatggggtagaggagataaccttttttcttgaaagggagctaggggacggggcatgcgggggagaggtcgaggacaagggcatcctgtttcctgtgttgtaaatagaagcactgagaaccagaggcaacagcaattaaatgacctggtaacaaattcatctactattatccagaatccngtagagacacnnaagaaggactatagtctgttaccactgttagcagctgcccctcaagttgaagaaaagattgcatttaagcttttagaactaacatccagaagaatattaagccccaatccagagacccagcaagtagatatagaaattgtttcatccttacccgccttgagagaacctgggaaatttgatttggtttatcacaatgaaaatggaacagagatagtggactacgctgtgacacaggagagcaagatcactgtattttggagagagttgattgacccaagactgatgattgaatctccaagtaacacatcaagtacagaacctgcctgagtatgacattatgtggggagtgaatgtagagttgtgaaaattctcacagtttacatcaagtacgtatggaagctgcttaacactttcaatttagaaacctttgtgatacatctgggaaggta

SEQ ID NO: 75836 - DNA, 342 bp, Homo sapiens
gtgagtggcaggtatcatgaaccacattgtggacctggagttgctaggaccttttctgccattacacagaaaaatcctccctgagaacacagccattggaggacacatggcagaggaagataagacaataaacagagacacataattatggccagcgtgggggctcacgcctgtaatcccaaaactttgggaggccgaggtgggcagatcacctaaggtcaggagttcgaggccagcctggccaacatggtgaaaccccgtctctactaaaaatacaaaaattagccgggcgtggtggcacgggcctgtagtcctagctactccagagggtgaggcaggaga

SEQ ID NO: 75837 - DNA, 435 bp, Homo sapiens
agatttaaaaaaaagaaaaatcatagcttctaagatgattacaaagaaattggtgtgggtttccaacctgggcaacatagtgagacctcatctctaccaaaaataaaaaaaattaaccagtcttggtggcacatacctgtagtcccagctacttgggaggctgagccactgactccagcctgggcaacagagtgagactctgtcttaaaaataaataaatgaataaatattgaaggagagaaggaaggaaatattagtttgcatttttctaaagcatccaaactgttggagatggataagtgcatttataccatgaagactttctagatctattgtttcatttcatttattgcctaagcccagaggaacaaagctgcagtgagctatgatcatgccactacactccagcctgggcgacagagtgagacctgtctc

SEQ ID NO: 75838 - DNA, 770 bp, Homo sapiens
gacagtgtggctggagctgagggagcaacagggagagagctgggagatgaagtccaggaagtggtggaatccagatcagatagagcttttgcttttccccatgggagccacaggagagtcttgaacagaggagtgatatcatctaactacagtttcaaggctccctcgggttaccatgagagaatagcacatagaggagcaaggcgggaggagggagaactttcgagaccattgctgttgcacatcaaggatgaaaggataattttaattgcacaaccttgttccatttgtcacaacatgttccctttttaaactgcagtctaaaagccaccttctccaagaaaggctttaaataaccttatggtctccaagccacttatataaaccctcctatttttccttaatctgtacccgcaaattgctttttttcttctatagactaaaggtcattgctgtcttagcctaatagaaacacaggaattaagtcagccaagtgatataacatggctacttcctaagaaatgacagtggagcaggcttaaaaggctcatcagtctagaacactcttgtctgattagggcctccgttccgacagcatcttcactgtgaagtgagacgaccttgagaatacaaagtgatcaaccagaactcatcttgtgggtcctctggtgtttttccgatttttaattcaacatagtgcacggacttcgatgttcaagtgacagcttaaccagttgtatttaaataatggcatgagcctgttcatcact

SEQ ID NO: 75839 - DNA, 1740 bp, Homo sapiens
cccctgggtggctgcggctggaccttcaccacctcttacaagctcaagaggcacctgcagtcgcacgataaactgcggcccttcggctgccctgcggagggctgtggcaagagcttcaccaccgtgtacaacctcaaggcgcacatgaagggccatgagcaggagaactcgttcaaatgtgaggtgtgcgaggagagcttccccacgcaggccaaactcggcgcccaccagcgcagccacttcgaacccgagaggccttaccagtgcgcgttttctggctgcaagaagacatttatcacagtgagtgctctgttttcccataaccgcgcccatttcagggaacaggaactgttttcctgctctttccctggctgcagcaagcaatatgacaaggcttgtaggctgaaaattcacctgcggagtcacaccggcgagagacctttcctttgtgactttgatggctgtggctggaacttcaccagcatgtccaaactcttaaggcacaaaaggaagcacgacgatgaccggaggttcatgtgccctgtggaaggctgtgggaaatctttcacgagggccgaacatctgaaaggccacagcattacccacctgggcacaaagcctttcgtgtgtcctgtggcaggctgctgtgccaggttctctgctcgcagtagcctctacattcactccaagaaacacctgcaggatgtggacacttggaaaagccgttgcccgatctcctcttgtaataaactcttcacatccaagcacagcatgaagacgcacatggttaaaaggcataaggtgggccaggatctcttagctcagctagaagcagcaaattctcttacacccagcagtgaacttaccagccagagacagaatgatctcagtgatgcagagatagtgtctctcttctctgatgtacctgacagtacttctgctgcattgctggacacagcattggtgaactctggaatcttgactattgatgtggcttctgtgagctcgactctggcagggcacctccctgctaataataataattccgtagggcaggctgtggaccctccgtccttgatggccaccagcgaccctcctcaaagtctggatacctctctcttttttggaacggcggccactggttttcagcagagctccttaaatatggatgaggtctcaagtgtaagtgtggggccattgggatctctggactctttggccatgaaaaactccagtccagagcctcaggctttgacacccagcagtaagctaacagtggacacagatactctgactccttcgagcaccctttgtgaaaacagtgtctcagaactactgacaccagccaaagcggagtggagcgtacatcctaactctgacttctttggacaggagggagaaacccagtttggattccccaatgcagcaggaaaccatggttctcagaaagaaagaaatcttatcactgtgactggcagctcatttttggtatgaagcaactctattcattccttgccatgtggctaacttttattacagtcaattttgaggatattctggactaaatatttaagtgcagtcatttctttttggtttgcaaaaagagcacagccctggactatgagtttggagatctaaattctgatcttgagtctggaactgacaagttgtgtgaccctcagcaagtcacttaacctatctgagccttaatttccttatttataaattgtggtggtttga

SEQ ID NO: 75840 - DNA, 562 bp, Homo sapiens
gagtatcgcttgaatccgggaggtggaggttgcagtgagccgagattgtgccactgcactccaacttggagacagagcgagactccgtctcaaaaaaaaaaaaagtgtgatcatttctgaatacaggggagcaatggattcaagtatcctgattggcttttttgttttctgttttgatttttttttttactgtattttgttaggtcatgttttgatctttttcttttaaccttatccattgccagctctttctcatatattgttttccttccaggcagctcagtctgtatcttcctgcctctttgggtgtctcaaaactgtctgattcatccagttctttaaaatatcaatcacccttcaatactaacaaaacccagcacttattgagtgcctgctgtgcacaaggcactggttagcactcacatgtagttactcattggaatctcataatcacccgatgaagaatgttattattctctctgtattttacataccaaattgttggtatcagcaaatagcaaattatatgagtgtgatctcattaacaagttctgtgcttttc

SEQ ID NO: 75841 - DNA, 2505 bp, Homo sapiens
gcttccggctccggcgtggggtttgatgtctacggagtggcttttgcttagcgtcttgaaggggggaaaaaaatcctctaagctggtgatttcacgttctttgacaaacttcaatagcaacaggcaacgataccactttaagaaaattccaaggaaaagacctcattttaaaattcccacctctggctcccaaagattggtttgcaaacttcgacaaaatactcttctccactcgctattgatggagtctcgctctgtcacccaggctggagtatagtggtgtgatcttggctcactgcaacctctgcctcccaggttcaagcgattctcctgcctcagcctctcgagtagctggaattacaggtctggcagaaggaacagtatcaactgactgagtaggtctcattggcagttgtgattcagagacctagaaagctgaacccacggctggcaagaagaggatggtttgtgggacctgggctgatgtctgatgaaattttaagccccagctatagctactacaaagaaaagtggctgatgataagcatgtaactcaaaaagacaatgtatataaaaatatgcaagaatcacaggaaacccacatatccaaccacctagatgaagttgttgctgctgttagcatcactcatagaaagaagttccaaaacaagctgcttcagacagcactattccagcctcctcgagagaaactccacctctgtgaagagaaagcaaagtcctattccaacagtcatgagtacaaacaggccgtccatgagcttgtgcgttgcgtagcactgacaagaatttgctatggagactcacattggaaactagcagaggcacatgttaatctggctcaaggctacctccagctgaaaggactgtcactgcaagcaaaacaacatgcagaaaaagccagacaaatcctcgccaactccattgtgcctccctatagtgagaatacagatgttttcaagttttccattgagcttttccataccatgggcagagctttactctcccttcaaaaatttaaggaagctgcagagaatttgacaaaagcagagagactttcaaaggagctgctacaatgtggaagaattataaaggaagaatggatagaaattgaagcacggatcagattatcatttgcacaggtgtatcaaggtcagaagaagtcaaaagaagctttgtcccactatcaagcagctttggaatatgttgagatcagtaaaggtgaaacaagtcgtgagtgtgtacccatattgagagaattagcaggtgtagagcaagccctgggactccacgatgtatccatcaaccacttcctccaggcacatctcatcatcctgagtagaagcccctctcaagtggaggcagcagactcggcacacatcgtcgcccatgctgctgtcgcttcagggagacacgagcaccatgatgtagctgagcagtattttcaagagagcatggctcatcttaaggattctgaagggatgggaagaaccaaatttctttcaattcaagatgaattttgccattttctacaaatgactggacaaaaagagagagcaacctcgatcctgagagagtccctggaagccaaagtggaagcatttggcgatttcagtcccgaggtggcagagacataccggctcctgggaggagcagacctggcgcaggggaaccacagtggggcccgcaagaaactgaagaaggtaaagctggaaccagtactaacacgagactaggctctccctcccctctccaaggtcaatttctctcccttgtggtggttcttttaaatgaaactttagaagtggcttgtttagataggatgacatcacttttgtggtagatctaacctgatacttttgggtaaaagacatagtaagcctcttagacatacatattttttaaatgaattatcagtttttactatgcaaatatttttaattttttacgtagtacaattgatcagtcctttatgtttgcggtgctctctctatactgagtttatagaggaattctcttacactttcttcaattgtcattcttctttaaatttggagtttatttgtgtggatggcatgaggaatggatctaatcttaccttttttccaaatggccacccagttgtccagcaccatttaattagagagcccatctatgctccagtgacttcagataacaccttcatcatatactgattttccttatggacttaagtctatttctagatttctcttctcttccactagtctttctgtttattcatgtgtcaatatttcagttttaattacagagattttatagaatgatttaatatgtgataggagtagacaccccttatggcttttcttttactagaatatcaggtgttctagctattcttccgtgtttatttttctacatgaatttttgtatcaatttgtctaactccataaagagcttactagtatttttattgcattatttataaataaatcttgtgagaattga

SEQ ID NO: 75842 - DNA, 268 bp, Homo sapiens
tgcagtcttgttcccatcagagagagatgatctctctctccaccatgtgaggacacagtgagaagacagccgtctgcaggcccggaagagagccctcaccaggaaatgaaactgttggcaccttgagacttcccagcttccagaactgtaagaaataaatgtttgttgtttaagcctttcaggctacggctttctgttacagcagcctgaactgagagtccatgccgagtttttgaaataaatgtgaattctgatgttaaaaaaaact

SEQ ID NO: 75843 - DNA, 3805 bp, Homo sapiens
gcttccggctccggcgtggggtttgatgtctacggagtggcttttgcttagcgtcttgaaggggggaaaaaaatcctctaagctggtgatttcacgttctttgacaaacttcaatagcaacaggcaacgataccactttaagaaaattccaaggaaaagacctcattttaaaattcccacctctggctcccaaagattggtttgcaaacttcgacaaaatactcttctccactcgctattgatggagtctcgctctgtcacccaggctggagtatagtggtgtgatcttggctcactgcaacctctgcctcccaggttcaagcgattctcctgcctcagcctctcgagtagctggaattacaggtctggcagaaggaacagtatcaactgactgagtaggtctcattggcagttgtgattcagagacctagaaagctgaacccacggctggcaagaagaggatggtttgtgggacctgggctgatgtctgatgaaattttaagccccagctatagctactacaaagaaaagtggctgatgataagcatgtaactcaaaaagacaatgtatataaaaatatgcaagaatcacaggaaacccacatatccaaccacctagatgaagttgttgctgctgttagcatcactcatagaaagaagttccaaaacaagctgcttcagacagcactattccagcctcctcgagagaaactccacctctgtgaagagaaagcaaagtcctattccaacagtcatgagtacaaacaggccgtccatgagcttgtgcgttgcgtagcactgacaagaatttgctatggagactcacattggaaactagcagaggcacatgttaatctggctcaaggctacctccagctgaaaggactgtcactgcaagcaaaacaacatgcagaaaaagccagacaaatcctcgccaactccattgtgcctccctatagtgagaatacagatgttttcaagttttccattgagcttttccataccatgggcagagctttactctcccttcaaaagtatccttttgcctctaacttttacaaatagaaatactattcacgtaacacttacacgccaagtaaaaagctgatgctgatggatgacttaggaagtgtgattggaagtatgggagccaaggaagttcaggacatggggtgtagaatctagaaccaagtggaaaatttcctgaacacaattcagatttaaggaagctgcagagaatttgacaaaagcagagagactttcaaaggagctgctacaatgtggaagaattataaaggaagaatggatagaaattgaagcacggatcagattatcatttgcacaggtgtatcaaggtcagaagaagtcaaaagaagctttgtcccactatcaagcagctttggaatatgttgagatcagtaaaggtgaaacaagtcgtgagtgtgtacccatattgagagaattagcaggtgtagagcaagccctgggactccacgatgtatccatcaaccacttcctccaggcacatctcatcatcctgagtagaagcccctctcaagtggaggcagcagactcggcacacatcgtcgcccatgctgctgtcgcttcagggagacacgagcaccatgatgtagctgagcagtattttcaagagagcatggctcatcttaaggattctgaagggatgggaagaaccaaatttctttcaattcaagatgaattttgccattttctacaaatgactggacaaaaagagagagcaacctcgatcctgagagagtccctggaagccaaagtggaagcatttggcgatttcagtcccgaggtggcagagacataccggctcctgggaggagcagacctggcgcaggggaaccacagtggggcccgcaagaaactgaagaagtgtctccagatccagaccctcttatatggaccgcaggacaaaaggactctggccacccagcaggccatgggcatgctgtccacggcccccaaggttgcttcgaagccaaggcaggcatcaaaagccaaagtggccttctgcaccagcatccctcaggacaccctgctggggaaggcccggcccggcacaacagcagactgaggcccccaccctgaaaaagcctaggacattcctgggcactgtcatttagggtgctgtacaaatcacctccgcctagaaaatggaattcaacagtcaggatacagatttccaaggccaactgttggccccaacatgcaacagtgagaccataagcctcccgtgggccacattttgacagtggatgcccttcagggtgatatatgctataaagcagttttctatcacctaagtggtttttcttgccaacaagaatttttacccatcagcactactgtggctgaaaaacttctcttcaacagttcagtgcgccctgtgcaggagtcagcccggcatctgcttgtacacacagctccttgcataggtgtggagttagatctggacagtgaacttcaggaagtcctttcttataggaggctaatagggattgagaataacatgagaagaaaacgctaataaagggaaacctgaacacgctgctgtcagcatgtgttttcaaagtgcagcctgcctcagagttcttcggagcctgaaaaggggtttgagaaagagcccagtaggaggggcaggaggccgacacacctgacttggcctggggcccaggaggcaggtgtaagggagtgaaaagaaaggctagccggaggctgcggggggaagaccgcagactccctgctgcttcgcatccctcctgtggcctccactgcaggcaggacaaacctggatgccacctggagctgcttcctgagttggcacactatcgtgtacacagcagtcttcagccccctggaaggaggccatagtcgtgtgaggatggcaaagtcgaacaggaagctttgagtgccttcctccacgatgtcaacgaggagatccagtgccagatcgaggtggatggaacacccaggggtaggggtgcaggtgtgggcagtgatgtcccttcccctccctcccctggtcccacagactgtggccatgaggctgcaggctggtgctatgacagcagattgcagcacagggccctcccctccagcccccagtgggacatcaaaaccaccctggggccatttgtgcagggcaccacctccagtattgatggggaaaataaactcagtagagccacgacagggtggagagaagcagggaccattgtcttcctcaggagcgtgacagctgaccccacagaccatgcttgctggtacacactggtcccagacccaggcctgtcggacatcagcagtgtgctaaaaacgtgtaagatgtggtcactactcaccgtgtgtcctatctagttgacatgggtggagtcagctaaggggtgaatgttcatatgctcccaattcacgttgaagccctaatccccaaagggatggtattgggggtggggtcttggagaggtgattaggttatgagggtggagccctgatgaatgggattagtgctttataaggagagacaccagagagatgatctctctctccaccatgtgaggacacagtgagaagacagccgtctgcaggcccggaagagagccctcaccaggaaatgaaactgttggcaccttgagacttcccagcttccagaactgtaagaaataaatgtttgttgtttaagcctttcaggctacggctttctgttacagcagcctgaactgagagtccatgccgagtttttgaaataaatgtgaattctgatgttaaaaaaaact

SEQ ID NO: 75844 - DNA, 3773 bp, Homo sapiens
ggacgcgtgggtccggacgcgtggtgtcgacccacgcgtgcggtgaggtacccgcttgctttatgggaaaaggctgctccggaactgccctactttagactttttcatggttatcaatctgtacaaagaatcaccaaactgataaagcaggaaccagagggcaaatcacgctgccaagacaactgtgtaattcgctcgaaaaagaaacgatggagtctcgctctgtcacccaggctggagtatagtggtgtgatcttggctcactgcaacctctgcctcccaggttcaagcgattctcctgcctcagcctctcgagtagctggaattacaggtctggcagaaggaacagtatcaactgactgagtaggtctcattggcagttgtgattcagagacctagaaagctgaacccacggctggcaagaagaggatggtttgtgggacctgggctgatgtctgatgaaattttaagccccagctatagctactacaaagaaaagtggctgatgataagcatgtaactcaaaaagacaatgtatataaaaatatgcaagaatcacaggaaacccacatatccaaccacctagatgaagttgttgctgctgttagcatcactcatagaaagaagttccaaaacaagctgcttcagacagcactattccagcctcctcgagagaaactccacctctgtgaagagaaagcaaagtcctattccaacagtcatgagtacaaacaggccgtccatgagcttgtgcgttgcgtagcactgacaagaatttgctatggagactcacattggaaactagcagaggcacatgttaatctggctcaaggctacctccagctgaaaggactgtcactgcaagcaaaacaacatgcagaaaaagccagacaaatcctcgccaactccattgtgcctccctatagtgagaatacagatgttttcaagttttccattgagcttttccataccatgggcagagctttactctcccttcaaaagtatccttttgcctctaacttttacaaatagaaatactattcacgtaacacttacacgccaagtaaaaagctgatgctgatggatgacttaggaagtgtgattggaagtatgggagccaaggaagttcaggacatggggtgtagaatctagaaccaagtggaaaatttcctgaacacaattcagatttaaggaagctgcagagaatttgacaaaagcagagagactttcaaaggagctgctacaatgtggaagaattataaaggaagaatggatagaaattgaagcacggatcagattatcatttgcacaggtgtatcaaggtcagaagaagtcaaaagaagctttgtcccactatcaagcagctttggaatatgttgagatcagtaaaggtgaaacaagtcgtgagtgtgtacccatattgagagaattagcaggtgtagagcaagccctgggactccacgatgtatccatcaaccacttcctccaggcacatctcatcatcctgagtagaagcccctctcaagtggaggcagcagactcggcacacatcgtcgcccatgctgctgtcgcttcagggagacacgagcaccatgatgtagctgagcagtattttcaagagagcatggctcatcttaaggattctgaagggatgggaagaaccaaatttctttcaattcaagatgaattttgccattttctacaaatgactggacaaaaagagagagcaacctcgatcctgagagagtccctggaagccaaagtggaagcatttggcgatttcagtcccgaggtggcagagacataccggctcctgggaggagcagacctggcgcaggggaaccacagtggggcccgcaagaaactgaagaagtgtctccagatccagaccctcttatatggaccgcaggacaaaaggactctggccacccagcaggccatgggcatgctgtccacggcccccaaggttgcttcgaagccaaggcaggcatcaaaagccaaagtggccttctgcaccagcatccctcaggacaccctgctggggaaggcccggcccggcacaacagcagactgaggcccccaccctgaaaaagcctaggacattcctgggcactgtcatttagggtgctgtacaaatcacctccgcctagaaaatggaattcaacagtcaggatacagatttccaaggccaactgttggccccaacatgcaacagtgagaccataagcctcccgtgggccacattttgacagtggatgcccttcagggtgatatatgctataaagcagttttctatcacctaagtggtttttcttgccaacaagaatttttacccatcagcactactgtggctgaaaaacttctcttcaacagttcagtgcgccctgtgcaggagtcagcccggcatctgcttgtacacacagctccttgcataggtgtggagttagatctggacagtgaacttcaggaagtcctttcttataggaggctaatagggattgagaataacatgagaagaaaacgctaataaagggaaacctgaacacgctgctgtcagcatgtgttttcaaagtgcagcctgcctcagagttcttcggagcctgaaaaggggtttgagaaagagcccagtaggaggggcaggaggccgacacacctgacttggcctggggcccaggaggcaggtgtaagggagtgaaaagaaaggctagccggaggctgcggggggaagaccgcagactccctgctgcttcgcatccctcctgtggcctccactgcaggcaggacaaacctggatgccacctggagctgcttcctgagttggcacactatcgtgtacacagcagtcttcagccccctggaaggaggccatagtcgtgtgaggatggcaaagtcgaacaggaagctttgagtgccttcctccacgatgtcaacgaggagatccagtgccagatcgaggtggatggaacacccaggggtaggggtgcaggtgtgggcagtgatgtcccttcccctccctcccctggtcccacagactgtggccatgaggctgcaggctggtgctatgacagcagattgcagcacagggccctcccctccagcccccagtgggacatcaaaaccaccctggggccatttgtgcagggcaccacctccagtattgatggggaaaataaactcagtagagccacgacagggtggagagaagcagggaccattgtcttcctcaggagcgtgacagctgaccccacagaccatgcttgctggtacacactggtcccagacccaggcctgtcggacatcagcagtgtgctaaaaacgtgtaagatgtggtcactactcaccgtgtgtcctatctagttgacatgggtggagtcagctaaggggtgaatgttcatatgctcccaattcacgttgaagccctaatccccaaagggatggtattgggggtggggtcttggagaggtgattaggttatgagggtggagccctgatgaatgggattagtgctttataaggagagacaccagagagatgatctctctctccaccatgtgaggacacagtgagaagacagccgtctgcaggcccggaagagagccctcaccaggaaatgaaactgttggcaccttgagacttcccagcttccagaactgtaagaaataaatgtttgttgtttaagcctttcaggctacggctttctgttacagcagcctgaactgagagtccatgccgagtttttgaaataaatgtgaattctgatgttaaaaaaaact

SEQ ID NO: 75845 - DNA, 3702 bp, Homo sapiens
ggacgcgtgggtccggacgcgtggtgtcgacccacgcgtgcggtgaggtacccgcttgctttatgggaaaaggctgctccggaactgccctactttagactttttcatggttatcaatctgtacaaagaatcaccaaactgataaagcaggaaccagagggcaaatcacgctgccaagacaactgtgtaattcgctcgaaaaagaaacggtgagcctctccagcagactgggtaaactggcaagggattttacgacatagttggagattggagagttacagaaacttttccggttttttacaagttttaaaggagtgattgagtgtcaaaggaaaagcagagaaaatacaggcacaatttaaagacagcaggaagaagagtgttcagagagcatttttctctttagggtgaagtttgaaagcatcatgcccagattatcagtggatttttgaaagaagacaatgtatataaaaatatgcaagaatcacaggaaacccacatatccaaccacctagatgaagttgttgctgctgttagcatcactcatagaaagaagttccaaaacaagctgcttcagacagcactattccagcctcctcgagagaaactccacctctgtgaagagaaagcaaagtcctattccaacagtcatgagtacaaacaggccgtccatgagcttgtgcgttgcgtagcactgacaagaatttgctatggagactcacattggaaactagcagaggcacatgttaatctggctcaaggctacctccagctgaaaggactgtcactgcaagcaaaacaacatgcagaaaaagccagacaaatcctcgccaactccattgtgcctccctatagtgagaatacagatgttttcaagttttccattgagcttttccataccatgggcagagctttactctcccttcaaaagtatccttttgcctctaacttttacaaatagaaatactattcacgtaacacttacacgccaagtaaaaagctgatgctgatggatgacttaggaagtgtgattggaagtatgggagccaaggaagttcaggacatggggtgtagaatctagaaccaagtggaaaatttcctgaacacaattcagatttaaggaagctgcagagaatttgacaaaagcagagagactttcaaaggagctgctacaatgtggaagaattataaaggaagaatggatagaaattgaagcacggatcagattatcatttgcacaggtgtatcaaggtcagaagaagtcaaaagaagctttgtcccactatcaagcagctttggaatatgttgagatcagtaaaggtgaaacaagtcgtgagtgtgtacccatattgagagaattagcaggtgtagagcaagccctgggactccacgatgtatccatcaaccacttcctccaggcacatctcatcatcctgagtagaagcccctctcaagtggaggcagcagactcggcacacatcgtcgcccatgctgctgtcgcttcagggagacacgagcaccatgatgtagctgagcagtattttcaagagagcatggctcatcttaaggattctgaagggatgggaagaaccaaatttctttcaattcaagatgaattttgccattttctacaaatgactggacaaaaagagagagcaacctcgatcctgagagagtccctggaagccaaagtggaagcatttggcgatttcagtcccgaggtggcagagacataccggctcctgggaggagcagacctggcgcaggggaaccacagtggggcccgcaagaaactgaagaagtgtctccagatccagaccctcttatatggaccgcaggacaaaaggactctggccacccagcaggccatgggcatgctgtccacggcccccaaggttgcttcgaagccaaggcaggcatcaaaagccaaagtggccttctgcaccagcatccctcaggacaccctgctggggaaggcccggcccggcacaacagcagactgaggcccccaccctgaaaaagcctaggacattcctgggcactgtcatttagggtgctgtacaaatcacctccgcctagaaaatggaattcaacagtcaggatacagatttccaaggccaactgttggccccaacatgcaacagtgagaccataagcctcccgtgggccacattttgacagtggatgcccttcagggtgatatatgctataaagcagttttctatcacctaagtggtttttcttgccaacaagaatttttacccatcagcactactgtggctgaaaaacttctcttcaacagttcagtgcgccctgtgcaggagtcagcccggcatctgcttgtacacacagctccttgcataggtgtggagttagatctggacagtgaacttcaggaagtcctttcttataggaggctaatagggattgagaataacatgagaagaaaacgctaataaagggaaacctgaacacgctgctgtcagcatgtgttttcaaagtgcagcctgcctcagagttcttcggagcctgaaaaggggtttgagaaagagcccagtaggaggggcaggaggccgacacacctgacttggcctggggcccaggaggcaggtgtaagggagtgaaaagaaaggctagccggaggctgcggggggaagaccgcagactccctgctgcttcgcatccctcctgtggcctccactgcaggcaggacaaacctggatgccacctggagctgcttcctgagttggcacactatcgtgtacacagcagtcttcagccccctggaaggaggccatagtcgtgtgaggatggcaaagtcgaacaggaagctttgagtgccttcctccacgatgtcaacgaggagatccagtgccagatcgaggtggatggaacacccaggggtaggggtgcaggtgtgggcagtgatgtcccttcccctccctcccctggtcccacagactgtggccatgaggctgcaggctggtgctatgacagcagattgcagcacagggccctcccctccagcccccagtgggacatcaaaaccaccctggggccatttgtgcagggcaccacctccagtattgatggggaaaataaactcagtagagccacgacagggtggagagaagcagggaccattgtcttcctcaggagcgtgacagctgaccccacagaccatgcttgctggtacacactggtcccagacccaggcctgtcggacatcagcagtgtgctaaaaacgtgtaagatgtggtcactactcaccgtgtgtcctatctagttgacatgggtggagtcagctaaggggtgaatgttcatatgctcccaattcacgttgaagccctaatccccaaagggatggtattgggggtggggtcttggagaggtgattaggttatgagggtggagccctgatgaatgggattagtgctttataaggagagacaccagagagatgatctctctctccaccatgtgaggacacagtgagaagacagccgtctgcaggcccggaagagagccctcaccaggaaatgaaactgttggcaccttgagacttcccagcttccagaactgtaagaaataaatgtttgttgtttaagcctttcaggctacggctttctgttacagcagcctgaactgagagtccatgccgagtttttgaaataaatgtgaattctgatgttaaaaaaaact

SEQ ID NO: 75846 - DNA, 3657 bp, Homo sapiens
ggacgcgtgggtccggacgcgtggtgtcgacccacgcgtgcggtgaggtacccgcttgctttatgggaaaaggctgctccggaactgccctactttagactttttcatggttatcaatctgtacaaagaatcaccaaactgataaagcaggaaccagagggcaaatcacgctgccaagacaactgtgtaattcgctcgaaaaagaaacgatggagtctcgctctgtcacccaggctggagtatagtggtgtgatcttggctcactgcaacctctgcctcccaggttcaagcgattctcctgcctcagcctctcgagtagctggaattacaggtctggcagaaggaacagtatcaactgactgagtaggtctcattggcagttgtgattcagagacctagaaagctgaacccacggctggcaagaagaggatggtttgtgggacctgggctgatgtctgatgaaattttaagccccagctatagctactacaaagaaaagtggctgatgataagcatgtaactcaaaaagacaatgtatataaaaatatgcaagaatcacaggaaacccacatatccaaccacctagatgaagttgttgctgctgttagcatcactcatagaaagaagttccaaaacaagctgcttcagacagcactattccagcctcctcgagagaaactccacctctgtgaagagaaagcaaagtcctattccaacagtcatgagtacaaacaggccgtccatgagcttgtgcgttgcgtagcactgacaagaatttgctatggagactcacattggaaactagcagaggcacatgttaatctggctcaaggctacctccagctgaaaggactgtcactgcaagcaaaacaacatgcagaaaaagccagacaaatcctcgccaactccattgtgcctccctatagtgagaatacagatgttttcaagttttccattgagcttttccataccatgggcagagctttactctcccttcaaaaatttaaggaagctgcagagaatttgacaaaagcagagagactttcaaaggagctgctacaatgtggaagaattataaaggaagaatggatagaaattgaagcacggatcagattatcatttgcacaggtgtatcaaggtcagaagaagtcaaaagaagctttgtcccactatcaagcagctttggaatatgttgagatcagtaaaggtgaaacaagtcgtgagtgtgtacccatattgagagaattagcaggtgtagagcaagccctgggactccacgatgtatccatcaaccacttcctccaggcacatctcatcatcctgagtagaagcccctctcaagtggaggcagcagactcggcacacatcgtcgcccatgctgctgtcgcttcagggagacacgagcaccatgatgtagctgagcagtattttcaagagagcatggctcatcttaaggattctgaagggatgggaagaaccaaatttctttcaattcaagatgaattttgccattttctacaaatgactggacaaaaagagagagcaacctcgatcctgagagagtccctggaagccaaagtggaagcatttggcgatttcagtcccgaggtggcagagacataccggctcctgggaggagcagacctggcgcaggggaaccacagtggggcccgcaagaaactgaagaagggagaccttagtttcctgctctcagcgacacttccatagcctcatgatagctgcttggtgttctacagtgtctccagatccagaccctcttatatggaccgcaggacaaaaggactctggccacccagcaggccatgggcatgctgtccacggcccccaaggttgcttcgaagccaaggcaggcatcaaaagccaaagtggccttctgcaccagcatccctcaggacaccctgctggggaaggcccggcccggcacaacagcagactgaggcccccaccctgaaaaagcctaggacattcctgggcactgtcatttagggtgctgtacaaatcacctccgcctagaaaatggaattcaacagtcaggatacagatttccaaggccaactgttggccccaacatgcaacagtgagaccataagcctcccgtgggccacattttgacagtggatgcccttcagggtgatatatgctataaagcagttttctatcacctaagtggtttttcttgccaacaagaatttttacccatcagcactactgtggctgaaaaacttctcttcaacagttcagtgcgccctgtgcaggagtcagcccggcatctgcttgtacacacagctccttgcataggtgtggagttagatctggacagtgaacttcaggaagtcctttcttataggaggctaatagggattgagaataacatgagaagaaaacgctaataaagggaaacctgaacacgctgctgtcagcatgtgttttcaaagtgcagcctgcctcagagttcttcggagcctgaaaaggggtttgagaaagagcccagtaggaggggcaggaggccgacacacctgacttggcctggggcccaggaggcaggtgtaagggagtgaaaagaaaggctagccggaggctgcggggggaagaccgcagactccctgctgcttcgcatccctcctgtggcctccactgcaggcaggacaaacctggatgccacctggagctgcttcctgagttggcacactatcgtgtacacagcagtcttcagccccctggaaggaggccatagtcgtgtgaggatggcaaagtcgaacaggaagctttgagtgccttcctccacgatgtcaacgaggagatccagtgccagatcgaggtggatggaacacccaggggtaggggtgcaggtgtgggcagtgatgtcccttcccctccctcccctggtcccacagactgtggccatgaggctgcaggctggtgctatgacagcagattgcagcacagggccctcccctccagcccccagtgggacatcaaaaccaccctggggccatttgtgcagggcaccacctccagtattgatggggaaaataaactcagtagagccacgacagggtggagagaagcagggaccattgtcttcctcaggagcgtgacagctgaccccacagaccatgcttgctggtacacactggtcccagacccaggcctgtcggacatcagcagtgtgctaaaaacgtgtaagatgtggtcactactcaccgtgtgtcctatctagttgacatgggtggagtcagctaaggggtgaatgttcatatgctcccaattcacgttgaagccctaatccccaaagggatggtattgggggtggggtcttggagaggtgattaggttatgagggtggagccctgatgaatgggattagtgctttataaggagagacaccagagagatgatctctctctccaccatgtgaggacacagtgagaagacagccgtctgcaggcccggaagagagccctcaccaggaaatgaaactgttggcaccttgagacttcccagcttccagaactgtaagaaataaatgtttgttgtttaagcctttcaggctacggctttctgttacagcagcctgaactgagagtccatgccgagtttttgaaataaatgtgaattctgatgttaaaaaaaact

SEQ ID NO: 75847 - DNA, 4389 bp, Homo sapiens
tggctgcttgcattttaattttcttgaagacctaaaaatggttggcagatcagaatgaataaacaggcttcagtagtaagtccccaaaccctcacacttttttttactcaagctatttatgtagcacaattcatccgatttttaaaaaatatattatgaaacatttgttatgcagaaaagtatggataacataacaaagacctttgaactcaccattcagtataagaaataaaacatgacccatccagttgaagtcccctctatacctaccccatccccagataactacttttttaaatttgatatcattcccatgctcttcttattttactatggttttgttttgcatgttttaaaacttcatattaaattataatacatattatatgcattcatctgtcgttttctttttccccttgactttgtaatcatgagattcatctatgtggttatatatacacatacatatatcaaacatttatatatcacatacatatataatatatacatatcacagtttacatattcattactaaatattgctaaattgttttacaaaggggctataccagtttgaatacccactatcaatatataaaagaattcttgttgctttgtatctttaacaaaacttggtagtttttgcagtctggtgggtgaaatggtacctacctcattgaggttttagtttgtatttctggttgttaatgagattaagcatgtttatttcatcagatttcaactctttgaataatctgtttatatcttttgagtgttattctattgagaggttttggtttggtttggtatttctcattaccttataggaattcttcatgtattctgaatgttaaacctttctcatttctgtgcactgcaagaatctttcctcagcgtggcttgtctttctactttgcttatggtgaattttggtgcacaaatattttaggttttcacatagttacattttatcagtctttcacttttgctttgtctagatcttgtctaagaaatacttccctacctcaagatcgtattttccggtcaggcatggtggctcactcctataatccccgcactttgggaggccaaggcaggtggatcacctgcagtcaggagtttgagaccagcctggccaacatggtgaaacctcatctctactaaaaatgcaaaaattagctgagtgtggtggcgggcacctgtaatctcagctactcgggaggctgaggcaggaaaatcacatgaacccaggaggtggaggttgcagtgagccaaaatcaccccacttgcactccagtctgggcgacagagtgagactccatcaaaaaatatatatatatatattttccagtattttcatctaaaagctccaagttttgcatttcacacttagtccttcaaatctttcttgagcttaatatttgtgtttgatttggggtagtgatccattttcttccatttggaaaaccagcggtcccagtacccatttattgactagcccacctcttcctcaccaatcccgcaaggccatttctgtcatctgtcaaggcttgggctctctgccctgttccactggtctttttgtctaccccgggtgacaaacatgctgtcttaattactttatttaaaaaaataaaagggtctttggcattcagtaaagcaagttcctccacctctccacctcattctttctcaaaattattttggccattttgggcacaactttaatctttctcctctcctgatttgccctagcctactacaagcaatcaaatggcaagacttaaagtaagcagaagggagaaatcaagccaaagccagccctgggtagtccataagctgaatatttggttcctaataactaagacattgctgtgtagtcaagagtatagacagcctatatattaataaaagtagagtatgtgtttacaaaaaaaacaaaactatttttttaaatcttttccaggctataacaagggccacatttaaaaatagaaactggagcccatcctctggtcagtaccaaggttcttgcctttatttttaaaaatactacttttaaatctattttttgcatacagatagccacagagagttttgtgaaatagtgctaaaactgttcacttttgcctagatccctcagaacatccaaaccaaaggtcagtcactaggagacatcccaggagcatgctaattccatcacagcagggcctaagaatgaggtcatctttctctcattcaagggagaccttagtttcctgctctcagcgacacttccatagcctcatgatagctgcttggtgttctacagtgtctccagatccagaccctcttatatggaccgcaggacaaaaggactctggccacccagcaggccatgggcatgctgtccacgatggcgcgtccctcacactttctctatctcattccctttccattcagaatctcaagagaaagctggttctagaaggttctgtgtaaccttctctggaatgttttgctgacttcccataacttgcataaaggacaagttcctttgaaacccgagttgtaaaagatcttccttgcccagggcccccaaggttgcttcgaagccaaggcaggcatcaaaagccaaagtggccttctgcaccagcatccctcaggacaccctgctggggaaggcccggcccggcacaacagcagactgaggcccccaccctgaaaaagcctaggacattcctgggcactgtcatttagggtgctgtacaaatcacctccgcctagaaaatggaattcaacagtcaggatacagatttccaaggccaactgttggccccaacatgcaacagtgagaccataagcctcccgtgggccacattttgacagtggatgcccttcagggtgatatatgctataaagcagttttctatcacctaagtggtttttcttgccaacaagaatttttacccatcagcactactgtggctgaaaaacttctcttcaacagttcagtgcgccctgtgcaggagtcagcccggcatctgcttgtacacacagctccttgcataggtgtggagttagatctggacagtgaacttcaggaagtcctttcttataggaggctaatagggattgagaataacatgagaagaaaacgctaataaagggaaacctgaacacgctgctgtcagcatgtgttttcaaagtgcagcctgcctcagagttcttcggagcctgaaaaggggtttgagaaagagcccagtaggaggggcaggaggccgacacacctgacttggcctggggcccaggaggcaggtgtaagggagtgaaaagaaaggctagccggaggctgcggggggaagaccgcagactccctgctgcttcgcatccctcctgtggcctccactgcaggcaggacaaacctggatgccacctggagctgcttcctgagttggcacactatcgtgtacacagcagtcttcagccccctggaaggaggccatagtcgtgtgaggatggcaaagtcgaacaggaagctttgagtgccttcctccacgatgtcaacgaggagatccagtgccagatcgaggtggatggaacacccaggggtaggggtgcaggtgtgggcagtgatgtcccttcccctccctcccctggtcccacagactgtggccatgaggctgcaggctggtgctatgacagcagattgcagcacagggccctcccctccagcccccagtgggacatcaaaaccaccctggggccatttgtgcagggcaccacctccagtattgatggggaaaataaactcagtagagccacgacagggtggagagaagcagggaccattgtcttcctcaggagcgtgacagctgaccccacagaccatgcttgctggtacacactggtcccagacccaggcctgtcggacatcagcagtgtgctaaaaacgtgtaagatgtggtcactactcaccgtgtgtcctatctagttgacatgggtggagtcagctaaggggtgaatgttcatatgctcccaattcacgttgaagccctaatccccaaagggatggtattgggggtggggtcttggagaggtgattaggttatgagggtggagccctgatgaatgggattagtgctttataaggagagacaccagagagatgatctctctctccaccatgtgaggacacagtgagaagacagccgtctgcaggcccggaagagagccctcaccaggaaatgaaactgttggcaccttgagacttcccagcttccagaactgtaagaaataaatgtttgttgtttaagcctttcaggctacggctttctgttacagcagcctgaactgagagtccatgccgagtttttgaaataaatgtgaattctgatgttaaaaaaaact

SEQ ID NO: 75848 - DNA, 3852 bp, Homo sapiens
gcttccggctccggcgtggggtttgatgtctacggagtggcttttgcttagcgtcttgaaggggggaaaaaaatcctctaagctggtgatttcacgttctttgacaaacttcaatagcaacaggcaacgataccactttaagaaaattccaaggaaaagacctcattttaaaattcccacctctggctcccaaagattggtttgcaaacttcgacaaaatactcttctccactcgctattgatggagtctcgctctgtcacccaggctggagtatagtggtgtgatcttggctcactgcaacctctgcctcccaggttcaagcgattctcctgcctcagcctctcgagtagctggaattacaggtctggcagaaggaacagtatcaactgactgagtaggtctcattggcagttgtgattcagagacctagaaagctgaacccacggctggcaagaagaggatggtttgtgggacctgggctgatgtctgatgaaattttaagccccagctatagctactacaaagaaaagtggctgatgataagcatgtaactcaaaaagacaatgtatataaaaatatgcaagaatcacaggaaacccacatatccaaccacctagatgaagttgttgctgctgttagcatcactcatagaaagaagttccaaaacaagctgcttcagacagcactattccagcctcctcgagagaaactccacctctgtgaagagaaagcaaagtcctattccaacagtcatgagtacaaacaggccgtccatgagcttgtgcgttgcgtagcactgacaagaatttgctatggagactcacattggaaactagcagaggcacatgttaatctggctcaaggctacctccagctgaaaggactgtcactgcaagcaaaacaacatgcagaaaaagccagacaaatcctcgccaactccattgtgcctccctatagtgagaatacagatgttttcaagttttccattgagcttttccataccatgggcagagctttactctcccttcaaaagtatccttttgcctctaacttttacaaatagaaatactattcacgtaacacttacacgccaagtaaaaagctgatgctgatggatgacttaggaagtgtgattggaagtatgggagccaaggaagttcaggacatggggtgtagaatctagaaccaagtggaaaatttcctgaacacaattcagatttaaggaagctgcagagaatttgacaaaagcagagagactttcaaaggagctgctacaatgtggaagaattataaaggaagaatggatagaaattgaagcacggatcagattatcatttgcacaggtgtatcaaggtcagaagaagtcaaaagaagctttgtcccactatcaagcagctttggaatatgttgagatcagtaaaggtgaaacaagtcgtgagtgtgtacccatattgagagaattagcaggtgtagagcaagccctgggactccacgatgtatccatcaaccacttcctccaggcacatctcatcatcctgagtagaagcccctctcaagtggaggcagcagactcggcacacatcgtcgcccatgctgctgtcgcttcagggagacacgagcaccatgatgtagctgagcagtattttcaagagagcatggctcatcttaaggattctgaagggatgggaagaaccaaatttctttcaattcaagatgaattttgccattttctacaaatgactggacaaaaagagagagcaacctcgatcctgagagagtccctggaagccaaagtggaagcatttggcgatttcagtcccgaggtggcagagacataccggctcctgggaggagcagacctggcgcaggggaaccacagtggggcccgcaagaaactgaagaagaatctcaagagaaagctggttctagaaggttctgtgtaaccttctctggaatgttttgctgacttcccataacttgcataaaggacaagttcctttgaaacccgagttgtaaaagatcttccttgcccagggcccccaaggttgcttcgaagccaaggcaggcatcaaaagccaaagtggccttctgcaccagcatccctcaggacaccctgctggggaaggcccggcccggcacaacagcagactgaggcccccaccctgaaaaagcctaggacattcctgggcactgtcatttagggtgctgtacaaatcacctccgcctagaaaatggaattcaacagtcaggatacagatttccaaggccaactgttggccccaacatgcaacagtgagaccataagcctcccgtgggccacattttgacagtggatgcccttcagggtgatatatgctataaagcagttttctatcacctaagtggtttttcttgccaacaagaatttttacccatcagcactactgtggctgaaaaacttctcttcaacagttcagtgcgccctgtgcaggagtcagcccggcatctgcttgtacacacagctccttgcataggtgtggagttagatctggacagtgaacttcaggaagtcctttcttataggaggctaatagggattgagaataacatgagaagaaaacgctaataaagggaaacctgaacacgctgctgtcagcatgtgttttcaaagtgcagcctgcctcagagttcttcggagcctgaaaaggggtttgagaaagagcccagtaggaggggcaggaggccgacacacctgacttggcctggggcccaggaggcaggtgtaagggagtgaaaagaaaggctagccggaggctgcggggggaagaccgcagactccctgctgcttcgcatccctcctgtggcctccactgcaggcaggacaaacctggatgccacctggagctgcttcctgagttggcacactatcgtgtacacagcagtcttcagccccctggaaggaggccatagtcgtgtgaggatggcaaagtcgaacaggaagctttgagtgccttcctccacgatgtcaacgaggagatccagtgccagatcgaggtggatggaacacccaggggtaggggtgcaggtgtgggcagtgatgtcccttcccctccctcccctggtcccacagactgtggccatgaggctgcaggctggtgctatgacagcagattgcagcacagggccctcccctccagcccccagtgggacatcaaaaccaccctggggccatttgtgcagggcaccacctccagtattgatggggaaaataaactcagtagagccacgacagggtggagagaagcagggaccattgtcttcctcaggagcgtgacagctgaccccacagaccatgcttgctggtacacactggtcccagacccaggcctgtcggacatcagcagtgtgctaaaaacgtgtaagatgtggtcactactcaccgtgtgtcctatctagttgacatgggtggagtcagctaaggggtgaatgttcatatgctcccaattcacgttgaagccctaatccccaaagggatggtattgggggtggggtcttggagaggtgattaggttatgagggtggagccctgatgaatgggattagtgctttataaggagagacaccagagagatgatctctctctccaccatgtgaggacacagtgagaagacagccgtctgcaggcccggaagagagccctcaccaggaaatgaaactgttggcaccttgagacttcccagcttccagaactgtaagaaataaatgtttgttgtttaagcctttcaggctacggctttctgttacagcagcctgaactgagagtccatgccgagtttttgaaataaatgtgaattctgatgttaaaaaaaact

SEQ ID NO: 75849 - DNA, 2809 bp, Homo sapiens
tggctgcttgcattttaattttcttgaagacctaaaaatggttggcagatcagaatgaataaacaggcttcagtagtaagtccccaaaccctcacacttttttttactcaagctatttatgtagcacaattcatccgatttttaaaaaatatattatgaaacatttgttatgcagaaaagtatggataacataacaaagacctttgaactcaccattcagtataagaaataaaacatgacccatccagttgaagtcccctctatacctaccccatccccagataactacttttttaaatttgatatcattcccatgctcttcttattttactatggttttgttttgcatgttttaaaacttcatattaaattataatacatattatatgcattcatctgtcgttttctttttccccttgactttgtaatcatgagattcatctatgtggttatatatacacatacatatatcaaacatttatatatcacatacatatataatatatacatatcacagtttacatattcattactaaatattgctaaattgttttacaaaggggctataccagtttgaatacccactatcaatatataaaagaattcttgttgctttgtatctttaacaaaacttggtagtttttgcagtctggtgggtgaaatggtacctacctcattgaggttttagtttgtatttctggttgttaatgagattaagcatgtttatttcatcagatttcaactctttgaataatctgtttatatcttttgagtgttattctattgagaggttttggtttggtttggtatttctcattaccttataggaattcttcatgtattctgaatgttaaacctttctcatttctgtgcactgcaagaatctttcctcagcgtggcttgtctttctactttgcttatggtgaattttggtgcacaaatattttaggttttcacatagttacattttatcagtctttcacttttgctttgtctagatcttgtctaagaaatacttccctacctcaagatcgtattttccggtcaggcatggtggctcactcctataatccccgcactttgggaggccaaggcaggtggatcacctgcagtcaggagtttgagaccagcctggccaacatggtgaaacctcatctctactaaaaatgcaaaaattagctgagtgtggtggcgggcacctgtaatctcagctactcgggaggctgaggcaggaaaatcacatgaacccaggaggtggaggttgcagtgagccaaaatcaccccacttgcactccagtctgggcgacagagtgagactccatcaaaaaatatatatatatatattttccagtattttcatctaaaagctccaagttttgcatttcacacttagtccttcaaatctttcttgagcttaatatttgtgtttgatttggggtagtgatccattttcttccatttggaaaaccagcggtcccagtacccatttattgactagcccacctcttcctcaccaatcccgcaaggccatttctgtcatctgtcaaggcttgggctctctgccctgttccactggtctttttgtctaccccgggtgacaaacatgctgtcttaattactttatttaaaaaaataaaagggtctttggcattcagtaaagcaagttcctccacctctccacctcattctttctcaaaattattttggccattttgggcacaactttaatctttctcctctcctgatttgccctagcctactacaagcaatcaaatggcaagacttaaagtaagcagaagggagaaatcaagccaaagccagccctgggtagtccataagctgaatatttggttcctaataactaagacattgctgtgtagtcaagagtatagacagcctatatattaataaaagtagagtatgtgtttacaaaaaaaacaaaactatttttttaaatcttttccaggctataacaagggccacatttaaaaatagaaactggagcccatcctctggtcagtaccaaggttcttgcctttatttttaaaaatactacttttaaatctattttttgcatacagatagccacagagagttttgtgaaatagtgctaaaactgttcacttttgcctagatccctcagaacatccaaaccaaaggtcagtcactaggagacatcccaggagcatgctaattccatcacagcagggcctaagaatgaggtcatctttctctcattcaagggagaccttagtttcctgctctcagcgacacttccatagcctcatgatagctgcttggtgttctacagtgtctccagatccagaccctcttatatggaccgcaggacaaaaggactctggccacccagcaggccatgggcatgctgtccacgatggcgcgtccctcacactttctctatctcattccctttccattcagaatctcaagagaaagctggttctagaaggttctgtgtaaccttctctggaatgttttgctgacttcccataacttgcataaaggacaagttcctttgaaacccgagttgtaaaagatcttccttgcccaggtatttaaaaataattcatcctttaagtcagaaatatatgctggatgttgtcttcctgcagaccagcccctgcaggctaaggcacctgctgcagggggagggccccgggaatccctgtggcctcctgcagccctgcttccggcttccctctgccctcggatgcccgtcaggactggagccggaaggttcactgactgaccttaaaggctggcccctaggacgcgccatcgtgcgctt

SEQ ID NO: 75850 - DNA, 2197 bp, Homo sapiens
gcttccggctccggcgtggggtttgatgtctacggagtggcttttgcttagcgtcttgaaggggggaaaaaaatcctctaagctggtgatttcacgttctttgacaaacttcaatagcaacaggcaacgataccactttaagaaaattccaaggaaaagacctcattttaaaattcccacctctggctcccaaagattggtttgcaaacttcgacaaaatactcttctccactcgctattgatggagtctcgctctgtcacccaggctggagtatagtggtgtgatcttggctcactgcaacctctgcctcccaggttcaagcgattctcctgcctcagcctctcgagtagctggaattacaggtctggcagaaggaacagtatcaactgactgagtaggtctcattggcagttgtgattcagagacctagaaagctgaacccacggctggcaagaagaggatggtttgtgggacctgggctgatgtctgatgaaattttaagccccagctatagctactacaaagaaaagtggctgatgataagcatgtaactcaaaaagacaatgtatataaaaatatgcaagaatcacaggaaacccacatatccaaccacctagatgaagttgttgctgctgttagcatcactcatagaaagaagttccaaaacaagctgcttcagacagcactattccagcctcctcgagagaaactccacctctgtgaagagaaagcaaagtcctattccaacagtcatgagtacaaacaggccgtccatgagcttgtgcgttgcgtagcactgacaagaatttgctatggagactcacattggaaactagcagaggcacatgttaatctggctcaaggctacctccagctgaaaggactgtcactgcaagcaaaacaacatgcagaaaaagccagacaaatcctcgccaactccattgtgcctccctatagtgagaatacagatgttttcaagttttccattgagcttttccataccatgggcagagctttactctcccttcaaaagtatccttttgcctctaacttttacaaatagaaatactattcacgtaacacttacacgccaagtaaaaagctgatgctgatggatgacttaggaagtgtgattggaagtatgggagccaaggaagttcaggacatggggtgtagaatctagaaccaagtggaaaatttcctgaacacaattcagatttaaggaagctgcagagaatttgacaaaagcagagagactttcaaaggagctgctacaatgtggaagaattataaaggaagaatggatagaaattgaagcacggatcagattatcatttgcacaggtgtatcaaggtcagaagaagtcaaaagaagctttgtcccactatcaagcagctttggaatatgttgagatcagtaaaggtgaaacaagtcgtgagtgtgtacccatattgagagaattagcaggtgtagagcaagccctgggactccacgatgtatccatcaaccacttcctccaggcacatctcatcatcctgagtagaagcccctctcaagtggaggcagcagactcggcacacatcgtcgcccatgctgctgtcgcttcagggagacacgagcaccatgatgtagctgagcagtattttcaagagagcatggctcatcttaaggattctgaagggatgggaagaaccaaatttctttcaattcaagatgaattttgccattttctacaaatgactggacaaaaagagagagcaacctcgatcctgagagagtccctggaagccaaagtggaagcatttggcgatttcagtcccgaggtggcagagacataccggctcctgggaggagcagacctggcgcaggggaaccacagtggggcccgcaagaaactgaagaagcttgaaagacctcaaagacctcagggaaagactgacgggcctggcttgaatccagggcccacccctggctcagtcagccaaggccaggagagtggtgaaaggctgcagaaagaattcctgaaggcggcttcatggatcaggaacatctcaggagtatactgagcccaagaacactgaagtcggatttgggtccagtcatcatctggcctccgtattaggtactatcttcagcagggttcagtccactgcctcactactttagctgtgggcattaaacatttccacacacaaa

SEQ ID NO: 75851 - DNA, 537 bp, Homo sapiens
ggacgcgtgggtccggacgcgtggtgtcgacccacgcgtgcggtgaggtacccgcttgctttatgggaaaaggctgctccggaactgccctactttagactttttcatggttatcaatctgtacaaagaatcaccaaactgataaagcaggaaccagagggcaaatcacgctgccaagacaactgtgtaattcgctcgaaaaagaaacgaagacaatgtatataaaaatatgcaagaatcacaggaaacccacatatccaaccacctagatgaagttgttgctgctgttagcatcactcatagaaagaagttccaaaacaagctgcttcagacagcactattccagcctcctcgagagaaactccacctctgtgaagagaaagcaaagtcctattccaacagtcatgaggtaaggagacttttgtttctgtatttctactctgagaattgagctatatggtataatcaagagaagtagaatgttttggattacattcctaatctcagcagtttgatacaagaaagtatataagacag

SEQ ID NO: 75852 - DNA, 200 bp, Homo sapiens
gcacatctcatcatcctgagtagaagcccctctcaagtggaggcagcagactcggcacacatcgtcgcccatgctgctgtcgcttcagggagacacgagcaccatggtgagaagaatccttttctcttcctgtctcacaggcatctgggtctataaacgagctgccttctagatgggttaacaggtggacagagccgcga

SEQ ID NO: 75853 - DNA, 1014 bp, Homo sapiens
ggcttgtgcctgtcgtcctagctacttgggagactaaggtggaaggatcaccctagcccaggagttcaaggttgcagtgagctgtgattgagccattgcattccagcctgggcaagagtgagaccctatctccaaaaggaaagagagaaacgaagtcctgtccctatcagcagccactccacatcctgcaccccagcctctggcactacgcgtccccttcctgtctctgaattatcctgttctagacatttcttagaaatgggatcacacactgtgtggccttttgtgtctggcgtctctcactgaatgtggcgtcctcaaggtgcatccacgctgtggcctgtgtcagagcctcgctccttttcatggctgagtatgtcccatcgtgtggatgggcgtttgtccgttcatccattgaaggcgtctgggctgcttccaccttctggctcctggggacatccgtgtagaagtgatggtgtggatgcgtgctcatttttcgggcagatacctaagagtggcgtggccgggtcatctggaaactcagtgaagagctgtcaggcttttccaacatggctgttccatcttacatcccaaccatgatgacggtgtgttgggttgggtgcttgtcatcctgtagtgtgacctcatgtgacacacagggcaacccattggtgggtgtccttatgtcctggagaggatgagttgccggcgcttgtccatggcaggctgagagcagagccccgtgtctgagagcaggtctgtgtttacctggctgccttgttgcgagctctccagtcgggttatgcccaagcagctgttagggcctggccccagatcttagaacgagaccccttcccagtctggccctgctgctgtaaccccaaggtggaagaagattgcttttagggctgtccctcacatacctgttctccgtggggtcttttctcaagaatgtgacctaaattccatgtctggaatgttctggacatgtgagccatcctcccagagccgggg

SEQ ID NO: 75854 - DNA, 2944 bp, Homo sapiens
  misc_feature (312)..(312): n is a, c, g, or t
  misc_feature (321)..(321): n is a, c, g, or t
  misc_feature (329)..(329): n is a, c, g, or t
  misc_feature (335)..(335): n is a, c, g, or t
  misc_feature (354)..(354): n is a, c, g, or t
  misc_feature (358)..(358): n is a, c, g, or t
  misc_feature (374)..(374): n is a, c, g, or t
  misc_feature (386)..(386): n is a, c, g, or t
cagactggagtgccagcaggccttgtcacactggctgtcaaaccaggtaccccgccgggcgggggagagacggtgcccagccatggccccccgggcccgcagcgcctcccaggaccggttggaggaggtggctgccccccgcccgtggccctgctccacctcccaggatgctttgagccagctgggccatggagggctggcaccgagctcgctcagatgactacttgagccgggccacccgttctgccgaggcactggggccaggggcactggtgtcaccccgctttgagcggtgtggctgggcttcccagncgttcgtcntgcccgcnaccccncgcctgcccaactctgggnaccntgccagggccccaggnccccaacccccngtctggcctgcagggcctggatgacctcgggtacatcggctaccggagctacagcccatcattccagcgaccggaccggcctcctccatgcgctctccttccgggactcaccctttggggggctgcctaccttcaacctggcccagtcccctgcgtcattcccaccagaggcctccgagccacccagggttgtacggccggaacccagcacccgggccctggagcctcctgcggaggatcgcggcgatgaggtggtcctgaggcagaagcccccgacgggccgcaaggttcagctgacccccgcaagacagatgaaccttggatttggtgacgagtccccagagccagaggccagtgggcgaggggaacgcctgggcaggaaggtggcccctttggccaccaccgaagactctctggcttccatcccctttattgatgagcccaccagccccagcattgacctccaagccaagcacgtccctgcctctgctgtggtctccagtgccatgaactcagcccctgtcctgggcaccagcccatcttccccgaccttcactttcaccctcggacgccattactcgcaggactgcagcagcatcaaggctggccgccgctcctcctacctgctggccatcaccacggagcgctccaagtcctgcgatgatggactcaacaccttccgcgacgagggccgggttctgcggcgcctgccaaaccgcatacccagcctgcggatgctccggagcttcttcaccgacgggtccttggatagctggggcacctctgaagatgctgacgctccttctaagcgacactcaacctctgacctctcagatgcgaccttcagcgatatcaggagagaaggctggttgtattataagcagattctcaccaagaaggggaagaaagcgggcagcggcctgcgccagtggaagcgggtgtacgccgcgctgcgggcgcgctcgctctcgctgagcaaggagcggcgggagcccgggccggcggcggcgggggctgcggcggccggcgcaggtgaggacgaggcggcgcccgtctgcatcggctcctgcctcgtggacatctcctacagcgagaccaagaggaggcacgtgttccggctgaccaccgctgacttctgtgaatatctctttcaggctgaggaccgggatgacatgctgggctggatcagagcgatccgggagaacagcagggccgagggcgaggaccccggctgtgccaaccaagctctgatcagcaagaagcttaatgattatcgcaaagtgagccatagctctgggcccaaagctgattcctcccccaaaggctctcgcggcctggggggcctcaagtctgagttcctcaagcagagtgcggcacgtggcctcaggactcaggacctgcccgcagggagcaaggatgacagtgctgcagcccccaaaaccccctggggcatcaacatcatcaagaaaaataagaaggccgctccgagggcgtttggggtcaggctggaggagtgccagccagccacggagaaccagcgcgtccccttaatcgtggctgcatgctgtcgcattgtggaggcacgagggctggagtccacaggcatttaccgagtgcccggcaacaatgcagtggtgtccagcctacaggagcagctcaaccgcgggcctggtgacatcaacctgcaggatgagcgctggcaagacctcaatgtgatcagcagcctgctcaagtccttcttccgaaagctgcccgagcctcttttcactgatgacaaatacaacgacttcatcgaggccaaccgcattgaggacgcgcgggagcgaatgaggacgctgcggaagctgatccgggatctcccaggacactactatgaaacgctcaaattccttgtgggccatctcaagaccatcgctgaccactctgagaaaaacaagatggaaccccggaacctggccctggtctttgggccgacactggtgaggacgtctgaggacaacatgacagacatggtgacccacatgcctgaccgctacaagatcgtggagacactgatccagcactcagactggttcttcagtgacgaagaggacaagggagagagaacccctgtgggcgacaaggagcctcaggcagtgcccaacattgagtacctcctgcccaacattggcaggacagtgccccctggcgacccggggtcagcggacctgttggagatttaaaggattctaccacctgtagttcagccaagtccaagggttcgtgggcccccaagaaggagccgtacgcccgggagatgctggcgatctccttcatctcggccgtcaaccgcaagcgcaagaagcggcgggaggcgcgggggctgggcagcagcaccgacgacgactcggagcaggaggcgcacaagcctggggcgggggccacagcgccggggactcaggagcggccgcaggggccgctgcctggcgccgtcgcccccgaggcccccggacgcctcagtcccccggcggcgccggaggagcggccggccgcggacacgcgctccattgtgtcgggct

SEQ ID NO: 75855 - DNA, 598 bp, Homo sapiens
  misc_feature (16)..(16): n is a, c, g, or t
atcggtaaatgagggngccagtggctggcagcctgatgtcacttcctgcctctagaggaagtggcagttaacatcattttctcctccatccctctcccatagatggacatcagatgtccatcatactcctagggcctggggagatctcatgtttcagaattccctggtttctgaagcctttgaggagagggaattgtgtgcataagactcagctttcttttttcctgatgcaactttcatttttttttctgtctttcaccaacagattctaccacctgtagttcagccaagtccaagggttcgtgggcccccaagaaggagccgtacgcccgggagatgctggcgatctccttcatctcggccgtcaaccgcaagcgcaagaagcggcgggaggcgcgggggctgggcagcagcaccgacgacgactcggagcaggaggcgcacaagcctggggcgggggccacagcgccggggactcaggagcggccgcaggggccgctgcctggcgccgtcgcccccgaggcccccggacgcctcagtcccccggcggcgccggaggagcggccggccgcggacacgcgctccattgtgtcgggct

SEQ ID NO: 75856 - DNA, 2799 bp, Homo sapiens
  misc_feature (312)..(312): n is a, c, g, or t
  misc_feature (321)..(321): n is a, c, g, or t
  misc_feature (329)..(329): n is a, c, g, or t
  misc_feature (335)..(335): n is a, c, g, or t
  misc_feature (354)..(354): n is a, c, g, or t
  misc_feature (358)..(358): n is a, c, g, or t
  misc_feature (374)..(374): n is a, c, g, or t
  misc_feature (386)..(386): n is a, c, g, or t
cagactggagtgccagcaggccttgtcacactggctgtcaaaccaggtaccccgccgggcgggggagagacggtgcccagccatggccccccgggcccgcagcgcctcccaggaccggttggaggaggtggctgccccccgcccgtggccctgctccacctcccaggatgctttgagccagctgggccatggagggctggcaccgagctcgctcagatgactacttgagccgggccacccgttctgccgaggcactggggccaggggcactggtgtcaccccgctttgagcggtgtggctgggcttcccagncgttcgtcntgcccgcnaccccncgcctgcccaactctgggnaccntgccagggccccaggnccccaacccccngtctggcctgcagggcctggatgacctcgggtacatcggctaccggagctacagcccatcattccagcgaccggaccggcctcctccatgcgctctccttccgggactcaccctttggggggctgcctaccttcaacctggcccagtcccctgcgtcattcccaccagaggcctccgagccacccagggttgtacggccggaacccagcacccgggccctggagcctcctgcggaggatcgcggcgatgaggtggtcctgaggcagaagcccccgacgggccgcaaggttcagctgacccccgcaagacagatgaaccttggatttggtgacgagtccccagagccagaggccagtgggcgaggggaacgcctgggcaggaaggtggcccctttggccaccaccgaagactctctggcttccatcccctttattgatgagcccaccagccccagcattgacctccaagccaagcacgtccctgcctctgctgtggtctccagtgccatgaactcagcccctgtcctgggcaccagcccatcttccccgaccttcactttcaccctcggacgccattactcgcaggactgcagcagcatcaaggctggccgccgctcctcctacctgctggccatcaccacggagcgctccaagtcctgcgatgatggactcaacaccttccgcgacgagggccgggttctgcggcgcctgccaaaccgcatacccagcctgcggatgctccggagcttcttcaccgacgggtccttggatagctggggcacctctgaagatgctgacgctccttctaagcgacactcaacctctgacctctcagatgcgaccttcagcgatatcaggagagaaggctggttgtattataagcagattctcaccaagaaggggaagaaagcgggcagcggcctgcgccagtggaagcgggtgtacgccgcgctgcgggcgcgctcgctctcgctgagcaaggagcggcgggagcccgggccggcggcggcgggggctgcggcggccggcgcaggctgaggaccgggatgacatgctgggctggatcagagcgatccgggagaacagcagggccgagggcgaggaccccggctgtgccaaccaagctctgatcagcaagaagcttaatgattatcgcaaagtgagccatagctctgggcccaaagctgattcctcccccaaaggctctcgcggcctggggggcctcaagtctgagttcctcaagcagagtgcggcacgtggcctcaggactcaggacctgcccgcagggagcaaggatgacagtgctgcagcccccaaaaccccctggggcatcaacatcatcaagaaaaataagaaggccgctccgagggcgtttggggtcaggctggaggagtgccagccagccacggagaaccagcgcgtccccttaatcgtggctgcatgctgtcgcattgtggaggcacgagggctggagtccacaggcatttaccgagtgcccggcaacaatgcagtggtgtccagcctacaggagcagctcaaccgcgggcctggtgacatcaacctgcaggatgagcgctggcaagacctcaatgtgatcagcagcctgctcaagtccttcttccgaaagctgcccgagcctcttttcactgatgacaaatacaacgacttcatcgaggccaaccgcattgaggacgcgcgggagcgaatgaggacgctgcggaagctgatccgggatctcccaggacactactatgaaacgctcaaattccttgtgggccatctcaagaccatcgctgaccactctgagaaaaacaagatggaaccccggaacctggccctggtctttgggccgacactggtgaggacgtctgaggacaacatgacagacatggtgacccacatgcctgaccgctacaagatcgtggagacactgatccagcactcagactggttcttcagtgacgaagaggacaagggagagagaacccctgtgggcgacaaggagcctcaggcagtgcccaacattgagtacctcctgcccaacattggcaggacagtgccccctggcgacccggggtcagattctaccacctgtagttcagccaagtccaagggttcgtgggcccccaagaaggagccgtacgcccgggagatgctggcgatctccttcatctcggccgtcaaccgcaagcgcaagaagcggcgggaggcgcgggggctgggcagcagcaccgacgacgactcggagcaggaggcgcacaagcctggggcgggggccacagcgccggggactcaggagcggccgcaggggccgctgcctggcgccgtcgcccccgaggcccccggacgcctcagtcccccggcggcgccggaggagcggccggccgcggacacgcgctccattgtgtcgggct

SEQ ID NO: 75857 - DNA, 3197 bp, Homo sapiens
  misc_feature (312)..(312): n is a, c, g, or t
  misc_feature (321)..(321): n is a, c, g, or t
  misc_feature (329)..(329): n is a, c, g, or t
  misc_feature (335)..(335): n is a, c, g, or t
  misc_feature (354)..(354): n is a, c, g, or t
  misc_feature (358)..(358): n is a, c, g, or t
  misc_feature (374)..(374): n is a, c, g, or t
  misc_feature (386)..(386): n is a, c, g, or t
cagactggagtgccagcaggccttgtcacactggctgtcaaaccaggtaccccgccgggcgggggagagacggtgcccagccatggccccccgggcccgcagcgcctcccaggaccggttggaggaggtggctgccccccgcccgtggccctgctccacctcccaggatgctttgagccagctgggccatggagggctggcaccgagctcgctcagatgactacttgagccgggccacccgttctgccgaggcactggggccaggggcactggtgtcaccccgctttgagcggtgtggctgggcttcccagncgttcgtcntgcccgcnaccccncgcctgcccaactctgggnaccntgccagggccccaggnccccaacccccngtctggcctgcagggcctggatgacctcgggtacatcggctaccggagctacagcccatcattccagcgaccggaccggcctcctccatgcgctctccttccgggactcaccctttggggggctgcctaccttcaacctggcccagtcccctgcgtcattcccaccagaggcctccgagccacccagggttgtacggccggaacccagcacccgggccctggagcctcctgcggaggatcgcggcgatgaggtggtcctgaggcagaagcccccgacgggccgcaaggttcagctgacccccgcaagacagatgaaccttggatttggtgacgagtccccagagccagaggccagtgggcgaggggaacgcctgggcaggaaggtggcccctttggccaccaccgaagactctctggcttccatcccctttattgatgagcccaccagccccagcattgacctccaagccaagcacgtccctgcctctgctgtggtctccagtgccatgaactcagcccctgtcctgggcaccagcccatcttccccgaccttcactttcaccctcggacgccattactcgcaggactgcagcagcatcaaggctggccgccgctcctcctacctgctggccatcaccacggagcgctccaagtcctgcgatgatggactcaacaccttccgcgacgagggccgggttctgcggcgcctgccaaaccgcatacccagcctgcggatgctccggagcttcttcaccgacgggtccttggatagctggggcacctctgaagatgctgacgctccttctaagcgacactcaacctctgacctctcagatgcgaccttcagcgatatcaggagagaaggctggttgtattataagcagattctcaccaagaaggggaagaaagcgggcagcggcctgcgccagtggaagcgggtgtacgccgcgctgcgggcgcgctcgctctcgctgagcaaggagcggcgggagcccgggccggcggcggcgggggctgcggcggccggcgcaggtgaggacgaggcggcgcccgtctgcatcggctcctgcctcgtggacatctcctacagcgagaccaagaggaggcacgtgttccggctgaccaccgctgacttctgtgaatatctctttcaggctgaggaccgggatgacatgctgggctggatcagagcgatccgggagaacagcagggccgagggcgaggaccccggctgtgccaaccaagctctgatcagcaagaagcttaatgattatcgcaaagtgagccatagctctgggcccaaagctgattcctcccccaaaggctctcgcggcctggggggcctcaagtctgagttcctcaagcagagtgcggcacgtggcctcaggactcaggacctgcccgcagggagcaaggatgacagtgctgcagcccccaaaaccccctggggcatcaacatcatcaagaaaaataagaaggccgctccgagggcgtttggggtcaggctggaggagtgccagccagccacggagaaccagcgcgtccccttaatcgtggctgcatgctgtcgcattgtggaggcacgagggctggagtccacaggcatttaccgagtgcccggcaacaatgcagtggtgtccagcctacaggagcagctcaaccgcgggcctggtgacatcaacctgcaggatgagcgctggcaagacctcaatgtgatcagcagcctgctcaagtccttcttccgaaagctgcccgagcctcttttcactgatgacaaatacaacgacttcatcgaggccaaccgcattgaggacgcgcgggagcgaatgaggacgctgcggaagctgatccgggatctcccaggacactactatgaaacgctcaaattccttgtgggccatctcaagaccatcgctgaccactctgagaaaaacaagatggaaccccggaacctggccctggtctttgggccgacactggtgaggacgtctgaggacaacatgacagacatggtgacccacatgcctgaccgctacaagatcgtggagacactgatccagcactcagactggttcttcagtgacgaagaggacaagggagagagaacccctgtgggcgacaaggagcctcaggcagtgcccaacattgagtacctcctgcccaacattggcaggacagtgccccctggcgacccggggtcagattctaccacctgtagttcagccaagtccaaggtacgtatgaaggcaattctgaaggcttgatccctgtacaaggcagcccactttggtttttgttcaagggaattgagggaatggcagttggaccatggggaaagttgatggtccctgggagggaaggcaggaggtaccgagtgcccaaggtaagctgagaaattgcttaccttggcagtgtttggtgaggcatctgctgtagtagaaggacctggcctgggagttatgtggctaggaggcaatgtcactcagtagttagaagcacagactctgcagtcagacagtcctgggtttgagttctggctccaccatttagtagtttgggacattgggcaagttacttaaccactttctgatccttagcttcctcatctataaaatgggaatatcagtaaatctgtggggtgctataataaataaaacagatatcctttaaggtctttggagagcctaaagcaagcagaaggaaataaagagaggagcagaaatccatgaaatagaaaacagttgaaaaaaagcaatgaaaccaaaagctggttctttgaaaaaaaatcagtgaaattgataaacctctagc

SEQ ID NO: 75858 - DNA, 970 bp, Homo sapiens
gaagcgcacgatggcgcgctcaatgcggttggcctcttttcactgatggtgcccttctcttctgacctgctgaaccttggtgtccatgtcctggagacgggggcagggaccccttttctgggatcagcatgcagctcagatggtattgcctcccaaatgaacacagctgggctaccccaggtcaggtgcacacccgagtgtagctgtgacaaatacaacgacttcatcgaggccaaccgcattgaggacgcgcgggagcgaatgaggacgctgcggaagctgatccgggatctcccaggacactactatgaaacgctcaaattccttgtgggccatctcaagaccatcgctgaccactctgagaaaaacaagatggaaccccggaacctggccctggtctttgggccgacactggtgaggacgtctgaggacaacatgacagacatggtgacccacatgcctgaccgctacaagatcgtggagacactgatccagcactcagactggttcttcagtgacgaagaggacaagggagagagaacccctgtgggcgacaaggagcctcaggcagtgcccaacattgagtacctcctgcccaacattggcaggacagtgccccctggcgacccggggtcagattctaccacctgtagttcagccaagtccaagggttcgtgggcccccaagaaggagccgtacgcccgggagatgctggcgatctccttcatctcggccgtcaaccgcaagcgcaagaagcggcgggaggcgcgggggctgggcagcagcaccgacgacgactcggagcaggaggcgcacaagcctggggcgggggccacagcgccggggactcaggagcggccgcaggggccgctgcctggcgccgtcgcccccgaggcccccggacgcctcagtcccccggcggcgccggaggagcggccggccgcggacacgcgctccattgtgtcgggct

SEQ ID NO: 75859 - DNA, 2411 bp, Homo sapiens
  misc_feature (312)..(312): n is a, c, g, or t
  misc_feature (321)..(321): n is a, c, g, or t
  misc_feature (329)..(329): n is a, c, g, or t
  misc_feature (335)..(335): n is a, c, g, or t
  misc_feature (354)..(354): n is a, c, g, or t
  misc_feature (358)..(358): n is a, c, g, or t
  misc_feature (374)..(374): n is a, c, g, or t
  misc_feature (386)..(386): n is a, c, g, or t
  misc_feature (2363)..(2364): n is a, c, g, or t
cagactggagtgccagcaggccttgtcacactggctgtcaaaccaggtaccccgccgggcgggggagagacggtgcccagccatggccccccgggcccgcagcgcctcccaggaccggttggaggaggtggctgccccccgcccgtggccctgctccacctcccaggatgctttgagccagctgggccatggagggctggcaccgagctcgctcagatgactacttgagccgggccacccgttctgccgaggcactggggccaggggcactggtgtcaccccgctttgagcggtgtggctgggcttcccagncgttcgtcntgcccgcnaccccncgcctgcccaactctgggnaccntgccagggccccaggnccccaacccccngtctggcctgcagggcctggatgacctcgggtacatcggctaccggagctacagcccatcattccagcgaccggaccggcctcctccatgcgctctccttccgggactcaccctttggggggctgcctaccttcaacctggcccagtcccctgcgtcattcccaccagaggcctccgagccacccagggttgtacggccggaacccagcacccgggccctggagcctcctgcggaggatcgcggcgatgaggtggtcctgaggcagaagcccccgacgggccgcaaggttcagctgacccccgcaagacagatgaaccttggatttggtgacgagtccccagagccagaggccagtgggcgaggggaacgcctgggcaggaaggtggcccctttggccaccaccgaagactctctggcttccatcccctttattgatgagcccaccagccccagcattgacctccaagccaagcacgtccctgcctctgctgtggtctccagtgccatgaactcagcccctgtcctgggcaccagcccatcttccccgaccttcactttcaccctcggacgccattactcgcaggactgcagcagcatcaaggctggccgccgctcctcctacctgctggccatcaccacggagcgctccaagtcctgcgatgatggactcaacaccttccgcgacgagggccgggttctgcggcgcctgccaaaccgcatacccagcctgcggatgctccggagcttcttcaccgacgggtccttggatagctggggcacctctgaagatgctgacgctccttctaagcgacactcaacctctgacctctcagatgcgaccttcagcgatatcaggagagaaggctggttgtattataagcagattctcaccaagaaggggaagaaagcgggcagcggcctgcgccagtggaagcgggtgtacgccgcgctgcgggcgcgctcgctctcgctgagcaaggagcggcgggagcccgggccggcggcggcgggggctgcggcggccggcgcaggtgaggacgaggcggcgcccgtctgcatcggctcctgcctcgtggacatctcctacagcgagaccaagaggaggcacgtgttccggctgaccaccgctgacttctgtgaatatctctttcaggctgaggaccgggatgacatgctgggctggatcagagcgatccgggagaacagcagggccgagggcgaggaccccggctgtgccaaccaagctctgatcagcaagaagcttaatgattatcgcaaagtgagccatagctctgggcccaaagctgattcctcccccaaaggctctcgcggcctggggggcctcaagtctgagttcctcaagcagagtgcggcacgtggcctcaggactcaggacctgcccgcagggagcaaggatgacagtgctgcagcccccaaaaccccctggggcatcaacatcatcaagaaaaataagaaggccgctccgagggcgtttggggtcaggctggaggagtgccagccagccacggagaaccagcgcgtccccttaatcgtggctgcatgctgtcgcattgtggaggcacgagggctggagtccacaggcatttaccgagtgcccggcaacaatgcagtggtgtccagcctacaggagcagctcaaccgcgggcctggtgacatcaacctgcaggatgagcgctggcaagacctcaatgtgatcagcagcctgctcaagtccttcttccgaaagctgcccgagcctcttttcactgatggtgcccttctcttctgacctgctgaaccttggtgtccatgtcctggagacgggggcagggaccccttttctgggatcagcatgcagctcagatggtattgcctcccaaatgaacacagctgggctaccccaggtcaggtgcacacccgagtgtagctgtgacaaatacaacgacttcatcgaggccaaccgcattgaggacgtnnttcctggttacaaggatactctagaataactatgagctgtacgtcgc

SEQ ID NO: 75860 - DNA, 2386 bp, Homo sapiens
  misc_feature (312)..(312): n is a, c, g, or t
  misc_feature (321)..(321): n is a, c, g, or t
  misc_feature (329)..(329): n is a, c, g, or t
  misc_feature (335)..(335): n is a, c, g, or t
  misc_feature (354)..(354): n is a, c, g, or t
  misc_feature (358)..(358): n is a, c, g, or t
  misc_feature (374)..(374): n is a, c, g, or t
  misc_feature (386)..(386): n is a, c, g, or t
cagactggagtgccagcaggccttgtcacactggctgtcaaaccaggtaccccgccgggcgggggagagacggtgcccagccatggccccccgggcccgcagcgcctcccaggaccggttggaggaggtggctgccccccgcccgtggccctgctccacctcccaggatgctttgagccagctgggccatggagggctggcaccgagctcgctcagatgactacttgagccgggccacccgttctgccgaggcactggggccaggggcactggtgtcaccccgctttgagcggtgtggctgggcttcccagncgttcgtcntgcccgcnaccccncgcctgcccaactctgggnaccntgccagggccccaggnccccaacccccngtctggcctgcagggcctggatgacctcgggtacatcggctaccggagctacagcccatcattccagcgaccggaccggcctcctccatgcgctctccttccgggactcaccctttggggggctgcctaccttcaacctggcccagtcccctgcgtcattcccaccagaggcctccgagccacccagggttgtacggccggaacccagcacccgggccctggagcctcctgcggaggatcgcggcgatgaggtggtcctgaggcagaagcccccgacgggccgcaaggttcagctgacccccgcaagacagatgaaccttggatttggtgacgagtccccagagccagaggccagtgggcgaggggaacgcctgggcaggaaggtggcccctttggccaccaccgaagactctctggcttccatcccctttattgatgagcccaccagccccagcattgacctccaagccaagcacgtccctgcctctgctgtggtctccagtgccatgaactcagcccctgtcctgggcaccagcccatcttccccgaccttcactttcaccctcggacgccattactcgcaggactgcagcagcatcaaggctggccgccgctcctcctacctgctggccatcaccacggagcgctccaagtcctgcgatgatggactcaacaccttccgcgacgagggccgggttctgcggcgcctgccaaaccgcatacccagcctgcggatgctccggagcttcttcaccgacgggtccttggatagctggggcacctctgaagatgctgacgctccttctaagcgacactcaacctctgacctctcagatgcgaccttcagcgatatcaggagagaaggctggttgtattataagcagattctcaccaagaaggggaagaaagcgggcagcggcctgcgccagtggaagcgggtgtacgccgcgctgcgggcgcgctcgctctcgctgagcaaggagcggcgggagcccgggccggcggcggcgggggctgcggcggccggcgcaggtgaggacgaggcggcgcccgtctgcatcggctcctgcctcgtggacatctcctacagcgagaccaagaggaggcacgtgttccggctgaccaccgctgacttctgtgaatatctctttcaggctgaggaccgggatgacatgctgggctggatcagagcgatccgggagaacagcagggccgagggcgaggaccccggctgtgccaaccaagctctgatcagcaagaagcttaatgattatcgcaaagtgagccatagctctgggcccaaagctgattcctcccccaaaggctctcgcggcctggggggcctcaagtctgagttcctcaagcagagtgcggcacgtggcctcaggactcaggacctgcccgcagggagcaaggatgacagtgctgcagcccccaaaaccccctggggcatcaacatcatcaagaaaaataagaaggccgctccgagggcgtttggggtcaggctggaggagtgccagccagccacggagaaccagcgcgtccccttaatcgtggctgcatgctgtcgcattgtggaggcacgagggctggagtccacaggcatttaccgagtgcccggcaacaatgcagtggtgtccagcctacaggagcagctcaaccgcgggcctggtgacatcaacctgcaggatgagcgctggcaagacctcaatgtgatcagcagcctgctcaagtccttcttccgaaagctgcccgagcctcttttcactgatggtgcccttctcttctgacctgctgaaccttggtgtccatgtcctggagacgggggcagggaccccttttctgggatcagcatgcagctcagatggtattgcctcccaaatgaacacagctgggctaccccaggtcaggtgcacacccgagtgtagctgtggtgctcgacgatatacaacgacatttatcgatggcctttacgaacgtgagtgacgtggcgcttgctg

SEQ ID NO: 75861 - DNA, 157 bp, Homo sapiens
caagacctcaatgtgatcagcagcctgctcaagtccttcttccgaaagctgcccgagcctcttttcactgatggtgagtaggaggtggaagtggggcggggaggggacaccagtccgtgcctcaccctgaccactacttttgcatttggtttgttgg

SEQ ID NO: 75862 - DNA, 2921 bp, Homo sapiens
  misc_feature (312)..(312): n is a, c, g, or t
  misc_feature (321)..(321): n is a, c, g, or t
  misc_feature (329)..(329): n is a, c, g, or t
  misc_feature (335)..(335): n is a, c, g, or t
  misc_feature (354)..(354): n is a, c, g, or t
  misc_feature (358)..(358): n is a, c, g, or t
  misc_feature (374)..(374): n is a, c, g, or t
  misc_feature (386)..(386): n is a, c, g, or t
cagactggagtgccagcaggccttgtcacactggctgtcaaaccaggtaccccgccgggcgggggagagacggtgcccagccatggccccccgggcccgcagcgcctcccaggaccggttggaggaggtggctgccccccgcccgtggccctgctccacctcccaggatgctttgagccagctgggccatggagggctggcaccgagctcgctcagatgactacttgagccgggccacccgttctgccgaggcactggggccaggggcactggtgtcaccccgctttgagcggtgtggctgggcttcccagncgttcgtcntgcccgcnaccccncgcctgcccaactctgggnaccntgccagggccccaggnccccaacccccngtctggcctgcagggcctggatgacctcgggtacatcggctaccggagctacagcccatcattccagcgaccggaccggcctcctccatgcgctctccttccgggactcaccctttggggggctgcctaccttcaacctggcccagtcccctgcgtcattcccaccagaggcctccgagccacccagggttgtacggccggaacccagcacccgggccctggagcctcctgcggaggatcgcggcgatgaggtggtcctgaggcagaagcccccgacgggccgcaaggttcagctgacccccgcaagacagatgaaccttggatttggtgacgagtccccagagccagaggccagtgggcgaggggaacgcctgggcaggaaggtggcccctttggccaccaccgaagactctctggcttccatcccctttattgatgagcccaccagccccagcattgacctccaagccaagcacgtccctgcctctgctgtggtctccagtgccatgaactcagcccctgtcctgggcaccagcccatcttccccgaccttcactttcaccctcggacgccattactcgcaggactgcagcagcatcaaggctggccgccgctcctcctacctgctggccatcaccacggagcgctccaagtcctgcgatgatggactcaacaccttccgcgacgagggccgggttctgcggcgcctgccaaaccgcatacccagcctgcggatgctccggagcttcttcaccgacgggtccttggatagctggggcacctctgaagatgctgacgctccttctaagcgacactcaacctctgacctctcagatgcgaccttcagcgatatcaggagagaaggctggttgtattataagcagattctcaccaagaaggggaagaaagcgggcagcggcctgcgccagtggaagcgggtgtacgccgcgctgcgggcgcgctcgctctcgctgagcaaggagcggcgggagcccgggccggcggcggcgggggctgcggcggccggcgcaggtgaggacgaggcggcgcccgtctgcatcggctcctgcctcgtggacatctcctacagcgagaccaagaggaggcacgtgttccggctgaccaccgctgacttctgtgaatatctctttcaggctgaggaccgggatgacatgctgggctggatcagagcgatccgggagaacagcagggccgagggcgaggaccccggctgtgccaaccaagctctgatcagcaagaagcttaatgattatcgcaaagtgagccatagctctgggcccaaagctgattcctcccccaaaggctctcgcggcctggggggcctcaagtctgagttcctcaagcagagtgcggcacgtggcctcaggactcaggacctgcccgcagggagcaaggatgacagtgctgcagcccccaaaaccccctggggcatcaacatcatcaagaaaaataagaaggccgctccgagggcgtttggggtcaggctggaggagtgccagccagccacggagaaccagcgcgtccccttaatcgtggctgcatgctgtcgcattgtggaggcacgagggctggagtccacaggcatttaccgagtgcccggcaacaatgcagtggtgtccagcctacaggagcagctcaaccgcgggcctggtgacatcaacctgcaggatgagcgctggcaagacctcaatgtgatcagcagcctgctcaagtccttcttccgaaagctgcccgagcctcttttcactgatgacaaatacaacgacttcatcgaggccaaccgcattgaggacgcgcgggagcgaatgaggacgctgcggaagctgatccgggatctcccaggacactactatgaaacgctcaaattccttgtgggccatctcaagaccatcgctgaccactctgagaaaaacaagatggaaccccggaacctggccctggtctttgggccgacactggtgaggacgtctgaggacaacatgacagacatggtgacccacatgcctgaccgctacaagatcgtggagacactgatccagcactcagactggttcttcagtgacgaagaggacaagggagagagaacccctgtgggcgacaaggagcctcaggcagtgcccaacattgagtacctcctgcccaacattggcaggacagtgccccctggcgacccggggtcagattctaccacctgtagttcagccaagtccaagggttcgtgggcccccaagaaggagccgtacgcccgggagatgctggcgatctccttcatctcggccgtcaaccgcaagcgcaagaagcggcgggaggcgcgggggctgggcagcagcaccgacgacgactcggagcaggaggcgcacaagcctggggcgggggccacagcgccggggactcaggagcggccgcaggggccgctgcctggcgccgtcgcccccgaggcccccggacgcctcagtcccccggcggcgccggaggagcggccggccgcggacacgcgctccattgtgtcgggct

SEQ ID NO: 75863 - DNA, 1032 bp, Homo sapiens
  misc_feature (32)..(32): n is a, c, g, or t
gagctgatctagaggatcccgaagcgcacganaggcgcgtccccttaatcgtggctgcatgctgtcgcattgtggaggcacgagggctggagtccacaggcatttaccgagtgcccggcaacaatgcagtggtgtccagcctacaggagcagctcaaccgcgggcctggtgacatcaacctgcaggatgagcgctggcaagacctcaatgtgatcagcagcctgctcaagtccttcttccgaaagctgcccgagcctcttttcactgatgacaaatacaacgacttcatcgaggccaaccgcattgaggacgcgcgggagcgaatgaggacgctgcggaagctgatccgggatctcccaggacactactatgaaacgctcaaattccttgtgggccatctcaagaccatcgctgaccactctgagaaaaacaagatggaaccccggaacctggccctggtctttgggccgacactggtgaggacgtctgaggacaacatgacagacatggtgacccacatgcctgaccgctacaagatcgtggagacactgatccagcactcagactggttcttcagtgacgaagaggacaagggagagagaacccctgtgggcgacaaggagcctcaggcagtgcccaacattgagtacctcctgcccaacattggcaggacagtgccccctggcgacccggggtcagattctaccacctgtagttcagccaagtccaagggttcgtgggcccccaagaaggagccgtacgcccgggagatgctggcgatctccttcatctcggccgtcaaccgcaagcgcaagaagcggcgggaggcgcgggggctgggcagcagcaccgacgacgactcggagcaggaggcgcacaagcctggggcgggggccacagcgccggggactcaggagcggccgcaggggccgctgcctggcgccgtcgcccccgaggcccccggacgcctcagtcccccggcggcgccggaggagcggccggccgcggacacgcgctccattgtgtcgggct

SEQ ID NO: 75864 - DNA, 3081 bp, Homo sapiens
  misc_feature (312)..(312): n is a, c, g, or t
  misc_feature (321)..(321): n is a, c, g, or t
  misc_feature (329)..(329): n is a, c, g, or t
  misc_feature (335)..(335): n is a, c, g, or t
  misc_feature (354)..(354): n is a, c, g, or t
  misc_feature (358)..(358): n is a, c, g, or t
  misc_feature (374)..(374): n is a, c, g, or t
  misc_feature (386)..(386): n is a, c, g, or t
cagactggagtgccagcaggccttgtcacactggctgtcaaaccaggtaccccgccgggcgggggagagacggtgcccagccatggccccccgggcccgcagcgcctcccaggaccggttggaggaggtggctgccccccgcccgtggccctgctccacctcccaggatgctttgagccagctgggccatggagggctggcaccgagctcgctcagatgactacttgagccgggccacccgttctgccgaggcactggggccaggggcactggtgtcaccccgctttgagcggtgtggctgggcttcccagncgttcgtcntgcccgcnaccccncgcctgcccaactctgggnaccntgccagggccccaggnccccaacccccngtctggcctgcagggcctggatgacctcgggtacatcggctaccggagctacagcccatcattccagcgaccggaccggcctcctccatgcgctctccttccgggactcaccctttggggggctgcctaccttcaacctggcccagtcccctgcgtcattcccaccagaggcctccgagccacccagggttgtacggccggaacccagcacccgggccctggagcctcctgcggaggatcgcggcgatgaggtggtcctgaggcagaagcccccgacgggccgcaaggttcagctgacccccgcaagacagatgaaccttggatttggtgacgagtccccagagccagaggccagtgggcgaggggaacgcctgggcaggaaggtggcccctttggccaccaccgaagactctctggcttccatcccctttattgatgagcccaccagccccagcattgacctccaagccaagcacgtccctgcctctgctgtggtctccagtgccatgaactcagcccctgtcctgggcaccagcccatcttccccgaccttcactttcaccctcggacgccattactcgcaggactgcagcagcatcaaggctggccgccgctcctcctacctgctggccatcaccacggagcgctccaagtcctgcgatgatggactcaacaccttccgcgacgagggccgggttctgcggcgcctgccaaaccgcatacccagcctgcggatgctccggagcttcttcaccgacgggtccttggatagctggggcacctctgaagatgctgacgctccttctaagcgacactcaacctctgacctctcagatgcgaccttcagcgatatcaggagagaaggctggttgtattataagcagattctcaccaagaaggggaagaaagcgggcagcggcctgcgccagtggaagcgggtgtacgccgcgctgcgggcgcgctcgctctcgctgagcaaggagcggcgggagcccgggccggcggcggcgggggctgcggcggccggcgcaggtgaggacgaggcggcgcccgtctgcatcggctcctgcctcgtggacatctcctacagcgagaccaagaggaggcacgtgttccggctgaccaccgctgacttctgtgaatatctctttcaggctgaggaccgggatgacatgctgggctggatcagagcgatccgggagaacagcagggccgagggcgaggaccccggctgtgccaaccaagctctgatcagcaagaagcttaatgattatcgcaaagtgagccatagctctgggcccaaagctgattcctcccccaaaggctctcgcggcctggggggcctcaagtctgagttcctcaagcagagtgcggcacgtggcctcaggactcaggacctgcccgcagggagcaaggatgacagtgctgcagcccccaaaaccccctggggcatcaacatcatcaagaaaaataagaaggccgctccgagggcgtttggggtcaggctggaggagtgccagccagccacggagaaccagcgcgtccccttaatcgtggctgcatgctgtcgcattgtggaggcacgagggctggagtccacaggcatttaccgagtgcccggcaacaatgcagtggtgtccagcctacaggagcagctcaaccgcgggcctggtgacatcaacctgcaggatgagcgctggcaagacctcaatgtgatcagcagcctgctcaagtccttcttccgaaagctgcccgagcctcttttcactgatggtgcccttctcttctgacctgctgaaccttggtgtccatgtcctggagacgggggcagggaccccttttctgggatcagcatgcagctcagatggtattgcctcccaaatgaacacagctgggctaccccaggtcaggtgcacacccgagtgtagctgtgacaaatacaacgacttcatcgaggccaaccgcattgaggacgcgcgggagcgaatgaggacgctgcggaagctgatccgggatctcccaggacactactatgaaacgctcaaattccttgtgggccatctcaagaccatcgctgaccactctgagaaaaacaagatggaaccccggaacctggccctggtctttgggccgacactggtgaggacgtctgaggacaacatgacagacatggtgacccacatgcctgaccgctacaagatcgtggagacactgatccagcactcagactggttcttcagtgacgaagaggacaagggagagagaacccctgtgggcgacaaggagcctcaggcagtgcccaacattgagtacctcctgcccaacattggcaggacagtgccccctggcgacccggggtcagattctaccacctgtagttcagccaagtccaagggttcgtgggcccccaagaaggagccgtacgcccgggagatgctggcgatctccttcatctcggccgtcaaccgcaagcgcaagaagcggcgggaggcgcgggggctgggcagcagcaccgacgacgactcggagcaggaggcgcacaagcctggggcgggggccacagcgccggggactcaggagcggccgcaggggccgctgcctggcgccgtcgcccccgaggcccccggacgcctcagtcccccggcggcgccggaggagcggccggccgcggacacgcgctccattgtgtcgggct

SEQ ID NO: 75865 - DNA, 2450 bp, Homo sapiens
  misc_feature (312)..(312): n is a, c, g, or t
  misc_feature (321)..(321): n is a, c, g, or t
  misc_feature (329)..(329): n is a, c, g, or t
  misc_feature (335)..(335): n is a, c, g, or t
  misc_feature (354)..(354): n is a, c, g, or t
  misc_feature (358)..(358): n is a, c, g, or t
  misc_feature (374)..(374): n is a, c, g, or t
  misc_feature (386)..(386): n is a, c, g, or t
cagactggagtgccagcaggccttgtcacactggctgtcaaaccaggtaccccgccgggcgggggagagacggtgcccagccatggccccccgggcccgcagcgcctcccaggaccggttggaggaggtggctgccccccgcccgtggccctgctccacctcccaggatgctttgagccagctgggccatggagggctggcaccgagctcgctcagatgactacttgagccgggccacccgttctgccgaggcactggggccaggggcactggtgtcaccccgctttgagcggtgtggctgggcttcccagncgttcgtcntgcccgcnaccccncgcctgcccaactctgggnaccntgccagggccccaggnccccaacccccngtctggcctgcagggcctggatgacctcgggtacatcggctaccggagctacagcccatcattccagcgaccggaccggcctcctccatgcgctctccttccgggactcaccctttggggggctgcctaccttcaacctggcccagtcccctgcgtcattcccaccagaggcctccgagccacccagggttgtacggccggaacccagcacccgggccctggagcctcctgcggaggatcgcggcgatgaggtggtcctgaggcagaagcccccgacgggccgcaaggttcagctgacccccgcaagacagatgaaccttggatttggtgacgagtccccagagccagaggccagtgggcgaggggaacgcctgggcaggaaggtggcccctttggccaccaccgaagactctctggcttccatcccctttattgatgagcccaccagccccagcattgacctccaagccaagcacgtccctgcctctgctgtggtctccagtgccatgaactcagcccctgtcctgggcaccagcccatcttccccgaccttcactttcaccctcggacgccattactcgcaggactgcagcagcatcaaggctggccgccgctcctcctacctgctggccatcaccacggagcgctccaagtcctgcgatgatggactcaacaccttccgcgacgagggccgggttctgcggcgcctgccaaaccgcatacccagcctgcggatgctccggagcttcttcaccgacgggtccttggatagctggggcacctctgaagatgctgacgctccttctaagcgacactcaacctctgacctctcagatgcgaccttcagcgatatcaggagagaaggctggttgtattataagcagattctcaccaagaaggggaagaaagcgggcagcggcctgcgccagtggaagcgggtgtacgccgcgctgcgggcgcgctcgctctcgctgagcaaggagcggcgggagcccgggccggcggcggcgggggctgcggcggccggcgcaggtgaggacgaggcggcgcccgtctgcatcggctcctgcctcgtggacatctcctacagcgagaccaagaggaggcacgtgttccggctgaccaccgctgacttctgtgaatatctctttcaggctgaggaccgggatgacatgctgggctggatcagagcgatccgggagaacagcagggccgagggcgaggaccccggctgtgccaaccaagctctgatcagcaagaagcttaatgattatcgcaaagtgagccatagctctgggcccaaagctgattcctcccccaaaggctctcgcggcctggggggcctcaagtctgagttcctcaagcagagtgcggcacgtggcctcaggactcaggacctgcccgcagggagcaaggatgacagtgctgcagcccccaaaaccccctggggcatcaacatcatcaagaaaaataagaaggccgctccgagggcgtttggggtcaggctggaggagtgccagccagccacggagaaccagcgcgtccccttaatcgtggctgcatgctgtcgcattgtggaggcacgagggctggagtccacaggcatttaccgagtgcccggcaacaatgcagtggtgtccagcctacaggagcagctcaaccgcgggcctggtgacatcaacctgcaggatgaggtgggtgaagctggggggtctgtggaaggggggctgagatggtgtgtgggtggtgctccgcttggagagttctgtggtctattgtgttgcatgcattgtgccctatgacatgcccggcattggtccagaacaccaagatgggcaagatgggacctgcccccgctggccagcccggggatgggcatcaccccaggctgaagctgaccaagtaaatgcagtcatggcctggggagctctgaggcagaggctcacagatggcagttttgtccgagtgtttaggatgagtagagttcaccaaaggccggtgaaagccaggtgagggcattccaggcagcagaatggcctgctcaatggtgtagacgcggaaagt

SEQ ID NO: 75866 - DNA, 452 bp, Homo sapiens
ccaacattggcaggacagtgccccctggcgacccggggtcaggtgagcgcaggggcctgggagtggggaggcgggaggttggacactgcattcctgagggtcccaggtgcctggccagatgcccagcttccctgtgccaccccagcggggccctcccctgccggccaccatggagatggggctggggggggccttctccctccctagggaagtccagcttgccccgtgcccacctcctgtctgcgcagctgccccgccccgggcagggtcggagctttgttcgccctctctcactggtttctttcctcagcctttaatttctcatgggctggctgtgtccttctgggcatgttcctctttttaatttttcttccttttctccttgcacccccgcctctccctcctcttctccccgtgctctcctcccacccccttctcttctcctccccctc

SEQ ID NO: 75867 - DNA, 433 bp, Homo sapiens
ttgcttgctgggggtactccattctaagaattttaaacctctatggcacgaatgcagttaatagactgttgacatgaaaattacatgagatagcacagttctgtctgtgagaacaagggtggtaagaaatgacattaaggcagctgggtgcagtggctcacatctgtaatcccagcactttggaaggccgaggcaggcagatcagaaggtcagaagatcatagaccatcctggctaacatggtgaaaccccgtctctactaaaaatacaaaaaaaaaaaaaaattagccgggcatggtggcaggcgtctgtagtcccagctactcaggaggctgaggcaggagaatggtgtgaacccgggaggcagaggttgcagtgagccgaggtcgtgccactgcactccagcctgggcgacaatgcaagactccatctca

SEQ ID NO: 75868 - DNA, 490 bp, Homo sapiens
ctaataaagacacacctgagactgggtaatttataaagaaaaagaggtttagtggactcacagttccacatggctggggaggcctcacactcatggcagaaggtgaaagacacgtcttacatggtggcagacaagagtgaacttgtccaaggaaacttccccttataaaaccatcagatcttgtgagacccattcactaccatgagaacggtatgggggaaaccactcccacaattcaattatctcccatcaagtccctcccacaacaggtggtagttatgggagctaaaattcaagatgagatttggctgggggcacagcaaaccatatcaaggaatttgtttctaattcgctaattctattcatccattcaccaaatgactattagcctctcctagaggatctctttcagatgcaatgaagagaaaaaacaaactgatactaaattgtaataggcagatcaagagaggagtcacactgcattcactgc

SEQ ID NO: 75869 - DNA, 591 bp, Homo sapiens
gtgagtgagtggccgtattgtgttatttcatttcgcatttcttgatagcgcctacatttgaacacattttcatatcacctcacatcacttagatatcctttccatgaagtacacattttggggttgggttgctgtagtaaaactaaaaaatgcagataaagtgtttgccatgaaaatattgaataaatgggaaatgctgaaaagagctgagacagcatgttttcgtgaagaaagggatgtattagtgaatggagacaataaatggattacaaccttgcactatgctttccaggatgacaataacttatacctggttatggattattatgttggtggggatttgcttactctactcagcaaatttgaagatagattgcctgaagatatggctagattttacttggctgagatggtgatagcaattgactcagttcatcagctacattatgtacacaggtaaaacagtccttcattgtacctggctgtgagttaccatgtaatatctagcaacagaggcctatttcttgccagatttattaattatggtcttggatacatttatcgtcaaccaaaaaaaattattttgagatg

SEQ ID NO: 75870 - DNA, 3433 bp, Homo sapiens
tccgcaagcctccgcctctgtgcgcgggactggaggagcctcgctgagcccagggcgcgacggcgagaggagagggaaggcgggggagggctggaagggagaggaagggagtggttgggagccgggctgccgcagcctctagtctcctcagccgcggaagcacccctcctcctgcgccgcggccgcctccctcctcgctgtggaaagatgcccttagcccaggggtgtgaagaagggggagaagtagctgccagagccgcccgcgccgccgccgcagctgctgctcgttgtgtcctttgaattcagagaagcacccccccgcctggggcgtcgggagcctccgggcggcggccgcggtgcgggtgtcggggagaccgggctctctgcccgcgcggcgcggcgcggctcggcccacgagcgaccaccgacatggagtgggctcgggcggccaagtagccgcttctccggagcccggtgccagtgccgcccgcagcccgccttccacccccggccgcgccgccggtcaggccctagggtgaagccgggaggaaaatgaagagttttcaccggaatccgttgaaaataggactgactgcaaagccttaaagaaagaaggacctcgggaggagaaacgaaaagccgcctccgggcaagacttggcgtgctccgagccgaggggctgcttcagggacctcgccccctccctttcccgctggagaaattgccgctgatgcattatccaagtggtggttgggaggatttgcagcaacatttttggttttccctcccccttctatgcattctgtttttttcctcccttttctgtttttcttcttcccgggaagtgaattgctgatgcaaatcggactttattcattaatgatgcaaccggattcgtttcaggattacgttgcacgagttgaattttgaatgaaggagaagagtttttttttttttttaaagaagtgttgactctctagttcgttgtacttttaattattattttatttaaatatacgacttaattgtattcttttaaaaatgcattaagtatatattttatggtaatttaccctcaaaatatatgtatatgggtgaaattgaagacgccttcagttaagtgaggttactggtgtgttggatgtttaattcagcaccagcattgcatgacagttgtttgaataacaagtggtttatttttaaaaccataccttttaaaatttaggttcagataatagtaaaagtcatcataataatttaaaggaaaaccagcagaaatcgaagcaaacatgtctggagaagtgcgtttgaggcagttggagcagtttattttggacgggcccgctcagaccaatgggcagtacttcagtgtggagacattactggatatactcatctgcctttatgatgaatgcaataattctccattgagaagagagaagaacattctcgaatacctagaatgggctaaaccatttacttctaaagtgaaacaaatgcgattacatagagaagactttgaaatattaaaggtgattggtcgaggagcttttggggaggttgctgtagtaaaactaaaaaatgcagataaagtgtttgccatgaaaatattgaataaatgggaaatgctgaaaagagctgagacagcatgttttcgtgaagaaagggatgtattagtgaatggagacaataaatggattacaaccttgcactatgctttccaggatgacaataacttatacctggttatggattattatgttggtggggatttgcttactctactcagcaaatttgaagatagattgcctgaagatatggctagattttacttggctgagatggtgatagcaattgactcagttcatcagctacattatgtacacagagacattaaacctgacaatatactgatggatatgaatggacatattcggttagcagattttggttcttgtctgaagctgatggaagatggaacggttcagtcctcagtggctgtaggaactccagattatatctctcctgaaatccttcaagccatggaagatggaaaagggagatatggacctgaatgtgactggtggtctttgggggtctgtatgtatgaaatgctttacggagaaacaccattttatgcagaatcgctggtggagacatacggaaaaatcatgaaccacaaagagaggtttcagtttccagcccaagtgactgatgtgtctgaaaatgctaaggatcttattcgaaggctcatttgtagcagagaacatcgacttggtcaaaatggaatagaagactttaagaaacacccatttttcagtggaattgattgggataatattcggaactgtgaagcaccttatattccagaagttagtagcccaacagatacatcgaattttgatgtagatgatgattgtttaaaaaattctgaaacgatgcccccaccaacacatactgcattttctggccaccatctgccatttgttggttttacatatactagtagctgtgtactttctgatcggagctgtttaagagttacggctggtcccacctcactggatcttgatgttaatgttcagaggactctagacaacaacttagcaactgaagcttatgaaagaagaattaagcgccttgagcaagaaaaacttgaactcagtagaaaacttcaagagtcaacacagactgtccaagctctgcagtattcaactgttgatggtccactaacagcaagcaaagatttagaaataaaaaacttaaaagaagaaattgaaaaactaagaaaacaagtaacagaatcaagtcatttggaacagcaacttgaagaagctaatgctgtgaggcaagaactagatgatgcttttagacaaatcaaggcttatgaaaaacaaatcaaaacgttacaacaagaaagagaagatctaaataaggaactagtccaggctagtgagcgattaaaaaaccaatccaaagagctgaaagacgcacactgtcagaggaaactggccatgcaggaattcatggagatcaatgagcggctaacagaattgcacacccaaaaacagaaacttgctcgccatgtccgagataaggaagaagaggtggacctggtgatgcaaaaagttgaaagcttaaggcaagaactgcgcagaacagaaagagccaaaaaagagctggaagttcatacagaagctctagctgctgaagcatctaaagacaggaagctacgtgaacagagtgagcactattctaagcaactggaaaatgaattggagggactgaagcaaaaacaaattagttactcaccaggagtatgcagcatagaacatcagcaagagataaccaaactaaagactgatttggaaaagaaaagtatcttttatgaagaagaattatctaaaagagaaggaatacatgcaaatgaaat

SEQ ID NO: 75871 - DNA, 3873 bp, Homo sapiens
tccgcaagcctccgcctctgtgcgcgggactggaggagcctcgctgagcccagggcgcgacggcgagaggagagggaaggcgggggagggctggaagggagaggaagggagtggttgggagccgggctgccgcagcctctagtctcctcagccgcggaagcacccctcctcctgcgccgcggccgcctccctcctcgctgtggaaagatgcccttagcccaggggtgtgaagaagggggagaagtagctgccagagccgcccgcgccgccgccgcagctgctgctcgttgtgtcctttgaattcagagaagcacccccccgcctggggcgtcgggagcctccgggcggcggccgcggtgcgggtgtcggggagaccgggctctctgcccgcgcggcgcggcgcggctcggcccacgagcgaccaccgacatggagtgggctcgggcggccaagtagccgcttctccggagcccggtgccagtgccgcccgcagcccgccttccacccccggccgcgccgccggtcaggccctagggtgaagccgggaggaaaatgaagagttttcaccggaatccgttgaaaataggactgactgcaaagccttaaagaaagaaggacctcgggaggagaaacgaaaagccgcctccgggcaagacttggcgtgctccgagccgaggggctgcttcagggacctcgccccctccctttcccgctggagaaattgccgctgatgcattatccaagtggtggttgggaggatttgcagcaacatttttggttttccctcccccttctatgcattctgtttttttcctcccttttctgtttttcttcttcccgggaagtgaattgctgatgcaaatcggactttattcattaatgatgcaaccggattcgtttcaggattacgttgcacgagttgaattttgaatgaaggagaagagtttttttttttttttaaagaagtgttgactctctagttcgttgtacttttaattattattttatttaaatatacgacttaattgtattcttttaaaaatgcattaagtatatattttatggtaatttaccctcaaaatatatgtatatgggtgaaattgaagacgccttcagttaagtgaggttactggtgtgttggatgtttaattcagcaccagcattgcatgacagttgtttgaataacaagtggtttatttttaaaaccataccttttaaaatttaggttcagataatagtaaaagtcatcataataatttaaaggaaaaccagcagaaatcgaagcaaacatgtctggagaagtgcgtttgaggcagttggagcagtttattttggacgggcccgctcagaccaatgggcagtacttcagtgtggagacattactggatatactcatctgcctttatgatgaatgcaataattctccattgagaagagagaagaacattctcgaatacctagaatgggctaaaccatttacttctaaagtgaaacaaatgcgattacatagagaagactttgaaatattaaaggtgattggtcgaggagcttttggggaggttgctgtagtaaaactaaaaaatgcagataaagtgtttgccatgaaaatattgaataaatgggaaatgctgaaaagagctgagacagcatgttttcgtgaagaaagggatgtattagtgaatggagacaataaatggattacaaccttgcactatgctttccaggatgacaataacttatacctggttatggattattatgttggtggggatttgcttactctactcagcaaatttgaagatagattgcctgaagatatggctagattttacttggctgagatggtgatagcaattgactcagttcatcagctacattatgtacacagagacattaaacctgacaatatactgatggatatgaatggacatattcggttagcagattttggttcttgtctgaagctgatggaagatggaacggttcagtcctcagtggctgtaggaactccagattatatctctcctgaaatccttcaagccatggaagatggaaaagggagatatggacctgaatgtgactggtggtctttgggggtctgtatgtatgaaatgctttacggagaaacaccattttatgcagaatcgctggtggagacatacggaaaaatcatgaaccacaaagagaggtttcagtttccagcccaagtgactgatgtgtctgaaaatgctaaggatcttattcgaaggctcatttgtagcagagaacatcgacttggtcaaaatggaatagaagactttaagaaacacccatttttcagtggaattgattgggataatattcggaactgtgaagcaccttatattccagaagttagtagcccaacagatacatcgaattttgatgtagatgatgattgtttaaaaaattctgaaacgatgcccccaccaacacatactgcattttctggccaccatctgccatttgttggttttacatatactagtagctgtgtactttctgatcggagctgtttaagagttacggctggtcccacctcactggatcttgatgttaatgttcagaggactctagacaacaacttagcaactgaagcttatgaaagaagaattaagcgccttgagcaagaaaaacttgaactcagtagaaaacttcaagagtcaacacagactgtccaagctctgcagtattcaactgttgatggtccactaacagcaagcaaagatttagaaataaaaaacttaaaagaagaaattgaaaaactaagaaaacaagtaacagaatcaagtcatttggaacagcaacttgaagaagctaatgctgtgaggcaagaactagatgatgcttttagacaaatcaaggcttatgaaaaacaaatcaaaacgttacaacaagaaagagaagatctaaataaggaactagtccaggctagtgagcgattaaaaaaccaatccaaagagctgaaagacgcacactgtcagaggaaactggccatgcaggaattcatggagatcaatgagcggctaacagaattgcacacccaaaaacagaaacttgctcgccatgtccgagataaggaagaagaggtggacctggtgatgcaaaaagttgaaagcttaaggcaagaactgcgcagaacagaaagagccaaaaaagagctggaagttcatacagaagctctagctgctgaagcatctaaagacaggaagctacgtgaacagagtgagcactattctaagcaactggaaaatgaattggagggactgaagcaaaaacaaattagttactcaccaggagtatgcagcatagaacatcagcaagagataaccaaactaaagactgatttggaaaagaaaagtatcttttatgaagaagaattatctaaaagagaaggaatacatgcaaatgaaataaaaaatcttaagaaagaactgcatgattcagaaggtcagcaacttgctctcaacaaagaaattatgattttaaaagacaaattggaaaaaaccagaagagaaagtcaaagtgaaagggaggaatttgaaagtgagttcaaacaacaatatgaacgagaaaaagtgttgttaactgaagaaaataaaaagctgacgagtgaacttgataagcttactactttgtatgagaacttaagtatacacaaccagcagttagaagaagaggttaaagatctagcagacaagaaagaatcagttgcacattgggaagcccaaatcacagaaataattcagtgggtcagcgatgaaaaggatgcacgagggtatcttcaggccttagcttctaaaatgactgaagaattggaggcattaagaaattccagcttgggtacacgagcaa

SEQ ID NO: 75872 - DNA, 2001 bp, Homo sapiens
gtgagtgagtggccgtattgtgttatttcatttcgcatttcttgatagcgcctacatttgaacacattttcatatcacctcacatcacttagatatcctttccatgaagtacacattttggggttgggttgctgtagtaaaactaaaaaatgcagataaagtgtttgccatgaaaatattgaataaatgggaaatgctgaaaagagctgagacagcatgttttcgtgaagaaagggatgtattagtgaatggagacaataaatggattacaaccttgcactatgctttccaggatgacaataacttatacctggttatggattattatgttggtggggatttgcttactctactcagcaaatttgaagatagattgcctgaagatatggctagattttacttggctgagatggtgatagcaattgactcagttcatcagctacattatgtacacagagacattaaacctgacaatatactgatggatatgaatggacatattcggttagcagattttggttcttgtctgaagctgatggaagatggaacggttcagtcctcagtggctgtaggaactccagattatatctctcctgaaatccttcaagccatggaagatggaaaagggagatatggacctgaatgtgactggtggtctttgggggtctgtatgtatgaaatgctttacggagaaacaccattttatgcagaatcgctggtggagacatacggaaaaatcatgaaccacaaagagaggtttcagtttccagcccaagtgactgatgtgtctgaaaatgctaaggatcttattcgaaggctcatttgtagcagagaacatcgacttggtcaaaatggaatagaagactttaagaaacacccatttttcagtggaattgattgggataatattcggaactgtgaagcaccttatattccagaagttagtagcccaacagatacatcgaattttgatgtagatgatgattgtttaaaaaattctgaaacgatgcccccaccaacacatactgcattttctggccaccatctgccatttgttggttttacatatactagtagctgtgtactttctgatcggagctgtttaagagttacggctggtcccacctcactggatcttgatgttaatgttcagaggactctagacaacaacttagcaactgaagcttatgaaagaagaattaagcgccttgagcaagaaaaacttgaactcagtagaaaacttcaagagtcaacacagactgtccaagctctgcagtattcaactgttgatggtccactaacagcaagcaaagatttagaaataaaaaacttaaaagaagaaattgaaaaactaagaaaacaagtaacagaatcaagtcatttggaacagcaacttgaagaagctaatgctgtgaggcaagaactagatgatgcttttagacaaatcaaggcttatgaaaaacaaatcaaaacgttacaacaagaaagagaagatctaaataaggaactagtccaggctagtgagcgattaaaaaaccaatccaaagagctgaaagacgcacactgtcagaggaaactggccatgcaggaattcatggagatcaatgagcggctaacagaattgcacacccaaaaacagaaacttgctcgccatgtccgagataaggaagaagaggtggacctggtgatgcaaaaagttgaaagcttaaggcaagaactgcgcagaacagaaagagccaaaaaagagctggaagttcatacagaagctctagctgctgaagcatctaaagacaggaagctacgtgaacagagtgagcactattctaagcaactggaaaatgaattggagggactgaagcaaaaacaaattagttactcaccaggagtatgcagcatagaacatcagcaagagataaccaaactaaagactgatttggaaaagaaaagtatcttttatgaagaagaattatctaaaagagaaggaatacatgcaaatgaaat

SEQ ID NO: 75873 - DNA, 428 bp, Homo sapiens
tatagtttgggatttttaaatattttgacaattcttaaatcataatttgaatttttgtgtaactaagaaacaccattatttatatctaatttgcatcacattttattaagaaaataattgatattgctctttcatttcagctaaaccatttacttctaaagtgaaacaaatgcgattacatagagaagactttgaaatattaaaggtgattggtcgaggagcttttggggaggtaagagattaagatttgatagaaggtctgctaattattttggaagctgttgaacacaattgtgagagaatttaacaagtattgttacttgttacttgttaaacaatatttgttaagttgtgattgatgtgattgattgtgctgttgtgattgatataatagctcagaaaataaagtgttgaatgaaatatttcta

SEQ ID NO: 75874 - DNA, 395 bp, Homo sapiens
aattagaaatttaaatgtaaagcaagaaatcatgtaagtcccagccaaaaatttgaataaatatgtaatctttgtgtgaagaaaactttttaaaaacagcaacaaagacagactattaaggaatgtaaactgaggaaaatatttgcaatatatggcaggcaaaaagttagtagatttaacatagaattttatttttgttaggatgtacaaaaaatgcagttatatgaatactcatttatattacagaaagaagttatttaaatattttattattcttgtagatgcactaatcttttgttattatttctatagcaaaaacaaattagttactcaccaggagtatgcagcatagaacatcagcaagagataaccaaactaaagactgatttggaaaa

SEQ ID NO: 75875 - DNA, 736 bp, Homo sapiens
ctgtcattcagctgacttttggctcgctaaatatagctgaatatcacaaattctaattgtcaaaaccctccctcattttaatttgaactagaaaactagacaaaatttggtaagaataaatttcagcaaactgtagaattatgatctaaaatatctcaaaattttatcccattttactttgaataatgttagaaatatactatgctaggctgtcagttggatccttttagtactacataagtaagttataaattacttaaattgctctcagtactttcagagaaagctaacattaccataattttggaaaaattagactgacctaaaagcagctcctctgctccttttcaaatctcctcctggttcagcctgcctgcctccacttctgcctccaccatgtccatcagggtgacccagcagccctacaaggtgttcaactctggcccctgggccttcagcagctcctcctacatgagcaggcccagtgcccacatcagctccttgattgtctcccgagtgggcagcagcagcaccagcttccagggtggcctgggtgccggcatgggtctgccactgcactccagcctggctaacagagcgagactgtctcaaaaaaaaaaaaaaagaataaataataataatagtaattataactgatatgccaggaaaggagggaaaatggaatcatataaaatgctcatttaaaaccataaaaggcagaaaaagaatggaaggc

SEQ ID NO: 75876 - DNA, 503 bp, Homo sapiens
cttgaatttagaaagagcgggtgggtggggtgatcagctgggcctcttctgtgcatggtagagcacatttcagaattgtgtgtgtatcagtggtcactgtaatttaagaaaaaagaacaagaattcagaaaattatatcctatccgaaaaaaaggctactctaatgttcctgatgacttcattatcaactggagttatttatttttctaagaatgttatctttggagataattttcatcagtgagtcaacctttgtttgcttgcattggtttcaccttctattattttttacccatgactgtcagcttttaccacttactgaaccctgacggaagaaggacgtctgctcattgacatgctgacaacctgataagtcaccccacacacataccacacacacacgtgcacatccactcattcgactcgctcagacccagtggctagtgtcgatttttctctaaagttgactatataataatcacttcatttcccagaaaaaaatg

SEQ ID NO: 75877 - DNA, 373 bp, Homo sapiens
ctcagcctcccaatgtgctgggattacaggtgtgagctactgcacccgggttgcacagcttttaatatgtttattagcaatctggatttctgcttttgtgaagtactttcttaactcttgagtccatttttcttttaggttatcttcttcttaatgattcaagggcattctttaaatatcttgtttatgagcccctttattctttatatgtgttgcaaatttttttcctatttatgactcctaatttcacactattaggttaatattaaagctagtttttatgtagtcaaatttatccatcttcctttatggttataaaatcattcctgaagcattgtttccacctgaaagtcacatgagaatgtcactcata

SEQ ID NO: 75878 - DNA, 1266 bp, Homo sapiens
ggtggagttaaatcaggttcccggttgattttggcgtttcaggaatccgtgcttaccaagtgtaaattgcattgctacttgttgaggtaaaaactaaaaatacagttggagtgtagagggagcagtttcggttatcctggtgacaggtgggatttttagaacagcaactttactaaaacatactgggtttttaaaaattctgtacttagttttataggtgtactctaaggaaatgcaacttatgggtgttcaattttatatgagtaaggagtgtgtgtttacctgagtgatcctcctgtatcttaggattgttttaggcattaaatttccttagtgaactgaaactattttgatttatacccatctcttaacacacatgcggcaaagtggcctccttgtttttgacattttcctagaattttctgacagtcttaccattgtttgtaatttaaaatgtttgtttgaatttttttttttttttgagacagtctcacgctgtcgcccaggctggagtgcagtggcgcgatttcggctcatttcaacctctgccaccctggttcaaaagattctcccgtctcagcctcccgagtagctgggattacagacgcccgccaccgcgccgtgttaatttttgtagttttcgtagagacggggttttgccatgttggccagactggatcacgaggtcaggagatggagactatctcttgagcctggtgtggtggcgggcgcctgcagtcccagctactcccgaggctgagacaggagaatcgcttgaacccgggaggtggaggttgcctgggcgacagagagagactctctccaaaaaaacaaaacaaaaaaaacacataagcaaacaactatacaagcagtataaagcatgtctaatactgccatatcacaatggcatatttcaatagggaaatggtattttaaataccattttttaaaaaccttttattctggaaaacatgcgaaactcgaatagtatggagaaccccatgtgttagtcactcacttagctttgacaattattaactcatagccaaggtcggttttgtttcatgttgtatccccccacacaaactagattattttgaaacaaatcttaaacattgtgtcacaacattagcgattttgacttttaccagattgccccagattaaggtcacaaaatttacttttagtagaataatagttctcatttttgtttgttgggcttcccttctctgtttatacatgatttctgtacagcagaaaagaaga

SEQ ID NO: 75879 - DNA, 329 bp, Homo sapiens
ctgggtaatttataataaacataaatttatgatgcatgcacttgctctccccaagggaccaaggacaagcctgctacgtactaccacccatggtaaccccacccatacaattggcagagcatacacttctccaaggactgaggaccagttaaccaaatgcctagcaaaactgtgccactacctccataaatgcccacagtctacatcactgaggaactcaaatatgtcactgatttgattaaagtcaaagaaatcacatgaagactacactcctgtgtccaccaagaacaaaaggtgaagcatcctacccaattgacactataggccac

SEQ ID NO: 75880 - DNA, 281 bp, Homo sapiens
gcagtcttgagggacatacaggagtttaggcactaggggacagaatgtgctgaggtccagagccaagaaagcatgactttgaaagctctgcaaatacagaaacacttcattatggttggagtatgaaaggaaagttggccaaaaatgagactaacgtaggagtttgacgattttaatgtccaacatttcaaagcctttgatgtaaagaacatttaaaggtaacagaatagtatctatttgagtcaaatatgacaggaataatatctgtgatgctcaaaggg

SEQ ID NO: 75881 - DNA, 762 bp, Homo sapiens
gcagataaatgctgatactgacacttctcaccagaaaaagagaaatacccatcatgaggaagagaaatgacttttgttcagttatgctcccgggtcccctttcactggagggatatctcagctttctgagcccctggttactgcaatcctcggttccagaacccagcaattcctatcatcacaattgtttcaagtcttatccaagccctgtatatttcagatcatccttaatttcttgttctgtacccagaggagatcaggaaaacctttaagtctctatgtgaggcaaatacatcctcctcactgccccagccccatgtgattgatgaagcaactgaggaagagaagtagggtgcttctggcactggaggagcgcagtgctgagaaactccgggctccattcggaaatagcactgatttcttagtgtacttttttttggtgttaatatagaaaacatcaaaaacacagttaaaagaatgaagcatgtctacatacgtgtggccagaaagactgaccagaagctggtagcagtgagggatgacagtgcttgcccctgggttgaatagtggaagagttaggggggaaacagtctgctctttgagaccctttcaatttcatgtgatggatttacagagacagatgaattaaacattatataaaaaaggaataaaaccactggtaggatctgtattccaggaagaaaaaagcatattacataataggtcaatgcacagaaataaaaaaaggaatttaactagagc

SEQ ID NO: 75882 - DNA, 383 bp, Homo sapiens
aatatcttgatgaaatgcacaggaatatctgcaaggtcaatgtttcatggacatttatttaggagaagtcattaaaaatgtattttttcctagtccgttgtgacagtatttggttcttaggtgcatgagttttagcaggaggattgcattattcaccttctgagccttgacagaaactgcttattttccgtaatgtggtcaatacatgtgtagtttctgaactgtaaaatccacagagaattaatactttgcagttattgctagatgggataagcaagcctattatgtcagcaaaattgatgattccttaatatgggctaaagtctccacctacttaattttctctaaaaccaagacattagtggtttgctttaaagattcaa

SEQ ID NO: 75883 - DNA, 549 bp, Homo sapiens
agtcctaagcagacttaaagccaagaaaataagaagaggaaagagagagggcctgccttaaccagctgtggtgctgacttggacaattccaggtcaagaggaactgtctactttcgactttgtgtgatagtaactttttaagcagtggaccgggagcccaagactcagatgcagcaagctttgcaaggctgacgagagctgagatcttcagtggccgatgggtacagggctgctgggagcgtagccacgtctgctccaaggtggcttgaatgaggcagtgcccaagtccttttgactggctgaggtgagcctgtggctcagtcacactttgtccctctcgtaataagtgcatttcccagacagcagctccttggtgtcatgcaactgaggaacctaattggctgggtgggttgttcccatccaacttccacctgtcacgaaggttgctttttcagatcagtctccacagctaccatcttgtcgggcacagagccgggcatcaacaagtgtatgttgaataaagaatgaattgatgaaatgaagtgaatg

SEQ ID NO: 75884 - DNA, 393 bp, Homo sapiens
tgggggattctccaaggtggcatggacatacaggatggaaatgggagacgtgtcaggcctggagatatgggttttggaacaacctgcattaaaattggaaggattagagagagtaggtgagatctccgagacagaggaaacagagcgaggaagctaagacctaggctggggcaaatgtctgaatttacctgagtgggggaagacagagaagctggcatgttggacagagatgactggtcaccaagacagaaggaagaatcaggccgtttaacaggatcaagagggtctagtgtttaaagagagatctttccaactgctacaggaaagtaaaatgttatggctccagacacctgctgaaattggtgcatgatcccctcaaagacagtgtttcct

SEQ ID NO: 75885 - DNA, 390 bp, Homo sapiens
ttttagtagagacggggtttcaccatgttggccaggctggtcacgaacttgacctcaagtgatcgacctgcctggcctctcaaagtgctgggattacaggtatgagccaccatgcctgacctgttcctgtattttctaattctctttatacttaggttctctatcacacctgaatgcaccaacacttatagttaaaatttagaaagtgcactcaagtctaacatgttggaagactggattgtaatttgagtcaacctgttattttgtacttggttcaaagtcagtcaatactattttttatatctatggcacatttatgttactagtactgcagtagatttttaacaacttcgtgtcttaggggagatactctgttaatttcaaataggt

SEQ ID NO: 75886 - DNA, 3478 bp, Homo sapiens
agagcagcttccggcgtggctggtgtaggcgggtggagaaggatcggggccctcgccgctctgtctcattccctcgcgctctctcgggcaacatggcgggtgtggaggaggtagcggcctccgggagccacctgaatggcgacctggatccagacgacagggaagaaggagctgcctctacggctgaggaagcagccaagaaaaaaagacgaaagaagaagaagagcaaagggccttctgcagcaggggaacaggaacctgataaagaatcaggagcctcagtggatgaagtagcaagacagttggaaagatcagcattggaagataaagaaagagatgaagatgatgaagatggagatggcgatggagatggagcaactggaaagaagaagaaaaagaagaagaagaagagaggaccaaaagttcaaacagaccctccctcagttccaatatgtgacctgtatcctaatggtgtatttcccaaaggacaagaatgcgaatacccacccacacaagatgggcgaacagctgcttggagaactacaagtgaagaaaagaaagcattagatcaggcaagtgaagagatttggaatgattttcgagaagctgcagaagcacatcgacaagttagaaaatacgtaatgagctggatcaagcctgggatgacaatgatagaaatctgtgaaaagttggaagactgttcacgcaagttaataaaagagaatggattaaatgcaggcctggcatttcctactggatgttctctcaataattgtgctgcccattatactcccaatgccggtgacacaacagtattacagtatgatgacatctgtaaaatagactttggaacacatataagtggtaggattattgactgtgcttttactgtcacttttaatcccaaatatgatacgttattaaaagctgtaaaagatgctactaacactggaataaagtgtgctggaattgatgttcgtctgtgtgatgttggtgaggccatccaagaagttatggagtcctatgaagttgaaatagatgggaagacatatcaagtgaaaccaatccgtaatctaaatggacattcaattgggcaatatagaatacatgctggaaaaacagtgccgattgtgaaaggaggggaggcaacaagaatggaggaaggagaagtatatgcaattgaaacctttggtagtacaggaaaaggtgttgttcatgatgatatggaatgttcacattacatgaaaaattttgatgttggacatgtgccaataaggcttccaagaacaaaacacttgttaaatgtcatcaatgaaaactttggaacccttgccttctgccgcagatggctggatcgcttgggagaaagtaaatacttgatggctctgaagaatctgtgtgacttgggcattgtagatccatatccaccattatgtgacattaaaggatcatatacagcgcaatttgaacataccatcctgttgcgtccaacatgtaaagaagttgtcagcagaggagatgactattaaacttagtccaaagccacctcaacacctttattttctgagctttgttggaaaacatgataccagaattaatttgccacatgttgtctgttttaacagtggacccatgtaatacttttatccatgtttaaaaaagaaggaatttggacaaaggcaaaccgtctaatgtaattaaccaacgaaaaagctttccggacttttaaatgctaactgtttttccccttcctgtctaggaaaatgctataaagctcaaattagttaggaatgacttatacgttttgttttgaatacctaagagatactttttggatatttatattgccatattcttacttgaatgctttgaatgactacatccagttctgcacctataccctctggtgttgctttttaaccttcctggaatccattttctaaaaaataaagacattttcagatctgagagctacatctcaatgtctgtggttataattctggacaggataaatagctaaacttaatgtaggcaaatgcagagacatttatctgaaatgtagacctctacactgagacttttctggcatagtggctaaaacaagatctacacatgcataaaaagggacaatcaccttttcttcataaatatacagctttaggaatatttcaccattctttgtaggacatagtagtccttgtctttttttctcctgacattggaaagatgtgctaattgaaacttgacttagtaggaacattgtgccaactcaaaaccttgatttagtaaaaatctcaatgtttagatcctttgtccagtggtggtgtttatcagggaatgtattcagcttgctcagaaaaccaaaagggtattaaagccacaaaagcaaagaagaaaaaaaaaaacttcccatgtttggatcttgttctagttagaaaaattaagttgaaattcttggactttttcattcatgaggcaaatgctgtaataccttcccctttgacaggtttggattcttaacattactagtggtatttcaggaagtgacgttacagttactttccttatagcggctaagtgtattaagttgaatgtaacgatggtaatattaatttgtttgaactgaggcccactactgattctttgacaaattgaattcttatatttaaataattttatgggaatgttccatcataatttctaaatcatttatatatcaaggtagccttaatttgtatatgtttcagtacaatgagattttattgcctctgggatgctgtttagtttgtattttgttgaacgtttttatcctaggaagagaaacctatgacttgtgtacctagatcatctgttacattaaaaagctgctctttcagcattagagctataaatgaatgttaccttgtcgggaaacaatctaggttttagctgtatgagctatgtttattatggtgctaatgttcagtagccacatttgactaatgtctccattctctgtgatgctgtggctagcagcagagctcgccagttcatgcctggacatactgtcagggctgggccctccagctagctcctttggggttgagtccgtatctttttgatgtggaagtataaagcaagtatcttgatttctaaacccagcaattttagaattgacctttatgagtgaagacttttggagcttttaaagaccttggcagtcatgatctcaaaccaattaggagctccaagctcccttcccaggtaactgttgggagcaatggcatcactgtatgcccttgtaatggctggaagggacatgatcttgtaagtaggaaagctgtaactaaaaattgtattgtttgcttattagccatgtatctcttaaaattttgttatgtttacaacgatgtaccttattggcaacaagttattagtttgatgtttaacaatagtgcctttagtaaattattttacaactaaaaaaaattgttttttg

SEQ ID NO: 75887 - DNA, 3482 bp, Homo sapiens
gttcctagaggatccccgttattttccttctatattggggagaaggatcggggccctcgccgctctgtctcattccctcgcgctctctcgggcaacatggcgggtgtggaggaggtagcggcctccgggagccacctgaatggcgacctggatccagacgacagggaagaaggagctgcctctacggctgaggaagcagccaagaaaaaaagacgaaagaagaagaagagcaaagggccttctgcagcaggggaacaggaacctgataaagaatcaggagcctcagtggatgaagtagcaagacagttggaaagatcagcattggaagataaagaaagagatgaagatgatgaagatggagatggcgatggagatggagcaactggaaagaagaagaaaaagaagaagaagaagagaggaccaaaagttcaaacagaccctccctcagttccaatatgtgacctgtatcctaatggtgtatttcccaaaggacaagaatgcgaatacccacccacacaagatgggcgaacagctgcttggagaactacaagtgaagaaaagaaagcattagatcaggcaagtgaagagatttggaatgattttcgagaagctgcagaagcacatcgacaagttagaaaatacgtaatgagctggatcaagcctgggatgacaatgatagaaatctgtgaaaagttggaagactgttcacgcaagttaataaaagagaatggattaaatgcaggcctggcatttcctactggatgttctctcaataattgtgctgcccattatactcccaatgccggtgacacaacagtattacagtatgatgacatctgtaaaatagactttggaacacatataagtggtaggattattgactgtgcttttactgtcacttttaatcccaaatatgatacgttattaaaagctgtaaaagatgctactaacactggaataaagtgtgctggaattgatgttcgtctgtgtgatgttggtgaggccatccaagaagttatggagtcctatgaagttgaaatagatgggaagacatatcaagtgaaaccaatccgtaatctaaatggacattcaattgggcaatatagaatacatgctggaaaaacagtgccgattgtgaaaggaggggaggcaacaagaatggaggaaggagaagtatatgcaattgaaacctttggtagtacaggaaaaggtgttgttcatgatgatatggaatgttcacattacatgaaaaattttgatgttggacatgtgccaataaggcttccaagaacaaaacacttgttaaatgtcatcaatgaaaactttggaacccttgccttctgccgcagatggctggatcgcttgggagaaagtaaatacttgatggctctgaagaatctgtgtgacttgggcattgtagatccatatccaccattatgtgacattaaaggatcatatacagcgcaatttgaacataccatcctgttgcgtccaacatgtaaagaagttgtcagcagaggagatgactattaaacttagtccaaagccacctcaacacctttattttctgagctttgttggaaaacatgataccagaattaatttgccacatgttgtctgttttaacagtggacccatgtaatacttttatccatgtttaaaaaagaaggaatttggacaaaggcaaaccgtctaatgtaattaaccaacgaaaaagctttccggacttttaaatgctaactgtttttccccttcctgtctaggaaaatgctataaagctcaaattagttaggaatgacttatacgttttgttttgaatacctaagagatactttttggatatttatattgccatattcttacttgaatgctttgaatgactacatccagttctgcacctataccctctggtgttgctttttaaccttcctggaatccattttctaaaaaataaagacattttcagatctgagagctacatctcaatgtctgtggttataattctggacaggataaatagctaaacttaatgtaggcaaatgcagagacatttatctgaaatgtagacctctacactgagacttttctggcatagtggctaaaacaagatctacacatgcataaaaagggacaatcaccttttcttcataaatatacagctttaggaatatttcaccattctttgtaggacatagtagtccttgtctttttttctcctgacattggaaagatgtgctaattgaaacttgacttagtaggaacattgtgccaactcaaaaccttgatttagtaaaaatctcaatgtttagatcctttgtccagtggtggtgtttatcagggaatgtattcagcttgctcagaaaaccaaaagggtattaaagccacaaaagcaaagaagaaaaaaaaaaacttcccatgtttggatcttgttctagttagaaaaattaagttgaaattcttggactttttcattcatgaggcaaatgctgtaataccttcccctttgacaggtttggattcttaacattactagtggtatttcaggaagtgacgttacagttactttccttatagcggctaagtgtattaagttgaatgtaacgatggtaatattaatttgtttgaactgaggcccactactgattctttgacaaattgaattcttatatttaaataattttatgggaatgttccatcataatttctaaatcatttatatatcaaggtagccttaatttgtatatgtttcagtacaatgagattttattgcctctgggatgctgtttagtttgtattttgttgaacgtttttatcctaggaagagaaacctatgacttgtgtacctagatcatctgttacattaaaaagctgctctttcagcattagagctataaatgaatgttaccttgtcgggaaacaatctaggttttagctgtatgagctatgtttattatggtgctaatgttcagtagccacatttgactaatgtctccattctctgtgatgctgtggctagcagcagagctcgccagttcatgcctggacatactgtcagggctgggccctccagctagctcctttggggttgagtccgtatctttttgatgtggaagtataaagcaagtatcttgatttctaaacccagcaattttagaattgacctttatgagtgaagacttttggagcttttaaagaccttggcagtcatgatctcaaaccaattaggagctccaagctcccttcccaggtaactgttgggagcaatggcatcactgtatgcccttgtaatggctggaagggacatgatcttgtaagtaggaaagctgtaactaaaaattgtattgtttgcttattagccatgtatctcttaaaattttgttatgtttacaacgatgtaccttattggcaacaagttattagtttgatgtttaacaatagtgcctttagtaaattattttacaactaaaaaaaattgttttttg

SEQ ID NO: 75888 - DNA, 3425 bp, Homo sapiens
agagcagcttccggcgtggctggtgtaggcgggtggagaaggatcggggccctcgccgctctgtctcattccctcgcgctctctcgggcaacatggcgggtgtggaggaggtagcggcctccgggagccacctgaatggcgacctggatccagacgacagggaagaaggagctgcctctacggctgaggaagcagccaagaaaaaaagacgaaagaagaagaagagcaaagggccttctgcagcaggggaacaggaacctgataaagaatcaggagcctcagtggatgaagtagcaagacagttggaaagatcagcattggaagataaagaaagagatgaagatgatgaagatggagatggcgatggagatggagcaactggaaagaagaagaaaaagaagaagaagaagagaggaccaaaagttcaaacagaccctccctcagttccaatatgtgacctgtatcctaatggtgtatttcccaaaggacaagaatgcgaatacccacccacacaagatgggcgaacagctgcttggagaactacaagtgaagaaaagaaagcattagatcaggcaagtgaagagatttggaatgattttcgagaagctgcagaagcacatcgacaagttagaaaatacgtaatgagctggatcaagcctgggatgacaatgatagaaatctgtgaaaagttggaagactgttcacgcaagttaataaaagagaatggattaaatgcaggcctggcatttcctactggatgttctctcaataattgtgctgcccattatactcccaatgccggtgacacaacagtattacagtatgatgacatctgtaaaatagactttggaacacatataagtggtaggattattgactgtgcttttactgtcacttttaatcccaaatatgatacgttattaaaagctgtgtgatgttggtgaggccatccaagaagttatggagtcctatgaagttgaaatagatgggaagacatatcaagtgaaaccaatccgtaatctaaatggacattcaattgggcaatatagaatacatgctggaaaaacagtgccgattgtgaaaggaggggaggcaacaagaatggaggaaggagaagtatatgcaattgaaacctttggtagtacaggaaaaggtgttgttcatgatgatatggaatgttcacattacatgaaaaattttgatgttggacatgtgccaataaggcttccaagaacaaaacacttgttaaatgtcatcaatgaaaactttggaacccttgccttctgccgcagatggctggatcgcttgggagaaagtaaatacttgatggctctgaagaatctgtgtgacttgggcattgtagatccatatccaccattatgtgacattaaaggatcatatacagcgcaatttgaacataccatcctgttgcgtccaacatgtaaagaagttgtcagcagaggagatgactattaaacttagtccaaagccacctcaacacctttattttctgagctttgttggaaaacatgataccagaattaatttgccacatgttgtctgttttaacagtggacccatgtaatacttttatccatgtttaaaaaagaaggaatttggacaaaggcaaaccgtctaatgtaattaaccaacgaaaaagctttccggacttttaaatgctaactgtttttccccttcctgtctaggaaaatgctataaagctcaaattagttaggaatgacttatacgttttgttttgaatacctaagagatactttttggatatttatattgccatattcttacttgaatgctttgaatgactacatccagttctgcacctataccctctggtgttgctttttaaccttcctggaatccattttctaaaaaataaagacattttcagatctgagagctacatctcaatgtctgtggttataattctggacaggataaatagctaaacttaatgtaggcaaatgcagagacatttatctgaaatgtagacctctacactgagacttttctggcatagtggctaaaacaagatctacacatgcataaaaagggacaatcaccttttcttcataaatatacagctttaggaatatttcaccattctttgtaggacatagtagtccttgtctttttttctcctgacattggaaagatgtgctaattgaaacttgacttagtaggaacattgtgccaactcaaaaccttgatttagtaaaaatctcaatgtttagatcctttgtccagtggtggtgtttatcagggaatgtattcagcttgctcagaaaaccaaaagggtattaaagccacaaaagcaaagaagaaaaaaaaaaacttcccatgtttggatcttgttctagttagaaaaattaagttgaaattcttggactttttcattcatgaggcaaatgctgtaataccttcccctttgacaggtttggattcttaacattactagtggtatttcaggaagtgacgttacagttactttccttatagcggctaagtgtattaagttgaatgtaacgatggtaatattaatttgtttgaactgaggcccactactgattctttgacaaattgaattcttatatttaaataattttatgggaatgttccatcataatttctaaatcatttatatatcaaggtagccttaatttgtatatgtttcagtacaatgagattttattgcctctgggatgctgtttagtttgtattttgttgaacgtttttatcctaggaagagaaacctatgacttgtgtacctagatcatctgttacattaaaaagctgctctttcagcattagagctataaatgaatgttaccttgtcgggaaacaatctaggttttagctgtatgagctatgtttattatggtgctaatgttcagtagccacatttgactaatgtctccattctctgtgatgctgtggctagcagcagagctcgccagttcatgcctggacatactgtcagggctgggccctccagctagctcctttggggttgagtccgtatctttttgatgtggaagtataaagcaagtatcttgatttctaaacccagcaattttagaattgacctttatgagtgaagacttttggagcttttaaagaccttggcagtcatgatctcaaaccaattaggagctccaagctcccttcccaggtaactgttgggagcaatggcatcactgtatgcccttgtaatggctggaagggacatgatcttgtaagtaggaaagctgtaactaaaaattgtattgtttgcttattagccatgtatctcttaaaattttgttatgtttacaacgatgtaccttattggcaacaagttattagtttgatgtttaacaatagtgcctttagtaaattattttacaactaaaaaaaattgttttttg

SEQ ID NO: 75889 - DNA, 2643 bp, Homo sapiens
agagcagcttccggcgtggctggtgtaggcgggtggagaaggatcggggccctcgccgctctgtctcattccctcgcgctctctcgggcaacatggcgggtgtggaggaggtagcggcctccgggagccacctgaatggcgacctggatccagacgacagggaagaaggagctgcctctacggctgaggaagcagccaagaaaaaaagacgaaagaagaagaagagcaaagggccttctgcagcaggggaacaggaacctgataaagaatcaggagcctcagtggatgaagtagcaagacagttggaaagatcagcattggaagataaagaaagagatgaagatgatgaagatggagatggcgatggagatggagcaactggaaagaagaagaaaaagaagaagaagaagagaggaccaaaagttcaaacagaccctccctcagttccaatatgtgacctgtatcctaatggtgtatttcccaaaggacaagaatgcgaatacccacccacacaagatgggcgaacagctgcttggagaactacaagtgaagaaaagaaagcattagatcaggcaagtgaagagatttggaatgattttcgagaagctgcagaagcacatcgacaagttagaaaatacgtaatgagctggatcaagcctgggatgacaatgatagaaatctgtgaaaagttggaagactgttcacgcaagttaataaaagagaatggattaaatgcaggcctggcatttcctactggatgttctctcaataattgtgctgcccattatactcccaatgccggtgacacaacagtattacagtatgatgacatctgtaaaatagactttggaacacatataagtggtaggattattgactgtgcttttactgtcacttttaatcccaaatatgatacgttattaaaagctgtaaaagatgctactaacactggaataaagtgtgctggaattgatgttcgtctgtgtgatgttggtgaggccatccaagaagttatggagtcctatgaagttgaaatagatgggaagacatatcaagtgaaaccaatccgtaatctaaatggacattcaattgggcaatatagaatacatgctggaaaaacagtgccgattgtgaaaggaggggaggcaacaagaatggaggaaggagaagtatatgcaattgaaacctttggtagtacaggaaaaggtgttgttcatgatgatatggaatgttcacattacatgaaaaattttgatgttggacatgtgccaataaggcttccaagaacaaaacacttgttaaatgtcatcaatgaaaactttggaacccttgccttctgccgcagatggctggatcgcttgggagaaagtaaatacttgatggctctgaagaatctgtgtgacttgggcattgtagatccatatccaccattatgtgacattaaaggatcatatacagcgcaatttgaacataccatcctgttgcgtccaacatgtaaagaagttgtcagcagaggagatgactattaaacttagtccaaagccacctcaacacctttattttctgagctttgttggaaaacatgataccagaattaatttgccacatgttgtctgttttaacagtggacccatgtaatacttttatccatgtttaaaaaagaaggaatttggacaaaggcaaaccgtctaatgtaattaaccaacgaaaaagctttccggacttttaaatgctaactgtttttccccttcctgtctaggaaaatgctataaagctcaaattagttaggaatgacttatacgttttgttttgaatacctaagagatactttttggatatttatattgccatattcttacttgaatgctttgaatgactacatccagttctgcacctataccctctggtgttgctttttaaccttcctggaatccattttctaaaaaataaagacattttcattcttctcagcaccacacaacacctattccaaaatcgaccacatatttggaagtaaagctctcctcagcaaatgtaaaagaacagaaattataacaaactgtctctcagaccacagtataaccaaactagaactcaggattaagaaactcactcaaaaccacacaactacatggaaactgaacaacctgctcctgaatgactactggatacataacaaaatgaaggcagaaataaagatgttctttaaaaccaatgagaacaaagacacaacataccagaatctctgggacacattcaaagcagtgtgtagagggaaatttatagcactaaatgcccacaagagaaagcaggaaatatctaaaattgacaccctaacatcacaattaaaagaactagagaagcaagagcaaacacattgaaaagctaagagaaggcaagaaataactaagatcagagcagaactgaaggaaatagagacacaaaaaactcttcaaaaaatcaatgaatccaggagctggttttttgaaacgatcaacaaaattgatagacactagcaagactaataaagaagaaaggagagaagaatcaaatagaagcaataaaaaatgataaaggggatatcaccaccaatcccacagaaataaaccaccatcagagaatactacaaacacctctacgcaa

SEQ ID NO: 75890 - DNA, 2972 bp, Homo sapiens
gatccctgatgtttaggacatagactgttctgcccactcccatacccccaagctgtgtgcgtgttgctccaggaacacgagccaaccatgagtttatggaacggtatgtagcagtgctgctactgtgctgagagctaaaatggatggaaataaccacacttgaccatcccattattcccctggaagttgcaaggcttcagtagactccagagttcccaagtacttacattagacagattttgtcagtgcacttgttgtctatttagggaggcagattcctggtgcttaatacttcactatcctcccataatcctctgcaaagtattttaaacaggaagttacaatgtacaaagcagtttttctgattgtcccttgtttttaaatgttacaaaattaagttgctatgaaaattttgcactttgaataataaagcatatgttactctttttttagtgtgctggaattgatgttcgtctgtgtgatgttggtgaggccatccaagaagttatggagtcctatgaagttgaaatagatgggaagacatatcaagtgaaaccaatccgtaatctaaatggacattcaattgggcaatatagaatacatgctggaaaaacagtgccgattgtgaaaggaggggaggcaacaagaatggaggaaggagaagtatatgcaattgaaacctttggtagtacaggaaaaggtgttgttcatgatgatatggaatgttcacattacatgaaaaattttgatgttggacatgtgccaataaggcttccaagaacaaaacacttgttaaatgtcatcaatgaaaactttggaacccttgccttctgccgcagatggctggatcgcttgggagaaagtaaatacttgatggctctgaagaatctgtgtgacttgggcattgtagatccatatccaccattatgtgacattaaaggatcatatacagcgcaatttgaacataccatcctgttgcgtccaacatgtaaagaagttgtcagcagaggagatgactattaaacttagtccaaagccacctcaacacctttattttctgagctttgttggaaaacatgataccagaattaatttgccacatgttgtctgttttaacagtggacccatgtaatacttttatccatgtttaaaaaagaaggaatttggacaaaggcaaaccgtctaatgtaattaaccaacgaaaaagctttccggacttttaaatgctaactgtttttccccttcctgtctaggaaaatgctataaagctcaaattagttaggaatgacttatacgttttgttttgaatacctaagagatactttttggatatttatattgccatattcttacttgaatgctttgaatgactacatccagttctgcacctataccctctggtgttgctttttaaccttcctggaatccattttctaaaaaataaagacattttcagatctgagagctacatctcaatgtctgtggttataattctggacaggataaatagctaaacttaatgtaggcaaatgcagagacatttatctgaaatgtagacctctacactgagacttttctggcatagtggctaaaacaagatctacacatgcataaaaagggacaatcaccttttcttcataaatatacagctttaggaatatttcaccattctttgtaggacatagtagtccttgtctttttttctcctgacattggaaagatgtgctaattgaaacttgacttagtaggaacattgtgccaactcaaaaccttgatttagtaaaaatctcaatgtttagatcctttgtccagtggtggtgtttatcagggaatgtattcagcttgctcagaaaaccaaaagggtattaaagccacaaaagcaaagaagaaaaaaaaaaacttcccatgtttggatcttgttctagttagaaaaattaagttgaaattcttggactttttcattcatgaggcaaatgctgtaataccttcccctttgacaggtttggattcttaacattactagtggtatttcaggaagtgacgttacagttactttccttatagcggctaagtgtattaagttgaatgtaacgatggtaatattaatttgtttgaactgaggcccactactgattctttgacaaattgaattcttatatttaaataattttatgggaatgttccatcataatttctaaatcatttatatatcaaggtagccttaatttgtatatgtttcagtacaatgagattttattgcctctgggatgctgtttagtttgtattttgttgaacgtttttatcctaggaagagaaacctatgacttgtgtacctagatcatctgttacattaaaaagctgctctttcagcattagagctataaatgaatgttaccttgtcgggaaacaatctaggttttagctgtatgagctatgtttattatggtgctaatgttcagtagccacatttgactaatgtctccattctctgtgatgctgtggctagcagcagagctcgccagttcatgcctggacatactgtcagggctgggccctccagctagctcctttggggttgagtccgtatctttttgatgtggaagtataaagcaagtatcttgatttctaaacccagcaattttagaattgacctttatgagtgaagacttttggagcttttaaagaccttggcagtcatgatctcaaaccaattaggagctccaagctcccttcccaggtaactgttgggagcaatggcatcactgtatgcccttgtaatggctggaagggacatgatcttgtaagtaggaaagctgtaactaaaaattgtattgtttgcttattagccatgtatctcttaaaattttgttatgtttacaacgatgtaccttattggcaacaagttattagtttgatgtttaacaatagtgcctttagtaaattattttacaactaaaaaaaattgttttttg

SEQ ID NO: 75891 - DNA, 2182 bp, Homo sapiens
agagcagcttccggcgtggctggtgtaggcgggtggagaaggatcggggccctcgccgctctgtctcattccctcgcgctctctcgggcaacatggcgggtgtggaggaggtagcggcctccgggagccacctgaatggcgacctggatccagacgacagggaagaaggagctgcctctacggctgaggaagcagccaagaaaaaaagacgaaagaagaagaagagcaaagggccttctgcagcaggggaacaggaacctgataaagaatcaggagcctcagtggatgaagtagcaagacagttggaaagatcagcattggaagataaagaaagagatgaagatgatgaagatggagatggcgatggagatggagcaactggaaagaagaagaaaaagaagaagaagaagagaggaccaaaagttcaaacagaccctccctcagttccaatatgtgacctgtatcctaatggtgtatttcccaaaggacaagaatgcgaatacccacccacacaagatgggcgaacagctgcttggagaactacaagtgaagaaaagaaagcattagatcaggcaagtgaagagatttggaatgattttcgagaagctgcagaagcacatcgacaagttagaaaatacgtaatgagctggatcaagcctgggatgacaatgatagaaatctgtgaaaagttggaagactgttcacgcaagttaataaaagagaatggattaaatgcaggcctggcatttcctactggatgttctctcaataattgtgctgcccattatactcccaatgccggtgacacaacagtattacagtatgatgacatctgtaaaatagactttggaacacatataagtggtaggattattgactgtgcttttactgtcacttttaatcccaaatatgatacgttattaaaagctgtaaaagatgctactaacactggaataaagtgtgctggaattgatgttcgtctgtgtgatgttggtgaggccatccaagaagttatggagtcctatgaagttgaaatagatgggaagacatatcaagtgaaaccaatccgtaatctaaatggacattcaattgggcaatatagaatacatgctggaaaaacagtgccgattgtgaaaggaggggaggcaacaagaatggaggaaggagaagtatatgcaattgaaacctttggtagtacaggaaaaggtgttgttcatgatgatatggaatgttcacattacatgaaaaattttgatgttggacatgtgccaataaggcttccaagaacaaaacacttgttaaatgtcatcaatgaaaactttggaacccttgccttctgccgcagatggctggatcgcttgggagaaagtaaatacttgatggctctgaagaatctgtgtgacttgggcattgtagatccatatccaccattatgtgacattaaaggatcatatacagcgcaatttgaacataccatcctgttgcgtccaacatgtaaagaagttgtcagcagaggagatgactattaaacttagtccaaagccacctcaacacctttattttctgagctttgttggaaaacatgataccagaattaatttgccacatgttgtctgttttaacagtggacccatgtaatacttttatccatgtttaaaaaagaaggaatttggacaaaggcaaaccgtctaatgtaattaaccaacgaaaaagctttccggacttttaaatgctaactgtttttccccttcctgtctaggaaaatgctataaagctcaaattagttaggaatgacttatacgttttgttttgaatacctaagagatactttttggatatttatattgccatattcttacttgaatgctttgaatgactacatccagttctgcacctataccctctggtgttgctttttaaccttcctggaatccattttctaaaaaataaagacattttaaaaaaaaaaaaaaaaaaaaaaaaaaaaaaaaaaaataaaaaaaaaaaaaaaaaaaaaaaaaaaaaataaaaaaaaaaaaaaaaaaaacataaatgtcaattttttcatttcatattattaattttatcattatttttcttactctaatcgttcctaactcttcaactttataaattttcatctcatttatttatctcacattttttctctttttctattcct

SEQ ID NO: 75892 - DNA, 2001 bp, Homo sapiens
  misc_feature (1971)..(1971): n is a, c, g, or t
agagcagcttccggcgtggctggtgtaggcgggtggagaaggatcggggccctcgccgctctgtctcattccctcgcgctctctcgggcaacatggcgggtgtggaggaggtagcggcctccgggagccacctgaatggcgacctggatccagacgacagggaagaaggagctgcctctacggctgaggaagcagccaagaaaaaaagacgaaagaagaagaagagcaaagggccttctgcagcaggggaacaggaacctgataaagaatcaggagcctcagtggatgaagtagcaagacagttggaaagatcagcattggaagataaagaaagagatgaagatgatgaagatggagatggcgatggagatggagcaactggaaagaagaagaaaaagaagaagaagaagagaggaccaaaagttcaaacagaccctccctcagttccaatatgtgacctgtatcctaatggtgtatttcccaaaggacaagaatgcgaatacccacccacacaagatgggcgaacagctgcttggagaactacaagtgaagaaaagaaagcattagatcaggcaagtgaagagatttggaatgattttcgagaagctgcagaagcacatcgacaagttagaaaatacgtaatgagctggatcaagcctgggatgacaatgatagaaatctgtgaaaagttggaagactgttcacgcaagttaataaaagagaatggattaaatgcaggcctggcatttcctactggatgttctctcaataattgtgctgcccattatactcccaatgccggtgacacaacagtattacagtatgatgacatctgtaaaatagactttggaacacatataagtggtaggattattgactgtgcttttactgtcacttttaatcccaaatatgatacgttattaaaagctgtaaaagatgctactaacactggaataaagtgtgctggaattgatgttcgtctgtgtgatgttggtgaggccatccaagaagttatggagtcctatgaagttgaaatagatgggaagacatatcaagtgaaaccaatccgtaatctaaatggacattcaattgggcaatatagaatacatgctggaaaaacagtgccgattgtgaaaggaggggaggcaacaagaatggaggaaggagaagtatatgcaattgaaacctttggtagtacaggaaaaggtgttgttcatgatgatatggaatgttcacattacatgaaaaattttgatgttggacatgtgccaataaggcttccaagaacaaaacacttgttaaatgtcatcaatgaaaactttggaacccttgccttctgccgcagatggctggatcgcttgggagaaagtaaatacttgatggctctgaagaatctgtgtgacttgggcattgtagatccatatccaccattatgtgacattaaaggatcatatacagcgcaatttgaacataccatcctgttgcgtccaacatgtaaagaagttgtcagcagaggagatgactattaaacttagtccaaagccacctcaacacctttattttctgagctttgttggaaaacatgataccagaattaatttgccacatgttgtctgttttaacagtggacccatgtaatacttttatccatgtttaaaaaagaaggaatttggacaaaggcaaaccgtctaatgtaattaaccaacgaaaaagctttccggacttttaaatgctaactgtttttccccttcctgtctaggaaaatgctataaagctcaaattagttaggaatgacttatacgttttgttttgaatacctaagagatactttttggatatttatattgccatattcttacttgaatgctttgaatgactacatccagttctgcacctataccctctggtgttgctttttaaccttcctggaatccattttctaaaaaataaagacattttgatgcggccaancttttttttttgtatctgactccgcctcgc

SEQ ID NO: 75893 - DNA, 2085 bp, Homo sapiens
agagcagcttccggcgtggctggtgtaggcgggtggagaaggatcggggccctcgccgctctgtctcattccctcgcgctctctcgggcaacatggcgggtgtggaggaggtagcggcctccgggagccacctgaatggcgacctggatccagacgacagggaagaaggagctgcctctacggctgaggaagcagccaagaaaaaaagacgaaagaagaagaagagcaaagggccttctgcagcaggggaacaggaacctgataaagaatcaggagcctcagtggatgaagtagcaagacagttggaaagatcagcattggaagataaagaaagagatgaagatgatgaagatggagatggcgatggagatggagcaactggaaagaagaagaaaaagaagaagaagaagagaggaccaaaagttcaaacagaccctccctcagttccaatatgtgacctgtatcctaatggtgtatttcccaaaggacaagaatgcgaatacccacccacacaagatgggcgaacagctgcttggagaactacaagtgaagaaaagaaagcattagatcaggcaagtgaagagatttggaatgattttcgagaagctgcagaagcacatcgacaagttagaaaatacgtaatgagctggatcaagcctgggatgacaatgatagaaatctgtgaaaagttggaagactgttcacgcaagttaataaaagagaatggattaaatgcaggcctggcatttcctactggatgttctctcaataattgtgctgcccattatactcccaatgccggtgacacaacagtattacagtatgatgacatctgtaaaatagactttggaacacatataagtggtaggattattgactgtgcttttactgtcacttttaatcccaaatatgatacgttattaaaagctgtaaaagatgctactaacactggaataaagtgtgctggaattgatgttcgtctgtgtgatgttggtgaggccatccaagaagttatggagtcctatgaagttgaaatagatgggaagacatatcaagtgaaaccaatccgtaatctaaatggacattcaattgggcaatatagaatacatgctggaaaaacagtgccgattgtgaaaggaggggaggcaacaagaatggaggaaggagaagtatatgcaattgaaacctttggtagtacaggaaaaggtgttgttcatgatgatatggaatgttcacattacatgaaaaattttgatgttggacatgtgccaataaggcttccaagaacaaaacacttgttaaatgtcatcaatgaaaactttggaacccttgccttctgccgcagatggctggatcgcttgggagaaagtaaatacttgatggctctgaagaatctgtgtgacttgggcattgtagatccatatccaccattatgtgacattaaaggatcatatacagcgcaatttgaacataccatcctgttgcgtccaacatgtaaagaagttgtcagcagaggagatgactattaaacttagtccaaagccacctcaacacctttattttctgagctttgttggaaaacatgataccagaattaatttgccacatgttgtctgttttaacagtggacccatgtaatacttttatccatgtttaaaaaagaaggaatttggacaaaggcaaaccgtctaatgtaattaaccaacgaaaaagctttccggacttttaaatgctaactgtttttccccttcctgtctaggaaaatgctataaagctcaaattagttaggaatgacttatacgttttgttttgaatacctaagagatactttttggatatttatattgccatattcttacttgaatgctttgaatgactacatccagttctgcacctataccctctggtgtggtttacttctggatcattttaaaaaaaaaggggggctaagtacccagggcaataaggtacgtttgtaaagggctaagggggaaaaaagaggggggaagggggaagaagggtgaggaaccggggaatggaccacaagcgaaattggtgtgtgtataataacaagataataaataa

SEQ ID NO: 75894 - DNA, 1952 bp, Homo sapiens
agagcagcttccggcgtggctggtgtaggcgggtggagaaggatcggggccctcgccgctctgtctcattccctcgcgctctctcgggcaacatggcgggtgtggaggaggtagcggcctccgggagccacctgaatggcgacctggatccagacgacagggaagaaggagctgcctctacggctgaggaagcagccaagaaaaaaagacgaaagaagaagaagagcaaagggccttctgcagcaggggaacaggaacctgataaagaatcaggagcctcagtggatgaagtagcaagacagttggaaagatcagcattggaagataaagaaagagatgaagatgatgaagatggagatggcgatggagatggagcaactggaaagaagaagaaaaagaagaagaagaagagaggaccaaaagttcaaacagaccctccctcagttccaatatgtgacctgtatcctaatggtgtatttcccaaaggacaagaatgcgaatacccacccacacaagatgggcgaacagctgcttggagaactacaagtgaagaaaagaaagcattagatcaggcaagtgaagagatttggaatgattttcgagaagctgcagaagcacatcgacaagttagaaaatacgtaatgagctggatcaagcctgggatgacaatgatagaaatctgtgaaaagttggaagactgttcacgcaagttaataaaagagaatggattaaatgcaggcctggcatttcctactggatgttctctcaataattgtgctgcccattatactcccaatgccggtgacacaacagtattacagtatgatgacatctgtaaaatagactttggaacacatataagtggtaggattattgactgtgcttttactgtcacttttaatcccaaatatgatacgttattaaaagctgtaaaagatgctactaacactggaataaagtgtgctggaattgatgttcgtctgtgtgatgttggtgaggccatccaagaagttatggagtcctatgaagttgaaatagatgggaagacatatcaagtgaaaccaatccgtaatctaaatggacattcaattgggcaatatagaatacatgctggaaaaacagtgccgattgtgaaaggaggggaggcaacaagaatggaggaaggagaagtatatgcaattgaaacctttggtagtacaggaaaaggtgttgttcatgatgatatggaatgttcacattacatgaaaaattttgatgttggacatgtgccaataaggcttccaagaacaaaacacttgttaaatgtcatcaatgaaaactttggaacccttgccttctgccgcagatggctggatcgcttgggagaaagtaaatacttgatggctctgaagaatctgtgtgacttgggcattgtagatccatatccaccattatgtgacattaaaggatcatatacagcgcaatttgaacataccatcctgttgcgtccaacatgtaaagaagttgtcagcagaggagatgactattaaacttagtccaaagccacctcaacacctttattttctgagctttgttggaaaacatgataccagaattaatttgccacatgttgtctgttttaacagtggacccatgtaatacttttatccatgtttaaaaaagaaggaatttggacaaaggcaaaccgtctaatgtaattaaccaacgaaaaagctttccggacttttaaatgctaactgtttttccccttcctgtctaggaaaatgctataaagctcaaattagttaggaatgacttatacgttttgttttgaatacctaagagatactttttggatatttatattgccatattcttacttgaatgctttgaatgactacatccagttctgcacctataccctctggtgttgctttttaaccttcctggaaatactggacgggatcctctgg

SEQ ID NO: 75895 - DNA, 1721 bp, Homo sapiens
agagcagcttccggcgtggctggtgtaggcgggtggagaaggatcggggccctcgccgctctgtctcattccctcgcgctctctcgggcaacatggcgggtgtggaggaggtagcggcctccgggagccacctgaatggcgacctggatccagacgacagggaagaaggagctgcctctacggctgaggaagcagccaagaaaaaaagacgaaagaagaagaagagcaaagggccttctgcagcaggggaacaggaacctgataaagaatcaggagcctcagtggatgaagtagcaagacagttggaaagatcagcattggaagataaagaaagagatgaagatgatgaagatggagatggcgatggagatggagcaactggaaagaagaagaaaaagaagaagaagaagagaggaccaaaagttcaaacagaccctccctcagttccaatatgtgacctgtatcctaatggtgtatttcccaaaggacaagaatgcgaatacccacccacacaagatgggcgaacagctgcttggagaactacaagtgaagaaaagaaagcattagatcaggcaagtgaagagatttggaatgattttcgagaagctgcagaagcacatcgacaagttagaaaatacgtaatgagctggatcaagcctgggatgacaatgatagaaatctgtgaaaagttggaagactgttcacgcaagttaataaaagagaatggattaaatgcaggcctggcatttcctactggatgttctctcaataattgtgctgcccattatactcccaatgccggtgacacaacagtattacagtatgatgacatctgtaaaatagactttggaacacatataagtggtaggattattgactgtgcttttactgtcacttttaatcccaaatatgatacgttattaaaagctgtaaaagatgctactaacactggaataaagtgtgctggaattgatgttcgtctgtgtgatgttggtgaggccatccaagaagttatggagtcctatgaagttgaaatagatgggaagacatatcaagtgaaaccaatccgtaatctaaatggacattcaattgggcaatatagaatacatgctggaaaaacagtgccgattgtgaaaggaggggaggcaacaagaatggaggaaggagaagtatatgcaattgaaacctttggtagtacaggaaaaggtgttgttcatgatgatatggaatgttcacattacatgaaaaattttgatgttggacatgtgccaataaggcttccaagaacaaaacacttgttaaatgtcatcaatgaaaactttggaacccttgccttctgccgcagatggctggatcgcttgggagaaagtaaatacttgatggctctgaagaatctgtgtgacttgggcattgtagatccatatccaccattatgtgacattaaaggatcatatacagcgcaatttgaacataccatcctgttgcgtccaacatgtaaagaagttgtcagcagaggagatgactattaaacttagtccaaagccacctcaacacctttattttctgagctttgttggaaaacatgataccagaattaatttgccacatgttgtctgttttaacagtggacccatgtaatacttttatccatgtttaaaaaagaacgatgcggccggttcacgtatattttcatattttttttatttgaatatgatattata

SEQ ID NO: 75896 - DNA, 1648 bp, Homo sapiens
  misc_feature (1538)..(1538): n is a, c, g, or t
  misc_feature (1577)..(1577): n is a, c, g, or t
agagcagcttccggcgtggctggtgtaggcgggtggagaaggatcggggccctcgccgctctgtctcattccctcgcgctctctcgggcaacatggcgggtgtggaggaggtagcggcctccgggagccacctgaatggcgacctggatccagacgacagggaagaaggagctgcctctacggctgaggaagcagccaagaaaaaaagacgaaagaagaagaagagcaaagggccttctgcagcaggggaacaggaacctgataaagaatcaggagcctcagtggatgaagtagcaagacagttggaaagatcagcattggaagataaagaaagagatgaagatgatgaagatggagatggcgatggagatggagcaactggaaagaagaagaaaaagaagaagaagaagagaggaccaaaagttcaaacagaccctccctcagttccaatatgtgacctgtatcctaatggtgtatttcccaaaggacaagaatgcgaatacccacccacacaagatgggcgaacagctgcttggagaactacaagtgaagaaaagaaagcattagatcaggcaagtgaagagatttggaatgattttcgagaagctgcagaagcacatcgacaagttagaaaatacgtaatgagctggatcaagcctgggatgacaatgatagaaatctgtgaaaagttggaagactgttcacgcaagttaataaaagagaatggattaaatgcaggcctggcatttcctactggatgttctctcaataattgtgctgcccattatactcccaatgccggtgacacaacagtattacagtatgatgacatctgtaaaatagactttggaacacatataagtggtaggattattgactgtgcttttactgtcacttttaatcccaaatatgatacgttattaaaagctgtaaaagatgctactaacactggaataaagtgtgctggaattgatgttcgtctgtgtgatgttggtgaggccatccaagaagttatggagtcctatgaagttgaaatagatgggaagacatatcaagtgaaaccaatccgtaatctaaatggacattcaattgggcaatatagaatacatgctggaaaaacagtgccgattgtgaaaggaggggaggcaacaagaatggaggaaggagaagtatatgcaattgaaacctttggtagtacaggaaaaggtgttgttcatgatgatatggaatgttcacattacatgaaaaattttgatgttggacatgtgccaataaggcttccaagaacaaaacacttgttaaatgtcatcaatgaaaactttggaacccttgccttctgccgcagatggctggatcgcttgggagaaagtaaatacttgatggctctgaagaatctgtgtgacttgggcattgtagatccatatccaccattatgtgacattaaaggatcatatacagcgcaatttgaacataccatcctgttgcgtccaacatgtaaagaagttgtcagccccccccgacactgccctccccccatnacttagtttccataagtcccaccctcaaacacccctttnacttttctggaggcttttgtttgggaaaaaaacatggatacccaggatattaaatttccccccaccccgcc

SEQ ID NO: 75897 - DNA, 1979 bp, Homo sapiens
ggatcccccgggctgcaggattcggcacgagcttagtccaaagccacctcaacacctttattttctgagctttgttggaaaacatgataccagaattaatttgccacatgttgtctgttttaacagtggacccatgtaatacttttatccatgtttaaaaaagaaggaatttggacaaaggcaaaccgtctaatgtaattaaccaacgaaaaagctttccggacttttaaatgctaactgtttttccccttcctgtctaggaaaatgctataaagctcaaattagttaggaatgacttatacgttttgttttgaatacctaagagatactttttggatatttatattgccatattcttacttgaatgctttgaatgactacatccagttctgcacctataccctctggtgttgctttttaaccttcctggaatccattttctaaaaaataaagacattttcagatctgagagctacatctcaatgtctgtggttataattctggacaggataaatagctaaacttaatgtaggcaaatgcagagacatttatctgaaatgtagacctctacactgagacttttctggcatagtggctaaaacaagatctacacatgcataaaaagggacaatcaccttttcttcataaatatacagctttaggaatatttcaccattctttgtaggacatagtagtccttgtctttttttctcctgacattggaaagatgtgctaattgaaacttgacttagtaggaacattgtgccaactcaaaaccttgatttagtaaaaatctcaatgtttagatcctttgtccagtggtggtgtttatcagggaatgtattcagcttgctcagaaaaccaaaagggtattaaagccacaaaagcaaagaagaaaaaaaaaaacttcccatgtttggatcttgttctagttagaaaaattaagttgaaattcttggactttttcattcatgaggcaaatgctgtaataccttcccctttgacaggtttggattcttaacattactagtggtatttcaggaagtgacgttacagttactttccttatagcggctaagtgtattaagttgaatgtaacgatggtaatattaatttgtttgaactgaggcccactactgattctttgacaaattgaattcttatatttaaataattttatgggaatgttccatcataatttctaaatcatttatatatcaaggtagccttaatttgtatatgtttcagtacaatgagattttattgcctctgggatgctgtttagtttgtattttgttgaacgtttttatcctaggaagagaaacctatgacttgtgtacctagatcatctgttacattaaaaagctgctctttcagcattagagctataaatgaatgttaccttgtcgggaaacaatctaggttttagctgtatgagctatgtttattatggtgctaatgttcagtagccacatttgactaatgtctccattctctgtgatgctgtggctagcagcagagctcgccagttcatgcctggacatactgtcagggctgggccctccagctagctcctttggggttgagtccgtatctttttgatgtggaagtataaagcaagtatcttgatttctaaacccagcaattttagaattgacctttatgagtgaagacttttggagcttttaaagaccttggcagtcatgatctcaaaccaattaggagctccaagctcccttcccaggtaactgttgggagcaatggcatcactgtatgcccttgtaatggctggaagggacatgatcttgtaagtaggaaagctgtaactaaaaattgtattgtttgcttattagccatgtatctcttaaaattttgttatgtttacaacgatgtaccttattggcaacaagttattagtttgatgtttaacaatagtgcctttagtaaattattttacaactaaaaaaaattgttttttg

SEQ ID NO: 75898 - DNA, 1084 bp, Homo sapiens
agagcagcttccggcgtggctggtgtaggcgggtggagaaggatcggggccctcgccgctctgtctcattccctcgcgctctctcgggcaacatggcgggtgtggaggaggtagcggcctccgggagccacctgaatggcgacctggatccagacgacagggaagaaggagctgcctctacggctgaggaagcagccaagaaaaaaagacgaaagaagaagaagagcaaagggccttctgcagcaggggaacaggaacctgataaagaatcaggagcctcagtggatgaagtagcaagacagttggaaagatcagcattggaagataaagaaagagatgaagatgatgaagatggagatggcgatggagatggagcaactggaaagaagaagaaaaagaagaagaagaagagaggaccaaaagttcaaacagaccctccctcagttccaatatgtgacctgtatcctaatggtgtatttcccaaaggacaagaatgcgaatacccacccacacaagatgggcgaacagctgcttggagaactacaagtgaagaaaagaaagcattagatcaggcaagtgaagagatttggaatgattttcgagaagctgcagaagcacatcgacaagttagaaaatacgtaatgagctggatcaagcctgggatgacaatgatagaaatctgtgaaaagttggaagactgttcacgcaagttaataaaagagaatggattaaatgcaggcctggcatttcctactggatgttctctcaataattgtgctgcccattatactcccaatgccggtgacacaacagtattacagtatgatgacatctgtaaaatagactttggaacacatataagtggtaggattattgactgtgcttttactgtcacttttaatcccaaatatgatacgttattaaaagctgtaaaagatgctactaacactggaataaagtgtgctggaattgatgttcgtctgtgtgatgttggtgaggccatccaagaagttatggagtcctatgaagttgaaatagatgggaagacatatcaagtgaaacctatgacctatatgggaccgcc

SEQ ID NO: 75899 - DNA, 1775 bp, Homo sapiens
ctataagtcattcctaactaatttgagctttatagcattttcctagacaggaaggggaaaatgctataaagctcaaattagttaggaatgacttatacgttttgttttgaatacctaagagatactttttggatatttatattgccatattcttacttgaatgctttgaatgactacatccagttctgcacctataccctctggtgttgctttttaaccttcctggaatccattttctaaaaaataaagacattttcagatctgagagctacatctcaatgtctgtggttataattctggacaggataaatagctaaacttaatgtaggcaaatgcagagacatttatctgaaatgtagacctctacactgagacttttctggcatagtggctaaaacaagatctacacatgcataaaaagggacaatcaccttttcttcataaatatacagctttaggaatatttcaccattctttgtaggacatagtagtccttgtctttttttctcctgacattggaaagatgtgctaattgaaacttgacttagtaggaacattgtgccaactcaaaaccttgatttagtaaaaatctcaatgtttagatcctttgtccagtggtggtgtttatcagggaatgtattcagcttgctcagaaaaccaaaagggtattaaagccacaaaagcaaagaagaaaaaaaaaaacttcccatgtttggatcttgttctagttagaaaaattaagttgaaattcttggactttttcattcatgaggcaaatgctgtaataccttcccctttgacaggtttggattcttaacattactagtggtatttcaggaagtgacgttacagttactttccttatagcggctaagtgtattaagttgaatgtaacgatggtaatattaatttgtttgaactgaggcccactactgattctttgacaaattgaattcttatatttaaataattttatgggaatgttccatcataatttctaaatcatttatatatcaaggtagccttaatttgtatatgtttcagtacaatgagattttattgcctctgggatgctgtttagtttgtattttgttgaacgtttttatcctaggaagagaaacctatgacttgtgtacctagatcatctgttacattaaaaagctgctctttcagcattagagctataaatgaatgttaccttgtcgggaaacaatctaggttttagctgtatgagctatgtttattatggtgctaatgttcagtagccacatttgactaatgtctccattctctgtgatgctgtggctagcagcagagctcgccagttcatgcctggacatactgtcagggctgggccctccagctagctcctttggggttgagtccgtatctttttgatgtggaagtataaagcaagtatcttgatttctaaacccagcaattttagaattgacctttatgagtgaagacttttggagcttttaaagaccttggcagtcatgatctcaaaccaattaggagctccaagctcccttcccaggtaactgttgggagcaatggcatcactgtatgcccttgtaatggctggaagggacatgatcttgtaagtaggaaagctgtaactaaaaattgtattgtttgcttattagccatgtatctcttaaaattttgttatgtttacaacgatgtaccttattggcaacaagttattagtttgatgtttaacaatagtgcctttagtaaattattttacaactaaaaaaaattgttttttg

SEQ ID NO: 75900 - DNA, 950 bp, Homo sapiens
ggacgcgtgggtcgacccacgcgtcgcggacgcgtgggtccggacgcgtgtgtattaagttgaatgtaacgatggtaatattaatttgtttgaactgaggcccactactgattctttgacaaattgaattcttatatttaaataattttatgggaatgttccatcataatttctaaatcatttatatatcaaggtagccttaatttgtatatgtttcagtacaatgagattttattgcctctgggatgctgtttagtttgtattttgttgaacgtttttatcctaggaagagaaacctatgacttgtgtacctagatcatctgttacattaaaaagctgctctttcagcattagagctataaatgaatgttaccttgtcgggaaacaatctaggttttagctgtatgagctatgtttattatggtgctaatgttcagtagccacatttgactaatgtctccattctctgtgatgctgtggctagcagcagagctcgccagttcatgcctggacatactgtcagggctgggccctccagctagctcctttggggttgagtccgtatctttttgatgtggaagtataaagcaagtatcttgatttctaaacccagcaattttagaattgacctttatgagtgaagacttttggagcttttaaagaccttggcagtcatgatctcaaaccaattaggagctccaagctcccttcccaggtaactgttgggagcaatggcatcactgtatgcccttgtaatggctggaagggacatgatcttgtaagtaggaaagctgtaactaaaaattgtattgtttgcttattagccatgtatctcttaaaattttgttatgtttacaacgatgtaccttattggcaacaagttattagtttgatgtttaacaatagtgcctttagtaaattattttacaactaaaaaaaattgttttttg

SEQ ID NO: 75901 - DNA, 613 bp, Homo sapiens
agagcagcttccggcgtggctggtgtaggcgggtggagaaggatcggggccctcgccgctctgtctcattccctcgcgctctctcgggcaacatggcgggtgtggaggaggtagcggcctccgggagccacctgaatggcgacctggatccagacgacagggaagaaggagctgcctctacggctgaggaagcagccaagaaaaaaagacgaaagaagaagaagagcaaagggccttctgcagcaggggaacaggaacctgataaagaatcaggagcctcagtggatgaagtagcaagacagttggaaagatcagcattggaagataaagaaagagatgaagatgatgaagatggagatggcgatggagatggagcaactggaaagaagaagaaaaagaagaagaagaagagaggacgttagtgtcttaagttaatgttaattgatatattagaagtgtttattctgtcgggtgtggtggctcacacctgtgatcccagctactccggaggctgaggcaggagaattgctggaacccaagagacggagattgcagtaagctgagattgtgccactgcactgcagcctgggcaacagagtgagactctgtctca

SEQ ID NO: 75902 - DNA, 428 bp, Homo sapiens
tttttttagttgtaaaataatttactaaaggcactattgttaaacatcaaactaataacttgttgccaataagggacatgatcttgtaagtaggaaagctgtaactaaaaattgtattgtttgcttattagccatgtatctcttaaaagatcatgatctcaaaccaattaggagctccaagctcccttcccaggtaactgttgggagcaatggcatcactgtatgcccttgtaatggctggaagggacatgatcttgtaagtaggaaagctgtaactaaaaattgtattgtttgcttattagccatgtatctcttaaaattttgttatgtttacaacgatgtaccttattggcaacaagttattagtttgatgtttaacaatagtgcctttagtaaattattttacaactaaaaaaaattgttttttg

SEQ ID NO: 75903 - DNA, 437 bp, Homo sapiens
atggcgggtgtggaggaggtagcggcctccgggagccacctgaatggcgacctggatccagacgacagggaagaaggagctgcctctacggctgaggaagcagccaagaaaaaaagacgaaagaagaagaagagcaaagggccttctgcaggtaaagagagttttatgttttcccagtcccctccgggaacggctgaactgtttggctcaggcccgttgagggggccgggaccggggccccagagccccgactagactgattcttgggcctgacagggtggcaaagccgggctatagattcctagtctgagaagaggcgtcatctcctcctgtgggactagagggctggtgggggagaaaagagtgcctgaggttggcgtgtggtacctctggggtcgctgggcccgagcccctgtattaccagaactcagctccca

SEQ ID NO: 75904 - DNA, 3562 bp, Homo sapiens
  misc_feature (3)..(4): n is a, c, g, or t
  misc_feature (15)..(16): n is a, c, g, or t
  misc_feature (18)..(18): n is a, c, g, or t
  misc_feature (22)..(22): n is a, c, g, or t
  misc_feature (26)..(26): n is a, c, g, or t
  misc_feature (30)..(30): n is a, c, g, or t
cannctcgcgagaannangacncgcnagcntcggcggcccggaaccggccttggaacatctgacggaacctgaggccgcttgccctcccgccccatggagcggcccccggggctgcggccgggcgcgggcgggccctgggagatgcgggagcggctgggcaccggcggcttcgggaacgtctgtctgtaccagcatcgggaacttgatctcaaaatagcaattaagtcttgtcgcctagagctaagtaccaaaaacagagaacgatggtgccatgaaatccagattatgaagaagttgaaccatgccaatgttgtaaaggcctgtgatgttcctgaagaattgaatattttgattcatgatgtgcctcttctagcaatggaatactgttctggaggagatctccgaaagctgctcaacaaaccagaaaattgttgtggacttaaagaaagccagatactttctttactaagtgatatagggtctgggattcgatatttgcatgaaaacaaaattatacatcgagatctaaaacctgaaaacatagttcttcaggatgttggtggaaagataatacataaaataattgatctgggatatgccaaagatgttgatcaaggaagtctgtgtacatcttttgtgggaacactgcagtatctggccccagagctctttgagaataagccttacacagccactgttgattattggagctttgggaccatggtatttgaatgtattgctggatataggccttttttgcatcatctgcagccatttacctggcatgagaagattaagaagaaggatccaaagtgtatatttgcatgtgaagagatgtcaggagaagttcggtttagtagccatttacctcaaccaaatagcctttgtagtttaatagtagaacccatggaaaactggctacagttgatgttgaattgggaccctcagcagagaggaggacctgttgaccttactttgaagcagccaagatgttttgtattaatggatcacattttgaatttgaagatagtacacatcctaaatatgacttctgcaaagataatttcttttctgttaccacctgatgaaagtcttcattcactacagtctcgtattgagcgtgaaactggaataaatactggttctcaagaacttctttcagagacaggaatttctctggatcctcggaaaccagcctctcaatgtgttctagatggagttagaggctgtgatagctatatggtttatttgtttgataaaagtaaaactgtatatgaagggccatttgcttccagaagtttatctgattgtgtaaattatattgtacaggacagcaaaatacagcttccaattatacagctgcgtaaagtgtgggctgaagcagtgcactatgtgtctggactaaaagaagactatagcaggctctttcagggacaaagggcagcaatgttaagtcttcttagatataatgctaacttaacaaaaatgaagaacactttgatctcagcatcacaacaactgaaagctaaattggagttttttcacaaaagcattcagcttgacttggagagatacagcgagcagatgacgtatgggatatcttcagaaaaaatgctaaaagcatggaaagaaatggaagaaaaggccatccactatgctgaggttggtgtcattggatacctggaggatcagattatgtctttgcatgctgaaatcatggagctacagaagagcccctatggaagacgtcagggagacttgatggaatctctggaacagcgtgccattgatctatataagcagttaaaacacagaccttcagatcactcctacagtgacagcacagagatggtgaaaatcattgtgcacactgtgcagagtcaggaccgtgtgctcaaggagctgtttggtcatttgagcaagttgttgggctgtaagcagaagattattgatctactccctaaggtggaagtggccctcagtaatatcaaagaagctgacaatactgtcatgttcatgcagggaaaaaggcagaaagaaatatggcatctccttaaaattgcctgtacacagagttctgcccggtcccttgtaggatccagtctagaaggtgcagtaacccctcagacatcagcatggctgcccccgacttcagcagaacatgatcattctctgtcatgtgtggtaactcctcaagatggggagacttcagcacaaatgatagaagaaaatttgaactgccttggccatttaagcactattattcatgaggcaaatgaggaacagggcaatagtatgatgaatcttgattggagttggttaacagaatgagttgtcacttgttcactgtccccaaacctatggaagttgttgctatacatgttggaaatgtgtttttcccccatgaaaccattcttcagacatcagtcaatggaagaaatggctatgaacagaaactacatttctactatgatcagaagaacatgattttacaagtataacagttttgagtaattcaagcctctaaacagacaggaatttagaaaaagtcaatgtacttgtttgaatatttgttttaataccacagctatttagaagcatcatcacgacacatttgccttcagtcttggtaaaacattacttatttaactgattaaaaataccttctatgtattagtgtcaacttttaacttttgggcgtaagaccaaatgtagttttgtatacagagaagaaaacctcaagtaataggcattttaagtaaaagtctacctgtgtttttttctaaaaaggctgctcacaagttctatttcttgaagaataaattctacctccttgtgttgcactgaacaggttctcttcctggcatcataaggagttggtgtaatcattttaaattccactgaaaatttaacagtatccccttctcatcgaagggattgtgtatctgtgcttctaatattagttggctttcataaatcatgttgttgtgtgtatatgtatttaagatgtacatttaataatatcaaagagaagatgcctgttaatttataatgtatttgaaaattacatgttttttcatttgtaaaaatgagtcatttgtttaaacaatctttcatgtcttgtcatacaaatttataaaggtctgcactcctttatctgtaattgtaattccaaaatccaaaaagctctgaaaacaaggtttccataagcttggtgacaaaattcatttgcttgcaatctaatctgaactgaccttgaatctttttatcccatttagtgtgaatattcctttattttgctgcttgatgatgagagggagggctgctgccacagactgtggtgagggctggttaatgtagtatggtatatgcacaaaactacttttctaaaatctaaaatttcataattctgaaacaacttgccccaagggtttcagagaaaggactgtggacctctatcatctgctaagtaatttagaagatattatttgtcttaaaaaatgtgaaatgcttttatattctaatagtttttcactttgtgtattaaatggtttttaaatt

SEQ ID NO: 75905 - DNA, 4851 bp, Homo sapiens
  misc_feature (1)..(2): n is a, c, g, or t
  misc_feature (1086)..(1086): n is a, c, g, or t
  misc_feature (1721)..(1721): n is a, c, g, or t
nngactcccagttttctggctaatgaatcagataccacagatacacagtgatagcatttgtttaggttatattttttaaaactttgaggcagccctgtcaacataccatgaagctcagaaataaactgctacccaggtagcttctttgagtgtcaccttgagtgacaaactgtaacaagattgtgtctgtcattggggcctattatataatcacacttgatttgtggcctctattgtcttttctagcttagagttgacttgaatctcttgttcatctgaaatggttaaaaccagctttcttcattatcctggagaaggctaaagttctgagggctttcactgtcttaaggagctagttatatgagaaagctcttggcttggtccatggtatttaggaaggaatgctgtttggagaagaacctttttggagccttgcatttgattgttggtgaggaggagacaacagagatgtgtggggaataaagttgggctatgggggaagtatttggagtgatagataacaaaggacacaacgttttttaaacctcctttgatgctcatcatttcctttttggtaaaatgggggtaacaaaagtagtcttctcacatgactgctgtgaggattaaatgggaaaattataagcagagagtagcaaatattattattattgcatttaggcttaattattgtccaaagaatataccagcatgatgcataagcaactttcaactcctttagccattttctgaaatataacaattaatgatttttttttaaaatcgaggtcacattttaaactgtagaacccattgtgaccaacagccatcccatttgagggtatctggctgctgccagttggctttaagatgtcatactgccctcaaatggaactttcaggatgtctacaggtccctttactagttggtttcaatgagcttttttcaaagtttttctgggttgtaaacagacggataaacatgaaattccaagcaacctagttcaagggcctccttcctttaggtaatgaaagtttgatgaattgtcctactgtttctaaatatgtggttaatcatccaagaaaaatngttcccttggccagaggctgcatttgtgtctagggcttgggttagtatgggttaaagatagccaagactattgttctcaagcacaggcaactaaggtctcttactgataaatttatatatacattatacacctgcaaactttattttttatatataactagattttatttataggtaatctttatatcttttatcttaacccaatttttaatttaaatggagatgtttattaattaaaattagtttcagagtttcagggatttttgaggaattttttgtttggaggctgatatgttacagaagaaaggttatatccactgactgatgtcttttatagatcactcctacagtgacagcacagagatggtgaaaatcattgtgcacactgtgcagagtcaggaccgtgtgctcaaggagctgtttggtcatttgaggtaggaaaattgcttcatttcctactgaaaaaccaggatacgtttatcttgttcctctcaaagtacaaaagccctctttggtaaagtatacttacccaggaagaattctgaaggtaccttgggtagcttggccatagctatctgcatttatgtgtccttttgtatgcattactttggagataagtcattaaatctgatgcngattgtggttcatttcctcagctgggttttgggaatatggtgtacagtcttggggcatgtgaaagtgtctgacactgatttaatctctccagcaagttgttgggctgtaagcagaagattattgatctactccctaaggtggaagtggccctcagtaatatcaaagaagctgacaatactgtcatgttcatgcagggaaaaaggcagaaagaaatatggcatctccttaaaattgcctgtgtaagtaattattaatgaattatttaatgtgacattgagttgctattattccttgcaaaggggattttatcagcatgaggtgggccctcttgaagacatgtatattttgcattgggatgacatccatgttccttgcttggtgtccagactagcaattgagatgcaggacttattatcatctctcctttccaatttctctgttgttatactcctcttagcccttgactactgtggtattccaacctaacttggggatagatgtacctgcctagataatgaaattgaccatctattcaactgggttttttttttctttcttcaactaaaatggtataagatgagtggatatatttggttttagtcaatgaagaaagggtccaaggacaggttactaatggtgtgtaaaggtgggaatagttttgtactgaaatactctggttgtgcatataagtagtaacggaaatgtaagtcttaggaatatgataagaaattgtgtgaatcaacagagatgcttgcctgtaatcttttgatgtttttttcttttccttcagacacagagttctgcccggtcccttgtaggatccagtctagaaggtgcagtaacccctcagacatcagcatggctgcccccgacttcagcagaacatgatcattctctgtcatgtgtggtaactcctcaagatggagatgggtgggtttactttgtaacaatagatagctgtgttttcatagcagtggtataggaatgaggcagtagttgttaaggtagtcttctgtgccttcagaccagggttgagtcctgactatccctttgtaataatcttaggcaacttacttgacttttttgatgttcatatttcctcacctgtaaaacaggaatgtctcatagaactgctgtggaaatttgattagacaatgtatataaagtgcttgggaaataaatgttcagcaaatgttgcgtattattagctcaaatgttgcttattattagctaagtccaagttctaagtcctttcttttattggcttattactttcttttactcaaaccttactccttcattaacagtttatgagaaattatgctatcattttgcatttatcattttggggatccttgattacccttctaataaatttttgagatctattttataactttgtatttctaagattagacttttttcagtgttttaaatcagttttgcaagaactcagattccaagccctatattttattaattcctactcttttgctaaaagctgaatgactatccatttctgttattttctcagcttaagatgtgccgtatccaaagccagtggctctttgctagcttgtgtattgtcgcttttctcacaactcatggagacctctacagcaccagcatttcctggaagctctgcccataattagttttgcagaagtgcagccatgttacatcactgctcaggaggtcatgcagttgcacattctgtactctacttttatgagagaaaagcacatggcaggaaggcaagctgatatcagggagacttcagcacaaatgatagaagaaaatttgaactgccttggccatttaagcactattattcatgaggcaaatgaggaacagggcaatagtatgatgaatcttgattggagttggttaacagaatgagttgtcacttgttcactgtccccaaacctatggaagttgttgctatacatgttggaaatgtgtttttcccccatgaaaccattcttcagacatcagtcaatggaagaaatggctatgaacagaaactacatttctactatgatcagaagaacatgattttacaagtataacagttttgagtaattcaagcctctaaacagacaggaatttagaaaaagtcaatgtacttgtttgaatatttgttttaataccacagctatttagaagcatcatcacgacacatttgccttcagtcttggtaaaacattacttatttaactgattaaaaataccttctatgtattagtgtcaacttttaacttttgggcgtaagaccaaatgtagttttgtatacagagaagaaaacctcaagtaataggcattttaagtaaaagtctacctgtgtttttttctaaaaaggctgctcacaagttctatttcttgaagaataaattctacctccttgtgttgcactgaacaggttctcttcctggcatcataaggagttggtgtaatcattttaaattccactgaaaatttaacagtatccccttctcatcgaagggattgtgtatctgtgcttctaatattagttggctttcataaatcatgttgttgtgtgtatatgtatttaagatgtacatttaataatatcaaagagaagatgcctgttaatttataatgtatttgaaaattacatgttttttcatttgtaaaaatgagtcatttgtttaaacaatctttcatgtcttgtcatacaaatttataaaggtctgcactcctttatctgtaattgtaattccaaaatccaaaaagctctgaaaacaaggtttccataagcttggtgacaaaattcatttgcttgcaatctaatctgaactgaccttgaatctttttatcccatttagtgtgaatattcctttattttgctgcttgatgatgagagggagggctgctgccacagactgtggtgagggctggttaatgtagtatggtatatgcacaaaactacttttctaaaatctaaaatttcataattctgaaacaacttgccccaagggtttcagagaaaggactgtggacctctatcatctgctaagtaatttagaagatattatttgtcttaaaaaatgtgaaatgcttttatattctaatagtttttcactttgtgtattaaatggtttttaaatt

SEQ ID NO: 75906 - DNA, 3660 bp, Homo sapiens
  misc_feature (3)..(4): n is a, c, g, or t
  misc_feature (15)..(16): n is a, c, g, or t
  misc_feature (18)..(18): n is a, c, g, or t
  misc_feature (22)..(22): n is a, c, g, or t
  misc_feature (26)..(26): n is a, c, g, or t
  misc_feature (30)..(30): n is a, c, g, or t
cannctcgcgagaannangacncgcnagcntcggcggcccggaaccggccttggaacatctgacggaacctgaggccgcttgccctcccgccccatggagcggcccccggggctgcggccgggcgcgggcgggccctgggagatgcgggagcggctgggcaccggcggcttcgggaacgtctgtctgtaccagcatcgggaacttgatctcaaaatagcaattaagtcttgtcgcctagagctaagtaccaaaaacagagaacgatggtgccatgaaatccagattatgaagaagttgaaccatgccaatgttgtaaaggcctgtgatgttcctgaagaattgaatattttgattcatgatgtgcctcttctagcaatggaatactgttctggaggagatctccgaaagctgctcaacaaaccagaaaattgttgtggacttaaagaaagccagatactttctttactaagtgatatagggtctgggattcgatatttgcatgaaaacaaaattatacatcgagatctaaaacctgaaaacatagttcttcaggatgttggtggaaagataatacataaaataattgatctgggatatgccaaagatgttgatcaaggaagtctgtgtacatcttttgtgggaacactgcagtatctggccccagagctctttgagaataagccttacacagccactgttgattattggagctttgggaccatggtatttgaatgtattgctggatataggccttttttgcatcatctgcagccatttacctggcatgagaagattaagaagaaggatccaaagtgtatatttgcatgtgaagagatgtcaggagaagttcggtttagtagccatttacctcaaccaaatagcctttgtagtttaatagtagaacccatggaaaactggctacagttgatgttgaattgggaccctcagcagagaggaggacctgttgaccttactttgaagcagccaagatgttttgtattaatggatcacattttgaatttgaagatagtacacatcctaaatatgacttctgcaaagataatttcttttctgttaccacctgatgaaagtcttcattcactacagtctcgtattgagcgtgaaactggaataaatactggttctcaagaacttctttcagagacaggaatttctctggatcctcggaaaccagcctctcaatgtgttctagatggagttagaggctgtgatagctatatggtttatttgtttgataaaagtaaaactgtatatgaagggccatttgcttccagaagtttatctgattgtgtaaattatattgtacaggacagcaaaatacagcttccaattatacagctgcgtaaagtgtgggctgaagcagtgcactatgtgtctggactaaaagaagactatagcaggctctttcagggacaaagggcagcaatgttaagtcttcttagatataatgctaacttaacaaaaatgaagaacactttgatctcagcatcacaacaactgaaagctaaattggagttttttcacaaaagcattcagcttgacttggagagatacagcgagcagatgacgtatgggatatcttcagaaaaaatgctaaaagcatggaaagaaatggaagaaaaggccatccactatgctgaggttggtgtcattggatacctggaggatcagattatgtctttgcatgctgaaatcatggagctacagaagagcccctatggaagacgtcagggagacttgatggaatctctggaacagcgtgccattgatctatataagcagttaaaacacagaccttcagatcactcctacagtgacagcacagagatggtgaaaatcattgtgcacactgtgcagagtcaggaccgtgtgctcaaggagctgtttggtcatttgagcaagttgttgggctgtaagcagaagattattgatctactccctaaggtggaagtggccctcagtaatatcaaagaagctgacaatactgtcatgttcatgcagggaaaaaggcagaaagaaatatggcatctccttaaaattgcctgtacacagagttctgcccggtcccttgtaggatccagtctagaaggtgcagtaacccctcagacatcagcatggctgcccccgacttcagcagaacatgatcattctctgtcatgtgtggtaactcctcaagatgggctggagtgcagtggcacagtcttggctcattgcaacctccgcctcccagattcaagcagttctcctgcttcagcttcccgagtagctgggatttcagggagacttcagcacaaatgatagaagaaaatttgaactgccttggccatttaagcactattattcatgaggcaaatgaggaacagggcaatagtatgatgaatcttgattggagttggttaacagaatgagttgtcacttgttcactgtccccaaacctatggaagttgttgctatacatgttggaaatgtgtttttcccccatgaaaccattcttcagacatcagtcaatggaagaaatggctatgaacagaaactacatttctactatgatcagaagaacatgattttacaagtataacagttttgagtaattcaagcctctaaacagacaggaatttagaaaaagtcaatgtacttgtttgaatatttgttttaataccacagctatttagaagcatcatcacgacacatttgccttcagtcttggtaaaacattacttatttaactgattaaaaataccttctatgtattagtgtcaacttttaacttttgggcgtaagaccaaatgtagttttgtatacagagaagaaaacctcaagtaataggcattttaagtaaaagtctacctgtgtttttttctaaaaaggctgctcacaagttctatttcttgaagaataaattctacctccttgtgttgcactgaacaggttctcttcctggcatcataaggagttggtgtaatcattttaaattccactgaaaatttaacagtatccccttctcatcgaagggattgtgtatctgtgcttctaatattagttggctttcataaatcatgttgttgtgtgtatatgtatttaagatgtacatttaataatatcaaagagaagatgcctgttaatttataatgtatttgaaaattacatgttttttcatttgtaaaaatgagtcatttgtttaaacaatctttcatgtcttgtcatacaaatttataaaggtctgcactcctttatctgtaattgtaattccaaaatccaaaaagctctgaaaacaaggtttccataagcttggtgacaaaattcatttgcttgcaatctaatctgaactgaccttgaatctttttatcccatttagtgtgaatattcctttattttgctgcttgatgatgagagggagggctgctgccacagactgtggtgagggctggttaatgtagtatggtatatgcacaaaactacttttctaaaatctaaaatttcataattctgaaacaacttgccccaagggtttcagagaaaggactgtggacctctatcatctgctaagtaatttagaagatattatttgtcttaaaaaatgtgaaatgcttttatattctaatagtttttcactttgtgtattaaatggtttttaaatt

SEQ ID NO: 75907 - DNA, 3471 bp, Homo sapiens
  misc_feature (3)..(4): n is a, c, g, or t
  misc_feature (15)..(16): n is a, c, g, or t
  misc_feature (18)..(18): n is a, c, g, or t
  misc_feature (22)..(22): n is a, c, g, or t
  misc_feature (26)..(26): n is a, c, g, or t
  misc_feature (30)..(30): n is a, c, g, or t
cannctcgcgagaannangacncgcnagcntcggcggcccggaaccggccttggaacatctgacggaacctgaggccgcttgccctcccgccccatggagcggcccccggggctgcggccgggcgcgggcgggccctgggagatgcgggagcggctgggcaccggcggcttcgggaacgtctgtctgtaccagcatcgggaacttgatctcaaaatagcaattaagtcttgtcgcctagagctaagtaccaaaaacagagaacgatggtgccatgaaatccagattatgaagaagttgaaccatgccaatgttgtaaaggcctgtgatgttcctgaagaattgaatattttgattcatgatgtgcctcttctagcaatggaatactgttctggaggagatctccgaaagctgctcaacaaaccagaaaattgttgtggacttaaagaaagccagatactttctttactaagtgatatagggtctgggattcgatatttgcatgaaaacaaaattatacatcgagatctaaaacctgaaaacatagttcttcaggatgttggtggaaagataatacataaaataattgatctgggatatgccaaagatgttgatcaaggaagtctgtgtacatcttttgtgggaacactgcagtatctggccccagagctctttgagaataagccttacacagccactgttgattattggagctttgggaccatggtatttgaatgtattgctggatataggccttttttgcatcatctgcagccatttacctggcatgagaagattaagaagaaggatccaaagtgtatatttgcatgtgaagagatgtcaggagaagttcggtttagtagccatttacctcaaccaaatagcctttgtagtttaatagtagaacccatggaaaactggctacagttgatgttgaattgggaccctcagcagagaggaggacctgttgaccttactttgaagcagccaagatgttttgtattaatggatcacattttgaatttgaagatagtacacatcctaaatatgacttctgcaaagataatttcttttctgttaccacctgatgaaagtcttcattcactacagtctcgtattgagcgtgaaactggaataaatactggttctcaagaacttctttcagagacaggaatttctctggatcctcggaaaccagcctctcaatgtgttctagatggagttagaggctgtgatagctatatggtttatttgtttgataaaagtaaaactgtatatgaagggccatttgcttccagaagtttatctgattgtgtaaattatattgtacaggacagcaaaatacagcttccaattatacagctgcgtaaagtgtgggctgaagcagtgcactatgtgtctggactaaaagaagactatagcaggctctttcagggacaaagggcagcaatgttaagtcttcttagatataatgctaacttaacaaaaatgaagaacactttgatctcagcatcacaacaactgaaagctaaattggagttttttcacaaaagcattcagcttgacttggagagatacagcgagcagatgacgtatgggatatcttcagaaaaaatgctaaaagcatggaaagaaatggaagaaaaggccatccactatgctgaggttggtgtcattggatacctggaggatcagattatgtctttgcatgctgaaatcatggagctacagaagagcccctatggaagacgtcagggagacttgatggaatctctggaacagcgtgccattgatctatataagcagttaaaacacagaccttcagatcactcctacagtgacagcacagagatggtgaaaatcattgtgcacactgtgcagagtcaggaccgtgtgctcaaggagctgtttggtcatttgagcaagttgttgggctgtaagcagaagattattgatctactccctaaggtggaagtggccctcagtaatatcaaagaagctgacaatactgtcatgttcatgcagggaaaaaggcagaaagaaatatggcatctccttaaaattgcctgtacacagagttctgcccggtcccttgtaggatccagtctagaagggagacttcagcacaaatgatagaagaaaatttgaactgccttggccatttaagcactattattcatgaggcaaatgaggaacagggcaatagtatgatgaatcttgattggagttggttaacagaatgagttgtcacttgttcactgtccccaaacctatggaagttgttgctatacatgttggaaatgtgtttttcccccatgaaaccattcttcagacatcagtcaatggaagaaatggctatgaacagaaactacatttctactatgatcagaagaacatgattttacaagtataacagttttgagtaattcaagcctctaaacagacaggaatttagaaaaagtcaatgtacttgtttgaatatttgttttaataccacagctatttagaagcatcatcacgacacatttgccttcagtcttggtaaaacattacttatttaactgattaaaaataccttctatgtattagtgtcaacttttaacttttgggcgtaagaccaaatgtagttttgtatacagagaagaaaacctcaagtaataggcattttaagtaaaagtctacctgtgtttttttctaaaaaggctgctcacaagttctatttcttgaagaataaattctacctccttgtgttgcactgaacaggttctcttcctggcatcataaggagttggtgtaatcattttaaattccactgaaaatttaacagtatccccttctcatcgaagggattgtgtatctgtgcttctaatattagttggctttcataaatcatgttgttgtgtgtatatgtatttaagatgtacatttaataatatcaaagagaagatgcctgttaatttataatgtatttgaaaattacatgttttttcatttgtaaaaatgagtcatttgtttaaacaatctttcatgtcttgtcatacaaatttataaaggtctgcactcctttatctgtaattgtaattccaaaatccaaaaagctctgaaaacaaggtttccataagcttggtgacaaaattcatttgcttgcaatctaatctgaactgaccttgaatctttttatcccatttagtgtgaatattcctttattttgctgcttgatgatgagagggagggctgctgccacagactgtggtgagggctggttaatgtagtatggtatatgcacaaaactacttttctaaaatctaaaatttcataattctgaaacaacttgccccaagggtttcagagaaaggactgtggacctctatcatctgctaagtaatttagaagatattatttgtcttaaaaaatgtgaaatgcttttatattctaatagtttttcactttgtgtattaaatggtttttaaatt

SEQ ID NO: 75908 - DNA, 913 bp, Homo sapiens
gctgatgaaaaagataatcttctaaaggcctaaattttcggcataaggcccaacatggtattagtatacaggaatgaaaaattcacccagtgttcatttgaagtaaagttttatctatgggttttctgtggaagagactgctgacaagtaaaattgctcttcctgaagactaagcccagcctccttgtgttgctctcagcaagtgttcttcatggcatcacatggagtcagatgaatcccatctttaatcacacatttaatagagtccttttcctgtgtaaggggttggacttttgtgcctttgatatcagctgaccataatgaattgtgttgtgtgctatatgtatatgtatttaagatgtacatttaataatatcaaagagaagatgcctgttaatttataatgtatttgaaaattacatgttttttcatttgtaaaaatgagtcatttgtttaaacaatctttcatgtcttgtcatacaaatttataaaggtctgcactcctttatctgtaattgtaattccaaaatccaaaaagctctgaaaacaaggtttccataagcttggtgacaaaattcatttgcttgcaatctaatctgaactgaccttgaatctttttatcccatttagtgtgaatattcctttattttgctgcttgatgatgagagggagggctgctgccacagactgtggtgagggctggttaatgtagtatggtatatgcacaaaactacttttctaaaatctaaaatttcataattctgaaacaacttgccccaagggtttcagagaaaggactgtggacctctatcatctgctaagtaatttagaagatattatttgtcttaaaaaatgtgaaatgcttttatattctaatagtttttcactttgtgtattaaatggtttttaaatt

SEQ ID NO: 75909 - DNA, 4703 bp, Homo sapiens
  misc_feature (3)..(4): n is a, c, g, or t
  misc_feature (15)..(16): n is a, c, g, or t
  misc_feature (18)..(18): n is a, c, g, or t
  misc_feature (22)..(22): n is a, c, g, or t
  misc_feature (26)..(26): n is a, c, g, or t
  misc_feature (30)..(30): n is a, c, g, or t
cannctcgcgagaannangacncgcnagcntcggcggcccggaaccggccttggaacatctgacggaacctgaggccgcttgccctcccgccccatggagcggcccccggggctgcggccgggcgcgggcgggccctgggagatgcgggagcggctgggcaccggcggcttcgggaacgtctgtctgtaccagcatcgggaacttgatctcaaaatagcaattaagtcttgtcgcctagagctaagtaccaaaaacagagaacgatggtgccatgaaatccagattatgaagaagttgaaccatgccaatgttgtaaaggcctgtgatgttcctgaagaattgaatattttgattcatgatgtgcctcttctagcaatggaatactgttctggaggagatctccgaaagctgctcaacaaaccagaaaattgttgtggacttaaagaaagccagatactttctttactaagtgatatagggtctgggattcgatatttgcatgaaaacaaaattatacatcgagatctaaaacctgaaaacatagttcttcaggatgttggtggaaagataatacataaaataattgatctgggatatgccaaagatgttgatcaaggaagtctgtgtacatcttttgtgggaacactgcagtatctggccccagagctctttgagaataagccttacacagccactgttgattattggagctttgggaccatggtatttgaatgtattgctggatataggccttttttgcatcatctgcagccatttacctggcatgagaagattaagaagaaggatccaaagtgtatatttgcatgtgaagagatgtcaggagaagttcggtttagtagccatttacctcaaccaaatagcctttgtagtttaatagtagaacccatggaaaactggctacagttgatgttgaattgggaccctcagcagagaggaggacctgttgaccttactttgaagcagccaagatgttttgtattaatggatcacattttgaatttgaagatagtacacatcctaaatatgacttctgcaaagataatttcttttctgttaccacctgatgaaagtcttcattcactacagtctcgtattgagcgtgaaactggaataaatactggttctcaagaacttctttcagagacaggaatttctctggatcctcggaaaccagcctctcaatgtgttctagatggagttagaggctgtgatagctatatggtttatttgtttgataaaagtaaaactgtatatgaagggccatttgcttccagaagtttatctgattgtgtaaattatattgtacaggacagcaaaatacagcttccaattatacagctgcgtaaagtgtgggctgaagcagtgcactatgtgtctggactaaaagaagactatagcaggctctttcagggacaaagggcagcaatgttaagtcttcttagatataatgctaacttaacaaaaatgaagaacactttgatctcagcatcacaacaactgaaagctaaattggagttttttcacaaaagcattcagcttgacttggagagatacagcgagcagatgacgtatgggatatcttcagaaaaaatgctaaaagcatggaaagaaatggaagaaaaggccatccactatgctgaggttggtgtcattggatacctggaggatcagattatgtctttgcatgctgaaatcatggagctacagaagagcccctatggaagacgtcagggagacttgatggaatctctggaacagcgtgccattgatctatataagcagttaaaacacagaccttcagatcactcctacagtgacagcacagagatggtgaaaatcattgtgcacactgtgcagagtcaggaccgtgtgctcaaggagctgtttggtcatttgagcaagttgttgggctgtaagcagaagattattgatctactccctaaggtggaagtggccctcagtaatatcaaagaagctgacaatactgtcatgttcatgcagggaaaaaggcagaaagaaatatggcatctccttaaaattgcctgtgtaagtaattattaatgaattatttaatgtgacattgagttgctattattccttgcaaaggggattttatcagcatgaggtgggccctcttgaagacatgtatattttgcattgggatgacatccatgttccttgcttggtgtccagactagcaattgagatgcaggacttattatcatctctcctttccaatttctctgttgttatactcctcttagcccttgactactgtggtattccaacctaacttggggatagatgtacctgcctagataatgaaattgaccatctattcaactgggttttttttttctttcttcaactaaaatggtataagatgagtggatatatttggttttagtcaatgaagaaagggtccaaggacaggttactaatggtgtgtaaaggtgggaatagttttgtactgaaatactctggttgtgcatataagtagtaacggaaatgtaagtcttaggaatatgataagaaattgtgtgaatcaacagagatgcttgcctgtaatcttttgatgtttttttcttttccttcagacacagagttctgcccggtcccttgtaggatccagtctagaaggtgcagtaacccctcagacatcagcatggctgcccccgacttcagcagaacatgatcattctctgtcatgtgtggtaactcctcaagatggagatgggtgggtttactttgtaacaatagatagctgtgttttcatagcagtggtataggaatgaggcagtagttgttaaggtagtcttctgtgccttcagaccagggttgagtcctgactatccctttgtaataatcttaggcaacttacttgacttttttgatgttcatatttcctcacctgtaaaacaggaatgtctcatagaactgctgtggaaatttgattagacaatgtatataaagtgcttgggaaataaatgttcagcaaatgttgcgtattattagctcaaatgttgcttattattagctaagtccaagttctaagtcctttcttttattggcttattactttcttttactcaaaccttactccttcattaacagtttatgagaaattatgctatcattttgcatttatcattttggggatccttgattacccttctaataaatttttgagatctattttataactttgtatttctaagattagacttttttcagtgttttaaatcagttttgcaagaactcagattccaagccctatattttattaattcctactcttttgctaaaagctgaatgactatccatttctgttattttctcagcttaagatgtgccgtatccaaagccagtggctctttgctagcttgtgtattgtcgcttttctcacaactcatggagacctctacagcaccagcatttcctggaagctctgcccataattagttttgcagaagtgcagccatgttacatcactgctcaggaggtcatgcagttgcacattctgtactctacttttatgagagaaaagcacatggcaggaaggcaagctgatatcagggagacttcagcacaaatgatagaagaaaatttgaactgccttggccatttaagcactattattcatgaggcaaatgaggaacagggcaatagtatgatggtaagttttgtgtggatatgggtgcctgctttggctatgttgggtgcaaaaggtttaactttccatgctagccttatctggcatttgggatgcatatgggaaatagaagaactcaagaggaaagagcatttggggaatatcctcaaccttaaatccttatctgccgttactcagggatatactaggattatgtcatcaattatcttcaataatagcatttttggtcaaattaaatgagtggtaagcttcttcacaatgtgaccattgaaattgaatggtttgttctgtacctttttgcttcagcaatcaattttctccattaagatgggacttgtactttaattcagatatggtacctcccgaatagaaaataaattatgttaatatagttgtaataataagtgtgtgttaagatttggttactataaactactgatttgttaaaacttgaggaaattaccataaaatgtctactgaatcaatttttcctgcatttagtcttaatgtcaattctgtacatttcctctttcattaagaaaaatagcagtggccaggcatggtggctcacgcctgtaatcctagcactttgggaggccaaggcaggtggattgcttgagcccaggagtttgagactagcctggccaacatgggaaaccctgtctttataaaaaatataaaaattggccaggtgtggtggcacacacctgtggtcccagctacttgggaggctgaggcaggaagatcgcttgagttcaagagtttcaggctgcagtgagccgtaatcctgccattgcactccagcctgtgacagagtgagactttgtctcggggaaaaaaaaaaaaaaaaaggataatggtggccagccatatgacatgtacctgtagtccgagttactagggaggctgaggcagaaggattgcatgagcccaggagttcaaggctgcagtgcattatgattggacttgtgaatagccactgtactccagcttggcaacatagcaaga

SEQ ID NO: 75910 - DNA, 3307 bp, Homo sapiens
  misc_feature (3)..(4): n is a, c, g, or t
  misc_feature (15)..(16): n is a, c, g, or t
  misc_feature (18)..(18): n is a, c, g, or t
  misc_feature (22)..(22): n is a, c, g, or t
  misc_feature (26)..(26): n is a, c, g, or t
  misc_feature (30)..(30): n is a, c, g, or t
cannctcgcgagaannangacncgcnagcntcggcggcccggaaccggccttggaacatctgacggaacctgaggccgcttgccctcccgccccatggagcggcccccggggctgcggccgggcgcgggcgggccctgggagatgcgggagcggctgggcaccggcggcttcgggaacgtctgtctgtaccagcatcgggaacttgatctcaaaatagcaattaagtcttgtcgcctagagctaagtaccaaaaacagagaacgatggtgccatgaaatccagattatgaagaagttgaaccatgccaatgttgtaaaggcctgtgatgttcctgaagaattgaatattttgattcatgatgtgcctcttctagcaatggaatactgttctggaggagatctccgaaagctgctcaacaaaccagaaaattgttgtggacttaaagaaagccagatactttctttactaagtgatatagggtctgggattcgatatttgcatgaaaacaaaattatacatcgagatctaaaacctgaaaacatagttcttcaggatgttggtggaaagataatacataaaataattgatctgggatatgccaaagatgttgatcaaggaagtctgtgtacatcttttgtgggaacactgcagtatctggccccagagctctttgagaataagccttacacagccactgttgattattggagctttgggaccatggtatttgaatgtattgctggatataggccttttttgcatcatctgcagccatttacctggcatgagaagattaagaagaaggatccaaagtgtatatttgcatgtgaagagatgtcaggagaagttcggtttagtagccatttacctcaaccaaatagcctttgtagtttaatagtagaacccatggaaaactggctacagttgatgttgaattgggaccctcagcagagaggaggacctgttgaccttactttgaagcagccaagatgttttgtattaatggatcacattttgaatttgaagatagtacacatcctaaatatgacttctgcaaagataatttcttttctgttaccacctgatgaaagtcttcattcactacagtctcgtattgagcgtgaaactggaataaatactggttctcaagaacttctttcagagacaggaatttctctggatcctcggaaaccagcctctcaatgtgttctagatggagttagaggctgtgatagctatatggtttatttgtttgataaaagtaaaactgtatatgaagggccatttgcttccagaagtttatctgattgtgtaaattatattgtacaggacagcaaaatacagcttccaattatacagctgcgtaaagtgtgggctgaagcagtgcactatgtgtctggactaaaagaagactatagcaggctctttcagggacaaagggcagcaatgttaagtcttcttagatataatgctaacttaacaaaaatgaagaacactttgatctcagcatcacaacaactgaaagctaaattggagttttttcacaaaagcattcagcttgacttggagagatacagcgagcagatgacgtatgggatatcttcagaaaaaatgctaaaagcatggaaagaaatggaagaaaaggccatccactatgctgaggttggtgtcattggatacctggaggatcagattatgtctttgcatgctgaaatcatggagctacagaagagcccctatggaagacgtcagggagacttgatggaatctctggaacagcgtgccattgatctatataagcagttaaaacacagaccttcagatcactcctacagtgacagcacagagatggtgaaaatcattgtgcacactgtgcagagtcaggaccgtgtgctcaaggagctgtttggtcatttgagcaagttgttgggctgtaagcagaagattattgatctactccctaaggtggaagtggccctcagtaatatcaaagaagctgacaatactgtcatgttcatgcagggaaaaaggcagaaagaaatatggcatctccttaaaattgcctgtacacagagttctgcccggtcccttgtaggatccagtctagaaggtgcagtaacccctcagacatcagcatggctgcccccgacttcagcagaacatgatcattctctgtcatgtgtggtaactcctcaagatggggagacttcagcacaaatgatagaagaaaatttgaactgccttggccatttaagcactattattcatgaggcaaatgaggaacagggcaatagtatgatggtaagttttgtgtggatatgggtgcctgctttggctatgttgggtgcaaaaggtttaactttccatgctagccttatctggcatttgggatgcatatgggaaatagaagaactcaagaggaaagagcatttggggaatatcctcaaccttaaatccttatctgccgttactcagggatatactaggattatgtcatcaattatcttcaataatagcatttttggtcaaattaaatgagtggtaagcttcttcacaatgtgaccattgaaattgaatggtttgttctgtacctttttgcttcagcaatcaattttctccattaagatgggacttgtactttaattcagatatggtacctcccgaatagaaaataaattatgttaatatagttgtaataataagtgtgtgttaagatttggttactataaactactgatttgttaaaacttgaggaaattaccataaaatgtctactgaatcaatttttcctgcatttagtcttaatgtcaattctgtacatttcctctttcattaagaaaaatagcagtggccaggcatggtggctcacgcctgtaatcctagcactttgggaggccaaggcaggtggattgcttgagcccaggagtttgagactagcctggccaacatgggaaaccctgtctttataaaaaatataaaaattggccaggtgtggtggcacacacctgtggtcccagctacttgggaggctgaggcaggaagatcgcttgagttcaagagtttcaggctgcagtgagccgtaatcctgccattgcactccagcctgtgacagagtgagactttgtctcggggaaaaaaaaaaaaaaaaaggataatggtggccagccatatgacatgtacctgtagtccgagttactagggaggctgaggcagaaggattgcatgagcccaggagttcaaggctgcagtgcattatgattggacttgtgaatagccactgtactccagcttggcaacatagcaaga

SEQ ID NO: 75911 - DNA, 253 bp, Homo sapiens
caaaactacttttctaaaatctaaaatttcataattctgaaacaacttgccccaagggtttcagagaaaggactgtggacctctatcatctgctaagtaatttagaagatattatttgtcttaaaaaatgtgaaatgcttttatattctaatagtttttcactttgtgtattaaatggtttttaaattactttcttgatctctattcattataaaaatcagattataataaaacagttgaatatggcttagga

SEQ ID NO: 75912 - DNA, 3607 bp, Homo sapiens
  misc_feature (3)..(4): n is a, c, g, or t
  misc_feature (15)..(16): n is a, c, g, or t
  misc_feature (18)..(18): n is a, c, g, or t
  misc_feature (22)..(22): n is a, c, g, or t
  misc_feature (26)..(26): n is a, c, g, or t
  misc_feature (30)..(30): n is a, c, g, or t
cannctcgcgagaannangacncgcnagcntcggcggcccggaaccggccttggaacatctgacggaacctgaggccgcttgccctcccgccccatggagcggcccccggggctgcggccgggcgcgggcgggccctgggagatgcgggagcggctgggcaccggcggcttcgggaacgtctgtctgtaccagcatcgggaacttgatctcaaaatagcaattaagtcttgtcgcctagagctaagtaccaaaaacagagaacgatggtgccatgaaatccagattatgaagaagttgaaccatgccaatgttgtaaaggcctgtgatgttcctgaagaattgaatattttgattcatgatgtgcctcttctagcaatggaatactgttctggaggagatctccgaaagctgctcaacaaaccagaaaattgttgtggacttaaagaaagccagatactttctttactaagtgatatagggtctgggattcgatatttgcatgaaaacaaaattatacatcgagatctaaaacctgaaaacatagttcttcaggatgttggtggaaagataatacataaaataattgatctgggatatgccaaagatgttgatcaaggaagtctgtgtacatcttttgtgggaacactgcagtatctggccccagagctctttgagaataagccttacacagccactgttgattattggagctttgggaccatggtatttgaatgtattgctggatataggccttttttgcatcatctgcagccatttacctggcatgagaagattaagaagaaggatccaaagtgtatatttgcatgtgaagagatgtcaggagaagttcggtttagtagccatttacctcaaccaaatagcctttgtagtttaatagtagaacccatggaaaactggctacagttgatgttgaattgggaccctcagcagagaggaggacctgttgaccttactttgaagcagccaagatgttttgtattaatggatcacattttgaatttgaagatagtacacatcctaaatatgacttctgcaaagataatttcttttctgttaccacctgatgaaagtcttcattcactacagtctcgtattgagcgtgaaactggaataaatactggttctcaagaacttctttcagagacaggaatttctctggatcctcggaaaccagcctctcaatgtgttctagatggagttagaggctgtgatagctatatggtttatttgtttgataaaagtaaaactgtatatgaagggccatttgcttccagaagtttatctgattgtgtaaattatattgtacaggacagcaaaatacagcttccaattatacagctgcgtaaagtgtgggctgaagcagtgcactatgtgtctggactaaaagaagactatagcaggctctttcagggacaaagggcagcaatgttaagtcttcttagatataatgctaacttaacaaaaatgaagaacactttgatctcagcatcacaacaactgaaagctaaattggagttttttcacaaaagcattcagcttgacttggagagatacagcgagcagatgacgtatgggatatcttcagaaaaaatgctaaaagcatggaaagaaatggaagaaaaggccatccactatgctgaggttggtgtcattggatacctggaggatcagattatgtctttgcatgctgaaatcatggagctacagaagagcccctatggaagacgtcagggagacttgatggaatctctggaacagcgtgccattgatctatataagcagttaaaacacagaccttcagatcactcctacagtgacagcacagagatggtgaaaatcattgtgcacactgtgcagagtcaggaccgtgtgctcaaggagctgtttggtcatttgagcaagttgttgggctgtaagcagaagattattgatctactccctaaggtggaagtggccctcagtaatatcaaagaagctgacaatactgtcatgttcatgcagggaaaaaggcagaaagaaatatggcatctccttaaaattgcctgtacacagagttctgcccggtcccttgtaggatccagtctagaaggtgcagtaacccctcagacatcagcatggctgcccccgacttcagcagaacatgatcattctctgtcatgtgtggtaactcctcaagatggggagacttcagcacaaatgatagaagaaaatttgaactgccttggccatttaagcactattattcatgaggcaaatgaggaacagggcaatagtatgatgaatcttgattggagttggttaacagaatgagttgtcacttgttcactgtccccaaacctatggaagttgttgctatacatgttggaaatgtgtttttcccccatgaaaccattcttcagacatcagtcaatggaagaaatggctatgaacagaaactacatttctactatgatcagaagaacatgattttacaagtataacagttttgagtaattcaagcctctaaacagacaggaatttagaaaaagtcaatgtacttgtttgaatatttgttttaataccacagctatttagaagcatcatcacgacacatttgccttcagtcttggtaaaacattacttatttaactgattaaaaataccttctatgtattagtgtcaacttttaacttttgggcgtaagaccaaatgtagttttgtatacagagaagaaaacctcaagtaataggcattttaagtaaaagtctacctgtgtttttttctaaaaaggctgctcacaagttctatttcttgaagaataaattctacctccttgtgttgcactgaacaggttctcttcctggcatcataaggagttggtgtaatcattttaaattccactgaaaatttaacagtatccccttctcatcgaagggattgtgtatctgtgcttctaatattagttggctttcataaatcatgttgttgtgtgtatatgtatttaagatgtacatttaataatatcaaagagaagatgcctgttaatttataatgtatttgaaaattacatgttttttcatttgtaaaaatgagtcatttgtttaaacaatctttcatgtcttgtcatacaaatttataaaggtctgcactcctttatctgtaattgtaattccaaaatccaaaaagctctgaaaacaaggtttccataagcttggtgacaaaattcatttgcttgcaatctaatctgaactgaccttgaatctttttatcccatttagtgtgaatattcctttattttgctgcttgatgatgagagggagggctgctgccacagactgtggtgagggctggttaatgtagtatggtatatgcacaaaactacttttctaaaatctaaaatttcataattctgaaacaacttgccccaagggtttcagagaaaggactgtggacctctatcatctgctaagtaatttagaagatattatttgtcttaaaaaatgtgaaatgcttttatattctaatagtttttcactttgtgtattaaatggtttttaaatttaaaaaaaaaaaaaaggggggggggcaaaagaatcccgaagggcc

SEQ ID NO: 75913 - DNA, 2926 bp, Homo sapiens
atgtgtaaagtcttgttcccagagatctctgagactaaactactgcacatgcacttgataattattagtcagctatgagtaccatggtatgcgaatgtattgctggatatccgtctttttagcatcatctgaattggaaaaccctgtgcatgagaagattaagaagaaggatccaaagtgtatatttgcatgtgaagagatgtcaggagaagttcggtttagtagccatttacctcaaccaaatagcctttgtagtttaatagtagaacccatggaaaactggctacagttgatgttgaattgggaccctcagcagagaggaggacctgttgaccttactttgaagcagccaagatgttttgtattaatggatcacattttgaatttgaagatagtacacatcctaaatatgacttctgcaaagataatttcttttctgttaccacctgatgaaagtcttcattcactacagtctcgtattgagcgtgaaactggaataaatactggttctcaagaacttctttcagagacaggaatttctctggatcctcggaaaccagcctctcaatgtgttctagatggagttagaggctgtgatagctatatggtttatttgtttgataaaagtaaaactgtatatgaagggccatttgcttccagaagtttatctgattgtgtaaattatattgtacaggacagcaaaatacagcttccaattatacagctgcgtaaagtgtgggctgaagcagtgcactatgtgtctggactaaaagaagactatagcaggctctttcagggacaaagggcagcaatgttaagtcttcttagatataatgctaacttaacaaaaatgaagaacactttgatctcagcatcacaacaactgaaagctaaattggagttttttcacaaaagcattcagcttgacttggagagatacagcgagcagatgacgtatgggatatcttcagaaaaaatgctaaaagcatggaaagaaatggaagaaaaggccatccactatgctgaggttggtgtcattggatacctggaggatcagattatgtctttgcatgctgaaatcatggagctacagaagagcccctatggaagacgtcagggagacttgatggaatctctggaacagcgtgccattgatctatataagcagttaaaacacagaccttcagatcactcctacagtgacagcacagagatggtgaaaatcattgtgcacactgtgcagagtcaggaccgtgtgctcaaggagctgtttggtcatttgagcaagttgttgggctgtaagcagaagattattgatctactccctaaggtggaagtggccctcagtaatatcaaagaagctgacaatactgtcatgttcatgcagggaaaaaggcagaaagaaatatggcatctccttaaaattgcctgtacacagagttctgcccggtcccttgtaggatccagtctagaaggtgcagtaacccctcagacatcagcatggctgcccccgacttcagcagaacatgatcattctctgtcatgtgtggtaactcctcaagatggggagacttcagcacaaatgatagaagaaaatttgaactgccttggccatttaagcactattattcatgaggcaaatgaggaacagggcaatagtatgatgaatcttgattggagttggttaacagaatgagttgtcacttgttcactgtccccaaacctatggaagttgttgctatacatgttggaaatgtgtttttcccccatgaaaccattcttcagacatcagtcaatggaagaaatggctatgaacagaaactacatttctactatgatcagaagaacatgattttacaagtataacagttttgagtaattcaagcctctaaacagacaggaatttagaaaaagtcaatgtacttgtttgaatatttgttttaataccacagctatttagaagcatcatcacgacacatttgccttcagtcttggtaaaacattacttatttaactgattaaaaataccttctatgtattagtgtcaacttttaacttttgggcgtaagaccaaatgtagttttgtatacagagaagaaaacctcaagtaataggcattttaagtaaaagtctacctgtgtttttttctaaaaaggctgctcacaagttctatttcttgaagaataaattctacctccttgtgttgcactgaacaggttctcttcctggcatcataaggagttggtgtaatcattttaaattccactgaaaatttaacagtatccccttctcatcgaagggattgtgtatctgtgcttctaatattagttggctttcataaatcatgttgttgtgtgtatatgtatttaagatgtacatttaataatatcaaagagaagatgcctgttaatttataatgtatttgaaaattacatgttttttcatttgtaaaaatgagtcatttgtttaaacaatctttcatgtcttgtcatacaaatttataaaggtctgcactcctttatctgtaattgtaattccaaaatccaaaaagctctgaaaacaaggtttccataagcttggtgacaaaattcatttgcttgcaatctaatctgaactgaccttgaatctttttatcccatttagtgtgaatattcctttattttgctgcttgatgatgagagggagggctgctgccacagactgtggtgagggctggttaatgtagtatggtatatgcacaaaactacttttctaaaatctaaaatttcataattctgaaacaacttgccccaagggtttcagagaaaggactgtggacctctatcatctgctaagtaatttagaagatattatttgtcttaaaaaatgtgaaatgcttttatattctaatagtttttcactttgtgtattaaatggtttttaaatt

SEQ ID NO: 75914 - DNA, 4568 bp, Homo sapiens
  misc_feature (3)..(4): n is a, c, g, or t
  misc_feature (15)..(16): n is a, c, g, or t
  misc_feature (18)..(18): n is a, c, g, or t
  misc_feature (22)..(22): n is a, c, g, or t
  misc_feature (26)..(26): n is a, c, g, or t
  misc_feature (30)..(30): n is a, c, g, or t
cannctcgcgagaannangacncgcnagcntcggcggcccggaaccggccttggaacatctgacggaacctgaggccgcttgccctcccgccccatggagcggcccccggggctgcggccgggcgcgggcgggccctgggagatgcgggagcggctgggcaccggcggcttcgggaacgtctgtctgtaccagcatcgggaacttgatctcaaaatagcaattaagtcttgtcgcctagagctaagtaccaaaaacagagaacgatggtgccatgaaatccagattatgaagaagttgaaccatgccaatgttgtaaaggcctgtgatgttcctgaagaattgaatattttgattcatgatgtgcctcttctagcaatggaatactgttctggaggagatctccgaaagctgctcaacaaaccagaaaattgttgtggacttaaagaaagccagatactttctttactaagtgatatagggtctgggattcgatatttgcatgaaaacaaaattatacatcgagatctaaaacctgaaaacatagttcttcaggatgttggtggaaagataatacataaaataattgatctgggatatgccaaagatgttgatcaaggaagtctgtgtacatcttttgtgggaacactgcagtatctggccccagagctctttgagaataagccttacacagccactgttgattattggagctttgggaccatggtatttgaatgtattgctggatataggccttttttgcatcatctgcagccatttacctggcatgagaagattaagaagaaggatccaaagtgtatatttgcatgtgaagagatgtcaggagaagttcggtttagtagccatttacctcaaccaaatagcctttgtagtttaatagtagaacccatggaaaactggctacagttgatgttgaattgggaccctcagcagagaggaggacctgttgaccttactttgaagcagccaagatgttttgtattaatggatcacattttgaatttgaagatagtacacatcctaaatatgacttctgcaaagataatttcttttctgttaccacctgatgaaagtcttcattcactacagtctcgtattgagcgtgaaactggaataaatactggttctcaagaacttctttcagagacaggaatttctctggatcctcggaaaccagcctctcaatgtgttctagatggagttagaggctgtgatagctatatggtttatttgtttgataaaagtaaaactgtatatgaagggccatttgcttccagaagtttatctgattgtgtaaattatattgtacaggacagcaaaatacagcttccaattatacagctgcgtaaagtgtgggctgaagcagtgcactatgtgtctggactaaaagaagactatagcaggctctttcagggacaaagggcagcaatgttaagtcttcttagatataatgctaacttaacaaaaatgaagaacactttgatctcagcatcacaacaactgaaagctaaattggagttttttcacaaaagcattcagcttgacttggagagatacagcgagcagatgacgtatgggatatcttcagaaaaaatgctaaaagcatggaaagaaatggaagaaaaggccatccactatgctgaggttggtgtcattggatacctggaggatcagattatgtctttgcatgctgaaatcatggagctacagaagagcccctatggaagacgtcagggagacttgatggaatctctggaacagcgtgccattgatctatataagcagttaaaacacagaccttcagatcactcctacagtgacagcacagagatggtgaaaatcattgtgcacactgtgcagagtcaggaccgtgtgctcaaggagctgtttggtcatttgagcaagttgttgggctgtaagcagaagattattgatctactccctaaggtggaagtggccctcagtaatatcaaagaagctgacaatactgtcatgttcatgcagggaaaaaggcagaaagaaatatggcatctccttaaaattgcctgtgtaagtaattattaatgaattatttaatgtgacattgagttgctattattccttgcaaaggggattttatcagcatgaggtgggccctcttgaagacatgtatattttgcattgggatgacatccatgttccttgcttggtgtccagactagcaattgagatgcaggacttattatcatctctcctttccaatttctctgttgttatactcctcttagcccttgactactgtggtattccaacctaacttggggatagatgtacctgcctagataatgaaattgaccatctattcaactgggttttttttttctttcttcaactaaaatggtataagatgagtggatatatttggttttagtcaatgaagaaagggtccaaggacaggttactaatggtgtgtaaaggtgggaatagttttgtactgaaatactctggttgtgcatataagtagtaacggaaatgtaagtcttaggaatatgataagaaattgtgtgaatcaacagagatgcttgcctgtaatcttttgatgtttttttcttttccttcagacacagagttctgcccggtcccttgtaggatccagtctagaaggtgcagtaacccctcagacatcagcatggctgcccccgacttcagcagaacatgatcattctctgtcatgtgtggtaactcctcaagatggagatgggtgggtttactttgtaacaatagatagctgtgttttcatagcagtggtataggaatgaggcagtagttgttaaggtagtcttctgtgccttcagaccagggttgagtcctgactatccctttgtaataatcttaggcaacttacttgacttttttgatgttcatatttcctcacctgtaaaacaggaatgtctcatagaactgctgtggaaatttgattagacaatgtatataaagtgcttgggaaataaatgttcagcaaatgttgcgtattattagctcaaatgttgcttattattagctaagtccaagttctaagtcctttcttttattggcttattactttcttttactcaaaccttactccttcattaacagtttatgagaaattatgctatcattttgcatttatcattttggggatccttgattacccttctaataaatttttgagatctattttataactttgtatttctaagattagacttttttcagtgttttaaatcagttttgcaagaactcagattccaagccctatattttattaattcctactcttttgctaaaagctgaatgactatccatttctgttattttctcagcttaagatgtgccgtatccaaagccagtggctctttgctagcttgtgtattgtcgcttttctcacaactcatggagacctctacagcaccagcatttcctggaagctctgcccataattagttttgcagaagtgcagccatgttacatcactgctcaggaggtcatgcagttgcacattctgtactctacttttatgagagaaaagcacatggcaggaaggcaagctgatatcagggagacttcagcacaaatgatagaagaaaatttgaactgccttggccatttaagcactattattcatgaggcaaatgaggaacagggcaatagtatgatggtaagttttgtgtggatatgggtgcctgctttggctatgttgggtgcaaaaggtttaactttccatgctagccttatctggcatttgggatgcatatgggaaatagaagaactcaagaggaaagagcatttggggaatatcctcaaccttaaatccttatctgccgttactcagggatatactaggattatgtcatcaattatcttcaataatagcatttttggtcaaattaaatgagtggtaagcttcttcacaatgtgaccattgaaattgaatggtttgttctgtacctttttgcttcagcaatcaattttctccattaagatgggacttgtactttaattcagatatggtacctcccgaatagaaaataaattatgttaatatagttgtaataataagtgtgtgttaagatttggttactataaactactgatttgttaaaacttgaggaaattaccataaaatgtctactgaatcaatttttcctgcatttagtcttaatgtcaattctgtacatttcctctttcattaagaaaaatagcagtggccaggcatggtggacacacctgtggtcccagctacttgggaggctgaggcaggaagatcgcttgagttcaagagtttcaggctgcagtgagccgtaatcctgccattgcactccagcctgtgacagagtgagactttgtctcggggaaaaaaaaaaaaaaaaaggataatggtggccagccatatgacatgtacctgtagtccgagttactagggaggctgaggcagaaggattgcatgagcccaggagttcaaggctgcagtgcattatgattggacttgtgaatagccactgtactccagcttggcaacatagcaaga

SEQ ID NO: 75915 - DNA, 1285 bp, Homo sapiens
  misc_feature (3)..(4): n is a, c, g, or t
  misc_feature (15)..(16): n is a, c, g, or t
  misc_feature (18)..(18): n is a, c, g, or t
  misc_feature (22)..(22): n is a, c, g, or t
  misc_feature (26)..(26): n is a, c, g, or t
  misc_feature (30)..(30): n is a, c, g, or t
cannctcgcgagaannangacncgcnagcntcggcggcccggaaccggccttggaacatctgacggaacctgaggccgcttgccctcccgccccatggagcggcccccggggctgcggccgggcgcgggcgggccctgggagatgcgggagcggctgggcaccggcggcttcgggaacgtctgtctgtaccagcatcgggaacttgatctcaaaatagcaattaagtcttgtcgcctagagctaagtaccaaaaacagagaacgatggtgccatgaaatccagattatgaagaagttgaaccatgccaatgttgtaaaggcctgtgatgttcctgaagaattgaatattttgattcatgatgtgcctcttctagcaatggaatactgttctggaggagatctccgaaagctgctcaacaaaccagaaaattgttgtggacttaaagaaagccagatactttctttactaagtgatatagggtctgggattcgatatttgcatgaaaacaaaattatacatcgagatctaaaacctgaaaacatagttcttcaggatgttggtggaaagataatacataaaataattgatctgggatatgccaaagatgttgatcaaggaagtctgtgtacatcttttgtgggaacactgcagtatctggccccagagctctttgagaataagccttacacagccactgttgattattggagctttgggaccatggtatttgaatgtattgctggatataggccttttttgcatcatctgcagccatttacctggcatgagaagattaagaagaaggatccaaagtgtatatttgcatgtgaagagatgtcaggagaagttcggtttagtagccatttacctcaaccaaatagcctttgtagtttaatagtagaacccatggaaaactggctacagttgatgttgaattgggaccctcagcagagaggaggacctgttgaccttactttgaagcagccaagatgttttgtattaatggatcacattttgaatttgaagaatagacacaccctaaatacgacttcttgctagtaaatttgatatataaaaccatctggccgacagattttaataactaaggcttcggatagaagtgcaaacccaacatacaacctattattcataaacttacacacagccccccactactccacttctttgtaaacccacccgaaaagttatccatagtttagttcaaagcctcaatattactttccgccctattaaatcgcatccatcctctattaaaaaaaaccc

SEQ ID NO: 75916 - DNA, 360 bp, Homo sapiens
ctctgacttcagagcacctcttccctgatgcactgtgctctgagcacacacaacagctatccaggagccagttctctgcatctaccctcatctggccattttgaaaaatgcaaagaaagaagtcactctaaattcaggcttaacaagatggttgtggttgagtggcagtggcctgtttactacatactgcctgtattagtccattttcatgttgctgataaagacatacctgagactgggtaatttacaaaagaaagaggtgtaatggacttacagttccacatggctggggaggcctcacaatcatggcagaaggtgaaaggcacgtctcacatggtggcagacaagagaagagagctt

SEQ ID NO: 75917 - DNA, 468 bp, Homo sapiens
aaattgattccagacaacattggaaaagatacagaaaaggtttgccaatttatcctctccatgatgtcttcattagaaaagtaaaaatgctggagaaccctgggtttgaaaggcatggagcttcgtggtggaggtagtagttctggaaaacccactagggacgagacacatgctaaagttgaatgagctgatggataggaaccaccagtccaagaatctgtttaaagttcagacttaaaacagtaccaaataaaaagtcctatttgtgaaaaacaaacaagaaacaacaatgaaagagcaaaattacgctgatgtggtggtgtatgcctgtaatcctagctactcaggaggctgaggcatgagaatcacttgaacccgggagacagaggttgcagtgagccaagattgcaccattgcactccagcctgggcaacagagtgagactctctccaaaaggaagaaaaaaaa

SEQ ID NO: 75918 - DNA, 365 bp, Homo sapiens
ccttcagcactattgaggcagatggaattcccataatgtgtataaaaaacagttttatggaacattaatgcttgtatttcatattctacttataaccaaatattagaaatagttgaaaagttcctttccaagctgatatttagattcatgaaaggaacactggacccttggtgataatgaatataaattttcttaataactgataccctctatcatgttctatactgatacggtttggctgtgtccccacccaaatctcatcctgaattccagtggaaggtgactgaattatggggactggtcttttctgtgctgttctcatgatagtgaatgagtctcatgagatctgatgactaaaaaaaaaa

SEQ ID NO: 75919 - DNA, 546 bp, Homo sapiens
tgcttcacttctggtctctgttttacagtagtgctcaccaatatttcaataaattctactgaacttactctaatagaacattattcaacccccaaagacttatctcttcactatgacatctccatactttatttttaggagacagactttcaaaaccagagaaatcaggtgccttcctcaaggtcatgctccaacccaggccaactattaaatgcttgcatctgttagctggattagtctctatgtatactgaactgtgatgaaaatctatagctttgttttagaaaattattgttgatggactattaatattatattaacaatttctcagtaagtgtgttttttcctcattgaatctaggaatgctgggctttaagttgataactgtgtcatttcaatcaagtacaaggattttgaggcagattttgctagatatcttagtaatcccccacaatgttttatgtaactcttctcagaatatcaatacattaattattttagatgacatattaaataatctatgaatattaatgaaaacaatacagt

SEQ ID NO: 75920 - DNA, 316 bp, Homo sapiens
aactggcatctagtgggtagaggtcaggggtgctgccaaaatcctatagtacataaggtaacaaaaaattattgagcctcaaatatcactaatgctgctgttgagaaaccctggcatgcatgtacacacacaaacacacacacacattctaattgaaacctacttgtgtccagagtataggctttgttttgtaagttaattgctaccaagtatacattttctcattgagaatatagaagtttgcttgctcacacaagaaacaaaactgactccgtgacctcatgaggactgtcaggaatatcagagacatgaatat

SEQ ID NO: 75921 - DNA, 462 bp, Homo sapiens
acaatctctccaagcaggagtcaccaaggcacatacacctttctttaaggaaacatcatcttccatgtttcacttattttcttcctgtcttttaaatcaacagtttatgggttttttttttccctcccttgatcacctggctgagatagaatttgtccatgtaaagttactggatttttttttcaatccatccttttcatactgtattttgtatacatactgaaattaatgtagttacaccaccttttagagggagattaatctcttcttgttaatttgttcctttattgatcagtcaatcacttacgtaagtatggactttacagatacctgttttatactgtgaattataatccaaggctgctttattttgtagctctaattgttctcgctttgaccgttgggaactttcagttgcttcccgtgtccctttgacatactcttattgtggggttttatctt

SEQ ID NO: 75922 - DNA, 493 bp, Homo sapiens
ttgttaaaatgtttttagctttgtttgtagaattgctttaactggtttcatctctgggagctacactttgaaatataactttagcaacattttactatactttttcacaacccagagcagtactattttatgcttagtggttaaactaattccataaatcttttgcaactatcctctattctttttcttgtaatttttacctgggaaggtttttactgataatcatcctatcctgagtcatcccacaaaccaatctgtctcactaatcattgcttctaacctacagactaagcataacttctgctaaatgatctttgataagatgctatgactctataaagtctttgatattcatgtctaaatttaatcacttgtagattttcatagaatcaatctttcacttctacaattgggagtatttataagttgtttatcttaaacagttcctctatcacgcttttcacgttaaataaagcaatcccttcaaatcaat

SEQ ID NO: 75923 - DNA, 1026 bp, Homo sapiens
tgacactgaggctaccgctagaccacggtccgcctggcaacgggcatcttcccagacgatggcgttaccgctagaccaaggagccctctggtggccctgtctgggcataacagaagcctcgcactcttgtcttctggtcacactcctcactatgtcccctcagctcctatctctgtatggccttttttttcctaggttatgattatagagtgaggattattataatactggaataaagagtaattgctacaaactaatgattaatgatattcatatataatcatatctaagatctatatttggtataactattcttgtttatgttttattatactggaacagcttgtgtccttggtctcttgcctcggcacctgggtggcttgctgcccacatacaacaatgttcatatcctaaactccagaatctgtgaatatcttaggtaatgtgacaaaggaaaattaagatatagatagtgtcaaggttaacaagcagctgacttcatgataaattatctttatcatgagcagaagcctcatgtaattagaagggcgcttaaatatgaaagagggagaaaaaaagacactttatcacactgatgtgatattaggtcaactcaatgcaatatttttttcctaagaaaatttttggggattattttcccattagcataaagttcagttcagttgttcaaacacctgtgatttatttttacatgcatattactatggatggtgataattaaacaaaaaatgcagaaaataaagaaatgctttctgaagagtgagcccaggtactatattattatatgagtatagacaatgtggactgtacatgtgattacatgtgattgtaaatgtgtggatgttttatatatgtataagtaatttgttgtataatatagtgctcaggctgcatttttaaaaatttgtatgaggtgggtttgatcaagataaatgggtgaaataaaaatgataaggttggtaatagttttgactatgcaataaataacattgatgataaaagtct

SEQ ID NO: 75924 - DNA, 371 bp, Homo sapiens
gtggtggggtacagggaagggtggataaaatgagaaaatatgagtacagtgattgtcacttaggaatccttcaataaatagtcaatgtagttagcctatcaactagggaaggggatgaggagatgaggctggaggatgggcggaggtgagaactgtcttgtccactgtggcagccactggccacacatggccatttagcatttgaaatgtagctagtctgaattgagatgtcttgtaaataaattaccttttgtacttctaagatgtagtatgaacaaacaacataaaatatccccatttttaatgattcatttatgtcaaaatcttaatatgttggatatattgtgttaaataaatattattaaaatttt

SEQ ID NO: 75925 - DNA, 387 bp, Homo sapiens
tccctttttctgtcaccagacattcagccacttataaaaatcactctctccccaaacttgtgattatctcctttctctcggtagttaaaatgagcacggttcagattcaatgtggcattttgaaagccaggggacacacccagggtgattatggtactcaggtacaggagaacagaaagacagttctctgctatggaatattaattataaatattagctccctttttactagattcaaaggcagttcagtggttactttaaaccaaggccaggtgtggtggctcacacctgtaatcctagcactttcggaagccaaggtgggagggtcacttgagctcaggagtttcaaaccgtcctgggcaagagagtgagacccacctctactta

SEQ ID NO: 75926 - DNA, 393 bp, Homo sapiens
tggccttgggcaatgtgatcagcgccttaggggaccagagcaagaaggtggtgcacgttccctacagggactccaagctcactcggctcctccaggattcgctggggggcaacagccagaccatcatgatcgcctgtgtgagcccctcagaccgagatttcatggagaccctcaacacactcaaatatgccaatcgggcccgcaacatcaagaacaaggtggtagtgaaccaggacaagaccagccagcaaatcagtgcactgcgggctgagattgctcggctgcagatggagctgatggagtataaggcgggcaagcgagtgataggagaggatggcgctgagggctatagtgatctgttccgagagaatgccatgctacagaaggagaatg

SEQ ID NO: 75927 - DNA, 276 bp, Homo sapiens
taagaggcagtgaggggcattcataacccaacgtttttctgctccccctatctgtctcctgctgggattctccagtggcccaagtaacttgaagacagagagcaagggagctccttgatgcagttctggaggtcagcctcctgggaacagaggaggatggaaaagactagagggggagatctggaagggcaaataaatggagtacatctagcacagaggactttgaagagagtcaagcttctaaaagcattagagaggctttgggttagccagtaa

SEQ ID NO: 75928 - DNA, 610 bp, Homo sapiens
cccattcaaaccaccgaagatcacatttaaaacaaagatctatcacccaaacatcgacgaaaaggggcaggtctgtctgccagtaattagtgctgaaaactggaagccagacaaccaaaaccgaccaagtaatccagtccctcatagcactggtgaatgacccccagccctgagcacccgcttcgggctgacctagctgaagaatactctaaggaccgtaaaaaattctgtaagaatgctgaagagtttacaaagaaatatggggaaaagcgacctgtggactaaaatctgccacgattggttccagcaagtgtgagcagagaccccgtgcagtgcattcagacaccccgcaaagcaggactctgtggaaattgacacgtgccaccgcctggcgttcgcttgtggcagttactaactttctacagttttcttaatcaaaagtggtctaggtaacctgtaaagaaaggattaaaaatttaagatgttctagttctgctctctttgttttaaaaatcactgcttcaatctacttcaaaagaatggtgtttcttttcttgtccaattttatccaaaatcttcaagttacatttaacccataaggtttaaaaaa

SEQ ID NO: 75929 - DNA, 898 bp, Homo sapiens
gagccggttgccagcccgggtcagccggacaccaaagcctctgggtgccggagaagctgctgccagcggagtccaaagtcagctccatagaagatggagcccccgactcagtggcgtcctctgcctgactctgtgttcacttctataataatctccactccctgggagcctggggagctggaggccaagctggttcgataaggacctgccatttggacaggacggggacgctgacaacgatccagagtcactggctgcgtcctacatgcagggccctattcaaagcctccacagcactgctcagcccatcttcctcacagtactgctcagcccgtcttcctaacagcactaagcaggcaatgctgccaccatcccctttccagaccagaaccccaagactcaagagtggtggaataatcagctcagactcccagctgacatgtggtggcacgtgctctggggttcccggggtgctgtagggagccggcgcgcagctctctcgtccaggacacacgagcaggagtgacctgcgtccagaaggtccatcactagccctggccatgtgctgagcacccaggcgatgccacgtggaatccaggtgagagagtcagcaccacctccatctgatgtgttagtctgaaggcagcgttacgtgttgcatctattagacaccaaccccacacaggtaagccatggccagccctggtccaccctccctgctttattccaggggtcccacagttccatctgccttgggtcttgccccttcaatccaccatattatccgctgacagagtaacctttttccgtaactcatgagctggtcatttaaagaaaaaggtggtgaattatgatttgagtgaattttaagaaatacaaattattttcagagtctaaa

SEQ ID NO: 75930 - DNA, 389 bp, Homo sapiens
  misc_feature (4)..(4): n is a, c, g, or t
  misc_feature (15)..(15): n is a, c, g, or t
  misc_feature (36)..(36): n is a, c, g, or t
  misc_feature (41)..(41): n is a, c, g, or t
  misc_feature (65)..(65): n is a, c, g, or t
  misc_feature (376)..(376): n is a, c, g, or t
  misc_feature (385)..(385): n is a, c, g, or t
  misc_feature (388)..(388): n is a, c, g, or t
ggcnggcacctgtantcccagctacttaggagactnaggcnggagaatagcttgaacctgggagntggaggttgcagtgtgctgagatcgcgccactgccctccagtagagtgagattccgtctcaaaaaaaaaaaaaaagaagaaatggagatacaaacttactacctacctccttacaacctaccctcacagtattactgtgaataaaagtgtgtgtagcactgggaacactattcacagagcactcatgaatgtttgttctttgttattagttactagagaggcaaatgtctgccagggctgaataatatgtgtgaattggtgattgtcgcacatatctaaagaagtagttatttttttcaattaaaacttantttaaaaanaana

SEQ ID NO: 75931 - DNA, 585 bp, Homo sapiens
tgtgtgctttctaagacatcaagaggcccagaatgtccagacatcttacttttgcctgattgaccttatctagttggtgttctttaacatgttccccatcccctgtaaaccctaataactaaactgataagagtcatcctcaaaattgagcaggcatctgaatcatctggtatacttagtaaaattccaattgctggtccccaatttctgacccaagactctgcatttttagcaatttgttgctgatacttctggtctggagcccataccttgagaacccctggtctagaggcctgataagattcaggcttaattttttttacagacatacttcataagtagtattgatagtttctttgaatctggttttttataatctttctaatgatgaaggaggaatgttctcaatactgacagtaatctcagttcttcaaactataggataggtttctgtagccacaatagtattttcgtcacaagggcccaaataagaatacatcatgtgtatttttagtagttattcaaattacaaattcactgtctttaatttattctaacaaaagtaaacctaattttatgattata

SEQ ID NO: 75932 - DNA, 1032 bp, Homo sapiens
aatgtcaaaaggaattactttctctttaaaggatagctcccacgcatacgggttgagtgggtatttttcttttgtgctggaatccagaggctccctcttgttctcaaggaaaatgtcagataacccacctgaccctgcttatgcacgtcattcaggttgcaagacacagaaagcttgtgccttcagtcaaggggttccttcacatgatagtggtcataaccccctttgccctttattaagccattgtccctcaactccaaacctacctttctatgctctgctctgtgatgctgggactggactctgcaaatgccacttctcctttgcccactggctcccattagagtactctagagggtgcctacaaacctggggcatcaagaaggagcagctccttccagtgtgcttctggctcctgtcaggatcaccccagcaatgctcacattgtctgtatatgccaagcaccagctcgttttccggcattgtcagagccagcttcattatgcccctccccagcagagcactggctgacctcagaggcctgagtatttgattcatgcccctcacttctaagctcttgagacaccagaaccagccaaacaaaaatctctccttagagatctgggtcccatttctgtggcgtccctcctcccaactctaggtcctgatggcctcacccttccgtttgttaccccagacacgggggtagaagcagcattctgtgggtacagccttggttgccccgatgccttctttgcctcctcagtctcagtcccatgcctgtttaaccagcttcttatattaaagtctctatgttgaaccatctagttggtttcttcctgactagaccctgaaagttaccttgttcaggttgtgggtacacctggctatgaggttccccagctgggcatgatggccctacatggcaaaggacaactccactttcggcctactgagctgactagcatcagcctccagcttcacactgagagatactgacctctgccctagcctctcgtcggatgggattgt

SEQ ID NO: 75933 - DNA, 353 bp, Homo sapiens
aagcctatgggacctataggacaccaagaagcaaacaaatatttgtgttgtgggaattctagaaggagaagaaacaagataaggtataagaaccctatttaggctggtgcaatgactcacacctgtaaccccagcaatctgggaggtcaagatgggaggattacttgagctcaggagttcaaggccagcctgggcaacatagtgagacctcatctctacaaaaactcagtcaggtatggcggcatgaactggtagtctcaactgctcaggagaatggggtgggagaactgcttgagcccagaaggtcaaggcttcagtgagctacaactgtaccaccgcactccagcctgggc

SEQ ID NO: 75934 - DNA, 4452 bp, Homo sapiens
cccgggaggaaggggaggaggccgagtgtttcctggcgcattcccggccagcccgagtgactcactcggccaaggaaactcccagggcccgcccaggacccccaagccgccgcggacgcagcccaggatggcggcccaggtgactctggaggacgcgctgtccaacgtggacctcctggaggagctgcccctgcccgaccagcagccctgcatcgagcccccgccatcctcgctgctctaccagccaaatttcaacactaactttgaagacagaaatgcatttgttactggcatcgcaagatacattgaacaagccaccgtccactctagcatgaacgagatgctggaggagggccaagaatatgctgtcatgctgtacacctggaggagctgctcccgggccatcccacaggtgaaatgtaacgagcagcctaacagagtggaaatctacgagaaaaccgtggaggttctggagcctgaggtcacaaaactgatgaatttcatgtacttccagagaaatgccattgagcgtttctgcggggaagtgaggcgcctgtgccatgccgagaggaggaaggacttcgtgtcagaagcctacctgatcacactgggcaaattcatcaacatgttcgctgtgctggacgagctgaagaacatgaagtgcagtgtgaagaacgaccactcagcgtacaagagggccgctcagtttttacgtaaaatggcagatccacagtccatccaggaatcgcagaatctgtccatgttcctggccaatcataacaagatcacacagtctctgcagcagcagctcgaagtgatttctggctacgaagagctcctggcagatattgtgaatctgtgtgtggattactacgagaacaggatgtatttgacgcccagtgagaaacacatgcttctcaaagtcatgggatttggtctgtacctgatggatgggagtgtcagtaacatctataagttggatgccaagaaaagaataaacttatccaaaatcgacaagtacttcaagcaactccaggtggttccgctatttggggacatgcaaatagaactggcaagatatatcaagaccagcgcccactacgaggaaaataaatctcgatggacgtgcacatcctccggcagcagccctcagtacaacatctgcgagcagatgatccagatccgcgaggaccacatgcgcttcatttcggagctggcgcgctacagcaacagcgaggtggtcacgggctcgggccgccaggaggcccagaagacggacgcggagtaccgcaagctcttcgacctggcgctgcagggcctgcagctgttgtcgcagtggagcgcgcacgtgatggaagtgtattcctggaagcttgtgcaccccaccgacaagtactccaacaaggactgccccgacagcgctgaagagtacgagcgtgccacgcgctacaactacaccagcgaggagaagtttgccctagtggaggtgatcgccatgatcaaaggcctgcaggtgctgatgggcaggatggagagcgtgttcaaccacgccatccggcacaccgtctatgccgcactgcaggacttctcccaggtgacccttagggagccgctgcggcaggccatcaagaagaagaagaacgtcatccagagtgtcctgcaggccatcaggaagaccgtgtgtgactgggagacggggcatgagcccttcaatgacccagccttgcggggcgagaaggaccccaagagcggcttcgacataaaagtaccacgccgcgccgtgggaccctccagcactcagctttacatggtgagaaccatgctagagtccctcattgcagacaaaagtggttccaagaaaaccttgagaagtagccttgaggggcccaccatattggacatagaaaaatttcatcgagagtcattcttctacactcacttgataaatttcagtgaaacgctgcagcagtgctgtgacctttcgcagctgtggttccgagagttcttcctggagctgaccatgggcaggaggatccagttccccattgagatgtcgatgccctggatcctgacggaccacatcctggagaccaaggaggcatcgatgatggagtacgtgctctactccctggacctgtacaatgacagcgcccactacgcgctcaccaggttcaacaagcagttcctgtacgacgaaattgaggccgaggtgaatctatgttttgaccaatttgtttacaagctagcagaccagatatttgcctattataaggttatggcaggaagtttgcttcttgataaacggttacgatcagaatgcaagaatcagggagccacgatccacctcccgccgtctaaccgctacgagacgctgctgaagcagaggcatgtgcagctcctcggcagatcaatagacctcaatcgtctgatcacccagcgcgtctcagcagccatgtataagtccctagaactggcgattggacgatttgaaagtgaagatttgacctccatagttgagctggatggcctgttggaaatcaaccgcatgacccacaagctgctgagccggtacctgacgctggacggcttcgacgccatgttccgggaggccaaccacaacgtgtcagcgccctacgggaggatcaccctgcacgtcttctgggagctcaactatgacttcctgcccaactactgctacaacggctctaccaaccggtttgttcggacagtgttaccattttctcaggaatttcaaagagataagcagcctaatgcacagcctcagtatctgcatggatccaaggctttgaacttggcctactccagcatttacggcagctaccggaacttcgtgggacctccacactttcaagtcatctgccggcttctcggctaccagggtatcgccgtggtcatggaggagctgctgaaggtcgtcaagagcctgctgcaaggcacaatcctgcagtacgtgaagacgctgatggaggtgatgcccaagatctgccgcctgccccggcacgagtacggctctcctggtatcctggagttcttccaccaccagctgaaggacatcgtggagtacgcagagctgaagacggtgtgcttccagaacctgcgggaggtggggaacgccatcctcttctgcctgctcatcgagcagagcctgtctttagaagaagtgtgtgacctgctgcacgcggctcctttccagaacatcttgccgcgagtccatgtgaaagagggggagagacttgatgccaaaatgaaaagactagaatcaaagtacgccccgctgcatcttgtcccactgattgaaagactggggacccctcagcaaattgccatcgcaagagagggggacctgctgacaaaggagcgcctctgctgcggcctgtccatgtttgaggtcatcctgacacggatccggagctttctggatgaccccatctggcgcgggcctctgcccagcaatggggtcatgcatgtggacgagtgtgtggagtttcacagactgtggagtgccatgcagtttgtctactgcattcccgtggggacacacgagttcacagtcgagcagtgctttggtgatgggctacactgggctggctgtatgatcatcgtacttcttgggcagcagcggcgttttgctgtgctggatttctgctaccatctacttaaagtccagaaacatgatggcaaagatgagattattaaaaatgtgcctttgaagaagatggtggagagaattcgcaagttccagattctcaatgatgagatcatcaccatcctggataagtacctgaagtcaggcgacggggagggcacgccagtggagcatgtgcgctgcttccagccgcccatccaccagtccctcgccagcagctgagggcacgcgctgcactccgtaactcaacatggcatgcctttctctccgtaaactatttagtgagatttttagggactatttttcagtatctctgtacctgttaaagggggtgcttttcgatctaaaaacttaattttataaaattgacttatttttctagactaaaattgtatatgcttttggtaattaggaactcttgagaatattggctgctgattgttgccatcacgttcctacaaaattgtttttctatgggatgttctggcagctgtgtcataaaatgctgctgggttcattcattcattccataagaaacttaataccagcaaatgcattaaatcccttgccagttaccattaactgtaactatttagcttttgtttagggatctttctgatggtcttttatgagcaatcttagttctaagtcattgttcccatcccttttttgtgtgtttcagaaaatagtgaacttgattcccctgcttccactaaatccagttgtgacaaaatctaacgtgacatcagatcgaaaggttatagaaataaaactaatgagatcta

SEQ ID NO: 75935 - DNA, 794 bp, Homo sapiens
gggctaggtagcgaggctgggtgggctctaccaaccgtttgttcggacagtgttaccattttctcaggaatttcaaagagataagcagcctaatgcacagcctcagtatctgcatggatccaaggctttgaacttggcctactccagcatttacggcagctaccggaacttcgtgggacctccacactttcaagtcatctgccggcttctcggctaccagggtatcgccgtggtcatggaggagctgctgaaggtcgtcaagagcctgctgcaaggcacaatcctgcagtacgtgaagacgctgatggaggtgatgcccaagatctgccgcctgccccggcacgagtacggctctcctggtatcctggagttcttccaccaccagctgaaggacatcgtggagtacgcagagctgaagacggtgtgcttccagaacctgcgggaggtggggaacgccatcctcttctgcctgctcatcgagcagagcctgtctttagaagaagtgtgtgacctgctgcacgcggctcctttccagaacatcttgccgcgagtccatgtgaaagagggggagagacttgatgccaaaatgaaaagactagaatcaaagtacgccccgctgcatcttgtcccactgattgaaagactggggacccctcagcaaattgccatcgcaagagagggggacctgctgacaaaggagcgcctctgctgcggcctgtccatgtttgaggtctctgaccgatcggggttctggtggccctcgggcggcctgccgcggggcggtgtgcccgggg

SEQ ID NO: 75936 - DNA, 1880 bp, Homo sapiens
tccttatgccagaaaaattcgagttcttccctatctattctgaaatgtaccataaattattttaattaatagtcaccctaactgatctatctaacactgtcttatttctaatatcagactgtacatttgtacccattaatgtcgcttcacgccctgcatttttaagataacattttctctttggagctccagccatcaatgtcttttgttgaacattagtaaattatttctggtgccatataaagatttggatacctgtaagcaatgaaagattttcccttttgtgatttattttgatcacataaaaattatcaaattggaagagtacatggtcatttgaaaggcaaaatctttatttacttacttattattttattttttgtagagatgaggcctcactatattgctcaggctgatcttgaactcttgggctcaagtgatcctcctgcctcaacctcccaagtgctggggtcataggcatgagccactgtgcctggcccagaatcctttttaaaatgatgatgaaatgccagagtcttagatactcagcactcactatccaggccattttgccgggtagattttttaaacgagaggttacagggccagggtcttttgcccatctgtggagatggacggtgtgtgcgccctcatgtgtgactttcagaatgcagcaaaggtttgaaggctggcctggctttggccaccatcgtgtgagtcagaccagaagccaggcgttttgcatgcaatatggaacacctctgctctttcggccaccacagtattcctggaagcttgtgcaccccaccgacaagtactccaacaaggactgccccgacagcgctgaagagtacgagcgtgccacgcgctacaactacaccagcgaggagaagtttgccctagtggaggtgaggatgctcggccgctcgctcttcctcatgtcgctctagcttcacaccatcttctctgtcaaaagcaaaaacatgaacaaaactgcctgtttactcattgcttctgtgtgggcacccctttccatctggcagagtagtcagagtagaacgcattagagaaacagtggttgtcggtcctgggtctgcactgaagctccctgggtgcgaatctggactcctggacctgcgtctggatggagagcagtgtcgggtgcggggaagggaggtgaaagagatgtggcccctgctgagagagaagagctgtcttgctctcctgtgaggcaggcgctgcactcccctcgtgagcctttccatgggcagctcttcattccagcatcaactggtatcttttctttcatagctgtgcttttcctgtgctgtttgagaaatctttgcatactctcaggtcgtgaaggtattctgcattgctttctggatacttcactctgctttcacactgagatgcgaaattcacctgaaattcatttttgaaacaattccgtccaaccctcacgctgccacctttgtagctggtcacgtgacaatgcatgtgtggctgtgtttctgctctgctctaacccagtgtcagttgctgtcggtatcccagcaccactctgtagctttgtagtcatctaccgtgtatgagaaagcacgtctttctgtctcctagacttccttggctattcttccccactgtagtttcatattcattttagaatcagcttttcccatcccacagtgaggattttaatcaggatatgaacaatcctatggatcatgacaggagaattgacagaagtctcatacagttggccctcagtgttcttgggttccacctccatgaaccaaccttgggtcaaaaatgttcagaaagaaaaaataacactacaacagtgaaaagtaataaaaatgttaaaaaccactgttttg

SEQ ID NO: 75937 - DNA, 317 bp, Homo sapiens
attgaagcccgttgcaagagctgactctttggagcgcctgtgccatgccgagaggaggaaggacttcgtgtcagaagcctacctgatcacactgggcaaattcatcaacatgttcgctgtgctggacgagctgaagaacatgaagtgcagtgtgaagaacgaccactcagcgtacaagagggccgctcagtttttacgtaaaatggcagatccacagtccatccaggaatcgcagaatctgtccatgttcctggccaatcataacaagatcacacagtctctgccatgagcttttcgtagcctgaaatcacttcgag

SEQ ID NO: 75938 - DNA, 4432 bp, Homo sapiens
tcacggacgccaccaaatatgtctaggtcgtggctgggtgttattcaggccgtggactctcccatggtcctacctggactcccatgccggcggttactcagcccaggatggcggcccaggtgactctggaggacgcgctgtccaacgtggacctcctggaggagctgcccctgcccgaccagcagccctgcatcgagcccccgccatcctcgctgctctaccagccaaatttcaacactaactttgaagacagaaatgcatttgttactggcatcgcaagatacattgaacaagccaccgtccactctagcatgaacgagatgctggaggagggccaagaatatgctgtcatgctgtacacctggaggagctgctcccgggccatcccacaggtgaaatgtaacgagcagcctaacagagtggaaatctacgagaaaaccgtggaggttctggagcctgaggtcacaaaactgatgaatttcatgtacttccagagaaatgccattgagcgtttctgcggggaagtgaggcgcctgtgccatgccgagaggaggaaggacttcgtgtcagaagcctacctgatcacactgggcaaattcatcaacatgttcgctgtgctggacgagctgaagaacatgaagtgcagtgtgaagaacgaccactcagcgtacaagagggccgctcagtttttacgtaaaatggcagatccacagtccatccaggaatcgcagaatctgtccatgttcctggccaatcataacaagatcacacagtctctgcagcagcagctcgaagtgatttctggctacgaagagctcctggcagatattgtgaatctgtgtgtggattactacgagaacaggatgtatttgacgcccagtgagaaacacatgcttctcaaagtcatgggatttggtctgtacctgatggatgggagtgtcagtaacatctataagttggatgccaagaaaagaataaacttatccaaaatcgacaagtacttcaagcaactccaggtggttccgctatttggggacatgcaaatagaactggcaagatatatcaagaccagcgcccactacgaggaaaataaatctcgatggacgtgcacatcctccggcagcagccctcagtacaacatctgcgagcagatgatccagatccgcgaggaccacatgcgcttcatttcggagctggcgcgctacagcaacagcgaggtggtcacgggctcgggccgccaggaggcccagaagacggacgcggagtaccgcaagctcttcgacctggcgctgcagggcctgcagctgttgtcgcagtggagcgcgcacgtgatggaagtgtattcctggaagcttgtgcaccccaccgacaagtactccaacaaggactgccccgacagcgctgaagagtacgagcgtgccacgcgctacaactacaccagcgaggagaagtttgccctagtggaggtgatcgccatgatcaaaggcctgcaggtgctgatgggcaggatggagagcgtgttcaaccacgccatccggcacaccgtctatgccgcactgcaggacttctcccaggtgacccttagggagccgctgcggcaggccatcaagaagaagaagaacgtcatccagagtgtcctgcaggccatcaggaagaccgtgtgtgactgggagacggggcatgagcccttcaatgacccagccttgcggggcgagaaggaccccaagagcggcttcgacataaaagtaccacgccgcgccgtgggaccctccagcactcagctttacatggtgagaaccatgctagagtccctcattgcagacaaaagtggttccaagaaaaccttgagaagtagccttgaggggcccaccatattggacatagaaaaatttcatcgagagtcattcttctacactcacttgataaatttcagtgaaacgctgcagcagtgctgtgacctttcgcagctgtggttccgagagttcttcctggagctgaccatgggcaggaggatccagttccccattgagatgtcgatgccctggatcctgacggaccacatcctggagaccaaggaggcatcgatgatggagtacgtgctctactccctggacctgtacaatgacagcgcccactacgcgctcaccaggttcaacaagcagttcctgtacgacgaaattgaggccgaggtgaatctatgttttgaccaatttgtttacaagctagcagaccagatatttgcctattataaggttatggcaggaagtttgcttcttgataaacggttacgatcagaatgcaagaatcagggagccacgatccacctcccgccgtctaaccgctacgagacgctgctgaagcagaggcatgtgcagctcctcggcagatcaatagacctcaatcgtctgatcacccagcgcgtctcagcagccatgtataagtccctagaactggcgattggacgatttgaaagtgaagatttgacctccatagttgagctggatggcctgttggaaatcaaccgcatgacccacaagctgctgagccggtacctgacgctggacggcttcgacgccatgttccgggaggccaaccacaacgtgtcagcgccctacgggaggatcaccctgcacgtcttctgggagctcaactatgacttcctgcccaactactgctacaacggctctaccaaccggtttgttcggacagtgttaccattttctcaggaatttcaaagagataagcagcctaatgcacagcctcagtatctgcatggatccaaggctttgaacttggcctactccagcatttacggcagctaccggaacttcgtgggacctccacactttcaagtcatctgccggcttctcggctaccagggtatcgccgtggtcatggaggagctgctgaaggtcgtcaagagcctgctgcaaggcacaatcctgcagtacgtgaagacgctgatggaggtgatgcccaagatctgccgcctgccccggcacgagtacggctctcctggtatcctggagttcttccaccaccagctgaaggacatcgtggagtacgcagagctgaagacggtgtgcttccagaacctgcgggaggtggggaacgccatcctcttctgcctgctcatcgagcagagcctgtctttagaagaagtgtgtgacctgctgcacgcggctcctttccagaacatcttgccgcgagtccatgtgaaagagggggagagacttgatgccaaaatgaaaagactagaatcaaagtacgccccgctgcatcttgtcccactgattgaaagactggggacccctcagcaaattgccatcgcaagagagggggacctgctgacaaaggagcgcctctgctgcggcctgtccatgtttgaggtcatcctgacacggatccggagctttctggatgaccccatctggcgcgggcctctgcccagcaatggggtcatgcatgtggacgagtgtgtggagtttcacagactgtggagtgccatgcagtttgtctactgcattcccgtggggacacacgagttcacagtcgagcagtgctttggtgatgggctacactgggctggctgtatgatcatcgtacttcttgggcagcagcggcgttttgctgtgctggatttctgctaccatctacttaaagtccagaaacatgatggcaaagatgagattattaaaaatgtgcctttgaagaagatggtggagagaattcgcaagttccagattctcaatgatgagatcatcaccatcctggataagtacctgaagtcaggcgacggggagggcacgccagtggagcatgtgcgctgcttccagccgcccatccaccagtccctcgccagcagctgagggcacgcgctgcactccgtaactcaacatggcatgcctttctctccgtaaactatttagtgagatttttagggactatttttcagtatctctgtacctgttaaagggggtgcttttcgatctaaaaacttaattttataaaattgacttatttttctagactaaaattgtatatgcttttggtaattaggaactcttgagaatattggctgctgattgttgccatcacgttcctacaaaattgtttttctatgggatgttctggcagctgtgtcataaaatgctgctgggttcattcattcattccataagaaacttaataccagcaaatgcattaaatcccttgccagttaccattaactgtaactatttagcttttgtttagggatctttctgatggtcttttatgagcaatcttagttctaagtcattgttcccatcccttttttgtgtgtttcagaaaatagtgaacttgattcccctgcttccactaaatccagttgtgacaaaatctaacgtgacatcagatcgaaaggttatagaaataaaactaatgagatcta

SEQ ID NO: 75939 - DNA, 4525 bp, Homo sapiens
tcagttcctgagaaaatgggtggcgtctccagccgccattggggattggcctgcaattgtttccatgtatctgtggaaccggcccaacaccccgcgtggatgcctgagcctggagactgtactgaaccctgcgtagtctatgtttttccgtacttgcataccagtgacgaactttaattggtaaattaggcacgcccaggatggcggcccaggtgactctggaggacgcgctgtccaacgtggacctcctggaggagctgcccctgcccgaccagcagccctgcatcgagcccccgccatcctcgctgctctaccagccaaatttcaacactaactttgaagacagaaatgcatttgttactggcatcgcaagatacattgaacaagccaccgtccactctagcatgaacgagatgctggaggagggccaagaatatgctgtcatgctgtacacctggaggagctgctcccgggccatcccacaggtgaaatgtaacgagcagcctaacagagtggaaatctacgagaaaaccgtggaggttctggagcctgaggtcacaaaactgatgaatttcatgtacttccagagaaatgccattgagcgtttctgcggggaagtgaggcgcctgtgccatgccgagaggaggaaggacttcgtgtcagaagcctacctgatcacactgggcaaattcatcaacatgttcgctgtgctggacgagctgaagaacatgaagtgcagtgtgaagaacgaccactcagcgtacaagagggccgctcagtttttacgtaaaatggcagatccacagtccatccaggaatcgcagaatctgtccatgttcctggccaatcataacaagatcacacagtctctgcagcagcagctcgaagtgatttctggctacgaagagctcctggcagatattgtgaatctgtgtgtggattactacgagaacaggatgtatttgacgcccagtgagaaacacatgcttctcaaagtcatgggatttggtctgtacctgatggatgggagtgtcagtaacatctataagttggatgccaagaaaagaataaacttatccaaaatcgacaagtacttcaagcaactccaggtggttccgctatttggggacatgcaaatagaactggcaagatatatcaagaccagcgcccactacgaggaaaataaatctcgatggacgtgcacatcctccggcagcagccctcagtacaacatctgcgagcagatgatccagatccgcgaggaccacatgcgcttcatttcggagctggcgcgctacagcaacagcgaggtggtcacgggctcgggccgccaggaggcccagaagacggacgcggagtaccgcaagctcttcgacctggcgctgcagggcctgcagctgttgtcgcagtggagcgcgcacgtgatggaagtgtattcctggaagcttgtgcaccccaccgacaagtactccaacaaggactgccccgacagcgctgaagagtacgagcgtgccacgcgctacaactacaccagcgaggagaagtttgccctagtggaggtgatcgccatgatcaaaggcctgcaggtgctgatgggcaggatggagagcgtgttcaaccacgccatccggcacaccgtctatgccgcactgcaggacttctcccaggtgacccttagggagccgctgcggcaggccatcaagaagaagaagaacgtcatccagagtgtcctgcaggccatcaggaagaccgtgtgtgactgggagacggggcatgagcccttcaatgacccagccttgcggggcgagaaggaccccaagagcggcttcgacataaaagtaccacgccgcgccgtgggaccctccagcactcagctttacatggtgagaaccatgctagagtccctcattgcagacaaaagtggttccaagaaaaccttgagaagtagccttgaggggcccaccatattggacatagaaaaatttcatcgagagtcattcttctacactcacttgataaatttcagtgaaacgctgcagcagtgctgtgacctttcgcagctgtggttccgagagttcttcctggagctgaccatgggcaggaggatccagttccccattgagatgtcgatgccctggatcctgacggaccacatcctggagaccaaggaggcatcgatgatggagtacgtgctctactccctggacctgtacaatgacagcgcccactacgcgctcaccaggttcaacaagcagttcctgtacgacgaaattgaggccgaggtgaatctatgttttgaccaatttgtttacaagctagcagaccagatatttgcctattataaggttatggcaggaagtttgcttcttgataaacggttacgatcagaatgcaagaatcagggagccacgatccacctcccgccgtctaaccgctacgagacgctgctgaagcagaggcatgtgcagctcctcggcagatcaatagacctcaatcgtctgatcacccagcgcgtctcagcagccatgtataagtccctagaactggcgattggacgatttgaaagtgaagatttgacctccatagttgagctggatggcctgttggaaatcaaccgcatgacccacaagctgctgagccggtacctgacgctggacggcttcgacgccatgttccgggaggccaaccacaacgtgtcagcgccctacgggaggatcaccctgcacgtcttctgggagctcaactatgacttcctgcccaactactgctacaacggctctaccaaccggtttgttcggacagtgttaccattttctcaggaatttcaaagagataagcagcctaatgcacagcctcagtatctgcatggatccaaggctttgaacttggcctactccagcatttacggcagctaccggaacttcgtgggacctccacactttcaagtcatctgccggcttctcggctaccagggtatcgccgtggtcatggaggagctgctgaaggtcgtcaagagcctgctgcaaggcacaatcctgcagtacgtgaagacgctgatggaggtgatgcccaagatctgccgcctgccccggcacgagtacggctctcctggtatcctggagttcttccaccaccagctgaaggacatcgtggagtacgcagagctgaagacggtgtgcttccagaacctgcgggaggtggggaacgccatcctcttctgcctgctcatcgagcagagcctgtctttagaagaagtgtgtgacctgctgcacgcggctcctttccagaacatcttgccgcgagtccatgtgaaagagggggagagacttgatgccaaaatgaaaagactagaatcaaagtacgccccgctgcatcttgtcccactgattgaaagactggggacccctcagcaaattgccatcgcaagagagggggacctgctgacaaaggagcgcctctgctgcggcctgtccatgtttgaggtcatcctgacacggatccggagctttctggatgaccccatctggcgcgggcctctgcccagcaatggggtcatgcatgtggacgagtgtgtggagtttcacagactgtggagtgccatgcagtttgtctactgcattcccgtggggacacacgagttcacagtcgagcagtgctttggtgatgggctacactgggctggctgtatgatcatcgtacttcttgggcagcagcggcgttttgctgtgctggatttctgctaccatctacttaaagtccagaaacatgatggcaaagatgagattattaaaaatgtgcctttgaagaagatggtggagagaattcgcaagttccagattctcaatgatgagatcatcaccatcctggataagtacctgaagtcaggcgacggggagggcacgccagtggagcatgtgcgctgcttccagccgcccatccaccagtccctcgccagcagctgagggcacgcgctgcactccgtaactcaacatggcatgcctttctctccgtaaactatttagtgagatttttagggactatttttcagtatctctgtacctgttaaagggggtgcttttcgatctaaaaacttaattttataaaattgacttatttttctagactaaaattgtatatgcttttggtaattaggaactcttgagaatattggctgctgattgttgccatcacgttcctacaaaattgtttttctatgggatgttctggcagctgtgtcataaaatgctgctgggttcattcattcattccataagaaacttaataccagcaaatgcattaaatcccttgccagttaccattaactgtaactatttagcttttgtttagggatctttctgatggtcttttatgagcaatcttagttctaagtcattgttcccatcccttttttgtgtgtttcagaaaatagtgaacttgattcccctgcttccactaaatccagttgtgacaaaatctaacgtgacatcagatcgaaaggttatagaaataaaactaatgagatcta

SEQ ID NO: 75940 - DNA, 3816 bp, Homo sapiens
agttcgacggagactctcccctaccgcttgggttaggctaggggagaggatttgttttttccgcttttagcgactgacctggaagcccagccccgctttgtatcccagtttcactgaggataaaatgatgcatttcaagcaccagacaagcagcctaaagatagatctttgtgatctatttcaaattgtgccttcaaagtcatcagctgtaacagtgtaagtccttatgggtagtgaaattctcagttctgagctttgtcgcatcattcattttgtggcttttcaggtcatgggatttggtctgtacctgatggatgggagtgtcagtaacatctataagttggatgccaagaaaagaataaacttatccaaaatcgacaagtacttcaagcaactccaggtggttccgctatttggggacatgcaaatagaactggcaagatatatcaagaccagcgcccactacgaggaaaataaatctcgatggacgtgcacatcctccggcagcagccctcagtacaacatctgcgagcagatgatccagatccgcgaggaccacatgcgcttcatttcggagctggcgcgctacagcaacagcgaggtggtcacgggctcgggccgccaggaggcccagaagacggacgcggagtaccgcaagctcttcgacctggcgctgcagggcctgcagctgttgtcgcagtggagcgcgcacgtgatggaagtgtattcctggaagcttgtgcaccccaccgacaagtactccaacaaggactgccccgacagcgctgaagagtacgagcgtgccacgcgctacaactacaccagcgaggagaagtttgccctagtggaggtgatcgccatgatcaaaggcctgcaggtgctgatgggcaggatggagagcgtgttcaaccacgccatccggcacaccgtctatgccgcactgcaggacttctcccaggtgacccttagggagccgctgcggcaggccatcaagaagaagaagaacgtcatccagagtgtcctgcaggccatcaggaagaccgtgtgtgactgggagacggggcatgagcccttcaatgacccagccttgcggggcgagaaggaccccaagagcggcttcgacataaaagtaccacgccgcgccgtgggaccctccagcactcagctttacatggtgagaaccatgctagagtccctcattgcagacaaaagtggttccaagaaaaccttgagaagtagccttgaggggcccaccatattggacatagaaaaatttcatcgagagtcattcttctacactcacttgataaatttcagtgaaacgctgcagcagtgctgtgacctttcgcagctgtggttccgagagttcttcctggagctgaccatgggcaggaggatccagttccccattgagatgtcgatgccctggatcctgacggaccacatcctggagaccaaggaggcatcgatgatggagtacgtgctctactccctggacctgtacaatgacagcgcccactacgcgctcaccaggttcaacaagcagttcctgtacgacgaaattgaggccgaggtgaatctatgttttgaccaatttgtttacaagctagcagaccagatatttgcctattataaggttatggcaggaagtttgcttcttgataaacggttacgatcagaatgcaagaatcagggagccacgatccacctcccgccgtctaaccgctacgagacgctgctgaagcagaggcatgtgcagctcctcggcagatcaatagacctcaatcgtctgatcacccagcgcgtctcagcagccatgtataagtccctagaactggcgattggacgatttgaaagtgaagatttgacctccatagttgagctggatggcctgttggaaatcaaccgcatgacccacaagctgctgagccggtacctgacgctggacggcttcgacgccatgttccgggaggccaaccacaacgtgtcagcgccctacgggaggatcaccctgcacgtcttctgggagctcaactatgacttcctgcccaactactgctacaacggctctaccaaccggtttgttcggacagtgttaccattttctcaggaatttcaaagagataagcagcctaatgcacagcctcagtatctgcatggatccaaggctttgaacttggcctactccagcatttacggcagctaccggaacttcgtgggacctccacactttcaagtcatctgccggcttctcggctaccagggtatcgccgtggtcatggaggagctgctgaaggtcgtcaagagcctgctgcaaggcacaatcctgcagtacgtgaagacgctgatggaggtgatgcccaagatctgccgcctgccccggcacgagtacggctctcctggtatcctggagttcttccaccaccagctgaaggacatcgtggagtacgcagagctgaagacggtgtgcttccagaacctgcgggaggtggggaacgccatcctcttctgcctgctcatcgagcagagcctgtctttagaagaagtgtgtgacctgctgcacgcggctcctttccagaacatcttgccgcgagtccatgtgaaagagggggagagacttgatgccaaaatgaaaagactagaatcaaagtacgccccgctgcatcttgtcccactgattgaaagactggggacccctcagcaaattgccatcgcaagagagggggacctgctgacaaaggagcgcctctgctgcggcctgtccatgtttgaggtcatcctgacacggatccggagctttctggatgaccccatctggcgcgggcctctgcccagcaatggggtcatgcatgtggacgagtgtgtggagtttcacagactgtggagtgccatgcagtttgtctactgcattcccgtggggacacacgagttcacagtcgagcagtgctttggtgatgggctacactgggctggctgtatgatcatcgtacttcttgggcagcagcggcgttttgctgtgctggatttctgctaccatctacttaaagtccagaaacatgatggcaaagatgagattattaaaaatgtgcctttgaagaagatggtggagagaattcgcaagttccagattctcaatgatgagatcatcaccatcctggataagtacctgaagtcaggcgacggggagggcacgccagtggagcatgtgcgctgcttccagccgcccatccaccagtccctcgccagcagctgagggcacgcgctgcactccgtaactcaacatggcatgcctttctctccgtaaactatttagtgagatttttagggactatttttcagtatctctgtacctgttaaagggggtgcttttcgatctaaaaacttaattttataaaattgacttatttttctagactaaaattgtatatgcttttggtaattaggaactcttgagaatattggctgctgattgttgccatcacgttcctacaaaattgtttttctatgggatgttctggcagctgtgtcataaaatgctgctgggttcattcattcattccataagaaacttaataccagcaaatgcattaaatcccttgccagttaccattaactgtaactatttagcttttgtttagggatctttctgatggtcttttatgagcaatcttagttctaagtcattgttcccatcccttttttgtgtgtttcagaaaatagtgaacttgattcccctgcttccactaaatccagttgtgacaaaatctaacgtgacatcagatcgaaaggttatagaaataaaactaatgagatcta

SEQ ID NO: 75941 - DNA, 3874 bp, Homo sapiens
tccttatgccagaaaaattcgagttcttccctatctattctgaaatgtaccataaattattttaattaatagtcaccctaactgatctatctaacactgtcttatttctaatatcagactgtacatttgtacccattaatgtcgcttcacgccctgcatttttaagataacattttctctttggagctccagccatcaatgtcttttgttgaacattagtaaattatttctggtgccatataaagatttggatacctgtaagcaatgaaagattttcccttttgtgatttattttgatcacataaaaattatcaaattggaagagtacatggtcatttgaaaggcaaaatctttatttacttacttattattttattttttgtagagatgaggcctcactatattgctcaggctgatcttgaactcttgggctcaagtgatcctcctgcctcaacctcccaagtgctggggtcataggcatgagccactgtgcctggcccagaatcctttttaaaatgatgatgaaatgccagagtcttagatactcagcactcactatccaggccattttgccgggtagattttttaaacgagaggttacagggccagggtcttttgcccatctgtggagatggacggtgtgtgcgccctcatgtgtgactttcagaatgcagcaaaggtttgaaggctggcctggctttggccaccatcgtgtgagtcagaccagaagccaggcgttttgcatgcaatatggaacacctctgctctttcggccaccacagtattcctggaagcttgtgcaccccaccgacaagtactccaacaaggactgccccgacagcgctgaagagtacgagcgtgccacgcgctacaactacaccagcgaggagaagtttgccctagtggaggtgatcgccatgatcaaaggcctgcaggtgctgatgggcaggatggagagcgtgttcaaccacgccatccggcacaccgtctatgccgcactgcaggacttctcccaggtgacccttagggagccgctgcggcaggccatcaagaagaagaagaacgtcatccagagtgtcctgcaggccatcaggaagaccgtgtgtgactgggagacggggcatgagcccttcaatgacccagccttgcggggcgagaaggaccccaagagcggcttcgacataaaagtaccacgccgcgccgtgggaccctccagcactcagctttacatggtgagaaccatgctagagtccctcattgcagacaaaagtggttccaagaaaaccttgagaagtagccttgaggggcccaccatattggacatagaaaaatttcatcgagagtcattcttctacactcacttgataaatttcagtgaaacgctgcagcagtgctgtgacctttcgcagctgtggttccgagagttcttcctggagctgaccatgggcaggaggatccagttccccattgagatgtcgatgccctggatcctgacggaccacatcctggagaccaaggaggcatcgatgatggagtacgtgctctactccctggacctgtacaatgacagcgcccactacgcgctcaccaggttcaacaagcagttcctgtacgacgaaattgaggccgaggtgaatctatgttttgaccaatttgtttacaagctagcagaccagatatttgcctattataaggttatggcaggaagtttgcttcttgataaacggttacgatcagaatgcaagaatcagggagccacgatccacctcccgccgtctaaccgctacgagacgctgctgaagcagaggcatgtgcagctcctcggcagatcaatagacctcaatcgtctgatcacccagcgcgtctcagcagccatgtataagtccctagaactggcgattggacgatttgaaagtgaagatttgacctccatagttgagctggatggcctgttggaaatcaaccgcatgacccacaagctgctgagccggtacctgacgctggacggcttcgacgccatgttccgggaggccaaccacaacgtgtcagcgccctacgggaggatcaccctgcacgtcttctgggagctcaactatgacttcctgcccaactactgctacaacggctctaccaaccggtttgttcggacagtgttaccattttctcaggaatttcaaagagataagcagcctaatgcacagcctcagtatctgcatggatccaaggctttgaacttggcctactccagcatttacggcagctaccggaacttcgtgggacctccacactttcaagtcatctgccggcttctcggctaccagggtatcgccgtggtcatggaggagctgctgaaggtcgtcaagagcctgctgcaaggcacaatcctgcagtacgtgaagacgctgatggaggtgatgcccaagatctgccgcctgccccggcacgagtacggctctcctggtatcctggagttcttccaccaccagctgaaggacatcgtggagtacgcagagctgaagacggtgtgcttccagaacctgcgggaggtggggaacgccatcctcttctgcctgctcatcgagcagagcctgtctttagaagaagtgtgtgacctgctgcacgcggctcctttccagaacatcttgccgcgagtccatgtgaaagagggggagagacttgatgccaaaatgaaaagactagaatcaaagtacgccccgctgcatcttgtcccactgattgaaagactggggacccctcagcaaattgccatcgcaagagagggggacctgctgacaaaggagcgcctctgctgcggcctgtccatgtttgaggtcatcctgacacggatccggagctttctggatgaccccatctggcgcgggcctctgcccagcaatggggtcatgcatgtggacgagtgtgtggagtttcacagactgtggagtgccatgcagtttgtctactgcattcccgtggggacacacgagttcacagtcgagcagtgctttggtgatgggctacactgggctggctgtatgatcatcgtacttcttgggcagcagcggcgttttgctgtgctggatttctgctaccatctacttaaagtccagaaacatgatggcaaagatgagattattaaaaatgtgcctttgaagaagatggtggagagaattcgcaagttccagattctcaatgatgagatcatcaccatcctggataagtacctgaagtcaggcgacggggagggcacgccagtggagcatgtgcgctgcttccagccgcccatccaccagtccctcgccagcagctgagggcacgcgctgcactccgtaactcaacatggcatgcctttctctccgtaaactatttagtgagatttttagggactatttttcagtatctctgtacctgttaaagggggtgcttttcgatctaaaaacttaattttataaaattgacttatttttctagactaaaattgtatatgcttttggtaattaggaactcttgagaatattggctgctgattgttgccatcacgttcctacaaaattgtttttctatgggatgttctggcagctgtgtcataaaatgctgctgggttcattcattcattccataagaaacttaataccagcaaatgcattaaatcccttgccagttaccattaactgtaactatttagcttttgtttagggatctttctgatggtcttttatgagcaatcttagttctaagtcattgttcccatcccttttttgtgtgtttcagaaaatagtgaacttgattcccctgcttccactaaatccagttgtgacaaaatctaacgtgacatcagatcgaaaggttatagaaataaaactaatgagatcta

SEQ ID NO: 75942 - DNA, 4795 bp, Homo sapiens
  misc_feature (4464)..(4464): n is a, c, g, or t
  misc_feature (4470)..(4470): n is a, c, g, or t
  misc_feature (4501)..(4501): n is a, c, g, or t
  misc_feature (4511)..(4512): n is a, c, g, or t
cccgggaggaaggggaggaggccgagtgtttcctggcgcattcccggccagcccgagtgactcactcggccaaggaaactcccagggcccgcccaggacccccaagccgccgcggacgcagcccaggatggcggcccaggtgactctggaggacgcgctgtccaacgtggacctcctggaggagctgcccctgcccgaccagcagccctgcatcgagcccccgccatcctcgctgctctaccagccaaatttcaacactaactttgaagacagaaatgcatttgttactggcatcgcaagatacattgaacaagccaccgtccactctagcatgaacgagatgctggaggagggccaagaatatgctgtcatgctgtacacctggaggagctgctcccgggccatcccacaggtgaaatgtaacgagcagcctaacagagtggaaatctacgagaaaaccgtggaggttctggagcctgaggtcacaaaactgatgaatttcatgtacttccagagaaatgccattgagcgtttctgcggggaagtgaggcgcctgtgccatgccgagaggaggaaggacttcgtgtcagaagcctacctgatcacactgggcaaattcatcaacatgttcgctgtgctggacgagctgaagaacatgaagtgcagtgtgaagaacgaccactcagcgtacaagagggccgctcagtttttacgtaaaatggcagatccacagtccatccaggaatcgcagaatctgtccatgttcctggccaatcataacaagatcacacagtctctgcagcagcagctcgaagtgatttctggctacgaagagctcctggcagatattgtgaatctgtgtgtggattactacgagaacaggatgtatttgacgcccagtgagaaacacatgcttctcaaagtcatgggatttggtctgtacctgatggatgggagtgtcagtaacatctataagttggatgccaagaaaagaataaacttatccaaaatcgacaagtacttcaagcaactccaggtggttccgctatttggggacatgcaaatagaactggcaagatatatcaagaccagcgcccactacgaggaaaataaatctcgatggacgtgcacatcctccggcagcagccctcagtacaacatctgcgagcagatgatccagatccgcgaggaccacatgcgcttcatttcggagctggcgcgctacagcaacagcgaggtggtcacgggctcgggccgccaggaggcccagaagacggacgcggagtaccgcaagctcttcgacctggcgctgcagggcctgcagctgttgtcgcagtggagcgcgcacgtgatggaagtgtattcctggaagcttgtgcaccccaccgacaagtactccaacaaggactgccccgacagcgctgaagagtacgagcgtgccacgcgctacaactacaccagcgaggagaagtttgccctagtggaggtgatcgccatgatcaaaggcctgcaggtgctgatgggcaggatggagagcgtgttcaaccacgccatccggcacaccgtctatgccgcactgcaggacttctcccaggtgacccttagggagccgctgcggcaggccatcaagaagaagaagaacgtcatccagagtgtcctgcaggccatcaggaagaccgtgtgtgactgggagacggggcatgagcccttcaatgacccagccttgcggggcgagaaggaccccaagagcggcttcgacataaaagtaccacgccgcgccgtgggaccctccagcactcagctttacatggtgagaaccatgctagagtccctcattgcagacaaaagtggttccaagaaaaccttgagaagtagccttgaggggcccaccatattggacatagaaaaatttcatcgagagtcattcttctacactcacttgataaatttcagtgaaacgctgcagcagtgctgtgacctttcgcagctgtggttccgagagttcttcctggagctgaccatgggcaggaggatccagttccccattgagatgtcgatgccctggatcctgacggaccacatcctggagaccaaggaggcatcgatgatggagtacgtgctctactccctggacctgtacaatgacagcgcccactacgcgctcaccaggttcaacaagcagttcctgtacgacgaaattgaggccgaggtgaatctatgttttgaccaatttgtttacaagctagcagaccagatatttgcctattataaggttatggcaggaagtttgcttcttgataaacggttacgatcagaatgcaagaatcagggagccacgatccacctcccgccgtctaaccgctacgagacgctgctgaagcagaggcatgtgcagctcctcggcagatcaatagacctcaatcgtctgatcacccagcgcgtctcagcagccatgtataagtccctagaactggcgattggacgatttgaaagtgaagatttgacctccatagttgagctggatggcctgttggaaatcaaccgcatgacccacaagctgctgagccggtacctgacgctggacggcttcgacgccatgttccgggaggccaaccacaacgtgtcagcgccctacgggaggatcaccctgcacgtcttctgggagctcaactatgacttcctgcccaactactgctacaacggctctaccaaccggtttgttcggacagtgttaccattttctcaggaatttcaaagagataagcagcctaatgcacagcctcagtatctgcatggatccaaggctttgaacttggcctactccagcatttacggcagctaccggaacttcgtgggacctccacactttcaagtcatctgccggcttctcggctaccagggtatcgccgtggtcatggaggagctgctgaaggtcgtcaagagcctgctgcaaggcacaatcctgcagtacgtgaagacgctgatggaggtgatgcccaagatctgccgcctgccccggcacgagtacggctctcctggtatcctggagttcttccaccaccagctgaaggacatcgtggagtacgcagagctgaagacggtgtgcttccagaacctgcgggaggtggggaacgccatcctcttctgcctgctcatcgagcagagcctgtctttagaagaagtgtgtgacctgctgcacgcggctcctttccagaacatcttgccgcgagtccatgtgaaagagggggagagacttgatgccaaaatgaaaagactagaatcaaagtacgccccgctgcatcttgtcccactgattgaaagactggggacccctcagcaaattgccatcgcaagagagggggacctgctgacaaaggagcgcctctgctgcggcctgtccatgtttgaggtcatcctgacacggatccggagctttctggatgaccccatctggcgcgggcctctgcccagcaatggggtcatgcatgtggacgagtgtgtggagtttcacagactgtggagtgccatgcagtttgtctactgcattcccgtggggacacacgagttcacagtcgagcagtgctttggtgatgggctacactgggctggctgtatgatcatcgtacttcttgggcagcagcggcgttttgctgtgctggatttctgctaccatctacttaaagtccagaaacatgatggcaaagatgagattattaaaaatgtgcctttgaagaagatggtggagagaattcgcaagttccagattctcaatgatgagatcatcaccatcctggataagtacctgaagtcaggcgacggggagggcacgccagtggagcatgtgcgctgcttccagccgcccatccaccagtccctcgccagcagctgagggcacgcgctgcactccgtaactcaacatggcatgcctttctctccgtaaactatttagtgagatttttagggactatttttcagtatctctgtacctgttaaagggggtgcttttcgatctaaaaacttaattttataaaattgacttatttttctagactaaaattgtatatgcttttggtaattaggaactcttgagaatattggctgctgattgttgccatcacgttcctacaaaattgtttttctatgggatgttctggcagctgtgtcataaaatgctgctgggttcattcattcattccataagaaacttaataccagcaaatgcattaaatcccttgccagttaccattaactgtaactatttagcttttgtttagggatctttctgatggtcttttatgagcaatcttagttctaagtcattgttcccatcccttttttgtgtgtttcagaaaatagtgaacttgattcccctgcttccactaaatccagttgtgacaaaatctaacgtgacatcagatcgaaaggttatagaaataaaactaatgagatctaaaaaaaaaaaanaaaaanaaaaaaaaaaaaaaaaaaggggggggggttnaaaatttccnnggggggggccaatttttgggtgtacccggtttttttttaaaaggtggggcccaatagggaggcgaaataataaggaagagcatgggcggtgttataacaggtcggtgagtggaaaacttgtttcttggacatttgtgaaggaccttcttctttggtgcgacaatattggcacacatccctagaagatttaagctctggggaaattaaatttagtgttatatgtgtagagggaattttctgtgaaagttgctcggcttttaaagcgcataataagtatatgtga

SEQ ID NO: 75943 - DNA, 2451 bp, Homo sapiens
tccttacgtgagaggtggaaaatggagttgagtttctgaggtggggcgaggctgtcggagctgcgagtgagtggcagaggctgctggtcacactgctgctgtcctctgcaggtacgtgctctactccctggacctgtacaatgacagcgcccactacgcgctcaccaggttcaacaagcagttcctgtacgacgaaattgaggccgaggtgaatctatgttttgaccaatttgtttacaagctagcagaccagatatttgcctattataaggttatggcaggaagtttgcttcttgataaacggttacgatcagaatgcaagaatcagggagccacgatccacctcccgccgtctaaccgctacgagacgctgctgaagcagaggcatgtgcagctcctcggcagatcaatagacctcaatcgtctgatcacccagcgcgtctcagcagccatgtataagtccctagaactggcgattggacgatttgaaagtgaagatttgacctccatagttgagctggatggcctgttggaaatcaaccgcatgacccacaagctgctgagccggtacctgacgctggacggcttcgacgccatgttccgggaggccaaccacaacgtgtcagcgccctacgggaggatcaccctgcacgtcttctgggagctcaactatgacttcctgcccaactactgctacaacggctctaccaaccggtttgttcggacagtgttaccattttctcaggaatttcaaagagataagcagcctaatgcacagcctcagtatctgcatggatccaaggctttgaacttggcctactccagcatttacggcagctaccggaacttcgtgggacctccacactttcaagtcatctgccggcttctcggctaccagggtatcgccgtggtcatggaggagctgctgaaggtcgtcaagagcctgctgcaaggcacaatcctgcagtacgtgaagacgctgatggaggtgatgcccaagatctgccgcctgccccggcacgagtacggctctcctggtatcctggagttcttccaccaccagctgaaggacatcgtggagtacgcagagctgaagacggtgtgcttccagaacctgcgggaggtggggaacgccatcctcttctgcctgctcatcgagcagagcctgtctttagaagaagtgtgtgacctgctgcacgcggctcctttccagaacatcttgccgcgagtccatgtgaaagagggggagagacttgatgccaaaatgaaaagactagaatcaaagtacgccccgctgcatcttgtcccactgattgaaagactggggacccctcagcaaattgccatcgcaagagagggggacctgctgacaaaggagcgcctctgctgcggcctgtccatgtttgaggtcatcctgacacggatccggagctttctggatgaccccatctggcgcgggcctctgcccagcaatggggtcatgcatgtggacgagtgtgtggagtttcacagactgtggagtgccatgcagtttgtctactgcattcccgtggggacacacgagttcacagtcgagcagtgctttggtgatgggctacactgggctggctgtatgatcatcgtacttcttgggcagcagcggcgttttgctgtgctggatttctgctaccatctacttaaagtccagaaacatgatggcaaagatgagattattaaaaatgtgcctttgaagaagatggtggagagaattcgcaagttccagattctcaatgatgagatcatcaccatcctggataagtacctgaagtcaggcgacggggagggcacgccagtggagcatgtgcgctgcttccagccgcccatccaccagtccctcgccagcagctgagggcacgcgctgcactccgtaactcaacatggcatgcctttctctccgtaaactatttagtgagatttttagggactatttttcagtatctctgtacctgttaaagggggtgcttttcgatctaaaaacttaattttataaaattgacttatttttctagactaaaattgtatatgcttttggtaattaggaactcttgagaatattggctgctgattgttgccatcacgttcctacaaaattgtttttctatgggatgttctggcagctgtgtcataaaatgctgctgggttcattcattcattccataagaaacttaataccagcaaatgcattaaatcccttgccagttaccattaactgtaactatttagcttttgtttagggatctttctgatggtcttttatgagcaatcttagttctaagtcattgttcccatcccttttttgtgtgtttcagaaaatagtgaacttgattcccctgcttccactaaatccagttgtgacaaaatctaacgtgacatcagatcgaaaggttatagaaataaaactaatgagatcta

SEQ ID NO: 75944 - DNA, 2363 bp, Homo sapiens
gaaaagaagctgtgtaggaaaactctctgtgctctggctcctctttgaggctaccctggctgccctgaaacagacagtgggcttggcaaaaacacacctcagacaggaagggaggccgaggtgaatctatgttttgaccaatttgtttacaagctagcagaccagatatttgcctattataaggttatggcaggaagtttgcttcttgataaacggttacgatcagaatgcaagaatcagggagccacgatccacctcccgccgtctaaccgctacgagacgctgctgaagcagaggcatgtgcagctcctcggcagatcaatagacctcaatcgtctgatcacccagcgcgtctcagcagccatgtataagtccctagaactggcgattggacgatttgaaagtgaagatttgacctccatagttgagctggatggcctgttggaaatcaaccgcatgacccacaagctgctgagccggtacctgacgctggacggcttcgacgccatgttccgggaggccaaccacaacgtgtcagcgccctacgggaggatcaccctgcacgtcttctgggagctcaactatgacttcctgcccaactactgctacaacggctctaccaaccggtttgttcggacagtgttaccattttctcaggaatttcaaagagataagcagcctaatgcacagcctcagtatctgcatggatccaaggctttgaacttggcctactccagcatttacggcagctaccggaacttcgtgggacctccacactttcaagtcatctgccggcttctcggctaccagggtatcgccgtggtcatggaggagctgctgaaggtcgtcaagagcctgctgcaaggcacaatcctgcagtacgtgaagacgctgatggaggtgatgcccaagatctgccgcctgccccggcacgagtacggctctcctggtatcctggagttcttccaccaccagctgaaggacatcgtggagtacgcagagctgaagacggtgtgcttccagaacctgcgggaggtggggaacgccatcctcttctgcctgctcatcgagcagagcctgtctttagaagaagtgtgtgacctgctgcacgcggctcctttccagaacatcttgccgcgagtccatgtgaaagagggggagagacttgatgccaaaatgaaaagactagaatcaaagtacgccccgctgcatcttgtcccactgattgaaagactggggacccctcagcaaattgccatcgcaagagagggggacctgctgacaaaggagcgcctctgctgcggcctgtccatgtttgaggtcatcctgacacggatccggagctttctggatgaccccatctggcgcgggcctctgcccagcaatggggtcatgcatgtggacgagtgtgtggagtttcacagactgtggagtgccatgcagtttgtctactgcattcccgtggggacacacgagttcacagtcgagcagtgctttggtgatgggctacactgggctggctgtatgatcatcgtacttcttgggcagcagcggcgttttgctgtgctggatttctgctaccatctacttaaagtccagaaacatgatggcaaagatgagattattaaaaatgtgcctttgaagaagatggtggagagaattcgcaagttccagattctcaatgatgagatcatcaccatcctggataagtacctgaagtcaggcgacggggagggcacgccagtggagcatgtgcgctgcttccagccgcccatccaccagtccctcgccagcagctgagggcacgcgctgcactccgtaactcaacatggcatgcctttctctccgtaaactatttagtgagatttttagggactatttttcagtatctctgtacctgttaaagggggtgcttttcgatctaaaaacttaattttataaaattgacttatttttctagactaaaattgtatatgcttttggtaattaggaactcttgagaatattggctgctgattgttgccatcacgttcctacaaaattgtttttctatgggatgttctggcagctgtgtcataaaatgctgctgggttcattcattcattccataagaaacttaataccagcaaatgcattaaatcccttgccagttaccattaactgtaactatttagcttttgtttagggatctttctgatggtcttttatgagcaatcttagttctaagtcattgttcccatcccttttttgtgtgtttcagaaaatagtgaacttgattcccctgcttccactaaatccagttgtgacaaaatctaacgtgacatcagatcgaaaggttatagaaataaaactaatgagatcta

SEQ ID NO: 75945 - DNA, 4352 bp, Homo sapiens
cccgggaggaaggggaggaggccgagtgtttcctggcgcattcccggccagcccgagtgactcactcggccaaggaaactcccagggcccgcccaggacccccaagccgccgcggacgcagcccaggatggcggcccaggtgactctggaggacgcgctgtccaacgtggacctcctggaggagctgcccctgcccgaccagcagccctgcatcgagcccccgccatcctcgctgctctaccagccaaatttcaacactaactttgaagacagaaatgcatttgttactggcatcgcaagatacattgaacaagccaccgtccactctagcatgaacgagatgctggaggagggccaagaatatgctgtcatgctgtacacctggaggagctgctcccgggccatcccacaggtgaaatgtaacgagcagcctaacagagtggaaatctacgagaaaaccgtggaggttctggagcctgaggtcacaaaactgatgaatttcatgtacttccagagaaatgccattgagcgtttctgcggggaagtgaggcgcctgtgccatgccgagaggaggaaggacttcgtgtcagaagcctacctgatcacactgggcaaattcatcaacatgttcgctgtgctggacgagctgaagaacatgaagtgcagtgtgaagaacgaccactcagcgtacaagagggccgctcagtttttacgtaaaatggcagatccacagtccatccaggaatcgcagaatctgtccatgttcctggccaatcataacaagatcacacagtctctgcagcagcagctcgaagtgatttctggctacgaagagctcctggcagatattgtgaatctgtgtgtggattactacgagaacaggatgtatttgacgcccagtgagaaacacatgcttctcaaagtcatgggatttggtctgtacctgatggatgggagtgtcagtaacatctataagttggatgccaagaaaagaataaacttatccaaaatcgacaagtacttcaagcaactccaggtggttccgctatttggggacatgcaaatagaactggcaagatatatcaagaccagcgcccactacgaggaaaataaatctcgatggacgtgcacatcctccggcagcagccctcagtacaacatctgcgagcagatgatccagatccgcgaggaccacatgcgcttcatttcggagctggcgcgctacagcaacagcgaggtggtcacgggctcgggccgccaggaggcccagaagacggacgcggagtaccgcaagctcttcgacctggcgctgcagggcctgcagctgttgtcgcagtggagcgcgcacgtgatggaagtgtattcctggaagcttgtgcaccccaccgacaagtactccaacaaggactgccccgacagcgctgaagagtacgagcgtgccacgcgctacaactacaccagcgaggagaagtttgccctagtggaggtgatcgccatgatcaaaggcctgcaggtgctgatgggcaggatggagagcgtgttcaaccacgccatccggcacaccgtctatgccgcactgcaggacttctcccaggtgacccttagggagccgctgcggcaggccatcaagaagaagaagaacgtcatccagagtgtcctgcaggccatcaggaagaccgtgtgtgactgggagacggggcatgagcccttcaatgacccagccttgcggggcgagaaggaccccaagagcggcttcgacataaaagtaccacgccgcgccgtgggaccctccagcactcagctttacatggtgagaaccatgctagagtccctcattgcagacaaaagtggttccaagaaaaccttgagaagtagccttgaggggcccaccatattggacatagaaaaatttcatcgagagtcattcttctacactcacttgataaatttcagtgaaacgctgcagcagtgctgtgacctttcgcagctgtggttccgagagttcttcctggagctgaccatgggcaggaggatccagttccccattgagatgtcgatgccctggatcctgacggaccacatcctggagaccaaggaggcatcgatgatggagtacgtgctctactccctggacctgtacaatgacagcgcccactacgcgctcaccaggttcaacaagcagttcctgtacgacgaaattgaggccgaggtgaatctatgttttgaccaatttgtttacaagctagcagaccagatatttgcctattataaggttatggcaggaagtttgcttcttgataaacggttacgatcagaatgcaagaatcagggagccacgatccacctcccgccgtctaaccgctacgagacgctgctgaagcagaggcatgtgcagctcctcggcagatcaatagacctcaatcgtctgatcacccagcgcgtctcagcagccatgtataagtccctagaactggcgattggacgatttgaaagtgaagatttgacctccatagttgagctggatggcctgttggaaatcaaccgcatgacccacaagctgctgagccggtacctgacttcctgcccaactactgctacaacggctctaccaaccggtttgttcggacagtgttaccattttctcaggaatttcaaagagataagcagcctaatgcacagcctcagtatctgcatggatccaaggctttgaacttggcctactccagcatttacggcagctaccggaacttcgtgggacctccacactttcaagtcatctgccggcttctcggctaccagggtatcgccgtggtcatggaggagctgctgaaggtcgtcaagagcctgctgcaaggcacaatcctgcagtacgtgaagacgctgatggaggtgatgcccaagatctgccgcctgccccggcacgagtacggctctcctggtatcctggagttcttccaccaccagctgaaggacatcgtggagtacgcagagctgaagacggtgtgcttccagaacctgcgggaggtggggaacgccatcctcttctgcctgctcatcgagcagagcctgtctttagaagaagtgtgtgacctgctgcacgcggctcctttccagaacatcttgccgcgagtccatgtgaaagagggggagagacttgatgccaaaatgaaaagactagaatcaaagtacgccccgctgcatcttgtcccactgattgaaagactggggacccctcagcaaattgccatcgcaagagagggggacctgctgacaaaggagcgcctctgctgcggcctgtccatgtttgaggtcatcctgacacggatccggagctttctggatgaccccatctggcgcgggcctctgcccagcaatggggtcatgcatgtggacgagtgtgtggagtttcacagactgtggagtgccatgcagtttgtctactgcattcccgtggggacacacgagttcacagtcgagcagtgctttggtgatgggctacactgggctggctgtatgatcatcgtacttcttgggcagcagcggcgttttgctgtgctggatttctgctaccatctacttaaagtccagaaacatgatggcaaagatgagattattaaaaatgtgcctttgaagaagatggtggagagaattcgcaagttccagattctcaatgatgagatcatcaccatcctggataagtacctgaagtcaggcgacggggagggcacgccagtggagcatgtgcgctgcttccagccgcccatccaccagtccctcgccagcagctgagggcacgcgctgcactccgtaactcaacatggcatgcctttctctccgtaaactatttagtgagatttttagggactatttttcagtatctctgtacctgttaaagggggtgcttttcgatctaaaaacttaattttataaaattgacttatttttctagactaaaattgtatatgcttttggtaattaggaactcttgagaatattggctgctgattgttgccatcacgttcctacaaaattgtttttctatgggatgttctggcagctgtgtcataaaatgctgctgggttcattcattcattccataagaaacttaataccagcaaatgcattaaatcccttgccagttaccattaactgtaactatttagcttttgtttagggatctttctgatggtcttttatgagcaatcttagttctaagtcattgttcccatcccttttttgtgtgtttcagaaaatagtgaacttgattcccctgcttccactaaatccagttgtgacaaaatctaacgtgacatcagatcgaaaggttatagaaataaaactaatgagatcta

SEQ ID NO: 75946 - DNA, 4380 bp, Homo sapiens
cccgggaggaaggggaggaggccgagtgtttcctggcgcattcccggccagcccgagtgactcactcggccaaggaaactcccagggcccgcccaggacccccaagccgccgcggacgcagcccaggatggcggcccaggtgactctggaggacgcgctgtccaacgtggacctcctggaggagctgcccctgcccgaccagcagccctgcatcgagcccccgccatcctcgctgctctaccagccaaatttcaacactaactttgaagacagaaatgcatttgttactggcatcgcaagatacattgaacaagccaccgtccactctagcatgaacgagatgctggaggagggccaagaatatgctgtcatgctgtacacctggaggagctgctcccgggccatcccacaggtgaaatgtaacgagcagcctaacagagtggaaatctacgagaaaaccgtggaggttctggagcctgaggtcacaaaactgatgaatttcatgtacttccagagaaatgccattgagcgtttctgcggggaagtgaggcgcctgtgccatgccgagaggaggaaggacttcgtgtcagaagcctacctgatcacactgggcaaattcatcaacatgttcgctgtgctggacgagctgaagaacatgaagtgcagtgtgaagaacgaccactcagcgtacaagagggccgctcagtttttacgtaaaatggcagatccacagtccatccaggaatcgcagaatctgtccatgttcctggccaatcataacaagatcacacagtctctgcagcagcagctcgaagtgatttctggctacgaagagctcctggcagatattgtgaatctgtgtgtggattactacgagaacaggatgtatttgacgcccagtgagaaacacatgcttctcaaagtcatgggatttggtctgtacctgatggatgggagtgtcagtaacatctataagttggatgccaagaaaagaataaacttatccaaaatcgacaagtacttcaagcaactccaggtggttccgctatttggggacatgcaaatagaactggcaagatatatcaagaccagcgcccactacgaggaaaataaatctcgatggacgtgcacatcctccggcagcagccctcagtacaacatctgcgagcagatgatccagatccgcgaggaccacatgcgcttcatttcggagctggcgcgctacagcaacagcgaggtggtcacgggctcgggccgccaggaggcccagaagacggacgcggagtaccgcaagctcttcgacctggcgctgcagggcctgcagctgttgtcgcagtggagcgcgcacgtgatggaagtgtattcctggaagcttgtgcaccccaccgacaagtactccaacaaggactgccccgacagcgctgaagagtacgagcgtgccacgcgctacaactacaccagcgaggagaagtttgccctagtggaggtgatcgccatgatcaaaggcctgcaggtgctgatgggcaggatggagagcgtgttcaaccacgccatccggcacaccgtctatgccgcactgcaggacttctcccaggtgacccttagggagccgctgcggcaggccatcaagaagaagaagaacgtcatccagagtgtcctgcaggccatcaggaagaccgtgtgtgactgggagacggggcatgagcccttcaatgacccagccttgcggggcgagaaggaccccaagagcggcttcgacataaaagtaccacgccgcgccgtgggaccctccagcactcagctttacatggtgagaaccatgctagagtccctcattgcagacaaaagtggttccaagaaaaccttgagaagtagccttgaggggcccaccatattggacatagaaaaatttcatcgagagtcattcttctacactcacttgataaatttcagtgaaacgctgcagcagtgctgtgacctttcgcagctgtggttccgagagttcttcctggagctgaccatgggcaggaggatccagttccccattgagatgtcgatgccctggatcctgacggaccacatcctggagaccaaggaggcatcgatgatggagtacgtgctctactccctggacctgtacaatgacagcgcccactacgcgctcaccaggttcaacaagcagttcctgtacgacgaaattgaggccgaggtgaatctatgttttgaccaatttgtttacaagctagcagaccagatatttgcctattataaggttatggcaggaagtttgcttcttgataaacggttacgatcagaatgcaagaatcagggagccacgatccacctcccgccgtctaaccgctacgagacgctgctgaagcagaggcatgtgcagctcctcggcagatcaatagacctcaatcgtctgatcacccagcgcgtctcagcagccatgtataagtccctagaactggcgattggacgatttgaaagtgaagatttgacctccatagttgagctggatggcctgttggaaatcaaccgcatgacccacaagctgctgagccggtacctgacgctggacggcttcgacgccatgttccgggaggccaaccacaacgtgtcagcgccctacgggaggatcaccctgcacgtcttctgggagctcaactatgacttcctgcccaactactgctacaacggctctaccaaccggtttgttcggacagtgttaccattttctcaggaatttcaaagagataagcagcctaatgcacagcctcagtatctgcatggatccaaggctttgaacttggcctactccagcatttacggcagctaccggaacttcgtgggacctccacactttcaagtcatctgccggcttctcggctaccagggtatcgccgtggtcatggaggagctgctgaaggtcgtcaagagcctgctgcaaggcacaatcctgcagtacgtgaagacgctgatggaggtgatgcccaagatctgccgcctgccccggcacgagtacggctctcctggtatcctggagttcttccaccaccagctgaaggacatcgtggagtacgcagagctgaagacggtgtgcttccagaacctgcgggaggtggggaacgccatcctcttctgcctgctcatcgagcagagcctgtctttagaagaagtgtgtgacctgctgcacgcggctcctttccagaacatcttgccgcgagtccatgtgaaagagggggagagacttgatgccaaaatgaaaagactagaatcaaagtacgccccgctgcatcttgtcccactgattgaaagactggggacccctcagcaaattgccatcgcaagagagggggacctgctgacaaaggagcgcctctgctgcggcctgtccatgtttgaggtcatcctgacacggatccggagctttctggatgaccccatctggcgcgggcctctgcccagcaatggggtcatgcatgtggacgagtgtgtggagtttcacagactgtggagtgccatgcagtttgtctactgcattcccgtggggacacacgagttcacagtcgagcagtgctttggtgatgggctacactgggctggctgtatgatcatcgtacttcttgggcagcagcggcgttttgctgtgctggatttctgctaccatctacttaaagtccagaaacatgatggcaaagatgagattattaaaaatgtgcctttgaagaagatggtggagagaattcgcaagttccagattctcaatgatgagatcatcaccatcctggataagtacctgaagtcaggcgacggggagggcacgccagtggagcatgtgcgctgcttccagccgcccatccaccagtccctcgccagcagctgagggcacgcgctgcactccgtaactcaacatggcatgcctttctctccgtaaactatttagtgagatttttagggactatttttcagtatctctgtacctgttaaagggggtgcttttcgatctaaaaacttaattttataaaattgacttatttttctagactaaaattgtatatgcttttggtaattaggaactcttgagaatattggctgctgattgttgccatcacgttcctacaaaattgtttttctatgggatgttctggcagctgtgtcataaaatgctgctgggttcattcattcattccataagaaacttaataccagcaaatgcattaaatcccttgccagttaccattaactgtaactatttagcttttgtttagggatctttctgatggtcttttatgagcaatcttagttctaagtcattgttcccatcccttttttgtgtgtttcagaaaatagtgatctcataacgggtacgaatcg

SEQ ID NO: 75947 - DNA, 4398 bp, Homo sapiens
cccgggaggaaggggaggaggccgagtgtttcctggcgcattcccggccagcccgagtgactcactcggccaaggaaactcccagggcccgcccaggacccccaagccgccgcggacgcagcccaggatggcggcccaggtgactctggaggacgcgctgtccaacgtggacctcctggaggagctgcccctgcccgaccagcagccctgcatcgagcccccgccatcctcgctgctctaccagccaaatttcaacactaactttgaagacagaaatgcatttgttactggcatcgcaagatacattgaacaagccaccgtccactctagcatgaacgagatgctggaggagggccaagaatatgctgtcatgctgtacacctggaggagctgctcccgggccatcccacaggtgaaatgtaacgagcagcctaacagagtggaaatctacgagaaaaccgtggaggttctggagcctgaggtcacaaaactgatgaatttcatgtacttccagagaaatgccattgagcgtttctgcggggaagtgaggcgcctgtgccatgccgagaggaggaaggacttcgtgtcagaagcctacctgatcacactgggcaaattcatcaacatgttcgctgtgctggacgagctgaagaacatgaagtgcagtgtgaagaacgaccactcagcgtacaagagggccgctcagtttttacgtaaaatggcagatccacagtccatccaggaatcgcagaatctgtccatgttcctggccaatcataacaagatcacacagtctctgcagcagcagctcgaagtgatttctggctacgaagagctcctggcagatattgtgaatctgtgtgtggattactacgagaacaggatgtatttgacgcccagtgagaaacacatgcttctcaaagtcatgggatttggtctgtacctgatggatgggagtgtcagtaacatctataagttggatgccaagaaaagaataaacttatccaaaatcgacaagtacttcaagcaactccaggtggttccgctatttggggacatgcaaatagaactggcaagatatatcaagaccagcgcccactacgaggaaaataaatctcgatggacgtgcacatcctccggcagcagccctcagtacaacatctgcgagcagatgatccagatccgcgaggaccacatgcgcttcatttcggagctggcgcgctacagcaacagcgaggtggtcacgggctcgggccgccaggaggcccagaagacggacgcggagtaccgcaagctcttcgacctggcgctgcagggcctgcagctgttgtcgcagtggagcgcgcacgtgatggaagtgtattcctggaagcttgtgcaccccaccgacaagtactccaacaaggactgccccgacagcgctgaagagtacgagcgtgccacgcgctacaactacaccagcgaggagaagtttgccctagtggaggtgatcgccatgatcaaaggcctgcaggtgctgatgggcaggatggagagcgtgttcaaccacgccatccggcacaccgtctatgccgcactgcaggacttctcccaggtgacccttagggagccgctgcggcaggccatcaagaagaagaagaacgtcatccagagtgtcctgcaggccatcaggaagaccgtgtgtgactgggagacggggcatgagcccttcaatgacccagccttgcggggcgagaaggaccccaagagcggcttcgacataaaagtaccacgccgcgccgtgggaccctccagcactcagctttacatggtgagaaccatgctagagtccctcattgcagacaaaagtggttccaagaaaaccttgagaagtagccttgaggggcccaccatattggacatagaaaaatttcatcgagagtcattcttctacactcacttgataaatttcagtgaaacgctgcagcagtgctgtgacctttcgcagctgtggttccgagagttcttcctggagctgaccatgggcaggaggatccagttccccattgagatgtcgatgccctggatcctgacggaccacatcctggagaccaaggaggcatcgatgatggagtacgtgctctactccctggacctgtacaatgacagcgcccactacgcgctcaccaggttcaacaagcagttcctgtacgacgaaattgaggccgaggtgaatctatgttttgaccaatttgtttacaagctagcagaccagatatttgcctattataaggttatggcaggaagtttgcttcttgataaacggttacgatcagaatgcaagaatcagggagccacgatccacctcccgccgtctaaccgctacgagacgctgctgaagcagaggcatgtgcagctcctcggcagatcaatagacctcaatcgtctgatcacccagcgcgtctcagcagccatgtataagtccctagaactggcgattggacgatttgaaagtgaagatttgacctccatagttgagctggatggcctgttggaaatcaaccgcatgacccacaagctgctgagccggtacctgacgctggacggcttcgacgccatgttccgggaggccaaccacaacgtgtcagcgccctacgggaggatcaccctgcacgtcttctgggagctcaactatgacttcctgcccaactactgctacaacggctctaccaaccggtttgttcggacagtgttaccattttctcaggaatttcaaagagataagcagcctaatgcacagcctcagtatctgcatggatccaaggctttgaacttggcctactccagcatttacggcagctaccggaacttcgtgggacctccacactttcaagtcatctgccggcttctcggctaccagggtatcgccgtggtcatggaggagctgctgaaggtcgtcaagagcctgctgcaaggcacaatcctgcagtacgtgaagacgctgatggaggtgatgcccaagatctgccgcctgccccggcacgagtacggctctcctggtatcctggagttcttccaccaccagctgaaggacatcgtggagtacgcagagctgaagacggtgtgcttccagaacctgcgggaggtggggaacgccatcctcttctgcctgctcatcgagcagagcctgtctttagaagaagtgtgtgacctgctgcacgcggctcctttccagaacatcttgccgcgagtccatgtgaaagagggggagagacttgatgccaaaatgaaaagactagaatcaaagtacgccccgctgcatcttgtcccactgattgaaagactggggacccctcagcaaattgccatcgcaagagagggggacctgctgacaaaggagcgcctctgctgcggcctgtccatgtttgaggtcatcctgacacggatccggagctttctggatgaccccatctggcgcgggcctctgcccagcaatggggtcatgcatgtggacgagtgtgtggagtttcacagactgtggagtgccatgcagtttgtctactgcattcccgtggggacacacgagttcacagtcgagcagtgctttggtgatgggctacactgggctggctgtatgatcatcgtacttcttgggcagcagcggcgttttgctgtgctggatttctgctaccatctacttaaagtccagaaacatgatggcaaagatgagattattaaaaatgtgatcatcaccatcctggataagtacctgaagtcaggcgacggggagggcacgccagtggagcatgtgcgctgcttccagccgcccatccaccagtccctcgccagcagctgagggcacgcgctgcactccgtaactcaacatggcatgcctttctctccgtaaactatttagtgagatttttagggactatttttcagtatctctgtacctgttaaagggggtgcttttcgatctaaaaacttaattttataaaattgacttatttttctagactaaaattgtatatgcttttggtaattaggaactcttgagaatattggctgctgattgttgccatcacgttcctacaaaattgtttttctatgggatgttctggcagctgtgtcataaaatgctgctgggttcattcattcattccataagaaacttaataccagcaaatgcattaaatcccttgccagttaccattaactgtaactatttagcttttgtttagggatctttctgatggtcttttatgagcaatcttagttctaagtcattgttcccatcccttttttgtgtgtttcagaaaatagtgaacttgattcccctgcttccactaaatccagttgtgacaaaatctaacgtgacatcagatcgaaaggttatagaaataaaactaatgagatcta

SEQ ID NO: 75948 - DNA, 2243 bp, Homo sapiens
  misc_feature (15)..(15): n is a, c, g, or t
gatgaaaccgtgtgntggatgaatcccggttagatcacaagtgctaggaataagtggcatgccatgtaggggagctctacgggcgctctatgcgtgtatgagatggcgtggtgaaacagagggactgtgaagcctcatggtgtagagtaatacatgctaaagatcgagagactctggcctaggagcgctgtcatgacgtgcagtgctataagggtcccttagaatctggcgtaattgtgtgcgactgtgatgcgttgacagattggagcctcggatagttagaagatgtgtatagagcgcatgttgtggaataatactgatacgagattgaccgctactaagacatgacatagagaccggtacctgacgctggacggcttcgacgccatgttccgggaggccaaccacaacgtgtcagcgccctacgggaggatcaccctgcacgtcttctgggagctcaactatgacttcctgcccaactactgctacaacggctctaccaaccggtttgttcggacagtgttaccattttctcaggaatttcaaagagataagcagcctaatgcacagcctcagtatctgcatggatccaaggctttgaacttggcctactccagcatttacggcagctaccggaacttcgtgggacctccacactttcaagtcatctgccggcttctcggctaccagggtatcgccgtggtcatggaggagctgctgaaggtcgtcaagagcctgctgcaaggcacaatcctgcagtacgtgaagacgctgatggaggtgatgcccaagatctgccgcctgccccggcacgagtacggctctcctggtatcctggagttcttccaccaccagctgaaggacatcgtggagtacgcagagctgaagacggtgtgcttccagaacctgcgggaggtggggaacgccatcctcttctgcctgctcatcgagcagagcctgtctttagaagaagtgtgtgacctgctgcacgcggctcctttccagaacatcttgccgcgagtccatgtgaaagagggggagagacttgatgccaaaatgaaaagactagaatcaaagtacgccccgctgcatcttgtcccactgattgaaagactggggacccctcagcaaattgccatcgcaagagagggggacctgctgacaaaggagcgcctctgctgcggcctgtccatgtttgaggtcatcctgacacggatccggagctttctggatgaccccatctggcgcgggcctctgcccagcaatggggtcatgcatgtggacgagtgtgtggagtttcacagactgtggagtgccatgcagtttgtctactgcattcccgtggggacacacgagttcacagtcgagcagtgctttggtgatgggctacactgggctggctgtatgatcatcgtacttcttgggcagcagcggcgttttgctgtgctggatttctgctaccatctacttaaagtccagaaacatgatggcaaagatgagattattaaaaatgtgcctttgaagaagatggtggagagaattcgcaagttccagattctcaatgatgagatcatcaccatcctggataagtacctgaagtcaggcgacggggagggcacgccagtggagcatgtgcgctgcttccagccgcccatccaccagtccctcgccagcagctgagggcacgcgctgcactccgtaactcaacatggcatgcctttctctccgtaaactatttagtgagatttttagggactatttttcagtatctctgtacctgttaaagggggtgcttttcgatctaaaaacttaattttataaaattgacttatttttctagactaaaattgtatatgcttttggtaattaggaactcttgagaatattggctgctgattgttgccatcacgttcctacaaaattgtttttctatgggatgttctggcagctgtgtcataaaatgctgctgggttcattcattcattccataagaaacttaataccagcaaatgcattaaatcccttgccagttaccattaactgtaactatttagcttttgtttagggatctttctgatggtcttttatgagcaatcttagttctaagtcattgttcccatcccttttttgtgtgtttcagaaaatagtgaacttgattcccctgcttccactaaatccagttgtgacaaaatctaacgtgacatcagatcgaaaggttatagaaataaaactaatgagatcta

SEQ ID NO: 75949 - DNA, 1661 bp, Homo sapiens
gcctggtggcaaattagcagggaaggatggggcgagagcttttagacaggtaaatcctggaaaacagagcacacattcaacactgggtcttacctgtgtctatatttacattaattaaatgtaactaaaaataaaattcagttcctcaagtgccaagccacattccaagtacttactaggcatgcatggctggcggctgccggaatggacaggacagacggaagcatttccatcatcccagaaatctcttgacagagataaaataaacttacagagtttattttatgctaaaaggcaaagaagttcttggttttcagcaccagattgctctctggcgagatacccttcctagcttgaccctctctttctctgctctagtctttagaagaagtgtgtgacctgctgcacgcggctcctttccagaacatcttgccgcgagtccatgtgaaagagggggagagacttgatgccaaaatgaaaagactagaatcaaagtacgccccgctgcatcttgtcccactgattgaaagactggggacccctcagcaaattgccatcgcaagagagggggacctgctgacaaaggagcgcctctgctgcggcctgtccatgtttgaggtcatcctgacacggatccggagctttctggatgaccccatctggcgcgggcctctgcccagcaatggggtcatgcatgtggacgagtgtgtggagtttcacagactgtggagtgccatgcagtttgtctactgcattcccgtggggacacacgagttcacagtcgagcagtgctttggtgatgggctacactgggctggctgtatgatcatcgtacttcttgggcagcagcggcgttttgctgtgctggatttctgctaccatctacttaaagtccagaaacatgatggcaaagatgagattattaaaaatgtgcctttgaagaagatggtggagagaattcgcaagttccagattctcaatgatgagatcatcaccatcctggataagtacctgaagtcaggcgacggggagggcacgccagtggagcatgtgcgctgcttccagccgcccatccaccagtccctcgccagcagctgagggcacgcgctgcactccgtaactcaacatggcatgcctttctctccgtaaactatttagtgagatttttagggactatttttcagtatctctgtacctgttaaagggggtgcttttcgatctaaaaacttaattttataaaattgacttatttttctagactaaaattgtatatgcttttggtaattaggaactcttgagaatattggctgctgattgttgccatcacgttcctacaaaattgtttttctatgggatgttctggcagctgtgtcataaaatgctgctgggttcattcattcattccataagaaacttaataccagcaaatgcattaaatcccttgccagttaccattaactgtaactatttagcttttgtttagggatctttctgatggtcttttatgagcaatcttagttctaagtcattgttcccatcccttttttgtgtgtttcagaaaatagtgaacttgattcccctgcttccactaaatccagttgtgacaaaatctaacgtgacatcagatcgaaaggttatagaaataaaactaatgagatcta

SEQ ID NO: 75950 - DNA, 4216 bp, Homo sapiens
cccgggaggaaggggaggaggccgagtgtttcctggcgcattcccggccagcccgagtgactcactcggccaaggaaactcccagggcccgcccaggacccccaagccgccgcggacgcagcccaggatggcggcccaggtgactctggaggacgcgctgtccaacgtggacctcctggaggagctgcccctgcccgaccagcagccctgcatcgagcccccgccatcctcgctgctctaccagccaaatttcaacactaactttgaagacagaaatgcatttgttactggcatcgcaagatacattgaacaagccaccgtccactctagcatgaacgagatgctggaggagggccaagaatatgctgtcatgctgtacacctggaggagctgctcccgggccatcccacaggtgaaatgtaacgagcagcctaacagagtggaaatctacgagaaaaccgtggaggttctggagcctgaggtcacaaaactgatgaatttcatgtacttccagagaaatgccattgagcgtttctgcggggaagtgaggcgcctgtgccatgccgagaggaggaaggacttcgtgtcagaagcctacctgatcacactgggcaaattcatcaacatgttcgctgtgctggacgagctgaagaacatgaagtgcagtgtgaagaacgaccactcagcgtacaagagggccgctcagtttttacgtaaaatggcagatccacagtccatccaggaatcgcagaatctgtccatgttcctggccaatcataacaagatcacacagtctctgcagcagcagctcgaagtgatttctggctacgaagagctcctggcagatattgtgaatctgtgtgtggattactacgagaacaggatgtatttgacgcccagtgagaaacacatgcttctcaaagtcatgggatttggtctgtacctgatggatgggagtgtcagtaacatctataagttggatgccaagaaaagaataaacttatccaaaatcgacaagtacttcaagcaactccaggtggttccgctatttggggacatgcaaatagaactggcaagatatatcaagaccagcgcccactacgaggaaaataaatctcgatggacgtgcacatcctccggcagcagccctcagtacaacatctgcgagcagatgatccagatccgcgaggaccacatgcgcttcatttcggagctggcgcgctacagcaacagcgaggtggtcacgggctcgggccgccaggaggcccagaagacggacgcggagtaccgcaagctcttcgacctggcgctgcagggcctgcagctgttgtcgcagtggagcgcgcacgtgatggaagtgtattcctggaagcttgtgcaccccaccgacaagtactccaacaaggactgccccgacagcgctgaagagtacgagcgtgccacgcgctacaactacaccagcgaggagaagtttgccctagtggaggtgatcgccatgatcaaaggcctgcaggtgctgatgggcaggatggagagcgtgttcaaccacgccatccggcacaccgtctatgccgcactgcaggacttctcccaggtgacccttagggagccgctgcggcaggccatcaagaagaagaagaacgtcatccagagtgtcctgcaggccatcaggaagaccgtgtgtgactgggagacggggcatgagcccttcaatgacccagccttgcggggcgagaaggaccccaagagcggcttcgacataaaagtaccacgccgcgccgtgggaccctccagcactcagctttacatggtgagaaccatgctagagtccctcattgcagacaaaagtggttccaagaaaaccttgagaagtagccttgaggggcccaccatattggacatagaaaaatttcatcgagagtcattcttctacactcacttgataaatttcagtgaaacgctgcagcagtgctgtgacctttcgcagctgtggttccgagagttcttcctggagctgaccatgggcaggaggatccagttccccattgagatgtcgatgccctggatcctgacggaccacatcctggagaccaaggaggcatcgatgatggagtacgtgctctactccctggacctgtacaatgacagcgcccactacgcgctcaccaggttcaacaagcagttcctgtacgacgaaattgaggccgaggtgaatctatgttttgaccaatttgtttacaagctagcagaccagatatttgcctattataaggttatggcaggaagtttgcttcttgataaacggttacgatcagaatgcaagaatcagggagccacgatccacctcccgccgtctaaccgctacgagacgctgctgaagcagaggcatgtgcagctcctcggcagatcaatagacctcaatcgtctgatcacccagcgcgtctcagcagccatgtataagtccctagaactggcgattggacgatttgaaagtgaagatttgacctccatagttgagctggatggcctgttggaaatcaaccgcatgacccacaagctgctgagccggtacctgacgctggacggcttcgacgccatgttccgggaggccaaccacaacgtgtcagcgccctacgggaggatcaccctgcacgtcttctgggagctcaactatgacttcctgcccaactactgctacaacggctctaccaaccggtttgttcggacagtgttaccattttctcaggaatttcaaagagataagcagcctaatgcacagcctcagtatctgcatggatccaaggctttgaacttggcctactccagcatttacggcagctaccggaacttcgtgggacctccacactttcaagtcatctgccggcttctcggctaccagggtatcgccgtggtcatggaggagctgctgaaggtcgtcaagagcctgctgcaaggcacaatcctgcagtacgtgaagacgctgatggaggtgatgcccaagatctgccgcctgccccggcacgagtacggctctcctggtatcctggagttcttccaccaccagctgaaggacatcgtggagtacgcagagctgaagacggtgtgcttccagaacctgcgggaggtggggaacgccatcctcttctgcctgctcatcgagcagagcctgtctttagaagaagtgtgtgacctgctgcacgcggctcctttccagaacatcttgccgcgagtccatgtgaaagagggggagagacttgatgccaaaatgaaaagactagaatcaaagtacgccccgctgcatcttgtcccactgattgaaagactggggacccctcagcaaattgccatcgcaagagagggggacctgctgacaaaggagcgcctctgctgcggcctgtccatgtttgaggtcatcctgacacggatccggagctttctggatgaccccatctggcgcgggcctctgcccagcaatggggtcatgcatgtggacgagtgtgtggagtttcacagactgtggagtgccatgcagtttgtctactgcattcccgtggggacacacgagttcacagtcgagcagtgctttggtgatgggctacactgggctggctgtatgatcatcgtacttcttgggcagcagcggcgttttgctgtgctggatttctgctaccatctacttaaagtccagaaacatgatggcaaagatgagattattaaaaatgtggtatgtggatgaaaatctcgcaccatctatggaccttttgcaaaagcatactttctttgtgttataagttcttgtttctggcaatgtttttcatcctagtacgtaaggtgccaccaacagaaactttcttttcgttcccaaaatgaatctaaatataattggccagtaaagcagtctggcagagaaaatactcattgttccgttttccttctcaaggtacttagatttacttccagtcttacaggatctgcattgtcagaatattggcaactatagtcttcgggcccctggaagtctgtgctttcttggctgctttaaaggccttttgtctttgttgctttatggatccctcatagttgaattctggaaaatactcagccattatctttgaaatatttcagcctcctttccattctccctattcttgccattcaggacttcagttaaacatatgttagaccttctcattctattctccacatctctttgttg

SEQ ID NO: 75951 - DNA, 2409 bp, Homo sapiens
cccgggaggaaggggaggaggccgagtgtttcctggcgcattcccggccagcccgagtgactcactcggccaaggaaactcccagggcccgcccaggacccccaagccgccgcggacgcagcccaggatggcggcccaggtgactctggaggacgcgctgtccaacgtggacctcctggaggagctgcccctgcccgaccagcagccctgcatcgagcccccgccatcctcgctgctctaccagccaaatttcaacactaactttgaagacagaaatgcatttgttactggcatcgcaagatacattgaacaagccaccgtccactctagcatgaacgagatgctggaggagggccaagaatatgctgtcatgctgtacacctggaggagctgctcccgggccatcccacaggtgaaatgtaacgagcagcctaacagagtggaaatctacgagaaaaccgtggaggttctggagcctgaggtcacaaaactgatgaatttcatgtacttccagagaaatgccattgagcgtttctgcggggaagtgaggcgcctgtgccatgccgagaggaggaaggacttcgtgtcagaagcctacctgatcacactgggcaaattcatcaacatgttcgctgtgctggacgagctgaagaacatgaagtgcagtgtgaagaacgaccactcagcgtacaagagggccgctcagtttttacgtaaaatggcagatccacagtccatccaggaatcgcagaatctgtccatgttcctggccaatcataacaagatcacacagtctctgcagcagcagctcgaagtgatttctggctacgaagagctcctggcagatattgtgaatctgtgtgtggattactacgagaacaggatgtatttgacgcccagtgagaaacacatgcttctcaaagtcatgggatttggtctgtacctgatggatgggagtgtcagtaacatctataagttggatgccaagaaaagaataaacttatccaaaatcgacaagtacttcaagcaactccaggtggttccgctatttggggacatgcaaatagaactggcaagatatatcaagaccagcgcccactacgaggaaaataaatctcgatggacgtgcacatcctccggcagcagccctcagtacaacatctgcgagcagatgatccagatccgcgaggaccacatgcgcttcatttcggagctggcgcgctacagcaacagcgaggtggtcacgggctcgggccgccaggaggcccagaagacggacgcggagtaccgcaagctcttcgacctggcgctgcagggcctgcagctgttgtcgcagtggagcgcgcacgtgatggaagtgtattcctggaagcttgtgcaccccaccgacaagtactccaacaaggactgccccgacagcgctgaagagtacgagcgtgccacgcgctacaactacaccagcgaggagaagtttgccctagtggaggtgatcgccatgatcaaaggcctgcaggtgctgatgggcaggatggagagcgtgttcaaccacgccatccggcacaccgtctatgccgcactgcaggacttctcccaggtgacccttagggagccgctgcggcaggccatcaagaagaagaagaacgtcatccagagtgtcctgcaggccatcaggaagaccgtgtgtgactgggagacggggcatgagcccttcaatgacccagccttgcggggcgagaaggaccccaagagcggcttcgacataaaagtaccacgccgcgccgtgggaccctccagcactcagctttacatggtgagaaccatgctagagtccctcattgcagacaaaagtggttccaagaaaaccttgagaagtagccttgaggggcccaccatattggacatagaaaaatttcatcgagagtcattcttctacactcacttgataaatttcagtgaaacgctgcagcagtgctgtgacctttcgcagctgtggttccgagagttcttcctggagctgaccatgggcaggaggatccagttccccattgagatgtcgatgccctggatcctgacggaccacatcctggagaccaaggaggcatcgatgatggagtgcgtgtcctgcgggcctgtctccagcctttgtgtgtggtgaccgggggtcctcagaggaggtggcggagaggccgggactgtttttagtattgtatttgaaatcaagtttctgggcctgggcaaaatagcaagaccccagtctctacaaaaatgagaaaacttagcctggtgtggtggctgatgcgggaggattgctttaccacagaaatttgtggctgcattgagctatggattgcaccactgcattccagcctggccacgtagcaagaccctgtctccaaataaaaaaaaaaa

SEQ ID NO: 75952 - DNA, 5193 bp, Homo sapiens
cccgggaggaaggggaggaggccgagtgtttcctggcgcattcccggccagcccgagtgactcactcggccaaggaaactcccagggcccgcccaggacccccaagccgccgcggacgcagcccaggatggcggcccaggtgactctggaggacgcgctgtccaacgtggacctcctggaggagctgcccctgcccgaccagcagccctgcatcgagcccccgccatcctcgctgctctaccagccaaatttcaacactaactttgaagacagaaatgcatttgttactggcatcgcaagatacattgaacaagccaccgtccactctagcatgaacgagatgctggaggagggccaagaatatgctgtcatgctgtacacctggaggagctgctcccgggccatcccacaggtgaaatgtaacgagcagcctaacagagtggaaatctacgagaaaaccgtggaggttctggagcctgaggtcacaaaactgatgaatttcatgtacttccagagaaatgccattgagcgtttctgcggggaagtgaggcgcctgtgccatgccgagaggaggaaggacttcgtgtcagaagcctacctgatcacactgggcaaattcatcaacatgttcgctgtgctggacgagctgaagaacatgaagtgcagtgtgaagaacgaccactcagcgtacaagagggccgctcagtttttacgtaaaatggcagatccacagtccatccaggaatcgcagaatctgtccatgttcctggccaatcataacaagatcacacagtctctgcagcagcagctcgaagtgatttctggctacgaagagctcctggcagatattgtgaatctgtgtgtggattactacgagaacaggatgtatttgacgcccagtgagaaacacatgcttctcaaagtcatgggatttggtctgtacctgatggatgggagtgtcagtaacatctataagttggatgccaagaaaagaataaacttatccaaaatcgacaagtacttcaagcaactccaggtggttccgctatttggggacatgcaaatagaactggcaagatatatcaagaccagcgcccactacgaggaaaataaatctcgatggacgtgcacatcctccggcagcagccctcagtacaacatctgcgagcagatgatccagatccgcgaggaccacatgcgcttcatttcggagctggcgcgctacagcaacagcgaggtggtcacgggctcgggccgccaggaggcccagaagacggacgcggagtaccgcaagctcttcgacctggcgctgcagggcctgcagctgttgtcgcagtggagcgcgcacgtgatggaagtgtattcctggaagcttgtgcaccccaccgacaagtactccaacaaggactgccccgacagcgctgaagagtacgagcgtgccacgcgctacaactacaccagcgaggagaagtttgccctagtggaggtgatcgccatgatcaaaggcctgcaggtgctgatgggcaggatggagagcgtgttcaaccacgccatccggcacaccgtctatgccgcactgcaggacttctcccaggtgacccttagggagccgctgcggcaggccatcaagaagaagaagaacgtcatccagagtgtcctgcaggccatcaggaagaccgtgtgtgactgggagacggggcatgagcccttcaatgacccagccttgcggggcgagaaggaccccaagagcggcttcgacataaaagtaccacgccgcgccgtgggaccctccagcactcagctttacatggtgagaaccatgctagagtccctcattgcagacaaaagtggttccaagaaaaccttgagaagtagccttgaggggcccaccatattggacatagaaaaatttcatcgagagtcattcttctacactcacttgataaatttcagtgaaacgctgcagcagtgctgtgacctttcgcagctgtggttccgagagttcttcctggagctgaccatgggcaggaggatccagttccccattgagatgtcgatgccctggatcctgacggaccacatcctggagaccaaggaggcatcgatgatggagtacgtgctctactccctggacctgtacaatgacagcgcccactacgcgctcaccaggttcaacaagcagttcctgtacgacgaaattgaggccgaggtgaatctatgttttgaccaatttgtttacaagctagcagaccagatatttgcctattataaggttatggcaggaagtttgcttcttgataaacggttacgatcagaatgcaagaatcagggagccacgatccacctcccgccgtctaaccgctacgagacgctgctgaagcagaggcatgtgcagctcctcggcagatcaatagacctcaatcgtctgatcacccagcgcgtctcagcagccatgtataagtccctagaactggcgattggacgatttgaaagtgaagatttgacctccatagttgagctggatggcctgttggaaatcaaccgcatgacccacaagctgctgagccggtacctgacgctggacggcttcgacgccatgttccgggaggccaaccacaacgtgtcagcgccctacgggaggatcaccctgcacgtcttctgggagctcaactatgacttcctgcccaactactgctacaacggctctaccaaccggtttgttcggacagtgttaccattttctcaggaatttcaaagagataagcagcctaatgcacagcctcagtatctgcatggatccaaggctttgaacttggcctactccagcatttacggcagctaccggaacttcgtgggacctccacactttcaagtcatctgccggcttctcggctaccagggtatcgccgtggtcatggaggagctgctgaaggtcgtcaagagcctgctgcaaggcacaatcctgcagtacgtgaagacgctgatggaggtgatgcccaagatctgccgcctgccccggcacgagtacggctctcctggtatcctggagttcttccaccaccagctgaaggacatcgtggagtacgcagagctgaagacggtgtgcttccagaacctgcgggaggtggggaacgccatcctcttctgcctgctcatcgagcagagcctgtctttagaagaagtgtgtgacctgctgcacgcggctcctttccagaacatcttgccgcgagtccatgtgaaagagggggagagacttgatgccaaaatgaaaagactagaatcaaagtacgccccgctgcatcttgtcccactgattgaaagactggggacccctcagcaaattgccatcgcaagagagggggacctgctgacaaaggagcgcctctgctgcggcctgtccatgtttgaggtcatcctgacacggatccggagctttctggatgaccccatctggcgcgggcctctgcccagcaatggggtcatgcatgtggacgagtgtgtggagtttcacagactgtggagtgccatgcagtttgtctactgcattcccgtggggacacacgagttcacagtcgagcagtgctttggtgatgggctacactgggctggctgtatgatcatcgtacttcttgggcagcagcggcgttttgctgtgctggatttctgctaccatctacttaaagtccagaaacatgatggcaaagatgagattattaaaaatgtgcctttgaagaagatggtggagagaattcgcaagttccagattctcaatgatgagatcatcaccatcctggataagtacctgaagtcaggcgacggggagggcacgccagtggagcatgtgcgctgcttccagccgcccatccaccagtccctcgccagcagctgagggcacgcgctgcactccgtaactcaacatggcatgcctttctctccgtaaactatttagtgagatttttagggactatttttcagtatctctgtacctgttaaagggggtgcttttcgatctaaaaacttaattttataaaattgacttatttttctcagcactcaacacattgtcatcatgctcttcgcgtcacttcaggcacaactcttgcagcacatcatctgcgctgccctgcattgtatgcccatccaccgttcctcacacaacattggtattctcattgggcatgttccttggccagcttgttgtccatcacacacatgcgctagcctaggcgttccatatccattaccattcaccatcaaggcacacactctcaagtcacccagcgaccattgccatttcacacagtccccatatgccccaagtttcacccattataacaacgttggtcacactcaatcttcacgctatgatctagtcttcacggggcaatccttttccctttgcaatcggggtcctttgtgatcataggcaaggcaaagtagctttcaaggtttacttacacatgttcgactatgagttatctccaccaatacacccctatatgataatacaggtgtggtagttatattagcaaggcacaacagcaattacagcgttggcaacctttctctgcaacttatacaccagccattaggagtctatttatccccagctgacgaagaagttcgccgaaggattttgtgttggacacgaaacagagaaattcgtataaacagcagggttgggcaaccaattccgcagggaacattgtgaggcacacaaggggggtttcaacttaaagcaaaaactgtacacgcaagacgttcacacttggcagggaatttcgtttaaacagaaaagaactactagaagaggaagaagtatctagaagcagagaaatgatatcgtgagcgagaggggagaacactacaccaacccaacgccaaccagcgagaggagtacttgtacacggacacagacgaaaacaacaaagcgcacacgggagctacacaaacaacgcaagacaccaatagggggcgaccacacccactatgtggggaggacgcaacaaaatacaaagagatcggaaagagattcaaaccccacctgagaacgaaccaccacacaagaagcacaatcaaagacgaatgatgaggcaacacaaacaaacacgagaatgggagaacgcacaacacaaatctcagcacgcacgcaaggagggcaccccccccgaccagaataaataaagagcagag

SEQ ID NO: 75953 - DNA, 1244 bp, Homo sapiens
tagaggttacttgcgatgtcgcgtgcatgtgaagagggggagagacttgatgccaaaatgaaaagactagaatcaaagtacgccccgctgcatcttgtcccactgattgaaagactggggacccctcagcaaattgccatcgcaagagagggggacctgctgacaaaggagcgcctctgctgcggcctgtccatgtttgaggtcatcctgacacggatccggagctttctggatgaccccatctggcgcgggcctctgcccagcaatggggtcatgcatgtggacgagtgtgtggagtttcacagactgtggagtgccatgcagtttgtctactgcattcccgtggggacacacgagttcacagtcgagcagtgctttggtgatgggctacactgggctggctgtatgatcatcgtacttcttgggcagcagcggcgttttgctgtgctggatttctgctaccatctacttaaagtccagaaacatgatggcaaagatgagattattaaaaatgtgcctttgaagaagatggtggagagaattcgcaagttccagattctcaatgatgagatcatcaccatcctggataagtacctgaagtcaggcgacggggagggcacgccagtggagcatgtgcgctgcttccagccgcccatccaccagtccctcgccagcagctgagggcacgcgctgcactccgtaactcaacatggcatgcctttctctccgtaaactatttagtgagatttttagggactatttttcagtatctctgtacctgttaaagggggtgcttttcgatctaaaaacttaattttataaaattgacttatttttctagactaaaattgtatatgcttttggtaattaggaactcttgagaatattggctgctgattgttgccatcacgttcctacaaaattgtttttctatgggatgttctggcagctgtgtcataaaatgctgctgggttcattcattcattccataagaaacttaataccagcaaatgcattaaatcccttgccagttaccattaactgtaactatttagcttttgtttagggatctttctgatggtcttttatgagcaatcttagttctaagtcattgttcccatcccttttttgtgtgtttcagaaaatagtgaacttgattcccctgcttccactaaatccagttgtgacaaaatctaacgtgacatcagatcgaaaggttatagaaataaaactaatgagatcta

SEQ ID NO: 75954 - DNA, 2458 bp, Homo sapiens
cccgggaggaaggggaggaggccgagtgtttcctggcgcattcccggccagcccgagtgactcactcggccaaggaaactcccagggcccgcccaggacccccaagccgccgcggacgcagcccaggatggcggcccaggtgactctggaggacgcgctgtccaacgtggacctcctggaggagctgcccctgcccgaccagcagccctgcatcgagcccccgccatcctcgctgctctaccagccaaatttcaacactaactttgaagacagaaatgcatttgttactggcatcgcaagatacattgaacaagccaccgtccactctagcatgaacgagatgctggaggagggccaagaatatgctgtcatgctgtacacctggaggagctgctcccgggccatcccacaggtgaaatgtaacgagcagcctaacagagtggaaatctacgagaaaaccgtggaggttctggagcctgaggtcacaaaactgatgaatttcatgtacttccagagaaatgccattgagcgtttctgcggggaagtgaggcgcctgtgccatgccgagaggaggaaggacttcgtgtcagaagcctacctgatcacactgggcaaattcatcaacatgttcgctgtgctggacgagctgaagaacatgaagtgcagtgtgaagaacgaccactcagcgtacaagagggccgctcagtttttacgtaaaatggcagatccacagtccatccaggaatcgcagaatctgtccatgttcctggccaatcataacaagatcacacagtctctgcagcagcagctcgaagtgatttctggctacgaagagctcctggcagatattgtgaatctgtgtgtggattactacgagaacaggatgtatttgacgcccagtgagaaacacatgcttctcaaagtcatgggatttggtctgtacctgatggatgggagtgtcagtaacatctataagttggatgccaagaaaagaataaacttatccaaaatcgacaagtacttcaagcaactccaggtggttccgctatttggggacatgcaaatagaactggcaagatatatcaagaccagcgcccactacgaggaaaataaatctcgatggacgtgcacatcctccggcagcagccctcagtacaacatctgcgagcagatgatccagatccgcgaggaccacatgcgcttcatttcggagctggcgcgctacagcaacagcgaggtggtcacgggctcgggccgccaggaggcccagaagacggacgcggagtaccgcaagctcttcgacctggcgctgcagggcctgcagctgttgtcgcagtggagcgcgcacgtgatggaagtgtattcctggaagcttgtgcaccccaccgacaagtactccaacaaggactgccccgacagcgctgaagagtacgagcgtgccacgcgctacaactacaccagcgaggagaagtttgccctagtggaggtgaggatgctcggccgctcgctcttcctcatgtcgctctagcttcacaccatcttctctgtcaaaagcaaaaacatgaacaaaactgcctgtttactcattgcttctgtgtgggcacccctttccatctggcagagtagtcagagtagaacgcattagagaaacagtggttgtcggtcctgggtctgcactgaagctccctgggtgcgaatctggactcctggacctgcgtctggatggagagcagtgtcgggtgcggggaagggaggtgaaagagatgtggcccctgctgagagagaagagctgtcttgctctcctgtgaggcaggcgctgcactcccctcgtgagcctttccatgggcagctcttcattccagcatcaactggtatcttttctttcatagctgtgcttttcctgtgctgtttgagaaatctttgcatactctcaggtcgtgaaggtattctgcattgctttctggatacttcactctgctttcacactgagatgcgaaattcacctgaaattcatttttgaaacaattccgtccaaccctcacgctgccacctttgtagctggtcacgtgacaatgcatgtgtggctgtgtttctgctctgctctaacccagtgtcagttgctgtcggtatcccagcaccactctgtagctttgtagtcatctaccgtgtatgagaaagcacgtctttctgtctcctagacttccttggctattcttccccactgtagtttcatattcattttagaatcagcttttcccatcccacagtgaggattttaatcaggatatgaacaatcctatggatcatgacaggagaattgacagaagtctcatacagttggccctcagtgttcttgggttccacctccatgaaccaaccttgggtcaaaaatgttcagaaagaaaaaataacactacaacagtgaaaagtaataaaaatgttaaaaaccactgttttg

SEQ ID NO: 75955 - DNA, 505 bp, Homo sapiens
ggtaaacagcacagatgctgggagagggctggcatctgaccgtgaccatcacgcccatgtgacaaaggatgtcaccacagtgaacagttctgaccacagtggcttttcacctgcttcgttaaatttaactcacaccggctcagaggacaatttgattcattctgtatctcagcagaaaccagagcacctcagaagatcaaggcttccaaattctcctgggggaacagacgtcagccattcagcacaaaggaaacttccttctctgtatgtcagaggaagacataattgtgccatttccttcttgaagaagtttacaaacatttgcaagttgtcaaaaataattagtctaaaattgtttcataaaccgtggaatgaaacaggacgtgccttgttgagatcaaagggcttctgttaccttcttgtaaactcaaatgaaattcttttgaaagtaaaatcttggaattagcagtggtttttgtggcacatgtatggcagggggagggga

SEQ ID NO: 75956 - DNA, 501 bp, Homo sapiens
  misc_feature (16)..(16): n is a, c, g, or t
  misc_feature (76)..(76): n is a, c, g, or t
ttagctgctctccccnatttctcctttcctctccattcttcttcccttctcccatatatccccttcctaaccacancttcctcagcggccgcataacaaatgtttcaacgatggtgcagaaagggaccagcttgacgaagcttctgcttttgtgactgtctcctaatgcagaaaccagagcacctcagaagatcaaggcttccaaattctcctgggggaacagacgtcagccattcagcacaaaggaaacttccttctctgtatgtcagaggaagacataattgtgccatttccttcttgaagaagtttacaaacatttgcaagttgtcaaaaataattagtctaaaattgtttcataaaccgtggaatgaaacaggacgtgccttgttgagatcaaagggcttctgttaccttcttgtaaactcaaatgaaattcttttgaaagtaaaatcttggaattagcagtggtttttgtggcacatgtatggcagggggagggga

SEQ ID NO: 75957 - DNA, 685 bp, Homo sapiens
cgcccgttttcccgcgggaaagccgaggcccggtgctgtattctgccgcccattttacccgcggggaagctgaggcccagtgctgtttaatatcttactcatgttcacttgatgagaaagtgacagatctgagacaaacccagttctagaggttatgacaccagccatggaagagcagagaggccaatgaggtggggaggttggaaacaaaaggccttctccaccccagcttgaccaacccaaaagctggaaggcaaggaagacctagatcgacagaaaagaaatgagtcaacgatggtgcagaaagggaccagcttgacgaagcttctgcttttgtgactgtctcctaatgcagaaaccagagcacctcagaagatcaaggcttccaaattctcctgggggaacagacgtcagccattcagcacaaaggaaacttccttctctgtatgtcagaggaagacataattgtgccatttccttcttgaagaagtttacaaacatttgcaagttgtcaaaaataattagtctaaaattgtttcataaaccgtggaatgaaacaggacgtgccttgttgagatcaaagggcttctgttaccttcttgtaaactcaaatgaaattcttttgaaagtaaaatcttggaattagcagtggtttttgtggcacatgtatggcagggggagggga

SEQ ID NO: 75958 - DNA, 525 bp, Homo sapiens
cgcccgttttcccgcgggaaagccgaggcccggtgctgtattctgccgcccattttacccgcggggaagctgaggcccagtgctgtttaatatcttactcatgttcacttgatgagaaagtgacagatctgagacaaacccagaaagggaccagcttgacgaagcttctgcttttgtgactgtctcctaatgcagaaaccagagcacctcagaagatcaaggcttccaaattctcctgggggaacagacgtcagccattcagcacaaaggaaacttccttctctgtatgtcagaggaagacataattgtgccatttccttcttgaagaagtttacaaacatttgcaagttgtcaaaaataattagtctaaaattgtttcataaaccgtggaatgaaacaggacgtgccttgttgagatcaaagggcttctgttaccttcttgtaaactcaaatgaaattcttttgaaagtaaaatcttggaattagcagtggtttttgtggcacatgtatggcagggggagggga

SEQ ID NO: 75959 - DNA, 560 bp, Homo sapiens
cgcccgttttcccgcgggaaagccgaggcccggtgctgtattctgccgcccattttacccgcggggaagctgaggcccagtgctgtttaatatcttactcatgttcacttgatgagaaagtgacagatctgagacaaacccagatcgacagaaaagaaatgagtcaacgatggtgcagaaagggaccagcttgacgaagcttctgcttttgtgactgtctcctaatgcagaaaccagagcacctcagaagatcaaggcttccaaattctcctgggggaacagacgtcagccattcagcacaaaggaaacttccttctctgtatgtcagaggaagacataattgtgccatttccttcttgaagaagtttacaaacatttgcaagttgtcaaaaataattagtctaaaattgtttcataaaccgtggaatgaaacaggacgtgccttgttgagatcaaagggcttctgttaccttcttgtaaactcaaatgaaattcttttgaaagtaaaatcttggaattagcagtggtttttgtggcacatgtatggcagggggagggga

SEQ ID NO: 75960 - DNA, 880 bp, Homo sapiens
cgcccgttttcccgcgggaaagccgaggcccggtgctgtattctgccgcccattttacccgcggggaagctgaggcccagtgctgtttaatatcttactcatgttcacttgatgagaaagtgacagatctgagacaaacccagttctagaggttatgacaccagccatggaagagcagagaggccaatgaggtggggaggttggaaacaaaaggccttctccaccccagcttgaccaacccaaaagctggaaggcaaggaagacctagacagaatttaagagacaccagaggatggcacatttatactgagcttgcagtttcctaaacatgaagaagatgaacggctctcagttaagcagcacgggtcagataggagcttgaaattgaatatttgagctgacacgggagagacatacttttgagattccaaatacgatttctgtggagaaaacaaaaaaggactctgtttttaattcaaaagggagaagtgaaattctacctcacttttttaaaagaagagcctggaattggcctatccgtctttttccccgttggatcacagagcagaaaggaaggtgggcgtttgtgttctgggtgttgtccacgctggacgtgccagcatctcccactgagccagatgttccagggctaaggccagtttcatttgaaggcacagccttactatatcatattaatctgatgccaagtttttggatgttatgagcaaccacctcatttattttttgtggttgtttaaccacaatgagtaagtcatgccgtgagggcccagagactgtgtcactgttgtgatgatagagtgcagggcccttcaaagggaggtctgtgggccagcagcacccaaggtaaccctggggagct

SEQ ID NO: 75961 - DNA, 891 bp, Homo sapiens
cgcccgttttcccgcgggaaagccgaggcccggtgctgtattctgccgcccattttacccgcggggaagctgaggcccagtgctgtttaatatcttactcatgttcacttgatgagaaagtgacagatctgagacaaacccagttctagaggttatgacaccagccatggaagagcagagaggccaatgaggtggggaggttggaaacaaaaggccttctccaccccagcttgaccaacccaaaagctggaaggcaaggaagacctagacagaatttaagagacaccagaggatggcacatttatactgagcttgcagtttcctaaacatgaagaagatgaacggctctcagttaagcagcacgggtcagataggagcttgaaattgaatatttgagctgacacgggagagacatacttttgagattccaaatacgatttctgtggagaaaacaaaaaaggactctgtttttaattcaaaagggagaagtgaaattctacctcacttttttaaaagaagagcctggaattggcctatccgtctttttccccgttggatcacagagcagaaaggaagctaagacctctagtacagtgttcaatggaactggtgagaaaagacgtccttgctgtgttcctgatatgaagaggaaagcagtccttctccattaaatgctgacaacatgagcctcccgtggtcggaacgggcttgtgaaggcggtgctggggtgcaccagggcagcagctacagggtcaagcctgagacacctgaagccctggacttggaatctgaagctgtcatcagccagtacacctatgaacctgtggaagacctgaagtacctgtttaaaagacagccaaaagataagtaaatacttcccaaatttccttg

SEQ ID NO: 75962 - DNA, 457 bp, Homo sapiens
tctccccatcgtgacttacagcatatgtgttaatctccctgtgaattctgagctcccaaatgctgaaggagatatgctaaaccctttccccgtggcgttcttccagacagaatttaagagacaccagaggatggcacatttatactgagcttgcagtttcctaaacatgaagaagatgaacggctctcagttaagcagcacgggtcagataggagcttgaaattgaatatttgagctgacacgggagagacatactgtgagtggccccacgaagttagctggatctctaagcttcctaagacaccatgattagaaatagattgaggtcagggtatgcggtcctatttgaattaatgaaaagccaaattgctcctcagagtgctggtttttgtgctgcaggtcagaccactgggttttgtggaccctttgcagaggtcgggggagcagctgggctctg

SEQ ID NO: 75963 - DNA, 429 bp, Homo sapiens
ttgtctggtttgttcatccctgttttcttaagagcctggtctgtaaatactccatagtacaattgaatgtgtggacaatgctaaagtaatgtttgtctttttctttctctagccacccaaacagccatgttgacttgtttttatttcatagggcctgggtataaaaaaaggaccttaatctttgcgatggatagttctttggttttctccatgattggcgtgggaatttattcccctgggtgattttttggggaggcctctgtgatgagaaaagtggctgtttgtgaacgagacccaataaacctccccatcccagagtttgcaaagcattttcacttacgtccccatctacactgatctgcgactgtggggattatttttttttttttctacagatggatagtgaatggcagaaagagaccccaggag

SEQ ID NO: 75964 - DNA, 452 bp, Homo sapiens
gttttgcacacaatttctgctagcaagattacaaccttaatggaaacacacaacgtattttaaaagttactaataataattccttagcattatctaatagccagtccatattcaaatttcaccagttgctaaaaatgccttttaacatttgaattgttccaatgaagatttaaccaacgttcatgtgttctattaggtcttgctgtcttgagcgtgtcttctctccttttttcctcttgccattgattgctttacatagcagttgcaaagcaagggtcatgatgaactaagtttctctgatttcatattaggttttctttctaccataccagtgaggaaaggaagatatttcttccaaggtctgaaagatttaattgtaactagttacatttttgtttattatagtcaagcatgtatcaaaatgaatttctattaaattcattcatttggaa

SEQ ID NO: 75965 - DNA, 449 bp, Homo sapiens
aaatcctctgtgttctgcctgtcatcccttcatctcctctaatcctggcaacattttttctgtctccatagttttacctttgatcttttatatcatatagttgaaattatacagtgtgtagccttttcaaattgacttctttcacttagtaatgtggatttcagtttcctccatgtcttttcatggcttgataatgcatttctttttagagccaaattatgttccatcgtctggatgtttatttattcacctactgaaggactgttggatgcttccttttggcaattatgaggaaagctgttataaatatctgtgcaggctttttgtgtggacataactgaaatatttttaaagttatatttattgaggtataatttacattcagtaatagtcacactttttagtgtagagttctgagttttgacagttgtatctaatcatgcaatcaa

SEQ ID NO: 75966 - DNA, 346 bp, Homo sapiens
tcaaatttaggttggcagctgttgttagtgtcaggacttaaataactttgctttgttaaaaaataaattcacaacatatgaatttcagcatgttgtgaatttattgtttgtgcttattagggaaagatacttcagttgaaaaaataagaaattctccagggtataaaaaaaccatccttgttagtagacaagtgatcatagtcttatcaagacatccatcctcagccggttgttgtgacttatgcctgtaaccccagcactttggaaggctgaggcagaaggattgcttgagtccaggagttcaagaccagcctgggcaacatgttgaaaccccatctctacaaaa

SEQ ID NO: 75967 - DNA, 552 bp, Homo sapiens
gggatatctgtgtgcaaacactagtttaactaaaggatatacttttattttacaaagacttgtctaaaatacctgttcctgacatgcaaacaaaaatagataatttgttcttttattcctaaatctatttaatttggtgtaattcagagtgatctttgaggatagaaagataatgcccaactgaagttaatattcttactgcctggaataagaataaagaattttagcagttcttaaaatatggagcagagcattagaatacctgcttttatgaaaaattttatacatttaaatttatataatgaaaatctttaggaaccaggccctagttaaacaggggaatcaaatatttatattactaaagttattaacaaaactttggagaccttattgcttatgggcaaaagcacagagtttgaaatattgattagagagtaagttctttaggagtcctagattttattttttcttgcttactgcctagagcaatgcctagcacctagcaaacactcaacaaatatttattaaatgactggatggatgggtggatgg

SEQ ID NO: 75968 - DNA, 316 bp, Homo sapiens
taacctgcttttatctcttccgcgtttgacacataaactcttttgaaaagcatgaaaccttttcaaaaagagcctttcttatggccgggcatggtggctcacacctgtaatcccagcactctgggaggccaaggtgcgcagattacttgaggtcagaagtttgagaccagcctggccaacctgctgaaaccccatctctactaaaaatacaaaaattagccaggcgtggtggcacatgtctgtaatcccagccaaaaccccgccattgattgcactccagcctgggtgacagcagagtgatactgtgtctccaaaa

SEQ ID NO: 75969 - DNA, 3039 bp, Homo sapiens
  misc_feature (2325)..(2325): n is a, c, g, or t
  misc_feature (2332)..(2332): n is a, c, g, or t
  misc_feature (2339)..(2339): n is a, c, g, or t
  misc_feature (2352)..(2352): n is a, c, g, or t
  misc_feature (2371)..(2371): n is a, c, g, or t
  misc_feature (2378)..(2378): n is a, c, g, or t
  misc_feature (2396)..(2396): n is a, c, g, or t
  misc_feature (2398)..(2398): n is a, c, g, or t
  misc_feature (2428)..(2428): n is a, c, g, or t
  misc_feature (2457)..(2457): n is a, c, g, or t
  misc_feature (2460)..(2460): n is a, c, g, or t
cttaacctactcattatgcagatgaggacaccagaatccagagatactggcttgcttaaaattgccaggagttggcgtgtgagccaggctggatctgcgtccctgcctccagggccagtgtcctctcactgcattgagctcctagcctcaggctctgggatggtggactaactcctcccgccccatcctcggctcgcgtctcactcagtgtaccttctagtcccgccatggccgctctcacccgggacccccagttccagaagctgcagcaatggtaccgcgagcaccgctccgagctgaacctgcgccgcctcttcgatgccaacaaggaccgcttcaaccacttcagcttgaccctcaacaccaaccatgggcatatcctggtggattactccaagaacctggtgacggaggacgtgatgcggatgctggtggacttggccaagtccaggggcgtggaggccgcccgggagcggatgttcaatggtgagaagatcaactacaccgagggtcgagccgtgctgcacgtggctctgcggaaccggtcaaacacacccatcctggtagacggcaaggatgtgatgccagaggtcaacaaggttctggacaagatgaagtctttctgccagcgtgtccggagcggtgactggaaggggtacacaggcaagaccatcacggacgtcatcaacattggcattggcggctccgacctgggacccctcatggtgactgaagcccttaagccatactcttcaggaggtccccgcgtctggtatgtctccaacattgatggaactcacattgccaaaaccctggcccagctgaaccccgagtcctccctgttcatcattgcctccaagacctttactacccaggagaccatcacgaatgcagagacggcgaaggagtggtttctccaggcggccaaggatccttctgcagtggcgaagcactttgttgccctgtctactaacacaaccaaagtgaaggagtttggaattgaccctcaaaacatgttcgagttctgggattgggtgggaggacgctactcgctgtggtcggccatcggactctccattgccctgcacgtgggttttgacaacttcgagcagctgctctcgggggctcactggatggaccagcacttccgcacgacgcccctggagaagaacgcccccgtcttgctggccctgctgggtatctggtacatcaactgctttgggtgtgagacacacgccatgctgccctatgaccagtacctgcaccgctttgctgcgtacttccagcagggcgacatggagtccaatgggaaatacatcaccaaatctggaacccgtgtggaccaccagacaggccccattgtgtggggggagccagggaccaatggccagcatgctttttaccagctcatccaccaaggcaccaagatgataccctgtgacttcctcatcccggtccagacccagcaccccatacggaagggtctgcatcacaagatcctcctggccaacttcttggcccagacagaggccctgatgaggggaaaatcgacggaggaggcccgaaaggagctccaggctgcgggcaagagtccagaggaccttgagaggctgctgccacataaggtctttgaaggaaatcgcccaaccaactctattgtgttcaccaagctcacaccattcatgcttggagccttggtcgccatgtatgagcacaagatcttcgttcagggcatcatctgggacatcaacagctttgaccagtggggagtggagctgggaaagcagctggctaagaaaatagagcctgagcttgatggcagtgctcaagtgacctctcacgacgcttctaccaatgggctcatcaacttcatcaagcagcagcgcgaggccagagtccaataaactcgtgctcatctgcagcctcctctgtgactcccctttctcttctcgtccctcctccccggagccggcactgcatgttcctggacaccacccagagcaccctctggttgtgggcttggaccacgagcccttagcagggaaggctggtctcccccagcctaacccccagcccctccatgtctatgctccctctgtgttagaagcttcaataacacatttacagcttcagaaagcaagcagtgttttgcttcataggacctgatagccatgcatcttgagagtgaggaaaagttacttgccaacacactggttccactggtagtgctggaggtagccctgggggcagctgcacctgtagcccccaatgatgttctggcagccatgctggcagcggtggttaccctcacactcttgcttgtcntcacagngggagcngttctgatcaagngagaatccccgcaggcatncacaggngaagcttccagggggtgntntggcaaatgcccttgagacccgcacaggtngatgtcagagggcattcattgttatcaangcnggacgtatggtgtggggtaaatccgggaggacatttgcatgggaagccgccgatggtgttaacacataggaactggcagttgtgttgcttggttgcacactcatcaagatagtgaccccagatgtaaaataagttccacatttgagaagaacaaagctatgagcgacttcatgtaagatgtttagaatgtgtaagtaggtctcttcaaattattttaatcacctacaacttttaaactaaactttaagctgtttaagtcaccttcattttaatgtaaaagcattgcccttctattggtattaattcggggctctgtagtcctttctctcaattttcttttaaatacattttttactccatgaagaagcttcatctcaacctccgtcatgttttagaaaccttttatcttttccttcctcatgctactcttctaagtcttcatattttctcttaaaatcttaagctattaaaattacgttaaaaacttaacgctaagcaatatcttagtaacctattgactatattttttaagtagttgtattaatctctatctttgaaagagaaaaaaacttatctgcg

SEQ ID NO: 75970 - DNA, 740 bp, Homo sapiens
gtgcctgcctttgctagatgagatgattgttcatcttggctttgtcagacccagccttgcagatgtgacagaacctgctctcgctggctgacagcccttgcatggccctttctctgcaggcccttggcgctgcaggaactcttggccacacctattttataggggagggacgtccctgagccccgtatgcttgtaagatgggatgagcaggcggcctgtgacccgtctgctttcttgaccttgacctcgatgtgggccttctccaacagtctcagaaccaaggactgggaatctcagtcccatgcagggccttggttcctctagtgatgggaagtgactaccctttgtctccctgggctggctgtggtaacttggctctgtctcttgtagccttctgcagtggcgaagcactttgttgccctgtctactaacacagtaagtgcccccgtggtcccctgtactgccttcctgggagtgcccagcatgtccaggtcatggcctctcagagacgcggttcgtaggtctggtggatcttggcttggctgatggtatggaaggtttggttgcctgtgggctgcaagccttccttgccttttccgcatttacccattcaacctctgcagctttgaggagggaggcttggagtcagtgggatcacgataaccccttcttccgtctcccaggcctgactgatacacagaacccttcatacacatgaccttcctaggcctttgtgccca

SEQ ID NO: 75971 - DNA, 229 bp, Homo sapiens
ccgggagcccttaaccctgtaaggtagagaggccctcagagaggcttggagggcaagagcaacccaggcaggatgagggctccacttccacctgagggcgggctgagcttgcagggccacatgacactcccttgggtgcctgcctgcaacacccactgtggggtaacccgagtcccccttgccacgctcacagagttgaggttgtgagttattctcagtgatgaccttt

SEQ ID NO: 75972 - DNA, 2125 bp, Homo sapiens
gggccgggccgggcgcctgcgccataaaggccgccgcgcgcccacgcgcctcgcttgctgcgcgctgccggcgctccttcctcctcggctcgcgtctcactcagtgtaccttctagtcccgccatggccgctctcacccgggacccccagttccagaagctgcagcaatggtaccgcgagcaccgctccgagctgaacctgcgccgcctcttcgatgccaacaaggaccgcttcaaccacttcagcttgaccctcaacaccaaccatgggcatatcctggtggattactccaagaacctggtgacggaggacgtgatgcggatgctggtggacttggccaagtccaggggcgtggaggccgcccgggagcggatgttcaatggtgagaagatcaactacaccgagggtcgagccgtgctgcacgtggctctgcggaaccggtcaaacacacccatcctggtagacggcaaggatgtgatgccagaggtcaacaaggttctggacaagatgaagtctttctgccagcgtgtccggagcggtgactggaaggggtacacaggcaagaccatcacggacgtcatcaacattggcattggcggctccgacctgggacccctcatggtgactgaagcccttaagccatactcttcaggaggtccccgcgtctggtatgtctccaacattgatggaactcacattgccaaaaccctggcccagctgaaccccgagtcctccctgttcatcattgcctccaagacctttactacccaggagaccatcacgaatgcagagacggcgaaggagtggtttctccaggcggccaaggatccttctgcagtggcgaagcactttgttgccctgtctactaacacaaccaaagtgaaggagtttggaattgaccctcaaaacatgttcgagttctgggattgggtgggaggacgctactcgctgtggtcggccatcggactctccattgccctgcacgtgggttttgacaacttcgagcagctgctctcgggggctcactggatggaccagcacttccgcacgacgcccctggagaagaacgcccccgtcttgctggccctgctgggtatctggtacatcaactgctttgggtgtgagacacacgccatgctgccctatgaccagtacctgcaccgctttgctgcgtacttccagcagggcgacatggagtccaatgggaaatacatcaccaaatctggaacccgtgtggaccaccagacaggccccattgtgtggggggagccagggaccaatggccagcatgctttttaccagctcatccaccaaggcaccaagatgataccctgtgacttcctcatcccggtccagacccagcaccccatacggaagggtctgcatcacaagatcctcctggccaacttcttggcccagacagaggccctgatgaggggaaaatcgacggaggaggcccgaaaggagctccaggctgcgggcaagagtccagaggaccttgagaggctgctgccacataaggtctttgaaggaaatcgcccaaccaactctattgtgttcaccaagctcacaccattcatgcttggagccttggtcgccatgtatgagcacaagatcttcgttcagggcatcatctgggacatcaacagctttgaccagtggggagtggagctgggaaagcagctggctaagaaaatagagcctgagcttgatggcagtgctcaagtgacctctcacgacgcttctaccaatgggctcatcaacttcatcaagcagcagcgcgaggccagagtccaataaactcgtgctcatctgcagcctcctctgtgactcccctttctcttctcgtccctcctccccggagccggcactgcatgttcctggacaccacccagagcaccctctggttgtgggcttggaccacgagcccttagcagggaaggctggtctcccccagcctaacccccagcccctccatgtctatgctccctctgtgttagaattggctgaagtgtttttgtgcagctgacttttctgacccatgttcacgttgttcacatcccatgtagaaaaataaagatgccacggaggaggttgtaggctcagcctctgattttttttttcc

SEQ ID NO: 75973 - DNA, 1556 bp, Homo sapiens
  misc_feature (1442)..(1442): n is a, c, g, or t
  misc_feature (1455)..(1455): n is a, c, g, or t
  misc_feature (1519)..(1519): n is a, c, g, or t
gggccgggccgggcgcctgcgccataaaggccgccgcgcgcccacgcgcctcgcttgctgcgcgctgccggcgctccttcctcctcggctcgcgtctcactcagtgtaccttctagtcccgccatggccgctctcacccgggacccccagttccagaagctgcagcaatggtaccgcgagcaccgctccgagctgaacctgcgccgcctcttcgatgccaacaaggaccgcttcaaccacttcagcttgaccctcaacaccaaccatgggcatatcctggtggattactccaagaacctggtgacggaggacgtgatgcggatgctggtggacttggccaagtccaggggcgtggaggccgcccgggagcggatgttcaatggtgagaagatcaactacaccgagggtcgagccgtgctgcacgtggctctgcggaaccggtcaaacacacccatcctggtagacggcaaggatgtgatgccagaggtcaacaaggttctggacaagatgaagtctttctgccagcgtgtccggagcggtgactggaaggggtacacaggcaagaccatcacggacgtcatcaacattggcattggcggctccgacctgggacccctcatggtgactgaagcccttaagccatactcttcaggaggtccccgcgtctggtatgtctccaacattgatggaactcacattgccaaaaccctggcccagctgaaccccgagtcctccctgttcatcattgcctccaagacctttactacccaggagaccatcacgaatgcagagacggcgaaggagtggtttctccaggcggccaaggatccttctgcagtggcgaagcactttgttgccctgtctactaacacaaccaaagtgaaggagtttggaattgaccctcaaaacatgttcgagttctgggattgggtgggaggacgctactcgctgtggtcggccatcggactctccattgccctgcacgtgggttttgacaacttcgagcagctgctctcgggggctcactggatggaccagcacttccgcacgacgcccctggagaagaacgcccccgtcttgctggccctgctgggtatctggtacatcaactgctttgggtgtgagacacacgccatgctgccctatgaccagtacctgcaccgctttgctgcgtacttccagcagggcgacatggagtccaatgggaaatacatcaccaaatctggaacccgtgtggaccaccagacaggccccattgtgtggggggagccagggaccaatggccagcatgctttttaccagctcatccaccaaggcaccaagatgataccctgtgacttcctcatcccggtccagacccagcacccatacggaaggtctgctcacaagatcctcctggcaattcttggccagaaagagcctgatgaggggaaatcgacggnggggccgaagagntccaggtggggacaatcacagacttggaggtgtgcctagttgggaatcccacacttgtgttccngccctttgtggctgtccttttgacaattgggacggac

SEQ ID NO: 75974 - DNA, 2409 bp, Homo sapiens
actgaccaccccaccagtcctctgccccagtccctctgccttcactcccatggccacctgtgctccagggcctgcctgacccctgtccagcggccctgaagtaaggtctgtgatgtctaaatgccgatacctcagtttccccatctttagaacggggctcttgtttggaactgtgcccgccacagcctgcacgcctagaacactgcctgtaacgtggaaggtgttcgatctatagagttttgtcgaatgaatgaatgaagccgactagtgcacagggagtgcagcggcgcgatggtagctctctgcagcctccaacacctgggctccagtgatccccgggctctgcccaccctccccactgccacttccgggcagaggccagcaaagcggcggcgcaagagcccgccatggccgctctcacccgggacccccagttccagaagctgcagcaatggtaccgcgagcaccgctccgagctgaacctgcgccgcctcttcgatgccaacaaggaccgcttcaaccacttcagcttgaccctcaacaccaaccatgggcatatcctggtggattactccaagaacctggtgacggaggacgtgatgcggatgctggtggacttggccaagtccaggggcgtggaggccgcccgggagcggatgttcaatggtgagaagatcaactacaccgagggtcgagccgtgctgcacgtggctctgcggaaccggtcaaacacacccatcctggtagacggcaaggatgtgatgccagaggtcaacaaggttctggacaagatgaagtctttctgccagcgtgtccggagcggtgactggaaggggtacacaggcaagaccatcacggacgtcatcaacattggcattggcggctccgacctgggacccctcatggtgactgaagcccttaagccatactcttcaggaggtccccgcgtctggtatgtctccaacattgatggaactcacattgccaaaaccctggcccagctgaaccccgagtcctccctgttcatcattgcctccaagacctttactacccaggagaccatcacgaatgcagagacggcgaaggagtggtttctccaggcggccaaggatccttctgcagtggcgaagcactttgttgccctgtctactaacacaaccaaagtgaaggagtttggaattgaccctcaaaacatgttcgagttctgggattgggtgggaggacgctactcgctgtggtcggccatcggactctccattgccctgcacgtgggttttgacaacttcgagcagctgctctcgggggctcactggatggaccagcacttccgcacgacgcccctggagaagaacgcccccgtcttgctggccctgctgggtatctggtacatcaactgctttgggtgtgagacacacgccatgctgccctatgaccagtacctgcaccgctttgctgcgtacttccagcagggcgacatggagtccaatgggaaatacatcaccaaatctggaacccgtgtggaccaccagacaggccccattgtgtggggggagccagggaccaatggccagcatgctttttaccagctcatccaccaaggcaccaagatgataccctgtgacttcctcatcccggtccagacccagcaccccatacggaagggtctgcatcacaagatcctcctggccaacttcttggcccagacagaggccctgatgaggggaaaatcgacggaggaggcccgaaaggagctccaggctgcgggcaagagtccagaggaccttgagaggctgctgccacataaggtctttgaaggaaatcgcccaaccaactctattgtgttcaccaagctcacaccattcatgcttggagccttggtcgccatgtatgagcacaagatcttcgttcagggcatcatctgggacatcaacagctttgaccagtggggagtggagctgggaaagcagctggctaagaaaatagagcctgagcttgatggcagtgctcaagtgacctctcacgacgcttctaccaatgggctcatcaacttcatcaagcagcagcgcgaggccagagtccaataaactcgtgctcatctgcagcctcctctgtgactcccctttctcttctcgtccctcctccccggagccggcactgcatgttcctggacaccacccagagcaccctctggttgtgggcttggaccacgagcccttagcagggaaggctggtctcccccagcctaacccccagcccctccatgtctatgctccctctgtgttagaattggctgaagtgtttttgtgcagctgacttttctgacccatgttcacgttgttcacatcccatgtagaaaaataaagatgccacggaggaggttgtaggctcagcctctgattttttttttcc

SEQ ID NO: 75975 - DNA, 1097 bp, Homo sapiens
  misc_feature (981)..(981): n is a, c, g, or t
  misc_feature (989)..(989): n is a, c, g, or t
  misc_feature (1000)..(1000): n is a, c, g, or t
  misc_feature (1002)..(1002): n is a, c, g, or t
  misc_feature (1010)..(1010): n is a, c, g, or t
  misc_feature (1017)..(1017): n is a, c, g, or t
  misc_feature (1026)..(1026): n is a, c, g, or t
  misc_feature (1028)..(1030): n is a, c, g, or t
  misc_feature (1034)..(1034): n is a, c, g, or t
  misc_feature (1036)..(1036): n is a, c, g, or t
  misc_feature (1045)..(1045): n is a, c, g, or t
  misc_feature (1061)..(1061): n is a, c, g, or t
gggccgggccgggcgcctgcgccataaaggccgccgcgcgcccacgcgcctcgcttgctgcgcgctgccggcgctccttcctcctcggctcgcgtctcactcagtgtaccttctagtcccgccatggccgctctcacccgggacccccagttccagaagctgcagcaatggtaccgcgagcaccgctccgagctgaacctgcgccgcctcttcgatgccaacaaggaccgcttcaaccacttcagcttgaccctcaacaccaaccatgggcatatcctggtggattactccaagaacctggtgacggaggacgtgatgcggatgctggtggacttggccaagtccaggggcgtggaggccgcccgggagcggatgttcaatggtgagaagatcaactacaccgagggtcgagccgtgctgcacgtggctctgcggaaccggtcaaacacacccatcctggtagacggcaaggatgtgatgccagaggtcaacaaggttctggacaagatgaagtctttctgccagcgtgtccggagcggtgactggaaggggtacacaggcaagaccatcacggacgtcatcaacattggcattggcggctccgacctgggacccctcatggtgactgaagcccttaagccatactcttcaggaggtccccgcgtctggtatgtctccaacattgatggaactcacattgccaaaaccctggcccagctgaaccccgagtcctccctgttcatcattgcctccaagacctttactacccaggagaccatcacgaatgcagagacggcgaaggagtggtttctccaggcggccaaggatccttctgcagtggcgaagcactttgttgccctgtctactaacacaaccaaagtgaaggagtttggaattgaccctcaaaacatgttcgagttctgggattgggtgggaggacgctactcgctgtggtcggccatcggactctccattggcctnacgtgggntttggcacctncngcgtggcncggggcnccggttggncnnnttcngngagctgganaaaccccgtgttgctntgggttggcacacacgttgggttagcaccaatgtcc

SEQ ID NO: 75976 - DNA, 2084 bp, Homo sapiens
tccactcaccactcaacacccaccccacccggcactaccggctaggtacgaggccggggtgtaatcggcgagggtacccgccatggccgctctcacccgggacccccagttccagaagctgcagcaatggtaccgcgagcaccgctccgagctgaacctgcgccgcctcttcgatgccaacaaggaccgcttcaaccacttcagcttgaccctcaacaccaaccatgggcatatcctggtggattactccaagaacctggtgacggaggacgtgatgcggatgctggtggacttggccaagtccaggggcgtggaggccgcccgggagcggatgttcaatggtgagaagatcaactacaccgagggtcgagccgtgctgcacgtggctctgcggaaccggtcaaacacacccatcctggtagacggcaaggatgtgatgccagaggtcaacaaggttctggacaagatgaagtctttctgccagcgtgtccggagcggtgactggaaggggtacacaggcaagaccatcacggacgtcatcaacattggcattggcggctccgacctgggacccctcatggtgactgaagcccttaagccatactcttcaggaggtccccgcgtctggtatgtctccaacattgatggaactcacattgccaaaaccctggcccagctgaaccccgagtcctccctgttcatcattgcctccaagacctttactacccaggagaccatcacgaatgcagagacggcgaaggagtggtttctccaggcggccaaggatccttctgcagtggcgaagcactttgttgccctgtctactaacacaaccaaagtgaaggagtttggaattgaccctcaaaacatgttcgagttctgggattgggtgggaggacgctactcgctgtggtcggccatcggactctccattgccctgcacgtgggttttgacaacttcgagcagctgctctcgggggctcactggatggaccagcacttccgcacgacgcccctggagaagaacgcccccgtcttgctggccctgctgggtatctggtacatcaactgctttgggtgtgagacacacgccatgctgccctatgaccagtacctgcaccgctttgctgcgtacttccagcagggcgacatggagtccaatgggaaatacatcaccaaatctggaacccgtgtggaccaccagacaggccccattgtgtggggggagccagggaccaatggccagcatgctttttaccagctcatccaccaaggcaccaagatgataccctgtgacttcctcatcccggtccagacccagcaccccatacggaagggtctgcatcacaagatcctcctggccaacttcttggcccagacagaggccctgatgaggggaaaatcgacggaggaggcccgaaaggagctccaggctgcgggcaagagtccagaggaccttgagaggctgctgccacataaggtctttgaaggaaatcgcccaaccaactctattgtgttcaccaagctcacaccattcatgcttggagccttggtcgccatgtatgagcacaagatcttcgttcagggcatcatctgggacatcaacagctttgaccagtggggagtggagctgggaaagcagctggctaagaaaatagagcctgagcttgatggcagtgctcaagtgacctctcacgacgcttctaccaatgggctcatcaacttcatcaagcagcagcgcgaggccagagtccaataaactcgtgctcatctgcagcctcctctgtgactcccctttctcttctcgtccctcctccccggagccggcactgcatgttcctggacaccacccagagcaccctctggttgtgggcttggaccacgagcccttagcagggaaggctggtctcccccagcctaacccccagcccctccatgtctatgctccctctgtgttagaattggctgaagtgtttttgtgcagctgacttttctgacccatgttcacgttgttcacatcccatgtagaaaaataaagatgccacggaggaggttgtaggctcagcctctgattttttttttcc

SEQ ID NO: 75977 - DNA, 1039 bp, Homo sapiens
  misc_feature (874)..(874): n is a, c, g, or t
  misc_feature (893)..(893): n is a, c, g, or t
  misc_feature (902)..(902): n is a, c, g, or t
  misc_feature (907)..(907): n is a, c, g, or t
  misc_feature (916)..(916): n is a, c, g, or t
gggccgggccgggcgcctgcgccataaaggccgccgcgcgcccacgcgcctcgcttgctgcgcgctgccggcgctccttcctcctcggctcgcgtctcactcagtgtaccttctagtcccgccatggccgctctcacccgggacccccagttccagaagctgcagcaatggtaccgcgagcaccgctccgagctgaacctgcgccgcctcttcgatgccaacaaggaccgcttcaaccacttcagcttgaccctcaacaccaaccatgggcatatcctggtggattactccaagaacctggtgacggaggacgtgatgcggatgctggtggacttggccaagtccaggggcgtggaggccgcccgggagcggatgttcaatggtgagaagatcaactacaccgagggtcgagccgtgctgcacgtggctctgcggaaccggtcaaacacacccatcctggtagacggcaaggatgtgatgccagaggtcaacaaggttctggacaagatgaagtctttctgccagcgtgtccggagcggtgactggaaggggtacacaggcaagaccatcacggacgtcatcaacattggcattggcggctccgacctgggacccctcatggtgactgaagcccttaagccatactcttcaggaggtccccgcgtctggtatgtctccaacattgatggaactcacattgccaaaaccctggcccagctgaaccccgagtcctccctgttcatcattgcctccaagacctttactacccaggagaccatcacgaatgcagagacggcgaaggagtggtttctccaggcggccaaggatccttctgcaggggaagcacttgtgcctgttataacacaccaaagtnagagttgggaatgacctcnaaaatgtcnagtcnggatggggnggaccaaccggggcgcacgactccttgcgcctggttgaactccagcacggtcgggccatggggccttcccacctgaaaacctggggccggtcgcaccggggtacacccgcaaaacctgacagg

SEQ ID NO: 75978 - DNA, 1358 bp, Homo sapiens
  misc_feature (1244)..(1244): n is a, c, g, or t
  misc_feature (1257)..(1257): n is a, c, g, or t
  misc_feature (1321)..(1321): n is a, c, g, or t
aaaggctaggtaggaggcctgggtgttggacgctttcaccacttcagcttgaccctcaacaccaaccatgggcatatcctggtggattactccaagaacctggtgacggaggacgtgatgcggatgctggtggacttggccaagtccaggggcgtggaggccgcccgggagcggatgttcaatggtgagaagatcaactacaccgagggtcgagccgtgctgcacgtggctctgcggaaccggtcaaacacacccatcctggtagacggcaaggatgtgatgccagaggtcaacaaggttctggacaagatgaagtctttctgccagcgtgtccggagcggtgactggaaggggtacacaggcaagaccatcacggacgtcatcaacattggcattggcggctccgacctgggacccctcatggtgactgaagcccttaagccatactcttcaggaggtccccgcgtctggtatgtctccaacattgatggaactcacattgccaaaaccctggcccagctgaaccccgagtcctccctgttcatcattgcctccaagacctttactacccaggagaccatcacgaatgcagagacggcgaaggagtggtttctccaggcggccaaggatccttctgcagtggcgaagcactttgttgccctgtctactaacacaaccaaagtgaaggagtttggaattgaccctcaaaacatgttcgagttctgggattgggtgggaggacgctactcgctgtggtcggccatcggactctccattgccctgcacgtgggttttgacaacttcgagcagctgctctcgggggctcactggatggaccagcacttccgcacgacgcccctggagaagaacgcccccgtcttgctggccctgctgggtatctggtacatcaactgctttgggtgtgagacacacgccatgctgccctatgaccagtacctgcaccgctttgctgcgtacttccagcagggcgacatggagtccaatgggaaatacatcaccaaatctggaacccgtgtggaccaccagacaggccccattgtgtggggggagccagggaccaatggccagcatgctttttaccagctcatccaccaaggcaccaagatgataccctgtgacttcctcatcccggtccagacccagcacccatacggaaggtctgctcacaagatcctcctggcaattcttggccagaaagagcctgatgaggggaaatcgacggnggggccgaagagntccaggtggggacaatcacagacttggaggtgtgcctagttgggaatcccacacttgtgttccngccctttgtggctgtccttttgacaattgggacggac

SEQ ID NO: 75979 - DNA, 1119 bp, Homo sapiens
  misc_feature (1005)..(1005): n is a, c, g, or t
  misc_feature (1018)..(1018): n is a, c, g, or t
  misc_feature (1082)..(1082): n is a, c, g, or t
tccgggtgtgaatcggccgaggctagacggcaaggatgtgatgccagaggtcaacaaggttctggacaagatgaagtctttctgccagcgtgtccggagcggtgactggaaggggtacacaggcaagaccatcacggacgtcatcaacattggcattggcggctccgacctgggacccctcatggtgactgaagcccttaagccatactcttcaggaggtccccgcgtctggtatgtctccaacattgatggaactcacattgccaaaaccctggcccagctgaaccccgagtcctccctgttcatcattgcctccaagacctttactacccaggagaccatcacgaatgcagagacggcgaaggagtggtttctccaggcggccaaggatccttctgcagtggcgaagcactttgttgccctgtctactaacacaaccaaagtgaaggagtttggaattgaccctcaaaacatgttcgagttctgggattgggtgggaggacgctactcgctgtggtcggccatcggactctccattgccctgcacgtgggttttgacaacttcgagcagctgctctcgggggctcactggatggaccagcacttccgcacgacgcccctggagaagaacgcccccgtcttgctggccctgctgggtatctggtacatcaactgctttgggtgtgagacacacgccatgctgccctatgaccagtacctgcaccgctttgctgcgtacttccagcagggcgacatggagtccaatgggaaatacatcaccaaatctggaacccgtgtggaccaccagacaggccccattgtgtggggggagccagggaccaatggccagcatgctttttaccagctcatccaccaaggcaccaagatgataccctgtgacttcctcatcccggtccagacccagcacccatacggaaggtctgctcacaagatcctcctggcaattcttggccagaaagagcctgatgaggggaaatcgacggnggggccgaagagntccaggtggggacaatcacagacttggaggtgtgcctagttgggaatcccacacttgtgttccngccctttgtggctgtccttttgacaattgggacggac

SEQ ID NO: 75980 - DNA, 855 bp, Homo sapiens
  misc_feature (759)..(759): n is a, c, g, or t
  misc_feature (799)..(799): n is a, c, g, or t
  misc_feature (838)..(838): n is a, c, g, or t
  misc_feature (850)..(850): n is a, c, g, or t
  misc_feature (855)..(855): n is a, c, g, or t
gggccgggccgggcgcctgcgccataaaggccgccgcgcgcccacgcgcctcgcttgctgcgcgctgccggcgctccttcctcctcggctcgcgtctcactcagtgtaccttctagtcccgccatggccgctctcacccgggacccccagttccagaagctgcagcaatggtaccgcgagcaccgctccgagctgaacctgcgccgcctcttcgatgccaacaaggaccgcttcaaccacttcagcttgaccctcaacaccaaccatgggcatatcctggtggattactccaagaacctggtgacggaggacgtgatgcggatgctggtggacttggccaagtccaggggcgtggaggccgcccgggagcggatgttcaatggtgagaagatcaactacaccgagggtcgagccgtgctgcacgtggctctgcggaaccggtcaaacacacccatcctggtagacggcaaggatgtgatgccagaggtcaacaaggttctggacaagatgaagtctttctgccagcgtgtccggagcggtgactggaaggggtacacaggcaagaccatcacggacgtcatcaacattggcattggcggctccgacctgggacccctcatggtgactgaagcccttaagccatactcttcaggaggtccccgcgtctggtatgtctccaacattgatggaactcacattgccaaaaccctggcccagctgaaccccgagtcctccctgttcatcattgcctccaagacntttactaccccagaaaaacatcaccgaattgcaaaaaacngggaaaaggaattgttttctccaagccgggcaaagggantcttcctgccantgggn

SEQ ID NO: 75981 - DNA, 1111 bp, Homo sapiens
  misc_feature (997)..(997): n is a, c, g, or t
  misc_feature (1010)..(1010): n is a, c, g, or t
  misc_feature (1074)..(1074): n is a, c, g, or t
tatttacagtacctggcctggcgtttgttgtacatactgtgacgtggttgtagactaataatgaatgtctctctgccagtcgtgtccggagcggtgactggaaggggtacacaggcaagaccatcacggacgtcatcaacattggcattggcggctccgacctgggacccctcatggtgactgaagcccttaagccatactcttcaggaggtccccgcgtctggtatgtctccaacattgatggaactcacattgccaaaaccctggcccagctgaaccccgagtcctccctgttcatcattgcctccaagacctttactacccaggagaccatcacgaatgcagagacggcgaaggagtggtttctccaggcggccaaggatccttctgcagtggcgaagcactttgttgccctgtctactaacacaaccaaagtgaaggagtttggaattgaccctcaaaacatgttcgagttctgggattgggtgggaggacgctactcgctgtggtcggccatcggactctccattgccctgcacgtgggttttgacaacttcgagcagctgctctcgggggctcactggatggaccagcacttccgcacgacgcccctggagaagaacgcccccgtcttgctggccctgctgggtatctggtacatcaactgctttgggtgtgagacacacgccatgctgccctatgaccagtacctgcaccgctttgctgcgtacttccagcagggcgacatggagtccaatgggaaatacatcaccaaatctggaacccgtgtggaccaccagacaggccccattgtgtggggggagccagggaccaatggccagcatgctttttaccagctcatccaccaaggcaccaagatgataccctgtgacttcctcatcccggtccagacccagcacccatacggaaggtctgctcacaagatcctcctggcaattcttggccagaaagagcctgatgaggggaaatcgacggnggggccgaagagntccaggtggggacaatcacagacttggaggtgtgcctagttgggaatcccacacttgtgttccngccctttgtggctgtccttttgacaattgggacggac

SEQ ID NO: 75982 - DNA, 772 bp, Homo sapiens
gggccgggccgggcgcctgcgccataaaggccgccgcgcgcccacgcgcctcgcttgctgcgcgctgccggcgctccttcctcctcggctcgcgtctcactcagtgtaccttctagtcccgccatggccgctctcacccgggacccccagttccagaagctgcagcaatggtaccgcgagcaccgctccgagctgaacctgcgccgcctcttcgatgccaacaaggaccgcttcaaccacttcagcttgaccctcaacaccaaccatgggcatatcctggtggattactccaagaacctggtgacggaggacgtgatgcggatgctggtggacttggccaagtccaggggcgtggaggccgcccgggagcggatgttcaatggtgagaagatcaactacaccgagggtcgagccgtgctgcacgtggctctgcggaaccggtcaaacacacccatcctggtagacggcaaggatgtgatgccagaggtcaacaaggttctggacaagatgaagtctttctgccagcgtgtccggagcggtgactggaaggggtacacaggcaagaccatcacggacgtcatcaacattggcattggcggctccgacctgggacccctcatggtgactgaagcccttaagccatactcttcaggaggtccccgcgtctggtatgtctccaacattgatggaactcacattgttcacatcccatgtagaaaaataaagatgccacggaggaggttgtaggctcagcctctgattttttttttcc

SEQ ID NO: 75983 - DNA, 829 bp, Homo sapiens
gggccgggccgggcgcctgcgccataaaggccgccgcgcgcccacgcgcctcgcttgctgcgcgctgccggcgctccttcctcctcggctcgcgtctcactcagtgtaccttctagtcccgccatggccgctctcacccgggacccccagttccagaagctgcagcaatggtaccgcgagcaccgctccgagctgaacctgcgccgcctcttcgatgccaacaaggaccgcttcaaccacttcagcttgaccctcaacaccaaccatgggcatatcctggtggattactccaagaacctggtgacggaggacgtgatgcggatgctggtggacttggccaagtccaggggcgtggaggccgcccgggagcggatgttcaatggtgagaagatcaactacaccgagggtcgagccgtgctgcacgtggctctgcggaaccggtcaaacacacccatcctggtagacggcaaggatgtgatgccagaggtcaacaaggttctggacaagatgaagtctttctgccagcgtgtccggagcggtgactggaaggggtacacaggcaagaccatcacggacgtcatcaacattggcattggcggctccgacctgggacccctcatggtgactgaagcccttaagccatactcttcaggaggtccccgcgtctggtatgtctccaaccatgggcatatcctggtggattactccaagaacctggtgacggaggacgtgatgcggatgctggtggacttggccaagtccaggggcgtgtaggccgccgggagcggatttcactggtgggtgatctatcgtgtagagtcacttatga

SEQ ID NO: 75984 - DNA, 743 bp, Homo sapiens
gggccgggccgggcgcctgcgccataaaggccgccgcgcgcccacgcgcctcgcttgctgcgcgctgccggcgctccttcctcctcggctcgcgtctcactcagtgtaccttctagtcccgccatggccgctctcacccgggacccccagttccagaagctgcagcaatggtaccgcgagcaccgctccgagctgaacctgcgccgcctcttcgatgccaacaaggaccgcttcaaccacttcagcttgaccctcaacaccaaccatgggcatatcctggtggattactccaagaacctggtgacggaggacgtgatgcggatgctggtggacttggccaagtccaggggcgtggaggccgcccgggagcggatgttcaatggtgagaagatcaactacaccgagggtcgagccgtgctgcacgtggctctgcggaaccggtcaaacacacccatcctggtagacggcaaggatgtgatgccagaggtcaacaaggttctggacaccacccagagcaccctctggttgtgggcttggaccacgagcccttagcagggaaggctggtctcccccagcctaacccccagcccctccatgtctatgctccctctgtgttagaattggctgaagtgtttttgtgcagctgacttttctgacccatgttcacgttgttcacatcccatgtagaaaaataaagatgccacggaggaggttgtaggctcagcctctgattttttttttcc

SEQ ID NO: 75985 - DNA, 532 bp, Homo sapiens
gtcactggcgtgctggtcatggactgatctggtgtccagcttggggtgggcagatcctgggccctgccctcgactcacaggctgctccagccctgccccatccctggctctggggaaggtgaggctcagctcacggagcacagctccctgcctcccggagctcctgttcccatcccgctagcaaatgcttctttgcatttctctccctttgtttttttttttgtagaccaaagtgaaggagtttggaattgaccctcaaaacatgttcgagttctgggatgtaagtacaagcacttctgcactgggtgaattaagtgtcctttgccaagtcatggctgttgagaggcccatgaggtcaggtcagtgtttattgagtacctgctgcatacctagcttggggaaaggtagagaggccctcagagaggcttggagggcaagagcaacccaggcaggatgagggctccacttccacctgagggcgggctgagcttgcagggccacatgacactcccttgggtgcctgcctgcaaca

SEQ ID NO: 75986 - DNA, 947 bp, Homo sapiens
  misc_feature (782)..(782): n is a, c, g, or t
  misc_feature (801)..(801): n is a, c, g, or t
  misc_feature (810)..(810): n is a, c, g, or t
  misc_feature (815)..(815): n is a, c, g, or t
  misc_feature (824)..(824): n is a, c, g, or t
agcggccgggtgagtcggacgagggcccgccatggccgctctcacccgggacccccagttccagaagctgcagcaatggtaccgcgagcaccgctccgagctgaacctgcgccgcctcttcgatgccaacaaggaccgcttcaaccacttcagcttgaccctcaacaccaaccatgggcatatcctggtggattactccaagaacctggtgacggaggacgtgatgcggatgctggtggacttggccaagtccaggggcgtggaggccgcccgggagcggatgttcaatggtgagaagatcaactacaccgagggtcgagccgtgctgcacgtggctctgcggaaccggtcaaacacacccatcctggtagacggcaaggatgtgatgccagaggtcaacaaggttctggacaagatgaagtctttctgccagcgtgtccggagcggtgactggaaggggtacacaggcaagaccatcacggacgtcatcaacattggcattggcggctccgacctgggacccctcatggtgactgaagcccttaagccatactcttcaggaggtccccgcgtctggtatgtctccaacattgatggaactcacattgccaaaaccctggcccagctgaaccccgagtcctccctgttcatcattgcctccaagacctttactacccaggagaccatcacgaatgcagagacggcgaaggagtggtttctccaggcggccaaggatccttctgcaggggaagcacttgtgcctgttataacacaccaaagtnagagttgggaatgacctcnaaaatgtcnagtcnggatggggnggaccaaccggggcgcacgactccttgcgcctggttgaactccagcacggtcgggccatggggccttcccacctgaaaacctggggccggtcgcaccggggtacacccgcaaaacctgacagg

SEQ ID NO: 75987 - DNA, 2121 bp, Homo sapiens
tctgatctctagaggatccttaagcgcacgatggccgtcacgcgcctcgcttgctgcgcgctgccggcgctccttcctcctcggctcgcgtctcactcagtgtaccttctagtcccgccatggccgctctcacccgggacccccagttccagaagctgcagcaatggtaccgcgagcaccgctccgagctgaacctgcgccgcctcttcgatgccaacaaggaccgcttcaaccacttcagcttgaccctcaacaccaaccatgggcatatcctggtggattactccaagaacctggtgacggaggacgtgatgcggatgctggtggacttggccaagtccaggggcgtggaggccgcccgggagcggatgttcaatggtgagaagatcaactacaccgagggtcgagccgtgctgcacgtggctctgcggaaccggtcaaacacacccatcctggtagacggcaaggatgtgatgccagaggtcaacaaggttctggacaagatgaagtctttctgccagcgtgtccggagcggtgactggaaggggtacacaggcaagaccatcacggacgtcatcaacattggcattggcggctccgacctgggacccctcatggtgactgaagcccttaagccatactcttcaggaggtccccgcgtctggtatgtctccaacattgatggaactcacattgccaaaaccctggcccagctgaaccccgagtcctccctgttcatcattgcctccaagacctttactacccaggagaccatcacgaatgcagagacggcgaaggagtggtttctccaggcggccaaggatccttctgcagtggcgaagcactttgttgccctgtctactaacacaaccaaagtgaaggagtttggaattgaccctcaaaacatgttcgagttctgggattgggtgggaggacgctactcgctgtggtcggccatcggactctccattgccctgcacgtgggttttgacaacttcgagcagctgctctcgggggctcactggatggaccagcacttccgcacgacgcccctggagaagaacgcccccgtcttgctggccctgctgggtatctggtacatcaactgctttgggtgtgagacacacgccatgctgccctatgaccagtacctgcaccgctttgctgcgtacttccagcagggcgacatggagtccaatgggaaatacatcaccaaatctggaacccgtgtggaccaccagacaggccccattgtgtggggggagccagggaccaatggccagcatgctttttaccagctcatccaccaaggcaccaagatgataccctgtgacttcctcatcccggtccagacccagcaccccatacggaagggtctgcatcacaagatcctcctggccaacttcttggcccagacagaggccctgatgaggggaaaatcgacggaggaggcccgaaaggagctccaggctgcgggcaagagtccagaggaccttgagaggctgctgccacataaggtctttgaaggaaatcgcccaaccaactctattgtgttcaccaagctcacaccattcatgcttggagccttggtcgccatgtatgagcacaagatcttcgttcagggcatcatctgggacatcaacagctttgaccagtggggagtggagctgggaaagcagctggctaagaaaatagagcctgagcttgatggcagtgctcaagtgacctctcacgacgcttctaccaatgggctcatcaacttcatcaagcagcagcgcgaggccagagtccaataaactcgtgctcatctgcagcctcctctgtgactcccctttctcttctcgtccctcctccccggagccggcactgcatgttcctggacaccacccagagcaccctctggttgtgggcttggaccacgagcccttagcagggaaggctggtctcccccagcctaacccccagcccctccatgtctatgctccctctgtgttagaattggctgaagtgtttttgtgcagctgacttttctgacccatgttcacgttgttcacatcccatgtagaaaaataaagatgccacggaggaggttgtaggctcagcctctgattttttttttcc

SEQ ID NO: 75988 - DNA, 2066 bp, Homo sapiens
  misc_feature (17)..(17): n is a, c, g, or t
taggctaggtacaggcngggtgtcctcggctcgcgtctcactcagtgtaccttctagtcccgccatggccgctctcacccgggacccccagttccagaagctgcagcaatggtaccgcgagcaccgctccgagctgaacctgcgccgcctcttcgatgccaacaaggaccgcttcaaccacttcagcttgaccctcaacaccaaccatgggcatatcctggtggattactccaagaacctggtgacggaggacgtgatgcggatgctggtggacttggccaagtccaggggcgtggaggccgcccgggagcggatgttcaatggtgagaagatcaactacaccgagggtcgagccgtgctgcacgtggctctgcggaaccggtcaaacacacccatcctggtagacggcaaggatgtgatgccagaggtcaacaaggttctggacaagatgaagtctttctgccagcgtgtccggagcggtgactggaaggggtacacaggcaagaccatcacggacgtcatcaacattggcattggcggctccgacctgggacccctcatggtgactgaagcccttaagccatactcttcaggaggtccccgcgtctggtatgtctccaacattgatggaactcacattgccaaaaccctggcccagctgaaccccgagtcctccctgttcatcattgcctccaagacctttactacccaggagaccatcacgaatgcagagacggcgaaggagtggtttctccaggcggccaaggatccttctgcagtggcgaagcactttgttgccctgtctactaacacaaccaaagtgaaggagtttggaattgaccctcaaaacatgttcgagttctgggattgggtgggaggacgctactcgctgtggtcggccatcggactctccattgccctgcacgtgggttttgacaacttcgagcagctgctctcgggggctcactggatggaccagcacttccgcacgacgcccctggagaagaacgcccccgtcttgctggccctgctgggtatctggtacatcaactgctttgggtgtgagacacacgccatgctgccctatgaccagtacctgcaccgctttgctgcgtacttccagcagggcgacatggagtccaatgggaaatacatcaccaaatctggaacccgtgtggaccaccagacaggccccattgtgtggggggagccagggaccaatggccagcatgctttttaccagctcatccaccaaggcaccaagatgataccctgtgacttcctcatcccggtccagacccagcaccccatacggaagggtctgcatcacaagatcctcctggccaacttcttggcccagacagaggccctgatgaggggaaaatcgacggaggaggcccgaaaggagctccaggctgcgggcaagagtccagaggaccttgagaggctgctgccacataaggtctttgaaggaaatcgcccaaccaactctattgtgttcaccaagctcacaccattcatgcttggagccttggtcgccatgtatgagcacaagatcttcgttcagggcatcatctgggacatcaacagctttgaccagtggggagtggagctgggaaagcagctggctaagaaaatagagcctgagcttgatggcagtgctcaagtgacctctcacgacgcttctaccaatgggctcatcaacttcatcaagcagcagcgcgaggccagagtccaataaactcgtgctcatctgcagcctcctctgtgactcccctttctcttctcgtccctcctccccggagccggcactgcatgttcctggacaccacccagagcaccctctggttgtgggcttggaccacgagcccttagcagggaaggctggtctcccccagcctaacccccagcccctccatgtctatgctccctctgtgttagaattggctgaagtgtttttgtgcagctgacttttctgacccatgttcacgttgttcacatcccatgtagaaaaataaagatgccacggaggaggttgtaggctcagcctctgattttttttttcc

SEQ ID NO: 75989 - DNA, 2045 bp, Homo sapiens
taggctagtagaggctgggtgttaatcgacgaggtggcccgccatggccgctctcacccgggacccccagttccagaagctgcagcaatggtaccgcgagcaccgctccgagctgaacctgcgccgcctcttcgatgccaacaaggaccgcttcaaccacttcagcttgaccctcaacaccaaccatgggcatatcctggtggattactccaagaacctggtgacggaggacgtgatgcggatgctggtggacttggccaagtccaggggcgtggaggccgcccgggagcggatgttcaatggtgagaagatcaactacaccgagggtcgagccgtgctgcacgtggctctgcggaaccggtcaaacacacccatcctggtagacggcaaggatgtgatgccagaggtcaacaaggttctggacaagatgaagtctttctgccagcgtgtccggagcggtgactggaaggggtacacaggcaagaccatcacggacgtcatcaacattggcattggcggctccgacctgggacccctcatggtgactgaagcccttaagccatactcttcaggaggtccccgcgtctggtatgtctccaacattgatggaactcacattgccaaaaccctggcccagctgaaccccgagtcctccctgttcatcattgcctccaagacctttactacccaggagaccatcacgaatgcagagacggcgaaggagtggtttctccaggcggccaaggatccttctgcagtggcgaagcactttgttgccctgtctactaacacaaccaaagtgaaggagtttggaattgaccctcaaaacatgttcgagttctgggattgggtgggaggacgctactcgctgtggtcggccatcggactctccattgccctgcacgtgggttttgacaacttcgagcagctgctctcgggggctcactggatggaccagcacttccgcacgacgcccctggagaagaacgcccccgtcttgctggccctgctgggtatctggtacatcaactgctttgggtgtgagacacacgccatgctgccctatgaccagtacctgcaccgctttgctgcgtacttccagcagggcgacatggagtccaatgggaaatacatcaccaaatctggaacccgtgtggaccaccagacaggccccattgtgtggggggagccagggaccaatggccagcatgctttttaccagctcatccaccaaggcaccaagatgataccctgtgacttcctcatcccggtccagacccagcaccccatacggaagggtctgcatcacaagatcctcctggccaacttcttggcccagacagaggccctgatgaggggaaaatcgacggaggaggcccgaaaggagctccaggctgcgggcaagagtccagaggaccttgagaggctgctgccacataaggtctttgaaggaaatcgcccaaccaactctattgtgttcaccaagctcacaccattcatgcttggagccttggtcgccatgtatgagcacaagatcttcgttcagggcatcatctgggacatcaacagctttgaccagtggggagtggagctgggaaagcagctggctaagaaaatagagcctgagcttgatggcagtgctcaagtgacctctcacgacgcttctaccaatgggctcatcaacttcatcaagcagcagcgcgaggccagagtccaataaactcgtgctcatctgcagcctcctctgtgactcccctttctcttctcgtccctcctccccggagccggcactgcatgttcctggacaccacccagagcaccctctggttgtgggcttggaccacgagcccttagcagggaaggctggtctcccccagcctaacccccagcccctccatgtctatgctccctctgtgttagaattggctgaagtgtttttgtgcagctgacttttctgacccatgttcacgttgttcacatcccatgtagaaaaataaagatgccacggaggaggttgtaggctcagcctctgattttttttttcc

SEQ ID NO: 75990 - DNA, 1178 bp, Homo sapiens
gggccgggccgggcgcctgcgccataaaggccgccgcgcgcccacgcgcctcgcttgctgcgcgctgccggcgctccttcctcctcggctcgcgtctcactcagtgtaccttctagtcccgccatggccgctctcacccgggacccccagttccagaagctgcagcaatggtaccgcgagcaccgctccgagctgaacctgcgccgcctcttcgatgccaacaaggaccgcttcaaccacttcagcttgaccctcaacaccaaccatgggcatatcctggtggattactccaagaacctggtgacggaggacgtgatgcggatgctggtggacttggccaagtccaggggcgtggaggccgcccgggagcggatgttcaatggtgagaagatcaactacaccgagggtcgagccgtgctgcacgtggctctgcggaaccggtcaaacacacccatcctggtagacggcaaggatgtgatgccagaggtcaacaaggttctggacaagatgaagtctttctgccagcgtgtccggagcggtgactggaaggggtacacaggcaagaccatcacggacgtcatcaacattggcattggcggctccgacctgggacccctcatggtgactgaagcccttaagccatactcttcaggaggtccccgcgtctggtatgtctccaacattgatggaactcacattgccaaaaccctggcccagctgaaccccgagtcctccctgttcatcattgcctccaagacctttactacccaggagaccatcacgaatgcagagacggcgaaggagtggtttctccaggcggccaaggatccttctgcagtggcgaagcactttgttgccctgtctactaacacagtaagtgcccccgtggtcccctgtactgccttcctgggagtgcccagcatgtccaggtcatggcctctcagagacgcggttcgtaggtctggtggatcttggcttggctgatggtatggaaggtttggttgcctgtgggctgcaagccttccttgccttttccgcatttacccattcaacctctgcagctttgaggagggaggcttggagtcagtgggatcacgataaccccttcttccgtctcccaggcctgactgatacacagaacccttcatacacatgaccttcctaggcctttgtgccca

SEQ ID NO: 75991 - DNA, 1396 bp, Homo sapiens
  misc_feature (1282)..(1282): n is a, c, g, or t
  misc_feature (1295)..(1295): n is a, c, g, or t
  misc_feature (1359)..(1359): n is a, c, g, or t
cctgtgcaccccttccagtcaccgctccggacacgctggcagaaagacttcatcttgtccagaaccttgttgacctctggcatcacttgaccctcaacaccaaccatgggcatatcctggtggattactccaagaacctggtgacggaggacgtgatgcggatgctggtggacttggccaagtccaggggcgtggaggccgcccgggagcggatgttcaatggtgagaagatcaactacaccgagggtcgagccgtgctgcacgtggctctgcggaaccggtcaaacacacccatcctggtagacggcaaggatgtgatgccagaggtcaacaaggttctggacaagatgaagtctttctgccagcgtgtccggagcggtgactggaaggggtacacaggcaagaccatcacggacgtcatcaacattggcattggcggctccgacctgggacccctcatggtgactgaagcccttaagccatactcttcaggaggtccccgcgtctggtatgtctccaacattgatggaactcacattgccaaaaccctggcccagctgaaccccgagtcctccctgttcatcattgcctccaagacctttactacccaggagaccatcacgaatgcagagacggcgaaggagtggtttctccaggcggccaaggatccttctgcagtggcgaagcactttgttgccctgtctactaacacaaccaaagtgaaggagtttggaattgaccctcaaaacatgttcgagttctgggattgggtgggaggacgctactcgctgtggtcggccatcggactctccattgccctgcacgtgggttttgacaacttcgagcagctgctctcgggggctcactggatggaccagcacttccgcacgacgcccctggagaagaacgcccccgtcttgctggccctgctgggtatctggtacatcaactgctttgggtgtgagacacacgccatgctgccctatgaccagtacctgcaccgctttgctgcgtacttccagcagggcgacatggagtccaatgggaaatacatcaccaaatctggaacccgtgtggaccaccagacaggccccattgtgtggggggagccagggaccaatggccagcatgctttttaccagctcatccaccaaggcaccaagatgataccctgtgacttcctcatcccggtccagacccagcacccatacggaaggtctgctcacaagatcctcctggcaattcttggccagaaagagcctgatgaggggaaatcgacggnggggccgaagagntccaggtggggacaatcacagacttggaggtgtgcctagttgggaatcccacacttgtgttccngccctttgtggctgtccttttgacaattgggacggac

SEQ ID NO: 75992 - DNA, 1198 bp, Homo sapiens
  misc_feature (23)..(23): n is a, c, g, or t
  misc_feature (26)..(26): n is a, c, g, or t
  misc_feature (31)..(31): n is a, c, g, or t
  misc_feature (1084)..(1084): n is a, c, g, or t
  misc_feature (1097)..(1097): n is a, c, g, or t
  misc_feature (1161)..(1161): n is a, c, g, or t
attagggcatggggggaacatcnggnagatncatgatattatcaaggtctaagctttcattagggatgctggcttcccaggtgcttagaacattaataaaggtagacggcaaggatgtgatgccagaggtcaacaaggttctggacaagatgaagtctttctgccagcgtgtccggagcggtgactggaaggggtacacaggcaagaccatcacggacgtcatcaacattggcattggcggctccgacctgggacccctcatggtgactgaagcccttaagccatactcttcaggaggtccccgcgtctggtatgtctccaacattgatggaactcacattgccaaaaccctggcccagctgaaccccgagtcctccctgttcatcattgcctccaagacctttactacccaggagaccatcacgaatgcagagacggcgaaggagtggtttctccaggcggccaaggatccttctgcagtggcgaagcactttgttgccctgtctactaacacaaccaaagtgaaggagtttggaattgaccctcaaaacatgttcgagttctgggattgggtgggaggacgctactcgctgtggtcggccatcggactctccattgccctgcacgtgggttttgacaacttcgagcagctgctctcgggggctcactggatggaccagcacttccgcacgacgcccctggagaagaacgcccccgtcttgctggccctgctgggtatctggtacatcaactgctttgggtgtgagacacacgccatgctgccctatgaccagtacctgcaccgctttgctgcgtacttccagcagggcgacatggagtccaatgggaaatacatcaccaaatctggaacccgtgtggaccaccagacaggccccattgtgtggggggagccagggaccaatggccagcatgctttttaccagctcatccaccaaggcaccaagatgataccctgtgacttcctcatcccggtccagacccagcacccatacggaaggtctgctcacaagatcctcctggcaattcttggccagaaagagcctgatgaggggaaatcgacggnggggccgaagagntccaggtggggacaatcacagacttggaggtgtgcctagttgggaatcccacacttgtgttccngccctttgtggctgtccttttgacaattgggacggac

SEQ ID NO: 75993 - DNA, 824 bp, Homo sapiens
  misc_feature (800)..(800): n is a, c, g, or t
  misc_feature (820)..(820): n is a, c, g, or t
  misc_feature (824)..(824): n is a, c, g, or t
gggccgggccgggcgcctgcgccataaaggccgccgcgcgcccacgcgcctcgcttgctgcgcgctgccggcgctccttcctcctcggctcgcgtctcactcagtgtaccttctagtcccgccatggccgctctcacccgggacccccagttccagaagctgcagcaatggtaccgcgagcaccgctccgagctgaacctgcgccgcctcttcgatgccaacaaggaccgcttcaaccacttcagcttgaccctcaacaccaaccatgggcatatcctggtggattactccaagaacctggtgacggaggacgtgatgcggatgctggtggacttggccaagtccaggggcgtggaggccgcccgggagcggatgttcaatggtgagaagatcaactacaccgagggtcgagccgtgctgcacgtggctctgcggaaccggtcaaacacacccatcctggtagacggcaaggatgtgatgccagaggtcaacaaggttctggacaagatgaagtctttctgccagcgtgtccggagcggtgactggaaggggtacacaggcaagaccatcacggacgtcatcaacattggcattggcggctccgacctgggacccctcatggtgactgaagcccttaagccatactcttcaggaggtccccgcgtctggtatgtctccaacattgatggaactcacattgccaaaaccctggcccagctgaaccccgagtcctccctgttcatcattgcctccaagcttactaccaggagacatcacaatgccaaacgcaaagatggttntcagcggcaagatcttttgngggn

SEQ ID NO: 75994 - DNA, 996 bp, Homo sapiens
  misc_feature (882)..(882): n is a, c, g, or t
  misc_feature (895)..(895): n is a, c, g, or t
  misc_feature (959)..(959): n is a, c, g, or t
gggctggctgcgcgcggccggcgctcgttcctcctcggttccgaccgtgggacccctcatggtgactgaagcccttaagccatactcttcaggaggtccccgcgtctggtatgtctccaacattgatggaactcacattgccaaaaccctggcccagctgaaccccgagtcctccctgttcatcattgcctccaagacctttactacccaggagaccatcacgaatgcagagacggcgaaggagtggtttctccaggcggccaaggatccttctgcagtggcgaagcactttgttgccctgtctactaacacaaccaaagtgaaggagtttggaattgaccctcaaaacatgttcgagttctgggattgggtgggaggacgctactcgctgtggtcggccatcggactctccattgccctgcacgtgggttttgacaacttcgagcagctgctctcgggggctcactggatggaccagcacttccgcacgacgcccctggagaagaacgcccccgtcttgctggccctgctgggtatctggtacatcaactgctttgggtgtgagacacacgccatgctgccctatgaccagtacctgcaccgctttgctgcgtacttccagcagggcgacatggagtccaatgggaaatacatcaccaaatctggaacccgtgtggaccaccagacaggccccattgtgtggggggagccagggaccaatggccagcatgctttttaccagctcatccaccaaggcaccaagatgataccctgtgacttcctcatcccggtccagacccagcacccatacggaaggtctgctcacaagatcctcctggcaattcttggccagaaagagcctgatgaggggaaatcgacggnggggccgaagagntccaggtggggacaatcacagacttggaggtgtgcctagttgggaatcccacacttgtgttccngccctttgtggctgtccttttgacaattgggacggac

SEQ ID NO: 75995 - DNA, 1965 bp, Homo sapiens
ggacgcgtgggtcgacccacgcgatcgattatcatttatttattattattattttttagtagagatgggcttttgccatgttggccatgctggtcttgaactcctgacctcaggtgatgcacccccccttggcctcccaaagtgctgggattacagtcttgagccgccatgcccagccatgcttgctcctttctgatcccagagccatgccctgataatagaggggttttgtttgtttttatttatgttctatttactcacatgaatgtacataaaatatgaagaattccatctgaattctgagataccttccagcctgggccgaagagagcctcaggttgactgcagcccctcaggggagaagctgcggcctttgacctgcaggcttagggttggggggtgtgtttaccgtcccccctcctctggttttaaagagctggaatctcaggaggttatgtggcgtcactgtcactgacctgcaaatactgctccatgggacagctgggcattgccttggcctctactgctgaaccctggctcaaggcctgcacccacccctaagctcgggcgcccactgctgttctctttggttgcagacctttactacccaggagaccatcacgaatgcagagacggcgaaggagtggtttctccaggcggccaaggatccttctgcagtggcgaagcactttgttgccctgtctactaacacaaccaaagtgaaggagtttggaattgaccctcaaaacatgttcgagttctgggattgggtgggaggacgctactcgctgtggtcggccatcggactctccattgccctgcacgtgggttttgacaacttcgagcagctgctctcgggggctcactggatggaccagcacttccgcacgacgcccctggagaagaacgcccccgtcttgctggccctgctgggtatctggtacatcaactgctttgggtgtgagacacacgccatgctgccctatgaccagtacctgcaccgctttgctgcgtacttccagcagggcgacatggagtccaatgggaaatacatcaccaaatctggaacccgtgtggaccaccagacaggccccattgtgtggggggagccagggaccaatggccagcatgctttttaccagctcatccaccaaggcaccaagatgataccctgtgacttcctcatcccggtccagacccagcaccccatacggaagggtctgcatcacaagatcctcctggccaacttcttggcccagacagaggccctgatgaggggaaaatcgacggaggaggcccgaaaggagctccaggctgcgggcaagagtccagaggaccttgagaggctgctgccacataaggtctttgaaggaaatcgcccaaccaactctattgtgttcaccaagctcacaccattcatgcttggagccttggtcgccatgtatgagcacaagatcttcgttcagggcatcatctgggacatcaacagctttgaccagtggggagtggagctgggaaagcagctggctaagaaaatagagcctgagcttgatggcagtgctcaagtgacctctcacgacgcttctaccaatgggctcatcaacttcatcaagcagcagcgcgaggccagagtccaataaactcgtgctcatctgcagcctcctctgtgactcccctttctcttctcgtccctcctccccggagccggcactgcatgttcctggacaccacccagagcaccctctggttgtgggcttggaccacgagcccttagcagggaaggctggtctcccccagcctaacccccagcccctccatgtctatgctccctctgtgttagaattggctgaagtgtttttgtgcagctgacttttctgacccatgttcacgttgttcacatcccatgtagaaaaataaagatgccacggaggaggttgtaggctcagcctctgattttttttttcc

SEQ ID NO: 75996 - DNA, 1264 bp, Homo sapiens
tctgatctctagaggatccttaagcgcacgatggccgtcacgcgcctcgcttgctgcgcgctgccggcgctccttcctcctcggctcgcgtctcactcagtgtaccttctagtcccgccatggccgctctcacccgggacccccagttccagaagctgcagcaatggtaccgcgagcaccgctccgagctgaacctgcgccgcctcttcgatgccaacaaggaccgcttcaaccacttcagcttgaccctcaacaccaaccatgggcatatcctggtggattactccaagaacctggtgacggaggacgtgatgcggatgctggtggacttgggagtccaatgggaaatacatcaccaaatctggaacccgtgtggaccaccagacaggccccattgtgtggggggagccagggaccaatggccagcatgctttttaccagctcatccaccaaggcaccaagatgataccctgtgacttcctcatcccggtccagacccagcaccccatacggaagggtctgcatcacaagatcctcctggccaacttcttggcccagacagaggccctgatgaggggaaaatcgacggaggaggcccgaaaggagctccaggctgcgggcaagagtccagaggaccttgagaggctgctgccacataaggtctttgaaggaaatcgcccaaccaactctattgtgttcaccaagctcacaccattcatgcttggagccttggtcgccatgtatgagcacaagatcttcgttcagggcatcatctgggacatcaacagctttgaccagtggggagtggagctgggaaagcagctggctaagaaaatagagcctgagcttgatggcagtgctcaagtgacctctcacgacgcttctaccaatgggctcatcaacttcatcaagcagcagcgcgaggccagagtccaataaactcgtgctcatctgcagcctcctctgtgactcccctttctcttctcgtccctcctccccggagccggcactgcatgttcctggacaccacccagagcaccctctggttgtgggcttggaccacgagcccttagcagggaaggctggtctcccccagcctaacccccagcccctccatgtctatgctccctctgtgttagaattggctgaagtgtttttgtgcagctgacttttctgacccatgttcacgttgttcacatcccatgtagaaaaataaagatgccacggaggaggttgtaggctcagcctctgattttttttttcc

SEQ ID NO: 75997 - DNA, 2743 bp, Homo sapiens
  misc_feature (38)..(39): n is a, c, g, or t
  misc_feature (58)..(58): n is a, c, g, or t
tcaaaaaatcacagtgctgcctaggaggggaaatgccnnagccagtcacccaacacangtaggctcagcctccagcagctttgaagggggcagaaagggaggatgaaaggcgggaaggctgggagaagctggggtcagggagatctgttagctcagcatgacccaggaagaggcaggagaggaaggggtgaattcctttccttctttcactccgttgagcaaagtgagtctcctctacacagtaattatgggtcaacaggcaagagcaagttcttctgcttgaggcagaaaaaataatgcctcagtgaactgcagcttagttcacaaaactttgtgtgaataaatcagatattcccattttgtaaaaagatataaacactcaggaaatacctactcaaatatttgttctaagttctctcgaaatgtttgaggtttccagaatgtctgttacatttcttatatgacatttagaagcctcactgattatccttgacttatatatatttaaaatgtggtttagtttgggcatcttcccagaagccctaattttgagagagcactgttacaatagatttgtcttcctggttatttttcctatggattctattttaaagttacaattttaaaattattatctatgaatttcttcaaaaattcctacaaaaaactatgaaaatgtgttttttagtaagagaggcacccaaatgcctctatctgttaaaccttggactcctcacccctaggataacaccatgaactgcagacaaatgtatctgaggcatttgtaagaagtggctcattccacagctataattctcagctaaagtcctggaagaagttggaaatggagcatttatcaagagcaaaaggaagacttggctggaacaaaccgtgccctatttccctggaatggagacttcttcagaggtagctgggcagaggctgagctagcatgacacaccaagttgcccactgagtccacactgggttctagacagagaggatgtggcgtgggatgacctcagggtgttggagaaaggccatgaagaaatccacttaaataaaatagggacccaaactttatgctggacaatgaaaatgtccagtgttacattgtggggactttatcccaaaaactgaaacaaaaactctgaaaataagttatctgatattaaacataattttggacgtagttctaaccaagctaccgttcttagaaaataagcaggaattaagtgttgattatttctcatctgggtgatttttctggcaaaaatccacattagtacaattaaatagcctctcttttatacagagagcttatcagcaagaccataaagaaagtcggttttgcagagacaggcaggggctttatttcctgaagggccgctgataacccttgataagcatatcattctctctgaaggcacatcctgtttgccatcttcctgatcattttctcctcttcagtagggaatgagttcgtctctactaaatcatcattgtcagtgatgtaccccccgccaagaggggcggaggttcccaacctcccagcccatgactttatgaaattccacatctgtcacaagattgcacatcttactttgcaaggcatttgcactggattatcgggtaggatcctgactcagagagagactgaactacagggaactggatgcctctgcggaggttgatgagaggtagggaagacggatgttggggataagggagagggggactcgttgttaaagatggccagttcatagggagtatccttgtttaggacaactttgaccgaacatactcaaccttctgacttttcagaatcagatagctggggttctctgcatatcatctggatttttgaacccaaccctttggcctcagtttcctggatattttggataaaagcacacccccattttgcctgagttatcttgcaaacagccccgatttttggcttcatttattgtctgggttttgataccagatgaacatttttggagcatccactgtgtgcaaaactccaaggagccactggggcttctgcagagcccctgccgcatgcttttctccaagatgccatctggagaaccccatcctgcacagtttcaagcagcacttctgggacgcttggttgtcctgcctctctggtgaccccagctcttttcacatcactttgcttgccatgcacaactgcaattatttgtgtgccagtctccctccacttcaccctcacgggcagccccagggcatgggctcaccaccctccttgggtctctacttgtgcttttctccatcactgggtaacgctgagcgaatatgtctccctgactcagcttctcccagccttcccacttctcatcctctccttctgcccacctcaaagctgctggaggctgagcctatgtgtgttgggtgactggctaaggcatttcccctcctaggcagcactgtgattttttttaaaaaatcatccttattgaagtggaggtgtggacccctttcccgactcagaggactgtggtgaggacaaggaagatggcatcaaaccacttgcattttatttggtatttctcaaagccccttaacatcaactatctcaacattattccccccagtcaccatgtgtggtaggcatgaaagatactgtccctaaagtgggttgataaagtagtagttagagtgactatgctcagagaaggtgtgatttgcccaaaattatacaacttgtgagtggtga

SEQ ID NO: 75998 - DNA, 879 bp, Homo sapiens
cagctgtatcccatagagttgccacccaggcctcagccaggacctttcaggccagacaggagcacctgaccaaaggcttcacagccgccctcaccgcccggccttctacggtgtccagagacagttagccaggcctgggctgggcacactccaccttccctagtcaccagctggtttcccagaggagaaggctgagacccgagaagggagccagcctgtcccatgcctgcctggggagccctgttcctgctctgggccacagcagaggccaccaaggactgccccagcccatgtacctgccgcgccctggaaaccatggggctgtgggtggactgcaggggccacggactcacggccctgcctgccctgccggcccgcacccgccaccttctgctggccaacaacagccttcagtccgtgcccccgggagcctttgaccacctgccccagctgcagaccctcgatgtgacgcagaacccctggcactgtgactgcagcctcacctatctgcgcctctggctggaggaccgcacgcccgaggccctgctgcaggtccgctgtgccagccccagcctcgctgcccatggcccgctgggccggctgacaggctaccagctgggcagctgtggctggcagctgcaggcgtcctgggtgcgcccgggggtcttgtgggacgtggcgctggtcgccgtggccgcgctgggcctggctcttctggctggcctgctgtgtgccaccacagaggccctggattgagccaggcccccagaacccctggctccaggccagggggccagtccctgaggcaggtccccagactccaccaagcctggtcagcccaaaccaccagaagcccagaataaactggcagctcagctg

SEQ ID NO: 75999 - DNA, 438 bp, Homo sapiens
gtaattccatataattttaaaagtgttttttttctaatttctgtgaaaaatgttactggtattttgatagagattacactgaatcagtagactagtccgggtagtatagatgtttaaataatattaataaattcaatccattaacatgaatttttttttacttgtttggtgctctctttatgtaatcagttagttaaagtttttattgtagagctcattcacttatttggctaagtacatttctaggtattggattttatttgtagccatagtaaatagtatttttaatttttttccagatggtttatgtttgacatatagaaattcgaccgattttatgggttttcctttgtatctagcaactttagtcaattcatgtgttctaacttttttggtggagactttaggttttctcaaatataagattattttatctgc

SEQ ID NO: 76000 - DNA, 3426 bp, Homo sapiens
gcagccgagcagcctggcaacggcggtggcgcccggagcccgagagtttccaggatggcttctgcatcaacttctaaatataattcacactccttggagaatgagtctattaagaggacgtctcgagatggagtcaatcgagatctcactgaggctgttcctcgacttccaggagaaacactaatcactgacaaagaagttatttacatatgtcctttcaatggccccattaagggaagagtttacatcacaaattatcgtctttatttaagaagtttggaaacggattcttctctaatacttgatgttcctctgggtgtgatctcgagaattgaaaaaatgggaggcgcgacaagtagaggagaaaattcctatggtctagatattacttgtaaagacatgagaaacctgaggttcgctttgaaacaggaaggccacagcagaagagatatgtttgagatcctcacgagatacgcgtttcccctggctcacagtctgccattatttgcatttttaaatgaagaaaagtttaacgtggatggatggacagtttacaatccagtggaagaatacaggaggcagggcttgcccaatcaccattggagaataacttttattaataagtgctatgagctctgtgacacttaccctgctcttttggtggttccgtatcgtgcctcagatgatgacctccggagagttgcaacttttaggtcccgaaatcgaattccagtgctgtcatggattcatccagaaaataagacggtcattgtgcgttgcagtcagcctcttgtcggtatgagtgggaaacgaaataaagatgatgagaaatatctcgatgttatcagggagactaataaacaaatttctaaactcaccatttatgatgcaagacccagcgtaaatgcagtggccaacaaggcaacaggaggaggatatgaaagtgatgatgcatatcataacgccgaacttttcttcttagacattcataatattcatgttatgcgggaatctttaaaaaaagtgaaggacattgtttatcctaatgtagaagaatctcattggttgtccagtttggagtctactcattggttagaacatatcaagctcgttttgacaggagccattcaagtagcagacaaagtttcttcagggaagagttcagtgcttgtgcattgcagtgacggatgggacaggactgctcagctgacatccttggccatgctgatgttggatagcttctataggagcattgaagggttcgaaatactggtacaaaaagaatggataagttttggacataaatttgcatctcgaataggtcatggtgataaaaaccacaccgatgctgaccgttctcctatttttctccagtttattgattgtgtgtggcaaatgtcaaaacagttccctacagcttttgaattcaatgaacaatttttgattataattttggatcatctgtatagttgccgatttggtactttcttattcaactgtgaatctgctcgagaaagacagaaggttacagaaaggactgtttctttatggtcactgataaacagtaataaagaaaaattcaaaaaccccttctatactaaagaaatcaatcgagttttatatccagttgccagtatgcgtcacttggaactctgggtgaattactacattagatggaaccccaggatcaagcaacaacagccgaatccagtggagcagcgttacatggagctcttagccttacgcgacgaatacataaagcggcttgaggaactgcagctcgccaactctgccaagctttctgatcccccaacttcaccttccagtccttcgcaaatgatgccccatgtgcaaactcacttctgaggggggaccctggcaccgcattagagctcgaaataaaggcgatagctgactttcatttggggcatttgtaaaaagtagattaaaatatttgcctccatgtagaacttgaactaacataatcttaaactcttgaatatgtgccttctagaatacatattacaagaaaactacagggtccacacggcaatcagaagaaaggagctgagatgaggttttggaaaaccctgacacctttaaaaagcagtttttgaaagacaaaatttagatttaatttacgtcttgagaaatactatatatacaatatatattttgtgggcttaattgaaacaacattattttaaaatcaaaggggatatatgtttgtggaatggattttcctgaagctgcttaacagttgctttggattctctaagatgaatccaaatgtgaaagatgcatgttactgccaaaaccaaattgagctcagcttcctaggcattacccaaaagcaaggtgtttaagtaattgccagcttttataccatcatgagtggtgacttaaggagaaatagctgtatagatgagtttttcattatttggaaatttaggggtagaaaatgttttcccctaattttccagagaagcctatttttatatttttaaaaaactgacagggcccagttaaatatgatttgcattttttaaatttgccagttttattttctaaattctttcatgagcttgcctaaaattcggaatggttttcgggttgtggcaaaccccaaagagagcactgtccaaggatgtcgggagcatcctgctgcttaggggaatgttttcgcaaatgttgctctagtcagtccagctcatctgccaaaatgtagggctaccgtcttggatgcatgagctattgctagagcatcatccttagaaatcagtgccccagatgtacatgtgttgagcgtattcttgaaagtattgtgtttatgcatttcaatttcaatggtgttggcttcccctccccaccccacgcgtgcataaaaactggttctacaaatttttacttgaagtaccaggccgtttgctttttcaggttgttttgttttatagtattaagtgaaattttaaatgcacagttctatttgctatctgaactaattcatttattaagtatatttgtaaaagctaaggctcgagttaaaacaatgaagtgttttacaatgatttgtaaaggactatttataactaatatggttttgttttcaatgaattaagaaagattaaatatatctttgtaaattattttatgtcatagtttaattggtctaccaagtaagacatctcaaatacagtagtataatgtatgaattttgtaagtataagaaattttattagacattctcttactttttgtaaatgctgtaaatatttcataaattaacaaagtgtcactccataaaaagaaagctaatactaatagcctaaaagattttgtgaaatttcatgaaaactttttaatggcaataatgactaaagacctgctgtaataaatgtattaactgaaacctaacactgttttcag

SEQ ID NO: 76001 - DNA, 849 bp, Homo sapiens
gcagccgagcagcctggcaacggcggtggcgcccggagcccgagagtttccaggatggcttctgcatcaacttctaaatataattcacactccttggagaatgagtctattaagaggacgtctcgagatggagtcaatcgagatctcactgaggctgttcctcgacttccaggagaaacactaatcactggattcttctctaatacttgatgttcctctgggtgtgatctcgagaattgaaaaaatgggaggcgcgacaagtagaggagaaaattcctatggtctagatattacttgtaaagacatgagaaacctgaggttcgctttgaaacaggaaggccacagcagaagagatatgtttgagatcctcacgagatacgcgtttcccctggctcacagtctgccattatttgcatttttaaatgaagaaaagtttaacgtggatggatggacagtttacaatccagtggaagaatacaggaggcagggcttgcccaatcaccattggagaataacttttattaataagtgctatgagctctgtgacacttaccctgctcttttggtggttccgtatcgtgcctcagatgatgacctccggagagttgcaacttttaggtcccgaaatcgaattccagtgctgtcatggattcatccagaaaataagacggtcattgtgcgttgcagtcagcctcttgtcggtatgagtgggaaacgaaataaagatgatgagaaatatctcgatgttatcagggagactaataaacaaatttctaaactcaccatttatgatgcaagacccagcgtaaatgcagtggccaacaaggtgagtggacttaatgatgtgct

SEQ ID NO: 76002 - DNA, 3372 bp, Homo sapiens
gcagccgagcagcctggcaacggcggtggcgcccggagcccgagagtttccaggatggcttctgcatcaacttctaaatataattcacactccttggagaatgagtctattaagaggacgtctcgagatggagtcaatcgagatctcactgaggctgttcctcgacttccaggagaaacactaatcactgacaaagaagttatttacatatgtcctttcaatggccccattaagggaagagtttacatcacaaattatcgtctttatttaagaagtttggaaacggattcttctctaatacttgatgttcctctgggtgtgatctcgagaattgaaaaaatgggaggcgcgacaagtagaggagaaaattcctatggtctagatattacttgtaaagacatgagaaacctgaggttcgctttgaaacaggaaggccacagcagaagagatatgtttgagatcctcacgagatacgcgtttcccctggctcacagtctgccattatttgcatttttaaatgaagaaaagtttaacgtggatggatggacagtttacaatccagtggaagaatacaggaggcagggcttgcccaatcaccattggagaataacttttattaataagtgctatgagctctgtgacacttaccctgctcttttggtggttccgtatcgtgcctcagatgatgacctccggagagttgcaacttttaggtcccgaaatcgaattccagtgctgtcatggattcatccagaaaataagacggtcattgtgcgttgcagtcagcctcttgtcggtatgagtgggaaacgaaataaagatgatgagaaatatctcgatgttatcagggagactaataaacaaatttctaaactcaccatttatgatgcaagacccagcgtaaatgcagtggccaacaaggcaacaggaggaggatatgaaagtgatgatgcatatcataacgccgaacttttcttcttagacattcataatattcatgttatgcgggaatctttaaaaaaagtgaaggacattgtttatcctaatgtagaagaatctcattggttgtccagtttggagtctactcattggttagaacatatcaagctcgttttgacaggagccattcaagtagcagacaaagtttcttcagggaagagttcagtgcttgtgcattgcagtgacggatgggacaggactgctcagctgacatccttggccatgctgatgttggatagcttctataggagcattgaagggttcgaaatactggtacaaaaagaatggataagttttggacataaatttgcatctcgaataggtcatggtgataaaaaccacaccgatgctgaccgttctcctatttttctccagtttattgattgtgtgtggcaaatgtcaaaacagttccctacagcttttgaattcaatgaacaatttttgattataattttggatcatctgtatagttgccgatttggtactttcttattcaactgtgaatctgctcgagaaagacagaaggttacagaaaggactgtttctttatggtcactgataaacagtaataaagaaaaattcaaaaaccccttctatactaaagaaatcaatcgagttttatatccagttgccagtatgcgtcacttggaactctgggtgaattactacattagatggaaccccaggatcaagcaacaacagccgaatccagtggagcagcgttacatggagctcttagccttacgcgacgaatacataaagcggcttgaggaactgcagctcgccaactctgccaagctttctgatcccccaacttcaccttccagtccttcgcaaatgatgccccatgtgcaaactcacttctgaggggggaccctggcaccgcattagagctcgaaataaaggcgatagctgactttcatttggggcatttgtaaaaagtagattaaaatatttgcctccatgtagaacttgaactaacataatcttaaactcttgaatatgtgccttctagaatacatattacaagaaaactacagggtccacacggcaatcagaagaaaggagctgagatgaggttttggaaaaccctgacacctttaaaaagcagtttttgaaagacaaaatttagatttaatttacgtcttgagaaatactatatatacaatatatattttgtgggcttaattgaaacaacattattttattgctttggattctctaagatgaatccaaatgtgaaagatgcatgttactgccaaaaccaaattgagctcagcttcctaggcattacccaaaagcaaggtgtttaagtaattgccagcttttataccatcatgagtggtgacttaaggagaaatagctgtatagatgagtttttcattatttggaaatttaggggtagaaaatgttttcccctaattttccagagaagcctatttttatatttttaaaaaactgacagggcccagttaaatatgatttgcattttttaaatttgccagttttattttctaaattctttcatgagcttgcctaaaattcggaatggttttcgggttgtggcaaaccccaaagagagcactgtccaaggatgtcgggagcatcctgctgcttaggggaatgttttcgcaaatgttgctctagtcagtccagctcatctgccaaaatgtagggctaccgtcttggatgcatgagctattgctagagcatcatccttagaaatcagtgccccagatgtacatgtgttgagcgtattcttgaaagtattgtgtttatgcatttcaatttcaatggtgttggcttcccctccccaccccacgcgtgcataaaaactggttctacaaatttttacttgaagtaccaggccgtttgctttttcaggttgttttgttttatagtattaagtgaaattttaaatgcacagttctatttgctatctgaactaattcatttattaagtatatttgtaaaagctaaggctcgagttaaaacaatgaagtgttttacaatgatttgtaaaggactatttataactaatatggttttgttttcaatgaattaagaaagattaaatatatctttgtaaattattttatgtcatagtttaattggtctaccaagtaagacatctcaaatacagtagtataatgtatgaattttgtaagtataagaaattttattagacattctcttactttttgtaaatgctgtaaatatttcataaattaacaaagtgtcactccataaaaagaaagctaatactaatagcctaaaagattttgtgaaatttcatgaaaactttttaatggcaataatgactaaagacctgctgtaataaatgtattaactgaaacctaacactgttttcag

SEQ ID NO: 76003 - DNA, 3235 bp, Homo sapiens
gcagccgagcagcctggcaacggcggtggcgcccggagcccgagagtttccaggatggcttctgcatcaacttctaaatataattcacactccttggagaatgagtctattaagaggacgtctcgagatggagtcaatcgagatctcactgaggctgttcctcgacttccaggagaaacactaatcactgacaaagaagttatttacatatgtcctttcaatggccccattaagggaagagtttacatcacaaattatcgtctttatttaagaagtttggaaacggattcttctctaatacttgatgttcctctgggtgtgatctcgagaattgaaaaaatgggaggcgcgacaagtagaggagaaaattcctatggtctagatattacttgtaaagacatgagaaacctgaggttcgctttgaaacaggaaggccacagcagaagagatatgtttgagatcctcacgagatacgcgtttcccctggctcacagtctgccattatttgcatttttaaatgaagaaaagtttaacgtggatggatggacagtttacaatccagtggaagaatacaggaggcagggcttgcccaatcaccattggagaataacttttattaataagtgctatgagctctgtgacacttaccctgctcttttggtggttccgtatcgtgcctcagatgatgacctccggagagttgcaacttttaggtcccgaaatcgaattccagtgctgtcatggattcatccagaaaataagacggtcattgtgcgttgcagtcagcctcttgtcggtatgagtgggaaacgaaataaagatgatgagaaatatctcgatgttatcagggagactaataaacaaatttctaaactcaccatttatgatgcaagacccagcgtaaatgcagtggccaacaaggcaacaggaggaggatatgaaagtgatgatgcatatcataacgccgaacttttcttcttagacattcataatattcatgttatgcgggaatctttaaaaaaagtgaaggacattgtttatcctaatgtagaagaatctcattggttgtccagtttggagtctactcattggttagaacatatcaagctcgttttgacaggagccattcaagtagcagacaaagtttcttcagggaagagttcagtgcttgtgcattgcagtgacggatgggacaggactgctcagctgacatccttggccatgctgatgttggatagcttctataggagcattgaagggttcgaaatactggtacaaaaagaatggataagttttggacataaatttgcatctcgaataggtcatggtgataaaaaccacaccgatgctgaccgttctcctatttttctccagtttattgattgtgtgtggcaaatgtcaaaacagttccctacagcttttgaattcaatgaacaatttttgattataattttggatcatctgtatagttgccgatttggtactttcttattcaactgtgaatctgctcgagaaagacagaaggttacagaaaggactgtttctttatggtcactgataaacagtaataaagaaaaattcaaaaaccccttctatactaaagaaatcaatcgagttttatatccagttgccagtatgcgtcacttggaactctgggtgaattactacattagatggaaccccaggatcaagcaacaacagccgaatccagtggagcagcgttacatggagctcttagccttacgcgacgaatacataaagcggcttgaggaactgcagctcgccaactctgccaagctttctgatcccccaacttcaccttccagtccttcgcaaatgatgccccatgtgcaaactcacttctgaggggggaccctggcaccgcattagagctcgaaataaaggcgatagctgactttcatttggggcatttgtaaaaagtagattaaaatatttgcctccatgtagaacttgaactaacataatcttaaactcttgaatatgtgccttctagaatacatattacaagaaaactacagggtccacacggcaatcagaagaaaggagctgagatgaggttttggaaaaccctgacacctttaaaaagcagtttttgaaagacaaaatttagatttaatttacgtcttgagaaatactatatatacaatatatattttgtgggcttaattgaaacaacattattttaaaatcaaaggggatatatgtttgtggaatggattttcctgaagctgcttaacagttgctttggattctctaagatgaatccaaatgtgaaagatgcatgttactgccaaaaccaaattgagctcagcttcctaggcattacccaaaagcaaggtgtttaagtaattgccagcttttataccatcatgagtggtgacttaaggagaaatagctgtatagatgagtttttcattatttggaaatttaggggtagaaaatgttttcccctaattttccagagaagcctatttttatatttttaaaaaactgacagggcccagttaaatatgatttgcattttttaaatttgccagttttattttctaaattctttcatgagcttgcctaaaattcggaatggttttcgggttgtggcaaaccccaaagagagcactgtccaaggatgtcgggagcatcctgctgcttaggggaatgttttcgcaaatgttgctctagtcagtccagctcatctgccaaaatgtagggctaccgtcttggatgcatgagctattgctagagcatcatccttagaaatcagtgccccagatgtacatgtgttgagcgtattcttgaaagtattgtgtttatgcatttcaatttcaatggtgttggcttcccctccccaccccacgcgtgcataaaaactggttctacaaatttttacttgaagtaccaggccgtttgctttttcaggttgttttgttttatagtattaagtgaaattttaaatgcacagttctatttgctatctgaactaattcatttattaagtatatttgtaaaagctaaggctcgagttaaaacaatgaagtgttttacaatgatttgtaaaggactatttataactaatatggttttgttttcaatgaattaagaaagattaaatatatctttgtaaattattttatgtcttacttggtagaccaattaaactatgacataaaataatttacaaagatatatttaatctttcttaattcattgtcgacgc

SEQ ID NO: 76004 - DNA, 3019 bp, Homo sapiens
gcagccgagcagcctggcaacggcggtggcgcccggagcccgagagtttccaggatggcttctgcatcaacttctaaatataattcacactccttggagaatgagtctattaagaggacgtctcgagatggagtcaatcgagatctcactgaggctgttcctcgacttccaggagaaacactaatcactgacaaagaagttatttacatatgtcctttcaatggccccattaagggaagagtttacatcacaaattatcgtctttatttaagaagtttggaaacggattcttctctaatacttgatgttcctctgggtgtgatctcgagaattgaaaaaatgggaggcgcgacaagtagaggagaaaattcctatggtctagatattacttgtaaagacatgagaaacctgaggttcgctttgaaacaggaaggccacagcagaagagatatgtttgagatcctcacgagatacgcgtttcccctggctcacagtctgccattatttgcatttttaaatgaagaaaagtttaacgtggatggatggacagtttacaatccagtggaagaatacaggaggcagggcttgcccaatcaccattggagaataacttttattaataagtgctatgagctctgtgacacttaccctgctcttttggtggttccgtatcgtgcctcagatgatgacctccggagagttgcaacttttaggtcccgaaatcgaattccagtgctgtcatggattcatccagaaaataagacggtcattgtgcgttgcagtcagcctcttgtcggtatgagtgggaaacgaaataaagatgatgagaaatatctcgatgttatcagggagactaataaacaaatttctaaactcaccatttatgatgcaagacccagcgtaaatgcagtggccaacaaggcaacaggaggaggatatgaaagtgatgatgcatatcataacgccgaacttttcttcttagacattcataatattcatgttatgcgggaatctttaaaaaaagtgaaggacattgtttatcctaatgtagaagaatctcattggttgtccagtttggagtctactcattggttagaacatatcaagctcgttttgacaggagccattcaagtagcagacaaagtttcttcagggaagagttcagtgcttgtgcattgcagtgacggatgggacaggactgctcagctgacatccttggccatgctgatgttggatagcttctataggagcattgaagggttcgaaatactggtacaaaaagaatggataagttttggacataaatttgcatctcgaataggtcatggtgataaaaaccacaccgatgctgaccgttctcctatttttctccagtttattgattgtgtgtggcaaatgtcaaaacagttcaccttccagtccttcgcaaatgatgccccatgtgcaaactcacttctgaggggggaccctggcaccgcattagagctcgaaataaaggcgatagctgactttcatttggggcatttgtaaaaagtagattaaaatatttgcctccatgtagaacttgaactaacataatcttaaactcttgaatatgtgccttctagaatacatattacaagaaaactacagggtccacacggcaatcagaagaaaggagctgagatgaggttttggaaaaccctgacacctttaaaaagcagtttttgaaagacaaaatttagatttaatttacgtcttgagaaatactatatatacaatatatattttgtgggcttaattgaaacaacattattttaaaatcaaaggggatatatgtttgtggaatggattttcctgaagctgcttaacagttgctttggattctctaagatgaatccaaatgtgaaagatgcatgttactgccaaaaccaaattgagctcagcttcctaggcattacccaaaagcaaggtgtttaagtaattgccagcttttataccatcatgagtggtgacttaaggagaaatagctgtatagatgagtttttcattatttggaaatttaggggtagaaaatgttttcccctaattttccagagaagcctatttttatatttttaaaaaactgacagggcccagttaaatatgatttgcattttttaaatttgccagttttattttctaaattctttcatgagcttgcctaaaattcggaatggttttcgggttgtggcaaaccccaaagagagcactgtccaaggatgtcgggagcatcctgctgcttaggggaatgttttcgcaaatgttgctctagtcagtccagctcatctgccaaaatgtagggctaccgtcttggatgcatgagctattgctagagcatcatccttagaaatcagtgccccagatgtacatgtgttgagcgtattcttgaaagtattgtgtttatgcatttcaatttcaatggtgttggcttcccctccccaccccacgcgtgcataaaaactggttctacaaatttttacttgaagtaccaggccgtttgctttttcaggttgttttgttttatagtattaagtgaaattttaaatgcacagttctatttgctatctgaactaattcatttattaagtatatttgtaaaagctaaggctcgagttaaaacaatgaagtgttttacaatgatttgtaaaggactatttataactaatatggttttgttttcaatgaattaagaaagattaaatatatctttgtaaattattttatgtcatagtttaattggtctaccaagtaagacatctcaaatacagtagtataatgtatgaattttgtaagtataagaaattttattagacattctcttactttttgtaaatgctgtaaatatttcataaattaacaaagtgtcactccataaaaagaaagctaatactaatagcctaaaagattttgtgaaatttcatgaaaactttttaatggcaataatgactaaagacctgctgtaataaatgtattaactgaaacctaacactgttttcag

SEQ ID NO: 76005 - DNA, 3372 bp, Homo sapiens
gcagccgagcagcctggcaacggcggtggcgcccggagcccgagagtttccaggatggcttctgcatcaacttctaaatataattcacactccttggagaatgagtctattaagaggacgtctcgagatggagtcaatcgagatctcactgaggctgttcctcgacttccaggagaaacactaatcactgacaaagaagttatttacatatgtcctttcaatggccccattaagggaagagtttacatcacaaattatcgtctttatttaagaagtttggaaacggattcttctctaatacttgatgttcctctgggtgtgatctcgagaattgaaaaaatgggaggcgcgacaagtagaggagaaaattcctatggtctagatattacttgtaaagacatgagaaacctgaggttcgctttgaaacaggaaggccacagcagaagagatatgtttgagatcctcacgagatacgcgtttcccctggctcacagtctgccattatttgcatttttaaatgaagaaaagtttaacgtggatggatggacagtttacaatccagtggaagaatacaggaggcagggcttgcccaatcaccattggagaataacttttattaataagtgctatgagctctgtgacacttaccctgctcttttggtggttccgtatcgtgcctcagatgatgacctccggagagttgcaacttttaggtcccgaaatcgaattccagtgctgtcatggattcatccagaaaataagacggtcattgtgcgttgcagtcagcctcttgtcggtatgagtgggaaacgaaataaagatgatgagaaatatctcgatgttatcagggagactaataaacaaatttctaaactcaccatttatgatgcaagacccagcgtaaatgcagtggccaacaaggcaacaggaggaggatatgaaagtgatgatgcatatcataacgccgaacttttcttcttagacattcataatattcatgttatgcgggaatctttaaaaaaagtgaaggacattgtttatcctaatgtagaagaatctcattggttgtccagtttggagtctactcattggttagaacatatcaagctcgttttgacaggagccattcaagtagcagacaaagtttcttcagggaagagttcagtgcttgtgcattgcagtgacggatgggacaggactgctcagctgacatccttggccatgctgatgttggatagcttctataggagcattgaagggttcgaaatactggtacaaaaagaatggataagttttggacataaatttgcatctcgaataggtcatggtgataaaaaccacaccgatgctgaccgttctcctatttttctccagtttattgattgtgtgtggcaaatgtcaaaacagttccctacagcttttgaattcaatgaacaatttttgattataattttggatcatctgtatagttgccgatttggtactttcttattcaactgtgaatctgctcgagaaagacagaaggttacagaaaggactgtttctttatggtcactgataaacagtaataaagaaaaattcaaaaaccccttctatactaaagaaatcaatcgagttttatatccagttgccagtatgcgtcacttggaactctgggtgaattactacattagatggaaccccaggatcaagcaacaacagccgaatccagtggagcagcgttacatggagctcttagccttacgcgacgaatacataaagcggcttgaggaactgcagctcgccaactctgccaagctttctgatcccccaacttcaccttccagtccttcgcaaatgatgccccatgtgcaaactcacttctgaggggggaccctggcaccgcattagagctcgaaataaaggcgatagctgactttcatttggggcatttgtaaaaagtagattaaaatatttgcctccatgtagaacttgaactaacataatcttaaactcttgaatatgtgccttctagaatacatattacaagaaaactacagggtccacacggcaatcagaagaaaggagctgagatgaggttttggaaaaccctgacacctttaaaaagcagtttttgaaagacaaaatttagatttaatttacgtcttgagaaatactatatatacaatatatattttgtgggcttaattgaaacaacattattttaaaatcaaaggggatatatgtttgtggaatggattttcctgaagctgcttaacagttgctttggattctctaagatgaatccaaatgtgaaagatgcatgttactgcctaattgccagcttttataccatcatgagtggtgacttaaggagaaatagctgtatagatgagtttttcattatttggaaatttaggggtagaaaatgttttcccctaattttccagagaagcctatttttatatttttaaaaaactgacagggcccagttaaatatgatttgcattttttaaatttgccagttttattttctaaattctttcatgagcttgcctaaaattcggaatggttttcgggttgtggcaaaccccaaagagagcactgtccaaggatgtcgggagcatcctgctgcttaggggaatgttttcgcaaatgttgctctagtcagtccagctcatctgccaaaatgtagggctaccgtcttggatgcatgagctattgctagagcatcatccttagaaatcagtgccccagatgtacatgtgttgagcgtattcttgaaagtattgtgtttatgcatttcaatttcaatggtgttggcttcccctccccaccccacgcgtgcataaaaactggttctacaaatttttacttgaagtaccaggccgtttgctttttcaggttgttttgttttatagtattaagtgaaattttaaatgcacagttctatttgctatctgaactaattcatttattaagtatatttgtaaaagctaaggctcgagttaaaacaatgaagtgttttacaatgatttgtaaaggactatttataactaatatggttttgttttcaatgaattaagaaagattaaatatatctttgtaaattattttatgtcatagtttaattggtctaccaagtaagacatctcaaatacagtagtataatgtatgaattttgtaagtataagaaattttattagacattctcttactttttgtaaatgctgtaaatatttcataaattaacaaagtgtcactccataaaaagaaagctaatactaatagcctaaaagattttgtgaaatttcatgaaaactttttaatggcaataatgactaaagacctgctgtaataaatgtattaactgaaacctaacactgttttcag

SEQ ID NO: 76006 - DNA, 708 bp, Homo sapiens
gcagatgttggatgactttccagaccagttttggaaaaagctcttgaggatcagaagctcctgggatttctgttatcacctgatttcatggagagagacagtccagggccgggaattatgtggcatctatgtgttccccagttgtgggatccatctggccgatggttatggtggtcagtgactttcagaggcctggaattcatgacagatgcttttgctaatgtgcttggtgccccactgaggctgctgagcagtgcttaccatgcgcccgatgtctcttctgtgtgcctctgagagcaaaagtggcctcagagtctgaaggagggcaaagtggccacagctgcagacacaaagtccagactagctcttgaccacatccaagtgcatcctgcattaagctcaggcacatcaaacctgcccaatcaaggtctgccaaaggaaggagtctgcaaatgacatttctcataatcaaacacactcttaatttgtttttatattattcactccattttttgattattataacttttaaaattatgtctagtagttttatcaattgctgagaagagtgttgaagtccaacttacaattgtggatttgttgatttcttctttcagctttattggttttggtttatgcattttaaggctctgctcttggtgtgtacacatgtaaaaccattttgtcttcatagtaaattaattttta

SEQ ID NO: 76007 - DNA, 806 bp, Homo sapiens
gcagatgttggatgactttccagaccagttttggaaaaagctcttgaggatcagaagctcctgggatttctgttatcacctgatttcatggagagagacagtccagggccgggaattatgtggcatctatgtgttccccagttgtgggatccatctggccgatggttatggtggtcagtgactttcagaggcctggaattcatgacagatgcttttgctaatgtgcttggtgccccactgaggctgctgagcagtgcttaccatgcgcccgatgtctcttctgtgtgcctctgagagcaaaagtggcctcagagtctgaaggagggcaaagtggccacagctgcagacacaaagtccagactagctcttgaccacatccaagtgcatcctgcattaagctcaggcacatcaaacctgcccaatcaaggtctgccaaaggaaggagtctgcaaatgacatttctcataatcaaacacactcttaatttgtttttatattattcactccattttttgattattataacttttaaaattatgtctagtagttttatcaattgctgagaagagtgttgaagtccaacttacaattgtggatttgttgatttcttctttcagctttattggttttggtttatgcattttaaggctctgctcttggtgtgtacacatgtaaaaccattttgtcttcatagtaaattaatttttaaaaatcattatgtaatgtccctctttgctccagtaattctttgctctgaggtctactgtattagtattaatatagcgacttctacttttaagttaata

SEQ ID NO: 76008 - DNA, 286 bp, Homo sapiens
ccatccctcctcaatcacgccaaagaagacctgtttagcatacaaaatcaagctgtgaggagtaaaactttggcaatgtcatttcatcacagcacagagccactgtgagtccagcacctcttatgaaaagaaaacagacggccaggcaccgtggctgacacctgtcatccgagcactttgggaggctgaggcaggtggatcacttgaggccaggagttcgaaaccagcctgcccaacaggtgaaaccccgtctctactaaaaatacaaaaaaaaagaaaaatcagg

SEQ ID NO: 76009 - DNA, 906 bp, Homo sapiens
cagctacttgggaggctgaggcatgagaatcgcttgaacccaggtggcggaggttgcagtaagtcgagatcacgccattgcgcttcagcctaggggacaagagcgagacttcgtctcaaaaaaaaagaaaagaagctcataataatataattccatttacctcactccagctctttgtggtgttgttgtcatatattatttctacgtgtcacaaatataatactttgttactgttattcttgctttaatttttaactattttcaaaaataatcttatatttactcacattactatttctggttctccttatttctttcctcagattcatttttttttttaaatctaagataatttccctttggctttaaaaaaaaaaacctttctttaccatttcacttagtgtgcatctcttggtgatgcattttctcagcttttatatgaaaacatctttatttcaccttcattttttgaaggatattgtcactagatttagaattctaggtttataaaataatgatgcggtcatgtttttatgatttatgttttaaaaaataatcctcatgtcgtagagacaaatactgaagtatttgttcaaaatgaaattatctgggctgggcgtggtggttcgtgcctgtaatcccagcactttgggagaaggcaggcagaacacttaaggtcaggagttcaagaccagcctggccaacgtgatgaaacccccgtctctactaaaaacacaaaaatcagttgggtgtggtggcgcacgcctgtaatgccagctactcgggaggctgatgcacaagaactgactgaacctggaaggtggaggctgcagtgagcccagattgtatcattgcactccagcctgagtgacagagcgcgaccctgtctcaaaaaacaaaaacaaa

SEQ ID NO: 76010 - DNA, 920 bp, Homo sapiens
actgtaggtctgcaccctgctctctgttagaaagggagaatcacaaatgttagaatagtgttaaaaactccatggaaacttttctgggcttaaaggaactgaatggcattttcatacctttctaatgctgtgatttaatatttcctggtgccttgtcagtgccacctgaaatcatgatcttatgatgtgcttcctctttggaaaaaactctaaaatagtaacactaaaatcaagaacattttgtttataggactcctttttttaagatgtgaaagccagccagtcaattcctgttcttaagtatattcttagctagggaggttgcttaagattttgtttataagactttcactaaaatcagaattgggtcatcgcgcccagtgctttagttttggaaatctgagtttgaaataaaggataaatgacataaattaatggagtaaaattaatgttgtgataatattaaataaagctaatgccttttgcacctggagggctatgcagatggcaggcatacctaattatgcaccctgcttgcctttaagtatactgatagaaatctctcaactgagtataaaatatgttcattcactggctccagaaaagtttgagtaaggcaacacaatccacaaaaagcctaacatgcttattttttagtggaaagaaatacaattctataagttaaaatgaaataattgaatacttatttttaaaacaagttattactactgttggatttgttctttctgtgaatatcaaaatatatgcctgtcattcccattagaaaaagatgattctcaaactagcaaggaagtacttaaatgtaagtttatatttttacagactgcacacaaagagaataatttactagtggaattctaaataaattgatttgctttctttacgtataaatcggattg

SEQ ID NO: 76011 - DNA, 339 bp, Homo sapiens
ctctacagtggtatgattatataagggtggaaatataaaagagtaagcctttagaaacagtttgtgtctaaattagctctcaggcatattgtcttcaaaggaatgttttaaaccagccaaagactaacatcaacatgcttacattttgagtccaaaattaaaatccaaaatagccaagcatggtggctcacgcctataatcccaactactccagaggctgaggtgtgatagaatttcttgaacctaggcgttccaggctgcagtgagctatgattgtgctgctgcactccagcctgggtgacagagcgaggttgcttctaaaacaaaaatttgaaatag

SEQ ID NO: 76012 - DNA, 395 bp, Homo sapiens
gtgccattaatttcaaatattaaaaattctgatcacagtcttagggtgtgatggttagaaacttgacattgaaggatataattctacttcaaaccaaaatatgtaggttggttgtgtacagaacactgctagacaccatacactagttccagaatagtggaatgatgtatattttgagaataacaagtgattcatatgaatctacccccttcacccacctttttggtagttatttttagcatctcaagagggtttttagatttacttactgtcataattcagatagaaatttatagtttaatcattaaagttcctggattttctacaaccacattttagaaatttgagtactaagcaaatactaaatgattaataatatttagattgcaacttaa

SEQ ID NO: 76013 - DNA, 998 bp, Homo sapiens
  misc_feature (866)..(866): n is a, c, g, or t
  misc_feature (893)..(893): n is a, c, g, or t
  misc_feature (896)..(896): n is a, c, g, or t
  misc_feature (900)..(900): n is a, c, g, or t
  misc_feature (911)..(911): n is a, c, g, or t
  misc_feature (920)..(920): n is a, c, g, or t
  misc_feature (928)..(928): n is a, c, g, or t
  misc_feature (947)..(947): n is a, c, g, or t
  misc_feature (950)..(950): n is a, c, g, or t
taggctagggcgagtccgggggtgaatcggccgagggagtggtcctgcgcaagcctggcatcaatgtggcatctgattggagtattcacctgcgataacccaagggatgttctgggttagggggagggaaggggagcattagtgctgagagatattctttcttctgccttggagttcggccctccccagacttcacttatgctagtctaagacccagattctgccaacatttgggcaggatgagagggctgaccctgggctccaaattcctcttgtgatctcctcacctctcccactccattgataccaactctttcccttcattcccccaacatcctgttgctctaactggagcacattcacttacgaacaccaggaaaccacagggcccttgtcgccccttctctttcccttatttaggagccctgaactcccccagagtctatccattcatgcctcttgtatgttgatgccacttcttggaagaagatgagggcaatgagttagggctccttttccccttccctcccaccagattgctctcccacctttcatttcttcctccaggctttactcccctttttatgccccaccgatacactgggaccaccccttaccccggacaggatgaatggatcaaaggagtgaggttgctaaagaacatccttttccctctcattctacccttttcctctccccgattccttgtagagctgctgcaattcttagaggggcagttctacctcctctgtccctcggcagaaagacgtttccacacctcttaggggatgcgcattaaacttcttttgcccccttcttgtcccctttgaggggcacttaagatgcgaaccgtggggtccggatcnggcccggttttgtggaaccgggggggncgncgtngccggtgtggnccggggggnggggcacngggcgggatggggtttccncgncccggggggcggggccgggctcaccaacaacacagcgtggggggggtc

SEQ ID NO: 76014 - DNA, 552 bp, Homo sapiens
  misc_feature (55)..(56): n is a, c, g, or t
agtggttcccccctggatccagattttggaagcccaagggtgtccagggtctatnnggcctggcccaatagtgctgagagatattctttcttctgccttggagttcggccctccccagacttcacttatgctagtctaagacccagatttacccttttcctctccccgattccttgtagagctgctgcaattcttagaggggcagttctacctcctctgtccctcggcagaaagacgtttccacacctcttaggggatgcgcattaaacttcttttgcccccttcttgtcccctttgaggggcacttaagatggagaaatcagttgtggtttcagtgaatcatggtcacctgtatttattgctaggagaagcctgagggtggggggagatgatcatgtgtgctcggggttggctggaagccctgggtggggggttgggggaggactaatggggagtcggggaatatttgtgggtattttttttacttcctcttggttcccagctgtgacacgttttgatcaaaggagaaacaataaagggataaaccataaa

SEQ ID NO: 76015 - DNA, 3892 bp, Homo sapiens
aactaggatacgtggctgagcgcgcgcgatggggcgggaggtttggggtcaaggagcaaactctgcacaagatggcggcggtagcggcagtggcggcgcgtaggaggcggtcttgggcgtctttggtactggcttttttaggggtctgcctggggattacccttgctgtggatagaagcaactttaagacctgtgaagagagttctttctgcaagcgacagagaagcatacggccaggcctctctccataccgagccttgctggactctctacagcttggtcctgattccctcacggtccatctgatccatgaggtcaccaaggtgttgctggtgctagagcttcaggggcttcaaaagaacatgactcggttcaggattgatgagctggagcctcggcgaccccgataccgtgtaccagatgttttggtggctgatccaccaatagcccggctttctgtctctggtcgtgatgagaacagtgtggagttaaccatggctgagggaccctacaagatcatcttgacagcacggccattccgccttgacctactagaggaccgaagtcttttgcttagtgtcaatgcccgaggactcttggagtttgagcatcagagggcccctagggtctcgcaaggatcaaaagacccagctgagggcgatggggcccagcctgaggaaacacccagggatggcgacaagccagaggagactcaggggaaggcagagaaagatgagccaggagcctgggaggagacattcaaaactcactctgacagcaagccgtatggccccatgtctgtgggtttggacttctctctgccaggcatggagcatgtctatgggatccctgagcatgcagacaacctgaggctgaaggtcactgagggtggggagccatatcgcctctacaatttggatgtgttccagtatgagctgtacaacccaatggccttgtatgggtctgtgcctgtgctcctggcacacaaccctcatcgcgacttgggcatcttctggctcaatgctgcagagacctgggttgatatatcttccaacactgccgggaagaccctgtttgggaagatgatggactacctgcagggctctggggagaccccacagacagatgttcgctggatgtcagagactggcatcattgacgtcttcctgctgctggggccctccatctctgatgttttccggcaatatgctagtctcacaggaacccaggcgttgcccccactcttctccctcggctaccaccagagccgttggaactaccgggacgaggctgatgtgctggaagtggatcagggctttgatgatcacaacctgccctgtgatgtcatctggctagacattgaacatgctgatggcaagcggtatttcacctgggaccccagtcgcttccctcagccccgcaccatgcttgagcgcttggcttctaagaggcggaagctggtggccatcgtagacccccacatcaaggtggactccggctaccgagttcacgaggagctgcggaacctggggctgtatgttaaaacccgggatggctctgactatgagggctggtgctggccaggctcagctggttaccctgacttcactaatcccacgatgagggcctggtgggctaacatgttcagctatgacaattatgagggctcagctcccaacctctttgtctggaatgacatgaacgaaccatctgtgttcaatggtcctgaggtcaccatgctcaaggatgcccagcattatgggggctgggagcaccgggatgtgcataacatctatggcctttatgtgcacatggcgactgctgatgggctgagacagcgctctgggggcatggaacgcccctttgtcctggccagggccttcttcgctggctcccagcgctttggagccgtgtggacaggggacaacactgccgagtgggaccatttgaagatctctattcctatgtgtctcagcttggggctggtgggactttccttctgtggggcggatgtgggtggcttcttcaaaaacccagagccagagctgcttgtgcgctggtaccagatgggtgcttaccagccattcttccgggcacatgcccacttggacactgggcgacgagagccatggctgttaccatctcagcacaatgatataatccgagatgccttgggccagcgatattctttgctgcccttctggtacaccctcttatatcaggcccatcgggaaggcattcctgtcatgaggcccctgtgggtgcagtaccctcaggatgtgactaccttcaatatagatgatcagtacttgcttggggatgcgttgctggttcaccctgtatcagactctggagcccatggtgtccaggtctatctgcctggccaaggggaggtgtggtatgacattcaaagctaccagaagcatcatggtccccagaccctgtacctgcctgtaactctaagcagtatccctgtgttccagcgtggagggacaatcgtgcctcgatggatgcgagtgcggcggtcttcagaatgtatgaaggatgaccccatcactctctttgttgcacttagccctcagggtacagctcaaggagagctctttctggatgatgggcacacgttcaactatcagactcgccaagagttcctgctgcgtcgattctcattctctggcaacacccttgtctccagctcagcagaccctgaaggacactttgagacaccaatctggattgagcgggtggtgataataggggctggaaagccagcagctgtggtactccagacaaaaggatctccagaaagccgcctgtccttccagcatgaccctgagacctctgtgttggtcctgcgcaagcctggcatcaatgtggcatctgattggagtattcacctgcgataacccaagggatgttctgggttagggggagggaaggggagcattagtgctgagagatattctttcttctgccttggagttcggccctccccagacttcacttatgctagtctaagacccagattctgccaacatttgggcaggatgagagggctgaccctgggctccaaattcctcttgtgatctcctcacctctcccactccattgataccaactctttcccttcattcccccaacatcctgttgctctaactggagcacattcacttacgaacaccaggaaaccacagggcccttgtcgccccttctctttcccttatttaggagccctgaactcccccagagtctatccattcatgcctcttgtatgttgatgccacttcttggaagaagatgagggcaatgagttagggctccttttccccttccctcccaccagattgctctcccacctttcatttcttcctccaggctttactcccctttttatgccccaccgatacactgggaccaccccttaccccggacaggatgaatggatcaaaggagtgaggttgctaaagaacatccttttccctctcattctacccttttcctctccccgattccttgtagagctgctgcaattcttagaggggcagttctacctcctctgtccctcggcagaaagacgtttccacacctcttaggggatgcgcattaaacttcttttgcccccttcttgtcccctttgaggggcacttaagatggagaaatcagttgtggtttcagtgaatcatggtcacctgtatttattgctaggagaagcctgagggtggggggagatgatcatgtgtgctcggggttggctggaagccctgggtggggggttgggggaggactaatggggagtcggggaatatttgtgggtattttttttacttcctcttggttcccagctgtgacacgttttgatcaaaggagaaacaataaagggataaaccataaa

SEQ ID NO: 76016 - DNA, 3847 bp, Homo sapiens
aggctgtaccggcctgggatgttgggatgcggcggtagcggcagtggcggcgcgtatgaaggcggtcttgggcgtctttggtactggcttttttaggggtctgcctggggattacccttgctgtggatagaagcaactttaagacctgtgaagagagttctttctgcaagcgacagagaagcatacggccaggcctctctccataccgagccttgctggactctctacagcttggtcctgattccctcacggtccatctgatccatgaggtcaccaaggtgttgctggtgctagagcttcaggggcttcaaaagaacatgactcggttcaggattgatgagctggagcctcggcgaccccgataccgtgtaccagatgttttggtggctgatccaccaatagcccggctttctgtctctggtcgtgatgagaacagtgtggagttaaccatggctgagggaccctacaagatcatcttgacagcacggccattccgccttgacctactagaggaccgaagtcttttgcttagtgtcaatgcccgaggactcttggagtttgagcatcagagggcccctagggtctcgcaaggatcaaaagacccagctgagggcgatggggcccagcctgaggaaacacccagggatggcgacaagccagaggagactcaggggaaggcagagaaagatgagccaggagcctgggaggagacattcaaaactcactctgacagcaagccgtatggccccatgtctgtgggtttggacttctctctgccaggcatggagcatgtctatgggatccctgagcatgcagacaacctgaggctgaaggtcactgagggtggggagccatatcgcctctacaatttggatgtgttccagtatgagctgtacaacccaatggccttgtatgggtctgtgcctgtgctcctggcacacaaccctcatcgcgacttgggcatcttctggctcaatgctgcagagacctgggttgatatatcttccaacactgccgggaagaccctgtttgggaagatgatggactacctgcagggctctggggagaccccacagacagatgttcgctggatgtcagagactggcatcattgacgtcttcctgctgctggggccctccatctctgatgttttccggcaatatgctagtctcacaggaacccaggcgttgcccccactcttctccctcggctaccaccagagccgttggaactaccgggacgaggctgatgtgctggaagtggatcagggctttgatgatcacaacctgccctgtgatgtcatctggctagacattgaacatgctgatggcaagcggtatttcacctgggaccccagtcgcttccctcagccccgcaccatgcttgagcgcttggcttctaagaggcggaagctggtggccatcgtagacccccacatcaaggtggactccggctaccgagttcacgaggagctgcggaacctggggctgtatgttaaaacccgggatggctctgactatgagggctggtgctggccaggctcagctggttaccctgacttcactaatcccacgatgagggcctggtgggctaacatgttcagctatgacaattatgagggctcagctcccaacctctttgtctggaatgacatgaacgaaccatctgtgttcaatggtcctgaggtcaccatgctcaaggatgcccagcattatgggggctgggagcaccgggatgtgcataacatctatggcctttatgtgcacatggcgactgctgatgggctgagacagcgctctgggggcatggaacgcccctttgtcctggccagggccttcttcgctggctcccagcgctttggagccgtgtggacaggggacaacactgccgagtgggaccatttgaagatctctattcctatgtgtctcagcttggggctggtgggactttccttctgtggggcggatgtgggtggcttcttcaaaaacccagagccagagctgcttgtgcgctggtaccagatgggtgcttaccagccattcttccgggcacatgcccacttggacactgggcgacgagagccatggctgttaccatctcagcacaatgatataatccgagatgccttgggccagcgatattctttgctgcccttctggtacaccctcttatatcaggcccatcgggaaggcattcctgtcatgaggcccctgtgggtgcagtaccctcaggatgtgactaccttcaatatagatgatcagtacttgcttggggatgcgttgctggttcaccctgtatcagactctggagcccatggtgtccaggtctatctgcctggccaaggggaggtgtggtatgacattcaaagctaccagaagcatcatggtccccagaccctgtacctgcctgtaactctaagcagtatccctgtgttccagcgtggagggacaatcgtgcctcgatggatgcgagtgcggcggtcttcagaatgtatgaaggatgaccccatcactctctttgttgcacttagccctcagggtacagctcaaggagagctctttctggatgatgggcacacgttcaactatcagactcgccaagagttcctgctgcgtcgattctcattctctggcaacacccttgtctccagctcagcagaccctgaaggacactttgagacaccaatctggattgagcgggtggtgataataggggctggaaagccagcagctgtggtactccagacaaaaggatctccagaaagccgcctgtccttccagcatgaccctgagacctctgtgttggtcctgcgcaagcctggcatcaatgtggcatctgattggagtattcacctgcgataacccaagggatgttctgggttagggggagggaaggggagcattagtgctgagagatattctttcttctgccttggagttcggccctccccagacttcacttatgctagtctaagacccagattctgccaacatttgggcaggatgagagggctgaccctgggctccaaattcctcttgtgatctcctcacctctcccactccattgataccaactctttcccttcattcccccaacatcctgttgctctaactggagcacattcacttacgaacaccaggaaaccacagggcccttgtcgccccttctctttcccttatttaggagccctgaactcccccagagtctatccattcatgcctcttgtatgttgatgccacttcttggaagaagatgagggcaatgagttagggctccttttccccttccctcccaccagattgctctcccacctttcatttcttcctccaggctttactcccctttttatgccccaccgatacactgggaccaccccttaccccggacaggatgaatggatcaaaggagtgaggttgctaaagaacatccttttccctctcattctacccttttcctctccccgattccttgtagagctgctgcaattcttagaggggcagttctacctcctctgtccctcggcagaaagacgtttccacacctcttaggggatgcgcattaaacttcttttgcccccttcttgtcccctttgaggggcacttaagatggagaaatcagttgtggtttcagtgaatcatggtcacctgtatttattgctaggagaagcctgagggtggggggagatgatcatgtgtgctcggggttggctggaagccctgggtggggggttgggggaggactaatggggagtcggggaatatttgtgggtattttttttacttcctcttggttcccagctgtgacacgttttgatcaaaggagaaacaataaagggataaaccataaa

SEQ ID NO: 76017 - DNA, 3812 bp, Homo sapiens
cggtagtggacgctgcgtacggacagctggtcttgggcgtctttggtactggcttttttaggggtctgcctggggattacccttgctgtggatagaagcaactttaagacctgtgaagagagttctttctgcaagcgacagagaagcatacggccaggcctctctccataccgagccttgctggactctctacagcttggtcctgattccctcacggtccatctgatccatgaggtcaccaaggtgttgctggtgctagagcttcaggggcttcaaaagaacatgactcggttcaggattgatgagctggagcctcggcgaccccgataccgtgtaccagatgttttggtggctgatccaccaatagcccggctttctgtctctggtcgtgatgagaacagtgtggagttaaccatggctgagggaccctacaagatcatcttgacagcacggccattccgccttgacctactagaggaccgaagtcttttgcttagtgtcaatgcccgaggactcttggagtttgagcatcagagggcccctagggtctcgcaaggatcaaaagacccagctgagggcgatggggcccagcctgaggaaacacccagggatggcgacaagccagaggagactcaggggaaggcagagaaagatgagccaggagcctgggaggagacattcaaaactcactctgacagcaagccgtatggccccatgtctgtgggtttggacttctctctgccaggcatggagcatgtctatgggatccctgagcatgcagacaacctgaggctgaaggtcactgagggtggggagccatatcgcctctacaatttggatgtgttccagtatgagctgtacaacccaatggccttgtatgggtctgtgcctgtgctcctggcacacaaccctcatcgcgacttgggcatcttctggctcaatgctgcagagacctgggttgatatatcttccaacactgccgggaagaccctgtttgggaagatgatggactacctgcagggctctggggagaccccacagacagatgttcgctggatgtcagagactggcatcattgacgtcttcctgctgctggggccctccatctctgatgttttccggcaatatgctagtctcacaggaacccaggcgttgcccccactcttctccctcggctaccaccagagccgttggaactaccgggacgaggctgatgtgctggaagtggatcagggctttgatgatcacaacctgccctgtgatgtcatctggctagacattgaacatgctgatggcaagcggtatttcacctgggaccccagtcgcttccctcagccccgcaccatgcttgagcgcttggcttctaagaggcggaagctggtggccatcgtagacccccacatcaaggtggactccggctaccgagttcacgaggagctgcggaacctggggctgtatgttaaaacccgggatggctctgactatgagggctggtgctggccaggctcagctggttaccctgacttcactaatcccacgatgagggcctggtgggctaacatgttcagctatgacaattatgagggctcagctcccaacctctttgtctggaatgacatgaacgaaccatctgtgttcaatggtcctgaggtcaccatgctcaaggatgcccagcattatgggggctgggagcaccgggatgtgcataacatctatggcctttatgtgcacatggcgactgctgatgggctgagacagcgctctgggggcatggaacgcccctttgtcctggccagggccttcttcgctggctcccagcgctttggagccgtgtggacaggggacaacactgccgagtgggaccatttgaagatctctattcctatgtgtctcagcttggggctggtgggactttccttctgtggggcggatgtgggtggcttcttcaaaaacccagagccagagctgcttgtgcgctggtaccagatgggtgcttaccagccattcttccgggcacatgcccacttggacactgggcgacgagagccatggctgttaccatctcagcacaatgatataatccgagatgccttgggccagcgatattctttgctgcccttctggtacaccctcttatatcaggcccatcgggaaggcattcctgtcatgaggcccctgtgggtgcagtaccctcaggatgtgactaccttcaatatagatgatcagtacttgcttggggatgcgttgctggttcaccctgtatcagactctggagcccatggtgtccaggtctatctgcctggccaaggggaggtgtggtatgacattcaaagctaccagaagcatcatggtccccagaccctgtacctgcctgtaactctaagcagtatccctgtgttccagcgtggagggacaatcgtgcctcgatggatgcgagtgcggcggtcttcagaatgtatgaaggatgaccccatcactctctttgttgcacttagccctcagggtacagctcaaggagagctctttctggatgatgggcacacgttcaactatcagactcgccaagagttcctgctgcgtcgattctcattctctggcaacacccttgtctccagctcagcagaccctgaaggacactttgagacaccaatctggattgagcgggtggtgataataggggctggaaagccagcagctgtggtactccagacaaaaggatctccagaaagccgcctgtccttccagcatgaccctgagacctctgtgttggtcctgcgcaagcctggcatcaatgtggcatctgattggagtattcacctgcgataacccaagggatgttctgggttagggggagggaaggggagcattagtgctgagagatattctttcttctgccttggagttcggccctccccagacttcacttatgctagtctaagacccagattctgccaacatttgggcaggatgagagggctgaccctgggctccaaattcctcttgtgatctcctcacctctcccactccattgataccaactctttcccttcattcccccaacatcctgttgctctaactggagcacattcacttacgaacaccaggaaaccacagggcccttgtcgccccttctctttcccttatttaggagccctgaactcccccagagtctatccattcatgcctcttgtatgttgatgccacttcttggaagaagatgagggcaatgagttagggctccttttccccttccctcccaccagattgctctcccacctttcatttcttcctccaggctttactcccctttttatgccccaccgatacactgggaccaccccttaccccggacaggatgaatggatcaaaggagtgaggttgctaaagaacatccttttccctctcattctacccttttcctctccccgattccttgtagagctgctgcaattcttagaggggcagttctacctcctctgtccctcggcagaaagacgtttccacacctcttaggggatgcgcattaaacttcttttgcccccttcttgtcccctttgaggggcacttaagatggagaaatcagttgtggtttcagtgaatcatggtcacctgtatttattgctaggagaagcctgagggtggggggagatgatcatgtgtgctcggggttggctggaagccctgggtggggggttgggggaggactaatggggagtcggggaatatttgtgggtattttttttacttcctcttggttcccagctgtgacacgttttgatcaaaggagaaacaataaagggataaaccataaa

SEQ ID NO: 76018 - DNA, 3865 bp, Homo sapiens
cggtagtggacgctgcgtacggacagctggtcttgggcgtctttggtactggcttttttaggggtctgcctggggattacccttgctgtggatagaagcaactttaagacctgtgaagagagttctttctgcaagcgacagagaagcatacggccaggcctctctccataccgagccttgctggactctctacagcttggtcctgattccctcacggtccatctgatccatgaggtcaccaaggtgttgctggtgctagagcttcaggggcttcaaaagaacatgactcggttcaggattgatgagctggagcctcggcgaccccgataccgtgtaccagatgttttggtggctgatccaccaatagcccggctttctgtctctggtcgtgatgagaacagtgtggagttaaccatggctgagggaccctacaagatcatcttgacagcacggccattccgccttgacctactagaggaccgaagtcttttgcttagtgtcaatgcccgaggactcttggagtttgagcatcagagggcccctagggtctccccctcgtccctgccccctctggattggagcagacagctctcctaccttccaggcaaggatcaaaagacccagctgagggcgatggggcccagcctgaggaaacacccagggatggcgacaagccagaggagactcaggggaaggcagagaaagatgagccaggagcctgggaggagacattcaaaactcactctgacagcaagccgtatggccccatgtctgtgggtttggacttctctctgccaggcatggagcatgtctatgggatccctgagcatgcagacaacctgaggctgaaggtcactgagggtggggagccatatcgcctctacaatttggatgtgttccagtatgagctgtacaacccaatggccttgtatgggtctgtgcctgtgctcctggcacacaaccctcatcgcgacttgggcatcttctggctcaatgctgcagagacctgggttgatatatcttccaacactgccgggaagaccctgtttgggaagatgatggactacctgcagggctctggggagaccccacagacagatgttcgctggatgtcagagactggcatcattgacgtcttcctgctgctggggccctccatctctgatgttttccggcaatatgctagtctcacaggaacccaggcgttgcccccactcttctccctcggctaccaccagagccgttggaactaccgggacgaggctgatgtgctggaagtggatcagggctttgatgatcacaacctgccctgtgatgtcatctggctagacattgaacatgctgatggcaagcggtatttcacctgggaccccagtcgcttccctcagccccgcaccatgcttgagcgcttggcttctaagaggcggaagctggtggccatcgtagacccccacatcaaggtggactccggctaccgagttcacgaggagctgcggaacctggggctgtatgttaaaacccgggatggctctgactatgagggctggtgctggccaggctcagctggttaccctgacttcactaatcccacgatgagggcctggtgggctaacatgttcagctatgacaattatgagggctcagctcccaacctctttgtctggaatgacatgaacgaaccatctgtgttcaatggtcctgaggtcaccatgctcaaggatgcccagcattatgggggctgggagcaccgggatgtgcataacatctatggcctttatgtgcacatggcgactgctgatgggctgagacagcgctctgggggcatggaacgcccctttgtcctggccagggccttcttcgctggctcccagcgctttggagccgtgtggacaggggacaacactgccgagtgggaccatttgaagatctctattcctatgtgtctcagcttggggctggtgggactttccttctgtggggcggatgtgggtggcttcttcaaaaacccagagccagagctgcttgtgcgctggtaccagatgggtgcttaccagccattcttccgggcacatgcccacttggacactgggcgacgagagccatggctgttaccatctcagcacaatgatataatccgagatgccttgggccagcgatattctttgctgcccttctggtacaccctcttatatcaggcccatcgggaaggcattcctgtcatgaggcccctgtgggtgcagtaccctcaggatgtgactaccttcaatatagatgatcagtacttgcttggggatgcgttgctggttcaccctgtatcagactctggagcccatggtgtccaggtctatctgcctggccaaggggaggtgtggtatgacattcaaagctaccagaagcatcatggtccccagaccctgtacctgcctgtaactctaagcagtatccctgtgttccagcgtggagggacaatcgtgcctcgatggatgcgagtgcggcggtcttcagaatgtatgaaggatgaccccatcactctctttgttgcacttagccctcagggtacagctcaaggagagctctttctggatgatgggcacacgttcaactatcagactcgccaagagttcctgctgcgtcgattctcattctctggcaacacccttgtctccagctcagcagaccctgaaggacactttgagacaccaatctggattgagcgggtggtgataataggggctggaaagccagcagctgtggtactccagacaaaaggatctccagaaagccgcctgtccttccagcatgaccctgagacctctgtgttggtcctgcgcaagcctggcatcaatgtggcatctgattggagtattcacctgcgataacccaagggatgttctgggttagggggagggaaggggagcattagtgctgagagatattctttcttctgccttggagttcggccctccccagacttcacttatgctagtctaagacccagattctgccaacatttgggcaggatgagagggctgaccctgggctccaaattcctcttgtgatctcctcacctctcccactccattgataccaactctttcccttcattcccccaacatcctgttgctctaactggagcacattcacttacgaacaccaggaaaccacagggcccttgtcgccccttctctttcccttatttaggagccctgaactcccccagagtctatccattcatgcctcttgtatgttgatgccacttcttggaagaagatgagggcaatgagttagggctccttttccccttccctcccaccagattgctctcccacctttcatttcttcctccaggctttactcccctttttatgccccaccgatacactgggaccaccccttaccccggacaggatgaatggatcaaaggagtgaggttgctaaagaacatccttttccctctcattctacccttttcctctccccgattccttgtagagctgctgcaattcttagaggggcagttctacctcctctgtccctcggcagaaagacgtttccacacctcttaggggatgcgcattaaacttcttttgcccccttcttgtcccctttgaggggcacttaagatggagaaatcagttgtggtttcagtgaatcatggtcacctgtatttattgctaggagaagcctgagggtggggggagatgatcatgtgtgctcggggttggctggaagccctgggtggggggttgggggaggactaatggggagtcggggaatatttgtgggtattttttttacttcctcttggttcccagctgtgacacgttttgatcaaaggagaaacaataaagggataaaccataaa

SEQ ID NO: 76019 - DNA, 3791 bp, Homo sapiens
aggctgtaccggcctgggatgttgggatgcggcggtagcggcagtggcggcgcgtatgaaggcggtcttgggcgtctttggtactggcttttttaggggtctgcctggggattacccttgctgtggatagaagcaactttaagacctgtgaagagagttctttctgcaagcgacagagaagcatacggccaggcctctctccataccgagccttgctggactctctacagcttggtcctgattccctcacggtccatctgatccatgaggtcaccaaggtgttgctggtgctagagcttcaggggcttcaaaagaacatgactcggttcaggattgatgagctggagcctcggcgaccccgataccgtgtaccagatgttttggtggctgatccaccaatagcccggctttctgtctctggtcgtgatgagaacagtgtggagttaaccatggctgagggaccctacaagatcatcttgacagcacggccattccgccttgacctactagaggaccgaagtcttttgcttagtgtcaatgcccgaggactcttggagtttgagcatcagagggcccctagggtctcgcaaggatcaaaagacccagctgagggcgatggggcccagcctgaggaaacacccagggatggcgacaagccagaggagactcaggggaaggcagagaaagatgagccaggagcctgggaggagacattcaaaactcactctgacagcaagccgtatggccccatgtctgtgggtttggacttctctctgccaggcatggagcatgtctatgggatccctgagcatgcagacaacctgaggctgaaggtcactgagggtggggagccatatcgcctctacaatttggatgtgttccagtatgagctgtacaacccaatggccttgtatgggtctgtgcctgtgctcctggcacacaaccctcatcgcgacttgggcatcttctggctcaatgctgcagagacctgggttgatatatcttccaacactgccgggaagaccctgtttgggaagatgatggactacctgcagggctctggggagaccccacagacagatgttcgctggatgtcagagactggcatcattgacgtcttcctgctgctggggccctccatctctgatgttttccggcaatatgctagtctcacaggaacccaggcgttgcccccactcttctccctcggctaccaccagagccgttggaactaccgggacgaggctgatgtgctggaagtggatcagggctttgatgatcacaacctgccctgtgatgtcatctggctagacattgaacatgctgatggcaagcggtatttcacctgggaccccagtcgcttccctcagccccgcaccatgcttgagcgcttggcttctaagaggcggaagctggtggccatcgtagacccccacatcaaggtggactccggctaccgagttcacgaggagctgcggaacctggggctgtatgttaaaacccgggatggctctgactatgagggctggtgctggccaggctcagctggttaccctgacttcactaatcccacgatgagggcctggtgggctaacatgttcagctatgacaattatgagggctcagctcccaacctctttgtctggaatgacatgaacgaaccatctgtgttcaatggtcctgaggtcaccatgctcaaggatgcccagcattatgggggctgggagcaccgggatgtgcataacatctatggcctttatgtgcacatggcgactgctgatgggctgagacagcgctctgggggcatggaacgcccctttgtcctggccagggccttcttcgctggctcccagcgctttggagccgtgtggacaggggacaacactgccgagtgggaccatttgaagatctctattcctatgtgtctcagcttggggctggtgggactttccttctgtggggcagatgggtgcttaccagccattcttccgggcacatgcccacttggacactgggcgacgagagccatggctgttaccatctcagcacaatgatataatccgagatgccttgggccagcgatattctttgctgcccttctggtacaccctcttatatcaggcccatcgggaaggcattcctgtcatgaggcccctgtgggtgcagtaccctcaggatgtgactaccttcaatatagatgatcagtacttgcttggggatgcgttgctggttcaccctgtatcagactctggagcccatggtgtccaggtctatctgcctggccaaggggaggtgtggtatgacattcaaagctaccagaagcatcatggtccccagaccctgtacctgcctgtaactctaagcagtatccctgtgttccagcgtggagggacaatcgtgcctcgatggatgcgagtgcggcggtcttcagaatgtatgaaggatgaccccatcactctctttgttgcacttagccctcagggtacagctcaaggagagctctttctggatgatgggcacacgttcaactatcagactcgccaagagttcctgctgcgtcgattctcattctctggcaacacccttgtctccagctcagcagaccctgaaggacactttgagacaccaatctggattgagcgggtggtgataataggggctggaaagccagcagctgtggtactccagacaaaaggatctccagaaagccgcctgtccttccagcatgaccctgagacctctgtgttggtcctgcgcaagcctggcatcaatgtggcatctgattggagtattcacctgcgataacccaagggatgttctgggttagggggagggaaggggagcattagtgctgagagatattctttcttctgccttggagttcggccctccccagacttcacttatgctagtctaagacccagattctgccaacatttgggcaggatgagagggctgaccctgggctccaaattcctcttgtgatctcctcacctctcccactccattgataccaactctttcccttcattcccccaacatcctgttgctctaactggagcacattcacttacgaacaccaggaaaccacagggcccttgtcgccccttctctttcccttatttaggagccctgaactcccccagagtctatccattcatgcctcttgtatgttgatgccacttcttggaagaagatgagggcaatgagttagggctccttttccccttccctcccaccagattgctctcccacctttcatttcttcctccaggctttactcccctttttatgccccaccgatacactgggaccaccccttaccccggacaggatgaatggatcaaaggagtgaggttgctaaagaacatccttttccctctcattctacccttttcctctccccgattccttgtagagctgctgcaattcttagaggggcagttctacctcctctgtccctcggcagaaagacgtttccacacctcttaggggatgcgcattaaacttcttttgcccccttcttgtcccctttgaggggcacttaagatggagaaatcagttgtggtttcagtgaatcatggtcacctgtatttattgctaggagaagcctgagggtggggggagatgatcatgtgtgctcggggttggctggaagccctgggtggggggttgggggaggactaatggggagtcggggaatatttgtgggtattttttttacttcctcttggttcccagctgtgacacgttttgatcaaaggagaaacaataaagggataaaccataaa

SEQ ID NO: 76020 - DNA, 4122 bp, Homo sapiens
aggctgtaccggcctgggatgttgggatgcggcggtagcggcagtggcggcgcgtatgaaggcggtcttgggcgtctttggtactggcttttttaggggtctgcctggggattacccttgctgtggatagaagcaactttaagacctgtgaagagagttctttctgcaagcgacagagaagcatacggccaggcctctctccataccgagccttgctggactctctacagcttggtcctgattccctcacggtccatctgatccatgaggtcaccaaggtgttgctggtgctagagcttcaggggcttcaaaagaacatgactcggttcaggattgatgagctggagcctcggcgaccccgataccgtgtaccagatgttttggtggctgatccaccaatagcccggctttctgtctctggtcgtgatgagaacagtgtggagttaaccatggctgagggaccctacaagatcatcttgacagcacggccattccgccttgacctactagaggaccgaagtcttttgcttagtgtcaatgcccgaggactcttggagtttgagcatcagagggcccctagggtctcgcaaggatcaaaagacccagctgagggcgatggggcccagcctgaggaaacacccagggatggcgacaagccagaggagactcaggggaaggcagagaaagatgagccaggagcctgggaggagacattcaaaactcactctgacagcaagccgtatggccccatgtctgtgggtttggacttctctctgccaggcatggagcatgtctatgggatccctgagcatgcagacaacctgaggctgaaggtcactgagggtggggagccatatcgcctctacaatttggatgtgttccagtatgagctgtacaacccaatggccttgtatgggtctgtgcctgtgctcctggcacacaaccctcatcgcgacttgggcatcttctggctcaatgctgcagagacctgggttgatatatcttccaacactgccgggaagaccctgtttgggaagatgatggactacctgcagggctctggggagaccccacagacagatgttcgctggatgtcagagactggcatcattgacgtcttcctgctgctggggccctccatctctgatgttttccggcaatatgctagtctcacaggaacccaggcgttgcccccactcttctccctcggctaccaccagagccgttggaactaccgggacgaggctgatgtgctggaagtggatcagggctttgatgatcacaacctgccctgtgatgtcatctggctagacattgaacatgctgatggcaagcggtatttcacctgggaccccagtcgcttccctcagccccgcaccatgcttgagcgcttggcttctaagaggcggaagctggtggccatcgtagacccccacatcaaggtggactccggctaccgagttcacgaggagctgcggaacctggggctgtatgttaaaacccgggatggctctgactatgagggctggtgctggccaggctcagctggttaccctgacttcactaatcccacgatgagggcctggtgggctaacatgttcagctatgacaattatgagggctcagctcccaacctctttgtctggaatgacatgaacgaaccatctgtgttcaatggtcctgaggtcaccatgctcaaggatgcccagcattatgggggctgggagcaccgggatgtgcataacatctatggcctttatgtgcacatggcgactgctgatgggctgagacagcgctctgggggcatggaacgcccctttgtcctggccagggccttcttcgctggctcccagcgctttggagccgtgtggacaggggacaacactgccgagtgggaccatttgaagatctctattcctatgtgtctcagcttggggctggtgggactttccttctgtggggcggatgtgggtggcttcttcaaaaacccagagccagagctgcttgtgcgctggtaccagatgggtgcttaccagccattcttccgggcacatgcccacttggacactgggcgacgagagccatggctgttaccatctcagcacaatgatataatccgagatgccttgggccagcgatattctttgctgcccttctggtacaccctcttatatcaggcccatcgggaaggcattcctgtcatgaggcccctgtgggtgcagtaccctcaggatgtgactaccttcaatatagatgatcagtacttgcttggggatgcgttgctggttcaccctgtatcagactctggagcccatggtgtccaggtctatctgcctggccaaggggaggtgtggtatgacattcaaagctaccagaagcatcatggtccccagaccctgtacctgcctgtaactctaagcagtatccctgtgttccagcgtggagggacaatcgtgcctcgatggatgcgagtgcggcggtcttcagaatgtatgaaggatgaccccatcactctctttgttgcacttagccctcagggtacagctcaaggagagctctttctggatgatgggcacacgttcaactatcagactcgccaagagttcctgctgcgtcgattctcattctctggcaacacccttgtctccagctcagcagaccctgaaggacactttgagacaccaatctggattgagcgggtggtgataataggggctggaaagccagcagctgtggtactccagacaaaaggatctccagaaagccgcctgtccttccagcatgaccctgagacctctgtgttggtcctgcgcaagcctggcatcaatgtggcatctgattggagtattcacctgcgataacccaagggatgttctgggttagggggagggaaggggagcattagtgctgagagatattctttcttctgccttggagttcggccctccccagacttcacttatgctagtctaagacccagattctgccaacatttgggcaggatgagagggctgaccctgggctccaaattcctcttgtgatctcctcacctctcccactccattgataccaactctttcccttcattcccccaacatcctgttgctctaactggagcacattcacttacgaacaccaggaaaccacagggcccttgtcgccccttctctttcccttatttaggagccctgaactcccccagagtctatccattcatgcctcttgtatgttgatgccacttcttggaagaagatgagggcaatgagttagggctccttttccccttccctcccaccagattgctctcccacctttcatttcttcctccaggctttactcccctttttatgccccaccgatacactgggaccaccccttaccccggacaggatgaatggatcaaaggagtgaggttgctaaagaacatccttttccctctcattctacccttttcctctccccgattccttgtagagctgctgcaattcttagaggggcagttctacctcctctgtccctcggcagaaagacgtttccacacctcttaggggatgcgcattaaacttcttttgcccccttcttgtcccctttgaggggcacttaagatggagaaatcagttgtggtttcagtgaatcatggtcacctgtatttattgctaggagaagcctgagggtggggggagatgatcatgtgtgctcggggttggctggaagccctgggtggggggttgggggaggactaatggggagtcggggaatatttgtgggtattttttttacttcctcttggttcccagctgtgacacgttttgatcaaaggagaaacaataaagggataaaccataaaaaaaaaaaaaaaacacaaatagacaacaaaaaaggggggcgctctaaaaacccctcggggcaattacctacccgtttcttgcaaggggccctttggagctcgtataacgcaggccggccgccgtttaccccgtgtgcgtcaacggacctgcctcttggaaggacctactcggtgggccaattggccacccaccaattaaagccgggattacctcccgtcttggtgtccccaccatgcttcccgaaatgtacgattcgttcacttttcccgcggca

SEQ ID NO: 76021 - DNA, 2275 bp, Homo sapiens
ttcacttcttagtgtcatagttggggcacagctatgacaattatgagggctcagctcccaacctctttgtctggaatgacatgaacgaaccatctgtgttcaatggtcctgaggtcaccatgctcaaggatgcccagcattatgggggctgggagcaccgggatgtgcataacatctatggcctttatgtgcacatggcgactgctgatgggctgagacagcgctctgggggcatggaacgcccctttgtcctggccagggccttcttcgctggctcccagcgctttggagccgtgtggacaggggacaacactgccgagtgggaccatttgaagatctctattcctatgtgtctcagcttggggctggtgggactttccttctgtggggcggatgtgggtggcttcttcaaaaacccagagccagagctgcttgtgcgctggtaccagatgggtgcttaccagccattcttccgggcacatgcccacttggacactgggcgacgagagccatggctgttaccatctcagcacaatgatataatccgagatgccttgggccagcgatattctttgctgcccttctggtacaccctcttatatcaggcccatcgggaaggcattcctgtcatgaggcccctgtgggtgcagtaccctcaggatgtgactaccttcaatatagatgatcagtacttgcttggggatgcgttgctggttcaccctgtatcagactctggagcccatggtgtccaggtctatctgcctggccaaggggaggtgtggtatgacattcaaagctaccagaagcatcatggtccccagaccctgtacctgcctgtaactctaagcagtatccctgtgttccagcgtggagggacaatcgtgcctcgatggatgcgagtgcggcggtcttcagaatgtatgaaggatgaccccatcactctctttgttgcacttagccctcagggtacagctcaaggagagctctttctggatgatgggcacacgttcaactatcagactcgccaagagttcctgctgcgtcgattctcattctctggcaacacccttgtctccagctcagcagaccctgaaggacactttgagacaccaatctggattgagcgggtggtgataataggggctggaaagccagcagctgtggtactccagacaaaaggatctccagaaagccgcctgtccttccagcatgaccctgagacctctgtgttggtcctgcgcaagcctggcatcaatgtggcatctgattggagtattcacctgcgataacccaagggatgttctgggttagggggagggaaggggagcattagtgctgagagatattctttcttctgccttggagttcggccctccccagacttcacttatgctagtctaagacccagattctgccaacatttgggcaggatgagagggctgaccctgggctccaaattcctcttgtgatctcctcacctctcccactccattgataccaactctttcccttcattcccccaacatcctgttgctctaactggagcacattcacttacgaacaccaggaaaccacagggcccttgtcgccccttctctttcccttatttaggagccctgaactcccccagagtctatccattcatgcctcttgtatgttgatgccacttcttggaagaagatgagggcaatgagttagggctccttttccccttccctcccaccagattgctctcccacctttcatttcttcctccaggctttactcccctttttatgccccaccgatacactgggaccaccccttaccccggacaggatgaatggatcaaaggagtgaggttgctaaagaacatccttttccctctcattctacccttttcctctccccgattccttgtagagctgctgcaattcttagaggggcagttctacctcctctgtccctcggcagaaagacgtttccacacctcttaggggatgcgcattaaacttcttttgcccccttcttgtcccctttgaggggcacttaagatggagaaatcagttgtggtttcagtgaatcatggtcacctgtatttattgctaggagaagcctgagggtggggggagatgatcatgtgtgctcggggttggctggaagccctgggtggggggttgggggaggactaatggggagtcggggaatatttgtgggtattttttttacttcctcttggttcccagctgtgacacgttttgatcaaaggagaaacaataaagggataaaccataaa

SEQ ID NO: 76022 - DNA, 2122 bp, Homo sapiens
aacggatcaggctaggtacgagaccgtgttttaatcggcacatggcgactgctgatgggctgagacagcgctctgggggcatggaacgcccctttgtcctggccagggccttcttcgctggctcccagcgctttggagccgtgtggacaggggacaacactgccgagtgggaccatttgaagatctctattcctatgtgtctcagcttggggctggtgggactttccttctgtggggcggatgtgggtggcttcttcaaaaacccagagccagagctgcttgtgcgctggtaccagatgggtgcttaccagccattcttccgggcacatgcccacttggacactgggcgacgagagccatggctgttaccatctcagcacaatgatataatccgagatgccttgggccagcgatattctttgctgcccttctggtacaccctcttatatcaggcccatcgggaaggcattcctgtcatgaggcccctgtgggtgcagtaccctcaggatgtgactaccttcaatatagatgatcagtacttgcttggggatgcgttgctggttcaccctgtatcagactctggagcccatggtgtccaggtctatctgcctggccaaggggaggtgtggtatgacattcaaagctaccagaagcatcatggtccccagaccctgtacctgcctgtaactctaagcagtatccctgtgttccagcgtggagggacaatcgtgcctcgatggatgcgagtgcggcggtcttcagaatgtatgaaggatgaccccatcactctctttgttgcacttagccctcagggtacagctcaaggagagctctttctggatgatgggcacacgttcaactatcagactcgccaagagttcctgctgcgtcgattctcattctctggcaacacccttgtctccagctcagcagaccctgaaggacactttgagacaccaatctggattgagcgggtggtgataataggggctggaaagccagcagctgtggtactccagacaaaaggatctccagaaagccgcctgtccttccagcatgaccctgagacctctgtgttggtcctgcgcaagcctggcatcaatgtggcatctgattggagtattcacctgcgataacccaagggatgttctgggttagggggagggaaggggagcattagtgctgagagatattctttcttctgccttggagttcggccctccccagacttcacttatgctagtctaagacccagattctgccaacatttgggcaggatgagagggctgaccctgggctccaaattcctcttgtgatctcctcacctctcccactccattgataccaactctttcccttcattcccccaacatcctgttgctctaactggagcacattcacttacgaacaccaggaaaccacagggcccttgtcgccccttctctttcccttatttaggagccctgaactcccccagagtctatccattcatgcctcttgtatgttgatgccacttcttggaagaagatgagggcaatgagttagggctccttttccccttccctcccaccagattgctctcccacctttcatttcttcctccaggctttactcccctttttatgccccaccgatacactgggaccaccccttaccccggacaggatgaatggatcaaaggagtgaggttgctaaagaacatccttttccctctcattctacccttttcctctccccgattccttgtagagctgctgcaattcttagaggggcagttctacctcctctgtccctcggcagaaagacgtttccacacctcttaggggatgcgcattaaacttcttttgcccccttcttgtcccctttgaggggcacttaagatggagaaatcagttgtggtttcagtgaatcatggtcacctgtatttattgctaggagaagcctgagggtggggggagatgatcatgtgtgctcggggttggctggaagccctgggtggggggttgggggaggactaatggggagtcggggaatatttgtgggtattttttttacttcctcttggttcccagctgtgacacgttttgatcaaaggagaaacaataaagggataaaccataaa

SEQ ID NO: 76023 - DNA, 1915 bp, Homo sapiens
gaggatcccccgcttggcgctttcgagttgcggatgtgggtggcttcttcaaaaacccagagccagagctgcttgtgcgctggtaccagatgggtgcttaccagccattcttccgggcacatgcccacttggacactgggcgacgagagccatggctgttaccatctcagcacaatgatataatccgagatgccttgggccagcgatattctttgctgcccttctggtacaccctcttatatcaggcccatcgggaaggcattcctgtcatgaggcccctgtgggtgcagtaccctcaggatgtgactaccttcaatatagatgatcagtacttgcttggggatgcgttgctggttcaccctgtatcagactctggagcccatggtgtccaggtctatctgcctggccaaggggaggtgtggtatgacattcaaagctaccagaagcatcatggtccccagaccctgtacctgcctgtaactctaagcagtatccctgtgttccagcgtggagggacaatcgtgcctcgatggatgcgagtgcggcggtcttcagaatgtatgaaggatgaccccatcactctctttgttgcacttagccctcagggtacagctcaaggagagctctttctggatgatgggcacacgttcaactatcagactcgccaagagttcctgctgcgtcgattctcattctctggcaacacccttgtctccagctcagcagaccctgaaggacactttgagacaccaatctggattgagcgggtggtgataataggggctggaaagccagcagctgtggtactccagacaaaaggatctccagaaagccgcctgtccttccagcatgaccctgagacctctgtgttggtcctgcgcaagcctggcatcaatgtggcatctgattggagtattcacctgcgataacccaagggatgttctgggttagggggagggaaggggagcattagtgctgagagatattctttcttctgccttggagttcggccctccccagacttcacttatgctagtctaagacccagattctgccaacatttgggcaggatgagagggctgaccctgggctccaaattcctcttgtgatctcctcacctctcccactccattgataccaactctttcccttcattcccccaacatcctgttgctctaactggagcacattcacttacgaacaccaggaaaccacagggcccttgtcgccccttctctttcccttatttaggagccctgaactcccccagagtctatccattcatgcctcttgtatgttgatgccacttcttggaagaagatgagggcaatgagttagggctccttttccccttccctcccaccagattgctctcccacctttcatttcttcctccaggctttactcccctttttatgccccaccgatacactgggaccaccccttaccccggacaggatgaatggatcaaaggagtgaggttgctaaagaacatccttttccctctcattctacccttttcctctccccgattccttgtagagctgctgcaattcttagaggggcagttctacctcctctgtccctcggcagaaagacgtttccacacctcttaggggatgcgcattaaacttcttttgcccccttcttgtcccctttgaggggcacttaagatggagaaatcagttgtggtttcagtgaatcatggtcacctgtatttattgctaggagaagcctgagggtggggggagatgatcatgtgtgctcggggttggctggaagccctgggtggggggttgggggaggactaatggggagtcggggaatatttgtgggtattttttttacttcctcttggttcccagctgtgacacgttttgatcaaaggagaaacaataaagggataaaccataaa

SEQ ID NO: 76024 - DNA, 3742 bp, Homo sapiens
aggctgtaccggcctgggatgttgggatgcggcggtagcggcagtggcggcgcgtatgaaggcggtcttgggcgtctttggtactggcttttttaggggtctgcctggggattacccttgctgtggatagaagcaactttaagacctgtgaagagagttctttctgcaagcgacagagaagcatacggccaggcctctctccataccgagccttgctggactctctacagcttggtcctgattccctcacggtccatctgatccatgaggtcaccaaggtgttgctggtgctagagcttcaggggcttcaaaagaacatgactcggttcaggattgatgagctggagcctcggcgaccccgataccgtgtaccagatgttttggtggctgatccaccaatagcccggctttctgtctctggtcgtgatgagaacagtgtggagttaaccatggctgagggaccctacaagatcatcttgacagcacggccattccgccttgacctactagaggaccgaagtcttttgcttagtgtcaatgcccgaggactcttggagtttgagcatcagagggcccctagggtctcgcaaggatcaaaagacccagctgagggcgatggggcccagcctgaggaaacacccagggatggcgacaagccagaggagactcaggggaaggcagagaaagatgagccaggagcctgggaggagacattcaaaactcactctgacagcaagccgtatggccccatgtctgtgggtttggacttctctctgccaggcatggagcatgtctatgggatccctgagcatgcagacaacctgaggctgaaggtcactgagggtggggagccatatcgcctctacaatttggatgtgttccagtatgagctgtacaacccaatggccttgtatgggtctgtgcctgtgctcctggcacacaaccctcatcgcgacttgggcatcttctggctcaatgctgcagagacctgggttgatatatcttccaacactgccgggaagaccctgtttgggaagatgatggactacctgcagggctctggggagaccccacagacagatgttcgctggatgtcagagactggcatcattgacgtcttcctgctgctggggccctccatctctgatgttttccggcaatatgctagtctcacaggaacccaggcgttgcccccactcttctccctcggctaccaccagagccgttggaactaccgggacgaggctgatgtgctggaagtggatcagggctttgatgatcacaacctgccctgtgatgtcatctggctagacattgaacatgctgatggcaagcggtatttcacctgggaccccagtcgcttccctcagccccgcaccatgcttgagcgcttggcttctaagaggcggaagctggtggccatcgtagacccccacatcaaggtggactccggctaccgagttcacgaggagctgcggaacctggggctgtatgttaaaacccgggatggctctgactatgagggctggtgctggccaggctcagctggttaccctgacttcactaatcccacgatgagggcctggtgggctaacatgttcagctatgacaattatgagggctcagctcccaacctctttgtctggaatgacatgaacgaaccatctgtgttcaatggtcctgaggtcaccatgctcaaggatgcccagcattatgggggctgggagcaccgggatgtgcataacatctatggcctttatgtgcacatggcgactgctgatgggctgagacagcgctctgggggcatggaacgcccctttgtcctggccagggccttcttcgctggctcccagcgctttggagccgtgtggacaggggacaacactgccgagtgggaccatttgaagatctctattcctatgtgtctcagcttggggctggtgggactttccttctgtggggcggatgtgggtggcttcttcaaaaacccagagccagagctgcttgtgcgctggtaccagatgggtgcttaccagccattcttccgggcacatgcccacttggacactgggcgacgagagccatggctgttaccatctcagcacaatgatataatccgagatgccttgggccagcgatattctttgctgcccttctggtacaccctcttatatcaggcccatcgggaaggcattcctgtcatgaggcccctgtgggtgcagtaccctcaggatgtgactaccttcaatatagatgatcagtacttgcttggggatgcgttgctggttcaccctgtatcagactctggagcccatggtgtccaggtctatctgcctggccaaggggaggtgtggtatgacattcaaagctaccagaagcatcatggtccccagaccctgtacctgcctgtaactctaagcagtatccctgtgttccagcgtggagggacaatcgtgcctcgatggatgcgagtgcggcggtcttcagaatgtatgaaggatgaccccatcactctctttgttgcacttagccctcagggtacagctcaaggagagctctttctggatgatgggcacacgttcaactatcagactcgccaagagttcctgctgcgtcgattctcattctctggcaacacccttgtctccagctcagcagaccctgaaggacactttgagacaccaatctggattgagcgggtggtgataataggggctggaaagccagcagctgtggtactccagacaaaaggatctccagaaagccgcctgtccttccagcatgaccctgagacctctgtgttggtcctgcgcaagcctggcatcaatgtggcatctgattggagtattcacctgcgataacccaagggatgttctgggttagggggagggaaggggagcattagtgctgagagatattctttcttctgccttggagttcggccctccccagacttcacttatgctagtctaagacccagattctgccaacatttgggcaggatgagagggctgaccctgggctccaaattcctcttgtgatctcctcacctctcccactccattgataccaactctttcccttcattcccccaacatcctgttgctctaactggagcacattcacttacgaacaccaggaaaccacagggcccttgtcgccccttctctttcctccccttccctcccaccagattgctctcccacctttcatttcttcctccaggctttactcccctttttatgccccaccgatacactgggaccaccccttaccccggacaggatgaatggatcaaaggagtgaggttgctaaagaacatccttttccctctcattctacccttttcctctccccgattccttgtagagctgctgcaattcttagaggggcagttctacctcctctgtccctcggcagaaagacgtttccacacctcttaggggatgcgcattaaacttcttttgcccccttcttgtcccctttgaggggcacttaagatggagaaatcagttgtggtttcagtgaatcatggtcacctgtatttattgctaggagaagcctgagggtggggggagatgatcatgtgtgctcggggttggctggaagccctgggtggggggttgggggaggactaatggggagtcggggaatatttgtgggtattttttttacttcctcttggttcccagctgtgacacgttttgatcaaaggagaaacaataaagggataaaccataaa

SEQ ID NO: 76025 - DNA, 1865 bp, Homo sapiens
cattccttctgtggggcggatgtggtctcacgagctgcttgtgcgctggtaccagatgggtgcttaccagtcacatgcttggacactgggcgacgagagccatggctgttaccatctcagcacaatgatataatccgagatgccttgggccagcgatattctttgctgcccttctggtacaccctcttatatcaggcccatcgggaaggcattcctgtcatgaggcccctgtgggtgcagtaccctcaggatgtgactaccttcaatatagatgatcagtacttgcttggggatgcgttgctggttcaccctgtatcagactctggagcccatggtgtccaggtctatctgcctggccaaggggaggtgtggtatgacattcaaagctaccagaagcatcatggtccccagaccctgtacctgcctgtaactctaagcagtatccctgtgttccagcgtggagggacaatcgtgcctcgatggatgcgagtgcggcggtcttcagaatgtatgaaggatgaccccatcactctctttgttgcacttagccctcagggtacagctcaaggagagctctttctggatgatgggcacacgttcaactatcagactcgccaagagttcctgctgcgtcgattctcattctctggcaacacccttgtctccagctcagcagaccctgaaggacactttgagacaccaatctggattgagcgggtggtgataataggggctggaaagccagcagctgtggtactccagacaaaaggatctccagaaagccgcctgtccttccagcatgaccctgagacctctgtgttggtcctgcgcaagcctggcatcaatgtggcatctgattggagtattcacctgcgataacccaagggatgttctgggttagggggagggaaggggagcattagtgctgagagatattctttcttctgccttggagttcggccctccccagacttcacttatgctagtctaagacccagattctgccaacatttgggcaggatgagagggctgaccctgggctccaaattcctcttgtgatctcctcacctctcccactccattgataccaactctttcccttcattcccccaacatcctgttgctctaactggagcacattcacttacgaacaccaggaaaccacagggcccttgtcgccccttctctttcccttatttaggagccctgaactcccccagagtctatccattcatgcctcttgtatgttgatgccacttcttggaagaagatgagggcaatgagttagggctccttttccccttccctcccaccagattgctctcccacctttcatttcttcctccaggctttactcccctttttatgccccaccgatacactgggaccaccccttaccccggacaggatgaatggatcaaaggagtgaggttgctaaagaacatccttttccctctcattctacccttttcctctccccgattccttgtagagctgctgcaattcttagaggggcagttctacctcctctgtccctcggcagaaagacgtttccacacctcttaggggatgcgcattaaacttcttttgcccccttcttgtcccctttgaggggcacttaagatggagaaatcagttgtggtttcagtgaatcatggtcacctgtatttattgctaggagaagcctgagggtggggggagatgatcatgtgtgctcggggttggctggaagccctgggtggggggttgggggaggactaatggggagtcggggaatatttgtgggtattttttttacttcctcttggttcccagctgtgacacgttttgatcaaaggagaaacaataaagggataaaccataaa

SEQ ID NO: 76026 - DNA, 3761 bp, Homo sapiens
  misc_feature (3629)..(3629): n is a, c, g, or t
  misc_feature (3656)..(3656): n is a, c, g, or t
  misc_feature (3659)..(3659): n is a, c, g, or t
  misc_feature (3663)..(3663): n is a, c, g, or t
  misc_feature (3674)..(3674): n is a, c, g, or t
  misc_feature (3683)..(3683): n is a, c, g, or t
  misc_feature (3691)..(3691): n is a, c, g, or t
  misc_feature (3710)..(3710): n is a, c, g, or t
  misc_feature (3713)..(3713): n is a, c, g, or t
aggctgtaccggcctgggatgttgggatgcggcggtagcggcagtggcggcgcgtatgaaggcggtcttgggcgtctttggtactggcttttttaggggtctgcctggggattacccttgctgtggatagaagcaactttaagacctgtgaagagagttctttctgcaagcgacagagaagcatacggccaggcctctctccataccgagccttgctggactctctacagcttggtcctgattccctcacggtccatctgatccatgaggtcaccaaggtgttgctggtgctagagcttcaggggcttcaaaagaacatgactcggttcaggattgatgagctggagcctcggcgaccccgataccgtgtaccagatgttttggtggctgatccaccaatagcccggctttctgtctctggtcgtgatgagaacagtgtggagttaaccatggctgagggaccctacaagatcatcttgacagcacggccattccgccttgacctactagaggaccgaagtcttttgcttagtgtcaatgcccgaggactcttggagtttgagcatcagagggcccctagggtctcgcaaggatcaaaagacccagctgagggcgatggggcccagcctgaggaaacacccagggatggcgacaagccagaggagactcaggggaaggcagagaaagatgagccaggagcctgggaggagacattcaaaactcactctgacagcaagccgtatggccccatgtctgtgggtttggacttctctctgccaggcatggagcatgtctatgggatccctgagcatgcagacaacctgaggctgaaggtcactgagggtggggagccatatcgcctctacaatttggatgtgttccagtatgagctgtacaacccaatggccttgtatgggtctgtgcctgtgctcctggcacacaaccctcatcgcgacttgggcatcttctggctcaatgctgcagagacctgggttgatatatcttccaacactgccgggaagaccctgtttgggaagatgatggactacctgcagggctctggggagaccccacagacagatgttcgctggatgtcagagactggcatcattgacgtcttcctgctgctggggccctccatctctgatgttttccggcaatatgctagtctcacaggaacccaggcgttgcccccactcttctccctcggctaccaccagagccgttggaactaccgggacgaggctgatgtgctggaagtggatcagggctttgatgatcacaacctgccctgtgatgtcatctggctagacattgaacatgctgatggcaagcggtatttcacctgggaccccagtcgcttccctcagccccgcaccatgcttgagcgcttggcttctaagaggcggaagctggtggccatcgtagacccccacatcaaggtggactccggctaccgagttcacgaggagctgcggaacctggggctgtatgttaaaacccgggatggctctgactatgagggctggtgctggccaggctcagctggttaccctgacttcactaatcccacgatgagggcctggtgggctaacatgttcagctatgacaattatgagggctcagctcccaacctctttgtctggaatgacatgaacgaaccatctgtgttcaatggtcctgaggtcaccatgctcaaggatgcccagcattatgggggctgggagcaccgggatgtgcataacatctatggcctttatgtgcacatggcgactgctgatgggctgagacagcgctctgggggcatggaacgcccctttgtcctggccagggccttcttcgctggctcccagcgctttggagccgtgtggacaggggacaacactgccgagtgggaccatttgaagatctctattcctatgtgtctcagcttggggctggtgggactttccttctgtggggcggatgtgggtggcttcttcaaaaacccagagccagagctgcttgtgcgctggtaccagatgggtgcttaccagccattcttccgggcacatgcccacttggacactgggcgacgagagccatggctgttaccatctcagcacaatgatataatccgagatgccttgggccagcgatattctttgctgcccttctggtacaccctcttatatcaggcccatcgggaaggcattcctgtcatgaggcccctgtgggtgcagtaccctcaggatgtgactaccttcaatatagatgatcagtacttgcttggggatgcgttgctggttcaccctgtatcagactctggagcccatggtgtccaggtctatctgcctggccaaggggaggtgtggtatgacattcaaagctaccagaagcatcatggtccccagaccctgtacctgcctgtaactctaagcagtatccctgtgttccagcgtggagggacaatcgtgcctcgatggatgcgagtgcggcggtcttcagaatgtatgaaggatgaccccatcactctctttgttgcacttagccctcagggtacagctcaaggagagctctttctggatgatgggcacacgttcaactatcagactcgccaagagttcctgctgcgtcgattctcattctctggcaacacccttgtctccagctcagcagaccctgaaggacactttgagacaccaatctggattgagcgggtggtgataataggggctggaaagccagcagctgtggtactccagacaaaaggatctccagaaagccgcctgtccttccagcatgaccctgagacctctgtgttggtcctgcgcaagcctggcatcaatgtggcatctgattggagtattcacctgcgataacccaagggatgttctgggttagggggagggaaggggagcattagtgctgagagatattctttcttctgccttggagttcggccctccccagacttcacttatgctagtctaagacccagattctgccaacatttgggcaggatgagagggctgaccctgggctccaaattcctcttgtgatctcctcacctctcccactccattgataccaactctttcccttcattcccccaacatcctgttgctctaactggagcacattcacttacgaacaccaggaaaccacagggcccttgtcgccccttctctttcccttatttaggagccctgaactcccccagagtctatccattcatgcctcttgtatgttgatgccacttcttggaagaagatgagggcaatgagttagggctccttttccccttccctcccaccagattgctctcccacctttcatttcttcctccaggctttactcccctttttatgccccaccgatacactgggaccaccccttaccccggacaggatgaatggatcaaaggagtgaggttgctaaagaacatccttttccctctcattctacccttttcctctccccgattccttgtagagctgctgcaattcttagaggggcagttctacctcctctgtccctcggcagaaagacgtttccacacctcttaggggatgcgcattaaacttcttttgcccccttcttgtcccctttgaggggcacttaagatgcgaaccgtggggtccggatcnggcccggttttgtggaaccgggggggncgncgtngccggtgtggnccggggggnggggcacngggcgggatggggtttccncgncccggggggcggggccgggctcaccaacaacacagcgtggggggggtc

SEQ ID NO: 76027 - DNA, 1717 bp, Homo sapiens
ctgactacgggctcattcgtatacagtgccctactctgtggactagtgattgcctgatggatgacgtcccctggtgtgcgtgcagtcaccctcatagcatgtgactaccttgaatcactaggatgatcgagcacttgcttggggatgcgttgctggttcaccctgtatcagactctggagcccatggtgtccaggtctatctgcctggccaaggggaggtgtggtatgacattcaaagctaccagaagcatcatggtccccagaccctgtacctgcctgtaactctaagcagtatccctgtgttccagcgtggagggacaatcgtgcctcgatggatgcgagtgcggcggtcttcagaatgtatgaaggatgaccccatcactctctttgttgcacttagccctcagggtacagctcaaggagagctctttctggatgatgggcacacgttcaactatcagactcgccaagagttcctgctgcgtcgattctcattctctggcaacacccttgtctccagctcagcagaccctgaaggacactttgagacaccaatctggattgagcgggtggtgataataggggctggaaagccagcagctgtggtactccagacaaaaggatctccagaaagccgcctgtccttccagcatgaccctgagacctctgtgttggtcctgcgcaagcctggcatcaatgtggcatctgattggagtattcacctgcgataacccaagggatgttctgggttagggggagggaaggggagcattagtgctgagagatattctttcttctgccttggagttcggccctccccagacttcacttatgctagtctaagacccagattctgccaacatttgggcaggatgagagggctgaccctgggctccaaattcctcttgtgatctcctcacctctcccactccattgataccaactctttcccttcattcccccaacatcctgttgctctaactggagcacattcacttacgaacaccaggaaaccacagggcccttgtcgccccttctctttcccttatttaggagccctgaactcccccagagtctatccattcatgcctcttgtatgttgatgccacttcttggaagaagatgagggcaatgagttagggctccttttccccttccctcccaccagattgctctcccacctttcatttcttcctccaggctttactcccctttttatgccccaccgatacactgggaccaccccttaccccggacaggatgaatggatcaaaggagtgaggttgctaaagaacatccttttccctctcattctacccttttcctctccccgattccttgtagagctgctgcaattcttagaggggcagttctacctcctctgtccctcggcagaaagacgtttccacacctcttaggggatgcgcattaaacttcttttgcccccttcttgtcccctttgaggggcacttaagatggagaaatcagttgtggtttcagtgaatcatggtcacctgtatttattgctaggagaagcctgagggtggggggagatgatcatgtgtgctcggggttggctggaagccctgggtggggggttgggggaggactaatggggagtcggggaatatttgtgggtattttttttacttcctcttggttcccagctgtgacacgttttgatcaaaggagaaacaataaagggataaaccataaa

SEQ ID NO: 76028 - DNA, 3774 bp, Homo sapiens
aggctgtaccggcctgggatgttgggatgcggcggtagcggcagtggcggcgcgtatgaaggcggtcttgggcgtctttggtactggcttttttaggggtctgcctggggattacccttgctgtggatagaagcaactttaagacctgtgaagagagttctttctgcaagcgacagagaagcatacggccaggcctctctccataccgagccttgctggactctctacagcttggtcctgattccctcacggtccatctgatccatgaggtcaccaaggtgttgctggtgctagagcttcaggggcttcaaaagaacatgactcggttcaggattgatgagctggagcctcggcgaccccgataccgtgtaccagatgttttggtggctgatccaccaatagcccggctttctgtctctggtcgtgatgagaacagtgtggagttaaccatggctgagggaccctacaagatcatcttgacagcacggccattccgccttgacctactagaggaccgaagtcttttgcttagtgtcaatgcccgaggactcttggagtttgagcatcagagggcccctagggtctcgcaaggatcaaaagacccagctgagggcgatggggcccagcctgaggaaacacccagggatggcgacaagccagaggagactcaggggaaggcagagaaagatgagccaggagcctgggaggagacattcaaaactcactctgacagcaagccgtatggccccatgtctgtgggtttggacttctctctgccaggcatggagcatgtctatgggatccctgagcatgcagacaacctgaggctgaaggtcactgagggtggggagccatatcgcctctacaatttggatgtgttccagtatgagctgtacaacccaatggccttgtatgggtctgtgcctgtgctcctggcacacaaccctcatcgcgacttgggcatcttctggctcaatgctgcagagacctgggttgatatatcttccaacactgccgggaagaccctgtttgggaagatgatggactacctgcagggctctggggagaccccacagacagatgttcgctggatgtcagagactggcatcattgacgtcttcctgctgctggggccctccatctctgatgttttccggcaatatgctagtctcacaggaacccaggcgttgcccccactcttctccctcggctaccaccagagccgttggaactaccgggacgaggctgatgtgctggaagtggatcagggctttgatgatcacaacctgccctgtgatgtcatctggctagacattgaacatgctgatggcaagcggtatttcacctgggaccccagtcgcttccctcagccccgcaccatgcttgagcgcttggcttctaagaggcggaagctggtggccatcgtagacccccacatcaaggtggactccggctaccgagttcacgaggagctgcggaacctggggctgtatgttaaaacccgggatggctctgactatgagggctggtgctggccaggctcagctggttaccctgacttcactaatcccacgatgagggcctggtgggctaacatgttcagctatgacaattatgagggctcagctcccaacctctttgtctggaatgacatgaacgaaccatctgtgttcaatggtcctgaggtcaccatgctcaaggatgcccagcattatgggggctgggagcaccgggatgtgcataacatctatggcctttatgtgcacatggcgactgctgatgggctgagacagcgctctgggggcatggaacgcccctttgtcctggccagggccttcttcgctggctcccagcgctttggagccgtgtggacaggggacaacactgccgagtgggaccatttgaagatctctattcctatgtgtctcagcttggggctggtgggactttccttctgtggggcggatgtgggtggcttcttcaaaaacccagagccagagctgcttgtgcgctggtaccagatgggtgcttaccagccattcttccgggcacatgcccacttggacactgggcgacgagagccatggctgttaccatctcagcacaatgatataatccgagatgccttgggccagcgatattctttgctgcccttctggtacaccctcttatatcaggcccatcgggaaggcattcctgtcatgaggcccctgtgggtgcagtaccctcaggatgtgactaccttcaatatagatgatcagtacttgcttggggatgcgttgctggttcaccctgtatcagactctggagcccatggtgtccaggtctatctgcctggccaaggggaggtgtggtatgacattcaaagctaccagaagcatcatggtccccagaccctgtacctgcctgtaactctaagcagtatccctgtgttccagcgtggagggacaatcgtgcctcgatggatgcgagtgcggcggtcttcagaatgtatgaaggatgaccccatcactctctttgttgcacttagccctcagggtacagctcaaggagagctctttctggatgatgggcacacgttcaactatcagactcgccaagagttcctgctgcgtcgattctcattctctggcaacacccttgtctccagctcagcagaccctgaaggacactttgagacaccaatctggattgagcgggtggtgataataggggctggaaagccagcagctgtggtactccagacaaaaggatctccagaaagccgcctgtccttccagcatgaccctgagacctctgtgttggtcctgcgcaagcctggcatcaatgtggcatctgattggagtattcacctgcgataacccaagggatgttctgggttagggggagggaaggggagcattagtgctgagagatattctttcttctgccttggagttcggccctccccagacttcacttatgctagtctaagacccagattctgccaacatttgggcaggatgagagggctgaccctgggctccaaattcctcttgtgatctcctcacctctcccactccattgataccaactctttcccttcattcccccaacatcctgttgctctaactggagcacattcacttacgaacaccaggaaaccacagggcccttgtcgccccttctctttcccttatttaggagccctgaactcccccagagtctatccattcatgcctcttgtatgttgatgccacttcttggaagaagatgagggcaatgagttagggctccttttccccttccctcccaccagattgctctcccacctttcatttcttcctccaggctttactcccctttttatgccccaccgatacactgggacctacccttttcctctccccgattccttgtagagctgctgcaattcttagaggggcagttctacctcctctgtccctcggcagaaagacgtttccacacctcttaggggatgcgcattaaacttcttttgcccccttcttgtcccctttgaggggcacttaagatggagaaatcagttgtggtttcagtgaatcatggtcacctgtatttattgctaggagaagcctgagggtggggggagatgatcatgtgtgctcggggttggctggaagccctgggtggggggttgggggaggactaatggggagtcggggaatatttgtgggtattttttttacttcctcttggttcccagctgtgacacgttttgatcaaaggagaaacaataaagggataaaccataaa

SEQ ID NO: 76029 - DNA, 3612 bp, Homo sapiens
aggctgtaccggcctgggatgttgggatgcggcggtagcggcagtggcggcgcgtatgaaggcggtcttgggcgtctttggtactggcttttttaggggtctgcctggggattacccttgctgtggatagaagcaactttaagacctgtgaagagagttctttctgcaagcgacagagaagcatacggccaggcctctctccataccgagccttgctggactctctacagcttggtcctgattccctcacggtccatctgatccatgaggtcaccaaggtgttgctggtgctagagcttcaggggcttcaaaagaacatgactcggttcaggattgatgagctggagcctcggcgaccccgataccgtgtaccagatgttttggtggctgatccaccaatagcccggctttctgtctctggtcgtgatgagaacagtgtggagttaaccatggctgagggaccctacaagatcatcttgacagcacggccattccgccttgacctactagaggaccgaagtcttttgcttagtgtcaatgcccgaggactcttggagtttgagcatcagagggcccctagggtctcgcaaggatcaaaagacccagctgagggcgatggggcccagcctgaggaaacacccagggatggcgacaagccagaggagactcaggggaaggcagagaaagatgagccaggagcctgggaggagacattcaaaactcactctgacagcaagccgtatggccccatgtctgtgggtttggacttctctctgccaggcatggagcatgtctatgggatccctgagcatgcagacaacctgaggctgaaggtcactgagggtggggagccatatcgcctctacaatttggatgtgttccagtatgagctgtacaacccaatggccttgtatgggtctgtgcctgtgctcctggcacacaaccctcatcgcgacttgggcatcttctggctcaatgctgcagagacctgggttgatatatcttccaacactgccgggaagaccctgtttgggaagatgatggactacctgcagggctctggggagaccccacagacagatgttcgctggatgtcagagactggcatcattgacgtcttcctgctgctggggccctccatctctgatgttttccggcaatatgctagtctcacaggaacccaggcgttgcccccactcttctccctcggctaccaccagagccgttggaactaccgggacgaggctgatgtgctggaagtggatcagggctttgatgatcacaacctgccctgtgatgtcatctggctagacattgaacatgctgatggcaagcggtatttcacctgggaccccagtcgcttccctcagccccgcaccatgcttgagcgcttggcttctaagaggcggaagctggtggccatcgtagacccccacatcaaggtggactccggctaccgagttcacgaggagctgcggaacctggggctgtatgttaaaacccgggatggctctgactatgagggctggtgctggccaggctcagctggttaccctgacttcactaatcccacgatgagggcctggtgggctaacatgttcagctatgacaattatgagggctcagctcccaacctctttgtctggaatgacatgaacgaaccatctgtgttcaatggtcctgaggtcaccatgctcaaggatgcccagcattatgggggctgggagcaccgggatgtgcataacatctatggcctttatgtgcacatggcgactgctgatgggctgagacagcgctctgggggcatggaacgcccctttgtcctggccagggccttcttcgctggctcccagcgctttggagccgtgtggacaggggacaacactgccgagtgggaccatttgaagatctctattcctatgtgtctcagcttggggctggtgggactttccttctgtggggcggatgtgggtggcttcttcaaaaacccagagccagagctgcttgtgcgctggtaccagatgggtgcttaccagccattcttccgggcacatgcccacttggacactgggcgacgagagccatggctgttaccatctcagcacaatgatataatccgagatgccttgggccagcgatattctttgctgcccttctggtacaccctcttatatcaggcccatcgggaaggcattcctgtcatgaggcccctgtgggtgcagtaccctcaggatgtgactaccttcaatatagatgatcagtacttgcttggggatgcgttgctggttcaccctgtatcagactctggagcccatggtgtccaggtctatctgcctggccaaggggaggtgtggtatgacattcaaagctaccagaagcatcatggtccccagaccctgtacctgcctgtaactctaagcagtatccctgtgttccagcgtggagggacaatcgtgcctcgatggatgcgagtgcggcggtcttcagaatgtatgaaggatgaccccatcactctctttgttgcacttagccctcagggtacagctcaaggagagctctttctggatgatgggcacacgttcaactatcagactcgccaagagttcctgctgcgtcgattctcattctctggcaacacccttgtctccagctcagcagaccctgaaggacactttgagacaccaatctggattgagcgggtggtgataataggggctggaaagccagcagctgtggtactccagacaaaaggatctccagaaagccgcctgtccttccagcatgaccctgagacctctgtgttggtcctgcgcaagcctggcatcaatgtggcatctgattggagtattcacctgcgataacccaagggatgttctgggttagggggagggaaggggagcattagtgctgagagatattctttcttctgccttggagttcggccctccccagacttcacttatgctagtctaagacccagattctgccaacatttgggcaggatgagagggctgaccctgggctccaaattcctcttgtgatctcctcacctctcccactccattgataccaactcttttcatttcttcctccaggctttactcccctttttatgccccaccgatacactgggaccaccccttaccccggacaggatgaatggatcaaaggagtgaggttgctaaagaacatccttttccctctcattctacccttttcctctccccgattccttgtagagctgctgcaattcttagaggggcagttctacctcctctgtccctcggcagaaagacgtttccacacctcttaggggatgcgcattaaacttcttttgcccccttcttgtcccctttgaggggcacttaagatggagaaatcagttgtggtttcagtgaatcatggtcacctgtatttattgctaggagaagcctgagggtggggggagatgatcatgtgtgctcggggttggctggaagccctgggtggggggttgggggaggactaatggggagtcggggaatatttgtgggtattttttttacttcctcttggttcccagctgtgacacgttttgatcaaaggagaaacaataaagggataaaccataaa

SEQ ID NO: 76030 - DNA, 3416 bp, Homo sapiens
aggctgtaccggcctgggatgttgggatgcggcggtagcggcagtggcggcgcgtatgaaggcggtcttgggcgtctttggtactggcttttttaggggtctgcctggggattacccttgctgtggatagaagcaactttaagacctgtgaagagagttctttctgcaagcgacagagaagcatacggccaggcctctctccataccgagccttgctggactctctacagcttggtcctgattccctcacggtccatctgatccatgaggtcaccaaggtgttgctggtgctagagcttcaggggcttcaaaagaacatgactcggttcaggattgatgagctggagcctcggcgaccccgataccgtgtaccagatgttttggtggctgatccaccaatagcccggctttctgtctctggtcgtgatgagaacagtgtggagttaaccatggctgagggaccctacaagatcatcttgacagcacggccattccgccttgacctactagaggaccgaagtcttttgcttagtgtcaatgcccgaggactcttggagtttgagcatcagagggcccctagggtctcgcaaggatcaaaagacccagctgagggcgatggggcccagcctgaggaaacacccagggatggcgacaagccagaggagactcaggggaaggcagagaaagatgagccaggagcctgggaggagacattcaaaactcactctgacagcaagccgtatggccccatgtctgtgggtttggacttctctctgccaggcatggagcatgtctatgggatccctgagcatgcagacaacctgaggctgaaggtcactgagggtggggagccatatcgcctctacaatttggatgtgttccagtatgagctgtacaacccaatggccttgtatgggtctgtgcctgtgctcctggcacacaaccctcatcgcgacttgggcatcttctggctcaatgctgcagagacctgggttgatatatcttccaacactgccgggaagaccctgtttgggaagatgatggactacctgcagggctctggggagaccccacagacagatgttcgctggatgtcagagactggcatcattgacgtcttcctgctgctggggccctccatctctgatgttttccggcaatatgctagtctcacaggaacccaggcgttgcccccactcttctccctcggctaccaccagagccgttggaactaccgggacgaggctgatgtgctggaagtggatcagggctttgatgatcacaacctgccctgtgatgtcatctggctagacattgaacatgctgatggcaagcggtatttcacctgggaccccagtcgcttccctcagccccgcaccatgcttgagcgcttggcttctaagaggcggaagctggtggccatcgtagacccccacatcaaggtggactccggctaccgagttcacgaggagctgcggaacctggggctgtatgttaaaacccgggatggctctgactatgagggctggtgctggccaggctcagctggttaccctgacttcactaatcccacgatgagggcctggtgggctaacatgttcagctatgacaattatgagggctcagctcccaacctctttgtctggaatgacatgaacgaaccatctgtgttcaatggtcctgaggtcaccatgctcaaggatgcccagcattatgggggctgggagcaccgggatgtgcataacatctatggcctttatgtgcacatggcgactgctgatgggctgagacagcgctctgggggcatggaacgcccctttgtcctggccagggccttcttcgctggctcccagcgctttggagccgtgtggacaggggacaacactgccgagtgggaccatttgaagatctctattcctatgtgtctcagcttggggctggtgggactttccttctgtggggcggatgtgggtggcttcttcaaaaacccagagccagagctgcttgtgcgctggtaccagatgggtgcttaccagccattcttccgggcacatgcccacttggacactgggcgacgagagccatggctgttaccatctcagcacaatgatataatccgagatgccttgggccagcgatattctttgctgcccttctggtacaccctcttatatcaggcccatcgggaaggcattcctgtcatgaggcccctgtgggtgcagtaccctcaggatgtgactaccttcaatatagatgatcagtacttgcttggggatgcgttgctggttcaccctgtatcagactctggagcccatggtgtccaggtctatctgcctggccaaggggaggtgtggtatgacattcaaagctaccagaagcatcatggtccccagaccctgtacctgcctgtaactctaagcagtatccctgtgttccagcgtggagggacaatcgtgcctcgatggatgcgagtgcggcggtcttcagaatgtatgaaggatgaccccatcactctctttgttgcacttagccctcagggtacagctcaaggagagctctttctggatgatgggcacacgttcaactatcagactcgccaagagttcctgctgcgtcgattctcattctctggcaacacccttgtctccagctcagcagaccctgaaggacactttgagacaccaatctggattgagcgggtggtgataataggggctggaaagccagcagctgtggtactccagacaaaaggatctccagaaagccgcctgtccttccagcatgaccctgagacctctgtgttggtcctgcgcaagcctggcatcaatgtggcatctgattggagtattcacctgcgataacccaagggatgttctgggttagggggagggaaggggagcattagtgctgagagatattctttcttctgccttggagttcggccctccccagacttcacttatgctagtctaagacccagattctgccaacatttgggcaggatgagagggctgaccctgggctccaaattcctcttgtgatctcctcacctctcccactccattgataccaactctttcccttcattcccccaacatcctgttgctctaactggagcacattcacttacgaacaccaggaaaccacagggcccttgtcgccccttctctttcccttatttaggagccctgaactcccccagagtctatccattcatgcctcttgtatgttgatgccacttcttggaagaagatgagggcaatgagttagggctccttttccccttccctcccaccagattgctctcccacctgatccattcatcctgtccggggtaaggggtggtcccagtgtatcggtggggcataaaaaggggagtaaagcgtggaggaagaaatgaaaggtgggaggtcgac

SEQ ID NO: 76031 - DNA, 3293 bp, Homo sapiens
aggctgtaccggcctgggatgttgggatgcggcggtagcggcagtggcggcgcgtatgaaggcggtcttgggcgtctttggtactggcttttttaggggtctgcctggggattacccttgctgtggatagaagcaactttaagacctgtgaagagagttctttctgcaagcgacagagaagcatacggccaggcctctctccataccgagccttgctggactctctacagcttggtcctgattccctcacggtccatctgatccatgaggtcaccaaggtgttgctggtgctagagcttcaggggcttcaaaagaacatgactcggttcaggattgatgagctggagcctcggcgaccccgataccgtgtaccagatgttttggtggctgatccaccaatagcccggctttctgtctctggtcgtgatgagaacagtgtggagttaaccatggctgagggaccctacaagatcatcttgacagcacggccattccgccttgacctactagaggaccgaagtcttttgcttagtgtcaatgcccgaggactcttggagtttgagcatcagagggcccctagggtctcgcaaggatcaaaagacccagctgagggcgatggggcccagcctgaggaaacacccagggatggcgacaagccagaggagactcaggggaaggcagagaaagatgagccaggagcctgggaggagacattcaaaactcactctgacagcaagccgtatggccccatgtctgtgggtttggacttctctctgccaggcatggagcatgtctatgggatccctgagcatgcagacaacctgaggctgaaggtcactgagggtggggagccatatcgcctctacaatttggatgtgttccagtatgagctgtacaacccaatggccttgtatgggtctgtgcctgtgctcctggcacacaaccctcatcgcgacttgggcatcttctggctcaatgctgcagagacctgggttgatatatcttccaacactgccgggaagaccctgtttgggaagatgatggactacctgcagggctctggggagaccccacagacagatgttcgctggatgtcagagactggcatcattgacgtcttcctgctgctggggccctccatctctgatgttttccggcaatatgctagtctcacaggaacccaggcgttgcccccactcttctccctcggctaccaccagagccgttggaactaccgggacgaggctgatgtgctggaagtggatcagggctttgatgatcacaacctgccctgtgatgtcatctggctagacattgaacatgctgatggcaagcggtatttcacctgggaccccagtcgcttccctcagccccgcaccatgcttgagcgcttggcttctaagaggcggaagctggtggccatcgtagacccccacatcaaggtggactccggctaccgagttcacgaggagctgcggaacctggggctgtatgttaaaacccgggatggctctgactatgagggctggtgctggccaggctcagctggttaccctgacttcactaatcccacgatgagggcctggtgggctaacatgttcagctatgacaattatgagggctcagctcccaacctctttgtctggaatgacatgaacgaaccatctgtgttcaatggtcctgaggtcaccatgctcaaggatgcccagcattatgggggctgggagcaccgggatgtgcataacatctatggcctttatgtgcacatggcgactgctgatgggctgagacagcgctctgggggcatggaacgcccctttgtcctggccagggccttcttcgctggctcccagcgctttggagccgtgtggacaggggacaacactgccgagtgggaccatttgaagatctctattcctatgtgtctcagcttggggctggtgggactttccttctgtggggcggatgtgggtggcttcttcaaaaacccagagccagagctgcttgtgcgctggtaccagatgggtgcttaccagccattcttccgggcacatgcccacttggacactgggcgacgagagccatggctgttaccatctcagcacaatgatataatccgagatgccttgggccagcgatattctttgctgcccttctggtacaccctcttatatcaggcccatcgggaaggcattcctgtcatgaggcccctgtgggtgcagtaccctcaggatgtgactaccttcaatatagatgatcagtacttgcttggggatgcgttgctggttcaccctgtatcagactctggagcccatggtgtccaggtctatctgcctggccaaggggagtagtgctgagagatattctttcttctgccttggagttcggccctccccagacttcacttatgctagtctaagacccagattctgccaacatttgggcaggatgagagggctgaccctgggctccaaattcctcttgtgatctcctcacctctcccactccattgataccaactctttcccttcattcccccaacatcctgttgctctaactggagcacattcacttacgaacaccaggaaaccacagggcccttgtcgccccttctctttcccttatttaggagccctgaactcccccagagtctatccattcatgcctcttgtatgttgatgccacttcttggaagaagatgagggcaatgagttagggctccttttccccttccctcccaccagattgctctcccacctttcatttcttcctccaggctttactcccctttttatgccccaccgatacactgggaccaccccttaccccggacaggatgaatggatcaaaggagtgaggttgctaaagaacatccttttccctctcattctacccttttcctctccccgattccttgtagagctgctgcaattcttagaggggcagttctacctcctctgtccctcggcagaaagacgtttccacacctcttaggggatgcgcattaaacttcttttgcccccttcttgtcccctttgaggggcacttaagatggagaaatcagttgtggtttcagtgaatcatggtcacctgtatttattgctaggagaagcctgagggtggggggagatgatcatgtgtgctcggggttggctggaagccctgggtggggggttgggggaggactaatggggagtcggggaatatttgtgggtattttttttacttcctcttggttcccagctgtgacacgttttgatcaaaggagaaacaataaagggataaaccataaa

SEQ ID NO: 76032 - DNA, 3266 bp, Homo sapiens
aggctgtaccggcctgggatgttgggatgcggcggtagcggcagtggcggcgcgtatgaaggcggtcttgggcgtctttggtactggcttttttaggggtctgcctggggattacccttgctgtggatagaagcaactttaagacctgtgaagagagttctttctgcaagcgacagagaagcatacggccaggcctctctccataccgagccttgctggactctctacagcttggtcctgattccctcacggtccatctgatccatgaggtcaccaaggtgttgctggtgctagagcttcaggggcttcaaaagaacatgactcggttcaggattgatgagctggagcctcggcgaccccgataccgtgtaccagatgttttggtggctgatccaccaatagcccggctttctgtctctggtcgtgatgagaacagtgtggagttaaccatggctgagggaccctacaagatcatcttgacagcacggccattccgccttgacctactagaggaccgaagtcttttgcttagtgtcaatgcccgaggactcttggagtttgagcatcagagggcccctagggtctcgcaaggatcaaaagacccagctgagggcgatggggcccagcctgaggaaacacccagggatggcgacaagccagaggagactcaggggaaggcagagaaagatgagccaggagcctgggaggagacattcaaaactcactctgacagcaagccgtatggccccatgtctgtgggtttggacttctctctgccaggcatggagcatgtctatgggatccctgagcatgcagacaacctgaggctgaaggtcactgagggtggggagccatatcgcctctacaatttggatgtgttccagtatgagctgtacaacccaatggccttgtatgggtctgtgcctgtgctcctggcacacaaccctcatcgcgacttgggcatcttctggctcaatgctgcagagacctgggttgatatatcttccaacactgccgggaagaccctgtttgggaagatgatggactacctgcagggctctggggagaccccacagacagatgttcgctggatgtcagagactggcatcattgacgtcttcctgctgctggggccctccatctctgatgttttccggcaatatgctagtctcacaggaacccaggcgttgcccccactcttctccctcggctaccaccagagccgttggaactaccgggacgaggctgatgtgctggaagtggatcagggctttgatgatcacaacctgccctgtgatgtcatctggctagacattgaacatgctgatggcaagcggtatttcacctgggaccccagtcgcttccctcagccccgcaccatgcttgagcgcttggcttctaagaggcggaagctggtggccatcgtagacccccacatcaaggtggactccggctaccgagttcacgaggagctgcggaacctggggctgtatgttaaaacccgggatggctctgactatgagggctggtgctggccaggctcagctggttaccctgacttcactaatcccacgatgagggcctggtgggctaacatgttcagctatgacaattatgagggctcagctcccaacctctttgtctggaatgacatgaacgaaccatctgtgttcaatggtcctgaggtcaccatgctcaaggatgcccagcattatgggggctgggagcaccgggatgtgcataacatctatggcctttatgtgcacatggcgactgctgatgggctgagacagcgctctgggggcatggaacgcccctttgtcctggccagggccttcttcgctggctcccagcgctttggagccgtgtggacaggggacaacactgccgagtgggaccatttgaagatctctattcctatgtgtctcagcttggggctggtgggactttccttctgtggggcggatgtgggtggcttcttcaaaaacccagagccagagctgcttgtgcgctggtaccagatgggtgcttaccagccattcttccgggcacatgcccacttggacactgggcgacgagagccatggctgttaccatctcagcacaatgatataatccgagatgccttgggccagcgatattctttgctgcccttctggtacaccctcttatatcaggcccatcgggaaggcattcctgtcatgaggcccctgtgggtgcagtaccctcaggatgtgactaccttcaatatagatgatcagtacttgcttggggatgcgttgctggttcaccctgtatcagactctggagcccatggtgtccaggtctatctgcctggccaaggggaggtgtggtatgacattcaaagctaccagaagcatcatggtccccagaccctgtacctgcctgtaactctaagcagtatccctgtgttccagcgtggagggacaatcgtgcctcgatggatgcgagtgcggcggtcttcagaatgtatgaaggatgaccccatcactctctttgttgcacttagccctcagggtacagctcaaggagagctctttctggatgatgggcacacgttcaactatcagactcgccaagagttcctgctgcgtcgattctcattctctggcaacacccttgtctccagctcagcagaccctgaaggacactttgagacaccaatctggattgagcgggtggtgataataggggctggaaagccagcagctgtggtactccagacaaaaggatctccagaaagccgcctgtccttccagcatgaccctgagacctctgtgttggtcctgcgcaagcctggcatcaatgtggcatctgattggagtattcacctgcgataacccaagggatgttctgggttagggggagggaaggggagcattagtgctgagagatattctttcttctgccttggagttcggccctccccagacttcacttatgctagtctaagacccagattctgccaacatttgggcaggatgagagggctgaccctgggctccaaattcctcttgtgatctcctcacctctcccactccattgataccaactctttcccttcattcccccaacatcctgttgctctaactggagcacattcacttacgaacaccaggaaaccacagggcccttgtcgccccttctctttcccttatttaggagccctgaactcccccagagtctatccattcatgcctcttgtatgtgtgcctgggaagggatccttagagtacctgcagaat

SEQ ID NO: 76033 - DNA, 1247 bp, Homo sapiens
agtaagaacagaaggggtcgtcgattatctctggcacaccttgtctccagctcagcagaccctgaaggacactttgagacaccaatctggattgagcgggtggtgataataggggctggaaagccagcagctgtggtactccagacaaaaggatctccagaaagccgcctgtccttccagcatgaccctgagacctctgtgttggtcctgcgcaagcctggcatcaatgtggcatctgattggagtattcacctgcgataacccaagggatgttctgggttagggggagggaaggggagcattagtgctgagagatattctttcttctgccttggagttcggccctccccagacttcacttatgctagtctaagacccagattctgccaacatttgggcaggatgagagggctgaccctgggctccaaattcctcttgtgatctcctcacctctcccactccattgataccaactctttcccttcattcccccaacatcctgttgctctaactggagcacattcacttacgaacaccaggaaaccacagggcccttgtcgccccttctctttcccttatttaggagccctgaactcccccagagtctatccattcatgcctcttgtatgttgatgccacttcttggaagaagatgagggcaatgagttagggctccttttccccttccctcccaccagattgctctcccacctttcatttcttcctccaggctttactcccctttttatgccccaccgatacactgggaccaccccttaccccggacaggatgaatggatcaaaggagtgaggttgctaaagaacatccttttccctctcattctacccttttcctctccccgattccttgtagagctgctgcaattcttagaggggcagttctacctcctctgtccctcggcagaaagacgtttccacacctcttaggggatgcgcattaaacttcttttgcccccttcttgtcccctttgaggggcacttaagatggagaaatcagttgtggtttcagtgaatcatggtcacctgtatttattgctaggagaagcctgagggtggggggagatgatcatgtgtgctcggggttggctggaagccctgggtggggggttgggggaggactaatggggagtcggggaatatttgtgggtattttttttacttcctcttggttcccagctgtgacacgttttgatcaaaggagaaacaataaagggataaaccataaa

SEQ ID NO: 76034 - DNA, 3386 bp, Homo sapiens
aggctgtaccggcctgggatgttgggatgcggcggtagcggcagtggcggcgcgtatgaaggcggtcttgggcgtctttggtactggcttttttaggggtctgcctggggattacccttgctgtggatagaagcaactttaagacctgtgaagagagttctttctgcaagcgacagagaagcatacggccaggcctctctccataccgagccttgctggactctctacagcttggtcctgattccctcacggtccatctgatccatgaggtcaccaaggtgttgctggtgctagagcttcaggggcttcaaaagaacatgactcggttcaggattgatgagctggagcctcggcgaccccgataccgtgtaccagatgttttggtggctgatccaccaatagcccggctttctgtctctggtcgtgatgagaacagtgtggagttaaccatggctgagggaccctacaagatcatcttgacagcacggccattccgccttgacctactagaggaccgaagtcttttgcttagtgtcaatgcccgaggactcttggagtttgagcatcagagggcccctagggtctcgcaaggatcaaaagacccagctgagggcgatggggcccagcctgaggaaacacccagggatggcgacaagccagaggagactcaggggaaggcagagaaagatgagccaggagcctgggaggagacattcaaaactcactctgacagcaagccgtatggccccatgtctgtgggtttggacttctctctgccaggcatggagcatgtctatgggatccctgagcatgcagacaacctgaggctgaaggtcactgagggtggggagccatatcgcctctacaatttggatgtgttccagtatgagctgtacaacccaatggccttgtatgggtctgtgcctgtgctcctggcacacaaccctcatcgcgacttgggcatcttctggctcaatgctgcagagacctgggttgatatatcttccaacactgccgggaagaccctgtttgggaagatgatggactacctgcagggctctggggagaccccacagacagatgttcgctggatgtcagagactggcatcattgacgtcttcctgctgctggggccctccatctctgatgttttccggcaatatgctagtctcacaggaacccaggcgttgcccccactcttctccctcggctaccaccagagccgttggaactaccgggacgaggctgatgtgctggaagtggatcagggctttgatgatcacaacctgccctgtgatgtcatctggctagacattgaacatgctgatggcaagcggtatttcacctgggaccccagtcgcttccctcagccccgcaccatgcttgagcgcttggcttctaagaggcggaagctggtggccatcgtagacccccacatcaaggtggactccggctaccgagttcacgaggagctgcggaacctggggctgtatgttaaaacccgggatggctctgactatgagggctggtgctggccaggctcagctggttaccctgacttcactaatcccacgatgagggcctggtgggctaacatgttcagctatgacaattatgagggctcagctcccaacctctttgtctggaatgacatgaacgaaccatctgtgttcaatggtcctgaggtcaccatgctcaaggatgcccagcattatgggggctgggagcaccgggatgtgcataacatctatggcctttatgtgcacatggcgactgctgatgggctgagacagcgctctgggggcatggaacgcccctttgtcctggccagggccttcttcgctggctcccagcgctttggagccgtgtggacaggggacaacactgccgagtgggaccatttgaagatctctattcctatgtgtctcagcttggggctggtgggactttccttctgtggggcggatgtgggtggcttcttcaaaaacccagagccagagctgcttgtgcgctggtaccagatgggtgcttaccagccattcttccgggcacatgcccacttggacactgggcgacgagagccatggctgttaccatctcagcacaatgatataatccgagatgccttgggccagcgatattctttgctgcccttctggtacaccctcttatatcaggcccatcgggaaggcattcctgtcatgaggcccctgtgggtgcagtaccctcaggatgtgactaccttcaatatagatgatcagtacttgcttggggatgcgttgctggttcaccctgtatcagactctggagcccatggtgtccaggtctatctgcctggccaaggggaggtgtggtatgacattcaaagctaccagaagcatcatggtccccagaccctgtacctgcctgtaactctaagcagtatccctgtgttccagcgtggagggacaatcgtgcctcgatggatgcgagtgcggcggtcttcagaatgtatgaaggatgaccccatcactctctttgttgcacttagccctcagggtacagctcaaggagagctctttctggatgatgggcacacgttcaactatcagactcgccaagagttcctgctgcgtcgattctcattctctggcaacacccttgtctccagctcagcagaccctgaaggacactttgagacaccaatctggattgagcgggtggtgataataggggctggaaagccagcagctgtggtactccagacaaaaggatctccagaaagccgcctgtccttccagcatgaccctgagacctctgtgttggtcctgcgcaagcctggcatcaatgtggcatctgattggagtattcacctgcgataacccaagggatgttctgggttagggggagggaaggggagcattagtgctgagagatattctttcttctgccttggagttcggccctccccagacttcacttatgctagtctaagacccagatttacccttttcctctccccgattccttgtagagctgctgcaattcttagaggggcagttctacctcctctgtccctcggcagaaagacgtttccacacctcttaggggatgcgcattaaacttcttttgcccccttcttgtcccctttgaggggcacttaagatggagaaatcagttgtggtttcagtgaatcatggtcacctgtatttattgctaggagaagcctgagggtggggggagatgatcatgtgtgctcggggttggctggaagccctgggtggggggttgggggaggactaatggggagtcggggaatatttgtgggtattttttttacttcctcttggttcccagctgtgacacgttttgatcaaaggagaaacaataaagggataaaccataaa

SEQ ID NO: 76035 - DNA, 2832 bp, Homo sapiens
aggctgtaccggcctgggatgttgggatgcggcggtagcggcagtggcggcgcgtatgaaggcggtcttgggcgtctttggtactggcttttttaggggtctgcctggggattacccttgctgtggatagaagcaactttaagacctgtgaagagagttctttctgcaagcgacagagaagcatacggccaggcctctctccataccgagccttgctggactctctacagcttggtcctgattccctcacggtccatctgatccatgaggtcaccaaggtgttgctggtgctagagcttcaggggcttcaaaagaacatgactcggttcaggattgatgagctggagcctcggcgaccccgataccgtgtaccagatgttttggtggctgatccaccaatagcccggctttctgtctctggtcgtgatgagaacagtgtggagttaaccatggctgagggaccctacaagatcatcttgacagcacggccattccgccttgacctactagaggaccgaagtcttttgcttagtgtcaatgcccgaggactcttggagtttgagcatcagagggcccctagggtctcgcaaggatcaaaagacccagctgagggcgatggggcccagcctgaggaaacacccagggatggcgacaagccagaggagactcaggggaaggcagagaaagatgagccaggagcctgggaggagacattcaaaactcactctgacagcaagccgtatggccccatgtctgtgggtttggacttctctctgccaggcatggagcatgtctatgggatccctgagcatgcagacaacctgaggctgaaggtcactgagggtggggagccatatcgcctctacaatttggatgtgttccagtatgagctgtacaacccaatggccttgtatgggtctgtgcctgtgctcctggcacacaaccctcatcgcgacttgggcatcttctggctcaatgctgcagagacctgggttgatatatcttccaacactgccgggaagaccctgtttgggaagatgatggactacctgcagggctctggggagaccccacagacagatgttcgctggatgtcagagactggcatcattgacgtcttcctgctgctggggccctccatctctgatgttttccggcaatatgctagtctcacaggaacccaggcgttgcccccactcttctccctcggctaccaccagagccgttggaactaccgggacgaggctgatgtgctggaagtggatcagggctttgatgatcacaacctgccctgtgatgtcatctggctagacattgaacatgctgatggcaagcggtatttcacctgggaccccagtcgcttccctcagccccgcaccatgcttgagcgcttggcttctaagaggcggaagctggtggccatcgtagacccccacatcaaggtggactccggctaccgagttcacgaggagctgcggaacctggggctgtatgttaaaacccgggatggctctgactatgagggctggtgctggccaggctcagctggttaccctgacttcactaatcccacgatgagggcctggtgggctaacatgttcagctatgacaattatgagggctcagctcccaacctctttgtctggaatgacatgaacgaaccatctgtgttcaatggtcctgaggtcaccatgctcaaggatgcccagcattatgggggctgggagcaccgggatgtgcataacatctatggcctttatgtgcacatggcgactgctgatgggctgagacagcgctctgggggcatggaacgcccctttgtcctggccagggccttcttcgctggctcccagcgctttggagccgtgtggacaggggacaacactgccgagtgggaccatttgaagatctctattcctatgtgtctcagcttggggctggtgggactttccttctgtggggcggatgtgggtggcttcttcaaaaacccagagccagagctgcttgtgcgctggtaccagatgggtgcttaccagccattcttccgggcacatgcccacttggacactgggcgacgagagccatggctgttaccatctcagcacattcacttacgaacaccaggaaaccacagggcccttgtcgccccttctctttcccttatttaggagccctgaactcccccagagtctatccattcatgcctcttgtatgttgatgccacttcttggaagaagatgagggcaatgagttagggctccttttccccttccctcccaccagattgctctcccacctttcatttcttcctccaggctttactcccctttttatgccccaccgatacactgggaccaccccttaccccggacaggatgaatggatcaaaggagtgaggttgctaaagaacatccttttccctctcattctacccttttcctctccccgattccttgtagagctgctgcaattcttagaggggcagttctacctcctctgtccctcggcagaaagacgtttccacacctcttaggggatgcgcattaaacttcttttgcccccttcttgtcccctttgaggggcacttaagatggagaaatcagttgtggtttcagtgaatcatggtcacctgtatttattgctaggagaagcctgagggtggggggagatgatcatgtgtgctcggggttggctggaagccctgggtggggggttgggggaggactaatggggagtcggggaatatttgtgggtattttttttacttcctcttggttcccagctgtgacacgttttgatcaaaggagaaacaataaagggataaaccataaa

SEQ ID NO: 76036 - DNA, 3260 bp, Homo sapiens
aggctgtaccggcctgggatgttgggatgcggcggtagcggcagtggcggcgcgtatgaaggcggtcttgggcgtctttggtactggcttttttaggggtctgcctggggattacccttgctgtggatagaagcaactttaagacctgtgaagagagttctttctgcaagcgacagagaagcatacggccaggcctctctccataccgagccttgctggactctctacagcttggtcctgattccctcacggtccatctgatccatgaggtcaccaaggtgttgctggtgctagagcttcaggggcttcaaaagaacatgactcggttcaggattgatgagctggagcctcggcgaccccgataccgtgtaccagatgttttggtggctgatccaccaatagcccggctttctgtctctggtcgtgatgagaacagtgtggagttaaccatggctgagggaccctacaagatcatcttgacagcacggccattccgccttgacctactagaggaccgaagtcttttgcttagtgtcaatgcccgaggactcttggagtttgagcatcagagggcccctagggtctcgcaaggatcaaaagacccagctgagggcgatggggcccagcctgaggaaacacccagggatggcgacaagccagaggagactcaggggaaggcagagaaagatgagccaggagcctgggaggagacattcaaaactcactctgacagcaagccgtatggccccatgtctgtgggtttggacttctctctgccaggcatggagcatgtctatgggatccctgagcatgcagacaacctgaggctgaaggtcactgagggtggggagccatatcgcctctacaatttggatgtgttccagtatgagctgtacaacccaatggccttgtatgggtctgtgcctgtgctcctggcacacaaccctcatcgcgacttgggcatcttctggctcaatgctgcagagacctgggttgatatatcttccaacactgccgggaagaccctgtttgggaagatgatggactacctgcagggctctggggagaccccacagacagatgttcgctggatgtcagagactggcatcattgacgtcttcctgctgctggggccctccatctctgatgttttccggcaatatgctagtctcacaggaacccaggcgttgcccccactcttctccctcggctaccaccagagccgttggaactaccgggacgaggctgatgtgctggaagtggatcagggctttgatgatcacaacctgccctgtgatgtcatctggctagacattgaacatgctgatggcaagcggtatttcacctgggaccccagtcgcttccctcagccccgcaccatgcttgagcgcttggcttctaagaggcggaagctggtggccatcgtagacccccacatcaaggtggactccggctaccgagttcacgaggagctgcggaacctggggctgtatgttaaaacccgggatggctctgactatgagggctggtgctggccaggctcagctggttaccctgacttcactaatcccacgatgagggcctggtgggctaacatgttcagctatgacaattatgagggctcagctcccaacctctttgtctggaatgacatgaacgaaccatctgtgttcaatggtcctgaggtcaccatgctcaaggatgcccagcattatgggggctgggagcaccgggatgtgcataacatctatggcctttatgtgcacatggcgactgctgatgggctgagacagcgctctgggggcatggaacgcccctttgtcctggccagggccttcttcgctggctcccagcgctttggagccgtgtggacaggggacaacactgccgagtgggaccatttgaagatctctattcctatgtgtctcagcttggggctggtgggactttccttctgtggggcggatgtgggtggcttcttcaaaaacccagagccagagctgcttgtgcgctggtaccagatgggtgcttaccagccattcttccgggcacatgcccacttggacactgggcgacgagagccatggctgttaccatctcagcacaatgatataatccgagatgccttgggccagcgatattctttgctgcccttctggtacaccctcttatatcaggcccatcgggaaggcattcctgtcatgaggcccctgtgggtgcagtaccctcaggatgtgactaccttcaatatagatgatcagtacttgcttggggatgcgttgctggttcaccctgtatcagactctggagcccatggtgtccaggtctatctgcctggccaaggggaggtgtggtatgacattcaaagctaccagaagcatcatggtccccagaccctgtacctgcctgtaactctaagcagtatccctgtgttccagcgtggagggacaatcgtgcctcgatggatgcgagtgcggcggtcttcagaatgtatgaaggatgaccccatcactctctttgttgcacttagccctcagggtacagctcaaggagagctctttctggatgatgggcacacgttcaactatcagactcgccaagagttcctgctgcgtcgattctcattctctggcaacacccttgtctccagctcagcagaccctgaaggacactttgagacaccaatctggattgagcgggtggtgataataggggctggaaagccagcagctgtggtactccagacaaaaggatctccagaaagccgcctgtccttccagcatgaccctgagacctctgtgttggtcctgcgcaagcctggcatcaatgtggcatctgattggagtattcacctgcgataacccaagggatgttctgggttagggggagggaaggggagcattagtgctgagagatattctttcttctgccttggagttcggccctccccagacttcacttatgctagtctaagacccagattctgccaacatttgggcaggatgagagggctgaccctgggctccaaattcctcttgtgatccccttccctcccaccagattgctctcccacctttcatttcttcctccaggctttactcccctttttatgccccaccgatacactgggaccgtggggggttgggggaggactaatggggagtcggggaatatttgtgggtattttttttacttcctcttggttcccagctgtgacacgttttgatcaaaggagaaacaataaagggataaaccataaa

SEQ ID NO: 76037 - DNA, 3078 bp, Homo sapiens
aggctgtaccggcctgggatgttgggatgcggcggtagcggcagtggcggcgcgtatgaaggcggtcttgggcgtctttggtactggcttttttaggggtctgcctggggattacccttgctgtggatagaagcaactttaagacctgtgaagagagttctttctgcaagcgacagagaagcatacggccaggcctctctccataccgagccttgctggactctctacagcttggtcctgattccctcacggtccatctgatccatgaggtcaccaaggtgttgctggtgctagagcttcaggggcttcaaaagaacatgactcggttcaggattgatgagctggagcctcggcgaccccgataccgtgtaccagatgttttggtggctgatccaccaatagcccggctttctgtctctggtcgtgatgagaacagtgtggagttaaccatggctgagggaccctacaagatcatcttgacagcacggccattccgccttgacctactagaggaccgaagtcttttgcttagtgtcaatgcccgaggactcttggagtttgagcatcagagggcccctagggtctcgcaaggatcaaaagacccagctgagggcgatggggcccagcctgaggaaacacccagggatggcgacaagccagaggagactcaggggaaggcagagaaagatgagccaggagcctgggaggagacattcaaaactcactctgacagcaagccgtatggccccatgtctgtgggtttggacttctctctgccaggcatggagcatgtctatgggatccctgagcatgcagacaacctgaggctgaaggtcactgagggtggggagccatatcgcctctacaatttggatgtgttccagtatgagctgtacaacccaatggccttgtatgggtctgtgcctgtgctcctggcacacaaccctcatcgcgacttgggcatcttctggctcaatgctgcagagacctgggttgatatatcttccaacactgccgggaagaccctgtttgggaagatgatggactacctgcagggctctggggagaccccacagacagatgttcgctggatgtcagagactggcatcattgacgtcttcctgctgctggggccctccatctctgatgttttccggcaatatgctagtctcacaggaacccaggcgttgcccccactcttctccctcggctaccaccagagccgttggaactaccgggacgaggctgatgtgctggaagtggatcagggctttgatgatcacaacctgccctgtgatgtcatctggctagacattgaacatgctgatggcaagcggtatttcacctgggaccccagtcgcttccctcagccccgcaccatgcttgagcgcttggcttctaagaggcggaagctggtggccatcgtagacccccacatcaaggtggactccggctaccgagttcacgaggagctgcggaacctggggctgtatgttaaaacccgggatggctctgactatgagggctggtgctggccaggctcagctggttaccctgacttcactaatcccacgatgagggcctggtgggctaacatgttcagctatgacaattatgagggctcagctcccaacctctttgtctggaatgacatgaacgaaccatctgtgttcaatggtcctgaggtcaccatgctcaaggatgcccagcattatgggggctgggagcaccgggatgtgcataacatctatggcctttatgtgcacatggcgactgctgatgggctgagacagcgctctgggggcatggaacgcccctttgtcctggccagggccttcttcgctggctcccagcgctttggagccgtgtggacaggggacaacactgccgagtgggaccatttgaagatctctattcctatgtgtctcagcttggggctggtgggactttccttctgtggggcggatgtgggtggcttcttcaaaaacccagagccagagctgcttgtgcgctggtaccagatgggtgcttaccagccattcttccgggcacatgcccacttggacactgggcgacgagagccatggctgttaccatctcagcacaatgatataatccgagatgccttgggccagcgatattctttgctgcccttctggtacaccctcttatatcaggcccatcgggaaggcattcctgtcatgaggcccctgtgggtgcagtaccctcaggatgtgactaccttcaatatagatgatcagtacttgcttggggatgcgttgctggttcaccctgtatcagactctggagcccatggtgtccaggtctatctgcctggccaaggggaggtgtggtatgacattcaaagctaccagaagcatcatggtccccagaccctgtacctgcctgtaactctaagcagtatccctgtgttccagcgtggagggacaatcgtgcctcgatggatgcgagtgcggcggtcttcagaatgtatgaaggatgaccccatcactctctttgttgcacttagccctcagggtacagctcaaggagagctctttctggatgatgggcacacgttcaactatcagactcgccaagagttcctgctgcgtcgattctcattctctggcaacacccttgtctccagctcagcagaccctgaaggacactttgagacaccaatctggattgagcgggtggtgataataggggctggaaagccagcagctgtggtactccagacaaaaggatctccagaaagccgcctgtccttccagcatgaccctgagacctctgtgttggtcctgcgcaagcctggcatcaatgtggcatctgattggagtattcacctgcgataacccaagggatgttctgggttagggggagggaaggggagcattagtgctgagagatattctttcttctgccttggagttcggccctccccagacttcacttatgctagtctaagacccagattctgccaacatttgggcaggatgagagggctgaccctgggctccaaattcctcttgtgagtatcaatggagtgggagaggtgaggagatgtcgacg

SEQ ID NO: 76038 - DNA, 3404 bp, Homo sapiens
aggctgtaccggcctgggatgttgggatgcggcggtagcggcagtggcggcgcgtatgaaggcggtcttgggcgtctttggtactggcttttttaggggtctgcctggggattacccttgctgtggatagaagcaactttaagacctgtgaagagagttctttctgcaagcgacagagaagcatacggccaggcctctctccataccgagccttgctggactctctacagcttggtcctgattccctcacggtccatctgatccatgaggtcaccaaggtgttgctggtgctagagcttcaggggcttcaaaagaacatgactcggttcaggattgatgagctggagcctcggcgaccccgataccgtgtaccagatgttttggtggctgatccaccaatagcccggctttctgtctctggtcgtgatgagaacagtgtggagttaaccatggctgagggaccctacaagatcatcttgacagcacggccattccgccttgacctactagaggaccgaagtcttttgcttagtgtcaatgcccgaggactcttggagtttgagcatcagagggcccctagggtctcgcaaggatcaaaagacccagctgagggcgatggggcccagcctgaggaaacacccagggatggcgacaagccagaggagactcaggggaaggcagagaaagatgagccaggagcctgggaggagacattcaaaactcactctgacagcaagccgtatggccccatgtctgtgggtttggacttctctctgccaggcatggagcatgtctatgggatccctgagcatgcagacaacctgaggctgaaggtcactgagggtggggagccatatcgcctctacaatttggatgtgttccagtatgagctgtacaacccaatggccttgtatgggtctgtgcctgtgctcctggcacacaaccctcatcgcgacttgggcatcttctggctcaatgctgcagagacctgggttgatatatcttccaacactgccgggaagaccctgtttgggaagatgatggactacctgcagggctctggggagaccccacagacagatgttcgctggatgtcagagactggcatcattgacgtcttcctgctgctggggccctccatctctgatgttttccggcaatatgctagtctcacaggaacccaggcgttgcccccactcttctccctcggctaccaccagagccgttggaactaccgggacgaggctgatgtgctggaagtggatcagggctttgatgatcacaacctgccctgtgatgtcatctggctagacattgaacatgctgatggcaagcggtatttcacctgggaccccagtcgcttccctcagccccgcaccatgcttgagcgcttggcttctaagaggcggaagctggtggccatcgtagacccccacatcaaggtggactccggctaccgagttcacgaggagctgcggaacctggggctgtatgttaaaacccgggatggctctgactatgagggctggtgctggccaggctcagctggttaccctgacttcactaatcccacgatgagggcctggtgggctaacatgttcagctatgacaattatgagggctcagctcccaacctctttgtctggaatgacatgaacgaaccatctgtgttcaatggtcctgaggtcaccatgctcaaggatgcccagcattatgggggctgggagcaccgggatgtgcataacatctatggcctttatgtgcacatggcgactgctgatgggctgagacagcgctctgggggcatggaacgcccctttgtcctggccagggccttcttcgctggctcccagcgctttggagccgtgtggacaggggacaacactgccgagtgggaccatttgaagatctctattcctatgtgtctcagcttggggctggtgggactttccttctgtggggcggatgtgggtggcttcttcaaaaacccagagccagagctgcttgtgcgctggtaccagatgggtgcttaccagccattcttccgggcacatgcccacttggacactgggcgacgagagccatggctgttaccatctcagcacaatgatataatccgagatgccttgggccagcgatattctttgctgcccttctggtacaccctcttatatcaggcccatcgggaaggcattcctgtcatgaggcccctgtgggtgcagtaccctcaggatgtgactaccttcaatatagatgatcagtacttgcttggggatgcgttgctggttcaccctgtatcagactctggagcccatggtgtccaggtctatctgcctggccaaggggaggtgtggtatgacattcaaagctaccagaagcatcatggtccccagaccctgtacctgcctgtaactctaagcagtatccctgtgttccagcgtggagggacaatcgtgcctcgatggatgcgagtgcggcggtcttcagaatgtatgaaggatgaccccatcactctctttgttgcacttagccctcagggtacagctcaaggagagctctttctggatgatgggcacacgttcaactatcagactcgccaagagttcctgctgcgtcgattctcattctctggcaacacccttgtctccagctcagcagaccctgaaggacactttgagacaccaatctggattgagcgggtggtgataataggggctggaaagccagcagctgtggtactccagacaaaaggatctccagaaagccgcctgtccttccagcatgaccctgagacctctgtgttggtcctgcgcaagcctggcatcaatgtggcatctgattggagtattcacctgcgataacccaagggatgttctgggttagggggagggaaggggagcattagtgctgagagatattctttcttctgccttggagttcggccctccccagacttcacttatgctagtctaagacccagatttacccttttcctctccccgattccttgtagagctgctgcaattcttagaggggcagttctacctcctctgtccctcggcagaaagacgtttccacacctcttaggggatgcgcattaaacttcttttgcccccttcttgtcccctttgaggggcacttaagatggagaaatcagttgtggtttcagtgaatcatggtcacctgtatttattgctaggatacagtagggagatctccctactgtatcctattatatatatatttctaagtgtaactgtccttcctctgtgccaggaaacgggagggggctgatcctctgatcctcacttcactgtcatgtttgaaagaggtattggtgttctggagtgggggtcaacccctccccagtctctgtgctaagtctcactttgggacggatgcct

SEQ ID NO: 76039 - DNA, 3066 bp, Homo sapiens
aggctgtaccggcctgggatgttgggatgcggcggtagcggcagtggcggcgcgtatgaaggcggtcttgggcgtctttggtactggcttttttaggggtctgcctggggattacccttgctgtggatagaagcaactttaagacctgtgaagagagttctttctgcaagcgacagagaagcatacggccaggcctctctccataccgagccttgctggactctctacagcttggtcctgattccctcacggtccatctgatccatgaggtcaccaaggtgttgctggtgctagagcttcaggggcttcaaaagaacatgactcggttcaggattgatgagctggagcctcggcgaccccgataccgtgtaccagatgttttggtggctgatccaccaatagcccggctttctgtctctggtcgtgatgagaacagtgtggagttaaccatggctgagggaccctacaagatcatcttgacagcacggccattccgccttgacctactagaggaccgaagtcttttgcttagtgtcaatgcccgaggactcttggagtttgagcatcagagggcccctagggtctcgcaaggatcaaaagacccagctgagggcgatggggcccagcctgaggaaacacccagggatggcgacaagccagaggagactcaggggaaggcagagaaagatgagccaggagcctgggaggagacattcaaaactcactctgacagcaagccgtatggccccatgtctgtgggtttggacttctctctgccaggcatggagcatgtctatgggatccctgagcatgcagacaacctgaggctgaaggtcactgagggtggggagccatatcgcctctacaatttggatgtgttccagtatgagctgtacaacccaatggccttgtatgggtctgtgcctgtgctcctggcacacaaccctcatcgcgacttgggcatcttctggctcaatgctgcagagacctgggttgatatatcttccaacactgccgggaagaccctgtttgggaagatgatggactacctgcagggctctggggagaccccacagacagatgttcgctggatgtcagagactggcatcattgacgtcttcctgctgctggggccctccatctctgatgttttccggcaatatgctagtctcacaggaacccaggcgttgcccccactcttctccctcggctaccaccagagccgttggaactaccgggacgaggctgatgtgctggaagtggatcagggctttgatgatcacaacctgccctgtgatgtcatctggctagacattgaacatgctgatggcaagcggtatttcacctgggaccccagtcgcttccctcagccccgcaccatgcttgagcgcttggcttctaagaggcggaagctggtggccatcgtagacccccacatcaaggtggactccggctaccgagttcacgaggagctgcggaacctggggctgtatgttaaaacccgggatggctctgactatgagggctggtgctggccaggctcagctggttaccctgacttcactaatcccacgatgagggcctggtgggctaacatgttcagctatgacaattatgagggctcagctcccaacctctttgtctggaatgacatgaacgaaccatctgtgttcaatggtcctgaggtcaccatgctcaaggatgcccagcattatgggggctgggagcaccgggatgtgcataacatctatggcctttatgtgcacatggcgactgctgatgggctgagacagcgctctgggggcatggaacgcccctttgtcctggccagggccttcttcgctggctcccagcgctttggagccgtgtggacaggggacaacactgccgagtgggaccatttgaagatctctattcctatgtgtctcagcttggggctggtgggactttccttctgtggggcggatgtgggtggcttcttcaaaaacccagagccagagctgcttgtgcgctggtaccagatgggtgcttaccagccattcttccgggcacatgcccacttggacactgggcgacgagagccatggctgttaccatctcagcacaatgatataatccgagatgccttgggccagcgatattctttgctgcccttctggtacaccctcttatatcaggcccatcgggaaggcattcctgtcatgaggcccctgtgggtgcagtaccctcaggatgtgactaccttcaatatagatgatcagtacttgcttggggatgcgttgctggttcaccctgtatcagactctggagcccatggtgtccaggtctatctgcctggccaaggggaggtgtggtatgacattcaaagctaccagaagcatcatggtccccagaccctgtacctgcctgtaactctaagcagtatccctgtgttccagcgtggagggacaatcgtgcctcgatggatgcgagtgcggcggtcttcagaatgtatgaaggatgaccccatcactctctttgttgcacttagccctcagggtacagctcaaggagagctctttctggatgatgggcacacgttcaactatcagactcgccaagagttcctgctgcgtcgattctcattctctggcaacacccttgtctccagctcagcagaccctgaaggacactttgagacaccaatctggattgagcgggtggtgataataggggctggaaagccagcagctgtggtactccagacaaaaggatctccagaaagccgcctgtccttccagcatgaccctgagacctctgtgttggtcctgcgcaagcctggcatcaatgtggcatctgattggagtattcacctgcgataacccaagggatgttctgggttagggggagggaaggggagcatatgatcatgtgtgctcggggttggctggaagccctgggtggggggttgggggaggactaatggggagtcggggaatatttgtgggtattttttttacttcctcttggttcccagctgtgacacgttttgatcaaaggagaaacaataaagggataaaccataaa

SEQ ID NO: 76040 - DNA, 2838 bp, Homo sapiens
  misc_feature (2797)..(2797): n is a, c, g, or t
aggctgtaccggcctgggatgttgggatgcggcggtagcggcagtggcggcgcgtatgaaggcggtcttgggcgtctttggtactggcttttttaggggtctgcctggggattacccttgctgtggatagaagcaactttaagacctgtgaagagagttctttctgcaagcgacagagaagcatacggccaggcctctctccataccgagccttgctggactctctacagcttggtcctgattccctcacggtccatctgatccatgaggtcaccaaggtgttgctggtgctagagcttcaggggcttcaaaagaacatgactcggttcaggattgatgagctggagcctcggcgaccccgataccgtgtaccagatgttttggtggctgatccaccaatagcccggctttctgtctctggtcgtgatgagaacagtgtggagttaaccatggctgagggaccctacaagatcatcttgacagcacggccattccgccttgacctactagaggaccgaagtcttttgcttagtgtcaatgcccgaggactcttggagtttgagcatcagagggcccctagggtctcgcaaggatcaaaagacccagctgagggcgatggggcccagcctgaggaaacacccagggatggcgacaagccagaggagactcaggggaaggcagagaaagatgagccaggagcctgggaggagacattcaaaactcactctgacagcaagccgtatggccccatgtctgtgggtttggacttctctctgccaggcatggagcatgtctatgggatccctgagcatgcagacaacctgaggctgaaggtcactgagggtggggagccatatcgcctctacaatttggatgtgttccagtatgagctgtacaacccaatggccttgtatgggtctgtgcctgtgctcctggcacacaaccctcatcgcgacttgggcatcttctggctcaatgctgcagagacctgggttgatatatcttccaacactgccgggaagaccctgtttgggaagatgatggactacctgcagggctctggggagaccccacagacagatgttcgctggatgtcagagactggcatcattgacgtcttcctgctgctggggccctccatctctgatgttttccggcaatatgctagtctcacaggaacccaggcgttgcccccactcttctccctcggctaccaccagagccgttggaactaccgggacgaggctgatgtgctggaagtggatcagggctttgatgatcacaacctgccctgtgatgtcatctggctagacattgaacatgctgatggcaagcggtatttcacctgggaccccagtcgcttccctcagccccgcaccatgcttgagcgcttggcttctaagaggcggaagctggtggccatcgtagacccccacatcaaggtggactccggctaccgagttcacgaggagctgcggaacctggggctgtatgttaaaacccgggatggctctgactatgagggctggtgctggccaggctcagctggttaccctgacttcactaatcccacgatgagggcctggtgggctaacatgttcagctatgacaattatgagggctcagctcccaacctctttgtctggaatgacatgaacgaaccatctgtgttcaatggtcctgaggtcaccatgctcaaggatgcccagcattatgggggctgggagcaccgggatgtgcataacatctatggcctttatgtgcacatggcgactgctgatgggctgagacagcgctctgggggcatggaacgcccctttgtcctggccagggccttcttcgctggctcccagcgctttggagccgtgtggacaggggacaacactgccgagtgggaccatttgaagatctctattcctatgtgtctcagcttggggctggtgggactttccttctgtggggcggatgtgggtggcttcttcaaaaacccagagccagagctgcttgtgcgctggtaccagatgggtgcttaccagccattcttccgggcacatgcccacttggacactgggcgacgagagccatggctgttaccatctcagcacaatgatataatccgagatgccttgggccagcgatattctttgctgcccttctggtacaccctcttatatcaggcccatcgggaaggcattcctgtcatgaggcccctgtgggtgcagtaccctcaggatgtgactaccttcaatatagatgatcagtacttgcttggggatgcgttgctggttcaccctgtatcagactctggagcccatggtgtccaggtctatctgcctggccaaggggaggtgtggtatgacattcaaagctaccagaagcatcatggtccccagaccctgtacctgcctgtaactctaagcagtatccctgtgttccagcgtggagggacaatcgtgcctcgatggatgcgagtgcggcggtcttcagaatgtatgaaggatgaccccatcactctctttgttgcacttagccctcagggtacagctcaaggagagctctttctggatgatgggcacacgttcaactatcagactcgccaagagttcctgctgcgtcgattctcattctctggcaacacccttgtctccagctcagcagaccctgaaggacactttgagacaccaatctggattgagcgggtggtgataataggggctggaaagccagcagctgtggtactccagacaaaagaatctccaaaaaaagcccgccctggttcctttcccagccattgaanccctgaaaaacctcctgttgtttgggttccctgccgccaaa

SEQ ID NO: 76041 - DNA, 1704 bp, Homo sapiens
cggtagtggacgctgcgtacggacagctggtcttgggcgtctttggtactggcttttttaggggtctgcctggggattacccttgctgtggatagaagcaactttaagacctgtgaagagagttctttctgcaagcgacagagaagcatacggccaggcctctctccataccgagccttgctggactctctacagcttggtcctgattccctcacggtccatctgatccatgaggtcaccaaggtgttgctggtgctagagcttcaggggcttcaaaagaacatgactcggttcaggattgatgagctggagcctcggcgaccccgataccgtgtaccagatgttttggtggctgatccaccaatagcccggctttctgtctctggtcgtgatgagaacagtgtggagttaaccatggctgagggaccctacaagatcatcttgacagcacggccattccgccttgacctactagaggaccgaagtcttttgcttagtgtcaatgcccgaggactcttggagtttgagcatcagagggcccctagggtctcgtgagtacaggggttgggactgcagggaacctagtgtgaaagagcataggggtgttgtgaggtctggcacggggaggagacggtggtgggacagccaggtagggcctgggggctgggagaagctctctgtcagggagggtaggaaccagacccgggtgcggttttttccatttcctgtacagaccaggaggcagtcacttttgtccctgagctgtaccctgggcatctctgggaggcctgcctgggtctgtgtctccttcttccccttctcacatcatcacatttcccagatttattttcttcgtttttatttatttattttttttggtttctttttccccccatctctggaagtttgtcgactgaaactcacttttatgtttctgtttttgtgttggttttgtgcctctttttccccttccctacccatctcctcctgccccagtttctcggataaggttaatctcacgcttggtagcatatgggataagatcaagaaccttttctctaggtaaatccatggccaccggtactgtatctgttcctctgcccttacccattcctcactctagccttcggggggaggtgccccagacccttccagcctttcactcaccccactttcccctgctgtgtgatgtctggtcctgttacctgttaccctggctgggagcccccagaagaaggaaggtgagatactgaaagtcaggtccttcgggaatgtagggagcttattgctttgccaggggatggagagatgctgcctattgctggggttcctgactctcagctgaggggcacctgaggttctgggcagagctacttgcccttgaaagcattttttggcagaatctcttgaagtccctatgtatgtctgtagaggcttggtatagtatgacccacatgcctttgcaaagccattgtgtcaggccaggaggctgaggcccagggagagcacttggggccagaatctctcagtagaggcaacagagccaggattggcattcataacccaggcccctgaatcattctgcctttctcttctgggatgttgacagaggctggtgttcaggcctgtgcctcctggtggcacttattcctcattttcctttctcatctctctccccatcctttgcaaacttatctgctcatt

SEQ ID NO: 76042 - DNA, 401 bp, Homo sapiens
cggtagtggacgctgcgtacggacagctggtcttgggcgtctttggtactggcttttttaggggtctgcctggggattacccttgctgtggatagaagcaactttaagacctgtgaagagagttctttctgcaagcgacagagaagcatacggccaggcctctctccataccgagccttgctggactctctacagcttggtcctgattccctcacggtccatctgatccatgaggtcaccaaggtgttgctggtgctagagcttcaggggcttcaaaagaacatgactcggttcaggattgatgagctggagcctcggcgaccccgataccgtgtaccagatgttttggtggctgatccaccaatagcccgaggctgatgaggcaggccttgaactcctcg

SEQ ID NO: 76043 - DNA, 348 bp, Homo sapiens
agtgagccaccacgcccagcctactctgcctttcaaagggaaggtgtgagtgagccaacttctcaggcctgatccttaaccctgtgtccactctgccttgttttgtatttgatgtgactacatctttctcccctctttcctcaactatcttctagtgctatgacaggaagaagcttttccttttgaagggggccccttctgacctccatgctgattgctctgtctttgtccttttctccttaggtcttgggcgtctttggtactggcttttttaggggtctgcctggggattacccttgctgtggatagaagcaactttaagacctgtgaagagagttctttctgcaa

SEQ ID NO: 76044 - DNA, 439 bp, Homo sapiens
gctcccgcccggcggtttagtaaagccacagctgtgcgtctttcttggtcttggccgctctcagccgccgccctcctttggctgcttgcggcggtcaacgtcgccgcccccttcctgcagtgcgcggggtcgtcggggcgggggaaaagatgcggcctggcctcggggaatgcagcctgcggccccgcggcccctcggctgagctggaagcaccgggccagcagttaagcctgtactacccttctggctctaccctgtagagctccgaatcctcctctgcccttgtcttcacgtgagcaccagctctggcttagttcagtgtccacggtcgctgggcacggcccagggtccagtaagctcacggcgtggatggtgttgctcaaacacaacatgtaatcgaatggcttggtccacgctctcgggtttatattactgggga

SEQ ID NO: 76045 - DNA, 338 bp, Homo sapiens
cacatggcgactgctgatgggctgagacagcgctctgggggcatggaacgcccctttgtcctggccagggccttcttcgctggctcccagcgctttggtaaggtttagagaatggagctgtggcagaagggtgtgaaggccagatctcaggagccatggacctggacctgcctctctgaggaatgggagccacacactgcatctgtttcctctcagctatgcgctttgaaggaagtcagggtgtgggaggtccactccttgttcaaatgttcttgtgaactgcatcttcagcagggttctggggacccagagcggatgtgggaggtcagccatgtaaa

SEQ ID NO: 76046 - DNA, 273 bp, Homo sapiens
ggtgtgagccaccacacccggcctatgctgttcttttcttattgccagttcctggaggagcatttctgacttgtgccaaaattgaaaagttttcctttattgtctttcttccttcctaggcccctgtgggtgcagtaccctcaggatgtgactaccttcaatatagatgatcagtacttgcttggtgagaaatgaggatagttggtggtgggttggctttgggccaagcagcactgcggatgcccagggagggactagtgaagctggtggtgc

SEQ ID NO: 76047 - DNA, 508 bp, Homo sapiens
tagggaaggcctctccccatgacctgcgtctgtctgttccacctgcctccctgaatctctctcggcttgccaacccttctatggttgattgcctgcaacatatcagggggccttgatgatccggggagggccctgaaaaatgcatctttttagattcctaggagctctcttctctgacactgtttgtcttcttcctcccctctgtccttctgtccccattttctgcccacgttcccagggctcagctcccaacctctttgtctggaatgacatgaacgaaccatctgtgttcaatggtcctgaggtcaccatgctcaaggatgcccagcattatgggggctgggagcaccgggatgtgcataacatctatggcctttatgtggtaagggcctgagagaggagagttggtggaaagagggaaaacagcccagagactgagggcctagggaacttgcaccagatgacagctggcttttgctcctcactacccgtctcttctctcctcacc

SEQ ID NO: 76048 - DNA, 1928 bp, Homo sapiens
gcctgctcgggcgcgggcggcggcgcggccatgaagctgaagctgaagaacgtgtttctcgcctacttcctggtgtcgatcgccggcctcctctacgcgctggtacagctcggccagccatgtgactgccttcctcccctgcgggcagcagccgagcagctacggcagaaggatctgaggatttcccagctgcaagcggaactccgacggccaccccctgcccctgcccagccccctgaacccgaggccctgcctactatctatgttgttacccccacctatgccaggcccctgtgggtgcagtaccctcaggatgtgactaccttcaatatagatgatcagtacttgcttggggatgcgttgctggttcaccctgtatcagactctggagcccatggtgtccaggtctatctgcctggccaaggggaggtgtggtatgacattcaaagctaccagaagcatcatggtccccagaccctgtacctgcctgtaactctaagcagtatccctgtgttccagcgtggagggacaatcgtgcctcgatggatgcgagtgcggcggtcttcagaatgtatgaaggatgaccccatcactctctttgttgcacttagccctcagggtacagctcaaggagagctctttctggatgatgggcacacgttcaactatcagactcgccaagagttcctgctgcgtcgattctcattctctggcaacacccttgtctccagctcagcagaccctgaaggacactttgagacaccaatctggattgagcgggtggtgataataggggctggaaagccagcagctgtggtactccagacaaaaggatctccagaaagccgcctgtccttccagcatgaccctgagacctctgtgttggtcctgcgcaagcctggcatcaatgtggcatctgattggagtattcacctgcgataacccaagggatgttctgggttagggggagggaaggggagcattagtgctgagagatattctttcttctgccttggagttcggccctccccagacttcacttatgctagtctaagacccagattctgccaacatttgggcaggatgagagggctgaccctgggctccaaattcctcttgtgatctcctcacctctcccactccattgataccaactctttcccttcattcccccaacatcctgttgctctaactggagcacattcacttacgaacaccaggaaaccacagggcccttgtcgccccttctctttcccttatttaggagccctgaactcccccagagtctatccattcatgcctcttgtatgttgatgccacttcttggaagaagatgagggcaatgagttagggctccttttccccttccctcccaccagattgctctcccacctttcatttcttcctccaggctttactcccctttttatgccccaccgatacactgggaccaccccttaccccggacaggatgaatggatcaaaggagtgaggttgctaaagaacatccttttccctctcattctacccttttcctctccccgattccttgtagagctgctgcaattcttagaggggcagttctacctcctctgtccctcggcagaaagacgtttccacacctcttaggggatgcgcattaaacttcttttgcccccttcttgtcccctttgaggggcacttaagatggagaaatcagttgtggtttcagtgaatcatggtcacctgtatttattgctaggagaagcctgagggtggggggagatgatcatgtgtgctcggggttggctggaagccctgggtggggggttgggggaggactaatggggagtcggggaatatttgtgggtattttttttacttcctcttggttcccagctgtgacacgttttgatcaaaggagaaacaataaagggataaaccataaa

SEQ ID NO: 76049 - DNA, 827 bp, Homo sapiens
  misc_feature (60)..(60): n is a, c, g, or t
  misc_feature (66)..(66): n is a, c, g, or t
  misc_feature (71)..(71): n is a, c, g, or t
  misc_feature (73)..(73): n is a, c, g, or t
  misc_feature (80)..(80): n is a, c, g, or t
  misc_feature (89)..(89): n is a, c, g, or t
  misc_feature (92)..(92): n is a, c, g, or t
  misc_feature (95)..(96): n is a, c, g, or t
  misc_feature (746)..(746): n is a, c, g, or t
  misc_feature (750)..(750): n is a, c, g, or t
  misc_feature (753)..(753): n is a, c, g, or t
  misc_feature (761)..(761): n is a, c, g, or t
  misc_feature (763)..(763): n is a, c, g, or t
ggccacatgaaatatgactacggcgtccctcggtgtatttcagtaccatggctggtgtgnatcgtnaaatngnctggccntggccgtcngangtnnatggcttttttaggggtctgcctggggattacccttgctgtggatagaagcaactttaagacctgtgaagagagttctttctgcaagcgacagagaagcatacggccaggcctctctccataccgagccttgctggactctctacagcttggtcctgattccctcacggtccatctgatccatgaggtcaccaaggtgttgctggtgctagagcttcaggggcttcaaaagaacatgactcggttcaggattgatgagctggagcctcggcgaccccgataccgtgtaccagatgttttggtggctgatccaccaatagcccggctttctgtctctggtcgtgatgagaacagtgtggagttaaccatggctgagggaccctacaagatcatcttgacagcacggccattccgccttgacctactagaggaccgaagtcttttgcttagtgtcaatgcccgaggactcttggagtttgagcatcagagggcccctagggtctctttctcggataaggttaatctcacgcttggtagcatatgggataagatcaagaaccttttctctaggcaaggatcaaaagacccagctgagggcgatggggcccagcctgaggaaacacccagggatggcgacaagccgaggactcngggnagncggaaaananccgggcctgagggacacccaaccctgcgggccgttgcccgtctgggtggccccccacccgcgcg

SEQ ID NO: 76050 - DNA, 3878 bp, Homo sapiens
cggtagtggacgctgcgtacggacagctggtcttgggcgtctttggtactggcttttttaggggtctgcctggggattacccttgctgtggatagaagcaactttaagacctgtgaagagagttctttctgcaagcgacagagaagcatacggccaggcctctctccataccgagccttgctggactctctacagcttggtcctgattccctcacggtccatctgatccatgaggtcaccaaggtgttgctggtgctagagcttcaggggcttcaaaagaacatgactcggttcaggattgatgagctggagcctcggcgaccccgataccgtgtaccagatgttttggtggctgatccaccaatagcccggctttctgtctctggtcgtgatgagaacagtgtggagttaaccatggctgagggaccctacaagatcatcttgacagcacggccattccgccttgacctactagaggaccgaagtcttttgcttagtgtcaatgcccgaggactcttggagtttgagcatcagagggcccctagggtctctttctcggataaggttaatctcacgcttggtagcatatgggataagatcaagaaccttttctctaggcaaggatcaaaagacccagctgagggcgatggggcccagcctgaggaaacacccagggatggcgacaagccagaggagactcaggggaaggcagagaaagatgagccaggagcctgggaggagacattcaaaactcactctgacagcaagccgtatggccccatgtctgtgggtttggacttctctctgccaggcatggagcatgtctatgggatccctgagcatgcagacaacctgaggctgaaggtcactgagggtggggagccatatcgcctctacaatttggatgtgttccagtatgagctgtacaacccaatggccttgtatgggtctgtgcctgtgctcctggcacacaaccctcatcgcgacttgggcatcttctggctcaatgctgcagagacctgggttgatatatcttccaacactgccgggaagaccctgtttgggaagatgatggactacctgcagggctctggggagaccccacagacagatgttcgctggatgtcagagactggcatcattgacgtcttcctgctgctggggccctccatctctgatgttttccggcaatatgctagtctcacaggaacccaggcgttgcccccactcttctccctcggctaccaccagagccgttggaactaccgggacgaggctgatgtgctggaagtggatcagggctttgatgatcacaacctgccctgtgatgtcatctggctagacattgaacatgctgatggcaagcggtatttcacctgggaccccagtcgcttccctcagccccgcaccatgcttgagcgcttggcttctaagaggcggaagctggtggccatcgtagacccccacatcaaggtggactccggctaccgagttcacgaggagctgcggaacctggggctgtatgttaaaacccgggatggctctgactatgagggctggtgctggccaggctcagctggttaccctgacttcactaatcccacgatgagggcctggtgggctaacatgttcagctatgacaattatgagggctcagctcccaacctctttgtctggaatgacatgaacgaaccatctgtgttcaatggtcctgaggtcaccatgctcaaggatgcccagcattatgggggctgggagcaccgggatgtgcataacatctatggcctttatgtgcacatggcgactgctgatgggctgagacagcgctctgggggcatggaacgcccctttgtcctggccagggccttcttcgctggctcccagcgctttggagccgtgtggacaggggacaacactgccgagtgggaccatttgaagatctctattcctatgtgtctcagcttggggctggtgggactttccttctgtggggcggatgtgggtggcttcttcaaaaacccagagccagagctgcttgtgcgctggtaccagatgggtgcttaccagccattcttccgggcacatgcccacttggacactgggcgacgagagccatggctgttaccatctcagcacaatgatataatccgagatgccttgggccagcgatattctttgctgcccttctggtacaccctcttatatcaggcccatcgggaaggcattcctgtcatgaggcccctgtgggtgcagtaccctcaggatgtgactaccttcaatatagatgatcagtacttgcttggggatgcgttgctggttcaccctgtatcagactctggagcccatggtgtccaggtctatctgcctggccaaggggaggtgtggtatgacattcaaagctaccagaagcatcatggtccccagaccctgtacctgcctgtaactctaagcagtatccctgtgttccagcgtggagggacaatcgtgcctcgatggatgcgagtgcggcggtcttcagaatgtatgaaggatgaccccatcactctctttgttgcacttagccctcagggtacagctcaaggagagctctttctggatgatgggcacacgttcaactatcagactcgccaagagttcctgctgcgtcgattctcattctctggcaacacccttgtctccagctcagcagaccctgaaggacactttgagacaccaatctggattgagcgggtggtgataataggggctggaaagccagcagctgtggtactccagacaaaaggatctccagaaagccgcctgtccttccagcatgaccctgagacctctgtgttggtcctgcgcaagcctggcatcaatgtggcatctgattggagtattcacctgcgataacccaagggatgttctgggttagggggagggaaggggagcattagtgctgagagatattctttcttctgccttggagttcggccctccccagacttcacttatgctagtctaagacccagattctgccaacatttgggcaggatgagagggctgaccctgggctccaaattcctcttgtgatctcctcacctctcccactccattgataccaactctttcccttcattcccccaacatcctgttgctctaactggagcacattcacttacgaacaccaggaaaccacagggcccttgtcgccccttctctttcccttatttaggagccctgaactcccccagagtctatccattcatgcctcttgtatgttgatgccacttcttggaagaagatgagggcaatgagttagggctccttttccccttccctcccaccagattgctctcccacctttcatttcttcctccaggctttactcccctttttatgccccaccgatacactgggaccaccccttaccccggacaggatgaatggatcaaaggagtgaggttgctaaagaacatccttttccctctcattctacccttttcctctccccgattccttgtagagctgctgcaattcttagaggggcagttctacctcctctgtccctcggcagaaagacgtttccacacctcttaggggatgcgcattaaacttcttttgcccccttcttgtcccctttgaggggcacttaagatggagaaatcagttgtggtttcagtgaatcatggtcacctgtatttattgctaggagaagcctgagggtggggggagatgatcatgtgtgctcggggttggctggaagccctgggtggggggttgggggaggactaatggggagtcggggaatatttgtgggtattttttttacttcctcttggttcccagctgtgacacgttttgatcaaaggagaaacaataaagggataaaccataaa

SEQ ID NO: 76051 - DNA, 4323 bp, Homo sapiens
cggtagtggacgctgcgtacggacagctggtcttgggcgtctttggtactggcttttttaggggtctgcctggggattacccttgctgtggatagaagcaactttaagacctgtgaagagagttctttctgcaagcgacagagaagcatacggccaggcctctctccataccgagccttgctggactctctacagcttggtcctgattccctcacggtccatctgatccatgaggtcaccaaggtgttgctggtgctagagcttcaggggcttcaaaagaacatgactcggttcaggattgatgagctggagcctcggcgaccccgataccgtgtaccagatgttttggtggctgatccaccaatagcccggctttctgtctctggtcgtgatgagaacagtgtggagttaaccatggctgagggaccctacaagatcatcttgacagcacggccattccgccttgacctactagaggaccgaagtcttttgcttagtgtcaatgcccgaggactcttggagtttgagcatcagagggcccctagggtctcgtgagtacaggggttgggactgcagggaacctagtgtgaaagagcataggggtgttgtgaggtctggcacggggaggagacggtggtgggacagccaggtagggcctgggggctgggagaagctctctgtcagggagggtaggaaccagacccgggtgcggttttttccatttcctgtacagaccaggaggcagtcacttttgtccctgagctgtaccctgggcatctctgggaggcctgcctgggtctgtgtctccttcttccccttctcacatcatcacatttcccagatttattttcttcgtttttatttatttattttttttggtttctttttccccccatctctggaagtttgtcgactgaaactcacttttatgtttctgtttttgtgttggttttgtgcctctttttccccttccctacccatctcctcctgccccagtttctcggataaggttaatctcacgcttggtagcatatgggataagatcaagaaccttttctctaggcaaggatcaaaagacccagctgagggcgatggggcccagcctgaggaaacacccagggatggcgacaagccagaggagactcaggggaaggcagagaaagatgagccaggagcctgggaggagacattcaaaactcactctgacagcaagccgtatggccccatgtctgtgggtttggacttctctctgccaggcatggagcatgtctatgggatccctgagcatgcagacaacctgaggctgaaggtcactgagggtggggagccatatcgcctctacaatttggatgtgttccagtatgagctgtacaacccaatggccttgtatgggtctgtgcctgtgctcctggcacacaaccctcatcgcgacttgggcatcttctggctcaatgctgcagagacctgggttgatatatcttccaacactgccgggaagaccctgtttgggaagatgatggactacctgcagggctctggggagaccccacagacagatgttcgctggatgtcagagactggcatcattgacgtcttcctgctgctggggccctccatctctgatgttttccggcaatatgctagtctcacaggaacccaggcgttgcccccactcttctccctcggctaccaccagagccgttggaactaccgggacgaggctgatgtgctggaagtggatcagggctttgatgatcacaacctgccctgtgatgtcatctggctagacattgaacatgctgatggcaagcggtatttcacctgggaccccagtcgcttccctcagccccgcaccatgcttgagcgcttggcttctaagaggcggaagctggtggccatcgtagacccccacatcaaggtggactccggctaccgagttcacgaggagctgcggaacctggggctgtatgttaaaacccgggatggctctgactatgagggctggtgctggccaggctcagctggttaccctgacttcactaatcccacgatgagggcctggtgggctaacatgttcagctatgacaattatgagggctcagctcccaacctctttgtctggaatgacatgaacgaaccatctgtgttcaatggtcctgaggtcaccatgctcaaggatgcccagcattatgggggctgggagcaccgggatgtgcataacatctatggcctttatgtgcacatggcgactgctgatgggctgagacagcgctctgggggcatggaacgcccctttgtcctggccagggccttcttcgctggctcccagcgctttggagccgtgtggacaggggacaacactgccgagtgggaccatttgaagatctctattcctatgtgtctcagcttggggctggtgggactttccttctgtggggcggatgtgggtggcttcttcaaaaacccagagccagagctgcttgtgcgctggtaccagatgggtgcttaccagccattcttccgggcacatgcccacttggacactgggcgacgagagccatggctgttaccatctcagcacaatgatataatccgagatgccttgggccagcgatattctttgctgcccttctggtacaccctcttatatcaggcccatcgggaaggcattcctgtcatgaggcccctgtgggtgcagtaccctcaggatgtgactaccttcaatatagatgatcagtacttgcttggggatgcgttgctggttcaccctgtatcagactctggagcccatggtgtccaggtctatctgcctggccaaggggaggtgtggtatgacattcaaagctaccagaagcatcatggtccccagaccctgtacctgcctgtaactctaagcagtatccctgtgttccagcgtggagggacaatcgtgcctcgatggatgcgagtgcggcggtcttcagaatgtatgaaggatgaccccatcactctctttgttgcacttagccctcagggtacagctcaaggagagctctttctggatgatgggcacacgttcaactatcagactcgccaagagttcctgctgcgtcgattctcattctctggcaacacccttgtctccagctcagcagaccctgaaggacactttgagacaccaatctggattgagcgggtggtgataataggggctggaaagccagcagctgtggtactccagacaaaaggatctccagaaagccgcctgtccttccagcatgaccctgagacctctgtgttggtcctgcgcaagcctggcatcaatgtggcatctgattggagtattcacctgcgataacccaagggatgttctgggttagggggagggaaggggagcattagtgctgagagatattctttcttctgccttggagttcggccctccccagacttcacttatgctagtctaagacccagattctgccaacatttgggcaggatgagagggctgaccctgggctccaaattcctcttgtgatctcctcacctctcccactccattgataccaactctttcccttcattcccccaacatcctgttgctctaactggagcacattcacttacgaacaccaggaaaccacagggcccttgtcgccccttctctttcccttatttaggagccctgaactcccccagagtctatccattcatgcctcttgtatgttgatgccacttcttggaagaagatgagggcaatgagttagggctccttttccccttccctcccaccagattgctctcccacctttcatttcttcctccaggctttactcccctttttatgccccaccgatacactgggaccaccccttaccccggacaggatgaatggatcaaaggagtgaggttgctaaagaacatccttttccctctcattctacccttttcctctccccgattccttgtagagctgctgcaattcttagaggggcagttctacctcctctgtccctcggcagaaagacgtttccacacctcttaggggatgcgcattaaacttcttttgcccccttcttgtcccctttgaggggcacttaagatggagaaatcagttgtggtttcagtgaatcatggtcacctgtatttattgctaggagaagcctgagggtggggggagatgatcatgtgtgctcggggttggctggaagccctgggtggggggttgggggaggactaatggggagtcggggaatatttgtgggtattttttttacttcctcttggttcccagctgtgacacgttttgatcaaaggagaaacaataaagggataaaccataaa

SEQ ID NO: 76052 - DNA, 2257 bp, Homo sapiens
tggtacgaggcagggggtgaatcggccgaggctcagctcccaacctctttgtctggaatgacatgaacgaaccatctgtgttcaatggtcctgaggtcaccatgctcaaggatgcccagcattatgggggctgggagcaccgggatgtgcataacatctatggcctttatgtgcacatggcgactgctgatgggctgagacagcgctctgggggcatggaacgcccctttgtcctggccagggccttcttcgctggctcccagcgctttggagccgtgtggacaggggacaacactgccgagtgggaccatttgaagatctctattcctatgtgtctcagcttggggctggtgggactttccttctgtggggcggatgtgggtggcttcttcaaaaacccagagccagagctgcttgtgcgctggtaccagatgggtgcttaccagccattcttccgggcacatgcccacttggacactgggcgacgagagccatggctgttaccatctcagcacaatgatataatccgagatgccttgggccagcgatattctttgctgcccttctggtacaccctcttatatcaggcccatcgggaaggcattcctgtcatgaggcccctgtgggtgcagtaccctcaggatgtgactaccttcaatatagatgatcagtacttgcttggggatgcgttgctggttcaccctgtatcagactctggagcccatggtgtccaggtctatctgcctggccaaggggaggtgtggtatgacattcaaagctaccagaagcatcatggtccccagaccctgtacctgcctgtaactctaagcagtatccctgtgttccagcgtggagggacaatcgtgcctcgatggatgcgagtgcggcggtcttcagaatgtatgaaggatgaccccatcactctctttgttgcacttagccctcagggtacagctcaaggagagctctttctggatgatgggcacacgttcaactatcagactcgccaagagttcctgctgcgtcgattctcattctctggcaacacccttgtctccagctcagcagaccctgaaggacactttgagacaccaatctggattgagcgggtggtgataataggggctggaaagccagcagctgtggtactccagacaaaaggatctccagaaagccgcctgtccttccagcatgaccctgagacctctgtgttggtcctgcgcaagcctggcatcaatgtggcatctgattggagtattcacctgcgataacccaagggatgttctgggttagggggagggaaggggagcattagtgctgagagatattctttcttctgccttggagttcggccctccccagacttcacttatgctagtctaagacccagattctgccaacatttgggcaggatgagagggctgaccctgggctccaaattcctcttgtgatctcctcacctctcccactccattgataccaactctttcccttcattcccccaacatcctgttgctctaactggagcacattcacttacgaacaccaggaaaccacagggcccttgtcgccccttctctttcccttatttaggagccctgaactcccccagagtctatccattcatgcctcttgtatgttgatgccacttcttggaagaagatgagggcaatgagttagggctccttttccccttccctcccaccagattgctctcccacctttcatttcttcctccaggctttactcccctttttatgccccaccgatacactgggaccaccccttaccccggacaggatgaatggatcaaaggagtgaggttgctaaagaacatccttttccctctcattctacccttttcctctccccgattccttgtagagctgctgcaattcttagaggggcagttctacctcctctgtccctcggcagaaagacgtttccacacctcttaggggatgcgcattaaacttcttttgcccccttcttgtcccctttgaggggcacttaagatggagaaatcagttgtggtttcagtgaatcatggtcacctgtatttattgctaggagaagcctgagggtggggggagatgatcatgtgtgctcggggttggctggaagccctgggtggggggttgggggaggactaatggggagtcggggaatatttgtgggtattttttttacttcctcttggttcccagctgtgacacgttttgatcaaaggagaaacaataaagggataaaccataaa

SEQ ID NO: 76053 - DNA, 2263 bp, Homo sapiens
agaggatccccaggaaacagcttaccattatgacgggctcagctcccaacctctttgtctggaatgacatgaacgaaccatctgtgttcaatggtcctgaggtcaccatgctcaaggatgcccagcattatgggggctgggagcaccgggatgtgcataacatctatggcctttatgtgcacatggcgactgctgatgggctgagacagcgctctgggggcatggaacgcccctttgtcctggccagggccttcttcgctggctcccagcgctttggagccgtgtggacaggggacaacactgccgagtgggaccatttgaagatctctattcctatgtgtctcagcttggggctggtgggactttccttctgtggggcggatgtgggtggcttcttcaaaaacccagagccagagctgcttgtgcgctggtaccagatgggtgcttaccagccattcttccgggcacatgcccacttggacactgggcgacgagagccatggctgttaccatctcagcacaatgatataatccgagatgccttgggccagcgatattctttgctgcccttctggtacaccctcttatatcaggcccatcgggaaggcattcctgtcatgaggcccctgtgggtgcagtaccctcaggatgtgactaccttcaatatagatgatcagtacttgcttggggatgcgttgctggttcaccctgtatcagactctggagcccatggtgtccaggtctatctgcctggccaaggggaggtgtggtatgacattcaaagctaccagaagcatcatggtccccagaccctgtacctgcctgtaactctaagcagtatccctgtgttccagcgtggagggacaatcgtgcctcgatggatgcgagtgcggcggtcttcagaatgtatgaaggatgaccccatcactctctttgttgcacttagccctcagggtacagctcaaggagagctctttctggatgatgggcacacgttcaactatcagactcgccaagagttcctgctgcgtcgattctcattctctggcaacacccttgtctccagctcagcagaccctgaaggacactttgagacaccaatctggattgagcgggtggtgataataggggctggaaagccagcagctgtggtactccagacaaaaggatctccagaaagccgcctgtccttccagcatgaccctgagacctctgtgttggtcctgcgcaagcctggcatcaatgtggcatctgattggagtattcacctgcgataacccaagggatgttctgggttagggggagggaaggggagcattagtgctgagagatattctttcttctgccttggagttcggccctccccagacttcacttatgctagtctaagacccagattctgccaacatttgggcaggatgagagggctgaccctgggctccaaattcctcttgtgatctcctcacctctcccactccattgataccaactctttcccttcattcccccaacatcctgttgctctaactggagcacattcacttacgaacaccaggaaaccacagggcccttgtcgccccttctctttcccttatttaggagccctgaactcccccagagtctatccattcatgcctcttgtatgttgatgccacttcttggaagaagatgagggcaatgagttagggctccttttccccttccctcccaccagattgctctcccacctttcatttcttcctccaggctttactcccctttttatgccccaccgatacactgggaccaccccttaccccggacaggatgaatggatcaaaggagtgaggttgctaaagaacatccttttccctctcattctacccttttcctctccccgattccttgtagagctgctgcaattcttagaggggcagttctacctcctctgtccctcggcagaaagacgtttccacacctcttaggggatgcgcattaaacttcttttgcccccttcttgtcccctttgaggggcacttaagatggagaaatcagttgtggtttcagtgaatcatggtcacctgtatttattgctaggagaagcctgagggtggggggagatgatcatgtgtgctcggggttggctggaagccctgggtggggggttgggggaggactaatggggagtcggggaatatttgtgggtattttttttacttcctcttggttcccagctgtgacacgttttgatcaaaggagaaacaataaagggataaaccataaa

SEQ ID NO: 76054 - DNA, 3796 bp, Homo sapiens
aggctgtaccggcctgggatgttgggatgcggcggtagcggcagtggcggcgcgtatgaaggcggtcttgggcgtctttggtactggcttttttaggggtctgcctggggattacccttgctgtggatagaagcaactttaagacctgtgaagagagttctttctgcaagcgacagagaagcatacggccaggcctctctccataccgagccttgctggactctctacagcttggtcctgattccctcacggtccatctgatccatgaggtcaccaaggtgttgctggtgctagagcttcaggggcttcaaaagaacatgactcggttcaggattgatgagctggagcctcggcgaccccgataccgtgtaccagatgttttggtggctgatccaccaatagcccggctttctgtctctggtcgtgatgagaacagtgtggagttaaccatggctgagggaccctacaagatcatcttgacagcacggccattccgccttgacctactagaggaccgaagtcttttgcttagtgtcaatgcccgaggactcttggagtttgagcatcagagggcccctagggtctcgcaaggatcaaaagacccagctgagggcgatggggcccagcctgaggaaacacccagggatggcgacaagccagaggagactcaggggaaggcagagaaagatgagccaggagcctgggaggagacattcaaaactcactctgacagcaagccgtatggccccatgtctgtgggtttggacttctctctgccaggcatggagcatgtctatgggatccctgagcatgcagacaacctgaggctgaaggtcactgagggtggggagccatatcgcctctacaatttggatgtgttccagtatgagctgtacaacccaatggccttgtatgggtctgtgcctgtgctcctggcacacaaccctcatcgcgacttgggcatcttctggctcaatgctgcagagacctgggttgatatatcttccaacactgccgggaagaccctgtttgggaagatgatggactacctgcagggctctggggagaccccacagacagatgttcgctggatgtcagagactggcatcattgacgtcttcctgctgctggggccctccatctctgatgttttccggcaatatgctagtctcacaggaacccaggcgttgcccccactcttctccctcggctaccaccagagccgttggaactaccgggacgaggctgatgtgctggaagtggatcagggctttgatgatcacaacctgccctgtgatgtcatctggctagacattgaacatgctgatggcaagcggtatttcacctgggaccccagtcgcttccctcagccccgcaccatgcttgagcgcttggcttctaagaggcggaagctggtggccatcgtagacccccacatcaaggtggactccggctaccgagttcacgaggagctgcggaacctggggctgtatgttaaaacccgggatggctctgactatgagggctggtgctggccaggctcagctggttaccctgacttcactaatcccacgatgagggcctggtgggctaacatgttcagctatgacaattatgagggctcagctcccaacctctttgtctggaatgacatgaacgaaccatctgtgttcaatggtcctgaggtcaccatgctcaaggatgcccagcattatgggggctgggagcaccgggatgtgcataacatctatggcctttatgtgcacatggcgactgctgatgggctgagacagcgctctgggggcatggaacgcccctttgtcctggccagggccttcttcgctggctcccagcgctttggagccgtgtggacaggggacaacactgccgagtgggaccatttgaagatctctattcctatgtgtctcagcttggggctggtgggactttccttctgtggggcggatgtgggtggcttcttcaaaaacccagagccagagctgcttgtgcgctggtaccagatgggtgcttaccagccattcttccgggcacatgcccacttggacactgggcgacgagagccatggctgttaccatctcagcacaatgatataatccgagatgccttgggccagcgatattctttgctgcccttctggtacaccctcttatatcaggcccatcgggaaggcattcctgtcatgaggcccctgtgggtgcagtaccctcaggatgtgactaccttcaatatagatgatcagtacttgcttggggatgcgttgctggttcaccctgtatcagactctggagcccatggtgtccaggtctatctgcctggccaaggggaggtgtggtatgacattcaaagctaccagaagcatcatggtccccagaccctgtacctgcctgtaactctaagcagtatccctgtgttccagcgtggagggacaatcgtgcctcgatggatgcgagtgcggcggtcttcagaatgtatgaaggatgaccccatcactctctttgttgcacttagccctcagggtacagctcaaggagagctctttctggatgatgggcacacgttcaactatcagactcgccaagagttcctgctgcgtcgattctcattctctggcaacacccttgtctccagctcagcagaccctgaaggacactttgagacaccaatctggattgagcgggtggtgataataggggctggaaagccagcagctgtggtactccagacaaaagtggtcctgcgcaagcctggcatcaatgtggcatctgattggagtattcacctgcgataacccaagggatgttctgggttagggggagggaaggggagcattagtgctgagagatattctttcttctgccttggagttcggccctccccagacttcacttatgctagtctaagacccagattctgccaacatttgggcaggatgagagggctgaccctgggctccaaattcctcttgtgatctcctcacctctcccactccattgataccaactctttcccttcattcccccaacatcctgttgctctaactggagcacattcacttacgaacaccaggaaaccacagggcccttgtcgccccttctctttcccttatttaggagccctgaactcccccagagtctatccattcatgcctcttgtatgttgatgccacttcttggaagaagatgagggcaatgagttagggctccttttccccttccctcccaccagattgctctcccacctttcatttcttcctccaggctttactcccctttttatgccccaccgatacactgggaccaccccttaccccggacaggatgaatggatcaaaggagtgaggttgctaaagaacatccttttccctctcattctacccttttcctctccccgattccttgtagagctgctgcaattcttagaggggcagttctacctcctctgtccctcggcagaaagacgtttccacacctcttaggggatgcgcattaaacttcttttgcccccttcttgtcccctttgaggggcacttaagatggagaaatcagttgtggtttcagtgaatcatggtcacctgtatttattgctaggagaagcctgagggtggggggagatgatcatgtgtgctcggggttggctggaagccctgggtggggggttgggggaggactaatggggagtcggggaatatttgtgggtattttttttacttcctcttggttcccagctgtgacacgttttgatcaaaggagaaacaataaagggataaaccataaa

SEQ ID NO: 76055 - DNA, 1928 bp, Homo sapiens
aatgaatgggaaagagttggtatcaacggagtgggagaggtgaggagatcacaagaggaatttggagcccaggctcagccctctcatcctgccccaaatgttggcagaatctgggtcttagactagcataagtgaagtctggggagggccgaactccaaggcagaagaaagaatatctctcagcacaatgatataatccgagatgccttgggccagcgatattctttgctgcccttctggtacaccctcttatatcaggcccatcgggaaggcattcctgtcatgaggcccctgtgggtgcagtaccctcaggatgtgactaccttcaatatagatgatcagtacttgcttggggatgcgttgctggttcaccctgtatcagactctggagcccatggtgtccaggtctatctgcctggccaaggggaggtgtggtatgacattcaaagctaccagaagcatcatggtccccagaccctgtacctgcctgtaactctaagcagtatccctgtgttccagcgtggagggacaatcgtgcctcgatggatgcgagtgcggcggtcttcagaatgtatgaaggatgaccccatcactctctttgttgcacttagccctcagggtacagctcaaggagagctctttctggatgatgggcacacgttcaactatcagactcgccaagagttcctgctgcgtcgattctcattctctggcaacacccttgtctccagctcagcagaccctgaaggacactttgagacaccaatctggattgagcgggtggtgataataggggctggaaagccagcagctgtggtactccagacaaaaggatctccagaaagccgcctgtccttccagcatgaccctgagacctctgtgttggtcctgcgcaagcctggcatcaatgtggcatctgattggagtattcacctgcgataacccaagggatgttctgggttagggggagggaaggggagcattagtgctgagagatattctttcttctgccttggagttcggccctccccagacttcacttatgctagtctaagacccagattctgccaacatttgggcaggatgagagggctgaccctgggctccaaattcctcttgtgatctcctcacctctcccactccattgataccaactctttcccttcattcccccaacatcctgttgctctaactggagcacattcacttacgaacaccaggaaaccacagggcccttgtcgccccttctctttcccttatttaggagccctgaactcccccagagtctatccattcatgcctcttgtatgttgatgccacttcttggaagaagatgagggcaatgagttagggctccttttccccttccctcccaccagattgctctcccacctttcatttcttcctccaggctttactcccctttttatgccccaccgatacactgggaccaccccttaccccggacaggatgaatggatcaaaggagtgaggttgctaaagaacatccttttccctctcattctacccttttcctctccccgattccttgtagagctgctgcaattcttagaggggcagttctacctcctctgtccctcggcagaaagacgtttccacacctcttaggggatgcgcattaaacttcttttgcccccttcttgtcccctttgaggggcacttaagatggagaaatcagttgtggtttcagtgaatcatggtcacctgtatttattgctaggagaagcctgagggtggggggagatgatcatgtgtgctcggggttggctggaagccctgggtggggggttgggggaggactaatggggagtcggggaatatttgtgggtattttttttacttcctcttggttcccagctgtgacacgttttgatcaaaggagaaacaataaagggataaaccataaa

SEQ ID NO: 76056 - DNA, 1667 bp, Homo sapiens
atcgagctcggcaccgttacattcgtgcccctgtgggtgcagtaccctcaggatgtgactaccttcaatatagatgatcagtacttgcttggggatgcgttgctggttcaccctgtatcagactctggagcccatggtgtccaggtctatctgcctggccaaggggaggtgtggtatgacattcaaagctaccagaagcatcatggtccccagaccctgtacctgcctgtaactctaagcagtatccctgtgttccagcgtggagggacaatcgtgcctcgatggatgcgagtgcggcggtcttcagaatgtatgaaggatgaccccatcactctctttgttgcacttagccctcagggtacagctcaaggagagctctttctggatgatgggcacacgttcaactatcagactcgccaagagttcctgctgcgtcgattctcattctctggcaacacccttgtctccagctcagcagaccctgaaggacactttgagacaccaatctggattgagcgggtggtgataataggggctggaaagccagcagctgtggtactccagacaaaaggatctccagaaagccgcctgtccttccagcatgaccctgagacctctgtgttggtcctgcgcaagcctggcatcaatgtggcatctgattggagtattcacctgcgataacccaagggatgttctgggttagggggagggaaggggagcattagtgctgagagatattctttcttctgccttggagttcggccctccccagacttcacttatgctagtctaagacccagattctgccaacatttgggcaggatgagagggctgaccctgggctccaaattcctcttgtgatctcctcacctctcccactccattgataccaactctttcccttcattcccccaacatcctgttgctctaactggagcacattcacttacgaacaccaggaaaccacagggcccttgtcgccccttctctttcccttatttaggagccctgaactcccccagagtctatccattcatgcctcttgtatgttgatgccacttcttggaagaagatgagggcaatgagttagggctccttttccccttccctcccaccagattgctctcccacctttcatttcttcctccaggctttactcccctttttatgccccaccgatacactgggaccaccccttaccccggacaggatgaatggatcaaaggagtgaggttgctaaagaacatccttttccctctcattctacccttttcctctccccgattccttgtagagctgctgcaattcttagaggggcagttctacctcctctgtccctcggcagaaagacgtttccacacctcttaggggatgcgcattaaacttcttttgcccccttcttgtcccctttgaggggcacttaagatggagaaatcagttgtggtttcagtgaatcatggtcacctgtatttattgctaggagaagcctgagggtggggggagatgatcatgtgtgctcggggttggctggaagccctgggtggggggttgggggaggactaatggggagtcggggaatatttgtgggtattttttttacttcctcttggttcccagctgtgacacgttttgatcaaaggagaaacaataaagggataaaccataaa

SEQ ID NO: 76057 - DNA, 3646 bp, Homo sapiens
aggctgtaccggcctgggatgttgggatgcggcggtagcggcagtggcggcgcgtatgaaggcggtcttgggcgtctttggtactggcttttttaggggtctgcctggggattacccttgctgtggatagaagcaactttaagacctgtgaagagagttctttctgcaagcgacagagaagcatacggccaggcctctctccataccgagccttgctggactctctacagcttggtcctgattccctcacggtccatctgatccatgaggtcaccaaggtgttgctggtgctagagcttcaggggcttcaaaagaacatgactcggttcaggattgatgagctggagcctcggcgaccccgataccgtgtaccagatgttttggtggctgatccaccaatagcccggctttctgtctctggtcgtgatgagaacagtgtggagttaaccatggctgagggaccctacaagatcatcttgacagcacggccattccgccttgacctactagaggaccgaagtcttttgcttagtgtcaatgcccgaggactcttggagtttgagcatcagagggcccctagggtctcgcaaggatcaaaagacccagctgagggcgatggggcccagcctgaggaaacacccagggatggcgacaagccagaggagactcaggggaaggcagagaaagatgagccaggagcctgggaggagacattcaaaactcactctgacagcaagccgtatggccccatgtctgtgggtttggacttctctctgccaggcatggagcatgtctatgggatccctgagcatgcagacaacctgaggctgaaggtcactgagggtggggagccatatcgcctctacaatttggatgtgttccagtatgagctgtacaacccaatggccttgtatgggtctgtgcctgtgctcctggcacacaaccctcatcgcgacttgggcatcttctggctcaatgctgcagagacctgggttgatatatcttccaacactgccgggaagaccctgtttgggaagatgatggactacctgcagggctctggggagaccccacagacagatgttcgctggatgtcagagactggcatcattgacgtcttcctgctgctggggccctccatctctgatgttttccggcaatatgctagtctcacaggaacccaggcgttgcccccactcttctccctcggctaccaccagagccgttggaactaccgggacgaggctgatgtgctggaagtggatcagggctttgatgatcacaacctgccctgtgatgtcatctggctagacattgaacatgctgatggcaagcggtatttcacctgggaccccagtcgcttccctcagccccgcaccatgcttgagcgcttggcttctaagaggcggaagctggtggccatcgtagacccccacatcaaggtggactccggctaccgagttcacgaggagctgcggaacctggggctgtatgttaaaacccgggatggctctgactatgagggctggtgctggccaggctcagctggttaccctgacttcactaatcccacgatgagggcctggtgggctaacatgttcagctatgacaattatgagggctcagctcccaacctctttgtctggaatgacatgaacgaaccatctgtgttcaatggtcctgaggtcaccatgctcaaggatgcccagcattatgggggctgggagcaccgggatgtgcataacatctatggcctttatgtgcacatggcgactgctgatgggctgagacagcgctctgggggcatggaacgcccctttgtcctggccagggccttcttcgctggctcccagcgctttggagccgtgtggacaggggacaacactgccgagtgggaccatttgaagatctctattcctatgtgtctcagcttggggctggtgggactttccttctgtggggcggatgtgggtggcttcttcaaaaacccagagccagagctgcttgtgcgctggtaccagatgggtgcttaccagccattcttccgggcacatgcccacttggacactgggcgacgagagccatggctgttaccatctcagcacaatgatataatccgagatgccttgggccagcgatattctttgctgcccttctggtacaccctcttatatcaggcccatcgggaaggcattcctgtcatgaggcccctgtgggtgcagtaccctcaggatgtgactaccttcaatatagatgatcagtacttgcttggggatgcgttgctggttcaccctgtatcagactctggagcccatggtgtccaggtctatctgcctggccaaggggaggtgtggtatgacattcaaagctaccagaagcatcatggtccccagaccctgtacctgcctgtaactctaagcagtatccctgtgttccagcgtggagggacaatcgtgcctcgatggatgcgagtgcggcggtcttcagaatgtatgaaggatgaccccatcactctctttgttgcacttagccctcagggtacagctcaaggagagctctttctggatgatgggcacacgttcaactatcagactcgccaagagttcctgctgcgtcgattctcattctctggcaacacccttgtctccagctcagcagaccctgaaggacactttgagacaccaatctggattgagcgggtggtgataataggggctggaaagccagcagctgtggtactccagacaaaaggatctccagaaagccgcctgtccttccagcatgaccctgagacctctgtgttggtcctgcgcaagcctggcatcaatgtggcatctgattggagtattcacctgcgataacccaagggatgttctgggttagggggagggaaggggagcattagtgctgagagatattctttcttctgccttggagttcggccctccccagacttcacttatgctagtctaagacccagattctgccaacatttgggcaggatgagagggctgaccctgggctccaaattcctcttgtgatctcctcacctctcccactccattgataccaactctttccccttccctcccaccagattgctctcccacctttcatttcttcctccaggctttactcccctttttatgccccaccgatacactgggaccaccccttaccccggacaggatgaatggatcaaaggagtgaggttgctaaagaacatccttttccctctcattctacccttttcctctccccgattccttgtagagctgctgcaattcttagaggggcagttctacctcctctgtccctcggcagaaagacgtttccacacctcttaggggatgcgcattaaacttcttttgcccccttcttgtcccctttgaggggcacttaagatggagaaatcagttgtggtttcagtgaatcatggtcacctgtatttattgctaggagaagcctgagggtggggggagatgatcatgtgtgctcggggttggctggaagccctgggtggggggttgggggaggactaatggggagtcggggaatatttgtgggtattttttttacttcctcttggttcccagctgtgacacgttttgatcaaaggagaaacaataaagggataaaccataaa

SEQ ID NO: 76058 - DNA, 3609 bp, Homo sapiens
aggctgtaccggcctgggatgttgggatgcggcggtagcggcagtggcggcgcgtatgaaggcggtcttgggcgtctttggtactggcttttttaggggtctgcctggggattacccttgctgtggatagaagcaactttaagacctgtgaagagagttctttctgcaagcgacagagaagcatacggccaggcctctctccataccgagccttgctggactctctacagcttggtcctgattccctcacggtccatctgatccatgaggtcaccaaggtgttgctggtgctagagcttcaggggcttcaaaagaacatgactcggttcaggattgatgagctggagcctcggcgaccccgataccgtgtaccagatgttttggtggctgatccaccaatagcccggctttctgtctctggtcgtgatgagaacagtgtggagttaaccatggctgagggaccctacaagatcatcttgacagcacggccattccgccttgacctactagaggaccgaagtcttttgcttagtgtcaatgcccgaggactcttggagtttgagcatcagagggcccctagggtctcgcaaggatcaaaagacccagctgagggcgatggggcccagcctgaggaaacacccagggatggcgacaagccagaggagactcaggggaaggcagagaaagatgagccaggagcctgggaggagacattcaaaactcactctgacagcaagccgtatggccccatgtctgtgggtttggacttctctctgccaggcatggagcatgtctatgggatccctgagcatgcagacaacctgaggctgaaggtcactgagggtggggagccatatcgcctctacaatttggatgtgttccagtatgagctgtacaacccaatggccttgtatgggtctgtgcctgtgctcctggcacacaaccctcatcgcgacttgggcatcttctggctcaatgctgcagagacctgggttgatatatcttccaacactgccgggaagaccctgtttgggaagatgatggactacctgcagggctctggggagaccccacagacagatgttcgctggatgtcagagactggcatcattgacgtcttcctgctgctggggccctccatctctgatgttttccggcaatatgctagtctcacaggaacccaggcgttgcccccactcttctccctcggctaccaccagagccgttggaactaccgggacgaggctgatgtgctggaagtggatcagggctttgatgatcacaacctgccctgtgatgtcatctggctagacattgaacatgctgatggcaagcggtatttcacctgggaccccagtcgcttccctcagccccgcaccatgcttgagcgcttggcttctaagaggcggaagctggtggccatcgtagacccccacatcaaggtggactccggctaccgagttcacgaggagctgcggaacctggggctgtatgttaaaacccgggatggctctgactatgagggctggtgctggccaggctcagctggttaccctgacttcactaatcccacgatgagggcctggtgggctaacatgttcagctatgacaattatgagggctcagctcccaacctctttgtctggaatgacatgaacgaaccatctgtgttcaatggtcctgaggtcaccatgctcaaggatgcccagcattatgggggctgggagcaccgggatgtgcataacatctatggcctttatgtgcacatggcgactgctgatgggctgagacagcgctctgggggcatggaacgcccctttgtcctggccagggccttcttcgctggctcccagcgctttggagccgtgtggacaggggacaacactgccgagtgggaccatttgaagatctctattcctatgtgtctcagcttggggctggtgggactttccttctgtggggcggatgtgggtggcttcttcaaaaacccagagccagagctgcttgtgcgctggtaccagatgggtgcttaccagccattcttccgggcacatgcccacttggacactgggcgacgagagccatggctgttaccatctcagcacaatgatataatccgagatgccttgggccagcgatattctttgctgcccttctggtacaccctcttatatcaggcccatcgggaaggcattcctgtcatgaggcccctgtgggtgcagtaccctcaggatgtgactaccttcaatatagatgatcagtacttgcttggggatgcgttgctggttcaccctgtatcagactctggagcccatggtgtccaggtctatctgcctggccaaggggaggtgtggtatgacattcaaagctaccagaagcatcatggtccccagaccctgtacctgcctgtaactctaagcagtatccctgtgttccagcgtggagggacaatcgtgcctcgatggatgcgagtgcggcggtcttcagaatgtatgaaggatgaccccatcactctctttgttgcacttagccctcagggtacagctcaaggagagctctttctggatgatgggcacacgttcaactatcagactcgccaagagttcctgctgcgtcgattctcattctctggcaacacccttgtctccagctcagcagaccctgaaggacactttgagacaccaatctggattgagcgggtggtgataataggggctggaaagccagcagctgtggtactccagacaaaaggatctccagaaagccgcctgtccttccagcatgaccctgagacctctgtgttggtcctgcgcaagcctggcatcaatgtggcatctgattggagtattcacctgcgataacccaagggatgttctgggttagggggagggaaggggagcattagtgctgagagatattctttcttctgccttggagttcggccctccccagacttcacttatgctagtctaagacccagattctgccaacatttgggcaggatgagagggctgaccctgggctccaaattcctcttgtgatccccttccctcccaccagattgctctcccacctttcatttcttcctccaggctttactcccctttttatgccccaccgatacactgggaccaccccttaccccggacaggatgaatggatcaaaggagtgaggttgctaaagaacatccttttccctctcattctacccttttcctctccccgattccttgtagagctgctgcaattcttagaggggcagttctacctcctctgtccctcggcagaaagacgtttccacacctcttaggggatgcgcattaaacttcttttgcccccttcttgtcccctttgaggggcacttaagatggagaaatcagttgtggtttcagtgaatcatggtcacctgtatttattgctaggagaagcctgagggtggggggagatgatcatgtgtgctcggggttggctggaagccctgggtggggggttgggggaggactaatggggagtcggggaatatttgtgggtattttttttacttcctcttggttcccagctgtgacacgttttgatcaaaggagaaacaataaagggataaaccataaa

SEQ ID NO: 76059 - DNA, 1338 bp, Homo sapiens
cgggtgtgaatcggacgaggagcctcagggtacagctcaaggagagctctttctggatgatgggcacacgttcaactatcagactcgccaagagttcctgctgcgtcgattctcattctctggcaacacccttgtctccagctcagcagaccctgaaggacactttgagacaccaatctggattgagcgggtggtgataataggggctggaaagccagcagctgtggtactccagacaaaaggatctccagaaagccgcctgtccttccagcatgaccctgagacctctgtgttggtcctgcgcaagcctggcatcaatgtggcatctgattggagtattcacctgcgataacccaagggatgttctgggttagggggagggaaggggagcattagtgctgagagatattctttcttctgccttggagttcggccctccccagacttcacttatgctagtctaagacccagattctgccaacatttgggcaggatgagagggctgaccctgggctccaaattcctcttgtgatctcctcacctctcccactccattgataccaactctttcccttcattcccccaacatcctgttgctctaactggagcacattcacttacgaacaccaggaaaccacagggcccttgtcgccccttctctttcccttatttaggagccctgaactcccccagagtctatccattcatgcctcttgtatgttgatgccacttcttggaagaagatgagggcaatgagttagggctccttttccccttccctcccaccagattgctctcccacctttcatttcttcctccaggctttactcccctttttatgccccaccgatacactgggaccaccccttaccccggacaggatgaatggatcaaaggagtgaggttgctaaagaacatccttttccctctcattctacccttttcctctccccgattccttgtagagctgctgcaattcttagaggggcagttctacctcctctgtccctcggcagaaagacgtttccacacctcttaggggatgcgcattaaacttcttttgcccccttcttgtcccctttgaggggcacttaagatggagaaatcagttgtggtttcagtgaatcatggtcacctgtatttattgctaggagaagcctgagggtggggggagatgatcatgtgtgctcggggttggctggaagccctgggtggggggttgggggaggactaatggggagtcggggaatatttgtgggtattttttttacttcctcttggttcccagctgtgacacgttttgatcaaaggagaaacaataaagggataaaccataaa

SEQ ID NO: 76060 - DNA, 1682 bp, Homo sapiens
ttccctacgtcgggagaggaaaactccatcaaaaaacgaaagccaggggcccaggatagccaactaatcgacccagtcaactaactgacccagtgcacaactctggtagctcagaaaacgcgggctaatttggaagtggacaggggcggagctgtggggccagcacggaatggatcacgtggtctgaagtaacttccttttctcctttcttttctttttggagtaacatctcaacggcacctcggctctgggctgtaagccctgcgatctcaaggcgcaaggctgggcgcaacggcagggttgcggggttacgggattgcggggtccggggagtggaacccgccgactccgggaacgaagcaccggcgccaaggtgtgggaggcggcggggtggagttggacgcctgcctcgcgccgacgcagtgcactcacgggggcggtcccagaggcagctagctgtggttccggttccgtcgcggagacacgtgaaggtcggtgcggagttcgtctctgcaagcttggtcgccctgggatggattcctcctcctcttcctccgcggcgggtttgggtgcagtggacccgcagttgcagcatttcatcgaggtagagactcaaaagcagcgcttccagcagctggtgcaccagatgactgaactttgttgggagaagtgcatggacaagcctgggccaaagttggacagtcgggctgaggcctgttttgtgaactgcgttgagcgcttcattgatacaagccagttcatcttgaatcgactggaacagacccagaaatccaagccagttttctcagaaagcctttctgactgatctcagcattacctctttggaaaaggaaggtagttcaagaaatgaagagctgttgatgggatgattgaagaaacagctatgagaggattggctcccatcttttgttactcttgggacatcctgtcatctgagaatgaacaaagaccaattttttgtgtgtgaagcttaagggtcatatgtttgcttgtattttttaatgctaatcttgtgaaaataattgacaggcgaaagaaaactctatttagatgcatattactgtacatgggactatgcttttctcaaagccccattaactgcttcctataattttgatagtgggaccacatacgtaaaaatctctcatttgtgtggagtcatttctgatttcaggggagatccttgtgtttatcagaaagggcagaagtaggggaagaataatttggtatccttatctagtgtttgattgtcaatgctggagaaaaatatctgtaagagtgtttatacagtacacttcagttatcttgatctccctttcctatatgatgatttgcttaaatatccatattaagtaagtctcaaggtagggtaggcagcctgagagtctagaggcctttagttataaaggaatctagccagtgaacataattcttattactagactgccacaaggaagaaattaacttaccctgtatatcagggtacaaaaaattcagtgatgtgcctaaataagttataaagatttaggccaatcagaagctaacagcagtttcaggtagaggtgcatgcctaatgttagttagtgtagattccatttactgcattcttctgatcactgaaataaaagctatataagattcaactctgtgattgagaaggc

SEQ ID NO: 76061 - DNA, 1020 bp, Homo sapiens
ttccctacgtcgggagaggaaaactccatcaaaaaacgaaagccaggggcccaggatagccaactaatcgacccagtcaactaactgacccagtgcacaactctggtagctcagaaaacgcgggctaatttggaagtggacaggggcggagctgtggggccagcacggaatggatcacgtggtctgaagtaacttccttttctcctttcttttctttttggagtaacatctcaacggcacctcggctctgggctgtaagccctgcgatctcaaggcgcaaggctgggcgcaacggcagggttgcggggttacgggattgcggggtccggggagtggaacccgccgactccgggaacgaagcaccggcgccaaggtgtgggaggcggcggggtggagttggacgcctgcctcgcgccgacgcagtgcactcacgggggcggtcccagaggcagctagctgtggttccggttccgtcgcggagacacgtgaaggtcggtgcggagttcgtctctgcaagcttggtcgccctgggatggattcctcctcctcttcctccgcggcgggtttgggtgcagtggacccgcagttgcagcatttcatcgaggtagagactcaaaagcagcgcttccagcagctggtgcaccagatgactgaactttgttgggttcctgtggcctagccggatgggagaagggtgactccgcttctctggggactgtcattccggacctcggctttgttggtgtagaggactgggtatcaaagaagacttatgccactggacacccagcactttcaggcacccgaggttgaagctgcctagtgctggtcaccaagactgatcggagcccccagtactgggattttatttttggcagcccgagtcccagagagtcagtgaatcagtgaatctgctattcctggactcctcgggatttaccttcattacccagttctaaccctctccgctgaaaaatgagtggctccagcccagtaactataaaagtggtgtaatctcta

SEQ ID NO: 76062 - DNA, 1245 bp, Homo sapiens
gatttataatagtatctattccatagtattgttgtaagaatttaatgtaaggctagagaacattgctatatacttggtcagctgccaaatgtgaactatcagtaacatatcagatattatttttaggtaaagtttttttttctctaagcaacaaaaagggacccctgcccccaaccgtctttttctttccaagttccctttgtgattctgtatcttgtcctgagcaggagaagtgcatggacaagcctgggccaaagttggacagtcgggctgaggcctgttttgtgaactgcgttgagcgcttcattgatacaagccagttcatcttgaatcgactggaacagacccagaaatccaagccagttttctcagaaagcctttctgactgatctcagcattacctctttggaaaaggaaggtagttcaagaaatgaagagctgttgatgggatgattgaagaaacagctatgagaggattggctcccatcttttgttactcttgggacatcctgtcatctgagaatgaacaaagaccaattttttgtgtgtgaagcttaagggtcatatgtttgcttgtattttttaatgctaatcttgtgaaaataattgacaggcgaaagaaaactctatttagatgcatattactgtacatgggactatgcttttctcaaagccccattaactgcttcctataattttgatagtgggaccacatacgtaaaaatctctcatttgtgtggagtcatttctgatttcaggggagatccttgtgtttatcagaaagggcagaagtaggggaagaataatttggtatccttatctagtgtttgattgtcaatgctggagaaaaatatctgtaagagtgtttatacagtacacttcagttatcttgatctccctttcctatatgatgatttgcttaaatatccatattaagtaagtctcaaggtagggtaggcagcctgagagtctagaggcctttagttataaaggaatctagccagtgaacataattcttattactagactgccacaaggaagaaattaacttaccctgtatatcagggtacaaaaaattcagtgatgtgcctaaataagttataaagatttaggccaatcagaagctaacagcagtttcaggtagaggtgcatgcctaatgttagttagtgtagattccatttactgcattcttctgatcactgaaataaaagctatataagattcaactctgtgattgagaaggc

SEQ ID NO: 76063 - DNA, 1317 bp, Homo sapiens
ttccctacgtcgggagaggaaaactccatcaaaaaacgaaagccaggggcccaggatagccaactaatcgacccagtcaactaactgacccagtgcacaactctggtagctcagaaaacgcgggctaatttggaagtggacaggggcggagctgtggggccagcacggaatggatcacgtggtctgaagtaacttccttttctcctttcttttctttttggagtaacatctcaacggcacctcggctctgggctgtaagccctgcgatctcaaggcgcaaggctgggcgcaacggcagggttgcggggttacgggattgcggggtccggggagtggaacccgccgactccgggaacgaagcaccggcgccaaggtgtgggaggcggcggggtggagttggacgcctgcctcgcgccgacgcagtgcactcacgggggcggtcccagaggcagctagctgtggttccggttccgtcgcggagacacgtgaaggtcggtgcggagttcgtctctgcaagcttggtcgccctgggatggattcctcctcctcttcctccgcggcgggtttgggtgcagtggacccgcagttgcagcatttcatcgaggtagagactcaaaagcagcgcttccagcagctggtgcaccagatgactgaactttgttggagatgggatcttgtgatgttgcccaggctagagtgcagtggcacaatcatgtcttcaatatcccattttcagcattggacagattttccagacagaaaaatcaacaaagaaatgtcagacttaatctgcactatagaaaaagtgaatctaatagatatttacagaacgtttcatccaacagctgcaaaatacacattcttctcctagcacatggatctttctcaaggacaaccatatgttaggtcacaaagcaagtcttaaaacatttttaaacattgaaatagcatcaagcatcttctctgaccacagtggaataaaactagaaatcaataacgagagggattttagaaactatacaaacacatggaaattaaacagtatgctcctgaatgacaagtgggtcaatgaagaaattaaaaagaaaattgaaaaatgtcttgaaacaaatgataatggaaacacaacataccaaaacctatgggatacagcaaaagcagtagtgagagggaagtttatagctataagcacctacatcaaaaaagaagaaaaacttcaaataaataatctaaccatgaatcttatagaactagagaactaagagcaaacaaaatccaaagttactagaagaaaatgaataatatagatcagagcgg

SEQ ID NO: 76064 - DNA, 557 bp, Homo sapiens
actagccacatgtggcttaatggctctcgaagtccgacagagcagattaagagacattgcttgctctttttactacttaatgaactttagttttctttttttctggttactgaattctagatgttagatttgtagagcctaccttttgaccagcacaagagaggcctgagccagtctgtggtcttctccttgggttggggggtgtgtgaggagtggatggggccagcgtacctcactggcaggtcctaggcgagttgggctttaccttctctccaagagacctgccagcctcttccctcgcttgaagacaccaggggtgcagaaggcattttctggccaactgttctttgctgatctgttcatcctaagaacaaaattgagtggcttaaaacaaaatgtagctagcctatagttccaaacctttaaagcctctgttatttaataaaggctggaaatgagttattctgaatagccagagtttctcagagagcaactctttaagcaccaggagtttagtaactttcatggtgggaagagttctaagtgttgaaggtact

SEQ ID NO: 76065 - DNA, 834 bp, Homo sapiens
atgaaatgatctaatgatactaagttttggtgatgatgtcagctcttacattgaaaacaatcactgtggaaaaatttgtccctcagtaaatttaaagataaacatgctcaaaacctagcaattgcactctgaagtatacatctttgcaggttatctttcattacagttatttttttccctgtcaggaccctaactaatacaatgccttgggaaaactaatgaacatgtatcctaggaagcatgtacaagaaagttcttcccagtcaggaaggtggccaagaaaaaaattttttaatgttcatagcagcactgcaatatccaaaagttagaaatgaaccaaatattcagcaatggtagaatggttaaattgtaccatggcatttatattgaaacagtagaattctacacagtggtgaaaatgaaggaaatagctaaccacaacatagatgaatatcacagacatagcatagagcaaaagaagcaaatcacagaaggatgccatcaacatgattccatttgtataaagtttaaaacagtataaactgaacaactatattgttttaagggtatatagttatatatatgagatacaactgtaaagaaaagcaagtgttttgctgtccccagaaccagaataatgatttcctctgtggagaagtacagcagtgtgattggggagtggcacctggtgcttctgggatgctggcaatgttctatttcttgtcttgggtggtgattgcatggatgttcacttttaaaatactctttatacatatatattttatatattcttgttcatatataacctttataataaagagaaaaaaatggcaa

SEQ ID NO: 76066 - DNA, 929 bp, Homo sapiens
agcgcacctcagtctaattgcctgccacttaattattgtcacactccacagggcactgattttcctctgcatttttcacttctgtctcaagcagggtctcaagacttctccccatttcccattcctccagcctaactctggcttgcagtaaaatactaaatttccagttccttctgacattcccaaatgccaatttcccctccctaattcacattatcaactatttgtcctttaaatgtacactttagtgtacattttaggtaccatattttaattaatcattttttgacaaagcattggctggcattttaaaaaagatttgttttctgtttgtaaagatttcccaagagaagaaagcaaagaataatcccctgacactgtattgtaaaaaatgttctgtgcctcctttccttttattgcctctagccacagaaaccttatcagaatatttttgggtcagggtttccctttggaaactttataaggtaatgtgtcctcagccacccttcagttttttccctggttctgggtttcagtactgtctggggataaatcaagatatccactgtggctgtgtatgctacaatgtctagtaaatttcagctcctggcctggaatgaaacttcgcatatctgggaatgggagacaggacagcctgaagttggagtgtagcctctcaagggagcaggtggatgccctgaggctgagaggagtctcctggggtactcttcctttgaaaagcaaacccttagagaagttaagattgtcttcaagcaacccgggttccatttctcgaagacacattgctggtcagccaatcagatggtggtaatgagggaaaaacaaataattactgccacctggattctccaagaattatgaaagagaaaatagtatcccaaaagacaaaaaaaaaaaaaaaaaaaaaa

SEQ ID NO: 76067 - DNA, 474 bp, Homo sapiens
tgtctctggcggcagccggagcttctggtgtagtcttcactgctctgtgtcttctgctcctagaggcccagcttctgtggcctcgttacctgcaggtattgggagatccacagctaagacgccaggacccactggaagcctagaaatgctcctggcctggaatgaaacttcgcatatctgggaatgggagacaggacagcctgaagttggagtgtagcctctcaagggagcaggtggatgccctgaggctgagaggagtctcctggggtactcttcctttgaaaagcaaacccttagagaagttaagattgtcttcaagcaacccgggttccatttctcgaagacacattgctggtcagccaatcagatggtggtaatgagggaaaaacaaataattactgccacctggattctccaagaattatgaaagagaaaatagtatcccaaaagacaaaaaaaaaaaaaaaaaaaaaa

SEQ ID NO: 76068 - DNA, 385 bp, Homo sapiens
tgtctctggcggcagccggagcttctggtgtagtcttcactgctctgtgtcttctgctcctagaggcccagcttctgtggcctcgttacctgcaggtattgggagatccacagctaagacgccaggacccactggaagcctagaaatgtgactgtgccttggtctggagtcctctgtgggcagctctgcccccactgccgcagctctccccgattgtgcagggaccactggacggtcgtcaggggagaatactgactcaggatgcagagttcatgaatgggaagagctttggtctgcggggttcccagtccccctttttttctattaaaaatttgtggaagtctccgcagaaatattaaagaatttaattaaagagtaattcaag

SEQ ID NO: 76069 - DNA, 993 bp, Homo sapiens
gccggagcttctggtgtagtcttcactgctctgtgtcttctgctcctagaggcccagcttctgtggcctcgttacctgcaggtattgggagatccacagctaagacgccaggacccactggaagcctagaaatggtgagagtgccgggtccgacatcccgagagagggggcggggctggttggaactggtgggaagtggctgtggcgggactctggcctccccgcagctggctccaaaatccgcggccccgagttctccttggcgcagctcggccctcagtccccttcagccataggatggcggccgggctgacagctcggaccccgggcatcctgtctcctccctgcgcagtgactgtgccttggtctggagtcctctgtgggcagctctgcccccactgccgcagctctccccgattgtgcagggaccactggacggtcgtcaggggagaatactgactcaggatgcagagttcatgaatgggaagagctttggtctgcggggttcccagtccccctttttttctattaaaaatttgtggaagtctccgcagaaatattaaagaatttaattaaagagtaattcaagaattgtagagcaccaagctatgttttgtagtttgtggtttatggaaggggcttgaagaaaacacttttataaagtgcatgataaaggaaagcaaattcaataattggttaggtaaagttatgtagtttcttaatttgtacgatcaaggtggaaattccctggtcatgtaatgagaggttaattggcagtttatagttggttaagcctgaattttattttcccccaatgtaatactttagaaaaaaatcattcgagttagatttttttgcaagtagcaaccctaggactggagcgcacctcagtctaattgcctgccacttaattattgtcacactccacagggcactgattttcctctgcatttttcacttctgtctcaagcagggtctcaagacttctcccca

SEQ ID NO: 76070 - DNA, 446 bp, Homo sapiens
tgatttcagctcactgcatcattcagtcggccgaaggcctggctagaacaaaaaggcagaaaaaaggtgaattcactctctctctgttttggagtagggagtcctatattctcctccccttggacatcagatctccaggttctctggccttcacactcagggacttgcaccagcagccccccaggtttttggtcttggactcagagttactccaccagctcccccggttctcagcccttcagacttggactgagccatgctacaggctcccctgtctcagcagcttgcagaaggcctaacgtggaactcctcagcctccatagttgagggagtgaatccccagcataaatccccactcatctatctacctatatatatccaataaattctgtttctctgaagaagtctgacttcttcagcccccaaaggcccccaaaggcccccaa

SEQ ID NO: 76071 - DNA, 692 bp, Homo sapiens
  misc_feature (140)..(141): n is a, c, g, or t
acaatctggaaggccaatttggccttgtaaaggtgcctctctacaggccgtgtcaactggcttctgagcccaaatgcaagcgaatgctgtcactgtatggaagagccattattacctcctgtctttccagaacgtgtgtnnaagaaaagtgagggaaaggggtgcgttggaggtgcaaagtcagcaacgattgtggcagatctgtctgagacaacaatacagacaccagatggtgaggagaggcttgggggagaggctcactccatggtctgggaccccagtggggaacgtctggctgtgcttatgaaagtcgcactcgaaacagccctgtgtttgagctccttccctgtggcattatccagggggagccaggagcccagccccagctcatcactttccatccttccttcaacaaaggggccctgctcagtgtgggctggtccacaggccgaattgcccacatcccgctgtactttgtcaatgcccagtttccacgttttagcccagtgcttgggcgggcccaggaaccccctgctgggggtggaggctctattcatgacctgcccctctttactgagacatccccaacctctgccccttgggaccctctcccagggccaccacctgttctgccccactccccacattcccacctctaagaataaataagttttccttttgttttccactca

SEQ ID NO: 76072 - DNA, 769 bp, Homo sapiens
gtatttttccctccagccttccctagttttgtggttatctcctctccatattcttgaactcacccccgacacctgttggctcagcctcttttagccctatttttcctgtcctctcctctacctacccaaataacccagagtgggtgtccagagtgggtgtccagagtgtggtgttgagagcacttactgggcagaaggacctggggagtgcctgtccttccttgtctttcacctagaaggtacctggtaagaggcctgtgaatggtttaatcagagctgcttcctcaaccctacagtgtttgagtgggtgaagacggcatccggctgggccctggcactctgtcgatgggcctcttccctccatgggtccctgttcccccatctgtctgtaagtttggcttcctccccagccctctgcatttgctgtgtccccatcctactctgccctcattcctatccttgcaggtcagggttgggtgtgatgacttcagagggtaggagtggtccagctcccctgttggaatattgaggagatggactccttttgccccagtgtgtcctgtgtctatcttgttcttacagctcaggagcgaagatctgatcgctgaatttgcccaagtcacaaattggtgagtgcacaagccctggagctttgtggaaaggaagtcctgaacctcaaaactccctttggggagaaggcaaagactcctactccttttctgattgctcaccatattctcattcctcctgttcccccaaaaaagaatac

SEQ ID NO: 76073 - DNA, 1826 bp, Homo sapiens
gcaggctggtactgggcctgggatttatgggctttgtcccttgcggtacccgtccgcatacgaatctagcccgggaaccgagttgcgggagtgcggtctgtgccgttccggccaggagtttgccgactgcagacgtcctgcgaaccggcaagatgtgctctctggggttgttccctcctccaccgcctcggggtcaagtcaccctatatgagcacaataacgagctggtgacgggcagtagctatgagagcccgccccccgacttccggggccagtggatcaatcttcctgtcctacaactgacaaaggatcccctaaagacccctggaaggctggaccatggcacaagaactgccttcatccatcaccgggagcaagtgtggaagagatgcatcaacatttggcgtgatgtgggcctttttggggtgctaaatgaaattgcaaactcagaagaagaggtgtttgagtgggtgaagacggcatccggctgggccctggcactctgtcgatgggcctcttccctccatgggtccctgttcccccatctgtctctcaggagcgaagatctgatcgctgaatttgcccaagtcacaaattggtccagctgctgcttgcgtgtctttgcatggcacccccacaccaacaagtttgcagtggccctgctagatgactcagtccgtgtgtataatgccagcagcaccatagtcccctccctgaagcaccggctgcagcgaaatgtggcgtctctggcctggaagccccttagtgcctctgtcttggctgtggcctgccagagctgcattcttatctggaccctggaccctacctccttgtctacccgaccctcttctggctgtgcccaagtgctgtctcaccctgggcatacacctgttaccagcttggcctgggcccccagtggggggcggctgctctcagcttcacccgtggatgctgctatccgggtatgggatgtctcaacagagacctgtgtcccccttccctggtttcgaggaggtggggtgaccaacctgctctggtccccagacggcagcaaaatcctggctaccactccttcagctgtctttcgagtctgggaggcccagatgtggacttgtgagaggtggcctactctatcagggcgctgtcagactggctgctggagcccagatggcagccgactgctgttcactgtattgggagagccactgatttactccctgtcttttccagaacgttgtggtgagggaaaggggtgcgttggaggtgcaaagtcagcaacgattgtggcagatctgtctgagacaacaatacagacaccagatggtgaggagaggcttgggggagaggctcactccatggtctgggaccccagtggggaacgtctggctgtgcttatgaaaggaaagccaagggtacaggatggtaaaccagtcatcctcctttttcgcactcgaaacagccctgtgtttgagctccttccctgtggcattatccagggggagccaggagcccagccccagctcatcactttccatccttccttcaacaaaggggccctgctcagtgtgggctggtccacaggccgaattgcccacatcccgctgtactttgtcaatgcccagtttccacgttttagcccagtgcttgggcgggcccaggaaccccctgctgggggtggaggctctattcatgacctgcccctctttactgagacatccccaacctctgccccttgggaccctctcccagggccaccacctgttctgccccactccccacattcccacctctaagaataaataagttttccttttgttttccactca

SEQ ID NO: 76074 - DNA, 1697 bp, Homo sapiens
tctaggtcgaggccggtggtaatcggccgaggttgtcccttgcggtacccgtccgcatacgaatctagcccgggaaccgagttgcgggagtgcggtctgtgccgttccggccaggagtttgccgactgcagacgtcctgcgaaccgtggatcaatcttcctgtcctacaactgacaaaggatcccctaaagacccctggaaggctggaccatggcacaagaactgccttcatccatcaccgggagcaagtgtggaagagatgcatcaacatttggcgtgatgtgggcctttttggggtgctaaatgaaattgcaaactcagaagaagaggtgtttgagtgggtgaagacggcatccggctgggccctggcactctgtcgatgggcctcttccctccatgggtccctgttcccccatctgtctctcaggagcgaagatctgatcgctgaatttgcccaagtcacaaattggtccagctgctgcttgcgtgtctttgcatggcacccccacaccaacaagtttgcagtggccctgctagatgactcagtccgtgtgtataatgccagcagcaccatagtcccctccctgaagcaccggctgcagcgaaatgtggcgtctctggcctggaagccccttagtgcctctgtcttggctgtggcctgccagagctgcattcttatctggaccctggaccctacctccttgtctacccgaccctcttctggctgtgcccaagtgctgtctcaccctgggcatacacctgttaccagcttggcctgggcccccagtggggggcggctgctctcagcttcacccgtggatgctgctatccgggtatgggatgtctcaacagagacctgtgtcccccttccctggtttcgaggaggtggggtgaccaacctgctctggtccccagacggcagcaaaatcctggctaccactccttcagctgtctttcgagtctgggaggcccagatgtggacttgtgagaggtggcctactctatcagggcgctgtcagactggctgctggagcccagatggcagccgactgctgttcactgtattgggagagccactgatttactccctgtcttttccagaacgttgtggtgagggaaaggggtgcgttggaggtgcaaagtcagcaacgattgtggcagatctgtctgagacaacaatacagacaccagatggtgaggagaggcttgggggagaggctcactccatggtctgggaccccagtggggaacgtctggctgtgcttatgaaaggaaagccaagggtacaggatggtaaaccagtcatcctcctttttcgcactcgaaacagccctgtgtttgagctccttccctgtggcattatccagggggagccaggagcccagccccagctcatcactttccatccttccttcaacaaaggggccctgctcagtgtgggctggtccacaggccgaattgcccacatcccgctgtactttgtcaatgcccagtttccacgttttagcccagtgcttgggcgggcccaggaaccccctgctgggggtggaggctctattcatgacctgcccctctttactgagacatccccaacctctgccccttgggaccctctcccagggccaccacctgttctgccccactccccacattcccacctctaagaataaataagttttccttttgttttccactca

SEQ ID NO: 76075 - DNA, 2304 bp, Homo sapiens
cacttccgttgagttccgcctcgccgtttgtcccttgcggtacccgtccgcatacgaatctagcccgggaaccgagttgcgggagtgcggtctgtgccgttccggccaggagtttgccgactgcagacgtcctgcgaaccggcaagatgtgctctctggggttgttccctcctccaccgcctcggggtcaagtcaccctatatgagcacaataacgagctggtgacgggcagtagctatgagagcccgccccccgacttccggggccagtggatcaatcttcctgtcctacaactgacaaaggatcccctaaagacccctggaaggctggaccatggcacaagaactgccttcatccatcaccgggagcaagtgtggaagagatgcatcaacatttggcgtgatgtgggcctttttggggtgctaaatgaaattgcaaactcagaagaagaggtgtttgagtgggtgaagacggcatccggctgggccctggcactctgtcgatgggcctcttccctccatgggtccctgttcccccatctgtctctcaggagcgaagatctgatcgctgaatttgcccaagtcacaaattggtccagctgctgcttgcgtgtctttgcatggcacccccacaccaacaagtttgcagtggccctgctagatgactcagtccgtgtgtataatgccagcagcaccatagtcccctccctgaagcaccggctgcagcgaaatgtggcgtctctggcctggaagccccttagtgcctctgtcttggctgtggcctgccagagctgcattcttatctggaccctggaccctacctccttgtctacccgaccctcttctggctgtgcccaagtgctgtctcaccctgggcatacacctgttaccagcttggcctgggcccccagtggggggcggctgctctcagcttcacccgtggatgctgctatccgggtatgggatgtctcaacagagacctgtgtcccccttccctggtttcgaggaggtggggtgaccaacctgctctggtccccagacggcagcaaaatcctggctaccactccttcagctgtctttcgagtctgggaggcccagatgtggacttgtgagaggtggcctactctatcagggcgctgtcagactggctgctggagcccagatggcagccgactgctgttcactgtattgggagagccactgatttactccctgtcttttccagaacgttgtggtgagggaaaggggtgcgttggaggtgcaaagtcagcaacgattgtggcagatctgtctgagacaacaatacagacaccagatggtgaggagaggcttgggggagaggctcactccatggtctgggaccccagtggggaacgtctggctgtgcttatgaaaggaaagccaagggtacaggatggtaaaccagtcatcctcctttttcgcactcgaaacagccctgtgtttgagctccttccctgtggcattatccagggggagccaggagcccagccccagctcatcactttccatccttccttcaacaaaggggccctgctcagtgtgggctggtccacaggccgaattgcccacatcccgctgtactttgtcaatgcccagtttccacgttttagcccagtgcttgggcgggcccaggaaccccctgctgggggtggaggctctattcatgacctgcccctctttactgagacatccccaacctctgccccttgggaccctctcccagggccaccacctgttctgcccatcccaatttcactctagataataagttcctttgtttcaaaaaaaacgaacaaacgacacatgtgcgcggcggagcccgaaagttctaacacccggctgagcgcgggcccacgagtgtcacagggaacggtccagaacactgccacaaggcggctccacaaaacaccggccgaccgtgaccacaaggctggcacggctacacgacaggacaaaatccacgacgcaacaccacacacagaacgagcgagcgccagcccggcgccgccgaagggcgcgaagaacgagaacgagagcgagccaggccgtacgacagagagacgaccgaaggaagcggagggccgagcgcagagcacagcaacaacaacacgacgacgccgagggcaaaccagacgggcgagggagaaacgaggacacacccaagaaagagcaagagaagcagagaaagaggggagaaaagcagccaaagaaacagagagcaagaaaagcggcagccagcacaaagagagggaaagaaacagagcaagcaacaagcagacgaaag

SEQ ID NO: 76076 - DNA, 1721 bp, Homo sapiens
cacttccgttgagttccgcctcgccgtttgtcccttgcggtacccgtccgcatacgaatctagcccgggaaccgagttgcgggagtgcggtctgtgccgttccggccaggagtttgccgactgcagacgtcctgcgaaccggcaagatgtgctctctggggttgttccctcctccaccgcctcggggtcaagtcaccctatatgagcacaataacgagctggtgacgggcagtagctatgagagcccgccccccgacttccggggccagtggatcaatcttcctgtcctacaactgacaaaggatcccctaaagacccctggaaggctggaccatggcacaagaactgccttcatccatcaccgggagcaagtgtggaagagatgcatcaacatttggcgtgatgtgggcctttttggggtgctaaatgaaattgcaaactcagaagaagaggtgtttgagtgggtgaagacggcatccggctgggccctggcactctgtcgatgggcctcttccctccatgggtccctgttcccccatctgtctctcaggagcgaagatctgatcgctgaatttgcccaagtcacaaattgcaccatagtcccctccctgaagcaccggctgcagcgaaatgtggcgtctctggcctggaagccccttagtgcctctgtcttggctgtggcctgccagagctgcattcttatctggaccctggaccctacctccttgtctacccgaccctcttctggctgtgcccaagtgctgtctcaccctgggcatacacctgttaccagcttggcctgggcccccagtggggggcggctgctctcagcttcacccgtggatgctgctatccgggtatgggatgtctcaacagagacctgtgtcccccttccctggtttcgaggaggtggggtgaccaacctgctctggtccccagacggcagcaaaatcctggctaccactccttcagctgtctttcgagtctgggaggcccagatgtggacttgtgagaggtggcctactctatcagggcgctgtcagactggctgctggagcccagatggcagccgactgctgttcactgtattgggagagccactgatttactccctgtcttttccagaacgttgtggtgagggaaaggggtgcgttggaggtgcaaagtcagcaacgattgtggcagatctgtctgagacaacaatacagacaccagatggtgaggagaggcttgggggagaggctcactccatggtctgggaccccagtggggaacgtctggctgtgcttatgaaaggaaagccaagggtacaggatggtaaaccagtcatcctcctttttcgcactcgaaacagccctgtgtttgagctccttccctgtggcattatccagggggagccaggagcccagccccagctcatcactttccatccttccttcaacaaaggggccctgctcagtgtgggctggtccacaggccgaattgcccacatcccgctgtactttgtcaatgcccagtttccacgttttagcccagtgcttgggcgggcccaggaaccccctgctgggggtggaggctctattcatgacctgcccctctttactgagacatccccaacctctgccccttgggaccctctcccagggccaccacctgttctgccccactccccacattcccacctctaagaataaataagttttccttttgttttccactca

SEQ ID NO: 76077 - DNA, 2669 bp, Homo sapiens
tctaggtcgaggccggtggtaatcggccgaggttgtcccttgcggtacccgtccgcatacgaatctagcccgggaaccgagttgcgggagtgcggtctgtgccgttccggccaggagtttgccgactgcagacgtcctgcgaaccggcaagatgtgctctctggggttgttccctcctccaccgcctcggggtcaagtcaccctatatgagcacaataacgagctggtgacgggcagtagctatgagagcccgccccccgacttccggggccaggtggccagggcgaggagggaggggacctacaggcatgggggcggagtcggggactactggggaaaggaggcagtgtgacaggggcagggtcacagagtctggcggagtggaaacagcttggccccggcaggagactagaagggctggaatctgttttaggactgggattggagtataacgggggaacggttaaggagctgtggaggaggcctagagggaatggagagaatgagggagaatctagggagtgtgaggatgcgggagaactatctaaaagttggggacagtatctggggaggatcagaaggatacaacatggaacttttttccatggtgttcctgggaaggacaaggaagggaaactgacatttattgagcgtttgctatgtaagaaagaggctgagtcaggtgttttctaaaaatgtcatatggtttcataatcacagcaaccctatgaaatattattctagttgcacagatacgggagctaagacttgtttcccattctcacaagtgttagctttgtggaaatgggaaacagacctctggaatctcttatacttagcccagcggtgggttggagatggcacggaattaaagatttgggaagagactgactcaccgtcacacccctcacttttgtgctatagtggatcaatcttcctgtcctacaactgacaaaggatcccctaaagacccctggaaggctggaccatggcacaagaactgccttcatccatcaccgggagcaagtgtggaagagatgcatcaacatttggcgtgatgtgggcctttttggggtgctaaatgaaattgcaaactcagaagaagaggtgtttgagtgggtgaagacggcatccggctgggccctggcactctgtcgatgggcctcttccctccatgggtccctgttcccccatctgtctgtaagtttggcttcctccccagccctctgcatttgctgtgtccccatcctactctgccctcattcctatccttgcaggtcagggttgggtgtgatgacttcagagggtaggagtggtccagctcccctgttggaatattgaggagatggactccttttgccccagtgtgtcctgtgtctatcttgttcttacagctcaggagcgaagatctgatcgctgaatttgcccaagtcacaaattggtccagctgctgcttgcgtgtctttgcatggcacccccacaccaacaagtttgcagtggccctgctagatgactcagtccgtgtgtataatgccagcagcaccatagtcccctccctgaagcaccggctgcagcgaaatgtggcgtctctggcctggaagccccttagtgcctctgtcttggctgtggcctgccagagctgcattcttatctggaccctggaccctacctccttgtctacccgaccctcttctggctgtgcccaagtgctgtctcaccctgggcatacacctgttaccagcttggcctgggcccccagtggggggcggctgctctcagcttcacccgtggatgctgctatccgggtatgggatgtctcaacagagacctgtgtcccccttccctggtttcgaggaggtggggtgaccaacctgctctggtccccagacggcagcaaaatcctggctaccactccttcagctgtctttcgagtctgggaggcccagatgtggacttgtgagaggtggcctactctatcagggcgctgtcagactggctgctggagcccagatggcagccgactgctgttcactgtattgggagagccactgatttactccctgtcttttccagaacgttgtggtgagggaaaggggtgcgttggaggtgcaaagtcagcaacgattgtggcagatctgtctgagacaacaatacagacaccagatggtgaggagaggcttgggggagaggctcactccatggtctgggaccccagtggggaacgtctggctgtgcttatgaaaggaaagccaagggtacaggatggtaaaccagtcatcctcctttttcgcactcgaaacagccctgtgtttgagctccttccctgtggcattatccagggggagccaggagcccagccccagctcatcactttccatccttccttcaacaaaggggccctgctcagtgtgggctggtccacaggccgaattgcccacatcccgctgtactttgtcaatgcccagtttccacgttttagcccagtgcttgggcgggcccaggaaccccctgctgggggtggaggctctattcatgacctgcccctctttactgagacatccccaacctctgccccttgggaccctctcccagggccaccacctgttctgccccactccccacattcccacctctaagaataaataagttttccttttgttttccactca

SEQ ID NO: 76078 - DNA, 1733 bp, Homo sapiens
tctaggtcgaggccggtggtaatcggccgaggttgtcccttgcggtacccgtccgcatacgaatctagcccgggaaccgagttgcgggagtgcggtctgtgccgttccggccaggagtttgccgactgcagacgtcctgcgaaccggcaagatgtgctctctggggttgttccctcctccaccgcctcggggtcaagtcaccctatatgagcacaataacgagctggtgacgggcagtagctatgagagcccgccccccgacttccggggccagtggatcaatcttcctgtcctacaactgacaaaggatcccctaaagacccctggaaggctggaccatggcacaagaactgccttcatccatcaccgggagcaagtgtggaagagatgcatcaacatttggcgtgatgtgggcctttttggggtgctaaatgaaattgcaaactcagaagaagaggctcaggagcgaagatctgatcgctgaatttgcccaagtcacaaattggtccagctgctgcttgcgtgtctttgcatggcacccccacaccaacaagtttgcagtggccctgctagatgactcagtccgtgtgtataatgccagcagcaccatagtcccctccctgaagcaccggctgcagcgaaatgtggcgtctctggcctggaagccccttagtgcctctgtcttggctgtggcctgccagagctgcattcttatctggaccctggaccctacctccttgtctacccgaccctcttctggctgtgcccaagtgctgtctcaccctgggcatacacctgttaccagcttggcctgggcccccagtggggggcggctgctctcagcttcacccgtggatgctgctatccgggtatgggatgtctcaacagagacctgtgtcccccttccctggtttcgaggaggtggggtgaccaacctgctctggtccccagacggcagcaaaatcctggctaccactccttcagctgtctttcgagtctgggaggcccagatgtggacttgtgagaggtggcctactctatcagggcgctgtcagactggctgctggagcccagatggcagccgactgctgttcactgtattgggagagccactgatttactccctgtcttttccagaacgttgtggtgagggaaaggggtgcgttggaggtgcaaagtcagcaacgattgtggcagatctgtctgagacaacaatacagacaccagatggtgaggagaggcttgggggagaggctcactccatggtctgggaccccagtggggaacgtctggctgtgcttatgaaaggaaagccaagggtacaggatggtaaaccagtcatcctcctttttcgcactcgaaacagccctgtgtttgagctccttccctgtggcattatccagggggagccaggagcccagccccagctcatcactttccatccttccttcaacaaaggggccctgctcagtgtgggctggtccacaggccgaattgcccacatcccgctgtactttgtcaatgcccagtttccacgttttagcccagtgcttgggcgggcccaggaaccccctgctgggggtggaggctctattcatgacctgcccctctttactgagacatccccaacctctgccccttgggaccctctcccagggccaccacctgttctgccccactccccacattcccacctctaagaataaataagttttccttttgttttccactca

SEQ ID NO: 76079 - DNA, 1663 bp, Homo sapiens
gtatttttccctccagccttccctagttttgtggttatctcctctccatattcttgaactcacccccgacacctgttggctcagcctcttttagccctatttttcctgtcctctcctctacctacccaaataacccagagtgggtgtccagagtgggtgtccagagtgtggtgttgagagcacttactgggcagaaggacctggggagtgcctgtccttccttgtctttcacctagaaggtacctggtaagaggcctgtgaatggtttaatcagagctgcttcctcaaccctacagtgtttgagtgggtgaagacggcatccggctgggccctggcactctgtcgatgggcctcttccctccatgggtccctgttcccccatctgtctctcaggagcgaagatctgatcgctgaatttgcccaagtcacaaattggtccagctgctgcttgcgtgtctttgcatggcacccccacaccaacaagtttgcagtggccctgctagatgactcagtccgtgtgtataatgccagcagcaccatagtcccctccctgaagcaccggctgcagcgaaatgtggcgtctctggcctggaagccccttagtgcctctgtcttggctgtggcctgccagagctgcattcttatctggaccctggaccctacctccttgtctacccgaccctcttctggctgtgcccaagtgctgtctcaccctgggcatacacctgttaccagcttggcctgggcccccagtggggggcggctgctctcagcttcacccgtggatgctgctatccgggtatgggatgtctcaacagagacctgtgtcccccttccctggtttcgaggaggtggggtgaccaacctgctctggtccccagacggcagcaaaatcctggctaccactccttcagctgtctttcgagtctgggaggcccagatgtggacttgtgagaggtggcctactctatcagggcgctgtcagactggctgctggagcccagatggcagccgactgctgttcactgtattgggagagccactgatttactccctgtcttttccagaacgttgtggtgagggaaaggggtgcgttggaggtgcaaagtcagcaacgattgtggcagatctgtctgagacaacaatacagacaccagatggtgaggagaggcttgggggagaggctcactccatggtctgggaccccagtggggaacgtctggctgtgcttatgaaaggaaagccaagggtacaggatggtaaaccagtcatcctcctttttcgcactcgaaacagccctgtgtttgagctccttccctgtggcattatccagggggagccaggagcccagccccagctcatcactttccatccttccttcaacaaaggggccctgctcagtgtgggctggtccacaggccgaattgcccacatcccgctgtactttgtcaatgcccagtttccacgttttagcccagtgcttgggcgggcccaggaaccccctgctgggggtggaggctctattcatgacctgcccctctttactgagacatccccaacctctgccccttgggaccctctcccagggccaccacctgttctgccccactccccacattcccacctctaagaataaataagttttccttttgttttccactca

SEQ ID NO: 76080 - DNA, 1730 bp, Homo sapiens
cacttccgttgagttccgcctcgccgtttgtcccttgcggtacccgtccgcatacgaatctagcccgggaaccgagttgcgggagtgcggtctgtgccgttccggccaggagtttgccgactgcagacgtcctgcgaaccggcaagatgtgctctctggggttgttccctcctccaccgcctcggggtcaagtcaccctatatgagcacaataacgagctggtgacgggcagtagctatgagagcccgccccccgacttccggggccagtggatcaatcttcctgtcctacaactgacaaaggatcccctaaagacccctggaaggctggaccatggcacaagaactgccttcatccatcaccgggagcaagtgtggaagagatgcatcaacatttggcgtgatgtgggcctttttggggtgctaaatgaaattgcaaactcagaagaagaggtgtttgagtgggtgaagacggcatccggctgggccctggcactctgtcgatgggcctcttccctccatgggtccctgttcccccatctgtctctcaggagcgaagatctgatcgctgaatttgcccaagtcacaaattggtccagctgctgcttgcgtgtctttgcatggcacccccacaccaacaagtttgcagtggccctgctagatgactcagtccgtgtgtataatgccagcagcaccatagtcccctccctgaagcaccggctgcagcgaaatgtggcgtctctggcctggaagccccttagtgcctctgtcttggctgtggcctgccagagctgcattcttatctggaccctggaccctacctccttgtctacccgaccctcttctggctgtgcccaagtgctgtctcaccctgggcatacacctgttaccagcttggcctgggcccccagtggggggcggctgctctcagcttcacccgtggatgctgctatccgggtatgggatgtctcaacagagacctgtgtcccccttccctggtttcgaggaggtggggtgaccaacctgctctggtccccagacggcagcaaaatcctggctaccactccttcagctgtctttcgagtctgggaggcccagatgtggacttgtgagaggtggcctactctatcagggcgctgtcagactggctgctggagcccagatggcagccgactgctgttcactgtattgggagagccactgatttactccctgtcttttccagaacgttgtggtgagggaaaggggtgcgttggaggtgcaaagtcagcaacgattgtggcagatctgtctgagacaacaatacagacaccagatggtgaggagaggcttgggggagaggctcactccatggtctgggaccccagtggggaacgtctggctgtgcttatgaaaggaaagccaagggtacaggatggtaaaccagtcatcctcctttttcgcactcgaaacagccctgtgtttgagctccttccctgtggcattatccagggggagccaggagcccagccccagctcatcactttccatccttccttcaacaaaggggccctgctcagtgtggaaccccctgctgggggtggaggctctattcatgacctgcccctctttactgagacatccccaacctctgccccttgggaccctctcccagggccaccacctgttctgccccactccccacattcccacctctaagaataaataagttttccttttgttttccactca

SEQ ID NO: 76081 - DNA, 2376 bp, Homo sapiens
tctaggtcgaggccggtggtaatcggccgaggttgtcccttgcggtacccgtccgcatacgaatctagcccgggaaccgagttgcgggagtgcggtctgtgccgttccggccaggagtttgccgactgcagacgtcctgcgaaccggcaagatgtgctctctggggttgttccctcctccaccgcctcggggtcaagtcaccctatatgagcacaataacgagctggtgacgggcagtagctatgagagcccgccccccgacttccggggccaggtggccagggcgaggagggaggggacctacaggcatgggggcggagtcggggactactggggaaaggaggcagtgtgacaggggcagggtcacagagtctggcggagtggaaacagcttggccccggcaggagactagaagggctggaatctgttttaggactgggattggagtataacgggggaacggttaaggagctgtggaggaggcctagagggaatggagagaatgagggagaatctagggagtgtgaggatgcgggagaactatctaaaagttggggacagtatctggggaggatcagaaggatacaacatggaacttttttccatggtgttcctgggaaggacaaggaagggaaactgacatttattgagcgtttgctatgtaagaaagaggctgagtcaggtgttttctaaaaatgtcatatggtttcataatcacagcaaccctatgaaatattattctagttgcacagatacgggagctaagacttgtttcccattctcacaagtgttagctttgtggaaatgggaaacagacctctggaatctcttatacttagcccagcggtgggttggagatggcacggaattaaagatttgggaagagactgactcaccgtcacacccctcacttttgtgctatagtggatcaatcttcctgtcctacaactgacaaaggatcccctaaagacccctggaaggctggaccatggcacaagaactgccttcatccatcaccgggagcaagtgtggaagagatgcatcaacatttggcgtgatgtgggcctttttggggtgctaaatgaaattgcaaactcagaagaagaggtgtttgagtgggtgaagacggcatccggctgggccctggcactctgtcgatgggcctcttccctccatgggtccctgttcccccatctgtctctcaggagcgaagatctgatcgctgaatttgcccaagtcacaaattgcaccatagtcccctccctgaagcaccggctgcagcgaaatgtggcgtctctggcctggaagccccttagtgcctctgtcttggctgtggcctgccagagctgcattcttatctggaccctggaccctacctccttgtctacccgaccctcttctggctgtgcccaagtgctgtctcaccctgggcatacacctgttaccagcttggcctgggcccccagtggggggcggctgctctcagcttcacccgtggatgctgctatccgggtatgggatgtctcaacagagacctgtgtcccccttccctggtttcgaggaggtggggtgaccaacctgctctggtccccagacggcagcaaaatcctggctaccactccttcagctgtctttcgagtctgggaggcccagatgtggacttgtgagaggtggcctactctatcagggcgctgtcagactggctgctggagcccagatggcagccgactgctgttcactgtattgggagagccactgatttactccctgtcttttccagaacgttgtggtgagggaaaggggtgcgttggaggtgcaaagtcagcaacgattgtggcagatctgtctgagacaacaatacagacaccagatggtgaggagaggcttgggggagaggctcactccatggtctgggaccccagtggggaacgtctggctgtgcttatgaaaggaaagccaagggtacaggatggtaaaccagtcatcctcctttttcgcactcgaaacagccctgtgtttgagctccttccctgtggcattatccagggggagccaggagcccagccccagctcatcactttccatccttccttcaacaaaggggccctgctcagtgtgggctggtccacaggccgaattgcccacatcccgctgtactttgtcaatgcccagtttccacgttttagcccagtgcttgggcgggcccaggaaccccctgctgggggtggaggctctattcatgacctgcccctctttactgagacatccccaacctctgccccttgggaccctctcccagggccaccacctgttctgccccactccccacattcccacctctaagaataaataagttttccttttgttttccactca

SEQ ID NO: 76082 - DNA, 1401 bp, Homo sapiens
ataggcggagcgatcatatgtgtgccaatcaacataggcgtgatgtgggcttttgggggtgctaaatgaaattgcaaactcagaagaagaggtgttcgagtgggtccctgttccgccggtctgcctctcaggagcgaagatctgatcgctgaatttgcccaagtcacaaattggtccagctgctgcttgcgtgtctttgcatggcacccccacaccaacaagtttgcagtggccctgctagatgactcagtccgtgtgtataatgccagcagcaccatagtcccctccctgaagcaccggctgcagcgaaatgtggcgtctctggcctggaagccccttagtgcctctgtcttggctgtggcctgccagagctgcattcttatctggaccctggaccctacctccttgtctacccgaccctcttctggctgtgcccaagtgctgtctcaccctgggcatacacctgttaccagcttggcctgggcccccagtggggggcggctgctctcagcttcacccgtggatgctgctatccgggtatgggatgtctcaacagagacctgtgtcccccttccctggtttcgaggaggtggggtgaccaacctgctctggtccccagacggcagcaaaatcctggctaccactccttcagctgtctttcgagtctgggaggcccagatgtggacttgtgagaggtggcctactctatcagggcgctgtcagactggctgctggagcccagatggcagccgactgctgttcactgtattgggagagccactgatttactccctgtcttttccagaacgttgtggtgagggaaaggggtgcgttggaggtgcaaagtcagcaacgattgtggcagatctgtctgagacaacaatacagacaccagatggtgaggagaggcttgggggagaggctcactccatggtctgggaccccagtggggaacgtctggctgtgcttatgaaaggaaagccaagggtacaggatggtaaaccagtcatcctcctttttcgcactcgaaacagccctgtgtttgagctccttccctgtggcattatccagggggagccaggagcccagccccagctcatcactttccatccttccttcaacaaaggggccctgctcagtgtgggctggtccacaggccgaattgcccacatcccgctgtactttgtcaatgcccagtttccacgttttagcccagtgcttgggcgggcccaggaaccccctgctgggggtggaggctctattcatgacctgcccctctttactgagacatccccaacctctgccccttgggaccctctcccagggccaccacctgttctgccccactccccacattcccacctctaagaataaataagttttccttttgttttccactca

SEQ ID NO: 76083 - DNA, 1480 bp, Homo sapiens
cacttccgttgagttccgcctcgccgtttgtcccttgcggtacccgtccgcatacgaatctagcccgggaaccgagttgcgggagtgcggtctgtgccgttccggccaggagtttgccgactgcagacgtcctgcgaaccggcaagatgtgctctctggggttgttccctcctccaccgcctcggggtcaagtcaccctatatgagcacaataacgagctggtgacgggcagtagctatgagagcccgccccccgacttccggggccagtggatcaatcttcctgtcctacaactgacaaaggatcccctaaagacccctggaaggctggaccatggcacaagaactgccttcatccatcaccgggagcaagtgtggaagagatgcatcaacatttggcgtgatgtgggcctttttggggtgctaaatgaaattgcaaactcagaagaagaggtgtttgagtgggtgaagacggcatccggctgggccctggcactctgtcgatgggcctcttccctccatgggtccctgttcccccatctgtctctcaggagcgaagatctgatcgctgaatttgcccaagtcacaaattggtccagctgctgcttgcgtgtctttgcatggcacccccacaccaacaagtttgcagtggccctgctagatgactcagtccgtgtgtataatgccagcagcaccatagtcccctccctgaagcaccggctgcagcgaaatgtggcgtctctggcctggaagccccttagtgcctctgtcttggctgtggcctgccagagctgcattcttatctggaccctggaccctacctccttgtctacccgaccctcttctggctgtgcccaagtgctgtctcaccctgggcatacacctgttaccagcttggcctgggcccccagtggggggcggctgctctcagcttcacccgtggatgctgctatccgggtatgggatgtctcaacagagacctgtgtcccccttccctggtttcgaggaggtggggtgaccaacctgctctggtccccagacggcagcaaaatcctggctaccactccttcagctgtctttcgagtctgggaggcccagatgtggacttgtgagaggtggcctactctatcagggcgctgtcagactggctgctggagcccagatggcagccgactgctgttcactgtattgggagagccactgatttactccctgtcttttccagaacgttgtggtgagggaaaggggtgcgttggaggtgcaaagtcagcaacgattgtggcagatctgtctgagacaacaatacagacaccagatggtgaggagaggcttggaggatagggtgcctacccggggttgtacccctttgtgtatcctaatggctgtgcttattcaaaggatatgccatgggtacatcgatggtttcaccagcttatccttcttaatgtgctcatcgatacgggtcctgtgttctgagactc

SEQ ID NO: 76084 - DNA, 1246 bp, Homo sapiens
  misc_feature (1246)..(1246): n is a, c, g, or t
cacttccgttgagttccgcctcgccgtttgtcccttgcggtacccgtccgcatacgaatctagcccgggaaccgagttgcgggagtgcggtctgtgccgttccggccaggagtttgccgactgcagacgtcctgcgaaccggcaagatgtgctctctggggttgttccctcctccaccgcctcggggtcaagtcaccctatatgagcacaataacgagctggtgacgggcagtagctatgagagcccgccccccgacttccggggccagtggatcaatcttcctgtcctacaactgacaaaggatcccctaaagacccctggaaggctggaccatggcacaagaactgccttcatccatcaccgggagcaagtgtggaagagatgcatcaacatttggcgtgatgtgggcctttttggggtgctaaatgaaattgcaaactcagaagaagaggtgtttgagtgggtgaagacggcatccggctgggccctggcactctgtcgatgggcctcttccctccatgggtccctgttcccccatctgtctctcaggagcgaagatctgatcgctgaatttgcccaagtcacaaattggtccagctgctgcttgcgtgtctttgcatggcacccccacaccaacaagtttgcagtggccctgctagatgactcagtccgtgtgtataatgccagcagcaccatagtcccctccctgaagcaccggctgcagcgaaatgtggcgtctctggcctggaagccccttagtgcctctgtcttggctgtggcctgccagagctgcattcttatctggaccctggaccctacctccttgtctacccgaccctcttctggctgtgcccaagtgctgtctcaccctgggcatacacctgttaccagcttggcctgggcccccagtggggggcggctgctctcagcttcacccgtggatgctgctatccggttatgggatgtctcacagaaactgtgtccccttcctggttcgagaggtgggtggcaactgtcttggtcccagaggagaaatctggtacatctaaggggcttcgattggaggcaatggactggaggggcaaccataaggggaaagtgggaacaaagagcgcgggctggaggaaaccagagaaccggtacacagggggggaaggggaggaacaaggcttgaacaacctgggaggagagcagcgcggaggtcatagagaagaggagaaatcagctgtcctccacactgtagcn

SEQ ID NO: 76085 - DNA, 1695 bp, Homo sapiens
tctaggtcgaggccggtggtaatcggccgaggttgtcccttgcggtacccgtccgcatacgaatctagcccgggaaccgagttgcgggagtgcggtctgtgccgttccggccaggagtttgccgactgcagacgtcctgcgaaccggcaagatgtgctctctggggttgttccctcctccaccgcctcggggtcaagtcaccctatatgagcacaataacgagctggtgacgggcagtagctatgagagcccgccccccgacttccggggccaggtggccagggcgaggagggaggggacctacaggcatgggggcggagtcggggactactggggaaaggaggcagtgtgacaggggcagggtcacagagtctggcggagtggaaacagcttggccccggcaggagactagaagggctggaatctgttttaggactgggattggagtataacgggggaacggttaaggagctgtggaggaggcctagagggaatggagagaatgagggagaatctagggagtgtgaggatgcgggagaactatctaaaagttggggacagtatctggggaggatcagaaggatacaacatggaacttttttccatggtgttcctgggaaggacaaggaagggaaactgacatttattgagcgtttgctatgtaagaaagaggctgagtcaggtgttttctaaaaatgtcatatggtttcataatcacagcaaccctatgaaatattattctagttgcacagatacgggagctaagacttgtttcccattctcacaagtgttagctttgtggaaatgggaaacagacctctggaatctcttatacttagcccagcggtgggttggagatggcacggaattaaagatttgggaagagactgactcaccgtcacacccctcacttttgtgctatagtggatcaatcttcctgtcctacaactgacaaaggatcccctaaagacccctggaaggctggaccatggcacaagaactgccttcatccatcaccgggagcaagtgtggaagagatgcatcaacatttggcgtgatgtgggcctttttggggtgctaaatgaaattgcaaactcagaagaagagggtgagggaaaggggtgcgttggaggtgcaaagtcagcaacgattgtggcagatctgtctgagacaacaatacagacaccagatggtgaggagaggcttgggggagaggctcactccatggtctgggaccccagtggggaacgtctggctgtgcttatgaaaggaaagccaagggtacaggatggtaaaccagtcatcctcctttttcgcactcgaaacagccctgtgtttgagctccttccctgtggcattatccagggggagccaggagcccagccccagctcatcactttccatccttccttcaacaaaggggccctgctcagtgtgggctggtccacaggccgaattgcccacatcccgctgtactttgtcaatgcccagtttccacgttttagcccagtgcttgggcgggcccaggaaccccctgctgggggtggaggctctattcatgacctgcccctctttactgagacatccccaacctctgccccttgggaccctctcccagggccaccacctgttctgccccactccccacattcccacctctaagaataaataagttttccttttgttttccactca

SEQ ID NO: 76086 - DNA, 1326 bp, Homo sapiens
tctaggtcgaggccggtggtaatcggccgaggttgtcccttgcggtacccgtccgcatacgaatctagcccgggaaccgagttgcgggagtgcggtctgtgccgttccggccaggagtttgccgactgcagacgtcctgcgaaccggcaagatgtgctctctggggttgttccctcctccaccgcctcggggtcaagtcaccctatatgagcacaataacgagctggtgacgggcagtagctatgagagcccgccccccgacttccggggccaggtggccagggcgaggagggaggggacctacaggcatgggggcggagtcggggactactggggaaaggaggcagtgtgacaggggcagggtcacagagtctggcggagtggaaacagcttggccccggcaggagactagaagggctggaatctgttttaggactgggattggagtataacgggggaacggttaaggagctgtggaggaggcctagagggaatggagagaatgagggagaatctagggagtgtgaggatgcgggagaactatctaaaagttggggacagtatctggggaggatcagaaggatacaacatggaacttttttccatggtgttcctgggaaggacaaggaagggaaactgacatttattgagcgtttgctatgtaagaaagaggctgagtcaggtgttttctaaaaatgtcatatggtttcataatcacagcaaccctatgaaatattattctagttgcacagatacgggagctaagacttgtttcccattctcacaagtgttagctttgtggaaatgggaaacagacctctggaatctcttatacttagcccagcggtgggttggagatggcacggaattaaagatttgggaagagactgactcaccgtcacacccctcacttttgtgctatagtggatcaatcttcctgtcctacaactgacaaaggatcccctaaagacccctggaaggctggaccatggcacaagaactgccttcatccatcaccgggagcaagtgtggaagagatgcatcaacatttggcgtgatgtgggcctttttggggtgctaaatgaaattgcccacatcccgctgtactttgtcaatgcccagtttccacgttttagcccagtgcttgggcgggcccaggaaccccctgctgggggtggaggctctattcatgacctgcccctctttactgagacatccccaacctctgccccttgggaccctctcccagggccaccacctgttctgccccactccccacattcccacctctaagaataaataagttttccttttgttttccactca

SEQ ID NO: 76087 - DNA, 351 bp, Homo sapiens
tggggcttccaggagttggatggagaagctgagggccttggctgctgtatggctctgccaggtggcccttctttgggcccagactctgatccttttctttcccttctctgcagggctggtccacaggccgaattgcccacatcccgctgtactttgtcaatgcccagtttccacgttttagcccagtgcttgggcgggcccaggaaccccctgctgggggtggaggctctattcatgacctgcccctctttactgagacatccccaacctctgccccttgggaccctctcccagggccaccacctgttctgccccactccccacattcccacctctaagaataaataagtt

SEQ ID NO: 76088 - DNA, 407 bp, Homo sapiens
ctcgtgaaagcactctttcaccctggcctgagaccttgcagattacctcttctctgttgacctgctcgtggtgacttggtcgtttttccccttcgctgtttttttcttttaactttcacaatccttattcctttttcacaacctggatttgagcccagagtgggccatcaggataggaggttttagcaggaggcaaagaaatagaattttggggatggcttcttgtcatcttctgactccacatcctctgtgttcccctccagaccctcttctggctgtgcccaagtgctgtctcaccctgggcatacacctgttaccagcttggcctgggcccccagtggggggcggctgctctcagcttcacccgtggatgctgctatccgggtgagtgggtccctgcccctcat

SEQ ID NO: 76089 - DNA, 1820 bp, Homo sapiens
cacttccgttgagttccgcctcgccgtttgtcccttgcggtacccgtccgcatacgaatctagcccgggaaccgagttgcgggagtgcggtctgtgccgttccggccaggagtttgccgactgcagacgtcctgcgaaccggcaagatgtgctctctggggttgttccctcctccaccgcctcggggtcaagtcaccctatatgagcacaataacgagctggtgacgggcagtagctatgagagcccgccccccgacttccggggccagtggatcaatcttcctgtcctacaactgacaaaggatcccctaaagacccctggaaggctggaccatggcacaagaactgccttcatccatcaccgggagcaagtgtggaagagatgcatcaacatttggcgtgatgtgggcctttttggggtgctaaatgaaattgcaaactcagaagaagaggtgtttgagtgggtgaagacggcatccggctgggccctggcactctgtcgatgggcctcttccctccatgggtccctgttcccccatctgtctctcaggagcgaagatctgatcgctgaatttgcccaagtcacaaattggtccagctgctgcttgcgtgtctttgcatggcacccccacaccaacaagtttgcagtggccctgctagatgactcagtccgtgtgtataatgccagcagcaccatagtcccctccctgaagcaccggctgcagcgaaatgtggcgtctctggcctggaagccccttagtgcctctgtcttggctgtggcctgccagagctgcattcttatctggaccctggaccctacctccttgtctacccgaccctcttctggctgtgcccaagtgctgtctcaccctgggcatacacctgttaccagcttggcctgggcccccagtggggggcggctgctctcagcttcacccgtggatgctgctatccgggtatgggatgtctcaacagagacctgtgtcccccttccctggtttcgaggaggtggggtgaccaacctgctctggtccccagacggcagcaaaatcctggctaccactccttcagctgtctttcgagtctgggaggcccagatgtggacttgtgagaggtggcctactctatcagggcgctgtcagactggctgctggagcccagatggcagccgactgctgttcactgtattgggagagccactgatttactccctgtcttttccagaacgttgtggtgagggaaaggggtgcgttggaggtgcaaagtcagcaacgattgtggcagatctgtctgagacaacaatacagacaccagatggtgaggagaggcttgggggagaggctcactccatggtctgggaccccagtggggaacgtctggctgtgcttatgaaaggaaagccaagggtacaggatggtaaaccagtcatcctcctttttcgcactcgaaacagccctgtgtttgagctccttccctgtggcattatccagggggagccaggagcccagccccagctcatcactttccatccttccttcaacaaaggggccctgctcagtgtgggctggtccacaggccgaattgcccacatcccgctgtactttgtcaatgcccagtttccacgttttagcccagtgcttgggcgggcccaggaaccccctgctgggggtggaggctctattcatgacctgcccctctttactgagacatccccaacctctgccccttgggaccctctcccagggccaccacctgttctgccccactccccacattcccacctctaagaataaataagttttccttttgttttccactca

SEQ ID NO: 76090 - DNA, 1825 bp, Homo sapiens
tctaggtcgaggccggtggtaatcggccgaggttgtcccttgcggtacccgtccgcatacgaatctagcccgggaaccgagttgcgggagtgcggtctgtgccgttccggccaggagtttgccgactgcagacgtcctgcgaaccggcaagatgtgctctctggggttgttccctcctccaccgcctcggggtcaagtcaccctatatgagcacaataacgagctggtgacgggcagtagctatgagagcccgccccccgacttccggggccagtggatcaatcttcctgtcctacaactgacaaaggatcccctaaagacccctggaaggctggaccatggcacaagaactgccttcatccatcaccgggagcaagtgtggaagagatgcatcaacatttggcgtgatgtgggcctttttggggtgctaaatgaaattgcaaactcagaagaagaggtgtttgagtgggtgaagacggcatccggctgggccctggcactctgtcgatgggcctcttccctccatgggtccctgttcccccatctgtctctcaggagcgaagatctgatcgctgaatttgcccaagtcacaaattggtccagctgctgcttgcgtgtctttgcatggcacccccacaccaacaagtttgcagtggccctgctagatgactcagtccgtgtgtataatgccagcagcaccatagtcccctccctgaagcaccggctgcagcgaaatgtggcgtctctggcctggaagccccttagtgcctctgtcttggctgtggcctgccagagctgcattcttatctggaccctggaccctacctccttgtctacccgaccctcttctggctgtgcccaagtgctgtctcaccctgggcatacacctgttaccagcttggcctgggcccccagtggggggcggctgctctcagcttcacccgtggatgctgctatccgggtatgggatgtctcaacagagacctgtgtcccccttccctggtttcgaggaggtggggtgaccaacctgctctggtccccagacggcagcaaaatcctggctaccactccttcagctgtctttcgagtctgggaggcccagatgtggacttgtgagaggtggcctactctatcagggcgctgtcagactggctgctggagcccagatggcagccgactgctgttcactgtattgggagagccactgatttactccctgtcttttccagaacgttgtggtgagggaaaggggtgcgttggaggtgcaaagtcagcaacgattgtggcagatctgtctgagacaacaatacagacaccagatggtgaggagaggcttgggggagaggctcactccatggtctgggaccccagtggggaacgtctggctgtgcttatgaaaggaaagccaagggtacaggatggtaaaccagtcatcctcctttttcgcactcgaaacagccctgtgtttgagctccttccctgtggcattatccagggggagccaggagcccagccccagctcatcactttccatccttccttcaacaaaggggccctgctcagtgtgggctggtccacaggccgaattgcccacatcccgctgtactttgtcaatgcccagtttccacgttttagcccagtgcttgggcgggcccaggaaccccctgctgggggtggaggctctattcatgacctgcccctctttactgagacatccccaacctctgccccttgggaccctctcccagggccaccacctgttctgccccactccccacattcccacctctaagaataaataagttttccttttgttttccactca

SEQ ID NO: 76091 - DNA, 2475 bp, Homo sapiens
tctaggtcgaggccggtggtaatcggccgaggttgtcccttgcggtacccgtccgcatacgaatctagcccgggaaccgagttgcgggagtgcggtctgtgccgttccggccaggagtttgccgactgcagacgtcctgcgaaccggcaagatgtgctctctggggttgttccctcctccaccgcctcggggtcaagtcaccctatatgagcacaataacgagctggtgacgggcagtagctatgagagcccgccccccgacttccggggccaggtggccagggcgaggagggaggggacctacaggcatgggggcggagtcggggactactggggaaaggaggcagtgtgacaggggcagggtcacagagtctggcggagtggaaacagcttggccccggcaggagactagaagggctggaatctgttttaggactgggattggagtataacgggggaacggttaaggagctgtggaggaggcctagagggaatggagagaatgagggagaatctagggagtgtgaggatgcgggagaactatctaaaagttggggacagtatctggggaggatcagaaggatacaacatggaacttttttccatggtgttcctgggaaggacaaggaagggaaactgacatttattgagcgtttgctatgtaagaaagaggctgagtcaggtgttttctaaaaatgtcatatggtttcataatcacagcaaccctatgaaatattattctagttgcacagatacgggagctaagacttgtttcccattctcacaagtgttagctttgtggaaatgggaaacagacctctggaatctcttatacttagcccagcggtgggttggagatggcacggaattaaagatttgggaagagactgactcaccgtcacacccctcacttttgtgctatagtggatcaatcttcctgtcctacaactgacaaaggatcccctaaagacccctggaaggctggaccatggcacaagaactgccttcatccatcaccgggagcaagtgtggaagagatgcatcaacatttggcgtgatgtgggcctttttggggtgctaaatgaaattgcaaactcagaagaagaggtgtttgagtgggtgaagacggcatccggctgggccctggcactctgtcgatgggcctcttccctccatgggtccctgttcccccatctgtctctcaggagcgaagatctgatcgctgaatttgcccaagtcacaaattggtccagctgctgcttgcgtgtctttgcatggcacccccacaccaacaagtttgcagtggccctgctagatgactcagtccgtgtgtataatgccagcagcaccatagtcccctccctgaagcaccggctgcagcgaaatgtggcgtctctggcctggaagccccttagtgcctctgtcttggctgtggcctgccagagctgcattcttatctggaccctggaccctacctccttgtctacccgaccctcttctggctgtgcccaagtgctgtctcaccctgggcatacacctgttaccagcttggcctgggcccccagtggggggcggctgctctcagcttcacccgtggatgctgctatccgggtatgggatgtctcaacagagacctgtgtcccccttccctggtttcgaggaggtggggtgaccaacctgctctggtccccagacggcagcaaaatcctggctaccactccttcagctgtctttcgagtctgggaggcccagatgtggacttgtgagaggtggcctactctatcagggcgctgtcagactggctgctggagcccagatggcagccgactgctgttcactgtattgggagagccactgatttactccctgtcttttccagaacgttgtggtgagggaaaggggtgcgttggaggtgcaaagtcagcaacgattgtggcagatctgtctgagacaacaatacagacaccagatggtgaggagaggcttgggggagaggctcactccatggtctgggaccccagtggggaacgtctggctgtgcttatgaaaggaaagccaagggtacaggatggtaaaccagtcatcctcctttttcgcactcgaaacagccctgtgtttgagctccttccctgtggcattatccagggggagccaggagcccagccccagctcatcactttccatccttccttcaacaaaggggccctgctcagtgtgggctggtccacaggccgaattgcccacatcccgctgtactttgtcaatgcccagtttccacgttttagcccagtgcttgggcgggcccaggaaccccctgctgggggtggaggctctattcatgacctgcccctctttactgagacatccccaacctctgccccttgggaccctctcccagggccaccacctgttctgccccactccccacattcccacctctaagaataaataagttttccttttgttttccactca

SEQ ID NO: 76092 - DNA, 2376 bp, Homo sapiens
tctaggtcgaggccggtggtaatcggccgaggttgtcccttgcggtacccgtccgcatacgaatctagcccgggaaccgagttgcgggagtgcggtctgtgccgttccggccaggagtttgccgactgcagacgtcctgcgaaccggcaagatgtgctctctggggttgttccctcctccaccgcctcggggtcaagtcaccctatatgagcacaataacgagctggtgacgggcagtagctatgagagcccgccccccgacttccggggccaggtggccagggcgaggagggaggggacctacaggcatgggggcggagtcggggactactggggaaaggaggcagtgtgacaggggcagggtcacagagtctggcggagtggaaacagcttggccccggcaggagactagaagggctggaatctgttttaggactgggattggagtataacgggggaacgtatctggggaggatcagaaggatacaacatggaacttttttccatggtgttcctgggaaggacaaggaagggaaactgacatttattgagcgtttgctatgtaagaaagaggctgagtcaggtgttttctaaaaatgtcatatggtttcataatcacagcaaccctatgaaatattattctagttgcacagatacgggagctaagacttgtttcccattctcacaagtgttagctttgtggaaatgggaaacagacctctggaatctcttatacttagcccagcggtgggttggagatggcacggaattaaagatttgggaagagactgactcaccgtcacacccctcacttttgtgctatagtggatcaatcttcctgtcctacaactgacaaaggatcccctaaagacccctggaaggctggaccatggcacaagaactgccttcatccatcaccgggagcaagtgtggaagagatgcatcaacatttggcgtgatgtgggcctttttggggtgctaaatgaaattgcaaactcagaagaagaggtgtttgagtgggtgaagacggcatccggctgggccctggcactctgtcgatgggcctcttccctccatgggtccctgttcccccatctgtctctcaggagcgaagatctgatcgctgaatttgcccaagtcacaaattggtccagctgctgcttgcgtgtctttgcatggcacccccacaccaacaagtttgcagtggccctgctagatgactcagtccgtgtgtataatgccagcagcaccatagtcccctccctgaagcaccggctgcagcgaaatgtggcgtctctggcctggaagccccttagtgcctctgtcttggctgtggcctgccagagctgcattcttatctggaccctggaccctacctccttgtctacccgaccctcttctggctgtgcccaagtgctgtctcaccctgggcatacacctgttaccagcttggcctgggcccccagtggggggcggctgctctcagcttcacccgtggatgctgctatccgggtatgggatgtctcaacagagacctgtgtcccccttccctggtttcgaggaggtggggtgaccaacctgctctggtccccagacggcagcaaaatcctggctaccactccttcagctgtctttcgagtctgggaggcccagatgtggacttgtgagaggtggcctactctatcagggcgctgtcagactggctgctggagcccagatggcagccgactgctgttcactgtattgggagagccactgatttactccctgtcttttccagaacgttgtggtgagggaaaggggtgcgttggaggtgcaaagtcagcaacgattgtggcagatctgtctgagacaacaatacagacaccagatggtgaggagaggcttgggggagaggctcactccatggtctgggaccccagtggggaacgtctggctgtgcttatgaaaggaaagccaagggtacaggatggtaaaccagtcatcctcctttttcgcactcgaaacagccctgtgtttgagctccttccctgtggcattatccagggggagccaggagcccagccccagctcatcactttccatccttccttcaacaaaggggccctgctcagtgtgggctggtccacaggccgaattgcccacatcccgctgtactttgtcaatgcccagtttccacgttttagcccagtgcttgggcgggcccaggaaccccctgctgggggtggaggctctattcatgacctgcccctctttactgagacatccccaacctctgccccttgggaccctctcccagggccaccacctgttctgccccactccccacattcccacctctaagaataaataagttttccttttgttttccactca

SEQ ID NO: 76093 - DNA, 1735 bp, Homo sapiens
cacttccgttgagttccgcctcgccgtttgtcccttgcggtacccgtccgcatacgaatctagcccgggaaccgagttgcgggagtgcggtctgtgccgttccggccaggagtttgccgactgcagacgtcctgcgaaccggcaagatgtgctctctggggttgttccctcctccaccgcctcggggtcaagtcaccctatatgagcacaataacgagctggtgacgggcagtagctatgagagcccgccccccgacttccggggccagtggatcaatcttcctgtcctacaactgacaaaggatcccctaaagacccctggaaggctggaccatggcacaagaactgccttcatccatcaccgggagcaagtgtggaagagatgcatcaacatttggcgtgatgtgggcctttttggggtgctaaatgaaattgcaaactcagaagaagaggtgtttgagtgggtgaagacggcatccggctgggccctggcactctgtcgatgggcctcttccctccatgggtccctgttcccccatctgtctctcaggagcgaagatctgatcgctgaatttgcccaagtcacaaattggtccagctgctgcttgcgtgtctttgcatggcacccccacaccaacaagtttgcagtggccctgctagatgactcagtccgtgtgtataatgccagcagcaccatagtcccctccctgaagcaccggctgcagcgaaatgtggcgtctctggcctggaagccccttagtgcctctgtcttggctgtggcctgccagagctgcattcttatctggaccctggaccctacctccttgtctacccgaccctcttctggctgtgcccaagtgctgtctcaccctgggcatacacctgttaccagcttggcctgggcccccagtggggggcggctgctctcagcttcacccgtggatgctgctatccgggtatgggatgtctcaacagagacctgtgtcccccttccctggtttcgaggaggtggggtgaccaacctgctctggtccccagacggcagcaaaatcctggctaccactccttcagctgtctttcgagtctgggaggcccagatgtggacttgtgagaggtggcctactctatcagggcgctgtcagactggctgctggagcccagatggcagccgactgctgttcactgtattgggagagccactgatttactccctgtcttttccagaacgttgtggtgagggaaaggggtgcgttggaggtgcaaagtcagcaacgattgtggcagatctgtctgagacaacaatacagacaccagatggtgaggagaggcttgggggagaggctcactccatggtctgggaccccagtggggaacgtctggctgtgcttatgaaaggaaagccaagggtacaggatggtaaaccagtcatcctcctttttcgcactcgaaacagccctgtgtttgagctccttccctgggctggtccacaggccgaattgcccacatcccgctgtactttgtcaatgcccagtttccacgttttagcccagtgcttgggcgggcccaggaaccccctgctgggggtggaggctctattcatgacctgcccctctttactgagacatccccaacctctgccccttgggaccctctcccagggccaccacctgttctgccccactccccacattcccacctctaagaataaataagttttccttttgttttccactca

SEQ ID NO: 76094 - DNA, 2129 bp, Homo sapiens
cacttccgttgagttccgcctcgccgtttgtcccttgcggtacccgtccgcatacgaatctagcccgggaaccgagttgcgggagtgcggtctgtgccgttccggccaggagtttgccgactgcagacgtcctgcgaaccggcaagatgtgctctctggggttgttccctcctccaccgcctcggggtcaagtcaccctatatgagcacaataacgagctggtgacgggcagtagctatgagagcccgccccccgacttccggggccagtggatcaatcttcctgtcctacaactgacaaaggatcccctaaagacccctggaaggctggaccatggcacaagaactgccttcatccatcaccgggagcaagtgtggaagagatgcatcaacatttggcgtgatgtgggcctttttggggtgctaaatgaaattgcaaactcagaagaagaggtgtttgagtgggtgaagacggcatccggctgggccctggcactctgtcgatgggcctcttccctccatgggtccctgttcccccatctgtctctcaggagcgaagatctgatcgctgaatttgcccaagtcacaaattggtccagctgctgcttgcgtgtctttgcatggcacccccacaccaacaagtttgcagtggccctgctagatgactcagtccgtgtgtataatgccagcaggtgtgtgtggggacaccaggtgggctctgacttgtcaatatcaccttcccttgccagccttggttccggggagtcctgtagttcttgaacctgattcatggggctccttccagaactggggtcagggaagctccataactggatgcgtgcttcttctagacctaacctttatcccctcctgtcctatggtgcccctggcccctggatggatcatccttcttctctgtggctttccctccttaactgcactctggtccctggagccttagtgttcctgccttgactcagtttcctgccccttcaccctagcaccatagtcccctccctgaagcaccggctgcagcgaaatgtggcgtctctggcctggaagccccttagtgcctctgtcttggctgtggcctgccagagctgcattcttatctggaccctggaccctacctccttgtctacccgaccctcttctggctgtgcccaagtgctgtctcaccctgggcatacacctgttaccagcttggcctgggcccccagtggggggcggctgctctcagcttcacccgtggatgctgctatccgggtatgggatgtctcaacagagacctgtgtcccccttccctggtttcgaggaggtggggtgaccaacctgctctggtccccagacggcagcaaaatcctggctaccactccttcagctgtctttcgagtctgggaggcccagatgtggacttgtgagaggtggcctactctatcagggcgctgtcagactggctgctggagcccagatggcagccgactgctgttcactgtattgggagagccactgatttactccctgtcttttccagaacgttgtggtgagggaaaggggtgcgttggaggtgcaaagtcagcaacgattgtggcagatctgtctgagacaacaatacagacaccagatggtgaggagaggcttgggggagaggctcactccatggtctgggaccccagtggggaacgtctggctgtgcttatgaaaggaaagccaagggtacaggatggtaaaccagtcatcctcctttttcgcactcgaaacagccctgtgtttgagctccttccctgtggcattatccagggggagccaggagcccagccccagctcatcactttccatccttccttcaacaaaggggccctgctcagtgtgggctggtccacaggccgaattgcccacatcccgctgtactttgtcaatgcccagtttccacgttttagcccagtgcttgggcgggcccaggaaccccctgctgggggtggaggctctattcatgacctgcccctctttactgagacatccccaacctctgccccttgggaccctctcccagggccaccacctgttctgccccactccccacattcccacctctaagaataaataagttttccttttgttttccactca

SEQ ID NO: 76095 - DNA, 1566 bp, Homo sapiens
cactgttcctcctctctgaggcttttccctcagctttccagccagctgcctgtgacatagcctgtattttcctctgggtgatccacaggcctgggaggattaatttgtggatcaatcttcctgtcctacaactgacaaaggatcccctaaagacccctggaaggctggaccatggcacaagaactgccttcatccatcaccgggagcaagtgtggaagagatgcatcaacatttggcgtgatgtgggcctttttggggtgctaaatgaaattgcaaactcagaagaagaggctcaggagcgaagatctgatcgctgaatttgcccaagtcacaaattggtccagctgctgcttgcgtgtctttgcatggcacccccacaccaacaagtttgcagtggccctgctagatgactcagtccgtgtgtataatgccagcagcaccatagtcccctccctgaagcaccggctgcagcgaaatgtggcgtctctggcctggaagccccttagtgcctctgtcttggctgtggcctgccagagctgcattcttatctggaccctggaccctacctccttgtctacccgaccctcttctggctgtgcccaagtgctgtctcaccctgggcatacacctgttaccagcttggcctgggcccccagtggggggcggctgctctcagcttcacccgtggatgctgctatccgggtatgggatgtctcaacagagacctgtgtcccccttccctggtttcgaggaggtggggtgaccaacctgctctggtccccagacggcagcaaaatcctggctaccactccttcagctgtctttcgagtctgggaggcccagatgtggacttgtgagaggtggcctactctatcagggcgctgtcagactggctgctggagcccagatggcagccgactgctgttcactgtattgggagagccactgatttactccctgtcttttccagaacgttgtggtgagggaaaggggtgcgttggaggtgcaaagtcagcaacgattgtggcagatctgtctgagacaacaatacagacaccagatggtgaggagaggcttgggggagaggctcactccatggtctgggaccccagtggggaacgtctggctgtgcttatgaaaggaaagccaagggtacaggatggtaaaccagtcatcctcctttttcgcactcgaaacagccctgtgtttgagctccttccctgtggcattatccagggggagccaggagcccagccccagctcatcactttccatccttccttcaacaaaggggccctgctcagtgtgggctggtccacaggccgaattgcccacatcccgctgtactttgtcaatgcccagtttccacgttttagcccagtgcttgggcgggcccaggaaccccctgctgggggtggaggctctattcatgacctgcccctctttactgagacatccccaacctctgccccttgggaccctctcccagggccaccacctgttctgccccactccccacattcccacctctaagaataaataagttttccttttgttttccactca

SEQ ID NO: 76096 - DNA, 1598 bp, Homo sapiens
tctaggtcgaggccggtggtaatcggccgaggttgtcccttgcggtacccgtccgcatacgaatctagcccgggaaccgagttgcgggagtgcggtctgtgccgttccggccaggagtttgccgactgcagacgtcctgcgaaccgtggatcaatcttcctgtcctacaactgacaaaggatcccctaaagacccctggaaggctggaccatggcacaagaactgccttcatccatcaccgggagcaagtgtggaagagatgcatcaacatttggcgtgatgtgggcctttttggggtgctaaatgaaattgcaaactcagaagaagaggtgtttgagtgggtgaagacggcatccggctgggccctggcactctgtcgatgggcctcttccctccatgggtccctgttcccccatctgtctctcaggagcgaagatctgatcgctgaatttgcccaagtcacaaattgcaccatagtcccctccctgaagcaccggctgcagcgaaatgtggcgtctctggcctggaagccccttagtgcctctgtcttggctgtggcctgccagagctgcattcttatctggaccctggaccctacctccttgtctacccgaccctcttctggctgtgcccaagtgctgtctcaccctgggcatacacctgttaccagcttggcctgggcccccagtggggggcggctgctctcagcttcacccgtggatgctgctatccgggtatgggatgtctcaacagagacctgtgtcccccttccctggtttcgaggaggtggggtgaccaacctgctctggtccccagacggcagcaaaatcctggctaccactccttcagctgtctttcgagtctgggaggcccagatgtggacttgtgagaggtggcctactctatcagggcgctgtcagactggctgctggagcccagatggcagccgactgctgttcactgtattgggagagccactgatttactccctgtcttttccagaacgttgtggtgagggaaaggggtgcgttggaggtgcaaagtcagcaacgattgtggcagatctgtctgagacaacaatacagacaccagatggtgaggagaggcttgggggagaggctcactccatggtctgggaccccagtggggaacgtctggctgtgcttatgaaaggaaagccaagggtacaggatggtaaaccagtcatcctcctttttcgcactcgaaacagccctgtgtttgagctccttccctgtggcattatccagggggagccaggagcccagccccagctcatcactttccatccttccttcaacaaaggggccctgctcagtgtgggctggtccacaggccgaattgcccacatcccgctgtactttgtcaatgcccagtttccacgttttagcccagtgcttgggcgggcccaggaaccccctgctgggggtggaggctctattcatgacctgcccctctttactgagacatccccaacctctgccccttgggaccctctcccagggccaccacctgttctgccccactccccacattcccacctctaagaataaataagttttccttttgttttccactca

SEQ ID NO: 76097 - DNA, 1144 bp, Homo sapiens
aaaagcataggccagcagtgctttggtatatacatggctgccatggtccccttcttgtgctgtcttccaggctgactccaggcaaaacagggcattgcggacaacagggtgagtgactgtgagaggaatctccagaagtgcgcctgggtgcgcacccagaccctcttctggctgtgcccaagtgctgtctcaccctgggcatacacctgttaccagcttggcctgggcccccagtggggggcggctgctctcagcttcacccgtggatgctgctatccgggtatgggatgtctcaacagagacctgtgtcccccttccctggtttcgaggaggtggggtgaccaacctgctctggtccccagacggcagcaaaatcctggctaccactccttcagctgtctttcgagtctgggaggcccagatgtggacttgtgagaggtggcctactctatcagggcgctgtcagactggctgctggagcccagatggcagccgactgctgttcactgtattgggagagccactgatttactccctgtcttttccagaacgttgtggtgagggaaaggggtgcgttggaggtgcaaagtcagcaacgattgtggcagatctgtctgagacaacaatacagacaccagatggtgaggagaggcttgggggagaggctcactccatggtctgggaccccagtggggaacgtctggctgtgcttatgaaaggaaagccaagggtacaggatggtaaaccagtcatcctcctttttcgcactcgaaacagccctgtgtttgagctccttccctgtggcattatccagggggagccaggagcccagccccagctcatcactttccatccttccttcaacaaaggggccctgctcagtgtgggctggtccacaggccgaattgcccacatcccgctgtactttgtcaatgcccagtttccacgttttagcccagtgcttgggcgggcccaggaaccccctgctgggggtggaggctctattcatgacctgcccctctttactgagacatccccaacctctgccccttgggaccctctcccagggccaccacctgttctgccccactccccacattcccacctctaagaataaataagttttccttttgttttccactca

SEQ ID NO: 76098 - DNA, 1384 bp, Homo sapiens
tctaggtcgaggccggtggtaatcggccgaggttgtcccttgcggtacccgtccgcatacgaatctagcccgggaaccgagttgcgggagtgcggtctgtgccgttccggccaggagtttgccgactgcagacgtcctgcgaaccggcaagatgtgctctctggggttgttccctcctccaccgcctcggggtcaagtcaccctatatgagcacaataacgagctggtgacgggcagtagctatgagagcccgccccccgacttccggggccaggtggccagggcgaggagggaggggacctacaggcatgggggcggagtcggggactactggggaaaggaggcagtgtgacaggggcagggtcacagagtctggcggagtggaaacagcttggccccggcaggagactagaagggctggaatctgttttaggactgggattggagtataacgggggaacggttaaggagctgtggaggaggcctagagggaatggagagaatgagggagaatctagggagtgtgaggatgcgggagaactatctaaaagttggggacagtatctggggaggatcagaaggatacaacatggaacttttttccatggtgttcctgggaaggacaaggaagggaaactgacatttattgagcgtttgctatgtaagaaagaggctgagtcaggtgttttctaaaaatgtcatatggtttcataatcacagcaaccctatgaaatattattctagttgcacagatacgggagctaagacttgtttcccattctcacaagtgttagctttgtggaaatgggaaacagacctctggaatctcttatacttagcccagcggtgggttggagatggcacggaattaaagatttgggaagagactgactcaccgtcacacccctcacttttgtgctatagtggatcaatcttcctgtcctacaactgacaaaggatcccctaaagacccctggaaggctggaccatggcacaagaactgccttcatccatcaccgggagcaagtgtggaagagatgcatcaacatttggcgtgatgtgggcctttttggggtgctaaatgaaattccatccttccttcaacaaaggggccctgctcagtgtgggctggtccacaggccgaattgcccacatcccgctgtactttgtcaatgcccagtttccacgttttagcccagtgcttgggcgggcccaggaaccccctgctgggggtggaggctctattcatgacctgcccctctttactgagacatccccaacctctgccccttgggaccctctcccagggccaccacctgttctgccccactccccacattcccacctctaagaataaataagttttccttttgttttccactca

SEQ ID NO: 76099 - DNA, 311 bp, Homo sapiens
tttttaaatagagataggtttcactatgttgcccaggctggtctccaacttttgagctcaagcaatctgcccgcctcagcctcccaaagtgctggtattacaggcgtgagccactgcaccagaactttaatcatactttataaacaaagattagtctgacagaggttaaatcccctcacccaaaagcaaccacaagtcagtatcttaacacttccttcttaagggttttaaaaacatatttgagttagtattttatcttttatatctcgcctattaaaccactaataattttccatgccactaaaatgcaa

SEQ ID NO: 76100 - DNA, 333 bp, Homo sapiens
tggaatccagtcagtgtgttttcaagccacctcaagggcccttgctcctttgttgccctgcgtctccacccctttgacccctttatccagtgggtaatcatttaacctattcttggaccttgatcctcaatacggaacttgtgaattttgctcatcagttgataatgggagaaatattcgcttctgtccagtcctgggctcccacagggctgagtaaggacatttctctgccccaacttccagaggcaggagattagacagggatgacagttaaggggttactggtaataggaaaatcattaaaactggagatataactaggtaaaaaagaaa

SEQ ID NO: 76101 - DNA, 352 bp, Homo sapiens
ataatgtaattgcagcatccacaaagaaagcttcatgcatgtagtatgtatgcatatggtaatttgttttgcctgtgtataccttataaatctttattagtaaaatcttgattaccaacattttcaaaatccatagtttttctgtactgctataaatcacttagaaaataagataggttatcaattttttatttacttgttatttgttttacaaaaatttgaaagtatagagtttcacaaagctttttgttatttttaatttatataaaatagtcctacaatgcatatcttggttaatgtatgaatcaaatttttcatgatatccttatgaataaaatacagcctacatgct

SEQ ID NO: 76102 - DNA, 418 bp, Homo sapiens
tggccctcactcttagctccccaagtatttcgctccctttccctctctcctcaattccagcaacagtgatctgtgtgccctgcatgtctctgcatccctcattctccttccatgaggacattaaaataaattcatgatatcctgcctttgggcctttttgtaaatatccttcacccagcacatagaattcctaccgctagtcatatttagtacatgataatctacccattacaataaccacctcctcattctttcttgttctggacctcttcaatgctcatattgaagagactgtttttgactcttcagatctcctagaatgttcttgaggtctttcctttgattactttgtgatttatcaaatgaaacatgggacccttgaaggtaacttcttctgcaggattttttgtttgtttgt

SEQ ID NO: 76103 - DNA, 821 bp, Homo sapiens
ctcccctgaattcatttgctgtggcaaatatggcttccttaaaatctgctgtttatgaaaatacaggacacaacaaaaagacagctgtctgcaagtcatgaagacagccattaccaggaaccaaactgaatggtaccttgatcttgtgcttttcggtctcgagagctgtgagaaacaaatgcctgctgttcaaattgtccagcctatggtattttgttacggcagtctgagctgaccaagataaccggaaacctagaaaaaaaactgagagactagataacacatgctccagaaaaaaaagtacttgatccagaaaaagttgaggaaggagatatctttttcagttgtgcgtcaatttcagtatgttgcctgcaataacaaataaataattgatgaactaaatggacgttatgtcatataaactcttaataagaacacctatgaatatttatgaagagcataattttacagaggaacacccaagtaatggtcacaggaattgaagagcttgcaagggtcaagcgctaatcagtgatggaacttggttttaaactccattatttcctgcagcagagtctacatcctcaaatgtttcaccatgccatctacagtctgatgtgctttccagatttctcaccattccacttgatctcctttaaatgactttgatttgagagtgtgcatcttcaaatatagtgctcagaactggatgcaatgctcacaatatcatgtgaccagcactaagtcgatacaagtttattcctttgaatttgtcctggcgtttgacaaggatattgtggatattaaagatatttatttca

SEQ ID NO: 76104 - DNA, 487 bp, Homo sapiens
aggccgaggtgggtggatcacctgaggtcaggggttcaagaccagtctggccaacatggtgaaaccccatctctactaaaaacacaaaaattacctgggtgcggtggcaggcgcctgtagtcccaggtatttggaaggctgaggcaggagaattgccaacccaggaggcggaggttgcagtgagccgagatcgtgccactgcgctccagcctggtgacagagtgagactccatctcaataaataaataaataaataaataaataaataaataaataaatcatgttctaccaaaatatgaactactctcccaaactataagccaaaattacaattaagtaaaaatagtcaaaatgaaagcccacacttccagtcctgttttataagcaattagggaaaataataggatgcctaatttttcaactctgtgacctacgttgcaatctagaccttcatttctttcttttttttttttttttttttttttta

SEQ ID NO: 76105 - DNA, 642 bp, Homo sapiens
gcttttactgcagcatgatagaaaaattaaccacaggtatatcataacaaaaagaccatgagttaccattttcacaaagttcagatatatttaaattagcctatttaatctttttttggttgttgttgagatggagtctcactctgtctctcaggctggagtacagtggcacaatctcagctcactgcaacctctgcctcccaggttcaagtaattctcctgcctcagcctcccgagtagcggggattacaggtgcccaacaccacacatggctaatttttgtatttttagtagagatggggttttgccatgttagccaggctggtcttgaactcctgacctcagatgatccgcctgcctcggcctctcaaagtgctgggattacaggcatgagccatcgcacccagcctatggtacacctttactgaggaaacaattcaggaacatcactcttagtaaggcaattgttgattataagtcaaaaaaacaccatcatgtacaaattcaggggattttgtataccttgtttttttggttacaaatatgcaaaattaaagatgtttgctaatacttgtttccaatttttaaacttttcaagtgttgcactgttaataatgttaaaataaaaggcatttgacttag

SEQ ID NO: 76106 - DNA, 2962 bp, Homo sapiens
  misc_feature (2905)..(2905): n is a, c, g, or t
aacctgtttgtggcctggtcggcgtcccgtagggcgccctcccgcgctaggccggccggcgtggcgctcggcgccgaacaggccccgaggaggccgcagttaggcctagtgattatccagttgccctgagcggctgcggaggtgcgctccataagcgggcagggtgggaaaagttcgcccgtttgtccggaaggcagttgatggacctggggtcgacaccactgcggacgcagggcacggcacgggggcgagaaggcgaaggctgcaggcgtgaggagctgtgactaatgagaattaaaggccatggatgaagatgaatttgaattgcagccacaagagccaaactcattttttgatggaataggagctgatgctacacacatggatggtgatcagattgttgtggaaatacaagaagcagtttttgtttctaatattgtggattctgacataactgtgcataactttgttcctgatgacccagactcagttgtaatccaagatgttgttgaagatgttgtcatagaggaggatgttcagtgctcagatatcttagaagaggcagatgtatctgaaaatgtcatcattcctgagcaagtgctggactcagatgtaactgaagaagtttctttaccacactgcacagtcccagatgatgttttagcttctgacattacttcaacctcaatgtctatgccagaacatgttttaacgagtgaatccatgcatgtgtgtgacattggacatgttgaacatatggtgcatgatagtgtagtggaagcagaaatcattactgatcctctgacgagtgacatagtttcagaagaagtattggtagcagactgtgcccctgaagcagtcatagatgccagcgggatctcagtggaccagcaagataatgacaaagccagctgtgaggactacctaatgatttcgttggatgatgctggcaaaatagaacatgatggttccactggagtgaccatcgatgcagaatcagaaatggatccttgtaaagtggatagcacttgtcctgaagtcatcaaggtgtacatttttaaagctgaccctggagaagatgacttaggtggaactgtagacattgtggagagtgaacctgaaaatgatcatggagttgaactacttgatcagaacagcagtattcgtgttcccagggaaaagatggtttatatgactgtcaatgactctcaacaagaagatgaagatttaaatgttgctgaaattgctgatgaagtttatatggaagtgatcgtaggagaggaggatgctgctgttgcagcagcagcagctgctgtgcatgagcagcaaattgatgaggatgaaatgaaaaccttcgtaccaattgcatgggcagcagcttatggtaataattctgatggaattgaaaaccggaatggcactgcaagtgccctcttgcacatagatgagtctgctggccttggcagactggctaaacagaaaccaaagaaaaagagaagacctgattccaggcagtaccaaacagcaataattattggccctgatggtcatcctttgactgtctatccttgcatgatttgtgggaagaagtttaagtcgaggggttttttgaaaagacacatgaaaaaccatcctgaacaccttgccaagaagaagtaccactgtactgactgtgattacactaccaataagaagataagtttacataaccacctggagagccacaagctgaccagcaaggcagagaaggccattgaatgtgatgagtgtgggaagcatttttctcatgcaggggctttgtttactcacaaaatggtgcataaggaaaaaggggccaacaaaatgcacaagtgtaaattctgtgaatatgagacagctgaacaggggttattgaatcgccacctcttggcagtccacagcaagaactttcctcatatttgtgtggagtgtggtaaaggtttccgacacccgtcggaactgagaaagcacatgcgaatccataccggcgagaagccataccaatgccagtactgtgaatataggtctgcagactcttctaacttgaaaacacatataaaaacaaagcatagtaaagagatgccattcaagtgtgacatttgtcttctgactttctcagataccaaagaagtgcagcaacatactcttgtccaccaagaaagcaaaacacatcagtgtttgcattgcgaccacaagagttcaaactcaagtgatttgaaacgacatgtaatttcagttcatacgaaagactatcctcataagtgtgagatgtgcgagaaaggctttcacaggccttcagaacttaagaaacatgtggctgtccacaaaggtaaaaaaatgcaccaatgtagacattgtgactttaagattgcagacccatttgttctaagtcgccatattctctcagttcacacaaaggatcttccatttaggtgtaagagatgtagaaagggatttaggcaacaaaatgagcttaaaaagcatatgaagacacacagtggcaggaaagtatatcagtgtgagtactgtgagtatagcactacagatgcctcaggctttaaacggcacgttatttccattcatacaaaagactatcctcatcggtgtgagtactgcaagaaaggcttccgaagaccttcagaaaagaaccagcacataatgagacaccataaagaagttggtctgccctaacagtgtgtctacaagcttgtaaagatgttggccttgaagcagaaaattcattttttaaagccagtcttgttcacatccattactatacattgaattatgctgtgtaaaaatagaattattgcttctagtccacttttctttacattttattcaatacgctgtcctgaatcctattcagtttctttaatagatgagnaaaaatagcaacaagcaagttgcttataataaaataatttgtgattctcccgaattc

SEQ ID NO: 76107 - DNA, 2147 bp, Homo sapiens
  misc_feature (2090)..(2090): n is a, c, g, or t
aacctgtttgtggcctggtcggcgtcccgtagggcgccctcccgcgctaggccggccggcgtggcgctcggcgccgaacaggccccgaggaggccgcagttaggcctagtgattatccagttgccctgagcggctgcggaggtgcgctccataagcgggcagggtgggaaaagttcgcccgtttgtccggaaggcagttgatggacctggggtcgacaccactgcggacgcagggcacggcacgggggcgagaaggcgaaggctgcaggcgtgagtggatgatgctggcaaaatagaacatgatggttccactggagtgaccatcgatgcagaatcagaaatggatccttgtaaagtggatagcacttgtcctgaagtcatcaaggtgtacatttttaaagctgaccctggagaagatgacttaggtggaactgtagacattgtggagagtgaacctgaaaatgatcatggagttgaactacttgatcagaacagcagtattcgtgttcccagggaaaagatggtttatatgactgtcaatgactctcaacaagaagatgaagatttaagtaataattctgatggaattgaaaaccggaatggcactgcaagtgccctcttgcacatagatgagtctgctggccttggcagactggctaaacagaaaccaaagaaaaagagaagacctgattccaggcagtaccaaacagcaataattattggccctgatggtcatcctttgactgtctatccttgcatgatttgtgggaagaagtttaagtcgaggggttttttgaaaagacacatgaaaaaccatcctgaacaccttgccaagaagaagtaccactgtactgactgtgattacactaccaataagaagataagtttacataaccacctggagagccacaagctgaccagcaaggcagagaaggccattgaatgtgatgagtgtgggaagcatttttctcatgcaggggctttgtttactcacaaaatggtgcataaggaaaaaggggccaacaaaatgcacaagtgtaaattctgtgaatatgagacagctgaacaggggttattgaatcgccacctcttggcagtccacagcaagaactttcctcatatttgtgtggagtgtggtaaaggtttccgacacccgtcggaactgagaaagcacatgcgaatccataccggcgagaagccataccaatgccagtactgtgaatataggtctgcagactcttctaacttgaaaacacatataaaaacaaagcatagtaaagagatgccattcaagtgtgacatttgtcttctgactttctcagataccaaagaagtgcagcaacatactcttgtccaccaagaaagcaaaacacatcagtgtttgcattgcgaccacaagagttcaaactcaagtgatttgaaacgacatgtaatttcagttcatacgaaagactatcctcataagtgtgagatgtgcgagaaaggctttcacaggccttcagaacttaagaaacatgtggctgtccacaaaggtaaaaaaatgcaccaatgtagacattgtgactttaagattgcagacccatttgttctaagtcgccatattctctcagttcacacaaaggatcttccatttaggtgtaagagatgtagaaagggatttaggcaacaaaatgagcttaaaaagcatatgaagacacacagtggcaggaaagtatatcagtgtgagtactgtgagtatagcactacagatgcctcaggctttaaacggcacgttatttccattcatacaaaagactatcctcatcggtgtgagtactgcaagaaaggcttccgaagaccttcagaaaagaaccagcacataatgagacaccataaagaagttggtctgccctaacagtgtgtctacaagcttgtaaagatgttggccttgaagcagaaaattcattttttaaagccagtcttgttcacatccattactatacattgaattatgctgtgtaaaaatagaattattgcttctagtccacttttctttacattttattcaatacgctgtcctgaatcctattcagtttctttaatagatgagnaaaaatagcaacaagcaagttgcttataataaaataatttgtgattctcccgaattc

SEQ ID NO: 76108 - DNA, 455 bp, Homo sapiens
gcctagtgcgcgcgcagtaacctgtttgtggcctggtcggcgtcccgtagggcgccctcccgcgctaggccggccggcgtggcgctcggcgccgaacaggccccgaggaggccgcagttaggcctagtgattatccagttgccctgagcggctgcggaggtgcgctccataagcgggcagggtgggaaaagttcgcccgtttgtccggaaggcagttgatggacctggggtcgacaccactgcggacgcagggcacggcacgggggcgagaaggcgaaggctgcaggcgtgaggtgaaggccggaggcctgctgggcctattttcgctatgtaaatgtccgcgaaggggaggagggacgggggggcaagatggcggctgctaggcgcctgctgctggggagtattgagagtgttgtcgggaggcggagccgccatcttgaaggcggtatctggaa

SEQ ID NO: 76109 - DNA, 203 bp, Homo sapiens
aatcatctttattttgagaaactatgaggctcattgcagagatcactatttcttacttttattatctgtgtgcaacatactatgaagcccagaactagaccagtgccagaaaatatttgaaataaattatgtaggggcagtgttgaattaagaattaagagtttaacatataatatttatttataaaatcaatttctctaaaa

SEQ ID NO: 76110 - DNA, 372 bp, Homo sapiens
aggaagaggccaatggctgccccagaattcccagcaggatttgttcctcttggatcagtgaaaaggaaaatggaaatataaaaataataactgggccccaggaaagaacttggagatgggggtggcatctcctgcctggctccggctggctgggcgagtggcaggccatttcctccatgaagcctgccctgaccacaccagccctgagttacatgcctcagcctcagaaccgccgggggcctgggctgggaaagtgcccatcctcctctcaagtccgcggcactcgccatccaccaagatgggctgctgcttttacctgcatagcaactttcttctcctggtaacagcatcttgaaatccctttgagaaacc

SEQ ID NO: 76111 - DNA, 453 bp, Homo sapiens
ctaattctgcagttatttggaagagtgaagggtcagaaataacaaaaaccctcctgaggaagaaccaaagtagtagagatgggctgtcttgccttagagacattaaggtctgttataaagctataataacgaagacagcctggtattagggtgccagtgtagttacagacaaagagaccaatggaacaggataaaaagcccataaataatctcatgcatatatgcacacttgacttacaatggaaggagtattgcagatcagtggggagagactgaactaatcaataaatcatgcagttacaagatcatacatgtggagaaacaaaatgaaaccagatcctgaagtacacaaaaaatcggttccaggtatattgaatatttgtatttttaaatcaccaacagaaaggttttaaaggaaaggaaaacagtagaactttcaaagaactaaaaaaa

SEQ ID NO: 76112 - DNA, 414 bp, Homo sapiens
ggctggctctttgcttgacagtggttgcggtaaggtcatttcaaagagcatccttcttagtatgtttaaatagctatagaaaagccgctgcaccctcacctcttcagagacccagccagcgataatggcgcgctcactctgatctcgggggagttaggagagggttgggcgtgcttagcaggtttgtgatgtaaacagtgcccatccctgagctgagcaggacctacattttgggcttcggtttctctaaaattctcttaaattggacattattacatgtcaaatgtagttaatcttggtcagtacagtcttggatgggggttgtttggcccctgcagaagggcctgtgttgaagctggactctgtcacgtgacttggaaacatggctgtgagcaggaaaacagctcctagttg

SEQ ID NO: 76113 - DNA, 303 bp, Homo sapiens
gtctggaactcctggcctcaagtgatccgtctgtctcagcctcccaaaagtgctgggatacaggagtgagccaccgtgcccggcctggccttgttgcttttagtattgaaaactctaggatgctccatcttgtctgtggttgtactggctcccgagaagacctttagccactggcctggctgagttgccaaagttgggggagggggcagtgcacagacccagtttctgacactcaaagcaggggctataaattctgtacactcccatgtccacagctctgcaccactgactggggcgtgtggg

SEQ ID NO: 76114 - DNA, 588 bp, Homo sapiens
agtccatgtcagctcccatcctgggagtgcactgagacaggtggtgggaatgggaggaggaaaggagggagatgccaggaagctgggatcaggagccgtttgccaaagcaaggcctgtgaggtgttgattcgggaacaagtgaaagtgtttgtgaaggttttgagctgggaaaagttggaatcagattttgtacttgctgttatccccaagggtaaacaataagcaaacgaaaaaatcagggcgaagctaaagctctagttagggcatctctctgccttgaaaatgacctcaagaaatctaggaacctctgtggaatgcaacttgaagatggaaaggtgcctttgtctgaaggtccctccccttttatgcctgctgccggtgtgagggttggggattgggccctgggactcagtcactcagtcttcttggagagataaacttttagctgaagtgattgattttcccctattttaatatactattttaactaatatgagttacttatgatttttaacagtctgttttaaatatctttcttgtatattcctcacattatatctttttactatctgctttaaaaaaagtta

SEQ ID NO: 76115 - DNA, 446 bp, Homo sapiens
ttgcacacaacctatatatccaaaaataggggcttgacgaatacattgtcatttatccacacaatgaaatgctatacagcattaaaaaatcatgcagaactgtggtttcaaattatttctagtaaaggacacctccactttttcataatcagtctttctagaatcccagtgtacagaactgtttagaagtagagctctcccactttgggaggctgaggcaggcggatcacttgaggttgggagttccggaccagcctggccaacatggtgaaacccggtctctactaaaaatgcaaaaacaagctgggtgtggtggcaggcacctgtggtcccgctgctctggaggctgaggcataagagtagcttgaacccaagaggcggaggttgcagagagcagggattgcagcactgcactacagcctggtgacagagcaagactgtgtctc

SEQ ID NO: 76116 - DNA, 564 bp, Homo sapiens
gtccgcaaagatcagatagttgtagatacgcggcgttatttctgagggttctgttctgttccattgatctatatctctgttttggtaccagtgccatgctgttttggttactgtagccttgtagtatagtttgaagtcaggtagtgtgatgcctccagctttgttcttttggcttaggattgacttggcgatgtgggctcttttttggttccatatgaactttaaagtagttttttccaattctgtgaagaaagtcgttggtagcttgatggggatggcattgaatctataaattaccttgggcagtatggccattttcacgattaaatatcatatattttatttaaagtcccttatatgttgagatatatttctgagctttctgttatgttattattttctaatagtcttttttatgccaataatacattgtttttgattagtgtggctttatactacattttagtatctgtaaggccaatatcttctcatgattcttgtattttgtaatttttatgatatctctgatatataccttcataggaacattgaatcattacattt

SEQ ID NO: 76117 - DNA, 1225 bp, Homo sapiens
ggcagatcttttgggcatcaatggaacaggggaagagcgactaccacaagacctgaaggtgtccactgacaaggagggtggcgtccaggacctgctcctgcctgaagacatgctctcaggggaagaatatgagtgtgtctcacctgatgacatctccttgcctcctctcccaggaagccctgagtcccctcttgcaccatctgacatggaggtggaagagcctgtcagctcctccctcagccttcacataagcagctatggggtgcaggctgggaccagcagcccaggggatgcccaggaatctgttcttccaccacctgttgcctttgcggatgcatgcaatgataagagagaaacattttcaagtcattttgagaggccttacctccagttcaaagctgagcccccactaacctccagaggattcgtggaaaagagtactgccttacacagaatcagtgctgaacatccagagagcatgatgagtgaagtgcatgagagagctttacagcagcaccctcaggctcagggtggtttgctagaaacacgggagaaaatgcatgctgataataacttcactaaaacccaagataggctgcatgcttcctctgatgcattctcgggcctcaggtttcaatcaggcaccagcaggggctatcagaggcaaatggttcctcgagaagagattaaaagcacatcagcaaagagcagcgtggtcagcctagctgaccaggcacctaatttctccaggctcctgtctaatgtaactgtcatggaaggttctccagtgactttggaagttgaagtaacaggatttccagagcctacactgacatggtgggtagcctataatgacaagccataaatggaaacaaattcaatcacagagaaaaatcattctgtgagcactaactgaaaggtttagggctagctgattaatattctatgacactgcaactctgcatgattcaatctcacatcagacccctctcattttagtagcagcatagttaatacctttaagaaaaataaaaggtaaccatataaagtactaataatttaacaaatttccaaagcactgtaggttggttgtgcttgttttcttctgtgtttaacattccacatttctaaagattgtgggttgaaattattttttattgtctatttccatataagcatggcatctgcttgctttaactacctttatgcaattgaaaatataaga

SEQ ID NO: 76118 - DNA, 791 bp, Homo sapiens
agcggcaaagtcactcaagcaatacttcttataatcaaggcaagtggtcagcggctgccttaaaaaaaaaaaaaaaaagcctggaaatacagtccccagccagagtaaagatcctcctctgcgacctcacagcccagctggattgggaccctgcagcgctctcacctctctgctcaggaaaatgtggctgctgcgcgtctcagcccagccgaatttgatcttgtggatttcatgtctaatctcagcctagattactcgggcttgtttggcccgctctagcatgcctggtctctctattctctcttgattctctcccatccttattcatccctcactcattgattgatttaattcaacaaccaagccccctgctgtgctggatgtcagatgttctaggtgtgctcaaatgaaggcccttttcattttccggaggagttcacttcccatgttgggagacagtaacaggaacaaatcaggctgcctaggtgttcacgatgtcaccaatattgggaagttacattttgtaatattttaataaaaatagcttttctgagcccaaccccctcccaccgcctactgatctttggctcttagtttctgcgccttccaaattccctcctccatagctcacctggccttgaggcttttacaaactgctctggcctgcatcctggatctcactctagaaaccactctgctggggtcattccggcagagcacccagcttcccctctctctgtggcagaaaaacctgattctctcccactttgtcatgaaaagtcccttccctg

SEQ ID NO: 76119 - DNA, 657 bp, Homo sapiens
agaaggatgacaattacaactgatcaatattttcctagaaataaagtagcaaacagatgtctcttgaaaggctttaacaattattttttgctgtgaccaataaagtctgaagacatgtacagaagttaagcaaaggtaggaagcatctctaaactaattcatcacactctactaaacaaaattggaaattgggccaaaggatacagttcaggaatatgcacatgatttcttctaagccagagttctgaccaggagaaatgacttcaacgtgagaaaaggtagaaagaagaaggaaaacaagtgttaattcttaattaaatacagactaataaagtccacatcaccaagaaccctgtgaggctgcagcatcacattgaaccacactgacctcgtgtaaaacatgaaaatgccaaggataaaggaatgatatagtgaagtggtgatatcctaattgaaataatgtgaagcccaagtttatcatttcttttatttaattctgtattcttgacccattgtttgctgtctgggctgaatagcaccaattctattcaaagaagaagaatgtacatgaaagaacaaacatgaatattatgcataacaagaggatgaacatgcagaagaaaaatgaggattaaggtgaaaagaagtggaaaaatg

SEQ ID NO: 76120 - DNA, 825 bp, Homo sapiens
tgttgctaaggaaacagcctcactcagcaagggtcacctttggaaacaacggcaagacttcaaagcagatcaatagagaaataccaagacctgaacttcctagcaaatgctctcttctattttaaaccctacccctcaaagaatggcaatcctcccagatgtctcctcatctctattgcgtatttctgcaacacctatgattaagttgcttgatgaccattagaggccacagcaccaatcaggagagcagcttacaggcatgaagtccgcgggcacttcccaccaacattggaaagcaacacattcatgggatcaggattcattctgctgttgttttaaatctaaattttaagtacctctctattttcacacagaagaactcatattaaacatattgatctctaacttgatttgttctcaaataatttgaagaccttttggtgtactcaagtcacaaaggatatttggtggtggaccgtggacaatccagaccaaacctccagagggaaggcaaccaaggttgtgctggagaggccagaagcagcaaatcattaagtcatttccatgatggactatactcactctgtcttttgcctctggttgtgcctgttctactttgtaaattccaaagagagaatttttatctaggttgggccatatgtctctgcactagatcagtcaaccatggccgaagagactggtagaagtgaccattggaagcatcattatgagctctccagccactccagcttgtgctctgcaattacactggttttaccctcatttccttgagccagtttctaaataaaagcaacttaccacaac

SEQ ID NO: 76121 - DNA, 550 bp, Homo sapiens
ccccgggctgcaggaattcggcacgccgggtaggagctaggtgaccctcggctgctgcagggatctgcagcgactgcagccatgggggcccacctggtccggcgctacctgggcgatgcctcggtggagcccgaccccctgcagatgccaaccttcccgccagactacggcttccccgaacgcaaggagcgcgagatggtggccacacagcaggagatgatggacgcgcagctgaggctccagctgcgggactactgcgcccaccacctcatccggctgctcaagtgcaagcgtgacagcttccccaacttcctggcctgcaagcaggagcggcacgactgggactactgcgagcaccgcgactatgtgatgcgcatgaaggagtttgagcgggagcggaggctgctccagcggaagaagcggcgggagaagaaggcggcagagttggccaaaggccagggacccggggaagtggaccccaaggtggccctgtagggggtgcaccccccaccctatggaccagtcaaataaaagccttcaggcccctcaa

SEQ ID NO: 76122 - DNA, 554 bp, Homo sapiens
  misc_feature (15)..(15): n is a, c, g, or t
aggctgtaccggtcncgagtcgtttggatccgggtaggagctaggtgaccctcggctgctgcagggatctgcagcgactgcagccatgggggcccacctggtccggcgctacctgggcgatgcctcggtggagcccgaccccctgcagatgccaaccttcccgccagactacggcttccccgaacgcaaggagcgcgagatggtggccacacagcaggagatgatggacgcgcagctgaggctccagctgcgggactactgcgcccaccacctcatccggctgctcaagtgcaagcgtgacagcttccccaacttcctggcctgcaagcaggagcggcacgactgggactactgcgagcaccgcgactatgtgatgcgcatgaaggagtttgagcgggagcggaggctgctccagcggaagaagcggcgggagaagaaggcggcagagttggccaaaggccagggacccggggaagtggaccccaaggtggccctgtagggggtgcaccccccaccctatggaccagtcaaataaaagccttcaggcccctcaa

SEQ ID NO: 76123 - DNA, 636 bp, Homo sapiens
ccccagccttccacacccctggcccacccaagccccccacatgcccagcccgcccaagcccccctcccacccccgccaacacccacagcctgcaccccacccaggcctggcccctggcaggatgtggctccagaggccagggacctgaactgccactgaggtttctagccgggccccaccttagtcccagagagggctctctaggggcctgtttgatggggacagggcaggtggctgaagccacctaggggagtggccaagcccaggttccagtgggaagccctgccacctgcgtgggcagaccccagacccaagccacaggcactcggacatgtcttcttcagaggcctcccccacagtgctctgggacggcccctccgcttcccagggcttggggggcgtgtcctggccagggaccctgacagcccctctcgtgcttttcccccagctatgtgatgcgcatgaaggagtttgagcgggagcggaggctgctccagcggaagaagcggcgggagaagaaggcggcagagttggccaaaggccagggacccggggaagtggaccccaaggtggccctgtagggggtgcaccccccaccctatggaccagtcaaataaaagccttcaggcccctcaa

SEQ ID NO: 76124 - DNA, 721 bp, Homo sapiens
  misc_feature (630)..(630): n is a, c, g, or t
  misc_feature (634)..(635): n is a, c, g, or t
  misc_feature (637)..(637): n is a, c, g, or t
  misc_feature (639)..(640): n is a, c, g, or t
  misc_feature (653)..(653): n is a, c, g, or t
  misc_feature (659)..(659): n is a, c, g, or t
  misc_feature (670)..(670): n is a, c, g, or t
  misc_feature (685)..(685): n is a, c, g, or t
ccccgggctgcaggaattcggcacgccgggtaggagctaggtgaccctcggctgctgcagggatctgcagcgactgcagccatgggggcccacctggtccggcgctacctgggcgatgcctcggtggagcccgaccccctgcagatgccaaccttcccgccagactacggcttccccgaacgcaaggagcgcgagatggtggccacacagcaggagatgatggacgcgcagctgaggctccagctgcgggactactgcgcccaccacctcatccggctgctcaagtgcaagcgtgacagcttccccaacttcctggcctgcaagcaggagcggcacgactgggactactgcgagcaccgcgactatgtgatgcgcatgaaggagtttgagcgggagcggaggctgctccagcggaagaagcggcgggagaagaaggcggcagagttggccaaaggccagggacccggggaagtggaccccaaggtggccctgtagggggtgcaccccccaccctatggaccagtcaaataaaagccttcaggcccctcaaaaaaaaaaaaaaaaaaacaaaaaaaaaaaacccgggggccctaggggggggggggaaaaaggggtaggaatgggccgggncaanngngnnccggacccggttnctggcncagggggaaancggggggcccccaanggggagcgaaaattcaaaagcgggtaacggttagga

SEQ ID NO: 76125 - DNA, 1136 bp, Homo sapiens
ccccgggctgcaggaattcggcacgccgggtaggagctaggtgaccctcggctgctgcagggatctgcagcgactgcagccatgggggcccacctggtccggcgctacctgggcgatgcctcggtggagcccgaccccctgcagatgccaaccttcccgccagactacggcttccccgaacgcaaggagcgcgagatggtggccacacagcaggagatgatggacgcgcagctgaggctccagctgcgggactactgcgcccaccacctcatccggctgctcaagtgcaagcgtgacagcttccccaacttcctggcctgcaagcaggagcggcacgactgggactactgcgagcaccgcgactatgtgatgcgcatgaaggagtttgagcgggagcggaggctgctccagcggaagaagcggcgggagaagaaggcggcagagttggccaaaggccagggacccggggaagtggaccccaaggtggccctgtagggggtgcaccccccaccctatggaccagtcaaataaaagccttcaggcccctcaaaaaaaaaaaaaaaaaaacaaaaaaaaaaaaaaaaaaaaaaaaaaaaaaaaaaaagaaaaaaaaaaaaaaaaaaaaaaaaaaaaaaaaaaaaaaaaaaaaaaaaaaaaaaaaaaaaaataaaaaaaaaaaaaaaattcaaagaaaacaaaaaacagaaaaagaaaaaccggtctagcctaattgtcgaataataaaaaaaactactgccctttttatacccaacgattatattataaaaaaagggaatacacccaattaaaggggctgataaaaaatcacgctgggcttagaaaaaggtgatgccaatgaaaaatgccgggattacaccttaaaacagttttggaaaacacaaagttatttcggaaattgcaagaattcaaaaaaggccataatcggggatattgaaaatgaaatcacgcctgtttgtacccttaggccgaaaagggaattttccttaaaaataacggtattaatcgggaaaagcaggttgttttttaaaaagtggcaggaatccgtaaaaaccgtttaaaaaaaaaaaatttaacgggcaaaccgggtttaacacaatggtccgggggcacttttg

SEQ ID NO: 76126 - DNA, 722 bp, Homo sapiens
ccccgggctgcaggaattcggcacgccgggtaggagctaggtgaccctcggctgctgcagggatctgcagcgactgcagccatgggggcccacctggtccggcgctacctgggcgatgcctcggtggagcccgaccccctgcagatgccaaccttcccgccagactacggcttccccgaacgcaaggagcgcgagatggtggccacacagcaggagatgatggacgcgcagctgaggctccagctgcgggactactgcgcccaccacctcatccggctgctcaagtgcaagcgtgacagcttccccaacttcctggcctgcaagcaggagcggcacgactgggactactgcgagcaccgcgactatgtgatgcgcatgaaggagtttgagcgggagcggaggctgctccagcggaagaagcggcgggagaagaaggcggcagagttggccaaaggccagggacccggggaagtggaccccaaggtggccctgtagggggtgcaccccccaccctatggaccagtcaaataaaagccttcaggcccctcaaaaaaaaaaaaaacaaccaaaatcacaaacaactaaatacacacacagcaaacaacaaaaaacaaccccgcgcgacctattgggcggccatcacagacgagtctacgagcgcacgttaccatgtgttctcccccccttttgcaccgcgtgtaatcgcggccccaaggggcaaa

SEQ ID NO: 76127 - DNA, 1111 bp, Homo sapiens
  misc_feature (585)..(585): n is a, c, g, or t
  misc_feature (603)..(604): n is a, c, g, or t
ccccgggctgcaggaattcggcacgccgggtaggagctaggtgaccctcggctgctgcagggatctgcagcgactgcagccatgggggcccacctggtccggcgctacctgggcgatgcctcggtggagcccgaccccctgcagatgccaaccttcccgccagactacggcttccccgaacgcaaggagcgcgagatggtggccacacagcaggagatgatggacgcgcagctgaggctccagctgcgggactactgcgcccaccacctcatccggctgctcaagtgcaagcgtgacagcttccccaacttcctggcctgcaagcaggagcggcacgactgggactactgcgagcaccgcgactatgtgatgcgcatgaaggagtttgagcgggagcggaggctgctccagcggaagaagcggcgggagaagaaggcggcagagttggccaaaggccagggacccggggaagtggaccccaaggtggccctgtagggggtgcaccccccaccctatggaccagtcaaataaaagccttcaggcccctcaaaaaaaaaaaaaaaaaaaaaaaaaagaaacactggntgcgggccgcgccccggnnccctcagagaaagcgcttctcatagagaccacattcgcggttggggcgcgcggcgggcgcccaaaggggtgaaaggaggacacatgggcgccaaacaggcggtgtgccctaaagggagaaccccgggcgccaagagagactaaggggggcggggggttctctccacaccaaaataaaaacaccgccgcgggaggcgaacaccaggaacgcgttctcgcgagacaaaactccccgagagagggagagtgtccgagaggggcgccaattaacgggggggatctctatatactaaacaggggggaggcccaaaagcggagagccccccgaagatatatatacaaatattttgagcgcgcccccgggggtcggcggggtggatgcccatacgaaaaaacagcacagcagcaccccccaacaccaacattcgtgcatcacgacaaaaaagcagcaaaaaacacatctcaatacgaagacacaacaccagctcaaaccggcgaaagacatatg

SEQ ID NO: 76128 - DNA, 722 bp, Homo sapiens
ccccgggctgcaggaattcggcacgccgggtaggagctaggtgaccctcggctgctgcagggatctgcagcgactgcagccatgggggcccacctggtccggcgctacctgggcgatgcctcggtggagcccgaccccctgcagatgccaaccttcccgccagactacggcttccccgaacgcaaggagcgcgagatggtggccacacagcaggagatgatggacgcgcagctgaggctccagctgcgggactactgcgcccaccacctcatccggctgctcaagtgcaagcgtgacagcttccccaacttcctggcctgcaagcaggagcggcacgactgggactactgcgagcaccgcgactatgtgatgcgcatgaaggagtttgagcgggagcggaggctgctccagcggaagaagcggcgggagaagaaggcggcagagttggccaaaggccagggacccggggaagtggaccccaaggtggccctgtagggggtgcaccccccaccctatggaccagtcaaataaaagccttcaggcccctcaagaataaaataaatgatgactcgctagaaagacatccgcggcactttactggggggcggaagcagggtattgaaaaggccgcttggccaacttttttttgctggcctttttttttgcacagagcgtgaacacgggcggccccataaggggcgcgtgaatggaaccccgttacc

SEQ ID NO: 76129 - DNA, 1131 bp, Homo sapiens
ccccgggctgcaggaattcggcacgccgggtaggagctaggtgaccctcggctgctgcagggatctgcagcgactgcagccatgggggcccacctggtccggcgctacctgggcgatgcctcggtggagcccgaccccctgcagatgccaaccttcccgccagactacggcttccccgaacgcaaggagcgcgagatggtggccacacagcaggagatgatggacgcgcagctgaggctccagctgcgggactactgcgcccaccacctcatccggctgctcaagtgcaagcgtgacagcttccccaacttcctggcctgcaagcaggagcggcacgactgggactactgcgagcaccgcgactatgtgatgcgcatgaaggagtttgagcgggagcggaggctgctccagcggaagaagcggcgggagaagaaggcggcagagttggccaaaggccagggacccggggaagtggaccccaaggtggccctgtagggggtgcaccccccaccctatggaccagtcaaataaaagccttcaggcccctcaaaaaaaaaaaaaaaaaaaaaaaaaaatgtgtgtgtgggcgcgcgctttggggccctccggaaagacttttttaaaacccttgcgttggggcccgggggcccagaggggtaggtgtgaagtgggtcaaataggtgttaccatggaggaaaaccggggacgagaggacaaagtggccggggaatctgcccaccaaatataaaaaacgcccgcgggaaaaaccgaagggttgcgtgaaaacagatcccaaaggggatgaccagaaggccactggacgcggaatgctataacgaaaggaagtgctcaaaggagaactcgcaaaattccaaaattaaggcccggccccggggaaaggaagaacgcaaaagaagaaggaaaaaaaagaaagaaaaggaagggcaaagcaaagagggggaagaagaagaggaaggaaggggggggggaggggcgagagagaaagggacgaagcggaagcagggggaagaggcagggggggagagagaggcaaagcggacggagaggaggagaggggagaggagggaggaagggagaacggagggaacgcggagagggagggcgaaagga

SEQ ID NO: 76130 - DNA, 501 bp, Homo sapiens
ccccgggctgcaggaattcggcacgccgggtaggagctaggtgaccctcggctgctgcagggatctgcagcgactgcagccatgggggcccacctggtccggcgctacctgggcgatgcctcggtggagcccgaccccctgcagatgccaaccttcccgccagactacggcttccccgaacgcaaggagcgcgagatggtggccacacagcaggagatgatggacgcgcagctgaggctccagctgcgggactactgcgcccaccacctcatccggctgctcaagtgcaagcgtgacagcttccccaacttcctggcctgcaagcaggagcggcacgactgggactactgcgagcaccgcgactatgtgatgctcatgaaggagtttgagcgggagcgtgttcttctccaaaaaagaagcggaagaagaagaaggcttttaaattgccaaaggcacggaccgggggacccgaaccccaggctggcgtgggggggccccccc

SEQ ID NO: 76131 - DNA, 516 bp, Homo sapiens
ccccgggctgcaggaattcggcacgccgggtaggagctaggtgaccctcggctgctgcagggatctgcagcgactgcagccatgggggcccacctggtccggcgctacctgggcgatgcctcggtggagcccgaccccctgcagatgccaaccttcccgccagactacggcttccccgaacgcaaggagcgcgagatggtggccacacagcaggagatgatggacgcgcagctgaggctccagtgctcaagtgcaagcgtgacagcttccccaacttcctggcctgcaagcaggagcggcacgactgggactactgcgagcaccgcgactatgtgatgcgcatgaaggagtttgagcgggagcggaggctgctccagcggaagaagcggcgggagaagaaggcggcagagttggccaaaggccagggacccggggaagtggaccccaaggtggccctgtagggggtgcaccccccaccctatggaccagtcaaataaaagccttcaggcccctcaa

SEQ ID NO: 76132 - DNA, 791 bp, Homo sapiens
  misc_feature (265)..(265): n is a, c, g, or t
  misc_feature (283)..(284): n is a, c, g, or t
gcggccgcctactactactactgctcgaattcaagcttctaactatgtgatgcgcatgaaggagtttgagcgggagcggaggctgctccagcggaagaagcggcgggagaagaaggcggcagagttggccaaaggccagggacccggggaagtggaccccaaggtggccctgtagggggtgcaccccccaccctatggaccagtcaaataaaagccttcaggcccctcaaaaaaaaaaaaaaaaaaaaaaaaaagaaacactggntgcgggccgcgccccggnnccctcagagaaagcgcttctcatagagaccacattcgcggttggggcgcgcggcgggcgcccaaaggggtgaaaggaggacacatgggcgccaaacaggcggtgtgccctaaagggagaaccccgggcgccaagagagactaaggggggcggggggttctctccacaccaaaataaaaacaccgccgcgggaggcgaacaccaggaacgcgttctcgcgagacaaaactccccgagagagggagagtgtccgagaggggcgccaattaacgggggggatctctatatactaaacaggggggaggcccaaaagcggagagccccccgaagatatatatacaaatattttgagcgcgcccccgggggtcggcggggtggatgcccatacgaaaaaacagcacagcagcaccccccaacaccaacattcgtgcatcacgacaaaaaagcagcaaaaaacacatctcaatacgaagacacaacaccagctcaaaccggcgaaagacatatg

SEQ ID NO: 76133 - DNA, 2904 bp, Homo sapiens
ccaagacttagcttaaacatcaggaaacaaactaaagccacaatccaaatgagagaaacactgtctcgtctaaactctagtttcatggtcagtgcaacagtgagttttcttttaataatggtatggtattgtcaagggaggcaaagtgttcatggtaacttggagctccccaatacatggccatgtcttctaaagacaacgtaatgagcccaagtgaactgaaggtcatactggcaggtgctgatgacagtttgtccttgaatgctgacatgtcttgaatattgcaaatgtcataatactcttttaaaacagtcctctacctgactctagttttgcgaggattagtttgtttccttggtagatttcaacatttcagaatgttacctccaaatttcacttgaattacttcctcctgtgaccttagcagatctgtcacatttgaaagcatatgactcacttccacccccttctaatgaaaaactgcatggtgttaaaagcactctcattagaaatataaggctgagaactgaagaaggctgtttaaagcaggaatttcactttattttactatgcctaaaaatacatctttggaccccttgcaaagtgctttaaaagtactttcaatttatgcatgactccaaaaaagtaatttttttttcccaaaaaaacctctttatttaaataattgggatatttgctaaatacctatttttttttacagtggcctaaaacccctattaatgaaaagtgaaatttgatttaattaggactcttgcagtcatcttcacgactgaggagaagtttcaataggctgtctagacattatgatgttaataggagattaaaatacatttggcaattcattttcattcttaatttgagtgcatgaaccactgcagatgagctgataagcagaaattctcaagtgggtttcactaataaatgtttttttatatgatttgaaatcaagtaaagggacaatgtttatgtacgtgtataacaacattcagcacatttgaggaatcacacactataataaagcttaaacctgtcatagaaccttgatctatattactttgtcttcagtaaaaagtgaaggatgagattttgtctttcatgttattgtagctggcatgcttcaaaattttgagcttactgggactgacagcctctcacttcaatctgagggattgacagaatttaaacaggctcattgattctgtacactctacccttcctgtggcaagtgataatgggatttcattaatgaatcaatttgttttacaaatgacatccactgtggcattggaagacagttgggtctgactcaagtttaacatttcttaccaaacattcttaagtatgaaattggtcctttaatccaaatgctcttggtcatggctgtcctttgcggattacatagcattcaggaaagtacaaaaactaaacactaaatccccaactggccccaaagaccttttatgatgtgagagacaagagttcaccccagattaatttcttttatcattggctttatactctaacatatagatactctctatagcaaaaaagggatgaatggctttcaatattcatttctgtttattcttgtgagggaaaataatatatcaagaaaattttcttccacttagaaagctttaaagctgaagtagaggtgcagtcaagcttggatctgcaggaagaaccactaggccactgagtcatacttgagcttttcttactactgccccaatttctaaattgttttttcttttcagcgtgtagggcttgggctctgtttccttttattagcatgtcacctgagggtggaacaaacaattggaaataaaatttgattattttatttcttataaagtattaatttcttaagggggtttgaaatcattggtaaaattaatatcagtacattatatgtcataaattttgattatctataatgtcttttcttatctaccacaaataattgagagttggctaaattcttgcagaatatatgggaaaaaaatcatagcaaagaattcagcttccctcaaaagaaagctatttttgtttccttcactccactaaatttgaaccagtagcacggatcaacacgacttctgcaatgagagtataacggtagctcttggtacagtcatattcatatttttaaatctttctttgaccaaaactattgcattgttttcattacattttgactgcgttacttattaaggccgaatgactttgacacccccgtggattatttttatgatcacatcaaatttaaacaatgtccaaagtgtaactttaatgttatattttgtttcaaaccctctggtctaagattattgagaaagatgttttttcctcctccctcaaatatgttatctcttcatatataaaaaaataagttattccatgcttttcaggaactgtaaaaattatttcaaaaagatatttgaaaaagttttctctattctggacacaaatgcttccatttatttcaaaagaagaagaagaaaaatggaatcttaatttaaaaaaatatatgtagtagtatctgctatgagatattcagtctctataaaaaaaaaaagggacacagcttcttttaaaacccttgtttcagtccatattcaacttcatggaacttctgaaacatcattcaattttgaactttatttaagagcatttttgtactgctgtctctgactgtcatggaaagttctgtaattctaaggtgtttctggttttatttttaatttcttcatctgtaccacagtcaaattagcaaccatctcccccatcccttgggctttctgtagatcagtggatgttaggtttaaacttctgttttctttgatgaagctttcaataaaaaatgaaaataaaatcaattga

SEQ ID NO: 76134 - DNA, 770 bp, Homo sapiens
agatactctctatagcaaaaaagggatgaatggctttcaatattcatttctgtttattcttgtgagggaaaataatatatcaagaaaattttcttccacttagaaagctttaaagctgaagtagaggtgcagtcaagcttggatctgcaggaagaaccactaggccactgagtcatacttgagcttttcttactactgccccaatttctaaattgtgcataaatacaatcactctcaatttttgaagggctaattatctactttgtgggtgtgttttgttttttcttttcagcgtgtagggcttgggctctgtttccttttattagcatgtcacctgagggtggaacaaacaattggaaataaaatttgattattttatttcttataaagtattaatttcttaagggggtttgaaatcattggtaaaattaatatcagtacattatatgtcataaattttgattatctataatgtcttttcttatctaccacaaataattgagagttggctaaattcttgcagaatatatgggaaaaaaatcatagcaaagaattcagcttccctcaaaagaaagctatttttgtttccttcactccactaaatttgaaccagtagcacggatcaacacgacttctgcaatgagagtataacggtagctcttggtacagtcatattcatatttttaaatctttctttgaccaaaactattgcattgttttcattacattttgactgcgttacttattaaggccgaatgactttgacaccc

SEQ ID NO: 76135 - DNA, 248 bp, Homo sapiens
gcagatatttaaaaattgatctgctcagggtgtcagatgcactaggtacaccactgccctttatcctacttaatttttgtcataatacttgcctgatttattgtatattttcattattttatataacatttaatatatttatatattttattaatatataatgaacaataaaagtttattaatatatgttcatatttcatagtctatattatttaacatttattatatattttatgtgttattcacct

SEQ ID NO: 76136 - DNA, 455 bp, Homo sapiens
aaaccttcttgattaaaatatatagttctaaaactattctgtaggacactgtaatgatggatatatataattatgcatttggcgaaacttacagaatgcataacacaaggattgaatcctaaagtcaactatggactttaataataataatgtatcaatattggctcattaattataacaaatgcatcatactaattcaagatgctagtaatagggaaaattatggatgtgtatgtgtgtgtagtgggtatatgggaacgctctttactctgtgaccaatttttctgttaatctataactgttctaaaaaaattctattaattaaaataaatacactgcctcaaatatatgttttatttatatatcaatttggttcatttgtttgaagaacattttgcaatggtgaaaacaaccattaaggtactatcttacatttaataaatgctgatcaattc

SEQ ID NO: 76137 - DNA, 701 bp, Homo sapiens
aagaatctgagagaccttttaaagtgagacagagaagctgattaccagagaaaaggctaactggaaaattcatagaaatttaaaaccaaccaaaggtaacccaaagaaatgtccttacttttttactctgctctgaaatagaccagtgtttctcaaacttgtctgcgtaggaatcccatagggatcttatttaaaatagcttctgggttagtaagtctggagtaggaccaagagtctggatctctaacaagctcccaggagacaatgatgctgctgttctgcaaatcacactgagtggcaaggaagtagacaaaagaagcagatttgaaaggggtcagtacacaggcaaggggtaagaagggtaagaatgtaatctaatgctgcttcgttcagctaaattggctagagctttagctaaaaaatgaaagaaaaaaagcctacagtttaaacagaaattgtgttttctcccttttgatgccaagctccttgaaaaaatcaagtacttaggtaacgattggtgtggcaatatcagaaaaaggccttattctacaataaaatttgtagaatcaaattttattttgtttttttagagacagagtctcactctgtcacccaggaagcagaggttgcagtaagccaagattgcaccattgcactccagcctgggcaacaagagtgaaattccatctcaaaaaaaaaaa

SEQ ID NO: 76138 - DNA, 1774 bp, Homo sapiens
tttataggaatgtttaacagccattaggtgtttagttctttttatcagaggatattatactattctcagttgtctttacagttttcatgctagcaaaggagttggttactctgctcattttgttggcaactgttttatagtcacatcattgaagtccaaaggaaaatgttttcagcattgtgtgaaatatgattttcaaccacgtaaggcaggtaaaagtaaatatttttgtaactcacttgttacgacagaattcttaactatccttttatgacctctgtagtattctctttcactggctttcctatgcttttaatgattttctcttatcctagtttgcattttctttttacttttatgtctgatttttgtcttctataagatcagtgctttgatctcttgtggtgtatttctcttacattctctcatctcagtctgatctgttctatggcattctttcaatagatacttattatttactgagtattggacaccattgtaggcactagggagttataaatctttgcctcttttttaaaaaagttaaatgttaaacccccagattaagcaatgcacagatacttttcttgtgggagattcacctaatcctggtagttctgaatcttgtttcctaagattggaggttttgttaatttctgatgctttagtaatgctggccttcaaggaatggaatgttgctgtactgttagttttggctcatgaaatgtgtctttacttaatatcccaaataatagcaaaaacaaggtcaaaacacattttaaaaactgctgtaaagagaaaatgcagagaaatgtgcaactgtataattagaattataagagataattcattcataatcaggtggcattttctagagagattttcctgcctgtgtaccggactccatctttgtgtcagagtaacaagccaactgaaagtcgagatgaaagaaaacaaggacagagtgcgtaggagttcccgtcacacacgtttaaggcttttttccccttccaggttcagggttctttcttgggtatatgacaatgagattgtcaatgctttttagggcacactgcctcctcctaacagaaatatcaccttaccctttgtgattaatggtacaatcataatagatatgatgaatccaaatgtggtgagggggaggtctttatatctttttcatatcttttttgttttcttgttgcttatgatctgatgtgtgtcttgtcatatacagaaaaaaaatattttgggtggtattttcaaaaatttgtttagattttgcatgattctaatgaaaatatttgttttatatttaatgtcagtaattgtagtttctattaaagaatatcaatttaacaataattcatcaatatatacttagaaaatagcttaaaaagcagtgacctgaataaatatattcattcattataatggtgtattctttcttttttaatgcaaattgattactttaataccaatcacattgcctttgctctggaaattctgttttattaaaactaagatgagaccaagatagtttgctaaaattgccaaattattttgaatttcagtggaattgattagaagtacagattgttggtattataatttttcatgttaggattgtgtgtttttaacaaatatttaggtaactttctcatcagacagttttaggaaacagtggtttaaagaatatacatgcaaacaattagggtgaagttataaccaaatgaaattgtcattaaccaataaaaagcgctttaacccaaaa

SEQ ID NO: 76139 - DNA, 349 bp, Homo sapiens
atgtgtttggtgttcaacaacttgtagaatatataaatggatgaatgcatattataccattccatgaaccaatgctgctgagaatgcaatggatgtactgcatcattggacactgaggttaacaaacataaggcaaaatagtatagcagaattgcttacccacgatagaaccagaacagagtgaattctattaacttcatatggctgaaacttttaagagttctttagatataactgcaatgaaaactggaaccacactttagttatgtttttggtacacatttatgtttcagttcacggtttaataaaccacataggtcattttatagtgaaggattagtcattctca

SEQ ID NO: 76140 - DNA, 308 bp, Homo sapiens
ctctggagttctatctaaaagggcaaaactatttttaaaataatatgaaactatttgcctttttcactgagttggcatgaggcaaaagcaatggaggataaaattgctccaccaaactgttccagtgcttgtgttgctggattttattcatagtaaaacaaaaaatgtgtttgacttaagaatattcttaatgaggcagtacaaatgattactattattaaatatcgaccttgaatattcttttaatactatatgtgacaaagtgggaaatatatgtatagcacttctgctgcatatgaaatatgatg

SEQ ID NO: 76141 - DNA, 414 bp, Homo sapiens
gggtcttagaaacagaaaatggtcccaatttgtgaacttttccatttgacaagatggaatataggctttccatataggatagaatcacaaaatgaagatatcagcaaaataattccatgcgagaaaatttcagaaaagcagagtcatccgggtgtgttccgtgcccctctttgatccctgaacatggttttggcacaggacaaggaggagtgaggggcgtggatgttctgctccatgtgtgacgactgtgccagcggcgtatactcagtacggctcaggaagagtcccaggaaaagtactgagatgcaaaccctcatgggcttaaatacatccggcctgtctctggtcctcgaacccagcaggctatgggggcagcaggtctgtgtgcaggcccagggacagcctgtgccaggc

SEQ ID NO: 76142 - DNA, 392 bp, Homo sapiens
atgttctgaaaaccaaattcaccatctactgatttttttaatgtgctttccataccctatacctcaaggtaataaataggtgatcaagactttcagacatgaaaagttcccagtaagaaaagtaaatgtcagtgctttcgttttcttatcaagcaacacaatggatatcctaatgcatatttcctggcatataacatgtcagacgattgtaaacattttcttttggtcacacaacatacatccaaactctggatgtttttgtttccctacttaggactaggataactcacctcaaaattaaatataattgcaaccagtctagaacagtttccccaacagacttgatttccaagaaatattaatttttttttctttttgacacagagtctcgc

SEQ ID NO: 76143 - DNA, 453 bp, Homo sapiens
tttcagaaaagaaacaagaatagctgcttgatcataactgtaagcccaaaaatgaaatacaaataagacatatccaagatttagatgttagttattctctctgttttgactgacacttgttagcgagaaggatgggttcaaatacagttgggagggttcaattttccttagactaagttggtgttctttctataatatgaatcaggggactggagagaagctgtattctgtaatcagaaatgacatttgcgaatattaaagtacaaggacattaaatgatactacattccaccaacttgtaagctaaaagccctttcacagagttctctgtccattaaaacatcaacttcttatacatttgggtttcttgacttgttttaagtaacagggctgaatttttgtagggctccgacaatctgcaataatttcaagtttgcatgtgtttatcggttg

SEQ ID NO: 76144 - DNA, 220 bp, Homo sapiens
tagtgcttactttgtctgtcactgtgcttcatcttgtcagggatacagagtggaagacctgatctctgctttcaaagcagcctacattctgtctgaagaaactaggctagtatagccgggcatggtggctcacacctgtaatcccagcactttgggaggccgaggccgacggatcgcttgaggtcaggagtttgagaccagcctggccaacatggcgaaa

SEQ ID NO: 76145 - DNA, 2195 bp, Homo sapiens
tcattgggtgattgatttctatgctccttggtgtggaccttgccagaattttgctccagaatttgagctcttggctaggatgattaaaggaaaagtgaaagctggaaaagtagactgtcaggcttatgctcagacatgccagaaagctgggatcagggcctatccaactgttaagttttatttctacgaaagagcaaagagaaattttcaagaagaggggggggggggggccccccccaaaaacccttcgtgtaggagggtggcagtctccctcccttctggagacaccaccagatgggccagccagaggcagcagcagcctcttcccatggatccaccacgagcgtcccacttgagccctcggaagaagagaccccggcagacgggtgccttgatggcctcctctcctcaagacatcaaatttcaagatttggtcgtcttcattttggagaagaaaatgggaaccacccgcagagcgttcctcatggagctggcccgcaggaaagggttcagggttgaaaatgagctcagtgattctgtcacccacattgtagcagagaacaactcgggttcggatgttctggagtggcttcaagcacagaaagtacaagtcagctcacaaccagagctcctcgatgtctcctggctgatcgaatgcataggagcagggaaaccggtggaaatgacaggaaaacaccagcttgttgtgagaagagactattcagatagcaccaacccaggccccccgaagactccaccaattgctgtacaaaagatctcccagtatgcgtgtcagagaagaaccactttaaacaactgtaaccagatattcacggatgcctttgatatactggctgaaaactgtgagtttagagaaaatgaagactcctgtgtgacatttatgagagcagcttctgtattgaaatctctgccattcacaatcatcagtatgaaggacacagaaggaattccctgcctggggtccaaggtgaagggtatcatagaggagattattgaagatggagaaagttctgaagttaaagctgtgttaaatgatgaacgatatcaatccttcaaactctttacttctgtatttggagtggggctgaagacttctgagaagtggttcaggatgggtttcagaactctgagtaaagtaaggtcggacaaaagcctgaaatttacacgaatgcagaaagcaggatttctgtattatgaagaccttgtcagctgtgtgaccagggcagaagcagaggccgtcagtgtgctggttaaagaggctgtctgggcatttcttccggatgctttcgtcaccatgacaggagggttccggaggggtaagaagatggggcatgatgtagattttttaattaccagcccaggatcaacagaggatgaagagcaacttttacagaaagtgatgaacttatgggaaaagaagggattacttttatattatgaccttgtggagtcaacatttgaaaagctcaggttgcctagcaggaaggttgatgctttggatcattttcaaaagtgctttctgattttcaaattgcctcgtcaaagagtggacagtgaccagtccagctggcaggaaggaaagacctggaaggccatccgtgtggatttagttctgtgcccctacgagcgtcgtgcctttgccctgttgggatggactggctcccggcagtttgagagagacctccggcgctatgccacacatgagcggaagatgattctggataaccatgctttatatgacaagaccaagaggatattcctcaaagcagaaagtgaagaagaaatttttgcgcatctgggattggattatattgaaccgtgggaaagaaatgcctaggaaagtgttgtcaacattttttcctattcttttcaagttaaataaattatgcttcatattagtaaaagatgccataggagagtttggggttatttaggtcttattgaaatgcagattgctactagaaataaataactttggaaacatgggaaggtgccactggtaatgggtaaggttctaataggccatgtttatgactgttgcatagaattcacaatgcatttttcaagagaaatgatgttgtcactggtggctcattcagggaagctcatcaaagcccactttgttcgcagtgtagctgaaatactgtctatctctaataaaaacaggaggaaac

SEQ ID NO: 76146 - DNA, 2576 bp, Homo sapiens
atggcttggccccttattctgtgatcttgaataactgagccttggttctcttgcttataaaatgtacctatgtaagtgaacagtggtaatacccaccatgaaatactatggagcagttagaagcaacagagcaattagaatacggatctggaaaacatagttccaagtgaaataaaaaggtgattggcaaaatgagaaatgtaacaatgccatttatgtaaagtcaaaacaaccacaagcagaatataacacccatgcaaataacagacatccagtacagtgtaatgattgtctacaaaaggaggagaatgcaagtgagttgggaggtttaaaggggatcaataaataaagaccacagaagggcctcagtacatttagaaataaataacatgcaaacaatgatgcttccctaccttcctcacgaggttactctgaggagctaatgagattgtgcgtatgaaaacaaaagttaattgactgtcttcattatgatctccatattggacaaatgaactgaacagagataaaaattccccatcacactttggcaggaagctgttgccagggcagcacctgtgaagccctggcctggcttcagagtctgctggtgagatgacatcaaaacccttcgtgtaggagggtggcagtctccctcccttctggagacaccaccagatgggccagccagaggcagcagcagcctcttcccatggatccaccacgagcgtcccacttgagccctcggaagaagagaccccggcagacgggtgccttgatggcctcctctcctcaagacatcaaatttcaagatttggtcgtcttcattttggagaagaaaatgggaaccacccgcagagcgttcctcatggagctggcccgcaggaaagggttcagggttgaaaatgagctcagtgattctgtcacccacattgtagcagagaacaactcgggttcggatgttctggagtggcttcaagcacagaaagtacaagtcagctcacaaccagagctcctcgatgtctcctggctgatcgaatgcataggagcagggaaaccggtggaaatgacaggaaaacaccagcttgttgtgagaagagactattcagatagcaccaacccaggccccccgaagactccaccaattgctgtacaaaagatctcccagtatgcgtgtcagagaagaaccactttaaacaactgtaaccagatattcacggatgcctttgatatactggctgaaaactgtgagtttagagaaaatgaagactcctgtgtgacatttatgagagcagcttctgtattgaaatctctgccattcacaatcatcagtatgaaggacacagaaggaattccctgcctggggtccaaggtgaagggtatcatagaggagattattgaagatggagaaagttctgaagttaaagctgtgttaaatgatgaacgatatcaatccttcaaactctttacttctgtatttggagtggggctgaagacttctgagaagtggttcaggatgggtttcagaactctgagtaaagtaaggtcggacaaaagcctgaaatttacacgaatgcagaaagcaggatttctgtattatgaagaccttgtcagctgtgtgaccagggcagaagcagaggccgtcagtgtgctggttaaagaggctgtctgggcatttcttccggatgctttcgtcaccatgacaggagggttccggaggggtaagaagatggggcatgatgtagattttttaattaccagcccaggatcaacagaggatgaagagcaacttttacagaaagtgatgaacttatgggaaaagaagggattacttttatattatgaccttgtggagtcaacatttgaaaagctcaggttgcctagcaggaaggttgatgctttggatcattttcaaaagtgctttctgattttcaaattgcctcgtcaaagagtggacagtgaccagtccagctggcaggaaggaaagacctggaaggccatccgtgtggatttagttctgtgcccctacgagcgtcgtgcctttgccctgttgggatggactggctcccggcagtttgagagagacctccggcgctatgccacacatgagcggaagatgattctggataaccatgctttatatgacaagaccaagaggatattcctcaaagcagaaagtgaagaagaaatttttgcgcatctgggattggattatattgaaccgtgggaaagaaatgcctaggaaagtgttgtcaacattttttcctattcttttcaagttaaataaattatgcttcatattagtaaaagatgccataggagagtttggggttatttaggtcttattgaaatgcagattgctactagaaataaataactttggaaacatgggaaggtgccactggtaatgggtaaggttctaataggccatgtttatgactgttgcatagaattcacaatgcatttttcaagagaaatgatgttgtcactggtggctcattcagggaagctcatcaaagcccactttgttcgcagtgtagctgaaatactgtctatctctaataaaaacaggaggaaac

SEQ ID NO: 76147 - DNA, 386 bp, Homo sapiens
tcccattaaaacatttcaattatatttaaaagaatcactgccaataactatactccttttcattccaggaatgcacatttaaagacttggcttatgttaaacatatgtagagagacatttttagcatctagaactgaatttcttacccatactgtctctgctcactctcgagtgattctctaataagaggtaagcattctagggcaagtcaagggatggaagaggcaaaattgttgaaaaaaaattgtcatttctcccaccaccctgctcttatttatctgaattcagatcttgggggcagagtgcccaggttttaacttagtttcactctttttttcatatatatatatatatatatatatgtgtgtgtgtgtgtgtgtgtgtgt

SEQ ID NO: 76148 - DNA, 544 bp, Homo sapiens
ctagcccataaatataagaaattatcagatgtcaattaacaatggaataaaatgaaattaaattttaaaatgaaaacattctagaaaatattcccaagaagagatttatttatttatttttctggctatctatccttaagggttcgggaaaaaatggccggtggagaacaaaagattgaaattttagctcattcatgatgcacgtgaccgggaaggagtgttaagatgtcctgtacttccttccataatcacaggttgaggtgagggttgcctaaagtctgatcagccacattttgacagtggagactcagaggcctagttaggaacacagaaggaaaaatgttaaaggcagacctttataaccaaaacaatcaacaggtctaaaagccaaagaaaccagtatttcagaattgttaacttactcctagatgtgtgttaggcatcgggcttatcttaaagaagtgtcttagaccacagaaacatagacccatgatatttggaccaagcataggttaaaactaggggagggaggcacgaattacaa

SEQ ID NO: 76149 - DNA, 639 bp, Homo sapiens
tatgaaagtttattgtttgctcatatgaagtttaaatgggtatcctgattagtagggaaagggggatttccacgtgcatactcggggatcaggtttcttccattatgtgcagtccgctgcaatcagcttgattgtggttggggaaagggaagagaatatggcccatggggttttcacaggccaagtctaaaagtgtgtggtttttttcctactcacattccattggctagaactcagtcacatgaccacacccaactgcaagggatgatgggaaatgtggtctagttgtgggccaaggaagaagacagacctggggagtggctagccagtctctgctgcatgctcgctgtttcctttatcgtttaattctttaaaactcaatatttgctacctatgccatagctaaaaaaataatgtccctaataataaaagggttattgaaatcagtaattaaaagacgaacattccaacaacaacagaaaagcaacatataggtccctttctgatgaccaataagccattaaaaataaaccttttactctgatagcaatcaatgaattgtaagttaatatgaagtataaaaatattttaaaatataaaaattaaaatcggctagccaatcagcagacttttctgtct

SEQ ID NO: 76150 - DNA, 3915 bp, Homo sapiens
taatacatgccctccttgccaattgttttctctagttcaatttatttttctttctttctttctttcttccttccttctttccttccttccttccttcctttctttttttctttttttttttttcggggtctggctctgtggcccaggctggagtgcagtgccatgatctcggcttactgcagccttacctcccaggctcaattaattctcccacctcagcctcctgagtagctgggattacaggtgtgcgccaccatgcccggctaatttttgtatttttagtagaggcagggtttcaccatgttggccaggctggtcttgaactcctgatctcaggtgatctgccctcctctacctcccaaagtgctgggattataggcgtgagccaccacacctggcccagttctatacttttctgtaaaaagtaaacaagttgcccaaatccttgtctctactttcagctgggaaactggcctgggcagctcaaaccattagatctggagagggagagggtgctgagtctgctcagtgatgtggcagtagtggatcaaaaatatctgtttggaggtcagacaggcctagattcactgctgtgcaattttgagtaagttccttgacttcccttgacttctctgatcctcatttttcttatctgaaaaatgcagcaaatagaatgatagaattattgtgagaacccaaacccagtagagtgctaggacagtgccagtcacatagtatgggctgtggtactagcagatgcagtcattgcctttagtacaaaagatgtacttgggaggtgacgagcatccagcaatggggacgagagccaggtggatgggaacaggataaacagcctctctggatccagtctgtctaccttctcaccctgaccatttctgtgtcactccccatgtgtttcaggtcatagccgcgtacccttttgtggccagaagcagccatgaagtgagcctgcaggcaggccagcctgtgaccatcctggaggcccaggacaagaaggggaaccctgagtggagcctggtggaagtgaatggacagaggggttatgtgccttctggcttcttggccagggctcggagcccagttctgtggggctggagtctgccctcttagggtaccctctttggagcctacattgccaaatgatgggggaggcttagaggctctgaccctggggggaaaagaagcaaaggaaaggtggaggtggaagggaagaccaggccagggtgggtgaagcacactcaggaggcagccagaagacatgggcgggcctcgcagagtgcttggtgtggtgggggcacaggaggctccagccaggactgctcattatgtctgcataaagaactcattccgacctggggtcacaatgcacttggacagcaggtcacagctgattggccaggactctccataggttatggccagtcttagctgtgcctgcatccgggcctgcctgtgggcgtgggtcacacgggataatgttacctgcgtgctgtgtggttgcaggaagcgggttctggaggagtccagaactgcctggtcagacagttcacttcctacacatggtatcaggagacatcataaccaatgagtcagcttttatttctctatgctggaagctgagtttatcttgggcagtgacccactgggagccctctcaagtggggaagccatggatttatcggtgtagcagagaggttcccaagactcttgactggtcctgggagtgggtgtgaccaagtcatagttctggaatgtgtgtaggcaaattcagaggctgttccagggaagaggggattttgatactgtgttaggtggggtgtgtgaggctgttggcagcaggtgaacagctactgctgtgttctcaggactagggaacaaaggggtatgcaaatcatagaggaaactctgggaaggcggtgataaggcctggtgggtggggaggttagggaatggcttgctttcctgtttctggttagaaggggagccagggggaacccccagtggtttcaggtggcccctgaggtcctggaggcagccgtggatgtgatgcaattggctgtgggaccttagatgtaggacacaacttcagtgttcccatccagaaagacctcactcacagggttgtgctgagaatgacgtggggctaagcatgcagagctccctgtaaactgtgaagtgtgatacaaatgtaaatgacagcagtgatctcggggtggcccccggcatgctgccctcccccacgcccatgcctgtggcagcaaaccttgttcatcagtatagctttctttcctgtaacccaggatctaccttggggggcttctcaatactgcattctatgtagccagcctctttaacttggtaagtgagccaccccattctagaacctggaaattggagcccctcaaaaacagttcctgttcaaggaggactgacctgctggggcaatgttgggtgcagtgcagtccctgcttggggtggtcatgtctaggctgttgctctgggcaaagataagttgcaagattcacagaaatgggaaaatgtgaccaagtgtgatcttaacaactgacaaagtttgtaaccaacccaagttagaatgtgtgtcaaacaggaggtagtttagatatgcttccaagaacatgtctgtgttataaccatagtgcctaagcagtgagctctggtttttgaagggcttttaagaaatatatacatgtctgtgtcagtctataacttgcctcctctgggcctgttaaagcatgaagactgcatgacacaagagaaatgcaagccctacggttcctttctcagcagcgaattcacttgagaggatgctcttgactcattctctctgctctttcctgctcagatttctgataaaaatagagagcataggggaacagataatgaaataggaaacccactcgtgggttccacagatacctaccgaaggcctactgtgtgctagaattgtagctcaggagttctcagtgtagctgctcactgaagttaccatggcaggtttcaactggcagaatccaggctccgtcccacccagagattctgatgaaattggtttagggtgtggctcgggcctcaggaattcagaaagcttcccaggtgcttccaatgtgcagccagggttagggacctctaccctagacacaaagtattggacagatagacctggtgccagagatggccatgagctgtaagctaggacgtgccccacctgagctctgcactagctagttcaaacaggcgctttaaaggcagtgtgaaaggggacagcctgttctgccaggtctcagaatgtatatttattaagtgccattaaaagggacctgaacaaaattggatgtcttgtaggcataagggaggaaaataaaatatacttggaaccaagtctatgtcatgaagggaaaataaaaatgtattcagtagcacgtgggttatggtttctcatagaccaggggataagattaaaagtcactgaagagtgggaaaatgcatgttgagaagatgagaatggcctgtattttctccaggggaatctgtgtaatgtgccttttccctctccaaatgcctagaaccatggcactgtgtcttatttatttaaccgttgggctgtctcatactaaacttgcaaagatatttgcctatgaactgaacaagacttccaggagttgaagtctggttcacaagggtaccccttgcctcctgtgatggagtgagaactcttaaacccctcaggccccaactcagttgtggagatgaggacaagattacaatatcaaaagaaagatgaatgaattcttggttaatatgacgaaccccagctcaatgagtaactgatgtgaactgctgggaataaaggacttcaaagatgaaaaaaaaaag

SEQ ID NO: 76151 - DNA, 516 bp, Homo sapiens
tactactaaattcgcggccgcgtcgacccatcctggaggcccaggacaagaaggggaaccctgagtggagcctggtggaagtgaatggacagaggggttatgtgccttctggcttcttggccagggctcggagcccagttctgtggggctggagtctgccctcttagggtaccctctttggagcctacattgccaaatgatgggggaggcttagaggctctgaccctggggggaaaagaagcaaaggaaaggtggaggtggaagggaagaccaggccagggtgggtgaagcacactcaggaggcagccagaagacatgggcgggcctcgcagagtgcttggtgtggtgggggcacaggaggctccagccaggactgctcattatgtctgcataaagaactcattccgacctggggtcacaatgcacttggacagcaggtcacagctgattgaagactggccataacctgtggagagtcctggccaatcagctgtgaccgtcgacgcggccgcgaat

SEQ ID NO: 76152 - DNA, 3179 bp, Homo sapiens
gcggccgctggctggtggacaccgggggacatcgtgggtatgtgccggctgggaaactacagctgtaccatgtggtccccagtgcagaggagctcagaaggcaggcggggctgaacaaagacccccgatgtctaacaccggagcccagcccagctctagtgccctctattcccaccatgaaccaggtcatagccgcgtacccttttgtggccagaagcagccatgaagtgagcctgcaggcaggccagcctgtgaccatcctggaggcccaggacaagaaggggaaccctgagtggagcctggtggaagtgaatggacagaggggttatgtgccttctggcttcttggccagggctcggagcccagttctgtggggctggagtctgccctcttagggtaccctctttggagcctacattgccaaatgatgggggaggcttagaggctctgaccctggggggaaaagaagcaaaggaaaggtggaggtggaagggaagaccaggccagggtgggtgaagcacactcaggaggcagccagaagacatgggcgggcctcgcagagtgcttggtgtggtgggggcacaggaggctccagccaggactgctcattatgtctgcataaagaactcattccgacctggggtcacaatgcacttggacagcaggtcacagctgattggccaggactctccataggttatggccagtcttagctgtgcctgcatccgggcctgcctgtgggcgtgggtcacacgggataatgttacctgcgtgctgtgtggttgcaggaagcgggttctggaggagtccagaactgcctggtcagacagttcacttcctacacatggtatcaggagacatcataaccaatgagtcagcttttatttctctatgctggaagctgagtttatcttgggcagtgacccactgggagccctctcaagtggggaagccatggatttatcggtgtagcagagaggttcccaagactcttgactggtcctgggagtgggtgtgaccaagtcatagttctggaatgtgtgtaggcaaattcagaggctgttccagggaagaggggattttgatactgtgttaggtggggtgtgtgaggctgttggcagcaggtgaacagctactgctgtgttctcaggactagggaacaaaggggtatgcaaatcatagaggaaactctgggaaggcggtgataaggcctggtgggtggggaggttagggaatggcttgctttcctgtttctggttagaaggggagccagggggaacccccagtggtttcaggtggcccctgaggtcctggaggcagccgtggatgtgatgcaattggctgtgggaccttagatgtaggacacaacttcagtgttcccatccagaaagacctcactcacagggttgtgctgagaatgacgtggggctaagcatgcagagctccctgtaaactgtgaagtgtgatacaaatgtaaatgacagcagtgatctcggggtggcccccggcatgctgccctcccccacgcccatgcctgtggcagcaaaccttgttcatcagtatagctttctttcctgtaacccaggatctaccttggggggcttctcaatactgcattctatgtagccagcctctttaacttggtaagtgagccaccccattctagaacctggaaattggagcccctcaaaaacagttcctgttcaaggaggactgacctgctggggcaatgttgggtgcagtgcagtccctgcttggggtggtcatgtctaggctgttgctctgggcaaagataagttgcaagattcacagaaatgggaaaatgtgaccaagtgtgatcttaacaactgacaaagtttgtaaccaacccaagttagaatgtgtgtcaaacaggaggtagtttagatatgcttccaagaacatgtctgtgttataaccatagtgcctaagcagtgagctctggtttttgaagggcttttaagaaatatatacatgtctgtgtcagtctataacttgcctcctctgggcctgttaaagcatgaagactgcatgacacaagagaaatgcaagccctacggttcctttctcagcagcgaattcacttgagaggatgctcttgactcattctctctgctctttcctgctcagatttctgataaaaatagagagcataggggaacagataatgaaataggaaacccactcgtgggttccacagatacctaccgaaggcctactgtgtgctagaattgtagctcaggagttctcagtgtagctgctcactgaagttaccatggcaggtttcaactggcagaatccaggctccgtcccacccagagattctgatgaaattggtttagggtgtggctcgggcctcaggaattcagaaagcttcccaggtgcttccaatgtgcagccagggttagggacctctaccctagacacaaagtattggacagatagacctggtgccagagatggccatgagctgtaagctaggacgtgccccacctgagctctgcactagctagttcaaacaggcgctttaaaggcagtgtgaaaggggacagcctgttctgccaggtctcagaatgtatatttattaagtgccattaaaagggacctgaacaaaattggatgtcttgtaggcataagggaggaaaataaaatatacttggaaccaagtctatgtcatgaagggaaaataaaaatgtattcagtagcacgtgggttatggtttctcatagaccaggggataagattaaaagtcactgaagagtgggaaaatgcatgttgagaagatgagaatggcctgtattttctccaggggaatctgtgtaatgtgccttttccctctccaaatgcctagaaccatggcactgtgtcttatttatttaaccgttgggctgtctcatactaaacttgcaaagatatttgcctatgaactgaacaagacttccaggagttgaagtctggttcacaagggtaccccttgcctcctgtgatggagtgagaactcttaaacccctcaggccccaactcagttgtggagatgaggacaagattacaatatcaaaagaaagatgaatgaattcttggttaatatgacgaaccccagctcaatgagtaactgatgtgaactgctgggaataaaggacttcaaagatgaaaaaaaaaag

SEQ ID NO: 76153 - DNA, 2542 bp, Homo sapiens
ggtgactccgaggattaaatatatccggctatccacatatccgccaggactctccataggttatggccagtcttagctgtgcctgcatccgggcctgcctgtgggcgtgggtcacacgggataatgttacctgcgtgctgtgtggttgcaggaagcgggttctggaggagtccagaactgcctggtcagacagttcacttcctacacatggtatcaggagacatcataaccaatgagtcagcttttatttctctatgctggaagctgagtttatcttgggcagtgacccactgggagccctctcaagtggggaagccatggatttatcggtgtagcagagaggttcccaagactcttgactggtcctgggagtgggtgtgaccaagtcatagttctggaatgtgtgtaggcaaattcagaggctgttccagggaagaggggattttgatactgtgttaggtggggtgtgtgaggctgttggcagcaggtgaacagctactgctgtgttctcaggactagggaacaaaggggtatgcaaatcatagaggaaactctgggaaggcggtgataaggcctggtgggtggggaggttagggaatggcttgctttcctgtttctggttagaaggggagccagggggaacccccagtggtttcaggtggcccctgaggtcctggaggcagccgtggatgtgatgcaattggctgtgggaccttagatgtaggacacaacttcagtgttcccatccagaaagacctcactcacagggttgtgctgagaatgacgtggggctaagcatgcagagctccctgtaaactgtgaagtgtgatacaaatgtaaatgacagcagtgatctcggggtggcccccggcatgctgccctcccccacgcccatgcctgtggcagcaaaccttgttcatcagtatagctttctttcctgtaacccaggatctaccttggggggcttctcaatactgcattctatgtagccagcctctttaacttggtaagtgagccaccccattctagaacctggaaattggagcccctcaaaaacagttcctgttcaaggaggactgacctgctggggcaatgttgggtgcagtgcagtccctgcttggggtggtcatgtctaggctgttgctctgggcaaagataagttgcaagattcacagaaatgggaaaatgtgaccaagtgtgatcttaacaactgacaaagtttgtaaccaacccaagttagaatgtgtgtcaaacaggaggtagtttagatatgcttccaagaacatgtctgtgttataaccatagtgcctaagcagtgagctctggtttttgaagggcttttaagaaatatatacatgtctgtgtcagtctataacttgcctcctctgggcctgttaaagcatgaagactgcatgacacaagagaaatgcaagccctacggttcctttctcagcagcgaattcacttgagaggatgctcttgactcattctctctgctctttcctgctcagatttctgataaaaatagagagcataggggaacagataatgaaataggaaacccactcgtgggttccacagatacctaccgaaggcctactgtgtgctagaattgtagctcaggagttctcagtgtagctgctcactgaagttaccatggcaggtttcaactggcagaatccaggctccgtcccacccagagattctgatgaaattggtttagggtgtggctcgggcctcaggaattcagaaagcttcccaggtgcttccaatgtgcagccagggttagggacctctaccctagacacaaagtattggacagatagacctggtgccagagatggccatgagctgtaagctaggacgtgccccacctgagctctgcactagctagttcaaacaggcgctttaaaggcagtgtgaaaggggacagcctgttctgccaggtctcagaatgtatatttattaagtgccattaaaagggacctgaacaaaattggatgtcttgtaggcataagggaggaaaataaaatatacttggaaccaagtctatgtcatgaagggaaaataaaaatgtattcagtagcacgtgggttatggtttctcatagaccaggggataagattaaaagtcactgaagagtgggaaaatgcatgttgagaagatgagaatggcctgtattttctccaggggaatctgtgtaatgtgccttttccctctccaaatgcctagaaccatggcactgtgtcttatttatttaaccgttgggctgtctcatactaaacttgcaaagatatttgcctatgaactgaacaagacttccaggagttgaagtctggttcacaagggtaccccttgcctcctgtgatggagtgagaactcttaaacccctcaggccccaactcagttgtggagatgaggacaagattacaatatcaaaagaaagatgaatgaattcttggttaatatgacgaaccccagctcaatgagtaactgatgtgaactgctgggaataaaggacttcaaagatgaaaaaaaaaag

SEQ ID NO: 76154 - DNA, 1891 bp, Homo sapiens
cacacctgtagtccaaactactcaggaggcagccgtggatgtgatgcaattggctgtgggaccttagatgtaggacacaacttcagtgttcccatccagaaagacctcactcacagggttgtgctgagaatgacgtggggctaagcatgcagagctccctgtaaactgtgaagtgtgatacaaatgtaaatgacagcagtgatctcggggtggcccccggcatgctgccctcccccacgcccatgcctgtggcagcaaaccttgttcatcagtatagctttctttcctgtaacccaggatctaccttggggggcttctcaatactgcattctatgtagccagcctctttaacttggtaagtgagccaccccattctagaacctggaaattggagcccctcaaaaacagttcctgttcaaggaggactgacctgctggggcaatgttgggtgcagtgcagtccctgcttggggtggtcatgtctaggctgttgctctgggcaaagataagttgcaagattcacagaaatgggaaaatgtgaccaagtgtgatcttaacaactgacaaagtttgtaaccaacccaagttagaatgtgtgtcaaacaggaggtagtttagatatgcttccaagaacatgtctgtgttataaccatagtgcctaagcagtgagctctggtttttgaagggcttttaagaaatatatacatgtctgtgtcagtctataacttgcctcctctgggcctgttaaagcatgaagactgcatgacacaagagaaatgcaagccctacggttcctttctcagcagcgaattcacttgagaggatgctcttgactcattctctctgctctttcctgctcagatttctgataaaaatagagagcataggggaacagataatgaaataggaaacccactcgtgggttccacagatacctaccgaaggcctactgtgtgctagaattgtagctcaggagttctcagtgtagctgctcactgaagttaccatggcaggtttcaactggcagaatccaggctccgtcccacccagagattctgatgaaattggtttagggtgtggctcgggcctcaggaattcagaaagcttcccaggtgcttccaatgtgcagccagggttagggacctctaccctagacacaaagtattggacagatagacctggtgccagagatggccatgagctgtaagctaggacgtgccccacctgagctctgcactagctagttcaaacaggcgctttaaaggcagtgtgaaaggggacagcctgttctgccaggtctcagaatgtatatttattaagtgccattaaaagggacctgaacaaaattggatgtcttgtaggcataagggaggaaaataaaatatacttggaaccaagtctatgtcatgaagggaaaataaaaatgtattcagtagcacgtgggttatggtttctcatagaccaggggataagattaaaagtcactgaagagtgggaaaatgcatgttgagaagatgagaatggcctgtattttctccaggggaatctgtgtaatgtgccttttccctctccaaatgcctagaaccatggcactgtgtcttatttatttaaccgttgggctgtctcatactaaacttgcaaagatatttgcctatgaactgaacaagacttccaggagttgaagtctggttcacaagggtaccccttgcctcctgtgatggagtgagaactcttaaacccctcaggccccaactcagttgtggagatgaggacaagattacaatatcaaaagaaagatgaatgaattcttggttaatatgacgaaccccagctcaatgagtaactgatgtgaactgctgggaataaaggacttcaaagatgaaaaaaaaaag

SEQ ID NO: 76155 - DNA, 1348 bp, Homo sapiens
gaaagcctaagtgtttcaggcaaaggcaagtgtgtgtgcaaaggaacttgagaaaacagattttcctaatacctaaagcataaggtaagaagatagtaacagaaagtgaaagggaaaacaattaagcagaaaccagattacaaagggtcacatacatgatggtatcgttttgcacaaactcatccaattgtctaaactcatcaaactgtacacattaaaggtgcaattctttatcaatcatacctcgacaaagctgttacaaaaagaaaatgatgtggtcttccagacactatctggagccacccacccacacgctaacttattggagtctttagggatccacttggtaatcaaacagcacagtgaatagaggaactctttggcataagaggatcataggttcaagtcccagctctaccactttctggcagtgtaaccactggcccttaccccagagcaagtgtcattctgtgccacacatatgcagcaatatatggacccacggggtcgaagccatctctctggctatgactacgttggcttcaccaattcctactttggcaactaataagcagctcctcgtggatcgtagaaaatcttagtgtcgtgggaaatttactggggggcaaagagtacaggcaaatgtggaagataaagatggcctcgtgtgtgtgtgtgtgtgtgtgtgtgtgtgtgtgtgcttgtgtttgtgtgcatattacatttattgtaggatcttaaaaaatctcaagggtgggagatagaaaggttaatagagttggaggagtggaagctattttgtatgcaactagtcactgctgaggggtgtcaaagtttctatttttatttgttctgttttgcacgtctttatcattttgctttattccgattatagaataaagtaattctttttaaaaatattttttggggcaaagttaagtaaaatgttgagcttctatatttctgggaactgtactcatataagagtgggcagctaattttactgtaaagaagggccatggtatagtagataaataaaatccaaggcaattttcaaacaatttttttaaactttggaatgtgtttaaatttaaatttgaaaataaagatatttgattttctggggaacatgaatattttagtttgtacaatgaaacaacacacagatcagcataacacctgttttcttcttgttttttttccatacttcaaaattattgtagatgttattactctcagaaagacaaaattccagcatagcagggctttctcttgtcctccaagctcccgtattttctcttaagttttaatgtaataaaaataatacttcaatatcctgttaaagtaa

SEQ ID NO: 76156 - DNA, 1201 bp, Homo sapiens
caaatgttgttaggcatataattccttctatttaataaaacaactttagggaatgagatttacagaataatcaaagtgagtaagctctctttttcaagaaagggctgagattaaaagttaagttactcattagaaattataaatttatgagataaaaattgtgtgtaatagaaatagggcttgcgtcttccagagactctccatctcctgcatttatggcgtaatatgggaagccccaaggaaccagctattttgaatccctataactgtatttttctctttttatacttttcaggcccttaccccagagcaagtgtcattctgtgccacacatatgcagcaatatatggacccacggggtcgaagccatctctctggctatgactacgttggcttcaccaattcctactttggcaactaataagcagctcctcgtggatcgtagaaaatcttagtgtcgtgggaaatttactggggggcaaagagtacaggcaaatgtggaagataaagatggcctcgtgtgtgtgtgtgtgtgtgtgtgtgtgtgtgtgtgcttgtgtttgtgtgcatattacatttattgtaggatcttaaaaaatctcaagggtgggagatagaaaggttaatagagttggaggagtggaagctattttgtatgcaactagtcactgctgaggggtgtcaaagtttctatttttatttgttctgttttgcacgtctttatcattttgctttattccgattatagaataaagtaattctttttaaaaatattttttggggcaaagttaagtaaaatgttgagcttctatatttctgggaactgtactcatataagagtgggcagctaattttactgtaaagaagggccatggtatagtagataaataaaatccaaggcaattttcaaacaatttttttaaactttggaatgtgtttaaatttaaatttgaaaataaagatatttgattttctggggaacatgaatattttagtttgtacaatgaaacaacacacagatcagcataacacctgttttcttcttgttttttttccatacttcaaaattattgtagatgttattactctcagaaagacaaaattccagcatagcagggctttctcttgtcctccaagctcccgtattttctcttaagttttaatgtaataaaaataatacttcaatatcctgttaaagtaa

SEQ ID NO: 76157 - DNA, 8223 bp, Homo sapiens
tgtcgattgtgtatggctgatgggattctaggaccaagcaagaggttttttttttttcccccacatacttaacgtttctatatttctatttgaattcgactggacagttccatttgaattatttctctctctctctctctctctctgacacattttatcttgccaggttctaaacctttaggaaaaatggagcaatttccaaaggaaaccgttgtggagagcagtgggccaaaggttttggaaacagcagaagagatccaggagaggcgtcaggaagtgttgactcggtatcaaagtttcaaggagcgggttgctgagaggggtcagaagcttgaggattcctatcacttacaagttttcaagcgagatgcagatgatctggggaagtggatcatggagaaagtcaatatcttaaccgataagagctatgaagacccaactaatatacaggggaaatatcagaagcatcaatcccttgaagcagaggtgcaaacgaaatcaagactcatgtctgaactggaaaaaacaagggaagaacgatttaccatgggtcattctgcccacgaagaaacgaaggcccatatagaggagctacgccacctgtgggacctgctgttagagctgaccctggagaagggtgaccagttgctgcgggccctgaagttccagcagtatgtacaggagtgtgctgacatcttagagtggattggagacaaggaggctatagcgacatcagtggagctaggtgaagactgggagcgcaccgaagttctgcataagaaatttgaagacttccaagtggagctggtagctaaagaagggagagttgttgaagtgaaccaatatgccaatgagtgtgccgaggaaaaccatcctgacctacccttaattcagtctaagcaaaatgaggtgaatgctgcctgggagcgccttcgtggtttggctctccagagacagaaagctctgtccaatgctgcaaacttacaacgattcaaaagggatgtgactgaagccatccagtggatcaaggagaaggaacctgtactcacctctgaggactatggcaaagaccttgttgcctctgaaggactgtttcacagccacaagggacttgagagaaatcttgcagtcatgagtgacaaggtgaaggagttatgtgctaaagcagagaagctgacactttcccatccttcagatgcacctcagatccaggagatgaaagaagatctggtctccagctgggagcatattcgtgccctggccaccagcagatatgaaaaactgcaggctacttattggtaccatcgattttcatctgactttgatgaactctcaggctggatgaacgagaagactgctgcgatcaatgctgatgagctgccaacagatgtggctggtggagaagttctgctggacaggcatcagcagcataagcatgagattgactcttacgatgaccgatttcaatctgctgatgagactggtcaagacctcgtgaatgccaatcatgaagcctctgatgaagttcgggaaaagatggaaatacttgacaacaactggactgccctgctggaactgtgggacgagcgtcatcgtcagtatgagcagtgcttggactttcatctcttctacagagacagtgagcaagtggacagttggatgagtagacaagaggccttcctggaaaacgaggatctgggaaactcactgggcagtgcagaagcccttcttcagaagcatgaagactttgaggaagcctttactgcccaggaagagaagatcataactgtagacaagactgcaaccaaattgattggtgatgaccattatgattcagagaacatcaaggctatccgtgacggcctgttagcccggcgggatgccctacgtgaaaaggctgccactagacgtagattgctgaaggagtcattgcttctgcaaaaactgtatgaggactcagatgacctaaagaactggatcaacaagaagaaaaagttggcagatgatgaagattacaaggacatacagaacttgaagagcagggttcaaaagcagcaagtctttgaaaaggagttggcagttaataagacccagctggaaaacatacagaaaactggccaagagatgattgagggtggtcactatgcctctgacaatgtgaccactcgtctgagtgaagttgccagcctctgggaggagttgctggaggctacaaaacagaaagggacccagttgcatgaggccaaccagcagctgcaatttgaaaataatgcagaagatttgcagcgctggctggaggatgttgagtggcaagtcacctctgaggattatgggaaaggcctggccgaggtacagaatcgactcaggaaacacggcctcctggagtcggctgtggctgctcgtcaggatcaggtggatatccttacagacctggctgcatattttgaagaaataggccatcctgattctaaggatataagggcaaggcaagagtccttggtatgccgatttgaagctctgaaagagccactggccaccagaaagaagaagctcttagaacttctccatctgcagctgatttgtagagacacagaggatgaggaagcctggatccaagagactgaaccctcagctacttccacctaccttggaaaggacctgattgcttccaaaaagcttctgaataggcatagagtcatcctggacaacattgccagccatgaaccacgcattcaagagataacagaaaggggaaacaaaatggtagaggaaggacactttgctgcagaagatgtggcctctagggtcaagagtttgaaccagaatatggagtctctccgtgctcgagctgctaggcgacaaaatgatcttgaagccaatgtccagttccagcagtacctggctgacctgcatgaagcagaaacatggatcagagagaaggaacctattgtagataatactaactatggtgctgatgaagaagcagctggggctcttctaaagaagcatgaggcctttctattagatctcaattcatttggagacagtatgaaagctctgcggaatcaggcaaacgcctgccagcaacaacaggctgcaccagtggagggagttgctggagaacaaagggtcatggctttatatgacttccaggcccgcagcccccgagaagtcaccatgaagaaaggtgatgtcttaacgctgctcagttccatcaataaggactggtggaaggtggaagctgctgatcatcagggcattgtcccagctgtctatgtcagaagactggcccacgatgagttcccgatgctcccacagcggcgacgagaagagccaggaaacatcacccagcgccaggagcagattgagaaccaataccgctccctcttggatcgggcagaagaacgcagacgtcgtctattgcaacgttataatgaatttttattggcctatgaggcaggagacatgctggaatggattcaagagaaaaaggcagaaaacactggagtggaactagatgatgtttgggagctgcagaaaaagtttgatgagttccaaaaggatttgaataccaatgagcctcggctaagggatatcaacaaggtagctgatgatctactatttgaaggacttctaacaccagaaggagctcaaatccggcaggaattgaatgcccgctggggttctttgcagaggcttgcagatgaacagcggcagctgctgggcagtgcccatgctgttgaagtgtttcacagagaagcagatgacacgaaggagcagattgagaagaaatgccaggccctcagtgctgcagaccctggctcagatctgttcagtgttcaggctcttcagcgacggcatgagggctttgaaagggacctcgtacccctgggagataaggtgaccatactgggggagacagcagagcggctcagtgagtcccatccagatgccactgaggacctgcagagacagaaaatggagctgaatgaggcctgggaagacctgcaggggcgtacaaaggatcgtaaggagagcctaaatgaggcccagaaattctacctgttcctcagcaaggccagggatctgcagaactggatcagtagcattggtggcatggtatcatcacaggagctggccgaagacttaactggcatagagatcttgctggagagacatcaggagcaccgtgctgacatggaggcagaggctcccaccttccaggccttagaggacttcagtgcagaacttatcgacagtgggcaccatgctagccctgaaattgaaaaaaagcttcaagctgtcaagctagagagagatgatttggagaaggcttgggaaaaacgcaagaagatcctagaccagtgcctggagttgcagatgttccaggggaactgtgatcaagttgagagccggatggtggcacgtgagaattccctgaggtcagatgacaaaagttccttagacagtctggaggctttgatgaagaaacgggacgatttggacaaagcaatcactgcccaggaagggaagatcactgacctagaacattttgctgagagcctcattgctgatgaacactatgccaaagaagagattgctacgcggctccaacgtgtactagacaggtggaaggctctcaaagcacaactgattgatgagcggacaaagcttggagactatgccaacctaaaacaattctaccgagaccttgaggagctggaagaatggatcagtgagatgctgcccacagcctgtgatgaatcctacaaagacgccactaacattcagaggaaatacctgaaacaccagacctttgcacatgaagtcgatggccgatctgagcaggtgcatggcgtcatcaacctggggaactccctgattgagcgtagttgtgatggcaatgaagaggccatgaaggagcaactggaacagctgaaggaacattgggatcatctgcttgagagaacaaatgacaaagggaagaagctcaatgaggccagtcgtcaacagaggttcaacacaagcatccgggactttgagttctggctctcagaggcagagacattgctggccatgaaagatcaggccagggacttggcttcagcaggaaacctactcaagaagcatcagctattggagagagagatgttggctcgagaggatgcactcaaggacctgaatacattggctgaagatttgctctccagcgggactttcaacgttgatcagattgtgaagaaaaaagataatgtcaacaagcgtttcctgaatgtccaagaattggcagctgcacaccacgaaaaattgaaagaggcctatgccttgttccagttcttccaggatctagatgatgaggaatcctggatagaggagaagttgatacgagtgagctcccaggactatgggagagatcttcagggggttcagaacttgctgaagaagcacaaacgcctagagggggagctggtggcccatgagcctgccatccagaatgtgctggatatggcagagaagctgaaagacaaggctgctgtggggcaagaggagatccagttgcggctggctcagtttgttgaacactgggagaagctcaaagagttggccaaggcccgaggacttaagttggaagaatccctagaatacttgcaattcatgcagaatgctgaggaagaggaagcttggatcaatgaaaagaatgctttggctgtccgaggagattgtggagatacattagctgctactcagagcttgctaatgaagcatgaagctttggaaaatgactttgctgtccatgagacccgagtacaaaatgtgtgtgcacaaggagaagacatcctaaataaggtgttgcaggaggaaagtcagaacaaagagatttcttccaagatagaggctctgaatgaaaagaccccttctctggctaaggcaatagctgcttggaagttgcaattggaagacgattatgcctttcaggaattcaactggaaggctgatgtggtagaggcttggatagctgataaggaaacaagcctaaagaccaatggcaatggtgcagaccttggtgacttcctcactcttctggcaaaacaggacactctggatgccagtctgcagagtttccagcaagagagacttcccgagatcactgacctgaaggacaaactgatttctgctcaacacaaccagtctaaagccattgaagagcgttatgccgctctgctgaagcgctgggaacagttgctggaagcctcggcagtccacagacagaaattgctggagaaacagctgcctctacagaaggctgaggacctgttcgtggaatttgcacataaggcttcagctttgaacaactggtgtgaaaagatggaagaaaacttgtcagagcctgtgcactgtgtctccctgaatgaaattcggcagctgcagaaagaccatgaggacttcttggcctccctggctagggctcaagcagactttaaatgtttgctggagctagaccagcagattaaggccttaggtgtgccttccagcccttatacctggttaacagtggaggtgctggaaaggacctggaagcacctatctgacatcattgaggaacgggagcaggagctgcaaaaggaagaggcaagacaggtcaagaactttgagatgtgtcaggagtttgaacagaatgccagtaccttccttcaatggatcctggaaaccagggcttactttctggatggatcattgctcaaagaaacaggaactctggaatctcagctggaagcaaataaaagaaaacagaaggagatccaggcgatgaagcgtcaactaaccaagattgtggacctgggggacaacttggaagacgctctgatccttgatatcaaatacagcaccattggattggctcagcagtgggaccagctctaccagcttgggttgcggatgcaacacaacctggagcaacagatccaggccaaggacatcaaaggtgtgagtgaagagactctaaaggaatttagcacaatctataaacactttgatgagaatttgacagggcgcctgactcacaaagagttccggtcctgcctgagaggactcaattactacttgcccatggtggaggaggatgaacatgagcccaagtttgagaagttcctggatgctgtggatccagggaggaagggctatgtctcactggaggactatactgctttcctgattgacaaggagtcagaaaacatcaagtccagtgatgaaatagagaatgccttccaagccctggcagagggcaagtcatatattaccaaagaagacatgaagcaggcccttaccccagagcaagtgtcattctgtgccacacatatgcagcaatatatggacccacggggtcgaagccatctctctggctatgactacgttggcttcaccaattcctactttggcaactaataagcagctcctcgtggatcgtagaaaatcttagtgtcgtgggaaatttactggggggcaaagagtacaggcaaatgtggaagataaagatggcctcgtgtgtgtgtgtgtgtgtgtgtgtgtgtgtgtgtgcttgtgtttgtgtgcatattacatttattgtaggatcttaaaaaatctcaagggtgggagatagaaaggttaatagagttggaggagtggaagctattttgtatgcaactagtcactgctgaggggtgtcaaagtttctatttttatttgttctgttttgcacgtctttatcattttgctttattccgattatagaataaagtaattctttttaaaaatattttttggggcaaagttaagtaaaatgttgagcttctatatttctgggaactgtactcatataagagtgggcagctaattttactgtaaagaagggccatggtatagtagataaataaaatccaaggcaattttcaaacaatttttttaaactttggaatgtgtttaaatttaaatttgaaaataaagatatttgattttctggggaacatgaatattttagtttgtacaatgaaacaacacacagatcagcataacacctgttttcttcttgttttttttccatacttcaaaattattgtagatgttattactctcagaaagacaaaattccagcatagcagggctttctcttgtcctccaagctcccgtattttctcttaagttttaatgtaataaaaataatacttcaatatcctgttaaagtaa

SEQ ID NO: 76158 - DNA, 948 bp, Homo sapiens
atctcccttttctctcatgtgattcctgttccggacctccatgtccagggcttactttctggatggcttactttctggatggatcattgctcaaagaaacaggaactctggaatctcagctggaagcaaataaaagaaaacagaaggagatccaggcgatgaagcgtcaactaaccaagattgtggacctgggggacaacttggaagacgctctgatccttgatatcaaatacagcaccattggattggctcagcagtgggaccagctctaccagcttgggttgcggatgcaacacaacctggagcaacagatccaggccaagtattgagggcgtgtggccagagcagggagggatgcaggtggtgttaggtgttaggaccttaactaagggcgagagtttggtgcaccagataaaagagttgcttcagagaaccaatattctgggtctttactgccccacggaatgactatttctctttatactgaaatccatcatgaaataaaagacagtgctctccatccacctgagcctactcatcacccacttggacaacaactgacttttatacccaatttctcagagttctttcaccatcttatgtgatctcttaggaaaccattccctttcatagaattttatctaaaatgtaatgtctagattaaaagaaacatttaaagtgtggccaaatagagcagaagggcagaaactcattttctagataaattcactatatcaaagcagctctaggtctcaatagcattttggcaacatttttatctagattaggattggcaaactttttctgtaaatggtctgataataaataatttaactttgtaaggcacatatattttctgctgtaactccttgattctgctgttgtagtgaaaaaagcagctatgataagtgaatgaccgtggccatgttccaataaagctttatatat

SEQ ID NO: 76159 - DNA, 7376 bp, Homo sapiens
tgtcgattgtgtatggctgatgggattctaggaccaagcaagaggttttttttttttcccccacatacttaacgtttctatatttctatttgaattcgactggacagttccatttgaattatttctctctctctctctctctctctgacacattttatcttgccaggttctaaacctttaggaaaaatggagcaatttccaaaggaaaccgttgtggagagcagtgggccaaaggttttggaaacagcagaagagatccaggagaggcgtcaggaagtgttgactcggtatcaaagtttcaaggagcgggttgctgagaggggtcagaagcttgaggattcctatcacttacaagttttcaagcgagatgcagatgatctggggaagtggatcatggagaaagtcaatatcttaaccgataagagctatgaagacccaactaatatacaggggaaatatcagaagcatcaatcccttgaagcagaggtgcaaacgaaatcaagactcatgtctgaactggaaaaaacaagggaagaacgatttaccatgggtcattctgcccacgaagaaacgaaggcccatatagaggagctacgccacctgtgggacctgctgttagagctgaccctggagaagggtgaccagttgctgcgggccctgaagttccagcagtatgtacaggagtgtgctgacatcttagagtggattggagacaaggaggctatagcgacatcagtggagctaggtgaagactgggagcgcaccgaagttctgcataagaaatttgaagacttccaagtggagctggtagctaaagaagggagagttgttgaagtgaaccaatatgccaatgagtgtgccgaggaaaaccatcctgacctacccttaattcagtctaagcaaaatgaggtgaatgctgcctgggagcgccttcgtggtttggctctccagagacagaaagctctgtccaatgctgcaaacttacaacgattcaaaagggatgtgactgaagccatccagtggatcaaggagaaggaacctgtactcacctctgaggactatggcaaagaccttgttgcctctgaaggactgtttcacagccacaagggacttgagagaaatcttgcagtcatgagtgacaaggtgaaggagttatgtgctaaagcagagaagctgacactttcccatccttcagatgcacctcagatccaggagatgaaagaagatctggtctccagctgggagcatattcgtgccctggccaccagcagatatgaaaaactgcaggctacttattggtaccatcgattttcatctgactttgatgaactctcaggctggatgaacgagaagactgctgcgatcaatgctgatgagctgccaacagatgtggctggtggagaagttctgctggacaggcatcagcagcataagcatgagattgactcttacgatgaccgatttcaatctgctgatgagactggtcaagacctcgtgaatgccaatcatgaagcctctgatgaagttcgggaaaagatggaaatacttgacaacaactggactgccctgctggaactgtgggacgagcgtcatcgtcagtatgagcagtgcttggactttcatctcttctacagagacagtgagcaagtggacagttggatgagtagacaagaggccttcctggaaaacgaggatctgggaaactcactgggcagtgcagaagcccttcttcagaagcatgaagactttgaggaagcctttactgcccaggaagagaagatcataactgtagacaagactgcaaccaaattgattggtgatgaccattatgattcagagaacatcaaggctatccgtgacggcctgttagcccggcgggatgccctacgtgaaaaggctgccactagacgtagattgctgaaggagtcattgcttctgcaaaaactgtatgaggactcagatgacctaaagaactggatcaacaagaagaaaaagttggcagatgatgaagattacaaggacatacagaacttgaagagcagggttcaaaagcagcaagtctttgaaaaggagttggcagttaataagacccagctggaaaacatacagaaaactggccaagagatgattgagggtggtcactatgcctctgacaatgtgaccactcgtctgagtgaagttgccagcctctgggaggagttgctggaggctacaaaacagaaagggacccagttgcatgaggccaaccagcagctgcaatttgaaaataatgcagaagatttgcagcgctggctggaggatgttgagtggcaagtcacctctgaggattatgggaaaggcctggccgaggtacagaatcgactcaggaaacacggcctcctggagtcggctgtggctgctcgtcaggatcaggtggatatccttacagacctggctgcatattttgaagaaataggccatcctgattctaaggatataagggcaaggcaagagtccttggtatgccgatttgaagctctgaaagagccactggccaccagaaagaagaagctcttagaacttctccatctgcagctgatttgtagagacacagaggatgaggaagcctggatccaagagactgaaccctcagctacttccacctaccttggaaaggacctgattgcttccaaaaagcttctgaataggcatagagtcatcctggacaacattgccagccatgaaccacgcattcaagagataacagaaaggggaaacaaaatggtagaggaaggacactttgctgcagaagatgtggcctctagggtcaagagtttgaaccagaatatggagtctctccgtgctcgagctgctaggcgacaaaatgatcttgaagccaatgtccagttccagcagtacctggctgacctgcatgaagcagaaacatggatcagagagaaggaacctattgtagataatactaactatggtgctgatgaagaagcagctggggctcttctaaagaagcatgaggcctttctattagatctcaattcatttggagacagtatgaaagctctgcggaatcaggcaaacgcctgccagcaacaacaggctgcaccagtggagggagttgctggagaacaaagggtcatggctttatatgacttccaggcccgcagcccccgagaagtcaccatgaagaaaggtgatgtcttaacgctgctcagttccatcaataaggactggtggaaggtggaagctgctgatcatcagggcattgtcccagctgtctatgtcagaagactggcccacgatgagttcccgatgctcccacagcggcgacgagaagagccaggaaacatcacccagcgccaggagcagattgagaaccaataccgctccctcttggatcgggcagaagaacgcagacgtcgtctattgcaacgttataatgaatttttattggcctatgaggcaggagacatgctggaatggattcaagagaaaaaggcagaaaacactggagtggaactagatgatgtttgggagctgcagaaaaagtttgatgagttccaaaaggatttgaataccaatgagcctcggctaagggatatcaacaaggtagctgatgatctactatttgaaggacttctaacaccagaaggagctcaaatccggcaggaattgaatgcccgctggggttctttgcagaggcttgcagatgaacagcggcagctgctgggcagtgcccatgctgttgaagtgtttcacagagaagcagatgacacgaaggagcagattgagaagaaatgccaggccctcagtgctgcagaccctggctcagatctgttcagtgttcaggctcttcagcgacggcatgagggctttgaaagggacctcgtacccctgggagataaggtgaccatactgggggagacagcagagcggctcagtgagtcccatccagatgccactgaggacctgcagagacagaaaatggagctgaatgaggcctgggaagacctgcaggggcgtacaaaggatcgtaaggagagcctaaatgaggcccagaaattctacctgttcctcagcaaggccagggatctgcagaactggatcagtagcattggtggcatggtatcatcacaggagctggccgaagacttaactggcatagagatcttgctggagagacatcaggagcaccgtgctgacatggaggcagaggctcccaccttccaggccttagaggacttcagtgcagaacttatcgacagtgggcaccatgctagccctgaaattgaaaaaaagcttcaagctgtcaagctagagagagatgatttggagaaggcttgggaaaaacgcaagaagatcctagaccagtgcctggagttgcagatgttccaggggaactgtgatcaagttgagagccggatggtggcacgtgagaattccctgaggtcagatgacaaaagttccttagacagtctggaggctttgatgaagaaacgggacgatttggacaaagcaatcactgcccaggaagggaagatcactgacctagaacattttgctgagagcctcattgctgatgaacactatgccaaagaagagattgctacgcggctccaacgtgtactagacaggtggaaggctctcaaagcacaactgattgatgagcggacaaagcttggagactatgccaacctaaaacaattctaccgagaccttgaggagctggaagaatggatcagtgagatgctgcccacagcctgtgatgaatcctacaaagacgccactaacattcagaggaaatacctgaaacaccagacctttgcacatgaagtcgatggccgatctgagcaggtgcatggcgtcatcaacctggggaactccctgattgagcgtagttgtgatggcaatgaagaggccatgaaggagcaactggaacagctgaaggaacattgggatcatctgcttgagagaacaaatgacaaagggaagaagctcaatgaggccagtcgtcaacagaggttcaacacaagcatccgggactttgagttctggctctcagaggcagagacattgctggccatgaaagatcaggccagggacttggcttcagcaggaaacctactcaagaagcatcagctattggagagagagatgttggctcgagaggatgcactcaaggacctgaatacattggctgaagatttgctctccagcgggactttcaacgttgatcagattgtgaagaaaaaagataatgtcaacaagcgtttcctgaatgtccaagaattggcagctgcacaccacgaaaaattgaaagaggcctatgccttgttccagttcttccaggatctagatgatgaggaatcctggatagaggagaagttgatacgagtgagctcccaggactatgggagagatcttcagggggttcagaacttgctgaagaagcacaaacgcctagagggggagctggtggcccatgagcctgccatccagaatgtgctggatatggcagagaagctgaaagacaaggctgctgtggggcaagaggagatccagttgcggctggctcagtttgttgaacactgggagaagctcaaagagttggccaaggcccgaggacttaagttggaagaatccctagaatacttgcaattcatgcagaatgctgaggaagaggaagcttggatcaatgaaaagaatgctttggctgtccgaggagattgtggagatacattagctgctactcagagcttgctaatgaagcatgaagctttggaaaatgactttgctgtccatgagacccgagtacaaaatgtgtgtgcacaaggagaagacatcctaaataaggtgttgcaggaggaaagtcagaacaaagagatttcttccaagatagaggctctgaatgaaaagaccccttctctggctaaggcaatagctgcttggaagttgcaattggaagacgattatgcctttcaggaattcaactggaaggctgatgtggtagaggcttggatagctgataaggaaacaagcctaaagaccaatggcaatggtgcagaccttggtgacttcctcactcttctggcaaaacaggacactctggatgccagtctgcagagtttccagcaagagagacttcccgagatcactgacctgaaggacaaactgatttctgctcaacacaaccagtctaaagccattgaagagcgttatgccgctctgctgaagcgctgggaacagttgctggaagcctcggcagtccacagacagaaattgctggagaaacagctgcctctacagaaggtttaaaaaaattatgaggcatgatcagttctctgttacctgtatattagccatgaaattcggaaacagatattgggaaactcagtttgggataatacaaaaaccttttattgcattgaaagatgttgggaagacattcttactgagcaaaaagtagattgaaaagaagctttaaaaattttttttagattgattgattagttgcataactaacttgagatggaagccaggcaaacagtggaagaggtggatggaacaagaggatgggaggtctttgtgtatgatagaattaaaactgtcaggcaaaagtcaaggttgtccctgtacttttcctaacccaaataaaaggagcactggacaagttgtcataaaacatgttctcaccttatatcaagctttcctaggttgaagaccttgtaaaagtcatttaatatctctaaaccttgatatccccatttagaaaattgagtagcatcaccattctattctgcctttctgttatcactattaaaaaagataatgaatctaaaagtgtaataattccatattattacattattacattcatataaatatgtatggttgtaatatgtgtgtattaataatacataattatatgtacattatctgtacctaaatatatgtacattaataatacataataaatatgtatgattaatatggattaatataataatgtaacattattacattactacatccatataaaattccatataaatatgtaatcaaaatattccttcaaatgttggctgctaaggcattggatgttgatcataaaaatatcaataatggaaggaggccaggtgcagtggctcacgcctataatcccagcactttggtagggcaaggcaggtggatcactagatcagaagatcaagatcatcctggctaacacggtgaaacaccgtctctactaaaaatacaaaaaattagccgggcgtggtggcgggcacctgtagtcccagctactcaggaggctgaggcaggagaacggcgtgatcccgggagatggagcttgcagtgagcccagatcgcggccactgtactcc

SEQ ID NO: 76160 - DNA, 7597 bp, Homo sapiens
tgtcgattgtgtatggctgatgggattctaggaccaagcaagaggttttttttttttcccccacatacttaacgtttctatatttctatttgaattcgactggacagttccatttgaattatttctctctctctctctctctctctgacacattttatcttgccaggttctaaacctttaggaaaaatggagcaatttccaaaggaaaccgttgtggagagcagtgggccaaaggttttggaaacagcagaagagatccaggagaggcgtcaggaagtgttgactcggtatcaaagtttcaaggagcgggttgctgagaggggtcagaagcttgaggattcctatcacttacaagttttcaagcgagatgcagatgatctggggaagtggatcatggagaaagtcaatatcttaaccgataagagctatgaagacccaactaatatacaggggaaatatcagaagcatcaatcccttgaagcagaggtgcaaacgaaatcaagactcatgtctgaactggaaaaaacaagggaagaacgatttaccatgggtcattctgcccacgaagaaacgaaggcccatatagaggagctacgccacctgtgggacctgctgttagagctgaccctggagaagggtgaccagttgctgcgggccctgaagttccagcagtatgtacaggagtgtgctgacatcttagagtggattggagacaaggaggctatagcgacatcagtggagctaggtgaagactgggagcgcaccgaagttctgcataagaaatttgaagacttccaagtggagctggtagctaaagaagggagagttgttgaagtgaaccaatatgccaatgagtgtgccgaggaaaaccatcctgacctacccttaattcagtctaagcaaaatgaggtgaatgctgcctgggagcgccttcgtggtttggctctccagagacagaaagctctgtccaatgctgcaaacttacaacgattcaaaagggatgtgactgaagccatccagtggatcaaggagaaggaacctgtactcacctctgaggactatggcaaagaccttgttgcctctgaaggactgtttcacagccacaagggacttgagagaaatcttgcagtcatgagtgacaaggtgaaggagttatgtgctaaagcagagaagctgacactttcccatccttcagatgcacctcagatccaggagatgaaagaagatctggtctccagctgggagcatattcgtgccctggccaccagcagatatgaaaaactgcaggctacttattggtaccatcgattttcatctgactttgatgaactctcaggctggatgaacgagaagactgctgcgatcaatgctgatgagctgccaacagatgtggctggtggagaagttctgctggacaggcatcagcagcataagcatgagattgactcttacgatgaccgatttcaatctgctgatgagactggtcaagacctcgtgaatgccaatcatgaagcctctgatgaagttcgggaaaagatggaaatacttgacaacaactggactgccctgctggaactgtgggacgagcgtcatcgtcagtatgagcagtgcttggactttcatctcttctacagagacagtgagcaagtggacagttggatgagtagacaagaggccttcctggaaaacgaggatctgggaaactcactgggcagtgcagaagcccttcttcagaagcatgaagactttgaggaagcctttactgcccaggaagagaagatcataactgtagacaagactgcaaccaaattgattggtgatgaccattatgattcagagaacatcaaggctatccgtgacggcctgttagcccggcgggatgccctacgtgaaaaggctgccactagacgtagattgctgaaggagtcattgcttctgcaaaaactgtatgaggactcagatgacctaaagaactggatcaacaagaagaaaaagttggcagatgatgaagattacaaggacatacagaacttgaagagcagggttcaaaagcagcaagtctttgaaaaggagttggcagttaataagacccagctggaaaacatacagaaaactggccaagagatgattgagggtggtcactatgcctctgacaatgtgaccactcgtctgagtgaagttgccagcctctgggaggagttgctggaggctacaaaacagaaagggacccagttgcatgaggccaaccagcagctgcaatttgaaaataatgcagaagatttgcagcgctggctggaggatgttgagtggcaagtcacctctgaggattatgggaaaggcctggccgaggtacagaatcgactcaggaaacacggcctcctggagtcggctgtggctgctcgtcaggatcaggtggatatccttacagacctggctgcatattttgaagaaataggccatcctgattctaaggatataagggcaaggcaagagtccttggtatgccgatttgaagctctgaaagagccactggccaccagaaagaagaagctcttagaacttctccatctgcagctgatttgtagagacacagaggatgaggaagcctggatccaagagactgaaccctcagctacttccacctaccttggaaaggacctgattgcttccaaaaagcttctgaataggcatagagtcatcctggacaacattgccagccatgaaccacgcattcaagagataacagaaaggggaaacaaaatggtagaggaaggacactttgctgcagaagatgtggcctctagggtcaagagtttgaaccagaatatggagtctctccgtgctcgagctgctaggcgacaaaatgatcttgaagccaatgtccagttccagcagtacctggctgacctgcatgaagcagaaacatggatcagagagaaggaacctattgtagataatactaactatggtgctgatgaagaagcagctggggctcttctaaagaagcatgaggcctttctattagatctcaattcatttggagacagtatgaaagctctgcggaatcaggcaaacgcctgccagcaacaacaggctgcaccagtggagggagttgctggagaacaaagggtcatggctttatatgacttccaggcccgcagcccccgagaagtcaccatgaagaaaggtgatgtcttaacgctgctcagttccatcaataaggactggtggaaggtggaagctgctgatcatcagggcattgtcccagctgtctatgtcagaagactggcccacgatgagttcccgatgctcccacagcggcgacgagaagagccaggaaacatcacccagcgccaggagcagattgagaaccaataccgctccctcttggatcgggcagaagaacgcagacgtcgtctattgcaacgttataatgaatttttattggcctatgaggcaggagacatgctggaatggattcaagagaaaaaggcagaaaacactggagtggaactagatgatgtttgggagctgcagaaaaagtttgatgagttccaaaaggatttgaataccaatgagcctcggctaagggatatcaacaaggtagctgatgatctactatttgaaggacttctaacaccagaaggagctcaaatccggcaggaattgaatgcccgctggggttctttgcagaggcttgcagatgaacagcggcagctgctgggcagtgcccatgctgttgaagtgtttcacagagaagcagatgacacgaaggagcagattgagaagaaatgccaggccctcagtgctgcagaccctggctcagatctgttcagtgttcaggctcttcagcgacggcatgagggctttgaaagggacctcgtacccctgggagataaggtgaccatactgggggagacagcagagcggctcagtgagtcccatccagatgccactgaggacctgcagagacagaaaatggagctgaatgaggcctgggaagacctgcaggggcgtacaaaggatcgtaaggagagcctaaatgaggcccagaaattctacctgttcctcagcaaggccagggatctgcagaactggatcagtagcattggtggcatggtatcatcacaggagctggccgaagacttaactggcatagagatcttgctggagagacatcaggagcaccgtgctgacatggaggcagaggctcccaccttccaggccttagaggacttcagtgcagaacttatcgacagtgggcaccatgctagccctgaaattgaaaaaaagcttcaagctgtcaagctagagagagatgatttggagaaggcttgggaaaaacgcaagaagatcctagaccagtgcctggagttgcagatgttccaggggaactgtgatcaagttgagagccggatggtggcacgtgagaattccctgaggtcagatgacaaaagttccttagacagtctggaggctttgatgaagaaacgggacgatttggacaaagcaatcactgcccaggaagggaagatcactgacctagaacattttgctgagagcctcattgctgatgaacactatgccaaagaagagattgctacgcggctccaacgtgtactagacaggtggaaggctctcaaagcacaactgattgatgagcggacaaagcttggagactatgccaacctaaaacaattctaccgagaccttgaggagctggaagaatggatcagtgagatgctgcccacagcctgtgatgaatcctacaaagacgccactaacattcagaggaaatacctgaaacaccagacctttgcacatgaagtcgatggccgatctgagcaggtgcatggcgtcatcaacctggggaactccctgattgagcgtagttgtgatggcaatgaagaggccatgaaggagcaactggaacagctgaaggaacattgggatcatctgcttgagagaacaaatgacaaagggaagaagctcaatgaggccagtcgtcaacagaggttcaacacaagcatccgggactttgagttctggctctcagaggcagagacattgctggccatgaaagatcaggccagggacttggcttcagcaggaaacctactcaagaagcatcagctattggagagagagatgttggctcgagaggatgcactcaaggacctgaatacattggctgaagatttgctctccagcgggactttcaacgttgatcagattgtgaagaaaaaagataatgtcaacaagcgtttcctgaatgtccaagaattggcagctgcacaccacgaaaaattgaaagaggcctatgccttgttccagttcttccaggatctagatgatgaggaatcctggatagaggagaagttgatacgagtgagctcccaggactatgggagagatcttcagggggttcagaacttgctgaagaagcacaaacgcctagagggggagctggtggcccatgagcctgccatccagaatgtgctggatatggcagagaagctgaaagacaaggctgctgtggggcaagaggagatccagttgcggctggctcagtttgttgaacactgggagaagctcaaagagttggccaaggcccgaggacttaagttggaagaatccctagaatacttgcaattcatgcagaatgctgaggaagaggaagcttggatcaatgaaaagaatgctttggctgtccgaggagattgtggagatacattagctgctactcagagcttgctaatgaagcatgaagctttggaaaatgactttgctgtccatgagacccgagtacaaaatgtgtgtgcacaaggagaagacatcctaaataaggtgttgcaggaggaaagtcagaacaaagagatttcttccaagatagaggctctgaatgaaaagaccccttctctggctaaggcaatagctgcttggaagttgcaattggaagacgattatgcctttcaggaattcaactggaaggctgatgtggtagaggcttggatagctgataaggaaacaagcctaaagaccaatggcaatggtgcagaccttggtgacttcctcactcttctggcaaaacaggacactctggatgccagtctgcagagtttccagcaagagagacttcccgagatcactgacctgaaggacaaactgatttctgctcaacacaaccagtctaaagccattgaagagcgttatgccgctctgctgaagcgctgggaacagttgctggaagcctcggcagtccacagacagaaattgctggagaaacagctgcctctacagaaggctgaggacctgttcgtggaatttgcacataaggcttcagctttgaacaactggtgtgaaaagatggaagaaaacttgtcagagcctgtgcactgtgtctccctgaatgaaattcggcagctgcagaaagaccatgaggacttcttggcctccctggctagggctcaagcagactttaaatgtttgctggagctagaccagcagattaaggccttaggtgtgccttccagcccttatacctggttaacagtggaggtgctggaaaggacctggaagcacctatctgacatcattgaggaacgggagcaggagctgcaaaaggaagaggcaagacaggtcaagaactttgagatgtgtcaggagtttgaacagaatgccagtaccttccttcaatggatcctggaaaccagggcttactttctggatggatcattgctcaaagaaacaggaactctggaatctcagctggaagcaaataaaagaaaacagaaggagatccaggcgatgaagcgtcaactaaccaagattgtggacctgggggacaacttggaagacgctctgatccttgatatcaaatacagcaccattggattggctcagcagtgggaccagctctaccagcttgggttgcggatgcaacacaacctggagcaacagatccaggccaagtattgagggcgtgtggccagagcagggagggatgcaggtggtgttaggtgttaggaccttaactaagggcgagagtttggtgcaccagataaaagagttgcttcagagaaccaatattctgggtctttactgccccacggaatgactatttctctttatactgaaatccatcatgaaataaaagacagtgctctccatccacctgagcctactcatcacccacttggacaacaactgacttttatacccaatttctcagagttctttcaccatcttatgtgatctcttaggaaaccattccctttcatagaattttatctaaaatgtaatgtctagattaaaagaaacatttaaagtgtggccaaatagagcagaagggcagaaactcattttctagataaattcactatatcaaagcagctctaggtctcaatagcattttggcaacatttttatctagattaggattggcaaactttttctgtaaatggtctgataataaataatttaactttgtaaggcacatatattttctgctgtaactccttgattctgctgttgtagtgaaaaaagcagctatgataagtgaatgaccgtggccatgttccaataaagctttatatat

SEQ ID NO: 76161 - DNA, 2294 bp, Homo sapiens
catgtttactacttgccgggtagaactggaggatagactttagaacaagaaatcatataattgaaaactacctttgctacttttggaattttaaaactgaaataattttagaaataattcgacctccctcatttgtaaatgatgaaagacttaaacaatttcacacaatgagaaaatgccagaaccagggctcgtaccgctaactcacatgttcaaccatcaaagtacacagtccctattggttttagttctgcccttttagattggtggccctgcagatatttaaagacaggcattatttttatcctcaatcttctcttctgctgagaggctttatcaggaaagatggtagtgtcttttttttctctctgcaggctgaggacctgttcgtggaatttgcacataaggcttcagctttgaacaactggtgtgaaaagatggaagaaaacttgtcagagcctgtgcactgtgtctccctgaatgaaattcggcagctgcagaaagaccatgaggacttcttggcctccctggctagggctcaagcagactttaaatgtttgctggagctagaccagcagattaaggccttaggtgtgccttccagcccttatacctggttaacagtggaggtgctggaaaggacctggaagcacctatctgacatcattgaggaacgggagcaggagctgcaaaaggaagaggcaagacaggtcaagaactttgagatgtgtcaggagtttgaacagaatgccagtaccttccttcaatggatcctggaaaccagggcttactttctggatggatcattgctcaaagaaacaggaactctggaatctcagctggaagcaaataaaagaaaacagaaggagatccaggcgatgaagcgtcaactaaccaagattgtggacctgggggacaacttggaagacgctctgatccttgatatcaaatacagcaccattggattggctcagcagtgggaccagctctaccagcttgggttgcggatgcaacacaacctggagcaacagatccaggccaaggacatcaaaggtgtgagtgaagagactctaaaggaatttagcacaatctataaacactttgatgagaatttgacagggcgcctgactcacaaagagttccggtcctgcctgagaggactcaattactacttgcccatggtggaggaggatgaacatgagcccaagtttgagaagttcctggatgctgtggatccagggaggaagggctatgtctcactggaggactatactgctttcctgattgacaaggagtcagaaaacatcaagtccagtgatgaaatagagaatgccttccaagccctggcagagggcaagtcatatattaccaaagaagacatgaagcaggcccttaccccagagcaagtgtcattctgtgccacacatatgcagcaatatatggacccacggggtcgaagccatctctctggctatgactacgttggcttcaccaattcctactttggcaactaataagcagctcctcgtggatcgtagaaaatcttagtgtcgtgggaaatttactggggggcaaagagtacaggcaaatgtggaagataaagatggcctcgtgtgtgtgtgtgtgtgtgtgtgtgtgtgtgtgtgcttgtgtttgtgtgcatattacatttattgtaggatcttaaaaaatctcaagggtgggagatagaaaggttaatagagttggaggagtggaagctattttgtatgcaactagtcactgctgaggggtgtcaaagtttctatttttatttgttctgttttgcacgtctttatcattttgctttattccgattatagaataaagtaattctttttaaaaatattttttggggcaaagttaagtaaaatgttgagcttctatatttctgggaactgtactcatataagagtgggcagctaattttactgtaaagaagggccatggtatagtagataaataaaatccaaggcaattttcaaacaatttttttaaactttggaatgtgtttaaatttaaatttgaaaataaagatatttgattttctggggaacatgaatattttagtttgtacaatgaaacaacacacagatcagcataacacctgttttcttcttgttttttttccatacttcaaaattattgtagatgttattactctcagaaagacaaaattccagcatagcagggctttctcttgtcctccaagctcccgtattttctcttaagttttaatgtaataaaaataatacttcaatatcctgttaaagtaa

SEQ ID NO: 76162 - DNA, 5516 bp, Homo sapiens
tgtcgattgtgtatggctgatgggattctaggaccaagcaagaggttttttttttttcccccacatacttaacgtttctatatttctatttgaattcgactggacagttccatttgaattatttctctctctctctctctctctctgacacattttatcttgccaggttctaaacctttaggaaaaatggagcaatttccaaaggaaaccgttgtggagagcagtgggccaaaggttttggaaacagcagaagagatccaggagaggcgtcaggaagtgttgactcggtatcaaagtttcaaggagcgggttgctgagaggggtcagaagcttgaggattcctatcacttacaagttttcaagcgagatgcagatgatctggggaagtggatcatggagaaagtcaatatcttaaccgataagagctatgaagacccaactaatatacaggggaaatatcagaagcatcaatcccttgaagcagaggtgcaaacgaaatcaagactcatgtctgaactggaaaaaacaagggaagaacgatttaccatgggtcattctgcccacgaagaaacgaaggcccatatagaggagctacgccacctgtgggacctgctgttagagctgaccctggagaagggtgaccagttgctgcgggccctgaagttccagcagtatgtacaggagtgtgctgacatcttagagtggattggagacaaggaggctatagcgacatcagtggagctaggtgaagactgggagcgcaccgaagttctgcataagaaatttgaagacttccaagtggagctggtagctaaagaagggagagttgttgaagtgaaccaatatgccaatgagtgtgccgaggaaaaccatcctgacctacccttaattcagtctaagcaaaatgaggtgaatgctgcctgggagcgccttcgtggtttggctctccagagacagaaagctctgtccaatgctgcaaacttacaacgattcaaaagggatgtgactgaagccatccagtggatcaaggagaaggaacctgtactcacctctgaggactatggcaaagaccttgttgcctctgaaggactgtttcacagccacaagggacttgagagaaatcttgcagtcatgagtgacaaggtgaaggagttatgtgctaaagcagagaagctgacactttcccatccttcagatgcacctcagatccaggagatgaaagaagatctggtctccagctgggagcatattcgtgccctggccaccagcagatatgaaaaactgcaggctacttattggtaccatcgattttcatctgactttgatgaactctcaggctggatgaacgagaagactgctgcgatcaatgctgatgagctgccaacagatgtggctggtggagaagttctgctggacaggcatcagcagcataagcatgagattgactcttacgatgaccgatttcaatctgctgatgagactggtcaagacctcgtgaatgccaatcatgaagcctctgatgaagttcgggaaaagatggaaatacttgacaacaactggactgccctgctggaactgtgggacgagcgtcatcgtcagtatgagcagtgcttggactttcatctcttctacagagacagtgagcaagtggacagttggatgagtagacaagaggccttcctggaaaacgaggatctgggaaactcactgggcagtgcagaagcccttcttcagaagcatgaagactttgaggaagcctttactgcccaggaagagaagatcataactgtagacaagactgcaaccaaattgattggtgatgaccattatgattcagagaacatcaaggctatccgtgacggcctgttagcccggcgggatgccctacgtgaaaaggctgccactagacgtagattgctgaaggagtcattgcttctgcaaaaactgtatgaggactcagatgacctaaagaactggatcaacaagaagaaaaagttggcagatgatgaagattacaaggacatacagaacttgaagagcagggttcaaaagcagcaagtctttgaaaaggagttggcagttaataagacccagctggaaaacatacagaaaactggccaagagatgattgagggtggtcactatgcctctgacaatgtgaccactcgtctgagtgaagttgccagcctctgggaggagttgctggaggctacaaaacagaaagggacccagttgcatgaggccaaccagcagctgcaatttgaaaataatgcagaagatttgcagcgctggctggaggatgttgagtggcaagtcacctctgaggattatgggaaaggcctggccgaggtacagaatcgactcaggaaacacggcctcctggagtcggctgtggctgctcgtcaggatcaggtggatatccttacagacctggctgcatattttgaagaaataggccatcctgattctaaggatataagggcaaggcaagagtccttggtatgccgatttgaagctctgaaagagccactggccaccagaaagaagaagctcttagaacttctccatctgcagctgatttgtagagacacagaggatgaggaagcctggatccaagagactgaaccctcagctacttccacctaccttggaaaggacctgattgcttccaaaaagcttctgaataggcatagagtcatcctggacaacattgccagccatgaaccacgcattcaagagataacagaaaggggaaacaaaatggtagaggaaggacactttgctgcagaagatgtggcctctagggtcaagagtttgaaccagaatatggagtctctccgtgctcgagctgctaggcgacaaaatgatcttgaagccaatgtccagttccagcagtacctggctgacctgcatgaagcagaaacatggatcagagagaaggaacctattgtagataatactaactatggtgctgatgaagaagcagctggggctcttctaaagaagcatgaggcctttctattagatctcaattcatttggagacagtatgaaagctctgcggaatcaggcaaacgcctgccagcaacaacaggctgcaccagtggagggagttgctggagaacaaagggtcatggctttatatgacttccaggcccgcagcccccgagaagtcaccatgaagaaaggtgatgtcttaacgctgctcagttccatcaataaggactggtggaaggtggaagctgctgatcatcagggcattgtcccagctgtctatgtcagaagactggcccacgatgagttcccgatgctcccacagcggcgacgagaagagccaggaaacatcacccagcgccaggagcagattgagaaccaataccgctccctcttggatcgggcagaagaacgcagacgtcgtctattgcaacgttataatgaatttttattggcctatgaggcaggagacatgctggaatggattcaagagaaaaaggcagaaaacactggagtggaactagatgatgtttgggagctgcagaaaaagtttgatgagttccaaaaggatttgaataccaatgagcctcggctaagggatatcaacaaggtagctgatgatctactatttgaaggacttctaacaccagaaggagctcaaatccggcaggaattgaatgcccgctggggttctttgcagaggcttgcagatgaacagcggcagctgctgggcagtgcccatgctgttgaagtgtttcacagagaagcagatgacacgaaggagcagattgagaagaaatgccaggccctcagtgctgcagaccctggctcagatctgttcagtgttcaggctcttcagcgacggcatgagggctttgaaagggacctcgtacccctgggagataaggtgaccatactgggggagacagcagagcggctcagtgagtcccatccagatgccactgaggacctgcagagacagaaaatggagctgaatgaggcctgggaagacctgcaggggcgtacaaaggatcgtaaggagagcctaaatgaggcccagaaattctacctgttcctcagcaaggccagggatctgcagaactggatcagtagcattggtggcatggtatcatcacaggagctggccgaagacttaactggcatagagatcttgctggagagacatcaggagcaccgtgctgacatggaggcagaggctcccaccttccaggccttagaggacttcagtgcagaacttatcgacagtgggcaccatgctagccctgaaattgaaaaaaagcttcaagctgtcaagctagagagagatgatttggagaaggcttgggaaaaacgcaagaagatcctagaccagtgcctggagttgcagatgttccaggggaactgtgatcaagttgagagccggatggtggcacgtgagaattccctgaggtcagatgacaaaagttccttagacagtctggaggctttgatgaagaaacgggacgatttggacaaagcaatcactgcccaggaagggaagatcactgacctagaacattttgctgagagcctcattgctgatgaacactatgccaaagaagagattgctacgcggctccaacgtgtactagacaggtggaaggctctcaaagcacaactgattgatgagcggacaaagcttggagactatgccaacctaaaacaattctaccgagaccttgaggagctggaagaatggatcagtgagatgctgcccacagcctgtgatgaatcctacaaagacgccactaacattcagaggaaatacctgaaacaccagacctttgcacatgaagtcgatggccgatctgagcaggtgcatggcgtcatcaacctggggaactccctgattgagcgtagttgtgatggcaatgaagaggccatgaaggagcaactggaacagctgaaggaacattgggatcatctgcttgagagaacaaatgacaaagggaagaagctcaatgaggccagtcgtcaacagaggttcaacacaagcatccgggactttgagttctggctctcagaggcagagacattgctggccatgaaagatcaggccagggacttggcttcagcaggaaacctactcaagaagcatcagctattggagagagagatgttggctcgagaggtaagtagtgttggcatccctctcctctgggcagaatagaaatatttctggctcttctccctcccatgttaggagaccatttgaaaacatagccttgcaaaattgttcttagtgttctcaaccagcagtcattttaattaggtaaaattaacgggctgtgaagacattaaaactgtcactgataatcaattatccctaaactatagactttaagattccagaaagtggacctgggaaactatcttttttatcttttactgatgcatacatataagccaattgtctttaagctatatatttgatctggtatttgaaagaaagtggaagtttactttatagaattacaaacaaaa

SEQ ID NO: 76163 - DNA, 385 bp, Homo sapiens
gtaataattataactctaaaaagcagtgctgctttaaaacccactcactaaacttctaagtctattactatggtggaaccatagtataatcttttttcgtgagatggagacaatgtgccaatagaaaattaggttttttagtagtatgattctcacttcacaaacaggatactcccagacaactagcttcaattttctaaagcctaggcttgggccttggaacataattagtagtctatatatgtttccatgaaaatgaataacacttaggctgagggcagtggctcacagctgtaatcccagcactttgggtggccgaggcaggaggattgctttaggccgagagttgtagaccaacctgggcaacaaagcaagacattgtctc

SEQ ID NO: 76164 - DNA, 854 bp, Homo sapiens
cgcgagcggcgcgagcggccgctcgcgtcagcactgggaaaaccagtctatgcaccaaaaatgtctaaaactggaaccaagattactttctatgaagacaaaaattttcaaggccgtcgctatgactgtgattgcgactgtgcagatttccacacatacctaagtcgctgcaactccattaaagtggaaggaggcacctgggctgtttatgaaaggcccaactttgctgggtacatgtacatcttaccacagggagagtaccctgaataccagcgttggatgggcctcaacgaccgcctcagctcctgcagagctgttcatctgcctagtggaggccagtataagattcagatctttgagaaaggggattttagtggtcagatgtatgaaaccaccgaagattgcccttccatcatggagcaatttcacatgcgagagatccactcctgtaaggtgctggagggtgtctggattttctatgagctacccaactaccgtggcaggcagtacctcctggacaagaaggagtaccggaagcccatcgattggggtgcagcctccccagctgtccagtctttccgccgcattgtggagtaatgacatgaatggggccatattcttcctggggcccaaatgctggctggccttgtggtccaaataggcatcatcaataaaacagttggcatgcatcccactgctgactataatgcctctccttaaatgcttctagggaccagcaatacagtgctcgccacagtgggcagtcacacaaagctacccatctgccagatcaccaatctagatctttgtgccaaacaaaatgagatctcattaaaaggttagaaagtcatact

SEQ ID NO: 76165 - DNA, 693 bp, Homo sapiens
cgcgagcggcgcgagcggccgctcgcgtcagcactgggaaaaccagtctatgcaccaaaaatgtctaaaactggaaccaagattactttctatgaagacaaaaattttcaaggccgtcgctatgactgtgattgcgactgtgcagatttccacacatacctaagtcgctgcaactccattaaagtggaaggaggcacctgggctgtttatgaaaggcccaactttgctgggtacatgtacatcttaccacagggagagtaccctgaataccagcgttggatgggcctcaacgaccgcctcagctcctgcagagctgttcatctgcctagtggaggccagtataagattcagatctttgagaaaggggattttagtggtcagatgtatgaaaccaccgaagattgcccttccatcatggagcaatttcacatgcgagagatccactcctgtaaggtgctggagggtgtctggattttctatgagctacccaactaccgtggcaggcagtacctcctggacaagaaggagtaccggaagcccatcgattggggtgcagcctccccagctgtccagtctttccgccgcattgtggagtaatgacatgaatggggccatattcttcctggggcccaaatgctggctggccttgtggtccaaataggcatcatcaataaaacagttggcatgcatccc

SEQ ID NO: 76166 - DNA, 2626 bp, Homo sapiens
ccccttggaccctcagagcataccgtctgcaagagacactatcatcctgttttgccaatgaagagctgtagagaaaggttcattgccctgtccaaggtcacgtagcaagaaagcagtagtattgagacttttcttttttttcttcatccgtaaactgaggtaccatatatctaaatctgtactgtgctaagatgggaagggaactgaaacacataaagaaatttgggcaggggataaaggagaggaagtagatgatttaggggtgggaaggaaaagggacccttttagggaacaggaaagagaataattgagataaatgggaagggaagggaaagattaaggtggagggaaacaattattagtatattagtatctagatagaaagaactacccaggatagaggagaatgagattttatagctttttatgagtcattcttcgtttcttcctctcattccctccatctaattagtcaccaaatcctgaagttctttactgttttctcatcatcattcacattggagttgccttttggttggccctcatcatctctcacctggcccacagcagccatccgtttctaggcacacactactaagtccaactcactcataatcaccaaagggattccagcatgattctggtgtcatttttctggctttattttctagtacttcaccacatattcaatatgtactggacttaatgaactacttattgtccctataatgggccatgttctttcactttattcttttaaacatgtttgttccttttcatttgcctctggaaaacacctacttatccttcaatgctcagctcaaagatcctctcaagacagtatccggctctgctcctttcatctgaaatgactcacatagttttcgcccgtgaaatccataaagtaaatcagccacaaggtggcggcataatgccaggtaattaacggttcgaagcatgacacctgtggtttcagtttataacctagcattgatctgaaattccatcttaaaaaaaaaaaagatgaaaagattgtggaattattgaataacaagggacaagctctgtagctcatttgtagttttcatcgtggttttcaggaactgcttggtgaatccttgggagttcctaggaactctgtctcctgtttcagccagaaaagctctgagagttgttttaaagccagaacttccagtctgctgtagtcttcaaataggaagctgaagctcagagaggtggctggatgaagatagtaaggctaattgtagagagggagctctgtagtccagacttactgtttctgctttcacagggctgcatatttttcagtgccatcagagacttaccccaggcattgtggtagaaacttgataagcgttggaggcaaagaggattcttatcattttgttactttgcaactactctgttggcaataaactaataataaagaacatgatatgatacattttcatgtatgaaagctctacatctatctaaaataagctctgtaaagctaaggttcatgctttatttttctctatgtatcctccatatcacctaggagtcatcttcatgaaacaattattgaagtcaagtgatgggcacagaggattgatagctcaaataaggcttggtacttgcccttggaaaaagtatgctaggattctggtgggaggggtagacatataaatggataatttataatatgatgtaagtacagagagctgtgggaacataaaggaaggaaaatgaacttgagtctgagactgctcacttctattagagccctcttctgttttgcttcatgttcagccttcaggaagaactcatttctgttgttgacaactgaagttgtctgtcagaaagcaatgttgtaaggtgacgtacagctacatatttttcctcaaaattgaggtgaaaggaatttctaaagtaggcattatgttcttaatttttatctgtgaattaagccacccagctcctcagctctttctctgttggccctctacttcagattactttctatgaagacaaaaattttcaaggccgtcgctatgactgtgattgcgactgtgcagatttccacacatacctaagtcgctgcaactccattaaagtggaaggaggcacctgggctgtttatgaaaggcccaactttgctgggtacatgtacatcttaccacagggagagtaccctgaataccagcgttggatgggcctcaacgaccgcctcagctcctgcagagctgttcatctgcctagtggaggccagtataagattcagatctttgagaaaggggattttagtggtcagatgtatgaaaccaccgaagattgcccttccatcatggagcaatttcacatgcgagagatccactcctgtaaggtgctggagggtgtctggattttctatgagctacccaactaccgtggcaggcagtacctcctggacaagaaggagtaccggaagcccatcgattggggtgcagcctccccagctgtccagtctttccgccgcattgtggagtaatgacatgaatggggccatattcttcctggggcccaaatgctggctggccttgtggtccaaataggcatcatcaataaaacagttggcatgcatccc

SEQ ID NO: 76167 - DNA, 2365 bp, Homo sapiens
attaaaatgttttctgattgtcccagcagtgtctttatagtgacttttttccccaaacacaagatcatgcattgcatttagttgtcatgtaagttttgttgcgtttagaacatgtcacttctgtccagaaatagaggtagtcttctgactcttacctctcacaagctttgttgaagaaaaaggacattaggaatttcaaagaggctgcttaaaaaaaaaaagagagactcttttgttcttaatttttacaactttgtctgggttttggtttcttgactcagcaaagtctgtaatgcagccctgcttggtaagcattaaaggcggtactgaagctttcctttattttataatcccagttgttttttctagaaaccatcaatagcgtctaaatgactgactcaatttttggatcctattctcatgactaagcaaatgtttgactgaaaccagcccatataaatgtcactgtgcctctaactctctgtagccattcctgaatttctttcagcactgggaaaaccagtctatgcaccaaaaatgtctaaaactggaaccaagctcaaagatcctctcaagacagtatccggctctgctcctttcatctgaaatgactcacatagttttcgcccgtgaaatccataaagtaaatcagccacaaggtggcggcataatgccaggtaattaacggttcgaagcatgacacctgtggtttcagtttataacctagcattgatctgaaattccatcttaaaaaaaaaaaagatgaaaagattgtggaattattgaataacaagggacaagctctgtagctcatttgtagttttcatcgtggttttcaggaactgcttggtgaatccttgggagttcctaggaactctgtctcctgtttcagccagaaaagctctgagagttgttttaaagccagaacttccagtctgctgtagtcttcaaataggaagctgaagctcagagaggtggctggatgaagatagtaaggctaattgtagagagggagctctgtagtccagacttactgtttctgctttcacagggctgcatatttttcagtgccatcagagacttaccccaggcattgtggtagaaacttgataagcgttggaggcaaagaggattcttatcattttgttactttgcaactactctgttggcaataaactaataataaagaacatgatatgatacattttcatgtatgaaagctctacatctatctaaaataagctctgtaaagctaaggttcatgctttatttttctctatgtatcctccatatcacctaggagtcatcttcatgaaacaattattgaagtcaagtgatgggcacagaggattgatagctcaaataaggcttggtacttgcccttggaaaaagtatgctaggattctggtgggaggggtagacatataaatggataatttataatatgatgtaagtacagagagctgtgggaacataaaggaaggaaaatgaacttgagtctgagactgctcacttctattagagccctcttctgttttgcttcatgttcagccttcaggaagaactcatttctgttgttgacaactgaagttgtctgtcagaaagcaatgttgtaaggtgacgtacagctacatatttttcctcaaaattgaggtgaaaggaatttctaaagtaggcattatgttcttaatttttatctgtgaattaagccacccagctcctcagctctttctctgttggccctctacttcagattactttctatgaagacaaaaattttcaaggccgtcgctatgactgtgattgcgactgtgcagatttccacacatacctaagtcgctgcaactccattaaagtggaaggaggcacctgggctgtttatgaaaggcccaactttgctgggtacatgtacatcttaccacagggagagtaccctgaataccagcgttggatgggcctcaacgaccgcctcagctcctgcagagctgttcatctgcctagtggaggccagtataagattcagatctttgagaaaggggattttagtggtcagatgtatgaaaccaccgaagattgcccttccatcatggagcaatttcacatgcgagagatccactcctgtaaggtgctggagggtgtctggattttctatgagctacccaactaccgtggcaggcagtacctcctggacaagaaggagtaccggaagcccatcgattggggtgcagcctccccagctgtccagtctttccgccgcattgtggagtaatgacatgaatggggccatattcttcctggggcccaaatgctggctggccttgtggtccaaataggcatcatcaataaaacagttggcatgcatccc

SEQ ID NO: 76168 - DNA, 1289 bp, Homo sapiens
attaaaatgttttctgattgtcccagcagtgtctttatagtgacttttttccccaaacacaagatcatgcattgcatttagttgtcatgtaagttttgttgcgtttagaacatgtcacttctgtccagaaatagaggtagtcttctgactcttacctctcacaagctttgttgaagaaaaaggacattaggaatttcaaagaggctgcttaaaaaaaaaaagagagactcttttgttcttaatttttacaactttgtctgggttttggtttcttgactcagcaaagtctgtaatgcagccctgcttggtaagcattaaaggcggtactgaagctttcctttattttataatcccagttgttttttctagaaaccatcaatagcgtctaaatgactgactcaatttttggatcctattctcatgactaagcaaatgtttgactgaaaccagcccatataaatgtcactgtgcctctaactctctgtagccattcctgaatttctttcagcactgggaaaaccagtctatgcaccaaaaatgtctaaaactggaaccaagctcaaagatcctctcaagacagtatccggctctgctcctttcatctgaaatgactcacatagttttcgcccgtgaaatccataaagtaaatcagccacaaggtggcggcataatgccagattactttctatgaagacaaaaattttcaaggccgtcgctatgactgtgattgcgactgtgcagatttccacacatacctaagtcgctgcaactccattaaagtggaaggaggcacctgggctgtttatgaaaggcccaactttgctgggtacatgtacatcttaccacagggagagtaccctgaataccagcgttggatgggcctcaacgaccgcctcagctcctgcagagctgttcatctgcctagtggaggccagtataagattcagatctttgagaaaggggattttagtggtcagatgtatgaaaccaccgaagattgcccttccatcatggagcaatttcacatgcgagagatccactcctgtaaggtgctggagggtgtctggattttctatgagctacccaactaccgtggcaggcagtacctcctggacaagaaggagtaccggaagcccatcgattggggtgcagcctccccagctgtccagtctttccgccgcattgtggagtaatgacatgaatggggccatattcttcctggggcccaaatgctggctggccttgtggtccaaataggcatcatcaataaaacagttggcatgcatccc

SEQ ID NO: 76169 - DNA, 612 bp, Homo sapiens
cagattggagcaaaagattctccttgttagcttgatggaataaacagatatgttgagaaaactgaccttacaaggaactgagcatagcttttggaatctgagggtggcttccagctgataaaacagcaaaacaccaaggccttcagtcacataacctcaagaaaatgaattctgcccaaacctgaataaacttggaagcccattcttccctagtaacctcccattgagagagcatcctggccaacaccttgaaggtaacgtggggagatcctgagcagaggacccagttatgccatgcctggactactgacacacagaaacagtgagataataaatgtatattgttttaaactgctaagcttgtggtaatttgttatcagcaatagtaaactactactactatttgttattgttatataacaattatattaattatatgtttgattatattaattacataacataatatgatattatataatttataattacattatatacaatatattaaaatataattatgtattaaagaattagataacaatgtataataaatatgtaatatactacatatgatatgttatctgttataataaaattatatataatatt

SEQ ID NO: 76170 - DNA, 501 bp, Homo sapiens
gtcgcgaatggtgtcccttctgaggcactgactgaaggcagtgtagggagggtcccaataggctgaatagccgattttgcatttatagtgctaaggaaaaagatgaaagccctcagcaacctactcaagatctgttatcctttgaagacagtggaaattttcaaagttctgtgcaagacacaaatgttttacatagatatataatcctagtttatatgtataggatacacacatactcatacatatatgggattagttatgtaatctaggattgctttcagaggacatttacgataattgcagaaaacccttccgtgggaaaggatactgggagtggagtcgtcctcttgctttcaaaagacttaatgttcagttagcatataaaggacaggttttcttgttctatcccagtaagccaagcaaattcctgtgaagctagctgtttccctttcctactgcattttccccaagataaaggtatagaatgcatcacagcccttt

SEQ ID NO: 76171 - DNA, 184 bp, Homo sapiens
  misc_feature (49)..(49): n is a, c, g, or t
  misc_feature (109)..(109): n is a, c, g, or t
gcaaaatggaaccatgggcttaggggaggagaacggcacattggtgtanaaagttgcagagaggaacaaaaaggctacctgcctcgctcccaggccaagtaacacaggnaggaaagaaaatatccacatatgcgagggctaaaggaaagaggtgttctcaagctgaagcaggaggtgggactca

SEQ ID NO: 76172 - DNA, 507 bp, Homo sapiens
gccagtcagttgtgttcaaattatattcaaataaggcaaacactaacctgtaaccaatccagctgtttctgtcctcacttctgttttctgtatgtcactttcctttttctgttcataaatcttcttccaccatgtggctgcgctggagtctctgaacctactctggctcgggaggctgcctgattcatgaattgttcattgctcaattaaactcctttaaatttaattcagctgatgtttttcttttatcatgtctaaaggatatacttcagaaagaatgcaattcattcatccaacaaatatatactgagccaggcacatttctctgtgctggagatacatccgtgaacaaaatagatgaaaaaaatcttgccctaataaagcttacattttaatagtccaaataacaaagtagtggcaaaaaccacaattatttttgcaccaacctaataaattagtaaaatacatggtatgtctggtagcatgctgtgaagcctttaacaactg

SEQ ID NO: 76173 - DNA, 750 bp, Homo sapiens
acagaaaaaatgagcaacttgtataagatggcacagctgtaaaaggtagagccagcgttcaaggccaggctatctggctctgccatcggtgctcttggccgctgtgttacagtgcctataaaaggaaacatccactgaaaggagacttgaatctatgagtctctgattacaaatgatctattctaccaacttagctgaatttcttataaggcagttttaaggcattaagtgagaagtcatgtaagaaagagatttgagaaatgaataccttgttcactacagactctaagcatatttatgtttccttcttttcctgttgccctgtaagtgaagtgacggactgcaaaaaaagaggattctgggagaagcatttaattccagaccaatatctaaaccagagtgtgttaatgatatcagaaagctcctcagacacataaaagagaatcacttgagcgcctgcatattatgcactttcaaaaagacaccttcctttttaaaagtctcttcacccatgctgttttgggttggggaatgggaagcttatttaactctggcattatcatcccctgaagatcaagggtgtacaatatcaaagtctagctgttcactctgtgtgatctgaaggtccttgtttaaaaagatgctattaatgcctcttgccatactggaaccaggacagtcgaatgcaaagggcacaggatcacagtacctgtggtatagcttgtgggccttttctgttcgctcttcctc

SEQ ID NO: 76174 - DNA, 642 bp, Homo sapiens
tactactactaaattcgcggccgcgtcgatacggtgttgggcatcacgttttggcatggagcaggcactcttttctttgcccccaggtgggactaagccaccacaagccttccctggtgtgtgcagtgggtgatgaatgcttgcctgctcagcacccacttcctggtgggctgggtcacattactatgactcccccttgagcttcagtccgcgcctggttggagattattgactcaacccggggatccagaggtgggatgtagctctggcctggccagaggaccgaggatgctgcatgccatggctacagctactggttcagctttgggctcatgtcctagtcagagccaatgagatgtaatcttgggatatctgctgggctgttgggaaggggacaggctgccctgcacatccccattcctgatgctgagggatctgagaaaatcacttgtaaaatttgggggtgtttggaagaaggggagattgatgtctctttctctctacagacatctgatcagctacagagcttgactaacctacccagaggcagaatgatatggtggttaaaagtgtgctctgggccgagattttgccactgcacttcagcctgggtgacagagtgagactccatctcaaaaaaaa

SEQ ID NO: 76175 - DNA, 460 bp, Homo sapiens
cctagatgaccataacaatatctttcatcctacctctcttctagaattttaccacactccatcaagagtaaagtataatttttctcttcttgacttttaggggattgtgagtcacctgtaaccagtataatgcagcagaagagatgctgtgtggctttccagttaggacatgaaaagtgatgaaataacctctgccttgctagctgttaagttttattcttggaacctaagtcttcacataagaagctcagctactttcaggccacagtgctaggaggaagccaagctatgtggagaggcatgagtagtgggcagttctagcttttgagtcctccaagtccaggagccagaaatatgagtgaatgagcattgagatgaatctagtcccagccattgacttctcctcagactttgggttgtttcagcagatgccccttcactctccagatactgtaggagc

SEQ ID NO: 76176 - DNA, 685 bp, Homo sapiens
  misc_feature (679)..(685): n is a, c, g, or t
gaaattcatcaattagaactgcttcttgctgccgccatatgaagaaggacgtgttcgcttccccttcctccatgattgtaagtttcctgagacctcgccagccatgctgaactgttataaacatcttgagagcaaggactaaatcttacttatctttattaagaactaacagtggaacacacagaaaatccatggatatactgtcagactgtcaccaaatatacattcaacatttttcttacttgtgagactgattttgagaaaatttgctatcacagaatcactaaactttagagcaggtaaagactcctgcaatgattttatttacttgctatattttaccaataagaaaaccgaggcatagagaagttgagactttctacacaccagtgcctagtcttcatgatgcttatgcccaaccctgagtcctttcctctatataatcctgcctcattacatttctgaaagacggagaagttttataacaacaagatgaaagactttggaagtttacagaggctatcaggctatcttctcatagacccatcatttgtccagcagaaagagactaaaaaggcttataagaatatcaagaccccaatgttgtacttatggtttgactttatatctctgactaattacagaatttgattattaaaaaaggttttttatatcaaannnnnnn

SEQ ID NO: 76177 - DNA, 542 bp, Homo sapiens
ggcacgagcgccccaagtggctggaatcccacctgctactatcactgtgaattataagagcatctgtgttgtcatttgcatttgcagtgttcccaaacattttcagtctctaacttgaacctaccaactctcttccaatttgctcattgacattcccagcccaaatgcgtttttatatttgcctatgcacactaatcatcacggctaaactttccattgtggacattgcttgatagtttgaaaaacagatttgcacatgttattcatttaatccacacaggaaccttaggtacatgagtattgctatgcccattttacagatgagggtagtaaggcaaagaggttgaatgacttcccccaaggctacacctgatgagaggcagaactgagaactgaatgtacacctttcttgactccaaagcttgcttttagatcatgctgttctttacctgagggttgctctattgtttcaccagcagcaagacacatgctttaagtagtttttgcaaaaacaatgatctgtttgagccaagtcatctgta

SEQ ID NO: 76178 - DNA, 428 bp, Homo sapiens
aagcagtttgattaagataagaccttgtatagttttctcttttacatattgttctactttatttagtttcttgcatctgcatgcttatagttctcatcaaatttgaataataatgacatacatagtcttacctatggcatatacaatatattatatttggcatatatacatcaaatatatataatgtatattctattctttctctctatcttctccttcaaagactccagttatatttatattagctgctttgaaattttaccacagctgactaatggtctgttcatttttgttgtatcttttctttctctctgtttctttctatttccatgtcttggaattgattaatctttcttcagcagcatctaatctgctgttaatcctatccagtgtattttcatctcagactttatttttcatctaaattt

SEQ ID NO: 76179 - DNA, 587 bp, Homo sapiens
ttgatggtcacaagagaagtgctattggcatacaggcaatagaggctaaggatgctgctaaccatctgaaaacaggaaagccccctacaacaaagaattgtctggacaaaatgtcaatagtgtcagtgctccagaggcttgtatcatcaagttttttttttttttttagccaggagacacttgataagtaatatcctgttcttctattcagatacatacctgtctgtttcattttcactgctgtcactttacctgctcttgggctcttgattcctaatagaccctatccacaagctccagagacatgagggacactggccaagtgcaaaactttatttctggataaagcgcttgtgtcctatcctggtgaacccaattacacttcaacatttattgaccatccacaacgtgcaggatacaacagcccaggagaagatgcagagcctatgaggaaacaaaggcaagtagtctagagactgggcaaactagaaagaaacctcttgtcactgcataccctaaccatggaacaagcaagatgacaacctcctctttctttactattcctccccacctagccaaatatccca

SEQ ID NO: 76180 - DNA, 747 bp, Homo sapiens
tcccatatacctgcctccaagtgtggtacagagaacttgggcctgctgggggcgcttagccttactctctccaccacctctcccaccaacccccagatgaactgcaggtagacgtttcttccttgcttggagccccagtttttgcatttcattttcattaaaatgaaaggtggtttggttttggttctaaggagctctacagtttaacagagagagggaccttaggggccaagaaagcaggggcctaccaagtatctccacttttgaaaattgtaattactgataaaaaattttttaaaggcaggtttattgaagcataatttataaacaataaaatttactctttttagtgtatagttctttgggctttgacaaaaacatacaattgtgccactaccacattccagacattgaacatcttcaccaccacccagaattcctttgtgctctcttgtggttaacccctcctcaaccccagtccgtggaaaccactggtttgttttctatcctctatccatcacctcaccatttccagaaatagtgtgcagctgtttgcacgtggctgcttttactgaacatgatgcattggagtcatccatattgcctgtgtagagtgcttttttgcaccgagtagcattccattgtatggatggagccatttgtttatccgttcacccatggcagggtatttgggcattttcagtatgggcaactatgattaaagctgccatcactgtgtatcaacta

SEQ ID NO: 76181 - DNA, 563 bp, Homo sapiens
taaaaaagaatgtttttctgaatcttagggcatacagccacttttaccatttttatttgaatttgagttcaggtaaacttaggcaaatagaaaagtgggagagggtgggaagagacaaggtgagcctgcttttcccaatactgggaaaatgaattaaactagacgggggacgtcagagaacagaatgccttgcctttggtctgctttttaatatattttatgatcccaaattttacagaaagtctcaagggtttctgtgttttttaaatggtcaaatatgtgacatacatgtgtacatagatcacagagccccactgtagttttttaaatgagccacatttaccttggggaagagcccctccccccccgccatcataatattgtgaatgtaaagagagattggttcacaatgagaatgtacagtaggctcctataagggtgacaggattatatgcagaatgactttgaagagccaaaattgatttatttatgttaagtagtgctaagaaggaatatttgtcccggagtgaggcatttgagatagagggggaaaagcaaaaaaa

SEQ ID NO: 76182 - DNA, 371 bp, Homo sapiens
tcgaacaattcagctcggtacccctccataatggtgcctagaacacataattgtttaataaatgttagctattgtgatttggcttcacaataactgttaggtaaacagtgccaatattagtattttattgataaggaagccaaggatcaaaaagactcagtgactttccctctgtcgtatgctgacaacaatgactttactattccatgctcatactcttcctaaaattctctatgccttaaggatccactataaagaacagagagaaactaaaataggccaggagcctgtaatcccagcactttggaatgccaagatgggtgatagattgagcctagaggttcgagaccagcctgggcaacatggtgaaa

SEQ ID NO: 76183 - DNA, 379 bp, Homo sapiens
ctgaaattaaagttaataaagcatgcaaagctcttaacatggtgcctagaacacataattgtttaataaatgttagctattgtgatttggcttcacaataactgttaggtaaacagtgccaatattagtattttattgataaggaagccaaggatcaaaaagactcagtgactttccctctgtcgtatgctgacaacaatgactttactattccatgctcatactcttcctaaaattctctatgccttaaggatccactataaagaacagagagaaactaaaataggccaggagcctgtaatcccagcactttggaatgccaagatgggtgatagattgagcctagaggttcgagaccagcctgggcaacatggtgaaa

SEQ ID NO: 76184 - DNA, 525 bp, Homo sapiens
taaaaaaaaaaaaaaaaaagagacaagtttctccctaatctgtgcatgccaaaaatggcaaagaagcaggaagcctccacagacctctgtgaggccagggcaggtgtgtaacaggcaccagcgccttggtgggtcatggttctgctcacctgttcctgggagaaggaaaaacccttttactggtgagaacactgagactcagagtgtacttgccctgatcacctatctagaaggtggcagaaagggcctttgcatgcaagcctgtctgaatctgaagcagatcctttcccattgcagtggaggtgttctttcagaaccaaagacttcttgtacttcctcccctacctacctatacaggagtgggaggcagggcctgccagccgcagggtgatctttgtgtctcttggtgtagagcataagtgtactttactgggggcagaacagagcatgccctattccaacaggaccacaagtgtcaggcaactgaaggctgggtgtatctgcagtcatctccatgccgagtca

SEQ ID NO: 76185 - DNA, 409 bp, Homo sapiens
ttggtaatatataatttatatgaaccttataaagtagatttctctcccctttctttacaggggttgaagggggagttccttaagcttttctacttttgacagctttagtgaactccaagtgattcgttatcaacttagagcactttaatgtagcccatttacagtgagacccatccatgactgcacgtcatatacagtaaccactaactgcaggtggctactgaggacttgaaatgcagctaatcctaactgagatgtgctgcaggtgtaaaacacacaacagatttctaagaattactgtccaaagaaagaatataaactctttgcaatgatattaataattaattttgttattacacgttgaaatattttggatatattgggttaaataaaatatattataaaaatt

SEQ ID NO: 76186 - DNA, 2305 bp, Homo sapiens
caaccctgaatgtcatagttagctactttcaactggaagctacaacatggatttatggaatctgtcttggtttctgttcttggatgctcttctcgtgatttctggcttggcaactccagaaaactttgatgtagatggcggaatggaccaggacatatttgatatcaatgaaggtttgggactggatctttttgagggtgacatcagacttgatagggcacaaattagaaattccatcattggagaaaagtatagatggcctcataccattccatatgttctagaagatagcttggaaatgaatgctaagggagttatcctcaatgcatttgaacgttatcgccttaaaacatgtattgactttaagccttgggctggagaaacaaactatatatcagtgttcaagggcagtggctgctggtcttcagtaggaaataggcgggttgggaagcaagaactttccatcggggcaaactgtgaccgaatagcaacagttcaacacgagttcctccacgctctgggattctggcatgagcagtcgcgttctgaccgggatgactatgtcaggataatgtgggacagaattctgtcaggcagagagcacaattttaacacctatagtgacgatatatcagattccctgaatgttccctatgattacacttcagtaatgcactacagtaaaactgcattccaaaatggaacagagccgacaattgtcacaagaatctcagactttgaggatgtgatcggccaacgaatggatttcagtgactctgatctcctaaagttgaatcaactgtataactgctcctcttccttgagttttatggactcatgcagttttgaactggaaaatgtgtgtggcatgatccaaagttcaggagataatgctgactggcaacgggtttcacaggttcccagggggccagagagtgatcactccaacatgggccagtgccaaggttctggtttcttcatgcatttcgatagcagctctgtaaatgtgggggccacagcagtgctggaaagtagaacgctgtaccctaaaagaggatttcagtgcctgcaattttacttatataacagtggcagtgaaagtgatcaactgaacatctatatcagggagtattctgcagacaatgtggatggcaatttaacccttgtggaagaaataaaagaaatacccactgggagctggcaactttatcatgtaacattgaaagtgaccaagaagtttagagtggtgtttgaaggacgcaaaggctctggtgcatcactgggtggtctgtctattgatgacatcaatctttcggaaacacggtgccctcatcatatctggcatataaggaatttcacacagttcattggcagcccaaatggaactctgtatagccctccattttactcttctaaaggttatgcctttcagatttacttaaatctagcccatgtgactaatgcagggatatatttccacttgatctctggagccaatgatgatcaattacagtggccatgtccttggcaacaagccacaatgacacttttggatcaaaatcctgacattcgacagcgtatgtccaatcagcggagtataactacagacccatttatgaccaccgataatggaaactatttctgggacaggccttctaaagtgggaacagtggctttgttctctaatggaactcagtttagaagaggtgggggctatggaaccagtgcctttataacccacgaaaggctgaaaagcagagattttataaaaggagatgatgtttatatcctactgacagtggaagacatatctcacctcaactctacacaaatccagctaacaccagcccctagtgttcaagacctctgctcaaaaaccacctgtaaaaatgacggtgtctgcactgttcgagatggcaaagctgagtgcaggtgccagtcaggggaagactggtggtacatgggagaaaggtgtgaaaagagaggctccacccgagacaccatagtcattgctgtttcatctactgttgctgtgtttgccttgatgctgatcatcacccttgtcagtgtctattgcaccaggaagaaatatcgtgaaaggatgagctcaaatcgaccaaatttgactctgcaaaatcatgctttttgaagattaactcgacaatatggccagctaatgaaattaaaaaggattcttcatcatggatttcgcctaagtgatattacagccacctcattcttctaaaagtggatatttttctgtaaatagctggaaatattataaatcactattttggtcaaagtc

SEQ ID NO: 76187 - DNA, 477 bp, Homo sapiens
ctgcgagttcgattacttgcggaagaggagaaaatcccagactttgagtccggtcaccagcagctcagtcgcatctcagagctgcctgagaaagaggatgccctggtacctctcagtcatccacgagaaggtactggcggagggggtgcaaatcccggccccccacccctctctctgcgtccggctgggaggacagccctgctccctgacaggctctggttctagtatctggttagctgcatcaagcaggtccccatggcctaaaatgacctccagaccccctgctttgacaaagctcctcacccctgtccatcctcaccccagtgggtggcagttacgccggcatggaactcagactcaccggcacgcatgacttccaaccgtccacacatctttgcacccacagtatctgcttcagagaatgtattctaaataataaaaatcataacaggaataaccagcttgatttatgcacaa

SEQ ID NO: 76188 - DNA, 550 bp, Homo sapiens
ccctcagtttctcattatccctctgcctagtgtcaatacgatttaatcataatcatcccactccaccgtccttgtaggtgttgttactctcagacctttccagtgtttgaatcatctcactggcaagggcattcatctccaccaggcttttccccaagttaccaacagtgtaatcattagcaatgagtccatgactttgggccaggcaccctccttgccccacatttcaccctgtatgtggctcttccttccagctgggcagtgagtgatgaggatcccaaaaactcatctcagtctatgtccttgctatgtatgtacaaaaatgagaaatgtaaattgtgtttaaaaaccttatctcattacatactttctcaaaccactctttgagtgtcatttttgggtcctccaagaagctgagataaaaatggaatttgatgtgcaagatatttactgcggaaagtacctgaggatgatcaagaggagaggagaggagaaggaagagaagtaggcagagagagccttctgatcactaggtgagtctgacatcaca

SEQ ID NO: 76189 - DNA, 1321 bp, Homo sapiens
aattgcagtttttcccattattttaattgcgaaaacagcaattacctttgcaccaacctgatggagtcccccttgccatgcttctctctgtgaaaaaccccaagccgaagtcagcataacatccacaggactctatgtttgcaaaagccagcttagctatattacatgtataagcacattttttcaatgagtcagccttagcttactgtaactttttaactttataaacttagtattttaactttttaaacttttttgttgaaaactaagacacaaaaacacatgttagcctagatccacacagggtcagggtcatcagtatcactgtcttccacctccacattttgtctctctggaaggtcttcaggggcaataacacacatggagctgtcatcgcctgtggtaacaatgccttctacagtacttcccaaagggcctgctagttcacttaattcttttatagagagaaggagtacactctaaaacactgatcaatagtatattatagtaaatacataaaccaggaacacatttattatcattatcacgtattgtgtattgtacagaatggtgtgtgctgtgctatccaggaacacatttattatcattatcaagtattgtgtactgtacagaatggtgtgcgctgtgcttttatgcaagtggcagcacagtagctttacacgagcatcactagacacatgagtagcattgcactcggcaacaggaattttttcaggcccattattataatcttatgggaccgcatcctatatgcagtttgtcattgaccaaaatgtccttatgcgatgcatgactatatttgcaaaggactagtatctagaatacatttaaaagtcttaaaatagtaacaaaacaaagaatgcaattagaacatgagcaaaagatacaaagcaacatttcactggagaagatatacagattgcaaataagcacatgaaaagatgtttgataccattagggaaacgcttctttaaaccaggagatatcaccacgtgttagaatcaacaaaataaggccaggcatggtggctcacacctgtaatcccaacactttgggaggctggggcaggcagatcacatgagatcaggaattcaagaccaacctggccaacatggcaaaaccctgtctctgctgaaaacacaaaaattagccaggtgtggtggcacacgcctgtagtcctagcaccttgggaggctgaggcaagataattgcttaaacccaggagacggaggttgcagtaagctgagatcatgccactgcgctccagcctgggcgacagagcaagattatgtctcaaaaa

SEQ ID NO: 76190 - DNA, 1039 bp, Homo sapiens
aattgcagtttttcccattattttaattgcgaaaacagcaattacctttgcaccaacctgatggagtcccccttgccatgcttctctctgtgaaaaaccccaagccgaagtcagcataacatccacaggactctatgtttgcaaaagccagcttagctatattacatgtataagcacattttttcaatgagtcagccttagcttactgtaactttttaactttataaacttagtattttaactttttaaacttttttgttgaaaactaagacacaaaaacacatgttagcctagatccacacagggtcagggtcatcagtatcactgtcttccacctccacattttgtctctctggaaggtcttcaggggcaataacacacatggagctgtcatcgcctgtggtaacaatgccttctacagtacttcccaaagggcctgctagttcacttaattcttttatagagagaaggagtacactctaaaacactgatcaatagtatattatagtaaatacataaaccaggaacacatttattatcattatcacgtattgtgtattgtacagaatggtgtgtgctgtgctatccaggaacacatttattatcattatcaagtattgtgtactgtacagaatggtgtgcgctgtgcttttatgcaagtggcagcacagtagctttacacgagcatcactagacacatgagtagcattgcactcggcaacaggaattttttcaggcccattattataatcttatgggaccgcatcctatatgcagtttgtcattgaccaaaatgtccttatgcgatgcatgactatatttgcaaaggactagtatctagaatacatttaaaagtcttaaaatagtaacaaaacaaagaatgcaattagaacatgagcaaaagatacaaagcaacatttcactggagaagatatacagattgcaaataagcacatgaaaagatgtttgataccattagggaaacgcttctttaaaccaggagatatcaccacggtgtataacggggggcctctagagt

SEQ ID NO: 76191 - DNA, 863 bp, Homo sapiens
actgatcaatagtatattatagtaaatacataaaccagtaacacatttattatcattatcaagtattatgtactgtacagaatggtgtgtgctgtgctatccaggaacacatttattatcattatcaagtattgtgtactgtacagaatgatgtgtgctgtgctatccaggaacacatttattatcattatcaagtattgtgtactgtacagaatgatgtgcgctgtgctatccaggaacacatttattatcattatcaagtattgtgtactgtacagaatggtgtgcgctgtgctatccaggaacacatttattatcattatcaagtattgtgtactgtacagaatggtgtgcgctgtgctatccagggaacacatttattatcattatcacgtattgtgtattgtacagaatggtgtgtgctgtgctatccaggaacacatttattatcattatcaagtattgtgtactgtacagaatggtgtgcgctgtgcttttatgcaagtggcagcacagtagctttacacgagcatcactagacacatgagtagcattgcactcggcaacaggaattttttcaggcccattattataatcttatgggaccgcatcctatatgcagtttgtcattgaccaaaatgtccttatgcgatgcatgactatatttgcaaaggactagtatctagaatacatttaaaagtcttaaaatagtaacaaaacaaagaatgcaattagaacatgagcaaaagatacaaagcaacatttcactggagaagatatacagattgcaaataagcacatgaaaagatgtttgataccattagggaaacgcttctttaaaccaggagatatcaccacgtgtt

SEQ ID NO: 76192 - DNA, 477 bp, Homo sapiens
cattttttattttttaaatgttgatttttttatgagtagttgctgtgtgggatctggatataaagattaaattctcatcagagagggagtgagtgatacattatgttctttgctgaaagaccatgtgtctcggaggctgaagcaaaggaaataaacacactctcctggtgtttatggggtttcctcattgttccctgatataattcagtttaagagttggtgacagaagcagatgccctatattcatgggatgttccatctcacttcatgacttactggaatcctaatttttaaaattttcacagtggaattaagacataatggatgactctagccagacatgctgacacatgcctgtagtccagctgcttcagaggctgaggcaagaggatcatgagcccaggaggtcaaggctgcagtgagctgtgatggcaccactgcatcccagcctgggtgatagagtgagacactgcctca

SEQ ID NO: 76193 - DNA, 405 bp, Homo sapiens
ctacctaaattcgcggccgcgtcgaccattatgttctttgctgaaagaccatgtgtctcggaggctgaagcaaaggaaataaacacactctcctggtgtttatggggtttcctcattgttccctgatataattcagtttaagagttggtgacagaagcagatgccctatattcatgggatgttccatctcacttcatgacttactggaatcctaatttttaaaattttcacagtggaattaagacataatggatgactctagccagacatgctgacacatgcctgtagtccagctgcttcagaggctgaggcaagaggatcatgagcccaggaggtcaaggctgcagtgagctgtgatggcaccactgcatcccagcctgggtgatagagtgagacactgcctca

SEQ ID NO: 76194 - DNA, 869 bp, Homo sapiens
aactatcacctctctaatttaaaatgcatgaaaattaatactttgtttttgttttttttttggaaacagtctcactctgtcacccaggctggagggcacaatctctgctcactgcaacctccacctcctgggctcaagcctcaagcaattctcctgcctcagcctcccaagtagctgggattacaggaacccaccaccacgcccagctaatttttgtatttttagtagatggggtttcatcatgttggccaggctggttttgaactcctgacttcaaatgatccacccacatccacctgccagagtgctgagattacaggcgtgagccaccgcacctggccaatgttcttttatatactcatgttttctaacaaaacagctttggatttataatgctgccagatgtcattacaattttttttctaaattcaaaggtaattattctaaacaataaaagggcacctggaattttcagaacattaaaaaactgaaaccacttagaagaaaagaagaaacctaaatgtctgtggaagtgatcagtattaagtgggtgatggctctttcatcttccttatccctaaagatacttccaacatattgttagagtaagtattaaaagaaaaagtaggtttgctgaaaaacattactaaatgacttggagctctccagtcaaagaaacaaagctaattgaaataatgtacatttggttcagtctgtcaggcaagtacaaatccataacaaaaaaaattaatagtatgctctttgctttggaatctctaatttacggtcatgccctaagtcacaggatgattattagggaaatgtcattgacacctgaaaattacctatcctgtaaaaagactggtgaa

SEQ ID NO: 76195 - DNA, 451 bp, Homo sapiens
cattgtgattgatcttgtaatgaacgtcagaattcattctacaccatccctgaatattgttcctgactctggtacttagtaatatttaggtacttcatcaatatttgttgcatagatgaatatcttttattaatgacaaagatactagcaataagtaaattagaaattatgaaaaaaaaaccaacctgaataatcaattcagattcattaaattgggtgcaagacatagagtgactggtaattttgctgcagcaaaaaaattaaattgacatagacaaagatgctagtttgtatgaatgccattttactagtgaaagcagctaacaaattgtgcagagtctgcatctcaacaaggtttcatattatccattcaatttcatacatgcaataacacaaatgtatttttgtgagaaaaatgttaagtccggagaaaaaaaaagaaatctgtaaa

SEQ ID NO: 76196 - DNA, 405 bp, Homo sapiens
aattgcattgtaatctcaccatgtaaacatggatttggggtgaaataagaaactttaaaatgatcctcccttagagattgttgttatattgtccctaaacttaatgaaaacaattttaaactttagagtactaagaatgcaaatgctgggattacaggtgcgagccactgcgcctggctgattcttcagtctttcttatgaatacattttctgcattgaaatcattttgtgtctttcagtggcaccagcctgtcagcttcgggagtatgtgcctgtaggcttcttgggctccaaaatccttgggaggagtggtctctcagttgtcgatcagtgtttatcacataagtcatcttgtatgttgtccaccaagaacttcaaataaattttctgattgaaaaagtacca

SEQ ID NO: 76197 - DNA, 429 bp, Homo sapiens
aattgcattgtaatctcaccatgtaaacatggatttggggtgaaataagaaactttaaaatgatcctcccttagagattgttgttatattgtccctaaacttaatgaaaacaattttaaactttagagtactaagaatgcaaagtacagaaagtagggcccgatgtgtgctgggattacaggtgcgagccactgcgcctggctgattcttcagtctttcttatgaatacattttctgcattgaaatcattttgtgtctttcagtggcaccagcctgtcagcttcgggagtatgtgcctgtaggcttcttgggctccaaaatccttgggaggagtggtctctcagttgtcgatcagtgtttatcacataagtcatcttgtatgttgtccaccaagaacttcaaataaattttctgattgaaaaagtacca

SEQ ID NO: 76198 - DNA, 615 bp, Homo sapiens
gatccattgagtaaaacaggatattggaaaataatcgtgacgttgttctaaatcctggttctgcacagtatcaagtaaataaccaagttttctggttttagatgagtgattgttaggttaactccctgactgtccttcgtacagcctgcatttgatcttcctatttcatactttacccaggtacttgattaaacatgggatctttgaactgagatccagcaatatctatcacattgtaaggtttttctcttcatgtatattgattgcagagtactttccacaaaccagaacaaactgtatttgaaaaaaagatttgtcacctttatccctggaaaggagagagggagacagtattggccacggcacagcagataaacatgtttattgttatggttcttcaggttgccatgggtgaaccaatgcacataaaacctgtagcacacatcaggaaatgttgtcattattatagtgtcttgtatctgataacaccgctttttaaaatgtgtttaaaagtcattagctagaaagtgttttaaaactcttgctataattagatagtaaatgcctgtgggtgcataattgcagtgctgggtaatagactgacttgagatagct

SEQ ID NO: 76199 - DNA, 274 bp, Homo sapiens
atagaagttacattaaatctgaggtatgttgttttaatttgcatttaaaaaataaataatggggctaacttttttcaaatgtttgttaacagttttagtttcttctgcaaattcatatcatttctgtaagccaggaaatccctgacaccctcctgtcaagctaaaaaacaagaaacacaatagagctgggcatggtggctcatgcatgtaatctcagtactttgggaagccgaggtgggaggatcacttgagcctaggagttcgagaccagcct

SEQ ID NO: 76200 - DNA, 1038 bp, Homo sapiens
agctgggactagagggatgcgccaccaggcctggctaatttttgtatttttagtagagatggggtttcaccatgttggccaggctggtctcgaactcctgaaatattatcccccccattccccagtttttttagataactcgtttttagtgtgacttcagaagagactgggcatgacacagattattttttgtagcttttttgtgtaggtgggtgattggtgtaaggtttaggagaacaaaaaaggacaggtaaatcaatattaacagggagctcggtacccctgcttctagaatttgaccaacaaagtgaaatttacaagtagtttgctggtttattatcaaattaacctgtgtttactaatgggtagtgtcatgtagctttgatctcaattctcaaaacggttttgtagactctggttggaatcccactttttctcaagtaatgagctttctaggtctgttgttctgaatcagattttgataccttttggtttagtaggtgtctgctaccaggtgagttaatttctcttccttgggtcctgggtttccttttttgtctgtttctttcctaaccttcgatgtgtatagggttgcaagtcatgtaagcataatactctttacatcctgggatagtatttgcttctttgtacttggttgtgcacagttgagaatacagtgtgggtgtggaacacctgtccaggtgcccagttcatgcctgacagttttgaaaggtagtctcattagaatccagttattaagcctgtctgttgtatacatgagaaactaatttagtctctgcttttactattttagtgcttgggaaagtttctttttgtaattaagactagtactttaaacgtatgtttagggcctttgaggtattaggaattttggaaactggaaagatacaatctttctatcacagtatttgtgttgatcctgaaatgtctgagtttattttgtttggagtgagtttaacctgaaatgtcaaaacctagatccataatatagcatcacatctcaataaatttatttgg

SEQ ID NO: 76201 - DNA, 709 bp, Homo sapiens
agcgggaaagatccaaggctgtgagcaaacactggacaaatacctgagtccagaagactgcctcagtggctcatactggcatacctcccagcaggtatctgcatgggtcggatagattcctgactgcaatgagacgggttggggttgagactgagacccctcagaatatgctgtggaaatgaggttggtggaactgttttattggcccagattgttaggtaccacccagcaggttcctgcaaaagctggataggtagattcttgattgcaacaggggaggccagagctgggactggtgcctcttggaatctgctgtgggatggagattggtgagcctatcagggtggctcagattcccgggctgcaagatataggtgagactccctttggatgcttgtgcaggtagctatgagcagggagctcagctgagggcacactggagctgagtcacaaggcaactttcaagttttttcctgtgactgctaccaatggacagagaagcctttctgccaaggcactagtgtgtgtgattctttctggactctttggcagatggttttggttgcaggttcaaggcaaacaggcttctagccattccccttagagaactaggctgcttctgagcttcagcctgggagcaagcttggaggattagtgactcaagtattggtctgcattctcaaaatgatccttcaaggacttggattcc

SEQ ID NO: 76202 - DNA, 2111 bp, Homo sapiens
ggccgcgcccacgtgaccggtccgggtgcaaacacgcgggtcagctgatccggcccaactgcggcgtcatcccggctataagcgcacggcctcggcgaccctctccgacccggccgccgccgccatgcagccctccagccttctgccgctcgccctctgcctgctggctgcacccgcctccgcgctcgtcaggatcccgctgcacaagttcacgtccatccgccggaccatgtcggaggttgggggctctgtggaggacctgattgccaaaggccccgtctcaaagtactcccaggcggtgccagccgtgaccgaggggcccattcccgaggtgctcaagaactacatggacgcccagtactacggggagattggcatcgggacgcccccccagtgcttcacagtcgtcttcgacacgggctcctccaacctgtgggtcccctccatccactgcaaactgctggacatcgcttgctggatccaccacaagtacaacagcgacaagtccagcacctacgtgaagaatggtacctcgtttgacatccactatggctcgggcagcctctccgggtacctgagccaggacactgtgtcggtgccctgccagtcagcgtcgtcagcctctgccctgggcggtgtcaaagtggagaggcaggtctttggggaggccaccaagcagccaggcatcaccttcatcgcagccaagttcgatggcatcctgggcatggcctacccccgcatctccgtcaacaacgtgctgcccgtcttcgacaacctgatgcagcagaagctggtggaccagaacatcttctccttctacctgagcagggacccagatgcgcagcctgggggtgagctgatgctgggtggcacagactccaagtattacaagggttctctgtcctacctgaatgtcacccgcaaggcctactggcaggtccacctggaccaggtggaggtggccagcgggctgaccctgtgcaaggagggctgtgaggccattgtggacacaggcacttccctcatggtgggcccggtggatgaggtgcgcgagctgcagaaggccatcggggccgtgccgctgattcagggcgagtacatgatcccctgtgagaaggtgtccaccctgcccgcgatcacactgaagctgggaggcaaaggctacaagctgtccccagaggactacacgctcaaggtgtcgcaggccgggaagaccctctgcctgagcggcttcatgggcatggacatcccgccacccagcgggccactctggatcctgggcgacgtcttcatcggccgctactacactgtgtttgaccgtgacaacaacagggtgggcttcgccgaggctgcccgcctctagttcccaaggcgtccgcgcgccagcacagaaacagaggagagtcccagagcaggaggcccctggcccagcggcccctcccacacacacccacacactcgcccgcccactgtcctgggcgccctggaagccggcggcccaagcccgacttgctgttttgttctgtggttttcccctccctgggttcagaaatgctgcctgcctgtctgtctctccatctgtttggtgggggtagagctgatccagagcacagatctgtttcgtgcattggaagaccccacccaagcttggcagccgagctcgtgtatcctggggctcccttcatctccagggagtcccctccccggccctaccagcgcccgctgggctgagcccctaccccacaccaggccgtcctcccgggccctcccttggaaacctgccctgcctgagggcccctctgcccagcttgggcccagctgggctctgccaccctacctgttcagtgtcccgggcccgttgaggatgaggccgctagaggcctgaggatgagctggaaggagtgagaggggacaaaacccaccttgttggagcctgcagggtggtgctgggactgagccagtcccaggggcatgtattggcctggaggtggggttgggattgggggctggtgccagccttcctctgcagctgacctctgttgtcctccccttgggcggctgagagccccagctgacatggaaatacagttgttggcctccggcctcccctc

SEQ ID NO: 76203 - DNA, 881 bp, Homo sapiens
ggccgcgcccacgtgaccggtccgggtgcaaacacgcgggtcagctgatccggcccaactgcggcgtcatcccggctataagcgcacggcctcggcgaccctctccgacccggccgccgccgccatgcagccctccagccttctgccgctcgccctctgcctgctggctgcacccgcctccgcgctcgtcaggatcccgctgcacaagttcacgtccatccgccggaccatgtcggaggttgggggctctgtggaggacctgattgccaaaggccccgtctcaaagtactcccaggcggtgccagccgtgaccgaggggcccattcccgaggtgctcaagaactacatggacgcccagtactacggggagattggcatcgggacgcccccccagtgcttcacagtcgtcttcgacacgggctcctccaacctgtgggtcccctccatccactgcaaactgctggacatcgcttgctggatccaccacaagtacaacagcgacaagtccagcacctacgtgaagaatggtacctcgtttgacatccactatggctcgggcagcctctccgggtacctgagccaggacactgtgtcggtgccctgccagtcagcgtcgtcagcctctgccctgggcggtgtcaaagtggagaggcaggtctttggggaggccaccaagcagccaggcatcaccttcatcgcagccaagttcgatggcatcctgggcatggcctacccccgcatctccgtcaacaacgtgctgcccgtcttcgacaacctgatgcagcagaagctggtggaccagaacatcttctccttctacctgagcaggacacagatgcgcagcctggggtgagctgctacactgtgagtgggaccgagcc

SEQ ID NO: 76204 - DNA, 418 bp, Homo sapiens
atagatcgagtcgtaccagatcccctttccatccctgagcggcttcatgggcatggacatcccgccacccagcgggccactctggatcctgggcgacgtcttcatcggccgctactacactgtgtttgaccgtgacaacaacagggtgggcttcgccgaggctgcccgcctctagttcccaaggcgtccgcgcgccagcacagaaacagaggagagtcccagagcaggaggcccctggcccagcggcccctcccacacacacccacacacctccccggccctaccagcgcccgctgggctgagcccctaccccacaccaggccgtcctcccgggccctcccttggaaacctgccctgcctgagggcccctagccccagctgacatggaaatacagttgttggcctccggcctcccctc

SEQ ID NO: 76205 - DNA, 187 bp, Homo sapiens
  misc_feature (65)..(65): n is a, c, g, or t
tcgcgggggactctagagagatcccccgggcgccgctagaggcctgaggatgagctggaaggagngagagggggattgggggctggtgccagccttcctctgcagctgacctctgttgtcctccccttgggcggctgagagccccagctgacatggaaatacagttgttggcctccggcctcccctc

SEQ ID NO: 76206 - DNA, 300 bp, Homo sapiens
ctagaaaagtccctgaaaaaaagaattgttaagaagtataataaccttgtcaaaacccacaatgcagcttagttttcctttatttatttgtggtcatgaagactatccccatttctccataaaatcctccctccatccactgcaaactgctggacatcgcttgctggatccaccacaagtacaacagcgacaagtccagcacctacgtgaagaatggtacctcgtttgacatccactatggctcgggcagcctctccgggtacctgagccaggacactgtgtcggtgagtccctctgggg

SEQ ID NO: 76207 - DNA, 2061 bp, Homo sapiens
taggtcgaggccgggtgtgaatcggccgagggcgcacggcctcggcgaccctctccgacccggccgccgccgccatgcagccctccagccttctgccgctcgccctctgcctgctggctgcacccgcctccgcgctcgtcaggatcccgctgcacaagttcacgtccatccgccggaccatgtcggaggttgggggctctgtggaggacctgattgccaaaggccccgtctcaaagtactcccaggcggtgccagccgtgaccgaggggcccattcccgaggtgctcaagaactacatggacgcccagtactacggggagattggcatcgggacgcccccccagtgcttcacagtcgtcttcgacacgggctcctccaacctgtgggtcccctccatccactgcaaactgctggacatcgcttgctggatccaccacaagtacaacagcgacaagtccagcacctacgtgaagaatggtacctcgtttgacatccactatggctcgggcagcctctccgggtacctgagccaggacactgtgtcggtgccctgccagtcagcgtcgtcagcctctgccctgggcggtgtcaaagtggagaggcaggtctttggggaggccaccaagcagccaggcatcaccttcatcgcagccaagttcgatggcatcctgggcatggcctacccccgcatctccgtcaacaacgtgctgcccgtcttcgacaacctgatgcagcagaagctggtggaccagaacatcttctccttctacctgagcagggacccagatgcgcagcctgggggtgagctgatgctgggtggcacagactccaagtattacaagggttctctgtcctacctgaatgtcacccgcaaggcctactggcaggtccacctggaccaggtggaggtggccagcgggctgaccctgtgcaaggagggctgtgaggccattgtggacacaggcacttccctcatggtgggcccggtggatgaggtgcgcgagctgcagaaggccatcggggccgtgccgctgattcagggcgagtacatgatcccctgtgagaaggtgtccaccctgcccgcgatcacactgaagctgggaggcaaaggctacaagctgtccccagaggactacacgctcaaggtgtcgcaggccgggaagaccctctgcctgagcggcttcatgggcatggacatcccgccacccagcgggccactctggatcctgggcgacgtcttcatcggccgctactacactgtgtttgaccgtgacaacaacagggtgggcttcgccgaggctgcccgcctctagttcccaaggcgtccgcgcgccagcacagaaacagaggagagtcccagagcaggaggcccctggcccagcggcccctcccacacacacccacacactcgcccgcccactgtcctgggcgccctggaagccggcggcccaagcccgacttgctgttttgttctgtggttttcccctccctgggttcagaaatgctgcctgcctgtctgtctctccatctgtttggtgggggtagagctgatccagagcacagatctgtttcgtgcattggaagaccccacccaagcttggcagccgagctcgtgtatcctggggctcccttcatctccagggagtcccctccccggccctaccagcgcccgctgggctgagcccctaccccacaccaggccgtcctcccgggccctcccttggaaacctgccctgcctgagggcccctctgcccagcttgggcccagctgggctctgccaccctacctgttcagtgtcccgggcccgttgaggatgaggccgctagaggcctgaggatgagctggaaggagtgagaggggacaaaacccaccttgttggagcctgcagggtggtgctgggactgagccagtcccaggggcatgtattggcctggaggtggggttgggattgggggctggtgccagccttcctctgcagctgacctctgttgtcctccccttgggcggctgagagccccagctgacatggaaatacagttgttggcctccggcctcccctc

SEQ ID NO: 76208 - DNA, 2631 bp, Homo sapiens
ggccgcgcccacgtgaccggtccgggtgcaaacacgcgggtcagctgatccggcccaactgcggcgtcatcccggctataagcgcacggcctcggcgaccctctccgacccggccgccgccgccatgcagccctccagccttctgccgctcgccctctgcctgctggctgcacccgcctccgcgctcgtcaggatcccgctgcacaagttcacgtccatccgccggaccatgtcggaggttgggggctctgtggaggacctgattgccaaaggccccgtctcaaagtactcccaggcggtgccagccgtgaccgaggggcccattcccgaggtgctcaagaactacatggacgcccagtactacggggagattggcatcgggacgcccccccagtgcttcacagtcgtcttcgacacgggctcctccaacctgtgggtcccctccatccactgcaaactgctggacatcgcttgctggatccaccacaagtacaacagcgacaagtccagcacctacgtgaagaatggtacctcgtttgacatccactatggctcgggcagcctctccgggtacctgagccaggacactgtgtcggtgccctgccagtcagcgtcgtcagcctctgccctgggcggtgtcaaagtggagaggcaggtctttggggaggccaccaagcagccaggcatcaccttcatcgcagccaagttcgatggcatcctgggcatggcctacccccgcatctccgtcaacaacgtgctgcccgtcttcgacaacctgatgcagcagaagctggtggaccagaacatcttctccttctacctgagcagggacccagatgcgcagcctgggggtgagctgatgctgggtggcacagactccaagtattacaagggttctctgtcctacctgaatgtcacccgcaaggcctactggcaggtccacctggaccaggtggaggtggccagcgggctgaccctgtgcaaggagggctgtgaggccattgtggacacaggcacttccctcatggtgggcccggtggatgaggtgcgcgagctgcagaaggccatcggggccgtgccgctgattcagggcgagtacatgatcccctgtgagaaggtgtccaccctgcccgcgatcacactgaagctgggaggcaaaggctacaagctgtccccagaggactacacgctcaaggtgtcgcaggccgggaagaccctctgcctgagcggcttcatgggcatggacatcccgccacccagcgggccactctggatcctgggcgacgtcttcatcggccgctactacactgtgtttgaccgtgacaacaacagggtgggcttcgccgaggctgcccgcctctagttcccaaggcgtccgcgcgccagcacagaaacagaggagagtcccagagcaggaggcccctggcccagcggcccctcccacacacacccacacactcgcccgcccactgtcctgggcgccctggaagccggcggcccaagcccgacttgctgttttgttctgtggttttcccctccctgggttcagaaatgctgcctgcctgtctgtctctccatctgtttggtgggggtagagctgatccagagcacagatctgtttcgtgcattggaagaccccacccaagcttggcagccgagctcgtgtatcctggggctcccttcatctccagggagtcccctccccggccctaccagcgcccgctgggctgagcccctaccccacaccaggccgtcctcccgggccctcccttggaaacctgccctgcctgagggcccctctgcccagcttgggcccagctgggctctgccaccctacctgttcagtgtcccgggcccgttgaggatgaggccgctagaggcctgaggatgagctggaaggagtgagaggggacaaaacccaccttgttggagcctgcagggtggtgctgggactgagccagtcccaggggcatgtattggcctggaggtggggttgggattgggggctggtgccagccttcctctgcagctgacctctgttgtcctccccttgggcggctgagagccccagctgacatggaaatacagttgttggcctccggcctcccctcaaaaaaaaaaaaaaaaaaaaaaaaaaaaaaaaaaaaaaaaaaaaaaaaaaaaaagggggggggcaaaaaaatcccccggggggcccaagccaactatgcgcccccaccacgagtctttgtgcgagaaacgaggggcgccccataaaaatgggaggcgctatatattaaaaatccagccagagcgagagaggggccggctagataaaaccacacacggccggcgcaggacgccgggagaaaaacagccgggcaagaggaggcaacatctggggggggagaaggagaccccacaaacctaccgggggcggggcgagagacacgaaaatgaggggacggaacacatcaccccagcgcaagagaaataaaggacccgctcacgcaaggggaacaaaccaaaacccagtagcgcgcagagaagatgcgtgcgtgggcacccacaccgacgcggtaatcggccgcgcgggactgaaaaaatgtgcccgcccgaggaatgatagtcacgagcaacaaattacccgcg

SEQ ID NO: 76209 - DNA, 2194 bp, Homo sapiens
ggccgcgcccacgtgaccggtccgggtgcaaacacgcgggtcagctgatccggcccaactgcggcgtcatcccggctataagcgcacggcctcggcgaccctctccgacccggccgccgccgccatgcagccctccagccttctgccgctcgccctctgcctgctggctgcacccgcctccgcgctcgtcaggatcccgctgcacaagttcacgtccatccgccggaccatgtcggaggttgggggctctgtggaggacctgattgccaaaggccccgtctcaaagtactcccaggcggtgccagccgtgaccgaggggcccattcccgaggtgctcaagaactacatggacgcccagtactacggggagattggcatcgggacgcccccccagtgcttcacagtcgtcttcgacacgggctcctccaacctgtgggtcccctccatccactgcaaactgctggacatcgcttgctggatccaccacaagtacaacagcgacaagtccagcacctacgtgaagaatggtacctcgtttgacatccactatggctcgggcagcctctccgggtacctgagccaggacactgtgtcggtgccctgccagtcagcgtcgtcagcctctgccctgggcggtgtcaaagtggagaggcaggtctttggggaggccaccaagcagccaggcatcaccttcatcgcagccaagttcgatggcatcctgggcatggcctacccccgcatctccgtcaacaacgtgctgcccgtcttcgacaacctgatgcagcagaagctggtggaccagaacatcttctccttctacctgagcagggacccagatgcgcagcctgggggtgagctgatgctgggtggcacagactccaagtattacaagggttctctgtcctacctgaatgtcacccgcaaggcctactggcaggtccacctggaccaggtggaggtggccagcgggctgaccctgtgcaaggagggctgtgaggccattgtggacacaggcacttccctcatggtgggcccggtggatgaggtgcgcgagctgcagaaggccatcggggccgtgccgctgattcagggcgagtacatgatcccctgtgagaaggtgtccaccctgcccgcgatcacactgaagctgggaggcaaaggctacaagctgtccccagaggactacacgctcaaggtgtcgcaggccgggaagaccctctgcctgagcggcttcatgggcatggacatcccgccacccagcgggccactctggatcctgggcgacgtcttcatcggccgctactacactgtgtttgaccgtgacaacaacagggtgggcttcgccgaggctgcccgcctctagttcccaaggcgtccgcgcgccagcacagaaacagaggagagtcccagagcaggaggcccctggcccagcggcccctcccacacacacccacacactcgcccgcccactgtcctgggcgccctggaagccggcggcccaagcccgacttgctgttttgttctgtggttttcccctccctgggttcagaaatgctgcctgcctgtctgtctctccatctgtttggtgggggtagagctgatccagagcacagatctgtttcgtgcattggaagaccccacccaagcttggcagccgagctcgtgtatcctggggctcccttcatctccagggagtcccctccccggccctaccagcgcccgctgggctgagcccctaccccacaccaggccgtcctcccgggccctcccttggaaacctgccctgcctgagggcccctctgcccagcttgggcccagctgggctctgccaccctacctgttcagtgtcccgggcccgttgaggatgaggccgctagaggcctgaggatgagctggaaggagtgagaggggacaaaacccaccttgttggagcctgcagggtggtgctgggactgagccagtcccaggggcatgtattggcctggaggtggggttgggattgggggctggtgccagccttcctctgcagctgacctctgttgtcctccccttgggcggctgagagccccagctgacatggaaatacagttgttggcctccggcctcccctcgatatacaaaggtgtcaaatcggtaccttgaaggtaaatgcggaaaatccgaaaaaatacaggatggagccagtcggcatccg

SEQ ID NO: 76210 - DNA, 2131 bp, Homo sapiens
ggccgcgcccacgtgaccggtccgggtgcaaacacgcgggtcagctgatccggcccaactgcggcgtcatcccggctataagcgcacggcctcggcgaccctctccgacccggccgccgccgccatgcagccctccagccttctgccgctcgccctctgcctgctggctgcacccgcctccgcgctcgtcaggatcccgctgcacaagttcacgtccatccgccggaccatgtcggaggttgggggctctgtggaggacctgattgccaaaggccccgtctcaaagtactcccaggcggtgccagccgtgaccgaggggcccattcccgaggtgctcaagaactacatggacgcccagtactacggggagattggcatcgggacgcccccccagtgcttcacagtcgtcttcgacacgggctcctccaacctgtgggtcccctccatccactgcaaactgctggacatcgcttgctggatccaccacaagtacaacagcgacaagtccagcacctacgtgaagaatggtacctcgtttgacatccactatggctcgggcagcctctccgggtacctgagccaggacactgtgtcggtgccctgccagtcagcgtcgtcagcctctgccctgggcggtgtcaaagtggagaggcaggtctttggggaggccaccaagcagccaggcatcaccttcatcgcagccaagttcgatggcatcctgggcatggcctacccccgcatctccgtcaacaacgtgctgcccgtcttcgacaacctgatgcagcagaagctggtggaccagaacatcttctccttctacctgagcagggacccagatgcgcagcctgggggtgagctgatgctgggtggcacagactccaagtattacaagggttctctgtcctacctgaatgtcacccgcaaggcctactggcaggtccacctggaccaggtggaggtggccagcgggctgaccctgtgcaaggagggctgtgaggccattgtggacacaggcacttccctcatggtgggcccggtggatgaggtgcgcgagctgcagaaggccatcggggccgtgccgctgattcagggcgagtacatgatcccctgtgagaaggtgtccaccctgcccgcgatcacactgaagctgggaggcaaaggctacaagctgtccccagaggactacacgctcaaggtgtcgcaggccgggaagaccctctgcctgagcggcttcatgggcatggacatcccgccacccagcgggccactctggatcctgggcgacgtcttcatcggccgctactacactgtgtttgaccgtgacaacaacagggtgggcttcgccgaggctgcccgcctctagttcccaaggcgtccgcgcgccagcacagaaacagaggagagtcccagagcaggaggcccctggcccagcggcccctcccacacacacccacacactcgcccgcccactgtcctgggcgccctggaagccggcggcccaagcccgacttgctgttttgttctgtggttttcccctccctgggttcagaaatgctgcctgcctgtctgtctctccatctgtttggtgggggtagagctgatccagagcacagatctgtttcgtgcattggaagaccccacccaagcttggcagccgagctcgtgtatcctggggctcccttcatctccagggagtcccctccccggccctaccagcgcccgctgggctgagcccctaccccacaccaggccgtcctcccgggccctcccttggaaacctgccctgcctgagggcccctctgcccagcttgggcccagctgggctctgccaccctacctgttcagtgtcccgggcccgttgaggatgaggccgctagaggcctgaggatgagctggaaggagtgagaggggacaaaacccaccttgttggagcctgcagggtggtgctgggactgagccagtcccaggggcatgtattggcctggaggtggggttgggattgggggctggtgccagccttcctctgcagctgacctctgttgtcctccccttgggcggctgagagccccagctgacatggaaatacagttgttggcctccggcctcccctcaaaaaaaaaaaaaaaaaaaa

SEQ ID NO: 76211 - DNA, 2584 bp, Homo sapiens
  misc_feature (2113)..(2113): n is a, c, g, or t
  misc_feature (2118)..(2118): n is a, c, g, or t
  misc_feature (2136)..(2136): n is a, c, g, or t
ggccgcgcccacgtgaccggtccgggtgcaaacacgcgggtcagctgatccggcccaactgcggcgtcatcccggctataagcgcacggcctcggcgaccctctccgacccggccgccgccgccatgcagccctccagccttctgccgctcgccctctgcctgctggctgcacccgcctccgcgctcgtcaggatcccgctgcacaagttcacgtccatccgccggaccatgtcggaggttgggggctctgtggaggacctgattgccaaaggccccgtctcaaagtactcccaggcggtgccagccgtgaccgaggggcccattcccgaggtgctcaagaactacatggacgcccagtactacggggagattggcatcgggacgcccccccagtgcttcacagtcgtcttcgacacgggctcctccaacctgtgggtcccctccatccactgcaaactgctggacatcgcttgctggatccaccacaagtacaacagcgacaagtccagcacctacgtgaagaatggtacctcgtttgacatccactatggctcgggcagcctctccgggtacctgagccaggacactgtgtcggtgccctgccagtcagcgtcgtcagcctctgccctgggcggtgtcaaagtggagaggcaggtctttggggaggccaccaagcagccaggcatcaccttcatcgcagccaagttcgatggcatcctgggcatggcctacccccgcatctccgtcaacaacgtgctgcccgtcttcgacaacctgatgcagcagaagctggtggaccagaacatcttctccttctacctgagcagggacccagatgcgcagcctgggggtgagctgatgctgggtggcacagactccaagtattacaagggttctctgtcctacctgaatgtcacccgcaaggcctactggcaggtccacctggaccaggtggaggtggccagcgggctgaccctgtgcaaggagggctgtgaggccattgtggacacaggcacttccctcatggtgggcccggtggatgaggtgcgcgagctgcagaaggccatcggggccgtgccgctgattcagggcgagtacatgatcccctgtgagaaggtgtccaccctgcccgcgatcacactgaagctgggaggcaaaggctacaagctgtccccagaggactacacgctcaaggtgtcgcaggccgggaagaccctctgcctgagcggcttcatgggcatggacatcccgccacccagcgggccactctggatcctgggcgacgtcttcatcggccgctactacactgtgtttgaccgtgacaacaacagggtgggcttcgccgaggctgcccgcctctagttcccaaggcgtccgcgcgccagcacagaaacagaggagagtcccagagcaggaggcccctggcccagcggcccctcccacacacacccacacactcgcccgcccactgtcctgggcgccctggaagccggcggcccaagcccgacttgctgttttgttctgtggttttcccctccctgggttcagaaatgctgcctgcctgtctgtctctccatctgtttggtgggggtagagctgatccagagcacagatctgtttcgtgcattggaagaccccacccaagcttggcagccgagctcgtgtatcctggggctcccttcatctccagggagtcccctccccggccctaccagcgcccgctgggctgagcccctaccccacaccaggccgtcctcccgggccctcccttggaaacctgccctgcctgagggcccctctgcccagcttgggcccagctgggctctgccaccctacctgttcagtgtcccgggcccgttgaggatgaggccgctagaggcctgaggatgagctggaaggagtgagaggggacaaaacccaccttgttggagcctgcagggtggtgctgggactgagccagtcccaggggcatgtattggcctggaggtggggttgggattgggggctggtgccagccttcctctgcagctgacctctgttgtcctccccttgggcggctgagagccccagctgacatggaaatacagttgttggcctccggcctcccctcanaaaanaaacaactacacccccgnagcgtccccgacgttacgctcatgctccatcgcgccacgcatcgcgcggacggaccccgccgaacctctcataatacaaaacacttgggggggccccgtgcccatttgcgcgccgcgccgcgccgatacatattagtgcccgtgctaacaacttgggacgggaaaacctgggttccccagtaaccgctgggagacatcctctcccatgggctaatacaaacgggccacccgacgcctttccaaactcgcaactcaatgggaacggcattgcagcgcaaattttgtgaaaacggctgaaccttggaaaccactccttctaacacagggccaatcgggcacctctttaacaaaactcgggcgaaaccgcttacggggggcctctctgccctccctcaacctttggcggggcgccaaacactaccgctcagaggcgcccttagtccgggct

SEQ ID NO: 76212 - DNA, 1973 bp, Homo sapiens
  misc_feature (15)..(15): n is a, c, g, or t
tgaggctgtgcagtngtgaggctggaatttgggatctggaggctagagccatcggatcccgctgcacaagttcacgtccatccgccggaccatgtcggaggttgggggctctgtggaggacctgattgccaaaggccccgtctcaaagtactcccaggcggtgccagccgtgaccgaggggcccattcccgaggtgctcaagaactacatggacgcccagtactacggggagattggcatcgggacgcccccccagtgcttcacagtcgtcttcgacacgggctcctccaacctgtgggtcccctccatccactgcaaactgctggacatcgcttgctggatccaccacaagtacaacagcgacaagtccagcacctacgtgaagaatggtacctcgtttgacatccactatggctcgggcagcctctccgggtacctgagccaggacactgtgtcggtgccctgccagtcagcgtcgtcagcctctgccctgggcggtgtcaaagtggagaggcaggtctttggggaggccaccaagcagccaggcatcaccttcatcgcagccaagttcgatggcatcctgggcatggcctacccccgcatctccgtcaacaacgtgctgcccgtcttcgacaacctgatgcagcagaagctggtggaccagaacatcttctccttctacctgagcagggacccagatgcgcagcctgggggtgagctgatgctgggtggcacagactccaagtattacaagggttctctgtcctacctgaatgtcacccgcaaggcctactggcaggtccacctggaccaggtggaggtggccagcgggctgaccctgtgcaaggagggctgtgaggccattgtggacacaggcacttccctcatggtgggcccggtggatgaggtgcgcgagctgcagaaggccatcggggccgtgccgctgattcagggcgagtacatgatcccctgtgagaaggtgtccaccctgcccgcgatcacactgaagctgggaggcaaaggctacaagctgtccccagaggactacacgctcaaggtgtcgcaggccgggaagaccctctgcctgagcggcttcatgggcatggacatcccgccacccagcgggccactctggatcctgggcgacgtcttcatcggccgctactacactgtgtttgaccgtgacaacaacagggtgggcttcgccgaggctgcccgcctctagttcccaaggcgtccgcgcgccagcacagaaacagaggagagtcccagagcaggaggcccctggcccagcggcccctcccacacacacccacacactcgcccgcccactgtcctgggcgccctggaagccggcggcccaagcccgacttgctgttttgttctgtggttttcccctccctgggttcagaaatgctgcctgcctgtctgtctctccatctgtttggtgggggtagagctgatccagagcacagatctgtttcgtgcattggaagaccccacccaagcttggcagccgagctcgtgtatcctggggctcccttcatctccagggagtcccctccccggccctaccagcgcccgctgggctgagcccctaccccacaccaggccgtcctcccgggccctcccttggaaacctgccctgcctgagggcccctctgcccagcttgggcccagctgggctctgccaccctacctgttcagtgtcccgggcccgttgaggatgaggccgctagaggcctgaggatgagctggaaggagtgagaggggacaaaacccaccttgttggagcctgcagggtggtgctgggactgagccagtcccaggggcatgtattggcctggaggtggggttgggattgggggctggtgccagccttcctctgcagctgacctctgttgtcctccccttgggcggctgagagccccagctgacatggaaatacagttgttggcctccggcctcccctc

SEQ ID NO: 76213 - DNA, 1951 bp, Homo sapiens
ggcccattttgacccaaaaccaaaaaaaatgcgatcccgctgcacaagttcacgtccatccgccggaccatgtcggaggttgggggctctgtggaggacctgattgccaaaggccccgtctcaaagtactcccaggcggtgccagccgtgaccgaggggcccattcccgaggtgctcaagaactacatggacgcccagtactacggggagattggcatcgggacgcccccccagtgcttcacagtcgtcttcgacacgggctcctccaacctgtgggtcccctccatccactgcaaactgctggacatcgcttgctggatccaccacaagtacaacagcgacaagtccagcacctacgtgaagaatggtacctcgtttgacatccactatggctcgggcagcctctccgggtacctgagccaggacactgtgtcggtgccctgccagtcagcgtcgtcagcctctgccctgggcggtgtcaaagtggagaggcaggtctttggggaggccaccaagcagccaggcatcaccttcatcgcagccaagttcgatggcatcctgggcatggcctacccccgcatctccgtcaacaacgtgctgcccgtcttcgacaacctgatgcagcagaagctggtggaccagaacatcttctccttctacctgagcagggacccagatgcgcagcctgggggtgagctgatgctgggtggcacagactccaagtattacaagggttctctgtcctacctgaatgtcacccgcaaggcctactggcaggtccacctggaccaggtggaggtggccagcgggctgaccctgtgcaaggagggctgtgaggccattgtggacacaggcacttccctcatggtgggcccggtggatgaggtgcgcgagctgcagaaggccatcggggccgtgccgctgattcagggcgagtacatgatcccctgtgagaaggtgtccaccctgcccgcgatcacactgaagctgggaggcaaaggctacaagctgtccccagaggactacacgctcaaggtgtcgcaggccgggaagaccctctgcctgagcggcttcatgggcatggacatcccgccacccagcgggccactctggatcctgggcgacgtcttcatcggccgctactacactgtgtttgaccgtgacaacaacagggtgggcttcgccgaggctgcccgcctctagttcccaaggcgtccgcgcgccagcacagaaacagaggagagtcccagagcaggaggcccctggcccagcggcccctcccacacacacccacacactcgcccgcccactgtcctgggcgccctggaagccggcggcccaagcccgacttgctgttttgttctgtggttttcccctccctgggttcagaaatgctgcctgcctgtctgtctctccatctgtttggtgggggtagagctgatccagagcacagatctgtttcgtgcattggaagaccccacccaagcttggcagccgagctcgtgtatcctggggctcccttcatctccagggagtcccctccccggccctaccagcgcccgctgggctgagcccctaccccacaccaggccgtcctcccgggccctcccttggaaacctgccctgcctgagggcccctctgcccagcttgggcccagctgggctctgccaccctacctgttcagtgtcccgggcccgttgaggatgaggccgctagaggcctgaggatgagctggaaggagtgagaggggacaaaacccaccttgttggagcctgcagggtggtgctgggactgagccagtcccaggggcatgtattggcctggaggtggggttgggattgggggctggtgccagccttcctctgcagctgacctctgttgtcctccccttgggcggctgagagccccagctgacatggaaatacagttgttggcctccggcctcccctc

SEQ ID NO: 76214 - DNA, 1960 bp, Homo sapiens
tcggtaccccttgaataggagctcctattcaagggtccgctgatcccgctgcacaagttcacgtccatccgccggaccatgtcggaggttgggggctctgtggaggacctgattgccaaaggccccgtctcaaagtactcccaggcggtgccagccgtgaccgaggggcccattcccgaggtgctcaagaactacatggacgcccagtactacggggagattggcatcgggacgcccccccagtgcttcacagtcgtcttcgacacgggctcctccaacctgtgggtcccctccatccactgcaaactgctggacatcgcttgctggatccaccacaagtacaacagcgacaagtccagcacctacgtgaagaatggtacctcgtttgacatccactatggctcgggcagcctctccgggtacctgagccaggacactgtgtcggtgccctgccagtcagcgtcgtcagcctctgccctgggcggtgtcaaagtggagaggcaggtctttggggaggccaccaagcagccaggcatcaccttcatcgcagccaagttcgatggcatcctgggcatggcctacccccgcatctccgtcaacaacgtgctgcccgtcttcgacaacctgatgcagcagaagctggtggaccagaacatcttctccttctacctgagcagggacccagatgcgcagcctgggggtgagctgatgctgggtggcacagactccaagtattacaagggttctctgtcctacctgaatgtcacccgcaaggcctactggcaggtccacctggaccaggtggaggtggccagcgggctgaccctgtgcaaggagggctgtgaggccattgtggacacaggcacttccctcatggtgggcccggtggatgaggtgcgcgagctgcagaaggccatcggggccgtgccgctgattcagggcgagtacatgatcccctgtgagaaggtgtccaccctgcccgcgatcacactgaagctgggaggcaaaggctacaagctgtccccagaggactacacgctcaaggtgtcgcaggccgggaagaccctctgcctgagcggcttcatgggcatggacatcccgccacccagcgggccactctggatcctgggcgacgtcttcatcggccgctactacactgtgtttgaccgtgacaacaacagggtgggcttcgccgaggctgcccgcctctagttcccaaggcgtccgcgcgccagcacagaaacagaggagagtcccagagcaggaggcccctggcccagcggcccctcccacacacacccacacactcgcccgcccactgtcctgggcgccctggaagccggcggcccaagcccgacttgctgttttgttctgtggttttcccctccctgggttcagaaatgctgcctgcctgtctgtctctccatctgtttggtgggggtagagctgatccagagcacagatctgtttcgtgcattggaagaccccacccaagcttggcagccgagctcgtgtatcctggggctcccttcatctccagggagtcccctccccggccctaccagcgcccgctgggctgagcccctaccccacaccaggccgtcctcccgggccctcccttggaaacctgccctgcctgagggcccctctgcccagcttgggcccagctgggctctgccaccctacctgttcagtgtcccgggcccgttgaggatgaggccgctagaggcctgaggatgagctggaaggagtgagaggggacaaaacccaccttgttggagcctgcagggtggtgctgggactgagccagtcccaggggcatgtattggcctggaggtggggttgggattgggggctggtgccagccttcctctgcagctgacctctgttgtcctccccttgggcggctgagagccccagctgacatggaaatacagttgttggcctccggcctcccctc

SEQ ID NO: 76215 - DNA, 2458 bp, Homo sapiens
  misc_feature (1987)..(1987): n is a, c, g, or t
  misc_feature (1992)..(1992): n is a, c, g, or t
  misc_feature (2010)..(2010): n is a, c, g, or t
ggccgcgcccacgtgaccggtccgggtgcaaacacgcgggtcagctgatccggcccaactgcggcgtcatcccggctataagcgcacggcctcggcgaccctctccgacccggccgccgccgccatgcagccctccagccttctgccgctcgccctctgcctgctggctgcacccgcctccgcgctcgtcaggatcccgctgcacaagttcacgtccatccgccggaccatgtcggaggttgggggctctgtggaggacctgattgccaaaggccccgtctcaaagtactcccaggcggtgccagccgtgaccgaggggcccattcccgaggtgctcaagaactacatggacgcccagtactacggggagattggcatcgggacgcccccccagtgcttcacagtcgtcttcgacacgggctcctccaacctgtgggtcccctccatccactgcaaactgctggacatcgcttgctggatccaccacaagtacaacagcgacaagtccagcacctacgtgaagaatggtacctcgtttgacatccactatggctcgggcagcctctccgggtacctgagccaggacactgtgtcggtgccctgccagtcagcgtcgtcagcctctgccctgggcggtgtcaaagtggagaggcaggtctttggggaggccaccaagcagccaggcatcaccttcatcgcagccaagttcgatggcatcctgggcatggcctacccccgcatctccgtcaacaacgtgctgcccgtcttcgacaacctgatgcagcagaagctggtggaccagaacatcttctccttctacctgagcagggacccagatgcgcagcctgggggtgagctgatgctgggtggcacagactccaagtattacaagggttctctgtcctacctgaatgtcacccgcaaggcctactggcaggtccacctggaccaggtggaggtggccagcgggctgaccctgtgcaaggagggctgtgaggccattgtggacacaggcacttccctcatggtgggcccggtggatgaggtgcgcgagctgcagaaggccatcggggccgtgccgctgattcagggcgagtacatgatcccctgtgagaaggtgtccaccctgcccgcgatcacactgaagctgggaggcaaaggctacaagctgtccccagaggactacacgctcaaggtgtcgcaggccgggaagaccctctgcctgagcggcttcatgggcatggacatcccgccacccagcgggccactctggatcctgggcgacgtcttcatcggccgctactacactgtgtttgaccgtgacaacaacagggtgggcttcgccgaggctgcccgcctctagttcccaaggcgtccgcgcgccagcacagaaacagaggagagtcccagagcaggaggcccctggcccagcggcccctcccacacacacccacacactcgcccgcccactgtcctgggcgccctggaagccggcggcccaagcccgacttgctgttttgttctgtggttttcccctccctgggttcagaaatgctgcctgcctgtctgtctctccatctgtttggtgggggtagagctgatccagagcacagatctgtttcgtgcattggaagaccccacccaagcttggcagccgagctcgtgtatcctggggctcccttcatctccagggagtcccctccccggccctaccagcgcccgctgggctgagcccctaccccacccgctagaggcctgaggatgagctggaaggagtgagaggggacaaaacccaccttgttggagcctgcagggtggtgctgggactgagccagtcccaggggcatgtattggcctggaggtggggttgggattgggggctggtgccagccttcctctgcagctgacctctgttgtcctccccttgggcggctgagagccccagctgacatggaaatacagttgttggcctccggcctcccctcanaaaanaaacaactacacccccgnagcgtccccgacgttacgctcatgctccatcgcgccacgcatcgcgcggacggaccccgccgaacctctcataatacaaaacacttgggggggccccgtgcccatttgcgcgccgcgccgcgccgatacatattagtgcccgtgctaacaacttgggacgggaaaacctgggttccccagtaaccgctgggagacatcctctcccatgggctaatacaaacgggccacccgacgcctttccaaactcgcaactcaatgggaacggcattgcagcgcaaattttgtgaaaacggctgaaccttggaaaccactccttctaacacagggccaatcgggcacctctttaacaaaactcgggcgaaaccgcttacggggggcctctctgccctccctcaacctttggcggggcgccaaacactaccgctcagaggcgcccttagtccgggct

SEQ ID NO: 76216 - DNA, 2157 bp, Homo sapiens
ggccgcgcccacgtgaccggtccgggtgcaaacacgcgggtcagctgatccggcccaactgcggcgtcatcccggctataagcgcacggcctcggcgaccctctccgacccggccgccgccgccatgcagccctccagccttctgccgctcgccctctgcctgctggctgcacccgcctccgcgctcgtcaggatcccgctgcacaagttcacgtccatccgccggaccatgtcggaggttgggggctctgtggaggacctgattgccaaaggccccgtctcaaagtactcccaggcggtgccagccgtgaccgaggggcccattcccgaggtgctcaagaactacatggacgcccagtactacggggagattggcatcgggacgcccccccagtgcttcacagtcgtcttcgacacgggctcctccaacctgtgggtcccctccatccactgcaaactgctggacatcgcttgctggatccaccacaagtacaacagcgacaagtccagcacctacgtgaagaatggtacctcgtttgacatccactatggctcgggcagcctctccgggtacctgagccaggacactgtgtcggtgccctgccagtcagcgtcgtcagcctctgccctgggcggtgtcaaagtggagaggcaggtctttggggaggccaccaagcagccaggcatcaccttcatcgcagccaagttcgatggcatcctgggcatggcctacccccgcatctccgtcaacaacgtgctgcccgtcttcgacaacctgatgcagcagaagctggtggaccagaacatcttctccttctacctgagcaggacccagatgcgcagcctgggggtgagctgatgctgggtggcacagggacccagatgcgcagcctgggggtgagctgatgctgggtggcacagactccaagtattacaagggttctctgtcctacctgaatgtcacccgcaaggcctactggcaggtccacctggaccaggtggaggtggccagcgggctgaccctgtgcaaggagggctgtgaggccattgtggacacaggcacttccctcatggtgggcccggtggatgaggtgcgcgagctgcagaaggccatcggggccgtgccgctgattcagggcgagtacatgatcccctgtgagaaggtgtccaccctgcccgcgatcacactgaagctgggaggcaaaggctacaagctgtccccagaggactacacgctcaaggtgtcgcaggccgggaagaccctctgcctgagcggcttcatgggcatggacatcccgccacccagcgggccactctggatcctgggcgacgtcttcatcggccgctactacactgtgtttgaccgtgacaacaacagggtgggcttcgccgaggctgcccgcctctagttcccaaggcgtccgcgcgccagcacagaaacagaggagagtcccagagcaggaggcccctggcccagcggcccctcccacacacacccacacactcgcccgcccactgtcctgggcgccctggaagccggcggcccaagcccgacttgctgttttgttctgtggttttcccctccctgggttcagaaatgctgcctgcctgtctgtctctccatctgtttggtgggggtagagctgatccagagcacagatctgtttcgtgcattggaagaccccacccaagcttggcagccgagctcgtgtatcctggggctcccttcatctccagggagtcccctccccggccctaccagcgcccgctgggctgagcccctaccccacaccaggccgtcctcccgggccctcccttggaaacctgccctgcctgagggcccctctgcccagcttgggcccagctgggctctgccaccctacctgttcagtgtcccgggcccgttgaggatgaggccgctagaggcctgaggatgagctggaaggagtgagaggggacaaaacccaccttgttggagcctgcagggtggtgctgggactgagccagtcccaggggcatgtattggcctggaggtggggttgggattgggggctggtgccagccttcctctgcagctgacctctgttgtcctccccttgggcggctgagagccccagctgacatggaaatacagttgttggcctccggcctcccctc

SEQ ID NO: 76217 - DNA, 1763 bp, Homo sapiens
ggccgcgcccacgtgaccggtccgggtgcaaacacgcgggtcagctgatccggcccaactgcggcgtcatcccggctataagcgcacggcctcggcgaccctctccgacccggccgccgccgccatgcagccctccagccttctgccgctcgccctctgcctgctggctgcacccgcctccgcgctcgtcaggatcccgctgcacaagttcacgtccatccgccggaccatgtcggaggttgggggctctgtggaggacctgattgccaaaggccccgtctcaaagtactcccaggcggtgccagccgtgaccgaggggcccattcccgaggtgctcaagaactacatggacgcccagtactacggggagattggcatcgggacgcccccccagtgcttcacagtcgtcttcgacacgggctcctccaacctgtgggtcccctccatccactgcaaactgctggacatcgcttgctggatccaccacaagtacaacagcgacaagtccagcacctacgtgaagaatggtacctcgtttgacatccactatggctcgggcagcctctccgggtacctgagccaggacactgtgtcggtgccctgccagtcagcgtcgtcagcctctgccctgggcggtgtcaaagtggagaggcaggtctttggggaggccaccaagcagccaggcatcaccttcatcgcagccaagttcgatggcatcctgggcatggcctacccccgcatctccgtcaacaacgtgctgcccgtcttcgacaacctgatgcagcagaagctggtggaccagaacatcttctccttctacctgagcagggacccagatgcgcagcctgggggtgagctgatgctgggtggcacagactccaagtattacaagggttctctgtcctacctgaatgtcacccgcaaggcctactggcaggtccacctggaccaggtggaggtggccagcgggctgaccctgtgcaaggagggctgtgaggccattgtggacacaggcacttccctcatggtgggcccggtggatgaggtgcgcgagctgcagaaggccatcggggccgtgccgctgattcagggcgagtacatgatcccctgtgagaaggtgtccaccctgcccgcgatcacactgaagctgggaggcaaaggctacaagctgtccccagaggactacacgctcaaggtgtcgcaggccgggaagaccctctgcctgagcggcttcatgggcatggacatcccgccacccagcgggccactctggatcctgggcgacgtcttcatcggccgctactacactgtgtttgaccgtgacaacaacagggtgggcttcgccgaggctgcccgcctctagttcccaaggcgtccgcgcgccagcacagaaacagaggagagtcccagagcaggaggcccctggcccagcggcccctcccacacacacccacacactcgcccgcccactgtcctgggcgccctggaagccggcggcccaagcccgacttgctgttttgttctgtggttttcccctccctgggttcagaaatgctgcctgcctgtctgtctctccatctgtttggtgggggtagagctgatccagagcacagatctgtttcgtgcattggaagaccccacccaagcttggcagccgagctcgtgtatcctggggctcccttcatctccagggagtccattcaacgcctccgcggaggcgttgaatggcttgggatgggacatcccggaggcctcgcaacggc

SEQ ID NO: 76218 - DNA, 1758 bp, Homo sapiens
atacgaatcgagcctataccagatatgcagagaccccccagtgcttcacagtcgtcttcgacacgggctcctccaacctgtgggtcccctccatccactgcaaactgctggacatcgcttgctggatccaccacaagtacaacagcgacaagtccagcacctacgtgaagaatggtacctcgtttgacatccactatggctcgggcagcctctccgggtacctgagccaggacactgtgtcggtgccctgccagtcagcgtcgtcagcctctgccctgggcggtgtcaaagtggagaggcaggtctttggggaggccaccaagcagccaggcatcaccttcatcgcagccaagttcgatggcatcctgggcatggcctacccccgcatctccgtcaacaacgtgctgcccgtcttcgacaacctgatgcagcagaagctggtggaccagaacatcttctccttctacctgagcagggacccagatgcgcagcctgggggtgagctgatgctgggtggcacagactccaagtattacaagggttctctgtcctacctgaatgtcacccgcaaggcctactggcaggtccacctggaccaggtggaggtggccagcgggctgaccctgtgcaaggagggctgtgaggccattgtggacacaggcacttccctcatggtgggcccggtggatgaggtgcgcgagctgcagaaggccatcggggccgtgccgctgattcagggcgagtacatgatcccctgtgagaaggtgtccaccctgcccgcgatcacactgaagctgggaggcaaaggctacaagctgtccccagaggactacacgctcaaggtgtcgcaggccgggaagaccctctgcctgagcggcttcatgggcatggacatcccgccacccagcgggccactctggatcctgggcgacgtcttcatcggccgctactacactgtgtttgaccgtgacaacaacagggtgggcttcgccgaggctgcccgcctctagttcccaaggcgtccgcgcgccagcacagaaacagaggagagtcccagagcaggaggcccctggcccagcggcccctcccacacacacccacacactcgcccgcccactgtcctgggcgccctggaagccggcggcccaagcccgacttgctgttttgttctgtggttttcccctccctgggttcagaaatgctgcctgcctgtctgtctctccatctgtttggtgggggtagagctgatccagagcacagatctgtttcgtgcattggaagaccccacccaagcttggcagccgagctcgtgtatcctggggctcccttcatctccagggagtcccctccccggccctaccagcgcccgctgggctgagcccctaccccacaccaggccgtcctcccgggccctcccttggaaacctgccctgcctgagggcccctctgcccagcttgggcccagctgggctctgccaccctacctgttcagtgtcccgggcccgttgaggatgaggccgctagaggcctgaggatgagctggaaggagtgagaggggacaaaacccaccttgttggagcctgcagggtggtgctgggactgagccagtcccaggggcatgtattggcctggaggtggggttgggattgggggctggtgccagccttcctctgcagctgacctctgttgtcctccccttgggcggctgagagccccagctgacatggaaatacagttgttggcctccggcctcccctc

SEQ ID NO: 76219 - DNA, 1582 bp, Homo sapiens
ggccgcgcccacgtgaccggtccgggtgcaaacacgcgggtcagctgatccggcccaactgcggcgtcatcccggctataagcgcacggcctcggcgaccctctccgacccggccgccgccgccatgcagccctccagccttctgccgctcgccctctgcctgctggctgcacccgcctccgcgctcgtcaggatcccgctgcacaagttcacgtccatccgccggaccatgtcggaggttgggggctctgtggaggacctgattgccaaaggccccgtctcaaagtactcccaggcggtgccagccgtgaccgaggggcccattcccgaggtgctcaagaactacatggacgcccagtactacggggagattggcatcgggacgcccccccagtgcttcacagtcgtcttcgacacgggctcctccaacctgtgggtcccctccatccactgcaaactgctggacatcgcttgctggatccaccacaagtacaacagcgacaagtccagcacctacgtgaagaatggtacctcgtttgacatccactatggctcgggcagcctctccgggtacctgagccaggacactgtgtcggtgccctgccagtcagcgtcgtcagcctctgccctgggcggtgtcaaagtggagaggcaggtctttggggaggccaccaagcagccaggcatcaccttcatcgcagccaagttcgatggcatcctgggcatggcctacccccgcatctccgtcaacaacgtgctgcccgtcttcgacaacctgatgcagcagaagctggtggaccagaacatcttctccttctacctgagcagggacccagatgcgcagcctgggggtgagctgatgctgggtggcacagactccaagtattacaagggttctctgtcctacctgaatgtcacccgcaaggcctactggcaggtccacctggaccaggtggaggtggccagcgggctgaccctgtgcaaggagggctgtgaggccattgtggacacaggcacttccctcatggtgggcccggtggatgaggtgcgcgagctgcagaaggccatcggggccgtgccgctgattcagggcgagtacatgatcccctgtgagaaggtgtccaccctgcccgcgatcacactgaagctgggaggcaaaggctacaagctgtccccagaggactacacgctcaaggtgtcgcaggccgggaagaccctctgcctgagcggcttcatgggcatggacatcccgccacccagcgggccactctggatcctgggcgacgtcttcatcggccgctactacactgtgtttgaccgtgacaacaacagggtgggcttcgccgaggctgcccgcctctagttcccaaggcgtccgcgcgccagcacagaaacagaggagagtcccagagcaggaggcccctggcccagcggcccctcccacacacacccacacactcgcccgcccactgtcctgggcgccctggaagccggcggcccaagcccgacttgctgttttgttctgtggttttcccctccctgggtgcggccgtggaccctcaagagacagccatgacgatgg

SEQ ID NO: 76220 - DNA, 1493 bp, Homo sapiens
ggccgcgcccacgtgaccggtccgggtgcaaacacgcgggtcagctgatccggcccaactgcggcgtcatcccggctataagcgcacggcctcggcgaccctctccgacccggccgccgccgccatgcagccctccagccttctgccgctcgccctctgcctgctggctgcacccgcctccgcgctcgtcaggatcccgctgcacaagttcacgtccatccgccggaccatgtcggaggttgggggctctgtggaggacctgattgccaaaggccccgtctcaaagtactcccaggcggtgccagccgtgaccgaggggcccattcccgaggtgctcaagaactacatggacgcccagtactacggggagattggcatcgggacgcccccccagtgcttcacagtcgtcttcgacacgggctcctccaacctgtgggtcccctccatccactgcaaactgctggacatcgcttgctggatccaccacaagtacaacagcgacaagtccagcacctacgtgaagaatggtacctcgtttgacatccactatggctcgggcagcctctccgggtacctgagccaggacactgtgtcggtgccctgccagtcagcgtcgtcagcctctgccctgggcggtgtcaaagtggagaggcaggtctttggggaggccaccaagcagccaggcatcaccttcatcgcagccaagttcgatggcatcctgggcatggcctacccccgcatctccgtcaacaacgtgctgcccgtcttcgacaacctgatgcagcagaagctggtggaccagaacatcttctccttctacctgagcagggacccagatgcgcagcctgggggtgagctgatgctgggtggcacagactccaagtattacaagggttctctgtcctacctgaatgtcacccgcaaggcctactggcaggtccacctggaccaggtggaggtggccagcgggctgaccctgtgcaaggagggctgtgaggccattgtggacacaggcacttccctcatggtgggcccggtggatgaggtgcgcgagctgcagaaggccatcggggccgtgccgctgattcagggcgagtacatgatcccctgtgagaaggtgtccaccctgcccgcgatcacactgaagctgggaggcaaaggctacaagctgtccccagaggactacacgctcaaggtgtcgcaggccgggaagaccctctgcctgagcggcttcatgggcatggacatcccgccacccagcgggccactctggatcctgggcgacgtcttcatcggccgctactacactgtgtttgaccgtgacaacaacagggtgggcttcgccgaggctgcccgcctctagttcccaaggcgtccgcgcgccagcacagaaacagaggagagtcccagagcaggaggcccctggcccagcggcccctcccacacacacccacacatccgtactgcccgggatcctctagatcacccagcaa

SEQ ID NO: 76221 - DNA, 1485 bp, Homo sapiens
ggccgcgcccacgtgaccggtccgggtgcaaacacgcgggtcagctgatccggcccaactgcggcgtcatcccggctataagcgcacggcctcggcgaccctctccgacccggccgccgccgccatgcagccctccagccttctgccgctcgccctctgcctgctggctgcacccgcctccgcgctcgtcaggatcccgctgcacaagttcacgtccatccgccggaccatgtcggaggttgggggctctgtggaggacctgattgccaaaggccccgtctcaaagtactcccaggcggtgccagccgtgaccgaggggcccattcccgaggtgctcaagaactacatggacgcccagtactacggggagattggcatcgggacgcccccccagtgcttcacagtcgtcttcgacacgggctcctccaacctgtgggtcccctccatccactgcaaactgctggacatcgcttgctggatccaccacaagtacaacagcgacaagtccagcacctacgtgaagaatggtacctcgtttgacatccactatggctcgggcagcctctccgggtacctgagccaggacactgtgtcggtgccctgccagtcagcgtcgtcagcctctgccctgggcggtgtcaaagtggagaggcaggtctttggggaggccaccaagcagccaggcatcaccttcatcgcagccaagttcgatggcatcctgggcatggcctacccccgcatctccgtcaacaacgtgctgcccgtcttcgacaacctgatgcagcagaagctggtggaccagaacatcttctccttctacctgagcagggacccagatgcgcagcctgggggtgagctgatgctgggtggcacagactccaagtattacaagggttctctgtcctacctgaatgtcacccgcaaggcctactggcaggtccacctggaccaggtggaggtggccagcgggctgaccctgtgcaaggagggctgtgaggccattgtggacacaggcacttccctcatggtgggcccggtggatgaggtgcgcgagctgcagaaggccatcggggccgtgccgctgattcagggcgagtacatgatcccctgtgagaaggtgtccaccctgcccgcgatcacactgaagctgggaggcaaaggctacaagctgtccccagaggactacacgctcaaggtgtcgcaggccgggaagaccctctgcctgagcggcttcatgggcatggacatcccgccacccagcgggccactctggatcctgggcgacgtcttcatcggccgctactacactgtgtttgaccgtgacaacaacagggtgggcttcgccgaggctgcccgcctctagttcccaaggcgtccgcgcgccagcacagaaacagaggagagtcccagagcaggaggcccctggcccagcggcccctcccacacacacccacacactcctgcaataaaatagtagcatcggca

SEQ ID NO: 76222 - DNA, 1745 bp, Homo sapiens
ggccgcgcccacgtgaccggtccgggtgcaaacacgcgggtcagctgatccggcccaactgcggcgtcatcccggctataagcgcacggcctcggcgaccctctccgacccggccgccgccgccatgcagccctccagccttctgccgctcgccctctgcctgctggctgcacccgcctccgcgctcgtcaggatcccgctgcacaagttcacgtccatccgccggaccatgtcggaggttgggggctctgtggaggacctgattgccaaaggccccgtctcaaagtactcccaggcggtgccagccgtgaccgaggggcccattcccgaggtgctcaagaactacatggacgcccagtactacggggagattggcatcgggacgcccccccagtgcttcacagtcgtcttcgacacgggctcctccaacctgtgggtcccctccatccactgcaaactgctggacatcgcttgctggatccaccacaagtacaacagcgacaagtccagcacctacgtgaagaatggtacctcgtttgacatccactatggctcgggcagcctctccgggtacctgagccaggacactgtgtcggtgccctgccagtcagcgtcgtcagcctctgccctgggcggtgtcaaagtggagaggcaggtctttggggaggccaccaagcagccaggcatcaccttcatcgcagccaagttcgatggcatcctgggcatggcctacccccgcatctccgtcaacaacgtgctgcccgtcttcgacaacctgatgcagcagaagctggtggaccagaacatcttctccttctacctgagcagggacccagatgcgcagcctgggggtgagctgatgctgggtggcacagactccaagtattacaagggttctctgtcctacctgaatgtcacccgcaaggcctactggcaggtccacctggaccaggtggaggtggccagcgggctgaccctgtgcaaggagggctgtgaggccattgtggacacaggcacttccctcatggtgggcccggtggatgaggtgcgcgagctgcagaaggccatcggggccgtgccgctgattcagggcgagtacatgatcccctgtgagaaggtgtccaccctgcccgcgatcacactgaagctgggaggcaaaggctacaagctgtccccagaggactacacgctcaaggtgtcgcaggccgggaagaccctctgcctgagcggcttcatgggcatggacatcccgccacccagcgggccactctggatcctgggcgacgtcttcatcggccgctactacactgtgtttgaccgtgacaacaacagggtgggcttcgccgaggctgcccgcctctagttcccaaggcgtccgcgcgccagcacagtcagaagagaagctgtccgagcaggagactgaagcggctgagaagtcagcttagcgggatgggcaagttccttacaatgtgtcacttgcaaataacaaagggactttgagggacatttcattaaatataattactgatactttagaggttactcatttacggtgcaattgcttctgtttgctaatgctgctttgcaaataaaacttgctgccgaccacccacgggcataaaatcaagtgcatttcagcattgcctaaagagctctgacaccacttttcatgttaagatcttcatttagctcctttactgggatttattggatgctgtaaaaaaataaatttacactggatatgc

SEQ ID NO: 76223 - DNA, 5072 bp, Homo sapiens
  misc_feature (2337)..(2337): n is a, c, g, or t
  misc_feature (4552)..(4552): n is a, c, g, or t
  misc_feature (5047)..(5048): n is a, c, g, or t
  misc_feature (5072)..(5072): n is a, c, g, or t
ggccgcgcccacgtgaccggtccgggtgcaaacacgcgggtcagctgatccggcccaactgcggcgtcatcccggctataagcgcacggcctcggcgaccctctccgacccggccgccgccgccatgcagccctccagccttctgccgctcgccctctgcctgctggctgcacccgcctccgcgctcgtcaggatcccgctgcacaagttcacgtccatccgccggaccatgtcggaggttgggggctctgtggaggacctgattgccaaaggccccgtctcaaagtactcccaggcggtgccagccgtgaccgaggggcccattcccgaggtgctcaagaactacatggacgcccagtactacggggagattggcatcgggacgcccccccagtgcttcacagtcgtcttcgacacgggctcctccaacctgtgggtcccctccatccactgcaaactgctggacatcgcttgctggatccaccacaagtacaacagcgacaagtccagcacctacgtgaagaatggtacctcgtttgacatccactatggctcgggcagcctctccgggtacctgagccaggacactgtgtcggtgccctgccagtcagcgtcgtcagcctctgccctgggcggtgtcaaagtggagaggcaggtctttggggaggccaccaagcagccaggcatcaccttcatcgcagccaagttcgatggcatcctgggcatggcctacccccgcatctccgtcaacaacgtgctgcccgtcttcgacaacctgatgcagcagaagctggtggaccagaacatcttctccttctacctgagcagggacccagatgcgcagcctgggggtgagctgatgctgggtggcacagactccaagtattacaagggttctctgtcctacctgaatgtcacccgcaaggcctactggcaggtccacctggaccaggtggaggtggccagcgggctgaccctgtgcaaggagggctgtgaggccattgtggacacaggcacttccctcatggtgggcccggtggatgaggtgcgcgagctgcagaaggccatcggggccgtgccgctgattcagggcgagtacatgatcccctgtgagaaggtgtccaccctgcccgcgatcacactgaagctgggaggcaaaggctacaagctgtccccagaggactacacgctcaaggcccagggccccggccagtgcccagccccgctgggagacccggccagcaccacggacggcgcccaggaagcccgagtccccctggacggggccttctggattccgaggcccccggcaggttcgcccaagggctgcttcgcttgcgtgtccaagccccctgccctgcaggctccggcggcccctgcccctgagccctcggcctctcccccgatggcgcccacactgttccccatggagtccaagagcagcaagaccgacagcgtgcgggctgccggcgcgccccctgcctgcaagcacctagccgagaagaagacgatgaccaaccccacgaccgtcatcgaggtctacccggacaccaccgaggtgaacgactattacctgtggtccatcttcaacttcgtctacctcaacttctgctgcctgggcttcatcgccttggcctactccctcaaagtgcgagacaagaagcttctcaatgacctgaatggagccgtggaggatgcaaagacggcccggctgttcaacatcaccagttctgccctggcagcctcctgcatcatcctcgtcttcatcttcctgcggtaccccctcaccgactactaaggcccgccaggcacggctgctggcggagacaagcactgagacatgtttattctcatggtccctgaaacgcaggatcccatgaggttggggcagggcagggcttcttgtcctggggcccccttgagctgtgaactgggcagcaaggccatcagaagctgagtacagcaagggggcagtgagcttggccctcagtccaccccctccgcctcctggcctccaccctgcctgtgtctggggcctgggggcttctcccctcgctgctgcaccctggcttccagcgtctgtgtccctgccctcacgtgccccttcccaggctcctggggccccttggacctgacacctagcaggaagggcttatgcaaaattgtcccaggttgggaggactcactctgtgctccccgaccctgcctcctccacgatgtgaccccgctcagagcccttgtgtctgtgaactttcaatgaaatacccatgcagctccagcccagccttctactttgtgtccctggcagggcctggagaagtctggaggctttgcaancctccctcaggaactgcctggcggtcagggccccgggtgctgtgtcccaacagactgcaggggacggtctgctccatcacagctgtgccagacagtgaatgggaagggggggcatttggtggaggtaccccaaactcgagtcacttagagggtcaggcagcctcctggggggacggaagggggtggggcacagcctcagctgcctgcattggccaaatcagagcaaaggaaaccacaaattcactcggaaggaagcagcaggcagagacgatagacgcctggctaacccctgtccctcctggagggctctgggacctggacaggcccctttacctctctcgtgcccatctccttagctgtaaaataggaaaatggcctttcacttctataatcactgtgaaaatgaacggaagatgcctttcaaaggccgaggccagcgccctgacggcccatggcatgtgcagtccacaatgtgggaggcaggatgcagggatgggctctgtccccttggaactcaggcacagtcatgggggtgccggtcagccctgaagacaagctgatgagggtgcactaggaaaagtgcagggcatcggcgaggcacacgaaggaggtggggaggtgaagatggagaagaagccgaggcagtggccatgggtgtggagcttcgcgctgtgggtgcccagctggtctgggaaaccgcaggaaatcccgcagctcaggtgcgcagtgggaaggacttgctattccgtgggaaggcaggcaaaccttcccagggaaggggcatggccgtgcgcctcatgttttgggaagctcgtgccctctggggtagcgaggccagcttggaggggagtccagtggacagaggtggatgcaagtggagggagctgagcctgggctggggctggcagcagagggctggacagcagggcgcctgcgtggcagctgtgcagtcagtggggttgactggtttggaaggtaaggtgggggagaagcccggaggattcctgtcccttgacttggacagcccagtggagagggctgtgtaccaagggcaggaaaccagggagaagaagatgttgactttaagataccaagcagagaagggaagagccttctgggctggagacgtggggtgcctcagaagggaggaccttgagctagcagcagatgggacaaacgcaggggacagggcacagccgtggcaggagtgcagcgagcaagattctggtcacagtcctgacccagaaacctgcagaggaagggagggtggccagcacctgcccgtgggcctggggtgcagcccaggcagaggtggatggagggggtgctcagggaagaggggaggggagtgtgtgacctcaaaatgggagggcttgggggtcagagtcgagagaggggacagggtggggaccatgtgggactcttgagcactgacccttgaacccaggcagtggtgggatgggagggcaggaggcggcgggctgcgaggctgatgcggggctgcacggagctgtcattgagcctcttggaggatggtgggagaagtgccaggggcggctgaaagccttgccgagactgtgggcagcctggttgtgggcacttcggatgcttgcaccattagacccagaggcttcctggacaagcctgggctggaagaggatggcagaggctgctgggccttggaagagagagggtcctggcttctagttcctggggcagctaaggccaaccccagtgtccaggtgtcttccatgttatgcctgggagggaagaaagtagaggggcaaatgctttctttgcctattttccttaaacatttggtggcagtgctggtggctgcctgggacaggggccaggaggaaacacccctgcattagggaagccctcagccagcttttccctgggatgttcctgcgcctggctgaagctttctgagttcatgttggggaaatggaacggtcaccttccagccagtaaaggcacccctagctcttgggatgtttgtatccaactccgggcaatgtggggctacaaaggcccctggcttccataccctggggaccgggggagggctggtgctcccgcggtgggtgtccacggtgaggtcaggcccccacagcaggtgcattctcgccctcagcaggcaggcaagcaggcatcagctccggcgctggtctctggcttcgaagtctgtgtctttgcctgtctgtactcntgcctgacctgctggcgctccctgtccactgcactcctcccacctcatttttatgtgattttgcacagtgcctggcagacatttgacattcaataaacattgtacgaacgaaagaatcaatccccctctcactctctctgtccttctccctgtgtgcctccatatatttgtgcatctttggggagtcaggtgactttccctaccctcccctctccccatgctgccctggtcactgcccttgggaccccagcccaacaggccagtttaaaaggattggggcttggctcagtggctcatgcttataatcccagtgctttgggagactgaggcaggaggattgcttgtgcccaggagctcaaggctgcagtgagccgtgattgcaccactgcactccagcctgggtgacagagtgagaccctgtctcaataaataaataaataaaggatcaagactgaaagggggattgattctttcgttcgtacaatgtttgtcgannggccgcgaatttagtagtagtagn

SEQ ID NO: 76224 - DNA, 2547 bp, Homo sapiens
ggccgcgcccacgtgaccggtccgggtgcaaacacgcgggtcagctgatccggcccaactgcggcgtcatcccggctataagcgcacggcctcggcgaccctctccgacccggccgccgccgccatgcagccctccagccttctgccgctcgccctctgcctgctggctgcacccgcctccgcgctcgtcaggatcccgctgcacaagttcacgtccatccgccggaccatgtcggaggttgggggctctgtggaggacctgattgccaaaggccccgtctcaaagtactcccaggcggtgccagccgtgaccgaggggcccattcccgaggtgctcaagaactacatggacgcccagtactacggggagattggcatcgggacgcccccccagtgcttcacagtcgtcttcgacacgggctcctccaacctgtgggtcccctccatccactgcaaactgctggacatcgcttgctggatccaccacaagtacaacagcgacaagtccagcacctacgtgaagaatggtacctcgtttgacatccactatggctcgggcagcctctccgggtacctgagccaggacactgtgtcggtgccctgccagtcagcgtcgtcagcctctgccctgggcggtgtcaaagtggagaggcaggtctttggggaggccaccaagcagccaggcatcaccttcatcgcagccaagttcgatggcatcctgggcatggcctacccccgcatctccgtcaacaacgtgctgcccgtcttcgacaacctgatgcagcagaagctggtggaccagaacatcttctccttctacctgagcagggacccagatgcgcagcctgggggtgagctgatgctgggtggcacagactccaagtattacaagggttctctgtcctacctgaatgtcacccgcaaggcctactggcaggtccacctggaccaggtggaggtggccagcgggctgaccctgtgcaaggagggctgtgaggccattgtggacacaggcacttccctcatggtgggcccggtggatgaggtgcgcgagctgcagaaggccatcggggccgtgccgctgattcagggcgagtacatgatcccctgtgagaaggtgtccaccctgcccgcgatcacactgaagctgggaggcaaaggctacaagctgtccccagaggactacacgctcaaggcccagggccccggccagtgcccagccccgctgggagacccggccagcaccacggacggcgcccaggaagcccgagtccccctggacggggccttctggattccgaggcccccggcaggttcgcccaagggctgcttcgcttgcgtgtccaagccccctgccctgcaggctccggcggcccctgcccctgagccctcggcctctcccccgatggcgcccacactgttccccatggagtccaagagcagcaagaccgacagcgtgcgggctgccggcgcgccccctgcctgcaagcacctagccgagaagaagacgatgaccaaccccacgaccgtcatcgaggtctacccggacaccaccgaggtgaacgactattacctgtggtccatcttcaacttcgtctacctcaacttctgctgcctgggcttcatcgccttggcctactccctcaaagtgcgagacaagaagcttctcaatgacctgaatggagccgtggaggatgcaaagacggcccggctgttcaacatcaccagttctgccctggcagcctcctgcatcatcctcgtcttcatcttcctgcggtaccccctcaccgactactaaggcccgccaggcacggctgctggcggagacaagcactgagacatgtttattctcatggtccctgaaacgcaggatcccatgaggttggggcagggcagggcttcttgtcctggggcccccttgagctgtgaactgggcagcaaggccatcagaagctgagtacagcaagggggcagtgagcttggccctcagtccaccccctccgcctcctggcctccaccctgcctgtgtctggggcctgggggcttctcccctcgctgctgcaccctggcttccagcgtctgtgtccctgccctcacgtgccccttcccaggctcctggggccccttggacctgacacctagcaggaagggcttatgcaaaattgtcccaggttgggaggactcactctgtgctccccgaccctgcctcctccacgatgtgaccccgctcagagcccttgtgtctgtgaactttcaatgaaatacccatgcagcaaaaaaaaaaaaaaaaaaaaaaaaaaaaaaaaaaaaaaaaaaaaaaaaaaaaaaaaaaaaaaaaaaaaaaacaaaaaaaaaactataaaaaaaaaataacatttaaatatcataaactcatactttattacatcttccactacctttcaaacccccacccttccctttccaacctctcctacactcctcttatttatcaccctcccctacacttttttaaacttcctctacccccatcttatacaacatctctaatcctatccccccaaacca

SEQ ID NO: 76225 - DNA, 1314 bp, Homo sapiens
ggcggtaaggccatgcccaggatgccatcgaggacccagatgcgcagcctgggggtgagctgatgctgggtggcacagactccaagtattacaagggttctctgtcctacctgaatgtcacccgcaaggcctactggcaggtccacctggaccaggtggaggtggccagcgggctgaccctgtgcaaggagggctgtgaggccattgtggacacaggcacttccctcatggtgggcccggtggatgaggtgcgcgagctgcagaaggccatcggggccgtgccgctgattcagggcgagtacatgatcccctgtgagaaggtgtccaccctgcccgcgatcacactgaagctgggaggcaaaggctacaagctgtccccagaggactacacgctcaaggtgtcgcaggccgggaagaccctctgcctgagcggcttcatgggcatggacatcccgccacccagcgggccactctggatcctgggcgacgtcttcatcggccgctactacactgtgtttgaccgtgacaacaacagggtgggcttcgccgaggctgcccgcctctagttcccaaggcgtccgcgcgccagcacagaaacagaggagagtcccagagcaggaggcccctggcccagcggcccctcccacacacacccacacactcgcccgcccactgtcctgggcgccctggaagccggcggcccaagcccgacttgctgttttgttctgtggttttcccctccctgggttcagaaatgctgcctgcctgtctgtctctccatctgtttggtgggggtagagctgatccagagcacagatctgtttcgtgcattggaagaccccacccaagcttggcagccgagctcgtgtatcctggggctcccttcatctccagggagtcccctccccggccctaccagcgcccgctgggctgagcccctaccccacaccaggccgtcctcccgggccctcccttggaaacctgccctgcctgagggcccctctgcccagcttgggcccagctgggctctgccaccctacctgttcagtgtcccgggcccgttgaggatgaggccgctagaggcctgaggatgagctggaaggagtgagaggggacaaaacccaccttgttggagcctgcagggtggtgctgggactgagccagtcccaggggcatgtattggcctggaggtggggttgggattgggggctggtgccagccttcctctgcagctgacctctgttgtcctccccttgggcggctgagagccccagctgacatggaaatacagttgttggcctccggcctcccctc

SEQ ID NO: 76226 - DNA, 1166 bp, Homo sapiens
ggccgcgcccacgtgaccggtccgggtgcaaacacgcgggtcagctgatccggcccaactgcggcgtcatcccggctataagcgcacggcctcggcgaccctctccgacccggccgccgccgccatgcagccctccagccttctgccgctcgccctctgcctgctggctgcacccgcctccgcgctcgtcaggatcccgctgcacaagttcacgtccatccgccggaccatgtcggaggttgggggctctgtggaggacctgattgccaaaggccccgtctcaaagtactcccaggcggtgccagccgtgaccgaggggcccattcccgaggtgctcaagaactacatggacgcccagtactacggggagattggcatcgggacgcccccccagtgcttcacagtcgtcttcgacacgggctcctccaacctgtgggtcccctccatccactgcaaactgctggacatcgcttgctggatccaccacaagtacaacagcgacaagtccagcacctacgtgaagaatggtacctcgtttgacatccactatggctcgggcagcctctccgggtacctgagccaggacactgtgtcggtgccctgccagtcagcgtcgtcagcctctgccctgggcggtgtcaaagtggagaggcaggtctttggggaggccaccaagcagccaggcatcaccttcatcgcagccaagttcgatggcatcctgggcatggcctacccccgcatctccgtcaacaacgtgctgcccgtcttcgacaacctgatgcagcagaagctggtggaccagaacatcttctccttctacctgagcagggacccagatgcgcagcctgggggtgagctgatgctgggtggcacagactccaagtattacaagggttctctgtcctacctgaatgtcacccgcaaggcctactggcaggtccacctggaccaggtggaggtggccagcgggctgaccctgtgcaaggagggctgtgaggccattgtggacacaggcacttccctcatggtgggcccggtggatgaggtgcgcgagctgcagaaggccatcggggccgtgccgctgattcagggcgagtacatgatctccttgtgagaaggtcacacaggttatttccgcaggtcacagactgaaacatggtgtctgt

SEQ ID NO: 76227 - DNA, 1087 bp, Homo sapiens
ggccgcgcccacgtgaccggtccgggtgcaaacacgcgggtcagctgatccggcccaactgcggcgtcatcccggctataagcgcacggcctcggcgaccctctccgacccggccgccgccgccatgcagccctccagccttctgccgctcgccctctgcctgctggctgcacccgcctccgcgctcgtcaggatcccgctgcacaagttcacgtccatccgccggaccatgtcggaggttgggggctctgtggaggacctgattgccaaaggccccgtctcaaagtactcccaggcggtgccagccgtgaccgaggggcccattcccgaggtgctcaagaactacatggacgcccagtactacggggagattggcatcgggacgcccccccagtgcttcacagtcgtcttcgacacgggctcctccaacctgtgggtcccctccatccactgcaaactgctggacatcgcttgctggatccaccacaagtacaacagcgacaagtccagcacctacgtgaagaatggtacctcgtttgacatccactatggctcgggcagcctctccgggtacctgagccaggacactgtgtcggtgccctgccagtcagcgtcgtcagcctctgccctgggcggtgtcaaagtggagaggcaggtctttggggaggccaccaagcagccaggcatcaccttcatcgcagccaagttcgatggcatcctgggcatggcctacccccgcatctccgtcaacaacgtgctgcccgtcttcgacaacctgatgcagcagaagctggtggaccagaacatcttctccttctacctgagcagggacccagatgcgcagcctgggggtgagctgatgctgggtggcacagactccaagtattacaagggttctctgtcctacctgaatgtcacccgcaaggcctactggcaggtccacctggaccaggtggaggtggccagcgggctgaccctgtgcaaggagggctgtgaggccattgtggacacaggcctcccttggggccgggttcagggcgcactggcaagcacgcgcggcccttataggggtataaccgtgcaggcc

SEQ ID NO: 76228 - DNA, 1697 bp, Homo sapiens
ctggcactcacttccttgtctgccgctagccttgaccctgatgtctggctgaaccttggctcctgagcagaccaggagaacctgagggttgaggaaaacctcttctgggccaggctgggcccacgcagagcagccctaccccgggaagaagggagtctgtccctcctcctgccttctgggcctttccatccctgcagtttcagaaaggcccctccttcaggaagctctccctgattgccacattcaccctcttactcctgacctggcactcttgtgcttggggggtggcgtggcagctgactcctcccttttcctcctagggggacccagatgcgcagcctgggggtgagctgatgctgggtggcacagactccaagtattacaagggttctctgtcctacctgaatgtcacccgcaaggcctactggcaggtccacctggaccaggtggaggtggccagcgggctgaccctgtgcaaggagggctgtgaggccattgtggacacaggcacttccctcatggtgggcccggtggatgaggtgcgcgagctgcagaaggccatcggggccgtgccgctgattcagggcgaggtgagcgccgggggctggggctggggctggggctggcagggggagccccaaggccaccactaccaccctgacactgctgtgacccctcttagtacatgatcccctgtgagaaggtgtccaccctgcccgcgatcacactgaagctgggaggcaaaggctacaagctgtccccagaggactacacgctcaaggtgtcgcaggccgggaagaccctctgcctgagcggcttcatgggcatggacatcccgccacccagcgggccactctggatcctgggcgacgtcttcatcggccgctactacactgtgtttgaccgtgacaacaacagggtgggcttcgccgaggctgcccgcctctagttcccaaggcgtccgcgcgccagcacagaaacagaggagagtcccagagcaggaggcccctggcccagcggcccctcccacacacacccacacactcgcccgcccactgtcctgggcgccctggaagccggcggcccaagcccgacttgctgttttgttctgtggttttcccctccctgggttcagaaatgctgcctgcctgtctgtctctccatctgtttggtgggggtagagctgatccagagcacagatctgtttcgtgcattggaagaccccacccaagcttggcagccgagctcgtgtatcctggggctcccttcatctccagggagtcccctccccggccctaccagcgcccgctgggctgagcccctaccccacaccaggccgtcctcccgggccctcccttggaaacctgccctgcctgagggcccctctgcccagcttgggcccagctgggctctgccaccctacctgttcagtgtcccgggcccgttgaggatgaggccgctagaggcctgaggatgagctggaaggagtgagaggggacaaaacccaccttgttggagcctgcagggtggtgctgggactgagccagtcccaggggcatgtattggcctggaggtggggttgggattgggggctggtgccagccttcctctgcagctgacctctgttgtcctccccttgggcggctgagagccccagctgacatggaaatacagttgttggcctccggcctcccctc

SEQ ID NO: 76229 - DNA, 963 bp, Homo sapiens
  misc_feature (47)..(47): n is a, c, g, or t
ttaaggctaggtacgagactgcggtgaaattcggccgagggctcaangtgtcgcaggccgggaagaccctctgcctgagcggcttcatgggcatggacatcccgccacccagcgggccactctggatcctgggcgacgtcttcatcggccgctactacactgtgtttgaccgtgacaacaacagggtgggcttcgccgaggctgcccgcctctagttcccaaggcgtccgcgcgccagcacagaaacagaggagagtcccagagcaggaggcccctggcccagcggcccctcccacacacacccacacactcgcccgcccactgtcctgggcgccctggaagccggcggcccaagcccgacttgctgttttgttctgtggttttcccctccctgggttcagaaatgctgcctgcctgtctgtctctccatctgtttggtgggggtagagctgatccagagcacagatctgtttcgtgcattggaagaccccacccaagcttggcagccgagctcgtgtatcctggggctcccttcatctccagggagtcccctccccggccctaccagcgcccgctgggctgagcccctaccccacaccaggccgtcctcccgggccctcccttggaaacctgccctgcctgagggcccctctgcccagcttgggcccagctgggctctgccaccctacctgttcagtgtcccgggcccgttgaggatgaggccgctagaggcctgaggatgagctggaaggagtgagaggggacaaaacccaccttgttggagcctgcagggtggtgctgggactgagccagtcccaggggcatgtattggcctggaggtggggttgggattgggggctggtgccagccttcctctgcagctgacctctgttgtcctccccttgggcggctgagagccccagctgacatggaaatacagttgttggcctccggcctcccctc

SEQ ID NO: 76230 - DNA, 973 bp, Homo sapiens
  misc_feature (13)..(13): n is a, c, g, or t
ggctaccgctccntgctgggaggcaaggctacagctgtccagagactacacgctcaagtgtcgcaggccgggaagaccctctgcctgagcggcttcatgggcatggacatcccgccacccagcgggccactctggatcctgggcgacgtcttcatcggccgctactacactgtgtttgaccgtgacaacaacagggtgggcttcgccgaggctgcccgcctctagttcccaaggcgtccgcgcgccagcacagaaacagaggagagtcccagagcaggaggcccctggcccagcggcccctcccacacacacccacacactcgcccgcccactgtcctgggcgccctggaagccggcggcccaagcccgacttgctgttttgttctgtggttttcccctccctgggttcagaaatgctgcctgcctgtctgtctctccatctgtttggtgggggtagagctgatccagagcacagatctgtttcgtgcattggaagaccccacccaagcttggcagccgagctcgtgtatcctggggctcccttcatctccagggagtcccctccccggccctaccagcgcccgctgggctgagcccctaccccacaccaggccgtcctcccgggccctcccttggaaacctgccctgcctgagggcccctctgcccagcttgggcccagctgggctctgccaccctacctgttcagtgtcccgggcccgttgaggatgaggccgctagaggcctgaggatgagctggaaggagtgagaggggacaaaacccaccttgttggagcctgcagggtggtgctgggactgagccagtcccaggggcatgtattggcctggaggtggggttgggattgggggctggtgccagccttcctctgcagctgacctctgttgtcctccccttgggcggctgagagccccagctgacatggaaatacagttgttggcctccggcctcccctc

SEQ ID NO: 76231 - DNA, 923 bp, Homo sapiens
atagatcgagtcgtaccagatcccctttccatccctgagcggcttcatgggcatggacatcccgccacccagcgggccactctggatcctgggcgacgtcttcatcggccgctactacactgtgtttgaccgtgacaacaacagggtgggcttcgccgaggctgcccgcctctagttcccaaggcgtccgcgcgccagcacagaaacagaggagagtcccagagcaggaggcccctggcccagcggcccctcccacacacacccacacactcgcccgcccactgtcctgggcgccctggaagccggcggcccaagcccgacttgctgttttgttctgtggttttcccctccctgggttcagaaatgctgcctgcctgtctgtctctccatctgtttggtgggggtagagctgatccagagcacagatctgtttcgtgcattggaagaccccacccaagcttggcagccgagctcgtgtatcctggggctcccttcatctccagggagtcccctccccggccctaccagcgcccgctgggctgagcccctaccccacaccaggccgtcctcccgggccctcccttggaaacctgccctgcctgagggcccctctgcccagcttgggcccagctgggctctgccaccctacctgttcagtgtcccgggcccgttgaggatgaggccgctagaggcctgaggatgagctggaaggagtgagaggggacaaaacccaccttgttggagcctgcagggtggtgctgggactgagccagtcccaggggcatgtattggcctggaggtggggttgggattgggggctggtgccagccttcctctgcagctgacctctgttgtcctccccttgggcggctgagagccccagctgacatggaaatacagttgttggcctccggcctcccctc

SEQ ID NO: 76232 - DNA, 809 bp, Homo sapiens
ccgcacgatcagtggtggggcacgaggcagggtgggcttcgccgaggctgcccgcctctagttcccaaggcgtccgcgcgccagcacagaaacagaggagagtcccagagcaggaggcccctggcccagcggcccctcccacacacacccacacactcgcccgcccactgtcctgggcgccctggaagccggcggcccaagcccgacttgctgttttgttctgtggttttcccctccctgggttcagaaatgctgcctgcctgtctgtctctccatctgtttggtgggggtagagctgatccagagcacagatctgtttcgtgcattggaagaccccacccaagcttggcagccgagctcgtgtatcctggggctcccttcatctccagggagtcccctccccggccctaccagcgcccgctgggctgagcccctaccccacaccaggccgtcctcccgggccctcccttggaaacctgccctgcctgagggcccctctgcccagcttgggcccagctgggctctgccaccctacctgttcagtgtcccgggcccgttgaggatgaggccgctagaggcctgaggatgagctggaaggagtgagaggggacaaaacccaccttgttggagcctgcagggtggtgctgggactgagccagtcccaggggcatgtattggcctggaggtggggttgggattgggggctggtgccagccttcctctgcagctgacctctgttgtcctccccttgggcggctgagagccccagctgacatggaaatacagttgttggcctccggcctcccctc

SEQ ID NO: 76233 - DNA, 4203 bp, Homo sapiens
  misc_feature (1468)..(1468): n is a, c, g, or t
  misc_feature (3683)..(3683): n is a, c, g, or t
  misc_feature (4178)..(4179): n is a, c, g, or t
  misc_feature (4203)..(4203): n is a, c, g, or t
actttttgccccttcctgtcttcctctctttccattctccttcccttcctcatcctagaacttggtttcttcttacagcaaacacgcacatatttgtggatgtgatagaaggaaagagtgctgaggaggggagggccctataattcattctgaatgaaggttgcctcttggaaatgagtccagctcagtccactgcctccccaagacttcctgagtgccagcccactcctttcgccttaatattcctccccaaaggccctgtggactgctgtctctcctgccaatgcacaacgctcatcctcaaggcatcccagttaattttaaacgaggcagaaccaatcaaattaggagacagttgtgtcgccccatcctccaattatatcctctctgaggccaacttcttttattttaatcatttaaaacttgcaaaaagaaaaaacaaggaatttctttatatccttcacccagttgccccaattttttaacattttaccatatttgcttttctctatatatataaatacatctcacctactttataaaccagttgagggctgagaggtttcagacatgacgcccccgtgccccaagttcatccgtgtacagtgccccagggcagagacatgttcctctagaaccatcgttcattcgtcagctctcggaaacaaagcactggtactgtgctgagcactgtggcaccggctctgctgggctcctggatgctccaaggccctgctccctggctgactgcccatttcctgtcctcctcccggcttcaggtgcgagacaagaagcttctcaatgacctgaatggagccgtggaggatgcaaagacggcccggctgttcaacatcaccagttctgccctggcagcctcctgcatcatcctcgtcttcatcttcctgcggtaccccctcaccgactactaaggcccgccaggcacggctgctggcggagacaagcactgagacatgtttattctcatggtccctgaaacgcaggatcccatgaggttggggcagggcagggcttcttgtcctggggcccccttgagctgtgaactgggcagcaaggccatcagaagctgagtacagcaagggggcagtgagcttggccctcagtccaccccctccgcctcctggcctccaccctgcctgtgtctggggcctgggggcttctcccctcgctgctgcaccctggcttccagcgtctgtgtccctgccctcacgtgccccttcccaggctcctggggccccttggacctgacacctagcaggaagggcttatgcaaaattgtcccaggttgggaggactcactctgtgctccccgaccctgcctcctccacgatgtgaccccgctcagagcccttgtgtctgtgaactttcaatgaaatacccatgcagctccagcccagccttctactttgtgtccctggcagggcctggagaagtctggaggctttgcaancctccctcaggaactgcctggcggtcagggccccgggtgctgtgtcccaacagactgcaggggacggtctgctccatcacagctgtgccagacagtgaatgggaagggggggcatttggtggaggtaccccaaactcgagtcacttagagggtcaggcagcctcctggggggacggaagggggtggggcacagcctcagctgcctgcattggccaaatcagagcaaaggaaaccacaaattcactcggaaggaagcagcaggcagagacgatagacgcctggctaacccctgtccctcctggagggctctgggacctggacaggcccctttacctctctcgtgcccatctccttagctgtaaaataggaaaatggcctttcacttctataatcactgtgaaaatgaacggaagatgcctttcaaaggccgaggccagcgccctgacggcccatggcatgtgcagtccacaatgtgggaggcaggatgcagggatgggctctgtccccttggaactcaggcacagtcatgggggtgccggtcagccctgaagacaagctgatgagggtgcactaggaaaagtgcagggcatcggcgaggcacacgaaggaggtggggaggtgaagatggagaagaagccgaggcagtggccatgggtgtggagcttcgcgctgtgggtgcccagctggtctgggaaaccgcaggaaatcccgcagctcaggtgcgcagtgggaaggacttgctattccgtgggaaggcaggcaaaccttcccagggaaggggcatggccgtgcgcctcatgttttgggaagctcgtgccctctggggtagcgaggccagcttggaggggagtccagtggacagaggtggatgcaagtggagggagctgagcctgggctggggctggcagcagagggctggacagcagggcgcctgcgtggcagctgtgcagtcagtggggttgactggtttggaaggtaaggtgggggagaagcccggaggattcctgtcccttgacttggacagcccagtggagagggctgtgtaccaagggcaggaaaccagggagaagaagatgttgactttaagataccaagcagagaagggaagagccttctgggctggagacgtggggtgcctcagaagggaggaccttgagctagcagcagatgggacaaacgcaggggacagggcacagccgtggcaggagtgcagcgagcaagattctggtcacagtcctgacccagaaacctgcagaggaagggagggtggccagcacctgcccgtgggcctggggtgcagcccaggcagaggtggatggagggggtgctcagggaagaggggaggggagtgtgtgacctcaaaatgggagggcttgggggtcagagtcgagagaggggacagggtggggaccatgtgggactcttgagcactgacccttgaacccaggcagtggtgggatgggagggcaggaggcggcgggctgcgaggctgatgcggggctgcacggagctgtcattgagcctcttggaggatggtgggagaagtgccaggggcggctgaaagccttgccgagactgtgggcagcctggttgtgggcacttcggatgcttgcaccattagacccagaggcttcctggacaagcctgggctggaagaggatggcagaggctgctgggccttggaagagagagggtcctggcttctagttcctggggcagctaaggccaaccccagtgtccaggtgtcttccatgttatgcctgggagggaagaaagtagaggggcaaatgctttctttgcctattttccttaaacatttggtggcagtgctggtggctgcctgggacaggggccaggaggaaacacccctgcattagggaagccctcagccagcttttccctgggatgttcctgcgcctggctgaagctttctgagttcatgttggggaaatggaacggtcaccttccagccagtaaaggcacccctagctcttgggatgtttgtatccaactccgggcaatgtggggctacaaaggcccctggcttccataccctggggaccgggggagggctggtgctcccgcggtgggtgtccacggtgaggtcaggcccccacagcaggtgcattctcgccctcagcaggcaggcaagcaggcatcagctccggcgctggtctctggcttcgaagtctgtgtctttgcctgtctgtactcntgcctgacctgctggcgctccctgtccactgcactcctcccacctcatttttatgtgattttgcacagtgcctggcagacatttgacattcaataaacattgtacgaacgaaagaatcaatccccctctcactctctctgtccttctccctgtgtgcctccatatatttgtgcatctttggggagtcaggtgactttccctaccctcccctctccccatgctgccctggtcactgcccttgggaccccagcccaacaggccagtttaaaaggattggggcttggctcagtggctcatgcttataatcccagtgctttgggagactgaggcaggaggattgcttgtgcccaggagctcaaggctgcagtgagccgtgattgcaccactgcactccagcctgggtgacagagtgagaccctgtctcaataaataaataaataaaggatcaagactgaaagggggattgattctttcgttcgtacaatgtttgtcgannggccgcgaatttagtagtagtagn

SEQ ID NO: 76234 - DNA, 4110 bp, Homo sapiens
  misc_feature (1375)..(1375): n is a, c, g, or t
  misc_feature (3590)..(3590): n is a, c, g, or t
  misc_feature (4085)..(4086): n is a, c, g, or t
  misc_feature (4110)..(4110): n is a, c, g, or t
aagggttcagagtcaggcacaggcaggcagacaggaccccaagcaggactggccttccagacaggaaagagggttgcggagacacaggaggccagttgagagtggcagaggagaaaggagtttcatgggaggatggggcttggagagagatgagggagggaaaacgggggccgccatgcatcctcagcttccgggggactttggagagggtcgaggctcagtgggagctggaggcccagggccccggccagtgcccagccccgctgggagacccggccagcaccacggacggcgcccaggaagcccgagtccccctggacggggccttctggattccgaggcccccggcaggttcgcccaagggctgcttcgcttgcgtgtccaagccccctgccctgcaggctccggcggcccctgcccctgagccctcggcctctcccccgatggcgcccacactgttccccatggagtccaagagcagcaagaccgacagcgtgcgggctgccggcgcgccccctgcctgcaagcacctagccgagaagaagacgatgaccaaccccacgaccgtcatcgaggtctacccggacaccaccgaggtgaacgactattacctgtggtccatcttcaacttcgtctacctcaacttctgctgcctgggcttcatcgccttggcctactccctcaaagtgcgagacaagaagcttctcaatgacctgaatggagccgtggaggatgcaaagacggcccggctgttcaacatcaccagttctgccctggcagcctcctgcatcatcctcgtcttcatcttcctgcggtaccccctcaccgactactaaggcccgccaggcacggctgctggcggagacaagcactgagacatgtttattctcatggtccctgaaacgcaggatcccatgaggttggggcagggcagggcttcttgtcctggggcccccttgagctgtgaactgggcagcaaggccatcagaagctgagtacagcaagggggcagtgagcttggccctcagtccaccccctccgcctcctggcctccaccctgcctgtgtctggggcctgggggcttctcccctcgctgctgcaccctggcttccagcgtctgtgtccctgccctcacgtgccccttcccaggctcctggggccccttggacctgacacctagcaggaagggcttatgcaaaattgtcccaggttgggaggactcactctgtgctccccgaccctgcctcctccacgatgtgaccccgctcagagcccttgtgtctgtgaactttcaatgaaatacccatgcagctccagcccagccttctactttgtgtccctggcagggcctggagaagtctggaggctttgcaancctccctcaggaactgcctggcggtcagggccccgggtgctgtgtcccaacagactgcaggggacggtctgctccatcacagctgtgccagacagtgaatgggaagggggggcatttggtggaggtaccccaaactcgagtcacttagagggtcaggcagcctcctggggggacggaagggggtggggcacagcctcagctgcctgcattggccaaatcagagcaaaggaaaccacaaattcactcggaaggaagcagcaggcagagacgatagacgcctggctaacccctgtccctcctggagggctctgggacctggacaggcccctttacctctctcgtgcccatctccttagctgtaaaataggaaaatggcctttcacttctataatcactgtgaaaatgaacggaagatgcctttcaaaggccgaggccagcgccctgacggcccatggcatgtgcagtccacaatgtgggaggcaggatgcagggatgggctctgtccccttggaactcaggcacagtcatgggggtgccggtcagccctgaagacaagctgatgagggtgcactaggaaaagtgcagggcatcggcgaggcacacgaaggaggtggggaggtgaagatggagaagaagccgaggcagtggccatgggtgtggagcttcgcgctgtgggtgcccagctggtctgggaaaccgcaggaaatcccgcagctcaggtgcgcagtgggaaggacttgctattccgtgggaaggcaggcaaaccttcccagggaaggggcatggccgtgcgcctcatgttttgggaagctcgtgccctctggggtagcgaggccagcttggaggggagtccagtggacagaggtggatgcaagtggagggagctgagcctgggctggggctggcagcagagggctggacagcagggcgcctgcgtggcagctgtgcagtcagtggggttgactggtttggaaggtaaggtgggggagaagcccggaggattcctgtcccttgacttggacagcccagtggagagggctgtgtaccaagggcaggaaaccagggagaagaagatgttgactttaagataccaagcagagaagggaagagccttctgggctggagacgtggggtgcctcagaagggaggaccttgagctagcagcagatgggacaaacgcaggggacagggcacagccgtggcaggagtgcagcgagcaagattctggtcacagtcctgacccagaaacctgcagaggaagggagggtggccagcacctgcccgtgggcctggggtgcagcccaggcagaggtggatggagggggtgctcagggaagaggggaggggagtgtgtgacctcaaaatgggagggcttgggggtcagagtcgagagaggggacagggtggggaccatgtgggactcttgagcactgacccttgaacccaggcagtggtgggatgggagggcaggaggcggcgggctgcgaggctgatgcggggctgcacggagctgtcattgagcctcttggaggatggtgggagaagtgccaggggcggctgaaagccttgccgagactgtgggcagcctggttgtgggcacttcggatgcttgcaccattagacccagaggcttcctggacaagcctgggctggaagaggatggcagaggctgctgggccttggaagagagagggtcctggcttctagttcctggggcagctaaggccaaccccagtgtccaggtgtcttccatgttatgcctgggagggaagaaagtagaggggcaaatgctttctttgcctattttccttaaacatttggtggcagtgctggtggctgcctgggacaggggccaggaggaaacacccctgcattagggaagccctcagccagcttttccctgggatgttcctgcgcctggctgaagctttctgagttcatgttggggaaatggaacggtcaccttccagccagtaaaggcacccctagctcttgggatgtttgtatccaactccgggcaatgtggggctacaaaggcccctggcttccataccctggggaccgggggagggctggtgctcccgcggtgggtgtccacggtgaggtcaggcccccacagcaggtgcattctcgccctcagcaggcaggcaagcaggcatcagctccggcgctggtctctggcttcgaagtctgtgtctttgcctgtctgtactcntgcctgacctgctggcgctccctgtccactgcactcctcccacctcatttttatgtgattttgcacagtgcctggcagacatttgacattcaataaacattgtacgaacgaaagaatcaatccccctctcactctctctgtccttctccctgtgtgcctccatatatttgtgcatctttggggagtcaggtgactttccctaccctcccctctccccatgctgccctggtcactgcccttgggaccccagcccaacaggccagtttaaaaggattggggcttggctcagtggctcatgcttataatcccagtgctttgggagactgaggcaggaggattgcttgtgcccaggagctcaaggctgcagtgagccgtgattgcaccactgcactccagcctgggtgacagagtgagaccctgtctcaataaataaataaataaaggatcaagactgaaagggggattgattctttcgttcgtacaatgtttgtcgannggccgcgaatttagtagtagtagn

SEQ ID NO: 76235 - DNA, 825 bp, Homo sapiens
  misc_feature (532)..(532): n is a, c, g, or t
  misc_feature (557)..(557): n is a, c, g, or t
  misc_feature (578)..(578): n is a, c, g, or t
  misc_feature (605)..(605): n is a, c, g, or t
  misc_feature (613)..(613): n is a, c, g, or t
  misc_feature (616)..(616): n is a, c, g, or t
  misc_feature (622)..(622): n is a, c, g, or t
  misc_feature (654)..(654): n is a, c, g, or t
  misc_feature (663)..(663): n is a, c, g, or t
  misc_feature (670)..(670): n is a, c, g, or t
  misc_feature (672)..(672): n is a, c, g, or t
  misc_feature (688)..(688): n is a, c, g, or t
  misc_feature (695)..(695): n is a, c, g, or t
  misc_feature (704)..(704): n is a, c, g, or t
  misc_feature (740)..(740): n is a, c, g, or t
  misc_feature (750)..(750): n is a, c, g, or t
  misc_feature (761)..(761): n is a, c, g, or t
  misc_feature (808)..(808): n is a, c, g, or t
ggccgcgcccacgtgaccggtccgggtgcaaacacgcgggtcagctgatccggcccaactgcggcgtcatcccggctataagcgcacggcctcggcgaccctctccgacccggccgccgccgccatgcagccctccagccttctgccgctcgccctctgcctgctggctgcacccgcctccgcgctcgtcaggatcccgctgcacaagttcacgtccatccgccggaccatgtcggaggttgggggctctgtggaggacctgattgccaaaggccccgtctcaaagtactcccaggcggtgccagccgtgaccgaggggcccattcccgaggtgctcaagaactacatggacgcccagtactacggggagattggcatcgggacgcccccccagtgcttcacagtcgtcttcgacacgggctcctccaacctgtgggtcccctccatccactgcaaactgctggacatcgcttgctggaatccaaccaacaaagtaacaaacaagcgaacaaagtccaagcaaccataacgntggaaagaaatgggtaccctccgtnttgaacaatcccacctaatgngcctcgggcgcaagccctcatcccggngataaccntgnaagccnaagagaacaacccggtgctctgggtgcacccntgcccaagntcaagcngntcgctcaagcccatcntgccccntgtgggcgnggtgctcaaaaaggtgtgaagaagggcaagggctcnttttgggggnaaggccaaccnaaagcaagccaaaggcaaatcaaccttttcaatcgcaagccaaaagnttctgaatgggcaatcc

SEQ ID NO: 76236 - DNA, 3691 bp, Homo sapiens
  misc_feature (956)..(956): n is a, c, g, or t
  misc_feature (3171)..(3171): n is a, c, g, or t
  misc_feature (3666)..(3667): n is a, c, g, or t
  misc_feature (3691)..(3691): n is a, c, g, or t
aagggttcagagtcaggcacaggcaggcagacaggaccccaagcaggactggccttccagacaggaaagagggttgcggagacacaggaggccagttgagagtggcagaggagaaaggagtttcatgggaggatggggcttggagagagatgagggagggaaaacgggggccgccatgcatcctcagcttccgggggactttggagagggtcgaggctcagtgggagctggaggttggtgaagaggacccagctcagggaacctgcgtggtgaagtgggggacttggagggagggagggaaggctggagttttctccatggggaggaactcatggggactgttatggggatggaagatcagctggcgtcaagcataccgtgagagtgaggatgtggtggggtagcggaggcggctgaggctgggaggacaggcattggtcaggaaaaatgattcacagggaacaaagtatcctcaggggaccaggctcagaagggctggtagggatcacagagaggctgtgggcaggtgagtaaaccagcctccagggagacaagtgtccttagcagccaggacctcagcacaggaccagagctcggaacgggacactttgccctgcgagcagatggagcatgacctggggtctgcgcaggagaggccacattttctcccctcgctgctgcaccctggcttccagcgtctgtgtccctgccctcacgtgccccttcccaggctcctggggccccttggacctgacacctagcaggaagggcttatgcaaaattgtcccaggttgggaggactcactctgtgctccccgaccctgcctcctccacgatgtgaccccgctcagagcccttgtgtctgtgaactttcaatgaaatacccatgcagctccagcccagccttctactttgtgtccctggcagggcctggagaagtctggaggctttgcaancctccctcaggaactgcctggcggtcagggccccgggtgctgtgtcccaacagactgcaggggacggtctgctccatcacagctgtgccagacagtgaatgggaagggggggcatttggtggaggtaccccaaactcgagtcacttagagggtcaggcagcctcctggggggacggaagggggtggggcacagcctcagctgcctgcattggccaaatcagagcaaaggaaaccacaaattcactcggaaggaagcagcaggcagagacgatagacgcctggctaacccctgtccctcctggagggctctgggacctggacaggcccctttacctctctcgtgcccatctccttagctgtaaaataggaaaatggcctttcacttctataatcactgtgaaaatgaacggaagatgcctttcaaaggccgaggccagcgccctgacggcccatggcatgtgcagtccacaatgtgggaggcaggatgcagggatgggctctgtccccttggaactcaggcacagtcatgggggtgccggtcagccctgaagacaagctgatgagggtgcactaggaaaagtgcagggcatcggcgaggcacacgaaggaggtggggaggtgaagatggagaagaagccgaggcagtggccatgggtgtggagcttcgcgctgtgggtgcccagctggtctgggaaaccgcaggaaatcccgcagctcaggtgcgcagtgggaaggacttgctattccgtgggaaggcaggcaaaccttcccagggaaggggcatggccgtgcgcctcatgttttgggaagctcgtgccctctggggtagcgaggccagcttggaggggagtccagtggacagaggtggatgcaagtggagggagctgagcctgggctggggctggcagcagagggctggacagcagggcgcctgcgtggcagctgtgcagtcagtggggttgactggtttggaaggtaaggtgggggagaagcccggaggattcctgtcccttgacttggacagcccagtggagagggctgtgtaccaagggcaggaaaccagggagaagaagatgttgactttaagataccaagcagagaagggaagagccttctgggctggagacgtggggtgcctcagaagggaggaccttgagctagcagcagatgggacaaacgcaggggacagggcacagccgtggcaggagtgcagcgagcaagattctggtcacagtcctgacccagaaacctgcagaggaagggagggtggccagcacctgcccgtgggcctggggtgcagcccaggcagaggtggatggagggggtgctcagggaagaggggaggggagtgtgtgacctcaaaatgggagggcttgggggtcagagtcgagagaggggacagggtggggaccatgtgggactcttgagcactgacccttgaacccaggcagtggtgggatgggagggcaggaggcggcgggctgcgaggctgatgcggggctgcacggagctgtcattgagcctcttggaggatggtgggagaagtgccaggggcggctgaaagccttgccgagactgtgggcagcctggttgtgggcacttcggatgcttgcaccattagacccagaggcttcctggacaagcctgggctggaagaggatggcagaggctgctgggccttggaagagagagggtcctggcttctagttcctggggcagctaaggccaaccccagtgtccaggtgtcttccatgttatgcctgggagggaagaaagtagaggggcaaatgctttctttgcctattttccttaaacatttggtggcagtgctggtggctgcctgggacaggggccaggaggaaacacccctgcattagggaagccctcagccagcttttccctgggatgttcctgcgcctggctgaagctttctgagttcatgttggggaaatggaacggtcaccttccagccagtaaaggcacccctagctcttgggatgtttgtatccaactccgggcaatgtggggctacaaaggcccctggcttccataccctggggaccgggggagggctggtgctcccgcggtgggtgtccacggtgaggtcaggcccccacagcaggtgcattctcgccctcagcaggcaggcaagcaggcatcagctccggcgctggtctctggcttcgaagtctgtgtctttgcctgtctgtactcntgcctgacctgctggcgctccctgtccactgcactcctcccacctcatttttatgtgattttgcacagtgcctggcagacatttgacattcaataaacattgtacgaacgaaagaatcaatccccctctcactctctctgtccttctccctgtgtgcctccatatatttgtgcatctttggggagtcaggtgactttccctaccctcccctctccccatgctgccctggtcactgcccttgggaccccagcccaacaggccagtttaaaaggattggggcttggctcagtggctcatgcttataatcccagtgctttgggagactgaggcaggaggattgcttgtgcccaggagctcaaggctgcagtgagccgtgattgcaccactgcactccagcctgggtgacagagtgagaccctgtctcaataaataaataaataaaggatcaagactgaaagggggattgattctttcgttcgtacaatgtttgtcgannggccgcgaatttagtagtagtagn

SEQ ID NO: 76237 - DNA, 881 bp, Homo sapiens
aagggttcagagtcaggcacaggcaggcagacaggaccccaagcaggactggccttccagacaggaaagagggttgcggagacacaggaggccagttgagagtggcagaggagaaaggagtttcatgggaggatggggcttggagagagatgagggagggaaaacgggggccgccatgcatcctcagcttccgggggactttggagagggtcgaggctcagtgggagctggaggttgggccgctgggaggcggatcagtggacagacagcggcccgcgggacggcggaaggacgcgcgcaccgaggctcagggggtccggccgcgcgccgaggagtcgcttgtaggtgaggaggcgccgtccggggggctgcggcagacccggatggggctgggggctgcagagcctcggccgcagaccccccggcgagcgccgcacgggagctgggaacgcggggtggcgcagagcgcgagcgacttggtgcctcgttggagaagtgttcatttcacagcctgttattgtgcgtctatgtatggcccgggggtgcgtggctccgggcaagtgtgcgcgcttggggtccccaggttggaggtggggggcggtgcgcacgagttggagaccccgcacctgtgccggttcttggtgctcgtggctgagcctgcatcgccttgtgtggggagttgtttactcgtcaatggctctgagcgcgcccgcgggtgcgccccggggtctggagagcccgcggtgcagcccgcggtggagcccgtggcggtgcccgtggcggtatcgggtgtccgcgggcgccgtgggcaggtgctttggccgctctgctagctctgccggttggcggctgaggcagcgtcgctgtgggtccggcgcccc

SEQ ID NO: 76238 - DNA, 1159 bp, Homo sapiens
ctttggccgggtgggacggtgtctggggccttgtgcttttctgcttgcgggggtcgtgtttaccgcggtattccggggggttgcgggcttatctcgttatcgtcgccgttttgtcgtgaccgttggggtgtcggtgtgcgtcttggcggtgttcccctcgtggtgttggacgttcgatgtggtgtgccgtgtagtcccggggggaacctgtgtccgtgggtgcagcttagtgagttgcttgggtgtgtggtgcgttgacggtgaggtcctgccagggcctgctcgaggtttggttttcggtccgagtcgcccctcccgaagtgttagagcacgtttgtagtttaggaccgctgggtttgttagtaactgtttgcatgtaataagttgaagctccatagggtcttctcgtctgcctgtgttatgcccgcctcttcacgcggcaggtcaatttcactggttaaaagtaaggcctggcccagcggcccctcccacacacacccacacactcgcccgcccactgtcctgggcgccctggaagccggcggcccaagcccgacttgctgttttgttctgtggttttcccctccctgggttcagaaatgctgcctgcctgtctgtctctccatctgtttggtgggggtagagctgatccagagcacagatctgtttcgtgcattggaagaccccacccaagcttggcagccgagctcgtgtatcctggggctcccttcatctccagggagtcccctccccggccctaccagcgcccgctgggctgagcccctaccccacaccaggccgtcctcccgggccctcccttggaaacctgccctgcctgagggcccctctgcccagcttgggcccagctgggctctgccaccctacctgttcagtgtcccgggcccgttgaggatgaggccgctagaggcctgaggatgagctggaaggagtgagaggggacaaaacccaccttgttggagcctgcagggtggtgctgggactgagccagtcccaggggcatgtattggcctggaggtggggttgggattgggggctggtgccagccttcctctgcagctgacctctgttgtcctccccttgggcggctgagagccccagctgacatggaaatacagttgttggcctccggcctcccctc

SEQ ID NO: 76239 - DNA, 536 bp, Homo sapiens
aagcagctggtcccggccgcagtcgttagcatgcacagatctgtttcgtgcattggaagaccccacccaagcttggcagccgagctcgtgtatcctggggctcccttcatctccagggagtcccctccccggccctaccagcgcccgctgggctgagcccctaccccacaccaggccgtcctcccgggccctcccttggaaacctgccctgcctgagggcccctctgcccagcttgggcccagctgggctctgccaccctacctgttcagtgtcccgggcccgttgaggatgaggccgctagaggcctgaggatgagctggaaggagtgagaggggacaaaacccaccttgttggagcctgcagggtggtgctgggactgagccagtcccaggggcatgtattggcctggaggtggggttgggattgggggctggtgccagccttcctctgcagctgacctctgttgtcctccccttgggcggctgagagccccagctgacatggaaatacagttgttggcctccggcctcccctc

SEQ ID NO: 76240 - DNA, 2185 bp, Homo sapiens
ggccgcgcccacgtgaccggtccgggtgcaaacacgcgggtcagctgatccggcccaactgcggcgtcatcccggctataagcgcacggcctcggcgaccctctccgacccggccgccgccgccatgcagccctccagccttctgccgctcgccctctgcctgctggctgcacccgcctccgcgctcgtcaggatcccgctgcacaagttcacgtccatccgccggaccatgtcggaggttgggggctctgtggaggacctgattgccaaaggccccgtctcaaagtactcccaggcggtgccagccgtgaccgaggggcccattcccgaggtgctcaagaactacatggacgcccagtactacggggagattggcatcgggacgcccccccagtgcttcacagtcgtcttcgacacgggctcctccaacctgtgggtcccctccatccactgcaaactgctggacatcgcttgctggatccaccacaagtacaacagcgacaagtccagcacctacgtgaagaatggtacctcgtttgacatccactatggctcgggcagcctctccgggtacctgagccaggacactgtgtcggtgccctgccagtcagcgtcgtcagcctctgccctgggcggtgtcaaagtggagaggcaggtctttggggaggccaccaagcagccaggcatcaccttcatcgcagccaagttcgatggcatcctgggcatggcctacccccgcatctccgtcaacaacgtgctgcccgtcttcgacaacctgatgcagcagaagctggtggaccagaacatcttctccttctacctgagcagggacccagatgcgcagcctgggggtgagctgatgctgggtggcacagactccaagtattacaagggttctctgtcctacctgaatgtcacccgcaaggcctactggcaggtccacctggaccaggtggaggtggccagcgggctgaccctgtgcaaggagggctgtgaggccattgtggacacaggcacttccctcatggtgggcccggtggatgaggtgcgcgagctgcagaaggccatcggggccgtgccgctgattcagggcgagtacatgatcccctgtgagaaggtgtccaccctgcccgcgatcacactgaagctgggaggcaaaggctacaagctgtccccagaggactacacgctcaaggtgtcgcaggccgggaagaccctctgcctgagcggcttcatgggcatggacatcccgccacccagcgggccactctggatcctgggcgacgtcttcatcggccgctactacactgtgtttgaccgtgacaacaacagggtgggcttcgccgaggctgcccgcctctagttcccaaggcgtccgcgcgccagcacagaaacagaggagagtcccagagcaggaggcccctggcccagcggcccctcccacacacacccacacactcgcccgcccactgtcctgggcgccctggaagccggcggcccaagcccgacttgctgttttgttctgtggttttcccctccctgggttcagaaatgctgcctgcctgtctgtctctccatctgtttggtgggggtagagctgatccagagcacagatctgtttcgtgcattggaagaccccacccaagcttggcagccgagctcgtgtatcctggggctcccttcatctccagggagtcccctccccggccctaccagcgcccgctgggctgagcccctaccccacaccaggccgtcctcccgggccctcccttggaaacctgccctgcctgagggcccctctgcccagcttgggcccagctgggctctgccaccctacctgttcagtgtcccgggcccgttgaggatgaggccgctagaggcctgaggatgagctggaaggagtgagaggggacaaaacccaccttgttggagcctgcagggtggtgctgggactgagccagtcccaggggcatgtattggcctggaggtggggttgggattgggggctggtgccagccttcctctgcagctgacctctgttgtcctccccttgggcggctgagagccccagctgacatggaaatacagttgttggcctccggcctcccctcaaaaaaaaaaaaaaaaaaaaaaaaaaaaaaaaaaaaaaaaaaaaaaaaaaaaaaaaaaaaaaaaaaaaaaaaaa

SEQ ID NO: 76241 - DNA, 2160 bp, Homo sapiens
  misc_feature (2129)..(2129): n is a, c, g, or t
  misc_feature (2134)..(2135): n is a, c, g, or t
  misc_feature (2144)..(2145): n is a, c, g, or t
  misc_feature (2148)..(2148): n is a, c, g, or t
  misc_feature (2151)..(2151): n is a, c, g, or t
ggccgcgcccacgtgaccggtccgggtgcaaacacgcgggtcagctgatccggcccaactgcggcgtcatcccggctataagcgcacggcctcggcgaccctctccgacccggccgccgccgccatgcagccctccagccttctgccgctcgccctctgcctgctggctgcacccgcctccgcgctcgtcaggatcccgctgcacaagttcacgtccatccgccggaccatgtcggaggttgggggctctgtggaggacctgattgccaaaggccccgtctcaaagtactcccaggcggtgccagccgtgaccgaggggcccattcccgaggtgctcaagaactacatggacgcccagtactacggggagattggcatcgggacgcccccccagtgcttcacagtcgtcttcgacacgggctcctccaacctgtgggtcccctccatccactgcaaactgctggacatcgcttgctggatccaccacaagtacaacagcgacaagtccagcacctacgtgaagaatggtacctcgtttgacatccactatggctcgggcagcctctccgggtacctgagccaggacactgtgtcggtgccctgccagtcagcgtcgtcagcctctgccctgggcggtgtcaaagtggagaggcaggtctttggggaggccaccaagcagccaggcatcaccttcatcgcagccaagttcgatggcatcctgggcatggcctacccccgcatctccgtcaacaacgtgctgcccgtcttcgacaacctgatgcagcagaagctggtggaccagaacatcttctccttctacctgagcagggacccagatgcgcagcctgggggtgagctgatgctgggtggcacagactccaagtattacaagggttctctgtcctacctgaatgtcacccgcaaggcctactggcaggtccacctggaccaggtggaggtggccagcgggctgaccctgtgcaaggagggctgtgaggccattgtggacacaggcacttccctcatggtgggcccggtggatgaggtgcgcgagctgcagaaggccatcggggccgtgccgctgattcagggcgagtacatgatcccctgtgagaaggtgtccaccctgcccgcgatcacactgaagctgggaggcaaaggctacaagctgtccccagaggactacacgctcaaggtgtcgcaggccgggaagaccctctgcctgagcggcttcatgggcatggacatcccgccacccagcgggccactctggatcctgggcgacgtcttcatcggccgctactacactgtgtttgaccgtgacaacaacagggtgggcttcgccgaggctgcccgcctctagttcccaaggcgtccgcgcgccagcacagaaacagaggagagtcccagagcaggaggcccctggcccagcggcccctcccacacacacccacacactcgcccgcccactgtcctgggcgccctggaagccggcggcccaagcccgacttgctgttttgttctgtggttttcccctccctgggttcagaaatgctgcctgcctgtctgtctctccatctgtttggtgggggtagagctgatccagagcacagatctgtttcgtgcattggaagaccccacccaagcttggcagccgagctcgtgtatcctggggctcccttcatctccagggagtcccctccccggccctaccagcgcccgctgggctgagcccctaccccacaccaggccgtcctcccgggccctcccttggaaacctgccctgcctgagggcccctctgcccagcttgggcccagctgggctctgccaccctacctgttcagtgtcccgggcccgttgaggatgaggccgctagaggcctgaggatgagctggaaggagtgagaggggacaaaacccaccttgttggagcctgcagggtggtgctgggactgagccagtcccaggggcatgtattggcctggaggtggggttgggattgggggctggtgccagccttcctctgcagctgacctctgttgtcctccccttgggcggctgagagccccagctgacatggaaatacagttgttggcctccggcctcccctcaaaaaaaaaacacaaaanaacannacaacacannacnacnaaacaacaa

SEQ ID NO: 76242 - DNA, 2044 bp, Homo sapiens
ggccgcgcccacgtgaccggtccgggtgcaaacacgcgggtcagctgatccggcccaactgcggcgtcatcccggctataagcgcacggcctcggcgaccctctccgacccggccgccgccgccatgcagccctccagccttctgccgctcgccctctgcctgctggctgcacccgcctccgcgctcgtcaggatcccgctgcacaagttcacgtccatccgccggaccatgtcggaggttgggggctctgtggaggacctgattgccaaaggccccgtctcaaagtactcccaggcggtgccagccgtgaccgaggggcccattcccgaggtgctcaagaactacatggacgcccagtactacggggagattggcatcgggacgcccccccagtgcttcacagtcgtcttcgacacgggctcctccaacctgtgggtcccctccatccactgcaaactgctggacatcgcttgctggatccaccacaagtacaacagcgacaagtccagcacctacgtgaagaatggtacctcgtttgacatccactatggctcgggcagcctctccgggtacctgagccaggacactgtgtcggtgccctgccagtcagcgtcgtcagcctctgccctgggcggtgtcaaagtggagaggcaggtctttggggaggccaccaagcagccaggcatcaccttcatcgcagccaagttcgatggcatcctgggcatggcctacccccgcatctccgtcaacaacgtgctgcccgtcttcgacaacctgatgcagcagaagctggtggaccagaacatcttctccttctacctgagcagggacccagatgcgcagcctgggggtgagctgatgctgggtggcacagactccaagtattacaagggttctctgtcctacctgaatgtcacccgcaaggcctactggcaggtccacctggaccaggtggaggtggccagcgggctgaccctgtgcaaggagggctgtgaggccattgtggacacaggcacttccctcatggtgggcccggtggatgaggtgcgcgagctgcagaaggccatcggggccgtgccgctgattcagggcgagtacatgatcccctgtgagaaggtgtccaccctgcccgcgatcacactgaagctgggaggcaaaggctacaagctgtccccagaggactacacgctcaaggtgtcgcaggccgggaagaccctctgcctgagcggcttcatgggcatggacatcccgccacccagcgggccactctggatcctgggcgacgtcttcatcggccgctactacactgtgtttgaccgtgacaacaacagggtgggcttcgccgaggctgcccgcctctagttcccaaggcgtccgcgcgccagcacagaaacagaggagagtcccagagcaggaggcccctggcccagcggcccctcccacacacacccacacactcgcccgcccactgtcctgggcgccctggaagccggcggcccaagcccgacttgctgttttgttctgtggttttcccctccctgggttcagaaatgctgcctgcctgtctgtctctccatctgtttggtgggggtagagctgatccagagcacagatctgtttcgtgcattggaagaccccacccaagcttggcagccgagctcgtgtatcctggggctcccttcatctccagggagtcccctccccggccctaccagcgcccgctgggctgagcccctaccccacaccaggccgtcctcccgggccctcccttggaaacctgccctgcctgagggcccctctgcccagcttgggcccagctgggctctgccaccctacctgttcagtgtcccgggcccgttgaggatgaggtgagctgaggtgagctgaggtggagggggaaaccacctgtggactgggggtggggacccgggtttgcgggggtgatgggggaccccgcgactgccctggggcgccgggagggcgcccaaaaagggggttggggccatgggttagggggtctctggctggtttgtttccttctgc

SEQ ID NO: 76243 - DNA, 2129 bp, Homo sapiens
tcgcttcctgggtttagaactcaggaccccgatctcagtctggagctccctcctgcaccctggctggcggtgtgctgggtgacaggactctggaggggtaccctgagtgcagctgtcggaggaggcagggcggtggggggggcagcacagaagcctctaaggccccaggtgcagtcctggacctcgtggagccgcatggagtgaggagaggatcccgctgcacaagttcacgtccatccgccggaccatgtcggaggttgggggctctgtggaggacctgattgccaaaggccccgtctcaaagtactcccaggcggtgccagccgtgaccgaggggcccattcccgaggtgctcaagaactacatggacgcccagtactacggggagattggcatcgggacgcccccccagtgcttcacagtcgtcttcgacacgggctcctccaacctgtgggtcccctccatccactgcaaactgctggacatcgcttgctggatccaccacaagtacaacagcgacaagtccagcacctacgtgaagaatggtacctcgtttgacatccactatggctcgggcagcctctccgggtacctgagccaggacactgtgtcggtgccctgccagtcagcgtcgtcagcctctgccctgggcggtgtcaaagtggagaggcaggtctttggggaggccaccaagcagccaggcatcaccttcatcgcagccaagttcgatggcatcctgggcatggcctacccccgcatctccgtcaacaacgtgctgcccgtcttcgacaacctgatgcagcagaagctggtggaccagaacatcttctccttctacctgagcagggacccagatgcgcagcctgggggtgagctgatgctgggtggcacagactccaagtattacaagggttctctgtcctacctgaatgtcacccgcaaggcctactggcaggtccacctggaccaggtggaggtggccagcgggctgaccctgtgcaaggagggctgtgaggccattgtggacacaggcacttccctcatggtgggcccggtggatgaggtgcgcgagctgcagaaggccatcggggccgtgccgctgattcagggcgagtacatgatcccctgtgagaaggtgtccaccctgcccgcgatcacactgaagctgggaggcaaaggctacaagctgtccccagaggactacacgctcaaggtgtcgcaggccgggaagaccctctgcctgagcggcttcatgggcatggacatcccgccacccagcgggccactctggatcctgggcgacgtcttcatcggccgctactacactgtgtttgaccgtgacaacaacagggtgggcttcgccgaggctgcccgcctctagttcccaaggcgtccgcgcgccagcacagaaacagaggagagtcccagagcaggaggcccctggcccagcggcccctcccacacacacccacacactcgcccgcccactgtcctgggcgccctggaagccggcggcccaagcccgacttgctgttttgttctgtggttttcccctccctgggttcagaaatgctgcctgcctgtctgtctctccatctgtttggtgggggtagagctgatccagagcacagatctgtttcgtgcattggaagaccccacccaagcttggcagccgagctcgtgtatcctggggctcccttcatctccagggagtcccctccccggccctaccagcgcccgctgggctgagcccctaccccacaccaggccgtcctcccgggccctcccttggaaacctgccctgcctgagggcccctctgcccagcttgggcccagctgggctctgccaccctacctgttcagtgtcccgggcccgttgaggatgaggccgctagaggcctgaggatgagctggaaggagtgagaggggacaaaacccaccttgttggagcctgcagggtggtgctgggactgagccagtcccaggggcatgtattggcctggaggtggggttgggattgggggctggtgccagccttcctctgcagctgacctctgttgtcctccccttgggcggctgagagccccagctgacatggaaatacagttgttggcctccggcctcccctc

SEQ ID NO: 76244 - DNA, 1909 bp, Homo sapiens
tggtgactctgtaggatccccggcagcccccgcaagacggggggctctgtggaggacctgattgccaaaggccccgtctcaaagtactcccaggcggtgccagccgtgaccgaggggcccattcccgaggtgctcaagaactacatggacgcccagtactacggggagattggcatcgggacgcccccccagtgcttcacagtcgtcttcgacacgggctcctccaacctgtgggtcccctccatccactgcaaactgctggacatcgcttgctggatccaccacaagtacaacagcgacaagtccagcacctacgtgaagaatggtacctcgtttgacatccactatggctcgggcagcctctccgggtacctgagccaggacactgtgtcggtgccctgccagtcagcgtcgtcagcctctgccctgggcggtgtcaaagtggagaggcaggtctttggggaggccaccaagcagccaggcatcaccttcatcgcagccaagttcgatggcatcctgggcatggcctacccccgcatctccgtcaacaacgtgctgcccgtcttcgacaacctgatgcagcagaagctggtggaccagaacatcttctccttctacctgagcagggacccagatgcgcagcctgggggtgagctgatgctgggtggcacagactccaagtattacaagggttctctgtcctacctgaatgtcacccgcaaggcctactggcaggtccacctggaccaggtggaggtggccagcgggctgaccctgtgcaaggagggctgtgaggccattgtggacacaggcacttccctcatggtgggcccggtggatgaggtgcgcgagctgcagaaggccatcggggccgtgccgctgattcagggcgagtacatgatcccctgtgagaaggtgtccaccctgcccgcgatcacactgaagctgggaggcaaaggctacaagctgtccccagaggactacacgctcaaggtgtcgcaggccgggaagaccctctgcctgagcggcttcatgggcatggacatcccgccacccagcgggccactctggatcctgggcgacgtcttcatcggccgctactacactgtgtttgaccgtgacaacaacagggtgggcttcgccgaggctgcccgcctctagttcccaaggcgtccgcgcgccagcacagaaacagaggagagtcccagagcaggaggcccctggcccagcggcccctcccacacacacccacacactcgcccgcccactgtcctgggcgccctggaagccggcggcccaagcccgacttgctgttttgttctgtggttttcccctccctgggttcagaaatgctgcctgcctgtctgtctctccatctgtttggtgggggtagagctgatccagagcacagatctgtttcgtgcattggaagaccccacccaagcttggcagccgagctcgtgtatcctggggctcccttcatctccagggagtcccctccccggccctaccagcgcccgctgggctgagcccctaccccacaccaggccgtcctcccgggccctcccttggaaacctgccctgcctgagggcccctctgcccagcttgggcccagctgggctctgccaccctacctgttcagtgtcccgggcccgttgaggatgaggccgctagaggcctgaggatgagctggaaggagtgagaggggacaaaacccaccttgttggagcctgcagggtggtgctgggactgagccagtcccaggggcatgtattggcctggaggtggggttgggattgggggctggtgccagccttcctctgcagctgacctctgttgtcctccccttgggcggctgagagccccagctgacatggaaatacagttgttggcctccggcctcccctc

SEQ ID NO: 76245 - DNA, 1790 bp, Homo sapiens
ggccgcgcccacgtgaccggtccgggtgcaaacacgcgggtcagctgatccggcccaactgcggcgtcatcccggctataagcgcacggcctcggcgaccctctccgacccggccgccgccgccatgcagccctccagccttctgccgctcgccctctgcctgctggctgcacccgcctccgcgctcgtcaggatcccgctgcacaagttcacgtccatccgccggaccatgtcggaggttgggggctctgtggaggacctgattgccaaaggccccgtctcaaagtactcccaggcggtgccagccgtgaccgaggggcccattcccgaggtgctcaagaactacatggacgcccagtactacggggagattggcatcgggacgcccccccagtgcttcacagtcgtcttcgacacgggctcctccaacctgtgggtcccctccatccactgcaaactgctggacatcgcttgctggatccaccacaagtacaacagcgacaagtccagcacctacgtgaagaatggtacctcgtttgacatccactatggctcgggcagcctctccgggtacctgagccaggacactgtgtcggtgccctgccagtcagcgtcgtcagcctctgccctgggcggtgtcaaagtggagaggcaggtctttggggaggccaccaagcagccaggcatcaccttcatcgcagccaagttcgatggcatcctgggcatggcctacccccgcatctccgtcaacaacgtgctgcccgtcttcgacaacctgatgcagcagaagctggtggaccagaacatcttctccttctacctgagcagggacccagatgcgcagcctgggggtgagctgatgctgggtggcacagactccaagtattacaagggttctctgtcctacctgaatgtcacccgcaaggcctactggcaggtccacctggaccaggtggaggtggccagcgggctgaccctgtgcaaggagggctgtgaggccattgtggacacaggcacttccctcatggtgggcccggtggatgaggtgcgcgagctgcagaaggccatcggggccgtgccgctgattcagggcgagtacatgatcccctgtgagaaggtgtccaccctgcccgcgatcacactgaagctgggaggcaaaggctacaagctgtccccagaggactacacgctcaaggtgtcgcaggccgggaagaccctctgcctgagcggcttcatgggcatggacatcccgccacccagcgggccactctggatcctgggcgacgtcttcatcggccgctactacactgtgtttgaccgtgacaacaacagggtgggcttcgccgaggctgcccgcctctagttcccaaggcgtccgcgcgccagcacagaaacagaggagagtcccagagcaggaggcccctggcccagcggcccctcccacacacacccacacactcgcccgcccactgtcctgggcgccctggaagccggcggcccaagcccgacttgctgttttgttctgtggttttcccctccctgggttcagaaatgctgcctgcctgtctgtctctccatctgtttggtgggggtagagctgatccagagcacagatctgtttcgtgcattggaagaccccacccaagcttggcagccgagctcgtgtatcctggggctcccttcatctccagggagtcccctccccggccctaccagcgcccgctgggctgagcccctaccccacggccagccatgcactccggccagccattgaataccggcagccatgc

SEQ ID NO: 76246 - DNA, 1902 bp, Homo sapiens
ggccgcgcccacgtgaccggtccgggtgcaaacacgcgggtcagctgatccggcccaactgcggcgtcatcccggctataagcgcacggcctcggcgaccctctccgacccggccgccgccgccatgcagccctccagccttctgccgctcgccctctgcctgctggctgcacccgcctccgcgctcgtcaggatcccgctgcacaagttcacgtccatccgccggaccatgtcggaggttgggggctctgtggaggacctgattgccaaaggccccgtctcaaagtactcccaggcggtgccagccgtgaccgaggggcccattcccgaggtgctcaagaactacatggacgcccagtactacggggagattggcatcgggacgcccccccagtgcttcacagtcgtcttcgacacgggctcctccaacctgtgggtcccctccatccactgcaaactgctggacatcgcttgctggatccaccacaagtacaacagcgacaagtccagcacctacgtgaagaatggtacctcgtttgacatccactatggctcgggcagcctctccgggtacctgagccaggacactgtgtcggtgccctgccagtcagcgtcgtcagcctctgccctgggcggtgtcaaagtggagaggcaggtctttggggaggccaccaagcagccaggcatcaccttcatcgcagccaagttcgatggcatcctgggcatggcctacccccgcatctccgtcaacaacgtgctgcccgtcttcgacaacctgatgcagcagaagctggtggaccagaacatcttctccttctacctgagcagggacccagatgcgcagcctgggggtgagctgatgctgggtggcacagactccaagtattacaagggttctctgtcctacctgaatgtcacccgcaaggcctactggcaggtccacctggaccaggtggaggtggccagcgggctgaccctgtgcaaggagggctgtgaggccattgtggacacaggcacttccctcatggtgggcccggtggatgaggtgcgcgagctgcagaaggccatcggggccgtgccgctgattcagggcgagtacatgatcccctgtgagaaggtgtccaccctgcccgcgatcacactgaagctgggaggcaaaggctacaagctgtccccagaggactacacgctcaaggtgtcgcaggccgggaagaccctctgcctgagcggcttcatgggcatggacatcccgccacccagcgggccactctggatcctgggcgacgtcttcatcggccgctactacactgtgtttgaccgtgacaacaacagggtgggcttcgccgaggctgcccgcctctagttcccaaggcgtccgcgcgccagcacagaaacagaggagagtcccagagcaggaggcccctggcccagcggcccctcccacacacacccacacactcgcccgcccactgtcctgggcgccctggaagccggcggcccaagcccgacttgctgttttgttctgtggttttcccctccctgggttcagaaatgctgcctgcctgtctgtctctccatctgtttggtgggggtagagctgatccagagcacagatctgtttcgtgcattggaagaccccacccaagcttggcagccgagctcgtgtatcctggggctcccttcatctccagggagtcccctccccggccctaccagcgcccgctgggctgagcccctaccccaccaagctctgcggaaatcaacaggcccagagcacttggagggaggaagaaagggagcggcgtcaggctatgacaggtctgctacgcaaaacatttttcaggtaaaatagtagagatgttgtcttgcaaaacaaacaacaaaaacaagtaaaaaaccaac

SEQ ID NO: 76247 - DNA, 1968 bp, Homo sapiens
ggccgcgcccacgtgaccggtccgggtgcaaacacgcgggtcagctgatccggcccaactgcggcgtcatcccggctataagcgcacggcctcggcgaccctctccgacccggccgccgccgccatgcagccctccagccttctgccgctcgccctctgcctgctggctgcacccgcctccgcgctcgtcaggatcccgctgcacaagttcacgtccatccgccggaccatgtcggaggttgggggctctgtggaggacctgattgccaaaggccccgtctcaaagtactcccaggcggtgccagccgtgaccgaggggcccattcccgaggtgctcaagaactacatggacgcccagtactacggggagattggcatcgggacgcccccccagtgcttcacagtcgtcttcgacacgggctcctccaacctgtgggtcccctccatccactgcaaactgctggacatcgcttgctggatccaccacaagtacaacagcgacaagtccagcacctacgtgaagaatggtacctcgtttgacatccactatggctcgggcagcctctccgggtacctgagccaggacactgtgtcggtgccctgccagtcagcgtcgtcagcctctgccctgggcggtgtcaaagtggagaggcaggtctttggggaggccaccaagcagccaggcatcaccttcatcgcagccaagttcgatggcatcctgggcatggcctacccccgcatctccgtcaacaacgtgctgcccgtcttcgacaacctgatgcagcagaagctggtggaccagaacatcttctccttctacctgagcagggacccagatgcgcagcctgggggtgagctgatgctgggtggcacagactccaagtattacaagggttctctgtcctacctgaatgtcacccgcaaggcctactggcaggtccacctggaccaggtggaggtggccagcgggctgaccctgtgcaaggagggctgtgaggccattgtggacacaggcacttccctcatggtgggcccggtggatgaggtgcgcgagctgcagaaggccatcggggccgtgccgctgattcagggcgagtacatgatcccctgtgagaaggtgtccaccctgcccgcgatcacactgaagctgggaggcaaaggctacaagctgtccccagaggactacacgctcaaggtgtcgcaggccgggaagaccctctgcctgagcggcttcatgggcatggacatcccgccacccagcgggccactctggatcctgggcgacgtcttcatcggccgctactacactgtgtttgaccgtgacaacaacagggtgggcttcgccgaggctgcccgcctctagttcccaaggcgtccgcgcgccagcacagaaacagaggagagtcccagagcaggaggcccctggcccagcggcccctcccacacacacccacacactcgcccgcccactgtcctgggcgccctggaagccggcggcccaagcccgacttgctgttttgttctgtggttttcccctccctgggttcagaaatgctgcctgcctgtctgtctctccatctgtttggtgggggtagagctgatccagagcacagatctgtttcgtgcattggaagaccccacccaagcttggcagccgagctcgtgtatcctggggctcccttcatctccagggagtccaggaggtcctcccggctacaggcggtggtgggcctaccagaacaggcgtctccgggactaccttggacctgcgtgctagggccttagcagtgggcagtgggccgcacctactgtaggccggcgtagatagccataagcgaacaccgacagagagcgaacccttggaggcagggggaacgcaggattaccatgggggtatacgcacccagacagcagaagagacatcagtggcaccaaaggagcacgcactatgtcctctggacgaagacg

SEQ ID NO: 76248 - DNA, 2077 bp, Homo sapiens
ggccgcgcccacgtgaccggtccgggtgcaaacacgcgggtcagctgatccggcccaactgcggcgtcatcccggctataagcgcacggcctcggcgaccctctccgacccggccgccgccgccatgcagccctccagccttctgccgctcgccctctgcctgctggctgcacccgcctccgcgctcgtcaggatcccgctgcacaagttcacgtccatccgccggaccatgtcggaggttgggggctctgtggaggacctgattgccaaaggccccgtctcaaagtactcccaggcggtgccagccgtgaccgaggggcccattcccgaggtgctcaagaactacatggacccccccagtgcttcacagtcgtcttcgacacgggctcctccaacctgtgggtcccctccatccactgcaaactgctggacatcgcttgctggatccaccacaagtacaacagcgacaagtccagcacctacgtgaagaatggtacctcgtttgacatccactatggctcgggcagcctctccgggtacctgagccaggacactgtgtcggtgccctgccagtcagcgtcgtcagcctctgccctgggcggtgtcaaagtggagaggcaggtctttggggaggccaccaagcagccaggcatcaccttcatcgcagccaagttcgatggcatcctgggcatggcctacccccgcatctccgtcaacaacgtgctgcccgtcttcgacaacctgatgcagcagaagctggtggaccagaacatcttctccttctacctgagcagggacccagatgcgcagcctgggggtgagctgatgctgggtggcacagactccaagtattacaagggttctctgtcctacctgaatgtcacccgcaaggcctactggcaggtccacctggaccaggtggaggtggccagcgggctgaccctgtgcaaggagggctgtgaggccattgtggacacaggcacttccctcatggtgggcccggtggatgaggtgcgcgagctgcagaaggccatcggggccgtgccgctgattcagggcgagtacatgatcccctgtgagaaggtgtccaccctgcccgcgatcacactgaagctgggaggcaaaggctacaagctgtccccagaggactacacgctcaaggtgtcgcaggccgggaagaccctctgcctgagcggcttcatgggcatggacatcccgccacccagcgggccactctggatcctgggcgacgtcttcatcggccgctactacactgtgtttgaccgtgacaacaacagggtgggcttcgccgaggctgcccgcctctagttcccaaggcgtccgcgcgccagcacagaaacagaggagagtcccagagcaggaggcccctggcccagcggcccctcccacacacacccacacactcgcccgcccactgtcctgggcgccctggaagccggcggcccaagcccgacttgctgttttgttctgtggttttcccctccctgggttcagaaatgctgcctgcctgtctgtctctccatctgtttggtgggggtagagctgatccagagcacagatctgtttcgtgcattggaagaccccacccaagcttggcagccgagctcgtgtatcctggggctcccttcatctccagggagtcccctccccggccctaccagcgcccgctgggctgagcccctaccccacaccaggccgtcctcccgggccctcccttggaaacctgccctgcctgagggcccctctgcccagcttgggcccagctgggctctgccaccctacctgttcagtgtcccgggcccgttgaggatgaggccgctagaggcctgaggatgagctggaaggagtgagaggggacaaaacccaccttgttggagcctgcagggtggtgctgggactgagccagtcccaggggcatgtattggcctggaggtggggttgggattgggggctggtgccagccttcctctgcagctgacctctgttgtcctccccttgggcggctgagagccccagctgacatggaaatacagttgttggcctccggcctcccctc

SEQ ID NO: 76249 - DNA, 1653 bp, Homo sapiens
  misc_feature (12)..(12): n is a, c, g, or t
tgctgtgtttgngtgttgtacttgtggtggatccagcaagcgacgtccagcagtttgcagtgaagaatggtacctcgtttgacatccactatggctcgggcagcctctccgggtacctgagccaggacactgtgtcggtgccctgccagtcagcgtcgtcagcctctgccctgggcggtgtcaaagtggagaggcaggtctttggggaggccaccaagcagccaggcatcaccttcatcgcagccaagttcgatggcatcctgggcatggcctacccccgcatctccgtcaacaacgtgctgcccgtcttcgacaacctgatgcagcagaagctggtggaccagaacatcttctccttctacctgagcagggacccagatgcgcagcctgggggtgagctgatgctgggtggcacagactccaagtattacaagggttctctgtcctacctgaatgtcacccgcaaggcctactggcaggtccacctggaccaggtggaggtggccagcgggctgaccctgtgcaaggagggctgtgaggccattgtggacacaggcacttccctcatggtgggcccggtggatgaggtgcgcgagctgcagaaggccatcggggccgtgccgctgattcagggcgagtacatgatcccctgtgagaaggtgtccaccctgcccgcgatcacactgaagctgggaggcaaaggctacaagctgtccccagaggactacacgctcaaggtgtcgcaggccgggaagaccctctgcctgagcggcttcatgggcatggacatcccgccacccagcgggccactctggatcctgggcgacgtcttcatcggccgctactacactgtgtttgaccgtgacaacaacagggtgggcttcgccgaggctgcccgcctctagttcccaaggcgtccgcgcgccagcacagaaacagaggagagtcccagagcaggaggcccctggcccagcggcccctcccacacacacccacacactcgcccgcccactgtcctgggcgccctggaagccggcggcccaagcccgacttgctgttttgttctgtggttttcccctccctgggttcagaaatgctgcctgcctgtctgtctctccatctgtttggtgggggtagagctgatccagagcacagatctgtttcgtgcattggaagaccccacccaagcttggcagccgagctcgtgtatcctggggctcccttcatctccagggagtcccctccccggccctaccagcgcccgctgggctgagcccctaccccacaccaggccgtcctcccgggccctcccttggaaacctgccctgcctgagggcccctctgcccagcttgggcccagctgggctctgccaccctacctgttcagtgtcccgggcccgttgaggatgaggccgctagaggcctgaggatgagctggaaggagtgagaggggacaaaacccaccttgttggagcctgcagggtggtgctgggactgagccagtcccaggggcatgtattggcctggaggtggggttgggattgggggctggtgccagccttcctctgcagctgacctctgttgtcctccccttgggcggctgagagccccagctgacatggaaatacagttgttggcctccggcctcccctc

SEQ ID NO: 76250 - DNA, 1905 bp, Homo sapiens
  misc_feature (1874)..(1874): n is a, c, g, or t
  misc_feature (1879)..(1880): n is a, c, g, or t
  misc_feature (1889)..(1890): n is a, c, g, or t
  misc_feature (1893)..(1893): n is a, c, g, or t
  misc_feature (1896)..(1896): n is a, c, g, or t
ggccgcgcccacgtgaccggtccgggtgcaaacacgcgggtcagctgatccggcccaactgcggcgtcatcccggctataagcgcacggcctcggcgaccctctccgacccggccgccgccgccatgcagccctccagccttctgccgctcgccctctgcctgctggctgcacccgcctccgcgctcgtcaggatcccgctgcacaagttcacgtccatccgccggaccatgtcggaggttgggggctctgtggaggacctgattgccaaaggccccgtctcaaagtactcccaggcggtgccagccgtgaccgaggggcccattcccgaggtgctcaagaactacatggacgcccagtactacggggagattggcatcgggacgcccccccagtgcttcacagtcgtcttcgacacgggctcctccaacctgtgggtcccctccatccactgcaaactgctggacatcgcttgctggatccaccacaagtacaacagcgacaagtccagcacctacgtgaagaatggtacctcgtttgacatccactatggctcgggcagcctctccgggtacctgagccaggacactgtgtcggtgccctgccagtcagcgtcgtcagcctctgccctgggcggtgtcaaagtggagaggcaggtctttggggaggccaccaagcagccaggcatcaccttcatcgcagccaagttcgatggcatcctgggcatggcctacccccgcatctccgtcaacaacgtgctgcccgtcttcgacaacctgatgcagcagaagctggtggaccagaacatcttctccttctacctgagcagggacccagatgcgcagcctgggggtgagctgatgctgggtggcacagactccaagtattacaagggttctctgtcctacctgaatgtcacccgcaaggcctactggcaggtccacctggaccaggtggaggtggccagcgggctgaccctgtgcaaggagggctgtgaggccattgtggacacaggcacttccctcatggtgggcccggtggatgaggtgcgcgagctgcagaaggccatcggggccgtgccgctgattcagggcgagtacatgatcccctgtgagaaggtgtccaccctgcccgcgatcacactgaagctgggaggcaaaggctacaagctgtccccagaggactacacgctcaaggtgtcgcaggccgggaagaccctctgcctgagcggcttcatgggcatggacatcccgccacccagcgggccactctggatcctgggcgacgtcttcatcggccgctactacactgtgtttgaccgtgacaacaacagggtgggcttcgccgaggctgcccgcctctagttcccaaggcgtccgcgcgccagcacagaaacagaggagagtcccagagcaggaggcccctggcccagcggcccctcccacacacacccacacactcgcccgcccactgtcctgggcgccctggaagccggcggcccaagcccgacttgctgttttgttctgtggttttcccctccctgggctgcccagcttgggcccagctgggctctgccaccctacctgttcagtgtcccgggcccgttgaggatgaggccgctagaggcctgaggatgagctggaaggagtgagaggggacaaaacccaccttgttggagcctgcagggtggtgctgggactgagccagtcccaggggcatgtattggcctggaggtggggttgggattgggggctggtgccagccttcctctgcagctgacctctgttgtcctccccttgggcggctgagagccccagctgacatggaaatacagttgttggcctccggcctcccctcaaaaaaaaaacacaaaanaacannacaacacannacnacnaaacaacaa

SEQ ID NO: 76251 - DNA, 1823 bp, Homo sapiens
gctcggtaccccaggcgcttgttgggaggctgagaatctcctcgttgcttagctgatgttctggggtttttcctttctccctcatctgtgttatagttctctgtcttttcatttttataggtttttggtgtggtgacctttttacagatgatagatctgtagcctctcttagttctggtgtctgccccccttgtggcagagatcagtatgggggcttgctgtgggcttcctgatgggaggagctgatgcccacccactggtaggtggagctgattctaatccctctggtgggtggtgcttagtcccagtgccctgccagtcagcgtcgtcagcctctgccctgggcggtgtcaaagtggagaggcaggtctttggggaggccaccaagcagccaggcatcaccttcatcgcagccaagttcgatggcatcctgggcatggcctacccccgcatctccgtcaacaacgtgctgcccgtcttcgacaacctgatgcagcagaagctggtggaccagaacatcttctccttctacctgagcagggacccagatgcgcagcctgggggtgagctgatgctgggtggcacagactccaagtattacaagggttctctgtcctacctgaatgtcacccgcaaggcctactggcaggtccacctggaccaggtggaggtggccagcgggctgaccctgtgcaaggagggctgtgaggccattgtggacacaggcacttccctcatggtgggcccggtggatgaggtgcgcgagctgcagaaggccatcggggccgtgccgctgattcagggcgagtacatgatcccctgtgagaaggtgtccaccctgcccgcgatcacactgaagctgggaggcaaaggctacaagctgtccccagaggactacacgctcaaggtgtcgcaggccgggaagaccctctgcctgagcggcttcatgggcatggacatcccgccacccagcgggccactctggatcctgggcgacgtcttcatcggccgctactacactgtgtttgaccgtgacaacaacagggtgggcttcgccgaggctgcccgcctctagttcccaaggcgtccgcgcgccagcacagaaacagaggagagtcccagagcaggaggcccctggcccagcggcccctcccacacacacccacacactcgcccgcccactgtcctgggcgccctggaagccggcggcccaagcccgacttgctgttttgttctgtggttttcccctccctgggttcagaaatgctgcctgcctgtctgtctctccatctgtttggtgggggtagagctgatccagagcacagatctgtttcgtgcattggaagaccccacccaagcttggcagccgagctcgtgtatcctggggctcccttcatctccagggagtcccctccccggccctaccagcgcccgctgggctgagcccctaccccacaccaggccgtcctcccgggccctcccttggaaacctgccctgcctgagggcccctctgcccagcttgggcccagctgggctctgccaccctacctgttcagtgtcccgggcccgttgaggatgaggccgctagaggcctgaggatgagctggaaggagtgagaggggacaaaacccaccttgttggagcctgcagggtggtgctgggactgagccagtcccaggggcatgtattggcctggaggtggggttgggattgggggctggtgccagccttcctctgcagctgacctctgttgtcctccccttgggcggctgagagccccagctgacatggaaatacagttgttggcctccggcctcccctc

SEQ ID NO: 76252 - DNA, 1540 bp, Homo sapiens
ggccgcgcccacgtgaccggtccgggtgcaaacacgcgggtcagctgatccggcccaactgcggcgtcatcccggctataagcgcacggcctcggcgaccctctccgacccggccgccgccgccatgcagccctccagccttctgccgctcgccctctgcctgctggctgcacccgcctccgcgctcgtcaggatcccgctgcacaagttcacgtccatccgccggaccatgtcggaggttgggggctctgtggaggacctgattgccaaaggccccgtctcaaagtactcccaggcggtgccagccgtgaccgaggggcccattcccgaggtgctcaagaactacatggacgcccagtactacggggagattggcatcgggacgcccccccagtgcttcacagtcgtcttcgacacgggctcctccaacctgtgggtcccctccatccactgcaaactgctggacatcgcttgctggatccaccacaagtacaacagcgacaagtccagcacctacgtgaagaatggtacctcgtttgacatccactatggctcgggcagcctctccgggtacctgagccaggacactgtgtcggtgccctgccagtcagcgtcgtcagcctctgccctgggcggtgtcaaagtggagaggcaggtctttggggaggccaccaagcagccaggcatcaccttcatcgcagccaagttcgatggcatcctgggcatggcctacccccgcatctccgtcaacaacgtgctgcccgtcttcgacaacctgatgcagcagaagctggtggaccagaacatcttctccttctacctgagcagggacccagatgcgcagcctgggggtgagctgatgctgggtggcacagactccaagtattacaagggttctctgtcctacctgaatgtcacccgcaaggcctactggcaggtccacctggaccaggtggaggtggccagcgggctgaccctgtgcaaggagggctgtgaggccattgtggacacaggcacttccctcatggtgggcccggtggatgaggtgcgcgagctgcagaaggccatcggggccgtgccgctgattcagggcgagtacatgatcccctgtgagaaggtgtccaccctgcccgcgatcacactgaagctgggaggcaaaggctacaagctgtccccagaggactacacgctcaaggtgtcgcaggccgggaagaccctctgcctgagcggcttcatgggcatggacatcccgccacccagcgggccactctggatcctgggcgacgtcttcatcggccgctactacactgtgtttgaccgtgacaacaacagggtgggcttcgccgaggctgcccgcctctagttcccaaggcgtccgcgcgccagcacagaaacagaggagagtcccagagcaggaggcccctggcccagcggcccctcccacacacacccacacactcgcccgcccactgtcctgggcgccctggaagccggcggcccaagcccgacttgcgaccagcgtaaagatcctctagagcag

SEQ ID NO: 76253 - DNA, 1527 bp, Homo sapiens
ggccgcgcccacgtgaccggtccgggtgcaaacacgcgggtcagctgatccggcccaactgcggcgtcatcccggctataagcgcacggcctcggcgaccctctccgacccggccgccgccgccatgcagccctccagccttctgccgctcgccctctgcctgctggctgcacccgcctccgcgctcgtcaggatcccgctgcacaagttcacgtccatccgccggaccatgtcggaggttgggggctctgtggaggacctgattgccaaaggccccgtctcaaagtactcccaggcggtgccagccgtgaccgaggggcccattcccgaggtgctcaagaactacatggacgcccagtactacggggagattggcatcgggacgcccccccagtgcttcacagtcgtcttcgacacgggctcctccaacctgtgggtcccctccatccactgcaaactgctggacatcgcttgctggatccaccacaagtacaacagcgacaagtccagcacctacgtgaagaatggtacctcgtttgacatccactatggctcgggcagcctctccgggtacctgagccaggacactgtgtcggtgccctgccagtcagcgtcgtcagcctctgccctgggcggtgtcaaagtggagaggcaggtctttggggaggccaccaagcagccaggcatcaccttcatcgcagccaagttcgatggcatcctgggcatggcctacccccgcatctccgtcaacaacgtgctgcccgtcttcgacaacctgatgcagcagaagctggtggaccagaacatcttctccttctacctgagcagggacccagatgcgcagcctgggggtgagctgatgctgggtggcacagactccaagtattacaagggttctctgtcctacctgaatgtcacccgcaaggcctactggcaggtccacctggaccaggtggaggtggccagcgggctgaccctgtgcaaggagggctgtgaggccattgtggacacaggcacttccctcatggtgggcccggtggatgaggtgcgcgagctgcagaaggccatcggggccgtgccgctgattcagggcgagtacatgatcccctgtgagaaggtgtccaccctgcccgcgatcacactgaagctgggaggcaaaggctacaagctgtccccagaggactacacgctcaaggtgtcgcaggccgggaagaccctctgcctgagcggcttcatgggcatggacatcccgccacccagcgggccactctggatcctgggcgacgtcttcatcggccgctactacactgtgtttgaccgtgacaacaacagggtgggcttcgccgaggctgcccgcctctagttcccaaggcgtccgcgcgccagcacagaaacagaggagagtcccagagcaggaggcccctggcccagcggcccctcccacacacacccacacatcttccagctgttttccggcaaagatcacctctgctggttaggatgctgtcgggaccgagctcgattgta

SEQ ID NO: 76254 - DNA, 1463 bp, Homo sapiens
ggccgcgcccacgtgaccggtccgggtgcaaacacgcgggtcagctgatccggcccaactgcggcgtcatcccggctataagcgcacggcctcggcgaccctctccgacccggccgccgccgccatgcagccctccagccttctgccgctcgccctctgcctgctggctgcacccgcctccgcgctcgtcaggatcccgctgcacaagttcacgtccatccgccggaccatgtcggaggttgggggctctgtggaggacctgattgccaaaggccccgtctcaaagtactcccaggcggtgccagccgtgaccgaggggcccattcccgaggtgctcaagaactacatggacgcccagtactacggggagattggcatcgggacgcccccccagtgcttcacagtcgtcttcgacacgggctcctccaacctgtgggtcccctccatccactgcaaactgctggacatcgcttgctggatccaccacaagtacaacagcgacaagtccagcacctacgtgaagaatggtacctcgtttgacatccactatggctcgggcagcctctccgggtacctgagccaggacactgtgtcggtgccctgccagtcagcgtcgtcagcctctgccctgggcggtgtcaaagtggagaggcaggtctttggggaggccaccaagcagccaggcatcaccttcatcgcagccaagttcgatggcatcctgggcatggcctacccccgcatctccgtcaacaacgtgctgcccgtcttcgacaacctgatgcagcagaagctggtggaccagaacatcttctccttctacctgagcagggacccagatgcgcagcctgggggtgagctgatgctgggtggcacagactccaagtattacaagggttctctgtcctacctgaatgtcacccgcaaggcctactggcaggtccacctggaccaggtggaggtggccagcgggctgaccctgtgcaaggagggctgtgaggccattgtggacacaggcacttccctcatggtgggcccggtggatgaggtgcgcgagctgcagaaggccatcggggccgtgccgctgattcagggcgagtacatgatcccctgtgagaaggtgtccaccctgcccgcgatcacactgaagctgggaggcaaaggctacaagctgtccccagaggactacacgctcaaggtgtcgcaggccgggaagaccctctgcctgagcggcttcatgggcatggacatcccgccacccagcgggccactctggatcctgggcgacgtcttcatcggccgctactacactgtgtttgaccgtgacaacaacagggtgggcttcgccgaggctgcccgcctctagttcccaaggcgtccgcgcgccagcacagaaacagaggagagtcccagagcaggaggccagttagcagctcgcccctgagttggggaacctctagaggcgg

SEQ ID NO: 76255 - DNA, 1508 bp, Homo sapiens
  misc_feature (12)..(12): n is a, c, g, or t
tgctgtgtttgngtgttgtacttgtggtggatccagcaagcgacgtccagcagtttgcagtggatggaggggacccacaggtttggaggagcccgtgtcgaagacgactgtgaagcactgggggggcgtcccgatgccaatctccacatccgtgctgcccgtcttcgacaacctgatgcagcagaagctggtggaccagaacatcttctccttctacctgagcagggacccagatgcgcagcctgggggtgagctgatgctgggtggcacagactccaagtattacaagggttctctgtcctacctgaatgtcacccgcaaggcctactggcaggtccacctggaccaggtggaggtggccagcgggctgaccctgtgcaaggagggctgtgaggccattgtggacacaggcacttccctcatggtgggcccggtggatgaggtgcgcgagctgcagaaggccatcggggccgtgccgctgattcagggcgagtacatgatcccctgtgagaaggtgtccaccctgcccgcgatcacactgaagctgggaggcaaaggctacaagctgtccccagaggactacacgctcaaggtgtcgcaggccgggaagaccctctgcctgagcggcttcatgggcatggacatcccgccacccagcgggccactctggatcctgggcgacgtcttcatcggccgctactacactgtgtttgaccgtgacaacaacagggtgggcttcgccgaggctgcccgcctctagttcccaaggcgtccgcgcgccagcacagaaacagaggagagtcccagagcaggaggcccctggcccagcggcccctcccacacacacccacacactcgcccgcccactgtcctgggcgccctggaagccggcggcccaagcccgacttgctgttttgttctgtggttttcccctccctgggttcagaaatgctgcctgcctgtctgtctctccatctgtttggtgggggtagagctgatccagagcacagatctgtttcgtgcattggaagaccccacccaagcttggcagccgagctcgtgtatcctggggctcccttcatctccagggagtcccctccccggccctaccagcgcccgctgggctgagcccctaccccacaccaggccgtcctcccgggccctcccttggaaacctgccctgcctgagggcccctctgcccagcttgggcccagctgggctctgccaccctacctgttcagtgtcccgggcccgttgaggatgaggccgctagaggcctgaggatgagctggaaggagtgagaggggacaaaacccaccttgttggagcctgcagggtggtgctgggactgagccagtcccaggggcatgtattggcctggaggtggggttgggattgggggctggtgccagccttcctctgcagctgacctctgttgtcctccccttgggcggctgagagccccagctgacatggaaatacagttgttggcctccggcctcccctc

SEQ ID NO: 76256 - DNA, 1324 bp, Homo sapiens
  misc_feature (29)..(29): n is a, c, g, or t
gaatatgtctagtagatgctggtgttaantcggacgaggcaggacccagatgcgcagcctgggggtgagctgatgctgggtggcacagactccaagtattacaagggttctctgtcctacctgaatgtcacccgcaaggcctactggcaggtccacctggaccaggtggaggtggccagcgggctgaccctgtgcaaggagggctgtgaggccattgtggacacaggcacttccctcatggtgggcccggtggatgaggtgcgcgagctgcagaaggccatcggggccgtgccgctgattcagggcgagtacatgatcccctgtgagaaggtgtccaccctgcccgcgatcacactgaagctgggaggcaaaggctacaagctgtccccagaggactacacgctcaaggtgtcgcaggccgggaagaccctctgcctgagcggcttcatgggcatggacatcccgccacccagcgggccactctggatcctgggcgacgtcttcatcggccgctactacactgtgtttgaccgtgacaacaacagggtgggcttcgccgaggctgcccgcctctagttcccaaggcgtccgcgcgccagcacagaaacagaggagagtcccagagcaggaggcccctggcccagcggcccctcccacacacacccacacactcgcccgcccactgtcctgggcgccctggaagccggcggcccaagcccgacttgctgttttgttctgtggttttcccctccctgggttcagaaatgctgcctgcctgtctgtctctccatctgtttggtgggggtagagctgatccagagcacagatctgtttcgtgcattggaagaccccacccaagcttggcagccgagctcgtgtatcctggggctcccttcatctccagggagtcccctccccggccctaccagcgcccgctgggctgagcccctaccccacaccaggccgtcctcccgggccctcccttggaaacctgccctgcctgagggcccctctgcccagcttgggcccagctgggctctgccaccctacctgttcagtgtcccgggcccgttgaggatgaggccgctagaggcctgaggatgagctggaaggagtgagaggggacaaaacccaccttgttggagcctgcagggtggtgctgggactgagccagtcccaggggcatgtattggcctggaggtggggttgggattgggggctggtgccagccttcctctgcagctgacctctgttgtcctccccttgggcggctgagagccccagctgacatggaaatacagttgttggcctccggcctcccctc

SEQ ID NO: 76257 - DNA, 1310 bp, Homo sapiens
tcatcagctcggtccatggttagcagaggacccagatgcgcagcctgggggtgagctgatgctgggtggcacagactccaagtattacaagggttctctgtcctacctgaatgtcacccgcaaggcctactggcaggtccacctggaccaggtggaggtggccagcgggctgaccctgtgcaaggagggctgtgaggccattgtggacacaggcacttccctcatggtgggcccggtggatgaggtgcgcgagctgcagaaggccatcggggccgtgccgctgattcagggcgagtacatgatcccctgtgagaaggtgtccaccctgcccgcgatcacactgaagctgggaggcaaaggctacaagctgtccccagaggactacacgctcaaggtgtcgcaggccgggaagaccctctgcctgagcggcttcatgggcatggacatcccgccacccagcgggccactctggatcctgggcgacgtcttcatcggccgctactacactgtgtttgaccgtgacaacaacagggtgggcttcgccgaggctgcccgcctctagttcccaaggcgtccgcgcgccagcacagaaacagaggagagtcccagagcaggaggcccctggcccagcggcccctcccacacacacccacacactcgcccgcccactgtcctgggcgccctggaagccggcggcccaagcccgacttgctgttttgttctgtggttttcccctccctgggttcagaaatgctgcctgcctgtctgtctctccatctgtttggtgggggtagagctgatccagagcacagatctgtttcgtgcattggaagaccccacccaagcttggcagccgagctcgtgtatcctggggctcccttcatctccagggagtcccctccccggccctaccagcgcccgctgggctgagcccctaccccacaccaggccgtcctcccgggccctcccttggaaacctgccctgcctgagggcccctctgcccagcttgggcccagctgggctctgccaccctacctgttcagtgtcccgggcccgttgaggatgaggccgctagaggcctgaggatgagctggaaggagtgagaggggacaaaacccaccttgttggagcctgcagggtggtgctgggactgagccagtcccaggggcatgtattggcctggaggtggggttgggattgggggctggtgccagccttcctctgcagctgacctctgttgtcctccccttgggcggctgagagccccagctgacatggaaatacagttgttggcctccggcctcccctc

SEQ ID NO: 76258 - DNA, 1164 bp, Homo sapiens
  misc_feature (1086)..(1086): n is a, c, g, or t
ggccgcgcccacgtgaccggtccgggtgcaaacacgcgggtcagctgatccggcccaactgcggcgtcatcccggctataagcgcacggcctcggcgaccctctccgacccggccgccgccgccatgcagccctccagccttctgccgctcgccctctgcctgctggctgcacccgcctccgcgctcgtcaggatcccgctgcacaagttcacgtccatccgccggaccatgtcggaggttgggggctctgtggaggacctgattgccaaaggccccgtctcaaagtactcccaggcggtgccagccgtgaccgaggggcccattcccgaggtgctcaagaactacatggacgcccagtactacggggagattggcatcgggacgcccccccagtgcttcacagtcgtcttcgacacgggctcctccaacctgtgggtcccctccatccactgcaaactgctggacatcgcttgctggatccaccacaagtacaacagcgacaagtccagcacctacgtgaagaatggtacctcgtttgacatccactatggctcgggcagcctctccgggtacctgagccaggacactgtgtcggtgccctgccagtcagcgtcgtcagcctctgccctgggcggtgtcaaagtggagaggcaggtctttggggaggccaccaagcagccaggcatcaccttcatcgcagccaagttcgatggcatcctgggcatggcctacccccgcatctccgtcaacaacgtgctgcccgtcttcgacaacctgatgcagcagaagctggtggaccagaacatcttctccttctacctgagcagggacccagatgcgcagcctgggggtgagctgatgctgggtggcacagactccaagtattacaagggttctctgtcctacctgaatgtcacccgcaaggcctactggcaggtccacctggaccaggtggaggtggccagcgggctgaccctgtgcaaggagggctgtgaggccattgtggacacaggcacttccctcatggtgggctgctgtttcatctgttcctgctgccgctggaatcgtggaggtaaagacttctnaaactgtttgaaatagccagataatacagccggccgaggttgagaccctggattcttggttctgtttcatgcaccact

SEQ ID NO: 76259 - DNA, 1080 bp, Homo sapiens
cggcgtcatcccggctataagcgcacggctcggcgaacctctccgtgccgctgattcagggcgagtacatgatcccctgtgagaaggtgtccaccctgcccgcgatcacactgaagctgggaggcaaaggctacaagctgtccccagaggactacacgctcaaggtgtcgcaggccgggaagaccctctgcctgagcggcttcatgggcatggacatcccgccacccagcgggccactctggatcctgggcgacgtcttcatcggccgctactacactgtgtttgaccgtgacaacaacagggtgggcttcgccgaggctgcccgcctctagttcccaaggcgtccgcgcgccagcacagaaacagaggagagtcccagagcaggaggcccctggcccagcggcccctcccacacacacccacacactcgcccgcccactgtcctgggcgccctggaagccggcggcccaagcccgacttgctgttttgttctgtggttttcccctccctgggttcagaaatgctgcctgcctgtctgtctctccatctgtttggtgggggtagagctgatccagagcacagatctgtttcgtgcattggaagaccccacccaagcttggcagccgagctcgtgtatcctggggctcccttcatctccagggagtcccctccccggccctaccagcgcccgctgggctgagcccctaccccacaccaggccgtcctcccgggccctcccttggaaacctgccctgcctgagggcccctctgcccagcttgggcccagctgggctctgccaccctacctgttcagtgtcccgggcccgttgaggatgaggccgctagaggcctgaggatgagctggaaggagtgagaggggacaaaacccaccttgttggagcctgcagggtggtgctgggactgagccagtcccaggggcatgtattggcctggaggtggggttgggattgggggctggtgccagccttcctctgcagctgacctctgttgtcctccccttgggcggctgagagccccagctgacatggaaatacagttgttggcctccggcctcccctc

SEQ ID NO: 76260 - DNA, 952 bp, Homo sapiens
ccccgggctgcaggaattcggcacggcacgctcaaggtgtcgcaggccgggaagaccctctgcctgagcggcttcatgggcatggacatcccgccacccagcgggccactctggatcctgggcgacgtcttcatcggccgctactacactgtgtttgaccgtgacaacaacagggtgggcttcgccgaggctgcccgcctctagttcccaaggcgtccgcgcgccagcacagaaacagaggagagtcccagagcaggaggcccctggcccagcggcccctcccacacacacccacacactcgcccgcccactgtcctgggcgccctggaagccggcggcccaagcccgacttgctgttttgttctgtggttttcccctccctgggttcagaaatgctgcctgcctgtctgtctctccatctgtttggtgggggtagagctgatccagagcacagatctgtttcgtgcattggaagaccccacccaagcttggcagccgagctcgtgtatcctggggctcccttcatctccagggagtcccctccccggccctaccagcgcccgctgggctgagcccctaccccacaccaggccgtcctcccgggccctcccttggaaacctgccctgcctgagggcccctctgcccagcttgggcccagctgggctctgccaccctacctgttcagtgtcccgggcccgttgaggatgaggccgctagaggcctgaggatgagctggaaggagtgagaggggacaaaacccaccttgttggagcctgcagggtggtgctgggactgagccagtcccaggggcatgtattggcctggaggtggggttgggattgggggctggtgccagccttcctctgcagctgacctctgttgtcctccccttgggcggctgagagccccagctgacatggaaatacagttgttggcctccggcctcccctc

SEQ ID NO: 76261 - DNA, 1004 bp, Homo sapiens
  misc_feature (19)..(19): n is a, c, g, or t
  misc_feature (33)..(33): n is a, c, g, or t
  misc_feature (54)..(54): n is a, c, g, or t
  misc_feature (71)..(71): n is a, c, g, or t
cgttcttaaggatagggtntcccggcctgcganaccttgagcgtgtagtctctngggacagcttgtagccntgcctcccagcttcagtgtgtcgcaggccgggaagaccctctgcctgagcggcttcatgggcatggacatcccgccacccagcgggccactctggatcctgggcgacgtcttcatcggccgctactacactgtgtttgaccgtgacaacaacagggtgggcttcgccgaggctgcccgcctctagttcccaaggcgtccgcgcgccagcacagaaacagaggagagtcccagagcaggaggcccctggcccagcggcccctcccacacacacccacacactcgcccgcccactgtcctgggcgccctggaagccggcggcccaagcccgacttgctgttttgttctgtggttttcccctccctgggttcagaaatgctgcctgcctgtctgtctctccatctgtttggtgggggtagagctgatccagagcacagatctgtttcgtgcattggaagaccccacccaagcttggcagccgagctcgtgtatcctggggctcccttcatctccagggagtcccctccccggccctaccagcgcccgctgggctgagcccctaccccacaccaggccgtcctcccgggccctcccttggaaacctgccctgcctgagggcccctctgcccagcttgggcccagctgggctctgccaccctacctgttcagtgtcccgggcccgttgaggatgaggccgctagaggcctgaggatgagctggaaggagtgagaggggacaaaacccaccttgttggagcctgcagggtggtgctgggactgagccagtcccaggggcatgtattggcctggaggtggggttgggattgggggctggtgccagccttcctctgcagctgacctctgttgtcctccccttgggcggctgagagccccagctgacatggaaatacagttgttggcctccggcctcccctc

SEQ ID NO: 76262 - DNA, 1104 bp, Homo sapiens
ggccgcgcccacgtgaccggtccgggtgcaaacacgcgggtcagctgatccggcccaactgcggcgtcatcccggctataagcgcacggcctcggcgaccctctccgacccggccgccgccgccatgcagccctccagccttctgccgctcgccctctgcctgctggctgcacccgcctccgcgctcgtcaggatcccgctgcacaagttcacgtccatccgccggaccatgtcggaggttgggggctctgtggaggacctgattgccaaaggccccgtctcaaagtactcccaggcggtgccagccgtgaccgaggggcccattcccgaggtgctcaagaactacatggacctagttcccaaggcgtccgcgcgccagcacagaaacagaggagagtcccagagcaggaggcccctggcccagcggcccctcccacacacacccacacactcgcccgcccactgtcctgggcgccctggaagccggcggcccaagcccgacttgctgttttgttctgtggttttcccctccctgggttcagaaatgctgcctgcctgtctgtctctccatctgtttggtgggggtagagctgatccagagcacagatctgtttcgtgcattggaagaccccacccaagcttggcagccgagctcgtgtatcctggggctcccttcatctccagggagtcccctccccggccctaccagcgcccgctgggctgagcccctaccccacaccaggccgtcctcccgggccctcccttggaaacctgccctgcctgagggcccctctgcccagcttgggcccagctgggctctgccaccctacctgttcagtgtcccgggcccgttgaggatgaggccgctagaggcctgaggatgagctggaaggagtgagaggggacaaaacccaccttgttggagcctgcagggtggtgctgggactgagccagtcccaggggcatgtattggcctggaggtggggttgggattgggggctggtgccagccttcctctgcagctgacctctgttgtcctccccttgggcggctgagagccccagctgacatggaaatacagttgttggcctccggcctcccctc

SEQ ID NO: 76263 - DNA, 4222 bp, Homo sapiens
  misc_feature (1487)..(1487): n is a, c, g, or t
  misc_feature (3702)..(3702): n is a, c, g, or t
  misc_feature (4197)..(4198): n is a, c, g, or t
  misc_feature (4222)..(4222): n is a, c, g, or t
aagggttcagagtcaggcacaggcaggcagacaggaccccaagcaggactggccttccagacaggaaagagggttgcggagacacaggaggccagttgagagtggcagaggagaaaggagtttcatgggaggatggggcttggagagagatgagggagggaaaacgggggccgccatgcatcctcagcttccgggggactttggagagggtcgaggctcagtgggagctggaggttgggccgctgggaggcggatcagtggacagacagcggcccgcgggacggcggaaggacgcgcgcaccgaggctcagggggtccggccgcgcgccgaggagtcgcttgtaggcccagggccccggccagtgcccagccccgctgggagacccggccagcaccacggacggcgcccaggaagcccgagtccccctggacggggccttctggattccgaggcccccggcaggttcgcccaagggctgcttcgcttgcgtgtccaagccccctgccctgcaggctccggcggcccctgcccctgagccctcggcctctcccccgatggcgcccacactgttccccatggagtccaagagcagcaagaccgacagcgtgcgggctgccggcgcgccccctgcctgcaagcacctagccgagaagaagacgatgaccaaccccacgaccgtcatcgaggtctacccggacaccaccgaggtgaacgactattacctgtggtccatcttcaacttcgtctacctcaacttctgctgcctgggcttcatcgccttggcctactccctcaaagtgcgagacaagaagcttctcaatgacctgaatggagccgtggaggatgcaaagacggcccggctgttcaacatcaccagttctgccctggcagcctcctgcatcatcctcgtcttcatcttcctgcggtaccccctcaccgactactaaggcccgccaggcacggctgctggcggagacaagcactgagacatgtttattctcatggtccctgaaacgcaggatcccatgaggttggggcagggcagggcttcttgtcctggggcccccttgagctgtgaactgggcagcaaggccatcagaagctgagtacagcaagggggcagtgagcttggccctcagtccaccccctccgcctcctggcctccaccctgcctgtgtctggggcctgggggcttctcccctcgctgctgcaccctggcttccagcgtctgtgtccctgccctcacgtgccccttcccaggctcctggggccccttggacctgacacctagcaggaagggcttatgcaaaattgtcccaggttgggaggactcactctgtgctccccgaccctgcctcctccacgatgtgaccccgctcagagcccttgtgtctgtgaactttcaatgaaatacccatgcagctccagcccagccttctactttgtgtccctggcagggcctggagaagtctggaggctttgcaancctccctcaggaactgcctggcggtcagggccccgggtgctgtgtcccaacagactgcaggggacggtctgctccatcacagctgtgccagacagtgaatgggaagggggggcatttggtggaggtaccccaaactcgagtcacttagagggtcaggcagcctcctggggggacggaagggggtggggcacagcctcagctgcctgcattggccaaatcagagcaaaggaaaccacaaattcactcggaaggaagcagcaggcagagacgatagacgcctggctaacccctgtccctcctggagggctctgggacctggacaggcccctttacctctctcgtgcccatctccttagctgtaaaataggaaaatggcctttcacttctataatcactgtgaaaatgaacggaagatgcctttcaaaggccgaggccagcgccctgacggcccatggcatgtgcagtccacaatgtgggaggcaggatgcagggatgggctctgtccccttggaactcaggcacagtcatgggggtgccggtcagccctgaagacaagctgatgagggtgcactaggaaaagtgcagggcatcggcgaggcacacgaaggaggtggggaggtgaagatggagaagaagccgaggcagtggccatgggtgtggagcttcgcgctgtgggtgcccagctggtctgggaaaccgcaggaaatcccgcagctcaggtgcgcagtgggaaggacttgctattccgtgggaaggcaggcaaaccttcccagggaaggggcatggccgtgcgcctcatgttttgggaagctcgtgccctctggggtagcgaggccagcttggaggggagtccagtggacagaggtggatgcaagtggagggagctgagcctgggctggggctggcagcagagggctggacagcagggcgcctgcgtggcagctgtgcagtcagtggggttgactggtttggaaggtaaggtgggggagaagcccggaggattcctgtcccttgacttggacagcccagtggagagggctgtgtaccaagggcaggaaaccagggagaagaagatgttgactttaagataccaagcagagaagggaagagccttctgggctggagacgtggggtgcctcagaagggaggaccttgagctagcagcagatgggacaaacgcaggggacagggcacagccgtggcaggagtgcagcgagcaagattctggtcacagtcctgacccagaaacctgcagaggaagggagggtggccagcacctgcccgtgggcctggggtgcagcccaggcagaggtggatggagggggtgctcagggaagaggggaggggagtgtgtgacctcaaaatgggagggcttgggggtcagagtcgagagaggggacagggtggggaccatgtgggactcttgagcactgacccttgaacccaggcagtggtgggatgggagggcaggaggcggcgggctgcgaggctgatgcggggctgcacggagctgtcattgagcctcttggaggatggtgggagaagtgccaggggcggctgaaagccttgccgagactgtgggcagcctggttgtgggcacttcggatgcttgcaccattagacccagaggcttcctggacaagcctgggctggaagaggatggcagaggctgctgggccttggaagagagagggtcctggcttctagttcctggggcagctaaggccaaccccagtgtccaggtgtcttccatgttatgcctgggagggaagaaagtagaggggcaaatgctttctttgcctattttccttaaacatttggtggcagtgctggtggctgcctgggacaggggccaggaggaaacacccctgcattagggaagccctcagccagcttttccctgggatgttcctgcgcctggctgaagctttctgagttcatgttggggaaatggaacggtcaccttccagccagtaaaggcacccctagctcttgggatgtttgtatccaactccgggcaatgtggggctacaaaggcccctggcttccataccctggggaccgggggagggctggtgctcccgcggtgggtgtccacggtgaggtcaggcccccacagcaggtgcattctcgccctcagcaggcaggcaagcaggcatcagctccggcgctggtctctggcttcgaagtctgtgtctttgcctgtctgtactcntgcctgacctgctggcgctccctgtccactgcactcctcccacctcatttttatgtgattttgcacagtgcctggcagacatttgacattcaataaacattgtacgaacgaaagaatcaatccccctctcactctctctgtccttctccctgtgtgcctccatatatttgtgcatctttggggagtcaggtgactttccctaccctcccctctccccatgctgccctggtcactgcccttgggaccccagcccaacaggccagtttaaaaggattggggcttggctcagtggctcatgcttataatcccagtgctttgggagactgaggcaggaggattgcttgtgcccaggagctcaaggctgcagtgagccgtgattgcaccactgcactccagcctgggtgacagagtgagaccctgtctcaataaataaataaataaaggatcaagactgaaagggggattgattctttcgttcgtacaatgtttgtcgannggccgcgaatttagtagtagtagn

SEQ ID NO: 76264 - DNA, 3927 bp, Homo sapiens
  misc_feature (1192)..(1192): n is a, c, g, or t
  misc_feature (3407)..(3407): n is a, c, g, or t
  misc_feature (3902)..(3903): n is a, c, g, or t
  misc_feature (3927)..(3927): n is a, c, g, or t
gtgctggccggtaggccgggcccagcttgctctcactttctcctctccaggcccagggccccggccagtgcccagccccgctgggagacccggccagcaccacggacggcgcccaggaagcccgagtccccctggacggggccttctggattccgaggcccccggcaggttcgcccaagggctgcttcgcttgcgtgtccaagccccctgccctgcaggctccggcggcccctgcccctgagccctcggcctctcccccgatggcgcccacactgttccccatggagtccaagagcagcaagaccgacagcgtgcgggctgccggcgcgccccctgcctgcaagcacctagccgagaagaagacgatgaccaaccccacgaccgtcatcgaggtctacccggacaccaccgaggtgaacgactattacctgtggtccatcttcaacttcgtctacctcaacttctgctgcctgggcttcatcgccttggcctactccctcaaagtgcgagacaagaagcttctcaatgacctgaatggagccgtggaggatgcaaagacggcccggctgttcaacatcaccagttctgccctggcagcctcctgcatcatcctcgtcttcatcttcctgcggtaccccctcaccgactactaaggcccgccaggcacggctgctggcggagacaagcactgagacatgtttattctcatggtccctgaaacgcaggatcccatgaggttggggcagggcagggcttcttgtcctggggcccccttgagctgtgaactgggcagcaaggccatcagaagctgagtacagcaagggggcagtgagcttggccctcagtccaccccctccgcctcctggcctccaccctgcctgtgtctggggcctgggggcttctcccctcgctgctgcaccctggcttccagcgtctgtgtccctgccctcacgtgccccttcccaggctcctggggccccttggacctgacacctagcaggaagggcttatgcaaaattgtcccaggttgggaggactcactctgtgctccccgaccctgcctcctccacgatgtgaccccgctcagagcccttgtgtctgtgaactttcaatgaaatacccatgcagctccagcccagccttctactttgtgtccctggcagggcctggagaagtctggaggctttgcaancctccctcaggaactgcctggcggtcagggccccgggtgctgtgtcccaacagactgcaggggacggtctgctccatcacagctgtgccagacagtgaatgggaagggggggcatttggtggaggtaccccaaactcgagtcacttagagggtcaggcagcctcctggggggacggaagggggtggggcacagcctcagctgcctgcattggccaaatcagagcaaaggaaaccacaaattcactcggaaggaagcagcaggcagagacgatagacgcctggctaacccctgtccctcctggagggctctgggacctggacaggcccctttacctctctcgtgcccatctccttagctgtaaaataggaaaatggcctttcacttctataatcactgtgaaaatgaacggaagatgcctttcaaaggccgaggccagcgccctgacggcccatggcatgtgcagtccacaatgtgggaggcaggatgcagggatgggctctgtccccttggaactcaggcacagtcatgggggtgccggtcagccctgaagacaagctgatgagggtgcactaggaaaagtgcagggcatcggcgaggcacacgaaggaggtggggaggtgaagatggagaagaagccgaggcagtggccatgggtgtggagcttcgcgctgtgggtgcccagctggtctgggaaaccgcaggaaatcccgcagctcaggtgcgcagtgggaaggacttgctattccgtgggaaggcaggcaaaccttcccagggaaggggcatggccgtgcgcctcatgttttgggaagctcgtgccctctggggtagcgaggccagcttggaggggagtccagtggacagaggtggatgcaagtggagggagctgagcctgggctggggctggcagcagagggctggacagcagggcgcctgcgtggcagctgtgcagtcagtggggttgactggtttggaaggtaaggtgggggagaagcccggaggattcctgtcccttgacttggacagcccagtggagagggctgtgtaccaagggcaggaaaccagggagaagaagatgttgactttaagataccaagcagagaagggaagagccttctgggctggagacgtggggtgcctcagaagggaggaccttgagctagcagcagatgggacaaacgcaggggacagggcacagccgtggcaggagtgcagcgagcaagattctggtcacagtcctgacccagaaacctgcagaggaagggagggtggccagcacctgcccgtgggcctggggtgcagcccaggcagaggtggatggagggggtgctcagggaagaggggaggggagtgtgtgacctcaaaatgggagggcttgggggtcagagtcgagagaggggacagggtggggaccatgtgggactcttgagcactgacccttgaacccaggcagtggtgggatgggagggcaggaggcggcgggctgcgaggctgatgcggggctgcacggagctgtcattgagcctcttggaggatggtgggagaagtgccaggggcggctgaaagccttgccgagactgtgggcagcctggttgtgggcacttcggatgcttgcaccattagacccagaggcttcctggacaagcctgggctggaagaggatggcagaggctgctgggccttggaagagagagggtcctggcttctagttcctggggcagctaaggccaaccccagtgtccaggtgtcttccatgttatgcctgggagggaagaaagtagaggggcaaatgctttctttgcctattttccttaaacatttggtggcagtgctggtggctgcctgggacaggggccaggaggaaacacccctgcattagggaagccctcagccagcttttccctgggatgttcctgcgcctggctgaagctttctgagttcatgttggggaaatggaacggtcaccttccagccagtaaaggcacccctagctcttgggatgtttgtatccaactccgggcaatgtggggctacaaaggcccctggcttccataccctggggaccgggggagggctggtgctcccgcggtgggtgtccacggtgaggtcaggcccccacagcaggtgcattctcgccctcagcaggcaggcaagcaggcatcagctccggcgctggtctctggcttcgaagtctgtgtctttgcctgtctgtactcntgcctgacctgctggcgctccctgtccactgcactcctcccacctcatttttatgtgattttgcacagtgcctggcagacatttgacattcaataaacattgtacgaacgaaagaatcaatccccctctcactctctctgtccttctccctgtgtgcctccatatatttgtgcatctttggggagtcaggtgactttccctaccctcccctctccccatgctgccctggtcactgcccttgggaccccagcccaacaggccagtttaaaaggattggggcttggctcagtggctcatgcttataatcccagtgctttgggagactgaggcaggaggattgcttgtgcccaggagctcaaggctgcagtgagccgtgattgcaccactgcactccagcctgggtgacagagtgagaccctgtctcaataaataaataaataaaggatcaagactgaaagggggattgattctttcgttcgtacaatgtttgtcgannggccgcgaatttagtagtagtagn

SEQ ID NO: 76265 - DNA, 553 bp, Homo sapiens
ggccgcgcccacgtgaccggtccgggtgcaaacacgcgggtcagctgatccggcccaactgcggcgtcatcccggctataagcgcacggcctcggcgaccctctccgacccggccgccgccgccatgcagccctccagccttctgccgctcgccctctgcctgctggctgcacccgcctccgcgctcgtcaggatcccgctgcacaagttcacgtccatccgccggaccatgtcggaggttgggggctctgtggaggacctgattgccaaaggccccgtctcaaagtactcccaggcggtgccagccgtgaccgaggggcccattcccgaggtgctcaagaactacatggacgcccagtactacggggagattggcatcgggacgcccccccagtgcttcacagtcgtccgtcgtccgagcggaccggtccgctcggaggaagaaaggcagccaggagaaaggaggggacgacaagccagcagaagttcattgtttacgtccctgtttccctcgcagcaagagattgaggaaggcactggtccgagcggaccg

SEQ ID NO: 76266 - DNA, 396 bp, Homo sapiens
cttctctaactcttcgacctcctgattagaagtaaaatttctcagtttacttttagctgagattcaggctcaaggatatagaggcctgaaatgtcagtagagatgggtttagtactctcaaagagttatttattgtactgtctggcagtgcttgtagtaggcaaataattttgttctacttggattctaattctaaaatactatttgaaaaatgtcctaaattcaaattatattgtggtttgggttcatgagactagaattaagaatattaagaatattgggccgggtgcaatggctcacacctgtaatcccagcactttgggaggccgagagcggatcacgaggtcaggagtttgagaccagcctgaccaatatggtgaaaccccgtctctactt

SEQ ID NO: 76267 - DNA, 366 bp, Homo sapiens
ccaacacatctttaataagatattgttcgtgcctttgccatatgctacagagcagcctctcactcggtgggccttttgattcctctcaataagattatttcaaatactctaatcctgaatcattgacatgaatacaaaagcctagtgacatctaatagatgcctcttagctttgcttttcctcttgttcctttcctttttcttctctttttacctgacaaaaagctcatagacacttgggctctgtctctcagtagcagcatggggggctcctcatgaaatataaagggggaaaaaggactgacagaggcccgataagctacagagtgaagggccatagattaaaagtaaatgccagtaaatccta

SEQ ID NO: 76268 - DNA, 2786 bp, Homo sapiens
agcgggttccgggaggcgcccggtgagcccacgtctgttgcggcggagcgagggaaacggactcggcggcgccggcatgaggagctgagcgtctcgggcgaggcgggctgacggcagcaccatgcaggcggcagtggctgtgtccgtgcccttcttgctgctctgtgtcctggggacctgccctccggcgcgctgcggccaggcaggagacgcctcattgatggagctagagaagaggaaggaaaaccgcttcgtggagcgccagagcatcgtgccactgcgcctcatctaccgctcgggcggcgaagacgaaagtcggcacgacgcgctcgacacgcgggtgcggggcgacctcggtggcccgcagttgactcatgttgaccaagcaagcttccaggttgatgcctttggaacgtcattcattctcgatgtcgtgctaaatcatgatttgctgtcctctgaatacatagagagacacattgaacatggaggcaagactgtggaagttaaaggaggagagcactgttactaccagggccatatccgaggaaaccctgactcatttgttgcattgtcaacatgccacggacttcatgggatgttctatgacgggaaccacacatatctcattgagccagaagaaaatgacactactcaagaggatttccattttcattcagtttacaaatccagactgtttgaattttccttggatgatcttccatctgaatttcagcaagtaaacattactccatcaaaatttattttgaagccaagaccaaaaaggagtaaacggcagcttcgtcgatatcctcgtaatgtagaagaagaaaccaaatacattgaactgatgattgtgaatgatcaccttatgtttaaaaaacatcggctttccgttgtacataccaatacctatgcgaaatctgtggtgaacatggcagatttaatatataaagaccaacttaagaccaggatagtattggttgctatggaaacctgggcgactgacaacaagtttgccatatctgaaaatccattgatcaccctacgtgagtttatgaaatacaggagggattttatcaaagagaaaagtgatgcagttcaccttttttcgggaagtcaatttgagagtagccggagcggggcagcttatattggtgggatttgctcgttgctgaaaggaggaggcgtgaatgaatttgggaaaactgatttaatggctgttacacttgcccagtcattagcccataatattggtattatctcagacaaaagaaagttagcaagtggtgaatgtaaatgcgaggacacgtggtccgggtgcataatgggagacactggctattatcttcctaaaaagttcacccagtgtaatattgaagagtatcatgacttcctgaatagtggaggtggtgcctgccttttcaacaaaccttctaagcttcttgatcctcctgagtgtggcaatggcttcattgaaactggagaggagtgtgattgtggaaccccggccgaatgtgtccttgaaggagcagagtgttgtaagaaatgcaccttgactcaagactctcaatgcagtgacggtctttgctgtaaaaagtgcaagtttcagcctatgggcactgtgtgccgagaagcagtaaatgattgtgatattcgtgaaacgtgctcaggaaattcaagccagtgtgcccctaatattcataaaatggatggatattcatgtgatggtgttcagggaatttgctttggaggaagatgcaaaaccagagatagacaatgcaaatacatttgggggcaaaaggtgacagcatcagacaaatattgctatgagaaactgaatattgaagggacggagaagggtaactgtgggaaagacaaagacacatggatacagtgcaacaaacgggatgtgctttgtggttaccttttgtgtaccaatattggcaatatcccaaggcttggagaactcgatggtgaaatcacatctactttagttgtgcagcaaggaagaacattaaactgcagtggtgggcatgttaagcttgaagaagatgtagatcttggctatgtggaagatgggacaccttgtggtccccaaatgatgtgcttagaacacaggtgtcttcctgtggcttctttcaactttagtacttgcttgagcagtaaagaaggcactatttgctcaggaaatggagtttgcagtaatgagctgaagtgtgtgtgtaacagacactggataggttctgattgcaacacttacttccctcacaatgatgatgcaaagactggtatcactctgtctggcaatggtgttgctggcaccaatatcataataggcataattgctggcaccattttagtgctggccctcatattaggaataactgcgtggggttataaaaactatcgagaacagagacagttaccccagggagattatgtaaaaaagcctggagatggtgactctttttatagcgacattcctcccggagtcagcacaaactcagcatctagttctaagaagaggtcaaatgggctctctcattcttggagtgaaaggattccagacacaaaacatatttcagacatctgtgaaaatgggcgacctcgaagtaactcttggcaaggtaacctgggaggcaacaaaaagaaaatcagaggcaaaagatttagacctcggtctaattcaactgagtaagtctgaacctctaatggaaaaaggcactccaaggtcctgtgcaaatagtgtcaaaagtaaattaagcagatagtcaaagaactgt

SEQ ID NO: 76269 - DNA, 2759 bp, Homo sapiens
agcggactcgctggctccccccgccagcggaagcgtccgcgaagcacaatgcagcactgagccgcggtggaggttgcagcgctacggccgccgcagcaccggccggggctgggtggaggtggccgcggggaccccgggggcgcggagcgagggaaacggactcggcggcgccggcatgaggagctgagcgtctcgggcgaggcgggctgacggcagcaccatgcaggcggcagtggctgtgtccgtgcccttcttgctgctctgtgtcctggggacctgccctccggcgcgctgcggccaggcaggagacgcctcattgatggagctagagaagaggaaggaaaaccgcttcgtggagcgccagagcatcgtgccactgcgcctcatctaccgctcgggcggcgaagacgaaagtcggcacgacgcgctcgacacgcgggtgcggggcgacctcggtggcccgcagttgactcatgttgaccaagcaagcttccaggttgatgcctttggaacgtcattcattctcgatgtcgtgctaaatcatgatttgctgtcctctgaatacatagagagacacattgaacatggaggcaagactgtggaagttaaaggaggagagcactgttactaccagggccatatccgaggaaaccctgactcatttgttgcattgtcaacatgccacggacttcatgggatgttctatgacgggaaccacacatatctcattgagccagaagaaaatgacactactcaagaggatttccattttcattcagtttacaaatccagactgtttgaattttccttggatgatcttccatctgaatttcagcaagtaaacattactccatcaaaatttattttgaagccaagaccaaaaaggagtaaacggcagcttcgtcgatatcctcgtaatgtagaagaagaaaccaaatacattgaactgatgattgtgaatgatcaccttatgtttaaaaaacatcggctttccgttgtacataccaatacctatgcgaaatctgtggtgaacatggcagatttaatatataaagaccaacttaagaccaggatagtattggttgctatggaaacctgggcgactgacaacaagtttgccatatctgaaaatccattgatcaccctacgtgagtttatgaaatacaggagggattttatcaaagagaaaagtgatgcagttcaccttttttcgggaagtcaatttgagagtagccggagcggggcagcttatattggtgggatttgctcgttgctgaaaggaggaggcgtgaatgaatttgggaaaactgatttaatggctgttacacttgcccagtcattagcccataatattggtattatctcagacaaaagaaagttagcaagtggtgaatgtaaatgcgaggacacgtggtccgggtgcataatgggagacactggctattatcttcctaaaaagttcacccagtgtaatattgaagagtatcatgacttcctgaatagtggaggtggtgcctgccttttcaacaaaccttctaagcttcttgatcctcctgagtgtggcaatggcttcattgaaactggagaggagtgtgattgtggaaccccggccgaatgtgtccttgaaggagcagagtgttgtaagaaatgcaccttgactcaagactctcaatgcagtgacggtctttgctgtaaaaagtgcaagtttcagcctatgggcactgtgtgccgagaagcagtaaatgattgtgatattcgtgaaacgtgctcaggaaattcaagccagtgtgcccctaatattcataaaatggatggatattcatgtgatggtgttcagggaatttgctttggaggaagatgcaaaaccagagatagacaatgcaaatacatttgggggcaaaaggtgacagcatcagacaaatattgctatgagaaactgaatattgaagggacggagaagggtaactgtgggaaagacaaagacacatggatacagtgcaacaaacgggatgtgctttgtggttaccttttgtgtaccaatattggcaatatcccaaggcttggagaactcgatggtgaaatcacatctactttagttgtgcagcaaggaagaacattaaactgcagtggtgggcatgttaagcttgaagaagatgtagatcttggctatgtggaagatgggacaccttgtggtccccaaatgatgtgcttagaacacaggtgtcttcctgtggcttctttcaactttagtacttgcttgagcagtaaagaaggcactatttgctcaggaaatggagtttgcagtaatgagctgaagtgtgtgtgtaacagacactggataggttctgattgcaacacttacttccctcacaatgatgatgcaaagactggtatcactctgtctggcaatggtgttgctggcaccaatatcataataggcataattgctggcaccattttagtgctggccctcatattaggaataactgcgtggggttataagtcaaatgggctctctcattcttggagtgaaaggattccagacacaaaacatatttcagacatctgtgaaaatgggcgacctcgaagtaactcttggcaaggtaacctgggaggcaacaaaaagaaaatcagaggcaaaagatttagacctcggtctaattcaactgagtaagtctgaacctctaatggaaaaaggcactccaaggtcctgtgcaaatagtgtcaaaagtaaattaagcagatagtcaaagaactgt

SEQ ID NO: 76270 - DNA, 4108 bp, Homo sapiens
agcggactcgctggctccccccgccagcggaagcgtccgcgaagcacaatgcagcactgagccgcggtggaggttgcagcgctacggccgccgcagcaccggccggggctgggtggaggtggccgcggggaccccgggggcgcggagcgagggaaacggactcggcggcgccggcatgaggagctgagcgtctcgggcgaggcgggctgacggcagcaccatgcaggcggcagtggctgtgtccgtgcccttcttgctgctctgtgtcctggggacctgccctccggcgcgctgcggccaggcaggagacgcctcattgatggagctagagaagaggaaggaaaaccgcttcgtggagcgccagagcatcgtgccactgcgcctcatctaccgctcgggcggcgaagacgaaagtcggcacgacgcgctcgacacgcgggtgcggggcgacctcggtggcccgcagttgactcatgttgaccaagcaagcttccaggttgatgcctttggaacgtcattcattctcgatgtcgtgctaaatcatgatttgctgtcctctgaatacatagagagacacattgaacatggaggcaagactgtggaagttaaaggaggagagcactgttactaccagggccatatccgaggaaaccctgactcatttgttgcattgtcaacatgccacggacttcatgggatgttctatgacgggaaccacacatatctcattgagccagaagaaaatgacactactcaagaggatttccattttcattcagtttacaaatccagactgtttgaattttccttggatgatcttccatctgaatttcagcaagtaaacattactccatcaaaatttattttgaagccaagaccaaaaaggagtaaacggcagcttcgtcgatatcctcgtaatgtagaagaagaaaccaaatacattgaactgatgattgtgaatgatcaccttatgtttaaaaaacatcggctttccgttgtacataccaatacctatgcgaaatctgtggtgaacatggcagatttaatatataaagaccaacttaagaccaggatagtattggttgctatggaaacctgggcgactgacaacaagtttgccatatctgaaaatccattgatcaccctacgtgagtttatgaaatacaggagggattttatcaaagagaaaagtgatgcagttcaccttttttcgggaagtcaatttgagagtagccggagcggggcagcttatattggtgggatttgctcgttgctgaaaggaggaggcgtgaatgaatttgggaaaactgatttaatggctgttacacttgcccagtcattagcccataatattggtattatctcagacaaaagaaagttagcaagtggtgaatgtaaatgcgaggacacgtggtccgggtgcataatgggagacactggctattatcttcctaaaaagttcacccagtgtaatattgaagagtatcatgacttcctgaatagtggaggtggtgcctgccttttcaacaaaccttctaagcttcttgatcctcctgagtgtggcaatggcttcattgaaactggagaggagtgtgattgtggaaccccggccgaatgtgtccttgaaggagcagagtgttgtaagaaatgcaccttgactcaagactctcaatgcagtgacggtctttgctgtaaaaagtgcaagtttcagcctatgggcactgtgtgccgagaagcagtaaatgattgtgatattcgtgaaacgtgctcaggaaattcaagccagtgtgcccctaatattcataaaatggatggatattcatgtgatggtgttcagggaatttgctttggaggaagatgcaaaaccagagatagacaatgcaaatacatttgggggcaaaaggtgacagcatcagacaaatattgctatgagaaactgaatattgaagggacggagaagggtaactgtgggaaagacaaagacacatggatacagtgcaacaaacgggatgtgctttgtggttaccttttgtgtaccaatattggcaatatcccaaggcttggagaactcgatggtgaaatcacatctactttagttgtgcagcaaggaagaacattaaactgcagtggtgggcatgttaagcttgaagaagatgtagatcttggctatgtggaagatgggacaccttgtggtccccaaatgatgtgcttagaacacaggtgtcttcctgtggcttctttcaactttagtacttgcttgagcagtaaagaaggcactatttgctcaggaaatggagtttgcagtaatgagctgaagtgtgtgtgtaacagacactggataggttctgattgcaacacttacttccctcacaatgatgatgcaaagactggtatcactctgtctggcaatggtgttgctggcaccaatatcataataggcataattgctggcaccattttagtgctggccctcatattaggaataactgcgtggggttataaaaactatcgagaacagagacagttaccccagggagattatgtaaaaaagcctggagatggtgactctttttatagcgacattcctcccggagtcagcacaaactcagcatctagttctaagaagaggtcaaatgggctctctcattcttggagtgaaaggattccagacacaaaacatatttcagacatctgtgaaaatgggcgacctcgaagtaactcttggcaaggtaacctgggaggcaacaaaaagaaaatcagaggcaaaagatttagacctcggtctaattcaactgagactttatctcctgccaagtctccttcttcatcaactgggtctattgcctccagcagaaaatacccttacccaatgcctccacttcctgatgaggacaagaaagtgaaccgacaaagtgccaggctatgggagacatccatttaagatcaactgtttacatgtgatacatcgaaaactgtttacttcaacttttatagaaacccaggctcatggaatcactgcaaatctatctgctcttcagacaatacgaagaccctctgagatgctacagaggagaggaagcggagtttcacatctggttaccattttctttttgtcattggcttaggatttaactaaccatgaaaagaactactgaaatattacactataacatggaacaataaaggtactggtatgttaatggataatccgcatgacagataatatgtagaaatattcataaagttaactcacatgacccaaatgtagcaagtttcctaaggtacaatagtggattcagaacttgacgttctgaggcacatcctcactgtaaacagtaatgctatatgcatgaagcttctgtttattgttttccatatttaaggaaacaacatcccataatagaaatgagcatgcagggctaaggcatataggatttttctgcaggactttaaagctttgaaaggccaatatcccataggctaactttaaacatgtatttttatttttgttttgttttttacttttcatatttatattagcatacaaggacaattgtatatatgtaacatttttaaaattttaaaaaaatgcagctgttacacacaagtgtattttgccaaatgcctaaaaattccgtcacaatcacatcatcgtcatccatccagtgatcttcaaagactataagcaggtaatgtaaatatagtggtcaatgctgtaaatgtgtctctccataattcgtatttgtccaaaacatgtgatatccctttaacctgtgcacagtctggaggcagttttattgagtgagtagttgagtgagagaacaaaatgcccagcaaaacttctggcctccacagtttgctgatgcaggagcccactctgctgccgatgggctgctccctggaaatcatctatcccatccgtccatcccatctcatcccagtgagccagcccctcagcagtgtgtgctgctgagattaagcaagtgcaccaaagacacatgagacaacgtactgccagtgagctggtagcttctggtttgccaatactctaaccctttgtggcctgaagttttgttccttggcaaaactttgtagtcacccttatctg

SEQ ID NO: 76271 - DNA, 4000 bp, Homo sapiens
agcggactcgctggctccccccgccagcggaagcgtccgcgaagcacaatgcagcactgagccgcggtggaggttgcagcgctacggccgccgcagcaccggccggggctgggtggaggtggccgcggggaccccgggggcgcggagcgagggaaacggactcggcggcgccggcatgaggagctgagcgtctcgggcgaggcgggctgacggcagcaccatgcaggcggcagtggctgtgtccgtgcccttcttgctgctctgtgtcctggggacctgccctccggcgcgctgcggccaggcaggagacgcctcattgatggagctagagaagaggaaggaaaaccgcttcgtggagcgccagagcatcgtgccactgcgcctcatctaccgctcgggcggcgaagacgaaagtcggcacgacgcgctcgacacgcgggtgcggggcgacctcggtggcccgcagttgactcatgttgaccaagcaagcttccaggttgatgcctttggaacgtcattcattctcgatgtcgtgctaaatcatgatttgctgtcctctgaatacatagagagacacattgaacatggaggcaagactgtggaagttaaaggaggagagcactgttactaccagggccatatccgaggaaaccctgactcatttgttgcattgtcaacatgccacggacttcatgggatgttctatgacgggaaccacacatatctcattgagccagaagaaaatgacactactcaagaggatttccattttcattcagtttacaaatccagactgtttgaattttccttggatgatcttccatctgaatttcagcaagtaaacattactccatcaaaatttattttgaagccaagaccaaaaaggagtaaacggcagcttcgtcgatatcctcgtaatgtagaagaagaaaccaaatacattgaactgatgattgtgaatgatcaccttatgtttaaaaaacatcggctttccgttgtacataccaatacctatgcgaaatctgtggtgaacatggcagatttaatatataaagaccaacttaagaccaggatagtattggttgctatggaaacctgggcgactgacaacaagtttgccatatctgaaaatccattgatcaccctacgtgagtttatgaaatacaggagggattttatcaaagagaaaagtgatgcagttcaccttttttcgggaagtcaatttgagagtagccggagcggggcagcttatattggtgggatttgctcgttgctgaaaggaggaggcgtgaatgaatttgggaaaactgatttaatggctgttacacttgcccagtcattagcccataatattggtattatctcagacaaaagaaagttagcaagtggtgaatgtaaatgcgaggacacgtggtccgggtgcataatgggagacactggctattatcttcctaaaaagttcacccagtgtaatattgaagagtatcatgacttcctgaatagtggaggtggtgcctgccttttcaacaaaccttctaagcttcttgatcctcctgagtgtggcaatggcttcattgaaactggagaggagtgtgattgtggaaccccggccgaatgtgtccttgaaggagcagagtgttgtaagaaatgcaccttgactcaagactctcaatgcagtgacggtctttgctgtaaaaagtgcaagtttcagcctatgggcactgtgtgccgagaagcagtaaatgattgtgatattcgtgaaacgtgctcaggaaattcaagccagtgtgcccctaatattcataaaatggatggatattcatgtgatggtgttcagggaatttgctttggaggaagatgcaaaaccagagatagacaatgcaaatacatttgggggcaaaaggtgacagcatcagacaaatattgctatgagaaactgaatattgaagggacggagaagggtaactgtgggaaagacaaagacacatggatacagtgcaacaaacgggatgtgctttgtggttaccttttgtgtaccaatattggcaatatcccaaggcttggagaactcgatggtgaaatcacatctactttagttgtgcagcaaggaagaacattaaactgcagtggtgggcatgttaagcttgaagaagatgtagatcttggctatgtggaagatgggacaccttgtggtccccaaatgatgtgcttagaacacaggtgtcttcctgtggcttctttcaactttagtacttgcttgagcagtaaagaaggcactatttgctcaggaaatggagtttgcagtaatgagctgaagtgtgtgtgtaacagacactggataggttctgattgcaacacttacttccctcacaatgatgatgcaaagactggtatcactctgtctggcaatggtgttgctggcaccaatatcataataggcataattgctggcaccattttagtgctggccctcatattaggaataactgcgtggggttataaaaactatcgagaacagaggtcaaatgggctctctcattcttggagtgaaaggattccagacacaaaacatatttcagacatctgtgaaaatgggcgacctcgaagtaactcttggcaaggtaacctgggaggcaacaaaaagaaaatcagaggcaaaagatttagacctcggtctaattcaactgagactttatctcctgccaagtctccttcttcatcaactgggtctattgcctccagcagaaaatacccttacccaatgcctccacttcctgatgaggacaagaaagtgaaccgacaaagtgccaggctatgggagacatccatttaagatcaactgtttacatgtgatacatcgaaaactgtttacttcaacttttatagaaacccaggctcatggaatcactgcaaatctatctgctcttcagacaatacgaagaccctctgagatgctacagaggagaggaagcggagtttcacatctggttaccattttctttttgtcattggcttaggatttaactaaccatgaaaagaactactgaaatattacactataacatggaacaataaaggtactggtatgttaatggataatccgcatgacagataatatgtagaaatattcataaagttaactcacatgacccaaatgtagcaagtttcctaaggtacaatagtggattcagaacttgacgttctgaggcacatcctcactgtaaacagtaatgctatatgcatgaagcttctgtttattgttttccatatttaaggaaacaacatcccataatagaaatgagcatgcagggctaaggcatataggatttttctgcaggactttaaagctttgaaaggccaatatcccataggctaactttaaacatgtatttttatttttgttttgttttttacttttcatatttatattagcatacaaggacaattgtatatatgtaacatttttaaaattttaaaaaaatgcagctgttacacacaagtgtattttgccaaatgcctaaaaattccgtcacaatcacatcatcgtcatccatccagtgatcttcaaagactataagcaggtaatgtaaatatagtggtcaatgctgtaaatgtgtctctccataattcgtatttgtccaaaacatgtgatatccctttaacctgtgcacagtctggaggcagttttattgagtgagtagttgagtgagagaacaaaatgcccagcaaaacttctggcctccacagtttgctgatgcaggagcccactctgctgccgatgggctgctccctggaaatcatctatcccatccgtccatcccatctcatcccagtgagccagcccctcagcagtgtgtgctgctgagattaagcaagtgcaccaaagacacatgagacaacgtactgccagtgagctggtagcttctggtttgccaatactctaaccctttgtggcctgaagttttgttccttggcaaaactttgtagtcacccttatctg

SEQ ID NO: 76272 - DNA, 4046 bp, Homo sapiens
agcggactcgctggctccccccgccagcggaagcgtccgcgaagcacaatgcagcactgagccgcggtggaggttgcagcgctacggccgccgcagcaccggccggggctgggtggaggtggccgcggggaccccgggggcgcggagcgagggaaacggactcggcggcgccggcatgaggagctgagcgtctcgggcgaggcgggctgacggcagcaccatgcaggcggcagtggctgtgtccgtgcccttcttgctgctctgtgtcctggggacctgccctccggcgcgctgcggccaggcaggagacgcctcattgatggagctagagaagaggaaggaaaaccgcttcgtggagcgccagagcatcgtgccactgcgcctcatctaccgctcgggcggcgaagacgaaagtcggcacgacgcgctcgacacgcgggtgcggggcgacctcggtggcccgcagttgactcatgttgaccaagcaagcttccaggttgatgcctttggaacgtcattcattctcgatgtcgtgctaaatcatgatttgctgtcctctgaatacatagagagacacattgaacatggaggcaagactgtggaagttaaaggaggagagcactgttactaccagggccatatccgaggaaaccctgactcatttgttgcattgtcaacatgccacggacttcatgggatgttctatgacgggaaccacacatatctcattgagccagaagaaaatgacactactcaagaggatttccattttcattcagtttacaaatccagactgtttgaattttccttggatgatcttccatctgaatttcagcaagtaaacattactccatcaaaatttattttgaagccaagaccaaaaaggagtaaacggcagcttcgtcgatatcctcgtaatgtagaagaagaaaccaaatacattgaactgatgattgtgaatgatcaccttatgtttaaaaaacatcggctttccgttgtacataccaatacctatgcgaaatctgtggtgaacatggcagatttaatatataaagaccaacttaagaccaggatagtattggttgctatggaaacctgggcgactgacaacaagtttgccatatctgaaaatccattgatcaccctacgtgagtttatgaaatacaggagggattttatcaaagagaaaagtgatgcagttcaccttttttcgggaagtcaatttgagagtagccggagcggggcagcttatattggtgggatttgctcgttgctgaaaggaggaggcgtgaatgaatttgggaaaactgatttaatggctgttacacttgcccagtcattagcccataatattggtattatctcagacaaaagaaagttagcaagtggtgaatgtaaatgcgaggacacgtggtccgggtgcataatgggagacactggctattatcttcctaaaaagttcacccagtgtaatattgaagagtatcatgacttcctgaatagtggaggtggtgcctgccttttcaacaaaccttctaagcttcttgatcctcctgagtgtggcaatggcttcattgaaactggagaggagtgtgattgtggaaccccggccgaatgtgtccttgaaggagcagagtgttgtaagaaatgcaccttgactcaagactctcaatgcagtgacggtctttgctgtaaaaagtgcaagtttcagcctatgggcactgtgtgccgagaagcagtaaatgattgtgatattcgtgaaacgtgctcaggaaattcaagccagtgtgcccctaatattcataaaatggatggatattcatgtgatggtgttcagggaatttgctttggaggaagatgcaaaaccagagatagacaatgcaaatacatttgggggcaaaaggtgacagcatcagacaaatattgctatgagaaactgaatattgaagggacggagaagggtaactgtgggaaagacaaagacacatggatacagtgcaacaaacgggatgtgctttgtggttaccttttgtgtaccaatattggcaatatcccaaggcttggagaactcgatggtgaaatcacatctactttagttgtgcagcaaggaagaacattaaactgcagtggtgggcatgttaagcttgaagaagatgtagatcttggctatgtggaagatgggacaccttgtggtccccaaatgatgtgcttagaacacaggtgtcttcctgtggcttctttcaactttagtacttgcttgagcagtaaagaaggcactatttgctcaggaaatggagtttgcagtaatgagctgaagtgtgtgtgtaacagacactggataggttctgattgcaacacttacttccctcacaatgatgatgcaaagactggtatcactctgtctggcaatggtgttgctggcaccaatatcataataggcataattgctggcaccattttagtgctggccctcatattaggaataactgcgtggggttataaaaactatcgagaacagaggtcaaatgggctctctcattcttggagtgaaaggattccagacacaaaacatatttcagacatctgtgaaaatgggcgacctcgaagtaactcttggcaaggtaacctgggaggcaacaaaaagaaaatcagaggcaaaagatttagacctcggtctaattcaactgagtatttaaacccatggttcaaaagagactataatgtagctaagtgggtagaagatgtgaataaaaacactgaagaaccatactttaggactttatctcctgccaagtctccttcttcatcaactgggtctattgcctccagcagaaaatacccttacccaatgcctccacttcctgatgaggacaagaaagtgaaccgacaaagtgccaggctatgggagacatccatttaagatcaactgtttacatgtgatacatcgaaaactgtttacttcaacttttacttcagacaatacgaagaccctctgagatgctacagaggagaggaagcggagtttcacatctggttaccattttctttttgtcattggcttaggatttaactaaccatgaaaagaactactgaaatattacactataacatggaacaataaaggtactggtatgttaatggataatccgcatgacagataatatgtagaaatattcataaagttaactcacatgacccaaatgtagcaagtttcctaaggtacaatagtggattcagaacttgacgttctgaggcacatcctcactgtaaacagtaatgctatatgcatgaagcttctgtttattgttttccatatttaaggaaacaacatcccataatagaaatgagcatgcagggctaaggcatataggatttttctgcaggactttaaagctttgaaaggccaatatcccataggctaactttaaacatgtatttttatttttgttttgttttttacttttcatatttatattagcatacaaggacaattgtatatatgtaacatttttaaaattttaaaaaaatgcagctgttacacacaagtgtattttgccaaatgcctaaaaattccgtcacaatcacatcatcgtcatccatccagtgatcttcaaagactataagcaggtaatgtaaatatagtggtcaatgctgtaaatgtgtctctccataattcgtatttgtccaaaacatgtgatatccctttaacctgtgcacagtctggaggcagttttattgagtgagtagttgagtgagagaacaaaatgcccagcaaaacttctggcctccacagtttgctgatgcaggagcccactctgctgccgatgggctgctccctggaaatcatctatcccatccgtccatcccatctcatcccagtgagccagcccctcagcagtgtgtgctgctgagattaagcaagtgcaccaaagacacatgagacaacgtactgccagtgagctggtagcttctggtttgccaatactctaaccctttgtggcctgaagttttgttccttggcaaaactttgtagtcacccttatctg

SEQ ID NO: 76273 - DNA, 4051 bp, Homo sapiens
agcggactcgctggctccccccgccagcggaagcgtccgcgaagcacaatgcagcactgagccgcggtggaggttgcagcgctacggccgccgcagcaccggccggggctgggtggaggtggccgcggggaccccgggggcgcggagcgagggaaacggactcggcggcgccggcatgaggagctgagcgtctcgggcgaggcgggctgacggcagcaccatgcaggcggcagtggctgtgtccgtgcccttcttgctgctctgtgtcctggggacctgccctccggcgcgctgcggccaggcaggagacgcctcattgatggagctagagaagaggaaggaaaaccgcttcgtggagcgccagagcatcgtgccactgcgcctcatctaccgctcgggcggcgaagacgaaagtcggcacgacgcgctcgacacgcgggtgcggggcgacctcggtggcccgcagattcagatgtttttgaagtcagaatcccagaagaccatataccagatacagttgactcatgttgaccaagcaagcttccaggttgatgcctttggaacgtcattcattctcgatgtcgtgctaaatcatgatttgctgtcctctgaatacatagagagacacattgaacatggaggcaagactgtggaagttaaaggaggagagcactgttactaccagggccatatccgaggaaaccctgactcatttgttgcattgtcaacatgccacggacttcatgggatgttctatgacgggaaccacacatatctcattgagccagaagaaaatgacactactcaagaggatttccattttcattcagtttacaaatccagactgtttgaattttccttggatgatcttccatctgaatttcagcaagtaaacattactccatcaaaatttattttgaagccaagaccaaaaaggagtaaacggcagcttcgtcgatatcctcgtaatgtagaagaagaaaccaaatacattgaactgatgattgtgaatgatcaccttatgtttaaaaaacatcggctttccgttgtacataccaatacctatgcgaaatctgtggtgaacatggcagatttaatatataaagaccaacttaagaccaggatagtattggttgctatggaaacctgggcgactgacaacaagtttgccatatctgaaaatccattgatcaccctacgtgagtttatgaaatacaggagggattttatcaaagagaaaagtgatgcagttcaccttttttcgggaagtcaatttgagagtagccggagcggggcagcttatattggtgggatttgctcgttgctgaaaggaggaggcgtgaatgaatttgggaaaactgatttaatggctgttacacttgcccagtcattagcccataatattggtattatctcagacaaaagaaagttagcaagtggtgaatgtaaatgcgaggacacgtggtccgggtgcataatgggagacactggctattatcttcctaaaaagttcacccagtgtaatattgaagagtatcatgacttcctgaatagtggaggtggtgcctgccttttcaacaaaccttctaagcttcttgatcctcctgagtgtggcaatggcttcattgaaactggagaggagtgtgattgtggaaccccggccgaatgtgtccttgaaggagcagagtgttgtaagaaatgcaccttgactcaagactctcaatgcagtgacggtctttgctgtaaaaagtgcaagtttcagcctatgggcactgtgtgccgagaagcagtaaatgattgtgatattcgtgaaacgtgctcaggaaattcaagccagtgtgcccctaatattcataaaatggatggatattcatgtgatggtgttcagggaatttgctttggaggaagatgcaaaaccagagatagacaatgcaaatacatttgggggcaaaaggtgacagcatcagacaaatattgctatgagaaactgaatattgaagggacggagaagggtaactgtgggaaagacaaagacacatggatacagtgcaacaaacgggatgtgctttgtggttaccttttgtgtaccaatattggcaatatcccaaggcttggagaactcgatggtgaaatcacatctactttagttgtgcagcaaggaagaacattaaactgcagtggtgggcatgttaagcttgaagaagatgtagatcttggctatgtggaagatgggacaccttgtggtccccaaatgatgtgcttagaacacaggtgtcttcctgtggcttctttcaactttagtacttgcttgagcagtaaagaaggcactatttgctcaggaaatggagtttgcagtaatgagctgaagtgtgtgtgtaacagacactggataggttctgattgcaacacttacttccctcacaatgatgatgcaaagactggtatcactctgtctggcaatggtgttgctggcaccaatatcataataggcataattgctggcaccattttagtgctggccctcatattaggaataactgcgtggggttataaaaactatcgagaacagaggtcaaatgggctctctcattcttggagtgaaaggattccagacacaaaacatatttcagacatctgtgaaaatgggcgacctcgaagtaactcttggcaaggtaacctgggaggcaacaaaaagaaaatcagaggcaaaagatttagacctcggtctaattcaactgagactttatctcctgccaagtctccttcttcatcaactgggtctattgcctccagcagaaaatacccttacccaatgcctccacttcctgatgaggacaagaaagtgaaccgacaaagtgccaggctatgggagacatccatttaagatcaactgtttacatgtgatacatcgaaaactgtttacttcaacttttatagaaacccaggctcatggaatcactgcaaatctatctgctcttcagacaatacgaagaccctctgagatgctacagaggagaggaagcggagtttcacatctggttaccattttctttttgtcattggcttaggatttaactaaccatgaaaagaactactgaaatattacactataacatggaacaataaaggtactggtatgttaatggataatccgcatgacagataatatgtagaaatattcataaagttaactcacatgacccaaatgtagcaagtttcctaaggtacaatagtggattcagaacttgacgttctgaggcacatcctcactgtaaacagtaatgctatatgcatgaagcttctgtttattgttttccatatttaaggaaacaacatcccataatagaaatgagcatgcagggctaaggcatataggatttttctgcaggactttaaagctttgaaaggccaatatcccataggctaactttaaacatgtatttttatttttgttttgttttttacttttcatatttatattagcatacaaggacaattgtatatatgtaacatttttaaaattttaaaaaaatgcagctgttacacacaagtgtattttgccaaatgcctaaaaattccgtcacaatcacatcatcgtcatccatccagtgatcttcaaagactataagcaggtaatgtaaatatagtggtcaatgctgtaaatgtgtctctccataattcgtatttgtccaaaacatgtgatatccctttaacctgtgcacagtctggaggcagttttattgagtgagtagttgagtgagagaacaaaatgcccagcaaaacttctggcctccacagtttgctgatgcaggagcccactctgctgccgatgggctgctccctggaaatcatctatcccatccgtccatcccatctcatcccagtgagccagcccctcagcagtgtgtgctgctgagattaagcaagtgcaccaaagacacatgagacaacgtactgccagtgagctggtagcttctggtttgccaatactctaaccctttgtggcctgaagttttgttccttggcaaaactttgtagtcacccttatctg

SEQ ID NO: 76274 - DNA, 2211 bp, Homo sapiens
aatgtccatcagtgatagactggattaagaaaatgtggcacatatacaccatggaatactatgcagccataaaaaatgatgagttcatgtcatttgtagggacatggatgaagctggaaaccatcattctgagcaaactatcacaaggacagaaaaccagacaccgcatgttctcactcataggtgggaattgaataatgagaacatatggacacaggggatgtgctttgtggttaccttttgtgtaccaatattggcaatatcccaaggcttggagaactcgatggtgaaatcacatctactttagttgtgcagcaaggaagaacattaaactgcagtggtgggcatgttaagcttgaagaagatgtagatcttggctatgtggaagatgggacaccttgtggtccccaaatgatgtgcttagaacacaggtgtcttcctgtggcttctttcaactttagtacttgcttgagcagtaaagaaggcactatttgctcaggaaatggagtttgcagtaatgagctgaagtgtgtgtgtaacagacactggataggttctgattgcaacacttacttccctcacaatgatgatgcaaagactggtatcactctgtctggcaatggtgttgctggcaccaatatcataataggcataattgctggcaccattttagtgctggccctcatattaggaataactgcgtggggttataaaaactatcgagaacagaggtcaaatgggctctctcattcttggagtgaaaggattccagacacaaaacatatttcagacatctgtgaaaatgggcgacctcgaagtaactcttggcaaggtaacctgggaggcaacaaaaagaaaatcagaggcaaaagatttagacctcggtctaattcaactgagactttatctcctgccaagtctccttcttcatcaactgggtctattgcctccagcagaaaatacccttacccaatgcctccacttcctgatgaggacaagaaagtgaaccgacaaagtgccaggctatgggagacatccatttaagatcaactgtttacatgtgatacatcgaaaactgtttacttcaacttttatagaaacccaggctcatggaatcactgcaaatctatctgctcttcagacaatacgaagaccctctgagatgctacagaggagaggaagcggagtttcacatctggttaccattttctttttgtcattggcttaggatttaactaaccatgaaaagaactactgaaatattacactataacatggaacaataaaggtactggtatgttaatggataatccgcatgacagataatatgtagaaatattcataaagttaactcacatgacccaaatgtagcaagtttcctaaggtacaatagtggattcagaacttgacgttctgaggcacatcctcactgtaaacagtaatgctatatgcatgaagcttctgtttattgttttccatatttaaggaaacaacatcccataatagaaatgagcatgcagggctaaggcatataggatttttctgcaggactttaaagctttgaaaggccaatatcccataggctaactttaaacatgtatttttatttttgttttgttttttacttttcatatttatattagcatacaaggacaattgtatatatgtaacatttttaaaattttaaaaaaatgcagctgttacacacaagtgtattttgccaaatgcctaaaaattccgtcacaatcacatcatcgtcatccatccagtgatcttcaaagactataagcaggtaatgtaaatatagtggtcaatgctgtaaatgtgtctctccataattcgtatttgtccaaaacatgtgatatccctttaacctgtgcacagtctggaggcagttttattgagtgagtagttgagtgagagaacaaaatgcccagcaaaacttctggcctccacagtttgctgatgcaggagcccactctgctgccgatgggctgctccctggaaatcatctatcccatccgtccatcccatctcatcccagtgagccagcccctcagcagtgtgtgctgctgagattaagcaagtgcaccaaagacacatgagacaacgtactgccagtgagctggtagcttctggtttgccaatactctaaccctttgtggcctgaagttttgttccttggcaaaactttgtagtcacccttatctg

SEQ ID NO: 76275 - DNA, 460 bp, Homo sapiens
ccctgtatttagtgcacagatctttttttcaagccaaaggtggaaatgtaagggacattggctgctttctccatcagggcttctggcccatgtctctctgttatagaaagtgatgtgcaaccaggatgggagaggcctcttgtcatcctagttgataaaatgattccttacaaaaaatggtctagaaaaaaaaaagagtaacaaatttaaaaagaatttttttaaaacctcaaaccgtaccaccaggtgtcactataacccaaagcactgctggtaatttttccattcaattgtaaagaaatgcaaaaactccacattttaagtaaatgagtactgtcttacaaggctttccctgtcagtaacttacgttgccatacagttactaaactgaatattctaaacagatgagaaaaggcacaagccttattttttttaaaaaattgtaaatagtgattaatga

SEQ ID NO: 76276 - DNA, 421 bp, Homo sapiens
aactgggttctaaccaaaacaacaacaacactcgctgacttcaaaggtctgttgactcgaggagataaatctcccagtcctagttggttcttttcagagaggtgcagaaaagaccccctagaatggagctgttgagccaatcacctttccacagcaagacataaagcggagcatctggggagagaaataaagcttacaaacaaaactcggggaaaggagaaagagaaaggtcattcgtccttttcaaagatgcttacttacactgttgattttattatattcaaaactacccaaatatcagacatccagtctgactgctcttttcttttaatcacttggagctcatttctgaaaatagcactctggtcctcagtgagccagattttgcaaactgcccatacattcccgttatcacatttta

SEQ ID NO: 76277 - DNA, 424 bp, Homo sapiens
gccagatgtccttaagtggataaatggttaaacaaactgtggtacatccataccgtggaatactcagaacaagaacttaaactattgatacaacaatctgaatagtctccagagaactatgctgagttagaaagtcattccctaggccagacacagtggctcacgcctataatccaagcactttgggaggccgaggcaggcggatcacgaggtcaagagatcgagaccatcctggccaacatggtgaaatcccatctctactaaaaatacaaaaattagctgggcatggtggcgcacacctgtagtcccagctacttgggcagctgaggcaggagaatcgcttgaactcaggaggtgaaggttgcagtgagccgagattgcactattgcactccagcctggtgacagacggagactctgtctca

SEQ ID NO: 76278 - DNA, 725 bp, Homo sapiens
gctagggccagaagagagaggtaggcagggctgctggccaggcactcttcaccaagacaaggcaagaggaggggcatgattgaggcagtgatacagaaagcagacagtagaggtcgtggcaagtgtgccgttacttgctacctgtggttgatgggagagtcacaccacatttaggaggagagaatccatttgccacttctgacaatgccacaagaatcacatatttcatccagaggttgaatttggcccatgctgagctttaaaatacagagctgtcttggaacaatggctcagtacattcatttggtgtccaacaaagcctgcctctgttgccttccctctctctgtgtgcccttcaagatcttcattgtgctttggggagagaaagagaaaatgtcatatcagggtagctcaccccatgtgtcctggactcaggaaaagagtatcttatcaccttactcttttgttattataaaaaataaagttgaacgtcttcaaataaaataaagaagtatagaaaaaattttaaattaacctgttatgattctacctagagaaccattgtcaacatcttggtatatgtacttccagatactttcctatgaatatatacattgtagattttttaatattaaaaggctatcatgctgctttgtatacaggctttctttactgatatgtaatataatacacagacaaatatacaaatcctaagccatcaactc

SEQ ID NO: 76279 - DNA, 815 bp, Homo sapiens
ttatctagagctgtaatctagatattttatagatctttgctgtgctgttttgaatttgtgttggagtagaacaatcagatgacaaaagctcatcccacatggaaaaatcaaagcattcattacagagagaattttgaaataaatgcatatataaaaaatatatatgcatatataatgcatatgtatatgcatataaaatatatatataaaatgggggttataaacaatgaaggaaatagtgatactatctatgtgggaacaatactagtatcctccctttggatgaatacagtagctacagatgcaattctggggactctgtttagcaatagcttaactattgcttggctacaagcatggataacttgttcaaagataatgaggagttgtaaatatttaaataaacaggatttgcaacataaaaagctttgtgactatgtgtctgaattcttagagttttctcccagcaagaccttggatgtggcagacttttctgtaattgtccatctcgcccctatttcatgaaaagccagagcttctctacttagtttgctaaccccaaatatataaattcaatagaagtactagcctgtttttactggtttatttgctttatctaaaaaaaacaaggcatagtttaaagtctgtttttgatagcataacaaaacaaaggttctcattttaataatgcatcacatatacacttggtaactattgcatagtaataatttaataacttgagaaatatatttatgcatgtatgtgtatatgttcatatatatgttatttttaattcagaagtaaaacaaatattg

SEQ ID NO: 76280 - DNA, 316 bp, Homo sapiens
ggcatattgcaaaataatatgttcatgtataatctcaatttagtttcattgatgtcataaacatcaatatacgtctacaaatataaaaaaagatcagaacaaggatctgaggggaaaaaattatttaaaagataaaatttaaaagctcaaaaatgtatacatcaaaatgttaacagtagtcaggtatagtggtgcacgcctgtggttccagctattccggaggctgaggcaggagatggcttgaggctgggagtttgaggctacagtgagctgtgatcgtgcctataaatagccactacactccagcctgagcaat

SEQ ID NO: 76281 - DNA, 504 bp, Homo sapiens
tttatcccccccatcacaaaactattataatttcaaaatagttacaagtacaatgtattccaagtggcttcttatttaagataattatattcacagagcagggaccgtttcaggtcctttaatgctgaaaggctaaataaagagaactttttattttttccatgttaatacatggatgatattaaccatgatgtttaatagctacagaatactgcatgaaatggatgtactataattcatttagcctttttcgtatttagagatttaagcagtagccaatttttcaccattacaagtggtgcaaggaccaatatcttcatgaatacagcattttctgtaaagcagaaattctttcttcaggattaatttccagatatctttctggtattagacacataccacttgcctaataacgttccaaaaggaattcattgtttacattgctattagaacatatgagattgcctgtttcattatgtccgtcccagcactgggtattatcat

SEQ ID NO: 76282 - DNA, 412 bp, Homo sapiens
taaaccagatgaaaatttattgaagcagaaaagtcatgatcatttaccggcaaaaaaaatcaggttacaaaacagtatgcacagtatgatctcattttctggagaaaattgacatataagcatggaaacagctctggaaaggtctgacagaagtgtcattgaggcgctgctgagagataggacacaatactttttattttgcttgtccctatttccagttttctgcaatgcatatccaccgcttctgtagtaatctcagagtatgcttttaaaagaaaaaaatcactgaccctccccgaaggtgggagaatccctggcttggcagaggtttctaaaacagatccctggaggtttcggtggccagaaacttaatatgagcagagtgcagtgccccattcagaggcagccccac

SEQ ID NO: 76283 - DNA, 513 bp, Homo sapiens
tatgcctttataaagttgatttcatcatcttaatttctccatactagcaattagcagctagaaaatgaaattcaataaaacataatagagattaatagccagaatcattacatgcttaacaatacatgcaatgaagcaggtacaaggcccctaaaagcaattggtgagaaaaattaaagaaggctaaataaatatatatcatgttcattgattggaagactcaattttgttagcatattacatcaacacaattctgattaatatttctagtaggagattttagagaaatttgaaagctagtttcaaaatgtatttgaaaatcaaagaacctagaataagcaagtcggtcttgaagaagcaataagttggaggacttactctgctagatttcaaacctgattttaaagctacagtaattttaaaacagtagtaatggtgtaagtattcataaatatatcaaagtaaaagaatacagattcaaacaatatgcccacatatgtacagttattgatt

SEQ ID NO: 76284 - DNA, 871 bp, Homo sapiens
gggttttttttttaaaaaaagaacaacctcagaaaacagtcttgttattcttatgtcagtttcacagctaacaataaataatgccaaattgttggcttaaaaacaagaagcattatttgtatggtttttacaaatggcaatgttgttctttacaaaaagtttaaaaccagagcattggtagtttttctaaatacttttattggcagtggtttagtagccagccctattaatctcaaggcaacaggagttcgtttttacagagataccaggccatatttgtccaagtgctcagtatgtgactcataagtgttcctgtgctattggatgacttccagatctttgccagaactaaccttcttagacatttgaatcaaattaaagttctttagctgagatcttagtggtgtagtctttccctaatacagtaatcctctccactcttaagcacaaacattaaaagattaccatgcaaactccacatgggtgaagacatctcttaattaaagcataataaatattgtagttcatagtatagttcaaataacgaatgtttatttctgttaggtatattaaaaattcaaatagttagaaaagtcagaattctttttaaaagaggtaataaaatggggacaattgaatttgggttgtgacaacttaaaaacaccaatacttttataccctgtttctctaggatggtctaaatcataaatgttctttgtcatcaataacttatagaataagaaccctcctcttttccaagacatgtttttaaaatagtaggtatttacggtatactacattccagctttaaaatacatttttccagatactaactcctttcctctcataataaattttgagaacttactaa

SEQ ID NO: 76285 - DNA, 491 bp, Homo sapiens
aaggggtccataataattattttagaaaatggaaaaatgaatataatctgagaagaaaaaacacagctgtttatcttagcacttttgaaaagcaagtagagaaagatagcactctacaaacctagatttaaatccaaaggtggctgttatcttattgttgttctcataggattttattatctgtattgagatgttcctcgctgccattgctcatcattacacattctcatataaaccatatgtccaagaagcagaagagggctcatgctttgattcctttcttgccatgtgggatgtctcagatattagagatgatatttctgaacaagtaaggcatgttggtaagtaccagctatttaattcaaccaaataggttgggtaggatattgaatttctcctactagggcaatttattatctatttagagatgaaaaaagactttaaagcagtaccacagtgcaggctcatcaactttggggagtgggagaggg

SEQ ID NO: 76286 - DNA, 5150 bp, Homo sapiens
agcttggtttggccttgggttccgctgtaggggaggtcccgtgcgaaagaatgaggagatcctggggccttacctactagcggaatcgactgaagagacgcctgccagtgcgggaggtaggaagctcgatccccaaagaaaagagcgagtgggcaggcagctgcgagacagaaccggagtgtgcagggtccctagaggccggttcctggtctgtgctgctctcctggaagccatggtacaggcagagctcagggcgatccccaggtgagggcagcggctctgcctgggattccaccgcagtacaaccgggtagatgcggggtggagaagaaaggatgttgcctgcactgctcgccaatagcaccctgagaggctacatttgcagaagcagcagcagcagaagacacagcgccggtccaggaggcggctcgagctgttcgtaaagtcgcccgacagctttttctccgtagtatgcgagttgacaaaacagccagagaacagggctccccattacaatcttttcgagatcttttcccttgctaaccggatctgatttgtgcgaaaacatgccttgcacttgtacctggaggaactggagacagtggattcgacctttagtagcggtcatctacctggtgtcaatagtggttgcggttcccctatgcgtgtgggaattacagaaactggaggttggaatacacaccaaggcttggtttattgctggaatctttttgctgttgactattcctatatcactgtgggtgatattgcaacacttagtgcattatacacaacctgaactacaaaaaccaataataaggattctttggatggtacctatttacagtttagatagttggatagctttgaaatatcccggaattgcaatatatgtggatacctgcagagaatgctatgaagcttatgtaatttacaactttatgggattccttaccaattatctaactaaccggtatccaaatctggtattaatccttgaagccaaagatcaacagaaacatttccctcctttatgttgctgtccaccatgggctatgggagaagtattgctgtttaggtgcaaactaggtgtattacagtacacagttgtcagacctttcaccaccatcgttgctttaatctgtgagctgcttggtatatatgacgaagggaactttagcttttcaaatgcttggacttatttggttataataaacaacatgtcacagttgtttgccatgtattgtctcctgctcttttataaagtactaaaagaagaactgagcccaatccaacctgttggcaaatttctttgtgtaaagctggtggtttttgtttctttttggcaagcagtagttattgctttgttggtaaaagttggcgttatttctgaaaagcatacgtgggaatggcaaactgtagaagctgtggccaccggactccaggattttattatctgtattgagatgttcctcgctgccattgctcatcattacacattctcatataaaccatatgtccaagaagcagaagagggctcatgctttgattcctttcttgccatgtgggatgtctcagatattagagatgatatttctgaacaagtaaggcatgttggacggacagtcaggggacatcccaggaaaaaattgtttcccgaggatcaagatcaaaatgaacatacaagtttattatcatcatcatcacaagatgcaatttccattgcttcttctatgccaccttcacccatgggtcactaccaagggtttggacacactgtgactccccagactacacctaccacagctaagatatctgatgaaatccttagtgatactataggagagaaaaaagaaccttcagataaatccgtggattcctgaacagtatggaaaagcaaactgtgcaactactacattatatcattacctggtatcccatggattttgtgcttgggacagaccataaatgatggaaaatgtcaacacaaaaatagctgaaagccaggtacaactactgcatttatatatgtaagttttgtatatcaaaaataattggtctaaatttcctagacttagacttgatttcttaacattagggtatcgcatactcaaatggtagacaatgaccccaactaaatcttcctgatgttacactgctttatcaagaggatggactttttttttttgagacagacagagtcttgctctgtcacccaggctggagtgcagtggcgcaatctcgggtcactgcaagctctgcctcccaagttcatgccattctcctgcctcagcctcccaagtagctgggactacaggcacctgccaccatgcccagctaattttttttttttcagtagagacagggtctcaccatgttagccaggatggtcttgatctgacctcgtgatccgccgacctcggcctcccaaagtgctggaattacaggcgtgagccactgcgcctggccaagaatggacattttttaaaaaaacatcagtacttcctaccactgctgcatgagtataatgctccggaattatcagaaagcataatgcagaaatacgaattagtggaacttaatcatgtgccatataagcttacctaacaaacagttatatccctattcctcaactgaatgtctttcaataaataagaatttatcatttattttctgcaacttttttatgtctcattctttaaacattaaaaacccttaatattttaacaaaaatttcttgattagaggcacagtgaaaaagaagtcaaaaaaaaaagttctacttttcatcagtgctattaaaggtggcagcaaatgtaaatcttggctgaatggtcttaattactcattaaaccacagtcagaaagacatataggtgctatttgggaaaactttttattacctaggatggggtttctctaattgctaatcacaaccccactgggtcatgtttgacattttataatgaaaataaaacagaaagtgccacagtatgttacagaaagcaaagatgagtattgtttctcaaagcctttgctttatgtatttatacacatactcattcatatctatctatatatatagagagagatagtggttcacagtaatcatacaaagtctttattccatccactattataaacatttctattaaaactaaaactgggctctatgtaaaaaccccaaagatacacacacaaaaaaaatctgtttgttagaactcaagtgaattcagtaaagttgcagaatacaaaatcaacatacaaaaagcattagcatttttatacataaataatgaaaataatgacctaactgaaaaattaagatgccatttatgatagcataaaaaaaatacttacttaggaataaatttaacaccaaggcagtaaaagatctgtatgtacactgaaaactatgaaacactgatgaaagaaagacacaaataaatggaaaggtatcccgtgctcatggatcagaataatactgttaaaatggtcacactacccaaagcaattcagaatcaatgcaatcctatcaaaattccaatggcattatttacacaaacagaaaaaaatcctaaaattcatatgtaacgataaaagaccctgaataggcaaaagaatactgaggaaaaaatgttggagacatcacatttcctaattataaattatactacaaaactatagtaatcaagacagtatggtactggtataaaaacacatacacaggccagtgggacagaagaaagagtccagatataaatccaaacatacacagtcaactaatttttgacaaagacaccaagaagacacatcggggaaagaacagtcttcattaagtgttcttaataaagatgctgggaaaactgcacttccacatgcaaaacaatgaaatcagacccttatcttagacctacacaacaatcaattcaaaatggataaaagacctaaatgtaagaccagaaactatagaagagaacataggagaaaagttcctggacactgacccttggcaatgattttttggatatcacaccaaaagctcagtcaacaaaaacaaaaacaaatgtgactacatcaaaccaaaaagcttctgacagtaaaagaaacagtcaacaaaatgaaacagtagcctacagattgagtaaaaaatatttgtaaggcatatatatggaaaagggttagtatccaaaatttataaagaattcatacaactcaattttaaaaatgggcaaaagacctgaaaagacatttctccgaagacgacacacagatggccaacaggtatataaaagggtgctcaacataattaatcatcaaggaaatgcatataaaaaccactcgaagtactacctctcaccagttaggctagctgttatcaaaaaaaacaaaagacaacaaatgttgtgatggtgtggaataaaaggaactctgtgcactgttggtgggaatgtagattggtacagccattatggaaaacagaatggaagtttctaaagaaaaataaaactaccatacgatccagcaatccctcttctgggcatatactcaaagtaaatgaaatcaccaccttgtaaatatatctgcagtccgtgttcattgcagcattattcatagtagccaacatggagacaactgaagtgtccgttgacagatgaataaagaaactgtgtatatatatgcctacacacaatggaatattattcatccctaaaaaaaaaaaaaccaacgatatcttgccatttgctacaacatggatgggcctgaaggacactgtgctaaatgaaataagccagacagaaaaaaagatactgcataatttcacatatatgtggaatctaaaaaaaaaatttaaatatataaagagcaaaactggttatagggggatagggagaaatggggaatgtaggtcaaaggattcaaggtagcagatatgtaggatgaataagtctagagatctattgtacaacatgaggattttaggtaacaaatttgtactgtatttgggattcatggtaaatgagtagatgtcagctgctgttgtcaaaaacaaaaaatatgtgggtaactgagatgatggatatgttaatttgcttcacattgtataccttaaatgtatgcaataaaatttattttaaaaataaaaaaaata

SEQ ID NO: 76287 - DNA, 5114 bp, Homo sapiens
agcttggtttggccttgggttccgctgtaggggaggtcccgtgcgaaagaatgaggagatcctggggccttacctactagcggaatcgactgaagagacgcctgccagtgcgggaggtaggaagctcgatccccaaagaaaagagcgagtgggcaggcagctgcgagacagaaccggagtgtgcagggtccctagaggccggttcctggtctgtgctgctctcctggaagccatggtacaggcagagctcagggcgatccccaggtgagggcagcggctctgcctgggattccaccgcagtacaaccgggtagatgcggggtggagaagaaaggatgttgcctgcactgctcgccaatagcaccctgagaggctacatttgcagaagcagcagcagcagaagacacagcgccggtccaggaggcggctcgagctgttcgtaaagtcgcccgacagctttttctccgtagtatgcgagttgacaaaacagccagagaacagggctccccattacaatcttttcgagatcttttcccttgctaaccggatctgatttgtgcgaaaacatgccttgcacttgtacctggaggaactggagacagtggattcgacctttagtagcggtcatctacctggtgtcaatagtggttgcggttcccctatgcgtgtgggaattacagaaactggaggttggaatacacaccaaggcttggtttattgctggaatctttttgctgttgactattcctatatcactgtgggtgatattgcaacacttagtgcattatacacaacctgaactacaaaaaccaataataaggattctttggatggtacctatttacagtttagatagttggatagctttgaaatatcccggaattgcaatatatgtggatacctgcagagaatgctatgaagcttatgtaatttacaactttatgggattccttaccaattatctaactaaccggtatccaaatctggtattaatccttgaagccaaagatcaacagaaacatttccctcctttatgttgctgtccaccatgggctatgggagaagtattgctgtttaggtgcaaactaggtgtattacagtacacagttgtcagacctttcaccaccatcgttgctttaatctgtgagctgcttggtatatatgacgaagggaactttagcttttcaaatgcttggacttatttggttataataaacaacatgtcacagttgtttgccatgtattgtctcctgctcttttataaagtactaaaagaagaactgagcccaatccaacctgttggcaaatttctttgtgtaaagctggtggtttttgtttctttttggcaagcagtagttattgctttgttggtaaaagttggcgttatttctgaaaagcatacgtgggaatggcaaactgtagaagctgtggccaccggactccaggattttattatctgtattgagatgttcctcgctgccattgctcatcattacacattctcatataaaccatatgtccaagaagcagaagagggctcatgctttgattcctttcttgccatgtgggatgtctcagatattagagatgatatttctgaacaagtaaggcatgttggacggacagtcaggggacatcccaggaaaaaattgtttcccgaggatcaagatcaaaatgaacatacaagtttattatcatcatcatcacaagatgcaatttccattgcttcttctatgccaccttcacccatgggtcactaccaagggtttggacacactgtgactccccagactacacctaccacagctaagatatctgatgaaatccttagtgatactataggagagaaaaaagaaccttcagataaatccgtggattcctgaacagtatggaaaagcaaactgtgcaactactacattatatcattacctggtatcccatggattttgtgcttgggacagaccataaatgatggaaaatgtcaacacaaaaatagctgaaagccaggtacaactactgcatttatatatgtaagttttgtatatcaaaaataattggtctaaatttcctagacttagacttgatttcttaacattagggtatcgcatactcaaatggtagacaatgaccccaactaaatcttcctgatgttacactgctttatcaagaggatggactttttttttttgagacagacagagtcttgctctgtcacccaggctggagtgcagtggcgcaatctcgggtcactgcaagctctgcctcccaagttcatgccattctcctgcctcagcctcccaagtagctgggactacaggcacctgccaccatgcccagctaattttttttttttcagtagagacagggtctcaccatgttagccaggatggtcttgatctgacctcgtgatccgccgacctcggcctcccaaagtgctggaattacaggcgtgagccactgcgcctggccaagaatggacattttttaaaaaaacatcagtacttcctaccactgctgcatgagtataatgctccggaattatcagaaagcataatgcagaaatacgaattagtggaacttaatcatgtgccatataagcttacctaacaaacagttatatccctattcctcaactgaatgtctttcaataaataagaatttatcatttattttctgcaacttttttatgtctcattctttaaacattaaaaacccttaatattttaacaaaaatttcttgattagaggcacagtgaaaaagaagtcaaaaaaaaaagttctacttttcatcagtgctattaaaggtggcagcaaatgtaaatcttggctgaatggtcttaattactcattaaaccacagtcagaaagacatataggtgctatttgggaaaactttttattacctaggatggggtttctctaattgctaatcacaaccccactgggtcatgtttgacattttataatgaaaataaaacagaaagtgccacagtatgttacagaaagcaaagatgagtattgtttctcaaagcctttgctttatgtatttatacacatactcattcatatctatctatatatatagagagagatagtggttcacagtaatcatacaaagtctttattccatccactattataaacatttctattaaaactaaaactgggctctatgtaaaaaccccaaagatacacacacaaaaaaaatctgtttgttagaactcaagtgaattcagtaaagttgcagaatacaaaatcaacatacaaaaagcattagcatttttatacataaataatgaaaataatgacctaactgaaaaattaagatgccatttatgatagcataaaaaaaatacttacttaggaataaatttaacaccaaggcagtaaaagatctgtatgtacactgaaaactatgaaacactgatgaaagaaagacacaaataaatggaaaggtatcccgtgctcatggatcagaataatactgttaaaatggtcacactacccaaagcaattcagaatcaatgcaatcctatcaaaattccaatggcattatttacacaaacagaaaaaaatcctaaaattcatatgtaacgataaaagaccctgaataggcaaaagaatactgaggaaaaaatgttggagacatcacatttcctaattataaattatactacaaaactatagtaatcaagacatgggacagaagaaagagtccagatataaatccaaacatacacagtcaactaatttttgacaaagacaccaagaagacacatcggggaaagaacagtcttcattaagtgttcttaataaagatgctgggaaaactgcacttccacatgcaaaacaatgaaatcagacccttatcttagacctacacaacaatcaattcaaaatggataaaagacctaaatgtaagaccagaaactatagaagagaacataggagaaaagttcctggacactgacccttggcaatgattttttggatatcacaccaaaagctcagtcaacaaaaacaaaaacaaatgtgactacatcaaaccaaaaagcttctgacagtaaaagaaacagtcaacaaaatgaaacagtagcctacagattgagtaaaaaatatttgtaaggcatatatatggaaaagggttagtatccaaaatttataaagaattcatacaactcaattttaaaaatgggcaaaagacctgaaaagacatttctccgaagacgacacacagatggccaacaggtatataaaagggtgctcaacataattaatcatcaaggaaatgcatataaaaaccactcgaagtactacctctcaccagttaggctagctgttatcaaaaaaaacaaaagacaacaaatgttgtgatggtgtggaataaaaggaactctgtgcactgttggtgggaatgtagattggtacagccattatggaaaacagaatggaagtttctaaagaaaaataaaactaccatacgatccagcaatccctcttctgggcatatactcaaagtaaatgaaatcaccaccttgtaaatatatctgcagtccgtgttcattgcagcattattcatagtagccaacatggagacaactgaagtgtccgttgacagatgaataaagaaactgtgtatatatatgcctacacacaatggaatattattcatccctaaaaaaaaaaaaaccaacgatatcttgccatttgctacaacatggatgggcctgaaggacactgtgctaaatgaaataagccagacagaaaaaaagatactgcataatttcacatatatgtggaatctaaaaaaaaaatttaaatatataaagagcaaaactggttatagggggatagggagaaatggggaatgtaggtcaaaggattcaaggtagcagatatgtaggatgaataagtctagagatctattgtacaacatgaggattttaggtaacaaatttgtactgtatttgggattcatggtaaatgagtagatgtcagctgctgttgtcaaaaacaaaaaatatgtgggtaactgagatgatggatatgttaatttgcttcacattgtataccttaaatgtatgcaataaaatttattttaaaaataaaaaaaata

SEQ ID NO: 76288 - DNA, 4720 bp, Homo sapiens
agcttggtttggccttgggttccgctgtaggggaggtcccgtgcgaaagaatgaggagatcctggggccttacctactagcggaatcgactgaagagacgcctgccagtgcgggaggtaggaagctcgatccccaaagaaaagagcgagtgggcaggcagctgcgagacagaaccggagtgtgcagggtccctagaggccggttcctggtctgtgctgctctcctggaagccatggtacaggcagagctcagggcgatccccaggtgagggcagcggctctgcctgggattccaccgcagtacaaccgggtagatgcggggtggagaagaaaggatgttgcctgcactgctcgccaatagcaccctgagaggctacatttgcagaagcagcagcagcagaagacacagcgccggtccaggaggcggctcgagctgttcgtaaagtcgcccgacagctttttctccgtagtatgcgagttgacaaaacagccagagaacagggctccccattacaatcttttcgagatcttttcccttgctaaccggatctgatttgtgcgaaaacatgccttgcacttgtacctggaggaactggagacagtggattcgacctttagtagcggtcatctacctggtgtcaatagtggttgcggttcccctatgcgtgtgggaattacagaaactggaggttggaatacacaccaaggcttggtttattgctggaatctttttgctgttgactattcctatatcactgtgggtgatattgcaacacttagtgcattatacacaacctgaactacaaaaaccaataataaggattctttggatggtacctatttacagtttagatagttggatagctttgaaatatcccggaattgcaatatatgtggatacctgcagagaatgctatgaagcttatgtaatttacaactttatgggattccttaccaattatctaactaaccggtatccaaatctggtattaatccttgaagccaaagatcaacagaaacatttccctcctttatgttgctgtccaccatgggctatgggagaagtattgctgtttaggtgcaaactaggtgtattacagtacacagttgtcagacctttcaccaccatcgttgctttaatctgtgagctgcttggtatatatgacgaagggaactttagcttttcaaatgcttggacttatttggttataataaacaacatgtcacagttgtttgccatgtattgtctcctgctcttttataaagtactaaaagaagaactgagcccaatccaacctgttggcaaatttctttgtgtaaagctggtggtttttgtttctttttggcaagcagtagttattgctttgttggtaaaagttggcgttatttctgaaaagcatacgtgggaatggcaaactgtagaagctgtggccaccggactccaggattttattatctgtattgagatgttcctcgctgccattgctcatcattacacattctcatataaaccatatgtccaagaagcagaagagggctcatgctttgattcctttcttgccatgtgggatgtctcagatattagagatgatatttctgaacaagtaaggcatgttggacggacagtcaggggacatcccaggaaaaaattgtttcccgaggatcaagatcaaaatgaacatacaagtttattatcatcatcatcacaagatgcaatttccattgcttcttctatgccaccttcacccatgggtcactaccaagggtttggacacactgtgactccccagactacacctaccacagctaagatatctgatgaaatccttagtgatactataggagagaaaaaagaaccttcagataaatccgtggattcctgaacagtatggaaaagcaaactgtgcaactactacattatatcattacctggtatcccatggattttgtgcttgggacagaccataaatgatggaaaatgtcaacacaaaaatagctgaaagccaggtacaactactgcatttatatatgtaagttttgtatatcaaaaataattggtctaaatttcctagacttagacttgatttcttaacattagggtatcgcatactcaaatggtagacaatgaccccaactaaatcttcctgatgttacactgctttatcaagaggatggactttttttttttgagacagacagagtcttgctctgtcacccaggctggagtgcagtggcgcaatctcgggtcactgcaagctctgcctcccaagttcatgccattctcctgcctcagcctcccaagtagctgggactacaggcacctgccaccatgcccagctaattttttttttttcagtagagacagggtctcaccatgttagccaggatggtcttgatctgacctcgtgatccgccgacctcggcctcccaaagtgctggaattacaggcgtgagccactgcgcctggccaagaatggacattttttaaaaaaacatcagtacttcctaccactgctgcatgagtataatgctccggaattatcagaaagcataatgcagaaatacgaattagtggaacttaatcatgtgccatataagcttacctaacaaacagttatatccctattcctcaactgaatgtctttcaataaataagaatttatcatttattttctgcaacttttttatgtctcattctttaaacattaaaaacccttaatattttaacaaaaatttcttgattagaggcacagtgaaaaagaagtcaaaaaaaaaagttctacttttcatcagtgctattaaaggtggcagcaaatgtaaatcttggctgaatggtcttaattactcattaaaccacagtcagaaagacatataggtgctatttgggaaaactttttattacctaggatggggtttctctaattgctaatcacaaccccactgggtcatgtttgacattttataatgaaaataaaacagaaagtgccacagtatgttacagaaagcaaagatgagtattgtttctcaaagcctttgctttatgtatttatacacatactcattcatatctatctatatatatagagagagatagtggttcacagtaatcatacaaagtctttattccatccactattataaacatttctattaaaactaaaactgggctctatgtaaaaaccccaaagatacacacacaaaaaaaatctgtttgttagaactcaagtgaattcagtaaagttgcagaatacaaaatcaacatacaaaaagcattagcatttttatacataaataatgaaaataatgacctaactgaaaaattaagatgccatttatgatagcataaaaaaaatacttacttaggaataaatttaacaccaaggcagtaaaagatctgtatgtacactgaaaactatgaaacactgatgaaagaaagacacaaataaatggaaaggtatcccgtgctcatggatcagaataatactgttaaaatggtcacactacccaaagcaattcagaatcaatgcaatcctatcaaaattccaatggcattatttacacaaacagaaaaaaatcctaaaattcatatgtaacgataaaagaccctgaataggcaaaagaatactgaggaaaaaatgttggagcatcaaaccaaaaagcttctgacagtaaaagaaacagtcaacaaaatgaaacagtagcctacagattgagtaaaaaatatttgtaaggcatatatatggaaaagggttagtatccaaaatttataaagaattcatacaactcaattttaaaaatgggcaaaagacctgaaaagacatttctccgaagacgacacacagatggccaacaggtatataaaagggtgctcaacataattaatcatcaaggaaatgcatataaaaaccactcgaagtactacctctcaccagttaggctagctgttatcaaaaaaaacaaaagacaacaaatgttgtgatggtgtggaataaaaggaactctgtgcactgttggtgggaatgtagattggtacagccattatggaaaacagaatggaagtttctaaagaaaaataaaactaccatacgatccagcaatccctcttctgggcatatactcaaagtaaatgaaatcaccaccttgtaaatatatctgcagtccgtgttcattgcagcattattcatagtagccaacatggagacaactgaagtgtccgttgacagatgaataaagaaactgtgtatatatatgcctacacacaatggaatattattcatccctaaaaaaaaaaaaaccaacgatatcttgccatttgctacaacatggatgggcctgaaggacactgtgctaaatgaaataagccagacagaaaaaaagatactgcataatttcacatatatgtggaatctaaaaaaaaaatttaaatatataaagagcaaaactggttatagggggatagggagaaatggggaatgtaggtcaaaggattcaaggtagcagatatgtaggatgaataagtctagagatctattgtacaacatgaggattttaggtaacaaatttgtactgtatttgggattcatggtaaatgagtagatgtcagctgctgttgtcaaaaacaaaaaatatgtgggtaactgagatgatggatatgttaatttgcttcacattgtataccttaaatgtatgcaataaaatttattttaaaaataaaaaaaata

SEQ ID NO: 76289 - DNA, 4929 bp, Homo sapiens
agcttggtttggccttgggttccgctgtaggggaggtcccgtgcgaaagaatgaggagatcctggggccttacctactagcggaatcgactgaagagacgcctgccagtgcgggaggtaggaagctcgatccccaatagcaccctgagaggctacatttgcagaagcagcagcagcagaagacacagcgccggtccaggaggcggctcgagctgttcgtaaagtcgcccgacagctttttctccgtagtatgcgagttgacaaaacagccagagaacagggctccccattacaatcttttcgagatcttttcccttgctaaccggatctgatttgtgcgaaaacatgccttgcacttgtacctggaggaactggagacagtggattcgacctttagtagcggtcatctacctggtgtcaatagtggttgcggttcccctatgcgtgtgggaattacagaaactggaggttggaatacacaccaaggcttggtttattgctggaatctttttgctgttgactattcctatatcactgtgggtgatattgcaacacttagtgcattatacacaacctgaactacaaaaaccaataataaggattctttggatggtacctatttacagtttagatagttggatagctttgaaatatcccggaattgcaatatatgtggatacctgcagagaatgctatgaagcttatgtaatttacaactttatgggattccttaccaattatctaactaaccggtatccaaatctggtattaatccttgaagccaaagatcaacagaaacatttccctcctttatgttgctgtccaccatgggctatgggagaagtattgctgtttaggtgcaaactaggtgtattacagtacacagttgtcagacctttcaccaccatcgttgctttaatctgtgagctgcttggtatatatgacgaagggaactttagcttttcaaatgcttggacttatttggttataataaacaacatgtcacagttgtttgccatgtattgtctcctgctcttttataaagtactaaaagaagaactgagcccaatccaacctgttggcaaatttctttgtgtaaagctggtggtttttgtttctttttggcaagcagtagttattgctttgttggtaaaagttggcgttatttctgaaaagcatacgtgggaatggcaaactgtagaagctgtggccaccggactccaggattttattatctgtattgagatgttcctcgctgccattgctcatcattacacattctcatataaaccatatgtccaagaagcagaagagggctcatgctttgattcctttcttgccatgtgggatgtctcagatattagagatgatatttctgaacaagtaaggcatgttggacggacagtcaggggacatcccaggaaaaaattgtttcccgaggatcaagatcaaaatgaacatacaagtttattatcatcatcatcacaagatgcaatttccattgcttcttctatgccaccttcacccatgggtcactaccaagggtttggacacactgtgactccccagactacacctaccacagctaagatatctgatgaaatccttagtgatactataggagagaaaaaagaaccttcagataaatccgtggattcctgaacagtatggaaaagcaaactgtgcaactactacattatatcattacctggtatcccatggattttgtgcttgggacagaccataaatgatggaaaatgtcaacacaaaaatagctgaaagccaggtacaactactgcatttatatatgtaagttttgtatatcaaaaataattggtctaaatttcctagacttagacttgatttcttaacattagggtatcgcatactcaaatggtagacaatgaccccaactaaatcttcctgatgttacactgctttatcaagaggatggactttttttttttgagacagacagagtcttgctctgtcacccaggctggagtgcagtggcgcaatctcgggtcactgcaagctctgcctcccaagttcatgccattctcctgcctcagcctcccaagtagctgggactacaggcacctgccaccatgcccagctaattttttttttttcagtagagacagggtctcaccatgttagccaggatggtcttgatctgacctcgtgatccgccgacctcggcctcccaaagtgctggaattacaggcgtgagccactgcgcctggccaagaatggacattttttaaaaaaacatcagtacttcctaccactgctgcatgagtataatgctccggaattatcagaaagcataatgcagaaatacgaattagtggaacttaatcatgtgccatataagcttacctaacaaacagttatatccctattcctcaactgaatgtctttcaataaataagaatttatcatttattttctgcaacttttttatgtctcattctttaaacattaaaaacccttaatattttaacaaaaatttcttgattagaggcacagtgaaaaagaagtcaaaaaaaaaagttctacttttcatcagtgctattaaaggtggcagcaaatgtaaatcttggctgaatggtcttaattactcattaaaccacagtcagaaagacatataggtgctatttgggaaaactttttattacctaggatggggtttctctaattgctaatcacaaccccactgggtcatgtttgacattttataatgaaaataaaacagaaagtgccacagtatgttacagaaagcaaagatgagtattgtttctcaaagcctttgctttatgtatttatacacatactcattcatatctatctatatatatagagagagatagtggttcacagtaatcatacaaagtctttattccatccactattataaacatttctattaaaactaaaactgggctctatgtaaaaaccccaaagatacacacacaaaaaaaatctgtttgttagaactcaagtgaattcagtaaagttgcagaatacaaaatcaacatacaaaaagcattagcatttttatacataaataatgaaaataatgacctaactgaaaaattaagatgccatttatgatagcataaaaaaaatacttacttaggaataaatttaacaccaaggcagtaaaagatctgtatgtacactgaaaactatgaaacactgatgaaagaaagacacaaataaatggaaaggtatcccgtgctcatggatcagaataatactgttaaaatggtcacactacccaaagcaattcagaatcaatgcaatcctatcaaaattccaatggcattatttacacaaacagaaaaaaatcctaaaattcatatgtaacgataaaagaccctgaataggcaaaagaatactgaggaaaaaatgttggagacatcacatttcctaattataaattatactacaaaactatagtaatcaagacagtatggtactggtataaaaacacatacacaggccagtgggacagaagaaagagtccagatataaatccaaacatacacagtcaactaatttttgacaaagacaccaagaagacacatcggggaaagaacagtcttcattaagtgttcttaataaagatgctgggaaaactgcacttccacatgcaaaacaatgaaatcagacccttatcttagacctacacaacaatcaattcaaaatggataaaagacctaaatgtaagaccagaaactatagaagagaacataggagaaaagttcctggacactgacccttggcaatgattttttggatatcacaccaaaagctcagtcaacaaaaacaaaaacaaatgtgactacatcaaaccaaaaagcttctgacagtaaaagaaacagtcaacaaaatgaaacagtagcctacagattgagtaaaaaatatttgtaaggcatatatatggaaaagggttagtatccaaaatttataaagaattcatacaactcaattttaaaaatgggcaaaagacctgaaaagacatttctccgaagacgacacacagatggccaacaggtatataaaagggtgctcaacataattaatcatcaaggaaatgcatataaaaaccactcgaagtactacctctcaccagttaggctagctgttatcaaaaaaaacaaaagacaacaaatgttgtgatggtgtggaataaaaggaactctgtgcactgttggtgggaatgtagattggtacagccattatggaaaacagaatggaagtttctaaagaaaaataaaactaccatacgatccagcaatccctcttctgggcatatactcaaagtaaatgaaatcaccaccttgtaaatatatctgcagtccgtgttcattgcagcattattcatagtagccaacatggagacaactgaagtgtccgttgacagatgaataaagaaactgtgtatatatatgcctacacacaatggaatattattcatccctaaaaaaaaaaaaaccaacgatatcttgccatttgctacaacatggatgggcctgaaggacactgtgctaaatgaaataagccagacagaaaaaaagatactgcataatttcacatatatgtggaatctaaaaaaaaaatttaaatatataaagagcaaaactggttatagggggatagggagaaatggggaatgtaggtcaaaggattcaaggtagcagatatgtaggatgaataagtctagagatctattgtacaacatgaggattttaggtaacaaatttgtactgtatttgggattcatggtaaatgagtagatgtcagctgctgttgtcaaaaacaaaaaatatgtgggtaactgagatgatggatatgttaatttgcttcacattgtataccttaaatgtatgcaataaaatttattttaaaaataaaaaaaata

SEQ ID NO: 76290 - DNA, 2668 bp, Homo sapiens
agcttggtttggccttgggttccgctgtaggggaggtcccgtgcgaaagaatgaggagatcctggggccttacctactagcggaatcgactgaagagacgcctgccagtgcgggaggtaggaagctcgatccccaaagaaaagagcgagtgggcaggcagctgcgagacagaaccggagtgtgcagggtccctagaggccggttcctggtctgtgctgctctcctggaagccatggtacaggcagagctcagggcgatccccaggtgagggcagcggctctgcctgggattccaccgcagtacaaccgggtagatgcggggtggagaagaaaggatgttgcctgcactgctcgccaatagcaccctgagaggctacatttgcagaagcagcagcagcagaagacacagcgccggtccaggaggcggctcgagctgttcgtaaagtcgcccgacagctttttctccgtagtatgcgagttgacaaaacagccagagaacagggctccccattacaatcttttcgagatcttttcccttgctaaccggatctgatttgtgcgaaaacatgccttgcacttgtacctggaggaactggagacagtggattcgacctttagtagcggtcatctacctggtgtcaatagtggttgcggttcccctatgcgtgtgggaattacagaaactggaggttggaatacacaccaaggcttggtttattgctggaatctttttgctgttgactattcctatatcactgtgggtgatattgcaacacttagtgcattatacacaacctgaactacaaaaaccaataataaggattctttggatggtacctatttacagtttagatagttggatagctttgaaatatcccggaattgcaatatatgtggatacctgcagagaatgctatgaagcttatgtaatttacaactttatgggattccttaccaattatctaactaaccggtatccaaatctggtattaatccttgaagccaaagatcaacagaaacatttccctcctttatgttgctgtccaccatgggctatgggagaagtattgctgtttaggtgcaaactaggtgtattacagtacacagttgtcagacctttcaccaccatcgttgctttaatctgtgagctgcttggtatatatgacgaagggaactttagcttttcaaatgcttggacttatttggttataataaacaacatgtcacagttgtttgccatgtattgtctcctgctcttttataaagtactaaaagaagaactgagcccaatccaacctgttggcaaatttctttgtgtaaagctggtggtttttgtttctttttggcaagcagtagttattgctttgttggtaaaagttggcgttatttctgaaaagcatacgtgggaatggcaaactgtagaagctgtggccaccggactccaggattttattatctgtattgagatgttcctcgctgccattgctcatcattacacattctcatataaaccatatgtccaagaagcagaagagggctcatgctttgattcctttcttgccatgtgggatgtctcagatattagagatgatatttctgaacaagtaaggcatgttggacggacagtcaggggacatcccaggaaaaaattgtttcccgaggatcaagatcaaaatgaacatacaagtttattatcatcatcatcacaagatgcaatttccattgcttcttctatgccaccttcacccatgggtcactaccaagggtttggacacactgtgactccccagactacacctaccacagctaagatatctgatgaaatccttagtgatactataggagagaaaaaagaaccttcagataaatccgtggattcctgaacagtatggaaaagcaaactgtgcaactactacattatatcattacctggtatcccatggattttgtgcttgggacagaccataaatgatggaaaatgtcaacacaaaaatagctgaaagccaggtacaactactgcatttatatatgtaagttttgtatatcaaaaataattggtctaaatttcctagacttagacttgatttcttaacattagggtatcgcatactcaaatggtagacaatgaccccaactaaatcttcctgatgttacactgctttatcaagaggatggactttttttttttgagacagacagagtcttgctctgtcacccaggctggagtgcagtggcgcaatctcgggtcactgcaagctctgcctcccaagttcatgccattctcctgcctcagcctcccaagtagctgggactacaggcacctgccaccatgcccagctaattttttttttttcagtagagacagggtctcaccatgttagccaggatggtcttgatctgacctcgtgatccgccgacctcggcctcccaaagtgctggaattacaggcgtgagccactgcgcctggccaagaatggacattttttaaaaaaacatcagtacttcctaccactgctgcatgagtataatgctccggaattatcagaaagcataatgcagaaatacgaattagtggaacttaatcatgtgccatataagcttacctaacaaacagttatatccctattcctcaactgaatgtctttcaataaataagaatttatcattta

SEQ ID NO: 76291 - DNA, 4566 bp, Homo sapiens
gcctgggcaccagagtgaaactctgtctcaaaaaaaaaaaaaaaaaagaatttagtaaagaggtgggtaataggggtcctagaaacaaatacaccaaatttaacaagctagaaacaatacaaaaagggaaaaagaaaaatccctgaaatcccaccacccagaaaagagtgattaacatcttggtaaacctgtgtcacatataaaactccagagaaagttccatactataaaaatttttggaattcgacaatgttcagtagtatattgtagatacagttctttgtcagtaaacagaaatattattttgttttgtggagggggtgatttttatttttatttttattttgcttagtattctgttatgtggatataactttttactaatctccttttgatattcaggttgttcctaatttttttaccattataagaaacactgaagtgaatattcttatgtatacaactatgaaagcatgtccatgtcattatttgctgtttaaattttacctggggccattatctctagatttgcttgaaatgctcagcttgactccctatcttgagacaaaactactagaaaaatgaatttgtaaagcaaattaatatatttaacatagagtttcttcagcaatatgctgtaaaggcagggtggtggtggtacacaggttgcactggatttttttttaatggcacatttttaaaactactgctcattttatgcttgatatagatttggcgtttaccttttcctaacatataggcaagcagtagttattgctttgttggtaaaagttggcgttatttctgaaaagcatacgtgggaatggcaaactgtagaagctgtggccaccggactccaggattttattatctgtattgagatgttcctcgctgccattgctcatcattacacattctcatataaaccatatgtccaagaagcagaagagggctcatgctttgattcctttcttgccatgtgggatgtctcagatattagagatgatatttctgaacaagtaaggcatgttggacggacagtcaggggacatcccaggaaaaaattgtttcccgaggatcaagatcaaaatgaacatacaagtttattatcatcatcatcacaagatgcaatttccattgcttcttctatgccaccttcacccatgggtcactaccaagggtttggacacactgtgactccccagactacacctaccacagctaagatatctgatgaaatccttagtgatactataggagagaaaaaagaaccttcagataaatccgtggattcctgaacagtatggaaaagcaaactgtgcaactactacattatatcattacctggtatcccatggattttgtgcttgggacagaccataaatgatggaaaatgtcaacacaaaaatagctgaaagccaggtacaactactgcatttatatatgtaagttttgtatatcaaaaataattggtctaaatttcctagacttagacttgatttcttaacattagggtatcgcatactcaaatggtagacaatgaccccaactaaatcttcctgatgttacactgctttatcaagaggatggactttttttttttgagacagacagagtcttgctctgtcacccaggctggagtgcagtggcgcaatctcgggtcactgcaagctctgcctcccaagttcatgccattctcctgcctcagcctcccaagtagctgggactacaggcacctgccaccatgcccagctaattttttttttttcagtagagacagggtctcaccatgttagccaggatggtcttgatctgacctcgtgatccgccgacctcggcctcccaaagtgctggaattacaggcgtgagccactgcgcctggccaagaatggacattttttaaaaaaacatcagtacttcctaccactgctgcatgagtataatgctccggaattatcagaaagcataatgcagaaatacgaattagtggaacttaatcatgtgccatataagcttacctaacaaacagttatatccctattcctcaactgaatgtctttcaataaataagaatttatcatttattttctgcaacttttttatgtctcattctttaaacattaaaaacccttaatattttaacaaaaatttcttgattagaggcacagtgaaaaagaagtcaaaaaaaaaagttctacttttcatcagtgctattaaaggtggcagcaaatgtaaatcttggctgaatggtcttaattactcattaaaccacagtcagaaagacatataggtgctatttgggaaaactttttattacctaggatggggtttctctaattgctaatcacaaccccactgggtcatgtttgacattttataatgaaaataaaacagaaagtgccacagtatgttacagaaagcaaagatgagtattgtttctcaaagcctttgctttatgtatttatacacatactcattcatatctatctatatatatagagagagatagtggttcacagtaatcatacaaagtctttattccatccactattataaacatttctattaaaactaaaactgggctctatgtaaaaaccccaaagatacacacacaaaaaaaatctgtttgttagaactcaagtgaattcagtaaagttgcagaatacaaaatcaacatacaaaaagcattagcatttttatacataaataatgaaaataatgacctaactgaaaaattaagatgccatttatgatagcataaaaaaaatacttacttaggaataaatttaacaccaaggcagtaaaagatctgtatgtacactgaaaactatgaaacactgatgaaagaaagacacaaataaatggaaaggtatcccgtgctcatggatcagaataatactgttaaaatggtcacactacccaaagcaattcagaatcaatgcaatcctatcaaaattccaatggcattatttacacaaacagaaaaaaatcctaaaattcatatgtaacgataaaagaccctgaataggcaaaagaatactgaggaaaaaatgttggagacatcacatttcctaattataaattatactacaaaactatagtaatcaagacagtatggtactggtataaaaacacatacacaggccagtgggacagaagaaagagtccagatataaatccaaacatacacagtcaactaatttttgacaaagacaccaagaagacacatcggggaaagaacagtcttcattaagtgttcttaataaagatgctgggaaaactgcacttccacatgcaaaacaatgaaatcagacccttatcttagacctacacaacaatcaattcaaaatggataaaagacctaaatgtaagaccagaaactatagaagagaacataggagaaaagttcctggacactgacccttggcaatgattttttggatatcacaccaaaagctcagtcaacaaaaacaaaaacaaatgtgactacatcaaaccaaaaagcttctgacagtaaaagaaacagtcaacaaaatgaaacagtagcctacagattgagtaaaaaatatttgtaaggcatatatatggaaaagggttagtatccaaaatttataaagaattcatacaactcaattttaaaaatgggcaaaagacctgaaaagacatttctccgaagacgacacacagatggccaacaggtatataaaagggtgctcaacataattaatcatcaaggaaatgcatataaaaaccactcgaagtactacctctcaccagttaggctagctgttatcaaaaaaaacaaaagacaacaaatgttgtgatggtgtggaataaaaggaactctgtgcactgttggtgggaatgtagattggtacagccattatggaaaacagaatggaagtttctaaagaaaaataaaactaccatacgatccagcaatccctcttctgggcatatactcaaagtaaatgaaatcaccaccttgtaaatatatctgcagtccgtgttcattgcagcattattcatagtagccaacatggagacaactgaagtgtccgttgacagatgaataaagaaactgtgtatatatatgcctacacacaatggaatattattcatccctaaaaaaaaaaaaaccaacgatatcttgccatttgctacaacatggatgggcctgaaggacactgtgctaaatgaaataagccagacagaaaaaaagatactgcataatttcacatatatgtggaatctaaaaaaaaaatttaaatatataaagagcaaaactggttatagggggatagggagaaatggggaatgtaggtcaaaggattcaaggtagcagatatgtaggatgaataagtctagagatctattgtacaacatgaggattttaggtaacaaatttgtactgtatttgggattcatggtaaatgagtagatgtcagctgctgttgtcaaaaacaaaaaatatgtgggtaactgagatgatggatatgttaatttgcttcacattgtataccttaaatgtatgcaataaaatttattttaaaaataaaaaaaata

SEQ ID NO: 76292 - DNA, 3875 bp, Homo sapiens
aaggggtccataataattattttagaaaatggaaaaatgaatataatctgagaagaaaaaacacagctgtttatcttagcacttttgaaaagcaagtagagaaagatagcactctacaaacctagatttaaatccaaaggtggctgttatcttattgttgttctcataggattttattatctgtattgagatgttcctcgctgccattgctcatcattacacattctcatataaaccatatgtccaagaagcagaagagggctcatgctttgattcctttcttgccatgtgggatgtctcagatattagagatgatatttctgaacaagtaaggcatgttggacggacagtcaggggacatcccaggaaaaaattgtttcccgaggatcaagatcaaaatgaacatacaagtttattatcatcatcatcacaagatgcaatttccattgcttcttctatgccaccttcacccatgggtcactaccaagggtttggacacactgtgactccccagactacacctaccacagctaagatatctgatgaaatccttagtgatactataggagagaaaaaagaaccttcagataaatccgtggattcctgaacagtatggaaaagcaaactgtgcaactactacattatatcattacctggtatcccatggattttgtgcttgggacagaccataaatgatggaaaatgtcaacacaaaaatagctgaaagccaggtacaactactgcatttatatatgtaagttttgtatatcaaaaataattggtctaaatttcctagacttagacttgatttcttaacattagggtatcgcatactcaaatggtagacaatgaccccaactaaatcttcctgatgttacactgctttatcaagaggatggactttttttttttgagacagacagagtcttgctctgtcacccaggctggagtgcagtggcgcaatctcgggtcactgcaagctctgcctcccaagttcatgccattctcctgcctcagcctcccaagtagctgggactacaggcacctgccaccatgcccagctaattttttttttttcagtagagacagggtctcaccatgttagccaggatggtcttgatctgacctcgtgatccgccgacctcggcctcccaaagtgctggaattacaggcgtgagccactgcgcctggccaagaatggacattttttaaaaaaacatcagtacttcctaccactgctgcatgagtataatgctccggaattatcagaaagcataatgcagaaatacgaattagtggaacttaatcatgtgccatataagcttacctaacaaacagttatatccctattcctcaactgaatgtctttcaataaataagaatttatcatttattttctgcaacttttttatgtctcattctttaaacattaaaaacccttaatattttaacaaaaatttcttgattagaggcacagtgaaaaagaagtcaaaaaaaaaagttctacttttcatcagtgctattaaaggtggcagcaaatgtaaatcttggctgaatggtcttaattactcattaaaccacagtcagaaagacatataggtgctatttgggaaaactttttattacctaggatggggtttctctaattgctaatcacaaccccactgggtcatgtttgacattttataatgaaaataaaacagaaagtgccacagtatgttacagaaagcaaagatgagtattgtttctcaaagcctttgctttatgtatttatacacatactcattcatatctatctatatatatagagagagatagtggttcacagtaatcatacaaagtctttattccatccactattataaacatttctattaaaactaaaactgggctctatgtaaaaaccccaaagatacacacacaaaaaaaatctgtttgttagaactcaagtgaattcagtaaagttgcagaatacaaaatcaacatacaaaaagcattagcatttttatacataaataatgaaaataatgacctaactgaaaaattaagatgccatttatgatagcataaaaaaaatacttacttaggaataaatttaacaccaaggcagtaaaagatctgtatgtacactgaaaactatgaaacactgatgaaagaaagacacaaataaatggaaaggtatcccgtgctcatggatcagaataatactgttaaaatggtcacactacccaaagcaattcagaatcaatgcaatcctatcaaaattccaatggcattatttacacaaacagaaaaaaatcctaaaattcatatgtaacgataaaagaccctgaataggcaaaagaatactgaggaaaaaatgttggagacatcacatttcctaattataaattatactacaaaactatagtaatcaagacagtatggtactggtataaaaacacatacacaggccagtgggacagaagaaagagtccagatataaatccaaacatacacagtcaactaatttttgacaaagacaccaagaagacacatcggggaaagaacagtcttcattaagtgttcttaataaagatgctgggaaaactgcacttccacatgcaaaacaatgaaatcagacccttatcttagacctacacaacaatcaattcaaaatggataaaagacctaaatgtaagaccagaaactatagaagagaacataggagaaaagttcctggacactgacccttggcaatgattttttggatatcacaccaaaagctcagtcaacaaaaacaaaaacaaatgtgactacatcaaaccaaaaagcttctgacagtaaaagaaacagtcaacaaaatgaaacagtagcctacagattgagtaaaaaatatttgtaaggcatatatatggaaaagggttagtatccaaaatttataaagaattcatacaactcaattttaaaaatgggcaaaagacctgaaaagacatttctccgaagacgacacacagatggccaacaggtatataaaagggtgctcaacataattaatcatcaaggaaatgcatataaaaaccactcgaagtactacctctcaccagttaggctagctgttatcaaaaaaaacaaaagacaacaaatgttgtgatggtgtggaataaaaggaactctgtgcactgttggtgggaatgtagattggtacagccattatggaaaacagaatggaagtttctaaagaaaaataaaactaccatacgatccagcaatccctcttctgggcatatactcaaagtaaatgaaatcaccaccttgtaaatatatctgcagtccgtgttcattgcagcattattcatagtagccaacatggagacaactgaagtgtccgttgacagatgaataaagaaactgtgtatatatatgcctacacacaatggaatattattcatccctaaaaaaaaaaaaaccaacgatatcttgccatttgctacaacatggatgggcctgaaggacactgtgctaaatgaaataagccagacagaaaaaaagatactgcataatttcacatatatgtggaatctaaaaaaaaaatttaaatatataaagagcaaaactggttatagggggatagggagaaatggggaatgtaggtcaaaggattcaaggtagcagatatgtaggatgaataagtctagagatctattgtacaacatgaggattttaggtaacaaatttgtactgtatttgggattcatggtaaatgagtagatgtcagctgctgttgtcaaaaacaaaaaatatgtgggtaactgagatgatggatatgttaatttgcttcacattgtataccttaaatgtatgcaataaaatttattttaaaaataaaaaaaata

SEQ ID NO: 76293 - DNA, 3295 bp, Homo sapiens
gcggccgtctactactactaaattcgcggccgcgtcgacagcaaactgtgcaactactacattatatcattacctggtatcccatggattttgtgcttgggacagaccataaatgatggaaaatgtcaacacaaaaatagctgaaagccaggtacaactactgcatttatatatgtaagttttgtatatcaaaaataattggtctaaatttcctagacttagacttgatttcttaacattagggtatcgcatactcaaatggtagacaatgaccccaactaaatcttcctgatgttacactgctttatcaagaggatggactttttttttttgagacagacagagtcttgctctgtcacccaggctggagtgcagtggcgcaatctcgggtcactgcaagctctgcctcccaagttcatgccattctcctgcctcagcctcccaagtagctgggactacaggcacctgccaccatgcccagctaattttttttttttcagtagagacagggtctcaccatgttagccaggatggtcttgatctgacctcgtgatccgccgacctcggcctcccaaagtgctggaattacaggcgtgagccactgcgcctggccaagaatggacattttttaaaaaaacatcagtacttcctaccactgctgcatgagtataatgctccggaattatcagaaagcataatgcagaaatacgaattagtggaacttaatcatgtgccatataagcttacctaacaaacagttatatccctattcctcaactgaatgtctttcaataaataagaatttatcatttattttctgcaacttttttatgtctcattctttaaacattaaaaacccttaatattttaacaaaaatttcttgattagaggcacagtgaaaaagaagtcaaaaaaaaaagttctacttttcatcagtgctattaaaggtggcagcaaatgtaaatcttggctgaatggtcttaattactcattaaaccacagtcagaaagacatataggtgctatttgggaaaactttttattacctaggatggggtttctctaattgctaatcacaaccccactgggtcatgtttgacattttataatgaaaataaaacagaaagtgccacagtatgttacagaaagcaaagatgagtattgtttctcaaagcctttgctttatgtatttatacacatactcattcatatctatctatatatatagagagagatagtggttcacagtaatcatacaaagtctttattccatccactattataaacatttctattaaaactaaaactgggctctatgtaaaaaccccaaagatacacacacaaaaaaaatctgtttgttagaactcaagtgaattcagtaaagttgcagaatacaaaatcaacatacaaaaagcattagcatttttatacataaataatgaaaataatgacctaactgaaaaattaagatgccatttatgatagcataaaaaaaatacttacttaggaataaatttaacaccaaggcagtaaaagatctgtatgtacactgaaaactatgaaacactgatgaaagaaagacacaaataaatggaaaggtatcccgtgctcatggatcagaataatactgttaaaatggtcacactacccaaagcaattcagaatcaatgcaatcctatcaaaattccaatggcattatttacacaaacagaaaaaaatcctaaaattcatatgtaacgataaaagaccctgaataggcaaaagaatactgaggaaaaaatgttggagacatcacatttcctaattataaattatactacaaaactatagtaatcaagacagtatggtactggtataaaaacacatacacaggccagtgggacagaagaaagagtccagatataaatccaaacatacacagtcaactaatttttgacaaagacaccaagaagacacatcggggaaagaacagtcttcattaagtgttcttaataaagatgctgggaaaactgcacttccacatgcaaaacaatgaaatcagacccttatcttagacctacacaacaatcaattcaaaatggataaaagacctaaatgtaagaccagaaactatagaagagaacataggagaaaagttcctggacactgacccttggcaatgattttttggatatcacaccaaaagctcagtcaacaaaaacaaaaacaaatgtgactacatcaaaccaaaaagcttctgacagtaaaagaaacagtcaacaaaatgaaacagtagcctacagattgagtaaaaaatatttgtaaggcatatatatggaaaagggttagtatccaaaatttataaagaattcatacaactcaattttaaaaatgggcaaaagacctgaaaagacatttctccgaagacgacacacagatggccaacaggtatataaaagggtgctcaacataattaatcatcaaggaaatgcatataaaaaccactcgaagtactacctctcaccagttaggctagctgttatcaaaaaaaacaaaagacaacaaatgttgtgatggtgtggaataaaaggaactctgtgcactgttggtgggaatgtagattggtacagccattatggaaaacagaatggaagtttctaaagaaaaataaaactaccatacgatccagcaatccctcttctgggcatatactcaaagtaaatgaaatcaccaccttgtaaatatatctgcagtccgtgttcattgcagcattattcatagtagccaacatggagacaactgaagtgtccgttgacagatgaataaagaaactgtgtatatatatgcctacacacaatggaatattattcatccctaaaaaaaaaaaaaccaacgatatcttgccatttgctacaacatggatgggcctgaaggacactgtgctaaatgaaataagccagacagaaaaaaagatactgcataatttcacatatatgtggaatctaaaaaaaaaatttaaatatataaagagcaaaactggttatagggggatagggagaaatggggaatgtaggtcaaaggattcaaggtagcagatatgtaggatgaataagtctagagatctattgtacaacatgaggattttaggtaacaaatttgtactgtatttgggattcatggtaaatgagtagatgtcagctgctgttgtcaaaaacaaaaaatatgtgggtaactgagatgatggatatgttaatttgcttcacattgtataccttaaatgtatgcaataaaatttattttaaaaataaaaaaaata

SEQ ID NO: 76294 - DNA, 2935 bp, Homo sapiens
agcttggtttggccttgggttccgctgtaggggaggtcccgtgcgaaagaatgaggagatcctggggccttacctactagcggaatcgactgaagagacgcctgccagtgcgggaggtaggaagctcgatccccaaagaaaagagcgagtgggcaggcagctgcgagacagaaccggagtgtgcagggtccctagaggccggttcctggtctgtgctgctctcctggaagccatggtacaggcagagctcagggcgatccccaggtgagggcagcggctctgcctgggattccaccgcagtacaaccgggtagatgcggggtggagaagaaaggatgttgcctgcactgctcgccaatagcaccctgagaggctacatttgcagaagcagcagcagcagaagacacagcgccggtccaggaggcggctcgagctgttcgtaaagtcgcccgacagctttttctccgtagtatgcgagttgacaaaacagccagagaacagggctccccattacaatcttttcgagatcttttcccttgctaaccggatctgatttgtgcgaaaacatgccttgcacttgtacctggaggaactggagacagtggattcgacctttagtagcggtcatctacctggtgtcaatagtggttgcggttcccctatgcgtgtgggaattacagaaactggaggttggaatacacaccaaggcttggtttattgctggaatctttttgctgttgactattcctatatcactgtgggtgatattgcaacacttagtgcattatacacaacctgaactacaaaaaccaataataaggattctttggatggtacctatttacagtttagatagttggatagctttgaaatatcccggaattgcaatatatgtggatacctgcagagaatgctatgaagcttatgtaatttacaactttatgggattccttaccaattatctaactaaccggtatccaaatctggtattaatccttgaagccaaagatcaacagaaacatttccctcctttatgttgctgtccaccatgggctatgggagaagtattgctgtttaggtgcaaactaggtgtattacagtacacagttgtcagacctttcaccaccatcgttgctttaatctgtgagctgcttggtatatatgacgaagggaactttagcttttcaaatgcttggacttatttggttataataaacaacatgtcacagttgtttgccatgtattgtctcctgctcttttataaagtactaaaagaagaactgagcccaatccaacctgttggcaaatttctttgtgtaaagctggtggtttttgtttctttttggcaagcagtagttattgctttgttggtaaaagttggcgttatttctgaaaagcatacgtgggaatggcaaactgtagaagctgtggccaccggactccaggattttattatctgtattgagatgttcctcgctgccattgctcatcattacacattctcatataaaccatatgtccaagaagcagaagagggctcatgctttgattcctttcttgccatgtgggatgtctcagatattagagatgatatttctgaacaagtaaggcatgttggacggacagtcaggggacatcccaggaaaaaattgtttcccgaggatcaagatcaaaatgaacatacaagtttattatcatcatcatcacaagatgcaatttccattgcttcttctatgccaccttcacccatgggtcactaccaagggtttggacacactgtgactccccagactacacctaccacagctaagatatctgatgaaatccttagtgatactataggagagaaaaaagaaccttcagataaatccgtggattcctgaacagtatggaaaagcaaactgtgcaactactacattatatcattacctggtatcccatggattttgtgcttgggacagaccataaatgatggaaaatgtcaacacaaaaatagctgaaagccaggtacaactactgcatttatatatgtaagttttgtatatcaaaaataattggtctaaatttcctagacttagacttgatttcttaacattagggtatcgcatactcaaatggtagacaatgaccccaactaaatcttcctgatgttacactgctttatcaagaggatggactttttttttttgagacagacagagtcttgctctgtcacccaggctggagtgcagtggcgcaatctcgggtcactgcaagctctgcctcccaagttcatgccattctcctgcctcagcctcccaagtagctgggactacaggcacctgccaccatgcccagctaattttttttttttcagtagagacagggtctcaccatgttagccaggatggtcttgatctgacctcgtgatccgccgacctcggcctcccaaagtgctggaattacaggcgtgagccactgcgcctggccaagaatggacattttttaaaaaaacatcagtacttcctaccactgctgcatgagtataatgctccggaattatcagaaagcataatgcagaaatacgaattagtggaacttaatcatgtgccatataagcttacctaacaaacagttatatccctattcctcaactgaatgtctttcaataaataagaatttatcatttaaaaaaaaaaaaaaaaaaaaaaaaaaaaaaaaaaaaaaaaaaaaaaaaaaaaaaaaaaaaaaaaaaaaaaaaaaaaaaaaaaaaaaaaaaaaagaaaaaaaaaaaaaaaaaaaaaaaaaagagaaaaacaaaaagagaaaaaaagagagaaaaagaaagagaggaaaagaacgcaccgaaaagaaaaaagaaggaagagagagaacggaaacagagaaagagagagaagacaagaggaggagagaaagaggccggagaaggagaacag

SEQ ID NO: 76295 - DNA, 1546 bp, Homo sapiens
agcttggtttggccttgggttccgctgtaggggaggtcccgtgcgaaagaatgaggagatcctggggccttacctactagcggaatcgactgaagagacgcctgccagtgcgggaggtaggaagctcgatccccaaagaaaagagcgagtgggcaggcagctgcgagacagaaccggagtgtgcagggtccctagaggccggttcctggtctgtgctgctctcctggaagccatggtacaggcagagctcagggcgatccccaggtgagggcagcggctctgcctgggattccaccgcagtacaaccgggtagatgcggggtggagaagaaaggatgttgcctgcactgctcgccaatagcaccctgagaggctacatttgcagaagcagcagcagcagaagacacagcgccggtccaggaggcggctcgagctgttcgtaaagtcgcccgacagctttttctccgtagtatgcgagttgacaaaacagccagagaacagggctccccattacaatcttttcgagatcttttcccttgctaaccggatctgatttgtgcgaaaacatgccttgcacttgtacctggaggaactggagacagtggattcgacctttagtagcggtcatctacctggtgtcaatagtggttgcggttcccctatgcgtgtgggaattacagaaactggaggttggaatacacaccaaggcttggtttattgctggaatctttttgctgttgactattcctatatcactgtgggtgatattgcaacacttagtgcattatacacaacctgaactacaaaaaccaataataaggattctttggatggtacctatttacagtttagatagttggatagctttgaaatatcccggaattgcaatatatgtggatacctgcagagaatgctatgaagcttatgtaatttacaactttatgggattccttaccaattatctaactaaccggtatccaaatctggtattaatccttgaagccaaagatcaacagaaacatttccctcctttatgttgctgtccaccatgggctatgggagaagtattgctgtttaggtgcaaactaggtgtattacagtacacagttgtcagacctttcaccaccatcgttgctttaatctgtgagctgcttggtatatatgacgaagggaactttagcttttcaaatgcttggacttatttggttataataaacaacatgtcacagttggtaagtaaaatgttcacttttcttaaactgtactaaattcgtatctataactaaatttctttagacaaagtttcttcttaggataaggcttgcttctttttaatcttcctataaattaaatctgaaatttaatttatagaaagacttgaaaaaaatttaatatatatcttaatacatatataaagatataataacatctttgtttattatttggcaacttataccctcacatgttgaccatgtttgttcatttatttctgttgctcattgcatagctgtatgagtatgtcataaataaaagcacagtgctacata

SEQ ID NO: 76296 - DNA, 649 bp, Homo sapiens
agcttggtttggccttgggttccgctgtaggggaggtcccgtgcgaaagaatgaggagatcctggggccttacctactagcggaatcgactgaagagacgcctgccagtgcgggaggtaggaagctcgatccccaaagaaaagagcgagtgggcaggcagctgcgagacagaaccggagtgtgcagggtccctagaggccggttcctggtctgtgctgctctcctggaagccatggtacaggcagagctcagggcgatccccaggtgagggcagcggctctgcctgggattccaccgcagtacaaccgggtagatgcggggtggagaagaaaggatgttgcctgcactgctcgccaatagcaccctgagaggctacatttgcagaagcagcagcagcagaagacacagcgccggtccaggaggcggctcgagctgttcgtaaagtcgcccgacagctttttctccgtagtatgcgagttgacaaaacagccagagaacagggctccccattacaatcttttcgagatcttttcccttgctaaccggatctgatttgtgcgaaaacatgccttgcacttgtacctggaggaactggagacagtggattcgaccacgtcgccaacatggggggtcctctagagtcacacgc

SEQ ID NO: 76297 - DNA, 543 bp, Homo sapiens
ttctctgtgtccaaagtcaagtgattgtcagtgagatctcaaataaactgacttctaaatttaagtattgctattgctgtattttgaagtacgattttgatttaatcagagatatctcatttttactatttttagaatctgtgagctgcttggtatatatgacgaagggaactttagcttttcaaatgcttggacttatttggttataataaacaacatgtcacagttggtaagtaaaatgttcacttttcttaaactgtactaaattcgtatctataactaaatttctttagacaaagtttcttcttaggataaggcttgcttctttttaatcttcctataaattaaatctgaaatttaatttatagaaagacttgaaaaaaatttaatatatatcttaatacatatataaagatataataacatctttgtttattatttggcaacttataccctcacatgttgaccatgtttgttcatttatttctgttgctcattgcatagctgtatgagtatgtcataaataaaagcacagtgctacat

SEQ ID NO: 76298 - DNA, 1505 bp, Homo sapiens
atgaaccgaagttttcacaagtctcagaccttgcgattctacgattgcagcgcagtggaagtcaagagcaagtttggggcggaattccgaaggttctctctggaccgtcataagcctgggaagtttgaagatttctacaagctggttgtgcacacccaccatatctccaacagtgatgtaactattggctatgcagatgtgcacggagacctgctgcccatcaacaatgatgacaacttctgcaaggcggtttctagtgcaaatcccctgctcagggtcttcatccagaaacgagaggaggccgagcgtggcagcctcggcgcgggctcgctgtgcaggcggaggcgggcgctgggcgcgctgcgtgatgaaggaccccggcggcgtgcacacctggacatcggcctcccgcgcgacttccgccccgtatcatccatcatcgatgtggacctggtccccgagacgcaccggcgagtgcggctgcaccggcacggctgcgagaagccgctgggcttctacatccgcgatggcgccagcgtgcgcgtgaccccgcacgggctggagaaggtgcccggcatcttcatctcgcgcatggtacccgggggcctggcggagagcaccgggctgctggctgtgaatgacgaggtcctggaggtgaacggcattgaggtggccgggaagacgctggaccaggtcacggacatgatgatcgccaacagccacaacctcatcgtcaccgtcaagcccgccaaccagcgcaacaacgtggtgcgcggcggccgcgcgttgggcagctcgggaccgccctcggacggcaccgcgggcttcgtgggtccccccgccccgcgcgtcctgcagaacttccaccccgacgaggcggagagcgatgaggacaacgacgtcgtcatcgagggcacactggagcctgcacgtcccccccagaccccgggcgcgcccgcaggcagcctctcccgggtcaatggcgcgggcctggcgcagcggctgcagcgggacctggccctggacggcggcctccagcggctgctcagctccctgcgggccgacccccgtcacagcctggcgctgccgccaggcggcgtggaggagcacgggcccgcggtcacgctctagactcccgagaggcccccaaatcctagctccagttccccggtaaggacagggacaggacctgcagactgcatccgctcattttttgttgtttttgtgaccacaaaaacaacgctgctctttgtttcaacttccggatataaaaacacaagtattgcctatttttatagaatttcgccacagaacttaaaatgaacgcctgtagagacactctataccaggcctgagtgcaggtcttggcgcctttgcaaagtgatagaaaagatctgaccaagtgcaaaaaaatgctttttaaaatttttacaaatactttgtttttaaagtgaagctttaaaattacttttttaaaatagtcaaattcatgtttttaagtaagt

SEQ ID NO: 76299 - DNA, 1451 bp, Homo sapiens
ttaatctctgagttctttggtttggtgcctgtggagctgtaaggagagtgctagagagttaattttaggggctgcacttgagcttgcctgatttcagctcagcctgcaggtctggaatgctcctgtgcaccctgggtgcttcggcgtcacgcagatggaacagcagtgccaggtgtatgacggccgagggctcaggcggggctcggttgtgtgtcccctctaactgtcccctctcccgcagaggaggccgagcgtggcagcctcggcgcgggctcgctgtgcaggcggaggcgggcgctgggcgcgctgcgtgatgaaggaccccggcggcgtgcacacctggacatcggcctcccgcgcgacttccgccccgtatcatccatcatcgatgtggacctggtccccgagacgcaccggcgagtgcggctgcaccggcacggctgcgagaagccgctgggcttctacatccgcgatggcgccagcgtgcgcgtgaccccgcacgggctggagaaggtgcccggcatcttcatctcgcgcatggtacccgggggcctggcggagagcaccgggctgctggctgtgaatgacgaggtcctggaggtgaacggcattgaggtggccgggaagacgctggaccaggtcacggacatgatgatcgccaacagccacaacctcatcgtcaccgtcaagcccgccaaccagcgcaacaacgtggtgcgcggcggccgcgcgttgggcagctcgggaccgccctcggacggcaccgcgggcttcgtgggtccccccgccccgcgcgtcctgcagaacttccaccccgacgaggcggagagcgatgaggacaacgacgtcgtcatcgagggcacactggagcctgcacgtcccccccagaccccgggcgcgcccgcaggcagcctctcccgggtcaatggcgcgggcctggcgcagcggctgcagcgggacctggccctggacggcggcctccagcggctgctcagctccctgcgggccgacccccgtcacagcctggcgctgccgccaggcggcgtggaggagcacgggcccgcggtcacgctctagactcccgagaggcccccaaatcctagctccagttccccggtaaggacagggacaggacctgcagactgcatccgctcattttttgttgtttttgtgaccacaaaaacaacgctgctctttgtttcaacttccggatataaaaacacaagtattgcctatttttatagaatttcgccacagaacttaaaatgaacgcctgtagagacactctataccaggcctgagtgcaggtcttggcgcctttgcaaagtgatagaaaagatctgaccaagtgcaaaaaaatgctttttaaaatttttacaaatactttgtttttaaagtgaagctttaaaattacttttttaaaatagtcaaattcatgtttttaagtaagt

SEQ ID NO: 76300 - DNA, 1118 bp, Homo sapiens
atgaaccgaagttttcacaagtctcagaccttgcgattctacgattgcagcgcagtggaagtcaagagcaagtttggggcggaattccgaaggttctctctggaccgtcataagcctgggaagtttgaagatttctacaagctggttgtgcacacccaccatatctccaacagtgatgtaactattggctatgcagatgtgcacggagacctgctgcccatcaacaatgatgacaacttctgcaaggcggtttctagtgcaaatcccctgctcagggtcttcatccagaaacgagatgacggagccctgcgaccaggaacctgactcttcagctcaaatcttggtttgaaagggggacttctctgtgcccctgttgtcggcatgccatggtagagaatggatggcccacgcagctggcccctcatgagaccccagccatctcattccactgggagccacgtcaggacgaaggaggactgggaggggcgtctggctgcgtggtgtggggcctgcagtgttgtggcacacgcagcttcagccaaacatctagccctgtacctagaactaagaaataaaactataacatcagatttaaaagttctctgggaacatttgtcctgcccaaaatagtaacttgtcatttttaaaagaataaaacagagctttgataagccccgtggatgcacctgacacgagagaatcaatggtgcaggtggatttgggctcaaggtggttttcaacacccaggtgatgtctaggtgactggaaagggtgtctgttggacttgcaccttttttccctgtggaagctatttttatgcagttttgtatttgttctcagaacaaattggccaaaaacactacctttaagtgtgacttgatttttagtgtacattttcagatgttatgggaaatgcattcacagttgaggtgtcaaagcaggggaagatggcttccttggcaataacaagcaaaggcaaacatgtttatttttgtatctgtaaaagctggtcgctctttaagtgtagttccagcatctaaagtggacacagaacctgttcttcagggcctgtcacaccctcactgtccatgtgagagtttgtccctccttgtggatac

SEQ ID NO: 76301 - DNA, 1173 bp, Homo sapiens
atgaaccgaagttttcacaagtctcagaccttgcgattctacgattgcagcgcagtggaagtcaagagcaagtttggggcggaattccgaaggttctctctggaccgtcataagcctgggaagtttgaagatttctacaagctggttgtgcacacccaccatatctccaacagtgatgtaactattggctatgcagatgtgcacggagacctgctgcccatcaacaatgatgacaacttctgcaaggcggtttctagtgcaaatcccctgctcagggtcttcatccagaaacgaggtggtgaacactgaccacctcaaggaaccaagcagccagtggtgacagttgcaagatgacggagccctgcgaccaggaacctgactcttcagctcaaatcttggtttgaaagggggacttctctgtgcccctgttgtcggcatgccatggtagagaatggatggcccacgcagctggcccctcatgagaccccagccatctcattccactgggagccacgtcaggacgaaggaggactgggaggggcgtctggctgcgtggtgtggggcctgcagtgttgtggcacacgcagcttcagccaaacatctagccctgtacctagaactaagaaataaaactataacatcagatttaaaagttctctgggaacatttgtcctgcccaaaatagtaacttgtcatttttaaaagaataaaacagagctttgataagccccgtggatgcacctgacacgagagaatcaatggtgcaggtggatttgggctcaaggtggttttcaacacccaggtgatgtctaggtgactggaaagggtgtctgttggacttgcaccttttttccctgtggaagctatttttatgcagttttgtatttgttctcagaacaaattggccaaaaacactacctttaagtgtgacttgatttttagtgtacattttcagatgttatgggaaatgcattcacagttgaggtgtcaaagcaggggaagatggcttccttggcaataacaagcaaaggcaaacatgtttatttttgtatctgtaaaagctggtcgctctttaagtgtagttccagcatctaaagtggacacagaacctgttcttcagggcctgtcacaccctcactgtccatgtgagagtttgtccctccttgtggatac

SEQ ID NO: 76302 - DNA, 376 bp, Homo sapiens
tctggtatttattaatgcccctccccccaccccgtctcttgcattgtagtttggggcggaattccgaaggttctctctggaccgtcataagcctgggaagtttgaagatttctacaagctggttgtgcacacccaccatatctccaacagtgatgtaactattggctatgcagatgtgcacggagacctgctgcccatcaacaatgatgacaacttctgcaaggcggtttctagtgcaaatcccctgctcagggtcttcatccagaaacgaggtactgaagtggttgagtggccggctggtcttgttgagaaatcatttttaaaatacagttttcaattttttctgtcattacaggactatgtggttcgttttcta

SEQ ID NO: 76303 - DNA, 682 bp, Homo sapiens
tgtgggagacggggtctcaggagcaccaggagtgagtcctggagaggggtggctgtgagaatctgggagcgagtgtgagtgtggcgtggagggggcactggtgtaacagaaggcagaagggcaggcagctgggaggctgcgggaacctgaagaccagagggttgaccctttgttccaggaaacgcttgatcaaattcccctgaagtctcccgcaaagcacagacgttgggactggtcttccctcttctgtcttaggggaaaaaggagtcagagagcaagagagggctgttacctccagctttcaagtaagcccaagattggtgcgtaccttttccagaaacacaaattctacctgatggtaaaaaaaatgaacatagaattggttttttcaagttgctttaagaaatccatgtccaaggccgggcgcggtggctcacgcctatgtaatcccagcactttgggaggccgaggcaggtggatcacctgaggtcaggagttccagatcagccgggccaagatggtaaaaccctgtctctactaaaactacaaaaaactagccaggcttggtagtgcacatctgtagtcgcagctacttgggaggctgaggcaggagaatcctttcaacctgggaggtggaagtcgcagtgagccgagatcatgccactgtactccagcctgggca

SEQ ID NO: 76304 - DNA, 348 bp, Homo sapiens
tagagacagggtcttgccctgttcccacgctagagtgcagtggcatgatcatagctcactgcagcctcaaactcctgtgctcaagcaatcctcctgcctcagtctctacagtagctggcactacaatagtgggtgccaccatgcccgactaattttttttattttttattttgtagagatgaggtattgctgtgttgcccaggctgaactggaatgcctggcctcaagaatcctcccaccttggcctcccaaagtcctgggattacatgcccaaatcttctttagttgtttctaatagttgttagccattgagatctaaggttgcttctaagttgattgatatattct

SEQ ID NO: 76305 - DNA, 2534 bp, Homo sapiens
agtaacctgttgcagaaaagtgaaagtatatccgcaacagttggctctgattgcagagagcgcgcttgtgagaactgatggcgggtacgcgcagaaaatctttgcaaaacaggcaagtgggatctcttctcatttttctgtgcatatctgtgggggatgcgacaactatccgctattcagtggcagaggaaatggagagcggctcgtttgtggccaacgtagctaaggacctaggactggaggtagggaagctggctgcgcgcggggcgcggctggtttccgagggcaacaaaatgcatttccggctccaccgcaagacgggagatttgtttgtgaaggagaaactggatcgggagtcactttgtggcaaagccgacccttgtgttctgcactttgaagtagtcctggtggagccgctgcagtccttccgggccgaggtcagggtatttgatatcaatgacaatgccccagttttcctaaacaaggagccgcttttaaagattccggagagcacccctttgggttcacgttttcctctgcagagcgcccaggatctggacgtgggccttaacggtctccagaactacaccctgagtgccaatgggtatttccacctgcacacccgcttctgcagccacgggcctaaatatgctgagctggtgctgaacaaacccctggaccgagaggagcagcctgaagtcaacttgacaattacggcggtggacggcgggtccccgcctaagtctggcacagctcacatccacgtggtggttctggatgtcaacgaccacgtgccccagttctcgcgactggtgtacagagcccaggtatcagagaacagccccaatggctctttggtggccacggtgactgccgtggacctagacgagggcaccaacaaagcgataacttactctttagctcaaaacccagaagcaattctcaagacgtttcagattgaccctcaaaatggagaagttcgactaagaggacccctcgattttgaagccattgaaacatacgacattgacattcaagctacagatggtggaggcctctctgcccacagcaaagtcctggtagaagtggtggatgtgaatgacaatcctcccgaagtgatggtctcctctgtgtccagcccactccctgaagactcaccaccacagacagtagtagcccttttcactatcagagaccgggacattcgagtgggaggaaaagtcacctgcttcctcagagaagaccttccctttgtaatcaaacctacatttgggaattcttactcactggtcactgacagaagcttggatcgggaggaggtctcaggctataatatcaccattgttgccatggatactggaccacctagcttgtctgccgagactatgatagaggtgctaatatccgacgttaatgacaatcctccaatatttcgggaagattcctatatcttgactgttcgagaaaacaacagtcctgcggtttttattggcaaagtccatgctgaggatcttgatttgggtgagaatgcccaaataacatattctctgttgcctccaaaaaacggagatctttcagtctttgcttacatatccataaattcaggcaatgggaagctctacgcgctgagaaccatggattatgaggccattcaagattttcaatttgtggtaaaggcaactgatgggggcttcctgtcactgagtagccaagttactgtcagagtggttgtcctagatgacaatgacaatcgtccaatgatcttatacccactgcagaacggcaccttgccctgcaatgacctggtgcccaggtctgcagaggcaggctacctagtgaccaaagtggtggctgtggatggtgactcaggtcagaattcttggctttcatatcatctacttaaggccactgaccttgggttattttctgttcaaagacaaaatggagaaatccatacattaaggcagatatctgagagagaccccatgatgcagaaattgatcattcttgttcaggatcacggccaaccagctctttccactactgtctcactcaacatcctgctggtagatggcttttcagagccctacctgcagttccaggatccaaccaagcattctagaaaggtaaatccatccactaaatatttggtcatttctctggtcatcctttcctttctctttctcctctctgtcatagtgatcttcattatacatgtctaccaaaagattaaatatagagaaaagttcacaattcaagagcatttctatgatgactgtaatttctctaacaacctggtacaaggacaaggcaatggatccttatctcggccttgtccatatgaaatgtgttcagccactggcactggtaatagtgagtttcgctttcttaagcgttttatgcccaacttgcctttccctcatgccactggggagataaaaatggaggctggctccagtttgcccccaaattctgataggaataagtctcagagattagagggccatgaccaggtatctgatgactatatgtag

SEQ ID NO: 76306 - DNA, 477 bp, Homo sapiens
gccaggccgttcctcactgcttgcccatgcactcacttaaatctgcttgcctttccttcagcctggaatactcttctccaaaccttctttatgccaagggtcaaaacacagtttctttgtgaaactcctctcatttcctctaatcaatccctgtggccaggtccttgttcctccatatacaccatttcaagactcttgtcatccgttttctatttcctactcccagcttctggcacacttctatgtcacttatatgcttccattaatggatgaaattaagtaaagtacatgttagacagaaacctaaaatttacaaagcatatttgaagtatcttttggtttcaaatgaagtccaaagaaatactggtatataaccattaacagctaaaaaaatttttcttaaaccacaaaatcactacaaatcaatcttcacttagatcaagttaatagaccttttcaggaacaatactgaaaaag

SEQ ID NO: 76307 - DNA, 455 bp, Homo sapiens
ggtcatagattgtttaaccaccttttgatctacccttaggaacactaaaggttgaagtaatttcctttcatgtgatcccctccctcttacttcccaagtctaaccttagtattattgtccaagtaactctaaagcatgttaagcagctgatgtttggttagaaagaaaagttgtcacaagattatgatgagagcaactcacttctgtttaaacagtgtgcaccctctaccctgccacttcacctcctgggaatccttatcacatatttgtcctgaaaacattatccacctgccctgtgctttataatatcagcagtatatctttttatcttgtggatgatgtgcctttatattttgagaaaaatttccagtaacagatttgatttgcatggacagaaacttgagcaaatgccaaactagcaggggggccattattctgctctataaataagttta

SEQ ID NO: 76308 - DNA, 2416 bp, Homo sapiens
  misc_feature (1919)..(1919): n is a, c, g, or t
  misc_feature (1985)..(1985): n is a, c, g, or t
  misc_feature (2268)..(2268): n is a, c, g, or t
ttgaattgaagtgaaattgcccaaagagatattttcctttagggactcatttcttcacatacttttgcttatcttgttggaagacacactatgtcaatctcagtatcctgtttgaatgaagactgctttcctcctatgtatctgttgcccctagacagtcattgtgcagcttgttacctttctgtgaaactccatgagacagctccagcattcatccttacaggtgctacctcctgacacttctgcttctttgcaaaatgacttccctgatctcctgagtctgtattgtttccagtgctgcctgaaccacatttgggtgatgctacaggaccagacagcagacagatttgtcatggatgcctgatgggataggaccctgttggcatcctctctgaaaatctcccttgcctggctagggattgttttattttattttctttagcctgtagcaaatacaggttcagtatctccattgaataatatattgtagaaagaaaggcagtaataaaaacttcgttctttttccccatttgaaaaacaattattataggagtttagaaaataaaaattttaaaaacaaaattaaaataattgatgttacaccatcaagggtctttgaatactcgattcttttttgattttttttgtctttactcctgtaccaatgtatcctttttaaagaataataaaatttgagaaattaaactcattgttattagtacctttctatccacttctttttttttttccaggatagtgaaaaaaaaaaaaaagaggagtgagggctgaacttgttacgatttagaaattaaggcccattttccttcttaagaacccagtttctctatatgaagcagatccagaccgcaggtccctgtcccaccacgcctttcacttccctgtgcctcgtttccccatctgtagaagagagtcagtcatgataataactcctacttcttggtagtgttgcaaggattaagcagcttaatacttgtatgtgctttgaacagtaacgtgctgtagtgtacaaaagatgtaaattgcagaccaggcatgctggcagctgcctgtagtttcagcttctcgggaagccaaagcaaaggatctcttgagcctcagtatctgaggtcagcctgggcaacctggcaaaatacctcatctcataataataacaacaataataataatgttagctgttatgggctgttattggttacttatcctaagtcacagtcttcttatttaatttactctcatatctcaattgtttttttgaagtaatcaattatcttccttgattgggtttgtttccagtatttgtctttggaaaggaatcctgcatttatacctggttatttatagcttcttctaaaggggtgaaagtatttccctacacagtcatgcatcaccatgcccggtcagttctgagaaatgagttgttagatgatttcatcgtgcaaacatcacaaagagcacttacacaaatgtacatggcatagccggctgcacacgtaggctacaggctataagtgtagcctgtgctcctaggctacaaacctgtgcagcatgtgaccaggctgaatactgtaggcaattgtgacacttaacacaatggtttttatgtatcaaaatgtgggaaaggtatagtaataatgcagtagaggccaggtgcggtggctcacacctgtaatcccagcactttgggaggctgaggcgggcagatcacgaggtcaggagatggagaccatcctggctaacacagtgaaatcccgtctctactaaaaatataaaaaattagccaggcatggtggcacgcacctgtagtcccagctactcaggaggctgaggcaggagaattgcttgaacctgggaggcaaaggttgctgtgagctgagatcatgcctctgcactccagcctnggctacagagcgagaccccatctcaaaataataataattattattattaagaagggaaaaaaatgntacacctgtacacctgtataaggcacttaccatgaatggagcttgcaggatggaaagtggctgtggatctgggtgaatcagtgagtggttagtgaatgtgaaagcctaggacatcactatctactactgtagacttataaacactgtatattggccaggcgcggtggctcatgcctgtaatcccagcactttgggaggccgaggtgggcggatcacgaggtcaggagatcgagaccatcctggccaacatagtgaaaccccatctctactaaaaatacaaaanttagccgggcatggtggcgcatgcctgtaatcccagctacttgggaggcggagggaggagaatcccttgaaccagggagttggaggttgcagtgagctgagattgcgccacagcactctagtctggtgacacagcgagactccatctc

SEQ ID NO: 76309 - DNA, 472 bp, Homo sapiens
  misc_feature (158)..(158): n is a, c, g, or t
  misc_feature (235)..(235): n is a, c, g, or t
  misc_feature (237)..(237): n is a, c, g, or t
gatttgccaccccttacattacaccgccagaatgaacctgtgcctttgtgtccagctagtggctggactgtggcttgttacttacctccacgccctcctgcatactgtcctaatagcacagctgtccttctgtgcctccaatatcatccatcatttcntctgtgatctcaatcctctcctgcagctctcttgctctgacgtctccttcaatgtaatgatcatttttgcagtaggngntctattggctctcacgccccttgtctgtatcctcgtatcttatggacttatcttctccactgttctgaagatcacctctactcagggcaagcagagagctgtttccacctgcagctgccacctgtcagtggtggtgttgttttacggcacagccatcgccgtctatttcagcccttcatccccccatatgcctgagagcgacactctgtcaaccatcatgtattcaatggtggct

SEQ ID NO: 76310 - DNA, 864 bp, Homo sapiens
  misc_feature (420)..(420): n is a, c, g, or t
  misc_feature (576)..(576): n is a, c, g, or t
  misc_feature (582)..(582): n is a, c, g, or t
  misc_feature (675)..(675): n is a, c, g, or t
ggcactttcctgttacctaaggaagaacccttgaagaagaggaagaggaaagaaagacaagtcaggcatggctctcacccagggacaggtgacattcagggatgtggctatagaattctctcaggaggagtggacatgcctggaccccgctcagaggactttgtacagggacgtgatgttggagaattataggaacctggcctccctgggaatctcttgttttgacctcagtattatctctatgttggagcaagggaaggagcctttcactttggagagccaagtacaaatagcaggaaacccagatggatgggaatggatcaaagccgtgatcacagctctctcttccgaatttgtaatgaaagatttactacacaaagggaagagtaatacaggagaagtattccaaacagtgatgtnggaaagacaggaaagccaagacattgaaggatgttccttcagggaagtccagaaaaatacacatggccttgagtatcaatgcagagatgctgaaggaaattacaaaggagtgcttttgacccaagaaggcaatctcactcatggaagagatgaacntgatanaaagagatgcaagaaacaagcttattaaaaatcagcttggattaagccttcagtcacatctgcctgaactgcagctttttcaatatgaagggnacaatcttatgaatgtactcaggtgagacgtcttccaacaataattcctcagtttcaccacctcaacaaaatgccttataatgtcaaacccaccatttttaagaaaattctccaaggatttatccccttctctattactcccacgggcaaacggcaataatgggggagcccttacacatcgagggcggg

SEQ ID NO: 76311 - DNA, 421 bp, Homo sapiens
tcagttggtaaaaacagacctgactcgtgaggctggacagagtcctccacgccttgggatctgagtcactggaaccaaactagactctattttacttcctataaccacctgcctggacagattgcacccttgtcagttaccatcaggggagagttgttttcttcaccacggtcacaaagactggccttcatgtgtgtgctatcatggtgatgacttcccagggaggaaagtacagggaggatgagaaactttttggccaatgggagcaggaagaacttcaagctctccaggagataaaagcaaagtcacagggctctgtgctgctgaagcacacttctggatatacctgccacaagcagcaacgctaattaaattggcattccttatcaccactgcagtagctcctcaggaatatttatat

SEQ ID NO: 76312 - DNA, 453 bp, Homo sapiens
gtttctaaaatgtattacataaagtatgtggagctgaagaaagcaaaaggttggactataatggatgctcttttgtgcctccaagatacacccttcagttctgaggctttcatttgtccgccccctgagagtattgctgcctgatgtctttctcctgagccttgagacttatgaattgtccttgggcaaagggagctgccttaccagaagaaaccttctttctctaggacactccttatcaaatggctattgatatgatagtataaatgcttgtgcccctatatcaaagcagaattctaaagaaccattttagcagagctgcccaagagattggccaaggcctccttgagactgtttcacagttcaagttctttttctcaatcttaattttttttatttctcaataggtattaatcctgagaactctccttaataaaattattatgtgcaaat

SEQ ID NO: 76313 - DNA, 831 bp, Homo sapiens
  misc_feature (28)..(28): n is a, c, g, or t
aattcggcatgagggaaaacctggaggnaaagaaaaaagagggaagcatgagggtactggatgcctgggcaaagattaagagaatttgccaagaggtgggacatttccaagacaaacagcatactttacactttggctaaagtccctcatggcagtactcatttttgatatgtgctctcactacatttaatcgcagtgacagttgtgagattagaggtaccgctttcttcaaaaggatcattgaaagttgtgggtttatccttgtgtttctgtttagttttttatcatactagttttatttgtaaaccaaaatgcattatattttagacctttgctccaaaaggctaatgtaataatttttttaatggacttaagattttaactctaaaacctcatcaacattccatatattatgattcacatgggacttgtaaaagacagacctccacacctcagaaccgcaatgggccttttgtcccccactgccgagtatttccgacctcctttgaaggttataaatttacaaccttagtatgttttatggtgtggtgaatattgccggagaatgatctggcccagatgaaaatgggattctgttggccctcaatgttcttttcttgagagaccctactctgcattttaatacatgttatactatcttcaagttttaaccaaaatgttaatttgattttttttttctttcagtcaggaagaaaggaaaaaaaagaggaagggagggaggagataaaggaaagaaaaggaaaagaaaaaaggcagaaagaaaagagaaagaaagaaaaagaaatagaaagaaaaaaggcaaacacaatg

SEQ ID NO: 76314 - DNA, 1648 bp, Homo sapiens
ctccagagttctttttgttcactcctaccccccatcaccatttgattgatctccttaccctgtaatttccccttcttgtcgcttacctgcagtatctttcccacccaggcatgccttattctttctaaaggaaagtatgaatggagaggggaaagcttgggaaactgatagatttccttggatgccaaaacacctccatagcctgtctgcccggccctatgtggaaacagcattgagtttcaagtcctttatgcctccacccagggatagccacttggaatccacatggcaattgtgaaacaagcaggaaatgcgtaattgtcagaattttgtggggaaaggactagggaataaggaaaacaaagatcttccttgtgttttagagctgtcagctagaggagcacctgcttgagtctgatgccatctaatggtcccagaagaaactgggttttgaacctagagttccatggactcttaggaattagactactactactactaagcattcactggtgcttactatgtgctattgctgtgccaagtatctgaaacctgtcttcttaccttatttttcaagataattctatgtggcaggtattactatctcaattctaagagtgagaaaatggagttttagaaacatttactaacttgcctgggtcacatagctaaggaagaggtggacttgcccagctttgcataaaactcctcaaaagagttgcctatactccctgattccacttatcttcctactatcctctttttaaaatatattatttatttatttaaataagcaatatatgaatgtggtttgaaattcaaaagacacaaagaagtatacagaggaaagcctcactctcaatccttctcaaggtttgctaattcctcttgcataggcaatccgttcttccagctttgtgtttatctttccagagaagtttactgtgtattaagcaaatatgtatatctttattcttgctcagtattttcgcaaacagcagctgtctaagttcactgttctgaactttattttttaaattaaaaatatatggctatgtagtattctattttatggaagttccatatttcatttatcctgtttccttctactgatggctagttaggttattggaagtcttttgctgttgctagttagtcttgtatagacattgtaatgcacatgtgcaaaaatacaagtatgatacaatcttaaaggggagttgctgagtccaatatatacattacaaatattgatagatattgcaaaattgccttcatagaggctatattaatttatagttccagcagcaacatatgagtttatctgtttctccatatatatatatatatatatatatacccaacagacacgtgttcattttctaaacactgttggaccactcctttctgggtgaaagtacgcatgctatttgtagttatcatgggctttaatatcatcctggtaagtacacgagatctaaaccccaggagatagggcacgactagacattaagcccacacacattacatcgctacatttggacacccacggacataattgcggccccaaccctcaacgagtaataataggggaccctttgattgcgaaaacccttttgtaaggaatctcagccgaaaaaggcaaaac

SEQ ID NO: 76315 - DNA, 299 bp, Homo sapiens
gaacagacccaggtcacacatctgcctttgaagacctggggttgtcacagctctattgaaaaaaatttaattgagattggaatgaacagttaagaaagctgtaatgggccaggtgtggtggctcatacctgtaatcccagcaccaaagaaatggttccagaccgggggcagtggctcacgcctgcaatcccagcactttgggaggctgaggcagatggatcatctgaggtcaggagttcgagactagcctggccaacgtggtgaaacctcgcctctattaaaaatacaaaaattagccg

SEQ ID NO: 76316 - DNA, 540 bp, Homo sapiens
atccaggagtaccagttcttagatcaggaggactggggcccccagcggacctcaaaggagatcaggcagttgcagaatgactgcatgaggcttcgggagtcactgaacaccacccaagtgcacaacctggccctgggggagaagctgcagaacctgcccaccttattgtataagagcctgaaggagggagcccaggccatccaggaggaggcccaggccatccaggatgaagtgaaggccctgcaggaggaaagccaggcctgccggaggtggctctgctcaggtgtgcgggcagccatggcagcggggagggaagaggcggctgccccatgctgctcactcgagctgtctctgcctgcagtgacccaaacccccggaaggcaggtctcctcttcaagctgcctgacctgccccacgaccacagagaccagggtcaggcctggcaggccccaggccagaggtcggacacctcctcgggaggccgctccttcagccagctcctccctagatcccagaaataaacttggaagctaagcttca

SEQ ID NO: 76317 - DNA, 473 bp, Homo sapiens
gattctgagaggtttcactgactcctacctggatagttaagaacatacacacggccgggtgtggtggctcatgcctacaatcccagctacttgggagactgaggcaggaggattgcttgaacctgggaggaggaggttgcagtgagctgagatcacaccactgcactccagcctggacaacagagcaagactctattctgtctcaaaaaaaaaaaaaaaaaagaacatactcactattagctctcctgaaattaatgggttggggaccctggcccagaactcagaaccctgcctctggtctggtattgttttcaccacaccacagggtcccccacaattcccccttaaaagctgaaactgtctggatggagcagctggtcctactccttgtccctcagtgacgtccagctccgttgtcttatttgcaccctaggctgtctctggtgggtttctggggcagggggctctaggcc

SEQ ID NO: 76318 - DNA, 947 bp, Homo sapiens
acaaatataggcaacaattcatagtgaaacagtggttatcttaggaagagatatactgagaaatagataaccaagaaacttggctagaggtttctttcctttttcttctaatacattttcttgtatactttgaccttttttaaaacaatagggcttatggatagaattatgggccattttgttttctacttcgataccatatatatctacacacacacactcccttaatttttaaaagtaatttttaatttttgaatacgaattttaaatttttaataaaaacatttattaagaattttttttctcattccagaactgggagctcagtaacgttggggccataagaaaacaaaatgtgtttattagatacaaattcaactgttacagtaaacaatgaatatctcaagttttgatatgaacctatttttaatataaatgtgtcaaattatatagaagttcaatataaagtacttttgacttacttttgcaaagattgaaagaactatgaaaaaaaattactgtaattttttttaaacacatactgttctatggaagtattacaccgaattactgcattgattccaatgatattccaactgaaataaaatatttgaaccacggcattaactccattccttttttgctgatgttaggacatacattaccactaggtggcaatatataattagcattccatttactttgcagccaaacacatttgcatttgcaacattcaaagtaggtagcaaatacctttcaaatatttatctaaaatacagtattgctcagagcatcttattaaaacaatacagtttagggtaataaaggaagcatatccctttttttctggatttgaattcaaatcactaaaattcattagttgggttcgatgattactaggacttaactgcaagttgtacatgctatattctcaagatataagacta

SEQ ID NO: 76319 - DNA, 896 bp, Homo sapiens
tggagcagttctgctagaggaggaaacagcacaaagggcactcttatgctgctgtaaaccagtgccaggatttttaaaatgtgagacacctgttaccctgtgcccagatttcatattgttcaaacacacatgctctacatacaatttgtgcagttaatgcaatcatcacaaggtcctaggccgacctacagcctcagcttacgaagatgacaagattaagagattaaagtaaagacaggcataagaaatcaaaagagtattgattaaggaagtgtttatgttcttctgccatggcttcagctggtccctccattcaaggtccctgacttcctgcaacagggggcaaaggactctttgtcttcaaatttccctccaccttgctcatcatcaagagagtgtgaagaggaggagaaaggctgaagaggaggagaaaggctaagatcttttccaatgcaaaattaggaaaaaatatactacagatttatgaaaaaataagaagtgaaagtattctctgactgcaagtatgaccacctgtctttctatatcaggttgataatttctaacatgttcctttgtaattgtttctcaattttgtgctgaatgttgaccatgtgcatttccatttcttcaacaaaatcacatttgtctttagagcactgttgttactgtgcacagcactctccccatgcctgaactgtcaacaatccactgagtaggacatatgcccagctgtctgactaaagctgagcattgtgggccgtggctttcaaatactccagtgctttcacagatgatctggggaggaaactagtgactccacacctttaatttaataatattgccccaaacaaatgagtaaaacagagaataaagagggcaaataagtactctgaaga

SEQ ID NO: 76320 - DNA, 1037 bp, Homo sapiens
tggagcagttctgctagaggaggaaacagcacaaagggcactcttatgctgctgtaaaccagtgccaggatttttaaaatgtgagacacctgttaccctagagtgtgaagaggaggagaaaggctgaagaggaggagaaaggctaagatcttttccaatgcaaaattaggaaaaaatatactacaggtaagatggagcaagcatgctctgcaccttgtgtctccctcaaaatgtggctctaaaacctggacaggatacagcagctatttgaggtctctgaaaagcaaacagtaacatgcaaaaaggggaagaggacaggaatctgaagtagcaccaaaccaatgatttatgaaaaaataagaagtgaaagtattctctgactgcaaaacccaagctaaaagactgcatttactacccttccttgctaacaagagtgactacgtgactatgttctggccaatgcaaacagcctgaaaagctgatgtaatgactggatcttcagcagccaccttgagcaagaggtagaagctagaggctgaggaatgatggagcagaaaggaaggagctggggttcctattaacatcctgaagctacactatcaggcctggactgaccaactctttctggccttcttttacaagagaaaaatacagttatttaaaccactatacttctgttttcttttttggggtatagataactgaacctaatcctgtcccaaatcctgatcctatctaaccagtgttagctatcagcccatacgtatactggagaatgacgtttaacaaaataagatgttaaagttctaactaattgtaataatcatgcagttttctcatgctgaacaaagttaaagaaatataatgtgtgtttcctaaagagtgtcattttttggaaagataacatggggcacaaagtaacataaaaatctacatataattatgtaaacattgctttgacatacaacaccaaatatttttattgtatttgtgaatgcatttcttggtaataaaacggcagttatgaataagtgata

SEQ ID NO: 76321 - DNA, 1239 bp, Homo sapiens
tggagcagttctgctagaggaggaaacagcacaaagggcactcttatgctgctgtaaaccagtgccaggatttttaaaatgtgagacacctgttaccctgtgcccagatttcatattgttcaaacacacatgctctacatacaatttgtgcagttaatgcaatcatcacaaggtcctaggccgacctacagcctcagcttacgaagatgacaagattaagagattaaagtaaagacaggcataagaaatcaaaagagtattgattaaggaagtgagagtgtgaagaggaggagaaaggctgaagaggaggagaaaggctaagatcttttccaatgcaaaattaggaaaaaatatactacaggtaagatggagcaagcatgctctgcaccttgtgtctccctcaaaatgtggctctaaaacctggacaggatacagcagctatttgaggtctctgaaaagcaaacagtaacatgcaaaaaggggaagaggacaggaatctgaagtagcaccaaaccaatgatttatgaaaaaataagaagtgaaagtattctctgactgcaagtatgaccacctgtctttctatatcagaacccaagctaaaagactgcatttactacccttccttgctaacaagagtgactacgtgactatgttctggccaatgcaaacagcctgaaaagctgatgtaatgactggatcttcagcagccaccttgagcaagaggtagaagctagaggctgaggaatgatggagcagaaaggaaggagctggggttcctattaacatcctgaagctacactatcaggcctggactgaccaactctttctggccttcttttacaagagaaaaatacagttatttaaaccactatacttctgttttcttttttggggtatagataactgaacctaatcctgtcccaaatcctgatcctatctaaccagtgttagctatcagcccatacgtatactggagaatgacgtttaacaaaataagatgttaaagttctaactaattgtaataatcatgcagttttctcatgctgaacaaagttaaagaaatataatgtgtgtttcctaaagagtgtcattttttggaaagataacatggggcacaaagtaacataaaaatctacatataattatgtaaacattgctttgacatacaacaccaaatatttttattgtatttgtgaatgcatttcttggtaataaaacggcagttatgaataagtgata

SEQ ID NO: 76322 - DNA, 1153 bp, Homo sapiens
tggagcagttctgctagaggaggaaacagcacaaagggcactcttatgctgctgtaaaccagtgccaggatttttaaaatgtgagacacctgttaccctgtgcccagatttcatattgttcaaacacacatgctctacatacaatttgtgcagttaatgcaatcatcacaaggtcctaggccgacctacagcctcagcttacgaagatgacaagattaagagattaaagtaaagacaggcataagaaatcaaaagagtattgattaaggaagtgagagtgtgaagaggaggagaaaggctgaagaggaggagaaaggctaagatcttttccaatgcaaaattaggaaaaaatatactacaggtaagatggagcaagcatgctctgcaccttgtgtctccctcaaaatgtggctctaaaacctggacaggatacagcagctatttgaggtctctgaaaagcaaacagtaacatgcaaaaaggggaagaggacaggaatctgaagtagcaccaaaccaatgaactgggagctcagtaacgttggggccataagaaaacaaaatgtgtttattagatacaaattcaactgttacagtaaacaatgaatatctcaagttttgatatgaacctatttttaatataaatgtgtcaaattatatagaagttcaatataaagtacttttgacttacttttgcaaagattgaaagaactatgaaaaaaaattactgtaattttttttaaacacatactgttctatggaagtattacaccgaattactgcattgattccaatgatattccaactgaaataaaatatttgaaccacggcattaactccattccttttttgctgatgttaggacatacattaccactaggtggcaatatataattagcattccatttactttgcagccaaacacatttgcatttgcaacattcaaagtaggtagcaaatacctttcaaatatttatctaaaatacagtattgctcagagcatcttattaaaacaatacagtttagggtaataaaggaagcatatccctttttttctggatttgaattcaaatcactaaaattcattagttgggttcgatgattactaggacttaactgcaagttgtacatgctatattctcaagatataagacta

SEQ ID NO: 76323 - DNA, 906 bp, Homo sapiens
tggagcagttctgctagaggaggaaacagcacaaagggcactcttatgctgctgtaaaccagtgccaggatttttaaaatgtgagacacctgttaccctagagtgtgaagaggaggagaaaggctgaagaggaggagaaaggctaagatcttttccaatgcaaaattaggaaaaaatatactacagatttatgaaaaaataagaagtgaaagtattctctgactgcaagtatgaccacctgtctttctatatcagaacccaagctaaaagactgcatttactacccttccttgctaacaagagtgactacgtgactatgttctggccaatgcaaacagcctgaaaagctgatgtaatgactggatcttcagcagccaccttgagcaagaggtagaagctagaggctgaggaatgatggagcagaaaggaaggagctggggttcctattaacatcctgaagctacactatcaggcctggactgaccaactctttctggccttcttttacaagagaaaaatacagttatttaaaccactatacttctgttttcttttttggggtatagataactgaacctaatcctgtcccaaatcctgatcctatctaaccagtgttagctatcagcccatacgtatactggagaatgacgtttaacaaaataagatgttaaagttctaactaattgtaataatcatgcagttttctcatgctgaacaaagttaaagaaatataatgtgtgtttcctaaagagtgtcattttttggaaagataacatggggcacaaagtaacataaaaatctacatataattatgtaaacattgctttgacatacaacaccaaatatttttattgtatttgtgaatgcatttcttggtaataaaacggcagttatgaataagtgata

SEQ ID NO: 76324 - DNA, 936 bp, Homo sapiens
tggagcagttctgctagaggaggaaacagcacaaagggcactcttatgctgctgtaaaccagtgccaggatttttaaaatgtgagacacctgttaccctgtgcccagatttcatattgttcaaacacacatgctctacatacaatttgtgcagttaatgcaatcatcacaaggtcctaggccgacctacagcctcagcttacgaagatgacaagattaagagattaaagtaaagacaggcataagaaatcaaaagagtattgattaaggaagtgagagtgtgaagaggaggagaaaggctgaagaggaggagaaaggctaagatcttttccaatgcaaaattaggaaaaaatatactacaggtaagatggagcaagcatgctctgcaccttgtgtctccctcaaaatgtggctctaaaacctggacaggatacagcagctatttgaggtctctgaaaagcaaacagtaacatgcaaaaaggggaagaggacaggaatctgaagtagcaccaaaccaatgatttatgaaaaaataagaagtgaaagtattctctgactgcaagtatgaccacctgtctttctatatcaggttgataatttctaacatgttcctttgtaattgtttctcaattttgtgctgaatgttgaccatgtgcatttccatttcttcaacaaaatcacatttgtctttagagcactgttgttactgtgcacagcactctccccatgcctgaactgtcaacaatccactgagtaggacatatgcccagctgtctgactaaagctgagcattgtgggccgtggctttcaaatactccagtgctttcacagatgatctggggaggaaactagtgactccacacctttaatttaataatattgccccaaacaaatgagtaaaacagagaataaagagggcaaataagtactctgaaga

SEQ ID NO: 76325 - DNA, 2527 bp, Homo sapiens
ggccgggagacctggcggagctgggggtggggggccagtttttgcaacggctaaggaagggcctgtgggtttattataaggcggagctcggcgggagaggtgcgggccgaatccgagccgagcggagaggaatccggcagtagagagcggactccagccggcggaccctgcagccctcgcctgggacagcggcgcgctgggcaggcgcccaagagagcatcgagcagcggaacccgcgaagccggcccgcagccgcgacccgcgcagcctgccgctctcccgccgccggtccgggcagcatgaggcgcgcggcgctctggctctggctgtgcgcgctggcgctgagcctgcagccggccctgccgcaaattgtggctactaatttgccccctgaagatcaagatggctctggggatgactctgacaacttctccggctcaggtgcaggtgctttgcaagatatcaccttgtcacagcagaccccctccacttggaaggacacgcagctcctgacggctattcccacgtctccagaacccaccggcctggaggctacagctgcctccacctccaccctgccggctggagaggggcccaaggagggagaggctgtagtcctgccagaagtggagcctggcctcaccgcccgggagcaggaggccaccccccgacccagggagaccacacagctcccgaccactcatcaggcctcaacgaccacagccaccacggcccaggagcccgccacctcccacccccacagggacatgcagcctggccaccatgagacctcaacccctgcaggacccagccaagctgaccttcacactccccacacagaggatggaggtccttctgccaccgagagggctgctgaggatggagcctccagtcagctcccagcagcagagggctctggggagcaggacttcacctttgaaacctcgggggagaatacggctgtagtggccgtggagcctgaccgccggaaccagtccccagtggatcagggggccacgggggcctcacagggcctcctggacaggaaagaggtgctgggaggggtcattgccggaggcctcgtggggctcatctttgctgtgtgcctggtgggtttcatgctgtaccgcatgaagaagaaggacgaaggcagctactccttggaggagccgaaacaagccaacggcggggcctaccagaagcccaccaaacaggaggaattctatgcctgacgcgggagccatgcgccccctccgccctgccactcactaggcccccacttgcctcttccttgaagaactgcaggccctggcctcccctgccaccaggccacctccccagcattccagcccctctggtcgctcctgcccacggagtcgtggggtgtgctgggagctccactctgcttctctgacttctgcctggagacttagggcaccaggggtttctcgcataggacctttccaccacagccagcacctggcatcgcaccattctgactcggtttctccaaactgaagcagcctctccccaggtccagctctggaggggagggggatccgactgctttggacctaaatggcctcatgtggctggaagatcctgcgggtggggcttggggctcacacacctgtagcacttactggtaggaccaagcatcttgggggggtggccgctgagtggcaggggacaggagtccactttgtttcgtggggaggtctaatctagatatcgacttgtttttgcacatgtttcctctagttctttgttcatagcccagtagaccttgttacttctgaggtaagttaagtaagttgattcggtatccccccatcttgcttccctaatctatggtcgggagacagcatcagggttaagaagactttttttttttttttttaaactaggagaaccaaatctggaagccaaaatgtaggcttagtttgtgtgttgtctcttgagtttgtcgctcatgtgtgcaacagggtatggactatctgtctggtggccccgtttctggtggtctgttggcaggctggccagtccaggctgccgtggggccgccgcctctttcaagcagtcgtgcctgtgtccatgcgctcagggccatgctgaggcctgggccgctgccacgttggagaagcccgtgtgagaagtgaatgctgggactcagccttcagacagagaggactgtagggagggcggcaggggcctggagatcctcctgcagaccacgcccgtcctgcctgtggcgccgtctccaggggctgcttcctcctggaaattgacgaggggtgtcttgggcagagctggctctgagcgcctccatccaaggccaggttctccgttagctcctgtggccccaccctgggccctgggctggaatcaggaatattttccaaagagtgatagtcttttgcttttggcaaaactctacttaatccaatgggtttttccctgtacagtagattttccaaatgtaataaactttaatataaagtagtcctgtgaatgccactgccttcgc

SEQ ID NO: 76326 - DNA, 2507 bp, Homo sapiens
  misc_feature (17)..(17): n is a, c, g, or t
ttcattaacctttcctnaattcccgggaggctaaggaagggcctgtgggtttattataaggcggagctcggcgggagaggtgcgggccgaatccgagccgagcggagaggaatccggcagtagagagcggactccagccggcggaccctgcagccctcgcctgggacagcggcgcgctgggcaggcgcccaagagagcatcgagcagcggaacccgcgaagccggcccgcagccgcgacccgcgcagcctgccgctctcccgccgccggtccgggcagcatgaggcgcgcggcgctctggctctggctgtgcgcgctggcgctgagcctgcagccggccctgccgcaaattgtggctactaatttgccccctgaagatcaagatggctctggggatgactctgacaacttctccggctcaggtgcaggtgctttgcaagatatcaccttgtcacagcagaccccctccacttggaaggacacgcagctcctgacggctattcccacgtctccagaacccaccggcctggaggctacagctgcctccacctccaccctgccggctggagaggggcccaaggagggagaggctgtagtcctgccagaagtggagcctggcctcaccgcccgggagcaggaggccaccccccgacccagggagaccacacagctcccgaccactcatcaggcctcaacgaccacagccaccacggcccaggagcccgccacctcccacccccacagggacatgcagcctggccaccatgagacctcaacccctgcaggacccagccaagctgaccttcacactccccacacagaggatggaggtccttctgccaccgagagggctgctgaggatggagcctccagtcagctcccagcagcagagggctctggggagcaggacttcacctttgaaacctcgggggagaatacggctgtagtggccgtggagcctgaccgccggaaccagtccccagtggatcagggggccacgggggcctcacagggcctcctggacaggaaagaggtgctgggaggggtcattgccggaggcctcgtggggctcatctttgctgtgtgcctggtgggtttcatgctgtaccgcatgaagaagaaggacgaaggcagctactccttggaggagccgaaacaagccaacggcggggcctaccagaagcccaccaaacaggaggaattctatgcctgacgcgggagccatgcgccccctccgccctgccactcactaggcccccacttgcctcttccttgaagaactgcaggccctggcctcccctgccaccaggccacctccccagcattccagcccctctggtcgctcctgcccacggagtcgtggggtgtgctgggagctccactctgcttctctgacttctgcctggagacttagggcaccaggggtttctcgcataggacctttccaccacagccagcacctggcatcgcaccattctgactcggtttctccaaactgaagcagcctctccccaggtccagctctggaggggagggggatccgactgctttggacctaaatggcctcatgtggctggaagatcctgcgggtggggcttggggctcacacacctgtagcacttactggtaggaccaagcatcttgggggggtggccgctgagtggcaggggacaggagtccactttgtttcgtggggaggtctaatctagatatcgacttgtttttgcacatgtttcctctagttctttgttcatagcccagtagaccttgttacttctgaggtaagttaagtaagttgattcggtatccccccatcttgcttccctaatctatggtcgggagacagcatcagggttaagaagactttttttttttttttttaaactaggagaaccaaatctggaagccaaaatgtaggcttagtttgtgtgttgtctcttgagtttgtcgctcatgtgtgcaacagggtatggactatctgtctggtggccccgtttctggtggtctgttggcaggctggccagtccaggctgccgtggggccgccgcctctttcaagcagtcgtgcctgtgtccatgcgctcagggccatgctgaggcctgggccgctgccacgttggagaagcccgtgtgagaagtgaatgctgggactcagccttcagacagagaggactgtagggagggcggcaggggcctggagatcctcctgcagaccacgcccgtcctgcctgtggcgccgtctccaggggctgcttcctcctggaaattgacgaggggtgtcttgggcagagctggctctgagcgcctccatccaaggccaggttctccgttagctcctgtggccccaccctgggccctgggctggaatcaggaatattttccaaagagtgatagtcttttgcttttggcaaaactctacttaatccaatgggtttttccctgtacagtagattttccaaatgtaataaactttaatataaagtagtcctgtgaatgccactgccttcgc

SEQ ID NO: 76327 - DNA, 3203 bp, Homo sapiens
ggccgggagacctggcggagctgggggtggggggccagtttttgcaacggctaaggaagggcctgtgggtttattataaggcggagctcggcgggagaggtgcgggccgaatccgagccgagcggagaggaatccggcagtagagagcggactccagccggcggaccctgcagccctcgcctgggacagcggcgcgctgggcaggcgcccaagagagcatcgagcagcggaacccgcgaagccggcccgcagccgcgacccgcgcagcctgccgctctcccgccgccggtccgggcagcatgaggcgcgcggcgctctggctctggctgtgcgcgctggcgctgagcctgcagccggccctgccgcaaattgtggctactaatttgccccctgaagatcaagatggctctggggatgactctgacaacttctccggctcaggtgcaggtgctttgcaagatatcaccttgtcacagcagaccccctccacttggaaggacacgcagctcctgacggctattcccacgtctccagaacccaccggcctggaggctacagctgcctccacctccaccctgccggctggagaggggcccaaggagggagaggctgtagtcctgccagaagtggagcctggcctcaccgcccgggagcaggaggccaccccccgacccagggagaccacacagctcccgaccactcatcaggcctcaacgaccacagccaccacggcccaggagcccgccacctcccacccccacagggacatgcagcctggccaccatgagacctcaacccctgcaggacccagccaagctgaccttcacactccccacacagaggatggaggtccttctgccaccgagagggctgctgaggatggagcctccagtcagctcccagcagcagagggctctggggagcaggacttcacctttgaaacctcgggggagaatacggctgtagtggccgtggagcctgaccgccggaaccagtccccagtggatcagggggccacgggggcctcacagggcctcctggacaggaaagaggtgctgggaggggtcattgccggaggcctcgtggggctcatctttgctgtgtgcctggtgggtttcatgctgtaccgcatgaagaagaaggacgaaggcagctactccttggaggagccgaaacaagccaacggcggggcctaccagaagcccaccaaacaggaggaattctatgcctgacgcgggagccatgcgccccctccgccctgccactcactaggcccccacttgcctcttccttgaagaactgcaggccctggcctcccctgccaccaggccacctccccagcattccagcccctctggtcgctcctgcccacggagtcgtggggtgtgctgggagctccactctgcttctctgacttctgcctggagacttagggcaccaggggtttctcgcataggacctttccaccacagccagcacctggcatcgcaccattctgactcggtttctccaaactgaagcagcctctccccaggtccagctctggaggggagggggatccgactgctttggacctaaatggcctcatgtggctggaagatcctgcgggtggggcttggggctcacacacctgtagcacttactggtaggaccaagcatcttgggggggtggccgctgagtggcaggggacaggagtccactttgtttcgtggggaggtctaatctagatatcgacttgtttttgcacatgtttcctctagttctttgttcatagcccagtagaccttgttacttctgaggtaagttaagtaagttgattcggtatccccccatcttgcttccctaatctatggtcgggagacagcatcagggttaagaagactttttttttttttttttaaactaggagaaccaaatctggaagccaaaatgtaggcttagtttgtgtgttgtctcttgagtttgtcgctcatgtgtgcaacagggtatggactatctgtctggtggccccgtttctggtggtctgttggcaggctggccagtccaggctgccgtggggccgccgcctctttcaagcagtcgtgcctgtgtccatgcgctcagggccatgctgaggcctgggccgctgccacgttggagaagcccgtgtgagaagtgaatgctgggactcagccttcagacagagaggactgtagggagggcggcaggggcctggagatcctcctgcagaccacgcccgtcctgcctgtggcgccgtctccaggggctgcttcctcctggaaattgacgaggggtgtcttgggcagagctggctctgagcgcctccatccaaggccaggttctccgttagctcctgtggccccaccctgggccctgggctggaatcaggaatattttccaaagagtgatagtcttttgcttttggcaaaactctacttaatccaatgggtttttccctgtacagtagattttccaaatgtaataaactttaatataaagtagtcctgtgaatgccactgccttcgcttcttgcctctgtgctgtgtgtgacgtgaccggacttttctgcaaacaccaacatgttgggaaacttggctcgaatctctgtgccttcgtctttcccatggggagggattctggttccagggtccctctgtgtatttgcttttttgttttggctgaaattctcctggaggtcggtaggttcagccaaggttttataaggctgatgtcaatttctgtgttgccaagctccaagccccatcttctaaatggcaaaggaaggtggatggccccagcacagcttgacctgaggctgtggtcacagcggaggtgtggagccgaggcctaccccgcagacaccttggacatcctcctcccacccggctgcagaggccagaggcccccagcccagggctcctgcacttacttgcttatttgacaacgtttcagcgactccgttggccactccgagaggtgggccagtctgtggatcagagatgcaccaccaagccaagggaacctgtgtccggtattcgatactgcgactttctgcctggagtgtatgactgcacatgactcgggggtggggaaaggggtcggctgaccatgctcatctgctggtccgtgggacggtgcccaagccagaggctgggttcatttgtgtaacgacaataaacggtacttgtcatttcgggcaaca

SEQ ID NO: 76328 - DNA, 3149 bp, Homo sapiens
ggccgggagacctggcggagctgggggtggggggccagtttttgcaacggctaaggaagggcctgtgggtttattataaggcggagctcggcgggagaggtgcgggccgaatccgagccgagcggagaggaatccggcagtagagagcggactccagccggcggaccctgcagccctcgcctgggacagcggcgcgctgggcaggcgcccaagagagcatcgagcagcggaacccgcgaagccggcccgcagccgcgacccgcgcagcctgccgctctcccgccgccggtccgggcagcatgaggcgcgcggcgctctggctctggctgtgcgcgctggcgctgagcctgcagccggccctgccgcaaattgtggctactaatttgccccctgaagatcaagatggctctggggatgactctgacaacttctccggctcaggtgcaggtgctttgcaagatatcaccttgtcacagcagaccccctccacttggaaggacacgcagctcctgacggctattcccacgtctccagaacccaccggcctggaggctacagctgcctccacctccaccctgccggctggagaggggcccaaggagggagaggctgtagtcctgccagaagtggagcctggcctcaccgcccgggagcaggaggccaccccccgacccagggagaccacacagctcccgaccactcatcaggcctcaacgaccacagccaccacggcccaggagcccgccacctcccacccccacagggacatgcagcctggccaccatgagacctcaacccctgcaggacccagccaagctgaccttcacactccccacacagaggatggaggtccttctgccaccgagagggctgctgaggatggagcctccagtcagctcccagcagcagagggctctggggagcaggacttcacctttgaaacctcgggggagaatacggctgtagtggccgtggagcctgaccgccggaaccagtccccagtggatcagggggccacgggggcctcacagggcctcctggacaggaaagaggtgctgggaggggtcattgccggaggcctcgtggggctcatctttgctgtgtgcctggtgggtttcatgctgtaccgcatgaagaagaaggacgaaggcagctactccttggaggagccgaaacaagccaacggcggggcctaccagaagcccaccaaacaggaggaattctatgcctgacgcgggagccatgcgccccctccgccctgccactcactaggcccccacttgcctcttccttgaagaactgcaggccctggcctcccctgccaccaggccacctccccagcattccagcccctctggtcgctcctgcccacggagtcgtggggtgtgctgggagctccactctgcttctctgacttctgcctggagacttagggcaccaggggtttctcgcataggacctttccaccacagccagcacctggcatcgcaccattctgactcggtttctccaaactgaagcagcctctccccaggtccagctctggaggggagggggatccgactgctttggacctaaatggcctcatgtggctggaagatcctgcgggtggggcttggggctcacacacctgtagcacttactggtaggaccaagcatcttgggggggtggccgctgagtggcaggggacaggagtccactttgtttcgtggggaggtctaatctagatatcgacttgtttttgcacatgtttcctctagttctttgttcatagcccagtagaccttgttacttctgaggtaagttaagtaagttgattcggtatccccccatcttgcttccctaatctatggtcgggagacagcatcagggttaagaagactttttttttttttttttaaactaggagaaccaaatctggaagccaaaatgtaggcttagtttgtgtgttgtctcttgagtttgtcgctcatgtgtgcaacagggtatggactatctgtctggtggccccgtttctggtggtctgttggcaggctggccagtccaggctgccgtggggccgccgcctctttcaagcagtcgtgcctgtgtccatgcgctcagggccatgctgaggcctgggccgctgccacgttggagaagcccgtgtgagaagtgaatgctgggactcagccttcagacagagaggactgtagggagggcggcaggggcctggagatcctcctgcagaccacgcccgtcctgcctgtggcgccgtctccaggggctgcttcctcctggaaattgacgaggggtgtcttgggcagagctggctctgagcgcctccatccaaggccaggttctccgttagctcctgtggccccaccctgggccctgggctggaatcaggaatattttccaaagagtgatagtcttttgcttttggcaaaaaactttaatataaagtagtcctgtgaatgccactgccttcgcttcttgcctctgtgctgtgtgtgacgtgaccggacttttctgcaaacaccaacatgttgggaaacttggctcgaatctctgtgccttcgtctttcccatggggagggattctggttccagggtccctctgtgtatttgcttttttgttttggctgaaattctcctggaggtcggtaggttcagccaaggttttataaggctgatgtcaatttctgtgttgccaagctccaagccccatcttctaaatggcaaaggaaggtggatggccccagcacagcttgacctgaggctgtggtcacagcggaggtgtggagccgaggcctaccccgcagacaccttggacatcctcctcccacccggctgcagaggccagaggcccccagcccagggctcctgcacttacttgcttatttgacaacgtttcagcgactccgttggccactccgagaggtgggccagtctgtggatcagagatgcaccaccaagccaagggaacctgtgtccggtattcgatactgcgactttctgcctggagtgtatgactgcacatgactcgggggtggggaaaggggtcggctgaccatgctcatctgctggtccgtgggacggtgcccaagccagaggctgggttcatttgtgtaacgacaataaacggtacttgtcatttcgggcaaca

SEQ ID NO: 76329 - DNA, 2890 bp, Homo sapiens
agcagagacccggccaagcctttactcataccatattctgatccttttccagcaaattgtggctactaatttgccccctgaagatcaagatggctctggggatgactctgacaacttctccggctcaggtgcaggtgctttgcaagatatcaccttgtcacagcagaccccctccacttggaaggacacgcagctcctgacggctattcccacgtctccagaacccaccggcctggaggctacagctgcctccacctccaccctgccggctggagaggggcccaaggagggagaggctgtagtcctgccagaagtggagcctggcctcaccgcccgggagcaggaggccaccccccgacccagggagaccacacagctcccgaccactcatcaggcctcaacgaccacagccaccacggcccaggagcccgccacctcccacccccacagggacatgcagcctggccaccatgagacctcaacccctgcaggacccagccaagctgaccttcacactccccacacagaggatggaggtccttctgccaccgagagggctgctgaggatggagcctccagtcagctcccagcagcagagggctctggggagcaggacttcacctttgaaacctcgggggagaatacggctgtagtggccgtggagcctgaccgccggaaccagtccccagtggatcagggggccacgggggcctcacagggcctcctggacaggaaagaggtgctgggaggggtcattgccggaggcctcgtggggctcatctttgctgtgtgcctggtgggtttcatgctgtaccgcatgaagaagaaggacgaaggcagctactccttggaggagccgaaacaagccaacggcggggcctaccagaagcccaccaaacaggaggaattctatgcctgacgcgggagccatgcgccccctccgccctgccactcactaggcccccacttgcctcttccttgaagaactgcaggccctggcctcccctgccaccaggccacctccccagcattccagcccctctggtcgctcctgcccacggagtcgtggggtgtgctgggagctccactctgcttctctgacttctgcctggagacttagggcaccaggggtttctcgcataggacctttccaccacagccagcacctggcatcgcaccattctgactcggtttctccaaactgaagcagcctctccccaggtccagctctggaggggagggggatccgactgctttggacctaaatggcctcatgtggctggaagatcctgcgggtggggcttggggctcacacacctgtagcacttactggtaggaccaagcatcttgggggggtggccgctgagtggcaggggacaggagtccactttgtttcgtggggaggtctaatctagatatcgacttgtttttgcacatgtttcctctagttctttgttcatagcccagtagaccttgttacttctgaggtaagttaagtaagttgattcggtatccccccatcttgcttccctaatctatggtcgggagacagcatcagggttaagaagactttttttttttttttttaaactaggagaaccaaatctggaagccaaaatgtaggcttagtttgtgtgttgtctcttgagtttgtcgctcatgtgtgcaacagggtatggactatctgtctggtggccccgtttctggtggtctgttggcaggctggccagtccaggctgccgtggggccgccgcctctttcaagcagtcgtgcctgtgtccatgcgctcagggccatgctgaggcctgggccgctgccacgttggagaagcccgtgtgagaagtgaatgctgggactcagccttcagacagagaggactgtagggagggcggcaggggcctggagatcctcctgcagaccacgcccgtcctgcctgtggcgccgtctccaggggctgcttcctcctggaaattgacgaggggtgtcttgggcagagctggctctgagcgcctccatccaaggccaggttctccgttagctcctgtggccccaccctgggccctgggctggaatcaggaatattttccaaagagtgatagtcttttgcttttggcaaaactctacttaatccaatgggtttttccctgtacagtagattttccaaatgtaataaactttaatataaagtagtcctgtgaatgccactgccttcgcttcttgcctctgtgctgtgtgtgacgtgaccggacttttctgcaaacaccaacatgttgggaaacttggctcgaatctctgtgccttcgtctttcccatggggagggattctggttccagggtccctctgtgtatttgcttttttgttttggctgaaattctcctggaggtcggtaggttcagccaaggttttataaggctgatgtcaatttctgtgttgccaagctccaagccccatcttctaaatggcaaaggaaggtggatggccccagcacagcttgacctgaggctgtggtcacagcggaggtgtggagccgaggcctaccccgcagacaccttggacatcctcctcccacccggctgcagaggccagaggcccccagcccagggctcctgcacttacttgcttatttgacaacgtttcagcgactccgttggccactccgagaggtgggccagtctgtggatcagagatgcaccaccaagccaagggaacctgtgtccggtattcgatactgcgactttctgcctggagtgtatgactgcacatgactcgggggtggggaaaggggtcggctgaccatgctcatctgctggtccgtgggacggtgcccaagccagaggctgggttcatttgtgtaacgacaataaacggtacttgtcatttcgggcaaca

SEQ ID NO: 76330 - DNA, 3152 bp, Homo sapiens
ggccgggagacctggcggagctgggggtggggggccagtttttgcaacggctaaggaagggcctgtgggtttattataaggcggagctcggcgggagaggtgcgggccgaatccgagccgagcggagaggaatccggcagtagagagcggactccagccggcggaccctgcagccctcgcctgggacagcggcgcgctgggcaggcgcccaagagagcatcgagcagcggaacccgcgaagccggcccgcagccgcgacccgcgcagcctgccgctctcccgccgccggtccgggcagcatgaggcgcgcggcgctctggctctggctgtgcgcgctggcgctgagcctgcagccggccctgccgcaaattgtggctactaatttgccccctgaagatcaagatggctctggggatgactctgacaacttctccggctcaggtgcaggtgctttgcaagatatcaccttgtcacagcagaccccctccacttggaaggacacgcagctcctgacggctattcccacgtctccagaacccaccggcctggaggctacagctgcctccacctccaccctgccggctggagaggggcccaaggagggagaggctgtagtcctgccagaagtggagcctggcctcaccgcccgggagcaggaggccaccccccgacccagggagaccacacagctcccgaccactcatcaggcctcaacgaccacagccaccacggcccaggagcccgccacctcccacccccacagggacatgcagcctggccaccatgagacctcaacccctgcaggacccagccaagctgaccttcacactccccacacagaggatggaggtccttctgccaccgagagggctgctgaggatggagcctccagtcagctcccagcagcagagggctctggggagcaggacttcacctttgaaacctcgggggagaatacggctgtagtggccgtggagcctgaccgccggaaccagtccccagtggatcagggggccacgggggcctcacagggcctcctggacaggaaagaggtgctgggaggggtcattgccggaggcctcgtggggctcatctttgctgtgtgcctggtgggtttcatgctgtaccgcatgaagaagaaggacgaaggcagctactccttggaggagccgaaacaagccaacggcggggcctaccagaagcccaccaaacaggaggaattctatgcctgacgcgggagccatgcgccccctccgccctgccactcactaggcccccacttgcctcttccttgaagaactgcaggccctggcctcccctgccaccaggccacctccccagcattccagcccctctggtcgctcctgcccacggagtcgtggggtgtgctgggagctccactctgcttctctgacttctgcctggagacttagggcaccaggggtttctcgcataggacctttccaccacagccagcacctggcatcgcaccattctgactcggtttctccaaactgaagcagcctctccccaggtccagctctggaggggagggggatccgactgctttggacctaaatggcctcatgtggctggaagatcctgcgggtggggcttggggctcacacacctgtagcacttactggtaggaccaagcatcttgggggggtggccgctgagtggcaggggacaggagtccactttgtttcgtggggaggtctaatctagatatcgacttgtttttgcacatgtttcctctagttctttgttcatagcccagtagaccttgttacttctgaggtaagttaagtaagttgattcggtatccccccatcttgcttccctaatctatggtcgggagacagcatcagggttaagaagactttttttttttttttttaaactaggagaaccaaatctggaagccaaaacagggtatggactatctgtctggtggccccgtttctggtggtctgttggcaggctggccagtccaggctgccgtggggccgccgcctctttcaagcagtcgtgcctgtgtccatgcgctcagggccatgctgaggcctgggccgctgccacgttggagaagcccgtgtgagaagtgaatgctgggactcagccttcagacagagaggactgtagggagggcggcaggggcctggagatcctcctgcagaccacgcccgtcctgcctgtggcgccgtctccaggggctgcttcctcctggaaattgacgaggggtgtcttgggcagagctggctctgagcgcctccatccaaggccaggttctccgttagctcctgtggccccaccctgggccctgggctggaatcaggaatattttccaaagagtgatagtcttttgcttttggcaaaactctacttaatccaatgggtttttccctgtacagtagattttccaaatgtaataaactttaatataaagtagtcctgtgaatgccactgccttcgcttcttgcctctgtgctgtgtgtgacgtgaccggacttttctgcaaacaccaacatgttgggaaacttggctcgaatctctgtgccttcgtctttcccatggggagggattctggttccagggtccctctgtgtatttgcttttttgttttggctgaaattctcctggaggtcggtaggttcagccaaggttttataaggctgatgtcaatttctgtgttgccaagctccaagccccatcttctaaatggcaaaggaaggtggatggccccagcacagcttgacctgaggctgtggtcacagcggaggtgtggagccgaggcctaccccgcagacaccttggacatcctcctcccacccggctgcagaggccagaggcccccagcccagggctcctgcacttacttgcttatttgacaacgtttcagcgactccgttggccactccgagaggtgggccagtctgtggatcagagatgcaccaccaagccaagggaacctgtgtccggtattcgatactgcgactttctgcctggagtgtatgactgcacatgactcgggggtggggaaaggggtcggctgaccatgctcatctgctggtccgtgggacggtgcccaagccagaggctgggttcatttgtgtaacgacaataaacggtacttgtcatttcgggcaaca

SEQ ID NO: 76331 - DNA, 2764 bp, Homo sapiens
  misc_feature (17)..(17): n is a, c, g, or t
ttcattaacctttcctnaattcccgggaggctaaggaagggcctgtgggtttattataaggcggagctcggcgggagaggtgcgggccgaatccgagccgagcggagaggaatccggcagtagagagcggactccagccggcggaccctgcagccccaaggagggagaggctgtagtcctgccagaagtggagcctggcctcaccgcccgggagcaggaggccaccccccgacccagggagaccacacagctcccgaccactcatcaggcctcaacgaccacagccaccacggcccaggagcccgccacctcccacccccacagggacatgcagcctggccaccatgagacctcaacccctgcaggacccagccaagctgaccttcacactccccacacagaggatggaggtccttctgccaccgagagggctgctgaggatggagcctccagtcagctcccagcagcagagggctctggggagcaggacttcacctttgaaacctcgggggagaatacggctgtagtggccgtggagcctgaccgccggaaccagtccccagtggatcagggggccacgggggcctcacagggcctcctggacaggaaagaggtgctgggaggggtcattgccggaggcctcgtggggctcatctttgctgtgtgcctggtgggtttcatgctgtaccgcatgaagaagaaggacgaaggcagctactccttggaggagccgaaacaagccaacggcggggcctaccagaagcccaccaaacaggaggaattctatgcctgacgcgggagccatgcgccccctccgccctgccactcactaggcccccacttgcctcttccttgaagaactgcaggccctggcctcccctgccaccaggccacctccccagcattccagcccctctggtcgctcctgcccacggagtcgtggggtgtgctgggagctccactctgcttctctgacttctgcctggagacttagggcaccaggggtttctcgcataggacctttccaccacagccagcacctggcatcgcaccattctgactcggtttctccaaactgaagcagcctctccccaggtccagctctggaggggagggggatccgactgctttggacctaaatggcctcatgtggctggaagatcctgcgggtggggcttggggctcacacacctgtagcacttactggtaggaccaagcatcttgggggggtggccgctgagtggcaggggacaggagtccactttgtttcgtggggaggtctaatctagatatcgacttgtttttgcacatgtttcctctagttctttgttcatagcccagtagaccttgttacttctgaggtaagttaagtaagttgattcggtatccccccatcttgcttccctaatctatggtcgggagacagcatcagggttaagaagactttttttttttttttttaaactaggagaaccaaatctggaagccaaaatgtaggcttagtttgtgtgttgtctcttgagtttgtcgctcatgtgtgcaacagggtatggactatctgtctggtggccccgtttctggtggtctgttggcaggctggccagtccaggctgccgtggggccgccgcctctttcaagcagtcgtgcctgtgtccatgcgctcagggccatgctgaggcctgggccgctgccacgttggagaagcccgtgtgagaagtgaatgctgggactcagccttcagacagagaggactgtagggagggcggcaggggcctggagatcctcctgcagaccacgcccgtcctgcctgtggcgccgtctccaggggctgcttcctcctggaaattgacgaggggtgtcttgggcagagctggctctgagcgcctccatccaaggccaggttctccgttagctcctgtggccccaccctgggccctgggctggaatcaggaatattttccaaagagtgatagtcttttgcttttggcaaaactctacttaatccaatgggtttttccctgtacagtagattttccaaatgtaataaactttaatataaagtagtcctgtgaatgccactgccttcgcttcttgcctctgtgctgtgtgtgacgtgaccggacttttctgcaaacaccaacatgttgggaaacttggctcgaatctctgtgccttcgtctttcccatggggagggattctggttccagggtccctctgtgtatttgcttttttgttttggctgaaattctcctggaggtcggtaggttcagccaaggttttataaggctgatgtcaatttctgtgttgccaagctccaagccccatcttctaaatggcaaaggaaggtggatggccccagcacagcttgacctgaggctgtggtcacagcggaggtgtggagccgaggcctaccccgcagacaccttggacatcctcctcccacccggctgcagaggccagaggcccccagcccagggctcctgcacttacttgcttatttgacaacgtttcagcgactccgttggccactccgagaggtgggccagtctgtggatcagagatgcaccaccaagccaagggaacctgtgtccggtattcgatactgcgactttctgcctggagtgtatgactgcacatgactcgggggtggggaaaggggtcggctgaccatgctcatctgctggtccgtgggacggtgcccaagccagaggctgggttcatttgtgtaacgacaataaacggtacttgtcatttcgggcaaca

SEQ ID NO: 76332 - DNA, 2470 bp, Homo sapiens
ttcaggtctatagacagcggacccccacagggacatgcagcctggccaccatgagacctcaacccctgcaggacccagccaagctgaccttcacactccccacacagaggatggaggtccttctgccaccgagagggctgctgaggatggagcctccagtcagctcccagcagcagagggctctggggagcaggacttcacctttgaaacctcgggggagaatacggctgtagtggccgtggagcctgaccgccggaaccagtccccagtggatcagggggccacgggggcctcacagggcctcctggacaggaaagaggtgctgggaggggtcattgccggaggcctcgtggggctcatctttgctgtgtgcctggtgggtttcatgctgtaccgcatgaagaagaaggacgaaggcagctactccttggaggagccgaaacaagccaacggcggggcctaccagaagcccaccaaacaggaggaattctatgcctgacgcgggagccatgcgccccctccgccctgccactcactaggcccccacttgcctcttccttgaagaactgcaggccctggcctcccctgccaccaggccacctccccagcattccagcccctctggtcgctcctgcccacggagtcgtggggtgtgctgggagctccactctgcttctctgacttctgcctggagacttagggcaccaggggtttctcgcataggacctttccaccacagccagcacctggcatcgcaccattctgactcggtttctccaaactgaagcagcctctccccaggtccagctctggaggggagggggatccgactgctttggacctaaatggcctcatgtggctggaagatcctgcgggtggggcttggggctcacacacctgtagcacttactggtaggaccaagcatcttgggggggtggccgctgagtggcaggggacaggagtccactttgtttcgtggggaggtctaatctagatatcgacttgtttttgcacatgtttcctctagttctttgttcatagcccagtagaccttgttacttctgaggtaagttaagtaagttgattcggtatccccccatcttgcttccctaatctatggtcgggagacagcatcagggttaagaagactttttttttttttttttaaactaggagaaccaaatctggaagccaaaatgtaggcttagtttgtgtgttgtctcttgagtttgtcgctcatgtgtgcaacagggtatggactatctgtctggtggccccgtttctggtggtctgttggcaggctggccagtccaggctgccgtggggccgccgcctctttcaagcagtcgtgcctgtgtccatgcgctcagggccatgctgaggcctgggccgctgccacgttggagaagcccgtgtgagaagtgaatgctgggactcagccttcagacagagaggactgtagggagggcggcaggggcctggagatcctcctgcagaccacgcccgtcctgcctgtggcgccgtctccaggggctgcttcctcctggaaattgacgaggggtgtcttgggcagagctggctctgagcgcctccatccaaggccaggttctccgttagctcctgtggccccaccctgggccctgggctggaatcaggaatattttccaaagagtgatagtcttttgcttttggcaaaactctacttaatccaatgggtttttccctgtacagtagattttccaaatgtaataaactttaatataaagtagtcctgtgaatgccactgccttcgcttcttgcctctgtgctgtgtgtgacgtgaccggacttttctgcaaacaccaacatgttgggaaacttggctcgaatctctgtgccttcgtctttcccatggggagggattctggttccagggtccctctgtgtatttgcttttttgttttggctgaaattctcctggaggtcggtaggttcagccaaggttttataaggctgatgtcaatttctgtgttgccaagctccaagccccatcttctaaatggcaaaggaaggtggatggccccagcacagcttgacctgaggctgtggtcacagcggaggtgtggagccgaggcctaccccgcagacaccttggacatcctcctcccacccggctgcagaggccagaggcccccagcccagggctcctgcacttacttgcttatttgacaacgtttcagcgactccgttggccactccgagaggtgggccagtctgtggatcagagatgcaccaccaagccaagggaacctgtgtccggtattcgatactgcgactttctgcctggagtgtatgactgcacatgactcgggggtggggaaaggggtcggctgaccatgctcatctgctggtccgtgggacggtgcccaagccagaggctgggttcatttgtgtaacgacaataaacggtacttgtcatttcgggcaaca

SEQ ID NO: 76333 - DNA, 2427 bp, Homo sapiens
tagaggatctagggagccttccctgcaggacccagccaagctgaccttcacactccccacacagaggatggaggtccttctgccaccgagagggctgctgaggatggagcctccagtcagctcccagcagcagagggctctggggagcaggacttcacctttgaaacctcgggggagaatacggctgtagtggccgtggagcctgaccgccggaaccagtccccagtggatcagggggccacgggggcctcacagggcctcctggacaggaaagaggtgctgggaggggtcattgccggaggcctcgtggggctcatctttgctgtgtgcctggtgggtttcatgctgtaccgcatgaagaagaaggacgaaggcagctactccttggaggagccgaaacaagccaacggcggggcctaccagaagcccaccaaacaggaggaattctatgcctgacgcgggagccatgcgccccctccgccctgccactcactaggcccccacttgcctcttccttgaagaactgcaggccctggcctcccctgccaccaggccacctccccagcattccagcccctctggtcgctcctgcccacggagtcgtggggtgtgctgggagctccactctgcttctctgacttctgcctggagacttagggcaccaggggtttctcgcataggacctttccaccacagccagcacctggcatcgcaccattctgactcggtttctccaaactgaagcagcctctccccaggtccagctctggaggggagggggatccgactgctttggacctaaatggcctcatgtggctggaagatcctgcgggtggggcttggggctcacacacctgtagcacttactggtaggaccaagcatcttgggggggtggccgctgagtggcaggggacaggagtccactttgtttcgtggggaggtctaatctagatatcgacttgtttttgcacatgtttcctctagttctttgttcatagcccagtagaccttgttacttctgaggtaagttaagtaagttgattcggtatccccccatcttgcttccctaatctatggtcgggagacagcatcagggttaagaagactttttttttttttttttaaactaggagaaccaaatctggaagccaaaatgtaggcttagtttgtgtgttgtctcttgagtttgtcgctcatgtgtgcaacagggtatggactatctgtctggtggccccgtttctggtggtctgttggcaggctggccagtccaggctgccgtggggccgccgcctctttcaagcagtcgtgcctgtgtccatgcgctcagggccatgctgaggcctgggccgctgccacgttggagaagcccgtgtgagaagtgaatgctgggactcagccttcagacagagaggactgtagggagggcggcaggggcctggagatcctcctgcagaccacgcccgtcctgcctgtggcgccgtctccaggggctgcttcctcctggaaattgacgaggggtgtcttgggcagagctggctctgagcgcctccatccaaggccaggttctccgttagctcctgtggccccaccctgggccctgggctggaatcaggaatattttccaaagagtgatagtcttttgcttttggcaaaactctacttaatccaatgggtttttccctgtacagtagattttccaaatgtaataaactttaatataaagtagtcctgtgaatgccactgccttcgcttcttgcctctgtgctgtgtgtgacgtgaccggacttttctgcaaacaccaacatgttgggaaacttggctcgaatctctgtgccttcgtctttcccatggggagggattctggttccagggtccctctgtgtatttgcttttttgttttggctgaaattctcctggaggtcggtaggttcagccaaggttttataaggctgatgtcaatttctgtgttgccaagctccaagccccatcttctaaatggcaaaggaaggtggatggccccagcacagcttgacctgaggctgtggtcacagcggaggtgtggagccgaggcctaccccgcagacaccttggacatcctcctcccacccggctgcagaggccagaggcccccagcccagggctcctgcacttacttgcttatttgacaacgtttcagcgactccgttggccactccgagaggtgggccagtctgtggatcagagatgcaccaccaagccaagggaacctgtgtccggtattcgatactgcgactttctgcctggagtgtatgactgcacatgactcgggggtggggaaaggggtcggctgaccatgctcatctgctggtccgtgggacggtgcccaagccagaggctgggttcatttgtgtaacgacaataaacggtacttgtcatttcgggcaaca

SEQ ID NO: 76334 - DNA, 2853 bp, Homo sapiens
ggccgggagacctggcggagctgggggtggggggccagtttttgcaacggctaaggaagggcctgtgggtttattataaggcggagctcggcgggagaggtgcgggccgaatccgagccgagcggagaggaatccggcagtagagagcggactccagccggcggaccctgcagccctcgcctgggacagcggcgcgctgggcaggcgcccaagagagcatcgagcagcggaacccgcgaagccggcccgcagccgcgacccgcgcagcctgccgctctcccgccgccggtccgggcagcatgaggcgcgcggcgctctggctctggctgtgcgcgctggcgctgagcctgcagccggccctgccgcaaattgtggctactaatttgccccctgaagatcaagatggctctggggatgactctgacaacttctccggctcaggtgcaggtgctttgcaagatatcaccttgtcacagcagaccccctccacttggaaggacacgcagctcctgacggctattcccacgtctccagaacccaccggcctggaggctacagctgcctccacctccaccctgccggctggagaggggcccaaggagggagaggctgtagtcctgccagaagtggagcctggcctcaccgcccgggagcaggaggccaccccccgacccagggagaccacacagctcccgaccactcatcaggcctcaacgaccacagccaccacggcccaggagcccgccacctcccacccccacagggacatgcagcctggccaccatgagacctcaacccctgcaggacccagccaagctgaccttcacactccccacacagaggatggaggtccttctgccaccgagagggctgctgaggatggagcctccagtcagctcccagcagcagagggctctggggagcaggacttcacctttgaaacctcgggggagaatacggctgtagtggccgtggagcctgaccgccggaaccagtccccagtggatcagggggccacgggggcctcacagggcctcctggacaggaaagaggtgctgggaggggtcattgccggaggcctcgtggggctcatctttgctgtgtgcctggtgggtttcatgctgtaccgcatgaagaagaaggacgaaggcagctactccttggaggagccgaaacaagccaacggcggggcctaccagaagcccaccaaacaggaggaattctatgcctgacgcgggagccatgcgccccctccgccctgccactcactaggcccccacttgcctcttccttgaagaactgcaggccctggcctcccctggccgctgagtggcaggggacaggagtccactttgtttcgtggggaggtctaatctagatatcgacttgtttttgcacatgtttcctctagttctttgttcatagcccagtagaccttgttacttctgaggtaagttaagtaagttgattcggtatccccccatcttgcttccctaatctatggtcgggagacagcatcagggttaagaagactttttttttttttttttaaactaggagaaccaaatctggaagccaaaatgtaggcttagtttgtgtgttgtctcttgagtttgtcgctcatgtgtgcaacagggtatggactatctgtctggtggccccgtttctggtggtctgttggcaggctggccagtccaggctgccgtggggccgccgcctctttcaagcagtcgtgcctgtgtccatgcgctcagggccatgctgaggcctgggccgctgccacgttggagaagcccgtgtgagaagtgaatgctgggactcagccttcagacagagaggactgtagggagggcggcaggggcctggagatcctcctgcagaccacgcccgtcctgcctgtggcgccgtctccaggggctgcttcctcctggaaattgacgaggggtgtcttgggcagagctggctctgagcgcctccatccaaggccaggttctccgttagctcctgtggccccaccctgggccctgggctggaatcaggaatattttccaaagagtgatagtcttttgcttttggcaaaactctacttaatccaatgggtttttccctgtacagtagattttccaaatgtaataaactttaatataaagtagtcctgtgaatgccactgccttcgcttcttgcctctgtgctgtgtgtgacgtgaccggacttttctgcaaacaccaacatgttgggaaacttggctcgaatctctgtgccttcgtctttcccatggggagggattctggttccagggtccctctgtgtatttgcttttttgttttggctgaaattctcctggaggtcggtaggttcagccaaggttttataaggctgatgtcaatttctgtgttgccaagctccaagccccatcttctaaatggcaaaggaaggtggatggccccagcacagcttgacctgaggctgtggtcacagcggaggtgtggagccgaggcctaccccgcagacaccttggacatcctcctcccacccggctgcagaggccagaggcccccagcccagggctcctgcacttacttgcttatttgacaacgtttcagcgactccgttggccactccgagaggtgggccagtctgtggatcagagatgcaccaccaagccaagggaacctgtgtccggtattcgatactgcgactttctgcctggagtgtatgactgcacatgactcgggggtggggaaaggggtcggctgaccatgctcatctgctggtccgtgggacggtgcccaagccagaggctgggttcatttgtgtaacgacaataaacggtacttgtcatttcgggcaaca

SEQ ID NO: 76335 - DNA, 3022 bp, Homo sapiens
ggccgggagacctggcggagctgggggtggggggccagtttttgcaacggctaaggaagggcctgtgggtttattataaggcggagctcggcgggagaggtgcgggccgaatccgagccgagcggagaggaatccggcagtagagagcggactccagccggcggaccctgcagccctcgcctgggacagcggcgcgctgggcaggcgcccaagagagcatcgagcagcggaacccgcgaagccggcccgcagccgcgacccgcgcagcctgccgctctcccgccgccggtccgggcagcatgaggcgcgcggcgctctggctctggctgtgcgcgctggcgctgagcctgcagccggccctgccgcaaattgtggctactaatttgccccctgaagatcaagatggctctggggatgactctgacaacttctccggctcaggtgcaggtgctttgcaagatatcaccttgtcacagcagaccccctccacttggaaggacacgcagctcctgacggctattcccacgtctccagaacccaccggcctggaggctacagctgcctccacctccaccctgccggctggagaggggcccaaggagggagaggctgtagtcctgccagaagtggagcctggcctcaccgcccgggagcaggaggccaccccccgacccagggagaccacacagctcccgaccactcatcaggcctcaacgaccacagccaccacggcccaggagcccgccacctcccacccccacagggacatgcagcctggccaccatgagacctcaacccctgcaggacccagccaagctgaccttcacactccccacacagaggatggaggtccttctgccaccgagagggctgctgaggatggagcctccagtcagctcccagcagcagagggctctggggagcaggacttcacctttgaaacctcgggggagaatacggctgtagtggccgtggagcctgaccgccggaaccagtccccagtggatcagggggccacgggggcctcacagggcctcctggacaggaaagaggtgctgggaggggtcattgccggaggcctcgtggggctcatctttgctgtgtgcctggtgggtttcatgctgtaccgcatgaagaagaaggacgaaggcagctactccttggaggagccgaaacaagccaacggcggggcctaccagaagcccaccaaacaggaggaattctatgcctgacgcgggagccatgcgccccctccgccctgccactcactaggcccccacttgcctcttccttgaagaactgcaggccctggcctcccctgccaccaggccacctccccagcattccagcccctctggtcgctcctgcccacggagtcgtggggtgtgctgggagctccactctgcttctctgacttctgcctggagacttagggcaccaggggtttctcgcataggacctttccaccacagccagcacctggcatcgcaccattctgactcggtttctccaaactgaagcagcctctccccaggtccagctctggaggggagggggatccgactgctttggacctaaatggcctcatgtggctggaagatcctgcgggtggggcttggggctcacacacctgtagcacttactggtaggaccaagcatcttgggggggtggccgctgagtggcaggggacaggagtccactttgtttcgtggggaggtctaatctagatatcgacttgtttttgcacatgtttcctctagttctttgttcatagcccagtagaccttgttacttctgaggtaagttaagtaagttgattcggtatccccccatcttgcttccctaatctatggtcgggagacagcatcagggttaagaagactttttttttttttttttaaactaggagaaccaaatctggaagccaaaatgtaggcttagtttgtgtgttgtctcttgagtttgtcgctcatgtgtgcaacagggtatggactatctgtctggtggccccgtttctggtggtctgttggcaggctggccagtccaggctgccgtggggccgccgcctctttcaagcagtcgtgcctgtgtccatgcgctcagggccatgctgaggcctgggccgctgccacgttggagaagcccgtgtgagaagtgaatgctgggactcagccttcagacagagaggactgtagggagggcggcaggggcctggagatcctcctgcagaccacgcccgtcctgcctgtggcgccgtctccaggggctgcttcctcctggaaattgacgaggggtgtcttgggcagagctggctctgagcgcctccatccaaggccaggttctccgttagctcctgtggccccaccctgggccctgggctggaatcaggaatattttccaaagagtgatagtcttttgcttttggcaaaactctacttaatccaatgggtttttccctgtacagtagattttccaaatgtaataaactttaatataaagtagtcctgtgaatgccactgccttcgcttcttgcctctgtgctgtgtgtgacgtgaccggacttttctgcaaacaccaacatgttgggaaacttggctcgaatctctgtgccttcgtctttcccatggggagggattctggttccagggtccctctgtgtatttgcttttttgttttggctgaaattctcctggaggtcggtaggttcagccaaggttttataaggctgcccagggctcctgcacttacttgcttatttgacaacgtttcagcgactccgttggccactccgagaggtgggccagtctgtggatcagagatgcaccaccaagccaagggaacctgtgtccggtattcgatactgcgactttctgcctggagtgtatgactgcacatgactcgggggtggggaaaggggtcggctgaccatgctcatctgctggtccgtgggacggtgcccaagccagaggctgggttcatttgtgtaacgacaataaacggtacttgtcatttcgggcaaca

SEQ ID NO: 76336 - DNA, 2827 bp, Homo sapiens
ggccgggagacctggcggagctgggggtggggggccagtttttgcaacggctaaggaagggcctgtgggtttattataaggcggagctcggcgggagaggtgcgggccgaatccgagccgagcggagaggaatccggcagtagagagcggactccagccggcggaccctgcagccctcgcctgggacagcggcgcgctgggcaggcgcccaagagagcatcgagcagcggaacccgcgaagccggcccgcagccgcgacccgcgcagcctgccgctctcccgccgccggtccgggcagcatgaggcgcgcggcgctctggctctggctgtgcgcgctggcgctgagcctgcagccggccctgccgcaaattgtggctactaatttgccccctgaagatcaagatggctctggggatgactctgacaacttctccggctcaggtgcaggtgctttgcaagatatcaccttgtcacagcagaccccctccacttggaaggacacgcagctcctgacggctattcccacgtctccagaacccaccggcctggaggctacagctgcctccacctccaccctgccggctggagaggggcccaaggagggagaggctgtagtcctgccagaagtggagcctggcctcaccgcccgggagcaggaggccaccccccgacccagggagaccacacagctcccgaccactcatcaggcctcaacgaccacagccaccacggcccaggagcccgccacctcccacccccacagggacatgcagcctggccaccatgagacctcaacccctgcaggacccagccaagctgaccttcacactccccacacagaggatggaggtccttctgccaccgagagggctgctgaggatggagcctccagtcagctcccagcagcagagggctctggggagcaggacttcacctttgaaacctcgggggagaatacggctgtagtggccgtggagcctgaccgccggaaccagtccccagtggatcagggggccacgggggcctcacagggcctcctggacaggaaagaggtgctgggaggggtcattgccggaggcctcgtggggctcatctttgctgtgtgcctggtgggtttcatgctgtaccgcatgaagaagaaggacgaaggcagctactccttggaggagccgaaacaagccaacggcggggcctaccagaagcccaccaaacaggaggaattctatgcctgacgcgggagccatgcgccccctccgccctgccactcactaggcccccacttgcctcttccttgaagaactgcaggccctggcctcccctgccaccaggccacctccccagcattccagcccctctggtcgctcctgcccacggagtcgtggggtgtgctgggagctccactctgcttctctgacttctgcctggagacttagggcaccaggggtttctcgcataggacctttccaccacagccagcacctggcatcgcaccattctgactcggtttctccaaactgaagcagcctctccccaggtccagctctggaggggagggggatccgactgctttggacctaaatggcctcatgtggctggaagatcctgcgggtggggcttggggctcacacacctgtagcacttactggtaggaccaagcatcttgggggggtggccgctgagtggcaggggacaggagtccactttgtttcgtggggaggtctaatctagatatcgacttgtttttgcacatgtttcctctagttctttgttcatagcccagtagaccttgttacttctgaggtaagttaagtaagttgattcggtatccccccatcttgcttccctaatctatggtcgggagacagcatcagggttaagaagactttttttttttttttttaaactaggagaaccaaatctggaagccaaaatgtaggcttagtttgtgtgttgtctcttgagtttgtcgctcatgtgtgcaacagggtatggactatctgtctggtggccccgtttctggtggtctgttggcaggctggccagtccaggctgccgtggggccgccgcctctttcaagcagtcgtgcctgtgtccatgcgctcagggccatgctgaggcctgggccgctgccacgttggagaagcccgtgtgagaagtgaatgctgggactcagccttcagacagagaggactgtagggagggcggcaggggcctggagatcctcctgcagaccacgcccgtcctgcctgtggcgccgtctccaggggctgcttcctcctggaaattgacgaggggtgtcttgggcagagctggctctgagcgcctccatccaaggccaggttctccgttagctcctgtggccccaccctgggccctgggctggaatcaggaatattttccaaagagaaggtggatggccccagcacagcttgacctgaggctgtggtcacagcggaggtgtggagccgaggcctaccccgcagacaccttggacatcctcctcccacccggctgcagaggccagaggcccccagcccagggctcctgcacttacttgcttatttgacaacgtttcagcgactccgttggccactccgagaggtgggccagtctgtggatcagagatgcaccaccaagccaagggaacctgtgtccggtattcgatactgcgactttctgcctggagtgtatgactgcacatgactcgggggtggggaaaggggtcggctgaccatgctcatctgctggtccgtgggacggtgcccaagccagaggctgggttcatttgtgtaacgacaataaacggtacttgtcatttcgggcaaca

SEQ ID NO: 76337 - DNA, 2652 bp, Homo sapiens
ggccgggagacctggcggagctgggggtggggggccagtttttgcaacggctaaggaagggcctgtgggtttattataaggcggagctcggcgggagaggtgcgggccgaatccgagccgagcggagaggaatccggcagtagagagcggactccagccggcggaccctgcagccctcgcctgggacagcggcgcgctgggcaggcgcccaagagagcatcgagcagcggaacccgcgaagccggcccgcagccgcgacccgcgcagcctgccgctctcccgccgccggtccgggcagcatgaggcgcgcggcgctctggctctggctgtgcgcgctggcgctgagcctgcagccggccctgccgcaaattgtggctactaatttgccccctgaagatcaagatggctctggggatgactctgacaacttctccggctcaggtgcaggtgctttgcaagatatcaccttgtcacagcagaccccctccacttggaaggacacgcagctcctgacggctattcccacgtctccagaacccaccggcctggaggctacagctgcctccacctccaccctgccggctggagaggggcccaaggagggagaggctgtagtcctgccagaagtggagcctggcctcaccgcccgggagcaggaggccaccccccgacccagggagaccacacagctcccgaccactcatcaggcctcaacgaccacagccaccacggcccaggagcccgccacctcccacccccacagggacatgcagcctggccaccatgagacctcaacccctgcaggacccagccaagctgaccttcacactccccacacagaggatggaggtccttctgccaccgagagggctgctgaggatggagcctccagtcagctcccagcagcagagggctctggggagcaggacttcacctttgaaacctcgggggagaatacggctgtagtggccgtggagcctgaccgccggaaccagtccccagtggatcagggggccacgggggcctcacagggcctcctggacaggaaagaggtgctgggaggggtcattgccggaggcctcgtggggctcatctttgctgtgtgcctggtgggtttcatgctgtaccgcatgaagaagaaggacgaaggcagctactccttggaggagccgaaacaagccaacggcggggcctaccagaagcccaccaaacaggaggaattctatgcctgacgcgggagccatgcgccccctccgccctgccactcactaggcccccacttgcctcttccttgaagaactgcaggccctggcctcccctgccaccaggccacctccccagcattccagcccctctggtcgctcctgcccacggagtcgtggggtgtgctgggagctccactctgcttctctgacttctgcctggagacttagggcaccaggggtttctcgcataggacctttccaccacagccagcacctggcatcgcaccattctgactcggtttctccaaactgaagcagcctctccccaggtccagctctggaggggagggggatccgactgctttggacctaaatggcctcatgtggctggaagatcctgcgggtggggcttggggctcacacacctgtagcacttactggtaggaccaagcatcttgggggggtggccgctgagtggcaggggacaggagtccactttgtttcgtggggaggtctaatctagatatcgacttgtttttgcacatgtttcctctagttctttgttcatagcccagtagaccttgttacttctgaggtaagttaagtaagttgattcggtatccccccatcttgcttccctaatctatggtcgggagacagcatcagggttaagaagactttttttttttttttttaaactaggagaaccaaatctggaagccaaaatgtaggcttagtttgtgtgttgtctcttgagtttgtcgctcatgtgtgcaacagggtatggactatctgtctggtggccccgtttctggtggtctgttggcaggctggccagtccaggctgccgtggggccgccgcctctttcaagcagtcgtgcctgtgtccatgcgctcagggccatgctgaggcctgggccgctgccacgttggagaagcccgtgtgagaagtgaatgctgggactcagccttcagacagagaggactgtagggagggcggcaggggcctggagatcctcctgcagaccacgcccgtcctgcctgtggcgccgtctccaggggctgcttcctcctggaaattgacgaggggtgtcttgggcagagctggctctgagcgcctccatccaaggccaggttctccgttagctcctgtggccccaccctgggccctgggctggaatcaggaatattttccaaagagtgatagtcttttgcttttggcaaaactctacttaatccaatgggtttttccctgtacagtagattttccaaatgtaataaactttaatataaagtagtcctgtgaatgccactgccttcgcttcttgcctctgtgctgtgtgtgacgtgaccggacttttctgcaaacacacagagggaccctggaaccagatccctccccatgggaaagacgaagcacagagactcgagccaagtttccctacag

SEQ ID NO: 76338 - DNA, 2658 bp, Homo sapiens
ggccgggagacctggcggagctgggggtggggggccagtttttgcaacggctaaggaagggcctgtgggtttattataaggcggagctcggcgggagaggtgcgggccgaatccgagccgagcggagaggaatccggcagtagagagcggactccagccggcggaccctgcagccctcgcctgggacagcggcgcgctgggcaggcgcccaagagagcatcgagcagcggaacccgcgaagccggcccgcagccgcgacccgcgcagcctgccgctctcccgccgccggtccgggcagcatgaggcgcgcggcgctctggctctggctgtgcgcgctggcgctgagcctgcagccggccctgccgcaaattgtggctactaatttgccccctgaagatcaagatggctctggggatgactctgacaacttctccggctcaggtgcaggtgctttgcaagatatcaccttgtcacagcagaccccctccacttggaaggacacgcagctcctgacggctattcccacgtctccagaacccaccggcctggaggctacagctgcctccacctccaccctgccggctggagaggggcccaaggagggagaggctgtagtcctgccagaagtggagcctggcctcaccgcccgggagcaggaggccaccccccgacccagggagaccacacagctcccgaccactcatcaggcctcaacgaccacagccaccacggcccaggagcccgccacctcccacccccacagggacatgcagcctggccaccatgagacctcaacccctgcaggacccagccaagctgaccttcacactccccacacagaggatggaggtccttctgccaccgagagggctgctgaggatggagcctccagtcagctcccagcagcagagggctctggggagcaggacttcacctttgaaacctcgggggagaatacggctgtagtggccgtggagcctgaccgccggaaccagtccccagtggatcagggggccacgggggcctcacagggcctcctggacaggaaagaggtgctgggaggggtcattgccggaggcctcgtggggctcatctttgctgtgtgcctggtgggtttcatgctgtaccgcatgaagaagaaggacgaaggcagctactccttggaggagccgaaacaagccaacggcggggcctaccagaagcccaccaaacaggaggaattctatgcctgacgcgggagccatgcgccccctccgccctgccactcactaggcccccacttgcctcttccttgaagaactgcaggccctggcctcccctgccaccaggccacctccccagcattccagcccctctggtcgctcctgcccacggagtcgtggggtgtgctgggagctccactctgcttctctgacttctgcctggagacttagggcaccaggggtttctcgcataggacctttccaccacagccagcacctggcatcgcaccattctgactcggtttctccaaactgaagcagcctctccccaggtccagctctggaggggagggggatccgactgctttggacctaaatggcctcatgtggctggaagatcctgcgggtggggcttggggctcacacacctgtagcacttactggtaggaccaagcatcttgggggggtggccgctgagtggcaggggacaggagtccactttgtttcgtggggaggtctaatctagatatcgacttgtttttgcacatgtttcctctagttctttgttcatagcccagtagaccttgttacttctgaggtaagttaagtaagttgattcggtatccccccatcttgcttccctaatctatggtcgggagacagcatcagggttaagaagactttttttttttttttttaaactaggagaaccaaatctggaagccaaaatgtaggcttagtttgtgtgttgtctcttgagtttgtcgctcatgtgtgcaacagggtatggactatctgtctggtggccccgtttctggtggtctgttggcaggctggccagtccaggctgccgtggggccgccgcctctttcaagcagtcgtgcctgtgtccatgcgctcagggccatgctgaggcctgggccgctgccacgttggagaagcccgtgtgagaagtgaatgctgggactcagccttcagacagagaggactgtagggagggcggcaggggcctggagatcctcctgcagaccacgcccgtcctgcctgtggcgccgtctccaggggctgcttcctcctggaaattgacgaggggtgtcttgggcagagctggctctgagcgcctccatccaaggccaggttctccgttagctcctgtggccccgcccagggctcctgcacttacttgcttatttgacaacgtttcagcgactccgttggccactccgagaggtgggccagtctgtggatcagagatgcaccaccaagccaagggaacctgtgtccggtattcgatactgcgactttctgcctggagtgtatgactgcacatgactcgggggtggggaaaggggtcggctgaccatgctcatctgctggtccgtgggacggtgcccaagccagaggctgggttcatttgtgtaacgacaataaacggtacttgtcatttcgggcaaca

SEQ ID NO: 76339 - DNA, 1708 bp, Homo sapiens
cccccccccgtaccagttgctgaagcagcctctccccaggtccagctctggaggggagggggatccgactgctttggacctaaatggcctcatgtggctggaagatcctgcgggtggggcttggggctcacacacctgtagcacttactggtaggaccaagcatcttgggggggtggccgctgagtggcaggggacaggagtccactttgtttcgtggggaggtctaatctagatatcgacttgtttttgcacatgtttcctctagttctttgttcatagcccagtagaccttgttacttctgaggtaagttaagtaagttgattcggtatccccccatcttgcttccctaatctatggtcgggagacagcatcagggttaagaagactttttttttttttttttaaactaggagaaccaaatctggaagccaaaatgtaggcttagtttgtgtgttgtctcttgagtttgtcgctcatgtgtgcaacagggtatggactatctgtctggtggccccgtttctggtggtctgttggcaggctggccagtccaggctgccgtggggccgccgcctctttcaagcagtcgtgcctgtgtccatgcgctcagggccatgctgaggcctgggccgctgccacgttggagaagcccgtgtgagaagtgaatgctgggactcagccttcagacagagaggactgtagggagggcggcaggggcctggagatcctcctgcagaccacgcccgtcctgcctgtggcgccgtctccaggggctgcttcctcctggaaattgacgaggggtgtcttgggcagagctggctctgagcgcctccatccaaggccaggttctccgttagctcctgtggccccaccctgggccctgggctggaatcaggaatattttccaaagagtgatagtcttttgcttttggcaaaactctacttaatccaatgggtttttccctgtacagtagattttccaaatgtaataaactttaatataaagtagtcctgtgaatgccactgccttcgcttcttgcctctgtgctgtgtgtgacgtgaccggacttttctgcaaacaccaacatgttgggaaacttggctcgaatctctgtgccttcgtctttcccatggggagggattctggttccagggtccctctgtgtatttgcttttttgttttggctgaaattctcctggaggtcggtaggttcagccaaggttttataaggctgatgtcaatttctgtgttgccaagctccaagccccatcttctaaatggcaaaggaaggtggatggccccagcacagcttgacctgaggctgtggtcacagcggaggtgtggagccgaggcctaccccgcagacaccttggacatcctcctcccacccggctgcagaggccagaggcccccagcccagggctcctgcacttacttgcttatttgacaacgtttcagcgactccgttggccactccgagaggtgggccagtctgtggatcagagatgcaccaccaagccaagggaacctgtgtccggtattcgatactgcgactttctgcctggagtgtatgactgcacatgactcgggggtggggaaaggggtcggctgaccatgctcatctgctggtccgtgggacggtgcccaagccagaggctgggttcatttgtgtaacgacaataaacggtacttgtcatttcgggcaaca

SEQ ID NO: 76340 - DNA, 1604 bp, Homo sapiens
tcagctcggtacccaaacgctgctcacacacctgtagcacttactggtaggaccaagcatcttgggggggtggccgctgagtggcaggggacaggagtccactttgtttcgtggggaggtctaatctagatatcgacttgtttttgcacatgtttcctctagttctttgttcatagcccagtagaccttgttacttctgaggtaagttaagtaagttgattcggtatccccccatcttgcttccctaatctatggtcgggagacagcatcagggttaagaagactttttttttttttttttaaactaggagaaccaaatctggaagccaaaatgtaggcttagtttgtgtgttgtctcttgagtttgtcgctcatgtgtgcaacagggtatggactatctgtctggtggccccgtttctggtggtctgttggcaggctggccagtccaggctgccgtggggccgccgcctctttcaagcagtcgtgcctgtgtccatgcgctcagggccatgctgaggcctgggccgctgccacgttggagaagcccgtgtgagaagtgaatgctgggactcagccttcagacagagaggactgtagggagggcggcaggggcctggagatcctcctgcagaccacgcccgtcctgcctgtggcgccgtctccaggggctgcttcctcctggaaattgacgaggggtgtcttgggcagagctggctctgagcgcctccatccaaggccaggttctccgttagctcctgtggccccaccctgggccctgggctggaatcaggaatattttccaaagagtgatagtcttttgcttttggcaaaactctacttaatccaatgggtttttccctgtacagtagattttccaaatgtaataaactttaatataaagtagtcctgtgaatgccactgccttcgcttcttgcctctgtgctgtgtgtgacgtgaccggacttttctgcaaacaccaacatgttgggaaacttggctcgaatctctgtgccttcgtctttcccatggggagggattctggttccagggtccctctgtgtatttgcttttttgttttggctgaaattctcctggaggtcggtaggttcagccaaggttttataaggctgatgtcaatttctgtgttgccaagctccaagccccatcttctaaatggcaaaggaaggtggatggccccagcacagcttgacctgaggctgtggtcacagcggaggtgtggagccgaggcctaccccgcagacaccttggacatcctcctcccacccggctgcagaggccagaggcccccagcccagggctcctgcacttacttgcttatttgacaacgtttcagcgactccgttggccactccgagaggtgggccagtctgtggatcagagatgcaccaccaagccaagggaacctgtgtccggtattcgatactgcgactttctgcctggagtgtatgactgcacatgactcgggggtggggaaaggggtcggctgaccatgctcatctgctggtccgtgggacggtgcccaagccagaggctgggttcatttgtgtaacgacaataaacggtacttgtcatttcgggcaaca

SEQ ID NO: 76341 - DNA, 1767 bp, Homo sapiens
aatataacaatggaaaatgttatgtgaatcaaattagctttcttgctctgaagttcacaaggggcctaatgataattctggtacattatttttgactcttttttggtaaattggtaaattagtaaaagcaaatggtgcaatcacaggatataaattgtgttgtttgttcagagaatattttacatccaggattgaaattctctagatatttttttaactgtgttttcctctaatttaaagtgcttgtaattacacaggagtccactttgtttcgtggggaggtctaatctagatatcgacttgtttttgcacatgtttcctctagttctttgttcatagcccagtagaccttgttacttctgaggtaagttaagtaagttgattcggtatccccccatcttgcttccctaatctatggtcgggagacagcatcagggttaagaagactttttttttttttttttaaactaggagaaccaaatctggaagccaaaatgtaggcttagtttgtgtgttgtctcttgagtttgtcgctcatgtgtgcaacagggtatggactatctgtctggtggccccgtttctggtggtctgttggcaggctggccagtccaggctgccgtggggccgccgcctctttcaagcagtcgtgcctgtgtccatgcgctcagggccatgctgaggcctgggccgctgccacgttggagaagcccgtgtgagaagtgaatgctgggactcagccttcagacagagaggactgtagggagggcggcaggggcctggagatcctcctgcagaccacgcccgtcctgcctgtggcgccgtctccaggggctgcttcctcctggaaattgacgaggggtgtcttgggcagagctggctctgagcgcctccatccaaggccaggttctccgttagctcctgtggccccaccctgggccctgggctggaatcaggaatattttccaaagagtgatagtcttttgcttttggcaaaactctacttaatccaatgggtttttccctgtacagtagattttccaaatgtaataaactttaatataaagtagtcctgtgaatgccactgccttcgcttcttgcctctgtgctgtgtgtgacgtgaccggacttttctgcaaacaccaacatgttgggaaacttggctcgaatctctgtgccttcgtctttcccatggggagggattctggttccagggtccctctgtgtatttgcttttttgttttggctgaaattctcctggaggtcggtaggttcagccaaggttttataaggctgatgtcaatttctgtgttgccaagctccaagccccatcttctaaatggcaaaggaaggtggatggccccagcacagcttgacctgaggctgtggtcacagcggaggtgtggagccgaggcctaccccgcagacaccttggacatcctcctcccacccggctgcagaggccagaggcccccagcccagggctcctgcacttacttgcttatttgacaacgtttcagcgactccgttggccactccgagaggtgggccagtctgtggatcagagatgcaccaccaagccaagggaacctgtgtccggtattcgatactgcgactttctgcctggagtgtatgactgcacatgactcgggggtggggaaaggggtcggctgaccatgctcatctgctggtccgtgggacggtgcccaagccagaggctgggttcatttgtgtaacgacaataaacggtacttgtcatttcgggcaaca

SEQ ID NO: 76342 - DNA, 2376 bp, Homo sapiens
ggccgggagacctggcggagctgggggtggggggccagtttttgcaacggctaaggaagggcctgtgggtttattataaggcggagctcggcgggagaggtgcgggccgaatccgagccgagcggagaggaatccggcagtagagagcggactccagccggcggaccctgcagccctcgcctgggacagcggcgcgctgggcaggcgcccaagagagcatcgagcagcggaacccgcgaagccggcccgcagccgcgacccgcgcagcctgccgctctcccgccgccggtccgggcagcatgaggcgcgcggcgctctggctctggctgtgcgcgctggcgctgagcctgcagccggccctgccgcaaattgtggctactaatttgccccctgaagatcaagatggctctggggatgactctgacaacttctccggctcaggtgcaggtgctttgcaagatatcaccttgtcacagcagaccccctccacttggaaggacacgcagctcctgacggctattcccacgtctccagaacccaccggcctggaggctacagctgcctccacctccaccctgccggctggagaggggcccaaggagggagaggctgtagtcctgccagaagtggagcctggcctcaccgcccgggagcaggaggccaccccccgacccagggagaccacacagctcccgaccactcatcaggcctcaacgaccacagccaccacggcccaggagcccgccacctcccacccccacagggacatgcagcctggccaccatgagacctcaacccctgcaggacccagccaagctgaccttcacactccccacacagaggatggaggtccttctgccaccgagagggctgctgaggatggagcctccagtcagctcccagcagcagagggctctggggagcaggacttcacctttgaaacctcgggggagaatacggctgtagtggccgtggagcctgaccgccggaaccagtccccagtggatcagggggccacgggggcctcacagggcctcctggacaggaaagaggtgctgggaggggtcattgccggaggcctcgtggggctcatctttgctgtgtgcctggtgggtttcatgctgtaccgcatgaagaagaaggacgaaggcagctactccttggaggagccgaaacaagccaacggcggggcctaccagaagcccaccaaacaggaggaattctatgcctgacgcgggagccatgcgccccctccgccctgccactcactaggcccccacttgcctcttccttgaagaactgcaggccctggcctcccctgccaccaggccacctccccagcattccagcccctctggtcgctcctgcccacggagtcgtggggtgtgctgggagctccactctgcttctctgacttctgcctggagacttagggcaccaggggtttctcgcataggacctttccaccacagccagcacctggcatcgcaccattctgactcggtttctccaaactgaagcagcctctccccaggtccagctctggaggggagggggatccgactgctttggacctaaatggcctcatgtggctggaagatcctgcgggtggggcttggggctcacacacctgtagcacttactggtaggaccaagcatcttgggggggtggccgctgagtggcaggggacaggagtccactttgtttcgtggggaggtctaatctagatatcgacttgtttttgcacatgtttcctctagttctttgttcatagcccagtagaccttgttacttctgaggtaagttaagtaagttgattcggtatccccccatcttgcttccctaatctatggtcgggagacagcatcagggttaagaagactttttttttttttttttaaactaggagaaccaaatctggaagccaaaatgtaggcttagtttgtgtgttgtctcttgagtttgtcgctcatgtgtgcaacagggtatggactatctgtctggtggccccgtttctggtggtctgttggcaggctggccagtccaggctgccgtggggccgccgcctctttcaagcagtcgcccagggctcctgcacttacttgcttatttgacaacgtttcagcgactccgttggccactccgagaggtgggccagtctgtggatcagagatgcaccaccaagccaagggaacctgtgtccggtattcgatactgcgactttctgcctggagtgtatgactgcacatgactcgggggtggggaaaggggtcggctgaccatgctcatctgctggtccgtgggacggtgcccaagccagaggctgggttcatttgtgtaacgacaataaacggtacttgtcatttcgggcaaca

SEQ ID NO: 76343 - DNA, 1762 bp, Homo sapiens
ggccgggagacctggcggagctgggggtggggggccagtttttgcaacggctaaggaagggcctgtgggtttattataaggcggagctcggcgggagaggtgcgggccgaatccgagccgagcggagaggaatccggcagtagagagcggactccagccggcggaccctgcagccctcgcctgggacagcggcgcgctgggcaggcgcccaagagagcatcgagcagcggaacccgcgaagccggcccgcagccgcgacccgcgcagcctgccgctctcccgccgccggtccgggcagcatgaggcgcgcggcgctctggctctggctgtgcgcgctggcgctgagcctgcagccggccctgccgcaaattgtggctactaatttgcccccatcttgcttccctaatctatggtcgggagacagcatcagggttaagaagactttttttttttttttttaaactaggagaaccaaatctggaagccaaaatgtaggcttagtttgtgtgttgtctcttgagtttgtcgctcatgtgtgcaacagggtatggactatctgtctggtggccccgtttctggtggtctgttggcaggctggccagtccaggctgccgtggggccgccgcctctttcaagcagtcgtgcctgtgtccatgcgctcagggccatgctgaggcctgggccgctgccacgttggagaagcccgtgtgagaagtgaatgctgggactcagccttcagacagagaggactgtagggagggcggcaggggcctggagatcctcctgcagaccacgcccgtcctgcctgtggcgccgtctccaggggctgcttcctcctggaaattgacgaggggtgtcttgggcagagctggctctgagcgcctccatccaaggccaggttctccgttagctcctgtggccccaccctgggccctgggctggaatcaggaatattttccaaagagtgatagtcttttgcttttggcaaaactctacttaatccaatgggtttttccctgtacagtagattttccaaatgtaataaactttaatataaagtagtcctgtgaatgccactgccttcgcttcttgcctctgtgctgtgtgtgacgtgaccggacttttctgcaaacaccaacatgttgggaaacttggctcgaatctctgtgccttcgtctttcccatggggagggattctggttccagggtccctctgtgtatttgcttttttgttttggctgaaattctcctggaggtcggtaggttcagccaaggttttataaggctgatgtcaatttctgtgttgccaagctccaagccccatcttctaaatggcaaaggaaggtggatggccccagcacagcttgacctgaggctgtggtcacagcggaggtgtggagccgaggcctaccccgcagacaccttggacatcctcctcccacccggctgcagaggccagaggcccccagcccagggctcctgcacttacttgcttatttgacaacgtttcagcgactccgttggccactccgagaggtgggccagtctgtggatcagagatgcaccaccaagccaagggaacctgtgtccggtattcgatactgcgactttctgcctggagtgtatgactgcacatgactcgggggtggggaaaggggtcggctgaccatgctcatctgctggtccgtgggacggtgcccaagccagaggctgggttcatttgtgtaacgacaataaacggtacttgtcatttcgggcaaca

SEQ ID NO: 76344 - DNA, 2000 bp, Homo sapiens
gcggcttgcggggaccacagctcccgaaagcgacgttcggccaccggaggagcgggagccaagcaggcggagctcggcgggagaggtgcgggccgaatccgagccgagcggagaggaatccggcagtagagagcggactccagccggcggaccctgcagccctcgcctgggacagcggcgcgctgggcaggcgcccaagagagcatcgagcagcggaacccgcgaagccggcccgcagccgcgacccgcgcagcctgccgctctcccgccgccggtccgggcagcatgaggcgcgcggcgctctggctctggctgtgcgcgctggcgctgagcctgcagccggccctgccgcaaattgtggctactaatttgccccctgaagatcaagatggctctggggatgactctgacaacttctccggctcaggtgcaggtgctttgcaagatatcaccttgtcacagcagaccccctccacttggaaggacacgcagctcctgacggctattcccacgtctccagaacccaccggcctggaggctacagctgcctccacctccaccctgccggctggagaggggcccaaggagggagaggctgtagtcctgccagaagtggagcctggcctcaccgcccgggagcaggaggccaccccccgacccagggagagggttaagaagactttttttttttttttttaaactaggagaaccaaatctggaagccaaaatgtaggcttagtttgtgtgttgtctcttgagtttgtcgctcatgtgtgcaacagggtatggactatctgtctggtggccccgtttctggtggtctgttggcaggctggccagtccaggctgccgtggggccgccgcctctttcaagcagtcgtgcctgtgtccatgcgctcagggccatgctgaggcctgggccgctgccacgttggagaagcccgtgtgagaagtgaatgctgggactcagccttcagacagagaggactgtagggagggcggcaggggcctggagatcctcctgcagaccacgcccgtcctgcctgtggcgccgtctccaggggctgcttcctcctggaaattgacgaggggtgtcttgggcagagctggctctgagcgcctccatccaaggccaggttctccgttagctcctgtggccccaccctgggccctgggctggaatcaggaatattttccaaagagtgatagtcttttgcttttggcaaaactctacttaatccaatgggtttttccctgtacagtagattttccaaatgtaataaactttaatataaagtagtcctgtgaatgccactgccttcgcttcttgcctctgtgctgtgtgtgacgtgaccggacttttctgcaaacaccaacatgttgggaaacttggctcgaatctctgtgccttcgtctttcccatggggagggattctggttccagggtccctctgtgtatttgcttttttgttttggctgaaattctcctggaggtcggtaggttcagccaaggttttataaggctgatgtcaatttctgtgttgccaagctccaagccccatcttctaaatggcaaaggaaggtggatggccccagcacagcttgacctgaggctgtggtcacagcggaggtgtggagccgaggcctaccccgcagacaccttggacatcctcctcccacccggctgcagaggccagaggcccccagcccagggctcctgcacttacttgcttatttgacaacgtttcagcgactccgttggccactccgagaggtgggccagtctgtggatcagagatgcaccaccaagccaagggaacctgtgtccggtattcgatactgcgactttctgcctggagtgtatgactgcacatgactcgggggtggggaaaggggtcggctgaccatgctcatctgctggtccgtgggacggtgcccaagccagaggctgggttcatttgtgtaacgacaataaacggtacttgtcatttcgggcaaca

SEQ ID NO: 76345 - DNA, 2473 bp, Homo sapiens
ggccgggagacctggcggagctgggggtggggggccagtttttgcaacggctaaggaagggcctgtgggtttattataaggcggagctcggcgggagaggtgcgggccgaatccgagccgagcggagaggaatccggcagtagagagcggactccagccggcggaccctgcagccctcgcctgggacagcggcgcgctgggcaggcgcccaagagagcatcgagcagcggaacccgcgaagccggcccgcagccgcgacccgcgcagcctgccgctctcccgccgccggtccgggcagcatgaggcgcgcggcgctctggctctggctgtgcgcgctggcgctgagcctgcagccggccctgccgcaaattgtggctactaatttgccccctgaagatcaagatggctctggggatgactctgacaacttctccggctcaggtgcaggtgctttgcaagatatcaccttgtcacagcagaccccctccacttggaaggacacgcagctcctgacggctattcccacgtctccagaacccaccggcctggaggctacagctgcctccacctccaccctgccggctggagaggggcccaaggagggagaggctgtagtcctgccagaagtggagcctggcctcaccgcccgggagcaggaggccaccccccgacccagggagaccacacagctcccgaccactcatcaggcctcaacgaccacagccaccacggcccaggagcccgccacctcccacccccacagggacatgcagcctggccaccatgagacctcaacccctgcaggacccagccaagctgaccttcacactccccacacagaggatggaggtccttctgccaccgagagggctgctgaggatggagcctccagtcagctcccagcagcagagggctctggggagcaggacttcacctttgaaacctcgggggagaatacggctgtagtggccgtggagcctgaccgccggaaccagtccccagtggatcagggggccacgggggcctcacagggcctcctggacaggaaagaggtgctgggaggggtcattgccggaggcctcgtggggctcatctttgctgtgtgcctggtgggtttcatgctgtaccgcatgaagaagaaggacgaaggcagctactccttggaggagccgaaacaagccaacggcggggcctaccagaagcccaccaaacaggaggaattctatgcctgacgcgggagccatgcgccccctccgccctgccactcactaggcccccacttgcctcttccttgaagaactgcaggccctggcctcccctgccaccaggccacctccccagcattccagcccctctggtcgctcctgcccacggagtcgtggggtgtgctgggagctccactctgcttctctgacttctgcctggagacttagggcaccaggggtttctcgcataggacctttccaccacagccagcacctggcatcgcaccattctgactcggtttctccaaactgaagcagcctctccccaggtccagctctggaggggagggggatccgactgctttggacctaaatggcctcatgtggctggaagatcctgcgggtggggcttggggctcacacacctgtagcacttactggtaggaccaagcatcttgggggggtggccgctgagtggcaggggacaggagtccactttgtttcgtggggaggtctaatctagatatcgacttgtttttgcacatgtttcctctagttctttgttcatagcccagtagaccttgttacttctgaggtaagttaagtaagttgattcggtatccccccatcttgcttccctaatctatggtcgggagacagcatcagggttaagaagactttttttttttttttttaaactaggagaaccaaatctggaagccaaaacagggtatggactatctgtctggtggccccgtttctggtggtctgttggcaggctggccagtccaggctgccgtggggccgccgcctctttcaagcagtcgtgcctgtgtccatgcgctcagggccatgctgaggcctgggccgctgccacgttggagaagcccgtgtgagaagtgaatgctgggactcagccttcagacagagaggactgtagggagggcggcaggggcctggagatcctcctgcaggcccagggctcctgcacttacttgcttatttgacaacgtttcagcgactccgttggccactccgagaggtgggccagtctgtggatcagagatgcaccaccaagccaagggaacctgtgtccggtattcgatactgcgactttctgcctggagtgtatgactgcacatgactcgggggtggggaaaggggtcggctgaccatgctcatctgctggtccgtgggacggtgcccaagccagaggctgggttcatttgtgtaacgacaataaacggtacttgtcatttcgggcaaca

SEQ ID NO: 76346 - DNA, 2121 bp, Homo sapiens
ggccgggagacctggcggagctgggggtggggggccagtttttgcaacggctaaggaagggcctgtgggtttattataaggcggagctcggcgggagaggtgcgggccgaatccgagccgagcggagaggaatccggcagtagagagcggactccagccggcggaccctgcagccctcgcctgggacagcggcgcgctgggcaggcgcccaagagagcatcgagcagcggaacccgcgaagccggcccgcagccgcgacccgcgcagcctgccgctctcccgccgccggtccgggcagcatgaggcgcgcggcgctctggctctggctgtgcgcgctggcgctgagcctgcagccggccctgccgcaaattgtggctactaatttgccccctgaagatcaagatggctctggggatgactctgacaacttctccggctcaggtgcaggtgctttgcaagatatcaccttgtcacagcagaccccctccacttggaaggacacgcagctcctgacggctattcccacgtctccagaacccaccggcctggaggctacagctgcctccacctccaccctgccggctggagaggggcccaaggagggagaggctgtagtcctgccagaagtggagcctggcctcaccgcccgggagcaggaggccaccccccgacccagggagaccacacagctcccgaccactcatcaggcctcaacgaccacagccaccacggcccaggagcccgccacctcccacccccacagggacatgcagcctggccaccatgagacctcaacccctgcaggacccagccaagctgaccttcacactccccacacagaggatggaggtccttctgccaccgagagggctgctgaggatggagcctccagtcagctcccagcagcagagggctctggggagcaggacttcacctttgaaacctcgggggagaatacggctgtagtggccgtggagcctgaccgccggaaccagtccccagtggatcagggggccacgggggcctcacagggcctcctggacaggaaagaggtgctgggaggggtcattgccggaggcctcgtggggctcatctttgctgtgtgcctggtgggtttcatgctgtaccgcatgaagaagaaggacgaaggcagctactccttggaggagccgaaacaagccaacggcggggcctaccagaagcccaccaaacaggaggaattctatgcctgacgcgggagccatgcgccccctccgccctgccactcactaggcccccacttgcctcttccttgaagaactgcaggccctggcctcccctgccaccaggccacctccccagcattccagcccctctggtcgctcctgcccacggagtcgtggggtgtgctgggagctccactctgcttctctgacttctgcctggagacttagggcaccaggggtttctcgcataggacctttccaccacagccagcacctggcatcgcaccattctgactcggtttctccaaactgaagcagcctctccccaggtccagctctggaggggagggggatccgactgctttggacctaaatggcctcatgtggctggaagatcctgcgggtggggcttggggctcacacacctgtagcacttactggtaggaccaagcatcttgggggggtggccgctgagtggcaggggacaggagtccactttgtttcgtggggaggtctaatctagatatcgacttgtttttgcacatgtttcctctagttctttgttcatagcccagtagaccttgttacttctgaggtaagttaagtaagttgattcggtatccccccatcttgcttccctaatctatggtcgggagacagcatcagggttaagaagactttttttttttttttttaaactaggagaaccaaatctggaagccaaaatgtaggcttagtttgtgtgttgtctcttgagtttgtcgctcatgtgtgctgtatgactgcacatgactcgggggtggggaaaggggtcggctgaccatgctcatctgctggtccgtgggacggtgcccaagccagaggctgggttcatttgtgtaacgacaataaacggtacttgtcatttcgggcaaca

SEQ ID NO: 76347 - DNA, 1707 bp, Homo sapiens
ggccgggagacctggcggagctgggggtggggggccagtttttgcaacggctaaggaagggcctgtgggtttattataaggcggagctcggcgggagaggtgcgggccgaatccgagccgagcggagaggaatccggcagtagagagcggactccagccggcggaccctgcagccctcgcctgggacagcggcgcgctgggcaggcgcccaagagagcatcgagcagcggaacccgcgaagccggcccgcagccgcgacccgcgcagcctgccgctctcccgccgccggtccgggcagcatgaggcgcgcggcgctctggctctggctgtgcgcgctggcgctgagcctgcagccggccctgccgcaaattgtggctactaatttgccccctgaagatcaagatggctctggggatgactctgacaacttctccggctcaggtgcaggtgctttgcaagatatcaccttgtcacagcagaccccctccacttggaaggacacgcagctcctgacggctattcccacgtctccagaacccaccggcctggaggctacagctgcctccacctccaccctgccggctggagaggggcccaaggagggagaggctgtagtcctgccagaagtggagcctggcctcaccgcccgggagcaggaggccaccccccgacccagggagaccacacagctcccgaccactcatcaggcctcaacgaccacagccaccacggcccaggagcccgccacctcccacccccacagggacatgcagcctggccaccatgagacctcaacccctgcaggacccagccaagctgaccttcacatccatccaaggccaggttctccgttagctcctgtggccccaccctgggccctgggctggaatcaggaatattttccaaagagtgatagtcttttgcttttggcaaaactctacttaatccaatgggtttttccctgtacagtagattttccaaatgtaataaactttaatataaagtagtcctgtgaatgccactgccttcgcttcttgcctctgtgctgtgtgtgacgtgaccggacttttctgcaaacaccaacatgttgggaaacttggctcgaatctctgtgccttcgtctttcccatggggagggattctggttccagggtccctctgtgtatttgcttttttgttttggctgaaattctcctggaggtcggtaggttcagccaaggttttataaggctgatgtcaatttctgtgttgccaagctccaagccccatcttctaaatggcaaaggaaggtggatggccccagcacagcttgacctgaggctgtggtcacagcggaggtgtggagccgaggcctaccccgcagacaccttggacatcctcctcccacccggctgcagaggccagaggcccccagcccagggctcctgcacttacttgcttatttgacaacgtttcagcgactccgttggccactccgagaggtgggccagtctgtggatcagagatgcaccaccaagccaagggaacctgtgtccggtattcgatactgcgactttctgcctggagtgtatgactgcacatgactcgggggtggggaaaggggtcggctgaccatgctcatctgctggtccgtgggacggtgcccaagccagaggctgggttcatttgtgtaacgacaataaacggtacttgtcatttcgggcaaca

SEQ ID NO: 76348 - DNA, 1899 bp, Homo sapiens
ggccgggagacctggcggagctgggggtggggggccagtttttgcaacggctaaggaagggcctgtgggtttattataaggcggagctcggcgggagaggtgcgggccgaatccgagccgagcggagaggaatccggcagtagagagcggactccagccggcggaccctgcagccctcgcctgggacagcggcgcgctgggcaggcgcccaagagagcatcgagcagcggaacccgcgaagccggcccgcagccgcgacccgcgcagcctgccgctctcccgccgccggtccgggcagcatgaggcgcgcggcgctctggctctggctgtgcgcgctggcgctgagcctgcagccggccctgccgcaaattgtggctactaatttgccccctgaagatcaagatggctctggggatgactctgacaacttctccggctcaggtgcaggtgctttgcaagatatcaccttgtcacagcagaccccctccacttggaaggacacgcagctcctgacggctattcccacgtctccagaacccaccggcctggaggctacagctgcctccacctccaccctgccggctggagaggggcccaaggagggagaggctgtagtcctgccagaagtggagcctggcctcaccgcccgggagcaggaggccaccccccgacccagggagaccacacagctcccgaccactcatcaggcctcaacgaccacagccaccacggcccaggagcccgccacctcccacccccacagggacatgcagcctggccaccatgagacctcaacccctgcaggacccagccaagctgaccttcacactccccacacagaggatggaggtccttctgccaccgagagggctgctgaggatggagcctccagtcagctcccagcagcagagggctctggggagcaggacttcacctttgaaacctcgggggagaatacggctgtagtggccgtggagcctgaccgccggaaccagtccccagtggatcagggggccacgggggcctcacagggcctcctggacaggaaagaggtgctgggaggggtcattgccggaggcctcgtggggctcatctttgctgtgtgcctggtgggtttcatgctgtaccgcatgaagaagaaggacgaaggcagctactccttggaggagccgaaacaagccaacggcggggcctaccagaagcccaccaaacaggaggaattctatgcctgacgcgggagccatgcgccccctccgccctgccactcactaggcccccacttgcctcttccttgaagaactgcaggccctggcctcccctgccaccaggccacctccccagcattccagcccctctggtcgctcctgcccacggagtcgtggggtgtgctgggagctccactctgcttctctgacttctgcctggagacttagggcaccaggggtttctcgcataggacctttccaccacagccagcacctggcatcgcaccattctgactcggtttctccaaactgaagcagcctctccccaggtccagctctggaggggagggggatccgactgctttggacctaaatggcctcatgtggctggaagatcctgcgggtggggcttggggctcacacacctgtagcacttactggtaggaccaagcatcttgggggggtggccgctgagtggcaggggacaggagtccactttgtttcgtggggaggtctaatctagatatcgacttgtttttgcacatgtttcctctagttctttgttcatagcccagtagaccttgttacttctgaggtaagttaagtaagttgattcggtatccccccatcttgcttccctaatctatggtcgggagacagcatcgctcccgaaggtcctgctagagtcacccag

SEQ ID NO: 76349 - DNA, 1223 bp, Homo sapiens
cgcgatacgcgacttgagcctgcagaccgggcctgccgcaaattgtggctactaatttgccccctgaagatcaagatggctctggggatgactctgacaacttctccggctcaggtgcaggtgctttgcaagatatcaccttgtcacagcagaccccctccacttggaaggacacgcagctcctgacggctattcccacgtctccagaacccaccggcctggaggctacagctgcctccacctccaccctgccggctggagaggggcccaaggagggagaggctgtagtcctgccagaagtggagcctggcctcaccgcccgggagcaggaggccaccccccgacccagggagaccacacagctcccgaccactcatcaggcctaccctgggccctgggctggaatcaggaatattttccaaagagtgatagtcttttgcttttggcaaaactctacttaatccaatgggtttttccctgtacagtagattttccaaatgtaataaactttaatataaagtagtcctgtgaatgccactgccttcgcttcttgcctctgtgctgtgtgtgacgtgaccggacttttctgcaaacaccaacatgttgggaaacttggctcgaatctctgtgccttcgtctttcccatggggagggattctggttccagggtccctctgtgtatttgcttttttgttttggctgaaattctcctggaggtcggtaggttcagccaaggttttataaggctgatgtcaatttctgtgttgccaagctccaagccccatcttctaaatggcaaaggaaggtggatggccccagcacagcttgacctgaggctgtggtcacagcggaggtgtggagccgaggcctaccccgcagacaccttggacatcctcctcccacccggctgcagaggccagaggcccccagcccagggctcctgcacttacttgcttatttgacaacgtttcagcgactccgttggccactccgagaggtgggccagtctgtggatcagagatgcaccaccaagccaagggaacctgtgtccggtattcgatactgcgactttctgcctggagtgtatgactgcacatgactcgggggtggggaaaggggtcggctgaccatgctcatctgctggtccgtgggacggtgcccaagccagaggctgggttcatttgtgtaacgacaataaacggtacttgtcatttcgggcaaca

SEQ ID NO: 76350 - DNA, 702 bp, Homo sapiens
ccggactttatcgtcatataagcggcttcttgcctctgtgctgtgtgtgacgtgaccggacttttctgcaaacaccaacatgttgggaaacttggctcgaatctctgtgccttcgtctttcccatggggagggattctggttccagggtccctctgtgtatttgcttttttgttttggctgaaattctcctggaggtcggtaggttcagccaaggttttataaggctgatgtcaatttctgtgttgccaagctccaagccccatcttctaaatggcaaaggaaggtggatggccccagcacagcttgacctgaggctgtggtcacagcggaggtgtggagccgaggcctaccccgcagacaccttggacatcctcctcccacccggctgcagaggccagaggcccccagcccagggctcctgcacttacttgcttatttgacaacgtttcagcgactccgttggccactccgagaggtgggccagtctgtggatcagagatgcaccaccaagccaagggaacctgtgtccggtattcgatactgcgactttctgcctggagtgtatgactgcacatgactcgggggtggggaaaggggtcggctgaccatgctcatctgctggtccgtgggacggtgcccaagccagaggctgggttcatttgtgtaacgacaataaacggtacttgtcatttcgggcaaca

SEQ ID NO: 76351 - DNA, 1387 bp, Homo sapiens
ggccgggagacctggcggagctgggggtggggggccagtttttgcaacggctaaggaagggcctgtgggtttattataaggcggagctcggcgggagaggtgcgggccgaatccgagccgagcggagaggaatccggcagtagagagcggactccagccggcggaccctgcagccctcgcctgggacagcggcgcgctgggcaggcgcccaagagagcatcgagcagcggaacccgcgaagccggcccgcagccgcgacccgcgcagcctgccgctctcccgccgccggtccgggcagcatgaggcgcgcggcgctctggctctggctgtgcgcgctggcgctgagcctgcagccggccctgccgcaaattgtggctactaatttgccccctgaagatcaagatggctctggggatgactctgacaacttctccggctcaggtgcaggtgctttgcaagatatcaccttgtcacagcagaccccctccacttggaaggacacgcagctcctgacggctattcccacgtctccagaacccaccggcctggaggctacagctgcctccacctccaccctgccggctggagaggggcccaaggagggagaggctgtagtcctgccagaagtggagcctggcctcaccgcccgggagcaggaggccaccccccgacccagggagaccacacagctcccgaccactcatcaggcctcaacgaccacagccaccacggcccaggagcccgccacctcccacccccacagggacatgcagcctggccaccatgagacctcaacccctgcaggacccagccaagctgaccttcacactccccacacagaggatggaggtccttctgccaccgagagggctgctgaggatggagcctccagtcagctcccagcagcagagggctctggggagcaggacttcacctttgaaacctcgggggagaatacggctgtagtggccgtggagcctgaccgccggaaccagtccccagtggatcagggggccacgggggcctcacagggcctcctggacaggaaagaggtgctgggaggggtcattgccggaggcctcgtggggctcatctttgctgtgtgcctggtgggtttcatgctgtaccgcatgaagaagaaggacgaaggcagctactccttggaggagccgaaacaagccaacggcggggcctaccagaagcccaccaaacaggaggaattctatgcctgacgcgcctgaccaggcttcagtgcctgaccaggcttcagtgcctgaccaggcttcagtgcctgaccaggcttcagtgcctgaccaggcttcagtgcctgacctggcttcagtgcctgaccaggcttcagtgcctgaccaggcttcagtgcctgacc

SEQ ID NO: 76352 - DNA, 993 bp, Homo sapiens
ggccgggagacctggcggagctgggggtggggggccagtttttgcaacggctaaggaagggcctgtgggtttattataaggcggagctcggcgggagaggtgcgggccgaatccgagccgagcggagaggaatccggcagtagagagcggactccagccggcggaccctgcagccctcgcctgggacagcggcgcgctgggcaggcgcccaagagagcatcgagcagcggaacccgcgaagccggcccgcagccgcgacccgcgcagcctgccgctctcccgccgccggtccgggcagcatgaggcgcgcggcgctctggctctggctgtgcgcgctggcgctgagcctgcagccggccctgccgcaaattgtggctactaatttgccccctgaagatcaagatggctctggggatgactctgacaacttctccggctcaggtgcaggtgctttgcaagatatcaccttgtcacagcagaccccctccacttggaaggacacgcagctcctgacggctattcccacgtctccagaacccaccggcctggaggctacagctgcctccacctccaccctgccggctggagaggggcccaaggagggagaggctgtagtcctgccagaagtggagcctggcctcaccgcccgggagcaggaggccaccccccgacccagggagaccacacagctcccgaccactcatcaggcctcaacgaccacagccaccacggcccaggagcccgccacctcccacccccacagggacatgcagcctggccaccatgagacctcaacccctgcaggacccagccaagctgaccttcacactccaccctgccggctggagaggggcccaaggagggagaggctgtagtcctgccagaagtggagcctggcctcaccgcccgggagcaggaggccaccccccgacccagggagaccacacagctcccgaccactcatcaggcctcaacgaccacagccaccacggg

SEQ ID NO: 76353 - DNA, 865 bp, Homo sapiens
ggccgggagacctggcggagctgggggtggggggccagtttttgcaacggctaaggaagggcctgtgggtttattataaggcggagctcggcgggagaggtgcgggccgaatccgagccgagcggagaggaatccggcagtagagagcggactccagccggcggaccctgcagccctcgcctgggacagcggcgcgctgggcaggcgcccaagagagcatcgagcagcggaacccgcgaagccggcccgcagccgcgacccgcgcagcctgccgctctcccgccgccggtccgggcagcatgaggcgcgcggcgctctggctctggctgtgcgcgctggcgctgagcctgcagccggccctgccgcaaattgtggctactaatttgccccctgaagatcaagatggctctggggatgactctgacaacttctccggctcaggtgcaggtgctttgcaagatatcaccttgtcacagcagaccccctccacttggaaggacacgcagctcctgacggctattcccacgtctccagaacccaccggcctggaggctacagctgcctccacctccaccctgccggctggagaggggcccaaggagggagaggctgtagtcctgccagaagtggagcctggcctcaccgcccgggagcaggaggccaccccccgacccagggagaccacacagctcccgaccactcatcaggcctgcgcctgaccaggcttcagtgcctgaccaggcttcagtgcctgaccaggcttcagtgcctgaccaggcttcagtgcctgaccaggcttcagtgcctgacctggcttcagtgcctgaccaggcttcagtgcctgaccaggcttcagtgcctgacc

SEQ ID NO: 76354 - DNA, 874 bp, Homo sapiens
ggccgggagacctggcggagctgggggtggggggccagtttttgcaacggctaaggaagggcctgtgggtttattataaggcggagctcggcgggagaggtgcgggccgaatccgagccgagcggagaggaatccggcagtagagagcggactccagccggcggaccctgcagccctcgcctgggacagcggcgcgctgggcaggcgcccaagagagcatcgagcagcggaacccgcgaagccggcccgcagccgcgacccgcgcagcctgccgctctcccgccgccggtccgggcagcatgaggcgcgcggcgctctggctctggctgtgcgcgctggcgctgagcctgcagccggccctgccgcaaattgtggctactaatttgccccctgaagatcaagatggctctggggatgactctgacaacttctccggctcaggtgcaggtgctttgcaagatatcaccttgtcacagcagaccccctccacttggaaggacacgcagctcctgacggctattcccacgtctccagaacccaccggcctggaggctacagctgcctccacctccaccctgccggctggagaggggcccaaggagggagaggctgtagtcctgccagaagtggagcctggcctcaccgcccgggagcaggaggccaccccccgacccagggagaccacacagctcccgaccactcatcaggcctaccctgggccctgggctggaatcaggaatattttccaaagagtgatagtcttttgcttttggcaaaactctacttaatccaatgggtttttccctgtacagtagattttccaaatgtaataaactttaatataaagtagtcctgtgaatgccactgccttcgc

SEQ ID NO: 76355 - DNA, 357 bp, Homo sapiens
gttttactttctttttagctttaaagtttttttggcggcaatgtgaatacattcctatacttctgcccacttaatttgttcttggccattgtctttgatactcatgtgtagccactcaagccccaggtgacaccatctacacacactggaaatatgaaattttttgaggcccaacatgttgttcaaaggaaatgctcactgcagcattttgaattttaattttcagattagggaagctgaaccgataagcataatacgaatattccaaaatctgcccaaacacttctggtccaaagtatttcagataagggatactgaacctgtataagctgttcatctaagctatattagatatgt

SEQ ID NO: 76356 - DNA, 761 bp, Homo sapiens
agtattccatgcagcaattaacaacataagcatttcgttatatgtcctaacacagagaagctcgaaaacaccaagaatgaacctgttttttaaaaagaatcaacactaaacaatacatacatacaaattatttagcccactggaggggtatcctccaactctctatactctcctctaccaccccaccccaactaggtccaaaagagctatgtcttacaacagtcccttaacttagctttccaggaggctcagtcatccattcctagagaagcctccttaactcacttaccattctctatttactgccttgagaattctacttcaatatgtggaattgtatttccttaaaccttagtcaaaaaggtaatcatgtcttggtatcatgaaataattttgaacttgaggaccctctgaaagggcctcagggacccctggcattaccagaccacactcttgagaatcactgatatccatttattttggaagtacaggtagaagaggagcctgccaactgtaagcggcaaatagaaactgagcaggttataggattcaaagtcaaaagatgtggatttgagccctaactccactgtacacttttctggctatttgaactaagtaagacagtaatttaacctctttcaagagtttcaggccgggtgcagtggctcacgcctgtaatcccagcactttgggaggccaaggtgggtggatcacgaggtcaggagatcgacaccatcctggctaacacagtgaaaccccgt

SEQ ID NO: 76357 - DNA, 714 bp, Homo sapiens
gcatcttcatcttcaacgttgtgtactacaagccgctggtctacaaaaacaccaacgtgtacccgtggtggggtgaggccatgggctgggccttcgtgctgtcctccatgctgtgcatgccactgcacctcctgggctgcctcctcagggccaagggcaccatggctgagtgctggaagcacctgacccagcccatctggggcctccaccacttggagtaccgagctcaggatgcagatgtcaggggcctgaccaccctgaccccagtgtccgagagcagcaaggtcgtcgtggtggagagtgtcatgggacagctcagctcacatcaccagctcacctctggtctgtggggcaagaggctgcaatattccatcctgggtgtctgggctgctaacctggcctgctcaggcttcccaccctgtgccctgggctgggcacacccccgggaagggaccccggacacggctcccacatccaggctcaaggcggatgcacttcctgcacctccagtcttctgtgtagcggctttaacccacgtatgtctgtcacgtccagtcccgagacggctgagtgaccccaagaaaggcttccctgacacccggacagaggctggagggctggggctgggtgagggtggtgggcctgcggggacattcttactgtgctaaaaagccactgcaaacatagcaataaaaacctgtcattttccaaagc

SEQ ID NO: 76358 - DNA, 519 bp, Homo sapiens
gcatcttcatcttcaacgttgtgtactacaagccgctggtctacaaaaacaccaacgtgtacccgtggtggggtgaggccatgggctgggccttcgtgctgtcctccatgctgtgcatgccactgcacctcctgggctgcctcctcagggccaagggcaccatggctgagtgctggaagcacctgacccagcccatctggggcctccaccacttggagtaccgagctcaggatgcagatgtcaggggcctgaccaccctgaccccagtgtccgagagcagcaaggtcgtcgtggtggagagtgtcatgggacagctcagctcacatcaccagctcacctctggtagccatagcagcccctgcttcatccccaccccacccctccagggggcctgcctttccctgacgcttttggggtctgcctgggagaggaggggagaaagcaccatgagtgctcactaaaacaactttttccatttttaataaaacgccaaaaatatcacaacccaccaaaaataga

SEQ ID NO: 76359 - DNA, 415 bp, Homo sapiens
tttattgagacagactctcgcactgtcatctgggctggtgtgcagtggcacgatctctgcttgctgcaacctgtgcctcccgggttcaagcaattctcctgcctcatcctcctgagtagctaggattacaggcacacgccaccatgcctggctaattttttgtatttttagtagagatggggtttcactattttggccaggctggtctcaaactcctgacctcatgatccgcctgcctcagcctcccaaggtgctgggattacagacgtgagccaccatgcccagtcgatatattcacatttttaataggaataactgtatactaaaatctattttagtgcatgtttaagatttgaagatgtaatttgactcagtactttccacctacatttttttcttcattctgtgcctgcta

SEQ ID NO: 76360 - DNA, 384 bp, Homo sapiens
ttttttttttaattgataattttctacaagtaccctccctaccttgaggatctgcgtctacctatagaggttttggcactactgtaaatgagtgaaatgtatcacagtcagggaaaggaggatctggggactttttgaaagggacaattgtgataaattccaggcaacttttattatgcagggctgtggactcggtgttaccttcttggaagctggacatgcagatttgatgtgagcagtactgtgtgggccaaacaaaacacatctgcagaccagacttgacctgcaggtcactaatttgaaacctctgtcctaaactgaggctaaatttgatttcttgtttccatcaactttatttttttttatttatttattgagacagtc

SEQ ID NO: 76361 - DNA, 424 bp, Homo sapiens
atgaataagagagataggcaagaaaaataagcaccaggacactgggaattcatccaggaacaaaacagaccccgtctcttctcttcctggacccagaatctttgcacaggctggtctttcccagagcactttcaccccctgccttctcctgaatactcatcttcattctttaggtttcagcttagaggtcccctcttccaggaagccttctctggctcctcctcccttctaggctgggccaagtgtttctctagggtttccatagctccccaggcttcccccatcccagcctggaccactctgggatggcacaatctggttggtgatgcctgtgtcttccactggactgggacctactataggataaagtctcagatgtgtttatctctggttcctctggacctagcagagaactagatactaa

SEQ ID NO: 76362 - DNA, 726 bp, Homo sapiens
cccagaaaaaaatatttggtacaactctttataacaggtactcaataaatattcataaatgcacctaagtttaggactggcagatggatgataagtaaacaaatacgtacccatgtgtaaatcattgagtttaggtctgtgaatttgaaaacaatgttgttatctgcagtgtttccaaacagaattctacttatccagtttttcccaccccagtgctaactctagagatcaggtatattgcactcactcattatatgtatatttagctgtatcttgagggattctttaactcagaatgttatggatttgttgagaatggctgaacacacggcctacaaggagaatcctgaccatttgctggacacactttcatagaatgacctctaaaggaaatgcagttgttctgataagaatcccagttcctcctgaccaacccactgctgataatctggtaaccccagccaagccaaggatgtcattctgtctgtccggatcttctgaaggcctcacatttctcttgtgccgcaactcttgtacggggtcatttcctctaaggaccaccataattgagtgtgtctttgttcatgcactaactttaagaagagaggtaaatactaaatcctcgccaactttaccaactacagaagattctagaaaggcagatcaaagctgactgtggctggctgagatcgcaggtgcctttccatgctgagtggcctgagtctg

SEQ ID NO: 76363 - DNA, 299 bp, Homo sapiens
aaaaattaaggggtggaaaaggagaaaagactaatacaattcaaacactagccaagagaggcctgactggggaaataacgcaaacaagaaataatgtggtgccctggaagaaatgctatcagtaagttacaagtcagcattgaggaagccccgaatgagactgtggaagacattctagagaagacgatctgaactaggtctagcatcagcttcccagcttttgaatctcactaggcaagggggacagagctccctgttgtggtttataacaactgtgataacagacacccagactcccc

SEQ ID NO: 76364 - DNA, 1077 bp, Homo sapiens
agacgcggagccatggccgaggtgttgcggacgctggccggaaaaccaaaatgccacgcacttcgacctatgatccttttcctaataatgcttgtcttggtcttgtttggttacggggtcctaagccccagaagtctaatgccaggaagcctggaacgggggttctgcatggctgttagggaacctgaccatctgcagcgcgtctcgttgccaaggatggtctacccccagccaaaggtgctgacaccgtgtaggaaggatgtcctcgtggtgaccccttggctggctcccattgtctgggagggcacattcaacatcgacatcctcaacgagcagttcaggctccagaacaccaccattgggttaactgtgtttgccatcaagaaatacgtggctttcctgaagctgttcctggagacggcggagaagcacttcatggtgggccaccgtgtccactactatgtcttcaccgaccagccggccgcggtgccccgcgtgacgctggggaccggtcggcagctgtcagtgctggaggtgcgcgcctacaagcgctggcaggacgtgtccatgcgccgcatggagatgatcagtgacttctgcgagcggcgcttcctcagcgaggtggattacctggtgtgcgtggacgtggacatggagttccgcgaccacgtgggcgtggagatcctgactccgctgttcggcaccctgcaccccggcttctacggaagcagccgggaggccttcacctacgagcgccggccccagtcccaggcctacatccccaaggacgagggcgatttctactacctgggggggttcttcggggggtcggtgcaagaggtgcagcggctcaccagggcctgccaccaggccatgatggtcgaccaggccaacggcatcgaggccgtgtggcacgacgagagccacctgaacaagtacctgctgcgccacaaacccaccaaggtgctctcccccgagtacttgtgggaccagcagctgctgggctggcccgccgtcctgaggaagctgaggttcactgcggtgcccaagaaccaccaggcggtccggaacccgtga

SEQ ID NO: 76365 - DNA, 300 bp, Homo sapiens
agacgcggagccatggccgaggtgttgcggacgctggccggaaaaccaaaatgccacgcacttcgacctatgatccttttcctaataatgcttgtcttggtcttgtttggttacggggtcctaagccccagaagtctaatgccaggaagcctggaacgggggttctgcatggctgttagggaacctgaccatctgcagcgcgtctcgttgccaaggatggtctacccccagccaaaggtgctgacaccgtggacgggcctcctgcagcccaggggtgcacggccggcggctcccccagcc

SEQ ID NO: 76366 - DNA, 356 bp, Homo sapiens
cagagactctgagctttggccctttcccgagttcccgggattatgagctgacacagcccccaagcaaccacagtgattccagcctgggagtgtggccttggcgggagggtcaatgcccagtcatggttcagcggctgtgcacacccctgcttacctgcatcccacgctttccatgcaaactcacgtggcggcgctttgtgcttgcaggatggtctacccccagccaaaggtgctgacaccgtggtgagtaaagttactgacactgaaactgaacgcagctcaaggggctgttctgaaggtattagagggcggtttccttgatgtaaatctcagttggggctgcttcgttctctcct

SEQ ID NO: 76367 - DNA, 4251 bp, Homo sapiens
  misc_feature (555)..(555): n is a, c, g, or t
  misc_feature (579)..(579): n is a, c, g, or t
tccacctcttggtgggagagggtgcaaaaaattttatgatcattctcagtctaccacaagaaggttccagtgatcaagaaaggcttcatggagataccaagcattgagcaggacttcaaggatggataagatctgatgctgaaggaaggagaaggggtgatattccaggagggaaggacagtgtgaataaaggagcggaggtgggaaggaagtgtttgggaggccctgatctgaccagtcttgttgaggagagggtgcatgaggcaggctggtaggagatgagaaaaagagaattgggggtagatttaggggtcttgaaggctggcctgagaatttgataaatgacccaataggcaaaaggaggcacggaaggattgtaagtagggtcaggaggtaacattgaatgccattgcctacacccccatgtccccacctgaaagtaacatccttcgttgcgtggttttctaaacatcgggactcttcatggtttgatggctggccccagggtagttggcacttttcatttttctcccgttcctgccccaccaccatcanaaggcttggacacctccatcatcnctgatgagtactgaatgttgggtccctgcggtccagagctgcctgcttctgccagagggaatgacagaagggaagtgactttcaaacaggagccggggtggggctgggcaaatgcacctggtccccttgcccacccactcctgcttctactctactctgggttcatcagttcatgccctgtcctggaggagaatttccaacatagtgacccccatgtggctaaaatggcagggaggggtgctaacatttattgaacattttcttgcatgaatctctctctctgagggtattcagttaggtctcaattctgcaaggttgctattacattatgaccactttgcagatgaggaaactgaggccagggaagttcatacagccagtcaatggcagcactggggttgaggccagctggtctgactctgcatcttggtcgcacgatgtcttttatctcattttctgtgtgagaacctcccaggacagcaccacaggctgatctgagatttaagagcagatctaaagtcacgcctaccttcggatgatactgaaaagccagagtcctggccaaaaagctggtcaggagggctgtgaggggccaggtgcacagtggggctctgacatgcctccccagtcccttcaggccctgtggtaaggctgaggtctcaggccatcactctgggggtctgaagatgagtcagagccagcctggggccctggcctcccagtgggtgagcaggaaggatttcactgcattgggaacattgtgtttccagatatagactggccacctgcctggccccctggatctctgggtggccgtccctggtgggcagtcaggagccaggccccacggggtgggtctgaggggcctttggatgacttcatctatcctcccccaccaagttagtatttctgtctgttctgtgaagtcctggtaactgaacaagccctttgggttcagattccttctcccactgaaagccgcatattgcagtaaatcctttttggccaagataaatgacagatggcccaggaggaagggcatcaggtgatagagacagagcagctagaagagtcagggagagaagaagatacaaaagaaattgtgcagcactcctttccttccacaaggcttgatgtgcccacactgcctccctgcaggacaggcatgggtgccatgtgtgagggtccacaggccaggccccctcttttagcctcagtttcccagttcacagggtggaggaggaatacgtgtttggaaccagtgacttccgggggccccctccggtggccttaaggtgacatcctcacccacctgggggcctgaggcaagcctgatagcttctacagtcctgcaggcccaaaagctaaccaagcagcagaacctttgcaaatgcagactctcagggcttatcctgcagggccccagtcagtggatctggggtggacccaggggcctttaattttagaaaatttgcagatgggtctgatattcactgtggcatagtatagatcaaggtcagctgtccccattcactgattcttagtcttgggtgcacattagaatcacctggagggctatagggaaaaattccaatgctcaggctacaccccagaccaattatatcgtaacctctgaaggtgaggcccagacagcagtaatgtttaaagttcctcaggtggttgcaataagcactgagactgagaaccattgctatggatgagccaaaaggtggaggcagcgtccaccatccatccttgcccgccctccttctgaaggtgaagctttcacctttggaaaccctgtcatccaccaagacagctaaaagcccgtcctctagcagctgatccctctgatggacaaggcattaaatgacaggttacataatcggggacctagtcctgggaccccggacaaggcacctgccttgcctgaacctcagtttcctcaactgtggaaggagggcatgggtgcctggttttcaaaacgtgctcagagcaggtctagctgtactgggcagtacctcggccaggagcactggactccgggcccccatgcccctggccctggttctcccagagcagctctaatcttagcctgttattgctgaagcctccttgtgctaagacaaacacttcaggagccaaaaacaatttgacaactgttagtctagatgatgtgcactttcatcccagctctgaaggtctacggaaaccccactctcccttctccacatatactcataattcctgtagtctggagccttcatttggcacctacaccccataaatcctgctttgatttgcctggcactgatgtggtcctgtatctggtttatctcccccactaagctgtgagttccttgaaggcaggtcttcattcattttataaacacagcacacatttattgagctccttctgccaccatgctggatgatggggacactgtggtgaatgagactgacacagcccctccctcatggagcaaaaacttcgtggatgagaaagattgagtgaagcaattacaaagttatatgtgctgtaacagggaagcatagggtgctatgggggcacaagggacggcacccaggaagatagagggggcaggaagcttcccagggacagggaaggaggccagccttggctgagggagctgcatctgcagagacctggagggtgagggaggggccaaggccatagacagggagcaggcctttgagccctgcctggtaaggagccagcattttatcctgggcccctgatgacgtaaccgtggggtgacctgaacagtttttcctgcctgtggaatcctcctctttgcctaccccacaccccttctccagcactggtgcaggagttgcatagtagtggctcaggagtcctggatgagagagatgcatctgggggcacagtaggggtgcacaggtgtggacggatgaggaggcaccttcacacgaatgggtgctcccagacaggggtgggtggtgcatgaatgttgaattgcgttgggtggtaggtgggatgtctgtgtttgaagcctgtcctgctccccacctaggttctatgaacaccctagcccaccctgacagcccttttcctggagtccagcccccagcttggcatagttggtgaagacccattgtctgcctatcgccaggcactcagagaaagcctctatcccccttctgtgggttcacgggctctctggggccacgctgcaggtggtggcttgccctgttgcctggccctcagctcaggcccttggagtgcctctctgccctgtctgctgccccggctgctcctcttaccctccctccctctctgcccgcttccggcccagtttctcagctacctcagtgcctgtgaccgcctgttacgtcagggatatgaggaaggcctggtggatgaggccatggagatgttccagttctccgagagccaggcaggggagttcctgcgcctctgggagcagttcagtgacatgggcttccagcaggaccggatcaaggaggtgctgctggtccatggcaaccgccgagagcaagccctggaggagctggtggcctgtgcccagtgaccacggaggcactccacgatgcctgggcatctaggcccaatgccagacctggcaacccatcctaactgtattattaaaaccaagtaagagtaaaaaa

SEQ ID NO: 76368 - DNA, 5494 bp, Homo sapiens
  misc_feature (555)..(555): n is a, c, g, or t
  misc_feature (579)..(579): n is a, c, g, or t
  misc_feature (4120)..(4120): n is a, c, g, or t
  misc_feature (4668)..(4668): n is a, c, g, or t
tccacctcttggtgggagagggtgcaaaaaattttatgatcattctcagtctaccacaagaaggttccagtgatcaagaaaggcttcatggagataccaagcattgagcaggacttcaaggatggataagatctgatgctgaaggaaggagaaggggtgatattccaggagggaaggacagtgtgaataaaggagcggaggtgggaaggaagtgtttgggaggccctgatctgaccagtcttgttgaggagagggtgcatgaggcaggctggtaggagatgagaaaaagagaattgggggtagatttaggggtcttgaaggctggcctgagaatttgataaatgacccaataggcaaaaggaggcacggaaggattgtaagtagggtcaggaggtaacattgaatgccattgcctacacccccatgtccccacctgaaagtaacatccttcgttgcgtggttttctaaacatcgggactcttcatggtttgatggctggccccagggtagttggcacttttcatttttctcccgttcctgccccaccaccatcanaaggcttggacacctccatcatcnctgatgagtactgaatgttgggtccctgcggtccagagctgcctgcttctgccagagggaatgacagaagggaagtgactttcaaacaggagccggggtggggctgggcaaatgcacctggtccccttgcccacccactcctgcttctactctactctgggttcatcagttcatgccctgtcctggaggagaatttccaacatagtgacccccatgtggctaaaatggcagggaggggtgctaacatttattgaacattttcttgcatgaatctctctctctgagggtattcagttaggtctcaattctgcaaggttgctattacattatgaccactttgcagatgaggaaactgaggccagggaagttcatacagccagtcaatggcagcactggggttgaggccagctggtctgactctgcatcttggtcgcacgatgtcttttatctcattttctgtgtgagaacctcccaggacagcaccacaggctgatctgagatttaagagcagatctaaagtcacgcctaccttcggatgatactgaaaagccagagtcctggccaaaaagctggtcaggagggctgtgaggggccaggtgcacagtggggctctgacatgcctccccagtcccttcaggccctgtggtaaggctgaggtctcaggccatcactctgggggtctgaagatgagtcagagccagcctggggccctggcctcccagtgggtgagcaggaaggatttcactgcattgggaacattgtgtttccagatatagactggccacctgcctggccccctggatctctgggtggccgtccctggtgggcagtcaggagccaggccccacggggtgggtctgaggggcctttggatgacttcatctatcctcccccaccaagttagtatttctgtctgttctgtgaagtcctggtaactgaacaagccctttgggttcagattccttctcccactgaaagccgcatattgcagtaaatcctttttggccaagataaatgacagatggcccaggaggaagggcatcaggtgatagagacagagcagctagaagagtcagggagagaagaagatacaaaagaaattgtgcagcactcctttccttccacaaggcttgatgtgcccacactgcctccctgcaggacaggcatgggtgccatgtgtgagggtccacaggccaggccccctcttttagcctcagtttcccagttcacagggtggaggaggaatacgtgtttggaaccagtgacttccgggggccccctccggtggccttaaggtgacatcctcacccacctgggggcctgaggcaagcctgatagcttctacagtcctgcaggcccaaaagctaaccaagcagcagaacctttgcaaatgcagactctcagggcttatcctgcagggccccagtcagtggatctggggtggacccaggggcctttaattttagaaaatttgcagatgggtctgatattcactgtggcatagtatagatcaaggtcagctgtccccattcactgattcttagtcttgggtgcacattagaatcacctggagggctatagggaaaaattccaatgctcaggctacaccccagaccaattatatcgtaacctctgaaggtgaggcccagacagcagtaatgtttaaagttcctcaggtggttgcaataagcactgagactgagaaccattgctatggatgagccaaaaggtggaggcagcgtccaccatccatccttgcccgccctccttctgaaggtgaagctttcacctttggaaaccctgtcatccaccaagacagctaaaagcccgtcctctagcagctgatccctctgatggacaaggcattaaatgacaggttacataatcggggacctagtcctgggaccccggacaaggcacctgccttgcctgaacctcagtttcctcaactgtggaaggagggcatgggtgcctggttttcaaaacgtgctcagagcaggtctagctgtactgggcagtacctcggccaggagcactggactccgggcccccatgcccctggccctggttctcccagagcagctctaatcttagcctgttattgctgaagcctccttgtgctaagacaaacacttcaggagccaaaaacaatttgacaactgttagtctagatgatgtgcactttcatcccagctctgaaggtctacggaaaccccactctcccttctccacatatactcataattcctgtagtctggagccttcatttggcacctacaccccataaatcctgctttgatttgcctggcactgatgtggtcctgtatctggtttatctcccccactaagctgtgagttccttgaaggcaggtcttcattcattttataaacacagcacacatttattgagctccttctgccaccatgctggatgatggggacactgtggtgaatgagactgacacagcccctccctcatggagcaaaaacttcgtggatgagaaagattgagtgaagcaattacaaagttatatgtgctgtaacagggaagcatagggtgctatgggggcacaagggacggcacccaggaagatagagggggcaggaagcttcccagggacagggaaggaggccagccttggctgagggagctgcatctgcagagacctggagggtgagggaggggccaaggccatagacagggagcaggcctttgagccctgcctggtaaggagccagcattttatcctgggcccctgatgacgtaaccgtggggtgacctgaacagtttttcctgcctgtggaatcctcctctttgcctaccccacaccccttctccagcactggtgcaggagttgcatagtagtggctcaggagtcctggatgagagagatgcatctgggggcacagtaggggtgcacaggtgtggacggatgaggaggcaccttcacacgaatgggtgctcccagacaggggtgggtggtgcatgaatgttgaattgcgttgggtggtaggtgggatgtctgtgtttgaagcctgtcctgctccccacctaggttctatgaacaccctagcccaccctgacagcccttttcctggagtccagcccccagcttggcatagttggtgaagacccattgtctgcctatcgccaggcactcagagaaagcctctatcccccttctgtgggttcacgggctctctggggccacgctgcaggtggtggcttgccctgttgcctggccctcagctcaggcccttggagtgcctctctgccctgtctgctgccccggctgctcctcttaccctccctccctctctgcccgcttccggcccagtttctcagctacctcagtgcctgtgaccgcctgttacgtcagggatatgaggaaggcctggtggatgaggccatggagatgttccagttctccgagagccaggtcagcagggcttcctgccagggccccaggggatggaagggatgggggtgtacccaggagcccggtgtgcagggccacaccagtcctcagagccagtctgngggtccagcctgtgggtctgtcgggagattgcctgactcctcagctctgaggaggagatggcccagggagctacagcagggacaaaggtgagaggcacagagggagatcaggaagaggtgggacggggacaggaggcagagagcagcaggggttttgctttattagacttaatcaacacagcctctgtgactgaatggccactctttgtcggacactcagataggagccatgggcagcacaaagatgcatgacctttctacttggggagcgtgccgcctaccccaagtgcatgcagctgtaggcccaatagtcacatcttgttttctgagactgagtctcactctattgcccaggctggagtgcaatggcacgatcttggctcactgcaacctctgcccccgaggttcaagcaattctcccgcctcggtctcccaagtagctgggattacaggcgcctgccaccacaccctgctaattttttttgtattttcagtagagacggagtttcaccatgttgaccaggctggtctcgaatgcctgatctcangtgatccgcccgcctcggcctcccaaagtgctgggattacaggcgtgagccaccgcacccggccccagtagtcacttctaagtgccccatggcagagcagctcttcacagaggctgaaggggacggagggttgggtgaggcctcgagaaggagagagtgagcagaggtggggaagtttcaagccctggggtcggaggggaaggaaagtgcaggctgcgctgtgatacctccacagtgttcagggcacgggcagggaccttgggctgtttgtgctccaggtgcaggtgtacggtctgcccccctcctgccccagcagaaagttgacagtgagtgggaggagtgggaggagagtcaggacagagcccatggccaggctggggccttctttccttggcagaggaagggaggtcggaacctacatcaccctacaggtacagaaaagtggcaggtgcggcccaggatcaggctcacgtggcctgggggtagccacagctttttgggactaggtgcagtaggcactggagctggggctccccatggctgaggccaggcccagcagagcccccagcaccctccctgtctcctcttcctcaggcaggggagttcctgcgcctctgggagcagttcagtgacatgggcttccagcaggaccggatcaaggaggtgctgctggtccatggcaaccgccgagagcaagccctggaggagctggtggcctgtgcccagtgaccacggaggcactccacgatgcctgggcatctaggcccaatgccagacctggcaacccatcctaactgtattattaaaaccaagtaagagtaaaaaa

SEQ ID NO: 76369 - DNA, 694 bp, Homo sapiens
tctcccttcgctctcacttctctcacctatcagtctcttagtctcgcctcctcattttcccactaccctccccatctctcccacctctcattgtcttctgctcacacacttcttcatccgccgcgtctctcactcctcctcactcgtgctatccctctgtcacgctctgttccccgcacagctcatctcagtactctccccctgctcgcttctctcttctcgccgatcttcttctcagtcacccagtactctccatttcctacctcctcacgcttctctccttttctcgttactccaatcctacacgagcgtcaccctctcagacccttgttaggttccaccctaccccaccccatccagctccatcttggaattagaaagatgcttcatggctcagagctggtgtcatcgctttttccagccacacccaactccccatccctatcctacttccagtcacccactaggaccttcctgcaagagggcaagcagttcagtgacatgggcttccagcaggaccggatcaaggaggtgctgctggtccatggcaaccgccgagagcaagccctggaggagctggtggcctgtgcccagtgaccacggaggcactccacgatgcctgggcatctaggcccaatgccagacctggcaacccatcctaactgtattattaaaaccaagtaagagtaaaaaa

SEQ ID NO: 76370 - DNA, 452 bp, Homo sapiens
ggagtctcactctgtctcccaagctggagtgcagtggcgcgatctcggctcactgcaagctccacctcctgggttcacaccattctcctgccttagcctcccaagtagctgggactacaggcgcctgccaccatatccagctaattttttgtatttttagtagagacggggtttcaccatgttagccaggctggtctcgatctcctgacctcgtgatgcaaagtgctgggattacaggcatgagccactgtgcccagccttattgcccctctcttaaggctgtgaagggcagtaagtgcttctaatgagctcagactggggcctggcacatagtaagcattcagtaaatgctcaatatgttttaactggcaatcatttcttccccactaaaccaagaactctcggtccatcttagaatcccgggcacagagagggcaccagtgtagacatgc

SEQ ID NO: 76371 - DNA, 418 bp, Homo sapiens
tattaaaatgagcacataatttaacatttaaaaaaaaattactactttttagctctattccctgaaaaagcctaaaagtattgactaacccagtggcagtgcattcctagggcctagattattttgtctgtaaataccattccctactaaaaacaaccagggatccaaccagaagtgggtagatctcaggatgtagcatgtagtattacaagagcttgtaatatcctatcctgttttaatagaaaagaagttatcaaacattattagggtcatgtcaaaaaggactcaggagacaacttgaataggcttcactggccaaaaaatgggtaaatttgagcatcaataaggataacaataaggacaaaacaacatatatatttacatctgtgagttcataatgataccaaaaaagataaaa

SEQ ID NO: 76372 - DNA, 713 bp, Homo sapiens
gggggtagatgagagtggggacttggatctgcctgccaggccgtcctgggcgctgcaggaagcaacatgacttaggtaactgcccagaggtgcaccagacatgatgcagcagccgcgagtggagacagataccatcggggctggcgaggggccacagcaggcagtgccctggtcagcctgggtcacgaggcatggctgggtgcgctggtgggtgagccacatgcccccgagctggatccagtggtggagcacctcgaactggcggcaaccgctgcagcgcctgctgtggggtctggaggggatactctacctgctgctggcactgatgttgtgccatgcactcttcaccactggctcccacctgctgagctccttgtggcctgtcgtggccgcggtgtggcgccacctgctaccggctctcctgctgctggtgctcagtgctctgcctgccctcctcttcacggcctccttcctgctgctcttctccacactgctgagccttgtgggcctcctcacctccatgactcacccaggcgacactcaggatttggatcaatagaagggcaaccccatcccactgcctgtgtctgttgagccctggcctagggcctgagaccccacggggagagggagggcaatgggatcagggctccctgccttggcagggcccagacccctagtccctaacaggtagactggcctgaccccggact

SEQ ID NO: 76373 - DNA, 738 bp, Homo sapiens
agcggaggaggtgaggagggtttgctgggtgggtatgggggagggggagactctgcaggagcctaattccccactctgagctcacccttctgtctgcccgggccctaccccttcccctactctcacccttataatccttttcagcactaggtcttcccgtcacctccacctctctccatgacccggctctgcttacccagacccgaagcacgtgaggatccgatcccagttcctccaaggggcctgggtgctggggaggggtcaggtagtccagtgcgtccacctgtatccacctggggccctagctgggcccagctcctggacagtgtcctatggctgggggcactaggactgacaatccaggcagtcttttccaccactggcccagccctgctgctgcttctggtcagcttcctcacctttgacctgctccataggcccgcaggtcacactctgccacagcgcaaacttctcaccaggggccagagtcagggggccggtgaaggtcctggacagcaggaggctctactcctgcaaatgggtacagtctcaggacaacttagcctccaggacgcactgctgctgctgctcatggggctgggcccgctcctgagagcctgtggcatgcccttgaccctgcttggcctggctttctgcctccatccttgggcctgagagcccctccccacaactcagtgtccttcaaatatacaatgaccacccttcttcatcaggccc

SEQ ID NO: 76374 - DNA, 1165 bp, Homo sapiens
agcggaggaggtgaggagggtttgctgggtgggtatgggggagggggagactctgcaggagcctaattccccactctgagctcacccttctgtctgcccgggccctaccccttcccctactctcacccttataatccttttcagcactaggtcttcccgtcacctccacctctctccatgacccggctctgcttacccagacccgaagcacgtgaggatccgatcccagttcctccaaggggcctgggtgctggggaggggtcaggtagtccagtgcgtccacctgtatccacctggggccctagctgggcccagctcctggacagtgtcctatggctgggggcactaggactgacaatccaggcagtcttttccaccactggcccagccctgctgctgcttctggtcagcttcctcacctttgacctgctccataggcccgcaggtcacactctgccacagcgcaaacttctcaccaggggccagagtcagggggccggtgaaggtcctggacagcaggaggctctactcctgcaaatgggtgcaccagacatgatgcagcagccgcgagtggagacagataccatcggggctggcgaggggccacagcaggcagtgccctggtcagcctgggtcacgaggcatggctgggtgcgctggtgggtgagccacatgcccccgagctggatccagtggtggagcacctcgaactggcggcaaccgctgcagcgcctgctgtggggtctggaggggatactctacctgctgctggcactgatgttgtgccatgcactcttcaccactggctcccacctgctgagctccttgtggcctgtcgtggccgcggtgtggcgccacctgctaccggctctcctgctgctggtgctcagtgctctgcctgccctcctcttcacggcctccttcctgctgctcttctccacactgctgagccttgtgggcctcctcacctccatgactcacccaggcgacactcaggatttggatcaatagaagggcaaccccatcccactgcctgtgtctgttgagccctggcctagggcctgagaccccacggggagagggagggcaatgggatcagggctccctgccttggcagggcccagacccctagtccctaacaggtagactggcctgaccccggact

SEQ ID NO: 76375 - DNA, 389 bp, Homo sapiens
ctgctataaagaaatatccaagactgggtagtttataaagaaagagggttaattggcccatggttctgcaggctgtacaggaagcatggcagaacctgcttcttggcagaaggcaaagggggagccagcactttacatggtggaagcaggaggaagagagaagagagggggtagaggtgccacacacctttaaatgaccagctctcaagaactcactcactctcagaagagcattaagggggaaatccaccattgtcatccagtcccctcccaccaggcccaccgccagcattggggattaaatttcagcatgagatttgggtggggacacagatccaaaacatatcacatataactcaggagtagctatgaagactgctagccagccg

SEQ ID NO: 76376 - DNA, 278 bp, Homo sapiens
gggttttggttgaggtttctacctcattatccaagatatttgcttttcagccagcagaaagaaaaaggagaagagctgccaccctttgtatccaggatgatctcttcttgaaatccttgatttaattatatctgcatgaccctttccccaactaaggttatatccacagttaccgggggttagcactgggacatcccttattttaagaacatgtctcagaaagttgcacaaaaaacttctactacatcccattggccaatgattcttacatgatgaca

SEQ ID NO: 76377 - DNA, 871 bp, Homo sapiens
gggctcttcctcgcggaagtggggaggaggcggttgcggttagtggaccgggaccggtaggggtgctgttgccatcatggctgaccccgacccccggtaccctcgctcctcgatcgaggacgacttcaactatggcagcagcgtggcctccgccaccgtgcacatccgaatgggttctcttaactacagtgacttcaacagtttttttatactttgagtctgtacggacatttgtacatgagagtcctgccttaattttgctgtttgccctcggatctctgggtttgatttttgcgttgactttaaacagacataagtatccccttaacctgtacctactttttggatttacgctgttggaagctctgactgtggcagttgttgttactttctatgatgtatatattattctgcaagctttcatactgactactacagtattttttggtttgactgtgtatactctacaatctaagaaggatttcagcaaatttggagcagggctgtttgctcttttgtggatattgtgcctgtcaggattcttgaagttttttttttatagtgagataatggagttggtcttagccgctgcaggagcccttcttttctgtggattcatcatctatgacacacactcactgatgcataaactgtcacctgaagagtacgtattagctgccatcagcctctacttggatatcatcaatctattcctgcacctgttacggtttctggaagcagttaataaaaagtaattaaaagtatctcagctcaactgaagaacaacaaaaaaaatttaacgagaaaaaaggattaaagtaattggaagcagtatatagaaactgtttcattaagtaataaagtttgaaac

SEQ ID NO: 76378 - DNA, 482 bp, Homo sapiens
gacttgccttgcctttttctgcttttaacatttgtattcaaagttgtacaccattgtcaaatgtataatgtagcagtaaatcattagaggaagtaagttaagtcctgttaatactgttctcaaatataaacatatttctttaatctcttccctatagttttttttttttatagtgagataatggagttggtcttagccgctgcaggagcccttcttttctgtggattcatcatctatgacacacactcactgatgcataaactgtcacctgaagagtacgtattagctgccatcagcctctacttggatatcatcaatctattcctgcacctgttacggtttctggaagcagttaataaaaagtaattaaaagtatctcagctcaactgaagaacaacaaaaaaaatttaacgagaaaaaaggattaaagtaattggaagcagtatatagaaactgtttcattaagtaataaagtttgaaac

SEQ ID NO: 76379 - DNA, 1800 bp, Homo sapiens
atgtggtcgagtgtaggctcccacgttggaccgggaccggtaggggtgctgttgccatcatggctgaccccgacccccggtaccctcgctcctcgatcgaggacgacttcaactatggcagcagcgtggcctccgccaccgtgcacatccgaatggcctttctgagaaaagtctacagcattctttctctgcaggttctcttaactacagtgacttcaacagtttttttatactttgagtctgtacggacatttgtacatgagagtcctgccttaattttgctgtttgccctcggatctctgggtttgatttttgcgttgactttaaacagacataagtatccccttaacctgtacctactttttggatttacgctgttggaagctctgactgtggcagttgttgttactttctatgatgtatatattattctgcaagctttcatactgactactacagtattttttggtttgactgtgtatactctacaatctaagaaggatttcagcaaatttggagcagggctgtttgctcttttgtggatattgtgcctgtcaggattcttgaagttttttttttatagtgagataatggagttggtcttagccgctgcaggagcccttcttttctgtggattcatcatctatgacacacactcactgatgcataaactgtcacctgaagagtacgtattagctgccatcagcctctacttggatatcatcaatctattcctgcacctgttacggtttctggaagcagttaataaaaagtaattaaaagtatctcagctcaactgaagaacaacaaaaaaaatttaacgagaaaaaaggattaaagtaattggaagcagtatatagaaactgtttcattaagtaataaagtttgaaacaatgattaaatactgttacaatctttatttgtatcatatgtaattttgagagctttaaaatcttactattctttatgatacctcatttctaaatccttgatttaggatctcagttaagagctatcaaaattctattaaaaatgcttttctggctgggcacagtggctcacgcctgtaatcccaccactttgggagaccgaggcaggtggatcacgaggtcaagaggttgagaccatcctggccaacatggtgaaaccccgtctctactaaaaatacaaaaattagctggatgtggtggcacacacctgtagtcccagctagtcaagaggctgaggccagagaatcgcttgaacctgggaggtggaggttgcattgagccaagatcacgccactgcattccagcctggtgacagagcgagactcagtctcaaaaaaaaaaaaaaaatttttcttcctaaattagccacgcatagcggttcgtttgcaattcaaaaataattttatgagtagataagaatatcagtttaccgttgtctagtgattttatctaaattttccctgaattattaagtaatattgatttggctttgattctgaagtagtagagtctttaccattataaactgtaaatctctttttgcttaaaaggaaaaaaatgtaaaagataaattccacagagaattattcagtattacattaaaatgttaatgactttttattttaaattgtactaacattaaaagttggcctgaaagtcagatattatgacaaaatttgacattaattgtttttaaagtatagatttcatttgaaattatagaatgctaatgtggttagaggacaccaaagatactgggtcatcagccattaagtatatctatttcaaaattaaaatatttgggaagtat

SEQ ID NO: 76380 - DNA, 2290 bp, Homo sapiens
atgtggtcgagtgtaggctcccacgttggaccgggaccggtaggggtgctgttgccatcatggctgaccccgacccccggtaccctcgctcctcgatcgaggacgacttcaactatggcagcagcgtggcctccgccaccgtgcacatccgaatggcctttctgagaaaagtctacagcattctttctctgcaggttctcttaactacagtgacttcaacagtttttttatactttgagtctgtacggacatttgtacatgagagtcctgccttaattttgctgtttgccctcggatctctgggtttgatttttgcgttgactttaaacagacataagtatccccttaacctgtacctactttttggatttacgctgttggaagctctgactgtggcagttgttgttactttctatgatgtatatattattctgcaagctttcatactgactactacagtattttttggtttgactgtgtatactctacaatctaagaaggatttcagcaaatttggagcagggctgtttgctcttttgtggatattgtgcctgtcaggattcttgaagttttttttttatagtgagataatggagttggtcttagccgctgcaggagcccttcttttctgtggattcatcatctatgacacacactcactgatgcataaactgtcacctgaagagtacgtattagctgccatcagcctctacttggatatcatcaatctattcctgcacctgttacggtttctggaagcagttaataaaaagtaattaaaagtatctcagctcaactgaagaacaacaaaaaaaatttaacgagaaaaaaggattaaagtaattggaagcagtatatagaaactgtttcattaagtaataaagtttgaaacaatgattaaatactgttacaatctttatttgtatcatatgtaattttgagagctttaaaatcttactattctttatgatacctcatttctaaatccttgatttaggatctcagttaagagctatcaaaattctattaaaaatgcttttctggctgggcacagtggctcacgcctgtaatcccaccactttgggagaccgaggcaggtggatcacgaggtcaagaggttgagaccatcctggccaacatggtgaaaccccgtctctactaaaaatacaaaaattagctggatgtggtggcacacacctgtagtcccagctagtcaagaggctgaggccagagaatcgcttgaacctgggaggtggaggttgcattgagccaagatcacgccactgcattccagcctggtgacagagcgagactcagtctcaaaaaaaaaaaaaaaatttttcttcctaaattagccacgcatagcggttcgtttgcaattcaaaaataattttatgagtagataagaatatcagtttaccgttgtctagtgattttatctaaattttccctgaattattaagtaatattgatttggctttgattctgaagtagtagagtctttaccattataaactgtaaatctctttttgcttaaaaggaaaaaaatgtaaaagataaattccacagagaattattcagtattacattaaaatgttaatgactttttattttaaattgtactaacattaaaagttggcctgaaagtcagatattatgacaaaatttgacattaattgtttttaaagtatagatttcatttgaaattatagaatgctaatgtggttagaggacaccaaagatactgggtcatcagccattaagtatatctatttcaaaattaaaatatttgggaagtattgtcttatggtttcatttgtgttggtccacacagcatgttaggtcagtgtaccagtaaccaatgaaattttgtcaaattccctcactgtactagtttgttaggctgccataacaaagttctacagcttgggtggcttcaacaagaaatttgttttcccacagttctggaggctaaaagtccaagatcaaggtgttagcagggttggtttcctttgaggcctttctctttgatttgtagatggccatcttctccctgtgtctttaaatggccttccctctgtacttgtctgtgcccaaatttcttcttcttatgaggacaccagtcatactggattagggcccacactgaggacctcatttttccttaattatctctttcaaaacctatctccaaatacagtcacattctgaagtgctgggattaggatttcttcatgtgaattttggggggactacaactcagcccataacaccccctaagtatttccca

SEQ ID NO: 76381 - DNA, 892 bp, Homo sapiens
atgtggtcgagtgtaggctcccacgttggaccgggaccggtaggggtgctgttgccatcatggctgaccccgacccccggtaccctcgctcctcgatcgaggacgacttcaactatggcagcagcgtggcctccgccaccgtgcacatccgaatggcctttctgagaaaagtctacagcattctttctctgcaggttctcttaactacagtgacttcaacagtttttttatactttgagtctgtacggacatttgtacatgagagtcctgccttaattttgctgtttgccctcggatctctgggtttgatttttgcgttgactttaaacagacataagtatccccttaacctgtacctactttttggatttacgctgttggaagctctgactgtggcagttgttgttactttctatgatgtatatattattctgcaagctttcatactgactactacagtattttttggtttgactgtgtatactctacaatctaagaaggatttcagcaaatttggagcagggctgtttgctcttttgtggatattgtgcctgtcaggattcttgaagttttttttttatagtgagataatggagttggtcttagccgctgcaggagcccttcttttctgtggattcatcatctatgacacacactcactgatgcataaactgtcacctgaagagtacgtattagctgccatcagcctctacttggatatcatcaatctattcctgcacctgttacggtttctggaagcagttaataaaaagtaattaaaagtatctcagctcaactgaagaacaacaaaaaaaatttaacgagaaaaaaggattaaagtaattggaagcagtatatagaaactgtttcattaagtaataaagtttgaaac

SEQ ID NO: 76382 - DNA, 1445 bp, Homo sapiens
agatccaagatgggcattatattcattgtatgtttacaaattcttacattttagttattcttcagcaaaaaatccagatggatgtttttttcagaaagtgttgaatgggtttacaaagtttttttgtaaggaacaatattgcaaattactaaaattgtatttttataggctgtttgctcttttgtggatattgtgcctgtcaggattcttgaagttttttttttatagtgagataatggagttggtcttagccgctgcaggagcccttcttttctgtggattcatcatctatgacacacactcactgatgcataaactgtcacctgaagagtacgtattagctgccatcagcctctacttggatatcatcaatctattcctgcacctgttacggtttctggaagcagttaataaaaagtaattaaaagtatctcagctcaactgaagaacaacaaaaaaaatttaacgagaaaaaaggattaaagtaattggaagcagtatatagaaactgtttcattaagtaataaagtttgaaacaatgattaaatactgttacaatctttatttgtatcatatgtaattttgagagctttaaaatcttactattctttatgatacctcatttctaaatccttgatttaggatctcagttaagagctatcaaaattctattaaaaatgcttttctggctgggcacagtggctcacgcctgtaatcccaccactttgggagaccgaggcaggtggatcacgaggtcaagaggttgagaccatcctggccaacatggtgaaaccccgtctctactaaaaatacaaaaattagctggatgtggtggcacacacctgtagtcccagctagtcaagaggctgaggccagagaatcgcttgaacctgggaggtggaggttgcattgagccaagatcacgccactgcattccagcctggtgacagagcgagactcagtctcaaaaaaaaaaaaaaaatttttcttcctaaattagccacgcatagcggttcgtttgcaattcaaaaataattttatgagtagataagaatatcagtttaccgttgtctagtgattttatctaaattttccctgaattattaagtaatattgatttggctttgattctgaagtagtagagtctttaccattataaactgtaaatctctttttgcttaaaaggaaaaaaatgtaaaagataaattccacagagaattattcagtattacattaaaatgttaatgactttttattttaaattgtactaacattaaaagttggcctgaaagtcagatattatgacaaaatttgacattaattgtttttaaagtatagatttcatttgaaattatagaatgctaatgtggttagaggacaccaaagatactgggtcatcagccattaagtatatctatttcaaaattaaaatatttgggaagtat

SEQ ID NO: 76383 - DNA, 1407 bp, Homo sapiens
agtcgtacctacttttgggatttacgctgttggaatgctctgactgtggcagttgttgttactttctatgatgtatatattattctgcaagctttcatactgactactacagtattttttggtttgactgtgtatactctacaatctaagaaggatttcagcaaatttggagcaggttttttttttatagtgagataatggagttggtcttagccgctgcaggagcccttcttttctgtggattcatcatctatgacacacactcactgatgcataaactgtcacctgaagagtacgtattagctgccatcagcctctacttggatatcatcaatctattcctgcacctgttacggtttctggaagcagttaataaaaagtaattaaaagtatctcagctcaactgaagaacaacaaaaaaaatttaacgagaaaaaaggattaaagtaattggaagcagtatatagaaactgtttcattaagtaataaagtttgaaacaatgattaaatactgttacaatctttatttgtatcatatgtaattttgagagctttaaaatcttactattctttatgatacctcatttctaaatccttgatttaggatctcagttaagagctatcaaaattctattaaaaatgcttttctggctgggcacagtggctcacgcctgtaatcccaccactttgggagaccgaggcaggtggatcacgaggtcaagaggttgagaccatcctggccaacatggtgaaaccccgtctctactaaaaatacaaaaattagctggatgtggtggcacacacctgtagtcccagctagtcaagaggctgaggccagagaatcgcttgaacctgggaggtggaggttgcattgagccaagatcacgccactgcattccagcctggtgacagagcgagactcagtctcaaaaaaaaaaaaaaaatttttcttcctaaattagccacgcatagcggttcgtttgcaattcaaaaataattttatgagtagataagaatatcagtttaccgttgtctagtgattttatctaaattttccctgaattattaagtaatattgatttggctttgattctgaagtagtagagtctttaccattataaactgtaaatctctttttgcttaaaaggaaaaaaatgtaaaagataaattccacagagaattattcagtattacattaaaatgttaatgactttttattttaaattgtactaacattaaaagttggcctgaaagtcagatattatgacaaaatttgacattaattgtttttaaagtatagatttcatttgaaattatagaatgctaatgtggttagaggacaccaaagatactgggtcatcagccattaagtatatctatttcaaaattaaaatatttgggaagtat

SEQ ID NO: 76384 - DNA, 1285 bp, Homo sapiens
ataaataaaaagataagcgtctcaggaggatcgtgaaaggaaaagtgacatctgttttttttttatagtgagataatggagttggtcttagccgctgcaggagcccttcttttctgtggattcatcatctatgacacacactcactgatgcataaactgtcacctgaagagtacgtattagctgccatcagcctctacttggatatcatcaatctattcctgcacctgttacggtttctggaagcagttaataaaaagtaattaaaagtatctcagctcaactgaagaacaacaaaaaaaatttaacgagaaaaaaggattaaagtaattggaagcagtatatagaaactgtttcattaagtaataaagtttgaaacaatgattaaatactgttacaatctttatttgtatcatatgtaattttgagagctttaaaatcttactattctttatgatacctcatttctaaatccttgatttaggatctcagttaagagctatcaaaattctattaaaaatgcttttctggctgggcacagtggctcacgcctgtaatcccaccactttgggagaccgaggcaggtggatcacgaggtcaagaggttgagaccatcctggccaacatggtgaaaccccgtctctactaaaaatacaaaaattagctggatgtggtggcacacacctgtagtcccagctagtcaagaggctgaggccagagaatcgcttgaacctgggaggtggaggttgcattgagccaagatcacgccactgcattccagcctggtgacagagcgagactcagtctcaaaaaaaaaaaaaaaatttttcttcctaaattagccacgcatagcggttcgtttgcaattcaaaaataattttatgagtagataagaatatcagtttaccgttgtctagtgattttatctaaattttccctgaattattaagtaatattgatttggctttgattctgaagtagtagagtctttaccattataaactgtaaatctctttttgcttaaaaggaaaaaaatgtaaaagataaattccacagagaattattcagtattacattaaaatgttaatgactttttattttaaattgtactaacattaaaagttggcctgaaagtcagatattatgacaaaatttgacattaattgtttttaaagtatagatttcatttgaaattatagaatgctaatgtggttagaggacaccaaagatactgggtcatcagccattaagtatatctatttcaaaattaaaatatttgggaagtat

SEQ ID NO: 76385 - DNA, 732 bp, Homo sapiens
tcaactatggcagcagcgtggcctccgccaccgtgcacatccgaatgggtacgttgtcccctctccagtgcctcccagccgcttgtctgcactgctcggcctctagaagccgacttccggcttccgagggagagcggccatctcctgggactcacagggagtgctcactgagctcccggccctccttctccgggtaccagaggactggcgccctcctcagggagtcggggaggcgcttcctcccctcctagcgggtgtgggagggcgccaggcccagaaggcttgcggctgtcctgtgtgcgccccggctccccagcgggcgccgcggtgtaggaagggacagatggaaaccgccgcagcctgaatttggcatcttgaagtgaaaagaaacgtcgtggaaatgagtcggttgatcactgtgactgacgtacacacgagtggaatccacggcctgatgtttttgttctgtggggtttcgcgttacaggcttatatttaccgtcctgtgctaggctggaagctccctgacggcactatttcctctccgcagggcccagaatgcaacaggtctttgaggattattgaggaagttgctcaacacagaagcttcctaagtcagtctaaattgtgttttaagttattacgtagtagccaatgggcagaaatttttgaatttaaaatgctcagcttcatctacgtggaagccattgcctgctctagtttggtcatttga

SEQ ID NO: 76386 - DNA, 537 bp, Homo sapiens
agatccaagatgggcattatattcattgtatgtttacaaattcttacattttagttattcttcagcaaaaaatccagatggatgtttttttcagaaagtgttgaatgggtttacaaagtttttttgtaaggaacaatattgcaaattactaaaattgtatttttataggctgtttgctcttttgtggatattgtgcctgtcaggattcttgaagttttttttttatagtgagataatggagttggtcttagccgctgcaggagcccttcttttctgtggattcatcatctatgacacacactcactgatgcataaactgtcacctgaagagtacgtattagctgccatcagcctctacttggatatcatcaatctattcctgcacctgttacggtttctggaagcagttaataaaaagtaattaaaagtatctcagctcaactgaagaacaacaaaaaaaatttaacgagaaaaaaggattaaagtaattggaagcagtatatagaaactgtttcattaagtaataaagtttgaaac

SEQ ID NO: 76387 - DNA, 1941 bp, Homo sapiens
atgtggtcgagtgtaggctcccacgttggaccgggaccggtaggggtgctgttgccatcatggctgaccccgacccccggtaccctcgctcctcgatcgaggacgacttcaactatggcagcagcgtggcctccgccaccgtgcacatccgaatggttctccagagagattgtaccttcagcaaacaatatatgaggataccttctgcaccctcagccacactgaatatcatcagattttttcatctccggcaatctggtagatcagggatggtgaacattttctacaaagggccaacctttctgagaaaagtctacagcattctttctctgcaggttctcttaactacagtgacttcaacagtttttttatactttgagtctgtacggacatttgtacatgagagtcctgccttaattttgctgtttgccctcggatctctgggtttgatttttgcgttgactttaaacagacataagtatccccttaacctgtacctactttttggatttacgctgttggaagctctgactgtggcagttgttgttactttctatgatgtatatattattctgcaagctttcatactgactactacagtattttttggtttgactgtgtatactctacaatctaagaaggatttcagcaaatttggagcagggctgtttgctcttttgtggatattgtgcctgtcaggattcttgaagttttttttttatagtgagataatggagttggtcttagccgctgcaggagcccttcttttctgtggattcatcatctatgacacacactcactgatgcataaactgtcacctgaagagtacgtattagctgccatcagcctctacttggatatcatcaatctattcctgcacctgttacggtttctggaagcagttaataaaaagtaattaaaagtatctcagctcaactgaagaacaacaaaaaaaatttaacgagaaaaaaggattaaagtaattggaagcagtatatagaaactgtttcattaagtaataaagtttgaaacaatgattaaatactgttacaatctttatttgtatcatatgtaattttgagagctttaaaatcttactattctttatgatacctcatttctaaatccttgatttaggatctcagttaagagctatcaaaattctattaaaaatgcttttctggctgggcacagtggctcacgcctgtaatcccaccactttgggagaccgaggcaggtggatcacgaggtcaagaggttgagaccatcctggccaacatggtgaaaccccgtctctactaaaaatacaaaaattagctggatgtggtggcacacacctgtagtcccagctagtcaagaggctgaggccagagaatcgcttgaacctgggaggtggaggttgcattgagccaagatcacgccactgcattccagcctggtgacagagcgagactcagtctcaaaaaaaaaaaaaaaatttttcttcctaaattagccacgcatagcggttcgtttgcaattcaaaaataattttatgagtagataagaatatcagtttaccgttgtctagtgattttatctaaattttccctgaattattaagtaatattgatttggctttgattctgaagtagtagagtctttaccattataaactgtaaatctctttttgcttaaaaggaaaaaaatgtaaaagataaattccacagagaattattcagtattacattaaaatgttaatgactttttattttaaattgtactaacattaaaagttggcctgaaagtcagatattatgacaaaatttgacattaattgtttttaaagtatagatttcatttgaaattatagaatgctaatgtggttagaggacaccaaagatactgggtcatcagccattaagtatatctatttcaaaattaaaatatttgggaagtat

SEQ ID NO: 76388 - DNA, 982 bp, Homo sapiens
  misc_feature (895)..(896): n is a, c, g, or t
atgtggtcgagtgtaggctcccacgttggaccgggaccggtaggggtgctgttgccatcatggctgaccccgacccccggtaccctcgctcctcgatcgaggacgacttcaactatggcagcagcgtggcctccgccaccgtgcacatccgaatggcctttctgagaaaagtctacagcattctttctctgcaggttctcttaactacagtgacttcaacagtttttttatactttgagtctgtacggacatttgtacatgagagtcctgccttaattttgctgtttgccctcggatctctgggtttgatttttgcgttgactttaaacagacataagtatccccttaacctgtacctactttttggatttacgctgttggaagctctgactgtggcagttgttgttactttctatgatgtatatattattctgcaagctttcatactgactactacagtattttttggtttgactgtgtatactctacaatctaagaaggatttcagcaaatttggagcagggctgtttgctcttttgtggatattgtgcctgtcaggattcttgaagttttttttttatagtgagataatggagttggtcttagccgctgcaggagcccttcttttctgtggattcatcatctatgacacacactcactgatgcataaactgtcacctgaagagtacgtattagctgccatcagcctctacttggatatcatcaatctattcctgcacctgttacggtttctggaagcagttaataaaaagtaattaaaagtatctcagctcaactgaagaacaacaaaaaaaatttaacgagaaaaaaggattaaagtaattggaagcagtatatagaaactgtttcattaagtaataaagtttgaaacgannaacaaaaaaaaaaattgtgctcattggctcaacagccgaacctctcgggcgcttccctttactggaggtcatattatgatccttcg

SEQ ID NO: 76389 - DNA, 638 bp, Homo sapiens
cttgcgctcaacctctcagaaggctcaggggatgccccaaagtggcaaaacaattggagaatgagactcacctgccaagaggaaagacactgaattgattcacccctgaggagagcaggttaaggtgtggtagtttagttctgtaggaaaatcataggcagagctcgaggccaacgcttctctgcctctgttggggaaagaacaagaggaaatgggtttgaagaacaacatgtaggaccaaaaataaacgcaaagaactgccgatcatccgtgttgttaagtcctggaacgctgaaagcagtgcagagtccttcgttaaaagaaaaacaaaaaccaaacctcaggtataatcttgcctagacgcaaaccaaaaaaagatctaggacaatctctctaagatctatgttatcagcagttgcctctgggtaaagggattattggtggtaacaataactgaattattttcactatgtattaattaaatatataatttattattaatgatcaataattattgctgttttctgaatttttaaattttctgtggtgtccctttttataatgagaatcttcatttttaggaatctcttctagtcttctgtgacttaaaaatttatgattcaatttttaataaagtc

SEQ ID NO: 76390 - DNA, 530 bp, Homo sapiens
tttcattttgaaaccattgtccctcccccaaccacttccatggaaaaattgtcttccatgaaactggtccctggtgccaaaaagttggggatttctgtcttacagatcctttttttgttgatagagtttaatgactattttctttaaagtgagcatatcatttgcatgaagataactattgtctttgagttatgctttgacaagagacaaaagagtagacactattgcaggactagagcacaagaacttcagagaacagaatgactagactattaagacaaagtatgctttcaataactgaattagacttgcccctgagtatttcatgttctgggatgctattataatggtattttaagcatttccatttctacttgcttattgctcatatatagacataccattaattgtataatgtatcctgtgacagtgctaaatcaatagctctagtagcttttttctacgttatttaggattttctatgtgcatgatcatattatctgtgaataaagatacttttactttttctt

SEQ ID NO: 76391 - DNA, 363 bp, Homo sapiens
tccaagctttgtgagttgcaaaagtgttctagtgttgtggcatgctttgtgaacaatgtggaaaggctttccattcattgggcctgttaattttagcaaccaggtaaaacaaaacgagtaatggccttaacagaaaagtaataccagtgttcttattaagatgaccttaaatctagagagttatagaacttggttaagtctatgtgctcgtaccccttacttataactcaagggaaattggagcaaaaatttgtgaattactgtttgctccaaaagttcataggcagtgctactgataaatcaaaactacagataggttttcctctcctcaaaggatggaagcaatgataatatgttaatatt

SEQ ID NO: 76392 - DNA, 584 bp, Homo sapiens
cagtgctggctcttattcatctcccatttctgcaatccatggtgatgattaaaagtcttaggagttttacgaggctcagtattttttttttttaatatgctagttcttcatgaatacattgggtactctgaagcatatcatttcctgggtttcctgaagtggtatgttgcgtggaatggcacattaggtctaaataattatcccctatgtaaggttcttgtttttcattcattctcttaaaaaatagatattaaacattaaataaggacagccaggtattgtttgaggtgttagtgggctatgctaaaaaatcaaaggtgggaatgaggcagctggagctcaaaggagcatgttagaaggagtcccaagaggacaaatccatttggttcttctttccttgttttttttcgaatatttttgaggatgataatttttttcccctcaaaagcttttaatgaatgttaggattaaaaaagagagagagagaatttatagaagagaaattaactatagctcctaaaatagctctttgtttctgaaagccttgattctgctatctattttataactgaaacaaaaacaaa

SEQ ID NO: 76393 - DNA, 752 bp, Homo sapiens
catagttaacacaattaactgtaattccttaagatcatctgatatccagtctatgttcagttttctccagtccagttttctccggtggtgtcaagcacttttttttcccattaagtttgttaggatctaaatgaagatcacgcattgcatttgtggtatcttttactccttaactgtatcttccctccttttttttaataccataaatttgttggagaaactgggtcatttttcctattggatgtatcacacattctggatttggctgattgtttccttggggtatcatttaacttgttatttttctcttatttcttgtaaagtggtagttaggtgtaaagtcttgatttaggtttagttttcaggaaagaatactttggggtactgagtacttcctgtaacattccagcatgacatacataatgactgcaagtctcactttagatgatgccaatttaagtactataaaattcctcaccaacttttaggtaatagttgaatatccacgtttaagttgtctagataaagtatttcattaggggttgcaaaatggtgatttttttttgagttattccctctgtatttattagctggaattctttaagtctttttaatatggccttattaatcttttttttttttttttgagatgggacagagttttgctcttgtcacccaggctggaggttgcagtgggctgagatcgtgccattgctctccagcttgggcaacaagagtgaaactccttagca

SEQ ID NO: 76394 - DNA, 648 bp, Homo sapiens
tttcttaataaggtgtttaattacaggttcaattacatatatatgaatattcattttggtaacctgtgtttgctgaatcaatttgttcattttatctaaaatttcaaagttgttctattattcatttatctttttaatacttataaggtgtgcggttagaatttgtgccttttgtctgttttgttaatcaatcttgctgggggccatcaattttatcagtgtttcaaaaaagcaaactttgattttattcatccctttaccatactgaaaatgttttgcttaatttccaaacttatacttccactgtgattaaatatttgtataactaaaactctttggaatttgtgtcttctcaatgatcaaaaatatgattaatttttataaatattgcttctgcacttgaaaaggatgtgtattctgcatgttgagcgtagtgtatcacgtatctcaattagatggagcgtgttaaatgcatcctttaaagattccatttccttactgatgtttgtctgtttatttttcagtggctgagacacagatattaaagtttcccacaatgatcgtcaacttatttctttttttcgtttgttaagctttgttctgtgtgttttaaggttaagttaccaggcataaacacatttagaattc

SEQ ID NO: 76395 - DNA, 263 bp, Homo sapiens
catgcagcctagtatttcattaaaaggctatgatatatccaaatttatcttaaaaagagtctcctcagtggatattcagttgtttatattttctttgccattagaaaaacagaagtacacagagatggtatttaatatcgattttcaaggacagattcatggggccagggagaacagcagaacatatgggcaggaggagaatttcaaaggaatagaagggtaaaatgcatgaaatcagagcatgttgcactcagcatggatgg

SEQ ID NO: 76396 - DNA, 287 bp, Homo sapiens
tggcgcatgcctgtaatctaggctactgtggaggctgaggcaggagaattgcctgaacctggaagatgaagattacagtgatgagactgcaccactgcactccagcctgggtcacaagagccaagagcgagaatccatctaaaaaaaaaaaaaagaatttctatttgggggacaaaataaaagaaatggagtgaaagggatgtaaagaaattgaaagtcaacaggctaataatgccaataaataatgatggagcaaagaaatcagtattggccaaataaaaccaatg

SEQ ID NO: 76397 - DNA, 520 bp, Homo sapiens
  misc_feature (18)..(18): n is a, c, g, or t
  misc_feature (41)..(41): n is a, c, g, or t
  misc_feature (64)..(64): n is a, c, g, or t
  misc_feature (98)..(98): n is a, c, g, or t
  misc_feature (126)..(126): n is a, c, g, or t
gagaccggacataaaacngggacaaatggggaaaccccccnactggaaagccaccaaaacaaanccctacaaacctcatcccggaagaccccccttantccctggccccctccccccagagagccncctgtgtttaagtccatggcctcacctgcacctcacaagagaaaaaggagtaaagtgggccatatttgccagggtgttggatgggttaacaagagcatttttacctttttccctcccatgtttggttcctgcagcatttcccattgatgcatgctattgtagacttccttaggttgaccttggccttgacctccacccactagctcatgacccaaaactgaagatgtgcatcagaaagggacagatttggtctttctgctgtaaaagatattctgccttagtgcctgctaatttgttgtgcatagtcctgtgctgccaatcttccccaccaattgttaaggttaatgtgtgttttatatgtgtattcacaaacattaaaatgtaatcagtggat

SEQ ID NO: 76398 - DNA, 564 bp, Homo sapiens
tttagtagagatggggttttaccatgttggtcaggctggtcttgaactcctgacctcaagtgatccacctgccttggcctcccaacatgctgtgattacaggcatgagccactgcagctggctttgtttaattgggtttttcttattaagttttgagagtttaaaaaaatatatattctggatatgtcattaatcagatatataatttgtaaatatcttctcccttagtatatattttaatattccactggcaaaatggaagtttgcgtgaagcatttttgtgatgtattgttaaataaaatggttgtctctaggaaaagcacttatgtgattgagttgtgagttgaaatagctgttttccccccgccccgagcaaaatctcatttttactggagagaatgacaaactggtttctcagacttgcaggctttctcaaatctcaaatttatctaaaaaattctcgagatattttctcacaaatgagtgaggtgaacctgtcacttcatggaaaataaatgacagtatttttaccagtgataaaattagagccttttgtttaaaaaa

SEQ ID NO: 76399 - DNA, 527 bp, Homo sapiens
tttattgctgcagtattattttcctgctacttgttcatttcaaatatgtaatgtttctgctgcattgtgggttaaatgactttcatgtgctgattttccaaccccggcaccatccatgatatcattttctgtggagacatgtattttaagttgcaatctgcctcaaaatccttttggaatttagcacatttgtaggttgtggattctccactgagattaggaaaactgtcatgtgctaatttaaattattcattcagcaagaatttattgagtaataacatttgtcagaatcaactttaggctctgaggataaggcatggagttaattaggcccctgccttcaaggtgtttacaatctaatgcataaattttgctaaatattggcatgtttctctttctgcctctccaatactgccccttgtgaaaacaaattctatttatgatcttaatcgcatggaaatagttattatgagaataacaaattagctttaatctttctgagaatcacctcataaatataagaaata

SEQ ID NO: 76400 - DNA, 333 bp, Homo sapiens
tccttccagcttaggtagattaactatttataaggcccatggggaaaaggaaacaaaggaccagcataaaggaaatgcttttttattgcctaccttctacagctggagaactgccacaactttgtggcagtacccttcctcagtgccatgggtactggaatcccactgcatgattcatgagtctaggcacgtggatgggctcatggatgagcatggtctaggcacatggatggcctgtggtcatactgcctgagccctagaaaaactgaagttggcaggatttatattcaagatctgtttcccctatagatgtcttcgtcctctgttcctgtg

SEQ ID NO: 76401 - DNA, 308 bp, Homo sapiens
tcctccactgtcctagaatgttggcttctcttgggctgtcttctccttgacattcacaggcacagcagccatctgtgcagcccattggtcccctaacgggggtcctcaagccaatttcagaacaacccttctgactgttgaccagacactcccctggagggcccacaggcacctcaaatccgccatgacataagcacacacggagctcatggcctgccccacacctcagtgtgcatgggatatcccgccttagcccatggcattcccatccagaagctaaatcgtggtaaaatacacataacagcaaa

SEQ ID NO: 76402 - DNA, 279 bp, Homo sapiens
aaaggagtatgctactttgtgctcattggtctttcctacaagagatctgcctgcattcctcaggacggtgagcaacagctactcctagaaatggccgtgtgccggtctgctctaaagagggagtgctgggggaagatgcggacacactgacacaccctggcagacctaggatctatagtcaccagctactgctgctgccagctcgcttcctgcaccacgtcctcatggaagggaggtctggagcacagtaaatccatcacagacagaaaggcacgaggg

SEQ ID NO: 76403 - DNA, 568 bp, Homo sapiens
cgtgagtgagatgattaaagcgttccagagagtgcgctcttggatgatagccgttactttttattaaccctggctttggtggtaagggaaacttccagaaatgcttgtgggtatattggatagctcagaaaatctgggaaatcaaagtggctcaatagctgtgaggaactgtgggtgactttatcctcacatcgtgtttcttccagaaattcagacgcaacagaggttaggccagtttggtgggttccagtgagcggtgtgttgagcctagtagagcataggtacttggggttgccaaaaccccagcaagttgaggcttcacgctcagggaaacttctgggtcagaggttaataaccacgctccttggagcaaggaggaggggagcctttctgactagctgaagtaattgcaggtttctaactgggcctaaggtgagctgagggcttgagcccctcagcccagcgggggtcccttttcatcccttctctgacagattgctttgtaaactttcttaggccttccccccacccctttgccccagtgctttaagcccttctttgtcttctt

SEQ ID NO: 76404 - DNA, 195 bp, Homo sapiens
ctcccgctccgcacccgcctttcccgagcaggctacacctctccctggcgcatctttactggaaagccggcaggcgaggggagaagtgagcgccgtctccgcgcctcctcggtcctgctggctgagcgcggggatggctccggagggagacactcaggaaaccacctccgcccttcccccatctctatccagcgg

SEQ ID NO: 76405 - DNA, 384 bp, Homo sapiens
  misc_feature (247)..(247): n is a, c, g, or t
  misc_feature (261)..(261): n is a, c, g, or t
  misc_feature (264)..(264): n is a, c, g, or t
  misc_feature (348)..(348): n is a, c, g, or t
tgctgttacctggggaatttcatgccagggggtttggagtcagactatagagtaatggctagaacagtgcctgtctcaagtcggaaggtggaagcaacagtggcctttgtgtttctgtgtcaaccctgtccagttgacagaagctgcagaaatacagagctctctggccaggtgtgatggttcacgtctgtaatcccagcagtttgggaggccaagggggttttattacgaggtcaggagtttgagnaccagcctggccanacnatggtgaaaccctgtctctactaaaaatacaaaattagccaggcatggtggcgcatgcctgtaatcccagctacttgggaggcntgagacaggagaatcttgaacccaggaagtggagat

SEQ ID NO: 76406 - DNA, 397 bp, Homo sapiens
aatctccatatttggttctggaaaactcataccatgagttcaatttgactgaactttgaattctgctcagctttcagttctgttttttaaaagtagaaagtattccacttatgcatggaatgcttgccgttcaaaatcatatgagttgacacgatgctttagagatcattttttttttttatggtaaggacagcacccagtctgaatggtggtgctggagatttctctgtaatccatttctctccccagtcactcttgattctgaaattaatccatctctttctactttccttctcttctaggcatttaaattgtgtctgctattgagagaggaaataaaataacgcttattttcacatcactcagaggtagacagattagcactcttgcagaagag

SEQ ID NO: 76407 - DNA, 2390 bp, Homo sapiens
caatagctaggcagaaaaggtacagcaaataaacgaaaagcagaaccatgagtctgatggcgaaagaggggaagcagtttgcttttctgatagcaatttcatgagtcagctgacctaagatacatacttcaattctcatgggatttcttgagctaggaaaggtggttggcttacggcacagtagagagcttccagggctggctggcgtgggatacccgtaccacagaaatgcagggaccattgcttcttccaggcctctgctttctgctgagcctctttggagctgtgactcagaaaaccaaaacttcctgtgctaagtgccccccaaatgcttcctgtgtcaataacactcactgcacctgcaaccatggatatacttctggatctgggcagaaactattcacattccccttggagacatgtaacgacattaatgaatgtacaccaccctatagtgtatattgtggatttaacgctgtgtgttacaatgtcgaaggaagtttctactgtcaatgtgtcccaggatatagactgcattctgggaatgaacaattcagtaattccaatgagaacacctgtcaggacaccacctcctcaaagacaaccgagggcaggaaagagctgcaaaagattgtggacaaatttgagtcacttctcaccaatcagactttatggagaacagaagggagacaagaaatctcatccacagctaccactattctccgggatgtggaatcgaaagttctagaaactgccttgaaagatccagaacaaaaagtcctgaaaatccaaaacgatagtgtagctattgaaactcaagcgattacagacaattgctctgaagaaagaaagacattcaacttgaacgtccaaatgaactcaatggacatccgttgcagtgacatcatccagggagacacacaaggtcccagtgccattgcctttatctcatattcttctcttggaaacatcataaatgcaactttttttgaagagatggataagaaagatcaagtgtatctgaactctcaggttgtgagtgctgctattggacccaaaaggaacgtgtctctctccaagtctgtgacgctgactttccagcacgtgaagatgacccccagtaccaaaaaggtcttctgtgtctactggaagagcacagggcagggcagccagtggtccagggatggctgcttcctgatacacgtgaacaagagtcacaccatgtgtaattgcagtcacctgtccagcttcgctgtcctgatggccctgaccagccaggaggaggatcccgtgctgactgtcatcacctacgtggggctgagcgtctctctgctgtgcctcctcctggcggccctcacttttctcctgtgtaaagccatccagaacaccagcacctcactgcatctgcagctctcgctctgcctcttcctggcccacctcctcttcctcgtggggattgatcgaactgaacccaaggtgctgtgctccatcatcgccggtgctttgcactatctctacctggccgccttcacctggatgctgctggagggtgtgcacctcttcctcactgcacggaacctgacagtggtcaactactcaagcatcaatagactcatgaagtggatcatgttcccagtcggctatggcgttcccgctgtgactgtggccatttctgcagcctcctggcctcacctttatggaactgctgatcgatgctggctccacctggaccagggattcatgtggagtttccttggcccagtctgtgccattttctctgcgaatttagtattgtttatcttggtcttttggattttgaaaagaaaactttcctccctcaatagtgaagtgtcaaccatccagaacacaaggatgctggctttcaaagcaacagctcagctcttcatcctgggctgcacatggtgtctgggcttgctacaggtgggtccagctgcccaggtcatggcctacctcttcaccatcatcaacagcctccaaggcttcttcatcttcttggtctactgcctcctcagccagcaggtccagaaacaatatcaaaagtggtttagagagatcgtaaaatcaaaatctgagtctgagacatacacactttccagcaagatgggtcctgactcaaaacccagtgagggggatgtttttccaggacaagtgaagagaaaatattaaaactagaatattcaactccatatggaaaatcatatccatggatctctttggcattatgaagaatgaagctaaggaaaagggaattcattaaacatatcatccttggagaggaagtaatcaacctttacttcccaagctgtttgttctccacaataggctctcaacaaatgtgtggtaaattgcatttctcttcaaaaaaaaaa

SEQ ID NO: 76408 - DNA, 486 bp, Homo sapiens
caatagctaggcagaaaaggtacagcaaataaacgaaaagcagaaccatgagtctgatggcgaaagaggggaagcagtttgcttttctgatagcaatttcatgagtcagctgacctaagatacatacttcaattctcatgggatttcttgagctaggaaaggtggttggcttacggcacagtagagagcttccagggctggctggcgtgggatacccgtaccacagaaatgcagggaccattgcttcttccaggcctctgctttctgctgagcctctttggagctgtgactcagaaaaccaaaagtgagtgctcagagccagaacagagaacttgtggaccaagggctggacctggagccactcatggtctccagtgggctggagaaaagtgcctgttctgagagcaatatttgggaaggcttgctcctgtgtttcattatttgtttgcttaatttatcattatatcaaatatggatagcctttta

SEQ ID NO: 76409 - DNA, 508 bp, Homo sapiens
gccttctcctggacatgcccatgtttccaccaccaccttcccacaggaggctccagctccagagctgcctccgccctctccagtccagcagggactttttcatctgccccgcccttgtcctggtgctgctgtagcagtagtgtgaccttggtaaggcgctaattcttgcagagcccctgttctcctgtattgccctgcctgttggggggcccttattgtgagcagaacctagggccttttcttctcagcccttgtctcccacgctgtgcgctccccatcgagtcaatcccaggccagtcattgccgacagccctcagtgcctcattctctcttctccattttttctctaatattcagaagccttcataatgtcttgcttagactgttgcaatgccctctttttaaaaatccttggttttttaattgtataacatatagcaggatccagatctaaataaaacataatctctgcccttgcgaaactcatggtaatggcagtaagtcgact

SEQ ID NO: 76410 - DNA, 1279 bp, Homo sapiens
accctgctggatacaaatgccctgtacgacctaagggcctccacagcaggaacaaaaggaattttgtctgagattttagcagaaaagtaatttttgaaatctattcttggatttagacgtttattggatttcaaagcttcttgctgcccaggagcttgtgaatacggtcaaaggtccatgaaatttccaaagtggtaccacagcagatgaacctgaatgcaaactggagggaccaacagagtccagcctatagacataaatccttaactacacctagatctcactgtcttttccaatggtcaaaagaggggctcttgaaatggctccattgttttatagaaacaaggtcttcctaagaagtctttttctcctatctttttcttacccaaaataaaggaatggcccaaaacctcaagccaagcttaccagctataaacaacttggtggtcagcagccaaaagaagagtggacatgccatggtcatgtggcacgtaccctatacaagcttcacagagaagaatggaagcacttgattgtaagacagagggtgagatgtgagaggaatattaaccttcactttccacaggcatttttttctgcaaatggcaccagcttttggacttaaaattttattccgaatactatttagatgcatcagggccctcaaaatatggatttcaagttggagacatcaaagtgcattatttactaaaaccactgcagcttttttcccctctcctttcacaagatgctattgtaaattcaggctgctttaatctctgtgattaaaaaaaaaaaggaagaaagaaaaaaaaagtgctgcttgaagaggaactgaactcacaatctgggagctagaaatgctctctcgtgctctctctgtctccagtgataagctgaccagatgtcttgaattaagtacagggtcaccaacatctctaatagaatccaactgtggaatagaaaaactatttcgtctaagaagtggatcctagctgtcaaataaaaaatcgctgttgaatgctgtaaagtacatttttacacccatgtacaatttagagcttaggaactcatggaaaaaaatagagttaacacggataaagggattttaaaaggcgagagagggaagagtttcttaaggagtctccaatgacaaaaatgtgttcattttctgagacctccagaatgaattactaaggtatcctcaaacaaaagtggttttgctattcagaaattcatatgttctaaatagagaaaattaaaaattaaaaagacatga

SEQ ID NO: 76411 - DNA, 546 bp, Homo sapiens
agaacaacagcgagaaggagccaaagctggagccagaaagcctggcaccgcaccttcccctgacagttagcaccttcctttcacaacatctcccttaagggggaagcgtctgctgtggaacccaccgcaagcaacgcaggcagagttcagcctgaagagcgccaggccagcctcctctgtcttccgagcaccgcttctcaggtcgcttcccaatctgaggaggctgtcgtgtccacaaccagtccagggggatgtgcgccactagctgaggacgccaggcccggcgacaccacaaaggcttggccatgcggaatgtgccctcaagagcacacacttcgggtagagggcacttgcattgagctcttcagctttttaaatccactgtagttcatgagcctgtgtgacataattacttttacattttatattgtcaattagtttattggcattttcaatcttttcaactattggctatgaaaatatgaatttaacgtaacattcaaatgagtattaaagaaaaataaagtagaacttcattagagggct

SEQ ID NO: 76412 - DNA, 867 bp, Homo sapiens
gaagatttgatattttcccaccataaagaaatgataaatatttgaggtgattgatatcctaaataccctgattcagttattacacattgtatgcgtgcatcaaaatatatgtaccccatagatatgtatgattaatatgtaacaataaaaaatgaaagaacatttctcaataaattggcaaaattgaaaattttaatcatatcaaaaagtgtggagaaacagtatcatacactattgctaggaatgcaaattactagagccattttggagatcagtgtggcagtatcatttaacaattatttctaattatcaatgataactggcatagcaactcttttccggttatctcccccttctttctgacttctctttaattctttgcaatttgtaacccacaactaaccttttcgcctaaagaattgctcgggcaaaaagagaaaattctttcaatgtccctttgaaaattcttcagcaacatgactgattaacatgagtggggtttgttgttgtttaccctacacactctagaaaccatcagtaaaattgtaaaattgtgttcagagacattcagtaagagtacgactaggcgtggtgtggttgctgacgcctgttatcccactactttgagaggccaagccatgaggattgcttgagtccaggaatttgagaccagcctgagcaacacaggaagaccctatctctaaatttagctgggtgtggtggtgcatgcctgttgtcctagctaataaggaggctgagatgggaggtttgcttgagcccaggacttcgaagttatagtaagctatgaatgctgcactctacgctagcctgggcaatgatagaatgagactctgtctttttgaagga

SEQ ID NO: 76413 - DNA, 798 bp, Homo sapiens
agttcaaaacgggtcataaagcagtggagaaaactggaaacatcagcaatgcttttggcccaggaactgccaaggaatgtacagagcagtggtggttcaagaagttttgccaaggagacgagggccttgcagatgaggagcggagtggccggccattggaagctgacaatgaccaattgagagcaatcatgctttaaaattggtgaggatgtaaagtcatgaagagggaattggtttaggggcaacacacctctgagagtgccctccagagttgtgtgacacagtggcccagagagagtgtagaatctccagggctatccaaaacactaaattctttggtacttattcattgaatcaatggagagactttagggatggcatttggtacagatctgtaagtaatgtatgaacatccttggtctctaatagcagtaacgacaattttaatcatcataattatttagcctgtacctgctctgtgcacagatcctgtgccatgtgccctgtcacacttaaccgttacaagagcctgtgaattacagatgatattcctattttatagaccaggaaactaaagctcggagagagtcagaatctctgatcttacgcagtgtcttggtctgctccggctgccataacaaagtatcacagaccgagtggcttcaacaacaggcactgatcaggcactgattgcctaatagtcttggaggctagaagtccagggtcacctgttgaaaggaggactggtttcccctgaggcctctcaccttggctggtaggtggccgtctgtgtgtatc

SEQ ID NO: 76414 - DNA, 534 bp, Homo sapiens
cctcccaagttcaaggcgattcttgtgcctcagcctcctgagtagctgagattacaggcgcccaccaccacgcctggctaatttttgtatttttagtagagatagggtttcaccatgttggtcaagcttatcttgaactcctgacctcaggtgatccacccgcctcggcctcccacagtgttgggattacagacgtgagccaccgtgcccagccagagaaaatcttatatttgacttgaaaatctgaacttaaaaggcaaccaaccagagaacctgaggggtaacggaaggacagcaaaacacagaggcctggccccagtaggggaatcgggtgtaactcggaagaaatgctgacggagctcttaccatgtggcacgcgcaggagcatgctggcctgttttactcagccccggccctggccacagagaggacgggaccttccccaagtgaagtgggttcttcagttgtggaaaaggccttgccacccactgccaagcattcccttagctccccacagggcacggagagccagga

SEQ ID NO: 76415 - DNA, 496 bp, Homo sapiens
taaaaagttaaaaaaagttttttaaatagaaaaaagcttttgaaataaagacataaagaaaggaaatatttttgtacagctatatgatatatttgtgtttctgaggcagggtcttgctctgtcacccaggctggagtgcagtggcaccatcacggcccactgtagccttggcctcctaggctcaatgcaatcctcctactagagcctccggattaactgggaccacaggtgcataccacgacacttggctaatttttatgtttttttaaagacagggtttcaccatgttgcccaggctggtctcaaatgcctgagctcaagcaatctgccagccttggcttcccaaagtattaagctaagtgttactacaagagtaaaaaagttaaaaaaaaattttaagtttacacagtaaaaaagttataataagctaaggctaattattattgaagaaaacatttttatataaagtagcctaagtgtacagtgtttataaagt

SEQ ID NO: 76416 - DNA, 714 bp, Homo sapiens
gaggcacatctagcctcatcatgcaaaatgagagtttaatattaatccactcatctgagtctaattcaacataaaacataccccaatctaacgataaagcctagaactgctgatataccatacagtaacctcctgagtcttgtcttttctgcagcagtaactatagcaataaaaggttgggggagagtataaatatttaaggaccaaaataaatctttaaacgttgaacaaccaggttatgtgatgggttaaactggcgactggtcccgacatggcagctcgtcgaataatgatagaaacagcaaaaccttggccattcctttcctatcagtgcagcattagtgcatgtcagctttgtaataacttaactagctagagctagcagatggtgtttttatggccctatataaacagtattaagtcattttaactctttctccataactcaggttttcaatctaggctgcagttgtccacctcttatcctctgagatgctcatgaggaagagtactaacatttattgagcacccgttatataccagccacttctcatagggatttattaactccaatttacagagaacagctactaggggcagagccaagatttgaactgattgtttgattccattgctgtggttcctcccactattagcatatcattctgaacctctgttttcattgattaaatgcacaggaaggagaaaagcagc

SEQ ID NO: 76417 - DNA, 826 bp, Homo sapiens
agcatgaaatgcctggcaacagtctttaaagaggaaaaattacatgtggaggaatatatgcattaacacccgatacattaatatgtatttaagctattattattatctttaagagttgctacagatcacttgttttctgcgtgtttgccgtggagaggggtgactgcgtgatcatgggtggagtccttgcacctagattaaggaattgtatgattaaatgaaagtctggtgacctcatgtggtcctccacacttggatatatcagggatctgggagataaagtgtgtttctcccccaggtgactgaagaagaggatgcccaacaagtagggccaggtttatgaaagcaagaccaccctatgcataatgaaatccaactgtgccatactttttggacaaatacttattaacaagctcatgtaaaatgtttgtatgacttattctataatctcaataaagtcctagttctttctgccctgactacaccttgtatgaagggtttgctcagatacaataatattctaagctgggattctaatatcttttagttgatatcaggcaacaagaaatcttagcatcaatgtctggatagaggactttgtgggaatcaagccacaggtgccatctctaagggttaagagtgaattacattttcaaaacctttctatggaatgggtgggggtttccacaatagtgtcacaagtccaaataacttgaatattattgtgactggagagcccattatctaatgaacaagcctacgtgtaaacactcacttctagcacgcgtcctgctagttggcaaagcatctgatttcgatctctata

SEQ ID NO: 76418 - DNA, 469 bp, Homo sapiens
aaagggaagaatccatcccctgcgtgtctctcctccatgccccaccttctggggtcagagatccaaggcctcattgggcagccctggactccaaggccccgtcaccccagaaccatttgagattcaatgcctgtgtccagctcccaggagtccaaccgtgaaatccacaagtgcaggccccaccctgtcctgcagttctctttcccttatgataatgtggttgagtcctttgtcactccctcctcctgctggctgcagaaatgacctcagcccaggccagagaccccagctctggcaaggcctcttgtggtcggccaggcccaggctgaaagccaagcagaatcaggcaggatctctagcgggagggaaacctgataggacctttgtcagacttttgttgtgaggctttggttttaggagtgatgagggaaataaagtggaacagaaattgatgactaaaaaaaaaagc

SEQ ID NO: 76419 - DNA, 867 bp, Homo sapiens
gagtctttcatgaacactttgctcctctatgtctcatttatgcaaaattcctggtgactctccactaacatttttaaagtgaaagcaaactttcactttaaaaaaagtgagcgagaggatcccttgagcccaggagttcaaggccagtctgggcaacatagcaagaccccatccctaaaaaaaaaaaaataagttttattaaatgtggcactttcccctagaagggcagtaaccccaggaaccagtctgcctcttttcgaataaaggagactttttaaaaagaaaaaatttctttttagggtggggtgctctttatctagcatctttccttcctccttctctctgcaaaattcaacattcatgacagagggccacaccaaccacgggtttatagagagaggaactgaacagctgttgattcccatctggaatatatttaatgtttgcctgcttgtggagcatggtatttaaagggtgtggatggatgaatgtttaaaaaaaaaacacacaaaactatgcacaagctgtatgagagatggctaggtccatctatgattttttttaaaagaagaattttaataccttttctttgacagtgaactgtatttagaaatatgatctttattgtgaaatgctcataaaatgcaaccaaactgcatgtttggccataggctagaataatatattaaaagaattaatggaaagtagtattgtctgggtttcatgaaactattccagataatattctccagcaaaacttatggtaacctgtattttataatgtcaatctgctggaccaagttaatttagaaaataatttttaatcctcagattttcaaaacttggactactgcaagactgatatgt

SEQ ID NO: 76420 - DNA, 364 bp, Homo sapiens
agcctcattacagctggacagtttcaaatgttctcaatctccaccaaacctcctctcatactacctcagtggagagggagatggatacctcattattgttgagtttggggtggaagtctagactgcccatttagtcaacatagacactgcatgtagggtaagagaagaatcttgctaacccccggcagggatgaaactcctagattcctgctcagacttcttttacactactctgggtgctggaaggagagggtgttggaataccctggcaaggatcagcgtctgggcttgccactttgcctttgcaggtgtacatggggatgggaccataattctttttgtggtgttcaacgagagcaaaatg

SEQ ID NO: 76421 - DNA, 453 bp, Homo sapiens
acattccctgctagcccctaaatctttcaggatccatgtccccctataaaataagcatatgccagttgtaaccctggctctgcaacctcagtttaagacgtaacactgagttctattgaatctgacactgacaatgttgattacaggtttatcttcccaggtacagaacaagaacatgagatcaagcactcttcaggctatcctgagatggctgcataattgactctttcctccctttcttctctcctgcctgccttctccccttacatactgagttcccaaaaccctctttggaaagcaggggtcacagtcatttctgtggcttgtgttttttccgggggtgtcgtcaaattgtggctccacaaagctctattgatgtgggcacttgcctcagtcggtggctcattttttgtttttttgttttttgtttgtttaacagctataaatacagat

SEQ ID NO: 76422 - DNA, 323 bp, Homo sapiens
ctccctcttctttcaagctatcagatttgcatggaagtctaaagcctctccctgcctgctctggctgcctaccctcttccccatctcttttaatcccatctcatcttggcatctgtctcttggatgactcaaaagaaaacaaatatgtgggtttttttttctaattatacctatcttttcccccactgacattctaatacttgccctagacccaggaagcatgtcccacttccttcttcctccctatgagttgagaattaccattagacaatagtggctaaattatttaacactgattaattagccaatatttggggggcaca

SEQ ID NO: 76423 - DNA, 651 bp, Homo sapiens
ccccggtgggagacgggggtctcagcatcagaagagcgggaggggagggaaccatccttggtaaggaagaagctgaaagaggacaacaccgtatttcaggccagttgaaatcgtgggtgtcagggcaagggaggcgtccgcagaccagagttgtgatggaccgttctccaccatgtgatgttcattttctccactgagattaaaaaagaagaggaaaggaaagaaggaaagtgcacaacctccttgaaaagacagctcctcctgccgaaaatgtgttgcagactcggtcagtcaggtggacttaattggaaggcactttctttttgatggaaaaagaaggagaaagatttgtaaaattgaaccaatgttaacacactcgcatcccacaaggagctgagttttgatctgcttcatgctgagagagcgggaaggagaccagagtgtgtctcagactttctaagctcagctgtaagttataaagatccacctacaacttcttgcaattctcacaattacactacataaaatgaaaaagaaggccgggcgccgtggctcacgcctgtaatcccagcactttgggaggccgaggcgggcggatcacgaggtcaggagatcgagaccgtcctggctaacacggtgaaaccccgtctc

SEQ ID NO: 76424 - DNA, 730 bp, Homo sapiens
ttcttatctctttctccggagtccttagtcatgtgtggtttagccattagcacatgatttgagtaagtgccatagctaatttcataaagtttctgacccaaggatccttattgttaatctgtaccagtgctgcactaattgctggcttgcagagaaataagaaacttgttttagaatatgttgatatttttattttccttcatcgaaaaattcttgttttgacaaactgtcagtgaactaagcagtgtgctgggtgatataggtaatttacagcctggtacaagcccccctttgtctcattgtgggtcactaacagttcacagactggcccaagagctgtggaccacactgatattgatactaaaccattttttaattatagataaaaacatgaagcccagaggggtggaatgacttcccagatcctaacacttagtttgtgacagaaccaaatatagccttcctgactcctgatttgtggtttattataccttgcatcagttcaagttgttcccccactgggatttaggattacacttattatttacaggagtgcttggataaatagtaagcttaaggttatatcgcagcacttttaaataatcaacttcagttggaagaggaaattattcagcttctttcatcttgtactgacaattaggtagcaaacatcatgaatctatactgttttatgtaatttgttaaaagaaaataatacctgatttgtaaa

SEQ ID NO: 76425 - DNA, 1001 bp, Homo sapiens
cttgctagtaagggaggaggtcacctactaagacactcataacagaataagtcatgccaagaactgagtgtagaagggcactggacccagatgaaacaacatctgaaagattgaaatcctcaagcaggaagaagatttgatgcctcaagcagagggaagccaggctagttctctgacccgtgagacagtgcataaatatcttaatggcagacacactccggctcaccaccaggcccagtcatgatcccagaagaatgccctgctactctggtgcctcattccaatgccagcaagccctgcctaccctcctggcaacattcctctccccttcctagtatcccagacacctgcctgacccagaagtcattgtcctcagacttggaggtcagccctcgcccactagatcttgcaggtcagctgcctcccacacagatctcaggctcttggaatggcctccacacaataaccctgtttgtgctgtgatttctgatggatgttgtgttgccagggacaactctgcacaaggattgatcagcctcatgagaatgcagtctctgggctgcaggcattactgcctgggatcaccacttgcttctgttgcccttcccaaaggaaaaagaattcatgtcccaacagaagaggtttccagttgtggttttctggaaatgtgcaacaaaggcagttaccaatggagacacagcctgaagctctccttggccacatcttcagccccctgcctcagggagagagagagagaaagggtaggggccctggagctgccccttgcaaaggtccttggaagctggcaatgtgcctctcagagtgcccaccaacctcctttccctaccaagctccacgtaagcattaaattaattaatacactaccaaccagatctcaaactagaagccagtaagatccagcatgaacacttagaaggatcccttctttttgaaatctgaggaatttggatgcattgaaaaataaatgaacatatcataac

SEQ ID NO: 76426 - DNA, 239 bp, Homo sapiens
gagatgtaagtctcccctgaaaatgtattattaaccattagtagcgttaggatgtcctttggttaggtttctcactgtctccgaaaaggcaaatttctagagaagctaggagctattgctgttaggttttttatggactcatttcctctcttcctgtcatctaatgtactgtccagtagaagtataatgtgagccacataggtaatttaaaattttctactaggcacatttaaaaagct

SEQ ID NO: 76427 - DNA, 859 bp, Homo sapiens
tcctttcaatcattccccatcatactgatcaaggtacctgctttcccctcatttaaagaaaattcaagtctctaaaaggactaaatatcttccacctagggagacacatgctcatttaaattggtccactgcaggctatgataaagtggtcactaggatccttcgaatgactggagtacgtatcatcgagtataagaagaagtgctttctgaatgatgccgtcacatgatccatgatagtgaagacataaaaaataacagaatattgcaaacttctttattttggcctgtgtaatcacagatttacctacaacaggataaatgaattcatattatgaaactgaaacacactggtaaatataacatgctccatataaatggtgcaagagaatccccaaaggcaagaggagtgcaggaggacccaggccaaaccattcctccgtggcagtcttgttcctcagtccttctgcttatatgggtggggaggcgaaaggagaaaggaatgaggacaggaaaaaagcaacagctgtgaaagatggggccaagcagacgtgaaaactgaagctgtactcaggccattttccttctggggaatcttaacaccaagctgcacctaacaattgttctacccaagcaacactgcaagaaagcagacatgaggaggatagaggcacaggaggttaatggaaggccctcactgaaagccctggcccacagaatgtgcctcccaaactgtgtgaggcctgcgagcgttctgtgtacaagagaccagccctgtctcaggtaccaagcggaaatagtcaatagcccatcaaccgacaggggcagcctggggcacctgctgattcttgcagtgatga

SEQ ID NO: 76428 - DNA, 414 bp, Homo sapiens
gtgacttgagcatctacagacgttatcttcagagggttctggaacccatcccctttggatacctgtaaatctttattttttgacctcttcagtgaagaccaaggtcaagaagaggttgctaaagacttgtttcagattatatcttagatttaacataccacttggtattactggagttttactacattgaagcttaatcttcgtatctgtaatttagtgttgctcccacgtactgtgctgtaggtctctcatttccttgcctgaataaaaaccccaagttagccatgtaaaatttttgtctttctagactatcttatatttctcttttgttttctacaatattccagttactagctaaacaaagaatagtctttgagaaagagtgcttttgctctcaattcagacatttgttta

SEQ ID NO: 76429 - DNA, 197 bp, Homo sapiens
aaatccaattttacggaagacaaaaaagagggtgggtttcataactattctacaagtggccactatagaaattcttcaccaagaaagctcctgttaggcctttaaaaatgtgtttctgttaagacacaactagtttcgtaagtcgctctattgcataacatgcggaatctctatatccagtgtgctgctaactagca

SEQ ID NO: 76430 - DNA, 318 bp, Homo sapiens
atttatttcatttgtgtcacaatataaaattcttcttgttaggacttgtgtacaaactgtatttaaaaacatatttctgaaagaggaatttttcagtggtcttatctggactacctttcaacctgtacctatcttaggaccaaagccagattttcagaatgaatcactaattcagtgaacttgagtagattttagagattacctgtctaatgctctcattttatatatggacaaaatgaaatatataaatgtgaaatgatctctacaaggtcacacaacatttagagacagagatggaactaaaagcaaaatattaga

SEQ ID NO: 76431 - DNA, 450 bp, Homo sapiens
aatccagactcagcacaaataaccaattaaacccaccttcaaaggcagacaaaaatcatatcactcttttatgcttctaccagcatttgaaccacctccatatagacataattagttagaaaaagtcaggttaatatttttgtcagtgtctctgtgtgtgtgtattcaataagtttgcaaatatatctttggctcctgttaaggagacccaaactataatcctgctaaatgtccaagtctcctgtttatgactatgtaaaatcggaggctacagatgccctaaataccctcctatgccaaaatatctccaccatcacccctgcctagggtgtcagttcccaaactggaatttcccgcctcactcatttctctgggttaaagtccagcctccaggaaggcccaagtaaaataccagattaatctgaaaaggaccaacttgttaataactca

SEQ ID NO: 76432 - DNA, 471 bp, Homo sapiens
caaatttcttccaacttagtttaagtgtgcagctcatgtgactggcattctgataaggctaaagccatcaccggttatcttccttcctactgattcatgagttcctgctatagagtttctgctacatgtagtctttggcaataaatactactgagttttgggagcataattttgtacaggataactgccttttaaatttggtgggtataaggcaagtattgtaattaccttgggtgttttattgactctccagaccttttgtaagttgaggcacaccatagagttattgaactaatttaacttctgaagtgccaaatgaatgtgttgtatccatatccaaaaagagacagccaggctgcagctgctgaaggaatcctgagaggcattaagaacatttctgcctgtgagtgaatccaataagaaactgggaagggctttaattttattaaacttttaccttattacagtgag

SEQ ID NO: 76433 - DNA, 510 bp, Homo sapiens
ggctaaccggctttcaggtcccctctggcagctgggagttttccttctatagctcaaaattcttttctgccttatttactttctggtgtcgacatatcttattcctttgttgcaggacaagaacttggaacttgctgagctggggatggtgggagtaaaagagttgtaaccttcccttctgctccccaaacaatgtgagagaagaaaccattggacgccactctctcctgttagcccaactgccagagcgaaaaagttgtgacgtcactggcttacccagcaagctaactgtgggaggtgggagtaaaagagctgtaaccttctctcccactcgaggaactaccctcctgcttgacaaattacaggagcgaaaaagccacgtatcagaggagacttcagggtatgtttatatctgtattacaggatttttaaaagattgaatgaagtagcatttctgaaatgtctggaacataatgtttgaaatagaataaaatatcaataaatggtgct

SEQ ID NO: 76434 - DNA, 179 bp, Homo sapiens
gacacgttgtcattgataaaactgacatcaccttagaggcagaggacaagtcctcacattgtttctgggacaggggcatggaaaaagagaagctttcactaactccctttatgttgtgtatctcaatggctactaaatacacctctctcctttcttttttcttttctttttcatgccac

SEQ ID NO: 76435 - DNA, 3831 bp, Homo sapiens
ctcgcgagaatgccgccagctccggaggcgactgcggcaggagcccgagctctcgcgcgacaggcaccaattcgttagacgcgcgctgcaggagcgcggaacatggcgcggcacgggccaccgtggagtcggttggacgcgcagcaggagcgcgacgtgcgggagctcgtccggggtgtcgccggcctccaggacgaggcagaccccaacttccagctcgccctaaacttcgcctggtccaacttcagatttcatcgtttcttggatgtcaacagccacaaaatagaaaaaacaatcgaaggaatttatgaaaaatttgtcattcattctgatctaagcaaagctgctagttggaagagattaacggaggaatttctaaatgcaccacttcccagtataaaggaaataaagacagatgcacattattccatactgtcacttcttctgtgtctgtcagactctccttcaaacagcagttatgtggagacaccaagaaataaagaagtggaaaagaaagatgatttcgactggggaaaatacttgatggaagatgaagaaatggacattggtccgtacatggacacaccaaattggtctgaagaaagtgaagaggaaaatgatcaacagcccttaagcagagaggactctggaattcaggtagacaggacaccgttagaagaacaagatcaaaacagaaaactggatccttgtatcagttggaaagatgagccagatgaccgaagctggctggaacatcatgtggtccatcagtactggacagccaggccctcccagtttcctcatagtttacatttgcactctaatttagctgctgtctgggaccaacacttgtacagcagtgatccattgtatgttccagatgacagggttttggttactgagactcaggttattcgggaaaccctatggttactttcaggagtgaaaaagctctttatatttcagttgatagatgggaaggtaactgtgagaaacaatattatagtaactcatttaacacatagctgtttacgatctgtgctggaacaaatagcagcatatggccaggttgtgtttcgactccaggagttcattgatgaagtcatgggacacagttctgagagcatgctgcctggaagtgggtctgttcctaagaagtcaactgaagctccctttagaacctaccaggctttcatgtgggccctgtacaaatatttcattagtttcaaagaggaacttgcagaaattgagaagtgcatcatcaataatgatactacaataactcttgcaatagtggtggacaagttggcacctcgattgtctcagctcaaggttctgcacaaagtgtttagtactggagtagcagaagttccacctgatactcgaaatgtcgtccgggcctctcacctgcttaacaccctgtacaaggccattcttgaatatgacaatgttggagaagcctctgagcaaaccgtctccctccttttctctctctgggtggaaacggtgcggccttacctgcagacggtggacgagtggatcgtgcacgggcacctgtgggatggcgccagggagttcatcatccagagaaacaaaaatgttccagttaatcacagagacttctggtatgcaacttacacgttatatagcgtatcagaaaagacagaaaatgaagaaaaaatgagtgataacgctagtgcgagttccggcagtgaccaggggccctccagcaggcagcacaccatggtgtccttcctcaaacctgtcctgaagcagatcataatggctggcaagtcgatgcagctgctgaagaacctgcagtgtgcggagagcaccacctgccaggcaggagccagagatgcagaaagaaaaagtttatacactctctttctggaatctgtacagtcccgtcttcgacatggagaagattccactccacaggttcttactgagcaacaggcaaccaaggagaacctgatgaagatgcagtccattgctgaaagccatcttgaactggatgatgttcatgatccactgcttgccattaactttgcaaggatgtatttggagcagagtgactttcacgagaagtttgctggtggtgatgtatgtgtggatagatcatcggaatctgtgacatgccagacttttgaattaacgctgagatcctgcctctatcctcatattgacaagcagtatctagattgctgtggaaatctcatgcaaactctaaaaaaagattacaggttggtagaatacttgcaagctatgaggaattttttcttaatggaaggaggagataccatgtatgacttctacacgtcaatttttgataaaataagagaaaaggaaacatggcagaatgtgtcttttcttaatgtccaactccaagaagcagtaggacagcgttatcctgaagatagttcacgtctatctatatcttttgaaaatgttgacacagctaagaagaagctgcctgttcatatcttagatggtctgaccctcagctacaaggtcccatggcccgtggacattgttataagtttggaatgtcaaaaaatttataatcaagtgtttcttctcttattgcaaataaagtgggcaaaatatagtctggatgttttactttttggtgaactggttagtactgcagaaaaaccacgacttaaagaaggccttatacatgaacaagacacagttgctcagttcggaccacaaaaagaaccagtaagacagcagattcatcgcatgttcctcttaagagtgaagctcatgcatttcgtgaacagcttgcacaactacatcatgaccaggattctacacagtacagggctggagtttcaacatcaagtcgaggaagccaaggatttagatcaattgattaaaattcactataggtatctgtcaaccatccatgaccggtgtctgctgagagaaaaggtcagctttgtgaaagaagctatcatgaaggtgttgaacttggctctcatgtttgcagacggttggcaggcaggcctgggcacttggcgaatggaatctatagagaaaatggaatctgattttaaaaactgccatatgtttcttgtaaccattttaaacaaagccgtctgtagaggatcctttccccatttggaatctctagcgttgtcactcatggctggcatggaacaaagttaaatgtcttcagcgtaataaatatctccgactttgtcatcatacatgtacatttccaccatgtgcagctgaaaagtgaaaatatttttattttggtttatttgtaaaacttgtccacagtcagcctggcacagtcgctcatgcctctaatcccagcacgatgggaggccaagacaggcagatcacttgagcccaggagtttgaggccagcctgggcaacatggtgaaacccggtgtctaccaaaaatacaaaatgtatccagacatggtggtgtgtacctgtagtcccagctactcaggaggcaaagatgggaggattacttgagcccaggaggtcaaggctacagtgagccatgattgcactactgcagtgcaacctgggtgacagagtgagaccctgactcagaaagaaccacttgcccacagtccagacagatggattgtaggtgggttttctggagattagtagatactgtatagagttgtatacataaaattgtgtcagtagtacaaagtgtatataggctgtttactcttacatttcctactgtaagatacagatttatggtactgatacctttaaattatatcatattttgaaaatgtaattactgatattcaaaataaattaaaggacttaaaatcaaaaaaaaatcc

SEQ ID NO: 76436 - DNA, 473 bp, Homo sapiens
agacagagtcttgctctgtcacccaggctggagtgcagtggcacaatctcgactcactgcaagctccgcctcccgggttcatgccattttcctgcctcagctcccagctactcaggaggcaaagatgggaggattacttgagcccaggaggtcaaggctacagtgagccatgattgcactactgcagtgcaacctgggtgacagagtgagaccctgactcagaaagaaccacttgcccacagtccagacagatggattgtaggtgggttttctggagattagtagatactgtatagagttgtatacataaaattgtgtcagtagtacaaagtgtatataggctgtttactcttacatttcctactgtaagatacagatttatggtactgatacctttaaattatatcatattttgaaaatgtaattactgatattcaaaataaattaaaggacttaaaatcaaaaaaaaatcc

SEQ ID NO: 76437 - DNA, 482 bp, Homo sapiens
aactgctggagaggctgaggctgcagaatcacttgaacccaggaggttgtggctccagtgagctgtgatcatgctgctgcactccagcctgggtgggtgacaaagtgagtccctgtcaaaaaaaaaaaaaaatgtcctgggcatactgtcatgaatatttttctagacttaaagtacactcgtctttttttaatctcatttcaggttactttcaggagtgaaaaagctctttatatttcagttgatagatgggaaggtaactgtgagaaacaatattatagtaactcatttaacacatgtaagttatttgtatttatggtaatttaagaaataggatttatgtaaactagtaatataattttagaacattttacaatattaaaattgctattgaactcgttcttgcttcctcacatgcaaaaaaaagctaacttaaaaatatttaatatccaaaaagaaaaattgagttgtgcatctttata

SEQ ID NO: 76438 - DNA, 310 bp, Homo sapiens
ggtttaaagatggggtcttgctatattgcccaggctggtcttttgagaccctgactcagaaagaaccacttgcccacagtccagacagatggattgtaggtgggttttctggagattagtagatactgtatagagttgtatacataaaattgtgtcagtagtacaaagtgtatataggctgtttactcttacatttcctactgtaagatacagatttatggtactgatacctttaaattatatcatattttgaaaatgtaattactgatattcaaaataaattaaaggacttaaaatcaaaaaaaaatcc

SEQ ID NO: 76439 - DNA, 3911 bp, Homo sapiens
aattattgttcactttttcctttgtgtataaaattataaatattaatcatattattactttgtcttctactaaacatactgtttaaaacaattgcaaaagaagtattttacagcgagagggaaatgaatttgaatgtttacagaagaccacctttgaataattgcagtttgcttgtgttgtagagctgtttacgatctgtgctggaacaaatagcagcatatggccaggttgtgtttcgactccaggagttcattgatgaagtcatgggacacagttctgagagcatgctgcctggaagtgggtctgttcctaagaagtcaactgaagctccctttagaacctaccaggctttcatgtgggccctgtacaaatatttcattagtttcaaagaggaacttgcagaaattgagaagtgcatcatcaataatggtattaaatgttcttcatctttactcatactacacgtaactcataatttgaatgccacttagagtttttattatataagatttgaaagttgcctagcagataagtagttctcgtgaatgcttcttttaaaattattttaaatttatatttttaagccattcatatctctaaaaatcaaaaaactacagaagatttagaatgaaaaatctaaattattcttcctgcaccagtaccccagccagtcagttctcctctccagagacagccaggtccttggcttcttacgcatccttccagaaagagtttcaacatacatgagcagtgcatatacatatacgcatacctagcagtcattacactgctctcttcaaatttttccagtttaaattttgaggataataccatacatatatgaagagcttctgttttcctttttacaaattgagtgtttcatcatatggtcgtgtcatagcccagtccccttaatggatttaggttgttcccaggcttttgctattgccagtagtgctgcagtgataatcacttctacatatccgttatcgtacacaggcagtgagttatctgtagggtaggttctttttttttttttttcatttgagacggagtctcgctctgttacctaggctggagtgcagtggctcaatctctgcttactgcaagctccgcctcccgggttcacgccatcctcctgcctcagcctcccgagtaactgattacaggcacctgccaccatccccagctaatttttgtattttcaatagagacaggctttcaccatgttgaccaccttggcctcccaaaatgctgggattacgggcataagctgggattatactgcatctgaccatgtgggatactacaataactcttgcaatagtggtggacaagttggcacctcgattgtctcagctcaaggttctgcacaaagtgtttagtactggagtagcagaagttccacctgatactcgaaatgtcgtccgggcctctcacctgcttaacaccctgtacaaggccattcttgaatatgacaatgttggagaagcctctgagcaaacctgaccagggaaccctgagagctgaccgtgcacactctctgcctcaggtctccctccttttctctctctgggtggaaacggtgcggccttacctgcagacggtggacgagtggatcgtgcacgggcacctgtgggatggcgccagggagttcatcatccagagaaacaaaaatgttccagttaatcacagagacttctggtatgcaacttacacgttatatagcgtatcagaaaagacagaaaatgaagaaaaaatgagtgataacgctagtgcgagttccggcagtgaccaggggccctccagcaggcagcacaccatggtgtccttcctcaaacctgtcctgaagcagatcataatggctggcaagtcgatgcagctgctgaagaacctgcagtgtgcggagagcaccacctgccaggcaggagccagagatgcagaaagaaaaagtttatacactctctttctggaatctgtacagtcccgtcttcgacatggagaagattccactccacaggttcttactgagcaacaggcaaccaaggagaacctgatgaagatgcagtccattgctgaaagccatcttgaactggatgatgttcatgatccactgcttgccattaactttgcaaggatgtatttggagcagagtgactttcacgagaagtttgctggtggtgatgtatgtgtggatagatcatcggaatctgtgacatgccagacttttgaattaacgctgagatcctgcctctatcctcatattgacaagcagtatctagattgctgtggaaatctcatgcaaactctaaaaaaagattacaggttggtagaatacttgcaagctatgaggaattttttcttaatggaaggaggagataccatgtatgacttctacacgtcaatttttgataaaataagagaaaaggaaacatggcagaatgtgtcttttcttaatgtccaactccaagaagcagtaggacagcgttatcctgaagatagttcacgtctatctatatcttttgaaaatgttgacacagctaagaagaagctgcctgttcatatcttagatggtctgaccctcagctacaaggtcccatggcccgtggacattgttataagtttggaatgtcaaaaaatttataatcaagtgtttcttctcttattgcaaataaagtgggcaaaatatagtctggatgttttactttttggtgaactggttagtactgcagaaaaaccacgacttaaagaaggccttatacatgaacaagacacagttgctcagttcggaccacaaaaagaaccagtaagacagcagattcatcgcatgttcctcttaagagtgaagctcatgcatttcgtgaacagcttgcacaactacatcatgaccaggattctacacagtacagggctggagtttcaacatcaagtcgaggaagccaaggatttagatcaattgattaaaattcactataggtatctgtcaaccatccatgaccggtgtctgctgagagaaaaggtcagctttgtgaaagaagctatcatgaaggtgttgaacttggctctcatgtttgcagacggttggcaggcaggcctgggcacttggcgaatggaatctatagagaaaatggaatctgattttaaaaactgccatatgtttcttgtaaccattttaaacaaagccgtctgtagaggatcctttccccatttggaatctctagcgttgtcactcatggctggcatggaacaaagttaaatgtcttcagcgtaataaatatctccgactttgtcatcatacatgtacatttccaccatgtgcagctgaaaagtgaaaatatttttattttggtttatttgtaaaacttgtccacagtcagcctggcacagtcgctcatgcctctaatcccagcacgatgggaggccaagacaggcagatcacttgagcccaggagtttgaggccagcctgggcaacatggtgaaacccggtgtctaccaaaaatacaaaatgtatccagacatggtggtgtgtacctgtagtcccagctactcaggaggcaaagatgggaggattacttgagcccaggaggtcaaggctacagtgagccatgattgcactactgcagtgcaacctgggtgacagagtgagaccctgactcagaaagaaccacttgcccacagtccagacagatggattgtaggtgggttttctggagattagtagatactgtatagagttgtatacataaaattgtgtcagtagtacaaagtgtatataggctgtttactcttacatttcctactgtaagatacagatttatggtactgatacctttaaattatatcatattttgaaaatgtaattactgatattcaaaataaattaaaggacttaaaatcaaaaaaaaatcc

SEQ ID NO: 76440 - DNA, 4780 bp, Homo sapiens
gcgaaaatccatctcggggggaaaaaaaatatgaaacaacataagtttgtgatagcaaaagattgggaaaaaatctaaatttcattaataggggactggttaaataaaatatgatacatcttagttaaactatcaggcatgtttaaccttcatgatacatattgccacaggagaataatttttaaccataatgttatactctaaagacatttccgtcgttttagaaataaaaagctgtcatccactcagatcttatacttgttagaaatatagaactcagatttcagatggctttgaggttccttatgtgtatgcatttgagctatgaagaagtttgaaggttaaggattatttaggtataactcatgttttctcaaaccaggaaaaaaattggggacataactgtcatggagttatctttactcaatctggtgtagaaagcatttcccaacctcagagatttatgttcttttttttgttttaaagacagatgcacattattccatactgtcacttcttctgtgtctgtcagactctccttcaaacagcagttatgtggagacaccaagaaataaagaagtggaaaagaaagatgatttcgactggggaaaatacttgatggaagatgaagaaatggacattggtccgtacatggacacaccaaattggtctgaagaaagtgaagaggaaaatgatcaacagcccttaagcagagaggactctggaattcaggtagacaggacaccgttagaagaacaagatcaaaacagaaaactggatccttgtatcagttggaaagatgagccagatgaccgaagctggctggaacatcatgtggtccatcagtactggacagccaggccctcccagtttcctcatagtttacatttgcactctaatttagctgctgtctgggaccaacacttgtacagcagtgatccattgtatgttccagatgacagggttttggttactgagactcaggttattcgggaaaccctatggttactttcaggagtgaaaaagctctttatatttcagttgatagatgggaaggtaactgtgagaaacaatattatagtaactcatttaacacatagctgtttacgatctgtgctggaacaaatagcagcatatggccaggttgtgtttcgactccaggagttcattgatgaagtcatgggacacagttctgagagcatgctgcctggaagtgggtctgttcctaagaagtcaactgaagctccctttagaacctaccaggctttcatgtgggccctgtacaaatatttcattagtttcaaagaggaacttgcagaaattgagaagtgcatcatcaataatggtattaaatgttcttcatctttactcatactacacgtaactcataatttgaatgccacttagagtttttattatataagatttgaaagttgcctagcagataagtagttctcgtgaatgcttcttttaaaattattttaaatttatatttttaagccattcatatctctaaaaatcaaaaaactacagaagatttagaatgaaaaatctaaattattcttcctgcaccagtaccccagccagtcagttctcctctccagagacagccaggtccttggcttcttacgcatccttccagaaagagtttcaacatacatgagcagtgcatatacatatacgcatacctagcagtcattacactgctctcttcaaatttttccagtttaaattttgaggataataccatacatatatgaagagcttctgttttcctttttacaaattgagtgtttcatcatatggtcgtgtcatagcccagtccccttaatggatttaggttgttcccaggcttttgctattgccagtagtgctgcagtgataatcacttctacatatccgttatcgtacacaggcagtgagttatctgtagggtaggttctttttttttttttttcatttgagacggagtctcgctctgttacctaggctggagtgcagtggctcaatctctgcttactgcaagctccgcctcccgggttcacgccatcctcctgcctcagcctcccgagtaactgattacaggcacctgccaccatccccagctaatttttgtattttcaatagagacaggctttcaccatgttgaccaccttggcctcccaaaatgctgggattacgggcataagctgggattatactgcatctgaccatgtgggatactacaataactcttgcaatagtggtggacaagttggcacctcgattgtctcagctcaaggttctgcacaaagtgtttagtactggagtagcagaagttccacctgatactcgaaatgtcgtccgggcctctcacctgcttaacaccctgtacaaggccattcttgaatatgacaatgttggagaagcctctgagcaaaccgtctccctccttttctctctctgggtggaaacggtgcggccttacctgcagacggtggacgagtggatcgtgcacgggcacctgtgggatggcgccagggagttcatcatccagagaaacaaaaatgttccagttaatcacagagacttctggtatgcaacttacacgttatatagcgtatcagaaaagacagaaaatgaagaaaaaatgagtgataacgctagtgcgagttccggcagtgaccaggggccctccagcaggcagcacaccatggtgtccttcctcaaacctgtcctgaagcagatcataatggctggcaagtcgatgcagctgctgaagaacctgcagtgtgcggagagcaccacctgccaggcaggagccagagatgcagaaagaaaaagtttatacactctctttctggaatctgtacagtcccgtcttcgacatggagaagattccactccacaggttcttactgagcaacaggcaaccaaggagaacctgatgaagatgcagtccattgctgaaagccatcttgaactggatgatgttcatgatccactgcttgccattaactttgcaaggatgtatttggagcagagtgactttcacgagaagtttgctggtggtgatgtatgtgtggatagatcatcggaatctgtgacatgccagacttttgaattaacgctgagatcctgcctctatcctcatattgacaagcagtatctagattgctgtggaaatctcatgcaaactctaaaaaaagattacaggttggtagaatacttgcaagctatgaggaattttttcttaatggaaggaggagataccatgtatgacttctacacgtcaatttttgataaaataagagaaaaggaaacatggcagaatgtgtcttttcttaatgtccaactccaagaagcagtaggacagcgttatcctgaagatagttcacgtctatctatatcttttgaaaatgttgacacagctaagaagaagctgcctgttcatatcttagatggtctgaccctcagctacaaggtcccatggcccgtggacattgttataagtttggaatgtcaaaaaatttataatcaagtgtttcttctcttattgcaaataaagtgggcaaaatatagtctggatgttttactttttggtgaactggttagtactgcagaaaaaccacgacttaaagaaggccttatacatgaacaagacacagttgctcagttcggaccacaaaaagaaccagtaagacagcagattcatcgcatgttcctcttaagagtgaagctcatgcatttcgtgaacagcttgcacaactacatcatgaccaggattctacacagtacagggctggagtttcaacatcaagtcgaggaagccaaggatttagatcaattgattaaaattcactataggtatctgtcaaccatccatgaccggtgtctgctgagagaaaaggtcagctttgtgaaagaagctatcatgaaggtgttgaacttggctctcatgtttgcagacggttggcaggcaggcctgggcacttggcgaatggaatctatagagaaaatggaatctgattttaaaaactgccatatgtttcttgtaaccattttaaacaaagccgtctgtagaggatcctttccccatttggaatctctagcgttgtcactcatggctggcatggaacaaagttaaatgtcttcagcgtaataaatatctccgactttgtcatcatacatgtacatttccaccatgtgcagctgaaaagtgaaaatatttttattttggtttatttgtaaaacttgtccacagtcagcctggcacagtcgctcatgcctctaatcccagcacgatgggaggccaagacaggcagatcacttgagcccaggagtttgaggccagcctgggcaacatggtgaaacccggtgtctaccaaaaatacaaaatgtatccagacatggtggtgtgtacctgtagtcccagctactcaggaggcaaagatgggaggattacttgagcccaggaggtcaaggctacagtgagccatgattgcactactgcagtgcaacctgggtgacagagtgagaccctgactcagaaagaaccacttgcccacagtccagacagatggattgtaggtgggttttctggagattagtagatactgtatagagttgtatacataaaattgtgtcagtagtacaaagtgtatataggctgtttactcttacatttcctactgtaagatacagatttatggtactgatacctttaaattatatcatattttgaaaatgtaattactgatattcaaaataaattaaaggacttaaaatcaaaaaaaaatcc

SEQ ID NO: 76441 - DNA, 3530 bp, Homo sapiens
aattattgttcactttttcctttgtgtataaaattataaatattaatcatattattactttgtcttctactaaacatactgtttaaaacaattgcaaaagaagtattttacagcgagagggaaatgaatttgaatgtttacagaagaccacctttgaataattgcagtttgcttgtgttgtagagctgtttacgatctgtgctggaacaaatagcagcatatggccaggttgtgtttcgactccaggagttcattgatgaagtcatgggacacagttctgagagcatgctgcctggaagtgggtctgttcctaagaagtcaactgaagctccctttagaacctaccaggctttcatgtgggccctgtacaaatatttcattagtttcaaagaggaacttgcagaaattgagaagtgcatcatcaataatggtattaaatgttcttcatctttactcatactacacgtaactcataatttgaatgccacttagagtttttattatataagatttgaaagttgcctagcagataagtagttctcgtgaatgcttcttttaaaattattttaaatttatatttttaagccattcatatctctaaaaatcaaaaaactacagaagatttagaatgaaaaatctaaattattcttcctgcaccagtaccccagccagtcagttctcctctccagagacagccaggtccttggcttcttacgcatccttccagaaagagtttcaacatacatgagcagtgcatatacatatacgcatacctagcagtcattacactgctctcttcaaatttttccagtttaaattttgaggataataccatacatatatgaagagcttctgttttcctttttacaaattgagtgtttcatcatatggtcgtgtcatagcccagtccccttaatggatttaggttgttcccaggcttttgctattgccagtagtgctgcagtgataatcacttctacatatccgttatcgtacacaggcagtgagttatctgtagggtaggttctttttttttttttttcatttgagacggagtctcgctctgttacctaggctggagtgcagtggctcaatctctgcttactgcaagctccgcctcccgggttcacgccatcctcctgcctcagcctcccgagtaactgattacaggcacctgccaccatccccagctaatttttgtattttcaatagagacaggctttcaccatgttgaccaccttggcctcccaaaatgctgggattacgggcataagctgggattatactgcatctgaccatgtgggatactacaataactcttgcaatagtggtggacaagttggcacctcgattgtctcagctcaaggttctgcacaaagtgtttagtactggagtagcagaagttccacctgatactcgaaatgtcgtccgggcctctcacctgcttaacaccctgtacaaggccattcttgaatatgacaatgttggagaagcctctgagcaaacctgaccagggaaccctgagagctgaccgtgcacactctctgcctcaggtctccctccttttctctctctgggtggaaacggtgcggccttacctgcagacggtggacgagtggatcgtgcacgggcacctgtgggatggcgccagggagttcatcatccagagaaacaaaaatgttccagttaatcacagagacttctggtatgcaacttacacgttatatagcgtatcagaaaagacagaaaatgaagaaaaaatgagtgataacgctagtgcgagttccggcagtgaccaggggccctccagcaggcagcacaccatggtgtccttcctcaaacctgtcctgaagcagatcataatggctggcaagtcgatgcagctgctgaagaacctgcagtgtgcggagagcaccacctgccaggcaggagccagagatgcagaaagaaaaagtttatacactctctttctggaatctgtacagtcccgtcttcgacatggagaagattccactccacaggttcttactgagcaacaggcaaccaaggagaacctgatgaagatgcagtccattgctgaaagccatcttgaactggatgatgttcatgatccactgcttgccattaactttgcaaggatgtatttggagcagagtgactttcacgagaagtttgctggtggtgatgtatgtgtggatagatcatcggaatctgtgacatgccagacttttgaattaacgctgagatcctgcctctatcctcatattgacaagcagtatctagattgctgtggaaatctcatgcaaactctaaaaaaagattacaggttggtagaatacttgcaagctatgaggaattttttcttaatggaaggaggagataccatgtatgacttctacacgtcaatttttgataaaataagagaaaaggaaacatggcagaatgtgtcttttcttaatgtccaactccaagaagcagtaggacagcgttatcctgaagatagttcacgtctatctatatcttttgaaaatgttgacacagctaagaagaagctgcctgttcatatcttagatggtctgaccctcagctacaaggtcccatggcccgtggacattgttataagtttggaatgtcaaaaaatttataatcaagtgtttcttctcttattgcaaataaagtgggcaaaatatagtctggatgttttactttttggtgaactggttagtactgcagaaaaaccacgacttaaagaaggccttatacatgaacaagacacagttgctcagttcggaccacaaaaagaaccagtaagacagcagattcatcgcatgttcctcttaagagtgaagctcatgcatttcgtgaacagcttgcacaactacatcatgaccaggattctacacagtacagggctggagtttcaacatcaagtcgaggaagccaaggatttagatcaattgattaaaattcactataggtatctgtcaaccatccatgaccggtgtctgctgagagaaaaggtcagctttgtgaaagaagctatcatgaaggtgttgaacttggctctcatgtttgcagacggttggcaggcaggcctgggcacttggcgaatggaatctatagagaaaatggaatctgattttaaaaactgccatatgtttcttgtaaccattttaaacaaagccgtctgtagaggatcctttccccattgtgagtatatcatgttaaaatatttctacctctgtatttccttgtaactaagtgtatgtgtcattgttttgttactgatcccatgaagaattagaaattctcaccattttcaaaactgaaaagtcccttagcagttgtcccatgctttgaattgctttttaagcattacggtgaggtgagtgtaagcctgaggatcttactttctggtataccatttattacaacagatttctaaaactcctattaaataaagttgatggcagaatagatttctgtcacacttcactatcgtgtagtttttgtaactatttcttttcaaa

SEQ ID NO: 76442 - DNA, 980 bp, Homo sapiens
ctcgcgagaatgccgccagctccggaggcgactgcggcaggagcccgagctctcgcgcgacaggcaccaattcgttagacgcgcgctgcaggagcgcggaacatggcgcggcacgggccaccgtggagtcggttggacgcgcagcaggagcgcgacgtgcgggagctcgtccggggtgtcgccggcctccaggacgaggcagaccccaacttccagctcgccctaaacttcgcctggtccaacttcagatttcatcgtttcttggatgtcaacagccacaaaatagaaaaaacaatcgaaggaatttatgaaaaatttgtcattcattctgatctaagcaaagctgctagttggaagagattaacggaggaatttctaaatgcaccacttcccagtataaaggaaataaagacagatgcacattattccatactgtcacttcttctgtgtctgtcagactctccttcaaacagcagttatgtggagacaccaagaaataaagaagtggaaaagaaagatgatttcgactggggaaaatacttgatggaagatgaagaaatggacattggtccgtacatggacacaccaaattggtctgaagaaagtgaagaggaaaatgatcaacagcccttaagcagagaggactctggaattcaggtagacaggacaccgttagaagaacaagatcaaaacagaaaactggatccttgtatcagttggaaagatgagccagatgaccgaagctggctggaacatcatgtggtccatcagtactggacagccaggccctcccagtttcctcatagtttacatttgcactctaatttagctgctgtctgggaccaacacttgtacagcagtgatccattgtatgttccagatgacagggttttggttactgagactcaggttattcgggaaaccctatggtaagaaatgttcatttaattaatagtctttatgagacttgattactgaga

SEQ ID NO: 76443 - DNA, 375 bp, Homo sapiens
ttcatcgtttcttggatgtcaacagccacaaaatagaaaaaacaatcgaagggtaagtcagtgtgtatatatacgcatccagaaatatatgtattttcttatagatctttttaagatagctttataatcttttcttatattttagaatttatgaaaaatttgtcattcattctgatctaagcaaagctgctagttggaagagattaacggaggaatttctaaatgcaccacttcccagtataaaggaaataaaggtatgccttcaattatgagatctccactgtgtattttactgtttcctatctgattatcgtcaatttgtttcagttactgtttaaacattctattttagtattatctactggctaacgggat

SEQ ID NO: 76444 - DNA, 410 bp, Homo sapiens
aaagacagatgcacattattccatactgtcacttcttctgtgtctgtcagactctccttcaaacagcagttatgtggagacaccaagaaataaagaagtgggtatgttactagattccttaacatatgagaagtaaaagagaaattgtttgattacttagttgctaaacactgagttttattgaaacttctaaaaatctgtgaaactaaagtatttctattgctttagatgctatcacaattgtaaaattttatttaaaatgctgtcagccctctatattctcaggttccagacccacagattcaatcaactacagatcaaaaatattcaaaataaataaataataatacaacagtctaaaataatacaatcttttaaaaaactatttacatagcatttacatgatatta

SEQ ID NO: 76445 - DNA, 402 bp, Homo sapiens
tctatctatatcttttgaaaatgttgacacagctaagaagaagctgcctgttcatatcttagatggtctgaccctcagctacaaggtatatgctgatattccttgtatgaaccgtgttttctgctaacattaaaacatgcaagtaattggttactttctaattttgtttttgtttcataggtcccatggcccgtggacattgttataagtttggaatgtcaaaaaatttataatcaagtgtttcttctcttattgcaaataaagtgggcaaaatatagtctggatgttttactttttggtggtaagatttgttttcagcagataaattgtaattttatttaattttagcccttaataaaagaggttaatgggaaagggaagcatacggggatctggaaaaaa

SEQ ID NO: 76446 - DNA, 350 bp, Homo sapiens
catttttgtgactgcccaattttctataatgttatagaagataacctttctgatgatgaaaggaaaacctatgctgtttttattattggaacaagtttaagaggtgttaatatttctaattttagtaaatgtagaatgtaaacttgttccactaaaaacaggttacaaaacctgttgttgatccagaatcctgccttacgaatgccagagatcttagtgtcactcattttctctccattcaggttggtagaatacttgcaagctatgaggaattttttcttaatggaaggaggagataccatgtatgacttctacacgtcaatttttgataaaataagagaaaaggaaac

SEQ ID NO: 76447 - DNA, 710 bp, Homo sapiens
tactgcaggcgctcctcctggccgtgggcttggtccgaggcacttctggcctgaagacagcgccattgagcccctgcagtacaggtgtaggtgcatacatgtacatttccaccatgtgcagctgaaaagtgaaaatatttttattttggtttatttgtaaaacttgtccacagtcagcctggcacagtcgctcatgcctctaatcccagcacgatgggaggccaagacaggcagatcacttgagcccaggagtttgaggccagcctgggcaacatggtgaaacccggtgtctaccaaaaatacaaaatgtatccagacatggtggtgtgtacctgtagtcccagctactcaggaggcaaagatgggaggattacttgagcccaggaggtcaaggctacagtgagccatgattgcactactgcagtgcaacctgggtgacagagtgagaccctgactcagaaagaaccacttgcccacagtccagacagatggattgtaggtgggttttctggagattagtagatactgtatagagttgtatacataaaattgtgtcagtagtacaaagtgtatataggctgtttactcttacatttcctactgtaagatacagatttatggtactgatacctttaaattatatcatattttgaaaatgtaattactgatattcaaaataaattaaaggacttaaaatcaaaaaaaaatcc

SEQ ID NO: 76448 - DNA, 1504 bp, Homo sapiens
tgtgtacacaaatgccaaaatggtgcgtattctagcagtagttttatggacatcaaatgcctgaaagaaagatcaggaagttgtatgtacagttgatctgaaatgcaacaacttgattaggaaaagtgatacaggaaacttttcccactgcaccttccagaggcactgaggttcggttcctgccacccctgccagtgctttctgtggtgccaggaccacatccgtcagtgtttctgccaggcgtcatggtgcagtggggtttgagttgatgctctttctgtccactttgctcttccaatgttttatagaactggttagtactgcagaaaaaccacgacttaaagaaggccttatacatgaacaagacacagttgctcagttcggaccacaaaaagaaccagtaagacagcagattcatcgcatgttcctcttaagagtgaagctcatgcatttcgtgaacagcttgcacaactacatcatgaccaggattctacacagtacagggctggagtttcaacatcaagtcgaggaagccaaggatttagatcaattgattaaaattcactataggtatctgtcaaccatccatgaccggtgtctgctgagagaaaaggtcagctttgtgaaagaagctatcatgaaggtgttgaacttggctctcatgtttgcagacggttggcaggcaggcctgggcacttggcgaatggaatctatagagaaaatggaatctgattttaaaaactgccatatgtttcttgtaaccattttaaacaaagccgtctgtagaggatcctttccccatttggaatctctagcgttgtcactcatggctggcatggaacaaagttaaatgtcttcagcgtaataaatatctccgactttgtcatcatacatgtacatttccaccatgtgcagctgaaaagtgaaaatatttttattttggtttatttgtaaaacttgtccacagtcagcctggcacagtcgctcatgcctctaatcccagcacgatgggaggccaagacaggcagatcacttgagcccaggagtttgaggccagcctgggcaacatggtgaaacccggtgtctaccaaaaatacaaaatgtatccagacatggtggtgtgtacctgtagtcccagctactcaggaggcaaagatgggaggattacttgagcccaggaggtcaaggctacagtgagccatgattgcactactgcagtgcaacctgggtgacagagtgagaccctgactcagaaagaaccacttgcccacagtccagacagatggattgtaggtgggttttctggagattagtagatactgtatagagttgtatacataaaattgtgtcagtagtacaaagtgtatataggctgtttactcttacatttcctactgtaagatacagatttatggtactgatacctttaaattatatcatattttgaaaatgtaattactgatattcaaaataaattaaaggacttaaaatcaaaaaaaaatcc

SEQ ID NO: 76449 - DNA, 226 bp, Homo sapiens
cacactgcagcctgggtgacagagcgagatcctatctaaaaaaaaaaaaaaaaaaaaaaaaaaagcccaacacttttttatctggagaatatttaacatacacaaaaccagagagaatacatatttcaaagtatcactttgtatatgataaatatatatagttttagccaggtgtggtggctcatgtctgtaatcccagcactttgggaggctgaggcgggtggat

SEQ ID NO: 76450 - DNA, 341 bp, Homo sapiens
gcaatgtgagtttcctcatttccatctattgacattaccacatcattcttgtttttccttgtcaatgagcctcctcttttcactaaagtgaagtagccctagccctgaccatgtagcagaatcactggcgagatttttaagaaagttacgttattccaaccctcatcagttctaatttccagatgagctttatgtgtaactggttctgagaagtactgatcagttttgataagttagctttcttaatttactcttagtctgtttcttttcttgtcttaatttttattttattattcctgttaaatgtctataacattttcatccagccagccaacttttat

SEQ ID NO: 76451 - DNA, 1022 bp, Homo sapiens
gccttgtcagccctcaaagatatcagccgtgtttcttaaaagccccatgttttctaaggcccactagaagaaaatctgccaaaagatttgtcgtcggtttcttcgtcggttgtcatgagatagcactactgatctcgtgtttccattaaggggtgcccttggcatcttccccctgggccgtaaccaggcgactatgcttgcccattgtgtgtgtgtgaacacggggggctccctccgcacgcgcaggccggcgtgctttccagggacattcacaacgacgaggagctctgagtgtaatctcttatgataagagtgtcatatttgggagacgacgggatacagagggccgactcggacactggcgagttgggggttgtgctccccgagtccaccgagtctctgaagggggacggcggggtgagagccaccagctcctccaggtctggcttggcggccgcagcctcgggaccggccgcggggctctcccgggccgcgtccccagccgcctgcgcccctgccgcgggctgcgcgcctcccgtgacttcgatggccggcagaggctggatttcggcaaaggtcgtcatggtcgtgggcaactggatctctttggggatcaggtgtccactagcttctggaacatggcagagaagaaatgggccagtttatttacgagatttgattgggaggatggttgccaactacaccctttctcctatcagaaggataagaaacaggtgtttcgaaagttgaacatgatggaacataactttggatgttagcagtaacagtctttggaatcacctgtagccatgccccaaaacatgatagcatgttgcaaaacctctagtgcccatggccataagggagaaagagcaccagaccatctgaataacgtgaaagtggacacaggaaacaccagacacccagagaaatggagtccaaatagaaactcagaccattcttgctggagatacatcaagtgaatacctttgtagatctggacctgacccaaggaagcctgg

SEQ ID NO: 76452 - DNA, 665 bp, Homo sapiens
tgaatgatatatcaatttgaagtttctcgacctttccatcaaggatcttgaattttttctcaattatgcttgctaatgtgtcaaaggccaagtacactgtatcaaacttgccgtctgtaagatgcaagatcaatctagtgtttcagccagttcactactgacatcagactcaactttgtcccctctctttcttttcatgcaagagactttaagggtaacctcttcagttgaaactgtcttggaagtgcagccctcctcctgtgtggctagagaaagagatggcaccaggatctcttaacggcaagtgctcacggggcatgggtgattttgtctagtctggtccttttggacgtggtgatttcctgtcatcctcgtggtctgacattgcttctcactggatactggttgtggcctttgactcattagctgattgttggatctctttgtgaggttcgattttttaaaaatccatgggtccctatggactgtcacctgttgcagatgatggtgattctcttcttttttttgtctccaagcctgggtgacagagcaagactccatttcaaaaaaataaaattaaatatgaccgggcacaagcttatttccttttagcgagggtaaattttatcttgggcacttgccgtcgttttccaaacgtctcaaac

SEQ ID NO: 76453 - DNA, 1012 bp, Homo sapiens
tgaatgatatatcaatttgaagtttctcgacctttccatcaaggatcttgaattttttctcaattatgcttgctaatgtgtcaaaggccaagtacactgtatcaaacttgccgtctgtaagatgcaagatcaatctagtgtttcagccagttcactactgacatcagactcaactttgtcccctctctttcttttcatgcaagagactttaagggtaacctcttcagttgaaactgtcttggaagtgcagccctcctcctgtgtggctagagaaagagatggcaccaggatctcttaacggcaagtgctcacggggcatgggtgattttgtctagtctggtccttttggacgtggtgatttcctgtcatcctcgtggtctgacattgcttctcactggatactggttgtggcctttgactcattagctgattgttggatctctttgtgaggttcgattttttaaaaatccatgggtccctatggactgtcacctgttgcagatgatggtgattctcttcttttttttgtctccaatagttgcctggatgacttcatgggtcagtccacatgattgcaggatttcccattgctcatctgtgaatgttgattggccaacctgtctgagctttcagcagatgcatccttgagcttactttcaggaattcctcctggaattggttttccttggtggtaatttctcatggtggagcttgtttctgaggcatggtacagtgctgcggaggcaaggcaaggctgtcatggtgattttcacagcatctggatggcaaattgccttcacgtagggaaaccacatgggactgatagctttctcaagggatctccaagcatctctgaatttggggatttcatcagttactccagcctgggtgacagagcaagactccatttcaaaaaaataaaattaaatatgaccgggcacaagcttatttccttttagcgagggtaaattttatcttgggcacttgccgtcgttttccaaacgtctcaaac

SEQ ID NO: 76454 - DNA, 1074 bp, Homo sapiens
tgaatgatatatcaatttgaagtttctcgacctttccatcaaggatcttgaattttttctcaattatgcttgctaatgtgtcaaaggccaagtacactgtatcaaacttgccgtctgtaagatgcaagatcaatctagtgtttcagccagttcactactgacatcagactcaactttgtcccctctctttcttttcatgcaagagactttaagggtaacctcttcagttgaaactgtcttggaagtgcagccctcctcctgtgtggctagagaaagagatggcaccaggatctcttaacggcaagtgctcacggggcatgggtgattttgtctagtctggtccttttggacgtggtgatttcctgtcatcctcgtggtctgacattgcttctcactggatactggttgtggcctttgactcattagctgattgttggatctctttgtgaggttcgattttttaaaaatccatgggtccctatggactgtcacctgttgcagatgatggtgattctcttcttttttttgtctccaatagttgcctggatgacttcatgggtcagtccacatgattgcaggatttcccattgctcatctgtgaatgttgattggccaacctgtctgagctttcagcagatgcatccttgagcttactttcaggaattcctcctggaattggttttccttggtggtaatttctcatggtggagcttgtttctgaggcatggtacagtgctgcggaggcaaggcaaggctgtcatggtgattttcacagcatctggatggcaaattgccttcacgtagggaaaccacatgggactgatagctttctcaagggatctccaagcatctctgaatttggggatttcatcagttactcctggaatcaaaatgagtgtggagtcataatatatattttttttgagacaaagtctcactctccagcctgggtgacagagcaagactccatttcaaaaaaataaaattaaatatgaccgggcacaagcttatttccttttagcgagggtaaattttatcttgggcacttgccgtcgttttccaaacgtctcaaac

SEQ ID NO: 76455 - DNA, 495 bp, Homo sapiens
atctggatgaagaaagggtaagctgatacattgacgagtattactcagcaataaaaagaaaccatttatacatgtaacatgaatgaatctcagaaacactatgctgactggaagaaattagacacaaaaatatgcatacgattttatgccatttatataaaatcttaaatatatacaaaatttagccaaagctaatagaactcaggactggggagagattgagtgggaaaggacaggaaggagctttcctagagtgacagaaaagtcctatattttgataagtgttcaacagtatgccttaatttttaaaagtttaatgggtaaaagggaaacacaaattgcaaagtttctggaaaatgatgataagaaaagtactacataatactacataccagaatctgtggaatacatttaaagcagtgagcagaggaaaattcatagccctaaacacttacataaatgaaaataaattcccaattcagaaatgaacaaagt

SEQ ID NO: 76456 - DNA, 1369 bp, Homo sapiens
agagtttacacatctgttcacttttgctccaatatgctcttttgacttaacgtcaagctttgggttgatgtgggtagggtagtgtcaaactgctttgagaggaatgggaccagttctgctgcctaagaaggtctgtctggatgtttataggcagcacctctgaagtggcctaaattcaccctgatctgatagttttcctgcttagaaagtgtgccttggccagatcagtatcccacatgggagtgttccctaggttgtagctgtgattgtttccagatgaccagattgtttttctgaaaatgagcatatttttagtcatgtcgattagctgttcttctacatcacattgttactctttctgatgatgattctagggttaacattggaaccatctcaaaataattacaaagttttagatgggtttacaatgtcttctaaacaatgtaatctaaaaataattgagtcagatgctaacgagatactgcaggcataactgctgtttttctgacaactgattgtgaaaccttaaaacctgcatacctcttcttacagtgaggagtatgcaaaatctggaaagatattctattttttttatataggtagataggatcgccatttatttcctatttagatatactgacattcatccatatgaaaatatgcaggtcattagcttactataatttacttttgacttaatggggcataaataaaactttcatagtacacatgaggtggatatttgatacacagaacatttgcggtgggctttctgtgggttagatgtaaagcccacatattttaatattcactattttaaatgagcaatgcatgaggggaatgcagtgtcagtacctggcctatttttaaactagtgtaatcaccctagtcataccattcagtatgtttgctttttaaaataagtaaccacaattaagttgttgtagcccttgcacttcaagagatctagtctttactttcagttgtctgttaggtccattctgtttactagacggatgttaataaaaactatgcgagcctgaatgaattctcagccaaatttagtcttgtctctcatcttgattggattaattccaaattctaaaatgattcagtccacaatagctctaggggatgaagaatttgccttactttgcccagttcctaagactgtgagttgtcaaatccctagactgtaagctcttcaaggagcaagaggcgcattttctccgtgtcatgtaatttttctaaggtgtttggcagcactctgtaccctgtggagtactcagtaccttttgtttgatgttgctgacaagacctgaaaaaaaatcccttaaaaaaaaaacccattaaagtgtagcaaaaccga

SEQ ID NO: 76457 - DNA, 1513 bp, Homo sapiens
agagtttacacatctgttcacttttgctccaatatgctcttttgacttaacgtcaagctttgggttgatgtgggtagggtagtgtcaaactgctttgagaggaatgggaccagttctgctgcctaagaaggtctgtctggatgtttataggcagcacctctgaagtggcctaaattcaccctgatctgatagttttcctgcttagaaagtgtgccttggccagatcagtatcccacatgggagtgttccctaggttgtagctgtgattgtttccagatgaccagattgtttttctgaaaatgagcatatttttagtcatgtcgattagctgttcttctacatcacattgttactctttctgatgatgattctagggttaacattggaaccatctcaaaataattacaaagttttagatgggtttacaatgtcttctaaacaatgtaatctaaaaataattgagtcagatgctaacgagatactgcaggcataactgctgtttttctgacaactgattgtgaaaccttaaaacctgcatacctcttcttacagtgaggagtatgcaaaatctggaaagatattctattttttttatataggtagataggatcgccatttatttcctatttagatatactgacattcatccatatgaaaatatgcaggtcattagcttactataatttacttttgacttaatggggcataaataaaactttcatagtacacatgaggtggatatttgatacacagaacatttgcggtgggctttctgtgggttagatgtaaagcccacatattttaatattcactattttaaatgagcaatgcatgaggggaatgcagtgtcagtacctggcctatttttaaactagtgtaatcaccctagtcataccattcagtatgtttgctttttaaaataagtaaccacaattaagttgttgtagcccttgcacttcaagagatctagtctttactttcagttgtctgttaggtccattctgtttactagacggatgttaataaaaactatgcgagcctgaatgaattctcagccaaatttagtcttgtctctcatcttgattggattaattccaaattctaaaatgattcagtccacaatagctctaggggatgaagaatttgccttactttgcccagttcctaagactgtgagttgtcaaatccctagactgtaagctcttcaaggagcaagaggcgcattttctccgtgtcatgtaatttttctaaggtgtttggcagcactctgtaccctgtggagtactcagtaccttttgtttgatgttgctgacaagacctgaaaaaaaatcccttaaaaaaaaaacccattaaagtgtagcaaaaccgatgtattattttttctcttttctcataaaccataagatatgtatatcaaaatgataatttatatgaagcatctgctatccttcacataagtatagtttatatgaactacaaatacctttcatcaacattaaagaagcttaaattg

SEQ ID NO: 76458 - DNA, 1046 bp, Homo sapiens
agagtttacacatctgttcacttttgctccaatatgctcttttgacttaacgtcaagctttgggttgatgtgggtagggtagtgtcaaactgctttgagaggaatgggaccagttctgctgcctaagaaggtctgtctggatgtttataggcagcacctctgaagtggcctaaattcaccctgatctgatagttttcctgcttagaaagtgtgccttggccagatcagtatcccacatgggagtgttccctaggttgtagctgtgattgtttccagatgaccagattgtttttctgaaaatgagcatatttttagtcatgtcgattagctgttcttctacatcacattgttactctttctgatgatgattctagggttaacattggaaccatctcaaaataattacaaagttttagatgggtttacaatgtcttctaaacaatgtaatctaaaaataattgagtcagatgctaacgagatactgcaggcataactgctgtttttctgacaactgattgtgaaaccttaaaacctgcatacctcttcttacagtgaggagtatgcaaaatctggaaagatattctattttttttatataggtagataggatcgccatttatttcctatttagatatactgacattcatccatatgaaaatatgcaggtcattagcttactataatttacttttgacttaatggggcataaataaaactttcatagtacacatgaggtggatatttgatacacagaacatttgcggtgggctttctgtgggttagatgtaaagcccacatattttaatattcactattttaaatgagcaatgcatgaggggaatgcagtgtcagtacctggcctatttttaaactagtgtaatcaccctagtcataccattcagtatgtttgctttttaaaataagtaaccacaattaagttgttgtagcccttgcacttcaagagatctagtctttactttcagttgtctgttaggtccattctgtttactagacggatgttaataaaaactatgcgagcctgaatg

SEQ ID NO: 76459 - DNA, 795 bp, Homo sapiens
tcgggataatatctatggattatatggggagagtggatcgccaggtaagggtataagatatactgacattcatccatatgaaaatatgcaggtcattagcttactataatttacttttgacttaatggggcataaataaaactttcatagtacacatgaggtggatatttgatacacagaacatttgcggtgggctttctgtgggttagatgtaaagcccacatattttaatattcactattttaaatgagcaatgcatgaggggaatgcagtgtcagtacctggcctatttttaaactagtgtaatcaccctagtcataccattcagtatgtttgctttttaaaataagtaaccacaattaagttgttgtagcccttgcacttcaagagatctagtctttactttcagttgtctgttaggtccattctgtttactagacggatgttaataaaaactatgcgagcctgaatgaattctcagccaaatttagtcttgtctctcatcttgattggattaattccaaattctaaaatgattcagtccacaatagctctaggggatgaagaatttgccttactttgcccagttcctaagactgtgagttgtcaaatccctagactgtaagctcttcaaggagcaagaggcgcattttctccgtgtcatgtaatttttctaaggtgtttggcagcactctgtaccctgtggagtactcagtaccttttgtttgatgttgctgacaagacctgaaaaaaaatcccttaaaaaaaaaacccattaaagtgtagcaaaaccga

SEQ ID NO: 76460 - DNA, 1601 bp, Homo sapiens
agagtttacacatctgttcacttttgctccaatatgctcttttgacttaacgtcaagctttgggttgatgtgggtagggtagtgtcaaactgctttgagaggaatgggaccagttctgctgcctaagaaggtctgtctggatgtttataggcagcacctctgaagtggcctaaattcaccctgatctgatagttttcctgcttagaaagtgtgccttggccagatcagtatcccacatgggagtgttccctaggttgtagctgtgattgtttccagatgaccagattgtttttctgaaaatgagcatatttttagtcatgtcgattagctgttcttctacatcacattgttactctttctgatgatgattctagggttaacattggaaccatctcaaaataattacaaagttttagatgggtttacaatgtcttctaaacaatgtaatctaaaaataattgagtcagatgctaacgagatactgcaggcataactgctgtttttctgacaactgattgtgaaaccttaaaacctgcatacctcttcttacagtgaggagtatgcaaaatctggaaagatattctattttttttatataggtagataggatcgccatttatttcctatttagatatactgacattcatccatatgaaaatatgcaggtcattagcttactataatttacttttgacttaatggggcataaataaaactttcatagtacacatgaggtggatatttgatacacagaacatttgcggtgggctttctgtgggttagatgtaaagcccacatattttaatattcactattttaaatgagcaatgcatgaggggaatgcagtgtcagtacctggcctatttttaaactagtgtaatcaccctagtcataccattcagtatgtttgctttttaaaataagtaaccacaattaagttgttgtagcccttgcacttcaagagatctagtctttactttcagttgtctgttaggtccattctgtttactagacggatgttaataaaaactatgcgagcctgaatgaattctcagccaaatttagtcttgtctctcatcttgattggattaattccaaattctaaaatgattcagtccacaatagctctaggggatgaagaatttgccttactttgcccagttcctaagactgtgagttgtcaaatccctagactgtaagctcttcaaggagcaagaggcgcattttctccgtgtcatgtaatttttctaaggtgtttggcagcactctgtaccctgtggagtactcagtaccttttgtttgatgttgctgacaagacctgaaaaaaaatcccttaaaaaaaaaacccattaaagtgtagcaaaaccgatgtattattttttctcttttctcataaaccataagatatgtatatcaaaatgataatttatatgaagcatctgctatccttcacataagtatagtttatatgaactacaaatacctttcatcaacattaaagaagcttaaattgaaaaaaccaaaacatctgacaccaaacttactaatcactcactagactaaccatcaacaaccagcatatgaccaatcaaaaaaagagg

SEQ ID NO: 76461 - DNA, 1651 bp, Homo sapiens
agagtttacacatctgttcacttttgctccaatatgctcttttgacttaacgtcaagctttgggttgatgtgggtagggtagtgtcaaactgctttgagaggaatgggaccagttctgctgcctaagaaggtctgtctggatgtttataggcagcacctctgaagtggcctaaattcaccctgatctgatagttttcctgcttagaaagtgtgccttggccagatcagtatcccacatgggagtgttccctaggttgtagctgtgattgtttccagatgaccagattgtttttctgaaaatgagcatatttttagtcatgtcgattagctgttcttctacatcacattgttactctttctgatgatgattctagggttaacattggaaccatctcaaaataattacaaagttttagatgggtttacaatgtcttctaaacaatgtaatctaaaaataattgagtcagatgctaacgagatactgcaggcataactgctgtttttctgacaactgattgtgaaaccttaaaacctgcatacctcttcttacagtgaggagtatgcaaaatctggaaagatattctattttttttatataggtagataggatcgccatttatttcctatttagatatactgacattcatccatatgaaaatatgcaggtcattagcttactataatttacttttgacttaatggggcataaataaaactttcatagtacacatgaggtggatatttgatacacagaacatttgcggtgggctttctgtgggttagatgtaaagcccacatattttaatattcactattttaaatgagcaatgcatgaggggaatgcagtgtcagtacctggcctatttttaaactagtgtaatcaccctagtcataccattcagtatgtttgctttttaaaataagtaaccacaattaagttgttgtagcccttgcacttcaagagatctagtctttactttcagttgtctgttaggtccattctgtttactagacggatgttaataaaaactatgcgagcctgaatgaattctcagccaaatttagtcttgtctctcatcttgattggattaattccaaattctaaaatgattcagtccacaatagctctaggggatgaagaatttgccttactttgcccagttcctaagactgtgagttgtcaaatccctagactgtaagctcttcaaggagcaagaggcgcattttctccgtgtcatgtaatttttctaaggtgtttggcagcactctgtaccctgtggagtactcagtaccttttgtttgatgttgctgacaagacctgaaaaaaaatcccttaaaaaaaaaacccattaaagtgtagcaaaaccgaaaaaaaaaaaaaaaaaaaaaatcctgtggtttgacacaaggatgggcacatatatcaatggaacaaaacagagagtccagaaatggacccacacacttatgatcagttgatttttgacagaggttcaaaggcaatccaatagagaaagcatagtctctcatcgaatggtattgaaacaattggatatacatatgcaaaaaagaatatttatacttcattagaaaataacccaaaatgggtcatagtctaaaatgtaaaatgtaaaactataaagcttctgga

SEQ ID NO: 76462 - DNA, 1097 bp, Homo sapiens
agagtttacacatctgttcacttttgctccaatatgctcttttgacttaacgtcaagctttgggttgatgtgggtagggtagtgtcaaactgctttgagaggaatgggaccagttctgctgcctaagaaggtctgtctggatgtttataggcagcacctctgaagtggcctaaattcaccctgatctgatagttttcctgcttagaaagtgtgccttggccagatcagtatcccacatgggagtgttccctaggttgtagctgtgattgtttccagatgaccagattgtttttctgaaaatgagcatatttttagtcatgtcgattagctgttcttctacatcacattgttactctttctgatgatgattctagggttaacattggaaccatctcaaaataattacaaagttttagatgggtttacaatgtcttctaaacaatgtaatctaaaaataattgagtcagatgctaacgagatactgcaggcataactgctgtttttctgacaactgattgtgaaaccttaaaacctgcatacctcttcttacagtgaggagtatgcaaaatctggaaagatattctattttttttatataggtagataggatcgccatttatttcctatttagatatactgacattcatccatatgaaaatatgcaggtcattagcttactataatttacttttgacttaatggggcataaataaaactttcatagtacacatgaggtggatatttgatacacagaacatttgcggtgggctttctgtgggttagatgtaaagcccacatattttaatattcactattttaaatgagcaatgcatgaggggaatgcagtgtcagtacctggcctatttttaaactagtgtaatcaccctagtcataccattcagtatgtttgctttttaaaataagtaaccacaattaagttgttgtagcccttgcacttcaagagatctagtctttactttcagttgtctgttaggtccattctgtttactagacggatgttaataaaaactatgcgagcctgaatggtatgactagggtgattacactagtttaaaaataggccaggtacgtcgacg

SEQ ID NO: 76463 - DNA, 421 bp, Homo sapiens
tgttaagtccatttagcaagatcacaggatacaagattagtatacaaaaattaacttcttcattcttatactatggttttactgtatagttcatgattacttaatgtaatttttagaaacaaataagctggatgatatttaatcttattcaaacaaagcactttcctttaaagtgatcatcaaaactttaaaacagtgctatttacaatagcataaaaaatatcgccatttatttcctatttagatatactgacattcatccatatgaaaatatgcaggtcattagcttactataatttacttttgacttaatggggcataaataaaactttcatagtacacatgaggtggatatttgatacacagaacatttgcggtgggctttctgtgggttagatgtaaagcccacatattttaatat

SEQ ID NO: 76464 - DNA, 403 bp, Homo sapiens
tgggagtgtcccaattttcccagtacagtctgtcacagcttcccttggctaggaaaggaaaatccactgaccccttgtgcttcctggttgaggtgataccccgccctgctttggctcgccgtccttgggctgcacccactgtccaaccagtcccaatgagatgaaccaggtacctcagttggaaatgcagaaatcacctgtcttcggtgtcgatcatgctgtgagctacagacctgagctgttcctattcagccatcttcgcttgtgctgctttaattaatgtgtacatttgattcatatgctgaatttgctgtggcatcatttcttgattgtttgtatattatctgatagcatgcaatcaatacttgattaaagcttagagtttacatctcctaaactatta

SEQ ID NO: 76465 - DNA, 638 bp, Homo sapiens
ttaaggcattgactattgttttatttctttagcaaaatgagagcaaacaactgcttcctttttagaaagcactccccacatataacaacaatttgttctctctggagggcccagatctatgaccttactaacatccagcaatcccaaatccaagtgcctgtggtaccaggcagataaggtaaagaagtgaagcaggccaagtgagactgcagtggtctggtgctaccattcccatctggaggagcatctgattctaaaccccacccaatttgtgccatgcgggttgctggcccagtgtttccagaacttccagtttttcaagagatgttccatatcccagtttttaaatgtcagatcatattatgaatgctaggccagcgaaataaaacatctgtggagcaaagcaatccacatgttgccattttgtgaccttggccacagcttattcttgccatctattgcaatgtactggtttacattcccacttaaagtgtacatttcattgaacttgcctagggaatgtacctattaggttaaatatccattatctctgtgtgaggtttccttaaggggctaaccataaagctttattatgtgatacctcctttcctttggaacaattaaaaagagtgcaaaga

SEQ ID NO: 76466 - DNA, 3884 bp, Homo sapiens
aacacaggctgagcagtcaggcccacagcatctgaccccaggcccagctcgtcctggctggcctgggtcggcctctggagtatggtctggcgggtgccccctttcttgctccccatcctcttcttggcttctcatgtgggcgcggcggtggacctgacgctgctggccaacctgcggctcacggacccccagcgcttcttcctgacttgcgtgtctggggaggccggggcggggaggggctcggacgcctggggcccgcccctgctgctggagaaggacgaccgtatcgtgcgcaccccgcccgggccacccctgcgcctggcgcgcaacggttcgcaccaggtcacgcttcgcggcttctccaagccctcggacctcgtgggcgtcttctcctgcgtgggcggtgctggggcgcggcgcacgcgcgtcatctacgtgcacaacagccctggagcccacctgcttccagacaaggtcacacacactgtgaacaaaggtgacaccgctgtactttctgcacgtgtgcacaaggagaagcagacagacgtgatctggaagagcaacggatcctacttctacaccctggactggcatgaagcccaggatgggcggttcctgctgcagctcccaaatgtgcagccaccatcgagcggcatctacagtgccacttacctggaagccagccccctgggcagcgccttctttcggctcatcgtgcggggttgtggggctgggcgctgggggccaggctgtaccaaggagtgcccaggttgcctacatggaggtgtctgccacgaccatgacggcgaatgtgtatgcccccctggcttcactggcacccgctgtgaacaggcctgcagagagggccgttttgggcagagctgccaggagcagtgcccaggcatatcaggctgccggggcctcaccttctgcctcccagacccctatggctgctcttgtggatctggctggagaggaagccagtgccaagaagcttgtgcccctggtcattttggggctgattgccgactccagtgccagtgtcagaatggtggcacttgtgaccggttcagtggttgtgtctgcccctctgggtggcatggagtgcactgtgagaagtcagaccggatcccccagatcctcaacatggcctcagaactggagttcaacttagagacgatgccccggatcaactgtgcagctgcagggaaccccttccccgtgcggggcagcatagagctacgcaagccagacggcactgtgctcctgtccaccaaggccattgtggagccagagaagaccacagctgagttcgaggtgccccgcttggttcttgcggacagtgggttctgggagtgccgtgtgtccacatctggcggccaagacagccggcgcttcaaggtcaatgtgaaagtgccccccgtgcccctggctgcacctcggctcctgaccaagcagagccgccagcttgtggtctccccgctggtctcgttctctggggatggacccatctccactgtccgcctgcactaccggccccaggacagtaccatggactggtcgaccattgtggtggaccccagtgagaacgtgacgttaatgaacctgaggccaaagacaggatacagtgttcgtgtgcagctgagccggccaggggaaggaggagagggggcctgggggcctcccaccctcatgaccacagactgtcctgagcctttgttgcagccgtggttggagggctggcatgtggaaggcactgaccggctgcgagtgagctggtccttgcccttggtgcccgggccactggtgggcgacggtttcctgctgcgcctgtgggacgggacacgggggcaggagcggcgggagaacgtctcatccccccaggcccgcactgccctcctgacgggactcacgcctggcacccactaccagctggatgtgcagctctaccactgcaccctcctgggcccggcctcgccccctgcacacgtgcttctgccccccagtgggcctccagccccccgacacctccacgcccaggccctctcagactccgagatccagctgacatggaagcacccggaggctctgcctgggccaatatccaagtacgttgtggaggtgcaggtggctgggggtgcaggagacccactgtggatagacgtggacaggcctgaggagacaagcaccatcatccgtggcctcaacgccagcacgcgctacctcttccgcatgcgggccagcattcaggggctcggggactggagcaacacagtagaagagtccaccctgggcaacgggctgcaggctgagggcccagtccaagagagccgggcagctgaagagggcctggatcagcagctgatcctggcggtggtgggctccgtgtctgccacctgcctcaccatcctggccgcccttttaaccctggtgtgcatccgcagaagctgcctgcatcggagacgcaccttcacctaccagtcaggctcgggcgaggagaccatcctgcagttcagctcagggaccttgacacttacccggcggccaaaactgcagcccgagcccctgagctacccagtgctagagtgggaggacatcacctttgaggacctcatcggggaggggaacttcggccaggtcatccgggccatgatcaagaaggacgggctgaagatgaacgcagccatcaaaatgctgaaagagtatgcctctgaaaatgaccatcgtgactttgcgggagaactggaagttctgtgcaaattggggcatcaccccaacatcatcaacctcctgggggcctgtaagaaccgaggttacttgtatatcgctattgaatatgccccctacgggaacctgctagattttctgcggaaaagccgggtcctagagactgacccagcttttgctcgagagcatgggacagcctctacccttagctcccggcagctgctgcgtttcgccagtgatgcggccaatggcatgcagtacctgagtgagaagcagttcatccacagggacctggctgcccggaatgtgctggtcggagagaacctagcctccaagattgcagacttcggcctttctcggggagaggaggtttatgtgaagaagacgatggggcgtctccctgtgcgctggatggccattgagtccctgaactacagtgtctataccaccaagagtgatgtctggtcctttggagtccttctttgggagatagtgagccttggaggtacaccctactgtggcatgacctgtgccgagctctatgaaaagctgccccagggctaccgcatggagcagcctcgaaactgtgacgatgaagtgtacgagctgatgcgtcagtgctggcgggaccgtccctatgagcgacccccctttgcccagattgcgctacagctaggccgcatgctggaagccaggaaggcctatgtgaacatgtcgctgtttgagaacttcacttacgcgggcattgatgccacagctgaggaggcctgagctgccatccagccagaacgtggctctgctggccggagcaaactctgctgtctaacctgtgaccagtctgacccttacagcctctgacttaagctgcctcaaggaatttttttaacttaagggagaaaaaaagggatctggggatggggtgggcttaggggaactgggttcccatgctttgtaggtgtctcatagctatcctgggcatccttctttctagttcagctgccccacaggtgtgtttcccatcccactgctcccccaacacaaacccccactccagctccttcgcttaagccagcactcacaccactaacatgccctgttcagctactcccactcccggcctgtcattcagaaaaaaataaatgttctaataagctcca

SEQ ID NO: 76467 - DNA, 3755 bp, Homo sapiens
aacacaggctgagcagtcaggcccacagcatctgaccccaggcccagctcgtcctggctggcctgggtcggcctctggagtatggtctggcgggtgccccctttcttgctccccatcctcttcttggcttctcatgtgggcgcggcggtggacctgacgctgctggccaacctgcggctcacggacccccagcgcttcttcctgacttgcgtgtctggggaggccggggcggggaggggctcggacgcctggggcccgcccctgctgctggagaaggacgaccgtatcgtgcgcaccccgcccgggccacccctgcgcctggcgcgcaacggttcgcaccaggtcacgcttcgcggcttctccaagccctcggacctcgtgggcgtcttctcctgcgtgggcggtgctggggcgcggcgcacgcgcgtcatctacgtgcacaacagccctggagcccacctgcttccagacaaggtcacacacactgtgaacaaaggtgacaccgctgtactttctgcacgtgtgcacaaggagaagcagacagacgtgatctggaagagcaacggatcctacttctacaccctggactggcatgaagcccaggatgggcggttcctgctgcagctcccaaatgtgcagccaccatcgagcggcatctacagtgccacttacctggaagccagccccctgggcagcgccttctttcggctcatcgtgcggggttgtggggctgggcgctgggggccaggctgtaccaaggagtgcccaggttgcctacatggaggtgtctgccacgaccatgacggcgaatgtgtatgcccccctggcttcactggcacccgctgtgaacaggcctgcagagagggccgttttgggcagagctgccaggagcagtgcccaggcatatcaggctgccggggcctcaccttctgcctcccagacccctatggctgctcttgtggatctggctggagaggaagccagtgccaagaagaccggatcccccagatcctcaacatggcctcagaactggagttcaacttagagacgatgccccggatcaactgtgcagctgcagggaaccccttccccgtgcggggcagcatagagctacgcaagccagacggcactgtgctcctgtccaccaaggccattgtggagccagagaagaccacagctgagttcgaggtgccccgcttggttcttgcggacagtgggttctgggagtgccgtgtgtccacatctggcggccaagacagccggcgcttcaaggtcaatgtgaaagtgccccccgtgcccctggctgcacctcggctcctgaccaagcagagccgccagcttgtggtctccccgctggtctcgttctctggggatggacccatctccactgtccgcctgcactaccggccccaggacagtaccatggactggtcgaccattgtggtggaccccagtgagaacgtgacgttaatgaacctgaggccaaagacaggatacagtgttcgtgtgcagctgagccggccaggggaaggaggagagggggcctgggggcctcccaccctcatgaccacagactgtcctgagcctttgttgcagccgtggttggagggctggcatgtggaaggcactgaccggctgcgagtgagctggtccttgcccttggtgcccgggccactggtgggcgacggtttcctgctgcgcctgtgggacgggacacgggggcaggagcggcgggagaacgtctcatccccccaggcccgcactgccctcctgacgggactcacgcctggcacccactaccagctggatgtgcagctctaccactgcaccctcctgggcccggcctcgccccctgcacacgtgcttctgccccccagtgggcctccagccccccgacacctccacgcccaggccctctcagactccgagatccagctgacatggaagcacccggaggctctgcctgggccaatatccaagtacgttgtggaggtgcaggtggctgggggtgcaggagacccactgtggatagacgtggacaggcctgaggagacaagcaccatcatccgtggcctcaacgccagcacgcgctacctcttccgcatgcgggccagcattcaggggctcggggactggagcaacacagtagaagagtccaccctgggcaacgggctgcaggctgagggcccagtccaagagagccgggcagctgaagagggcctggatcagcagctgatcctggcggtggtgggctccgtgtctgccacctgcctcaccatcctggccgcccttttaaccctggtgtgcatccgcagaagctgcctgcatcggagacgcaccttcacctaccagtcaggctcgggcgaggagaccatcctgcagttcagctcagggaccttgacacttacccggcggccaaaactgcagcccgagcccctgagctacccagtgctagagtgggaggacatcacctttgaggacctcatcggggaggggaacttcggccaggtcatccgggccatgatcaagaaggacgggctgaagatgaacgcagccatcaaaatgctgaaagagtatgcctctgaaaatgaccatcgtgactttgcgggagaactggaagttctgtgcaaattggggcatcaccccaacatcatcaacctcctgggggcctgtaagaaccgaggttacttgtatatcgctattgaatatgccccctacgggaacctgctagattttctgcggaaaagccgggtcctagagactgacccagcttttgctcgagagcatgggacagcctctacccttagctcccggcagctgctgcgtttcgccagtgatgcggccaatggcatgcagtacctgagtgagaagcagttcatccacagggacctggctgcccggaatgtgctggtcggagagaacctagcctccaagattgcagacttcggcctttctcggggagaggaggtttatgtgaagaagacgatggggcgtctccctgtgcgctggatggccattgagtccctgaactacagtgtctataccaccaagagtgatgtctggtcctttggagtccttctttgggagatagtgagccttggaggtacaccctactgtggcatgacctgtgccgagctctatgaaaagctgccccagggctaccgcatggagcagcctcgaaactgtgacgatgaagtgtacgagctgatgcgtcagtgctggcgggaccgtccctatgagcgacccccctttgcccagattgcgctacagctaggccgcatgctggaagccaggaaggcctatgtgaacatgtcgctgtttgagaacttcacttacgcgggcattgatgccacagctgaggaggcctgagctgccatccagccagaacgtggctctgctggccggagcaaactctgctgtctaacctgtgaccagtctgacccttacagcctctgacttaagctgcctcaaggaatttttttaacttaagggagaaaaaaagggatctggggatggggtgggcttaggggaactgggttcccatgctttgtaggtgtctcatagctatcctgggcatccttctttctagttcagctgccccacaggtgtgtttcccatcccactgctcccccaacacaaacccccactccagctccttcgcttaagccagcactcacaccactaacatgccctgttcagctactcccactcccggcctgtcattcagaaaaaaataaatgttctaataagctcca

SEQ ID NO: 76468 - DNA, 3875 bp, Homo sapiens
aacacaggctgagcagtcaggcccacagcatctgaccccaggcccagctcgtcctggctggcctgggtcggcctctggagtatggtctggcgggtgccccctttcttgctccccatcctcttcttggcttctcatgtgggcgcggcggtggacctgacgctgctggccaacctgcggctcacggacccccagcgcttcttcctgacttgcgtgtctggggaggccggggcggggaggggctcggacgcctggggcccgcccctgctgctggagaaggacgaccgtatcgtgcgcaccccgcccgggccacccctgcgcctggcgcgcaacggttcgcaccaggtcacgcttcgcggcttctccaagccctcggacctcgtgggcgtcttctcctgcgtgggcggtgctggggcgcggcgcacgcgcgtcatctacgtgcacaacagccctggagcccacctgcttccagacaaggtcacacacactgtgaacaaaggtgacaccgctgtactttctgcacgtgtgcacaaggagaagcagacagacgtgatctggaagagcaacggatcctacttctacaccctggactggcatgaagcccaggatgggcggttcctgctgcagctcccaaatgtgcagccaccatcgagcggcatctacagtgccacttacctggaagccagccccctgggcagcgccttctttcggctcatcgtgcggggttgtggggctgggcgctgggggccaggctgtaccaaggagtgcccaggttgcctacatggaggtgtctgccacgaccatgacggcgaatgtgtatgcccccctggcttcactggcacccgctgtgaacaggcctgcagagagggccgttttgggcagagctgccaggagcagtgcccaggcatatcaggctgccggggcctcaccttctgcctcccagacccctatggctgctcttgtggatctggctggagaggaagccagtgccaagaagaccggatcccccagatcctcaacatggcctcagaactggagttcaacttagagacgatgccccggatcaactgtgcagctgcagggaaccccttccccgtgcggggcagcatagagctacgcaagccagacggcactgtgctcctgtccaccaaggccattgtggagccagagaagaccacagctgagttcgaggtgccccgcttggttcttgcggacagtgggttctgggagtgccgtgtgtccacatctggcggccaagacagccggcgcttcaaggtcaatgtgaaagtgccccccgtgcccctggctgcacctcggctcctgaccaagcagagccgccagcttgtggtctccccgctggtctcgttctctggggatggacccatctccactgtccgcctgcactaccggccccaggacagtaccatggactggtcgaccattgtggtggaccccagtgagaacgtgacgttaatgaacctgaggccaaagacaggatacagtgttcgtgtgcagctgagccggccaggggaaggaggagagggggcctgggggcctcccaccctcatgaccacagactgtcctgagcctttgttgcagccgtggttggagggctggcatgtggaaggcactgaccggctgcgagtgagctggtccttgcccttggtgcccgggccactggtgggcgacggtttcctgctgcgcctgtgggacgggacacgggggcaggagcggcgggagaacgtctcatccccccaggcccgcactgccctcctgacgggactcacgcctggcacccactaccagctggatgtgcagctctaccactgcaccctcctgggcccggcctcgccccctgcacacgtgcttctgccccccagtgggcctccagccccccgacacctccacgcccaggccctctcagactccgagatccagctgacatggaagcacccggaggctctgcctgggccaatatccaagtacgttgtggaggtgcaggtggctgggggtgcaggagacccactgtggatagacgtggacaggcctgaggagacaagcaccatcatccgtggcctcaacgccagcacgcgctacctcttccgcatgcgggccagcattcaggggctcggggactggagcaacacagtagaagagtccaccctgggcaacgggctgcaggctgagggcccagtccaagagagccgggcagctgaagagggcctggatcagcagctgatcctggcggtggtgggctccgtgtctgccacctgcctcaccatcctggccgcccttttaaccctggtgtgcatccgcagaagctgcctgcatcggagacgcaccttcacctaccagtcaggctcgggcgaggagaccatcctgcagttcagctcagggaccttgacacttacccggcggccaaaactgcagcccgagcccctgagctacccagtgctagagtgggaggacatcacctttgaggacctcatcggggaggggaacttcggccaggtcatccgggccatgatcaagaaggacgggctgaagatgaacgcagccatcaaaatgctgaaagagtatgcctctgaaaatgaccatcgtgactttgcgggagaactggaagttctgtgcaaattggggcatcaccccaacatcatcaacctcctgggggcctgtaagaaccgaggttacttgtatatcgctattgaatatgccccctacgggaacctgctagattttctgcggaaaagccgggtcctagagactgacccagcttttgctcgagagcatgggacagcctctacccttagctcccggcagctgctgcgtttcgccagtgatgcggccaatggcatgcagtacctgagtgagaagcagttcatccacagggacctggctgcccggaatgtgctggtcggagagaacctagcctccaagattgcagacttcggcctttctcggggagaggaggtttatgtgaagaagacgatggggcgtctccctgtgcgctggatggccattgagtccctgaactacagtgtctataccaccaagagtgatgtctggtcctttggagtccttctttgggagatagtgagccttggaggtacaccctactgtggcatgacctgtgccgagctctatgaaaagctgccccagggctaccgcatggagcagcctcgaaactgtgacgatgaagtgtacgagctgatgcgtcagtgctggcgggaccgtccctatgagcgacccccctttgcccagattgcgctacagctaggccgcatgctggaagccaggaaggcctatgtgaacatgtcgctgtttgagaacttcacttacgcgggcattgatgccacagctgaggaggcctgagctgccatccagccagaacgtggctctgctggccggagcaaactctgctgtctaacctgtgaccagtctgacccttacagcctctgacttaagctgcctcaaggaatttttttaacttaagggagaaaaaaagggatctggggatggggtgggcttaggggaactgggttcccatgctttgtaggtgtctcatagctatcctgggcatccttctttctagttcagctgccccacaggtgtgtttcccatcccactgctcccccaacacaaacccccactccagctccttcgcttaagccagcactcacaccactaacatgccctgttcagctactcccactcccggcctgtcattcagaaaaaaataaatgttctaataagctccaaaaaaacggcacgagctcgtgccgaattcaacgcggtataccttaccagcaacatctacatctttgtgagtttgttcgaaattaaattgaaatacatttgacatctatttccactctcca

SEQ ID NO: 76469 - DNA, 3865 bp, Homo sapiens
aacacaggctgagcagtcaggcccacagcatctgaccccaggcccagctcgtcctggctggcctgggtcggcctctggagtatggtctggcgggtgccccctttcttgctccccatcctcttcttggcttctcatgtgggcgcggcggtggacctgacgctgctggccaacctgcggctcacggacccccagcgcttcttcctgacttgcgtgtctggggaggccggggcggggaggggctcggacgcctggggcccgcccctgctgctggagaaggacgaccgtatcgtgcgcaccccgcccgggccacccctgcgcctggcgcgcaacggttcgcaccaggtcacgcttcgcggcttctccaagccctcggacctcgtgggcgtcttctcctgcgtgggcggtgctggggcgcggcgcacgcgcgtcatctacgtgcacaacagccctggagcccacctgcttccagacaaggtcacacacactgtgaacaaaggtgacaccgctgtactttctgcacgtgtgcacaaggagaagcagacagacgtgatctggaagagcaacggatcctacttctacaccctggactggcatgaagcccaggatgggcggttcctgctgcagctcccaaatgtgcagccaccatcgagcggcatctacagtgccacttacctggaagccagccccctgggcagcgccttctttcggctcatcgtgcggggttgtggggctgggcgctgggggccaggctgtaccaaggagtgcccaggttgcctacatggaggtgtctgccacgaccatgacggcgaatgtgtatgcccccctggcttcactggcacccgctgtgaacaggcctgcagagagggccgttttgggcagagctgccaggagcagtgcccaggcatatcaggctgccggggcctcaccttctgcctcccagacccctatggctgctcttgtggatctggctggagaggaagccagtgccaagaagaccggatcccccagatcctcaacatggcctcagaactggagttcaacttagagacgatgccccggatcaactgtgcagctgcagggaaccccttccccgtgcggggcagcatagagctacgcaagccagacggcactgtgctcctgtccaccaaggccattgtggagccagagaagaccacagctgagttcgaggtgccccgcttggttcttgcggacagtgggttctgggagtgccgtgtgtccacatctggcggccaagacagccggcgcttcaaggtcaatgtgaaagtgccccccgtgcccctggctgcacctcggctcctgaccaagcagagccgccagcttgtggtctccccgctggtctcgttctctggggatggacccatctccactgtccgcctgcactaccggccccaggacagtaccatggactggtcgaccattgtggtggaccccagtgagaacgtgacgttaatgaacctgaggccaaagacaggatacagtgttcgtgtgcagctgagccggccaggggaaggaggagagggggcctgggggcctcccaccctcatgaccacagactgtcctgagcctttgttgcagccgtggttggagggctggcatgtggaaggcactgaccggctgcgagtgagctggtccttgcccttggtgcccgggccactggtgggcgacggtttcctgctgcgcctgtgggacgggacacgggggcaggagcggcgggagaacgtctcatccccccaggcccgcactgccctcctgacgggactcacgcctggcacccactaccagctggatgtgcagctctaccactgcaccctcctgggcccggcctcgccccctgcacacgtgcttctgccccccagtgggcctccagccccccgacacctccacgcccaggccctctcagactccgagatccagctgacatggaagcacccggaggctctgcctgggccaatatccaagtacgttgtggaggtgcaggtggctgggggtgcaggagacccactgtggatagacgtggacaggcctgaggagacaagcaccatcatccgtggcctcaacgccagcacgcgctacctcttccgcatgcgggccagcattcaggggctcggggactggagcaacacagtagaagagtccaccctgggcaacgggctgcaggctgagggcccagtccaagagagccgggcagctgaagagggcctggatcagcagctgatcctggcggtggtgggctccgtgtctgccacctgcctcaccatcctggccgcccttttaaccctggtgtgcatccgcagaagctgcctgcatcggagacgcaccttcacctaccagtcaggctcgggcgaggagaccatcctgcagttcagctcagggaccttgacacttacccggcggccaaaactgcagcccgagcccctgagctacccagtgctagagtgggaggacatcacctttgaggacctcatcggggaggggaacttcggccaggtcatccgggccatgatcaagaaggacgggctgaagatgaacgcagccatcaaaatgctgaaagagtatgcctctgaaaatgaccatcgtgactttgcgggagaactggaagttctgtgcaaattggggcatcaccccaacatcatcaacctcctgggggcctgtaagaaccgaggttacttgtatatcgctattgaatatgccccctacgggaacctgctagattttctgcggaaaagccgggtcctagagactgacccagcttttgctcgagagcatgggacagcctctacccttagctcccggcagctgctgcgtttcgccagtgatgcggccaatggcatgcagtacctgagtgagaagcagttcatccacagggacctggctgcccggaatgtgctggtcggagagaacctagcctccaagattgcagacttcggcctttctcggggagaggaggtttatgtgaagaagacgatggtgagtctcattcaaccctcacccttagggcttgtgcctggccctgccccacaggagcctcaaacaggcccttcctccacactcagcccctcaaacccattctctcctaggggcgtctccctgtgcgctggatggccattgagtccctgaactacagtgtctataccaccaagagtgatgtctggtcctttggagtccttctttgggagatagtgagccttggaggtacaccctactgtggcatgacctgtgccgagctctatgaaaagctgccccagggctaccgcatggagcagcctcgaaactgtgacgatgaagtgtacgagctgatgcgtcagtgctggcgggaccgtccctatgagcgacccccctttgcccagattgcgctacagctaggccgcatgctggaagccaggaaggcctatgtgaacatgtcgctgtttgagaacttcacttacgcgggcattgatgccacagctgaggaggcctgagctgccatccagccagaacgtggctctgctggccggagcaaactctgctgtctaacctgtgaccagtctgacccttacagcctctgacttaagctgcctcaaggaatttttttaacttaagggagaaaaaaagggatctggggatggggtgggcttaggggaactgggttcccatgctttgtaggtgtctcatagctatcctgggcatccttctttctagttcagctgccccacaggtgtgtttcccatcccactgctcccccaacacaaacccccactccagctccttcgcttaagccagcactcacaccactaacatgccctgttcagctactcccactcccggcctgtcattcagaaaaaaataaatgttctaataagctcca

SEQ ID NO: 76470 - DNA, 3719 bp, Homo sapiens
aacacaggctgagcagtcaggcccacagcatctgaccccaggcccagctcgtcctggctggcctgggtcggcctctggagtatggtctggcgggtgccccctttcttgctccccatcctcttcttggcttctcatgtgggcgcggcggtggacctgacgctgctggccaacctgcggctcacggacccccagcgcttcttcctgacttgcgtgtctggggaggccggggcggggaggggctcggacgcctggggcccgcccctgctgctggagaaggacgaccgtatcgtgcgcaccccgcccgggccacccctgcgcctggcgcgcaacggttcgcaccaggtcacgcttcgcggcttctccaagccctcggacctcgtgggcgtcttctcctgcgtgggcggtgctggggcgcggcgcacgcgcgtcatctacgtgcacaacagccctggagcccacctgcttccagacaaggtcacacacactgtgaacaaaggtgacaccgctgtactttctgcacgtgtgcacaaggagaagcagacagacgtgatctggaagagcaacggatcctacttctacaccctggactggcatgaagcccaggatgggcggttcctgctgcagctcccaaatgtgcagccaccatcgagcggcatctacagtgccacttacctggaagccagccccctgggcagcgccttctttcggctcatcgtgcggggttgtggggctgggcgctgggggccaggctgtaccaaggagtgcccaggttgcctacatggaggtgtctgccacgaccatgacggcgaatgtgtatgcccccctggcttcactggcacccgctgtgaacaggcctgcagagagggccgttttgggcagagctgccaggagcagtgcccaggcatatcaggctgccggggcctcaccttctgcctcccagacccctatggctgctcttgtggatctggctggagaggaagccagtgccaagaagaccggatcccccagatcctcaacatggcctcagaactggagttcaacttagagacgatgccccggatcaactgtgcagctgcagggaaccccttccccgtgcggggcagcatagagctacgcaagccagacggcactgtgctcctgtccaccaaggccattgtggagccagagaagaccacagctgagttcgaggtgccccgcttggttcttgcggacagtgggttctgggagtgccgtgtgtccacatctggcggccaagacagccggcgcttcaaggtcaatgtgaaagtgccccccgtgcccctggctgcacctcggctcctgaccaagcagagccgccagcttgtggtctccccgctggtctcgttctctggggatggacccatctccactgtccgcctgcactaccggccccaggacagtaccatggactggtcgaccattgtggtggaccccagtgagaacgtgacgttaatgaacctgaggccaaagacaggatacagtgttcgtgtgcagctgagccggccaggggaaggaggagagggggcctgggggcctcccaccctcatgaccacagactgtcctgagcctttgttgcagccgtggttggagggctggcatgtggaaggcactgaccggctgcgagtgagctggtccttgcccttggtgcccgggccactggtgggcgacggtttcctgctgcgcctgtgggacgggacacgggggcaggagcggcgggagaacgtctcatccccccaggcccgcactgccctcctgacgggactcacgcctggcacccactaccagctggatgtgcagctctaccactgcaccctcctgggcccggcctcgccccctgcacacgtgcttctgccccccagtgggcctccagccccccgacacctccacgcccaggccctctcagactccgagatccagctgacatggaagcacccggaggctctgcctgggccaatatccaagtacgttgtggaggtgcaggtggctgggggtgcaggagacccactgtggatagacgtggacaggcctgaggagacaagcaccatcatccgtggcctcaacgccagcacgcgctacctcttccgcatgcgggccagcattcaggggctcggggactggagcaacacagtagaagagtccaccctgggcaacgggctgcaggctgagggcccagtccaagagagccgggcagctgaagagggcctggatcagcagctgatcctggcggtggtgggctccgtgtctgccacctgcctcaccatcctggccgcccttttaaccctggtgtgcatccgcagaagctgcctgcatcggagacgcaccttcacctaccagtcaggctcgggcgaggagaccatcctgcagttcagctcagggaccttgacacttacccggcggccaaaactgcagcccgagcccctgagctacccagtgctagagtgggaggacatcacctttgaggacctcatcggggaggggaacttcggccaggtcatccgggccatgatcaagaaggacgggctgaagatgaacgcagccatcaaaatgctgaaagagtatgcctctgaaaatgaccatcgtgactttgcgggagaactggaagttctgtgcaaattggggcatcaccccaacatcatcaacctcctgggggcctgtaagaaccgaggttacttgtatatcgctattgaatatgccccctacgggaacctgctagattttctgcggaaaagccgggtcctagagactgacccagcttttgctcgagagcatgggacagcctctacccttagctcccggcagctgctgcgtttcgccagtgatgcggccaatggcatgcagtacctgagtgagaagcagttcatccacagggacctggctgcccggaatgtgctggtcggagagaacctagcctccaagattgcagacttcggcctttctcggggagaggaggtttatgtgaagaagacgatggtgagtctcattcaaccctcacccttagggcttgtgcctggccctgccccacaggagcctcaaacaggcccttcctccacactcagcccctcaaacccattctctcctaggggcgtctccctgtgcgctggatggccattgagtccctgaactacagtgtctataccaccaagagtgatgtggcaaggtcatgcccacctgaggatcttaccagagcatgacccccaagactccctctctgtgccccctcccctgcagacagccctcttggcacactcctcctgtctctccagggatgtccatcttgatctgaacctaccccttgccccaagccctttggccttgcctgcatggctcactgcttaccacactgatcactcctctgaccactacatgcctacttcgtgcttctgccccaacactcccttgattccctccaccccctttgaactctctcccctggtctcagggctgatgcacactacacagaggctgttaaagtgtgagatgcagtcaagagtaagagctttggagcctgagttggaacgcttgctctgccactaactagctgtatggccttgggcaatctagctaacctctcagtgcctcagtgtcttcatctgtaaaatggcaagactaatagaacctgtatcatagggttggtgtgagggttaaatgaattaacatgtctgttaaatgaccagggcctggaccacggtaagtgctcaata

SEQ ID NO: 76471 - DNA, 164 bp, Homo sapiens
gtgagtagggagagagctggggcaggacagaggtgttgggtaatagtgaagggatacagtgagcaggagagggagggcaaatggtgcgagggggctgaagggagcatggcagcttctagaagaggtgggggctgaataatgtgtgctttacaccccacgcccag

SEQ ID NO: 76472 - DNA, 318 bp, Homo sapiens
ctcgtgtgcctgtctgtgcctccttccgccccctttgactcttgcgtggaccgtctaccctcttgtctcatcctgtgaagggcgaggagaccatcctgcagttcagctcagggaccttgacacttacccggcggccaaaactgcagcccgagcccctgagctacccagtgctagagtgggaggacatcacctttgaggacctcatcggggaggggaacttcggccaggtcatccgggccatgatcaagaaggacgggctgaagatgaacgcagccatcaaaatgctgaaaggtccactggggcgacccctggcccagc

SEQ ID NO: 76473 - DNA, 327 bp, Homo sapiens
ccaaggtggggcttgctggaaggagtcttggaaggtgtttcaggaataggactggggtaaaggtagtttcggattatgtttgtgtaagtgacgggggatgccttggagaggtttgggaatgctggcggatgcttcctgaggtagatggagaggccactcaggaattgctctcatcttcctccctgaagggcaaggtcatgcccacctgaggatcttaccagagcatgacccccaagactccctctctgtgccccctcccctgcagacagccctcttggcacactcctcctgtctctccagggatgtccatcttgatctgaacctacc

SEQ ID NO: 76474 - DNA, 209 bp, Homo sapiens
accgagagcactttgtcccctcctgcaggaggtacaccctactgtggcatgacctgtgccgagctctatgaaaagctgccccagggctaccgcatggagcagcctcgaaactgtgacgatgaagtgtgagtcaccccatccttgagctccatgatcctatctctgtgatgagtgacctcagctttgatccctgtgaccccatcacccca

SEQ ID NO: 76475 - DNA, 2104 bp, Homo sapiens
aacacaggctgagcagtcaggcccacagcatctgaccccaggcccagctcgtcctggctggcctgggtcggcctctggagtatggtctggcgggtgccccctttcttgctccccatcctcttcttggcttctcatgtggcacccactaccagctggatgtgcagctctaccactgcaccctcctgggcccggcctcgccccctgcacacgtgcttctgccccccagtgggcctccagccccccgacacctccacgcccaggccctctcagactccgagatccagctgacatggaagcacccggaggctctgcctgggccaatatccaagtacgttgtggaggtgcaggtggctgggggtgcaggagacccactgtggatagacgtggacaggcctgaggagacaagcaccatcatccgtggcctcaacgccagcacgcgctacctcttccgcatgcgggccagcattcaggggctcggggactggagcaacacagtagaagagtccaccctgggcaacgggctgcaggctgagggcccagtccaagagagccgggcagctgaagagggcctggatcagcagctgatcctggcggtggtgggctccgtgtctgccacctgcctcaccatcctggccgcccttttaaccctggtgtgcatccgcagaagctgcctgcatcggagacgcaccttcacctaccagtcaggctcgggcgaggagaccatcctgcagttcagctcagggaccttgacacttacccggcggccaaaactgcagcccgagcccctgagctacccagtgctagagtgggaggacatcacctttgaggacctcatcggggaggggaacttcggccaggtcatccgggccatgatcaagaaggacgggctgaagatgaacgcagccatcaaaatgctgaaagagtatgcctctgaaaatgaccatcgtgactttgcgggagaactggaagttctgtgcaaattggggcatcaccccaacatcatcaacctcctgggggcctgtaagaaccgaggttacttgtatatcgctattgaatatgccccctacgggaacctgctagattttctgcggaaaagccgggtcctagagactgacccagcttttgctcgagagcatgggacagcctctacccttagctcccggcagctgctgcgtttcgccagtgatgcggccaatggcatgcagtacctgagtgagaagcagttcatccacagggacctggctgcccggaatgtgctggtcggagagaacctagcctccaagattgcagacttcggcctttctcggggagaggaggtttatgtgaagaagacgatggggcgtctccctgtgcgctggatggccattgagtccctgaactacagtgtctataccaccaagagtgatgtctggtcctttggagtccttctttgggagatagtgagccttggaggtacaccctactgtggcatgacctgtgccgagctctatgaaaagctgccccagggctaccgcatggagcagcctcgaaactgtgacgatgaagtgtacgagctgatgcgtcagtgctggcgggaccgtccctatgagcgacccccctttgcccagattgcgctacagctaggccgcatgctggaagccaggaaggcctatgtgaacatgtcgctgtttgagaacttcacttacgcgggcattgatgccacagctgaggaggcctgagctgccatccagccagaacgtggctctgctggccggagcaaactctgctgtctaacctgtgaccagtctgacccttacagcctctgacttaagctgcctcaaggaatttttttaacttaagggagaaaaaaagggatctggggatggggtgggcttaggggaactgggttcccatgctttgtaggtgtctcatagctatcctgggcatccttctttctagttcagctgccccacaggtgtgtttcccatcccactgctcccccaacacaaacccccactccagctccttcgcttaagccagcactcacaccactaacatgccctgttcagctactcccactcccggcctgtcattcagaaaaaaataaatgttctaataagctcca

SEQ ID NO: 76476 - DNA, 1442 bp, Homo sapiens
ctttgactcttgcgtggaccgtctaccctcttgtctcatcctgtgaagggcgaggagaccatcctgcagttcagctcagggaccttgacacttacccggcggccaaaactgcagcccgagcccctgagctacccagtgctagagtgggaggacatcacctttgaggacctcatcggggaggggaacttcggccaggtcatccgggccatgatcaagaaggacgggctgaagatgaacgcagccatcaaaatgctgaaagagtatgcctctgaaaatgaccatcgtgactttgcgggagaactggaagttctgtgcaaattggggcatcaccccaacatcatcaacctcctgggggcctgtaagaaccgaggttacttgtatatcgctattgaatatgccccctacgggaacctgctagattttctgcggaaaagccgggtcctagagactgacccagcttttgctcgagagcatgggacagcctctacccttagctcccggcagctgctgcgtttcgccagtgatgcggccaatggcatgcagtacctgagtgagaagcagttcatccacagggacctggctgcccggaatgtgctggtcggagagaacctagcctccaagattgcagacttcggcctttctcggggagaggaggtttatgtgaagaagacgatggggcgtctccctgtgcgctggatggccattgagtccctgaactacagtgtctataccaccaagagtgatgtctggtcctttggagtccttctttgggagatagtgagccttggaggtacaccctactgtggcatgacctgtgccgagctctatgaaaagctgccccagggctaccgcatggagcagcctcgaaactgtgacgatgaagtgtacgagctgatgcgtcagtgctggcgggaccgtccctatgagcgacccccctttgcccagattgcgctacagctaggccgcatgctggaagccaggaaggcctatgtgaacatgtcgctgtttgagaacttcacttacgcgggcattgatgccacagctgaggaggcctgagctgccatccagccagaacgtggctctgctggccggagcaaactctgctgtctaacctgtgaccagtctgacccttacagcctctgacttaagctgcctcaaggaatttttttaacttaagggagaaaaaaagggatctggggatggggtgggcttaggggaactgggttcccatgctttgtaggtgtctcatagctatcctgggcatccttctttctagttcagctgccccacaggtgtgtttcccatcccactgctcccccaacacaaacccccactccagctccttcgcttaagccagcactcacaccactaacatgccctgttcagctactcccactcccggcctgtcattcagaaaaaaataaatgttctaataagctcca

SEQ ID NO: 76477 - DNA, 1391 bp, Homo sapiens
ccgtcacgccacagactgggcagctcagggaccttgacacttacccggcggccaaaactgcagcccgagcccctgagctacccagtgctagagtgggaggacatcacctttgaggacctcatcggggaggggaacttcggccaggtcatccgggccatgatcaagaaggacgggctgaagatgaacgcagccatcaaaatgctgaaagagtatgcctctgaaaatgaccatcgtgactttgcgggagaactggaagttctgtgcaaattggggcatcaccccaacatcatcaacctcctgggggcctgtaagaaccgaggttacttgtatatcgctattgaatatgccccctacgggaacctgctagattttctgcggaaaagccgggtcctagagactgacccagcttttgctcgagagcatgggacagcctctacccttagctcccggcagctgctgcgtttcgccagtgatgcggccaatggcatgcagtacctgagtgagaagcagttcatccacagggacctggctgcccggaatgtgctggtcggagagaacctagcctccaagattgcagacttcggcctttctcggggagaggaggtttatgtgaagaagacgatggggcgtctccctgtgcgctggatggccattgagtccctgaactacagtgtctataccaccaagagtgatgtctggtcctttggagtccttctttgggagatagtgagccttggaggtacaccctactgtggcatgacctgtgccgagctctatgaaaagctgccccagggctaccgcatggagcagcctcgaaactgtgacgatgaagtgtacgagctgatgcgtcagtgctggcgggaccgtccctatgagcgacccccctttgcccagattgcgctacagctaggccgcatgctggaagccaggaaggcctatgtgaacatgtcgctgtttgagaacttcacttacgcgggcattgatgccacagctgaggaggcctgagctgccatccagccagaacgtggctctgctggccggagcaaactctgctgtctaacctgtgaccagtctgacccttacagcctctgacttaagctgcctcaaggaatttttttaacttaagggagaaaaaaagggatctggggatggggtgggcttaggggaactgggttcccatgctttgtaggtgtctcatagctatcctgggcatccttctttctagttcagctgccccacaggtgtgtttcccatcccactgctcccccaacacaaacccccactccagctccttcgcttaagccagcactcacaccactaacatgccctgttcagctactcccactcccggcctgtcattcagaaaaaaataaatgttctaataagctcca

SEQ ID NO: 76478 - DNA, 1168 bp, Homo sapiens
  misc_feature (450)..(450): n is a, c, g, or t
  misc_feature (456)..(456): n is a, c, g, or t
  misc_feature (462)..(462): n is a, c, g, or t
  misc_feature (493)..(493): n is a, c, g, or t
  misc_feature (502)..(504): n is a, c, g, or t
  misc_feature (509)..(509): n is a, c, g, or t
  misc_feature (511)..(511): n is a, c, g, or t
tcttttccttccttcacttactttcccccctttcgcggtacctcgggctttgtgttctttcgctgcttcacgcccgggttcctttgttttctgttgctcactagcctctttgtctccgtggtctccttgcgttacatgctctccaaccctcatacggctcttcggtaatgcatcatgcttcttttcgtccaagttgactgccggtccatactggccacttcatgtaatctcttgaatgtgtataattgccaggctgcatcacaaccagggagcgttggctgtcctctgtgaaattgtgctcgttcccgtactatgtaccttatctctccaagaattgccagactttcgtcctttctcggggatacggaaggtttatgtcgaaataagtactactgggcctgtcttccctgtggcgctctgattgccacattgatgttcctgaactacagngtctanaccacncaagaggatgtctggtccttggagtcctctntgggagatnnntgagncntggaggtacaccctactgtggcatgacctgtgccgagctctatgaaaagctgccccagggctaccgcatggagcagcctcgaaactgtgacgatgaagtgtacgagctgatgcgtcagtgctggcgggaccgtccctatgagcgacccccctttgcccagattgcgctacagctaggccgcatgctggaagccaggaaggcctatgtgaacatgtcgctgtttgagaacttcacttacgcgggcattgatgccacagctgaggaggcctgagctgccatccagccagaacgtggctctgctggccggagcaaactctgctgtctaacctgtgaccagtctgacccttacagcctctgacttaagctgcctcaaggaatttttttaacttaagggagaaaaaaagggatctggggatggggtgggcttaggggaactgggttcccatgctttgtaggtgtctcatagctatcctgggcatccttctttctagttcagctgccccacaggtgtgtttcccatcccactgctcccccaacacaaacccccactccagctccttcgcttaagccagcactcacaccactaacatgccctgttcagctactcccactcccggcctgtcattcagaaaaaaataaatgttctaataagctcca

SEQ ID NO: 76479 - DNA, 2615 bp, Homo sapiens
caaccaacgcaaaatagctaggtacaggctggtgtgtaatcggacgaggctaccactccctggactccggagctccagggacccacctctaaggatgaagcaggggtctcagaacaccctgaggcccctgcgagagaacctttgagaaggacaacccctcagcaaggagccagtggcccagggaggtcacctgtgggccaagcaaggcagccagaaaaacccagccatctgcacctggagaaggcgtccagctggccccacaggcgggactcagggaggccaccaggggacagcagtggacaggctgtggctcctagtgaggtgggccaacaagcacaagggctggagccggcagggcctgcgcagaccttccatcttgcctgagggctcttcagattcaagaggtccagccgtggagaaacatccgggaccctcagacactgttgtttttcgggagaaaaaaccaaaggaggtgatgggaggcttttcaagacgctgctccaaactcatcaactcctcccagctgctttaccaggagtatagtgatgttgtcctgaataaggagatccagagccagcagcggctggagagcctgtccgagacacccgggcctagctctccgcggcagcctcggaaggccctggtctcctccgagtcgtacctgcagcggctctccatggcctccagcggctccctctggcaggaaatccccgtggtgcgcaacagcaccgtgctgctctccatgacccatgaagaccaaaagctgcaagaggtcaaatttgagctgattgtgtcagaggcctcctacctgcgcagtctaaacatagctgtggatcatttccaactttcaacttcactccgggccacactttccaaccaggagcaccaatggctcttctctcgtttacaggatgtgcgagacgtcagcgccacgttcctttcagacctggaagagaactttgagaacaatatcttctccttccaagtatgtgacgtagtcctgaaccacgccccagacttccgccgggtctacctgccttatgtcaccaaccagacctatcaggaacgcaccttccagagcctgatgaatagcaacagcaatttccgggaggtcttggagaagctggagagcgaccccgtctgccagcgcctttccctcaagtcctttctgattctgcccttccaacgcatcacccgcctcaaactgctgctccagaacattctgaagagaacacagcctggctcctcggaggaggcagaggccacgaaggcacaccacgccctggagcagctgatccgggactgcaataacaatgtccagagtatgcgacggacagaggagctaatctacctgagccagaagattgagtttgagtgcaaaatattcccgctcatttctcagtcacgctggctggtgaaaagtggggagctgacagccttggagttcagtgcttccccagggctacgaaggaagctgaacacgcgtccagtccacctgcacctcttcaatgactgtctgctgctgtctcggccccgagagggtagccgattcctggtatttgaccatgctcccttctcctccattcggggggaaaagtgtgaaatgaagctacatggacctcacaaaaacctgttccgactctttctgcggcagaacactcagggcgcccaggccgagttcctcttccgcacggagactcaaagtgaaaagcttcggtggatctcagccttggccatgccaagagaggagttggaccttctggagtgttacaactccccccaggtacagtgccttcgagcctacaagccccgagagaatgatgaattggcactggagaaagccgacgtggtgatggtgactcagcagagcagtgacggctggctggagggcgtgaggctctcagacggggagcgaggctggtttcctgtgcagcaggtggagttcatttccaacccagaggtccgtgcacagaacctgaaggaagctcatcgagtcaagactgccaaactacagctggtggaacagcaagcctaagtcttctctgagaggagtttcgtgagctgaagaacaagctgctcatggcaagggctggccccagaaccctgcaagagaggccttctgtggatggagaactaggccttctcaaagctcaaggacaaaatccagctaacccagtccctcggcccaggcctcctttcgtgctttgtgcttggtgggggggatttcgagggactttgcactggactctgggaacctttcatcattaaaaaaagggggaccattggggcctgagccaaggaactttccttctactgccttatagtgcttaaacattctccgcctccagggtgcagattcagagctggccagagtttcagtgatagccgtatgttaaacagaatctcacctcagtctcctggagggagatgtttaagaggggttaacacatcagatgggagggtcagcccggtgacctctaaggtatcttctaacctagaaactcaccataattatggtgcaaggtcagtgtgtctctgagatctatgtctgttggtggcaatgtgagggtgatactctctcactctaataaacttggcacttctccgagtatttt

SEQ ID NO: 76480 - DNA, 2342 bp, Homo sapiens
caaccaacgcaaaatagctaggtacaggctggtgtgtaatcggacgaggctaccactccctggactccggagctccagggacccacctctaaggatgaagcaggggtctcagaacaccctgaggcccctgcgagagaacctttgagaaggacaacccctcagcaaggagccagtggcccagggaggtcacctgtgggccaacaagcacaagggctggagccggcagggcctgcgcagaccttccatcttgcctgagggctcttcagattcaagaggtccagccgtggagaaacatccgggaccctcagacactgttgtttttcgggagaaaaaaccaaaggaggtgatgggaggcttttcaagacgctgctccaaactcatcaactcctcccagctgctttaccaggagtatagtgatgttgtcctgaataaggagatccagagccagcagcggctggagagcctgtccgagacacccgggcctagctctccgcggcagcctcggaaggccctggtctcctccgagtcgtacctgcagcggctctccatggcctccagcggctccctctggcaggaaatccccgtggtgcgcaacagcaccgtgctgctctccatgacccatgaagaccaaaagctgcaagaggtcaaatttgagctgattgtgtcagaggcctcctacctgcgcagtctaaacatagctgtggatcatttccaactttcaacttcactccgggccacactttccaaccaggagcaccaatggctcttctctcgtttacaggatgtgcgagacgtcagcgccacgttcctttcagacctggaagagaactttgagaacaatatcttctccttccaagtatgtgacgtagtcctgaaccacgccccagacttccgccgggtctacctgccttatgtcaccaaccagacctatcaggaacgcaccttccagagcctgatgaatagcaacagcaatttccgggaggtcttggagaagctggagagcgaccccgtctgccagcgcctttccctcaagtcctttctgattctgcccttccaacgcatcacccgcctcaaactgctgctccagaacattctgaagagaacacagcctggctcctcggaggaggcagaggccacgaaggcacaccacgccctggagcagctgatccgggactgcaataacaatgtccagagtatgcgacggacagaggagctaatctacctgagccagaagattgagtttgagtgcaaaatattcccgctcatttctcagtcacgctggctggtgaaaagtggggagctgacagccttggagttcagtgcttccccagggctacgaaggaagctgaacacgcgtccagtccacctgcacctcttcaatgactgtctgctgctgtctcggccccgagagggtagccgattcctggtatttgaccatgctcccttctcctccattcggggggaaaagtgtgaaatgaagctacatggacctcacaaaaacctgttccgactctttctgcggcagaacactcagggcgcccaggccgagttcctcttccgcacggagactcaaagtgaaaagcttcggtggatctcagccttggccatgccaagagaggagttggaccttctggagtgttacaactccccccaggtacagtgccttcgagcctacaagccccgagagaatgatgaattggcactggagaaagccgacgtggtgatggtgactcagcagagcagtgacggctggctggagggcgtgaggctctcagacggggagcgaggctggtttcctgtgcagcaggtggagttcatttccaacccagaggtccgtgcacagaacctgaaggaagctcatcgagtcaagactgccaaactacagctggtggaacagcaagcctaagtcttctctgagaggagtttcgtgagctgaagaacaagctgctcatggcaagggctggccccagaaccctgcaagagaggccttctgtggatggagaactaggccttctcaaagcccaaggaactttccttctactgccttatagtgcttaaacattctccgcctccagggtgcagattcagagctggccagagtttcagtgatagccgtatgttaaacagaatctcacctcagtctcctggagggagatgtttaagaggggttaacacatcagatgggagggtcagcccggtgacctctaaggtatcttctaacctagaaactcaccataattatggtgcaaggtcagtgtgtctctgagatctatgtctgttggtggcaatgtgagggtgatactctctcactctaataaacttggcacttctccgagtatttt

SEQ ID NO: 76481 - DNA, 982 bp, Homo sapiens
caaccaacgcaaaatagctaggtacaggctggtgtgtaatcggacgaggctaccactccctggactccggagctccagggacccacctctaaggatgaagcaggggtctcagaacaccctgaggcccctgcgagagaacctttgagaaggacaacccctcagcaaggagccagtggcccagggaggtcacctgtgggccaacaagcacaagggctggagccggcagggcctgcgcagaccttccatcttgcctgagggctcttcagattcaagaggtccagccgtggagaaacatccgggaccctcagacactgttgtttttcgggagaaaaaaccaaaggaggtgatgggaggcttttcaagacgctgctccaaactcatcaactcctcccagctgctttaccaggagtatagtgatgttgtcctgaataaggagatccagagccagcagcggctggagagcctgtccgagacacccgggcctagctctccgcggcagcctcggaaggccctggtctcctccgagtcgtacctgcagcggctctccatggcctccagcggctccctctggcaggaaatccccgtggtgcgcaacagcaccgtgctgctctccatgacccatgaagaccaaaagctgcaagaggtcaaatttgagctgattgtgtcagaggcctcctacctgcgcagtctaaacatagctgtggatcatttccaactttcaacttcactccgggccacactttccaaccaggagcaccaatggctcttctctcgtttacaggatgtgcgagacgtcagcgccacgttcctttcagacctggaagagaactttgagaacaatatcttctccttccaagtatgtgacgtagtcctgaaccacgccccagacttccgccgggtctacctgccttatgtcaccaaccccacggtgcgttgccacacggtgcgttgcccaacacggtgcgtgcccacacgtgcgtga

SEQ ID NO: 76482 - DNA, 2486 bp, Homo sapiens
caaccaacgcaaaatagctaggtacaggctggtgtgtaatcggacgaggctaccactccctggactccggagctccagggacccacctctaaggatgaagcaggggtctcagaacaccctgaggcccctgcgagagaacctttgagaaggacaacccctcagcaaggagccagtggcccagggaggtcacctgtgggccaacaagcacaagggctggagccggcagggcctgcgcagaccttccatcttgcctgagggctcttcagattcaagaggtccagccgtggagaaacatccgggaccctcagacactgttgtttttcgggagaaaaaaccaaaggaggtgatgggaggcttttcaagacgctgctccaaactcatcaactcctcccagctgctttaccaggagtatagtgatgttgtcctgaataaggagatccagagccagcagcggctggagagcctgtccgagacacccgggcctagctctccgcggcagcctcggaaggccctggtctcctccgagtcgtacctgcagcggctctccatggcctccagcggctccctctggcaggaaatccccgtggtgcgcaacagcaccgtgctgctctccatgacccatgaagaccaaaagctgcaagaggtcaaatttgagctgattgtgtcagaggcctcctacctgcgcagtctaaacatagctgtggatcatttccaactttcaacttcactccgggccacactttccaaccaggagcaccaatggctcttctctcgtttacaggatgtgcgagacgtcagcgccacgttcctttcagacctggaagagaactttgagaacaatatcttctccttccaagtatgtgacgtagtcctgaaccacgccccagacttccgccgggtctacctgccttatgtcaccaaccagacctatcaggaacgcaccttccagagcctgatgaatagcaacagcaatttccgggaggtcttggagaagctggagagcgaccccgtctgccagcgcctttccctcaagtcctttctgattctgcccttccaacgcatcacccgcctcaaactgctgctccagaacattctgaagagaacacagcctggctcctcggaggaggcagaggccacgaaggcacaccacgccctggagcagctgatccgggactgcaataacaatgtccagagtatgcgacggacagaggagctaatctacctgagccagaagattgagtttgagtgcaaaatattcccgctcatttctcagtcacgctggctggtgaaaagtggggagctgacagccttggagttcagtgcttccccagggctacgaaggaagctgaacacgcgtccagtccacctgcacctcttcaatgactgtctgctgctgtctcggccccgagagggtagccgattcctggtatttgaccatgctcccttctcctccattcggggggaaaagtgtgaaatgaagctacatggacctcacaaaaacctgttccgactctttctgcggcagaacactcagggcgcccaggccgagttcctcttccgcacggagactcaaagtgaaaagcttcggtggatctcagccttggccatgccaagagaggagttggaccttctggagtgttacaactccccccaggtacagtgccttcgagcctacaagccccgagagaatgatgaattggcactggagaaagccgacgtggtgatggtgactcagcagagcagtgacggctggctggagggcgtgaggctctcagacggggagcgaggctggtttcctgtgcagcaggtggagttcatttccaacccagaggtccgtgcacagaacctgaaggaagctcatcgagtcaagactgccaaactacagctggtggaacagcaagcctaagtcttctctgagaggagtttcgtgagctgaagaacaagctgctcatggcaagggctggccccagaaccctgcaagagaggccttctgtggatggagaactaggccttctcaaagctcaaggacaaaatccagctaacccagtccctcggcccaggcctcctttcgtgctttgtgcttggtgggggggatttcgagggactttgcactggactctgggaacctttcatcattaaaaaaagggggaccattggggcctgagccaaggaactttccttctactgccttatagtgcttaaacattctccgcctccagggtgcagattcagagctggccagagtttcagtgatagccgtatgttaaacagaatctcacctcagtctcctggagggagatgtttaagaggggttaacacatcagatgggagggtcagcccggtgacctctaaggtatcttctaacctagaaactcaccataattatggtgcaaggtcagtgtgtctctgagatctatgtctgttggtggcaatgtgagggtgatactctctcactctaataaacttggcacttctccgagtatttt

SEQ ID NO: 76483 - DNA, 2246 bp, Homo sapiens
caaccaacgcaaaatagctaggtacaggctggtgtgtaatcggacgaggctaccactccctggactccggagctccagggacccacctctaaggatgaagcaggggtctcagaacaccctgaggcccctgcgagagaacctttgagaaggacaacccctcagcaaggagccagtggcccagggaggtcacctgtgggccaacaagcacaagggctggagccggcagggcctgcgcagaccttccatcttgcctgagggctcttcagattcaagaggtccagccgtggagaaacatccgggaccctcagacactgttgtttttcgggagaaaaaaccaaaggaggtgatgggaggcttttcaagacgctgctccaaactcatcaactcctcccagctgctttaccaggagtatagtgatgttgtcctgaataaggagatccagagccagcagcggctggagagcctgtccgagacacccgggcctagctctccgcggcagcctcggaaggccctggtctcctccgagtcgtacctgcagcggctctccatggcctccagcggctccctctggcaggaaatccccgtggtgcgcaacagcaccgtgctgctctccatgacccatgaagaccaaaagctgcaagaggtcaaatttgagctgattgtgtcagaggcctcctacctgcgcagtctaaacatagctgtggatcatttccaactttcaacttcactccgggccacactttccaaccaggagcaccaatggctcttctctcgtttacaggatgtgcgagacgtcagcgccacgttcctttcagacctggaagagaactttgagaacaatatcttctccttccaagtatgtgacgtagtcctgaaccacgccccagacttccgccgggtctacctgccttatgtcaccaaccagacctatcaggaacgcaccttccagagcctgatgaatagcaacagcaatttccgggaggtcttggagaagctggagagcgaccccgtctgccagcgcctttccctcaagtcctttctgattctgcccttccaacgcatcacccgcctcaaactgctgctccagaacattctgaagagaacacagcctggctcctcggaggaggcagaggccacgaaggcacaccacgccctggagcagctgatccgggactgcaataacaatgtccagagtatgcgacggacagaggagctaatctacctgagccagaagattgagtttgagtgcaaaatattcccgctcatttctcagtcacgctggctggtgaaaagtggggagctgacagccttggagttcagtgcttccccagggctacgaaggaagctgaacacgcgtccagtccacctgcacctcttcaatgactgtctgctgctgtctcggccccgagagggtagccgattcctggtatttgaccatgctcccttctcctccattcggggggaaaagtgtgaaatgaagctacatggacctcacaaaaacctgttccgactctttctgcggcagaacactcagggcgcccaggccgagttcctcttccgcacggagactcagtgagatggggctgggcagaggagctgggggtgggggaagatgggcagccgagaaaagaagtgagaccaaggcagaaaatgtgtccagaagacagccacagcctcatttagcccattctggactggggaccaccatagagaaattcagactcctaaaactaatggataacttgcaggagattggggtgggagagggtacaaagtcaccaccgaggcttagcatctattttatactctttactcaagagggacaaggtctgtgtagtatcagaaaggagaaggactggtatggagtgagcaaggaattggaatactggtatctgtgagcacatgcctccatgcctgaggcagaaacccttctatgccccagctggtgggcacagatgtgaataagacaagtgctgggtgacttttactttctgtgctcccatcttccaaaccagtcctctattgaccagaaatccatagtgttgagaatgctgatttgctcatgttttcaataataataaaataaaatacattcacacagacatacatttttgagagtattaatagtacctataaaatctggaacacagtgcctgcaataatgaacatgtaaaagcctgtagctgttattgctattataaaagatatatgaacagtcatttaaaagtttgacgtatctaagtgtt

SEQ ID NO: 76484 - DNA, 396 bp, Homo sapiens
tggaagagatgcttgttcaagtggaacttgcatggaagtggcatggggaggagggtgggactgggagcaaacctcatgcttctcccatctgtgacactgccttctctctcttcctctgccctgtagatattcccgctcatttctcagtcacgctggctggtgaaaagtggggagctgacagccttggagttcagtgcttccccagggctacgaaggaagctgaacacgcgtccagtccacctgcacctcttcaatgactgtctgctgctgtctcggccccgagagtcagtgactggagtggcaggccagggcacaagaggggaaggggatgaggaaagaggggggtctgaaagggagagagaagggtcatgttcctagaagagcccttctcaatgg

SEQ ID NO: 76485 - DNA, 330 bp, Homo sapiens
agaggccgacctctaatttgaagcctagaagaagcaacaagggatgactttgcttggccctgagctgacagtctaggatgagagcaagtgacagacgacagcaaccccagctgaatgctctgtaagtcccctacccccaccatctctgtccaagatgagtcaaaacttgtggcacagggagggaagctgcagtgcccccgggaaaggagcttgtggctgagtagctgggaaaacgtttgaatgaggagacagcagagacgtgggccagattccccaagggaagtggtaagcaccccatagcttgagtcactggactgctggggcagctac

SEQ ID NO: 76486 - DNA, 1707 bp, Homo sapiens
  misc_feature (60)..(60): n is a, c, g, or t
  misc_feature (453)..(453): n is a, c, g, or t
  misc_feature (925)..(925): n is a, c, g, or t
  misc_feature (1295)..(1295): n is a, c, g, or t
  misc_feature (1382)..(1382): n is a, c, g, or t
  misc_feature (1482)..(1482): n is a, c, g, or t
  misc_feature (1577)..(1577): n is a, c, g, or t
atggtcaaggtcaagcgttagtcgggttgacgaggtgtgcccttgctgtgatgcaatacncgtggagctttgcctctgtggtcttccccactaaaactcacagccttcatctcaccgtgagaaaaaaaatcaggcaaattctgatagaggagcatcctacaatatccctcatcagtcctcctgaaaaccaccaagatcatccaaacccgagtcagaaactgtcacagcaagaggggtctaaagacacatgatgactagatgtcacgtgagaccctggatgggatcctggaacagaaaatggatattaggtaaaaacgaaggaaatccgaataatctagggactttagttcctaataatacgtcggtattggttcgctaattataacaaaattactatactaatgttaggtattaataataggggcatggcatatgggaactctgaactatatnctcaatatatctgtaaatctaaaactattttttttgaagagcatcttttttttttttttttttttaaccctgcagcaatgagctttgggatggacagcctgtgaaccagactctcctctctccaggaaatttggtgagctattcagcatctttttaatctctttcttgcttaaactagctgcagtgagagctctgttgtctgcaaccaagaatctagactaatacctgcatttagttatttacatacgtgtttaaaaaagagagagctgcaggagatttggtgtcattttccattttgagctgcgatcatttttaaaatgcaggataatgtctgcaaagtacctggggatagagtcaggactaatgagataatatctgcaaaatgctttgagttccctggagctgctgagaggcaaggaacatgcattatcatcattagaaaaaacaagctttgaaaactttggcagaaggngatataagtgaaatcagttcaattactcatgccttcaatagacaagttctataaaagttaaagtattttttttttttgtaaatcaaattcctcttcatttcctctgtcaaacattactgttctatgatctttcaattatttttggttggactccctttgacaatgtattgaagcagctttcgtttctctgcttccagattctctggcagatattctcaaacttcaaatctatctccattttgagaaaatatacaaagcatatgctttcttttaatgttacttgaaatttcaaaacaacatggtgaccaaaactaaaccaatacaatgataggaatagaagaaatattatttttatttttcaaattttttnttttatttatttacttacctatttatttttgagacagggtcttgctctgttgccaggctggaaggcagtggcacgatcacgccacancctcccaagtagctggggctacaggtgtgcccctaatgttttatttatttttgttttttgtagggagggcatctccctaggtgtctagactggtctcaantcctggctcaagcgattctcctgcctcagcctcccaaagtgctggaatttacaggcgtgaagccaccacactcggccatctttaaagatacattnaaaaaatttgtcagttatatatgagtaagcttggagtcttgcattggcatcttctgaagaagagggagaacagagctcatcatgaccctttcaacatctagcctaacgcactgttttgttttcaaagtcc

SEQ ID NO: 76487 - DNA, 331 bp, Homo sapiens
gaatacaacatttttattcaaaagagatttttaacaataattaacaataatttagccccaagccctcattttatagacagggagccagaggcacagagaagttgtgtcctatactgctatcacagagctagttggtgacagccatgaggcaatcaaccaaaatctgttaaaattgctgctaaaggggtattaacttgatattaacttaacttatcaaaggaaaaatggcagtcactctagattctgatcaggtaaaaaaagtaagaatgactgtctttaaaaattttaactaaactattccattagcttaaatgaggctgaattaaaaata

SEQ ID NO: 76488 - DNA, 439 bp, Homo sapiens
  misc_feature (434)..(435): n is a, c, g, or t
tggagatggagtctcactcttgtcacccaggctggagtgcaggaaaggcagctgaccacattcaacacggattcaggaaaagccctcagcaaatgaggaagctcttccgcctgtaagtgcaccagtgcaaacccaacactgagccgggagagactgagcccatgttcaccgagactgggaataagattagcgagcgccggctcacctcgccagtgcagtgagaagccgaggcacagactgacaaggggaagcaaagccactgtcagacagaggacacgcgtgtgcacacggaaaccccacgagtccacagaaacaccgccatggccaaggcgggagtttagggcacaggattaaagcaccacacacaggtgacaaatgaaataaaaatacacagtcctcaatagcatatcgaacacctaggactagatctaaannaaaa

SEQ ID NO: 76489 - DNA, 707 bp, Homo sapiens
  misc_feature (702)..(703): n is a, c, g, or t
caatcctatacaaactatggcagaacttgtttcaggaggcccacttaatgcaatatcaaaccatgacagacacatcacatgacaagacaatgaacatccaagcccagtgtccctcaagagcattcctacacaggaggtccttagcccggtatgagcaaatctcatttggccatgcagagaaaaggccaatgcaccatggccacagggacttacctggaaatgccaggtcatcttggcatatgaaagtcagcgtaattcactacagtaatgcggtaaggaagtgacctcatgagcatctcactaggtgcaggaaaggcagctgaccacattcaacacggattcaggaaaagccctcagcaaatgaggaagctcttccgcctgtaagtgcaccagtgcaaacccaacactgagccgggagagactgagcccatgttcaccgagactgggaataagattagcgagcgccggctcacctcgccagtgcagtgagaagccgaggcacagactgacaaggggaagcaaagccactgtcagacagaggacacgcgtgtgcacacggaaaccccacgagtccacagaaacaccgccatggccaaggcgggagtttagggcacaggattaaagcaccacacacaggtgacaaatgaaataaaaatacacagtcctcaatagcatatcgaacacctaggactagatctaaannaaaa

SEQ ID NO: 76490 - DNA, 430 bp, Homo sapiens
gtctaatttttttctcgttttgtacttagtagagtttcgatctagattactccaacttcataaaagattcaggaagtaccgaatgacctcaaggacctaatatcctcaattctaccagaactggaagaattggaagaggactctgagcatcagataagaacaccggctagataacaccttggtttccgccttgtgataccatgagcagagaacctagctgcggtatgcctggactggtgatctacagacatgttagacaatctcattctaagcctctgcacttgtggatattttttaatgcagaattagaaaactaataatgtcagattgggtaaattgtgtttttcagaaaatttgttcattgtttccaagttgtaaaatttatacatgtaaacatgttcataaatttttatattttcgacgtctataa

SEQ ID NO: 76491 - DNA, 679 bp, Homo sapiens
caaccatgaagctcctttttcctatctttgccagcctcatgctacagtaccaggtgaacacagaatttattggcttgagacgctgtttaatgggtttggggagatgcagggatcactgcaatgtggatgaaaaagagatacagaaatgcaagatgaaaaaatgttgtgttggaccaaaagtggttaaattgattaaaaactacctgcaatatggaacaccaaatgtacttaatgaagacgtccaagaaatgctaaaacctgccaagaattctagtgctgtgatacaaagaaaacatattttatctgttctcccccaaatcaaaagcactagcttttttgctaataccaactttgtcatcattccaaatgccacccctatgaactctgccaccatcagcactatgaccccaggacagatcacatacactgctacttctaccaagagtaacaccaaagaaagcagagattctgccactgcctcgccaccaccagcaccacctccaccaaacatactgccaacaccatcactggagctagaggaagcagaagagcagtaatgtggatctttcccttaaaactccaagttcctctctatttttgctatctataaaatgacatagaactgtttcctctgtcatcagtcattcaataaacactgtttgagcacctacaataaaaa

SEQ ID NO: 76492 - DNA, 670 bp, Homo sapiens
cctatctcaaagaaaaaaaagttatataaatggaatcatactgtatttaatcttttgagatcatgttttcactcagcataattctcttgagatttatccaagttatcgtgtatatcagtagacattccaaatggtacagtaatgtcacaccgagaatctgctcctccataaaagcaatgaggacattagcaaaagctgttgacataaacttattagaattgtggaaattaacaaaagcttgccacattccaaggaatgtttacctaagaaaaacagctgaatctcagtaagaacggaaagcctatagtgttttaacttgctctaatcctatacacctctccccagttccatggaagccttgaaactcaatagcttcacatttatagtagttgtggaaagtagagcttagcagccactggagagaaaagaacagatttgaagcccaaaaaggctcattcccagagaattaaccacgagttgacctaacagctcactgaaaatctccataatcaggacttcttttaattcgacctatttcagagtacactctgtatacagcttgatgtacagggcatttatttcttaaaaaacaatcagtagttcaacaaaagaaattagacttaaccaaaatgaaacttttgtgcttcaaatcataacatcaacatacata

SEQ ID NO: 76493 - DNA, 277 bp, Homo sapiens
  misc_feature (54)..(54): n is a, c, g, or t
  misc_feature (250)..(250): n is a, c, g, or t
  misc_feature (256)..(256): n is a, c, g, or t
tgcctcaagtaccctaggggtaaaatttcttccctcaattcctactgatattanagaaaacttacaatgtattttacggtcctgacaattacaggtgggattcataggagatatattgacgtgacttttggattctaaacagtgctgagataattaagcagaatctgaattaagattggaagtggccacccaggatatgataacagttaaataatctagaaactacttttttaattgcgttaggagagancaagtnttctcatggctgttctttctc

SEQ ID NO: 76494 - DNA, 1027 bp, Homo sapiens
cagggctgtgtgttccagaaggctgataccatggaagacatcaccttggcttcctggctgtctggttagtgatttgagcaatgagaggcagcagctagaaatgaaagagtagaagaagagagtgtctcctgacactgtgtgcatggtctccagtcagcctctgattccttcccagggcctgattggttcagcaccaagtgaagtcatagtcactatggtgactcacaattgtcctcagaacctagtgccaacagtctgcaagattcaaacactggccaccatgcctggcttccttctggttcaagcctgaataaggtccctcttctgtgctgtcttcctgaagccatctgtggagtcaagcagtcatggctcagggacactctgaagtaggtcccagcacatctgcatggagcatcaggaggaaggtggatgaatacttaagacccagcctggcctctaaatcggtgctgagcgttttactcagtagacagcttgggaatcatagaaacgatgcggatctgacagagtggctgtggacactgaagcaagccataccagggtggacctggcctttgccgacacgccacacaatcaacccacctctgccccctggggaggatggaaaatccaagaaaatggtgtggatcaataaatccttcccctgatgcaaccattacaagtggaagctgtgttctcactgcttttggctggacatggtctttgatcacctggtttcttgacttctgacccgtctctgtgttacccgaggccacagcagatgaactttacctactgccctccgagaaggtgtttactaacgttgtagagtctggggatgttggagacacgaggggccctgcttagagaagctggaagggcagctgagtggaacatggagaggccctgcaaccctaaatttctagggggaggggactttcaggagcccacttagaggtcttgatttgtctcccttgaagtttgggggagagcatgggtagaaattgaaatcaaataaatttaaaatgag

SEQ ID NO: 76495 - DNA, 1559 bp, Homo sapiens
aaaaccttgagtttaaaccatccctttctcttgttgggtccaaatggacagactctggttttctattgaagatttacacgcagattcctgtcataatttttcttttctatcgagccctgtcatgatgataagtgatagcaggttggttcctagatcatacaccatggacctagcacagaagtgttttcagaagagccttttccttacaaaacagcatgaaagtcattgagccaatggatactgagatttcaaactggagccaatggatacttagaggagccctgaagtgtagagtagttgctacttcttgttcactaggtctaattagcatgtcatcagtgtaacagactagtgtgttgtcttgtgaaagagaaaggtgataagatccctgtgaactaaactatgatgtagggcttgaaaattgatatacaatacgcctgaggtaggatggcgaaggtgtattcctggtcttaccagctgaaagtaaattgcttctggtggtctttactaacagttattgagaaaaaaagcattttcaaggtcaagaggtacatactaggttccaggggatatgttaatttgctcaagaaatgaaaccacatctggaacagcagctgcaattggagtcatcacctggcttagtttacaatgacccactaccatcttccaagatccatctgccttctgcataggccaaacagtcccagggcctgattggttcagcaccaagtgaagtcatagtcactatggtgactcacaattgtcctcagaacctagtgccaacagtctgcaagattcaaacactggccaccatgcctggcttccttctggttcaagcctgaataaggtccctcttctgtgctgtcttcctgaagccatctgtggagtcaagcagtcatggctcagggacactctgaagtaggtcccagcacatctgcatggagcatcaggaggaaggtggatgaatacttaagacccagcctggcctctaaatcggtgctgagcgttttactcagtagacagcttgggaatcatagaaacgatgcggatctgacagagtggctgtggacactgaagcaagccataccagggtggacctggcctttgccgacacgccacacaatcaacccacctctgccccctggggaggatggaaaatccaagaaaatggtgtggatcaataaatccttcccctgatgcaaccattacaagtggaagctgtgttctcactgcttttggctggacatggtctttgatcacctggtttcttgacttctgacccgtctctgtgttacccgaggccacagcagatgaactttacctactgccctccgagaaggtgtttactaacgttgtagagtctggggatgttggagacacgaggggccctgcttagagaagctggaagggcagctgagtggaacatggagaggccctgcaaccctaaatttctagggggaggggactttcaggagcccacttagaggtcttgatttgtctcccttgaagtttgggggagagcatgggtagaaattgaaatcaaataaatttaaaatgag

SEQ ID NO: 76496 - DNA, 1531 bp, Homo sapiens
aaaaccttgagtttaaaccatccctttctcttgttgggtccaaatggacagactctggttttctattgaagatttacacgcagattcctgtcataatttttcttttctatcgagccctgtcatgatgataagtgatagcaggttggttcctagatcatacaccatggacctagcacagaagtgttttcagaagagccttttccttacaaaacagcatgaaagtcattgagccaatggatactgagatttcaaactggagccaatggatacttagaggagccctgaagtgtagagtagttgctacttcttgttcactaggtctaattagcatgtcatcagtgtaacagactagtgtgttgtcttgtgaaagagaaaggtgataagatccctgtgaactaaactatgatgtagggcttgaaaattgatatacaatacgcctgaggtaggatggcgaaggtgtattcctggtcttaccagctgaaagtaaattgcttctggtggtctttactaacagttattgagaaaaaaagcattttcaaggtcaagaggtacatactaggttccaggggatatgttaatttgctcaagaaatgaaaccacatctggaacagcagctgcaattggagtcatcacctggcttagtttacaatgacccactaccatcttccaagatccatctgccttctgcataggccaaacagtcccagggcctgattggttcagcaccaagtgaagtcatagtcactatggtgactcacaattgtcctcagaacctagtgccaacagtctgcaagattcaaacactggccaccatgcctggcttccttctggttcaagcctgaataaggtccctcttctgtgctgtcttcctgaagccatctgtggagtcaagcagtcatggctcagggacactctgaagtaggtcccagcacatctgcatggagcatcaggaggaaggtggatgaatacttaagacccagcctggcctctaaatcggtgctgagcgttttactcagtagacagcttgggaatcatagaaacgatgcggatctgacagagtggctgtggacactgaagcaagccataccagggtggacctggcctttgccgacacgccacacaatcaacccacctctgccccctggggaggatggaaaatccaagaaaatggtgtggatcaataaatccttcccctgatgcaaccattaaaaaaaaaaaaaaaaaaaaaaaaaaaaaaaaaaaaaaaaaaaaaaaaaaaggggggcgcggcgccccgcgaagaaatatcccccgcaggggggccaccaactgttgcgccagctccccccgttttccggtgtacacaacggggcgcccccacaggagaagggcggggtatataagaacggcagaggcaccgcagggcgcggccgttaaaccacaggggggcggcggtggggaaaaacgccggcccgggcgggcacgccctggggaaggaaacccccaacctcgggggggggggacaccctggggagccagctccccagcgggg

SEQ ID NO: 76497 - DNA, 462 bp, Homo sapiens
gtaggactgctgacaggaagaaagtggtggagtcagaggtcacaatccaaagcaaggtgacagtctcttgacgaagacaccctgagtgctgaattaaggggctaaataacagtgctatagtggtttcataatcataaagcattccaggaacacaatattgcttatcaactgagctttaaaacagatatgaggcaggacatggtggctcacacctgcactcccagcaatttggcaagccaagctttgatggctctggcagaaagccttcctgttccaaactcaccacttatcatcatagtacccgcgttcaggcattaagaagaaaagagcatccaatccctctgctttcctgcatcggctcccatgcacaagcaaatgtgttgtgttagtggctatcaaatattcatgtatttgatcaaggaaatttgtatttccaaatggtaaaacaaaaatactactaaa

SEQ ID NO: 76498 - DNA, 1773 bp, Homo sapiens
gagcttcttgcccagaaacaaagtttatgctctatgtgatcagctacatctccttaggttccatacttatcaggggcttttgacatggaagaatgtgataattggggagcaaccttctgagaattcagcctttgaagtaattcaaagacagtttcttagcacacacgttaactccagacacagcagtggtgggtgcctccattgaggtttccgttttctcttctgtccatcaagggcccaacatccaactggtcccacagtgagcaggggcaactcttgcttcttcagcatctggccacttcgtttccatggtaactgccacgtgtacttttctagcagtctgtggccactccgtactcagctgaaaacactgtttcagccccctctctggtgacctcagccttctccaggtgtatctcttgatgatcttggagaccagcagccacagctgctgctactcctgcaggagactgtcaggctgtggtggggggcaggggtgttggaggagaagttgaaaatccgtgtgttctctgcccctctgctcctccatcttagcttctggaggagttaaggcaccaagggcaccaagtcaggttggcagttttgctgcccttgcccaagcctccagcaaaactagctggtcccctgctttgctgggtcccagccaggtgtgattttggttgttgattagtaaccacacattgtttttccccacctttttcattagtggaggttttgtttgtttgttttgttgtttgagacagagtctcacgctcttttcagactggagtgcagtggtgcgatgtcagctcactgcaacctccacttcccgggttcagacgattctcatgcctcagcctcctgagtagctgggattacagatgtgcaccaccacacctggctaatttttgtatttttagtagagatggggtttcaccatattggccaggctggtctcaaactcctgacctcaggcgattggcccacctcggcctcccaaagtgctgggattacaggtgtgaaccaccgtgcccggcccattagtggagttctgatgggcacggtaaatattattaatgaaagagaaattctgtatacttttttaaaaatctctttaatgaaagaatgaagagtggcagagataataattgaaagattagtttctcatggaattaatttggccttgatattcagtatttggaaatgtcttaaagaaaaccattttcattgtagaaaatccttttttaaatacttgttatatcccagggagattagtttataccttccacctcaggcagtcatcagctgctttagagaatggaatccaccctgcccctccattttttggttcctggggctcaattcaagtctggtcaagtctccctggctggggattctgtcctgggaacagatactcagttgtagtctcatgtgtctgcactcacccaagactctatatacttgcttgctcagagcatagttagggcagctcctaaaaatgcattcagcagaagactgaaaaacttcaattgcttcatttgtatgcaaatagaaaatggtagataattatatattatacgcctttgtgtaagttcatttaatacttgaagcagtctttgtctcaaaagagtatgcccttactgagaaaggatatgtgaacggtacatttattgttggggagagtggattgtttacatcatgtctggacttttgtctagttgggtagacagttctacaccagcagcccccttaataaagaagtctacacagaca

SEQ ID NO: 76499 - DNA, 2928 bp, Homo sapiens
aaaatattttccgtgtccccgcctgcagagtcagtgtgcggtttgggagaaaatgtgtcggatattttggggcggtcacgtgggcgggcgggctccgagaggccccgggacagtcccagcctagagccgtgcccccccaggagccccccagtacggcgagccccggacattgcgacgctccatccaagagactgcccgacgccgggacctcggggctccgccgcctcccttccccctcccactccagcagctacggcccagttccctcaacctgacccagtatgtagaagccagtctctgcaggcggccagcgggacttttggaggcccagtgggcaggccaggcagggcgggtacggagcctcccaggctggggcagtgggcatgggcaggggctgtggctgaagacctcgcccgcccactgcagaccccaggggactctcacaccgcagctgccatggccaccaataaggagcgactctttgcggctggtgccctggggcctggatctggctacccaggggcaggtttccccttcgccttcccaggggcactcagggggtctccgcctttcgagatgctgagccctagcttccggggcctgggccagcctgacctccccaaggagatggcctctctgtcggtggagacacagagcaccagctcagaggagatggtgcccagctcgccctcgccccctccgcctcctcgggtctacaagccatgcttcgtgtgcaatgacaagtcctctggctaccactatggggtcagctcttgtgaaggctgcaagggcttctttcgccgaagcatccagaagaacatggtgtacacgtgtcaccgcgacaaaaactgtatcatcaacaaggtgaccaggaatcgctgccagtactgccggctacagaagtgcttcgaagtgggcatgtccaaggaagctgtgcgaaatgaccggaacaagaagaagaaagaggtgaaggaagaagggtcacctgacagctatgagctgagccctcagttagaagagctcatcaccaaggtcagcaaagcccatcaggagactttcccctcgctctgccagctgggcaagtataccacgaactccagtgcagaccaccgcgtgcagctggatctggggctgtgggacaagttcagtgagctggctaccaagtgcatcatcaagatcgtggagtttgccaagcggttgcctggctttacagggctcagcattgctgaccagatcactctgctcaaagctgcctgcctagatatcctgatgctgcgtatctgcacaaggtacaccccagagcaggacaccatgaccttctccgacgggctgaccctgaaccggacccagatgcacaatgccggcttcgggcccctcacagaccttgtctttgcctttgctgggcagctcctgcccctggagatggatgacaccgagacagggctgctcagcgccatctgcctcatctgcggagaccgcatggacctggaggagcccgaaaaagtggacaagctgcaggagccactgctggaagccctgaggctgtacgcccggcgccggcggcccagccagccctacatgttcccaaggatgctaatgaaaatcaccgacctccggggcatcagcactaagggagctgaaagggccattactctgaagatggagattccaggcccgatgcctcccttaatccgagagatgctggagaaccctgaaatgtttgaggatgactcctcgcagcctggtccccaccccaatgcctctagcgaggatgaggttcctgggggccagggcaaagggggcctgaagtccccagcctgaccagggcccctgacctccccgctgtgggggttggggcttcaggcagcagactgaccatctcccagaccgccagtgactgggggaggacctgctctgccctctccccaccccttccaatgagctccttgtttttgccaaagtttctaggggtgcctctgtgttcatccccttcctgatctaaccggctccctcgccagtcccgggggcctgccctgctcccaccaggagagagggcaaagggatgagcctgggtttggactctaaaatctcagcactgccccatgggtcctagacttcccagggcaagaggaagaccctgccattccacagccccttcctctgccaggtgcttggctctctgagagcaaacaggaacactagagaccaaaaaggggacaaaggagaagggctgagcccaccttcttgctcctacccttggtgcctaatgctgtgtgatgcacctgcagggtgtgtgctagcctctgtgccccgtccttgtgccaggtcaaggtgggggcaggctgggccctgcatttctggggcaggaacagagggtgaaagggacagatagatgcaggtccattctgcacctcttggctcgggtgcagagttcaccctgtgccctccgttataagtccctcccccagccctgtcatgtgccttgggctcctcctgccctccatctcagccattggggcagggaccctcctacactacagaggggccaggggatccctctctccctagtgccttccaccctttactccccagagcagcttggcccagggaggggggatgctgcttagctgatcccgccctgacccagaggaagcctctatttatttattagcttttgtttacaccgtggaattgaccccttcctccaggggtcttgggtgggggagcccagggcccctgtgacccctcctttcttcctccaatccccagtttgtatttagctgccaaataagattcccattggctccctgtgttctcttggggggtcagggtgctgtcccctcccctctgtttacatctcccctctaccccgctgtatcgcatattgctgagttttctatttttgcaaaataaagtgatggaaactca

SEQ ID NO: 76500 - DNA, 2602 bp, Homo sapiens
aaaatattttccgtgtccccgcctgcagagtcagtgtgcggtttgggagaaaatgtgtcggatattttggggcggtcacgtgggcgggcgggctccgagaggccccgggacagtcccagcctagagccgtgcccccccaggagccccccagtacggcgagccccggacattgcgacgctccatccaagagactgcccgacgccgggacctcggggctccgccgcctcccttccccctcccactccagcagctacggcccagttccctcaacctgacccagtatgtagaagccagtctctgcaggcggccagcggcggtggagacacagagcaccagctcagaggagatggtgcccagctcgccctcgccccctccgcctcctcgggtctacaagccatgcttcgtgtgcaatgacaagtcctctggctaccactatggggtcagctcttgtgaaggctgcaagggcttctttcgccgaagcatccagaagaacatggtgtacacgtgtcaccgcgacaaaaactgtatcatcaacaaggtgaccaggaatcgctgccagtactgccggctacagaagtgcttcgaagtgggcatgtccaaggaagctgtgcgaaatgaccggaacaagaagaagaaagaggtgaaggaagaagggtcacctgacagctatgagctgagccctcagttagaagagctcatcaccaaggtcagcaaagcccatcaggagactttcccctcgctctgccagctgggcaagtataccacgaactccagtgcagaccaccgcgtgcagctggatctggggctgtgggacaagttcagtgagctggctaccaagtgcatcatcaagatcgtggagtttgccaagcggttgcctggctttacagggctcagcattgctgaccagatcactctgctcaaagctgcctgcctagatatcctgatgctgcgtatctgcacaaggtacaccccagagcaggacaccatgaccttctccgacgggctgaccctgaaccggacccagatgcacaatgccggcttcgggcccctcacagaccttgtctttgcctttgctgggcagctcctgcccctggagatggatgacaccgagacagggctgctcagcgccatctgcctcatctgcggagaccgcatggacctggaggagcccgaaaaagtggacaagctgcaggagccactgctggaagccctgaggctgtacgcccggcgccggcggcccagccagccctacatgttcccaaggatgctaatgaaaatcaccgacctccggggcatcagcactaagggagctgaaagggccattactctgaagatggagattccaggcccgatgcctcccttaatccgagagatgctggagaaccctgaaatgtttgaggatgactcctcgcagcctggtccccaccccaatgcctctagcgaggatgaggttcctgggggccagggcaaagggggcctgaagtccccagcctgaccagggcccctgacctccccgctgtgggggttggggcttcaggcagcagactgaccatctcccagaccgccagtgactgggggaggacctgctctgccctctccccaccccttccaatgagctccttgtttttgccaaagtttctaggggtgcctctgtgttcatccccttcctgatctaaccggctccctcgccagtcccgggggcctgccctgctcccaccaggagagagggcaaagggatgagcctgggtttggactctaaaatctcagcactgccccatgggtcctagacttcccagggcaagaggaagaccctgccattccacagccccttcctctgccaggtgcttggctctctgagagcaaacaggaacactagagaccaaaaaggggacaaaggagaagggctgagcccaccttcttgctcctacccttggtgcctaatgctgtgtgatgcacctgcagggtgtgtgctagcctctgtgccccgtccttgtgccaggtcaaggtgggggcaggctgggccctgcatttctggggcaggaacagagggtgaaagggacagatagatgcaggtccattctgcacctcttggctcgggtgcagagttcaccctgtgccctccgttataagtccctcccccagccctgtcatgtgccttgggctcctcctgccctccatctcagccattggggcagggaccctcctacactacagaggggccaggggatccctctctccctagtgccttccaccctttactccccagagcagcttggcccagggaggggggatgctgcttagctgatcccgccctgacccagaggaagcctctatttatttattagcttttgtttacaccgtggaattgaccccttcctccaggggtcttgggtgggggagcccagggcccctgtgacccctcctttcttcctccaatccccagtttgtatttagctgccaaataagattcccattggctccctgtgttctcttggggggtcagggtgctgtcccctcccctctgtttacatctcccctctaccccgctgtatcgcatattgctgagttttctatttttgcaaaataaagtgatggaaactca

SEQ ID NO: 76501 - DNA, 2453 bp, Homo sapiens
aaaatattttccgtgtccccgcctgcagagtcagtgtgcggtttgggagaaaatgtgtcggatattttggggcggtcacgtgggcgggcgggctccgagaggccccgggacagtcccagcctagagccgtgcccccccaggagccccccagtacggcgagccccggacattgcgacgctccatccaagagactgcccgacgccgggacctcggggctccgccgcctcccttccccctcccactccagcagctacggcccagttccctcaacctgacccagtatgtagaagccagtctctgcaggcggccagcggggcttctttcgccgaagcatccagaagaacatggtgtacacgtgtcaccgcgacaaaaactgtatcatcaacaaggtgaccaggaatcgctgccagtactgccggctacagaagtgcttcgaagtgggcatgtccaaggaagctgtgcgaaatgaccggaacaagaagaagaaagaggtgaaggaagaagggtcacctgacagctatgagctgagccctcagttagaagagctcatcaccaaggtcagcaaagcccatcaggagactttcccctcgctctgccagctgggcaagtataccacgaactccagtgcagaccaccgcgtgcagctggatctggggctgtgggacaagttcagtgagctggctaccaagtgcatcatcaagatcgtggagtttgccaagcggttgcctggctttacagggctcagcattgctgaccagatcactctgctcaaagctgcctgcctagatatcctgatgctgcgtatctgcacaaggtacaccccagagcaggacaccatgaccttctccgacgggctgaccctgaaccggacccagatgcacaatgccggcttcgggcccctcacagaccttgtctttgcctttgctgggcagctcctgcccctggagatggatgacaccgagacagggctgctcagcgccatctgcctcatctgcggagaccgcatggacctggaggagcccgaaaaagtggacaagctgcaggagccactgctggaagccctgaggctgtacgcccggcgccggcggcccagccagccctacatgttcccaaggatgctaatgaaaatcaccgacctccggggcatcagcactaagggagctgaaagggccattactctgaagatggagattccaggcccgatgcctcccttaatccgagagatgctggagaaccctgaaatgtttgaggatgactcctcgcagcctggtccccaccccaatgcctctagcgaggatgaggttcctgggggccagggcaaagggggcctgaagtccccagcctgaccagggcccctgacctccccgctgtgggggttggggcttcaggcagcagactgaccatctcccagaccgccagtgactgggggaggacctgctctgccctctccccaccccttccaatgagctccttgtttttgccaaagtttctaggggtgcctctgtgttcatccccttcctgatctaaccggctccctcgccagtcccgggggcctgccctgctcccaccaggagagagggcaaagggatgagcctgggtttggactctaaaatctcagcactgccccatgggtcctagacttcccagggcaagaggaagaccctgccattccacagccccttcctctgccaggtgcttggctctctgagagcaaacaggaacactagagaccaaaaaggggacaaaggagaagggctgagcccaccttcttgctcctacccttggtgcctaatgctgtgtgatgcacctgcagggtgtgtgctagcctctgtgccccgtccttgtgccaggtcaaggtgggggcaggctgggccctgcatttctggggcaggaacagagggtgaaagggacagatagatgcaggtccattctgcacctcttggctcgggtgcagagttcaccctgtgccctccgttataagtccctcccccagccctgtcatgtgccttgggctcctcctgccctccatctcagccattggggcagggaccctcctacactacagaggggccaggggatccctctctccctagtgccttccaccctttactccccagagcagcttggcccagggaggggggatgctgcttagctgatcccgccctgacccagaggaagcctctatttatttattagcttttgtttacaccgtggaattgaccccttcctccaggggtcttgggtgggggagcccagggcccctgtgacccctcctttcttcctccaatccccagtttgtatttagctgccaaataagattcccattggctccctgtgttctcttggggggtcagggtgctgtcccctcccctctgtttacatctcccctctaccccgctgtatcgcatattgctgagttttctatttttgcaaaataaagtgatggaaactca

SEQ ID NO: 76502 - DNA, 2208 bp, Homo sapiens
ccgctatagaggatcccgtctgagcagctgggagtaggtcattggcactcggctcctcgtagagggtcttggatagcgggcgaggaagggcagcagctggcacacctccttacgcaaggatgaggtctcctcggcagccaggcacccaggatccgcaccgaggcaaacacaaagggctccttctgcttctctgaccccacctgcagcaggtagtggataacagcccctatggcctccttcatgacgctcacgagctgcagcttctgtggctccttaagcagtgactgctcacagcgagtgcattcctggatccccaactccatgagggcatagaaggcggtcgccacatcctctttcacctccgtgcccgtcaactccagtgcagaccaccgcgtgcagctggatctggggctgtgggacaagttcagtgagctggctaccaagtgcatcatcaagatcgtggagtttgccaagcggttgcctggctttacagggctcagcattgctgaccagatcactctgctcaaagctgcctgcctagatatcctgatgctgcgtatctgcacaaggtacaccccagagcaggacaccatgaccttctccgacgggctgaccctgaaccggacccagatgcacaatgccggcttcgggcccctcacagaccttgtctttgcctttgctgggcagctcctgcccctggagatggatgacaccgagacagggctgctcagcgccatctgcctcatctgcggagaccgcatggacctggaggagcccgaaaaagtggacaagctgcaggagccactgctggaagccctgaggctgtacgcccggcgccggcggcccagccagccctacatgttcccaaggatgctaatgaaaatcaccgacctccggggcatcagcactaagggagctgaaagggccattactctgaagatggagattccaggcccgatgcctcccttaatccgagagatgctggagaaccctgaaatgtttgaggatgactcctcgcagcctggtccccaccccaatgcctctagcgaggatgaggttcctgggggccagggcaaagggggcctgaagtccccagcctgaccagggcccctgacctccccgctgtgggggttggggcttcaggcagcagactgaccatctcccagaccgccagtgactgggggaggacctgctctgccctctccccaccccttccaatgagctccttgtttttgccaaagtttctaggggtgcctctgtgttcatccccttcctgatctaaccggctccctcgccagtcccgggggcctgccctgctcccaccaggagagagggcaaagggatgagcctgggtttggactctaaaatctcagcactgccccatgggtcctagacttcccagggcaagaggaagaccctgccattccacagccccttcctctgccaggtgcttggctctctgagagcaaacaggaacactagagaccaaaaaggggacaaaggagaagggctgagcccaccttcttgctcctacccttggtgcctaatgctgtgtgatgcacctgcagggtgtgtgctagcctctgtgccccgtccttgtgccaggtcaaggtgggggcaggctgggccctgcatttctggggcaggaacagagggtgaaagggacagatagatgcaggtccattctgcacctcttggctcgggtgcagagttcaccctgtgccctccgttataagtccctcccccagccctgtcatgtgccttgggctcctcctgccctccatctcagccattggggcagggaccctcctacactacagaggggccaggggatccctctctccctagtgccttccaccctttactccccagagcagcttggcccagggaggggggatgctgcttagctgatcccgccctgacccagaggaagcctctatttatttattagcttttgtttacaccgtggaattgaccccttcctccaggggtcttgggtgggggagcccagggcccctgtgacccctcctttcttcctccaatccccagtttgtatttagctgccaaataagattcccattggctccctgtgttctcttggggggtcagggtgctgtcccctcccctctgtttacatctcccctctaccccgctgtatcgcatattgctgagttttctatttttgcaaaataaagtgatggaaactca

SEQ ID NO: 76503 - DNA, 1349 bp, Homo sapiens
ctcggcccgactatctctctgtggggcacgacctccggggctcagcactaagtggagctgaaagggccattactctgaagatggagattccaggcccgatgcctcccttaatccgagagatgctggagaaccctgaaatgtttgaggatgactcctcgcagcctggtccccaccccaatgcctctagcgaggatgaggttcctgggggccagggcaaagggggcctgaagtccccagcctgaccagggcccctgacctccccgctgtgggggttggggcttcaggcagcagactgaccatctcccagaccgccagtgactgggggaggacctgctctgccctctccccaccccttccaatgagctccttgtttttgccaaagtttctaggggtgcctctgtgttcatccccttcctgatctaaccggctccctcgccagtcccgggggcctgccctgctcccaccaggagagagggcaaagggatgagcctgggtttggactctaaaatctcagcactgccccatgggtcctagacttcccagggcaagaggaagaccctgccattccacagccccttcctctgccaggtgcttggctctctgagagcaaacaggaacactagagaccaaaaaggggacaaaggagaagggctgagcccaccttcttgctcctacccttggtgcctaatgctgtgtgatgcacctgcagggtgtgtgctagcctctgtgccccgtccttgtgccaggtcaaggtgggggcaggctgggccctgcatttctggggcaggaacagagggtgaaagggacagatagatgcaggtccattctgcacctcttggctcgggtgcagagttcaccctgtgccctccgttataagtccctcccccagccctgtcatgtgccttgggctcctcctgccctccatctcagccattggggcagggaccctcctacactacagaggggccaggggatccctctctccctagtgccttccaccctttactccccagagcagcttggcccagggaggggggatgctgcttagctgatcccgccctgacccagaggaagcctctatttatttattagcttttgtttacaccgtggaattgaccccttcctccaggggtcttgggtgggggagcccagggcccctgtgacccctcctttcttcctccaatccccagtttgtatttagctgccaaataagattcccattggctccctgtgttctcttggggggtcagggtgctgtcccctcccctctgtttacatctcccctctaccccgctgtatcgcatattgctgagttttctatttttgcaaaataaagtgatggaaactca

SEQ ID NO: 76504 - DNA, 399 bp, Homo sapiens
ttgatccatgcaaagatttccttaccctgcaccccctgccacacatgtgggactcctcagctctcttttcgtcttagcctctgcccctatgacctgatcctagacttttggatgccctgtctcctcctgacttcccgggactacccctgccaagcctcagatcctccacctctgccttctccatgcctgcttcaggttgcactcactggggacctaacctcctcactttccactcattccctcttttccccatcccccagaaacagcactaaccctcctccaccccccacctccagatgctgcgtatctgcacaaggtacaccccagagcaggacaccatgaccttctccgacgggctgaccctgaaccggacccagatgcacaatgccggcttcgggc

SEQ ID NO: 76505 - DNA, 825 bp, Homo sapiens
aaaaaaaacctgtaacatatacagtgtacttagaattgtgctgaattaaaaattccattctgcagttgcagtagtcacatttcagattgccacatgtggccaatgactactgtattcctatcattgcaaagttctattggacagtccaggcttagaaggatgtctggaacatagtgtttgataaatattagctgtggtaataaatgttattaagagaacaggactaggaacaagtgacaagctctggacattcgagagtggggtacttggggagtggggttggaagttgtgtgcattgcgctcgctgaagagacagcctgaaagaatgggatgaatgggcagcaagcctggtagagaaggccaggtagaggttccaggcagaggagtggcacccaggaagcctagtgagaagaggatgagctggggacggagaggtggtgggcctgtgctgggcgccccctaggggagtcaggggcagttgagaaaggttagggagatggccttaagggccatgtgcctctgtcctcctgagcctctctctttctctctccattgtaggagctgaaagggccattactctgaagatggagattccaggcccgatgcctcccttaatccgagagatgctggagaaccctgaaatgtttgaggatgactcctcgcagcctggtccccaccccaatgcctctagcgaggatgaggttcctgggggccagggcaaagggggcctgaagtccccagcctgaccagggcccctgacctccccgctgtgggggttggggcttcaggcagcagactgaccatctcccagaccgccagtgactg

SEQ ID NO: 76506 - DNA, 3415 bp, Homo sapiens
  misc_feature (3415)..(3415): n is a, c, g, or t
aaaatattttccgtgtccccgcctgcagagtcagtgtgcggtttgggagaaaatgtgtcggatattttggggcggtcacgtgggcgggcgggctccgagaggccccgggacagtcccagcctagagccgtgcccccccaggagccccccagtacggcgagccccggacattgcgacgctccatccaagagactgcccgacgccgggacctcggggctccgccgcctcccttccccctcccactccagcagctacggcccagttccctcaacctgacccagtatgtagaagccagtctctgcaggcggccagcgggacttttggaggcccagtgggcaggccaggcagggcgggtacggagcctcccaggctggggcagtgggcatgggcaggggctgtggctgaagacctcgcccgcccactgcagaccccaggggactctcacaccgcagctgccatggccaccaataaggagcgactctttgcggctggtgccctggggcctggatctggctacccaggggcaggtttccccttcgccttcccaggggcactcagggggtctccgcctttcgagatgctgagccctagcttccggggcctgggccagcctgacctccccaaggagatggcctctctgtcggtggagacacagagcaccagctcagaggagatggtgcccagctcgccctcgccccctccgcctcctcgggtctacaagccatgcttcgtgtgcaatgacaagtcctctggctaccactatggggtcagctcttgtgaaggctgcaagggcttctttcgccgaagcatccagaagaacatggtgtacacgtgtcaccgcgacaaaaactgtatcatcaacaaggtgaccaggaatcgctgccagtactgccggctacagaagtgcttcgaagtgggcatgtccaaggaagctgtgcgaaatgaccggaacaagaagaagaaagaggtgaaggaagaagggtcacctgacagctatgagctgagccctcagttagaagagctcatcaccaaggtcagcaaagcccatcaggagactttcccctcgctctgccagctgggcaagtataccacgaactccagtgcagaccaccgcgtgcagctggatctggggctgtgggacaagttcagtgagctggctaccaagtgcatcatcaagatcgtggagtttgccaagcggttgcctggctttacagggctcagcattgctgaccagatcactctgctcaaagctgcctgcctagatatcctgatgctgcgtatctgcacaaggtacaccccagagcaggacaccatgaccttctccgacgggctgaccctgaaccggacccagatgcacaatgccggcttcgggcccctcacagaccttgtctttgcctttgctgggcagctcctgcccctggagatggatgacaccgagacagggctgctcagcgccatctgcctcatctgcggagaccgcatggacctggaggagcccgaaaaagtggacaagctgcaggagccactgctggaagccctgaggctgtacgcccggcgccggcggcccagccagccctacatgttcccaaggatgctaatgaaaatcaccgacctccggggcatcagcactaagggagctgaaagggccattactctgaagatggagattccaggcccgatgcctcccttaatccgagagatgctggagaaccctgaaatgtttgaggatgactcctcgcagcctggtccccaccccaatgcctctagcgaggatgaggttcctgggggccagggcaaagggggcctgaagtccccagcctgaccagggcccctgacctccccgctgtgggggttggggcttcaggcagcagactgaccatctcccagaccgccagtgactgggggaggacctgctctgccctctccccaccccttccaatgagctccttgtttttgccaaagtttctaggggtgcctctgtgttcatccccttcctgatctaaccggctccctcgccagtcccgggggcctgccctgctcccaccaggagagagggcaaagggatgagcctgggtttggactctaaaatctcagcactgccccatgggtcctagacttcccagggcaagaggaagaccctgccattccacagccccttcctctgccaggtgcttggctctctgagagcaaacaggaacactagagaccaaaaaggggacaaaggagaagggctgagcccaccttcttgctcctacccttggtgcctaatgctgtgtgatgcacctgcagggtgtgtgctagcctctgtgccccgtccttgtgccaggtcaaggtgggggcaggctgggccctgcatttctggggcaggaacagagggtgaaagggacagatagatgcaggtccattctgcacctcttggctcgggtgcagagttcaccctgtgccctccgttataagtccctcccccagccctgtcatgtgccttgggctcctcctgccctccatctcagccattggggcagggaccctcctacactacagaggggccaggggatccctctctccctagtgccttccaccctttactccccagagcagcttggcccagggaggggggatgctgcttagctgatcccgccctgacccagaggaagcctctatttatttattagcttttgtttacaccgtggaattgaccccttcctccaggggtcttgggtgggggagcccagggcccctgtgacccctcctttcttcctccaatccccagtttgtatttagctgccaaataagattcccattggctccctgtgttctcttggggggtcagggtgctgtcccctcccctctgtttacatctcccctctaccccgctgtatcgcatattgctgagttttctatttttgcaaaataaagtgatggaaactcaaaaaaaaaaaaaaaaaaaaaaaaagaaaaaaaaaaaaaaaaaaaaaaggggggggggcgcgcgaaaaaaaattccccgggggggccccaaaatttagggcggtccccagttttttttgtgaaaaaagggggccccaattgagggggggtggtttatataaaaagaaaggagggggcgcggggtttaaaaaaggtcgcgtgacggggaaaacaatcgggtaacccacgcggcaactcttggggagagacgagcaccccctaatactctgcggggggggggggacaactagtgtgtgcggacacacaacaaaccccacagagaattatttaaacgtccctaaggggaaaagatttaacattttgacacgcgttatacgtgtcggtcaaacagcacacgcatattacagcggcggtcaaaaagtttgcgcacacggcgaatataattctcacgagcaacaattttatcgcgaagtgagtacaataaaagn

SEQ ID NO: 76507 - DNA, 2679 bp, Homo sapiens
agataagagctggacggaggctaaagcggcagccccagcttcgcgccccgcccagtccctttcccctgctggggatcccccctcttccccgcccaccccttacccgcatgcagcccagcgccctatgctagccctccccctccccccctgctggagcggggcgccgccgggggaggagggggaatcggctgcgggtccttggtgtttccagcacccagtttcccttcaagccgggtcgcgatgtacgactgtatggaaacgtttgccccgggtccgcgacggctgtacggggcggccgggcccggggccggcttgctgcgcagagccaccggcggctcctgtttcgccggacttgaatcttttgcctggccgcaacccgccagcctgcaatcggtggagacacagagcaccagctcagaggagatggtgcccagctcgccctcgccccctccgcctcctcgggtctacaagccatgcttcgtgtgcaatgacaagtcctctggctaccactatggggtcagctcttgtgaaggctgcaagggcttctttcgccgaagcatccagaagaacatggtgtacacgtgtcaccgcgacaaaaactgtatcatcaacaaggtgaccaggaatcgctgccagtactgccggctacagaagtgcttcgaagtgggcatgtccaaggaagctgtgcgaaatgaccggaacaagaagaagaaagaggtgaaggaagaagggtcacctgacagctatgagctgagccctcagttagaagagctcatcaccaaggtcagcaaagcccatcaggagactttcccctcgctctgccagctgggcaagtataccacgaactccagtgcagaccaccgcgtgcagctggatctggggctgtgggacaagttcagtgagctggctaccaagtgcatcatcaagatcgtggagtttgccaagcggttgcctggctttacagggctcagcattgctgaccagatcactctgctcaaagctgcctgcctagatatcctgatgctgcgtatctgcacaaggtacaccccagagcaggacaccatgaccttctccgacgggctgaccctgaaccggacccagatgcacaatgccggcttcgggcccctcacagaccttgtctttgcctttgctgggcagctcctgcccctggagatggatgacaccgagacagggctgctcagcgccatctgcctcatctgcggagaccgcatggacctggaggagcccgaaaaagtggacaagctgcaggagccactgctggaagccctgaggctgtacgcccggcgccggcggcccagccagccctacatgttcccaaggatgctaatgaaaatcaccgacctccggggcatcagcactaagggagctgaaagggccattactctgaagatggagattccaggcccgatgcctcccttaatccgagagatgctggagaaccctgaaatgtttgaggatgactcctcgcagcctggtccccaccccaatgcctctagcgaggatgaggttcctgggggccagggcaaagggggcctgaagtccccagcctgaccagggcccctgacctccccgctgtgggggttggggcttcaggcagcagactgaccatctcccagaccgccagtgactgggggaggacctgctctgccctctccccaccccttccaatgagctccttgtttttgccaaagtttctaggggtgcctctgtgttcatccccttcctgatctaaccggctccctcgccagtcccgggggcctgccctgctcccaccaggagagagggcaaagggatgagcctgggtttggactctaaaatctcagcactgccccatgggtcctagacttcccagggcaagaggaagaccctgccattccacagccccttcctctgccaggtgcttggctctctgagagcaaacaggaacactagagaccaaaaaggggacaaaggagaagggctgagcccaccttcttgctcctacccttggtgcctaatgctgtgtgatgcacctgcagggtgtgtgctagcctctgtgccccgtccttgtgccaggtcaaggtgggggcaggctgggccctgcatttctggggcaggaacagagggtgaaagggacagatagatgcaggtccattctgcacctcttggctcgggtgcagagttcaccctgtgccctccgttataagtccctcccccagccctgtcatgtgccttgggctcctcctgccctccatctcagccattggggcagggaccctcctacactacagaggggccaggggatccctctctccctagtgccttccaccctttactccccagagcagcttggcccagggaggggggatgctgcttagctgatcccgccctgacccagaggaagcctctatttatttattagcttttgtttacaccgtggaattgaccccttcctccaggggtcttgggtgggggagcccagggcccctgtgacccctcctttcttcctccaatccccagtttgtatttagctgccaaataagattcccattggctccctgtgttctcttggggggtcagggtgctgtcccctcccctctgtttacatctcccctctaccccgctgtatcgcatattgctgagttttctatttttgcaaaataaagtgatggaaactca

SEQ ID NO: 76508 - DNA, 2592 bp, Homo sapiens
aaaatattttccgtgtccccgcctgcagagtcagtgtgcggtttgggagaaaatgtgtcggatattttggggcggtcacgtgggcgggcgggctccgagaggccccgggacagtcccagcctagagccgtgcccccccaggagccccccagtacggcgagccccggacattgcgacgctccatccaagagactgcccgacgccgggacctcggggctccgccgcctcccttccccctcccactccagcagctacggcccagttccctcaacctgacccagtatgtagaagccagtctctgcaggcggccagcgggacttttggaggcccagtgggcaggccaggcagggcgggtacggagcctcccaggctggggcagtgggcatgggcaggggctgtggctgaagacctcgcccgcccactgcagaccccaggggactctcacaccgcagctgccatggccaccaataaggagcgactctttgcggctggtgccctggggcctggatctggctacccaggggcaggtttccccttcgccttcccaggggcactcagggggtctccgcctttcgagatgctgagccctagcttccggggcctgggccagcctgacctccccaaggagatggcctctctgtcggtggagacacagagcaccagctcagaggagatggtgcccagctcgccctcgccccctccgcctcctcgggtctacaagccatgcttcgtgtgcaatgacaagtcctctggctaccactatggggtcagctcttgtgaaggctgcaagggcttctttcgccgaagcatccagaagaacatggtgtacacgtgtcaccgcgacaaaaactgtatcatcaacaaggtgaccaggaatcgctgccagtactgccggctacagaagtgcttcgaagtgggcatgtccaaggaagctgtgcgaaatgaccggaacaagaagaagaaagaggtgaaggaagaagggtcacctgacagctatgagctgagccctcagttagaagagctcatcaccaaggtcagcaaagcccatcaggagactttcccctcgctctgccagctgggcaagtataccacgaactccagtgcagaccaccgcgtgcagctggatctggggctgtgggacaagttcagtgagctggctaccaagtgcatcatcaagatcgtggagtttgccaagcggttgcctggctttacagggctcagcattgctgaccagatcactctgctcaaagctgcctgcctagatatcctgatgctgcgtatctgcacaaggtacaccccagagcaggacaccatgaccttctccgacgggctgaccctgaaccggacccagatgcacaatgccggcttcgggcccctcacagaccttgtctttgcctttgctgggcagctcctgcccctggagatggatgacaccgagacagggctgctcagcgccatctgcctcatctgcggagaccgcatggacctggaggagcccgaaaaagtggacaagctgcaggagccactgctggaagccctgaggctgtacgcccggcgccggcggcccagccagccctacatgttcccaaggatgctaatgaaaatcaccgacctccggggcatcagcactaagggagctgaaagggccattactctgaagatggagattccaggcccgatgcctcccttaatccgagagatgctggagaaccctgaaatgtttgaggatgactcctcgcagcctggtccccaccccaatgcctctagcgaggatgaggttcctgggggccagggcaaagggggcctgaagtccccagcctgaccagggcccctgacctccccgctgtgggggttggggcttcaggcagcagactgaccatctcccagaccgccagtgactgggggaggacctgctctgccctctccccaccccttccaatgagctccttgtttttgccaaagtttctaggggtgcctctgtgttcatccccttcctgatctaaccggctccctcgccagtcccgggggcctgccctgctcccaccaggagagagggcaaagggatgagcctgggtttggactctaaaatctcagcactgccccatgggtcctagacttcccagggcaagaggaagaccctgccattccacagccccttcctctgccaggtgcttggctctctgagagcaaacaggaacactagagaccaaaaaggggacaaaggagaagggctgagcccaccttcttgctcctacccttggtgcctaatgctgtgtgatgcacctgcagggtgtgtgctagcctctgtgccccgtccttgtgccaggtcaaggtgggaagtcgacttcccaccgggaaaagaagctttctttaaaactaaaagggttttttggggggggagttggcggggaggaaataaggctaacagaggttgacctaaaattagccttacaaaggagaaaggaccacattgcttacttgaaacagacaatgaaaacaaccaaagtgatatataaaatagttgatgagaactagacttatgactgtagtttactagagtttagttttcagttgctgaagtagctcattttct

SEQ ID NO: 76509 - DNA, 1478 bp, Homo sapiens
  misc_feature (1253)..(1253): n is a, c, g, or t
  misc_feature (1431)..(1431): n is a, c, g, or t
  misc_feature (1449)..(1449): n is a, c, g, or t
  misc_feature (1458)..(1458): n is a, c, g, or t
agataagagctggacggaggctaaagcggcagccccagcttcgcgccccgcccagtccctttcccctgctggggatcccccctcttccccgcccaccccttacccgcatgcagcccagcgccctatgctagccctccccctccccccctgctggagcggggcgccgccgggggaggagggggaatcggctgcgggtccttggtgtttccagcacccagtttcccttcaagccgggtcgcgatgtacgactgtatggaaacgtttgccccgggtccgcgacggctgtacggggcggccgggcccggggccggcttgctgcgcagagccaccggcggctcctgtttcgccggacttgaatcttttgcctggccgcaacccgccagcctgcaatcggtggagacacagagcaccagctcagaggagatggtgcccagctcgccctcgccccctccgcctcctcgggtctacaagccatgcttcgtgtgcaatgacaagtcctctggctaccactatggggtcagctcttgtgaaggctgcaagggcttctttcgccgaagcatccagaagaacatggtgtacacgtgtcaccgcgacaaaaactgtatcatcaacaaggtgaccaggaatcgctgccagtactgccggctacagaagtgcttcgaagtgggcatgtccaaggaagctgtgcgaaatgaccggaacaagaagaagaaagaggtgaaggaagaagggtcacctgacagctatgagctgagccctcagttagaagagctcatcaccaaggtcagcaaagcccatcaggagactttcccctcgctctgccagctgggcaagtataccacgaactccagtgcagaccaccgcgtgcagctggatctggggctgtgggacaagttcagtgagctggctaccaagtgcatcatcaagatcgtggagtttgccaagcggttgcctggctttacagggctcagcattgctgaccagatcactctgctcaaagctgcctgcctagatatcctgatgctgcgtatctgcacaaggtacaccccagagcaggacaccatgaccttctccgacgggctgaccctgaaccggacccagatgcacaatgccggcttcgggcccctcacagaccttgtctttgcctttgctgggcagctcctgcccctggagatggatgacaccgagacagggctgctcagcgccatctgcctcatctgcggagaccgcatggacctggaggaacagcagtntgccgacggtcatattgcactcaacagttaagtccaaaacattcggttcagagttagcttttccccattttggcaatcagttcgtcacaaatcttggtgagttcttctatttctttattcttctgctccagcgtccttttcagggcgtccactcgcagctgctccttccgcagctggnctggtgggcggcttgctnctgctgggncttgctcgaacctgagcaat

SEQ ID NO: 76510 - DNA, 346 bp, Homo sapiens
tacaagtttacagatcacaaggtcactgaaataaatcactatgtgaaaaaaaacagctatgaaatagttgaagaattttccttctagtttaaaggaaaacctggaaaatattttcatctatatgtctagcaatctccttattcaacaacatttcacaacagggagctgtatcattcattttggaaaaaagcataaggagtactagataacaaagggccaaataaaacaacagtttatgggaaatgtgccaccaactgacaagaggagatgaagagtttctatacgtcaataaccagttctcttcattcacttacccatttatttattcaacaacaacttattgagc

SEQ ID NO: 76511 - DNA, 481 bp, Homo sapiens
taattgccttttcttgtctttaaaatcatcaccagggctgggcacttactgtgtgcaggcgctgttctatggactcaggatacatcagctaccgaagcaaagatccctaaccttgtgaaactgacattctggtgggaggacagatccaataaaaactaaaataaataagtcaatgatgtagtgtgttaaaaagtgatcggtgctggctgggcgccgtggctcatgcctatgatcccaacactttgggaagccgaggcaggcggatcacctgaggtcaggagttcgagaccagcctggccaacatggtgaaaccctgtctctagtaaaaatacaaaattagctgggtgtgatggcacacacctgtaatcccagctactctggaggctgaggcaggagaatcgcttgaacccggaagccgagttcgtgactcagatgtcccccacaccccacctggcaccaccttctggacggggatcctctg

SEQ ID NO: 76512 - DNA, 721 bp, Homo sapiens
agctctggcttcgtttgtgaaacccgacgggatgaagggctaggctcgcctccagagtagtgtagtttctcccgccgtgggcacccggccccttgctaccccgcaaaatctcgcgaccatttactctggccatccgaaggcgcgtgcctgggttgcactcccgtgtccggccctcgaggttcttgcctagggaagacccgagccctagggccgtacttaagctgcctgcgtgcaggacccgggttttgcttttgctaatttcctccccaccccagggctgggcacttactgtgtgcaggcgctgttctatggactcaggatacatcagctaccgaagcaaagatccctaaccttgtgaaactgacattctggtgggaggacagatccaataaaaactaaaataaataagtcaatgatgtagtgtgttaaaaagtgatcggtgctggctgggcgccgtggctcatgcctatgatcccaacactttgggaagccgaggcaggcggatcacctgaggtcaggagttcgagaccagcctggccaacatggtgaaaccctgtctctagtaaaaatacaaaattagctgggtgtgatggcacacacctgtaatcccagctactctggaggctgaggcaggagaatcgcttgaacccggaagccgagttcgtgactcagatgtcccccacaccccacctggcaccaccttctggacggggatcctctg

SEQ ID NO: 76513 - DNA, 268 bp, Homo sapiens
gattgttccattcgattctattcggtgattccattcgattccatttgataatgattccaatcgagaccattcgatgattccattcaattccattcaataatgatccctttcgagtccattcaatgattccgtttttttccgtttgatgttgattccattcgattccattcgatgataattccattcgattctatgcgatgattccattccattccatttgaagatgattccattcgagaccattcgatgattgcattcaattcattcg

SEQ ID NO: 76514 - DNA, 313 bp, Homo sapiens
aaaaaaatatttttttttcttaagcaaccattgcttcagtttttttcctacatacagctaagtaagacactcttacattcactaaggtgctaattaaaatgataatcaattcatttaatcctggatggtagaactgttgtcattaattcaactttaaaaagtaaatgatttccaggtaaaagtttactaactatcaagagtagagagctaattgctgataataatgttagcaaatatgtcctaggtagtaataataacattagtactactactagtagtactagtagaagtaatagtggtactagtaatagta

SEQ ID NO: 76515 - DNA, 519 bp, Homo sapiens
aaaaaaaaaaaaaaactgggcgcagtggctcacgcctgtaattccagcactttgtgaggccgaggcaggcagatcacttgaggccaggagtttgaaaccagcctggctaacattgcgaaactccatctctactaaaaatacaaaaattagccaggcgcagtggtgggcgcctgtaattccagctactcgggaggctgaggcaggagagtggcttgaactcgggaggcggaggttgcaatgagctgaaatcgagccattgcacttcagcctgggtgacagaacaagactgtctcagaaaaaaaaaaaagaactttctttgatatctacaaagggattctgtgtggagattttgaactctgagccatgaatctagtcataaactggggaacggcattccaggaagaggaatcggaatatataaaagataaaaactggagagcaagttacgcataagaagcaaaaacagtgctatatacttggagcactgggcatcagagtttggagcggagtcagaaactc

SEQ ID NO: 76516 - DNA, 418 bp, Homo sapiens
cttgggttttgcttttgttctatgagagctccccatcctgccttaccccagtgatacagattggagggttcagaaaatgggcatgtttgtaaacatatgacagaaatgagccaggcatggtggctcacgtctgtaatcccagcactttgggaggccaaggcaggagggttgcttgacaccaggagtttgagaccagctgggcaacatagtaagatcctgtctctataaaaaataactttaaaaaaattagcggagtgtggtgacacaccagtagtcccagctacttgcaacactgagatgggaggctcacttgagcccaggagctcgaggttacggtcagctgcagtcatgcctccgcactcctgtctgggcgatgagatcatgtctctgaaaaaagaaacagtaaaagtaaaattta

SEQ ID NO: 76517 - DNA, 3759 bp, Homo sapiens
agcgggctgtgcgcggtgaactcggcggctgcactggcggcagctggaggtgtaatagtgcgggtagtgggtttggagaagttccgaggcggcggtggcgccggtcaggacaaggatagcggaaccgggccctgggcttgtcgctcaccatgccgacagtagaggagctttaccgcaattatggcatcctggccgatgccacggagcaagtgggccagcataaagatgcctatcaagtgatattggatggtgtgaaaggtggtactaaggaaaagcgattagcagctcaatttattccgaaattctttaagcattttccagaattggctgattctgctatcaatgcacagttagacctctgtgaggatgaagatgtatctattcgacgtcaagcaattaaagaactgcctcaatttgccactggagaaaatccttcctcgagtggccagataatactaacgcaacttttgccagaacagatgactctgccagaatttaaccctagtgaacaatgccccctattaagtatatttaaaatggatgcaaaagggacttttaggtgggttgttcagcccaaatacttcaaggagaggacattgttagagaacgagcaattaaattcctttctacaaaacttaagactttaccagatgaagtcttaacaaaggaagtggaagagcttatactaactgaatccaaaaaggtcctagaagatgtgactggtgaagaatttgttctatttatgaagatactgtctgggttaaaaagcttacagacagtgagtggaagacagcaacttgtagagttggtggctgaacaggccgacctagaacagaccttcaatccctcggatcctgactgtgtggacaggctcttacagtgcactcggcaggcagtacccctcttctctaaaaatgtccattccacaaggtttgtgacatatttctgtgagcaggttctccctaacctcggtaccttgactaccccagtggaaggtcttgatatacagttggaggtattgaaattgttggcggagatgagttcattttgtggtgacatggaaaaactagaaacaaatttaaggaaactatttgataagttattggaatacatgcccctccctccagaagaggcagaaaatggagagaatgctggtaatgaagaacccaagctacagttcagttatgtggaatgtttgttgtacagttttcaccagttgggccgaaaacttccagatttcttaacagccaaactgaatgcagaaaagctcaaagatttcaaaatcaggctgcagtactttgcacggggcctgcaagtttatatcagacaacttcgcttagctctccagggtaaaacgggtgaggccttaaaaacagaagagaacaagattaaagtcgttgcattgaaaataacaaacaatatcaatgttttaatcaaggatctcttccacattcctccttcttataagagcacagtaacactatcctggaaacctgtacaaaaggttgagattgggcaaaagagagccagtgaagatacaacttcaggttcaccacccaagaaatcttcagcaggaccaaaaagagatgccaggcagatttataaccctcccagtgggaaatatagcagcaatttgggcaactttaattatgagagagaggagccttcaggggaagtagaggtggccgaggttggggcacacgaggaaatcgtagtcggggaagactctactgaataagacatcagcattcttcagcattgtcatgagcttaatatacttaaattctactactcattggattgccggggatgtccctttaaacagactgctgccttcagctaaaaacttaatgttctttatacctttgtatgtatgacctacttttgtaacagaccatggttgtgtccaaggtaaaaccacagtgatatttttggatgctttgtctgcaatcttgacttgtttttgcagtatcattattcagacttcaaattgtgaatcttttaaacatcttgataatttgttgttgagagctgttcattctaaaatgtaatgaaattcagtctagttctgctgataaagatcatcagttttgaaaggttactgattttcctcttccctcttagttttttacccaatatatggagaagagtaatggtcaatcttaacattttgttttaattgtttaataaagctgctgggcagtggtgcagcattcctacctagtgtcataaaagcaaaatacttacatagctttcttaaaatataggaatgacattacatttttaggagaaagtaagttgctttgcaccgcctacttaattcttttccatatattgtgatacaaacttttgaatatggaatcttactatttgaatagaaatgtgtatgtataatatacatacatacataagcatatatgtgtgtgtgtgtgtgtatatatatatatatgcatgctgtgaaacttgactacacaacataaatcactttttaaattccaggaacgggtagtctgacacggtgattatccttttgaggctgaatccgttattaacttgttatttaggtttttactcccagtagcaagggattctaagttagttgcacttacatgattattgttatttaaaactaagaataaaggctgcattttcaaagataaattggaattgctgttggtgaaataacaaccaaaatactgaatctgatgtacatacaggtttctacaggaagagatggtataatttacaatttggagatttaataaccagggctacccagaaaaagtgacttgataacatggtaccaataagtaagggatgctctctcggtttgcttttgccactttcaagattttaacttctcaggttattaatcaaaattattgtataagttagccaatagaatttttaggttaaaacaacagatggggggtttgtggagtgtttaatgtcatgggcatttttagtagcatagaccctttgttctgcatttgaatgtttcgtatatttttgtttcacagttaatcttccaagtttactattcaagtcagaaattcagatgacatttctagtggtttgctgttttggttttttatgttttttggttttttttgaggtttcatttcttacacaggtgttttcatcaccatcaattttacactgggggaaaaacaattcctttattagaattactgcacatgtgtatggggaaaatagttctgaaaggctagaatgatacaagtgagcaaaagttggtcagcttggctatggagtggtggcaataatctctaaacattccaaaagaccatgagctgaacctaaactcccttggaatctgaacaaaggaatataaaattgccatttgaaaactgaccagctaatctggacctcagagatagatcagccagtggcccaaagccatttcaagtacagaaattatagagactacagctaaataaatttgaacattaaatataattttaccactttttgtctttataagcatatttgtaaactcagaactgagcagaagtgactttactttctcaagtttgatactgagttgactgttcccttatccctcacccttccccttccctttcctaaggcaatagtgcacaacttaggttatttttgcttccgaatttgaatgaaaaacttaatgccatggatttttttcttttgcaagacacctgtttatcatcttgtttaaatgtaaatgtccccttatgcttttgaaataaatttccttttgtaatt

SEQ ID NO: 76518 - DNA, 3674 bp, Homo sapiens
agcgggctgtgcgcggtgaactcggcggctgcactggcggcagctggaggtgtaatagtgcgggtagtgggtttggagaagttccgaggcggcggtggcgccggtcaggacaaggatagcggaaccgggccctgggcttgtcgctcaccatgccgacagtagaggagctttaccgcaattatggcatcctggccgatgccacggagcaagtgggccagcataaagatgcctatcaagtgatattggatggtgtgaaaggtggtactaaggaaaagcgattagcagctcaatttattccgaaattctttaagcattttccagaattggctgattctgctatcaatgcacagttagacctctgtgaggatgaagatgtatctattcgacgtcaagcaattaaagaactgcctcaatttgccactggagaaaatccttcctcgagtggccagataatactaacgcaacttttgccagaacagatgactctgccagaatttaaccctagtgaacaatgccccctattaagtatatttaaaatggatgcaaaagggacttttaggtgggttgttcagcccaaatacttcaaggagaggacattgttagagaacgagcaattaaattcctttctacaaaacttaagactttaccagatgaagtcttaacaaaggaagtggaagagcttatactaactgaatccaaaaaggtcctagaagatgtgactggtgaagaatttgttctatttatgaagatactgtctgggttaaaaagcttacagacagtgagtggaagacagcaacttgtagagttggtggctgaacaggccgacctagaacagaccttcaatccctcggatcctgactgtgtggacaggctcttacagtgcactcggcaggcagtacccctcttctctaaaaatgtccattccacaaggtttgtgacatatttctgtgagcaggttctccctaacctcggtaccttgactaccccagtggaaggtcttgatatacagttggaggtattgaaattgttggcggagatgagttcattttgtggtgacatggaaaaactagaaacaaatttaaggaaactatttgataagttattggaatacatgcccctccctccagaagaggcagaaaatggagagaatgctggtaatgaagaacccaagctacagttcagttatgtggaatgtttgttgtacagttttcaccagttgggccgaaaacttccagatttcttaacagccaaactgaatgcagaaaagctcaaagatttcaaaatcaggctgcagtactttgcacggggcctgcaagtttatatcagacaacttcgcttagctctccagggtaaaacgggtgaggccttaaaaacagaagagaacaagattaaagtcgttgcattgaaaataacaaacaatatcaatgttttaatcaaggcaaaagagagccagtgaagatacaacttcaggttcaccacccaagaaatcttcagcaggaccaaaaagagatgccaggcagatttataaccctcccagtgggaaatatagcagcaatttgggcaactttaattatgagagagaggagccttcaggggaagtagaggtggccgaggttggggcacacgaggaaatcgtagtcggggaagactctactgaataagacatcagcattcttcagcattgtcatgagcttaatatacttaaattctactactcattggattgccggggatgtccctttaaacagactgctgccttcagctaaaaacttaatgttctttatacctttgtatgtatgacctacttttgtaacagaccatggttgtgtccaaggtaaaaccacagtgatatttttggatgctttgtctgcaatcttgacttgtttttgcagtatcattattcagacttcaaattgtgaatcttttaaacatcttgataatttgttgttgagagctgttcattctaaaatgtaatgaaattcagtctagttctgctgataaagatcatcagttttgaaaggttactgattttcctcttccctcttagttttttacccaatatatggagaagagtaatggtcaatcttaacattttgttttaattgtttaataaagctgctgggcagtggtgcagcattcctacctagtgtcataaaagcaaaatacttacatagctttcttaaaatataggaatgacattacatttttaggagaaagtaagttgctttgcaccgcctacttaattcttttccatatattgtgatacaaacttttgaatatggaatcttactatttgaatagaaatgtgtatgtataatatacatacatacataagcatatatgtgtgtgtgtgtgtgtatatatatatatatgcatgctgtgaaacttgactacacaacataaatcactttttaaattccaggaacgggtagtctgacacggtgattatccttttgaggctgaatccgttattaacttgttatttaggtttttactcccagtagcaagggattctaagttagttgcacttacatgattattgttatttaaaactaagaataaaggctgcattttcaaagataaattggaattgctgttggtgaaataacaaccaaaatactgaatctgatgtacatacaggtttctacaggaagagatggtataatttacaatttggagatttaataaccagggctacccagaaaaagtgacttgataacatggtaccaataagtaagggatgctctctcggtttgcttttgccactttcaagattttaacttctcaggttattaatcaaaattattgtataagttagccaatagaatttttaggttaaaacaacagatggggggtttgtggagtgtttaatgtcatgggcatttttagtagcatagaccctttgttctgcatttgaatgtttcgtatatttttgtttcacagttaatcttccctccccaagtttgctattcaaatcaactgcctgaatgacatttctagtagtctgatgtatttttctgaggaatagtttgtgattccaatgcaggtgtcttcattaccattacctctacactgcagaagaagcaaaactcctttattagaattactgcacatgtgtatggggaaaatagttctgaaaggctagaatgatacaagtgagcaaaagttggtcagcttggctatggagtggtggcaataatctctaaacattccaaaagaccatgagctgaacctaaactcccttggaatctgaacaaaggaatataaaattgccatttgaaaactgaccagctaatctggacctcagagatagatcagccagtggcccaaagccatttcaagtacagaaattatagagactacagctaaataaatttgaacattaaatataattttaccactttttgtctttataagcatatttgtaaactcagaactgagcagaagtgactttactttctcaagtttgatactgagttgactgttcccttatccctcacccttccccttccctttcctaaggcaatagtgcacaacttaggttatttttgcttccgaatttgaatgaaaaacttaatgccatggatttttttcttttgcaagacacctgtttatcatcttgtttaaatgtaaatgtccccttatgcttttgaaataaatttccttttgtaatt

SEQ ID NO: 76519 - DNA, 5121 bp, Homo sapiens
  misc_feature (675)..(675): n is a, c, g, or t
agtttagaagttaatgaagagatttgatctcatttacatatgattaaaagtccagccttgtgataacttcgatcagttttcttcatgggacgacacctttgaggaccatttctctgtggctataaaagtgactgaccaatggatgagagactcttgttctgtacatcacaagtgacttgatttttcagcaaaagatatgcttagtttatatcagtagctgaaacacactcagacgcacatacacacatagcacctatttggcagtattctgagaagcttatgtagctgataaagcagtgaaaaaaactcagcctttagatctacatttgtgtgagtccagttgcgtgaaatactgtgatcaaaacaaaaattgcatatttattgcattcaaagggacattttgtagtctaacctgattttcgaaattgattattgataatttaagatatttttcatagttatatgagttacctttagtaatgatagacaataaataaagaactaagaagttgtcatgaaagtcatagccagagcaggtagataagagaaagaaataaagggcatccaaactagaatggagaagtcaaattgttctctatgcagatgacatgatgttatatatataaaaacaaaactaaagactctaccaaaaaactcatagaactgataaatttngaaaagttagaagatacaaaattagtatacaaaaatcagtagcatttctatgcatgaacagtgaactagctgaaaaagaaatcaaggtaaccccatttataatagctgtgaaaaaaatctaggaataaattaaccaagaaggtaaaatatttctatacaaggaaaactacaaaacactgatgaaagaaattgaaggagatacaaacaaattgaaagacactccgtactcatggattagaggaattaatatattttaaatgaccatgctacccaaagtgatctccagattcaatacaacttctatcaaaataactgacattcttcacagaaattgccaccaaaaaaaattcttaaaatttatatggaaccacaagaccccaaatagccaaagcaatactgagcaaaaagaacaaagctggagttatcacactaccagatctcaaaatataaatcaaaaatgtagtaaccaaaacagcctgatactggcataaaaatagatacagagcaatggaacagaacagagaaccagaaattaatccacgtatctacagccaactgattttttacaaaggtggcaagaatactcattggagggacaaaaaaaaaagggacagtctcttcaataaatggtgctgagaaaactgggtatccatatgcagaagaatgaaactagatccgcacctcccaccctgtacaaaaaccaactcaaaatggatgaaagacctaaatgtaagacctaaaacaataaaactaccataagagaaaacaagaagcacttcaggacattggtctgggaaaagattttatgactgagacctaaaagcacaggcaacaaaaacatgggatcatatcaaattaaaaagcttctgtgcagcagaggaaaccatcaacagtgaaaagacagcttacagaatgggagaaaatatttgtaaactactcatgcaacagaggattaatattcagaatatagaagatattcaaacatcttaatagcaaaacaaatctagattaaaaatgggcaaatcatctgaacagacatttctcaaaagaagacgtacaaatggccaataaatgtatgaaaaaattctaaacactaagcatcagggtaatgcacatcaaaaccacaatgagtaagttggaagttcagggaagagattttatctcatttacatatgattaaaagtcagacattggcacccccatgtttattgtagcactattcattagccaagacatggaatcaacccagaatcaacaggtgcatcaacaggtgaatggctaaacaagatgtggtattatacacaatgggatactattcagccataaaaaaagaatgtcctttcatttgcagcaacatggaaggaactggaggactttatagtaggtgaaataagccagcaatggaaaattaaacaatgcatgttctcactcatgtggaagttttaaaaagttaatcttatagaagtaaaaattaggacagcgcatactagaggctgagaagatagggggaaggaagggatagggagagatttgtgggaggatgcaaaataacataggaataagccctagtgttgtgtaccactatagcatgactatagttaatatatactttaaaatagaagaatattgaatgttcccaacacaaagaaattataggtgtttgagatgatggatatgcttgttaccctgagctgataactgtacattctttgtatcaaagtattctaccccacgaatatgtagaattattattcgtgaatttgaagaattaagttttttaaaaagtgtacgggctgggcacagtggctcacacctgtagtcccagcactgaggcaggacgatcccttgaggcctgcagtttgagatcagcctggcaacaaaatgaggacctgtctctacaaaaaaaaaaaatagccaaacatggtggtgtgcatctgtagccctagctactggggagtctgaggcagaaagatcactctagtccagaagttcaatgttatggtgaactgtgaacgcaccactgcactccagcctgagcaacacagcaagaccctccaaaaaaagtgtagttatcgtaacatcaccttgaaacaactttgttactgggatacatttaattaagcaactaccatgaatgtagtcggtaccttgccttacgtgcttcagtatatatgttgttcttgttttatgtacaggctaaatttgtagattgaatagcagaatattagttctgttcttatagggcctactgctgtattcagagttatgagctacgtttcttctgcgtttgctgcaccatgaaatcctaagcaagacctaaacccttgttcgctttttcgtagagcagagagagaggagccttcaggggaagtagaggtggccgaggttggggcacacgaggaaatcgtagtcggggaagactctactgaataagacatcagcattcttcagcattgtcatgagcttaatatacttaaattctactactcattggattgccggggatgtccctttaaacagactgctgccttcagctaaaaacttaatgttctttatacctttgtatgtatgacctacttttgtaacagaccatggttgtgtccaaggtaaaaccacagtgatatttttggatgctttgtctgcaatcttgacttgtttttgcagtatcattattcagacttcaaattgtgaatcttttaaacatcttgataatttgttgttgagagctgttcattctaaaatgtaatgaaattcagtctagttctgctgataaagatcatcagttttgaaaggttactgattttcctcttccctcttagttttttacccaatatatggagaagagtaatggtcaatcttaacattttgttttaattgtttaataaagctgctgggcagtggtgcagcattcctacctagtgtcataaaagcaaaatacttacatagctttcttaaaatataggaatgacattacatttttaggagaaagtaagttgctttgcaccgcctacttaattcttttccatatattgtgatacaaacttttgaatatggaatcttactatttgaatagaaatgtgtatgtataatatacatacatacataagcatatatgtgtgtgtgtgtgtgtatatatatatatatgcatgctgtgaaacttgactacacaacataaatcactttttaaattccaggaacgggtagtctgacacggtgattatccttttgaggctgaatccgttattaacttgttatttaggtttttactcccagtagcaagggattctaagttagttgcacttacatgattattgttatttaaaactaagaataaaggctgcattttcaaagataaattggaattgctgttggtgaaataacaaccaaaatactgaatctgatgtacatacaggtttctacaggaagagatggtataatttacaatttggagatttaataaccagggctacccagaaaaagtgacttgataacatggtaccaataagtaagggatgctctctcggtttgcttttgccactttcaagattttaacttctcaggttattaatcaaaattattgtataagttagccaatagaatttttaggttaaaacaacagatggggggtttgtggagtgtttaatgtcatgggcatttttagtagcatagaccctttgttctgcatttgaatgtttcgtatatttttgtttcacagttaatcttccctccccaagtttgctattcaaatcaactgcctgaatgacatttctagtagtctgatgtatttttctgaggaatagtttgtgattccaatgcaggtgtcttcattaccattacctctacactgcagaagaagcaaaactcctttattagaattactgcacatgtgtatggggaaaatagttctgaaaggctagaatgatacaagtgagcaaaagttggtcagcttggctatggagtggtggcaataatctctaaacattccaaaagaccatgagctgaacctaaactcccttggaatctgaacaaaggaatataaaattgccatttgaaaactgaccagctaatctggacctcagagatagatcagccagtggcccaaagccatttcaagtacagaaattatagagactacagctaaataaatttgaacattaaatataattttaccactttttgtctttataagcatatttgtaaactcagaactgagcagaagtgactttactttctcaagtttgatactgagttgactgttcccttatccctcacccttccccttccctttcctaaggcaatagtgcacaacttaggttatttttgcttccgaatttgaatgaaaaacttaatgccatggatttttttcttttgcaagacacctgtttatcatcttgtttaaatgtaaatgtccccttatgcttttgaaataaatttccttttgtaatt

SEQ ID NO: 76520 - DNA, 3988 bp, Homo sapiens
agcgggctgtgcgcggtgaactcggcggctgcactggcggcagctggaggtgtaatagtgcgggtagtgggtttggagaagttccgaggcggcggtggcgccggtcaggacaaggatagcggaaccgggccctgggcttgtcgctcaccatgccgacagtagaggagctttaccgcaattatggcatcctggccgatgccacggagcaagtgggccagcataaagatgcctatcaagtgatattggatggtgtgaaaggtggtactaaggaaaagcgattagcagctcaatttattccgaaattctttaagcattttccagaattggctgattctgctatcaatgcacagttagacctctgtgaggatgaagatgtatctattcgacgtcaagcaattaaagaactgcctcaatttgccactggagaaaatccttcctcgagtggccagataatactaacgcaacttttgccagaacagatgactctgccagaatttaaccctagtgaacaatgccccctattaagtatatttaaaatggatgcaaaagggacttttaggtgggttgttcagcccaaatacttcaaggagaggacattgttagagaacgagcaattaaattcctttctacaaaacttaagactttaccagatgaagtcttaacaaaggaagtggaagagcttatactaactgaatccaaaaaggtcctagaagatgtgactggtgaagaatttgttctatttatgaagatactgtctgggttaaaaagcttacagacagtgagtggaagacagcaacttgtagagttggtggctgaacaggccgacctagaacagaccttcaatccctcggatcctgactgtgtggacaggctcttacagtgcactcggcaggcagtacccctcttctctaaaaatgtccattccacaaggtttgtgacatatttctgtgagcaggttctccctaacctcggtaccttgactaccccagtggaaggtcttgatatacagttggaggtattgaaattgttggcggagatgagttcattttgtggtgacatggaaaaactagaaacaaatttaaggaaactatttgataagttattggaatacatgcccctccctccagaagaggcagaaaatggagagaatgctggtaatgaagaacccaagctacagttcagttatgtggaatgtttgttgtacagttttcaccagttgggccgaaaacttccagatttcttaacagccaaactgaatgcagaaaagctcaaagatttcaaaatcaggctgcagtactttgcacggggcctgcaagtttatatcagacaacttcgcttagctctccagggtaaaacgggtgaggccttaaaaacagaagagaacaagattaaagtcgttgcattgaaaataacaaacaatatcaatgttttaatcaaggatctcttccacattcctccttcttataagagcacagtaacactatcctggaaacctgtacaaaaggttgagattgggcaaaagagagccagtgaagatacaacttcaggttcaccacccaagaaatcttcagcaggaccaaaaagagatgccaggcagatttataaccctcccagtgggaaatatagcagcaatttgggcaactttaattatgagagagaggagccttcaggggaagtagaggtggccgaggttggggcacacgaggaaatcgtagtcggggaagactctactgaataagacatcagcattcttcagcattgtcatgagcttaatatacttaaattctactactcattggattgccggggatgtccctttaaacagactgctgccttcagctaaaaacttaatgttctttatacctttgtatgtatgacctacttttgtaacagaccatggttgtgtccaaggtaaaaccacagtgatatttttggatgctttgtctgcaatcttgacttgtttttgcagtatcattattcagacttcaaattgtgaatcttttaaacatcttgataatttgttgttgagagctgttcattctaaaatgtaatgaaattcagtctagttctgctgataaagatcatcagttttgaaaggttactgattttcctcttccctcttagttttttacccaatatatggagaagagtaatggtcaatcttaacattttgttttaattgtttaataaagctgctgggcagtggtgcagcattcctacctagtgtcataaaagcaaaatacttacatagctttcttaaaatataggaatgacattacatttttaggagaaagtaagttgctttgcaccgcctacttaattcttttccatatattgtgatacaaacttttgaatatggaatcttactatttgaatagaaatgtgtatgtataatatacatacatacataagcatatatgtgtgtgtgtgtgtgtatatatatatatatgcatgctgtgaaacttgactacacaacataaatcactttttaaattccaggaacgggtagtctgacacggtgattatccttttgaggctgaatccgttattaacttgttatttaggtttttactcccagtagcaagggattctaagttagttgcacttacatgattattgttatttaaaactaagaataaaggctgcattttcaaagataaattggaattgctgttggtgaaataacaaccaaaatactgaatctgatgtacatacaggtttctacaggaagagatggtataatttacaatttggagatttaataaccagggctacccagaaaaagtgacttgataacatggtaccaataagtaagggatgctctctcggtttgcttttgccactttcaagattttaacttctcaggttattaatcaaaattattgtataagttagccaatagaatttttaggttaaaacaacagatggggggtttgtggagtgtttaatgtcatgggcatttttagtagcatagaccctttgttctgcatttgaatgtttcgtatatttttgtttcacagttaatcttccctccccaagtttgctattcaaatcaactgcctgaatgacatttctagtagtctgatgtatttttctgaggaatagtttgtgattccaatgcaggtgtcttcattaccattacctctacactgcagaagaagcaaaactcctttattagaattactgcacatgtgtatggggaaaatagttctgaaaggctagaatgatacaagtgagcaaaagttggtcagcttggctatggagtggtggcaataatctctaaacattccaaaagaccatgagctgaacctaaactcccttggaatctgaacaaaggaatataaaattgccatttgaaaactgaccagctaatctggacctcagagatagatcagccagtggcccaaagccatttcaagtacagaaattatagagactacagctaaataaatttgaacattaaatataattttaccactttttgtctttataagcatatttgtaaactcagaactgagcagaagtgactttactttctcaagtttgatactgagttgactgttcccttatccctcacccttccccttccctttcctaaggcaatagtgcacaacttaggttatttttgcttccgaatttgaatgaaaaacttaatgccatggatttttttcttttgcaagacacctgtttatcatcttgtttaaatgtaaatgtccccttatgcttttgaaataaatttccttttgtaattaaaaaaaacgaccacacagaaagacgcacaaacaacaaacacacaacaaaaaaaaaacttggcggggcggcacagcgccagagaagtgtctaaacaccacttgttggggcggcgcccataagaatacgaccggcgacagcggtcgcaaaaacccccgaagaaatggcggggtccccaataaaacgcggacccgcctgacaaccagcgggtggggcagcggtacacaggccgggcgac

SEQ ID NO: 76521 - DNA, 3253 bp, Homo sapiens
ttgttgcctaatcttaaaaaacatctttaaagggcacccacatttctttggttaatagtataaaaaagactgcattgacatggttaagttcccaggaccctcagttgttcagagatgactggtatcattacctgcaaaagtgtcttgaccttgatggagcttatgttgataaataaagtttatattttttattctttatctttttattccatttttccatgaacttattgaagccccttcgtagatcacctattgaggttatatctggggcatgctggggtgtgcactatatcgtatttgtagtcagaatacttgatgctgtagcgctcagcatttattgaatgaaattctgctataatatttgagcgaatatttgtttttcgacaatgcattttctttggatttcttacagaaaaatgtccattccacaaggtttgtgacatatttctgtgagcaggttctccctaacctcggtaccttgactaccccagtggaaggtcttgatatacagttggaggtattgaaattgttggcggagatgagttcattttgtggtgacatggaaaaactagaaacaaatttaaggaaactatttgataagttattggaatacatgcccctccctccagaagaggcagaaaatggagagaatgctggtaatgaagaacccaagctacagttcagttatgtggaatgtttgttgtacagttttcaccagttgggccgaaaacttccagatttcttaacagccaaactgaatgcagaaaagctcaaagatttcaaaatcaggctgcagtactttgcacggggcctgcaagtttatatcagacaacttcgcttagctctccagggtaaaacgggtgaggccttaaaaacagaagagaacaagattaaagtcgttgcattgaaaataacaaacaatatcaatgttttaatcaaggatctcttccacattcctccttcttataagagcacagtaacactatcctggaaacctgtacaaaaggttgagattgggcaaaagagagccagtgaagatacaacttcaggttcaccacccaagaaatcttcagcaggaccaaaaagagatgccaggcagatttataaccctcccagtgggaaatatagcagcaatttgggcaactttaattatgagagagaggagccttcaggggaagtagaggtggccgaggttggggcacacgaggaaatcgtagtcggggaagactctactgaataagacatcagcattcttcagcattgtcatgagcttaatatacttaaattctactactcattggattgccggggatgtccctttaaacagactgctgccttcagctaaaaacttaatgttctttatacctttgtatgtatgacctacttttgtaacagaccatggttgtgtccaaggtaaaaccacagtgatatttttggatgctttgtctgcaatcttgacttgtttttgcagtatcattattcagacttcaaattgtgaatcttttaaacatcttgataatttgttgttgagagctgttcattctaaaatgtaatgaaattcagtctagttctgctgataaagatcatcagttttgaaaggttactgattttcctcttccctcttagttttttacccaatatatggagaagagtaatggtcaatcttaacattttgttttaattgtttaataaagctgctgggcagtggtgcagcattcctacctagtgtcataaaagcaaaatacttacatagctttcttaaaatataggaatgacattacatttttaggagaaagtaagttgctttgcaccgcctacttaattcttttccatatattgtgatacaaacttttgaatatggaatcttactatttgaatagaaatgtgtatgtataatatacatacatacataagcatatatgtgtgtgtgtgtgtgtatatatatatatatgcatgctgtgaaacttgactacacaacataaatcactttttaaattccaggaacgggtagtctgacacggtgattatccttttgaggctgaatccgttattaacttgttatttaggtttttactcccagtagcaagggattctaagttagttgcacttacatgattattgttatttaaaactaagaataaaggctgcattttcaaagataaattggaattgctgttggtgaaataacaaccaaaatactgaatctgatgtacatacaggtttctacaggaagagatggtataatttacaatttggagatttaataaccagggctacccagaaaaagtgacttgataacatggtaccaataagtaagggatgctctctcggtttgcttttgccactttcaagattttaacttctcaggttattaatcaaaattattgtataagttagccaatagaatttttaggttaaaacaacagatggggggtttgtggagtgtttaatgtcatgggcatttttagtagcatagaccctttgttctgcatttgaatgtttcgtatatttttgtttcacagttaatcttccctccccaagtttgctattcaaatcaactgcctgaatgacatttctagtagtctgatgtatttttctgaggaatagtttgtgattccaatgcaggtgtcttcattaccattacctctacactgcagaagaagcaaaactcctttattagaattactgcacatgtgtatggggaaaatagttctgaaaggctagaatgatacaagtgagcaaaagttggtcagcttggctatggagtggtggcaataatctctaaacattccaaaagaccatgagctgaacctaaactcccttggaatctgaacaaaggaatataaaattgccatttgaaaactgaccagctaatctggacctcagagatagatcagccagtggcccaaagccatttcaagtacagaaattatagagactacagctaaataaatttgaacattaaatataattttaccactttttgtctttataagcatatttgtaaactcagaactgagcagaagtgactttactttctcaagtttgatactgagttgactgttcccttatccctcacccttccccttccctttcctaaggcaatagtgcacaacttaggttatttttgcttccgaatttgaatgaaaaacttaatgccatggatttttttcttttgcaagacacctgtttatcatcttgtttaaatgtaaatgtccccttatgcttttgaaataaatttccttttgtaatt

SEQ ID NO: 76522 - DNA, 2755 bp, Homo sapiens
gggagtttttcattttcccttatctcacctaatttaacagtcttcatcccagtcctaatgaaatattttagatttttattatgttcctataacttaaactgatttattttaaaacaacttctatgtgcatgtgaccttactcattttttagctacattctaacctgtcaagggaacacagattatttgctttctttgctacatctagatttgtttagagtcaagcaataggaatacgcattatctatagatttaaaccaaggaattctgtaaagactgtagaggtgattctgatagaagtgtaattactctagttctatgacagaatggattatgcctcatagaagttattggcaatttgtcttaattttcctttccctttgtagaacaagattaaagtcgttgcattgaaaataacaaacaatatcaatgttttaatcaaggatctcttccacattcctccttcttataagagcacagtaacactatcctggaaacctgtacaaaaggttgagattgggcaaaagagagccagtgaagatacaacttcaggttcaccacccaagaaatcttcagcaggaccaaaaagagatgccaggcagatttataaccctcccagtgggaaatatagcagcaatttgggcaactttaattatgagagagaggagccttcaggggaagtagaggtggccgaggttggggcacacgaggaaatcgtagtcggggaagactctactgaataagacatcagcattcttcagcattgtcatgagcttaatatacttaaattctactactcattggattgccggggatgtccctttaaacagactgctgccttcagctaaaaacttaatgttctttatacctttgtatgtatgacctacttttgtaacagaccatggttgtgtccaaggtaaaaccacagtgatatttttggatgctttgtctgcaatcttgacttgtttttgcagtatcattattcagacttcaaattgtgaatcttttaaacatcttgataatttgttgttgagagctgttcattctaaaatgtaatgaaattcagtctagttctgctgataaagatcatcagttttgaaaggttactgattttcctcttccctcttagttttttacccaatatatggagaagagtaatggtcaatcttaacattttgttttaattgtttaataaagctgctgggcagtggtgcagcattcctacctagtgtcataaaagcaaaatacttacatagctttcttaaaatataggaatgacattacatttttaggagaaagtaagttgctttgcaccgcctacttaattcttttccatatattgtgatacaaacttttgaatatggaatcttactatttgaatagaaatgtgtatgtataatatacatacatacataagcatatatgtgtgtgtgtgtgtgtatatatatatatatgcatgctgtgaaacttgactacacaacataaatcactttttaaattccaggaacgggtagtctgacacggtgattatccttttgaggctgaatccgttattaacttgttatttaggtttttactcccagtagcaagggattctaagttagttgcacttacatgattattgttatttaaaactaagaataaaggctgcattttcaaagataaattggaattgctgttggtgaaataacaaccaaaatactgaatctgatgtacatacaggtttctacaggaagagatggtataatttacaatttggagatttaataaccagggctacccagaaaaagtgacttgataacatggtaccaataagtaagggatgctctctcggtttgcttttgccactttcaagattttaacttctcaggttattaatcaaaattattgtataagttagccaatagaatttttaggttaaaacaacagatggggggtttgtggagtgtttaatgtcatgggcatttttagtagcatagaccctttgttctgcatttgaatgtttcgtatatttttgtttcacagttaatcttccctccccaagtttgctattcaaatcaactgcctgaatgacatttctagtagtctgatgtatttttctgaggaatagtttgtgattccaatgcaggtgtcttcattaccattacctctacactgcagaagaagcaaaactcctttattagaattactgcacatgtgtatggggaaaatagttctgaaaggctagaatgatacaagtgagcaaaagttggtcagcttggctatggagtggtggcaataatctctaaacattccaaaagaccatgagctgaacctaaactcccttggaatctgaacaaaggaatataaaattgccatttgaaaactgaccagctaatctggacctcagagatagatcagccagtggcccaaagccatttcaagtacagaaattatagagactacagctaaataaatttgaacattaaatataattttaccactttttgtctttataagcatatttgtaaactcagaactgagcagaagtgactttactttctcaagtttgatactgagttgactgttcccttatccctcacccttccccttccctttcctaaggcaatagtgcacaacttaggttatttttgcttccgaatttgaatgaaaaacttaatgccatggatttttttcttttgcaagacacctgtttatcatcttgtttaaatgtaaatgtccccttatgcttttgaaataaatttccttttgtaatt

SEQ ID NO: 76523 - DNA, 2282 bp, Homo sapiens
actcactgacattatgatggacccttgttcatgtggtcgagactgggcaacatacagccgaaggagatacaacttcaggttcaccacccaagaaatcttcagcaggaccaaaaagagatgccaggcagatttataaccctcccagtgggaaatatagcagcaatttgggcaactttaattatgagagagaggagccttcaggggaagtagaggtggccgaggttggggcacacgaggaaatcgtagtcggggaagactctactgaataagacatcagcattcttcagcattgtcatgagcttaatatacttaaattctactactcattggattgccggggatgtccctttaaacagactgctgccttcagctaaaaacttaatgttctttatacctttgtatgtatgacctacttttgtaacagaccatggttgtgtccaaggtaaaaccacagtgatatttttggatgctttgtctgcaatcttgacttgtttttgcagtatcattattcagacttcaaattgtgaatcttttaaacatcttgataatttgttgttgagagctgttcattctaaaatgtaatgaaattcagtctagttctgctgataaagatcatcagttttgaaaggttactgattttcctcttccctcttagttttttacccaatatatggagaagagtaatggtcaatcttaacattttgttttaattgtttaataaagctgctgggcagtggtgcagcattcctacctagtgtcataaaagcaaaatacttacatagctttcttaaaatataggaatgacattacatttttaggagaaagtaagttgctttgcaccgcctacttaattcttttccatatattgtgatacaaacttttgaatatggaatcttactatttgaatagaaatgtgtatgtataatatacatacatacataagcatatatgtgtgtgtgtgtgtgtatatatatatatatgcatgctgtgaaacttgactacacaacataaatcactttttaaattccaggaacgggtagtctgacacggtgattatccttttgaggctgaatccgttattaacttgttatttaggtttttactcccagtagcaagggattctaagttagttgcacttacatgattattgttatttaaaactaagaataaaggctgcattttcaaagataaattggaattgctgttggtgaaataacaaccaaaatactgaatctgatgtacatacaggtttctacaggaagagatggtataatttacaatttggagatttaataaccagggctacccagaaaaagtgacttgataacatggtaccaataagtaagggatgctctctcggtttgcttttgccactttcaagattttaacttctcaggttattaatcaaaattattgtataagttagccaatagaatttttaggttaaaacaacagatggggggtttgtggagtgtttaatgtcatgggcatttttagtagcatagaccctttgttctgcatttgaatgtttcgtatatttttgtttcacagttaatcttccctccccaagtttgctattcaaatcaactgcctgaatgacatttctagtagtctgatgtatttttctgaggaatagtttgtgattccaatgcaggtgtcttcattaccattacctctacactgcagaagaagcaaaactcctttattagaattactgcacatgtgtatggggaaaatagttctgaaaggctagaatgatacaagtgagcaaaagttggtcagcttggctatggagtggtggcaataatctctaaacattccaaaagaccatgagctgaacctaaactcccttggaatctgaacaaaggaatataaaattgccatttgaaaactgaccagctaatctggacctcagagatagatcagccagtggcccaaagccatttcaagtacagaaattatagagactacagctaaataaatttgaacattaaatataattttaccactttttgtctttataagcatatttgtaaactcagaactgagcagaagtgactttactttctcaagtttgatactgagttgactgttcccttatccctcacccttccccttccctttcctaaggcaatagtgcacaacttaggttatttttgcttccgaatttgaatgaaaaacttaatgccatggatttttttcttttgcaagacacctgtttatcatcttgtttaaatgtaaatgtccccttatgcttttgaaataaatttccttttgtaatt

SEQ ID NO: 76524 - DNA, 2169 bp, Homo sapiens
acccacgcgtccgcgaccacgcgtcctcccagtgggaaatatagcagcaatttgggcaactttaattatgagagagaggagccttcaggggaagtagaggtggccgaggttggggcacacgaggaaatcgtagtcggggaagactctactgaataagacatcagcattcttcagcattgtcatgagcttaatatacttaaattctactactcattggattgccggggatgtccctttaaacagactgctgccttcagctaaaaacttaatgttctttatacctttgtatgtatgacctacttttgtaacagaccatggttgtgtccaaggtaaaaccacagtgatatttttggatgctttgtctgcaatcttgacttgtttttgcagtatcattattcagacttcaaattgtgaatcttttaaacatcttgataatttgttgttgagagctgttcattctaaaatgtaatgaaattcagtctagttctgctgataaagatcatcagttttgaaaggttactgattttcctcttccctcttagttttttacccaatatatggagaagagtaatggtcaatcttaacattttgttttaattgtttaataaagctgctgggcagtggtgcagcattcctacctagtgtcataaaagcaaaatacttacatagctttcttaaaatataggaatgacattacatttttaggagaaagtaagttgctttgcaccgcctacttaattcttttccatatattgtgatacaaacttttgaatatggaatcttactatttgaatagaaatgtgtatgtataatatacatacatacataagcatatatgtgtgtgtgtgtgtgtatatatatatatatgcatgctgtgaaacttgactacacaacataaatcactttttaaattccaggaacgggtagtctgacacggtgattatccttttgaggctgaatccgttattaacttgttatttaggtttttactcccagtagcaagggattctaagttagttgcacttacatgattattgttatttaaaactaagaataaaggctgcattttcaaagataaattggaattgctgttggtgaaataacaaccaaaatactgaatctgatgtacatacaggtttctacaggaagagatggtataatttacaatttggagatttaataaccagggctacccagaaaaagtgacttgataacatggtaccaataagtaagggatgctctctcggtttgcttttgccactttcaagattttaacttctcaggttattaatcaaaattattgtataagttagccaatagaatttttaggttaaaacaacagatggggggtttgtggagtgtttaatgtcatgggcatttttagtagcatagaccctttgttctgcatttgaatgtttcgtatatttttgtttcacagttaatcttccctccccaagtttgctattcaaatcaactgcctgaatgacatttctagtagtctgatgtatttttctgaggaatagtttgtgattccaatgcaggtgtcttcattaccattacctctacactgcagaagaagcaaaactcctttattagaattactgcacatgtgtatggggaaaatagttctgaaaggctagaatgatacaagtgagcaaaagttggtcagcttggctatggagtggtggcaataatctctaaacattccaaaagaccatgagctgaacctaaactcccttggaatctgaacaaaggaatataaaattgccatttgaaaactgaccagctaatctggacctcagagatagatcagccagtggcccaaagccatttcaagtacagaaattatagagactacagctaaataaatttgaacattaaatataattttaccactttttgtctttataagcatatttgtaaactcagaactgagcagaagtgactttactttctcaagtttgatactgagttgactgttcccttatccctcacccttccccttccctttcctaaggcaatagtgcacaacttaggttatttttgcttccgaatttgaatgaaaaacttaatgccatggatttttttcttttgcaagacacctgtttatcatcttgtttaaatgtaaatgtccccttatgcttttgaaataaatttccttttgtaatt

SEQ ID NO: 76525 - DNA, 3038 bp, Homo sapiens
agcgggctgtgcgcggtgaactcggcggctgcactggcggcagctggaggtgtaatagtgcgggtagtgggtttggagaagttccgaggcggcggtggcgccggtcaggacaaggatagcggaaccgggccctgggcttgtcgctcaccatgccgacagtagaggagctttaccgcaattatggcatcctggccgatgccacggagcaagtgggccagcataaagatgcctatcaagtgatattggatggtgtgaaaggtggtactaaggaaaagcgattagcagctcaatttattccgaaattctttaagcattttccagaattggctgattctgctatcaatgcacagttagacctctgtgaggatgaagatgtatctattcgacgtcaagcaattaaagaactgcctcaatttgccactggagaaaatccttcctcgagtggccagataatactaacgcaacttttgccagaacagatgactctgccagaatttaaccctagtgaacaatgccccctattaagtatatttaaaatggatgcaaaagggacttttaggtgggttgttcagcccaaatacttcaaggagaggacattgttagagaacgagcaattaaattcctttctacaaaacttaagactttaccagatgaagtcttaacaaaggaagtggaagagcttatactaactgaatccaaaaaggtcctagaagatgtgactggtgaagaatttgttctatttatgaagatactgtctgggttaaaaagcttacagacagtgagtggaagacagcaacttgtagagttggtggctgaacaggccgacctagaacagaccttcaatccctcggatcctgactgtgtggacaggctcttacagtgcactcggcaggcagtacccctcttctctaaaaatgtccattccacaaggtttgtgacatatttctgtgagcaggttctccctaacctcggtaccttgactaccccagtggaaggtcttgatatacagttggaggtattgaaattgttggcggagatgagttcattttgtggtgacatggaaaaactagaaacaaatttaaggaaactatttgataagttattggaatacatgcccctccctccagaagaggcagaaaatggagagaatgctggtaatgaagaacccaagctacagttcagttatgtggaatgtttgttgtacagttttcaccagttgggccgaaaacttccagatttcttaacagccaaactgaatgcagaaaagctcaaagatttcaaaatcaggctgcagtactttgcacggggcctgcaagtttatatcagacaacttcgcttagctctccagggtaaaacgggtgaggccttaaaaacagaagagaacaagattaaagtcgttgcattgaaaataacaaacaatatcaatgttttaatcaaggatctcttccacattcctccttcttataagagcacagtaacactatcctggaaacctgtacaaaaggttgagattgggcaaaagagagccagtgaagatacaacttcaggttcaccacccaagaaatcttcagcaggaccaaaaagagatgccaggcagatttataaccctcccagtgggaaatatagcagcaatttgggcaactttaattatgagagagaggagccttcaggggaagtagaggtggccgaggttggggcacacgaggaaatcgtagtcggggaagactctactgaataagacatcagcattcttcagcattgtcatgagcttaatatacttaaattctactactcattggattgccggggatgtccctttgaggctgaatccgttattaacttgttatttaggtttttactcccagtagcaagggattctaagttagttgcacttacatgattattgttatttaaaactaagaataaaggctgcattttcaaagataaattggaattgctgttggtgaaataacaaccaaaatactgaatctgatgtacatacaggtttctacaggaagagatggtataatttacaatttggagatttaataaccagggctacccagaaaaagtgacttgataacatggtaccaataagtaagggatgctctctcggtttgcttttgccactttcaagattttaacttctcaggttattaatcaaaattattgtataagttagccaatagaatttttaggttaaaacaacagatggggggtttgtggagtgtttaatgtcatgggcatttttagtagcatagaccctttgttctgcatttgaatgtttcgtatatttttgtttcacagttaatcttccctccccaagtttgctattcaaatcaactgcctgaatgacatttctagtagtctgatgtatttttctgaggaatagtttgtgattccaatgcaggtgtcttcattaccattacctctacactgcagaagaagcaaaactcctttattagaattactgcacatgtgtatggggaaaatagttctgaaaggctagaatgatacaagtgagcaaaagttggtcagcttggctatggagtggtggcaataatctctaaacattccaaaagaccatgagctgaacctaaactcccttggaatctgaacaaaggaatataaaattgccatttgaaaactgaccagctaatctggacctcagagatagatcagccagtggcccaaagccatttcaagtacagaaattatagagactacagctaaataaatttgaacattaaatataattttaccactttttgtctttataagcatatttgtaaactcagaactgagcagaagtgactttactttctcaagtttgatactgagttgactgttcccttatccctcacccttccccttccctttcctaaggcaatagtgcacaacttaggttatttttgcttccgaatttgaatgaaaaacttaatgccatggatttttttcttttgcaagacacctgtttatcatcttgtttaaatgtaaatgtccccttatgcttttgaaataaatttccttttgtaatt

SEQ ID NO: 76526 - DNA, 1540 bp, Homo sapiens
aagcagtggtatcaacgcagagtgcccattacggccggggctttcttaaaatataggaatgacattacatttttaggagaaagtaagttgctttgcaccgcctacttaattcttttccatatattgtgatacaaacttttgaatatggaatcttactatttgaatagaaatgtgtatgtataatatacatacatacataagcatatatgtgtgtgtgtgtgtgtatatatatatatatgcatgctgtgaaacttgactacacaacataaatcactttttaaattccaggaacgggtagtctgacacggtgattatccttttgaggctgaatccgttattaacttgttatttaggtttttactcccagtagcaagggattctaagttagttgcacttacatgattattgttatttaaaactaagaataaaggctgcattttcaaagataaattggaattgctgttggtgaaataacaaccaaaatactgaatctgatgtacatacaggtttctacaggaagagatggtataatttacaatttggagatttaataaccagggctacccagaaaaagtgacttgataacatggtaccaataagtaagggatgctctctcggtttgcttttgccactttcaagattttaacttctcaggttattaatcaaaattattgtataagttagccaatagaatttttaggttaaaacaacagatggggggtttgtggagtgtttaatgtcatgggcatttttagtagcatagaccctttgttctgcatttgaatgtttcgtatatttttgtttcacagttaatcttccctccccaagtttgctattcaaatcaactgcctgaatgacatttctagtagtctgatgtatttttctgaggaatagtttgtgattccaatgcaggtgtcttcattaccattacctctacactgcagaagaagcaaaactcctttattagaattactgcacatgtgtatggggaaaatagttctgaaaggctagaatgatacaagtgagcaaaagttggtcagcttggctatggagtggtggcaataatctctaaacattccaaaagaccatgagctgaacctaaactcccttggaatctgaacaaaggaatataaaattgccatttgaaaactgaccagctaatctggacctcagagatagatcagccagtggcccaaagccatttcaagtacagaaattatagagactacagctaaataaatttgaacattaaatataattttaccactttttgtctttataagcatatttgtaaactcagaactgagcagaagtgactttactttctcaagtttgatactgagttgactgttcccttatccctcacccttccccttccctttcctaaggcaatagtgcacaacttaggttatttttgcttccgaatttgaatgaaaaacttaatgccatggatttttttcttttgcaagacacctgtttatcatcttgtttaaatgtaaatgtccccttatgcttttgaaataaatttccttttgtaatt

SEQ ID NO: 76527 - DNA, 1432 bp, Homo sapiens
tgaaacaacgctttgatgtaacaaaaaggcggtggtacggtcggaattccgggaatatcgaatgtgtatgtataatatacatacatacataagcatatatgtgtgtgtgtgtgtgtatatatatatatatgcatgctgtgaaacttgactacacaacataaatcactttttaaattccaggaacgggtagtctgacacggtgattatccttttgaggctgaatccgttattaacttgttatttaggtttttactcccagtagcaagggattctaagttagttgcacttacatgattattgttatttaaaactaagaataaaggctgcattttcaaagataaattggaattgctgttggtgaaataacaaccaaaatactgaatctgatgtacatacaggtttctacaggaagagatggtataatttacaatttggagatttaataaccagggctacccagaaaaagtgacttgataacatggtaccaataagtaagggatgctctctcggtttgcttttgccactttcaagattttaacttctcaggttattaatcaaaattattgtataagttagccaatagaatttttaggttaaaacaacagatggggggtttgtggagtgtttaatgtcatgggcatttttagtagcatagaccctttgttctgcatttgaatgtttcgtatatttttgtttcacagttaatcttccctccccaagtttgctattcaaatcaactgcctgaatgacatttctagtagtctgatgtatttttctgaggaatagtttgtgattccaatgcaggtgtcttcattaccattacctctacactgcagaagaagcaaaactcctttattagaattactgcacatgtgtatggggaaaatagttctgaaaggctagaatgatacaagtgagcaaaagttggtcagcttggctatggagtggtggcaataatctctaaacattccaaaagaccatgagctgaacctaaactcccttggaatctgaacaaaggaatataaaattgccatttgaaaactgaccagctaatctggacctcagagatagatcagccagtggcccaaagccatttcaagtacagaaattatagagactacagctaaataaatttgaacattaaatataattttaccactttttgtctttataagcatatttgtaaactcagaactgagcagaagtgactttactttctcaagtttgatactgagttgactgttcccttatccctcacccttccccttccctttcctaaggcaatagtgcacaacttaggttatttttgcttccgaatttgaatgaaaaacttaatgccatggatttttttcttttgcaagacacctgtttatcatcttgtttaaatgtaaatgtccccttatgcttttgaaataaatttccttttgtaatt

SEQ ID NO: 76528 - DNA, 974 bp, Homo sapiens
tttcgagcggccgcccgggcatggtaccaataagtaagggatgctctctcggtttgcttttgccactttcaagattttaacttctcaggttattaatcaaaattattgtataagttagccaatagaatttttaggttaaaacaacagatggggggtttgtggagtgtttaatgtcatgggcatttttagtagcatagaccctttgttctgcatttgaatgtttcgtatatttttgtttcacagttaatcttccctccccaagtttgctattcaaatcaactgcctgaatgacatttctagtagtctgatgtatttttctgaggaatagtttgtgattccaatgcaggtgtcttcattaccattacctctacactgcagaagaagcaaaactcctttattagaattactgcacatgtgtatggggaaaatagttctgaaaggctagaatgatacaagtgagcaaaagttggtcagcttggctatggagtggtggcaataatctctaaacattccaaaagaccatgagctgaacctaaactcccttggaatctgaacaaaggaatataaaattgccatttgaaaactgaccagctaatctggacctcagagatagatcagccagtggcccaaagccatttcaagtacagaaattatagagactacagctaaataaatttgaacattaaatataattttaccactttttgtctttataagcatatttgtaaactcagaactgagcagaagtgactttactttctcaagtttgatactgagttgactgttcccttatccctcacccttccccttccctttcctaaggcaatagtgcacaacttaggttatttttgcttccgaatttgaatgaaaaacttaatgccatggatttttttcttttgcaagacacctgtttatcatcttgtttaaatgtaaatgtccccttatgcttttgaaataaatttccttttgtaatt

SEQ ID NO: 76529 - DNA, 866 bp, Homo sapiens
  misc_feature (32)..(32): n is a, c, g, or t
cggcggggtgggtgagagggggggcggggcgnatgggcgacggcgaatggagggagtgtttaatgtcatgggcatttttagtagcatagaccctttgttctgcatttgaatgtttcgtatatttttgtttcacagttaatcttccctccccaagtttgctattcaaatcaactgcctgaatgacatttctagtagtctgatgtatttttctgaggaatagtttgtgattccaatgcaggtgtcttcattaccattacctctacactgcagaagaagcaaaactcctttattagaattactgcacatgtgtatggggaaaatagttctgaaaggctagaatgatacaagtgagcaaaagttggtcagcttggctatggagtggtggcaataatctctaaacattccaaaagaccatgagctgaacctaaactcccttggaatctgaacaaaggaatataaaattgccatttgaaaactgaccagctaatctggacctcagagatagatcagccagtggcccaaagccatttcaagtacagaaattatagagactacagctaaataaatttgaacattaaatataattttaccactttttgtctttataagcatatttgtaaactcagaactgagcagaagtgactttactttctcaagtttgatactgagttgactgttcccttatccctcacccttccccttccctttcctaaggcaatagtgcacaacttaggttatttttgcttccgaatttgaatgaaaaacttaatgccatggatttttttcttttgcaagacacctgtttatcatcttgtttaaatgtaaatgtccccttatgcttttgaaataaatttccttttgtaatt

SEQ ID NO: 76530 - DNA, 1739 bp, Homo sapiens
  misc_feature (1662)..(1662): n is a, c, g, or t
  misc_feature (1676)..(1676): n is a, c, g, or t
  misc_feature (1682)..(1682): n is a, c, g, or t
  misc_feature (1699)..(1699): n is a, c, g, or t
  misc_feature (1726)..(1726): n is a, c, g, or t
  misc_feature (1738)..(1738): n is a, c, g, or t
agcgggctgtgcgcggtgaactcggcggctgcactggcggcagctggaggtgtaatagtgcgggtagtgggtttggagaagttccgaggcggcggtggcgccggtcaggacaaggatagcggaaccgggccctgggcttgtcgctcaccatgccgacagtagaggagctttaccgcaattatggcatcctggccgatgccacggagcaagtgggccagcataaagatgcctatcaagtgatattggatggtgtgaaaggtggtactaaggaaaagcgattagcagctcaatttattccgaaattctttaagcattttccagaattggctgattctgctatcaatgcacagttagacctctgtgaggatgaagatgtatctattcgacgtcaagcaattaaagaactgcctcaatttgccactggagaaaatccttcctcgagtggccagataatactaacgcaacttttgccagaacagatgactctgccagaatttaaccctagtgaacaatgccccctattaagtatatttaaaatggatgcaaaagggacttttaggtgggttgttcagcccaaatacttcaaggagaggacattgttagagaacgagcaattaaattcctttctacaaaacttaagactttaccagatgaagtcttaacaaaggaagtggaagagcttatactaactgaatccaaaaaggtcctagaagatgtgactggtgaagaatttgttctatttatgaagatactgtctgggttaaaaagcttacagacagtgagtggaagacagcaacttgtagagttggtggctgaacaggccgacctagaacagaccttcaatccctcggatcctgactgtgtggacaggctcttacagtgcactcggcaggcagtacccctcttctctaaaaatgtccattccacaaggtttgtgacatatttctgtgagcaggttctccctaacctcggtaccttgactaccccagtggaaggtcttgatatacagttggaggtattgaaattgttggcggagatgagttcattttgtggtgacatggaaaaactagaaacaaatttaaggaaactatttgataagttattggaatacatgcccctccctccagaagaggcagaaaatggagagaatgctggtaatgaagaacccaagctacagttcagttatgtggaatgtttgttgtacagttttcaccagttgggccgaaaacttccagatttcttaacagccaaactgaatgcagaaaagctcaaagatttcaaaatcaggctgcagtactttgcacggggcctgcaagtttatatcagacaacttcgcttagctctccagggtaaaacgggtgaggccttaaaaacagaagagaacaagattaaagtcgttgcattgaaaataacaaacaatatcaatgttttaatcaaggatctcttccacattcctccttcttataagagcacagtaacactatcctggaaacctgtacaaaaggttgagattgggcaaaagagagccagtgaagatacaacttcaggttcaccacccaagaaatcttcagcaggaccaaaaagagatgccaggcagatttataaccctcccagtgggaaatatagcagcaatttgggcaactttaattatgaaccaaaaangaacctccaggggnaaattnaaagttgcccaaggttngggcccaccaaagaaatcctttttccngggggggggggng

SEQ ID NO: 76531 - DNA, 812 bp, Homo sapiens
  misc_feature (32)..(32): n is a, c, g, or t
cggcggggtgggtgagagggggggcggggcgnatgggcgacggcgaatggagggagtgtttaatgtcatgggcatttttagtagcatagaccctttgttctgcatttgaatgtttcgtatatttttgtttcacagttaatcttccctccccaagtttgctattcaaatcaactgcctgaatgacatttctagtagtctgatgtatttttctgaggaatagtttgtgattccaatgcaggtgtcttcattaccattacctctacactgcagaagaagcaaaactcctttattagaattactgcacatgtgtatggggaaaatagttctgaaaggctagaatgatacaagtgagcaaaagttggtcagcttggctatggagtggtggcaataatctctaaacattccaaaagaccatgagctgaacctaaactcccttggaatctgaacaaaggaatataaaattgccatttgcatttcaagtacagaaattatagagactacagctaaataaatttgaacattaaatataattttaccactttttgtctttataagcatatttgtaaactcagaactgagcagaagtgactttactttctcaagtttgatactgagttgactgttcccttatccctcacccttccccttccctttcctaaggcaatagtgcacaacttaggttatttttgcttccgaatttgaatgaaaaacttaatgccatggatttttttcttttgcaagacacctgtttatcatcttgtttaaatgtaaatgtccccttatgcttttgaaataaatttccttttgtaatt

SEQ ID NO: 76532 - DNA, 316 bp, Homo sapiens
attgcaaaatctgtatatttttctctcttaggaatacatgcccctccctccagaagaggcagaaaatggagagaatgctggtaatgaagaacccaagctacagttcagttatgtggaatgtttgttgtacagttttcaccagttgggccgaaaacttccagatttcttaacagccaaactgaatgcagaaaagctcaaagatttcaaaatcaggtgatatatgattgaggtggctcaatccttggcaaaggtggtagctatcctgaagttccttgggttttgcttttgttctatgagagctccccatcctgcctta

SEQ ID NO: 76533 - DNA, 447 bp, Homo sapiens
atttattgaatgaaattctgctataatatttgagcgaatatttgtttttcgacaatgcattttctttggatttcttacagaaaaatgtccattccacaaggtttgtgacatatttctgtgagcaggttctccctaacctcggtaccttgactaccccagtggaaggtcttgatatacagttggaggtaagcaaaaatttcagctttagcactgataaggcattcttatattttaacaaaaatgtaaaccactaacttagatccgatttctaagggagcagtttaaatgtctggtaatggccagccagtaatctccctagaccagaattaattgcattaggactgcttcatggattcaattaaagtttgctgcaatgggaaagccttacctgtagttttattatagtcagtctctacttttgtagccttaatatttttaaataaggtg

SEQ ID NO: 76534 - DNA, 3751 bp, Homo sapiens
agcgggctgtgcgcggtgaactcggcggctgcactggcggcagctggaggtgtaatagtgcgggtagtgggtttggagaagttccgaggcggcggtggcgccggtcaggacaaggatagcggaaccgggccctgggcttgtcgctcaccatgccgacagtagaggagctttaccgcaattatggcatcctggccgatgccacggagcaagtgggccagcataaagatgcctatcaagtgatattggatggtgtgaaaggtggtactaaggaaaagcgattagcagctcaatttattccgaaattctttaagcattttccagaattggctgattctgctatcaatgcacagttagacctctgtgaggatgaagatgtatctattcgacgtcaagcaattaaagaactgcctcaatttgccactggagaaaatccttcctcgagtggccagataatactaacgcaacttttgccagaacagatgactctgccagaatttaaccctagtgaacaatgccccctattaagtatatttaaaatggatgcaaaagggacttttaggtgggttgttcagcccaaatacttcaaggagaggacattgttagagaacgagcaattaaattcctttctacaaaacttaagactttaccagatgaagtcttaacaaaggaagtggaagagcttatactaactgaatccaaaaaggtcctagaagatgtgactggtgaagaatttgttctatttatgaagatactgtctgggttaaaaagcttacagacagtgagtggaagacagcaacttgtagagttggtggctgaacaggccgacctagaacagaccttcaatccctcggatcctgactgtgtggacaggctcttacagtgcactcggcaggcagtacccctcttctctaaaaatgtccattccacaaggtttgtgacatatttctgtgagcaggttctccctaacctcggtaccttgactaccccagtggaaggtcttgatatacagttggaggtattgaaattgttggcggagatgagttcattttgtggtgacatggaaaaactagaaacaaatttaaggaaactatttgataagttattggaatacatgcccctccctccagaagaggcagaaaatggagagaatgctggtaatgaagaacccaagctacagttcagttatgtggaatgtttgttgtacagttttcaccagttgggccgaaaacttccagatttcttaacagccaaactgaatgcagaaaagctcaaagatttcaaaatcaggctgcagtactttgcacggggcctgcaagtttatatcagacaacttcgcttagctctccagggtaaaacgggtgaggccttaaaaacagaagagaacaagattaaagtcgttgcattgaaaataacaaacaatatcaatgttttaatcaaggatctcttccacattcctccttcttataagagcacagtaacactatcctggaaacctgtacaaaaggttgagattgggcaaaagagagccagtgaagatacaacttcaggttcaccacccaagaaatcttcagcaggaccaaaaagagatgccaggcagatttataaccctcccagtgggaaatatagcagcaatttgggcaactttaattatgagagagaggagccttcaggggaagtagaggtggccgaggttggggcacacgaggaaatcgtagtcggggaagactctactgaataagacatcagcattcttcagcattgtcatgagcttaatatacttaaattctactactcattggattgccggggatgtccctttaaacagactgctgccttcagctaaaaacttaatgttctttatacctttgtatgtatgacctacttttgtaacagaccatggttgtgtccaaggtaaaaccacagtgatatttttggatgctttgtctgcaatcttgacttgtttttgcagtatcattattcagacttcaaattgtgaatcttttaaacatcttgataatttgttgttgagagctgttcattctaaaatgtaatgaaattcagtctagttctgctgataaagatcatcagttttgaaaggttactgattttcctcttccctcttagttttttacccaatatatggagaagagtaatggtcaatcttaacattttgttttaattgtttaataaagctgctgggcagtggtgcagcattcctacctagtgtcataaaagcaaaatacttacatagctttcttaaaatataggaatgacattacatttttaggagaaagtaagttgctttgcaccgcctacttaattcttttccatatattgtgatacaaacttttgaatatggaatcttactatttgaatagaaatgtgtatgtataatatacatacatacataagcatatatgtgtgtgtgtgtgtgtatatatatatatatgcatgctgtgaaacttgactacacaacataaatcactttttaaattccaggaacgggtagtctgacacggtgattatccttttgaggctgaatccgttattaacttgttatttaggtttttactcccagtagcaagggattctaagttagttgcacttacatgattattgttatttaaaactaagaataaaggctgcattttcaaagataaattggaattgctgttggtgaaataacaaccaaaatactgaatctgatgtacatacaggtttctacaggaagagatggtataatttacaatttggagatttaataaccagggctacccagaaaaagtgacttgataacatggtaccaataagtaagggatgctctctcggtttgcttttgccactttcaagattttaacttctcaggttattaatcaaaattattgtataagttagccaatagaatttttaggttaaaacaacagatggggggtttgtggagtgtttaatgtcatgggcatttttagtagcatagaccctttgttctgcatttgaatgtttcgtatatttttgtttcacagttaatcttccctccccaagtttgctattcaaatcaactgcctgaatgacatttctagtagtctgatgtatttttctgaggaatagtttgtgattccaatgcaggtgtcttcattaccattacctctacactgcagaagaagcaaaactcctttattagaattactgcacatgtgtatggggaaaatagttctgaaaggctagaatgatacaagtgagcaaaagttggtcagcttggctatggagtggtggcaataatctctaaacattccaaaagaccatgagctgaacctaaactcccttggaatctgaacaaaggaatataaaattgccatttgaaaactgaccagctaatctggacctcagagatagatcagccagtggcccaaagccatttcaagtacagaaattatagagactacagctaaataaatttgaacattaaatataattttaccactttttgtctttataagcatatttgtaaactcagaactgagcagaagtgactttactttctcaagtttgatactgagttgactgttcccttatccctcacccttccccttccctttcctaaggcaatagtgcacaacttaggttatttttgcttccgaatttgaatgaaaaacttaatgccatggatttttttcttttgcaagacacctgtttatcatcttgtttaaatgtaaatgtccccttatgcttttgaaataaatttccttttgtaatt

SEQ ID NO: 76535 - DNA, 2669 bp, Homo sapiens
gatcccctactgttccacagggggaatacatgcccctccctccagaagaggcagaaaatggagagaatgctggtaatgaagaacccaagctacagttcagttatgtggaatgtttgttgtacagttttcaccagttgggccgaaaacttccagatttcttaacagccaaactgaatgcagaaaagctcaaagatttcaaaatcaggctgcagtactttgcacggggcctgcaagtttatatcagacaacttcgcttagctctccagggtaaaacgggtgaggccttaaaaacagaagagaacaagattaaagtcgttgcattgaaaataacaaacaatatcaatgttttaatcaaggatctcttccacattcctccttcttataagagcacagtaacactatcctggaaacctgtacaaaaggttgagattgggcaaaagagagccagtgaagatacaacttcaggttcaccacccaagaaatcttcagcaggaccaaaaagagatgccaggcagatttataaccctcccagtgggaaatatagcagcaatttgggcaactttaattatgagagagaggagccttcaggggaagtagaggtggccgaggttggggcacacgaggaaatcgtagtcggggaagactctactgaataagacatcagcattcttcagcattgtcatgagcttaatatacttaaattctactactcattggattgccggggatgtccctttaaacagactgctgccttcagctaaaaacttaatgttctttatacctttgtatgtatgacctacttttgtaacagaccatggttgtgtccaaggtaaaaccacagtgatatttttggatgctttgtctgcaatcttgacttgtttttgcagtatcattattcagacttcaaattgtgaatcttttaaacatcttgataatttgttgttgagagctgttcattctaaaatgtaatgaaattcagtctagttctgctgataaagatcatcagttttgaaaggttactgattttcctcttccctcttagttttttacccaatatatggagaagagtaatggtcaatcttaacattttgttttaattgtttaataaagctgctgggcagtggtgcagcattcctacctagtgtcataaaagcaaaatacttacatagctttcttaaaatataggaatgacattacatttttaggagaaagtaagttgctttgcaccgcctacttaattcttttccatatattgtgatacaaacttttgaatatggaatcttactatttgaatagaaatgtgtatgtataatatacatacatacataagcatatatgtgtgtgtgtgtgtgtatatatatatatatgcatgctgtgaaacttgactacacaacataaatcactttttaaattccaggaacgggtagtctgacacggtgattatccttttgaggctgaatccgttattaacttgttatttaggtttttactcccagtagcaagggattctaagttagttgcacttacatgattattgttatttaaaactaagaataaaggctgcattttcaaagataaattggaattgctgttggtgaaataacaaccaaaatactgaatctgatgtacatacaggtttctacaggaagagatggtataatttacaatttggagatttaataaccagggctacccagaaaaagtgacttgataacatggtaccaataagtaagggatgctctctcggtttgcttttgccactttcaagattttaacttctcaggttattaatcaaaattattgtataagttagccaatagaatttttaggttaaaacaacagatggggggtttgtggagtgtttaatgtcatgggcatttttagtagcatagaccctttgttctgcatttgaatgtttcgtatatttttgtttcacagttaatcttccctccccaagtttgctattcaaatcaactgcctgaatgacatttctagtagtctgatgtatttttctgaggaatagtttgtgattccaatgcaggtgtcttcattaccattacctctacactgcagaagaagcaaaactcctttattagaattactgcacatgtgtatggggaaaatagttctgaaaggctagaatgatacaagtgagcaaaagttggtcagcttggctatggagtggtggcaataatctctaaacattccaaaagaccatgagctgaacctaaactcccttggaatctgaacaaaggaatataaaattgccatttgaaaactgaccagctaatctggacctcagagatagatcagccagtggcccaaagccatttcaagtacagaaattatagagactacagctaaataaatttgaacattaaatataattttaccactttttgtctttataagcatatttgtaaactcagaactgagcagaagtgactttactttctcaagtttgatactgagttgactgttcccttatccctcacccttccccttccctttcctaaggcaatagtgcacaacttaggttatttttgcttccgaatttgaatgaaaaacttaatgccatggatttttttcttttgcaagacacctgtttatcatcttgtttaaatgtaaatgtccccttatgcttttgaaataaatttccttttgtaatt

SEQ ID NO: 76536 - DNA, 3544 bp, Homo sapiens
agcgggctgtgcgcggtgaactcggcggctgcactggcggcagctggaggtgtaatagtgcgggtagtgggtttggagaagttccgaggcggcggtggcgccggtcaggacaaggatagcggaaccgggccctgggcttgtcgctcaccatgccgacagtagaggagctttaccgcaattatggcatcctggccgatgccacggagcaagtgggccagcataaagatgcctatcaagtgatattggatggtgtgaaaggtggtactaaggaaaagcgattagcagctcaatttattccgaaattctttaagcattttccagaattggctgattctgctatcaatgcacagttagacctctgtgaggatgaagatgtatctattcgacgtcaagcaattaaagaactgcctcaatttgccactggagaaaatccttcctcgagtggccagataatactaacgcaacttttgccagaacagatgactctgccagaatttaaccctagtgaacaatgccccctattaagtatatttaaaatggatgcaaaagggacttttaggtgggttgttcagcccaaatacttcaaggagaggacattgttagagaacgagcaattaaattcctttctacaaaacttaagactttaccagatgaagtcttaacaaaggaagtggaagagcttatactaactgaatccaaaaaggtcctagaagatgtgactggtgaagaatttgttctatttatgaagatactgtctgggttaaaaagcttacagacagtgagtggaagacagcaacttgtagagttggtggctgaacaggccgacctagaacagaccttcaatccctcggatcctgactgtgtggacaggctcttacagtgcactcggcaggcagtacccctcttctctaaaaatgtccattccacaaggtttgtgacatatttctgtgagcaggttctccctaacctcggtaccttgactaccccagtggaaggtcttgatatacagttggaggtattgaaattgttggcggagatgagttcattttgtggtgacatggaaaaactagaaacaaatttaaggaaactatttgataagttattggaatacatgcccctccctccagaagaggcagaaaatggagagaatgctggtaatgaagaacccaagctacagttcagttatgtggaatgtttgttgtacagttttcaccagttgggccgaaaacttccagatttcttaacagccaaactgaatgcagaaaagctcaaagatttcaaaatcaggctgcagtactttgcacggggcctgcaagtttatatcagacaacttcgcttagctctccagggtaaaacgggtgaggccttaaaaacagaagagaacaagattaaagtcgttgcattgaaaataacaaacaatatcaatgttttaatcaaggatctcttccacattcctccttcttataagagcacagtaacactatcctggaaacctgtacaaaaggttgagattgggcaaaagagagccagtgaagatacaacttcaggttcaccacccaagaaatcttcagcaggaccaaaaagagatgccaggcagatttataaccctcccagtgggaaatatagcagcaatttgggcaactttaattatgagagagaggagccttcaggggaagtagaggtggccgaggttggggcacacgaggaaatcgtagtcggggaagactctactgaataagacatcagcattcttcagcattgtcatgagcttaatatacttaaattctactactcattggattgccggggatgtccctttaaacagactgctgccttcagctaaaaacttaatgttctttatacctttgtatgtatgacctacttttgtaacagaccatggttgtgtccaaggtaaaaccacagtgatatttttggatgctttgtctgcaatcttgacttgtttttgcagtatcattattcagacttcaaattgtgaatcttttaaacatcttgataatttgttgttgagagctgttcattctaaaatgtaatgaaattcagtctagttctgctgataaagatcatcagttttgaaaggttactgattttcctcttccctcttagttttttacccaatatatggagaagagtaatggtcaatcttaacattttgttttaattgtttaataaagctgctgggcagtggtgcagcattcctacctagtgtcataaaagcaaaatacttacatagctttcttaaaatataggaatgacattacatttttaggagaaagtaagttgctttgcaccgcctacttaattcttttccatatattgtgatacaaacttttgaatatggaatcttactatttgaatagaaatgtgtatgtataatatacatacatacataagcatatatgtgtgtgtgtgtgtgtatatatatatatatgcatgctgtgaaacttgactacacaacataaatcactttttaaattccaggaacgggtagtctgacacggtgattatccttttgaggctgaatccgttattaacttgttatttaggtttttactcccagtagcaagggattctaagttagttgcacttacatgattattgttatttaaaactaagaataaaggctgcattttcaaagataaattggaattgctgttggtgaaataacaaccaaaatactgaatctgatgtacatacaggtttctacaggaagagatggtataatttacaatttggagatttaataaccagggctacccagaaaaagtgacttgataacatggtaccaataagtaagggatgctctctcggtttgcttttgccactttcaagattttaacttctcaggttattaatcaaaattattgtataagttagccaatagaatttttaggttaaaacaacagatggggggtttgtggagtgtttaatgtcatgggcatttttagtagcatagaccctttgttctgcatttgaatgtttcgtatatttttgtttcacagttaatcttccctccccaagtttgctattcaaatcaactgcctgaatgacatttctagtagtctgatgtatttttctgaggaatagtttgtgattccaatgcaggtgtcttcattaccattacctctacactgcagaagaagcaaaactcctttattagaattactgcacatgtgtatggggaaaatagttctgaaaggctagaatgatacaagtgagcaaaagttggtcagcttggctatggagtggtggcaataatctctaaacattccaaaagaccatgagctgaacctaaactcccttggaatctgaacaaaggaatataaaattgccatttgaaaactgaccagctaatctggacctcagagatagatcagccagtggcccaaagccatttcaagtacagaaattatagagactacagctaaataaatttgaacattaaatataattttaccactttttgtctttataagcatatttgtaaactctccctatccctgacctttccccttcctttcctaaa

SEQ ID NO: 76537 - DNA, 2674 bp, Homo sapiens
agcgggctgtgcgcggtgaactcggcggctgcactggcggcagctggaggtgtaatagtgcgggtagtgggtttggagaagttccgaggcggcggtggcgccggtcaggacaaggatagcggaaccgggccctgggcttgtcgctcaccatgccgacagtagaggagctttaccgcaattatggcatcctggccgatgccacggagcaagtgggccagcataaagatgcctatcaagtgatattggatggtgtgaaaggtggtactaaggaaaagcgattagcagctcaatttattccgaaattctttaagcattttccagaattggctgattctgctatcaatgcacagttagacctctgtgaggatgaagatgtatctattcgacgtcaagcaattaaagaactgcctcaatttgccactggagaaaatccttcctcgagtggccagataatactaacgcaacttttgccagaacagatgactctgccagaatttaaccctagtgaacaatgccccctattaagtatatttaaaatggatgcaaaagggacttttaggtgggttgttcagcccaaatacttcaaggagaggacattgttagagaacgagcaattaaattcctttctacaaaacttaagactttaccagatgaagtcttaacaaaggaagtggaagagcttatactaactgaatccaaaaaggtcctagaagatgtgactggtgaagaatttgttctatttatgaagatactgtctgggttaaaaagcttacagacagtgagtggaagacagcaacttgtagagttggtggctgaacaggccgacctagaacagaccttcaatccctcggatcctgactgtgtggacaggctcttacagtgcactcggcaggcagtacccctcttctctaaaaatgtccattccacaaggtttgtgacatatttctgtgagcaggttctccctaacctcggtaccttgactaccccagtggaaggtcttgatatacagttggaggtattgaaattgttggcggagatgagttcattttgtggtgacatggaaaaactagaaacaaatttaaggaaactatttgataagttattggaatacatgcccctccctccagaagaggcagaaaatggagagaatgctggtaatgaagaacccaagctacagttcagttatgtggaatgtttgttgtacagttttcaccagttgggccgaaaacttccagatttcttaacagccaaactgaatgcagaaaagctcaaagatttcaaaatcaggctgcagtactttgcacggggcctgcaagtttatatcagacaacttcgcttagctctccagggtaaaacgggtgaggccttaaaaacagaagagaacaagattaaagtcgttgcattgaaaataacaaacaatatcaatgttttaatcaaggatctcttccacattcctccttcttataagagcacagtaacactatcctggaaacctgtacaaaaggttgagattgggcaaaagagagccagtgaagatacaacttcaggttcaccacccaagaaatcttcagcaggaccaaaaagagatgccaggcagatttataaccctcccagtgggaaatatagcagcaatttgggcaactttaattatggtgagcgtttccgtttgggtacaaggaatatgagagattaggcagaaattgtgttatactttattttaattagtaattatatacagtgtcatggttctatccaatgacttttctgaattagcttggagaactagggctgttgaggaaatgatttatcccattcctctctcattcacccttctgggctgactgtattgaacatgcaacattaaacagtaagcacttaaagaaaatatgcctcttgtattcagaggaaccaacagaaacaaaataagttgacagaaccattctttccatgctttcccagttgcagcttcaaggcaaggcattctgtgcattctccctcagggatgggtatagcttctgagagatagtataaatgctctttcttggacatagtcagcctgctgcctatactcccatcttctgtagctagttaaaaagaaataacagaagtggagtcagatgttcaggcatcatctagcaaggaagatgtgttctattgcagtctctccctctgcccagaatgcaatcctcctatcagtgcttcctattcccctttagccattagagccaggagagcttcataccagtccatcctctcccacggctgtcgaatcaaaagtaaagtttatctctcattggcttatttcctcatggatctttttttttaaaagaatggagagaaatatcaggtcaattccttaccttgcttaagaagacaaagtttaggccgggggcagtggctcaagcctgtaatcccagcactttgggaggccgaggcaggcggatcacgaggtcaggagatcgagaccatcctggctaacagggtgaaaccccgtctctactaaaaataccaaaaatttgccaggtgtggtggcgggcgcctgctagtcccagctactctggaggctgaggcaggagaatggtttgaacctgggaggtggagctttcagtgagtggagatcgcaccactgtactccagcctaggcgacagagccaagactccgtctcaaaaaaaa

SEQ ID NO: 76538 - DNA, 2382 bp, Homo sapiens
agcgggctgtgcgcggtgaactcggcggctgcactggcggcagctggaggtgtaatagtgcgggtagtgggtttggagaagttccgaggcggcggtggcgccggtcaggacaaggatagcggaaccgggccctgggcttgtcgctcaccatgccgacagtagaggagctttaccgcaattatggcatcctggccgatgccacggagcaagtgggccagcataaagatgcctatcaagtgatattggatggtgtgaaaggtggtactaaggaaaagcgattagcagctcaatttattccgaaattctttaagcattttccagaattggctgattctgctatcaatgcacagttagacctctgtgaggatgaagatgtatctattcgacgtcaagcaattaaagaactgcctcaatttgccactggagaaaatccttcctcgagtggccagataatactaacgcaacttttgccagaacagatgactctgccagaatttaaccctagtgaacaatgccccctattaagtatatttaaaatggatgcaaaagggacttttaggtgggttgttcagcccaaatacttcaaggagaggacattgttagagaacgagcaattaaattcctttctacaaaacttaagactttaccagatgaagtcttaacaaaggaagtggaagagcttatactaactgaatccaaaaaggtcctagaagatgtgactggtgaagaatttgttctatttatgaagatactgtctgggttaaaaagcttacagacagtgagtggaagacagcaacttgtagagttggtggctgaacaggccgacctagaacagaccttcaatccctcggatcctgactgtgtggacaggctcttacagtgcactcggcaggcagtacccctcttctctgtgagctctttatttttacacacccggtattagctatatatatatttccataaatactcactttaacattccccttaaacctttccagtagtgtcccttatctgaaatgcttgcttggaaccagaagtgtattcagatttttgaatatttgcattgtgcctggttgagcatccctaattcaaaaatccaaaacctgaaatgctttaatgagcatttcctttgagcgtgatgtttgagcatcacattggtgctcaaaaagttttggattttgaagcatttcagatttgggattttcagatgagggatgcttggtctgtgtttatgaaggccacagtggtgttggtgagaacccaaagcagcaagaaactttcttgaaagaaagaattttttttttcctttgagacagagtcttgccctgtcactcatgctggagtgcagtggcacgatcttggcttactgcagcttctacctcccaggctcaagccttccttccatctcagcctcccaagtagctgctactacagtcatgcactatcacactcggctaatttttgtgtttttgtagagacggggcttccccatgttgcccatactagtcttgaactcctgagctgaagcagtctgcccaccttggcctcccaaagtgctgggattacaggtgtgagccaccatgagtggccaataaattttttttaagtcttcctagagactttttttgaaagtcatgagaattttgcattctgtctcaggctttgtgtttcctgaggccatgcatcttctgggatgtgcatacattcatttgaaaaacacaatttaaaggaactatcctagagcaggcgtggtggcccgtccctgtaatcccaatcccagcactttgtgagccaaggtgggagtatcacttgaggctgagttcaagaccagcctgggcaacagagcaagaccttgtctctacaaaaaaaattaagtaatagaattatcccttttgagaaatgtgcagtctgaaaatccaacactaaaagatgtccacaattcatttatttatttatttatttatttatgagacagagtctcgctccatcccccaggctggagtgcagtggcatgatcttggctgactgcaacctccacctcccagattcaagcaattctcgtgcctcaacttcccgagtagctgggattacaggcaagcaccaccacacccagctgattttttgtatttttagtagggatggggttttgccatgttgcccaggctgctctcgcactcctgagttcaggcaatccacctgcctcagcctcccaaagtgctaggattacaggcatgagccaccatgcctggccatgccccaaatttgaccagagaatcaaggaagagatcaaaatgtatagatgttccaatgctccagatgactttgcagtaaagtatataaggggtcttcaaaaagttcctggaaaatgcatattatgaaaga

SEQ ID NO: 76539 - DNA, 364 bp, Homo sapiens
aattagccgggcgcggtggcgggcgcctgtagtccaagctactcaggaggctgaggcaggagaatggcgtgaacccgggaggcagagcttgccgtgagctgagatcgcaccactgcactccagcctgggggacagacagagcgagactccgtctcaaaaaaaaaagagaaagttctgagctttgtgcactctagtcccctactaggttaaaggacagtgggttgggatccccatgggttgtggcttgatgtatctgtgagaggaacacgagcatctgtgagctgcagggtgtctggaaggctgtgcccctggggagactcagccagaaaaccaacgtaagatcaggacagtgcaccctgctggg

SEQ ID NO: 76540 - DNA, 899 bp, Homo sapiens
  misc_feature (2)..(3): n is a, c, g, or t
gnnggtcagccagtcctgagcacctaaccatgttgggcatcactgtcctcgctgcgctcttggcctgtgcctccagctgtggggtgcccagcttcccgcccaacctatccgcccgagtggtgggaggagaggatgcccggccccacagctggccctggcagatctccctccagtacctcaagaacgacacgtggaggcatacgtgtggcgggactttgattgctagcaacttcgtcctcactgccgcccactgcatcagcaacacccggacctaccgtgtggccgtgggaaagaacaacctggaggtggaagacgaagaaggatccctgtttgtgggtgtggacaccatccacgtccacaagagatggaatgccctcctgttgcgcaatgatattgccctcatcaagcttgcagagcatgtggagctgagtgacaccatccaggtggcctgcctgccagagaaggactccctgctccccaaggactacccctgctatgtcaccggctggggccgcctctggaccaacggccccattgctgataagctgcagcagggcctgcagcccgtggtggatcacgccacgtgctccaggattgactggtggggcttcagggtgaagaaaaccatggtgtgcgctgggggcgatggcgtcatctcagcctgcaatggggactccggtggcccactgaactgccagttggagaacggttcctgggaggtgtttggcatcgtcagctttggctcccggcggggctgcaacacccgcaagaagccggtagtctacacccgggtgtccgcctacatcgactggatcaacgagaaaatgcagctgtgatttgttgctgggagcggcggcagcgagtccctgcaacagcaataaacttccttctcctcgggc

SEQ ID NO: 76541 - DNA, 947 bp, Homo sapiens
  misc_feature (2)..(3): n is a, c, g, or t
gnnggtcagccagtcctgagcacctaaccatgttgggcatcactgtcctcgctgcgctcttggcctgtgcaacacccggacctaccgtgtggccgtgggaaagaacaacctggaggtggaagacgaagaaggatccctgtttgtgggtgtggacaccatccacgtccacaagagatggaatgccctcctgttgcgcaatgatattgccctcatcaagcttgcagagcatgtggagctgagtgacaccatccaggtggcctgcctgccagagaaggactccctgctccccaaggactacccctgctatgtcaccggctggggccgcctctggaccaacggccccattgctgataagctgcagcagggcctgcagcccgtggtggatcacgccacgtgctccaggattgactggtggggcttcagggtgaagaaaaccatggtgtgcgctgggggcgatggcgtcatctcagcctgcaatggggactccggtggcccactgaactgccagttggagaacggttcctgggaggtgtttggcatcgtcagctttggctcccggcggggctgcaacacccgcaagaagccggtagtctacacccgggtgtccgcctacatcgactggatcaacgagaaaatgcagctgtgatttgttgctgggagcggcggcagcgagtccctgcaacagcaataaacttccttctcctcgggcaaaaaaaaaaacaaacaaacaaaaaaaaatttggtgggcgctctgggcccgcgaaaaagttcttaacacacttccgttgggcgcgcgccccccaggggtaggaaccctggcacagcggccacaaagaacaccggccgggcatagggcggggttccccccataaaaaggcggggggcaccgcggtttgaacaacccacagggttcggggcctagggcttcaacaaggcccagggcgata

SEQ ID NO: 76542 - DNA, 1137 bp, Homo sapiens
  misc_feature (2)..(3): n is a, c, g, or t
gnnggtcagccagtcctgagcacctaaccatgttgggcatcactgtcctcgctgcgctcttggcctgtgcctccagctgtggggtgcccagcttcccgcccaacctatccgcccgagtggtgggaggagaggatgcccggccccacagctggccctggcagatctccctccagtacctcaagaacgacacgtggaggcatacgtgtggcgggactttgattgctagcaacttcgtcctcactgccgcccactgcatcagcaacacccggacctaccgtgtggccgtgggaaagaacaacctggaggtggaagacgaagaaggatccctgtttgtgggtgtggacaccatccacgtccacaagagatggaatgccctcctgttgcgcaatgatattgccctcatcaagcttgcagagcatgtggagctgagtgacaccatccaggtggcctgcctgccagagaaggactccctgctccccaaggactacccctgctatgtcaccggctggggccgcctctggaccaacggccccattgctgataagctgcagcagggcctgcagcccgtggtggatcacgccacgtgctccaggattgactggtggggcttcagggtgaagaaaaccatggtgtgcgctgggggcgatggcgtcatctcagcctgcaatggggactccggtggcccactgaactgccagttggagaacggttcctgggaggtgtttggcatcgtcagctttggctcccggcggggctgcaacacccgcaagaagccggtagtctacacccgggtgtccgcctacatcgactggatcaacgagaaaatgcagctgtgatttgttgctgggagcggcggcagcgagtccctgcaacagcaataaacttccttctcctcgggcaaaaaaaaaaacaaacaaacaaaaaaaaatttggtgggcgctctgggcccgcgaaaaagttcttaacacacttccgttgggcgcgcgccccccaggggtaggaaccctggcacagcggccacaaagaacaccggccgggcatagggcggggttccccccataaaaaggcggggggcaccgcggtttgaacaacccacagggttcggggcctagggcttcaacaaggcccagggcgata

SEQ ID NO: 76543 - DNA, 581 bp, Homo sapiens
  misc_feature (2)..(3): n is a, c, g, or t
gnnggtcagccagtcctgagcacctaaccatgttgggcatcactgtcctcgctgcgctcttggcctgtgcctccagctgtggggtgcccagcttcccgcccaacctatccgcccgagtggtgggaggagaggatgcccggccccacagctggccctggcagatctccctccagtacctcaagaacgacacgtggaggcatacgtgtggcgggactttgattgctagcaacttcgtcctcactgccgcccactgcatcagcaacacccggacctaccgtgtggccgtgggaaagaacaacctggaggtggaagacgaagaaggatccctgtttgtgggtgtggacaccatccacgtccacaagagatggaatgccctcctgttgcgcaatgatattgccctcatcaagcttgcagagcatgtggagctgagtgacaccatccaggtggcctgcctgccagagaaggactccctgctccccaaggactacccctgctatgtcaccggctggggccgcctctggaccccacggccccatttcttaaaaacctgaaacaggcccctgtaccctgggggatatacc

SEQ ID NO: 76544 - DNA, 880 bp, Homo sapiens
agcagcttggaccaccatttacatagctgcatggtcctgggacatacgatggaaagaatgaggaatggttataaaataaggaggctgagatgcataaaaatagaagagaaccagtcacatttggttaccactcaattacgagtgagattagcattacgagggaccctaattgaaagcaagtcccgagaagcctgtcgtgcctttgctttggtgacatatacatgtccacggacagggctcctggagacctcagcactttctaggttgctccttgattgcttcagtggaagctgtcagcctcctaatttctaacccatgttcttgcttctaagttagtttgaaacaaaactagtctaaataaagttgctcagaaaatacctcctgagttatttgacgagacgtttactgcatctctttaattttaaattgccagatgggtgagaggacacctgagtcactttcttctccctcacacccagcccagtcccttgaccagcaggagttggtaactgttgaataatgacacttctctccctccttcctactctttttccatcccactattgctcacttatttaatgaaacagcataaagtccagaccctattttaaaaattaatcttcccctttgggaggccgaggtgggtggattaggaggtcaggagatcgaaaccatcctggctaacaccgtgaaaccctgtctctactaaaaatacaaaaaattagccaggtgaggtggcggtcgcctgtggtcccagctactcgggaggctgaggcaggagaatggtgtgaacccaggaggtggagcttgcagtgagccgagatcgcgccactgcactccagcctgggcgacagagcgagactccatctcaaaaaaaaaa

SEQ ID NO: 76545 - DNA, 284 bp, Homo sapiens
aaaagtatttggggtctatgaaatcattctcagtttagcctttagtttttgctttatgtattttaagaaggaaaataaatcaatacttacttgaagaaacacaaaatttatagctttgcaactggcccattgcttacaaacagtagggttaaaattgcaatgcttagatattgaaaaacaaaacactagtagtccaagaatcccatcaagtgctcaattgtaattttgtctttaaatgcaaaataatgtcacaagcaatcatgctaaatgtttgtgttactgta

SEQ ID NO: 76546 - DNA, 409 bp, Homo sapiens
  misc_feature (401)..(408): n is a, c, g, or t
tttaattaaagagacagggtctcactctgttgcccaggctgaagtgcactgaagtgatcacagctcaccgtaacctctaagtcttggcctcaagaggtcctcccacttcagcttcctgagtaggtgggactacaggtgtgcactgccacacccagctaatgtttaaaatttttttgtagacaaggagtcttgctatgttgcccaggttggtcttgaactcctggcctcaagcaatcctcccacctctgcctcccaaagtgttgggattacaggtgtgagccactacaagcaggctgccttgcttctcttcgtagtttcaccacataggaatgtattcccaaacaatacgctatcaagttgaggtttttttgtttttgttttttttgagacagagatttcannnnnnnna

SEQ ID NO: 76547 - DNA, 372 bp, Homo sapiens
atagttatgtcatgtatcaccacatataagtgggtaaatgatcactgtcacaacatgctctacataaacaacaacactgaataaaaaagacctctgaggaacaggccaatttgaaactaggaattctagatttttaccttcggactttttaatttcctcttcccataattacagatgagaaaataaaatacatcctgtaaattcacccacttcaccacaaagtttgaagactactaaaataccttataattggatcaaatgtattcaagctggatctaaaaccctctgtattacctgaccatataaccactacccttgtgtttgtgtgcaacaatagctcctacagtagattttttttagggtaaaaagtac

SEQ ID NO: 76548 - DNA, 448 bp, Homo sapiens
caacaactattgtcaatgtttctcctttctgttaatgggaaatttaatgaccctttcctatgagaaaatgatgacaagaacctgtttcatggtgaaatctgaaagctgtgtggcttgtgttcttgtttgaatccaagggttggactaaattgacttctacactcctgcaaatttttccccaaagcttccatggtttgcactttcaaaacaactacttagcattaaaacttgtgtcaaatcccatgaagcgagttatctattaaatggagttaatgttttaaagatgcataatgatgggtttcttctgtactctctctaatcaaatgcttggatttttctgaccatactccaccccacataaagatttgaactatatgtcactactctgtaaaatgcagatcaagagagttacaagaaaaaataataaaatagtacatatttattcaaa

SEQ ID NO: 76549 - DNA, 339 bp, Homo sapiens
ggacttaatgtgggtgttaaatgaatacttgttgactaggtcccagggaggacctttgaaccttgggatgtataatttctattgtagttaaaacctttaaattataagaacagaaattcgctcaaactaggaaaagttaaaaaggggtttttaaagggacatctcataggaaggaagcactagttgggcctcaccggaattggagctggaaggtgggaagcgtctggtgagaaggaaagctgcaccttccatctctcccattctgggggccactcagtatctcagatgatctctgtgaactgttcagttcactgtttctctctccagattgcttccttt

SEQ ID NO: 76550 - DNA, 829 bp, Homo sapiens
cagccctagcccacctttgtttgtttggtgacagcaactaaggtctggtcagggccgcttggccacgctcatgccttttcctctcaacagttgcttctttgagtcagggtgcagctctggtcacctggcggcctcttcagctcagccctccacaaagtgtgagcctgaaggaccaccctgaattgcccttgtaggacccagaacagctaccagcagaatcagattctcatggaccaactggtattcaaagagacaatctggaatgatgcgttctggcagaacccctgggaccaggggggcctggcagtgattatcttattcatcaccgctgtcctgcttctcatcttatttgccatcgtgtttggtttactcacttccacagaaaacactcagtgtgaagcgggtgaagaggagtgacctgacttgctggggactgagatggcagcaggggaggcgagctgacctgcccccattccagtggtgggccccttcgcggttccctctggctcaggggccaagccctggtgtcttcctttcccaccaggaaaaagtctagtaaaatactgtatctggcttagggttggtcagactagtaagatggggaggctggtctgagaccaattctggctccttgaccctattgtttttagggttccccgaccagaaccctaaaagcacatggagaggatggctccactgcctcaggtggaaggagctatggctaacaaggttctctaacaggctcacaggcccagccagcaatttcacaaatccttgacagagaaagacacaaccaaatgaaataaaaattccttttcaaatctgctaa

SEQ ID NO: 76551 - DNA, 574 bp, Homo sapiens
cagccctagcccacctttgtttgtttggtgacagcaactaaggtctggtcagggccgcttggccacgctcatgccttttcctctcaacagttgcttctttgagtcagggtgcagctctggtcacctggcggcctcttcagctcagccctccacaaagtgtgagcctgaaggaccaccctgaattgcccttgtaggacccagaacagctaccagcagaatcagattctcatggaccaactggtattcaaagagacaatctggaatgatgcgttctggcagaacccctgggaccaggggggcctggcagtgattatcttattcatcaccgctgtcctgcttctcatcttatttgccatcgtgtttggtttactcacttccacagaaaacactcagtgtgaagcgggtgaagaggagtgacctgacttgctggggactgagatggcagcaggggaggcgagctgacctgcccccattccagtggtgggccccttcgcggttccctctggctcaggggccaagccctggtgtcttcctttcccaccaggaaaaagtctagtaaaatactgtatctggc

SEQ ID NO: 76552 - DNA, 622 bp, Homo sapiens
tcttattacatatgttatcttactaagtttttaaaataaattgataaatacttaaactttttctcatttaatttctaatacggtgaatgttgatcattacaagccacataaacaaaagctcttgggagtattcactaatttttaagaacacaaagtggtcctgactaaagagattgaaaactctttctttaaggaaagaaggccagattcatcaaatgaacaaagttctgaagttttaatcatttgggtattcctttggaatatggacttaacatgcctctagtttctttttctggttataagaatgtatcagtggactactgtgacattttccaaatattcagagggtaagaaggtttttgtttttaaaatggatgctacctatgtggttgccataccaaattgagatacagttaatggtcattcttgtcagcctgttcacacttgataccactctattggttgtgaggtatacctgtggttttggagctgttcaccatggcagattacttcagggttgtagtgactctcactttacagaagaggcaggaggattgcttaagcccaggaattcgagtccagcctggtcaacatagccagaccccatctctacaaaaaattt

SEQ ID NO: 76553 - DNA, 3916 bp, Homo sapiens
  misc_feature (948)..(948): n is a, c, g, or t
  misc_feature (1454)..(1454): n is a, c, g, or t
accggtccgctgtaacaccggcccggcgcagaagcgggacgtcggcttctaggggcccaggccggcggcggcgatggcctcggcagctgtggagagcttcgtgaccaagcaactggacctgctggagcttgagagagacgcggaggtggaggagcgcaggtcctggcaggagaacatctctctgaaagagctccagagccgaggcgtgtgtttgctgaagctgcaggtatccagccagcgcactgggctgtacggacggctgctggtcacctttgagcccaggcgatacgggtccgcggcagctcttcccagtaacagctttacttctggtgatatcgtgggcctgtacgatgctgctaatgagggcagtcagctggccactgggatcttgacccgggtcacccagaagtcggtcacggtggcctttgatgagtcccacgatttccagttgagcttggaccgagagaattcctacagactgttaaaacttgccaatgatgtcacttacaggcgactgaaaaaagccctgattgctctaaagaagtatcattctggcccagcctcctcactcatagaagtgctctttggcagatctgctcccagtcctgccagtgaaatacacccgctgacattcttcaacacctgcctggacacctcccagaaagaagcggtttcatttgcgctgtctcagaaagaacttgccatcatccatggacctcctggcactgggaaaaccacgactgtggttgagatcattcttcaagctgtgaaacaaggcttaaaggttctgtgctgcgccccctccaacatcgccgtggacaatctggtggagcgcctggctctgtgtaagcagcggattctgcgcctgggacaccctgcccgcctcctggagtccattcagcagcactccctggatgcggttttagcgcggagcgacagtgcccagantgttgcagatatcaggaaggacatcgaccaggtctttgtgaaaaacaaaaagacccaggataagagagagaaaagtaattttcgaaatgaaattaagctgttaagaaaagaactgaaggagagggaagaagcagctatgctcgagagcctcacttcggcaaacgtggtccttgcaacaaacacaggtgcgtctgccgatggccccctgaagttgctgcccgagagctacttcgacgtggtggtcattgacgagtgtgcccaggccctcgaggcgagctgctggatccccctgctgaaggccagaaagtgcatcctggcgggcgatcacaagcagctgccccccaccacagtctctcacaaggctgcgctggcaggactgtcactcagcctgatggaacgcctggctgaggagtacggcgcgagggtggtgcggacactgacggtgcagtaccgcatgcaccaggctatcatgcgctgggcctcagacaccatgtaccttgggcagntcacagcccactcttccgtggcaaggcacctcctgagggacctcccaggtgtggctgccacagaagagacgggtgtgcccctgctcttggtggacaccgccggctgcgggctgtttgagctggaggaggaggacgaacagtcgaaagggaaccctggcgaagtccgcctcgtcagtttgcacatccaggctctggtggacgctggtgttccagcccgtgacattgctgtggtctcgccatacaacctccaggtggacctgctcagacagagccttgtgcacaggcaccctgagcttgaaatcaagtctgtcgatggcttccaaggccgagagaaggaggccgtgatactgtccttcgtcagatccaacaggaaaggtgaagttggttttcttgctgaggaccggaggatcaacgtggctgtcacccgtgcccgacgccacgtggcggtcatctgtgactcccgtactgtcaacaaccatgcatttttgaagaccctggtggagtatttcacacagcatggggaagtacgcacggcctttgagtatcttgacgatattgtcccagaaaactattcccatgagaactcccagggttccagccacgctgccaccaagccccagggacctgctacgtccaccaggaccggaagccagcggcaggagggaggccaggaggctgcagcacctgccagacagggccggaagaagccggctgggaagtctctggcctctgaagctccatctcagcccagcctcaacggaggcagcccagagggagtggagagccaagatggcgtggaccacttccgggccatgatagtggagttcatggccagcaagaagatgcagttggagtttcctccttccctcaattcccacgacaggctgcgggtccaccaaatagccgaggagcacgggctgaggcacgacagttccggggaagggaagaggaggttcatcactgtgagcaagagggccccgcgaccccgagcagccctgggacccccagcagggaccggtggcccagcccctctccagccagtgccccctacccctgcgcagacagagcagcctcccagggagcagcgtggcccagaccagcctgatctgaggacgctgcacctggagagactgcagagggtcaggagcgcgcaggggcagcccgccagcaaggagcagcaggcctcagggcagcagaaacttccagaaaagaaaaagaaaaaagccaaaggacatccggccacagatctgcccacggaggaggactttgaggccctggtttctgccgccgttaaggctgataacacctgcggctttgccaagtgcacagccggcgtcacaaccctgggccagttctgccagctctgcagccgccgctactgcctcagccaccacctgcccgagatccatggctgcggtgagagggctcgcgcccatgcccggcagagaatcagccgggaaggggtcctctatgccggcagcgggaccaagaacggatccctggacccagccaagagggcccagctgcagaggaggctggataagaagctgagtgagctcagcaaccagaggaccagccggaggaaggagagggggacgtgaccggccgcatccttgcacgccccgcggagctctctccatggtagcccagggcgctggcagaccatgctccgcctccaccagggccacagaggagcggaggggcctatgggggaggagcggagggccctgttggggaaggttgggtttttggaccccagggataagcttttccgatgtcacaatgtggaggaaagcacctgggggacaacagtgctcgtgcaggtggggcttgggaaatgcacgtcccttccccttactccccgccaaaacccacatcccagcctctggatcctggggaaggttccagtccctggagaatacccagggcctcaaacttgaagtcactcctccaatgtctgggacttgccagctcagcccgttaggatgagggtgctgagaggaaacaggaaacaagactgcgaatggcgctcaggcagggagcagggagtggcgtttggcttgcacgttcccatgtggccagatgctggggccactttccttctgtctgctggtgactgcagtgttccccctcctcctcaccacggggctcctgtgagtctggggggcacctctttctggcctgtgcacctctctctggcttataaaggtgcctggcctgtgccaacccctccttgttgcgcctcaccgtggggaccaggtgagccggctctcccacgtggttgtcccgggaaaagctgccccacagcctcagcatcttcagcacttaccgatccagagcctcccggccttctccggtgtcctgtaccaactcttctatttaagagaacctcagatgatgtacctgagcctcagggttttgtttcagagggatataaattatttaaaaattaaatgaaaacg

SEQ ID NO: 76554 - DNA, 139 bp, Homo sapiens
gactctgctaagccatagacactctttcgtcttgttctttttgtgaattttgaaatactgaaaataatgtgatttaccaagtgctgttattgactatgttcaccagaacaatattaaaatctattaagaatgtatatta

SEQ ID NO: 76555 - DNA, 502 bp, Homo sapiens
cactacggtgtgtgggaggaagatgcagccaggttatagacttttttcttaaaaacaagaactcactacaaagtaaatgaaattatttttctgatacatctaaaagccagttctaggggaagttctaaaagaagcgttcagaaattggaacaagagcagtattattagaggacagtatgcatttggggtttgaattgttgtttagacctgtttatacctggtctgtgagttctgaaacccaacttgcttgggtgaagtgagccactgaagcctgtgttttggatgggaaggctatggcagaggggctccacgtttcccctgactgcattactgccttcacaaggttggccttcattaagcccctaattgttaagagtaaatgataagagtttaagttttttcttagtttgttttttatttgaggtatacttatactcattttagagaaagatcaatgtatgagaaaaggaacttaagaaacataaattcactgtaattattt

SEQ ID NO: 76556 - DNA, 268 bp, Homo sapiens
gactggcaccactgtaagaaagccctttatgaggtcatcatcccccacttgccatctctccccagatgcagatgtgcaagcttttaaaaacacttgagaagccaccatgcctcgctttgcaagccctcttttaagaaatgtcattatcagaagtcaatttgatggcatcaagaggaagcaatgcctccaatatctgaaaaccctgagaacactgcaatatgatggatttaagaccgtatattttggggaaaccaatatcccagaaagt

SEQ ID NO: 76557 - DNA, 406 bp, Homo sapiens
tattatttaaaaaaactaaaaggggcctaggcatggtggctcatgcctgtacctagcactttgggaggctgaggcaggaggattgcttgagaccaggagttcgagaccagcctgggcgatgtaatgagtctttgtctcttaaaaaaaattaaaataaattagttggtcattgtggcaggcacctgtagtcctggactggagaggtggatgtggaagcattgcttgagcctagaagtttaaggctgcagtgacatcacactccatcctgggtgagagagtaagagtctgtctaaaaaaaaaaataaggttccagtgtagttggcattttctaaaaactgcagctagtctgtttaaaacctagagaaggttgtggtaaaggcataatagatggctggcctgtgaggaa

SEQ ID NO: 76558 - DNA, 496 bp, Homo sapiens
tttttttgagatggaatttcactcgttgcccaggctggagtgcagtggcgtgatcttggctcactgcaagctctgcctcccgggttcaagcgattcttttgcctcagcctcccgagtagctgggattacaggcatctgccactacacccagctaattttttgtatttttagtagagacagggtttcaccatgttggccagcctgggcgatgtaatgagtctttgtctcttaaaaaaaattaaaataaattagttggtcattgtggcaggcacctgtagtcctggactggagaggtggatgtggaagcattgcttgagcctagaagtttaaggctgcagtgacatcacactccatcctgggtgagagagtaagagtctgtctaaaaaaaaaaataaggttccagtgtagttggcattttctaaaaactgcagctagtctgtttaaaacctagagaaggttgtggtaaaggcataatagatggctggcctgtgaggaa

SEQ ID NO: 76559 - DNA, 515 bp, Homo sapiens
aaacgtaacagaagaatgccaaagtcaagaatacaactgagaacatcttgaagctacgaattagtacttgccaccatccagctgttggttgcctatagattatcaagaattttacttgtatcattatctcatttaatactcacaataatcctggaaaaattattatccccatcttataaatgaggaaactgaggctcaaaagtttaaaagacttgcctgaagctacatagctcataagtaaaagagtaggaatttggacccaagtctgactggcactcaagccaagcactcttgaaattttctttaatcttctttctagtgtctcctagtgtctcccaaattgcttggattacaggcgtgagccactgtgcctggctggtttctgtcttttttctaatgcatgttttttccatggctgtgaccatattgtggaaaatgctgtattccatttttttttcatttaacatcataacaatattcaaatgccgttaaaaactttcatcaacatcataatt

SEQ ID NO: 76560 - DNA, 802 bp, Homo sapiens
aaagaatgttggggccacacaagcagagaacaccatgtcttcagatctcttcacagccttgtcctccagagtttagaagtggagggaaaagattaaaggcaatcttcttgttttgctatttgtccttggacctaatctggacttaatttggacacacaggctaacgaaggccgtgagtgtgagttgtccaggtccttggcaacaaagaattgaacaaaatgcacaaagtaacaaaggaacaaaacagagggaggaagcatcaaaagcggaaatttattaaggtaagaaatagggtgggtatgggcttgagcaagtggctcaaggacccagttacgaagttttctgggtttttagtactccttttgaggtccctatcagctaccactgatatggattaaggatttggtctgtggctaattaaaggcttaggagaattggcacgctatgcggatgaaggaatgcaggtgcttggcctgcagccactccaaggcactttccctttctacctgagaagtggtagaaaggggagggttgtagggacagtagcctttgatcctttgctattcaggtgtggggagatgggactttttcttttggtttagctgttggaagtttgccttaattggccttaggtttcctgcctccagaccttggtgttttttcttttaggaagtcagcacaaattggccttaagttctctgcctccataccccattctcctgcctcccttctgtacaaaccatttgttatacatagttcatcttaaactcacctggtaattggggaggccttctgtgtatgc

SEQ ID NO: 76561 - DNA, 517 bp, Homo sapiens
aaagaatgttggggccacacaagcagagaacaccatgtcttcagatctcttcacagccttgtcctccagagtttagaagtggagggaaaagattaaaggcaatcttcttgttttgctatttgtccttggacctaatctggacttaatttggacacacaggctaacgaaggccgtgagtgtgagttgtccaggtccttggcaacaaagaattgaacaaaatgcacaaagtaacaaaggaacaaaacagagggaggaagcatcaaaagcggaaatttattaagcagatgaaatccaaggccctggctccaggatcctgctctttcctgtggcgactcttgtgcagatttggcatagaaacaatatggaacttgttacacttctctggacaagtcattatgcttttggctcacaggctccacttccctggacaccccttcaccctaagcttcaagtaattcagcttcacccttcagagaagaactcagctgtcacttcttctaaggaccctccctagctg

SEQ ID NO: 76562 - DNA, 394 bp, Homo sapiens
agcatttggaaaacaccaggataaagcataccagtggtgtgaacaaggaacgagaattaagatctaaaacccaggagagaggaaaacaaatctcaaccacagcatctcttcttcagtacctatgtggtggtctttcttcctgcattctctgcttcctctgccactcttttacccacctcctagtacctgtagtctaacagtattgatgtcactcactttgtgactacagatttggactagaagtaatagaaaccacctatatttggaggttatctcatttttcatgtttccttactcaaaatctgtataaattatttggtaactcatttgctgggccattactttttgtttctctgtgtttggtataagtattaatactaacaaaatattgtat

SEQ ID NO: 76563 - DNA, 609 bp, Homo sapiens
aaaggtagacaatggctagattgtggagtggctggaatcacagagattagcattatttagttagcagagcaaatatgaaggtttggatcactgaagcacagggcaagaaggataatttcagactaataaattatttttggtctgtgtgcttgtttatttttcagtaggaatcagaagtttgtatatcctattgattatttatatacaccatctacccctcacttctgccttaatggcagggtcccaattttcttctggtatcaactcatttcccacatgactcacagggaaatgagcctatgctcagcccaaggttctgccacctttgtactctgggacttgcatcagtggcccccaggttctcaggccttcaaccttggacttggaattataccatcatctcccctgcttctcaggcctttggactcaaactgagctacaccaacagcttccctggttctccagcttgcagatgacctatcatgtgacttcttggccttcataatcacatgagccaattctactaagtcctctctcatacatctatgtatctatctatctatctatctatcctattgattgtgtttctctagggaaagctgactaata

SEQ ID NO: 76564 - DNA, 841 bp, Homo sapiens
attggagactattattctaagtgcagtaagtcaggaatggaaaaccaaacatcctatgttctcactgatatgtgggagctaagctgtgagaacacaatggcataagaatgatataatgggcttaggggactcgggggtaagagtgagagggggtgagggataaaagacaacatatatggtgcaatgtatactgctcaggtgatgggtgcaacaggatctcagaaatcactgctaaagaacttacttatgtaaccaaataccacctgtaacccaataacttatggaaaaataaaataataaataataagggttttggccatggaaagtaggagaaaaaggaaagtgcatctccaaaaggttaacagaaggctaaagatcaactttgtttatgtcatgcattttccgaaatcgggctccatctctcttttgcttaattgcacttagggtgtgggtgtattattttgggtgtaaaagagtctgggcatgtctgtatttaaaggaatattttttgtgtctacattcttttttttcccgctggggcgaggtggctcaggcctataatcccagcactttgggaggctgagacaggtggatcacttgaagtcaggagtttgagaccagcctggccaacatggcaaaaccctgtctctactaaaaatgcaaaattagctgggcatggtggccagtgcctgtaatcccagttactcacgaggctgaggcaggagaatcgcttgaaccctggaggcagaggttgcagtgagtcgagatcacaccactgcactccagcctgggtgacagaacaaaactctgtctcagaaaaaaaaaaaaaaaaaaagaaaga

SEQ ID NO: 76565 - DNA, 267 bp, Homo sapiens
aaaacaagggttatgtgaagggggtggggggagggggagtaattaatttttctttttgtttaaagtaggaaagccaaactacatctcccaaacacaccacttgacttgaaagagatacaaaagtcctttctcttaaaagtcatccatgtcgggcatgatggctcacgcgtgaaatcccagcacgttgggaggcggaggagggcggatcacgaggtcaggagatggagaccatcctggctaacatggtgaaaccccatctcccctaaa

SEQ ID NO: 76566 - DNA, 1257 bp, Homo sapiens
aagatttacccatgttgatatggctgtagtttattcattttcattgctgtaggttactatattgcattggtgtatcataatttattctactgctgatggacatataggctatttctagctttaggctattataagcaatgctgctgtgaaagtttgtgtaaacacacacacatatgtatgttctctttaagtacatatgtgtgtgtgtgtgtgaatgtatatatatatatatatatatgttctagagcatataaacacagatttctttggagtctttaccttggtatgtaattcctggtttgtagagcatgtatatattaatatattcagttttacaagatcgtgccaaaattttccaaaatgattgtaccaatttatataaccaacaacaatatacaaaagtttctgttgcactacatcctcaccaacacttgatattgtcagacattttaagttttattactgtaatgaatgtgtaatgctgttttattgtggctctattttgcatttccctgattgttaatgaagaatagcccctttttatatgagtgttgtctaatgtttagggtctttccccatttttctgttgggttgtttgtatttttcttactttttgtattaatctgttatataatgttgaaacaagttttattgattatatgtgctacaaatgtttttcccactttgtggcttgtactttcactgtcttaatgtcttttgatgaaaccaagttgtcagtggagtagaattcatcactcttcccttatgattaatgatatctgtatcctatttaagaaatattttccaaccctaagatcattaagacttttatattgtcttctaaaattttattgctttgctttttaaattttggtctaggcagacctgcaattaatgttcttacatatggagaaagggaggcatatatagatccccaaccccttccatgtggaaaattagactagcaccatttgttgaaagatggtcctctctgccctaccctgcagtgccatcttgatcatgaaccaagtagtcatataagtatggagttgtttctgaccttggtattctttccattagtctattatctttttttgtatgttgctggattcaatatactcacattttgtttaagatttcaggggatctcacaaataagactgacctgtaattttccttttggtaatgtctttctctgaatttggtatcaaattatgctagctaccttcattaaatgagttggggaatacactttct

SEQ ID NO: 76567 - DNA, 521 bp, Homo sapiens
aaccagcttaatcacatgattccgaatttaaaccgacttccctaaagggaaatttggccctcaaggccaagaattgggcacgagaaagacttttatattgtcttctaaaattttattgctttgctttttaaattttggtctaggcagacctgcaattaatgttcttacatatggagaaagggaggcatatatagatccccaaccccttccatgtggaaaattagactagcaccatttgttgaaagatggtcctctctgccctaccctgcagtgccatcttgatcatgaaccaagtagtcatataagtatggagttgtttctgaccttggtattctttccattagtctattatctttttttgtatgttgctggattcaatatactcacattttgtttaagatttcaggggatctcacaaataagactgacctgtaattttccttttggtaatgtctttctctgaatttggtatcaaattatgctagctaccttcattaaatgagttggggaatacactttct

SEQ ID NO: 76568 - DNA, 784 bp, Homo sapiens
caataaaatttcagttatgtgagaagaaaaagtcctagacctcctctgtacaacatcatgcatatagttaacaatactggggttgtacacttaatttaaaagggtaaaccttgggtgttatttatttattaccacaagaaagaaagaaggaaggaaagtgagcgtgcccttgatacttttctggggactgtaatgtaagcagaaattgagacaagggtccttggaactggctgatagttttttttcttcctaatttgcccaaataggacaaataggttgattggttcagagcatttctgcaattacactaaaatgcttggttctgggattgagtaggtgtgaccatcaaatgaataactctgtggagcagtcatttaacatttcaaaaagttataaaaatgtctgaaaatgcaattttaaaaaagcaaaaccaaatgagtccagagcagcactgtccggtagaactgtctgcagtggaagatggaaatgtctgcgctgtcctgtagagtacacgtggtcctatgtggctgccgagcatctgaaatgtggttaatgtggctaagaaactgtgtttttaactttatttaattttaattcatttaaatttagccatatgtggctgatgcttaccatgttggggaacgtaggtctagagactttagaaaagttagtatgagtgaagtaggaacttggtccttggacatttgggatttgaaagaaaggcggaggaaaggcattataatttgaccagaactctagcttatggtcttatcttaaaaaaaaa

SEQ ID NO: 76569 - DNA, 786 bp, Homo sapiens
acagaatgaaagaaagaaagtagataagtatataagatccttcaaagggctgatgggacgaagactgggtacgagaagctcctattgtaagtcggtgacatggctggggttttctctcagcaaatattgagcaaacactgactgtgccaggtgatgtgctgggtcccaaacccttcccagacccagccctggcactcacggagatccagctaggaagtccgggaaaaggtcatcggggaaataaacaaagtcaagcacagtggatgaacgcgctgctgccgctccccacacctcttgtggtggacatcacttacgcttcctcatggtgcatgtcacttatgcttcctggtgccctcccagatgacccccccttgggccactacacacagctgcacccggcaagagcagacaaggatggtctactcactgagcctgcaaggctggtgtgcaggacaggccagctacactccccaggtgtgtgcaagaccggggacgagtcagtcattgggaggtgaggtgctcgggcagtgtgggatggaggaggagggagggaaactgagtgtgggctcttcgtattggagaggaggggacggccatggcacaaagagccacccaaagcgccacccaaagagccgtgaggggaatactggttaccaaaaacgaagagcacccatggacttgctctctaaagcaacccatgattgtcgaacaaaaacggcattgtattgaccaaaaacaccagtatcagcattgacacctgcttctaatacaaaagaagcagatgac

SEQ ID NO: 76570 - DNA, 2255 bp, Homo sapiens
ctgtaaccatgaatacggtttcactgtcacgtcttgttataagaggaaccggctatgaccctcatttcagatggggtcccagtgccgttggtggttgcctgacgaaaagctgcacttaatagaaatcactgtggatgcaggagatggacggtgatgagctcaggaccagccagcaaccccatcaggcggtaatgcctaccatggtcacccatgacttcctctcgccactgctcggagctcctgcaaagccacaggcaacaacacatttctgctccgtacgagaagctcctattgtaagtcggtgacatggctggggttttctctcagcaaatattgagcaaacactgactgtgccaggtgatgtgctgggtcccaaacccttcccagacccagccctggcactcacggagatccagctaggaagtccgggaaaaggtcatcggggaaataaacaaagtcaagcacagtggatgaacgcgctgctgccgctccccacacctcttgtggtggacatcacttacgcttcctcatggtgcatgtcacttatgcttcctggtgccctcccagatgacccccccttgggccactacacacagctgcacccggcaagagcagacaaggatggtctactcactgagcctgcaaggctggtgtgcaggacaggccagctacactccccaggtgtgtgcaagaccggggacgagtcagtcattgggaggtgaggtgctcgggcagtgtgggatggaggaggagggagggaaactgagtgtgggctcttcgtattggagaggaggggacggccatggcacaaagactcagatgggaaagtgtgagaaagcagagatttcaaaggagctacggtggagacccacagaagaggaatgctgaggcttttctgtctgaaatgctgaatagactctagcacacgcaaaacagcccaccacagcgagctgcaggattcttccgggcttttaacagtggtcttgtaaaaaaaattagccgggcatggttgtcccagctactcaggaggcagagaggggaggatggcttgcgcccaggaggttgaggctgcagtgagccatgatcgcaccactgcactccagcctgggtgacagaatgagacccctgactcaaaaaaaaaaaaaaaaaaaaaaaaaaaagactggaacattcaaaacctgttgatgggctcaagaaattctcaagaaattctcttgcctcagcctcctgagtagctggaactacaggtgtgcaccaccacatgtggctaatttgtgtattttttgtagagacagggtcttaccatgttgcccagtctggccttgaactcctggactcaagggatccaatgacaggcgagagccaccatgcccagccacatttttgctaaattctttacactggtgaatctcaaagaattctctgatcatcacaccatatcctgctaagtgtgcaattaacctgtggacttcagttggacactttcagattagcattagctatgtggggccaccaaatgccaactgttaaattatcactcaaagataaatgacacttgagtgtgctgtttgagtttatacctctaaaaaatgcttatagtaccatgagactagtgtgccaacgtgtctggctgccaacgtgtctatagctgagccaataagaattagtctctagagcctctgtttccaaggaagtcaatctctagattcccacattggctgcatgatggaataagccaggggctacgaaaaatactgatgcctgttgaagcttggaggagctggggttggggtgtagggcagtgatgatcacatatgaatagaactgggagtctttagtgttactggtggcaatgttgaaatgcatgagggttgtttattgtataatgaagtatttttcacatgaagtcatatgaagtattccattccactgtatttgttcttattttaacgatacaactaggtaataaaggaaatgaagtattgttttatattttaaaaaaacacatatgcctggatctcacgccccagacattctgatttaactggtctagggtatggtctgggcatcaggactttttcaggctccaagtgattctaatgtgcaacaaggttgagaactattgctttagggccttcgtgttctttgagaatacaaagaaaattcagagagataggttaaaaacacacttgccattcctccattgctctgacatctatcagcaaataagctataacaggaaatacagggctttg

SEQ ID NO: 76571 - DNA, 398 bp, Homo sapiens
acgggggtgcagcggggctgaatggcactccaagctcgtggggctggggagtccacatctgcacccgccgcgtggctagcaccccctgagcgttttggtcaatttgccatcatcccacccctcagtgccgttggtggttgcctgacgaaaagctgcacttaatagaaatcactgtggatgcaggagatggacggtgatgagctcaggaccagccagcaaccccatcaggcggtaatgcctaccatggtcacccatgacttcctctcgccactgctcggagctcctgcaaagccacaggcaacaacacatttctgctccgtacgagaagctcctattgtaagtcggtgacatggctggggttttctctcagcaaatattgagcaaacactgactgtgcc

SEQ ID NO: 76572 - DNA, 2221 bp, Homo sapiens
  misc_feature (36)..(36): n is a, c, g, or t
ttgtcctcagggaagctggggctggtcaactttagnaagtggtcccagtgccgttggtggttgcctgacgaaaagctgcacttaatagaaatcactgtggatgcaggagatggacggtgatgagctcaggaccagccagcaaccccatcaggcggtaatgcctaccatggtcacccatgacttcctctcgccactgctcggagctcctgcaaagccacaggcaacaacacatttctgctccgtacgagaagctcctattgtaagtcggtgacatggctggggttttctctcagcaaatattgagcaaacactgactgtgccaggtgatgtgctgggtcccaaacccttcccagacccagccctggcactcacggagatccagctaggaagtccgggaaaaggtcatcggggaaataaacaaagtcaagcacagtggatgaacgcgctgctgccgctccccacacctcttgtggtggacatcacttacgcttcctcatggtgcatgtcacttatgcttcctggtgccctcccagatgacccccccttgggccactacacacagctgcacccggcaagagcagacaaggatggtctactcactgagcctgcaaggctggtgtgcaggacaggccagctacactccccaggtgtgtgcaagaccggggacgagtcagtcattgggaggtgaggtgctcgggcagtgtgggatggaggaggagggagggaaactgagtgtgggctcttcgtattggagaggaggggacggccatggcacaaagactcagatgggaaagtgtgagaaagcagagatttcaaaggagctacggtggagacccacagaagaggaatgctgaggcttttctgtctgaaatgctgaatagactctagcacacgcaaaacagcccaccacagcgagctgcaggattcttccgggcttttaacagtggtcttgtaaaaaaaattagccgggcatggttgtcccagctactcaggaggcagagaggggaggatggcttgcgcccaggaggttgaggctgcagtgagccatgatcgcaccactgcactccagcctgggtgacagaatgagacccctgactcaaaaaaaaaaaaaaaaaaaaaaaaaaaagactggaacattcaaaacctgttgatgggctcaagaaattctcaagaaattctcttgcctcagcctcctgagtagctggaactacaggtgtgcaccaccacatgtggctaatttgtgtattttttgtagagacagggtcttaccatgttgcccagtctggccttgaactcctggactcaagggatccaatgacaggcgagagccaccatgcccagccacatttttgctaaattctttacactggtgaatctcaaagaattctctgatcatcacaccatatcctgctaagtgtgcaattaacctgtggacttcagttggacactttcagattagcattagctatgtggggccaccaaatgccaactgttaaattatcactcaaagataaatgacacttgagtgtgctgtttgagtttatacctctaaaaaatgcttatagtaccatgagactagtgtgccaacgtgtctggctgccaacgtgtctatagctgagccaataagaattagtctctagagcctctgtttccaaggaagtcaatctctagattcccacattggctgcatgatggaataagccaggggctacgaaaaatactgatgcctgttgaagcttggaggagctggggttggggtgtagggcagtgatgatcacatatgaatagaactgggagtctttagtgttactggtggcaatgttgaaatgcatgagggttgtttattgtataatgaagtatttttcacatgaagtcatatgaagtattccattccactgtatttgttcttattttaacgatacaactaggtaataaaggaaatgaagtattgttttatattttaaaaaaacacatatgcctggatctcacgccccagacattctgatttaactggtctagggtatggtctgggcatcaggactttttcaggctccaagtgattctaatgtgcaacaaggttgagaactattgctttagggccttcgtgttctttgagaatacaaagaaaattcagagagataggttaaaaacacacttgccattcctccattgctctgacatctatcagcaaataagctataacaggaaatacagggctttg

SEQ ID NO: 76573 - DNA, 414 bp, Homo sapiens
caatcaacactgcctcatgagctactgctctcctgctctttgaaaagacaaatccttatttctttgtagtgatccagaaggcagtgggaagaatgacaggtgcttggttatcttcaatttaatctctacctttcaatggggctagtgcaagctagggccattttactgcacccaaaggaatttaagacatttctattatctctaaagaatccagattaacatgccttcttggtgggcagggagaccagctatgaattctaggatctcaattcaaatgcttttgaattcttcctgcttgttcagttaattacatatatgtcaccacaatcttgcttttttttttctatgcttctaattttctctgaaactataacattattttaggggttaataaatttgtaattggaaaaaatg

SEQ ID NO: 76574 - DNA, 466 bp, Homo sapiens
gtcttctctgttttgtgatgcttcctttgctggtggagaggcagggcagtccattagccatcagcactgcatttcattcttctgactctttccacagtacccaattgtggaatgagaagtagatcgtgatgcctagatccacattctctttctgctcctgactagctgtgtgtctggccacgtcacttaaccattctgagatgtaatgtactctgttgttgattaacggtggaaactcctgcctagtctgggattgttacctgcagattctctgtgatgagggtcagaggcacttgattgctttattggctggaatatgcctagttgtttcattctatctagtgttttcactcctactaaagcatctttcttctcaaacattcctaggttgtgcccatgtgttgactgaatgaagggactaggacaccattctaaaagacaccaaaaggctctttaaaaaaaaaca

SEQ ID NO: 76575 - DNA, 377 bp, Homo sapiens
actctcagcatagctataatgctatccatagagactgtagagttataatcgtgactactaaatttaagcagcatccttgcctggtgctgtatcatttttggacaccagagatatatttattcctgtctctagagagcgaaaaagcacctctctgtcagaatgactactttctactttaaaaatgtttttgatgataactcttgatggctttagataaagccatccttccaaaaggcctgaagcactctcagatggctccgttttgtcagccctttactgctctgggatgtggtctacccactgttaagctaatatttttgatcttcaatttggaaccttaattatgctgtacagcagtcgttgtacgtggatgcata

SEQ ID NO: 76576 - DNA, 389 bp, Homo sapiens
cacatcttcctgtcctcttctgagccctccaaactgttccatcctctgcttgttacccagttccaaagtcacttccacattttcaggtatctttacagcagtcccctgtgaccttggtaccaatttattgtattagccagttctcacattgttagaaggaaatacctgagactgggtaatatatgaaggaaagaggcttaatttactcacagttttgcatggctgggaaggctgcaggaaacttaaaatcatggtggaaggtgaaggggaagcaaggcaccttcttcacaaggtgacaggagagaggaagtgcaagcaagggcaacgccagatgcttataaaaccatcagatctcatgagaactcagtcactatcatgagaatagcatg

SEQ ID NO: 76577 - DNA, 850 bp, Homo sapiens
aggcaaagggattggcctcctgggcagaaaggggccaaaagggagggccctttggaggagcgtggctctggtgaggggtggaggtgagacccacacttatgctctgatgccttgcaactgatttcctccagatacaaacagggcagctgaatggggagatggcctcccccatcagaggcagttcccagccagcttccttggatggccacacaggaatcactccacacaccatccctgagaagcagaaccacagggaaacctcttgtccctctggaaactcagttacaatcagttcagcacttgaaggaaggatctcgaaacattacagcccgaagaacaagagggtgaaactgtggaggcctcagcatcttctacccagagtgtgcccaagctataccctggggcagccaccagcatcaagagcttcaggccagtagggagctaggggacctcttggtcccatttccttgataacatcagaaatctgaagaacaactctccagcaaggcacgggcttcaactgaagccctcttcccaagtcatactaaaacaagaactgaccccagctgcgggtgcttctctctgcccgcacatccctcttccagcctgctccatatgcagccccacacagtgggggttcctgttgggattgtgtgtctggggcaagtgaccttaccaccccaagcctccatttcctcagaagtcaaacagggatggggatgctgactttccggggtaagcgtgactctccgccctctctccagccccctggctctggagtggaaatctgggctcttctcgagctcagtcaataccagccatagatataacagggcactggggaaaagat

SEQ ID NO: 76578 - DNA, 436 bp, Homo sapiens
tactgactgaccctgggttcgattcccagccgagacgtttctgctccattccggcaggagctaccttcccgagccgcgctttgctcacctgtaggagagctagagggaaataagacagcccttcttaggatggtggagtggctagaaagaagcaatccacgccaaaggcttagctcagttcctagacttagtaaatgctcaataaatgtctgccattgttattattatttattatgcttccagctggcctggaaggagggttctggagccagaagggaccttggagagacctcggttaaatctctagcgccatctttatttttaggatggagtaacttgctcaggacctacatctaacattgtggaggggatgcggtttttaagtaggaattcttgactagacctctcagcaacccttcctctccgtgacagtggg

SEQ ID NO: 76579 - DNA, 388 bp, Homo sapiens
gcttacaggaaccaactctgagctgaagccactggccaggctcttgaatatgataagagaatcacagcatgcggctcagcacgtggctcaaggcggatgtcagccccgctggacaccatgctcccctcagccctgcatcttctttcaggctgtcccttctgcccggacaacgctctcccactcccctcccctcctcacccctagtcccttcacctaattaactcctgggcattcctcggggctctgtcttaatgtcacctcctctgagagccctccttgatgctccagattgggtcaagcatattatgaaccatcacaaggccatgcattcctcctgcagaacctgagctcaacagaaataaatcaaaacttcactcaccagggtatc

SEQ ID NO: 76580 - DNA, 1325 bp, Homo sapiens
tgcagatacgggctccaccacgctccaggacaccagcaaccagggtgtttgcagcctcacagcctggttttccacaagtctgccccatccctaaggccacacagctgaagctttggctctgctttcattccagggatgggcaggctggcattgggccacctgctgcccctggccccagattctctgggtggggggccatgtgatccatctggctggggcaatgccaggaccaccccacccatttcagtgtcctaattcttactttgttctgccattgtggcagtctggtggtaaatataaccttttgacagtttttgaactgcctggaacccaagatcctaaacattttttaaccgtatttgggttatcttttattttggtttttatccccaatggagaaaaatcaagatggaaaaaagttattttaaaatacacgatgggtggcagcagtggtggtagggaaaaacaaggtaaaaaaattttttaaaaaataaagtacaggatgaagtgaattgaaagatttgtttaatgcactcttcttcaaggatagtattcctgtgttcataaaatttgagaataaattggtctcgaattaaaaaaaaattttagaatgtcaagatcctaacttccaatttgagaacacgtaacgtgagtctctggattgggaatgacttatgtgatcccaaaccctcattttcacaaagaaggtggagccctagtagctctgaaattcaaatgaagccatgcctctgctgcctggtccagtgctgtgctaacccctcagcctgcccaggtacagctgggtctttgtccaccgagcagggagttccactgtgatatatgcatcccaccctcactggcaggccattgactacacctgcaaccagcctattctcacagccctttttgtggtgagcaggagagctggactctgagccccccagttgcctagagagagggtagagctggcctttaattaaggacttttttgctttttagagcgagcttccggggaagcatagcacagcaatagggccactttcctgccagagggggtgggtgccaaaggatgtgggtcttttgctcactggtttaccctcagcataccaggaaaaatagtcatcctgattcactgtttggtccaagtttttatcacacagtattgtgtgatgaaatcctttctgtagaatgatttaactggatgaaaataaccatgtttcttttttgtctttagaaatatgttactctggctgggcttggtggctcatgcctgtaatcccagcactttgggaggctgaggcgggtggatcacctgaggtcaggag

SEQ ID NO: 76581 - DNA, 1032 bp, Homo sapiens
gcccagaccacactgaccacaaatgacattgtcattagcaagctgacccagatcctttcatacctgaggcagggaacccgtaacaagaagcttaagaagaaggataaagggaagctggaagagaagaaacctcctgaggctgacatgaatatttttgaagacattggggattacgtaccctccacaaccaagacacctcgggacaaggagcgggagagatatcgggaacgggagcgtgatcgggaaagagacagagaccgtgaccgagagcgagagcgagaacgagatcgggaacgagagcgagagcgggaccgagagagagaagaggaaaagaagagacacagctactttgagaagccaaaagtagatgatgagcccatggacgttgacaaaggacctgggtctaccaaggagttgatcaagtccatcaatgaaaagtttgctgggtctgctggctgggaaggcacagaatcgctgaagaagccagaagacaaaaagcagctgggagatttctttggcatgtccaacagttatgcagagtgctacccagccacgatggatgacatggctgtggatagtgatgaggaggtggattatagcaaaatggaccagggtaacaagaaggggcccttaggccgttgggactttgatacccaggaagaatacagcgagtatatgaacaacaaagaagctttgcccaaggctgcattccagtatggtatcaaaatgtctgaagggcggaaaaccaggcgcttcaaggaaaccaatgacaaagcagagcttgatcgccagtggaagaagattagtgcaatcattgagaagaggaagaagatggaagctgatggggttgaagtcaaaagaccaaaatactaatcactagttacaaccagagatgctccacaaggatatgctccccactgttttctttctacaatttccaaaggttgcaagatgtttttttgtggatgaatataaaattttattgtgtaattacttggttccattaaaattggttaacttgcaaaaagtcga

SEQ ID NO: 76582 - DNA, 306 bp, Homo sapiens
gagggtcccgtgggattcacgtggcgcttcaaggaaaccaatgacaaagcagagcttgatcgccagtggaagaagattagtgcaatcattgagaagaggaagaagatggaagctgatggggttgaagtcaaaagaccaaaatactaatcactagttacaaccagagatgctccacaaggatatgctccccactgttttctttctacaatttccaaaggttgcaagatgtttttttgtggatgaatataaaattttattgtgtaattacttggttccattaaaattggttaacttgcaaaaagtcga

SEQ ID NO: 76583 - DNA, 779 bp, Homo sapiens
ttcgagctcggtaccctcatcttgggcctgtgttatcctgcctctactgtttattagttttgtgaacttgccaagttctttcactgtttatgcctcagtttcctcatcaggaaaatggagagaaatatagttccctcttcatagattttatgagaattaagtgagatatgcatttagtgtacagaataatgcctgtcacatagtaagtatgtaataagcatttattattacttatcagggtatgatttatgaactgtggaacctgggattatgggagagtctggcttcaatcaagggctgaaattccatttccactgacatctcttccttccccatcccccgattctgtcctgcaacagggtaacaagaaggggcccttaggccgttgggactttgatacccaggaagaatacagcgagtatatgaacaacaaagaagctttgcccaaggctgcattccagtatggtatcaaaatgtctgaagggcggaaaaccaggcgcttcaaggaaaccaatgacaaagcagagcttgatcgccagtggaagaagattagtgcaatcattgagaagaggaagaagatggaagctgatggggttgaagtcaaaagaccaaaatactaatcactagttacaaccagagatgctccacaaggatatgctccccactgttttctttctacaatttccaaaggttgcaagatgtttttttgtggatgaatataaaattttattgtgtaattacttggttccattaaaattggttaacttgcaaaaagtcga

SEQ ID NO: 76584 - DNA, 815 bp, Homo sapiens
agtgttgtctttttcattacagccattctagtgggtgggaattggtatctcattgtggttttaatttccctggtgactaataatgttgaccatcttttcatgtgcttcatgacttctgttgagaaatgtctattcaagtccattgcctatttttttattggattgtcttttattattaagtccctgcaatgcaatgaattatgaaatttatattctctgaggaagctgaaacattgtcagataaatgatttgcaagtattttcttctctggattgtctcttcactttcatgatgatttcctttgaagaacgaacatttttaattttgaagtctaacgtgtttttttcttttattgcttgtttttgatgtcttatccattccctgacctaaaatcacaaagatttacacctgtatgttcttctgacggtgttgtagttttagctcttacattttggtctttgatcctttttgagttaatttttgtagattgtatgagttaggcatcctcatattcttggcacccttgttgaaaattagttgaccgtacacgtaacactctgggtctgcccttatgcagtatggtcttgattactgtagctttgcagtatggggtgtgtggatttattaatagcagatgggagtagaaccgcagccttgttaagcagggataatgggaaggaatcagtctatcctggatatagaataattcccctttatttgtgtctctttgaaatgcattgtcgtagccccagttatttctttgttcagactcccagtgattttaagtgctcttcaggtttgagaaagggctccaa

SEQ ID NO: 76585 - DNA, 825 bp, Homo sapiens
ttcgagaattgcttttctttttcgtgtttgtttttgatttaaaaaatcaatcatgtacccgattccaaagtcaaacctgtaacaagttacaaccaagtcagtctccttcgcatctctgttctctatcctctttcttcccccttttctatttgtttttggtttattttcccatgtttcttttcgcaaatacagcaagtgtgtatattgagtcaaatctcttcctcctttcttacacaaaattagcacattaaatatatagtactgcaccttactttttctctcactatgtcctagagattgctctacgcgttgtatggcgtttttcatagttattcactgtgtgtggataccacagtgtattcaactgtcacctgatgacagacatttgcattctttgcaatcctttgtaaatacaaacaatgctgcaatgtacatgtcattccacatattctccaaggtatagttaggacagatcccagaagtggaatttctgggtcaatgggcaagtgcatttttgctgattattatccagtttccttctgttgagttccattttgcattaccaccagcagtgtttgagaatgactgtttctccatagaactagaacttttacagtgaattttatcctaacttttcttcaatctccttttacttttactttctattttaaagaatataattcagatttctctagtggtcatgagtctgtgtgtagtgtgagaatctagagacaactgttctaaggcggcatgagaatgggcagctcagctcagagtttagacctcatctgtttccagtgccctgggggttttggggagtaactg

SEQ ID NO: 76586 - DNA, 1311 bp, Homo sapiens
gacgacgttcccacccactcctgagagcagagctggccgcagccatgaccccgcagcttctcctggcccttgtcctctgggccagctgcccgccctgcagtggaaggaaagggcccccagcagctctgacactgccccgggtgcaatgccgagcctctcggtacccgatcgccgtggattgctcctggaccctgccgcctgctccaaactccaccagccccgtgtccttcattgccacgtacaggctcggcatggctgcccggggccacagctggccctgcctgcagcagacgccaacgtccaccagctgcaccatcacggatgtccagctgttctccatggctccctacgtgctcaatgtcaccgccgtccacccctggggctccagcagcagcttcgtgcctttcataacagagcacatcatcaagcccgaccctccagaaggcgtgcgcctaagccccctcgctgagcgccagctacaggtgcagtgggagcctcccgggtcctggcccttcccagagatcttctcactgaagtactggatccgttacaagcgtcagggagctgcgcgcttccaccgggtggggcccattgaagccacgtccttcatcctcagggctgtgcggccccgagccaggtactacatccaagtggcggctcaggacctcacagactacggggaactgagtgactggagtctccccgccactgccacgatgagcctgggcaagtagcaagggcttcccgctgcctccagacagcacctgggtcctcgccaccctaagccccgggacacctgttggagggcggatgggatctgcctagcctgggctggagtccttgctttgctgctgctgagctgccgggcaacctcagatgaccgacttttccctttgagcctcagtttctctagctgagaaatggagatgtactactctctcctttacctttacctttaccacagtgcagggctgactgaactgtcactgtgagatattttttattgtttaattagaaaagaattgttgttgggctgggcgcagtggatcgcacctgtaatcccagtcactgggtagccgacgtgggagggtagcttgaggccaggagctcgaaaccagtccgggccacacagcaagaccccatctctaaaaaattaatataaatataaaataaattagccaggtgtgatgttgcgcgcccacagtcccaactacttgggaggctgaggtgggaggatcacttgagtccaggaggttaaggctgcagtgagctgtcgtcacaccactgccttcatgcctgggcaacagagca

SEQ ID NO: 76587 - DNA, 519 bp, Homo sapiens
tcccccgatctgactacgcggctcgatctgactacgcggctggagtccttgctttgctgctgctgagctgccgggcaacctcagatgaccgacttttccctttgagcctcagtttctctagctgagaaatggagatgtactactctctcctttacctttacctttaccacagtgcagggctgactgaactgtcactgtgagatattttttattgtttaattagaaaagaattgttgttgggctgggcgcagtggatcgcacctgtaatcccagtcactgggtagccgacgtgggagggtagcttgaggccaggagctcgaaaccagtccgggccacacagcaagaccccatctctaaaaaattaatataaatataaaataaattagccaggtgtgatgttgcgcgcccacagtcccaactacttgggaggctgaggtgggaggatcacttgagtccaggaggttaaggctgcagtgagctgtcgtcacaccactgccttcatgcctgggcaacagagca

SEQ ID NO: 76588 - DNA, 2424 bp, Homo sapiens
aacttaactaccattcatgacattgtttctttggggaaaaaacatacccatttccaaaacagctgaagcatagtcttctggatcctgcgcctctttgtgaagttggcctttgctggtggctctgccactggtttggaaatcagagatggtttttccatgcccatgatgaggacaaaggtgagtgtcccctgtctccacattgggaaaagaaacacacccatcccttagaaaggagagggaaatggtattgcggcctcactctcagatgagtaaaacctcctgagaatttaatgtgtgattgtttttataaatgtgacaagtcctggtgttagctcctggcctccaattgagcaaggtttcagtagcaggtaatcccctgttctttccctagctgtgtggggcgggaccatgtctttgctaccacctcttgctatattcctaccctttttttttttttttttttttgaggcaggtatttgctctgtcgcccaggctggagtgcagtggcatgatcatggctcattacagcctcagcctattgggcttaaaccatcctcccacctcagccacccaagtagctgggactacagatgcagaccaccaagcctggctagttcttaaaaatgttttgtggaaatgaggtctcactgtgttgtccaagctggtcttgaactcctgagctcaaaccatcctcctgcctcagcctcccaaagtgctaggatgacagccactgtgcccaaccatatccctaacttttaaaccttgctgtggctgagaacaaattaatgtagtttgaagtttaccaacagggaaaacaaaaggaaagaaagggatggggcagcagagcaggcagtgccatgactcagttccactcagatctcattctggatttgactggggtagaaaccagactttaggatgcccatgactcattgtctatggaaatagcattctcttagacttgtgcagtcagctacctgtggagctgtacgtagcagcccccataggcttgaaggacctttctgtagctgtctttggaggcagtgatactctcctcccaattgttacacacatttctgcataggagttgatacatgaaacaggaaactcaaatacattttgcaatgagttgagaagtaaatccaaaaccagatttagctgagagtcttttgttgcatgaagctgtgcacacaaaggcagtgaagaggtctagaataagacagctgtaggtttgcgtgttaattgcatgatgatctgactacgtgtgcacagggcctggcactcagcatcctacttggattatctcattcaatccttgataacactgtggagcagctcctgttggatgaagaaacaaagattcagagtagatgtcacccaaggttataccattggttggagggagagctggaacagtgaccagggatatccagctccagaaccctgaatcttaacctctgtggtatactcctgttcggtgggttgccctgagccaattgttctgctctctgagtcttgctcctcatctgtaagatggtcctcgggcggctgagtgtattgagagacagcctaggtatagatgcataccttcaggaaataggccatccttctagggccacagaaatgcccctgagaccttttttcctgtcatagcaccgtgctctgctttctgagaactgaaatttgcagggatagcctgcctacggaatttgtccacttgtttagtggggctggatggtggttgtcctatttacttaattcacttgatgggtttcagtcttttgaacctaaaaaaaataagaaaatgggatttgtttaatctcgttttccaacacaacagttcttaatctgctttcgaatgtttgtttgtgggctgaatacaattcagtgttaatctagtgacctagtattgcctggtgatgaaatctgtccctgccgttaggttcacttgtgtttctttgtgtttctctctctctgtctctctttctctctcgtacacacacacacacacacacacacacacacacacacacacacacacacacacacacacattttaaacttggtctttaaaatctcagtttttcctgcttaagacaagaagatccctgatgccaagatttctacctgaaaggtcagtttcagctttgtaacaactgggtaattgtctcctaaaataaaccagcatctcagggactgcaagcttgtcttctcagttatgtgaatgcaaatctcttctctcctaatgactaccctgcctatgccgtttcctgtgggcatgtgcagtcatctggaaatggcggctgccagttccacagctggggacgaccctggcttcttttctgtaatgaggatgtgtctgctcctgccattgccccactctttgtcctctgccttgtggtcaggagctgctctttgtgcttt

SEQ ID NO: 76589 - DNA, 1193 bp, Homo sapiens
cccccccccccagcatgtgactcaacagtcacctctgtagagcatcactaaagatggcttctcccagggccctgcccatcaattatcttttgagacaaatgcacatggattcttaggtaactcacaggggaatatatttgtatagaccaagattgggagaaagagccaggggagagctggaacagtgaccagggatatccagctccagaaccctgaatcttaacctctgtggtatactcctgttcggtgggttgccctgagccaattgttctgctctctgagtcttgctcctcatctgtaagatggtcctcgggcggctgagtgtattgagagacagcctaggtatagatgcataccttcaggaaataggccatccttctagggccacagaaatgcccctgagaccttttttcctgtcatagcaccgtgctctgctttctgagaactgaaatttgcagggatagcctgcctacggaatttgtccacttgtttagtggggctggatggtggttgtcctatttacttaattcacttgatgggtttcagtcttttgaacctaaaaaaaataagaaaatgggatttgtttaatctcgttttccaacacaacagttcttaatctgctttcgaatgtttgtttgtgggctgaatacaattcagtgttaatctagtgacctagtattgcctggtgatgaaatctgtccctgccgttaggttcacttgtgtttctttgtgtttctctctctctgtctctctttctctctcgtacacacacacacacacacacacacacacacacacacacacacacacacacacacacacattttaaacttggtctttaaaatctcagtttttcctgcttaagacaagaagatccctgatgccaagatttctacctgaaaggtcagtttcagctttgtaacaactgggtaattgtctcctaaaataaaccagcatctcagggactgcaagcttgtcttctcagttatgtgaatgcaaatctcttctctcctaatgactaccctgcctatgccgtttcctgtgggcatgtgcagtcatctggaaatggcggctgccagttccacagctggggacgaccctggcttcttttctgtaatgaggatgtgtctgctcctgccattgccccactctttgtcctctgccttgtggtcaggagctgctctttgtgcttt

SEQ ID NO: 76590 - DNA, 420 bp, Homo sapiens
gcactctcactcagtctgtatctactcctcctccccagcactcacaggatgaatttgacaacatattttattcctaagcattcaaaatctatcctaaaagaatagatattgttcttaaggtagccaagaagtgctaaacactgaggttctttttgctttcaaagatcccgggggcagggggtgaaccagaatcatctgcctctctctccacattggcaagacatcatgccccttttctcctgtgaactgttttttttttttcagggctgtgaattcttcctgtaattagacccccattctgtcatggtttgattttttaaaaatatacctgggctgcctctgcccttgggtagtaagaggagaagtcttaaaattttaaagcttaattagccagatcccatatcttttaaaaaaaaaaaa

SEQ ID NO: 76591 - DNA, 353 bp, Homo sapiens
caactacttggggaggctgaggtgggagaatcatttgagcctaggcgttcaaggctgcagtgagctatgattgtgccactgcactccagcctgggtgacagagcaacactccctctcaaaacaaaaaagagaaaagaaagaggcccttggactcccgtcctggctctgcccctaaccagcttcacaaacacaagaacacgccactcctgaacctggtctgtgaatcaagaaacagttgggatcagaccatgtggtctctaaatccccttgctccttattaagctctaaaaatgagaagtcttaaaattttaaagcttaattagccagatcccatatcttttaaaaaaaaaaaa

SEQ ID NO: 76592 - DNA, 661 bp, Homo sapiens
aaagagcagcctgcaagctgggagcttgcatgggtgaatgccgcagaaactgaggactagacattttcataatggtggctccatcttcccttctctgccagccgcgtgtatcctaaggagcagaccagatggggctgataactgaaaagcccatttgcataagattagggtaaggtgaccagccttccccatgtgccatgtaaatgtcatacctaattgaaccaatctgtgagccctacataaatcagacaccacctcctcatgccagactaaaacaatcggtgcattccctgccagctggtgtttttttcttctccatcctttccgcatggtcttttctgcttggagaacccttcctctatggaggaagctgttcctctttctcttctcttctacctattaaacctctgctcctaaattccacctgtgtctgtgtcctaaattttcttggcatgcgacaacgaacccctggcattattcaaaggcttctggactgaacccagcctctgacagtccgtccaggtgttggtaaaggatctccagctatcctgtcacaaaactttcctttcttttctatccatggtcattatgtctactatgctctccgtatatgcaatgtgcaggaatttttacaattcaggggaacagttctgttaggaaa

SEQ ID NO: 76593 - DNA, 501 bp, Homo sapiens
taaaaataatactaaccctcaaagttaaaacaaacaaaattccatcaaagcactctcaaaaaaaaagccatgttaccagtcatttattaggtctaaataatatgcctatattatcctccccaccttgaaaatagactctttaataaacacaagaggaaaaataaataggttaaccaggaaaaaggtcattgccttgtctgttgtaatacggtctgatcacccaagatgattgatttcttaaaagaatccatatccatgactcttatagacattctgccatcctgcagccatctacaaggtagcttatacttctaaggttattaaatccttgtggtcctcttaagaaatcaagaagttcagtagcctcactttttttgtaaaataaattttctcagtctccctttttaaaataaaagctgtaaaatggaagtgttaaatcagtatacttgaacaataccacctagttttgcatatcttcaataccattagctccattctgga

SEQ ID NO: 76594 - DNA, 395 bp, Homo sapiens
gaacaaacaatctgttgtgactgcagaagcaatgtaagagaaaaacaaatttttagggttaaaaaggaagaatgtggccaggcgcaatcactcatgtctgtaatcccaacacttagggatggtgaggtgggaggatcacttgagcctagaagttcaagaccagcctgagcagtgcagttagacactccaccatctctacaaaacaaaacaaaaaatatatatatttgggtgtggtggtgtttacttgtattcccagctattttggatgctgaggcagacagattacttgagcctggaggtctaggcttcactgagcagttcactttaccactgcactcttgcctgggtgtcactccagataggtgacagtgtctcaaagaaaaaaaaaaaaaaaa

SEQ ID NO: 76595 - DNA, 429 bp, Homo sapiens
aagtaacaaatatgtacatagcaatatgaagtgtggagagcaccccgtcatgtcatatttcttttttgcagtaaacagttctataacaggcagttagattttcttgttttgtctgttttggacatagacattttgacataagctacatgagattagaaacatttacatttttgaatttcattcatcagaatgaacattttcattgatgatgactctttaaaatgaaaggcaatttttcaaaataactattctatcacaactttaaggaatgtcatattaaactatatagtagtatatgtacattttttctgttaagttttaaagtacttcctctgagattttgctttaaaggtagaaaatattggccgggcgccgtggctcccgcctgtaatcccagcactttgggaggccaaggcaggaggattgctt

SEQ ID NO: 76596 - DNA, 691 bp, Homo sapiens
  misc_feature (3)..(3): n is a, c, g, or t
  misc_feature (5)..(8): n is a, c, g, or t
acngnnnnatcacttgaagctgggaggcggagcttgcagtgagccgagatcgcgccactgcactccaccctgggcgacagagcaagactctgtctcaaaacaaaacaaagcaaattagctgcttgtaatgtgtacatttcctgaaagtacttttgaataatatacatctaaaatgtcaaggttcattggtggaaaacaacaaatcatgaagctactaaaaaattatgtgagaaggcccgtcgggcaagtgaggaacgcctctgccggccgccgccctgtctgggaagtgaggagttcctctgcccggccgtccaactgactgggatgtgaggagcgcctctgacccgccgctgcccggtctgggaagtgagcagcgcctctgcccggccgccaccctgtctgcgaagtgagcagcgcctctgcccgccccaccccctcaccgtctgggatgttaggagcacctctgcccgcccgccgccccatctggaatgtgaggagcgactctgccaagctgccgccctgtgtggcaagtgaggagcacctctgcccggccgccgccctgtctgggaagtgaggagcgcctctgctcggccgctgtgcaaccctccaagtgtgaggtgacagccttgtgtgtgatctttctgctctccccaagtttgcattttcgacattaaagtttactttttaatta

SEQ ID NO: 76597 - DNA, 1083 bp, Homo sapiens
accactgggcaggcagaatttgtttgagggatagaacgacaacaaaataaatgttcctgcagcctgagatttcaggtagagtactgactaaggtttaataagacaataggtgacctgaggacatgcaagcttgtaaaatgcaacagcctcctgctagagtgacttgtacatgagcttgcttgcagaagactagattagatgtttctcaggatcccctcctgcgcaggggttctctgattttcgtgttctctgcccagatgggctgggggagttgagagtgtgcttattttcactgcgatcatgagaccacagttctgggttatctcctctcatacatcaagccccagaggaggcggcaagaggaacagccacaaacaagtactttaccccacagcttagtggccagtaaacaccctggggactaggaaaaggaaccaactgtaggcacctctccagggcctagggagacaagtgtcctctcttctgcatacatttgggctccccttacagagccctttgccctggctctctggtccttgttgctctaacagtccagatgtacacccagcctcagggggaaggcagctctctccagacagagtctcagggcccagcaaggtcaggttatctgctttcattcagggcaacaaatgatacaaatggtgccagggagtggcaaggccatgggggtaggtgggggtgtctttttcttttcataaagtaacaacagacgagactgaggttaaacatcagaaaaaaacctctggaatgaccttcctcattccaggaggccctggaataaggaagaggcttctttctgagggagctttgaggaattttgacagctgttgacatgggatttgggaaaggtgaagctgtgactggaggggcaggagatggtccaagtgtccatccagagatgagactcttagaatcaaagtgttcagcccaggaagtcttggagatcccaccttctgtggccctgcaccttatgggaagccattaagggggctcatctaggaattctggttacagcccagtgctcatcccagcgtatgctgcctctttagggcagccccaagg

SEQ ID NO: 76598 - DNA, 669 bp, Homo sapiens
ggaagccggggctggtctactggtctgtaggcacctctccagggcctagggagacaagtgtcctctcttctgcatacatttgggctccccttacagagccctttgccctggctctctggtccttgttgctctaacagtccagatgtacacccagcctcagggggaaggcagctctctccagacagagtctcagggcccagcaaggtcaggttatctgctttcattcagggcaacaaatgatacaaatggtgccagggagtggcaaggccatgggggtaggtgggggtgtctttttcttttcataaagtaacaacagacgagactgaggttaaacatcagaaaaaaacctctggaatgaccttcctcattccaggaggccctggaataaggaagaggcttctttctgagggagctttgaggaattttgacagctgttgacatgggatttgggaaaggtgaagctgtgactggaggggcaggagatggtccaagtgtccatccagagatgagactcttagaatcaaagtgttcagcccaggaagtcttggagatcccaccttctgtggccctgcaccttatgggaagccattaagggggctcatctaggaattctggttacagcccagtgctcatcccagcgtatgctgcctctttagggcagccccaagg

SEQ ID NO: 76599 - DNA, 641 bp, Homo sapiens
catggtgaaacccccatctctactaaaaatacaaaaattagccaggcgtggtggtgggcacctgaaatccctactcaggaggctgaggcagagaatcgcttgaacctgggaggcagaggttgcagtgagccgagatcgtgccactgcacttcagcctgggtgacagagcgagactccatctcaaaacaaaacaagcaaacaaacaacaacaacaaaaaacacctcttgacttctaaagacgcaaaagtggccaaaagtgcaatacagtattgtgtttatttacatctattttaaatgcatgtgtatctgtaaatacaaagtgattcgtgactcattgtctcctcagtctatagcattattaacttctaggagcagcagtggagtagagtgtactgaatggtcacagactcatcgattatcagatctggaaaggagcttagagaagatctgttccaggctcctattttatagaagggaaggttgacatccaaagaatggaaggaaatctcctaattattctgagagtatcacagtgatggagccaggactaggtcctggatcacctctaagaagacacttagctatttgactatcgactagggcctagcattattaagcactagataaatacagatgaaaaa

SEQ ID NO: 76600 - DNA, 843 bp, Homo sapiens
tttatatctgtgttctccgtagtgactggcaggggatcttgcatctaaagtaactaaaataaaattaagttaatcagatacattttgtgaaggtttagatctcttggctggaaaaatgttaaacaagagacagtaatcaaaggagatttggaaatgggtgcatttagagagaaaaatgtgttcttaaaaagcagtgactaaattcggtctcctgattttttcatttcaatagatctttttaaagaaaaccaagtgttgaatttctctgtcagtgaagactttgtgctgagttttcatgatgggttttctgtgagcagagagtcctcatcagccttcccacttccctgaaaccccccaaaactctaaatttttgccagcaaacacattaactgttctttcattctgacaaagcaaatcctccagaattttgcagtagaaatatcagccacttcgtggatgatggctttttcgccctgaaatctcctatggctttctaagtgaatgggtgtcatctgaattaatgatggcgctgttaggttttattgattagttaataaatgctggggaggggaatcctgggtgataggtatttgctccttcctatatttgctggagagaaactaaacccaaaatgaaggatgctttgtgccagttgtgttaaagtgactgtgtccgtgggatcccactatgactgtcccaaggtaataaaaatatcagggcttgggccaggtgcagtggctcatgcctgtgatcccaaaactttgggaggctgaggcaggaggatcacgaggtcaggtgatcgagaccatactggccagcatggtgaaacttcatctctattaa

SEQ ID NO: 76601 - DNA, 296 bp, Homo sapiens
atcccagggaagccttccaatattgctgctggctgggagtaagtggtcacctggctggaggagacgcacatgtgttaggccaagagtgagcctgcgtgaccatgcactgagtggacagtggccgctgtgctggggcagttgaagatggggccattcctgagtaagtccggtcccaaacccatcctccccggtgggaaagggccagggaggcaagggtcacgcccagcagcctacagggaggggttcagccccagaagagccttgccccatcccaccccacctggcctcccactaca

SEQ ID NO: 76602 - DNA, 409 bp, Homo sapiens
gatggatgttaagggttacttatgccctctccacccccaacaatatgttaaagttcatcagaatgtgatcttatttggaagtagggccgttgcagatgtaatgagttaaggtcatgctggagtagggcgggcccctaatccactgagactggtgtcgttgtaagagaagagacacagaagagacgcacagggagaaccacctgtggtgatggcggcagggatcagctgatgcatttccaaggccaggagtgccaagcactgccagcagggaccagaagctaggaacgggcagggaataattcctccttcagagcctccaaaaaggaactaaccctccagacaccttgattttggacttaatagcttccagagctgtaagtgaataaatttctgttgccacccagtttat

SEQ ID NO: 76603 - DNA, 686 bp, Homo sapiens
ctttctctatttctctttctcttaataatttaatcttttaaaagttatctcacatggcaaagctttggctttacaaagcgaacaaaaaaaacttccccatgaaaagtatcctgattcattaccactttttttcattttttcctgtttttcagtgcgtttgacatatgcgtcattgtcgtagtagcacgtgtataattttaagtcctgtttttcacgtagcctcctattagcacttaccgtcttgcccctgagccttcgtagctgtcatttttgatgtctacataatattctttgattgagtaccccatgattcattttcttttctcctgcttttggccactttggttgtttccaatttgtgccattataaataacactgcaattaacggcttttatttcctcagatacatttgcatctgttttatgaattaaaagcagctgaactgacttctgtgtcattcctgtttgaacaaaaatggaatgtcctggtttcgtaacgggacaatctaaatttagcctcactgacagagctgtgcgacaaggggaacggcagagtagaggtcgtagagcatttcagaaaaagtctatttagttcatttgtcccactttgaggagaagacgaagtcttgtgttgctccaaagtgagcgcaagattggtaactttacccttgacaggagtttttaaa

SEQ ID NO: 76604 - DNA, 424 bp, Homo sapiens
  misc_feature (415)..(415): n is a, c, g, or t
acaccctgtctagtccctgcagggcattaaaacccaagccttagtgtgactaggtcttgtctccacctctccacactgcccacagctgctgagtatcagttccttggctcactattccaaactcctcggtcctttcttcatttctaactcctatggacttcccccgctcctccccacacgtgttgttttgtttgttggttggttggatttttgggacagaatcacttgaacccgggaggtagaggttgcagtgaactaagatcaagccactgcacatccggcctgggtgacagagcaaagacactgtctcatacaaaaaaaggtggctttggttttttgagcccaagcactctcctttagcttgtgtcttctcacagtcccccttgaggagaagctctgaaacaggaacatttgngaaaggctt

SEQ ID NO: 76605 - DNA, 381 bp, Homo sapiens
  misc_feature (325)..(325): n is a, c, g, or t
  misc_feature (360)..(360): n is a, c, g, or t
  misc_feature (369)..(369): n is a, c, g, or t
ggccttcaaattacaaaaagcaatttacattatagtaatagttcatgtttatagtacaggaacaagaatgagttaaactaaatattccaaatcagtacaagttatttccttttttttttttttttgagacagagtctcactgtcacccaggctgtcttgctttgtcatccaggctgcagtgcagtggagtggtcacaactcactgcaacttcagcctcctgggctcaagcaagcctcccacctcagtagcctcccactcctgattagctgggactacagtgaatgtgtcgccatgcccagcctagtggtatttttaacagataantaagaatggaggtagtggcagaggtggagtgagangagagacangtaaaatatagg

SEQ ID NO: 76606 - DNA, 328 bp, Homo sapiens
tagagtttcaatatcaataaatactttatttttgattctaaagtaatgaatctaaatgttaccaaataaaaacaatagcattgcccaccaaaagcataagcaacaagaggaaaaatacataaactgtacgtaatcaaaatttaaaactttggggtttcaaaagagaccatcaagaatgtgaaatggcaaaccacagaatgtgagaagatttttgcaaattatatatctgataaaggacttgtttatagaatatataaagaaccattacaacccagtaataaagaaaacctgattaaatatggacaaacatctgagtagacatttccgc

SEQ ID NO: 76607 - DNA, 411 bp, Homo sapiens
  misc_feature (1)..(1): n is a, c, g, or t
ncgagagcaacagtttacttaatacggtaatggactagtgcagtttttgtagacagtgggcttctgatacaaagtcttgtttaaacacagacacacacacacacaaacacacacacacaccctaaagtgtgggtttcctgttctaatgatttgttgaatattatattattattattattattattattattgttattgttattagtaatgtttggttctggattctacttgttactgagtttaaattactggcggttcaggttacttttccacacttaccaacgatgcaatgtaactggctagcttatatatatatatatatatatatatatatatatattttttttttttttttttttttttacttatttttttctgatattcttacaccagatatgtacgaaaatgatc

SEQ ID NO: 76608 - DNA, 307 bp, Homo sapiens
ttcagcaagggtttctgtatctgtgcattgaggattaaattattcacatggtcagagaagcccatcaccactgatagttattgtaggtatggaaaactaacgactaagaagggagaaaaatataccaagcagttggcttggctgaacacaagtaaagactcttacagtcactggtgtgaactgcttattatcaatgtctgattacagtgctgcatactaatgattatgcatgtcattaaatgtgtcagattaactttgttataaaatttatgacaacattaaattttattcacatgaaaagccttca

SEQ ID NO: 76609 - DNA, 331 bp, Homo sapiens
tgagaatcaaaatgaaagaacctcaaagagaaataaaaactcaaaggaagaatctgagttctttaaacaacaccagagcaatcctgtcctaaaactggaggattttcaggttttgcaatgtgacaaacttggaaaagatacatctgacactaaatcctttggcaattttattccacctcggggcttcaactaccccattctcagtatctccatcttaaccttgatgacttctcaagatattaaatatttccatctgcctaatgacaaaaatcactcatctcaataaaaagctgtatttattagcatcttcttcctcaaatcagtttgtcct

SEQ ID NO: 76610 - DNA, 250 bp, Homo sapiens
ctgttcaatgtgtaaggaattttaaatagaaatggaaattcataaagacaagggccaagatgaccttttcaaatcagaatgtttaaggttgtgttaaaggcagctcctctcccccttttaggcactcttccttcccaaggatactgaagatatattttgagtgagaggatgcatgatgctccctgactcttggcctactccctttatcctacagaatagagctcattattcacgtaggtcaaggttgcta

SEQ ID NO: 76611 - DNA, 402 bp, Homo sapiens
tccacagaaaatttcaagtctatttccactttagggcttatacacttctatcttttcttcctggaatgcacttcctttgattcatctcgtgagtctttccaccagctcatcccagtatctgttcaaatgtcttcccttagagataatgttcctaaacaccctatttaataacaaacccaaatgctttttagcacttaagcctgatttatttttcttcacaatatgtgtctgttagcttttcctatcctatccatgatattacattgtactgtgatatattcctatatttattactctgtctaactctgtagcatatcatacgaactatgtcttgtatctccaattacaacgaagtgtctggcatacaagtggtagtcaataaatatttactgcatgactaag

SEQ ID NO: 76612 - DNA, 2908 bp, Homo sapiens
ttttttcttgctctgtcacccaggctggagtgcaatgttgcgatctccgctcaccgcagcctccacctccacctcctgggttcaagcaattcttctgcctcagcctcccgagtagctgggattacaggcgtgtgccaccacgctcagctaatttttgtaattttttttttagtagagacgaagcttcaccatgttggccaggctggtctcggactcttgacctcaagtgacccacccgccttggcctcccaaagtgttgggattacaggcgtgagccaccgtgcccagcccgggaccttttttcttaaagaagaaattatactgtatgtgtgtatgtgtgtagagagtgtggtgaggcttaaagacaatgggcttcaaagtctgccagaagggccccagtcaagttattcagcctcagtttgctcacctgtaattgggaataattatgtgtgatggtgttatgtaaacacctggcacagtgcctggccttctcctttacctgcttttcttcctgctccttatcattgagctttgaaagactatggtaaatgtttccctagtaatatgactaagtacttactggggtttgacgggggaaagaatatgactattttatccagtactgactttatgcagaagattttaagggtggggtcactgacattggtccaagggaggaaatgtacagtgttaagggggctgagcgagttttagccaaaactctgaaaaacgtgacagatgctaagcatttaatgccacgtaagctaaataatgtagggccagctgccgttgaagcacaaactaagataagctaataattagttgtactaggatttatacctcatacagacagtagttgatgtattcaagaatgcattctccgtgatggaggttttcttggttcctggctcataattcttagggaagtctgcgttctgctgatcacgatcactttattgtcctacccagtatcactgatatgtactttgttaaataaaaatacaaataacctgaagaggtattatttgaaagctgtgtaactccatggtatggctagtgtgataattgtcttctgataatgcatatgtagtgaattatggccgaggttagtttccagtactggttataagtaagttaaatttctgaaatgttttgggcactgttcagtaacctttggagtagcttgcagtgtctttactgctttcaagtgctgatgtggaggaatcattagtgttgggcagggaaacaggagctgtcagactgagagggccagggatgttcattgtggagattaaatgttctgagtaagtgagtttgtagacattttcttgtaagaaaatgttccatgctttactctgttttggacattttcttttgaaaaattttgagatagaaaccttaatatcatttcatatatttacagcatatagttaatttgagtagagtcaaattaatcttactttagaatttgattactaagtattagcatggataataatgcttcttttgcttaaatgtaaaaattaggccgttttactaggtgtactttgtcttaatcatattcctatttttttatacagctgtgcaaccatattgcttctgggaaaaaatgtcaatatgtgggaaactgttcctttgctcatagtcctgaggaaagagaagtttggacttacatgaaggagaatgggatacaagatatggagcaattttacgaactatggctcaagagtcaaaaaaatgaaaaaagtgaagacatagccagtcagtcaaacaaggaaaatggaaaacaaattcacatgccaacagattatgctgaagttacagtggactttcactgctggatgtgtgggaaaaactgcaacagtgagaagcagtggcagggccacatctcctccgagaagcacaaagagaaggttttccacaccgaggacgaccagtactgctggcagcaccgcttcccaacaggctatttcagtatttgtgataggtatatgaatggcacctgcccagaaggaaacagctgtaaatttgcacatggaaatgccgaacttcatgaatgggaagaaagaagagatgccctaaagatgaagctcaacaaagcacgaaaagatcacttaattggcccaaatgataatgactttggaaaatatagttttttgtttaaagatttaaactaatatgctggcttttatgtatgatacctaatcagagcattgaccagaaaaattgaaagtgttctgaggcacatagcagaggagctgcagatttcctgcttgtattggcgtatatcgttcctcctgagcagcaacccacagtaggtaggaaaatgggctgtttcacaggcctggccacgctctcacggaaccactggcatcagatggtgaagtgactgctacccggttgccatctgttgaacagacttttggatgaagtgtgttggggaagaggataaggttatatctaggacaactctttgagttggtccttcatataagaatcgtgacggtaagagaataaacacttgtactgggatcagaatacatgatggatgaaattctttacatgttttagcagaatgaatttgtttaatataataaagtttgctacttatctgtatgtaggttgctaaaaaggattttcttaactcagattttaagccaaataaccatttaacactagtatttgttaaatggggtatttttctgtatttgtatgtttcactataataagggaattaaggataatgtgcattgagaatattttgaaaaataattgactcaaattttatttcttggtcttttgctgtttaaatgatgattttgaaagattaaacctgtactgttggtattgtgttagtgtatggaccaatactgcctgtaataaagattttatatatagatgcctttca

SEQ ID NO: 76613 - DNA, 495 bp, Homo sapiens
cagtcacgtatctagaaagcacgagtgccttgattactcatgatagacctcagccacgcgtgcactgttcccagcaggcttgacgcgcaatcaggttccttgaacattctcaggcactgataaagctgcttaggtagttgctcaaaaacatggataataatgcttcttttgcttaaatgtaaaaattaggccgttttactaggtgtactttgtcttaatcatattcctatttttttatacagctgtgcaaccatattgcttctgggaaaaaatgtcaatatgtgggaaactgttcctttgctcatagtcctgaggaaagagaagtttggacttacatgaaggagaatgggagtaagttaatcttttagctgtgtccttgagctagcttgcctgaaagttcttttcctctctataaatatgccagcttcctgtgaacacagaaagcagtttgcattctaaacggttgccccgtttcatcagtagctctgttggcga

SEQ ID NO: 76614 - DNA, 3539 bp, Homo sapiens
gtatatttgcgtgctctcgtgagaaatctttttaatgaaggaaatgacgtttatcgggaacatgattggaacaactcgataagccagtacacggaagccttgaatatagctgattatgcaaaatctgaagaaattttaatccccaaagaaataattgaaaaactatatataaatcgtattgcctgctattctaatatgggtttccatgataaagttttggaggactgcaatatagtcctcagtttaaatgccagtaactgcaaagctctgtatcggaaatctaaggctttaagtgatttaggaagatacaaaaaggcttacgatgctgtagcaaagtgctccttagcagtgcctcaggatgagcatgtaataaaactaactcaagaactagctcagaaattgggatttaaaataagaaaagcgtatgtcagagctgagctctcattaaaatcagttcctggggatggggctaccaaggctttgaaccattctgtggaagatattgagccagatttattaactccaaggcaagaagcagttcctgttgtctctttaccggcacccagtttttctcatgaagttggaagtgagctggcctcagttcctgttatgcccttaacttctattttgccactacaagtggaagagagcgctctgccatctgcagtgctggcaaatggaggaaagatgcccttcactatgccagaagcttttctagatgatggagatatggtccttggagatgaactagatgacctgcttgattctgcacctgaaactaatgaaactgttatgccgtcagctttagtcagaggaccccttcagacagccagtgtctctcctagcatgcccttttcggcatcgctgttaggaaccttacccattggtgcgaggtatgctcctccaccctccttctcagaattttatccacctttgacttcatccttagaagatttttgttcttctttaaattcattttcaatgagtgaatccaaacgagatctgtccacctcaacttctagagagggaacaccgcttaacaacagtaattcttcccttttacttatgaatggaccaggtagtttgtttgcttcagagaatttcctgggaatttcaagtcagcctagaaatgactttggaaacttttttggaagtgcagttaccaaaccatcttcatcagtgactccaagacatcccctcgaaggaacccatgaattgagacaagcttgccagatctgttttgtaaaatcaggccctaagttaatggatttcacttaccatgctaacatagatcataagtgtaagaaagatattttaatcggtaggataaagaatgttgaagataaatcatggaaaaaaatacgtccaagaccaacaaaaacaaattatgaaggaccatattatatatgtaaagatgttgctgctgaggaggaatgtagatattcaggccactgcacgtttgcttattgccaagaggagatagatgtgtggacactggagcggaaaggagcattcagccgggaggctttctttggcggcaatggaaagattaaccttactgtgttcaaacttctccaggagcatcttggggaatttatattcctttgtgagaaatgttttgatcataagcctagaatgataagtaaaagaaataaagataattctactgcttgttctcacccggttacaaagcatgagtttgaagacaataagtgccttgtccacattttgcgagagacaacagtaaaatactccaaaatacgttcttttcatggtcagtgtcagcttgatttatgtcgacatgaagttcggtatggctgtttaagggaagatgagtgcttttatgcccatagtcttgtggaactgaaagtctggataatgcaaaatgaaacaggtatctcacatgatgctattgctcaagagtctaaacgatattggcagaatttggaagcaaatgtacctggagcgcaggtacttggtaatcaaataatgcctggatttcttaatatgaagataaagtttgtgtgcgcccagtgtctgagaaacggtcaagtcattgaaccagacaaaaacagaaaatattgtagtgcaaaagcaaggcattcgtggaccaaagaccggcgtgcgatgagagtgatgtctattgaacgtaagaagtggatgaacatccgtcctctccccacaaagaaacaaatgcctttacagtttgatctgtgcaaccatattgcttctgggaaaaaatgtcaatatgtgggaaactgttcctttgctcatagtcctgaggaaagagaagtttggacttacatgaaggagaatgggatacaagatatggagcaattttacgaactatggctcaagagtcaaaaaaatgaaaaaagtgaagacatagccagtcagtcaaacaaggaaaatggaaaacaaattcacatgccaacagattatgctgaagttacagtggactttcactgctggatgtgtgggaaaaactgcaacagtgagaagcagtggcagggccacatctcctccgagaagcacaaagagaaggttttccacaccgaggacgaccagtactgctggcagcaccgcttcccaacaggctatttcagtatttgtgataggtatatgaatggcacctgcccagaaggaaacagctgtaaatttgcacatggaaatgccgaacttcatgaatgggaagaaagaagagatgccctaaagatgaagctcaacaaagcacgaaaagatcacttaattggcccaaatgataatgactttggaaaatatagttttttgtttaaagatttaaactaatatgctggcttttatgtatgatacctaatcagagcattgaccagaaaaattgaaagtgttctgaggcacatagcagaggagctgcagatttcctgcttgtattggcgtatatcgttcctcctgagcagcaacccacagtaggtaggaaaatgggctgtttcacaggcctggccacgctctcacggaaccactggcatcagatggtgaagtgactgctacccggttgccatctgttgaacagacttttggatgaagtgtgttggggaagaggataaggttatatctaggacaactctttgagttggtccttcatataagaatcgtgacggtaagagaataaacacttgtactgggatcagaatacatgatggatgaaattctttacatgttttagcagaatgaatttgtttaatataataaagtttgctacttatctgtatgtaggttgctaaaaaggattttcttaactcagattttaagccaaataaccatttaacactagtatttgttaaatggggtatttttctgtatttgtatgtttcactataataagggaattaaggataatgtgcattgagaatattttgaaaaataattgactcaaattttatttcttggtcttttgctgtttaaatgatgattttgaaagattaaacctgtactgttggtattgtgttagtgtatggaccaatactgcctgtaataaagattttatatatagatgcctttca

SEQ ID NO: 76615 - DNA, 3477 bp, Homo sapiens
gtatatttgcgtgctctcgtgagaaatctttttaatgaaggaaatgacgtttatcgggaacatgattggaacaactcgataagccagtacacggaagccttgaatatagctgattatgcaaaatctgaagaaattttaatccccaaagaaataattgaaaaactatatataaatcgtattgcctgctattctaatatgggtttccatgataaagttttggaggactgcaatatagtcctcagtttaaatgccagtaactgcaaagctctgtatcggaaatctaaggctttaagtgatttaggaagatacaaaaaggcttacgatgctgtagcaaagtgctccttagcagtgcctcaggatgagcatgtaataaaactaactcaagaactagctcagaaattgggatttaaaataagaaaagcgtatgtcagagctgagctctcattaaaatcagttcctggggatggggctaccaaggctttgaaccattctgtggaagatattgagccagatttattaactccaaggcaagaagcagttcctgttgtctctttaccggcacccagtttttctcatgaagttggaagtgagctggcctcagttcctgttatgcccttaacttctattttgccactacaagtggaagagagcgctctgccatctgcagtgctggcaaatggaggaaagatgcccttcactatgccagaagcttttctagatgatggagatatggtccttggagatgaactagatgacctgcttgattctgcacctgaaactaatgaaactgttatgccgtcagctttagtcagaggaccccttcagacagccagtgtctctcctagcatgcccttttcggcatcgctgttaggaaccttacccattggtgcgaggtatgctcctccaccctccttctcagaattttatccacctttgacttcatccttagaagatttttgttcttctttaaattcattttcaatgagtgaatccaaacgagatctgtccacctcaacttctagagagggaacaccgcttaacaacagtaattcttcccttttacttatgaatggaccaggtagtttgtttgcttcagagaatttcctgggaatttcaagtcagcctagaaatgactttggaaacttttttggaagtgcagttaccaaaccatcttcatcagtgactccaagacatcccctcgaaggaacccatgaattgagacaagcttgccagatctgttttgtaaaatcaggccctaagttaatggatttcacttaccatgctaacatagatcataagtgtaagaaagatattttaatcggtaggataaagaatgttgaagataaatcatggaaaaaaatacgtccaagaccaacaaaaacaaattatgaaggaccatattatatatgtaaagatgttgctgctgaggaggaatgtagatattcaggccactgcacgtttgcttattgccaagaggagatagatgtgtggacactggagcggaaaggagcattcagccgggaggctttctttggcggcaatggaaagattaaccttactgtgttcaaacttctccaggagcatcttggggaatttatattcctttgtgagaaatgttttgatcataagcctagaatgataagtaaaagaaataaagataattctactgcttgttctcacccggttacaaagcatgagtttgaagacaataagtgccttgtccacattttgcgagagacaacagtaaaatactccaaaatacgttcttttcatggtcagtgtcagcttgatttatgtcgacatgaagttcggtatggctgtttaagggaagatgagtgcttttatgcccatagtcttgtggaactgaaagtctggataatgcaaaatgaaacaggtatctcacatgatgctattgctcaagagtctaaacgatattggcagaatttggaagcaaatgtacctggagcgcaggtacttggtaatcaaataatgcctggatttcttaatatgaagataaagtttgtgtgcgcccagtgtctgagaaacggtcaagtcattgaaccagacaaaaacagaaaatattgtagtgcaaaagcaaggcattcgtggaccaaagaccggcgtgcgatgagagtgatgtctattgaacctgtgcaaccatattgcttctgggaaaaaatgtcaatatgtgggaaactgttcctttgctcatagtcctgaggaaagagaagtttggacttacatgaaggagaatgggatacaagatatggagcaattttacgaactatggctcaagagtcaaaaaaatgaaaaaagtgaagacatagccagtcagtcaaacaaggaaaatggaaaacaaattcacatgccaacagattatgctgaagttacagtggactttcactgctggatgtgtgggaaaaactgcaacagtgagaagcagtggcagggccacatctcctccgagaagcacaaagagaaggttttccacaccgaggacgaccagtactgctggcagcaccgcttcccaacaggctatttcagtatttgtgataggtatatgaatggcacctgcccagaaggaaacagctgtaaatttgcacatggaaatgccgaacttcatgaatgggaagaaagaagagatgccctaaagatgaagctcaacaaagcacgaaaagatcacttaattggcccaaatgataatgactttggaaaatatagttttttgtttaaagatttaaactaatatgctggcttttatgtatgatacctaatcagagcattgaccagaaaaattgaaagtgttctgaggcacatagcagaggagctgcagatttcctgcttgtattggcgtatatcgttcctcctgagcagcaacccacagtaggtaggaaaatgggctgtttcacaggcctggccacgctctcacggaaccactggcatcagatggtgaagtgactgctacccggttgccatctgttgaacagacttttggatgaagtgtgttggggaagaggataaggttatatctaggacaactctttgagttggtccttcatataagaatcgtgacggtaagagaataaacacttgtactgggatcagaatacatgatggatgaaattctttacatgttttagcagaatgaatttgtttaatataataaagtttgctacttatctgtatgtaggttgctaaaaaggattttcttaactcagattttaagccaaataaccatttaacactagtatttgttaaatggggtatttttctgtatttgtatgtttcactataataagggaattaaggataatgtgcattgagaatattttgaaaaataattgactcaaattttatttcttggtcttttgctgtttaaatgatgattttgaaagattaaacctgtactgttggtattgtgttagtgtatggaccaatactgcctgtaataaagattttatatatagatgcctttca

SEQ ID NO: 76616 - DNA, 2455 bp, Homo sapiens
ttgttggctgttttttttttttttcttcttatttttcttgcagatgaatggaccaggtagtttgtttgcttcagagaatttcctgggaatttcaagtcagcctagaaatgactttggaaacttttttggaagtgcagttaccaaaccatcttcatcagtgactccaagacatcccctcgaaggaacccatgaattgagacaagcttgccagatctgttttgtaaaatcaggccctaagttaatggatttcacttaccatgctaacatagatcataagtgtaagaaagatattttaatcggtaggataaagaatgttgaagataaatcatggaaaaaaatacgtccaagaccaacaaaaacaaattatgaaggaccatattatatatgtaaagatgttgctgctgaggaggaatgtagatattcaggccactgcacgtttgcttattgccaagaggagatagatgtgtggacactggagcggaaaggagcattcagccgggaggctttctttggcggcaatggaaagattaaccttactgtgttcaaacttctccaggagcatcttggggaatttatattcctttgtgagaaatgttttgatcataagcctagaatgataagtaaaagaaataaagataattctactgcttgttctcacccggttacaaagcatgagtttgaagacaataagtgccttgtccacattttgcgagagacaacagtaaaatactccaaaatacgttcttttcatggtcagtgtcagcttgatttatgtcgacatgaagttcggtatggctgtttaagggaagatgagtgcttttatgcccatagtcttgtggaactgaaagtctggataatgcaaaatgaaacaggtatctcacatgatgctattgctcaagagtctaaacgatattggcagaatttggaagcaaatgtacctggagcgcaggtacttggtaatcaaataatgcctggatttcttaatatgaagataaagtttgtgtgcgcccagtgtctgagaaacggtcaagtcattgaaccagacaaaaacagaaaatattgtagtgcaaaagcaaggcattcgtggaccaaagaccggcgtgcgatgagagtgatgtctattgaacctgtgcaaccatattgcttctgggaaaaaatgtcaatatgtgggaaactgttcctttgctcatagtcctgaggaaagagaagtttggacttacatgaaggagaatgggatacaagatatggagcaattttacgaactatggctcaagagtcaaaaaaatgaaaaaagtgaagacatagccagtcagtcaaacaaggaaaatggaaaacaaattcacatgccaacagattatgctgaagttacagtggactttcactgctggatgtgtgggaaaaactgcaacagtgagaagcagtggcagggccacatctcctccgagaagcacaaagagaaggttttccacaccgaggacgaccagtactgctggcagcaccgcttcccaacaggctatttcagtatttgtgataggtatatgaatggcacctgcccagaaggaaacagctgtaaatttgcacatggaaatgccgaacttcatgaatgggaagaaagaagagatgccctaaagatgaagctcaacaaagcacgaaaagatcacttaattggcccaaatgataatgactttggaaaatatagttttttgtttaaagatttaaactaatatgctggcttttatgtatgatacctaatcagagcattgaccagaaaaattgaaagtgttctgaggcacatagcagaggagctgcagatttcctgcttgtattggcgtatatcgttcctcctgagcagcaacccacagtaggtaggaaaatgggctgtttcacaggcctggccacgctctcacggaaccactggcatcagatggtgaagtgactgctacccggttgccatctgttgaacagacttttggatgaagtgtgttggggaagaggataaggttatatctaggacaactctttgagttggtccttcatataagaatcgtgacggtaagagaataaacacttgtactgggatcagaatacatgatggatgaaattctttacatgttttagcagaatgaatttgtttaatataataaagtttgctacttatctgtatgtaggttgctaaaaaggattttcttaactcagattttaagccaaataaccatttaacactagtatttgttaaatggggtatttttctgtatttgtatgtttcactataataagggaattaaggataatgtgcattgagaatattttgaaaaataattgactcaaattttatttcttggtcttttgctgtttaaatgatgattttgaaagattaaacctgtactgttggtattgtgttagtgtatggaccaatactgcctgtaataaagattttatatatagatgcctttca

SEQ ID NO: 76617 - DNA, 2471 bp, Homo sapiens
ttattctcaacttctagagagggaacgctgtccacgacagacagttgtccccgtcggcatgagtggagcaggtagttccctcgttcaagagaatttgcgtgcggccgcaagccgagcctagtaatgactttgaacacctacatgcaagagccgaccgaataccatatctatcagtcactcaagatcaacgcctgcaaggtacgcatgaaccaataccttagggcctgatctgttttgtaaaatcaggccctaagttaatggatttcacttaccatgctaacatagatcataagtgtaagaaagatattttaatcggtaggataaagaatgttgaagataaatcatggaaaaaaatacgtccaagaccaacaaaaacaaattatgaaggaccatattatatatgtaaagatgttgctgctgaggaggaatgtagatattcaggccactgcacgtttgcttattgccaagaggagatagatgtgtggacactggagcggaaaggagcattcagccgggaggctttctttggcggcaatggaaagattaaccttactgtgttcaaacttctccaggagcatcttggggaatttatattcctttgtgagaaatgttttgatcataagcctagaatgataagtaaaagaaataaagataattctactgcttgttctcacccggttacaaagcatgagtttgaagacaataagtgccttgtccacattttgcgagagacaacagtaaaatactccaaaatacgttcttttcatggtcagtgtcagcttgatttatgtcgacatgaagttcggtatggctgtttaagggaagatgagtgcttttatgcccatagtcttgtggaactgaaagtctggataatgcaaaatgaaacaggtatctcacatgatgctattgctcaagagtctaaacgatattggcagaatttggaagcaaatgtacctggagcgcaggtacttggtaatcaaataatgcctggatttcttaatatgaagataaagtttgtgtgcgcccagtgtctgagaaacggtcaagtcattgaaccagacaaaaacagaaaatattgtagtgcaaaagcaaggcattcgtggaccaaagaccggcgtgcgatgagagtgatgtctattgaacctgtgcaaccatattgcttctgggaaaaaatgtcaatatgtgggaaactgttcctttgctcatagtcctgaggaaagagaagtttggacttacatgaaggagaatgggatacaagatatggagcaattttacgaactatggctcaagagtcaaaaaaatgaaaaaagtgaagacatagccagtcagtcaaacaaggaaaatggaaaacaaattcacatgccaacagattatgctgaagttacagtggactttcactgctggatgtgtgggaaaaactgcaacagtgagaagcagtggcagggccacatctcctccgagaagcacaaagagaaggttttccacaccgaggacgaccagtactgctggcagcaccgcttcccaacaggctatttcagtatttgtgataggtatatgaatggcacctgcccagaaggaaacagctgtaaatttgcacatggaaatgccgaacttcatgaatgggaagaaagaagagatgccctaaagatgaagctcaacaaagcacgaaaagatcacttaattggcccaaatgataatgactttggaaaatatagttttttgtttaaagatttaaactaatatgctggcttttatgtatgatacctaatcagagcattgaccagaaaaattgaaagtgttctgaggcacatagcagaggagctgcagatttcctgcttgtattggcgtatatcgttcctcctgagcagcaacccacagtaggtaggaaaatgggctgtttcacaggcctggccacgctctcacggaaccactggcatcagatggtgaagtgactgctacccggttgccatctgttgaacagacttttggatgaagtgtgttggggaagaggataaggttatatctaggacaactctttgagttggtccttcatataagaatcgtgacggtaagagaataaacacttgtactgggatcagaatacatgatggatgaaattctttacatgttttagcagaatgaatttgtttaatataataaagtttgctacttatctgtatgtaggttgctaaaaaggattttcttaactcagattttaagccaaataaccatttaacactagtatttgttaaatggggtatttttctgtatttgtatgtttcactataataagggaattaaggataatgtgcattgagaatattttgaaaaataattgactcaaattttatttcttggtcttttgctgtttaaatgatgattttgaaagattaaacctgtactgttggtattgtgttagtgtatggaccaatactgcctgtaataaagattttatatatagatgcctttca

SEQ ID NO: 76618 - DNA, 1585 bp, Homo sapiens
gaagtgaaaatacagaatcataaggtatttcttttagaagcattgagaaaaaaattctctggttcctcaggtacaaactttgtgcctctccctttgtgttatgtcttttgctcgtgtgtctttgtttttttctgaactccatttttcttaggtggaccaaagaccggcgtgcgatgagagtgatgtctattgaacgtaagaagtggatgaacatccgtcctctccccacaaagaaacaaatgcctttacagtttgatctgtgcaaccatattgcttctgggaaaaaatgtcaatatgtgggaaactgttcctttgctcatagtcctgaggaaagagaagtttggacttacatgaaggagaatgggatacaagatatggagcaattttacgaactatggctcaagagtcaaaaaaatgaaaaaagtgaagacatagccagtcagtcaaacaaggaaaatggaaaacaaattcacatgccaacagattatgctgaagttacagtggactttcactgctggatgtgtgggaaaaactgcaacagtgagaagcagtggcagggccacatctcctccgagaagcacaaagagaaggttttccacaccgaggacgaccagtactgctggcagcaccgcttcccaacaggctatttcagtatttgtgataggtatatgaatggcacctgcccagaaggaaacagctgtaaatttgcacatggaaatgccgaacttcatgaatgggaagaaagaagagatgccctaaagatgaagctcaacaaagcacgaaaagatcacttaattggcccaaatgataatgactttggaaaatatagttttttgtttaaagatttaaactaatatgctggcttttatgtatgatacctaatcagagcattgaccagaaaaattgaaagtgttctgaggcacatagcagaggagctgcagatttcctgcttgtattggcgtatatcgttcctcctgagcagcaacccacagtaggtaggaaaatgggctgtttcacaggcctggccacgctctcacggaaccactggcatcagatggtgaagtgactgctacccggttgccatctgttgaacagacttttggatgaagtgtgttggggaagaggataaggttatatctaggacaactctttgagttggtccttcatataagaatcgtgacggtaagagaataaacacttgtactgggatcagaatacatgatggatgaaattctttacatgttttagcagaatgaatttgtttaatataataaagtttgctacttatctgtatgtaggttgctaaaaaggattttcttaactcagattttaagccaaataaccatttaacactagtatttgttaaatggggtatttttctgtatttgtatgtttcactataataagggaattaaggataatgtgcattgagaatattttgaaaaataattgactcaaattttatttcttggtcttttgctgtttaaatgatgattttgaaagattaaacctgtactgttggtattgtgttagtgtatggaccaatactgcctgtaataaagattttatatatagatgcctttca

SEQ ID NO: 76619 - DNA, 1438 bp, Homo sapiens
taatatttgccatctaacagtcctgaaagtagttcttatgcgtgagagtttacctgctgcttgaactgggtgatctctccatgtctaatataatagtctccttcagcccccttgagtttcttttgaactgtatgctgactgctacaaaatatgcacatagttgcatgtatttaaatggagtttagttgctgctgctgaaagtaattcatttttctttagtacaagatatggagcaattttacgaactatggctcaagagtcaaaaaaatgaaaaaagtgaagacatagccagtcagtcaaacaaggaaaatggaaaacaaattcacatgccaacagattatgctgaagttacagtggactttcactgctggatgtgtgggaaaaactgcaacagtgagaagcagtggcagggccacatctcctccgagaagcacaaagagaaggttttccacaccgaggacgaccagtactgctggcagcaccgcttcccaacaggctatttcagtatttgtgataggtatatgaatggcacctgcccagaaggaaacagctgtaaatttgcacatggaaatgccgaacttcatgaatgggaagaaagaagagatgccctaaagatgaagctcaacaaagcacgaaaagatcacttaattggcccaaatgataatgactttggaaaatatagttttttgtttaaagatttaaactaatatgctggcttttatgtatgatacctaatcagagcattgaccagaaaaattgaaagtgttctgaggcacatagcagaggagctgcagatttcctgcttgtattggcgtatatcgttcctcctgagcagcaacccacagtaggtaggaaaatgggctgtttcacaggcctggccacgctctcacggaaccactggcatcagatggtgaagtgactgctacccggttgccatctgttgaacagacttttggatgaagtgtgttggggaagaggataaggttatatctaggacaactctttgagttggtccttcatataagaatcgtgacggtaagagaataaacacttgtactgggatcagaatacatgatggatgaaattctttacatgttttagcagaatgaatttgtttaatataataaagtttgctacttatctgtatgtaggttgctaaaaaggattttcttaactcagattttaagccaaataaccatttaacactagtatttgttaaatggggtatttttctgtatttgtatgtttcactataataagggaattaaggataatgtgcattgagaatattttgaaaaataattgactcaaattttatttcttggtcttttgctgtttaaatgatgattttgaaagattaaacctgtactgttggtattgtgttagtgtatggaccaatactgcctgtaataaagattttatatatagatgcctttca

SEQ ID NO: 76620 - DNA, 979 bp, Homo sapiens
tgtggtatctagaggatccgtcgacggtaccaacaggctatttcagtatttgtgataggtatatgaatggcacctgcccagaaggaaacagctgtaaatttgcacatggaaatgccgaacttcatgaatgggaagaaagaagagatgccctaaagatgaagctcaacaaagcacgaaaagatcacttaattggcccaaatgataatgactttggaaaatatagttttttgtttaaagatttaaactaatatgctggcttttatgtatgatacctaatcagagcattgaccagaaaaattgaaagtgttctgaggcacatagcagaggagctgcagatttcctgcttgtattggcgtatatcgttcctcctgagcagcaacccacagtaggtaggaaaatgggctgtttcacaggcctggccacgctctcacggaaccactggcatcagatggtgaagtgactgctacccggttgccatctgttgaacagacttttggatgaagtgtgttggggaagaggataaggttatatctaggacaactctttgagttggtccttcatataagaatcgtgacggtaagagaataaacacttgtactgggatcagaatacatgatggatgaaattctttacatgttttagcagaatgaatttgtttaatataataaagtttgctacttatctgtatgtaggttgctaaaaaggattttcttaactcagattttaagccaaataaccatttaacactagtatttgttaaatggggtatttttctgtatttgtatgtttcactataataagggaattaaggataatgtgcattgagaatattttgaaaaataattgactcaaattttatttcttggtcttttgctgtttaaatgatgattttgaaagattaaacctgtactgttggtattgtgttagtgtatggaccaatactgcctgtaataaagattttatatatagatgcctttca

SEQ ID NO: 76621 - DNA, 3086 bp, Homo sapiens
  misc_feature (3053)..(3053): n is a, c, g, or t
gtatatttgcgtgctctcgtgagaaatctttttaatgaaggaaatgacgtttatcgggaacatgattggaacaactcgataagccagtacacggaagccttgaatatagctgattatgcaaaatctgaagaaattttaatccccaaagaaataattgaaaaactatatataaatcgtattgcctgctattctaatatgggtttccatgataaagttttggaggactgcaatatagtcctcagtttaaatgccagtaactgcaaagctctgtatcggaaatctaaggctttaagtgatttaggaagatacaaaaaggcttacgatgctgtagcaaagtgctccttagcagtgcctcaggatgagcatgtaataaaactaactcaagaactagctcagaaattgggatttaaaataagaaaagcgtatgtcagagctgagctctcattaaaatcagttcctggggatggggctaccaaggctttgaaccattctgtggaagatattgagccagatttattaactccaaggcaagaagcagttcctgttgtctctttaccggcacccagtttttctcatgaagttggaagtgagctggcctcagttcctgttatgcccttaacttctattttgccactacaagtggaagagagcgctctgccatctgcagtgctggcaaatggaggaaagatgcccttcactatgccagaagcttttctagatgatggagatatggtccttggagatgaactagatgacctgcttgattctgcacctgaaactaatgaaactgttatgccgtcagctttagtcagaggaccccttcagacagccagtgtctctcctagcatgcccttttcggcatcgctgttaggaaccttacccattggtgcgaggtatgctcctccaccctccttctcagaattttatccacctttgacttcatccttagaagatttttgttcttctttaaattcattttcaatgagtgaatccaaacgagatctgtccacctcaacttctagagagggaacaccgcttaacaacagtaattcttcccttttacttatgaatggaccaggtagtttgtttgcttcagagaatttcctgggaatttcaagtcagcctagaaatgactttggaaacttttttggaagtgcagttaccaaaccatcttcatcagtgactccaagacatcccctcgaaggaacccatgaattgagacaagcttgccagatctgttttgtaaaatcaggccctaagttaatggatttcacttaccatgctaacatagatcataagtgtaagaaagatattttaatcggtaggataaagaatgttgaagataaatcatggaaaaaaatacgtccaagaccaacaaaaacaaattatgaaggaccatattatatatgtaaagatgttgctgctgaggaggaatgtagatattcaggccactgcacgtttgcttattgccaagaggagatagatgtgtggacactggagcggaaaggagcattcagccgggaggctttctttggcggcaatggaaagattaaccttactgtgttcaaacttctccaggagcatcttggggaatttatattcctttgtgagaaatgttttgatcataagcctagaatgataagtaaaagaaataaagataattctactgcttgttctcacccggttacaaagcatgagtttgaagacaataagtgccttgtccacattttgcgagagacaacagtaaaatactccaaaatacgttcttttcatggtcagtgtcagcttgatttatgtcgacatgaagttcggtatggctgtttaagggaagatgagtgcttttatgcccatagtcttgtggaactgaaagtctggataatgcaaaatgaaacaggtatctcacatgatgctattgctcaagagtctaaacgatattggcagaatttggaagcaaatgtacctggagcgcaggtacttggtaatcaaataatgcctggatttcttaatatgaagataaagtttgtgtgcgcccagtgtctgagaaacggtcaagtcattgaaccagacaaaaacagaaaatattgtagtgcaaaagcaaggcattcgtggaccaaagaccggcgtgcgatgagagtgatgtctattgaacgtaagaagtggatgaacatccgtcctctccccacaaagaaacaaatgcctttacagtttgatctgtgcaaccatattgcttctgggaaaaaatgtcaatatgtgggaaactgttcctttgctcatagtcctgaggaaagagaagtttggacttacatgaaggagaatgggatacaagatatggagcaattttacgaactatggctcaagagtcaaaaaaatgaaaaaagtgaagacatagccagtcagtcaaacaaggaaaatggaaaacaaattcacatgccaacagattatgctgaagttacagtggactttcactgctggatgtgtgggaaaaactgcaacagtgagaagcagtggcagggccacatctcctccgagaagcacaaagagaaggttttccacaccgaggacgaccagtactgctggcagcaccgcttcccaacaggctatttcagtatttgtgataggtatatgaatggcacctgcccagaaggaaacagctgtaaatttgcacatggaaatgccgaacttcatgaatgggaagaaagaagagatgccctaaagatgaagctcaacaaagcacgaaaagatcacttaattggcccaaatgataatgactttggaaaatatagttttttgtttaaagatttaaactaatatgctggcttttatgtatgatacctaatcagagcattgaccagaaaaattgaaagtgttctgaggcacatagcagaggagctgcagatttcctgcttgtattggcgtatatcgttcctcctgagcagcaacccacagtaggtaggaaaatgggctgtttcacaggcctggccacgctctcacggaaccactggcatcagatggtgaagtgactgctacccgtccatctgtgacaactatgatgngttgttggtcctcacaggatcctgtagatacag

SEQ ID NO: 76622 - DNA, 1800 bp, Homo sapiens
gtatatttgcgtgctctcgtgagaaatctttttaatgaaggaaatgacgtttatcgggaacatgattggaacaactcgataagccagtacacggaagccttgaatatagctgattatgcaaaatctgaagaaattttaatccccaaagaaataattgaaaaactatatataaatcgtattgcctgctattctaatatgggtttccatgataaagttttggaggactgcaatatagtcctcagtttaaatgccagtaactgcaaagctctgtatcggaaatctaaggctttaagtgatttaggaagatacaaaaaggcttacgatgctgtagcaaagtgctccttagcagtgcctcaggatgagcatgtaataaaactaactcaagaactagctcagaaattgggatttaaaataagaaaagcgtatgtcagagctgagctctcattaaaatcagttcctggggatggggctaccaaggctttgaaccattctgtggaagatattgagccagatttattaactccaaggcaagaagcagttcctgttgtctctttaccggcacccagtttttctcatgaagttggaagtgagctggcctcagttcctgttatgcccttaacttctattttgccactacaagtggaagagagcgctctgccatctgcagtgctggcaaatggaggaaagatgcccttcactatgccagaagcttttctagatgatggagatatggtccttggagatgaactagatgacctgcttgattctgcacctgaaactaatgaaactgttatgccgtcagctttagtcagaggaccccttcagacagccagtgtctctcctagcatgcccttttcggcatcgctgttaggaaccttacccattggtgcgaggtatgctcctccaccctccttctcagaattttatccacctttgacttcatccttagaagatttttgttcttctttaaattcattttcaatgagtgaatccaaacgagatctgtccacctcaacttctagagagggaacaccgcttaacaacagtaattcttcccttttacttatgaatggaccaggtagtttgtttgcttcagagaatttcctgggaatttcaagtcagcctagaaatgactttggaaacttttttggaagtgcagttaccaaaccatcttcatcagtgactccaagacatcccctcgaaggaacccatgaattgagacaagcttgccagatctgttttgtaaaatcaggccctaagttaatggatttcacttaccatgctaacatagatcataagtgtaagaaagatattttaatcggtaggataaagaatgttgaagataaatcatggaaaaaaatacgtccaagaccaacaaaaacaaattatgaaggaccatattatatatgtaaagatgttgctgctgaggaggaatgtagatattcaggccactgcacgtttgcttattgccaagaggagatagatgtgtggacactggagcggaaaggagcattcagccgggaggctttctttggcggcaatggaaagattaaccttactgtgttcaaacttctccaggagcatcttggggaatttatattcctttgtgagaaatgttttgatcataagcctagaatgataagtaaaagaaataaagataattctactgcttgttctcacccggttacaaagcatgagtttgaagacaataagtatgttgatagtttctaatttctgtaatgacaaaatagattctttttctagatctgaataaaaactagtagtaatgtctgtccaggc

SEQ ID NO: 76623 - DNA, 516 bp, Homo sapiens
gtatatttgcgtgctctcgtgagaaatctttttaatgaaggaaatgacgtttatcgggaacatgattggaacaactcgataagccagtacacggaagccttgaatatagctgattatgcaaaatctgaagaaattttaatccccaaagaaataattgaaaaactatatataaatcgtattgcctgctattctaatatgggtttccatgataaagttttggaggactgcaatatagtcctcagtttaaatgccagtaactgcaaagctctgtatcggaaatctaaggctttaagtgatttaggaagatacaaaaaggcttacgatgctgtagcaaagtgctccttagcagtgcctcaggatgagcatgtaataaaactaactcaagaactagctcagaaattgggatttaaaataagaaaagcgtatgtcagagctgagctctcattaaaatcagttcctggggatggggctaccaaggatgctaatggctattgtgagttgggcaatgattggtgg

SEQ ID NO: 76624 - DNA, 343 bp, Homo sapiens
ttttgagtgtgttctcatgtcattaattactgatacaagttgatacatgcaattgttgggaggaaagattcctcagaaggcacaaagagctgtatttgtgtatattccatttcaaaaaagagaaacgtggtattcatccttgctgatggattaggaggtatgagaatagattggaagctgaaggttctccacgtctgactgcacccagattggtgggctgttgttcttatagatataatttaaaggaaggcttgtacattccccaggtatctcacatgatgctattgctcaagagtctaaacgatattggcagaatttggaagcaaatgtacctggagcgcag

SEQ ID NO: 76625 - DNA, 252 bp, Homo sapiens
tctgctctatgtggtcagtcaggaactcaggactctaccatcttttgtcattgtcaacttcaacctgtgatctttcagctctccactgaaggaggagagaaggaccacctgttctcagctacttcagctggaagtgacccatcagttctccttacacacctctgctttactgagacacaatgggactggggaatacagtttaacaatgtgtccaggaaaaggaaatgggactggtgagcatctagaatggtt

SEQ ID NO: 76626 - DNA, 642 bp, Homo sapiens
agaccctgtctcaaaaaaataaataaataaaaaacaacaaaaaaataaaataaaagcagctagttcagcttgcaattcaaacaagtgcacacgtactttccctcaaggccacacccatcacacttcaggcccagcagcagtgctgtgtgcacacctcccatgctgtctcacagaatattaaaaggcaagggttgagatttaatcacatcaacagttttattatttcaagaccattcttaagtgatatgagcctttttcaccccctgtgagtaggtgacagtaaagaatgcagtggctactggcagattctggtaccacagcctggaatcacgtgacggtgccggcaatttcacccatcattgcttttcaccatcaggcaaatgtcaacagcacaagagactcacaccgtatgattatgaaaatagttttgatcccgaggacccccttgagaaccgctgccctaacaaatgcctcgcatggtcgcggctcctttcagagcacggcggcacctcggaatgaagccgttcctccatcaactctgcagccagccaaccgggattgtttaaatacttctgaagctcacatgaaagctaaggctcttcagaatacatcttctgacttttcctcagaaacacaaggccc

SEQ ID NO: 76627 - DNA, 361 bp, Homo sapiens
cttcagatccaaatagcctgaaggttgttaaaatacagatagtgagccaccgcacccggccctttataaattctttgggcttagatgtctgtcatatagttttgtgtcatctgtagcaagcaccagctgtaattttggtttggtattggatatacctcagctggtttgtagagtcatttaaatacttcagactatttttctcattcattttatttagtaaacattgtttataaagtgctgggtaaaacataaaggtgactaaaatacagtttcttcccttgagagatttctagtgtggtggaatctgtgagctacacacatggccaagtgtgcaaggggctattgcaggggcacagacttg

SEQ ID NO: 76628 - DNA, 529 bp, Homo sapiens
gtcatatttgtaaaggactttaaaacacccaaatggagggccatttggtgatctacctccagaatcataatgaaaaccatcaccatgaactgagtttctactgtacaccacaaaccatattctcatctgttcccatcctaaaactcccactggaccagctgggaacctgacagctgctgcactgttggttccacttgcctgctgccgtcttctaggagcagaaagtcatgtgacccgggcctggctactgtgattggctctgtgatgagcacatgacaaagctgggccaatcagaatcttccctgagactttttttgccagataggaaaagactccccaaccctaccgttgctaagctggggcccattgggaacacatatggaaggtgcctgagaaatataagaagcccccaaagatatgcagtccctatgacaatgcttgagccttagatgcacctgtagaggaagccagatctacttcctggatttgacagttacaggaatagtaaattcttttactgcttaagcca

SEQ ID NO: 76629 - DNA, 464 bp, Homo sapiens
ggaagaacaaggaaatgacagtggctggagcagagtggggaatggaaggagtagtaagagctgaagtcagacaggcaacgagagactaaattatgaagggctttgaaggccattgctgggactgatctgaaggccttgagcagaaaggtggccccgcctaccccaccaaccccagcttctctggttcctcccttggtaacggaatgcatgcttattgctgttgtttgaatgcactcaaacatttcccttttatggccttcacactggcttttacctctccttggaatcctcttccccccagatctttatcccttgcctcgccccttcacattacttacgtctctgctcaatggatcttctctgaccacagatttgaaaatagcacgctacctcccttctatgttgactagggtcctactaggaaaacaggaaccacactgcgcattttcataagataaagttta

SEQ ID NO: 76630 - DNA, 359 bp, Homo sapiens
attctcctctgttctcttgatgtgtagggaaatttgaagaatgactctgataaaaatctaaaagagaaacatcgaatcctaactggctgtgtgaccctaaaaccttactccgtctctttgaacctcagatttctcagggcttggcacatagcaagcatttcatactcagaagctggtactattactgttgtgttttgtggggggaggtttgtttgttttgtttggagacaggatctggctttgttgccctggctggagtgaagtggcgccatcatagctcactgcagcctcgccctcctgggctccagcgatcctcctgcctcagtctcccgagtagctgggaccacctgcgcatgccg

SEQ ID NO: 76631 - DNA, 274 bp, Homo sapiens
caaggcctcttccaccctccagagaagagccctgaaatgacccacgcaggcacatacaatcaggggtctggaaacaagaccaagacggacgcacatctatttgcccaaataaattaagtagcattctgaacatgatgaatagtttggcaggaaaaaaacgttccagtaaatgcacgggctgacccaaaatggtccctccactggaatatggaaaatgaaaaaagatattgttttggctctagcctataaggcattaataaacaattggcatcta

SEQ ID NO: 76632 - DNA, 203 bp, Homo sapiens
ttttttttttcagagacaggatctcgctctatcacccaggctggagtacagtggcacaaatagtagctcactgtaacctcaagcttaggctcaagcaatcctcctgtcttggcctcctaaagtgctgggactacgggtgtgagccaccatacctagcctacttttaaattttctagaagtcacattttaaaaagacttttaaa

SEQ ID NO: 76633 - DNA, 724 bp, Homo sapiens
gattcacaaataaacgcagcgggatctgagaaggggcctgagtacacgggccgggggagaaagggaagtggcaacccctagttcaaaatgcaaacgacctctggaatttcgggaagagacggaggagtgagtttggattgagcccaccctgtgggggaggggaagcccaggcttgagaagcaaagctcgcgtttattgaccacctactaagtgctaaatccttctgcatttgttctcactttgaagagtaaaggctacccctgccaggtttccagtcttgggctggctccgagaagggcctaggctttgaagcgcttttaaattgtcctctggccctgggtggccagggaaggttcccgggggtgcagccaaatacacatcgccggcaaactgattaaccctgaaagtggcgccgaggcccggtctgtggctcttggtgttcccctccccctcacccctcttgggggagccagacggccacccccaggggaggaggggcccggccgagcctcgccgcgacttttgcgagatagcgcggcgacatggccacacaatggagcccgcaggcgggagtgcggggcggggcgcggcgccctggccttgcgcgcttacggggtcctctccagggccctctggggcctctgacttaaaatagggaggactgggccaggagatcgagacaatcctggccaacctgttgaaaccccgcctctactaaaataca

SEQ ID NO: 76634 - DNA, 423 bp, Homo sapiens
gattcacaaataaacgcagcgggatctgagaaggggcctgagtacacgggccgggggagaaagggaagtggcaacccctagttcaaaatgcaaacgacctctggaatttcgggaagagacggaggagtgagtttggattgagcccacccttcacccctcttgggggagccagacggccacccccaggggaggaggggcccggccgagcctcgccgcgacttttgcgagatagcgcggcgacatggccacacaatggagcccgcaggcgggagtgcggggcggggcgcggcgccctggccttgcgcgcttacggggtcctctccagggccctctggggcctctgacttaaaatagggaggactgggccaggagatcgagacaatcctggccaacctgttgaaaccccgcctctactaaaataca

SEQ ID NO: 76635 - DNA, 729 bp, Homo sapiens
tcaggccctgcttttttgtatcaacccgaagggaactttccaaatgtaaaaaccatgtggctcatttacatagtgactgaaaccatctttcatggaaactccctgtgtaacaaacagaattatcgttactagttttcagaggtttgaatggccaacgtttgtactcataaaaagagagaaatgatttcactctggggaaacagtaagggttaagagaatgcatccttaccaggactatctaagccgctaaatataattgtatttgcactaaacttgttgccaattaagattaaatattagcctttaagtactctatatctaacatgaagtgctcctttttaattgcttttgaagggaccgataacttgtgagttcatggagtgagaaaatggctagtctataaacgtcagtagagcatcaagatttcagaataagttcaaagagggctgaaatacatgttcaagtggaaattgttaattttttatgggaatgttttcatgagatgtgacaatgatgctgtattttaagtctttttgtgtttcttctggttatttgcccccattaaaagatcaatagatctttataatttattatacttatgctgattactgttttcttctttacaaaattatgtctcagcgagtgccaaatattattgtttctttgattttttactttataattttgctgaaataaatacatctcttctactagaaaaataagcataat

SEQ ID NO: 76636 - DNA, 783 bp, Homo sapiens
aggcagacttatttacagaaatgaggaaagtgtgagaggatggagatgcccaagaggaagtgatcagcaaaatcacactagagaaactctcagacatattttatgacattaaaagctccaggaatgagaaatatcaggggcatatctactcttaagaagaaagaagtatgagaattcaccaagacatagaaatattatgaataagttatgtgatgagaagatttatttatctcaggcttagtgctggagaagtcaacaacctagaaatgccaaggaacacaagttaaaaagctgatgaaaagcctgctctctccagcttaatgaccaagaaaggggcagccaagaaaaacataaggcttttagacaacaaccaccctattccatggaataccactgttgcagtcccactcccactcctgtaagcaaaagctgagtggagaacctagacttccacctttcatcttcaccaggccgtaacaagacactgttaaagacaaaataatatttaataacacttgttaacgcatggttgggaagactgtattcaggatcattacatgatcccattgcatggacaagccaaggagtagagcagggtcagtggatggaaaattactaagaggaaacatgaggtgtaagaaggattctggccaaaccaacctaacagggcttacatcacttagagaatagtggaggatgagggactggatcagacatcaaagatgatcagatattaaggatagaggtttttgctagcaaaatgtagatttttgctaaaactat

SEQ ID NO: 76637 - DNA, 274 bp, Homo sapiens
gttcctgcttgttagaagagtgtacaagagcagtagctgctaaagaacgtcttccacaccattgtgtgtttggggcaggctgaatagtcccatccacaccaaagaagtccataccgtaactcagaacctgtgaatacatgacctcagatggcaggagggactttgcagatgggatcaaggatcttgagatgggtggatgatcctggagtatccaggtggccccatgtcatcacaaaggttcttttaggaaggaggcaggtcaaagagagacaat

SEQ ID NO: 76638 - DNA, 516 bp, Homo sapiens
ctgaaactgcggctagtaccaaaccctatccatactgtttttccacctggtaactgagtgactactaagtgactaacatggatatgctggataaaggaatgatgcacagcccgggcgggacggaatgggatggcgtgaggttgcaccatgctacttagaacagtgctcaatttaaaacttaggaactgtttacttctgcagttttttatttaatatttttggaccacagttaactgcgagtaactgttaaacttcagaaagtaaaaccatgggtaagagagactactgtatatctttccataccattatcttagctcttacaaacctatatgtgcatattatcataattattatcataatatgtgtgataggcacattattctgcaacttgctttttcccttgataatacactataggcatgcagtggtctgcaaccctgtctatgtattaaaatcatctaggtactttaaaaatactgattcccaggtctccacagattttcctgcccataggtg

SEQ ID NO: 76639 - DNA, 431 bp, Homo sapiens
cccagatgtggttctcaaccttctaggctaagaaaccgatgacacccaccttccaggaatgggacctcctcctctcaaggacagactcacttaaccacatttgtgaaataaaaaaggacagtttacaaatgtatagtactgtatatatccaattgtcataaatatcccaacacaacaagctctgtcactaaaatcataatcgaactataaatgtattaatttacagcgagaataacttttccagaaactagatatttcagagtttcaatactgagctttgtggtttttttttttttttttttttttttttggcatattgacttagaaagccaaggaataatgcaaaggttttctagtgagcgttgaatctgatcaaagtaaaacggatgaaacaaatgtacaatggaagttcttgccaatgaccccaaatc

SEQ ID NO: 76640 - DNA, 190 bp, Homo sapiens
aaaggttagctgaagcttgttttcctggcaacagagcagagttctgagagagcgtgagtatgcaaggcctcttgaggcccaagcctaggttcagaacaggaatcacttctgatatactctattggccaaagttagtcccaagtccagatccaggcttgctcaaaacagtggcccatctctctggccccaa

SEQ ID NO: 76641 - DNA, 430 bp, Homo sapiens
cagggacagcgctcagcagccgcgccgcatcccgcgcccgatcggccgccgcgtcagcaccacggacagctcctggagcagccccagcggggccctggcagcagggctcacacaccccagtcgccccacaagcatctggggacacaaggggccgtgactgacaaggagaaggagcgtcccccgagttgctgcgctgctgccggagccctccttcagcacaaatccccctccgccctcggcaagggcgtcctgagcaggagacctgagaatgagaccgtgctgcaccagttctgctgcccagccgccgacgcctgctccgacctggcctcccaaagtgatggctcctgcacccaggccggtgggggcatggaggactccgtggtggcagcggcggcggtggcagccggcagacccagtgcccatgccccga

SEQ ID NO: 76642 - DNA, 450 bp, Homo sapiens
tagggtgctattcttaatcatatactaagtaagtattttacatacatatagactgtgtttatttggtcactacattttgttaatgggtaaaagaccatatattaagctactttgttatttacatctatatctgttattaatctgatagctaggaagttgtatttagtaagaatctaattaggtttgcttttatcttataattgggattcctttatgctctatagtgttaatgtgtacagtgtttattagaggcttaaatgatacttctttaagcatccagtttttattttattaaaaaatcttagtgtttctttacaggttagttttgtattcttttttaatattttaagacattgccttcctatttaataatgtgctattcgtataataatctgtttttattacatagacatttgtgttatttaataaagtatattgtgttatatccct

SEQ ID NO: 76643 - DNA, 1128 bp, Homo sapiens
ggctgtggctttgccctttggcctttgctggctgtgtggcggctccgcggttcgcaggtcgttcgctgagcgtctctgcttagccgcggtcatgagccggcacagccggctgcagaggcaggttctgagcctgtaccgcgatctgctgcgcgccgggcgtgggaagccgggcgccgaggcgcgagtgcgggcagagttccggcagcatgcgggcctgccgcggtccgacgtgctgcgcatcgagtacctgtaccgccgcgggcggcgccagctgcagctgctacgctcgggccacgccaccgccatgggcgccttcgtacgcccgcgggccccgaccggggagcctggcggcgtgggttcccagcctgacgacggcgacagtccaaggaacccccacgacagcacgggggcaccggagacccgccccgacggacggtgacaggcgaagagccgaactcgctcgatggcgtggtggagccaggaggctcgcctgactgcatggggggactggggaacccgcctaaggtgagaggtcttaagagactagcttgacgaattggggatgtcagagactcctccttggcgacgcagggggcctagagagccccgtgatggacggcaagggaggcccgccttttccgatgcttggagacaggtcggtgctcctcccccatgagggcttggggcggcctgggacgctggcgggctggacagtgtcaagccaagagctacttgcccgaaggtacggggagccaggacgacccccggtggacagggagagcctgagacgcccttctcttgacccctgagaacatacccacttctggctcctcaaggagtctcccctctcctgtatttaactctgagaagtgcagactttttgctgagaacgttttgggaaggtgccctgatgagcggtgagaagcccggaatccccttctggaaaactttcccccattaattgtgacaagccaggaccatgaggaaggggtaggggtctatcaccctggttgatcaactgaagacccccaaaggcccctacttgatggttttgaggggcaacattgactcatttgccccttccctctcggaatgttggacaaagggaataaaattggggatatgtct

SEQ ID NO: 76644 - DNA, 3340 bp, Homo sapiens
gggggcggggctccgagccgggctgaggcgagcgggggcgcgggtggcgcggcgggacgcgagcggcgagccggagcgcggagcccggctcccgcaccatggaggaggacgacagctacgttcccagtgacctgacagcagaggagcgtcaagaactggagaacatccgacggagaaaacaggagctgctggctgacattcagaggctgaaggatgagatagcagaagtagctaatgaaattgaaaacctgggatccacagaggaaaggaaaaacatgcagaggaacaaacaggtagccatgggcaggaaaaaatttaatatggaccctaaaaaggggatccagttcttaatagagaacgacctcctgaagaacacttgtgaagacattgcccagttcttatataaaggcgaagggctcaacaagacagccatcggcgactacctaggggagagagatgagtttaatatccaggttcttcatgcatttgtggagctgcatgagttcactgatcttaatctcgtccaggcactacggcagttcctgtggagcttccggctacccggagaggcccagaagatcgaccggatgatggaggcgtttgcccagcgatattgtcagtgcaataatggcgtgttccagtccacggatacttgttacgtcctctcctttgccatcatcatgttgaacaccagtctgcacaaccccaatgtcaaagataagcccactgtggagaggttcattgccatgaaccgaggcatcaatgatgggggagacctgccggaggagctcctccggaatctctatgagagcataaaaaatgaaccctttaaaatcccagaagacgacgggaatgacctcactcacactttcttcaatccagaccgagaaggctggctattgaaactcggaggtggcagggtaaagacttggaagagacgctggttcattctgactgacaactgcctttactactttgagtataccacggataaggagccccgtggaatcatccctttagagaatctgagtatccgggaagtggaggactccaaaaaaccaaactgctttgagctttatatccccgacaataaagaccaagttatcaaggcctgcaagaccgaggctgacgggcgggtggtggaggggaaccacactgtttaccggatctcagctccgacgcccgaggagaaggaggagtggattaagtgcattaaagcagccatcagcagggaccctttctacgaaatgctcgcagcacggaaaaagaaggtctcctccacgaagcgacactgagcgtgcagccaagggcgttggtctgcgggggccttggagctcctgctcttctcccgcacctccatggatgcactgctgccgagcagagcgtcctctgccaggccccgccctggattcctagagactagcttcagcttttgctattttttttaagtgggagaagggtgggcagttatcactggggaagagaggaccggccacctgtccagcatgggctccagagccttcctctctcacagggcagagctcttgtcggcagggcagcctcctggccagtttctctgctcagtgttctggtagcagagctcagagccaactgtttacctcttggttgtccccgtgaagaagccttcaaaccctgcaccataaatacatgtgtccatatattattatatgttaagagaaaaaggtggaaaggaagagaagccacatactataaagatctattttttttttttaagagagaacgtagggctgttcaggtgcattctgccctggctgcgctggggagcttctccctggagaagagcacctggggctgcggccaaggggcatcagcctgggcccgcggcagggcctggcctgcctctcctgtgctgtgggagctcgctgcctggtgcttgtcttggcgagatggacaggtgaggtcgaggacgcagagggcagaggcccagtggagcctcagacggcacagtcagagtcgggggcctgcctggccggggtcgcagtcggcagcagcgtgcagtccggcatctcccgcggatgcttttccatcccaagtgcctgcggagcccgaggagaggagagagctgactggacgcttacgttattttcctccttcagaatccaagttcttgttgggctttaaagtagaaagtcagcattttccttgagctaaatacctaataaccaaaactgtgaggaaggttatcgggacagaggttccggataacctgtttcattttgggttttcttcctcttccccagactccagtcctcgttctagaggaaggagtaggacttccccgatccccgtagcttcagctttttctgcctcaaaaccagccctaactggactactctggatgcattttgtggtgggccccctagagggaagatgggcctttatctgctccgtggggtgcactggagtgaggggggtggccgggctgcctctcgcatctctgtcttcccctgcaggcgctgtgtgagctggccctgcccctcctcattacagtatgaagggagccgtgacacgcagcattttcctgccgttctctcagggactctcagggcagctcctgccactccgccagggccagcatgccagtccaggcagagcaggtggctggctgtctggccgtctcgccccgcccctccacaggaccctggaccagggcggtgcagggcgcagccccgaggaggcaggtggaggagctgcgggttttcacagggccgcgtcgccacggctcctctgatcctttagggttggcgagcatctctggaaatagcttttgcagaggagtggtgggaggaatagagggggacagtctgtcacctccctccccgccactttgtgtagatcctacctggagggaatggctttaggcacttttgtgccagagcttgtgagggtgacagaagagggtccaggctggaaacctgaactttctgggtgggagaaccaggtggtgcctgccgaggtctgggcgtgtttgggccggtgctggagcctgtccagctggcccgggccctggcctggttctcaagtgtttcctagacagagaggcacctgggtcagtattagtctatttatcagaggtgtaaataatctatgtatagtttttctccttttagattattttgtatttgtttaaaagaagttttgtcaaaatacaaaaatataaagaaatgactgaaagttgttgacagggtttttaagaaataattattctaattgtttttgtttgtttgtttttgccttgtaaactagcgccaaggaactgcagcaaataaactccaactctgcccaagcaaaaaaaaaa

SEQ ID NO: 76645 - DNA, 969 bp, Homo sapiens
agccattgcctgtctgttcaggaagcagctctgagctgccctagtggctggacagcttcacaggtatccccggcccctcccagtcagaccccacaggaaaacttggctcccagtaagttaccgctctcctggaagcacagaacggacttttcgtgtcccgctgtaaggaaacaagatggtccttaaaaccgaagaggaggacgttcccagtgacctgacagcagaggagcgtcaagaactggagaacatccgacggagaaaacaggagctgctggctgacattcagaggctgaaggatgagatagcagaagtagctaatgaaattgaaaacctgggatccacagaggaaaggaaaaacatgcagaggaacaaacaggtagccatgggcaggaaaaaatttaatatggaccctaaaaaggggatccagttcttaatagagaacgacctcctgaagaacacttgtgaagacattgcccagttcttatataaaggcgaagggctcaacaagacagccatcggcgactacctaggggagagagatgagtttaatatccaggttcttcatgcatttgtggagctgcatgagttcactgatcttaatctcgtccaggcactacggcagttcctgtggagcttccggctacccggagaggcccagaagatcgaccggatgatggaggcgtttgcccagcgatattgtcagtgcaataatggcgtgttccagtccacggatacttgttacgtcctctcctttgccatcatcatgttgaacaccagtctgcacaaccccaatgtcaaagataagcccactgtggagaggttcattgccatgaaccgaggcatcaatgatgggggagacctgccggaggagctcctccggaatctctatgagacgctagcagctgaagccgtgaagatgccggaaagacgcacggggacatgaactcactcagacagactccacgtcca

SEQ ID NO: 76646 - DNA, 724 bp, Homo sapiens
cggaggagaaaaagaaacctggctgggcagagggcaggctggtagtcccacactttgggaggctgacgcaggcagatcatttgagcccaagagtttgagactagcctgggcaacacagtgagcatggtggcatgcgcctgtggtcccagctacttgggaggctgaggtgggaggatcacttgagcccaggaggcagaggttgcaatgagccgagatagcaccactgcacttcagccttcagacagagagagaccctgtctcaaaaaaaaataaagaaaacctctgttccagggtagaaggagcaaatgagcttggagcttggagccaggttcaggcttcaggtttcagttggcctttcatagttccaccagattatgcctgttgctttcctggataaatctttcaaaaacctgtgtaaatcagtggaaatcatattagtctttcaagcctttccgatggcctgaagtactaaaatggctgtgatggttgacaggaaaaacatgcagaggaacaaacaggtagccatgggcaggaaaaaatttaatatggaccctaaaaaggtaagtgagaaagaagcgggaagtggtccatattagatggggtttttttatagtgctcagatagaccctaaaaacgtttttttccaagcgttacagttcatgttgccgttttgtagagcaaatgttatgcactaagcccttgttcctaaactgtgactccccgg

SEQ ID NO: 76647 - DNA, 3582 bp, Homo sapiens
ggagcagcacacactcggagcgtctgctagggctgcagctctgcgcgtccatctctgcgctctgcgccagccttccccaccgggcccagcgagtttccacctgcagggccggtgctctcagcttttgttttctctggacaccttcttctctacccctgctgtgctggcgcacacatgctgtccttgctccggctctccctgcacctacagctgtgggagctcccggcagcctggtactgtggggtcgctgcacggagccaccatggcctctgacgtggagagctgtgacctgccgaggctttgatgttgctgcccagggctggccaggacactggggccgcaggagaggggactcaccgtggttcccagtgacctgacagcagaggagcgtcaagaactggagaacatccgacggagaaaacaggagctgctggctgacattcagaggctgaaggatgagatagcagaagtagctaatgaaattgaaaacctgggatccacagaggaaaggaaaaacatgcagaggaacaaacaggtagccatgggcaggaaaaaatttaatatggaccctaaaaaggggatccagttcttaatagagaacgacctcctgaagaacacttgtgaagacattgcccagttcttatataaaggcgaagggctcaacaagacagccatcggcgactacctaggggagagagatgagtttaatatccaggttcttcatgcatttgtggagctgcatgagttcactgatcttaatctcgtccaggcactacggcagttcctgtggagcttccggctacccggagaggcccagaagatcgaccggatgatggaggcgtttgcccagcgatattgtcagtgcaataatggcgtgttccagtccacggatacttgttacgtcctctcctttgccatcatcatgttgaacaccagtctgcacaaccccaatgtcaaagataagcccactgtggagaggttcattgccatgaaccgaggcatcaatgatgggggagacctgccggaggagctcctccggaatctctatgagagcataaaaaatgaaccctttaaaatcccagaagacgacgggaatgacctcactcacactttcttcaatccagaccgagaaggctggctattgaaactcggaggtggcagggtaaagacttggaagagacgctggttcattctgactgacaactgcctttactactttgagtataccacggataaggagccccgtggaatcatccctttagagaatctgagtatccgggaagtggaggactccaaaaaaccaaactgctttgagctttatatccccgacaataaagaccaagttatcaaggcctgcaagaccgaggctgacgggcgggtggtggaggggaaccacactgtttaccggatctcagctccgacgcccgaggagaaggaggagtggattaagtgcattaaagcagccatcagcagggaccctttctacgaaatgctcgcagcacggaaaaagaaggtctcctccacgaagcgacactgagcgtgcagccaagggcgttggtctgcgggggccttggagctcctgctcttctcccgcacctccatggatgcactgctgccgagcagagcgtcctctgccaggccccgccctggattcctagagactagcttcagcttttgctattttttttaagtgggagaagggtgggcagttatcactggggaagagaggaccggccacctgtccagcatgggctccagagccttcctctctcacagggcagagctcttgtcggcagggcagcctcctggccagtttctctgctcagtgttctggtagcagagctcagagccaactgtttacctcttggttgtccccgtgaagaagccttcaaaccctgcaccataaatacatgtgtccatatattattatatgttaagagaaaaaggtggaaaggaagagaagccacatactataaagatctattttttttttttaagagagaacgtagggctgttcaggtgcattctgccctggctgcgctggggagcttctccctggagaagagcacctggggctgcggccaaggggcatcagcctgggcccgcggcagggcctggcctgcctctcctgtgctgtgggagctcgctgcctggtgcttgtcttggcgagatggacaggtgaggtcgaggacgcagagggcagaggcccagtggagcctcagacggcacagtcagagtcgggggcctgcctggccggggtcgcagtcggcagcagcgtgcagtccggcatctcccgcggatgcttttccatcccaagtgcctgcggagcccgaggagaggagagagctgactggacgcttacgttattttcctccttcagaatccaagttcttgttgggctttaaagtagaaagtcagcattttccttgagctaaatacctaataaccaaaactgtgaggaaggttatcgggacagaggttccggataacctgtttcattttgggttttcttcctcttccccagactccagtcctcgttctagaggaaggagtaggacttccccgatccccgtagcttcagctttttctgcctcaaaaccagccctaactggactactctggatgcattttgtggtgggccccctagagggaagatgggcctttatctgctccgtggggtgcactggagtgaggggggtggccgggctgcctctcgcatctctgtcttcccctgcaggcgctgtgtgagctggccctgcccctcctcattacagtatgaagggagccgtgacacgcagcattttcctgccgttctctcagggactctcagggcagctcctgccactccgccagggccagcatgccagtccaggcagagcaggtggctggctgtctggccgtctcgccccgcccctccacaggaccctggaccagggcggtgcagggcgcagccccgaggaggcaggtggaggagctgcgggttttcacagggccgcgtcgccacggctcctctgatcctttagggttggcgagcatctctggaaatagcttttgcagaggagtggtgggaggaatagagggggacagtctgtcacctccctccccgccactttgtgtagatcctacctggagggaatggctttaggcacttttgtgccagagcttgtgagggtgacagaagagggtccaggctggaaacctgaactttctgggtgggagaaccaggtggtgcctgccgaggtctgggcgtgtttgggccggtgctggagcctgtccagctggcccgggccctggcctggttctcaagtgtttcctagacagagaggcacctgggtcagtattagtctatttatcagaggtgtaaataatctatgtatagtttttctccttttagattattttgtatttgtttaaaagaagttttgtcaaaatacaaaaatataaagaaatgactgaaagttgttgacagggtttttaagaaataattattctaattgtttttgtttgtttgtttttgccttgtaaactagcgccaaggaactgcagcaaataaactccaactctgcccaagcaaaaaaaaaa

SEQ ID NO: 76648 - DNA, 3306 bp, Homo sapiens
gctacgggccgaaggtatttttatgcgagcggcgagccggagcgcggagcccggctcccgcaccatggaggaggacgacagctacgttcccagtgacctgacagcagaggagcgtcaagaactggagaacatccgacggagaaaacaggagctgctggctgacattcagaggctgaaggatgagatagcagaagtagctaatgaaattgaaaacctgggatccacagaggaaaggaaaaacatgcagaggaacaaacaggtagccatgggcaggaaaaaatttaatatggaccctaaaaaggggatccagttcttaatagagaacgacctcctgaagaacacttgtgaagacattgcccagttcttatataaaggcgaagggctcaacaagacagccatcggcgactacctaggggagagagatgagtttaatatccaggttcttcatgcatttgtggagctgcatgagttcactgatcttaatctcgtccaggcactacggcagttcctgtggagcttccggctacccggagaggcccagaagatcgaccggatgatggaggcgtttgcccagcgatattgtcagtgcaataatggcgtgttccagtccacggatacttgttacgtcctctcctttgccatcatcatgttgaacaccagtctgcacaaccccaatgtcaaagataagcccactgtggagaggttcattgccatgaaccgaggcatcaatgatgggggagacctgccggaggagctcctccggaatctctatgagagcataaaaaatgaaccctttaaaatcccagaagacgacgggaatgacctcactcacactttcttcaatccagaccgagaaggctggctattgaaactcggaggtggcagggtaaagacttggaagagacgctggttcattctgactgacaactgcctttactactttgagtataccacggataaggagccccgtggaatcatccctttagagaatctgagtatccgggaagtggaggactccaaaaaaccaaactgctttgagctttatatccccgacaataaagaccaagttatcaaggcctgcaagaccgaggctgacgggcgggtggtggaggggaaccacactgtttaccggatctcagctccgacgcccgaggagaaggaggagtggattaagtgcattaaagcagccatcagcagggaccctttctacgaaatgctcgcagcacggaaaaagaaggtctcctccacgaagcgacactgagcgtgcagccaagggcgttggtctgcgggggccttggagctcctgctcttctcccgcacctccatggatgcactgctgccgagcagagcgtcctctgccaggccccgccctggattcctagagactagcttcagcttttgctattttttttaagtgggagaagggtgggcagttatcactggggaagagaggaccggccacctgtccagcatgggctccagagccttcctctctcacagggcagagctcttgtcggcagggcagcctcctggccagtttctctgctcagtgttctggtagcagagctcagagccaactgtttacctcttggttgtccccgtgaagaagccttcaaaccctgcaccataaatacatgtgtccatatattattatatgttaagagaaaaaggtggaaaggaagagaagccacatactataaagatctattttttttttttaagagagaacgtagggctgttcaggtgcattctgccctggctgcgctggggagcttctccctggagaagagcacctggggctgcggccaaggggcatcagcctgggcccgcggcagggcctggcctgcctctcctgtgctgtgggagctcgctgcctggtgcttgtcttggcgagatggacaggtgaggtcgaggacgcagagggcagaggcccagtggagcctcagacggcacagtcagagtcgggggcctgcctggccggggtcgcagtcggcagcagcgtgcagtccggcatctcccgcggatgcttttccatcccaagtgcctgcggagcccgaggagaggagagagctgactggacgcttacgttattttcctccttcagaatccaagttcttgttgggctttaaagtagaaagtcagcattttccttgagctaaatacctaataaccaaaactgtgaggaaggttatcgggacagaggttccggataacctgtttcattttgggttttcttcctcttccccagactccagtcctcgttctagaggaaggagtaggacttccccgatccccgtagcttcagctttttctgcctcaaaaccagccctaactggactactctggatgcattttgtggtgggccccctagagggaagatgggcctttatctgctccgtggggtgcactggagtgaggggggtggccgggctgcctctcgcatctctgtcttcccctgcaggcgctgtgtgagctggccctgcccctcctcattacagtatgaagggagccgtgacacgcagcattttcctgccgttctctcagggactctcagggcagctcctgccactccgccagggccagcatgccagtccaggcagagcaggtggctggctgtctggccgtctcgccccgcccctccacaggaccctggaccagggcggtgcagggcgcagccccgaggaggcaggtggaggagctgcgggttttcacagggccgcgtcgccacggctcctctgatcctttagggttggcgagcatctctggaaatagcttttgcagaggagtggtgggaggaatagagggggacagtctgtcacctccctccccgccactttgtgtagatcctacctggagggaatggctttaggcacttttgtgccagagcttgtgagggtgacagaagagggtccaggctggaaacctgaactttctgggtgggagaaccaggtggtgcctgccgaggtctgggcgtgtttgggccggtgctggagcctgtccagctggcccgggccctggcctggttctcaagtgtttcctagacagagaggcacctgggtcagtattagtctatttatcagaggtgtaaataatctatgtatagtttttctccttttagattattttgtatttgtttaaaagaagttttgtcaaaatacaaaaatataaagaaatgactgaaagttgttgacagggtttttaagaaataattattctaattgtttttgtttgtttgtttttgccttgtaaactagcgccaaggaactgcagcaaataaactccaactctgcccaagcaaaaaaaaaa

SEQ ID NO: 76649 - DNA, 3423 bp, Homo sapiens
agccattgcctgtctgttcaggaagcagctctgagctgccctagtggctggacagcttcacaggtatccccggcccctcccagtcagaccccacaggaaaacttggctcccagtaagttaccgctctcctggaagcacagaacggacttttcgtgtcccgctgtaaggaaacaagatggtccttaaaaccgaagaggaggacgttcccagtgacctgacagcagaggagcgtcaagaactggagaacatccgacggagaaaacaggagctgctggctgacattcagaggctgaaggatgagatagcagaagtagctaatgaaattgaaaacctgggatccacagaggaaaggaaaaacatgcagaggaacaaacaggtagccatgggcaggaaaaaatttaatatggaccctaaaaaggggatccagttcttaatagagaacgacctcctgaagaacacttgtgaagacattgcccagttcttatataaaggcgaagggctcaacaagacagccatcggcgactacctaggggagagagatgagtttaatatccaggttcttcatgcatttgtggagctgcatgagttcactgatcttaatctcgtccaggcactacggcagttcctgtggagcttccggctacccggagaggcccagaagatcgaccggatgatggaggcgtttgcccagcgatattgtcagtgcaataatggcgtgttccagtccacggatacttgttacgtcctctcctttgccatcatcatgttgaacaccagtctgcacaaccccaatgtcaaagataagcccactgtggagaggttcattgccatgaaccgaggcatcaatgatgggggagacctgccggaggagctcctccggaatctctatgagagcataaaaaatgaaccctttaaaatcccagaagacgacgggaatgacctcactcacactttcttcaatccagaccgagaaggctggctattgaaactcggaggtggcagggtaaagacttggaagagacgctggttcattctgactgacaactgcctttactactttgagtataccacggataaggagccccgtggaatcatccctttagagaatctgagtatccgggaagtggaggactccaaaaaaccaaactgctttgagctttatatccccgacaataaagaccaagttatcaaggcctgcaagaccgaggctgacgggcgggtggtggaggggaaccacactgtttaccggatctcagctccgacgcccgaggagaaggaggagtggattaagtgcattaaagcagccatcagcagggaccctttctacgaaatgctcgcagcacggaaaaagaaggtctcctccacgaagcgacactgagcgtgcagccaagggcgttggtctgcgggggccttggagctcctgctcttctcccgcacctccatggatgcactgctgccgagcagagcgtcctctgccaggccccgccctggattcctagagactagcttcagcttttgctattttttttaagtgggagaagggtgggcagttatcactggggaagagaggaccggccacctgtccagcatgggctccagagccttcctctctcacagggcagagctcttgtcggcagggcagcctcctggccagtttctctgctcagtgttctggtagcagagctcagagccaactgtttacctcttggttgtccccgtgaagaagccttcaaaccctgcaccataaatacatgtgtccatatattattatatgttaagagaaaaaggtggaaaggaagagaagccacatactataaagatctattttttttttttaagagagaacgtagggctgttcaggtgcattctgccctggctgcgctggggagcttctccctggagaagagcacctggggctgcggccaaggggcatcagcctgggcccgcggcagggcctggcctgcctctcctgtgctgtgggagctcgctgcctggtgcttgtcttggcgagatggacaggtgaggtcgaggacgcagagggcagaggcccagtggagcctcagacggcacagtcagagtcgggggcctgcctggccggggtcgcagtcggcagcagcgtgcagtccggcatctcccgcggatgcttttccatcccaagtgcctgcggagcccgaggagaggagagagctgactggacgcttacgttattttcctccttcagaatccaagttcttgttgggctttaaagtagaaagtcagcattttccttgagctaaatacctaataaccaaaactgtgaggaaggttatcgggacagaggttccggataacctgtttcattttgggttttcttcctcttccccagactccagtcctcgttctagaggaaggagtaggacttccccgatccccgtagcttcagctttttctgcctcaaaaccagccctaactggactactctggatgcattttgtggtgggccccctagagggaagatgggcctttatctgctccgtggggtgcactggagtgaggggggtggccgggctgcctctcgcatctctgtcttcccctgcaggcgctgtgtgagctggccctgcccctcctcattacagtatgaagggagccgtgacacgcagcattttcctgccgttctctcagggactctcagggcagctcctgccactccgccagggccagcatgccagtccaggcagagcaggtggctggctgtctggccgtctcgccccgcccctccacaggaccctggaccagggcggtgcagggcgcagccccgaggaggcaggtggaggagctgcgggttttcacagggccgcgtcgccacggctcctctgatcctttagggttggcgagcatctctggaaatagcttttgcagaggagtggtgggaggaatagagggggacagtctgtcacctccctccccgccactttgtgtagatcctacctggagggaatggctttaggcacttttgtgccagagcttgtgagggtgacagaagagggtccaggctggaaacctgaactttctgggtgggagaaccaggtggtgcctgccgaggtctgggcgtgtttgggccggtgctggagcctgtccagctggcccgggccctggcctggttctcaagtgtttcctagacagagaggcacctgggtcagtattagtctatttatcagaggtgtaaataatctatgtatagtttttctccttttagattattttgtatttgtttaaaagaagttttgtcaaaatacaaaaatataaagaaatgactgaaagttgttgacagggtttttaagaaataattattctaattgtttttgtttgtttgtttttgccttgtaaactagcgccaaggaactgcagcaaataaactccaactctgcccaagcaaaaaaaaaa

SEQ ID NO: 76650 - DNA, 3217 bp, Homo sapiens
  misc_feature (10)..(11): n is a, c, g, or t
ggaggcgttnnccagcgatatgtcagtgcaataatggcgtgttccagtccacggacgacagctacgttcccagtgacctgacagcagaggagcgtcaagaactggagaacatccgacggagaaaacaggagctgctggctgacattcagaggctgaaggatgagatagcagaagtagctaatgaaattgaaaacctgggatccacagaggaaaggaaaaacatgcagaggaacaaacaggtagccatgggcaggaaaaaatttaatatggaccctaaaaaggggatccagttcttaatagagaacgacctcctgaagaacacttgtgaagacattgcccagttcttatataaaggcgaagggctcaacaagacagccatcggcgactacctaggggagagagatgagtttaatatccaggttcttcatgcatttgtggagctgcatgagttcactgatcttaatctcgtccaggcactacggcagttcctgtggagcttccggctacccggagaggcccagaagatcgaccggatgatggaggcgtttgccatcatcatgttgaacaccagtctgcacaaccccaatgtcaaagataagcccactgtggagaggttcattgccatgaaccgaggcatcaatgatgggggagacctgccggaggagctcctccggaatctctatgagagcataaaaaatgaaccctttaaaatcccagaagacgacgggaatgacctcactcacactttcttcaatccagaccgagaaggctggctattgaaactcggaggtggcagggtaaagacttggaagagacgctggttcattctgactgacaactgcctttactactttgagtataccacggataaggagccccgtggaatcatccctttagagaatctgagtatccgggaagtggaggactccaaaaaaccaaactgctttgagctttatatccccgacaataaagaccaagttatcaaggcctgcaagaccgaggctgacgggcgggtggtggaggggaaccacactgtttaccggatctcagctccgacgcccgaggagaaggaggagtggattaagtgcattaaagcagccatcagcagggaccctttctacgaaatgctcgcagcacggaaaaagaaggtctcctccacgaagcgacactgagcgtgcagccaagggcgttggtctgcgggggccttggagctcctgctcttctcccgcacctccatggatgcactgctgccgagcagagcgtcctctgccaggccccgccctggattcctagagactagcttcagcttttgctattttttttaagtgggagaagggtgggcagttatcactggggaagagaggaccggccacctgtccagcatgggctccagagccttcctctctcacagggcagagctcttgtcggcagggcagcctcctggccagtttctctgctcagtgttctggtagcagagctcagagccaactgtttacctcttggttgtccccgtgaagaagccttcaaaccctgcaccataaatacatgtgtccatatattattatatgttaagagaaaaaggtggaaaggaagagaagccacatactataaagatctattttttttttttaagagagaacgtagggctgttcaggtgcattctgccctggctgcgctggggagcttctccctggagaagagcacctggggctgcggccaaggggcatcagcctgggcccgcggcagggcctggcctgcctctcctgtgctgtgggagctcgctgcctggtgcttgtcttggcgagatggacaggtgaggtcgaggacgcagagggcagaggcccagtggagcctcagacggcacagtcagagtcgggggcctgcctggccggggtcgcagtcggcagcagcgtgcagtccggcatctcccgcggatgcttttccatcccaagtgcctgcggagcccgaggagaggagagagctgactggacgcttacgttattttcctccttcagaatccaagttcttgttgggctttaaagtagaaagtcagcattttccttgagctaaatacctaataaccaaaactgtgaggaaggttatcgggacagaggttccggataacctgtttcattttgggttttcttcctcttccccagactccagtcctcgttctagaggaaggagtaggacttccccgatccccgtagcttcagctttttctgcctcaaaaccagccctaactggactactctggatgcattttgtggtgggccccctagagggaagatgggcctttatctgctccgtggggtgcactggagtgaggggggtggccgggctgcctctcgcatctctgtcttcccctgcaggcgctgtgtgagctggccctgcccctcctcattacagtatgaagggagccgtgacacgcagcattttcctgccgttctctcagggactctcagggcagctcctgccactccgccagggccagcatgccagtccaggcagagcaggtggctggctgtctggccgtctcgccccgcccctccacaggaccctggaccagggcggtgcagggcgcagccccgaggaggcaggtggaggagctgcgggttttcacagggccgcgtcgccacggctcctctgatcctttagggttggcgagcatctctggaaatagcttttgcagaggagtggtgggaggaatagagggggacagtctgtcacctccctccccgccactttgtgtagatcctacctggagggaatggctttaggcacttttgtgccagagcttgtgagggtgacagaagagggtccaggctggaaacctgaactttctgggtgggagaaccaggtggtgcctgccgaggtctgggcgtgtttgggccggtgctggagcctgtccagctggcccgggccctggcctggttctcaagtgtttcctagacagagaggcacctgggtcagtattagtctatttatcagaggtgtaaataatctatgtatagtttttctccttttagattattttgtatttgtttaaaagaagttttgtcaaaatacaaaaatataaagaaatgactgaaagttgttgacagggtttttaagaaataattattctaattgtttttgtttgtttgtttttgccttgtaaactagcgccaaggaactgcagcaaataaactccaactctgcccaagcaaaaaaaaaa

SEQ ID NO: 76651 - DNA, 454 bp, Homo sapiens
gctacgggccgaaggtatttttatgcgagcggcgagccggagcgcggagcccggctcccgcaccatggaggaggacgacagctacgttcccagtgacctgacagcagaggagcgtcaagaactggagaacatccgacggagaaaacaggagctgctggctgacattcagttttggcagttgtcaatgtttttggagatcacagcgtagttgttttggattttatttttcattactaaattcagattatgttttggggggcaggaattttatagaaattatctttgcagtgcatattatcaataacacataatcaggctttcccaatgtaaaggttttctttccccctttacaattagtaattattttgtggaataaattgtgacactatatgtaatattccattccccatcagattttcagtttatatcagtatgtgtttaaggattcctgtgg

SEQ ID NO: 76652 - DNA, 312 bp, Homo sapiens
ccaagatcacgccactgcactccagcctgggtgacagagtgagactccatctcaaaaaaaaaaagaaaaaaaaaatcattggcagtttaacaattcatagagaaataaattgcctccccaagttctggaacactctgtctttacccactcaggcagttcctgtggagcttccggctacccggagaggcccagaagatcgaccggatgatggaggcgtttgcccagcgatattgtcagtgcaataatggcgtgttccagtccacgggtaaatacgatcattcatcctagtttatgatgggcgttttacactgg

SEQ ID NO: 76653 - DNA, 364 bp, Homo sapiens
tgggatgtttctgaacatctgagcatgcaacggctcccctttgcttttctctcatctttagatacttgttacgtcctctcctttgccatcatcatgttgaacaccagtctgcacaaccccaatgtcaaagataagcccactgtggagaggttcattgccatgaaccgaggcatcaatgatgggggagacctgccggaggagctcctccgggtaagcaaggaagaatggtcttcattcaagtcaagaaagagttcactgggaacaggatcgtcttttgtaggaaggaagaaaaaacatacaatttatcaagggtctcctcttttaatttgtttaaccatgtgaatttcattaagaaagtggtagt

SEQ ID NO: 76654 - DNA, 471 bp, Homo sapiens
ttggccctggtgcggtggctcatgccctgtaatccccaacacttttggaggccaaggtgggcagatcacaaggtcaagagttcaagagactgggagtttcaccatgttggccaggctggtcttgaactcctaacctcagataatctgcccacgttggcctcccaaattgctgggattacaggtgtgagccactgcaacaagccatctgctattttacttttaaaatattggaggctcttatgcatttcacttttatcttctgtattatcagtgttctgtcaatactttcacatgtgatattttgtaaacttacatctggcttatacagtataagttcaaggaataatgattcagaaaagaaaactcagaatttcttccctaagattttataggagctgtaaaactgcaaaggttattgtgaaaattaaagagagcttgagtaatgaaaaaaaaaaaagtcgacgcggccgc

SEQ ID NO: 76655 - DNA, 442 bp, Homo sapiens
tagagaggctgcagtagcgtgagggaaaaggagctgggcgtgtagccagagataaagacactggaagttgcctggagggttttgagcagaggggggtccatgatcaaaattacgtgtcaatggcatgactgtctgcctctttacagaaaggggtaaggtgtagaagctgagaatcacatcggatgagaaaaggtgaacagttggcaaaggaaacagtagaaatctggcaaatctaataaaactttgatggtagtaaaaacaacagtgcctaatatccggtgttaaacagcaacattaacatctagaaccagaataacccaaccgccaaaggagagagagcattattggagataaagaactttgtaccttttgactgaggtatgaagatattggcacttgtttagtgcatgtgtttaaatttttggagaaactactaaaaaaa

SEQ ID NO: 76656 - DNA, 415 bp, Homo sapiens
aattactaagagattagctctcaaatgttctcaccacaaataagtgcgaggtgggtatgttaattagctagatttaatttcacgaggtctatgtacatcaaaccatgtatattgtaaatatatacaatttttattttttaattataaccttaataaaagtgggaggaaaagtgataaacggtaataagcccttaaaggtaataagttaacttgtcacccaacgtatttattaatttttctatacaatgtaatgtgcttggagaacattgaggccgggcacggtggctcatgcttgtaatctcagcactttgggaggccaaggtgggcggatcacttgaggacaggagtttgagaccagcctggccaacatggtgaaaccccatgtctattaaaactacaaaaaaaaatagctgtg

SEQ ID NO: 76657 - DNA, 990 bp, Homo sapiens
cggggatgcatgagaaggtgagctgtcactcacaaaaaaagggaaaatgatttgaaaaatgtttcacatatacactttttatcattttagtggatggcagccttacgtcagtagtatatgccactatgaagtatggccaaaaccctagcgtcacttgtaaccattgtactcttatggatttgtgtcttacaccatttgccttgctttttaaatgactttgtttttcaaggtgctgtcattttgcaaaaggaaatctttatatgaaatgtacaaaaaccgttactaactggacaacagggaaggtgctggccccacattagtgcctgcccaccgctctacttctaaccagggacacggatcttccattctctacatccaccggactgcagcccaagtctggacctggctgcagtgggcatattaccgtatggatatctttttctttctttttttaaagtgaggagattcttcagggggtcaggctgagaatgtaataagcctgacattggaacagatttctcccgtgtggtctagctggacccctccggcatttgccacactccctgccagtcctgacattgacttcctgaatgtgattaggtggtaatgagcaagaatttcctaggatgttgaaacatctgtatccaggcccccaatcaaatgctgctgaatattgtgaatgtttttactccgctcactttcccactgtgctttcctctaaccaaaatatacgtgtagccattaccaatgtacaactctcaatgcggagttgccgccacggtttaaaataaatctctgtgaaaacctttctgcagctatggtcccatcacggttacatgtggccacgcacacaccgacaaccttgctgtgctgtttagccctgtgggttctgtccagttggtgggagggggaggttccagaccactccacctgctgtctagatgccagggagagctgctgtttggaggtgaagatgagccctgttcacca

SEQ ID NO: 76658 - DNA, 457 bp, Homo sapiens
ctcctgcctgaatggctggtgagagatttgaaggcacaggggttgaaggataattattcaaattgtgggattctccagtggatcctagcacatcataactaaaaagcaccaataaatttcctaagttaccacaagggggcagtaacgcccccactgagaatcactgggcaaatggtgtttcttagccttgcaactatggatattttgaattttggatcagagaattatttgttgtgtgtgtgtgtgggtggggagggggcggtgttgaggggagagagtgctgtcctgtgtattttagaatgtttagcagcatcttggactctacccaccagtaacaccagtaatactctacccaccagtaacagccctcctgaccaccagttagggcaaccagaatgtctccagacaccacctcttgttccatggtgggtaaattcacccgcaactgaaatcacca

SEQ ID NO: 76659 - DNA, 316 bp, Homo sapiens
gcctggtggcgcatgcctgtaatcccagctacttaggaggctgaggcaggagaattccttgaacccagaaggtggaggttgcagtgagctgagattgcaccactgcactccagcctaggtgacacagcaagactctgtcaaaaaaaaaaaaaaaagaaatccaaataaaatttccagaatatgtggaaaatagtgccaataaaaatattacacatgtgtaatcccagcattttgagatgccaaggtggcaggatcacttgagaccaggagttcgcaaccagcctggacaacatagggagactccatctccacacac

SEQ ID NO: 76660 - DNA, 510 bp, Homo sapiens
taaatggaaagacatgccatgttcacagattagaagactatttgtctaagatgataataaatattcccaaaattgatctacaagattcaatgtaatcttcattaaagtcccagatgacttctttgcagaaattgagtaactgatcctaaaagtcaagggacttagagtagccaaaacaaccgttaaaaagaacaaattaggtggagccagtttcaaaagtttctacaaagctatagtaatcagtatagcctggtactgccacgaagatgtcacatagttcaatcagataagatttagagtctagacataaaccctttggttaacagtcaattgattttcttttctatatatattttaagcagaaaaggatttatttttatttttatttttttactttaagttctgggatacgtgtgcagaatgtgcaggtttgttacataggtatacgtgtgccatgtggtttgctgcacctattgacctgtcctctaaattccctcagtcagttgattt

SEQ ID NO: 76661 - DNA, 1791 bp, Homo sapiens
ttttttttttgaaaccaaagctgtctcagaaatggccaatttaactttacagtaacaatagacagcacaacacaaactctctcaatacagataaactcacacatactggagatatatatataatagatatatataaaattattttaatgcattgtagtgtaatatttatgcatactatactgtataacatgttattcaaaagggattgccatttctgagacacagtaacaaaaaaatgaggaaattattttgcttctatttatagcctctgtcaaaagtcaaaagactataaatgctttgcaaaaatggtttcacgtttgcttaaatgcttcatcacagtcacattcaaaatagtgactctaaacaaagaagaaagcagcactgtcatcagatgcatgataaaccaaaatatgaaaatgggaaatgtttaattaacctagtaattgggtgggttaagtacatgggtgaattttatatgtgatttttgttttgttttgttttgttcagattaactgcttatagccttagaaagccttttacaaaattaaaaaaaaaatagatgtgcattcagtttttaagaatggaatcatccaaaggaattcctttttttgaggtttggatgttgcagctagtaaaggatatttttgctctgttcagcagttctaaaaattgctgaagtaggggccaggtcactggtagttatagtatggaatgggagaagtgaaagttcagttatagaactttccatacttccaagtttactgcaagtttttatgcttgagagagatgctttctaatataagactgatgtgttgattttactgattgtactgtacatctattaaagccttagattattacattacgggttggaacccataccaatgtaatttcaatcgtgttaagaaagtaatggtgacttcacatgttattgtagttagttacattatagaatattacttatttttcttgttaaaatgtagtttttcatttcctacatttattagattttcattttctattaacaattgaataccatttcagtttatagacttgttttattagattttaccaatgaatttttcaaaatacaaaaaaaagtagtttttccttcataacatactcagttttgaattacatgtagtgtcacatgaatattcgtattgttaactaaatgatttatattttactgatttaatattacagtgtaagaatgtcagtcattgttagttcttgtctagttttcattaaaagaacaaagatcttttatatggatatcttataaatatataatcattgctaagtaagaagttaagttgttgctatcgcaacaatcctggcagacaattgagtaatattttgatgatttattttgtttgtaattagttattataagaagatctagatcctagatattagaataaaatttattttctactgtatccatttcaaatgttcaaaatattgtttaatatttttgaaatccctgagtatcaggccttgttataaataagctgcataatcaataaatagaacaagggactttttgttgataatccaaatactcaaagtttacgtaatgaaaattatagcgtgtgtgcaaactcttgagggttgattatgctgcaatttagcatgttggaacgtctagggagaaggttgactttttgcacttctgtatatagtcaaaagagagaaacctgtataatagtaagatcttattttgaataaaaacgtttatatttacaaggagttttggtaagggtaatacaatgacagactgagcaaaat

SEQ ID NO: 76662 - DNA, 371 bp, Homo sapiens
aacaggcaggcaatgtgcacagcaattcttagcttgcagcactgagaaggtttctatttccttgattcaactgaaaatgaacaaaaagggtatatgcagtaaaaatgtccctgccatcgattttaaatcccaaaaacaaactcatccaccattcaaaacatactaaagtcttgatttcttgatagttcttgtttgtttgtttttgtagcgacgggggtcttgctatgttgctgaggctggtctcaactcctggtctcaagtaatcctcctgcctcagcctcccaaagcactgggattataggcttgagccactgcatccagcctaaagtcttgattattaagagtacctttataatttacacacactaagc

SEQ ID NO: 76663 - DNA, 516 bp, Homo sapiens
tggtggagttagttagggtctcactgtgttgcccaggctggtctcgaactcctaggcccaagtgatcctcccacctcagcctcccaaagtgctgggattacgactgtgagccactccacccgtccttaaaataattaaaaaaaaaaaaagtctaaggccacattgcctcaataacctccctcttggattctctgcagtgggggagatagctgtctataagcagccctaatttttttttttaaggaaattaatcgtggactaatagaaaattaatcctgactaatatgggattttggatcacataaagctctgttatacaaatacttattactgcctataatcccagcactttgagaggccaaggcaggcagatcatgaggtcaggtttcgagaccagcctgaccaacgtggtgaaaccctgtctctacttaaaatacaaaaattagccaggcgtggtggcacgtgcctgtaatcacagctactcaggaggctgaggcaggataatcgcttgaaccc

SEQ ID NO: 76664 - DNA, 316 bp, Homo sapiens
tcccaaatccatggtcatcctaatcacccccagaagtgatttttttaaacattcaggttgctgtattaaacccaccatgtaatactctgctttataatttctgcctttttactgtatgttttgaagctatttccatcaactcatagcaccctctccaacctccttgttgttattatctattggaacctgggtctctactcacctcttcatactggcttatggctaagactctatctctgttccatttccaatcatctttcatagtgacatcagtatacatgtggcttcttaagtttctcaacatttttaaatttcc

SEQ ID NO: 76665 - DNA, 2018 bp, Homo sapiens
agacgcccagagccgcgcgcgagccggaggagcccagccaggacgccccgcgagacccagcaggctgtggagatattattgcagaccaagaggaagaggcaggtcccagctgtgacaagcatgtccccgggccaggcaagccggctctgtctaaaaagaaccccggcgtggtggcctaccaaggaggcggggaagagatggccagcccggacgaggtggacgacacctatctacaggagttctgggacatgctctcccagaccgaggagcagggacccgagccccaggagggcgcggctaaggtggcagctgcgctggaaaccaaggtggtgcccgagacccccaaagacaccaggtgtgtggaagcggccaaggacgcgtcctcggtcaagcgcaggaggctcaaccggattcccatcgagccccatcctaaggaggagcccaagcacccggagaaggagcagcaggaaggcgtccccaacagcgacgagggctactgggactccaccacgccaggcccagaggaagacagctcgagcagcgggaagaaggcgggcatcccccgggatagctacagcggggacgcgctctatgatctctatgctgacccggacggaagtccagcaacccttcctggagggaaggacaacgaggagacgtcctccctgtcccggttaaagcccgtatctccaggcaccatcacctgtccactgcgaacaccaggcagcttgctgaaggactctaagatccctattagcatcaagcacctgaccaaccttccatctagccatcccgtggtgcaccagcaaccctccaggagtgagatgcccagaacaaaaatcccggtttccaaagtgctggtccgcagagtcagcaaccggggcttggctgggaccaccatcagagcaacggcctgccacgacagtgccaaaaagttgtgaggtcttccaggccaaggtggatgggccccatgccaaggaatacaacttttccctggaaaccactaaagtaagttttgcttttcctaaagaaagtcttttaggacaccacccgtcccccgccctgctccagagcgtggaccgaggaggtctttgtgccctgagcagggaccggataacaccagaaagagggatgctacacgggggtttctcctctcaagataagtccctgagaattattttcaagcacttttttcttttttacctttaagtttttcttccttttgctttaatatactgaacacttggaagtcacctttacttgcctttgcagaaaacagaacttagccaaacctaagtaagagtcatgcctggatattgggataagccagtgtctagaggcctgaaggaaccgctgaagaaccagaggagatctcctcttccaagacacgtttccttccttcccttctttcctctttcctttccagttaaaaaaaaacaaaaacaaaaacaaaaccctttgctgtatcactgtgtggaaaatacctccaaagctgaaagagccaggtatttacctgatgagcagaggggaccactgattggcagaaaacttccctacgttcagttgttagatatgcaaattgataaggatctaacactaggaaaataaaggcgagttttggtttggttggtttccagtcatttgtttggggagatataaaaggctcaggagagcaggcttttgcttttgcttttgtttgtttcttcccccacccagtgcagaaatcaggatcagggaaagattttattaaatgccaatagatacagtatttaagcatttataaactgaaaccttttcatgtgaagataatgcatattttaccgtttatccagctgttaacattttgtaatcagtcaattcaatagaattattctggataattctatatctagaatataaaatctggtcttatagctagacatgatgatggtccccaaaccattgatgttctgttatgtactgtaatgggaagcgattctgattttgttttatatgggttctctggttctcaaaaaaaa

SEQ ID NO: 76666 - DNA, 458 bp, Homo sapiens
ctcagacccgtcggcagatcgtatttgtttgatgttttctgacgtgacttcactgaaaagctttgactctcttacaggctgtggagatattattgcagaccaagaggaagaggcaggtcccagctgtgacaagcatgtccccgggccaggcaagccggctctgtctaaaaagaaccccggcgtggtggcctaccaaggaggcggggaagagatggccagcccggacgaggtggacgacacctatctacaggagttctgggacatgctctcccagaccgaggagcagggacccgagccccaggagggcgcggctaaggtggcagctgcgctggaaaccaaggtggtgcccgagacccccaaagacaccaggtgtgtggaagcggccaaggacgcgtcctcggtcaagcgcaggaggctcaaccggattcccatcgagccccatcctaaggaggagccca

SEQ ID NO: 76667 - DNA, 353 bp, Homo sapiens
ccttaacaccgtagtcaatcaactggatgtttttgttcaaagtcttcatccagctaactttgacctcaatagagaaacatgggagatgactggctgaatagtttatttttcccacaaatgctttagcattatatagacatggatgtagtgtgtcctcaggcatcataaggaactgacaatttttggttttgaaaaatgaactaaacttgtcccgataattttgcctggcactgcaactcaatgaataattcagctaatttacaccacagtcatttgtacattatgagtgtacacgctttgaaagtatttctgtacctttgtcatattgcctattaaatgtgttctgaaaatag

SEQ ID NO: 76668 - DNA, 1047 bp, Homo sapiens
gttaaatattaatgttttgtcctgttctaaatctctgtaaaagcagtattctttctattccttcttttcttaccctgtccccttcaacattctcagcactgcaggagtttgtgaccaagaacttcaagagtcaagacagaaggaagccaagggagcagtgcaatggatttctcagtaaaggtagacatagagaaggaggtgacctgccccatctgcctggagctcctgacagaacctctgagcctagattgtggccacagcttctgccaagcctgcatcactgcaaagatcaaggagtcagtgatcatctcaagaggggaaagcagctgtcctgtgtgtcagaccagattccagcctgggaacctccgacctaatcggcatctggccaacatagttgagagagtcaaagaggtcaagatgagcccacaggaggggcagaagagagatgtctgtgagcaccacggaaaaaaactccagatcttctgtaaggaggatggaaaagtcatttgctgggtttgtgaactgtctcaggaacaccaaggtcaccaaacattccgcataaacgaggtggtcaaggaatgtcaggtaggctccaagatagaggaagagagagcagagagcagaagatggtacctaatgtgaaatctccactttttttgtcctgctttattccccttgtcaccatagaacggagagccctgtgatctctttccatactctttgcttagtttctgatgcctgaaggacactgctgcacatcgttttatttaaaaaagagtacaaatttttagcaaggaaaaattgaatgaatggagaattgctttgtaagataagctttcattgcccctccgagaagaatagtatttttgggaacacgtctggttagatgtgggaagagtggcaatgaagggaagtctttccttactgcagggtctgctttttctctaggaaaagaatcaggctactcttgataagaggatggtgacttccatcatccaggaataaagaatacattcatctcctcagattttcccccatgccataggt

SEQ ID NO: 76669 - DNA, 801 bp, Homo sapiens
aagcagtggtatcaacgcagagggcccattacggccgggattgacgtcatgaaaaggagtgaaagctggacattgaagaagccaaaatctgtttccaagaaactaaagagtgtattccgagtaccagatctgagtgggatgctgcaagttcttaaagagctgacagatgtccagtactactgggtctaccatcagagaatactacaaacacctctatggaaataaactagaaaatctagaagaaatggataaattcctcgacacatacaccctcccaagactaaaccaggaagaagttgaatctctgaatagaccaataacaggagctgaaattgtggcaataatcaatagcttaccaaccaaaaagagtccaggaccagaaggattcacagctgaattctaccagaggtacaaggaggaactggtaccattccttctgaaactattccaatcaatagaaaaagagggaaacctccctaactcattttatgaggccagcatcatgctgataccaaagccgggcagagacacaaccaaaaaaacaacaacaaaacaaacacaaaaaacaaaacctttgtgggacgacttggggcctctgaaaaaagatttttttaacaccactttcgttgggcgaccccgcgggcccccatgaggattagcgttgacactgtggctcaataagcgtgtcacctgaagaaaaactccgtgctagcacatcagggcggtgagatttctctaccccatatgatagaaacggccgcggggggagacccggcgtgttttctgagaccaacattctgt

SEQ ID NO: 76670 - DNA, 314 bp, Homo sapiens
tctgcctcctgggttcaagcgattctgctgcctcagcctcccaagtagctgggattacaggcgtgtgccaccacgcttggctaatttttatagtcttacaccctgtatttcttaagggtcctactaacctctgactatcaacacaagttccgtttgatatcgacacaagtttcattttcaatatgtctcttctcaatgctgtaagacacacctatcccatatccttcacttgacttggtaattttttctacagtggagcaatggagtgtgcatacatttggaaaactgtggatcagtcactaactgaccagtca

SEQ ID NO: 76671 - DNA, 2920 bp, Homo sapiens
actcagctcctgtggggaaactcatttgtggagaccagccctctggcttggtgagtgaatctggtttacaccggctcctgccctgccttcactcttctcccctgattcaagactcctctgctttggactgaagcactgcaggagtttgtgaccaagaacttcaagagtcaagacagaaggaagccaagggagcagtgcaatggatttctcagtaaaggtagacatagagaaggaggtgacctgccccatctgcctggagctcctgacagaacctctgagcctagattgtggccacagcttctgccaagcctgcatcactgcaaagatcaaggagtcagtgatcatctcaagaggggaaagcagctgtcctgtgtgtcagaccagattccagcctgggaacctccgacctaatcggcatctggccaacatagttgagagagtcaaagaggtcaagatgagcccacaggaggggcagaagagagatgtctgtgagcaccacggaaaaaaactccagatcttctgtaaggaggatggaaaagtcatttgctgggtttgtgaactgtctcaggaacaccaaggtcaccaaacattccgcataaacgaggtggtcaaggaatgtcaggaaaagctgcaggtagccctgcagaggctgataaaggagaatcaagaggctgagaagctggaagatgacatcagacaagagagaaccgcctggaagaattatatccagatcgagagacagaagattctgaaagggttcaatgaaatgagagtcatcttggacaatgaggagcagagagagctgcaaaagctggaggaaggtgaggtgaatgtgctggataacctggcagcagctacagaccagctggtccagcagaggcaggatgccagcacgctcatctcagatctccagcggaggttgacgggatcgtcagtagagatgctgcaggatgtgattgacgtcatgaaaaggagtgaaagctggacattgaagaagccaaaatctgtttccaagaaactaaagagtgtattccgagtaccagatctgagtgggatgctgcaagttcttaaagagctgacagatgtccagtactactgggtggacgtgatgctgaatccaggcagtgccacttcgaatgttgctatttctgtggatcagagacaagtgaaaactgtacgcacctgcacatttaagaattcaaatccatgtgatttttctgcttttggtgtcttcggctgccaatatttctcttcggggaaatattactgggaagtagatgtgtctggaaagattgcctggatcctgggcgtacacagtaaaataagtagtctgaataaaaggaagagctctgggtttgcttttgatccaagtgtaaattattcaaaagtttactccagatatagacctcaatatggctactgggttataggattacagaatacatgtgaatataatgcttttgaggactcctcctcttctgatcccaaggttttgactctctttatggctgtgcctccctgtcgtattggggttttcctagactatgaggcaggcattgtctcatttttcaatgtcacaaaccacggagcactcatctacaagttctctggatgtcgcttttctcgacctgcttatccgtatttcaatccttggaactgcctagtccccatgactgtgtgcccaccgagctcctgagtgttctcattcctttacccacttctgcatagtagcccttgtgctgagactcagattctgcacctgagttcatctctactgagaccatctcttcctttctttccccttcttttacttagaatgtctttgtattcatttgctagggcttccatagcaaagcatcatagattgctgatttaaactgtaattgtattgccgtactgtgggctggaaatcccaaatctagattccagcagagttggttctttctgaggtctgcaaggaagggctctgttccatgcctctctccttggcttgtagaaggcatcttgtccctatgactcttcacattgtctttatgtacatctctgtgcccaagttttccctttttattaagacaccagtcatactggctcagggcccaccgctaatgccttaatgaaatcattttaacattatattctctacaaagaccttatttccaaataagataatatttggaggtattgggaataaaaactccaacatataaatttgaggaaggcacgatttcactcataacaatcttaccctttcttgcaagagatgcttgtacattattttcctaataccttggtttcactagtagtaaacattattattttttttatatttgcaaaggaaacatatctaatccttcctatagaaagaacagtattgctgtaattccttttcttttcttcctcatttcctctgccccttaaaagattgaagaaagagaaacttgtcaactcatatccacgttatctagcaaagtacataagaatctatcactaagtaatgtatccttcagaatgtgttggtttaccagtgacaccccatattcatcacaaaattaaagcaagaagtccatagtaatttatttgctaatagtggatttttaatgctcagagtttctgaggtcaaattttatcttttcacttacaagctctatgatcttaaataatttacttaatgtattttggtgtattttcctcaaattaatattggtgttcaagactatatctaattcctctgatcactttgagaaacaaacttttattaaatgtaaggcacttttctatgaattttaaatataaaaataaatattgttctgattattactgaaaagatgtcagccatttcaatgtcttgggaaacaattttttgtttttgttctgttttctttttgcttcaataaaacaatagctggctctaaaaaaaaaa

SEQ ID NO: 76672 - DNA, 2916 bp, Homo sapiens
ggctggtactggtcccgaatcctcttagatccagccctctggcttggtgagtgaatctggtttacaccggctcctgccctgccttcactcttctcccctgattcaagactcctctgctttggactgaagcactgcaggagtttgtgaccaagaacttcaagagtcaagacagaaggaagccaagggagcagtgcaatggatttctcagtaaaggtagacatagagaaggaggtgacctgccccatctgcctggagctcctgacagaacctctgagcctagattgtggccacagcttctgccaagcctgcatcactgcaaagatcaaggagtcagtgatcatctcaagaggggaaagcagctgtcctgtgtgtcagaccagattccagcctgggaacctccgacctaatcggcatctggccaacatagttgagagagtcaaagaggtcaagatgagcccacaggaggggcagaagagagatgtctgtgagcaccacggaaaaaaactccagatcttctgtaaggaggatggaaaagtcatttgctgggtttgtgaactgtctcaggaacaccaaggtcaccaaacattccgcataaacgaggtggtcaaggaatgtcaggaaaagctgcaggtagccctgcagaggctgataaaggagaatcaagaggctgagaagctggaagatgacatcagacaagagagaaccgcctggaagaattatatccagatcgagagacagaagattctgaaagggttcaatgaaatgagagtcatcttggacaatgaggagcagagagagctgcaaaagctggaggaaggtgaggtgaatgtgctggataacctggcagcagctacagaccagctggtccagcagaggcaggatgccagcacgctcatctcagatctccagcggaggttgacgggatcgtcagtagagatgctgcaggatgtgattgacgtcatgaaaaggagtgaaagctggacattgaagaagccaaaatctgtttccaagaaactaaagagtgtattccgagtaccagatctgagtgggatgctgcaagttcttaaagagctgacagatgtccagtactactgggtggacgtgatgctgaatccaggcagtgccacttcgaatgttgctatttctgtggatcagagacaagtgaaaactgtacgcacctgcacatttaagaattcaaatccatgtgatttttctgcttttggtgtcttcggctgccaatatttctcttcggggaaatattactgggaagtagatgtgtctggaaagattgcctggatcctgggcgtacacagtaaaataagtagtctgaataaaaggaagagctctgggtttgcttttgatccaagtgtaaattattcaaaagtttactccagatatagacctcaatatggctactgggttataggattacagaatacatgtgaatataatgcttttgaggactcctcctcttctgatcccaaggttttgactctctttatggctgtgcctccctgtcgtattggggttttcctagactatgaggcaggcattgtctcatttttcaatgtcacaaaccacggagcactcatctacaagttctctggatgtcgcttttctcgacctgcttatccgtatttcaatccttggaactgcctagtccccatgactgtgtgcccaccgagctcctgagtgttctcattcctttacccacttctgcatagtagcccttgtgctgagactcagattctgcacctgagttcatctctactgagaccatctcttcctttctttccccttcttttacttagaatgtctttgtattcatttgctagggcttccatagcaaagcatcatagattgctgatttaaactgtaattgtattgccgtactgtgggctggaaatcccaaatctagattccagcagagttggttctttctgaggtctgcaaggaagggctctgttccatgcctctctccttggcttgtagaaggcatcttgtccctatgactcttcacattgtctttatgtacatctctgtgcccaagttttccctttttattaagacaccagtcatactggctcagggcccaccgctaatgccttaatgaaatcattttaacattatattctctacaaagaccttatttccaaataagataatatttggaggtattgggaataaaaactccaacatataaatttgaggaaggcacgatttcactcataacaatcttaccctttcttgcaagagatgcttgtacattattttcctaataccttggtttcactagtagtaaacattattattttttttatatttgcaaaggaaacatatctaatccttcctatagaaagaacagtattgctgtaattccttttcttttcttcctcatttcctctgccccttaaaagattgaagaaagagaaacttgtcaactcatatccacgttatctagcaaagtacataagaatctatcactaagtaatgtatccttcagaatgtgttggtttaccagtgacaccccatattcatcacaaaattaaagcaagaagtccatagtaatttatttgctaatagtggatttttaatgctcagagtttctgaggtcaaattttatcttttcacttacaagctctatgatcttaaataatttacttaatgtattttggtgtattttcctcaaattaatattggtgttcaagactatatctaattcctctgatcactttgagaaacaaacttttattaaatgtaaggcacttttctatgaattttaaatataaaaataaatattgttctgattattactgaaaagatgtcagccatttcaatgtcttgggaaacaattttttgtttttgttctgttttctttttgcttcaataaaacaatagctggctctaaaaaaaaaa

SEQ ID NO: 76673 - DNA, 2821 bp, Homo sapiens
actcagctcctgtggggaaactcatttgtggagaccagccctctggcttggtgagtgaatctggtttacaccggctcctgccctgccttcactcttctcccctgattcaagactcctctgctttggactgaagcactgcaggagtttgtgaccaagaacttcaagagtcaagacagaaggaagccaagggagcagtgcaatggatttctcagtaaaggtagacatagagaaggaggtgacctgccccatctgcctggagctcctgacagaacctctgagcctagattgtggccacagcttctgccaagcctgcatcactgcaaagatcaaggagtcagtgatcatctcaagaggggaaagcagctgtcctgtgtgtcagaccagattccagcctgggaacctccgacctaatcggcatctggccaacatagttgagagagtcaaagaggtcaagatgagcccacaggaggggcagaagagagatgtctgtgagcaccacggaaaaaaactccagatcttctgtaaggaggatggaaaagtcatttgctgggtttgtgaactgtctcaggaacaccaaggtcaccaaacattccgcataaacgaggtggtcaaggaatgtcaggaaaagctgcaggtagccctgcagaggctgataaaggagaatcaagaggctgagaagctggaagatgacatcagacaagagagaaccgcctggaagaattatatccagatcgagagacagaagattctgaaagggttcaatgaaatgagagtcatcttggacaatgaggagcagagagagctgcaaaagctggaggaaggtgaggtgaatgtgctggataacctggcagcagctacagaccagctggtccagcagaggcaggatgccagcacgctcatctcagatctccagcggaggttgacgggatcgtcagtagagatgctgcaggatgtgattgacgtcatgaaaaggagtgaaagctggacattgaagaagccaaaatctgtttccaagaaactaaagagtgtattccgagtaccagatctgagtgggatgctgcaagttcttaaagagctgacagatgtccagtactactgggtggacgtgatgctgaatccaggcagtgccacttcgaatgttgctatttctgtggatcagagacaagtgaaaactgtacgcacctgcacatttaagaattcaaatccatgtgatttttctgcttttggtgtcttcggctgccaatatttctcttcggggaaatattactgggaagtagatgtgtctggaaagattgcctggatcctgggcgtacacagtaaaataagtagtctgaataaaaggaagagctctgggtttgcttttgatccaagtgtaaattattcaaaagtttactccagatatagacctcaatatggctactgggttataggattacagaatacatgtgaatataatgcttttgaggactcctcctcttctgatcccaaggttttgactctctttatggctgtgcctccctgtcgtattggggttttcctagactatgaggcaggcattgtctcatttttcaatgtcacaaaccacggagcactcatctacaagttctctggatgtcgcttttctcgacctgcttatccgtatttcaatccttggaactgcctagtccccatgactgtgtgcccaccgagctcctgagtgttctcattcctttacccacttctgcatagtagcccttgtgctgagactcagattctgcacctgagttcatctctactgagaccatctcttcctttctttccccttcttttacttagaatgtctttgtattcatttgctagggcttccatagcaaagcatcatagattgctgatttaaactgtaattgtattgccgtactgtgggctggaaatcccaaatctagattccagcagagttggttctttctgaggtctgcaaggaagggctctgttccatgcctctctccttggcttgtagaaggcatcttgtccctatgactcttcacattgtctttatgtacatctctgtgcccaagttttccctttttattaagacaccagtcatactggctcagggcccaccgctaatgccttaatgaaatcattttaacattatattctctacaaagaccttatttccaaataagataatatttggaggtattgggaataaaaactccaacatataaatttgaggaaggcacgatttcactcataacaatcttaccctttcttgcaagagatgcttgtacattattttcctaataccttggtttcactagtagtaaacattattattttttttatatttgcaaaggaaacatatctaatccttcctatagaaagaacagtattgctgtaattccttttcttttcttcctcatttcctctgccccttaaaagattgaagaaagagaaacttgtcaactcatatccacgttatctagcaaagtacataagaatctatcactaagtaatgtatccttcagaatgtgttggtttaccagtgacaccccatattcatcacaaaattaaagcaagaagtccatagtaatttatttgctaatagtggatttttaatgctcagagtttctgaggtcaaattttatcttttcacttacaagctctatgatcttaaataatttacttaatgtattttggtgtattttcctcaaattaatattggtgttcaagactatatctaattcctctgatcactttgagaaacaaacttttattaaatgtaaggcacttttctatgaattttaaatataaaaataaatattgttctgattattactga

SEQ ID NO: 76674 - DNA, 2784 bp, Homo sapiens
gttaaatattaatgttttgtcctgttctaaatctctgtaaaagcagtattctttctattccttcttttcttaccctgtccccttcaacattctcagcactgcaggagtttgtgaccaagaacttcaagagtcaagacagaaggaagccaagggagcagtgcaatggatttctcagtaaaggtagacatagagaaggaggtgacctgccccatctgcctggagctcctgacagaacctctgagcctagattgtggccacagcttctgccaagcctgcatcactgcaaagatcaaggagtcagtgatcatctcaagaggggaaagcagctgtcctgtgtgtcagaccagattccagcctgggaacctccgacctaatcggcatctggccaacatagttgagagagtcaaagaggtcaagatgagcccacaggaggggcagaagagagatgtctgtgagcaccacggaaaaaaactccagatcttctgtaaggaggatggaaaagtcatttgctgggtttgtgaactgtctcaggaacaccaaggtcaccaaacattccgcataaacgaggtggtcaaggaatgtcaggaaaagctgcaggtagccctgcagaggctgataaaggagaatcaagaggctgagaagctggaagatgacatcagacaagagagaaccgcctggaagaattatatccagatcgagagacagaagattctgaaagggttcaatgaaatgagagtcatcttggacaatgaggagcagagagagctgcaaaagctggaggaaggtgaggtgaatgtgctggataacctggcagcagctacagaccagctggtccagcagaggcaggatgccagcacgctcatctcagatctccagcggaggttgacgggatcgtcagtagagatgctgcaggatgtgattgacgtcatgaaaaggagtgaaagctggacattgaagaagccaaaatctgtttccaagaaactaaagagtgtattccgagtaccagatctgagtgggatgctgcaagttcttaaagagctgacagatgtccagtactactgggtggacgtgatgctgaatccaggcagtgccacttcgaatgttgctatttctgtggatcagagacaagtgaaaactgtacgcacctgcacatttaagaattcaaatccatgtgatttttctgcttttggtgtcttcggctgccaatatttctcttcggggaaatattactgggaagtagatgtgtctggaaagattgcctggatcctgggcgtacacagtaaaataagtagtctgaataaaaggaagagctctgggtttgcttttgatccaagtgtaaattattcaaaagtttactccagatatagacctcaatatggctactgggttataggattacagaatacatgtgaatataatgcttttgaggactcctcctcttctgatcccaaggttttgactctctttatggctgtgcctccctgtcgtattggggttttcctagactatgaggcaggcattgtctcatttttcaatgtcacaaaccacggagcactcatctacaagttctctggatgtcgcttttctcgacctgcttatccgtatttcaatccttggaactgcctagtccccatgactgtgtgcccaccgagctcctgagtgttctcattcctttacccacttctgcatagtagcccttgtgctgagactcagattctgcacctgagttcatctctactgagaccatctcttcctttctttccccttcttttacttagaatgtctttgtattcatttgctagggcttccatagcaaagcatcatagattgctgatttaaactgtaattgtattgccgtactgtgggctggaaatcccaaatctagattccagcagagttggttctttctgaggtctgcaaggaagggctctgttccatgcctctctccttggcttgtagaaggcatcttgtccctatgactcttcacattgtctttatgtacatctctgtgcccaagttttccctttttattaagacaccagtcatactggctcagggcccaccgctaatgccttaatgaaatcattttaacattatattctctacaaagaccttatttccaaataagataatatttggaggtattgggaataaaaactccaacatataaatttgaggaaggcacgatttcactcataacaatcttaccctttcttgcaagagatgcttgtacattattttcctaataccttggtttcactagtagtaaacattattattttttttatatttgcaaaggaaacatatctaatccttcctatagaaagaacagtattgctgtaattccttttcttttcttcctcatttcctctgccccttaaaagattgaagaaagagaaacttgtcaactcatatccacgttatctagcaaagtacataagaatctatcactaagtaatgtatccttcagaatgtgttggtttaccagtgacaccccatattcatcacaaaattaaagcaagaagtccatagtaatttatttgctaatagtggatttttaatgctcagagtttctgaggtcaaattttatcttttcacttacaagctctatgatcttaaataatttacttaatgtattttggtgtattttcctcaaattaatattggtgttcaagactatatctaattcctctgatcactttgagaaacaaacttttattaaatgtaaggcacttttctatgaattttaaatataaaaataaatattgttctgattattactga

SEQ ID NO: 76675 - DNA, 2737 bp, Homo sapiens
  misc_feature (10)..(10): n is a, c, g, or t
ctcgatcatntcggctatgggatcaagactcctctgctttggactgaagcactgcaggagtttgtgaccaagaacttcaagagtcaagacagaaggaagccaagggagcagtgcaatggatttctcagtaaaggtagacatagagaaggaggtgacctgccccatctgcctggagctcctgacagaacctctgagcctagattgtggccacagcttctgccaagcctgcatcactgcaaagatcaaggagtcagtgatcatctcaagaggggaaagcagctgtcctgtgtgtcagaccagattccagcctgggaacctccgacctaatcggcatctggccaacatagttgagagagtcaaagaggtcaagatgagcccacaggaggggcagaagagagatgtctgtgagcaccacggaaaaaaactccagatcttctgtaaggaggatggaaaagtcatttgctgggtttgtgaactgtctcaggaacaccaaggtcaccaaacattccgcataaacgaggtggtcaaggaatgtcaggaaaagctgcaggtagccctgcagaggctgataaaggagaatcaagaggctgagaagctggaagatgacatcagacaagagagaaccgcctggaagaattatatccagatcgagagacagaagattctgaaagggttcaatgaaatgagagtcatcttggacaatgaggagcagagagagctgcaaaagctggaggaaggtgaggtgaatgtgctggataacctggcagcagctacagaccagctggtccagcagaggcaggatgccagcacgctcatctcagatctccagcggaggttgacgggatcgtcagtagagatgctgcaggatgtgattgacgtcatgaaaaggagtgaaagctggacattgaagaagccaaaatctgtttccaagaaactaaagagtgtattccgagtaccagatctgagtgggatgctgcaagttcttaaagagctgacagatgtccagtactactgggtggacgtgatgctgaatccaggcagtgccacttcgaatgttgctatttctgtggatcagagacaagtgaaaactgtacgcacctgcacatttaagaattcaaatccatgtgatttttctgcttttggtgtcttcggctgccaatatttctcttcggggaaatattactgggaagtagatgtgtctggaaagattgcctggatcctgggcgtacacagtaaaataagtagtctgaataaaaggaagagctctgggtttgcttttgatccaagtgtaaattattcaaaagtttactccagatatagacctcaatatggctactgggttataggattacagaatacatgtgaatataatgcttttgaggactcctcctcttctgatcccaaggttttgactctctttatggctgtgcctccctgtcgtattggggttttcctagactatgaggcaggcattgtctcatttttcaatgtcacaaaccacggagcactcatctacaagttctctggatgtcgcttttctcgacctgcttatccgtatttcaatccttggaactgcctagtccccatgactgtgtgcccaccgagctcctgagtgttctcattcctttacccacttctgcatagtagcccttgtgctgagactcagattctgcacctgagttcatctctactgagaccatctcttcctttctttccccttcttttacttagaatgtctttgtattcatttgctagggcttccatagcaaagcatcatagattgctgatttaaactgtaattgtattgccgtactgtgggctggaaatcccaaatctagattccagcagagttggttctttctgaggtctgcaaggaagggctctgttccatgcctctctccttggcttgtagaaggcatcttgtccctatgactcttcacattgtctttatgtacatctctgtgcccaagttttccctttttattaagacaccagtcatactggctcagggcccaccgctaatgccttaatgaaatcattttaacattatattctctacaaagaccttatttccaaataagataatatttggaggtattgggaataaaaactccaacatataaatttgaggaaggcacgatttcactcataacaatcttaccctttcttgcaagagatgcttgtacattattttcctaataccttggtttcactagtagtaaacattattattttttttatatttgcaaaggaaacatatctaatccttcctatagaaagaacagtattgctgtaattccttttcttttcttcctcatttcctctgccccttaaaagattgaagaaagagaaacttgtcaactcatatccacgttatctagcaaagtacataagaatctatcactaagtaatgtatccttcagaatgtgttggtttaccagtgacaccccatattcatcacaaaattaaagcaagaagtccatagtaatttatttgctaatagtggatttttaatgctcagagtttctgaggtcaaattttatcttttcacttacaagctctatgatcttaaataatttacttaatgtattttggtgtattttcctcaaattaatattggtgttcaagactatatctaattcctctgatcactttgagaaacaaacttttattaaatgtaaggcacttttctatgaattttaaatataaaaataaatattgttctgattattactga

SEQ ID NO: 76676 - DNA, 3796 bp, Homo sapiens
actcagctcctgtggggaaactcatttgtggagaccagccctctggcttggtgagtgaatctggtttacaccggctcctgccctgccttcactcttctcccctgattcaagactcctctgctttggactgaagcactgcaggagtttgtgaccaagaacttcaagagtcaagacagaaggaagccaagggagcagtgcaatggatttctcagtaaaggtagacatagagaaggaggtgacctgccccatctgcctggagctcctgacagaacctctgagcctagattgtggccacagcttctgccaagcctgcatcactgcaaagatcaaggagtcagtgatcatctcaagaggggaaagcagctgtcctgtgtgtcagaccagattccagcctgggaacctccgacctaatcggcatctggccaacatagttgagagagtcaaagaggtcaagatgagcccacaggaggggcagaagagagatgtctgtgagcaccacggaaaaaaactccagatcttctgtaaggaggatggaaaagtcatttgctgggtttgtgaactgtctcaggaacaccaaggtcaccaaacattccgcataaacgaggtggtcaaggaatgtcaggaaaagctgcaggtagccctgcagaggctgataaaggagaatcaagaggctgagaagctggaagatgacatcagacaagagagaaccgcctggaaggcaggaggagacacctcctaagggataattagacaggaatctgggcaggaccctgggctctatcacaaggagaccccttcctctttgctgtgctagaattaacaagcatagaagtcatttgattaggtctcaatttaactccttccctgttggagtttaggggctggaaagtagacatatcataaatcaacactatatttggaagtgaaggcatggagggaaatatctgtgaaaacgcttcctgtgaatcctgtgttccatttgtgtcatcaggtttgaggctccaatccttccagtaaacaccctggagaaagacccaggattccctgtttagggggtttcagtagggggatttttttgtttgtttgtttgtttgttttttgagacagagtctctctctgtcatccaggctggagtgtagtggcgcgatcttggctcactgcaacctctgcctccctggttcaaacgattctcctgcctcagcctcccgagtagctgggactacaggcatgtgccaccatgcccagctaattttttgtatttttagtagagatggggtttcatcatgttagccaggatggtctcaatctcctgaccttgtgatccacccatctcagcctcccaaagtgctgggattacaggcatgagccactgtgccaggccaggtagagggatttaagacacagaaaggcaaagttgttcaggacaggtgtctacaatccaagcctcacccaggcatcacattttgtctcagattaggcctcaataaaactgacttgagtgtattgctttgggaggagctcaggttaaaaagtagaaaaacatggcttcaccagaaattgtgtattggcttttgcctcctattccttttgagaactccctgaggaaaactgttcttatcctgtctcccaggctcatacaaagcaggccttcaaccagccagactgactgcctctttctcttttcattcccaagaattatatccagatcgagagacagaagattctgaaagggttcaatgaaatgagagtcatcttggacaatgaggagcagagagagctgcaaaagctggaggaaggtgaggtgaatgtgctggataacctggcagcagctacagaccagctggtccagcagaggcaggatgccagcacgctcatctcagatctccagcggaggttgacgggatcgtcagtagagatgctgcaggatgtgattgacgtcatgaaaaggagtgaaagctggacattgaagaagccaaaatctgtttccaagaaactaaagagtgtattccgagtaccagatctgagtgggatgctgcaagttcttaaagagctgacagatgtccagtactactgggtggacgtgatgctgaatccaggcagtgccacttcgaatgttgctatttctgtggatcagagacaagtgaaaactgtacgcacctgcacatttaagaattcaaatccatgtgatttttctgcttttggtgtcttcggctgccaatatttctcttcggggaaatattactgggaagtagatgtgtctggaaagattgcctggatcctgggcgtacacagtaaaataagtagtctgaataaaaggaagagctctgggtttgcttttgatccaagtgtaaattattcaaaagtttactccagatatagacctcaatatggctactgggttataggattacagaatacatgtgaatataatgcttttgaggactcctcctcttctgatcccaaggttttgactctctttatggctgtgcctccctgtcgtattggggttttcctagactatgaggcaggcattgtctcatttttcaatgtcacaaaccacggagcactcatctacaagttctctggatgtcgcttttctcgacctgcttatccgtatttcaatccttggaactgcctagtccccatgactgtgtgcccaccgagctcctgagtgttctcattcctttacccacttctgcatagtagcccttgtgctgagactcagattctgcacctgagttcatctctactgagaccatctcttcctttctttccccttcttttacttagaatgtctttgtattcatttgctagggcttccatagcaaagcatcatagattgctgatttaaactgtaattgtattgccgtactgtgggctggaaatcccaaatctagattccagcagagttggttctttctgaggtctgcaaggaagggctctgttccatgcctctctccttggcttgtagaaggcatcttgtccctatgactcttcacattgtctttatgtacatctctgtgcccaagttttccctttttattaagacaccagtcatactggctcagggcccaccgctaatgccttaatgaaatcattttaacattatattctctacaaagaccttatttccaaataagataatatttggaggtattgggaataaaaactccaacatataaatttgaggaaggcacgatttcactcataacaatcttaccctttcttgcaagagatgcttgtacattattttcctaataccttggtttcactagtagtaaacattattattttttttatatttgcaaaggaaacatatctaatccttcctatagaaagaacagtattgctgtaattccttttcttttcttcctcatttcctctgccccttaaaagattgaagaaagagaaacttgtcaactcatatccacgttatctagcaaagtacataagaatctatcactaagtaatgtatccttcagaatgtgttggtttaccagtgacaccccatattcatcacaaaattaaagcaagaagtccatagtaatttatttgctaatagtggatttttaatgctcagagtttctgaggtcaaattttatcttttcacttacaagctctatgatcttaaataatttacttaatgtattttggtgtattttcctcaaattaatattggtgttcaagactatatctaattcctctgatcactttgagaaacaaacttttattaaatgtaaggcacttttctatgaattttaaatataaaaataaatattgttctgattattactga

SEQ ID NO: 76677 - DNA, 2760 bp, Homo sapiens
actcagctcctgtggggaaactcatttgtggagaccagccctctggcttggtgagtgaatctggtttacaccggctcctgccctgccttcactcttctcccctgattcaagactcctctgctttggactgaagcactgcaggagtttgtgaccaagaacttcaagagtcaagacagaaggaagccaagggagcagtgcaatggatttctcagtaaaggtagacatagagaaggaggtgacctgccccatctgcctggagctcctgacagaacctctgagcctagattgtggccacagcttctgccaagcctgcatcactgcaaagatcaaggagtcagtgatcatctcaagaggggaaagcagctgtcctgtgtgtcagaccagattccagcctgggaacctccgacctaatcggcatctggccaacatagttgagagagtcaaagaggtcaagatgagcccacaggaggggcagaagagagatgtctgtgagcaccacggaaaaaaactccagatcttctgtaaggaggatggaaaagtcatttgctgggtttgtgaactgtctcaggaacaccaaggtcaccaaacattccgcataaacgaggtggtcaaggaatgtcaggaaaagctgcaggtagccctgcagaggctgataaaggagaatcaagaggctgagaagctggaagatgacatcagacaagagagaaccgcctggaagaattatatccagatcgagagacagaagattctgaaagggttcaatgaaatgagagtcatcttggacaatgaggagcagagagagctgcaaaagctggaggaaggatgccagcacgctcatctcagatctccagcggaggttgacgggatcgtcagtagagatgctgcaggttatcaatttttgttatcactaggagtgaaagctggacattgaagaagccaaaatctgtttccaagaaactaaagagtgtattccgagtaccagatctgagtgggatgctgcaagttcttaaagagctgacagatgtccagtactactgggtggacgtgatgctgaatccaggcagtgccacttcgaatgttgctatttctgtggatcagagacaagtgaaaactgtacgcacctgcacatttaagaattcaaatccatgtgatttttctgcttttggtgtcttcggctgccaatatttctcttcggggaaatattactgggaagtagatgtgtctggaaagattgcctggatcctgggcgtacacagtaaaataagtagtctgaataaaaggaagagctctgggtttgcttttgatccaagtgtaaattattcaaaagtttactccagatatagacctcaatatggctactgggttataggattacagaatacatgtgaatataatgcttttgaggactcctcctcttctgatcccaaggttttgactctctttatggctgtgcctccctgtcgtattggggttttcctagactatgaggcaggcattgtctcatttttcaatgtcacaaaccacggagcactcatctacaagttctctggatgtcgcttttctcgacctgcttatccgtatttcaatccttggaactgcctagtccccatgactgtgtgcccaccgagctcctgagtgttctcattcctttacccacttctgcatagtagcccttgtgctgagactcagattctgcacctgagttcatctctactgagaccatctcttcctttctttccccttcttttacttagaatgtctttgtattcatttgctagggcttccatagcaaagcatcatagattgctgatttaaactgtaattgtattgccgtactgtgggctggaaatcccaaatctagattccagcagagttggttctttctgaggtctgcaaggaagggctctgttccatgcctctctccttggcttgtagaaggcatcttgtccctatgactcttcacattgtctttatgtacatctctgtgcccaagttttccctttttattaagacaccagtcatactggctcagggcccaccgctaatgccttaatgaaatcattttaacattatattctctacaaagaccttatttccaaataagataatatttggaggtattgggaataaaaactccaacatataaatttgaggaaggcacgatttcactcataacaatcttaccctttcttgcaagagatgcttgtacattattttcctaataccttggtttcactagtagtaaacattattattttttttatatttgcaaaggaaacatatctaatccttcctatagaaagaacagtattgctgtaattccttttcttttcttcctcatttcctctgccccttaaaagattgaagaaagagaaacttgtcaactcatatccacgttatctagcaaagtacataagaatctatcactaagtaatgtatccttcagaatgtgttggtttaccagtgacaccccatattcatcacaaaattaaagcaagaagtccatagtaatttatttgctaatagtggatttttaatgctcagagtttctgaggtcaaattttatcttttcacttacaagctctatgatcttaaataatttacttaatgtattttggtgtattttcctcaaattaatattggtgttcaagactatatctaattcctctgatcactttgagaaacaaacttttattaaatgtaaggcacttttctatgaattttaaatataaaaataaatattgttctgattattactga

SEQ ID NO: 76678 - DNA, 1978 bp, Homo sapiens
tctgcctcctgggttcaagcgattctgctgcctcagcctcccaagtagctgggattacaggcgtgtgccaccacgcttggctaatttttatagtcttacaccctgtatttcttaagggtcctactaacctctgactatcaacacaagttccgtttgatatcgacacaagtttcattttcaatatgtctcttctcaatgctgtaagacacacctatcccatatccttcacttgacttggtaattttttctacagtggatggacgtgatgctgaatccaggcagtgccacttcgaatgttgctatttctgtggatcagagacaagtgaaaactgtacgcacctgcacatttaagaattcaaatccatgtgatttttctgcttttggtgtcttcggctgccaatatttctcttcggggaaatattactgggaagtagatgtgtctggaaagattgcctggatcctgggcgtacacagtaaaataagtagtctgaataaaaggaagagctctgggtttgcttttgatccaagtgtaaattattcaaaagtttactccagatatagacctcaatatggctactgggttataggattacagaatacatgtgaatataatgcttttgaggactcctcctcttctgatcccaaggttttgactctctttatggctgtgcctccctgtcgtattggggttttcctagactatgaggcaggcattgtctcatttttcaatgtcacaaaccacggagcactcatctacaagttctctggatgtcgcttttctcgacctgcttatccgtatttcaatccttggaactgcctagtccccatgactgtgtgcccaccgagctcctgagtgttctcattcctttacccacttctgcatagtagcccttgtgctgagactcagattctgcacctgagttcatctctactgagaccatctcttcctttctttccccttcttttacttagaatgtctttgtattcatttgctagggcttccatagcaaagcatcatagattgctgatttaaactgtaattgtattgccgtactgtgggctggaaatcccaaatctagattccagcagagttggttctttctgaggtctgcaaggaagggctctgttccatgcctctctccttggcttgtagaaggcatcttgtccctatgactcttcacattgtctttatgtacatctctgtgcccaagttttccctttttattaagacaccagtcatactggctcagggcccaccgctaatgccttaatgaaatcattttaacattatattctctacaaagaccttatttccaaataagataatatttggaggtattgggaataaaaactccaacatataaatttgaggaaggcacgatttcactcataacaatcttaccctttcttgcaagagatgcttgtacattattttcctaataccttggtttcactagtagtaaacattattattttttttatatttgcaaaggaaacatatctaatccttcctatagaaagaacagtattgctgtaattccttttcttttcttcctcatttcctctgccccttaaaagattgaagaaagagaaacttgtcaactcatatccacgttatctagcaaagtacataagaatctatcactaagtaatgtatccttcagaatgtgttggtttaccagtgacaccccatattcatcacaaaattaaagcaagaagtccatagtaatttatttgctaatagtggatttttaatgctcagagtttctgaggtcaaattttatcttttcacttacaagctctatgatcttaaataatttacttaatgtattttggtgtattttcctcaaattaatattggtgttcaagactatatctaattcctctgatcactttgagaaacaaacttttattaaatgtaaggcacttttctatgaattttaaatataaaaataaatattgttctgattattactga

SEQ ID NO: 76679 - DNA, 2683 bp, Homo sapiens
  misc_feature (2415)..(2415): n is a, c, g, or t
  misc_feature (2417)..(2417): n is a, c, g, or t
  misc_feature (2683)..(2683): n is a, c, g, or t
actcagctcctgtggggaaactcatttgtggagaccagccctctggcttggtgagtgaatctggtttacaccggctcctgccctgccttcactcttctcccctgattcaagactcctctgctttggactgaagcactgcaggagtttgtgaccaagaacttcaagagtcaagacagaaggaagccaagggagcagtgcaatggatttctcagtaaaggtagacatagagaaggaggtgacctgccccatctgcctggagctcctgacagaacctctgagcctagattgtggccacagcttctgccaagcctgcatcactgcaaagatcaaggagtcagtgatcatctcaagaggggaaagcagctgtcctgtgtgtcagaccagattccagcctgggaacctccgacctaatcggcatctggccaacatagttgagagagtcaaagaggtcaagatgagcccacaggaggggcagaagagagatgtctgtgagcaccacggaaaaaaactccagatcttctgtaaggaggatggaaaagtcatttgctgggtttgtgaactgtctcaggaacaccaaggtcaccaaacattccgcataaacgaggtggtcaaggaatgtcaggaaaagctgcaggtagccctgcagaggctgataaaggagaatcaagaggctgagaagctggaagatgacatcagacaagagagaaccgcctggaagaattatatccagatcgagagacagaagattctgaaagggttcaatgaaatgagagtcatcttggacaatgaggagcagagagagctgcaaaagctggaggaaggtgaggtgaatgtgctggataacctggcagcagctacagaccagctggtccagcagaggcaggatgccagcacgctcatctcagatctccagcggaggttgacgggatcgtcagtagagatgctgcaggatgtgattgacgtcatgaaaaggagtgaaagctggacattgaagaagccaaaatctgtttccaagaaactaaagagtgtattccgagtaccagatctgagtgggatgctgcaagttcttaaagagctgacagatgtccagtactactgggtggacgtgatgctgaatccaggcagtgccacttcgaatgttgctatttctgtggatcagagacaagtgaaaactgtacgcacctgcacatttaagaattcaaatccatgtgatttttctgcttttggtgtcttcggctgccaatatttctcttcggggaaatattactgggaagtagatgtgtctggaaagattgcctggatcctgggcgtacacagtaaaataagtagtctgaataaaaggaagagctctgggtttgcttttgatccaagtgtaaattattcaaaagtttactccagatatagacctcaatatggctactgggttataggattacagaatacatgtgaatataatgcttttgaggactcctcctcttctgatcccaaggttttgactctctttatggctgtgcctccctgtcgtattggggttttcctagactatgaggcaggcattgtctcatttttcaatgtcacaaaccacggagcactcatctacaagttctctggatgtcgcttttctcgacctgcttatccgtatttcaatccttggaactgcctagtccccatgactgtgtgcccaccgagctcctgagtgttctcattcctttacccacttctgcatagtagcccttgtgctgagactcagattctgcacctgagttcatctctactgagaccatctcttcctttctttccccttcttttacttagaatgtctttgtattcatttgctagggcttccatagcaaagcatcatagattgctgatttaaactgtaattgtattgccgtactgtgggctggaaatcccaaatctagattccagcagagttggttctttctgaggtctgcaaggaagggctctgttccatgcctctctccttggcttgtagaaggcatcttgtccctatgactcttcacattgtctttatgtacatctctgtgcccaagttttccctttttattaagacaccagtcatactggctcagggcccaccgctaatgccttaatgaaatcattttaacattatattctctacaaagaccttatttccaaataagataatatttggaggtattgggaataaaaactccaacatataaatttgaggaaggcacgatttcactcataacaatcttaccctttcttgcaagagatgcttgtacattattttcctaataccttggtttcactagtagtaaacattattattttttttatatttgcaaaggaaacatatctaatccttcctatagaaagaacagtattgctgtaattccttttcttttcttcctcatttcctctgccctnanagattgagaagaaacactgtcaatctattcccgtattagccaagtctagatctattcctagaagttcccagacggttggctccgtgcaccatttctcaaatagccaagtcccacctcctgccacgggcactagccccagcggccactcactctcacacagccacctacaaccaatcggccacccatgggcgcattttcctcttggcccctggctccactacactcgtcacgcgccccctgttcttataggcgcggattgatttgcn

SEQ ID NO: 76680 - DNA, 1364 bp, Homo sapiens
actcagctcctgtggggaaactcatttgtggagaccagccctctggcttggtgagtgaatctggtttacaccggctcctgccctgccttcactcttctcccctgattcaagactcctctgctttggactgaagcactgcaggagtttgtgaccaagaacttcaagagtcaagacagaaggaagccaagggagcagtgcaatggatttctcagtaaaggtagacatagagaaggaggtgacctgccccatctgcctggagctcctgacagaacctctgagcctagattgtggccacagcttctgccaagcctgcatcactgcaaagatcaaggagtcagtgatcatctcaagaggggaaagcagctgtcctgtgtgtcagaccagattccagcctgggaacctccgacctaatcggcatctggccaacatagttgagagagtcaaagaggtcaagatgagcccacaggaggggcagaagagagatgtctgtgagcaccacggaaaaaaactccagatcttctgtaaggaggatggaaaagtcatttgctgggtttgtgaactgtctcaggaacaccaaggtcaccaaacattccgcataaacgaggtggtcaaggaatgtcaggaaaagctgcaggtagccctgcagaggctgataaaggagaatcaagaggctgagaagctggaagatgacatcagacaagagagaaccgcctggaagaattatatccagatcgagagacagaagattctgaaagggttcaatgaaatgagagtcatcttggacaatgaggagcagagagagctgcaaaagctggaggaaggtgaggtgaatgtgctggataacctggcagcagctacagaccagctggtccagcagaggcaggatgccagcacgctcatctcagatctccagcggaggttgacgggatcgtcagtagagatgctgcaggatgtgattgacgtcatgaaaaggagtgaaagctggacattgaagaagccaaaatctgtttccaagaaactaaagagtgtattccgagtaccagatctgagtgggatgctgcaagttcttaaagagctgacagatgtccagtactactgggtggacgtgatgctgaatccaggcagtgccacttcgaatgttgctatttctgtggatcagagacaagtgaaaactgtacgcacctgcacatttaagaattcaaatccatgtgatttttctgcttttggtgtcttcggctgccaatatttctcttcggggaaatattactgggaagtagatgtgtctggaaagattgcctggatcctgggcgtacacagtaaaataagtagtctgaataaaaggaagagctctgggtttgcttttg

SEQ ID NO: 76681 - DNA, 1277 bp, Homo sapiens
actcagctcctgtggggaaactcatttgtggagaccagccctctggcttggtgagtgaatctggtttacaccggctcctgccctgccttcactcttctcccctgattcaagactcctctgctttggactgaagcactgcaggagtttgtgaccaagaacttcaagagtcaagacagaaggaagccaagggagcagtgcaatggatttctcagtaaaggtagacatagagaaggaggtgacctgccccatctgcctggagctcctgacagaacctctgagcctagattgtggccacagcttctgccaagcctgcatcactgcaaagatcaaggagtcagtgatcatctcaagaggggaaagcagctgtcctgtgtgtcagaccagattccagcctgggaacctccgacctaatcggcatctggccaacatagttgagagagtcaaagaggtcaagatgagcccacaggaggggcagaagagagatgtctgtgagcaccacggaaaaaaactccagatcttctgtaaggaggatggaaaagtcatttgctgggtttgtgaactgtctcaggaacaccaaggtcaccaaacattccgcataaacgaggtggtcaaggaatgtcaggaaaagctgcaggtagccctgcagaggctgataaaggagaatcaagaggctgagaagctggaagatgacatcagacaagagagaaccgcctggaagaattatatccagatcgagagacagaagattctgaaagggttcaatgaaatgagagtcatcttggacaatgaggagcagagagagctgcaaaagctggaggaaggtgaggtgaatgtgctggataacctggcagcagctacagaccagctggtccagcagaggcaggatgccagcacgctcatctcagatctccagcggaggttgacgggatcgtcagtagagatgctgcagatgtgattgacgtcatgaaaaggagtgaaagctggacagtgagaaggtggaggagtataacctgagatactcctacatgaagtcgtgggcaggcctgctgagaatactgggtgtggtggagctgcttttgggggccggtgtctttgcttgtgtcacagcttacattcacaaggacagtgagtggtacaacttgtttggatattcacaaccgtatggcatgggaggcgttggtggattgggcagtatgtatgggggctattactacactgctaagaccccttatgtactcgtgttgctggatcacgatcaaggatagctgacaaacaac

SEQ ID NO: 76682 - DNA, 299 bp, Homo sapiens
attacacagaggggaagaccttcccaagattacacacagacaggtagacatgagcacatttctctggactccagtgtcaggcatctcccctctactgtcctcagggaagagggtccaagtgcgtcagcaagtatggtgaaaggtgaaagagacagtgatcttggatggagagaaatagggcaaaggtgtaaaggttatcaatttttgttatcactaggagtgaaagctggacattgaagaagccaaaatctgtttccaagaaactaaagagtgtattccgagtaccagatctgagtggg

SEQ ID NO: 76683 - DNA, 638 bp, Homo sapiens
ccgcggacgcgtgggttcgtaaggaagcaaatcctaggaacaatcacgtgagcttggaaggagacctttccccagctgagcctcagcctgggccatcacctgcatctggactgaagacccaaagaaactactccatcaggaattgtttgagaccatgcattatgtggacactcatatcgtggaattatattgccaattggcattcctaaagcttctacgctagcaggtttggagtaattcaccagtgaagtcttctcaacctgggcaatcatgtgagcttggaagatgatgcatccccatctcatctttcaggtgaaacctcagccttggccatcacctacatctggatttctgacccagagaaactagaaagcaggaggttattcgaggatgctgggctcccctcacaaatctgtttctcaaagtattgcagaaaggtgtgtcttctggacactcccagagtaggctggagtacagtggcatgatttcagcttaccgcaaactctgcctcctggattcaaaccatcctccggcctcagcctcctgagtagctggggcaacaggtgtgaaggctggtcttaaactcctgacctcaagtgatggacctgtcttggcttccaaaagtgctggaattacag

SEQ ID NO: 76684 - DNA, 2349 bp, Homo sapiens
taagaaaaaaaggctagcactagattctgaagcagcagtctctgctgataaaccagactcagtactgactcatcatgtccccagtttcctgcagaagctgtgcaaagagagggcccagaagttgtgcagaaatagcaccagggtgcctgcacagtgcacagtcccttcccatcctcagtccactcctgtacatagcccagacagaatgctggactcacccaaaagaaagagaccgaaatcccttgcgcaagtggaagagcctgcaattgaaaatgttaagcctccaggttcccctgtggccaaactggcaaaatttactttcaagcagaagtcaaaactgatccactcctttgaagatcacagccatgtgtcacctggtgcaactaaaatagcagttcatagtcctaaaatttcccagcgtagaacaagaagagacgcagccttgccggtgaagcgtccaggaaagttaacatctaccccaggaaaccagatctccagtcagccacagggtgagacaaaggaggtgtcgcagcagccaccagagaaacacggaccaagagagaaggtgatgtgtgcccctgagaagaggattattcagcctgaattagagcttgggaacgagactgggtgtgctcatcttacttgtgagggagacaaaaaggaagaggtttcaggcagtaataaaagcggcaaggttcatgcctgcacattagccagattggcaaacttctgcgttactcccccatcggaatccaaatcaaaatcccctcctcctgaaaggaagaaccgaggtgagagaggcccaagctcccctcctacaaccacagctccaatgcgtgtcagtaaaaggaaatcttttcagctccgtgggtccaccgagaaactgattgtttccaaagaatccctcttcactttaccagaactaggtgatgaagcatttgattgtgactggggtgaagagatgagaaaaaagtcatagttgggaaaagctttctggtcaaatctcaccttcttcaactccacagaggaccttcaggatatcaatatggtatttataaatgtatagaacaattggccatattgaggatcactctgaatactggctcccccttaaggctttctaatttcaggttaatcttcatgacttaaaaagttgtataatcagttgaggtcagtgtgataccagcagctgagctgaattaattatgttgtgcttaattttacaaatggagtacttgtattcctgttcctgaagctgtttctgttttttgttttgttttgtttttaagggggagaggttcttccctagattaatttcttctttcattcactcaggaacaaatgtcaagaaggtagcactcataaatctaacaaggcagatgaactcttttctacttttttttttttttttttgtattttcacctggaatgggctaagtacagtgaatataatcacttggatgatttgccaaaatcagactatttttctagtattatttttgtattgatttgtgtggatcaggttaaatgtgactaatgcttttctttctttgagaggtatccttacaattccatgatgttcttagagatctggccactggtcaaacagtacctttctgaagtactgaccttctgagttgtcctttctttcttgagccaacattttgtacttcagattcttttttctcttgggggcctaccttcaaccaagtaaaatactgtgattagaagaagagagagtatgagccaggcacagtgactcactcctgtagtcctagctactcggggaggctgaggcaggatgattgcttaagcccaggagttcggggttacagtgagctgtggtcacaccactgtattccagcctgggtgacagagtgagatcctgtctctaaaaataaaataaatgaagaagagagactatgtggtagtctcaatcaaacatcatgtctcatctacccagctggttaatatggaaatgtgattcctactaagttgtgattcacttgtctttaaaaccaaggaaattatgtactgtttttggtcagaatagataacctcaagctttgtctttctatgtgcttttaaaatcacttattcctttggattctaataagggttattaggattcagtaattatggactttctcttctgaagtgtgaatttgtaaactgattgtttaattgtcagagggacttttggacatagaatactcaaaactatatgtattttgtttaattttcacttcattcaattcacgcattgaaaacaaatttagaaaatccaatttttcttaagcatttaaacgttctaaaattcactaataaaattttctgaaaaaatttaaa

SEQ ID NO: 76685 - DNA, 2932 bp, Homo sapiens
taagaaaaaaaggctagcactagattctgaagcagcagtctctgctgataaaccagactcagtactgactcatcatgtccccagtttcctgcagaagctgtgcaaagagagggcccagaagttgtgcagaaatagcaccagggtgcctgcacagtgcacagtcccttcccatcctcagtccactcctgtacatagcccagacagaatgctggactcacccaaaagaaagagaccgaaatcccttgcgcaagtggaagagcctgcaattgaaaatgttaagcctccaggttcccctgtggccaaactggcaaaatttactttcaagcagaagtcaaaactgatccactcctttgaagatcacagccatgtgtcacctggtgcaactaaaatagcagttcatagtcctaaaatttcccagcgtagaacaagaagagacgcagccttgccggtgaagcgtccaggaaagttaacatctaccccaggaaaccagatctccagtcagccacagggtgagacaaaggaggtgtcgcagcagccaccagagaaacacggaccaagagagaaggtgatgtgtgcccctgagaagaggattattcagcctgaattagagcttgggaacgagactgggtgtgctcatcttacttgtgagggagacaaaaaggaagaggtttcaggcagtaataaaagcggcaaggttcatgcctgcacattagccagattggcaaacttctgcgttactcccccatcggaatccaaatcaaaatcccctcctcctgaaaggaagaaccgaggtgagagaggcccaagctcccctcctacaaccacagctccaatgcgtgtcagtaaaaggaaatcttttcagctccgtgggtccaccgagaaactgattgtttccaaagaatccctcttcactttaccagaactaggtgatgaagcatttgattgtgactggggtgaagagatgagaaaaaagtcatagttgggaaaagctttctggtcaaatctcaccttcttcaactccacagaggaccttcaggatatcaatatggtatttataaatgtatagaacaattggccatattgaggatcactctgaatactggctcccccttaaggctttctaatttcaggttaatcttcatgacttaaaaagttgtataatcagttgaggtcagtgtgataccagcagctgagctgaattaattatgttgtgcttaattttacaaatggagtacttgtattcctgttcctgaagctgtttctgttttttgttttgttttgtttttaagggggagaggttcttccctagattaatttcttctttcattcactcaggaacaaatgtcaagaaggtagcactcataaatctaacaaggcagatgaactcttttctacttttttttttttttttttgtattttcacctggaatgggctaagtacagtgaatataatcacttggatgatttgccaaaatcagactatttttctagtattatttttgtattgatttgtgtggatcaggttaaatgtgactaatgcttttctttctttgagaggtatccttacaattccatgatgttcttagagatctggccactggtcaaacagtacctttctgaagtactgaccttctgagttgtcctttctttcttgagccaacattttgtacttcagattcttttttctcttgggggcctaccttcaaccaagtaaaatactgtgattagaagaagagagagtatgagccaggcacagtgactcactcctgtagtcctagctactcggggaggctgaggcaggatgattgcttaagcccaggagttcggggttacagtgagctgtggtcacaccactgtattccagcctgggtgacagagtgagatcctgtctctaaaaataaaataaatgaagaagagagactatgtggtagtctcaatcaaacatcatgtctcatctacccagctggttaatatggaaatgtgattcctactaagttgtgattcacttgtctttaaaaccaaggaaattatgtactgtttttggtcagaatagataacctcaagctttgtctttctatgtgcttttaaaatcacttattcctttggattctaataagggttattaggattcagtaattatggactttctcttctgaagtgtgaatttgtaaactgattgtttaattgtcagagggacttttggacatagaatactcaaaactatatgtattttgtttaattttcacttcattcaattcacgcattgaaaacaaatttagaaaatccaatttttcttaagcatttaaacgttctaaaattcactaataaaattttctgaaaaaatttaaaaaaaaaaaaaaaaaaaaaaaaaaaaaaaaaaaaaaaaaacaaaaaaaaaacacaacaaaacaaaacaacaccaaaaaaaaaaacaaaacaaacaacaaaacaagacaccaacgagcggcgcgcctaaacacagaagccacaccggcggcgacaccacagcgccgccccaccacctcaacccgagccagccaccccccatgcgcggaatatcaacagcaaacaggacgcggcaaaaaccgccgaggaaacaaaccagagcacaggcgcataaggaacacccaacaccggctggggagactgacgaggccgcacccgccaccacgagatcatgagcgcggagcagcaaaatcacatacgagcgagctggaaggcaaacacaacacgatagcgctgggccgacgacctcgccacgagaagtcacacagaaaatcaacgggcaggaagacaacccgaagccagccggccgccgcgcagagcgaccccggacgacgtcgcagcggccctcgtccgtgcgaagacgggacgcgccccgagaggccaggcacccgcgagcgacccgccagacaacgacccgcacaacgat

SEQ ID NO: 76686 - DNA, 344 bp, Homo sapiens
cagagatagaagaaaatataaaactattttctttttaaaactgtactgaatgtagggccgggcatagtggctcactcctgtaatcccaatactttagggggccaaggtaggaggatcacttgaggtcagcagttcaagaccagcctaggcaacatggcgagactccatctctacagaaaatttttttaaaaattagctggacatggtggctcatgcctgtggtcctagctactcaggaggctaaggtgggaggattgcttgagcccaggaggttgaggctgcagtgagccgtgatcgtgccactgcactccagcctgggtgacagaatgagactcaatctcaaa

SEQ ID NO: 76687 - DNA, 454 bp, Homo sapiens
tatacatacacacacccacaccctaccccatgccaccccaccccccaccccacaatagagaagagcagggaaagtagataggcactttcctatctttttgaaacctagtcacaaagaacatgggcattacccttgtcacacgcagggtattactgtttttattcattcaaaagttatttaacgagctcctactgtggtgagcaagtccagtggaatccaggcccttgctctgctattagagggatgagggcctttctcttcaaggggagattccctttccttgtgtcagccttacatagtcctttctgggtttcctaatggtggaaccaccaggcagagttccaagatggccaagccttcctcccttctcttcctaaacttcccacagctatttaagaagtacagatgacttcacagcccacgggaggcatggccaatagcaccttgagaaaac

SEQ ID NO: 76688 - DNA, 403 bp, Homo sapiens
tgttgcccaggctggtctcgaactcctgagctcaagcaattcgtccacctcagcctccgaaagtgctgggattacaggtgtgagccactgcacccgccttcaagagttatcaagagataaattatatttcctctctgaagagaaggtgaagtcatcttctgagagtgaaatagggagtgaggtgggagttcagaaagaatggaaacgtttttgaagagtcaaaattattgactggggacaaaggaaaagatttccatacagtgttctgttggagttggaaagcatgctctatgtggcatgatcgtctcaatctgcaccataccccatgagcagcgagttggggtcctctttgggtagatgttttgggaaggctggcagaatcacaaggcgctgagcatgctgg

SEQ ID NO: 76689 - DNA, 453 bp, Homo sapiens
ctgtgggctatgactttgtcctcatgcctttgccatgtggatggtgaatgatgcaggtgttgccctttctgatctccagccccccagcctttcatactttacctggctgattctacatcttttttgaatgatgaatttttgtttcaggaatcagcctgatggttttaattcacttctccagtgcttggagataactaaaagcttccctccctatatatgagttctggtggaacacagattatttacttctgagagtcttttgctagttggaaatggtgcttttctatctctaaatccctcaaggatatgggtagtgtggttcttgcatgtaagaaatgtttctttaaaatgcacccagtataataagagaactgaattaccctctccgggcagttctctcagatactgagtcattgttagaacatcaaattagcaaatagctagaccagaagg

SEQ ID NO: 76690 - DNA, 1435 bp, Homo sapiens
ttctcgtcttgtgtacctgggcatccctccagggtttggggagccagcctcccccgcccccctacactggaatttgtttgtgtttcttcactgggggtggagggctcaaggggctctaagagggaaaagctccccacacccccagatgctgctcctcctcccggctagagggaacccaacacccaccagtgaaatctgatgcagctgggagtttggaccttgggtctagacagctggtgcgcccaagaggtagggggaggggtgcggcttctccccagttcccagggagtcttgtttgttaagcggggccttgggcagtgttttcctgctgagggtggttttacattttttttcctcattggcccacagagagtggagttggcctagctctgacgcgtcccctctttatccccaatgtgccccctccattaggggctccaggtgggctccagcccacacttgctctctgcctctgctgacacgtgcacacacacacacatgcacacactgctcctctctgcctgctttcccctggagtcccatgccctgccccatccagacactgcccaaggcccacccgtctatttccacctcattccccctttaagctgagaatggggtctgcctatagaagcttccagagacagctgagactgggtccccggtgcctccaccctaggatctcaggcctgccccaaactgcttcttacagcgtggaggtttctctgatttctcccttatctagcaacacttggttcttttggctagtcagggctgggatcccagggggatccacctgcaggagtcagaggtaaagaagcatccacacggagggtagtggggaaggaagcccacatggcagaagctctgcaaacacagtccgagggactgagtgagtccatacaatgcctcacacacaaaggccattgtcaaagcctcgggcctggcagaaagtgaggggggtggggccgctaggccacctcctgctcagccacccctggtcctcattctgggatgaggggagggcctaggagaagccctccctttcagtgcagattcccttcttgaatgggacattgagttcctatcagccaccccagactgggtcttcccatgtatataatggaggaagacccctcccagccctctcagtcccccagctcaaagtgcctcagttcctccatctgctcccagatcccctggcactctagacaggcatgcccatgggaaggaccctgggatggagaggcaggcttcgcggcccttcatgcctgcccactgggattccagttaactcaccccagggtgtcaggggctctgcaggatggcaagtgttggggaggagggaggcagaccactctgtgccccacgggcactgacccaccctgccataggcttcctaagggaggcccccaaaaccctctcccctcccctc

SEQ ID NO: 76691 - DNA, 497 bp, Homo sapiens
gataaattaaggctagtataggcctgcgtgtttaatcggccgaccctgggatggagaggcaggcttcgcggcccttcatgcctgcccactgggattccagttaactcaccccagggtgtcaggggctctgcaggatggcaagtgttggggaggagggaggcagaccactctgtgccccacgggcactgacccaccctgccataggcttcctaagggagcccccagaaacacaatcgacaatcagcactagcagcgacacaagggtagaacaagtagaagagagaacaagagtcgcacgagcaacaaaacgcacgtaacaggaaagacacaggaaccgagaagagagagaaaagagagaaagaaaaggacagcagcaagagacgagagacagcacagcgagagggggaaggagaggaggagaacgaacaaacacagaaaaacgacaaggaaaggaagagcagaggggataggcagcagaggcagaagaaaggagaaca

SEQ ID NO: 76692 - DNA, 2945 bp, Homo sapiens
ttctcgtcttgtgtacctgggcatccctccagggtttggggagccagcctcccccgcccccctacactggaatttgtttgtgtttcttcactgggggtggagggctcaaggggctctaagagggaaaagctccccacacccccagatgctgctcctcctcccggctagagggaacccaacacccaccagtgaaatctgatgcagctgggagtttggaccttgggtctagacagctggtgcgcccaagaggtagggggaggggtgcggcttctccccagttcccagggagtcttgtttgttaagcggggccttgggcagtgttttcctgctgagggtggttttacattttttttcctcattggcccacagagagtggagttggcctagctctgacgcgtcccctctttatccccaatgtgccccctccattaggggctccaggtgggctccagcccacacttgctctctgcctctgctgacacgtgcacacacacacacatgcacacactgctcctctctgcctgctttcccctggagtcccatgccctgccccatccagacactgcccaaggcccacccgtctatttccacctcattccccctttaagctgagaatggggtctgcctatagaagcttccagagacagctgagactgggtccccggtgcctccaccctaggatctcaggcctgccccaaactgcttcttacagcgtggaggtttctctgatttctcccttatctagcaacacttggttcttttggctagtcagggctgggatcccagggggatccacctgcaggagtcagaggtaaagaagcatccacacggagggtagtggggaaggaagcccacatggcagaagctctgcaaacacagtccgagggactgagtgagtccatacaatgcctcacacacaaaggccattgtcaaagcctcgggcctggcagaaagtgaggggggtggggccgctaggccacctcctgctcagccacccctggtcctcattctgggatgaggggagggcctaggagaagccctccctttcagtgcagattcccttcttgaatgggacattgagttcctatcagccaccccagactgggtcttcccatgtatataatggaggaagacccctcccagccctctcagtcccccagctcaaagtgcctcagttcctccatctgctcccagatcccctggcactctagacaggcatgcccatgggaaggaccctgggatggagaggcaggcttcgcggcccttcatgcctgcccactgggattccagttaactcaccccagggtgtcaggggctctgcaggatggcaagtgttggggaggagggaggcagaccactctgtgccccacgggcactgacccaccctgccataggcttcctaagggagcccccggaagcctgccctcgctcgtaccacgtggatgcatgcgtaagtgggaacgaccccatgcgcagactcacgataaactggcgccatgggaaaaccactggggacaaaagcaaagagtgggatacgaaaggaaagaacaagggacacatccaaaaggacaaaagggaacccaagcacccaagggccaggcacgccaggaacgcacaacgggctcagccaagaaagatcactggacagcccactgcacagagccaccccgggactgccgaggactcaatcaccacatagtaacaacaagtaccaggaggggaaagcgtggaggacataaggagaagacgcacaagacacaaccgagcagggaagcacagcaccacgcaagggcacgactccgtccacccacgcgacccacagaccaaagagggcaacgaacaagagcaagcgacgacacaggaacaaacaaggcagaaacggggaagaacaacacccaagcgcaacgaagacatacccagcccgctccccaccagaagaggaacaaagaagagcaggaagcccacactaacaccaccagatggaacaatcggaccacaggcaagcaccacagagcaggaagacacaaaacaaaagaaacgagccagcgacaacacgaccacaagaccagtggagacaacccaaacacacaaggccaaaacaaagcgacaaagaggcaaggcagaaacaacaacacacagaagtggcaaaccaagcacacctagaacaaacgcagggcacaccaccgcccagacaccaccacggagcaaccaccaacaaaagacgacaacgggagaagcatcgtacagcagccagaccacaacagccccaacacgcaacaaacaaacaacacaaaaacacgcagccagaacggacacgtcagacagaaacgagacacgagaaaagaccagagcagcagaaaaccacacaaacaagcaaacaaaacgagataagagcaaaccgacccacgacaaaagcaagcaaaacaccactacacgaaggccacaacacaacacaacaagagagaacacaagaacagcaatggagacacaaaaaacgaacgagagcgacacacgacaatagacagccaagggcgcgagagagcgccagcagcagacagacacacggcgagacacacaaccagcaccacaactagtaaggcaggacgacacaacagaggacgccgcacacacagacacacacgcaacacacagacacacgacgacgaccgcaagagcacgacagagcgcaaagagaagggagacccgacgcacactgcaccaacactagacaacgaccatcgagaacaccaacagatcagcgcacccagacacaagacgaatcagagcaagaacagacagccacgccgaacagaaacacaccagaccgaaagcacgacgcgacacaacgcagacgacccgaagcaagcaagagacgcaagcaacagacgaacaacagaggcacaccatcgacacaacgccacagacacagggacggcatacggcac

SEQ ID NO: 76693 - DNA, 1687 bp, Homo sapiens
ttctcgtcttgtgtacctgggcatccctccagggtttggggagccagcctcccccgcccccctacactggaatttgtttgtgtttcttcactgggggtggagggctcaaggggctctaagagggaaaagctccccacacccccagatgctgctcctcctcccggctagagggaacccaacacccaccagtgaaatctgatgcagctgggagtttggaccttgggtctagacagctggtgcgcccaagaggtagggggaggggtgcggcttctccccagttcccagggagtcttgtttgttaagcggggccttgggcagtgttttcctgctgagggtggttttacattttttttcctcattggcccacagagagtggagttggcctagctctgacgcgtcccctctttatccccaatgtgccccctccattaggggctccaggtgggctccagcccacacttgctctctgcctctgctgacacgtgcacacacacacacatgcacacactgctcctctctgcctgctttcccctggagtcccatgccctgccccatccagacactgcccaaggcccacccgtctatttccacctcattccccctttaagctgagaatggggtctgcctatagaagcttccagagacagctgagactgggtccccggtgcctccaccctaggatctcaggcctgccccaaactgcttcttacagcgtggaggtttctctgatttctcccttatctagcaacacttggttcttttggctagtcagggctgggatcccagggggatccacctgcaggagtcagaggtaaagaagcatccacacggagggtagtggggaaggaagcccacatggcagaagctctgcaaacacagtccgagggactgagtgagtccatacaatgcctcacacacaaaggccattgtcaaagcctcgggcctggcagaaagtgaggggggtggggccgctaggccacctcctgctcagccacccctggtcctcattctgggatgaggggagggcctaggagaagccctccctttcagtgcagattcccttcttgaatgggacattgagttcctatcagccaccccagactgggtcttcccatgtatataatggaggaagacccctcccagccctctcagtcccccagctcaaagtgcctcagttcctccatctgctcccagatcccctggcactctagacaggcatgcccatgggaaggaccctgggatggagaggcaggcttcgcggcccttcatgcctgcccactgggattccagttaactcaccccagggtgtcaggggctctgcaggatggcaagtgttggggaggagggaggcagaccactctgtgccccacgggcactgacccaccctgccataggcttcctaagggagcccccagaaacacaatcgacaatcagcactagcagcgacacaagggtagaacaagtagaagagagaacaagagtcgcacgagcaacaaaacgcacgtaacaggaaagacacaggaaccgagaagagagagaaaagagagaaagaaaaggacagcagcaagagacgagagacagcacagcgagagggggaaggagaggaggagaacgaacaaacacagaaaaacgacaaggaaaggaagagcagaggggataggcagcagaggcagaagaaaggagaaca

SEQ ID NO: 76694 - DNA, 372 bp, Homo sapiens
ggattcaagggtaaatgaagatgagcataacttagctattatagtaggtgacaggtaccctgatgatgctgaccagccgacttgctgcccttgcacgcagtcataaaatggggtgggataggatgcagtgagaatggatttaacttagattacatccgctcatgagactgggttttgccaagcattgttttaaaccagaattccctaatgatttgggatttatcactcagtctgagcaattgctgatttggttggcttggtggttctcaaactgactgaaggttggactcactctgggagcttttaaaaaaatgcccatggccgggcttggtggctcatgcctgtaatcccagcactttgggtggcagaggc

SEQ ID NO: 76695 - DNA, 168 bp, Homo sapiens
tacctaccagcggtagtaaatgtctcagaataagaaggctcagaaacagtatttgccctgtttccccatctgttaaacttggagggaggctgaaacagtctgcaaggtcccttaatcctgatatcttctcaatctttatgactctgttccacctttccctggagccac

SEQ ID NO: 76696 - DNA, 262 bp, Homo sapiens
ctttgtcttaaaaaaacaaacgaacaaaactaaaaacaatattaattcagttttcttaccttccaccttaggaagctacagaaaaaactatagtgtaatgtaaaccagatataaaaatagaacaaaaaattatttacagaaatcattataatagaaatgataaacaaaaccaagggctgcttcataggaaagataaatagaattgataaacctccagccaggctaaccatcaagaaaagctaggagacacaatttacaaata

SEQ ID NO: 76697 - DNA, 320 bp, Homo sapiens
agttcgagaccagcctgaccaacattgagaaaccccatctctactaaaaatacaaaaaattagccgggcatggtggtgcatgcctgtcatctcagctacttgggaggctgaggcaggagaatcacttgaacccgggaggcggaggttgcagtgagccaagatcgcgccattgcactccagcctgggcaacaagagcaaaactctgtctttaaaaaaaaaaagagagagagctaagagaactctcttaccccttctgccctgtgagggcacaatgagaaaacagccatctatggactaggaagtgagccttcatcacactg

SEQ ID NO: 76698 - DNA, 698 bp, Homo sapiens
ctttgggaggccgaggcaggcggattgcctgagctcagtagttcaagaccagcctggacaacacagcaaaaccccatctctactaaaaatagaaaaatattagccaggtgtggtggtgcatgcctgtggtcctagcttcttgggaggctgattcaggagaattgcttgaatctgggaggcagaggttgcagtgagctgagatcacatcactgcacttcagcctgggtaacagagcgagactctctccaaataataataataataataataataataaaataaacttcaaaactaaaacaactttaggctaactgggaaaactgaaataggaagacctcgccttgaccctagggaatgaagccaaaactcagagggctggaggtatccagctgcctagctgctgtccagctaggagcacagtttctttggaggtccccaaaccatgctggtggagcctcatctatctctttagctccccatcaaagggatcactttatcagctgcacagtctttaagcccaacgtccacagcaggactctcttttaaaacagtttggccttgagagaggcagtccgcttgttatctatgttttgttttgtgttggcttcctggcgagttatcagggagactttggtttctttgtcttctgttatctccctgctgggtttcaaagctgccctctgagctgctgtcagcct

SEQ ID NO: 76699 - DNA, 678 bp, Homo sapiens
tgtcctttagcttgaggccctcgctttcctccattctcatgaccttgcccccttccctgtggagggtcttgttatgctgaaggcacctttccctccttccggactggcgttcctacttcttgggaggctgattcaggagaattgcttgaatctgggaggcagaggttgcagtgagctgagatcacatcactgcacttcagcctgggtaacagagcgagactctctccaaataataataataataataataataataaaataaacttcaaaactaaaacaactttaggctaactgggaaaactgaaataggaagacctcgccttgaccctagggaatgaagccaaaactcagagggctggaggtatccagctgcctagctgctgtccagctaggagcacagtttctttggaggtccccaaaccatgctggtggagcctcatctatctctttagctccccatcaaagggatcactttatcagctgcacagtctttaagcccaacgtccacagcaggactctcttttaaaacagtttggccttgagagaggcagtccgcttgttatctatgttttgttttgtgttggcttcctggcgagttatcagggagactttggtttctttgtcttctgttatctccctgctgggtttcaaagctgccctctgagctgctgtcagcct

SEQ ID NO: 76700 - DNA, 691 bp, Homo sapiens
agaatgagtaatgtataaaaatgttataccatttttgtcaaaaggaagtgccactttaattttatttgatcaaactcttgagagtttgatttccatgattctctctggtgatactagactggacatagaccacatgtaaaggcttctcaggggcccttgtcctcaccactctcccaacaggcacagtccccagcctcagagccttctcacccctctgcctggccacatactctggaattctttggaatatgaaatcctggggaaggttttcaccttctccccacagttatcccaactaaggaatcacctcagtatattcccaaaataaagctgtgtggccgattcatccaaaacttgcatcatcaggtacccaagtcctcatccctcaaacctttcctcacctcagctttgaatgttcctgaacttgagcaacttgggctacttcaacaacagtagcacctctcctttcaagccacctcttttcctgaaggcatgggagatgcccatcatgtttcatttctctctttcttactccaaaattgctcagtatttgctctttatccatttgcatcagaatcatgtgggataaattgaaatcagaaagacatctaatgcattcagctctgccacacaaacttctccaaaaaaggagcctggagatcctggctcccttctcagagtggggatgaaa

SEQ ID NO: 76701 - DNA, 1889 bp, Homo sapiens
ctgaaccctcgtggagccattcatacaggtccctatttaaggaacaagtgattatgctacctttgcacggttagggtaccgcggccgttaaacatgtgtcactgggcaggcggtgcctctaatactggtgatgctagaggtgatgtttttggtaaacaggcggggtaagatttgccgagttccttttactttttttaacctttccttatgagcatgcctgtgttgggttgacagtgagggtaataatgacttgttggttgattagatatctcatgctgttgactaagaacattcaatcttcgtaaactggccattggtgttctgagaaattgaatcttacagagttctttaattttgaaagtttcttgttctcagataatagccttgtaaatgtctccaaatttcagagtcctattcatcttacctaaaatacactaagcctttgttctctttaagtagtacagatatcttagcagccggtaatggttaagggtgtgagtacaaggaacattctgttttggccctctctgttgtgcattgtagatgcctcatcacttcataaatatttattgagtgtttttcttgttaagcactagataaacctacaaaggtaaataagactagagttcctgacctgtcaaggatatcaccacctggtctaccatccatctgtagcaaagtgaccccagcgttcctatgcttacactctcctttttggcagcttggccatgttagttcatgtgtgttagctgttattttttatttttgcttttgccaaaaatctcagtaagctaaacattgggatcagataggtttcattcttagatttcttgatagatttctttggtttaagttatggtttgagtttgtttccctttttcgttagtaaggccacatttttgtgaacatttatttgaattaaatttctgttttctttgatttaagccattttcatgaattttctccagatgcgtgaattgacattagatatcacatttcttttttaatggccattatggtttaatatgttgctattaaaaggttgttttagctgtttttcaactcgtttcatgatctatgtgtaagttcccaaagggagagatcatattttatcttttcccgtaaacgccacagcatataatagagtgccctgtatatggcggttgtcagtaaatgtttgactggattctctgaatggagtaaaacggtttttaaattcttttcatagcaggatagcccaaatggctataaaagaggtcaaaaattctttgtataaatgtttttgacttttggctgaaactattaaattctttataaaataaatcatcgttaaaaagatacccacatttatgttataagccaaactctgttattctggtaactgaaagtttgtgagctttttagatggttaatgggaatgttcagatagatacgactttgtcatctattgtctctgcatttgttaaaatagtaatgctatcactttctttagcctctaagttagttgatatttatttacccttgttaccaatgttcttatgttaaaacattcattcattcaatattaacaccttattgtagctaggtattttaataagtaaattaacttcctgatgcaaggagttggtagcatagtacagtgtagtgtttcacaaatataacctgttgatcctataaggtcaaaactattttcatcatagtaagatgtggttttctgttatcattgttttagtgtttgtactgataatgtggaagcaaacaccaaaacaatgaaaacagaaaaccacatgatgggtaaaactgctgatgcctcagcatgaatcagtgctgtgacaccagtctgtactagtagtcattgtattcttcaccatcacaaacttagttgaaaa

SEQ ID NO: 76702 - DNA, 357 bp, Homo sapiens
atatgaaaaaaaacatgagacagacaagaaccaaaaaaaatttgacatcaggatgataaatatagtcttagacattacttcgaaaatatatctacctacctacacacacacacacacacacacacacacacacacacacacacccctcaagggaaagtgtatagaaaagcatggccaaaagagcattgcatagtaatgaaaaataatagtgaatagagggtgaatttagaagcctcttgctgtctcttgctaaggtttatttatttgtcatgcaagtgagaaggggttgcttcccctaatgctagagtagtaattctcaaacttcatcaaagatcagaatcaccaagaggtcttgtg

SEQ ID NO: 76703 - DNA, 779 bp, Homo sapiens
gaggaccccttgaagccaggagttccaggctgtagtgagccgtggttctgctactgctctccagcctgggtgacagagcaagactctgtccaccccccacccccaacaaaaagaatttcactatatagatgtttcttgatttttcaaactggtctgttagtttgtgttcagtttgtcacctttgtgagaaaaaaaacactcataagttagtgtgtacttcctacttaatttctcctgggtcatcgtgaagcactccctgccctccatgagaacagtatgtcacccgctctcttccctgtgccaagcccataaagggctgttggcaaatatgtcggacaaatagactcgcctaagagggcctttctctccaagccctcgccagcacaggctgtgtcactttcttaggtggcacctaccgtctgttgcacacttgctgcagatgatttggcacaggatgtcgcttcagaaaaccttgtaggaagccgtgagtcgttaccgtccccatttcacagacaggaaagtgcaggccttagatgcactgcctgataccctgtggcccccgcgttcctagacagatacactgcctggtacactgtacccccccacccccgctatcgtttgcagctggggttgaaccctgcattcatagacaggttcccccttgagtgagccccccatctgcttaactgagggcttgtcctggttataaatgtctgggtgggggtgggcactgctggctgcagctgtcaggactgggaatgctgaacctgcactgaggg

SEQ ID NO: 76704 - DNA, 469 bp, Homo sapiens
catttagctcattggttgccatctttaattagtggcagtgacactaaagatattcagatttgtcctaaatgccttttggaggttgtaatggctcatgaattggccttgggtgccatcacaagggtctgaaattaaacctacaggttctgaatacaacatcatggttgcctgagtctgggcatctgtgaagaagggtaatggatggtgaggtcagtactgcaggctaccttaccttggtgattaggtttctaagatcatagcattaagaatttctgtatgagataagtcatctagattggtcccagcccctgttagtagctgccagtgtggcacattcatgtcaaaatttcccagaagccaagatgatgtaggccccagaggtgggttgttaaaagatgctcctctaagggtctcttctgttcccacggatcctgcagagcatggcaggtatgaaaccatccttaactgc

SEQ ID NO: 76705 - DNA, 711 bp, Homo sapiens
agcggaaaaatcgtgcttgcaagatcgttcatatatttgagaatacaccttatgacctgcttgttctctgtactgtttttagtgactttgaaggtaaatccagagtatacttagaggatacaagcaagtaactatttctctagaagtgacattggtgatcactcatgctcaaagagaattgcatttcattgcttcctctttcagttcctgtgaacatgactttgtcccaatcaaaaaatgtaatttattttcaaatcactgggaaaatattggtctagatgagaatataagcctttttccctcctctataaatagaaaattaaacattaaggggaagaaccttatgtgctgtgaactaaggggtttaatttaaccttctgtatctgaggtctagagaaagagaaataatgacagtttacaactgtgtgccgagctgttgtgcttaaatgtgtttttgacagaggtggcagtgaaaactaggctatttttcttttttaaaaaatggtacaagcttttaattggtttatgtaaaagaaaataggcaagatatacttttaattctaacaatagttttagtagatactctgataggaaatataatattcctcggaaatgtagaagacataccctaaaaaaagttatgatttagtattttacgaatcgtcctagctactacagggagattaagaactcttccgtaacttaaatctg

SEQ ID NO: 76706 - DNA, 2639 bp, Homo sapiens
ggcacgagccgccagcaaacctcgggggccaggaccggcgctcactcgaccgcgcggctcacgggtgccctgtgaccccacagcggagctcgcggcggctgccacccggccccgccggccatgaggcgcgcgccttccctggtccttttcttcctggtcgccctttgcgggcgcgggaactgccgcgtggccaatgcggaggaaaagctgatggacgaccttctgaacaaaacccgttacaataacctgatccgcccagccaccagctcctcacagctcatctccatcaagctgcagctctccctggcccagcttatcagcgtgaatgagcgagagcagatcatgaccaccaatgtctggctgaaacaggaatggactgattaccgcctgacctggaacagctcccgctacgagggtgtgaacatcctgaggatccctgcaaagcgcatctggttgcctgacatcgtgctttacaacaacgccgacgggacctatgaggtgtctgtctacaccaacttgatagtccggtccaacggcagcgtcctgtggctgccccctgccatctacaagagcgcctgcaagattgaggtgaagtactttcccttcgaccagcagaactgcaccctcaagttccgctcctggacctatgaccacacggagatagacatggtcctcatgacgcccacagccagcatggatgactttactcccagtggtgagtgggacatagtggccctcccagggagaaggacagtgaacccacaagaccccagctacgtggacgtgacttacgacttcatcatcaagcgcaagcctctgttctacaccatcaacctcatcatcccctgcgtgctcaccaccttgctggccatcctcgtcttctacctgccatccgactgcggcgagaagatgacactgtgcatctcagtgctgctggcactgacattcttcctgctgctcatctccaagatcgtgccacccacctccctcgatgtgcctctcatcggcaagtacctcatgttcaccatggtgctggtcaccttctccatcgtcaccagcgtctgtgtgctcaatgtgcaccaccgctcgcccagcacccacaccatggcaccctgggtcaagcgctgcttcctgcacaagctgcctaccttcctcttcatgaagcgccctggccccgacagcagcccggccagagccttcccgcccagcaagtcatgcgtgaccaagcccgaggccaccgccacctccaccagcccctccaacttctatgggaactccatgtactttgtgaaccccgcctctgcagcttccaagtctccagccggctctaccccggtggctatccccagggatttctggctgcggtcctctgggaggttccgacaggatgtgcaggaggcattagaaggtgtcagcttcatcgcccagcacatgaagaatgacgatgaagaccagagtgtcgttgaggactggaagtacgtggctatggtggtggaccggctgttcctgtgggtgttcatgtttgtgtgcgtcctgggcactgtggggctcttcctaccgcccctcttccagacccatgcagcttctgaggggccctacgctgcccagcgtgactgagggccccctgggttgtggggtgagaggatgtgagtggccgggtgggcactttgctgcttctttctgggttgtggccgatgaggccctaagtaaatatgtgagcattggccatcaaccccatcaaaccagcccacagccgtggaacaggcaaggatgggggcctgggctgtcctctctgaatgccttggagggatcccaggaagccccagtaggagggagcttcagacagttcaattctggcctgtcttccttccctgcaccgggcaatggggataaagatgacttcgtagcagcacctactatgcttcaggcatggtgccggcctgcctctccatcaccatctctctccacttccccttgtccagttcctcacacacttctagattcttcccagctcagaggcttggcatttgccatatcatcatctttttttttttcttttaaacggagtcttgctatatcgcccaggctcaagtgattctcctgcctgaacctcccaagtagctgggattacagaaagccgccaccgtgcccagctaatttttgtatttttgttggccaggctgatttcgaactcctgacctcagatgacccacctgcctcggcctcccaaagtgctgggattacaggtgtgagccactatgcctggccttccctatcttctacctgaaccttcttcctcttcccccagggcttcccaagctctttccacagccacatcagtcagggcatggctccaatccattctttgctccaatgtcacctcctctgagaggccttccctaaccacccaatcattctaaagcagcctccctacagtcacgttaccctgcctccttcctcgagcactcctgtgtacctgtcgctcttatctggtggcatgtatgtcatccacagctcacccactagagtgtgagctccatgagaacagggacctgctccttcacattcgtggtagtatccccagggcctaggacagagcttggcacacagtaggtgctcaataaatgtttgttgaatga

SEQ ID NO: 76707 - DNA, 480 bp, Homo sapiens
caccgcactccagcctgggcaaaagaggaagactccgtctcaaaaaaaaacaaaaacaaaaacaaaaaaagaatgcatggagttagttcattcttctcgccccctggaacttctgatcaaaagtcaatacctttgtgacctacaagtctctttatttgccctccattatagactgagctgttaataacatttaatgagctcacatggattcactggctaataaagaagaatagagttgaggacattgctgccctgtttatgcccaaaaattaccctaaactgaaagttgctttgtgttccttcactcccctctgctggtaaattttaatatagttcttaatttttttaagtcaaattgatagaaatatcaattgtgtttttaaaactgtaagaaaaaataatgttgaacatcacaaaaatgtactcaatctttcccaaaacccatttctttccagttagttttcataactgtaggttctt

SEQ ID NO: 76708 - DNA, 381 bp, Homo sapiens
gcttggagaggctcttcctgggtgtgtctagttggccctcttttccctcctcttcttaggatactttttatttctttgctatcagttgtaacgtttcctctttcatttctgatttttgttattcgaatcttctttcttttttcttagtctggttaagaatttgctgaatttacctttaaaaaaccgaactttccattgtggaagacattgtggcgattcctcaaggatctagaactagaaataccatttgacccagcaatcccattactgggtatatagcaaaaggattataaatcatgctgctataaagacacatgcacacacgtatgtctattgtggaataatgccgcaattaaacatatgtgtgcatgtgtcaaaaaa

SEQ ID NO: 76709 - DNA, 459 bp, Homo sapiens
ataactttgtaaatgtgagcaaatttgtttatatacatgaggggtctggaatgctgttgggaacgacatgaatcttcccctgattccagaccaaatggccctatattaataatatcccaactcaactgtggtaaagaaacaaaattaagaaggcttctggctgttaccagtgaaaaaacaggttgctcattatggcaatatatacgtgtctcagcagtaactttctgcctcttctacctggttttgtgcacagttttacacatggtcccactttgctgataattatgttccattgctccctctggaccttagacttctgctgtccatttcagtttttcctctctgatttcctacaggcattttctaaaagcagggagagaatttaagtaatcatctaggagatcgaaaactaaaaaaaaaataccctttctgtaattcaaacagacttaccatcctaga

SEQ ID NO: 76710 - DNA, 351 bp, Homo sapiens
caaggtaaatgtctgaatataatgtaactaaagctacattcctataaaaatgcctggccaaaaggtagctcttcaagccagcagtcatctccaggataatacattgaatctgtagagcttattttacccagtttttcccctcccctgcaaaggcaattctttaatctgctctacaaagtctctacctactaagaagtcatctttggttgagggacctcctgggacaggcagctcattccattttcaaatagttctaaatgggggaaatggtttcctttgttcagccaaatgttgtcttctttaaggcctgcttctccacattagctcttccttctggaatgagacacagta

SEQ ID NO: 76711 - DNA, 1097 bp, Homo sapiens
agtagccccagactcccatcttcttagcttaactccagtggaaagcagtctctatcttctacctttcataagtcagtctcgggaaaggattctgattgcccctacttggctcatatacccatccctggactaattcctgttgccgagtaaatagcacagtatgattatcctgcctggatcccatgtaatacctgtgggtagggcaaggaagttggagtcctgtgaccgacagtcttgttagagacattattagtatgaccccatcggtggtagctaatgactgagaaaaacatggtgattattttcaaaaatgagtatgaaaatctaaagtatccaaacttaaaaaaaattatttaaatgttttcccagaatgaatctctatctctcttttagaaacatcccattttgtaagaccaaggtatgaaagtattcatctgagtttcaaatgattgcctaatcttacctgtaatcattattgagaaccaaacacccattaatggtgtggtctaaggacaaggtcctgaagagatgagactggcgcatattaaagatgcctgctatgatgatgtggctgtcatggctacattatcatgagggatttggaatctggggttccagagagcacgtttttagccactatctctgactattaaatcacttacaacagctttggataataaaattctctgtttctctcttggtttggttccatattagaatctgcaagtgcaaaggcaaaacagtcagcaaaacagcagacttaaatagaaaaaagccccaaaaggaaaggaaaacaattgaaaatttaaaagaaaaacacccccacccccaaacatgatctaatcagtcttccttatggagaagttatgaatcatcctacttagcaaataagacaattgaatgtgcaagcccaaacttgaattaaagttattctcaacttcctgtttctcttattaacatgcatttattatttaataagtatttatgtatataattgagatatttaagctctgggtaacttaagtggctgtagagtactacctgaacacacaaggagaaataaactttgaatatgtgcctgtatatttacaacacac

SEQ ID NO: 76712 - DNA, 723 bp, Homo sapiens
agtcttgctctgtcacctacactggaattcagtggcacagtctcagctcagctcactgcaacctccacctcccgggttcaagtgattctcatacctcagcctcctgagtagctgggattacaggaaaaaaagtccttgggaattgagaagccaatgagattagtcgttcaagctgaagtcattctatctgctagctgtctggagccactgaagctgtgggcgaacagcaagaagtttaagctacatctgcacactctgcggtccatccagagaccaagaaagaagcacaaggatcctgcagagtcttccgaagcccaagccaaatatatgaggcagggagctagagaatgtggaggaagtggtcagtaggaaaaggaatgggaacagacattctccttcagaaacttgaggtccagtccctgaactttagctggccccaaaacttgagcaagctctaaaaagcagaacatctcccacttaacagtttattctgagaactggccaaccacaggagggaaaatcatatctccagttaaagtgccctgatcatgccatctgctcatcctaccccctttgccctgctcccacacaaagttcctgctagccctgtttacgtcttcttttttaaactctttttttaaaatttgatttttagacatttgaagatttccatggtcagagggtctgtaatagtcttttttgaataaagctgctccttaccta

SEQ ID NO: 76713 - DNA, 431 bp, Homo sapiens
agtcttgctctgtcacctacactggaattcagtggcacagtctcagctcagctcactgcaacctccacctcccgggttcaagtgattctcatacctcagcctcctgagtagctgggattacaggtccctgaactttagctggccccaaaacttgagcaagctctaaaaagcagaacatctcccacttaacagtttattctgagaactggccaaccacaggagggaaaatcatatctccagttaaagtgccctgatcatgccatctgctcatcctaccccctttgccctgctcccacacaaagttcctgctagccctgtttacgtcttcttttttaaactctttttttaaaatttgatttttagacatttgaagatttccatggtcagagggtctgtaatagtcttttttgaataaagctgctccttaccta

SEQ ID NO: 76714 - DNA, 762 bp, Homo sapiens
attgtactcgtcccatacccataaagcttcaaatgttcttgctaaaaatttgataataaaaacttatgggacagaaatcatagataagacttaatataccacttaccaaataacaaacagtggtatgaatatttaatttatgtaattgcctccaaaattctgaaaggtatttattatatgcctatttcatagccaaggaagctgagacagagtttaagtaacttagatttagattcaataaatggcacaacagggataaactcagacagaatttgtagtggttgtgctcttattcacttctgtatattggttctcaaataggatataaatatcctaaactaatataatattagagtaaaacatcaaaacttagaatcagagtccaaagagactatattaataagaaaaaattagatagtgtagcatactttaaaatgtcaatcatctcgaagcaaacaagaacaatgcaagagtagcaacaacaaaatataatttaaaacaaaaatgtataatatagcttaaatatgactattttacactgatgagaaaagtgcaatttattaacatatagcagtcctctgcttttgtgtatgaaatgacatagtaaacaaacaaacaaaaatgttcactacaagtataatttgacagaactgtagtccagtgggaaatcctcttagaatatgacagatcaaatacaaaacttcagtaacacaattatttgactttgtgaaacatatatgaatttgtgccctcccctctctc

SEQ ID NO: 76715 - DNA, 296 bp, Homo sapiens
actgtaagaggccaggggcagtctcatgaccacacgagtcaaatcaagccaggcttcatgagaactggccttgggaagttgccaaggaccaaagtagtttcttcatctctcagaggcctcatggtttctgtgatctttgcttctctccgtgccagtctgattctattctgtctctcagaccacattctctgtttgcccatggcccaacctgattgtcaaccccaagtgaatacattttcacaagtccacaatcaatgatgatggatctcctctgtttcctaatttgaattcttagc

SEQ ID NO: 76716 - DNA, 1057 bp, Homo sapiens
ggcccagattttcttataaagtcaaatgggagatacttgtttgcaagaaatagttcttttggttcttacttttccataaggattgagtctcaaaatgtctggtagcatccactgcattttgtaggggacaataacaaagaagatgccagcaatatcttctatcttttccaacattattcacctctcccacccaaggacaatggtgggctggacagagcattcaatgaccgagaatctaccataagctactagggccacatcttcccctttcttctcccccaggtttgtcccatttgtactgactctgacccaggttgtcatgacttgagactcactagaagtttcagaaagatgcagactgctttaaaaaaaaaaaaaaaaagggcaaggggaggtgtgagaagaaagtataattctttttcttctaacgggagatataaaaatcatataagcatgatttatcatttgattggaacattgtattttatggttgcagagcacatgtatcatcctatctgcttctgacacccagtaagcagctctggcttttataattttgatgaaagaggtttcctaacagtatttcggtgtgcatgctcacacaccagccctggtcatcagtgaacagattcttccaggtcttcattgtagcggaagaaagtgagatcagagatcccgaggaagggcttcagtttcaccagtagtggagctagggagtagcggggcagaagccgcaggaagtcagtgcaggacgccggaggccactcctaattgcttcatgtgttgttgccgtgctgatgaccttggaggcgctgctggtcctggatccttgcgaccttttcttccaagaggaaatgtggtgctgagccccccttccactggctgtgacaaagaaggacccctcatgtgggggcctaattctagtgaatccccaaaggtacatgttgaaatagggaaaaggcccaggtgaggctgtctatgtaatagagaagatccattgcaaaatgaaaatatggggttctagccaggggcagggaacttaatctcccttttccat

SEQ ID NO: 76717 - DNA, 400 bp, Homo sapiens
caagcacctgtagtcccagctactcaggaggctgagacaggagaattacttgaacctgggagacagaggttgccatgagccaagatctcaccagtgcattacagcgtgggtgacagagcgacactctgtcaaaaaaaaaaaaaaaaaaaaaaaaagtccaaaaagtaagtaaagaggaggtttggaattagatatttggtgtatgaatgaatgggctaaagtgcaaaagaacaggcagaataactgagctggtacagaggaaaaaaatcacacttaaaatctaaaagtatctgcttctcaatttgggctttcccacttagcagctttgacaccttagaaagaacacttaacttacctgagcttctattacttctaaaaagtgcataaagtgcaggctaag

SEQ ID NO: 76718 - DNA, 449 bp, Homo sapiens
ttccgcagatgaaattctctggctaaacactctccttattttagggatcagacacagagcctgcttatccccaaacagtaggcttcagttccctgccagctcaaggacgaattattcagacaagccagtcacaccctcccgtgggaaccaggctcactctgcacttttgttactacaaagcctgcctccagcagcccctccttgttaccgtgttccggagtgtagcctccacattgccctgcatagtgtgcagggtccttctcccctggactggagtatctgtgaccagtcagctgctgttgattgcatccgtcctgcatcaagtgttgtgtgttcggccatccccgtatctctgggggtggggacaggggcgggggcaggagcgtggggggaaggaatccctctttcatcaatggagtaaagagtgtgaataaaacgattggcatcac

SEQ ID NO: 76719 - DNA, 459 bp, Homo sapiens
agaactacccaaagccatgcctggctttcgctctgagtatcctaagcccaacctgatgcctcttcaacgataccactctttccacttcagataatctgacctgtgccaagatgcccaggtggatgcctgtttaaactgatatacaccctcacccaccttattctcatttctgctgcctgtaagaacccacctgccccaaatacttaaagagtaacaatttctggttgaggcactgaaaattaaacatggctgttttgactaatccacaacttcactcagttgctctataataagtaaggacatgctccactgtaactataatcaggaatcatgatgtgaaaaatatttctttttaaaaaaatgtagttatataaaaagtcacaagtcattgtaaaaaaaatctttggttatatatttgaggaattatttttattaaaaataatatgacattagatttct

SEQ ID NO: 76720 - DNA, 2040 bp, Homo sapiens
  misc_feature (1)..(1): n is a, c, g, or t
  misc_feature (4)..(4): n is a, c, g, or t
  misc_feature (137)..(138): n is a, c, g, or t
  misc_feature (155)..(155): n is a, c, g, or t
  misc_feature (168)..(169): n is a, c, g, or t
  misc_feature (261)..(261): n is a, c, g, or t
  misc_feature (263)..(263): n is a, c, g, or t
  misc_feature (326)..(326): n is a, c, g, or t
  misc_feature (378)..(378): n is a, c, g, or t
nacncctgacctcaggtgatccacccacctcggcctcccaaagtgctgggattacaggcatgagcacccacccagtgagagatttatatctataagggttgtagcctgcagggttgtccttctgacaggctgggaannatagcctccagccagangcagaaacagacnnttcaaggaggaggtaaaggaaatagcaatttatgctgagtggaatggccaaatagatttatttaataagctctaggaggagtcatgaatatntntggaaggagaaatgcatgcacgcacaattgagtttcttgcttcttcatgggtcccatgtacanaaatggcagtgttagcatgatcccagggtggagttttcagccctctgacatnaaaaggtgaagcagaggacatgaaaactcgctctgtgcatcctctgtacgctggccagaacctctccatcgtgggtggtctcttatcaggcaagaaaggagaggttgatatcagtggtggaggctttgaaagggctggtttctgttaaatccttagggaagaaagcctcatcatggttagcaaaggagggggtataacgatgtgtatcttaaccccatcatcccatcctagcaaagctgagaactcagttttgaaagttactctggggtcccctcagccaagagtgggtctgttcagtcagttgggagcttagaatttcattttcatttatcaatgctaatgcgaaagagtacgctgtcttcatggcagctgaatttgcaagaaactccttggatggggttaatggcagctgtatttttctgggagctctgctttaattggataaagtaagttctggtaagatttcttcatcttcagtatctcaaatgttttcatttaaataatctttataacaacttttgatgtctgagtggattcccacacagtcatctattgtaagactttctgattccttttttttcctttggtcattatgaatagggcttctgtaaataactgcatggtagcttttgatgggaaataacatcaaagtagttgtcaaaatacttaggaatgttatttttggattgtaaggtgagacttgtttagctttggaaaaaaatgcacaacttgtaataggggaggaaaaataattttctgtttttggaattcttagatggaacgctctgtaaaaactgacagattaaaatgagaaaaacagaaaagtttaaaaacatgtatatcttatggttacatgggagatactcagggaaaaatgagtaaatctccaacaggtggctttcaattcaagcataaatactatcttcaacttaaagaaagaagatttgaggtgcagtagtggggagctaaccagcaaaagcacattagacaagggtaaggtgcgttatacagacttaagtccacgcattctcattgataagactcttcagtgatttagtatccttctcttcttggcgtcgagagaggtagcttttaaatggtgatttccttatagatgtaaattttccttacacaagtaacttctctattttcacaacttcctttgttagcattttttttcaaaataattagcttggaataattcttaagccaaagggacatattttggggttgcatattctggtttcctaccattatatttcggggtggcatagtttggtcttatacactgtgttccactggcaatgaaaagagttcttggttttcctccagcaatttgtcatttgttaaagagcttagcagttctaagagatatagaccagctgtgctatctttttgtggttttcagttctctagtatgttgagcatctttttgtaagtgtacttgccatctgtagatcttctttggtgaagtgtctgttcagatctgtgtgcatttttaattgggttgtttaacttattgtttagttttaacaattttttatatattttgaatacaaattctcagatctgtattttgcaaatattttcttcaacatgtggcttgtctttttgttctcttaacaaggtctcttccagagtataaactgtaaatattaagaa

SEQ ID NO: 76721 - DNA, 381 bp, Homo sapiens
catctgcctcttcttgatccaggctcgcttttctgtcctgtctcctctgtcatctagaactttgatccaccactcctctttttcatgtgtcttcaactctccctctccaaagataatttcctgtgaatctgtcatactctatgtgctttctctactcttaaacacatccttgatcctaactgtcccttacactattgtcctctcccctcttgctgcttcgtttatatgaaccagcctttctcacctggggctgtgggtgataactaagctctgatgtcctaaggaagggacaaactgtcacctgaaagccacatgtggccaccatctttttttgtagggcttgtgggctaagaatggtttatatattttttgaaggttgaa

SEQ ID NO: 76722 - DNA, 496 bp, Homo sapiens
tgatgatgatgatgttgatgatgatgatgatgatgacaacctatacttatagagggtggcagtgtagtttactaagagtcaaggcaacttattttataatactggctgtgtcttcttggccaagtcattaacttctctgagcctctgtttctgcatctgttcatagggttgtgacaattaaacaaaaaaaaaggcatgaggagcccttatcatgatgattgacatagaataagagctccataactggaatccattttttaaaataatctttttgaatgtattatatatatatatttgtatacaaaatacatgtatgtatttttatatacatcctctcctttgaccctcagagtaaccatgtccaagtttggaatttgagatctggaaatgtggattctaaaatccttcacctctttgagccttggtttcctcatctgtaaaatggggagaattgttaggaatattaaatgaactaataaatgcaaagttgttcaag

SEQ ID NO: 76723 - DNA, 1629 bp, Homo sapiens
aaaaggtggagatccagatctagggggagaattggctaggttcttcatcacagtcactgtcttgagacacataggtggtccatggaaacatttccatgagggatttcagaggggagaatgggcagactgcaaagcctcggtactctaataccaggcaaaaagaagaaagggaacaggcattttagttttcacattgaaacagagtgtatgtgtatggccctatgcaaatgttgttcctggtgaatattcatcaatgtactcatcacacataggtatatttagacagaaaggggtcctcatcacagacacccaaattatgagcacattactgcctcctctcccctagaggtgcttcttccagcctcccccattggaggccagcacaagacgggctctccaacccaatatcttccccttccctccttcctttctgctcaggtggctgagtatacacattgaactcttttgtttcaacttcacgtgtatataggttggtgcaaaagtaactgtggtgttttccattaaaagcaatgtcaagaaccgcaattactttggcaccaacctaatatgtatgcaagtacattctttaacctttccaactcccagtccaagccatcaggctaatttccgcgtggaatttgtggtcactggtttgcagtcctttcatttctggtgtggtcagaagtctccttcagactcttcccgataagttgccataggcttcttcatcacctttagtacctacccacttttgctgggataacactacccaagataaattcaaaaaaattgtcctaagtgttagtgtgtttctgttttggttgaagtctattattgctatatggttttctactgtttctacttgatggaagactattaagggttaagtaggctggcctaggaagctgaccaccatttataacatacttttgagtgggaaaatgcattcagaggcctgtaatcaatacttaggtggactttgggaatatagtatttattttatgagtgactagaatattggtagaaccatagaaactttgaatgtggagctggaaagcctcctccttcccccactgagatcaattgattaacaagctaggttgtagaaaccaagtgaaagaggcaaaaacttggccaagggcatgtagtcggggacttctgaagattctgctgggctgggggcaggaaaggggtcacagacggtcttagggttgtctcactcagcaactcactgtgttggccttgggaaatgtaagtcactgtgttgggctgtaatggaaatattgagaaagcagctcagctagtggcgtggggagaggttgtctagtcctctggcttatctgtaaattcctggcatgtgcttgttggagcagaatgaatggggctgctgtgttttacctgcagctaggagcatggctggagtggtggagacactccctgtggtctgttctaaaaatagcagtgggaacagagctgaggggaagaggagggggctccttcgggagctgggtggggaggcctcacccccttcctcttcctgccaggcccgatgtgaggaagtcccatggagtcacataattccatctgggagagtcctggagccatcagccctcacaccccctcctcata

SEQ ID NO: 76724 - DNA, 692 bp, Homo sapiens
actcatagtatagctatttgtgtgtgtgtgtgtctgtgtatgtgtgtatgtgtgtgtgtttactagaactttagtagcatctggtctcataggttatttgggcattcagatgaagaagatttgtcccagaaattagaaactcttttagtgctaagcctcttactttgatattgtctagctaagtttaatgagtactttgggacatgccaagccagagatacaaaccaaagtgaagcaattggccttttctctgggatatattatcaggcagctttaaaagtaagattcaagtatatgaccagtgttatctgtaatatgttaatgtcagccacatacctgcatgaagatcatgcaactgatgtataattcagaattgaaccatataggttctttgagaacctgactttttattagctccaggtttacagactgacactgtcacagcagctcaagtctgaacttgccaaggtacaacagtgtgaatgattgactttaattccctgtcatgtgttttcttgagcctgttacaccactgcggtatggatgtgtgacccagtgacaatgttcactgccagttgttttgtccagtgccacagagatcattggccctctactgcagttgtgttacaatttgcaaatgtttggatgataccatgttttttatccaaaattaaaaaccttcagtcttttgc

SEQ ID NO: 76725 - DNA, 350 bp, Homo sapiens
tgtttgttttacaggggatcctagctaaatagaagagtagaggaaaaacgactgtttcaacccttaccgtaatcaactttattgtgataaagattcacatattttgcaatatgtcttatctttatggaaattaaaaaatccaatcacagaatcaaaacttcagaaatatagccaaatataagtggaaatttagtatacaataaatgcaacatctcaaattagtggagaaaaatagaattattaaaaagcagtattggaaaaaccatatacctatatggaacaagataaaattagatctattcattacattcaataccaaaaaattctaaatatatcagatatttaaatgt

SEQ ID NO: 76726 - DNA, 962 bp, Homo sapiens
accgcgaacctgttttaatcagcaaagtcttttataaccctgtatttttgtggctgacttccaatcccatcctgtgacttagaatgcctaacactgtctggaatgcagcccgatctgtggagtggctgcagcacctgtgtttcagcctgaagaatgggcacagatatttcatgattctgaagaagaattggaggtgagacttgagaaaatggagaaaaagatatgctttggattttcttgaagactagaagctttcttaaccatccaccaccttgttgactggttattattctctctaccttctgtgaaacaaactgatggatactaatggcacaattacacttatagctagtcagttgcatagtttatgcacatagttctgcttccagtgtttagtaatgagttaaacattttggctatatttgtctctgaagctataatttcattaatcattatgtatagcaataataacaagtaaaacaaaaagaagaattttttgtttttatggtaattatgttgggtgctttggatcctcccaataaagttgacttccctaaaataattacacttgaattaggtatagagaagctaattgtaacaaattgaaagttactgtaaatcttctaatcgtagttctctgcaagtgtacttaagttattgctccacttgaaataaatgaaaactggaaatctgaggtgatgaattatgggtcccttttatgtaagaaagatgacaaggaaatctaatctgctgagttatactaaaataaaataccttggcctgggatcaaatataggtgaaagaattaacatttatgttttttaattaagataaaatgtacaagttttatgtacatattttatgatttcctgatataacaaaaagtgttgataaaagcacccaatactgattctaatgacatttgattagcattaaagagttgctattattattgttgttgt

SEQ ID NO: 76727 - DNA, 990 bp, Homo sapiens
accgcgaacctgttttaatcagcaaagtcttttataaccctgtatttttgtggctgacttccaatcccatcctgtgacttagaatgcctaacactgtctggaatgcagcccgatctgtggagtggctgcagcacctgtgtttcagcctgaagaatgggcacagatatttcatgattctgaagaagaattggaggtgagacttgagaaaatggagaaaaagatatgctttggattttcttgaagactagaagctttcttaaccatccaccaccttgttgactggttattattctctctaccttctgtgaaacaaactgatggatactaatggcacaattacacttatagctagacgggacgcatacgcacatgcacatagaatatggtctcaggcgccgaaacttgagcaaaacattccgccgtagtattagaatcctgccctctaccagcattgggggttatgactaccaggtggagccccccctgcccagccaccaccaccccccccgccctcgaggcggagtagagctccgcagaacgagtgagaagatagatagaatcacctgtcctcgggggagggatacaaccccgcggcgaggtctccccaccgcaggggtagaaagagccaccactccgagtaccacccccccccacgactcgtcaagtggcctcagattgagtcgatcgtgccgcgtgcccgaccgtataccccggtaccaactctggtgggcaccgacattggcgcctcggcagggctacgccgcccaccccccgcgggccggaggatgacacccaagtagcacaccttgagagcccagtacggatcagcagcgatgactggatggtccctatgccctacagagagagggggctaccggcgaatgagggcggctttccacgcggcgccgtaccagaatctggactgtgcggaagggcggcgcatctccgtcgataaagtgacccagatatagagagacctgtccagctctc

SEQ ID NO: 76728 - DNA, 438 bp, Homo sapiens
gctagctccacttctctacttcctcacacagctaaaaaaaacaaaaccgtctattctagaacagtttaagcacatgaaactagagaattgtgtgatgaaccccaaactagttttacttaaccaacacacacacaccacacacacacttttaaagtatgtcaggtcagaggccgttttcacctatcggcacttcagtatgcgtcactaactagtgaggaccttattaaatgaaacagtcaccaaccatgccatcacagcaaggttaataagaatcccttcctgtcctccgacacgcagttcacagtcacatttccctgattgacttaaaaggtctttttcacagttgatttattttgatcagtatctaaacagaatccacacatgacacttggttgctatgtctgttaaaactcttttatttatagggtctgccttccc

SEQ ID NO: 76729 - DNA, 533 bp, Homo sapiens
tatgccctccatcctcacctcttaatgtcctttaatgaactgttcacctatcatatgtctataggttgtaggttttttgtcccgagcaaggtttaaagtcataattttcaattcagtactttggaaaacttcactaaatttaactacgtatgttcagatgtctcttttaaggtttattttatataatagtgtaagataagtagccaaataccatgaggaaagacttgtccttcctgtcatggcagaaagactgaaatatgacttggggaatcatatggacataaaccaaaatgtatttttctgtgtgcaaattactgtataaataagcacacaaaaagctgttgaggatcatagggcagagtggggaaactagtattagaaaaattatctagtgtgagaaatttgccataaagttggtagtacaaaccatttttctaatataccttagcttatagtctttgctggcttcttaatgaaatatgaaaatttgtaagaaagtatctacaggaaaacattctcaactacaaattcat

SEQ ID NO: 76730 - DNA, 538 bp, Homo sapiens
gtcaagaaaggaatttggaggataggagtatctacatgtagtgggggaggccttgtatctggagcaggtttttaaattctctcccttttttttttttttttttttaaaggacacaatgtggcatagtataaacaggaagatactgttgagggttacgtttctcaggtattcggcaggtgatctgcacagatggagagaaggaagatggagcagggccggtcaggagagggaagacagcagtgatgaggccttatggagcccaaagccccacctccctgggatccactcagctaatactgaggagggcatctctgtcctcagcttgtgactcttcagaggctgtggtaccagagtgcacaccttacagagaatacatgaatgaatagatgttgaaattttctacccctataatttttcaaccttttgccccttactccttccctcttctccttccttccttttctaaaatttttttttaaaaagtgctcacaaaaaagcaaattaaaaatcccggtatcatttacaaagtaaaaagaaa

SEQ ID NO: 76731 - DNA, 461 bp, Homo sapiens
tgagatggagtcttcctctgtcacccaggctggagtgcagtggtgccatcttggctcactgaaacctctgcctccctggctcaagcaattctcctgcctcagcctcctgagtagctgggattacaggcatgcgccacctgtaatggctaatttttgtatttttagtagagatggcgtttcaccatgttggccaggatggtctccaactcctgaactcaaatgatcctcctgcctcagcctcccaaagtgctgggattacaggcgtgaaccaccatgcccagccaatatgtgaaattttttttaactgcttactataactcttattctaatgtcatagacactgaaagagagaagttaaactgtgctaaaaatattacattttgaaggaaacattaatttctgatatacaccaacagaatgaggaattctaaaaagagcatttggtgtgcaattataatgta

SEQ ID NO: 76732 - DNA, 472 bp, Homo sapiens
ggtttcaccatgttggccaggttggtctcaaactcctgacctcaggtgatccacctcagcctcctaaagtgctgggattaaaggcgtgagccaccacacccacacctggccctcaaccatctctttcaccttctgctcatgacagtttactagaatttttttcccttgagactgaatgtcaagtcaaaaacaataaaaaattgctaatcattactatgactccagagctacttgcttctttaaaaattcctgaaattataaaatataaagccaaagcaatgaatttctaatggtggaattgtagacactgtggccccctggggatgttatttcagatggggcaaggggatattcctaacctattttaaatcatgccagcctagataactatgtgaaaattatatgggtgcttagcaaaactattaactagcacccctttggcagttttacattaaaaatcctttattagctt

SEQ ID NO: 76733 - DNA, 487 bp, Homo sapiens
gtttattcagtttgaagaaaaaaattgaaactaaaaaacatacatagaatgttacaaaaatatttaaaattttgtctaaatggacaagtatttaacaatttcagctttctagaaatggagtcaccccctttaacatgttctttggacattggactgttgtatatattttcagaaagacatgattatatagcactatatctcttcaggacaggaactgtgttttactcttctttatgcccatgtgacctagaacgtattttgttcttaataagtatttgtccacaagtgaactatcacacagaaaaaggaatctggatcagataggattaagtttatctacatactacagaaaaacccaaaataacgatgttgaagagatagagctgtacttttatgtgtagaagtaccaagacaggcaggcagtccaggattggtgtggaggctccagaagttcctaggctctctccagctttctgcccaacataac

SEQ ID NO: 76734 - DNA, 461 bp, Homo sapiens
ctgactgtagtaactgagaatggtttcacaggagaggtggcacagcattctctcaacaagtagggaacacagcatgagccaaatcatggaggtataaaagcgtgagctacattagcaagcatctaatagatctgaaatctataatgcaagccaagctgtaatgacctgtggaaggctgtgaatgctattctcttaacagtacaataatagctatcatttattgagtatgtaccaagcattgaaatattttaacattttttatttcattcaaataacatcttcctaacactcttatgtagaggaactattattatgcccattttataggagaggaagctaaggctaaagaattaagcaaattcccaatgtatcatggctagaaagtagaagaaaggaaattcaagtcagtcagatccaaagccttgcttttaacttctgacttagaatacaatgatgagcca

SEQ ID NO: 76735 - DNA, 213 bp, Homo sapiens
gggccaaatgtctgagatccctttctgtcttcattgtagatttctactctgtttgtttgttgaactgaatccctcttttcttttacgtcaatttaatctgccttgttcctccatcattgcaaaaagaaaaacaaagtctagctacacccacctacctactcagagataagaaagcttcttttgtacatgtgtaaattatttcatttaaaatga

SEQ ID NO: 76736 - DNA, 394 bp, Homo sapiens
ggataattattttgtacttaattttatatacagtaaaagcctgggttgtcatttttaaaaatcctgtgcttcaaacaattgagcagacatcaagtccctgaaactgaaacttccatttatttaatgcggcgactcgcagactctttggactcaagaattcctttgaccgtcttaaaaattgtaccccagagagcttttctttaggtgggttataacttcagtatttaccatattagactacactttgagaacactgttttaatgtatttccttgatctgactaaataaaataacagggatattttaaggagagggatttggtgtaattcagtattgagtactggcaatgcataaaacatgggtaggtgtcactcacacaggaagacttgaccaa

SEQ ID NO: 76737 - DNA, 343 bp, Homo sapiens
ctctggctccaagagtctgaacctccccaaattgctcctgtggataatatcactattgtaaaacctagatcagcgcttgagatattttgcagaccctgcactggatggatcaactgataccacccagactggtaatctggctcaaccagttctgccatcctacccaggaacagaagacagcaagaaaacatcacttaaatcccctattcaatccatctccaacctaaccaatcagcactccccgcctcccaagctcttacccaccaaattatcttttaagactctgatccccatatgcttgggaagactgatctgaataataataaaactctggtttcaccca

SEQ ID NO: 76738 - DNA, 554 bp, Homo sapiens
tcattagtaagtagaagtaccataaagtatctaaaactccagtggtgattactggaatgggtgaagagtgaatagggcagggtggtgaagtaggaggaagacaatccttggcattagactctcctggctcctcacttcttagccgtgcatcctttggaggttacttcatttctctaaaggtggctttctcaactgcaaaatagcactgcttacgcctaccccgtgaggtgctgtagatcctcagcctgttgaagggttgatatgggcctggcacagagtgagccctgtggatgctctgtatccctgtctctcttcacctgcacatgtaggcttatccaaaatgaggactagaggtaataaaattgcaccatgttgggattcctgctcaatgagtaaattttagccgctcttgtcccaaaaacagcaaaatgggtaattatgtgagataatggatatgttaatttgctttttcatagtaactattttactatctatatgtatcccataacgtcatattgtgtaccttaatatacacaatacactttatttaaaaa

SEQ ID NO: 76739 - DNA, 724 bp, Homo sapiens
ggatggtagacaaagttagtgaaagtaaaaccaatcatttacttagctactagccatttaaatgcattcttgaagaggaagtattaatagattaaacttacatgaacttaaaatatttttatgtcttctttatgaataactaagaattgaacctatattgttgattctaaagcgaaaaatcagaaaaggattgtgtgaaaagtaaaatgaatgtagcataactgctttatgaagtgtggaaatacaatgcagaaagacaatgtccggctgggcacagtggctcacacctgtaatcccagcacttaaggagaccgaggcgggtagatcaattgagttcaggagttccagaccagcctggccaacatggtaaaaccccgtctctaaaaaaaaaaaaaaaagaaaaaagaaaaagaaagacaatgtccaaggcactttaattcaactaaaaccttgcatcacctgaatgaaaaattgggaacctatttttttccctttaattttgaactcttttagtaaaatgacagaatgtcaatccctttgttatatatagtaaagcaggatactttatattggttcagtgtgtcatgtttgttcatttggacaaatgtaacttacaggtgaaaatgcttatagggacctggtagagttatttgagagagagacacttaagtacagagcagttgtattaacagtttatatttgtttaaaatacagtttatatata

SEQ ID NO: 76740 - DNA, 154 bp, Homo sapiens
  misc_feature (143)..(145): n is a, c, g, or t
  misc_feature (148)..(151): n is a, c, g, or t
gcctgtctgtttgtgccgccaggagaccttggaagggacagagaaagagctggggttttgccatgttgcccaggctgatctccaacacctgggatcaagcagtctgcccaccttggcctcccaaagtgctgaaattacaggtnnnacnnnnatg

SEQ ID NO: 76741 - DNA, 426 bp, Homo sapiens
cccgaaggagtcactgatcacatcagaccacaggggtcggcccacctcgggtttgggacagtgttctttcctggaatgaagcagtggcaatgcctctggcacaggattgctgggcctgcaggaggccaggaggcacctctgtgctgtgttcccagtaggaggaggcagctactacttgtaaggcacacatatcattttgcattggaaaagtgaagataggcttgctgcagagggagtgatgggagagttcaccttaaattgttctactgaggaagggctccaaagagccagtgggttttccgcaggcagacggggttctccctgtccggctcaccagtgcaggaagccagggaagaaattactgtgggaattctgttatttcacaagcacttcatacctgcatccctgcacttggcaccgcaggcc

SEQ ID NO: 76742 - DNA, 637 bp, Homo sapiens
cgcgccagatggggcgggaggaggggagacccggcacccaccggcccagagctgcctgacgcggcctgggcggaccccgccgcccgggtgcctaggcacgattccagggatccagggtaaagcggttcgcgcgggaacaggaggatatgtcaggcacaggctattccccatcactatagccacagaggactggtccagatgcggatcccgatctgtgcttcttcagatggttggataccaagaaagctgctcaggaaaccttacaacacaatggaaaaaacattggagctcctggttaagccttcagactccaggaggcacaccattgggctcctcaagttctcacccctttggtctcagactgaattataccaccaacttccctggttctccaccttgcagatggcagattgtggaacttcttggcctccatagttgcatgaagcaattctcatattaattcgccacttacatatctatacatattctcttgggtctgtttctctggagaaccctgacttatacatgaccttcatgtatagctaaataacaatgtattaatattttccacagaggtgtcatgtctctgtatattaaatgatccaaggccaggcgcggtggctcacgcctgtaatcc

SEQ ID NO: 76743 - DNA, 2408 bp, Homo sapiens
atgggagttgcataggagagatggatgtgtgtaaacattatcactaaaatgataaacagaatacccattagaattcttagaactattaatgatcaagaggggtggaggcatttcttggtatcaaataactggttaaggttactttgggcgaaatctatttcctttttgtttttgttgttggataacaagaaatgtctagactaatattcatcagttttacaaacataatgaaaattagttgatttttagttgatttttttgtcccaacattttttttaacctttttgccactcattatatgtttgcagttctaggtctttgacagctgaagaccacaggaatcaaacaggcgagacacacagaatactgacccttctttacgcttttatagtgtttataccatatggcccagtgtggaattcttgattatccaagtgcctttggtcatttgtggcaggaaaacttaatagtttttagccagcagtgccacagccagcttttactgcaatacctaaagggtcaagtagtgtttttgtaccactattatttcaaatttaagtattctgccatgaaacgatccatactgggctggaacttgacatgtgaaatctttaatactaaagcttatctctgcttggcagctttttaggagaataatgagagttacaattttgactcttgcgttcctagaattcaaatggcatagctttctgaaatgagtatttcaagtttagtagtccgtataggagtgttgtgacttcaatttcagtgttcttgttaaaagaaataatatgatatatatatacacacatatatataacttgatgccagttttctagtaagcctcagtcttttattcactactcaatgataatgcattgtacaaacactgtcacatgagtaaataaaaatgaataattccttagaagatggagagtgttaaattatatttgtgataggaagcttagacatatcttttggttattagcttccattgccaattgtatttcagatgcatagggttttcttcccaaaaatatattgttaacttttatagctaactagcacctggaaaaaatgtatttgtacaactttactattgtatatagttttataataatgaaaaataaacccaatggccatattagaatgcaatttcgacatacagcttatctagatagttttccagaggattttgaaatttggcttaactgggaggataactgctcagcacaccactgaaacataaccactgacaccattcatttattttaactgagattcttgacatttttctctcctatgccttgttactttagcatacttgaactcacataaatgcttctttggattacatgggctatctgattccattttggatctgattgtccatcttgaattcaatatggtattcatctggactattcaaaaattatgccatttctagtctgtgaaataagatgtaaaaaatctttatttttgccctttggtaaaaacctatgtgacaacttttaaaatgtgaagcaacatctaatatagttgactggtatactaataggaaagtgaaagtatttcatgggtactttgtcacagaatgtgaaaagaaacttggcatagtggcctttataatgaggcatccacttactcctctgaagtgaagtctgtagcttagcttgtgtatagtttttgaaagaaatctcatgatcttcgttcattctcttgccttctcttttatctcatatggcacaagtagagggggaagccaggaggaaattcatcaccttgctatgcttttatttgatttttaattcctgagtgcctaaatgtggtgaccggcacctcacataactttttgagattcttgatgtcatttttatccttcctgtcaaccagcaatgtatttttatgttactaaaaccagtaacgtcataattgttgagggcaagcttcattgttgatagtgcaaagtgtcgctgttgtgatgtgtgtttattttattcaagtttgaatattgacaagtgtaacttaagctggtgactgacacctattgatctgctgtgtgcaaatgatagtactattttttagaaaactcttaagtaaattttaaaaatatttgaatacaaaatatctgagcaattttgaactcaaaagtttttcattgttttaaggattgccacaggactctttaatggtttttaatggacatacatgcctaatatttattggtgtgtttaaaatattttttgatagagtgttatgtcttaagcgcattagaaaacaattgtttgtaatggaatcaaagtgtttccctggacagtttgatgtgcttatggttgagatttataatctgcttgtactttgctttttaacttattaactgtaaataaattttagagaatacaaaaaaa

SEQ ID NO: 76744 - DNA, 2013 bp, Homo sapiens
  misc_feature (1992)..(1992): n is a, c, g, or t
  misc_feature (1994)..(1994): n is a, c, g, or t
atgggagttgcataggagagatggatgtgtgtaaacattatcactaaaatgataaacagaatacccattagaattcttagaactattaatgatcaagaggggtggaggcatttcttggtatcaaataactggttaaggttactttgggcgaaatctatttcctttttgtttttgttgttggataacaagaaatgtctagactaatattcatcagttttacaaacataatgaaaattagttgatttttagttgatttttttgtcccaacattttttttaacctttttgccactcattatatgtttgcagttctaggtctttgacagctgaagaccacaggaatcaaacaggcgagacacacagaatactgacccttctttacgcttttatagtgtttataccatatggcccagtgtggaattcttgattatccaagtgcctttggtcatttgtggcaggaaaacttaatagtttttagccagcagtgccacagccagcttttactgcaatacctaaagggtcaagtagtgtttttgtaccactattatttcaaatttaagtattctgccatgaaacgatccatactgggctggaacttgacatgtgaaatctttaatactaaagcttatctctgcttggcagctttttaggagaataatgagagttacaattttgactcttgcgttcctagaattcaaatggcatagctttctgaaatgagtatttcaagtttagtagtccgtataggagtgttgtgacttcaatttcagtgttcttgttaaaagaaataatatgatatatatatacacacatatatataacttgatgccagttttctagtaagcctcagtcttttattcactactcaatgataatgcattgtacaaacactgtcacatgagtaaataaaaatgaataattccttagaagatggagagtgttaaattatatttgtgataggaagcttagacatatcttttggttattagcttccattgccaattgtatttcagatgcatagggttttcttcccaaaaatatattgttaacttttatagctaactagcacctggaaaaaatgtatttgtacaactttactattgtatatagttttataataatgaaaaataaacccaatggccatattagaatgcaatttcgacatacagcttatctagatagttttccagaggattttgaaatttggcttaactgggaggataactgctcagcacaccactgaaacataaccactgacaccattcatttattttaactgagattcttgacatttttctctcctatgccttgttactttagcatacttgaactcacataaatgcttctttggattacatgggctatctgattccattttggatctgattgtccatcttgaattcaatatggtattcatctggactattcaaaaattatgccatttctagtctgtgaaataagatgtaaaaaatctttatttttgccctttggtaaaaacctatgtgacaacttttaaaatgtgaagcaacatctaatatagttgactggtatactaataggaaagtgaaagtatttcatgggtactttgtcacagaatgtgaaaagaaacttggcatagtggcctttataatgaggcatccacttactcctctgaagtgaagtctgtagcttagcttgtgtatagtttttgaaagaaatctcatgatcttcgttcattctcttgccttctcttttatctcatatggcacaagtagagggggaagccaggaggaaattcatcaccttgctatgcttttatttgatttttaattcctgagtgcctaaatgtggtgaccggcacctcacataactttttgagattcttgatgtcatttttatccttcctgtcaaccagcaatgtatttttatgttactaaaaccagtaacgtcataattgttgagggcaagcttcattgttgatagtgcaaagtgtcgctgttgcagtgtgcttcgngngatcctctggaacagctat

SEQ ID NO: 76745 - DNA, 1252 bp, Homo sapiens
  misc_feature (1)..(1): n is a, c, g, or t
  misc_feature (148)..(148): n is a, c, g, or t
  misc_feature (151)..(151): n is a, c, g, or t
  misc_feature (274)..(274): n is a, c, g, or t
  misc_feature (492)..(492): n is a, c, g, or t
  misc_feature (508)..(508): n is a, c, g, or t
  misc_feature (620)..(620): n is a, c, g, or t
  misc_feature (753)..(753): n is a, c, g, or t
ncacaaagctaagttttgaatactctgtgtcactgcttccagctgatattataaaaggcagtggtgaggatttcagctaaaaaaagattcgttgtttcaaaagcccagcctgaagtaagacagtgccatagacacgaccacaccaganggnaggtggttcacaaagggccttgcattcttctttgctcttgtttactttacatgagggcaaggagtctcagaagcgtaagatataatactacactagacaggcaagcagacctaatgtgcaaantctcatgttggctatataggtagtttatatgtcagttccaattatgaatacattcctcagcaactagagttttctcattcattcttactgaactgttagggcatgtggcagcccagagctctgtcaaaatgaattgtcccccttgaaaagttggcaatgcaaggaagtgacaacctaatgcatgttagcactcttgataacaggacccagaggagacngcgaagaacaattggntatgtgtctgggcactggctgttgttcctgcctgggttcaaatctcctctctgccgcttatgatctgtgtgcatttacaagtttgttagcccccttacctctttgttccttntaaggttgtcgtgcaaattacatgaaatgatgttacaggtgtaagccaatgcctgacacacatatgtattctacagtaatcattatcaaagtggtaagcaggaaccagtgccatttcacaactatcaggtacncttctgggtactcatcatgaaagactgcagtgttccatttacaggcattggttggtggtttactaaagagtgtgtttttgtccaagaagttcactcactacattttgctcaaccagtcctctcatttgcagcgatttttttttctttgagcgtcccttgttgtgcagcataaacatctgggctgcatggtcagacccatgaggcttctcttccatctggccacctgttatataattaagcctgattgcagatgcgattctcatttagctgtcagcagcagcctgggagactagcaactgaggtgaataaaggtagctcaccacatctacaagggtagaagggctgaagcgaagggttgaccagccaggacaacaaaggttattgcttatggcagtgtcagcctaagagctcaagttcaagatcagaagcatgagagggtaagacctctaggggagtctgcataggtccaggtgaaaccctgggtgtctcttgattgtcg

SEQ ID NO: 76746 - DNA, 1106 bp, Homo sapiens
aagaaactccctttatctcccaaagggagatacaactacaggaaagccaaccaggcagcctcgtcgagtggctaagccaggcaagcccagcttggggctgacaagtcgggtggggagttgagaagttgttcacaaagtcctaatgactaaactccaccttgttgaaagagaccaactacatataatgtctgctcacaagtggtccgaccttgaggttaaaattgtctggactctggcaggatatgtgtatggattttaagtgacaggatcatggatcacctcctctaaacctgtcatttcccagacaaggacactgagacccacagaagtgaatgccttgcctggggctggcacgagttggcaaagttgctccccaccgggcccagggaaggaagctggctggctgcaggaggggcgtcgttctgcagctgcccaaatgcagccatgatgcatttgttttaaactagctttattttcagggggtgatgtttacctgaccttatccccaaattctttggcacctcacagtggaccccatgtgtacatccccatccctcccaggccactactgactttgtatcttgcgactcttcaaaggactggtgagaatggcactttgtacagaagacacacctgaaatgggagggggggtggacagaacttaaaaaaataaaagggccagccacagtggctcacacctgtaatcctaacattctgagaggttagaagcaagaggatggcttgagcccaggcatttgcagccagcctgagaaatagagcgagaccctgtctcaatcaatcaatcaaaaacgacagagatagatagatagatgatagattgatagatgatagatagatagatagatagatagatagatagatagatagcaacatggtctaaatgagtctaggagtggagtgtccttgaacttggggagaccaccctccactgcatttgcattattgatactatggctggagagggccttttgcctaaaagcttggagtatgttggggcccccgagagcaggtgagggccagaggttcagatcagaggatggaaaaaggaggtggagaacaggaaagaaaaacattttaataagaac

SEQ ID NO: 76747 - DNA, 1359 bp, Homo sapiens
gcatttggcgggatctgtgtctctcgctggtgctggcacaggagcttgggatctgtctcctctttcgcctcctgcaccttgagagccctgggctactctgtcacagcccctgttgccctgcgatctgtaggtccttggggacgcatagttaaggtgccaggacatcctggaagctgggaaatgaccatggctggagaaggaaagaaggtgtgttttgcctgactcagtgactatagagagaaccaagttctgcaggcctgtcacctaagtctcagctgggtgtcacaaactctgaactggattccaaggctttcatgaatgcacttatgtttgctgtggcagctgcattatgtcgtgggggatgtggatgcagaacctcccattctgtcgtcttgcttatgttactctcctttatgtttcactttctcaaatgaatgtcaagcaggtgattttcagattcaaaagttctaaaataaattgctcaaatttacacattatgtaagctgttaataaaatttcttgtaggtgctacatatttattaaaatttttggttgtaattttaagctcactgtaggcagaaaggaatcattaagatttctattcttttttagtctgtatctaaatgaccatatattttaattccaaatatttactttatacttcagtaatgctcattgtattttgcaaaatttatattgttcttttatttgaaaatataaggctttttttagctcctgaaatctatattatagtcatatagttttattatagtatttgataagaagagcagcaacatattgagaacagaataaaattctgctgtctttttaatgattatttattaaattcttctcattaaagcctattattaatgattgtaatgtatttactgtataattttactgcaatttattaaatgccaatgacttctaatgtctgcttttcatgactgcacacagtttaaagctgtagatatctaaagggttatttttcagcccggcatggtggtcacgcctgtaatcccagcactttgggaggccaaggtgggtggatcacgaggtcaggagatcaagaccatcctggctaccacggtgaaaccccgtctctactaaatatagaaaaaattagccgggcatagtggtgggtgcctgtattcccagctactcgagaggctgaggcaggagaatggcgtgaacccagtaggcggagcttgcagtgagccgagatggcaccactgcactacagcctgggcgacagggtgagactgtctcaaaaaaaaacaaaaagggcttatttttcattgtatatttatgttgtattcaggattttatgcattaaaatctctcttcttattttca

SEQ ID NO: 76748 - DNA, 1549 bp, Homo sapiens
gcatttggcgggatctgtgtctctcgctggtgctggcacaggagcttgggatctgtctcctctttcgcctcctgcaccttgagagccctgggctactctgtcacagcccctgttgccctgcgatctgtaggtccttggggacgcatagttaaggtgccaggacatcctggaagctgggaaatgaccatggctggagaaggaaagaaggtgtgttttgcctgactcagtgactatagagagaaccaagttctgcaggcctgtcacctaagtctcaggtgagtatgaattctcttgtgtttttcacagattgttgcagtggcaggaccaaggtcaaatgagttatagccaagtctacagtaagatgtggcagtattctgttttgaagccgggaccatgattgggcaagcttgccacttggtcaagtgctcaccctctgaaaatgtcttccttggtctttgcctccagctgggtgtcacaaactctgaactggattccaaggctttcatgaatgcacttatgtttgctgtggcagctgcattatgtcgtgggggatgtggatgcagaacctcccattctgtcgtcttgcttatgttactctcctttatgtttcactttctcaaatgaatgtcaagcaggtgattttcagattcaaaagttctaaaataaattgctcaaatttacacattatgtaagctgttaataaaatttcttgtaggtgctacatatttattaaaatttttggttgtaattttaagctcactgtaggcagaaaggaatcattaagatttctattcttttttagtctgtatctaaatgaccatatattttaattccaaatatttactttatacttcagtaatgctcattgtattttgcaaaatttatattgttcttttatttgaaaatataaggctttttttagctcctgaaatctatattatagtcatatagttttattatagtatttgataagaagagcagcaacatattgagaacagaataaaattctgctgtctttttaatgattatttattaaattcttctcattaaagcctattattaatgattgtaatgtatttactgtataattttactgcaatttattaaatgccaatgacttctaatgtctgcttttcatgactgcacacagtttaaagctgtagatatctaaagggttatttttcagcccggcatggtggtcacgcctgtaatcccagcactttgggaggccaaggtgggtggatcacgaggtcaggagatcaagaccatcctggctaccacggtgaaaccccgtctctactaaatatagaaaaaattagccgggcatagtggtgggtgcctgtattcccagctactcgagaggctgaggcaggagaatggcgtgaacccagtaggcggagcttgcagtgagccgagatggcaccactgcactacagcctgggcgacagggtgagactgtctcaaaaaaaaacaaaaagggcttatttttcattgtatatttatgttgtattcaggattttatgcattaaaatctctcttcttattttca

SEQ ID NO: 76749 - DNA, 699 bp, Homo sapiens
gcatttggcgggatctgtgtctctcgctggtgctggcacaggagcttgggatctgtctcctctttcgcctcctgcaccttgagagccctgggctactctgtcacagcccctgttgccctgcgatctgtaggtccttggggacgcatagttaaggtgccaggacatcctggaagctgggaaatgaccatggctggagaaggaaagaaggtgtgttttgcctgactcagtgactatagagagaaccaagttctgcaggcctgtcacctaagtctcagcttttgcatatgcagaagaagaattggatgaaattcagccttgattatgatgaaaactctcaacaagttaggaatagaaggtcctgtagctttttcttttgagacggagttttgctctgttgcccaggctggagtgcagtggtgcaatcttggctccctgcaagctccgcctcccggattcacgccattctcctgcctcagattccccagcagctgggaattcaggcacccgccaccatgcccggctatttttatttttatttgtttattttttttagtagagacagggtttcactgtgttagccaggatggtctcaatctcctgacctcgttgatccacccacctcggcctcccaaattgctaggattacaggcgtgagccaccgctcctggccggtcctgtagctattatttcctgtttttc

SEQ ID NO: 76750 - DNA, 3259 bp, Homo sapiens
gacccacgcgtacgacgagacgcgtgggatcagaaccacgacgtccgatagagtcacatttattgatttgcatatgttgaatcaaccttgcatcctggggacaaagccaactccattgttgcggatgaactttttaatgtgctgctggatttgttttgccagtattttattgaggatttttgcacagtgtttaccaaagacattggcatgatgtgttgttgttgttgttgttgttgtagtatctatgttaggttttggtatctggatgatgctggcctgatagaatgagttagagagaacttctttgtcttcaattttttttggatggttttaggagaaaaggtaccatctcctctttgtacctctgctcaaattcagcttgcttggtaggctagtttttactgcctcagtttcagaacacattattgatctattcagggttcagtcttgtggagggtttattttgcaaggaaattgtctatttcttctagattttctggtttatgtgcatacatatgtttatagtgttctctgattgttgttcatatttccatgggatcagtgatgatatctcccttattatttctaattgtgtttggttctcctttcttttcttatttatttgcctagctagtgttccatctagtttattaatttttttcataaaaacagctcctggatttgttgacttttttttttggaagagttttcagtgtctctatctccctcagctctactttgatcttggttatttcttgttttctgctacctttctggttagttttcacttggttttctagttcttttcatcaagatgttaggctgttaattttagatcttctagtttctcttttttttcttcttgtggcagagtctcactctgtcacccaggctggagtacagtggcatgatctccgctcactgcaacctccacttctcagttttaagtgatttctgctgtctcagcttcctgagtagctgggattacagatgtgcatcacaaaaaccagctaatttttgaattttttttgtagaggtggggttttgttgtgtggtccagactggtcttgaacatctggccttaagtgatttgcctaccccagcctcccaaagtgctggaactacaggcatgagccaccacacccagccctttctatctttttgatgtggacattagtgctataaatttccctcttttcttggtttccagtgattattttattctatcttggtgagtcatcagggaaataatcttaaatttacaatcaacatatagtttaaatccatataattgtgtgagaagaaccctttgttatttgaaggtgatgtttgaaagattttctaacggtgccttttagttagtcttaaatttctaattgtagttaaaaacatgccattgtcatttctgacattttaagtatatggtttagaagtggttagtatagttctattgttttgcagtaggttttagataatttgtgtcttacaaaagtaaaagtgaatactcattacttatgaaagaagttagttagcttgccttaggtagatagcaagagaagagtccctggaaagtccctggtcagtgcctcatccctgcataacatataaagaagcctggaaaaaatcaagctgcagacactaacaagggaactagcatatgttgttgtgcttggggacatgcccgtggctgcacagatagaaaaacctctggcccatttggataaaaacttgtagaaacctccagctcactcagataaaggaacaagaacgacctagcatagaaatgcctttgtttggccaggcacggtggatcatgcctgtaattccaacaatgtcggaggcagctgtgggcggatcatctgaggtcgggagtttgagaccagcatgaccaagatggacaaactctgtctttactaaaaatacaaaactagccaggcatggtgctgcatgcctataatcccagctacttgggaggctgaggcaggagaatcgctagaacccaggaggcggaggtttctgtgagccgagatcgcaccattgcactccaggctgggcaacaagagcaaaactgcaaaaaaaaataaaaataaataaaaaaagaaagtacatctcaaaaaaaagaaagacaagaaaaagaaaaaaaagaagcacttttgtctttgtacagtcagtgggctcccaggaaaatgttccttctctttttgttggcatgggcactgtgggatctggtgcattccggtcgacactctcgtttatttggactgtaagtctgacctctatgaataattacttcagaccctgagtgctcccgggccaagctccttggccaaactttcaccttagcttctgataagtcttgggccaagctaagcagcatctatcaatcatcccttcagctcctgattgatcccgggccaaaggctgggccaagctgagccacacgtttttcaagacagcctgtgaactaggcacatatccttcccttcccagtccataaaaaccctggacccagcctcgtagagggcaccactttcagacacctatctctgctggcaaagagctttcttctcttgcttcttaaactttcactccaacctcacctttgtgttcacgctccttaatctccttagaggtagaacaaagaactctggatgttatctcagactacgagagactgttacatcttggtgcactgctgagactacgacacttggtttctttgagtttgactaaatattttacatgagtgtaattatacagctttcctttttgactgtcttattttacttaacagaatgttttgaagatttgtccttattgtagtacttttcaagatttccttatttttaaggctgaatgctatcccagtgattgtacgtgccctgtttgctgaatctactcatccttaagggtacatttgcttccaggtaacatgtttgtgagtaatactacaatgtgcatatatctattccatgttctgctttgtctgtttgggatatttttcatacactgattcagtaccatgtgtattcccttgcttttgttgtctcatccgttgatgctacgtcccccaaattattgccacgaccagttgtaatgaagcttcacccttctgtattgtgctaggaattttacagctataggttttacattatagtcttcattcattttttaaaattgacacatgtaattgtgcatattttggggaaacaattatatatatgtgttgtataacaataaaaatcagagtacttctata

SEQ ID NO: 76751 - DNA, 994 bp, Homo sapiens
gcatttggcgggatctgtgtctctcgctggtgctggcacaggagcttgggatctgtctcctctttcgcctcctgcaccttgagagccctgggctactctgtcacagcccctgttgccctgcgatctgtaggtccttggggacgcatagttaaggtgccaggacatcctggaagctgggaaatgaccatggctggagaaggaaagaaggtgtgttttgcctgactcagtgactatagagagaaccaagttctgcaggcctgtcacctaagtctcagggcggggagaccttccttccccacgggtttgaggctatggctaagtggtgagccttggtgagacgcagaaaggatccatcccaggcacttggctagaggcaggttcctgggatctgataaaactgatattggagacgctggagctgatccgacatagcaatggtgttgactccctccttatgtgtggattgctcagcgggggaacttgactgtccaacatgctgggtgcaagaacagcagaaaggggacttttaagatgtggcaaacatgaggcctcttcggagaggactttggaaaccaggccttgcttggctgaatgctatcccagtgattgtacgtgccctgtttgctgaatctactcatccttaagggtacatttgcttccaggtaacatgtttgtgagtaatactacaatgtgcatatatctattccatgttctgctttgtctgtttgggatatttttcatacactgattcagtaccatgtgtattcccttgcttttgttgtctcatccgttgatgctacgtcccccaaattattgccacgaccagttgtaatgaagcttcacccttctgtattgtgctaggaattttacagctataggttttacattatagtcttcattcattttttaaaattgacacatgtaattgtgcatattttggggaaacaattatatatatgtgttgtataacaataaaaatcagagtacttctata

SEQ ID NO: 76752 - DNA, 973 bp, Homo sapiens
gcatttggcgggatctgtgtctctcgctggtgctggcacaggagcttgggatctgtctcctctttcgcctcctgcaccttgagagccctgggctactctgtcacagcccctgttgccctgcgatctgtaggtccttggggacgcatagttaaggtgccaggacatcctggaagctgggaaatgaccatggctggagaaggaaagaaggtgtgttttgcctgactcagtgactatagagagaaccaagttctgcaggcctgtcacctaagtctcagggcggggagaccttccttccccacgggtttgaggctatggctaagtggtgagccttggtgagacgcagaaaggatccatcccaggcacttggctagaggtaagtaaaaatagcctttgggccagaagacctgatagtttgggtactcgtctggacataagtccccatcttcccagaaatgtcgtcttttgtctgcaacaactggctggagaaatatttcagaaagatgtgtgcctggaacacccaaaggcatacctttcctttctccttggcataggccttgcagcactgaagaaagaccaggtttgcaacggagccttcaatactcttcatccctatggatctcaggggctcatagggtgacaggagaggagacaagctagcttgggaagagtctttgtccttcagcttctcctctactgaaacactatatacttggggccacagttcatagcaaaacacacatgctgtctttctttctctcacacccccatctcgggaacccaacaacttgatggcaggtagctctgggtatccttggtctggcattcacccactgggcatctaagctgtcctaaagctcttttcaatcacttctcactgtttccaggcccatgtgggtaggtgttccagccttcactctttcaggctgttcataaaggcacagtgtgggaaaatcccctactgtgatggccattg

SEQ ID NO: 76753 - DNA, 4226 bp, Homo sapiens
ttgttaactttgtcaaagatcaggttgttgtaggtttttggctttatttctaggttctctactttgtttcatttgtctatgtgtctgtttctataccagtaccatgctgtttttgttactgtactcttctagtatagtttgaagttaggtagagtgacacttccagcttttttttttttttcttaaggttggcttggctatttgggctcttttttggttccatatgaactttaaaagtttttatttttctaattctctgaagaatgtcagtagttcaatgggaatagcattgaatctatgaattacttagggccatatgcccatattcatgatactgattcttcctctccatgagcatggaatatttctccatctgttttgtgtccactctgatttctctgagcagttgtttgtggttctccttgaagaggtccttcactttctttcttagctgtattcctaggtatttttttctctttgtagcaaatgtgaatgaaagttcattcatgatttgtctccctgcttgcctgttgtttgtgcatgggaatgctagctacttttgcacattgattttatatcctgagattttgctactgttgcttatcaccttaagaagctttgggcctgagacaatgaggttttctagatgtaggatcaggtcatctgcaaacaaagataatttgacttcctctctttctattagaatactctttatttcttcctctggcctgattttcctggccaaggcttctgatactatattgaatggtagtggtgaaagagggcattcttttcttgtgccagttttcaggtggaacgtttctagcttttgcacattcagtatgatattggctgtgggtttgttgtatatggctcttattattttcaggtatgtttcttcacttcctagtttattgagaattttaaacctgaaagaatgctgaattttattggatgctttttctgcatttattgagataatcatgtggtttttgtatttagttctctttatgtgatgagtcacatttattgatttgcatatgttgaatcaaccttgcatcctggggacaaagccaactccattgttgcggatgaactttttaatgtgctgctggatttgttttgccagtattttattgaggatttttgcacagtgtttaccaaagacattggcatgatgtgttgttgttgttgttgttgttgtagtatctatgttaggttttggtatctggatgatgctggcctgatagaatgagttagagagaacttctttgtcttcaattttttttggatggttttaggagaaaaggtaccatctcctctttgtacctctgctcaaattcagcttgcttggtaggctagtttttactgcctcagtttcagaacacattattgatctattcagggttcagtcttgtggagggtttattttgcaaggaaattgtctatttcttctagattttctggtttatgtgcatacatatgtttatagtgttctctgattgttgttcatatttccatgggatcagtgatgatatctcccttattatttctaattgtgtttggttctcctttcttttcttatttatttgcctagctagtgttccatctagtttattaatttttttcataaaaacagctcctggatttgttgacttttttttttggaagagttttcagtgtctctatctccctcagctctactttgatcttggttatttcttgttttctgctacctttctggttagttttcacttggttttctagttcttttcatcaagatgttaggctgttaattttagatcttctagtttctcttttttttcttcttgtggcagagtctcactctgtcacccaggctggagtacagtggcatgatctccgctcactgcaacctccacttctcagttttaagtgatttctgctgtctcagcttcctgagtagctgggattacagatgtgcatcacaaaaaccagctaatttttgaattttttttgtagaggtggggttttgttgtgtggtccagactggtcttgaacatctggccttaagtgatttgcctaccccagcctcccaaagtgctggaactacaggcatgagccaccacacccagccctttctatctttttgatgtggacattagtgctataaatttccctcttttcttggtttccagtgattattttattctatcttggtgagtcatcagggaaataatcttaaatttacaatcaacatatagtttaaatccatataattgtgtgagaagaaccctttgttatttgaaggtgatgtttgaaagattttctaacggtgccttttagttagtcttaaatttctaattgtagttaaaaacatgccattgtcatttctgacattttaagtatatggtttagaagtggttagtatagttctattgttttgcagtaggttttagataatttgtgtcttacaaaagtaaaagtgaatactcattacttatgaaagaagttagttagcttgccttaggtagatagcaagagaagagtccctggaaagtccctggtcagtgcctcatccctgcataacatataaagaagcctggaaaaaatcaagctgcagacactaacaagggaactagcatatgttgttgtgcttggggacatgcccgtggctgcacagatagaaaaacctctggcccatttggataaaaacttgtagaaacctccagctcactcagataaaggaacaagaacgacctagcatagaaatgcctttgtttggccaggcacggtggatcatgcctgtaattccaacaatgtcggaggcagctgtgggcggatcatctgaggtcgggagtttgagaccagcatgaccaagatggacaaactctgtctttactaaaaatacaaaactagccaggcatggtgctgcatgcctataatcccagctacttgggaggctgaggcaggagaatcgctagaacccaggaggcggaggtttctgtgagccgagatcgcaccattgcactccaggctgggcaacaagagcaaaactgcaaaaaaaaataaaaataaataaaaaaagaaagtacatctcaaaaaaaagaaagacaagaaaaagaaaaaaaagaagcacttttgtctttgtacagtcagtgggctcccaggaaaatgttccttctctttttgttggcatgggcactgtgggatctggtgcattccggtcgacactctcgtttatttggactgtaagtctgacctctatgaataattacttcagaccctgagtgctcccgggccaagctccttggccaaactttcaccttagcttctgataagtcttgggccaagctaagcagcatctatcaatcatcccttcagctcctgattgatcccgggccaaaggctgggccaagctgagccacacgtttttcaagacagcctgtgaactaggcacatatccttcccttcccagtccataaaaaccctggacccagcctcgtagagggcaccactttcagacacctatctctgctggcaaagagctttcttctcttgcttcttaaactttcactccaacctcacctttgtgttcacgctccttaatctccttagaggtagaacaaagaactctggatgttatctcagactacgagagactgttacatcttggtgcactgctgagactacgacacttggtttctttgagtttgactaaatattttacatgagtgtaattatacagctttcctttttgactgtcttattttacttaacagaatgttttgaagatttgtccttattgtagtacttttcaagatttccttatttttaaggctgaatgctatcccagtgattgtacgtgccctgtttgctgaatctactcatccttaagggtacatttgcttccaggtaacatgtttgtgagtaatactacaatgtgcatatatctattccatgttctgctttgtctgtttgggatatttttcatacactgattcagtaccatgtgtattcccttgcttttgttgtctcatccgttgatgctacgtcccccaaattattgccacgaccagttgtaatgaagcttcacccttctgtattgtgctaggaattttacagctataggttttacattatagtcttcattcattttttaaaattgacacatgtaattgtgcatattttggggaaacaattatatatatgtgttgtataacaataaaaatcagagtacttctata

SEQ ID NO: 76754 - DNA, 796 bp, Homo sapiens
tagcccccatgactcaaattgtacttccttgcacatatttgatgttaacaagtatgttttaaaaattttaaataaccccatttgcaataaaatcatttgcaatgattttctcacagtcgaggcaggctgttggctcggttaggacagatgccctgatcatgtagtttcagagaccactggagggagctgcccatgatttacaattgctggcctcttctacgtggccacctcagccataagtgagagtatataggtgaactaagaggtggagccataaacatttctcttttactgtcttacaggtatttgtggtggttgatttttctagaggaaggttatttatataaagcttcactaatatccatttagttatgtggatagcaggtccatgaactgcaaagtgatatttctgaggtatctctaggaggaatgcactttcagtgccctaggataactccaaaaactcaccagtagttttctgttaaatgtcaggcaaccacagtaactttcatgacatccacaggaactacatttttcagtcccactatgcctgggcctttgagtggtacatgcattcccactaaatagctactccattacccagggaaatgaagtcaggttgagctactccaatcaaatttcattttttaggatgaatcccatcatctgaataactcaggactattaaagcctcaaaatgtttctctgtaagaacctcaggcaacaccaggacaaacccaaagagagtttaggtgaaacttagcttcgtatgtgcagcaaagagacgccaacagag

SEQ ID NO: 76755 - DNA, 348 bp, Homo sapiens
gcacatttgacctaatgaactgacaattcactgctaattttaggttccatttgacttaatcctaaaaatgagagcataagtagataacagcctgtacattgaagtagttccagaaatattggatttatctaaaattatgtttttcattatagtgtagttgccctgtaaatttttattgatggtagtgcataaaaaggcattaaaatttgagacttcctgattttagaaggtttatgccaagcaagtttgacacttttaagcttacaccaaatgggtgaattgtgatctaagaattgcttaagactatacttgggtgcagttttcattttttgaaggctgctttacgtg

SEQ ID NO: 76756 - DNA, 498 bp, Homo sapiens
cctagtatttcctcagctgagtgcatggggccagaccacactggggagggcagtcagcgtcactcagagcaccgggtcatctcatgcagaaacaccctcaaagaaatagcccaaattatgctgaccaaatatctgggcaccccgtgccccagacaagttgacacagaaaattaaccatcacaggttaactccatccaggagtggaattgctgggtcatagagaaggcataggaattcacagaaatcaccaaacggttttcaggcggttgtgccatgttaaactcccactggaaagagaggagagctgtgattgttccacgtcctcagcaacgtttagaataggcagtctttggccgggccgggcacagaggctcaaacctgtaaccccagcactttgggaggccatagtgggtggattacctgagatcaagagttcaagaccagcctggccaacatggttaaaccccgtctctattaaaaatgcaaaaattagccagg

SEQ ID NO: 76757 - DNA, 936 bp, Homo sapiens
agagcgtattatgaagtagaggcagcaactgggtgggtggatggacatgcatgaacaggaagcctggtaccatgccaggctagtacctcaattcaactgagtaatcaaggttcctacagattagtcattacaaactgttcaccaggacaaactgtgctttaaattgattgcatgcttatcttgtgttttacctgtaatttttcaacaagatttgtgtcatattgaccagagtatatcaatcttgaaaaagctgataaaaaagtgtatttttattaagatttataaaaataatatattgcatatcacgactgctcatacaactctgttgaagcattgccactgaggtaaatggagagaaaaattctattacaatactacatgctttactgcactaatattttcccgttgattttaagctgtattgaaaagcaaactggacccttcaggagtcatttgttgtagcatttgaaaaaagcattgattttaacatgggggcatataatcaagtttcagaaacattcacattgagatgagctttgaaaggttatttgtcagtgtttcatttgtccaacctctgaatattaaatttttaagtctttctcccttatcctctatctcatgtctaaagtaatttcctttagaattatgtcattattttaaaattgccaacttaccatgtttcttatttcatctttcacatacagaattaaaataactaataaggtgaagaaatatggagaattttttaattgcttaaattataatggttttgatgacaaaaataattatggaataattaagaattttaaatgacccaaggattaagtctccatgcatcttttgacattgtcgtcatcaacacaaagggaaagcaagtgtgaaagattgcacaatgggttttgtgacatggcctcaaaccaactgcaaagaatgaga

SEQ ID NO: 76758 - DNA, 2600 bp, Homo sapiens
ttaggtacgaggccgcggattactcggccgagggtggagcagcgcgcgcaagcgaggccaggggaaggtgggcgcaggactttagccggttgagaaggatcaagcaggcatttggagcacaggtgtctagaaacttttaaggggccggttcaagaaggaaaagttcccttctgctgtgaaactatttggcaagaggctggagggcccaatggctgcaaaatcgcaacccaacattcccaaagccaagagtctagatggcgtcaccaatgacagaaccgcatctcaagggcagtggggccgtgcctgggaggtggactggttttcactggcgagcgtcatcttcctactgctgttcgcccccttcatcgtctactacttcatcatggcttgtgaccagtacagctgcgccctgaccggccctgtggtggacatcgtcaccggacatgctcggctctcggacatctgggccaagactccacctataacgaggaaagccgcccagctctataccttgtgggtcaccttccaggtgcttctgtacacgtctctccctgacttctgccataagtttctacccggctacgtaggaggcatccaggagggggccgtgactcctgcaggggttgtgaacaagtatcagatcaacggcctgcaagcctggctcctcacgcacctgctctggtttgcaaacgctcatctcctgtcctggttctcgcccaccatcatcttcgacaactggatcccactgctgtggtgcgccaacatccttggctatgccgtctccaccttcgccatggtcaagggctacttcttccccaccagcgccagagactgcaaattcacaggcaatttcttttacaactacatgatgggcatcgagtttaaccctcggatcgggaagtggtttgacttcaagctgttcttcaatgggcgccccgggatcgtcgcctggaccctcatcaacctgtccttcgcagcgaagcagcgggagctccacagccatgtgaccaatgccatggtcctggtcaacgtcctgcaggccatctacgtgattgacttcttctggaacgaaacctggtacctgaagaccattgacatctgccatgaccacttcgggtggtacctgggctggggcgactgtgtctggctgccttatctttacacgctgcagggtctgtacttggtgtaccaccccgtgcagctgtccaccccgcacgccgtgggcgtcctgctgctgggcctggtgggctactacatcttccgggtggccaaccaccagaaggacctgttccgccgcacggatgggcgctgcctcatctggggcaggaagcccaaggtcatcgagtgctcctacacatccgccgacgggcagaggcaccacagcaagctgctggtgtcgggcttctggggcgtggcccgccacttcaactacgtcggcgacctgatgggcagcctggcctactgcctggcctgtggcggtggccacctgctgccctacttctacatcatctacatggccatcctgctgacccaccgctgcctccgggacgagcaccgctgcgccagcaagtacggccgggactgggagcgctacaccgccgcagtgccttaccgcctgctgcctggaatcttctaagggcacgccctagggagaagccctgtggggctgtcaagagcgtgttctgccaggtccatgggggctggcatcccagctccaactcgaggagcctcagtttcctcatctgtaaactggagagagcccagcacttggcaggtgtccagtacctaatcacgctctgttccttgcttttgccttcaagggaattccgagtgtccagcactgccgtattgccagcacagacggattttctctaatcagtgtccctggggcaggaggatgacccagtcacctttactagtcctttggagacaatttacctgtattaggagcccaggccacgctacactctgcccacactggtgagcaggaggtcttcccacgccctgtcattaggctgcatttactcttgctaaataaaagtgggagtggggcgtgcgcgttatccatgtattgcctttcagctctagatccccctcccctgcctgctctgcagtcgtgggtggggcccgtgcgccgtttctccttggtagcgtgcacggtgttgaactgggacactggggagaaaggggctttcatgtcgtttccttcctgctcctgctgcacagctgccaggagtgctctgcctggagtctgcagacctcagagaggtcccagcactggctgtggcctttcaggtgtaggcaggtgggctctgcttcccgattccctgtgagcgcccaccctctcgaaagaattttctgcttgccctgtgactgtgcagactctggctcgagcaacccggggaacttcaccctcaggggcctcccacaccttctccagcgaggaggtctcagtcccagcctcgggagggcacctccttttctgtgctttcttccctgaggcattcttcctcatccctagggtgttgtgtagaactctttttaaactctatgctccgagtagagttcatctttatattaaacttcccctgttcaaataa

SEQ ID NO: 76759 - DNA, 370 bp, Homo sapiens
gtggggagagggtccagctcacaggcgaggggccgctggggctccggggaggcggggcggaggcgtggatagtccccctcccccacgagccggcgtctgagggatgctctgtccccgcgctgtctggagcttccccgggcgaaggctgcctggctccggggtcggctcctggccccatgccgcgctccgcggcggctctttctcctgccccacctgttgttcgcctccctctttgtcagtgctgagccaggcacagcagctttgcgatgggactggcttgtccgccgtcctccctgacatgcggctgttgaagccctgagcactggaccttctgcctcttgcttgactcctactgtgggccttgagcgtc

SEQ ID NO: 76760 - DNA, 2639 bp, Homo sapiens
tatctcggcctactgtgtgactccgacccctggctagagggtaggcggcgtggagcagcgcgcgcaagcgaggccaggggaaggtgggcgcaggtgaggggccgaggtgtgcgcaggactttagccggttgagaaggatcaagcaggcatttggagcacaggtgtctagaaacttttaaggggccggttcaagaaggaaaagttcccttctgctgtgaaactatttggcaagaggctggagggcccaatggctgcaaaatcgcaacccaacattcccaaagccaagagtctagatggcgtcaccaatgacagaaccgcatctcaagggcagtggggccgtgcctgggaggtggactggttttcactggcgagcgtcatcttcctactgctgttcgcccccttcatcgtctactacttcatcatggcttgtgaccagtacagctgcgccctgaccggccctgtggtggacatcgtcaccggacatgctcggctctcggacatctgggccaagactccacctataacgaggaaagccgcccagctctataccttgtgggtcaccttccaggtgcttctgtacacgtctctccctgacttctgccataagtttctacccggctacgtaggaggcatccaggagggggccgtgactcctgcaggggttgtgaacaagtatcagatcaacggcctgcaagcctggctcctcacgcacctgctctggtttgcaaacgctcatctcctgtcctggttctcgcccaccatcatcttcgacaactggatcccactgctgtggtgcgccaacatccttggctatgccgtctccaccttcgccatggtcaagggctacttcttccccaccagcgccagagactgcaaattcacaggcaatttcttttacaactacatgatgggcatcgagtttaaccctcggatcgggaagtggtttgacttcaagctgttcttcaatgggcgccccgggatcgtcgcctggaccctcatcaacctgtccttcgcagcgaagcagcgggagctccacagccatgtgaccaatgccatggtcctggtcaacgtcctgcaggccatctacgtgattgacttcttctggaacgaaacctggtacctgaagaccattgacatctgccatgaccacttcgggtggtacctgggctggggcgactgtgtctggctgccttatctttacacgctgcagggtctgtacttggtgtaccaccccgtgcagctgtccaccccgcacgccgtgggcgtcctgctgctgggcctggtgggctactacatcttccgggtggccaaccaccagaaggacctgttccgccgcacggatgggcgctgcctcatctggggcaggaagcccaaggtcatcgagtgctcctacacatccgccgacgggcagaggcaccacagcaagctgctggtgtcgggcttctggggcgtggcccgccacttcaactacgtcggcgacctgatgggcagcctggcctactgcctggcctgtggcggtggccacctgctgccctacttctacatcatctacatggccatcctgctgacccaccgctgcctccgggacgagcaccgctgcgccagcaagtacggccgggactgggagcgctacaccgccgcagtgccttaccgcctgctgcctggaatcttctaagggcacgccctagggagaagccctgtggggctgtcaagagcgtgttctgccaggtccatgggggctggcatcccagctccaactcgaggagcctcagtttcctcatctgtaaactggagagagcccagcacttggcaggtgtccagtacctaatcacgctctgttccttgcttttgccttcaagggaattccgagtgtccagcactgccgtattgccagcacagacggattttctctaatcagtgtccctggggcaggaggatgacccagtcacctttactagtcctttggagacaatttacctgtattaggagcccaggccacgctacactctgcccacactggtgagcaggaggtcttcccacgccctgtcattaggctgcatttactcttgctaaataaaagtgggagtggggcgtgcgcgttatccatgtattgcctttcagctctagatccccctcccctgcctgctctgcagtcgtgggtggggcccgtgcgccgtttctccttggtagcgtgcacggtgttgaactgggacactggggagaaaggggctttcatgtcgtttccttcctgctcctgctgcacagctgccaggagtgctctgcctggagtctgcagacctcagagaggtcccagcactggctgtggcctttcaggtgtaggcaggtgggctctgcttcccgattccctgtgagcgcccaccctctcgaaagaattttctgcttgccctgtgactgtgcagactctggctcgagcaacccggggaacttcaccctcaggggcctcccacaccttctccagcgaggaggtctcagtcccagcctcgggagggcacctccttttctgtgctttcttccctgaggcattcttcctcatccctagggtgttgtgtagaactctttttaaactctatgctccgagtagagttcatctttatattaaacttcccctgttcaaataa

SEQ ID NO: 76761 - DNA, 2657 bp, Homo sapiens
atcatccgggggcgggcgcccctgccctgcgggtgacttcgacccctggctagagggtaggcggcgtgtggagcagcgcgcgcaagcgaggccaggggaaggtgggcgcaggtgaggggccgaggtgtgcgcaggactttagccggttgagaaggatcaagcaggcatttggagcacaggtgtctagaaacttttaaggggccggttcaagaaggaaaagttcccttctgctgtgaaactatttggcaagaggctggagggcccaatggctgcaaaatcgcaacccaacattcccaaagccaagagtctagatggcgtcaccaatgacagaaccgcatctcaagggcagtggggccgtgcctgggaggtggactggttttcactggcgagcgtcatcttcctactgctgttcgcccccttcatcgtctactacttcatcatggcttgtgaccagtacagctgcgccctgaccggccctgtggtggacatcgtcaccggacatgctcggctctcggacatctgggccaagactccacctataacgaggaaagccgcccagctctataccttgtgggtcaccttccaggtgcttctgtacacgtctctccctgacttctgccataagtttctacccggctacgtaggaggcatccaggagggggccgtgactcctgcaggggttgtgaacaagtatcagatcaacggcctgcaagcctggctcctcacgcacctgctctggtttgcaaacgctcatctcctgtcctggttctcgcccaccatcatcttcgacaactggatcccactgctgtggtgcgccaacatccttggctatgccgtctccaccttcgccatggtcaagggctacttcttccccaccagcgccagagactgcaaattcacaggcaatttcttttacaactacatgatgggcatcgagtttaaccctcggatcgggaagtggtttgacttcaagctgttcttcaatgggcgccccgggatcgtcgcctggaccctcatcaacctgtccttcgcagcgaagcagcgggagctccacagccatgtgaccaatgccatggtcctggtcaacgtcctgcaggccatctacgtgattgacttcttctggaacgaaacctggtacctgaagaccattgacatctgccatgaccacttcgggtggtacctgggctggggcgactgtgtctggctgccttatctttacacgctgcagggtctgtacttggtgtaccaccccgtgcagctgtccaccccgcacgccgtgggcgtcctgctgctgggcctggtgggctactacatcttccgggtggccaaccaccagaaggacctgttccgccgcacggatgggcgctgcctcatctggggcaggaagcccaaggtcatcgagtgctcctacacatccgccgacgggcagaggcaccacagcaagctgctggtgtcgggcttctggggcgtggcccgccacttcaactacgtcggcgacctgatgggcagcctggcctactgcctggcctgtggcggtggccacctgctgccctacttctacatcatctacatggccatcctgctgacccaccgctgcctccgggacgagcaccgctgcgccagcaagtacggccgggactgggagcgctacaccgccgcagtgccttaccgcctgctgcctggaatcttctaagggcacgccctagggagaagccctgtggggctgtcaagagcgtgttctgccaggtccatgggggctggcatcccagctccaactcgaggagcctcagtttcctcatctgtaaactggagagagcccagcacttggcaggtgtccagtacctaatcacgctctgttccttgcttttgccttcaagggaattccgagtgtccagcactgccgtattgccagcacagacggattttctctaatcagtgtccctggggcaggaggatgacccagtcacctttactagtcctttggagacaatttacctgtattaggagcccaggccacgctacactctgcccacactggtgagcaggaggtcttcccacgccctgtcattaggctgcatttactcttgctaaataaaagtgggagtggggcgtgcgcgttatccatgtattgcctttcagctctagatccccctcccctgcctgctctgcagtcgtgggtggggcccgtgcgccgtttctccttggtagcgtgcacggtgttgaactgggacactggggagaaaggggctttcatgtcgtttccttcctgctcctgctgcacagctgccaggagtgctctgcctggagtctgcagacctcagagaggtcccagcactggctgtggcctttcaggtgtaggcaggtgggctctgcttcccgattccctgtgagcgcccaccctctcgaaagaattttctgcttgccctgtgactgtgcagactctggctcgagcaacccggggaacttcaccctcaggggcctcccacaccttctccagcgaggaggtctcagtcccagcctcgggagggcacctccttttctgtgctttcttccctgaggcattcttcctcatccctagggtgttgtgtagaactctttttaaactctatgctccgagtagagttcatctttatattaaacttcccctgttcaaataa

SEQ ID NO: 76762 - DNA, 2634 bp, Homo sapiens
atcatccgggggcgggcgcccctgccctgcgggtgacttcgacccctggctagagggtaggcggcgtgtggagcagcgcgcgcaagcgaggccaggggaaggtgggcgcaggactttagccggttgagaaggatcaagcaggcatttggagcacaggtgtctagaaacttttaaggggccggttcaagaaggaaaagttcccttctgctgtgaaactatttggcaagaggctggagggcccaatggctgcaaaatcgcaacccaacattcccaaagccaagagtctagatggcgtcaccaatgacagaaccgcatctcaagggcagtggggccgtgcctgggaggtggactggttttcactggcgagcgtcatcttcctactgctgttcgcccccttcatcgtctactacttcatcatggcttgtgaccagtacagctgcgccctgaccggccctgtggtggacatcgtcaccggacatgctcggctctcggacatctgggccaagactccacctataacgaggaaagccgcccagctctataccttgtgggtcaccttccaggtgcttctgtacacgtctctccctgacttctgccataagtttctacccggctacgtaggaggcatccaggagggggccgtgactcctgcaggggttgtgaacaagtatcagatcaacggcctgcaagcctggctcctcacgcacctgctctggtttgcaaacgctcatctcctgtcctggttctcgcccaccatcatcttcgacaactggatcccactgctgtggtgcgccaacatccttggctatgccgtctccaccttcgccatggtcaagggctacttcttccccaccagcgccagagactgcaaattcacaggcaatttcttttacaactacatgatgggcatcgagtttaaccctcggatcgggaagtggtttgacttcaagctgttcttcaatgggcgccccgggatcgtcgcctggaccctcatcaacctgtccttcgcagcgaagcagcgggagctccacagccatgtgaccaatgccatggtcctggtcaacgtcctgcaggccatctacgtgattgacttcttctggaacgaaacctggtacctgaagaccattgacatctgccatgaccacttcgggtggtacctgggctggggcgactgtgtctggctgccttatctttacacgctgcagggtctgtacttggtgtaccaccccgtgcagctgtccaccccgcacgccgtgggcgtcctgctgctgggcctggtgggctactacatcttccgggtggccaaccaccagaaggacctgttccgccgcacggatgggcgctgcctcatctggggcaggaagcccaaggtcatcgagtgctcctacacatccgccgacgggcagaggcaccacagcaagctgctggtgtcgggcttctggggcgtggcccgccacttcaactacgtcggcgacctgatgggcagcctggcctactgcctggcctgtggcggtggccacctgctgccctacttctacatcatctacatggccatcctgctgacccaccgctgcctccgggacgagcaccgctgcgccagcaagtacggccgggactgggagcgctacaccgccgcagtgccttaccgcctgctgcctggaatcttctaagggcacgccctagggagaagccctgtggggctgtcaagagcgtgttctgccaggtccatgggggctggcatcccagctccaactcgaggagcctcagtttcctcatctgtaaactggagagagcccagcacttggcaggtgtccagtacctaatcacgctctgttccttgcttttgccttcaagggaattccgagtgtccagcactgccgtattgccagcacagacggattttctctaatcagtgtccctggggcaggaggatgacccagtcacctttactagtcctttggagacaatttacctgtattaggagcccaggccacgctacactctgcccacactggtgagcaggaggtcttcccacgccctgtcattaggctgcatttactcttgctaaataaaagtgggagtggggcgtgcgcgttatccatgtattgcctttcagctctagatccccctcccctgcctgctctgcagtcgtgggtggggcccgtgcgccgtttctccttggtagcgtgcacggtgttgaactgggacactggggagaaaggggctttcatgtcgtttccttcctgctcctgctgcacagctgccaggagtgctctgcctggagtctgcagacctcagagaggtcccagcactggctgtggcctttcaggtgtaggcaggtgggctctgcttcccgattccctgtgagcgcccaccctctcgaaagaattttctgcttgccctgtgactgtgcagactctggctcgagcaacccggggaacttcaccctcaggggcctcccacaccttctccagcgaggaggtctcagtcccagcctcgggagggcacctccttttctgtgctttcttccctgaggcattcttcctcatccctagggtgttgtgtagaactctttttaaactctatgctccgagtagagttcatctttatattaaacttcccctgttcaaataa

SEQ ID NO: 76763 - DNA, 2644 bp, Homo sapiens
cgaggaagctaaggctgcgttggggtgaggccctcacttcatccggcgactagcaccgcgtccggcagcgccagccctacactcgcccgcgccatggcctctgtctccgaggtgtgcgcaggactttagccggttgagaaggatcaagcaggcatttggagcacaggtgtctagaaacttttaaggggccggttcaagaaggaaaagttcccttctgctgtgaaactatttggcaagaggctggagggcccaatggctgcaaaatcgcaacccaacattcccaaagccaagagtctagatggcgtcaccaatgacagaaccgcatctcaagggcagtggggccgtgcctgggaggtggactggttttcactggcgagcgtcatcttcctactgctgttcgcccccttcatcgtctactacttcatcatggcttgtgaccagtacagctgcgccctgaccggccctgtggtggacatcgtcaccggacatgctcggctctcggacatctgggccaagactccacctataacgaggaaagccgcccagctctataccttgtgggtcaccttccaggtgcttctgtacacgtctctccctgacttctgccataagtttctacccggctacgtaggaggcatccaggagggggccgtgactcctgcaggggttgtgaacaagtatcagatcaacggcctgcaagcctggctcctcacgcacctgctctggtttgcaaacgctcatctcctgtcctggttctcgcccaccatcatcttcgacaactggatcccactgctgtggtgcgccaacatccttggctatgccgtctccaccttcgccatggtcaagggctacttcttccccaccagcgccagagactgcaaattcacaggcaatttcttttacaactacatgatgggcatcgagtttaaccctcggatcgggaagtggtttgacttcaagctgttcttcaatgggcgccccgggatcgtcgcctggaccctcatcaacctgtccttcgcagcgaagcagcgggagctccacagccatgtgaccaatgccatggtcctggtcaacgtcctgcaggccatctacgtgattgacttcttctggaacgaaacctggtacctgaagaccattgacatctgccatgaccacttcgggtggtacctgggctggggcgactgtgtctggctgccttatctttacacgctgcagggtctgtacttggtgtaccaccccgtgcagctgtccaccccgcacgccgtgggcgtcctgctgctgggcctggtgggctactacatcttccgggtggccaaccaccagaaggacctgttccgccgcacggatgggcgctgcctcatctggggcaggaagcccaaggtcatcgagtgctcctacacatccgccgacgggcagaggcaccacagcaagctgctggtgtcgggcttctggggcgtggcccgccacttcaactacgtcggcgacctgatgggcagcctggcctactgcctggcctgtggcggtggccacctgctgccctacttctacatcatctacatggccatcctgctgacccaccgctgcctccgggacgagcaccgctgcgccagcaagtacggccgggactgggagcgctacaccgccgcagtgccttaccgcctgctgcctggaatcttctaagggcacgccctagggagaagccctgtggggctgtcaagagcgtgttctgccaggtccatgggggctggcatcccagctccaactcgaggagcctcagtttcctcatctgtaaactggagagagcccagcacttggcaggtgtccagtacctaatcacgctctgttccttgcttttgccttcaagggaattccgagtgtccagcactgccgtattgccagcacagacggattttctctaatcagtgtccctggggcaggaggatgacccagtcacctttactagtcctttggagacaatttacctgtattaggagcccaggccacgctacactctgcccacactggtgagcaggaggtcttcccacgccctgtcattaggctgcatttactcttgctaaataaaagtgggagtggggcgtgcgcgttatccatgtattgcctttcagctctagatccccctcccctgcctgctctgcagtcgtgggtggggcccgtgcgccgtttctccttggtagcgtgcacggtgttgaactgggacactggggagaaaggggctttcatgtcgtttccttcctgctcctgctgcacagctgccaggagtgctctgcctggagtctgcagacctcagagaggtcccagcactggctgtggcctttcaggtgtaggcaggtgggctctgcttcccgattccctgtgagcgcccaccctctcgaaagaattttctgcttgccctgtgactgtgcagactctggctcgagcaacccggggaacttcaccctcaggggcctcccacaccttctccagcgaggaggtctcagtcccagcctcgggagggcacctccttttctgtgctttcttccctgaggcattcttcctcatccctagggtgttgtgtagaactctttttaaactctatgctccgagtagagttcatctttatattaaacttcccctgttcaaataa

SEQ ID NO: 76764 - DNA, 3247 bp, Homo sapiens
tatctcggcctactgtgtgactccgacccctggctagagggtaggcggcgtggagcagcgcgcgcaagcgaggccaggggaaggtgggcgcaggtgaggggccgaggtgtgcgcaggactttagccggttgagaaggatcaagcaggcatttggagcacaggtgtctagaaacttttaaggggccggttcaagaaggaaaagttcccttctgctgtgaaactatttggcaagaggctggagggcccaatggctgcaaaatcgcaacccaacattcccaaagccaagagtctagatggcgtcaccaatgacagaaccgcatctcaagggcagtggggccgtgcctgggaggtggactggttttcactggcgagcgtcatcttcctactgctgttcgcccccttcatcgtctactacttcatcatggcttgtgaccagtacagctgcgccctgaccggccctgtggtggacatcgtcaccggacatgctcggctctcggacatctgggccaagactccacctataacgaggaaagccgcccagctctataccttgtgggtcaccttccaggtgcttctgtacacgtctctccctgacttctgccataagtttctacccggctacgtaggaggcatccaggagggggccgtgactcctgcaggggttgtgaacaagtatcagatcaacggcctgcaagcctggctcctcacgcacctgctctggtttgcaaacgctcatctcctgtcctggttctcgcccaccatcatcttcgacaactggatcccactgctgtggtgcgccaacatccttggctatgccgtctccaccttcgccatggtcaagggctacttcttccccaccagcgccagagactgcaaattcacaggcaatttcttttacaactacatgatgggcatcgagtttaaccctcggatcgggaagtggtttgacttcaagctgttcttcaatgggcgccccgggatcgtcgcctggaccctcatcaacctgtccttcgcagcgaagcagcgggagctccacagccatgtgaccaatgccatggtcctggtcaacgtcctgcaggccatctacgtgattgacttcttctggaacgaaacctggtacctgaagaccattgacatctgccatgaccacttcgggtggtacctgggctggggcgactgtgtctggctgccttatctttacacgctgcagggtctgtacttggtgtaccaccccgtgcagctgtccaccccgcacgccgtgggcgtcctgctgctgggcctggtgggctactacatcttccgggtggccaaccaccagaaggacctgttccgccgcacggatgggcgctgcctcatctggggcaggaagcccaaggtcatcgagtgctcctacacatccgccgacgggcagaggcaccacagcaagctgctggtgtcgggcttctggggcgtggcccgccacttcaactacgtcggcgacctgatgggcagcctggcctactgcctggcctgtggcggtggccacctgctgccctacttctacatcatctacatggccatcctgctgacccaccgctgcctccgggacgagcaccgctgcgccagcaagtacggccgggactgggagcgctacaccgccgcagtgccttaccgcctgctgcctggaatcttctaagggcacgccctagggagaagccctgtggggctgtcaagagcgtgttctgccaggtccatgggggctggcatcccagctccaactcgaggagcctcagtttcctcatctgtaaactggagagagcccagcacttggcaggtgtccagtacctaatcacgctctgttccttgcttttgccttcaagggaattccgagtgtccagcactgccgtattgccagcacagacggattttctctaatcagtgtccctggggcaggaggatgacccagtcacctttactagtcctttggagacaatttacctgtattaggagcccaggccacgctacactctgcccacactggtgagcaggaggtcttcccacgccctgtcattaggctgcatttactcttgctaaataaaagtgggagtggggcgtgcgcgttatccatgtattgcctttcagctctagatccccctcccctgcctgctctgcagtcgtgggtggggcccgtgcgccgtttctccttggtagcgtgcacggtgttgaactgggacactggggagaaaggggctttcatgtcgtttccttcctgctcctgctgcacagctgccaggagtgctctgcctggagtctgcagacctcagagaggtcccagcactggctgtggcctttcaggtgtaggcaggtgggctctgcttcccgattccctgtgagcgcccaccctctcgaaagaattttctgcttgccctgtgactgtgcagactctggctcgagcaacccggggaacttcaccctcaggggcctcccacaccttctccagcgaggaggtctcagtcccagcctcgggagggcacctccttttctgtgctttcttccctgaggcattcttcctcatccctagggtgttgtgtagaactctttttaaactctatgctccgagtagagttcatctttatattaaacttcccctgttcaaataaaaaaaaaaaaaaaaaaaaaaaaaaaaaaaaaaaagggggggaaaaaaaaaaaaaaaaaaaacaaacaaaaacacaaaaaagaaagaagaaaacaaaacaaaaagaaaaacaaagacacagacaagaggaagggcgggggccgcgcaccacacccacgcgccgtgcagcaaccaacatacagaggccgcgcccaacacaaacgccaacgacgagcgcggggaccaccaagcagagagcacagcacactaatacgcactcagcgccggagccaagcccgcgacccaaaacaccacccaggagaggacgaaaacccaacccgccgcaacagagacaaaaatacgcaaaagacgaacaccccgcgggaggggccgaaacagtacaacgagcgcgacacacaaccagaaaaaagaggggccacgaaggggggggagagaactaagacacagcacaacgaacgcacgaggagggcggcggccaaaaccaagcaacgacccaggcccgagtggaggagcaaggcagctaagcgagaccgagaaggagagaaaaagagaagagaaagacacacagcgccgcgcgacgagacgagcagcacgcagccgcgccgaaga

SEQ ID NO: 76765 - DNA, 3036 bp, Homo sapiens
tatctcggcctactgtgtgactccgacccctggctagagggtaggcggcgtggagcagcgcgcgcaagcgaggccaggggaaggtgggcgcaggtgaggggccgaggtgtgcgcaggactttagccggttgagaaggatcaagcaggcatttggagcacaggtgtctagaaacttttaaggggccggttcaagaaggaaaagttcccttctgctgtgaaactatttggcaagaggctggagggcccaatggctgcaaaatcgcaacccaacattcccaaagccaagagtctagatggcgtcaccaatgacagaaccgcatctcaagggcagtggggccgtgcctgggaggtggactggttttcactggcgagcgtcatcttcctactgctgttcgcccccttcatcgtctactacttcatcatggcttgtgaccagtacagctgcgccctgaccggccctgtggtggacatcgtcaccggacatgctcggctctcggacatctgggccaagactccacctataacgaggaaagccgcccagctctataccttgtgggtcaccttccaggtgcttctgtacacgtctctccctgacttctgccataagtttctacccggctacgtaggaggcatccaggagggggccgtgactcctgcaggggttgtgaacaagtatcagatcaacggcctgcaagcctggctcctcacgcacctgctctggtttgcaaacgctcatctcctgtcctggttctcgcccaccatcatcttcgacaactggatcccactgctgtggtgcgccaacatccttggctatgccgtctccaccttcgccatggtcaagggctacttcttccccaccagcgccagagactgcaaattcacaggcaatttcttttacaactacatgatgggcatcgagtttaaccctcggatcgggaagtggtttgacttcaagctgttcttcaatgggcgccccgggatcgtcgcctggaccctcatcaacctgtccttcgcagcgaagcagcgggagctccacagccatgtgaccaatgccatggtcctggtcaacgtcctgcaggccatctacgtgattgacttcttctggaacgaaacctggtacctgaagaccattgacatctgccatgaccacttcgggtggtacctgggctggggcgactgtgtctggctgccttatctttacacgctgcagggtctgtacttggtgtaccaccccgtgcagctgtccaccccgcacgccgtgggcgtcctgctgctgggcctggtgggctactacatcttccgggtggccaaccaccagaaggacctgttccgccgcacggatgggcgctgcctcatctggggcaggaagcccaaggtcatcgagtgctcctacacatccgccgacgggcagaggcaccacagcaagctgctggtgtcgggcttctggggcgtggcccgccacttcaactacgtcggcgacctgatgggcagcctggcctactgcctggcctgtggcggtggccacctgctgccctacttctacatcatctacatggccatcctgctgacccaccgctgcctccgggacgagcaccgctgcgccagcaagtacggccgggactgggagcgctacaccgccgcagtgccttaccgcctgctgcctggaatcttctaagggcacgccctagggagaagccctgtggggctgtcaagagcgtgttctgccaggtccatgggggctggcatcccagctccaactcgaggagcctcagtttcctcatctgtaaactggagagagcccagcacttggcaggtgtccagtacctaatcacgctctgttccttgcttttgccttcaagggaattccgagtgtccagcactgccgtattgccagcacagacggattttctctaatcagtgtccctggggcaggaggatgacccagtcacctttactagtcctttggagacaatttacctgtattaggagcccaggccacgctacactctgcccacactggtgagcaggaggtcttcccacgccctgtcattaggctgcatttactcttgctaaataaaagtgggagtggggcgtgcgcgttatccatgtattgcctttcagctctagatccccctcccctgcctgctctgcagtcgtgggtggggcccgtgcgccgtttctccttggtagcgtgcacggtgttgaactgggacactggggagaaaggggctttcatgtcgtttccttcctgctcctgctgcacagctgccaggagtgctctgcctggagtctgcagacctcagagaggtcccagcactggctgtggcctttcaggtgtaggcaggtgggctctgcttcccgattccctgtgagcgcccaccctctcgaaagaattttctgcttgccctgtgactgtgcagactctggctcgagcaacccggggaacttcaccctcaggggcctcccacaccttctccagcgaggaggtctcagtcccagcctcgggagggcacctccttttctgtgctttcttccctgaggcattcttcctcatccctagggtgttgtgtagaactctttttaaactctatgctccgagtagagttcatctttatattaaacttcccctgttcaaataaaaaaaaaaaaaaaaaaaaaaaaaaaaaaaaaaaagggggggcgcgcgccctaaaaaagtattccccgcaggggggcgccaaatatttacgcttaccccacggtttctttggcacaagggggcgccccataaagggagagccagaataataaaagcaatgaggagctggggccggtggttatacacaacgctcgggagcgggggaacaacgcggtcataccaggcagcgatcccttgtgggacaaggagaccataaaaccctcggggggcggggacacacattgtgggggacaaccaaccctctagagaaatatttaagcgctcaaggggacaaatataaccacttccagcgtcgatacagcgtgttacacaaacgggcaattataccagccgtatga

SEQ ID NO: 76766 - DNA, 2959 bp, Homo sapiens
tatctcggcctactgtgtgactccgacccctggctagagggtaggcggcgtggagcagcgcgcgcaagcgaggccaggggaaggtgggcgcaggtgaggggccgaggtgtgcgcaggactttagccggttgagaaggatcaagcaggcatttggagcacaggtgtctagaaacttttaaggggccggttcaagaaggaaaagttcccttctgctgtgaaactatttggcaagaggctggagggcccaatggctgcaaaatcgcaacccaacattcccaaagccaagagtctagatggcgtcaccaatgacagaaccgcatctcaagggcagtggggccgtgcctgggaggtggactggttttcactggcgagcgtcatcttcctactgctgttcgcccccttcatcgtctactacttcatcatggcttgtgaccagtacagctgcgccctgaccggccctgtggtggacatcgtcaccggacatgctcggctctcggacatctgggccaagactccacctataacgaggaaagccgcccagctctataccttgtgggtcaccttccaggtgcttctgtacacgtctctccctgacttctgccataagtttctacccggctacgtaggaggcatccaggagggggccgtgactcctgcaggggttgtgaacaagtatcagatcaacggcctgcaagcctggctcctcacgcacctgctctggtttgcaaacgctcatctcctgtcctggttctcgcccaccatcatcttcgacaactggatcccactgctgtggtgcgccaacatccttggctatgccgtctccaccttcgccatggtcaagggctacttcttccccaccagcgccagagactgcaaattcacaggcaatttcttttacaactacatgatgggcatcgagtttaaccctcggatcgggaagtggtttgacttcaagctgttcttcaatgggcgccccgggatcgtcgcctggaccctcatcaacctgtccttcgcagcgaagcagcgggagctccacagccatgtgaccaatgccatggtcctggtcaacgtcctgcaggccatctacgtgattgacttcttctggaacgaaacctggtacctgaagaccattgacatctgccatgaccacttcgggtggtacctgggctggggcgactgtgtctggctgccttatctttacacgctgcagggtctgtacttggtgtaccaccccgtgcagctgtccaccccgcacgccgtgggcgtcctgctgctgggcctggtgggctactacatcttccgggtggccaaccaccagaaggacctgttccgccgcacggatgggcgctgcctcatctggggcaggaagcccaaggtcatcgagtgctcctacacatccgccgacgggcagaggcaccacagcaagctgctggtgtcgggcttctggggcgtggcccgccacttcaactacgtcggcgacctgatgggcagcctggcctactgcctggcctgtggcggtggccacctgctgccctacttctacatcatctacatggccatcctgctgacccaccgctgcctccgggacgagcaccgctgcgccagcaagtacggccgggactgggagcgctacaccgccgcagtgccttaccgcctgctgcctggaatcttctaagggcacgccctagggagaagccctgtggggctgtcaagagcgtgttctgccaggtccatgggggctggcatcccagctccaactcgaggagcctcagtttcctcatctgtaaactggagagagcccagcacttggcaggtgtccagtacctaatcacgctctgttccttgcttttgccttcaagggaattccgagtgtccagcactgccgtattgccagcacagacggattttctctaatcagtgtccctggggcaggaggatgacccagtcacctttactagtcctttggagacaatttacctgtattaggagcccaggccacgctacactctgcccacactggtgagcaggaggtcttcccacgccctgtcattaggctgcatttactcttgctaaataaaagtgggagtggggcgtgcgcgttatccatgtattgcctttcagctctagatccccctcccctgcctgctctgcagtcgtgggtggggcccgtgcgccgtttctccttggtagcgtgcacggtgttgaactgggacactggggagaaaggggctttcatgtcgtttccttcctgctcctgctgcacagctgccaggagtgctctgcctggagtctgcagacctcagagaggtcccagcactggctgtggcctttcaggtgtaggcaggtgggctctgcttcccgattccctgtgagcgcccaccctctcgaaagaattttctgcttgccctgtgactgtgcagactctggctcgagcaacccggggaacttcaccctcaggggcctcccacaccttctccagcgaggaggtctcagtcccagcctcgggagggcacctccttttctgtgctttcttccctgaggcattcttcctcatccctagggtgttgtgtagaactctttttaaactctatgctccgagtagagttcatctttatattaaacttcccctgttcaaataaaaaaaaaaaaaaaaaaaaaaaaaaaaaaaaaaaaaaaaaaaaaaaaaaaaaaaaaaaaaaaaaaaggggggggggccaaaaaatcccccggggggggcccattgggcacaccacatttgttgtgcacacaaggggggcccccaaaagaaggggcgcgacataaaacgcgcgagcgcggggcgcgcagttaaaaacaactggtgggcgagtgggaacactcggcggccagcggagggaactgcgggaggaggccaccatatgctgggggggggacacattgtgcggacacacaccaccgcgagatatcgacccccggggga

SEQ ID NO: 76767 - DNA, 2773 bp, Homo sapiens
tatctcggcctactgtgtgactccgacccctggctagagggtaggcggcgtggagcagcgcgcgcaagcgaggccaggggaaggtgggcgcaggtgaggggccgaggtgtgcgcaggactttagccggttgagaaggatcaagcaggcatttggagcacaggtgtctagaaacttttaaggggccggttcaagaaggaaaagttcccttctgctgtgaaactatttggcaagaggctggagggcccaatggctgcaaaatcgcaacccaacattcccaaagccaagagtctagatggcgtcaccaatgacagaaccgcatctcaagggcagtggggccgtgcctgggaggtggactggttttcactggcgagcgtcatcttcctactgctgttcgcccccttcatcgtctactacttcatcatggcttgtgaccagtacagctgcgccctgaccggccctgtggtggacatcgtcaccggacatgctcggctctcggacatctgggccaagactccacctataacgaggaaagccgcccagctctataccttgtgggtcaccttccaggtgcttctgtacacgtctctccctgacttctgccataagtttctacccggctacgtaggaggcatccaggagggggccgtgactcctgcaggggttgtgaacaagtatcagatcaacggcctgcaagcctggctcctcacgcacctgctctggtttgcaaacgctcatctcctgtcctggttctcgcccaccatcatcttcgacaactggatcccactgctgtggtgcgccaacatccttggctatgccgtctccaccttcgccatggtcaagggctacttcttccccaccagcgccagagactgcaaattcacaggcaatttcttttacaactacatgatgggcatcgagtttaaccctcggatcgggaagtggtttgacttcaagctgttcttcaatgggcgccccgggatcgtcgcctggaccctcatcaacctgtccttcgcagcgaagcagcgggagctccacagccatgtgaccaatgccatggtcctggtcaacgtcctgcaggccatctacgtgattgacttcttctggaacgaaacctggtacctgaagaccattgacatctgccatgaccacttcgggtggtacctgggctggggcgactgtgtctggctgccttatctttacacgctgcagaagagaacacggaggcaaggcgtgtgtcagaggcagagctggggtttgaccccaggccgctgggcccccgagcccacactcctgtcctctccctgggcaaagcaccgcttgaccccttccccctcgccccccagggtctgtacttggtgtaccaccccgtgcagctgtccaccccgcacgccgtgggcgtcctgctgctgggcctggtgggctactacatcttccgggtggccaaccaccagaaggacctgttccgccgcacggatgggcgctgcctcatctggggcaggaagcccaaggtcatcgagtgctcctacacatccgccgacgggcagaggcaccacagcaagctgctggtgtcgggcttctggggcgtggcccgccacttcaactacgtcggcgacctgatgggcagcctggcctactgcctggcctgtggcggtggccacctgctgccctacttctacatcatctacatggccatcctgctgacccaccgctgcctccgggacgagcaccgctgcgccagcaagtacggccgggactgggagcgctacaccgccgcagtgccttaccgcctgctgcctggaatcttctaagggcacgccctagggagaagccctgtggggctgtcaagagcgtgttctgccaggtccatgggggctggcatcccagctccaactcgaggagcctcagtttcctcatctgtaaactggagagagcccagcacttggcaggtgtccagtacctaatcacgctctgttccttgcttttgccttcaagggaattccgagtgtccagcactgccgtattgccagcacagacggattttctctaatcagtgtccctggggcaggaggatgacccagtcacctttactagtcctttggagacaatttacctgtattaggagcccaggccacgctacactctgcccacactggtgagcaggaggtcttcccacgccctgtcattaggctgcatttactcttgctaaataaaagtgggagtggggcgtgcgcgttatccatgtattgcctttcagctctagatccccctcccctgcctgctctgcagtcgtgggtggggcccgtgcgccgtttctccttggtagcgtgcacggtgttgaactgggacactggggagaaaggggctttcatgtcgtttccttcctgctcctgctgcacagctgccaggagtgctctgcctggagtctgcagacctcagagaggtcccagcactggctgtggcctttcaggtgtaggcaggtgggctctgcttcccgattccctgtgagcgcccaccctctcgaaagaattttctgcttgccctgtgactgtgcagactctggctcgagcaacccggggaacttcaccctcaggggcctcccacaccttctccagcgaggaggtctcagtcccagcctcgggagggcacctccttttctgtgctttcttccctgaggcattcttcctcatccctagggtgttgtgtagaactctttttaaactctatgctccgagtagagttcatctttatattaaacttcccctgttcaaataa

SEQ ID NO: 76768 - DNA, 2585 bp, Homo sapiens
tatctcggcctactgtgtgactccgacccctggctagagggtaggcggcgtggagcagcgcgcgcaagcgaggccaggggaaggtgggcgcaggtgaggggccgaggtgtgcgcaggactttagccggttgagaaggatcaagcaggcatttggagcacaggtgtctagaaacttttaaggggccggttcaagaaggaaaagttcccttctgctgtgaaactatttggcaagaggctggagggcccaatggctgcaaaatcgcaacccaacattcccaaagccaagagtctagatggcgtcaccaatgacagaaccgcatctcaagggcagtggggccgtgcctgggaggtggactggttttcactggcgagcgtcatcttcctactgctgttcgcccccttcatcgtctactacttcatcatggcttgtgaccagtacagctgcgccctgaccggccctgtggtggacatcgtcaccggacatgctcggctctcggacatctgggccaagactccacctataacgaggaaagccgcccagctctataccttgtgggtcaccttccaggtgcttctgtacacgtctctccctgacttctgccataagtttctacccggctacgtaggaggcatccaggagggggccgtgactcctgcaggggttgtgaacaagtatcagatcaacggcctgcaagcctggctcctcacgcacctgctctggtttgcaaacgctcatctcctgtcctggttctcgcccaccatcatcttcgacaactggatcccactgctgtggtgcgccaacatccttggctatgccgtctccaccttcgccatggtcaagggctacttcttccccaccagcgccagagactgcaaattcacaggcaatttcttttacaactacatgatgggcatcgagtttaaccctcggatcgggaagtggtttgacttcaagctgttcttcaatgggcgccccgggatcgtcgcctggaccctcatcaacctgtccttcgcagcgaagcagcgggagctccacagccatgtgaccaatgccatggtcctggtcaacgtcctgcaggccatctacgtgattgacttcttctggaacgaaacctggtacctgaagaccattgacatctgccatgaccacttcgggtggtacctgggctggggcgactgtgtctggctgccttatctttacacgctgcagggtctgtacttggtgtaccaccccgtgcagctgtccaccccgcacgccgtgggcgtcctgctgctgggcctggtgggctactacatcttccgggtggccaaccaccagaaggacctgttccgccgcacggatgggcgctgcctcatctggggcaggaagcccaaggtcatcgagtgctcctacacatccgccgacgggcagaggcaccacagcaagctgctggtgtcgggcttctggggcgtggcccgccacttcaactacgtcggcgacctgatgggcagcctggcctactgcctggcctgtggcggtggccacctgctgccctacttctacatcatctacatggccatcctgctgacccaccgctgcctccgggacgagcaccgctgcgccagcaagtacggccgggactgggagcgctacaccgccgcagtgccttaccgcctgctgcctggaatcttctaagggcacgccctagggagaagccctgtggggctgtcaagagcgtgttctgccaggtccatgggggctggcatcccagctccaactcgaggagcctcagtttcctcatctgtaaactggagagagcccagcacttggcaggtgtccagtacctaatcacgctctgttccttgcttttgccttcaagggaattccgagtgtccagcactgccgtattgccagcacagacggattttctctaatcagtgtccctggggcaggaggatgacccagtcacctttactagtcctttggagacaatttacctgtattaggagcccaggccacgctacactctgcccacactggtgagcaggaggtcttcccacgccctgtcattaggctgcatttactcttgctaaatccccctcccctgcctgctctgcagtcgtgggtggggcccgtgcgccgtttctccttggtagcgtgcacggtgttgaactgggacactggggagaaaggggctttcatgtcgtttccttcctgctcctgctgcacagctgccaggagtgctctgcctggagtctgcagacctcagagaggtcccagcactggctgtggcctttcaggtgtaggcaggtgggctctgcttcccgattccctgtgagcgcccaccctctcgaaagaattttctgcttgccctgtgactgtgcagactctggctcgagcaacccggggaacttcaccctcaggggcctcccacaccttctccagcgaggaggtctcagtcccagcctcgggagggcacctccttttctgtgctttcttccctgaggcattcttcctcatccctagggtgttgtgtagaactctttttaaactctatgctccgagtagagttcatctttatattaaacttcccctgttcaaataa

SEQ ID NO: 76769 - DNA, 2388 bp, Homo sapiens
tatctcggcctactgtgtgactccgacccctggctagagggtaggcggcgtggagcagcgcgcgcaagcgaggccaggggaaggtgggcgcaggtgaggggccgaggtgtgcgcaggactttagccggttgagaaggatcaagcaggcatttggagcacaggtgtctagaaacttttaaggggccggttcaagaaggaaaagttcccttctgctgtgaaactatttggcaagaggctggagggcccaatggctgcaaaatcgcaacccaacattcccaaagccaagagtctagatggcgtcaccaatgacagaaccgcatctcaagggcagtggggccgtgcctgggaggtggactggttttcactggcgagcgtcatcttcctactgctgttcgcccccttcatcgtctactacttcatcatggcttgtgaccagtacagctgcgccctgaccggccctgtggtggacatcgtcaccggacatgctcggctctcggacatctgggccaagactccacctataacgaggaaagccgcccagctctataccttgtgggtcaccttccaggtgcttctgtacacgtctctccctgacttctgccataagtttctacccggctacgtaggaggcatccaggagggggccgtgactcctgcaggggttgtgaacaagtatcagatcaacggcctgcaagcctggctcctcacgcacctgctctggtttgcaaacgctcatctcctgtcctggttctcgcccaccatcatcttcgacaactggatcccactgctgtggtgcgccaacatccttggctatgccgtctccaccttcgccatggtcaagggctacttcttccccaccagcgccagagactgcaaattcacaggcaatttcttttacaactacatgatgggcatcgagtttaaccctcggatcgggaagtggtttgacttcaagctgttcttcaatgggcgccccgggatcgtcgcctggaccctcatcaacctgtccttcgcagcgaagcagcgggagctccacagccatgtgaccaatgccatggtcctggtcaacgtcctgcaggccatctacgtgattgacttcttctggaacgaaacctggtacctgaagaccattgacatctgccatgaccacttcgggtggtacctgggctggggcgactgtgtctggctgccttatctttacacgctgcagggtctgtacttggtgtaccaccccgtgcagctgtccaccccgcacgccgtgggcgtcctgctgctgggcctggtgggctactacatcttccgggtggccaaccaccagaaggacctgttccgccgcacggatgggcgctgcctcatctggggcaggaagcccaaggtcatcgagtgctcctacacatccgccgacgggcagaggcaccacagcaagctgctggtgtcgggcttctggggcgtggcccgccacttcaactacgtcggcgacctgatgggcagcctggcctactgcctggcctgtggcggtggccacctgctgccctacttctacatcatctacatggccatcctgctgacccaccgctgcctccgggacgagcaccgctgcgccagcaaggaattccgagtgtccagcactgccgtattgccagcacagacggattttctctaatcagtgtccctggggcaggaggatgacccagtcacctttactagtcctttggagacaatttacctgtattaggagcccaggccacgctacactctgcccacactggtgagcaggaggtcttcccacgccctgtcattaggctgcatttactcttgctaaataaaagtgggagtggggcgtgcgcgttatccatgtattgcctttcagctctagatccccctcccctgcctgctctgcagtcgtgggtggggcccgtgcgccgtttctccttggtagcgtgcacggtgttgaactgggacactggggagaaaggggctttcatgtcgtttccttcctgctcctgctgcacagctgccaggagtgctctgcctggagtctgcagacctcagagaggtcccagcactggctgtggcctttcaggtgtaggcaggtgggctctgcttcccgattccctgtgagcgcccaccctctcgaaagaattttctgcttgccctgtgactgtgcagactctggctcgagcaacccggggaacttcaccctcaggggcctcccacaccttctccagcgaggaggtctcagtcccagcctcgggagggcacctccttttctgtgctttcttccctgaggcattcttcctcatccctagggtgttgtgtagaactctttttaaactctatgctccgagtagagttcatctttatattaaacttcccctgttcaaataa

SEQ ID NO: 76770 - DNA, 2543 bp, Homo sapiens
tatctcggcctactgtgtgactccgacccctggctagagggtaggcggcgtggagcagcgcgcgcaagcgaggccaggggaaggtgggcgcaggtgaggggccgaggtgtgcgcaggactttagccggttgagaaggatcaagcaggcatttggagcacaggtgtctagaaacttttaaggggccggttcaagaaggaaaagttcccttctgctgtgaaactatttggcaagaggctggagggcccaatggctgcaaaatcgcaacccaacattcccaaagccaagagtctagatggcgtcaccaatgacagaaccgcatctcaagggcagtggggccgtgcctgctgcgccctgaccggccctgtggtggacatcgtcaccggacatgctcggctctcggacatctgggccaagactccacctataacgaggaaagccgcccagctctataccttgtgggtcaccttccaggtgcttctgtacacgtctctccctgacttctgccataagtttctacccggctacgtaggaggcatccaggagggggccgtgactcctgcaggggttgtgaacaagtatcagatcaacggcctgcaagcctggctcctcacgcacctgctctggtttgcaaacgctcatctcctgtcctggttctcgcccaccatcatcttcgacaactggatcccactgctgtggtgcgccaacatccttggctatgccgtctccaccttcgccatggtcaagggctacttcttccccaccagcgccagagactgcaaattcacaggcaatttcttttacaactacatgatgggcatcgagtttaaccctcggatcgggaagtggtttgacttcaagctgttcttcaatgggcgccccgggatcgtcgcctggaccctcatcaacctgtccttcgcagcgaagcagcgggagctccacagccatgtgaccaatgccatggtcctggtcaacgtcctgcaggccatctacgtgattgacttcttctggaacgaaacctggtacctgaagaccattgacatctgccatgaccacttcgggtggtacctgggctggggcgactgtgtctggctgccttatctttacacgctgcagggtctgtacttggtgtaccaccccgtgcagctgtccaccccgcacgccgtgggcgtcctgctgctgggcctggtgggctactacatcttccgggtggccaaccaccagaaggacctgttccgccgcacggatgggcgctgcctcatctggggcaggaagcccaaggtcatcgagtgctcctacacatccgccgacgggcagaggcaccacagcaagctgctggtgtcgggcttctggggcgtggcccgccacttcaactacgtcggcgacctgatgggcagcctggcctactgcctggcctgtggcggtggccacctgctgccctacttctacatcatctacatggccatcctgctgacccaccgctgcctccgggacgagcaccgctgcgccagcaagtacggccgggactgggagcgctacaccgccgcagtgccttaccgcctgctgcctggaatcttctaagggcacgccctagggagaagccctgtggggctgtcaagagcgtgttctgccaggtccatgggggctggcatcccagctccaactcgaggagcctcagtttcctcatctgtaaactggagagagcccagcacttggcaggtgtccagtacctaatcacgctctgttccttgcttttgccttcaagggaattccgagtgtccagcactgccgtattgccagcacagacggattttctctaatcagtgtccctggggcaggaggatgacccagtcacctttactagtcctttggagacaatttacctgtattaggagcccaggccacgctacactctgcccacactggtgagcaggaggtcttcccacgccctgtcattaggctgcatttactcttgctaaataaaagtgggagtggggcgtgcgcgttatccatgtattgcctttcagctctagatccccctcccctgcctgctctgcagtcgtgggtggggcccgtgcgccgtttctccttggtagcgtgcacggtgttgaactgggacactggggagaaaggggctttcatgtcgtttccttcctgctcctgctgcacagctgccaggagtgctctgcctggagtctgcagacctcagagaggtcccagcactggctgtggcctttcaggtgtaggcaggtgggctctgcttcccgattccctgtgagcgcccaccctctcgaaagaattttctgcttgccctgtgactgtgcagactctggctcgagcaacccggggaacttcaccctcaggggcctcccacaccttctccagcgaggaggtctcagtcccagcctcgggagggcacctccttttctgtgctttcttccctgaggcattcttcctcatccctagggtgttgtgtagaactctttttaaactctatgctccgagtagagttcatctttatattaaacttcccctgttcaaataa

SEQ ID NO: 76771 - DNA, 2693 bp, Homo sapiens
atcatccgggggcgggcgcccctgccctgcgggtgacttcgacccctggctagagggtaggcggcgtgtggagcagcgcgcgcaagcgaggccaggggaaggtgggcgcaggtgaggggccgaggtgtgcgcaggactttagccggttgagaaggatcaagcaggcatttggagcacaggtgtctagaaacttttaaggggccggttcaagaaggaaaagttcccttctgctgtgaaactatttggcaagaggctggagggcccaatggctgcaaaatcgcaacccaacattcccaaagccaagagtctagatggcgtcaccaatgacagaaccgcatctcaagggcagtggggccgtgcctgggaggtggactggttttcactggcgagcgtcatcttcctactgctgttcgcccccttcatcgtctactacttcatcatggcttgtgaccagtacagctgcgccctgaccggccctgtggtggacatcgtcaccggacatgctcggctctcggacatctgggccaagactccacctataacgaggaaagccgcccagctctataccttgtgggtcaccttccaggtcagcagcccctgccctggggttgggacacagcaggtgcttctgtacacgtctctccctgacttctgccataagtttctacccggctacgtaggaggcatccaggagggggccgtgactcctgcaggggttgtgaacaagtatcagatcaacggcctgcaagcctggctcctcacgcacctgctctggtttgcaaacgctcatctcctgtcctggttctcgcccaccatcatcttcgacaactggatcccactgctgtggtgcgccaacatccttggctatgccgtctccaccttcgccatggtcaagggctacttcttccccaccagcgccagagactgcaaattcacaggcaatttcttttacaactacatgatgggcatcgagtttaaccctcggatcgggaagtggtttgacttcaagctgttcttcaatgggcgccccgggatcgtcgcctggaccctcatcaacctgtccttcgcagcgaagcagcgggagctccacagccatgtgaccaatgccatggtcctggtcaacgtcctgcaggccatctacgtgattgacttcttctggaacgaaacctggtacctgaagaccattgacatctgccatgaccacttcgggtggtacctgggctggggcgactgtgtctggctgccttatctttacacgctgcagggtctgtacttggtgtaccaccccgtgcagctgtccaccccgcacgccgtgggcgtcctgctgctgggcctggtgggctactacatcttccgggtggccaaccaccagaaggacctgttccgccgcacggatgggcgctgcctcatctggggcaggaagcccaaggtcatcgagtgctcctacacatccgccgacgggcagaggcaccacagcaagctgctggtgtcgggcttctggggcgtggcccgccacttcaactacgtcggcgacctgatgggcagcctggcctactgcctggcctgtggcggtggccacctgctgccctacttctacatcatctacatggccatcctgctgacccaccgctgcctccgggacgagcaccgctgcgccagcaagtacggccgggactgggagcgctacaccgccgcagtgccttaccgcctgctgcctggaatcttctaagggcacgccctagggagaagccctgtggggctgtcaagagcgtgttctgccaggtccatgggggctggcatcccagctccaactcgaggagcctcagtttcctcatctgtaaactggagagagcccagcacttggcaggtgtccagtacctaatcacgctctgttccttgcttttgccttcaagggaattccgagtgtccagcactgccgtattgccagcacagacggattttctctaatcagtgtccctggggcaggaggatgacccagtcacctttactagtcctttggagacaatttacctgtattaggagcccaggccacgctacactctgcccacactggtgagcaggaggtcttcccacgccctgtcattaggctgcatttactcttgctaaataaaagtgggagtggggcgtgcgcgttatccatgtattgcctttcagctctagatccccctcccctgcctgctctgcagtcgtgggtggggcccgtgcgccgtttctccttggtagcgtgcacggtgttgaactgggacactggggagaaaggggctttcatgtcgtttccttcctgctcctgctgcacagctgccaggagtgctctgcctggagtctgcagacctcagagaggtcccagcactggctgtggcctttcaggtgtaggcaggtgggctctgcttcccgattccctgtgagcgcccaccctctcgaaagaattttctgcttgccctgtgactgtgcagactctggctcgagcaacccggggaacttcaccctcaggggcctcccacaccttctccagcgaggaggtctcagtcccagcctcgggagggcacctccttttctgtgctttcttccctgaggcattcttcctcatccctagggtgttgtgtagaactctttttaaactctatgctccgagtagagttcatctttatattaaacttcccctgttcaaataa

SEQ ID NO: 76772 - DNA, 2310 bp, Homo sapiens
  misc_feature (2234)..(2234): n is a, c, g, or t
tatctcggcctactgtgtgactccgacccctggctagagggtaggcggcgtggagcagcgcgcgcaagcgaggccaggggaaggtgggcgcaggtgaggggccgaggtgtgcgcaggactttagccggttgagaaggatcaagcaggcatttggagcacaggtgtctagaaacttttaaggggccggttcaagaaggaaaagttcccttctgctgtgaaactatttggcaagaggctggagggcccaatggctgcaaaatcgcaacccaacattcccaaagccaagagtctagatggcgtcaccaatgacagaaccgcatctcaagggcagtggggccgtgcctgggaggtggactggttttcactggcgagcgtcatcttcctactgctgttcgcccccttcatcgtctactacttcatcatggcttgtgaccagtacagctgcgccctgaccggccctgtggtggacatcgtcaccggacatgctcggctctcggacatctgggccaagactccacctataacgaggaaagccgcccagctctataccttgtgggtcaccttccaggtgcttctgtacacgtctctccctgacttctgccataagtttctacccggctacgtaggaggcatccaggagggggccgtgactcctgcaggggttgtgaacaagtatcagatcaacggcctgcaagcctggctcctcacgcacctgctctggtttgcaaacgctcatctcctgtcctggttctcgcccaccatcatcttcgacaactggatcccactgctgtggtgcgccaacatccttggctatgccgtctccaccttcgccatggtcaagggctacttcttccccaccagcgccagagactgcaaattcacaggcaatttcttttacaactacatgatgggcatcgagtttaaccctcggatcgggaagtggtttgacttcaagctgttcttcaatgggcgccccgggatcgtcgcctggaccctcatcaacctgtccttcgcagcgaagcagcgggagctccacagccatgtgaccaatgccatggtcctggtcaacgtcctgcaggccatctacgtgattgacttcttctggaacgaaacctggtacctgaagaccattgacatctgccatgaccacttcgggtggtacctgggctggggcgactgtgtctggctgccttatctttacacgctgcagggtctgtacttggtgtaccaccccgtgcagctgtccaccccgcacgccgtgggcgtcctgctgctgggcctggtgggctactacatcttccgggtggccaaccaccagaaggacctgttccgccgcacggatgggcgctgcctcatctggggcaggaagcccaaggtcatcgagtgctcctacacatccgccgacgggcagaggcaccacagcaagctgctggtgtcgggcttctggggcgtggcccgccacttcaactacgtcggcgacctgatgggcagcctggcctactgcctggcctgtggcggtggccacctgctgccctacttctacatcatctacatggccatcctgctgacccaccgctgcctccgggacgagcaccgctgcgccagcaagtacggccgggactgggagcgctacaccgccgcagtgccttaccgcctgctgcctggaatcttctaagggcacgccctagggagaagccctgtggggctgtcaagagcgtgttctgccaggtccatgggggctggcatcccagctccaactcgaggagcctcagtttcctcatctgtaaactggagagagcccagcacttggcaggtgtccagtacctaatcacgctctgttccttgcttttgccttcaagggaattccgagtgtccagcactgccgtattgccagcacagacggattttctctaatcagtgtccctggggcaggaggatgacccagtcacctttactagtcctttggagacaatttacctgtattaggagcccaggccacgctacactctgcccacactggtgagcaggaggtcttcccacgccctgtcattaggctgcatttactcttgctaaataaaagtgggagtggggcgtgcgcgttatccatgtattgcctttcagctctagaatgccccttccttgccttgtttgaaaacgggggggggggcccgccctcctttcttcctggtaggaggaacggcgtttatttggaaaccgcggggaaaagggggttntagtcgtttctttcttttcctttttacaaaaggaagggaagtcttccctggggtggcgacccccaaaagggccgca

SEQ ID NO: 76773 - DNA, 2534 bp, Homo sapiens
tatctcggcctactgtgtgactccgacccctggctagagggtaggcggcgtggagcagcgcgcgcaagcgaggccaggggaaggtgggcgcaggtgaggggccgaggtgtgcgcaggactttagccggttgagaaggatcaagcaggcatttggagcacaggtgtctagaaacttttaaggggccggttcaagaaggaaaagttcccttctgctgtgaaactatttggcaagaggctggagggcccaatggctgcaaaatcgcaacccaacattcccaaagccaagagtctagatggcgtcaccaatgacagaaccgcatctcaagggcagtggggccgtgcctgggaggtggactggttttcactggcgagcgtcatcttcctactgctgttcgcccccttcatcgtctactacttcatcatggcttgtgaccagtacagctgcgccctgaccggccctgtggtggacatcgtcaccggacatgctcggctctcggacatctgggccaagactccacctataacgaggaaagccgcccagctctataccttgtgggtcaccttccaggtgcttctgtacacgtctctccctgacttctgccataagtttctacccggctacgtaggaggcatccaggagggggccgtgactcctgcaggggttgtgaacaagtatcagatcaacggcctgcaagcctggctcctcacgcacctgctctggtttgcaaacgctcatctctacttcttccccaccagcgccagagactgcaaattcacaggcaatttcttttacaactacatgatgggcatcgagtttaaccctcggatcgggaagtggtttgacttcaagctgttcttcaatgggcgccccgggatcgtcgcctggaccctcatcaacctgtccttcgcagcgaagcagcgggagctccacagccatgtgaccaatgccatggtcctggtcaacgtcctgcaggccatctacgtgattgacttcttctggaacgaaacctggtacctgaagaccattgacatctgccatgaccacttcgggtggtacctgggctggggcgactgtgtctggctgccttatctttacacgctgcagggtctgtacttggtgtaccaccccgtgcagctgtccaccccgcacgccgtgggcgtcctgctgctgggcctggtgggctactacatcttccgggtggccaaccaccagaaggacctgttccgccgcacggatgggcgctgcctcatctggggcaggaagcccaaggtcatcgagtgctcctacacatccgccgacgggcagaggcaccacagcaagctgctggtgtcgggcttctggggcgtggcccgccacttcaactacgtcggcgacctgatgggcagcctggcctactgcctggcctgtggcggtggccacctgctgccctacttctacatcatctacatggccatcctgctgacccaccgctgcctccgggacgagcaccgctgcgccagcaagtacggccgggactgggagcgctacaccgccgcagtgccttaccgcctgctgcctggaatcttctaagggcacgccctagggagaagccctgtggggctgtcaagagcgtgttctgccaggtccatgggggctggcatcccagctccaactcgaggagcctcagtttcctcatctgtaaactggagagagcccagcacttggcaggtgtccagtacctaatcacgctctgttccttgcttttgccttcaagggaattccgagtgtccagcactgccgtattgccagcacagacggattttctctaatcagtgtccctggggcaggaggatgacccagtcacctttactagtcctttggagacaatttacctgtattaggagcccaggccacgctacactctgcccacactggtgagcaggaggtcttcccacgccctgtcattaggctgcatttactcttgctaaataaaagtgggagtggggcgtgcgcgttatccatgtattgcctttcagctctagatccccctcccctgcctgctctgcagtcgtgggtggggcccgtgcgccgtttctccttggtagcgtgcacggtgttgaactgggacactggggagaaaggggctttcatgtcgtttccttcctgctcctgctgcacagctgccaggagtgctctgcctggagtctgcagacctcagagaggtcccagcactggctgtggcctttcaggtgtaggcaggtgggctctgcttcccgattccctgtgagcgcccaccctctcgaaagaattttctgcttgccctgtgactgtgcagactctggctcgagcaacccggggaacttcaccctcaggggcctcccacaccttctccagcgaggaggtctcagtcccagcctcgggagggcacctccttttctgtgctttcttccctgaggcattcttcctcatccctagggtgttgtgtagaactctttttaaactctatgctccgagtagagttcatctttatattaaacttcccctgttcaaataa

SEQ ID NO: 76774 - DNA, 1935 bp, Homo sapiens
ctaggtagaaggccgggtgttgacatcggccgaggctgtcctggttctcgcccaccatcatcttcgacaactggatcccactgctgtggtgcgccaacatccttggctatgccgtctccaccttcgccatggtcaagggctacttcttccccaccagcgccagagactgcaaattcacaggcaatttcttttacaactacatgatgggcatcgagtttaaccctcggatcgggaagtggtttgacttcaagctgttcttcaatgggcgccccgggatcgtcgcctggaccctcatcaacctgtccttcgcagcgaagcagcgggagctccacagccatgtgaccaatgccatggtcctggtcaacgtcctgcaggccatctacgtgattgacttcttctggaacgaaacctggtacctgaagaccattgacatctgccatgaccacttcgggtggtacctgggctggggcgactgtgtctggctgccttatctttacacgctgcagggtctgtacttggtgtaccaccccgtgcagctgtccaccccgcacgccgtgggcgtcctgctgctgggcctggtgggctactacatcttccgggtggccaaccaccagaaggacctgttccgccgcacggatgggcgctgcctcatctggggcaggaagcccaaggtcatcgagtgctcctacacatccgccgacgggcagaggcaccacagcaagctgctggtgtcgggcttctggggcgtggcccgccacttcaactacgtcggcgacctgatgggcagcctggcctactgcctggcctgtggcggtggccacctgctgccctacttctacatcatctacatggccatcctgctgacccaccgctgcctccgggacgagcaccgctgcgccagcaagtacggccgggactgggagcgctacaccgccgcagtgccttaccgcctgctgcctggaatcttctaagggcacgccctagggagaagccctgtggggctgtcaagagcgtgttctgccaggtccatgggggctggcatcccagctccaactcgaggagcctcagtttcctcatctgtaaactggagagagcccagcacttggcaggtgtccagtacctaatcacgctctgttccttgcttttgccttcaagggaattccgagtgtccagcactgccgtattgccagcacagacggattttctctaatcagtgtccctggggcaggaggatgacccagtcacctttactagtcctttggagacaatttacctgtattaggagcccaggccacgctacactctgcccacactggtgagcaggaggtcttcccacgccctgtcattaggctgcatttactcttgctaaataaaagtgggagtggggcgtgcgcgttatccatgtattgcctttcagctctagatccccctcccctgcctgctctgcagtcgtgggtggggcccgtgcgccgtttctccttggtagcgtgcacggtgttgaactgggacactggggagaaaggggctttcatgtcgtttccttcctgctcctgctgcacagctgccaggagtgctctgcctggagtctgcagacctcagagaggtcccagcactggctgtggcctttcaggtgtaggcaggtgggctctgcttcccgattccctgtgagcgcccaccctctcgaaagaattttctgcttgccctgtgactgtgcagactctggctcgagcaacccggggaacttcaccctcaggggcctcccacaccttctccagcgaggaggtctcagtcccagcctcgggagggcacctccttttctgtgctttcttccctgaggcattcttcctcatccctagggtgttgtgtagaactctttttaaactctatgctccgagtagagttcatctttatattaaacttcccctgttcaaataa

SEQ ID NO: 76775 - DNA, 1816 bp, Homo sapiens
aggatccttaattaaattaatctcctcccccccccccccgccagagactgcaaattcacaggcaatttcttttacaactacatgatgggcatcgagtttaaccctcggatcgggaagtggtttgacttcaagctgttcttcaatgggcgccccgggatcgtcgcctggaccctcatcaacctgtccttcgcagcgaagcagcgggagctccacagccatgtgaccaatgccatggtcctggtcaacgtcctgcaggccatctacgtgattgacttcttctggaacgaaacctggtacctgaagaccattgacatctgccatgaccacttcgggtggtacctgggctggggcgactgtgtctggctgccttatctttacacgctgcagggtctgtacttggtgtaccaccccgtgcagctgtccaccccgcacgccgtgggcgtcctgctgctgggcctggtgggctactacatcttccgggtggccaaccaccagaaggacctgttccgccgcacggatgggcgctgcctcatctggggcaggaagcccaaggtcatcgagtgctcctacacatccgccgacgggcagaggcaccacagcaagctgctggtgtcgggcttctggggcgtggcccgccacttcaactacgtcggcgacctgatgggcagcctggcctactgcctggcctgtggcggtggccacctgctgccctacttctacatcatctacatggccatcctgctgacccaccgctgcctccgggacgagcaccgctgcgccagcaagtacggccgggactgggagcgctacaccgccgcagtgccttaccgcctgctgcctggaatcttctaagggcacgccctagggagaagccctgtggggctgtcaagagcgtgttctgccaggtccatgggggctggcatcccagctccaactcgaggagcctcagtttcctcatctgtaaactggagagagcccagcacttggcaggtgtccagtacctaatcacgctctgttccttgcttttgccttcaagggaattccgagtgtccagcactgccgtattgccagcacagacggattttctctaatcagtgtccctggggcaggaggatgacccagtcacctttactagtcctttggagacaatttacctgtattaggagcccaggccacgctacactctgcccacactggtgagcaggaggtcttcccacgccctgtcattaggctgcatttactcttgctaaataaaagtgggagtggggcgtgcgcgttatccatgtattgcctttcagctctagatccccctcccctgcctgctctgcagtcgtgggtggggcccgtgcgccgtttctccttggtagcgtgcacggtgttgaactgggacactggggagaaaggggctttcatgtcgtttccttcctgctcctgctgcacagctgccaggagtgctctgcctggagtctgcagacctcagagaggtcccagcactggctgtggcctttcaggtgtaggcaggtgggctctgcttcccgattccctgtgagcgcccaccctctcgaaagaattttctgcttgccctgtgactgtgcagactctggctcgagcaacccggggaacttcaccctcaggggcctcccacaccttctccagcgaggaggtctcagtcccagcctcgggagggcacctccttttctgtgctttcttccctgaggcattcttcctcatccctagggtgttgtgtagaactctttttaaactctatgctccgagtagagttcatctttatattaaacttcccctgttcaaataa

SEQ ID NO: 76776 - DNA, 2368 bp, Homo sapiens
tatctcggcctactgtgtgactccgacccctggctagagggtaggcggcgtggagcagcgcgcgcaagcgaggccaggggaaggtgggcgcaggtgaggggccgaggtgtgcgcaggactttagccggttgagaaggatcaagcaggcatttggagcacaggtgtctagaaacttttaaggggccggttcaagaaggaaaagttcccttctgctgtgaaactatttggcaagaggctggagggcccaatggctgcaaaatcgcaacccaacattcccaaagccaagagtctagatggcgtcaccaatgacagaaccgcatctcaagggcagtggggccgtgcctgggaggtggactggttttcactggcgagcgtcatcttcctactgctgttcgcccccttcatcgtctactacttcatcatggcttgtgaccagtacagctgcgccctgaccggccctgtggtggacatcgtcaccggacatgctcggctctcggacatctgggccaagactccacctataacgaggaaagccgcccagctctataccttgtgggtcaccttccaggtgcttctgtacacgtctctccctgacttctgccataagtttctacccggctacgtaggaggcatccaggagggggccgtgactcctgcaggggttgtgaacaagtatcagatcaacggcctgcaagcctggctcctcacgcacctgctctggtttgcaaacgctcatctcctgtcctggttctcgcccaccatcatcttcgacaactggatcccactgctgtggtgcgccaacatccttggctatgccgtctccaccttcgccatggtcaagggctacttcttccccaccagcgccagagactgcaaattcacaggcaatttcttttacaactacatgatgggcatcgagtttaaccctcggatcgggaagtggtttgacttcaagctgttcttcaatgggcgccccgggatcgtcgcctggaccctcatcaacctgtccttcgcagcgaagcagcgggagctccacagccatgtgaccaatgccatggtcctggtcaacgtcctgcaggccatctacgtgattgacttcttctggaacgaaacctggtacctgaagaccattgacatctgccatgaccacttcgggtggtacctgggctggggcgactgtgtctggctgccttatctttacacgctgcagggtctgtacttggtgtaccaccccgtgcagctgtccaccccgcacgccgtgggcgtcctgctgctgggcctggtgggctactacatcttccgggtggccaaccaccagaaggacctgttccgccgcacggatgggcgctgcctcatctggggcaggaagcccaaggtcatcgagtgctcctacacatccgccgacgggcagaggcaccacagcaagctgctggtgtcgggcttctggggcgtggcccgccacttcaactacgtcggcgacctgatgggcagcctggcctactgcctggcctgtggcggtggccacctgctgccctacttctacatcatctacatggccatcctgctgacccaccgctgcctccgggacgagcaccgctgcgccagcaagtacggccgggactgggagcgctacaccgccgcagtgccttaccgcctgctgcctggaatcttctaagggcacgccctagggagaagccctgtggggctgtcaagagcgtgttctgccaggtccatgggggctggcatcccagctccaactcgaggagcctcagtttcctcatctgtaaactggagagagcccagcacttggcaggtgtccagtacctaatcacgctctgttccttgcttttgccttcaagggaattccgagtgtccagcactgccgtattgccagcacagacggattttctctaatcagtgtccctggggcaggaggatgacccagtcacctttactagtcctttggagacaatttacctgctcctgctgcacagctgccaggagtgctctgcctggagtctgcagacctcagagaggtcccagcactggctgtggcctttcaggtgtaggcaggtgggctctgcttcccgattccctgtgagcgcccaccctctcgaaagaattttctgcttgccctgtgactgtgcagactctggctcgagcaacccggggaacttcaccctcaggggcctcccacaccttctccagcgaggaggtctcagtcccagcctcgggagggcacctccttttctgtgctttcttccctgaggcattcttcctcatccctagggtgttgtgtagaactctttttaaactctatgctccgagtagagttcatctttatattaaacttcccctgttcaaataa

SEQ ID NO: 76777 - DNA, 1208 bp, Homo sapiens
tatctcggcctactgtgtgactccgacccctggctagagggtaggcggcgtggagcagcgcgcgcaagcgaggccaggggaaggtgggcgcaggtgaggggccgaggtgtgcgcaggactttagccggttgagaaggatcaagcaggcatttggagcacaggtgtctagaaacttttaaggggccggttcaagaaggaaaagttcccttctgctgtgaaactatttggcaagaggctggagggcccaatggctgcaaaatcgcaacccaacattcccaaagccaagagtctagatggcgtcaccaatgacagaaccgcatctcaagggcagtggggccgtgcctgggaggtggactggttttcactggcgagcgtcatcttcctactgctgttcgcccccttcatcgtctactacttcatcatggcttgtgaccagtacagctgcgccctgaccggccctgtggtggacatcgtcaccggacatgctcggctctcggacatctgggccaagactccacctataacgaggaaagccgcccagctctataccttgtgggtcaccttccaggtgcttctgtacacgtctctccctgacttctgccataagtttctacccggctacgtaggaggcatccaggagggggccgtgactcctgcaggggttgtgaacaagtatcagatcaacggcctgcaagcctggctcctcacgcacctgctctggtttgcaaacgctcatctcctgtcctggttctcgcccaccatcatcttcgacaactggatcccactgctgtggtgcgccaacatccttggctatgccgtctccaccttcgccatggtcaagggctacttcttccccaccagcgccagagactgcaaattcacaggcaatttcttttacaactacatgatgggcatcgagtttaaccctcggatcgggaagtggtttgacttcaagctgttcttcaatgggcgccccgggatcgtcgcctggaccctcatcaacctgtccttcgcagcgaagcagcgggagctccacagccatgtgaccaatgccatggtcctggtcaacgtcctgcaggtgcctgtcatggctggagagggtgaaacgccgatgccggcaggctctgggggaacccgcaagccagagcgtattcccatgaccttaatctactgcttgtaaaagagagtcagctgccctccccaggtgt

SEQ ID NO: 76778 - DNA, 415 bp, Homo sapiens
tatctcggcctactgtgtgactccgacccctggctagagggtaggcggcgtggagcagcgcgcgcaagcgaggccaggggaaggtgggcgcaggtgaggggccgaggtgtgcgcaggactttagccggttgagaaggatcaagcaggcatttggagcacaggtgtctagaaacttttaaggggccggttcaagaaggaaaagttcccttctgctgtgaaactatttggcaagaggctggagggcccaatggctgcaaaatcgcaacccaacattcccaaagccaagagtctagatggcgtcaccgtatgcagatgattatgtcttcggcactggtaccgtttctgctaggtggatgagagtggcctcgcgcggttggatcgacgacgtgcgtcaggcgttatctcagtcgctatc

SEQ ID NO: 76779 - DNA, 388 bp, Homo sapiens
cctgccccacctgttgttcgcctccctctttgtcagtgctgagccaggcacagcagctttgcgatgggactggcttgtccgccgtcctccctgacatgcggctgttgaagccctgagcactggaccttctgcctcttgcttgactcctactgtgggccttgagcgtctgccctctcctgaaatgtcagctgcctgcggtcttattcatttttgtgttccttgcaggactttagccggttgagaaggatcaagcaggcatttggagcacaggtgtctagaaacttttaaggggccggttcaagaaggaaaagttcccttctgctgtgaaactatttggcaagaggctggaggtaagtgtatctcagtgccctggatcgtgggcgcaggc

SEQ ID NO: 76780 - DNA, 805 bp, Homo sapiens
tcaccctcaggggcctcccacaccttctccagcgaggaggtctcagtcccagcctcgggagggcacctccttttctgtgctttcttccctgaggcattcttcctcatccctagggtgttgtgtagaactctttttaaactctatgctccgagtagagttcatctttatattaaacttcccctgttcaaataaagtggctgtgtggtttctgactggtgaatgggcctgactcgtgaatgggcctgactgcaggtctgactggtatacgtgggctctgtttctggtatgagaagggatgtctgagagagatgcttgggtctcggcgtcaaagcattgggtgcccgtgggtgcgtggcgccaccctgcccctctccctcccatgtcagccctttgctggggctgtttttgggttgaatgtggagagtattccattcccccccaaggagatgaaaccaggcttggccacctgcccccggcaagtgaatggagaagccagaaagagtgccaggtttgtcttgcacctggagaaacaagagtttcacacaggcagcccagtgcccatgccagggcagggggccaagctcagagtggcttcattgcttcacatgagaactggtcccacagccaggccgcctcccagacagcctggagggtatcggaactgtgacccgcccaggctgactgctgagccctagtgttcgtgcactggtgccccaccactacctgtttgaggatatgggcctgaggggtcccgtgcatctgtgctggacacacaccacaagagtgattcaaatgccggggagac

SEQ ID NO: 76781 - DNA, 1273 bp, Homo sapiens
acacaagctccctgctctcaggagaatctggcacagcaccatcaccaactcagagggagggaagcaaccttgagtcagctcccaggcagtaatgagtgttcaagggagatataactctaaggaaaaggattgaggtcaaggaattagaagaaacagatggaagaatcatttgaaccatatccaggtcttttgaaaatgatgagacagaagagaaagcgaaaattgcttcagacagttttgctgagaaatttgtctcagataaattttggagtaaggtcagagacctaagataagaaaacccctaggcagaggtgggaaaaaatagaaaaaagaaaacgaaaagagcaaatacattcttccttcctatcttccacttgccagagtagctttactaagatgctgcctgatcatttctctccagacacttttgccaatgatattaatactataaaggagcatttctggacttgattcattaatgattagaaagctcgtaacagattagatgaccaggctacagtctcacctgccaggcagtgcagctgcagatcttggctgaccatcatgtcagcacctactatgtgccagtcactgtgccaggagttggaaatatgaggaagaccgtaattctcataatgagaatacaaggaagaccatctctcaagaaaggaacatcataaaacatgtttactgtcaagtccttgtcattatcaaaaatatctccagattgatgtcattctgagaaaagtgatttcatactgaaaaaaattctacaaaaatagtaaaactcttcttctcaattttcagaacttggatggggttgggggcaggtgctttcatctattttcatcttgtcctggtagaaattatttgcttgattaacattttggtggagaagttcagtctctaaggctacagatgagaagatcagttactggatgggatcctaacttcaatgtcaaatccaagagcctgaaaataaaggatggaaagaaagggaaacaaagaaaagttatcagacaatgtgaagacattttatggagaggaagaaagagtgagtgagcacaggaaaaatcacaaagcagtatatgaagaaaagaaagagataacagttattagtaagtaaagagataattaagagataatcctttcagtggcatgaacaccatagtttgtgacatcactggtcattaatgatttgtgagaagcagtgtctcaactatgtttctgttacattaattatacccaaaataaaatatttgcacacctattg

SEQ ID NO: 76782 - DNA, 440 bp, Homo sapiens
tgctgagaaatttgtctcagataaattttggagtaaggtcagagacctaagataagaaaacccctaggcagaggtgggaaaaaatagaaaaaagaaaacgaaaagagcaaatacattcttccttcctatcttccacttgccagagtagctttactaagatgctgcctgatcatttctctccagacacttttgccaatgatattaatactataaaggagcatttctggacttgattcattaatgattagaaagctcgtaacagattagatgaccaggctacagtctcacctgccaggcagtgcagctgcagatcttggctgaccatcatgtcaggtgagaaagagactaatacaaaataattgcttttataaattgcaagttaatcttctgctgattgatattcctgagtagaattactaacatagatttggggaagaaaa

SEQ ID NO: 76783 - DNA, 793 bp, Homo sapiens
aaattagtgtcaaaatacaaatatgattatttcaaagacttgtaaaaactactcactccaattttttttggtaatgcattcatatcttaaagtggtattagtcagtggcttgccaaacaaatattttaataagttattataatccactgggcttttctggatagatcttccagtcctgaagatttttcagttttgtagaattcctactgcagtttttatttcttggaaatggactttcaaaggctttaatcatattttctcttttcctctcccgttaaatatctaaaagcagctggaatgcaaaacatttgtatctgtcagatagacatgagtgcattttacctgacaaccacggattatcttagagttttaaacactgttacagagaaaagaaaatttatttgcataggtcacataatatttagatcctctccgtagcacctccatagatagtagatcctgcagtactttaagcattagagttacacatcaaaattaagctagtttcaaatctcaaaggaattcataagctgagatttaagtcttgggtacccctccccttactttccacataggtacttagttctcacacctgcacttaccagcatccagaatatatttcttaaggcctactcttgttaggtactctgtgaaaaagggttttaggccaggcacggtggctcacacctgtaatcccagcacttgggaagcccaggcgggcggatcacttgaggtcaggaatttgagactagcctcactaacatggtgaaacccccatctacactaaaaatac

SEQ ID NO: 76784 - DNA, 786 bp, Homo sapiens
aggcggatgcggatgcggatgcggatgcgaaggtggcggccgaggtggcggccgaggtggcggctgcggcggccgccgcggatgcagatgcggatgagaccctcggtgactgtgaggggaacccagattttcagatggcctccctgtacgtgggcgacctgcaccctgaggtgaccgaggcaatgctgtacgagaagttcagtccagctgggcccatcctctccatccgcatctgcagggacaagatcacccgccgctcattgggctacgcgtatgtcaactaccagcaaccggtggacgccaagcgggccctggagaccctgaactttgatgtcataaagggcaggccagtgcgcatcatgtggtcccagagggacccgtcgctccgcaagagcggggtgggcaacgtcttcatcaagaacctgggcaagaccatcgacaacaaggcgctgtacaacatcttctcggcgttcggcaacatcctctcctgcaaagtggcctgtgacgaaaaggggcccaagggctacgggttcgtgcacttccaaaagcaggaatctgcggagcgggccatcgatgtgatgaatggcatgttcctgaactaccgcaaaattttcgtcgggagattcaagtcgcataaagaacgagaggccgaaaggggagcctgggccaggcagtccactagtgctgacgtcaaggatttcgaggaagacaccgacgaggaggccaccttgcgatgaagacatcccaggagctagccagccagcagagccaaaccttggctcacac

SEQ ID NO: 76785 - DNA, 775 bp, Homo sapiens
cagcttcccaagttgctgggattacaggcacataccacaatggctggctaattttttattttttaatttgttgtagagacaacaaataaacatggtcttgccatgttgcccaggctggtctcgaactcctgagctcaaacaatccgcctgcctcggcctcccaaagtgctgggattatagatgtcagccaccgcactggctcaagattgcatgctccttgtaagaatctaaatgcctgaggtggaacagtttcaacacacccctgcttccatgtctgtggaaaaattgtcttccatgaaaccaattcctagtaccaaaaaggttgggaaccactgatgtttaggcacctgccgtgaggcagctaccacaatgggagatggtgaaggtgtagaaatgaatgatacttgttccctgcttgcaggaacctgccagtttactagggctggcagaagtgtcagtaataattaacagcaaagtgtgatgagtcttgtgatggagagatagaatagagctttgggaacccagaggaggaccccacctagacttcgggggtgatggccagagcaggcttcccagaggaagaaagctgaaagtaccataggccactagagagaagataaataccagccagagaacagcatgtgtaaaatcctataagctagtgaagattaatacaaagaagtgtggcatggctggagtgtagtaggccatagatgtggggtccagtaaaaatatatggtgatcctagaattcttccttagtcagaaaattaaaa

SEQ ID NO: 76786 - DNA, 616 bp, Homo sapiens
agcggtaaatctaagaaatctaaaaaatatgctgagtgaaagaaaccacgtgttaaagagtgtatactgtgactctatgtagatgaaattctaggacaggtgaaaataatcaataatcatggaaaaacagtcattgtctgtgtatagaggtgggtggggaaaatgtagagtgaagggccataagggaactttttgcagtgaaaaaaaaatgttccacatgttgactgtggtggtggtcacacagatgtacatatttgtcaaaatttactaaccagtacacttaaaatgggtatattatatagaaattatagcttaatggccaggtgcggtggctcacgcctgtaatcccagcactttgggaggccaaggcgggcagatcacaaggtcaggagattgagagcatcctggctaacacagtgaaacctcgtttctactaaaaatacaaaaaattagctgggcgtggtggcatgctactgtaatcccagctactcaggaggctgaggcaggagaatcgcttgaacccaggagtgggaggttgcagtgagccaagatcatgccactactctccagcctgggcgacagagtgagattccatctcaaaaaaaaaaaaaaaaaa

SEQ ID NO: 76787 - DNA, 391 bp, Homo sapiens
ccaggaggcctggatccttccccagcaaccgtgtggaggtttttacttcctctgatccaggggacacatgtaatctttttctacaactccctgaggctggtttttcccaccctacaaatcagtaagcataaatttttgcagagaagcctggagccatgggtcctaagcattcaggcagccaaaaaaattaaattttcaaccggagccgggtaaggacacatggtctcaaacgtttcctgcccaattggagccgctttcctcctcttgcacacttgctccccctactgcctgacgctggaagtgcaggcctggctccgaggcaagcttgaacgccccagctcggtcctgggatggccagggtgaaagccagcagagcagagaggttgccaaa

SEQ ID NO: 76788 - DNA, 163 bp, Homo sapiens
ttttacaaccaacaactttccttctggcattgatttacctagcagataactttacagatttctcctcctccatctgctacagcacgttctttggccacctcttccttacatttcatacaacttgcattcagcaatgttttttttttttttttttgagacaggg

SEQ ID NO: 76789 - DNA, 1054 bp, Homo sapiens
aggcgggaggattgcttgagtccaggagtttaaggttgcagtgagctatgattgcaccattgcacttcaggctgggccacagagcaagaccctgtctcagaaaacagaaagaaagaaagtcaaagaaataaagtcaaagacaagaaggtgatacagagaagacagaaaaggaggaggagagagactgacaggtacacaaatcagagaagtcccagagataacaaaaacacaaccacagagatagggagacgtaagccggagaaagacccagagattcgcatagaaagcaacgtggagactcagaagcaagcacagcatcaaggaatgatcaataaaaagaaaaaaaaatatttcctgaggacttccaagtacaaggccctgcaatctcaggccacttctgtcccatctctgccttcagagggggggacaggtagtccagacaattagaatacagagggggctgtgttctgacggggccacgcaggcattgaggaaacgcagcaggcccctcccctagctggggcggggatgtctgtgtgccatcatctcattccatctggtcattcctttgcccattcatccatccattcattcaagtcaccccatgcacattttccaagactgcctgtgacctggccctgtgccgggcagagctgaggatgccaaggtgaattcctcctgtgcctggccccggccccagtctgctggaagaaccagacacagacaatcacactgcggggaaacacgtgctccatcggaaaagtccagagcagggggtgggcagagaggcccagcgtgcaccagagcctcgctcaggtcagcgccaggcctgcctggagcagccaactgtgggagaagaaggagttggtgaaaggtgggtcccacctgggccgtccacagaagggctgaggggtagggggtgaggggttgaagatcaggccctgccgccatgccacacggctgtcctctgtccctgctcctgggggagctgaaactgcatggaaggtcccccaggggtgccccgtctaataaactcgatgaagaggaaaaaagc

SEQ ID NO: 76790 - DNA, 278 bp, Homo sapiens
ctttaaatgtttggtagaatttaccagtgatgccatctcggcctgggattttctttgcaggtaggtttttttttttattactaatttaatctattcgctgtgttacaaatctattcagatttactgtttcttcttgggccagttttattcatctaacagtattttctaatttcccttttgatacattttctattaaagatactttcattttcaatcaaaataaaattaacaatcatattgtgttgtttaaaacattatactggaatatatcaattgtc

SEQ ID NO: 76791 - DNA, 426 bp, Homo sapiens
tccactgcatggctagaccacagtttattcacgcattcatcggctgatgaacatttgggttatgtctactttttgactgttaggaataatgctgttatgaatgctcatgtgcgagttttgtgtagacacatgttttccttcccctaaggtacctaggaatggagtttctgggtcatatggtcactctctgtttaacactctgaaaaacggacaaaccgtttccctaagtggttgccccgttttcctttccgccagtgtgtgcaggctccagggccgccccatcctcactggccccagctcctttgtgaagaaggctcctgcagctgctgcatgccacctccactagcatcctatggtccagaaggtggtcttgtggccacccatagctgcaaaggaggctggaaaatagtctttattccaggcagc

SEQ ID NO: 76792 - DNA, 531 bp, Homo sapiens
ctgccggagtgggagcggtcactgctgggggctgcgcagcacgcttgcgtcttttgcatgccgcgttgccactactctgcctgttctggaaggcctgggaccctcccttggagggggcacaggtgggctttgagtaatgagacctggtacttgcatcatccattcatcaagtcagcacccggggatgccaggttctgttaggggcgaggggacgtacagcagtagaggagacagctgagatccctgctcagggggattgaggggggctggcatcccagccggggagacagatgaaaaccaagtaaatcagcagaaaagataatttcactcatgataggagctgtgaggggttagagccaaatagaaatacagcgtgagccacgtgtgaggttttcagtttaaattttctaatagccacttaacagtcaaaggaaacaggtggaattaattttaatcttatttaacccaaatatatgcaaagtattatcacttcaacatgtaatcagtataaacggcatcaatatttttgca

SEQ ID NO: 76793 - DNA, 330 bp, Homo sapiens
  misc_feature (71)..(71): n is a, c, g, or t
  misc_feature (129)..(129): n is a, c, g, or t
  misc_feature (149)..(149): n is a, c, g, or t
  misc_feature (156)..(156): n is a, c, g, or t
gggccagccagtggcctccatgggcacctaggactcgccaggccaatgcatgacctcacagcagctcaagncgggtacggccgtgcccttgtccacggagctcaggtggaaggagctggggcacagtgnctgggctgggacagtgcatnccacctnccgtggtgggacaggtacagcgtgccaggaagccttggtcaccgccacagcctgctcctcatggtgagtgcccgcgccaggagcgtcaggagtgagggtatgtgggggctggttaggaagagggccactgctcattacgaaaactttcccttctctgcaggaattgtaaccgtg

SEQ ID NO: 76794 - DNA, 197 bp, Homo sapiens
agacataatttgggtggggacacagccaagccatatcgctgctgcttcagaggacccacattacagcagacagaaagctcgcatgatcaagaaaagctgaaatatacaaactactcattaggattatagagctatagtaatgaagctccatagtgtggcattggcactaaagacttctcgatttaagcaagagtgta

SEQ ID NO: 76795 - DNA, 358 bp, Homo sapiens
caaagtgctgggattacaggtgtgagccagtgagcctgttactgatattttatatgccttatctcatttaaccctttcagagttgggtttccctatcttgatcttacagacaagaatccacctcaaaaaatcagataagtagcctgctcaaggccatgtaacagctgagattcaaatccaggacagtgagatttcaaactccaagttctttccataccaagctgccccctcccacaagaactgagcgccaaacatcttagctgcataaacatgcaaataaaaagacctgcaaatcatctgacatgagatttaaactaatatagcatatatattcaaatatatggccagtactcatctt

SEQ ID NO: 76796 - DNA, 691 bp, Homo sapiens
aagatcagtatgcaaaaatcagttgattggttgtattgtcatataataacaataatcaattgaaaataaagattcaaatgccatcaaaagtgtgaactttgtaggggaaatagttttaaaagtacaggagaaaaactggctgagagaaattaagatctaagtaaaagaagaaatacaccattttcatggatcagaagacaattttgttaggatgacaattctccccacattgatctatagactcaacataatcctagtcaaaattcaagtgagcatttttatagaaatttgaaagcttattctaaatttttgttgggaaaccgtcctccatgtgtcctcttgtactgcttgctacacatcttacttagaaggctaagaaaccaagccctgatcatttcttatcacgtttgtttcttacagttgtgtttgcagagagcaactttgaggtatgagataatgtttcactctgggacaaagaacaggctttcttacagcttgatataaaacagatgaattccccaagtccagtgtacctcttctgcaatgcaaccaattgcatgtacaggcatccatctgggcccatgtcacatcaccctatgggtcttggggatggggagcaagggaaactgatgtggatgataatgctcataatgcttaccatgccatgggtaatagagttctttgccataga

SEQ ID NO: 76797 - DNA, 231 bp, Homo sapiens
ttttggtgttttctttttctttttttttattattattttttaacccgaataaaggggatctctgtagagcggtgcagggcttgcagtgcggacttggagaaagtttacttcaactcccttcttggacaaccctctgccctagcaatattaaaaccatgttgggccaaggagatatgagaccgttcaaaataatcaaaattaaatttgtcgtaagcccagccttgagtgctt

SEQ ID NO: 76798 - DNA, 760 bp, Homo sapiens
tgtgtagtcaaaaaggtgagagcatttcttttcccgcattccaggcaagaatccaaagatttactccggttggacaacttaagtggcagctaacccttgaatcaatccccattcaaggccaggtattttccaaagctgcaatcactatgacctattgggattcaaagctccttcctaagaatgcccattccttggttacatcatcaaaggaccagacagttgaggcctaccattggcaccacgaggcctatgggtacttcttgcccatccagacaaggtggcaggacaatgaccagtatggccacgtcaacaacgccgtgtactacagctacttcgacacgattatcagcctctacctcatcaggtcgctcaagttctgcagctccagcccctctctttgactctctgacatgcccttggttgggagttcatgtagggaattccgggaagaggttcccccagttttcctctgctagtgcacctcttttgttgagccatgtgaatatcagacccttccagaggagaacagcaaactgacacgtgagtgaaaaacgcgccgccctgttgctcctgcagtctcaggtgttcatatgtcttggtcctttgcactaaattgtcagcaaatgtgtaggctttgaatctcaaataagcacctacacaatagaccacataatgttcagcccctgtgcaacttgagcagacattaacatcaaccctcgaggcctttttgtgggaaaagcagctgcttccgccacagagg

SEQ ID NO: 76799 - DNA, 787 bp, Homo sapiens
ctgccaacagatgggaaacacccctgaccttcttaatgatattggtccccagcaccttcttagtggccatggtgcatgctgtcttctgggcctgcctggggaacttgatacactggtggatcttccagtctcaattaatgtccattcctgtatatccacctccctccacctctttattttttcctctatcctctgccaggacaaccagacatttcgactttgcttaaagtaggccatctctagattctcagagcaaccctagcagtgagttgctcatcccgtgagtccttatttaatcccatgttctgaaaaagcacacccatgtcaatgcattctaagttacctgcccttactttctggcccacatcctcaatgtacaattgcagaggttctgccctacctcctggtggtacatgatagctaatttttatagcctctttgggtatattctctttcctgctttattaggcccagcaagcccccagctgggttaagctaggatttaacctccaggtattgccctgatcaccagaaggagaggcgggacaactcctcaagggtttgcctgatttctagcagggagaggcctttgcaatatcatcttgcatgggaggagtgctgacacttaatagggaggaattaaacttctgctagcactaaggcttcagggaagtgtgcagagccacttcctcagagtcatccatccagaggtcctcatccatgcttctaggccccaggtctatgtaaccatggccttgatcttagtatgacagaaatggcttgctgg

SEQ ID NO: 76800 - DNA, 382 bp, Homo sapiens
cctgtcacttcaaggaaaacaactgacagtttgttgccaatgataaaattcaaactttcaagtgaaaattaaaattttagaaagcttgtgttacctgctgtgctattgtcagcttcccagtacttaaaagattttcctgatgagatgatgggtggtgatttttatgaatgtgagtttttgctattatatgatgaattgtgtcaagatttgtaatatctgtataactcagtgagccaatattttcaaagggaccagtgttacaaaattatgggtgaaagatcttttcaaaaagcaagtaacagaatacaaagagttcatatatatgagattccatatttcgactaacccttaagaaactcctacttgtcaagttttggtgtag

SEQ ID NO: 76801 - DNA, 383 bp, Homo sapiens
  misc_feature (32)..(32): n is a, c, g, or t
  misc_feature (56)..(56): n is a, c, g, or t
  misc_feature (78)..(78): n is a, c, g, or t
  misc_feature (114)..(114): n is a, c, g, or t
attgcagtggggccattggagaaagaacagancgctggccgggcgcaagtgtcacncctgtaatcccagcacactggnagtccgaggcaggtggatcgtgaggtcaggagttcncgatcagcctggccaacatagtgaaaccccgtctctactaaaaatacaaaaattagctgggtgtagtggtgcgtgcctgcagtcccagttacttgggaagctgaggcaggagaatcacttgaacccaggaggcggaggttgtggtgagctgagatcatgccactgcactccaacctgggcaatagagcaagactgtctcaaaagaaaaaaaaaaacgaaagagtgctcagtgtgcacgctgctgcccctgcccatggtttgggagtggc

SEQ ID NO: 76802 - DNA, 424 bp, Homo sapiens
ttagtgtggtcaattttgtttctcttttttagatataatttacataccatacaatttacccttttaaagtaaatatattcagcagttttttgtatattcacaagatgtataaccaccaccactatctacagaaaattttcattacccaaaaagaaactccatacccaagagtggttacttcccctttcctggcaaccactaatctaatttctgtccctatggatttgcctgttctgaacatttcacataaagggcatcatatatgtggctgtgtctgacttctctcactatgttttcgagatacagctaggcgcggtggctcacacctgtaatcccaacactttgggactctgaggtgggaggatcacctgaggtcaggagttcgagaacagcctggccaacatggcaaaacctcgtctctact

SEQ ID NO: 76803 - DNA, 1574 bp, Homo sapiens
  misc_feature (2)..(2): n is a, c, g, or t
  misc_feature (4)..(4): n is a, c, g, or t
  misc_feature (6)..(8): n is a, c, g, or t
  misc_feature (1572)..(1572): n is a, c, g, or t
  misc_feature (1574)..(1574): n is a, c, g, or t
tncntnnnggcagcagaagctgcaccatgtccatgtcacccacggtcatcatcctggcatgtcttgggttcttcttggaccagagtgtgtgggcacacgtgggtggtcaggacaagcccttctgctctgcctggcccagcgctgtggtgcctcaaggaggacacgtgactcttcggtgtcactatcgtcgtgggtttaacatcttcacgctgtacaagaaagatggggtccctgtccctgagctctacaacagaatattctggaacagtttcctcattagccctgtgaccccagcacacgcagggacctacagatgtcgaggttttcacccgcactcccccactgagtggtcggcacccagcaaccccctggtgatcatggtcacaggtctatatgagaaaccttcgcttacagcccggccgggccccacggttcgcgcaggagagaacgtgaccttgtcctgcagctcccagagctcctttgacatctaccatctatccagggagggggaagcccatgaacttaggctccctgcagtgcccagcatcaatggaacattccaggccgacttccctctgggtcctgccacccacggagagacctacagatgcttcggctctttccatggatctccctacgagtggtcagacccgagtgacccactgcctgtttctgtcacaggaaacccttctagtagttggccttcacccactgaaccaagcttcaaaactggtatcgccagacacctgcatgctgtgattaggtactcagtggccatcatcctcttcaccatccttcccttctttctccttcatcgctggtgctccaaaaaaaaaaatgctgctgtaatgaaccaagagcctgcgggacacagaacagtgaacagggaggactctgatgaacaagaccctcaggaggtgacatacgcacagttggatcactgcattttcacacagagaaaaatcactggcccttctcagaggagcaagagaccctcaacagataccagcgtgtgtatagaacttccaaatgctgagcccagagcgttgtctcctgcccatgagcaccacagtcaggccttgatgggatcttctagggagacaacagccctgtctcaaacccagcttgccagctctaatgtaccagcagctggaatctgaaggcgtgagtctccatcttagagcatcactcttcctcacaccacaaatctggtgcctgtctcttgcttaccaatgtctaaggtccccactgcctgctgcagagaaaacacactcctttgcttagcccacaattctctatttcacttgacccctgcccacctctccaacctaactggcttacttcctagtctacttgaggctgcaatcacactgaggaactcacaattccaaacatacaagaggctctctcttaacacggcacttagacacgtgctgttccaccttccctcgtgctgttccacctttcctcagactatttttcagccttctggcatcagcaaaccttataaaatttttttgatttcagtgtagttctctcctcttcaaataaacatgtctgccttcattcttnan

SEQ ID NO: 76804 - DNA, 1523 bp, Homo sapiens
  misc_feature (2)..(2): n is a, c, g, or t
  misc_feature (4)..(4): n is a, c, g, or t
  misc_feature (6)..(8): n is a, c, g, or t
  misc_feature (1521)..(1521): n is a, c, g, or t
  misc_feature (1523)..(1523): n is a, c, g, or t
tncntnnnggcagcagaagctgcaccatgtccatgtcacccacggtcatcatcctggcatgtcttgggttcttcttggaccagagtgtgtgggcacacgtgggtggtcaggacaagcccttctgctctgcctggcccagcgctgtggtgcctcaaggaggacacgtgactcttcggtgtcactatcgtcgtgggtttaacatcttcacgctgtacaagaaagatggggtccctgtccctgagctctacaacagaatattctggaacagtttcctcattagccctgtgaccccagcacacgcagggacctacagatgtcgaggttttcacccgcactcccccactgagtggtcggcacccagcaaccccctggtgatcatggtcacaggtctatatgagaaaccttcgcttacagcccggccgggccccacggttcgcgcaggagagaacgtgaccttgtcctgcagctcccagagctcctttgacatctaccatctatccagggagggggaagcccatgaacttaggctccctgcagtgcccagcatcaatggaacattccaggccgacttccctctgggtcctgccacccacggagagacctacagatgcttcggctctttccatggatctccctacgagtggtcagacccgagtgacccactgcctgtttctgtcacaggtatcgccagacacctgcatgctgtgattaggtactcagtggccatcatcctcttcaccatccttcccttctttctccttcatcgctggtgctccaaaaaaaaaaatgctgctgtaatgaaccaagagcctgcgggacacagaacagtgaacagggaggactctgatgaacaagaccctcaggaggtgacatacgcacagttggatcactgcattttcacacagagaaaaatcactggcccttctcagaggagcaagagaccctcaacagataccagcgtgtgtatagaacttccaaatgctgagcccagagcgttgtctcctgcccatgagcaccacagtcaggccttgatgggatcttctagggagacaacagccctgtctcaaacccagcttgccagctctaatgtaccagcagctggaatctgaaggcgtgagtctccatcttagagcatcactcttcctcacaccacaaatctggtgcctgtctcttgcttaccaatgtctaaggtccccactgcctgctgcagagaaaacacactcctttgcttagcccacaattctctatttcacttgacccctgcccacctctccaacctaactggcttacttcctagtctacttgaggctgcaatcacactgaggaactcacaattccaaacatacaagaggctctctcttaacacggcacttagacacgtgctgttccaccttccctcgtgctgttccacctttcctcagactatttttcagccttctggcatcagcaaaccttataaaatttttttgatttcagtgtagttctctcctcttcaaataaacatgtctgccttcattcttnan

SEQ ID NO: 76805 - DNA, 1469 bp, Homo sapiens
  misc_feature (2)..(2): n is a, c, g, or t
  misc_feature (4)..(4): n is a, c, g, or t
  misc_feature (6)..(8): n is a, c, g, or t
  misc_feature (1467)..(1467): n is a, c, g, or t
  misc_feature (1469)..(1469): n is a, c, g, or t
tncntnnnggcagcagaagctgcaccatgtccatgtcacccacggtcatcatcctggcatgtcttgggttcttcttggaccagagtgtgtgggcacacgtgggtggtcaggacaagcccttctgctctgcctggcccagcgctgtggtgcctcaaggaggacacgtgactcttcggtgtcactatcgtcgtgggtttaacatcttcacgctgtacaagaaagatggggtccctgtccctgagctctacaacagaatattctggaacagtttcctcattagccctgtgaccccagcacacgcagggacctacagatgtcgaggttttcacccgcactcccccactgagtggtcggcacccagcaaccccctggtgatcatggtcacaggtctatatgagaaaccttcgcttacagcccggccgggccccacggttcgcgcaggagagaacgtgaccttgtcctgcagctcccagagctcctttgacatctaccatctatccagggagggggaagcccatgaacttaggctccctgcagtgcccagcatcaatggaacattccaggccgacttccctctgggtcctgccacccacggagagacctacagatgcttcggctctttccatggatctccctacgagtggtcagacccgagtgacccactgcctgtttctgtcacaggaaacccttctagtagttggccttcacccactgaaccaagcttcaaaactgatgctgctgtaatgaaccaagagcctgcgggacacagaacagtgaacagggaggactctgatgaacaagaccctcaggaggtgacatacgcacagttggatcactgcattttcacacagagaaaaatcactggcccttctcagaggagcaagagaccctcaacagataccagcgtgtgtatagaacttccaaatgctgagcccagagcgttgtctcctgcccatgagcaccacagtcaggccttgatgggatcttctagggagacaacagccctgtctcaaacccagcttgccagctctaatgtaccagcagctggaatctgaaggcgtgagtctccatcttagagcatcactcttcctcacaccacaaatctggtgcctgtctcttgcttaccaatgtctaaggtccccactgcctgctgcagagaaaacacactcctttgcttagcccacaattctctatttcacttgacccctgcccacctctccaacctaactggcttacttcctagtctacttgaggctgcaatcacactgaggaactcacaattccaaacatacaagaggctctctcttaacacggcacttagacacgtgctgttccaccttccctcgtgctgttccacctttcctcagactatttttcagccttctggcatcagcaaaccttataaaatttttttgatttcagtgtagttctctcctcttcaaataaacatgtctgccttcattcttnan

SEQ ID NO: 76806 - DNA, 342 bp, Homo sapiens
cttgaaacttataaccatagtggggaatattggcttgtcacacaggaagagaagcagagtggcagattggttatgaagagagtaagtttaggctcaaacaacttgggtttgaattttacttttgtcactaacgagccatgcagctagggcaagttatttaacttttttgggggcctggtttgttcatctggagatattaatattttctaccttgtagggttattgtgagaattgaatgaaaatgaatgccataatgtatgtgaagcgcttagtacagaacctggcacacagtaagtgctcaaatggagcccattatttttatcagacaagaagtaacctcag

SEQ ID NO: 76807 - DNA, 942 bp, Homo sapiens
atgagcgggacaaaccagtcgagtgtctccgagttcctcctcctgggactctccaggcagccccagcagcagcatctcctctttgtgttcttcctcagcatgtacctggccactgtcctggggaacctgctcatcatcctgtccgtaagcatagactcctgcctgcacacccccatgtacttcttcctcagcaacctgtcttttgtggacatctgcttctccttcaccaccgtccccaagatgctggccaatcacatactcgagactcagaccatctccttctgtggctgtctcacacagatgtatttcgttttcatgttcgtggacatggacaatttcctcctagctgtgatggcctatgaccactttgtcgccgtgtgccaccccttacattacacagcaaagatgacccatcagctctgtgccctgctggttgctggattatgggtggttgccaacctgaatgtccttctgcacaccctgctgatggctccactctcattctgtgcagacaatgccatcactcacttcttctgcgatgtgactcccctactgaaactctcctgctcagacacacacctcaatgaggtcataatccttagtgagggtgccctggtcatgatcaccccatttctttgcatcctggcttcttatatgcacatcacctgcactgtcctgaaggtcccatccacaaagggaaggtggaaagccttctccacctgtggttctcacctggctgtggttctcctcttctacagcaccatcattgctgtgtattttaaccctctgtcctcccactcagctgagaaagacactatggctactgtgttgtatacagtagtgactcccatgctaaaccctttcatctacagcctgaggaacaggtacttgaaaggggctctgaaaaaagtagttggcagggtggtgttttctgtctgatga

SEQ ID NO: 76808 - DNA, 256 bp, Homo sapiens
aacctgtaaaatatcaagtaatgggcagctttagtgaaattattgggtagtataagttaaccaaatataatatttttaatactattgaactttatcttttatgtctctgttttttaaagttttgtcatttagtatgagaatgttgcattttgaggagcatatagtatacagaaaagaacaccatattagaaatcaagaaaactggaatccaagtacatttatgttattaacaagctgtatgacctcgaacttgtct

SEQ ID NO: 76809 - DNA, 775 bp, Homo sapiens
ctcagcctcccaagtagctgggattacgggcgcctgccattatgcccagctaatttttgtatttttagtagagatggggtttcaccatgttggccaggctggtctcgaactcctgacctcaggtgatccacccacctcagccttccaaagtgctgggattacaggcatgagccaccgtgcctgcctttcattgcctcttgaaaagagcttgtcttgtttatactgtagaaattccttgagctcataggcattgctcagggtcagatgacagttctgagactcactgagttgctggaacgaggggagaggctgccacggcccgacaaatgtccctgtgaggtctatcatctcatgaagaactgctgggagacagaggcgtcctttcgcccaaccttcgagaacctcatacccattctgaagacagtccatgagaagtaccaaggccaggccccttcagtgttcagcgtgtgctgaggcacaatggcagccctgcctgggaggactggaccaggcagtggctgcagagggagcctcctgctccctgctccaggatgaaaccaagagggggatgtcagcctcacccacaccgtgtgccttactcctgtctagagaccccacctctgtgaacttatttttctttcttggccgtgagcctaaccatgatcttgagggacccaacatttgtaggggcactaatccagcccttaaatcccccagcttccaaacttgaggcccaccatctccaccatctggtaataaactcatgttttctctg

SEQ ID NO: 76810 - DNA, 858 bp, Homo sapiens
ctcagcctcccaagtagctgggattacgggcgcctgccattatgcccagctaatttttgtatttttagtagagatggggtttcaccatgttggccaggctggtctcgaactcctgacctcaggtgatccacccacctcagccttccaaagtgctgggattacaggcatgagccaccgtgcctgcctttcattgcctcttgaaaagagcttgtcttgtttatactgtagaaattccttgagctcataggcattgctcagggtcagatgacagttctgagactcactgagttgctggaacgaggggagaggctgccacggcccgacaaatgtccctgtgaggtgagacttcctttgtctttccctgaccccactatcctgctgtggagagggcagcccccaccagccctggtttttccttctaggtctatcatctcatgaagaactgctgggagacagaggcgtcctttcgcccaaccttcgagaacctcatacccattctgaagacagtccatgagaagtaccaaggccaggccccttcagtgttcagcgtgtgctgaggcacaatggcagccctgcctgggaggactggaccaggcagtggctgcagagggagcctcctgctccctgctccaggatgaaaccaagagggggatgtcagcctcacccacaccgtgtgccttactcctgtctagagaccccacctctgtgaacttatttttctttcttggccgtgagcctaaccatgatcttgagggacccaacatttgtaggggcactaatccagcccttaaatcccccagcttccaaacttgaggcccaccatctccaccatctggtaataaactcatgttttctctg

SEQ ID NO: 76811 - DNA, 4245 bp, Homo sapiens
acaagcagtagctacccgcgggagcggggaggggtccgggttcgagcttgtgttcccccggaagggtgagtctggacgcgggcgcggaaggagcgcggccggaggtcctcaggaagaagccgcggggactggctgcgcttgacaggctgcacttggatgggagcacctggtgcctcgggactgctccgatgcccgggtctgtgctgaatgtgtaatatgcggaactatattgaaacattacaaccatcttttgatggcaacaccctgaggacctcccttttccagatggggaaactgaggcccagaattgctaagtggcttgcttgagttgacacagggagctccaggactcaccctcagctgagccacctgccgggagcatgcctctgcgccactgggggatggccaggggcagtaagcccgttggggatggagcccagcccatggctgccatgggaggcctgaaggtgcttctgcactgggctggtccaggcggcggggagccctgggtcactttcagtgagtcatcgctgacagctgaggaagtctgcatccacattgcacataaagttggtatcactcctccttgcttcaatctctttgccctcttcgatgctcaggcccaagtctggttgcccccaaaccacatcctagagatccccagagatgcaagcctgatgctatatttccgcataaggttttatttccggaactggcatggcatgaatcctcgggaaccggctgtgtaccgttgtgggcccccaggaaccgaggcatcctcagatcagacagcacaggggatgcaactcctggacccagcctcatttgagtacctctttgagcagggcaagcatgagtttgtgaatgacgtggcatcactgtgggagctgtcgaccgaggaggagatccaccactttaagaatgagagcctgggcatggcctttctgcacctctgtcacctcgctctccgccatggcatccccctggaggaggtggccaagaagaccagcttcaaggactgcatcccgcgctccttccgccggcatatccggcagcacagcgccctgacccggctgcgccttcggaacgtcttccgcaggttcctgcgggacttccagccgggccgactctcccagcagatggtcatggtcaaatacctagccacactcgagcggctggcaccccgcttcggcacagagcgtgtgcccgtgtgccacctgaggctgctggcccaggccgagggggagccctgctacatccgggacagtggggtggcccctacagaccctggccctgagtctgctgctgggcccccaacccacgaggtgctggtgacaggcactggtggcatccagtggtggccagtagaggaggaggtgaacaaggaggagggttctagtggcagcagtggcaggaacccccaagccagcctgtttgggaagaaggccaaggctcacaaggcagtcggccagccggcagacaggccgcgggagccactgtgggcctacttctgtgacttccgggacatcacccacgtggtgctgaaagagcactgtgtcagcatccaccggcaggacaacaagtgcctggagctgagcttgccttcccgggctgcggcgctgtccttcgtgtcgctggtggacggctatttccgcctgacggccgactccagccactacctgtgccacgaggtggctcccccacggctggtgatgagcatccgggatgggatccacggacccctgctggagccatttgtgcaggccaagctgcggcccgaggacggcctgtacctcattcactggagcaccagccacccctaccgcctgatcctcacagtggcccagcgtagccaggcaccagacggcatgcagagcttgcggctccgaaagttccccattgagcagcaggacggggccttcgtgctggagggctggggccggtccttccccagcgttcgggaacttggggctgccttgcagggctgcttgctgagggccggggatgactgcttctctctgcgtcgctgttgcctgccccaaccaggagaaacctccaatctcatcatcatgcggggggctcgggccagccccaggacactcaacctcagccagctcagcttccaccgggttgaccagaaggagatcacccagctgtcccacttgggccagggcacaaggaccaacgtgtatgagggccgcctgcgagtggagggcagcggggaccctgaggagggcaagatggatgacgaggaccccctcgtgcctggcagggaccgtgggcaggagctacgagtggtgctcaaagtgctggaccctagtcaccatgacatcgccctggccttctacgagacagccagcctcatgagccaggtctcccacacgcacctggccttcgtgcatggcgtctgtgtgcgcggccctgaaaatatcatggtgacagagtacgtggagcacggacccctggatgtgtggctgcggagggagcggggccatgtgcccatggcttggaagatggtggtggcccagcagctggccagcgccctcagctacctggagaacaagaacctggttcatggtaatgtgtgtggccggaacatcctgctggcccggctggggttggcagagggcaccagccccttcatcaagctgagtgatcctggcgtgggcctgggcgccctctccagggaggagcgggtggagaggatcccctggctggcccccgaatgcctaccaggtggggccaacagcctaagcaccgccatggacaagtgggggtttggcgccaccctcctggagatctgctttgacggagaggcccctctgcagagccgcagtccctccgagaaggagcatttctaccagaggcagcaccggctgcccgagccctcctgcccacagctggccacactcaccagccagtgtctgacctatgagccaacccagaggccatcattccgcaccatcctgcgtgacctcacccggctgcagccccacaatcttgctgacgtcttgactgtgaacccggactcaccggcgtcggaccctacggttttccacaagcgctatttgaaaaagatccgagatctgggcgagggtcacttcggcaaggtcagcttgtactgctacgatccgaccaacgacggcactggcgagatggtggcggtgaaagccctcaaggcagactgcggcccccagcaccgctcgggctggaagcaggagattgacattctgcgcacgctctaccacgagcacatcatcaagtacaagggctgctgcgaggaccaaggcgagaagtcgctgcagctggtcatggagtacgtgcccctgggcagcctccgagactacctgccccggcacagcatcgggctggcccagctgctgctcttcgcccagcagatctgcgagggcatggcctatctgcacgcgcagcactacatccaccgagacctagccgcgcgcaacgtgctgctggacaacgacaggctggtcaagatcggggactttggcctagccaaggccgtgcccgaaggccacgagtactaccgcgtgcgcgaggatggggacagccccgtgttctggtatgccccagagtgcctgaaggagtataagttctactatgcgtcagatgtctggtccttcggggtgaccctgtatgagctgctgacgcactgtgactccagccagagcccccccacgaaattccttgagctcataggcattgctcagggtcagatgacagttctgagactcactgagttgctggaacgaggggagaggctgccacggcccgacaaatgtccctgtgaggtctatcatctcatgaagaactgctgggagacagaggcgtcctttcgcccaaccttcgagaacctcatacccattctgaagacagtccatgagaagtaccaaggccaggccccttcagtgttcagcgtgtgctgaggcacaatggcagccctgcctgggaggactggaccaggcagtggctgcagagggagcctcctgctccctgctccaggatgaaaccaagagggggatgtcagcctcacccacaccgtgtgccttactcctgtctagagaccccacctctgtgaacttatttttctttcttggccgtgagcctaaccatgatcttgagggacccaacatttgtaggggcactaatccagcccttaaatcccccagcttccaaacttgaggcccaccatctccaccatctggtaataaactcatgttttctctg

SEQ ID NO: 76812 - DNA, 529 bp, Homo sapiens
  misc_feature (53)..(53): n is a, c, g, or t
  misc_feature (63)..(63): n is a, c, g, or t
gcatggccgggcttttcgaagcaagcaagcttataaccaggtttcccaaaggnactggccttngggcaggcgtttgtgtgccggccctgaaaagtctatcatctcatgaagaactgctgggagacagaggcgtcctttcgcccaaccttcgagaacctcatacccattctgaagacagtccatgagaagtaccaaggccaggccccttcagtgttcagcgtgtgctgaggcacaatggcagccctgcctgggaggactggaccaggcagtggctgcagagggagcctcctgctccctgctccaggatgaaaccaagagggggatgtcagcctcacccacaccgtgtgccttactcctgtctagagaccccacctctgtgaacttatttttctttcttggccgtgagcctaaccatgatcttgagggacccaacatttgtaggggcactaatccagcccttaaatcccccagcttccaaacttgaggcccaccatctccaccatctggtaataaactcatgttttctctg

SEQ ID NO: 76813 - DNA, 343 bp, Homo sapiens
acaagcagtagctacccgcgggagcggggaggggtccgggttcgagcttgtgttcccccggaagggtgagtctggacgcgggcgcggaaggagcgcggccggaggtcctcaggaagaagccgcggggactggctgcgcttgacaggctgcacttggatgggagcacctggtgcctcgggactgctccgatgcccgggtctgtgctgaatgtgtaatatgcggaactatattgaaacattacaaccatcttttgatggcaacaccctgaggacctcccttttccagcttccaaacttgaggcccaccatctccaccatctggtaataaactcatgttttctctg

SEQ ID NO: 76814 - DNA, 4640 bp, Homo sapiens
acaagcagtagctacccgcgggagcggggaggggtccgggttcgagcttgtgttcccccggaagggtgagtctggacgcgggcgcggaaggagcgcggccggaggtcctcaggaagaagccgcggggactggctgcgcttgacaggctgcacttggatgggagcacctggtgcctcgggactgctccgatgcccgggtctgtgctgaatgtgtaatatgcggaactatattgaaacattacaaccatcttttgatggcaacaccctgaggacctcccttttccagatggggaaactgaggcccagaattgctaagtggcttgcttgagttgacacagggagctccaggactcaccctcagctgagccacctgccgggagcatgcctctgcgccactgggggatggccaggggcagtaagcccgttggggatggagcccagcccatggctgccatgggaggcctgaaggtgcttctgcactgggctggtccaggcggcggggagccctgggtcactttcagtgagtcatcgctgacagctgaggaagtctgcatccacattgcacataaagttggtatcactcctccttgcttcaatctctttgccctcttcgatgctcaggcccaagtctggttgcccccaaaccacatcctagagatccccagagatgcaagcctgatgctatatttccgcataaggttttatttccggaactggcatggcatgaatcctcgggaaccggctgtgtaccgttgtgggcccccaggaaccgaggcatcctcagatcagacagcacaggggatgcaactcctggacccagcctcatttgagtacctctttgagcagggcaagcatgagtttgtgaatgacgtggcatcactgtgggagctgtcgaccgaggaggagatccaccactttaagaatgagagcctgggcatggcctttctgcacctctgtcacctcgctctccgccatggcatccccctggaggaggtggccaagaagaccagcttcaaggactgcatcccgcgctccttccgccggcatatccggcagcacagcgccctgacccggctgcgccttcggaacgtcttccgcaggttcctgcgggacttccagccgggccgactctcccagcagatggtcatggtcaaatacctagccacactcgagcggctggcaccccgcttcggcacagagcgtgtgcccgtgtgccacctgaggctgctggcccaggccgagggggagccctgctacatccgggacagtggggtggcccctacagaccctggccctgagtctgctgctgggcccccaacccacgaggtgctggtgacaggcactggtggcatccagtggtggccagtagaggaggaggtgaacaaggaggagggttctagtggcagcagtggcaggaacccccaagccagcctgtttgggaagaaggccaaggctcacaaggcagtcggccagccggcagacaggccgcgggagccactgtgggcctacttctgtgacttccgggacatcacccacgtggtgctgaaagagcactgtgtcagcatccaccggcaggacaacaagtgcctggagctgagcttgccttcccgggctgcggcgctgtccttcgtgtcgctggtggacggctatttccgcctgacggccgactccagccactacctgtgccacgaggtggctcccccacggctggtgatgagcatccgggatgggatccacggacccctgctggagccatttgtgcaggccaagctgcggcccgaggacggcctgtacctcattcactggagcaccagccacccctaccgcctgatcctcacagtggcccagcgtagccaggcaccagacggcatgcagagcttgcggctccgaaagttccccattgagcagcaggacggggccttcgtgctggagggctggggccggtccttccccagcgttcgggaacttggggctgccttgcagggctgcttgctgagggccggggatgactgcttctctctgcgtcgctgttgcctgccccaaccaggagaaacctccaatctcatcatcatgcggggggctcgggccagccccaggacactcaacctcagccagctcagcttccaccgggttgaccagaaggagatcacccagctgtcccacttgggccagggcacaaggaccaacgtgtatgagggccgcctgcgagtggagggcagcggggaccctgaggagggcaagatggatgacgaggaccccctcgtgcctggcagggaccgtgggcaggagctacgagtggtgctcaaagtgctggaccctagtcaccatgacatcgccctggccttctacgagacagccagcctcatgagccaggtctcccacacgcacctggccttcgtgcatggcgtctgtgtgcgcggccctgaaaatatcatggtgacagagtacgtggagcacggacccctggatgtgtggctgcggagggagcggggccatgtgcccatggcttggaagatggtggtggcccagcagctggccagcgccctcagctacctggagaacaagaacctggttcatggtaatgtgtgtggccggaacatcctgctggcccggctggggttggcagagggcaccagccccttcatcaagctgagtgatcctggcgtgggcctgggcgccctctccagggaggagcgggtggagaggatcccctggctggcccccgaatgcctaccaggtggggccaacagcctaagcaccgccatggacaagtgggggtttggcgccaccctcctggagatctgctttgacggagaggcccctctgcagagccgcagtccctccgagaaggagcatttctaccagaggcagcaccggctgcccgagccctcctgcccacagctggccacactcaccagccagtgtctgacctatgagccaacccagaggccatcattccgcaccatcctgcgtgacctcacccggctgcagccccacaatcttgctgacgtcttgactgtgaacccggactcaccggcgtcggaccctacggttttccacaagcgctatttgaaaaagatccgagatctgggcgagggtcacttcggcaaggtcagcttgtactgctacgatccgaccaacgacggcactggcgagatggtggcggtgaaagccctcaaggcagactgcggcccccagcaccgctcgggctggaagcaggagattgacattctgcgcacgctctaccacgagcacatcatcaagtacaagggctgctgcgaggaccaaggtgggcgggacccggcgagtcctagagacttgagggggcgtggttagagcgtgggtgtggccttgtgggcggggccagtctggcctagccaattagagactctcaaccccaggctgcagtacgcggttcttggcatctgggtgagcgtggctgggctgcctccttcccatctggggggtgctacctgctggggccaggatggacgggagccaccagcagctccctcaagtgagaatggggttctggatgggtccatcccacctgagaactgggtctagtgtgcgcgggtcttggccttccctcccgaccttggaggggctctgctgggctcaaggtaggcggtccccggcccgccctctatcgtcccccaccggggccgcccctctccgcggcaggcgagaagtcgctgcagctggtcatggagtacgtgcccctgggcagcctccgagactacctgccccggcacagcatcgggctggcccagctgctgctcttcgcccagcagatctgcgagggcatggcctatctgcacgcgcagcactacatccaccgagacctagccgcgcgcaacgtgctgctggacaacgacaggctggtcaagatcggggactttggcctagccaaggccgtgcccgaaggccacgagtactaccgcgtgcgcgaggatggggacagccccgtgttctggtatgccccagagtgcctgaaggagtataagttctactatgcgtcagatgtctggtccttcggggtgaccctgtatgagctgctgacgcactgtgactccagccagagcccccccacgaaattccttgagctcataggcattgctcagggtcagatgacagttctgagactcactgagttgctggaacgaggggagaggctgccacggcccgacaaatgtccctgtgaggtctatcatctcatgaagaactgctgggagacagaggcgtcctttcgcccaaccttcgagaacctcatacccattctgaagacagtccatgagaagtaccaaggccaggccccttcagtgttcagcgtgtgctgaggcacaatggcagccctgcctgggaggactggaccaggcagtggctgcagagggagcctcctgctccctgctccaggatgaaaccaagagggggatgtcagcctcacccacaccgtgtgccttactcctgtctagagaccccacctctgtgaacttatttttctttcttggccgtgagcctaaccatgatcttgagggacccaacatttgtaggggcactaatccagcccttaaatcccccagcttccaaacttgaggcccaccatctccaccatctggtaataaactcatgttttctctg

SEQ ID NO: 76815 - DNA, 4357 bp, Homo sapiens
acaagcagtagctacccgcgggagcggggaggggtccgggttcgagcttgtgttcccccggaagggtgagtctggacgcgggcgcggaaggagcgcggccggaggtcctcaggaagaagccgcggggactggctgcgcttgacaggctgcacttggatgggagcacctggtgcctcgggactgctccgatgcccgggtctgtgctgaatgtgtaatatgcggaactatattgaaacattacaaccatcttttgatggcaacaccctgaggacctcccttttccagatggggaaactgaggcccagaattgctaagtggcttgcttgagttgacacagggagctccaggactcaccctcagctgagccacctgccgggagcatgcctctgcgccactgggggatggccaggggcagtaagcccgttggggatggagcccagcccatggctgccatgggaggcctgaaggtgcttctgcactgggctggtccaggcggcggggagccctgggtcactttcagtgagtcatcgctgacagctgaggaagtctgcatccacattgcacataaagttggtatcactcctccttgcttcaatctctttgccctcttcgatgctcaggcccaagtctggttgcccccaaaccacatcctagagatccccagagatgcaagcctgatgctatatttccgcataaggttttatttccggaactggcatggcatgaatcctcgggaaccggctgtgtaccgttgtgggcccccaggaaccgaggcatcctcagatcagacagcacaggggatgcaactcctggacccagcctcatttgagtacctctttgagcagggcaagcatgagtttgtgaatgacgtggcatcactgtgggagctgtcgaccgaggaggagatccaccactttaagaatgagagcctgggcatggcctttctgcacctctgtcacctcgctctccgccatggcatccccctggaggaggtggccaagaagaccagcttcaaggactgcatcccgcgctccttccgccggcatatccggcagcacagcgccctgacccggctgcgccttcggaacgtcttccgcaggttcctgcgggacttccagccgggccgactctcccagcagatggtcatggtcaaatacctagccacactcgagcggctggcaccccgcttcggcacagagcgtgtgcccgtgtgccacctgaggctgctggcccaggccgagggggagccctgctacatccgggacagtggggtggcccctacagaccctggccctgagtctgctgctgggcccccaacccacgaggtgctggtgacaggcactggtggcatccagtggtggccagtagaggaggaggtgaacaaggaggagggttctagtggcagcagtggcaggaacccccaagccagcctgtttgggaagaaggccaaggctcacaaggcagtcggccagccggcagacaggccgcgggagccactgtgggcctacttctgtgacttccgggacatcacccacgtggtgctgaaagagcactgtgtcagcatccaccggcaggacaacaagtgcctggagctgagcttgccttcccgggctgcggcgctgtccttcgtgtcgctggtggacggctatttccgcctgacggccgactccagccactacctgtgccacgaggtggctcccccacggctggtgatgagcatccgggatgggatccacggacccctgctggagccatttgtgcaggccaagctgcggcccgaggacggcctgtacctcattcactggagcaccagccacccctaccgcctgatcctcacagtggcccagcgtagccaggcaccagacggcatgcagagcttgcggctccgaaagttccccattgagcagcaggacggggccttcgtgctggagggctggggccggtccttccccagcgttcgggaacttggggctgccttgcagggctgcttgctgagggccggggatgactgcttctctctgcgtcgctgttgcctgccccaaccaggagaaacctccaatctcatcatcatgcggggggctcgggccagccccaggacactcaacctcagccagctcagcttccaccgggttgaccagaaggagatcacccagctgtcccacttgggccagggcacaaggaccaacgtgtatgagggccgcctgcgagtggagggcagcggggaccctgaggagggcaagatggatgacgaggaccccctcgtgcctggcagggaccgtgggcaggagctacgagtggtgctcaaagtgctggaccctagtcaccatgacatcgccctggccttctacgagacagccagcctcatgagccaggtctcccacacgcacctggccttcgtgcatggcgtctgtgtgcgcggccctgaaagtagctcaaaactccttgtataggctaggtgtggtggctcacacctatcccagcactttgggaggcagaggtgggaggatcgcttaaacccaggagttcaagaccagcctggatatcatggtgacagagtacgtggagcacggacccctggatgtgtggctgcggagggagcggggccatgtgcccatggcttggaagatggtggtggcccagcagctggccagcgccctcagctacctggagaacaagaacctggttcatggtaatgtgtgtggccggaacatcctgctggcccggctggggttggcagagggcaccagccccttcatcaagctgagtgatcctggcgtgggcctgggcgccctctccagggaggagcgggtggagaggatcccctggctggcccccgaatgcctaccaggtggggccaacagcctaagcaccgccatggacaagtgggggtttggcgccaccctcctggagatctgctttgacggagaggcccctctgcagagccgcagtccctccgagaaggagcatttctaccagaggcagcaccggctgcccgagccctcctgcccacagctggccacactcaccagccagtgtctgacctatgagccaacccagaggccatcattccgcaccatcctgcgtgacctcacccggctgcagccccacaatcttgctgacgtcttgactgtgaacccggactcaccggcgtcggaccctacggttttccacaagcgctatttgaaaaagatccgagatctgggcgagggtcacttcggcaaggtcagcttgtactgctacgatccgaccaacgacggcactggcgagatggtggcggtgaaagccctcaaggcagactgcggcccccagcaccgctcgggctggaagcaggagattgacattctgcgcacgctctaccacgagcacatcatcaagtacaagggctgctgcgaggaccaaggcgagaagtcgctgcagctggtcatggagtacgtgcccctgggcagcctccgagactacctgccccggcacagcatcgggctggcccagctgctgctcttcgcccagcagatctgcgagggcatggcctatctgcacgcgcagcactacatccaccgagacctagccgcgcgcaacgtgctgctggacaacgacaggctggtcaagatcggggactttggcctagccaaggccgtgcccgaaggccacgagtactaccgcgtgcgcgaggatggggacagccccgtgttctggtatgccccagagtgcctgaaggagtataagttctactatgcgtcagatgtctggtccttcggggtgaccctgtatgagctgctgacgcactgtgactccagccagagcccccccacgaaattccttgagctcataggcattgctcagggtcagatgacagttctgagactcactgagttgctggaacgaggggagaggctgccacggcccgacaaatgtccctgtgaggtctatcatctcatgaagaactgctgggagacagaggcgtcctttcgcccaaccttcgagaacctcatacccattctgaagacagtccatgagaagtaccaaggccaggccccttcagtgttcagcgtgtgctgaggcacaatggcagccctgcctgggaggactggaccaggcagtggctgcagagggagcctcctgctccctgctccaggatgaaaccaagagggggatgtcagcctcacccacaccgtgtgccttactcctgtctagagaccccacctctgtgaacttatttttctttcttggccgtgagcctaaccatgatcttgagggacccaacatttgtaggggcactaatccagcccttaaatcccccagcttccaaacttgaggcccaccatctccaccatctggtaataaactcatgttttctctg

SEQ ID NO: 76816 - DNA, 4009 bp, Homo sapiens
tgtctatcgatgcaccttcatcatacctcgggtggtgaaggtggcaagagaatttatttccaggcttggaaatgtacccagccctttggccagaaaccagcagtgcaattggctccatcctagctgcaagggaggctgggaaatgtagtcctcctgtgaggccacagcatgggcaacatacgcactgtcctctgcccaggggcaacgtgagactgaagctgcaggtgggggagggggcctcagagggagtgtgaaggcagacattgggtctggggggtctttggggctgacggtagcaaatgacgtgactcctgacctcgtttctcacctgatccaggtatcactcctccttgcttcaatctctttgccctcttcgatgctcaggcccaagtctggttgcccccaaaccacatcctagagatccccagagatgcaagcctgatgctatatttccgcataaggttttatttccggaactggcatggcatgaatcctcgggaaccggctgtgtaccgttgtgggcccccaggaaccgaggcatcctcagatcagacagcacaggggatgcaactcctggacccagcctcatttgagtacctctttgagcagggcaagcatgagtttgtgaatgacgtggcatcactgtgggagctgtcgaccgaggaggagatccaccactttaagaatgagagcctgggcatggcctttctgcacctctgtcacctcgctctccgccatggcatccccctggaggaggtggccaagaagaccagcttcaaggactgcatcccgcgctccttccgccggcatatccggcagcacagcgccctgacccggctgcgccttcggaacgtcttccgcaggttcctgcgggacttccagccgggccgactctcccagcagatggtcatggtcaaatacctagccacactcgagcggctggcaccccgcttcggcacagagcgtgtgcccgtgtgccacctgaggctgctggcccaggccgagggggagccctgctacatccgggacagtggggtggcccctacagaccctggccctgagtctgctgctgggcccccaacccacgaggtgctggtgacaggcactggtggcatccagtggtggccagtagaggaggaggtgaacaaggaggagggttctagtggcagcagtggcaggaacccccaagccagcctgtttgggaagaaggccaaggctcacaaggcagtcggccagccggcagacaggccgcgggagccactgtgggcctacttctgtgacttccgggacatcacccacgtggtgctgaaagagcactgtgtcagcatccaccggcaggacaacaagtgcctggagctgagcttgccttcccgggctgcggcgctgtccttcgtgtcgctggtggacggctatttccgcctgacggccgactccagccactacctgtgccacgaggtggctcccccacggctggtgatgagcatccgggatgggatccacggacccctgctggagccatttgtgcaggccaagctgcggcccgaggacggcctgtacctcattcactggagcaccagccacccctaccgcctgatcctcacagtggcccagcgtagccaggcaccagacggcatgcagagcttgcggctccgaaagttccccattgagcagcaggacggggccttcgtgctggagggctggggccggtccttccccagcgttcgggaacttggggctgccttgcagggctgcttgctgagggccggggatgactgcttctctctgcgtcgctgttgcctgccccaaccaggagaaacctccaatctcatcatcatgcggggggctcgggccagccccaggacactcaacctcagccagctcagcttccaccgggttgaccagaaggagatcacccagctgtcccacttgggccagggcacaaggaccaacgtgtatgagggccgcctgcgagtggagggcagcggggaccctgaggagggcaagatggatgacgaggaccccctcgtgcctggcagggaccgtgggcaggagctacgagtggtgctcaaagtgctggaccctagtcaccatgacatcgccctggccttctacgagacagccagcctcatgagccaggtctcccacacgcacctggccttcgtgcatggcgtctgtgtgcgcggccctgaaaatatcatggtgacagagtacgtggagcacggacccctggatgtgtggctgcggagggagcggggccatgtgcccatggcttggaagatggtggtggcccagcagctggccagcgccctcagctacctggagaacaagaacctggttcatggtaatgtgtgtggccggaacatcctgctggcccggctggggttggcagagggcaccagccccttcatcaagctgagtgatcctggcgtgggcctgggcgccctctccagggaggagcgggtggagaggatcccctggctggcccccgaatgcctaccaggtggggccaacagcctaagcaccgccatggacaagtgggggtttggcgccaccctcctggagatctgctttgacggagaggcccctctgcagagccgcagtccctccgagaaggagcatttctaccagaggcagcaccggctgcccgagccctcctgcccacagctggccacactcaccagccagtgtctgacctatgagccaacccagaggccatcattccgcaccatcctgcgtgacctcacccggctgcagccccacaatcttgctgacgtcttgactgtgaacccggactcaccggcgtcggaccctacggttttccacaagcgctatttgaaaaagatccgagatctgggcgagggtcacttcggcaaggtcagcttgtactgctacgatccgaccaacgacggcactggcgagatggtggcggtgaaagccctcaaggcagactgcggcccccagcaccgctcgggctggaagcaggagattgacattctgcgcacgctctaccacgagcacatcatcaagtacaagggctgctgcgaggaccaaggcgagaagtcgctgcagctggtcatggagtacgtgcccctgggcagcctccgagactacctgccccggcacagcatcgggctggcccagctgctgctcttcgcccagcagatctgcgagggcatggcctatctgcacgcgcagcactacatccaccgagacctagccgcgcgcaacgtgctgctggacaacgacaggctggtcaagatcggggactttggcctagccaaggccgtgcccgaaggccacgagtactaccgcgtgcgcgaggatggggacagccccgtgttctggtatgccccagagtgcctgaaggagtataagttctactatgcgtcagatgtctggtccttcggggtgaccctgtatgagctgctgacgcactgtgactccagccagagcccccccacgaaattccttgagctcataggcattgctcagggtcagatgacagttctgagactcactgagttgctggaacgaggggagaggctgccacggcccgacaaatgtccctgtgaggtctatcatctcatgaagaactgctgggagacagaggcgtcctttcgcccaaccttcgagaacctcatacccattctgaagacagtccatgagaagtaccaaggccaggccccttcagtgttcagcgtgtgctgaggcacaatggcagccctgcctgggaggactggaccaggcagtggctgcagagggagcctcctgctccctgctccaggatgaaaccaagagggggatgtcagcctcacccacaccgtgtgccttactcctgtctagagaccccacctctgtgaacttatttttctttcttggccgtgagcctaaccatgatcttgagggacccaacatttgtaggggcactaatccagcccttaaatcccccagcttccaaacttgaggcccaccatctccaccatctggtaataaactcatgttttctctg

SEQ ID NO: 76817 - DNA, 3849 bp, Homo sapiens
tgtctatcgatgcaccttcatcatacctcgggtggtgaaggtggcaagagaatttatttccaggcttggaaatgtacccagccctttggccagaaaccagcagtgcaattggctccatcctagctgcaagggaggctgggaaatgtagtcctcctgtgaggccacagcatgggcaacatacgcactgtcctctgcccaggggcaacgtgagactgaagctgcaggcccaagtctggttgcccccaaaccacatcctagagatccccagagatgcaagcctgatgctatatttccgcataaggttttatttccggaactggcatggcatgaatcctcgggaaccggctgtgtaccgttgtgggcccccaggaaccgaggcatcctcagatcagacagcacaggggatgcaactcctggacccagcctcatttgagtacctctttgagcagggcaagcatgagtttgtgaatgacgtggcatcactgtgggagctgtcgaccgaggaggagatccaccactttaagaatgagagcctgggcatggcctttctgcacctctgtcacctcgctctccgccatggcatccccctggaggaggtggccaagaagaccagcttcaaggactgcatcccgcgctccttccgccggcatatccggcagcacagcgccctgacccggctgcgccttcggaacgtcttccgcaggttcctgcgggacttccagccgggccgactctcccagcagatggtcatggtcaaatacctagccacactcgagcggctggcaccccgcttcggcacagagcgtgtgcccgtgtgccacctgaggctgctggcccaggccgagggggagccctgctacatccgggacagtggggtggcccctacagaccctggccctgagtctgctgctgggcccccaacccacgaggtgctggtgacaggcactggtggcatccagtggtggccagtagaggaggaggtgaacaaggaggagggttctagtggcagcagtggcaggaacccccaagccagcctgtttgggaagaaggccaaggctcacaaggcagtcggccagccggcagacaggccgcgggagccactgtgggcctacttctgtgacttccgggacatcacccacgtggtgctgaaagagcactgtgtcagcatccaccggcaggacaacaagtgcctggagctgagcttgccttcccgggctgcggcgctgtccttcgtgtcgctggtggacggctatttccgcctgacggccgactccagccactacctgtgccacgaggtggctcccccacggctggtgatgagcatccgggatgggatccacggacccctgctggagccatttgtgcaggccaagctgcggcccgaggacggcctgtacctcattcactggagcaccagccacccctaccgcctgatcctcacagtggcccagcgtagccaggcaccagacggcatgcagagcttgcggctccgaaagttccccattgagcagcaggacggggccttcgtgctggagggctggggccggtccttccccagcgttcgggaacttggggctgccttgcagggctgcttgctgagggccggggatgactgcttctctctgcgtcgctgttgcctgccccaaccaggagaaacctccaatctcatcatcatgcggggggctcgggccagccccaggacactcaacctcagccagctcagcttccaccgggttgaccagaaggagatcacccagctgtcccacttgggccagggcacaaggaccaacgtgtatgagggccgcctgcgagtggagggcagcggggaccctgaggagggcaagatggatgacgaggaccccctcgtgcctggcagggaccgtgggcaggagctacgagtggtgctcaaagtgctggaccctagtcaccatgacatcgccctggccttctacgagacagccagcctcatgagccaggtctcccacacgcacctggccttcgtgcatggcgtctgtgtgcgcggccctgaaaatatcatggtgacagagtacgtggagcacggacccctggatgtgtggctgcggagggagcggggccatgtgcccatggcttggaagatggtggtggcccagcagctggccagcgccctcagctacctggagaacaagaacctggttcatggtaatgtgtgtggccggaacatcctgctggcccggctggggttggcagagggcaccagccccttcatcaagctgagtgatcctggcgtgggcctgggcgccctctccagggaggagcgggtggagaggatcccctggctggcccccgaatgcctaccaggtggggccaacagcctaagcaccgccatggacaagtgggggtttggcgccaccctcctggagatctgctttgacggagaggcccctctgcagagccgcagtccctccgagaaggagcatttctaccagaggcagcaccggctgcccgagccctcctgcccacagctggccacactcaccagccagtgtctgacctatgagccaacccagaggccatcattccgcaccatcctgcgtgacctcacccggctgcagccccacaatcttgctgacgtcttgactgtgaacccggactcaccggcgtcggaccctacggttttccacaagcgctatttgaaaaagatccgagatctgggcgagggtcacttcggcaaggtcagcttgtactgctacgatccgaccaacgacggcactggcgagatggtggcggtgaaagccctcaaggcagactgcggcccccagcaccgctcgggctggaagcaggagattgacattctgcgcacgctctaccacgagcacatcatcaagtacaagggctgctgcgaggaccaaggcgagaagtcgctgcagctggtcatggagtacgtgcccctgggcagcctccgagactacctgccccggcacagcatcgggctggcccagctgctgctcttcgcccagcagatctgcgagggcatggcctatctgcacgcgcagcactacatccaccgagacctagccgcgcgcaacgtgctgctggacaacgacaggctggtcaagatcggggactttggcctagccaaggccgtgcccgaaggccacgagtactaccgcgtgcgcgaggatggggacagccccgtgttctggtatgccccagagtgcctgaaggagtataagttctactatgcgtcagatgtctggtccttcggggtgaccctgtatgagctgctgacgcactgtgactccagccagagcccccccacgaaattccttgagctcataggcattgctcagggtcagatgacagttctgagactcactgagttgctggaacgaggggagaggctgccacggcccgacaaatgtccctgtgaggtctatcatctcatgaagaactgctgggagacagaggcgtcctttcgcccaaccttcgagaacctcatacccattctgaagacagtccatgagaagtaccaaggccaggccccttcagtgttcagcgtgtgctgaggcacaatggcagccctgcctgggaggactggaccaggcagtggctgcagagggagcctcctgctccctgctccaggatgaaaccaagagggggatgtcagcctcacccacaccgtgtgccttactcctgtctagagaccccacctctgtgaacttatttttctttcttggccgtgagcctaaccatgatcttgagggacccaacatttgtaggggcactaatccagcccttaaatcccccagcttccaaacttgaggcccaccatctccaccatctggtaataaactcatgttttctctg

SEQ ID NO: 76818 - DNA, 5069 bp, Homo sapiens
acaagcagtagctacccgcgggagcggggaggggtccgggttcgagcttgtgttcccccggaagggtgagtctggacgcgggcgcggaaggagcgcggccggaggtcctcaggaagaagccgcggggactggctgcgcttgacaggctgcacttggatgggagcacctggtgcctcgggactgctccgatgcccgggtctgtgctgaatgtgtaatatgcggaactatattgaaacattacaaccatcttttgatggcaacaccctgaggacctcccttttccagatggggaaactgaggcccagaattgctaagtggcttgcttgagttgacacagggagctccaggactcaccctcagctgagccacctgccgggagcatgcctctgcgccactgggggatggccaggggcagtaagcccgttggggatggagcccagcccatggctgccatgggaggcctgaaggtgcttctgcactgggctggtccaggcggcggggagccctgggtcactttcagtgagtcatcgctgacagctgaggaagtctgcatccacattgcacataaagttggtatcactcctccttgcttcaatctctttgccctcttcgatgctcaggcccaagtctggttgcccccaaaccacatcctagagatccccagagatgcaagcctgatgctatatttccgcataaggttttatttccggaactggcatggcatgaatcctcgggaaccggctgtgtaccgttgtgggcccccaggaaccgaggcatcctcagatcagacagcacaggggatgcaactcctggacccagcctcatttgagtacctctttgagcagggcaagcatgagtttgtgaatgacgtggcatcactgtgggagctgtcgaccgaggaggagatccaccactttaagaatgagagcctgggcatggcctttctgcacctctgtcacctcgctctccgccatggcatccccctggaggaggtggccaagaagaccagcttcaaggactgcatcccgcgctccttccgccggcatatccggcagcacagcgccctgacccggctgcgccttcggaacgtcttccgcaggttcctgcgggacttccagccgggccgactctcccagcagatggtcatggtcaaatacctagccacactcgagcggctggcaccccgcttcggcacagagcgtgtgcccgtgtgccacctgaggctgctggcccaggccgagggggagccctgctacatccgggacagtggggtggcccctacagaccctggccctgagtctgctgctgggcccccaacccacgaggtgctggtgacaggcactggtggcatccagtggtggccagtagaggaggaggtgaacaaggaggagggttctagtggcagcagtggcaggaacccccaagccagcctgtttgggaagaaggccaaggctcacaaggcagtcggccagccggcagacaggccgcgggagccactgtgggcctacttctgtgacttccgggacatcacccacgtggtgctgaaagagcactgtgtcagcatccaccggcaggacaacaagtgcctggagctgagcttgccttcccgggctgcggcgctgtccttcgtgtcgctggtggacggctatttccgcctgacggccgactccagccactacctgtgccacgaggtggctcccccacggctggtgatgagcatccgggatgggatccacggacccctgctggagccatttgtgcaggccaagctgcggcccgaggacggcctgtacctcattcactggagcaccagccacccctaccgcctgatcctcacagtggcccagcgtagccaggcaccagacggcatgcagagcttgcggctccgaaagttccccattgagcagcaggacggggccttcgtgctggagggctggggccggtccttccccagcgttcgggaacttggggctgccttgcagggctgcttgctgagggccggggatgactgcttctctctgcgtcgctgttgcctgccccaaccaggagaaacctccaatctcatcatcatgcggggggctcgggccagccccaggacactcaacctcagccagctcagcttccaccgggttgaccagaaggagatcacccagctgtcccacttgggccagggcacaaggaccaacgtgtatgagggccgcctgcgagtggagggcagcggggaccctgaggagggcaagatggatgacgaggaccccctcgtgcctggcagggaccgtgggcaggagctacgagtggtgctcaaagtgctggaccctagtcaccatgacatcgccctggccttctacgagacagccagcctcatgagccaggtctcccacacgcacctggccttcgtgcatggcgtctgtgtgcgcggccctgaaaatatcatggtgacagagtacgtggagcacggacccctggatgtgtggctgcggagggagcggggccatgtgcccatggcttggaagatggtggtggcccagcagctggccagcgccctcagctacctggagaacaagaacctggttcatggtaatgtgtgtggccggaacatcctgctggcccggctggggttggcagagggcaccagccccttcatcaagctgagtgatcctggcgtgggcctgggcgccctctccagggaggagcgggtggagaggatcccctggctggcccccgaatgcctaccaggtggggccaacagcctaagcaccgccatggacaagtgggggtttggcgccaccctcctggagatctgctttgacggagaggcccctctgcagagccgcagtccctccgagaaggagcatttctaccagaggcagcaccggctgcccgagccctcctgcccacagctggccacactcaccagccagtgtctgacctatgagccaacccagaggccatcattccgcaccatcctgcgtgacctcacccggctgcagccccacaatcttgctgacgtcttgactgtgaacccggactcaccggcgtcggaccctacggttttccacaagcgctatttgaaaaagatccgagatctgggcgagggtcacttcggcaaggtcagcttgtactgctacgatccgaccaacgacggcactggcgagatggtggcggtgaaagccctcaaggcagactgcggcccccagcaccgctcgggctggaagcaggagattgacattctgcgcacgctctaccacgagcacatcatcaagtacaagggctgctgcgaggaccaaggtgggcgggacccggcgagtcctagagacttgagggggcgtggttagagcgtgggtgtggccttgtgggcggggccagtctggcctagccaattagagactctcaaccccaggctgcagtacgcggttcttggcatctgggtgagcgtggctgggctgcctccttcccatctggggggtgctacctgctggggccaggatggacgggagccaccagcagctccctcaagtgagaatggggttctggatgggtccatcccacctgagaactgggtctagtgtgcgcgggtcttggccttccctcccgaccttggaggggctctgctgggctcaaggtaggcggtccccggcccgccctctatcgtcccccaccggggccgcccctctccgcggcaggcgagaagtcgctgcagctggtcatggagtacgtgcccctgggcagcctccgagactacctgccccggcacagcatcgggctggcccagctgctgctcttcgcccagcagatctgcgaggttggtcggccccgcccctgcttctggagcttgccccttcctcttcagcttgggctggcctgagcgatccggtgcagtctgctctcacgctccgcccctgctcgtttgcccaggctgtcttgtccttgcactgacctccgaactgtttggcttgcttggccacaccccctcctcccaagggaccacgcacagccggctcggcccctcccaactcgccctcctgcccagctttgctcgtctagccccgtccctgctttctggctcagcctccttttgcttggtgccacgtgccatccggccctctccagcggccgggtagccaccggcctgacctgactgtcccccagccctcctggctgctcaggtcctgccgccgcccccggccgaaccccgccccactgaaactcacgagccctgccccgtccccagggcatggcctatctgcacgcgcagcactacatccaccgagacctagccgcgcgcaacgtgctgctggacaacgacaggctggtcaagatcggggactttggcctagccaaggccgtgcccgaaggccacgagtactaccgcgtgcgcgaggatggggacagccccgtgttctggtatgccccagagtgcctgaaggagtataagttctactatgcgtcagatgtctggtccttcggggtgaccctgtatgagctgctgacgcactgtgactccagccagagcccccccacgaaattccttgagctcataggcattgctcagggtcagatgacagttctgagactcactgagttgctggaacgaggggagaggctgccacggcccgacaaatgtccctgtgaggtctatcatctcatgaagaactgctgggagacagaggcgtcctttcgcccaaccttcgagaacctcatacccattctgaagacagtccatgagaagtaccaaggccaggccccttcagtgttcagcgtgtgctgaggcacaatggcagccctgcctgggaggactggaccaggcagtggctgcagagggagcctcctgctccctgctccaggatgaaaccaagagggggatgtcagcctcacccacaccgtgtgccttactcctgtctagagaccccacctctgtgaacttatttttctttcttggccgtgagcctaaccatgatcttgagggacccaacatttgtaggggcactaatccagcccttaaatcccccagcttccaaacttgaggcccaccatctccaccatctggtaataaactcatgttttctctg

SEQ ID NO: 76819 - DNA, 3375 bp, Homo sapiens
acaagcagtagctacccgcgggagcggggaggggtccgggttcgagcttgtgttcccccggaagggtgagtctggacgcgggcgcggaaggagcgcggccggaggtcctcaggaagaagccgcggggactggctgcgcttgacaggctgcacttggatgggagcacctggtgcctcgggactgctccgatgcccgggtctgtgctgaatgtgtaatatgcggaactatattgaaacattacaaccatcttttgatggcaacaccctgaggacctcccttttccagatggggaaactgaggcccagaattgctaagtggcttgcttgagttgacacagggagctccaggactcaccctcagctgagccacctgccgggagcatgcctctgcgccactgggggatggccaggggcagtaagcccgttggggatggagcccagcccatggctgccatgggaggcctgaaggtgcttctgcactgggctggtccaggcggcggggagccctgggtcactttcagtgagtcatcgctgacagctgaggaagtctgcatccacattgcacataaagttggtatcactcctccttgcttcaatctctttgccctcttcgatgctcaggcccaagtctggttgcccccaaaccacatcctagagatccccagagatgcaagcctgatgctatatttccgcataaggttttatttccggaactggcatggcatgaatcctcgggaaccggctgtgtaccgttgtgggcccccaggaaccgaggcatcctcagatcagacagcacaggggatgcaactcctggacccagcctcatttgagtacctctttgagcagggcaagcatgagtttgtgaatgacgtggcatcactgtgggagctgtcgaccgaggaggagatccaccactttaagaatgagagcctgggcatggcctttctgcacctctgtcacctcgctctccgccatggcatccccctggaggaggtggccaagaagaccagcttcaaggactgcatcccgcgctccttccgccggcatatccggcagcacagcgccctgacccggctgcgccttcggaacgtcttccgcaggttcctgcgggacttccagccgggccgactctcccagcagatggtcatggtcaaatacctagccacactcgagcggctggcaccccgcttcggcacagagcgtgtgcccgtgtgccacctgaggctgctggcccaggccgagggggagccctgctacatccgggacagtggggtggcccctacagaccctggccctgagtctgctgctgggcccccaacccacgaggtgctggtgacaggcactggtggcatccagtggtggccagtagaggaggaggtgaacaaggaggagggttctagtggcagcagtggcaggaacccccaagccagcctgtttgggaagaaggccaaggctcacaaggcagtcggccagccggcagacaggccgcgggagccactgtgggcctacttctgtgacttccgggacatcacccacgtggtgctgaaagagcactgtgtcagcatccaccggcaggacaacaagtgcctggagctgagcttgccttcccgggctgcggcgctgtccttcgtgtcgctggtggacggctatttccgcctgacggccgactccagccactacctgtgccacgaggtggctcccccacggctggtgatgagcatccgggatgggatccacggacccctgctggagccatttgtgcaggccaagctgcggcccgaggacggcctgtacctcattcactggagcaccagccacccctaccgcctgatcctcacagtggcccagcgtagccaggcaccagacggcatgcagagcttgcggctccgaaagttccccattgagcagcaggacggggccttcgtgctggagggctggggccggtccttccccagcgttcgggaacttggggctgccttgcagggctgcttgctgagggccggggatgactgcttctctctgcgtcgctgttgcctgccccaaccaggagaaacctccaatctcatcatcatgcggggggctcgggccagccccaggacactcaacctcagccagctcagcttccaccatcttgctgacgtcttgactgtgaacccggactcaccggcgtcggaccctacggttttccacaagcgctatttgaaaaagatccgagatctgggcgagggtcacttcggcaaggtcagcttgtactgctacgatccgaccaacgacggcactggcgagatggtggcggtgaaagccctcaaggcagactgcggcccccagcaccgctcgggctggaagcaggagattgacattctgcgcacgctctaccacgagcacatcatcaagtacaagggctgctgcgaggaccaaggcgagaagtcgctgcagctggtcatggagtacgtgcccctgggcagcctccgagactacctgccccggcacagcatcgggctggcccagctgctgctcttcgcccagcagatctgcgagggcatggcctatctgcacgcgcagcactacatccaccgagacctagccgcgcgcaacgtgctgctggacaacgacaggctggtcaagatcggggactttggcctagccaaggccgtgcccgaaggccacgagtactaccgcgtgcgcgaggatggggacagccccgtgttctggtatgccccagagtgcctgaaggagtataagttctactatgcgtcagatgtctggtccttcggggtgaccctgtatgagctgctgacgcactgtgactccagccagagcccccccacgaaattccttgagctcataggcattgctcagggtcagatgacagttctgagactcactgagttgctggaacgaggggagaggctgccacggcccgacaaatgtccctgtgaggtctatcatctcatgaagaactgctgggagacagaggcgtcctttcgcccaaccttcgagaacctcatacccattctgaagacagtccatgagaagtaccaaggccaggccccttcagtgttcagcgtgtgctgaggcacaatggcagccctgcctgggaggactggaccaggcagtggctgcagagggagcctcctgctccctgctccaggatgaaaccaagagggggatgtcagcctcacccacaccgtgtgccttactcctgtctagagaccccacctctgtgaacttatttttctttcttggccgtgagcctaaccatgatcttgagggacccaacatttgtaggggcactaatccagcccttaaatcccccagcttccaaacttgaggcccaccatctccaccatctggtaataaactcatgttttctctg

SEQ ID NO: 76820 - DNA, 4250 bp, Homo sapiens
acaagcagtagctacccgcgggagcggggaggggtccgggttcgagcttgtgttcccccggaagggtgagtctggacgcgggcgcggaaggagcgcggccggaggtcctcaggaagaagccgcggggactggctgcgcttgacaggctgcacttggatgggagcacctggtgcctcgggactgctccgatgcccgggtctgtgctgaatgtgtaatatgcggaactatattgaaacattacaaccatcttttgatggcaacaccctgaggacctcccttttccagatggggaaactgaggcccagaattgctaagtggcttgcttgagttgacacagggagctccaggactcaccctcagctgagccacctgccgggagcatgcctctgcgccactgggggatggccaggggcagtaagcccgttggggatggagcccagcccatggctgccatgggaggcctgaaggtgcttctgcactgggctggtccaggcggcggggagccctgggtcactttcagtgagtcatcgctgacagctgaggaagtctgcatccacattgcacataaagttggtatcactcctccttgcttcaatctctttgccctcttcgatgctcaggcccaagtctggttgcccccaaaccacatcctagagatccccagagatgcaagcctgatgctatatttccgcataaggttttatttccggaactggcatggcatgaatcctcgggaaccggctgtgtaccgttgtgggcccccaggaaccgaggcatcctcagatcagacagcacaggggatgcaactcctggacccagcctcatttgagtacctctttgagcagggcaagcatgagtttgtgaatgacgtggcatcactgtgggagctgtcgaccgaggaggagatccaccactttaagaatgagagcctgggcatggcctttctgcacctctgtcacctcgctctccgccatggcatccccctggaggaggtggccaagaagaccagcttcaaggactgcatcccgcgctccttccgccggcatatccggcagcacagcgccctgacccggctgcgccttcggaacgtcttccgcaggttcctgcgggacttccagccgggccgactctcccagcagatggtcatggtcaaatacctagccacactcgagcggctggcaccccgcttcggcacagagcgtgtgcccgtgtgccacctgaggctgctggcccaggccgagggggagccctgctacatccgggacagtggggtggcccctacagaccctggccctgagtctgctgctgggcccccaacccacgaggtgctggtgacaggcactggtggcatccagtggtggccagtagaggaggaggtgaacaaggaggagggttctagtggcagcagtggcaggaacccccaagccagcctgtttgggaagaaggccaaggctcacaaggcagtcggccagccggcagacaggccgcgggagccactgtgggcctacttctgtgacttccgggacatcacccacgtggtgctgaaagagcactgtgtcagcatccaccggcaggacaacaagtgcctggagctgagcttgccttcccgggctgcggcgctgtccttcgtgtcgctggtggacggctatttccgcctgacggccgactccagccactacctgtgccacgaggtggctcccccacggctggtgatgagcatccgggatgggatccacggacccctgctggagccatttgtgcaggccaagctgcggcccgaggacggcctgtacctcattcactggagcaccagccacccctaccgcctgatcctcacagtggcccagcgtagccaggcaccagacggcatgcagagcttgcggctccgaaagttccccattgagcagcaggacggggccttcgtgctggagggctggggccggtccttccccagcgttcgggaacttggggctgccttgcagggctgcttgctgagggccggggatgactgcttctctctgcgtcgctgttgcctgccccaaccaggagaaacctccaatctcatcatcatgcggggggctcgggccagccccaggacactcaacctcagccagctcagcttccaccgggttgaccagaaggagatcacccagctgtcccacttgggccagggcacaaggaccaacgtgtatgagggccgcctgcgagtggagggcagcggggaccctgaggagggcaagatggatgacgaggaccccctcgtgcctggcagggaccgtgggcaggagctacgagtggtgctcaaagtgctggaccctagtcaccatgacatcgccctggccttctacgagacagccagcctcatgagccaggtctcccacacgcacctggccttcgtgcatggcgtctgtgtgcgcggccctgaaaatatcatggtgacagagtacgtggagcacggacccctggatgtgtggctgcggagggagcggggccatgtgcccatggcttggaagatggtggtggcccagcagctggccagcgccctcagctacctggagaacaagaacctggttcatggtaatgtgtgtggccggaacatcctgctggcccggctggggttggcagagggcaccagccccttcatcaagctgagtgatcctggcgtgggcctgggcgccctctccagggaggagcgggtggagaggatcccctggctggcccccgaatgcctaccaggtggggccaacagcctaagcaccgccatggacaagtgggggtttggcgccaccctcctggagatctgctttgacggagaggcccctctgcagagccgcagtccctccgagaaggagcatttctaccagaggcagcaccggctgcccgagccctcctgcccacagctggccacactcaccagccagtgtctgacctatgagccaacccagaggccatcattccgcaccatcctgcgtgacctcacccggctgcagccccacaatcttgctgacgtcttgactgtgaacccggactcaccggcgtcggaccctacggttttccacaagcgctatttgaaaaagatccgagatctgggcgagggtcacttcggcaaggtcagcttgtactgctacgatccgaccaacgacggcactggcgagatggtggcggtgaaagccctcaaggcagactgcggcccccagcaccgctcgggctggaagcaggagattgacattctgcgcacgctctaccacgagcacatcatcaagtacaagggctgctgcgaggaccaaggcgagaagtcgctgcagctggtcatggagtacgtgcccctgggcagcctccgagactacctgccccggcacagcatcgggctggcccagctgctgctcttcgcccagcagatctgcgagggcatggcctatctgcacgcgcagcactacatccaccgagacctagccgcgcgcaacgtgctgctggacaacgacaggctggtcaagatcggggactttggcctagccaaggccgtgcccgaaggccacgagtactaccgcgtgcgcgaggatggggacagccccgtgttctggtatgccccagagtgcctgaaggagtataagttctactatgcgtcagatgtctggtccttcggggtgaccctgtatgagctgctgacgcactgtgactccagccagagcccccccacgaaattccttgagctcataggcattgctcagggtcagatgacagttctgagactcactgagttgctggaacgaggggagaggctgccacggcccgacaaatgtccctgtgaggtctatcatctcatgaagaactgctgggagacagaggcgtcctttcgcccaaccttcgagaacctcatacccattctgaagacagtccatgagaagtaccaaggccaggccccttcagtgttcagcgtgtgctgaggcacaatggcagccctgcctgggaggactggaccaggcagtggctgcagagggagcctcctgctccctgctccaggatgaaaccaagagggggatgtcagcctcacccacaccgtgtgccttactcctgtctagagaccccacctctgtgaacttatttttctttcttggccgtgagcctaaccatgatcttgagggacccaacatttgtaggggcactaatccagcccttaaatcccccagcttccaaacttgaggccccacgccaattaataccaaccgaggttctccggtagaataacctac

SEQ ID NO: 76821 - DNA, 4265 bp, Homo sapiens
  misc_feature (4262)..(4262): n is a, c, g, or t
acaagcagtagctacccgcgggagcggggaggggtccgggttcgagcttgtgttcccccggaagggtgagtctggacgcgggcgcggaaggagcgcggccggaggtcctcaggaagaagccgcggggactggctgcgcttgacaggctgcacttggatgggagcacctggtgcctcgggactgctccgatgcccgggtctgtgctgaatgtgtaatatgcggaactatattgaaacattacaaccatcttttgatggcaacaccctgaggacctcccttttccagatggggaaactgaggcccagaattgctaagtggcttgcttgagttgacacagggagctccaggactcaccctcagctgagccacctgccgggagcatgcctctgcgccactgggggatggccaggggcagtaagcccgttggggatggagcccagcccatggctgccatgggaggcctgaaggtgcttctgcactgggctggtccaggcggcggggagccctgggtcactttcagtgagtcatcgctgacagctgaggaagtctgcatccacattgcacataaagttggtatcactcctccttgcttcaatctctttgccctcttcgatgctcaggcccaagtctggttgcccccaaaccacatcctagagatccccagagatgcaagcctgatgctatatttccgcataaggttttatttccggaactggcatggcatgaatcctcgggaaccggctgtgtaccgttgtgggcccccaggaaccgaggcatcctcagatcagacagcacaggggatgcaactcctggacccagcctcatttgagtacctctttgagcagggcaagcatgagtttgtgaatgacgtggcatcactgtgggagctgtcgaccgaggaggagatccaccactttaagaatgagagcctgggcatggcctttctgcacctctgtcacctcgctctccgccatggcatccccctggaggaggtggccaagaagaccagcttcaaggactgcatcccgcgctccttccgccggcatatccggcagcacagcgccctgacccggctgcgccttcggaacgtcttccgcaggttcctgcgggacttccagccgggccgactctcccagcagatggtcatggtcaaatacctagccacactcgagcggctggcaccccgcttcggcacagagcgtgtgcccgtgtgccacctgaggctgctggcccaggccgagggggagccctgctacatccgggacagtggggtggcccctacagaccctggccctgagtctgctgctgggcccccaacccacgaggtgctggtgacaggcactggtggcatccagtggtggccagtagaggaggaggtgaacaaggaggagggttctagtggcagcagtggcaggaacccccaagccagcctgtttgggaagaaggccaaggctcacaaggcagtcggccagccggcagacaggccgcgggagccactgtgggcctacttctgtgacttccgggacatcacccacgtggtgctgaaagagcactgtgtcagcatccaccggcaggacaacaagtgcctggagctgagcttgccttcccgggctgcggcgctgtccttcgtgtcgctggtggacggctatttccgcctgacggccgactccagccactacctgtgccacgaggtggctcccccacggctggtgatgagcatccgggatgggatccacggacccctgctggagccatttgtgcaggccaagctgcggcccgaggacggcctgtacctcattcactggagcaccagccacccctaccgcctgatcctcacagtggcccagcgtagccaggcaccagacggcatgcagagcttgcggctccgaaagttccccattgagcagcaggacggggccttcgtgctggagggctggggccggtccttccccagcgttcgggaacttggggctgccttgcagggctgcttgctgagggccggggatgactgcttctctctgcgtcgctgttgcctgccccaaccaggagaaacctccaatctcatcatcatgcggggggctcgggccagccccaggacactcaacctcagccagctcagcttccaccgggttgaccagaaggagatcacccagctgtcccacttgggccagggcacaaggaccaacgtgtatgagggccgcctgcgagtggagggcagcggggaccctgaggagggcaagatggatgacgaggaccccctcgtgcctggcagggaccgtgggcaggagctacgagtggtgctcaaagtgctggaccctagtcaccatgacatcgccctggccttctacgagacagccagcctcatgagccaggtctcccacacgcacctggccttcgtgcatggcgtctgtgtgcgcggccctgaaaatatcatggtgacagagtacgtggagcacggacccctggatgtgtggctgcggagggagcggggccatgtgcccatggcttggaagatggtggtggcccagcagctggccagcgccctcagctacctggagaacaagaacctggttcatggtaatgtgtgtggccggaacatcctgctggcccggctggggttggcagagggcaccagccccttcatcaagctgagtgatcctggcgtgggcctgggcgccctctccagggaggagcgggtggagaggatcccctggctggcccccgaatgcctaccaggtggggccaacagcctaagcaccgccatggacaagtgggggtttggcgccaccctcctggagatctgctttgacggagaggcccctctgcagagccgcagtccctccgagaaggagcatttctaccagaggcagcaccggctgcccgagccctcctgcccacagctggccacactcaccagccagtgtctgacctatgagccaacccagaggccatcattccgcaccatcctgcgtgacctcacccggctgcagccccacaatcttgctgacgtcttgactgtgaacccggactcaccggcgtcggaccctacggttttccacaagcgctatttgaaaaagatccgagatctgggcgagggtcacttcggcaaggtcagcttgtactgctacgatccgaccaacgacggcactggcgagatggtggcggtgaaagccctcaaggcagactgcggcccccagcaccgctcgggctggaagcaggagattgacattctgcgcacgctctaccacgagcacatcatcaagtacaagggctgctgcgaggaccaaggcgagaagtcgctgcagctggtcatggagtacgtgcccctgggcagcctccgagactacctgccccggcacagcatcgggctggcccagctgctgctcttcgcccagcagatctgcgagggcatggcctatctgcacgcgcagcactacatccaccgagacctagccgcgcgcaacgtgctgctggacaacgacaggctggtcaagatcggggactttggcctagccaaggccgtgcccgaaggccacgagtactaccgcgtgcgcgaggatggggacagccccgtgttctggtatgccccagagtgcctgaaggagtataagttctactatgcgtcagatgtctggtccttcggggtgaccctgtatgagctgctgacgcactgtgactccagccagagcccccccacgaaattccttgagctcataggcattgctcagggtcagatgacagttctgagactcactgagttgctggaacgaggggagaggctgccacggcccgacaaatgtccctgtgaggtctatcatctcatgaagaactgctgggagacagaggcgtcctttcgcccaaccttcgagaacctcatacccattctgaagacagtccatgagaagtaccaaggccaggccccttcagtgttcagcgtgtgctgaggcacaatggcagccctgcctgggaggactggaccaggcagtggctgcagagggagcctcctgctccctgctccaggatgaaaccaagagggggatgtcagcctcacccacaccgtgtgccttactcctgtctagagaccccacctctgtgaacttatttttctttcttggccgtgagcctaaccatgatcttgagggacccaacatttgtaggggcactaatccagcccttaaatcccccagcttccaaacttgaggcccaccatctccaccatctggtaataaactcatgttttctctgaaaaaaaaaaataatantca

SEQ ID NO: 76822 - DNA, 4328 bp, Homo sapiens
acaagcagtagctacccgcgggagcggggaggggtccgggttcgagcttgtgttcccccggaagggtgagtctggacgcgggcgcggaaggagcgcggccggaggtcctcaggaagaagccgcggggactggctgcgcttgacaggctgcacttggatgggagcacctggtgcctcgggactgctccgatgcccgggtctgtgctgaatgtgtaatatgcggaactatattgaaacattacaaccatcttttgatggcaacaccctgaggacctcccttttccagatggggaaactgaggcccagaattgctaagtggcttgcttgagttgacacagggagctccaggactcaccctcagctgagccacctgccgggagcatgcctctgcgccactgggggatggccaggggcagtaagcccgttggggatggagcccagcccatggctgccatgggaggcctgaaggtgcttctgcactgggctggtccaggcggcggggagccctgggtcactttcagtgagtcatcgctgacagctgaggaagtctgcatccacattgcacataaagttggtatcactcctccttgcttcaatctctttgccctcttcgatgctcaggcccaagtctggttgcccccaaaccacatcctagagatccccagagatgcaagcctgatgctatatttccgcataaggttttatttccggaactggcatggcatgaatcctcgggaaccggctgtgtaccgttgtgggcccccaggaaccgaggcatcctcagatcagacagcacaggggatgcaactcctggacccagcctcatttgagtacctctttgagcagggcaagcatgagtttgtgaatgacgtggcatcactgtgggagctgtcgaccgaggaggagatccaccactttaagaatgagagcctgggcatggcctttctgcacctctgtcacctcgctctccgccatggcatccccctggaggaggtggccaagaagaccagcttcaaggactgcatcccgcgctccttccgccggcatatccggcagcacagcgccctgacccggctgcgccttcggaacgtcttccgcaggttcctgcgggacttccagccgggccgactctcccagcagatggtcatggtcaaatacctagccacactcgagcggctggcaccccgcttcggcacagagcgtgtgcccgtgtgccacctgaggctgctggcccaggccgagggggagccctgctacatccgggacagtggggtggcccctacagaccctggccctgagtctgctgctgggcccccaacccacgaggtgctggtgacaggcactggtggcatccagtggtggccagtagaggaggaggtgaacaaggaggagggttctagtggcagcagtggcaggaacccccaagccagcctgtttgggaagaaggccaaggctcacaaggcagtcggccagccggcagacaggccgcgggagccactgtgggcctacttctgtgacttccgggacatcacccacgtggtgctgaaagagcactgtgtcagcatccaccggcaggacaacaagtgcctggagctgagcttgccttcccgggctgcggcgctgtccttcgtgtcgctggtggacggctatttccgcctgacggccgactccagccactacctgtgccacgaggtggctcccccacggctggtgatgagcatccgggatgggatccacggacccctgctggagccatttgtgcaggccaagctgcggcccgaggacggcctgtacctcattcactggagcaccagccacccctaccgcctgatcctcacagtggcccagcgtagccaggcaccagacggcatgcagagcttgcggctccgaaagttccccattgagcagcaggacggggccttcgtgctggagggctggggccggtccttccccagcgttcgggaacttggggctgccttgcagggctgcttgctgagggccggggatgactgcttctctctgcgtcgctgttgcctgccccaaccaggagaaacctccaatctcatcatcatgcggggggctcgggccagccccaggacactcaacctcagccagctcagcttccaccgggttgaccagaaggagatcacccagctgtcccacttgggccagggcacaaggaccaacgtgtatgagggccgcctgcgagtggagggcagcggggaccctgaggagggcaagatggatgacgaggaccccctcgtgcctggcagggaccgtgggcaggagctacgagtggtgctcaaagtgctggaccctagtcaccatgacatcgccctggccttctacgagacagccagcctcatgagccaggtctcccacacgcacctggccttcgtgcatggcgtctgtgtgcgcggccctgaaaatatcatggtgacagagtacgtggagcacggacccctggatgtgtggctgcggagggagcggggccatgtgcccatggcttggaagatggtggtggcccagcagctggccagcgccctcagctacctggagaacaagaacctggttcatggtaatgtgtgtggccggaacatcctgctggcccggctggggttggcagagggcaccagccccttcatcaagctgagtgatcctggcgtgggcctgggcgccctctccagggaggagcgggtggagaggatcccctggctggcccccgaatgcctaccaggtggggccaacagcctaagcaccgccatggacaagtgggggtttggcgccaccctcctggagatctgctttgacggagaggcccctctgcagagccgcagtccctccgagaaggagcatttctaccagaggcagcaccggctgcccgagccctcctgcccacagctggccacactcaccagccagtgtctgacctatgagccaacccagaggccatcattccgcaccatcctgcgtgacctcacccggctgcagccccacaatcttgctgacgtcttgactgtgaacccggactcaccggcgtcggaccctacggttttccacaagcgctatttgaaaaagatccgagatctgggcgagggtcacttcggcaaggtcagcttgtactgctacgatccgaccaacgacggcactggcgagatggtggcggtgaaagccctcaaggcagactgcggcccccagcaccgctcgggctggaagcaggagattgacattctgcgcacgctctaccacgagcacatcatcaagtacaagggctgctgcgaggaccaaggcgagaagtcgctgcagctggtcatggagtacgtgcccctgggcagcctccgagactacctgccccggcacagcatcgggctggcccagctgctgctcttcgcccagcagatctgcgagggcatggcctatctgcacgcgcagcactacatccaccgagacctagccgcgcgcaacgtgctgctggacaacgacaggctggtcaagatcggggactttggcctagccaaggccgtgcccgaaggccacgagtactaccgcgtgcgcgaggatggggacagccccgtgttctggtatgccccagagtgcctgaaggagtataagttctactatgcgtcagatgtctggtccttcggggtgaccctgtatgagctgctgacgcactgtgactccagccagagcccccccacgaaattccttgagctcataggcattgctcagggtcagatgacagttctgagactcactgagttgctggaacgaggggagaggctgccacggcccgacaaatgtccctgtgaggtgagacttcctttgtctttccctgaccccactatcctgctgtggagagggcagcccccaccagccctggtttttccttctaggtctatcatctcatgaagaactgctgggagacagaggcgtcctttcgcccaaccttcgagaacctcatacccattctgaagacagtccatgagaagtaccaaggccaggccccttcagtgttcagcgtgtgctgaggcacaatggcagccctgcctgggaggactggaccaggcagtggctgcagagggagcctcctgctccctgctccaggatgaaaccaagagggggatgtcagcctcacccacaccgtgtgccttactcctgtctagagaccccacctctgtgaacttatttttctttcttggccgtgagcctaaccatgatcttgagggacccaacatttgtaggggcactaatccagcccttaaatcccccagcttccaaacttgaggcccaccatctccaccatctggtaataaactcatgttttctctg

SEQ ID NO: 76823 - DNA, 1456 bp, Homo sapiens
aacccttcacctttaccctcaccctaatccgcgggagattgacattctgcgcacgctctaccacgagcacatcatcaagtacaagggctgctgcgaggaccaaggtgggcgggacccggcgagtcctagagacttgagggggcgtggttagagcgtgggtgtggccttgtgggcggggccagtctggcctagccaattagagactctcaaccccaggctgcagtacgcggttcttggcatctgggtgagcgtggctgggctgcctccttcccatctggggggtgctacctgctggggccaggatggacgggagccaccagcagctccctcaagtgagaatggggttctggatgggtccatcccacctgagaactgggtctagtgtgcgcgggtcttggccttccctcccgaccttggaggggctctgctgggctcaaggtaggcggtccccggcccgccctctatcgtcccccaccggggccgcccctctccgcggcaggcgagaagtcgctgcagctggtcatggagtacgtgcccctgggcagcctccgagactacctgccccggcacagcatcgggctggcccagctgctgctcttcgcccagcagatctgcgagggcatggcctatctgcacgcgcagcactacatccaccgagacctagccgcgcgcaacgtgctgctggacaacgacaggctggtcaagatcggggactttggcctagccaaggccgtgcccgaaggccacgagtactaccgcgtgcgcgaggatggggacagccccgtgttctggtatgccccagagtgcctgaaggagtataagttctactatgcgtcagatgtctggtccttcggggtgaccctgtatgagctgctgacgcactgtgactccagccagagcccccccacgaaattccttgagctcataggcattgctcagggtcagatgacagttctgagactcactgagttgctggaacgaggggagaggctgccacggcccgacaaatgtccctgtgaggtctatcatctcatgaagaactgctgggagacagaggcgtcctttcgcccaaccttcgagaacctcatacccattctgaagacagtccatgagaagtaccaaggccaggccccttcagtgttcagcgtgtgctgaggcacaatggcagccctgcctgggaggactggaccaggcagtggctgcagagggagcctcctgctccctgctccaggatgaaaccaagagggggatgtcagcctcacccacaccgtgtgccttactcctgtctagagaccccacctctgtgaacttatttttctttcttggccgtgagcctaaccatgatcttgagggacccaacatttgtaggggcactaatccagcccttaaatcccccagcttccaaacttgaggcccaccatctccaccatctggtaataaactcatgttttctctg

SEQ ID NO: 76824 - DNA, 4073 bp, Homo sapiens
acaagcagtagctacccgcgggagcggggaggggtccgggttcgagcttgtgttcccccggaagggtgagtctggacgcgggcgcggaaggagcgcggccggaggtcctcaggaagaagccgcggggactggctgcgcttgacaggctgcacttggatgggagcacctggtgcctcgggactgctccgatgcccgggtctgtgctgaatgtgtaatatgcggaactatattgaaacattacaaccatcttttgatggcaacaccctgaggacctcccttttccagatggggaaactgaggcccagaattgctaagtggcttgcttgagttgacacagggagctccaggactcaccctcagctgagccacctgccgggagcatgcctctgcgccactgggggatggccaggggcagtaagcccgttggggatggagcccagcccatggctgccatgggaggcctgaaggtgcttctgcactgggctggtccaggcggcggggagccctgggtcactttcagtgagtcatcgctgacagctgaggaagtctgcatccacattgcacataaagttggtatcactcctccttgcttcaatctctttgccctcttcgatgctcaggcccaagtctggttgcccccaaaccacatcctagagatccccagagatgcaagcctgatgctatatttccgcataaggttttatttccggaactggcatggcatgaatcctcgggaaccggctgtgtaccgttgtgggcccccaggaaccgaggcatcctcagatcagacagcacaggggatgcaactcctggacccagcctcatttgagtacctctttgagcagggcaagcatgagtttgtgaatgacgtggcatcactgtgggagctgtcgaccgaggaggagatccaccactttaagaatgagagcctgggcatggcctttctgcacctctgtcacctcgctctccgccatggcatccccctggaggaggtggccaagaagaccagcttcaaggactgcatcccgcgctccttccgccggcatatccggcagcacagcgccctgacccggctgcgccttcggaacgtcttccgcaggttcctgcgggacttccagccgggccgactctcccagcagatggtcatggtcaaatacctagccacactcgagcggctggcaccccgcttcggcacagagcgtgtgcccgtgtgccacctgaggctgctggcccaggccgagggggagccctgctacatccgggacagtggggtggcccctacagaccctggccctgagtctgctgctgggcccccaacccacgaggtgctggtgacaggcactggtggcatccagtggtggccagtagaggaggaggtgaacaaggaggagggttctagtggcagcagtggcaggaacccccaagccagcctgtttgggaagaaggccaaggctcacaaggcagtcggccagccggcagacaggccgcgggagccactgtgggcctacttctgtgacttccgggacatcacccacgtggtgctgaaagagcactgtgtcagcatccaccggcaggacaacaagtgcctggagctgagcttgccttcccgggctgcggcgctgtccttcgtgtcgctggtggacggctatttccgcctgacggccgactccagccactacctgtgccacgaggtggctcccccacggctggtgatgagcatccgggatgggatccacggacccctgctggagccatttgtgcaggccaagctgcggcccgaggacggcctgtacctcattcactggagcaccagccacccctaccgcctgatcctcacagtggcccagcgtagccaggcaccagacggcatgcagagcttgcggctccgaaagttccccattgagcagcaggacggggccttcgtgctggagggctggggccggtccttccccagcgttcgggaacttggggctgccttgcagggctgcttgctgagggccggggatgactgcttctctctgcgtcgctgttgcctgccccaaccaggagaaacctccaatctcatcatcatgcggggggctcgggccagccccaggacactcaacctcagccagctcagcttccaccgggttgaccagaaggagatcacccagctgtcccacttgggccagggcacaaggaccaacgtgtatgagggccgcctgcgagtggagggcagcggggaccctgaggagggcaagatggatgacgaggaccccctcgtgcctggcagggaccgtgggcaggagctacgagtggtgctcaaagtgctggaccctagtcaccatgacatcgccctggccttctacgagacagccagcctcatgagccaggtctcccacacgcacctggccttcgtgcatggcgtctgtgtgcgcggccctgaaaatatcatggtgacagagtacgtggagcacggacccctggatgtgtggctgcggagggagcggggccatgtgcccatggcttggaagatggtggtggcccagcagctggccagcgccctcagctacctggagaacaagaacctggttcatggtaatgtgtgtggccggaacatcctgctggcccggctggggttggcagagggcaccagccccttcatcaagctgagtgatcctggcgtgggcctgggcgccctctccagggaggagcgggtggagaggatcccctggctggcccccgaatgcctaccaggtggggccaacagcctaagcaccgccatggacaagtgggggtttggcgccaccctcctggagatctgctttgacggagaggcccctctgcagagccgcagtccctccgagaaggagcatttctaccagaggcagcaccggctgcccgagccctcctgcccacagctggccacactcaccagccagtgtctgacctatgagccaacccagaggccatcattccgcaccatcctgcgtgacctcacccggctgcagccccacaatcttgctgacgtcttgactgtgaacccggactcaccggcgtcggaccctacggttttccacaagcgctatttgaaaaagatccgagatctgggcgagggtcacttcggcaaggtcagcttgtactgctacgatccgaccaacgacggcactggcgagatggtggcggtgaaagccctcaaggcagactgcggcccccagcaccgctcgggctggaagcaggagattgacattctgcgcacgctctaccacgagcacatcatcaagtacaagggctgctgcgaggaccaaggcgagaagtcgctgcagctggtcatggagtacgtgcccctgggcagcctccgagactacctgccccggcacagcatcgggctggcccagctgctgctcttcgcccagcagatctgcgagggcatggcctatctgcacgcgcagcactacatccaccgagacctagccgcgcgcaacgtgctgctggacaacgacaggctggtcaagatcggggactttggcctagccaaggccgtgcccgaaggccacgagtactaccgcgtgcgcgaggatggggacagccccgtgttctggtatgccccagagtgcctgaaggagtataagttctactatgcgtcagatgtctggtccttcggggtgaccctgtatgagctgctgacgcactgtgactccagccagagcccccccacggtgagagccaggcccgcagccccaccgggagtttgctagagcaattagaaaggcataggctgggccaggcgcggtggctcaagcctgtaatcccagcactttgggaggccgaggcgggcggatcacgaggtcaggagatcgagaccaacctggctaacacggtgaaacccgtctctactaaaaatacaaaaaaaattagccaggcgtggtggcgggcgcctgtagtcccagctactcaggagactgaggcaggagaatggcatgaacccgggaggcggagcttgcagtgagccgagatctcccgactgcactccagctgggtgacagagcgagactccgtctaagacaggacaggacggagagagagagaaagaa

SEQ ID NO: 76825 - DNA, 3500 bp, Homo sapiens
acaagcagtagctacccgcgggagcggggaggggtccgggttcgagcttgtgttcccccggaagggtgagtctggacgcgggcgcggaaggagcgcggccggaggtcctcaggaagaagccgcggggactggctgcgcttgacaggctgcacttggatgggagcacctggtgcctcgggactgctccgatgcccgggtctgtgctgaatgtgtaatatgcggaactatattgaaacattacaaccatcttttgatggcaacaccctgaggacctcccttttccagatggggaaactgaggcccagaattgctaagtggcttgcttgagttgacacagggagctccaggactcaccctcagctgagccacctgccgggagcatgcctctgcgccactgggggatggccaggggcagtaagcccgttggggatggagcccagcccatggctgccatgggaggcctgaaggtgcttctgcactgggctggtccaggcggcggggagccctgggtcactttcagtgagtcatcgctgacagctgaggaagtctgcatccacattgcacataaagttggtatcactcctccttgcttcaatctctttgccctcttcgatgctcaggcccaagtctggttgcccccaaaccacatcctagagatccccagagatgcaagcctgatgctatatttccgcataaggttttatttccggaactggcatggcatgaatcctcgggaaccggctgtgtaccgttgtgggcccccaggaaccgaggcatcctcagatcagacagcacaggggatgcaactcctggacccagcctcatttgagtacctctttgagcagggcaagcatgagtttgtgaatgacgtggcatcactgtgggagctgtcgaccgaggaggagatccaccactttaagaatgagagcctgggcatggcctttctgcacctctgtcacctcgctctccgccatggcatccccctggaggaggtggccaagaagaccagcttcaaggactgcatcccgcgctccttccgccggcatatccggcagcacagcgccctgacccggctgcgccttcggaacgtcttccgcaggttcctgcgggacttccagccgggccgactctcccagcagatggtcatggtcaaatacctagccacactcgagcggctggcaccccgcttcggcacagagcgtgtgcccgtgtgccacctgaggctgctggcccaggccgagggggagccctgctacatccgggacagtggggtggcccctacagaccctggccctgagtctgctgctgggcccccaacccacgaggtgctggtgacaggcactggtggcatccagtggtggccagtagaggaggaggtgaacaaggaggagggttctagtggcagcagtggcaggaacccccaagccagcctgtttgggaagaaggccaaggctcacaaggcagtcggccagccggcagacaggccgcgggagccactgtgggcctacttctgtgacttccgggacatcacccacgtggtgctgaaagagcactgtgtcagcatccaccggcaggacaacaagtgcctggagctgagcttgccttcccgggctgcggcgctgtccttcgtgtcgctggtggacggctatttccgcctgacggccgactccagccactacctgtgccacgaggtggctcccccacggctggtgatgagcatccgggatgggatccacggacccctgctggagccatttgtgcaggccaagctgcggcccgaggacggcctgtacctcattcactggagcaccagccacccctaccgcctgatcctcacagtggcccagcgtagccaggcaccagacggcatgcagagcttgcggctccgaaagttccccattgagcagcaggacggggccttcgtgctggagggctggggccggtccttccccagcgttcgggaacttggggctgccttgcagggctgcttgctgagggccggggatgactgcttctctctgcgtcgctgttgcctgccccaaccaggagaaacctccaatctcatcatcatgcggggggctcgggccagccccaggacactcaacctcagccagctcagcttccaccgggttgaccagaaggagatcacccagctgtcccacttgggccagggcacaaggaccaacgtgtatgagggccgcctgcgagtggagggcagcggggaccctgaggagggcaagatggatgacgaggaccccctcgtgcctggcagggaccgtgggcaggagctacgagtggtgctcaaagtgctggaccctagtcaccatgacatcgccctggccttctacgagacagccagcctcatgagccaggtctcccacacgcacctggccttcgtgcatggcgtctgtgtgcgcggccctgaaaatatcatggtgacagagtacgtggagcacggacccctggatgtgtggctgcggagggagcggggccatgtgcccatggcttggaagatggtggtggcccagcagctggccagcgccctcagctacctggagaacaagaacctggttcatggtaatgtgtgtggccggaacatcctgctggcccggctggggttggcagagggcaccagccccttcatcaagctgagtgatcctggcgtgggcctgggcgccctctccagggaggagcgggtggagaggatcccctggctggcccccgaatgcctaccaggtggggccaacagcctaagcaccgccatggacaagtgggggtttggcgccaccctcctggagatctgctttgacggagaggcccctctgcagagccgcagtccctccgagaaggagcatttctaccagaggcagcaccggctgcccgagccctcctgcccacagctggccacactcaccagccagtgtctgacctatgagccaacccagaggccatcattccgcaccatcctgcgtgacctcacccggctgcagccccacaatcttgctgacgtcttgactgtgaacccggactcaccggcgtcggaccctacggttttccacaagcgctatttgaaaaagatccgagatctgggcgagggtcacttcggcaaggtcagcttgtactgctacgatccgaccaacgacggcactggcgagatggtggcggtgaaagccctcaaggcagactgcggcccccagcaccgctcgggctggaagcaggagattgacattctgcgcacgctctaccacgagcacatcatcaagtacaagggctgctgcgaggaccaaggcgagaagtcgctgcagctggtcatggagtacgtgcccctgggcagcctccgagactacctgccccggcacagctggcagtagccctcctctctggctgccccactggccacatctctggcctgctagattaaagctgtaaagtcaccctagccatcattctactatcaacattactaataagtggctcctttaacctctccacccttatca

SEQ ID NO: 76826 - DNA, 4525 bp, Homo sapiens
acaagcagtagctacccgcgggagcggggaggggtccgggttcgagcttgtgttcccccggaagggtgagtctggacgcgggcgcggaaggagcgcggccggaggtcctcaggaagaagccgcggggactggctgcgcttgacaggctgcacttggatgggagcacctggtgcctcgggactgctccgatgcccgggtctgtgctgaatgtgtaatatgcggaactatattgaaacattacaaccatcttttgatggcaacaccctgaggacctcccttttccagatggggaaactgaggcccagaattgctaagtggcttgcttgagttgacacagggagctccaggactcaccctcagctgagccacctgccgggagcatgcctctgcgccactgggggatggccaggggcagtaagcccgttggggatggagcccagcccatggctgccatgggaggcctgaaggtgcttctgcactgggctggtccaggcggcggggagccctgggtcactttcagtgagtcatcgctgacagctgaggaagtctgcatccacattgcacataaagttggtatcactcctccttgcttcaatctctttgccctcttcgatgctcaggcccaagtctggttgcccccaaaccacatcctagagatccccagagatgcaagcctgatgctatatttccgcataaggttttatttccggaactggcatggcatgaatcctcgggaaccggctgtgtaccgttgtgggcccccaggaaccgaggcatcctcagatcagacagcacaggggatgcaactcctggacccagcctcatttgagtacctctttgagcagggcaagcatgagtttgtgaatgacgtggcatcactgtgggagctgtcgaccgaggaggagatccaccactttaagaatgagagcctgggcatggcctttctgcacctctgtcacctcgctctccgccatggcatccccctggaggaggtggccaagaagaccagcttcaaggactgcatcccgcgctccttccgccggcatatccggcagcacagcgccctgacccggctgcgccttcggaacgtcttccgcaggttcctgcgggacttccagccgggccgactctcccagcagatggtcatggtcaaatacctagccacactcgagcggctggcaccccgcttcggcacagagcgtgtgcccgtgtgccacctgaggctgctggcccaggccgagggggagccctgctacatccgggacagtggggtggcccctacagaccctggccctgagtctgctgctgggcccccaacccacgaggtgctggtgacaggcactggtggcatccagtggtggccagtagaggaggaggtgaacaaggaggagggttctagtggcagcagtggcaggaacccccaagccagcctgtttgggaagaaggccaaggctcacaaggcagtcggccagccggcagacaggccgcgggagccactgtgggcctacttctgtgacttccgggacatcacccacgtggtgctgaaagagcactgtgtcagcatccaccggcaggacaacaagtgcctggagctgagcttgccttcccgggctgcggcgctgtccttcgtgtcgctggtggacggctatttccgcctgacggccgactccagccactacctgtgccacgaggtggctcccccacggctggtgatgagcatccgggatgggatccacggacccctgctggagccatttgtgcaggccaagctgcggcccgaggacggcctgtacctcattcactggagcaccagccacccctaccgcctgatcctcacagtggcccagcgtagccaggcaccagacggcatgcagagcttgcggctccgaaagttccccattgagcagcaggacggggccttcgtgctggagggctggggccggtccttccccagcgttcgggaacttggggctgccttgcagggctgcttgctgagggccggggatgactgcttctctctgcgtcgctgttgcctgccccaaccaggagaaacctccaatctcatcatcatgcggggggctcgggccagccccaggacactcaacctcagccagctcagcttccaccgggttgaccagaaggagatcacccagctgtcccacttgggccagggcacaaggaccaacgtgtatgagggccgcctgcgagtggagggcagcggggaccctgaggagggcaagatggatgacgaggaccccctcgtgcctggcagggaccgtgggcaggagctacgagtggtgctcaaagtgctggaccctagtcaccatgacatcgccctggccttctacgagacagccagcctcatgagccaggtctcccacacgcacctggccttcgtgcatggcgtctgtgtgcgcggccctgaaaatatcatggtgacagagtacgtggagcacggacccctggatgtgtggctgcggagggagcggggccatgtgcccatggcttggaagatggtggtggcccagcagctggccagcgccctcagctacctggagaacaagaacctggttcatggtaatgtgtgtggccggaacatcctgctggcccggctggggttggcagagggcaccagccccttcatcaagctgagtgatcctggcgtgggcctgggcgccctctccagggaggagcgggtggagaggatcccctggctggcccccgaatgcctaccaggtggggccaacagcctaagcaccgccatggacaagtgggggtttggcgccaccctcctggagatctgctttgacggagaggcccctctgcagagccgcagtccctccgagaaggagcatttctaccagaggcagcaccggctgcccgagccctcctgcccacagctggccacactcaccagccagtgtctgacctatgagccaacccagaggccatcattccgcaccatcctgcgtgacctcacccggctgcagccccacaatcttgctgacgtcttgactgtgaacccggactcaccggcgtcggaccctacggttttccacaagcgctatttgaaaaagatccgagatctgggcgagggtcacttcggcaaggtcagcttgtactgctacgatccgaccaacgacggcactggcgagatggtggcggtgaaagccctcaaggcagactgcggcccccagcaccgctcgggctggaagcaggagattgacattctgcgcacgctctaccacgagcacatcatcaagtacaagggctgctgcgaggaccaaggcgagaagtcgctgcagctggtcatggagtacgtgcccctgggcagcctccgagactacctgccccggcacagcatcgggctggcccagctgctgctcttcgcccagcagatctgcgagggcatggcctatctgcacgcgcagcactacatccaccgagacctagccgcgcgcaacgtgctgctggacaacgacaggctggtcaagatcggggactttggcctagccaaggccgtgcccgaaggccacgagtactaccgcgtgcgcgaggatggggacagccccgtgttctggtatgccccagagtgcctgaaggagtataagttctactatgcgtcagatgtctggtccttcggggtgaccctgtatgagctgctgacgcactgtgactccagccagagcccccccacgaaattccttgagctcataggcattgctcagggtcagatgacagttctgagactcactgagttgctggaacgaggggagaggctgccacggcccgacaaatgtccctgtgaggtctatcatctcatgaagaactgctgggagacagaggcgtcctttcgcccaaccttcgagaacctcatacccattctgaagacagtccatgagaagtaccaaggccaggccccttcagtgttcagcgtgtgctgaggcacaatggcagccctgcctgggaggactggaccaggcagtggctgcagagggagcctcctgctccctgctccaggatgaaaccaagagggggatgtcagcctcacccacaccgtgtgccttactcctgtctagagaccccacctctgtgaacttatttttctttcttggccgtgagcctaaccatgatcttgagggacccaacatttgtaggggcactaatccagcccttaaatcccccagcttccaaacttgaggcccaccatctccaccatctggtaataaactcatgttttctctgaaaacacaacccccccccccacacccacacaaccacactcttcgccagcgcacaaggccaccgacaacgctcttccaaaccccttccccgggccccgcggcccaccggcacacaacacgtgcacaagaccggcccccagaaaaccggcgacacaccacaaggccaggaaccccagcaaacacacactgcccggcgacacaacacgccacacacacccacaaggacaccccacggccaccggggatataaaacgggtccacgagaccgaataatagccggt

SEQ ID NO: 76827 - DNA, 5443 bp, Homo sapiens
acaagcagtagctacccgcgggagcggggaggggtccgggttcgagcttgtgttcccccggaagggtgagtctggacgcgggcgcggaaggagcgcggccggaggtcctcaggaagaagccgcggggactggctgcgcttgacaggctgcacttggatgggagcacctggtgcctcgggactgctccgatgcccgggtctgtgctgaatgtgtaatatgcggaactatattgaaacattacaaccatcttttgatggcaacaccctgaggacctcccttttccagatggggaaactgaggcccagaattgctaagtggcttgcttgagttgacacagggagctccaggactcaccctcagctgagccacctgccgggagcatgcctctgcgccactgggggatggccaggggcagtaagcccgttggggatggagcccagcccatggctgccatgggaggcctgaaggtgcttctgcactgggctggtccaggcggcggggagccctgggtcactttcagtgagtcatcgctgacagctgaggaagtctgcatccacattgcacataaagttggtatcactcctccttgcttcaatctctttgccctcttcgatgctcaggcccaagtctggttgcccccaaaccacatcctagagatccccagagatgcaagcctgatgctatatttccgcataaggttttatttccggaactggcatggcatgaatcctcgggaaccggctgtgtaccgttgtgggcccccaggaaccgaggcatcctcagatcagacagcacaggggatgcaactcctggacccagcctcatttgagtacctctttgagcagggcaagcatgagtttgtgaatgacgtggcatcactgtgggagctgtcgaccgaggaggagatccaccactttaagaatgagagcctgggcatggcctttctgcacctctgtcacctcgctctccgccatggcatccccctggaggaggtggccaagaagaccagcttcaaggactgcatcccgcgctccttccgccggcatatccggcagcacagcgccctgacccggctgcgccttcggaacgtcttccgcaggttcctgcgggacttccagccgggccgactctcccagcagatggtcatggtcaaatacctagccacactcgagcggctggcaccccgcttcggcacagagcgtgtgcccgtgtgccacctgaggctgctggcccaggccgagggggagccctgctacatccgggacagtggggtggcccctacagaccctggccctgagtctgctgctgggcccccaacccacgaggtgctggtgacaggcactggtggcatccagtggtggccagtagaggaggaggtgaacaaggaggagggttctagtggcagcagtggcaggaacccccaagccagcctgtttgggaagaaggccaaggctcacaaggcagtcggccagccggcagacaggccgcgggagccactgtgggcctacttctgtgacttccgggacatcacccacgtggtgctgaaagagcactgtgtcagcatccaccggcaggacaacaagtgcctggagctgagcttgccttcccgggctgcggcgctgtccttcgtgtcgctggtggacggctatttccgcctgacggccgactccagccactacctgtgccacgaggtggctcccccacggctggtgatgagcatccgggatgggatccacggacccctgctggagccatttgtgcaggccaagctgcggcccgaggacggcctgtacctcattcactggagcaccagccacccctaccgcctgatcctcacagtggcccagcgtagccaggcaccagacggcatgcagagcttgcggctccgaaagttccccattgagcagcaggacggggccttcgtgctggagggctggggccggtccttccccagcgttcgggaacttggggctgccttgcagggctgcttgctgagggccggggatgactgcttctctctgcgtcgctgttgcctgccccaaccaggagaaacctccaatctcatcatcatgcggggggctcgggccagccccaggacactcaacctcagccagctcagcttccaccgggttgaccagaaggagatcacccagctgtcccacttgggccagggcacaaggaccaacgtgtatgagggccgcctgcgagtggagggcagcggggaccctgaggagggcaagatggatgacgaggaccccctcgtgcctggcagggaccgtgggcaggagctacgagtggtgctcaaagtgctggaccctagtcaccatgacatcgccctggccttctacgagacagccagcctcatgagccaggtctcccacacgcacctggccttcgtgcatggcgtctgtgtgcgcggccctgaaaatatcatggtgacagagtacgtggagcacggacccctggatgtgtggctgcggagggagcggggccatgtgcccatggcttggaagatggtggtggcccagcagctggccagcgccctcagctacctggagaacaagaacctggttcatggtaatgtgtgtggccggaacatcctgctggcccggctggggttggcagagggcaccagccccttcatcaagctgagtgatcctggcgtgggcctgggcgccctctccagggaggagcgggtggagaggatcccctggctggcccccgaatgcctaccaggtggggccaacagcctaagcaccgccatggacaagtgggggtttggcgccaccctcctggagatctgctttgacggagaggcccctctgcagagccgcagtccctccgagaaggagcatttctaccagaggcagcaccggctgcccgagccctcctgcccacagctggccacactcaccagccagtgtctgacctatgagccaacccagaggccatcattccgcaccatcctgcgtgacctcacccggctgcagccccacaatcttgctgacgtcttgactgtgaacccggactcaccggcgtcggaccctacggttttccacaagcgctatttgaaaaagatccgagatctgggcgagggtcacttcggcaaggtcagcttgtactgctacgatccgaccaacgacggcactggcgagatggtggcggtgaaagccctcaaggcagactgcggcccccagcaccgctcgggctggaagcaggagattgacattctgcgcacgctctaccacgagcacatcatcaagtacaagggctgctgcgaggaccaaggtgggcgggacccggcgagtcctagagacttgagggggcgtggttagagcgtgggtgtggccttgtgggcggggccagtctggcctagccaattagagactctcaaccccaggctgcagtacgcggttcttggcatctgggtgagcgtggctgggctgcctccttcccatctggggggtgctacctgctggggccaggatggacgggagccaccagcagctccctcaagtgagaatggggttctggatgggtccatcccacctgagaactgggtctagtgtgcgcgggtcttggccttccctcccgaccttggaggggctctgctgggctcaaggtaggcggtccccggcccgccctctatcgtcccccaccggggccgcccctctccgcggcaggcgagaagtcgctgcagctggtcatggagtacgtgcccctgggcagcctccgagactacctgccccggcacagcatcgggctggcccagctgctgctcttcgcccagcagatctgcgaggttggtcggccccgcccctgcttctggagcttgccccttcctcttcagcttgggctggcctgagcgatccggtgcagtctgctctcacgctccgcccctgctcgtttgcccaggctgtcttgtccttgcactgacctccgaactgtttggcttgcttggccacaccccctcctcccaagggaccacgcacagccggctcggcccctcccaactcgccctcctgcccagctttgctcgtctagccccgtccctgctttctggctcagcctccttttgcttggtgccacgtgccatccggccctctccagcggccgggtagccaccggcctgacctgactgtcccccagccctcctggctgctcaggtcctgccgccgcccccggccgaaccccgccccactgaaactcacgagccctgccccgtccccagggcatggcctatctgcacgcgcagcactacatccaccgagacctagccgcgcgcaacgtgctgctggacaacgacaggctggtcaagatcggggactttggcctagccaaggccgtgcccgaaggccacgagtactaccgcgtgcgcgaggatggggacagccccgtgttctggtgaccaggcggggtgcagtctgagggggtgctggggtcacttggaacaggcagggtggagtagacggatgctgggtatcatgatagggcatgatcccagtgaagcgcggcggggcctagcggtgcgggggtggggcctatggaggcaaggggcggtgtatagagtgcggcttggcctggtgggcggggttaacccggcctagccaatgagcggcctagccaatgagcatatcaccccgctcaggctgcgctcttaagggtgggtcccaactgagcccagagggtccttcagtctcaggtgagggcttcagcctggtctgatccccaagccctcagtgcagccccccgtggcctgagtgcccccctccccctaggtatgccccagagtgcctgaaggagtataagttctactatgcgtcagatgtctggtccttcggggtgaccctgtatgagctgctgacgcactgtgactccagccagagcccccccacgaaattccttgagctcataggcattgctcagggtcagatgacagttctgagactcactgagttgctggaacgaggggagaggctgccacggcccgacaaatgtccctgtgaggtctatcatctcatgaagaactgctgggagacagaggcgtcctttcgcccaaccttcgagaacctcatacccattctgaagacagtccatgagaagtaccaaggccaggccccttcagtgttcagcgtgtgctgaggcacaatggcagccctgcctgggaggactggaccaggcagtggctgcagagggagcctcctgctccctgctccaggatgaaaccaagagggggatgtcagcctcacccacaccgtgtgccttactcctgtctagagaccccacctctgtgaacttatttttctttcttggccgtgagcctaaccatgatcttgagggacccaacatttgtaggggcactaatccagcccttaaatcccccagcttccaaacttgaggcccaccatctccaccatctggtaataaactcatgttttctctg

SEQ ID NO: 76828 - DNA, 1837 bp, Homo sapiens
cctcggcctcccaggtgctgggattacaggcatgagccacagtgccggccccagaagaggttttatctaagtgtagaattatgccaacaagcctggctaggaagggcagcctaggcagagtgcatggcctgtgcaaaggctgaggcttcagtgtattaaggagctgtggtctacaggaggggcaggagggaagcttggggcaggaggctgactgtgacactccagctctgcataatcactggacctgggtcccagtcctggttctacggctgtgagcacgtcctcccactttgtggagcctcagttgcctcatctgtataatggaactgataagagcgggcacctggcggtccactctggggacttgactctgcctcttggggaacgggttgggggcgaggggaggatgttgactcctctgggtccctttcccaacagaaggagcatttctaccagaggcagcaccggctgcccgagccctcctgcccacagctggccacactcaccagccagtgtctgacctatgagccaacccagaggccatcattccgcaccatcctgcgtgacctcacccggctgcagccccacaatcttgctgacgtcttgactgtgaacccggactcaccggcgtcggaccctacggttttccacaagcgctatttgaaaaagatccgagatctgggcgagggtcacttcggcaaggtcagcttgtactgctacgatccgaccaacgacggcactggcgagatggtggcggtgaaagccctcaaggcagactgcggcccccagcaccgctcgggctggaagcaggagattgacattctgcgcacgctctaccacgagcacatcatcaagtacaagggctgctgcgaggaccaaggcgagaagtcgctgcagctggtcatggagtacgtgcccctgggcagcctccgagactacctgccccggcacagcatcgggctggcccagctgctgctcttcgcccagcagatctgcgagggcatggcctatctgcacgcgcagcactacatccaccgagacctagccgcgcgcaacgtgctgctggacaacgacaggctggtcaagatcggggactttggcctagccaaggccgtgcccgaaggccacgagtactaccgcgtgcgcgaggatggggacagccccgtgttctggtatgccccagagtgcctgaaggagtataagttctactatgcgtcagatgtctggtccttcggggtgaccctgtatgagctgctgacgcactgtgactccagccagagcccccccacgaaattccttgagctcataggcattgctcagggtcagatgacagttctgagactcactgagttgctggaacgaggggagaggctgccacggcccgacaaatgtccctgtgaggtctatcatctcatgaagaactgctgggagacagaggcgtcctttcgcccaaccttcgagaacctcatacccattctgaagacagtccatgagaagtaccaaggccaggccccttcagtgttcagcgtgtgctgaggcacaatggcagccctgcctgggaggactggaccaggcagtggctgcagagggagcctcctgctccctgctccaggatgaaaccaagagggggatgtcagcctcacccacaccgtgtgccttactcctgtctagagaccccacctctgtgaacttatttttctttcttggccgtgagcctaaccatgatcttgagggacccaacatttgtaggggcactaatccagcccttaaatcccccagcttccaaacttgaggcccaccatctccaccatctggtaataaactcatgttttctctg

SEQ ID NO: 76829 - DNA, 4134 bp, Homo sapiens
acaagcagtagctacccgcgggagcggggaggggtccgggttcgagcttgtgttcccccggaagggtgagtctggacgcgggcgcggaaggagcgcggccggaggtcctcaggaagaagccgcggggactggctgcgcttgacaggctgcacttggatgggagcacctggtgcctcgggactgctccgatgcccgggtctgtgctgaatgtgtaatatgcggaactatattgaaacattacaaccatcttttgatggcaacaccctgaggacctcccttttccagatggggaaactgaggcccagaattgctaagtggcttgcttgagttgacacagggagctccaggactcaccctcagctgagccacctgccgggagcatgcctctgcgccactgggggatggccaggggcagtaagcccgttggggatggagcccagcccatggctgccatgggaggcctgaaggtgcttctgcactgggctggtccaggcggcggggagccctgggtcactttcagtgagtcatcgctgacagctgaggaagtctgcatccacattgcacataaagttggtatcactcctccttgcttcaatctctttgccctcttcgatgctcaggcccaagtctggttgcccccaaaccacatcctagagatccccagagatgcaagcctgatgctatatttccgcataaggttttatttccggaactggcatggcatgaatcctcgggaaccggctgtgtaccgttgtgggcccccaggaaccgaggcatcctcagatcagacagcacaggggatgcaactcctggacccagcctcatttgagtacctctttgagcagggcaagcatgagtttgtgaatgacgtggcatcactgtgggagctgtcgaccgaggaggagatccaccactttaagaatgagagcctgggcatggcctttctgcacctctgtcacctcgctctccgccatggcatccccctggaggaggtggccaagaagaccagcttcaaggactgcatcccgcgctccttccgccggcatatccggcagcacagcgccctgacccggctgcgccttcggaacgtcttccgcaggttcctgcgggacttccagccgggccgactctcccagcagatggtcatggtcaaatacctagccacactcgagcggctggcaccccgcttcggcacagagcgtgtgcccgtgtgccacctgaggctgctggcccaggccgagggggagccctgctacatccgggacagtggggtggcccctacagaccctggccctgagtctgctgctgggcccccaacccacgaggtgctggtgacaggcactggtggcatccagtggtggccagtagaggaggaggtgaacaaggaggagggttctagtggcagcagtggcaggaacccccaagccagcctgtttgggaagaaggccaaggctcacaaggcagtcggccagccggcagacaggccgcgggagccactgtgggcctacttctgtgacttccgggacatcacccacgtggtgctgaaagagcactgtgtcagcatccaccggcaggacaacaagtgcctggagctgagcttgccttcccgggctgcggcgctgtccttcgtgtcgctggtggacggctatttccgcctgacggccgactccagccactacctgtgccacgaggtggctcccccacggctggtgatgagcatccgggatgggatccacggacccctgctggagccatttgtgcaggccaagctgcggcccgaggacggcctgtacctcattcactggagcaccagccacccctaccgcctgatcctcacagtggcccagcgtagccaggcaccagacggcatgcagagcttgcggctccgaaagttccccattgagcagcaggacggggccttcgtgctggagggctggggccggtccttccccagcgttcgggaacttggggctgccttgcagggctgcttgctgagggccggggatgactgcttctctctgcgtcgctgttgcctgccccaaccaggagaaacctccaatctcatcatcatgcggggggctcgggccagccccaggacactcaacctcagccagctcagcttccaccgggttgaccagaaggagatcacccagctgtcccacttgggccagggcacaaggaccaacgtgtatgagggccgcctgcgagtggagggcagcggggaccctgaggagggcaagatggatgacgaggaccccctcgtgcctggcagggaccgtgggcaggagctacgagtggtgctcaaagtgctggaccctagtcaccatgacatcgccctggccttctacgagacagccagcctcatgagccaggtctcccacacgcacctggccttcgtgcatggcgtctgtgtgcgcggccctgaaaatatcatggtgacagagtacgtggagcacggacccctggatgtgtggctgcggagggagcggggccatgtgcccatggcttggaagatggtggtggcccagcagctggccagcgccctcagctacctggagaacaagaacctggttcatggtaatgtgtgtggccggaacatcctgctggcccggctggggttggcagagggcaccagccccttcatcaagctgagtgatcctggcgtgggcctgggcgccctctccagggaggagcgggtggagaggatcccctggctggcccccgaatgcctaccaggtggggccaacagcctaagcaccgccatggacaagtgggggtttggcgccaccctcctggagatctgctttgacggagaggcccctctgcagagccgcagtccctccgagaaggagcatttctaccagaggcagcaccggctgcccgagccctcctgcccacagctggccacactcaccagccagtgtctgacctatgagccaacccagaggccatcattccgcaccatcctgcgtgacctcacccggctgcagccccacaatcttgctgacgtcttgactgtgaacccggactcaccggcgtcggaccctacggttttccacaagcgctatttgaaaaagatccgagatctgggcgagggtcacttcggcaaggtcagcttgtactgctacgatccgaccaacgacggcactggcgagatggtggcggtgaaagccctcaaggcagactgcggcccccagcaccgctcgggctggaagcaggagattgacattctgcgcacgctctaccacgagcacatcatcaagtacaagggctgctgcgaggaccaaggcgagaagtcgctgcagctggtcatggagtacgtgcccctgggcagcctccgagactacctgccccggcacagcatcgggctggcccagctgctgctcttcgcccagcagatctgcgagggcatggcctatctgcacgcgcagcactacatccaccgagacctagccgcgcgcaacgtgctgctggacaacgacaggctggtcaagatcggggactttggcctagccaaggccgtgcccgaaggccacgagtactaccgcgtgcgcgaggatggggacagccccgtgttctggtatgccccagagtgcctgaaggagtataagttctactatgcgtcagatgtctggtccttcggggtgaccctgtatgagctgctgacgcactgtgactccagccagagcccccccacggtctatcatctcatgaagaactgctgggagacagaggcgtcctttcgcccaaccttcgagaacctcatacccattctgaagacagtccatgagaagtaccaaggccaggccccttcagtgttcagcgtgtgctgaggcacaatggcagccctgcctgggaggactggaccaggcagtggctgcagagggagcctcctgctccctgctccaggatgaaaccaagagggggatgtcagcctcacccacaccgtgtgccttactcctgtctagagaccccacctctgtgaacttatttttctttcttggccgtgagcctaaccatgatcttgagggacccaacatttgtaggggcactaatccagcccttaaatcccccagcttccaaacttgaggcccaccatctccaccatctggtaataaactcatgttttctctg

SEQ ID NO: 76830 - DNA, 4840 bp, Homo sapiens
acaagcagtagctacccgcgggagcggggaggggtccgggttcgagcttgtgttcccccggaagggtgagtctggacgcgggcgcggaaggagcgcggccggaggtcctcaggaagaagccgcggggactggctgcgcttgacaggctgcacttggatgggagcacctggtgcctcgggactgctccgatgcccgggtctgtgctgaatgtgtaatatgcggaactatattgaaacattacaaccatcttttgatggcaacaccctgaggacctcccttttccagatggggaaactgaggcccagaattgctaagtggcttgcttgagttgacacagggagctccaggactcaccctcagctgagccacctgccgggagcatgcctctgcgccactgggggatggccaggggcagtaagcccgttggggatggagcccagcccatggctgccatgggaggcctgaaggtgcttctgcactgggctggtccaggcggcggggagccctgggtcactttcagtgagtcatcgctgacagctgaggaagtctgcatccacattgcacataaagttggtatcactcctccttgcttcaatctctttgccctcttcgatgctcaggcccaagtctggttgcccccaaaccacatcctagagatccccagagatgcaagcctgatgctatatttccgcataaggttttatttccggaactggcatggcatgaatcctcgggaaccggctgtgtaccgttgtgggcccccaggaaccgaggcatcctcagatcagacagcacaggggatgcaactcctggacccagcctcatttgagtacctctttgagcagggcaagcatgagtttgtgaatgacgtggcatcactgtgggagctgtcgaccgaggaggagatccaccactttaagaatgagagcctgggcatggcctttctgcacctctgtcacctcgctctccgccatggcatccccctggaggaggtggccaagaagaccagcttcaaggactgcatcccgcgctccttccgccggcatatccggcagcacagcgccctgacccggctgcgccttcggaacgtcttccgcaggttcctgcgggacttccagccgggccgactctcccagcagatggtcatggtcaaatacctagccacactcgagcggctggcaccccgcttcggcacagagcgtgtgcccgtgtgccacctgaggctgctggcccaggccgagggggagccctgctacatccgggacagtggggtggcccctacagaccctggccctgagtctgctgctgggcccccaacccacgaggtgctggtgacaggcactggtggcatccagtggtggccagtagaggaggaggtgaacaaggaggagggttctagtggcagcagtggcaggaacccccaagccagcctgtttgggaagaaggccaaggctcacaaggcagtcggccagccggcagacaggccgcgggagccactgtgggcctacttctgtgacttccgggacatcacccacgtggtgctgaaagagcactgtgtcagcatccaccggcaggacaacaagtgcctggagctgagcttgccttcccgggctgcggcgctgtccttcgtgtcgctggtggacggctatttccgcctgacggccgactccagccactacctgtgccacgaggtggctcccccacggctggtgatgagcatccgggatgggatccacggacccctgctggagccatttgtgcaggccaagctgcggcccgaggacggcctgtacctcattcactggagcaccagccacccctaccgcctgatcctcacagtggcccagcgtagccaggcaccagacggcatgcagagcttgcggctccgaaagttccccattgagcagcaggacggggccttcgtgctggagggctggggccggtccttccccagcgttcgggaacttggggctgccttgcagggctgcttgctgagggccggggatgactgcttctctctgcgtcgctgttgcctgccccaaccaggagaaacctccaatctcatcatcatgcggggggctcgggccagccccaggacactcaacctcagccagctcagcttccaccgggttgaccagaaggagatcacccagctgtcccacttgggccagggcacaaggaccaacgtgtatgagggccgcctgcgagtggagggcagcggggaccctgaggagggcaagatggatgacgaggaccccctcgtgcctggcagggaccgtgggcaggagctacgagtggtgctcaaagtgctggaccctagtcaccatgacatcgccctggccttctacgagacagccagcctcatgagccaggtctcccacacgcacctggccttcgtgcatggcgtctgtgtgcgcggccctgaaaatatcatggtgacagagtacgtggagcacggacccctggatgtgtggctgcggagggagcggggccatgtgcccatggcttggaagatggtggtggcccagcagctggccagcgccctcagctacctggagaacaagaacctggttcatggtaatgtgtgtggccggaacatcctgctggcccggctggggttggcagagggcaccagccccttcatcaagctgagtgatcctggcgtgggcctgggcgccctctccagggaggagcgggtggagaggatcccctggctggcccccgaatgcctaccaggtggggccaacagcctaagcaccgccatggacaagtgggggtttggcgccaccctcctggagatctgctttgacggagaggcccctctgcagagccgcagtccctccgagaaggagcatttctaccagaggcagcaccggctgcccgagccctcctgcccacagctggccacactcaccagccagtgtctgacctatgagccaacccagaggccatcattccgcaccatcctgcgtgacctcacccggctgcagccccacaatcttgctgacgtcttgactgtgaacccggactcaccggcgtcggaccctacggttttccacaagcgctatttgaaaaagatccgagatctgggcgagggtcacttcggcaaggtcagcttgtactgctacgatccgaccaacgacggcactggcgagatggtggcggtgaaagccctcaaggcagactgcggcccccagcaccgctcgggctggaagcaggagattgacattctgcgcacgctctaccacgagcacatcatcaagtacaagggctgctgcgaggaccaaggtgggcgggacccggcgagtcctagagacttgagggggcgtggttagagcgtgggtgtggccttgtgggcggggccagtctggcctagccaattagagactctcaaccccaggctgcagtacgcggttcttggcatctgggtgagcgtggctgggctgcctccttcccatctggggggtgctacctgctggggccaggatggacgggagccaccagcagctccctcaagtgagaatggggttctggatgggtccatcccacctgagaactgggtctagtgtgcgcgggtcttggccttccctcccgaccttggaggggctctgctgggctcaaggtaggcggtccccggcccgccctctatcgtcccccaccggggccgcccctctccgcggcaggcgagaagtcgctgcagctggtcatggagtacgtgcccctgggcagcctccgagactacctgccccggcacagcatcgggctggcccagctgctgctcttcgcccagcagatctgcgaggttggtcggccccgcccctgcttctggagcttgccccttcctcttcagcttgggctggcctgagcgatccggtgcagtctgctctcacgctccgcccctgctcgtttgcccaggctgtcttgtccttgcactgacctccgaactgtttggcttgcttggccacaccccctcctcccaagggaccacgcacagccggctcggcccctcccaactcgccctcctgcccagctttgctcgtctagccccgtccctgctttctggctcagcctccttttgcttggtgccacgtgccatccggccctctccagcggccgggtagccaccggcctgacctgactgtcccccagccctcctggctgctcaggtcctgccgccgcccccggccgaaccccgccccactgaaactcacgagccctgccccgtccccagggcatggcctatctgcacgcgcagcactacatccaccgagacctagccgcgcgcaacgtgctgctggacaacgacaggctggtcaagatcggggactttggcctagccaaggccgtgcccgaaggccacgagtactaccgcgtgcgcgaggatggggacagccccgtgttctggtctatcatctcatgaagaactgctgggagacagaggcgtcctttcgcccaaccttcgagaacctcatacccattctgaagacagtccatgagaagtaccaaggccaggccccttcagtgttcagcgtgtgctgaggcacaatggcagccctgcctgggaggactggaccaggcagtggctgcagagggagcctcctgctccctgctccaggatgaaaccaagagggggatgtcagcctcacccacaccgtgtgccttactcctgtctagagaccccacctctgtgaacttatttttctttcttggccgtgagcctaaccatgatcttgagggacccaacatttgtaggggcactaatccagcccttaaatcccccagcttccaaacttgaggcccaccatctccaccatctggtaataaactcatgttttctctg

SEQ ID NO: 76831 - DNA, 3056 bp, Homo sapiens
acaagcagtagctacccgcgggagcggggaggggtccgggttcgagcttgtgttcccccggaagggtgagtctggacgcgggcgcggaaggagcgcggccggaggtcctcaggaagaagccgcggggactggctgcgcttgacaggctgcacttggatgggagcacctggtgcctcgggactgctccgatgcccgggtctgtgctgaatgtgtaatatgcggaactatattgaaacattacaaccatcttttgatggcaacaccctgaggacctcccttttccagatggggaaactgaggcccagaattgctaagtggcttgcttgagttgacacagggagctccaggactcaccctcagctgagccacctgccgggagcatgcctctgcgccactgggggatggccaggggcagtaagcccgttggggatggagcccagcccatggctgccatgggaggcctgaaggtgcttctgcactgggctggtccaggcggcggggagccctgggtcactttcagtgagtcatcgctgacagctgaggaagtctgcatccacattgcacataaagttggtatcactcctccttgcttcaatctctttgccctcttcgatgctcaggcccaagtctggttgcccccaaaccacatcctagagatccccagagatgcaagcctgatgctatatttccgcataaggttttatttccggaactggcatggcatgaatcctcgggaaccggctgtgtaccgttgtgggcccccaggaaccgaggcatcctcagatcagacagcacaggggatgcaactcctggacccagcctcatttgagtacctctttgagcagggcaagcatgagtttgtgaatgacgtggcatcactgtgggagctgtcgaccgaggaggagatccaccactttaagaatgagagcctgggcatggcctttctgcacctctgtcacctcgctctccgccatggcatccccctggaggaggtggccaagaagaccagcttcaaggactgcatcccgcgctccttccgccggcatatccggcagcacagcgccctgacccggctgcgccttcggaacgtcttccgcaggttcctgcgggacttccagccgggccgactctcccagcagatggtcatggtcaaatacctagccacactcgagcggctggcaccccgcttcggcacagagcgtgtgcccgtgtgccacctgaggctgctggcccaggccgagggggagccctgctacatccgggacagtggggtggcccctacagaccctggccctgagtctgctgctgggcccccaacccacgaggtgctggtgacaggcactggtggcatccagtggtggccagtagaggaggaggtgaacaaggaggagggttctagtggcagcagtggcaggaacccccaagccagcctgtttgggaagaaggccaaggctcacaaggcagtcggccagccggcagacaggccgcgggagccactgtgggcctacttctgtgacttccgggacatcacccacgtggtgctgaaagagcactgtgtcagcatccaccggcaggacaacaagtgcctggagctgagcttgccttcccgggctgcggcgctgtccttcgtgtcgctggtggacggctatttccgcctgacggccgactccagccactacctgtgccacgaggtggctcccccacggctggtgatgagcatccgggatgggatccacggacccctgctggagccatttgtgcaggccaagctgcggcccgaggacggcctgtacctcattcactggagcaccagccacccctaccgcctgatcctcacagtggcccagcgtagccaggcaccagacggcatgcagagcttgcggctccgaaagttccccattgagcagcaggacggggccttcgtgctggagggctggggccggtccttccccagcgttcgggaacttggggctgccttgcagggctgcttgctgagggccggggatgactgcttctctctgcgtcgctgttgcctgccccaaccaggagaaacctccaatctcatcatcatgcggggggctcgggccagccccaggacactcaacctcagccagctcagcttccaccgggttgaccagaaggagatcacccagctgtcccacttgggccagggcacaaggaccaacgtgtatgagggccgcctgcgagtggagggcagcggggaccctgaggagggcaagatggatgacgaggaccccctcgtgcctggcagggaccgtgggcaggagctacgagtggtgctcaaagtgctggaccctagtcaccatgacatcgccctggccttctacgagacagccagcctcatgagccaggtctcccacacgcacctggccttcgtgcatggcgtctgtgtgcgcggccctgaaaatatcatggtgacagagtacgtggagcacggacccctggatgtgtggctgcggagggagcggggccatgtgcccatggcttggaagatggtggtggcccagcagctggccagcgccctcagctacctggagaacaagaacctggttcatggtaatgtgtgtggccggaacatcctgctggcccggctggggttggcagagggcaccagccccttcatcaagctgagtgatcctggcgtgggcctgggcgccctctccagggaggagcgggtggagaggatcccctggctggcccccgaatgcctaccaggtggggccaacagcctaagcaccgccatggacaagtgggggtttggcgccaccctcctggagattgcagagggagcctcctgctccctgctccaggatgaaaccaagagggggatgtcagcctcacccacaccgtgtgccttactcctgtctagagaccccacctctgtgaacttatttttctttcttggccgtgagcctaaccatgatcttgagggacccaacatttgtaggggcactaatccagcccttaaatcccccagcttccaaacttgaggcccaccatctccaccatctggtaataaactcatgttttctctg

SEQ ID NO: 76832 - DNA, 849 bp, Homo sapiens
taaaagataaaatccattcctcctcccagtgagcaagcatggcttgcatttctcaaaaatgagaacttccatggcagccaagaaaacgtcttctcagaggaactttcgtttgatgcatctcccaagcccacatgcctcctgtgttccagccacctctgcccatttcacatttaaaccagctctccattcccattgagttgccctaacaacattgtctccagtgtcagaaccatattaaggttcgtttctcagattgggagcctgcaacaccatacagccaacattgcctttgccacgccactgccaccatccccaccattgccctatggtgggcagatgaattccagaaaccctcagggagccaggataattaggcaacccatctgaattggccacgtaagtgacaggcacttatctctcgggttcttgcttttgcagactccagggaagtcctgtctagaggtcgatggcagagactcctagtctttcccatgaggggttgataggaatcaaattgggattcctttggctttgggttttgtttttttgttgttgtttttggttttcagtttgttttttggtgtatggggggtgattttgtttctgaataagaaaaagaagaggcaaccatggcccttatgtgggtttatcctttttgagcaatgttttcagcctacaagtaaggaatcttgcaaagtcttttgtccagcaagcagtcttaaaaatgtttttcctaactcccttttgcaggtgactaagtacaaaaaaatagttttctcattgtattcaaaatagtgagtaggttccctggataatacacagtggtagttgacatattttctcaaaaca

SEQ ID NO: 76833 - DNA, 609 bp, Homo sapiens
tagaggatcccccggaagcacctgcaacaccatacagccaacattgcctttgccacgccactgccaccatccccaccattgccctatggtgggcagatgaattccagaaaccctcagggagccaggataattaggcaacccatctgaattggccacgtaagtgacaggcacttatctctcgggttcttgcttttgcagactccagggaagtcctgtctagaggtcgatggcagagactcctagtctttcccatgaggggttgataggaatcaaattgggattcctttggctttgggttttgtttttttgttgttgtttttggttttcagtttgttttttggtgtatggggggtgattttgtttctgaataagaaaaagaagaggcaaccatggcccttatgtgggtttatcctttttgagcaatgttttcagcctacaagtaaggaatcttgcaaagtcttttgtccagcaagcagtcttaaaaatgtttttcctaactcccttttgcaggtgactaagtacaaaaaaatagttttctcattgtattcaaaatagtgagtaggttccctggataatacacagtggtagttgacatattttctcaaaaca

SEQ ID NO: 76834 - DNA, 738 bp, Homo sapiens
gctcaccctggggaattccaagacattgtccttgaaggaggctccaagctcaggacctcaggatgggagatgaggagaagcggaacagggccatcacggcccgcaggcagcacctgaagagcgtgatgctgcagatagcggccacggagctggagaaggaggagagccgccgtgaggcagagaagcagaactacctggcggagcactgcccgccgctgcatatcccgggctccatgtctgaagtgcaggagctctgcaaacagctgcacgccaagatcgatgcggctgaagaggagaagtacgacatggaggtgagggtgcagaagaccagcaaggagctggaggacatgaaccagaagctatttgatctgcggggcaagttcaagcggcccccactgcggagggtgcgcatgtcggccgatgccatgctcaaggccctgctgggctcgaagcacaaggtgtgcatggacctgagggccaacctgaagcaggtcaagaaggaggacacagagaaggagcgggacctgcgagacgtgggtgactggaggaagaacatcgaggagaagtctggcatggagggccggaagaagatgtttgagtccgagtcctaggccactcgctgcccctacgcctgccccggtgcccggctcccagcagaacatactagggagatgcacccagagcctgccagggagggctggcctcaccaccaccgtcaataaaggatttgaatcccca

SEQ ID NO: 76835 - DNA, 709 bp, Homo sapiens
cacctggcaaagtgtcacacaccacacagcaccatgtcccagtgcaagaagcggaacagggccatcacggcccgcaggcagcacctgaagagcgtgatgctgcagatagcggccacggagctggagaaggaggagagccgccgtgaggcagagaagcagaactacctggcggagcactgcccgccgctgcatatcccgggctccatgtctgaagtgcaggagctctgcaaacagctgcacgccaagatcgatgcggctgaagaggagaagtacgacatggaggtgagggtgcagaagaccagcaaggagctggaggacatgaaccagaagctatttgatctgcggggcaagttcaagcggcccccactgcggagggtgcgcatgtcggccgatgccatgctcaaggccctgctgggctcgaagcacaaggtgtgcatggacctgagggccaacctgaagcaggtcaagaaggaggacacagagaaggagcgggacctgcgagacgtgggtgactggaggaagaacatcgaggagaagtctggcatggagggccggaagaagatgtttgagtccgagtcctaggccactcgctgcccctacgcctgccccggtgcccggctcccagcagaacatactagggagatgcacccagagcctgccagggagggctggcctcaccaccaccgtcaataaaggatttgaatcccca

SEQ ID NO: 76836 - DNA, 692 bp, Homo sapiens
  misc_feature (43)..(43): n is a, c, g, or t
  misc_feature (45)..(45): n is a, c, g, or t
tgctgaggtactctaaggatctccctcctacccacgggaacangncatcatggcccgcaggcagcacctgaagagcgtgatgctgcagatagcggccacggagctggagaaggaggagagccgccgtgaggcagagaagcagaactacctggcggagcactgcccgccgctgcatatcccgggctccatgtctgaagtgcaggagctctgcaaacagctgcacgccaagatcgatgcggctgaagaggagaagtacgacatggaggtgagggtgcagaagaccagcaaggagctggaggacatgaaccagaagctatttgatctgcggggcaagttcaagcggcccccactgcggagggtgcgcatgtcggccgatgccatgctcaaggccctgctgggctcgaagcacaaggtgtgcatggacctgagggccaacctgaagcaggtcaagaaggaggacacagagaaggagcgggacctgcgagacgtgggtgactggaggaagaacatcgaggagaagtctggcatggagggccggaagaagatgtttgagtccgagtcctaggccactcgctgcccctacgcctgccccggtgcccggctcccagcagaacatactagggagatgcacccagagcctgccagggagggctggcctcaccaccaccgtcaataaaggatttgaatcccca

SEQ ID NO: 76837 - DNA, 561 bp, Homo sapiens
gctcaccctggggaattccaagacattgtccttgaaggaggctccaagctcaggacctcaggatgggagatgaggagaagcggaacagggccatcacggcccgcaggcagcacctgaagagcgtgatgctgcagatagcggccacggagctggagaaggaggagagccgccgtgaggcagagaagcagaactacctggcggagcactgcccgccgctgcatatcccgggctccatgtctgaagtgcaggagctctgcaaacagctgcacgccaagatcgatgcggctgaagaggagaagtacgacatggaggtgagggtgcagaagaccagcaaggagctggaggacatgaaccagaagctatttgatctgcggggcaagttcaagcggcccccactgcggagggtgcgcatgtcggccgatgccatgctcaaggccctgctgggctcgaagcacaaggtgtgcatggacctgagggccaacctgaagcaggtcaagaaggaggacacagagaaggaacggacctgcgaacgtgggtaggaggtgaagatcctgtagagtg

SEQ ID NO: 76838 - DNA, 695 bp, Homo sapiens
actgggaaccactgggttagagtatatgaagagctgttagtggccatttagataatcttaggtttagagagacctgtgttaatttattgtcatcacatagcctaagtgaacagtggaatgtgaaaggcagtttattaataatcaccttaaaaggtgtggaaccgaagtcttgtctcctctcttttatttggatctctctgcctgtgtgtacatgctccctcttcatctcgacttggttgtggagaggtggtatgtgtgtttcttccgtgagtttttatatgctggcaccttcatttccctctaactgctccaccttccttttccccccttcctctgcgtacttctctcttctttttttatgtgtcttcctccccatgtctgtgtgtatgagagagagaaagataatggcagagctggaatggaatacatcaatcatctaattccctcagtttatagatttggaaattaaggcccaagaattcaggtgacttgaccaaattcacatgactaaaaagtggcagagcaaggaacagaagccactactttttccactttactactctgtcctgttatctgcacatttgtgtgtgtgtatatgtgtggatatgtgtctaccccctcctctgtaatatgaaatacaaatagagggtttttttgctatgtgtagaataaaactgttctctattgtgtttgaa

SEQ ID NO: 76839 - DNA, 315 bp, Homo sapiens
ttttttttttagtagagacgggtttcaccatgttggccaagatggtctcaatctcttgacctcgtgatccaccggccttggcttcccaaattgctgggattacaggcgtgacacatggtgcctggccacagcatgttttttaatttttaaattggagggattgtttctttatcaatttattatgatctaatttaaatactccttttaaaatacttggctgattctcaagttgtagtacatcaagtaagcattttaaaatgtcttctaatttgaccattctactcataatctttataattatgatgaaaaacacaa

SEQ ID NO: 76840 - DNA, 521 bp, Homo sapiens
tgtgcttttaattgggaaatcagatactaagcttgttagaatcaagtctaaaatacaagaaagctggcttaaggaaaagcttgaggcactacctaaaattaaaatgttcaagttctagtttaacttccatattcttagtctgagataagggtgtcaaagtatagtggtctatagattgtaaagtgcccctagatttggaaactggccatttcactgtatagaaaatatactctttgatcacgttgtatataaatgtccaagtttgaagcaatatgattattttgatcttgaatcagtaattaaggtggacttcaaactgttgaggttttattttctgagaggaccaaagagtcatgaatgtgccagggaaagtccttaggttctaaaaccagacttagatctaggcacatagaaaccgctccacacatccatagtgaatcttattgaattaaagacccttggtaaaatagacacagctaccattagaaggaagcttgcaactgaataacttgtctttctta

SEQ ID NO: 76841 - DNA, 2840 bp, Homo sapiens
gtcgctgcggagcggaggcggggcgtagggcggggtcacgtggggctgcgcccaaggctgccgggagcagactgggctgcgggcggcggggccggcgcctgcctggagggatggggctgccgggcgcgtaggggccatgccgcccgggacccgggcctgccgcgttccgcgccccggccgccgcgccccacgtccgcgccgggatggtgaacctggcggccatggtgtggcgccggcttctgcggaagaggtgggtgctcgccctggtcttcgggctgtcgctcgtctacttcctcagcagcaccttcaagcaggaggagagggcagtgagagataggaatctcctccaggttcatgaccataatcagcccatcccgtggaaagtgcagtttaacttgggcaatagcagtcgtccgagcaatcagtgccgcaactccattcaagggaagcacctcatcacggatgaactcggctacgtttgcgagaggaaggatttgctggtaaatggctgctgtaatgtcaacgtccctagcacgaagcagtactgctgtgatggctgctggcccaacggctgctgcagcgcctatgagtactgtgtctcctgctgcctgcagcccaacaagcaacttctcctggagcgcttcctcaaccgggcagccgtggcattccagaacctcttcatggcagtcgaagatcactttgagttgtgcctggccaaatgcaggacctcatctcagagcgtgcagcatgagaacacctaccgggaccccatagcaaagtattgctatggagaaagcccgcccgagctcttccccgcttgacgggtgcagcggacttgctccagcctgggtgaggaggccccgctgaagaactcgcctcctgggacccagcttcagccatcgggccaggctgcaggaagaagacaaaggcagcgtgaggaaaccttggctttgaccccttctcgtgttgtcatctttggcttcgctcaccacccgggcttaccagatggaactcttctgtaaagcagcttggcccctccagccagtcccattcgggaaagatgaaaccggaggccgggctcacggtggtggtggagttcttggatgactcagccctgggacctgcacagggacctgtgacttgtgttcatcgggggccggtgtcacttccagttttgatccaggctctttcactgtaaaattatttattggattcctttggagtaatgggaacattctaatgttttatgtaggaaaatgccttgccattctagttgaatatgttcaaggaaattatttttgttgttgttctgtgttctcgagtttcaggagttaaatcattcttccacccagatacaacattttctcttttaggacgtgaatattctctctaggcagttatttttgtttgtatttcgacagtatcaagcataggccctgaacgtgacctgttagccatatcctgacgtgtaaaattatctaaaaactcagacactcttccattctaatctaactgcacgatttctaacagtgggcaccatgtgcctgccctcaggttattttccagtggtagtcgaatgtgctcatataccctatggagagcactgttttagcagaaatctaatttctcttcctggaggaatttgttctcatttcttttgccacttaaaattaactgtgggctactcagccagggtacagtgggagcctcaggaaggtcagaggcaacctcctcccctgttctatcaatagaaacccaacgttgaggcaattcctaaacagacgcacctcgtagcttgctgtatgtgtttattctttattgctttcagctttggggctgtaacaggtacaaatatttggtttccctatgatttatagagaagaagaagaaacccagctttctatcagagcactgcaagagaagagtcttacacctgccctcagtgggagatgagaatggtcattatgacttagagaatgctacacgtgtaggttgctggtgtgtcctgaatccacaggcataaagcactccccatttttcctactgtaatgcagattctccggctcaaggtctagaatatttgatcctaagatcaagacatcatgcccttcgaatagtactgctctttgttttcaggagtcacgtgaacacacaactctcctatattcctcacgaacctcaggattgagcaaggtctttgtaatttttttggttcactttattgacctgggagcaaggtgctaattctgtggtcagtattcaatgtttttttcagtggagctttttctttgggccatatttgccttctaatacattcctgcaatatgtagtggtgatttcccttagcttcctcctactacctcttatactcatctccccaaattatttgcctcccttaaataagttttcctagaaggtaagctggtcaggcaatttgaaaaatattagatcccaagaaatctattccgtttgcattggacttctcggattccatgtgtttgcagcaggactacatcgaactctgatgtgccggattgtggcatgtctgcatgtctcatccatctattgtttttggtaactcagtttggaatttcagtgtctgtcttccctgggttgacattggaatcagcctctcctttgagcttattttaactcttgagcaacataacatagatttaatgtgaacagtttataccaaagggcagcctgtgcctgtttatggatcctctctgcctttgtacttgaagagcgcattttacatttccagtcctttcacagacaggagctccaaccttacgatggagaattaaacttgcttgtatttccactttgtggatgag

SEQ ID NO: 76842 - DNA, 3831 bp, Homo sapiens
gtcgctgcggagcggaggcggggcgtagggcggggtcacgtggggctgcgcccaaggctgccgggagcagactgggctgcgggcggcggggccggcgcctgcctggagggatggggctgccgggcgcgtaggggccatgccgcccgggacccgggcctgccgcgttccgcgccccggccgccgcgccccacgtccgcgccgggatggtgaacctggcggccatggtgtggcgccggcttctgcggaagaggtgggtgctcgccctggtcttcgggctgtcgctcgtctacttcctcagcagcaccttcaagcaggaggagagggcagtgagagataggaatctcctccaggttcatgaccataatcagcccatcccgtggaaagtgcagtttaacttgggcaatagcagtcgtccgagcaatcagtgccgcaactccattcaagggaagcacctcatcacggatgaactcggctacgtttgcgagaggaaggatttgctggtaaatggctgctgtaatgtcaacgtccctagcacgaagcagtactgctgtgatggctgctggcccaacggctgctgcagcgcctatgagtactgtgtctcctgctgcctgcagcccaacaagcaacttctcctggagcgcttcctcaaccgggcagccgtggcattccagaacctcttcatggcagtcgaagatcactttgagttgtgcctggccaaatgcaggacctcatctcagagcgtgcagcatgagaacacctaccgggaccccatagcaaagtattgctatggagaaagcccgcccgagctcttccccgcttgacgggtgcagcggacttgctccagcctgggtgaggaggccccgctgaagaactcgcctcctgggacccagcttcagccatcgggccaggctgcaggaagaagacaaaggcagcgtgaggaaaccttggctttgaccccttctcgtgttgtcatctttggcttcgctcaccacccgggcttaccagatggaactcttctgtaaagcagcttggcccctccagccagtcccattcgggaaagatgaaaccggaggccgggctcacggtggtggtggagttcttggatgactcagccctgggacctgcacagggacctgtgacttgtgttcatcgggggccggtgtcacttccagttttgatccaggctctttcactgtaaaattatttattggattcctttggagtaatgggaacattctaatgttttatgtaggaaaatgccttgccattctagttgaatatgttcaaggaaattatttttgttgttgttctgtgttctcgagtttcaggagttaaatcattcttccacccagatacaacattttctcttttaggacgtgaatattctctctaggcagttatttttgtttgtatttcgacagtatcaagcataggccctgaacgtgacctgttagccatatcctgacgtgtaaaattatctaaaaactcagacactcttccattctaatctaactgcacgatttctaacagtgggcaccatgtgcctgccctcaggttattttccagtggtagtcgaatgtgctcatataccctatggagagcactgttttagcagaaatctaatttctcttcctggaggaatttgttctcatttcttttgccacttaaaattaactgtgggctactcagccagggtacagtgggagcctcaggaaggtcagaggcaacctcctcccctgttctatcaatagaaacccaacgttgaggcaattcctaaacagacgcacctcgtagcttgctgtatgtgtttattctttattgctttcagctttggggctgtaacaggtacaaatatttggtttccctatgatttatagagaagaagaagaaacccagctttctatcagagcactgcaagagaagagtcttacacctgccctcagtgggagatgagaatggtcattatgacttagagaatgctacacgtgtaggttgctggtgtgtcctgaatccacaggcataaagcactccccatttttcctactgtaatgcagattctccggctcaaggtctagaatatttgatcctaagatcaagacatcatgcccttcgaatagtactgctctttgttttcaggagtcacgtgaacacacaactctcctatattcctcacgaacctcaggattgagcaaggtctttgtaatttttttggttcactttattgacctgggagcaaggtgctaattctgtggtcagtattcaatgtttttttcagtggagctttttctttgggccatatttgccttctaatacattcctgcaatatgtagtggtgatttcccttagcttcctcctactacctcttatactcatctccccaaattatttgcctcccttaaataagttttcctagaaggtaagctggtcaggcaatttgaaaaatattagatcccaagaaatctattccgtttgcattggacttctcggattccatgtgtttgcagcaggactacatcgaactctgatgtgccggattgtggcatgtctgcatgtctcatccatctattgtttttggtaactcagtttggaatttcagtgtctgtcttccctgggttgacattggaatcagcctctcctttgagcttattttaactcttgagcaacataacatagatttaatgtgaacagtttataccaaagggcagcctgtgcctgtttatggatcctctctgcctttgtacttgaagagcgcattttacatttccagtcctttcacagacaggagctccaaccttacgatggagaattaaacttgcttgtatttccactttgtggatgaggaactatgagaggtggagtgacttcctgggtccccgctgagacttagtgacagatcccagacaagaacttcatctctgactccaggtctagtcctcttccccctgtctcttgccaactccagccctgacaccgtgggcgtctcccctgagagcagatatatttcaattgtccaggccaaaagaggggcgaggcggcataaacacccaaattaggtggaggatccaaaagtcattttcatttggctgtggaatatgttttttgtatttcaatcagctaggggtgtgttcactgtttttggaaattcacagcgcttgagcctccataatgaagccgggctgcagagcacctggcacgtgctccaggctcccagctcccaacctaggacctctccctgccctccactctggttggtttgtggttccctcgaccgagggtttctagaatcagggaccttgtctaagttttgtttgcccagagcccagcgaagtgtgtgatacaccttgggagtttaggagatcacaaaagggatgaaaacacctttagaaaacatttcattggtggggcgtggtggcttatgcctgtaatcccagcactttggaaggctgaggcaggtggatcacctgaaggcaggagttcagaccagcctgaccaatatggtgaaaccccatctatactaaaaatacaaaaattagccgggtgtgggggcgtgtgcctgtttttgtgagactctgtctcaaaaaaaagaaaaaaatattgttaataagtgagtgttttcggctcaagggaattgagtcatacgttgcatctcccccagttctgcatcttatttgctgcgcttgctggagttgtaaagattggtcctaacagggaaagaagcacacaagagactgtgaaaagggctctgagacaagcaaggacaaaagagggagggaaataccttccacagggcctgggatctggcaatgctagagccttttttttttttttttt

SEQ ID NO: 76843 - DNA, 3674 bp, Homo sapiens
gtcgctgcggagcggaggcggggcgtagggcggggtcacgtggggctgcgcccaaggctgccgggagcagactgggctgcgggcggcggggccggcgcctgcctggagggatggggctgccgggcgcgtaggggccatgccgcccgggacccgggcctgccgcgttccgcgccccggccgccgcgccccacgtccgcgccgggatggtgaacctggcggccatggtgtggcgccggcttctgcggaagaggtgggtgctcgccctggtcttcgggctgtcgctcgtctacttcctcagcagcaccttcaagcaggctacgtttgcgagaggaaggatttgctggtaaatggctgctgtaatgtcaacgtccctagcacgaagcagtactgctgtgatggctgctggcccaacggctgctgcagcgcctatgagtactgtgtctcctgctgcctgcagcccaacaagcaacttctcctggagcgcttcctcaaccgggcagccgtggcattccagaacctcttcatggcagtcgaagatcactttgagttgtgcctggccaaatgcaggacctcatctcagagcgtgcagcatgagaacacctaccgggaccccatagcaaagtattgctatggagaaagcccgcccgagctcttccccgcttgacgggtgcagcggacttgctccagcctgggtgaggaggccccgctgaagaactcgcctcctgggacccagcttcagccatcgggccaggctgcaggaagaagacaaaggcagcgtgaggaaaccttggctttgaccccttctcgtgttgtcatctttggcttcgctcaccacccgggcttaccagatggaactcttctgtaaagcagcttggcccctccagccagtcccattcgggaaagatgaaaccggaggccgggctcacggtggtggtggagttcttggatgactcagccctgggacctgcacagggacctgtgacttgtgttcatcgggggccggtgtcacttccagttttgatccaggctctttcactgtaaaattatttattggattcctttggagtaatgggaacattctaatgttttatgtaggaaaatgccttgccattctagttgaatatgttcaaggaaattatttttgttgttgttctgtgttctcgagtttcaggagttaaatcattcttccacccagatacaacattttctcttttaggacgtgaatattctctctaggcagttatttttgtttgtatttcgacagtatcaagcataggccctgaacgtgacctgttagccatatcctgacgtgtaaaattatctaaaaactcagacactcttccattctaatctaactgcacgatttctaacagtgggcaccatgtgcctgccctcaggttattttccagtggtagtcgaatgtgctcatataccctatggagagcactgttttagcagaaatctaatttctcttcctggaggaatttgttctcatttcttttgccacttaaaattaactgtgggctactcagccagggtacagtgggagcctcaggaaggtcagaggcaacctcctcccctgttctatcaatagaaacccaacgttgaggcaattcctaaacagacgcacctcgtagcttgctgtatgtgtttattctttattgctttcagctttggggctgtaacaggtacaaatatttggtttccctatgatttatagagaagaagaagaaacccagctttctatcagagcactgcaagagaagagtcttacacctgccctcagtgggagatgagaatggtcattatgacttagagaatgctacacgtgtaggttgctggtgtgtcctgaatccacaggcataaagcactccccatttttcctactgtaatgcagattctccggctcaaggtctagaatatttgatcctaagatcaagacatcatgcccttcgaatagtactgctctttgttttcaggagtcacgtgaacacacaactctcctatattcctcacgaacctcaggattgagcaaggtctttgtaatttttttggttcactttattgacctgggagcaaggtgctaattctgtggtcagtattcaatgtttttttcagtggagctttttctttgggccatatttgccttctaatacattcctgcaatatgtagtggtgatttcccttagcttcctcctactacctcttatactcatctccccaaattatttgcctcccttaaataagttttcctagaaggtaagctggtcaggcaatttgaaaaatattagatcccaagaaatctattccgtttgcattggacttctcggattccatgtgtttgcagcaggactacatcgaactctgatgtgccggattgtggcatgtctgcatgtctcatccatctattgtttttggtaactcagtttggaatttcagtgtctgtcttccctgggttgacattggaatcagcctctcctttgagcttattttaactcttgagcaacataacatagatttaatgtgaacagtttataccaaagggcagcctgtgcctgtttatggatcctctctgcctttgtacttgaagagcgcattttacatttccagtcctttcacagacaggagctccaaccttacgatggagaattaaacttgcttgtatttccactttgtggatgaggaactatgagaggtggagtgacttcctgggtccccgctgagacttagtgacagatcccagacaagaacttcatctctgactccaggtctagtcctcttccccctgtctcttgccaactccagccctgacaccgtgggcgtctcccctgagagcagatatatttcaattgtccaggccaaaagaggggcgaggcggcataaacacccaaattaggtggaggatccaaaagtcattttcatttggctgtggaatatgttttttgtatttcaatcagctaggggtgtgttcactgtttttggaaattcacagcgcttgagcctccataatgaagccgggctgcagagcacctggcacgtgctccaggctcccagctcccaacctaggacctctccctgccctccactctggttggtttgtggttccctcgaccgagggtttctagaatcagggaccttgtctaagttttgtttgcccagagcccagcgaagtgtgtgatacaccttgggagtttaggagatcacaaaagggatgaaaacacctttagaaaacatttcattggtggggcgtggtggcttatgcctgtaatcccagcactttggaaggctgaggcaggtggatcacctgaaggcaggagttcagaccagcctgaccaatatggtgaaaccccatctatactaaaaatacaaaaattagccgggtgtgggggcgtgtgcctgtttttgtgagactctgtctcaaaaaaaagaaaaaaatattgttaataagtgagtgttttcggctcaagggaattgagtcatacgttgcatctcccccagttctgcatcttatttgctgcgcttgctggagttgtaaagattggtcctaacagggaaagaagcacacaagagactgtgaaaagggctctgagacaagcaaggacaaaagagggagggaaataccttccacagggcctgggatctggcaatgctagagccttttttttttttttttt

SEQ ID NO: 76844 - DNA, 3365 bp, Homo sapiens
gcacgagctcctccgctgactaatatgcttaaattcagggcggcggggccggcgcctgcctggagggatggggctgccgggcgcgtaggggccatgccgcccgggacccgggcctgccgcgttccgcgccccggccgccgcgccccacgtccgcgccgggatggtgaacctggcggccatggtgtggcgccggcttctgcggaagaggtgggtgctcgccctggtcttcgggctgtcgctcgtctacttcctcagcagcaccttcaagcagagcgtgcagcatgagaacacctaccgggaccccatagcaaagtattgctatggagaaagcccgcccgagctcttccccgcttgacgggtgcagcggacttgctccagcctgggtgaggaggccccgctgaagaactcgcctcctgggacccagcttcagccatcgggccaggctgcaggaagaagacaaaggcagcgtgaggaaaccttggctttgaccccttctcgtgttgtcatctttggcttcgctcaccacccgggcttaccagatggaactcttctgtaaagcagcttggcccctccagccagtcccattcgggaaagatgaaaccggaggccgggctcacggtggtggtggagttcttggatgactcagccctgggacctgcacagggacctgtgacttgtgttcatcgggggccggtgtcacttccagttttgatccaggctctttcactgtaaaattatttattggattcctttggagtaatgggaacattctaatgttttatgtaggaaaatgccttgccattctagttgaatatgttcaaggaaattatttttgttgttgttctgtgttctcgagtttcaggagttaaatcattcttccacccagatacaacattttctcttttaggacgtgaatattctctctaggcagttatttttgtttgtatttcgacagtatcaagcataggccctgaacgtgacctgttagccatatcctgacgtgtaaaattatctaaaaactcagacactcttccattctaatctaactgcacgatttctaacagtgggcaccatgtgcctgccctcaggttattttccagtggtagtcgaatgtgctcatataccctatggagagcactgttttagcagaaatctaatttctcttcctggaggaatttgttctcatttcttttgccacttaaaattaactgtgggctactcagccagggtacagtgggagcctcaggaaggtcagaggcaacctcctcccctgttctatcaatagaaacccaacgttgaggcaattcctaaacagacgcacctcgtagcttgctgtatgtgtttattctttattgctttcagctttggggctgtaacaggtacaaatatttggtttccctatgatttatagagaagaagaagaaacccagctttctatcagagcactgcaagagaagagtcttacacctgccctcagtgggagatgagaatggtcattatgacttagagaatgctacacgtgtaggttgctggtgtgtcctgaatccacaggcataaagcactccccatttttcctactgtaatgcagattctccggctcaaggtctagaatatttgatcctaagatcaagacatcatgcccttcgaatagtactgctctttgttttcaggagtcacgtgaacacacaactctcctatattcctcacgaacctcaggattgagcaaggtctttgtaatttttttggttcactttattgacctgggagcaaggtgctaattctgtggtcagtattcaatgtttttttcagtggagctttttctttgggccatatttgccttctaatacattcctgcaatatgtagtggtgatttcccttagcttcctcctactacctcttatactcatctccccaaattatttgcctcccttaaataagttttcctagaaggtaagctggtcaggcaatttgaaaaatattagatcccaagaaatctattccgtttgcattggacttctcggattccatgtgtttgcagcaggactacatcgaactctgatgtgccggattgtggcatgtctgcatgtctcatccatctattgtttttggtaactcagtttggaatttcagtgtctgtcttccctgggttgacattggaatcagcctctcctttgagcttattttaactcttgagcaacataacatagatttaatgtgaacagtttataccaaagggcagcctgtgcctgtttatggatcctctctgcctttgtacttgaagagcgcattttacatttccagtcctttcacagacaggagctccaaccttacgatggagaattaaacttgcttgtatttccactttgtggatgaggaactatgagaggtggagtgacttcctgggtccccgctgagacttagtgacagatcccagacaagaacttcatctctgactccaggtctagtcctcttccccctgtctcttgccaactccagccctgacaccgtgggcgtctcccctgagagcagatatatttcaattgtccaggccaaaagaggggcgaggcggcataaacacccaaattaggtggaggatccaaaagtcattttcatttggctgtggaatatgttttttgtatttcaatcagctaggggtgtgttcactgtttttggaaattcacagcgcttgagcctccataatgaagccgggctgcagagcacctggcacgtgctccaggctcccagctcccaacctaggacctctccctgccctccactctggttggtttgtggttccctcgaccgagggtttctagaatcagggaccttgtctaagttttgtttgcccagagcccagcgaagtgtgtgatacaccttgggagtttaggagatcacaaaagggatgaaaacacctttagaaaacatttcattggtggggcgtggtggcttatgcctgtaatcccagcactttggaaggctgaggcaggtggatcacctgaaggcaggagttcagaccagcctgaccaatatggtgaaaccccatctatactaaaaatacaaaaattagccgggtgtgggggcgtgtgcctgtttttgtgagactctgtctcaaaaaaaagaaaaaaatattgttaataagtgagtgttttcggctcaagggaattgagtcatacgttgcatctcccccagttctgcatcttatttgctgcgcttgctggagttgtaaagattggtcctaacagggaaagaagcacacaagagactgtgaaaagggctctgagacaagcaaggacaaaagagggagggaaataccttccacagggcctgggatctggcaatgctagagccttttttttttttttttt

SEQ ID NO: 76845 - DNA, 679 bp, Homo sapiens
  misc_feature (427)..(427): n is a, c, g, or t
  misc_feature (434)..(434): n is a, c, g, or t
  misc_feature (451)..(451): n is a, c, g, or t
  misc_feature (453)..(453): n is a, c, g, or t
gcacgagctcctccgctgactaatatgcttaaattcagggcggcggggccggcgcctgcctggagggatggggctgccgggcgcgtaggggccatgccgcccgggacccgggcctgccgcgttccgcgccccggccgccgcgccccacgtccgcgccgggatggtgaacctggcggccatggtgtggcgccggcttctgcggaagaggtgggtgctcgccctggtcttcgggctgtcgctcgtctacttcctcagcagcaccttcaagcagtctgaaaacagccagttacttcccaagagttgcacagagaagcctgcacacttccatctggatatttagttaccctcttggaaacagtctccactccacccatcacattctacctccaaggactggaacacagacttattcccacctccccgcttntgggctnttggctggccccaggtntntgacaatcctcccttggggccagaggtactcaaggatgccaagagggatattgagttcacacacacacacacacaaggtgcaaaaaaaccccttgggtattggcctaaccaataaacacttttctttggttaatcattgctattatcaaaaaatcttaatataaaaatctaggctatacaaagaaaattactcaaatacaaatgttgttcacattgtaaaaaaaaa

SEQ ID NO: 76846 - DNA, 2797 bp, Homo sapiens
gcacgagctcctccgctgactaatatgcttaaattcagggcggcggggccggcgcctgcctggagggatggggctgccgggcgcgtaggggccatgccgcccgggacccgggcctgccgcgttccgcgccccggccgccgcgccccacgtccgcgccgggatggtgaacctggcggccatggtgtggcgccggcttctgcggaagaggtgggtgctcgccctggtcttcgggctgtcgctcgtctacttcctcagcagcaccttcaagcaggaggagagggcagtgagagataggaatctcctccaggttcatgaccataatcagcccatcccgtggaaagtgcagtttaacttgggcaatagcagtcgtccgagcaatcagtgccgcaactccattcaagggaagcacctcatcacggatgaactcggctacgtttgcgagaggaaggatttgctggtaaatggctgctgtaatgtcaacgtccctagcacgaagcagtactgctgtgatggctgctggcccaacggctgctgcagcgcctatgagtactgtgtctcctgctgcctgcagcccaacaagcaacttctcctggagcgcttcctcaaccgggcagccgtggcattccagaacctcttcatggcagtcgaagatcactttgagttgtgcctggccaaatgcaggacctcatctcagagcgtgcagcatgagaacacctaccgggaccccatagcaaagtattgctatggagaaagcccgcccgagctcttccccgcttgacgggtgcagcggacttgctccagcctgggtgaggaggccccgctgaagaactcgcctcctgggacccagcttcagccatcgggccaggctgcaggaagaagacaaaggcagcgtgaggaaaccttggctttgaccccttctcgtgttgtcatctttggcttcgctcaccacccgggcttaccagatggaactcttctgtaaagcagcttggcccctccagccagtcccattcgggaaagatgaaaccggaggccgggctcacggtggtggtggagttcttggatgactcagccctgggacctgcacagggacctgtgacttgtgttcatcgggggccggtgtcacttccagttttgatccaggctctttcactgtaaaattatttattggattcctttggagtaatgggaacattctaatgttttatgtaggaaaatgccttgccattctagttgaatatgttcaaggaaattatttttgttgttgttctgtgttctcgagtttcaggagttaaatcattcttccacccagatacaacattttctcttttaggacgtgaatattctctctaggcagttatttttgtttgtatttcgacagtatcaagcataggccctgaacgtgacctgttagccatatcctgacgtgtaaaattatctaaaaactcagacactcttccattctaatctaactgcacgatttctaacagtgggcaccatgtgcctgccctcaggttattttccagtggtagtcgaatgtgctcatataccctatggagagcactgttttagcagaaatctaatttctcttcctggaggaatttgttctcatttcttttgccacttaaaattaactgtgggctactcagccagggtacagtgggagcctcaggaaggtcagaggcaacctcctcccctgttctatcaatagaaacccaacgttgaggcaattcctaaacagacgcacctcgtagcttgctgtatgtgtttattctttattgctttcagctttggggctgtaacaggtacaaatatttggtttccctatgatttatagagaagaagaagaaacccagctttctatcagagcactgcaagagaagagtcttacacctgccctcagtgggagatgagaatggtcattatgacttagagaatgctacacgtgtaggttgctggtgtgtcctgaatccacaggcataaagcactccccatttttcctactgtaatgcagattctccggctcaaggtctagaatatttgatcctaagatcaagacatcatgcccttcgaatagtactgctctttgttttcaggagtcacgtgaacacacaactctcctatattcctcacgaacctcaggattgagcaaggtctttgtaatttttttggttcactttattgacctgggagcaaggtgctaattctgtggtcagtattcaatgtttttttcagtggagctttttctttgggccatatttgccttctaatacattcctgcaatatgtagtggtgatttcccttagcttcctcctactacctcttatactcatctccccaaattatttgcctcccttaaataagttttcctagaaggtaagctggtcaggcaatttgaaaaatattagatcccaagaaatctattccgtttgcattggacttctcggattccatgtgtttgcagcaggactacatcgaactctgatgtgccggattgtggcatgtctgcatgtctcatccatctattgtttttggtaactcagtttggaatttcagtgtctgtcttccctgggttgacattggaatcagcctctcctttgagcttattttaactcttgagcaacataacatagatttaatgtgaacagtttataccaaagggcagcctgtgcctgtttatggatcctctctgcctttgtacttgaagagcgcattttacatttccagtcctttcacagacaggagctccaaccttacgatggagaattaaacttgcttgtatttccactttgtggatgag

SEQ ID NO: 76847 - DNA, 3776 bp, Homo sapiens
gtcgctgcggagcggaggcggggcgtagggcggggtcacgtggggctgcgcccaaggctgccgggagcagactgggctgcgggcggcggggccggcgcctgcctggagggatggggctgccgggcgcgtaggggccatgccgcccgggacccgggcctgccgcgttccgcgccccggccgccgcgccccacgtccgcgccgggatggtgaacctggcggccatggtgtggcgccggcttctgcggaagaggtgggtgctcgccctggtcttcgggctgtcgctcgtctacttcctcagcagcaccttcaagcaggaggagagggcagtgagagataggaatctcctccaggttcatgaccataatcagcccatcccgtggaaagtgcagtttaacttgggcaatagcagtcgtccgagcaatcagtgccgcaactccattcaagggaagcacctcatcacggatgaactcggctacgtttgcgagaggaaggatttgctggtaaatggctgctgtaatgtcaacgtccctagcacgaagcagtactgctgtgatggctgctggcccaacggctgctgcagcgcctatgagtactgtgtctcctgctgcctgcagcccaacaagcaacttctcctggagcgcttcctcaaccgggcagccgtggcattccagaacctcttcatggcagtcgaagatcactttgagttgtgcctggccaaatgcaggacctcatctcagagcgtgcagcatgagaacacctaccgggaccccatagcaaagtattgctatggagaaagcccgcccgagctcttccccgcttgacgggtgcagcggacttgctccagcctgggtgaggaggccccgctgaagaactcgcctcctgggacccagcttcagccatcgggccaggctgcaggaagaagacaaaggcagcgtgaggaaaccttggctttgaccccttctcgtgttgtcatctttggcttcgctcaccacccgggcttaccagatggaactcttctgtaaagcagcttggcccctccagccagtcccattcgggaaagatgaaaccggaggccgggctcacggtggtggtggagttcttggatgactcagccctgggacctgcacagggacctgtgacttgtgttcatcgggggccggtgtcacttccagttttgatccaggctctttcactgtaaaattatttattggattcctttggagtaatgggaacattctaatgttttatgtaggaaaatgccttgccattctagttgaatatgttcaaggaaattatttttgttgttgttctgtgttctcgagtttcaggagttaaatcattcttccacccagatacaacattttctcttttaggacgtgaatattctctctaggcagttatttttgtttgtatttcgacagtatcaagcataggccctgaacgtgacctgttagccatatcctgacgtgtaaaattatctaaaaactcagacactcttccattctaatctaactgcacgatttctaacagtgggcaccatgtgcctgccctcaggttattttccagtggtagtcgaatgtgctcatataccctatggagagcactgttttagcagaaatctaatttctcttcctggaggaatttgttctcatttcttttgccacttaaaattaactgtgggctactcagccagggtacagtgggagcctcaggaaggtcagaggcaacctcctcccctgttctatcaatagaaacccaacgttgaggcaattcctaaacagacgcacctcgtagcttgctgtatgtgtttattctttattgctttcagctttggggctgtaacaggtacaaatatttggtttccctatgatttatagagaagaagaagaaacccagctttctatcagagcactgcaagagaagagtcttacacctgccctcagtgggagatgagaatggtcattatgacttagagaatgctacacgtgtaggttgctggtgtgtcctgaatccacaggcataaagcactccccatttttcctactgtaatgcagattctccggctcaaggtctagaatatttgatcctaagatcaagacatcatgcccttcgaatagtactgctctttgttttcaggagtcacgtgaacacacaactctcctatattcctcacgaacctcaggattgagcaaggtctttgtaatttttttggttcactttattgacctgggagcaaggtgctaattctgtggtcagtattcaatgtttttttcagtggagctttttctttgggccatatttgccttctaatacattcctgcaatatgtagtggtgatttcccttagcttcctcctactacctcttatactcatctccccaaattatttgcctcccttaaataagttttcctagaaggtaagctggtcaggcaatttgatgtgtttgcagcaggactacatcgaactctgatgtgccggattgtggcatgtctgcatgtctcatccatctattgtttttggtaactcagtttggaatttcagtgtctgtcttccctgggttgacattggaatcagcctctcctttgagcttattttaactcttgagcaacataacatagatttaatgtgaacagtttataccaaagggcagcctgtgcctgtttatggatcctctctgcctttgtacttgaagagcgcattttacatttccagtcctttcacagacaggagctccaaccttacgatggagaattaaacttgcttgtatttccactttgtggatgaggaactatgagaggtggagtgacttcctgggtccccgctgagacttagtgacagatcccagacaagaacttcatctctgactccaggtctagtcctcttccccctgtctcttgccaactccagccctgacaccgtgggcgtctcccctgagagcagatatatttcaattgtccaggccaaaagaggggcgaggcggcataaacacccaaattaggtggaggatccaaaagtcattttcatttggctgtggaatatgttttttgtatttcaatcagctaggggtgtgttcactgtttttggaaattcacagcgcttgagcctccataatgaagccgggctgcagagcacctggcacgtgctccaggctcccagctcccaacctaggacctctccctgccctccactctggttggtttgtggttccctcgaccgagggtttctagaatcagggaccttgtctaagttttgtttgcccagagcccagcgaagtgtgtgatacaccttgggagtttaggagatcacaaaagggatgaaaacacctttagaaaacatttcattggtggggcgtggtggcttatgcctgtaatcccagcactttggaaggctgaggcaggtggatcacctgaaggcaggagttcagaccagcctgaccaatatggtgaaaccccatctatactaaaaatacaaaaattagccgggtgtgggggcgtgtgcctgtttttgtgagactctgtctcaaaaaaaagaaaaaaatattgttaataagtgagtgttttcggctcaagggaattgagtcatacgttgcatctcccccagttctgcatcttatttgctgcgcttgctggagttgtaaagattggtcctaacagggaaagaagcacacaagagactgtgaaaagggctctgagacaagcaaggacaaaagagggagggaaataccttccacagggcctgggatctggcaatgctagagccttttttttttttttttt

SEQ ID NO: 76848 - DNA, 3596 bp, Homo sapiens
gtcgctgcggagcggaggcggggcgtagggcggggtcacgtggggctgcgcccaaggctgccgggagcagactgggctgcgggcggcggggccggcgcctgcctggagggatggggctgccgggcgcgtaggggccatgccgcccgggacccgggcctgccgcgttccgcgccccggccgccgcgccccacgtccgcgccgggatggtgaacctggcggccatggtgtggcgccggcttctgcggaagaggtgggtgctcgccctggtcttcgggctgtcgctcgtctacttcctcagcagcaccttcaagcaggaggagagggcagtgagagataggaatctcctccaggttcatgaccataatcagcccatcccgtggaaagtgcagtttaacttgggcaatagcagtcgtccgagcaatcagtgccgcaactccattcaagggaagcacctcatcacggatgaactcggctacgtttgcgagaggaaggatttgctggtaaatggctgctgtaatgtcaacgtccctagcacgaagcagtactgctgtgatggctgctggcccaacggctgctgcagcgcctatgagtactgtgtctcctgctgcctgcagcccaacaagcaacttctcctggagcgcttcctcaaccgggcagccgtggcattccagaacctcttcatggcagtcgaagatcactttgagttgtgcctggccaaatgcaggacctcatctcagagcgtgcagcatgagaacacctaccgggaccccatagcaaagtattgctatggagaaagcccgcccgagctcttccccgcttgacgggtgcagcggacttgctccagcctgggtgaggaggccccgctgaagaactcgccccctgggacctgcacagggacctgtgacttgtgttcatcgggggccggtgtcacttccagttttgatccaggctctttcactgtaaaattatttattggattcctttggagtaatgggaacattctaatgttttatgtaggaaaatgccttgccattctagttgaatatgttcaaggaaattatttttgttgttgttctgtgttctcgagtttcaggagttaaatcattcttccacccagatacaacattttctcttttaggacgtgaatattctctctaggcagttatttttgtttgtatttcgacagtatcaagcataggccctgaacgtgacctgttagccatatcctgacgtgtaaaattatctaaaaactcagacactcttccattctaatctaactgcacgatttctaacagtgggcaccatgtgcctgccctcaggttattttccagtggtagtcgaatgtgctcatataccctatggagagcactgttttagcagaaatctaatttctcttcctggaggaatttgttctcatttcttttgccacttaaaattaactgtgggctactcagccagggtacagtgggagcctcaggaaggtcagaggcaacctcctcccctgttctatcaatagaaacccaacgttgaggcaattcctaaacagacgcacctcgtagcttgctgtatgtgtttattctttattgctttcagctttggggctgtaacaggtacaaatatttggtttccctatgatttatagagaagaagaagaaacccagctttctatcagagcactgcaagagaagagtcttacacctgccctcagtgggagatgagaatggtcattatgacttagagaatgctacacgtgtaggttgctggtgtgtcctgaatccacaggcataaagcactccccatttttcctactgtaatgcagattctccggctcaaggtctagaatatttgatcctaagatcaagacatcatgcccttcgaatagtactgctctttgttttcaggagtcacgtgaacacacaactctcctatattcctcacgaacctcaggattgagcaaggtctttgtaatttttttggttcactttattgacctgggagcaaggtgctaattctgtggtcagtattcaatgtttttttcagtggagctttttctttgggccatatttgccttctaatacattcctgcaatatgtagtggtgatttcccttagcttcctcctactacctcttatactcatctccccaaattatttgcctcccttaaataagttttcctagaaggtaagctggtcaggcaatttgaaaaatattagatcccaagaaatctattccgtttgcattggacttctcggattccatgtgtttgcagcaggactacatcgaactctgatgtgccggattgtggcatgtctgcatgtctcatccatctattgtttttggtaactcagtttggaatttcagtgtctgtcttccctgggttgacattggaatcagcctctcctttgagcttattttaactcttgagcaacataacatagatttaatgtgaacagtttataccaaagggcagcctgtgcctgtttatggatcctctctgcctttgtacttgaagagcgcattttacatttccagtcctttcacagacaggagctccaaccttacgatggagaattaaacttgcttgtatttccactttgtggatgaggaactatgagaggtggagtgacttcctgggtccccgctgagacttagtgacagatcccagacaagaacttcatctctgactccaggtctagtcctcttccccctgtctcttgccaactccagccctgacaccgtgggcgtctcccctgagagcagatatatttcaattgtccaggccaaaagaggggcgaggcggcataaacacccaaattaggtggaggatccaaaagtcattttcatttggctgtggaatatgttttttgtatttcaatcagctaggggtgtgttcactgtttttggaaattcacagcgcttgagcctccataatgaagccgggctgcagagcacctggcacgtgctccaggctcccagctcccaacctaggacctctccctgccctccactctggttggtttgtggttccctcgaccgagggtttctagaatcagggaccttgtctaagttttgtttgcccagagcccagcgaagtgtgtgatacaccttgggagtttaggagatcacaaaagggatgaaaacacctttagaaaacatttcattggtggggcgtggtggcttatgcctgtaatcccagcactttggaaggctgaggcaggtggatcacctgaaggcaggagttcagaccagcctgaccaatatggtgaaaccccatctatactaaaaatacaaaaattagccgggtgtgggggcgtgtgcctgtttttgtgagactctgtctcaaaaaaaagaaaaaaatattgttaataagtgagtgttttcggctcaagggaattgagtcatacgttgcatctcccccagttctgcatcttatttgctgcgcttgctggagttgtaaagattggtcctaacagggaaagaagcacacaagagactgtgaaaagggctctgagacaagcaaggacaaaagagggagggaaataccttccacagggcctgggatctggcaatgctagagccttttttttttttttttt

SEQ ID NO: 76849 - DNA, 391 bp, Homo sapiens
gaatctcctccaggttcatgaccataatcagcccatcccgtggaaagtgcagtttaacttgggcaatagcagtcgtccgagcaatcagtgccgcaactccattcaagggaagcacctcatcacggatgaactcggtgaggctggcttcccttcctctccaggcggtcaggagcgtaggctggttgggccattcatagggtttttgtttgaatagggattcctctgcaacacattttctctcctcgctcatctccaacattccccaggtttttgtcttctataccctactcatcattcaaggttcccttcaacatcagagaagcttgttttgataactctaactcttaaaagttctttctgcctacaacttacaacatgagcactgtgtcac

SEQ ID NO: 76850 - DNA, 2141 bp, Homo sapiens
ctaagatccattttctaaactccaattgagcattctctgtatctgggtggtttttacttttttacttaatcttgcttgatcaggaactctggtgtcttcttggccccccacgtgatctcgttcatggtcacttttttgtttatctcattttctctgaggctggtccttcctgttaacgtcttggcatttgtgggaagcacaaaatgttcttgtctctccaactctgcttttcgctccctgccctgccattcctctcccgcgcctgccctctcccttccatctttcccaggtacttttctctcccagccctgccactcttctgccgcacctgcgctctcccctccatctttcccaggtacttttgagccttgactccccaggtcccttcattctgtgctcactccatgatgtcattttgttctccagttaaagaaagtacagacaataaccaccaagtcgaactcgatcaaacaggggaaaaaccaacttttccctgttgtcatgaatggcaaagaagatgttttgtggtgcactgagctcgaaaggatctttggctttcctgtgcactacacagacgtgtccaacatgggccgtggtgcccgccagaagctgctgggaaggtcctggagcgtgcctgtcatccgacacctcttcgcccctctgaaggactactttgcatgtgaatagttccagccaggccccaagcccactggggtgtgtggcagagccaggacccaggaggtgtgattcctgaaggcatccccaggccctgctcttcctcagctgtgtgggtcataccgtgtacctcagttccctcttgctcagtgggggcagagccacctgactcttgcaggggtagcctgaggtgccgcctccttgtgcacaaatcagacctggctgcttggagcagcctaacacggtgctcattttttcttctcctaaaactttaaaacttgaagtaggtagcaacgtggctttttttttttcccttcctgggtctaccactcagagaaacaatggctaagataccaaaaccacagtgccgacagctctccaatactcaggttaatgctgaaaaatcatccaagacagttattgcaagagtttaatttttgaaaactggctactgctctgtgtttacagacgtgtgcagttgtaggcatgtagctacaggacatttttaagggcccaggatcgttttttcccagggcaagcagaagagaaaatgttgtatatgtcttttacccggcacattccccttgcctaaatacaagggctggagtctgcacgggacctattagagtattttccacaatgatgatgatttcagcagggatgacgtcatcatcacattcagggctattttttcccccacaaacccaagggcaggggccactcttagctaaatccctccccgtgactgcaatagaaccctctggggagctcaggaaggggtgtgctgagttctataatataagctgccatatattttgtagacaagtatggctcctccatatctccctcttccctaggagaggagtgtgaagcaaggagcttagataagacaccccctcaaacccattccctctccaggagacctaccctccacaggcacaggtccccagatgagaagtctgctaccctcatttctcatctttttactaaactcagaggcagtgacagcagtcagggacagacatacatttctcataccttccccacatctgagagatgacagggaaaactgcaaagctcggtgctccctttggagattttttaatccttttttattccataagaagtcgtttttagggagaacgggaattcagacaagctgcatttcagaaatgctgtcataatggtttttaacaccttttactcttcttactggtgctattttgtagaataaggaacaacgttgacaagttttgtggggctttttatacactttttaaaatctcaaacttctatttttatgtttaacgttttcattaaaatttttttgtaactggagccacgacgtaacaaatatggggaaaaaactgtgccttgtttcaacagtttttgctaatttttaggctgaaagatgacggatgcctagagtttaccttatgtttaattaaaatcagtatttgtctata

SEQ ID NO: 76851 - DNA, 4256 bp, Homo sapiens
gaagggagagagcaaacaaaggggtcaggagggaaaataatgcactggcttcctgagcccctgcagaggctgagcagggagagggggccagggccagaggggacagaggctggcggcagacgggccgggacaggcaggtcctaaatggcattgtttgaaggggccggctaattgcacagagcagtctgagcctgagaccccagccctggcctccccactctgtcctgggtgctggcgtctgagccttcgggacagcctgtccacatggaaccaagtcctgagcctccaagcttggaaagcatgaagggagacaccaggcatctcaatggagaggaggacgccggcgggagggaagactcgatcctcgtcaacggggcctgcagcgaccagtcctccgactcgcccccaatcctggaggctatccgcaccccggagatcagaggccgaagatcaagctcgcgactctccaagagggaggtgtccagtctgctaagctacacacaggacttgacaggcgatggcgacggggaagatggggatggctctgacaccccagtcatgccaaagctcttccgggaaaccaggactcgttcagaaagcccagctgtccgaactcgaaataacaacagtgtctccagccgggagaggcacaggccttccccacgttccacccgaggccggcagggccgcaaccatgtggacgagtcccccgtggagttcccggctaccaggtccctgagacggcgggcaacagcatcggcaggaacgccatggccgtcccctcccagctcttaccttaccatcgacctcacagacgacacagaggacacacatgggacgccccagagcagcagtaccccctacgcccgcctagcccaggacagccagcaggggggcatggagtccccgcaggtggaggcagacagtggagatggagacagttcagagtatcaggatgggaaggagtttggaataggggacctcgtgtggggaaagatcaagggcttctcctggtggcccgccatggtggtgtcttggaaggccacctccaagcgacaggctatgtctggcatgcggtgggtccagtggtttggcgatggcaagttctccgaggtctctgcagacaaactggtggcactggggctgttcagccagcactttaatttggccaccttcaataagctcgtctcctatcgaaaagccatgtaccatgctctggagaaagctagggtgcgagctggcaagaccttccccagcagccctggagactcattggaggaccagctgaagcccatgttggagtgggcccacgggggcttcaagcccactgggatcgagggcctcaaacccaacaacacgcaaccagagaacaagactcgaagacgcacagctgacgactcagccacctctgactactgccccgcacccaagcgcctcaagacaaattgctataacaacggcaaagaccgaggggatgaagatcagagccgagaacaaatggcttcagatgttgccaacaacaagagcagcctggaagatggctgtttgtcttgtggcaggaaaaaccccgtgtccttccaccctctctttgagggggggctctgtcagacatgccgggatcgcttccttgagctgttttacatgtatgatgacgatggctatcagtcttactgcactgtgtgctgcgagggccgagagctgctgctttgcagcaacacgagctgctgccggtgtttctgtgtggagtgcctggaggtgctggtgggcacaggcacagcggccgaggccaagcttcaggagccctggagctgctacatgtgtctcccgcagcgctgtcatggcgtcctgcggcgccggaaggactggaacgtgcgcctgcaggccttcttcaccagtgacacggggcttgaatacgaagcccccaagctgtaccctgccattcccgcagcccgaaggcggcccattcgagtcctgtcattgtttgatggcatcgcgacaggctacctagtcctcaaagagttgggcataaaggtaggaaagtacgtcgcttctgaagtgtgtgaggagtccattgctgttggaaccgtgaagcacgaggggaatatcaaatacgtgaacgacgtgaggaacatcacaaagaaaaatattgaagaatggggcccatttgacttggtgattggcggaagcccatgcaacgatctctcaaatgtgaatccagccaggaaaggcctgtatgagggtacaggccggctcttcttcgaattttaccacctgctgaattactcacgccccaaggagggtgatgaccggccgttcttctggatgtttgagaatgttgtagccatgaaggttggcgacaagagggacatctcacggttcctggagtgtaatccagtgatgattgatgccatcaaagtttctgctgctcacagggcccgatacttctggggcaacctacccgggatgaacaggcccgtgatagcatcaaagaatgataaactcgagctgcaggactgcttggaatacaataggatagccaagttaaagaaagtacagacaataaccaccaagtcgaactcgatcaaacaggggaaaaaccaacttttccctgttgtcatgaatggcaaagaagatgttttgtggtgcactgagctcgaaaggatctttggctttcctgtgcactacacagacgtgtccaacatgggccgtggtgcccgccagaagctgctgggaaggtcctggagcgtgcctgtcatccgacacctcttcgcccctctgaaggactactttgcatgtgaatagttccagccaggccccaagcccactggggtgtgtggcagagccaggacccaggaggtgtgattcctgaaggcatccccaggccctgctcttcctcagctgtgtgggtcataccgtgtacctcagttccctcttgctcagtgggggcagagccacctgactcttgcaggggtagcctgaggtgccgcctccttgtgcacaaatcagacctggctgcttggagcagcctaacacggtgctcattttttcttctcctaaaactttaaaacttgaagtaggtagcaacgtggctttttttttttcccttcctgggtctaccactcagagaaacaatggctaagataccaaaaccacagtgccgacagctctccaatactcaggttaatgctgaaaaatcatccaagacagttattgcaagagtttaatttttgaaaactggctactgctctgtgtttacagacgtgtgcagttgtaggcatgtagctacaggacatttttaagggcccaggatcgttttttcccagggcaagcagaagagaaaatgttgtatatgtcttttacccggcacattccccttgcctaaatacaagggctggagtctgcacgggacctattagagtattttccacaatgatgatgatttcagcagggatgacgtcatcatcacattcagggctattttttcccccacaaacccaagggcaggggccactcttagctaaatccctccccgtgactgcaatagaaccctctggggagctcaggaaggggtgtgctgagttctataatataagctgccatatattttgtagacaagtatggctcctccatatctccctcttccctaggagaggagtgtgaagcaaggagcttagataagacaccccctcaaacccattccctctccaggagacctaccctccacaggcacaggtccccagatgagaagtctgctaccctcatttctcatctttttactaaactcagaggcagtgacagcagtcagggacagacatacatttctcataccttccccacatctgagagatgacagggaaaactgcaaagctcggtgctccctttggagattttttaatccttttttattccataagaagtcgtttttagggagaacgggaattcagacaagctgcatttcagaaatgctgtcataatggtttttaacaccttttactcttcttactggtgctattttgtagaataaggaacaacgttgacaagttttgtggggctttttatacactttttaaaatctcaaacttctatttttatgtttaacgttttcattaaaatttttttgtaactggagccacgacgtaacaaatatggggaaaaaactgtgccttgtttcaacagtttttgctaatttttaggctgaaagatgacggatgcctagagtttaccttatgtttaattaaaatcagtatttgtctata

SEQ ID NO: 76852 - DNA, 510 bp, Homo sapiens
cggccgcagcccgcgtggacgctccgagcgccccccgacggacgggaccggctccctggcggtcgggcgagcgggcggcaacgctgcccggccggcagcgctggggttaagtggcccaagtaaacctagctcggcgatcggcgccggagattcgcgagcccagcgccctgcacggccgccagccggcctcccgccagccagccccgacccgcggctccgccgcccagccgcgccccagccagccctgcggcaggtgagcgccccggggccccggggaggctcggccgccagctgcttcgagggctgctaggggaggggacggcgggggctcccgaagctgccggggagagaccctctccagggacctcccgaggaggggctctcgccgggttggagacccggctgggtttgcggggtgaggaaacgtccacggaccctgcttggggtggaacggggacagcgggtgggacgcgggggacatacgtctgacggggaccggagatactagag

SEQ ID NO: 76853 - DNA, 4205 bp, Homo sapiens
cggccgcagcccgcgtggacgctccgagcgccccccgacggacgggaccggctccctggcggtcgggcgagcgggcggcaacgctgcccggccggcagcgctggggttaagtggcccaagtaaacctagctcggcgatcggcgccggagattcgcgagcccagcgccctgcacggccgccagccggcctcccgccagccagccccgacccgcggctccgccgcccagccgcgccccagccagccctgcggcaggaaagcatgaagggagacaccaggcatctcaatggagaggaggacgccggcgggagggaagactcgatcctcgtcaacggggcctgcagcgaccagtcctccgactcgcccccaatcctggaggctatccgcaccccggagatcagaggccgaagatcaagctcgcgactctccaagagggaggtgtccagtctgctaagctacacacaggacttgacaggcgatggcgacggggaagatggggatggctctgacaccccagtcatgccaaagctcttccgggaaaccaggactcgttcagaaagcccagctgtccgaactcgaaataacaacagtgtctccagccgggagaggcacaggccttccccacgttccacccgaggccggcagggccgcaaccatgtggacgagtcccccgtggagttcccggctaccaggtccctgagacggcgggcaacagcatcggcaggaacgccatggccgtcccctcccagctcttaccttaccatcgacctcacagacgacacagaggacacacatgggacgccccagagcagcagtaccccctacgcccgcctagcccaggacagccagcaggggggcatggagtccccgcaggtggaggcagacagtggagatggagacagttcagagtatcaggatgggaaggagtttggaataggggacctcgtgtggggaaagatcaagggcttctcctggtggcccgccatggtggtgtcttggaaggccacctccaagcgacaggctatgtctggcatgcggtgggtccagtggtttggcgatggcaagttctccgaggtctctgcagacaaactggtggcactggggctgttcagccagcactttaatttggccaccttcaataagctcgtctcctatcgaaaagccatgtaccatgctctggagaaagctagggtgcgagctggcaagaccttccccagcagccctggagactcattggaggaccagctgaagcccatgttggagtgggcccacgggggcttcaagcccactgggatcgagggcctcaaacccaacaacacgcaaccagtggttaataagtcgaaggtgcgtcgtgcaggcagtaggaaattagaatcaaggaaatacgagaacaagactcgaagacgcacagctgacgactcagccacctctgactactgccccgcacccaagcgcctcaagacaaattgctataacaacggcaaagaccgaggggatgaagatcagagccgagaacaaatggcttcagatgttgccaacaacaagagcagcctggaagatggctgtttgtcttgtggcaggaaaaaccccgtgtccttccaccctctctttgagggggggctctgtcagacatgccgggatcgcttccttgagctgttttacatgtatgatgacgatggctatcagtcttactgcactgtgtgctgcgagggccgagagctgctgctttgcagcaacacgagctgctgccggtgtttctgtgtggagtgcctggaggtgctggtgggcacaggcacagcggccgaggccaagcttcaggagccctggagctgctacatgtgtctcccgcagcgctgtcatggcgtcctgcggcgccggaaggactggaacgtgcgcctgcaggccttcttcaccagtgacacggggcttgaatacgaagcccccaagctgtaccctgccattcccgcagcccgaaggcggcccattcgagtcctgtcattgtttgatggcatcgcgacaggctacctagtcctcaaagagttgggcataaaggtaggaaagtacgtcgcttctgaagtgtgtgaggagtccattgctgttggaaccgtgaagcacgaggggaatatcaaatacgtgaacgacgtgaggaacatcacaaagaaaaatattgaagaatggggcccatttgacttggtgattggcggaagcccatgcaacgatctctcaaatgtgaatccagccaggaaaggcctgtatgagggtacaggccggctcttcttcgaattttaccacctgctgaattactcacgccccaaggagggtgatgaccggccgttcttctggatgtttgagaatgttgtagccatgaaggttggcgacaagagggacatctcacggttcctggagtgtaatccagtgatgattgatgccatcaaagtttctgctgctcacagggcccgatacttctggggcaacctacccgggatgaacagttaaagaaagtacagacaataaccaccaagtcgaactcgatcaaacaggggaaaaaccaacttttccctgttgtcatgaatggcaaagaagatgttttgtggtgcactgagctcgaaaggatctttggctttcctgtgcactacacagacgtgtccaacatgggccgtggtgcccgccagaagctgctgggaaggtcctggagcgtgcctgtcatccgacacctcttcgcccctctgaaggactactttgcatgtgaatagttccagccaggccccaagcccactggggtgtgtggcagagccaggacccaggaggtgtgattcctgaaggcatccccaggccctgctcttcctcagctgtgtgggtcataccgtgtacctcagttccctcttgctcagtgggggcagagccacctgactcttgcaggggtagcctgaggtgccgcctccttgtgcacaaatcagacctggctgcttggagcagcctaacacggtgctcattttttcttctcctaaaactttaaaacttgaagtaggtagcaacgtggctttttttttttcccttcctgggtctaccactcagagaaacaatggctaagataccaaaaccacagtgccgacagctctccaatactcaggttaatgctgaaaaatcatccaagacagttattgcaagagtttaatttttgaaaactggctactgctctgtgtttacagacgtgtgcagttgtaggcatgtagctacaggacatttttaagggcccaggatcgttttttcccagggcaagcagaagagaaaatgttgtatatgtcttttacccggcacattccccttgcctaaatacaagggctggagtctgcacgggacctattagagtattttccacaatgatgatgatttcagcagggatgacgtcatcatcacattcagggctattttttcccccacaaacccaagggcaggggccactcttagctaaatccctccccgtgactgcaatagaaccctctggggagctcaggaaggggtgtgctgagttctataatataagctgccatatattttgtagacaagtatggctcctccatatctccctcttccctaggagaggagtgtgaagcaaggagcttagataagacaccccctcaaacccattccctctccaggagacctaccctccacaggcacaggtccccagatgagaagtctgctaccctcatttctcatctttttactaaactcagaggcagtgacagcagtcagggacagacatacatttctcataccttccccacatctgagagatgacagggaaaactgcaaagctcggtgctccctttggagattttttaatccttttttattccataagaagtcgtttttagggagaacgggaattcagacaagctgcatttcagaaatgctgtcataatggtttttaacaccttttactcttcttactggtgctattttgtagaataaggaacaacgttgacaagttttgtggggctttttatacactttttaaaatctcaaacttctatttttatgtttaacgttttcattaaaatttttttgtaactggagccacgacgtaacaaatatggggaaaaaactgtgccttgtttcaacagtttttgctaatttttaggctgaaagatgacggatgcctagagtttaccttatgtttaattaaaatcagtatttgtctata

SEQ ID NO: 76854 - DNA, 4224 bp, Homo sapiens
cggccgcagcccgcgtggacgctccgagcgccccccgacggacgggaccggctccctggcggtcgggcgagcgggcggcaacgctgcccggccggcagcgctggggttaagtggcccaagtaaacctagctcggcgatcggcgccggagattcgcgagcccagcgccctgcacggccgccagccggcctcccgccagccagccccgacccgcggctccgccgcccagccgcgccccagccagccctgcggcaggaaagcatgaagggagacaccaggcatctcaatggagaggaggacgccggcgggagggaagactcgatcctcgtcaacggggcctgcagcgaccagtcctccgactcgcccccaatcctggaggctatccgcaccccggagatcagaggccgaagatcaagctcgcgactctccaagagggaggtgtccagtctgctaagctacacacaggacttgacaggcgatggcgacggggaagatggggatggctctgacaccccagtcatgccaaagctcttccgggaaaccaggactcgttcagaaagcccagctgtccgaactcgaaataacaacagtgtctccagccgggagaggcacaggccttccccacgttccacccgaggccggcagggccgcaaccatgtggacgagtcccccgtggagttcccggctaccaggtccctgagacggcgggcaacagcatcggcaggaacgccatggccgtcccctcccagctcttaccttaccatcgacctcacagacgacacagaggacacacatgggacgccccagagcagcagtaccccctacgcccgcctagcccaggacagccagcaggggggcatggagtccccgcaggtggaggcagacagtggagatggagacagttcagagtatcaggatgggaaggagtttggaataggggacctcgtgtggggaaagatcaagggcttctcctggtggcccgccatggtggtgtcttggaaggccacctccaagcgacaggctatgtctggcatgcggtgggtccagtggtttggcgatggcaagttctccgaggtctctgcagacaaactggtggcactggggctgttcagccagcactttaatttggccaccttcaataagctcgtctcctatcgaaaagccatgtaccatgctctggagaaagctagggtgcgagctggcaagaccttccccagcagccctggagactcattggaggaccagctgaagcccatgttggagtgggcccacgggggcttcaagcccactgggatcgagggcctcaaacccaacaacacgcaaccagtggttaataagtcgaaggtgcgtcgtgcaggcagtaggaaattagaatcaaggaaatacgagaacaagactcgaagacgcacagctgacgactcagccacctctgactactgccccgcacccaagcgcctcaagacaaattgctataacaacggcaaagaccgaggggatgaagatcagagccgagaacaaatggcttcagatgttgccaacaacaagagcagcctggaagatggctgtttgtcttgtggcaggaaaaaccccgtgtccttccaccctctctttgagggggggctctgtcagacatgccgggatcgcttccttgagctgttttacatgtatgatgacgatggctatcagtcttactgcactgtgtgctgcgagggccgagagctgctgctttgcagcaacacgagctgctgccggtgtttctgtgtggagtgcctggaggtgctggtgggcacaggcacagcggccgaggccaagcttcaggagccctggagctgctacatgtgtctcccgcagcgctgtcatggcgtcctgcggcgccggaaggactggaacgtgcgcctgcaggccttcttcaccagtgacacggggcttgaatacgaagcccccaagctgtaccctgccattcccgcagcccgaaggcggcccattcgagtcctgtcattgtttgatggcatcgcgacaggctacctagtcctcaaagagttgggcataaaggtaggaaagtacgtcgcttctgaagtgtgtgaggagtccattgctgttggaaccgtgaagcacgaggggaatatcaaatacgtgaacgacgtgaggaacatcacaaagaaaaatattgaagaatggggcccatttgacttggtgattggcggaagcccatgcaacgatctctcaaatgtgaatccagccaggaaaggcctgtatgagggtacaggccggctcttcttcgaattttaccacctgctgaattactcacgccccaaggagggtgatgaccggccgttcttctggatgtttgagaatgttgtagccatgaaggttggcgacaagagggacatctcacggttcctggagtgtaatccagtgatgattgatgccatcaaagtttctgctgctcacagggcccgatacttctggggcaacctacccgggatgaacaggatctttggctttcctgtgcactacacagacgtgtccaacatgggccgtggtgcccgccagaagctgctgggaaggtcctggagcgtgcctgtcatccgacacctcttcgcccctctgaaggactactttgcatgtgaatagttccagccaggccccaagcccactggggtgtgtggcagagccaggacccaggaggtgtgattcctgaaggcatccccaggccctgctcttcctcagctgtgtgggtcataccgtgtacctcagttccctcttgctcagtgggggcagagccacctgactcttgcaggggtagcctgaggtgccgcctccttgtgcacaaatcagacctggctgcttggagcagcctaacacggtgctcattttttcttctcctaaaactttaaaacttgaagtaggtagcaacgtggctttttttttttcccttcctgggtctaccactcagagaaacaatggctaagataccaaaaccacagtgccgacagctctccaatactcaggttaatgctgaaaaatcatccaagacagttattgcaagagtttaatttttgaaaactggctactgctctgtgtttacagacgtgtgcagttgtaggcatgtagctacaggacatttttaagggcccaggatcgttttttcccagggcaagcagaagagaaaatgttgtatatgtcttttacccggcacattccccttgcctaaatacaagggctggagtctgcacgggacctattagagtattttccacaatgatgatgatttcagcagggatgacgtcatcatcacattcagggctattttttcccccacaaacccaagggcaggggccactcttagctaaatccctccccgtgactgcaatagaaccctctggggagctcaggaaggggtgtgctgagttctataatataagctgccatatattttgtagacaagtatggctcctccatatctccctcttccctaggagaggagtgtgaagcaaggagcttagataagacaccccctcaaacccattccctctccaggagacctaccctccacaggcacaggtccccagatgagaagtctgctaccctcatttctcatctttttactaaactcagaggcagtgacagcagtcagggacagacatacatttctcataccttccccacatctgagagatgacagggaaaactgcaaagctcggtgctccctttggagattttttaatccttttttattccataagaagtcgtttttagggagaacgggaattcagacaagctgcatttcagaaatgctgtcataatggtttttaacaccttttactcttcttactggtgctattttgtagaataaggaacaacgttgacaagttttgtggggctttttatacactttttaaaatctcaaacttctatttttatgtttaacgttttcattaaaatttttttgtaactggagccacgacgtaacaaatatggggaaaaaactgtgccttgtttcaacagtttttgctaatttttaggctgaaagatgacggatgcctagagtttaccttatgtttaattaaaatcagtatttgtctataaaaaaagaaaacacaagagacgggaaagcagaagagaagacaaagaaaaggaggggaggaaaaatcacagggagaaaaggaccatggtgagaggaccaggaaaagagggggaaaaagggagaaaagatagaaccgggg

SEQ ID NO: 76855 - DNA, 4149 bp, Homo sapiens
cggccgcagcccgcgtggacgctccgagcgccccccgacggacgggaccggctccctggcggtcgggcgagcgggcggcaacgctgcccggccggcagcgctggggttaagtggcccaagtaaacctagctcggcgatcggcgccggagattcgcgagcccagcgccctgcacggccgccagccggcctcccgccagccagccccgacccgcggctccgccgcccagccgcgccccagccagccctgcggcaggaaagcatgaagggagacaccaggcatctcaatggagaggaggacgccggcgggagggaagactcgatcctcgtcaacggggcctgcagcgaccagtcctccgactcgcccccaatcctggaggctatccgcaccccggagatcagaggccgaagatcaagctcgcgactctccaagagggaggtgtccagtctgctaagctacacacaggacttgacaggcgatggcgacggggaagatggggatggctctgacaccccagtcatgccaaagctcttccgggaaaccaggactcgttcagaaagcccagctgtccgaactcgaaataacaacagtgtctccagccgggagaggcacaggccttccccacgttccacccgaggccggcagggccgcaaccatgtggacgagtcccccgtggagttcccggctaccaggtccctgagacggcgggcaacagcatcggcaggaacgccatggccgtcccctcccagctcttaccttaccatcgacctcacagacgacacagaggacacacatgggacgccccagagcagcagtaccccctacgcccgcctagcccaggacagccagcaggggggcatggagtccccgcaggtggaggcagacagtggagatggagacagttcagagtatcaggatgggaaggagtttggaataggggacctcgtgtggggaaagatcaagggcttctcctggtggcccgccatggtggtgtcttggaaggccacctccaagcgacaggctatgtctggcatgcggtgggtccagtggtttggcgatggcaagttctccgaggtctctgcagacaaactggtggcactggggctgttcagccagcactttaatttggccaccttcaataagctcgtctcctatcgaaaagccatgtaccatgctctggagaaagctagggtgcgagctggcaagaccttccccagcagccctggagactcattggaggaccagctgaagcccatgttggagtgggcccacgggggcttcaagcccactgggatcgagggcctcaaacccaacaacacgcaaccagtggttaataagtcgaaggtgcgtcgtgcaggcagtaggaaattagaatcaaggaaatacgagaacaagactcgaagacgcacagctgacgactcagccacctctgactactgccccgcacccaagcgcctcaagacaaattgctataacaacggcaaagaccgaggggatgaagatcagagccgagaacaaatggcttcagatgttgccaacaacaagagcagcctggaagatggctgtttgtcttgtggcaggaaaaaccccgtgtccttccaccctctctttgagggggggctctgtcagacatgccgggatcgcttccttgagctgttttacatgtatgatgacgatggctatcagtcttactgcactgtgtgctgcgagggccgagagctgctgctttgcagcaacacgagctgctgccggtgtttctgtgtggagtgcctggaggtgctggtgggcacaggcacagcggccgaggccaagcttcaggagccctggagctgctacatgtgtctcccgcagcgctgtcatggcgtcctgcggcgccggaaggactggaacgtgcgcctgcaggccttcttcaccagtgacacggggcttgaatacgaagcccccaagctgtaccctgccattcccgcagcccgaaggcggcccattcgagtcctgtcattgtttgatggcatcgcgacaggctacctagtcctcaaagagttgggcataaaggtaggaaagtacgtcgcttctgaagtgtgtgaggagtccattgctgttggaaccgtgaagcacgaggggaatatcaaatacgtgaacgacgtgaggaacatcacaaagaaaaatattgaagaatggggcccatttgacttggtgattggcggaagcccatgcaacgatctctcaaatgtgaatccagccaggaaaggcctgtatgagggtacaggccggctcttcttcgaattttaccacctgctgaattactcacgccccaaggagggtgatgaccggccgttcttctggatgtttgagaatgttgtagccatgaaggttggcgacaagagggacatctcacggttcctggagtgtaatccagtgatgattgatgccatcaaagtttctgctgctcacagggcccgatacttctggggcaacctacccgggatgaacaggatctttggctttcctgtgcactacacagacgtgtccaacatgggccgtggtgcccgccagaagctgctgggaaggtcctggagcgtgcctgtcatccgacacctcttcgcccctctgaaggactactttgcatgtgaatagttccagccaggccccaagcccactggggtgtgtggcagagccaggacccaggaggtgtgattcctgaaggcatccccaggccctgctcttcctcagctgtgtgggtcataccgtgtacctcagttccctcttgctcagtgggggcagagccacctgactcttgcaggggtagcctgaggtgccgcctccttgtgcacaaatcagacctggctgcttggagcagcctaacacggtgctcattttttcttctcctaaaactttaaaacttgaagtaggtagcaacgtggctttttttttttcccttcctgggtctaccactcagagaaacaatggctaagataccaaaaccacagtgccgacagctctccaatactcaggttaatgctgaaaaatcatccaagacagttattgcaagagtttaatttttgaaaactggctactgctctgtgtttacagacgtgtgcagttgtaggcatgtagctacaggacatttttaagggcccaggatcgttttttcccagggcaagcagaagagaaaatgttgtatatgtcttttacccggcacattccccttgcctaaatacaagggctggagtctgcacgggacctattagagtattttccacaatgatgatgatttcagcagggatgacgtcatcatcacattcagggctattttttcccccacaaacccaagggcaggggccactcttagctaaatccctccccgtgactgcaatagaaccctctggggagctcaggaaggggtgtgctgagttctataatataagctgccatatattttgtagacaagtatggctcctccatatctccctcttccctaggagaggagtgtgaagcaaggagcttagataagacaccccctcaaacccattccctctccaggagacctaccctccacaggcacaggtccccagatgagaagtctgctaccctcatttctcatctttttactaaactcagaggcagtgacagcagtcagggacagacatacatttctcataccttccccacatctgagagatgacagggaaaactgcaaagctcggtgctccctttggagattttttaatccttttttattccataagaagtcgtttttagggagaacgggaattcagacaagctgcatttcagaaatgctgtcataatggtttttaacaccttttactcttcttactggtgctattttgtagaataaggaacaacgttgacaagttttgtggggctttttatacactttttaaaatctcaaacttctatttttatgtttaacgttttcattaaaatttttttgtaactggagccacgacgtaacaaatatggggaaaaaactgtgccttgtttcaacagtttttgctaatttttaggctgaaagatgacggatgcctagagtttaccttatgtttaattaaaatcagtatttgtctataagaaaaaaaaacaacaaaacacaaacactacaacacaacaaacaacaacacaacacaaggggg

SEQ ID NO: 76856 - DNA, 4275 bp, Homo sapiens
cggccgcagcccgcgtggacgctccgagcgccccccgacggacgggaccggctccctggcggtcgggcgagcgggcggcaacgctgcccggccggcagcgctggggttaagtggcccaagtaaacctagctcggcgatcggcgccggagattcgcgagcccagcgccctgcacggccgccagccggcctcccgccagccagccccgacccgcggctccgccgcccagccgcgccccagccagccctgcggcaggaaagcatgaagggagacaccaggcatctcaatggagaggaggacgccggcgggagggaagactcgatcctcgtcaacggggcctgcagcgaccagtcctccgactcgcccccaatcctggaggctatccgcaccccggagatcagaggccgaagatcaagctcgcgactctccaagagggaggtgtccagtctgctaagctacacacaggacttgacaggcgatggcgacggggaagatggggatggctctgacaccccagtcatgccaaagctcttccgggaaaccaggactcgttcagaaagcccagctgtccgaactcgaaataacaacagtgtctccagccgggagaggcacaggccttccccacgttccacccgaggccggcagggccgcaaccatgtggacgagtcccccgtggagttcccggctaccaggtccctgagacggcgggcaacagcatcggcaggaacgccatggccgtcccctcccagctcttaccttaccatcgacctcacagacgacacagaggacacacatgggacgccccagagcagcagtaccccctacgcccgcctagcccaggacagccagcaggggggcatggagtccccgcaggtggaggcagacagtggagatggagacagttcagagtatcaggatgggaaggagtttggaataggggacctcgtgtggggaaagatcaagggcttctcctggtggcccgccatggtggtgtcttggaaggccacctccaagcgacaggctatgtctggcatgcggtgggtccagtggtttggcgatggcaagttctccgaggtctctgcagacaaactggtggcactggggctgttcagccagcactttaatttggccaccttcaataagctcgtctcctatcgaaaagccatgtaccatgctctggagaaagctagggtgcgagctggcaagaccttccccagcagccctggagactcattggaggaccagctgaagcccatgttggagtgggcccacgggggcttcaagcccactgggatcgagggcctcaaacccaacaacacgcaaccagtggttaataagtcgaaggtgcgtcgtgcaggcagtaggaaattagaatcaaggaaatacgagaacaagactcgaagacgcacagctgacgactcagccacctctgactactgccccgcacccaagcgcctcaagacaaattgctataacaacggcaaagaccgaggggatgaagatcagagccgagaacaaatggcttcagatgttgccaacaacaagagcagcctggaagatggctgtttgtcttgtggcaggaaaaaccccgtgtccttccaccctctctttgagggggggctctgtcagacatgccgggatcgcttccttgagctgttttacatgtatgatgacgatggctatcagtcttactgcactgtgtgctgcgagggccgagagctgctgctttgcagcaacacgagctgctgccggtgtttctgtgtggagtgcctggaggtgctggtgggcacaggcacagcggccgaggccaagcttcaggagccctggagctgctacatgtgtctcccgcagcgctgtcatggcgtcctgcggcgccggaaggactggaacgtgcgcctgcaggccttcttcaccagtgacacggggcttgaatacgaagcccccaagctgtaccctgccattcccgcagcccgaaggcggcccattcgagtcctgtcattgtttgatggcatcgcgacaggctacctagtcctcaaagagttgggcataaaggtaggaaagtacgtcgcttctgaagtgtgtgaggagtccattgctgttggaaccgtgaagcacgaggggaatatcaaatacgtgaacgacgtgaggaacatcacaaagaaaaatattgaagaatggggcccatttgacttggtgattggcggaagcccatgcaacgatctctcaaatgtgaatccagccaggaaaggcctgtatgagggtacaggccggctcttcttcgaattttaccacctgctgaattactcacgccccaaggagggtgatgaccggccgttcttctggatgtttgagaatgttgtagccatgaaggttggcgacaagagggacatctcacggttcctggagtgtaatccagtgatgattgatgccatcaaagtttctgctgctcacagggcccgatacttctggggcaacctacccgggatgaacaggcccgtgatagcatcaaagaatgataaactcgagctgcaggactgcttggaatacaataggatagccaagttaaagaaagtacagacaataaccaccaagtcgaactcgatcaaacaggggaaaaaccaacttttccctgttgtcatgaatggcaaagaagatgttttgtggtgcactgagctcgaaaggatctttggctttcctgtgcactacacagacgtgtccaacatgggccgtggtgcccgccagaagctgctgggaaggtcctggagcgtgcctgtcatccgacacctcttcgcccctctgaaggactactttgcatgtgaatagttccagccaggccccaagcccactggggtgtgtggcagagccaggacccaggaggtgtgattcctgaaggcatccccaggccctgctcttcctcagctgtgtgggtcataccgtgtacctcagttccctcttgctcagtgggggcagagccacctgactcttgcaggggtagcctgaggtgccgcctccttgtgcacaaatcagacctggctgcttggagcagcctaacacggtgctcattttttcttctcctaaaactttaaaacttgaagtaggtagcaacgtggctttttttttttcccttcctgggtctaccactcagagaaacaatggctaagataccaaaaccacagtgccgacagctctccaatactcaggttaatgctgaaaaatcatccaagacagttattgcaagagtttaatttttgaaaactggctactgctctgtgtttacagacgtgtgcagttgtaggcatgtagctacaggacatttttaagggcccaggatcgttttttcccagggcaagcagaagagaaaatgttgtatatgtcttttacccggcacattccccttgcctaaatacaagggctggagtctgcacgggacctattagagtattttccacaatgatgatgatttcagcagggatgacgtcatcatcacattcagggctattttttcccccacaaacccaagggcaggggccactcttagctaaatccctccccgtgactgcaatagaaccctctggggagctcaggaaggggtgtgctgagttctataatataagctgccatatattttgtagacaagtatggctcctccatatctccctcttccctaggagaggagtgtgaagcaaggagcttagataagacaccccctcaaacccattccctctccaggagacctaccctccacaggcacaggtccccagatgagaagtctgctaccctcatttctcatctttttactaaactcagaggcagtgacagcagtcagggacagacatacatttctcataccttccccacatctgagagatgacagggaaaactgcaaagctcggtgctccctttggagattttttaatccttttttattccataagaagtcgtttttagggagaacgggaattcagacaagctgcatttcagaaatgctgtcataatggtttttaacaccttttactcttcttactggtgctattttgtagaataaggaacaacgttgacaagttttgtggggctttttatacactttttaaaatctcaaacttctatttttatgtttaacgttttcattaaaatttttttgtaactggagccacgacgtaacaaatatggggaaaaaactgtgccttgtttcaacagtttttgctaatttttaggctgaaagatgacggatgcctagagtttaccttatgtttaattaaaatcagtatttgtctata

SEQ ID NO: 76857 - DNA, 4026 bp, Homo sapiens
cggccgcagcccgcgtggacgctccgagcgccccccgacggacgggaccggctccctggcggtcgggcgagcgggcggcaacgctgcccggccggcagcgctggggttaagtggcccaagtaaacctagctcggcgatcggcgccggagattcgcgagcccagcgccctgcacggccgccagccggcctcccgccagccagccccgacccgcggctccgccgcccagccgcgccccagccagccctgcggcaggaaagcatgaagggagacaccaggcatctcaatggagaggaggacgccggcgggagggaagactcgatcctcgtcaacggggcctgcagcgaccagtcctccgactcgcccccaatcctggaggctatccgcaccccggagatcagaggccgaagatcaagctcgcgactctccaagagggaggtgtccagtctgctaagctacacacaggacttgacaggcgatggcgacggggaagatggggatggctctgacaccccagtcatgccaaagctcttccgggaaaccaggactcgttcagaaagcccagctgtccgaactcgaaataacaacagtgtctccagccgggagaggcacaggccttccccacgttccacccgaggccggcagggccgcaaccatgtggacgagtcccccgtggagttcccggctaccaggtccctgagacggcgggcaacagcatcggcaggaacgccatggccgtcccctcccagctcttaccttaccatcgacctcacagacgacacagaggacacacatgggacgccccagagcagcagtaccccctacgcccgcctagcccaggacagccagcaggggggcatggagtccccgcaggtggaggcagacagtggagatggagacagttcagagtatcaggatgggaaggagtttggaataggggacctcgtgtggggaaagatcaagggcttctcctggtggcccgccatggtggtgtcttggaaggccacctccaagcgacaggctatgtctggcatgcggtgggtccagtggtttggcgatggcaagttctccgaggtctctgcagacaaactggtggcactggggctgttcagccagcactttaatttggccaccttcaataagctcgtctcctatcgaaaagccatgtaccatgctctggagaaagctagggtgcgagctggcaagaccttccccagcagccctggagactcattggaggaccagctgaagcccatgttggagtgggcccacgggggcttcaagcccactgggatcgagggcctcaaacccaacaacacgcaaccagagaacaagactcgaagacgcacagctgacgactcagccacctctgactactgccccgcacccaagcgcctcaagacaaattgctataacaacggcaaagaccgaggggatgaagatcagagccgagaacaaatggcttcagatgttgccaacaacaagagcagcctggaagatggctgtttgtcttgtggcaggaaaaaccccgtgtccttccaccctctctttgagggggggctctgtcagacatgccgggatcgcttccttgagctgttttacatgtatgatgacgatggctatcagtcttactgcactgtgtgctgcgagggccgagagctgctgctttgcagcaacacgagctgctgccggtgtttctgtgtggagtgcctggaggtgctggtgggcacaggcacagcggccgaggccaagcttcaggagccctggagctgctacatgtgtctcccgcagcgctgtcatggcgtcctgcggcgccggaaggactggaacgtgcgcctgcaggccttcttcaccagtgacacggggcttgaatacgaagcccccaagctgtaccctgccattcccgcagcccgaaggcggcccattcgagtcctgtcattgtttgatggcatcgcgacaggctacctagtcctcaaagagttgggcataaaggtaggaaagtacgtcgcttctgaagtgtgtgaggagtccattgctgttggaaccgtgaagcacgaggggaatatcaaatacgtgaacgacgtgaggaacatcacaaagaaaaatattgaagaatggggcccatttgacttggtgattggcggaagcccatgcaacgatctctcaaatgtgaatccagccaggaaaggcctgtatgagggtacaggccggctcttcttcgaattttaccacctgctgaattactcacgccccaaggagggtgatgaccggccgttcttctggatgtttgagaatgttgtagccatgaaggttggcgacaagagggacatctcacggttcctggagtgtaatccagtgatgattgatgccatcaaagtttctgctgctcacagggcccgatacttctggggcaacctacccgggatgaacaggatctttggctttcctgtgcactacacagacgtgtccaacatgggccgtggtgcccgccagaagctgctgggaaggtcctggagcgtgcctgtcatccgacacctcttcgcccctctgaaggactactttgcatgtgaatagttccagccaggccccaagcccactggggtgtgtggcagagccaggacccaggaggtgtgattcctgaaggcatccccaggccctgctcttcctcagctgtgtgggtcataccgtgtacctcagttccctcttgctcagtgggggcagagccacctgactcttgcaggggtagcctgaggtgccgcctccttgtgcacaaatcagacctggctgcttggagcagcctaacacggtgctcattttttcttctcctaaaactttaaaacttgaagtaggtagcaacgtggctttttttttttcccttcctgggtctaccactcagagaaacaatggctaagataccaaaaccacagtgccgacagctctccaatactcaggttaatgctgaaaaatcatccaagacagttattgcaagagtttaatttttgaaaactggctactgctctgtgtttacagacgtgtgcagttgtaggcatgtagctacaggacatttttaagggcccaggatcgttttttcccagggcaagcagaagagaaaatgttgtatatgtcttttacccggcacattccccttgcctaaatacaagggctggagtctgcacgggacctattagagtattttccacaatgatgatgatttcagcagggatgacgtcatcatcacattcagggctattttttcccccacaaacccaagggcaggggccactcttagctaaatccctccccgtgactgcaatagaaccctctggggagctcaggaaggggtgtgctgagttctataatataagctgccatatattttgtagacaagtatggctcctccatatctccctcttccctaggagaggagtgtgaagcaaggagcttagataagacaccccctcaaacccattccctctccaggagacctaccctccacaggcacaggtccccagatgagaagtctgctaccctcatttctcatctttttactaaactcagaggcagtgacagcagtcagggacagacatacatttctcataccttccccacatctgagagatgacagggaaaactgcaaagctcggtgctccctttggagattttttaatccttttttattccataagaagtcgtttttagggagaacgggaattcagacaagctgcatttcagaaatgctgtcataatggtttttaacaccttttactcttcttactggtgctattttgtagaataaggaacaacgttgacaagttttgtggggctttttatacactttttaaaatctcaaacttctatttttatgtttaacgttttcattaaaatttttttgtaactggagccacgacgtaacaaatatggggaaaaaactgtgccttgtttcaacagtttttgctaatttttaggctgaaagatgacggatgcctagagtttaccttatgtttaattaaaatcagtatttgtctata

SEQ ID NO: 76858 - DNA, 4086 bp, Homo sapiens
cggccgcagcccgcgtggacgctccgagcgccccccgacggacgggaccggctccctggcggtcgggcgagcgggcggcaacgctgcccggccggcagcgctggggttaagtggcccaagtaaacctagctcggcgatcggcgccggagattcgcgagcccagcgccctgcacggccgccagccggcctcccgccagccagccccgacccgcggctccgccgcccagccgcgccccagccagccctgcggcaggaaagcatgaagggagacaccaggcatctcaatggagaggaggacgccggcgggagggaagactcgatcctcgtcaacggggcctgcagcgaccagtcctccgactcgcccccaatcctggaggctatccgcaccccggagatcagaggccgaagatcaagctcgcgactctccaagagggaggtgtccagtctgctaagctacacacaggacttgacaggcgatggcgacggggaagatggggatggctctgacaccccagtcatgccaaagctcttccgggaaaccaggactcgttcagaaagcccagctgtccgaactcgaaataacaacagtgtctccagccgggagaggcacaggccttccccacgttccacccgaggccggcagggccgcaaccatgtggacgagtcccccgtggagttcccggctaccaggtccctgagacggcgggcaacagcatcggcaggaacgccatggccgtcccctcccagctcttaccttaccatcgacctcacagacgacacagaggacacacatgggacgccccagagcagcagtaccccctacgcccgcctagcccaggacagccagcaggggggcatggagtccccgcaggtggaggcagacagtggagatggagacagttcagagtatcaggatgggaaggagtttggaataggggacctcgtgtggggaaagatcaagggcttctcctggtggcccgccatggtggtgtcttggaaggccacctccaagcgacaggctatgtctggcatgcggtgggtccagtggtttggcgatggcaagttctccgaggtctctgcagacaaactggtggcactggggctgttcagccagcactttaatttggccaccttcaataagctcgtctcctatcgaaaagccatgtaccatgctctggagaaagctagggtgcgagctggcaagaccttccccagcagccctggagactcattggaggaccagctgaagcccatgttggagtgggcccacgggggcttcaagcccactgggatcgagggcctcaaacccaacaacacgcaaccagtggttaataagtcgaaggtgcgtcgtgcaggcagtaggaaattagaatcaaggaaatacgagaacaagactcgaagacgcacagctgacgactcagccacctctgactactgccccgcacccaagcgcctcaagacaaattgctataacaacggcaaagaccgaggggatgaagatcagagccgagaacaaatggcttcagatgttgccaacaacaagagcagcctggaagatggctgtttgtcttgtggcaggaaaaaccccgtgtccttccaccctctctttgagggggggctctgtcagacatgccgggatcgcttccttgagctgttttacatgtatgatgacgatggctatcagtcttactgcactgtgtgctgcgagggccgagagctgctgctttgcagcaacacgagctgctgccggtgtttctgtgtggagtgcctggaggtgctggtgggcacaggcacagcggccgaggccaagcttcaggagccctggagctgctacatgtgtctcccgcagcgctgtcatggcgtcctgcggcgccggaaggactggaacgtgcgcctgcaggccttcttcaccagtgacacggggcttgaatacgaagcccccaagctgtaccctgccattcccgcagcccgaaggcggcccattcgagtcctgtcattgtttgatggcatcgcgacaggctacctagtcctcaaagagttgggcataaaggtaggaaagtacgtcgcttctgaagtgtgtgaggagtccattgctgttggaaccgtgaagcacgaggggaatatcaaatacgtgaacgacgtgaggaacatcacaaagaaaaatattgaagaatggggcccatttgacttggtgattggcggaagcccatgcaacgatctctcaaatgtgaatccagccaggaaaggcctgtatgagggtacaggccggctcttcttcgaattttaccacctgctgaattactcacgccccaaggagggtgatgaccggccgttcttctggatgtttgagaatgttgtagccatgaaggttggcgacaagagggacatctcacggttcctggagtgtaatccagtgatgattgatgccatcaaagtttctgctgctcacagggcccgatacttctggggcaacctacccgggatgaacaggatctttggctttcctgtgcactacacagacgtgtccaacatgggccgtggtgcccgccagaagctgctgggaaggtcctggagcgtgcctgtcatccgacacctcttcgcccctctgaaggactactttgcatgtgaatagttccagccaggccccaagcccactggggtgtgtggcagagccaggacccaggaggtgtgattcctgaaggcatccccaggccctgctcttcctcagctgtgtgggtcataccgtgtacctcagttccctcttgctcagtgggggcagagccacctgactcttgcaggggtagcctgaggtgccgcctccttgtgcacaaatcagacctggctgcttggagcagcctaacacggtgctcattttttcttctcctaaaactttaaaacttgaagtaggtagcaacgtggctttttttttttcccttcctgggtctaccactcagagaaacaatggctaagataccaaaaccacagtgccgacagctctccaatactcaggttaatgctgaaaaatcatccaagacagttattgcaagagtttaatttttgaaaactggctactgctctgtgtttacagacgtgtgcagttgtaggcatgtagctacaggacatttttaagggcccaggatcgttttttcccagggcaagcagaagagaaaatgttgtatatgtcttttacccggcacattccccttgcctaaatacaagggctggagtctgcacgggacctattagagtattttccacaatgatgatgatttcagcagggatgacgtcatcatcacattcagggctattttttcccccacaaacccaagggcaggggccactcttagctaaatccctccccgtgactgcaatagaaccctctggggagctcaggaaggggtgtgctgagttctataatataagctgccatatattttgtagacaagtatggctcctccatatctccctcttccctaggagaggagtgtgaagcaaggagcttagataagacaccccctcaaacccattccctctccaggagacctaccctccacaggcacaggtccccagatgagaagtctgctaccctcatttctcatctttttactaaactcagaggcagtgacagcagtcagggacagacatacatttctcataccttccccacatctgagagatgacagggaaaactgcaaagctcggtgctccctttggagattttttaatccttttttattccataagaagtcgtttttagggagaacgggaattcagacaagctgcatttcagaaatgctgtcataatggtttttaacaccttttactcttcttactggtgctattttgtagaataaggaacaacgttgacaagttttgtggggctttttatacactttttaaaatctcaaacttctatttttatgtttaacgttttcattaaaatttttttgtaactggagccacgacgtaacaaatatggggaaaaaactgtgccttgtttcaacagtttttgctaatttttaggctgaaagatgacggatgcctagagtttaccttatgtttaattaaaatcagtatttgtctata

SEQ ID NO: 76859 - DNA, 4156 bp, Homo sapiens
cggccgcagcccgcgtggacgctccgagcgccccccgacggacgggaccggctccctggcggtcgggcgagcgggcggcaacgctgcccggccggcagcgctggggttaagtggcccaagtaaacctagctcggcgatcggcgccggagattcgcgagcccagcgccctgcacggccgccagccggcctcccgccagccagccccgacccgcggctccgccgcccagccgcgccccagccagccctgcggcaggaaagcatgaagggagacaccaggcatctcaatggagaggaggacgccggcgggagggaagactcgatcctcgtcaacggggcctgcagcgaccagtcctccgactcgcccccaatcctggaggctatccgcaccccggagatcagaggccgaagatcaagctcgcgactctccaagagggaggtgtccagtctgctaagctacacacaggacttgacaggcgatggcgacggggaagatggggatggctctgacaccccagtcatgccaaagctcttccgggaaaccaggactcgttcagaaagcccagctgtccgaactcgaaataacaacagtgtctccagccgggagaggcacaggccttccccacgttccacccgaggccggcagggccgcaaccatgtggacgagtcccccgtggagttcccggctaccaggtccctgagacggcgggcaacagcatcggcaggaacgccatggccgtcccctcccagctcttaccttaccatcgacctcacagacgacacagaggacacacatgggacgccccagagcagcagtaccccctacgcccgcctagcccaggacagccagcaggggggcatggagtccccgcaggtggaggcagacagtggagatggagacagttcagagtatcaggatgggaaggagtttggaataggggacctcgtgtggggaaagatcaagggcttctcctggtggcccgccatggtggtgtcttggaaggccacctccaagcgacaggctatgtctggcatgcggtgggtccagtggtttggcgatggcaagttctccgaggtctctgcagacaaactggtggcactggggctgttcagccagcactttaatttggccaccttcaataagctcgtctcctatcgaaaagccatgtaccatgctctggagaaagctagggtgcgagctggcaagaccttccccagcagccctggagactcattggaggaccagctgaagcccatgttggagtgggcccacgggggcttcaagcccactgggatcgagggcctcaaacccaacaacacgcaaccagtggttaataagtcgaaggtgcgtcgtgcaggcagtaggaaattagaatcaaggaaatacgagaacaagactcgaagacgcacagctgacgactcagccacctctgactactgccccgcacccaagcgcctcaagacaaattgctataacaacggcaaagaccgaggggatgaagatcagagccgagaacaaatggcttcagatgttgccaacaacaagagcagcctggaagatggctgtttgtcttgtggcaggaaaaaccccgtgtccttccaccctctctttgagggggggctctgtcagacatgccgggatcgcttccttgagctgttttacatgtatgatgacgatggctatcagtcttactgcactgtgtgctgcgagggccgagagctgctgctttgcagcaacacgagctgctgccggtgtttctgtgtggagtgcctggaggtgctggtgggcacaggcacagcggccgaggccaagcttcaggagccctggagctgctacatgtgtctcccgcagcgctgtcatggcgtcctgcggcgccggaaggactggaacgtgcgcctgcaggccttcttcaccagtgacacggggcttgaatacgaagcccccaagctgtaccctgccattcccgcagcccgaaggcggcccattcgagtcctgtcattgtttgatggcatcgcgacaggctacctagtcctcaaagagttgggcataaaggtaggaaagtacgtcgcttctgaagtgtgtgaggagtccattgctgttggaaccgtgaagcacgaggggaatatcaaatacgtgaacgacgtgaggaacatcacaaagaaaaatattgaagaatggggcccatttgacttggtgattggcggaagcccatgcaacgatctctcaaatgtgaatccagccaggaaaggcctgtatgagggtacaggccggctcttcttcgaattttaccacctgctgaattactcacgccccaaggagggtgatgaccggccgttcttctggatgtttgagaatgttgtagccatgaaggttggcgacaagagggacatctcacggttcctggagtgtaatccagtgatgattgatgccatcaaagtttctgctgctcacagggcccgatacttctggggcaacctacccgggatgaacaggcccgtgatagcatcaaagaatgataaactcgagctgcaggactgcttggaatacaataggatagccaaggatctttggctttcctgtgcactacacagacgtgtccaacatgggccgtggtgcccgccagaagctgctgggaaggtcctggagcgtgcctgtcatccgacacctcttcgcccctctgaaggactactttgcatgtgaatagttccagccaggccccaagcccactggggtgtgtggcagagccaggacccaggaggtgtgattcctgaaggcatccccaggccctgctcttcctcagctgtgtgggtcataccgtgtacctcagttccctcttgctcagtgggggcagagccacctgactcttgcaggggtagcctgaggtgccgcctccttgtgcacaaatcagacctggctgcttggagcagcctaacacggtgctcattttttcttctcctaaaactttaaaacttgaagtaggtagcaacgtggctttttttttttcccttcctgggtctaccactcagagaaacaatggctaagataccaaaaccacagtgccgacagctctccaatactcaggttaatgctgaaaaatcatccaagacagttattgcaagagtttaatttttgaaaactggctactgctctgtgtttacagacgtgtgcagttgtaggcatgtagctacaggacatttttaagggcccaggatcgttttttcccagggcaagcagaagagaaaatgttgtatatgtcttttacccggcacattccccttgcctaaatacaagggctggagtctgcacgggacctattagagtattttccacaatgatgatgatttcagcagggatgacgtcatcatcacattcagggctattttttcccccacaaacccaagggcaggggccactcttagctaaatccctccccgtgactgcaatagaaccctctggggagctcaggaaggggtgtgctgagttctataatataagctgccatatattttgtagacaagtatggctcctccatatctccctcttccctaggagaggagtgtgaagcaaggagcttagataagacaccccctcaaacccattccctctccaggagacctaccctccacaggcacaggtccccagatgagaagtctgctaccctcatttctcatctttttactaaactcagaggcagtgacagcagtcagggacagacatacatttctcataccttccccacatctgagagatgacagggaaaactgcaaagctcggtgctccctttggagattttttaatccttttttattccataagaagtcgtttttagggagaacgggaattcagacaagctgcatttcagaaatgctgtcataatggtttttaacaccttttactcttcttactggtgctattttgtagaataaggaacaacgttgacaagttttgtggggctttttatacactttttaaaatctcaaacttctatttttatgtttaacgttttcattaaaatttttttgtaactggagccacgacgtaacaaatatggggaaaaaactgtgccttgtttcaacagtttttgctaatttttaggctgaaagatgacggatgcctagagtttaccttatgtttaattaaaatcagtatttgtctata

SEQ ID NO: 76860 - DNA, 421 bp, Homo sapiens
ggttctttttctattgtctgtttttccctcttcattgaatttcttagcacagctggccttttttattgtatccctgacactatatgtgaaggagagcagaggctctagatgttgttcttccagagaagatttaacttccctggtagcagctagagtgcaagcaaaccatcttagtccagccaaggcctgtaatagctggaggttggtcacaatatttgtaaagctatgtcaactgctcatttgcccgtactactagttttgtagccctgcaggagtcccggctgagagcttcacatgttattatgacctctccttggaaggtcctggttctgttgtactaaaagactagaaaattctggatttctgcttaactttaatcttttgccctgtaaagcttaagaattcaataaaatgtttgagt

SEQ ID NO: 76861 - DNA, 1102 bp, Homo sapiens
ttcttctcaggtgggaaattggcaagtggagtccatgtagtctcacatgtggggtcggcctacagaccagagacgtcttctgcagccacctgctttccagagagatgaatgaaacagtcatcctggctgatgagctgtgtcgccagcccaagcccagcacggtgcaagcttgtaaccgctttaattgccccccagcctggtaccctgcacagtggcagccgtgttccagaacgtgtggcgggggtgttcagaaacgtgaggttctttgcaagcagcgcatggctgatggcagcttcctggagcttcctgagaccttctgttcagcttcaaaacctgcctgccagcaagcatgcaagaaagatgactgtcccagcgagtggcttctctcagactggacagagtgttccacaagctgcggggaaggcacccagactcgaagcgccatttgccgaaagatgctgaaaaccggcctctcaacggttgtcaattccaccctgtgcccgcccctgcctttctcttcctccatcaggccctgtatgctggcaacctgtgcaaggcccgggcggccatccacgaagcacagcccgcacatcgcggccgccaggaaggtctacatacagactcgcaggcagaggaagctgcacttcgtggtggggggcttcgcctacctgctccccaagacggcggtggtgctgcgctgcccggcgcgcagggtccgcaagcccctcatcacctgggagaaggacggccagcacctcatcagctcgacgcacgtcacggtggcccccttcggctatctcaagatccaccgcctcaagccctcggatgcaggcgtctacacctgctcagcgggcccggcccgggagcactttgtgattaagctcatcggaggcaaccgcaagctcgtggcccggcccttgagcccgagaagtgaggaagaggtgcttgcggggaggaagggcggcccgaaggaggccctgcagacccacaaacaccagaacgggatcttctccaacggcagcaaggcggagaagcggggcctggccgccaacccggggagccgctacgacgacctcgtctcccggctgctggagcagggcgg

SEQ ID NO: 76862 - DNA, 989 bp, Homo sapiens
ttcttctcaggtgggaaattggcaagtggagtccatgtagtctcacatgtggggtcggcctacagaccagagacgtcttctgcagccacctgctttccagagagatgaatgaaacagtcatcctggctgatgagctgtgtcgccagcccaagcccagcacggtgcaagcttgtaaccgctttaattgccccccagcctggtaccctgcacagtggcagccgtgttccagaacgtgtggcgggggtgttcagaaacgtgaggttctttgcaagcagcgcatggctgatggcagcttcctggagcttcctgagaccttctgttcagcttcaaaacctgcctgccagcaagcatgcaagaaagatgactgtcccagcgagtggcttctctcagactggacagagtgttccacaagctgcggggaaggcacccagactcgaagcgccatttgccgaaagatgctgaaaaccggcctctcaacggttgtcaattccaccctgtgcccgcccctgcctttctcttcctccatcaggccctgtatgctggcaacctgtgcaagtaagtatgtcagggctctgggaatggggagatgaaacccacacagcagcagctatagccaccacgccgtggccttccctaaactcaagacctgtgggaaatagtgggacagtagaaccccatggagggctgcaggcaggagagctcagctggagacggaaaaggaatcttaattacacgtggccaggctaaattctcctctccactggaaaaacagtttgcaggggggtagagcaaagttcacttgctggcatacagagatctggaagctggaggcagtgtattactaatgatgtctaatgttatccactctggggttttaaacgactctaaacagatttgttctgtttaatattaatccctagatcctcgacccctggggggcatccggacacacacatctagggattggttgccaggtagtagtagtagtg

SEQ ID NO: 76863 - DNA, 774 bp, Homo sapiens
tctcattcaatccagccctttaggaatctcgtagacagatagtactctaaagggaaagatttgaatgtgtcactgtggccctggcccaggcaaatcattttgagcagctcctgtctgctgtgcattcttccaggacacaaagccgggggggaagacatggtctgaggctctcaaggaaataatgtgctgcaaagccaagctcgttagttctttatgaagtgagggacaaagatctgttcattcagcagagccgtggtatgtgcctgttaaatcgggcactgtgcaagccaatagggtgaagatatacatattaatgagacacagccctaatctttaggagctcaaactttagttgtgggagagacagtcaagtccattaaaatatacacagtgctaagtgtttaacagtagcctttgttaaggctacagagcacaaagggaaagagtaacaaagcgcctgggggaggtgggagagcttagagaggaggtagcgttctgagttggatcttgaaggctgtggtattgaacctccaaagcggggagagaggctctctcagcgcaaagaccaaggtattataaagtgcgtacagtagcagctacttactatggctggatgatgatgataattttatctaatatttatgtaatccgtagaatgtatcagttatgtcttttcctatttaatcttcagaaatagaaacagcccaacaatttaggtaagtatagcccccattatcctgcactccagcctgggtgacaaagcaagattatctc

SEQ ID NO: 76864 - DNA, 720 bp, Homo sapiens
tctcattcaatccagccctttaggaatctcgtagacagatagtactctaaagggaaagatttgaatgtgtcactgtggccctggcccaggcaaatcattttgagcagctcctgtctgctgtgcattcttccaggacacaaagccgggggggaagacatggtctgaggctctcaaggaaataatgtgctgcaaagccaagctcgttagttctttatgaagtgagggacaaagatctgttcattcagcagagccgtggtatgtgcctgttaaatcgggcactgtgcaagccaatagggtgaagatatacatattaatgagacacagccctaatctttaggagctcaaactttagttgtgggagagacagtcaagtccattacaaagggaaagagtaacaaagcgcctgggggaggtgggagagcttagagaggaggtagcgttctgagttggatcttgaaggctgtggtattgaacctccaaagcggggagagaggctctctcagcgcaaagaccaaggtattataaagtgcgtacagtagcagctacttactatggctggatgatgatgataattttatctaatatttatgtaatccgtagaatgtatcagttatgtcttttcctatttaatcttcagaaatagaaacagcccaacaatttaggtaagtatagcccccattatcctgcactccagcctgggtgacaaagcaagattatctc

SEQ ID NO: 76865 - DNA, 113 bp, Homo sapiens
tttttttccagaaaacttttaaatgttttctctgatttccactggggcagatttttacaaaatttttaagaaagactaacaagagctttgaagacgtgggattttgatttctt

SEQ ID NO: 76866 - DNA, 693 bp, Homo sapiens
gctttccatttattaactcatctcacattcacaaatgaccccataaagtaagcactattgttatccccattgtactgacagggaagctgaggtccagaggagcttgggtgccttgctcgaggtcacacagcttgtgagtggtggttggagctgaggaaacgtgagaaattgttgttcccaagctgtgaggtgccacatgggggccaagataaaattattctttttctttttagagatagggtctcaccatcattcaggttgtagtacagtggcgcaatcatggctcactgccacctccaactcctgggcttaagggatcctcccacctcagcctcctgagtagctgggtctacaggccagtgccaccatggtgggctaatttttaaaagtttttattttccatagagattgggctttgccattttgcccaggctggtcttgaactcgtgggctgaagcaatccggctccgtcaacctcccaaagccctgggattacaggcgtgagccactgtgcctggcctgttctccatttttttacttctttctctgcgtccagattgatccccttgaacactaatttaggggacactaaaaatctgctacatttgctggttattttctaaattaacatttaaaagttgcgtatttccttatcaaggtatgagaatgatttaaaaaaaaaaaaaaaaaaat

SEQ ID NO: 76867 - DNA, 393 bp, Homo sapiens
tattgtgtgcagcgcacagagcctagtgtcagtgtttctctggggattgaagcagacagttctgccaaccagcatggatgggggaatagcctgggcaggatgcaagccacatcgtgcagaatatgattcttagtggaatagaaagccaagtgccatggaagccaagacacgtgcaggcttaccaagatgccccaagccattggagagaatatggagtttctcagtgcacagaagattcagaagatttacttaaacttaaagggcaagtagaccttaagaagctgtaaaacttgaggacatccaagattctgacatatgaaatataatttctttggcacctatggtataccatacactcttagctactaaacttagctactttttgaatgcatg

SEQ ID NO: 76868 - DNA, 648 bp, Homo sapiens
ttccaccattaatataaaatgtgtgcattttcttttatggtagaaaattcacactacaggaacattgatcatatgctttctgctttagtttctataaagaatgagtcacagagaagacaattgctttatttcaatgcctaggaagttattgcctttcaccttttgagcatctgtgttgcacacttaatggaaatacttgaaatataatattgatctacttatcaaattatagtaaatatgaagtaagaaacatcacatggtaacaattattcctttcactcaatggacatgattagcgagaaaataataaagaaatatttcgtatttgcagcctacctttaaagtattgaagcataattgtgaaacatttacaagttgctgagttgtcacttgtggaaatacaaaaaagaaaaagaaaaattgataaaccattgtcttatgatttcaaaaatttcacgggaagggggcagataataagtggttttatgcctataagttatttagaattccacatatttttaaaagggggttttaatatgttgttatttgacctgctttgagatgtctacagtcttgacttcttgatatctttgtatcttgttacagtcttattattacaagcagtgttaggcaattaaatttggaatt

SEQ ID NO: 76869 - DNA, 274 bp, Homo sapiens
cagagagagactctgtcaaaaaaaaaaaaaaagaaaggaaggaaggtaggtaggtaggtgggtatttggggccagctggcctgtaatcccagcacttggaggctgaggtgggtgaatcacttgaggtcaggagtttgagaccagcctggccaacatggtgaaaccctgtcactactaaaaatacaaaaattagctgggcgtggtagtgccacttgtaatcccaactactggggaggctggaacctcggaggcggagattgcagtgggctaagat

SEQ ID NO: 76870 - DNA, 414 bp, Homo sapiens
aacttgaccaatttaaacaaaaatgtaatttctctgtcctgttggtgtaatgtaatcaagagtttgtgataggaaattaatttttcaaccagtgatacaattttatgactgaatttaatatggacctgttaatgtgacattttcatgtttctgttgagtctgccttgatgaataactcagagcacttattctgtggtacacagagtcagtatttctcatttctggaattggatgctttattttctggtatgcctgtgataagagaggtgatagagtggcttctgcatctaattggtttgaatcctggtattacacttaactgatttgggcaaatgtatcctcgaggctcgatattttgttttgtttttctcccctgtaagagcactcactgctgtcttagcttgggctgctgtg

SEQ ID NO: 76871 - DNA, 357 bp, Homo sapiens
  misc_feature (249)..(249): n is a, c, g, or t
attcttgcacttacaggatcgaggtccccattttcttgctggctgtcagccgagggccattcccaccttctagagccctccacacattccttagctcatagcccccggcttttgtcttaaaagccagcagtggtgggtcaggtgcttctcatgtcacatctctctgacttactcttctggttccctttttcactttgaaggacttgtgtggttagatagatcgggccctctgtggttagatagatcggngccctctgtggttagatagatcgggccctctgtggttagacgggtcgggccctctgtggttagatgggtcgggccctctgtggttagataggtcgggcctcctggata

SEQ ID NO: 76872 - DNA, 570 bp, Homo sapiens
agtagatgtaactttttaaaaaggaaatggcttataacatcaagtgctccagaaaaaatcaaaatcttttgattttccagggagaatggcaaaaaaaggggaaaaagaatctttggtgaggaaggccttcaggaaaaagcaaccagtccagaaagatcaaaatcaagaaagactgtacatagagtgtgcacaccatcagttcagagtgcaagagtgggggtagggggctaaagtctggctctcgtgggcagaagaggtgggcacagaaagcagagcaagcagcacgaaccattcccgagagagcctgactatgaaggggagagaacaaatggcacttgtctcacagactctggggcagtgcccaggaaattaaatttaggactatatatcaatttaaaagtactggatagagtaacgaaagtgatgttttcagtaagtgttgtacagcagaaggcttgtttttgttgattttaaaaatctttcatgggagattggagagatgctggtaaaaaaaaatacagcattaaaataaaatctttcactataaaactagctagtacggccaggagt

SEQ ID NO: 76873 - DNA, 429 bp, Homo sapiens
atattacgttactgaaactgaaataataaaaaggtcaagtgtattagaaatcttagctacagaacagtaaaaactttcttcaacaggagactgatatcatttaattcttatttcatttttgtgtactaattatacagcataaaaatgtttaaataaaaagtcacctattaacactcacataacacagaacattacaattaatgtttactttcatcttttaaagatgttcttcagaaatcttcatttaaatcattaagtgtctcatgaaaaattattcagagaaaatgataggaaagtaaaatcagtatctgtatacctatcacctacatttgataactaaattaaaaccaagagttagccatatttatttgctgctttgtatttgttcaaacacaaataaaatgagtcactgaactgacagtccagata

SEQ ID NO: 76874 - DNA, 345 bp, Homo sapiens
gtgacctctgaaactaggggataaaaggcattgctgcttcctccttgttctctactaaatcactcactccgggggaagccagccaccgtgtcgtgaggacatttaagcagccctagagagaggtccgcaaggtgagaaactgaggccgcctgccgacagccatgtgagggagccaccttggaagcagatctagccccagtcaaacctccagatgcctgcagctccaagcaacaccttgactaccgcctcagaagaaaccctgggccagaaacaccaggcaaagccaatcttggatttctgacccacagaaactactacataataaatattgttttaagtctctaa

SEQ ID NO: 76875 - DNA, 711 bp, Homo sapiens
tggaacacagctataggcttctgggagatagtttattaaatgccatgcagaatgctatgtttttagatgtgcatgtaaatcaagaattagctgaggaatatctttttattagtagtagtagtaactcatttttagattcaagtaaagtttgttttccaggtgagatgacatttttaagaaattgaatttaagtatgtgcttttatatccggaccaggtttctcaaggaagcagaatacaagggaatgaaaggggaagggagggtagtgcccaagagaaacctcggctcctaagtgctcccctgccaggtttcccccgtgcctgcccactggcaccatcctggcagctccagcccacaccccctcctggaccctgggctgcctctcgctgaatagctgcagggggcctgctatgtgacaggtatggaatgaggtaatccttttccacctctaatttctgaagggtgtgtctgtccagtttttacttgttcattgaatttaaagccttaggaaccaacagctacagtgcaagctgtaattattgatgtctgtttcatattcatctgtaagttctggcatttgatcaagaagtcaatatatcacttcatcttcaggctgaatgtgtctcagctataaaggttttattgtttgatggatagcatacaattatgactgcccacaataaaaagtgttttcatttgtaagatgggtga

SEQ ID NO: 76876 - DNA, 547 bp, Homo sapiens
gtagctataaaatttaggaactatatgttctcccccactgctttagagtaacctctggatttttcccaagccatgacagaatggcattagacttactctccaatcaaaatacaacacatggcaagacacacaaggcagctattttcaggaacacacaggcagcattgtgatccttgagagaatacaaagactgaaagtctaagatcaagatgccagcagagttggtgtttggagagtgcttcccctgtgggttgcagacttctcactatatcctcaagtggcttttcctcagtgtgtgcacaagggaagaaagagagagggctctggtctctcttcttacaagaacattaatcctatcagatcagggccccacccttgtaacctgatttaaccttaattacttccttaaacactccatctccaaatacagtcacactgaggattagggcttcaatatgtgaatctgggggagacaaacattcagtccataataatacttaacactactgaattgtatgctttaaaataattaagatcattttttaaa

SEQ ID NO: 76877 - DNA, 814 bp, Homo sapiens
cttccggttctgtcttttcgctggctcgatacgaacaaggaagtcgcccccagcggagccccggctcccccaggcagaggcggccccgggggcggagtcaacggcggaggccacgccctctgtgaaagggcggggcatgcaaattcgaaatgaaagcccgggaacgccggaagaagcacgggtgtaagatttcccttttcaaaggcggagaataagaaatcagcccgagagtgtaagggcgtcaatagcgctgtggacgagacagagggaatggggcaaggagcgaggctggggctctcaccgcgacttgaatgtggatgagagtgggacggtgacggcgggcgcgaaggcgagcgcatcgcttctcggccttttggctaagatcaagtgtagtatctgttcttatcagtttaatatctgatacgtcctctatccgaggacaatatattaaatggatttttggagcagggagatggaataggagcttgctccgtccactccacgcatcgacctggtattgcagtacctccaggaacggtgcaccccctccggggatacaacgtgtttcctaaaagtagagggaggtaagagacggtagcacctgcggggcggcttgcacgccgagtgcctgtgacgcgccggcttgacttaactgcttccctgaagtaccgtgaggttcctgatgtgcgggcggtagacggtaggcttatgcggcacgctttcgtttccaccgtggctactgcgctttgggaaggccacgacctcctcctttggggaggtccttaggatccgaaaaaaaaaaagtcacttgtaa

SEQ ID NO: 76878 - DNA, 1057 bp, Homo sapiens
cttccggttctgtcttttcgctggctcgatacgaacaaggaagtcgcccccagcggagccccggctcccccaggcagaggcggccccgggggcggagtcaacggcggaggccacgccctctgtgaaagggcggggcatgcaaattcgaaatgaaagcccgggaacgccggaagaagcacgggtgtaagatttcccttttcaaaggcggagaataagaaatcagcccgagagtgtaagggcgtcaatagcgctgtggacgagacagagggaatggggcaaggagcgaggctggggctctcaccgcgacttgaatgtggatgagagtgggacggtgacggcgggcgcgaaggcgagcgcatcgcttctcggccttttggctaagatcaagtgtagtatctgttcttatcagtttaatatctgatacgtcctctatccgaggacaatatattaaatggatttttggagcagggagatggaataggagcttgctccgtccactccacgcatcgacctggtattgcagtacctccaggaacggtgcaccccctccggggatacaacgtgtttcctaaaagtagagggaggtaagagacggtagcacctgcggggcggcttgcacgccgagtgcctgtgacgcgccggcttgacttaactgcttccctgaagtaccgtgaggttcctgatgtgcgggcggtagacggtaggcttatgcggcacgctttcgtttccaccgtggctactgcgctttgggaaggccacgacctcctcctttggggaggtccttaggatctcagcttggcagtcgagtgggtggcgaccttttaaaggaatgggacccacccggagttcttctttctcctgtctctctctctctctctctctctctctctgtctctccgtctctctgtgtctctgtgtctgtctctctctctctgtgtctctctctgtctctctgtctctctctctgtctctctctctctctctctctctctctctctctctcctctctctctgtctctctctctctttccctctctctctctctttcccccccccc

SEQ ID NO: 76879 - DNA, 701 bp, Homo sapiens
  misc_feature (6)..(6): n is a, c, g, or t
  misc_feature (16)..(16): n is a, c, g, or t
tagagnaagcacattnggcacgagggatcaagtgtagtatctgttcttatcagtttaatatctgatacgtcctctatccgaggacaatatattaaatggatttttggagcagggagatggaataggagcttgctccgtccactccacgcatcgacctggtattgcagtacctccaggaacggtgcaccccctccggggatacaacgtgtttcctaaaagtagagggaggtaagagacggtagcacctgcggggcggcttgcacgccgagtgcctgtgacgcgccggcttgacttaactgcttccctgaagtaccgtgaggttcctgatgtgcgggcggtagacggtaggcttatgcggcacgctttcgtttccaccgtggctactgcgctttgggaaggccacgacctcctcctttggggaggtccttaggatctcagcttggcagtcgagtgggtggcgaccttttaaaggaatgggacccacccggagttcttctttctcctgtctctctctctctctctctctctctctctgtctctccgtctctctgtgtctctgtgtctgtctctctctctctgtgtctctctctgtctctctgtctctctctctgtctctctctctctctctctctctctctctctctctcctctctctctgtctctctctctctttccctctctctctctctttcccccccccc

SEQ ID NO: 76880 - DNA, 177 bp, Homo sapiens
cttctactgcaaattcgtcttgtgatatcaacaaaggcatttacatgtgcccctagcacagagcctggcatccagaagtgttccataagcagcagcagttattgtgatgattattactgtgactattattaagagtttgccattctgcaaatagttgccttttttccattcctttag

SEQ ID NO: 76881 - DNA, 358 bp, Homo sapiens
ttcactagcctcacagatatcttgctggtgtcttaattggcatgttttgattacttgtgagattgaatatatttttgtatgaaatattaaatattttcgtatttatttcttggtcattagtattttatttatgtatttatttatttatttattttgaggcagcgtctggctctgttacccagactggagtgcagtgacacaatctcagcttactgcaacctctgtctcactggttcaagtgatcctcccacctgagtagctgggactgtaggtgtgcaccacacagcctggataatatttgcatttttagtagagatgaggtttcgccatgttacccaggctggtctcaaactcctgg

SEQ ID NO: 76882 - DNA, 452 bp, Homo sapiens
ttacatgaataagttctttagtggtgatttctgaggttttggtgcacccatcacccaagcagtgtacactttacccaatgtgtagtcttttatctctcacctgcctctcaccctttcccaagtccccaaagtccattgtatcatttttatgcttttgtatatcctgtgttattcctaaaataaattggagtagtttaacaatgaaaaataaaaagactaaacacataatagggtcttactccatgccaggcagaggcattcattattacatttgactgtcactaaaatctaaaggactatatttaattccattttcagatgaggaaaggaaattaagttacagaaattaagccagttgtttaaagctaaacagtgataagtgatagagtcaggcttgggatccaggccaactgactccagatccagggctggctgacttaaccatgatgctc

SEQ ID NO: 76883 - DNA, 391 bp, Homo sapiens
tcagacagccaggctggtctttgtggagttatttttggtaacttcccaggtgaaacaaggaacatgggtggaactgagcctccctgaggatgcctggggtcctgatccaggtccaatcatctccgaaaaaggcagctaagggtcctcttgcccaaagtgcatccagcagcctaccttatataatgtgtctcttaggaggcttcccccaagtatcttagcatctatttatgtatccctgaataaaaccctatttggttttgcacatttgcaaactttatataaacagagtcactgggtttacattagtttgcaaattgcttcttctactcaacattgttgctgagattttttttttccaggttaatgcatgaactgtaattcatttattttt

SEQ ID NO: 76884 - DNA, 507 bp, Homo sapiens
gctccagcagccacggaacatggatctgagccccgagagattcctggatgtgggagacccaccctctgtccttggtggttggtgagggctgcaggattggggcttctgatgttattgtcctggggacagactccctgggcaggatcacggagggggcagactgagctgggacaaggggcattcgggcctcgggcagtggggcaggccctagagtggcagccagtcatcacagtgatttccctgaacgggcaatgttcctttccaggcttagtgccctggcggcctcggggaagtggagaaaagagaggggcaccagggttacgattctcagcttactgaggtctgatgtgaatggcatgcaagcctctggccaggaccggccagtgccaccttctgagcatgttctgagtgttgactctgcgccgggcacgggagatgaggctccggctctgtggagctgcatccggctggggagagatggacaagagagagcaaacacccccgtgc

SEQ ID NO: 76885 - DNA, 384 bp, Homo sapiens
aaagaattcacagttaaatatgtaccacataacacagcaacaatctgtataaagcaaaatctatatgaagtataagaagaaataaaaaactaaaattaggggactttgacacttagcacaagatgtagtgggtaaaaaaggatataaaagatctaaataatataatgtgaatcttcaagtatatccctaataatcaagaatatactgcttccccccacccccaactctgtctcccaggctgcagtacagtggcatgatcacggctcactgcagccttgacctccctgcctcaggtgatcctcccacctcagcctcccaagtagctgagaccacaggtgcacaccaccatgcccagctaattttttttttttttttgcttattgt

SEQ ID NO: 76886 - DNA, 713 bp, Homo sapiens
atgtgctaccttgtttcaccttttaaaaacaacaagcaaataattatactctgctttataatgtggtggaatgtatacaaatactttcttccataatttttgagagcagtaactgtgtctcaccaatcttcatattctccactgcactgaccatagcattttgaatataatttggaatcaattaaatacatgaacaaacaagtaaaattttatggtgcagggaaagtattattattattttttaaaagggctctgagatataatctacttttctgggatagtaccaaataaaaatgaaatcaagaatttaaagcattctgaaaatactgagaaagaccattaaaaaaaagaaggctaagagtttgtttaaaaatatgagaaataaaaaaaagatccatataactgactatagcaaaagcatgtgttttctgaagtaagtaaggcagaaagtaaaatagacatccttttaatacctctcatatctatgcagagatggccaaggtctggtagtgattttcatgatgatgggtctgggaagcttattattttgtaaccagttttattacctgcccccagcaaaaggcatttgtttaccttctttcctcttttattcactttagacgtgaagagaagtatcactgcttcagtattaggctatttcaataagcaaggcaattttattacagatatcagatgcaacacatatttggtaa

SEQ ID NO: 76887 - DNA, 748 bp, Homo sapiens
ttgtatttctagctgaaaatgtcattttttttaatggtactagtcataattccagtgggtttgagagagttctgggagatatggtgaatacgaactaactaagcaaaatgattttaaagtttatgtagaattctaagcttatgctgaaaagacagtatagcgtagtgcttaagagaactgactctggggtcaaactacctgagttcatatatttgaatgctctactgctagctaagtgcatttttctgtggctcattctccctgtctgtgaagtgaggatattagttcctatctcttagaaatgttttgtggataaaacaagttattacatataagccacttatgatcgtgctttagatatagaaaattcttaataaatgaattgctattagcgttatagaaattaaacaaaattttagaaaaagggctagataagggaaacttgcttatatattcaagttggttgaattaagttacatattaagttataacaaattatgccataagtctagtataatcaaagcagtaaagcattgtcatagaaatatacaaatagattagtgaaactaaagaatccaaaaatgcctgaaccatgtttaaaaatgacatttaaattaaaaagggaaatctggtttaacagtggtggagacaactggctatttggtgggaataaacagacccacctactatcatcagaaataaatgccaaataggttaaaaatacaaaagtgagcaagcaagagagaca

SEQ ID NO: 76888 - DNA, 346 bp, Homo sapiens
ctgctgccatgcaaccaacttttcctccaaaggcccagtagcaagtattttaggttttgtgggccttaaggtaggtctctgtcacaaccacttaactctcctgttgtagcacaaaagcagctatagacaatatttaaatgactggacatagctgtgtcccagtcaaactatttacaaaagtaggctgcaggctggatttggcctgtgggtcattgtattataaacagggtgatccttgataaaatgaaatatgggcatgtcactcacttaactctaacccctgcaatgatttctcaagcactaagtttacagtactcagtttggtctgcatggcctagttgatcca

SEQ ID NO: 76889 - DNA, 797 bp, Homo sapiens
ctgagttctatgttactaggggtcttgtgtgcacatctcttagcgtgtgtgtatatgtgtctgtgcacacacgtgtaatgagtggtatacttacctgacatcagtgtgtgccgacgttcttcagcctatgggggcctccatgtccctccttcctggtgttccttcttttctggggcagctgccatttctttgattcctgcatctctcctacagcctgacctcttcttcaaggcaggattgggggagagggtctgggctgcccctccccaacacctagattccctccttccacatcctgttagcctcctttttggcagttttttccatcttcgccatctggcctggcactgtgcccattcagctcctgaagggagccccagggctcgggaagcagaagtgtgggatggggaccaggccaggggcctggcagctctcagtgctcagcttgggccgttctgtgtgactgtcagaaagaggcggctttttgaccaccaggatcctttataaagatgggctggggccaggtgcggtggctcatgcctataatctcagcactttgggaggccgagccgggtggatcaactcaggtcaggagttcaataccagcctgaccaatatggtgaaacctgtctctacttaaaatacaaaaattagccaggcatggtggcgtgcacctgtagtcccagctactcaggaggctgagacaagagaattgcttgaacctgggaggaaaaggttttagtgagctgagactgtaccactgcaatccagcctgggcaacggggaactccgtctca

SEQ ID NO: 76890 - DNA, 455 bp, Homo sapiens
tgctctgccagttaaaaactcaattggaaaggaaggatgttgggtgtaaagaggcaagggcctcacagacagatttaagtgctcttctttgtttgaattaaaagaaaatgtggttctatgttttaattaaaagatagcgtttcagaggaatttgcttagagaacccagaagtgcctaatcttggtcagccaagctaccattcttgtatgccttgtcaagtatgtgaaggggcatagcataaaaggataaaaagccaagtgagagtcaaaattctgcttaatttttaacagactagcataagcttctctgggatcaactggctataatctcatgatttacgtttaaagtataagcagtgcctcctgctttcccactaagtttgactccagttcttgggattgtatcacctaattcctggctgtagtaactcataccagtggccagtatccagagaa

SEQ ID NO: 76891 - DNA, 439 bp, Homo sapiens
aggccctgagccaggcccggctctcagggcgggagacacaggagaggttgtgcgggtccctggagcagtcgggaaccagaggggaggggatttattgagcaaggggctctgctgaaccctcccctgcatcacttcctcgcttcctcagagttgctctgtgaggaagtaccatcgttgtccccagtttacataaggaaaccaaggctctgagaggtgacatgacttacccaaaatcccacagctcaagatgatgggcctcaccccaacccctctggaaaagcctgtccagactgggagagaagggtcagtgaggcagggacagcgggattattgccacccccatttcctcaagataaacaggcacagcagggcaggtggactgcccaatctccgtgtcattgagtgggactgctgacctctgaccctctgcctccctcta

SEQ ID NO: 76892 - DNA, 470 bp, Homo sapiens
cctggcctctgatgttatccatgcccaatccagggacctgccacgcatctttagggtgacaacctcccagctggcagtgccgcccaccacgtgcactgtgctgctgctggcagagagcgagggggagcgggaacgctggctgcaggtgctgggtgagctgcagcggctgctgctggacgcgcggccaagaccccggcccgtgtacacactcaaggaggcttacgacaacgggctgccgctgctgcctcacacgctctgcgctgccatcctcgctcaagatgatgggcctcaccccaacccctctggaaaagcctgtccagactgggagagaagggtcagtgaggcagggacagcgggattattgccacccccatttcctcaagataaacaggcacagcagggcaggtggactgcccaatctccgtgtcattgagtgggactgctgacctctgaccctctgcctccctcta

SEQ ID NO: 76893 - DNA, 303 bp, Homo sapiens
aatacatggagattaaataacttgctcctcaatgattgttgggtcgaaaatgaaatcaataatgagatttaaaaattctttgaactgaacgataatagtgacacaacctatcaaaacatctgggacaccaaaagcggtgctaagaggaaagttcgtacattaaatgcctacatcgaaaagtctgaaagagcacaaatagacaatctaacataaaatcacacctcaaggagctaaagaagcaagaatgaaccaaacccaaacccagcagagaaaaagaaataaccaagatcagagcagaactaa

SEQ ID NO: 76894 - DNA, 480 bp, Homo sapiens
agcagggcgtttttcttcctggagggcctgtggagcggaggcccgaggcctagggcaaacttgccatgaagaaaggagaggctgttcgagagccctaggctgggagtcggaggacctgggttcgatttatacatacttaagcatgtcagtgaacttctgggcactttagttttctgatttccagaagtaaatactgtttcctgccttgccgtttcccaaagttgtgcgggttgaatgcctcaaattcctgcctttcctcaagagaagagcccccaggagaaaagccagtattgcttgtgctcctaacaacctgtctcttggttatgggaactctgtgaagagaatatgactgtgtcctgaagaatttggattagtttaatatgtatgcataatatatgtacacttatgtacgtatttatgtttatatgcatcaagagatacctagaagaaggtccattaaaatactattattttctgtgg

SEQ ID NO: 76895 - DNA, 3497 bp, Homo sapiens
gcttactcctttccgcagggcagcacccagggacctgagtgttgcaaggtgcgagaggggagcgccgcggggagcgccgcgggaagcgcatgtgcctcaaattcctgcctttcctcaagagaagagcccccaggagaaaagccagtattgcttgtgctcctaacaacctgtctcttgagaggctgatcatcaggggttcactttcagagaagttgagaatgcaggctgaacaaggaagaggaaggggaatcctgcagggatgaatgagaggacagcaatgcatgtgtgatgtgtgtgagcacacacacacagtaacctttcctaggagaactgtattactctaatgataatcacctttgaggaaaaaaaacttgtaagtatgaatttggtgttacaagcagcatgaattccagccaaatatcactcagaatgaaacatgggagagttaacatgcagaagaaaccttcaaagtgtagtgaatgtgggaagttctttactcagagatcatctcttacccagcaccagaggattcacagaggagagaagccctatgtgtgcagtgaatgtggaagttgtttccgtaaacagtcaaatcttactcaacatctgagaattcataccggagagaaaccttataaatgtaatgaatgtgagaaagcctttcaaacaaaagcaattcttgttcagcatctgagaattcatactggagagaaaccctataaatgcaatgaatgtggaaaagccttttgtcagagcccatcccttattaaacaccagcgaattcatactggagagaaaccatataaatgtacagaatgtggcaaagccttcagtcagagcatatgccttactcgtcatcagagaagtcattctggagataaaccttttaagtgtaatgaatgtgggaaagcctttaatcagagtgcatgtctcatgcagcatcagagaattcattcaggagagaagccctacacatgcactgaatgtggtaaagccttcactcagaactcttcccttgttgaacatgaaaggactcacactggagagaaactttataagtgtagtgagtgtgaaaaaactttccgcaaacaagcacaccttagtgagcattacagaattcatactggagaaaaaccttatgagtgtgttggatgtgggaaatcctttaggcacagttcagcacttcttcgacatcagaggcttcatgctggagagtaaaatttggaatataatgagtatgggaagatttgtatggaagcaccttttttttctcctaaattcctaggaatgtaagactcaatctgtagctagtatgaatattttgtattttgaacaagaaatgttgtgtcctaatgtgtcctagtctggagtttgatgccttatctgctgctcagtgggtgtaaccttatcccttctgagcctcagtttccccattccccccaatagaaaaatggggatatttcctagggttgtcctgagaataaaatgagttctgtgtgacagttaactgccattaattaattagccgttctaaaagtttatttacaatatcaaaatctgacaagtaaatcagcattgttgtttggttctcataatgtattgtttcttaagaacattttgtaattgggctatgattttatgatctacagacgtctatttaaactataatgtcttggtttaaataggataatacaatctaagactggtttgtccttgagaaatttcagatttaatcagagaaaaatgtactgattgggatttgagtggacattgtggggtgtatttctggataccctcaagatcttcatttaaattttgatactttctattactagatctaatttgattttaagctctaagtttcacttttccattaaacggaaagcctccctgacattaactgaataaaacctcatgttgtgggacttctgtgtgtgtttagggttggcagcaggtgattaggagaaggcatatgacagtagagaggactggaatatagaggagaatataagcatgtagatgaggatgtggctgtatttgttttgagttctaggagcacagcaccaaatgtggtctcttaagggaagatgagggtagaagatgttaagatcccaggttccagcaactgatgccactgactaacaactagccacttgtcagaggaaggagagaacagtgtcttggggatgctgatgggttggagtgcctaatggctcattaaaagccatgaaaaagcaaagaaatcaaagaatacttttgatggagctttaggctatgctaagccttttaatgtaaacaagcacctctaacgctaaaagcacccttgcaagaaaggtaggagttactattcacatcctagagtcaaggaaaaagagaagatgtttgacttgctcaaagtcaagcaggtaatgtcagaattgaatctcaaatctatatctttatagatttgcagttctggtttatataataccaaagtcacatacaggtaatttcccaccattgaaccttcctgttggtgtgagatgccaaatctgtgaaaaccagacacaggtggccaggtgggtgtcgaactcctgacctcaagtgatccgcctgcctcagcctcccaaagtgctgggattacaggtgtgagtcaccacatctggtcggattttaactattctaataggtatgtagtggtattaattgttttaatctgcagttcaccaataatatatgaatttagcatcttttcatatgtttgccatctgtatagctttggtgaggtatctgttagaggttttgcccatttttaattggattgctcattttcttattgttgaattttaagtgttccttgtatattttgtataacagacctttatcagataggtcttttgcaaatattttcctcccaggctgtggcttattttctcaatccttgattccttctctttactttttttttcttttttctttttttaaagaaatggtagcataatatacacagttgtccattttttaaagactaaaccatctcacagattgttctgtatcagtaaataaagatctttcccccacccttgcccagtgtgtcattgtcttaatagaccattattagttccctattggtggacacttaatggcttttatttttctgttgtaagcaaaactgcatatacagcatccttgtctttaggcacatgtgcaagatatttataaggtaattctcaggctgggcacagtggctcatgcctgtaatcccagcactttgggaggccgaggtgggtggatcatttgaggtcaggagttcgagaccagcctggtcaacatagtgaaaccccacctctactaaaaatacaaaaataattagccagcatgatggagggcacctgtagtcccagctactcaggaggccgaggcaggagaaattgcttgaacctgggagatgaaggttgcaatgagctgagattgcaccactgcactccagcctgggcgacagagcaagactacgtctt

SEQ ID NO: 76896 - DNA, 3064 bp, Homo sapiens
gcttactcctttccgcagggcagcacccagggacctgagtgttgcaaggtgcgagaggggagcgccgcggggagcgccgcgggaagcgcatgtgcctcaaattcctgcctttcctcaagagaagagcccccaggagaaaagccagtattgcttgtgctcctaacaacctgtctcttgagaggctgatcatcaggggttcactttcagagaagttgagaatgcaggctgaacaaggaagaggaaggggaatcctgcagggatgaatgagaggacagcaatgcatgtgtgatgtgtgtgagcacacacacacagtaacctttcctaggagaactgtattactctaatgataatcacctttgaggaaaaaaaacttgtaagtatgaatttggtgttacaagcagcatgaattccagccaaatatcactcagaatgaaacatgggagagttaacatgcagaagaaaccttcaaagtgtagtgaatgtgggaagttctttactcagagatcatctcttacccagcaccagaggattcacagaggagagaagccctatgtgtgcagtgaatgtggaagttgtttccgtaaacagtcaaatcttactcaacatctgagaattcataccggagagaaaccttataaatgtaatgaatgtgagaaagcctttcaaacaaaagcaattcttgttcagcatctgagaattcatactggagagaaaccctataaatgcaatgaatgtggaaaagccttttgtcagagcccatcccttattaaacaccagcgaattcatactggagagaaaccatataaatgtacagaatgtggcaaagccttcagtcagagcatatgccttactcgtcatcagagaagtcattctggagataaaccttttaagtgtaatgaatgtgggaaagcctttaatcagagtgcatgtctcatgcagcatcagagaattcattcaggagagaagccctacacatgcactgaatgtggtaaagccttcactcagaactcttcccttgttgaacatgaaaggactcacactggagagaaactttataagtgtagtgagtgtgaaaaaactttccgcaaacaagcacaccttagtgagcattacagaattcatactggagaaaaaccttatgagtgtgttggatgtgggaaatcctttaggcacagttcagcacttcttcgacatcagaggcttcatgctggagagtaaaatttggaatataatgagtatgggaagatttgtatggaagcaccttttttttctcctaaattcctaggaatgtaagactcaatctgtagctagtatgaatattttgtattttgaacaagaaatgttgtgtcctaatgtgtcctagtctggagtttgatgccttatctgctgctcagtgggtgtaaccttatcccttctgagcctcagtttccccattccccccaatagaaaaatggggatatttcctagggttgtcctgagaataaaatgagttctgtgtgacagttaactgccattaattaattagccgttctaaaagtttatttacaatatcaaaatctgacaagtaaatcagcattgttgtttggttctcataatgtattgtttcttaagaacattttgtaattgggctatgattttatgatctacagacgtctatttaaactataatgtcttggtttaaataggataatacaatctaagactggtttgtccttgagaaatttcagatttaatcagagaaaaatgtactgattgggatttgagtggacattgtggggtgtatttctggataccctcaagatcttcatttaaattttgatactttctattactagatctaatttgattttaagctctaagtttcacttttccattaaacggaaagcctccctgacattaactgaataaaacctcatgttgtgggacttctgtgtgtgtttagggttggcagcaggtgattaggagaaggcatatgacagtagagaggactggaatatagaggagaatataagcatgtagatgaggatgtggctgtatttgttttgagttctaggagcacagcaccaaatgtggtctcttaagggaagatgagggtagaagatgttaagatcccaggttccagcaactgatgccactgactaacaactagccacttgtcagaggaaggagagaacagtgtcttggggatgctgatgggttggagtgcctaatggctcattaaaagccatgaaaaagcaaagaaatcaaagaatacttttgatggagctttaggctatgctaagccttttaatgtaaacaagcacctctaacgctaaaagcacccttgcaagaaaggtaggagttactattcacatcctagagtcaaggaaaaagagaagatgtttgacttgctcaaagtcaagcaggtaatgtcagaattgaatctcaaatctatatctttatagatttgcagttctggtttatataataccaaagtcacatacaggtaatttcccaccattgaaccttcctgttggtgtgagatgccaaatctgtgaaaaccagacacaggtggccaggtgggtgtcgaactcctgacctcaagtgatccgcctgcctcagcctcccaaagtgctgggattacaggtgtgagtcaccacatctggtcggattttaactattctaataggtatgtagtggtattaattgttttaatctgcagttcaccaataatatatgaatttagcatcttttcatatgtttgccatctgtatagctttggtgaggtatctgttagaggttttgcccatttttaattggattgctcattttcttattgttgaattttaagtgttccttgtatattttgtataacagacctttatcagataggtcttttgcaaatattttcctcccaggctgtggcttattttctcaatccttgattccttctctttactttttttttcttttttctttttttaaagaaatggtagcataatatacacagttgtccattttttaaagactaaaccatctcacagattgttctgtatcagtaaataaagatctttcccccaccctt

SEQ ID NO: 76897 - DNA, 2902 bp, Homo sapiens
gcttactcctttccgcagggcagcacccagggacctgagtgttgcaaggtgcgagaggggagcgccgcggggagcgccgcgggaagcgcatgtgcctcaaattcctgcctttcctcaagagaagagcccccaggagaaaagccagtattgcttgtgctcctaacaacctgtctcttgagaggctgatcatcaggggttcactttcagagaagttgagaatgcaggctgaacaaggaagaggaaggggaatcctgcagggatgaatgagaggacagcaatgcatgtgtgatgtgtgtgagcacacacacacagtaacctttcctaggagaactgtattactctaatgataatcacctttgaggaaaaaaaacttgtaagtatgaatttggtgttacaagcagcatgaattccagccaaatatcactcagaatgaaacatgggagagttaacatgcagaagaaaccttcaaagtgtagtgaatgtgggaagttctttactcagagatcatctcttacccagcaccagaggattcacagaggagagaagccctatgtgtgcagtgaatgtggaagttgtttccgtaaacagtcaaatcttactcaacatctgagaattcataccggagagaaaccttataaatgtaatgaatgtgagaaagcctttcaaacaaaagcaattcttgttcagcatctgagaattcatactggagagaaaccctataaatgcaatgaatgtggaaaagccttttgtcagagcccatcccttattaaacaccagcgaattcatactggagagaaaccatataaatgtacagaatgtggcaaagccttcagtcagagcatatgccttactcgtcatcagagaagtcattctggagataaaccttttaagtgtaatgaatgtgggaaagcctttaatcagagtgcatgtctcatgcagcatcagagaattcattcaggagagaagccctacacatgcactgaatgtggtaaagccttcactcagaactcttcccttgttgaacatgaaaggactcacactggagagaaactttataagtgtagtgagtgtgaaaaaactttccgcaaacaagcacaccttagtgagcattacagaattcatactggagaaaaaccttatgagtgtgttggatgtgggaaatcctttaggcacagttcagcacttcttcgacatcagaggcttcatgctggagagtaaaatttggaatataatgagtatgggaagatttgtatggaagcaccttttttttctcctaaattcctaggaatgtaagactcaatctgtagctagtatgaatattttgtattttgaacaagaaatgttgtgtcctaatgtgtcctagtctggagtttgatgccttatctgctgctcagtgggtgtaaccttatcccttctgagcctcagtttccccattccccccaatagaaaaatggggatatttcctagggttgtcctgagaataaaatgagttctgtgtgacagttaactgccattaattaattagccgttctaaaagtttatttacaatatcaaaatctgacaagtaaatcagcattgttgtttggttctcataatgtattgtttcttaagaacattttgtaattgggctatgattttatgatctacagacgtctatttaaactataatgtcttggtttaaataggataatacaatctaagactggtttgtccttgagaaatttcagatttaatcagagaaaaatgtactgattgggatttgagtggacattgtggggtgtatttctggataccctcaagatcttcatttaaattttgatactttctattactagatctaatttgattttaagctctaagtttcacttttccattaaacggaaagcctccctgacattaactgaataaaacctcatgttgtgggacttctgtgtgtgtttagggttggcagcaggtgattaggagaaggcatatgacagtagagaggactggaatatagaggagaatataagcatgtagatgaggatgtggctgtatttgttttgagttctaggagcacagcaccaaatgtggtctcttaagggaagatgagggtagaagatgttaagatcccaggttccagcaactgatgccactgactaacaactagccacttgtcagaggaaggagagaacagtgtcttggggatgctgatgggttggagtgcctaatggctcattaaaagccatgaaaaagcaaagaaatcaaagaatacttttgatggagctttaggctatgctaagccttttaatgtaaacaagcacctctaacgctaaaagcacccttgcaagaaaggtaggagttactattcacatcctagagtcaaggaaaaagagaagatgtttgacttgctcaaagtcaagcaggtaatgtcagaattgaatctcaaatctatatctttatagatttgcagttctggtttatataataccaaagtcacatacaggtaatttcccaccattgaaccttcctgttggtgtgagatgccaaatctgtgaaaaccagacacaggtggccaggtgggtgtcgaactcctgacctcaagtgatccgcctgcctcagcctcccaaagtgctgggattacaggtgtgagtcaccacatctggtcggattttaactattctaataggtatgtagtggtattaattgttttaatctgcagttcaccaataatatatgaatttagcatcttttcatatgtttgccatctgtatagctttggtgaggtatctgttagaggttttgcccatttttaattggattgctcattttcttattgttgaattttaagtgttccttgtatatttgcaaaagacctatctgataacggtctgttatacaaaatatacaaggaacgtcgacc

SEQ ID NO: 76898 - DNA, 515 bp, Homo sapiens
gaggacagtcatctatgggcctcttctgcctatggattgtaatgtcctggggtttcctaagaaagggaatacacctgttatcctcctggctctggcatactgaggaaattaaacactgaaagtgatccaggctttcccagaggctgactggtagtgctggggagatgagcacttcctggccagcccctgtaggctccgtggccagctatgcctggacccttctagcagcaatgctgctgtattccagcaaagccaagtgcaggagtcccaggataaggcagaccccagttctgcagtgagggcggccctagtacaacacaacttggtcactggaccctcatagggatggatgcaatcccatcacccactcagatgcctgagactgtgcagaagcagggccagtgaaagcagagggcagatccagcagtgcttcaaggggccctgctatgcggatttagagtcggccatggacatggctgaagatggccaggacatagaacagggagcaacagcag

SEQ ID NO: 76899 - DNA, 520 bp, Homo sapiens
gtcttgatctcctgacgtcgtgatccacccatcttggcctcccaaagtgctaggattacaggtgtgagccaccgcgcccggctgtaatttcagaattatagatattgaatgtccatagtgacaaacacctataaaaatagaaaactctccagtactgtttttggaacctgaaagattgggttagtcatttattctgttttgttgttcaaacattgttttaagcctcagatttcaacctatatatatagaatagcagagaggggatgaggtctattagtgacattgtagttgtaaaagtgcagtttgaacctttgctttatttatgtacatactgtactgtcgtttgctctgtgcctttataaaagtaatcaaaaaaaagtatttcttcactagctattgcagtcttttataaaagactgcctttgcttagagcatgctatatattgcagtgtggaatattggaggccattataagaatgtttggaaatagcttgacccctgaaagatatctataaactca

SEQ ID NO: 76900 - DNA, 416 bp, Homo sapiens
caacactccctgctgtctcatgtctggcttggtgcagacattttcttatctgcctggcacctgcaggcatctgtgtttgtgaacccagcatataccacttctactgtgccattctctctatcctgctccttttctgggactcccagtggaaggtggcaggtgacaggtaagatggtggagcagctctccaagccctttggggactgagccacagtgtgtggctgcttccctgacctgtgtgatggcatcctagggttgttcaggaagatgcaaagcagctcagtcctgactgagttggagactggtgtctaccagatatctgctgtccacacaagctgcagctatgcagagaagctgggtgtagagaagcagctgatgggagctggggatattctgagttggtgcctggagagagg

SEQ ID NO: 76901 - DNA, 597 bp, Homo sapiens
ccttatttaggaaacatttttcaaatctccaaaagtgtaaactgtatttaaaaaagcaaatgactagcccacaggccgtacatagtttgctgacccctgcttttgtaggaatgaggagctcagctttgggggcttctcaggccttccatcttgtataaggaagacagatatgtcatgcccagaggcaggtggcagaacatcctgaaagggaagggatagtaggaaacagtgacctcccctgggcagccggaagcatttgtttaatcagattgctttcctaccacttgctgatgagtaattcttaccgcttttgggtcatggtggcttgaagaatctgatgagggccgggcacagtggctcatatctataatcttaacactttggaaggccaaggtggaaggatcacttgagcccagaagttcaagaccagcctgggcaacatagtgagacccccatctctacaaaaattttaaacaattaaaataaaaagtctggtgaaacttctggatccagattctctcttcaaaataagttccatcctcaacactcaaactcacactttcacggtatttgagaggccgcactcatccctcaccc

SEQ ID NO: 76902 - DNA, 437 bp, Homo sapiens
acccacagggaaggagaaggtggggctggtctccgctgggccagcaggtggcgccagggcctgtcggtctctccccttggccacctcccttgcgcttgctcatctcatgcccaggcgctgagggttctcagctggggcaggagagatggggtcctgaggcctgggtgaagttccaagccctggggctcgggggcagactctcgctcacccctcccagaaagatgttttcctaggggatgtccagcctaacacggcagggaaggaagtggtggtcacctgggaaaggggccaacctgagaggttgggggtcctgatgaggctgctattctcttgaggacatgaaatgagaggcggtgaagtcagtcagtgagtcaaaagctgagatctaggaaccagacacaatgtgggagaagctgcggtgaaatcaatcagtgaga

SEQ ID NO: 76903 - DNA, 534 bp, Homo sapiens
cgagaaggagccaaagctggagccagaaagcctggcaccgccaccttcccctgacagttagcaccttcctttcacaacatctcccttaagggggaagcgtctgctgtggaacccaccgcaaggcaacgcaggcagagttcagcctgaagagcgccaggccagcctcctctgtcttccgagcaccgcttctcaggtcgcttcccaatctgaggaggctgtcgtgtccacaaccagtccagggggatgtgcgccactagctgaggacgccaggcccggcgacaccacaaaggcttggccatgcggaatgtgccctcaagagcacacacttcgggtagagggcacttgcattgagctcttcagctttttaaatccactgtagttcatgagcctgtgtgacataattacttttacattttatattgtcaattagtttattggcattttcaatcttttcaactattggctatgaaaatatgaatttaacgtaacattcaaatgagtattaaagaaaaataaagtagaacttcattagaa

SEQ ID NO: 76904 - DNA, 359 bp, Homo sapiens
tgagactgagtctcactctgtcacccagactggagtgcagtggcacgatctcagttcactgcaagctccaccttctgggttcacgccattctcccgcctcagcctcccgagtagctgggacttcaggcgcccgccaccacacccagctaatttttgtatttttagtagagacggggtttcactgtgttagccaggatggtcttgatctcctgaccttgtgatccgcccacctcggcctcccaaagtgctgggattacaggtgtgagccaccacacctggccccatgatttgtcttttaatataaatggaaaactggagagagagaattgtgtttcaaaaactgtagcacacctgttgtt

SEQ ID NO: 76905 - DNA, 627 bp, Homo sapiens
ctggggtctgggaaggaggctatggtgaagtctaggacatgtgtgtttctgcagcgcctaggctgccagtcaaccacaggggagggccaagcccagtatggccccatcctccctggcctaactctgcttcttggccatcctgggagcagtcaagtactccaggcattgtcttcacagctgtctgtttcctgtcctctgtcctgagctctgtaccatccatatggaccttgccttttgtagccttctgggtgctgagtggatgtttaggacccaggatggctggggtgaacaatggggagggtatctgtgtccagtgtttcagaggctttggttaggacaaggctggcaaatgtagggttagtttggttttgttttttaaaagaacaaaaagataagatgatgaatagcctgtttcccatgatcaatttaaacataactgttaagaatgaatacagttaggtaaatgtgaatgagataaatgtttataaatgaacttgtcatagtttaaaaattctttttggtaacttgaaaccttatagtgaaattaagtaatagagatactcattaattgtctgagttatttctaagtaagttaaaatatgaaaacatatatgattattcataagt

SEQ ID NO: 76906 - DNA, 411 bp, Homo sapiens
tgagatggagtctcgctctgtcgcccaggctggagtgcagtggcgggatctcggctcactgcaagctccgcctcccgggttcacgccattctcctgcctcagcctcccaagtagctgggactacaggcgcccgccactacgcccggctaattttttgtatttttagtagagacggggtttcaccgttttagccgggatggtctcgatctcctgacctcgtgatccgcccgcctcggcctcccaaagtgctgggattacaggcgtgagccaccgcgcccggcctgtatttcatcttaatgtaagaataacagtcaaagaaaattggtaaaatatatactatattaggggatgttttgtgactgcaattgaattttctttcatatattgttcactttaataaaattaacctgc

SEQ ID NO: 76907 - DNA, 541 bp, Homo sapiens
atttttaatgggttactcttaagtgttacgtaattccttatgctgtggtgatcttgacattttaccagttcaagtgaagtatagaaagcgtccctccatttaagattcattacctctccatttataatataattctcttaaatattttctctttatacattgggaacatcagacaatattataactttgtcatcagtgatgaaacacaagttagaaaaacagaggctgggcgtggtggctcacactggtaatcccagcactctgggaggctgaggtgggcggatcgcttgagatagggagttcgggagcagcctggccaacatagtgaaacccatctctagtaaatacaaaaattagctgggcatggtggtgcgtgcctgtggtcccggctgctcgggagactgaggcgggagaatcactttggccccggggatggaggttgcagtgagccaagatcgcaccattgcactccagcctggcgacagagcaagactctgtgtcagaaataaatacataaatacataaatagatagaaagaaag

SEQ ID NO: 76908 - DNA, 402 bp, Homo sapiens
cttcatttcccactgccttgtgtattattaaaatttaagtctgcccatagctttcaactgaaagaaaataggcaatattagaacagatcaggctgagggcaaattacaactaaaaaaaaccccaaaccatctgaacagtggggatgttttcagttaacagcagtatggtattggaataacttattgatagttttagatagaaatctatttatagaactcagcaaccacagaccaatcaatttttcaactataacaactatataaaaccaaacacacaggccaggtattgtggcttatgcctataatcccagcactctgggacgccaaggcaggaggatctcttgaggccaggagtctaagagtagcctgggcaacatagtgagacccccatctctacaaata

SEQ ID NO: 76909 - DNA, 342 bp, Homo sapiens
tggggtttctccacgttgcccaggctagtcttgaactcctgcgctcaagtgatccacctgtcttggcctcccaacaggcatgaaccaacacccccagccagttttagtgatttttcaagaaatacatactcattttagaaagtacaaagagattgaaataagagctcactaaccagagacgacccattatggtttaaatttctttgtatatgtgcctaccttttcctgtgtgtgcatatttaatacacagcttgagtattccttctctgaaatccttgggaccagaagcgttgtggatttcaggcttgttcagactttggaatatttgcattatacttactg

SEQ ID NO: 76910 - DNA, 1115 bp, Homo sapiens
actcttgctttcaagagatgtggaatttctcttttataagaatctatgtggatataaatagtggtgatcaaggcactcttacactaagagttcagtgatgatacatctctgtcctttcttggcaatttttgctaccacttatttttagtgcctatataacattttaaagttgcatcctcctttttatgactgatgagaagcatatgcctctatgaggaagaaaaggtatttatgacttacagaaaaaaatttctcacagctatgagtaagctatagggaactgaaaacaagaggccaaagaacctttttttttttaatggccttggttacataaagatatttagaccagctttcaaaaataacaacagtttttaaaatttaccatatcgagcctcagtacgttactctaaaacacagctttataattcctctataatctacattaaatgaagagtaaaataaaactacaaatttaggaagatgaggaggaccaaaaaaactacaaataaggtaaataagaaaaattgcaaacctcaaatctcttacaaagaaaattatgatattaatagtttccttactcacatttggtaattgtataaagactgcagagttactacctgtacatctgaaaaaggagaaaaaggacctaaccagtgttgctgaaagaaattttacaaataaagggatcgatctggtagctagtcaggtttatttttacctgggatttagggcttcctgaggcaatgtagcctttacccttttttaggtcttagctccctttgaaaatctgatgaaatcattagatttggggggtaggatgtcttgtataaaaaattttgtatgggcttgtttatgtatttcagggagtttgtgagtgctctgaaaacgaatgaactcctagaccacctgtatcggaatcacctgagttgcatattaaaattgcagactattggactccaccctaatcttattgtattagaatttctaggcctggcactgtggctcacacctgtaatcccagcactttgggaggccaaggcaggtggatcacgaggtcaggagattgagaccatcctggctaacacagtgaaaccctctctctactaaaaatacaa

SEQ ID NO: 76911 - DNA, 1005 bp, Homo sapiens
aagaaactctgtctcgaagtaaataaataaatttttaaaaaccaacctgatgtgaagttgaaacacaagacgcggaaataaaaactcagagtataaatatctatattgttaccattatctgggataattgatgatttataagaagctgaggtttcgtcttcctagaaatggacttttattaggccagcaagaatgaccacttagccatttaaatgatttgtcagcatcttttgctgctctcttctaagaccattggttttcactaaaggataaatacctgctaagcaaattataaaatactataagacatttaatctcctggaagaggacttgctgataattggatcaaagttccagcattattgctcttttcgaatcatatggacttagtgttctcatgaccgaggagtcacatttttagcttgctaaaatattcactggagaacatggtgaaatccacgagtggaaacgttccatggtattttcaaacgccacgtgtcaggaatttggcatgccttcctctgggagaggcactggagtgtggccagatggaacccagcagggtacagagggcatttgtgggagcagttaggaaaccaggacgtccagcttctgcctgccagggagctcgctcatgttgtctctgaaatttgcataagagcaattacctcatattctaattttaaagatacaatttttaaagacatggaaggctctgaggcctcctgaaggctattcctatgtgaggtattgtttacgggtggcctttcactatttccaaatcagcgatgaaaagaagactgagtctaaaataaatgaagcaacagacttcagcagcctgagagaattttgttcaattccagtctccttaaaaaaaaatcggtttttgctttcaatttaggaaaattgttttgggttgcattgttgaaagtaatgatttctagcagctacttatgtataatctcttaaccaattaaattctgaatctcttaaaaaaaaaaaaaa

SEQ ID NO: 76912 - DNA, 108 bp, Homo sapiens
gactcttacagtgaagacagagctcttcaatacaccctgtggaaaggctggccaggtaagttactgttcaaatcaggaccatttgtggagtgaagtgtgtgtgtgtgt

SEQ ID NO: 76913 - DNA, 310 bp, Homo sapiens
tgatctgcccacctcagactcccaaagtgctgggactacaagcgtgaaccactgcacctggcctatcatgagaatttctaacattcttttagctctttgtacatgctaagggcatcggctgcaacatttcacccaattttatcatcagcaaccttatgaagcaggtacataattatccccattttacagaaaggaagactgaggcccaggtggcagaaaatgcctctccataaatactgggctagtaagtttcagagccaggaaaccaggcttgccagagactctaagagctgcctttttaacctctcct

SEQ ID NO: 76914 - DNA, 989 bp, Homo sapiens
atcatagttgaaccgtcctggaatagaagtgagtaaggtgaaccaggtgtggtggctcatgcctgtaatcctagcactttgggagaccgaggtgggaggattgcttgaggcctggagttcaggaacatcctgggcaacatagcaagatcctgtctctacaaaaaatccaaagtttttttaaattaaaaaaaaaaagtgagtaaggcagcttgaaccggaaatgcacaaaactgctatccagtttgcaaggcttttcccaatgactttgagggatggaacctgaaggaagcgggaggaggcaaatagggaggaaagtgaaatgatttataaatgacttgctaattttgtccaaagggagtaatgataattagggcattcttcccacacgaagatgacacaattgacccaatatcattgaggcaaacagtttgggctgtttttccagtagtatgacagtgacggtgtgtcaaccgcaggacctcacccacatttctttgggacctaggagtgtgggaaatagcagccagatttgaggtacaaatcatggtgtccagcctgcaaagcctttttgcagcaatctaagcctgactgctcctgttgtatggtcaaagtcattttaatctactttagcttattgtaaaatgttcaagaattgtattttgtcttgaaaaccatgaattttattgtttagggggagttattttttaaggagtgcaggatttcagttttggatgatgaaaaagttttgaagatgggtagtgacagtggtcacacaacattgtaaatgtacttaatgccattgtacacttacgtgactttaaagtaaacatgaaattttctacatttgtttgtttgatccaactgttatcctccctaagggtacttggaagttctttctggacattgccactgggaacttactatttaaatattgttggtcctcttggattccatcagtactccagagacttccttcgtttctaatttaa

SEQ ID NO: 76915 - DNA, 297 bp, Homo sapiens
ctcgtgatccgcccgcctcagccccccaaagtgctgggattacaggcgtgagccaccgaccccagcctaagatgtggttttccaatacaaagagaacaatgcaaaaggcttacaaggtaacacaacacacacacacacacacgaatacagagctctttgtgggaatcaaacgactataaaaaaaacttgtacttattataggattacatggaaaaaacaagtaatttccactcagatttgccctcaatccctccagagaaactacctcaaaacaaaataaacaagtgctttactaaa

SEQ ID NO: 76916 - DNA, 389 bp, Homo sapiens
atggtagagagacacttataatgcagtagttgaaaacctgcaaattggagtcatgctgtttggatttgaggaccagctctgcctacattggctgtggggtcttgaacaagtcacttaacttccctgtccatcaatgttcttatctgcaaaacaaaataatgacagtgtctggtaatgctgttggaggaaaaaataaaatagtgcctacatatggactctgtattttttttattatactttaagtgactctgtatgttttaaagtgattttagaaagctagatattgtgtattgaagttctattatgtggtattctcatgtactctatggaatctaacagtccattttctgtgtgcatttgcaatccatagagaaagagagagaagtgag

SEQ ID NO: 76917 - DNA, 382 bp, Homo sapiens
tgaatataaaagccctcagtatttaaaattgagaacattatttttccagtcctttaaaaaaccgtatctagtcaatattaagaataatgtttccaagtcataccctcatatcaggtatggcatgacgtcttccataatttgtttcattacagtgtaatatgaaaatctttgcacacagatgtgttatagcaaaaggaagaacacaaacggttccttcgggaagattttgtgctctcttgaattcaactgtctcagaaatcattaatcctgtgacttgggcagcataccacctggttttttagaaatcacttggatattggctgggcacagtggctcatgcctgtaatcccagcactttgggaggctgaggtgggcggatcac

SEQ ID NO: 76918 - DNA, 365 bp, Homo sapiens
atgggccatagtttgcctacctgtttaccctttgtttagagtctttctcttgccctactccctggccccaatctctgctaccgtggtaacgtgagctccgcaagggcaaggattttttcctattttgttcatggacttccaaaatgcctacaacaacatctgacacatagaccctcaacttattaaaataatagataagttaattatgttttgagtgttttttataagcagcatatagctgaggttttacaattcagtctactgatctcatctcaacagatatgtttaattaggttgcattcattgtgatttctagtatatttggaattatccctgtctggtttttgttttgtatttctttcctt

SEQ ID NO: 76919 - DNA, 646 bp, Homo sapiens
tgaagaaacattttaaggaaaaacagtggaaaagtatattaatctggaatcagtgaagaaaccaagaccaacacctcttactcattattcctttacatgcagaatagaggcatttatgcaaattgaactgcaggtttttcagcatatacacaatgtcttgtgcaacagaaaaacatgttggggaaatattcctcagtggagagtcgttctcatgctgacggggagaacgaaagtgacaggggtttcctcataagttttgtatgaaatatctctacaaacctcaattagttctactctacactttcactatcatcaacactgagactatcctgtctcacctacaaatgtggaaactttacattgttcgatttttcagcagactttgttttattaaatttttattagtgttaagaatgctaaatttatgtttcaattttatttccaaatttctatcttgttatttgtacaacaaagtaataaggatggttgtcacaaaaacaaaactatgccttctcttttttttcaatcaccagtagtatttttgagaagacttgtgaacacttaaggaaatgactattaaagtcttatttttatttttttcaaggaaagatggattcaaataaattattctgtttttgcttttatg

SEQ ID NO: 76920 - DNA, 578 bp, Homo sapiens
tgaagagacagggtctcactcagtcaccaggcaggagtgcagcagtgccatcacagctcactgcagctttgaattcctggctcaagcgatcctccaacctcagccataggcatgcaccaccatgctaggccttttagtagagacaggatctcaccatgttgctcaggctggtctccaacccctgggctcaagtgatcctcctgccttggcctcccaaagtgggaggattacaagtgttatccaccatgctggacaggaatatttttaaataatgaaaccaagttcctttcgctttgtaagttaatgcatgtattgatggtgagtagagaacaatgacacaatctctagagagacataggtgttcggcctggctcaatcactagccttatagtctcacaggaaaatatgaacttcatcaaaatagctaattattaccacatcatggatctttatggtcattttcaaatagacaaaattacaaagttcaatatataaatgccattggcctaatatcccattttataggattaactatttttcaaggagtcatgaacacaatttcaaattctccattcaga

SEQ ID NO: 76921 - DNA, 422 bp, Homo sapiens
caacacagtgagacatatctacaaaaaattaaaaattggctggacatggtggtggttcacctgtagtacaagctactcaggaggtcgatgtgggaggattgcttgaggctgagaggttgagggctgcagtgagccatgagtgccactgcactcagcctgggcaacagagtaaaaccctgtctcaaaaaaaataaaataaaatcggaaaaattctgaattcctttacatttggctccaaaagttttgcataagggattgtggaccctttatctttggataaaaagatttgttttatccattcaacgcacattgtgtttagtgctaaggaaaaaatgattaagacatggtttcttccctggaagagtgcacagtggagtagagtgagtgacagaggagttgcaccctattcaggatttgagttc

SEQ ID NO: 76922 - DNA, 507 bp, Homo sapiens
taaaagttgaaaaaatttcctccattctaatttctactactgcaaagattgataggtacaacccgtataaacaaaagctcttttagagcctcagtaattttcaagaatgggaggggacaaaaatgttggagaactctttgctaaagcagtgaagtctcctattagccactgtgaccaagtgaggcattatccagcattagcattctttctcagattattcacccaccctaggcttccatgtgaccctgaaataagggacttcacttccaagtttggccgaagatgctatcagggaatccaggattctgattatggtaacatacccttcccacctccttttcctgttcttcctcctaatggaaaggacatgggctatgaagcaagcagaccttgatctcagcctcggccctgcataaagtaagaaatagtaatgcctagccttccttagcaggattgtttggaggattaaataaagtcatgaagacaaatctgtaaagtgcttacaaa

SEQ ID NO: 76923 - DNA, 126 bp, Homo sapiens
tggagcaggctgggagtggtggtttatgcctattatcccactgctttgggaggctgtggtgggaggtttgtctgaggccaggagttcaagaccagcctggacaacagagcgagaccctgtttctta

SEQ ID NO: 76924 - DNA, 423 bp, Homo sapiens
actccccttggtgacttcctctactcacatgggtttagctacaaatcagatgttcattattcctaagtgtgaacccctagccctggctttccttgcaagttcagacctacacagaagacgatcacagctgacgggtccactgttgatctggtctcaccagctggaatcacagtatcttcttccctgtttctaatcctgtgtgtctgttcaccacaccctaccacatttatcccccagtgtttctggaattacttcctccttctccataaagtgaccatccaagctcactttatttcaagccctcatcatctgttgctggacatcaccatgacctcaggcgatgccagggtcttcatgagcatggaaccaaatcaacatggaagaacaggtcatgaggagccaggtcacctcagccatggagct

SEQ ID NO: 76925 - DNA, 760 bp, Homo sapiens
agcctgtagactcagctactcgggaggttgaggcaggagaatggcgtgaacccaggaggcggagcttgcagtgagccgagatcacaccactgcactccagcctgggtgacagagcaagactccgtctaaaaaaaaaaaatagtaagaaagaaggaaagacacaaagacagaaagaaggaaggaaagaaagcaagctgttttccccctgccttgcccctgctcaccctttgaattccttttcctgggcaaagccaagaaccctcgtgggctaaaaccccgctttggggcttaaagtttgcaaaatcctcccattaatctattgggaccagttgccacttaggagcattctttgataacttttacaaaacatcttttgtggtttttgaaatgttttcattttgtagatcattagcccttcttttttgaactggaatacatttcacgggaattttcaaatttaaagtctgtgcaatgttacataaaatacctttgattattaaaagccatctgttttgctataacttcccttttttgttctaaagtttgtctatttctgctatttgtttttttaccatagaaatattgatttccttaagttttcaaagaaccaagttattaataatttctctaagaactagtctcaagcttgctatacaatcctatggttgatagactgtggctttcttgttgatttccatttgttgttcatttcctccaattttccttttttaaaaattataattattgtttggattattta

SEQ ID NO: 76926 - DNA, 920 bp, Homo sapiens
agttcaaagtgaactgaagcttttacatctgaagaagtgatgaagactcaggagttggctgaggaaagtcagcactacgagggaaggaaagtgaaccaggcagatggaacaacgtatgagaagggacagacagaaggtgcattcagggaccttagagaagggtggctggagaggacagcaggggccagatcacgaacttcgtgtgtacacatttgagacttaatcctaaagcgattagaagccacggcttctaattcacaaattcttttgccacagaagaggcagaaatcacttcattttaatacctaccaataacctataggatggtcagttcaaattattctcaggtccacagcaactgacctaggatactatggggttgatcccataagaacaggaggaaagagctgctttccccacaactcccattaccactccctgctggcccaagatcaccaggaaattgatcccaggaggaaatacagaacgtttgggaagagcaggtccaactctggctcttgggccgctaacatcttaatagtcaagttggttatattgtgccattacattaccagttataatttacacaaattgtccttctctggcttggtctgtctcctcccctcctcagtgcagaagtacttttgctctcagggacggatcccagtggcctgatgctccatcctccctccttgcccctctgccacaggccctgtcccacaaaggattagaagaacaccccttgttaaattccaggagtcagcaaagagtggacaccttgttttaaacattcttataccaggtaggcagtattctggcaagagtataacaaaagcctctacagttaagttaaacccgcaaataaactggctccctagttgaaatgtgcaagacagccttaggagcatgttaagatgaca

SEQ ID NO: 76927 - DNA, 270 bp, Homo sapiens
agaagcaaaattaggacttaataacattttctgaaaactacaacatttgcatattagaacctatgaacaaaatacgcattgggttttatttgggattccaagataattttagtcataaagtttaggaacagattattccattgctttactatttctctgagcatttaaaaaatgttatctcgttaaatctttataacaacctagtgaaataaggcagcaaagtcctcactttgttgaagaagacattgagcctaagagaagcaagttgcc

SEQ ID NO: 76928 - DNA, 2496 bp, Homo sapiens
aatatggttaaaatttgacaagataatcctgaagtttgtaatgacaagtctggagacaatataaatgcctttcagtggggaggacgattttaagtttatttatatgtttactattgaatatgtgcagtctgaaatgaatggtgcatctccatttgtttttcaagatagattaaaaatccaaggacagaagaacattgtgaataataagctcccatttgttggcgatagtaggtggagtgatagaagaggctgtgggtacataaacaggtgatactagtcaagagcaggtcaaatggaaagaatgaagacatgtttggaggctactggaataattccaagtaaaagttgctaaaggacatgtactaggataatgacataatgctttgtaaaaaacaaatctgaaaaaattataggtgaatgtaatgtacacaaagctatctgaacattgcagattatgggaagagaggagtcaaagatgatgattccaggtttcaaatctggtgacaatatgtggttcatttctcatctgccctcccctcctatgtgtactttgctgttccttctcttataagtggggtaatgctaaagttttcttcatcccttgctttccccactctctttcttccacattctctttcttcttcgtggtttcagctgtcatctctttttggatgactcccacatttttacctctggttctgatctctttctcagcctctggtccttcatatcccttgcttgcttgggatgttatcatgttatgatcatggtcttagtgtaatcagacatctgttcaattccagccactgttgggagatatatgtcaccttggaaaagttccttaacttctataagggtcaatgaccccatttataaatgggcatatgaatactacttatctttcaagggtgttaagagcactgaatgaataatgatcttctaaaaacagtacataaactgggctcattctccttggtatgaggtgaaatgaaagaaatttagataatattatatctattcacctatcttctgtctttcttgtttttggcatataatctattatgaaccatcatttattggaaaggactgtctgaagtatagctcagaaggacacatcagaaggtgtggggctcgtccttatggatggagaagtggggctatattggtgtggggaatgaaaggatgagacaggacaaaatgtagaaatagattaaatatgagagtcaaggaagcattaaattatgacttagctgatatatagaataatatgttaccctttagagatacaggattttttgtagaagtttttgcagaaaagtgaaggaattgatatttattacgttgactgtaccttgtgtggtgcatttgttgcaactgatgaaacgatactgatacatttttatattaatactaaaatacatagtttgcattagggttcatactttgtggtgtacattctgcgggttttgacgaaggtatggtggcatatattcattgttactgtatcatgtagaatagttttagtgccctaaaaatcccctttgcgtcacctctttcattttcccctctccctgaacaccaggcaatcactaatctttttctgtgtccacatttttgccttttccagaatgtcatgtagttagaatcatctagtgtgcggtcttttcagagtggcttctttcacttagtaatatccttttaagattcctcaagtctttccatggcttgatagctaatttctttttattactgaatgatattcctttgtatgacgtaccacaattcatttatccattctcctgctgaaggtcagattgcttctaagttttcatagttatgaaaacttgtattttaagattaaaatctggaagtttttattgatattaggcattcgtttcttagggctgctataataacagagtaccacaaactgggtagcttaaaacaacagaaatttattctttcatagttctggagcctagacatcagaaatcaaggtgttagcagggttggcacctgccaaccaagagagctttgagggagaatctattccatacctttctcctagctgctcatgagggttagccatctttgatgttccttggattgtaaatgcatcagtccaatctctgcttccctcttcatggggcattctccctgtttcttcacattgctgtcttcttgtgaggataccagtcatattgaattaggggcccaccctacaccagtatgacctcatcttaactaattatatctgcaacaaccctatttccaaattaggtcacattctaaggcactggtggttagacttcaacaacgttattagagggcacagttcaacccatagcatgaagtgatgctttctagaccattcttctttagatagtcatcctttttgttattgttgaatcatggatggtgatgtaacgttttccagctttggctagttgtggtttcagctgaaaaaccaaaatgtccctgactgtgttatataaa

SEQ ID NO: 76929 - DNA, 6757 bp, Homo sapiens
gcccggccgacgcggctttgtctcctttgttcccggcggtggcagcgccgcgcgggaggggcgggcagcgggcgcagttttccgcccctcggtctccgggtaacagctgcggctccaccagacccggggagaggccgctgcgcgcggagcccgagcccggagcggccgacgcccgcctcggcgcgcacatcccgcggggcccggccgggtggtgactcccacacgggtcatgctgttgtctcctgatccagccggccctgccaggtgaccatgcctgctctgggcccagctcttctccaggctctctgggccgggtgggtcctcaccctccagccccttccaccaactgcattcactcccaatggcacgtatctgcagcacctggcaagggaccccacctcaggcaccctctacctgggggctaccaacttcctgttccagctgagccctgggctgcagctggaggccacagtgtccaccggccctgtgctagacagcagggactgcctgccacctgtgatgcctgatgagtgcccccaggcccagcctaccaacaacccgaatcagctgctcctggtgagcccaggggccctggtggtatgcgggagcgtgcaccagggggtctgtgaacagcggcgcctggggcagctcgagcagctgctgctgcggccagagcggcctggggacacacaatatgtggctgccaatgatcctgcggtcagcacggtggggctggtagcccagggcttggcaggggagcccctcctgtttgtggggcgaggatacaccagcaggggtgtggggggtggcattccacccatcacaacccgggccctgtggccgcccgacccccaagctgccttctcctatgaggagacagccaagctggcagtgggccgcctctccgagtacagccaccacttcgtgagtgcctttgcacgtggggccagcgcctacttcctgttcctgcggcgggacctgcaggctcagtctagagcttttcgtgcctatgtatctcgagtgtgtctccgggaccagcactactactcctatgtggagttgcctctggcctgcgaaggtggccgctacgggctgatccaggctgcagctgtggccacgtccagggaggtggcgcatggggaggtgctctttgcagctttctcctcggctgcaccccccactgtgggccggcccccatcggcggctgctggggcatctggagcctctgccctctgtgccttccccctggatgaggtggaccggcttgctaatcgcacgcgagatgcctgctacacccgggagggtcgtgctgaggatgggaccgaggtggcctacatcgagtatgatgtcaattctgactgtgcacagctgccagtggacaccctggatgcttatccctgtggctcagaccacacgcccagccccatggccagccgggtcccgctggaagccacaccaattctggagtggccagggattcagctaacagctgtggcagtcaccatggaagatggacacaccatcgctttcctgggtgatagtcaagggcagctgcacagggtctacttgggcccagggagcgatggccacccatactccacacagagcatccagcaggggtctgcagtgagcagagacctcacctttgatgggacctttgagcacctgtatgtcatgacccagagcacacttctgaaggttcctgtggcttcctgtgctcagcacctggactgtgcatcttgccttgctcacagggacccatactgtgggtggtgcgtgctccttggcaggtgcagtcgccgttctgagtgctcgaggggccagggcccagagcagtggctatggagcttccagcctgagctgggctgtctgcaagtggcagccatgagtcctgccaacatcagccgagaggagacgagggaggttttcctatcagtgccagacctgccacccctgtggccaggggagtcatattcctgccactttggggaacatcagagtcctgccctgctgactggttctggtgtgatgtgcccctccccagaccctagtgaggccccagtgctgccgagaggagccgactacgtatccgtgagcgtggagctcagatttggcgctgttgtgatcgccaaaacttccctctctttctatgactgtgtggcggtcactgaactccgcccatctgcgcagtgccaggcctgtgtgagcagccgctgggggtgtaactggtgtgtctggcagcacctgtgcacccacaaggcctcgtgtgatgctgggcccatggttgcaagccatcagagcccgcttgtctccccagaccctcctgcaagaggtgatggagactcagcagagcttgagggccctcccgcccccctcatcctcccgtccagcctcgactaccagtatgacacccccgggctctgggagctggaagaggcgaccttgggggcaagctcctgcccctgtgtggagagcgttcagggctccacgttgatgccggtccatgtggagcgggaaatccggctgctaggcaggaacctgcaccttttccaggatggcccaggagacaatgagtgtgtgatggagctggagggcctcgaggtggtggttgaggcccgggtcgagtgtgagccacctccagatacccagtgccatgtcacctgccagcagcaccagctcagctatgaggctctgcagccggagctccgtgtggggctgtttctgcgtcgggccggccgtctgcgtgtggacagtgctgaggggctgcatgtggtactgtatgactgttccgtgggacatggagactgcagccgctgccaaactgccatgccccagtatggctgtgtgtggtgtgagggggagcgtccacgttgtgtgacccgggaggcctgtggtgaggctgaggctgtggccacccagtgcccagcgcccctcatccactcggtggagccactgactgggcctgtagacggaggcacccgtgtcaccatcaggggctccaacctgggccagcatgtgcaggatgtgctgggcatggtcacggtggctggagtgccctgtgctgtggatgcccaggagtacgaggtctccagcagcctcgtgtgcatcaccggggccagtggggaggaggtggccggcgccacagcggtggaggtgccgggaagaggacgtggtgtctcagaacacgactttgcctaccaggatccgaaggtccattccatcttcccggcccgcggccccagagctgggggcacccgtctcaccctgaatggctccaagctcctgactgggcggctggaggacatccgagtggtggttggagaccagccttgtcacttgctgccggagcagcagtcagaacaactgcggtgtgagaccagcccacgccccacgcctgccacgctccctgtggctgtgtggtttggggccacggagcggaggcttcaacgcggacagttcaagtataccttggaccccaacatcacctctgctggccccaccaagagcttcctcagtggaggacgtgagatatgcgtccgtggccagaatctggacgtggtacagacgccaagaatccgggtgaccgtggtctcgagaatgctgcagcccagccaggggcttggacggaggcgtcgcgtggtcccggagacggcatgttcccttggaccctcctgcagtagccagcaatttgaggagccgtgccatgtcaactcctcccagctcatcacgtgccgcacacctgccctcccaggcctgcctgaggacccctgggtccgggtggaatttatccttgacaacctggtctttgactttgcaacactgaaccccacacctttctcctatgaggccgaccccaccctgcagccactcaaccctgaggaccccaccatgccattccggcacaagcctgggagtgtgttctccgtggagggggagaacctggaccttgcaatgtccaaggggtggtggctatgataggggatggcccctgtgtggtgaagacgctgacgcggcaccacctgtactgcgagccccccgtggagcagcccctgccacggcaccatgccctccgagaggcacctgactctttgcctgagttcacggtgcagatggggaacttgcgcttctccctgggtcacgtgcagtatgacggcgagagccctggggcttttcctgtggcagcccaggtgggcttgggggtgggcacctctcttctggctctgggtgtcatcatcattgtcctcatgtacaggaggaagagcaagcaggccctgagggactataagaaggttcagatccagctggagaatctggagagcagtgtgcgggaccgctgcaagaaggaattcacagacctcatgactgagatgaccgatctcaccagtgacctcctgggcagcggcatccccttcctcgactacaaggtgtatgcggagaggatcttcttccctgggcaccgcgagtcgcccttgcaccgggacctgggtgtgcctgagagcagacggcccactgtggagcaagggctggggcagctctctaacctgctcaacagcaagctcttcctcaccaagttcatccacacgctggagagccagcgcaccttttcagctcgggaccgtgcctacgtggcatctctgctcaccgtggcactgcatgggaagcttgagtatttcactgacatcctccgcactctgctcagtgacctggttgcccagtatgtggccaagaaccccaagctgatgctgcgcaggacagagactgtggtggagaagctgctcaccaactggatgtccatctgtctgtataccttcgtgagggactccgtaggggagcctctgtacatgctctttcgagggattaagcaccaagtggataaggggccagtggacagtgtgacaggcaaggccaaatacaccttgaacgacaaccgcctgctcagagaggatgtggagtaccgtcccctgaccttgaatgcactattggctgtggggcctggggcaggagaggcccagggcgtgcccgtgaaggtcctagactgtgacaccatctcccaggcaaaggagaagatgctggaccagctttataaaggagtgcctctcacccagcggccagaccctcgcacccttgatgttgagtggcggtctggggtggccgggcacctcattctttctgacgaggatgtcacttctgaggtccagggtctgtggaggcgcctgaacacactgcagcattacaaggtcccagatggagcaactgtggccctcgtcccctgcctcaccaagcatgtgctccgggaaaaccaggattatgtccctggagagcggaccccaatgctggaggatgtagatgaggggggcatccggccctggcacctggtgaagccaagtgatgagccggagccgcccaggcctcggaggggcagccttcggggcggggagcgtgagcgcgccaaggccatccctgagatctacctgacccgcctgctgtccatgaagggcaccctgcagaagttcgtggatgacctgttccaggtgattctcagcaccagccgccccgtgccgctcgctgtgaagtacttctttgacctgctggatgagcaggcccagcagcatggcatctccgaccaggacaccatccacatctggaagaccaacagcttgcctctgaggttctggatcaatataataaaaaacccgcagtttgtgttcgacgtgcaaacatctgataacatggatgcggtgctccttgtcattgcacagaccttcatggacgcctgcaccctggccgaccacaagctgggccgggactccccgatcaacaaacttctgtatgcacgggacattccccggtacaagcggatggtggaaaggtactatgcagacatcagacagactgtcccagccagcgaccaagagatgaactctgtcctggctgaactgtcctggaactactccggagacctcggggcgcgagtggccctgcatgaactctacaagtacatcaacaagtactatgaccagatcatcactgccctggaggaggatggcacggcccagaagatgcagctgggctatcggctccagcagattgcagctgctgtggaaaacaaggtcacagatctataggaacccaggagccacggcctgctgttgcttcagcctggcctgggcagccctggaagctcggaggagaggccaccttcttaggtgcctgtagtgactgacaagcagagttagtggaaggtgactcccagtctcctggtggctctggcctcggccctgctggatccacctcctagacccggggcctcaaggctcatggggtagtacccagcctgctccccgagtccagcgaccctgtgacaccggtctgcagggagttggggactaagggcttccagagagtggctggaagagactccaggcccctggggagactgtactgttcctgaacactggccttggccacactgggattcggagaggaaggaggagagccccatgcttcctgtctgcctcctccaccatccctgacctcagttgagctgcctctggccttgttgctgctgccacatcctaggtctaagagttgaacgcctctcctaggccactacaaactgacccctcagcagggctggctgccacagggctgccctgcctcataggtagccatggtgagggctatctgctgcaggggggtcttggggagagtggtgactccattgacccagcttttcattaaaggataacacactgca

SEQ ID NO: 76930 - DNA, 6723 bp, Homo sapiens
gcccggccgacgcggctttgtctcctttgttcccggcggtggcagcgccgcgcgggaggggcgggcagcgggcgcagttttccgcccctcggtctccgggtaacagctgcggctccaccagacccggggagaggccgctgcgcgcggagcccgagcccggagcggccgacgcccgcctcggcgcgcacatcccgcggggcccggccgggtggtgactcccacacgggtcatgctgttgtctcctgatccagccggccctgccaggtgaccatgcctgctctgggcccagctcttctccaggctctctgggccgggtgggtcctcaccctccagccccttccaccaactgcattcactcccaatggcacgtatctgcagcacctggcaagggaccccacctcaggcaccctctacctgggggctaccaacttcctgttccagctgagccctgggctgcagctggaggccacagtgtccaccggccctgtgctagacagcagggactgcctgccacctgtgatgcctgatgagtgcccccaggcccagcctaccaacaacccgaatcagctgctcctggtgagcccaggggccctggtggtatgcgggagcgtgcaccagggggtctgtgaacagcggcgcctggggcagctcgagcagctgctgctgcggccagagcggcctggggacacacaatatgtggctgccaatgatcctgcggtcagcacggtggggctggtagcccagggcttggcaggggagcccctcctgtttgtggggcgaggatacaccagcaggggtgtggggggtggcattccacccatcacaacccgggccctgtggccgcccgacccccaagctgccttctcctatgaggagacagccaagctggcagtgggccgcctctccgagtacagccaccacttcgtgagtgcctttgcacgtggggccagcgcctacttcctgttcctgcggcgggacctgcaggctcagtctagagcttttcgtgcctatgtatctcgagtgtgtctccgggaccagcactactactcctatgtggagttgcctctggcctgcgaaggtggccgctacgggctgatccaggctgcagctgtggccacgtccagggaggtggcgcatggggaggtgctctttgcagctttctcctcggctgcaccccccactgtgggccggcccccatcggcggctgctggggcatctggagcctctgccctctgtgccttccccctggatgaggtggaccggcttgctaatcgcacgcgagatgcctgctacacccgggagggtcgtgctgaggatgggaccgaggtggcctacatcgagtatgatgtcaattctgactgtgcacagctgccagtggacaccctggatgcttatccctgtggctcagaccacacgcccagccccatggccagccgggtcccgctggaagccacaccaattctggagtggccagggattcagctaacagctgtggcagtcaccatggaagatggacacaccatcgctttcctgggtgatagtcaagggcagctgcacagggtctacttgggcccagggagcgatggccacccatactccacacagagcatccagcaggggtctgcagtgagcagagacctcacctttgatgggacctttgagcacctgtatgtcatgacccagagcacacttctgaaggttcctgtggcttcctgtgctcagcacctggactgtgcatcttgccttgctcacagggacccatactgtgggtggtgcgtgctccttggcaggtgcagtcgccgttctgagtgctcgaggggccagggcccagagcagtggctatggagcttccagcctgagctgggctgtctgcaagtggcagccatgagtcctgccaacatcagccgagaggagacgagggaggttttcctatcagtgccagacctgccacccctgtggccaggggagtcatattcctgccactttggggaacatcagagtcctgccctgctgactggttctggtgtgatgtgcccctccccagaccctagtgaggccccagtgctgccgagaggagccgactacgtatccgtgagcgtggagctcagatttggcgctgttgtgatcgccaaaacttccctctctttctatgactgtgtggcggtcactgaactccgcccatctgcgcagtgccaggcctgtgtgagcagccgctgggggtgtaactggtgtgtctggcagcacctgtgcacccacaaggcctcgtgtgatgctgggcccatggttgcaagccatcaggtgatggagactcagcagagcttgagggccctcccgcccccctcatcctcccgtccagcctcgactaccagtatgacacccccgggctctgggagctggaagaggcgaccttgggggcaagctcctgcccctgtgtggagagcgttcagggctccacgttgatgccggtccatgtggagcgggaaatccggctgctaggcaggaacctgcaccttttccaggatggcccaggagacaatgagtgtgtgatggagctggagggcctcgaggtggtggttgaggcccgggtcgagtgtgagccacctccagatacccagtgccatgtcacctgccagcagcaccagctcagctatgaggctctgcagccggagctccgtgtggggctgtttctgcgtcgggccggccgtctgcgtgtggacagtgctgaggggctgcatgtggtactgtatgactgttccgtgggacatggagactgcagccgctgccaaactgccatgccccagtatggctgtgtgtggtgtgagggggagcgtccacgttgtgtgacccgggaggcctgtggtgaggctgaggctgtggccacccagtgcccagcgcccctcatccactcggtggagccactgactgggcctgtagacggaggcacccgtgtcaccatcaggggctccaacctgggccagcatgtgcaggatgtgctgggcatggtcacggtggctggagtgccctgtgctgtggatgcccaggagtacgaggtctccagcagcctcgtgtgcatcaccggggccagtggggaggaggtggccggcgccacagcggtggaggtgccgggaagaggacgtggtgtctcagaacacgactttgcctaccaggatccgaaggtccattccatcttcccggcccgcggccccagagctgggggcacccgtctcaccctgaatggctccaagctcctgactgggcggctggaggacatccgagtggtggttggagaccagccttgtcacttgctgccggagcagcagtcagaacaactgcggtgtgagaccagcccacgccccacgcctgccacgctccctgtggctgtgtggtttggggccacggagcggaggcttcaacgcggacagttcaagtataccttggaccccaacatcacctctgctggccccaccaagagcttcctcagtggaggacgtgagatatgcgtccgtggccagaatctggacgtggtacagacgccaagaatccgggtgaccgtggtctcgagaatgctgcagcccagccaggggcttggacggaggcgtcgcgtggtcccggagacggcatgttcccttggaccctcctgcagtagccagcaatttgaggagccgtgccatgtcaactcctcccagctcatcacgtgccgcacacctgccctcccaggcctgcctgaggacccctgggtccgggtggaatttatccttgacaacctggtctttgactttgcaacactgaaccccacacctttctcctatgaggccgaccccaccctgcagccactcaaccctgaggaccccaccatgccattccggcacaagcctgggagtgtgttctccgtggagggggagaacctggaccttgcaatgtccaaggggtggtggctatgataggggatggcccctgtgtggtgaagacgctgacgcggcaccacctgtactgcgagccccccgtggagcagcccctgccacggcaccatgccctccgagaggcacctgactctttgcctgagttcacggtgcagatggggaacttgcgcttctccctgggtcacgtgcagtatgacggcgagagccctggggcttttcctgtggcagcccaggtgggcttgggggtgggcacctctcttctggctctgggtgtcatcatcattgtcctcatgtacaggaggaagagcaagcaggccctgagggactataagaaggttcagatccagctggagaatctggagagcagtgtgcgggaccgctgcaagaaggaattcacagacctcatgactgagatgaccgatctcaccagtgacctcctgggcagcggcatccccttcctcgactacaaggtgtatgcggagaggatcttcttccctgggcaccgcgagtcgcccttgcaccgggacctgggtgtgcctgagagcagacggcccactgtggagcaagggctggggcagctctctaacctgctcaacagcaagctcttcctcaccaagttcatccacacgctggagagccagcgcaccttttcagctcgggaccgtgcctacgtggcatctctgctcaccgtggcactgcatgggaagcttgagtatttcactgacatcctccgcactctgctcagtgacctggttgcccagtatgtggccaagaaccccaagctgatgctgcgcaggacagagactgtggtggagaagctgctcaccaactggatgtccatctgtctgtataccttcgtgagggactccgtaggggagcctctgtacatgctctttcgagggattaagcaccaagtggataaggggccagtggacagtgtgacaggcaaggccaaatacaccttgaacgacaaccgcctgctcagagaggatgtggagtaccgtcccctgaccttgaatgcactattggctgtggggcctggggcaggagaggcccagggcgtgcccgtgaaggtcctagactgtgacaccatctcccaggcaaaggagaagatgctggaccagctttataaaggagtgcctctcacccagcggccagaccctcgcacccttgatgttgagtggcggtctggggtggccgggcacctcattctttctgacgaggatgtcacttctgaggtccagggtctgtggaggcgcctgaacacactgcagcattacaaggtcccagatggagcaactgtggccctcgtcccctgcctcaccaagcatgtgctccgggaaaaccaggattatgtccctggagagcggaccccaatgctggaggatgtagatgaggggggcatccggccctggcacctggtgaagccaagtgatgagccggagccgcccaggcctcggaggggcagccttcggggcggggagcgtgagcgcgccaaggccatccctgagatctacctgacccgcctgctgtccatgaagggcaccctgcagaagttcgtggatgacctgttccaggtgattctcagcaccagccgccccgtgccgctcgctgtgaagtacttctttgacctgctggatgagcaggcccagcagcatggcatctccgaccaggacaccatccacatctggaagaccaacagcttgcctctgaggttctggatcaatataataaaaaacccgcagtttgtgttcgacgtgcaaacatctgataacatggatgcggtgctccttgtcattgcacagaccttcatggacgcctgcaccctggccgaccacaagctgggccgggactccccgatcaacaaacttctgtatgcacgggacattccccggtacaagcggatggtggaaaggtactatgcagacatcagacagactgtcccagccagcgaccaagagatgaactctgtcctggctgaactgtcctggaactactccggagacctcggggcgcgagtggccctgcatgaactctacaagtacatcaacaagtactatgaccagatcatcactgccctggaggaggatggcacggcccagaagatgcagctgggctatcggctccagcagattgcagctgctgtggaaaacaaggtcacagatctataggaacccaggagccacggcctgctgttgcttcagcctggcctgggcagccctggaagctcggaggagaggccaccttcttaggtgcctgtagtgactgacaagcagagttagtggaaggtgactcccagtctcctggtggctctggcctcggccctgctggatccacctcctagacccggggcctcaaggctcatggggtagtacccagcctgctccccgagtccagcgaccctgtgacaccggtctgcagggagttggggactaagggcttccagagagtggctggaagagactccaggcccctggggagactgtactgttcctgaacactggccttggccacactgggattcggagaggaaggaggagagccccatgcttcctgtctgcctcctccaccatccctgacctcagttgagctgcctctggccttgttgctgctgccacatcctaggtctaagagttgaacgcctctcctaggccactacaaactgacccctcagcagggctggctgccacagggctgccctgcctcataggtagccatggtgagggctatctgctgcaggggggtcttggggagagtggtgactccattgacccagcttttcattaaaggataacacactgca

SEQ ID NO: 76931 - DNA, 7260 bp, Homo sapiens
gcccggccgacgcggctttgtctcctttgttcccggcggtggcagcgccgcgcgggaggggcgggcagcgggcgcagttttccgcccctcggtctccgggtaacagctgcggctccaccagacccggggagaggccgctgcgcgcggagcccgagcccggagcggccgacgcccgcctcggcgcgcacatcccgcggggcccggccgggtggtgactcccacacgggtcatgctgttgtctcctgatccagccggccctgccaggtgaccatgcctgctctgggcccagctcttctccaggctctctgggccgggtgggtcctcaccctccagccccttccaccaactgcattcactcccaatggcacgtatctgcagcacctggcaagggaccccacctcaggcaccctctacctgggggctaccaacttcctgttccagctgagccctgggctgcagctggaggccacagtgtccaccggccctgtgctagacagcagggactgcctgccacctgtgatgcctgatgagtgcccccaggcccagcctaccaacaacccgaatcagctgctcctggtgagcccaggggccctggtggtatgcgggagcgtgcaccagggggtctgtgaacagcggcgcctggggcagctcgagcagctgctgctgcggccagagcggcctggggacacacaatatgtggctgccaatgatcctgcggtcagcacggtggggctggtagcccagggcttggcaggggagcccctcctgtttgtggggcgaggatacaccagcaggggtgtggggggtggcattccacccatcacaacccgggccctgtggccgcccgacccccaagctgccttctcctatgaggagacagccaagctggcagtgggccgcctctccgagtacagccaccacttcgtgagtgcctttgcacgtggggccagcgcctacttcctgttcctgcggcgggacctgcaggctcagtctagagcttttcgtgcctatgtatctcgagtgtgtctccgggaccagcactactactcctatgtggagttgcctctggcctgcgaaggtggccgctacgggctgatccaggctgcagctgtggccacgtccagggaggtggcgcatggggaggtgctctttgcagctttctcctcggctgcaccccccactgtgggccggcccccatcggcggctgctggggcatctggagcctctgccctctgtgccttccccctggatgaggtggaccggcttgctaatcgcacgcgagatgcctgctacacccgggagggtcgtgctgaggatgggaccgaggtggcctacatcgagtatgatgtcaattctgactgtgcacagctgccagtggacaccctggatgcttatccctgtggctcagaccacacgcccagccccatggccagccgggtcccgctggaagccacaccaattctggagtggccagggattcagctaacagctgtggcagtcaccatggaagatggacacaccatcgctttcctgggtgatagtcaagggcagctgcacagggtctacttgggcccagggagcgatggccacccatactccacacagagcatccagcaggggtctgcagtgagcagagacctcacctttgatgggacctttgagcacctgtatgtcatgacccagagcacacttctgaaggttcctgtggcttcctgtgctcagcacctggactgtgcatcttgccttgctcacagggacccatactgtgggtggtgcgtgctccttggcaggtgcagtcgccgttctgagtgctcgaggggccagggcccagagcagtggctatggagcttccagcctgagctgggctgtctgcaagtggcagccatgagtcctgccaacatcagccgagaggagacgagggaggttttcctatcagtgccagacctgccacccctgtggccaggggagtcatattcctgccactttggggaacatcagagtcctgccctgctgactggttctggtgtgatgtgcccctccccagaccctagtgaggccccagtgctgccgagaggagccgactacgtatccgtgagcgtggagctcagatttggcgctgttgtgatcgccaaaacttccctctctttctatgactgtgtggcggtcactgaactccgcccatctgcgcagtgccaggcctgtgtgagcagccgctgggggtgtaactggtgtgtctggcagcacctgtgcacccacaaggcctcgtgtgatgctgggcccatggttgcaagccatcaggtgatggagactcagcagagcttgagggccctcccgcccccctcatcctcccgtccagcctcgactaccagtatgacacccccgggctctgggagctggaagaggcgaccttgggggcaagctcctgcccctgtgtggagagcgttcagggctccacgttgatgccggtccatgtggagcgggaaatccggctgctaggcaggaacctgcaccttttccaggatggcccaggagacaatgagtgtgtgatggagctggagggcctcgaggtggtggttgaggcccgggtcgagtgtgagccacctccagatacccagtgccatgtcacctgccagcagcaccagctcagctatgaggctctgcagccggagctccgtgtggggctgtttctgcgtcgggccggccgtctgcgtgtggacagtgctgaggggctgcatgtggtactgtatgactgttccgtgggacatggagactgcagccgctgccaaactgccatgccccagtatggctgtgtgtggtgtgagggggagcgtccacgttgtgtgacccgggaggcctgtggtgaggctgaggctgtggccacccagtgcccagcgcccctcatccactcggtggagccactgactgggcctgtagacggaggcacccgtgtcaccatcaggggctccaacctgggccagcatgtgcaggatgtgctgggcatggtcacggtggctggagtgccctgtgctgtggatgcccaggagtacgaggtctccagcagcctcgtgtgcatcaccggggccagtggggaggaggtggccggcgccacagcggtggaggtgccgggaagaggacgtggtgtctcagaacacgactttgcctaccaggatccgaaggtccattccatcttcccggcccgcggccccagagctgggggcacccgtctcaccctgaatggctccaagctcctgactgggcggctggaggacatccgagtggtggttggagaccagccttgtcacttgctgccggagcagcagtcagaacaactgcggtgtgagaccagcccacgccccacgcctgccacgctccctgtggctgtgtggtttggggccacggagcggaggcttcaacgcggacagttcaagtataccttggaccccaacatcacctctgctggccccaccaagagcttcctcagtggaggacgtgagatatgcgtccgtggccagaatctggacgtggtacagacgccaagaatccgggtgaccgtggtctcgagaatgctgcagcccagccaggggcttggacggaggcgtcgcgtggtcccggagacggcatgttcccttggaccctcctgcagtagccagcaatttgaggagccgtgccatgtcaactcctcccagctcatcacgtgccgcacacctgccctcccaggcctgcctgaggacccctgggtccgggtggaatttatccttgacaacctggtctttgactttgcaacactgaaccccacacctttctcctatgaggccgaccccaccctgcagccactcaaccctgaggaccccaccatgccattccggcacaagcctgggagtgtgttctccgtggagggggagaacctggaccttgcaatgtccaaggggtggtggctatgataggggatggcccctgtgtggtgaagacgctgacgcggcaccacctgtactgcgagccccccgtggagcagcccctgccacggcaccatgccctccgagaggcacctgactctttgcctgagttcacggtgcagatggggaacttgcgcttctccctgggtcacgtgcagtatgacggcgagagccctggggcttttcctgtggcagcccaggtgggcttgggggtgggcacctctcttctggctctgggtgtcatcatcattgtcctcatgtacaggaggaagagcaagcaggccctgagggactataagaaggttcagatccagctggagaatctggagagcagtgtgcgggaccgctgcaagaaggaattcacagacctcatgactgagatgaccgatctcaccagtgacctcctgggcagcggcatccccttcctcgactacaaggtgtatgcggagaggatcttcttccctgggcaccgcgagtcgcccttgcaccgggacctgggtgtgcctgagagcagacggcccactgtggagcaagggctggggcagctctctaacctgctcaacagcaagctcttcctcaccaagttcatccacacgctggagagccagcgcaccttttcagctcgggaccgtgcctacgtggcatctctgctcaccgtggcactgcatgggaagcttgagtatttcactgacatcctccgcactctgctcagtgacctggttgcccagtatgtggccaagaaccccaagctgatgctgcgcaggacagagactgtggtggagaagctgctcaccaactggatgtccatctgtctgtataccttcgtgagggtgagggggcagaggtggacagggctcctgtccagggagggtcaggccctccaaacttctaagccctcagccaccatgcagctcggacacttgtgccagagcagagactcctgctcagcctgtcctcagtccccttaagcccatgtcctgtccccttccccagtgtgcgtcatgtcccatacacctctgccacctgctggggggccctaactgcctgtgctctcctaggactccgtaggggagcctctgtacatgctctttcgagggattaagcaccaagtggataaggggccagtggacagtgtgacaggcaaggccaaatacaccttgaacgacaaccgcctgctcagagaggatgtggagtaccgtcccctgaccttgaatgcactattggctgtggggcctggggcaggagaggcccagggcgtgcccgtgaaggtcctagactgtgacaccatctcccaggcaaaggagaagatgctggaccagctttataaaggagtgcctctcacccagcggccagaccctcgcacccttgatgttggtgagggcgtggagagcccctggggacctgagccactgttgggcctgggctggccccggaccaactctgcagggacaactcatcactcagggtggggaggatgctgggaggcaggcagaagctggctttggaacatctttcttggacagcctctcatctggggagggggtccctgctcttggtctttggagaggttgagtaaggctgccccatgatggaggggctggtgtccctgtggaggaggagatgggctccactatgggaagggtatcttccagccctgcacccagttctgccttgcccttgcagagtggcggtctggggtggccgggcacctcattctttctgacgaggatgtcacttctgaggtccagggtctgtggaggcgcctgaacacactgcagcattacaaggtcccagatggagcaactgtggccctcgtcccctgcctcaccaagcatgtgctccgggaaaaccaggattatgtccctggagagcggaccccaatgctggaggatgtagatgaggggggcatccggccctggcacctggtgaagccaagtgatgagccggagccgcccaggcctcggaggggcagccttcggggcggggagcgtgagcgcgccaaggccatccctgagatctacctgacccgcctgctgtccatgaagggcaccctgcagaagttcgtggatgacctgttccaggtgattctcagcaccagccgccccgtgccgctcgctgtgaagtacttctttgacctgctggatgagcaggcccagcagcatggcatctccgaccaggacaccatccacatctggaagaccaacagcttgcctctgaggttctggatcaatataataaaaaacccgcagtttgtgttcgacgtgcaaacatctgataacatggatgcggtgctccttgtcattgcacagaccttcatggacgcctgcaccctggccgaccacaagctgggccgggactccccgatcaacaaacttctgtatgcacgggacattccccggtacaagcggatggtggaaaggtactatgcagacatcagacagactgtcccagccagcgaccaagagatgaactctgtcctggctgaactgtcctggaactactccggagacctcggggcgcgagtggccctgcatgaactctacaagtacatcaacaagtactatgaccagatcatcactgccctggaggaggatggcacggcccagaagatgcagctgggctatcggctccagcagattgcagctgctgtggaaaacaaggtcacagatctataggaacccaggagccacggcctgctgttgcttcagcctggcctgggcagccctggaagctcggaggagaggccaccttcttaggtgcctgtagtgactgacaagcagagttagtggaaggtgactcccagtctcctggtggctctggcctcggccctgctggatccacctcctagacccggggcctcaaggctcatggggtagtacccagcctgctccccgagtccagcgaccctgtgacaccggtctgcagggagttggggactaagggcttccagagagtggctggaagagactccaggcccctggggagactgtactgttcctgaacactggccttggccacactgggattcggagaggaaggaggagagccccatgcttcctgtctgcctcctccaccatccctgacctcagttgagctgcctctggccttgttgctgctgccacatcctaggtctaagagttgaacgcctctcctaggccactacaaactgacccctcagcagggctggctgccacagggctgccctgcctcataggtagccatggtgagggctatctgctgcaggggggtcttggggagagtggtgactccattgacccagcttttcattaaaggataacacactgca

SEQ ID NO: 76932 - DNA, 6669 bp, Homo sapiens
gcccggccgacgcggctttgtctcctttgttcccggcggtggcagcgccgcgcgggaggggcgggcagcgggcgcagttttccgcccctcggtctccgggtaacagctgcggctccaccagacccggggagaggccgctgcgcgcggagcccgagcccggagcggccgacgcccgcctcggcgcgcacatcccgcggggcccggccgggtggtgactcccacacgggtcatgctgttgtctcctgatccagccggccctgccaggtgaccatgcctgctctgggcccagctcttctccaggctctctgggccgggtgggtcctcaccctccagccccttccaccaactgcattcactcccaatggcacgtatctgcagcacctggcaagggaccccacctcaggcaccctctacctgggggctaccaacttcctgttccagctgagccctgggctgcagctggaggccacagtgtccaccggccctgtgctagacagcagggactgcctgccacctgtgatgcctgatgagtgcccccaggcccagcctaccaacaacccgaatcagctgctcctggtgagcccaggggccctggtggtatgcgggagcgtgcaccagggggtctgtgaacagcggcgcctggggcagctcgagcagctgctgctgcggccagagcggcctggggacacacaatatgtggctgccaatgatcctgcggtcagcacggtggggctggtagcccagggcttggcaggggagcccctcctgtttgtggggcgaggatacaccagcaggggtgtggggggtggcattccacccatcacaacccgggccctgtggccgcccgacccccaagctgccttctcctatgaggagacagccaagctggcagtgggccgcctctccgagtacagccaccacttcgtgagtgcctttgcacgtggggccagcgcctacttcctgttcctgcggcgggacctgcaggctcagtctagagcttttcgtgcctatgtatctcgagtgtgtctccgggaccagcactactactcctatgtggagttgcctctggcctgcgaaggtggccgctacgggctgatccaggctgcagctgtggccacgtccagggaggtggcgcatggggaggtgctctttgcagctttctcctcggctgcaccccccactgtgggccggcccccatcggcggctgctggggcatctggagcctctgccctctgtgccttccccctggatgaggtggaccggcttgctaatcgcacgcgagatgcctgctacacccgggagggtcgtgctgaggatgggaccgaggtggcctacatcgagtatgatgtcaattctgactgtgcacagctgccagtggacaccctggatgcttatccctgtggctcagaccacacgcccagccccatggccagccgggtcccgctggaagccacaccaattctggagtggccagggattcagctaacagctgtggcagtcaccatggaagatggacacaccatcgctttcctgggtgatagtcaagggcagctgcacagggtctacttgggcccagggagcgatggccacccatactccacacagagcatccagcaggggtctgcagtgagcagagacctcacctttgatgggacctttgagcacctgtatgtcatgacccagagcacacttctgaaggttcctgtggcttcctgtgctcagcacctggactgtgcatcttgccttgctcacagggacccatactgtgggtggtgcgtgctccttggcaggtgcagtcgccgttctgagtgctcgaggggccagggcccagagcagtggctatggagcttccagcctgagctgggctgtctgcaagtggcagccatgagtcctgccaacatcagccgagaggagacgagggaggttttcctatcagtgccagacctgccacccctgtggccaggggagtcatattcctgccactttggggaacatcagagtcctgccctgctgactggttctggtgtgatgtgcccctccccagaccctagtgaggccccagtgctgccgagaggagccgactacgtatccgtgagcgtggagctcagatttggcgctgttgtgatcgccaaaacttccctctctttctatgactgtgtggcggtcactgaactccgcccatctgcgcagtgccaggcctgtgtgagcagccgctgggggtgtaactggtgtgtctggcagcacctgtgcacccacaaggcctcgtgtgatgctgggcccatggttgcaagccatcaggtgatggagactcagcagagcttgagggccctcccgcccccctcatcctcccgtccagcctcgactaccagtatgacacccccgggctctgggagctggaagaggcgaccttgggggcaagctcctgcccctgtgtggagagcgttcagggctccacgttgatgccggtccatgtggagcgggaaatccggctgctaggcaggaacctgcaccttttccaggatggcccaggagacaatgagtgtgtgatggagctggagggcctcgaggtggtggttgaggcccgggtcgagtgtgagccacctccagatacccagtgccatgtcacctgccagcagcaccagctcagctatgaggctctgcagccggagctccgtgtggggctgtttctgcgtcgggccggccgtctgcgtgtggacagtgctgaggggctgcatgtggtactgtatgactgttccgtgggacatggagactgcagccgctgccaaactgccatgccccagtatggctgtgtgtggtgtgagggggagcgtccacgttgtgtgacccgggaggcctgtggtgaggctgaggctgtggccacccagtgcccagcgcccctcatccactcggtggagccactgactgggcctgtagacggaggcacccgtgtcaccatcaggggctccaacctgggccagcatgtgcaggatgtgctgggcatggtcacggtggctggagtgccctgtgctgtggatgcccaggagtacgaggtctccagcagcctcgtgtgcatcaccggggccagtggggaggaggtggccggcgccacagcggtggaggtgccgggaagaggacgtggtgtctcagaacacgactttgcctaccaggatccgaaggtccattccatcttcccggcccgcggccccagagctgggggcacccgtctcaccctgaatggctccaagctcctgactgggcggctggaggacatccgagtggtggttggagaccagccttgtcacttgctgccggagcagcagtcagaacaactgcggtgtgagaccagcccacgccccacgcctgccacgctccctgtggctgtgtggtttggggccacggagcggaggcttcaacgcggacagttcaagtataccttggaccccaacatcacctctgctggccccaccaagagcttcctcagtggaggacgtgagatatgcgtccgtggccagaatctggacgtggtacagacgccaagaatccgggtgaccgtggtctcgagaatgctgcagcccagccaggggcttggacggaggcgtcgcgtggtcccggagacggcatgttcccttggaccctcctgcagtagccagcaatttgaggagccgtgccatgtcaactcctcccagctcatcacgtgccgcacacctgccctcccaggcctgcctgaggacccctgggtccgggtggaatttatccttgacaacctggtctttgactttgcaacactgaaccccacacctttctcctatgaggccgaccccaccctgcagccactcaaccctgaggaccccaccatgccattccggcacaagcctgggagtgtgttctccgtggagggggagaacctggaccttgcaatgtccaaggggtggtggctatgataggggatggcccctgtgtggtgaagacgctgacgcggcaccacctgtactgcgagccccccgtggagcagcccctgccacggcaccatgccctccgagaggcacctgactctttgcctgagttcacggtgcagatggggaacttgcgcttctccctgggtcacgtgcagtatgacggcgagagccctggggcttttcctgtggcagcccaggtgggcttgggggtgggcacctctcttctggctctgggtgtcatcatcattgtcctcatgtacaggaggaagagcaagcaggccctgagggactataagaaggttcagatccagctggagaatctggagagcagtgtgcgggaccgctgcaagaaggaattcacagacctcatgactgagatgaccgatctcaccagtgacctcctgggcagcggcatccccttcctcgactacaaggtgtatgcggagaggatcttcttccctgggcaccgcgagtcgcccttgcaccgggacctgggtgtgcctgagagcagacggcccactgtggagcaagggctggggcagctctctaacctgctcaacagcaagctcttcctcaccaagttcatccacacgctggagagccagcgcaccttttcagctcgggaccgtgcctacgtggcatctctgctcaccgtggcactgcatgggaagcttgagtatttcactgacatcctccgcactctgctcagtgacctggttgcccagtatgtggccaagaaccccaagctgatgctgcgcaggacagagactgtggtggagaagctgctcaccaactggatgtccatctgtctgtataccttcgtgagggactccgtaggggagcctctgtacatgctctttcgagggattaagcaccaagtggataaggggccagtggacagtgtgacaggcaaggccaaatacaccttgaacgacaaccgcctgctcagagaggatgtggagtaccgtcccctgaccttgaatgcactattggctgtggggcctggggcaggagaggcccagggcgtgcccgtgaaggtcctagactgtgacaccatctcccaggcaaaggagaagatgctggaccagctttataaaggagtgcctctcacccagcggccagaccctcgcacccttgatgttgagtggcggtctggggtggccgggcacctcattctttctgacgaggatgtcacttctgaggtccagggtctgtggaggcgcctgaacacactgcagcattacaaggtcccagatggagcaactgtggccctcgtcccctgcctcaccaagcatgtgctccgggaaaaccaggattatgtccctggagagcggaccccaatgctggaggatgtagatgaggggggcatccggccctggcacctggtgaagccaagtgatgagccggagccgcccaggcctcggaggggcagccttcggggcggggagcgtgagcgcgccaaggccatccctgagatctacctgacccgcctgctgtccatgaagggcaccctgcagaagttcgtggatgacctgttccaggtgattctcagcaccagccgccccgtgccgctcgctgtgaagtacttctttgacctgctggatgagcaggcccagcagcatggcatctccgaccaggacaccatccacatctggaagaccaacagcttgcctctgaggttctggatcaatataataaaaaacccgcagtttgtgttcgacgtgcaaacatctgataacatggatgcggtgctccttgtcattgcacagaccttcatggacgcctgcaccctggccgaccacaagctgggccgggactccccgatcaacaaacttctgtatgcacgggacattccccggtacaagcggatggtggaaaggtactatgcagacatcagacagactgtcccagccagcgaccaagagatgaactctgtcctggctgaactgtcctggaactactccggagacctcggggcgcgagtggccctgcatgaactctacaagtacatcaacaagtactatgaccagatcatcactgccctggaggaggatggcacggcccagaagatgcagctgggctatcggctccagcagattgcagctgctgtggaacctggcctgggcagccctggaagctcggaggagaggccaccttcttaggtgcctgtagtgactgacaagcagagttagtggaaggtgactcccagtctcctggtggctctggcctcggccctgctggatccacctcctagacccggggcctcaaggctcatggggtagtacccagcctgctccccgagtccagcgaccctgtgacaccggtctgcagggagttggggactaagggcttccagagagtggctggaagagactccaggcccctggggagactgtactgttcctgaacactggccttggccacactgggattcggagaggaaggaggagagccccatgcttcctgtctgcctcctccaccatccctgacctcagttgagctgcctctggccttgttgctgctgccacatcctaggtctaagagttgaacgcctctcctaggccactacaaactgacccctcagcagggctggctgccacagggctgccctgcctcataggtagccatggtgagggctatctgctgcaggggggtcttggggagagtggtgactccattgacccagcttttcattaaaggataacacactgca

SEQ ID NO: 76933 - DNA, 3797 bp, Homo sapiens
tctctgtcaatcttatggagcatgggaaggggaagaccacctgacagtagggcagggagaggggctgccaggtaagcttgaggggcccttgatgcagctgggcacccccttagcctgccctgtgcctacagcctcgtgtgcatcaccggggccagtggggaggaggtggccggcgccacagcggtggaggtgccgggaagaggacgtggtgtctcagaacacgactttgcctaccaggatccgaaggtccattccatcttcccggcccgcggccccagagctgggggcacccgtctcaccctgaatggctccaagctcctgactgggcggctggaggacatccgagtggtggttggagaccagccttgtcacttgctgccggagcagcagtcagaacaactgcggtgtgagaccagcccacgccccacgcctgccacgctccctgtggctgtgtggtttggggccacggagcggaggcttcaacgcggacagttcaagtataccttggaccccaacatcacctctgctggccccaccaagagcttcctcagtggaggacgtgagatatgcgtccgtggccagaatctggacgtggtacagacgccaagaatccgggtgaccgtggtctcgagaatgctgcagcccagccaggggcttggacggaggcgtcgcgtggtcccggagacggcatgttcccttggaccctcctgcagtagccagcaatttgaggagccgtgccatgtcaactcctcccagctcatcacgtgccgcacacctgccctcccaggcctgcctgaggacccctgggtccgggtggaatttatccttgacaacctggtctttgactttgcaacactgaaccccacacctttctcctatgaggccgaccccaccctgcagccactcaaccctgaggaccccaccatgccattccggcacaagcctgggagtgtgttctccgtggagggggagaacctggaccttgcaatgtccaaggaggaggtggtggctatgataggggatggcccctgtgtggtgaagacgctgacgcggcaccacctgtactgcgagccccccgtggagcagcccctgccacggcaccatgccctccgagaggcacctgactctttgcctgagttcacggtgcagatggggaacttgcgcttctccctgggtcacgtgcagtatgacggcgagagccctggggcttttcctgtggcagcccaggtgggcttgggggtgggcacctctcttctggctctgggtgtcatcatcattgtcctcatgtacaggaggaagagcaagcaggccctgagggactataagaaggttcagatccagctggagaatctggagagcagtgtgcgggaccgctgcaagaaggaattcacagacctcatgactgagatgaccgatctcaccagtgacctcctgggcagcggcatccccttcctcgactacaaggtgtatgcggagaggatcttcttccctgggcaccgcgagtcgcccttgcaccgggacctgggtgtgcctgagagcagacggcccactgtggagcaagggctggggcagctctctaacctgctcaacagcaagctcttcctcaccaagttcatccacacgctggagagccagcgcaccttttcagctcgggaccgtgcctacgtggcatctctgctcaccgtggcactgcatgggaagcttgagtatttcactgacatcctccgcactctgctcagtgacctggttgcccagtatgtggccaagaaccccaagctgatgctgcgcaggacagagactgtggtggagaagctgctcaccaactggatgtccatctgtctgtataccttcgtgagggactccgtaggggagcctctgtacatgctctttcgagggattaagcaccaagtggataaggggccagtggacagtgtgacaggcaaggccaaatacaccttgaacgacaaccgcctgctcagagaggatgtggagtaccgtcccctgaccttgaatgcactattggctgtggggcctggggcaggagaggcccagggcgtgcccgtgaaggtcctagactgtgacaccatctcccaggcaaaggagaagatgctggaccagctttataaaggagtgcctctcacccagcggccagaccctcgcacccttgatgttgagtggcggtctggggtggccgggcacctcattctttctgacgaggatgtcacttctgaggtccagggtctgtggaggcgcctgaacacactgcagcattacaaggtcccagatggagcaactgtggccctcgtcccctgcctcaccaagcatgtgctccgggaaaaccaggattatgtccctggagagcggaccccaatgctggaggatgtagatgaggggggcatccggccctggcacctggtgaagccaagtgatgagccggagccgcccaggcctcggaggggcagccttcggggcggggagcgtgagcgcgccaaggccatccctgagatctacctgacccgcctgctgtccatgaagggcaccctgcagaagttcgtggatgacctgttccaggtgattctcagcaccagccgccccgtgccgctcgctgtgaagtacttctttgacctgctggatgagcaggcccagcagcatggcatctccgaccaggacaccatccacatctggaagaccaacagcttgcctctgaggttctggatcaatataataaaaaacccgcagtttgtgttcgacgtgcaaacatctgataacatggatgcggtgctccttgtcattgcacagaccttcatggacgcctgcaccctggccgaccacaagctgggccgggactccccgatcaacaaacttctgtatgcacgggacattccccggtacaagcggatggtggaaaggtactatgcagacatcagacagactgtcccagccagcgaccaagagatgaactctgtcctggctgaactgtcctggaactactccggagacctcggggcgcgagtggccctgcatgaactctacaagtacatcaacaagtactatgaccagatcatcactgccctggaggaggatggcacggcccagaagatgcagctgggctatcggctccagcagattgcagctgctgtggaaaacaaggtcacagatctataggaacccaggagccacggcctgctgttgcttcagcctggcctgggcagccctggaagctcggaggagaggccaccttcttaggtgcctgtagtgactgacaagcagagttagtggaaggtgactcccagtctcctggtggctctggcctcggccctgctggatccacctcctagacccggggcctcaaggctcatggggtagtacccagcctgctccccgagtccagcgaccctgtgacaccggtctgcagggagttggggactaagggcttccagagagtggctggaagagactccaggcccctggggagactgtactgttcctgaacactggccttggccacactgggattcggagaggaaggaggagagccccatgcttcctgtctgcctcctccaccatccctgacctcagttgagctgcctctggccttgttgctgctgccacatcctaggtctaagagttgaacgcctctcctaggccactacaaactgacccctcagcagggctggctgccacagggctgccctgcctcataggtagccatggtgagggctatctgctgcaggggggtcttggggagagtggtgactccattgacccagcttttcattaaaggataacacactgca

SEQ ID NO: 76934 - DNA, 7444 bp, Homo sapiens
  misc_feature (2652)..(2652): n is a, c, g, or t
gcccggccgacgcggctttgtctcctttgttcccggcggtggcagcgccgcgcgggaggggcgggcagcgggcgcagttttccgcccctcggtctccgggtaacagctgcggctccaccagacccggggagaggccgctgcgcgcggagcccgagcccggagcggccgacgcccgcctcggcgcgcacatcccgcggggcccggccgggtggtgactcccacacgggtcatgctgttgtctcctgatccagccggccctgccaggtgaccatgcctgctctgggcccagctcttctccaggctctctgggccgggtgggtcctcaccctccagccccttccaccaactgcattcactcccaatggcacgtatctgcagcacctggcaagggaccccacctcaggcaccctctacctgggggctaccaacttcctgttccagctgagccctgggctgcagctggaggccacagtgtccaccggccctgtgctagacagcagggactgcctgccacctgtgatgcctgatgagtgcccccaggcccagcctaccaacaacccgaatcagctgctcctggtgagcccaggggccctggtggtatgcgggagcgtgcaccagggggtctgtgaacagcggcgcctggggcagctcgagcagctgctgctgcggccagagcggcctggggacacacaatatgtggctgccaatgatcctgcggtcagcacggtggggctggtagcccagggcttggcaggggagcccctcctgtttgtggggcgaggatacaccagcaggggtgtggggggtggcattccacccatcacaacccgggccctgtggccgcccgacccccaagctgccttctcctatgaggagacagccaagctggcagtgggccgcctctccgagtacagccaccacttcgtgagtgcctttgcacgtggggccagcgcctacttcctgttcctgcggcgggacctgcaggctcagtctagagcttttcgtgcctatgtatctcgagtgtgtctccgggaccagcactactactcctatgtggagttgcctctggcctgcgaaggtggccgctacgggctgatccaggctgcagctgtggccacgtccagggaggtggcgcatggggaggtgctctttgcagctttctcctcggctgcaccccccactgtgggccggcccccatcggcggctgctggggcatctggagcctctgccctctgtgccttccccctggatgaggtggaccggcttgctaatcgcacgcgagatgcctgctacacccgggagggtcgtgctgaggatgggaccgaggtggcctacatcgagtatgatgtcaattctgactgtgcacagctgccagtggacaccctggatgcttatccctgtggctcagaccacacgcccagccccatggccagccgggtcccgctggaagccacaccaattctggagtggccagggattcagctaacagctgtggcagtcaccatggaagatggacacaccatcgctttcctgggtgatagtcaagggcagctgcacagggtctacttgggcccagggagcgatggccacccatactccacacagagcatccagcaggggtctgcagtgagcagagacctcacctttgatgggacctttgagcacctgtatgtcatgacccagagcacacttctgaaggttcctgtggcttcctgtgctcagcacctggactgtgcatcttgccttgctcacagggacccatactgtgggtggtgcgtgctccttggcaggtgcagtcgccgttctgagtgctcgaggggccagggcccagagcagtggctatggagcttccagcctgagctgggctgtctgcaagtggcagccatgagtcctgccaacatcagccgagaggagacgagggaggttttcctatcagtgccagacctgccacccctgtggccaggggagtcatattcctgccactttggggaacatcagagtcctgccctgctgactggttctggtgtgatgtgcccctccccagaccctagtgaggccccagtgctgccgagaggagccgactacgtatccgtgagcgtggagctcagatttggcgctgttgtgatcgccaaaacttccctctctttctatgactgtgtggcggtcactgaactccgcccatctgcgcagtgccaggcctgtgtgagcagccgctgggggtgtaactggtgtgtctggcagcacctgtgcacccacaaggcctcgtgtgatgctgggcccatggttgcaagccatcagagcccgcttgtctccccagaccctcctgcaagaggtggacccagcccctccccacccacagcccccaaagccctggccacccctgctcctgacacccttcccgtggagcctggggctccctccacagccacagcttcggacatctcacctggggctagtccttccctgctcagcccctgggggccatgggcaggttctggctccatatcttcccctggctccacagggtcgcctctccatgaggagccctcccctcccagcccccaaaatggacctggaaccgctgtccctgcccccactgacttcagaccctcagccacacctgaggacctcttggcctccccgctgtcaccntcagaggtagcagcagtgccccctgcagaccctggccccgaggctcttcatcccacagtgcccctggacctgccccctgccactgttcctgccaccactttcccaggggccatgggctccgtgaagcccgccctggactggctcacgagagaaggcggcgagctgcccgaggcggacgagtggacggggggtgacgcacccgccttctccacttccaccctcctctcaggtgatggagactcagcagagcttgagggccctcccgcccccctcatcctcccgtccagcctcgactaccagtatgacacccccgggctctgggagctggaagaggcgaccttgggggcaagctcctgcccctgtgtggagagcgttcagggctccacgttgatgccggtccatgtggagcgggaaatccggctgctaggcaggaacctgcaccttttccaggatggcccaggagacaatgagtgtgtgatggagctggagggcctcgaggtggtggttgaggcccgggtcgagtgtgagccacctccagatacccagtgccatgtcacctgccagcagcaccagctcagctatgaggctctgcagccggagctccgtgtggggctgtttctgcgtcgggccggccgtctgcgtgtggacagtgctgaggggctgcatgtggtactgtatgactgttccgtgggacatggagactgcagccgctgccaaactgccatgccccagtatggctgtgtgtggtgtgagggggagcgtccacgttgtgtgacccgggaggcctgtggtgaggctgaggctgtggccacccagtgcccagcgcccctcatccactcggtggagccactgactgggcctgtagacggaggcacccgtgtcaccatcaggggctccaacctgggccagcatgtgcaggatgtgctgggcatggtcacggtggctggagtgccctgtgctgtggatgcccaggagtacgaggtctccagcagcctcgtgtgcatcaccggggccagtggggaggaggtggccggcgccacagcggtggaggtgccgggaagaggacgtggtgtctcagaacacgactttgcctaccaggatccgaaggtccattccatcttcccggcccgcggccccagagctgggggcacccgtctcaccctgaatggctccaagctcctgactgggcggctggaggacatccgagtggtggttggagaccagccttgtcacttgctgccggagcagcagtcagaacaactgcggtgtgagaccagcccacgccccacgcctgccacgctccctgtggctgtgtggtttggggccacggagcggaggcttcaacgcggacagttcaagtataccttggaccccaacatcacctctgctggccccaccaagagcttcctcagtggaggacgtgagatatgcgtccgtggccagaatctggacgtggtacagacgccaagaatccgggtgaccgtggtctcgagaatgctgcagcccagccaggggcttggacggaggcgtcgcgtggtcccggagacggcatgttcccttggaccctcctgcagtagccagcaagtaggacacccttgggtacccccacactctccccttgccccataccacaccctggggacagccagagcaggtgccagaggaggctcttcccatctttgcttggcccctcgtcaacctgcctgtcttccttccagtttgaggagccgtgccatgtcaactcctcccagctcatcacgtgccgcacacctgccctcccaggcctgcctgaggacccctgggtccgggtggaatttatccttgacaacctggtctttgactttgcaacactgaaccccacacctttctcctatgaggccgaccccaccctgcagccactcaaccctgaggaccccaccatgccattccggcacaagcctgggagtgtgttctccgtggagggggagaacctggaccttgcaatgtccaaggaggaggtggtggctatgataggggatggcccctgtgtggtgaagacgctgacgcggcaccacctgtactgcgagccccccgtggagcagcccctgccacggcaccatgccctccgagaggcacctgactctttgcctgagttcacggtgcagatggggaacttgcgcttctccctgggtcacgtgcagtatgacggcgagagccctggggcttttcctgtggcagcccaggtgggcttgggggtgggcacctctcttctggctctgggtgtcatcatcattgtcctcatgtacaggaggaagagcaagcaggccctgagggactataagaaggttcagatccagctggagaatctggagagcagtgtgcgggaccgctgcaagaaggaattcacagacctcatgactgagatgaccgatctcaccagtgacctcctgggcagcggcatccccttcctcgactacaaggtgtatgcggagaggatcttcttccctgggcaccgcgagtcgcccttgcaccgggacctgggtgtgcctgagagcagacggcccactgtggagcaagggctggggcagctctctaacctgctcaacagcaagctcttcctcaccaagttcatccacacgctggagagccagcgcaccttttcagctcgggaccgtgcctacgtggcatctctgctcaccgtggcactgcatgggaagcttgagtatttcactgacatcctccgcactctgctcagtgacctggttgcccagtatgtggccaagaaccccaagctgatgctgcgcaggacagagactgtggtggagaagctgctcaccaactggatgtccatctgtctgtataccttcgtgagggactccgtaggggagcctctgtacatgctctttcgagggattaagcaccaagtggataaggggccagtggacagtgtgacaggcaaggccaaatacaccttgaacgacaaccgcctgctcagagaggatgtggagtaccgtcccctgaccttgaatgcactattggctgtggggcctggggcaggagaggcccagggcgtgcccgtgaaggtcctagactgtgacaccatctcccaggcaaaggagaagatgctggaccagctttataaaggagtgcctctcacccagcggccagaccctcgcacccttgatgttgagtggcggtctggggtggccgggcacctcattctttctgacgaggatgtcacttctgaggtccagggtctgtggaggcgcctgaacacactgcagcattacaaggtcccagatggagcaactgtggccctcgtcccctgcctcaccaagcatgtgctccgggaaaaccaggattatgtccctggagagcggaccccaatgctggaggatgtagatgaggggggcatccggccctggcacctggtgaagccaagtgatgagccggagccgcccaggcctcggaggggcagccttcggggcggggagcgtgagcgcgccaaggccatccctgagatctacctgacccgcctgctgtccatgaagggcaccctgcagaagttcgtggatgacctgttccaggtgattctcagcaccagccgccccgtgccgctcgctgtgaagtacttctttgacctgctggatgagcaggcccagcagcatggcatctccgaccaggacaccatccacatctggaagaccaacagcttgcctctgaggttctggatcaatataataaaaaacccgcagtttgtgttcgacgtgcaaacatctgataacatggatgcggtgctccttgtcattgcacagaccttcatggacgcctgcaccctggccgaccacaagctgggccgggactccccgatcaacaaacttctgtatgcacgggacattccccggtacaagcggatggtggaaaggtactatgcagacatcagacagactgtcccagccagcgaccaagagatgaactctgtcctggctgaactgtcctggaactactccggagacctcggggcgcgagtggccctgcatgaactctacaagtacatcaacaagtactatgaccagatcatcactgccctggaggaggatggcacggcccagaagatgcagctgggctatcggctccagcagattgcagctgctgtggaaaacaaggtcacagatctataggaacccaggagccacggcctgctgttgcttcagcctggcctgggcagccctggaagctcggaggagaggccaccttcttaggtgcctgtagtgactgacaagcagagttagtggaaggtgactcccagtctcctggtggctctggcctcggccctgctggatccacctcctagacccggggcctcaaggctcatggggtagtacccagcctgctccccgagtccagcgaccctgtgacaccggtctgcagggagttggggactaagggcttccagagagtggctggaagagactccaggcccctggggagactgtactgttcctgaacactggccttggccacactgggattcggagaggaaggaggagagccccatgcttcctgtctgcctcctccaccatccctgacctcagttgagctgcctctggccttgttgctgctgccacatcctaggtctaagagttgaacgcctctcctaggccactacaaactgacccctcagcagggctggctgccacagggctgccctgcctcataggtagccatggtgagggctatctgctgcaggggggtcttggggagagtggtgactccattgacccagcttttcattaaaggataacacactgca

SEQ ID NO: 76935 - DNA, 2786 bp, Homo sapiens
ggtccctctcaagacctgaaacacttcaggatttatttccccactctaacccccagatccatttatgagaagtgagtgaggatggcagaagcaggggcatgggtgtgtgtgacttgcttgggacgggacaggctgaatcgtactgggctaggcttgagcttggctggcatggctgcattggactgtgctggatgaggccggggtgtgcctggggattgtcaggcaggcctgggcgagtaggactcatctggccatcctctcctgaccctggggctgagcaggaggaagagcaagcaggccctgagggactataagaaggttcagatccagctggagaatctggagagcagtgtgcgggaccgctgcaagaaggaattcacagacctcatgactgagatgaccgatctcaccagtgacctcctgggcagcggcatccccttcctcgactacaaggtgtatgcggagaggatcttcttccctgggcaccgcgagtcgcccttgcaccgggacctgggtgtgcctgagagcagacggcccactgtggagcaagggctggggcagctctctaacctgctcaacagcaagctcttcctcaccaagttcatccacacgctggagagccagcgcaccttttcagctcgggaccgtgcctacgtggcatctctgctcaccgtggcactgcatgggaagcttgagtatttcactgacatcctccgcactctgctcagtgacctggttgcccagtatgtggccaagaaccccaagctgatgctgcgcaggacagagactgtggtggagaagctgctcaccaactggatgtccatctgtctgtataccttcgtgagggactccgtaggggagcctctgtacatgctctttcgagggattaagcaccaagtggataaggggccagtggacagtgtgacaggcaaggccaaatacaccttgaacgacaaccgcctgctcagagaggatgtggagtaccgtcccctgaccttgaatgcactattggctgtggggcctggggcaggagaggcccagggcgtgcccgtgaaggtcctagactgtgacaccatctcccaggcaaaggagaagatgctggaccagctttataaaggagtgcctctcacccagcggccagaccctcgcacccttgatgttgagtggcggtctggggtggccgggcacctcattctttctgacgaggatgtcacttctgaggtccagggtctgtggaggcgcctgaacacactgcagcattacaaggtcccagatggagcaactgtggccctcgtcccctgcctcaccaagcatgtgctccgggaaaaccaggattatgtccctggagagcggaccccaatgctggaggatgtagatgaggggggcatccggccctggcacctggtgaagccaagtgatgagccggagccgcccaggcctcggaggggcagccttcggggcggggagcgtgagcgcgccaaggccatccctgagatctacctgacccgcctgctgtccatgaagggcaccctgcagaagttcgtggatgacctgttccaggtgattctcagcaccagccgccccgtgccgctcgctgtgaagtacttctttgacctgctggatgagcaggcccagcagcatggcatctccgaccaggacaccatccacatctggaagaccaacagcttgcctctgaggttctggatcaatataataaaaaacccgcagtttgtgttcgacgtgcaaacatctgataacatggatgcggtgctccttgtcattgcacagaccttcatggacgcctgcaccctggccgaccacaagctgggccgggactccccgatcaacaaacttctgtatgcacgggacattccccggtacaagcggatggtggaaaggtactatgcagacatcagacagactgtcccagccagcgaccaagagatgaactctgtcctggctgaactgtcctggaactactccggagacctcggggcgcgagtggccctgcatgaactctacaagtacatcaacaagtactatgaccagatcatcactgccctggaggaggatggcacggcccagaagatgcagctgggctatcggctccagcagattgcagctgctgtggaaaacaaggtcacagatctataggaacccaggagccacggcctgctgttgcttcagcctggcctgggcagccctggaagctcggaggagaggccaccttcttaggtgcctgtagtgactgacaagcagagttagtggaaggtgactcccagtctcctggtggctctggcctcggccctgctggatccacctcctagacccggggcctcaaggctcatggggtagtacccagcctgctccccgagtccagcgaccctgtgacaccggtctgcagggagttggggactaagggcttccagagagtggctggaagagactccaggcccctggggagactgtactgttcctgaacactggccttggccacactgggattcggagaggaaggaggagagccccatgcttcctgtctgcctcctccaccatccctgacctcagttgagctgcctctggccttgttgctgctgccacatcctaggtctaagagttgaacgcctctcctaggccactacaaactgacccctcagcagggctggctgccacagggctgccctgcctcataggtagccatggtgagggctatctgctgcaggggggtcttggggagagtggtgactccattgacccagcttttcattaaaggataacacactgca

SEQ ID NO: 76936 - DNA, 2739 bp, Homo sapiens
cctcacagaccctgtcagtcctagaggatggatgggggcagaagcaggggcatgggtgtgtgtgacttgcttgggacgggacaggctgaatcgtactgggctaggcttgagcttggctggcatggctgcattggactgtgctggatgaggccggggtgtgcctggggattgtcaggcaggcctgggcgagtaggactcatctggccatcctctcctgaccctggggctgagcaggaggaagagcaagcaggccctgagggactataagaaggttcagatccagctggagaatctggagagcagtgtgcgggaccgctgcaagaaggaattcacagacctcatgactgagatgaccgatctcaccagtgacctcctgggcagcggcatccccttcctcgactacaaggtgtatgcggagaggatcttcttccctgggcaccgcgagtcgcccttgcaccgggacctgggtgtgcctgagagcagacggcccactgtggagcaagggctggggcagctctctaacctgctcaacagcaagctcttcctcaccaagttcatccacacgctggagagccagcgcaccttttcagctcgggaccgtgcctacgtggcatctctgctcaccgtggcactgcatgggaagcttgagtatttcactgacatcctccgcactctgctcagtgacctggttgcccagtatgtggccaagaaccccaagctgatgctgcgcaggacagagactgtggtggagaagctgctcaccaactggatgtccatctgtctgtataccttcgtgagggactccgtaggggagcctctgtacatgctctttcgagggattaagcaccaagtggataaggggccagtggacagtgtgacaggcaaggccaaatacaccttgaacgacaaccgcctgctcagagaggatgtggagtaccgtcccctgaccttgaatgcactattggctgtggggcctggggcaggagaggcccagggcgtgcccgtgaaggtcctagactgtgacaccatctcccaggcaaaggagaagatgctggaccagctttataaaggagtgcctctcacccagcggccagaccctcgcacccttgatgttgagtggcggtctggggtggccgggcacctcattctttctgacgaggatgtcacttctgaggtccagggtctgtggaggcgcctgaacacactgcagcattacaaggtcccagatggagcaactgtggccctcgtcccctgcctcaccaagcatgtgctccgggaaaaccaggattatgtccctggagagcggaccccaatgctggaggatgtagatgaggggggcatccggccctggcacctggtgaagccaagtgatgagccggagccgcccaggcctcggaggggcagccttcggggcggggagcgtgagcgcgccaaggccatccctgagatctacctgacccgcctgctgtccatgaagggcaccctgcagaagttcgtggatgacctgttccaggtgattctcagcaccagccgccccgtgccgctcgctgtgaagtacttctttgacctgctggatgagcaggcccagcagcatggcatctccgaccaggacaccatccacatctggaagaccaacagcttgcctctgaggttctggatcaatataataaaaaacccgcagtttgtgttcgacgtgcaaacatctgataacatggatgcggtgctccttgtcattgcacagaccttcatggacgcctgcaccctggccgaccacaagctgggccgggactccccgatcaacaaacttctgtatgcacgggacattccccggtacaagcggatggtggaaaggtactatgcagacatcagacagactgtcccagccagcgaccaagagatgaactctgtcctggctgaactgtcctggaactactccggagacctcggggcgcgagtggccctgcatgaactctacaagtacatcaacaagtactatgaccagatcatcactgccctggaggaggatggcacggcccagaagatgcagctgggctatcggctccagcagattgcagctgctgtggaaaacaaggtcacagatctataggaacccaggagccacggcctgctgttgcttcagcctggcctgggcagccctggaagctcggaggagaggccaccttcttaggtgcctgtagtgactgacaagcagagttagtggaaggtgactcccagtctcctggtggctctggcctcggccctgctggatccacctcctagacccggggcctcaaggctcatggggtagtacccagcctgctccccgagtccagcgaccctgtgacaccggtctgcagggagttggggactaagggcttccagagagtggctggaagagactccaggcccctggggagactgtactgttcctgaacactggccttggccacactgggattcggagaggaaggaggagagccccatgcttcctgtctgcctcctccaccatccctgacctcagttgagctgcctctggccttgttgctgctgccacatcctaggtctaagagttgaacgcctctcctaggccactacaaactgacccctcagcagggctggctgccacagggctgccctgcctcataggtagccatggtgagggctatctgctgcaggggggtcttggggagagtggtgactccattgacccagcttttcattaaaggataacacactgca

SEQ ID NO: 76937 - DNA, 6166 bp, Homo sapiens
gcccggccgacgcggctttgtctcctttgttcccggcggtggcagcgccgcgcgggaggggcgggcagcgggcgcagttttccgcccctcggtctccgggtaacagctgcggctccaccagacccggggagaggccgctgcgcgcggagcccgagcccggagcggccgacgcccgcctcggcgcgcacatcccgcggggcccggccgggtggtgactcccacacgggtcatgctgttgtctcctgatccagccggccctgccaggtgaccatgcctgctctgggcccagctcttctccaggctctctgggccgggtgggtcctcaccctccagccccttccaccaactgcattcactcccaatggcacgtatctgcagcacctggcaagggaccccacctcaggcaccctctacctgggggctaccaacttcctgttccagctgagccctgggctgcagctggaggccacagtgtccaccggccctgtgctagacagcagggactgcctgccacctgtgatgcctgatgagtgcccccaggcccagcctaccaacaacccgaatcagctgctcctggtgagcccaggggccctggtggtatgcgggagcgtgcaccagggggtctgtgaacagcggcgcctggggcagctcgagcagctgctgctgcggccagagcggcctggggacacacaatatgtggctgccaatgatcctgcggtcagcacggtggggctggtagcccagggcttggcaggggagcccctcctgtttgtggggcgaggatacaccagcaggggtgtggggggtggcattccacccatcacaacccgggccctgtggccgcccgacccccaagctgccttctcctatgaggagacagccaagctggcagtgggccgcctctccgagtacagccaccacttcgtgagtgcctttgcacgtggggccagcgcctacttcctgttcctgcggcgggacctgcaggctcagtctagagcttttcgtgcctatgtatctcgagtgtgtctccgggaccagcactactactcctatgtggagttgcctctggcctgcgaaggtggccgctacgggctgatccaggctgcagctgtggccacgtccagggaggtggcgcatggggaggtgctctttgcagctttctcctcggctgcaccccccactgtgggccggcccccatcggcggctgctggggcatctggagcctctgccctctgtgccttccccctggatgaggtggaccggcttgctaatcgcacgcgagatgcctgctacacccgggagggtcgtgctgaggatgggaccgaggtggcctacatcgagtatgatgtcaattctgactgtgcacagctgccagtggacaccctggatgcttatccctgtggctcagaccacacgcccagccccatggccagccgggtcccgctggaagccacaccaattctggagtggccagggattcagctaacagctgtggcagtcaccatggaagatggacacaccatcgctttcctgggtgatagtcaagggcagctgcacagggtctacttgggcccagggagcgatggccacccatactccacacagagcatccagcaggggtctgcagtgagcagagacctcacctttgatgggacctttgagcacctgtatgtcatgacccagagcacacttctgaaggttcctgtggcttcctgtgctcagcacctggactgtgcatcttgccttgctcacagggacccatactgtgggtggtgcgtgctccttggcaggtgcagtcgccgttctgagtgctcgaggggccagggcccagagcagtggctatggagcttccagcctgagctgggctgtctgcaagtggcagccatgagtcctgccaacatcagccgagaggagacgagggaggttttcctatcagtgccagacctgccacccctgtggccaggggagtcatattcctgccactttggggaacatcagagtcctgccctgctgactggttctggtgtgatgtgcccctccccagaccctagtgaggccccagtgctgccgagaggagccgactacgtatccgtgagcgtggagctcagatttggcgctgttgtgatcgccaaaacttccctctctttctatgactgtgtggcggtcactgaactccgcccatctgcgcagtgccaggcctgtgtgagcagccgctgggggtgtaactggtgtgtctggcagcacctgtgcacccacaaggcctcgtgtgatgctgggcccatggttgcaagccatcaggtgatggagactcagcagagcttgagggccctcccgcccccctcatcctcccgtccagcctcgactaccagtatgacacccccgggctctgggagctggaagaggcgaccttgggggcaagctcctgcccctgtgtggagagcgttcagggctccacgttgatgccggtccatgtggagcgggaaatccggctgctaggcaggaacctgcaccttttccaggatggcccaggagacaatgagtgtgtgatggagctggagggcctcgaggtggtggttgaggcccgggtcgagtgtgagccacctccagatacccagtgccatgtcacctgccagcagcaccagctcagctatgaggctctgcagccggagctccgtgtggggctgtttctgcgtcgggccggccgtctgcgtgtggacagtgctgaggggctgcatgtggtactgtatgactgttccgtgggacatggagactgcagccgctgccaaactgccatgccccagtatggctgtgtgtggtgtgagggggagcgtccacgttgtgtgacccgggaggcctgtggtgaggctgaggctgtggccacccagtgcccagcgcccctcatccactcggtggagccactgactgggcctgtagacggaggcacccgtgtcaccatcaggggctccaacctgggccagcatgtgcaggatgtgctgggcatggtcacggtggctggagtgccctgtgctgtggatgcccaggagtacgaggtctccagcagcctcgtgtgcatcaccggggccagtggggaggaggtggccggcgccacagcggtggaggtgccgggaagaggacgtggtgtctcagaacacgactttgcctaccaggatccgaaggtccattccatcttcccggcccgcggccccagagctgggggcacccgtctcaccctgaatggctccaagctcctgactgggcggctggaggacatccgagtggtggttggagaccagccttgtcacttgctgccggagcagcagtcagaacaactgcggtgtgagaccagcccacgccccacgcctgccacgctccctgtggctgtgtggtttggggccacggagcggaggcttcaacgcggacagttcaagtataccttggaccccaacatcacctctgctggccccaccaagagcttcctcagtggaggacgtgagatatgcgtccgtggccagaatctggacgtggtacagacgccaagaatccgggtgaccgtggtctcgagaatgctgcagcccagccaggggcttggacggaggcgtcgcgtggtcccggagacggcatgttcccttggaccctcctgcagtagccagcaatttgaggagccgtgccatgtcaactcctcccagctcatcacgtgccgcacacctgccctcccaggcctgcctgaggacccctgggtccgggtggaatttatccttgacaacctggtctttgactttgcaacactgaaccccacacctttctcctatgaggccgaccccaccctgcagccactcaaccctgaggaccccaccatgccattccggcacaagcctgggagtgtgttctccgtggagggggagaacctggaccttgcaatgtccaaggggtggtggctatgataggggatggcccctgtgtggtgaagacgctgacgcggcaccacctgtactgcgagccccccgtggagcagcccctgccacggcaccatgccctccgagaggcacctgactctttgcctgagttcacggtgcagatggggaacttgcgcttctccctgggtcacgtgcagtatgacggcgagagccctggggcttttcctgtggcagcccaggtgggcttgggggtgggcacctctcttctggctctgggtgtcatcatcattgtcctcatgtacaggaggaagagcaagcaggccctgagggactataagaaggttcagatccagctggagaatctggagagcagtgtgcgggaccgctgcaagaaggaattcacagacctcatgactgagatgaccgatctcaccagtgacctcctgggcagcggcatccccttcctcgactacaaggtgtatgcggagaggatcttcttccctgggcaccgcgagtcgcccttgcaccgggacctgggtgtgcctgagagcagacggcccactgtggagcaagggctggggcagctctctaacctgctcaacagcaagctcttcctcaccaagttcatccacacgctggagagccagcgcaccttttcagctcgggaccgtgcctacgtggcatctctgctcaccgtggcactgcatgggaagcttgagtatttcactgacatcctccgcactctgctcagtgacctggttgcccagtatgtggccaagaaccccaagctgatgctgcgcaggacagagactgtggtggagaagctgctcaccaactggatgtccatctgtctgtataccttcgtgagggactccgtaggggagcctctgtacatgctctttcgagggattaagcaccaagtggataaggggccagtggacagtgtgacaggcaaggccaaatacaccttgaacgacaaccgcctgctcagagaggatgtggagtaccgtcccctgaccttgaatgcactattggctgtggggcctggggcaggagaggcccagggcgtgcccgtgaaggtcctagactgtgacaccatctcccaggcaaaggagaagatgctggaccagctttataaaggagtgcctctcacccagcggccagaccctcgcacccttgatgttgagtggcggtctggggtggccgggcacctcattctttctgacgaggatgtcacttctgaggtccagggtctgtggaggcgcctgaacacactgcagcattacaaggtcccagatggagcaactgtggccctcgtcccctgcctcaccaagcatgtgctccgggaaaaccaggattatgtccctggagagcggaccccaatgctggaggatgtagatgaggggggcatccggccctggcacctggtgaagccaagtgatgagccggagccgcccaggcctcggaggggcagccttcggggcggggagcgtgagcgcgccaaggccatccctgagatctacctgacccgcctgctgtccatgaagggcaccctgcagaagttcgtggatgacctgttccaggtgattctcagcaccagccgccccgtgccgctcgctgtgaagtacttctttgacctgctggatgagcaggcccagcagcatggcatctccgaccaggacaccatccacatctggaagaccaacagcttgcctctgaggttctggatcaatataataaaaaacccgcagtttgtgttcgacgtgcaaacatctgataacatggatgcggtgctccttgtcattgcacagaccttcatggacgcctgcaccctggccgaccacaagctgggccgggactccccgatcaacaaacttctgtatgcacgggacattccccggtacaagcggatggtggaaaggtactatgcagacatcagacagactgtcccagccagcgaccaagagatgaactctgtcctggctgaactgtcctggaactactccggagacctcggggcgcgagtggccctgcatgaactctacaagtacatcaacaagtactatgaccagatcatcactgccctggaggaggtgaccacaagccacaaggaaagaagacgaagtttgaatagcttctgtccctctgctttcccttttccatttgaaagaaaggactctggggtttttactgttacctgatcaatggcagagcctcctgagtagctgggaggatcctgtagagtcacacct

SEQ ID NO: 76938 - DNA, 2157 bp, Homo sapiens
agttgctgctgttagtcagatctagaggatcccacttgcatgtaccggcttgcatgggaagcttgagtatttcactgacatcctccgcactctgctcagtgacctggttgcccagtatgtggccaagaaccccaagctgatgctgcgcaggacagagactgtggtggagaagctgctcaccaactggatgtccatctgtctgtataccttcgtgagggactccgtaggggagcctctgtacatgctctttcgagggattaagcaccaagtggataaggggccagtggacagtgtgacaggcaaggccaaatacaccttgaacgacaaccgcctgctcagagaggatgtggagtaccgtcccctgaccttgaatgcactattggctgtggggcctggggcaggagaggcccagggcgtgcccgtgaaggtcctagactgtgacaccatctcccaggcaaaggagaagatgctggaccagctttataaaggagtgcctctcacccagcggccagaccctcgcacccttgatgttgagtggcggtctggggtggccgggcacctcattctttctgacgaggatgtcacttctgaggtccagggtctgtggaggcgcctgaacacactgcagcattacaaggtcccagatggagcaactgtggccctcgtcccctgcctcaccaagcatgtgctccgggaaaaccaggattatgtccctggagagcggaccccaatgctggaggatgtagatgaggggggcatccggccctggcacctggtgaagccaagtgatgagccggagccgcccaggcctcggaggggcagccttcggggcggggagcgtgagcgcgccaaggccatccctgagatctacctgacccgcctgctgtccatgaagggcaccctgcagaagttcgtggatgacctgttccaggtgattctcagcaccagccgccccgtgccgctcgctgtgaagtacttctttgacctgctggatgagcaggcccagcagcatggcatctccgaccaggacaccatccacatctggaagaccaacagcttgcctctgaggttctggatcaatataataaaaaacccgcagtttgtgttcgacgtgcaaacatctgataacatggatgcggtgctccttgtcattgcacagaccttcatggacgcctgcaccctggccgaccacaagctgggccgggactccccgatcaacaaacttctgtatgcacgggacattccccggtacaagcggatggtggaaaggtactatgcagacatcagacagactgtcccagccagcgaccaagagatgaactctgtcctggctgaactgtcctggaactactccggagacctcggggcgcgagtggccctgcatgaactctacaagtacatcaacaagtactatgaccagatcatcactgccctggaggaggatggcacggcccagaagatgcagctgggctatcggctccagcagattgcagctgctgtggaaaacaaggtcacagatctataggaacccaggagccacggcctgctgttgcttcagcctggcctgggcagccctggaagctcggaggagaggccaccttcttaggtgcctgtagtgactgacaagcagagttagtggaaggtgactcccagtctcctggtggctctggcctcggccctgctggatccacctcctagacccggggcctcaaggctcatggggtagtacccagcctgctccccgagtccagcgaccctgtgacaccggtctgcagggagttggggactaagggcttccagagagtggctggaagagactccaggcccctggggagactgtactgttcctgaacactggccttggccacactgggattcggagaggaaggaggagagccccatgcttcctgtctgcctcctccaccatccctgacctcagttgagctgcctctggccttgttgctgctgccacatcctaggtctaagagttgaacgcctctcctaggccactacaaactgacccctcagcagggctggctgccacagggctgccctgcctcataggtagccatggtgagggctatctgctgcaggggggtcttggggagagtggtgactccattgacccagcttttcattaaaggataacacactgca

SEQ ID NO: 76939 - DNA, 5261 bp, Homo sapiens
  misc_feature (5073)..(5076): n is a, c, g, or t
  misc_feature (5150)..(5150): n is a, c, g, or t
  misc_feature (5160)..(5160): n is a, c, g, or t
  misc_feature (5195)..(5195): n is a, c, g, or t
  misc_feature (5225)..(5225): n is a, c, g, or t
gcccggccgacgcggctttgtctcctttgttcccggcggtggcagcgccgcgcgggaggggcgggcagcgggcgcagttttccgcccctcggtctccgggtaacagctgcggctccaccagacccggggagaggccgctgcgcgcggagcccgagcccggagcggccgacgcccgcctcggcgcgcacatcccgcggggcccggccgggtggtgactcccacacgggtcatgctgttgtctcctgatccagccggccctgccaggtgaccatgcctgctctgggcccagctcttctccaggctctctgggccgggtgggtcctcaccctccagccccttccaccaactgcattcactcccaatggcacgtatctgcagcacctggcaagggaccccacctcaggcaccctctacctgggggctaccaacttcctgttccagctgagccctgggctgcagctggaggccacagtgtccaccggccctgtgctagacagcagggactgcctgccacctgtgatgcctgatgagtgcccccaggcccagcctaccaacaacccgaatcagctgctcctggtgagcccaggggccctggtggtatgcgggagcgtgcaccagggggtctgtgaacagcggcgcctggggcagctcgagcagctgctgctgcggccagagcggcctggggacacacaatatgtggctgccaatgatcctgcggtcagcacggtggggctggtagcccagggcttggcaggggagcccctcctgtttgtggggcgaggatacaccagcaggggtgtggggggtggcattccacccatcacaacccgggccctgtggccgcccgacccccaagctgccttctcctatgaggagacagccaagctggcagtgggccgcctctccgagtacagccaccacttcgtgagtgcctttgcacgtggggccagcgcctacttcctgttcctgcggcgggacctgcaggctcagtctagagcttttcgtgcctatgtatctcgagtgtgtctccgggaccagcactactactcctatgtggagttgcctctggcctgcgaaggtggccgctacgggctgatccaggctgcagctgtggccacgtccagggaggtggcgcatggggaggtgctctttgcagctttctcctcggctgcaccccccactgtgggccggcccccatcggcggctgctggggcatctggagcctctgccctctgtgccttccccctggatgaggtggaccggcttgctaatcgcacgcgagatgcctgctacacccgggagggtcgtgctgaggatgggaccgaggtggcctacatcgagtatgatgtcaattctgactgtgcacagctgccagtggacaccctggatgcttatccctgtggctcagaccacacgcccagccccatggccagccgggtcccgctggaagccacaccaattctggagtggccagggattcagctaacagctgtggcagtcaccatggaagatggacacaccatcgctttcctgggtgatagtcaagggcagctgcacagggtctacttgggcccagggagcgatggccacccatactccacacagagcatccagcaggggtctgcagtgagcagagacctcacctttgatgggacctttgagcacctgtatgtcatgacccagagcacacttctgaaggttcctgtggcttcctgtgctcagcacctggactgtgcatcttgccttgctcacagggacccatactgtgggtggtgcgtgctccttggcaggtgcagtcgccgttctgagtgctcgaggggccagggcccagagcagtggctatggagcttccagcctgagctgggctgtctgcaagtggcagccatgagtcctgccaacatcagccgagaggagacgagggaggttttcctatcagtgccagacctgccacccctgtggccaggggagtcatattcctgccactttggggaacatcagagtcctgccctgctgactggttctggtgtgatgtgcccctccccagaccctagtgaggccccagtgctgccgagaggagccgactacgtatccgtgagcgtggagctcagatttggcgctgttgtgatcgccaaaacttccctctctttctatgactgtgtggcggtcactgaactccgcccatctgcgcagtgccaggcctgtgtgagcagccgctgggggtgtaactggtgtgtctggcagcacctgtgcacccacaaggcctcgtgtgatgctgggcccatggttgcaagccatcaggtgatggagactcagcagagcttgagggccctcccgcccccctcatcctcccgtccagcctcgactaccagtatgacacccccgggctctgggagctggaagaggcgaccttgggggcaagctcctgcccctgtgtggagagcgttcagggctccacgttgatgccggtccatgtggagcgggaaatccggctgctaggcaggaacctgcaccttttccaggatggcccaggagacaatgagtgtgtgatggagctggagggcctcgaggtggtggttgaggcccgggtcgagtgtgagccacctccagatacccagtgccatgtcacctgccagcagcaccagctcagctatgaggctctgcagccggagctccgtgtggggctgtttctgcgtcgggccggccgtctgcgtgtggacagtgctgaggggctgcatgtggtactgtatgactgttccgtgggacatggagactgcagccgctgccaaactgccatgccccagtatggctgtgtgtggtgtgagggggagcgtccacgttgtgtgacccgggaggcctgtggtgaggctgaggctgtggccacccagtgcccagcgcccctcatccactcggtggagccactgactgggcctgtagacggaggcacccgtgtcaccatcaggggctccaacctgggccagcatgtgcaggatgtgctgggcatggtcacggtggctggagtgccctgtgctgtggatgcccaggagtacgaggtctccagcagcctcgtgtgcatcaccggggccagtggggaggaggtggccggcgccacagcggtggaggtgccgggaagaggacgtggtgtctcagaacacgactttgcctaccaggatccgaaggtccattccatcttcccggcccgcggccccagagctgggggcacccgtctcaccctgaatggctccaagctcctgactgggcggctggaggacatccgagtggtggttggagaccagccttgtcacttgctgccggagcagcagtcagaacaactgcggtgtgagaccagcccacgccccacgcctgccacgctccctgtggctgtgtggtttggggccacggagcggaggcttcaacgcggacagttcaagtataccttggaccccaacatcacctctgctggccccaccaagagcttcctcagtggaggacgtgagatatgcgtccgtggccagaatctggacgtggtacagacgccaagaatccgggtgaccgtggtctcgagaatgctgcagcccagccaggggcttggacggaggcgtcgcgtggtcccggagacggcatgttcccttggaccctcctgcagtagccagcaatttgaggagccgtgccatgtcaactcctcccagctcatcacgtgccgcacacctgccctcccaggcctgcctgaggacccctgggtccgggtggaatttatccttgacaacctggtctttgactttgcaacactgaaccccacacctttctcctatgaggccgaccccaccctgcagccactcaaccctgaggaccccaccatgccattccggcacaagcctgggagtgtgttctccgtggagggggagaacctggaccttgcaatgtccaaggggtggtggctatgataggggatggcccctgtgtggtgaagacgctgacgcggcaccacctgtactgcgagccccccgtggagcagcccctgccacggcaccatgccctccgagaggcacctgactctttgcctgagttcacggtgcagatggggaacttgcgcttctccctgggtcacgtgcagtatgacggcgagagccctggggcttttcctgtggcagcccaggtgggcttgggggtgggcacctctcttctggctctgggtgtcatcatcattgtcctcatgtacaggaggaagagcaagcaggccctgagggactataagaaggttcagatccagctggagaatctggagagcagtgtgcgggaccgctgcaagaaggaattcacagacctcatgactgagatgaccgatctcaccagtgacctcctgggcagcggcatccccttcctcgactacaaggtgtatgcggagaggatcttcttccctgggcaccgcgagtcgcccttgcaccgggacctgggtgtgcctgagagcagacggcccactgtggagcaagggctggggcagctctctaacctgctcaacagcaagctcttcctcaccaagttcatccacacgctggagagccagcgcaccttttcagctcgggaccgtgcctacgtggcatctctgctcaccgtggcactgcatgggaagcttgagtatttcactgacatcctccgcactctgctcagtgacctggttgcccagtatgtggccaagaaccccaagctgatgctgcgcaggacagagactgtggtggagaagctgctcaccaactggatgtccatctgtctgtataccttcgtgagggactccgtaggggagcctctgtacatgctctttcgagggattaagcaccaagtggataaggggccagtggacagtgtgacaggcaaggccaaatacaccttgaacgacaaccgcctgctcagagaggatgtggagtaccgtcccctgaccttgaatgcactattggctgtggggcctggggcaggagaggcccagggcgtgcccgtgaaggtcctagactgtgacaccatctcccaggcaaaggagaagatgctggaccagctttataaaggagtgcctctcacccagcnnnncctgccaggtgaccatgcctgctctgggcccagctcttctccaggctctctgggccgggtgggtcctcaccctncagccccttncaccaactgcattcactcccaatggcacgtatctncagcacctggcaagggaccccacctcaggnaccctctacctgggggctaccaactttctgttccag

SEQ ID NO: 76940 - DNA, 5196 bp, Homo sapiens
gcccggccgacgcggctttgtctcctttgttcccggcggtggcagcgccgcgcgggaggggcgggcagcgggcgcagttttccgcccctcggtctccgggtaacagctgcggctccaccagacccggggagaggccgctgcgcgcggagcccgagcccggagcggccgacgcccgcctcggcgcgcacatcccgcggggcccggccgggtggtgactcccacacgggtcatgctgttgtctcctgatccagccggccctgccaggtgaccatgcctgctctgggcccagctcttctccaggctctctgggccgggtgggtcctcaccctccagccccttccaccaactgcattcactcccaatggcacgtatctgcagcacctggcaagggaccccacctcaggcaccctctacctgggggctaccaacttcctgttccagctgagccctgggctgcagctggaggccacagtgtccaccggccctgtgctagacagcagggactgcctgccacctgtgatgcctgatgagtgcccccaggcccagcctaccaacaacccgaatcagctgctcctggtgagcccaggggccctggtggtatgcgggagcgtgcaccagggggtctgtgaacagcggcgcctggggcagctcgagcagctgctgctgcggccagagcggcctggggacacacaatatgtggctgccaatgatcctgcggtcagcacggtggggctggtagcccagggcttggcaggggagcccctcctgtttgtggggcgaggatacaccagcaggggtgtggggggtggcattccacccatcacaacccgggccctgtggccgcccgacccccaagctgccttctcctatgaggagacagccaagctggcagtgggccgcctctccgagtacagccaccacttcgtgagtgcctttgcacgtggggccagcgcctacttcctgttcctgcggcgggacctgcaggctcagtctagagcttttcgtgcctatgtatctcgagtgtgtctccgggaccagcactactactcctatgtggagttgcctctggcctgcgaaggtggccgctacgggctgatccaggctgcagctgtggccacgtccagggaggtggcgcatggggaggtgctctttgcagctttctcctcggctgcaccccccactgtgggccggcccccatcggcggctgctggggcatctggagcctctgccctctgtgccttccccctggatgaggtggaccggcttgctaatcgcacgcgagatgcctgctacacccgggagggtcgtgctgaggatgggaccgaggtggcctacatcgagtatgatgtcaattctgactgtgcacagctgccagtggacaccctggatgcttatccctgtggctcagaccacacgcccagccccatggccagccgggtcccgctggaagccacaccaattctggagtggccagggattcagctaacagctgtggcagtcaccatggaagatggacacaccatcgctttcctgggtgatagtcaagggcagctgcacagggtctacttgggcccagggagcgatggccacccatactccacacagagcatccagcaggggtctgcagtgagcagagacctcacctttgatgggacctttgagcacctgtatgtcatgacccagagcacacttctgaaggttcctgtggcttcctgtgctcagcacctggactgtgcatcttgccttgctcacagggacccatactgtgggtggtgcgtgctccttggcaggtgcagtcgccgttctgagtgctcgaggggccagggcccagagcagtggctatggagcttccagcctgagctgggctgtctgcaagtggcagccatgagtcctgccaacatcagccgagaggagacgagggaggttttcctatcagtgccagacctgccacccctgtggccaggggagtcatattcctgccactttggggaacatcagagtcctgccctgctgactggttctggtgtgatgtgcccctccccagaccctagtgaggccccagtgctgccgagaggagccgactacgtatccgtgagcgtggagctcagatttggcgctgttgtgatcgccaaaacttccctctctttctatgactgtgtggcggtcactgaactccgcccatctgcgcagtgccaggcctgtgtgagcagccgctgggggtgtaactggtgtgtctggcagcacctgtgcacccacaaggcctcgtgtgatgctgggcccatggttgcaagccatcaggtgatggagactcagcagagcttgagggccctcccgcccccctcatcctcccgtccagcctcgactaccagtatgacacccccgggctctgggagctggaagaggcgaccttgggggcaagctcctgcccctgtgtggagagcgttcagggctccacgttgatgccggtccatgtggagcgggaaatccggctgctaggcaggaacctgcaccttttccaggatggcccaggagacaatgagtgtgtgatggagctggagggcctcgaggtggtggttgaggcccgggtcgagtgtgagccacctccagatacccagtgccatgtcacctgccagcagcaccagctcagctatgaggctctgcagccggagctccgtgtggggctgtttctgcgtcgggccggccgtctgcgtgtggacagtgctgaggggctgcatgtggtactgtatgactgttccgtgggacatggagactgcagccgctgccaaactgccatgccccagtatggctgtgtgtggtgtgagggggagcgtccacgttgtgtgacccgggaggcctgtggtgaggctgaggctgtggccacccagtgcccagcgcccctcatccactcggtggagccactgactgggcctgtagacggaggcacccgtgtcaccatcaggggctccaacctgggccagcatgtgcaggatgtgctgggcatggtcacggtggctggagtgccctgtgctgtggatgcccaggagtacgaggtctccagcagcctcgtgtgcatcaccggggccagtggggaggaggtggccggcgccacagcggtggaggtgccgggaagaggacgtggtgtctcagaacacgactttgcctaccaggatccgaaggtccattccatcttcccggcccgcggccccagagctgggggcacccgtctcaccctgaatggctccaagctcctgactgggcggctggaggacatccgagtggtggttggagaccagccttgtcacttgctgccggagcagcagtcagaacaactgcggtgtgagaccagcccacgccccacgcctgccacgctccctgtggctgtgtggtttggggccacggagcggaggcttcaacgcggacagttcaagtataccttggaccccaacatcacctctgctggccccaccaagagcttcctcagtggaggacgtgagatatgcgtccgtggccagaatctggacgtggtacagacgccaagaatccgggtgaccgtggtctcgagaatgctgcagcccagccaggggcttggacggaggcgtcgcgtggtcccggagacggcatgttcccttggaccctcctgcagtagccagcaatttgaggagccgtgccatgtcaactcctcccagctcatcacgtgccgcacacctgccctcccaggcctgcctgaggacccctgggtccgggtggaatttatccttgacaacctggtctttgactttgcaacactgaaccccacacctttctcctatgaggccgaccccaccctgcagccactcaaccctgaggaccccaccatgccattccggcacaagcctgggagtgtgttctccgtggagggggagaacctggaccttgcaatgtccaaggggtggtggctatgataggggatggcccctgtgtggtgaagacgctgacgcggcaccacctgtactgcgagccccccgtggagcagcccctgccacggcaccatgccctccgagaggcacctgactctttgcctgagttcacggtgcagatggggaacttgcgcttctccctgggtcacgtgcagtatgacggcgagagccctggggcttttcctgtggcagcccaggtgggcttgggggtgggcacctctcttctggctctgggtgtcatcatcattgtcctcatgtacaggaggaagagcaagcaggccctgagggactataagaaggttcagatccagctggagaatctggagagcagtgtgcgggaccgctgcaagaaggaattcacagacctcatgactgagatgaccgatctcaccagtgacctcctgggcagcggcatccccttcctcgactacaaggtgtatgcggagaggatcttcttccctgggcaccgcgagtcgcccttgcaccgggacctgggtgtgcctgagagcagacggcccactgtggagcaagggctggggcagctctctaacctgctcaacagcaagctcttcctcaccaagttcatccacacgctggagagccagcgcaccttttcagctcgggaccgtgcctacgtggcatctctgctcaccgtggcactgcatgggaagcttgagtatttcactgacatcctccgcactctgctcagtgacctggttgcccagtatgtggccaagaaccccaagctgatgctgcgcaggacagagactgtggtggagaagctgctcaccaactggatgtccatctgtctgtataccttcgtgagggactccgtaggggagcctctgtacatgctctttcgagggattaagcaccaagtggataaggggccagtggacagtgtgacaggcaaggccaaatacaccttgaacgacaaccgcctgctcagagaggatgtggagtaccgtcccctgaccttgaatgcactattggctgtggggcctggggcaggagaggcccagggcgtgcccgtgaaggtcctagactgtgacaccatcctaggtctaagagttgaacgcctctcctaggccactacaaactgacccctcagcagggctggctgccacagggctgccctgcctcataggtagccatggtgagggctatctgctgcaggggggtcttggggagagtggtgactccattgacccagcttttcattaaaggataacacactgca

SEQ ID NO: 76941 - DNA, 4934 bp, Homo sapiens
gcccggccgacgcggctttgtctcctttgttcccggcggtggcagcgccgcgcgggaggggcgggcagcgggcgcagttttccgcccctcggtctccgggtaacagctgcggctccaccagacccggggagaggccgctgcgcgcggagcccgagcccggagcggccgacgcccgcctcggcgcgcacatcccgcggggcccggccgggtggtgactcccacacgggtcatgctgttgtctcctgatccagccggccctgccaggtgaccatgcctgctctgggcccagctcttctccaggctctctgggccgggtgggtcctcaccctccagccccttccaccaactgcattcactcccaatggcacgtatctgcagcacctggcaagggaccccacctcaggcaccctctacctgggggctaccaacttcctgttccagctgagccctgggctgcagctggaggccacagtgtccaccggccctgtgctagacagcagggactgcctgccacctgtgatgcctgatgagtgcccccaggcccagcctaccaacaacccgaatcagctgctcctggtgagcccaggggccctggtggtatgcgggagcgtgcaccagggggtctgtgaacagcggcgcctggggcagctcgagcagctgctgctgcggccagagcggcctggggacacacaatatgtggctgccaatgatcctgcggtcagcacggtggggctggtagcccagggcttggcaggggagcccctcctgtttgtggggcgaggatacaccagcaggggtgtggggggtggcattccacccatcacaacccgggccctgtggccgcccgacccccaagctgccttctcctatgaggagacagccaagctggcagtgggccgcctctccgagtacagccaccacttcgtgagtgcctttgcacgtggggccagcgcctacttcctgttcctgcggcgggacctgcaggctcagtctagagcttttcgtgcctatgtatctcgagtgtgtctccgggaccagcactactactcctatgtggagttgcctctggcctgcgaaggtggccgctacgggctgatccaggctgcagctgtggccacgtccagggaggtggcgcatggggaggtgctctttgcagctttctcctcggctgcaccccccactgtgggccggcccccatcggcggctgctggggcatctggagcctctgccctctgtgccttccccctggatgaggtggaccggcttgctaatcgcacgcgagatgcctgctacacccgggagggtcgtgctgaggatgggaccgaggtggcctacatcgagtatgatgtcaattctgactgtgcacagctgccagtggacaccctggatgcttatccctgtggctcagaccacacgcccagccccatggccagccgggtcccgctggaagccacaccaattctggagtggccagggattcagctaacagctgtggcagtcaccatggaagatggacacaccatcgctttcctgggtgatagtcaagggcagctgcacagggtctacttgggcccagggagcgatggccacccatactccacacagagcatccagcaggggtctgcagtgagcagagacctcacctttgatgggacctttgagcacctgtatgtcatgacccagagcacacttctgaaggttcctgtggcttcctgtgctcagcacctggactgtgcatcttgccttgctcacagggacccatactgtgggtggtgcgtgctccttggcaggtgcagtcgccgttctgagtgctcgaggggccagggcccagagcagtggctatggagcttccagcctgagctgggctgtctgcaagtggcagccatgagtcctgccaacatcagccgagaggagacgagggaggttttcctatcagtgccagacctgccacccctgtggccaggggagtcatattcctgccactttggggaacatcagagtcctgccctgctgactggttctggtgtgatgtgcccctccccagaccctagtgaggccccagtgctgccgagaggagccgactacgtatccgtgagcgtggagctcagatttggcgctgttgtgatcgccaaaacttccctctctttctatgactgtgtggcggtcactgaactccgcccatctgcgcagtgccaggcctgtgtgagcagccgctgggggtgtaactggtgtgtctggcagcacctgtgcacccacaaggcctcgtgtgatgctgggcccatggttgcaagccatcaggtgatggagactcagcagagcttgagggccctcccgcccccctcatcctcccgtccagcctcgactaccagtatgacacccccgggctctgggagctggaagaggcgaccttgggggcaagctcctgcccctgtgtggagagcgttcagggctccacgttgatgccggtccatgtggagcgggaaatccggctgctaggcaggaacctgcaccttttccaggatggcccaggagacaatgagtgtgtgatggagctggagggcctcgaggtggtggttgaggcccgggtcgagtgtgagccacctccagatacccagtgccatgtcacctgccagcagcaccagctcagctatgaggctctgcagccggagctccgtgtggggctgtttctgcgtcgggccggccgtctgcgtgtggacagtgctgaggggctgcatgtggtactgtatgactgttccgtgggacatggagactgcagccgctgccaaactgccatgccccagtatggctgtgtgtggtgtgagggggagcgtccacgttgtgtgacccgggaggcctgtggtgaggctgaggctgtggccacccagtgcccagcgcccctcatccactcggtggagccactgactgggcctgtagacggaggcacccgtgtcaccatcaggggctccaacctgggccagcatgtgcaggatgtgctgggcatggtcacggtggctggagtgccctgtgctgtggatgcccaggagtacgaggtctccagcagcctcgtgtgcatcaccggggccagtggggaggaggtggccggcgccacagcggtggaggtgccgggaagaggacgtggtgtctcagaacacgactttgcctaccaggatccgaaggtccattccatcttcccggcccgcggccccagagctgggggcacccgtctcaccctgaatggctccaagctcctgactgggcggctggaggacatccgagtggtggttggagaccagccttgtcacttgctgccggagcagcagtcagaacaactgcggtgtgagaccagcccacgccccacgcctgccacgctccctgtggctgtgtggtttggggccacggagcggaggcttcaacgcggacagttcaagtataccttggaccccaacatcacctctgctggccccaccaagagcttcctcagtggaggacgtgagatatgcgtccgtggccagaatctggacgtggtacagacgccaagaatccgggtgaccgtggtctcgagaatgctgcagcccagccaggggcttggacggaggcgtcgcgtggtcccggagacggcatgttcccttggaccctcctgcagtagccagcaatttgaggagccgtgccatgtcaactcctcccagctcatcacgtgccgcacacctgccctcccaggcctgcctgaggacccctgggtccgggtggaatttatccttgacaacctggtctttgactttgcaacactgaaccccacacctttctcctatgaggccgaccccaccctgcagccactcaaccctgaggaccccaccatgccattccggcacaagcctgggagtgtgttctccgtggagggggagaacctggaccttgcaatgtccaaggggtggtggctatgataggggatggcccctgtgtggtgaagacgctgacgcggcaccacctgtactgcgagccccccgtggagcagcccctgccacggcaccatgccctccgagaggcacctgactctttgcctgagttcacggtgcagatggggaacttgcgcttctccctgggtcacgtgcagtatgacggcgagagccctggggcttttcctgtggcagcccaggtgggcttgggggtgggcacctctcttctggctctgggtgtcatcatcattgtcctcatgtacaggaggaagagcaagcaggccctgagggactataagaaggttcagatccagctggagaatctggagagcagtgtgcgggaccgctgcaagaaggaattcacagacctcatgactgagatgaccgatctcaccagtgacctcctgggcagcggcatccccttcctcgactacaaggtgtatgcggagaggatcttcttccctgggcaccgcgagtcgcccttgcaccgggacctgggtgtgcctgagagcagacggcccactgtggagcaagggctggggcagctctctaacctgctcaacagcaagctcttcctcaccaagttcatccacacgctggagagccagcgcaccttttcagctcgggaccgtgcctacgtggcatctctgctcaccgtggcactgcatgggaagcttgagtatttcactgacatcctccgcactctgctcagtgacctggttgcccagtatgtggccaagaaccccaagctgatgctgcgcaggactccgtaggggagcctctgtacatgctctttcgagggattaagcaccaagtggataaggggccagtggacagtggaccgaagggcctacgggccattgacatgacttaccaaaaaacagataatgagaatcaagacaagcagccagagactaattattagcatcatccctctactataaaaaaaccaaatcaacgaaaatctataaagctgtaccc

SEQ ID NO: 76942 - DNA, 839 bp, Homo sapiens
ggctgactagaggacccgcctaagtggaactactccggagacctcggggcgcgagtggccctgcatgaactctacaagtacatcaacaagtactatgaccagatcatcactgccctggaggaggatggcacggcccagaagatgcagctgggctatcggctccagcagattgcagctgctgtggaaaacaaggtcacagatctataggaacccaggagccacggcctgctgttgcttcagcctggcctgggcagccctggaagctcggaggagaggccaccttcttaggtgcctgtagtgactgacaagcagagttagtggaaggtgactcccagtctcctggtggctctggcctcggccctgctggatccacctcctagacccggggcctcaaggctcatggggtagtacccagcctgctccccgagtccagcgaccctgtgacaccggtctgcagggagttggggactaagggcttccagagagtggctggaagagactccaggcccctggggagactgtactgttcctgaacactggccttggccacactgggattcggagaggaaggaggagagccccatgcttcctgtctgcctcctccaccatccctgacctcagttgagctgcctctggccttgttgctgctgccacatcctaggtctaagagttgaacgcctctcctaggccactacaaactgacccctcagcagggctggctgccacagggctgccctgcctcataggtagccatggtgagggctatctgctgcaggggggtcttggggagagtggtgactccattgacccagcttttcattaaaggataacacactgca

SEQ ID NO: 76943 - DNA, 4365 bp, Homo sapiens
  misc_feature (2652)..(2652): n is a, c, g, or t
gcccggccgacgcggctttgtctcctttgttcccggcggtggcagcgccgcgcgggaggggcgggcagcgggcgcagttttccgcccctcggtctccgggtaacagctgcggctccaccagacccggggagaggccgctgcgcgcggagcccgagcccggagcggccgacgcccgcctcggcgcgcacatcccgcggggcccggccgggtggtgactcccacacgggtcatgctgttgtctcctgatccagccggccctgccaggtgaccatgcctgctctgggcccagctcttctccaggctctctgggccgggtgggtcctcaccctccagccccttccaccaactgcattcactcccaatggcacgtatctgcagcacctggcaagggaccccacctcaggcaccctctacctgggggctaccaacttcctgttccagctgagccctgggctgcagctggaggccacagtgtccaccggccctgtgctagacagcagggactgcctgccacctgtgatgcctgatgagtgcccccaggcccagcctaccaacaacccgaatcagctgctcctggtgagcccaggggccctggtggtatgcgggagcgtgcaccagggggtctgtgaacagcggcgcctggggcagctcgagcagctgctgctgcggccagagcggcctggggacacacaatatgtggctgccaatgatcctgcggtcagcacggtggggctggtagcccagggcttggcaggggagcccctcctgtttgtggggcgaggatacaccagcaggggtgtggggggtggcattccacccatcacaacccgggccctgtggccgcccgacccccaagctgccttctcctatgaggagacagccaagctggcagtgggccgcctctccgagtacagccaccacttcgtgagtgcctttgcacgtggggccagcgcctacttcctgttcctgcggcgggacctgcaggctcagtctagagcttttcgtgcctatgtatctcgagtgtgtctccgggaccagcactactactcctatgtggagttgcctctggcctgcgaaggtggccgctacgggctgatccaggctgcagctgtggccacgtccagggaggtggcgcatggggaggtgctctttgcagctttctcctcggctgcaccccccactgtgggccggcccccatcggcggctgctggggcatctggagcctctgccctctgtgccttccccctggatgaggtggaccggcttgctaatcgcacgcgagatgcctgctacacccgggagggtcgtgctgaggatgggaccgaggtggcctacatcgagtatgatgtcaattctgactgtgcacagctgccagtggacaccctggatgcttatccctgtggctcagaccacacgcccagccccatggccagccgggtcccgctggaagccacaccaattctggagtggccagggattcagctaacagctgtggcagtcaccatggaagatggacacaccatcgctttcctgggtgatagtcaagggcagctgcacagggtctacttgggcccagggagcgatggccacccatactccacacagagcatccagcaggggtctgcagtgagcagagacctcacctttgatgggacctttgagcacctgtatgtcatgacccagagcacacttctgaaggttcctgtggcttcctgtgctcagcacctggactgtgcatcttgccttgctcacagggacccatactgtgggtggtgcgtgctccttggcaggtgcagtcgccgttctgagtgctcgaggggccagggcccagagcagtggctatggagcttccagcctgagctgggctgtctgcaagtggcagccatgagtcctgccaacatcagccgagaggagacgagggaggttttcctatcagtgccagacctgccacccctgtggccaggggagtcatattcctgccactttggggaacatcagagtcctgccctgctgactggttctggtgtgatgtgcccctccccagaccctagtgaggccccagtgctgccgagaggagccgactacgtatccgtgagcgtggagctcagatttggcgctgttgtgatcgccaaaacttccctctctttctatgactgtgtggcggtcactgaactccgcccatctgcgcagtgccaggcctgtgtgagcagccgctgggggtgtaactggtgtgtctggcagcacctgtgcacccacaaggcctcgtgtgatgctgggcccatggttgcaagccatcagagcccgcttgtctccccagaccctcctgcaagaggtggacccagcccctccccacccacagcccccaaagccctggccacccctgctcctgacacccttcccgtggagcctggggctccctccacagccacagcttcggacatctcacctggggctagtccttccctgctcagcccctgggggccatgggcaggttctggctccatatcttcccctggctccacagggtcgcctctccatgaggagccctcccctcccagcccccaaaatggacctggaaccgctgtccctgcccccactgacttcagaccctcagccacacctgaggacctcttggcctccccgctgtcaccntcagaggtagcagcagtgccccctgcagaccctggccccgaggctcttcatcccacagtgcccctggacctgccccctgccactgttcctgccaccactttcccaggggccatgggctccgtgaagcccgccctggactggctcacgagagaaggcggcgagctgcccgaggcggacgagtggacggggggtgacgcacccgccttctccacttccaccctcctctcaggtgatggagactcagcagagcttgagggccctcccgcccccctcatcctcccgtccagcctcgactaccagtatgacacccccgggctctgggagctggaagaggcgaccttgggggcaagctcctgcccctgtgtggagagcgttcagggctccacgttgatgccggtccatgtggagcgggaaatccggctgctaggcaggaacctgcaccttttccaggatggcccaggagacaatgagtgtgtgatggagctggagggcctcgaggtggtggttgaggcccgggtcgagtgtgagccacctccagatacccagtgccatgtcacctgccagcagcaccagctcagctatgaggctctgcagccggagctccgtgtggggctgtttctgcgtcgggccggccgtctgcgtgtggacagtgctgaggggctgcatgtggtactgtatgactgttccgtgggacatggagactgcagccgctgccaaactgccatgccccagtatggctgtgtgtggtgtgagggggagcgtccacgttgtgtgacccgggaggcctgtggtgaggctgaggctgtggccacccagtgcccagcgcccctcatccactcggtggagccactgactgggcctgtagacggaggcacccgtgtcaccatcaggggctccaacctgggccagcatgtgcaggatgtgctgggcatggtcacggtggctggagtgccctgtgctgtggatgcccaggagtacgaggtctccagcagcctcgtgtgcatcaccggggccagtggggaggaggtggccggcgccacagcggtggaggtgccgggaagaggacgtggtgtctcagaacacgactttgcctaccaggatccgaaggtccattccatcttcccggcccgcggccccagagctgggggcacccgtctcaccctgaatggctccaagctcctgactgggcggctggaggacatccgagtggtggttggagaccagccttgtcacttgctgccggagcagcagtcagaacaactgcggtgtgagaccagcccacgccccacgcctgccacgctccctgtggctgtgtggtttggggccacggagcggaggcttcaacgcggacagttcaagtataccttggaccccaacatcacctctgctggccccaccaagagcttcctcagtggaggacgtgagatatgcgtccgtggccagaatctggacgtggtacagacgccaagaatccgggtgaccgtggtctcgagaatgctgcagcccagccaggggcttggacggaggcgtcgcgtggtcccggagacggcatgttcccttggaccctcctgcagtagccagcaatttgaggagccgtgccatgtcaactcctcccagctcatcacgtgccgcactgtgattcctctaactggaactatttcaatgatgtcattatttccctaccaacttcctttcagggcttgctgcgcgttt

SEQ ID NO: 76944 - DNA, 2196 bp, Homo sapiens
gcccggccgacgcggctttgtctcctttgttcccggcggtggcagcgccgcgcgggaggggcgggcagcgggcgcagttttccgcccctcggtctccgggtaacagctgcggctccaccagacccggggagaggccgctgcgcgcggagcccgagcccggagcggccgacgcccgcctcggcgcgcacatcccgcggggcccggccgggtggtgactcccacacgggtcatgctgttgtctcctgatccagccggccctgccaggtgaccatgcctgctctgggcccagctcttctccaggctctctgggccgggtgggtcctcaccctccagccccttccaccaactgcattcactcccaatggcacgtatctgcagcacctggcaagggaccccacctcaggcaccctctacctgggggctaccaacttcctgttccagctgagccctgggctgcagctggaggccacagtgtccaccggccctgtgctagacagcagggactgcctgccacctgtgatgcctgatgagtgcccccaggcccagcctaccaacaacccgaatcagctgctcctggtgagcccaggggccctggtggtatgcgggagcgtgcaccagggggtctgtgaacagcggcgcctggggcagctcgagcagctgctgctgcggccagagcggcctggggacacacaatatgtggctgccaatgatcctgcggtcagcacggtggggctggtagcccagggcttggcaggggagcccctcctgtttgtggggcgaggatacaccagcaggggtgtggggggtggcattccacccatcacaacccgggccctgtggccgcccgacccccaagctgccttctcctatgaggagacagccaagctggcagtgggccgcctctccgagtacagccaccacttcgtgagtgcctttgcacgtggggccagcgcctacttcctgttcctgcggcgggacctgcaggctcagtctagagcttttcgtgcctatgtatctcgagtgtgtctccgggaccagcactactactcctatgtggagttgcctctggcctgcgaaggtggccgctacgggctgatccaggctgcagctgtggccacgtccagggaggtggcgcatggggaggtgctctttgcagctttctcctcggctgcaccccccactgtgggccggcccccatcggcggctgctggggcatctggagcctctgccctctgtgccttccccctggatgaggtggaccggcttgctaatcgcacgcgagatgcctgctacacccgggagggtcgtgctgaggatgggaccgaggtggcctacatcgagtatgatgtcaattctgactgtgcacagctgccagtggacaccctggatgcttatccctgtggctcagaccacacgcccagccccatggccagccgggtcccgctggaagccacaccaattctggagtggccagggattcagctaacagctgtggcagtcaccatggaagatggacacaccatcgctttcctgggtgatagtcaagggcagctgcacagggtctacttgggcccagggagcgatggccacccatactccacacagagcatccagcaggggtctgcagtgagcagagacctcacctttgatgggacctttgagcacctgtatgtcatgacccagagcacacttctgaaggttcctgtggcttcctgtgctcagcacctggactgtgcatcttgccttgctcacagggacccatactgtgggtggtgcgtgctccttggcaggtgcagtcgccgttctgagtgctcgaggggccagggcccagagcagtggctatggagcttccagcctgagctgggctgtctgcaagtggcagccatgagtcctgccaacatcagccgagaggagacgagggaggtgaatgatcagataggcagggccctggtggggagggctctgggcatcaaggtctgggtagagatcttggatcctgatgtcggacatgccagataccacatggcctcacacaagtcacttcttttaggagctcagtttccccatctatttctaactcaggccagagggtgtttggggaggcctgagggctgttgattgctggtgcctgcccacattgggtgtcccataaatgtgagccctggtctgctgcccactagccccaacagtgtgtcc

SEQ ID NO: 76945 - DNA, 2112 bp, Homo sapiens
gcccggccgacgcggctttgtctcctttgttcccggcggtggcagcgccgcgcgggaggggcgggcagcgggcgcagttttccgcccctcggtctccgggtaacagctgcggctccaccagacccggggagaggccgctgcgcgcggagcccgagcccggagcggccgacgcccgcctcggcgcgcacatcccgcggggcccggccgggtggtgactcccacacgggtcatgctgttgtctcctgatccagccggccctgccaggtgaccatgcctgctctgggcccagctcttctccaggctctctgggccgggtgggtcctcaccctccagccccttccaccaactgcattcactcccaatggcacgtatctgcagcacctggcaagggaccccacctcaggcaccctctacctgggggctaccaacttcctgttccagctgagccctgggctgcagctggaggccacagtgtccaccggccctgtgctagacagcagggactgcctgccacctgtgatgcctgatgagtgcccccaggcccagcctaccaacaacccgaatcagctgctcctggtgagcccaggggccctggtggtatgcgggagcgtgcaccagggggtctgtgaacagcggcgcctggggcagctcgagcagctgctgctgcggccagagcggcctggggacacacaatatgtggctgccaatgatcctgcggtcagcacggtggggctggtagcccagggcttggcaggggagcccctcctgtttgtggggcgaggatacaccagcaggggtgtggggggtggcattccacccatcacaacccgggccctgtggccgcccgacccccaagctgccttctcctatgaggagacagccaagctggcagtgggccgcctctccgagtacagccaccacttcgtgagtgcctttgcacgtggggccagcgcctacttcctgttcctgcggcgggacctgcaggctcagtctagagcttttcgtgcctatgtatctcgagtgtgtctccgggaccagcactactactcctatgtggagttgcctctggcctgcgaaggtggccgctacgggctgatccaggctgcagctgtggccacgtccagggaggtggcgcatggggaggtgctctttgcagctttctcctcggctgcaccccccactgtgggccggcccccatcggcggctgctggggcatctggagcctctgccctctgtgccttccccctggatgaggtggaccggcttgctaatcgcacgcgagatgcctgctacacccgggagggtcgtgctgaggatgggaccgaggtggcctacatcgagtatgatgtcaattctgactgtgcacagctgccagtggacaccctggatgcttatccctgtggctcagaccacacgcccagccccatggccagccgggtcccgctggaagccacaccaattctggagtggccagggattcagctaacagctgtggcagtcaccatggaagatggacacaccatcgctttcctgggtgatagtcaagggcagctgcacagggtctacttgggcccagggagcgatggccacccatactccacacagagcatccagcaggggtctgcagtgagcagagacctcacctttgatgggacctttgagcacctgtatgtcatgacccagagcacacttctgaaggttcctgtggcttcctgtgctcagcacctggactgtgcatcttgccttgctcacagggacccatactgtgggtggtgcgtgctccttggcaggtgcagtcgccgttctgagtgctcgaggggccagggcccagagcagtggctatggagcttccagcctgagctgggctgtctgcaagtggcagccatgagtcctgccaacatcagccgagaggagacgagggaggttttcctatcagtgccagacctgccacccctgtggccaggggagtcatattcctgccactttggggaacatcagagtcctgccctgctgactggttctggtgtgatgtgcccctccccagaccctagtgaggccccagtgctgccgagaggagccggtggactacgtaccagtgtggagaggtaccga

SEQ ID NO: 76946 - DNA, 352 bp, Homo sapiens
cccctgccacggcaccatgccctccgagaggcacctgactctttgcctgagttcacggtcagtgggcaggtccctggccgggctgggcattgacctgggccaaacccttgctcacaggtggctcctgacacaggtgcagatggggaacttgcgcttctccctgggtcacgtgcagtatgacggcgagagccctggggcttttcctgtggcagcccaggtgggcttgggggtgggcacctctcttctggctctgggtgtcatcatcattgtcctcatgtacaggtgggtgcagccagatgtggctgggctggggcaggtcgtgggatctggctggactgggaagggacagacc

SEQ ID NO: 76947 - DNA, 495 bp, Homo sapiens
ggagggtcaggccctccaaacttctaagccctcagccaccatgcagctcggacacttgtgccagagcagagactcctgctcagcctgtcctcagtccccttaagcccatgtcctgtccccttccccagtgtgcgtcatgtcccatacacctctgccacctgctggggggccctaactgcctgtgctctcctaggactccgtaggggagcctctgtacatgctctttcgagggattaagcaccaagtggataaggggccagtggacagtgtgacaggcaaggccaaatacaccttgaacgacaaccgcctgctcagagaggatgtggagtaccgtcccctggtgagggtgtgcaagtgtgtggcctgcagtctgagtgcggtgagggcgagggtggagagtgtgtgggtgtgtggggtctggacaccagcttctgatgtggtacctggatgtagagctgggttgacctctggctggctcctggagagagcccatca

SEQ ID NO: 76948 - DNA, 452 bp, Homo sapiens
cagtatggctgtgtgtggtgtgagggggagcgtccacgttgtgtgacccgggaggcctgtggtgaggctgaggctgtggccacccagtgcccagcgcccctcatccactcggtttgttgaaaggctggccatcccttcctcagtgctgcccttagagggagggtgtgggggcccaaaggtgggaggttggggctgcctttccagttgagtagaggtgagcagtccttgtcctggaacaggtggagccactgactgggcctgtagacggaggcacccgtgtcaccatcaggggctccaacctgggccagcatgtgcaggatgtgctgggcatggtcacggtggctggagtgccctgtgctgtggatgcccaggagtacgaggtctccagcaggtaagctggctgcacccagcaggagcacggcgcagcctggggcctccgcggttggcgttgc

SEQ ID NO: 76949 - DNA, 7310 bp, Homo sapiens
  misc_feature (2652)..(2652): n is a, c, g, or t
gcccggccgacgcggctttgtctcctttgttcccggcggtggcagcgccgcgcgggaggggcgggcagcgggcgcagttttccgcccctcggtctccgggtaacagctgcggctccaccagacccggggagaggccgctgcgcgcggagcccgagcccggagcggccgacgcccgcctcggcgcgcacatcccgcggggcccggccgggtggtgactcccacacgggtcatgctgttgtctcctgatccagccggccctgccaggtgaccatgcctgctctgggcccagctcttctccaggctctctgggccgggtgggtcctcaccctccagccccttccaccaactgcattcactcccaatggcacgtatctgcagcacctggcaagggaccccacctcaggcaccctctacctgggggctaccaacttcctgttccagctgagccctgggctgcagctggaggccacagtgtccaccggccctgtgctagacagcagggactgcctgccacctgtgatgcctgatgagtgcccccaggcccagcctaccaacaacccgaatcagctgctcctggtgagcccaggggccctggtggtatgcgggagcgtgcaccagggggtctgtgaacagcggcgcctggggcagctcgagcagctgctgctgcggccagagcggcctggggacacacaatatgtggctgccaatgatcctgcggtcagcacggtggggctggtagcccagggcttggcaggggagcccctcctgtttgtggggcgaggatacaccagcaggggtgtggggggtggcattccacccatcacaacccgggccctgtggccgcccgacccccaagctgccttctcctatgaggagacagccaagctggcagtgggccgcctctccgagtacagccaccacttcgtgagtgcctttgcacgtggggccagcgcctacttcctgttcctgcggcgggacctgcaggctcagtctagagcttttcgtgcctatgtatctcgagtgtgtctccgggaccagcactactactcctatgtggagttgcctctggcctgcgaaggtggccgctacgggctgatccaggctgcagctgtggccacgtccagggaggtggcgcatggggaggtgctctttgcagctttctcctcggctgcaccccccactgtgggccggcccccatcggcggctgctggggcatctggagcctctgccctctgtgccttccccctggatgaggtggaccggcttgctaatcgcacgcgagatgcctgctacacccgggagggtcgtgctgaggatgggaccgaggtggcctacatcgagtatgatgtcaattctgactgtgcacagctgccagtggacaccctggatgcttatccctgtggctcagaccacacgcccagccccatggccagccgggtcccgctggaagccacaccaattctggagtggccagggattcagctaacagctgtggcagtcaccatggaagatggacacaccatcgctttcctgggtgatagtcaagggcagctgcacagggtctacttgggcccagggagcgatggccacccatactccacacagagcatccagcaggggtctgcagtgagcagagacctcacctttgatgggacctttgagcacctgtatgtcatgacccagagcacacttctgaaggttcctgtggcttcctgtgctcagcacctggactgtgcatcttgccttgctcacagggacccatactgtgggtggtgcgtgctccttggcaggtgcagtcgccgttctgagtgctcgaggggccagggcccagagcagtggctatggagcttccagcctgagctgggctgtctgcaagtggcagccatgagtcctgccaacatcagccgagaggagacgagggaggttttcctatcagtgccagacctgccacccctgtggccaggggagtcatattcctgccactttggggaacatcagagtcctgccctgctgactggttctggtgtgatgtgcccctccccagaccctagtgaggccccagtgctgccgagaggagccgactacgtatccgtgagcgtggagctcagatttggcgctgttgtgatcgccaaaacttccctctctttctatgactgtgtggcggtcactgaactccgcccatctgcgcagtgccaggcctgtgtgagcagccgctgggggtgtaactggtgtgtctggcagcacctgtgcacccacaaggcctcgtgtgatgctgggcccatggttgcaagccatcagagcccgcttgtctccccagaccctcctgcaagaggtggacccagcccctccccacccacagcccccaaagccctggccacccctgctcctgacacccttcccgtggagcctggggctccctccacagccacagcttcggacatctcacctggggctagtccttccctgctcagcccctgggggccatgggcaggttctggctccatatcttcccctggctccacagggtcgcctctccatgaggagccctcccctcccagcccccaaaatggacctggaaccgctgtccctgcccccactgacttcagaccctcagccacacctgaggacctcttggcctccccgctgtcaccntcagaggtagcagcagtgccccctgcagaccctggccccgaggctcttcatcccacagtgcccctggacctgccccctgccactgttcctgccaccactttcccaggggccatgggctccgtgaagcccgccctggactggctcacgagagaaggcggcgagctgcccgaggcggacgagtggacggggggtgacgcacccgccttctccacttccaccctcctctcaggtgatggagactcagcagagcttgagggccctcccgcccccctcatcctcccgtccagcctcgactaccagtatgacacccccgggctctgggagctggaagaggcgaccttgggggcaagctcctgcccctgtgtggagagcgttcagggctccacgttgatgccggtccatgtggagcgggaaatccggctgctaggcaggaacctgcaccttttccaggatggcccaggagacaatgagtgtgtgatggagctggagggcctcgaggtggtggttgaggcccgggtcgagtgtgagccacctccagatacccagtgccatgtcacctgccagcagcaccagctcagctatgaggctctgcagccggagctccgtgtggggctgtttctgcgtcgggccggccgtctgcgtgtggacagtgctgaggggctgcatgtggtactgtatgactgttccgtgggacatggagactgcagccgctgccaaactgccatgccccagtatggctgtgtgtggtgtgagggggagcgtccacgttgtgtgacccgggaggcctgtggtgaggctgaggctgtggccacccagtgcccagcgcccctcatccactcggtggagccactgactgggcctgtagacggaggcacccgtgtcaccatcaggggctccaacctgggccagcatgtgcaggatgtgctgggcatggtcacggtggctggagtgccctgtgctgtggatgcccaggagtacgaggtctccagcagcctcgtgtgcatcaccggggccagtggggaggaggtggccggcgccacagcggtggaggtgccgggaagaggacgtggtgtctcagaacacgactttgcctaccaggatccgaaggtccattccatcttcccggcccgcggccccagagctgggggcacccgtctcaccctgaatggctccaagctcctgactgggcggctggaggacatccgagtggtggttggagaccagccttgtcacttgctgccggagcagcagtcagaacaactgcggtgtgagaccagcccacgccccacgcctgccacgctccctgtggctgtgtggtttggggccacggagcggaggcttcaacgcggacagttcaagtataccttggaccccaacatcacctctgctggccccaccaagagcttcctcagtggaggacgtgagatatgcgtccgtggccagaatctggacgtggtacagacgccaagaatccgggtgaccgtggtctcgagaatgctgcagcccagccaggggcttggacggaggcgtcgcgtggtcccggagacggcatgttcccttggaccctcctgcagtagccagcaatttgaggagccgtgccatgtcaactcctcccagctcatcacgtgccgcacacctgccctcccaggcctgcctgaggacccctgggtccgggtggaatttatccttgacaacctggtctttgactttgcaacactgaaccccacacctttctcctatgaggccgaccccaccctgcagccactcaaccctgaggaccccaccatgccattccggcacaagcctgggagtgtgttctccgtggagggggagaacctggaccttgcaatgtccaaggaggaggtggtggctatgataggggatggcccctgtgtggtgaagacgctgacgcggcaccacctgtactgcgagccccccgtggagcagcccctgccacggcaccatgccctccgagaggcacctgactctttgcctgagttcacggtgcagatggggaacttgcgcttctccctgggtcacgtgcagtatgacggcgagagccctggggcttttcctgtggcagcccaggtgggcttgggggtgggcacctctcttctggctctgggtgtcatcatcattgtcctcatgtacaggaggaagagcaagcaggccctgagggactataagaaggttcagatccagctggagaatctggagagcagtgtgcgggaccgctgcaagaaggaattcacagacctcatgactgagatgaccgatctcaccagtgacctcctgggcagcggcatccccttcctcgactacaaggtgtatgcggagaggatcttcttccctgggcaccgcgagtcgcccttgcaccgggacctgggtgtgcctgagagcagacggcccactgtggagcaagggctggggcagctctctaacctgctcaacagcaagctcttcctcaccaagttcatccacacgctggagagccagcgcaccttttcagctcgggaccgtgcctacgtggcatctctgctcaccgtggcactgcatgggaagcttgagtatttcactgacatcctccgcactctgctcagtgacctggttgcccagtatgtggccaagaaccccaagctgatgctgcgcaggacagagactgtggtggagaagctgctcaccaactggatgtccatctgtctgtataccttcgtgagggactccgtaggggagcctctgtacatgctctttcgagggattaagcaccaagtggataaggggccagtggacagtgtgacaggcaaggccaaatacaccttgaacgacaaccgcctgctcagagaggatgtggagtaccgtcccctgaccttgaatgcactattggctgtggggcctggggcaggagaggcccagggcgtgcccgtgaaggtcctagactgtgacaccatctcccaggcaaaggagaagatgctggaccagctttataaaggagtgcctctcacccagcggccagaccctcgcacccttgatgttgagtggcggtctggggtggccgggcacctcattctttctgacgaggatgtcacttctgaggtccagggtctgtggaggcgcctgaacacactgcagcattacaaggtcccagatggagcaactgtggccctcgtcccctgcctcaccaagcatgtgctccgggaaaaccaggattatgtccctggagagcggaccccaatgctggaggatgtagatgaggggggcatccggccctggcacctggtgaagccaagtgatgagccggagccgcccaggcctcggaggggcagccttcggggcggggagcgtgagcgcgccaaggccatccctgagatctacctgacccgcctgctgtccatgaagggcaccctgcagaagttcgtggatgacctgttccaggtgattctcagcaccagccgccccgtgccgctcgctgtgaagtacttctttgacctgctggatgagcaggcccagcagcatggcatctccgaccaggacaccatccacatctggaagaccaacagcttgcctctgaggttctggatcaatataataaaaaacccgcagtttgtgttcgacgtgcaaacatctgataacatggatgcggtgctccttgtcattgcacagaccttcatggacgcctgcaccctggccgaccacaagctgggccgggactccccgatcaacaaacttctgtatgcacgggacattccccggtacaagcggatggtggaaaggtactatgcagacatcagacagactgtcccagccagcgaccaagagatgaactctgtcctggctgaactgtcctggaactactccggagacctcggggcgcgagtggccctgcatgaactctacaagtacatcaacaagtactatgaccagatcatcactgccctggaggaggatggcacggcccagaagatgcagctgggctatcggctccagcagattgcagctgctgtggaaaacaaggtcacagatctataggaacccaggagccacggcctgctgttgcttcagcctggcctgggcagccctggaagctcggaggagaggccaccttcttaggtgcctgtagtgactgacaagcagagttagtggaaggtgactcccagtctcctggtggctctggcctcggccctgctggatccacctcctagacccggggcctcaaggctcatggggtagtacccagcctgctccccgagtccagcgaccctgtgacaccggtctgcagggagttggggactaagggcttccagagagtggctggaagagactccaggcccctggggagactgtactgttcctgaacactggccttggccacactgggattcggagaggaaggaggagagccccatgcttcctgtctgcctcctccaccatccctgacctcagttgagctgcctctggccttgttgctgctgccacatcctaggtctaagagttgaacgcctctcctaggccactacaaactgacccctcagcagggctggctgccacagggctgccctgcctcataggtagccatggtgagggctatctgctgcaggggggtcttggggagagtggtgactccattgacccagcttttcattaaaggataacacactgca

SEQ ID NO: 76950 - DNA, 7558 bp, Homo sapiens
  misc_feature (2652)..(2652): n is a, c, g, or t
gcccggccgacgcggctttgtctcctttgttcccggcggtggcagcgccgcgcgggaggggcgggcagcgggcgcagttttccgcccctcggtctccgggtaacagctgcggctccaccagacccggggagaggccgctgcgcgcggagcccgagcccggagcggccgacgcccgcctcggcgcgcacatcccgcggggcccggccgggtggtgactcccacacgggtcatgctgttgtctcctgatccagccggccctgccaggtgaccatgcctgctctgggcccagctcttctccaggctctctgggccgggtgggtcctcaccctccagccccttccaccaactgcattcactcccaatggcacgtatctgcagcacctggcaagggaccccacctcaggcaccctctacctgggggctaccaacttcctgttccagctgagccctgggctgcagctggaggccacagtgtccaccggccctgtgctagacagcagggactgcctgccacctgtgatgcctgatgagtgcccccaggcccagcctaccaacaacccgaatcagctgctcctggtgagcccaggggccctggtggtatgcgggagcgtgcaccagggggtctgtgaacagcggcgcctggggcagctcgagcagctgctgctgcggccagagcggcctggggacacacaatatgtggctgccaatgatcctgcggtcagcacggtggggctggtagcccagggcttggcaggggagcccctcctgtttgtggggcgaggatacaccagcaggggtgtggggggtggcattccacccatcacaacccgggccctgtggccgcccgacccccaagctgccttctcctatgaggagacagccaagctggcagtgggccgcctctccgagtacagccaccacttcgtgagtgcctttgcacgtggggccagcgcctacttcctgttcctgcggcgggacctgcaggctcagtctagagcttttcgtgcctatgtatctcgagtgtgtctccgggaccagcactactactcctatgtggagttgcctctggcctgcgaaggtggccgctacgggctgatccaggctgcagctgtggccacgtccagggaggtggcgcatggggaggtgctctttgcagctttctcctcggctgcaccccccactgtgggccggcccccatcggcggctgctggggcatctggagcctctgccctctgtgccttccccctggatgaggtggaccggcttgctaatcgcacgcgagatgcctgctacacccgggagggtcgtgctgaggatgggaccgaggtggcctacatcgagtatgatgtcaattctgactgtgcacagctgccagtggacaccctggatgcttatccctgtggctcagaccacacgcccagccccatggccagccgggtcccgctggaagccacaccaattctggagtggccagggattcagctaacagctgtggcagtcaccatggaagatggacacaccatcgctttcctgggtgatagtcaagggcagctgcacagggtctacttgggcccagggagcgatggccacccatactccacacagagcatccagcaggggtctgcagtgagcagagacctcacctttgatgggacctttgagcacctgtatgtcatgacccagagcacacttctgaaggttcctgtggcttcctgtgctcagcacctggactgtgcatcttgccttgctcacagggacccatactgtgggtggtgcgtgctccttggcaggtgcagtcgccgttctgagtgctcgaggggccagggcccagagcagtggctatggagcttccagcctgagctgggctgtctgcaagtggcagccatgagtcctgccaacatcagccgagaggagacgagggaggttttcctatcagtgccagacctgccacccctgtggccaggggagtcatattcctgccactttggggaacatcagagtcctgccctgctgactggttctggtgtgatgtgcccctccccagaccctagtgaggccccagtgctgccgagaggagccgactacgtatccgtgagcgtggagctcagatttggcgctgttgtgatcgccaaaacttccctctctttctatgactgtgtggcggtcactgaactccgcccatctgcgcagtgccaggcctgtgtgagcagccgctgggggtgtaactggtgtgtctggcagcacctgtgcacccacaaggcctcgtgtgatgctgggcccatggttgcaagccatcagagcccgcttgtctccccagaccctcctgcaagaggtggacccagcccctccccacccacagcccccaaagccctggccacccctgctcctgacacccttcccgtggagcctggggctccctccacagccacagcttcggacatctcacctggggctagtccttccctgctcagcccctgggggccatgggcaggttctggctccatatcttcccctggctccacagggtcgcctctccatgaggagccctcccctcccagcccccaaaatggacctggaaccgctgtccctgcccccactgacttcagaccctcagccacacctgaggacctcttggcctccccgctgtcaccntcagaggtagcagcagtgccccctgcagaccctggccccgaggctcttcatcccacagtgcccctggacctgccccctgccactgttcctgccaccactttcccaggggccatgggctccgtgaagcccgccctggactggctcacgagagaaggcggcgagctgcccgaggcggacgagtggacggggggtgacgcacccgccttctccacttccaccctcctctcaggtgatggagactcagcagagcttgagggccctcccgcccccctcatcctcccgtccagcctcgactaccagtatgacacccccgggctctgggagctggaagaggcgaccttgggggcaagctcctgcccctgtgtggagagcgttcagggctccacgttgatgccggtccatgtggagcgggaaatccggctgctaggcaggaacctgcaccttttccaggatggcccaggagacaatgagtgtgtgatggagctggagggcctcgaggtggtggttgaggcccgggtcgagtgtgagccacctccagatacccagtgccatgtcacctgccagcagcaccagctcagctatgaggctctgcagccggagctccgtgtggggctgtttctgcgtcgggccggccgtctgcgtgtggacagtgctgaggggctgcatgtggtactgtatgactgttccgtgggacatggagactgcagccgctgccaaactgccatgccccagtatggctgtgtgtggtgtgagggggagcgtccacgttgtgtgacccgggaggcctgtggtgaggctgaggctgtggccacccagtgcccagcgcccctcatccactcggtggagccactgactgggcctgtagacggaggcacccgtgtcaccatcaggggctccaacctgggccagcatgtgcaggatgtgctgggcatggtcacggtggctggagtgccctgtgctgtggatgcccaggagtacgaggtctccagcagcctcgtgtgcatcaccggggccagtggggaggaggtggccggcgccacagcggtggaggtgccgggaagaggacgtggtgtctcagaacacgactttgcctaccaggatccgaaggtccattccatcttcccggcccgcggccccagagctgggggcacccgtctcaccctgaatggctccaagctcctgactgggcggctggaggacatccgagtggtggttggagaccagccttgtcacttgctgccggagcagcagtcagaacaactgcggtgtgagaccagcccacgccccacgcctgccacgctccctgtggctgtgtggtttggggccacggagcggaggcttcaacgcggacagttcaagtataccttggaccccaacatcacctctgctggccccaccaagagcttcctcagtggaggacgtgagatatgcgtccgtggccagaatctggacgtggtacagacgccaagaatccgggtgaccgtggtctcgagaatgctgcagcccagccaggggcttggacggaggcgtcgcgtggtcccggagacggcatgttcccttggaccctcctgcagtagccagcaatttgaggagccgtgccatgtcaactcctcccagctcatcacgtgccgcacacctgccctcccaggcctgcctgaggacccctgggtccgggtggaatttatccttgacaacctggtctttgactttgcaacactgaaccccacacctttctcctatgaggccgaccccaccctgcagccactcaaccctgaggaccccaccatgccattccggcacaagcctgggagtgtgttctccgtggagggggagaacctggaccttgcaatgtccaaggaggaggtggtggctatgataggggatggcccctgtgtggtgaagacgctgacgcggcaccacctgtactgcgagccccccgtggagcagcccctgccacggcaccatgccctccgagaggcacctgactctttgcctgagttcacggtgcagatggggaacttgcgcttctccctgggtcacgtgcagtatgacggcgagagccctggggcttttcctgtggcagcccaggtgggcttgggggtgggcacctctcttctggctctgggtgtcatcatcattgtcctcatgtacaggaggaagagcaagcaggccctgagggactataagaaggttcagatccagctggagaatctggagagcagtgtgcgggaccgctgcaagaaggaattcacagacctcatgactgagatgaccgatctcaccagtgacctcctgggcagcggcatccccttcctcgactacaaggtgtatgcggagaggatcttcttccctgggcaccgcgagtcgcccttgcaccgggacctgggtgtgcctgagagcagacggcccactgtggagcaagggctggggcagctctctaacctgctcaacagcaagctcttcctcaccaagttcatccacacgctggagagccagcgcaccttttcagctcgggaccgtgcctacgtggcatctctgctcaccgtggcactgcatgggaagcttgagtatttcactgacatcctccgcactctgctcagtgacctggttgcccagtatgtggccaagaaccccaagctgatgctgcgcaggacagagactgtggtggagaagctgctcaccaactggatgtccatctgtctgtataccttcgtgagggactccgtaggggagcctctgtacatgctctttcgagggattaagcaccaagtggataaggggccagtggacagtgtgacaggcaaggccaaatacaccttgaacgacaaccgcctgctcagagaggatgtggagtaccgtcccctgaccttgaatgcactattggctgtggggcctggggcaggagaggcccagggcgtgcccgtgaaggtcctagactgtgacaccatctcccaggcaaaggagaagatgctggaccagctttataaaggagtgcctctcacccagcggccagaccctcgcacccttgatgttgagtggcggtctggggtggccgggcacctcattctttctgacgaggatgtcacttctgaggtccagggtctgtggaggcgcctgaacacactgcagcattacaaggtcccagatggagcaactgtggccctcgtcccctgcctcaccaagcatgtgctccgggaaaaccaggattatgtccctggagagcggaccccaatgctggaggatgtagatgaggggggcatccggccctggcacctggtgaagccaagtgatgagccggagccgcccaggcctcggaggggcagccttcggggcggggagcgtgagcgcgccaaggccatccctgagatctacctgacccgcctgctgtccatgaagggcaccctgcagaagttcgtggatgacctgttccaggtgattctcagcaccagccgccccgtgccgctcgctgtgaagtacttctttgacctgctggatgagcaggcccagcagcatggcatctccgaccaggacaccatccacatctggaagaccaacagcttgcctctgaggttctggatcaatataataaaaaacccgcagtttgtgttcgacgtgcaaacatctgataacatggatgcggtgctccttgtcattgcacagaccttcatggacgcctgcaccctggccgaccacaagctgggccgggactccccgatcaacaaacttctgtatgcacgggacattccccggtacaagcggatggtggaaaggtactatgcagacatcagacagactgtcccagccagcgaccaagagatgaactctgtcctggctgaactgtcctggaactactccggagacctcggggcgcgagtggccctgcatgaactctacaagtacatcaacaagtactatgaccagatcatcactgccctggaggaggatggcacggcccagaagatgcagctgggctatcggctccagcagattgcagctgctgtggaaaacaaggtcacagatctataggaacccaggagccacggcctgctgttgcttcagcctggcctgggcagccctggaagctcggaggagaggccaccttcttaggtgcctgtagtgactgacaagcagagttagtggaaggtgactcccagtctcctggtggctctggcctcggccctgctggatccacctcctagacccggggcctcaaggctcatggggtagtacccagcctgctccccgagtccagcgaccctgtgacaccggtctgcagggagttggggactaagggcttccagagagtggctggaagagactccaggcccctggggagactgtactgttcctgaacactggccttggccacactgggattcggagaggaaggaggagagccccatgcttcctgtctgcctcctccaccatccctgacctcagttgagctgcctctggccttgttgctgctgccacatcctaggtctaagagttgaacgcctctcctaggccactacaaactgacccctcagcagggctggctgccacagggctgccctgcctcataggtagccatggtgagggctatctgctgcaggggggtcttggggagagtggtgactccattgacccagcttttcattaaaggataacacactgcaaaaaaaaataaataaaaaaaaaaaatattcgagacgccccgggccatcgaaaaacactcaaagacaaacagttcgagagcaccagccaaccaagagagacacaagcggacagaccggtacaaggacaacgcgcgacaaaacaagacagaggaaccaccaaatacaaacgccggcggaaaacaagcgatacgaaaaagcaacagagaccaaggaagcgcgaaaaacggaggaagcgacacattaaaccg

SEQ ID NO: 76951 - DNA, 7032 bp, Homo sapiens
gcccggccgacgcggctttgtctcctttgttcccggcggtggcagcgccgcgcgggaggggcgggcagcgggcgcagttttccgcccctcggtctccgggtaacagctgcggctccaccagacccggggagaggccgctgcgcgcggagcccgagcccggagcggccgacgcccgcctcggcgcgcacatcccgcggggcccggccgggtggtgactcccacacgggtcatgctgttgtctcctgatccagccggccctgccaggtgaccatgcctgctctgggcccagctcttctccaggctctctgggccgggtgggtcctcaccctccagccccttccaccaactgcattcactcccaatggcacgtatctgcagcacctggcaagggaccccacctcaggcaccctctacctgggggctaccaacttcctgttccagctgagccctgggctgcagctggaggccacagtgtccaccggccctgtgctagacagcagggactgcctgccacctgtgatgcctgatgagtgcccccaggcccagcctaccaacaacccgaatcagctgctcctggtgagcccaggggccctggtggtatgcgggagcgtgcaccagggggtctgtgaacagcggcgcctggggcagctcgagcagctgctgctgcggccagagcggcctggggacacacaatatgtggctgccaatgatcctgcggtcagcacggtggggctggtagcccagggcttggcaggggagcccctcctgtttgtggggcgaggatacaccagcaggggtgtggggggtggcattccacccatcacaacccgggccctgtggccgcccgacccccaagctgccttctcctatgaggagacagccaagctggcagtgggccgcctctccgagtacagccaccacttcgtgagtgcctttgcacgtggggccagcgcctacttcctgttcctgcggcgggacctgcaggctcagtctagagcttttcgtgcctatgtatctcgagtgtgtctccgggaccagcactactactcctatgtggagttgcctctggcctgcgaaggtggccgctacgggctgatccaggctgcagctgtggccacgtccagggaggtggcgcatggggaggtgctctttgcagctttctcctcggctgcaccccccactgtgggccggcccccatcggcggctgctggggcatctggagcctctgccctctgtgccttccccctggatgaggtggaccggcttgctaatcgcacgcgagatgcctgctacacccgggagggtcgtgctgaggatgggaccgaggtggcctacatcgagtatgatgtcaattctgactgtgcacagctgccagtggacaccctggatgcttatccctgtggctcagaccacacgcccagccccatggccagccgggtcccgctggaagccacaccaattctggagtggccagggattcagctaacagctgtggcagtcaccatggaagatggacacaccatcgctttcctgggtgatagtcaagggcagctgcacagggtctacttgggcccagggagcgatggccacccatactccacacagagcatccagcaggggtctgcagtgagcagagacctcacctttgatgggacctttgagcacctgtatgtcatgacccagagcacacttctgaaggttcctgtggcttcctgtgctcagcacctggactgtgcatcttgccttgctcacagggacccatactgtgggtggtgcgtgctccttggcaggtgcagtcgccgttctgagtgctcgaggggccagggcccagagcagtggctatggagcttccagcctgagctgggctgtctgcaagtggcagccatgagtcctgccaacatcagccgagaggagacgagggaggttttcctatcagtgccagacctgccacccctgtggccaggggagtcatattcctgccactttggggaacatcagagtcctgccctgctgactggttctggtgtgatgtgcccctccccagaccctagtgaggccccagtgctgccgagaggagccgactacgtatccgtgagcgtggagctcagatttggcgctgttgtgatcgccaaaacttccctctctttctatgactgtgtggcggtcactgaactccgcccatctgcgcagtgccaggcctgtgtgagcagccgctgggggtgtaactggtgtgtctggcagcacctgtgcacccacaaggcctcgtgtgatgctgggcccatggttgcaagccatcaggtgatggagactcagcagagcttgagggccctcccgcccccctcatcctcccgtccagcctcgactaccagtatgacacccccgggctctgggagctggaagaggcgaccttgggggcaagctcctgcccctgtgtggagagcgttcagggctccacgttgatgccggtccatgtggagcgggaaatccggctgctaggcaggaacctgcaccttttccaggatggcccaggagacaatgagtgtgtgatggagctggagggcctcgaggtggtggttgaggcccgggtcgagtgtgagccacctccagatacccagtgccatgtcacctgccagcagcaccagctcagctatgaggctctgcagccggagctccgtgtggggctgtttctgcgtcgggccggccgtctgcgtgtggacagtgctgaggggctgcatgtggtactgtatgactgttccgtgggacatggagactgcagccgctgccaaactgccatgccccagtatggctgtgtgtggtgtgagggggagcgtccacgttgtgtgacccgggaggcctgtggtgaggctgaggctgtggccacccagtgcccagcgcccctcatccactcggtggagccactgactgggcctgtagacggaggcacccgtgtcaccatcaggggctccaacctgggccagcatgtgcaggatgtgctgggcatggtcacggtggctggagtgccctgtgctgtggatgcccaggagtacgaggtctccagcagcctcgtgtgcatcaccggggccagtggggaggaggtggccggcgccacagcggtggaggtgccgggaagaggacgtggtgtctcagaacacgactttgcctaccaggatccgaaggtccattccatcttcccggcccgcggccccagagctgggggcacccgtctcaccctgaatggctccaagctcctgactgggcggctggaggacatccgagtggtggttggagaccagccttgtcacttgctgccggagcagcagtcagaacaactgcggtgtgagaccagcccacgccccacgcctgccacgctccctgtggctgtgtggtttggggccacggagcggaggcttcaacgcggacagttcaagtataccttggaccccaacatcacctctgctggccccaccaagagcttcctcagtggaggacgtgagatatgcgtccgtggccagaatctggacgtggtacagacgccaagaatccgggtgaccgtggtctcgagaatgctgcagcccagccaggggcttggacggaggcgtcgcgtggtcccggagacggcatgttcccttggaccctcctgcagtagccagcaatttgaggagccgtgccatgtcaactcctcccagctcatcacgtgccgcacacctgccctcccaggcctgcctgaggacccctgggtccgggtggaatttatccttgacaacctggtctttgactttgcaacactgaaccccacacctttctcctatgaggccgaccccaccctgcagccactcaaccctgaggaccccaccatgccattccggcacaagcctgggagtgtgttctccgtggagggggagaacctggaccttgcaatgtccaaggggtggtggctatgataggggatggcccctgtgtggtgaagacgctgacgcggcaccacctgtactgcgagccccccgtggagcagcccctgccacggcaccatgccctccgagaggcacctgactctttgcctgagttcacggtgcagatggggaacttgcgcttctccctgggtcacgtgcagtatgacggcgagagccctggggcttttcctgtggcagcccaggtgggcttgggggtgggcacctctcttctggctctgggtgtcatcatcattgtcctcatgtacaggaggaagagcaagcaggccctgagggactataagaaggttcagatccagctggagaatctggagagcagtgtgcgggaccgctgcaagaaggaattcacagacctcatgactgagatgaccgatctcaccagtgacctcctgggcagcggcatccccttcctcgactacaaggtgtatgcggagaggatcttcttccctgggcaccgcgagtcgcccttgcaccgggacctgggtgtgcctgagagcagacggcccactgtggagcaagggctggggcagctctctaacctgctcaacagcaagctcttcctcaccaagttcatccacacgctggagagccagcgcaccttttcagctcgggaccgtgcctacgtggcatctctgctcaccgtggcactgcatgggaagcttgagtatttcactgacatcctccgcactctgctcagtgacctggttgcccagtatgtggccaagaaccccaagctgatgctgcgcaggacagagactgtggtggagaagctgctcaccaactggatgtccatctgtctgtataccttcgtgagggactccgtaggggagcctctgtacatgctctttcgagggattaagcaccaagtggataaggggccagtggacagtgtgacaggcaaggccaaatacaccttgaacgacaaccgcctgctcagagaggatgtggagtaccgtcccctgaccttgaatgcactattggctgtggggcctggggcaggagaggcccagggcgtgcccgtgaaggtcctagactgtgacaccatctcccaggcaaaggagaagatgctggaccagctttataaaggagtgcctctcacccagcggccagaccctcgcacccttgatgttggtgagggcgtggagagcccctggggacctgagccactgttgggcctgggctggccccggaccaactctgcagggacaactcatcactcagggtggggaggatgctgggaggcaggcagaagctggctttggaacatctttcttggacagcctctcatctggggagggggtccctgctcttggtctttggagaggttgagtaaggctgccccatgatggaggggctggtgtccctgtggaggaggagatgggctccactatgggaagggtatcttccagccctgcacccagttctgccttgcccttgcagagtggcggtctggggtggccgggcacctcattctttctgacgaggatgtcacttctgaggtccagggtctgtggaggcgcctgaacacactgcagcattacaaggtcccagatggagcaactgtggccctcgtcccctgcctcaccaagcatgtgctccgggaaaaccaggattatgtccctggagagcggaccccaatgctggaggatgtagatgaggggggcatccggccctggcacctggtgaagccaagtgatgagccggagccgcccaggcctcggaggggcagccttcggggcggggagcgtgagcgcgccaaggccatccctgagatctacctgacccgcctgctgtccatgaagggcaccctgcagaagttcgtggatgacctgttccaggtgattctcagcaccagccgccccgtgccgctcgctgtgaagtacttctttgacctgctggatgagcaggcccagcagcatggcatctccgaccaggacaccatccacatctggaagaccaacagcttgcctctgaggttctggatcaatataataaaaaacccgcagtttgtgttcgacgtgcaaacatctgataacatggatgcggtgctccttgtcattgcacagaccttcatggacgcctgcaccctggccgaccacaagctgggccgggactccccgatcaacaaacttctgtatgcacgggacattccccggtacaagcggatggtggaaaggtactatgcagacatcagacagactgtcccagccagcgaccaagagatgaactctgtcctggctgaactgtcctggaactactccggagacctcggggcgcgagtggccctgcatgaactctacaagtacatcaacaagtactatgaccagatcatcactgccctggaggaggatggcacggcccagaagatgcagctgggctatcggctccagcagattgcagctgctgtggaaaacaaggtcacagatctataggaacccaggagccacggcctgctgttgcttcagcctggcctgggcagccctggaagctcggaggagaggccaccttcttaggtgcctgtagtgactgacaagcagagttagtggaaggtgactcccagtctcctggtggctctggcctcggccctgctggatccacctcctagacccggggcctcaaggctcatggggtagtacccagcctgctccccgagtccagcgaccctgtgacaccggtctgcagggagttggggactaagggcttccagagagtggctggaagagactccaggcccctggggagactgtactgttcctgaacactggccttggccacactgggattcggagaggaaggaggagagccccatgcttcctgtctgcctcctccaccatccctgacctcagttgagctgcctctggccttgttgctgctgccacatcctaggtctaagagttgaacgcctctcctaggccactacaaactgacccctcagcagggctggctgccacagggctgccctgcctcataggtagccatggtgagggctatctgctgcaggggggtcttggggagagtggtgactccattgacccagcttttcattaaaggataacacactgca

SEQ ID NO: 76952 - DNA, 5701 bp, Homo sapiens
  misc_feature (1043)..(1043): n is a, c, g, or t
taacatgatagatcgagcgcttacctgcagctctctttgatgggacctttgagcacctgtatgtcatgacccagagcacacttctgaaggttcctgtggcttcctgtgctcagcacctggactgtgcatcttgccttgctcacagggacccatactgtgggtggtgcgtgctccttggcaggtgcagtcgccgttctgagtgctcgaggggccagggcccagagcagtggctatggagcttccagcctgagctgggctgtctgcaagtggcagccatgagtcctgccaacatcagccgagaggagacgagggaggttttcctatcagtgccagacctgccacccctgtggccaggggagtcatattcctgccactttggggaacatcagagtcctgccctgctgactggttctggtgtgatgtgcccctccccagaccctagtgaggccccagtgctgccgagaggagccgactacgtatccgtgagcgtggagctcagatttggcgctgttgtgatcgccaaaacttccctctctttctatgactgtgtggcggtcactgaactccgcccatctgcgcagtgccaggcctgtgtgagcagccgctgggggtgtaactggtgtgtctggcagcacctgtgcacccacaaggcctcgtgtgatgctgggcccatggttgcaagccatcagagcccgcttgtctccccagaccctcctgcaagaggtggacccagcccctccccacccacagcccccaaagccctggccacccctgctcctgacacccttcccgtggagcctggggctccctccacagccacagcttcggacatctcacctggggctagtccttccctgctcagcccctgggggccatgggcaggttctggctccatatcttcccctggctccacagggtcgcctctccatgaggagccctcccctcccagcccccaaaatggacctggaaccgctgtccctgcccccactgacttcagaccctcagccacacctgaggacctcttggcctccccgctgtcaccntcagaggtagcagcagtgccccctgcagaccctggccccgaggctcttcatcccacagtgcccctggacctgccccctgccactgttcctgccaccactttcccaggggccatgggctccgtgaagcccgccctggactggctcacgagagaaggcggcgagctgcccgaggcggacgagtggacggggggtgacgcacccgccttctccacttccaccctcctctcaggtgatggagactcagcagagcttgagggccctcccgcccccctcatcctcccgtccagcctcgactaccagtatgacacccccgggctctgggagctggaagaggcgaccttgggggcaagctcctgcccctgtgtggagagcgttcagggctccacgttgatgccggtccatgtggagcgggaaatccggctgctaggcaggaacctgcaccttttccaggatggcccaggagacaatgagtgtgtgatggagctggagggcctcgaggtggtggttgaggcccgggtcgagtgtgagccacctccagatacccagtgccatgtcacctgccagcagcaccagctcagctatgaggctctgcagccggagctccgtgtggggctgtttctgcgtcgggccggccgtctgcgtgtggacagtgctgaggggctgcatgtggtactgtatgactgttccgtgggacatggagactgcagccgctgccaaactgccatgccccagtatggctgtgtgtggtgtgagggggagcgtccacgttgtgtgacccgggaggcctgtggtgaggctgaggctgtggccacccagtgcccagcgcccctcatccactcggtggagccactgactgggcctgtagacggaggcacccgtgtcaccatcaggggctccaacctgggccagcatgtgcaggatgtgctgggcatggtcacggtggctggagtgccctgtgctgtggatgcccaggagtacgaggtctccagcagcctcgtgtgcatcaccggggccagtggggaggaggtggccggcgccacagcggtggaggtgccgggaagaggacgtggtgtctcagaacacgactttgcctaccaggatccgaaggtccattccatcttcccggcccgcggccccagagctgggggcacccgtctcaccctgaatggctccaagctcctgactgggcggctggaggacatccgagtggtggttggagaccagccttgtcacttgctgccggagcagcagtcagaacaactgcggtgtgagaccagcccacgccccacgcctgccacgctccctgtggctgtgtggtttggggccacggagcggaggcttcaacgcggacagttcaagtataccttggaccccaacatcacctctgctggccccaccaagagcttcctcagtggaggacgtgagatatgcgtccgtggccagaatctggacgtggtacagacgccaagaatccgggtgaccgtggtctcgagaatgctgcagcccagccaggggcttggacggaggcgtcgcgtggtcccggagacggcatgttcccttggaccctcctgcagtagccagcaatttgaggagccgtgccatgtcaactcctcccagctcatcacgtgccgcacacctgccctcccaggcctgcctgaggacccctgggtccgggtggaatttatccttgacaacctggtctttgactttgcaacactgaaccccacacctttctcctatgaggccgaccccaccctgcagccactcaaccctgaggaccccaccatgccattccggcacaagcctgggagtgtgttctccgtggagggggagaacctggaccttgcaatgtccaaggaggaggtggtggctatgataggggatggcccctgtgtggtgaagacgctgacgcggcaccacctgtactgcgagccccccgtggagcagcccctgccacggcaccatgccctccgagaggcacctgactctttgcctgagttcacggtgcagatggggaacttgcgcttctccctgggtcacgtgcagtatgacggcgagagccctggggcttttcctgtggcagcccaggtgggcttgggggtgggcacctctcttctggctctgggtgtcatcatcattgtcctcatgtacaggaggaagagcaagcaggccctgagggactataagaaggttcagatccagctggagaatctggagagcagtgtgcgggaccgctgcaagaaggaattcacagacctcatgactgagatgaccgatctcaccagtgacctcctgggcagcggcatccccttcctcgactacaaggtgtatgcggagaggatcttcttccctgggcaccgcgagtcgcccttgcaccgggacctgggtgtgcctgagagcagacggcccactgtggagcaagggctggggcagctctctaacctgctcaacagcaagctcttcctcaccaagttcatccacacgctggagagccagcgcaccttttcagctcgggaccgtgcctacgtggcatctctgctcaccgtggcactgcatgggaagcttgagtatttcactgacatcctccgcactctgctcagtgacctggttgcccagtatgtggccaagaaccccaagctgatgctgcgcaggacagagactgtggtggagaagctgctcaccaactggatgtccatctgtctgtataccttcgtgagggactccgtaggggagcctctgtacatgctctttcgagggattaagcaccaagtggataaggggccagtggacagtgtgacaggcaaggccaaatacaccttgaacgacaaccgcctgctcagagaggatgtggagtaccgtcccctgaccttgaatgcactattggctgtggggcctggggcaggagaggcccagggcgtgcccgtgaaggtcctagactgtgacaccatctcccaggcaaaggagaagatgctggaccagctttataaaggagtgcctctcacccagcggccagaccctcgcacccttgatgttgagtggcggtctggggtggccgggcacctcattctttctgacgaggatgtcacttctgaggtccagggtctgtggaggcgcctgaacacactgcagcattacaaggtcccagatggagcaactgtggccctcgtcccctgcctcaccaagcatgtgctccgggaaaaccaggattatgtccctggagagcggaccccaatgctggaggatgtagatgaggggggcatccggccctggcacctggtgaagccaagtgatgagccggagccgcccaggcctcggaggggcagccttcggggcggggagcgtgagcgcgccaaggccatccctgagatctacctgacccgcctgctgtccatgaagggcaccctgcagaagttcgtggatgacctgttccaggtgattctcagcaccagccgccccgtgccgctcgctgtgaagtacttctttgacctgctggatgagcaggcccagcagcatggcatctccgaccaggacaccatccacatctggaagaccaacagcttgcctctgaggttctggatcaatataataaaaaacccgcagtttgtgttcgacgtgcaaacatctgataacatggatgcggtgctccttgtcattgcacagaccttcatggacgcctgcaccctggccgaccacaagctgggccgggactccccgatcaacaaacttctgtatgcacgggacattccccggtacaagcggatggtggaaaggtactatgcagacatcagacagactgtcccagccagcgaccaagagatgaactctgtcctggctgaactgtcctggaactactccggagacctcggggcgcgagtggccctgcatgaactctacaagtacatcaacaagtactatgaccagatcatcactgccctggaggaggatggcacggcccagaagatgcagctgggctatcggctccagcagattgcagctgctgtggaaaacaaggtcacagatctataggaacccaggagccacggcctgctgttgcttcagcctggcctgggcagccctggaagctcggaggagaggccaccttcttaggtgcctgtagtgactgacaagcagagttagtggaaggtgactcccagtctcctggtggctctggcctcggccctgctggatccacctcctagacccggggcctcaaggctcatggggtagtacccagcctgctccccgagtccagcgaccctgtgacaccggtctgcagggagttggggactaagggcttccagagagtggctggaagagactccaggcccctggggagactgtactgttcctgaacactggccttggccacactgggattcggagaggaaggaggagagccccatgcttcctgtctgcctcctccaccatccctgacctcagttgagctgcctctggccttgttgctgctgccacatcctaggtctaagagttgaacgcctctcctaggccactacaaactgacccctcagcagggctggctgccacagggctgccctgcctcataggtagccatggtgagggctatctgctgcaggggggtcttggggagagtggtgactccattgacccagcttttcattaaaggataacacactgca

SEQ ID NO: 76953 - DNA, 3368 bp, Homo sapiens
gagctcggtaccctatccgtgtccggggttggggctgagctgacctagccgggactgggctgtgctttaggtccaggtaacataagccatcttacgttacgtaagctcacggtctgtttcagtggaggacgtgagatatgcgtccgtggccagaatctggacgtggtacagacgccaagaatccgggtgaccgtggtctcgagaatgctgcagcccagccaggggcttggacggaggcgtcgcgtggtcccggagacggcatgttcccttggaccctcctgcagtagccagcaatttgaggagccgtgccatgtcaactcctcccagctcatcacgtgccgcacacctgccctcccaggcctgcctgaggacccctgggtccgggtggaatttatccttgacaacctggtctttgactttgcaacactgaaccccacacctttctcctatgaggccgaccccaccctgcagccactcaaccctgaggaccccaccatgccattccggcacaagcctgggagtgtgttctccgtggagggggagaacctggaccttgcaatgtccaaggaggaggtggtggctatgataggggatggcccctgtgtggtgaagacgctgacgcggcaccacctgtactgcgagccccccgtggagcagcccctgccacggcaccatgccctccgagaggcacctgactctttgcctgagttcacggtgcagatggggaacttgcgcttctccctgggtcacgtgcagtatgacggcgagagccctggggcttttcctgtggcagcccaggtgggcttgggggtgggcacctctcttctggctctgggtgtcatcatcattgtcctcatgtacaggaggaagagcaagcaggccctgagggactataagaaggttcagatccagctggagaatctggagagcagtgtgcgggaccgctgcaagaaggaattcacagacctcatgactgagatgaccgatctcaccagtgacctcctgggcagcggcatccccttcctcgactacaaggtgtatgcggagaggatcttcttccctgggcaccgcgagtcgcccttgcaccgggacctgggtgtgcctgagagcagacggcccactgtggagcaagggctggggcagctctctaacctgctcaacagcaagctcttcctcaccaagttcatccacacgctggagagccagcgcaccttttcagctcgggaccgtgcctacgtggcatctctgctcaccgtggcactgcatgggaagcttgagtatttcactgacatcctccgcactctgctcagtgacctggttgcccagtatgtggccaagaaccccaagctgatgctgcgcaggacagagactgtggtggagaagctgctcaccaactggatgtccatctgtctgtataccttcgtgagggactccgtaggggagcctctgtacatgctctttcgagggattaagcaccaagtggataaggggccagtggacagtgtgacaggcaaggccaaatacaccttgaacgacaaccgcctgctcagagaggatgtggagtaccgtcccctgaccttgaatgcactattggctgtggggcctggggcaggagaggcccagggcgtgcccgtgaaggtcctagactgtgacaccatctcccaggcaaaggagaagatgctggaccagctttataaaggagtgcctctcacccagcggccagaccctcgcacccttgatgttgagtggcggtctggggtggccgggcacctcattctttctgacgaggatgtcacttctgaggtccagggtctgtggaggcgcctgaacacactgcagcattacaaggtcccagatggagcaactgtggccctcgtcccctgcctcaccaagcatgtgctccgggaaaaccaggattatgtccctggagagcggaccccaatgctggaggatgtagatgaggggggcatccggccctggcacctggtgaagccaagtgatgagccggagccgcccaggcctcggaggggcagccttcggggcggggagcgtgagcgcgccaaggccatccctgagatctacctgacccgcctgctgtccatgaagggcaccctgcagaagttcgtggatgacctgttccaggtgattctcagcaccagccgccccgtgccgctcgctgtgaagtacttctttgacctgctggatgagcaggcccagcagcatggcatctccgaccaggacaccatccacatctggaagaccaacagcttgcctctgaggttctggatcaatataataaaaaacccgcagtttgtgttcgacgtgcaaacatctgataacatggatgcggtgctccttgtcattgcacagaccttcatggacgcctgcaccctggccgaccacaagctgggccgggactccccgatcaacaaacttctgtatgcacgggacattccccggtacaagcggatggtggaaaggtactatgcagacatcagacagactgtcccagccagcgaccaagagatgaactctgtcctggctgaactgtcctggaactactccggagacctcggggcgcgagtggccctgcatgaactctacaagtacatcaacaagtactatgaccagatcatcactgccctggaggaggatggcacggcccagaagatgcagctgggctatcggctccagcagattgcagctgctgtggaaaacaaggtcacagatctataggaacccaggagccacggcctgctgttgcttcagcctggcctgggcagccctggaagctcggaggagaggccaccttcttaggtgcctgtagtgactgacaagcagagttagtggaaggtgactcccagtctcctggtggctctggcctcggccctgctggatccacctcctagacccggggcctcaaggctcatggggtagtacccagcctgctccccgagtccagcgaccctgtgacaccggtctgcagggagttggggactaagggcttccagagagtggctggaagagactccaggcccctggggagactgtactgttcctgaacactggccttggccacactgggattcggagaggaaggaggagagccccatgcttcctgtctgcctcctccaccatccctgacctcagttgagctgcctctggccttgttgctgctgccacatcctaggtctaagagttgaacgcctctcctaggccactacaaactgacccctcagcagggctggctgccacagggctgccctgcctcataggtagccatggtgagggctatctgctgcaggggggtcttggggagagtggtgactccattgacccagcttttcattaaaggataacacactgca

SEQ ID NO: 76954 - DNA, 2996 bp, Homo sapiens
gccagatgtggctgggctggggcaggtcgtgggatctggctggactgggaagggacagaccgggccaggagtcaggaaacattctctgtaaatggccagagagtaaatattttcgctttgcaggccaagtggtctctgttcaacaactcagctttgccactgtggcacaaaggcagccagggacgacatggaaacacatgaaagtggctgtgttctaacaaatctttataaaaataggttgtgggatggatttggcctggttgtggttggctgatctctaggctaaactgtgctgggctagacggggcatgggtgtgtgtgacttgcttgggacgggacaggctgaatcgtactgggctaggcttgagcttggctggcatggctgcattggactgtgctggatgaggccggggtgtgcctggggattgtcaggcaggcctgggcgagtaggactcatctggccatcctctcctgaccctggggctgagcaggaggaagagcaagcaggccctgagggactataagaaggttcagatccagctggagaatctggagagcagtgtgcgggaccgctgcaagaaggaattcacagacctcatgactgagatgaccgatctcaccagtgacctcctgggcagcggcatccccttcctcgactacaaggtgtatgcggagaggatcttcttccctgggcaccgcgagtcgcccttgcaccgggacctgggtgtgcctgagagcagacggcccactgtggagcaagggctggggcagctctctaacctgctcaacagcaagctcttcctcaccaagttcatccacacgctggagagccagcgcaccttttcagctcgggaccgtgcctacgtggcatctctgctcaccgtggcactgcatgggaagcttgagtatttcactgacatcctccgcactctgctcagtgacctggttgcccagtatgtggccaagaaccccaagctgatgctgcgcaggacagagactgtggtggagaagctgctcaccaactggatgtccatctgtctgtataccttcgtgagggactccgtaggggagcctctgtacatgctctttcgagggattaagcaccaagtggataaggggccagtggacagtgtgacaggcaaggccaaatacaccttgaacgacaaccgcctgctcagagaggatgtggagtaccgtcccctgaccttgaatgcactattggctgtggggcctggggcaggagaggcccagggcgtgcccgtgaaggtcctagactgtgacaccatctcccaggcaaaggagaagatgctggaccagctttataaaggagtgcctctcacccagcggccagaccctcgcacccttgatgttgagtggcggtctggggtggccgggcacctcattctttctgacgaggatgtcacttctgaggtccagggtctgtggaggcgcctgaacacactgcagcattacaaggtcccagatggagcaactgtggccctcgtcccctgcctcaccaagcatgtgctccgggaaaaccaggattatgtccctggagagcggaccccaatgctggaggatgtagatgaggggggcatccggccctggcacctggtgaagccaagtgatgagccggagccgcccaggcctcggaggggcagccttcggggcggggagcgtgagcgcgccaaggccatccctgagatctacctgacccgcctgctgtccatgaagggcaccctgcagaagttcgtggatgacctgttccaggtgattctcagcaccagccgccccgtgccgctcgctgtgaagtacttctttgacctgctggatgagcaggcccagcagcatggcatctccgaccaggacaccatccacatctggaagaccaacagcttgcctctgaggttctggatcaatataataaaaaacccgcagtttgtgttcgacgtgcaaacatctgataacatggatgcggtgctccttgtcattgcacagaccttcatggacgcctgcaccctggccgaccacaagctgggccgggactccccgatcaacaaacttctgtatgcacgggacattccccggtacaagcggatggtggaaaggtactatgcagacatcagacagactgtcccagccagcgaccaagagatgaactctgtcctggctgaactgtcctggaactactccggagacctcggggcgcgagtggccctgcatgaactctacaagtacatcaacaagtactatgaccagatcatcactgccctggaggaggatggcacggcccagaagatgcagctgggctatcggctccagcagattgcagctgctgtggaaaacaaggtcacagatctataggaacccaggagccacggcctgctgttgcttcagcctggcctgggcagccctggaagctcggaggagaggccaccttcttaggtgcctgtagtgactgacaagcagagttagtggaaggtgactcccagtctcctggtggctctggcctcggccctgctggatccacctcctagacccggggcctcaaggctcatggggtagtacccagcctgctccccgagtccagcgaccctgtgacaccggtctgcagggagttggggactaagggcttccagagagtggctggaagagactccaggcccctggggagactgtactgttcctgaacactggccttggccacactgggattcggagaggaaggaggagagccccatgcttcctgtctgcctcctccaccatccctgacctcagttgagctgcctctggccttgttgctgctgccacatcctaggtctaagagttgaacgcctctcctaggccactacaaactgacccctcagcagggctggctgccacagggctgccctgcctcataggtagccatggtgagggctatctgctgcaggggggtcttggggagagtggtgactccattgacccagcttttcattaaaggataacacactgca

SEQ ID NO: 76955 - DNA, 2530 bp, Homo sapiens
ccccttgctagagctcaccttggcagagctccccttgccagagctccccttggagctccccttggtagatccagctggagaatctggagagcagtgtgcgggaccgctgcaagaaggaattcacagacctcatgactgagatgaccgatctcaccagtgacctcctgggcagcggcatccccttcctcgactacaaggtgtatgcggagaggatcttcttccctgggcaccgcgagtcgcccttgcaccgggacctgggtgtgcctgagagcagacggcccactgtggagcaagggctggggcagctctctaacctgctcaacagcaagctcttcctcaccaagttcatccacacgctggagagccagcgcaccttttcagctcgggaccgtgcctacgtggcatctctgctcaccgtggcactgcatgggaagcttgagtatttcactgacatcctccgcactctgctcagtgacctggttgcccagtatgtggccaagaaccccaagctgatgctgcgcaggacagagactgtggtggagaagctgctcaccaactggatgtccatctgtctgtataccttcgtgagggactccgtaggggagcctctgtacatgctctttcgagggattaagcaccaagtggataaggggccagtggacagtgtgacaggcaaggccaaatacaccttgaacgacaaccgcctgctcagagaggatgtggagtaccgtcccctgaccttgaatgcactattggctgtggggcctggggcaggagaggcccagggcgtgcccgtgaaggtcctagactgtgacaccatctcccaggcaaaggagaagatgctggaccagctttataaaggagtgcctctcacccagcggccagaccctcgcacccttgatgttgagtggcggtctggggtggccgggcacctcattctttctgacgaggatgtcacttctgaggtccagggtctgtggaggcgcctgaacacactgcagcattacaaggtcccagatggagcaactgtggccctcgtcccctgcctcaccaagcatgtgctccgggaaaaccaggattatgtccctggagagcggaccccaatgctggaggatgtagatgaggggggcatccggccctggcacctggtgaagccaagtgatgagccggagccgcccaggcctcggaggggcagccttcggggcggggagcgtgagcgcgccaaggccatccctgagatctacctgacccgcctgctgtccatgaagggcaccctgcagaagttcgtggatgacctgttccaggtgattctcagcaccagccgccccgtgccgctcgctgtgaagtacttctttgacctgctggatgagcaggcccagcagcatggcatctccgaccaggacaccatccacatctggaagaccaacagcttgcctctgaggttctggatcaatataataaaaaacccgcagtttgtgttcgacgtgcaaacatctgataacatggatgcggtgctccttgtcattgcacagaccttcatggacgcctgcaccctggccgaccacaagctgggccgggactccccgatcaacaaacttctgtatgcacgggacattccccggtacaagcggatggtggaaaggtactatgcagacatcagacagactgtcccagccagcgaccaagagatgaactctgtcctggctgaactgtcctggaactactccggagacctcggggcgcgagtggccctgcatgaactctacaagtacatcaacaagtactatgaccagatcatcactgccctggaggaggatggcacggcccagaagatgcagctgggctatcggctccagcagattgcagctgctgtggaaaacaaggtcacagatctataggaacccaggagccacggcctgctgttgcttcagcctggcctgggcagccctggaagctcggaggagaggccaccttcttaggtgcctgtagtgactgacaagcagagttagtggaaggtgactcccagtctcctggtggctctggcctcggccctgctggatccacctcctagacccggggcctcaaggctcatggggtagtacccagcctgctccccgagtccagcgaccctgtgacaccggtctgcagggagttggggactaagggcttccagagagtggctggaagagactccaggcccctggggagactgtactgttcctgaacactggccttggccacactgggattcggagaggaaggaggagagccccatgcttcctgtctgcctcctccaccatccctgacctcagttgagctgcctctggccttgttgctgctgccacatcctaggtctaagagttgaacgcctctcctaggccactacaaactgacccctcagcagggctggctgccacagggctgccctgcctcataggtagccatggtgagggctatctgctgcaggggggtcttggggagagtggtgactccattgacccagcttttcattaaaggataacacactgca

SEQ ID NO: 76956 - DNA, 6016 bp, Homo sapiens
gcccggccgacgcggctttgtctcctttgttcccggcggtggcagcgccgcgcgggaggggcgggcagcgggcgcagttttccgcccctcggtctccgggtaacagctgcggctccaccagacccggggagaggccgctgcgcgcggagcccgagcccggagcggccgacgcccgcctcggcgcgcacatcccgcggggcccggccgggtggtgactcccacacgggtcatgctgttgtctcctgatccagccggccctgccaggtgaccatgcctgctctgggcccagctcttctccaggctctctgggccgggtgggtcctcaccctccagccccttccaccaactgcattcactcccaatggcacgtatctgcagcacctggcaagggaccccacctcaggcaccctctacctgggggctaccaacttcctgttccagctgagccctgggctgcagctggaggccacagtgtccaccggccctgtgctagacagcagggactgcctgccacctgtgatgcctgatgagtgcccccaggcccagcctaccaacaacccgaatcagctgctcctggtgagcccaggggccctggtggtatgcgggagcgtgcaccagggggtctgtgaacagcggcgcctggggcagctcgagcagctgctgctgcggccagagcggcctggggacacacaatatgtggctgccaatgatcctgcggtcagcacggtggggctggtagcccagggcttggcaggggagcccctcctgtttgtggggcgaggatacaccagcaggggtgtggggggtggcattccacccatcacaacccgggccctgtggccgcccgacccccaagctgccttctcctatgaggagacagccaagctggcagtgggccgcctctccgagtacagccaccacttcgtgagtgcctttgcacgtggggccagcgcctacttcctgttcctgcggcgggacctgcaggctcagtctagagcttttcgtgcctatgtatctcgagtgtgtctccgggaccagcactactactcctatgtggagttgcctctggcctgcgaaggtggccgctacgggctgatccaggctgcagctgtggccacgtccagggaggtggcgcatggggaggtgctctttgcagctttctcctcggctgcaccccccactgtgggccggcccccatcggcggctgctggggcatctggagcctctgccctctgtgccttccccctggatgaggtggaccggcttgctaatcgcacgcgagatgcctgctacacccgggagggtcgtgctgaggatgggaccgaggtggcctacatcgagtatgatgtcaattctgactgtgcacagctgccagtggacaccctggatgcttatccctgtggctcagaccacacgcccagccccatggccagccgggtcccgctggaagccacaccaattctggagtggccagggattcagctaacagctgtggcagtcaccatggaagatggacacaccatcgctttcctgggtgatagtcaagggcagctgcacagggtctacttgggcccagggagcgatggccacccatactccacacagagcatccagcaggggtctgcagtgagcagagacctcacctttgatgggacctttgagcacctgtatgtcatgacccagagcacacttctgaaggttcctgtggcttcctgtgctcagcacctggactgtgcatcttgccttgctcacagggacccatactgtgggtggtgcgtgctccttggcaggtgcagtcgccgttctgagtgctcgaggggccagggcccagagcagtggctatggagcttccagcctgagctgggctgtctgcaagtggcagccatgagtcctgccaacatcagccgagaggagacgagggaggttttcctatcagtgccagacctgccacccctgtggccaggggagtcatattcctgccactttggggaacatcagagtcctgccctgctgactggttctggtgtgatgtgcccctccccagaccctagtgaggccccagtgctgccgagaggagccgactacgtatccgtgagcgtggagctcagatttggcgctgttgtgatcgccaaaacttccctctctttctatgactgtgtggcggtcactgaactccgcccatctgcgcagtgccaggcctgtgtgagcagccgctgggggtgtaactggtgtgtctggcagcacctgtgcacccacaaggcctcgtgtgatgctgggcccatggttgcaagccatcaggtgatggagactcagcagagcttgagggccctcccgcccccctcatcctcccgtccagcctcgactaccagtatgacacccccgggctctgggagctggaagaggcgaccttgggggcaagctcctgcccctgtgtggagagcgttcagggctccacgttgatgccggtccatgtggagcgggaaatccggctgctaggcaggaacctgcaccttttccaggatggcccaggagacaatgagtgtgtgatggagctggagggcctcgaggtggtggttgaggcccgggtcgagtgtgagccacctccagatacccagtgccatgtcacctgccagcagcaccagctcagctatgaggctctgcagccggagctccgtgtggggctgtttctgcgtcgggccggccgtctgcgtgtggacagtgctgaggggctgcatgtggtactgtatgactgttccgtgggacatggagactgcagccgctgccaaactgccatgccccagtatggctgtgtgtggtgtgagggggagcgtccacgttgtgtgacccgggaggcctgtggtgaggctgaggctgtggccacccagtgcccagcgcccctcatccactcggtggagccactgactgggcctgtagacggaggcacccgtgtcaccatcaggggctccaacctgggccagcatgtgcaggatgtgctgggcatggtcacggtggctggagtgccctgtgctgtggatgcccaggagtacgaggtctccagcagcctcgtgtgcatcaccggggccagtggggaggaggtggccggcgccacagcggtggaggtgccgggaagaggacgtggtgtctcagaacacgactttgcctaccaggatccgaaggtccattccatcttcccggcccgcggccccagagctgggggcacccgtctcaccctgaatggctccaagctcctgactgggcggctggaggacatccgagtggtggttggagaccagccttgtcacttgctgccggagcagcagtcagaacaactgcggtgtgagaccagcccacgccccacgcctgccacgctccctgtggctgtgtggtttggggccacggagcggaggcttcaacgcggacagttcaagtataccttggaccccaacatcacctctgctggccccaccaagagcttcctcagtggaggacgtgagatatgcgtccgtggccagaatctggacgtggtacagacgccaagaatccgggtgaccgtggtctcgagaatgctgcagcccagccaggggcttggacggaggcgtcgcgtggtcccggagacggcatgttcccttggaccctcctgcagtagccagcaatttgaggagccgtgccatgtcaactcctcccagctcatcacgtgccgcacacctgccctcccaggcctgcctgaggacccctgggtccgggtggaatttatccttgacaacctggtctttgactttgcaacactgaaccccacacctttctcctatgaggccgaccccaccctgcagccactcaaccctgaggaccccaccatgccattccggcacaagcctgggagtgtgttctccgtggagggggagaacctggaccttgcaatgtccaaggggtggtggctatgataggggatggcccctgtgtggtgaagacgctgacgcggcaccacctgtactgcgagccccccgtggagcagcccctgccacggcaccatgccctccgagaggcacctgactctttgcctgagttcacggtgcagatggggaacttgcgcttctccctgggtcacgtgcagtatgacggcgagagccctggggcttttcctgtggcagcccaggtgggcttgggggtgggcacctctcttctggctctgggtgtcatcatcattgtcctcatgtacaggaggaagagcaagcaggccctgagggactataagaaggttcagatccagctggagaatctggagagcagtgtgcgggaccgctgcaagaaggaattcacagacctcatgactgagatgaccgatctcaccagtgacctcctgggcagcggcatccccttcctcgactacaaggtgtatgcggagaggatcttcttccctgggcaccgcgagtcgcccttgcaccgggacctgggtgtgcctgagagcagacggcccactgtggagcaagggctggggcagctctctaacctgctcaacagcaagctcttcctcaccaagttcatccacacgctggagagccagcgcaccttttcagctcgggaccgtgcctacgtggcatctctgctcaccgtggcactgcatgggaagcttgagtatttcactgacatcctccgcactctgctcagtgacctggttgcccagtatgtggccaagaaccccaagctgatgctgcgcaggacagagactgtggtggagaagctgctcaccaactggatgtccatctgtctgtataccttcgtgagggactccgtaggggagcctctgtacatgctctttcgagggattaagcaccaagtggataaggggccagtggacagtgtgacaggcaaggccaaatacaccttgaacgacaaccgcctgctcagagaggatgtggagtaccgtcccctgaccttgaatgcactattggctgtggggcctggggcaggagaggcccagggcgtgcccgtgaaggtcctagactgtgacaccatctcccaggcaaaggagaagatgctggaccagctttataaaggagtgcctctcacccagcggccagaccctcgcacccttgatgttgagtggcggtctggggtggccgggcacctcattctttctgacgaggatgtcacttctgaggtccagggtctgtggaggcgcctgaacacactgcagcattacaaggtcccagatggagcaactgtggccctcgtcccctgcctcaccaagcatgtgctccgggaaaaccaggattatgtccctggagagcggaccccaatgctggaggatgtagatgaggggggcatccggccctggcacctggtgaagccaagtgatgagccggagccgcccaggcctcggaggggcagccttcggggcggggagcgtgagcgcgccaaggccatccctgagatctacctgacccgcctgctgtccatgaagggcaccctgcagaagttcgtggatgacctgttccaggtgattctcagcaccagccgccccgtgccgctcgctgtgaagtacttctttgacctgctggatgagcaggcccagcagcatggcatctccgaccaggacaccatccacatctggaagaccaacagcttgcctctgaggttctggatcaatataataaaaaacccgcagtttgtgttcgacgtgcaaacatctgataacatggatgcggtgctccttgtcattgcacagaccttcatggacgcctgcaccctggccgaccacaagctgggccgggactccccgatcaacaaacttctgtatgcacgggacattccccggtacaagcggatggtggaaaggtactatgcagacatcagacagactgtcccagccagcgaccaagagatgaactctgtcctggctgaactgtcctgggtaaggcctccctctgcttcttgggttgggcataggcctcctgccacaacggtccttcccccttcacactgcccctttgcagggaagcccttgggaacctcagca

SEQ ID NO: 76957 - DNA, 1467 bp, Homo sapiens
ggaggggtgacagctgtgggctcttggcacagggaccccaatgctggaggatgtagatgaggggggcatccggccctggcacctggtgaagccaagtgatgagccggagccgcccaggcctcggaggggcagccttcggggcggggagcgtgagcgcgccaaggccatccctgagatctacctgacccgcctgctgtccatgaagggcaccctgcagaagttcgtggatgacctgttccaggtgattctcagcaccagccgccccgtgccgctcgctgtgaagtacttctttgacctgctggatgagcaggcccagcagcatggcatctccgaccaggacaccatccacatctggaagaccaacagcttgcctctgaggttctggatcaatataataaaaaacccgcagtttgtgttcgacgtgcaaacatctgataacatggatgcggtgctccttgtcattgcacagaccttcatggacgcctgcaccctggccgaccacaagctgggccgggactccccgatcaacaaacttctgtatgcacgggacattccccggtacaagcggatggtggaaaggtactatgcagacatcagacagactgtcccagccagcgaccaagagatgaactctgtcctggctgaactgtcctggaactactccggagacctcggggcgcgagtggccctgcatgaactctacaagtacatcaacaagtactatgaccagatcatcactgccctggaggaggatggcacggcccagaagatgcagctgggctatcggctccagcagattgcagctgctgtggaaaacaaggtcacagatctataggaacccaggagccacggcctgctgttgcttcagcctggcctgggcagccctggaagctcggaggagaggccaccttcttaggtgcctgtagtgactgacaagcagagttagtggaaggtgactcccagtctcctggtggctctggcctcggccctgctggatccacctcctagacccggggcctcaaggctcatggggtagtacccagcctgctccccgagtccagcgaccctgtgacaccggtctgcagggagttggggactaagggcttccagagagtggctggaagagactccaggcccctggggagactgtactgttcctgaacactggccttggccacactgggattcggagaggaaggaggagagccccatgcttcctgtctgcctcctccaccatccctgacctcagttgagctgcctctggccttgttgctgctgccacatcctaggtctaagagttgaacgcctctcctaggccactacaaactgacccctcagcagggctggctgccacagggctgccctgcctcataggtagccatggtgagggctatctgctgcaggggggtcttggggagagtggtgactccattgacccagcttttcattaaaggataacacactgca

SEQ ID NO: 76958 - DNA, 1079 bp, Homo sapiens
aaccccagaccttgctgaagcaggtagacctgggctgtcttcctaccaaggaggcccccttgctctaccctgttctgtccccatctggcacacctggcctggggtccctgggccatggaggggactctgcttcccactgtagtgcccatcccattctctacctctcaggtccccttctcccccagcccttccctggggtcctgggctgcctcctgtggctctctgcacccctcgtctctctcacctttcatttggcctcttccctagaactactccggagacctcggggcgcgagtggccctgcatgaactctacaagtacatcaacaagtactatgaccagatcatcactgccctggaggaggatggcacggcccagaagatgcagctgggctatcggctccagcagattgcagctgctgtggaaaacaaggtcacagatctataggaacccaggagccacggcctgctgttgcttcagcctggcctgggcagccctggaagctcggaggagaggccaccttcttaggtgcctgtagtgactgacaagcagagttagtggaaggtgactcccagtctcctggtggctctggcctcggccctgctggatccacctcctagacccggggcctcaaggctcatggggtagtacccagcctgctccccgagtccagcgaccctgtgacaccggtctgcagggagttggggactaagggcttccagagagtggctggaagagactccaggcccctggggagactgtactgttcctgaacactggccttggccacactgggattcggagaggaaggaggagagccccatgcttcctgtctgcctcctccaccatccctgacctcagttgagctgcctctggccttgttgctgctgccacatcctaggtctaagagttgaacgcctctcctaggccactacaaactgacccctcagcagggctggctgccacagggctgccctgcctcataggtagccatggtgagggctatctgctgcaggggggtcttggggagagtggtgactccattgacccagcttttcattaaaggataacacactgca

SEQ ID NO: 76959 - DNA, 4302 bp, Homo sapiens
  misc_feature (2652)..(2652): n is a, c, g, or t
gcccggccgacgcggctttgtctcctttgttcccggcggtggcagcgccgcgcgggaggggcgggcagcgggcgcagttttccgcccctcggtctccgggtaacagctgcggctccaccagacccggggagaggccgctgcgcgcggagcccgagcccggagcggccgacgcccgcctcggcgcgcacatcccgcggggcccggccgggtggtgactcccacacgggtcatgctgttgtctcctgatccagccggccctgccaggtgaccatgcctgctctgggcccagctcttctccaggctctctgggccgggtgggtcctcaccctccagccccttccaccaactgcattcactcccaatggcacgtatctgcagcacctggcaagggaccccacctcaggcaccctctacctgggggctaccaacttcctgttccagctgagccctgggctgcagctggaggccacagtgtccaccggccctgtgctagacagcagggactgcctgccacctgtgatgcctgatgagtgcccccaggcccagcctaccaacaacccgaatcagctgctcctggtgagcccaggggccctggtggtatgcgggagcgtgcaccagggggtctgtgaacagcggcgcctggggcagctcgagcagctgctgctgcggccagagcggcctggggacacacaatatgtggctgccaatgatcctgcggtcagcacggtggggctggtagcccagggcttggcaggggagcccctcctgtttgtggggcgaggatacaccagcaggggtgtggggggtggcattccacccatcacaacccgggccctgtggccgcccgacccccaagctgccttctcctatgaggagacagccaagctggcagtgggccgcctctccgagtacagccaccacttcgtgagtgcctttgcacgtggggccagcgcctacttcctgttcctgcggcgggacctgcaggctcagtctagagcttttcgtgcctatgtatctcgagtgtgtctccgggaccagcactactactcctatgtggagttgcctctggcctgcgaaggtggccgctacgggctgatccaggctgcagctgtggccacgtccagggaggtggcgcatggggaggtgctctttgcagctttctcctcggctgcaccccccactgtgggccggcccccatcggcggctgctggggcatctggagcctctgccctctgtgccttccccctggatgaggtggaccggcttgctaatcgcacgcgagatgcctgctacacccgggagggtcgtgctgaggatgggaccgaggtggcctacatcgagtatgatgtcaattctgactgtgcacagctgccagtggacaccctggatgcttatccctgtggctcagaccacacgcccagccccatggccagccgggtcccgctggaagccacaccaattctggagtggccagggattcagctaacagctgtggcagtcaccatggaagatggacacaccatcgctttcctgggtgatagtcaagggcagctgcacagggtctacttgggcccagggagcgatggccacccatactccacacagagcatccagcaggggtctgcagtgagcagagacctcacctttgatgggacctttgagcacctgtatgtcatgacccagagcacacttctgaaggttcctgtggcttcctgtgctcagcacctggactgtgcatcttgccttgctcacagggacccatactgtgggtggtgcgtgctccttggcaggtgcagtcgccgttctgagtgctcgaggggccagggcccagagcagtggctatggagcttccagcctgagctgggctgtctgcaagtggcagccatgagtcctgccaacatcagccgagaggagacgagggaggttttcctatcagtgccagacctgccacccctgtggccaggggagtcatattcctgccactttggggaacatcagagtcctgccctgctgactggttctggtgtgatgtgcccctccccagaccctagtgaggccccagtgctgccgagaggagccgactacgtatccgtgagcgtggagctcagatttggcgctgttgtgatcgccaaaacttccctctctttctatgactgtgtggcggtcactgaactccgcccatctgcgcagtgccaggcctgtgtgagcagccgctgggggtgtaactggtgtgtctggcagcacctgtgcacccacaaggcctcgtgtgatgctgggcccatggttgcaagccatcagagcccgcttgtctccccagaccctcctgcaagaggtggacccagcccctccccacccacagcccccaaagccctggccacccctgctcctgacacccttcccgtggagcctggggctccctccacagccacagcttcggacatctcacctggggctagtccttccctgctcagcccctgggggccatgggcaggttctggctccatatcttcccctggctccacagggtcgcctctccatgaggagccctcccctcccagcccccaaaatggacctggaaccgctgtccctgcccccactgacttcagaccctcagccacacctgaggacctcttggcctccccgctgtcaccntcagaggtagcagcagtgccccctgcagaccctggccccgaggctcttcatcccacagtgcccctggacctgccccctgccactgttcctgccaccactttcccaggggccatgggctccgtgaagcccgccctggactggctcacgagagaaggcggcgagctgcccgaggcggacgagtggacggggggtgacgcacccgccttctccacttccaccctcctctcaggtgatggagactcagcagagcttgagggccctcccgcccccctcatcctcccgtccagcctcgactaccagtatgacacccccgggctctgggagctggaagaggcgaccttgggggcaagctcctgcccctgtgtggagagcgttcagggctccacgttgatgccggtccatgtggagcgggaaatccggctgctaggcaggaacctgcaccttttccaggatggcccaggagacaatgagtgtgtgatggagctggagggcctcgaggtggtggttgaggcccgggtcgagtgtgagccacctccagatacccagtgccatgtcacctgccagcagcaccagctcagctatgaggctctgcagccggagctccgtgtggggctgtttctgcgtcgggccggccgtctgcgtgtggacagtgctgaggggctgcatgtggtactgtatgactgttccgtgggacatggagactgcagccgctgccaaactgccatgccccagtatggctgtgtgtggtgtgagggggagcgtccacgttgtgtgacccgggaggcctgtggtgaggctgaggctgtggccacccagtgcccagcgcccctcatccactcggtggagccactgactgggcctgtagacggaggcacccgtgtcaccatcaggggctccaacctgggccagcatgtgcaggatgtgctgggcatggtcacggtggctggagtgccctgtgctgtggatgcccaggagtacgaggtctccagcagcctcgtgtgcatcaccggggccagtggggaggaggtggccggcgccacagcggtggaggtgccgggaagaggacgtggtgtctcagaacacgactttgcctaccaggatccgaaggtccattccatcttcccggcccgcggccccagagctgggggcacccgtctcaccctgaatggctccaagctcctgactgggcggctggaggacatccgagtggtggttggagaccagccttgtcacttgctgccggagcagcagtcagaacaactgcggtgtgagaccagcccacgccccacgcctgccacgctccctgtggctgtgtggtttggggccacggagcggaggcttcaacgcggacagttcaagtataccttggaccccaacatcacctctgctggccccaccaagagcttcctcagtggaggacgtgagatatgcgtccgtggccagaatctggacgtggtacagacgccaagaatccgggtgaccgtggtctcgagaatgctgcagcccagccaggggcttggacggaggcgtcgcgtggtcccggagacggcatgttcccttggaccctcctgcagtagccagcaatttagagagccgtgccatgcaactcctcccagctcaccacgccacccctgctggtaccgagctcaa

SEQ ID NO: 76960 - DNA, 2548 bp, Homo sapiens
gcccggccgacgcggctttgtctcctttgttcccggcggtggcagcgccgcgcgggaggggcgggcagcgggcgcagttttccgcccctcggtctccgggtaacagctgcggctccaccagacccggggagaggccgctgcgcgcggagcccgagcccggagcggccgacgcccgcctcggcgcgcacatcccgcggggcccggccgggtggtgactcccacacgggtcatgctgttgtctcctgatccagccggccctgccaggtgaccatgcctgctctgggcccagctcttctccaggctctctgggccgggtgggtcctcaccctccagccccttccaccaactgcattcactcccaatggcacgtatctgcagcacctggcaagggaccccacctcaggcaccctctacctgggggctaccaacttcctgttccagctgagccctgggctgcagctggaggccacagtgtccaccggccctgtgctagacagcagggactgcctgccacctgtgatgcctgatgagtgcccccaggcccagcctaccaacaacccgaatcagctgctcctggtgagcccaggggccctggtggtatgcgggagcgtgcaccagggggtctgtgaacagcggcgcctggggcagctcgagcagctgctgctgcggccagagcggcctggggacacacaatatgtggctgccaatgatcctgcggtcagcacggtggggctggtagcccagggcttggcaggggagcccctcctgtttgtggggcgaggatacaccagcaggggtgtggggggtggcattccacccatcacaacccgggccctgtggccgcccgacccccaagctgccttctcctatgaggagacagccaagctggcagtgggccgcctctccgagtacagccaccacttcgtgagtgcctttgcacgtggggccagcgcctacttcctgttcctgcggcgggacctgcaggctcagtctagagcttttcgtgcctatgtatctcgagtgtgtctccgggaccagcactactactcctatgtggagttgcctctggcctgcgaaggtggccgctacgggctgatccaggctgcagctgtggccacgtccagggaggtggcgcatggggaggtgctctttgcagctttctcctcggctgcaccccccactgtgggccggcccccatcggcggctgctggggcatctggagcctctgccctctgtgccttccccctggatgaggtggaccggcttgctaatcgcacgcgagatgcctgctacacccgggagggtcgtgctgaggatgggaccgaggtggcctacatcgagtatgatgtcaattctgactgtgcacagctgccagtggacaccctggatgcttatccctgtggctcagaccacacgcccagccccatggccagccgggtcccgctggaagccacaccaattctggagtggccagggattcagctaacagctgtggcagtcaccatggaagatggacacaccatcgctttcctgggtgatagtcaagggcagctgcacagggtctacttgggcccagggagcgatggccacccatactccacacagagcatccagcaggggtctgcagtgagcagagacctcacctttgatgggacctttgagcacctgtatgtcatgacccagagcacacttctgaaggttcctgtggcttcctgtgctcagcacctggactgtgcatcttgccttgctcacagggacccatactgtgggtggtgcgtgctccttggcaggtgcagtcgccgttctgagtgctcgaggggccagggcccagagcagtggctatggagcttccagcctgagctgggctgtctgcaagtggcagccatgagtcctgccaacatcagccgagaggagacgagggaggttttcctatcagtgccagacctgccacccctgtggccaggggagtcatattcctgccactttggggaacatcagagtcctgccctgctgactggttctggtgtgatgtgcccctccccagaccctagtgaggccccagtgctgccgagaggagccgactacgtatccgtgagcgtggagctcagatttggcgctgttgtgatcgccaaaacttccctctctttctatgactgtgtggcggtcactgaactccgcccatctgcgcagtgccaggcctgtgtgagcagccgctgggggtgtaactggtgtgtctggcagcacctgtgcacccacaaggcctcgtgtgatgctgggcccatggttgcaagccatcaggtgagtgtgactttgggctgggccataccgggggggttgggggtcccagtgtgagagtttttctcatggcccggggtctgtctgcctatgtgaggctctgtcctgagcaccagagccgctgtatgtgacggactccctggagaacagccgccgatacatcccgcctgttttgggagagggcatttgtagctgagaggcaggggatgtctggccttcatgccccacctcggcacagacacccctggagcct

SEQ ID NO: 76961 - DNA, 421 bp, Homo sapiens
atcctggacatagtgcctatctaagaagcctggtcctcctctgctcaccccctaggttaggaggagcatcttggcaatgccacagtcctatcccttaccagtggccccagggtgctctggcggccacgtgagccccactctctcgacctctcttcctgccaggtgaccatgcctgctctgggcccagctcttctccaggctctctgggccgggtgggtcctcaccctccagccccttccaccaactgcattcactcccaatggcacgtatctgcagcacctggcaagggaccccacctcaggcaccctctacctgggggctaccaacttcctgttccagctgagccctgggctgcagctggaggccacagtgtccaccggccctgtgctagacagcagggactgcctgccacctgtgatgc

SEQ ID NO: 76962 - DNA, 902 bp, Homo sapiens
tctgtgcattgtaggatgtttagcggcatccctagattctacccattagatgccagttgtccccctcagtttacaaccaaaattatttccaaattaccaaatgtctgctggaaggaaaatcactcccagttgagaaccattgatgtaagcagtgatcatcagtgccgccttttttgttttttgttttaaaaccttaaaatctgtgaaaatgccttcctaaaaccattaaatagtttttctgcaacttcataattgatggcttaaactgatggcactagaactaaactgatcaatagtaacatcacagagagataacccaaagagtgtgtaccttttaatttgatagaattagaagtagtatacaataccaactgcaaaatagtaagtattcttgccaaagaactaaatctgaatcaaatcaggcctctaggtctaacttcttctctatggaaaatacaggaggacatgtgaaatgacaccagaggagtataaccagcaaaattcaggatatggaaaattctacagaacaaaaggcctggtatcatcaacaaataaatagaaaaaaagagaaggagaccaaacaagagttaacaaactttttctgtaaagggtgccagataaaagtagtttaggctttgcagaccatatagactctgtcacaaatgcaaaagcagtcgtagacagtacattaacaaatgagcatggctatgtctggtaaaagtttatttacaaagccaggtgtgaaggccagtttgtttacatgtggctataaataaactctgtaaaggcaggttggagtttgctgaccctgaattaaaagatgcttaaaaagacatccaaatgtattgtgccactgcacttcagcctgggcgacagaacaagactccgtctcaaaaaaaaaa

SEQ ID NO: 76963 - DNA, 4116 bp, Homo sapiens
attaattctggctccacttgttgctcggcccaggttggggagaggacggagggtggccgcagcgggttcctgagtgaattacccaggagggactgagcacagcaccaactagagaggggtcagggggtgcgggactcgagcgagcaggaaggaggcagcgcctggcaccagggctttgactcaacagaattgagacacgtttgtaatcgctggcgtgccccgcgcacaggatcccagcgaaaatcagatttcctggtgaggttgcgtgggtggattaatttggaaaaagaaactgcctatatcttgccatcaaaaaactcacggaggagaagcgcagtcaatcaacagtaaacttaagagaccccggatgcttccgttgtttaaacttgtatgcttgaaaattatctgagaggcaataaacatctgctcctttcttccctctccagaagtccattggaatattaagcccaggagttgctttggggatggctggaagtgcaatgtcttccaagttcttcctagtggctttggccatatttttctccttcgcccaggttgtaattgaagccaattcttggtggtcgctaggtatgaataaccctgttcagatgtcagaagtatatattataggagcacagcctctctgcagccaactggcaggactttctcaaggacagaagaaactgtgccacttgtatcaggaccacatgcagtacatcggagaaggcgcgaagacaggcatcaaagaatgccagtatcaattccgacatcgaaggtggaactgcagcactgtggataacacctctgtttttggcagggtgatgcagataggcagccgcgagacggccttcacatacgccgtgagcgcagcaggggtggtgaacgccatgagccgggcgtgccgcgagggcgagctgtccacctgcggctgcagccgcgccgcgcgccccaaggacctgccgcgggactggctctggggcggctgcggcgacaacatcgactatggctaccgctttgccaaggagttcgtggacgcccgcgagcgggagcgcatccacgccaagggctcctacgagagtgctcgcatcctcatgaacctgcacaacaacgaggccggccgcaggacggtgtacaacctggctgatgtggcctgcaagtgccatggggtgtccggctcatgtagcctgaagacatgctggctgcagctggcagacttccgcaaggtgggtgatgccctgaaggagaagtacgacagcgcggcggccatgcggctcaacagccggggcaagttggtacaggtcaacagccgcttcaactcgcccaccacacaagacctggtctacatcgaccccagccctgactactgcgtgcgcaatgagagcaccggctcgctgggcacgcagggccgcctgtgcaacaagacgtcggagggcatggatggctgcgagctcatgtgctgcggccgtgggtacgaccagttcaagaccgtgcagacggagcgctgccactgcaagttccactggtgctgctacgtcaagtgcaagaagtgcacggagatcgtggaccagtttgtgtgcaagtagtgggtgccacccagcactcagccccgctcccaggacccgcttatttatagaaagtacagtgattctggtttttggtttttagaaatattttttatttttccccaagaattgcaaccggaaccattttttttcctgttaccatctaagaactctgtggtttattattaatattataattattatttggcaataatgggggtgggaaccacgaaaaatatttattttgtggatctttgaaaaggtaatacaagacttcttttggatagtatagaatgaagggggaaataacacataccctaacttagctgtgtgggacatggtacacatccagaaggtaaagaaatacattttctttttctcaaatatgccatcatatgggatgggtaggttccagttgaaagagggtggtagaaatctattcacaattcagcttctatgaccaaaatgagttgtaaattctctggtgcaagataaaaggtcttgggaaaacaaaacaaaacaaaacaaacctcccttccccagcagggctgctagcttgctttctgcattttcaaaatgataatttacaatggaaggacaagaatgtcatattctcaaggaaaaaaggtatatcacatgtctcattctcctcaaatattccatttgcagacagaccgtcatattctaatagctcatgaaatttgggcagcagggaggaaagtccccagaaattaaaaaatttaaaactcttatgtcaagatgttgatttgaagctgttataagaattgggattccagatttgtaaaaagacccccaatgattctggacactagattttttgtttggggaggttggcttgaacataaatgaaatatcctgtattttcttagggatacttggttagtaaattataatagtagaaataatacatgaatcccattcacaggtttctcagcccaagcaacaaggtaattgcgtgccattcagcactgcaccagagcagacaacctatttgaggaaaaacagtgaaatccaccttcctcttcacactgagccctctctgattcctccgtgttgtgatgtgatgctggccacgtttccaaacggcagctccactgggtcccctttggttgtaggacaggaaatgaaacattaggagctctgcttggaaaacagttcactacttagggatttttgtttcctaaaacttttattttgaggagcagtagttttctatgttttaatgacagaacttggctaatggaattcacagaggtgttgcagcgtatcactgttatgatcctgtgtttagattatccactcatgcttctcctattgtactgcaggtgtaccttaaaactgttcccagtgtacttgaacagttgcatttataaggggggaaatgtggtttaatggtgcctgatatctcaaagtcttttgtacataacatatatatatatatacatatatataaatataaatataaatatatctcattgcagccagtgatttagatttacagcttactctggggttatctctctgtctagagcattgttgtccttcactgcagtccagttgggattattccaaaagttttttgagtcttgagcttgggctgtggccccgctgtgatcataccctgagcacgacgaagcaacctcgtttctgaggaagaagcttgagttctgactcactgaaatgcgtgttgggttgaagatatctttttttcttttctgcctcacccctttgtctccaacctccatttctgttcactttgtggagagggcattacttgttcgttatagacatggacgttaagagatattcaaaactcagaagcatcagcaatgtttctcttttcttagttcattctgcagaatggaaacccatgcctattagaaatgacagtacttattaattgagtccctaaggaatattcagcccactacatagatagctttttttttttttttttttttttaataaggacacctctttccaaacaggccatcaaatatgttcttatctcagacttacgttgttttaaaagtttggaaagatacacatcttttcatacccccccttaggaggttgggctttcatatcacctcagccaactgtggctcttaatttattgcataatgatatccacatcagccaactgtggctctttaatttattgcataatgatattcacatcccctcagttgcagtgaattgtgagcaaaagatcttgaaagcaaaaagcactaattagtttaaaatgtcacttttttggtttttattatacaaaaaccatgaagtactttttttatttgctaaatcagattgttcctttttagtgactcatgtttatgaagagagttgagtttaacaatcctagcttttaaaagaaactatttaatgtaaaatattctacatgtcattcagatattatgtatatcttctagcctttattctgtacttttaatgtacatatttctgtcttgcgtgatttgtatatttcactggtttaaaaaacaaacatcgaaaggcttattccaaatggaag

SEQ ID NO: 76964 - DNA, 1105 bp, Homo sapiens
attaattctggctccacttgttgctcggcccaggttggggagaggacggagggtggccgcagcgggttcctgagtgaattacccaggagggactgagcacagcaccaactagagaggggtcagggggtgcgggactcgagcgagcaggaaggaggcagcgcctggcaccagggctttgactcaacagaattgagacacgtttgtaatcgctggcgtgccccgcgcacaggatcccagcgaaaatcagatttcctggtgaggttgcgtgggtggattaatttggaaaaagaaactgcctatatcttgccatcaaaaaactcacggaggagaagcgcagtcaatcaacagtaaacttaagagaccccggatgcttccgttgtttaaacttgtatgcttgaaaattatctgagaggcaataaacatctgctcctttcttccctctccagaagtccattggaatattaagcccaggagttgctttggggatggctggaagtgcaatgtcttccaagttcttcctagtggctttggccatatttttctccttcgcccaggttgtaattgaagccaattcttggtggtcgctaggtatgaataaccctgttcagatgtcagaagtatatattataggagcacagcctctctgcagccaactggcaggactttctcaaggacagaagaaactgtgccacttgtatcaggaccacatgcagtacatcggagaaggcgcgaagacaggcatcaaagaatgccagtatcaattccgacatcgaaggtggaactgcagcactgtggataacacctctgtttttggcagggtgatgcagataggtaggaaaacatttaaaatatttttttaaaacattaactttttttcctagaagaaatccttagcatttacttcatgcttgatagaaagcatgaaggaggatgccttccagctcgggtggtggcttgggcatttttgtcattatagcaaatgatgttaattcctgtccctacacctgatgataagttttggattttaatcaaatcaggaggcaagtatcacagacaccttcatttttgcaaacacttaatttttctataaagcattttgtttaaa

SEQ ID NO: 76965 - DNA, 194 bp, Homo sapiens
ctgcactccaacctgggtgacagagcaaaactctgtctcaaaaaaataaataaataataaaaggtagatgatcctgggtgggcctggcttaatcaggtgaaagccacgaaggaagggactgggccttcctaaatagagagagcacctcctgctggccatggggcagaaagccatgctgtgaggggaggggcggt

SEQ ID NO: 76966 - DNA, 475 bp, Homo sapiens
aaagtagttgtgtctaaaataataaacacattataactacacacacagtcacacacacacacactcacacacacatacacacaaacaggcataccttctagatattgcgagtttgattccagaccactgtgacaaagccaatattgcaataaaacaagttacataaatattttagttttccagtgcatataaaaattatgcttatactatactattgtctattaaatgtgcaatagcattatgtctaaaaataaaatatacaaatctgaattaaaatattttattgctaaaagatgctaatgattattagagccttgaatgagttacagtctttttgctgatgaagagtcttacctcagtgcggatagctgctgattgatcaagttggtggctgctgaaaggtggggtggctttggcatctcttaaaataaaataacaataaagtttgctgtattgattgactcttcctttcaca

SEQ ID NO: 76967 - DNA, 2278 bp, Homo sapiens
cgctgcggcgcctggcgctccgcgggcgtccgggtggacagcgccaggggcacagggctgacatctcagggctaattccctcctccagtgcgtaaatccaggcttaagccgccgcagggtgtgagcctcccctcccccacccgaacgccgcagctgcacggggcacgacagccttcgcagaggtgcagccacaccccggcctaacgctgctgctcccgccgctactggagtggtggggaggggtgagtggactccaggaatcctcggaagggcgggggcggaggcagggggcccctctagccgctacttcgaaacagcactccttgttctcgatggtccccgcgcgactgtcttagctcacgacacttccggttccttttaaaggcccccaaggctgtgcaacgcggagcgtgagaggaaggtataaagggtagcgagagggcgggaccgaggaggaaagggaaaaaaaaaaaactagggggataggggtggggggacgcgcgaagggcgcgctctcgcgtcacgtgaccgggacgcgccgttcttccgtcggccattttaggtggtccgcggcggcgccattaaagcgaggaggaggcgagagcggccgccgctggtgcttattcttttttagtgcagcgggagagagcgggagtgtgcgccgcgcgagagtgggaggcgaagggggcaggccagggagaggcgcaggagcctttgcagccacgcgcgcgccttccctgtcttgtgtgcttcgcgaggtagagcgggcgcgcggcagcggcggggattactttgctgctagtttcggttcgcggcagcggcgggtgtagtctcggcggcagcggcggagacactagcactatgtcggaggagcagttcggcggggacggggcggcggcagcggcaacggcggcggtaggcggctcggcgggcgagcaggagggagccatggtggcggcgacacagggggcagcggcggcggcgggaagcggagccgggaccgggggcggaaccgcgtctggaggcaccgaagggggcagcgccgagtcggagggggcgaagattgacgccagtaagaacgaggaggatgaaggccattcaaactcctccccacgacactctgaagcagcgacggcacagcgggaagaatggaaaatgtttataggaggccttagctgggacactacaaagaaagatctgaaggactacttttccaaatttggtgaagttgtagactgcactctgaagttagatcctatcacagggcgatcaaggggttttggctttgtgctatttaaagaatcggagagtgtagataaggtcatggatcaaaaagaacataaattgaatgggaaggtgattgatcctaaaagggccaaagccatgaaaacaaaagagccggttaaaaaaatttttgttggtggcctttctccagatacacctgaagagaaaataagggagtactttggtggtttggtgaggtggaatccatagagctccccatggacaacaagaccaataagaggcgtgggttctgctttattacctttaaggaagaagaaccagtgaagaagataatggaaaagaaataccacaatgttggtcttagtaaatgtgaaataaaagtagccatgtcgaaggaacaatatcagcaacagcaacagtggggatctagaggaggatttgcaggaagagctcgtggaagaggtggtggccccagtcaaaactggaaccagggatatagtaactattggaatcaaggctatggcaactatggatataacagccaaggttacggtggttatggaggatatgactacactggttacaacaactactatggatatggtgattatagcaaccagcagagtggttatgggaaggtatccaggcgaggtggtcatcaaaatagctacaaaccatactaaattattccatttgcaacttatccccaacaggtggtgaagcagtattttccaatttgaagattcatttgaaggtggctcctgccacctgctaatagcagttcaaactaattttttgtatcaagtccctgaatggaagtatgacgttgggtccctctgaagtttaattctggagttctcattaaaagaaatttgctttcatggttttatttcttaattgctatgcttcagaatcaatttgggtttatgccctttcccccagtattgtagagcaagtcttgtgttaaaagcccagtgtgacagtgtcatgatgtagtagtgtcttactggttttttaataaatccttttgtat

SEQ ID NO: 76968 - DNA, 1774 bp, Homo sapiens
cctcccccccccacccccccccaaacttacgggctaggtacgaggctgggtgttaatcggccgaggcggcggcgccattaaagcgaggaggaggcgagagcggccgccgctggtgcttattcttttttagtgcagcgggagagagcgggagtgtgcgccgcgcgagagtgggaggcgaagggggcaggccagggagaggcgcaggagcctttgcagccacgcgcgcgccttccctgtcttgtgtgcttcgcgaggtagagcgggcgcgcggcagcggcggggattactttgctgctagtttcggttcgcggcagcggcgggtgtagtctcggcggcagcggcggagacactagcactatgtcggaggagcagttcggcggggacggggcggcggcagcggcaacggcggcggtaggcggctcggcgggcgagcaggagggagccatggtggcggcgacacagggggcagcggcggcggcgggaagcggagccgggaccgggggcggaaccgcgtctggaggcaccgaagggggcagcgccgagtcggagggggcgaagattgacgccagtaagaacgaggaggatgaaggccattcaaactcctccccacgacactctgaagcagcgacggcacagcgggaagaatggaaaatgtttataggaggccttagctgggacactacaaagaaagatctgaaggactacttttccaaatttggtgaagttgtagactgcactctgaagttagatcctatcacagggcgatcaaggggttttggctttgtgctatttaaagaatcggagagtgtagataaggtcatggatcaaaaagaacataaattgaatgggaaggtgattgatcctaaaagggccaaagccatgaaaacaaaagagccggttaaaaaaatttttgttggtggcctttctccagatacacctgaagagaaaataagggagtactttggtggtttggtgaggtggaatccatagagctccccatggacaacaagaccaataagaggcgtgggttctgctttattacctttaaggaagaagaaccagtgaagaagataatggaaaagaaataccacaatgttggtcttagtaaatgtgaaataaaagtagccatgtcgaaggaacaatatcagcaacagcaacagtggggatctagaggaggatttgcaggaagagctcgtggaagaggtggtggccccagtcaaaactggaaccagggatatagtaactattggaatcaaggctatggcaactatggatataacagccaaggttacggtggttatggaggatatgactacactggttacaacaactactatggatatggtgattatagcaaccagcagagtggttatgggaaggtatccaggcgaggtggtcatcaaaatagctacaaaccatactaaattattccatttgcaacttatccccaacaggtggtgaagcagtattttccaatttgaagattcatttgaaggtggctcctgccacctgctaatagcagttcaaactaattttttgtatcaagtccctgaatggaagtatgacgttgggtccctctgaagtttaattctggagttctcattaaaagaaatttgctttcatggttttatttcttaattgctatgcttcagaatcaatttgggtttatgccctttcccccagtattgtagagcaagtcttgtgttaaaagcccagtgtgacagtgtcatgatgtagtagtgtcttactggttttttaataaatccttttgtat

SEQ ID NO: 76969 - DNA, 2074 bp, Homo sapiens
cgctgcggcgcctggcgctccgcgggcgtccgggtggacagcgccaggggcacagggctgacatctcagggctaattccctcctccagtgcgtaaatccaggcttaagccgccgcagggtgtgagcctcccctcccccacccgaacgccgcagctgcacggggcacgacagccttcgcagaggtgcagccacaccccggcctaacgctgctgctcccgccgctactggagtggtggggaggggtgagtggactccaggaatcctcggaagggcgggggcggaggcagggggcccctctagccgctacttcgaaacagcactccttgttctcgatggtccccgcgcgactgtcttagctcacgacacttccggttccttttaaaggcccccaaggctgtgcaacgcggagcgtgagaggaaggtataaagggtagcgagagggcgggaccgaggaggaaagggaaaaaaaaaaaactagggggataggggtggggggacgcgcgaagggcgcgctctcgcgtcacgtgaccgggacgcgccgttcttccgtcggccattttaggtggtccgcggcggcgccattaaagcgaggaggaggcgagagcggccgccgctggtgcttattcttttttagtgcagcgggagagagcgggagtgtgcgccgcgcgagagtgggaggcgaagggggcaggccagggagaggcgcaggagcctttgcagccacgcgcgcgccttccctgtcttgtgtgcttcgcgaggtagagcgggcgcgcggcagcggcggggattactttgctgctagtttcggttcgcggcagcggcgggtgtagtctcggcggcagcggcggagacactagcactatgtcggaggagcagttcggcggggacggggcggcggcagcggcaacggcggcggtaggcggctcggcgggcgagcaggagggagccatggtggcggcgacacagggggcagcggcggcggcgggaagcggagccgggaccgggggcggaaccgcgtctggaggcaccgaagggggcagcgccgagtcggagggggcgaagattgacgccagtaagaacgaggaggatgaagggaaaatgtttataggaggccttagctgggacactacaaagaaagatctgaaggactacttttccaaatttggtgaagttgtagactgcactctgaagttagatcctatcacagggcgatcaaggggttttggctttgtgctatttaaagaatcggagagtgtagataaggtcatggatcaaaaagaacataaattgaatgggaaggtgattgatcctaaaagggccaaagccatgaaaacaaaagagccggttaaaaaaatttttgttggtggcctttctccagatacacctgaagagaaaataagggagtactttggtggtttggtgaggtggaatccatagagctccccatggacaacaagaccaataagaggcgtgggttctgctttattacctttaaggaagaagaaccagtgaagaagataatggaaaagaaataccacaatgttggtcttagtaaatgtgaaataaaagtagccatgtcgaaggaacaatatcagcaacagcaacagtggggatctagaggaggatttgcaggaagagctcgtggaagaggtggtgaccagcagagtggttatgggaaggtatccaggcgaggtggtcatcaaaatagctacaaaccatactaaattattccatttgcaacttatccccaacaggtggtgaagcagtattttccaatttgaagattcatttgaaggtggctcctgccacctgctaatagcagttcaaactaattttttgtatcaagtccctgaatggaagtatgacgttgggtccctctgaagtttaattctggagttctcattaaaagaaatttgctttcatggttttatttcttaattgctatgcttcagaatcaatttgggtttatgccctttcccccagtattgtagagcaagtcttgtgttaaaagcccagtgtgacagtgtcatgatgtagtagtgtcttactggttttttaataaatccttttgtat

SEQ ID NO: 76970 - DNA, 2038 bp, Homo sapiens
cgctgcggcgcctggcgctccgcgggcgtccgggtggacagcgccaggggcacagggctgacatctcagggctaattccctcctccagtgcgtaaatccaggcttaagccgccgcagggtgtgagcctcccctcccccacccgaacgccgcagctgcacggggcacgacagccttcgcagaggtgcagccacaccccggcctaacgctgctgctcccgccgctactggagtggtggggaggggtgagtggactccaggaatcctcggaagggcgggggcggaggcagggggcccctctagccgctacttcgaaacagcactccttgttctcgatggtccccgcgcgactgtcttagctcacgacacttccggttccttttaaaggcccccaaggctgtgcaacgcggagcgtgagaggaaggtataaagggtagcgagagggcgggaccgaggaggaaagggaaaaaaaaaaaactagggggataggggtggggggacgcgcgaagggcgcgctctcgcgtcacgtgaccgggacgcgccgttcttccgtcggccattttaggtggtccgcggcggcgccattaaagcgaggaggaggcgagagcggccgccgctggtgcttattcttttttagtgcagcgggagagagcgggagtgtgcgccgcgcgagagtgggaggcgaagggggcaggccagggagaggcgcaggagcctttgcagccacgcgcgcgccttccctgtcttgtgtgcttcgcgaggtagagcgggcgcgcggcagcggcggggattactttgctgctagtttcggttcgcggcagcggcgggtgtagtctcggcggcagcggcggagacactagcactatgtcggaggagcagttcggcggggacggggcggcggcagcggcaacggcggcggtaggcggctcggcgggcgagcaggagggagccatggtgtcggagggggcgaagattgacgccagtaagaacgaggaggatgaaggccattcaaactcctccccacgacactctgaagcagcgacggcacagcgggaagaatggaaaatgtttataggaggccttagctgggacactacaaagaaagatctgaaggactacttttccaaatttggtgaagttgtagactgcactctgaagttagatcctatcacagggcgatcaaggggttttggctttgtgctatttaaagaatcggagagtgtagataaggtcatggatcaaaaagaacataaattgaatgggaaggtgattgatcctaaaagggccaaagccatgaaaacaaaagagccggttaaaaaaatttttgttggtggcctttctccagatacacctgaagagaaaataagggagtactttggtggtttggtgaggtggaatccatagagctccccatggacaacaagaccaataagaggcgtgggttctgctttattacctttaaggaagaagaaccagtgaagaagataatggaaaagaaataccacaatgttggtcttagtaaatgtgaaataaaagtagccatgtcgaaggaacaatatcagcaacagcaacagtggggatctagaggaggatttgcaggaagagctcgtggaagaggtggtgaccagcagagtggttatgggaaggtatccaggcgaggtggtcatcaaaatagctacaaaccatactaaattattccatttgcaacttatccccaacaggtggtgaagcagtattttccaatttgaagattcatttgaaggtggctcctgccacctgctaatagcagttcaaactaattttttgtatcaagtccctgaatggaagtatgacgttgggtccctctgaagtttaattctggagttctcattaaaagaaatttgctttcatggttttatttcttaattgctatgcttcagaatcaatttgggtttatgccctttcccccagtattgtagagcaagtcttgtgttaaaagcccagtgtgacagtgtcatgatgtagtagtgtcttactggttttttaataaatccttttgtat

SEQ ID NO: 76971 - DNA, 1995 bp, Homo sapiens
cgctgcggcgcctggcgctccgcgggcgtccgggtggacagcgccaggggcacagggctgacatctcagggctaattccctcctccagtgcgtaaatccaggcttaagccgccgcagggtgtgagcctcccctcccccacccgaacgccgcagctgcacggggcacgacagccttcgcagaggtgcagccacaccccggcctaacgctgctgctcccgccgctactggagtggtggggaggggtgagtggactccaggaatcctcggaagggcgggggcggaggcagggggcccctctagccgctacttcgaaacagcactccttgttctcgatggtccccgcgcgactgtcttagctcacgacacttccggttccttttaaaggcccccaaggctgtgcaacgcggagcgtgagaggaaggtataaagggtagcgagagggcgggaccgaggaggaaagggaaaaaaaaaaaactagggggataggggtggggggacgcgcgaagggcgcgctctcgcgtcacgtgaccgggacgcgccgttcttccgtcggccattttaggtggtccgcggcggcgccattaaagcgaggaggaggcgagagcggccgccgctggtgcttattcttttttagtgcagcgggagagagcgggagtgtgcgccgcgcgagagtgggaggcgaagggggcaggccagggagaggcgcaggagcctttgcagccacgcgcgcgccttccctgtcttgtgtgcttcgcgaggtagagcgggcgcgcggcagcggcggggattactttgctgctagtttcggttcgcggcagcggcgggtgtagtctcggcggcagcggcggagacactagcactatgtcggaggagcagttcggcggggacggggcggcggcagcggcaacgggtcggagggggcgaagattgacgccagtaagaacgaggaggatgaaggccattcaaactcctccccacgacactctgaagcagcgacggcacagcgggaagaatggaaaatgtttataggaggccttagctgggacactacaaagaaagatctgaaggactacttttccaaatttggtgaagttgtagactgcactctgaagttagatcctatcacagggcgatcaaggggttttggctttgtgctatttaaagaatcggagagtgtagataaggtcatggatcaaaaagaacataaattgaatgggaaggtgattgatcctaaaagggccaaagccatgaaaacaaaagagccggttaaaaaaatttttgttggtggcctttctccagatacacctgaagagaaaataagggagtactttggtggtttggtgaggtggaatccatagagctccccatggacaacaagaccaataagaggcgtgggttctgctttattacctttaaggaagaagaaccagtgaagaagataatggaaaagaaataccacaatgttggtcttagtaaatgtgaaataaaagtagccatgtcgaaggaacaatatcagcaacagcaacagtggggatctagaggaggatttgcaggaagagctcgtggaagaggtggtgaccagcagagtggttatgggaaggtatccaggcgaggtggtcatcaaaatagctacaaaccatactaaattattccatttgcaacttatccccaacaggtggtgaagcagtattttccaatttgaagattcatttgaaggtggctcctgccacctgctaatagcagttcaaactaattttttgtatcaagtccctgaatggaagtatgacgttgggtccctctgaagtttaattctggagttctcattaaaagaaatttgctttcatggttttatttcttaattgctatgcttcagaatcaatttgggtttatgccctttcccccagtattgtagagcaagtcttgtgttaaaagcccagtgtgacagtgtcatgatgtagtagtgtcttactggttttttaataaatccttttgtat

SEQ ID NO: 76972 - DNA, 1009 bp, Homo sapiens
cgctgcggcgcctggcgctccgcgggcgtccgggtggacagcgccaggggcacagggctgacatctcagggctaattccctcctccagtgcgtaaatccaggcttaagccgccgcagggtgtgagcctcccctcccccacccgaacgccgcagctgcacggggcacgacagccttcgcagaggtgcagccacaccccggcctaacgctgctgctcccgccgctactggagtggtggggaggggtgagtggactccaggaatcctcggaagggcgggggcggaggcagggggcccctctagccgctacttcgaaacagcactccttgttctcgatggtccccgcgcgactgtcttagctcacgacacttccggttccttttaaaggcccccaaggctgtgcaacgcggagcgtgagaggaaggtataaagggtagcgagagggcgggaccgaggaggaaagggaaaaaaaaaaaactagggggataggggtggggggacgcgcgaagggcgcgctctcgcgtcacgtgaccgggacgcgccgttcttccgtcggccattttaggtggtccgcggcggcgccattaaagcgaggaggaggcgagagcggccgccgctggtgcttattcttttttagtgcagcgggagagagcgggagtgtgcgccgcgcgagagtgggaggcgaagggggcaggccagggagaggcgcaggagcctttgcagccacgcgcgcgccttccctgtcttgtgtgcttcgcgaggtagagcgggcgcgcggcagcggcggggattactttgctgctagtttcggttcgcggcagcggcgggtgtagtctcggcggcagcggcggagacactagcactatgtcggaggagcagttcggcggggacggggcggcggcagcggcaacggccatgggtctcctcccaccgacttagccgccaggattttttcccgcctgtcgtggggtaccttttttctttccatgctgtcccctctttttcccttttt

SEQ ID NO: 76973 - DNA, 353 bp, Homo sapiens
cggcgggaagcggagccgggaccgggggcggaaccgcgtctggaggcaccgaagggggcagcgccgagtcggagggggcgaagattgacgccagtaagaacgaggaggatgaagggtgagtaaggggcatcccaggatagtcaggcccaactagtccccctccccctctttattcccccgccattaggcctggttcccgctctcagcccgttctccgggcccccatgcagcctccttgcactggtctccctttttctatgttgggttccccggaccttcatttccttcttcctttgcctgcttatcgcccccctcccccatcacacacgtttccacctttagccgtcaccatg

SEQ ID NO: 76974 - DNA, 2576 bp, Homo sapiens
ggaattccggaattccgaatgcgtcggaatgcagcgggagagagcgggagtgtgcgccgcgcgagagtgggaggcgaagggggcaggccagggagaggcgcaggagcctttgcagccacgcgcgcgccttccctgtcttgtgtgcttcgcgaggtagagcgggcgcgcggcagcggcggggattactttgctgctagtttcggttcgcggcagcggcgggtgtagtctcggcggcagcggcggagacactagcactatgtcggaggagcagttcggcggggacggggcggcggcagcggcaacggcggcggtaggcggctcggcgggcgagcaggagggagccatggtggcggcgacacagggggcagcggcggcggcgggaagcggagccgggaccgggggcggaaccgcgtctggaggcaccgaagggggcagcgccgagtcggagggggcgaagattgacgccagtaagaacgaggaggatgaagggaaaatgtttataggaggccttagctgggacactacaaagaaagatctgaaggactacttttccaaatttggtgaagttgtagactgcactctgaagttagatcctatcacagggcgatcaaggggttttggctttgtgctatttaaagaatcggagagtgtagataaggtcatggatcaaaaagaacataaattgaatgggaaggtgattgatcctaaaagggccaaagccatgaaaacaaaagagccggttaaaaaaatttttgttggtggcctttctccagatacacctgaagagaaaataagggagtactttggtggtttggtgaggtggaatccatagagctccccatggacaacaagaccaataagaggcgtgggttctgctttattacctttaaggaagaagaaccagtgaagaagataatggaaaagaaataccacaatgttggtcttagtaaatgtgaaataaaagtagccatgtcgaaggaacaatatcagcaacagcaacagtggggatctagaggaggatttgcaggaagagctcgtggaagaggtggtgaattcctcagaggcaggagaaggcttggagctacccccaaactcaatccactgttggcagctgagcgtgtagtagggtggtcctagccatacagaaccacttctctgtctccctcctcttccctggttcgtccagccccagtccatcagggaccacctgggcagcctcccagagatgggatcgggttggggctaagggcatcgggtctgtcgcagccaggggtgcaggaggatcgctgtgctgtgagccgttcagctggctcccgacgaaggaggcacggaaccagacagcgcggcgagggcgagagcgctgcaggcaaggcgtaggccccgcggcggatcttgccgaagagcaggacaggctccgagtcctggaaggggtagtggccggccagcatggtgaagagcgccacgcccaggctccagacatcggctgccttgcccgagtatgaggcccgtgagctgagtatctcaggtcccacgtaggctggcgacgcgtgcttgtccacagggaatcatctggcccagtcagcacgcaggagtcctccaggttctccagcaccagcttcttcctgggacatggggagaaacagaagggtcaggtcctacccagaacccccatgctatcacccttgtggcacccactttccaagtcgctgctggcctttgacagacacaagccagtcctgtgatgtctgatcctgttttacagatacccaagcccaggctcagagaggttaagtcatttaaggccacagagcaattaaatttaaactaaaattctgaaaggaatacatttttcaacagagtccttggggagggggctgatggggctgagagggttaagcctctcttaaaccagctacaaacttagggtccaggcaggtaataagatgagagaaacaggaagtgtgcctgacatctcagcacaagcgctacctaaaaagggtacacaacgcattctagggtttaccaagtgcctgctgtgttcctggcccttgacccagctcattacctggctcacctcattctatctagctacagcctgcaaggaagacaccattttacagctgtagagcatgggcctgggatgggaacgctggctggcagatactcagagccagtgctgtgacccaccctctcagttcccaagatggccccacattcccattgttttccccaagagaagccaggaattgtattttaatgaaaaggtccccatttaaaaaatattggcaaaccagtttatataaaaaacacaaacaggtaagcagggcaaaaaaaaaagtgtgtaaggctgggcgcggtgctcatgcccggtaatcctagcactttgggagcgcgaggcagggggatcacttgagttcaggagttcaagaccagcctgggcaacacggtaaaaacctatctctacaaaaaatacgaaaattagcaggcatggtgattcgcacctgtagtcccagctacttgggaggctgatcttgaactcctgaactcaagtgatccccctgcctcggccggaattc

SEQ ID NO: 76975 - DNA, 2131 bp, Homo sapiens
cgctgcggcgcctggcgctccgcgggcgtccgggtggacagcgccaggggcacagggctgacatctcagggctaattccctcctccagtgcgtaaatccaggcttaagccgccgcagggtgtgagcctcccctcccccacccgaacgccgcagctgcacggggcacgacagccttcgcagaggtgcagccacaccccggcctaacgctgctgctcccgccgctactggagtggtggggaggggtgagtggactccaggaatcctcggaagggcgggggcggaggcagggggcccctctagccgctacttcgaaacagcactccttgttctcgatggtccccgcgcgactgtcttagctcacgacacttccggttccttttaaaggcccccaaggctgtgcaacgcggagcgtgagaggaaggtataaagggtagcgagagggcgggaccgaggaggaaagggaaaaaaaaaaaactagggggataggggtggggggacgcgcgaagggcgcgctctcgcgtcacgtgaccgggacgcgccgttcttccgtcggccattttaggtggtccgcggcggcgccattaaagcgaggaggaggcgagagcggccgccgctggtgcttattcttttttagtgcagcgggagagagcgggagtgtgcgccgcgcgagagtgggaggcgaagggggcaggccagggagaggcgcaggagcctttgcagccacgcgcgcgccttccctgtcttgtgtgcttcgcgaggtagagcgggcgcgcggcagcggcggggattactttgctgctagtttcggttcgcggcagcggcgggtgtagtctcggcggcagcggcggagacactagcactatgtcggaggagcagttcggcggggacggggcggcggcagcggcaacggcggcggtaggcggctcggcgggcgagcaggagggagccatggtggcggcgacacagggggcagcggcggcggcgggaagcggagccgggaccgggggcggaaccgcgtctggaggcaccgaagggggcagcgccgagtcggagggggcgaagattgacgccagtaagaacgaggaggatgaaggccattcaaactcctccccacgacactctgaagcagcgacggcacagcgggaagaatggaaaatgtttataggaggccttagctgggacactacaaagaaagatctgaaggactacttttccaaatttggtgaagttgtagactgcactctgaagttagatcctatcacagggcgatcaaggggttttggctttgtgctatttaaagaatcggagagtgtagataaggtcatggatcaaaaagaacataaattgaatgggaaggtgattgatcctaaaagggccaaagccatgaaaacaaaagagccggttaaaaaaatttttgttggtggcctttctccagatacacctgaagagaaaataagggagtactttggtggtttggtgaggtggaatccatagagctccccatggacaacaagaccaataagaggcgtgggttctgctttattacctttaaggaagaagaaccagtgaagaagataatggaaaagaaataccacaatgttggtcttagtaaatgtgaaataaaagtagccatgtcgaaggaacaatatcagcaacagcaacagtggggatctagaggaggatttgcaggaagagctcgtggaagaggtggtgaccagcagagtggttatgggaaggtatccaggcgaggtggtcatcaaaatagctacaaaccatactaaattattccatttgcaacttatccccaacaggtggtgaagcagtattttccaatttgaagattcatttgaaggtggctcctgccacctgctaatagcagttcaaactaattttttgtatcaagtccctgaatggaagtatgacgttgggtccctctgaagtttaattctggagttctcattaaaagaaatttgctttcatggttttatttcttaattgctatgcttcagaatcaatttgggtttatgccctttcccccagtattgtagagcaagtcttgtgttaaaagcccagtgtgacagtgtcatgatgtagtagtgtcttactggttttttaataaatccttttgtat

SEQ ID NO: 76976 - DNA, 1711 bp, Homo sapiens
cctcccccccccacccccccccaaacttacgggctaggtacgaggctgggtgttaatcggccgaggctgcagcgggagagagcgggagtgtgcgccgcgcgagagtgggaggcgaagggggcaggccagggagaggcgcaggagcctttgcagccacgcgcgcgccttccctgtcttgtgtgcttcgcgaggtagagcgggcgcgcggcagcggcggggattactttgctgctagtttcggttcgcggcagcggcgggtgtagtctcggcggcagcggcggagacactagcactatgtcggaggagcagttcggcggggacggggcggcggcagcggcaacggcggcggtaggcggctcggcgggcgagcaggagggagccatggtggcggcgacacagggggcagcggcggcggcgggaagcggagccgggaccgggggcggaaccgcgtctggaggcaccgaagggggcagcgccgagtcggagggggcgaagattgacgccagtaagaacgaggaggatgaaggccattcaaactcctccccacgacactctgaagcagcgacggcacagcgggaagaatggaaaatgtttataggaggccttagctgggacactacaaagaaagatctgaaggactacttttccaaatttggtgaagttgtagactgcactctgaagttagatcctatcacagggcgatcaaggggttttggctttgtgctatttaaagaatcggagagtgtagataaggtcatggatcaaaaagaacataaattgaatgggaaggtgattgatcctaaaagggccaaagccatgaaaacaaaagagccggttaaaaaaatttttgttggtggcctttctccagatacacctgaagagaaaataagggagtactttggtggtttggtgaggtggaatccatagagctccccatggacaacaagaccaataagaggcgtgggttctgctttattacctttaaggaagaagaaccagtgaagaagataatggaaaagaaataccacaatgttggtcttagtaaatgtgaaataaaagtagccatgtcgaaggaacaatatcagcaacagcaacagtggggatctagaggaggatttgcaggaagagctcgtggaagaggtggtggccccagtcaaaactggaaccagggatatagtaactattggaatcaaggctatggcaactatggatataacagccaaggttacggtggttatggaggatatgactacactggttacaacaactactatggatatggtgattatagcaaccagcagagtggttatgggaaggtatccaggcgaggtggtcatcaaaatagctacaaaccatactaaattattccatttgcaacttatccccaacaggtggtgaagcagtattttccaatttgaagattcatttgaaggtggctcctgccacctgctaatagcagttcaaactaattttttgtatcaagtccctgaatggaagtatgacgttgggtccctctgaagtttaattctggagttctcattaaaagaaatttgctttcatggttttatttcttaattgctatgcttcagaatcaatttgggtttatgccctttcccccagtattgtagagcaagtcttgtgttaaaagcccagtgtgacagtgtcatgatgtagtagtgtcttactggttttttaataaatccttttgtat

SEQ ID NO: 76977 - DNA, 2084 bp, Homo sapiens
cgctgcggcgcctggcgctccgcgggcgtccgggtggacagcgccaggggcacagggctgacatctcagggctaattccctcctccagtgcgtaaatccaggcttaagccgccgcagggtgtgagcctcccctcccccacccgaacgccgcagctgcacggggcacgacagccttcgcagaggtgcagccacaccccggcctaacgctgctgctcccgccgctactggagtggtggggaggggtgagtggactccaggaatcctcggaagggcgggggcggaggcagggggcccctctagccgctacttcgaaacagcactccttgttctcgatggtccccgcgcgactgtcttagctcacgacacttccggttccttttaaaggcccccaaggctgtgcaacgcggagcgtgagaggaaggtataaagggtagcgagagggcgggaccgaggaggaaagggaaaaaaaaaaaactagggggataggggtggggggacgcgcgaagggcgcgctctcgcgtcacgtgaccgggacgcgccgttcttccgtcggccattttaggtggtccgcggcggcgccattaaagcgaggaggaggcgagagcggccgccgctggtgcttattcttttttagtgcagcgggagagagcgggagtgtgcgccgcgcgagagtgggaggcgaagggggcaggccagggagaggcgcaggagcctttgcagccacgcgcgcgccttccctgtcttgtgtgcttcgcgaggtagagcgggcgcgcggcagcggcggggattactttgctgctagtttcggttcgcggcagcggcgggtgtagtctcggcggcagcggcggagacactagcactatcggcggtaggcggctcggcgggcgagcaggagggagccatggtggcggcgacacagggggcagcggcggcggcgggaagcggagccgggaccgggggcggaaccgcgtctggaggcaccgaagggggcagcgccgagtcggagggggcgaagattgacgccagtaagaacgaggaggatgaaggccattcaaactcctccccacgacactctgaagcagcgacggcacagcgggaagaatggaaaatgtttataggaggccttagctgggacactacaaagaaagatctgaaggactacttttccaaatttggtgaagttgtagactgcactctgaagttagatcctatcacagggcgatcaaggggttttggctttgtgctatttaaagaatcggagagtgtagataaggtcatggatcaaaaagaacataaattgaatgggaaggtgattgatcctaaaagggccaaagccatgaaaacaaaagagccggttaaaaaaatttttgttggtggcctttctccagatacacctgaagagaaaataagggagtactttggtggtttggtgaggtggaatccatagagctccccatggacaacaagaccaataagaggcgtgggttctgctttattacctttaaggaagaagaaccagtgaagaagataatggaaaagaaataccacaatgttggtcttagtaaatgtgaaataaaagtagccatgtcgaaggaacaatatcagcaacagcaacagtggggatctagaggaggatttgcaggaagagctcgtggaagaggtggtgaccagcagagtggttatgggaaggtatccaggcgaggtggtcatcaaaatagctacaaaccatactaaattattccatttgcaacttatccccaacaggtggtgaagcagtattttccaatttgaagattcatttgaaggtggctcctgccacctgctaatagcagttcaaactaattttttgtatcaagtccctgaatggaagtatgacgttgggtccctctgaagtttaattctggagttctcattaaaagaaatttgctttcatggttttatttcttaattgctatgcttcagaatcaatttgggtttatgccctttcccccagtattgtagagcaagtcttgtgttaaaagcccagtgtgacagtgtcatgatgtagtagtgtcttactggttttttaataaatccttttgtat

SEQ ID NO: 76978 - DNA, 1578 bp, Homo sapiens
cgctgcggcgcctggcgctccgcgggcgtccgggtggacagcgccaggggcacagggctgacatctcagggctaattccctcctccagtgcgtaaatccaggcttaagccgccgcagggtgtgagcctcccctcccccacccgaacgccgcagctgcacggggcacgacagccttcgcagaggtgcagccacaccccggcctaacgctgctgctcccgccgctactggagtggtggggaggggtgagtggactccaggaatcctcggaagggcgggggcggaggcagggggcccctctagccgctacttcgaaacagcactccttgttctcgatggtccccgcgcgactgtcttagctcacgacacttccggttccttttaaaggcccccaaggctgtgcaacgcggagcgtgagaggaaggtataaagggtagcgagagggcgggaccgaggaggaaagggaaaaaaaaaaaactagggggataggggtggggggacgcgcgaagggcgcgctctcgcgtcacgtgaccgggacgcgccgttcttccgtcggccattttaggtggtccgcggcggcgccattaaagcgaggaggaggcgagagcggccgccgctggtgcttattcttttttagtgcagcgggagagagcgggagtgtgcgccgcgcgagagtgggaggcgaagggggcaggccagggagaggcgcaggagcctttgcagccacgcgcgcgccttccctgtcttgtgtgcttcgcgaggtagagcgggcgcgcggcagcggcggggattactttgctgctagtttcggttcgcggcagcggcgggtgtagtctcggcggcagcggcggagacactagcactatgtcggaggagcagttcggcggggacggggcggcggcagcggcaacggcggcggtaggcggctcggcgggcgagcaggagggagccatggtcgccgccgccgcctctccttagtcgccgccatgacgaccgtgtacacctcgcaggtgcgccagaattaccaccaggactcagaggccgccatcaaccgccagatcaaacctggagctctaggacctcctacgtcaacctgttccatggtcttactacttttggacctgcgatgcatgtggcttcgaacgaactttggccaatacttccttcacccaatctcatgaggagcagggaacatgctgagaaccctgatgaaggctgccgaaccaacgaggtggcgaatctcccttcggggtactcagaaccagaccggtgactgactgggagagccggctgaatgcatggcgtggtgcatacacttgggaccactgtgaaccagcccctacggaactgcaccaatggcccttgccaaagtgaccccccatcgcggtgtctacgtggaagcaccttactccttcctgtcagtgtgaaagcctccaagagattgggtgcacagttgcaccatgttgccacacgctctcgcccccgaaacggcttgcgggaatcttctgcgagaacaccctgttgcacgtgatttacgacacgaatcgcatattaccccagagcgggagcaaccgtcgtacg

SEQ ID NO: 76979 - DNA, 477 bp, Homo sapiens
ggttgaactacttaagcttaatttgttaaactccggtaagtacctagcccacatgatttgactcagagattctcttttgtccacagacagtcatctcaggagcagaaagaaaagagctcccaaatgctatatctattcaggggctctcaagaacaatggaatatcatcctgatttagaaaatttggatgaagatggatatactcaattacacttcgactctcaaagcaataccaggatagctgttgtttcagagaaaggatcgtgtgctgcatctcctccttggcgcctcattgctgtaattttgggaatcctatgcttggtaatactggtgatagctgtggtcctgggtaccatggctggtttcaaagctgtggaattcaaaggataaattaatgaagaaaacaagcggagctgaagaagaaagtacaatatggtgctgtcttcctaatgaaataaattcactaaatggacattaa

SEQ ID NO: 76980 - DNA, 609 bp, Homo sapiens
ggttgaactacttaagcttaatttgttaaactccggtaagtacctagcccacatgatttgactcagagattctcttttgtccacagacagtcatctcaggagcagaaagaaaagagctcccaaatgctatatctattcaggggctctcaagaacaatggaatatcatcctgatttagaaaatttggatgaagatggatatactcaattacacttcgactctcaaagcaataccaggatagctgttgtttcagagaaaggatcgtgtgctgcatctcctccttggcgcctcattgctgtaattttgggaatcctatgcttggtaatactggtgatagctgtggtcctgggtaccatgggggttctttccagcccttgtcctcctaattggattatatatgagaagagctgttatctattcagcatgtcactaaattcctgggatggaagtaaaagacaatgctggcaactgggctctaatctcctaaagatagacagctcaaatgaattggtaagtgtagacttctgttatgattatctgtggtgtgtatcctgaaggaagatagagggagattccaggtaatgacaatttttcctaaaatgaagtcttt

SEQ ID NO: 76981 - DNA, 2574 bp, Homo sapiens
ggttgaactacttaagcttaatttgttaaactccggtaagtacctagcccacatgatttgactcagagattctcttttgtccacagacagtcatctcaggagcagaaagaaaagagctcccaaatgctatatctattcaggggctctcaagaacaatggaatatcatcctgatttagaaaatttggatgaagatggatatactcaattacacttcgactctcaaagcaataccaggatagctgttgtttcagagaaaggatcgtgtgctgcatctcctccttggcgcctcattgctgtaattttgggaatcctatgcttggtaatactggtgatagctgtggtcctgggtaccatggctatttggagatccaattcaggaagcaacacattggagaatggctactttctatcaagaaataaagagaaccacagtcaacccacacaatcatctttagaagacagtgtgactcctaccaaagctgtcaaaaccacaggggttctttccagcccttgtcctcctaattggattatatatgagaagagctgttatctattcagcatgtcactaaattcctgggatggaagtaaaagacaatgctggcaactgggctctaatctcctaaagatagacagctcaaatgaattgggatttatagtaaaacaagtgtcttcccaacctgataattcattttggataggcctttctcggccccagactgaggtaccatggctctgggaggatggatcaacattctcttctaacttatttcagatcagaaccacagctacccaagaaaacccatctccaaattgtgtatggattcacgtgtcagtcatttatgaccaactgtgtagtgtgccctcatatagtatttgtgagaagaagttttcaatgtaagaggaagggtggagaaggagagagaaatatgtgaggtagtaaggaggacagaaaacagaacagaaaagagtaacagctgaggtcaagataaatgcagaaaatgtttagagagcttggccaactgtaatcttaaccaagaaattgaagggagaggctgtgatttctgtatttgtcgacctacaggtaggctagtattatttttctagttagtagatccctagacatggaatcagggcagccaagcttgagtttttattttttatttatttatttttttgagatagggtctcactttgttacccaggctggagtgcagtggcacaatctcgactcactgcagctatctctcgcctcagcccctcaagtagctgggactacaggtgcatgccaccatgccaggctaatttttggtgttttttgtagagactgggttttgccatgttgaccaagctggtctctaactcctgggcttaagtgatctgcccgccttggcctcccaaagtgctgggattacagatgtgagccaccacacctggccccaagcttgaattttcattctgccattgacttggcatttaccttgggtaagccataagcgaatcttaatttctggctctatcagagttgtttcatgctcaacaatgccattgaagtgcacggtgtgttgccacgatttgaccctcaacttctagcagtatatcagttatgaactgagggtgaaatatatttctgaatagctaaatgaagaaatgggaaaaaatcttcaccacagtcagagcaattttattattttcatcagtatgatcataattatgattatcatcttagtaaaaagcaggaactcctactttttctttatcaattaaatagctcagagagtacatctgccatatctctaatagaatcttttttttttttttttttttgagacagagtttcgctcttgttgcccaggctggagtgcaacggcacgatctcggctcaccgcaacctccgccccctgggttcaagcaattctcctgcctcagcctcccaagtagctgggattacagtcaggcaccaccacacccggctaattttgtatttttttagtagagacagggtttctccatgtcggtcagggtagtcccgaactcctgacctcaagtgatctgcctgcctcggcctcccaagtgctgggattacaggcgtgagccactgcacccagcctagaatcttgtataatatgtaattgtagggaaactgctctcataggaaagttttctgctttttaaatacaaaaatacataaaaatacataaaatctgatgatgaatataaaaaagtaaccaacctcattggaacaagtattaacattttggaatatgttttattagttttgtgatgtactgttttacaatttttaccatttttttcagtaattactgtaaaatggtattattggaatgaaactatatttcctcatgtgctgatttgtcttatttttttcatactttcccactggtgctatttttatttccaatggatatttctgtattactagggaggcatttacagtcctctaatgttgattaatatgtgaaaagaaattgtaccaattttactaaattatgcagtttaaaatggatgattttatgttatgtggatttcatttcaataaaaaaaaactcttatca

SEQ ID NO: 76982 - DNA, 2607 bp, Homo sapiens
  misc_feature (4)..(4): n is a, c, g, or t
cggntgaactacttaagcttaatttgttaaactccggggctctcaagaacaatggaatatcatcctgatttagaaaatttggatgaagatggatatactcaattacacttcgactctcaaagcaataccaggatagctgttgtttcagagaaaggatcgtgtgctgcatctcctccttggcgcctcattgctgtaattttgggaatcctatgcttggtaatactggtgatagctgtggtcctgggtaccatgggtactgggcagtttctcaaggatctctcatttttaaataacagaagaaagctatttggagatccaattcaggaagcaacacattggagaatggctactttctatcaagaaataaagagaaccacagtcaacccacacaatcatctttagaagacagtgtgactcctaccaaagctgtcaaaaccacaggggttctttccagcccttgtcctcctaattggattatatatgagaagagctgttatctattcagcatgtcactaaattcctgggatggaagtaaaagacaatgctggcaactgggctctaatctcctaaagatagacagctcaaatgaattgagtctcactctgttgcccaagctagagtgcagtgaagccgcgacatcccaggctcaagtgatcctcccacctcagcttcctgagtagggatttatagtaaaacaagtgtcttcccaacctgataattcattttggataggcctttctcggccccagactgaggtaccatggctctgggaggatggatcaacattctcttctaacttatttcagatcagaaccacagctacccaagaaaacccatctccaaattgtgtatggattcacgtgtcagtcatttatgaccaactgtgtagtgtgccctcatatagtatttgtgagaagaagttttcaatgtaagaggaagggtggagaaggagagagaaatatgtgaggtagtaaggaggacagaaaacagaacagaaaagagtaacagctgaggtcaagataaatgcagaaaatgtttagagagcttggccaactgtaatcttaaccaagaaattgaagggagaggctgtgatttctgtatttgtcgacctacaggtaggctagtattatttttctagttagtagatccctagacatggaatcagggcagccaagcttgagtttttattttttatttatttatttttttgagatagggtctcactttgttacccaggctggagtgcagtggcacaatctcgactcactgcagctatctctcgcctcagcccctcaagtagctgggactacaggtgcatgccaccatgccaggctaatttttggtgttttttgtagagactgggttttgccatgttgaccaagctggtctctaactcctgggcttaagtgatctgcccgccttggcctcccaaagtgctgggattacagatgtgagccaccacacctggccccaagcttgaattttcattctgccattgacttggcatttaccttgggtaagccataagcgaatcttaatttctggctctatcagagttgtttcatgctcaacaatgccattgaagtgcacggtgtgttgccacgatttgaccctcaacttctagcagtatatcagttatgaactgagggtgaaatatatttctgaatagctaaatgaagaaatgggaaaaaatcttcaccacagtcagagcaattttattattttcatcagtatgatcataattatgattatcatcttagtaaaaagcaggaactcctactttttctttatcaattaaatagctcagagagtacatctgccatatctctaatagaatcttttttttttttttttttttgagacagagtttcgctcttgttgcccaggctggagtgcaacggcacgatctcggctcaccgcaacctccgccccctgggttcaagcaattctcctgcctcagcctcccaagtagctgggattacagtcaggcaccaccacacccggctaattttgtatttttttagtagagacagggtttctccatgtcggtcagggtagtcccgaactcctgacctcaagtgatctgcctgcctcggcctcccaagtgctgggattacaggcgtgagccactgcacccagcctagaatcttgtataatatgtaattgtagggaaactgctctcataggaaagttttctgctttttaaatacaaaaatacataaaaatacataaaatctgatgatgaatataaaaaagtaaccaacctcattggaacaagtattaacattttggaatatgttttattagttttgtgatgtactgttttacaatttttaccatttttttcagtaattactgtaaaatggtattattggaatgaaactatatttcctcatgtgctgatttgtcttatttttttcatactttcccactggtgctatttttatttccaatggatatttctgtattactagggaggcatttacagtcctctaatgttgattaatatgtgaaaagaaattgtaccaattttactaaattatgcagtttaaaatggatgattttatgttatgtggatttcatttcaataaaaaaaaactcttatca

SEQ ID NO: 76983 - DNA, 2351 bp, Homo sapiens
  misc_feature (4)..(4): n is a, c, g, or t
cggntgaactacttaagcttaatttgttaaactccggggctctcaagaacaatggaatatcatcctgatttagaaaatttggatgaagatggatatactcaattacacttcgactctcaaagcaataccaggatagctgttgtttcagagaaaggatcgtgtgctgcatctcctccttggcgcctcattgctgtaattttgggaatcctatgcttggtaatactggtgatagctgtggtcctgggtaccatggctatttggagatccaattcaggaagcaacacattggagaatggctactttctatcaagaaataaagagaaccacagtcaacccacacaatcatctttagaagacagtgtgactcctaccaaagctgtcaaaaccacaggggttctttccagcccttgtcctcctaattggattatatatgagaagagctgttatctattcagcatgtcactaaattcctgggatggaagtaaaagacaatgctggcaactgggctctaatctcctaaagatagacagctcaaatgaattgatttcagatcagaaccacagctacccaagaaaacccatctccaaattgtgtatggattcacgtgtcagtcatttatgaccaactgtgtagtgtgccctcatatagtatttgtgagaagaagttttcaatgtaagaggaagggtggagaaggagagagaaatatgtgaggtagtaaggaggacagaaaacagaacagaaaagagtaacagctgaggtcaagataaatgcagaaaatgtttagagagcttggccaactgtaatcttaaccaagaaattgaagggagaggctgtgatttctgtatttgtcgacctacaggtaggctagtattatttttctagttagtagatccctagacatggaatcagggcagccaagcttgagtttttattttttatttatttatttttttgagatagggtctcactttgttacccaggctggagtgcagtggcacaatctcgactcactgcagctatctctcgcctcagcccctcaagtagctgggactacaggtgcatgccaccatgccaggctaatttttggtgttttttgtagagactgggttttgccatgttgaccaagctggtctctaactcctgggcttaagtgatctgcccgccttggcctcccaaagtgctgggattacagatgtgagccaccacacctggccccaagcttgaattttcattctgccattgacttggcatttaccttgggtaagccataagcgaatcttaatttctggctctatcagagttgtttcatgctcaacaatgccattgaagtgcacggtgtgttgccacgatttgaccctcaacttctagcagtatatcagttatgaactgagggtgaaatatatttctgaatagctaaatgaagaaatgggaaaaaatcttcaccacagtcagagcaattttattattttcatcagtatgatcataattatgattatcatcttagtaaaaagcaggaactcctactttttctttatcaattaaatagctcagagagtacatctgccatatctctaatagaatcttttttttttttttttttttgagacagagtttcgctcttgttgcccaggctggagtgcaacggcacgatctcggctcaccgcaacctccgccccctgggttcaagcaattctcctgcctcagcctcccaagtagctgggattacagtcaggcaccaccacacccggctaattttgtatttttttagtagagacagggtttctccatgtcggtcagggtagtcccgaactcctgacctcaagtgatctgcctgcctcggcctcccaagtgctgggattacaggcgtgagccactgcacccagcctagaatcttgtataatatgtaattgtagggaaactgctctcataggaaagttttctgctttttaaatacaaaaatacataaaaatacataaaatctgatgatgaatataaaaaagtaaccaacctcattggaacaagtattaacattttggaatatgttttattagttttgtgatgtactgttttacaatttttaccatttttttcagtaattactgtaaaatggtattattggaatgaaactatatttcctcatgtgctgatttgtcttatttttttcatactttcccactggtgctatttttatttccaatggatatttctgtattactagggaggcatttacagtcctctaatgttgattaatatgtgaaaagaaattgtaccaattttactaaattatgcagtttaaaatggatgattttatgttatgtggatttcatttcaataaaaaaaaactcttatca

SEQ ID NO: 76984 - DNA, 2233 bp, Homo sapiens
  misc_feature (4)..(4): n is a, c, g, or t
cggntgaactacttaagcttaatttgttaaactccggggctctcaagaacaatggaatatcatcctgatttagaaaatttggatgaagatggatatactcaattacacttcgactctcaaagcaataccaggatagctgttgtttcagagaaaggggttctttccagcccttgtcctcctaattggattatatatgagaagagctgttatctattcagcatgtcactaaattcctgggatggaagtaaaagacaatgctggcaactgggctctaatctcctaaagatagacagctcaaatgaattgggatttatagtaaaacaagtgtcttcccaacctgataattcattttggataggcctttctcggccccagactgaggtaccatggctctgggaggatggatcaacattctcttctaacttatttcagatcagaaccacagctacccaagaaaacccatctccaaattgtgtatggattcacgtgtcagtcatttatgaccaactgtgtagtgtgccctcatatagtatttgtgagaagaagttttcaatgtaagaggaagggtggagaaggagagagaaatatgtgaggtagtaaggaggacagaaaacagaacagaaaagagtaacagctgaggtcaagataaatgcagaaaatgtttagagagcttggccaactgtaatcttaaccaagaaattgaagggagaggctgtgatttctgtatttgtcgacctacaggtaggctagtattatttttctagttagtagatccctagacatggaatcagggcagccaagcttgagtttttattttttatttatttatttttttgagatagggtctcactttgttacccaggctggagtgcagtggcacaatctcgactcactgcagctatctctcgcctcagcccctcaagtagctgggactacaggtgcatgccaccatgccaggctaatttttggtgttttttgtagagactgggttttgccatgttgaccaagctggtctctaactcctgggcttaagtgatctgcccgccttggcctcccaaagtgctgggattacagatgtgagccaccacacctggccccaagcttgaattttcattctgccattgacttggcatttaccttgggtaagccataagcgaatcttaatttctggctctatcagagttgtttcatgctcaacaatgccattgaagtgcacggtgtgttgccacgatttgaccctcaacttctagcagtatatcagttatgaactgagggtgaaatatatttctgaatagctaaatgaagaaatgggaaaaaatcttcaccacagtcagagcaattttattattttcatcagtatgatcataattatgattatcatcttagtaaaaagcaggaactcctactttttctttatcaattaaatagctcagagagtacatctgccatatctctaatagaatcttttttttttttttttttttgagacagagtttcgctcttgttgcccaggctggagtgcaacggcacgatctcggctcaccgcaacctccgccccctgggttcaagcaattctcctgcctcagcctcccaagtagctgggattacagtcaggcaccaccacacccggctaattttgtatttttttagtagagacagggtttctccatgtcggtcagggtagtcccgaactcctgacctcaagtgatctgcctgcctcggcctcccaagtgctgggattacaggcgtgagccactgcacccagcctagaatcttgtataatatgtaattgtagggaaactgctctcataggaaagttttctgctttttaaatacaaaaatacataaaaatacataaaatctgatgatgaatataaaaaagtaaccaacctcattggaacaagtattaacattttggaatatgttttattagttttgtgatgtactgttttacaatttttaccatttttttcagtaattactgtaaaatggtattattggaatgaaactatatttcctcatgtgctgatttgtcttatttttttcatactttcccactggtgctatttttatttccaatggatatttctgtattactagggaggcatttacagtcctctaatgttgattaatatgtgaaaagaaattgtaccaattttactaaattatgcagtttaaaatggatgattttatgttatgtggatttcatttcaataaaaaaaaactcttatca

SEQ ID NO: 76985 - DNA, 1142 bp, Homo sapiens
ggttgaactacttaagcttaatttgttaaactccggtaagtacctagcccacatgatttgactcagagattctcttttgtccacagacagtcatctcaggagcagaaagaaaagagctcccaaatgctatatctattcaggggctctcaagaacaatggaatatcatcctgatttagaaaatttggatgaagatggatatactcaattacacttcgactctcaaagcaataccaggatagctgttgtttcagagaaaggatcgtgtgctgcatctcctccttggcgcctcattgctgtaattttgggaatcctatgcttggtaatactggtgatagctgtggtcctgggtaccatgggggttctttccagcccttgtcctcctaattggattatatatgagaagagctgttatctattcagcatgtcactaaattcctgggatggaagtaaaagacaatgctggcaactgggctctaatctcctaaagatagacagctcaaatgaattgagtctcactctgttgcccaagctagagtgcagtgaagccgcgacatcccaggctcaagtgatcctcccacctcagcttcctgagtaggtaggactacagggtgcaccaccacactcgtctaatgtttttttgtatttttcatagagacgaggtttctccatatcatctgggctggtctcaaaatcctgggcacaagcgatctgcctacctcgatctcccagtgttgggattacaggtgtaagccaccatacttggccaaaattcatttttaatatctctataattataatcatagcatgccttaagcacataaagtgcatagtatatgcttttatttttaactaatttaaaaaactgtgtttcgccttaaaacaaatcctttcaaacatactccatgtatgcatgactacaataatcaggacactacccatttttgtgagtttgtatttcaatttttaaatatggtggaagtaaagtagaaaattcttctccttgtcatcataattatcaagaaaaatggcaacaatgataatatatgtttagaaattatttactctttgcaagatactgggaaaggcaaagagggttaaaacataaccctgctatcacaggacacatataatcttttaagta

SEQ ID NO: 76986 - DNA, 622 bp, Homo sapiens
  misc_feature (4)..(4): n is a, c, g, or t
cggntgaactacttaagcttaatttgttaaactccggggctctcaagaacaatggaatatcatcctgatttagaaaatttggatgaagatggatatactcaattacacttcgactctcaaagcaataccaggatagctgttgtttcagagaaaggatcgtgtgctgcatctcctccttggcgcctcattgctgtaattttgggaatcctatgcttggtaatactggtgatagctgtggtcctgggtaccatgggggttctttccagcccttgtcctcctaattggattatatatgagaagagctgttatctattcagcatgtcactaaattcctgggatggaagtaaaagacaatgctggcaactgggctctaatctcctaaagatagacagctcaaatgaattgggatttatagtaaaacaagtgtcttcccaacctgataattcattttggataggcctttctcggccccagactgaggtaccatggctctgggaggatggatcaacattctcttctaactttttaactagtttccttcttgctgcccaggcttgaagtgaacggcacgatacttgttcaccggaaacctggcccctgggtttaagcgatttttccggcc

SEQ ID NO: 76987 - DNA, 611 bp, Homo sapiens
tctccacagcaatatatcatctatttatcattaatcaataatgtattcttttattccaataacatttgggttttgggattttaattttcaaacacagcagaatgacattttttctgtcactattattattgttggtatgtgaagctatttggagatccaattcaggaagcaacacattggagaatggctactttctatcaagaaataaagagaaccacagtcaacccacacaatcatctttagaagacagtgtgactcctaccaaagctgtcaaaaccacaggcaagggcatagttaaaggacggaatcttgactcaagagggttaattcttggtgctgaagcctggggcaggggtgtaaagaaaaacacttagattcaatgattgtaaatttaaggcaaatacacatattagtattaccttagtgtaatgtatccctgtcatatatacaataaggtgaaattataagtaccctatgcagttggctggacagttctaaattggactttattaatttttaaaatcagtaactgatttatcactggctatgtgcttagatctacaggagatcatataatttgatacaaataaaagaaaagtgttctctcccct

SEQ ID NO: 76988 - DNA, 2436 bp, Homo sapiens
ggttgaactacttaagcttaatttgttaaactccggtaagtacctagcccacatgatttgactcagagattctcttttgtccacagacagtcatctcaggagcagaaagaaaagagctcccaaatgctatatctattcaggggctctcaagaacaatggaatatcatcctgatttagaaaatttggatgaagatggatatactcaattacacttcgactctcaaagcaataccaggatagctgttgtttcagagaaaggatcgtgtgctgcatctcctccttggcgcctcattgctgtaattttgggaatcctatgcttggtaatactggtgatagctgtggtcctgggtaccatgggggttctttccagcccttgtcctcctaattggattatatatgagaagagctgttatctattcagcatgtcactaaattcctgggatggaagtaaaagacaatgctggcaactgggctctaatctcctaaagatagacagctcaaatgaattgggatttatagtaaaacaagtgtcttcccaacctgataattcattttggataggcctttctcggccccagactgaggtaccatggctctgggaggatggatcaacattctcttctaacttatttcagatcagaaccacagctacccaagaaaacccatctccaaattgtgtatggattcacgtgtcagtcatttatgaccaactgtgtagtgtgccctcatatagtatttgtgagaagaagttttcaatgtaagaggaagggtggagaaggagagagaaatatgtgaggtagtaaggaggacagaaaacagaacagaaaagagtaacagctgaggtcaagataaatgcagaaaatgtttagagagcttggccaactgtaatcttaaccaagaaattgaagggagaggctgtgatttctgtatttgtcgacctacaggtaggctagtattatttttctagttagtagatccctagacatggaatcagggcagccaagcttgagtttttattttttatttatttatttttttgagatagggtctcactttgttacccaggctggagtgcagtggcacaatctcgactcactgcagctatctctcgcctcagcccctcaagtagctgggactacaggtgcatgccaccatgccaggctaatttttggtgttttttgtagagactgggttttgccatgttgaccaagctggtctctaactcctgggcttaagtgatctgcccgccttggcctcccaaagtgctgggattacagatgtgagccaccacacctggccccaagcttgaattttcattctgccattgacttggcatttaccttgggtaagccataagcgaatcttaatttctggctctatcagagttgtttcatgctcaacaatgccattgaagtgcacggtgtgttgccacgatttgaccctcaacttctagcagtatatcagttatgaactgagggtgaaatatatttctgaatagctaaatgaagaaatgggaaaaaatcttcaccacagtcagagcaattttattattttcatcagtatgatcataattatgattatcatcttagtaaaaagcaggaactcctactttttctttatcaattaaatagctcagagagtacatctgccatatctctaatagaatcttttttttttttttttttttgagacagagtttcgctcttgttgcccaggctggagtgcaacggcacgatctcggctcaccgcaacctccgccccctgggttcaagcaattctcctgcctcagcctcccaagtagctgggattacagtcaggcaccaccacacccggctaattttgtatttttttagtagagacagggtttctccatgtcggtcagggtagtcccgaactcctgacctcaagtgatctgcctgcctcggcctcccaagtgctgggattacaggcgtgagccactgcacccagcctagaatcttgtataatatgtaattgtagggaaactgctctcataggaaagttttctgctttttaaatacaaaaatacataaaaatacataaaatctgatgatgaatataaaaaagtaaccaacctcattggaacaagtattaacattttggaatatgttttattagttttgtgatgtactgttttacaatttttaccatttttttcagtaattactgtaaaatggtattattggaatgaaactatatttcctcatgtgctgatttgtcttatttttttcatactttcccactggtgctatttttatttccaatggatatttctgtattactagggaggcatttacagtcctctaatgttgattaatatgtgaaaagaaattgtaccaattttactaaattatgcagtttaaaatggatgattttatgttatgtggatttcatttcaataaaaaaaaactcttatca

SEQ ID NO: 76989 - DNA, 1567 bp, Homo sapiens
  misc_feature (4)..(4): n is a, c, g, or t
cggntgaactacttaagcttaatttgttaaactccggggctctcaagaacaatggaatatcatcctgatttagaaaatttggatgaagatggatatactcaattacacttcgactctcaaagcaataccaggatagctgttgtttcagagaaaggatcgtgtgctgcatctcctccttggcgcctcattgctgtaattttgggaatcctatgcttggtaatactggtgatagctgtggtcctgggtaccatggctatttggagatccaattcaggaagcaacacattggagaatggctactttctatcaagaaataaagagaaccacagtcaacccacacaatcatctttagaagacagtgtgactcctaccaaagctgtcaaaaccacaggggttctttccagcccttgtcctcctaattggattatatatgagaagagctgttatctattcagcatgtcactaaattcctgggatggaagtaaaagacaatgctggcaactgggctctaatctcctaaagatagacagctcaaatgaattgggatttatagtaaaacaagtgtcttcccaacctgataattcattttggataggcctttctcggccccagactgaggtaccatggctctgggaggatggatcaacattctcttctaacttatttcagatcagaaccacagctacccaagaaaacccatctccaaattgtgtatggattcacgtgtcagtcatttatgaccaactgtgtagtgtgccctcatatagtatttgtgagaagaagttttcaatgtaagaggaagggtggagaaggagagagaaatatgtgaggtagtaaggaggacagaaaacagaacagaaaagagtaacagctgaggtcaagataaatgcagaaaatgtttagagagcttggccaactgtaatcttaaccaagaaattgaagggagaggctgtgatttctgtatttgtcgacctacaggtaggctagtattatttttctagttagtagatccctagacatggaatcagggcagccaagcttgagtttttattttttatttatttatttttttgagatagggtctcactttgttacccagcctagaatcttgtataatatgtaattgtagggaaactgctctcataggaaagttttctgctttttaaatacaaaaatacataaaaatacataaaatctgatgatgaatataaaaaagtaaccaacctcattggaacaagtattaacattttggaatatgttttattagttttgtgatgtactgttttacaatttttaccatttttttcagtaattactgtaaaatggtattattggaatgaaactatatttcctcatgtgctgatttgtcttatttttttcatactttcccactggtgctatttttatttccaatggatatttctgtattactagggaggcatttacagtcctctaatgttgattaatatgtgaaaagaaattgtaccaattttactaaattatgcagtttaaaatggatgattttatgttatgtggatttcatttcaataaaaaaaaactcttatca

SEQ ID NO: 76990 - DNA, 2213 bp, Homo sapiens
  misc_feature (4)..(4): n is a, c, g, or t
cggntgaactacttaagcttaatttgttaaactccggggctctcaagaacaatggaatatcatcctgatttagaaaatttggatgaagatggatatactcaattacacttcgactctcaaagcaataccaggatagctgttgtttcagagaaaggatcgtgtgctgcatctcctccttggcgcctcattgctgtaattttgggaatcctatgcttggtaatactggtgatagctgtggtcctgggtaccatgggggttctttccagcccttgtcctcctaattggattatatatgagaagagctgttatctattcagcatgtcactaaattcctgggatggaagtaaaagacaatgctggcaactgggctctaatctcctaaagatagacagctcaaatgaattgatttcagatcagaaccacagctacccaagaaaacccatctccaaattgtgtatggattcacgtgtcagtcatttatgaccaactgtgtagtgtgccctcatatagtatttgtgagaagaagttttcaatgtaagaggaagggtggagaaggagagagaaatatgtgaggtagtaaggaggacagaaaacagaacagaaaagagtaacagctgaggtcaagataaatgcagaaaatgtttagagagcttggccaactgtaatcttaaccaagaaattgaagggagaggctgtgatttctgtatttgtcgacctacaggtaggctagtattatttttctagttagtagatccctagacatggaatcagggcagccaagcttgagtttttattttttatttatttatttttttgagatagggtctcactttgttacccaggctggagtgcagtggcacaatctcgactcactgcagctatctctcgcctcagcccctcaagtagctgggactacaggtgcatgccaccatgccaggctaatttttggtgttttttgtagagactgggttttgccatgttgaccaagctggtctctaactcctgggcttaagtgatctgcccgccttggcctcccaaagtgctgggattacagatgtgagccaccacacctggccccaagcttgaattttcattctgccattgacttggcatttaccttgggtaagccataagcgaatcttaatttctggctctatcagagttgtttcatgctcaacaatgccattgaagtgcacggtgtgttgccacgatttgaccctcaacttctagcagtatatcagttatgaactgagggtgaaatatatttctgaatagctaaatgaagaaatgggaaaaaatcttcaccacagtcagagcaattttattattttcatcagtatgatcataattatgattatcatcttagtaaaaagcaggaactcctactttttctttatcaattaaatagctcagagagtacatctgccatatctctaatagaatcttttttttttttttttttttgagacagagtttcgctcttgttgcccaggctggagtgcaacggcacgatctcggctcaccgcaacctccgccccctgggttcaagcaattctcctgcctcagcctcccaagtagctgggattacagtcaggcaccaccacacccggctaattttgtatttttttagtagagacagggtttctccatgtcggtcagggtagtcccgaactcctgacctcaagtgatctgcctgcctcggcctcccaagtgctgggattacaggcgtgagccactgcacccagcctagaatcttgtataatatgtaattgtagggaaactgctctcataggaaagttttctgctttttaaatacaaaaatacataaaaatacataaaatctgatgatgaatataaaaaagtaaccaacctcattggaacaagtattaacattttggaatatgttttattagttttgtgatgtactgttttacaatttttaccatttttttcagtaattactgtaaaatggtattattggaatgaaactatatttcctcatgtgctgatttgtcttatttttttcatactttcccactggtgctatttttatttccaatggatatttctgtattactagggaggcatttacagtcctctaatgttgattaatatgtgaaaagaaattgtaccaattttactaaattatgcagtttaaaatggatgattttatgttatgtggatttcatttcaataaaaaaaaactcttatca

SEQ ID NO: 76991 - DNA, 2513 bp, Homo sapiens
  misc_feature (4)..(4): n is a, c, g, or t
cggntgaactacttaagcttaatttgttaaactccggggctctcaagaacaatggaatatcatcctgatttagaaaatttggatgaagatggatatactcaattacacttcgactctcaaagcaataccaggatagctgttgtttcagagaaaggatcgtgtgctgcatctcctccttggcgcctcattgctgtaattttgggaatcctatgcttggtaatactggtgatagctgtggtcctgggtaccatggctatttggagatccaattcaggaagcaacacattggagaatggctactttctatcaagaaataaagagaaccacagtcaacccacacaatcatctttagaagacagtgtgactcctaccaaagctgtcaaaaccacaggggttctttccagcccttgtcctcctaattggattatatatgagaagagctgttatctattcagcatgtcactaaattcctgggatggaagtaaaagacaatgctggcaactgggctctaatctcctaaagatagacagctcaaatgaattgagtctcactctgttgcccaagctagagtgcagtgaagccgcgacatcccaggctcaagtgatcctcccacctcagcttcctgagtagggatttatagtaaaacaagccccagactgaggtaccatggctctgggaggatggatcaacattctcttctaacttatttcagatcagaaccacagctacccaagaaaacccatctccaaattgtgtatggattcacgtgtcagtcatttatgaccaactgtgtagtgtgccctcatatagtatttgtgagaagaagttttcaatgtaagaggaagggtggagaaggagagagaaatatgtgaggtagtaaggaggacagaaaacagaacagaaaagagtaacagctgaggtcaagataaatgcagaaaatgtttagagagcttggccaactgtaatcttaaccaagaaattgaagggagaggctgtgatttctgtatttgtcgacctacaggtaggctagtattatttttctagttagtagatccctagacatggaatcagggcagccaagcttgagtttttattttttatttatttatttttttgagatagggtctcactttgttacccaggctggagtgcagtggcacaatctcgactcactgcagctatctctcgcctcagcccctcaagtagctgggactacaggtgcatgccaccatgccaggctaatttttggtgttttttgtagagactgggttttgccatgttgaccaagctggtctctaactcctgggcttaagtgatctgcccgccttggcctcccaaagtgctgggattacagatgtgagccaccacacctggccccaagcttgaattttcattctgccattgacttggcatttaccttgggtaagccataagcgaatcttaatttctggctctatcagagttgtttcatgctcaacaatgccattgaagtgcacggtgtgttgccacgatttgaccctcaacttctagcagtatatcagttatgaactgagggtgaaatatatttctgaatagctaaatgaagaaatgggaaaaaatcttcaccacagtcagagcaattttattattttcatcagtatgatcataattatgattatcatcttagtaaaaagcaggaactcctactttttctttatcaattaaatagctcagagagtacatctgccatatctctaatagaatcttttttttttttttttttttgagacagagtttcgctcttgttgcccaggctggagtgcaacggcacgatctcggctcaccgcaacctccgccccctgggttcaagcaattctcctgcctcagcctcccaagtagctgggattacagtcaggcaccaccacacccggctaattttgtatttttttagtagagacagggtttctccatgtcggtcagggtagtcccgaactcctgacctcaagtgatctgcctgcctcggcctcccaagtgctgggattacaggcgtgagccactgcacccagcctagaatcttgtataatatgtaattgtagggaaactgctctcataggaaagttttctgctttttaaatacaaaaatacataaaaatacataaaatctgatgatgaatataaaaaagtaaccaacctcattggaacaagtattaacattttggaatatgttttattagttttgtgatgtactgttttacaatttttaccatttttttcagtaattactgtaaaatggtattattggaatgaaactatatttcctcatgtgctgatttgtcttatttttttcatactttcccactggtgctatttttatttccaatggatatttctgtattactagggaggcatttacagtcctctaatgttgattaatatgtgaaaagaaattgtaccaattttactaaattatgcagtttaaaatggatgattttatgttatgtggatttcatttcaataaaaaaaaactcttatca

SEQ ID NO: 76992 - DNA, 569 bp, Homo sapiens
ggttgaactacttaagcttaatttgttaaactccggtaagtacctagcccacatgatttgactcagagattctcttttgtccacagacagtcatctcaggagcagaaagaaaagagctcccaaatgctatatctattcaggggctctcaagaacaatggaatatcatcctgatttagaaaatttggatgaagatggatatactcaattacacttcgactctcaaagcaataccaggatagctgttgtttcagagaaaggatcgtgtgctgcatctcctccttggcgcctcattgctgtaattttgggaatcctatgcttggtaatactggtgatagctgtggtcctgggtaccatgggtgagtatttggtggaggagattaacaacagacaatttagtaagcaattattatgtgccaggcactcttttaagggcttgacatgcataatctactttaatttgtatataatctggttttatctgtattgggttggtgctgttaatgcccatttcacttataaagggtgagagagactgagaggttattttacctttccagggttataagct

SEQ ID NO: 76993 - DNA, 2081 bp, Homo sapiens
  misc_feature (4)..(4): n is a, c, g, or t
cggntgaactacttaagcttaatttgttaaactccggggctctcaagaacaatggaatatcatcctgatttagaaaatttggatgaagatggatatactcaattacacttcgactctcaaagcaataccaggatagctgttgtttcagagaaagggatttatagtaaaacaagtgtcttcccaacctgataattcattttggataggcctttctcggccccagactgaggtaccatggctctgggaggatggatcaacattctcttctaacttatttcagatcagaaccacagctacccaagaaaacccatctccaaattgtgtatggattcacgtgtcagtcatttatgaccaactgtgtagtgtgccctcatatagtatttgtgagaagaagttttcaatgtaagaggaagggtggagaaggagagagaaatatgtgaggtagtaaggaggacagaaaacagaacagaaaagagtaacagctgaggtcaagataaatgcagaaaatgtttagagagcttggccaactgtaatcttaaccaagaaattgaagggagaggctgtgatttctgtatttgtcgacctacaggtaggctagtattatttttctagttagtagatccctagacatggaatcagggcagccaagcttgagtttttattttttatttatttatttttttgagatagggtctcactttgttacccaggctggagtgcagtggcacaatctcgactcactgcagctatctctcgcctcagcccctcaagtagctgggactacaggtgcatgccaccatgccaggctaatttttggtgttttttgtagagactgggttttgccatgttgaccaagctggtctctaactcctgggcttaagtgatctgcccgccttggcctcccaaagtgctgggattacagatgtgagccaccacacctggccccaagcttgaattttcattctgccattgacttggcatttaccttgggtaagccataagcgaatcttaatttctggctctatcagagttgtttcatgctcaacaatgccattgaagtgcacggtgtgttgccacgatttgaccctcaacttctagcagtatatcagttatgaactgagggtgaaatatatttctgaatagctaaatgaagaaatgggaaaaaatcttcaccacagtcagagcaattttattattttcatcagtatgatcataattatgattatcatcttagtaaaaagcaggaactcctactttttctttatcaattaaatagctcagagagtacatctgccatatctctaatagaatcttttttttttttttttttttgagacagagtttcgctcttgttgcccaggctggagtgcaacggcacgatctcggctcaccgcaacctccgccccctgggttcaagcaattctcctgcctcagcctcccaagtagctgggattacagtcaggcaccaccacacccggctaattttgtatttttttagtagagacagggtttctccatgtcggtcagggtagtcccgaactcctgacctcaagtgatctgcctgcctcggcctcccaagtgctgggattacaggcgtgagccactgcacccagcctagaatcttgtataatatgtaattgtagggaaactgctctcataggaaagttttctgctttttaaatacaaaaatacataaaaatacataaaatctgatgatgaatataaaaaagtaaccaacctcattggaacaagtattaacattttggaatatgttttattagttttgtgatgtactgttttacaatttttaccatttttttcagtaattactgtaaaatggtattattggaatgaaactatatttcctcatgtgctgatttgtcttatttttttcatactttcccactggtgctatttttatttccaatggatatttctgtattactagggaggcatttacagtcctctaatgttgattaatatgtgaaaagaaattgtaccaattttactaaattatgcagtttaaaatggatgattttatgttatgtggatttcatttcaataaaaaaaaactcttatca

SEQ ID NO: 76994 - DNA, 450 bp, Homo sapiens
tgggatttcaacacactagagtattaatatacctgtaaaaggaaatggactattttctactgttgcataatctctaagagatattattttttaaagtaaggtataggacaacatgtacaataatgctacctttagtaagggtagaaaaaaatgaaaatgtgcattcatttgcttatattaaaagaataacgaatagaaagcaaacttaaaaactgattgaagagaacagatggaggagagaacgatagaagctagactttcctgaatgtaccttgctttgtggcttactttggaactattaaatgtgatatataattatgaaataacattttaaaaagttgagggaggaacttatcctttaaaagttgaaagtaatggccaggtgtggtggctcacgcctataatcccagcactttgcgaggcttgaggcaccccccccctccaccaaaa

SEQ ID NO: 76995 - DNA, 937 bp, Homo sapiens
cgcgtggccctcggcgccgccaccctagctggcgcagtcttgacactgcatccttccctcctagtgccttaccgagcgacagacgcggcgtgagggtttacttccactggtactccaagaaactgaggctagtcagacacaatctcagctcttctgttgtgctgttgtaacagtttacgctggccttttttttttctttttctttttctttttaaaatgttaatgcccgttgtctttcctgggctgtttgctagcggaaggatgccagggaagccagcaggagctaggagagagtccgtggatctcgaaagaaatatgggagacagatgcccggcgggtgcgtctggagatggggacggcgggagttgagttgtggcagtagttgagttgtaatttgtgggcggaggcccagagagactccccacccttcacccctgccccactctgtccccagttccgccatttgtgaggccagaggtttccggactgttggcctcgccaggcagccgtctcccgccccaggcggcatcccccagtccctcccgcctccacgagagcctggagctctcagcctcgcccggggctccactctctcctccggctccctgggctgttttgctctaacgatcttgccagatccctccctctgtagacaaccaccaacctctgtttgctgttgaattctctcctcacattacccaggtctgctcaagacatgattttggttttggtttctgagggttctagtgggcagaaggttggagggacacttatgagggtggccgggggtctgacgctgcactttggaaaaactcacacagttgaatttccaaagaaatctgccctttgccctctttgcacctttgatacattctggaagttttctcaggctttggacacttctggggatggaggtgtggagaagtggggagttccc

SEQ ID NO: 76996 - DNA, 410 bp, Homo sapiens
actgaagaaattaggctcgaagaggtcacatgacttagccatggtcacaaggcagaggcagagctagaactttatttttgcagtttggtttattgaaccaattaaaataaataatagcatggtaaagacaacaccgtatgaccttggaaaggaaacaaacctctctagtcatgcacagcagttctttctagcacgtggtcctagaaatttcattttttcttttttataattttttttatggcccaagaaatttcaaaacatgcttccccactttaccatgtggaggagaaatagatctgtgagaatgggtaggcaagaagagaagagaccatcctttaaatgatgtttattgtataaaagtaattatttggactttaaaaccactcaagaataaagttcgcatccagaaa

SEQ ID NO: 76997 - DNA, 403 bp, Homo sapiens
acaggaagacaatgggaatctgcccatcttagccagattagggggaagaaatctcccttgaaaatttttagccatagacctccccacagtcagctttaatctttgagcttatataaatatattttaaatgagcaaagttggtccttaggcagtaatacagaagcaaatagggacaaatctcaaccctgcagcataggatttctgtagctaacaccctacaaaagatgagctcacaatccaaaataatgaaacataaggaagcaatccacattgaatgacagtaacagacataaaaaatggtggaattggactcccccaaaactgcagataaaagagttatgtaaactaaaaataaatatatgcaatgttactaatgacataagaaaaaggaactgacctcatg

SEQ ID NO: 76998 - DNA, 877 bp, Homo sapiens
caatgggtattacagcactaaattacggcgaaatgtttaagacgcccagtaagggcgtaacggactccatttggaggattgggactgggcccccctggaggtagacggtaaaataagttcatatggcaaagagcccatcaccgctcaattggaacgcagtcaggcgtcttgcgaaacagtctggaatttaatcgcaatgatcctattattaaccagcggctcagatatattttgatcgcgaaactttaaacaaattcgggataaaaagaaaatcaatctcttgaaaaacatagatgaaaaactcacagaagcagccagagaattggggtactcgcttgaacagagaaccgtgaagatgaaacagagagataagaaagttgtgacaaagacctttcatggtgcaggcttggttgttccagtagataaaaatgatgttgggtaccgagagctccctgaaacagatgctgacctcaagagaatttgcaagacaatagttgaggctgcaagtgatgaggagagactaaaagcttttgctcccattcaggaaatgatgacttttgtgcagtttgctaatgatgaatgtgattatggcatggggcttgaattgggaatggatctcttttgctatggctcacattattttcataaagttgctggccagcttttacctcttgcatataatctgttgaagaggaatctgtttgcagaaattattgaggagcatctggcaaacagaagtcaagagaacatagaccaacttgctgcatgagtaaggtggctttgattggtgtacagtatttcaaaggactagtattaaacttgtgatttttgttttgtttttaaggaatacaaaaaataaacatttactaaaaacgtt

SEQ ID NO: 76999 - DNA, 785 bp, Homo sapiens
acgcgatagggggagggggtggagagtagggggttaggttgtggggtatgagttgggggggggaagtgggatcatcgggggggtgcaccggttcgtttccaatgtcctagaagagtggaagagggatgctctggggtgcggggcgtgggattgggggggccgtgataggaggggtggggagacagaatcgagacaagcagggaagggatgtgttagatgtgattggcgctcaggaggaaagtggataaggagaagattatgaatatgtggaagggggatagaaagggggggcagaagcttaacatataaagtgaaagggggtactcaatggataacaagtacgaatgggacagacagttccctgaaacatagctgacctcaagagaatttgcaagacaatagttgaggctgcaagtgatgaggagagactaaaagcttttgctcccattcaggaaatgatgacttttgtgcagtttgctaatgatgaatgtgattatggcatggggcttgaattgggaatggatctcttttgctatggctcacattattttcataaagttgctggccagcttttacctcttgcatataatctgttgaagaggaatctgtttgcagaaattattgaggagcatctggcaaacagaagtcaagagaacatagaccaacttgctgcatgagtaaggtggctttgattggtgtacagtatttcaaaggactagtattaaacttgtgatttttgttttgtttttaaggaatacaaaaaataaacatttactaaaaacgtt

SEQ ID NO: 77000 - DNA, 1486 bp, Homo sapiens
gttttactatgatcctcctgagttccagaaaatcattataagctttctttacctgaagatttctatcacttctggaagttctgtgaagaacttgatcctgaaaagccatctgattcactttctgcaagccttggacttcaattagttggtccttatgatatccttgctggaaaacataaaacgaagaaaaaatcaacaggcctgaattttaaccttcactggaggttttactatgatcctcctgagttccagaccattattattggagataataaaactcagtaccacatggggtatttcagggattctcctgatgaatttcctgtatatgttggtataaatgaagcaaagaaaaattgtataattgttccaaatggagataatgtatttgctgcagtcaaattatttttgacgaaaaaacttaaagaaataacggataaaaagaaaatcaatctcttgaaaaacatagatgaaaaactcacagaagcagccagagaattggggtactcgcttgaacagagaaccgtgaagatgaaacagagagataagaaagttgtgacaaagacctttcatggtgcaggcttggttgttccagtagataaaaatgatgttgggtaccgagagctccctgaaacagatgctgacctcaagagaatttgcaagacaatagttgaggctgcaagtgatgaggagagactaaaagcttttgctcccattcaggaaatgatgacttttgtgcagtttgctaatgatgaatgtgattatggcatggggcttgaattgggaatggatctcttttgctatggctcacattattttcataaagttgctggccagcttttacctcttgcatataatctgttgaagaggaatctgtttgcagaaattattgaggagcatctggcaaacagaagtcaagagaacatagaccaacttgctgcatgagtaaggtggctttgattggtgtacagtatttcaaaggactagtattaaacttgtgatttttgttttgtttttaaggaatacaaaaaataaacatttactaaaaacgttaaaaaaaaaacacacaacacaaaaaacaaaaaaaaaacaaagaaaaaaaaacaaaaggaacaaaaaaaatagaagacaaaagaaaaaaaacaaacgcagcaaacaacgaaccaagcgcgcaaagagaaggaaacagcgcgcacacacaacccgcaaccacggacggaagaaaaaagagatacacagagcaggaggggcggcgcaatagacaaaaccactgcgagcgacgcacgccaccgagcacgacaaaatcacgcatggctaagaagaaagacgacgaccacacggaggagagcgtcttacatcagagaaggcccgcgcgcggcagaaccaacccagagacgatgcaccaacacaaccgcgtgagtcactgcgaagacacccaactcggggagggatgcgagcacacacaacgctactaaggcgaccagac

SEQ ID NO: 77001 - DNA, 993 bp, Homo sapiens
gtgctgaagactactacccaaggtggcacaagttgtattagtacaaagtcttaggaggaaaaaccctctttataatcttcttacttttgaagactgattcattttctaactatgtagataatcttttatattattgatttctttcagctgacctcaagagaatttgcaagacaatagttgaggctgcaagtgatgaggagagactaaaagcttttgctcccattcaggaaatgatgacttttgtgcagtttgctaatgatgaatgtgattatggcatggggcttgaattgggaatggatctcttttgctatggctcacattattttcataaagttgctggccagcttttacctcttgcatataatctgttgaagaggaatctgtttgcagaaattattgaggagcatctggcaaacagaagtcaagagaacatagaccaacttgctgcatgagtaaggtggctttgattggtgtacagtatttcaaaggactagtattaaacttgtgatttttgttttgtttttaaggaatacaaaaaataaacatttactaaaaacgttaaaaaaaaaacacacaacacaaaaaacaaaaaaaaaacaaagaaaaaaaaacaaaaggaacaaaaaaaatagaagacaaaagaaaaaaaacaaacgcagcaaacaacgaaccaagcgcgcaaagagaaggaaacagcgcgcacacacaacccgcaaccacggacggaagaaaaaagagatacacagagcaggaggggcggcgcaatagacaaaaccactgcgagcgacgcacgccaccgagcacgacaaaatcacgcatggctaagaagaaagacgacgaccacacggaggagagcgtcttacatcagagaaggcccgcgcgcggcagaaccaacccagagacgatgcaccaacacaaccgcgtgagtcactgcgaagacacccaactcggggagggatgcgagcacacacaacgctactaaggcgaccagac

SEQ ID NO: 77002 - DNA, 361 bp, Homo sapiens
gtgtagctaaaatgattttggaagtagcctttgttaaacaagtgctttgttgatatattttctgctacttattaggatatctgctatattctctgcttaatgttatatttttatttttcagtattttcataaagttgctggccagcttttacctcttgcatataatctgttgaagaggaatctgtttgcagaaattattgaggagcatctggcaaacagaagtcaagagaacatagaccaacttgctgcatgagtaaggtggctttgattggtgtacagtatttcaaaggactagtattaaacttgtgatttttgttttgtttttaaggaatacaaaaaataaacatttactaaaaacgtt

SEQ ID NO: 77003 - DNA, 1211 bp, Homo sapiens
ggttggcggcgctcggaagcggcccgcggatcggggaattctgctggcgctgcagctgcagaatggtcggcggtggcgggaagcgcaggcccggcggggaggggccgcagtgtgaaaaaacaactgatgtgaagaaaagtaaattctgtgaagctgatgtctccagtgaccttcgaaaagaagtagaaaatcattataagctttctttacctgaagatttctatcacttctggaagttctgtgaagaacttgatcctgaaaagccatctgattcactttctgcaagccttggacttcaattagttggtccttatgatatccttgctggaaaacataaaacgaagaaaaaatcaacaggcctgaattttaaccttcactggaggttttactatgatcctcctgagttccagaccattattattggagataataaaactcagtaccacatggggtatttcagggattctcctgatgaatttcctgtatatgttggtataaatgaagcaaagaaaaattgtataattgttccaaatggagataatgtatttgctgcagtcaaattatttttgacgaaaaaacttaaagaaataacggataaaaagaaaatcaatctcttgaaaaacatagatgaaaaactcacagaagcagccagagaattggggtactcgcttgaacagagaaccgtgaagatgaaacagagagataagaaagttgtgacaaagacctttcatggtgcaggcttggttgttccagtagataaaaatgatgttgggtaccgagagctccctgaaacagatgctgacctcaagagaatttgcaagacaatagttgaggctgcaagtgatgaggagagactaaaagcttttgctcccattcaggaaatgatgacttttgtgcagtttgctaatgatgaatgtgattatggcatggggcttgaattgggaatggatctcttttgctatggctcacattattttcataaagttgctggccagcttttacctcttgcatataatctgttgaagaggaatctgtttgcagaaattattgaggagcatctggcaaacagaagtcaagagaacatagaccaacttgctgcatgagtaaggtggctttgattggtgtacagtatttcaaaggactagtattaaacttgtgatttttgttttgtttttaaggaatacaaaaaataaacatttactaaaaacgtt

SEQ ID NO: 77004 - DNA, 1644 bp, Homo sapiens
ggttggcggcgctcggaagcggcccgcggatcggggaattctgctggcgctgcagctgcagaatggtcggcggtggcgggaagcgcaggcccggcggggaggggccgcagtgtgaaaaaacaactgatgtgaagaaaagtaaattctgtgaagctgatgtctccagtgaccttcgaaaagaagtagaaaatcattataagctttctttacctgaagatttctatcacttctggaagttctgtgaagaacttgatcctgaaaagccatctgattcactttctgcaagccttggacttcaattagttggtccttatgatatccttgctggaaaacataaaacgaagaaaaaatcaacaggcctgaattttaaccttcactggaggttttactatgatcctcctgagttccagaccattattattggagataataaaactcagtaccacatggggtatttcagggattctcctgatgaatttcctgtatatgttggtataaatgaagcaaagaaaaattgtataattgttccaaatggagataatgtatttgctgcagtcaaattatttttgacgaaaaaacttaaagaaataacggataaaaagaaaatcaatctcttgaaaaacatagatgaaaaactcacagaagcagccagagaattggggtactcgcttgaacagagaaccgtgaagatgaaacagagagataagaaagttgtgacaaagacctttcatggtgcaggcttggttgttccagtagataaaaatgatgttgggtaccgagagctccctgaaacagatgctgacctcaagagaatttgcaagacaatagttgaggctgcaagtgatgaggagagactaaaagcttttgctcccattcaggaaatgatgacttttgtgcagtttgctaatgatgaatgtgattatggcatggggcttgaattgggaatggatctcttttgctatggctcacattattttcataaagttgctggccagcttttacctcttgcatataatctgttgaagaggaatctgtttgcagaaattattgaggagcatctggcaaacagaagtcaagagaacatagaccaacttgctgcatgagtaaggtggctttgattggtgtacagtatttcaaaggactagtattaaacttgtgatttttgttttgtttttaaggaatacaaaaaataaacatttactaaaaacgttaaaaaaaaaacacacaacacaaaaaacaaaaaaaaaacaaagaaaaaaaaacaaaaggaacaaaaaaaatagaagacaaaagaaaaaaaacaaacgcagcaaacaacgaaccaagcgcgcaaagagaaggaaacagcgcgcacacacaacccgcaaccacggacggaagaaaaaagagatacacagagcaggaggggcggcgcaatagacaaaaccactgcgagcgacgcacgccaccgagcacgacaaaatcacgcatggctaagaagaaagacgacgaccacacggaggagagcgtcttacatcagagaaggcccgcgcgcggcagaaccaacccagagacgatgcaccaacacaaccgcgtgagtcactgcgaagacacccaactcggggagggatgcgagcacacacaacgctactaaggcgaccagac

SEQ ID NO: 77005 - DNA, 606 bp, Homo sapiens
aagtgcatccaaggccctgggttctccagccctgccacaaccttgctctgtgacctccagcaagaccctgccccttctgggcgtgtgcgtagtatgagggaggacctagctcagtgccaagccccagcaggatgtctttcctcaaccgcagccacgggtctcagcccatggaagaataaacctccccctgtgaggctgttgtgacagttttgagaaaaggttcagactcagaggctgccagatgggaagggacccttgtgagtcagtgctgagccgccccacatcctggccttggcctggaagctttgtggtgtcctgcttgcaggagagggtagagagggtcacgtcccagccaccttcttggcactctcagaggtgtccatgggggaggccccagcgtggctaaagaagaccggaggcctcgctgggtggacagtccagtgggtaagagcggggccttggtggcagaggccctgaggtgaacccggctctgcctgtgactgagccaggccacttaacctccctgaactgcagtgtctgaggctgtcaaaggggattattcagagttttaactgaagaacagagatgtcagcctcttattctaag

SEQ ID NO: 77006 - DNA, 675 bp, Homo sapiens
tcagtgagctatgatcacaccgcgcattccaaccagggcgacagagtgaggcccatccccatatatatatatatatgatggattataaggtatcaaagattcaaagcctgtttgtcaagagaaaattttaaaactggagtctagttttggtaaagatatttgctgtttgaataaaatgaacaaagatttgacaaactatagttttctgcttttgtatatcttacgttgttttcagaaatttcttctgtgtaaagatatgtcaatatctttgaaagaatgttttgattgagtaggccataaattagtagtctagggcaagggtcagcatacttgagcccattgcttctttttataaatacaaatacagtttgttagagcatagcatgcatatacatttatatgttgttcatggcaaatttgaactacaacaggaaaatttagtcttgcagcagagactttatggtccacaaagcctaaaatatttactctctggctctttatagaaaaagttggcagacccctagtctaggaaacagataaaacttctcatatctggccaggtgcggtggctcatgcctgtaatcccggcactttgggaggctgagacaggcagatcatatgagcctcaggagttcaagacgagcttgggcaacatggcgaaaccccttctctaca

SEQ ID NO: 77007 - DNA, 513 bp, Homo sapiens
agtcctcaagctatcctcctgtcctggcttccccaaattgctgggatttatagggatgagctactgtggcagccaagaaaaatctttaaaaaattactatcttataactaagcttatacaatgaagacagcatattttattgtcttcccccttgtacacaaacttaaaaatcattttaagaactgataagaagatcgagagttctattttcaagatgtaatattgtaccaacaaaagctaaaaaattcaaatatgtatagtgtattactgaatggaagactaactcgattggcagagtttataggtaatagttttaatagtatgataaaatttattgtggtttatgttgaactctttttaaagatgatgagcattgattctttgttttccatatcctcgaatggtaatttctactgttgagtcattccaataaaagcattttggtcacatagtagtgattacttggcttgcctttcttgcttcttcatttttctgacctgttctctctgttca

SEQ ID NO: 77008 - DNA, 599 bp, Homo sapiens
  misc_feature (27)..(27): n is a, c, g, or t
ctaacacggagaaaccccgtctctacnaaaaacacacaaaaaattagccgggcgtggtggcgggtgcctgtagtcccagcactcgggaggctgacgcaggagaatggcgtgaacctgggaggcggagcttgcagtcagcggacatcgtgccactgcgctccagcctgggcgacagaacgagactcagtcaaaaataaaaaagccatgaagaataaatgtatatggtgatgacactaaaattcaggttctgtggaatttagattaatttcctagcaagaggcagttggcaatttttaaattgttttaaattgtttgaaactatatttaggctaagctttaaaaaataaatgaaaaagaatttttctatgattcgttaaaaaaaaaaaaaaaggccttggtttccaatcctcagtactacgttactactaagtatttaggtgccatgggaagaatcatttccctctcttggcctcacgggtttccatatatgcccaggaaactgagctagtctctaccagccataaacttatcatggaatattttttaaatttagataaatatgtaagtaaatctaggatgctggaatttcctctgagtgg

SEQ ID NO: 77009 - DNA, 429 bp, Homo sapiens
tggcatgtgcctgtagttccagctaattggaaggctgagacaggagaatttctggaaccctggaggtggaggttgcggtgagctgagattgcaccattgcactccagcctggacgacagagtgagattccatgtgaaaaaaaaaaaaatcatacgaagtatgttctcacatcattaagctagaaatcaaataacaaaaatatctaggaaatccctaaatatctagaaatcaaacaacacatgggccaagaaaaagtttcaagggaaattagaaaatatttccaattaaatgaaaatacaccataaaatttgtgggatgcaggtaaagcagtgcttagaggaaattcgtagcattaaatgcttttactggtaaaaaaagaaaggtcctcagtcaatagtctaaacttccaccttaggaaactacaaaatg

SEQ ID NO: 77010 - DNA, 864 bp, Homo sapiens
acgggccttctccttctgcgttccctctgctgacactggccgacccacctccttcaggaatgatatgtgcaagcacttagccttgtgccttactgacaacgccactgtaaaccccagaacactttcctcctgtctcttgctctgatacttctttcaccatctgctggtctccctctgcaagggttccagccaaggagaaccggcgatgggagaggcagggtgcctcaacctgctgggtcctcagcagcctgatggaggggccaccgcttctacagggttctcaccacacttgctgtttaaccaccatgagtgacaaaggcaaatgccacacagcaattctaagcccatcaggtgcatgagacaccaaacaccgctcacagacactgcggagggcacagactggctgtgtagcaggcactgcagtgcagaactgcccacacagtgtatgaggggccagggtttttgtttgatttgcattttattgtggtaaaaatacttaacatgagagctaccctcttaccacatttttaagcatataatacagtacaggttttaaggttggtaattttcatggaattcagaggccaacctctatattttggtgaaaactaacagttcttaatctgaactactcaacactaaaattttccacaaatggcagcttctgatcacttcagatgttccagtgattggtagcaattaaatggaaaattccaatctgagctggctccaagtatgccacaagtacaggatcagaagctatgaccactgtctgaccctcctcacagcagcaaagcaggaaacagcaaactcagtttgtaccaacggggcaatggggaatttcctgaggtcaaatcctccttg

SEQ ID NO: 77011 - DNA, 443 bp, Homo sapiens
cctatggttaatggtttctgcagaaaaggaccaattgatttctttctaaaacgttgcttcagggtgtagagacctttataggtcatgtttcaacttacagaaaatttttatagttcaaatataaattaagttcaatgtggaatttgtaatagaatttcaggtgaagtaaaatttccactttccttaggctgtttgcagtgcccagcaggccccatgatatcgagatggaagttctgttaaaggaggagattgatcagggatgggcagaataagggatatgcgcagctcaggctaatgatacaatgattgagatgtagaaagagggtcaggcatgggataacgcctgtaatcccactgccttgggaggccaagacaagagaatcgattgaggtcagaccagcctggtcaacagagtgaggacctaacctgtacaaaaaaaaaaa

SEQ ID NO: 77012 - DNA, 351 bp, Homo sapiens
tgatgttatctaaattttcttaatataatacatgggtaagaataaaagtacctgaaaattataaagaatattgagaaatgtgaatcaggcaccttacaaaattgacttgtaaaataatatacccttaaaatgtcatctattctatcctacttgtattattcagggttccctagaggaacagaactaataggatagatagatgtatatatgaaagggagtttattaaggagtattgactcacacaatcacaaggtgaagtcccacaataggctgtctgcaagctgaagagcaaggaagccagtccaagtcccaaaacctcaaaagtaaggaagctgatagagcagccttcgg

SEQ ID NO: 77013 - DNA, 782 bp, Homo sapiens
agcggagcttggacagccacgcgtgcgcccaggccaggcggagggactgccccgccctggtccagtgattgatcagcagtgattactgaggctttaatggtccgcttggatgggaattaattctgggatggataaataatgcatcgaggtttatgtagtccaaggcgagccgtccgtccggagccaggagaggtagccgagggagcctgacgggtgacgccagcggccacggggccccgaacgagcaggacatgaggggcgactaggcgcgaggacgagcaaaagcaagtggatgacagcatgaacggccctgcggggctggccggacggctgcaagaacatgctgagcccaaagatcaggcaggccaggagggcccgctccaaaagcctagtgatgggggagcagagccggagccctgggcggatgccgtgccctcacaggctgggccccgtgctgaaggcgggctggctgaagaagcagaggagcatcatgaagaactggcagcagcgctggtttgtgctgcgtggggatcagcttttctactacaaggacaaagatgagatcaagccccagggatttatttctctacaagggacacaggtgactgaacttcctccttggccccgaggacccagggaagcacctctttgagatcagcccaggtggtgccggggagcgggagaaggtgccggccaaccccgaggcgctcctgctcatggccagctcccagcgtgacatggaggactgggtgcaggccatccgccgagtcatctgggccccg

SEQ ID NO: 77014 - DNA, 395 bp, Homo sapiens
tgatttaaagaatcaaagacataattcacactttatttttcaaatcaccctttatcttagtctgttttagctataataaaaatatcataggctgggtggcttataaacaacaaaaatgtgtatttcacagttcgggaggctgagaagcacaagatcgaggcactggcatattcggtatttggtgagggcctgcttccttgttcataaatggctaccttcttgtatcctcacaaggcagatgggacaaggaagcattctggagcctcttttatgagggcactaatcccattcatgagagttcatttcttcatgacctaattacctcttaaaggccccacctccaaatatcatcacactgagaatccgatttccacatatgaggttttggggaaata

SEQ ID NO: 77015 - DNA, 915 bp, Homo sapiens
attcgttacctatttgttcttgtgtgttggtattatattttccacatcctcatgggccactaaattataatattttaacttcaaatgacgtctaacttggaatcacgtaatcaatattactttactgagtgtttatcttccctaaactgcttcatggaccacaaaagaagacctaaaaaacaacatctgatgctcagtttcaatggatcaatgagctgaacccaaaaatagccactctagaatattcatgagaggcctctcagtataactggaaacttcataccaagtttcactttcaaagaattcattttaaaacatgttctctgattttaaactcagttatttatatgatattaaagagactttaaccaacttgatggcaaacctaacaaaagatgtctaccaattattttaacttcatcaaaggttttaagggaaactatttaagacatattaacaacttcctattttgttccataggccccattcttaaaaggctcctcagggctttaatattccataatattaaaagggctttaatattccataataatttattttacgctttcttaataaccttttctcaaactccaggtgaatcatttctgcaatttgttactgtttgtagctcaacaaattattcatttgagctggctgagccacacgcataacatttttaattagagtgccacagttgacttcaaatccaaaatatcccaatccaaaattattctgtaggcttcggatttgctgccaggagtctaaaaagctaaaaatagcgaccaaactttcacatcacaaggcagaaaaaagcatttcaagaaagcgtacaggcttcaaatagatgcgtgaacagatcccaaaaggcaggcataggctgacaagacttcagatttgaccgtccccagtatactt

SEQ ID NO: 77016 - DNA, 487 bp, Homo sapiens
aaaacctatttaaagattgcaatatataatcatttttacagtatttgattaaacctgataggctttccagaaatgaaaaaaagtcagttctaaaaccaaagctgatatttagaaaatgtgaaaatgtaaatcagtgctatccatagtatagtttctctaaaactttatcttaaacagtcattttaaaagaatataactattcaaaaacgtaactgctatcttaagttttaaaataagttaaaacattttaaaatatgaatactgtagtttaaaagaaagaaactgggggaaggaaaagtagagaaatgccaattccaatgcaaggctttatttgccaagttttcttagaatgacttttaccaactgatgaattcctgaaacagaatgtataatggaaatacggaaacactgttgcctaaagtggcattattcactgctactgtgatgctactgtaatgtaataaattattaaattgttgcaaagtgc

SEQ ID NO: 77017 - DNA, 319 bp, Homo sapiens
cttcactgccgctgccctttgagacagggaacacacgtggagaaacctgtgaacaaaacccaagtgcaccagcccagctccatccacagcggacggccgccctccatccccctcggggccgcagcctgctgtgggtgagggtgacgagggggagcgctacacgctggctcctggctcccaacactgacttccccaggcaggttgggggcattgttccctgcaagcctcagtcccaagaacacagctctaccaggagcctgtcctgtgagaggcactgatgcacgtgggcctgtcttctaggcccttggtgtagctcgaa

SEQ ID NO: 77018 - DNA, 576 bp, Homo sapiens
aaatttagaaacagaatgatcagatgttcccgcagtttcatttgtgggtacctaccaaaaagaattagaagccaggagtggaagacagatttgtgtacacccatattcatagcagcattagtcacaacagccaaaatgtggaagcaacccaagggttcatggacagatgaatgaaaaagcacactgcagttcctttatacaatggaagactattcagccttaaaaaggcaggcacttctggccagtgcggtggctcacgcctgtaattgcggcgtcttggaagaccgaggtgggcggatcacctgaggtcaggaattcaagaccagcctggccatcttggtgaaaccctgtctctactgaaaatgcaaaaaatgagacgagcgtggtggggtgtgcctatagtcccaactactcgggaggctgaggcacaagaatggctggaacccgggaggcggaggttgcagtgagcccagattgtgccactgcactccagcctgtgcgacagagtgaggctccatggaaacacaaaacaaaacaaagtcaaacgaacaaacaaacaaaagacaaacaaaaaaa

SEQ ID NO: 77019 - DNA, 415 bp, Homo sapiens
tgctgggattacaggcgtgagcgaccgcgcccggaccatgctgtatccttatctgttgtctgttgttgtttgtttgttttggagcccagaaataacttctcacctatatgttcaaatgatttttcacatgagtgctaagaaagctcattggtggaaaagcagccttttcaagaaatggtgttggagaaacttgatttccacatgcaaaaaatgagacgagcgtggtggggtgtgcctatagtcccaactactcgggaggctgaggcacaagaatggctggaacccgggaggcggaggttgcagtgagcccagattgtgccactgcactccagcctgtgcgacagagtgaggctccatggaaacacaaaacaaaacaaagtcaaacgaacaaacaaacaaaagacaaacaaaaaaa

SEQ ID NO: 77020 - DNA, 362 bp, Homo sapiens
tactgctatggcttttgtagtagctgaaagtacaagttttccttctccatttccacttccttttttaaagtgaatgaacatttttaaaatataaattttaggataaattcataaatctccccaaaaaatgcaaaaggagttttacataggattactttgaacttacagataaactagggaaaatcaacatctttgtagaactgagatattccacacaagagctagggtgtttaaagcttcaccagttatcctgacgcaaaaccggggcagcaaagccttgctgtaaatatctggagctctgagaacgtcttgtgttgcttttgcttttgtgacttggtgatatctttgttgcaaaacaaaac

SEQ ID NO: 77021 - DNA, 532 bp, Homo sapiens
aaaaaaaaaaactagtactaccaatgaaataaatgcaacagagttggagagctcaagtcacgtattcatttattctacaaatactctctaaatggctactctgtaaccaagcattttatattgcttttttattgagagaggacatacatgtttagaattcacacagctcaagtatacagcttgaccaattcttacattagtgtccatccatgtaaccatcatccaatttaagatgtggaatatttctagcagctcagaaggttctcttgtgccttctccccgttcctaatcccctccaaaagatacccattattttgacttctatcactgtgggatagttttgcctgctcttgaattcacggacattcaaatcgactcatccagtacatactcctttgggtctggtctgtttcgttcaacattatgtccaggaaattcatccctttgcttatgtgcaactatagttcattctttttctttgatgcacagaatactatgccattcaatacacattgaacaatatgccacaatt

SEQ ID NO: 77022 - DNA, 724 bp, Homo sapiens
cctaaatcttgagtagtgtacggtaatgacgcttcttcctatatccactcttattatgttaaaacaaatgtatttgcgagtattggcattttagactttaaaaatgctgtatgatttcagatgaactctgctgtttagaagtaaccacagaaaagcaaagtcagtgtacactctgagtgaaaggaaatgtaatgtggataaaggcccgccacctcctcacattggtttatttactggcagctgatacgtttaactcatttccttgagcttatacaaaacatagaaaagcaaactgttaaagtagtcaataattatttgtctcagatcccagattctatgatccctgcttaaaagaaaatgttcactgcatgtaggttgatttcttatgttttgtagactcattgttatttttcaatccccaaaagtcttggcctaaaccatccctaggggagcagattaacctaccactacattgcacagggttggtgactcgacgtggtgaatgtgcacacgccctgcctggtccgccatgttccaaagaagatgatttaatggtagaacggatacctgctgctagacctgatggaatgttacctgtccgtgttacataatcaagtgcaatatactcagttctcatgcaggtgacattctaccatgaaacgcagaagataagccatgtttctgtattgtacatgtaaagaaaaataaaactgtttatgataaa

SEQ ID NO: 77023 - DNA, 1686 bp, Homo sapiens
gccgcgcccaggggagatggcgtgcaagtatccgctgcggtgttctggtgctagagtggagaggctggcaaagaagaaggcacacgcatggtgagaatccggcctgagccgaagcggagtttgctatggacagcaaccatcaaagtaattacaaactcagtaaaactgagaagaagttcttaaggaaacagattaaagccaagcatactttgctgagacatgaaggcattgagacagtatcctatgccactcagagcctggttgttgccaatggtggtttgggtaatggtgtgagtcggaaccagctgctcccggttttagagaaatgtggactggtggatgctctcttaatgccacctaacaagccgtactcatttgcaagatacagaactacagaagaatctaagagagcctatgttaccctcaatggaaaagaagtagtggatgatttaggacaaaagatcactctgtatttgaattttgtggaaaaagtgcagtggaaggagttgaggcctcaagccttaccaccaggactcatggtagtagaagaaataatttcttctgaggaggagaaaatgcttttggaaagtgttgattggacagaagatacagacaatcaaaactctcaaaaatccttaaaacacagaagagtaaagcattttggttatgagttccactatgagaacaacaatgtagataaagataagccattatctgggggtcttcctgacatttgtgaaagctttttggagaaatggttgaggaaaggttacattaaacataaacctgatcaaatgaccataaatcagtatgaacctgggcaagattgtcatggattttaagcacccagatggcattgcagtgccagttatgttgcctcgtcggagtttgctggtgatgacaggagaatctagatacctttggacccatggaatcacgtgcagaaaatttgatactgttcaagcatctgagagtcttaaaagtggaattatcaccagtgatgttggagacttaactttaagcaagaggggactacgaacatcatttacatttaggaaagtgaggcaaacaccttgtaactgtagagcgtagagtggcagctctccaagaaattgttcgactcctgagaccaggtgggaaggcactcatttatgtctgggcaatggaacaagaatataataagcagaagtccaagtatcttagaggaaacagaaatagccaaggaaagaaagaggagatgaacagtgatacctcagtgcagaggtcacttgtggagcaaatgcgtgacatgggcagtcgagactcggcatcttctgtcccccgcattaatgactctcaggaaggaggatgtaattcaaggcaagtttctaattccaagctgcctgttcatgttaacaggacttctttttattctcaagatgtactggttccctggcaccttaagggaaatcctgataaaggcaaacctgttgagccatttggtcccataggatcccaggacccaagtcctgtgtttcatcgttactaccatgtgttccgtgagggagaactggaaggtgcctgcaggactgtgagtgatgtcagaattctgcaaagctactacgatcaaggaaactggtgtgtgattcttcaaaaggcctgattatttacctgaacacatcatatataaagaagaaatgctcactt

SEQ ID NO: 77024 - DNA, 3573 bp, Homo sapiens
gccgcgcccaggggagatggcgtgcaagtatccgctgcggtgttctggtgctagagtggagaggctggcaaagaagaaggcacacgcatggtgagaatccggcctgagccgaagcggagtttgctatggacagcaaccatcaaagtaattacaaactcagtaaaactgagaagaagttcttaaggaaacagattaaagccaagcatactttgctgagacatgaaggcattgagacagtatcctatgccactcagagcctggttgttgccaatggtggtttgggtaatggtgtgagtcggaaccagctgctcccggttttagagaaatgtggactggtggatgctctcttaatgccacctaacaagccgtactcatttgcaagatacagaactacagaagaatctaagagagcctatgttaccctcaatggaaaagaagtagtggatgatttaggacaaaagatcactctgtatttgaattttgtggaaaaagtgcagtggaaggagttgaggcctcaagccttaccaccaggactcatggtagtagaagaaataatttcttctgaggaggagaaaatgcttttggaaagtgttgattggacagaagatacagacaatcaaaactctcaaaaatccttaaaacacagaagagtaaagcattttggttatgagttccactatgagaacaacaatgtagataaagataagccattatctgggggtcttcctgacatttgtgaaagctttttggagaaatggttgaggaaaggttacattaaacataaacctgatcaaatgaccataaatcagtatgaacctgggcaagattgtcatggattttaagcacccagatggcattgcagtgccagttatgttgcctcgtcggagtttgctggtgatgacaggagaatctagatacctttggacccatggaatcacgtgcagaaaatttgatactgttcaagcatctgagagtcttaaaagtggaattatcaccagtgatgttggagacttaactttaagcaagaggggactacgaacatcatttacatttaggaaagtgaggcaaacaccttgtaactgtagagcgtagagtggcagctctccaagaaattgttcgactcctgagaccaggtgggaaggcactcatttatgtctgggcaatggaacaagaatataataagcagaagtccaagtatcttagaggaaacagaaatagccaaggaaagaaagaggagatgaacagtgatacctcagtgcagaggtcacttgtggagcaaatgcgtgacatgggcagtcgagactcggcatcttctgtcccccgcattaatgactctcaggaaggaggatgtaattcaaggcaagtttctaattccaagctgcctgttcatgttaacaggacttctttttattctcaagatgtactggttccctggcaccttaagggaaatcctgataaaggcaaacctgttgagccatttggtcccataggatcccaggacccaagtcctgtgtttcatcgttactaccatgtgttccgtgagggagaactggaaggtgcctgcaggactgtgagtgatgtcagaattctgcaaagctactacgatcaaggaaactggtgtgtgattcttcaaaaggcctgattatttacctgaacacatcatatataaagaagaaatgctcacttaaaaaaaaagagagaataaattaattacccttttaattaaagagaaaacttgtgggaaagtaccaaaggaaagctgagaaaaatttggaagtagggattcattaggagacattcaaatgtctcctgttggctgacatcacagatgtggtgttggctcctcctacttccctaggagaggtggtttctaaaagtgattgaagcagtttgtgcagtgtttgtaattcttgggtaagagcccaggattttgaagataatagttttttagtaaagtgctactaaatgtagtaaatcatgtaggattttagggatgtaattatatgttaatacagaaaatagtcctggtcaatagaaaattgtctgaagttttacctatgatttttagctctgtaaaatcatagacaataaccattctatttccatgcctgactagcccagggctggacgtatagcgggtgtccaataacgtttagtcaatcagataatacccagaacttagtaggagtttcattcaaaaactattttttgaacccaaccatgtaccagttactattttaagtactgataatgaagcagtgaataagaaagagcaaagctcttgcccttatggtgcttacattctagacggggagacagacagcaggcaaatcaataaatagatactatgtgccagatagtgataaatgccatgaaaaacataaaatgagagacgattcaccttggagcaaaagattacttttaagtgactgaaataactactaatcctgactaatttattatcaagagttaattggtattccaaattcattgagcagggtgctaaaaacaacccaaatgtgctcctttaactcctttgtttaaatgacaaaagttagaatgtggtcactcagacctaactgtgcccttagagccaaagctgtggtgtcattattggttatttctagttgattcatagtttgtcccaatccaggttcaatcgggttatttttaagatctgtacaatattgcataatagtaacccagttaacttaccacttaggttagatttcctggaggaacaaaggtagaaattcaaccataggtcaaattatcacatagaaggaaaaggctttttttcaaagaaaaaattttttgaacactttactcccagtatgcattacttttgtagtagtaatgcttaagactgttttaaagaaaaattgctttctgtttaattaatgtttactgttattaatgctagtgatacttaatcttgaagcatcaagttttcagaaacctatagtgatcaataatgggtctcagatgagaggatgattatttttttcatggaatttcagtccaacatcctggtgtactggtccctctgggatgaatttataaggctcatgatataggaaaaggaatatagggctaaaaatagttttatttctgatataaattctggtacttgacaccaaagtttgaagtcaagtcatgccaataaattttaacatccaaatgaaatagatgattttctatgaagatgaaaaataccaaaattgactcaagaagggagagaaaatggaagatgttgaaaaatagcataggaattcagaactgggctctagaatcagatttcctgagagttgaattctagatctgccatttattagctgtgggattttgggcaaatttcttgactttctgtgcttcagttttcttagctgtaaaattggaagagttgttatgaaaattcactgaaagtatatttgtatacatcataggatagtgtaagaatatagtatggctttgagaaatgttcattattattactcccagaggagttttaggtattaagtgatgccaaatataatttgttaattgtataataaaaatctatattcttactga

SEQ ID NO: 77025 - DNA, 1219 bp, Homo sapiens
gtgatagccagaggaaagagactcccccctcatttccagagagtgataaagaagcctcacggctggagcaagagtacgtccatcaggtttatgaagagattgctgggcacttcagcagcacaagacataccccttggccgcacattgtggagtttttgaaggctttgccaagtggttcaatagtggctgatattggatgtggtaatggaaagtatcttggcatcaataaggagttatatatgattggttgtgatcgtagccaaaaccttgtggacatttgtagagagaggcaatttcaggcttttgtctgtgatgcattggcagtaccagtccgcagtgggtcttgtgatgcctgcatctccattgctgttattcatcattttgcaacagcagagcgtagagtggcagctctccaagaaattgttcgactcctgagaccaggtgggaaggcactcatttatgtctgggcaatggaacaagaatataataagcagaagtccaagtatcttagaggaaacagaaatagccaaggaaagaaagaggagatgaacagtgatacctcagtgcagaggtcacttgtggagcaaatgcgtgacatgggcagtcgagactcggcatcttctgtcccccgcattaatgactctcaggaaggaggatgtaattcaaggcaagtttctaattccaagctgcctgttcatgttaacaggacttctttttattctcaagatgtactggttccctggcaccttaagggaaatcctgataaaggcaaacctgttgagccatttggtcccataggatcccaggacccaagtcctgtgtttcatcgttactaccatgtgttccgtgagggagaactggaaggtgcctgcaggactgtgagtgatgtcagaattctgcaaagctactacgatcaaggaaactggtgtgtgattcttcaaaaggcctgattatttacctgaacacatcatatataaagaagaaatgctcacttaaaaaaaaagagagaataaattaattacccttttaattaaagagaaaacttgtgggaaagtaccaaaggaaagctgagaaaaatttggaagtagggattcattaggagacattcaaatgtctcctgttggctgacatcacagatgtggtgttggctcctcctacttccctaggagaggtggtatagggtggtatagggtgtataggtaatagggccggctcgtcg

SEQ ID NO: 77026 - DNA, 2881 bp, Homo sapiens
gtgatagccagaggaaagagactcccccctcatttccagagagtgataaagaagcctcacggctggagcaagagtacgtccatcaggtttatgaagagattgctgggcacttcagcagcacaagacataccccttggccgcacattgtggagtttttgaaggctttgccaagtggttcaatagtggctgatattggatgtggtaatggaaagtatcttggcatcaataaggagttatatatgattggttgtgatcgtagccaaaaccttgtggacatttgtagagagaggcaatttcaggcttttgtctgtgatgcattggcagtaccagtccgcagtgggtcttgtgatgcctgcatctccattgctgttattcatcattttgcaacagcagagcgtagagtggcagctctccaagaaattgttcgactcctgagaccaggtgggaaggcactcatttatgtctgggcaatggaacaagaatataataagcagaagtccaagtatcttagaggaaacagaaatagccaaggaaagaaagaggagatgaacagtgatacctcagtgcagaggtcacttgtggagcaaatgcgtgacatgggcagtcgagactcggcatcttctgtcccccgcattaatgactctcaggaaggaggatgtaattcaaggcaagtttctaattccaagctgcctgttcatgttaacaggacttctttttattctcaagatgtactggttccctggcaccttaagggaaatcctgataaaggcaaacctgttgagccatttggtcccataggatcccaggacccaagtcctgtgtttcatcgttactaccatgtgttccgtgagggagaactggaaggtgcctgcaggactgtgagtgatgtcagaattctgcaaagctactacgatcaaggaaactggtgtgtgattcttcaaaaggcctgattatttacctgaacacatcatatataaagaagaaatgctcacttaaaaaaaaagagagaataaattaattacccttttaattaaagagaaaacttgtgggaaagtaccaaaggaaagctgagaaaaatttggaagtagggattcattaggagacattcaaatgtctcctgttggctgacatcacagatgtggtgttggctcctcctacttccctaggagaggtggtttctaaaagtgattgaagcagtttgtgcagtgtttgtaattcttgggtaagagcccaggattttgaagataatagttttttagtaaagtgctactaaatgtagtaaatcatgtaggattttagggatgtaattatatgttaatacagaaaatagtcctggtcaatagaaaattgtctgaagttttacctatgatttttagctctgtaaaatcatagacaataaccattctatttccatgcctgactagcccagggctggacgtatagcgggtgtccaataacgtttagtcaatcagataatacccagaacttagtaggagtttcattcaaaaactattttttgaacccaaccatgtaccagttactattttaagtactgataatgaagcagtgaataagaaagagcaaagctcttgcccttatggtgcttacattctagacggggagacagacagcaggcaaatcaataaatagatactatgtgccagatagtgataaatgccatgaaaaacataaaatgagagacgattcaccttggagcaaaagattacttttaagtgactgaaataactactaatcctgactaatttattatcaagagttaattggtattccaaattcattgagcagggtgctaaaaacaacccaaatgtgctcctttaactcctttgtttaaatgacaaaagttagaatgtggtcactcagacctaactgtgcccttagagccaaagctgtggtgtcattattggttatttctagttgattcatagtttgtcccaatccaggttcaatcgggttatttttaagatctgtacaatattgcataatagtaacccagttaacttaccacttaggttagatttcctggaggaacaaaggtagaaattcaaccataggtcaaattatcacatagaaggaaaaggctttttttcaaagaaaaaattttttgaacactttactcccagtatgcattacttttgtagtagtaatgcttaagactgttttaaagaaaaattgctttctgtttaattaatgtttactgttattaatgctagtgatacttaatcttgaagcatcaagttttcagaaacctatagtgatcaataatgggtctcagatgagaggatgattatttttttcatggaatttcagtccaacatcctggtgtactggtccctctgggatgaatttataaggctcatgatataggaaaaggaatatagggctaaaaatagttttatttctgatataaattctggtacttgacaccaaagtttgaagtcaagtcatgccaataaattttaacatccaaatgaaatagatgattttctatgaagatgaaaaataccaaaattgactcaagaagggagagaaaatggaagatgttgaaaaatagcataggaattcagaactgggctctagaatcagatttcctgagagttgaattctagatctgccatttattagctgtgggattttgggcaaatttcttgactttctgtgcttcagttttcttagctgtaaaattggaagagttgttatgaaaattcactgaaagtatatttgtatacatcataggatagtgtaagaatatagtatggctttgagaaatgttcattattattactcccagaggagttttaggtattaagtgatgccaaatataatttgttaattgtataataaaaatctatattcttactga

SEQ ID NO: 77027 - DNA, 2545 bp, Homo sapiens
tgataagtcacgcagaggacgatcggtatcgacccgcccgcgcactagcacgtatagagcgtagagtggcagctctccaagaaattgttcgactcctgagaccaggtgggaaggcactcatttatgtctgggcaatggaacaagaatataataagcagaagtccaagtatcttagaggaaacagaaatagccaaggaaagaaagaggagatgaacagtgatacctcagtgcagaggtcacttgtggagcaaatgcgtgacatgggcagtcgagactcggcatcttctgtcccccgcattaatgactctcaggaaggaggatgtaattcaaggcaagtttctaattccaagctgcctgttcatgttaacaggacttctttttattctcaagatgtactggttccctggcaccttaagggaaatcctgataaaggcaaacctgttgagccatttggtcccataggatcccaggacccaagtcctgtgtttcatcgttactaccatgtgttccgtgagggagaactggaaggtgcctgcaggactgtgagtgatgtcagaattctgcaaagctactacgatcaaggaaactggtgtgtgattcttcaaaaggcctgattatttacctgaacacatcatatataaagaagaaatgctcacttaaaaaaaaagagagaataaattaattacccttttaattaaagagaaaacttgtgggaaagtaccaaaggaaagctgagaaaaatttggaagtagggattcattaggagacattcaaatgtctcctgttggctgacatcacagatgtggtgttggctcctcctacttccctaggagaggtggtttctaaaagtgattgaagcagtttgtgcagtgtttgtaattcttgggtaagagcccaggattttgaagataatagttttttagtaaagtgctactaaatgtagtaaatcatgtaggattttagggatgtaattatatgttaatacagaaaatagtcctggtcaatagaaaattgtctgaagttttacctatgatttttagctctgtaaaatcatagacaataaccattctatttccatgcctgactagcccagggctggacgtatagcgggtgtccaataacgtttagtcaatcagataatacccagaacttagtaggagtttcattcaaaaactattttttgaacccaaccatgtaccagttactattttaagtactgataatgaagcagtgaataagaaagagcaaagctcttgcccttatggtgcttacattctagacggggagacagacagcaggcaaatcaataaatagatactatgtgccagatagtgataaatgccatgaaaaacataaaatgagagacgattcaccttggagcaaaagattacttttaagtgactgaaataactactaatcctgactaatttattatcaagagttaattggtattccaaattcattgagcagggtgctaaaaacaacccaaatgtgctcctttaactcctttgtttaaatgacaaaagttagaatgtggtcactcagacctaactgtgcccttagagccaaagctgtggtgtcattattggttatttctagttgattcatagtttgtcccaatccaggttcaatcgggttatttttaagatctgtacaatattgcataatagtaacccagttaacttaccacttaggttagatttcctggaggaacaaaggtagaaattcaaccataggtcaaattatcacatagaaggaaaaggctttttttcaaagaaaaaattttttgaacactttactcccagtatgcattacttttgtagtagtaatgcttaagactgttttaaagaaaaattgctttctgtttaattaatgtttactgttattaatgctagtgatacttaatcttgaagcatcaagttttcagaaacctatagtgatcaataatgggtctcagatgagaggatgattatttttttcatggaatttcagtccaacatcctggtgtactggtccctctgggatgaatttataaggctcatgatataggaaaaggaatatagggctaaaaatagttttatttctgatataaattctggtacttgacaccaaagtttgaagtcaagtcatgccaataaattttaacatccaaatgaaatagatgattttctatgaagatgaaaaataccaaaattgactcaagaagggagagaaaatggaagatgttgaaaaatagcataggaattcagaactgggctctagaatcagatttcctgagagttgaattctagatctgccatttattagctgtgggattttgggcaaatttcttgactttctgtgcttcagttttcttagctgtaaaattggaagagttgttatgaaaattcactgaaagtatatttgtatacatcataggatagtgtaagaatatagtatggctttgagaaatgttcattattattactcccagaggagttttaggtattaagtgatgccaaatataatttgttaattgtataataaaaatctatattcttactga

SEQ ID NO: 77028 - DNA, 218 bp, Homo sapiens
tttttttctaatggaggggaggcatttttgtttttcagaaagtatagctatttatgggcctaatgttgtttaaaggaaataaagcctagaatgaaagatttatgtgtggtttggtatttccttaggaatgatatctgaaaccaaaggcctttttttttttaaaactgggaaacaattagtcttcttatgtagcagtagaattactatctttatagacg

SEQ ID NO: 77029 - DNA, 106 bp, Homo sapiens
ttcaaaggtgtatggaaatatgctttcactactcttggggaaataccttctagtgggatgttggtaggtacgtatttaataagctcttggtttgattgccaaaatg

SEQ ID NO: 77030 - DNA, 610 bp, Homo sapiens
tattattttaatccaagatacagctgaacaccatatcttagatctaaactctcatacaataagccttaaaatgtaactaatataaatctgggagttcatatgaccctgccttggtgggagtgacatattcaaaaaaccaacaatttgacaaaaaatataacctaaaaacaattcaagttgtatttggactgtgaacaccaatacggtattagtgttaatacatacatgcttgttaccttattacaatagcataaaatatcacaaagtagaaagagttctgggtagacaggagtcctgctgagtagctctgtgccctgggtgggggttatgaggaagggttcccaggtctgcttcctccaccctgaggtcaccattaaagttggaagatgacttaaaaatcagacagcatcaatccccttcaatagttttctatggtgtatgtgttcattaaattctgggtcattgaacggtcatggataaccttaatctctcttagcctcagtgtctactaacatagttcatattctgttaaagttatgagcattcgtattctaagatttgtattgaatatagatgatagattaaaattttagtgacaaatcttaaaaaa

SEQ ID NO: 77031 - DNA, 278 bp, Homo sapiens
ggtagcaaataactgctaggagggctgtgatgtctctcgatcagaatggatttgtcatgcttcatagaggaggttgggcttcatttagttattactggattctgataaactgagcagaggacacagtggcggaagcaagttgaatctcatctaaaagtaacatctgcttgattggaggtttttgtgaagtagtggaagcgtgatcttgactgtgttgtgcattgaaagctagactgaattgatagcacatgcagtaggtagctgacagtagtaagcta

SEQ ID NO: 77032 - DNA, 261 bp, Homo sapiens
tgctatgtattttaattccacatatatttgcaatccattaagacattataattattgtctcatataatcaattgtatttttgcttatccatatatttaacttttccattgcttttcatgccttcttacattttcatatttccacatggaattatttttcttctgcctggcccacatctgtgtttcttttaatgtagatctgctggtgacaccatctctgtttttatttgtatggaaatatctacttcaagtttaattttta

SEQ ID NO: 77033 - DNA, 535 bp, Homo sapiens
gttctggtgagatgcctattcattatgagaggacaagaacaagatggcattggtagaatcatgattttcatttttcctcatcaccatctctgtctcccagcccttgtacctctcagttttgaaactaagtcagctgtcttaggtgaaaaaattaattatcccaatgtaaatctccaaatgtgagggcttatctagtccctatgaagagaaatgccccaaaaaaagtggaaaactgtaaggggaaattataagaaaagagttatgactgcaataagaaaaaactaagaaaggaaaaagaaccatcagtaaagtttaattgtaagagttgacaccagtggatggaattcatctacaaagaagcaggcaactacacaacttttttttggtaccacgtcaacctctgcttcagtattggcaggacagaataatcccataactgctctggttcaacaagggagaaactaaagggggaaccaaagagatggaaaatttcaaaccaccatcccagaatctcttggaactcaaggtaattctg

SEQ ID NO: 77034 - DNA, 521 bp, Homo sapiens
tcagtccccaggcctccccaggcctcagtttccccatgtattagataggccatttggggacttgaagctctcagatacaggaacagcagtttggaggagctgagcaggtctggggtgtgactgacattcccaggtacctgaaggaggaactgcacatctccaggtgggacctgcagtccttcctggaaacttccatggctccccacacatgcaagttcaaagcctctctcctgaacctaggttcagagccccttctgcagtggtagttccaacctccctcccatgtccccactcacagctaagcttcgggcctggagcacctccaacctgctgatcagggcaagtcccaatgtggccttcaaggcatttgcacatgttcattgtgacactgttcgctgagcagtcactgtgtgctaggcgtatctgcagcatctggacagacgacactaaatgggtattgaaggattgaatgagggatcaataatgatatccagtttgattcagtggttccagaggttttt

SEQ ID NO: 77035 - DNA, 553 bp, Homo sapiens
ccttctccatgtccttcaatatgggacgtcccccaacagcactcaagtccaagatggagggagaattctccagaaccttcagaaagactaatccaggagagttcaggggcaccacccccagaagcaaattcactgcaaggtgccttatatttatgttctgaagaagaagctggaagcaagggtgtacttactggggctgtctgaatggaagcattcctccgtgttcatttaaaagaacgcttaatagtaacatctggactctaatgccagctagcttgtacctcatcagtgcttagagcctaacaactttggagcgatgtatgaactaatgctttaggaaacccactctagtgttctcttgtttggccctagactcaggcttaatttgtaagtggaatagaatctcccagcaagtatgacagaactgaaaagaaggagagcaacagctggctcggtccctgctctgagtatgtgtatatatgtgtttgtctctatgtgtgtgtatatacataaatatccattaaaatgtattagtagaaactagtttctcttt

SEQ ID NO: 77036 - DNA, 243 bp, Homo sapiens
actttcactgggagtgacatagagaatgataccaaggagagtcaggagacccacactcctgctccatctaggataagcttcatgtgggaacacctttttctgccagcccagctatctgcctccatcacaaactgactcagtaagactatgttatttaatcctgtgaattggtcagtaccattaacccacactacatgcatggattatgaagttagggaaatgaaaaaaaatttccacagtcta

SEQ ID NO: 77037 - DNA, 376 bp, Homo sapiens
aggctacagggtttattttattttatttttaagtcaataggcctgagtgttggtaaagactagatacccagcagtccttcttgcatttcttcttggggtgggggggcagaagggaatggagaggaaatgaaggcggattgctggtaagtgaggcaggaaggcagggagtttattatggaatgtcatcggtaagtttccccatgatttgatcccaagctggtgtggagtgaagggtaagctgttggctcaacagatagtgagaatcaaacttagtggagttgtagagcctgtttcctgcagcggacagcaagatgtacaagccgtccactgcaggaatgacgtgctgtaaaagggatgcagtgtcaagtgtagtcat

SEQ ID NO: 77038 - DNA, 408 bp, Homo sapiens
gagcggggtctacggttagctttaggtagctgggagcgggacaccaacgggctgcgaaggaagcagggacgttcagacagcctggggttcgcgttcccttccagctcagcggtctttggagctcctccttcccggagttctgatttctaaagggctatccagagttctggctcaggcttgaatgctgaagattgctcccggagtttctctccaggaaaaagttcgcggggacctcgggctgcagatgtttctcccaatccctctttagtctaccctcatgtagggccgagacctacagagcccttccctttccattttgttaggtcaccgccggcttctataataaagctgctttataactgaggactgtgcttggggttagcatgctatttttattttggatgttgc

SEQ ID NO: 77039 - DNA, 430 bp, Homo sapiens
  misc_feature (423)..(423): n is a, c, g, or t
atgtaattagttaagataaggtcatactggagtaggatgaacccctaagtccagcatgactggtgtccttacaaaagaggaaatttggacataagcacacagggagaacacccccatgtgaatataaaggcagagataggtgtggtgcttctacaagccaaagaacaccagatattgtcagcaaaccccaaaaagctaggggagaggcatggagcagattcttcacagcctcagaaggaaccagccttgctgataccttcatctctcctagcctctggaactatgagacaatgtctgttatataagccactcagtttgtggtagttgtttttctggtttgtttgtttttctgagacagagtctctctctgtcagccagccaagaatctgccactgcactccagccggggcgacagagcaaaanccgtctc

SEQ ID NO: 77040 - DNA, 384 bp, Homo sapiens
gccacagcacaaagaccacccgggatgcactaccgccactgagaacctcaaaaagacccggacgggtctgacgcctgcacacttggctccaggatagaacaccctcacagcaccgccaccctccaagcttccgttatctggaaggaaaatcaggacgaatgggctctgcaggcctgcctgccatagtaccaggctctctggaatgggggaagacacacaaaatcccccaaaacaccctcacccccgaagaacttcacgttctgttcagcaaaaaagacttgcccacacaactagaacttcaggacttaaagggaccagaaagatcatctagtccaaggctcagtccaaagtggaggtgagcagctcgccctaccatggtgccca

SEQ ID NO: 77041 - DNA, 352 bp, Homo sapiens
tgtgggagaatcacctgcaacagattatgactctacagcattttcctgaagaaagtataggaaaaaagttttaaatactgaacattgatttgctttataagtagacaccatctacaaattttgcttgtctttttaaacatacatatatatttaatatatttttatgtttttcactaaggctttattttctgaggccctttaattagtttcactaatcagagtaatttccagaagtgtaatcttggagagattactgtaataaatattaaatattgtggtggttaaaagtatgggatttacgctgggtgtggtggctcacgccggtaatcccagcactttgggaggctgagat

SEQ ID NO: 77042 - DNA, 447 bp, Homo sapiens
agaagaaaaacaaattttcctttgtttcatggtatgagtttatagattcctgctctctacacctagtgacttcaaatattctgttttatcagcagtggagtgaaggtcataaactgtctgagcagcctgagatagagccacctgggtgccatagtgatggccatggaataagccatgctaagcactagggcaaacctacataatggccatctgagttgcacagcaacggtcatgtctaatcctgagttatgagcctgttataatttgattaactgtctttgtcctgcctctgtatccctgctttcacgccactgtaagcctgcttcaagctaacccacccctttttaaaagtgtgtttaagtcaagtgctgtctttattctaggcccagtttttagacgttgagtccagtgggtctgagtgcactcaataaagatcctcctgtatac

SEQ ID NO: 77043 - DNA, 2941 bp, Homo sapiens
  misc_feature (2)..(3): n is a, c, g, or t
  misc_feature (222)..(222): n is a, c, g, or t
  misc_feature (565)..(565): n is a, c, g, or t
  misc_feature (567)..(567): n is a, c, g, or t
  misc_feature (581)..(581): n is a, c, g, or t
  misc_feature (759)..(759): n is a, c, g, or t
  misc_feature (969)..(969): n is a, c, g, or t
  misc_feature (1359)..(1359): n is a, c, g, or t
  misc_feature (1485)..(1485): n is a, c, g, or t
  misc_feature (1562)..(1562): n is a, c, g, or t
  misc_feature (1729)..(1729): n is a, c, g, or t
  misc_feature (1915)..(1915): n is a, c, g, or t
  misc_feature (1933)..(1933): n is a, c, g, or t
  misc_feature (1970)..(1970): n is a, c, g, or t
  misc_feature (2322)..(2322): n is a, c, g, or t
  misc_feature (2415)..(2415): n is a, c, g, or t
  misc_feature (2525)..(2525): n is a, c, g, or t
gnnatccagtgttgataatcagacattgaagtctccagctattattgtaaaactgtttcatgtttgaattctgtcagtttttgcttgagatattttgatggtatgttactaggtgagtaaatgtttatattttttacatcttcttgctgtattgaagtttttcatcaatatttaatgtctttctttttctcttacaacctttttttttaaatttaaagtctnttttgtctgatattagtatagccactcctgctttctttgtaattatttgcatggtatatcttttttcatccttccattttcaaactatttgtgtctttgggtcaagtgagtcttttatagatggcatatacttggatcatgtttttcttttcttatccatcctgccaatctttctttttgattggagagtttaattcatttacatttaaatatttattaataatgaataacttacttttgtcatttgctatttgttttctctatgccttatagcttccatgcctcttatttttgacataactgcacttttttgtgtttagttctttttacgtagtacattgtntntatacctttctcantttcttttgtaattctatattttttttgttacaatgggaattatcttaaagttacaacactgtaatctaatttataccagtttaacttcaataacacacaaaaactctgcttctttactacctctgtctccatctttttcagttattgatatctctaaatttcatctatatatattanatgacccaaaacataaactattaaatcctttaattgtatttgtatcttaaattatgtagaaagactcaatttgaagctttgaaccaaagttgcaataatactagcttttagacagctcatagtgtccccagattctacaggaccaattttcttaaatttttttctttctgtacttcagaatcagtaattctcattgtcctatcttcaagntcatgggttcttttgcctactcaattccacctttgaatccccatagtaaatttgtaatttcagttattgtaattttcggctccagaattttttggtttcttttgagttttctatatcttcattgatatttcaattttgttcatacattgttttcttgaatatattaacatcttcctttagttctttgaccatttttaaaatagctattttaaaggctttttctaatagatatgccaacaggtcttctacagacacagtctctgttgttctttttttccctttgaattggccatactttcctctatttctttgtatgccttctggctttcggttaagaactagacatttgaatctaattatgttgtaatttggaaataagattttccctgnttcacaactttttctgtttttttgttattgattttattgcttttgatattataaaatattgtagtaccaaaaatcagccagtctctttgctaaagcctagcaaggatcacctttgcttcagttccngataagctcctcatcttcatctgagaccacctcagcctgggcttcattgtactggacttcattttggtacacagacnttgtccatatcactatcagcattttggtcaaaacaaacaagtttctaggatgctccaaactttctcacatctgtttttcttctgagccctcgaaactgttcctactctgcctgttacccagatccaaagtcactcccacatttttgggtatcttaatatcagcaccncactctaccagtgccaatttactgtattagtctgttctcatgctgctataaagtactgcctgagatggagtaatttataaaggaaagaagtttaattgattcacagtttcatatggctgaggaggcctcaggaaacttacaatcatggcaaaaggggaagcaagcacatccttattcacatgatgncaggaaggagaagtgccnagcaaaagaggggaaagccccttataaaaccataagntcttgtgagaactcactatcaagagaaccgcagcatggagttaactgtccccatgatttaattacctcccactaggtccctcccacgacacatagggggattatagaaacttcaattcaaaatgagatttgggtgggtcacagccaaaccatatggcatatctgcttggagtaagcctgttatttagagagcattgaaaactagccagaaaggtttacttttaacttagttggctgtaagaaattattgaaatttttttcccgtaagaaaataatacgattgaaataaaagtgaaattcagaaatcaaatacagttatgaggtatatgcaatatgcaaactcaaattaaaantagtctagagatgttcaactttaaaccattgttttggcacattctatatatttaaacttaaagttaatacctcaaggtgggctattaattaanaaacagtatatatttattcaagtttgtgtatatattagaatctacagaaactatgtatgttataaaatgaagatgaaaacattctaaaatagaaagaaaaataaaaatgnccatatcctttgccccataaattctacttctatacttttaaccttaaaaataattcagaaaaaagataaacgcatgaagacatttatgtctgcattctttataataacaaaaattggggaaaaaaactccatgtcaagaaagtgggataagaaaaatagtgaagtattatactgccattagaataattatttggaagtctgtagaaacgtggacatgtttgatatggtaagtaaaatgagcacaatacgaaatagtatgcatactatgattgtgactttgtaaaatctttatgcatgtggaaggtaatctgcaaaacaaattcattgtgttagtgtagcgggatatggaatggctttatttatttaaatcttttctttaatattactttgtattttcaataaaaataaatcactgc

SEQ ID NO: 77044 - DNA, 332 bp, Homo sapiens
ctaaaaacacctagtaactgaatggcttttctttggagggtaatacattttaaaacatttagtgtgccacctactgctccacagtgactagagagcctctatttcttggtgacttgggactagatcagatgccaaatgtacaaagtttcttaagagttgagattatatcatctgaagtcatcttattttagccaaatctttttaatttcaccggcaaatctgtgaaggaaaacacttgatgttcaaaaagaatagtacattttaaaagctgcgattttaaacagttgttaatgttaaaaaaaaaaagcactagaggtatttttaaacataga

SEQ ID NO: 77045 - DNA, 2755 bp, Homo sapiens
  misc_feature (1)..(1): n is a, c, g, or t
  misc_feature (3)..(3): n is a, c, g, or t
  misc_feature (5)..(7): n is a, c, g, or t
  misc_feature (942)..(943): n is a, c, g, or t
  misc_feature (982)..(983): n is a, c, g, or t
  misc_feature (1311)..(1311): n is a, c, g, or t
  misc_feature (2256)..(2257): n is a, c, g, or t
  misc_feature (2749)..(2750): n is a, c, g, or t
  misc_feature (2754)..(2755): n is a, c, g, or t
nantnnngaagctttgttctttagctctttgcaataaatcttgctgctgctcactctttgggtccacactgcctttacgagctgtaacactcaccgcgaaggtctgcagcttcactcctgaagccagtgagaccacgaacccaccaggaggaacaaacaactccagatgtgctgccttaagagctgtaacactcaccgcgaaggtctgcagcttcagtcctaagccagcaagaccacgaacccaccagaaggaagaaactctgaacacatccaaacatcagaaggaacaaactctggacatgccgcctttaagaactgtgacactcaccacgagggtccgtggcttcattcttgaagtcagtgagaccaagaacccaccaattccagacacattttggcaaccacaaagggactatcacctattgccaagcggtgagactatcgccaagtggtgagaccatcgtctatcgctgagcagcaaaacaatcgcctatcgccaagcaaatcgaagccatcaagctacagatggtcttacaaatggaaccccaaatgagttcaactaacaacttctaccgaggacccctggaccgacccgctggcacttccactggcctagagagttcccccttgagacactacaactgcagggccccttcttcacttctatccagcaggaagtagctagagcagtcatcggccaaattcccaacagcagttggggtgtcctgtttagaggggggattgagaggtggcagtgtgctggcagccctcgcagccctcgctcactcttggctcctcctcggccttggcgcccactctggccatgcttaaggagcccttcagcctgccactgcactgtgggaacactggccaaggccagagccagctcactcagcttgtggggaagtgtggagggagaggcgcaggcgggaactggggctnnatgcggcgcttgcgggccagcgtgagttccggtggttgnnggcttggcgggccccagactcggagcggctggcctgccctgctggccccaggcagtgaggggcttagcacccaggccagcagctgtggatggtgcgctgagtctcccagcagtgctggcccaccccaccagcactgcactcgatttctcgccaggccttagctgcctccccgcaggcaggccttgggacctgcagcccaccatgcctgagtctcccctgctgccgccgtgggctcctgcgtggcccaagcctccccgacgagcactgccccctgctccccggtgcctggtcccatcgaccccaagggctgaggagtgcaggtgcatgntgcgggactggcaggcagctccacctgcggccccatgcaggaagccagctgggctcctgagtctggtggggacttggagaatttttatgtctagctaagggattgtaaatacaccaatcagcactctgtatctagctcaaggattgtaaatacaccaatcagcaccctgtgtctagctcagggtttgtcaatgcaccaatcggcactctgtatctagttaatctggtggggagttggagaatctttatgtctagctaagggattgtaaatacaccaatcagcactctgtatctagctcaaggtttgtaaacacaccaatcagaaccctgtgtctagctcagggtttgtgaatgcaccaatcagcactctgtatctagttaatctggtggggacttggagaatctttatgtctagctaagggattgtgaatgcaccaatcggcactctgtatctagctcaaggttgtaaatggaccaatcagcactctatgtctagctcagtgtttgtaaatacaccaatcgacactctatctagctaatctagtggggacgtggagaacttttgtgtctaactcagggattgtaaatgcaccaatcagaaccctgtcaaaatggaccaatagctctctgtaaaacagactgactttctgtaaaatggaccaatcagcaggatgtgggtggggccagataagagaagaaaagcaggctgcctgagccagcagtggcaacccgcttgggtccccttccacactgtggaagctttgttctttcgctctttgcaataaatcttgctgctgctcactctttgggtccacactgcctttatgagctgtaacactcaccgcgaaggtctgcagcttcatctgaagcagcgagacacgaacccaccaggaggaacaaacaactccgatgcgctgccttaagagctgtaacaccgcgaggtctnnagcttcactcctgagccagcaagaccacaaacccaccagaaggaagaaactcaggaaaacagccgaacatcagaaggaataaactctggacacaccacctttaagaactgtgacactcgctgcgagcgtctgtggcttcattcttgaagtcagtgagaccaagaacccaccaattctggacacaattgcactctagcctgggcaacaagagtgaaactcatctcgaaaaaaaaaagagtctggaagggccttctgagttgtaatattatgaacttaaattttgaggtcctgaagttttgttgcagtgtgaatgataagagtagtctttttttgatatcatctgtagaagacccaattttggggtttcagattaggaagggtttgatggtttttagtggactatgaaaaggttttttttggtgaaaatatattttggtataatgtactaaagtcttgtagtatttagtcataatagagtttaacagtggaagnnaatnn

SEQ ID NO: 77046 - DNA, 266 bp, Homo sapiens
taatggccacattggaataatttgagcaacaaaataaataatgatagtattggattataacccaaagaataaaatactcatgtctgtactaaagtaaataaacaaatgggagagaagaaacaaatattaacaaaatgattccaaataataaatgttgaagcagtgaaggaaatagaaagtcaccattagaacaccacagttgtaatcgtctcaggtgaatgctaaaattagtagatgaaacttgaaggagaaatagacatttgtat

SEQ ID NO: 77047 - DNA, 536 bp, Homo sapiens
acgggttatcaagccctggctctctattttctcagaaaaaaagcagcccttctgcccctaaaaaaagtctacaaagtcaatcgtgagaccagaccttgacctgttccgtttggcgctctggattgcggagcataccgaggagtcctggatggcagagcagatgcaacggcacccctgagctgccctcagggggtcctcagccttggaggaggcaggagacctgggctatggagccactcacaggccctactgagaacaacttggtgtccatcacagtcctcttcagaatgcccagaatatggggataagaaggtgaaaccggcatgtttattaacacaatggaatattctgtggccaaatcaaaggaagacgttgaggattctggtgacacctggaaacgtactgctaagggaaaaaagcaggaccacaatgttatgtggatattgactgcgactatatataatgccagcgtggacttctcagagatggaatttggaggaatgtaatacagatgcaaatagagttttccccacgtt

SEQ ID NO: 77048 - DNA, 451 bp, Homo sapiens
ctcctcttcctccacctctgccacagggctccagcttccctctgggggcaccactgttcttagatggcagagcagatgcaacggcacccctgagctgccctcagggggtcctcagccttggaggaggcaggagacctgggctatggagccactcacaggccctactgagaacaacttggtgtccatcacagtcctcttcagaatgcccagaatatggggataagaaggtgaaaccggcatgtttattaacacaatggaatattctgtggccaaatcaaaggaagacgttgaggattctggtgacacctggaaacgtactgctaagggaaaaaagcaggaccacaatgttatgtggatattgactgcgactatatataatgccagcgtggacttctcagagatggaatttggaggaatgtaatacagatgcaaatagagttttccccacgtt

SEQ ID NO: 77049 - DNA, 410 bp, Homo sapiens
tgaggctctttttaaaaattcttcataatgagttgcttgtgtggaaactcacattcgcatactttacccttccttgcgctgtattttcctccattccttattggaaacatgcaaagagctaaatggaaaacaaaccctgctccggggcgcattgtccccttaaacttggtcagtgggcatgtgaaagctcagacggtcatcttcctcatcatgttagctcctcctcagacacatacaggggacggatcaggcaaacatcatttggaacaatgtcagtctagagcgctcgacacttacaggattggtcaaggaaggaacggttgatgtctgggaatttgaaaacctgtgttgagcagacctgtagcctgggatagctctcgcctgtgcaggttggccccaggccgccttct

SEQ ID NO: 77050 - DNA, 2180 bp, Homo sapiens
aagtcacgaaggagaactacccgatggcgaagtacctttcctgtcacctaaggaagaacccttgaagaagaggaagaggaaagaaagacaagtcaggcatggctctcacccagctctctcttccgaatttgtaatgaaagatttactacacaaagggaagagtaatacaggagaagtattccaaacagtgatgttggaaagacaggaaagccaagacattgaaggatgttccttcagggaagtccagaaaaatacacatggccttgagtatcaatgcagagatgctgaaggaaattacaaaggagtgcttttgacccaagaaggcaatctcactcatggaagagatgaacatgataaaagagatgcaagaaacaagcttattaaaaatcagcttggattaagccttcagtcacatctgcctgaactgcagctttttcaatatgaagggaaaatttatgaatgtaatcaggttgagaagtctttcaacaataattcctcagtttcaccacctcaacaaatgccttataatgtcaaaacccacatttctaagaaatatctcaaagattttatctcttctttattactcacacaggggcaaaaagcaaataattggggaagcccttacaaatctgatggatgtggcatggtctttcctcaaaattcacaccttgcaagtcatcagagaagtcatactaaagagaaaccttacaaatgttatgagtgtggcaaagcctttagaacacgttcaaacctaactacccatcaggtgatccatactggcgaaaaacgttacaaatgtaatgagtgtggtaaggtctttagtcgaaattcacaactctcacaacatcagaaaattcacactggagagaaaccttataaatgtaacgaatgtggcaaggtcttcactcagaattcacaccttgtaagacatcgaggaattcatactggagagaaaccttacaagtgtaatgagtgtgggaaacctttagtatctgttcaagcctaactacccatcagacaatccatactggtgggaaaccttacaaatgtaacgtgtggaaagttctaaagtcagagttcaaaccttgcaagccatcacagaattcatagtggagagaaaccttacaaatgaaggtggtaacttttgcagttagaattcattcctttgacaacgtcagagaatttatgcctgagagattccttgaaaatgcaatgactggctgggtgcagtggctcatgcctgtaatcccaacactttgggagtccgaggcaggtggatcacctgaggtcaggagttcaagaccagcctgaccaacatggcgaaaccccatttctactaaaagtacacaattagctaggcctggtggcgtgcgcctgtaatcccagctatataggaggctgaggcaggagaatcacttgaacccaggaggcggaggttgcagtgagccaagatcgtgccaatgcactccatcctgggcaaaaagagcaaaactccatcttaaaggaaaaaaaaaaaatgcaatgactgtggcaaactcctcatgagttcaagtattaatagacatccaagagtccataataatgagaaatcacataaatgtactgtgtgtgacagaggctttattcaggcctcacagctttgcaggcattaaaatctacgtatttgatggaaccacacaaatgtaatgtgtaagagcatcctgaagctcttactctaagactgtaactgtaggtgaggattcatacaaagagtgactcagtctctagttctttgattcacttttaaaatgataaactgcacaataattacacgttccaatatggtaaaacttaagacattatatatttcaaaggtcaaaggacatttggaaatggctacttaccttcaggttataaaatcttttattccattgtttgaggtttctcaaaaaggctactgtttgtgactttcaacctgaactatggatctgtggctattttgcatccttaagcacctttcgtggtgcctatctgggaaagaaccacagtatggaaaggcttacttcattacatgaggatcatttttatccatgtttattgaagaaggaggactctgccttgtaaaattaaatattctctcaattgagagaccatggttttggggcagaaaataatgtaaaactatgatatcaatcatcata

SEQ ID NO: 77051 - DNA, 3664 bp, Homo sapiens
  misc_feature (19)..(19): n is a, c, g, or t
  misc_feature (335)..(335): n is a, c, g, or t
ggcacgagggcgggtgacnccgccgagcgaagaacccttgaagaagaggaagaggaaagaaagacaagtcaggcatggctctcacccagggacaggtgacattcagggatgtggctatagaattctctcaggaggagtggacatgcctggaccccgctcagaggactttgtacagggacgtgatgttggagaattataggaacctggcctccctgggaatctcttgttttgacctcagtattatctctatgttggagcaagggaaggagcctttcactttggagagccaagtacaaatagcaggaaacccagatggatgggaatggatcaaagcngtgatcacagctctctcttccgaatttgtaatgaaagatttactacacaaagggaagagtaatacaggagaagtattccaaacagtgatgttggaaagacaggaaagccaagacattgaaggatgttccttcagggaagtccagaaaaatacacatggccttgagtatcaatgcagagatgctgaaggaaattacaaaggagtgcttttgacccaagaaggcaatctcactcatggaagagatgaacatgataaaagagatgcaagaaacaagcttattaaaaatcagcttggattaagccttcagtcacatctgcctgaactgcagctttttcaatatgaagggaaaatttatgaatgtaatcaggttgagaagtctttcaacaataattcctcagtttcaccacctcaacaaatgccttataatgtcaaaacccacatttctaagaaatatctcaaagattttatctcttctttattactcacacaggggcaaaaagcaaataattggggaagcccttacaaatctgatggatgtggcatggtctttcctcaaaattcacaccttgcaagtcatcagagaagtcatactaaagagaaaccttacaaatgttatgagtgtggcaaagcctttagaacacgttcaaacctaactacccatcaggtgatccatactggcgaaaaacgttacaaatgtaatgagtgtggtaaggtctttagtcgaaattcacaactctcacaacatcagaaaattcacactggagagaaaccttataaatgtaacgaatgtggcaaggtcttcactcagaattcacaccttgtaagacatcgaggaattcatactggagagaaaccttacaagtgtaatgagtgtgggaaagcctttagagctcgttcaagcttagctatccatcaggcaacccacagtggagaaaaaccttacaaatgtaatgaatgtggcaaggtcttcactcaaaattcacaccttacaaatcactggagaattcacactggagagaaaccttacaagtgtaatgagtgcggcaaagcctttggtgttcgttcaagcctagctattcatctggtaattcacaccggagaaaagccttacaaatgtcatgaatgcggcaaggtctttaggcgtaattcacaccttgcaaggcatcagctaattcatactggagagaaaccttataagtgtaatgagtgtggcaaagcctttagagcacattcaaacctaactacccatcaggtcatccatactggagaaaagccttacaaatgtaatgaatgtggcaaggtcttcactcaaaattcacaccttgcaaatcatcaaagaattcatactggagtgaagccttatatgtgtaatgagtgcggcaaagccttcagtgtgtattcaagcctaactacccatcaggtcatccatactggagaaaaaccttacaaatgtaatgagtgtggcaaggtcttcactcagaattcacaccttgcaagacatcggggaattcatactggagagaaaccttataaatgtaatgaatgtggcaaggtctttaggcataattcatacctttcaaggcatcagcgaattcatactggagagaaaccttacaagtataatgagtatggcaaagcctttagtgaacattcaaacctaactacccatcaggtcatccatactggtgaaaaaccttacaaatgtaatgagtgtggcaaggtcttcactcagaattcacaccttgcaagacatcggagagttcatactggaggtaaaccttaccagtgtaatgaatgtggcaaagcctttagtcaaacatcaaagcttgcaaggcatcagagagttcatactggagagaaaccatatgagtgtaatcagtgtgggaaagcctttagtgtccgttcaagcctaactacccatcaggcaatccatactggaaaaaaaccttacaaatgcaatgagtgtgggaaggtcttcactcagaattcacaccttgcaagacatcggggaattcatactggagagaaaccttacaagtgtaatgagtgtggcaaagcctttagtcaaacttcaaaacttgcaaggcatcagagaattcataccggagagaaaccatatgagtgtgggaaaccctttagtatctgttcaagcctaactacccatcagacaatccatactggtgggaaaccttacaaatgtaacgtgtggaaagttctaaagtcagagttcaaaccttgcaagccatcacagaattcatagtggagagaaaccttacaaatgaaggtggtaacttttgcagttagaattcattcctttgacaacgtcagagaatttatgcctgagagattccttgaaaatgcaatgactggctgggtgcagtggctcatgcctgtaatcccaacactttgggagtccgaggcaggtggatcacctgaggtcaggagttcaagaccagcctgaccaacatggcgaaaccccatttctactaaaagtacacaattagctaggcctggtggcgtgcgcctgtaatcccagctatataggaggctgaggcaggagaatcacttgaacccaggaggcggaggttgcagtgagccaagatcgtgccaatgcactccatcctgggcaaaaagagcaaaactccatcttaaaggaaaaaaaaaaaatgcaatgactgtggcaaactcctcatgagttcaagtattaatagacatccaagagtccataataatgagaaatcacataaatgtactgtgtgtgacagaggctttattcaggcctcacagctttgcaggcattaaaatctacgtatttgatggaaccacacaaatgtaatgtgtaagagcatcctgaagctcttactctaagactgtaactgtaggtgaggattcatacaaagagtgactcagtctctagttctttgattcacttttaaaatgataaactgcacaataattacacgttccaatatggtaaaacttaagacattatatatttcaaaggtcaaaggacatttggaaatggctacttaccttcaggttataaaatcttttattccattgtttgaggtttctcaaaaaggctactgtttgtgactttcaacctgaactatggatctgtggctattttgcatccttaagcacctttcgtggtgcctatctgggaaagaaccacagtatggaaaggcttacttcattacatgaggatcatttttatccatgtttattgaagaaggaggactctgccttgtaaaattaaatattctctcaattgagagaccatggttttggggcagaaaataatgtaaaactatgatatcaatcatcata

SEQ ID NO: 77052 - DNA, 319 bp, Homo sapiens
agtactattctgccataaaaaaaagaatgagatcctatcacttgcaacatcttggatggaactggaggtcattatgttaagtgaaataagtcaggcacagaaagaaaaactttgcatattctcactcatttgtgagaactgaaaattaaaacaattgaactcacggaaatagagagtataatgatggtttccagagactgggaaaggtattgggtggggggcagggaatggggaaggttaataagtacaatgcaatgaatacgatctagtattttacagcacaaaagggtggctatggtcaacaataatttatagtaca

SEQ ID NO: 77053 - DNA, 670 bp, Homo sapiens
atgatcttgagtactttgtcctttaggtgtcttgcaaatatcctttctcacggtctttttattctgttgggccttttgataaacagaagtttatcaatgtagtcagttttattaatttattgatattaaagttatattcttttacagtatcttctaacagttttagaatttttttctttcacatttaagttttcagtctacttagatcttatttttttttaagatctttaccttttccatctggatgccgttatcccagagctacttattgagacattcagtcttcactgatgtgccctatcttatatcatacatactgatatgtgtggatctatttctgaacactctattctgttccattggcctgtttatccttgggctaacacaacactgtcttaatagcagcagctttataatcattgttatctgacaaagcatctcctctcatcttgttcaataggattgcctttgcctacacctttgcatattctgtgcattgtcttgtgccacaaaaacaaaaaataaagatgttgagattttcattggattgaccatgtgaaataatttggagaatattggcatatttccattatgttttttttcttttttttttccttaaggtcaggaaagcatcaaatatttctattattgagtcttctaaatgatgaaa

SEQ ID NO: 77054 - DNA, 369 bp, Homo sapiens
taggcagttttgaagaactaaatggaatatctagaatgaaaaaccatgcttgctaaaattaactcaatgagtgagtttaaaaagcaatttagacccagctgagagctgaatttgtggtatatgcagaaattacttctgatgcgaggcagagcatgatgacagaatgaggagatcccaaacatctatgagagttccattctgaatgattagaagaatgaggaagcaacagtatttaaaaagataatcactaagaaagttctatacttgatgaaaaatgtgaatcctaagattcaggaacagtgtgagacttcagctggggaaaaaagatgaaactacacttctacatttaggagtaaaactacagaatac

SEQ ID NO: 77055 - DNA, 190 bp, Homo sapiens
ctaaaaaggacaagaagaaatttgggcattgaagtgtagtgttggaactttattaaattctgttgcactgctgtaattgagctggaacctccttgtatttggtattctttctagttaaagctttgacagtcctaggaattctgctctgaaatcataaaaattaaaaaaaaattgtttttactgtatagat

SEQ ID NO: 77056 - DNA, 374 bp, Homo sapiens
gtaaggacaccatcgaccaatgggattagggccctatcctgtgatctttagttttatgtaccccctaaaggctctatgtccaaatgcagtcacactggggtttagggttttaataaatgaattttgggggacacagtttagtccataacattctgtccttgacctgccaaaatgtatgtccttctcccatacaagataaatttattccatcccagccgggcatggtggctcacacctgtaatcccagcactttgggaagccaaggcaggcggatcagaaggtcaagagatcgagaccgttctggctaacacggtgaaaccccatctctactaaaataaaaaaaagtcgacgcggccgcgaatttagtagtagta

SEQ ID NO: 77057 - DNA, 429 bp, Homo sapiens
gtaaggacaccatcgaccaatgggattagggccctatcctgtgatctttagttttatgtaccccctaaaggctctatgtccaaatgcagtcacactggggtttagggttttaataaatgaattttgggggacacagtttagtccataacattctgtccttgacctgccaaaatgtatgtccttctcccatacaagataaatttattccatcccagccgggcatggtggctcacacctgtaatcccagcactttgggaagccaaggcaggcggatcagaaggtcaagagatcgagaccgttctggctaacacggtgaaaccccatctctactaaagagacatgagaatggcataaacccgggaggcagagcttgcagtgagccaagatggtgccactgcactccagcctgggcgacagagctagactccg

SEQ ID NO: 77058 - DNA, 550 bp, Homo sapiens
atgatattcttaaaaataaatgcatatatttgtatatgttatttttaagttgtttcgtttaaaaggataggaagagaaattgttaattttgcacttaggccattaaattaagaaagaatgaataaaacaatggttaggatttgcatattggtaacaatggcaaccttctgaattgctttcattttgctgagttcagtgattgtgctctgtgaattaattcttttgtggaaagctattgaaagatcaaggaatttagaaaacaaaacaacagagaagcgtgctgtttcatatctatttgtacatagaaggttcaaagtgagattgtttacatcacaagtcttgttgacattttatttgcttcttagaagaaagatagtattcaaaaatgattatataatcatgcagataagacgttgcagtcatgaatgaactgttctgagagaaggaccaagaagaaaaaccacatgacaatttcgagctgggtttggttggcaagtgtcttcacaagacttgaaaatagagccctatttgattcctacagaaaaaataa

SEQ ID NO: 77059 - DNA, 423 bp, Homo sapiens
tgctcatgccaggacaggaagcagacgactgctaacaaaatgttttcactgtgatcactgctacctgtgttgggtgcaggtgcccaagtgtcacccaagcctctcccgtggtgcaggtgctcaggcagttcccaggcctccctgtggtctaggtgtccacacactacccaagcctctcccgtggtgcagggccgggcggcggcggacgagggccccgccccggaattccggtttgtgcccaaacctaaaggaccatcaggaagagaatttccagaggcccctggctcaggaatggcctgtaagcctaggtattgggttccaagctgaagccaggccagagtagccaagtggggtttggatttttgtccaaacagctcaggcaagcttctggtgggagaagggaaaggtggggaaatgggcaag

SEQ ID NO: 77060 - DNA, 401 bp, Homo sapiens
aaatgtgagattaatttggtgatcagagtcttcaatgttttgctttagcaagaatgaaaaaagtacaaagtatttggtgaacaaaatccatgtatatgttttttctgaattatttacttattattgagccattggataaaatattttcatggcttttgaaacatatctccataatgctatataaaagatttgtttcagtttataattaacaaaacagtgaacaaatgattagttattaaatggatcacttttagtgctaatatggtagctatagaatgataagttaatgttggtttgattaacattttttgatagcagggatgaatgtttttccatgtttgtttttgaattgtattttttgaactttgaaatgctctttaaaatacagaaaaatctgtatg

SEQ ID NO: 77061 - DNA, 443 bp, Homo sapiens
ttgatgtttcagcaccacagtgttttaattacagaggcttttgtagtatggtgtaagtctggtaaggcctgtcccatcctcttagtttgttgtatttgttttcagtgtgtttctggttattcttgcagatttattttttaatatgaactttagtatcaacctgtctaattttattcaaaagcattgttgggatttttattagggttacattaaacttatgagagctgatatgttaataatattgagtccttctctctgagaatagtattacctcttttatttattttatttatatctacttttgtgtctttcaggtgtgtttttaatttttctttgtatagattttacacatttttaagattattcctaagtaattttctttgttagtattataaatgagattttctttaccatttgtttgctgttggttattgtttgctgtt

SEQ ID NO: 77062 - DNA, 455 bp, Homo sapiens
gtacattcccaatggtatatacctcagattcagaaagaattgcaacgaaaatctgaaattattggtggtggtgttagtactgtgattctgtatctgctgttattctgaacatgtgtattatgggatgaatgggattaggggtattataggataaagtcagaactcatctgaaatttatctttaaaacaatattctcagctctatctactggaaagttgtaagtggtgactaaaccagtcataatgagcactcctagagcccaggttgtgatgtctgaatggacttcccagtagagggagatagggatccttgaagaaccagctgtttcaggtctaggacaagaaatgtagatcctagaacatcttgccatgctagctggctaagaagaatataaaaactatgaggattctgttgaaaggacctatggggtcaacttgaataagctcctactggta

SEQ ID NO: 77063 - DNA, 428 bp, Homo sapiens
gggccccgtctcagaggttctgatgctgtaaatcaggcgggacccctgaattttcatttctaagaagctcacaggtgctactaatgttgaagagaacctatgatctagttcaacttctgggatttcttgctttctttcttttgtaaaaaaaataaataaataaatttaaaaaagagtttttgaagatggggaaatgaggcctggaaatagaaaagatttgcctagagtcacacacactgtcaggtcaggtagagtcaaaatcaggcaccccgactcacagactgcttcacattgccatcagagattgtcctgcaacaatattatgtttagttctactgcagaatgataactggatcttaccccctttgcctgatctggccacaaacttgtttttcaggtctttccattaggctctcttcagctaatta

SEQ ID NO: 77064 - DNA, 85 bp, Homo sapiens
tctggcagtggcaagttccctgtcatccaagtgttcaattgacttcagggccccgccagccctccaagactaacagtgatgtgtg

SEQ ID NO: 77065 - DNA, 757 bp, Homo sapiens
atctgagaaagggactctgtctcacttatattttccaaagttaacacagtacatggaaaatagaatacatatttattcaaaaaacatataaaatgccttgtgtgtctgaataaacccagttcttatgtagacatggtaagggattatttggtattcatgtgagcagttaggttttgtgtcagagtagaatgaccactctatcaaaagctccatactattttgacatgaaattgatctgcaaacacctatccagaatcccaaactaatctaaagaaggacagaatatatcccctgaattttatctttctcatgtgtttagaatctagctgatgaaaattcattttactaccaccttgtttgtttacattcgtttgttctctcattcagcaatctaccacgcaacacgtaatgttagtgagccactcttctaggtgctgaaatagccactcttctaggtgctgaaatacagacgaatccagataaggcctctactttcatgaagtttatattctagtgtctcaggttggagaataaggaaatacagaagatgaaacagagtgatataatgcagaatgactggatgattagtttgggatttctggaaaatattttctgtattggtgtttttctttttttgttttggtttgattttgtctttttgaaacaaggtctcactcttttgtccaggcaagatggtgcagtggcagcatctcagctcactgcaacctctgcctcccggactcaagcgatcttccca

SEQ ID NO: 77066 - DNA, 281 bp, Homo sapiens
atagtaccttttgtggatagacttctcagttaggttgtactagtattattccatattttgttccctcccatcccatcaaccccttactataaaatgaataaataacctgcattttgtatagaagttccaatttcaaatattctttcttgttgttcctgtaaaccagagagtgtttgtaggaacaacaggacagaaatatgtggaaatgtcaaagttttgtcctccagaatgcatttccaatacttttaaacctgaaagtacaataaaattcggatccattt

SEQ ID NO: 77067 - DNA, 578 bp, Homo sapiens
tgtagaaataaaaagtgcagatttatgagaggggatgggtctacctggagtgacttgaggaatacccagaagaccccgtccacctcctcctgcttagaatatgccttttgctagcctgctgtgatgcctggaatttcatccttcacccattgctgggcccacccacatagtttaaagccaagatcaggacagagatggagggagctgtcccctggccaccctgatacctgctgttggaaatcaacaaacaaacacaaacccactttgcgttctgtgagtgtgcatgtatgttggtccctaggtgctgcaggacaagaggagggccagaaagctctgcccatgcctggggagcatgctggatctcccttccagctacagaagaggtctatggtttcttagacacgcgtggattctcacagccaccaccacagacagtacaagcaacagttccaatactccagagaacgccctcatctctcctcacccctgccttctggcaagcaatgagctgttctctgttcctgtatttttgccttttctagaatgccatataaatggaattatatagaatgtgaaaa

SEQ ID NO: 77068 - DNA, 736 bp, Homo sapiens
ctaagatcctatccagaagctgctgatcaccagttgtaggtattttctagccattgggagactgcctttccctggtgccggctgtgaccagttattattttagagagacagtttaacaactgcctgaccacctgatggttgcgtgacattcctggtgggagcggggagccctctcctgctctgcttgtgtctgactacctactgtggcactatagaatcaaatgagaaaaacttaaaatttgggacaatttaacagctttattgaagtatattgatataacaaagtatatttaaagtgttcagtttgatacacacatatacacatagatacacctatttaaaaacccatcaccacaacagacaaaggacatattcatcatacccaaaagtttcctcatgtagcccctccctcccagtcttccttacctctccaccccaccaggcaacccctgatatgctttatgtaactatacattaatttgtatttcctagaattttatataattggaatcacacattgtatattctgttttatctggcttctttcactcagcaaaattattacgagattcactgacgttgtagcatgtatcattagttcattccttttattactgagtagtattcaactgtagggatacaccagtgattttacccattcccttattgatgaacattttggttgtttctagattttggctattgcaaataaagctgctatgaacattcatgtaca

SEQ ID NO: 77069 - DNA, 683 bp, Homo sapiens
gccgggcgcggtggctcaggcctgtaatcccagcactttgggaggccgaggcgggcgtatcacgaggtcgggagattgagaccatcctggctaacacggtgaaaccccgtctctgctaaaaaatacaaaaaaattcgctgggtgtggtggcgggcacctgtaatcccagctactgaggaggctgaggcaggagaatgacatgaacccggggggcagagcttgcagtgagccgagattgcaccactgcactccagcctgggcgacagagcaagactccgtctcaaaaaaaaaaaaaaaagaaggggtgcgtgtgtcttcccccattgagctcctcctcagtgaagcagagtgcatccctcgcagtttctgccgaggcctggccacccccagccagccccagtggatgggcaaactgttgtcaccactagaagtccaatttctcacccctcgggtgtcagctggactggaagcaaaactagcactcaactgtattgactcctctggagccaggggtggggacctggagtctcagtctgctgcatctggaaggcatcataagtgtccccaggcctgggcaggctggccttcctccttcactctaggagatgggcatttgaagcagaactctggggggtttgcctctgtcctttgctttcacctgattgtgggaggggaggtgggag

SEQ ID NO: 77070 - DNA, 390 bp, Homo sapiens
cattttaacattttagcaaggtccaggttgtgagatcattcagtgctctcctgtgtgtctttcataatcttaattcatcactgacctcatcttaaagcaggctaaaaaataatttcaatcaatcagttaataactgatagttaagaatcccagtgttgttacatgttttaaaatgttgattagggcttggctgaaaagtagtttcagttgcatcttataccatgtagactataaataagcattcatgtttatgtcagatatgaatatatataaacatcgatatgtgtatttttaaaaatttaacataaatatcttacgcctacctcccctttgttaagtgccaatgtagattactttctctgcctatgaattaattgaactcttgtgctc

SEQ ID NO: 77071 - DNA, 296 bp, Homo sapiens
gtcaacaggtaggactgtgtgatgactcatcctactcaaaattctccagactcggtttgtgcaatattggattctacaatgctgagcaagggaagaaaagtgtttaaaggagagccacaaataagaatatataggttgaatataaactttatagagcctgaatagattggaatggaatagatggaggcttcacactccttcccacatgcattgtcctatgcatctcttcatctggtgttcatcggtatcctttgtaatatcctttataataagctagtaaatgtgagtacagtcat

SEQ ID NO: 77072 - DNA, 90 bp, Homo sapiens
  misc_feature (88)..(89): n is a, c, g, or t
gcccggatgatcctcagtggtctggggtgcaggcttcaaacctgtagctgtctagcgacagagtggttcaattccacctttcgggcgnna

SEQ ID NO: 77073 - DNA, 414 bp, Homo sapiens
acttcattcagggagagagtttaaggggaaaagatagtcatagtcatcatctctcttggtgtttccaaacctgatgagcattaacattttctgggaagctttaaaaaggtatgggttcttgggtttcactgtataggctgtctttggtggatctgagatgggttgtggagctctatctatattttgaatccctgcccccatgggatctgatgaccaacctgtttgaaaaccattgcctcatccttgcaaatatcacagttggctgagtattggtgagtggggttgatttctggcctgaggtttagagccaactccaaggggcaaggttaacaacgttccataaagagtcaggaaattgacctgtagtcctgtccacaaataagccttctgaatagacacggtttttccctcaag

SEQ ID NO: 77074 - DNA, 347 bp, Homo sapiens
aattatctcctgaccttttcaaaacacactgaagtgagaataagagattttaaaaggtagaacacattgcgcaaagagaaaaggagaaaagatataaggataagagaaatttcaacacatctttggaaaactgaattacggaggaggatgaactgaattagaagcaggaagaaagctataacctaaggacctgcacaaggaaacacatgagaacctggcaaatattctgcagaactgaaatgctcagaattggaggcaacagatattgttgagggaggtgtcatgtgtggggctcaaaaattggtgattggtcaacaatctgaatagggaccagtcagagagtaagc

SEQ ID NO: 77075 - DNA, 480 bp, Homo sapiens
acagaattaatttcttcctcaagtcccattactggcattgctttcttcttgaccaaagctgagttctgcaccaatgctgagtcttctcattttgtaaaatatttatggtcataatccacagtcatataggatagtggtcctataagattacaatactgtatttttactataccttttctatgtttagttttgtttagatatacaaatacttaccattgtgttacagttgcctgtagtattcaggacagtagcatgccatgcaagtttgtagcctaggagcaataggctacactatatagcctaggtgaattgtaggctatgccgtctagttttgtgtaaatgtactctttgatgttgcctcaatgatgatgtcacctaacagtgcatttatcagaagtgcccccatcaatacacatgactgtatttggtcttcttcctaatttcctgatatatgaccactaaaaccttaaaatctcaaaa

SEQ ID NO: 77076 - DNA, 354 bp, Homo sapiens
ccctcaggtcacttgtgatgaccttggaaacataggtagctctcagtggtctgggggcccctggcagcccctccaccttcctcacactttttcagtcagtcatttctggaaggatttgggaaaacttcatttgctagtggacattttagtcattgggtgagcaagaagaaatggcatacttccttatttgagccaatctgccttctcaaaagtgtgatcactattaaaagagtcatgatatggtgtgggcagtctctgaaccaaacacaatgctgaaatgactttcggacaaaggtgatggtgcacttagttctgtcttgggtggcagggacaactttgcagaagctgtcatgg

SEQ ID NO: 77077 - DNA, 429 bp, Homo sapiens
tctgaagcctggggaggactttgaagccagagaaaggaaagccaagatgacagattttgatcgttttaaagttatgaaggcaaagaaaatgaggaacagaataatcaagaatgaagttaagaagcttcaaaaggcagctctcctgaaagcttctcccaaaaaagcacctggtactaagggtactgctgctgctgctgctgctgctgctgctgctgctgctaaagttccagcaaaaaagatcaccgccgcgagtaaaaaggctccagcccagaaggttcctgcccagaaagccacaggccagaaagcagcgcctgctccaaaagctcagaagggtcaaaaagctccagcccagaaagcacctgctccaaaggcatctggcaagaaagcataagtggcaatcataaaaagtaataaaggttctttttgacc

SEQ ID NO: 77078 - DNA, 910 bp, Homo sapiens
gctcgaccagaattctaactaggatcttcaagatcaactctccccaggtcagtgcatggagcagaaagagaagggaaagggatagaatgtcttcatgactttaatcctagtatttgaaaaaaaataatcaaaccttgcacctacaaatttctgtcttgatccagaaagtcattagcataaaaaagataatagtgggcttctcgcctaacgccgccaacatggtgttcaggcgcttcgtggaggttggccgggtggcctatgtctcctttggacctcatgccggaaaattggtcgcgattgtagatgttattgatcagaacagggctttggtcgatggaccttgcactcaagtgaggagacaggccatgcctttcaagtgcatgcagctcactgatttcatcctcaagtttccgcacagtgcccaccagaagtatgtccgacaagcctggcagaaggcagacatcaatacaaaatgggcagccacacgatgggccaagaagattgaagccagagaaaggaaagccaagatgacagattttgatcgttttaaagttatgaaggcaaagaaaatgaggaacagaataatcaagaatgaagttaagaagcttcaaaaggcagctctcctgaaagcttctcccaaaaaagcacctggtactaagggtactgctgctgctgctgctgctgctgctgctgctgctgctaaagttccagcaaaaaagatcaccgccgcgagtaaaaaggctccagcccagaaggttcctgcccagaaagccacaggccagaaagcagcgcctgctccaaaagctcagaagggtcaaaaagctccagcccagaaagcacctgctccaaaggcatctggcaagaaagcataagtggcaatcataaaaagtaataaaggttctttttgacc

SEQ ID NO: 77079 - DNA, 734 bp, Homo sapiens
ggtcactctacagaatccccttactttcgtccagctgccaacatggtgttcaggcgcttcgtggaggttggccgggtggcctatgtctcctttggacctcatgccggaaaattggtcgcgattgtagatgttattgatcagaacagggctttggtcgatggaccttgcactcaagtgaggagacaggccatgcctttcaagtgcatgcagctcactgatttcatcctcaagtttccgcacagtgcccaccagaagtatgtccgacaagcctggcagaaggcagacatcaatacaaaatgggcagccacacgatgggccaagaagattgaagccagagaaaggaaagccaagatgacagattttgatcgttttaaagttatgaaggcaaagaaaatgaggaacagaataatcaagaatgaagttaagaagcttcaaaaggcagctctcctgaaagcttctcccaaaaaagcacctggtactaagggtactgctgctgctgctgctgctgctgctgctgctgctgctaaagttccagcaaaaaagatcaccgccgcgagtaaaaaggctccagcccagaaggttcctgcccagaaagccacaggccagaaagcagcgcctgctccaaaagctcagaagggtcaaaaagctccagcccagaaagcacctgctccaaaggcatctggcaagaaagcataagtggcaatcataaaaagtaataaaggttctttttgacc

SEQ ID NO: 77080 - DNA, 725 bp, Homo sapiens
aaagcttaaggctaggtacgaggctgggtgttgatggtgttcaggcgcttcgtggaggttggccgggtggcctatgtctcctttggacctcatgccggaaaattggtcgcgattgtagatgttattgatcagaacagggctttggtcgatggaccttgcactcaagtgaggagacaggccatgcctttcaagtgcatgcagctcactgatttcatcctcaagtttccgcacagtgcccaccagaagtatgtccgacaagcctggcagaaggcagacatcaatacaaaatgggcagccacacgatgggccaagaagattgaagccagagaaaggaaagccaagatgacagattttgatcgttttaaagttatgaaggcaaagaaaatgaggaacagaataatcaagaatgaagttaagaagcttcaaaaggcagctctcctgaaagcttctcccaaaaaagcacctggtactaagggtactgctgctgctgctgctgctgctgctgctgctgctgctaaagttccagcaaaaaagatcaccgccgcgagtaaaaaggctccagcccagaaggttcctgcccagaaagccacaggccagaaagcagcgcctgctccaaaagctcagaagggtcaaaaagctccagcccagaaagcacctgctccaaaggcatctggcaagaaagcataagtggcaatcataaaaagtaataaaggttctttttgacc

SEQ ID NO: 77081 - DNA, 1165 bp, Homo sapiens
  misc_feature (421)..(421): n is a, c, g, or t
  misc_feature (433)..(433): n is a, c, g, or t
  misc_feature (456)..(456): n is a, c, g, or t
aatcttgtgtgacactctgcgagcactatctcactactactctgatgggatacctgtcgacgggttgtttaccgaccttgggtgggtctcctctcccatttgtgttgtccccatgtatgcggcctgagaccaatgtcccgcctatgtggttgaacccacgtcttttcccccttgcgagccctcagggatggcacaccagctgtggacctccccggccggtgcggccttttctgggtccccacgtatatagcccatcggggcattccgtggagcttgcgggctcttcagaatcctgaggagtacctgatcctcaggagcaccagtacagcgcccagaccagtagagacccggtagtcagaggcgcaggggagcatcctgggtttgggcccgcgacacccccgcggcccgcgctctgcgctcngctggcttggcnatgcctgcgggcagacggacggncggacggcacagctccctgggtgttcaggcgcttcgtggaggttggccgggtggcctatgtctcctttggacctcatgccggaaaattggtcgcgattgtagatgttattgatcagaacagggctttggtcgatggaccttgcactcaagtgaggagacaggccatgcctttcaagtgcatgcagctcactgatttcatcctcaagtttccgcacagtgcccaccagaagtatgtccgacaagcctggcagaaggcagacatcaatacaaaatgggcagccacacgatgggccaagaagattgaagccagagaaaggaaagccaagatgacagattttgatcgttttaaagttatgaaggcaaagaaaatgaggaacagaataatcaagaatgaagttaagaagcttcaaaaggcagctctcctgaaagcttctcccaaaaaagcacctggtactaagggtactgctgctgctgctgctgctgctgctgctgctgctgctaaagttccagcaaaaaagatcaccgccgcgagtaaaaaggctccagcccagaaggttcctgcccagaaagccacaggccagaaagcagcgcctgctccaaaagctcagaagggtcaaaaagctccagcccagaaagcacctgctccaaaggcatctggcaagaaagcataagtggcaatcataaaaagtaataaaggttctttttgacc

SEQ ID NO: 77082 - DNA, 711 bp, Homo sapiens
cccacgcgtccgccacgcgtccgtgttcaggcgcttcgtggaggttggccgggtggcctatgtctcctttggacctcatgccggaaaattggtcgcgattgtagatgttattgatcagaacagggctttggtcgatggaccttgcactcaagtgaggagacaggccatgcctttcaagtgcatgcagctcactgatttcatcctcaagtttccgcacagtgcccaccagaagtatgtccgacaagcctggcagaaggcagacatcaatacaaaatgggcagccacacgatgggccaagaagattgaagccagagaaaggaaagccaagatgacagattttgatcgttttaaagttatgaaggcaaagaaaatgaggaacagaataatcaagaatgaagttaagaagcttcaaaaggcagctctcctgaaagcttctcccaaaaaagcacctggtactaagggtactgctgctgctgctgctgctgctgctgctgctgctgctaaagttccagcaaaaaagatcaccgccgcgagtaaaaaggctccagcccagaaggttcctgcccagaaagccacaggccagaaagcagcgcctgctccaaaagctcagaagggtcaaaaagctccagcccagaaagcacctgctccaaaggcatctggcaagaaagcataagtggcaatcataaaaagtaataaaggttctttttgacc

SEQ ID NO: 77083 - DNA, 849 bp, Homo sapiens
  misc_feature (756)..(756): n is a, c, g, or t
  misc_feature (760)..(760): n is a, c, g, or t
  misc_feature (763)..(763): n is a, c, g, or t
  misc_feature (766)..(766): n is a, c, g, or t
  misc_feature (775)..(775): n is a, c, g, or t
ggtcactctacagaatccccttactttcgtccagctgccaacatggtgttcaggcgcttcgtggaggttggccgggtggcctatgtctcctttggacctcatgccggaaaattggtcgcgattgtagatgttattgatcagaacagggctttggtcgatggaccttgcactcaagtgaggagacaggccatgcctttcaagtgcatgcagctcactgatttcatcctcaagtttccgcacagtgcccaccagaagtatgtccgacaagcctggcagaaggcagacatcaatacaaaatgggcagccacacgatgggccaagaagattgaagccagagaaaggaaagccaagatgacagattttgatcgttttaaagttatgaaggcaaagaaaatgaggaacagaataatcaagaatgaagttaagaagcttcaaaaggcagctctcctgaaagcttctcccaaaaaagcacctggtactaagggtactgctgctgctgctgctgctgctgctgctgctgctgctaaagttccagcaaaaaagatcaccgccgcgagtaaaaaggctccagcccagaaggttcctgcccagaaagccacaggccagaaagcagcgcctgctccaaaagctcagaagggtcaaaaagctccagcccagaaagcacctgctccaaaggcatctggcaagaaagcataagtggcaatcataaaaagtaataaaggttctttttgaccaaaaaaaaaaaaaaaaaaattngggngcnggncggaaattnacacctcgcgtgggcgcggccaaagaagaccggacagggtccagcaccgcgccagggggttcccaaaaacccgg

SEQ ID NO: 77084 - DNA, 874 bp, Homo sapiens
ccacgcgtcgcggacgcgtgggtcgacccacgcgtgcgccaacatggtgttcaggcgcttcgtggaggttggccgggtggcctatgtctcctttggacctcatgccggaaaattggtcgcgattgtagatgttattgatcagaacagggctttggtcgatggaccttgcactcaagtgaggagacaggccatgcctttcaagtgcatgcagctcactgatttcatcctcaagtttccgcacagtgcccaccagaagtatgtccgacaagcctggcagaaggcagacatcaatacaaaatgggcagccacacgatgggccaagaagattgaagccagagaaaggaaagccaagatgacagattttgatcgttttaaagttatgaaggcaaagaaaatgaggaacagaataatcaagaatgaagttaagaagcttcaaaaggcagctctcctgaaagcttctcccaaaaaagcacctggtactaagggtactgctgctgctgctgctgctgctgctgctgctgctgctaaagttccagcaaaaaagatcaccgccgcgagtaaaaaggctccagcccagaaggttcctgcccagaaagccacaggccagaaagcagcgcctgctccaaaagctcagaagggtcaaaaagctccagcccagaaagcacctgctccaaaggcatctggcaagaaagcataagtggcaatcataaaaagtaataaaggttctttttgaccaaacaacaaaagccacgctcctaacacaacaacggggggggggcaaagtctccgggggggcctttcgtcccctctttgaaaaggggctcaaggggctataaagagcgggggtaaacgcgcggggcacccgtgggggttg

SEQ ID NO: 77085 - DNA, 812 bp, Homo sapiens
aaagcttaaggctaggtacgaggctgggtgttgatggtgttcaggcgcttcgtggaggttggccgggtggcctatgtctcctttggacctcatgccggaaaattggtcgcgattgtagatgttattgatcagaacagggctttggtcgatggaccttgcactcaagtgaggagacaggccatgcctttcaagtgcatgcagctcactgatttcatcctcaagtttccgcacagtgcccaccagaagtatgtccgacaagcctggcagaaggcagacatcaatacaaaatgggcagccacacgatgggccaagaagattgaagccagagaaaggaaagccaagatgacagattttgatcgttttaaagttatgaaggcaaagaaaatgaggaacagaataatcaagaatgaagttaagaagcttcaaaaggcagctctcctgaaagcttctcccaaaaaagcacctggtactaagggtactgctgctgctgctgctgctgctgctgctgctgctgctaaagttccagcaaaaaagatcaccgccgcgagtaaaaaggctccagcccagaaggttcctgcccagaaagccacaggccagaaagcagcgcctgctccaaaagctcagaagggtcaaaaagctccagcccagaaagcacctgctccaaaggcatctggcaagaaagcataagtggcaatcataaaaagtaataaaggttctttttgaccacaaaaaaaaccgggcttttccgggaggaaaaggtttaaggccatgcctattttccgccccttttgcaaggaattcgccctagcgta

SEQ ID NO: 77086 - DNA, 868 bp, Homo sapiens
  misc_feature (787)..(787): n is a, c, g, or t
  misc_feature (790)..(790): n is a, c, g, or t
  misc_feature (800)..(803): n is a, c, g, or t
  misc_feature (812)..(812): n is a, c, g, or t
  misc_feature (815)..(815): n is a, c, g, or t
  misc_feature (822)..(823): n is a, c, g, or t
  misc_feature (825)..(826): n is a, c, g, or t
  misc_feature (833)..(834): n is a, c, g, or t
  misc_feature (837)..(837): n is a, c, g, or t
  misc_feature (853)..(853): n is a, c, g, or t
  misc_feature (861)..(861): n is a, c, g, or t
gcaatatggtataggtcgggctggtgtaattcatgacgggacgtgtgttcaggcgcttcgtggaggttggccgggtggcctatgtctcctttggacctcatgccggaaaattggtcgcgattgtagatgttattgatcagaacagggctttggtcgatggaccttgcactcaagtgaggagacaggccatgcctttcaagtgcatgcagctcactgatttcatcctcaagtttccgcacagtgcccaccagaagtatgtccgacaagcctggcagaaggcagacatcaatacaaaatgggcagccacacgatgggccaagaagattgaagccagagaaaggaaagccaagatgacagattttgatcgttttaaagttatgaaggcaaagaaaatgaggaacagaataatcaagaatgaagttaagaagcttcaaaaggcagctctcctgaaagcttctcccaaaaaagcacctggtactaagggtactgctgctgctgctgctgctgctgctgctgctgctgctaaagttccagcaaaaaagatcaccgccgcgagtaaaaaggctccagcccagaaggttcctgcccagaaagccacaggccagaaagcagcgcctgctccaaaagctcagaagggtcaaaaagctccagcccagaaagcacctgctccaaaggcatctggcaagaaagcataagtggcaatcataaaaagtaataaaggttctttttgaccaaaaacgaataaaaaaaaatcgggggtttttttgggggggggaaaaagggtttnaangggctgggtnnnnttttccggnccntttttgnnannggggaannggnggccccaagggggggntaatgaanccggtat

SEQ ID NO: 77087 - DNA, 844 bp, Homo sapiens
ccttagctagtaggaggcgggtgtgaatcggccgaggggtgttcaggcgcttcgtggaggttggccgggtggcctatgtctcctttggacctcatgccggaaaattggtcgcgattgtagatgttattgatcagaacagggctttggtcgatggaccttgcactcaagtgaggagacaggccatgcctttcaagtgcatgcagctcactgatttcatcctcaagtttccgcacagtgcccaccagaagtatgtccgacaagcctggcagaaggcagacatcaatacaaaatgggcagccacacgatgggccaagaagattgaagccagagaaaggaaagccaagatgacagattttgatcgttttaaagttatgaaggcaaagaaaatgaggaacagaataatcaagaatgaagttaagaagcttcaaaaggcagctctcctgaaagcttctcccaaaaaagcacctggtactaagggtactgctgctgctgctgctgctgctggctgctgctgctgctgctgctgctgctgctgctaaagttccagcaaaaaagatcaccgccgcgagtaaaaaggctccagcccagaaggttcctgcccagaaagccacaggccagaaagcagcgcctgctccaaaagctcagaagggtcaaaaagctccagcccagaaagcacctgctccaaaggcatctggcaagaaagcataagtggcaatcataaaaagtaataaaggttctttttgacctgttgacaaatgtatttaagcctttggatttaaagcctgttgaggctagagttaggaggcagattgatagtaggattataataaacattaaataatca

SEQ ID NO: 77088 - DNA, 756 bp, Homo sapiens
aaaatataggctaggtagaggctggttcgaatcggccgaggcaacatggtgttcaggcgcttcgtggaggttggccgggtggcctatgtctcctttggacctcatgccggaaaattggtcgcgattgtagatgttattgatcagaacagggctttggtcgatggaccttgcactcaagtgaggagacaggccatgcctttcaagtgcatgcagctcactgatttcatcctcaagtttccgcacagtgcccaccagaagtatgtccgacaagcctggcagaaggcagacatcaatacaaaatgggcagccacacgatgggccaagaagattgaagccagagaaaggaaagccaagatgacagattttgatcgttttaaagttatgaaggcaaagaaaatgaggaacagaataatcaagaatgaagttaagaagcttcaaaaggcagctctcctgaaagcttctcccaaaaaagcacctggtactaagggtactgctgctgctgctgctgctgctggctgctgctgctgctgctgctgctgctgctgctaaagttccagcaaaaaagatcaccgccgcgagtaaaaaggctccagcccagaaggttcctgcccagaaagccacaggccagaaagcagcgcctgctccaaaagctcagaagggtcaaaaagctccagcccagaaagcacctgctccaaaggcatctggcaagaaagcataagtggcaatcataaaaagtaataaaggttctttttgacc

SEQ ID NO: 77089 - DNA, 738 bp, Homo sapiens
cggacgcgtgggtcgaacgctgccaacatggtgttcaggcgcttcgtggaggttggccgggtggcctatgtctcctttggacctcatgccggaaaattggtcgcgattgtagatgttattgatcagaacagggctttggtcgatggaccttgcactcaagtgaggagacaggccatgcctttcaagtgcatgcagctcactgatttcatcctcaagtttccgcacagtgcccaccagaagtatgtccgacaagcctggcagaaggcagacatcaatacaaaatgggcagccacacgatgggccaagaagattgaagccagagaaaggaaagccaagatgacagattttgatcgttttaaagttatgaaggcaaagaaaatgaggaacagaataatcaagaatgaagttaagaagcttcaaaaggcagctctcctgaaagcttctcccaaaaaagcacctggtactaagggtactgctgctgctgctgctgctgctggctgctgctgctgctgctgctgctgctgctgctaaagttccagcaaaaaagatcaccgccgcgagtaaaaaggctccagcccagaaggttcctgcccagaaagccacaggccagaaagcagcgcctgctccaaaagctcagaagggtcaaaaagctccagcccagaaagcacctgctccaaaggcatctggcaagaaagcataagtggcaatcataaaaagtaataaaggttctttttgacc

SEQ ID NO: 77090 - DNA, 862 bp, Homo sapiens
  misc_feature (773)..(774): n is a, c, g, or t
  misc_feature (779)..(779): n is a, c, g, or t
  misc_feature (782)..(783): n is a, c, g, or t
aaaatataggctaggtagaggctggttcgaatcggccgaggcaacatggtgttcaggcgcttcgtggaggttggccgggtggcctatgtctcctttggacctcatgccggaaaattggtcgcgattgtagatgttattgatcagaacagggctttggtcgatggaccttgcactcaagtgaggagacaggccatgcctttcaagtgcatgcagctcactgatttcatcctcaagtttccgcacagtgcccaccagaagtatgtccgacaagcctggcagaaggcagacatcaatacaaaatgggcagccacacgatgggccaagaagattgaagccagagaaaggaaagccaagatgacagattttgatcgttttaaagttatgaaggcaaagaaaatgaggaacagaataatcaagaatgaagttaagaagcttcaaaaggcagctctcctgaaagcttctcccaaaaaagcacctggtactaagggtactgctgctgctgctgctgctgctggctgctgctgctgctgctgctgctgctgctgctaaagttccagcaaaaaagatcaccgccgcgagtaaaaaggctccagcccagaaggttcctgcccagaaagccacaggccagaaagcagcgcctgctccaaaagctcagaagggtcaaaaagctccagcccagaaagcacctgctccaaaggcatctggcaagaaagcataagtggcaatcataaaaagtaataaaggttctttttgaccaagcaaaaaaaaaaacnnggggntanntggggggggggaacagaggaaggagggccagggcataggggcccggaccattttggcaaggggaaatgcgcaccaaggg

SEQ ID NO: 77091 - DNA, 960 bp, Homo sapiens
cggacgcgtgggtcgaacgctgccaacatggtgttcaggcgcttcgtggaggttggccgggtggcctatgtctcctttggacctcatgccggaaaattggtcgcgattgtagatgttattgatcagaacagggctttggtcgatggaccttgcactcaagtgaggagacaggccatgcctttcaagtgcatgcagctcactgatttcatcctcaagtttccgcacagtgcccaccagaagtatgtccgacaagcctggcagaaggcagacatcaatacaaaatgggcagccacacgatgggccaagaagattgaagccagagaaaggaaagccaagatgacagattttgatcgttttaaagttatgaaggcaaagaaaatgaggaacagaataatcaagaatgaagttaagaagcttcaaaaggcagctctcctgaaagcttctcccaaaaaagcacctggtactaagggtactgctgctgctgctgctgctgctggctgctgctgctgctgctgctgctgctgctgctaaagttccagcaaaaaagatcaccgccgcgagtaaaaaggctccagcccagaaggttcctgcccagaaagccacaggccagaaagcagcgcctgctccaaaagctcagaagggtcaaaaagctccagcccagaaagcacctgctccaaaggcatctggcaagaaagcataagtggcaatcataaaaagtaataaaggttctttttgaccaaaagaacacaaacgcaccggtctgaggagagcaaggcgacaacgcaacgccgtcgacggatgcacacgccaagacgcgtcaggcacgagaccacacacaaagaaagcggggggcgacaaacgcagcggggacaagccgacccccgtagaaagaccactgggattaaccgcggcccgcaccacaggagacagacgggcgtaggacacactgtgggggagccc

SEQ ID NO: 77092 - DNA, 412 bp, Homo sapiens
  misc_feature (10)..(12): n is a, c, g, or t
  misc_feature (21)..(21): n is a, c, g, or t
  misc_feature (23)..(24): n is a, c, g, or t
ctactaaatnnncggccgcgncnnccaaaaaagcacctggtactaagggtactgctgctgctgctgctgctggctgctgctgctgctgctgctgctgctgctgctaaagttccagcaaaaaagatcaccgccgcgagtaaaaaggctccagcccagaaggttcctgcccagaaagccacaggccagaaagcagcgcctgctccaaaagctcagaagggtcaaaaagctccagcccagaaagcacctgctccaaaggcatctggcaagaaagcataagtggcaatcataaaaagtaataaaggttctttttgacctgttgacaaatgtatttaagcctttggatttaaagcctgttgaggctagagttaggaggcagattgatagtaggattataataaacattaaataatca

SEQ ID NO: 77093 - DNA, 470 bp, Homo sapiens
ccgcctactactactaaattcgcggccgcgtcgaccaaagccaagatgacagattttgatcgttttaaagttatgaaggcaaagaaaatgaggaacagaataatcaagaatgaagttaagaagcttcaaaaggcagctctcctgaaagcttctcccaaaaaagcacctggtactaagggtactgctgctgctgctgctgctgctgctgctgctgctgctaaagttccagcaaaaaagatcaccgccgcgagtaaaaaggctccagcccagaaggttcctgcccagaaagccacaggccagaaagcagcgcctgctccaaaagctcagaagggtcaaaaagctccagcccagaaagcacctgctccaaaggcatctggcaagaaagcataagtggcaatcataaaaagtaataaaggttctttttgaccaaaaaaaagtcgacgcggccgcaatttagtagtagtattccg

SEQ ID NO: 77094 - DNA, 262 bp, Homo sapiens
  misc_feature (235)..(235): n is a, c, g, or t
gctcagattatccccggatgtacatgagtattgatctggctgtacatgagtattgatcagaacagggctttggtcgatggaccttgcactcaagtgaggagacaggccatgcctttcaagtgcatgcagctcactgatttcatcctcaagtttccgcacagtgcccaccagaagtatgtccgacaagcctggcagaaggcagacatcaatactcatgtacaaccgggcaccgagnctcgacattcgttactcctggctcata

SEQ ID NO: 77095 - DNA, 461 bp, Homo sapiens
  misc_feature (92)..(92): n is a, c, g, or t
  misc_feature (118)..(118): n is a, c, g, or t
  misc_feature (219)..(219): n is a, c, g, or t
cctttactctcttctccctccagaccttcctctgacccttgctgaactggggtccctttgtgagtgtctcagtctagaggtacctccctccntggggggtctcagctcctggagtcgnccagccttggggcccctctgtgagatctcaatgctgtctggggaccctaagagttttctcacctgttcagtctcatctaaccttccaatgtctgatgttcngctgctgctgctgctgctgctgctgctgctgctaaagttccagcaaaaaagatcaccgccgcgagtaaaaaggctccagcccagaaggttcctgcccagaaagccacaggccagaaagcagcgcctgctccaaaagctcagaagggtcaaaaagctccagcccagaaagcacctgctccaaaggcatctggcaagaaagcataagtggcaatcataaaaagtaataaaggttctttttgacc

SEQ ID NO: 77096 - DNA, 338 bp, Homo sapiens
aggtgagctcccagggttttcttaatgctcaaatggtcgcccaacgcagcagagagctgctaagtcatcacttccgacaacagagggtggctatgagctgctgctgctgctgctgctgctgctgctgctaaagttccagcaaaaaagatcaccgccgcgagtaaaaaggctccagcccagaaggttcctgcccagaaagccacaggccagaaagcagcgcctgctccaaaagctcagaagggtcaaaaagctccagcccagaaagcacctgctccaaaggcatctggcaagaaagcataagtggcaatcataaaaagtaataaaggttctttttgacc

SEQ ID NO: 77097 - DNA, 295 bp, Homo sapiens
  misc_feature (10)..(12): n is a, c, g, or t
  misc_feature (21)..(21): n is a, c, g, or t
  misc_feature (23)..(24): n is a, c, g, or t
ctactaaatnnncggccgcgncnnccaaaaaagcacctggtactaagggtactgctgctgctgctgctgctgctgctgctgctgctaaagttccagcaaaaaagatcaccgccgcgagtaaaaaggctccagcccagaaggttcctgcccagaaagccacaggccagaaagcagcgcctgctccaaaagctcagaagggtcaaaaagctccagcccagaaagcacctgctccaaaggcatctggcaagaaagcataagtggcaatcataaaaagtaataaaggttctttttgacc

SEQ ID NO: 77098 - DNA, 287 bp, Homo sapiens
  misc_feature (8)..(8): n is a, c, g, or t
  misc_feature (30)..(30): n is a, c, g, or t
agggcganagccctgggatgcaccggccanaggccatgctgctgcgctgctgctgctgctgctgctgctgctgctgctaaagttccagcaaaaaagatcaccgccgcgagtaaaaaggctccagcccagaaggttcctgcccagaaagccacaggccagaaagcagcgcctgctccaaaagctcagaagggtcaaaaagctccagcccagaaagcacctgctccaaaggcatctggcaagaaagcataagtggcaatcataaaaagtaataaaggttctttttgacc

SEQ ID NO: 77099 - DNA, 433 bp, Homo sapiens
  misc_feature (178)..(178): n is a, c, g, or t
agcttcatcccatcacagctgatccccccaaccgccaaccccgtcaccagtgcggtgcctcagccgcaggggccaccactccatcccagcgctcccagctggaggcctattccactctgctggccaacatgggcagtctgagccagacgccgggacacaagggcttgtagccatggcncagcagccacagcgctgctgctgctgctgctgctgctgctgctgctaaagttccagcaaaaaagatcaccgccgcgagtaaaaaggctccagcccagaaggttcctgcccagaaagccacaggccagaaagcagcgcctgctccaaaagctcagaagggtcaaaaagctccagcccagaaagcacctgctccaaaggcatctggcaagaaagcataagtggcaatcataaaaagtaataaaggttctttttgacc

SEQ ID NO: 77100 - DNA, 613 bp, Homo sapiens
  misc_feature (55)..(55): n is a, c, g, or t
  misc_feature (105)..(105): n is a, c, g, or t
cagattcacctgaagagtgtgagtggtcccattgaggttctgctggtgaacaganggcatggagctcaccccctgtggctgtgcctgtgccaccacctgaagatntgctccagagcccatctgctgtttctacactccacctctgcccaagcctgccctagcccagtcccaggaagcctcacgtccaaatagtcctcagctcactcccactgctgtccctggcagtgcagaagtccagggaatggctggcccagcagctgagatcacagtgagtggcggccctgggactgatagcaaggacagtggtgagctcagttcactcccactgggcccaacaacactggacacccggccactgcagtcttctgcccgctgctgctgctgctgctgctgctgctgctgctaaagttccagcaaaaaagatcaccgccgcgagtaaaaaggctccagcccagaaggttcctgcccagaaagccacaggccagaaagcagcgcctgctccaaaagctcagaagggtcaaaaagctccagcccagaaagcacctgctccaaaggcatctggcaagaaagcataagtggcaatcataaaaagtaataaaggttctttttgacc

SEQ ID NO: 77101 - DNA, 209 bp, Homo sapiens
ctctttattggccgcctactactactatacgggtggaagattacgacagagaaggttcctgcccagaaagccacaggccagaaagcagcgcctgctccaaaagctcagaagggtcaaaaagctccagcccagaaagcacctgctccaaaggcatctggcaagaaagcataagtggcaatcataaaaagtaataaaggttctttttgacc

SEQ ID NO: 77102 - DNA, 859 bp, Homo sapiens
ggcggtgcgttcttctacacatgcgcagggttgggcgggtcttcttccttctcgcctaacgccgccaacatggtgttcaggcgcttcgtggaggttggccgggtggcctatgtctcctttggacctcatgccggaaaattggtcgcgattgtagatgttattgatcagaacagggctttggtcgatggaccttgcactcaagtgaggagacaggccatgcctttcaagtgcatgcagctcactgatttcatcctcaagtttccgcacagtgcccaccagaagtatgtccgacaagcctggcagaaggcagacatcaatacaaaatgggcagccacacgatgggccaagaagattgaagccagagaaaggaaagccaagatgacagattttgatcgttttaaagttatgaaggcaaagaaaatgaggaacagaataatcaagaatgaagttaagaagcttcaaaaggcagctctcctgaaagcttctcccaaaaaagcacctggtactaagggtactgctgctgctgctgctgctgctgctgctgctgctgctaaagttccagcaaaaaagatcaccgccgcgagtaaaaaggctccagcccagaaggttcctgcccagaaagccacaggccagaaagcagcgcctgctccaaaagctcagaagggtcaaaaagctccagcccagaaagcacctgctccaaaggcatctggcaagaaagcataagtggcaatcataaaaagtaataaaggttctttttgacctgttgacaaatgtatttaagcctttggatttaaagcctgttgaggctagagttaggaggcagattgatagtaggattataataaacattaaataatca

SEQ ID NO: 77103 - DNA, 627 bp, Homo sapiens
ggcggtgcgttcttctacacatgcgcagggttgggcgggtcttcttccttctcgcctaacgccgccaacatggtgttcaggcgcttcgtggaggttggccgggtggcctatgtctcctttggacctcatgccggaaaattggtcgcgattgtagatgttattgatcagaacagggctttggtcgatggaccttgcactcaagtgaggagacaggccatgcctttcaagtgcatgcagctcactgatttcatcctcaagtttccgcacagtgcccaccagaagtatgtccgacaagcctggcagaaggcagacatcaatacaaaatgggcagccacacgatgggccaagaagattgaagccagagaaaggaaagccaagatgacagattttgatcgttttaaagttatgaaggcaaagaaaatgaggaacagaataatcaagaatgaagttaagaagcttcaaaaggcagctctcctgaaagcttctcccaaaaaagcacctggtactaagggtactgctgctgctgctgctgctgctgctgctgctgctgctaaagttccagcaaaaaagatcaccgccgcgagtaaaaaggctccagccctgggcgataagcaggtaccgagctcg

SEQ ID NO: 77104 - DNA, 802 bp, Homo sapiens
  misc_feature (773)..(773): n is a, c, g, or t
  misc_feature (790)..(790): n is a, c, g, or t
  misc_feature (792)..(793): n is a, c, g, or t
ggcggtgcgttcttctacacatgcgcagggttgggcgggtcttcttccttctcgcctaacgccgccaacatggtgttcaggcgcttcgtggaggttggccgggtggcctatgtctcctttggacctcatgccggaaaattggtcgcgattgtagatgttattgatcagaacagggctttggtcgatggaccttgcactcaagtgaggagacaggccatgcctttcaagtgcatgcagctcactgatttcatcctcaagtttccgcacagtgcccaccagaagtatgtccgacaagcctggcagaaggcagacatcaatacaaaatgggcagccacacgatgggccaagaagattgaagccagagaaaggaaagccaagatgacagattttgatcgttttaaagttatgaaggcaaagaaaatgaggaacagaataatcaagaatgaagttaagaagcttcaaaaggcagctctcctgaaagcttctcccaaaaaagcacctggtactaagggtactgctgctgctgctgctgctgctgctgctgctgctgctaaagttccagcaaaaaagatcaccgccgcgagtaaaaaggctccagcccagaaggttcctgcccagaaagccacaggccagaaagcagcgcctgctccaaaagctcagaagggtcaaaaagctccagcccagaaagcacctgctccaaaggcatctggcaagaaagcataagtggcaatcataaaaagtaataaaggttctttttgaccaaacacaacaancacacaacaaaaaacanannaaaacaaaa

SEQ ID NO: 77105 - DNA, 880 bp, Homo sapiens
ggcggtgcgttcttctacacatgcgcagggttgggcgggtcttcttccttctcgcctaacgccgccaacatggtgttcaggcgcttcgtggaggttggccgggtggcctatgtctcctttggacctcatgccggaaaattggtcgcgattgtagatgttattgatcagaacagggctttggtcgatggaccttgcactcaagtgaggagacaggccatgcctttcaagtgcatgcagctcactgatttcatcctcaagtttccgcacagtgcccaccagaagtatgtccgacaagcctggcagaaggcagacatcaatacaaaatgggcagccacacgatgggccaagaagattgaagccagagaaaggaaagccaagatgacagattttgatcgttttaaagttatgaaggcaaagaaaatgaggaacagaataatcaagaatgaagttaagaagcttcaaaaggcagctctcctgaaagcttctcccaaaaaagcacctggtactaagggtactgctgctgctgctaaagttccagcaaaaaaagatcaccgaaagacctaaatacacatttgatttctcagaagacgaggatgatgatgctgatgatgatgatgatgacaataatgattagaggaatagacagttaaagcatctcccataaagatgatggggaagatgaatttgtaccttcagatgggtaagatcacacgctgacttatacattttcaaccagggaaaatccacaaagccacatccagacaaaatcgggcctgacaaaaacaagtcacgatttcgcgcgctctctctctcattcctctcaagtcctcacgagtccgaagatgcatcagtttagctagacgtcactgccgaaacattc

SEQ ID NO: 77106 - DNA, 872 bp, Homo sapiens
ggcggtgcgttcttctacacatgcgcagggttgggcgggtcttcttccttctcgcctaacgccgccaacatggtgagtcttactgttgcgggctccggggccgtcgaccatgccgctcgacctccacctccgctgggaagctgaggcgccgaacggctcccagagggtcccgggaagcgcatggtgttcaggcgcttcgtggaggttggccgggtggcctatgtctcctttggacctcatgccggaaaattggtcgcgattgtagatgttattgatcagaacagggctttggtcgatggaccttgcactcaagtgaggagacaggccatgcctttcaagtgcatgcagctcactgatttcatcctcaagtttccgcacagtgcccaccagaagtatgtccgacaagcctggcagaaggcagacatcaatacaaaatgggcagccacacgatgggccaagaagattgaagccagagaaaggaaagccaagatgacagattttgatcgttttaaagttatgaaggcaaagaaaatgaggaacagaataatcaagaatgaagttaagaagcttcaaaaggcagctctcctgaaagcttctcccaaaaaagcacctggtactaagggtactgctgctgctgctgctgctgctgctgctgctgctgctaaagttccagcaaaaaagatcaccgccgcgagtaaaaaggctccagcccagaaggttcctgcccagaaagccacaggccagaaagcagcgcctgctccaaaagctcagaagggtcaaaaagctccagcccagaaagcacctgctccaaaggcatctggcaagaaagcataagtggcaatcataaaaagtaataaaggttctttttgacc

SEQ ID NO: 77107 - DNA, 510 bp, Homo sapiens
tcgtcgtcgtcgtggtttggcgtgtattccgagcgttggtgtctggcggtttccgagcgttggtgtctggcggtttctgaccgttggtgtctggcggtttccgaccgttggtgtctggcacgcgccaccctctcttgctttggttgcgccatgccgatgtaccaggtaaagccctatcacggggtctgcgcccctctccgcacagtgcccaccagaagtatgtccgacaagcctggcagaaggcagacatcaatacaaaatgggcagccacacgatgggccaagaagattgaagccagagaaaggaaagccaagatgacagattttgatcgttttaaagttatgaaggcaaagaaaatgaggaacagaataatcaagaatgaagttaagaagcttcaaaaggcagctctcctgaaagcttctcccaaaaaagcacctggtactaagggtactgctgatgggggagccggcggcgccgctacgagcacccgggcttggcgcctggcaccat

SEQ ID NO: 77108 - DNA, 376 bp, Homo sapiens
taaattagcggccggtcgactatgaaggcaagaaaatgaggaacagaataatcaagaatgaagttaagaagcttcaaaaggcagctctcctgaaagcttctcccaaaaaagcacctggtactaagggtactgctgctgctgctgctgctgctgctgctgctgctgctaaagttccagcaaaaaagatcaccgccgcgagtaaaaaggctccagcccagaaggttcctgcccagaaagccacaggccagaaagcagcgcctgctccaaaagctcagaagggtcaaaaagctccagcccagaaagcacctgctccaaaggcatctggcaagaaagcataagtggcaatcataaaaagtaataaaggttctttttgacc

SEQ ID NO: 77109 - DNA, 823 bp, Homo sapiens
gacacgaatggggcacaggacgcttgtagccgagggatcaagacgacgaggacccggatgtgccgattcggatccgtctctctgaaagttattgaaggcaaagaaaatgaggaacagaataatcaagaatgaagttaagaagcttcaaaaggcagctctcctgaaagcttctcccaaaaaagcacctggtactaagggtactgctgctgctgctgctgctgctgctgctgctgctgctaaagttccagcaaaaaagatcaccgccgcgagtaaaaaggctccagcccagaaggttcctgcccagaaagccacaggccagaaagcagcgcctgctccaaaagctcagaagggtcaaaaagctccagcccagaaagcacctgctccaaaggcatctggcaagaaagcataagtggcaatcataaaaagtaataaaggttctttttgaccaaaaaaaaaaaaaaaaaaaaaaaaaacaggtgtgtgcggggcgcgcccgggagccccggagaaagcttttaagaaacccgcgcgggggggcgcgcgggggccccggggggcacaggaacaggggggccaacgcgcgggtaccacagagggagaccccggggcacagagaacaaaaggggcggagaatcttctcacccaaagtaaaacaagaggccgcgggggcgacacacgagacggggtctggggaacactatcacccagagatgaggaaagccgagagagggcacaaaaggggggagcatccaatcaaaccaggagggggtcccaaagggaagactccagactttccagatttaccccggcccccgtgtgggta

SEQ ID NO: 77110 - DNA, 261 bp, Homo sapiens
  misc_feature (26)..(26): n is a, c, g, or t
acaggctaggtacgaggctggtgtcngcacatggtgttcaggcgcttcgtggaggttggccgggtggcctatgtctcctttggacctcatgccggaaaattggtcgcgattgtagatgttattgatcagaacagggctttggtcgatggaccttgcactcaagtgaggagacaggccatgcctttcaagtgcatgcagctcactgatttcatcctcaagtttccgcacagtgcccacccgggtgtcccgccgcctctgctc

SEQ ID NO: 77111 - DNA, 750 bp, Homo sapiens
  misc_feature (479)..(479): n is a, c, g, or t
  misc_feature (488)..(488): n is a, c, g, or t
  misc_feature (491)..(491): n is a, c, g, or t
  misc_feature (500)..(500): n is a, c, g, or t
  misc_feature (503)..(503): n is a, c, g, or t
cggacgcgtgggtccggacgcgtgggtgttcaggcgcttcgtggaggttggccgggtggcctatgtctcctttggacctcatgccggaaaattggtcgcgattgtagatgttattgatcagaacagggctttggtcgatggaccttgcactcaagtgaggagacaggccatgcctttcaagtgcatgcagctcactgatttcatcctcaagtttccgcacagtgcccaccagaagtatgtccgacaagcctggcagaaggcagacatcaatacaaaatgggcagccacacgatgggccaagaagattgaagccagagaaaggaaagccaagatgacagattttgatcgttttaaagttatgaaggcaaagaaaatgaggaacagaataatcaagaatgaagttaagaagcttcaaaaggcagctctcctgaaagcttctcccaaaaaagcacctggtactaagggtactgctctgctgntgctgctgntgntgctgctgntgntgctggctgctgctgctgctgctgctgctgctgctgctaaagttccagcaaaaaagatcaccgccgcgagtaaaaaggctccagcccagaaggttcctgcccagaaagccacaggccagaaagcagcgcctgctccaaaagctcagaagggtcaaaaagctccagcccagaaagcacctgctccaaaggcatctggcaagaaagcataagtggcaatcataaaaagtaataaaggttctttttgacc

SEQ ID NO: 77112 - DNA, 1008 bp, Homo sapiens
gctcgaccagaattctaactaggatcttcaagatcaactctccccaggtcagtgcatggagcagaaagagaagggaaagggatagaatgtcttcatgactttaatcctagtatttgaaaaaaaataatcaaaccttgcacctacaaatttctgtcttgatccagaaagtcattagcataaaaaagataatagtgggcttctcgcctaacgccgccaacatggtgttcaggcgcttcgtggaggttggccgggtggcctatgtctcctttggacctcatgccggaaaattggtcgcgattgtagatgttattgatcagaacagggctttggtcgatggaccttgcactcaagtgaggagacaggccatgcctttcaagtgcatgcagctcactgatttcatcctcaagtttccgcacagtgcccaccagaagtatgtccgacaagcctggcagaaggcagacatcaatacaaaatgggcagccacacgatgggccaagaagattgaagccagagaaaggaaagccaagatgacagattttgatcgttttaaagttatgaaggcaaagaaaatgaggaacagaataatcaagaatgaagttaagaagcttcaaaaggcagctctcctgaaagcttctcccaaaaaagcacctggtactaagggtactgctgctgctgctgctgctgctgctgctgctgctgctaaagttccagcaaaaaagatcaccgccgcgagtaaaaaggctccagcccagaaggttcctgcccagaaagccacaggccagaaagcagcgcctgctccaaaagctcagaagggtcaaaaagctccagcccagaaagcacctgctccaaaggcatctggcaagaaagcataagtggcaatcataaaaagtaataaaggttctttttgacctgttgacaaatgtatttaagcctttggatttaaagcctgttgaggctagagttaggaggcagattgatagtaggattataataaacattaaataatca

SEQ ID NO: 77113 - DNA, 1101 bp, Homo sapiens
gctcgaccagaattctaactaggatcttcaagatcaactctccccaggtcagtgcatggagcagaaagagaagggaaagggatagaatgtcttcatgactttaatcctagtatttgaaaaaaaataatcaaaccttgcacctacaaatttctgtcttgatccagaaagtcattagcataaaaaagataatagtgggcttctcgcctaacgccgccaacatggtgttcaggcgcttcgtggaggttggccgggtggcctatgtctcctttggacctcatgccggaaaattggtcgcgattgtagatgttattgatcagaacagggctttggtcgatggaccttgcactcaagtgaggagacaggccatgcctttcaagtgcatgcagctcactgatttcatcctcaagtttccgcacagtgcccaccagaagtatgtccgacaagcctggcagaaggcagacatcaatacaaaatgggcagccacacgatgggccaagaagattgaagccagagaaaggaaagccaagatgacagattttgatcgttttaaagttatgaaggcaaagaaaatgaggaacagaataatcaagaatgaagttaagaagcttcaaaaggcagctctcctgaaagcttctcccaaaaaagcacctggtactaagggtactgctgctgctgctgctgctgctgctgctgctgctgctaaagttccagcaaaaaagatcaccgccgcgagtaaaaaggctccagcccagaaggttcctgcccagaaagccacaggccagaaagcagcgcctgctccaaaagctcagaagggtcaaaaagctccagcccagaaagcacctgctccaaaggcatctggcaagaaagcataagtggcaatcataaaaagtaataaaggttctttttgacctgttgacaaatgtatttaagcctttggatttaaagcctgttgaggctagagttaggaggcagattgatagtaggattataataaacattaaataatcaaaaaaaaaaaaaagaaacaaagggggggggaataaagagtactcggaggggccaattaagggcaaacacaatatagtgagaaagggggcacta

SEQ ID NO: 77114 - DNA, 832 bp, Homo sapiens
ggtcactctacagaatccccttactttcgtccagctgccaacatggtgttcaggcgcttcgtggaggttggccgggtggcctatgtctcctttggacctcatgccggaaaattggtcgcgattgtagatgttattgatcagaacagggctttggtcgatggaccttgcactcaagtgaggagacaggccatgcctttcaagtgcatgcagctcactgatttcatcctcaagtttccgcacagtgcccaccagaagtatgtccgacaagcctggcagaaggcagacatcaatacaaaatgggcagccacacgatgggccaagaagattgaagccagagaaaggaaagccaagatgacagattttgatcgttttaaagttatgaaggcaaagaaaatgaggaacagaataatcaagaatgaagttaagaagcttcaaaaggcagctctcctgaaagcttctcccaaaaaagcacctggtactaagggtactgctgctgctgctgctgctgctgctgctgctgctgctaaagttccagcaaaaaagatcaccgccgcgagtaaaaaggctccagcccagaaggttcctgcccagaaagccacaggccagaaagcagcgcctgctccaaaagctcagaagggtcaaaaagctccagcccagaaagcacctgctccaaaggcatctggcaagaaagcataagtggcaatcataaaaagtaataaaggttctttttgacctgttgacaaatgtatttaagcctttggatttaaagcctgttgaggctagagttaggaggcagattgatagtaggattataataaacattaaataatca

SEQ ID NO: 77115 - DNA, 1045 bp, Homo sapiens
gctcgaccagaattctaactaggatcttcaagatcaactctccccaggtcagtgcatggagcagaaagagaagggaaagggatagaatgtcttcatgactttaatcctagtatttgaaaaaaaataatcaaaccttgcacctacaaatttctgtcttgatccagaaagtcattagcataaaaaagataatagtgggcttctcgcctaacgccgccaacatggtgttcaggcgcttcgtggaggttggccgggtggcctatgtctcctttggacctcatgccggaaaattggtcgcgattgtagatgttattgatcagaacagggctttggtcgatggaccttgcactcaagtgaggagacaggccatgcctttcaagtgcatgcagctcactgatttcatcctcaagtttccgcacagtgcccaccagaagtatgtccgacaagcctggcagaaggcagacatcaatacaaaatgggcagccacacgatgggccaagaagattgaagccagagaaaggaaagccaagatgacagattttgatcgttttaaagttatgaaggcaaagaaaatgaggaacagaataatcaagaatgaagttaagaagcttcaaaaggcagctctcctgaaagcttctcccaaaaaagcacctggtactaagggtactgctgctgctgctgctgctgctgctgctgctgctgctaaagttccagcaaaaaagatcaccgccgcgagtaaaaaggctccagcccagaaggttcctgcccagaaagccacaggccagaaagcagcgcctgctccaaaagctcagaagggtcaaaaagctccagcccagaaagcacctgctccaaaggcatctggcaagaaagcataagtggcaatcataaaaagtaataaaggttctttttgacctgttgacaaatgtatttaagcctttggatttaaagcctgttgaggctagagttaggaggcagattgatagtaggattataataaacattaaataatcacaacactaattcccacccttatacgcccttacccgct

SEQ ID NO: 77116 - DNA, 823 bp, Homo sapiens
aaagcttaaggctaggtacgaggctgggtgttgatggtgttcaggcgcttcgtggaggttggccgggtggcctatgtctcctttggacctcatgccggaaaattggtcgcgattgtagatgttattgatcagaacagggctttggtcgatggaccttgcactcaagtgaggagacaggccatgcctttcaagtgcatgcagctcactgatttcatcctcaagtttccgcacagtgcccaccagaagtatgtccgacaagcctggcagaaggcagacatcaatacaaaatgggcagccacacgatgggccaagaagattgaagccagagaaaggaaagccaagatgacagattttgatcgttttaaagttatgaaggcaaagaaaatgaggaacagaataatcaagaatgaagttaagaagcttcaaaaggcagctctcctgaaagcttctcccaaaaaagcacctggtactaagggtactgctgctgctgctgctgctgctgctgctgctgctgctaaagttccagcaaaaaagatcaccgccgcgagtaaaaaggctccagcccagaaggttcctgcccagaaagccacaggccagaaagcagcgcctgctccaaaagctcagaagggtcaaaaagctccagcccagaaagcacctgctccaaaggcatctggcaagaaagcataagtggcaatcataaaaagtaataaaggttctttttgacctgttgacaaatgtatttaagcctttggatttaaagcctgttgaggctagagttaggaggcagattgatagtaggattataataaacattaaataatca

SEQ ID NO: 77117 - DNA, 822 bp, Homo sapiens
gcccagtttgagcctgactctagaggatcccccaggtgttcaggcgcttcgtggaggttggccgggtggcctatgtctcctttggacctcatgccggaaaattggtcgcgattgtagatgttattgatcagaacagggctttggtcgatggaccttgcactcaagtgaggagacaggccatgcctttcaagtgcatgcagctcactgatttcatcctcaagtttccgcacagtgcccaccagaagtatgtccgacaagcctggcagaaggcagacatcaatacaaaatgggcagccacacgatgggccaagaagattgaagccagagaaaggaaagccaagatgacagattttgatcgttttaaagttatgaaggcaaagaaaatgaggaacagaataatcaagaatgaagttaagaagcttcaaaaggcagctctcctgaaagcttctcccaaaaaagcacctggtactaagggtactgctgctgctgctgctgctgctgctgctgctgctgctaaagttccagcaaaaaagatcaccgccgcgagtaaaaaggctccagcccagaaggttcctgcccagaaagccacaggccagaaagcagcgcctgctccaaaagctcagaagggtcaaaaagctccagcccagaaagcacctgctccaaaggcatctggcaagaaagcataagtggcaatcataaaaagtaataaaggttctttttgacctgttgacaaatgtatttaagcctttggatttaaagcctgttgaggctagagttaggaggcagattgatagtaggattataataaacattaaataatca

SEQ ID NO: 77118 - DNA, 1039 bp, Homo sapiens
gggggcgagaaaacaaatctacggctaggtgcgaggctgggtggtgcgccgctggcgagcgcgtggagggcccggcaggcctggcgcgccttgggccacgcgtgcgcgcctccgccgctggagctggatggctgatgcggctcgtggtccgagagccttgtcctgccgtgtgggccttgcggacctgggagctggtgggcgttgggaaccgggcttaagctactgaggcgtttgctgatttcgtccatccaggtgttcaggcgcttcgtggaggttggccgggtggcctatgtctcctttggacctcatgccggaaaattggtcgcgattgtagatgttattgatcagaacagggctttggtcgatggaccttgcactcaagtgaggagacaggccatgcctttcaagtgcatgcagctcactgatttcatcctcaagtttccgcacagtgcccaccagaagtatgtccgacaagcctggcagaaggcagacatcaatacaaaatgggcagccacacgatgggccaagaagattgaagccagagaaaggaaagccaagatgacagattttgatcgttttaaagttatgaaggcaaagaaaatgaggaacagaataatcaagaatgaagttaagaagcttcaaaaggcagctctcctgaaagcttctcccaaaaaagcacctggtactaagggtactgctgctgctgctgctgctgctgctgctgctgctgctaaagttccagcaaaaaagatcaccgccgcgagtaaaaaggctccagcccagaaggttcctgcccagaaagccacaggccagaaagcagcgcctgctccaaaagctcagaagggtcaaaaagctccagcccagaaagcacctgctccaaaggcatctggcaagaaagcataagtggcaatcataaaaagtaataaaggttctttttgacctgttgacaaatgtatttaagcctttggatttaaagcctgttgaggctagagttaggaggcagattgatagtaggattataataaacattaaataatca

SEQ ID NO: 77119 - DNA, 820 bp, Homo sapiens
ggaacgaggggaagacggtgaactaagagcggagtgttcaggcgcttcgtggaggttggccgggtggcctatgtctcctttggacctcatgccggaaaattggtcgcgattgtagatgttattgatcagaacagggctttggtcgatggaccttgcactcaagtgaggagacaggccatgcctttcaagtgcatgcagctcactgatttcatcctcaagtttccgcacagtgcccaccagaagtatgtccgacaagcctggcagaaggcagacatcaatacaaaatgggcagccacacgatgggccaagaagattgaagccagagaaaggaaagccaagatgacagattttgatcgttttaaagttatgaaggcaaagaaaatgaggaacagaataatcaagaatgaagttaagaagcttcaaaaggcagctctcctgaaagcttctcccaaaaaagcacctggtactaagggtactgctgctgctgctgctgctgctgctgctgctgctgctaaagttccagcaaaaaagatcaccgccgcgagtaaaaaggctccagcccagaaggttcctgcccagaaagccacaggccagaaagcagcgcctgctccaaaagctcagaagggtcaaaaagctccagcccagaaagcacctgctccaaaggcatctggcaagaaagcataagtggcaatcataaaaagtaataaaggttctttttgacctgttgacaaatgtatttaagcctttggatttaaagcctgttgaggctagagttaggaggcagattgatagtaggattataataaacattaaataatca

SEQ ID NO: 77120 - DNA, 968 bp, Homo sapiens
  misc_feature (53)..(53): n is a, c, g, or t
  misc_feature (58)..(58): n is a, c, g, or t
  misc_feature (78)..(78): n is a, c, g, or t
  misc_feature (116)..(116): n is a, c, g, or t
  misc_feature (120)..(120): n is a, c, g, or t
  misc_feature (136)..(136): n is a, c, g, or t
  misc_feature (160)..(160): n is a, c, g, or t
  misc_feature (169)..(169): n is a, c, g, or t
cattctatttccccctctattgatccccacctccaaatatctcatcaacaacngactnatcaccacccaacaatgacnaatcaaactaacctcaaaacaaatgatagccatacacnacantaaaggacgaacctgntctcttatactagtatccttaatnatttttatngccacaactaacgtgttcaggcgcttcgtggaggttggccgggtggcctatgtctcctttggacctcatgccggaaaattggtcgcgattgtagatgttattgatcagaacagggctttggtcgatggaccttgcactcaagtgaggagacaggccatgcctttcaagtgcatgcagctcactgatttcatcctcaagtttccgcacagtgcccaccagaagtatgtccgacaagcctggcagaaggcagacatcaatacaaaatgggcagccacacgatgggccaagaagattgaagccagagaaaggaaagccaagatgacagattttgatcgttttaaagttatgaaggcaaagaaaatgaggaacagaataatcaagaatgaagttaagaagcttcaaaaggcagctctcctgaaagcttctcccaaaaaagcacctggtactaagggtactgctgctgctgctgctgctgctgctgctgctgctgctaaagttccagcaaaaaagatcaccgccgcgagtaaaaaggctccagcccagaaggttcctgcccagaaagccacaggccagaaagcagcgcctgctccaaaagctcagaagggtcaaaaagctccagcccagaaagcacctgctccaaaggcatctggcaagaaagcataagtggcaatcataaaaagtaataaaggttctttttgacctgttgacaaatgtatttaagcctttggatttaaagcctgttgaggctagagttaggaggcagattgatagtaggattataataaacattaaataatca

SEQ ID NO: 77121 - DNA, 823 bp, Homo sapiens
ccgcctactactactaaattcgcggccgcgtcgaccgtgttcaggcgcttcgtggaggttggccgggtggcctatgtctcctttggacctcatgccggaaaattggtcgcgattgtagatgttattgatcagaacagggctttggtcgatggaccttgcactcaagtgaggagacaggccatgcctttcaagtgcatgcagctcactgatttcatcctcaagtttccgcacagtgcccaccagaagtatgtccgacaagcctggcagaaggcagacatcaatacaaaatgggcagccacacgatgggccaagaagattgaagccagagaaaggaaagccaagatgacagattttgatcgttttaaagttatgaaggcaaagaaaatgaggaacagaataatcaagaatgaagttaagaagcttcaaaaggcagctctcctgaaagcttctcccaaaaaagcacctggtactaagggtactgctgctgctgctgctgctgctgctgctgctgctgctaaagttccagcaaaaaagatcaccgccgcgagtaaaaaggctccagcccagaaggttcctgcccagaaagccacaggccagaaagcagcgcctgctccaaaagctcagaagggtcaaaaagctccagcccagaaagcacctgctccaaaggcatctggcaagaaagcataagtggcaatcataaaaagtaataaaggttctttttgacctgttgacaaatgtatttaagcctttggatttaaagcctgttgaggctagagttaggaggcagattgatagtaggattataataaacattaaataatca

SEQ ID NO: 77122 - DNA, 825 bp, Homo sapiens
ccttagctagtaggaggcgggtgtgaatcggccgaggggtgttcaggcgcttcgtggaggttggccgggtggcctatgtctcctttggacctcatgccggaaaattggtcgcgattgtagatgttattgatcagaacagggctttggtcgatggaccttgcactcaagtgaggagacaggccatgcctttcaagtgcatgcagctcactgatttcatcctcaagtttccgcacagtgcccaccagaagtatgtccgacaagcctggcagaaggcagacatcaatacaaaatgggcagccacacgatgggccaagaagattgaagccagagaaaggaaagccaagatgacagattttgatcgttttaaagttatgaaggcaaagaaaatgaggaacagaataatcaagaatgaagttaagaagcttcaaaaggcagctctcctgaaagcttctcccaaaaaagcacctggtactaagggtactgctgctgctgctgctgctgctgctgctgctgctgctaaagttccagcaaaaaagatcaccgccgcgagtaaaaaggctccagcccagaaggttcctgcccagaaagccacaggccagaaagcagcgcctgctccaaaagctcagaagggtcaaaaagctccagcccagaaagcacctgctccaaaggcatctggcaagaaagcataagtggcaatcataaaaagtaataaaggttctttttgacctgttgacaaatgtatttaagcctttggatttaaagcctgttgaggctagagttaggaggcagattgatagtaggattataataaacattaaataatca

SEQ ID NO: 77123 - DNA, 830 bp, Homo sapiens
  misc_feature (31)..(31): n is a, c, g, or t
cgggagacctaaaccagggaaggggggcccntttggcaacatggtgttcaggcgcttcgtggaggttggccgggtggcctatgtctcctttggacctcatgccggaaaattggtcgcgattgtagatgttattgatcagaacagggctttggtcgatggaccttgcactcaagtgaggagacaggccatgcctttcaagtgcatgcagctcactgatttcatcctcaagtttccgcacagtgcccaccagaagtatgtccgacaagcctggcagaaggcagacatcaatacaaaatgggcagccacacgatgggccaagaagattgaagccagagaaaggaaagccaagatgacagattttgatcgttttaaagttatgaaggcaaagaaaatgaggaacagaataatcaagaatgaagttaagaagcttcaaaaggcagctctcctgaaagcttctcccaaaaaagcacctggtactaagggtactgctgctgctgctgctgctgctgctgctgctgctgctaaagttccagcaaaaaagatcaccgccgcgagtaaaaaggctccagcccagaaggttcctgcccagaaagccacaggccagaaagcagcgcctgctccaaaagctcagaagggtcaaaaagctccagcccagaaagcacctgctccaaaggcatctggcaagaaagcataagtggcaatcataaaaagtaataaaggttctttttgacctgttgacaaatgtatttaagcctttggatttaaagcctgttgaggctagagttaggaggcagattgatagtaggattataataaacattaaataatca

SEQ ID NO: 77124 - DNA, 942 bp, Homo sapiens
caggctcggtaggtttgtcgcctctacctataaatcttcccactattttgcaacatagacgggtgtgctcttttagctgttcttaggtagctcgtctggtttcgggggtcttagctttggctctccttgcaaagttatttctagttaattcattagtgttcaggcgcttcgtggaggttggccgggtggcctatgtctcctttggacctcatgccggaaaattggtcgcgattgtagatgttattgatcagaacagggctttggtcgatggaccttgcactcaagtgaggagacaggccatgcctttcaagtgcatgcagctcactgatttcatcctcaagtttccgcacagtgcccaccagaagtatgtccgacaagcctggcagaaggcagacatcaatacaaaatgggcagccacacgatgggccaagaagattgaagccagagaaaggaaagccaagatgacagattttgatcgttttaaagttatgaaggcaaagaaaatgaggaacagaataatcaagaatgaagttaagaagcttcaaaaggcagctctcctgaaagcttctcccaaaaaagcacctggtactaagggtactgctgctgctgctgctgctgctgctgctgctgctgctaaagttccagcaaaaaagatcaccgccgcgagtaaaaaggctccagcccagaaggttcctgcccagaaagccacaggccagaaagcagcgcctgctccaaaagctcagaagggtcaaaaagctccagcccagaaagcacctgctccaaaggcatctggcaagaaagcataagtggcaatcataaaaagtaataaaggttctttttgacctgttgacaaatgtatttaagcctttggatttaaagcctgttgaggctagagttaggaggcagattgatagtaggattataataaacattaaataatca

SEQ ID NO: 77125 - DNA, 1388 bp, Homo sapiens
  misc_feature (933)..(933): n is a, c, g, or t
gctcgaccagaattctaactaggatcttcaagatcaactctccccaggtcagtgcatggagcagaaagagaagggaaagggatagaatgtcttcatgactttaatcctagtatttgaaaaaaaataatcaaaccttgcacctacaaatttctgtcttgatccagaaagtcattagcataaaaaagataatagtgggcttctcgcctaacgccgccaacatggtgttcaggcgcttcgtggaggttggccgggtggcctatgtctcctttggacctcatgccggaaaattggtcgcgattgtagatgttattgatcagaacagggctttggtcgatggaccttgcactcaagtgaggagacaggccatgcctttcaagtgcatgcagctcactgatttcatcctcaagtttccgcacagtgcccaccagaagtatgtccgacaagcctggcagaaggcagacatcaatacaaaatgggcagccacacgatgggccaagaagattgaagccagagaaaggaaagccaagatgacagattttgatcgttttaaagttatgaaggcaaagaaaatgaggaacagaataatcaagaatgaagttaagaagcttcaaaaggcagctctcctgaaagcttctcccaaaaaagcacctggtactaagggtactgctgctgctgctgctgctgctgctgctgctgctgctaaagttccagcaaaaaagatcaccgccgcgagtaaaaaggctccagcccagaaggttcctgcccagaaagccacaggccagaaagcagcgcctgctccaaaagctcagaagggtcaaaaagctccagcccagaaagcacctgctccaaaggcatctggcaagaaagcataagtggcaatcataaaaagtaataaaggttctttttgaccaaaaaaaaaaaaaaaaaaaaaanaaaaaaaagaaaaaaaaaaacaaaaacaaaaaaaaaaaaaaaaacaacagccaaccacacaaacagacacacaccacaccaacgccaaccagacataaccaacacacagaccacaaacaaaacacaccacccaccaacgacacgacaccacaagaaacacgacacccaacaaacactagagatcgccgcactcacaccacccacaaccacaccataacagacaagaaaccagaaccataataacaaacaacactagacagtggagcaaaacagcatacaccacacgagcaacacaaagaagcaaaaaagaaagaagacaacgacacgaccccacaccaacccacgccgccggcagcacaacacaacccaaaacaaaccgaactagcacaaaacaaaacataggacgatgagagagagcacacacccagcacacacaacccaccacgacaccaaaa

SEQ ID NO: 77126 - DNA, 951 bp, Homo sapiens
  misc_feature (922)..(922): n is a, c, g, or t
  misc_feature (939)..(939): n is a, c, g, or t
  misc_feature (941)..(942): n is a, c, g, or t
gctcgaccagaattctaactaggatcttcaagatcaactctccccaggtcagtgcatggagcagaaagagaagggaaagggatagaatgtcttcatgactttaatcctagtatttgaaaaaaaataatcaaaccttgcacctacaaatttctgtcttgatccagaaagtcattagcataaaaaagataatagtgggcttctcgcctaacgccgccaacatggtgttcaggcgcttcgtggaggttggccgggtggcctatgtctcctttggacctcatgccggaaaattggtcgcgattgtagatgttattgatcagaacagggctttggtcgatggaccttgcactcaagtgaggagacaggccatgcctttcaagtgcatgcagctcactgatttcatcctcaagtttccgcacagtgcccaccagaagtatgtccgacaagcctggcagaaggcagacatcaatacaaaatgggcagccacacgatgggccaagaagattgaagccagagaaaggaaagccaagatgacagattttgatcgttttaaagttatgaaggcaaagaaaatgaggaacagaataatcaagaatgaagttaagaagcttcaaaaggcagctctcctgaaagcttctcccaaaaaagcacctggtactaagggtactgctgctgctgctgctgctgctgctgctgctgctgctaaagttccagcaaaaaagatcaccgccgcgagtaaaaaggctccagcccagaaggttcctgcccagaaagccacaggccagaaagcagcgcctgctccaaaagctcagaagggtcaaaaagctccagcccagaaagcacctgctccaaaggcatctggcaagaaagcataagtggcaatcataaaaagtaataaaggttctttttgaccaaacacaacaancacacaacaaaaaacanannaaaacaaaa

SEQ ID NO: 77127 - DNA, 1045 bp, Homo sapiens
  misc_feature (964)..(964): n is a, c, g, or t
  misc_feature (967)..(967): n is a, c, g, or t
  misc_feature (977)..(980): n is a, c, g, or t
  misc_feature (989)..(989): n is a, c, g, or t
  misc_feature (992)..(992): n is a, c, g, or t
  misc_feature (999)..(1000): n is a, c, g, or t
  misc_feature (1002)..(1003): n is a, c, g, or t
  misc_feature (1010)..(1011): n is a, c, g, or t
  misc_feature (1014)..(1014): n is a, c, g, or t
  misc_feature (1030)..(1030): n is a, c, g, or t
  misc_feature (1038)..(1038): n is a, c, g, or t
gctcgaccagaattctaactaggatcttcaagatcaactctccccaggtcagtgcatggagcagaaagagaagggaaagggatagaatgtcttcatgactttaatcctagtatttgaaaaaaaataatcaaaccttgcacctacaaatttctgtcttgatccagaaagtcattagcataaaaaagataatagtgggcttctcgcctaacgccgccaacatggtgttcaggcgcttcgtggaggttggccgggtggcctatgtctcctttggacctcatgccggaaaattggtcgcgattgtagatgttattgatcagaacagggctttggtcgatggaccttgcactcaagtgaggagacaggccatgcctttcaagtgcatgcagctcactgatttcatcctcaagtttccgcacagtgcccaccagaagtatgtccgacaagcctggcagaaggcagacatcaatacaaaatgggcagccacacgatgggccaagaagattgaagccagagaaaggaaagccaagatgacagattttgatcgttttaaagttatgaaggcaaagaaaatgaggaacagaataatcaagaatgaagttaagaagcttcaaaaggcagctctcctgaaagcttctcccaaaaaagcacctggtactaagggtactgctgctgctgctgctgctgctgctgctgctgctgctaaagttccagcaaaaaagatcaccgccgcgagtaaaaaggctccagcccagaaggttcctgcccagaaagccacaggccagaaagcagcgcctgctccaaaagctcagaagggtcaaaaagctccagcccagaaagcacctgctccaaaggcatctggcaagaaagcataagtggcaatcataaaaagtaataaaggttctttttgaccaaaaacgaataaaaaaaaatcgggggtttttttgggggggggaaaaagggtttnaangggctgggtnnnnttttccggnccntttttgnnannggggaannggnggccccaagggggggntaatgaanccggtat

SEQ ID NO: 77128 - DNA, 1112 bp, Homo sapiens
gctcgaccagaattctaactaggatcttcaagatcaactctccccaggtcagtgcatggagcagaaagagaagggaaagggatagaatgtcttcatgactttaatcctagtatttgaaaaaaaataatcaaaccttgcacctacaaatttctgtcttgatccagaaagtcattagcataaaaaagataatagtgggcttctcgcctaacgccgccaacatggtgttcaggcgcttcgtggaggttggccgggtggcctatgtctcctttggacctcatgccggaaaattggtcgcgattgtagatgttattgatcagaacagggctttggtcgatggaccttgcactcaagtgaggagacaggccatgcctttcaagtgcatgcagctcactgatttcatcctcaagtttccgcacagtgcccaccagaagtatgtccgacaagcctggcagaaggcagacatcaatacaaaatgggcagccacacgatgggccaagaagattgaagccagagaaaggaaagccaagatgacagattttgatcgttttaaagttatgaaggcaaagaaaatgaggaacagaataatcaagaatgaagttaagaagcttcaaaaggcagctctcctgaaagcttctcccaaaaaagcacctggtactaagggtactgctgctgctgctgctgctgctgctgctgctgctgctaaagttccagcaaaaaagatcaccgccgcgagtaaaaaggctccagcccagaaggttcctgcccagaaagccacaggccagaaagcagcgcctgctccaaaagctcagaagggtcaaaaagctccagcccagaaagcacctgctccaaaggcatctggcaagaaagcataagtggcaatcataaaaagtaataaaggttctttttgacccaaacaaaaaaaaaaggggggggtaaaatatcctcgggggcaagttacgcgtaccagtttttgtaaaagggccctatgggggtgaataagaaggagggcggtaaacacgtggatgaacggctgtggatttggaaggcctcttgggtggattggcatcacagtaagttggaataattgtaggtaagttcggggtgtgtattaa

SEQ ID NO: 77129 - DNA, 1049 bp, Homo sapiens
gctcgaccagaattctaactaggatcttcaagatcaactctccccaggtcagtgcatggagcagaaagagaagggaaagggatagaatgtcttcatgactttaatcctagtatttgaaaaaaaataatcaaaccttgcacctacaaatttctgtcttgatccagaaagtcattagcataaaaaagataatagtgggcttctcgcctaacgccgccaacatggtgttcaggcgcttcgtggaggttggccgggtggcctatgtctcctttggacctcatgccggaaaattggtcgcgattgtagatgttattgatcagaacagggctttggtcgatggaccttgcactcaagtgaggagacaggccatgcctttcaagtgcatgcagctcactgatttcatcctcaagtttccgcacagtgcccaccagaagtatgtccgacaagcctggcagaaggcagacatcaatacaaaatgggcagccacacgatgggccaagaagattgaagccagagaaaggaaagccaagatgacagattttgatcgttttaaagttatgaaggcaaagaaaatgaggaacagaataatcaagaatgaagttaagaagcttcaaaaggcagctctcctgaaagcttctcccaaaaaagcacctggtactaagggtactgctgctgctgctgctgctgctgctgctgctgctgctaaagttccagcaaaaaagatcaccgccgcgagtaaaaaggctccagcccagaaggttcctgcccagaaagccacaggccagaaagcagcgcctgctccaaaagctcagaagggtcaaaaagctccagcccagaaagcacctgctccaaaggcatctggcaagaaagcataagtggcaatcataaaaagtaataaaggttctttttgaccaaacaacaaaagccacgctcctaacacaacaacggggggggggcaaagtctccgggggggcctttcgtcccctctttgaaaaggggctcaaggggctataaagagcgggggtaaacgcgcggggcacccgtgggggttg

SEQ ID NO: 77130 - DNA, 1056 bp, Homo sapiens
  misc_feature (912)..(913): n is a, c, g, or t
  misc_feature (917)..(917): n is a, c, g, or t
gctcgaccagaattctaactaggatcttcaagatcaactctccccaggtcagtgcatggagcagaaagagaagggaaagggatagaatgtcttcatgactttaatcctagtatttgaaaaaaaataatcaaaccttgcacctacaaatttctgtcttgatccagaaagtcattagcataaaaaagataatagtgggcttctcgcctaacgccgccaacatggtgttcaggcgcttcgtggaggttggccgggtggcctatgtctcctttggacctcatgccggaaaattggtcgcgattgtagatgttattgatcagaacagggctttggtcgatggaccttgcactcaagtgaggagacaggccatgcctttcaagtgcatgcagctcactgatttcatcctcaagtttccgcacagtgcccaccagaagtatgtccgacaagcctggcagaaggcagacatcaatacaaaatgggcagccacacgatgggccaagaagattgaagccagagaaaggaaagccaagatgacagattttgatcgttttaaagttatgaaggcaaagaaaatgaggaacagaataatcaagaatgaagttaagaagcttcaaaaggcagctctcctgaaagcttctcccaaaaaagcacctggtactaagggtactgctgctgctgctgctgctgctgctgctgctgctgctaaagttccagcaaaaaagatcaccgccgcgagtaaaaaggctccagcccagaaggttcctgcccagaaagccacaggccagaaagcagcgcctgctccaaaagctcagaagggtcaaaaagctccagcccagaaagcacctgctccaaaggcatctggcaagaaagcataagtggcaatcataaaaagtaataaaggttctttttgaccgnncttntgaccggttcaaaccaaaacacccacaacagcaaaacagaccacaacacgcaaccaagaacacagaaacaaagacacccggggggggggccaacccagagaggagacagggggacaaagagaggaagacgggcacccgg

SEQ ID NO: 77131 - DNA, 997 bp, Homo sapiens
gctcgaccagaattctaactaggatcttcaagatcaactctccccaggtcagtgcatggagcagaaagagaagggaaagggatagaatgtcttcatgactttaatcctagtatttgaaaaaaaataatcaaaccttgcacctacaaatttctgtcttgatccagaaagtcattagcataaaaaagataatagtgggcttctcgcctaacgccgccaacatggtgttcaggcgcttcgtggaggttggccgggtggcctatgtctcctttggacctcatgccggaaaattggtcgcgattgtagatgttattgatcagaacagggctttggtcgatggaccttgcactcaagtgaggagacaggccatgcctttcaagtgcatgcagctcactgatttcatcctcaagtttccgcacagtgcccaccagaagtatgtccgacaagcctggcagaaggcagacatcaatacaaaatgggcagccacacgatgggccaagaagattgaagccagagaaaggaaagccaagatgacagattttgatcgttttaaagttatgaaggcaaagaaaatgaggaacagaataatcaagaatgaagttaagaagcttcaaaaggcagctctcctgaaagcttctcccaaaaaagcacctggtactaagggtactgctgctgctgctgctgctgctgctgctgctgctgctaaagttccagcaaaaaagatcaccgccgcgagtaaaaaggctccagcccagaaggttcctgcccagaaagccacaggccagaaagcagcgcctgctccaaaagctcagaagggtcaaaaagctccagcccagaaagcacctgctccaaaggcatctggcaagaaagcataagtggcaatcataaaaagtaataaaggttctttttgaccacaaaaaaaaccgggcttttccgggaggaaaaggtttaaggccatgcctattttccgccccttttgcaaggaattcgccctagcgta

SEQ ID NO: 77132 - DNA, 1055 bp, Homo sapiens
gctcgaccagaattctaactaggatcttcaagatcaactctccccaggtcagtgcatggagcagaaagagaagggaaagggatagaatgtcttcatgactttaatcctagtatttgaaaaaaaataatcaaaccttgcacctacaaatttctgtcttgatccagaaagtcattagcataaaaaagataatagtgggcttctcgcctaacgccgccaacatggtgttcaggcgcttcgtggaggttggccgggtggcctatgtctcctttggacctcatgccggaaaattggtcgcgattgtagatgttattgatcagaacagggctttggtcgatggaccttgcactcaagtgaggagacaggccatgcctttcaagtgcatgcagctcactgatttcatcctcaagtttccgcacagtgcccaccagaagtatgtccgacaagcctggcagaaggcagacatcaatacaaaatgggcagccacacgatgggccaagaagattgaagccagagaaaggaaagccaagatgacagattttgatcgttttaaagttatgaaggcaaagaaaatgaggaacagaataatcaagaatgaagttaagaagcttcaaaaggcagctctcctgaaagcttctcccaaaaaagcacctggtactaagggtactgctgctgctgctgctgctgctgctgctgctgctgctaaagttccagcaaaaaagatcaccgccgcgagtaaaaaggctccagcccagaaggttcctgcccagaaagccacaggccagaaagcagcgcctgctccaaaagctcagaagggtcaaaaagctccagcccagaaagcacctgctccaaaggcatctggcaagaaagcataagtggcaatcataaaaagtaataaaggttctttttgacctgcccaccagaagtatgtccgacaagcctggcagaaggcagacatcaatacaaaatgggcagccacacgatgggccaagaagattgaagccagagaaaggaaagccaagatgacagattttgcttcctttctctgctagatcggt

SEQ ID NO: 77133 - DNA, 1452 bp, Homo sapiens
gctcgaccagaattctaactaggatcttcaagatcaactctccccaggtcagtgcatggagcagaaagagaagggaaagggatagaatgtcttcatgactttaatcctagtatttgaaaaaaaataatcaaaccttgcacctacaaatttctgtcttgatccagaaagtcattagcataaaaaagataatagtgggcttctcgcctaacgccgccaacatggtgttcaggcgcttcgtggaggttggccgggtggcctatgtctcctttggacctcatgccggaaaattggtcgcgattgtagatgttattgatcagaacagggctttggtcgatggaccttgcactcaagtgaggagacaggccatgcctttcaagtgcatgcagctcactgatttcatcctcaagtttccgcacagtgcccaccagaagtatgtccgacaagcctggcagaaggcagacatcaatacaaaatgggcagccacacgatgggccaagaagattgaagccagagaaaggaaagccaagatgacagattttgatcgttttaaagttatgaaggcaaagaaaatgaggaacagaataatcaagaatgaagttaagaagcttcaaaaggcagctctcctgaaagcttctcccaaaaaagcacctggtactaagggtactgctgctgctgctgctgctgctgctgctgctgctgctaaagttccagcaaaaaagatcaccgccgcgagtaaaaaggctccagcccagaaggttcctgcccagaaagccacaggccagaaagcagcgcctgctccaaaagctcagaagggtcaaaaagctccagcccagaaagcacctgctccaaaggcatctggcaagaaagcataagtggcaatcataaaaagtaataaaggttctttttgaccgcctatagggcatccatgtattaagggtccttttgccccggtaacgcaaagtttgcctgcgccccaatctggcctattggccaatctgcctataggggggatatacatttctgtggcgtgtttaaaccggcgcattggtccgtgggggacccatattaaccgcttggacaccacgcctttctcacgcgcccattcccgcaagggccccctgtggcctttgcacgatgtgctcccctctcgcccttacatcccccgcgcgcattctgtaccccggcgcatctgcttacgcgcgctttctacaccacgccccacggtcacacctttgactaccagacccacgctgcagcgccctctctcctctcacagagcctctctttccccgcggctccgtcactagtctacgctctgctctcgcgccctgccccgcgcctcccttcccttcatgtccactcacgcctctccgtcaccgctcctcccttgcctcctccacctccgtggccacactcttgctcgcgctcccgtcgctccgcgtgctccccgcc

SEQ ID NO: 77134 - DNA, 952 bp, Homo sapiens
gctcgaccagaattctaactaggatcttcaagatcaactctccccaggtcagtgcatggagcagaaagagaagggaaagggatagaatgtcttcatgactttaatcctagtatttgaaaaaaaataatcaaaccttgcacctacaaatttctgtcttgatccagaaagtcattagcataaaaaagataatagtgggcttctcgcctaacgccgccaacatggtgttcaggcgcttcgtggaggttggccgggtggcctatgtctcctttggacctcatgccggaaaattggtcgcgattgtagatgttattgatcagaacagggctttggtcgatggaccttgcactcaagtgaggagacaggccatgcctttcaagtgcatgcagctcactgatttcatcctcaagtttccgcacagtgcccaccagaagtatgtccgacaagcctggcagaaggcagacatcaatacaaaatgggcagccacacgatgggccaagaagattgaagccagagaaaggaaagccaagatgacagattttgatcgttttaaagttatgaaggcaaagaaaatgaggaacagaataatcaagaatgaagttaagaagcttcaaaaggcagctctcctgaaagcttctcccaaaaaagcacctggtactaagggtactgctgctgctgctgctgctgctgctgctgctgctgctaaagttccagcaaaaaagatcaccgccgcgagtaaaaaggctccagcccagaaggttcctgcccagaaagccacaggccagaaagcagcgcctgctccaaaagctcagaagggtcaaaaagctccagcccagaaagcacctgctccaaaggcatctggcaagaaagcataagtggcaatcataaaaagtaataaaggttctttttgaccaaaaaaaagtcgacgcggccgcaatttagtagtagtattccg

SEQ ID NO: 77135 - DNA, 981 bp, Homo sapiens
  misc_feature (914)..(914): n is a, c, g, or t
  misc_feature (976)..(976): n is a, c, g, or t
gctcgaccagaattctaactaggatcttcaagatcaactctccccaggtcagtgcatggagcagaaagagaagggaaagggatagaatgtcttcatgactttaatcctagtatttgaaaaaaaataatcaaaccttgcacctacaaatttctgtcttgatccagaaagtcattagcataaaaaagataatagtgggcttctcgcctaacgccgccaacatggtgttcaggcgcttcgtggaggttggccgggtggcctatgtctcctttggacctcatgccggaaaattggtcgcgattgtagatgttattgatcagaacagggctttggtcgatggaccttgcactcaagtgaggagacaggccatgcctttcaagtgcatgcagctcactgatttcatcctcaagtttccgcacagtgcccaccagaagtatgtccgacaagcctggcagaaggcagacatcaatacaaaatgggcagccacacgatgggccaagaagattgaagccagagaaaggaaagccaagatgacagattttgatcgttttaaagttatgaaggcaaagaaaatgaggaacagaataatcaagaatgaagttaagaagcttcaaaaggcagctctcctgaaagcttctcccaaaaaagcacctggtactaagggtactgctgctgctgctgctgctgctgctgctgctgctgctaaagttccagcaaaaaagatcaccgccgcgagtaaaaaggctccagcccagaaggttcctgcccagaaagccacaggccagaaagcagcgcctgctccaaaagctcagaagggtcaaaaagctccagcccagaaagcacctgctccaaaggcatctggcaagaaagcataagtggcaatcataaaaagtaataaaggttctttttgaccaaanaaaaaaaagaaaaaaaaaaacaaaaacctttggggggcgcccgggcccggaaaaagtttttnaaacc

SEQ ID NO: 77136 - DNA, 939 bp, Homo sapiens
  misc_feature (911)..(911): n is a, c, g, or t
gctcgaccagaattctaactaggatcttcaagatcaactctccccaggtcagtgcatggagcagaaagagaagggaaagggatagaatgtcttcatgactttaatcctagtatttgaaaaaaaataatcaaaccttgcacctacaaatttctgtcttgatccagaaagtcattagcataaaaaagataatagtgggcttctcgcctaacgccgccaacatggtgttcaggcgcttcgtggaggttggccgggtggcctatgtctcctttggacctcatgccggaaaattggtcgcgattgtagatgttattgatcagaacagggctttggtcgatggaccttgcactcaagtgaggagacaggccatgcctttcaagtgcatgcagctcactgatttcatcctcaagtttccgcacagtgcccaccagaagtatgtccgacaagcctggcagaaggcagacatcaatacaaaatgggcagccacacgatgggccaagaagattgaagccagagaaaggaaagccaagatgacagattttgatcgttttaaagttatgaaggcaaagaaaatgaggaacagaataatcaagaatgaagttaagaagcttcaaaaggcagctctcctgaaagcttctcccaaaaaagcacctggtactaagggtactgctgctgctgctgctgctgctgctgctgctgctgctaaagttccagcaaaaaagatcaccgccgcgagtaaaaaggctccagcccagaaggttcctgcccagaaagccacaggccagaaagcagcgcctgctccaaaagctcagaagggtcaaaaagctccagcccagaaagcacctgctccaaaggcatctggcaagaaagcataagtggcaatcataaaaagtaataaaggttctttttgaccnaaaaaaaaaatgagagaagtcgtatcga

SEQ ID NO: 77137 - DNA, 741 bp, Homo sapiens
gctggtagcgactctagaggatcccctggctgtacatgagtattgatcagaacagggctttggtcgatggaccttgcactcaagtgaggagacaggccatgcctttcaagtgcatgcagctcactgatttcatcctcaagtttccgcacagtgcccaccagaagtatgtccgacaagcctggcagaaggcagacatcaatacaaaatgggcagccacacgatgggccaagaagattgaagccagagaaaggaaagccaagatgacagattttgatcgttttaaagttatgaaggcaaagaaaatgaggaacagaataatcaagaatgaagttaagaagcttcaaaaggcagctctcctgaaagcttctcccaaaaaagcacctggtactaagggtactgctgctgctgctgctgctgctgctgctgctgctgctaaagttccagcaaaaaagatcaccgccgcgagtaaaaaggctccagcccagaaggttcctgcccagaaagccacaggccagaaagcagcgcctgctccaaaagctcagaagggtcaaaaagctccagcccagaaagcacctgctccaaaggcatctggcaagaaagcataagtggcaatcataaaaagtaataaaggttctttttgacctgttgacaaatgtatttaagcctttggatttaaagcctgttgaggctagagttaggaggcagattgatagtaggattataataaacattaaataatca

SEQ ID NO: 77138 - DNA, 751 bp, Homo sapiens
gctcagattatccccggatgtacatgagtattgatctggctgtacatgagtattgatcagaacagggctttggtcgatggaccttgcactcaagtgaggagacaggccatgcctttcaagtgcatgcagctcactgatttcatcctcaagtttccgcacagtgcccaccagaagtatgtccgacaagcctggcagaaggcagacatcaatacaaaatgggcagccacacgatgggccaagaagattgaagccagagaaaggaaagccaagatgacagattttgatcgttttaaagttatgaaggcaaagaaaatgaggaacagaataatcaagaatgaagttaagaagcttcaaaaggcagctctcctgaaagcttctcccaaaaaagcacctggtactaagggtactgctgctgctgctgctgctgctgctgctgctgctgctaaagttccagcaaaaaagatcaccgccgcgagtaaaaaggctccagcccagaaggttcctgcccagaaagccacaggccagaaagcagcgcctgctccaaaagctcagaagggtcaaaaagctccagcccagaaagcacctgctccaaaggcatctggcaagaaagcataagtggcaatcataaaaagtaataaaggttctttttgacctgttgacaaatgtatttaagcctttggatttaaagcctgttgaggctagagttaggaggcagattgatagtaggattataataaacattaaataatca

SEQ ID NO: 77139 - DNA, 712 bp, Homo sapiens
gtacccctcaacgctttatacttctgggctttggtcgatggaccttgcactcaagtgaggagacaggccatgcctttcaagtgcatgcagctcactgatttcatcctcaagtttccgcacagtgcccaccagaagtatgtccgacaagcctggcagaaggcagacatcaatacaaaatgggcagccacacgatgggccaagaagattgaagccagagaaaggaaagccaagatgacagattttgatcgttttaaagttatgaaggcaaagaaaatgaggaacagaataatcaagaatgaagttaagaagcttcaaaaggcagctctcctgaaagcttctcccaaaaaagcacctggtactaagggtactgctgctgctgctgctgctgctgctgctgctgctgctaaagttccagcaaaaaagatcaccgccgcgagtaaaaaggctccagcccagaaggttcctgcccagaaagccacaggccagaaagcagcgcctgctccaaaagctcagaagggtcaaaaagctccagcccagaaagcacctgctccaaaggcatctggcaagaaagcataagtggcaatcataaaaagtaataaaggttctttttgacctgttgacaaatgtatttaagcctttggatttaaagcctgttgaggctagagttaggaggcagattgatagtaggattataataaacattaaataatca

SEQ ID NO: 77140 - DNA, 750 bp, Homo sapiens
aggcagtgatcgactcggtacccatctcgtgaccggcgattatagatgttattgatcagaacagggctttggtcgatggaccttgcactcaagtgaggagacaggccatgcctttcaagtgcatgcagctcactgatttcatcctcaagtttccgcacagtgcccaccagaagtatgtccgacaagcctggcagaaggcagacatcaatacaaaatgggcagccacacgatgggccaagaagattgaagccagagaaaggaaagccaagatgacagattttgatcgttttaaagttatgaaggcaaagaaaatgaggaacagaataatcaagaatgaagttaagaagcttcaaaaggcagctctcctgaaagcttctcccaaaaaagcacctggtactaagggtactgctgctgctgctgctgctgctgctgctgctgctgctaaagttccagcaaaaaagatcaccgccgcgagtaaaaaggctccagcccagaaggttcctgcccagaaagccacaggccagaaagcagcgcctgctccaaaagctcagaagggtcaaaaagctccagcccagaaagcacctgctccaaaggcatctggcaagaaagcataagtggcaatcataaaaagtaataaaggttctttttgacctgttgacaaatgtatttaagcctttggatttaaagcctgttgaggctagagttaggaggcagattgatagtaggattataataaacattaaataatca

SEQ ID NO: 77141 - DNA, 961 bp, Homo sapiens
tacacctaatatttccttgtccccctccttttcgattgatgctgtaatattttctcggaatcctcttcactgcccaaagtttggcagatagaggcaactcccaggccagtgagctttacttgccgtgtaaaaggaggaaaggggtggaaaaaaaccgactttctgcatttaactacaaaaaaagttcatgtttagtttggtagaggtgttatgtataatcgccggtcacgagatatctcgtgaccggcgattatagatgttattgatcagaacagggctttggtcgatggaccttgcactcaagtgaggagacaggccatgcctttcaagtgcatgcagctcactgatttcatcctcaagtttccgcacagtgcccaccagaagtatgtccgacaagcctggcagaaggcagacatcaatacaaaatgggcagccacacgatgggccaagaagattgaagccagagaaaggaaagccaagatgacagattttgatcgttttaaagttatgaaggcaaagaaaatgaggaacagaataatcaagaatgaagttaagaagcttcaaaaggcagctctcctgaaagcttctcccaaaaaagcacctggtactaagggtactgctgctgctgctgctgctgctgctgctgctgctgctaaagttccagcaaaaaagatcaccgccgcgagtaaaaaggctccagcccagaaggttcctgcccagaaagccacaggccagaaagcagcgcctgctccaaaagctcagaagggtcaaaaagctccagcccagaaagcacctgctccaaaggcatctggcaagaaagcataagtggcaatcataaaaagtaataaaggttctttttgacctgttgacaaatgtatttaagcctttggatttaaagcctgttgaggctagagttaggaggcagattgatagtaggattataataaacattaaataatca

SEQ ID NO: 77142 - DNA, 730 bp, Homo sapiens
gctcggactcctgttgcatttactttcttgtactgtgtgctaagggctttggtcgatggaccttgcactcaagtgaggagacaggccatgcctttcaagtgcatgcagctcactgatttcatcctcaagtttccgcacagtgcccaccagaagtatgtccgacaagcctggcagaaggcagacatcaatacaaaatgggcagccacacgatgggccaagaagattgaagccagagaaaggaaagccaagatgacagattttgatcgttttaaagttatgaaggcaaagaaaatgaggaacagaataatcaagaatgaagttaagaagcttcaaaaggcagctctcctgaaagcttctcccaaaaaagcacctggtactaagggtactgctgctgctgctgctgctgctgctgctgctgctgctaaagttccagcaaaaaagatcaccgccgcgagtaaaaaggctccagcccagaaggttcctgcccagaaagccacaggccagaaagcagcgcctgctccaaaagctcagaagggtcaaaaagctccagcccagaaagcacctgctccaaaggcatctggcaagaaagcataagtggcaatcataaaaagtaataaaggttctttttgacctgttgacaaatgtatttaagcctttggatttaaagcctgttgaggctagagttaggaggcagattgatagtaggattataataaacattaaataatca

SEQ ID NO: 77143 - DNA, 723 bp, Homo sapiens
  misc_feature (34)..(35): n is a, c, g, or t
  misc_feature (37)..(37): n is a, c, g, or t
tgggccccgtgtttatcatgcagtattgatcagnncnggctttggtcgatggaccttgcactcaagtgaggagacaggccatgcctttcaagtgcatgcagctcactgatttcatcctcaagtttccgcacagtgcccaccagaagtatgtccgacaagcctggcagaaggcagacatcaatacaaaatgggcagccacacgatgggccaagaagattgaagccagagaaaggaaagccaagatgacagattttgatcgttttaaagttatgaaggcaaagaaaatgaggaacagaataatcaagaatgaagttaagaagcttcaaaaggcagctctcctgaaagcttctcccaaaaaagcacctggtactaagggtactgctgctgctgctgctgctgctgctgctgctgctgctaaagttccagcaaaaaagatcaccgccgcgagtaaaaaggctccagcccagaaggttcctgcccagaaagccacaggccagaaagcagcgcctgctccaaaagctcagaagggtcaaaaagctccagcccagaaagcacctgctccaaaggcatctggcaagaaagcataagtggcaatcataaaaagtaataaaggttctttttgacctgttgacaaatgtatttaagcctttggatttaaagcctgttgaggctagagttaggaggcagattgatagtaggattataataaacattaaataatca

SEQ ID NO: 77144 - DNA, 1058 bp, Homo sapiens
gggggcgagaaaacaaatctacggctaggtgcgaggctgggtggtgcgccgctggcgagcgcgtggagggcccggcaggcctggcgcgccttgggccacgcgtgcgcgcctccgccgctggagctggatggctgatgcggctcgtggtccgagagccttgtcctgccgtgtgggccttgcggacctgggagctggtgggcgttgggaaccgggcttaagctactgaggcgtttgctgatttcgtccatccaggtgttcaggcgcttcgtggaggttggccgggtggcctatgtctcctttggacctcatgccggaaaattggtcgcgattgtagatgttattgatcagaacagggctttggtcgatggaccttgcactcaagtgaggagacaggccatgcctttcaagtgcatgcagctcactgatttcatcctcaagtttccgcacagtgcccaccagaagtatgtccgacaagcctggcagaaggcagacatcaatacaaaatgggcagccacacgatgggccaagaagattgaagccagagaaaggaaagccaagatgacagattttgatcgttttaaagttatgaaggcaaagaaaatgaggaacagaataatcaagaatgaagttaagaagcttcaaaaggcagctctcctgaaagcttctcccaaaaaagcacctggtactaagggtactgctgctgctgctgctgctgctggctgctgctgctgctgctgctgctgctgctgctaaagttccagcaaaaaagatcaccgccgcgagtaaaaaggctccagcccagaaggttcctgcccagaaagccacaggccagaaagcagcgcctgctccaaaagctcagaagggtcaaaaagctccagcccagaaagcacctgctccaaaggcatctggcaagaaagcataagtggcaatcataaaaagtaataaaggttctttttgacctgttgacaaatgtatttaagcctttggatttaaagcctgttgaggctagagttaggaggcagattgatagtaggattataataaacattaaataatca

SEQ ID NO: 77145 - DNA, 854 bp, Homo sapiens
aaaatataggctaggtagaggctggttcgaatcggccgaggcaacatggtgttcaggcgcttcgtggaggttggccgggtggcctatgtctcctttggacctcatgccggaaaattggtcgcgattgtagatgttattgatcagaacagggctttggtcgatggaccttgcactcaagtgaggagacaggccatgcctttcaagtgcatgcagctcactgatttcatcctcaagtttccgcacagtgcccaccagaagtatgtccgacaagcctggcagaaggcagacatcaatacaaaatgggcagccacacgatgggccaagaagattgaagccagagaaaggaaagccaagatgacagattttgatcgttttaaagttatgaaggcaaagaaaatgaggaacagaataatcaagaatgaagttaagaagcttcaaaaggcagctctcctgaaagcttctcccaaaaaagcacctggtactaagggtactgctgctgctgctgctgctgctggctgctgctgctgctgctgctgctgctgctgctaaagttccagcaaaaaagatcaccgccgcgagtaaaaaggctccagcccagaaggttcctgcccagaaagccacaggccagaaagcagcgcctgctccaaaagctcagaagggtcaaaaagctccagcccagaaagcacctgctccaaaggcatctggcaagaaagcataagtggcaatcataaaaagtaataaaggttctttttgacctgttgacaaatgtatttaagcctttggatttaaagcctgttgaggctagagttaggaggcagattgatagtaggattataataaacattaaataatca

SEQ ID NO: 77146 - DNA, 836 bp, Homo sapiens
cggacgcgtgggtcgaacgctgccaacatggtgttcaggcgcttcgtggaggttggccgggtggcctatgtctcctttggacctcatgccggaaaattggtcgcgattgtagatgttattgatcagaacagggctttggtcgatggaccttgcactcaagtgaggagacaggccatgcctttcaagtgcatgcagctcactgatttcatcctcaagtttccgcacagtgcccaccagaagtatgtccgacaagcctggcagaaggcagacatcaatacaaaatgggcagccacacgatgggccaagaagattgaagccagagaaaggaaagccaagatgacagattttgatcgttttaaagttatgaaggcaaagaaaatgaggaacagaataatcaagaatgaagttaagaagcttcaaaaggcagctctcctgaaagcttctcccaaaaaagcacctggtactaagggtactgctgctgctgctgctgctgctggctgctgctgctgctgctgctgctgctgctgctaaagttccagcaaaaaagatcaccgccgcgagtaaaaaggctccagcccagaaggttcctgcccagaaagccacaggccagaaagcagcgcctgctccaaaagctcagaagggtcaaaaagctccagcccagaaagcacctgctccaaaggcatctggcaagaaagcataagtggcaatcataaaaagtaataaaggttctttttgacctgttgacaaatgtatttaagcctttggatttaaagcctgttgaggctagagttaggaggcagattgatagtaggattataataaacattaaataatca

SEQ ID NO: 77147 - DNA, 1001 bp, Homo sapiens
ctctgtggaaacatcagttcgcatggccattccggcagcctgtggatgctgtcaaactgggtctaccgattcccacctcgggttgggagaggaccacggtggccaaaattcttagcttcttcctttccctcatgcagcccatggatagccagccccagagattcccacctcgggttgggagaggaccacggtggccaaaattcttagcttcttcctttccctcatgcagcccatggatagccagccccagaggattatcacaaaattataaaacagcctatggacatgggtactattaagaggagacttgaaaacaattattattgggctgcttcagagtgtatgcaagattttaataccatgttcaccaactgttacatttacaacaagcccactgatgatattgtcctaatggcacaaacgctggaaaagatattcctggcagaaggcagacatcaatacaaaatgggcagccacacgatgggccaagaagattgaagccagagaaaggaaagccaagatgacagattttgatcgttttaaagttatgaaggcaaagaaaatgaggaacagaataatcaagaatgaagttaagaagcttcaaaaggcagctctcctgaaagcttctcccaaaaaagcacctggtactaagggtactgctgctgctgctgctgctgctgctgctgctgctgctaaagttccagcaaaaaagatcaccgccgcgagtaaaaaggctccagcccagaaggttcctgcccagaaagccacaggccagaaagcagcgcctgctccaaaagctcagaagggtcaaaaagctccagcccagaaagcacctgctccaaaggcatctggcaagaaagcataagtggcaatcataaaaagtaataaaggttctttttgacctgttgacaaatgtatttaagcctttggatttaaagcctgttgaggctagagttaggaggcagattgatagtaggattataataaacattaaataatca

SEQ ID NO: 77148 - DNA, 1070 bp, Homo sapiens
  misc_feature (53)..(53): n is a, c, g, or t
  misc_feature (58)..(58): n is a, c, g, or t
  misc_feature (78)..(78): n is a, c, g, or t
  misc_feature (116)..(116): n is a, c, g, or t
  misc_feature (120)..(120): n is a, c, g, or t
  misc_feature (136)..(136): n is a, c, g, or t
  misc_feature (160)..(160): n is a, c, g, or t
  misc_feature (169)..(169): n is a, c, g, or t
cattctatttccccctctattgatccccacctccaaatatctcatcaacaacngactnatcaccacccaacaatgacnaatcaaactaacctcaaaacaaatgatagccatacacnacantaaaggacgaacctgntctcttatactagtatccttaatnatttttatngccacaactaacgtgttcaggcgcttcgtggaggttggccgggtggcctatgtctcctttggacctcatgccggaaaattggtcgcgattgtagatgttattgatcagaacagggctttggtcgatggaccttgcactcaagtgaggagacaggccatgcctttcaagtgcatgcagctcactgatttcatcctcaagtttccgcacagtgcccaccagaagtatgtccgacaagcctggcagaaggcagacatcaatacaaaatgggcagccacacgatgggccaagaagattgaagccagagaaaggggtaataacttagggtcatttgaattctggtcctttctttttttggagggttcaagatagtgtgagagggataatttttatttgttgttttttttttaacagaaagccaagatgacagattttgatcgttttaaagttatgaaggcaaagaaaatgaggaacagaataatcaagaatgaagttaagaagcttcaaaaggcagctctcctgaaagcttctcccaaaaaagcacctggtactaagggtactgctgctgctgctgctgctgctgctgctgctgctgctaaagttccagcaaaaaagatcaccgccgcgagtaaaaaggctccagcccagaaggttcctgcccagaaagccacaggccagaaagcagcgcctgctccaaaagctcagaagggtcaaaaagctccagcccagaaagcacctgctccaaaggcatctggcaagaaagcataagtggcaatcataaaaagtaataaaggttctttttgacctgttgacaaatgtatttaagcctttggatttaaagcctgttgaggctagagttaggaggcagattgatagtaggattataataaacattaaataatca

SEQ ID NO: 77149 - DNA, 1182 bp, Homo sapiens
gggggcgagaaaacaaatctacggctaggtgcgaggctgggtggtgcgccgctggcgagcgcgtggagggcccggcaggcctggcgcgccttgggccacgcgtgcgcgcctccgccgctggagctggatggctgatgcggctcgtggtccgagagccttgtcctgccgtgtgggccttgcggacctgggagctggtgggcgttgggaaccgggcttaagctactgaggcgtttgctgatttcgtccatccaggtgttcaggcgcttcgtggaggttggccgggtggcctatgtctcctttggacctcatgccggaaaattggtcgcgattgtagatgttattgatcagaacagggctttggtcgatggaccttgcactcaagtgaggagacaggccatgcctttcaagtgcatgcagctcactgatttcatcctcaagtttccgcacagtgcccaccagaagtatgtccgacaagcctggcagaaggcagacatcaatacaaaatgggcagccacacgatgggccaagaagattgaagccagagaaaggaaagccaagatgacagattttgatcgttttaaagttatgaaggcaaagaaaatgaggaacagaataatcaagaatgaagttaagaagcttcaaaaggcagctctcctgaaagcttctcccaaaaaagcacctggtactaagggtactgctgctgctgctgctgctgctggctgctgctgctgctgctgctgctgctgctgctaaagttccagcaaaaaagatcaccgccgcgagtaaaaaggctccagcccagaaggttcctgcccagaaagccacaggccagaaagcagcgcctgctccaaaagctcagaagggtcaaaaagctccagcccagaaagcacctgctccaaaggcatctggcaagaaagcataagtggcaatcataaaaagtaataaaggttctttttgaccaaaagaacacaaacgcaccggtctgaggagagcaaggcgacaacgcaacgccgtcgacggatgcacacgccaagacgcgtcaggcacgagaccacacacaaagaaagcggggggcgacaaacgcagcggggacaagccgacccccgtagaaagaccactgggattaaccgcggcccgcaccacaggagacagacgggcgtaggacacactgtgggggagccc

SEQ ID NO: 77150 - DNA, 575 bp, Homo sapiens
ccgcctactactactaaattcgcggccgcgtcgaccaaaatgggcagccacacgatgggccaagaagattgaagccagagaaaggaaagccaagatgacagattttgatcgttttaaagttatgaaggcaaagaaaatgaggaacagaataatcaagaatgaagttaagaagcttcaaaaggcagctctcctgaaagcttctcccaaaaaagcacctggtactaagggtactgctgctgctgctgctgctgctgctgctgctgctgctaaagttccagcaaaaaagatcaccgccgcgagtaaaaaggctccagcccagaaggttcctgcccagaaagccacaggccagaaagcagcgcctgctccaaaagctcagaagggtcaaaaagctccagcccagaaagcacctgctccaaaggcatctggcaagaaagcataagtggcaatcataaaaagtaataaaggttctttttgacctgttgacaaatgtatttaagcctttggatttaaagcctgttgaggctagagttaggaggcagattgatagtaggattataataaacattaaataatca

SEQ ID NO: 77151 - DNA, 504 bp, Homo sapiens
  misc_feature (485)..(485): n is a, c, g, or t
gcccagtttgagcctgactctagaggatcccccaggtgttcaggcgcttcgtggaggttggccgggtggcctatgtctcctttggacctcatgccggaaaattggtcgcgattgtagatgttattgatcagaacagggctttggtcgatggaccttgcactcaagtgaggagacaggccatgcctttcaagtgcatgcagctcactgatttcatcctcaagtttccgcacagtgcccaccagaagtatgtccgacaagcctggcagaaggcagacatcaatacaaaatgggcagccacacgatgggccaagaagattgaagccagagaaaggaaagccaagatgacagattttgatcgttttaaagttatgaaggcaaagaaaatgaggaacagaataatcaagaatgaagttaagaagcttcaaaaggcagctctcctgaaagcttctcccaaaaaagcacctggtactaagggtactgctggnatcctctgagatcacctca

SEQ ID NO: 77152 - DNA, 729 bp, Homo sapiens
  misc_feature (488)..(488): n is a, c, g, or t
gcccagtttgagcctgactctagaggatcccccaggtgttcaggcgcttcgtggaggttggccgggtggcctatgtctcctttggacctcatgccggaaaattggtcgcgattgtagatgttattgatcagaacagggctttggtcgatggaccttgcactcaagtgaggagacaggccatgcctttcaagtgcatgcagctcactgatttcatcctcaagtttccgcacagtgcccaccagaagtatgtccgacaagcctggcagaaggcagacatcaatacaaaatgggcagccacacgatgggccaagaagattgaagccagagaaaggaaagccaagatgacagattttgatcgttttaaagttatgaaggcaaagaaaatgaggaacagaataatcaagaatgaagttaagaagcttcaaaaggcagctctcctgaaagcttctcccaaaaaagcacctggtactaagggtactgctccaggngcttgtggggccctgtgaaggtggtggtagcagagaattttgatgaaatagtgaataatgaaaataaagatgtgctgattgaatttcacgccccttggtgtggtcattgtaagaacctggagcccaagtataaagaacttggggagaagctcagaaaagacccaaatattgtcataggcaagatggatgccacagccagtgatgtgccttctccatatgaagtcagaggtttcctaccata

SEQ ID NO: 77153 - DNA, 884 bp, Homo sapiens
  misc_feature (490)..(490): n is a, c, g, or t
  misc_feature (501)..(501): n is a, c, g, or t
  misc_feature (505)..(505): n is a, c, g, or t
  misc_feature (507)..(507): n is a, c, g, or t
gcccagtttgagcctgactctagaggatcccccaggtgttcaggcgcttcgtggaggttggccgggtggcctatgtctcctttggacctcatgccggaaaattggtcgcgattgtagatgttattgatcagaacagggctttggtcgatggaccttgcactcaagtgaggagacaggccatgcctttcaagtgcatgcagctcactgatttcatcctcaagtttccgcacagtgcccaccagaagtatgtccgacaagcctggcagaaggcagacatcaatacaaaatgggcagccacacgatgggccaagaagattgaagccagagaaaggaaagccaagatgacagattttgatcgttttaaagttatgaaggcaaagaaaatgaggaacagaataatcaagaatgaagttaagaagcttcaaaaggcagctctcctgaaagcttctcccaaaaaagcacctggtactaagggtactgctgcagcagnagcagcagcancagnancagcagcagttcgtccggaaccaaaccttctacctcctttgagcccatcaaggcagacccacaggtggtgagtacctgccccctgggggcagagagagagagtctagcctcagtccagtcctaggtcagaaaacagaattggggatggaacccagatctcctggtcaaaccctgatgggacacgagagctcatcatgcagcaccttctggggttcagtgctggttggcccactataggcacaccaattcctagggataacacagaaactccactgccgtattcttcaagccctttacctgcacaacccttggaagcaacgactcacttaattgacacttctactgtattaactctctctcatctaatatgaatacct

SEQ ID NO: 77154 - DNA, 731 bp, Homo sapiens
gcccagtttgagcctgactctagaggatcccccaggtgttcaggcgcttcgtggaggttggccgggtggcctatgtctcctttggacctcatgccggaaaattggtcgcgattgtagatgttattgatcagaacagggctttggtcgatggaccttgcactcaagtgaggagacaggccatgcctttcaagtgcatgcagctcactgatttcatcctcaagtttccgcacagtgcccaccagaagtatgtccgacaagcctggcagaaggcagacatcaatacaaaatgggcagccacacgatgggccaagaagattgaagccagagaaaggaaagccaagatgacagattttgatcgttttaaagttatgaaggcaaagaaaatgaggaacagaataatcaagaatgaagttaagaagcttcaaaaggcagctctcctgaaagcttctcccaaaaaagcacctggtactaagggtactgctccaggcgcttgtgggagacactaatggcccaggcgagtttattgataattttgatgtaacagagcaccggagaaattacccccacgtccaaaatgtcaactctgagaagaaccaggttcagagactcacgaccccacgacgcatgacactgcggtgggtctggaaggaccgcaacaacaatgtgacttactgtgtttgatatactcggtagccgggaactgaaatagaaagagcgtgtcagtgaaggta

SEQ ID NO: 77155 - DNA, 785 bp, Homo sapiens
gcccagtttgagcctgactctagaggatcccccaggtgttcaggcgcttcgtggaggttggccgggtggcctatgtctcctttggacctcatgccggaaaattggtcgcgattgtagatgttattgatcagaacagggctttggtcgatggaccttgcactcaagtgaggagacaggccatgcctttcaagtgcatgcagctcactgatttcatcctcaagtttccgcacagtgcccaccagaagtatgtccgacaagcctggcagaaggcagacatcaatacaaaatgggcagccacacgatgggccaagaagattgaagccagagaaaggaaagccaagatgacagattttgatcgttttaaagttatgaaggcaaagaaaatgaggaacagaataatcaagaatgaagttaagaagcttcaaaaggcagctctcctgaaagcttctcccaaaaaagcacctggtactaagggtactgctccaggcgcttgttggtatcagtcagtgctctgactcttgcaactgaaactgttcggagcattctgaaaatagatgatgtggtaaacactcgataatctggataactgactagcaccattatgatcaccagtattgtggctggaatggaagaagatcaccttgttgttccttgtttggaagattatttcctctgaatttctgggcttggtcttccagttggcatttgcctgaagttgtattgaaacatttaatgaaaatattaaatatttggtttcaagggcagatttatcttctcccactacg

SEQ ID NO: 77156 - DNA, 765 bp, Homo sapiens
  misc_feature (489)..(489): n is a, c, g, or t
  misc_feature (504)..(504): n is a, c, g, or t
  misc_feature (507)..(507): n is a, c, g, or t
  misc_feature (514)..(514): n is a, c, g, or t
  misc_feature (520)..(520): n is a, c, g, or t
  misc_feature (552)..(553): n is a, c, g, or t
  misc_feature (563)..(563): n is a, c, g, or t
  misc_feature (591)..(591): n is a, c, g, or t
  misc_feature (606)..(606): n is a, c, g, or t
  misc_feature (615)..(615): n is a, c, g, or t
  misc_feature (620)..(622): n is a, c, g, or t
  misc_feature (626)..(626): n is a, c, g, or t
  misc_feature (632)..(632): n is a, c, g, or t
  misc_feature (641)..(641): n is a, c, g, or t
  misc_feature (652)..(652): n is a, c, g, or t
  misc_feature (687)..(687): n is a, c, g, or t
  misc_feature (751)..(751): n is a, c, g, or t
gcccagtttgagcctgactctagaggatcccccaggtgttcaggcgcttcgtggaggttggccgggtggcctatgtctcctttggacctcatgccggaaaattggtcgcgattgtagatgttattgatcagaacagggctttggtcgatggaccttgcactcaagtgaggagacaggccatgcctttcaagtgcatgcagctcactgatttcatcctcaagtttccgcacagtgcccaccagaagtatgtccgacaagcctggcagaaggcagacatcaatacaaaatgggcagccacacgatgggccaagaagattgaagccagagaaaggaaagccaagatgacagattttgatcgttttaaagttatgaaggcaaagaaaatgaggaacagaataatcaagaatgaagttaagaagcttcaaaaggcagctctcctgaaagcttctcccaaaaaagcacctggtactaagggtactgctcgcgcancagcaacagcagcancanccaacancaacancagcaacaccaccacactaaagggcatacatnncctgctttcnccaattaaccactgaattgctatttttnccttttggccagatngctaggtcnctggnnncccngcagtnggtgttttnacataagattngggtccttttggaaagaatagttgcagtgtttatnggatagttgtggtaagaatctagtttattttgcatttggctaattaggtctgtgctgcctggtnctaaactcaacccc

SEQ ID NO: 77157 - DNA, 735 bp, Homo sapiens
ccacgcgtcgcggacgcgtgggtcgacccacgcgtgcgccaacatggtgttcaggcgcttcgtggaggttggccgggtggcctatgtctcctttggacctcatgccggaaaattggtcgcgattgtagatgttattgatcagaacagggctttggtcgatggaccttgcactcaagtgaggagacaggccatgcctttcaagtgcatgcagctcactgatttcatcctcaagtttccgcacagtgcccaccagaagtatgtccgacaagcctggcagaaggcagacatcaatacaaaatgggcagccacacgatgggccaagaagattgaagccagagaaaggaaagccaagatgacagattttgatcgttttaaagttatgaaggcaaagaaaatgaggaacagaataatcaagaatgaagttaagaagcttcaaaaggcagctctcctgaaagcttctcccaaaaaagcacctggtactaagggtactgctgctgctgctgctgctgctgctgctgctgctgctaaagttccagcaaaaaagatcaccgccgcgagtaaaaaggctccagcccagaaggttcctgcccagaaagccacaggccagaaagcagcgcctgctccaaaagctcagaagggtcaaaaagctccagcccagaaagcacctgctccaaaggcatctggcaagaaagcataagtggcaatcataaaaagtaataaaggttctttttgacc

SEQ ID NO: 77158 - DNA, 1317 bp, Homo sapiens
  misc_feature (421)..(421): n is a, c, g, or t
  misc_feature (433)..(433): n is a, c, g, or t
  misc_feature (456)..(456): n is a, c, g, or t
aatcttgtgtgacactctgcgagcactatctcactactactctgatgggatacctgtcgacgggttgtttaccgaccttgggtgggtctcctctcccatttgtgttgtccccatgtatgcggcctgagaccaatgtcccgcctatgtggttgaacccacgtcttttcccccttgcgagccctcagggatggcacaccagctgtggacctccccggccggtgcggccttttctgggtccccacgtatatagcccatcggggcattccgtggagcttgcgggctcttcagaatcctgaggagtacctgatcctcaggagcaccagtacagcgcccagaccagtagagacccggtagtcagaggcgcaggggagcatcctgggtttgggcccgcgacacccccgcggcccgcgctctgcgctcngctggcttggcnatgcctgcgggcagacggacggncggacggcacagctccctgggtgttcaggcgcttcgtggaggttggccgggtggcctatgtctcctttggacctcatgccggaaaattggtcgcgattgtagatgttattgatcagaacagggctttggtcgatggaccttgcactcaagtgaggagacaggccatgcctttcaagtgcatgcagctcactgatttcatcctcaagtttccgcacagtgcccaccagaagtatgtccgacaagcctggcagaaggcagacatcaatacaaaatgggcagccacacgatgggccaagaagattgaagccagagaaaggaaagccaagatgacagattttgatcgttttaaagttatgaaggcaaagaaaatgaggaacagaataatcaagaatgaagttaagaagcttcaaaaggcagctctcctgaaagcttctcccaaaaaagcacctggtactaagggtactgctgctgctgctgctgctgctgctgctgctgctgctaaagttccagcaaaaaagatcaccgccgcgagtaaaaaggctccagcccagaaggttcctgcccagaaagccacaggccagaaagcagcgcctgctccaaaagctcagaagggtcaaaaagctccagcccagaaagcacctgctccaaaggcatctggcaagaaagcataagtggcaatcataaaaagtaataaaggttctttttgacctcacaacaacgaactaaacacaaaacaacacaaccaccaacaccacagaaaaccaccacgcaagaccccccaagcaaagaccagggaacaccccagagacagggagggacacacccaccacagaaaacatgcgcacacccggacaccgaagc

SEQ ID NO: 77159 - DNA, 385 bp, Homo sapiens
  misc_feature (8)..(8): n is a, c, g, or t
  misc_feature (30)..(30): n is a, c, g, or t
agggcganagccctgggatgcaccggccanaggccatgctgctgcgctgctgctgctgctgctgctgctgctgctgctaaagttccagcaaaaaagatcaccgccgcgagtaaaaaggctccagcccagaaggttcctgcccagaaagccacaggccagaaagcagcgcctgctccaaaagctcagaagggtcaaaaagctccagcccagaaagcacctgctccaaaggcatctggcaagaaagcataagtggcaatcataaaaagtaataaaggttctttttgacctgttgacaaatgtatttaagcctttggatttaaagcctgttgaggctagagttaggaggcagattgatagtaggattataataaacattaaataatca

SEQ ID NO: 77160 - DNA, 357 bp, Homo sapiens
  misc_feature (1)..(1): n is a, c, g, or t
ngaggcagtgaatcgagctcgtgtaccatctcgtgaccggcgattatagatgttattgatcagaacagggctttggtcgatggaccttgcactcaagtgaggagacaggccatgcctttcaagtgcatgcagctcactgatttcatcctcaagtttccgcacagtgcccaccagaagtatgtccgacaagcctggcagaaggcagacatcaatacaaaatgggcagccacacgatgggccaagaagattgaagccagagaaaggaaagccaagatgacagattttgatcgttttaaagttatgaaggcaaagaaaatgaggaacagaataatcgccggtcacgagatggtccggctt

SEQ ID NO: 77161 - DNA, 288 bp, Homo sapiens
ccacgcgtcgcggacgcgtgggtcgacccacgcgtgcgccaacatggctgctgctgctgctgctgctgctgctgctgctaaagttccagcaaaaaagatcaccgccgcgagtaaaaaggctccagcccagaaggttcctgcccagaaagccacaggccagaaagcagcgcctgctccaaaagctcagaagggtcaaaaagctccagcccagaaagcacctgctccaaaggcatctggcaagaaagcataagtggcaatcataaaaagtaataaaggttctttttgacc

SEQ ID NO: 77162 - DNA, 420 bp, Homo sapiens
  misc_feature (25)..(25): n is a, c, g, or t
  misc_feature (54)..(54): n is a, c, g, or t
atgacctttttaactgtccttcagncttaaacgttaaaaagcactgtcaggccnagcccccccttaggcttgaaagtatgtcccctgatgagcagaactcccagacacccatttctgacccaaactcaaatgatggtcagtcagatcccctccctaattcttcaaactcagttgtgccgctgctgctgctgctgctgctgctgctgctgctaaagttccagcaaaaaagatcaccgccgcgagtaaaaaggctccagcccagaaggttcctgcccagaaagccacaggccagaaagcagcgcctgctccaaaagctcagaagggtcaaaaagctccagcccagaaagcacctgctccaaaggcatctggcaagaaagcataagtggcaatcataaaaagtaataaaggttctttttgacc

SEQ ID NO: 77163 - DNA, 761 bp, Homo sapiens
ggcggtgcgttcttctacacatgcgcagggttgggcgggtcttcttccttctcgcctaacgccgccaacatggtgttcaggcgcttcgtggaggttggccgggtggcctatgtctcctttggacctcatgccggaaaattggtcgcgattgtagatgttattgatcagaacagggctttggtcgatggaccttgcactcaagtgaggagacaggccatgcctttcaagtgcatgcagctcactgatttcatcctcaagtttccgcacagtgcccaccagaagtatgtccgacaagcctggcagaaggcagacatcaatacaaaatgggcagccacacgatgggccaagaagattgaagccagagaaaggaaagccaagatgacagattttgatcgttttaaagttatgaaggcaaagaaaatgaggaacagaataatcaagaatgaagttaagaagcttcaaaaggcagctctcctgaaagcttctcccaaaaaagcacctggtactaagggtactgctgctgctgctgctgctgctgctgctgctgctgctaaagttccagcaaaaaagatcaccgccgcgagtaaaaaggctccagcccagaaggttcctgcccagaaagccacaggccagaaagcagcgcctgctccaaaagctcagaagggtcaaaaagctccagcccagaaagcacctgctccaaaggcatctggcaagaaagcataagtggcaatcataaaaagtaataaaggttctttttgacc

SEQ ID NO: 77164 - DNA, 819 bp, Homo sapiens
ggcggtgcgttcttctacacatgcgcagggttgggcgggtcttcttccttctcgcctaacgccgccaacatggtgttcaggcgcttcgtggaggttggccgggtggcctatgtctcctttggacctcatgccggaaaattggtcgcgattgtagatgttattgatcagaacagggctttggtcgatggaccttgcactcaagtgaggagacaggccatgcctttcaagtgcatgcagctcactgatttcatcctcaagtttccgcacagtgcccaccagaagtatgtccgacaagcctggcagaaggcagacatcaatacaaaatgggcagccacacgatgggccaagaagattgaagccagagaaaggaaagccaagatgacagattttgatcgttttaaagttatgaaggcaaagaaaatgaggaacagaataatcaagaatgaagttaagaagcttcaaaaggcagctctcctgaaagcttctcccaaaaaagcacctggtactaagggtactgctgctgctgctgctgctgctgctgctgctgctgctaaagttccagcaaaaaagatcaccgccgcgagtaaaaaggctccagcccagaaggttcctgcccagaaagccacaggccagaaagcagcgcctgctccaaaagctcagaagggtcaaaaagctccagcccagaaagcacctgctccaaaggcatctggcaagaaagcataagtggcaatcataaaaagtaataaaggttctttttgaccaggggatctaaaaaagtgggtttttttgcccgctttgcggcccatttctctttctctt

SEQ ID NO: 77165 - DNA, 482 bp, Homo sapiens
  misc_feature (477)..(477): n is a, c, g, or t
ggcggtgcgttcttctacacatgcgcagggttgggcgggtcttcttccttctcgcctaacgccgccaacatggtgttcaggcgcttcgtggaggttggccgggtggcctatgtctcctttggacctcatgccggaaaattggtcgcgattgtagatgttattgatcagaacagggctttggtcgatggaccttgcactcaagtgaggagacaggccatgcctttcaagtgcatgcagctcactgatttcatcctcaagtttccgcacagtgcccaccagaagtatgtccgacaagcctggcagaaggcagacatcaatacaaaatgggcagccacacgatgggccaagaagattgaagccagagaaaggaaagccaagatgacagattttgatcgttttaaagttatgaaggcaaagaaaatgaaaaaaaaaaaaaaaaacactttggggggcgcccgggcccggaaaaagtttttnaaacc

SEQ ID NO: 77166 - DNA, 952 bp, Homo sapiens
ggcggtgcgttcttctacacatgcgcagggttgggcgggtcttcttccttctcgcctaacgccgccaacatggtgttcaggcgcttcgtggaggttggccgggtggcctatgtctcctttggacctcatgccggaaaattggtcgcgattgtagatgttattgatcagaacagggctttggtcgatggaccttgcactcaagtgaggagacaggccatgcctttcaagtgcatgcagctcactgatttcatcctcaagtttccgcacagtgcccaccagaagtatgtccgacaagcctggcagaaggcagacatcaatacaaaatgggcagccacacgatgggccaagaagattgaagccagagaaaggaaagccaagatgacagattttgatcgttttaaagttatgaaggcaaagaaaatgaggaacagaataatcaagaatgaagttaagaagcttcaaaaggcagctctcctgaaagcttctcccaaaaaagcacctggtactaagggtactgctgctgctgctgctgctgctgctgctgctgctgctaaagttccagcaaaaaagatcaccgccgcgagtaaaaaggctccagcccagaaggttcctgcccagaaagccacaggccagaaagcagcgcctgctccaaaagctcagaagggtcaaaaagctccagcccagaaagcacctgctccaaaggcatctggcaagaaagcataagtggcaatcataaaaagtaataaaggttctttttgacctgttgacaaatgtatttaagcctttggatttaaagcctgttgaggctagagttaggaggcagattgatagtaggattataataaacattaaataatcaaaaaaaaaaaaaagaaacaaagggggggggaataaagagtactcggaggggccaattaagggcaaacacaatatagtgagaaagggggcacta

SEQ ID NO: 77167 - DNA, 866 bp, Homo sapiens
  misc_feature (330)..(331): n is a, c, g, or t
  misc_feature (349)..(349): n is a, c, g, or t
gcttctcgcctaacgctgccaacatggtgttgtgttcaggcgcttcgtggaggttggccgggtggcctatgtctcctttggacctcatgccggaaaattggtcgcgattgtagatgttattgatcagaacagggctttggtcgatggaccttgcactcaagtgaggagacaggccatgcctttcaagtgcatgcagctcactgatttcatcctcaagtttccgcacagtgcccaccagaagtatgtccgacaagcctggcagaaggcagacatcaatacaaaatgggcagccacacgatgggccaagaagattgaagccagagaaaggannagccaagatgacagattntgatccgtctacaaggttatgcacagggcaaagcacacatgaggcaacaggaacatcactccaaggaattgcacacgttacgcaagcctttcaaacagggccaggctctccctgtaaaggctttctcccaaagaaaagcaccctgggtaactaaaggggtaacttgactgctgagatgcctgactgcttgcttgccttgctgccttacacggttccagacgaacacacagcattcaccggcacgccaacgttacagaaggggctcgcaaggcccaggcaagggttccctgtcccagaatcggcccctcaggcccagaaatacgacgccgccctaggctcccaaacaagggctcacgacatcgggcgcgcaaaagacgacgtccacaggcgccaaggaaagcgcacccaggtccccaaaggagctcgttcggggcagaaagcacaggcataaagtttgcgagactcactttcagcccaggttcatacaaaagggtcactcatttggaacctagttcgg

SEQ ID NO: 77168 - DNA, 684 bp, Homo sapiens
  misc_feature (330)..(331): n is a, c, g, or t
  misc_feature (349)..(349): n is a, c, g, or t
gcttctcgcctaacgctgccaacatggtgttgtgttcaggcgcttcgtggaggttggccgggtggcctatgtctcctttggacctcatgccggaaaattggtcgcgattgtagatgttattgatcagaacagggctttggtcgatggaccttgcactcaagtgaggagacaggccatgcctttcaagtgcatgcagctcactgatttcatcctcaagtttccgcacagtgcccaccagaagtatgtccgacaagcctggcagaaggcagacatcaatacaaaatgggcagccacacgatgggccaagaagattgaagccagagaaaggannagccaagatgacagattntgatcgttttagacagttatgaaggggatatggatagtgtgtggttctcttaaggaattttggggcaggtgatccactaataatttttaaatactatgggaaagtggcagagggaccggaagtgggctttaaagatcgtgaaggggatttcttcatgaggagtagggtggcgtaatcatcaaggttggggattctcacactacaagaaagatgtcgtccggcgaggaaccccgcgcgttccgtagcgagcacccacttggggccactggagggcccttgacgggagatccgatcaccagggtgttgctgcgagaactcttgtcaattgtccccgc

SEQ ID NO: 77169 - DNA, 1263 bp, Homo sapiens
  misc_feature (421)..(421): n is a, c, g, or t
  misc_feature (433)..(433): n is a, c, g, or t
  misc_feature (456)..(456): n is a, c, g, or t
aatcttgtgtgacactctgcgagcactatctcactactactctgatgggatacctgtcgacgggttgtttaccgaccttgggtgggtctcctctcccatttgtgttgtccccatgtatgcggcctgagaccaatgtcccgcctatgtggttgaacccacgtcttttcccccttgcgagccctcagggatggcacaccagctgtggacctccccggccggtgcggccttttctgggtccccacgtatatagcccatcggggcattccgtggagcttgcgggctcttcagaatcctgaggagtacctgatcctcaggagcaccagtacagcgcccagaccagtagagacccggtagtcagaggcgcaggggagcatcctgggtttgggcccgcgacacccccgcggcccgcgctctgcgctcngctggcttggcnatgcctgcgggcagacggacggncggacggcacagctccctgggtgttcaggcgcttcgtggaggttggccgggtggcctatgtctcctttggacctcatgccggaaaattggtcgcgattgtagatgttattgatcagaacagggctttggtcgatggaccttgcactcaagtgaggagacaggccatgcctttcaagtgcatgcagctcactgatttcatcctcaagtttccgcacagtgcccaccagaagtatgtccgacaagcctggcagaaggcagacatcaatacaaaatgggcagccacacgatgggccaagaagattgaagccagagaaaggaaagccaagatgacagattttgatcgttttaaagttatgaaggcaaagaaaatgaggaacagaataatcaagaatgaagttaagaagcttcaaaaggcagctctcctgaaagcttctcccaaaaaagcacctggtactaagggtactgctgctgctgctgctgctgctgctgctgctgctgctaaagttccagcaaaaaagatcaccgccgcgagtaaaaaggctccagcccagaaggttcctgcccagaaagccacaggccagaaagcagcgcctgctccaaaagctcagaagggtcaaaaagctccagcccagaaagcacctgctccaaaggcatctggcaagaaagcataagtggcaatcataaaaagtaataaaggttctttttgacctgttgacaaatgtatttaagcctttggatttaaagcctgttgaggctagagttaggaggcagattgatagtaggattataataaacattaaataatca

SEQ ID NO: 77170 - DNA, 833 bp, Homo sapiens
ccacgcgtcgcggacgcgtgggtcgacccacgcgtgcgccaacatggtgttcaggcgcttcgtggaggttggccgggtggcctatgtctcctttggacctcatgccggaaaattggtcgcgattgtagatgttattgatcagaacagggctttggtcgatggaccttgcactcaagtgaggagacaggccatgcctttcaagtgcatgcagctcactgatttcatcctcaagtttccgcacagtgcccaccagaagtatgtccgacaagcctggcagaaggcagacatcaatacaaaatgggcagccacacgatgggccaagaagattgaagccagagaaaggaaagccaagatgacagattttgatcgttttaaagttatgaaggcaaagaaaatgaggaacagaataatcaagaatgaagttaagaagcttcaaaaggcagctctcctgaaagcttctcccaaaaaagcacctggtactaagggtactgctgctgctgctgctgctgctgctgctgctgctgctaaagttccagcaaaaaagatcaccgccgcgagtaaaaaggctccagcccagaaggttcctgcccagaaagccacaggccagaaagcagcgcctgctccaaaagctcagaagggtcaaaaagctccagcccagaaagcacctgctccaaaggcatctggcaagaaagcataagtggcaatcataaaaagtaataaaggttctttttgacctgttgacaaatgtatttaagcctttggatttaaagcctgttgaggctagagttaggaggcagattgatagtaggattataataaacattaaataatca

SEQ ID NO: 77171 - DNA, 1134 bp, Homo sapiens
ggcttctggctgccgccggccccccgcgaacgggctgcggggcaggagtggcgctgctgctccgactttccccggacttcgaggctcccgggacctggtagcgctctgggtctccggcggagaacaggcgcctaatctggcgagaaggaactcaggccgagccctccggcctcccgcaggaccctgtcacgtggattgctgggggatggcgttgaggaggaggtcagaagttgagtagcaggggcctaggagggctcgaagccttcacagcgatggcagagaagcgacccctgagaaccctggggcctgtgatgtatggcaagctgccccgcttagagacagactccgtgttcaggcgcttcgtggaggttggccgggtggcctatgtctcctttggacctcatgccggaaaattggtcgcgattgtagatgttattgatcagaacagggctttggtcgatggaccttgcactcaagtgaggagacaggccatgcctttcaagtgcatgcagctcactgatttcatcctcaagtttccgcacagtgcccaccagaagtatgtccgacaagcctggcagaaggcagacatcaatacaaaatgggcagccacacgatgggccaagaagattgaagccagagaaaggaaagccaagatgacagattttgatcgttttaaagttatgaaggcaaagaaaatgaggaacagaataatcaagaatgaagttaagaagcttcaaaaggcagctctcctgaaagcttctcccaaaaaagcacctggtactaagggtactgctgctgctgctgctgctgctgctgctgctgctgctaaagttccagcaaaaaagatcaccgccgcgagtaaaaaggctccagcccagaaggttcctgcccagaaagccacaggccagaaagcagcgcctgctccaaaagctcagaagggtcaaaaagctccagcccagaaagcacctgctccaaaggcatctggcaagaaagcataagtggcaatcataaaaagtaataaaggttctttttgacctgttgacaaatgtatttaagcctttggatttaaagcctgttgaggctagagttaggaggcagattgatagtaggattataataaacattaaataatca

SEQ ID NO: 77172 - DNA, 918 bp, Homo sapiens
  misc_feature (39)..(39): n is a, c, g, or t
agcggcgccaggaaattgaacaaaaacttgaagttcagncagaagaagagagaaagcaggttgaaaatgaaaggagagaactgtttgaagagaggcgtgctaaacagacagaactgcggcttttggaacagaaagttgagcttgcgcagctgcaagaagaatggaatgaacataatcgccggtcacgagatatctcgtgaccggcgattatagatgttattgatcagaacagggctttggtcgatggaccttgcactcaagtgaggagacaggccatgcctttcaagtgcatgcagctcactgatttcatcctcaagtttccgcacagtgcccaccagaagtatgtccgacaagcctggcagaaggcagacatcaatacaaaatgggcagccacacgatgggccaagaagattgaagccagagaaaggaaagccaagatgacagattttgatcgttttaaagttatgaaggcaaagaaaatgaggaacagaataatcaagaatgaagttaagaagcttcaaaaggcagctctcctgaaagcttctcccaaaaaagcacctggtactaagggtactgctgctgctgctgctgctgctgctgctgctgctgctaaagttccagcaaaaaagatcaccgccgcgagtaaaaaggctccagcccagaaggttcctgcccagaaagccacaggccagaaagcagcgcctgctccaaaagctcagaagggtcaaaaagctccagcccagaaagcacctgctccaaaggcatctggcaagaaagcataagtggcaatcataaaaagtaataaaggttctttttgacctgttgacaaatgtatttaagcctttggatttaaagcctgttgaggctagagttaggaggcagattgatagtaggattataataaacattaaataatca

SEQ ID NO: 77173 - DNA, 707 bp, Homo sapiens
gttcagcagcagccagagttgggctttggtcgatggaccttgcactcaagtgaggagacaggccatgcctttcaagtgcatgcagctcactgatttcatcctcaagtttccgcacagtgcccaccagaagtatgtccgacaagcctggcagaaggcagacatcaatacaaaatgggcagccacacgatgggccaagaagattgaagccagagaaaggaaagccaagatgacagattttgatcgttttaaagttatgaaggcaaagaaaatgaggaacagaataatcaagaatgaagttaagaagcttcaaaaggcagctctcctgaaagcttctcccaaaaaagcacctggtactaagggtactgctgctgctgctgctgctgctgctgctgctgctgctaaagttccagcaaaaaagatcaccgccgcgagtaaaaaggctccagcccagaaggttcctgcccagaaagccacaggccagaaagcagcgcctgctccaaaagctcagaagggtcaaaaagctccagcccagaaagcacctgctccaaaggcatctggcaagaaagcataagtggcaatcataaaaagtaataaaggttctttttgacctgttgacaaatgtatttaagcctttggatttaaagcctgttgaggctagagttaggaggcagattgatagtaggattataataaacattaaataatca

SEQ ID NO: 77174 - DNA, 1260 bp, Homo sapiens
gggggcgagaaaacaaatctacggctaggtgcgaggctgggtggtgcgccgctggcgagcgcgtggagggcccggcaggcctggcgcgccttgggccacgcgtgcgcgcctccgccgctggagctggatggctgatgcggctcgtggtccgagagccttgtcctgccgtgtgggccttgcggacctgggagctggtgggcgttgggaaccgggcttaagctactgaggcgtttgctgatttcgtccatccaggtgttcaggcgcttcgtggaggttggccgggtggcctatgtctcctttggacctcatgccggaaaattggtcgcgattgtagatgttattgatcagaacagggctttggtcgatggaccttgcactcaagtgaggagacaggccatgcctttcaagtgcatgcagctcactgatttcatcctcaagtttccgcacagtgcccaccagaagtatgtccgacaagcctggcagaaggcagacatcaatacaaaatgggcagccacacgatgggccaagaagattgaagccagagaaaggaaagccaagatgacagattttgatcgttttaaagttatgaaggcaaagaaaatgaggaacagaataatcaagaatgaagttaagaagcttcaaaaggcagctctcctgaaagcttctcccaaaaaagcacctggtactaagggtactgctgctgctgctgctgctgctggctgctgctgctgctgctgctgctgctgctgctaaagttccagcaaaaaagatcaccgccgcgagtaaaaaggctccagcccagaaggttcctgcccagaaagccacaggccagaaagcagcgcctgctccaaaagctcagaagggtcaaaaagctccagcccagaaagcacctgctccaaaggcatctggcaagaaagcataagtggcaatcataaaaagtaataaaggttctttttgacctgttgacaaatgtatttaagcctttggatttaaagcctgttgaggctagagttaggaggcagattgatagtaggattataataaacattaaataatcacaaacaaaaaaaaaaggggggggtaaaatatcctcgggggcaagttacgcgtaccagtttttgtaaaagggccctatgggggtgaataagaaggagggcggtaaacacgtggatgaacggctgtggatttggaaggcctcttgggtggattggcatcacagtaagttggaataattgtaggtaagttcggggtgtgtattaa

SEQ ID NO: 77175 - DNA, 960 bp, Homo sapiens
gggggcgagaaaacaaatctacggctaggtgcgaggctgggtggtgcgccgctggcgagcgcgtggagggcccggcaggcctggcgcgccttgggccacgcgtgcgcgcctccgccgctggagctggatggctgatgcggctcgtggtccgagagccttgtcctgccgtgtgggccttgcggacctgggagctggtgggcgttgggaaccgggcttaagctactgaggcgtttgctgatttcgtccatccaggtgttcaggcgcttcgtggaggttggccgggtggcctatgtctcctttggacctcatgccggaaaattggtcgcgattgtagatgttattgatcagaacagggctttggtcgatggaccttgcactcaagtgaggagacaggccatgcctttcaagtgcatgcagctcactgatttcatcctcaagtttccgcacagtgcccaccagaagtatgtccgacaagcctggcagaaggcagacatcaatacaaaatgggcagccacacgatgggccaagaagattgaagccagagaaaggaaagccaagatgacagattttgatcgttttaaagttatgaaggcaaagaaaatgaggaacagaataatcaagaatgaagttaagaagcttcaaaaggcagctctcctgaaagcttctcccaaaaaagcacctggtactaagggtactgctgctgctgctgctgctgctggctgctgctgctgctgctgctgctgctgctgctaaagttccagcaaaaaagatcaccgccgcgagtaaaaaggctccagcccagaaggttcctgcccagaaagccacaggccagaaagcagcgcctgctccaaaagctcagaagggtcaaaaagctccagcccagaaagcacctgctccaaaggcatctggcaagaaagcataagtggcaatcataaaaagtaataaaggttctttttgacc

SEQ ID NO: 77176 - DNA, 1164 bp, Homo sapiens
gggggcgagaaaacaaatctacggctaggtgcgaggctgggtggtgcgccgctggcgagcgcgtggagggcccggcaggcctggcgcgccttgggccacgcgtgcgcgcctccgccgctggagctggatggctgatgcggctcgtggtccgagagccttgtcctgccgtgtgggccttgcggacctgggagctggtgggcgttgggaaccgggcttaagctactgaggcgtttgctgatttcgtccatccaggtgttcaggcgcttcgtggaggttggccgggtggcctatgtctcctttggacctcatgccggaaaattggtcgcgattgtagatgttattgatcagaacagggctttggtcgatggaccttgcactcaagtgaggagacaggccatgcctttcaagtgcatgcagctcactgatttcatcctcaagtttccgcacagtgcccaccagaagtatgtccgacaagcctggcagaaggcagacatcaatacaaaatgggcagccacacgatgggccaagaagattgaagccagagaaaggaaagccaagatgacagattttgatcgttttaaagttatgaaggcaaagaaaatgaggaacagaataatcaagaatgaagttaagaagcttcaaaaggcagctctcctgaaagcttctcccaaaaaagcacctggtactaagggtactgctgctgctgctgctgctgctggctgctgctgctgctgctgctgctgctgctgctaaagttccagcaaaaaagatcaccgccgcgagtaaaaaggctccagcccagaaggttcctgcccagaaagccacaggccagaaagcagcgcctgctccaaaagctcagaagggtcaaaaagctccagcccagaaagcacctgctccaaaggcatctggcaagaaagcataagtggcaatcataaaaagtaataaaggttctttttgacccaaacaaacacaaacataaaaaaaaactgaaacaaaaaaaaaaggggggggggcgaaaaaaatttctcagggggggcccaaatttagggcaacccgttttttgtgtaaagggggcccaaatgagggggattataaagagcggcaggggcgggtaaaaaggggtgtgggaaacgcgtcgtggttgtgggagagagaccatggggg

SEQ ID NO: 77177 - DNA, 641 bp, Homo sapiens
tccaaaggttaagggtgctgtcagaagttgaaaatttcttcttagtgaggcatgttggctcacaaatataatccgagcactctgggaggctgaggcagaaggatagcttgaggctaggagttcaagaccagcctggataacatagcaagaccctatctctacaaaaatgtttgtaaaaagaaatagccaagtgtggtggcacgtgtctatagtcccagctgctcaggaagctgaggcaggaggattgcttagtctgggtgttcaaggctgcagtgagctatgatcatgccgctgccctccagcctgggcaacagaacaaaactctatctaaaaaaaaaattttaaatataattaataaatattttaaaacataaaatttcttctttcctatgtgtgtcttcaccgtatacctcccaaagtgctgggattacaggtgtgcaccactgtgccaggcctcaaagcttatattctaattagaggagggattcaagtaaatcattgaaggtaatgctgaaaggctggcagtaccatttttgcttttttggagattgtatatttgattacatttacctttatttttctgattgtactcttggatcaggagctgaaactactagaatttaagacaaaacaaactatag

SEQ ID NO: 77178 - DNA, 735 bp, Homo sapiens
  misc_feature (14)..(15): n is a, c, g, or t
  misc_feature (25)..(26): n is a, c, g, or t
  misc_feature (71)..(71): n is a, c, g, or t
  misc_feature (76)..(76): n is a, c, g, or t
  misc_feature (93)..(93): n is a, c, g, or t
  misc_feature (170)..(170): n is a, c, g, or t
  misc_feature (229)..(229): n is a, c, g, or t
  misc_feature (330)..(330): n is a, c, g, or t
  misc_feature (339)..(339): n is a, c, g, or t
  misc_feature (604)..(604): n is a, c, g, or t
ggctctcagtcccnncctcacgggnngtgcctccccccactgcgatgggggtcctaagagccaggggggangaggngctggctctcagtcccntcctcgcggggggtgcctcccgcctctgcgatggggctcctaagagccagggggggaagacgggctcgctctcagtngccgcctcgcggggggtgcctcccgccctgcgatgggggtcccaagagccgggggggangaggggctggctctctgtactcgcctctcgatgggtgcctccccgcctgcgattggggtcctaagagccagggggtaagagggcctagctctgagtccctncctctcggngggtgcctccccaccctgcgatggcggtcccaagtgtcagggggggaagagggggtggctgtcactcctcggctcgtggaggctgtctcccaccactgcgatgggggttctaagagccaggggggaagaggggctggttctcagtccctgcctcagtgggggtgcctccccctctgcgatgggggtcctaagagccagcggaggaagaggggctggctctcagttcccgccttttttttttttctcagtgttttagacgcccagntgcacaacttgattgccttacaaatgacctgcttccaggatgcggaaattcctaatttcttctgtgacccttctcaactcccccatcttgcatgttgtgacaccttcaccaataacataatcatgtatttc

SEQ ID NO: 77179 - DNA, 782 bp, Homo sapiens
cgcaaacttggtttcactggatccactcctattggcaaacagatcatgaagagctgtgctgttagcaacttgaagaaagtttcccttgagcttggtggcaagtctccacttataatatttaatgactgtgaacttgacaaggctgtgcgaatgggcatgggagcagtatttttcaacaaaggagagaactgtattgctgctgggcggttgttcgtggaagaatccatccacgacgaatttgtgacaagagtggtagaagaaattaaaaagatgaaaattggtgatccacttgacagatccactgatcatgggccccaaaatcataaggctcatctggaaaagctgctgcaatactgtgaaactggagtgaaagaaggggccactttggtgtacgggggaagacaagtccaaaggccaggctttttcatggagccgaccgtgttcacagatgtggaagactacatgtacctcgccaaagaggaatcctttgggcctattatggtcatttctaaattccaaaatgggtaggttcttcagacacaatgtaacttaggttttgactagataagtcatttttcccctttgccactctgctatatacacagcataagattaatgaacatgtaattttctaccataagaataattaacttaaataattagaagttacgcttttgctaaccatcgtagatcatagtatatttttgcttttcagcttcaattaatggccaacataatgggcttttagctgaataaattttagtttttctgcacttgaaatt

SEQ ID NO: 77180 - DNA, 1759 bp, Homo sapiens
  misc_feature (7)..(7): n is a, c, g, or t
  misc_feature (16)..(16): n is a, c, g, or t
  misc_feature (35)..(36): n is a, c, g, or t
  misc_feature (40)..(40): n is a, c, g, or t
ggcgccnccccggccnccctagcaccccggcctcnncatnagaggcgggagacccggagcagcagcagaggcaggaggactaggaggaggaggaggagccgtcgcaggatgaaggatcggactcaagagctgcggagtgcgaaagacagtgatgatgaagaggaggtggtccacgtggatcgggaccacttcatggatgagttctttgaacaggtggaagagatccggggctgcattgagaaactgtcggaggatgtggagcaggtgaaaaaacagcatagcgccatcctggccgcacccaacccagatgagaagaccaaacaggagctggaggatctcactgcagacatcaagaagacggccaacaaggttcggtccaaattgaaagcgatcgagcaaagcattgaacaggaggaggggctgaaccgttcctccgcggacctgcgcatccgcaagacccagcactccacactgtcccggaagttcgtggaggtaatgaccgaatataacgcgacccagtccaagtaccgggaccgctgcaaggaccggatccagcggcaactggagatcactggaaggaccaccaccaacgaagaactggaagacatgctggagagcgggaagctggccatcttcacagatgacatcaaaatggactcacagatgacgaagcaggcgctgaatgagattgagacgaggcacaatgagatcatcaagctggagaccagcatccgcgagctgcacgatatgtttgtggacatggccatgctcgtagagagccagggagagatgattgaccgcatcgagtacaacgtggaacattctgtggactacgtggagcgagctgtgtctgacaccaagaaagcagtgaaatatcagagcaaggcccggaggaagaaaatcatgatcatcatttgctgtgtggtgctgggggtggtcttggcgtcatccattggggggacgctgggcttgtaggccccccccacccttctctctcccagacccttcccccaccacatcgggagcaatacccccaccacccctttcactccatcccctgctccaggctcactcccaaaacagacccaggcagccccacccctcctccacccccacggcagaccctggtgtccctggacctcaccgggccatggacccccccccgtccccgcacgtagatcgcagcaggcgtgattacacatgcacaccaacatgcatgccgccggcacatgctcgagacgtgtggacaccccagcgtgcgtgtgcgtgtgatgtgtgtgatgcaccagagcaccccctccacccccaccttgggtgtgtgtgcgtggtctgagcttcccccttcaccggggctgttgtgtagactgcagccaagtgtaacacagcagtccatcacgccctctctgtcctctgtgaacagtgtgtgtgcgtgcgtgagaccacagatctgtggacacaccatttgtgtacgtggaattttgtgtttcagtgtttgaacctaatgcaacagcaacaaagccactgatacctgagccctttgtgtctgctacaaaccaggcaggtggtgtgtgtggactcacactcacattctcagaggatccagggaggcccaggtacacacaggccatggcagacaccccatgtctttgttaccccaggggctgtggcatgtcccaggagggtgtgcatgtgtgtgtgtgtgtgtgtgtgtgtgtccaggatgtgcctgaagtattgataggtcttctcagatagagcc

SEQ ID NO: 77181 - DNA, 1132 bp, Homo sapiens
  misc_feature (7)..(7): n is a, c, g, or t
  misc_feature (16)..(16): n is a, c, g, or t
  misc_feature (35)..(36): n is a, c, g, or t
  misc_feature (40)..(40): n is a, c, g, or t
ggcgccnccccggccnccctagcaccccggcctcnncatnagaggcgggagacccggagcagcagcagaggcaggaggactaggaggaggaggaggagccgtcgcaggatgaaggatcggactcaagagctgcggagtgcgaaagacagtgatgatgaagaggaggtggtccacgtggatcgggaccacttcatggatgagttctttgaacaggtggaagagatccggggctgcattgagaaactgtcggaggatgtggagcaggtgaaaaaacagcatagcgccatcctggccgcacccaacccagatgagaagaccaaacaggagctggaggatctcactgcagacatcaagaagacggccaacaaggttcggtccaaattgaaagcgatcgagcaaagcattgaacaggaggaggggctgaaccgttcctccgcggacctgcgcatccgcaagacccagcactccacactgtcccggaagttcgtggaggtaatgaccgaatataacgcgacccagtccaagtaccgggaccgctgcaaggaccggatccagcggcaactggagatcactggaaggaccaccaccaacgaagaactggaagacatgctggagagcgggaagctggccatcttcacagatgacgtgagccgcgggtggggcgggctctgcttttggaaaatttttgcctcccctccctaagttcaggttgaactaaggtcctaagtccaccctggaaaaatgagcagcgggaagcctgagccgggaactggggaattccatgggagcggagcaggaaggcacccccatcagatgacggagtcgttcgtgtgccaggcactgttctaagcactttccatcttcacattcacccaccaactcatttaatactcacacatccccttcgaggaaaccccatttcacagatgaggaaaactggcccagagagatgaaatcacttggcaagatctcagagcgagggagagggccaggacttgaatcctgtctagtttcagagtcagaactctcgagccctaggatacacgacatactctgctactgaagcaagtcgtttcaccagagaactgatttgcctacattaaaagaaattttttttaattaaaaaaaactt

SEQ ID NO: 77182 - DNA, 642 bp, Homo sapiens
gagaattcaaggaatttcagagccaagagaaaaggggtttatgtttgtaaacaaaaactcataaatgtgtatgtttgaaaagccaaaaataaagcacactatattccactaagtgaaactgttactcccttgggcagtcttctgggtcttccacccactcttcagacaaatcactggtctcttctattctcatttcctgtttcttatctggagtctggcagataaaagggttctacattcacaccctagatctacttcatgctatccatccttcttctagaaaatggctagcattagggggtccttttcctatttgtccaagagaaaaatttgtaagagattacctccttttcttgctttggaattctctgtcccattccgaaactgttgaaatttgaatatgatcactggagaagtgaatcattccatgggactttactaaaacctacccaaccacaggtccccacttgtgggggtacaggctaggtttgaccaatgaacacacaactacaaatgtgaaaaagacacttttccagacagtcaactggatgccatattggaatggcttgtgatatctgtagtccttggttttgaaaaatttccacagtaattagtgttattttatgacctttctggagtaga

SEQ ID NO: 77183 - DNA, 588 bp, Homo sapiens
gagaattcaaggaatttcagagccaagagaaaaggggtttatgtttgtaaacaaaaactcataaatgtgtatgtttgaaaagccaaaaataaagcacactatattccactaagtgaaactgttactcccttgggcagtcttctgggtcttccacccactcttcagacaaatcactggtctcttctattctcatttcctgtttcttatctggagtctggcagataaaagggttctacattcacaccctagatctacttcatgctatccatccttcttctagaaaatggctagcattagggggtccttttcctatttgtccaagagacgaaactgttgaaatttgaatatgatcactggagaagtgaatcattccatgggactttactaaaacctacccaaccacaggtccccacttgtgggggtacaggctaggtttgaccaatgaacacacaactacaaatgtgaaaaagacacttttccagacagtcaactggatgccatattggaatggcttgtgatatctgtagtccttggttttgaaaaatttccacagtaattagtgttattttatgacctttctggagtaga

SEQ ID NO: 77184 - DNA, 2577 bp, Homo sapiens
ccgggacagcgagcggcggctcacctgggagagcaaagcgtggctctcctgcgcccactcgggagaaggagcggatccacttaggtcagcggttaaaacgtcgttacaagaggccaccccggcatcgcggggcctgtggctgcgccccctcttgaattcaggcctagcacatcacctccgcccctcgcaccctgcagtctgcgctccatacagcacgtgagcgggtgctcagcaatgttccctggctgaaagaaccgcatagagtagcatgcaaaaatgacatgcatgtttaagataaaataagggagaggacacctgttctgactgagtctggcaactcagatctccccgcagccaacatctacattcctttggacagctgtctgctgtgtagggacacctccctggaactttgaaaagcaccccatcattaccttccactttgttctggagcaaggtttcaaaagaagagtgccgtattttgattaatttagtgaattggattttcagacacaagtaagagcatccactcagtggcctctgcagtaaataatgatatcagatcacataacaagaagactggaggttggcgggaaatctggacctggtgactcaaagaagtcatgaaggaccatctctccattctgccaccttctcgcctgtggattttcctccccaggcttgtcacttcattgtcgagagatgccctcacaatccaagccaggcagcctcacatgaccagatctaaaacacaaagagggagccaaactgagaaaggaccttttccctctgaacacttctctcttggaaaaagaaaatgtttcccagaaagcctcatagccttcctcttatatctccttgactaactgggacccggatccctggatatcctttcctgagaaagagagggtctggggcaggggatagagaaaatgactagcaactagcagcacatgatgtttaaacataagatttaaagaaatgcaaggcacaaacaatttgaagactttttttaagtttttaaaatcttcacaaaataaaaaggaattggacaatgcactttaaaaactagaagacgtttcactgaaaacagcatctcctaattcatttcatggcttagatagtaatagaaaattattttattctaattccatactttatcaactaattttaattattttataattacccaaaatatgtcatgtagaatgaaaataaaagaaaatgaaaacagttatatcaaggccaagtcagttgtatgtttactggctatttagaaatttctaaatacgtgtatatttagaaatgactatatagatactatttgggtaatgttagggatggaaagtttatgtccccccaaaatttgtatgttgaaatcctaagcccaatgtgatggttttaaggggcggggcctttgtgaggtgattaggtcatgagagtggagacttcatggatgagaatagtaagtatccttataaaagagactccagaggctgggtgcagtgtctcatgcctgtaatcccagcactttgggaggccgaggcaggtggatcgcctggggtcaggagttcgagaccagcctggccaacatggcaaaaccctgtctctactaaaaatacaaaaattagccaggtgttgtggtgggcacctgtaatcccagctacttaggaggctgaggcctgagaattgcttgaacccaggaggtggaggttgcagtgaactgagatcgcgccactgcactccagcctgggggacggagtgagactgtctccaaaaaataaaatacaataaaagagactccaaagaactttctagccctcttgccaccacctaaggatgcaaagagttgacagcaacctggaagagccctcaccagaactcgaccattctggcactctgacttccagcctccactgtgagaaataaatttctattgtttatgagccactcagcatatggtactttgtagccctagacaggctaagacaggtaattagcaattttaggtgattttcatcatcaaaattttcatgatggcattttggagaattcacataaaccactctgttaccctcctaaaagtattgctcaaatactgaattatatttatgcttgccaaagttaatttttttccaacaagtaacactagccacttcattttgtgcttttgatacaaaagcatttcccaatccagcggctttcatcttctggcctggttggcaaaagtgtaactcacttcggcaccctctctgaaccctagtctcctcctcaaatgtaaaacagtaataaacctttcttacccaggaagccattataaggattataatcaacataagatataattctttaattatcaaagcagttgctggcatgtggcaggcattcaacagaaaccgtgttgctatgttatttttattgttaccattaatattcctattgggattgaaacccttatgtcatatcaaaacttttccatctttgacaaatgagacatattaggatagtatcttaataatatgtaagagtttagtgcttgagctattcaattattaaactttgcttccaagaaacaga

SEQ ID NO: 77185 - DNA, 616 bp, Homo sapiens
tgttctataaacgcttattacatcattgtgcataggcttcatttttaaaagtactcccaaataaatacaaggaggcgatggaaattgaatgaagattcgaaggattcccatagagcgtggctcacttcccctcaccgggacagcgagcggcggctcacctgggagagcaaagcgtggctctcctgcgcccactcgggagagcaaacaatggctcacctgcgcccacccgggagagcaagcgtggctcacctgcgcccactcgggaaagccagccgccatcctgtgctgcaggcagggagcgggcggcgggagaggagcggatccacttaggtcagcggttaaaacgtcgttacaagaggccaccccggcatcgcggggcctgtggctgcgccccctcttgaattcaggcctagcacatcacctccgcccctcgcaccctgcagtctgcgctccatacagcacgtgagcgggtgctcagcaatgttccctggctgaaagaaccgcatagagtagcatgcaaaaatgacatgcatgtttaagataaaataagggagaggacacctgttctgactgagtctggcaactcagatctccccgcagccaacatctacattcc

SEQ ID NO: 77186 - DNA, 937 bp, Homo sapiens
acgtcacaggacgcgcccgcttctcgctggagtgcgcaccgagcggcagtgacttcgccgctgctgtagttccccggctggatgcggtgactggtgccagtgctcaggcgcccgctgcccttgacctcccgccccgcgagccctaactcagcgcaggaggaccggctgccgccgccgccgccgccagcagagccaagcacagtgggaactttcagaaagcactggttgaaggaacgctggaatccctgggacttactgcgtagcatgtagtagttgctcctctacaaaagtttcaccttatgaagtatagcaggctctgatgctggtgtctggtagaagaagattactcacagctctgctgcaggctcagaagtggccctttcaaccctccagagacatgagactagtgcagttccgggcaccccacctggtggggcctcacttgggcctggagacagggaatggtggaggggttatcaacctcaatgcctttgaccccacactcccaaagacgatgacgcagttcctagagcagggagaggccaccctctcagtggcaagaagagccttggctgcccagttgccagtcctaccatggtcggaggtaaccttcctggctccagtcacatggccagataaggtggtgtgtgtgggcatgaattatgtggaccactgcaaagaacagaacgtgcccgtgcccaaggagcccatcatcttcagcaagtttgccagctccatcgtggggccctatgatgaggtggtcctcccaccacagagccaggtcagtgcctccccactgccctccctagtcactgggcccatcacaagggcattctgagctcagtattgagcctactggagccacctctcgctcagtagtgcattcaacagaaactctacaggattatacacacagtagtaacactggccttggaaa

SEQ ID NO: 77187 - DNA, 1517 bp, Homo sapiens
acgtcacaggacgcgcccgcttctcgctggagtgcgcaccgagcggcagtgacttcgccgctgctgtagttccccggctggatgcggtgactggtgccagtgctcaggcgcccgctgcccttgacctcccgccccgcgagccctaactcagcgcaggaggaccggctgccgccgccgccgccgccagcagagccaagcacagtgggaactttcagaaagcactggttgaaggaacgctggaatccctgggacttactgcgtagcatgtagtagttgctcctctacaaaagtttcaccttatgaagtatagcaggctctgatgctggtgtctggtagaagaagattactcacagctctgctgcaggctcagaagtggccctttcaaccctccagagacatgagactagtgcagttccgggcaccccacctggtggggcctcacttgggcctggagacagggaatggtggaggggttatcaacctcaatgcctttgaccccacactcccaaagacgatgacgcagttcctagagcagggagaggccaccctctcagtggcaagaagagccttggctgcccagttgccagtcctaccatggtcggaggtaaccttcctggctccagtcacatggccagataaggtggtgtgtgtgggcatgaattatgtggaccactgcaaagaacagaacgtgcccgtgcccaaggagcccatcatcttcagcaagtttgccagctccatcgtggggccctatgatgaggtggtcctcccaccacagagccaggaggtagattgggaagtggagctggccgtggtcattggaaagaaaggcaagcacatcaaggccacagatgccatggcccacgtggccggcttcactgtggctcatgacgtgagtgctcgtgactggctaacaagacgcaatgggaaacagtggctgctgggaaaaaccttcgacaccttctgccctctgggccctgccttggtgaccaaggacagtgtagcagatccacacaacttaaagatctgctgccgagtgaatggggaagtcgtccagagcagcaacaccaaccagatggtattcaagacagaggacctgatagcctgggtctcccagtttgttaccttttacccaggggatgtcatcctaactgggacccccccaggtgtcggtgtattcaggaaacctcctgtctttctcaagaagggggatgaagtccagtgtgagattgaagaactaggtgtcatcatcaacaaggtggtgtgatggctcctgcacaggcccgacataggatgagggcatctgctcccactcagcctagcccagggaaaggcccagtggcaggtgtgggcaggtgccagccctgcaagccgcctcttctcggtagaagggagaaggacagagctctcttcaataaatgcgtcgggtcaaaaaaacaaacaatcaaacactacaacaaacaaaaaaaaatttggggggaggcccgcgcccgaaaatttttataacaacactgtggggg

SEQ ID NO: 77188 - DNA, 1707 bp, Homo sapiens
acgtcacaggacgcgcccgcttctcgctggagtgcgcaccgagcggcagtgacttcgccgctgctgtagttccccggctggatgcggtgactggtgccagtgctcaggcgcccgctgcccttgacctcccgccccgcgagccctaactcagcgcaggaggaccggctgccgccgccgccgccgccagcagagccaagcacagtgggaactttcagaaagcactggttgaaggaacgctggaatccctgggacttactgcgtagcatgtagtagttgctcctctacaaaagtttcaccttatgaagtatagcaggctctgatgctggtgtctggtagaagaagattactcacagctctgctgcaggctcagaagtggccctttcaaccctccagagacatgagactagtgcagttccgggcaccccacctggtggggcctcacttgggcctggagacagggaatggtggaggggttatcaacctcaatgcctttgaccccacactcccaaagacgatgacgcagttcctagagcagggagaggccaccctctcagtggcaagaagagccttggctgcccagttgccagtcctaccatggtcggaggtaaccttcctggctccagtcacatggccagataaggtggtgtgtgtgggcatgaattatgtggaccactgcaaagaacagaacgtgcccgtgcccaaggagcccatcatcttcagcaagtttgccagctccatcgtggggccctatgatgaggtggtcctcccaccacagagccaggaggtagattgggaagtggagctggccgtggtcattggaaagaaaggcaagcacatcaaggtgaggtggaaagggtgggctcccaggccagagtgcagcagaggccccagctcctgcctctcctagttctgacctcactcaccgacacatggcaccagctgtccctgacactaggaagcagtcagcctccttgctccctgacactgcctttcccttcacccacctttggctggctctggctactaacatgggataacagctttgagatcccttgccacaggtgttggtgtcacccgtgatctaacctcctgtatggccaaatcccctgcccccataggccacagatgccatggcccacgtggccggcttcactgtggctcatgacgtgagtgctcgtgactggctaacaagacgcaatgggaaacagtggctgctgggaaaaaccttcgacaccttctgccctctgggccctgccttggtgaccaaggacagtgtagcagatccacacaacttaaagatctgctgccgagtgaatggggaagtcgtccagagcagcaacaccaaccagatggtattcaagacagaggacctgatagcctgggtctcccagtttgttaccttttacccaggggatgtcatcctaactgggacccccccaggtgtcggtgtattcaggaaacctcctgtctttctcaagaagggggatgaagtccagtgtgagattgaagaactaggtgtcatcatcaacaaggtggtgtgatggctcctgcacaggcccgacataggatgagggcatctgctcccactcagcctagcccagggaaaggcccagtggcaggtgtgggcaggtgccagccctgcaagccgcctcttctcggtagaagggagaaggacagagctctcttcaataaatgcgtcgggtcaaa

SEQ ID NO: 77189 - DNA, 1304 bp, Homo sapiens
acgtcacaggacgcgcccgcttctcgctggagtgcgcaccgagcggcagtgacttcgccgctgctgtagttccccggctggatgcggtgactggtgccagtgctcaggcgcccgctgcccttgacctcccgccccgcgagccctaactcagcgcaggaggaccggctgccgccgccgccgccgccaggctctgatgctggtgtctggtagaagaagattactcacagctctgctgcaggctcagaagtggccctttcaaccctccagagacatgagactagtgcagttccgggcaccccacctggtggggcctcacttgggcctggagacagggaatggtggaggggttatcaacctcaatgcctttgaccccacactcccaaagacgatgacgcagttcctagagcagggagaggccaccctctcagtggcaagaagagccttggctgcccagttgccagtcctaccatggtcggaggtaaccttcctggctccagtcacatggccagataaggtggtgtgtgtgggcatgaattatgtggaccactgcaaagaacagaacgtgcccgtgcccaaggagcccatcatcttcagcaagtttgccagctccatcgtggggccctatgatgaggtggtcctcccaccacagagccaggaggtagattgggaagtggagctggccgtggtcattggaaagaaaggcaagcacatcaaggccacagatgccatggcccacgtggccggcttcactgtggctcatgacgtgagtgctcgtgactggctaacaagacgcaatgggaaacagtggctgctgggaaaaaccttcgacaccttctgccctctgggccctgccttggtgaccaaggacagtgtagcagatccacacaacttaaagatctgctgccgagtgaatggggaagtcgtccagagcagcaacaccaaccagatggtattcaagacagaggacctgatagcctgggtctcccagtttgttaccttttacccaggggatgtcatcctaactgggacccccccaggtgtcggtgtattcaggaaacctcctgtctttctcaagaagggggatgaagtccagtgtgagattgaagaactaggtgtcatcatcaacaaggtggtgtgatggctcctgcacaggcccgacataggatgagggcatctgctcccactcagcctagcccagggaaaggcccagtggcaggtgtgggcaggtgccagccctgcaagccgcctcttctcggtagaagggagaaggacagagctctcttcaataaatgcgtcgggtcaaa

SEQ ID NO: 77190 - DNA, 1571 bp, Homo sapiens
acgtcacaggacgcgcccgcttctcgctggagtgcgcaccgagcggcagtgacttcgccgctgctgtagttccccggctggatgcggtgactggtgccagtgctcaggcgcccgctgcccttgacctcccgccccgcgagccctaactcagcgcaggaggaccggctgccgccgccgccgccgccagcagagccaagcacagtgggaactttcagaaagcactggttgaaggaacgctggaatccctgggacttactgcgtagcatgtagtagttgctcctctacaaaagtttcaccttatgaagtatagcaggctctgatgctggtgtctggtagaagaagattactcacagctctgctgcaggctcagaagtggccctttcaaccctccagagacatgagactagtgcagttccgggcaccccacctggtggggcctcacttgggcctggagacagggaatggtggaggggttatcaacctcaatgcctttgaccccacactcccaaagacgatgacgcagttcctagagcagggagaggccaccctctcagtggcaagaagagccttggctgcccagttgccagtcctaccatggtcggaggtaaccttcctggctccagtcacatggccagataaggtggtgtgtgtgggcatgaattatgtggaccactgcaaagaacagaacgtgcccgtgcccaaggagcccatcatcttcagcaagtttgccagctccatcgtggggccctatgatgaggtggtcctcccaccacagagccaggaggtagattgggaagtggagctggccgtggtcattggaaagaaaggcaagcacatcaaggtgaggtggaaagggtgggctcccaggccagagtgcagcagaggccccagctcctgcctctcctagttctgacctcactcaccgacacatggcaccagctgtccctgacactaggaagcagtcagcctccttgctccctgacactgcctttcccttcacccacctttggctggctctggctactaacatgggataacagctttgagatcccttgccacaggtgttggtgtcacccgtgatctaacctcctgtatggccaaatcccctgcccccataggccacagatgccatggcccacgtggccggcttcactgtggctcatgacgtgagtgctcgtgactggctaacaagacgcaatgggaaacagtggctgctgggaaaaaccttcgacaccttctgccctctgggccctgccttggtgaccaaggacagtgtagcagccaccagttctcccatgggcttccttcccaagccccctagagggaacacaactgcagaggatgtgaaactgcatgcgtgaagtaaattacaaagaacactgagctgatgggtggatcgggcttcctgcggctgccaccatctgaaataatctaagttgagcatcatggagcatagctatcgcaaggcccaggcattttccacactacagatgaaagccagtgtgactcacccagccactgtggaaacaacagcattgaccacacacagtgaggggacagcgccaggttgg

SEQ ID NO: 77191 - DNA, 1581 bp, Homo sapiens
acgtcacaggacgcgcccgcttctcgctggagtgcgcaccgagcggcagtgacttcgccgctgctgtagttccccggctggatgcggtgactggtgccagtgctcaggcgcccgctgcccttgacctcccgccccgcgagccctaactcagcgcaggaggaccggctgccgccgccgccgccgccaggctctgatgctggtgtctggtagaagaagattactcacagctctgctgcaggctcagaagtggccctttcaaccctccagagacatgagactagtgcagttccgggcaccccacctggtggggcctcacttgggcctggagacagggaatggtggaggggttatcaacctcaatgcctttgaccccacactcccaaagacgatgacgcagttcctagagcagggagaggccaccctctcagtggcaagaagagccttggctgcccagttgccagtcctaccatggtcggaggtaaccttcctggctccagtcacatggccagataaggtggtgtgtgtgggcatgaattatgtggaccactgcaaagaacagaacgtgcccgtgcccaaggagcccatcatcttcagcaagtttgccagctccatcgtggggccctatgatgaggtggtcctcccaccacagagccaggaggtagattgggaagtggagctggccgtggtcattggaaagaaaggcaagcacatcaaggtgaggtggaaagggtgggctcccaggccagagtgcagcagaggccccagctcctgcctctcctagttctgacctcactcaccgacacatggcaccagctgtccctgacactaggaagcagtcagcctccttgctccctgacactgcctttcccttcacccacctttggctggctctggctactaacatgggataacagctttgagatcccttgccacaggtgttggtgtcacccgtgatctaacctcctgtatggccaaatcccctgcccccataggccacagatgccatggcccacgtggccggcttcactgtggctcatgacgtgagtgctcgtgactggctaacaagacgcaatgggaaacagtggctgctgggaaaaaccttcgacaccttctgccctctgggccctgccttggtgaccaaggacagtgtagcagatccacacaacttaaagatctgctgccgagtgaatggggaagtcgtccagagcagcaacaccaaccagatggtattcaagacagaggacctgatagcctgggtctcccagtttgttaccttttacccaggggatgtcatcctaactgggacccccccaggtgtcggtgtattcaggaaacctcctgtctttctcaagaagggggatgaagtccagtgtgagattgaagaactaggtgtcatcatcaacaaggtggtgtgatggctcctgcacaggcccgacataggatgagggcatctgctcccactcagcctagcccagggaaaggcccagtggcaggtgtgggcaggtgccagccctgcaagccgcctcttctcggtagaagggagaaggacagagctctcttcaataaatgcgtcgggtcaaa

SEQ ID NO: 77192 - DNA, 976 bp, Homo sapiens
acgtcacaggacgcgcccgcttctcgctggagtgcgcaccgagcggcagtgacttcgccgctgctgtagttccccggctggatgcggtgactggtgccagtgctcaggcgcccgctgcccttgacctcccgccccgcgagccctaactcagcgcaggaggaccggctgccgccgccgccgccgccagcagagccaagcacagtgggaactttcagaaagcactggttgaaggaacgctggaatccctgggacttactgcgtagcatgtagtagttgctcctctacaaaagtttcaccttatgaagtatagcaggctctgatgctggtgtctggtagaagaagattactcacagctctgctgcaggctcagaagtggccctttcaaccctccagagacatgagactagtgcagttccgggcaccccacctggtggggcctcacttgggcctggagacagggaatggtggaggggttatcaacctcaatgcctttgaccccacactcccaaagacgatgacgcagttcctagagcagggagaggccaccctctcagtggcaagaagagccttggctgcccagttgccagtcctaccatggtcggaggtaaccttcctggctccagtcacatggccagataaggtggtgtgtgtgggcatgaattatgtggaccactgcaaagaacagaacgtgcccgtgcccaaggagcccatcatcttcagcaagtttgccagctccatcgtggggccctatgatgaggtggtctcccactcagcctagcccagggaaaggcccagtggcaggtgtgggcaggtgccagccctgcaagccgcctcttctcggtagaagggagaaggacagagctctcttcaataaatgcgtcgggtcaaaaaaacaaacaatcaaacactacaacaaacaaaaaaaaatttggggggaggcccgcgcccgaaaatttttataacaacactgtggggg

SEQ ID NO: 77193 - DNA, 1430 bp, Homo sapiens
acgtcacaggacgcgcccgcttctcgctggagtgcgcaccgagcggcagtgacttcgccgctgctgtagttccccggctggatgcggtgactggtgccagtgctcaggcgcccgctgcccttgacctcccgccccgcgagccctaactcagcgcaggaggaccggctgccgccgccgccgccgccagcagagccaagcacagtgggaactttcagaaagcactggttgaaggaacgctggaatccctgggacttactgcgtagcatgtagtagttgctcctctacaaaagtttcaccttatgaagtatagcaggctctgatgctggtgtctggtagaagaagattactcacagctctgctgcaggctcagaagtggccctttcaaccctccagagacatgagactagtgcagttccgggcaccccacctggtggggcctcacttgggcctggagacagggaatggtggaggggttatcaacctcaatgcctttgaccccacactcccaaagacgatgacgcagttcctagagcagggagaggccaccctctcagtggcaagaagagccttggctgcccagttgccagtcctaccatggtcggaggtaaccttcctggctccagtcacatggccagataaggtggtgtgtgtgggcatgaattatgtggaccactgcaaagaacagaacgtgcccgtgcccaaggagcccatcatcttcagcaagtttgccagctccatcgtggggccctatgatgaggtggtcctcccaccacagagccaggaggtagattgggaagtggagctggccgtggtcattggaaagaaaggcaagcacatcaaggccacagatgccatggcccacgtggccggcttcactgtggctcatgacgtgagtgctcgtgactggctaacaagacgcaatgggaaacagtggctgctgggaaaaaccttcgacaccttctgccctctgggccctgccttggtgaccaaggacagtgtagcagatccacacaacttaaagatctgctgccgagtgaatggggaagtcgtccagagcagcaacaccaaccagatggtattcaagacagaggacctgatagcctgggtctcccagtttgttaccttttacccaggggatgtcatcctaactgggacccccccaggtgtcggtgtattcaggaaacctcctgtctttctcaagaagggggatgaagtccagtgtgagattgaagaactaggtgtcatcatcaacaaggtggtgtgatggctcctgcacaggcccgacataggatgagggcatctgctcccactcagcctagcccagggaaaggcccagtggcaggtgtgggcaggtgccagccctgcaagccgcctcttctcggtagaagggagaaggacagagctctcttcaataaatgcgtcgggtcaaa

SEQ ID NO: 77194 - DNA, 1693 bp, Homo sapiens
acgtcacaggacgcgcccgcttctcgctggagtgcgcaccgagcggcagtgacttcgccgctgctgtagttccccggctggatgcggtgactggtgccagtgctcaggcgcccgctgcccttgacctcccgccccgcgagccctaactcagcgcaggaggaccggctgccgccgccgccgccgccagcagagccaagcacagtgggaactttcagaaagcactggttgaaggaacgctggaatccctgggacttactgcgtagcatgtagtagttgctcctctacaaaagtttcaccttatgaagtatagcaggctctgatgctggtgtctggtagaagaagattactcacagctctgctgcaggctcagaagtggccctttcaaccctccagagacatgagactagtgcagttccgggcaccccacctggtggggcctcacttgggcctggagacagggaatggtggaggggttatcaacctcaatgcctttgaccccacactcccaaagacgatgacgcagttcctagagcagggagaggccaccctctcagtggcaagaagagccttggctgcccagttgccagtcctaccatggtcggaggtaaccttcctggctccagtcacatggccagataaggtggtgtgtgtgggcatgaattatgtggaccactgcaaagaacagaacgtgcccgtgcccaaggagcccatcatcttcagcaagtttgccagctccatcgtggggccctatgatgaggtggtcctcccaccacagagccaggaggtagattgggaagtggagctggccgtggtcattggaaagaaaggcaagcacatcaaggccacagatgccatggcccacgtggccggcttcactgtggctcatgacgtgagtgctcgtgactggctaacaagacgcaatgggaaacagtggctgctgggaaaaaccttcgacaccttctgccctctgggccctgccttggtgaccaaggacagtgtagcagatccacacaacttaaagatctgctgccgagtgaatggggaagtcgtccagagcagcaacaccaaccagatggtattcaagacagaggacctgatagcctgggtctcccagtgagtgacaagggctgtcctgccagccccgctccacctgccacacatgtggaggctgacctgagccctccacctttggctgtggccactcagccagcccctggtctcactgggtccttttgctttgctccaggtttgttaccttttacccaggggatgtcatcctaactgggacccccccaggtgtcggtgtattcaggaaacctcctgtctttctcaaggtaggttagcgaaaagcaaagagagcaagggccccaaaggcctggcaggcttggctcagacttgagaagtacaggcttgtgtatgtgtctgacggaagggctgacaccgtcatggcctgctctgttgcagaagggggatgaagtccagtgtgagattgaagaactaggtgtcatcatcaacaaggtggtgtgatggctcctgcacaggcccgacataggatgagggcatctgctcccactcagcctagcccagggaaaggcccagtggcaggtgtgggcaggtgccagccctgcaagccgcctcttctcggtagaagggagaaggacagagctctcttcaataaatgcgtcgggtcaaa

SEQ ID NO: 77195 - DNA, 427 bp, Homo sapiens
gagatggagtctcgctctgttgcccaggctggagtgcaatggcgcaatcacagctcagaagcagttcttatatgcatagtgcctctgcccaaattgaccccttttttcaacttccagactatttccattggcccagaaattggaacttgtggagagacgtgaagggatggtcaaaggagagagtgtaggaaatttaggggactaatgatataactcagttcatcattagatttctttttatttattctttactgtctttgtattagaaacaaccttcataatttagctacactgttcttgtggaagatgccattttttgatttgcaaattcttagaattttttatttgatacttgagcctaggagttcgagacctgactgggtaatatagcgacaccctgttctccacaaaaaggaaaaaagaaaga

SEQ ID NO: 77196 - DNA, 414 bp, Homo sapiens
ataactcactggagccttgatgtcttgggctcaagcgatccccctgcctcagcctccctaatagtgaggactataggcatgtgccatcatgcctggttaattttttaaattttttgtagagacagatctcactatattgcctaggctggtctcaaactcctggcctcaagtgatcttctcacctttgcctcccaaagtgctggaatttcaggtgtgagccgccaccacacccatcccaatccctgctttttagagtgtattcggttcgaatgaaaacaacctattttgctactagaaatatttttaaaaatcctttcatggcatagttaggttttactattttaattttatcatgagactgaattcctcagaaattcagaattcttttaggtttactaggtataagagaaacga

SEQ ID NO: 77197 - DNA, 458 bp, Homo sapiens
aaaacctagtgtggagtcttttttcctgatttatccctaactgccatatccccactcttctccccaacagttactgtgatctgcattctaacatagcatgtacccacattgtacattaaacgtaatttgtatataactatgtaagattggaactgaatagcaggtgactggttgacctaatgtttcctttttgtatgtttagattttgtaattttccttgcatatttttgtaattaatacctttttccttttctcatatctcatacttttttttttttttttgagatagggtctcattctgtcacccaggctgaagttcagtgacacaatcacagctcactgtagccttgacctcctgggatcaagtaatcctcctgcctcagcctccgaagtagccaagaccacaggcgcaccaccacacctggctaatttttttttactttttgtagagacagggt

SEQ ID NO: 77198 - DNA, 408 bp, Homo sapiens
tttcaccatgttagccaggatggtctcgatcttctgaccttgtgatccgcctgcctcggcctcccaaagtgcttgtattacaggcgtgagcaaccgcgcccagccaggattattattttttaaatcagagacactgagtaccacctaaagggacttaaattatgcaattggaatgaaactaaagtgaattgaacatttagtttcacttagattttatttttcctgccaactgtcatatgagagtttgagagggagcccagattagacttagagaaaaataaataaattacattttatctgcacacatgaattctagagtgagttaaatttaccacagcgtgcatatatatgtatatatatgataccttgttttatatagctccttatagttttaaaagcactttgtac

SEQ ID NO: 77199 - DNA, 452 bp, Homo sapiens
tttctctgatatagaaaaacactcattttagaatgaaaaatagtgatatgcatgtgtgtaaaatgtgtaatcttagtctcaggcttcagtttcgtaattttagatcacttccctctttttcatgagaaaagctcctagacactcctatttgggaattgtataaatagtgaataatataatgaagaaaaaagtctaaaacaaggacttgctgtacactatctacaggtgtcttgaacatgttatataaggtattcttttgcttatttatgagtttggttatttgtttttatttgctgaattgtaagagttctttgtgtattttggatacaggtcctttatcagatatgtgacgtgcaaatatatcctccaaggttgaagcttgtttcttcattccctcaagagttaatttcacagagggaaacataattttaataaagtccaatttatcaatt

SEQ ID NO: 77200 - DNA, 562 bp, Homo sapiens
gggacttttgttagactgatgttggaacttctggatctcttctctgattattttatctttcttttatatttcttattgctttatttctttgtgttgcattatgggagagttccttggccttttcttctggttcacacattagttctgctgggtctgttctgctattctgccttattaaattttttatttcaaaagcttttcataccagatctctaatggctgttttcataagttcttgttccaatcttaaggatgcaaacttttatttaaaaaaactctcagaccaggcgcagtggctcatgcctgtaatcccagcacttcgggaggccgaggcgggcggatcatgaggtcaggagatcaagaccatcctggctaacacagtgaaaccctgtctctactaaaagtacaaaaattagccaggcatgctggcgggcgcctgtagtcccagctactcgggaggctgaggcaggagaatggcgtgaacctgggaggcggaggttgctgtgagccaagattgcgccactacactccagcctgggggacagagcgagactccatctca

SEQ ID NO: 77201 - DNA, 767 bp, Homo sapiens
gaattattacaaattgaagaacatgggaggctcttaataaatttccttgaataaaataattgaatttatgtaacagcaagctgcattatgaaaaaaagtgaaagctataaaaattaagtttcatgaacagaaacaaatctaaaaaaaaaatactctcttttgccacaatttgtttcccagaaaagataacagtatccaagtcctttatagctatttgtgtaaccttgaaagggtttcctctaaatctggtcactgcatcatggccaactcatttaatatttggtttttgttatgacaaggagatggcaggaattcaaagtcctgtccactaggaaatggatagagatagccaagtcactgctatcaacagtcaatttcactcactgttaaactggattctgaccaaggcttaagtaaaaaagaccttgaaaacttagccattcgattcagctttgagcctgactttaaatattctccaccaagattaccatgtttaaacatttggtaaaaccctcccttcaataagaagtgtgaatcagggagcgctcaaggagtcctaaaggaagacgaagtggactgtgaaattctcaaatataattataaacttaatagtgtgtatattcaattctgattggtgtataatcacttaactaatagaaagaaactaatttgccattacagctgttttgaaattacatttaaaggcaaaatcacagtgcactgggaattgcagccacagagccactgactagttttgctttggaaaa

SEQ ID NO: 77202 - DNA, 790 bp, Homo sapiens
aatgggtaacgttgcatgtcccaccttatttgctcctcaccttatatagcaggattatcatccccactttgtagatgagaacactgaggcaagaggttaagtaacttaggtcgaagaacattgctggtgacagcatcggcatcaaagccaggtctgtgtgacattctctttactctgtcatagaacctccctacatagcccactctcctgactcctaacaagaactaatgattctgtcactccaagaatagcatttccagagtgacacccatgaactgagcccacgctggcctgtacttagtggaaattattggccactttattgtgcttaagcatatgatgggcaactgaattaggtgactcagggtattaaagctggaagggtctatatagatcatttagcatcactctactcatttttgaggtgagaacattaaaactggccagagtcacaccagtgagttgcactgctaaggactgaacatgggactcaaggctctcattatttctaggtgctcttcctctgcagcacctctcagttttctctttccaaatcttttccaaatccagcttaaattccattgtgttcttacagcattccatgattttccaaatgagaattagtcattctttgctctcagcttacattatactttaaacctctgttttagcacttcattccttctgctttatattaattttgtatgttggtcaccctttctaaactataaacctgttaagaacttatttttgtataaccttcaagtatctagttcattgttttgtccat

SEQ ID NO: 77203 - DNA, 435 bp, Homo sapiens
ctcctaatttttatagcttttaatgtctacctaatgctccaagtttagtctgattatttaatgtgcagaaatcattaaaaccattttctgcctcacaaaaaactaaatcattggctgttactaaacaataattaagatttatacttcataggtatgtaagtataaaatcagcaataaaaagaccaggtgcagtgactcacacctgtaatcccagtgctttgggagaccaaggctggcgaatcacttgaggccaggagtttgagaccagtctggccaacatggtaaaaccccatctctactaaaaatataaaaattagccaggcgtggtgatgcacacctgtaatctcagctactaaagaggctgaggcatgagaatctcttgaaccctggaggcggtggttgcagtgagctgagatcgcgccactgcactccagc

SEQ ID NO: 77204 - DNA, 318 bp, Homo sapiens
tgagctgattggatcccggtgagtagcctcggtactccatgcctgtacttaggagggtatatttcttttgcaggaagaaaccaatagttttctgaaagcgattgaagaagccaataaaaagatgcaagcagcagagatcagcctagaggagaaagaccagaggatcggggagctggacaggctgattgagcgcatggaaaaggtaggacacagcgttgggcctattgcccacttgcccaaacttttccctgtaggtccatctgagatacgagaggccctggatatggattcctctcacctccaaaatttgcaattaaa

SEQ ID NO: 77205 - DNA, 3246 bp, Homo sapiens
cgccgtcccgcgtcgcccccgcgcagggcgggccccgcacgcttattctgcccgggaggaacgccggcgtccagcccgctaccgaccgccgctgcgggatgctgcgctccacgtccacggtcaccctgctctcgggcggcgccgccaggacgcccggggcgcccagcaggagggcaaatgtttgcagactacggctgaccgtacctcctgagagtccagttcctgagcaatgtgaaaagaagattgagagaaaagagcagcttcttgacctgagcaatggagaacctaccaggaaacttcctcagggtgttgtttatggtgtggtgcgaagatcagatcaaaatcagcagaaagaaatggtggtgtatgggtggtccaccagtcagctgaaagaagagatgaactacatcaaagatgtgagagccactttggaaaaggtgagaaagcgaatgtatggagactatgatgagatgagacagaagattcgacagctcacccaggaactatcagtttcccatgctcagcaggagtatctggagaatcacatccaaacccagtcgtctgccctggatcgttttaatgccatgaactcagccttggcatcagattccattggcctgcagaaaaccctcgtggatgtgactttggaaaacagcaacattaaggatcaaatcagaaatctgcagcagacgtatgaagcatccatggacaagctgagggaaaagcagaggcagttggaggtagcgcaagttgaaaaccagctgctaaaaatgaaggtggaatcgtcccaagaagccaatgctgaggtgatgcgagagatgaccaagaagctgtacagccagtatgaggagaagctgcaggaagaacagaggaagcacagtgctgagaaggaggctcttttggaagaaaccaatagttttctgaaagcgattgaagaagccaataaaaagatgcaagcagcagagatcagcctagaggagaaagaccagaggatcggggagctggacaggctgattgagcgcatggaaaaggaacgtcatcaactgcaacttcaactcctagaacatgaaacagaaatgtctggggagttaactgattctgacaaggaaaggtatcagcagttggaggaggcatcagccagcctccgtgagcggatcagacacctagatgacatggtgcattgccagcagaagaagtcaagcagatggtcgaggagattgaatcattaaagaaaaagttgcaacagaaacagctcttaatactgcagcttttagaaaagatatctttcttagaaggagagaataatgaactacaaagcaggttggactatttaacagaaacccaggccaagaccgaagtggaaaccagagagataggagtgggctgtgatcttctacccagccaaacaggcaggactcgtgaaattgtgatgccttctaggaactacaccccatacacaagagtcctggagttaaccatgaagaaaactctgacttaggcactcagaggcatacactttttacagatggacaaaagctctggaaccctgtggcttcaaatcctttgggaagggtgactgttgtttcccctacacacagtgtaagccggaatgggaatcgctgaggctctgatccacttctaagacaggaaggaaagtgaaggcagagtgagcaggtaagagagggatatacaaggtcacatttcagacacccactcggcataccctgccgtactgcatcatcatttgttttctttgtagacactgaaatcctatcaggaggattccttcacaatgtattttatttgctagactttggttgggagggaaaaggacattaatttgaagtttcatgttattcatgccaggattgtttgatagagcatgaaggttttgtttacccataaaagtattagaggcagcgtttctctgatacagagaggcctgtccacaagaagcatgggcacccagccaaacttgaacctggaagggagggttcccggcctgcaggtgctctttcctcttggtcccaagcatctgtgcagggtcgtgggagccacactgagagacttgtgtgggccagacaagcttcattctgatgcgctagtcccttggtttaatttgtgccttatgctttcattggaccagctgaaatcactgtatttattcaacttgtgatttttttttctttctcactttaacttaaagagaattttatatgtcttggaaatttaataatttagtgttctcagtatcaattggtgtttttgttaaacgaatgaatcatctgttcatgcatgctctactttgatattataacctatgtcacatgtgtttaataaataccatatattttgttctaaaaaaaaaaaagaaaaaaaaaaaaaaaaaaaaaaaaaaaaaagaaaaaaaaaaaaaaaagaaaaaagaaaaaaaaaaaaataaaaaaaaaaaaaaagaaaaaaaaaaaaaaagaagggtggggggggcgggcgcaggaaaaaaaagtatataaaaaatacgcgagcgtgggggcgggcgcagcgccactaagagagatacgaaaacaaggtagctaacagcaagctatctacaaaagaaacagcggcgatagaacgagaaaggggggggcgggcccccaaacaaaaaaaaaacagcgcgcggggggcaggagacagaaaaagggcgtgaatgatcaacaacaacaacggaagagaggaagagatcagatacaggagcagactacatcacaggagaggaataggacaacaaacaaaagagagagggaccagacacaaaagtaagcagaccgaacataacaaatcaaaaacacccgcccccggcggcgcggggggtgaggacaaagaaaaagaggacataacaatagagcataacaaagagcaagcagtgaagaagaacacaaagagacgaagcaagacaagaagtaaagagagcaacaacacaacgaagatcaagacagaaaacaacacgcacaaaagcaacgaaagagaaacgaaaatggagagagacaccaccaaagaacaaaacgaacacagcaagacgaaaaaacgagcaagaacgataaaatacgagaacagaacaagacaaggcacataacaaagaaccaaagagaagaagaaaagcacgaaaccaagacacaacaatgagcagacagaagaaaaacaaagaaacgagcacaaaaagatagaaaaaagaaggagagtatgtaaaaataaaagacaagagaa

SEQ ID NO: 77206 - DNA, 548 bp, Homo sapiens
acgtgctggcatccatacagtgatttaaaacagcagaagatgaaggctaagaaatgatttcctctttctgggaacgtaggacggtgcagaaggaggagaacccccgatccccacccaaggaagcaaagttactcagaccaatcctggtgatcatggggtgacagatgttacagccttcacatctggcctcttttgtagctttgaactaacctgcctaagaagagaggaaaactgttgatgtagtgggaacgctccctcctcgagcattaaccgggttgaccccacccctctgtcctcgctgtcttcagtccaatcaagatcggaaagcaggatcaagagaaagatgatcagaccggaacaggtaaacgttccatatagagatgcttcggaagtgcggagaagtgacagcttatcccctctcaggccgtcatgttctctcagcagaccctctgaattactgatgtcagaacttattggctgggctacagcacataagcaactcctagagttttaagacattaaaagaaggtgatttcagacaagaaaac

SEQ ID NO: 77207 - DNA, 430 bp, Homo sapiens
tgagatgaggaagaatgtaggcacgagccttaactgtgctgagaaaagacggcacatgaaaatctgagctcaaaatgtaaaacctaactaacctgcctaagaagagaggaaaactgttgatgtagtgggaacgctccctcctcgagcattaaccgggttgaccccacccctctgtcctcgctgtcttcagtccaatcaagatcggaaagcaggatcaagagaaagatgatcagaccggaacaggtaaacgttccatatagagatgcttcggaagtgcggagaagtgacagcttatcccctctcaggccgtcatgttctctcagcagaccctctgaattactgatgtcagaacttattggctgggctacagcacataagcaactcctagagttttaagacattaaaagaaggtgatttcagacaagaaaac

SEQ ID NO: 77208 - DNA, 585 bp, Homo sapiens
tcacagttcagcagggaacaggaaggatccatttttaggaaggagagtctgtgcttgaggttttttttaaaccagggttggctcttaaaatcaaacccactggggtcattcccttagataaggctgccctatgggcctcagagacaattttcccatccccaacctcttaaaacaagtgagtcatttcctactaaagaagataagggtctatttctatgatttatgaccagatgctcctatcagtcagtccctgggaactgctagatgatactcaactcagaggatgtgtgaggggaacaatgacaggcagtggaaccagacagcctcagtgtaaatcctggctcagccactgtgcccagcgtgtgacctcaggcatgacacctgacctctctatggctcagtgtcctcatctgtaaaatgagaatagtacctacctcatagagttgttatggagattaaatgatgaaaatcagaatgttgcatattaaatttcaatatatgaaaaagtgctgactcttaggaagccctacagtgttttccgttatattactcttcacaatccctggctagtggatccaatgagga

SEQ ID NO: 77209 - DNA, 427 bp, Homo sapiens
acatacacacatacccaatgcacactctatccaaggattgtaattttgtatatttaaaattttaaatttaacaaggggtagatgtggcttagtctttcagtattgctgattaagtgactaaagattttagcaactaggaatttgtaatgatgaaatattgttctgttaatactagcaaatttaactaaagcaattctaaggaatggtgattatggatatattctaacccactttacccttttcaaaatgtagtgaaaggcatgaaactcaaactgctagggagggcacgaagaagttggggctgcaggctgtatgcttttgtaaacacgtccagctccctgctctgatgatgtgtctgcagggtcatttggaggagttgatatgagggagcagatgaatcttctcacttaaaatatcctgtaacgtc

SEQ ID NO: 77210 - DNA, 595 bp, Homo sapiens
aggacaggcagctagcctcccctggggcaggcagggaccagaagagccccagagggtcttgtagaacagaggcggaggaggagaggacagaaaggacagggagacaaccaaggaggccctgaagagactgaatgggagagtgtgactgctccctgcaaatcctccccatgtctggactgaggaaatagctcgaagcaccatccgtctcctggtggagcagcagcagcgtccagaggctgggggctgaggctccttgtttccaacaagctcctaggtgatggatgctgctggcaggtgcaccacactgagttgcaagactcgtccctccaggcacccccttcacaggttcagcatcctcgctgccatctcctcacaaatgcgggaagggagccaccaccccaggctgggctaactcgcatgaggacaccactaacattgtctgcgttccatttacgttagacaggcaggtctacaatgtttgaagtttacagatttcttggatatagcagtgaaaggtttgtattttttatctgtaaggaaaaattgtgaagtttacatcattgcaaaataaacagaactgtgacttctgtttcac

SEQ ID NO: 77211 - DNA, 399 bp, Homo sapiens
acttctgccccctgggttcaagagattctcctacctcagcctcctgcgtagccgggattacaggcacccgcaccatgcccagctaatttttgcattgttagcagagatgaggtttcgccaggttggccaggctggtcttgaactcctgacctcaagtgatccacccacctttgttggcctcccaaagtgctggaattacaggcaacatgtagcctttgagtctagcttcttccactagcctaattcatttgagattccactcgattctacttgagattcatccacattgttgaatgcacattcttttttatttgttctgtagcattctgttgtgcagctgtgccccagtttgtttatctattcactctcagttgtttccagttttaatgacatcttcag

SEQ ID NO: 77212 - DNA, 533 bp, Homo sapiens
tattttttgtagagatgggtcttactagataatcatagtttcttttactgtgcctttactacatatcagaaacagggccagcattttgcatgcattatctctaactctcctaacagcctgtaaggaagttgttactatcttcttttaacaaatgacagaacagaaaggttaaatgattttgctaaggccacacagccagaaggtggaggttataaggctcatacccttcccattaaagcagaataccttaggcttcatacttgggttaggttcatagtatcagtgaccagaatgccccttaccccaactttttcaaataccggtggtctcaaccaggttttggagagaaaccggacaacagccagtgcaaggttcagcgcctcgataacagtccaacgctcagaaactctactctaactggaggaagaccctccaacttctttttgctttcttcttactcaccttttaggggcagcatttaatgatatggaatattctttctgttacaggaataaagtgaagtaatttgtatt

SEQ ID NO: 77213 - DNA, 4520 bp, Homo sapiens
aggtcagttccggcgggtgacggtgcggacgggtcaggagcgtagaggcggcggcaaaatggcggcgcctgaggagcgggatctaacccaggagcagacagagaagctgctgcagtttcaggatctcactggcatcgaatctatggatcagtgtcgccataccttggaacagcataactggaacatagaggctgctgtacaggacagattgaatgagcaagagggcgtacctagtgttttcaacccacctccatcacgacccctgcaggttaatacagctgaccacaggatctacagctatgttgtctcaagacctcaaccaagggggctgcttggatggggttattacttgataatgcttccattccggtttacctattacacgatacttgatatatttaggtttgctcttcgttttatacggcctgaccctcgcagccgggtcactgaccccgttggggacattgtttcatttatgcactcttttgaagagaaatatgggagggcacaccctgtcttctaccagggaacgtacagccaggcacttaacgatgccaaaagggagcttcgctttcttttggtttatcttcatggagatgatcaccaggactctgatgagttttgtcgcaacacactctgtgcacctgaagttatttcactaataaacactaggatgctcttctgggcatgctctacaaacaaacctgagggatacagggtctcacaggctttacgagagaacacctatccattcctggccatgattatgctgaaggatcgaaggatgactgtggtgggacggctagaaggcctcattcaacctgatgacctcattaaccaactgacatttatcatggatgctaaccagacttacctggtgtcagaacgcctagaaagggaagaaagaaaccagacccaagtgctgagacaacagcaggatgaggcctacctggcctctctcagagctgaccaggagaaagaaagaaagaaacgggaggagcgggagcgtaagcggcggaaggaggaggaggtgcaacagcaaaagttggcagaggagagacggcggcagaatttacaggaggaaaaggaaaggaagttggaatgcctgccccctgaaccttcccctgatgaccctgaaagtgtcaagatcatcttcaaattacctaatgattctcgagtagagagacgattccacttttcacagtctctaacagtaatccacgacttcttattctccttgaaggaaagcccagaaaagtttcagattgaagccaattttcccaggcgagtgctgccctgcatcccttcagaggagtggcccaatccccctacgctacaggaggccggactcagccacacagaagttctttttgttcaggacctaactgacgaatgacatttttttcttcctgtcccctcctaccccagtccctaaaagaaatggggaaaaaagaaaacaacagcaagtcagaaaaaaaaaacaagagagagaaattcatattattattattattataatacaatattttttttaaaagactgctgcatccttaggaaggatcagaaaccatgctgcccgtaagagtcacaacctgtgtgtgcgcgcaaggttagcaacaaacgtacccgcttggcaagcccacccttcctgtggcctctgtgcacgcaccttccagtgaacagagactcttcaccttcgacccatccattgtcccagctgggaaggggacattcccactagttctcattcattcttgcttttatgaaaaataaaagtgaaaaacctccatcaaccagctacttgcagcatctcctgaggacttgcttctcctgcctctggggaagagagggaagagaaagcacagagcagagaagcagagatgttccttgaactgcccacaagttttcaataacttttatttctgttttgtaatgaccaaaggaatgaggctgacataggtatatatatatatttttttcctttatttgataaagagccaattctttaaacccatgagtttatgccctgggctccttagcccacaatagtgtaataaaagtgccccgggctggtttgtgcttatttctgccattgtccctctcacgttcccagagaggtcattctttttggtccaactcttgctgtcctttcttaccacctgtgcaccccacttggagcagtgggaggaaatctgggtttgtggccccacaaaggctgtatatgtaaagatacacctatgtatgtggtggaactcacctttacacacaactgcagcttttccttggagtctgtaccaggtggtggttatggggtctgaaccaaaggatagcagctcttcattcctcttctgacatgtgcatgctgctccccccagccctgggctttcctgaattgccaagcctggtgcctttccaaaggactagcagggcctgtggtggagccagcagaaccacaggagagtgccctgcctgtctcagtggaagtgtattattgttttaaggatagaaccagaggccttgaagggagccaagacagaactcccagcctgtgtaatctattggaaggcacattttcatttctgatgcagccaccttctggaggcagcttttatcctttctctctattgctatgttgaagtaatagggttttttttaacctctggatgtctcgtctgtggttgagtttatggtaatgggtacatgggtcaggccatgtattaacagatgccagtgcgctctgacaagtattccaaagtgttccgtagctagactggtgcaggctcgttgtaccactgcaaccgactgacgttactgtagttcctagaatgctgtgagggcggggggttcagatcaacataaagcctaacttgctggagttgtagtctcaaggctttctctcttgcttaactaaaacctaaggaccactgtttttggtagcaattatatggttactatccactgcagtcctcagttgttggggtaaatcccacatggcagagtaaggcaccccacagaaattaacttggagagcctgagaaattcccagtggccttggcatagctgtctagaacaccatctctaggaaaatttaattctgtccctggccagctattgttcttccacttcgttttctgctgtcccaaggccagatgagtggaatcaccatctgactgttgtcaataaaatgtatctggcgtgaacagcaggataacccatgttctccacataaggataaccttacgtgaaaccttcctgctgacaaccatgcagaggaatttttccacttaagtcagagccttcctccccatctggaattcacagctgttccctggcagcacacaggagggtattaaggacctttgtgaggctaggtacactgtccacacctctttggggaagttacgattttttttttccatcataattcagtctcttcttattctacagtgtgcactttatgcctctcgccttttgataatagttgttcagtgaaggaagtcagctgccagaatattaagaagggtctccctttatgtcagtacaactgttagggcggccttcccatttactttaggtttcaagaggattcaccggaagcacatgccccggtctagtcccatttgaaacagttctgctttactgagaccctaggccggtctccttgctgaccctagcgctgctgcctaggtgccatttcctttcctcctcagtcaaatacaggctgcacattttgtcacttaatgccagtacaatctgtgttactcctaaggacttttgggattttgatgagacctgcgagggagaagacactgagaagccagtgatctgcaagcatttgctcttgtttccacatcacctctgggatatttcagctgttgtttccaaatggcaaatcatcaactaaaagcacttgtttcaagttttgttctgcactcccacgactgaagttgtagattgagctgaataaccatgggaagtgaccaagcaaagacactcgattggagtcagttgaatatttgtaccctcagtggagcccttctggtcttttcttccacttctgcagaatttcctctagcaaatacttctttctccttgcttgcctccaccatgatatttgaataagagatggccagaggataacacttgtctcttaaaaactaagctaaaaagaacctagaaccttcaattgagcagttgtgaaaattgctaatggtgccaaggccaagcaaagagtttcagaaaatgactgagaaggagcgataacccccagaatgcaaaatcaggggcatcattatccggtgcttgaacaaggagctccgctctacaactggtttttttaggacttgtgaggaacacagcaacggaaatccatccacaaaggatgcagtgccccaacttgtactgcgcctgaatagtcatgtgataatttactgaagaaatctagtgtactttaaatttttttcataaaagtttacattgtattgtaggttaacattaaatgttttatagcaaaaacttca

SEQ ID NO: 77214 - DNA, 2082 bp, Homo sapiens
aggtcagttccggcgggtgacggtgcggacgggtcaggagcgtagaggcggcggcaaaatggcggcgcctgaggagcgggatctaacccaggagcagacagagaagctgctgcagtttcaggatctcactggcatcgaatctatggatcagtgtcgccataccttggaacagcataactggaacatagaggctgctgtacaggacagattgaatgagcaagagggcgtacctagtgttttcaacccacctccatcacgacccctgcaggttaatacagctgaccacaggatctacagctatgttgtctcaagacctcaaccaagggggctgcttggatggggttattacttgataatgcttccattccggtttacctattacacgatacttgatatatttaggtttgctcttcgttttatacggcctgaccctcgcagccgggtcactgaccccgttggggacattgtttcatttatgcactcttttgaagagaaatatgggagggcacaccctgtcttctaccagggaacgtacagccaggcacttaacgatgccaaaagggagcttcgctttcttttggtttatcttcatggagatgatcaccaggactctgatgagttttgtcgcaacacactctgtgcacctgaagttatttcactaataaacactaggatgctcttctgggcatgctctacaaacaaacctgagggatacagggtctcacaggctttacgagagaacacctatccattcctggccatgattatgctgaaggatcgaaggatgactgtggtgggacggctagaaggcctcattcaacctgatgacctcattaaccaactgacatttatcatggatgctaaccagacttacctggtgtcagaacgcctagaaagggaagaaagaaaccagacccaagtgctgagacaacagcaggatgaggcctacctggcctctctcagagctgaccaggagaaagaaagaaagaaacgggaggagcgggagcgtaagcggcggaaggaggaggaggtgcaacagcaaaagttggcagaggagagacggcggcagaatttacaggaggaaaaggaaaggaagttggaatgcctgccccctgaaccttcccctgatgaccctgaaagtgtcaagatcatcttcaaattacctaatgattctcgagtagagagacgattccacttttcacagtctctaacagtaatccacgacttcttattctccttgaaggaaagcccagaaaagtttcagattgaagccaattttcccaggcgagtgctgccctgcatcccttcagaggagtggcccaatccccctacgctacaggaggccggactcagccacacagaagttctttttgttcaggacctaactgacgaatgacatttttttcttcctgtcccctcctaccccagtccctaaaagaaatggggaaaaaagaaaacaacagcaagtcagaaaaaaaaaacaagagagagaaattcatattattattattattataatacaatattttttttaaaagactgctgcatccttaggaaggatcagaaaccatgctgcccgtaagagtcacaacctgtgtgtgcgcgcaaggttagcaacaaacgtacccgcttggcaagcccacccttcctgtggcctctgtgcacgcaccttccagtgaacagagactcttcaccttcgacccatccattgtcccagctgggaaggggacattcccactagttctcattcattcttgcttttatgaaaaataaaagtgaaaaacctccatcaaccagctacttgcagcatctcctgaggacttgcttctcctgcctctggggaagagagggaagagaaagcacagagcagagaagcagagatgttccttgaactgcccacaagttttcaataacttttatttctgttttgtaatgaccaaaggaatgaggctgacataggtatatatatatatttttttcctttatttgataaagagccaattctttaaacccatgagtttatgccctgggctccttagcccacaatagtgtaataaaagtgccccgggctggtttgtgctt

SEQ ID NO: 77215 - DNA, 4459 bp, Homo sapiens
aggtcagttccggcgggtgacggtgcggacgggtcaggagcgtagaggcggcggcaaaatggcggcgcctgaggagcgggatctaacccaggagcagacagagaagctgctgcagtttcaggatctcactggcatcgaatctatggatcagtgtcgccataccttggaacagcataactggaacatagaggctgctgtacaggacagattgaatgagcaagagggcgtacctagtgttttcaacccacctccatcacgacccctgcaggttaatacagctgaccacaggatctacagctatgttgtctcaagacctcaaccaagggggctgcttggatggggttattacttgataatgcttccattccggtttacctattacacgatacttgatatatttaggtttgctcttcgttttatacggcctgaccctcgcagccgggtcactgaccccgttggggacattgtttcatttatgcactcttttgaagagaaatatgggagggcacaccctgtcttctaccagggaacgtacagccaggcacttaacgatgccaaaagggagcttcgctttcttttggtttatcttcatggagatgatcaccaggactctgatgagttttgtcgcaacacactctgtgcacctgaagttatttcactaataaacactaggatgctcttctgggcatgctctacaaacaaacctgagggatacagggtctcacaggctttacgagagaacacctatccattcctggccatgattatgctgaaggatcgaaggatgactgtggtgggacggctagaaggcctcattcaacctgatgacctcattaaccaactgacatttatcatggatgctaaccagacttacctggtgtcagaacgcctagaaagggaagaaagaaaccagacccaagtgctgagacaacagcaggatgaggcctacctggcctctctcagagctgaccaggagaaagaaagaaagaaacgggaggagcgggagcgtaagcggcggaaggaggaggaggtgcaacagcaaaagttggcagaggagagacggcggcagaatttacaggaggaaaaggaaaggaagttggaatgcctgccccctgaaccttcccctgatgaccctgaaagtgtcaagatcatcttcaaattacctaatgattctcgagtagagagacgattccacttttcacagtctctaacagtaatccacgacttcttattctccttgaaggaaagcccagaaaagtttcagattgaagccaattttcccaggcgagtgctgccctgcatcccttcagaggagtggcccaatccccctacgctacaggaggccggactcagccacacagaagttctttttgttcaggacctaactgacgaatgacatttttttcttcctgtcccctcctaccccagtccctaaaagaaatggggaaaaaagaaaacaacagcaagtcagaaaaaaaaaacaagagagagaaattcatattattattattattataatacaatattttttttaaaagactgctgcatccttaggaaggatcagaaaccatgctgcccgtaagagtcacaacctgtgtgtgcgcgcaaggttagcaacaaacgtacccgcttggcaagcccacccttcctgtggcctctgtgcacgcaccttccagtgaacagagactcttcaccttcgacccatccattgtcccagctgggaaggggacattcccactagttctcattcattcttgcttttatgaaaaataaaagtgaaaaacctccatcaaccagctacttgcagcatctcctgaggacttgcttctcctgcctctggggaagagagggaagagaaagcacagagcagagaagcagagatgttccttgaactgcccacaagttttcaataacttttatttctgttttgtaatgaccaaaggaatgaggctgacataggtatatatatatatttttttcctttatttgataaagagccaattctttaaacccatgagtttatgccctgggctccttagcccacaatagtgtaataaaagtgccccgggctggtttgtgcttatttctgccattgtccctctcacgttcccagagaggtcattctttttggtccaactcttgctgtcctttcttaccacctgtgcaccccacttggagcagtgggaggaaatctgggtttgtggccccacaaaggctgtatatgtaaagatacacctatgtatgtggtggaactcacctttacacacaactgcagcttttccttggagtctgtaccaggtggtggttatggggtctgaaccaaaggatagcagctcttcattcctcttctgacatgtgcatgctgctccccccagccctgggctttcctgaattgccaagcctggtgcctgtctcagtggaagtgtattattgttttaaggatagaaccagaggccttgaagggagccaagacagaactcccagcctgtgtaatctattggaaggcacattttcatttctgatgcagccaccttctggaggcagcttttatcctttctctctattgctatgttgaagtaatagggttttttttaacctctggatgtctcgtctgtggttgagtttatggtaatgggtacatgggtcaggccatgtattaacagatgccagtgcgctctgacaagtattccaaagtgttccgtagctagactggtgcaggctcgttgtaccactgcaaccgactgacgttactgtagttcctagaatgctgtgagggcggggggttcagatcaacataaagcctaacttgctggagttgtagtctcaaggctttctctcttgcttaactaaaacctaaggaccactgtttttggtagcaattatatggttactatccactgcagtcctcagttgttggggtaaatcccacatggcagagtaaggcaccccacagaaattaacttggagagcctgagaaattcccagtggccttggcatagctgtctagaacaccatctctaggaaaatttaattctgtccctggccagctattgttcttccacttcgttttctgctgtcccaaggccagatgagtggaatcaccatctgactgttgtcaataaaatgtatctggcgtgaacagcaggataacccatgttctccacataaggataaccttacgtgaaaccttcctgctgacaaccatgcagaggaatttttccacttaagtcagagccttcctccccatctggaattcacagctgttccctggcagcacacaggagggtattaaggacctttgtgaggctaggtacactgtccacacctctttggggaagttacgattttttttttccatcataattcagtctcttcttattctacagtgtgcactttatgcctctcgccttttgataatagttgttcagtgaaggaagtcagctgccagaatattaagaagggtctccctttatgtcagtacaactgttagggcggccttcccatttactttaggtttcaagaggattcaccggaagcacatgccccggtctagtcccatttgaaacagttctgctttactgagaccctaggccggtctccttgctgaccctagcgctgctgcctaggtgccatttcctttcctcctcagtcaaatacaggctgcacattttgtcacttaatgccagtacaatctgtgttactcctaaggacttttgggattttgatgagacctgcgagggagaagacactgagaagccagtgatctgcaagcatttgctcttgtttccacatcacctctgggatatttcagctgttgtttccaaatggcaaatcatcaactaaaagcacttgtttcaagttttgttctgcactcccacgactgaagttgtagattgagctgaataaccatgggaagtgaccaagcaaagacactcgattggagtcagttgaatatttgtaccctcagtggagcccttctggtcttttcttccacttctgcagaatttcctctagcaaatacttctttctccttgcttgcctccaccatgatatttgaataagagatggccagaggataacacttgtctcttaaaaactaagctaaaaagaacctagaaccttcaattgagcagttgtgaaaattgctaatggtgccaaggccaagcaaagagtttcagaaaatgactgagaaggagcgataacccccagaatgcaaaatcaggggcatcattatccggtgcttgaacaaggagctccgctctacaactggtttttttaggacttgtgaggaacacagcaacggaaatccatccacaaaggatgcagtgccccaacttgtactgcgcctgaatagtcatgtgataatttactgaagaaatctagtgtactttaaatttttttcataaaagtttacattgtattgtaggttaacattaaatgttttatagcaaaaacttca

SEQ ID NO: 77216 - DNA, 4946 bp, Homo sapiens
aggtcagttccggcgggtgacggtgcggacgggtcaggagcgtagaggcggcggcaaaatggcggcgcctgaggagcgggatctaacccaggagcagacagagaagctgctgcagtttcaggatctcactggcatcgaatctatggatcagtgtcgccataccttggaacagcataactggaacatagaggctgctgtacaggacagattgaatgagcaagagggcgtacctagtgttttcaacccacctccatcacgacccctgcaggttaatacagctgaccacaggatctacagctatgttgtctcaagacctcaaccaagggggctgcttggatggggttattacttgataatgcttccattccggtttacctattacacgatacttgatatatttaggtttgctcttcgttttatacggcctgaccctcgcagccgggtcactgaccccgttggggacattgtttcatttatgcactcttttgaagagaaatatgggagggcacaccctgtcttctaccagggaacgtacagccaggcacttaacgatgccaaaagggagcttcgctttcttttggtttatcttcatggagatgatcaccaggactctgatgagttttgtcgcaacacactctgtgcacctgaagttatttcactaataaacactaggatgctcttctgggcatgctctacaaacaaacctgagggatacagggtctcacaggctttacgagagaacacctatccattcctggccatgattatgctgaaggatcgaaggatgactgtggtgggacggctagaaggcctcattcaacctgatgacctcattaaccaactgacatttatcatggatgctaaccagacttacctggtgtcagaacgcctagaaagggaagaaagaaaccagacccaagtgctgagacaacagcaggatgaggcctacctggcctctctcagagctgaccaggagaaagaaagaaagaaacgggaggagcgggagcgtaagcggcggaaggaggaggaggtgcaacagcaaaagttggcagaggagagacggcggcagaatttacaggaggaaaaggaaaggaagttggaatgcctgccccctgaaccttcccctgatgaccctgaaagtgtcaagatcatcttcaaattacctaatgattctcgagtagagagacgattccacttttcacagtctctaacagtaatccacgacttcttattctccttgaaggaaagcccagaaaagtttcagattgaagccaattttcccaggcgagtgctgccctgcatcccttcagaggagtggcccaatccccctacgctacaggaggccggactcagccacacagaagttctttttgttcaggacctaactgacgaatgacatttttttcttcctgtcccctcctaccccagtccctaaaagaaatggggaaaaaagaaaacaacagcaagtcagaaaaaaaaaacaagagagagaaattcatattattattattattataatacaatattttttttaaaagactgctgcatccttaggaaggatcagaaaccatgctgcccgtaagagtcacaacctgtgtgtgcgcgcaaggttagcaacaaacgtacccgcttggcaagcccacccttcctgtggcctctgtgcacgcaccttccagtgaacagagactcttcaccttcgacccatccattgtcccagctgggaaggggacattcccactagttctcattcattcttgcttttatgaaaaataaaagtgaaaaacctccatcaaccagctacttgcagcatctcctgaggacttgcttctcctgcctctggggaagagagggaagagaaagcacagagcagagaagcagagatgttccttgaactgcccacaagttttcaataacttttatttctgttttgtaatgaccaaaggaatgaggctgacataggtatatatatatatttttttcctttatttgataaagagccaattctttaaacccatgagtttatgccctgggctccttagcccacaatagtgtaataaaagtgccccgggctggtttgtgcttatttctgccattgtccctctcacgttcccagagaggtcattctttttggtccaactcttgctgtcctttcttaccacctgtgcaccccacttggagcagtgggaggaaatctgggtttgtggccccacaaaggctgtatatgtaaagatacacctatgtatgtggtggaactcacctttacacacaactgcagcttttccttggagtctgtaccaggtggtggttatggggtctgaaccaaaggatagcagctcttcattcctcttctgacatgtgcatgctgctccccccagccctgggctttcctgaattgccaagcctggtgcctttccaaaggactagcagggcctgtggtggagccagcagaaccacaggagagtgccctgcctgtctcagtggaagtgtattattgttttaaggatagaaccagaggccttgaagggagccaagacagaactcccagcctgtgtaatctattggaaggcacattttcatttctgatgcagccaccttctggaggcagcttttatcctttctctctattgctatgttgaagtaatagggttttttttaacctctggatgtctcgtctgtggttgagtttatggtaatgggtacatgggtcaggccatgtattaacagatgccagtgcgctctgacaagtattccaaagtgttccgtagctagactggtgcaggctcgttgtaccactgcaaccgactgacgttactgtagttcctagaatgctgtgagggcggggggttcagatcaacataaagcctaacttgctggagttgtagtctcaaggctttctctcttgcttaactaaaacctaaggaccactgtttttggtagcaattatatggttactatccactgcagtcctcagttgttggggtaaatcccacatggcagagtaaggcaccccacagaaattaacttggagagcctgagaaattcccagtggccttggcatagctgtctagaacaccatctctaggaaaatttaattctgtccctggccagctattgttcttccacttcgttttctgctgtcccaaggccagatgagtggaatcaccatctgactgttgtcaataaaatgtatctggcgtgaacagcaggataacccatgttctccacataaggataaccttacgtgaaaccttcctgctgacaaccatgcagaggaatttttccacttaagtcagagccttcctccccatctggaattcacagctgttccctggcagcacacaggagggtattaaggacctttgtgaggctaggtacactgtccacacctctttggggaagttacgattttttttttccatcataattcagtctcttcttattctacagtgtgcactttatgcctctcgccttttgataatagttgttcagtgaaggaagtcagctgccagaatattaagaagggtctccctttatgtcagtacaactgttagggcggccttcccatttactttaggtttcaagaggattcaccggaagcacatgccccggtctagtcccatttgaaacagttctgctttactgagaccctaggccggtctccttgctgaccctagcgctgctgcctaggtgccatttcctttcctcctcagtcaaatacaggctgcacattttgtcacttaatgccagtacaatctgtgttactcctaaggacttttgggattttgatgagacctgcgagggagaagacactgagaagccagtgatctgcaagcatttgctcttgtttccacatcacctctgggatatttcagctgttgtttccaaatggcaaatcatcaactaaaagcacttgtttcaagttttgttctgcactcccacgactgaagttgtagattgagctgaataaccatgggaagtgaccaagcaaagacactcgattggagtcagttgaatatttgtaccctcagtggagcccttctggtcttttcttccacttctgcagaatttcctctagcaaatacttctttctccttgcttgcctccaccatgatatttgaataagagatggccagaggataacacttgtctcttaaaaactaagctaaaaagaacctagaaccttcaattgagcagttgtgaaaattgctaatggtgccaaggccaagcaaagagtttcagaaaatgactgagaaggagcgataacccccagaatgcaaaatcaggggcatcattatccggtgcttgaacaaggagctccgctctacaactggtttttttaggacttgtgaggaacacagcaacggaaatccatccacaaaggatgcagtgccccaacttgtactgcgcctgaatagtcatgtgataatttactgaagaaatctagtgtactttaaatttttttcataaaagtttacattgtattgtaggttaacattaaatgttttatagcaaaaacttcaaaaaaaaaaaaaaaaaaaaaaaaaaaaaaaaaaaaggggggggggcctaaaagatttcccccgggggggcccattttgggttcccccgattttttttggtcacaaggtggtccccttgtaggggaacgggttattataattaagcataagggaacgggggcggggatgttttaacaccacgttcgggggcggggaaaacacgctgtctacgctggggacacttcgtgggggaaggagaaaccctctaccttcgtgggggggcggcgcacctattgtgggggcaacactccctccagggaaatttaagggtccagggggaaattataacatttctcagggtgcttatggtggtgttcaaccacacacggtaaataggtggggggatgaaatatttggccacgggacatagtttgggaaagatttttg

SEQ ID NO: 77217 - DNA, 4418 bp, Homo sapiens
aggtcagttccggcgggtgacggtgcggacgggtcaggagcgtagaggcggcggcaaaatggcggcgcctgaggagcgggatctaacccaggagcagacagagaagctgctgcagtttcaggatctcactggcatcgaatctatggatcagtgtcgccataccttggaacagcataactggaacatagaggctgctgtacaggacagattgaatgagcaagagggcgtacctagtgttttcaacccacctccatcacgacccctgcaggttaatacagctgaccacaggatctacagctatgttgtctcaagacctcaaccaagggggctgcttggatggggttattacttgataatgcttccattccggtttacctattacacgatacttgatatatttaggtttgctcttcgttttatacggcctgaccctcgcagccgggtcactgaccccgttggggacattgtttcatttatgcactcttttgaagagaaatatgggagggcacaccctgtcttctaccagggaacgtacagccaggcacttaacgatgccaaaagggagcttcgctttcttttggtttatcttcatggagatgatcaccaggactctgatgagttttgtcgcaacacactctgtgcacctgaagttatttcactaataaacactaggatgctcttctgggcatgctctacaaacaaacctgagggatacagggtctcacaggctttacgagagaacacctatccattcctggccatgattatgctgaaggatcgaaggatgactgtggtgggacggctagaaggcctcattcaacctgatgacctcattaaccaactgacatttatcatggatgctaaccagacttacctggtgtcagaacgcctagaaagggaagaaagaaaccagacccaagtgctgagacaacagcaggatgaggcctacctggcctctctcagagctgaccaggagaaagaaagaaagaaacgggaggagcgggagcgtaagcggcggaaggaggaggaggtgcaacagcaaaagttggcagaggagagacggcggcagaatttacaggaggaaaaggaaaggaagttggaatgcctgccccctgaaccttcccctgatgaccctgaaagtgtcaagatcatcttcaaattacctaatgattctcgagtagagagacgattccacttttcacagtctctaacagtaatccacgacttcttattctccttgaaggaaagcccagaaaagtttcagattgaagccaattttcccaggcgagtgctgccctgcatcccttcagaggagtggcccaatccccctacgctacaggaggccggactcagccacacagaagttctttttgttcaggacctaactgacgaatgacatttttttcttcctgtcccctcctaccccagtccctaaaagaaatggggaaaaaagaaaacaacagcaagtcagaaaaaaaaaacaagagagagaaattcatattattattattattataatacaatattttttttaaaagactgctgcatccttaggaaggatcagaaaccatgctgcccgtaagagtcacaacctgtgtgtgcgcgcaaggttagcaacaaacgtacccgcttggcaagcccacccttcctgtggcctctgtgcacgcaccttccagtgaacagagactcttcaccttcgacccatccattgtcccagctgggaaggggacattcccactagttctcattcattcttgcttttatgaaaaataaaagtgaaaaacctccatcaaccagctacttgcagcatctcctgaggacttgcttctcctgcctctggggaagagagggaagagaaagcacagagcagagaagcagagatgttccttgaactgcccacaagttttcaataacttttatttctgttttgtaatgaccaaaggaatgaggctgacataggtatatatatatatttttttcctttatttgataaagagccaattctttaaacccatgagtttatgccctgggctccttagcccacaatagtgtaataaaagtgccccgggctggtttgtgcttatttctgccattgtccctctcacgttcccagagaggtcattctttttggtccaactcttgctgtcctttcttaccacctgtgcaccccacttggagcagtgggaggaaatctgggtttgtggccccacaaaggctgtatatgtaaagatacacctatgtatgtggtggaactcacctttacacacaactgcagcttttccttggagtctgtaccaggtggtggttatggggtctgaaccaaaggatagcagctcttcattcctcttctgacatgtgcatgctgctccccccagccctgggctttcctgaattgccaagcctggtgcctttccaaaggactagcagggcctgtggtggagccagcagaaccacaggagagtgccctgcctgtctcagtggaagtgtattattgttttaaggatagaaccagaggccttgaagggagccaagacagaactcccagcctgtgtaatctattggaaggcacattttcatttctgatgcagccaccttctggaggcagcttttatcctttctctctattgctatgttgaagtaatagggttttttttaacctctggatgtctcgtctgtggttgagtttatggtaatgggtacatgggtcaggccatgtattaacagatgccagtgcgctctgacaagtattccaaagtgttccgtagctagactggtgcaggctcgttgtaccactgcaaccgactgacgttactgtagttcctagaatgctgtgagggcggggggttcagatcaacataaagcctaacttgctggagttgtagtctcaaggctttctctcttgcttaactaaaacctaaggaccactgtttttggtagcaattatatggttactatccactgcagtcctcagttgttggggtaaatcccacatggcagagtaaggcaccccacagaaattaacttggagagcctgagaaattcccagtggccttggcatagctgtctagaacaccatctctaggaaaatttaattctgtccctggccagctattgttcttccacttcgttttctgctgtcccaaggccagatgagtggaatcaccatctgactgttgtcaataaaatgtatctggcgtgaacagcaggataacccatgttctccacataaggataaccttacgtgaaaccttcctgctgacaaccatgcagaggaatttttccacttaagtcagagccttcctccccatctggaattcacagctgttccctggcagcacacaggagggtattaaggacctttgtgaggctaggtacactgtccacacctctttggggaagttacgattttttttttccatcataattcagtctcttcttattctacagtgtgcactttatgcctctcgccttttgataatagttgttcagtgaaggaagtcagctgccagaatattaagaagggtctccctttatgtcagtacaactgttagggcggccttcccatttactttaggtttcaagaggattcaccggaagcacatgccccggtctagtcccatttgaaacagttctgctttactgagaccctaggccggtctccttgctgaccctagcgctgctgcctaggtgccatttcctttcctcctcagtcaaatacaggctgcacattttgtcacttaatgccagtacaatctgtgttactcctaaggacttttgggattttgatgagacctgcgagggagaagacactgagaagccagtgatctgcaagcatttgctcttgtttccacatcacctctgggatatttcagctgttgtttccaaatggcaaatcatcaactaaaagcacttgtttcaagttttgttctgcactcccacgactgaagttgtagattgagagaatttcctctagcaaatacttctttctccttgcttgcctccaccatgatatttgaataagagatggccagaggataacacttgtctcttaaaaactaagctaaaaagaacctagaaccttcaattgagcagttgtgaaaattgctaatggtgccaaggccaagcaaagagtttcagaaaatgactgagaaggagcgataacccccagaatgcaaaatcaggggcatcattatccggtgcttgaacaaggagctccgctctacaactggtttttttaggacttgtgaggaacacagcaacggaaatccatccacaaaggatgcagtgccccaacttgtactgcgcctgaatagtcatgtgataatttactgaagaaatctagtgtactttaaatttttttcataaaagtttacattgtattgtaggttaacattaaatgttttatagcaaaaacttca

SEQ ID NO: 77218 - DNA, 4976 bp, Homo sapiens
aggtcagttccggcgggtgacggtgcggacgggtcaggagcgtagaggcggcggcaaaatggcggcgcctgaggagcgggatctaacccaggagcagacagagaagctgctgcagtttcaggatctcactggcatcgaatctatggatcagtgtcgccataccttggaacagcataactggaacatagaggctgctgtacaggacagattgaatgagcaagagggcgtacctagtgttttcaacccacctccatcacgacccctgcaggttaatacagctgaccacaggatctacagctatgttgtctcaagacctcaaccaagggggctgcttggatggggttattacttgataatgcttccattccggtttacctattacacgatacttgatatatttaggtttgctcttcgttttatacggcctgaccctcgcagccgggtcactgaccccgttggggacattgtttcatttatgcactcttttgaagagaaatatgggagggcacaccctgtcttctaccagggaacgtacagccaggcacttaacgatgccaaaagggagcttcgctttcttttggtttatcttcatggagatgatcaccaggactctgatgagttttgtcgcaacacactctgtgcacctgaagttatttcactaataaacactaggatgctcttctgggcatgctctacaaacaaacctgagggatacagggtctcacaggctttacgagagaacacctatccattcctggccatgattatgctgaaggatcgaaggatgactgtggtgggacggctagaaggcctcattcaacctgatgacctcattaaccaactgacatttatcatggatgctaaccagacttacctggtgtcagaacgcctagaaagggaagaaagaaaccagacccaagtgctgagacaacagcaggatgaggcctacctggcctctctcagagctgaccaggagaaagaaagaaagaaacgggaggagcgggagcgtaagcggcggaaggaggaggaggtgcaacagcaaaagttggcagaggagagacggcggcagaatttacaggaggaaaaggaaaggaagttggaatgcctgccccctgaaccttcccctgatgaccctgaaagtgtcaagatcatcttcaaattacctaatgattctcgagtagagagacgattccacttttcacagtctctaacagtaatccacgacttcttattctccttgaaggaaagcccagaaaagtttcagattgaagccaattttcccaggcgagtgctgccctgcatcccttcagaggagtggcccaatccccctacgctacaggaggccggactcagccacacagaagttctttttgttcaggacctaactgacgaatgacatttttttcttcctgtcccctcctaccccagtccctaaaagaaatggggaaaaaagaaaacaacagcaagtcagaaaaaaaaaacaagagagagaaattcatattattattattattataatacaatattttttttaaaagactgctgcatccttaggaaggatcagaaaccatgctgcccgtaagagtcacaacctgtgtgtgcgcgcaaggttagcaacaaacgtacccgcttggcaagcccacccttcctgtggcctctgtgcacgcaccttccagtgaacagagactcttcaccttcgacccatccattgtcccagctgggaaggggacattcccactagttctcattcattcttgcttttatgaaaaataaaagtgaaaaacctccatcaaccagctacttgcagcatctcctgaggacttgcttctcctgcctctggggaagagagggaagagaaagcacagagcagagaagcagagatgttccttgaactgcccacaagttttcaataacttttatttctgttttgtaatgaccaaaggaatgaggctgacataggtatatatatatatttttttcctttatttgataaagagccaattctttaaacccatgagtttatgccctgggctccttagcccacaatagtgtaataaaagtgccccgggctggtttgtgcttatttctgccattgtccctctcacgttcccagagaggtcattctttttggtccaactcttgctgtcctttcttaccacctgtgcaccccacttggagcagtgggaggaaatctgggtttgtggccccacaaaggctgtatatgtaaagatacacctatgtatgtggtggaactcacctttacacacaactgcagcttttccttggagtctgtaccaggtggtggttatggggtctgaaccaaaggatagcagctcttcattcctcttctgacatgtgcatgctgctccccccagccctgggctttcctgaattgccaagcctggtgcctttccaaaggactagcagggcctgtggtggagccagcagaaccacaggagagtgccctgcctgtctcagtggaagtgtattattgttttaaggatagaaccagaggccttgaagggagccaagacagaactcccagcctgtgtaatctattggaaggcacattttcatttctgatgcagccaccttctggaggcagcttttatcctttctctctattgctatgttgaagtaatagggttttttttaacctctggatgtctcgtctgtggttgagtttatggtaatgggtacatgggtcaggccatgtattaacagatgccagtgcgctctgacaagtattccaaagtgttccgtagctagactggtgcaggctcgttgtaccactgcaaccgactgacgttactgtagttcctagaatgctgtgagggcggggggttcagatcaacataaagcctaacttgctggagttgtagtctcaaggctttctctcttgcttaactaaaacctaaggaccactgtttttggtagcaattatatggttactatccactgcagtcctcagttgttggggtaaatcccacatggcagagtaaggcaccccacagaaattaacttggagagcctgagaaattcccagtggccttggcatagctgtctagaacaccatctctaggaaaatttaattctgtccctggccagctattgttcttccacttcgttttctgctgtcccaaggccagatgagtggaatcaccatctgactgttgtcaataaaatgtatctggcgtgaacagcaggataacccatgttctccacataaggataaccttacgtgaaaccttcctgctgacaaccatgcagaggaatttttccacttaagtcagagccttcctccccatctggaattcacagctgttccctggcagcacacaggagggtattaaggacctttgtgaggctaggtacactgtccacacctctttggggaagttacgattttttttttccatcataattcagtctcttcttattctacagtgtgcactttatgcctctcgccttttgataatagttgttcagtgaaggaagtcagctgccagaatattaagaagggtctccctttatgtcagtacaactgttagggcggccttcccatttactttaggtttcaagaggattcaccggaagcacatgccccggtctagtcccatttgaaacagttctgctttactgagaccctaggccggtctccttgctgaccctagcgctgctgcctaggtgccatttcctttcctcctcagtcaaatacaggctgcacattttgtcacttaatgccagtacaatctgtgttactcctaaggacttttgggattttgatgagacctgcgagggagaagacactgagaagccagtgatctgcaagcatttgctcttgtttccacatcacctctgggatatttcagctgttgtttccaaatggcaaatcatcaactaaaagcacttgtttcaagttttgttctgcactcccacgactgaagttgtagattgagctgaataaccatgggaagtgaccaagcaaagacactcgattggagtcagttgaatatttgtaccctcagtggagcccttctggtcttttcttccacttctgcagaatttcctctagcaaatacttctttctccttgcttgcctccaccatgatatttgaataagagatggccagaggataacacttgtctcttaaaaactaagctaaaaagaacctagaaccttcaattgagcagttgtgaaaattgctaatggtgccaaggccaagcaaagagtttcagaaaatgactgagaaggagcgataacccccagaatgcaaaatcaggggcatcattatccggtgcttgaacaaggagctccgctctacaactggtttttttaggacttgtgaggaacacagcaacggaaatccatccacaaaggatgcagtgccccaacttgtactgcgcctgaatagtcatgtgataatttactgaagaaatctagtgtactttaaatttttttcataaaagtttacattgtattgtaggttaacattaaatgttttatagcaaaaacttcataacaggctgtggatctttctgtgtgggaccgatgtggtagataattttctatgtgtgaaggagaggttgaaaaacaccgggagggaacagcatggcatggcattgccaagaaggaagggagagtcaaagagaaggatggagttaggtcttctctgttgtatccctgtggaaaaatagcaacttagtatgatggagagagagagcagacaggcctgggttcaaatttgggctctctagtttgtcaggtttgcaacctcgggcaaattctctagcttccctgaacttgaatttccccaactataaatgaagataatgccgtccacctcaggataggtttatagattcaatcaagtaaatgtatatgaggctcctgatatgtagatgtcattaagtgtttgttccccttctatgggagtgtattttgtaagaatattttcttggaataacattttctt

SEQ ID NO: 77219 - DNA, 4077 bp, Homo sapiens
  misc_feature (4076)..(4076): n is a, c, g, or t
aggtcagttccggcgggtgacggtgcggacgggtcaggagcgtagaggcggcggcaaaatggcggcgcctgaggagcgggatctaacccaggagcagacagagaagctgctgcagtttcaggatctcactggcatcgaatctatggatcagtgtcgccataccttggaacagcataactggaacatagaggctgctgtacaggacagattgaatgagcaagagggcgtacctagtgttttcaacccacctccatcacgacccctgcaggttaatacagctgaccacaggatctacagctatgttgtctcaagacctcaaccaagggggctgcttggatggggttattacttgataatgcttccattccggtttacctattacacgatacttgatatatttaggtttgctcttcgttttatacggcctgaccctcgcagccgggtcactgaccccgttggggacattgtttcatttatgcactcttttgaagagaaatatgggagggcacaccctgtcttctaccagggaacgtacagccaggcacttaacgatgccaaaagggagcttcgctttcttttggtttatcttcatggagatgatcaccaggactctgatgagttttgtcgcaacacactctgtgcacctgaagttatttcactaataaacactaggatgctcttctgggcatgctctacaaacaaacctgagggatacagggtctcacaggctttacgagagaacacctatccattcctggccatgattatgctgaaggatcgaaggatgactgtggtgggacggctagaaggcctcattcaacctgatgacctcattaaccaactgacatttatcatggatgctaaccagacttacctggtgtcagaacgcctagaaagggaagaaagaaaccagacccaagtgctgagacaacagcaggatgaggcctacctggcctctctcagagctgaccaggagaaagaaagaaagaaacgggaggagcgggagcgtaagcggcggaaggaggaggaggtgcaacagcaaaagttggcagaggagagacggcggcagaatttacaggaggaaaaggaaaggaagttggaatgcctgccccctgaaccttcccctgatgaccctgaaagtgtcaagatcatcttcaaattacctaatgattctcgagtagagagacgattccacttttcacagtctctaacagtaatccacgacttcttattctccttgaaggaaagcccagaaaagtttcagattgaagccaattttcccaggcgagtgctgccctgcatcccttcagaggagtggcccaatccccctacgctacaggaggccggactcagccacacagaagttctttttgttcaggacctaactgacgaatgacatttttttcttcctgtcccctcctaccccagtccctaaaagaaatggggaaaaaagaaaacaacagcaagtcagaaaaaaaaaacaagagagagaaattcatattattattattattataatacaatattttttttaaaagactgctgcatccttaggaaggatcagaaaccatgctgcccgtaagagtcacaacctgtgtgtgcgcgcaaggttagcaacaaacgtacccgcttggcaagcccacccttcctgtggcctctgtgcacgcaccttccagtgaacagagactcttcaccttcgacccatccattgtcccagctgggaaggggacattcccactagttctcattcattcttgcttttatgaaaaataaaagtgaaaaacctccatcaaccagctacttgcagcatctcctgaggacttgcttctcctgcctctggggaagagagggaagagaaagcacagagcagagaagcagagatgttccttgaactgcccacaagttttcaataacttttatttctgttttgtaatgaccaaaggaatgaggctgacataggtatatatatatatttttttcctttatttgataaagagccaattctttaaacccatgagtttatgccctgggctccttagcccacaatagtgtaataaaagtgccccgggctggtttgtgcttatttctgccattgtccctctcacgttcccagagaggtcattctttttggtccaactcttgctgtcctttcttaccacctgtgcaccccacttggagcagtgggaggaaatctgggtttgtggccccacaaaggctgtatatgtaaagatacacctatgtatgtggtggaactcacctttacacacaactgcagcttttccttggagtctgtaccaggtggtggttatggggtctgaaccaaaggatagcagctcttcattcctcttctgacatgtgcatgctgctccccccagccctgggctttcctgaattgccaagcctggtgcctttccaaaggactagcagggcctgtggtggagccagcagaaccacaggagagtgccctgcctgtctcagtggaagtgtattattgttttaaggatagaaccagaggccttgaagggagccaagacagaactcccagcctgtgtaatctattggaaggcacattttcatttctgatgcagccaccttctggaggcagcttttatcctttctctctattgctatgttgaagtaatagggttttttttaacctctggatgtctcgtctgtggttgagtttatggtaatgggtacatgggtcaggccatgtattaacagatgccagtgcgctctgacaagtattccaaagtgttccgtagctagactggtgcaggctcgttgtaccactgcaaccgactgacgttactgtagttcctagaatgctgtgagggcggggggttcagatcaacataaagcctaacttgctggagttgtagtctcaaggctttctctcttgcttaactaaaacctaaggaccactgtttttggtagcaattatatggttactatccactgcagtcctcagttgttggggtaaatcccacatggcagagtaaggcaccccacagaaattaacttggagagcctgagaaattcccagtggccttggcatagctgtctagaacaccatctctaggaaaatttaattctgtccctggccagctattgttcttccacttcgttttctgctgtcccaaggccagatgagtggaatcaccatctgactgttgtcaataaaatgtatctggcgtgaacagcaggataacccatgttctccacataaggataaccttacgtgaaaccttcctgctgacaaccatgcagaggaatttttccacttaagtcagagccttcctccccatctggaattcacagctgttccctggcagcacacaggagggtattaaggacctttgtgaggctaggtacactgtccacacctctttggggaagttacgattttttttttccatcataattcagtctcttcttattctacagtgtgcactttatgcctctcgccttttgataatagttgttcagtgaaggaagtcagctgccagaatattaagaagggtctccctttatgtcagtacaactgttagggcggccttcccatttactttaggtttcaagaggattcaccggaagcacatgccccggtctagtcccatttgaaacagttctgctttactgagaccctaggccggtctccttgctgaccctagcgctgctgcctaggtgccatttcctttcctcctcagtcaaatacaggctgcacattttgtcacttaatgccagtacaatctgtgttactcctaaggacttttgggattttgatgagacctgcgagggagaagacactgagaagccagtgatctgcaagcatttgctcttgtttccacatcacctctgggatattcagtgtgtcccaatgcaatctcataaagcctgttcagtgtgttggctccagatgatttgtgatgggccatacctggagggcagagacgagggcaggaattgacccgggcctggtttcatgggatctcgaaatttccgggcccattaaagggaacgtttaaaacaaacgggtgggccaaatagcacgctgttttctcgccagatatttng

SEQ ID NO: 77220 - DNA, 3989 bp, Homo sapiens
aggtcagttccggcgggtgacggtgcggacgggtcaggagcgtagaggcggcggcaaaatggcggcgcctgaggagcgggatctaacccaggagcagacagagaagctgctgcagtttcaggatctcactggcatcgaatctatggatcagtgtcgccataccttggaacagcataactggaacatagaggctgctgtacaggacagattgaatgagcaagagggcgtacctagtgttttcaacccacctccatcacgacccctgcaggttaatacagctgaccacaggatctacagctatgttgtctcaagacctcaaccaagggggctgcttggatggggttattacttgataatgcttccattccggtttacctattacacgatacttgatatatttaggtttgctcttcgttttatacggcctgaccctcgcagccgggtcactgaccccgttggggacattgtttcatttatgcactcttttgaagagaaatatgggagggcacaccctgtcttctaccagggaacgtacagccaggcacttaacgatgccaaaagggagcttcgctttcttttggtttatcttcatggagatgatcaccaggactctgatgagttttgtcgcaacacactctgtgcacctgaagttatttcactaataaacactaggatgctcttctgggcatgctctacaaacaaacctgagggatacagggtctcacaggctttacgagagaacacctatccattcctggccatgattatgctgaaggatcgaaggatgactgtggtgggacggctagaaggcctcattcaacctgatgacctcattaaccaactgacatttatcatggatgctaaccagacttacctggtgtcagaacgcctagaaagggaagaaagaaaccagacccaagtgctgagacaacagcaggatgaggcctacctggcctctctcagagctgaccaggagaaagaaagaaagaaacgggaggagcgggagcgtaagcggcggaaggaggaggaggtgcaacagcaaaagttggcagaggagagacggcggcagaatttacaggaggaaaaggaaaggaagttggaatgcctgccccctgaaccttcccctgatgaccctgaaagtgtcaagatcatcttcaaattacctaatgattctcgagtagagagacgattccacttttcacagtctctaacagtaatccacgacttcttattctccttgaaggaaagcccagaaaagtttcagattgaagccaattttcccaggcgagtgctgccctgcatcccttcagaggagtggcccaatccccctacgctacaggaggccggactcagccacacagaagttctttttgttcaggacctaactgacgaatgacatttttttcttcctgtcccctcctaccccagtccctaaaagaaatggggaaaaaagaaaacaacagcaagtcagaaaaaaaaaacaagagagagaaattcatattattattattattataatacaatattttttttaaaagactgctgcatccttaggaaggatcagaaaccatgctgcccgtaagagtcacaacctgtgtgtgcgcgcaaggttagcaacaaacgtacccgcttggcaagcccacccttcctgtggcctctgtgcacgcaccttccagtgaacagagactcttcaccttcgacccatccattgtcccagctgggaaggggacattcccactagttctcattcattcttgcttttatgaaaaataaaagtgaaaaacctccatcaaccagctacttgcagcatctcctgaggacttgcttctcctgcctctggggaagagagggaagagaaagcacagagcagagaagcagagatgttccttgaactgcccacaagttttcaataacttttatttctgttttgtaatgaccaaaggaatgaggctgacataggtatatatatatatttttttcctttatttgataaagagccaattctttaaacccatgagtttatgccctgggctccttagcccacaatagtgtaataaaagtgccccgggctggtttgtgcttatttctgccattgtccctctcacgttcccagagaggtcattctttttggtccaactcttgctgtcctttcttaccacctgtgcaccccacttggagcagtgggaggaaatctgggtttgtggccccacaaaggctgtatatgtaaagatacacctatgtatgtggtggaactcacctttacacacaactgcagcttttccttggagtctgtaccaggtggtggttatggggtctgaaccaaaggatagcagctcttcattcctcttctgacatgtgcatgctgctccccccagccctgggctttcctgaattgccaagcctggtgcctttccaaaggactagcagggcctgtggtggagccagcagaaccacaggagagtgccctgcctgtctcagtggaagtgtattattgttttaaggatagaaccagaggccttgaagggagccaagacagaactcccagcctgtgtaatctattggaaggcacattttcatttctgatgcagccaccttctggaggcagcttttatcctttctctctattgctatgttgaagtaatagggttttttttaacctctggatgtctcgtctgtggttgagtttatggtaatgggtacatgggtcaggccatgtattaacagatgccagtgcgctctgacaagtattccaaagtgttccgtagctagactggtgcaggctcgttgtaccactgcaaccgactgacgttactgtagttcctagaatgctgtgagggcggggggttcagatcaacataaagcctaacttgctggagttgtagtctcaaggctttctctcttgcttaactaaaacctaaggaccactgtttttggtagcaattatatggttactatccactgcagtcctcagttgttggggtaaatcccacatggcagagtaaggcaccccacagaaattaacttggagagcctgagaaattcccagtggccttggcatagctgtctagaacaccatctctaggaaaatttaattctgtccctggccagctattgttcttccacttcgttttctgctgtcccaaggccagatgagtggaatcaccatctgactgttgtcaataaaatgtatctggcgtgaacagcaggataacccatgttctccacataaggataaccttacgtgaaaccttcctgctgacaaccatgcagaggaatttttccacttaagtcagagccttcctccccatctggaattcacagctgttccctggcagcacacaggagggtattaaggacctttgtgaggctaggtacactgtccacacctctttggggaagttacgattttttttttccatcataattcagtctcttcttattctacagtgtgcactttatgcctctcgccttttgataatagttgttcagtgaaggaagtcagctgccagaatattaagaagggtctccctttatgtcagtacaactgttagggcggccttcccatttactttaggtttcaagaggattcaccggaagcacatgccccggtctagtcccatttgaaacagttctgctttactgagaccctaggccggtctccttgctgaccctagcgctgctgcctaggtgccatttcctttcctcctcagtcaaatacaggctgcacattttgtcacttaatgcaaaatcaggggcatcattatccggtgcttgaacaaggagctccgctctacaactggtttttttaggacttgtgaggaacacagcaacggaaatccatccacaaaggatgcagtgccccaacttgtactgcgcctgaatagtcatgtgataatttactgaagaaatctagtgtactttaaatttttttcataaaagtttacattgtattgtaggttaacattaaatgttttatagcaaaaacttca

SEQ ID NO: 77221 - DNA, 232 bp, Homo sapiens
acttagaaggatgaggtggccaggaagaaggaactgtactttagaggaacaaatcacatggaaggaccaaaaagagtgagaaaatctgacctagccatttgataaaatattagggattgagagaattgtctctaactttgtttttggactttcaggggctgcttggatggggttattacttgataatgcttccattccggtttacctattacacgatacttgatatatttag

SEQ ID NO: 77222 - DNA, 355 bp, Homo sapiens
ccttttcatacctttccacagcaacacactctgtgcacctgaagttatttcactaataaacactaggatgctcttctgggcatgctctacaaacaaacctgagggatacaggggtaagttatgtttcttctgcctcattgagattgttggagtatctttggaatagtctggaaagacatgccatgccatttattacaagtgtgtttgttctgtggtagatacgacgctagttgctattttatattgtctcatttaatcctctcagcagtcctgagagatggggggtcatattacctttgctttatggtttaggaaataggctcagagagttcaagccactggctgaagatcacac

SEQ ID NO: 77223 - DNA, 440 bp, Homo sapiens
ggttcaacagctgaactgctgtatgaatcagtaaaatgaaagttacacacagtagtttaggcagaagtatttttgggagaattgcctttcgtccatattgctttgggctgtaccatttttattgactgagtagatttttattgaggagcacttgttttttattagtattaggagagacctaaggaaagaggatgtcgtatttctgctctcatggaacttgagagtttgaatggagtagggcaagacatgtacgcaggtgtgagtagtgtcatggaggcattaagagaggagagagcttattcagcctcagtagattgtgaaggaatcagctcaccctgatccaatggtgtcttcctgttaaggtgctgtactctgataaaagttatattaaagtcattaaaatgcttatgcttcattaccagagaggttttttcttttta

SEQ ID NO: 77224 - DNA, 348 bp, Homo sapiens
cttatggacttcaagtgaattctgataaagggctaaaagtaggggaagtgtttactgttgaccttggagaggccatcctatttgattgttctgctgattctcatccccccaacacctactcctggattaggaggactgacaatactacatatatcattaagcatgggcctcgcttagaagttgcatctgagaaagtagcccagaagacaatggactatgtgtgctgtgcttacaacaacataaccggcaggcaagatgaaactcatttcacagttatcatcacttccgtaggtatgtgtgacatacaaggaagggatcctaataaaacatgaatgcatgctggccttg

SEQ ID NO: 77225 - DNA, 334 bp, Homo sapiens
ttaaacatttcctccattcatgtcaggaactcatccatataaggcctcatgagcacatggatctggtgcatggtcccctcaagctctacaggcactaggcagtcagcattgctgattggcttaaaggagctatgcacaagggtttcatccaggtcagtgaccatacagatccttccttgatttttctctgtcacctctgggagcaggcaggttcctgggatctgataaaactgatattggagacgctggagctgatccgacatagcaatggtgttgactccctccttatgtgtggattgctcagcgggggaacttgactgtccaacatgctggg

SEQ ID NO: 77226 - DNA, 857 bp, Homo sapiens
cgtccggaaagagctgttgggtctgagccggcaggcgaaggcgaaagggtctgggactacaaggtttagctcccagccagagcaggaaaggaacgactgactgttcgccatctgggtgtaattctaacctctctgcacgcccagcccgactcgtggcctgagccgcacttgtcctcctgcctcgcccactagcaacaggctgccaggtcgggaggcccctggtgcccatggtgctcttgtccatggggcttgggtgcatctgggccccgcctgcaagtgggcccggtgcatctccctagttcaggctctgcagcctgacaaggcactgaaatagcaattaagccaactaagtattggcccaggtggttcacaaaagactttttttttttcttttagttaaatctgcataaagttggatgcagtcgttttatctgcaaaggggagaggagtctttgtataaaatccataaatatgttaaattttaatttgccgatgtccttcagactatcatagcctcattaccttttattttgtataccgagatctatgctaaaaagttgtcaaaacaaatacttcaccttcaagttaagatgtaaggttttgtgctgtttctggcgagctgctgaactggcaggaaaggaataaaccagaaacaataaatcagaagcaatttgcttcttccctcatttcatgctcttcctccagcaaccagcgaaagagatcctcacatagaggccttttatttgagatcttttcacatcctgaagggagagagctggagaggtttgacctgagagagaagtgattatttccaagcctcaggaaaaaatgaaataaaatctgctaatagcgtccta

SEQ ID NO: 77227 - DNA, 445 bp, Homo sapiens
ttttaggacagatagggagatgaaggtagaatagaaataagtgcctgttaagctagggtatataaagatgtgaaaatgaataaccaggaaagtagaggatgggaggaaagtgtgtgttaaatttctctgtgcctaggtgttttcttacagaggaaatacatttggatataattgaacttgttaagagttactagatttatctgtaaatggtcactgtgctgtaacctctttttctatagattgaagaatgtgtggtatgctctgacaagaaagcagctgttctttttcaaccctgtggccacatgtgtgcttgtgagagtaagtagcctatgcagagttcctcaatattattataaaaatagaaagtgaaacaaaaattatgtttttgagggtttttttgcttttgattttgggataactccataaaaaagttgatggggcctcg

SEQ ID NO: 77228 - DNA, 7703 bp, Homo sapiens
atcttcaagttgtgaagactttattggactttggctgtcatcccagtctccaggattctgaaggtgatacccctcttcatgatgcaataagtaagaaacgtgatgatatcctagcagttcttttggaagctggagcagatgttaccatcacaaacaataatggatttaatgctctgcatcatgctgcactaaggggaaatcccagtgcaatgcgtgttttactatctaaattaccaagaccatggattgtggatgagaagaaagatgatggttatactgccttacatctggctgcccttaataatcacgtagaagtggctgaactgttggtacatcagggtaatgcaaacctggatatccagaatgtgaaccaacaaactgccctacaccttgctgttgaacgacagcatacccagattgttaggcttttggtccgtgcaggtgccaagcttgatattcaggataaggatggggatactcctttgcatgaagctctaaggcatcacactttgtctcagctacgtcagctccaagatatgcaagatgtggggaaggtggatgctgcctgggagccatccaaaaacacgttaataatgggacttggtacccagggggcagagaagaagagtgcagcatctattgcctgtttcttggcagccaatggtgctgacctgagcattcgaaataagaagggtcaatcgccacttgatctctgtcctgatccgaatctctgcaaagcactggcaaagtgtcataaggaaaaagtcagtggtcaagtgggttctcggagtccttctatgattagtaatgattctgaaaccttagaagagtgtatggtgtgctcagatatgaagagagatactctttttggtccatgtggacatattgctacctgttctttatgttctccacgtgtcaagaaatgcctcatctgtaaagaacaggttcaatccaggacaaagattgaagaatgtgtggtatgctctgacaagaaagcagctgttctttttcaaccctgtggccacatgtgtgcttgtgagaactgtgctaacctgatgaaaaagtgtgtgcagtgtcgagcagtagttgaacgaagagtgcctttcattatgtgctgtggagggaaaagttcagaagatgccactgatgatatctcaagtgggaatattccagtattacaaaaggacaaggataataccaatgtcaatgcagatgtgcaaaagttgcagcaacagttacaagacattaaagagcagacaatgtgccctgtgtgtctagatcgtctgaagaatatgattttcctttgtggtcacggaacctgtcaactctgtggagaccgcatgagtgaatgtcctatctgtcgcaaggctattgaacgaaggattcttttgtattaactaagacacatggtgtattttgttagctaatgtatctagtcatgagatcttaataggcttttgatctagttggaagttctgatgagttaatttctaatatcatagtttctttactagagtataattgggctgtaaatgtaccagaacaaaaaaccctacaaaatggtgttggaaattgtgttttttgtttttgttttaaatttgaaacatcaaattcatgtaactcataggataatttacctttggcttctaagaggaaagtcctttaaggatatccttttttaaaaaattgcatttttctcttataatttgtaaatttgttggatctcaaaagacataattctttgtgatcagttatccttcatttcatcgtggttttacacagtgagttgataacaggttctctgagaagtcatgcatcaaataaaagaggcaggtcaaacaattatgtcacatggtaaattataaaatgacagtacaagttccagatagttaagggaataccgaagggatgattctttttttaagataacaggaagttacccacatgtttgtttctgaattcttagagtaaatggaagcatagaatgagggaataatgactttgcatttctcttgttttctagattcaaaaggaacattgtttaacttgaatcagattaccagtttcaaggtgactgatagacaagaaaaggaaaaataagcaataatagtgggcaactgaagagaaaaaaaaaacgagtatctattaactggccactaacagttgcctttcttacattaatttatacactattttgttcagccagtgtttttaaaaaaaatctatgaaaagtgtacttccggttttctgtgattacttatctgggcttgatctgaccagtgaaatgacattgccctatttggacctctgaggttctatttagctttgcagatgtacatagtatcccagtgatctgcaaaattaatgccttttccaagaaaaaatcttttcttctctgtatcagttaattctgacagtgttagtgattctgtcttcattataggccttatttccattatctctttctttatagtattttttgttataaagaaaacagtctttctgtgtatacctacggatgagggtattatttaaactgccaacaatatccaagacatggtcaataacctaattataaatactttagaaagagtgaccaggacatgtatagaaatgtctgcttacctgtagactttaaaaacaaacaaaaaaaacaaacaaaatttttggagcatttaatcattttttttctccttttatctcctttgtaatcttattgtctcctgagtaaatatacacataaatgtttggggattcattgctgctagattatatcaggtgtttacatagtgtctactatatgctgttgataagctttttcctaaaaatagttatcctcttttgtagtttttttccctcctttaaatctggctagcttttcttacttcagtttttatagaacaccaactaaatttgaaagtatgaagtctctagccctcttacactgtttctggctgtttaatccttgctgcctttgcaagtcctggtgaaagcaatggggagctttgctggctggttttgtagtctcaacaattccatgtctgtgtttagctgagtaactgctatcatttagaacagtaaaatttttatagatttcaaatttgaaaattcatgtacactcagttatctaataaggggccaccgacgctgtttttaaaactattttgaagttataaaaaggtagaacatctgactgatgatgttcacataaagagacagacagactatcatgttgcagacatgaaaacagcatgtcaggtttttcctttccttccatgccatgggctacccatctcttcccactagatcacctggtgaggagggagcacctggctgactcatgcagagtttggccaatcagagaattgtgtggtctccagctctactttccttaaacaaatcctttctgttttctgagctgcagtgctaaaacagatccctaaaaggtaatagcatcttccagactagtttaattatttcctttataagaatatgacataaatttttattatagaaataatgtcattataattttagtgctagtacttgtgggttttctgtatttgtatcaccttgaaatttgttccatgaatagaaaatacttctttattcatgttttcaatcacttagaattattttaaatttattttgggtttgtgagagataataagattaagaacttcatcatttcagtgactttcctccaactctctgaatctgctacctcttattatatgtcccttagcagtacttttccagttaggttcgttaccctcctcattagctaaacctctttatcttgtgcctcaaaagagcttttacttttcttagaaacatttataaaaaagaaaaaaactgacacgcattcattcaaaaaagtatttattgggctttagggattagatacacaacagtggaaaaatggcatcttagcacactcagaatttattgtgcagcagttgtgtattttaaggaatctgtagttaaaaggaagagatccaaaggtcctgataacatttcctaacgtttcagaagagttgtcattgagtagtgtttggatttcctctctgtatccctcaccctaccattttctcctttattcttctaagattgttagcgttgttactcaaaacatacacatacaacataccagatggtgctgttctaatggtatttgttcacgtaatttaacgttcttactgcttatactatatacatatttaattttgttgggagcaagaaggttttcaagaaaagataattttgtattagtgtaggaatatattagacaaatgtttagttggtcaaattatgcataagatatttgtaactttaaacattgcaaattgaccagctagctatggaagcataaaattaattgataattaatgttggaaatacatttctaaaatttatatttttatggtgttagcctgtaagagcattttagcatattgaaatgcatgctgcttaagatgtgtctggttcaaatatcaaaacttgctgggtcatttttacatagtagaaacatactgtctatgtgttgcccaattgctgtttgtccactctgaattctggaccctttttggactaagaattagttaaattcatgaactaagagaattagagatggggtagagtaggatcaggacagtggggttacaacagataggaaaggaaagtcagcatttgagtgtagagaaaaaaagaggatcatacagatgtcatcaaattataggctttaatacaggttgctttttttaatccaaaaggaaaagcacttatcctatcagaatgtctaccatgttttatagtaataatttgtgtaaaaaattgaatttttgaatagttttttgtattttttgtgatgaaaaactcataacataaaatttaccatattaactgtttctaaagaatacagttcagccatgtgaagtacatttacactgttgtgaaacagatctccagaactttttcatcttgcaaaactgaaactccatacccattaaacaactcccctttttgttttctcctcagtggaatagaattttgactccatataaatcaagaaacacctaaattctttagttgtttgtgtttgcaagatctaaggtcatggtaaacattaagttcttaaaatttttgggagggacagtgcacctctcctctgaattgttagcaattaaattgagtaggttttaaatgtctattcattggaagggtttgttatttcattttgagccagaggggagaggcacattttaaatatcagaattagattagctttgagtttgtacaattgggaacataatagattttcataaattatgtgtgccttgttggaagtgtcaactgtctttatgtctgcttgtaaaagtttcaaaatatgttttccctcaaaaaggcaacgttacttcatttgcttgaatattatgataggaatgcttactgatattacttgatagtcatatatagcctaggaaatttaacatatatataactatagcagtattaataatgatagttgtacttctttaaaacattaaatttgaggaaactttaatgctgtctcgtgtacattgctttactacagtgagggggaatatcctttagattgagcctcaatttactggttagtagtatgtgaaactctggtataaaaacgtaaactagacagtagagccgatgaattaaaattgtaaattgctacattggcattttctacctccttttctgtcagagtattactttttccagcatttattcttatttgtgagtaaagaggaaatgggaacctgaggttaaaattgacatttttgtttcattgagaatttaagcagtaggtacaggagaagtgacttgtcacattaatttggtgcctaaatctgtaactacaagttgtgatcgacatgtacaaaatgtctaagaaaggtcatatgctgaatattttacttttcctgtatagtctgcatgatttgtttcataaacccagcttatttcctccaaaaagcaaaatggtcctgtaatttttaaagtaaaataaacgtgccattttgtctgcaatctataatttcaggaagttattgaaagttctgactcagggctttttaacagttcaagcaattgtcagttatattttggaaactccatctgtgtaattctccagtgccttgaaagaattattaacttggcaacactattaaaactttataaaagatggtctttagtgcacgtgtatcattatatacacgttttaaagtcatattgcttagcttgttaataatgattctgcatgtgtgctgggtttgggtaattctttaaaggaagttttctagatttgcacttgatgtttgttttttaaaaactgattatttatggccgtgacactgttaccagaaaagtaattctaattaagttattatgcaaagtcatctataagtagcatctgggaagaggagatcgaggccacagtttgctattttagtatgaaaggaggatctgtttgggaaacatagattgtcttcccctcaaatgaggggaaaaaaaaagaccctttgttcaaatggattctgttgtaaaaaattatttttaaaggaaatcacaaattgtatgtcattcttaatgctagtcttatagaataaatccataaaattgtttttatgttcagtatgtttatgtcattctaaatgcagcaaattcaatgatagcagttcaattgactcatagcagtgttttgtattttttctaattctttagctttcaatattggattaaagtcttgtttgtgaatatagtttccgtatggcaaatgatttcttgcttattagcttttgttaaagaatgcttagtaagagctaagcttttaaaagtaatgcaaacatttatcgttaataaaacctatggtgtaatatcatataatgcttttctttgatctttggagaattattcttttatagtagtatacatgaattttgatttttaaagcatttaaaaacaaatctcaatacattaaaaaacctgttattgttaaaaaggaaattaccatgcctttaagaaacaaggatgtacatcttcaattcagcataagtgtccacatctagaaggctctcattgcagttgtttacagttaaggtacctctatctaaagggccaaagaagcatttcatattttaacacctcacattctttcaggattaagacatatgaaaatagtctgaataggataaatttgataggaagtaacttaaccagtctggaagattcagctttttctataaaaagcttattcctcttcacaactcagatgtagatttcattttcaagaggtagatattttaaagcaatgatctatttgggttttagttttatgagtaaatcattaattgtatggtttgggggttattttattttccatgttaatataagcacttatttctgaagttattgagaggtcatctagctccagttcaaaagattatgtatatctgatgtttaagaggaaaaacatctgaaaaaatatcttttgtttatttgaaaaaagcatatatattccaactttaaaattgtgaatttattttgagtaacctctaattaactgtatttttttgtttctgttgctgtatagttagaaatttcatggcaatattttttactaaattgaaactataggttttaaaaataaagacattttagaaaatttgctt

SEQ ID NO: 77229 - DNA, 6793 bp, Homo sapiens
atcttcaagttgtgaagactttattggactttggctgtcatcccagtctccaggattctgaaggtgatacccctcttcatgatgcaataagtaagaaacgtgatgatatcctagcagttcttttggaagctggagcagatgttaccatcacaaacaataatggatttaatgctctgcatcatgctgcactaaggggaaatcccagtgcaatgcgtgttttactatctaaattaccaagaccatggattgtggatgagaagaaagatgatggttatactgccttacatctggctgcccttaataatcacgtagaagtggctgaactgttggtacatcagggtaatgcaaacctggatatccagaatgtgaaccaacaaactgccctacaccttgctgttgaacgacagcatacccagattgttaggcttttggtccgtgcaggtgccaagcttgatattcaggataaggatggggatactcctttgcatgaagctctaaggcatcacactttgtctcagctacgtcagctccaagatatgcaagatgtggggaaggtggatgctgcctgggagccatccaaaaacacgttaataatgggacttggtacccagggggcagagaagaagagtgcagcatctattgcctgtttcttggcagccaatggtgctgacctgagcattcgaaataagaagggtcaatcgccacttgatctctgtcctgatccgaatctctgcaaagcactggcaaagtgtcataaggaaaaagtcagtggtcaagtgggttctcggagtccttctatgattagtaatgattctgaaaccttagaagagtgtatggtgtgctcagatatgaagagagatactctttttggtccatgtggacatattgctacctgttctttatgttctccacgtgtcaagaaatgcctcatctgtaaagaacaggttcaatccaggacaaagattgaagaatgtgtggtatgctctgacaagaaagcagctgttctttttcaaccctgtggccacatgtgtgcttgtgagaactgtgctaacctgatgaaaaagtgtgtgcagtgtcgagcagtagttgaacgaagagtgcctttcattatgtgctgtggagggaaaagttcagaagatgccactgatgatatctcaagtgggaatattccagtattacaaaaggacaaggataataccaatgtcaatgcagatgtgcaaaagttgcagcaacagttacaagacattaaagagcagacaatgtgccctgtgtgtctagatcgtctgaagaatatgattttcctttgtggtcacggaacctgtcaactctgtggagaccgcatgagtgaatgtcctatctgtcgcaaggctattgaacgaaggattcttttgtattaactaagacacatggtgtattttgttagctaatgtatctagtcatgagatcttaataggcttttgatctagttggaagttctgatgagttaatttctaatatcatagtttctttactagagtataattgggctgtaaatgtaccagaacaaaaaaccctacaaaatggtgttggaaattgtgttttttgtttttgttttaaatttgaaacatcaaattcatgtaactcataggataatttacctttggcttctaagaggaaagtcctttaaggatatccttttttaaaaaattgcatttttctcttataatttgtaaatttgttggatctcaaaagacataattctttgtgatcagttatccttcatttcatcgtggttttacacagtgagttgataacaggttctctgagaagtcatgcatcaaataaaagaggcaggtcaaacaattatgtcacatggtaaattataaaatgacagtacaagttccagatagttaagggaataccgaagggatgattctttttttaagataacaggaagttacccacatgtttgtttctgaattcttagagtaaatggaagcatagaatgagggaataatgactttgcatttctcttgttttctagattcaaaaggaacattgtttaacttgaatcagattaccagtttcaaggtgactgatagacaagaaaaggaaaaataagcaataatagtgggcaactgaagagaaaaaaaaaacgagtatctattaactggccactaacagttgcctttcttacattaatttatacactattttgttcagccagtgtttttaaaaaaaatctatgaaaagtgtacttccggttttctgtgattacttatctgggcttgatctgaccagtgaaatgacattgccctatttggacctctgaggttctatttagctttgcagatgtacatagtatcccagtgatctgcaaaattaatgccttttccaagaaaaaatcttttcttctctgtatcagttaattctgacagtgttagtgattctgtcttcattataggccttatttccattatctctttctttatagtattttttgttataaagaaaacagtctttctgtgtatacctacggatgagggtattatttaaactgccaacaatatccaagacatggtcaataacctaattataaatactttagaaagagtgaccaggacatgtatagaaatgtctgcttacctgtagactttaaaaacaaacaaaaaaaacaaacaaaatttttggagcatttaatcattttttttctccttttatctcctttgtaatcttattgtctcctgagtaaatatacacataaatgtttggggattcattgctgctagattatatcaggtgtttacatagtgtctactatatgctgttgataagctttttcctaaaaatagttatcctcttttgtagtttttttccctcctttaaatctggctagcttttcttacttcagtttttatagaacaccaactaaatttgaaagtatgaagtctctagccctcttacactgtttctggctgtttaatccttgctgcctttgcaagtcctggtgaaagcaatggggagctttgctggctggttttgtagtctcaacaattccatgtctgtgtttagctgagtaactgctatcatttagaacagtaaaatttttatagatttcaaatttgaaaattcatgtacactcagttatctaataaggggccaccgacgctgtttttaaaactattttgaagttataaaaaggtagaacatctgactgatgatgttcacataaagagacagacagactatcatgttgcagacatgaaaacagcatgtcaggtttttcctttccttccatgccatgggctacccatctcttcccactagatcacctggtgaggagggagcacctggctgactcatgcagagtttggccaatcagagaattgtgtggtctccagctctactttccttaaacaaatcctttctgttttctgagctgcagtgctaaaacagatccctaaaaggtaatagcatcttccagactagtttaattatttcctttataagaatatgacataaatttttattatagaaataatgtcattataattttagtgctagtacttgtgggttttctgtatttgtatcaccttgaaatttgttccatgaatagaaaatacttctttattcatgttttcaatcacttagaattattttaaatttattttgggtttgtgagagataataagattaagaacttcatcatttcagtgactttcctccaactctctgaatctgctacctcttattatatgtcccttagcagtacttttccagttaggttcgttaccctcctcattagctaaacctctttatcttgtgcctcaaaagagcttttacttttcttagaaacatttataaaaaagaaaaaaactgacacgcattcattcaaaaaagtatttattgggctttagggattagatacacaacagtggaaaaatggcatcttagcacactcagaatttattgtgcagcagttgtgtattttaaggaatctgtagttaaaaggaagagatccaaaggtcctgataacatttcctaacgtttcagaagagttgtcattgagtagtgtttggatttcctctctgtatccctcaccctaccattttctcctttattcttctaagattgttagcgttgttactcaaaacatacacatacaacataccagatggtgctgttctaatggtatttgttcacgtaatttaacgttcttactgcttatactatatacatatttaattttgttgggagcaagaaggttttcaagaaaagataattttgtattagtgtaggaatatattagacaaatgtttagttggtcaaattatgcataagatatttgtaactttaaacattgcaaattgaccagctagctatggaagcataaaattaattgataattaatgttggaaatacatttctaaaatttatatttttatggtgttagcctgtaagagcattttagcatattgaaatgcatgctgcttaagatgtgtctggttcaaatatcaaaacttgctgggtcatttttacatagtagaaacatactgtctatgtgttgcccaattgctgtttgtccactctgaattctggaccctttttggactaagaattagttaaattcatgaactaagagaattagagatggggtagagtaggatcaggacagtggggttacaacagataggaaaggaaagtcagcatttgagtgtagagaaaaaaagaggatcatacagatgtcatcaaattataggctttaatacaggttgctttttttaatccaaaaggaaaagcacttatcctatcagaatgtctaccatgttttatagtaataatttgtgtaaaaaattgaatttttgaatagttttttgtattttttgtgatgaaaaactcataacataaaatttaccatattaactgtttctaaagaatacagttcagccatgtgaagtacatttacactgttgtgaaacagatctccagaactttttcatcttgcaaaactgaaactccatacccattaaacaactcccctttttgttttctcctcagtggaatagaattttgactccatataaatcaagaaacacctaaattctttagttgtttgtgtttgcaagatctaaggtcatggtaaacattaagttcttaaaatttttgggagggacagtgcacctctcctctgaattgttagcaattaaattgagtaggttttaaatgtctattcattggaagggtttgttatttcattttgagccagaggggagaggcacattttaaatatcagaattagattagctttgagtttgtacaattgggaacataatagattttcataaattatgtgtgccttgttggaagtgtcaactgtctttatgtctgcttgtaaaagtttcaaaatatgttttccctcaaaaaggcaacgttacttcatttgcttgaatattatgataggaatgcttactgatattacttgatagtcatatatagcctaggaaatttaacatatatataactatagcagtattaataatgatagttgtacttctttaaaacattaaatttgaggaaactttaatgctgtctcgtgtacattgctttactacagtgagggggaatatcctttagattgagcctcaatttactggttagtagtatgtgaaactctggtataaaaacgtaaactagacagtagagccgatgaattaaaattgtaaattgctacattggcattttctacctccttttctgtcagagtattactttttccagcatttattcttatttgtgagtaaagaggaaatgggaacctgaggttaaaattgacatttttgtttcattgagaatttaagcagtaggtacaggagaagtgacttgtcacattaatttggtgcctaaatctgtaactacaagttgtgatcgacatgtacaaaatgtctaagaaaggtcatatgctgaatattttacttttcctgtatagtctgcatgatttgtttcataaacccagcttatttcctccaaaaagcaaaatggtcctgtaatttttaaagtaaaataaacgtgccattttgtctgcaatctataatttcaggaagttattgaaagttctgactcagggctttttaacagttcaagcaattgtcagttatattttggaaactccatctgtgtaattctccagtgccttgaaagaattattaacttggcaacactattaaaactttataaaagatggtctttagtgcacgtgtatcattatatacacgttttaaagtcatattgcttagcttgttaataatgattctgcatgtgtgctgggtttgggtaattctttaaaggaagttttctagatttgcacttgatgtttgttttttaaaaactgattatttatggccgtgacactgttaccagaaaagtaattctaattaagttattatgcaaagtcatctataagtagcatctgggaagaggagatcgaggccacagtttgctattttagtatgaaaggaggatctgtttgggaaacatagattgtcttcccctcaaatgaggggaaaaaaaaagaccctttgttcaaatggattctgttgtaaaaaattatttttaaaggaaatcacaaattgtatgtcattcttaatgctagtcttatagaataaatccataaaattgtttttatgttcagtatgtttatgtcattctaaatgcagcaaattcaatgatagcagttcaattgactcatagcagtgttttgtattttttctaattctttagctttcaatattggattaaagtcttgtttgtgaatata

SEQ ID NO: 77230 - DNA, 6491 bp, Homo sapiens
  misc_feature (6310)..(6310): n is a, c, g, or t
  misc_feature (6315)..(6315): n is a, c, g, or t
  misc_feature (6325)..(6325): n is a, c, g, or t
  misc_feature (6488)..(6488): n is a, c, g, or t
atcttcaagttgtgaagactttattggactttggctgtcatcccagtctccaggattctgaaggtgatacccctcttcatgatgcaataagtaagaaacgtgatgatatcctagcagttcttttggaagctggagcagatgttaccatcacaaacaataatggatttaatgctctgcatcatgctgcactaaggggaaatcccagtgcaatgcgtgttttactatctaaattaccaagaccatggattgtggatgagaagaaagatgatggttatactgccttacatctggctgcccttaataatcacgtagaagtggctgaactgttggtacatcagggtaatgcaaacctggatatccagaatgtgaaccaacaaactgccctacaccttgctgttgaacgacagcatacccagattgttaggcttttggtccgtgcaggtgccaagcttgatattcaggataaggatggggatactcctttgcatgaagctctaaggcatcacactttgtctcagctacgtcagctccaagatatgcaagatgtggggaaggtggatgctgcctgggagccatccaaaaacacgttaataatgggacttggtacccagggggcagagaagaagagtgcagcatctattgcctgtttcttggcagccaatggtgctgacctgagcattcgaaataagaagggtcaatcgccacttgatctctgtcctgatccgaatctctgcaaagcactggcaaagtgtcataaggaaaaagtcagtggtcaagtgggttctcggagtccttctatgattagtaatgattctgaaaccttagaagagtgtatggtgtgctcagatatgaagagagatactctttttggtccatgtggacatattgctacctgttctttatgttctccacgtgtcaagaaatgcctcatctgtaaagaacaggttcaatccaggacaaagattgaagaatgtgtggtatgctctgacaagaaagcagctgttctttttcaaccctgtggccacatgtgtgcttgtgagaactgtgctaacctgatgaaaaagtgtgtgcagtgtcgagcagtagttgaacgaagagtgcctttcattatgtgctgtggagggaaaagttcagaagatgccactgatgatatctcaagtgggaatattccagtattacaaaaggacaaggataataccaatgtcaatgcagatgtgcaaaagttgcagcaacagttacaagacattaaagagcagacaatgtgccctgtgtgtctagatcgtctgaagaatatgattttcctttgtggtcacggaacctgtcaactctgtggagaccgcatgagtgaatgtcctatctgtcgcaaggctattgaacgaaggattcttttgtattaactaagacacatggtgtattttgttagctaatgtatctagtcatgagatcttaataggcttttgatctagttggaagttctgatgagttaatttctaatatcatagtttctttactagagtataattgggctgtaaatgtaccagaacaaaaaaccctacaaaatggtgttggaaattgtgttttttgtttttgttttaaatttgaaacatcaaattcatgtaactcataggataatttacctttggcttctaagaggaaagtcctttaaggatatccttttttaaaaaattgcatttttctcttataatttgtaaatttgttggatctcaaaagacataattctttgtgatcagttatccttcatttcatcgtggttttacacagtgagttgataacaggttctctgagaagtcatgcatcaaataaaagaggcaggtcaaacaattatgtcacatggtaaattataaaatgacagtacaagttccagatagttaagggaataccgaagggatgattctttttttaagataacaggaagttacccacatgtttgtttctgaattcttagagtaaatggaagcatagaatgagggaataatgactttgcatttctcttgttttctagattcaaaaggaacattgtttaacttgaatcagattaccagtttcaaggtgactgatagacaagaaaaggaaaaataagcaataatagtgggcaactgaagagaaaaaaaaaacgagtatctattaactggccactaacagttgcctttcttacattaatttatacactattttgttcagccagtgtttttaaaaaaaatctatgaaaagtgtacttccggttttctgtgattacttatctgggcttgatctgaccagtgaaatgacattgccctatttggacctctgaggttctatttagctttgcagatgtacatagtatcccagtgatctgcaaaattaatgccttttccaagaaaaaatcttttcttctctgtatcagttaattctgacagtgttagtgattctgtcttcattataggccttatttccattatctctttctttatagtattttttgttataaagaaaacagtctttctgtgtatacctacggatgagggtattatttaaactgccaacaatatccaagacatggtcaataacctaattataaatactttagaaagagtgaccaggacatgtatagaaatgtctgcttacctgtagactttaaaaacaaacaaaaaaaacaaacaaaatttttggagcatttaatcattttttttctccttttatctcctttgtaatcttattgtctcctgagtaaatatacacataaatgtttggggattcattgctgctagattatatcaggtgtttacatagtgtctactatatgctgttgataagctttttcctaaaaatagttatcctcttttgtagtttttttccctcctttaaatctggctagcttttcttacttcagtttttatagaacaccaactaaatttgaaagtatgaagtctctagccctcttacactgtttctggctgtttaatccttgctgcctttgcaagtcctggtgaaagcaatggggagctttgctggctggttttgtagtctcaacaattccatgtctgtgtttagctgagtaactgctatcatttagaacagtaaaatttttatagatttcaaatttgaaaattcatgtacactcagttatctaataaggggccaccgacgctgtttttaaaactattttgaagttataaaaaggtagaacatctgactgatgatgttcacataaagagacagacagactatcatgttgcagacatgaaaacagcatgtcaggtttttcctttccttccatgccatgggctacccatctcttcccactagatcacctggtgaggagggagcacctggctgactcatgcagagtttggccaatcagagaattgtgtggtctccagctctactttccttaaacaaatcctttctgttttctgagctgcagtgctaaaacagatccctaaaaggtaatagcatcttccagactagtttaattatttcctttataagaatatgacataaatttttattatagaaataatgtcattataattttagtgctagtacttgtgggttttctgtatttgtatcaccttgaaatttgttccatgaatagaaaatacttctttattcatgttttcaatcacttagaattattttaaatttattttgggtttgtgagagataataagattaagaacttcatcatttcagtgactttcctccaactctctgaatctgctacctcttattatatgtcccttagcagtacttttccagttaggttcgttaccctcctcattagctaaacctctttatcttgtgcctcaaaagagcttttacttttcttagaaacatttataaaaaagaaaaaaactgacacgcattcattcaaaaaagtatttattgggctttagggattagatacacaacagtggaaaaatggcatcttagcacactcagaatttattgtgcagcagttgtgtattttaaggaatctgtagttaaaaggaagagatccaaaggtcctgataacatttcctaacgtttcagaagagttgtcattgagtagtgtttggatttcctctctgtatccctcaccctaccattttctcctttattcttctaagattgttagcgttgttactcaaaacatacacatacaacataccagatggtgctgttctaatggtatttgttcacgtaatttaacgttcttactgcttatactatatacatatttaattttgttgggagcaagaaggttttcaagaaaagataattttgtattagtgtaggaatatattagacaaatgtttagttggtcaaattatgcataagatatttgtaactttaaacattgcaaattgaccagctagctatggaagcataaaattaattgataattaatgttggaaatacatttctaaaatttatatttttatggtgttagcctgtaagagcattttagcatattgaaatgcatgctgcttaagatgtgtctggttcaaatatcaaaacttgctgggtcatttttacatagtagaaacatactgtctatgtgttgcccaattgctgtttgtccactctgaattctggaccctttttggactaagaattagttaaattcatgaactaagagaattagagatggggtagagtaggatcaggacagtggggttacaacagataggaaaggaaagtcagcatttgagtgtagagaaaaaaagaggatcatacagatgtcatcaaattataggctttaatacaggttgctttttttaatccaaaaggaaaagcacttatcctatcagaatgtctaccatgttttatagtaataatttgtgtaaaaaattgaatttttgaatagttttttgtattttttgtgatgaaaaactcataacataaaatttaccatattaactgtttctaaagaatacagttcagccatgtgaagtacatttacactgttgtgaaacagatctccagaactttttcatcttgcaaaactgaaactccatacccattaaacaactcccctttttgttttctcctcagtggaatagaattttgactccatataaatcaagaaacacctaaattctttagttgtttgtgtttgcaagatctaaggtcatggtaaacattaagttcttaaaatttttgggagggacagtgcacctctcctctgaattgttagcaattaaattgagtaggttttaaatgtctattcattggaagggtttgttatttcattttgagccagaggggagaggcacattttaaatatcagaattagattagctttgagtttgtacaattgggaacataatagattttcataaattatgtgtgccttgttggaagtgtcaactgtctttatgtctgcttgtaaaagtttcaaaatatgttttccctcaaaaaggcaacgttacttcatttgcttgaatattatgataggaatgcttactgatattacttgatagtcatatatagcctaggaaatttaacatatatataactatagcagtattaataatgatagttgtacttctttaaaacattaaatttgaggaaactttaatgctgtctcgtgtacattgctttactacagtgagggggaatatcctttagattgagcctcaatttactggttagtagtatgtgaaactctggtataaaaacgtaaactagacagtagagccgatgaattaaaattgtaaattgctacattggcattttctacctccttttctgtcagagtattactttttccagcatttattcttatttgtgagtaaagaggaaatgggaacctgaggttaaaattgacatttttgtttcattgagaatttaagcagtaggtacaggagaagtgacttgtcacattaatttggtgcctaaatctgtaactacaagttgtgatcgacatgtacaaaatgtctaagaaaggtcatatgctgaatattttacttttcctgtatagtctgcatgatttgtttcataaacccagcttatttcctccaaaaagcaaaatggtcctgtaatttttaaagtaaaataaacgtgccattttgtctgcaatctataatttcaggaagttattgaaagttctgactcagggctttttaacagttcaagcaattgtcagttatattttggaaactccatctgtgtaattctccagtgccttgaaagaattattaacttggcaacactattaaaactttataaaagatggtctttagtgcacgtgtatcattatatacacgttttaaagtcatattgcttagcttgttaataatgattctgcatgtgtggcgggtggaanctaanggagttctanattgactgggtttgggttaaaaatgttttattgggggaccgttcggaaagatctataattatgcagcctaaagtcggggaggacaggccgtgtttaagaggtgggacaaatttcccagggaaacactccgtggaattacgtttgctaacaagtttcaaaaagntga

SEQ ID NO: 77231 - DNA, 7649 bp, Homo sapiens
atcttcaagttgtgaagactttattggactttggctgtcatcccagtctccaggattctgaaggtgatacccctcttcatgatgcaataagtaagaaacgtgatgatatcctagcagttcttttggaagctggagcagatgttaccatcacaaacaataatggatttaatgctctgcatcatgctgcactaaggggaaatcccagtgcaatgcgtgttttactatctaaattaccaagaccatggattgtggatgagaagaaagatgatggttatactgccttacatctggctgcccttaataatcacgtagaagtggctgaactgttggtacatcagggtaatgcaaacctggatatccagaatgtgaaccaacaaactgccctacaccttgctgttgaacgacagcatacccagattgttaggcttttggtccgtgcaggtgccaagcttgatattcaggataaggatggggatactcctttgcatgaagctctaaggcatcacactttgtctcagctacgtcagctccaagatatgcaagatgtggggaaggtggatgctgcctgggagccatccaaaaacacgttaataatgggacttggtacccagggggcagagaagaagagtgcagcatctattgcctgtttcttggcagccaatggtgctgacctgagcattcgaaataagaagggtcaatcgccacttgatctctgtcctgatccgaatctctgcaaagcactggcaaagtgtcataaggaaaaagtcagtggtcaagtgggttctcggagtccttctatgattagtaatgattctgaaaccttagaagagtgtatggtgtgctcagatatgaagagagatactctttttggtccatgtggacatattgctacctgttctttatgttctccacgtgtcaagaaatgcctcatctgtaaagaacaggttcaatccaggacaaagattgaagaatgtgtggtatgctctgacaagaaagcagctgttctttttcaaccctgtggccacatgtgtgcttgtgagaactgtgctaacctgatgaaaaagtgtgtgcagtgtcgagcagtagttgaacgaagagtgcctttcattatgtgctgtggagggaaaagttcagaagatgccactgatgatatctcaagtgggaatattccagtattacaaaaggacaaggataataccaatgtcaatgcagatgtgcaaaagttgcagcaacagttacaagacattaaagagcagacaatgtgccctgtgtgtctagatcgtctgaagaatatgattttcctttgtggtcacggaacctgtcaactctgtggagaccgcatgagtgaatgtcctatctgtcgcaaggctattgaacgaaggattcttttgtattaactaagacacatggtgtattttgttagctaatgtatctagtcatgagatcttaataggcttttgatctagttggaagttctgatgagttaatttctaatatcatagtttctttactagagtataattgggctgtaaatgtaccagaacaaaaaaccctacaaaatggtgttggaaattgtgttttttgtttttgttttaaatttgaaacatcaaattcatgtaactcataggataatttacctttggcttctaagaggaaagtcctttaaggatatccttttttaaaaaattgcatttttctcttataatttgtaaatttgttggatctcaaaagacataattctttgtgatcagttatccttcatttcatcgtggttttacacagtgagttgataacaggttctctgagaagtcatgcatcaaataaaagaggcaggtcaaacaattatgtcacatggtaaattataaaatgacagtacaagttccagatagttaagggaataccgaagggatgattctttttttaagataacaggaagttacccacatgtttgtttctgaattcttagagtaaatggaagcatagaatgagggaataatgactttgcatttctcttgttttctagattcaaaaggaacattgtttaacttgaatcagattaccagtttcaaggtgactgatagacaagaaaaggaaaaataagcaataatagtgggcaactgaagagaaaaaaaaaacgagtatctattaactggccactaacagttgcctttcttacattaatttatacactattttgttcagccagtgtttttaaaaaaaatctatgaaaagtgtacttccggttttctgtgattacttatctgggcttgatctgaccagtgaaatgacattgccctatttggacctctgaggttctatttagctttgcagatgtacatagtatcccagtgatctgcaaaattaatgccttttccaagaaaaaatcttttcttctctgtatcagttaattctgacagtgttagtgattctgtcttcattataggccttatttccattatctctttctttatagtattttttgttataaagaaaacagtctttctgtgtatacctacggatgagggtattatttaaactgccaacaatatccaagacatggtcaataacctaattataaatactttagaaagagtgaccaggacatgtatagaaatgtctgcttacctgtagactttaaaaacaaacaaaaaaaacaaacaaaatttttggagcatttaatcattttttttctccttttatctcctttgtaatcttattgtctcctgagtaaatatacacataaatgtttggggattcattgctgctagattatatcaggtgtttacatagtgtctactatatgctgttgataagctttttcctaaaaatagttatcctcttttgtagtttttttccctcctttaaatctggctagcttttcttacttcagtttttatagaacaccaactaaatttgaaagtatgaagtctctagccctcttacactgtttctggctgtttaatccttgctgcctttgcaagtcctggtgaaagcaatggggagctttgctggctggttttgtagtctcaacaattccatgtctgtgtttagctgagtaactgctatcatttagaacagtaaaatttttatagatttcaaatttgaaaattcatgtacactcagttatctaataaggggccaccgacgctgtttttaaaactattttgaagttataaaaaggtagaacatctgactgatgatgttcacataaagagacagacagactatcatgttgcagacatgaaaacagcatgtcaggtttttcctttccttccatgccatgggctacccatctcttcccactagatcacctggtgaggagggagcacctggctgactcatgcagagtttggccaatcagagaattgtgtggtctccagctctactttccttaaacaaatcctttctgttttctgagctgcagtgctaaaacagatccctaaaaggtaatagcatcttccagactagtttaattatttcctttataagaatatgacataaatttttattatagaaataatgtcattataattttagtgctagtacttgtgggttttctgtatttgtatcaccttgaaatttgttccatgaatagaaaatacttctttattcatgttttcaatcacttagaattattttaaatttattttgggtttgtgagagataataagattaagaacttcatcatttcagtgactttcctccaactctctgaatctgctacctcttattatatgtcccttagcagtacttttccagttaggttcgttaccctcctcattagctaaacctctttatcttgtgcctcaaaagagcttttacttttcttagaaacatttataaaaaagaaaaaaactgacacgcattcattcaaaaaagtatttattgggctttagggattagatacacaacagtggaaaaatggcatcttagcacactcagaatttattgtgcagcagttgtgtattttaaggaatctgtagttaaaaggaagagatccaaaggtcctgataacatttcctaacgtttcagaagagttgtcattgagtagtgtttggatttcctctctgtatccctcaccctaccattttctcctttattcttctaagattgttagcgttgttactcaaaacatacacatacaacataccagatggtgctgttctaatggtatttgttcacgtaatttaacgttcttactgcttatactatatacatatttaattttgttgggagcaagaaggttttcaagaaaagataattttgtattagtgtaggaatatattagacaaatgtttagttggtcaaattatgcataagatatttgtaactttaaacattgcaaattgaccagctagctatggaagcataaaattaattgataattaatgttggaaatacatttctaaaatttatatttttatggtgttagcctgtaagagcattttagcatattgaaatgcatgctgcttaagatgtgtctggttcaaatatcaaaacttgctgggtcatttttacatagtagaaacatactgtctatgtgttgcccaattgctgtttgtccactctgaattctggaccctttttggactaagaattagttaaattcatgaactaagagaattagagatggggtagagtaggatcaggacagtggggttacaacagataggaaaggaaagtcagcatttgagtgtagagaaaaaaagaggatcatacagatgtcatcaaattataggctttaatacaggttgctttttttaatccaaaaggaaaagcacttatcctatcagaatgtctaccatgttttatagtaataatttgtgtaaaaaattgaatttttgaatagttttttgtattttttgtgatgaaaaactcataacataaaatttaccatattaactgtttctaaagaatacagttcagccatgtgaagtacatttacactgttgtgaaacagatctccagaactttttcatcttgcaaaactgaaactccatacccattaaacaactcccctttttgttttctcctcagtggaatagaattttgactccatataaatcaagaaacacctaaattctttagttgtttgtgtttgcaagatctaaggtcatggtaaacattaagttcttaaaatttttgggagggacagtgcacctctcctctgaattgttagcaattaaattgagtaggttttaaatgtctattcattggaagggtttgttatttcattttgagccagaggggagaggcacattttaaatatcagaattagattagctttgagtttgtacaattgggaacataatagattttcataaattatgtgtgccttgttggaagtgtcaactgtctttatgtctgcttgtaaaagtttcaaaatatgttttccctcaaaaaggcaacgttacttcatttgcttgaatattatgataggaatgcttactgatattacttgatagtcatatatagcctaggaaatttaacatatatataactatagcagtattaataatgatagttgtacttctttcagtgagggggaatatcctttagattgagcctcaatttactggttagtagtatgtgaaactctggtataaaaacgtaaactagacagtagagccgatgaattaaaattgtaaattgctacattggcattttctacctccttttctgtcagagtattactttttccagcatttattcttatttgtgagtaaagaggaaatgggaacctgaggttaaaattgacatttttgtttcattgagaatttaagcagtaggtacaggagaagtgacttgtcacattaatttggtgcctaaatctgtaactacaagttgtgatcgacatgtacaaaatgtctaagaaaggtcatatgctgaatattttacttttcctgtatagtctgcatgatttgtttcataaacccagcttatttcctccaaaaagcaaaatggtcctgtaatttttaaagtaaaataaacgtgccattttgtctgcaatctataatttcaggaagttattgaaagttctgactcagggctttttaacagttcaagcaattgtcagttatattttggaaactccatctgtgtaattctccagtgccttgaaagaattattaacttggcaacactattaaaactttataaaagatggtctttagtgcacgtgtatcattatatacacgttttaaagtcatattgcttagcttgttaataatgattctgcatgtgtgctgggtttgggtaattctttaaaggaagttttctagatttgcacttgatgtttgttttttaaaaactgattatttatggccgtgacactgttaccagaaaagtaattctaattaagttattatgcaaagtcatctataagtagcatctgggaagaggagatcgaggccacagtttgctattttagtatgaaaggaggatctgtttgggaaacatagattgtcttcccctcaaatgaggggaaaaaaaaagaccctttgttcaaatggattctgttgtaaaaaattatttttaaaggaaatcacaaattgtatgtcattcttaatgctagtcttatagaataaatccataaaattgtttttatgttcagtatgtttatgtcattctaaatgcagcaaattcaatgatagcagttcaattgactcatagcagtgttttgtattttttctaattctttagctttcaatattggattaaagtcttgtttgtgaatatagtttccgtatggcaaatgatttcttgcttattagcttttgttaaagaatgcttagtaagagctaagcttttaaaagtaatgcaaacatttatcgttaataaaacctatggtgtaatatcatataatgcttttctttgatctttggagaattattcttttatagtagtatacatgaattttgatttttaaagcatttaaaaacaaatctcaatacattaaaaaacctgttattgttaaaaaggaaattaccatgcctttaagaaacaaggatgtacatcttcaattcagcataagtgtccacatctagaaggctctcattgcagttgtttacagttaaggtacctctatctaaagggccaaagaagcatttcatattttaacacctcacattctttcaggattaagacatatgaaaatagtctgaataggataaatttgataggaagtaacttaaccagtctggaagattcagctttttctataaaaagcttattcctcttcacaactcagatgtagatttcattttcaagaggtagatattttaaagcaatgatctatttgggttttagttttatgagtaaatcattaattgtatggtttgggggttattttattttccatgttaatataagcacttatttctgaagttattgagaggtcatctagctccagttcaaaagattatgtatatctgatgtttaagaggaaaaacatctgaaaaaatatcttttgtttatttgaaaaaagcatatatattccaactttaaaattgtgaatttattttgagtaacctctaattaactgtatttttttgtttctgttgctgtatagttagaaatttcatggcaatattttttactaaattgaaactataggttttaaaaataaagacattttagaaaatttgctt

SEQ ID NO: 77232 - DNA, 1949 bp, Homo sapiens
cggacgcggtgggtcgacccacgcgtccgggaaatgggaacctgaggttaaaattgacatttttgtttcattgagaatttaagcagtaggtacaggagaagtgacttgtcacattaatttggtgcctaaatctgtaactacaagttgtgatcgacatgtacaaaatgtctaagaaaggtcatatgctgaatattttacttttcctgtatagtctgcatgatttgtttcataaacccagcttatttcctccaaaaagcaaaatggtcctgtaatttttaaagtaaaataaacgtgccattttgtctgcaatctataatttcaggaagttattgaaagttctgactcagggctttttaacagttcaagcaattgtcagttatattttggaaactccatctgtgtaattctccagtgccttgaaagaattattaacttggcaacactattaaaactttataaaagatggtctttagtgcacgtgtatcattatatacacgttttaaagtcatattgcttagcttgttaataatgattctgcatgtgtgctgggtttgggtaattctttaaaggaagttttctagatttgcacttgatgtttgttttttaaaaactgattatttatggccgtgacactgttaccagaaaagtaattctaattaagttattatgcaaagtcatctataagtagcatctgggaagaggagatcgaggccacagtttgctattttagtatgaaaggaggatctgtttgggaaacatagattgtcttcccctcaaatgaggggaaaaaaaaagaccctttgttcaaatggattctgttgtaaaaaattatttttaaaggaaatcacaaattgtatgtcattcttaatgctagtcttatagaataaatccataaaattgtttttatgttcagtatgtttatgtcattctaaatgcagcaaattcaatgatagcagttcaattgactcatagcagtgttttgtattttttctaattctttagctttcaatattggattaaagtcttgtttgtgaatatagtttccgtatggcaaatgatttcttgcttattagcttttgttaaagaatgcttagtaagagctaagcttttaaaagtaatgcaaacatttatcgttaataaaacctatggtgtaatatcatataatgcttttctttgatctttggagaattattcttttatagtagtatacatgaattttgatttttaaagcatttaaaaacaaatctcaatacattaaaaaacctgttattgttaaaaaggaaattaccatgcctttaagaaacaaggatgtacatcttcaattcagcataagtgtccacatctagaaggctctcattgcagttgtttacagttaaggtacctctatctaaagggccaaagaagcatttcatattttaacacctcacattctttcaggattaagacatatgaaaatagtctgaataggataaatttgataggaagtaacttaaccagtctggaagattcagctttttctataaaaagcttattcctcttcacaactcagatgtagatttcattttcaagaggtagatattttaaagcaatgatctatttgggttttagttttatgagtaaatcattaattgtatggtttgggggttattttattttccatgttaatataagcacttatttctgaagttattgagaggtcatctagctccagttcaaaagattatgtatatctgatgtttaagaggaaaaacatctgaaaaaatatcttttgtttatttgaaaaaagcatatatattccaactttaaaattgtgaatttattttgagtaacctctaattaactgtatttttttgtttctgttgctgtatagttagaaatttcatggcaatattttttactaaattgaaactataggttttaaaaataaagacattttagaaaatttgctt

SEQ ID NO: 77233 - DNA, 4849 bp, Homo sapiens
ttctttactaaccctacaaaaaacctagtgtctataactaaagattctgaactgcccacctgcagctgtcttgatcgagttatacaaaaagacaaaggcccatattatacacaccttggggcaggaccaagtgttgctgctgtcagggaaatcatggagaataggtatggtcaaaaaggaaacgcaataaggatagaaatagtagtgtacaccggtaaagaagggaaaagctctcatgggtgtccaattgctaagtgggttttaagaagaagcagtgatgaagaaaaagttctttgtttggtccggcagcgtacaggccaccactgtccaactgctgtgatggtggtgctcatcatggtgtgggatggcatccctcttccaatggccgaccggctatacacagagctcacagagaatctaaagtcatacaatgggcaccctaccgacagaagatgcaccctcaatgaaaatcgtacctgtacatgtcaaggaattgatccagagacttgtggagcttcattctcttttggctgttcatggagtatgtactttaatggctgtaagtttggtagaagcccaagccccagaagatttagaattgatccaagctctcccttacatgaaaaaaaccttgaagataacttacagagtttggctacacgattagctccaatttataagcagtatgctccagtagcttaccaaaatcaggtggaatatgaaaatgttgcccgagaatgtcggcttggcagcaaggaaggtcgtcccttctctggggtcactgcttgcctggacttctgtgctcatccccacagggacattcacaacatgaataatggaagcactgtggtttgtaccttaactcgagaagataaccgctctttgggtgttattcctcaagatgagcagctccatgtgctacctctttataagctttcagacacagatgagtttggctccaaggaaggaatggaagccaagatcaaatctggggccatcgaggtcctggcaccccgccgcaaaaaaagaacgtgtttcactcagcctgttccccgttctggaaagaagagggctgcgatgatgacagaggttcttgcacataagataagggcagtggaaaagaaacctattccccgaatcaagcggaagaataactcaacaacaacaaacaacagtaagccttcgtcactgccaaccttagggagtaacactgagaccgtgcaacctgaagtaaaaagtgaaaccgaaccccattttatcttaaaaagttcagacaacactaaaacttattcgctgatgccatccgctcctcacccagtgaaagaggcatctccaggcttctcctggtccccgaagactgcttcagccacaccagctccactgaagaatgacgcaacagcctcatgcgggttttcagaaagaagcagcactccccactgtacgatgccttcgggaagactcagtggtgccaatgcagctgctgctgatggccctggcatttcacagcttggcgaagtggctcctctccccaccctgtctgctcctgtgatggagcccctcattaattctgagccttccactggtgtgactgagccgctaacgcctcatcagccaaaccaccagccctccttcctcacctctcctcaagaccttgcctcttctccaatggaagaagatgagcagcattctgaagcagatgagcctccatcagacgaacccctatctgatgaccccctgtcacctgctgaggagaaattgccccacattgatgagtattggtcagacagtgagcacatctttttggatgcaaatattggtggggtggccatcgcacctgctcacggctcggttttgattgagtgtgcccggcgagagctgcacgctaccactcctgttgagcaccccaaccgtaatcatccaacccgcctctcccttgtcttttaccagcacaaaaacctaaataagccccaacatggttttgaactaaacaagattaagtttgaggctaaagaagctaagaataagaaaatgaaggcctcagagcaaaaagaccaggcagctaatgaaggtccagaacagtcctctgaagtaaatgaattgaaccaaattccttctcataaagcattaacattaacccatgacaatgttgtcaccgtgtccccttatgctctcacacacgttgcggggccctataaccattgggtctgaaggcttttctccccctcttaatgcctttgctagtgcagtgtattttttcaaggtgctgttaaaagaaagtcatgttgtcgtttactatcttcatctcacccatttcaagtctgaggtaaaaaaataataatgataacaaaacggggtgggtattcttaactgtgactatattttgacaattggtagaaggtgcacattttaagcaaaaataaaagttttatagttttaaatacataaagaaatgtttcagttaggcattaaccttgatagaatcactcagtttggtgctttaaattaagtctgtttactatgaaacaagagtcatttttagaggattttaacaggttcatgttctatgatgtaaaatcaagacacacagtgttaactctacacagcttctggtgcttaaccacatccacacagttaaaaataagctgaattattatttcatggtgccattgttccaacatcttccaatcattgctagaaaattggcatattcctttgaaataaacttatgaaatgttttctctcttaaaatatttctcctgtgtaaaataaatcattgttgttagtaatggttggaggctgttcataaattgtaaatatatattttaaaagcactttctatttttaaaagtaacttgaaataatatagtataagaatcctattgtctattgtttgtgcatatttgcatacaagagaaatcatttatccttgctgtgtagagttccatcttgttaactgcagtatgtattctaatcatgtatatggtttgtgttcttttactgtgtcctctcacattcaagtattagcaacttgcagtatataaaatagttagataatgagaagttgttaattatctctaaaattggaattaggaagcatatcaccaatattgattaacattctctttggaactaggtaagagtggtctcttcttattgaacaacctcaatttagtttcatcccacctttctcagtataatccatgagaggtgtttccaaaaggagatgagggaacaggataggtttcagaagagtcaaatgcttctaatgtctcaaggtgataaaatacaaaaactaagtagacagatatttgtactgaagtctgatacagaattagaaaaaaaaaattcttgttgaaatattttgaaaacaaattccctactatcatcacatgcctccccaaccccaagtcaaaaacaagaggaatggtactacaaacatggctttgtccattaagagctaattcatttgtttatcttagcatactagatttgggaaaatgataactcatcttttctgataattgcctatgttctaggtaacaggaaaacaggcattaagtttattttagtcttcccattttcttcctattactttattgactcattttattgcaaaacaaaaaggattacccaaacaacatgtttcgaacaaggagaattttcaatgaaatacttgattctgttaaaatgcagaggtgctataacattcaaagtgtcagattccttgggagtatggaaaacctaatggtgcttctcccttggaaatgccataggaagcccacaaccgctaacacttacaattttggtgcaaaagcaaacagttccagcaggctctctaaagaaaaactcattgtaacttattaaaataatatctggtgcaaagtatctgttttgagcttttgactaatccaagtaaaggaatatgaagggattgtaaaaaacaaaatgtccattgatagaccatcgtgtacaagtagatttctgcttgttgaatatgtaaaatagggtaattcattgacttgttttagtattttgtgtgcctaaggtttcttatatacatataagtatataaataagtgattgtttattgcttcagctgcttcaacaagatatttactagtattagactatcaggaatacacccttgcgagattatgttttagattttaggccttagctcccactagaaattatttcttcaccagatttaatggataaagttttatggctctttatgcatccactcatctactcattcttcgagtctacacttattgaatgcctgcaaaatctaagtatcacttttatttttctttggatcaccacctatgacatagtaaacttgaagaataaaaactaccctcagaaatatttttaaaagaagtagcaaattatcttcagtataatccatggtaatgtatgcagtaattcaaattgatctctctctcaataggtttcttaacaatctaaacttgaaacatcaatgttaatttttggaactattgggatttgtgacgcttgttgcagtttaccaaaacaagtatttgaaaatatatagtatcaactgaaatgtttccattccgttgttgtagttaacatcatgaatggacttcttaagctgattaccccactgtgggaaccaaattggattcctactttgttggactctctttcctgattttaacaatttaccatcccattctctgccctgtgattttttttaaaagcttattcaatgttctgcagcattgtgattgtatgctggctacactgcttttagaatgctctttctcatgaagcaaggaaataaatttgtttgaaatgacattttctctcataaaactggtca

SEQ ID NO: 77234 - DNA, 135 bp, Homo sapiens
taaattacgaagagtgtctaatttttgaacttctgtacatctatatcttatatacattaagatgttcaaagccaaagccttcaagtacagattgcaattaattagtacattcccttcactgtgttttatactcag

SEQ ID NO: 77235 - DNA, 834 bp, Homo sapiens
cccaagtcaaaaacaagaggaatggtactacaaacatggctttgtccattaagagctaattcatttgtttatcttagcatactagatttgggaaaatgataactcatcttttctgataattgcctatgttctaggtaacaggaaaacaggcattaagtttattttagtcttcccattttcttcctattactttattgactcattttattgcaaaacaaaaaggattacccaaacaacatgtttcgaacaaggagaattttcaatgaaatacttgattctgttaaaatgcagaggtgctataacattcaaagtgtcagattccttgggagtatggaaaacctaatggtgcttctcccttggaaatgccataggaagcccacaaccgctaacacttacaattttggtgcaaaagcaaacagttccagcaggctctctaaagaaaaactcattgtaacttattaaaataatatctggtgcaaagtatctgttttgagcttttgactaatccaagtaaaggaatatgaagggattgtaaaaaacaaaatgtccattgatagaccatcgtgtacaagtagatttctgcttgttgaatatgtaaaatagggtaattcattgacttgttttagtattttgtgtgccttagatttccgttttaagacatgtatatttttgtgagcctaaggtttcttatatacatataagtatataaataagtgattgtttattgcttcagctgcttcaacaagatatttactagtattagactatcaggaatacacccttgcgagattatgttttagattttaggccttagctcccactagaaattatttc

SEQ ID NO: 77236 - DNA, 3920 bp, Homo sapiens
ttctttactaaccctacaaaaaacctagtgtctataactaaagattctgaactgcccacctgcagctgtcttgatcgagttatacaaaaagacaaaggcccatattatacacaccttggggcaggaccaagtgttgctgctgtcagggaaatcatggagaataggtatggtcaaaaaggaaacgcaataaggatagaaatagtagtgtacaccggtaaagaagggaaaagctctcatgggtgtccaattgctaagtgggttttaagaagaagcagtgatgaagaaaaagttctttgtttggtccggcagcgtacaggccaccactgtccaactgctgtgatggtggtgctcatcatggtgtgggatggcatccctcttccaatggccgaccggctatacacagagctcacagagaatctaaagtcatacaatgggcaccctaccgacagaagatgcaccctcaatgaaaatcgtacctgtacatgtcaaggaattgatccagagacttgtggagcttcattctcttttggctgttcatggagtatgtactttaatggctgtaagtttggtagaagcccaagccccagaagatttagaattgatccaagctctcccttacatgaaaaaaaccttgaagataacttacagagtttggctacacgattagctccaatttataagcagtatgctccagtagcttaccaaaatcaggtggaatatgaaaatgttgcccgagaatgtcggcttggcagcaaggaaggtcgtcccttctctggggtcactgcttgcctggacttctgtgctcatccccacagggacattcacaacatgaataatggaagcactgtggtttgtaccttaactcgagaagataaccgctctttgggtgttattcctcaagatgagcagctccatgtgctacctctttataagctttcagacacagatgagtttggctccaaggaaggaatggaagccaagatcaaatctggggccatcgaggtcctggcaccccgccgcaaaaaaagaacgtgtttcactcagcctgttccccgttctggaaagaagagggctgcgatgatgacagaggttcttgcacataagataagggcagtggaaaagaaacctattccccgaatcaagcggaagaataactcaacaacaacaaacaacagtaagccttcgtcactgccaaccttagggagtaacactgagaccgtgcaacctgaagtaaaaagtgaaaccgaaccccattttatcttaaaaagttcagacaacactaaaacttattcgctgatgccatccgctcctcacccagtgaaagaggcatctccaggcttctcctggtccccgaagactgcttcagccacaccagctccactgaagaatgacgcaacagcctcatgcgggttttcagaaagaagcagcactccccactgtacgatgccttcgggaagactcagtggtgccaatgcagctgctgctgatggccctggcatttcacagcttggcgaagtggctcctctccccaccctgtctgctcctgtgatggagcccctcattaattctgagccttccactggtgtgactgagccgctaacgcctcatcagccaaaccaccagccctccttcctcacctctcctcaagaccttgcctcttctccaatggaagaagatgagcagcattctgaagcagatgagcctccatcagacgaacccctatctgatgaccccctgtcacctgctgaggagaaattgccccacattgatgagtattggtcagacagtgagcacatctttttggatgcaaatattggtggggtggccatcgcacctgctcacggctcggttttgattgagtgtgcccggcgagagctgcacgctaccactcctgttgagcaccccaaccgtaatcatccaacccgcctctcccttgtcttttaccagcacaaaaacctaaataagccccaacatggttttgaactaaacaagattaagtttgaggctaaagaagctaagaataagaaaatgaaggcctcagagcaaaaagaccaggcagctaatgaaggtccagaacagtcctctgaagtaaatgaattgaaccaaattccttctcataaagcattaacattaacccatgacaatgttgtcaccgtgtccccttatgctctcacacacgttgcggggccctataaccattgggtctgaaggcttttctccccctcttaatgcctttgctagtgcagtgtattttttcaaggtgctgttaaaagaaagtcatgttgtcgtttactatcttcatctcacccatttcaagtctgaggtaaaaaaataataatgataacaaaacggggtgggtattcttaactgtgactatatttgtactgaagtctgatacagaattagaaaaaaaaaattcttgttgaaatattttgaaaacaaattccctactatcatcacatgcctccccaaccccaagtcaaaaacaagaggaatggtactacaaacatggctttgtccattaagagctaattcatttgtttatcttagcatactagatttgggaaaatgataactcatcttttctgataattgcctatgttctaggtaacaggaaaacaggcattaagtttattttagtcttcccattttcttcctattactttattgactcattttattgcaaaacaaaaaggattacccaaacaacatgtttcgaacaaggagaattttcaatgaaatacttgattctgttaaaatgcagaggtgctataacattcaaagtgtcagattccttgggagtatggaaaacctaatggtgcttctcccttggaaatgccataggaagcccacaaccgctaacacttacaattttggtgcaaaagcaaacagttccagcaggctctctaaagaaaaactcattgtaacttattaaaataatatctggtgcaaagtatctgttttgagcttttgactaatccaagtaaaggaatatgaagggattgtaaaaaacaaaatgtccattgatagaccatcgtgtacaagtagatttctgcttgttgaatatgtaaaatagggtaattcattgacttgttttagtattttgtgtgcctaaggtttcttatatacatataagtatataaataagtgattgtttattgcttcagctgcttcaacaagatatttactagtattagactatcaggaatacacccttgcgagattatgttttagattttaggccttagctcccactagaaattatttcttcaccagatttaatggataaagttttatggctctttatgcatccactcatctactcattcttcgagtctacacttattgaatgcctgcaaaatctaagtatcacttttatttttctttggatcaccacctatgacatagtaaacttgaagaataaaaactaccctcagaaatatttttaaaagaagtagcaaattatcttcagtataatccatggtaatgtatgcagtaattcaaattgatctctctctcaataggtttcttaacaatctaaacttgaaacatcaatgttaatttttggaactattgggatttgtgacgcttgttgcagtttaccaaaacaagtatttgaaaatatatagtatcaactgaaatgtttccattccgttgttgtagttaacatcatgaatggacttcttaagctgattaccccactgtgggaaccaaattggattcctactttgttggactctctttcctgattttaacaatttaccatcccattctctgccctgtgattttttttaaaagcttattcaatgttctgcagcattgtgattgtatgctggctacactgcttttagaatgctctttctcatgaagcaaggaaataaatttgtttgaaatgacattttctctcataaaactggtca

SEQ ID NO: 77237 - DNA, 241 bp, Homo sapiens
tctctagtagacatagtagataagaaagcaaaaacatgcaataaattactgtagttattgtgaagaagcccgtataggatggaggtacaggtcaattgtagttgaagggattcaggaaagacttcatagatgagggaagtcttgcttgaagtgactcctcaaagatgaataaatgcttgccatgtggtgagtgaggagggacctttcagacagaatatgcaatgagacaggggacaaaggc

SEQ ID NO: 77238 - DNA, 726 bp, Homo sapiens
cccccttcacacccacccaaaaagcatcattgactaaaattttaaactaataaccaacagggtattgataccaaaagcagctgttaaagaaatagcacttcaggccaggcacagtggctcacacctataatcccagcactttgagaggccaaggtgggaggatcacttgagcccaagaggtcaagaccagcctggacaacacagtgaaacctcatctctacaaaaaataaaaattagccaggcatggtggcacattcctgtagtaccagatactcaggaggctgaggtgggaggattgcttgagcccaggaggttgagggtgcaatgagtcgtgattgcaccactgcgctccagcctgggtggaatgacagagtgacaccgtgagacagagggagtgggtgagagtgagaccgtgtctcaaaaaaaaaaaaaaaagaaatgctactcgaaagataagacaccgtgaatgattattggaagaactattcaaatatgtaaaatccagtttttggaaagacaatgtcacctgcctcacctgctgcactcatgtttccttctgcaacctgcttcccttctgcccacaactgaagttcctcaccttgttctgctttttcatttttcaatatacttctcaccttctaataaacctcgtgaattgcttatctgttacatgtattgtttcttgtctcgatcttcctgctggaatgcaagctccatgaaggcaga

SEQ ID NO: 77239 - DNA, 339 bp, Homo sapiens
ctctcgttggggcttgtaactctagcgaattgcattttttcctaattacaggaaaaatagcaaattggcaaacatcaggaagtgggtacacctcctctgatttacaaggaagagtgtaaggtgactttatagctcaggaattcagtgaaataaatttatggttagaaaaattcatgttctttatgtgatgaaggtcctttaacttttaacacgcttctccagttaagctgagcaggactcacacggaaatggctgtctacagctgccgcaaattgatttatccccagataattgtcagagctgcagaccaaattgttagaaagaaacagttctttaatt

SEQ ID NO: 77240 - DNA, 292 bp, Homo sapiens
gattggaggaagaatccagagaattcccctcaaatacaccagtgcccttcagaagaatgaagtcaaaacacggagacagaatcctgggacctagggtgggaaagaatggagtctaagctctgcccacccattcagcaggtaggcaaggtgagcctgtctgccactgttcctgctctgaggataaggaggtgaaacaacctggtcaacagcattacctcctggtgctgacagttcctgtgtgggaaaacagacaatcaataagttaaaaacaaacaaacaaaaaaagatgata

SEQ ID NO: 77241 - DNA, 438 bp, Homo sapiens
cttgacgctgtccccaggctctgcggggccaggaatagggccactgggcctggggtccttgtagttcaagggtcaccctgaactgcggggctctaactatagagaccctggggcagtgacgcctgtgcaacctgcccgcctgtcactccctcccccaacccctcacacttgccctgcctccttgacctgccctgcccacccctcaccctcaccctcacgctgcccccttatcccgcccctggcacctgccctgcccttcccctcctgtgatggttaatactgagtgtcaacttgattggactgaaggatgcaaagtatcgatcctgggtgtgtctgtgagtgtgttgccaaagaagattaacatttgagtcagtggctgggaaaggcagacccatccttaatctgggtgggcaccatctaatcagctgccagctctgc

SEQ ID NO: 77242 - DNA, 427 bp, Homo sapiens
ctgccaacccgttcagcctcacagctcaaacagcatgttcccggcagtacccgaagccaggttctgtgaccttgggatgctttggtgggccacctgggtaatagcaaggtacctgatgtgcattacttcatttaatccatacaagaaatgtatgaaatcactactatcctgctatttcacagatgagaaacctgagacttagagagaatgtgacttgcttaaacccataaatgttggagccagaacccaagaaatttgacaagcaattttgaaccactttgttcactttctcaagcaatcctcccgcctcagcctcccaaagtgctgggattacaggcacgagccaccacacccagcagtattactgttctaatcaggcctcatcatatgagatgttgggtgtatgggactcagggctgagagagaa

SEQ ID NO: 77243 - DNA, 678 bp, Homo sapiens
caattaagtccaagttccagcgccctagaaggcaacaggcttaagaggcagaggagggatctgggggaggggcgagaaagagcgtttagaaagcgagaattgacttcagagaaagagcacaggactgggggaggggccctctggttctcgtctctgccctgccggagactgggacatccttttctccctgggtctgtgtccccgtcgctacatcccagcctggagggcatggcccagcggttgcataggtccctcggtttctgcagagcccgggagtcaccctattttggtaaaggtgaattgctcctccatgggtcgtgaaagaagatcatgtcagtggtggtgtttctgctcgtctcagaagggaagtctgtgacccgtgggagttgctggggagggcctggtctgggccaggcctcttctttgggttgccccctcacacactctggtcatccaggaagcctctgtggccctcggaatgtgtaaaagatggtggttttaggagctgctggttttgcaactgagtgctgacggcttatttcttgttaatgattctgtcaaaagtgtcttagcgatgctcttcagcccttcatcacccacccaaaaaagattaaagtggattcttcatcagctattttaaaatcacctaagaattatacaatcctttggagaatcaaa

SEQ ID NO: 77244 - DNA, 452 bp, Homo sapiens
cttcctcagccttctgccatcagacctgcaaacttgcctgcctacacttccttgctttcctccctccctccagttctaatgtcttctgattctctccaaggtgaattgctcctccatgggtcgtgaaagaagatcatgtcagtggtggtgtttctgctcgtctcagaagggaagtctgtgacccgtgggagttgctggggagggcctggtctgggccaggcctcttctttgggttgccccctcacacactctggtcatccaggaagcctctgtggccctcggaatgtgtaaaagatggtggttttaggagctgctggttttgcaactgagtgctgacggcttatttcttgttaatgattctgtcaaaagtgtcttagcgatgctcttcagcccttcatcacccacccaaaaaagattaaagtggattcttcatcagctattttaaaatcacc

SEQ ID NO: 77245 - DNA, 663 bp, Homo sapiens
tgctgggaggagctgcccaggtgtgctgaggggcctgtactcaggaagagaaacagggaatcctccacagcactagaaaaacaccccaactcaccaatgacagcaaagcagatattggaagtcattcagaaagaagggttaaaagaaacaagttctggaagacagaaagcccagattaaggttggcagtgtccgtttctgtttcagaccccggcatggcttggagacagcgttggtgtgtatgaaggatcttcctccaatgaaggatttgggacaactttccatgatgattatattagagcctcagctgctttcgtgttggtcatgaggtgatgctgaaccgaatgcttgaactagcaggagtggctgggattgcattggagtggttccgttcattccttccggtggaacctctccattagcctgtctgaatgcaatgcttcacactaacactcgaataggggatggaacattcttcaaaatccctggaaagtcaggcctctatgctctcaaaaaagaggagtcgtcatgcccagcagatggcacgttggatttagtctgtgaatctgaattggatggtacagatatggccgaggcaaatgcccatggagaagaaaatggagtcatgttcgggaccactctacaagtacagaagatgtgtata

SEQ ID NO: 77246 - DNA, 524 bp, Homo sapiens
tgctgggaggagctgcccaggtgtgctgaggggcctgtactcaggaagagaaacagggaatcctccacagcactagaaaaacaccccaactcaccaatgacagcaaagcagatattggaagtcattcagaaagaagggttaaaagaaacaagtttcagaccccggcatggcttggagacagcgttggtgtgtatgaaggatcttcctccaatgaaggatttgggacaactttccatgatgattatattagagcctcagctgctttcgtgttggtcatgaggtgatgctgaaccgaatgcttgaactagcaggagtggctgggattgcattggagtggttccgttcattccttccggtttgttcgaagcaggtaactgatgaagcatcttccactcgagattcaagccttactaacacagcagtgcaaagcaagttagtgtcttccttccagcagcacaccaaaaaggctcttaaacaggctttgaggcagcagcagaaaagaagaaatggagtctcaatgatgg

SEQ ID NO: 77247 - DNA, 451 bp, Homo sapiens
gagcaccccgtggaatcccccacgtcatcatcagaaccatcaatgagatgcaaacatgaaagacaagaggaagaagaaggaccgcacctgggccgaggctgcccgcctggcactagaaaaacaccccaactcaccaatgacagcaaagcagatattggaagtcattcagaaagaagggttaaaagaaacaagtggaacctctccattagcctgtctgaatgcaatgcttcacactaacactcgaataggggatggaacattcttcaaaatccctggaaagtcaggcctctatgctctcaaaaaagaggagtcgtcatgcccagcagatggcacgttggatttagtctgtgaatctgaattggatggtacagatatggccgaggcaaatgcccatggagaagaaaatggagtcatgttcgggaccactctacaagtacagaagatgtgtata

SEQ ID NO: 77248 - DNA, 887 bp, Homo sapiens
agctctgggccttgagactgggatgtagcttggcttacacctcaccttgctgggctctcacctgggctgccagcagaggtgttaagtggggcacagctgtggcagggaacagggaagaaagggaggaggccagctccccagacagcctagacctcgtatggtgagccaatatcagtgacacccaagtgtcctctagttctcagcccccaaggtggccctggagcagggacttcctccggcccggggaacccagggaagcccctttctctgctgcactgacaccggttctttgccttcaaaaaggaggaaacaaatgagctgatgtgaagactgaaattaccctggactacagatggcagtggggtagtggtgggacagttcagggctccagatggagggggacagttcagggctccagatggaggggaagatgctccctctgggcagttctaggtacccagctcctacaggggtcactgccaaggccaagatgccccaggaaggtggcacacgccccggggagggcattgtttcatgtgtgactacaacctctgaataaacacaggcgcagactctcaggctaaatatagcctggcaagtgtgagaggtgggtggggagctggtttggggggagcaagatgcacccaggatggaggggcacccttccctgagtcacctctgctggtgctggggaaccagcgttacctttagatgggccaggccccggattcacatggaggggaaccatactctacagtttgtagagggcagaggttggaggtggggaggtgcacacaggatggactctggagcccatcagactgggttcactactgagcctcagtttcctcatctgaaaaaatgggataatagcacttacctaccca

SEQ ID NO: 77249 - DNA, 313 bp, Homo sapiens
tgtctcaggcacgctctgattatctgagataatattctcagaggattcctttgaaacactagtgataacattatggaggtcttgggccactgaggttctcttcagtgggttttttttttttttttttttttgggaattgggattttggtggggtcgccaaggtgggagtgagggggcggcaatctcgggttaatgggcaccctctgcttcgggggtcaaaggctgtcctcgtgcctcagcttccggagtagccaaaataaggggggggtgcaccaccccaagaaattttctgtgtatattaagaaaagagggg

SEQ ID NO: 77250 - DNA, 314 bp, Homo sapiens
ctgtaaaaaaatttttttttcttcctgtgagaaattgagactcttaaaagttaaagtctactaatgaaagattatttgcttgtgcctgttttctacattcatttttctttaaaggttgactcttatttttaccctcccaaatccagactcttctatgtactctccttaaattttaaactcccaagctttgtatagaagtcgataatctggtccagatgctgaaaagaagacaaagctttcacatttgcaatattggcttcattttctggacttctgttgttttaatcatgagtgttcatgtttctttaaaacag

SEQ ID NO: 77251 - DNA, 419 bp, Homo sapiens
tgtcctctctctcttcttagatgatctcatccatttccatgactacaaccactcaatgattcccaaatttatatctctaggtccaggcctgtctctagaaacatttactggggtgtcccgtcggcactgtagacatttgagacaatgccatttcaacgcagacttcctcctgatttctctcactcccaaattgttgagttcattcatttgttgaatgaatatttattattctattcagccatacaaatagttgacttattgattatttactggatgtgtcagactctcgtttaagctttaatctttataacaccgtcgtgaattagatactattcttgtttccattttacaggtgaggaaattgaggcccagaaagtttaagaagtagcatgcctaaattaaagagcagtaagtggtag

SEQ ID NO: 77252 - DNA, 544 bp, Homo sapiens
ctaaagtcaaattatgtggtttaagtcaccctctgtacagcaactttaaatctactttctgtacttccattttgtttctgtgtaactgaaaacttcaaacactctcattctaattctacactattcctggaaatcctttctctttgatatatttatctaatttcatattctaatgtgtttttcctttcagacacaacaatcaactactcaaagatgccatctaatgcactatgccactaagtattgtggccagagagttattttaagtgtaataaattatcttaaaattgagggccgggcatagtggctcatgcctgtaatcctagcactttgggaggccgaggcgggtgaattgcctgaggtcaggagttcgagaccagcctgggccacacagtgaaacccagtctctactaaaatacaaaaaatcagctggccgtggcggcgtgcgcctgtagtcccagccactcgggaggctgagacaggagaattgcttgaacccggcaggcagaagttgcagtgagccgagatcgcgccactgcactcc

SEQ ID NO: 77253 - DNA, 1957 bp, Homo sapiens
gccctttccttttacttccttgcgagtcatagagctgtagggggatagacgtcttcccgcactcaggcgccggttgaggctgcgctcctggcgaaggacaggtgctcctttcagccggttaacgttcagctcaagaccggattaagtctcttgctctccaaataaaattgtaaaggtttggaaatatagaaccacatttttaccaaaaacctactagagagcattcgtcagcttgcccttttcgccccgaaaaacgactttttcattcacagcctgtctcttcctctttttaaatttatgccgacagaggaagaagctgatatttaacaaataacaagaggttgcgataaatagaatttaaggtgggaaagcagccgccaaactgacaaatcgtcttcgagaccgacaagaaaatagtagtccggaatttggctaatggatggagaaggtggtcgtttttcatagacccttacggagaatatctagtgaagctaaagagatcaccataaacttatgcattcaaacgcatttctggaacagaggtcgtaaccgattttgtttccatcatcagtcctgaacagttgattatttatataatcaactgttatttatataaaggtaataaaaatattacctttcctcctcctttacaatgaatatctgttagaacacctgccagtgtaacaatcagactacaaggctacaggattatgattactgtctcggatgatgagcccggggtcctacaaatcatgacccccgccggcccctcattctgcccatatttgccaaacgtctgcatcagtaatttgaataatttaaaatagttccaaaacagcaaagctcagcagttacgcaaagaaacaagaatggaaaacatcccctcaggcacagagaagtgtccacccctttgggtggaggaattatacaaatcaggagaaagataaggacaatagcagttcatcacgatttatcccgcctctgcaatgttctagacaaattaactcggagcgctccaatggacccgcatttgtctctttactattcaatcgctgtaagatatacggagactgcatcactttaaatgggagtatcaattgctttgtggttatgctggattttgtgttattgctcagtcactaaagtaagaaaaatctatatggcttgtcaaatttatgcctattgtatttcgccccctgctggtttagctcgtgtgcaagcttgaatttgtgtgtgtgtagaaactagaaattgattttaaacgaacacatgcttgttttcattttacagctctactaaacagaaatatcaaaataagaacatatgactagaccttaaagcagaccctacactaagaacatgtttaaactaaatgaatttaaactgcactccagcctgcgcgacagagtgaaaccctgtctaaaaaaaaattaaattaaattgcacaccccccatcagcttacaattttgtaatagggaaattgagtacctatttggccaactaacttgtaattggtaatcttacatgtaattccgaagacagtgccctaatgctcatgacattttattacaaagggaaagtatttgagtgtttttaaggtgataaatctgtgggaaatataaagtccatttcatttggagtcaatgatagtattgtttttatttaccttttaaaaattatggccataactgcattacctaagatttggcatcaagaaaagaagaagaaaaaaattaccagttaacatttgttgtatttacttctagtttttttttcctgtgcgtactttttacaaacttgtaatcataatttaagtagattttgtgtcccttttgtgttgtaagcatttccacccatcgtttaatgtaaaaccttaattttaattggctgcttagtagtcaatggaatgaccactatatggatagttttcagtattataaaataatacttagatga

SEQ ID NO: 77254 - DNA, 599 bp, Homo sapiens
acctactcagaaggaaaataatacttggtttagagatttaaatgctgtaatttacaagtaaactctctcaccaaatgaattttaaataagtgtcagaggcaagcatttaaaatttgtgaagggaaagaagatttgaaaattgcagtggtttcttttactggaggaaacagaatcccaacttaattggattgcgttacaggttgccgctgtaagtgcctttgcccagactctgcgaagatacacgtcgcttaatcacctggcccaggcagctcgtgcagtgcttcagaacacttcccaaatcaaccagatgcttagtgacctcaaccgtgtcgactttgccaatgtccaggagcaggcttcctgggtgtgccagtgtgatgacaacatggttcagagactagaaacagacttcaagatgactcttcagcagcagagcaccctggagcagtgggctgcgtggcttgacaatgtgatgatgcaagcactgaaaccctatgaaggaagacccagttttcctaaagccgccaggcagtttctgctaaaatggtctttctacaggtatcatctaggtttttcctaggctttcttcttcatattct

SEQ ID NO: 77255 - DNA, 3164 bp, Homo sapiens
  misc_feature (15)..(16): n is a, c, g, or t
  misc_feature (18)..(18): n is a, c, g, or t
agcggtacttctgcnncnactacaaacagtactttaaagacaggccttccactgccattcagagagccatggaggatactctagtttctttgggaagataaacactcaatctgctagttaagagacaaagctcaagagaaataagctgaagctgtaacctccatttcaaacttgtggttctgcagaccatcatgcagacatcagagactgggtcggacacaggctcgacagtgaccttacaaacatctgtggctagtcaagcagcagtgcctacgcaggtggtacagcaagtaccagtacaacaacaggtacagcaggtacagactgtgcagcaggtacaacatgtctatcccgctcaggtgcagtatgtggaaggaagcgatactgtctataccaatggagcaatccgaacaacaacgtatccttacacagagacacagatgtacagccaaaatactggagggaattactttgatactcaagggagttccgcccaggtgactaccgtggtctcatcccacagtatggtgggcactggtgggattcagatgggcgtcacaggaggacaactcatcagcagctctggaggaacctatctgatcggcaactcaatggagaattctggtcactcagtgacacacacaactcgggcctccccagcgacaattgaaatggcgattgagacgctgcaaaagtctgacggtctgtccactcacagaagctctcttctcaacagccatctccagtggctgttggacaattatgagacagcagaaggagtgagccttcccagaagcactctgtacaaccactaccttcgacactgtcaggaacacaaactggacccagtcaatgctgcctcttttggaaaattaataagatcaatttttatggggctacgaaccaggagattgggcactagaggaaactccaaataccactactatgggattcgtgtcaagccagattcccctcttaatcgtctgcaagaagacatgcagtatatggctatgagacaacaacccatgcaacagaaacaaaggtacaagcctatgcagaaagtggatggggttgcagatggtttcacaggaagtggtcaacagacaggcacatctgttgagcaaactgtaattgcccaaagccaacatcatcaacagtttttagatgcatctcgagcacttccagagtttggagaagttgaaatctcttctctgccagatggtactacctttgaggatatcaagtcactgcagagtctttatagagagcactgtgaggcaatattggacgttgttgtgaatcttcaatttagcctgatagaaaaattgtggcaaacattctggcgctattctccctctactccaactgatggcactaccattaccgaatcgagcaatctgagtgaaatagaaagtcgacttccgaaagcaaagctgataactctgtgcaaacatgagtctatcctgaaatggatgtgtaactgtgaccatgggatgtaccaggctttggtggagattctcatccccgacgtccttagacctattcctagtgccttgacccaagccattcgaaattttgcaaaaagccttgaaggttggctttccaatgccatgaacaatattccacagagaatgatacaaaccaaggttgccgctgtaagtgcctttgcccagactctgcgaagatacacgtcgcttaatcacctggcccaggcagctcgtgcagtgcttcagaacacttcccaaatcaaccagatgcttagtgacctcaaccgtgtcgactttgccaatgtccaggagcaggcttcctgggtgtgccagtgtgatgacaacatggttcagagactagaaacagacttcaagatgactcttcagcagcagagcaccctggagcagtgggctgcgtggcttgacaatgtgatgatgcaagcactgaaaccctatgaaggaagacccagttttcctaaagccgccaggcagtttctgctaaaatggtctttctacagctcaatggttattcgggacttaaccttacgcagtgctgctagctttggctccttccacctgatccgtctactctacgacgaatatatgttttacttagtagaacatcgtgttgctcaggcaacaggagagactcctatagcagtcatgggcgaggtaagagaggctgaaagagctgtgacccactgggttattaaaaataagccagaattacacttcagtctaaatacattattgattaaaaccatggttcctaaccaagtcagcctcagagccaggagggactgtggagttattgcaagagttccttaaattcctctgttcttatgtgcttaatcaaaagattctaaaattgtggattatatcatgtgaaagttcatggaatgtgtctctatattatacaggtacctatgtaaaagaaaaacttgagaaccactggaatatgaaaaatattttaagtgggaaaaagattggtgctcctgataaagcaaagggctaggaatacaatggaaaggattaaatatgtattttgtagactctttcccggtctccaagaacaaagtaaatgattctattttagaaggataaaaatggtaatgatgataactaacattttttggacacttactatgtgcgaggcacagttctatgttttttacatgtaataaagcacttaatgcaagtctttgagatacgttctactttattctgttttacaataagcatccgaggtttatgcagaaagctaaggcacagaaaggttaaatgattactcagctaaaaaatggtagagatttttttttcaaacacagtctgattttcaaacccatatgcttctaaccactaatgatgtaagggggaaaattctcttcttcagaatttctgaatagtcatcaaaatggcttatcaaaaagcttaaactctgaatataacaagggctggttaatataatgaggaatagatgcaaatgctcagatggttcagcactggcttattttgttatattgaatgcaggaggcgggggtagtttataccttgtcgaatcataccagattattaaatgtgacaaattacccaaggcggtaaaaaagacatgttcacttttaagctatgtgtatgtgcttatataaataaaaaagagtgaaaacagatattattcaa

SEQ ID NO: 77256 - DNA, 3220 bp, Homo sapiens
  misc_feature (171)..(171): n is a, c, g, or t
ctccccgtgcgagtgtctccctctccctctcgctctctctctctctccctctctctctctctttgtgagttatagcaaccgtgccttgtgaatcaagcgccatagtcaccgtagtcctggcgactgttacccatcaacaacaactactcctctcctcctcctcctcctctncctcctcctcctccccaccacaccatctccatcacccaccaacaacaccacaataatccacagccaagagaccatcatgcagacatcagagactgggtcggacacaggctcgacagtgaccttacaaacatctgtggctagtcaagcagcagtgcctacgcaggtggtacagcaagtaccagtacaacaacaggtacagcaggtacagactgtgcagcaggtacaacatgtctatcccgctcaggtgcagtatgtggaaggaagcgatactgtctataccaatggagcaatccgaacaacaacgtatccttacacagagacacagatgtacagccaaaatactggagggaattactttgatactcaagggagttccgcccaggtgactaccgtggtctcatcccacagtatggtgggcactggtgggattcagatgggcgtcacaggaggacaactcatcagcagctctggaggaacctatctgatcggcaactcaatggagaattctggtcactcagtgacacacacaactcgggcctccccagcgacaattgaaatggcgattgagacgctgcaaaagtctgacggtctgtccactcacagaagctctcttctcaacagccatctccagtggctgttggacaattatgagacagcagaaggagtgagccttcccagaagcactctgtacaaccactaccttcgacactgtcaggaacacaaactggacccagtcaatgctgcctcttttggaaaattaataagatcaatttttatggggctacgaaccaggagattgggcactagaggaaactccaaataccactactatgggattcgtgtcaagccagattcccctcttaatcgtctgcaagaagacatgcagtatatggctatgagacaacaacccatgcaacagaaacaaaggtacaagcctatgcagaaagtggatggggttgcagatggtttcacaggaagtggtcaacagacaggcacatctgttgagcaaactgtaattgcccaaagccaacatcatcaacagtttttagatgcatctcgagcacttccagagtttggagaagttgaaatctcttctctgccagatggtactacctttgaggatatcaagtcactgcagagtctttatagagagcactgtgaggcaatattggacgttgttgtgaatcttcaatttagcctgatagaaaaattgtggcaaacattctggcgctattctccctctactccaactgatggcactaccattaccgaatcgagcaatctgagtgaaatagaaagtcgacttccgaaagcaaagctgataactctgtgcaaacatgagtctatcctgaaatggatgtgtaactgtgaccatgggatgtaccaggctttggtggagattctcatccccgacgtccttagacctattcctagtgccttgacccaagccattcgaaattttgcaaaaagccttgaaggttggctttccaatgccatgaacaatattccacagagaatgatacaaaccaaggttgccgctgtaagtgcctttgcccagactctgcgaagatacacgtcgcttaatcacctggcccaggcagctcgtgcagtgcttcagaacacttcccaaatcaaccagatgcttagtgacctcaaccgtgtcgactttgccaatgtccaggagcaggcttcctgggtgtgccagtgtgatgacaacatggttcagagactagaaacagacttcaagatgactcttcagcagcagagcaccctggagcagtgggctgcgtggcttgacaatgtgatgatgcaagcactgaaaccctatgaaggaagacccagttttcctaaagccgccaggcagtttctgctaaaatggtctttctacagctcaatggttattcgggacttaaccttacgcagtgctgctagctttggctccttccacctgatccgtctactctacgacgaatatatgttttacttagtagaacatcgtgttgctcaggcaacaggagagactcctatagcagtcatgggcgaggtaagagaggctgaaagagctgtgacccactgggttattaaaaataagccagaattacacttcagtctaaatacattattgattaaaaccatggttcctaaccaagtcagcctcagagccaggagggactgtggagttattgcaagagttccttaaattcctctgttcttatgtgcttaatcaaaagattctaaaattgtggattatatcatgtgaaagttcatggaatgtgtctctatattatacaggtacctatgtaaaagaaaaacttgagaaccactggaatatgaaaaatattttaagtgggaaaaagattggtgctcctgataaagcaaagggctaggaatacaatggaaaggattaaatatgtattttgtagactctttcccggtctccaagaacaaagtaaatgattctattttagaaggataaaaatggtaatgatgataactaacattttttggacacttactatgtgcgaggcacagttctatgttttttacatgtaataaagcacttaatgcaagtctttgagatacgttctactttattctgttttacaataagcatccgaggtttatgcagaaagctaaggcacagaaaggttaaatgattactcagctaaaaaatggtagagatttttttttcaaacacagtctgattttcaaacccatatgcttctaaccactaatgatgtaagggggaaaattctcttcttcagaatttctgaatagtcatcaaaatggcttatcaaaaagcttaaactctgaatataacaagggctggttaatataatgaggaatagatgcaaatgctcagatggttcagcactggcttattttgttatattgaatgcaggaggcgggggtagtttataccttgtcgaatcataccagattattaaatgtgacaaattacccaaggcggtaaaaaagacatgttcacttttaagctatgtgtatgtgcttatataaataaaaaagagtgaaaacagatattattcaa

SEQ ID NO: 77257 - DNA, 3287 bp, Homo sapiens
  misc_feature (171)..(171): n is a, c, g, or t
ctccccgtgcgagtgtctccctctccctctcgctctctctctctctccctctctctctctctttgtgagttatagcaaccgtgccttgtgaatcaagcgccatagtcaccgtagtcctggcgactgttacccatcaacaacaactactcctctcctcctcctcctcctctncctcctcctcctccccaccacaccatctccatcacccaccaacaacaccacaataatccacagccaaggccacttggtcattctggcattttatggtagagaatacgttgagtttggctctggaaggaatatgagagaccatcatgcagacatcagagactgggtcggacacaggctcgacagtgaccttacaaacatctgtggctagtcaagcagcagtgcctacgcaggtggtacagcaagtaccagtacaacaacaggtacagcaggtacagactgtgcagcaggtacaacatgtctatcccgctcaggtgcagtatgtggaaggaagcgatactgtctataccaatggagcaatccgaacaacaacgtatccttacacagagacacagatgtacagccaaaatactggagggaattactttgatactcaagggagttccgcccaggtgactaccgtggtctcatcccacagtatggtgggcactggtgggattcagatgggcgtcacaggaggacaactcatcagcagctctggaggaacctatctgatcggcaactcaatggagaattctggtcactcagtgacacacacaactcgggcctccccagcgacaattgaaatggcgattgagacgctgcaaaagtctgacggtctgtccactcacagaagctctcttctcaacagccatctccagtggctgttggacaattatgagacagcagaaggagtgagccttcccagaagcactctgtacaaccactaccttcgacactgtcaggaacacaaactggacccagtcaatgctgcctcttttggaaaattaataagatcaatttttatggggctacgaaccaggagattgggcactagaggaaactccaaataccactactatgggattcgtgtcaagccagattcccctcttaatcgtctgcaagaagacatgcagtatatggctatgagacaacaacccatgcaacagaaacaaaggtacaagcctatgcagaaagtggatggggttgcagatggtttcacaggaagtggtcaacagacaggcacatctgttgagcaaactgtaattgcccaaagccaacatcatcaacagtttttagatgcatctcgagcacttccagagtttggagaagttgaaatctcttctctgccagatggtactacctttgaggatatcaagtcactgcagagtctttatagagagcactgtgaggcaatattggacgttgttgtgaatcttcaatttagcctgatagaaaaattgtggcaaacattctggcgctattctccctctactccaactgatggcactaccattaccgaatcgagcaatctgagtgaaatagaaagtcgacttccgaaagcaaagctgataactctgtgcaaacatgagtctatcctgaaatggatgtgtaactgtgaccatgggatgtaccaggctttggtggagattctcatccccgacgtccttagacctattcctagtgccttgacccaagccattcgaaattttgcaaaaagccttgaaggttggctttccaatgccatgaacaatattccacagagaatgatacaaaccaaggttgccgctgtaagtgcctttgcccagactctgcgaagatacacgtcgcttaatcacctggcccaggcagctcgtgcagtgcttcagaacacttcccaaatcaaccagatgcttagtgacctcaaccgtgtcgactttgccaatgtccaggagcaggcttcctgggtgtgccagtgtgatgacaacatggttcagagactagaaacagacttcaagatgactcttcagcagcagagcaccctggagcagtgggctgcgtggcttgacaatgtgatgatgcaagcactgaaaccctatgaaggaagacccagttttcctaaagccgccaggcagtttctgctaaaatggtctttctacagctcaatggttattcgggacttaaccttacgcagtgctgctagctttggctccttccacctgatccgtctactctacgacgaatatatgttttacttagtagaacatcgtgttgctcaggcaacaggagagactcctatagcagtcatgggcgaggtaagagaggctgaaagagctgtgacccactgggttattaaaaataagccagaattacacttcagtctaaatacattattgattaaaaccatggttcctaaccaagtcagcctcagagccaggagggactgtggagttattgcaagagttccttaaattcctctgttcttatgtgcttaatcaaaagattctaaaattgtggattatatcatgtgaaagttcatggaatgtgtctctatattatacaggtacctatgtaaaagaaaaacttgagaaccactggaatatgaaaaatattttaagtgggaaaaagattggtgctcctgataaagcaaagggctaggaatacaatggaaaggattaaatatgtattttgtagactctttcccggtctccaagaacaaagtaaatgattctattttagaaggataaaaatggtaatgatgataactaacattttttggacacttactatgtgcgaggcacagttctatgttttttacatgtaataaagcacttaatgcaagtctttgagatacgttctactttattctgttttacaataagcatccgaggtttatgcagaaagctaaggcacagaaaggttaaatgattactcagctaaaaaatggtagagatttttttttcaaacacagtctgattttcaaacccatatgcttctaaccactaatgatgtaagggggaaaattctcttcttcagaatttctgaatagtcatcaaaatggcttatcaaaaagcttaaactctgaatataacaagggctggttaatataatgaggaatagatgcaaatgctcagatggttcagcactggcttattttgttatattgaatgcaggaggcgggggtagtttataccttgtcgaatcataccagattattaaatgtgacaaattacccaaggcggtaaaaaagacatgttcacttttaagctatgtgtatgtgcttatataaataaaaaagagtgaaaacagatattattcaa

SEQ ID NO: 77258 - DNA, 4252 bp, Homo sapiens
  misc_feature (15)..(16): n is a, c, g, or t
  misc_feature (18)..(18): n is a, c, g, or t
agcggtacttctgcnncnactacaaacagtactttaaagacaggccttccactgccattcagagagccatggaggatactctagtttctttgggaagataaacactcaatctgctagttaagagacaaagctcaagagaaataagctgaagctgtaacctccatttcaaacttgtggttctgcagaccatcatgcagacatcagagactgggtcggacacaggctcgacagtgaccttacaaacatctgtggctagtcaagcagcagtgcctacgcaggtggtacagcaagtaccagtacaacaacaggtacagcaggtacagactgtgcagcaggtacaacatgtctatcccgctcaggtgcagtatgtggaaggaagcgatactgtctataccaatggagcaatccgaacaacaacgtatccttacacagagacacagatgtacagccaaaatactggagggaattactttgatactcaagggagttccgcccaggtgactaccgtggtctcatcccacagtatggtgggcactggtgggattcagatgggcgtcacaggaggacaactcatcagcagctctggaggaacctatctgatcggcaactcaatggagaattctggtcactcagtgacacacacaactcgggcctccccagcgacactccagtggctgttggacaattatgagacagcagaaggagtgagccttcccagaagcactctgtacaaccactaccttcgacactgtcaggaacacaaactggacccagtcaatgctgcctcttttggaaaattaataagatcaatttttatggggctacgaaccaggagattgggcactagaggaaactccaaataccactactatgggattcgtgtcaagccagattcccctcttaatcgtctgcaagaagacatgcagtatatggctatgagacaacaacccatgcaacagaaacaaaggtacaagcctatgcagaaagtggatggggttgcagatggtttcacaggaagtggtcaacagacaggcacatctgttgagcaaactgtaattgcccaaagccaacatcatcaacagtttttagatgcatctcgagcacttccagagtttggagaagttgaaatctcttctctgccagatggtactacctttgaggatatcaagtcactgcagagtctttatagagagcactgtgaggcaatattggacgttgttgtgaatcttcaatttagcctgatagaaaaattgtggcaaacattctggcgctattctccctctactccaactgatggcactaccattaccgaatcgagcaatctgagtgaaatagaaagtcgacttccgaaagcaaagctgataactctgtgcaaacatgagtctatcctgaaatggatgtgtaactgtgaccatgggatgtaccaggctttggtggagattctcatccccgacgtccttagacctattcctagtgccttgacccaagccattcgaaattttgcaaaaagccttgaaggttggctttccaatgccatgaacaatattccacagagaatgatacaaaccaaggttgccgctgtaagtgcctttgcccagactctgcgaagatacacgtcgcttaatcacctggcccaggcagctcgtgcagtgcttcagaacacttcccaaatcaaccagatgcttagtgacctcaaccgtgtcgactttgccaatgtccaggagcaggcttcctgggtgtgccagtgtgatgacaacatggttcagagactagaaacagacttcaagatgactcttcagcagcagagcaccctggagcagtgggctgcgtggcttgacaatgtgatgatgcaagcactgaaaccctatgaaggaagacccagttttcctaaagccgccaggcagtttctgctaaaatggtctttctacagctcaatggttattcgggacttaaccttacgcagtgctgctagctttggctccttccacctgatccgtctactctacgacgaatatatgttttacttagtagaacatcgtgttgctcaggcaacaggagagactcctatagcagtcatgggcgagtttggtgatttaaatgccgtgtctcctggaaatctggataaagatgaaggcagtgaagtagaaagtgaaatggatgaagaactggatgactcttcagagcctcaagccaaaagagagaaaacagagctgagccaggcatttccagtgggctgcatgcagcctgttctcgagactggcgtgcaaccaagcctcctgaatccaattcacagcgagcacattgtcacaagtactcagactatcagacagtgcagcgctacaggaaatacctacactgcagtctaaagaatattaaagcgtatttttccagcttacattaaccctgttgatattgggcttaagttgaaaatttaataagcctgaaggtcgactgttgtcaaattctatctgtgctgaacattaactttttggagttgtgaaatggaatgggtgtatgtattttgccagatctttttttttaacgtaaacaaattatttgcttcttaataatgaattttttcccttagtttcaggtgtcaagaaggatttttacaacacttaatgtcaatgttttgttttcttataattaaaaagtaatttacattttttgtagcttaaaatattttattgttgattgttagtcttggtgtatgatttcatgtgtaagttttttaattagatgcacttctgtgaaatatcaaaagaaatgatttttttgatttacactggaggcatgcccatttggcagcagatgcatcaaatttgcttttgaaaggtgcttttcattggacagaaccataagacactattttgataacattttgagtacggagagagaatacagagcatttttattatagtgctagagggtttggaaggtcatctatttttctctgaggaaaaattgagctgtacatttatcagttcagagtaaatgacagaattgcaagagattatgctaatatgtacataatttgtgtacataattattaaaccatgttaacaatgcaagcttccgttaaacattgaattttaactattatttgcataccaattcctctgtttaaagactactgattctgtatttgggaccactgcacagatgcattctgctgttaagtgggggctgttatagttagatactgaagcagaaaaaaaagacttgactttttttttttaagtgtacatgctacttatgctgagctggacatacaggaaaccattccatttggatgactttcttttattccaggtctttttcctaatagtagttcaatatgctgctattataaacgagaatttatagaatgcaaggaatgtagcaacctacataacgttatttccttcaaaactatttcctggtttctaaagtatgtggatttaaattgtaaacagaacctgaaggcagtgtaactggcacacctcactgttacttatccccaattctgtaggatttggataggtggctggatggaccattgccattgaagaatgtacatcagggatcatcgtacctcggctattacatggtgccttaaaacagaactgaagctaaggtttagtaaggtttattttgttcatgtgactaactcttcaatccatttgacaaagtgtgcctgtcattttcagattcctgaagtaaggacaggtgacatgttcttcaaaggaaatttagggaaaacaaaggaaaacaaaaagacaaaaatcagtttccctctttgagtgaccgtggatctattttttattcttagagctgaatattacttgattacaaatcagattgcttaagggtgtggaatagcaggctagttttaataccaacttgttaacataaaatcatatatgttttagaccattcttatttagttacaattttagaaagttaacaaagtaagcaggtacttatcgaagtgcatcttttcagtctaaatgtttgtctgtgtgtctaggtgctggtgagtccacatggacacatgagtgcccatggggcaggagtctgctataaagtcagaaggtgagatcctagagagttacacccagccccattttaatttgcatgaaaagccaaggttcttttaagcactcaaattatttaatggttaaaacacaagaaaggcacatctgttcatttaaatagttgtaaaaaactaatcagcaaaaataaatagataataaagccaaaaaaaaggaaa

SEQ ID NO: 77259 - DNA, 2832 bp, Homo sapiens
cgggccggactctgggctgtagctcatccccgacgtccttatgacctattctagtgccttgacccaagccattcgaaattttgcaaaaagccttgaaggttggctttccaatgccatgaacaatattccacagagaatgatacaaaccaaggttgccgctgtaagtgcctttgcccagactctgcgaagatacacgtcgcttaatcacctggcccaggcagctcgtgcagtgcttcagaacacttcccaaatcaaccagatgcttagtgacctcaaccgtgtcgactttgccaatgtccaggagcaggcttcctgggtgtgccagtgtgatgacaacatggttcagagactagaaacagacttcaagatgactcttcagcagcagagcaccctggagcagtgggctgcgtggcttgacaatgtgatgatgcaagcactgaaaccctatgaaggaagacccagttttcctaaagccgccaggcagtttctgctaaaatggtctttctacagctcaatggttattcgggacttaaccttacgcagtgctgctagctttggctccttccacctgatccgtctactctacgacgaatatatgttttacttagtagaacatcgtgttgctcaggcaacaggagagactcctatagcagtcatgggcgagtttggtgatttaaatgccgtgtctcctggaaatctggataaagatgaaggcagtgaagtagaaagtgaaatggatgaagaactggatgactcttcagagcctcaagccaaaagagagaaaacagagctgagccaggcatttccagtgggctgcatgcagcctgttctcgagactggcgtgcaaccaagcctcctgaatccaattcacagcgagcacattgtcacaagtactcagactatcagacagtgcagcgctacaggaaatacctacactgcagtctaaagaatattaaagcgtatttttccagcttacattaaccctgttgatattgggcttaagttgaaaatttaataagcctgaaggtcgactgttgtcaaattctatctgtgctgaacattaactttttggagttgtgaaatggaatgggtgtatgtattttgccagatctttttttttaacgtaaacaaattatttgcttcttaataatgaattttttcccttagtttcaggtgtcaagaaggatttttacaacacttaatgtcaatgttttgttttcttataattaaaaagtaatttacattttttgtagcttaaaatattttattgttgattgttagtcttggtgtatgatttcatgtgtaagttttttaattagatgcacttctgtgaaatatcaaaagaaatgatttttttgatttacactggaggcatgcccatttggcagcagatgcatcaaatttgcttttgaaaggtgcttttcattggacagaaccataagacactattttgataacattttgagtacggagagagaatacagagcatttttattatagtgctagagggtttggaaggtcatctatttttctctgaggaaaaattgagctgtacatttatcagttcagagtaaatgacagaattgcaagagattatgctaatatgtacataatttgtgtacataattattaaaccatgttaacaatgcaagcttccgttaaacattgaattttaactattatttgcataccaattcctctgtttaaagactactgattctgtatttgggaccactgcacagatgcattctgctgttaagtgggggctgttatagttagatactgaagcagaaaaaaaagacttgactttttttttttaagtgtacatgctacttatgctgagctggacatacaggaaaccattccatttggatgactttcttttattccaggtctttttcctaatagtagttcaatatgctgctattataaacgagaatttatagaatgcaaggaatgtagcaacctacataacgttatttccttcaaaactatttcctggtttctaaagtatgtggatttaaattgtaaacagaacctgaaggcagtgtaactggcacacctcactgttacttatccccaattctgtaggatttggataggtggctggatggaccattgccattgaagaatgtacatcagggatcatcgtacctcggctattacatggtgccttaaaacagaactgaagctaaggtttagtaaggtttattttgttcatgtgactaactcttcaatccatttgacaaagtgtgcctgtcattttcagattcctgaagtaaggacaggtgacatgttcttcaaaggaaatttagggaaaacaaaggaaaacaaaaagacaaaaatcagtttccctctttgagtgaccgtggatctattttttattcttagagctgaatattacttgattacaaatcagattgcttaagggtgtggaatagcaggctagttttaataccaacttgttaacataaaatcatatatgttttagaccattcttatttagttacaattttagaaagttaacaaagtaagcaggtacttatcgaagtgcatcttttcagtctaaatgtttgtctgtgtgtctaggtgctggtgagtccacatggacacatgagtgcccatggggcaggagtctgctataaagtcagaaggtgagatcctagagagttacacccagccccattttaatttgcatgaaaagccaaggttcttttaagcactcaaattatttaatggttaaaacacaagaaaggcacatctgttcatttaaatagttgtaaaaaactaatcagcaaaaataaatagataataaagccaaaaaaaaggaaa

SEQ ID NO: 77260 - DNA, 4199 bp, Homo sapiens
  misc_feature (15)..(16): n is a, c, g, or t
  misc_feature (18)..(18): n is a, c, g, or t
agcggtacttctgcnncnactacaaacagtactttaaagacaggccttccactgccattcagagagccatggaggatactctagtttctttgggaagataaacactcaatctgctagttaagagacaaagctcaagagaaataagctgaagctgtaacctccatttcaaacttgtggttctgcagaccatcatgcagacatcagagactgggtcggacacaggctcgacagtgaccttacaaacatctgtggctagtcaagcagcagtgcctacgcaggtggtacagcaagtaccagtacaacaacaggtacagcaggtacagactgtgcagcaggtacaacatgtctatcccgctcaggtgcagtatgtggaaggaagcgatactgtctataccaatggagcaatccgaacaacaacgtatccttacacagagacacagatgtacagccaaaatactggagggaattactttgatactcaagggagttccgcccaggtgactaccgtggtctcatcccacagtatggtgggcactggtgggattcagatgggcgtcacaggaggacaactcatcagcagctctggaggaacctatctgatcggcaactcaatggagaattctggtcactcagtgacacacacaactcgggcctccccagcgacactccagtggctgttggacaattatgagacagcagaaggagtgagccttcccagaagcactctgtacaaccactaccttcgacactgtcaggaacacaaactggacccagtcaatgctgcctcttttggaaaattaataagatcaatttttatggggctacgaaccaggagattgggcactagaggaaactccaaataccactactatgggattcgtgtcaagccagattcccctcttaatcgtctgcaagaagacatgcagtatatggctatgagacaacaacccatgcaacagaaacaaaggtacaagcctatgcagaaagtggatggggttgcagatggtttcacaggaagtggtcaacagacaggcacatctgttgagcaaactgtaattgcccaaagccaacatcatcaacagtttttagatgcatctcgagcacttccagagtttggagaagttgaaatctcttctctgccagatggtactacctttgaggatatcaagtcactgcagagtctttatagagagcactgtgaggcaatattggacgttgttgtgaatcttcaatttagcctgatagaaaaattgtggcaaacattctggcgctattctccctctactccaactgatggcactaccattaccgaatcgagcaatctgagtgaaatagaaagtcgacttccgaaagcaaagctgataactctgtgcaaacatgagtctatcctgaaatggatgtgtaactgtgaccatgggatgtaccaggctttggtggagattctcatccccgacgtccttagacctattcctagtgccttgacccaagccattcgaaattttgcaaaaagccttgaaggttggctttccaatgccatgaacaatattccacagagaatgatacaaaccaaggttgccgctgtaagtgcctttgcccagactctgcgaagatacacgtcgcttaatcacctggcccaggcagctcgtgcagtgcttcagaacacttcccaaatcaaccagatgcttagtgacctcaaccgtgtcgactttgccaatgtccaggagcaggcttcctgggtgtgccagtgtgatgacaacatggttcagagactagaaacagacttcaagatgactcttcagcagcagagcaccctggagcagtgggctgcgtggcttgacaatgtgatgatgcaagcactgaaaccctatgaaggaagacccagttttcctaaagccgccaggcagtttctgctaaaatggtctttctacagctcaatggttattcgggacttaaccttacgcagtgctgctagctttggctccttccacctgatccgtctactctacgacgaatatatgttttacttagtagaacatcgtgttgctcaggcaacaggagagactcctatagcagtcatgggcgagtttggtgatttaaatgccgtgtctcctggaaatctggataaagatgaaggcagtgaagtagaaagtgaaatggatgaagaactggatgactcttcagagcctcaagccaaaagagagaaaacagagctgagccaggcatttccagtgggctgcatgcagcctgttctcgagactggcgtgcaaccaagcctcctgaatccaattcacagcgagcacattgtcacaagtactcagactatcagacagtgcagcgctacaggaaatacctacactgcagtctaaagaatattaaagcgtatttttccagcttacattaaccctgttgatattgggcttaagttgaaaatttaataagcctgaaggtcgactgttgtcaaattctatctgtgctgaacattaactttttggagttgtgaaatggaatgggtgtatgtattttgccagatctttttttttaacgtaaacaaattatttgcttcttaataatgaattttttcccttagtttcaggtgtcaagaaggatttttacaacacttaatgtcaatgttttgttttcttataattaaaaagtaatttacattttttgtagcttaaaatattttattgttgattgttagtcttggtgtatgatttcatgtgtaagttttttaattagatgcacttctgtgaaatatcaaaagaaatgatttttttgatttacactggaggcatgcccatttggcagcagatgcatcaaatttgcttttgaaaggtgcttttcattggacagaaccataagacactattttgataacattttgagtacggagagagaatacagagcatttttattatagtgctagagggtttggaaggtcatctatttttctctgaggaaaaattgagctgtacatttatcagttcagagtaaatgacagaattgcaagagattatgctaatatgtacataatttgtgtacataattattaaaccatgttaacaatgcaagcttccgttaaacattgaattttaactattatttgcataccaattcctctgtttaaagactactgattctgtatttgggaccactgcacagatgcattctgctgttaagtgggggctgttatagttagatactgaagcagaaaaaaaagacttgactttttttttttaagtgtacatgctacttatgctgagctggacatacaggaaaccattccatttggatgactttcttttattccaggtctttttcctaatagtagttcaatatgctgctattataaacgagaatttatagaatgcaaggaatgtagcaacctacataacgttatttccttcaaaagcagtgtaactggcacacctcactgttacttatccccaattctgtaggatttggataggtggctggatggaccattgccattgaagaatgtacatcagggatcatcgtacctcggctattacatggtgccttaaaacagaactgaagctaaggtttagtaaggtttattttgttcatgtgactaactcttcaatccatttgacaaagtgtgcctgtcattttcagattcctgaagtaaggacaggtgacatgttcttcaaaggaaatttagggaaaacaaaggaaaacaaaaagacaaaaatcagtttccctctttgagtgaccgtggatctattttttattcttagagctgaatattacttgattacaaatcagattgcttaagggtgtggaatagcaggctagttttaataccaacttgttaacataaaatcatatatgttttagaccattcttatttagttacaattttagaaagttaacaaagtaagcaggtacttatcgaagtgcatcttttcagtctaaatgtttgtctgtgtgtctaggtgctggtgagtccacatggacacatgagtgcccatggggcaggagtctgctataaagtcagaaggtgagatcctagagagttacacccagccccattttaatttgcatgaaaagccaaggttcttttaagcactcaaattatttaatggttaaaacacaagaaaggcacatctgttcatttaaatagttgtaaaaaactaatcagcaaaaataaatagataataaagccaaaaaaaaggaaa

SEQ ID NO: 77261 - DNA, 2841 bp, Homo sapiens
  misc_feature (15)..(16): n is a, c, g, or t
  misc_feature (18)..(18): n is a, c, g, or t
agcggtacttctgcnncnactacaaacagtactttaaagacaggccttccactgccattcagagagccatggaggatactctagtttctttgggaagataaacactcaatctgctagttaagagacaaagctcaagagaaataagctgaagctgtaacctccatttcaaacttgtggttctgcagaccatcatgcagacatcagagactgggtcggacacaggctcgacagtgaccttacaaacatctgtggctagtcaagcagcagtgcctacgcaggtggtacagcaagtaccagtacaacaacaggtacagcaggtacagactgtgcagcaggtacaacatgtctatcccgctcaggtgcagtatgtggaaggaagcgatactgtctataccaatggagcaatccgaacaacaacgtatccttacacagagacacagatgtacagccaaaatactggagggaattactttgatactcaagggagttccgcccaggtgactaccgtggtctcatcccacagtatggtgggcactggtgggattcagatgggcgtcacaggaggacaactcatcagcagctctggaggaacctatctgatcggcaactcaatggagaattctggtcactcagtgacacacacaactcgggcctccccagcgacactccagtggctgttggacaattatgagacagcagaaggagtgagccttcccagaagcactctgtacaaccactaccttcgacactgtcaggaacacaaactggacccagtcaatgctgcctcttttggaaaattaataagatcaatttttatggggctacgaaccaggagattgggcactagaggaaactccaaataccactactatgggattcgtgtcaagccagattcccctcttaatcgtctgcaagaagacatgcagtatatggctatgagacaacaacccatgcaacagaaacaaaggtacaagcctatgcagaaagtggatggggttgcagatggtttcacaggaagtggtcaacagacaggcacatctgttgagcaaactgtaattgcccaaagccaacatcatcaacagtttttagatgcatctcgagcacttccagagtttggagaagttgaaatctcttctctgccagatggtactacctttgaggatatcaagtcactgcagagtctttatagagagcactgtgaggcaatattggacgttgttgtgaatcttcaatttagcctgatagaaaaattgtggcaaacattctggcgctattctccctctactccaactgatggcactaccattaccgaatcgagcaatctgagtgaaatagaaagtcgacttccgaaagcaaagctgataactctgtgcaaacatgagtctatcctgaaatggatgtgtaactgtgaccatgggatgtaccaggctttggtggagattctcatccccgacgtccttagacctattcctagtgccttgacccaagccattcgaaattttgcaaaaagccttgaaggttggctttccaatgccatgaacaatattccacagagaatgatacaaaccaaggttgccgctgtaagtgcctttgcccagactctgcgaagatacacgtcgcttaatcacctggcccaggcagctcgtgcagtgcttcagaacacttcccaaatcaaccagatgcttagtgacctcaaccgtgtcgactttgccaatgtccaggagcaggcttcctgggtgtgccagtgtgatgacaacatggttcagagactagaaacagacttcaagatgactcttcagcagcagagcaccctggagcagtgggctgcgtggcttgacaatgtgatgatgcaagcactgaaaccctatgaaggaagacccagttttcctaaagccgccaggcagtttctgctaaaatggtctttctacagctcaatggttattcgggacttaaccttacgcagtgctgctagctttggctccttccacctgatccgtctactctacgacgaatatatgttttacttagtagaacatcgtgttgctcaggcaacaggagagactcctatagcagtcatgggcgaggtacctatgtaaaagaaaaacttgagaaccactggaatatgaaaaatattttaagtgggaaaaagattggtgctcctgataaagcaaagggctaggaatacaatggaaaggattaaatatgtattttgtagactctttcccggtctccaagaacaaagtaaatgattctattttagaaggataaaaatggtaatgatgataactaacattttttggacacttactatgtgcgaggcacagttctatgttttttacatgtaataaagcacttaatgcaagtctttgagatacgttctactttattctgttttacaataagcatccgaggtttatgcagaaagctaaggcacagaaaggttaaatgattactcagctaaaaaatggtagagatttttttttcaaacacagtctgattttcaaacccatatgcttctaaccactaatgatgtaagggggaaaattctcttcttcagaatttctgaatagtcatcaaaatggcttatcaaaaagcttaaactctgaatataacaagggctggttaatataatgaggaatagatgcaaatgctcagatggttcagcactggcttattttgttatattgaatgcaggaggcgggggtagtttataccttgtcgaatcataccagattattaaatgtgacaaattacccaaggcggtaaaaaagacatgttcacttttaagctatgtgtatgtgcttatataaataaaaaagagtgaaaacagatattattcaa

SEQ ID NO: 77262 - DNA, 898 bp, Homo sapiens
  misc_feature (171)..(171): n is a, c, g, or t
ctccccgtgcgagtgtctccctctccctctcgctctctctctctctccctctctctctctctttgtgagttatagcaaccgtgccttgtgaatcaagcgccatagtcaccgtagtcctggcgactgttacccatcaacaacaactactcctctcctcctcctcctcctctncctcctcctcctccccaccacaccatctccatcacccaccaacaacaccacaataatccacagccaagagaccatcatgcagacatcagagactgggtcggacacaggctcgacagtgaccttacaaacatctgtggctagtcaagcagcagtgcctacgcaggtggtacagcaagtaccagtacaacaacaggtacagcaggtacagactgtgcagcaggtacaacatgtctatcccgctcaggtgcagtatgtggaaggaagcgatactgtctataccaatggagcaatccgaacaacaacgtatccttacacagagacacagatgtacagccaaaatactggagggaattactttgatactcaagggagttccgcccaggtgactaccgtggtctcatcccacagtatggtgggcactggtgggattcagatgggcgtcacaggaggacaactcatcagcagctctggaggaacctatctgatcggcaactcaatggagaattctggtcactcagtgacacacacaactcgggcctccccagcgacactttttctgttttcctgtgtccctttttccctaggccaactcagtccctgaaatgaaactcctcagacagattaccatgaaccgtctgtttcctacactaaatcataaattgactgaaggttctgggcctcattttcaaagcatttaataaaatgggactttgaatgacaaaaaatc

SEQ ID NO: 77263 - DNA, 2880 bp, Homo sapiens
acctactcagaaggaaaataatacttggtttagagatttaaatgctgtaatttacaagtaaactctctcaccaaatgaattttaaataagtgtcagaggcaagcatttaaaatttgtgaagggaaagaagatttgaaaattgcagtggtttcttttactggaggaaacagaatcccaacttaattggattgcgttacaggttgccgctgtaagtgcctttgcccagactctgcgaagatacacgtcgcttaatcacctggcccaggcagctcgtgcagtgcttcagaacacttcccaaatcaaccagatgcttagtgacctcaaccgtgtcgactttgccaatgtccaggagcaggcttcctgggtgtgccagtgtgatgacaacatggttcagagactagaaacagacttcaagatgactcttcagcagcagagcaccctggagcagtgggctgcgtggcttgacaatgtgatgatgcaagcactgaaaccctatgaaggaagacccagttttcctaaagccgccaggcagtttctgctaaaatggtctttctacagctcaatggttattcgggacttaaccttacgcagtgctgctagctttggctccttccacctgatccgtctactctacgacgaatatatgttttacttagtagaacatcgtgttgctcaggcaacaggagagactcctatagcagtcatgggcgagtttggtgatttaaatgccgtgtctcctggaaatctggataaagatgaaggcagtgaagtagaaagtgaaatggatgaagaactggatgactcttcagagcctcaagccaaaagagagaaaacagagctgagccaggcatttccagtgggctgcatgcagcctgttctcgagactggcgtgcaaccaagcctcctgaatccaattcacagcgagcacattgtcacaagtactcagactatcagacagtgcagcgctacaggaaatacctacactgcagtctaaagaatattaaagcgtatttttccagcttacattaaccctgttgatattgggcttaagttgaaaatttaataagcctgaaggtcgactgttgtcaaattctatctgtgctgaacattaactttttggagttgtgaaatggaatgggtgtatgtattttgccagatctttttttttaacgtaaacaaattatttgcttcttaataatgaattttttcccttagtttcaggtgtcaagaaggatttttacaacacttaatgtcaatgttttgttttcttataattaaaaagtaatttacattttttgtagcttaaaatattttattgttgattgttagtcttggtgtatgatttcatgtgtaagttttttaattagatgcacttctgtgaaatatcaaaagaaatgatttttttgatttacactggaggcatgcccatttggcagcagatgcatcaaatttgcttttgaaaggtgcttttcattggacagaaccataagacactattttgataacattttgagtacggagagagaatacagagcatttttattatagtgctagagggtttggaaggtcatctatttttctctgaggaaaaattgagctgtacatttatcagttcagagtaaatgacagaattgcaagagattatgctaatatgtacataatttgtgtacataattattaaaccatgttaacaatgcaagcttccgttaaacattgaattttaactattatttgcataccaattcctctgtttaaagactactgattctgtatttgggaccactgcacagatgcattctgctgttaagtgggggctgttatagttagatactgaagcagaaaaaaaagacttgactttttttttttaagtgtacatgctacttatgctgagctggacatacaggaaaccattccatttggatgactttcttttattccaggtctttttcctaatagtagttcaatatgctgctattataaacgagaatttatagaatgcaaggaatgtagcaacctacataacgttatttccttcaaaactatttcctggtttctaaagtatgtggatttaaattgtaaacagaacctgaaggcagtgtaactggcacacctcactgttacttatccccaattctgtaggatttggataggtggctggatggaccattgccattgaagaatgtacatcagggatcatcgtacctcggctattacatggtgccttaaaacagaactgaagctaaggtttagtaaggtttattttgttcatgtgactaactcttcaatccatttgacaaagtgtgcctgtcattttcagattcctgaagtaaggacaggtgacatgttcttcaaaggaaatttagggaaaacaaaggaaaacaaaaagacaaaaatcagtttccctctttgagtgaccgtggatctattttttattcttagagctgaatattacttgattacaaatcagattgcttaagggtgtggaatagcaggctagttttaataccaacttgttaacataaaatcatatatgttttagaccattcttatttagttacaattttagaaagttaacaaagtaagcaggtacttatcgaagtgcatcttttcagtctaaatgtttgtctgtgtgtctaggtgctggtgagtccacatggacacatgagtgcccatggggcaggagtctgctataaagtcagaaggtgagatcctagagagttacacccagccccattttaatttgcatgaaaagccaaggttcttttaagcactcaaattatttaatggttaaaacacaagaaaggcacatctgttcatttaaatagttgtaaaaaactaatcagcaaaaataaatagataataaagccaaaaaaaaggaaa

SEQ ID NO: 77264 - DNA, 864 bp, Homo sapiens
  misc_feature (171)..(171): n is a, c, g, or t
ctccccgtgcgagtgtctccctctccctctcgctctctctctctctccctctctctctctctttgtgagttatagcaaccgtgccttgtgaatcaagcgccatagtcaccgtagtcctggcgactgttacccatcaacaacaactactcctctcctcctcctcctcctctncctcctcctcctccccaccacaccatctccatcacccaccaacaacaccacaataatccacagccaagagaccatcatgcagacatcagagactgggtcggacacaggctcgacagtgaccttacaaacatctgtggctagtcaagcagcagtgcctacgcaggtggtacagcaagtaccagtacaacaacaggtacagcaggtacagactgtgcagcaggtacaacatgtctatcccgctcaggtgcagtatgtggaaggaagcgatactgtctataccaatggagcaatccgaacaacaacgtatccttacacagagacacagatgtacagccaaaatactggagggaattactttgatactcaagggagttccgcccaggtgactaccgtggtctcatcccacagtatggtgggcactggtgggattcagatgggcgtcacaggaggacaactcatcagcagctctggaggaacctatctgatcggcaactcaatggagaattctggtcactcagtgacacacacaactcgggcctccccagcgacagccaactcagtccctgaaatgaaactcctcagacagattaccatgaaccgtctgtttcctacactaaatcataaattgactgaaggttctgggcctcattttcaaagcatttaataaaatgggactttgaatgacaaaaaatc

SEQ ID NO: 77265 - DNA, 678 bp, Homo sapiens
  misc_feature (171)..(171): n is a, c, g, or t
ctccccgtgcgagtgtctccctctccctctcgctctctctctctctccctctctctctctctttgtgagttatagcaaccgtgccttgtgaatcaagcgccatagtcaccgtagtcctggcgactgttacccatcaacaacaactactcctctcctcctcctcctcctctncctcctcctcctccccaccacaccatctccatcacccaccaacaacaccacaataatccacagccaaggccacttggtcattctggcattttatggtagagaatacgttgagtttggctctggaaggaatatgagagaccatcatgcagacatcagagactgggtcggacacaggctcgacagtgaccttacaaacatctgtggctagtcaagcagcagtgcctacgcaggtggtacagcaagtaccagtacaacaacaggtacagcaggtacagactgtgcagcaggtacaacatgtctatcccgctcaggtgcagtatgtggaaggaagcgatactgtctataccaatggagcaatgtccagggccccctggagcatgattttggaatcttcaccataaacttaaactactgttggcatttataccaaatgaaaaagacgcctgccacttcgacctttatgctctcagggaaaataaatggctttgtagacactgctagaggtca

SEQ ID NO: 77266 - DNA, 244 bp, Homo sapiens
aatgacactgtttcactgtttctctaaaatcacgttcttttgtgatagactgtcagtggttcccccatatctgtccctgccttgctaaatttagcagaatccctgaggacatggcctctgagaatagcagctgcatttcccagactcccttgcagctagcaaggttgtgtgactaagccctggccagtaggcatggaagtgaagactgtaatgtccaagtaatccttggaaagaaaagaacgtg

SEQ ID NO: 77267 - DNA, 366 bp, Homo sapiens
  misc_feature (18)..(18): n is a, c, g, or t
  misc_feature (29)..(29): n is a, c, g, or t
  misc_feature (69)..(69): n is a, c, g, or t
  misc_feature (92)..(92): n is a, c, g, or t
  misc_feature (101)..(101): n is a, c, g, or t
cggccatcccagtcctgnccctgcagaanaccctccctccccaatgtggccccaccgtcatgcccccantcagcatttcccagaactgagcntattgtctntccccctgtttaacagtgtaggttttaatatttttcaggtccgttgaggccaacagatcaggagatgatggccattgagacattttatattggggtaaagaaatttcatatattaactgtgcttcactgtttttccctcttctgatgtaattcttgttactgcttttcgccacaagggggcttaagaacctcatttattatttaaattaatgagagcttaaaagttgtggaggctcttgacagataatgattccgtgtgaaatat

SEQ ID NO: 77268 - DNA, 258 bp, Homo sapiens
tccagcctgggcaacatagcgaaatcctgtaattaaaaaaaaaaaaaaaaaaaagatatagttttgtcattgtttgtttcctctctatacttactattgtacttaatcagctatttaacaaaaacctattgattagccacattgtgctcagttctaggaaagccttaaaaaacaagaaagatgtcactgccacagtcacacgctagtttatacactagtggggaaaatggacaaatacataagccgttaaccttttag

SEQ ID NO: 77269 - DNA, 565 bp, Homo sapiens
ggagattggttccaggaccccctccccccacccctgaggatacaaaattcacagatgctcaagtccctgctatacagtggtataatatttgcatagaacctgcacacatctttccttaccctttaaatcatctccaggttacagatacctagcacaacataaatgctgcataaatagctgttataccgtgtgtgtctgtgttttaaacattgtttatttgagacagggtctcactctgtcaccaggctacagtgcagaggcacagtcacagctcattgcagcctcaacctcctgggctcaagcagtcctccacctcagcctcccaaagtgctaggatgacaggtgtgagccactgtgccccaccaaaaaaaatgttttttcaaatattttctatctgtggttggattcagaccacatgaacactgagggctgactgtagttttgaatgtctgttactgaggaggcaccagcataaagtattttatcacttcagacgctgacaatctagtatttttaatttttaaatcttttgaaagctaatacatataggtgatttgtaaaaaaa

SEQ ID NO: 77270 - DNA, 473 bp, Homo sapiens
gggaccttgtctcaaacaaaggcacaaacatgtatacaatgaagagtcatttcctcttccatgctgttcccagctaccctattatcctcagaggcaagcatgcctaccagttcttggaaactgctgaagtttgaaaaggataaatggagacctaacaggaaggccccagaaccaaggtgctagtgaggggtgacccaagggagcagtattgcacatgcaacccttttacattgtggccaacagctcagaatggggatgcggtgtgatgtggctgccaggaagtgaaaggcatctcaggctacataaatggatatccaggaggaaggaggaggtaagctgctctgcctacgtgtcacggtcagccagcacctggagaattgtgtttagttgcgaacatggagctgtcatggaaatgtggacaaactggagcctgttcagaggacagccctaagatgggtgagacccagcatatc

SEQ ID NO: 77271 - DNA, 344 bp, Homo sapiens
cataaacaacaaagcataaaaaaatcttaacctagtggactaaaagatttcttgcttttttcatttctgctaatggcctctctcccttggcactgccagaactggtccattaaaggtgaatcgagcctcagtttgcaggcaggacgtggtccaaaagatcatttgtaagttggttgtttggaccaaagaatgtgtttccccctagaaaccatttttctcagggtgactgggttctcagttttgcttgtacagtgccgttcaacttccactgaagctgagctctgggtctttgagggcaggttctctgcagtgcaggagggagaaaacaggtcacctgctgctgc

SEQ ID NO: 77272 - DNA, 1006 bp, Homo sapiens
cttgcgggccggtggccccgggcaggccacttctgacgcgggtgcgaggccttccgcgggcgtgcacggttgggccggagccgcgccgggggccgggacacgcctggggtcagcgctggcgtcgccgctcgggtggggtgggccgggttcgggtccagtctcctccccacgggcggcccgcgccccgtcttccagtgacccccacatcccttgcgccccgagctggaacttcggcaggttctgccccgggccgcgcgcgctttctggggaccagggctgtggttcctgctccgcgtcgtgcctttagacaccgccgggcgttcgtcctccatccctccccccttttccccactccgcggttgacgagggccgcccccaagtggccatgtcccccggcatggacgacccctcagtgcccctgagggcccagggtctcgcccccgtcccgaggcaggccatgtttgaatttatttggagaaattcgcccagcccaggggacctctttctgcagctctggccttccagtaggagagggtccctggggctctcaggcctgacaacttggcatcactgaattctctaaccatgtctgtccatgacttgaactccttttcttttagaaagatctttgcaaaccccttgtgggcgtgcccctcccatggcccccgtgcctcttgcctgggctttgggcttgtctgaaagggctaaaagggggtgatgcctggccgggcgggtggctcacgcctgcagtcccagcactttgggaggccgaggtgggcggatcacctgaagtcaggagttcaagaccatcctggccaacatagtgaaacccatctctactaaaaatacaaaaattagcaaggcttggtggcaggcacctgtagtcccagctacttgggaggctgaggcaggagcaggagaattgcttgaacctgggaggcagaggttgcagtgagctgagatcgtgccactgcacttcagcctgggtgacagagagagactgtct

SEQ ID NO: 77273 - DNA, 405 bp, Homo sapiens
acctatgaacacagggcactagagccactttagactaattttctgatctttaattattttaacactccagaggaggactggttttctcctgtgtttttttaatgtatggcaagtggaacctctaatcgaccaccctgtttttcatcctaactcaggcttgcagtaaaattatcagttcccactttctttgctgcattctcaaatgcaacacatgagaccagctttcccttgccaatttacaatgctgttaactatatgtcctttattatacatttcattaaagttttctattatttggtttctttctacttctccctacagttctggcaatatttgctttttatatttagaagcctcccttttgggtgcataaatatataaagctatattctcttgagaaattaa

SEQ ID NO: 77274 - DNA, 397 bp, Homo sapiens
gtttcctttctccatgaaatcctgcctgtgctaccaaatcaggaaggtggaacaaagctctacctcttaccaaatcctcccagactccttaataatatccaaccaaaaccataggaaattaacccaaatgatctgtatctgcctgtgtttctgttaaatttgaacggtgtaattcatacatttcatgcctccaaagtcatacgagctgccagttagctagtacaaaaatcacagttgtccgaggaaaagattttaatacgaaagatacatagatgttaagctgttggtactgaccaagagtgattacaagtgcattcagagcagaaccagtggggcagtagcagtctcagactcaggacaacatattaacagtgtgcatatccatccagtagatcca

SEQ ID NO: 77275 - DNA, 139 bp, Homo sapiens
gcagtgactaaacgaacggcaggacaccttgctgctctgttaccaggaagagcaccttagcacgctctcatcttcccctgcagtcaggactaggagacaggctggagaaggggcacaagagttgggaccagaaggcctg

SEQ ID NO: 77276 - DNA, 349 bp, Homo sapiens
gctaaatactagtaactctaaacttagtgaattttctaggcagcagctttcctctgctgtctagactggtaaagaacaaactaaagccaagcgcagtggctcatgcctgtattcccagcactttgggaggccaaggcgggcaaatcacctgaggtcaggagctcaagaccagcctgaccaacatggtgaaaccctgtctacactaaaaatacaaaaattagctgggcgtggtggtgcacacctgtaatcccagctacttaggaagctgaagcaagagaattgcttgaacccaggaggcagaggtcacagtgagccaagactgtgccactgtgctccagcctgggcgacg

SEQ ID NO: 77277 - DNA, 372 bp, Homo sapiens
gtttatattcctggaacattgccaatatctattttaggtggccactggagggcagtatctctctgtgatttttctctgtcccttagatgggaactggcctttgtttttaggtcctttagtaatctaaagtttgcttcatctgttttcaaaaatgcttccaagaataaataaataaagacagagtgcctagaaaatggataattattgtgtatattgcatgattttactcccagctaccagtatgaaagctgtgtttactaacaagaaaatttacctttgttaagttttccataatgatagttataaaatccatgtaaaatatgtcttggtgcagtacgtataaataaatatactttccacagagtggtataa

SEQ ID NO: 77278 - DNA, 706 bp, Homo sapiens
actgactgccaccatgtgctattccaggaagtcagccttgaggactggctgtgcttactgagcacacaccagcccactgccacatggcagccaaatgcacaccaagcacaaacaccaagctgcaatgttgatgccttgggagcaaagaatgccctgatgtgctcagctgagcactactctgtcctggagcagtgacagtcctgattgcccagtaattgcttggtggtactgaatttatacattgtattattcagagattattgattccttcaggacaaggcaccttcagtttgaatcactgccaccagatcaagtggtccctcattacgtatatagaagactctgacagactctctctggcatggaatagccaaaaggaaagaatatgaaaatcaagttagtattgctttatccagtaaaaaaaatctggactgcattgtcaggatacagtttttctataccctattctcttgacacccttcaaaacaggagataggaaaaaagagaaaaatcaatcttcacgaaaataaagaaatggtggcattacaaaccacctagtagaaaatgcactggaatttggaagaacaatgaaagcagactcacacctcctcagactttggcccagatttgggtttctctaaaggcaaatgttgcatcctgagaggccctgcagtaataagacagccacatgttgtaagggaagtgt

SEQ ID NO: 77279 - DNA, 805 bp, Homo sapiens
acacccagatagagacatatacaatatcaatttattgataaactcaacatagaaaaaaatgtgaaattaccccaaattgatacacagggttaatatatttactatcaaggcacttcgtagatactgacaagattatccaaacaattatgtagaaaagcaaaaaacaaaacaaaccaacagaaatcccaaaaaacctggaatagctcaaacatctgaaaaaaaagatagagcagcatgctcccgggaggtgaaggttgcagtgagctgagatcacgccattgcactccagcttaggcaacaagagtgaaactccatctcaaaaaaataaataataaaataaataaataaaataaagataaagggttggaatcacttcacgttacttcaagtcctctaatatagtgaaagcattttttcctttttcatatttacaataaaacgtttatacctgccattgtcttgtgcatactcttgtcaaaaaatattgtctccaaacaacagtctcatttttgtgtcccctaaaattttcactagagtgacattcggaaaaaatgtattaagcatagcatctggccgggcatggtggctcatgcctgtaatcccaacactttgggaggccgaagcgggtggatcacctgaagtcaggagttcaagaccatgcctggccaacatggtgaaaccccatctctattacaaatacaaaaattagccaggtgtggtgatggtgcatgtctgtaatcccagctattcgggaggccgaggcaggagaatcacttgagcctgggaggcggaggctgcaatgagc

SEQ ID NO: 77280 - DNA, 917 bp, Homo sapiens
cggggtaggagcgagcgcgcccgggaactcggtggagcgagcgcgcccgggaactcggtggaggccgcggtggcggggtggggcggggctgagggcagggcggggcctgtgggagtcgtggcgcaaagagctcggggtaggagcgcgcgcccggaaactcagcggtggccgcggcgaaggggcggggctgagggtgggacggggcttgtgggaggcgtggcgcgaagatttcagagttggagcgcgcgcgaccccggactccacggaggccgcggcgagcaggcggagctgcgggtcgggacgctctgcgtggggcggggcgcaagggaggtttcgagcccggaaggtccggcgcccagagctaacgggagtcccaggttaaacactttaagatgagaaaaattgatctctgtctgagctctgaagggtccgaagtgattttagctacatcaagtgatgaaaaacacccacctgaaaatatcattgatgggaatccagaaacgttttggaccaccacaggaatgtttccccaggaattcattatttgtttccacaaacatgtaaggattgaaaggcttgtaatccaaagttactttgtacagaccttgaagattgaaaaaagcacgtctaaagagccagttgattttgagcaatggattgaaaaagatttggtacacacagaggggcagcttcaaaatgaagaaattgtggcacatgatggctccgctacttacttgagattcattattgtatcagcctttgatcattttgcatctgtgcatagcgtttctgcagaaggaacagtagtctcaaatctttcctcataatgataacaaaatgctcttgcatgattttttaacaatatatttaaacaggaagttgtcactgatatactttattaaaaggatttttatcaa

SEQ ID NO: 77281 - DNA, 660 bp, Homo sapiens
caaggctgggccggggaggcgcgcgtgcgcgggccccggcacgaaggcggggccggacctggaggcggggccaggcccagggcaggcgacccgagggccgagggtttggaactcgcagaggttaaacactttaagatgagaaaaattgatctctgtctgagctctgaagggtccgaagtgattttagctacatcaagtgatgaaaaacacccacctgaaaatatcattgatgggaatccagaaacgttttggaccaccacaggaatgtttccccaggaattcattatttgtttccacaaacatgtaaggattgaaaggcttgtaatccaaagttactttgtacagaccttgaagattgaaaaaagcacgtctaaagagccagttgattttgagcaatggattgaaaaagatttggtacacacagaggggcagcttcaaaatgaagaaattgtggcacatgatggctccgctacttacttgagattcattattgtatcagcctttgatcattttgcatctgtgcatagcgtttctgcagaaggaacagtagtctcaaatctttcctcataatgataacaaaatgctcttgcatgattttttaacaatatatttaaacaggaagttgtcactgatatactttattaaaaggatttttatcaa

SEQ ID NO: 77282 - DNA, 572 bp, Homo sapiens
ggctcagcaccccgggcacaaagctaggaagggttaaacactttaagatgagaaaaattgatctctgtctgagctctgaagggtccgaagtgattttagctacatcaagtgatgaaaaacacccacctgaaaatatcattgatgggaatccagaaacgttttggaccaccacaggaatgtttccccaggaattcattatttgtttccacaaacatgtaaggattgaaaggcttgtaatccaaagttactttgtacagaccttgaagattgaaaaaagcacgtctaaagagccagttgattttgagcaatggattgaaaaagatttggtacacacagaggggcagcttcaaaatgaagaaattgtggcacatgatggctccgctacttacttgagattcattattgtatcagcctttgatcattttgcatctgtgcatagcgtttctgcagaaggaacagtagtctcaaatctttcctcataatgataacaaaatgctcttgcatgattttttaacaatatatttaaacaggaagttgtcactgatatactttattaaaaggatttttatcaa

SEQ ID NO: 77283 - DNA, 943 bp, Homo sapiens
cggggtaggagcgagcgcgcccgggaactcggtggagcgagcgcgcccgggaactcggtggaggccgcggtggcggggtggggcggggctgagggcagggcggggcctgtgggagtcgtggcgcaaagagctcggggtaggagcgcgcgcccggaaactcagcggtggccgcggcgaaggggcggggctgagggtgggacggggcttgtgggaggcgtggcgcgaagatttcagagttggagcgcgcgcgaccccggactccacggaggccgcggcgagcaggcggagctgcgggtcgggacgctctgcgtggggcggggcgcaagggaggtttcgagcccggaaggtccggcgcccagagctaacgggagtcccaggttaaacactttaagatgagaaaaattgatctctgtctgagctctgaagggtccgaagtgattttagctacatcaagtgatgaaaaacacccacctgaaaatatcattgatgggaatccagaaacgttttggaccaccacaggaatgtttccccaggaattcattatttgtttccacaaacatgtaaggattgaaaggcttgtaatccaaagttactttgtacagaccttgaagattgaaaaaagcacgtctaaagagccagttgattttgagcaatggattgaaaaagatttggtacacacagaggggcagcttcaaaatgaagaaattgtggcacatgatggctccgctacttacttgagattcattattgtatcagcctttgatcattttgcatctgtgcatagcgtttctgcagaaggaacagtagtctcaaatctttcctcataatgataacaaaatgctcttgcatgattttttaacaatatatttaaacaggaagttgtcactgatatactttattaaaaggatttttatcaacaattgtttcagtttttatttacatt

SEQ ID NO: 77284 - DNA, 1059 bp, Homo sapiens
  misc_feature (1053)..(1053): n is a, c, g, or t
cggggtaggagcgagcgcgcccgggaactcggtggagcgagcgcgcccgggaactcggtggaggccgcggtggcggggtggggcggggctgagggcagggcggggcctgtgggagtcgtggcgcaaagagctcggggtaggagcgcgcgcccggaaactcagcggtggccgcggcgaaggggcggggctgagggtgggacggggcttgtgggaggcgtggcgcgaagatttcagagttggagcgcgcgcgaccccggactccacggaggccgcggcgagcaggcggagctgcgggtcgggacgctctgcgtggggcggggcgcaagggaggtttcgagcccggaaggtccggcgcccagagctaacgggagtcccaggttaaacactttaagatgagaaaaattgatctctgtctgagctctgaagggtccgaagtgattttagctacatcaagtgatgaaaaacacccacctgaaaatatcattgatgggaatccagaaacgttttggaccaccacaggaatgtttccccaggaattcattatttgtttccacaaacatgtaaggattgaaaggcttgtaatccaaagttactttgtacagaccttgaagattgaaaaaagcacgtctaaagagccagttgattttgagcaatggattgaaaaagatttggtacacacagaggggcagcttcaaaatgaagaaattgtggcacatgatggctccgctacttacttgagattcattattgtatcagcctttgatcattttgcatctgtgcatagcgtttctgcagaaggaacagtagtctcaaatctttcctcataatgataacaaaatgctcttgcatgattttttaacaatatatttaaacaggaagttgtcactgatatactttattaaaaggatttttatcaaaaaaaaaaaaaaaaaaaaaaaaacatgtcggccgcttgggccagtcaacttagacttgaacaggcttatcatgcggccgaattgagtcatttggcaattcgcctataggagaggtttcaatggcgcgcttacccgngctggg

SEQ ID NO: 77285 - DNA, 714 bp, Homo sapiens
  misc_feature (95)..(95): n is a, c, g, or t
ttcttttcccaagttggaagcaaagggtcaattctggtcactgcaattcttccttcggggttccacgaatttccgccccagactttccaaggaantggattcacagtggggtccaaccaggccagcttaatttggtatttaatgtgaaccggggtttctccggtgtgggtaagcttgttcccaacctcccacctcaggttattctgccgcccccagcactttgggagactagctttgaggctagttcaagaccagcctgggcaacacggtgagaccctgtccctacaaaaaatgagagttgcagtttttagctccagttgctatttttcatcaaatcaaggctggtatttagctgatatgtaccacaactattatatgtagctggccttatgtgttgttatatatttagaatattactcttgcatcaagctgtttcttttgctaactgcttgttaacagttaactagcactgctaaaagcatttatattgatttttttcccatacaggcacatgatggctccgctacttacttgagattcattattgtatcagcctttgatcattttgcatctgtgcatagcgtttctgcagaaggaacagtagtctcaaatctttcctcataatgataacaaaatgctcttgcatgattttttaacaatatatttaaacaggaagttgtcactgatatactttattaaaaggatttttatcaa

SEQ ID NO: 77286 - DNA, 884 bp, Homo sapiens
aaaccagtttagaaggaagatgactgtattcctgataagtctcttctctcattaatcgtggaggttctagagtcatacctaaagtttgaattccatttctggcacttatgagctgtatatcattgaacaccttgcttggctcctctaaacctgttttctcaccagtaaagtgggttaaagtacctttctcataagattgtagtcaaaagtgaatggataaatatgtttgactcatcataggctctccataaatgtttatgaccaagaccaccaatagtagtattatcgccatacacacaaaaaaatcggaacaatgccaaattcagaaaagctctacttgctctgtgttgtatggttgcgaacatttggaagattagttacacaagactatattttaccatagggttttttggaaacatacagagtaacttccatgttgtttctgatcccagtgctctgtgtagttccactgtgcatgataatctcaggcagagggaaaaagaaatatagggacaaaaacatacagccagattaacactttacttactttgtttacaatgttagtacagaccttgaagattgaaaaaagcacgtctaaagagccagttgattttgagcaatggattgaaaaagatttggtacacacagaggggcagcttcaaaatgaagaaattgtggcacatgatggctccgctacttacttgagattcattattgtatcagcctttgatcattttgcatctgtgcatagcgtttctgcagaaggaacagtagtctcaaatctttcctcataatgataacaaaatgctcttgcatgattttttaacaatatatttaaacaggaagttgtcactgatatactttattaaaaggatttttatcaa

SEQ ID NO: 77287 - DNA, 1507 bp, Homo sapiens
cggggtaggagcgagcgcgcccgggaactcggtggagcgagcgcgcccgggaactcggtggaggccgcggtggcggggtggggcggggctgagggcagggcggggcctgtgggagtcgtggcgcaaagagctcggggtaggagcgcgcgcccggaaactcagcggtggccgcggcgaaggggcggggctgagggtgggacggggcttgtgggaggcgtggcgcgaagatttcagagttggagcgcgcgcgaccccggactccacggaggccgcggcgagcaggcggagctgcgggtcgggacgctctgcgtggggcggggcgcaagggaggtttcgagcccggaaggtccggcgcccagagctaacgggagtcccaggttaaacactttaagatgagaaaaattgatctctgtctgagctctgaagggtccgaagtgattttagctacatcaagtgatgaaaaacacccacctgaaaatatcattgatgggaatccagaaacgttttggaccaccacaggaatgtttccccaggaattcattatttgtttccacaaacatgtaaggattgaaaggcttgtaatccaaagttactttgtacagaccttgaagattgaaaaaagcacgtctaaagagccagttgattttgagcaatggattgaaaaagatttggtacacacagaggggcagcttcaaaatgaagaaattgtggcacatgatggctccgctacttacttgagattcattattgtatcagcctttgatcattttgcatctgtgcatagcgtttctgcagaaggaacagtagtctcaaatctttcctcataatgataacaaaatgctcttgcatgattttttaacaatatatttaaacaggaagttgtcactgatatactttattaaaaggatttttatcaaaaaaaaaaaaaaaaaaaaaaaaaaaaaaaaaaaaaaaaaaaaaaaaaaaaaaaaaaaaaaaaaaaaaaaaaaaaaaaaaaaaaaaaaaaaaaaaaaaaaaaaaaaaaaaaaaaacttgggggggggccccgtccccaatttccccttttggggggccgtttaaaattaaatggcccgttttttaaaaacttgtgaatgggaaaaccctggggttccccaaattaaaccccttggaaaaaattccccttttccccagtggggtaaatacgaaaaagcccccacccgttggcttttccaaaaattggcccaccctaatgggaaatgggaaattttgaccgtaaatttttggtaaaattcccgtaaaattttggaaaacaacctatttttaaccaaatggcccaaaatgggaaaatccctttttaattaaaagaaattaccccgataagggtcggagggttgtcccatttggaaacaagagtcctttttaaaaaacgggccttcaacctaaaagggcaaaaaaccctttttatggcgagggccacttttggaaccctccccctataagttttttgggtcagggccctaaaaca

SEQ ID NO: 77288 - DNA, 830 bp, Homo sapiens
agcacagatgtctcaatagccccatacaagtaatgtgcagaaacgcttgtgtcatatggccctgtacacatttgtaaatattcataatacactcctagaagggaacatgcttaattacaacatatgtgctgtctgggacagttggctcacacgtgtaatcccagcacggaggcagaggcggacagatcacctagggtcagtagttcaagcccagcctggctaacatggcaaaagccgcccagctaatttcgtatttttagtagagacagggtttctccatgttggttaggctgttctcaaactcccaacctcaggtgatctgtcggccccagcactttgggagactagctttgaggctagttcaagaccagcctgggcaacacggtgagaccctgtccctacaaaaaatgagagttgcagtttttagctccagttgctatttttcatcaaatcaaggctggtatttagctgatatgtaccacaactattatatgtagctggccttatgtgttgttatatatttagaatattactcttgcatcaagctgtttcttttgctaactgcttgttaacagttaactagcactgctaaaagcatttatattgatttttttcccatacaggcacatgatggctccgctacttacttgagattcattattgtatcagcctttgatcattttgcatctgtgcatagcgtttctgcagaaggaacagtagtctcaaatctttcctcataatgataacaaaatgctcttgcatgattttttaacaatatatttaaacaggaagttgtcactgatatactttattaaaaggatttttatcaa

SEQ ID NO: 77289 - DNA, 912 bp, Homo sapiens
ccttttttcttactttctaagattaaatttcaaggaatagaattactgggtgcaaggttgtaaacatacttatagcttttaaaatatattggctaattgctttccagagaaattatataaatataaaaatgtagtcatgcttcagggtagcgtattctgaggcaacattaaccaaaggaaacttctttattatgattgttgcccaggctggagtgcagtggtgcgatctctgctcactgcaatctctgcctcccgggttcaagcgattctcctgcctcagcctctcaagtagctgggattacaggtgcgtgccaccacgcccagctaatttcgtatttttagtagagacagggtttctccatgttggttaggctgttctcaaactcccaacctcaggtgatctgtcggccccagcactttgggagactagctttgaggctagttcaagaccagcctgggcaacacggtgagaccctgtccctacaaaaaatgagagttgcagtttttagctccagttgctatttttcatcaaatcaaggctggtatttagctgatatgtaccacaactattatatgtagctggccttatgtgttgttatatatttagaatattactcttgcatcaagctgtttcttttgctaactgcttgttaacagttaactagcactgctaaaagcatttatattgatttttttcccatacaggcacatgatggctccgctacttacttgagattcattattgtatcagcctttgatcattttgcatctgtgcatagcgtttctgcagaaggaacagtagtctcaaatctttcctcataatgataacaaaatgctcttgcatgattttttaacaatatatttaaacaggaagttgtcactgatatactttattaaaaggatttttatcaa

SEQ ID NO: 77290 - DNA, 1420 bp, Homo sapiens
agcacagatgtctcaatagccccatacaagtaatgtgcagaaacgcttgtgtcatatggccctgtacacatttgtaaatattcataatacactcctagaagggaacatgcttaattacaacatatgtgctgtctgggacagttggctcacacgtgtaatcccagcacggaggcagaggcggacagatcacctagggtcagtagttcaagcccagcctggctaacatggcaaaagccgcccagctaatttcgtatttttagtagagacagggtttctccatgttggttaggctgttctcaaactcccaacctcaggtgatctgtcggccccagcactttgggagactagctttgaggctagttcaagaccagcctgggcaacacggtgagaccctgtccctacaaaaaatgagagttgcagtttttagctccagttgctatttttcatcaaatcaaggctggtatttagctgatatgtaccacaactattatatgtagctggccttatgtgttgttatatatttagaatattactcttgcatcaagctgtttcttttgctaactgcttgttaacagttaactagcactgctaaaagcatttatattgatttttttcccatacaggcacatgatggctccgctacttacttgagattcattattgtatcagcctttgatcattttgcatctgtgcatagcgtttctgcagaaggaacagtagtctcaaatctttcctcataatgataacaaaatgctcttgcatgattttttaacaatatatttaaacaggaagttgtcactgatatactttattaaaaggatttttatcaaaaaaaaaaaaaaaaaaaaaaaaaaaaaaaaaaaaaaaaaaaaaaaaaaaaaaaaaaaaaaaaaaaaaaaaaaaaaaaaaaaaaaaaaaaaaaaaaaaaaaaaaaaaaaaaaaaacttgggggggggccccgtccccaatttccccttttggggggccgtttaaaattaaatggcccgttttttaaaaacttgtgaatgggaaaaccctggggttccccaaattaaaccccttggaaaaaattccccttttccccagtggggtaaatacgaaaaagcccccacccgttggcttttccaaaaattggcccaccctaatgggaaatgggaaattttgaccgtaaatttttggtaaaattcccgtaaaattttggaaaacaacctatttttaaccaaatggcccaaaatgggaaaatccctttttaattaaaagaaattaccccgataagggtcggagggttgtcccatttggaaacaagagtcctttttaaaaaacgggccttcaacctaaaagggcaaaaaaccctttttatggcgagggccacttttggaaccctccccctataagttttttgggtcagggccctaaaaca

SEQ ID NO: 77291 - DNA, 1502 bp, Homo sapiens
ccttttttcttactttctaagattaaatttcaaggaatagaattactgggtgcaaggttgtaaacatacttatagcttttaaaatatattggctaattgctttccagagaaattatataaatataaaaatgtagtcatgcttcagggtagcgtattctgaggcaacattaaccaaaggaaacttctttattatgaaaaatactttagaaagacactttttttttttttttttgagacggaattttgctcttgttgcccaggctggagtgcagtggtgcgatctctgctcactgcaatctctgcctcccgggttcaagcgattctcctgcctcagcctctcaagtagctgggattacaggtgcgtgccaccacgcccagctaatttcgtatttttagtagagacagggtttctccatgttggttaggctgttctcaaactcccaacctcaggtgatctgtcggccccagcactttgggagactagctttgaggctagttcaagaccagcctgggcaacacggtgagaccctgtccctacaatggtatttagctgatatgtaccacaactattatatgtagctggccttatgtgttgttatatatttagaatattactcttgcatcaagctgtttcttttgctaactgcttgttaacagttaactagcactgctaaaagcatttatattgatttttttcccatacaggcacatgatggctccgctacttacttgagattcattattgtatcagcctttgatcattttgcatctgtgcatagcgtttctgcagaaggaacagtagtctcaaatctttcctcataatgataacaaaatgctcttgcatgattttttaacaatatatttaaacaggaagttgtcactgatatactttattaaaaggatttttatcaaaaaaaaaaaaaaaaaaaaaaaaaaaaaaaaaaaaaaaaaaaaaaaaaaaaaaaaaaaaaaaaaaaaaaaaaaaaaaaaaaaaaaaaaaaaaaaaaaaaaaaaaaaaaaaaaaaacttgggggggggccccgtccccaatttccccttttggggggccgtttaaaattaaatggcccgttttttaaaaacttgtgaatgggaaaaccctggggttccccaaattaaaccccttggaaaaaattccccttttccccagtggggtaaatacgaaaaagcccccacccgttggcttttccaaaaattggcccaccctaatgggaaatgggaaattttgaccgtaaatttttggtaaaattcccgtaaaattttggaaaacaacctatttttaaccaaatggcccaaaatgggaaaatccctttttaattaaaagaaattaccccgataagggtcggagggttgtcccatttggaaacaagagtcctttttaaaaaacgggccttcaacctaaaagggcaaaaaaccctttttatggcgagggccacttttggaaccctccccctataagttttttgggtcagggccctaaaaca

SEQ ID NO: 77292 - DNA, 1331 bp, Homo sapiens
cggggtaggagcgagcgcgcccgggaactcggtggagcgagcgcgcccgggaactcggtggaggccgcggtggcggggtggggcggggctgagggcagggcggggcctgtgggagtcgtggcgcaaagagctcggggtaggagcgcgcgcccggaaactcagcggtggccgcggcgaaggggcggggctgagggtgggacggggcttgtgggaggcgtggcgcgaagatttcagagttggagcgcgcgcgaccccggactccacggaggccgcggcgagcaggcggagctgcgggtcgggacgctctgcgtggggcggggcgcaagggaggtttcgagcccggaaggtccggcgcccagagctaacgggagtcccaggttaaacactttaagatgagaaaaattgatctctgtctgagctctgaagggtccgaagtgattttagctacatcaagtgatgaaaaacacccacctgaaaatatcattgatggatttggtacacacagaggggcagcttcaaaatgaagaaattgtggcacatgatggctccgctacttacttgagattcattattgtatcagcctttgatcattttgcatctgtgcatagcgtttctgcagaaggaacagtagtctcaaatctttcctcataatgataacaaaatgctcttgcatgattttttaacaatatatttaaacaggaagttgtcactgatatactttattaaaaggatttttatcaaaaaaaaaaaaaaaaaaaaaaaaaaaaaaaaaaaaaaaaaaaaaaaaaaaaaaaaaaaaaaaaaaaaaaaaaaaaaaaaaaaaaaaaaaaaaaaaaaaaaaaaaaaaaaaaaaaacttgggggggggccccgtccccaatttccccttttggggggccgtttaaaattaaatggcccgttttttaaaaacttgtgaatgggaaaaccctggggttccccaaattaaaccccttggaaaaaattccccttttccccagtggggtaaatacgaaaaagcccccacccgttggcttttccaaaaattggcccaccctaatgggaaatgggaaattttgaccgtaaatttttggtaaaattcccgtaaaattttggaaaacaacctatttttaaccaaatggcccaaaatgggaaaatccctttttaattaaaagaaattaccccgataagggtcggagggttgtcccatttggaaacaagagtcctttttaaaaaacgggccttcaacctaaaagggcaaaaaaccctttttatggcgagggccacttttggaaccctccccctataagttttttgggtcagggccctaaaaca

SEQ ID NO: 77293 - DNA, 979 bp, Homo sapiens
cggggtaggagcgagcgcgcccgggaactcggtggagcgagcgcgcccgggaactcggtggaggccgcggtggcggggtggggcggggctgagggcagggcggggcctgtgggagtcgtggcgcaaagagctcggggtaggagcgcgcgcccggaaactcagcggtggccgcggcgaaggggcggggctgagggtgggacggggcttgtgggaggcgtggcgcgaagatttcagagttggagcgcgcgcgaccccggactccacggaggccgcggcgagcaggcggagctgcgggtcgggacgctctgcgtggggcggggcgcaagggaggtttcgagcccggaaggtccggcgcccagagctaacgggagtcccaggttaaacactttaagatgagaaaaattgatctctgtctgagctctgaagggtccgaagtgattttagctacatcaagtgatgaaaaacacccacctgaaaatatcattgatgggaatccagaaacgttttggaccaccacaggaatgtttccccaggaattcattatttgtttccacaaacatgtaaggattgaaaggcttgtaatccaaagttactttgtacagaccttgaagattgaaaaaagcacgtctaaagagccagttgattttgagcaatggattgaaaaagatttggtacacacagaggggcagcttcaaaatgaagaaattgtggcacatgatggctccgctacttacttgagattcattattgtatcagcctttgatcattttgcatctgtgcatagcgtttctgcagaaggaacagtagtctcaaatctttcctcataatgataacaaaatgctcttgcatgattttttaacaatatatttaaacaggaagttgtcactgatatactttattaaaaggatttttatcaaaaaaaaaaaccctttctctacctccctccacctattcttctctatcttcaatcttatctaaa

SEQ ID NO: 77294 - DNA, 305 bp, Homo sapiens
caaggctgggccggggaggcgcgcgtgcgcgggccccggcacgaaggcggggccggacctggaggcggggccaggcccagggcaggcgacccgagggccgagggtttggaactcgcagaggtgggccctgcgcgtgcgtgctcgcgggagggtgggtcccctgggtcctgcgggccccggggatagagctgagctgggggagggtaggcagcgcgcgccccgggactggcctggggaaaggcgcacaggagtggtttcgcatcttggcccgcgaagtaatgggagccggagagggcggggccgat

SEQ ID NO: 77295 - DNA, 980 bp, Homo sapiens
cggggtaggagcgagcgcgcccgggaactcggtggagcgagcgcgcccgggaactcggtggaggccgcggtggcggggtggggcggggctgagggcagggcggggcctgtgggagtcgtggcgcaaagagctcggggtaggagcgcgcgcccggaaactcagcggtggccgcggcgaaggggcggggctgagggtgggacggggcttgtgggaggcgtggcgcgaagatttcagagttggagcgcgcgcgaccccggactccacggaggccgcggcgagcaggcggagctgcgggtcgggacgctctgcgtggggcggggcgcaagggaggtttcgagcccggaaggtccggcgcccagagctaacgggagtcccaggttaaacactttaagatgagaaaaattgatctctgtctgagctctgaagggtccgaagtgattttagctacatcaagtgatgaaaaacacccacctgaaaatatcattgatgggaatccagaaacgttttggaccaccacaggaatgtttccccaggaattcattatttgtttccacaaacatgtaaggattgaaaggcttgtaatccaaagttactttgtacagaccttgaagattgaaaaaagcacgtctaaagagccagttgattttgagcaatggattgaaaaaggtatgtgtttcaccagcattgttctgagcatgaaggagtagataatattcctttgattctgcatttctcatctagctgcactttggtgaaaaaagatgactttaatgatccttgtgacacatttagggtctagaaagacccaggtttgaatacaaagctgcttcttcatttactggttatataagtattaacatgtgacttaatttttctcagtttcagaatccttattaggaaaatggtgatgatatctatcattcaaggttttggtgaactagtgtctggcatataatagacaataaatattagtttctcat

SEQ ID NO: 77296 - DNA, 905 bp, Homo sapiens
gctggctgggctaggcagcatcacggggttctgcagcccaactgcacatcaggctggtgacagtcacgcagcctattacttcatgtgtcatcagaggatcgctagaacacagcacttcaagtgtgcagatttagtgagccatagtctaaagacaaatagagccactgaatcctaaatttcaatcaatcatctccgttactcgtcttattggtattaatcctttgaaattatgtggggtgggagttaaagctaataactaattatgttaatgctaaaactaagatttttctggcaagggaaaatcctcccaagtcccagcactttgggaggccgaggtgggcagatgacctgaggtcaggagtttgagaccagcctggccaacatggtgaaacgccatctctactaaaattgaaaaattagctgggcatggtggcaggtgcctgtaatcccagctattggggaggctgaagcaggagaatcgcttgaaacaggaggcagagattgcagtgagccgagattgtgccactgcactccagcctgggcaacaggaacaaaactctatctcaaaaaataaaacaagatttttctgagaaaaaggtgtaaaaccgtatactaaatttgaaatagaaatataagcgtgaactcatttgttgttcttttaccgtatacacattttctacctctgccccagtagcagtagacacatcaagcacctagaaagtggtctctaatacatgaaaaccatgaattcatagtggtggtttcaaagccaaaaccaacaacaaacacatgtaattcggtcactcttggaggtacctagggcactaactcctaacactgggaatggacacttgaaggaagatcagcaattatcctgtcttttctctacaaattgcaattcaggg

SEQ ID NO: 77297 - DNA, 2513 bp, Homo sapiens
  misc_feature (2513)..(2513): n is a, c, g, or t
gcgtcaagcttggcacgaggccatggagcagctgctgcgcgccgagctgcgcaccgcgaccctgcgggccttcggcggccccggcgccggctgcatcagcgagggccgagcctacgacacggacgcaggcccagtgttcgtcaaagtcaaccgcaggacgcaggcccggcagatgtttgagggggaggtggccagcctggaggccctccggagcacgggcctggtgcgggtgccgaggcccatgaaggtcatcgacctgccgggaggtggggccgcctttgtgatggagcatttgaagatgaagagcttgagcagtcaagcatcaaaacttggagagcagatggcagatttgcatctttacaaccagaagctcagggagaagttgaaggaggaggagaacacagtgggccgaagaggtgagggtgctgagcctcagtatgtggacaagttcggcttccacacggtgacgtgctgcggcttcatcccgcaggtgaatgagtggcaggatgactggccgacctttttcgcccggcaccggctccaggcgcagctggacctcattgagaaggactatgctgaccgagaggcacgagaactctggtcccggctacaggtgaagatcccggatctgttttgtggcctagagattgtccccgcgttgctccacggggatctctggtcgggaaacgtggctgaggacgacgtggggcccattatttacgacccggcttccttctatggccattccgagtttgaactggcaatcgccttgatgtttggggggttccccagatccttcttcaccgcctaccaccggaagatccccaaggctccgggcttcgaccagcggctgctgctctaccagctgtttaactacctgaaccactggaaccacttcgggcgggagtacaggagcccttcgttgggcaccatgcgaaggctgctcaagtagcggcccctgccctcccttcccctgtccccgtccccgtctccgtctccccgtcctgtccccccgtctccatactccgccgttaaccctcgatcctccttcgtaccgggttactctatgataagagttgcacttcaaatacacagataaagaaaacacaggctatgtcccatcgttcccagacgctacggctagcccactcgcgcgaacgaccacctcgctcgagacccgagcacagagaacgagcacacacaagcacagagagacaccacgcaggacgccgcgacccgcacagacggagacaagcagctcgccccacggccccacacaccagcacacaacagaacacagagagcgacagcgcaacggacgccagcagaccaaccgacgacaccacccgaacaccaacaaacgcttaaccacacaatcaactaccatcactcaacccagccccacgccaaaaccagacagtcacaccatagctagccacgcaaatccatctcacaaccaactccgcaacacacactcctcgccaacatgaccacacaaattaagcacccaacgagctacaccaaacgaaataagaaccttactctccccgcaccatccactcaacaccaataacacctaccacacctagtagtagtctacatactaactaccgcacacccaactgcaccccacccgaacgagcaggagacgacgcaccagcgacgccccctagacgcgacgacacccacagcgagcccgcgcacccgcgcaaccatggcgacggcgaccgagagaacgacccgagaggagtggacgcggacaggagcgacgacggacacacccgacccgcagccgcacagcgcaagccgcgcaccggagacggaccgcggagaacgacagtcccgacccgcacgagccgatacagcaaccgcgccccagcggacgcccgaccgaggcgccgacgcgcaaccacacctcctccgacaatcgatggaagagagcgacagagcacccaagcagacatgccagacgagagggcccacagcgcaggcacagccgccggcataccgatacaagcgcacacacgaaggacgacgccccacatctcagaaggactgcagcaggacaggtcgcgcacaggagtggggcacccgtgcctcggtggccggcagccacgtgcgcgcgcagccgacacaactcacccgagcagcgcgtctcgcagtcaccgcgcagatagcgacgacgagactcacgagctgcgacggttgaggcagaagtacacggaggcgacgacagcatcgagaggacagcggtgcagacgtatgagaagacagaggcagggtctagacggcacaggatctcgcgagagaggcgtcgggatagacgaggcgacgcggctcgccggcaggagctcatggaggcagcaggagagcgcgaagagacgcgagagagcgcagcgagggataccggcggagagagtagcacgatgacgaaggccagcgcagagaaagaagatggacatcaggaagcaggtagcagggctgcgagggaaggtgaggcatagagcgctcgn

SEQ ID NO: 77298 - DNA, 2248 bp, Homo sapiens
  misc_feature (2248)..(2248): n is a, c, g, or t
cccgatgttgtcaacgtggtcgagcatttgaagatgaagagcttgagcagtcaagcatcaaaacttggagagcagatggcagatttgcatctttacaaccagaagctcagggagaagttgaaggaggaggagaacacagtgggccgaagaggtgagggtgctgagcctcagtatgtggacaagttcggcttccacacggtgacgtgctgcggcttcatcccgcaggtgaatgagtggcaggatgactggccgacctttttcgcccggcaccggctccaggcgcagctggacctcattgagaaggactatgctgaccgagaggcacgagaactctggtcccggctacaggtgaagatcccggatctgttttgtggcctagagattgtccccgcgttgctccacggggatctctggtcgggaaacgtggctgaggacgacgtggggcccattatttacgacccggcttccttctatggccattccgagtttgaactggcaatcgccttgatgtttggggggttccccagatccttcttcaccgcctaccaccggaagatccccaaggctccgggcttcgaccagcggctgctgctctaccagctgtttaactacctgaaccactggaaccacttcgggcgggagtacaggagcccttcgttgggcaccatgcgaaggctgctcaagtagcggcccctgccctcccttcccctgtccccgtccccgtctccgtctccccgtcctgtccccccgtctccatactccgccgttaaccctcgatcctccttcgtaccgggttactctatgataagagttgcacttcaaatacacagataaagaaaacacaggctatgtcccatcgttcccagacgctacggctagcccactcgcgcgaacgaccacctcgctcgagacccgagcacagagaacgagcacacacaagcacagagagacaccacgcaggacgccgcgacccgcacagacggagacaagcagctcgccccacggccccacacaccagcacacaacagaacacagagagcgacagcgcaacggacgccagcagaccaaccgacgacaccacccgaacaccaacaaacgcttaaccacacaatcaactaccatcactcaacccagccccacgccaaaaccagacagtcacaccatagctagccacgcaaatccatctcacaaccaactccgcaacacacactcctcgccaacatgaccacacaaattaagcacccaacgagctacaccaaacgaaataagaaccttactctccccgcaccatccactcaacaccaataacacctaccacacctagtagtagtctacatactaactaccgcacacccaactgcaccccacccgaacgagcaggagacgacgcaccagcgacgccccctagacgcgacgacacccacagcgagcccgcgcacccgcgcaaccatggcgacggcgaccgagagaacgacccgagaggagtggacgcggacaggagcgacgacggacacacccgacccgcagccgcacagcgcaagccgcgcaccggagacggaccgcggagaacgacagtcccgacccgcacgagccgatacagcaaccgcgccccagcggacgcccgaccgaggcgccgacgcgcaaccacacctcctccgacaatcgatggaagagagcgacagagcacccaagcagacatgccagacgagagggcccacagcgcaggcacagccgccggcataccgatacaagcgcacacacgaaggacgacgccccacatctcagaaggactgcagcaggacaggtcgcgcacaggagtggggcacccgtgcctcggtggccggcagccacgtgcgcgcgcagccgacacaactcacccgagcagcgcgtctcgcagtcaccgcgcagatagcgacgacgagactcacgagctgcgacggttgaggcagaagtacacggaggcgacgacagcatcgagaggacagcggtgcagacgtatgagaagacagaggcagggtctagacggcacaggatctcgcgagagaggcgtcgggatagacgaggcgacgcggctcgccggcaggagctcatggaggcagcaggagagcgcgaagagacgcgagagagcgcagcgagggataccggcggagagagtagcacgatgacgaaggccagcgcagagaaagaagatggacatcaggaagcaggtagcagggctgcgagggaaggtgaggcatagagcgctcgn

SEQ ID NO: 77299 - DNA, 1928 bp, Homo sapiens
  misc_feature (1928)..(1928): n is a, c, g, or t
actctgaggatccccggctgactacggagtgaagatcccggatctgttttgtggcctagagattgtccccgcgttgctccacggggatctctggtcgggaaacgtggctgaggacgacgtggggcccattatttacgacccggcttccttctatggccattccgagtttgaactggcaatcgccttgatgtttggggggttccccagatccttcttcaccgcctaccaccggaagatccccaaggctccgggcttcgaccagcggctgctgctctaccagctgtttaactacctgaaccactggaaccacttcgggcgggagtacaggagcccttcgttgggcaccatgcgaaggctgctcaagtagcggcccctgccctcccttcccctgtccccgtccccgtctccgtctccccgtcctgtccccccgtctccatactccgccgttaaccctcgatcctccttcgtaccgggttactctatgataagagttgcacttcaaatacacagataaagaaaacacaggctatgtcccatcgttcccagacgctacggctagcccactcgcgcgaacgaccacctcgctcgagacccgagcacagagaacgagcacacacaagcacagagagacaccacgcaggacgccgcgacccgcacagacggagacaagcagctcgccccacggccccacacaccagcacacaacagaacacagagagcgacagcgcaacggacgccagcagaccaaccgacgacaccacccgaacaccaacaaacgcttaaccacacaatcaactaccatcactcaacccagccccacgccaaaaccagacagtcacaccatagctagccacgcaaatccatctcacaaccaactccgcaacacacactcctcgccaacatgaccacacaaattaagcacccaacgagctacaccaaacgaaataagaaccttactctccccgcaccatccactcaacaccaataacacctaccacacctagtagtagtctacatactaactaccgcacacccaactgcaccccacccgaacgagcaggagacgacgcaccagcgacgccccctagacgcgacgacacccacagcgagcccgcgcacccgcgcaaccatggcgacggcgaccgagagaacgacccgagaggagtggacgcggacaggagcgacgacggacacacccgacccgcagccgcacagcgcaagccgcgcaccggagacggaccgcggagaacgacagtcccgacccgcacgagccgatacagcaaccgcgccccagcggacgcccgaccgaggcgccgacgcgcaaccacacctcctccgacaatcgatggaagagagcgacagagcacccaagcagacatgccagacgagagggcccacagcgcaggcacagccgccggcataccgatacaagcgcacacacgaaggacgacgccccacatctcagaaggactgcagcaggacaggtcgcgcacaggagtggggcacccgtgcctcggtggccggcagccacgtgcgcgcgcagccgacacaactcacccgagcagcgcgtctcgcagtcaccgcgcagatagcgacgacgagactcacgagctgcgacggttgaggcagaagtacacggaggcgacgacagcatcgagaggacagcggtgcagacgtatgagaagacagaggcagggtctagacggcacaggatctcgcgagagaggcgtcgggatagacgaggcgacgcggctcgccggcaggagctcatggaggcagcaggagagcgcgaagagacgcgagagagcgcagcgagggataccggcggagagagtagcacgatgacgaaggccagcgcagagaaagaagatggacatcaggaagcaggtagcagggctgcgagggaaggtgaggcatagagcgctcgn

SEQ ID NO: 77300 - DNA, 401 bp, Homo sapiens
tttagtagataatgtctttttgcacataacttattgttggatttgctttatttttccaacctgccaatctgtcatttaccaagagtatttatttttgacattcgtatttaatgtgcttagtcatatagttttgagtctgtcatcttgcaatttgttttttgtttcatctgccctttgttctctctttacctgccttcctctgggttgagtattttatgtttctgtcttacctcctttgttggcttactaggtatctttgctgggttttgaatggtccctctagggtttaggcagcacttggctccgaattgcaacagtggcctcttttcccttgttgtccaggtgaatgagtggcaggatgactggccgacctttttcgcccggcaccggctccaggcgca

SEQ ID NO: 77301 - DNA, 1004 bp, Homo sapiens
gcgtcaagcttggcacgaggccatggagcagctgctgcgcgccgagctgcgcaccgcgaccctgcgggccttcggcggccccggcgccggctgcatcagcgagggccgagcctacgacacggacgcaggcccagtgttcgtcaaagtcaaccgcaggacgcaggcccggcagatgtttgagggggaggtggccagcctggaggccctccggagcacgggcctggtgcgggtgccgaggcccatgaaggtcatcgacctgccgggaggtggggccgcctttgtgatggagcatttgaagatgaagagcttgagcagtcaagcatcaaaacttggagagcagatggcagatttgcatctttacaaccagaagctcagggagaagttgaaggaggaggagaacacagtgggccgaagaggtgagggtgctgagcctcagtatgtggacaagttcggcttccacacggtgacgtgctgcggcttcatcccgcaggtgaatgagtggcaggatgactggccgacctttttcgcccggcaccggctccaggcgcagctggacctcattgagaaggactatgctgaccgagaggcacgagaactctggtcccggctacaggtgaagatcccggatctgttttgtggcctagagattgtccccgcgttgctccacggggatctctggtcgggaaacgtggctgaggacgacgtggggcccattatttacgacccggcttccttctatggccattccgagtttgaactggcaatcgccttgatgtttggggggttccccagatccttcttcaccgcctaccaccggaagatccccaaggctccgggcttcgaccagcggctgctgctctaccagctgtttaactacctgaaccactggaaccacttcgggcgggagtacaggagcccttcgttgggcaccatgcgaaggctgctcaagtagcggcccctgccctcccttcccccgtagtcaaagcgatggtctagagtcacct

SEQ ID NO: 77302 - DNA, 461 bp, Homo sapiens
aataatgatgaccactgtcacttgtttgggcacgtgctgaccatctgtataaaactctggactaaccccctttagataaaatatttgtgatcctcgaagcattctgaaaaatgctactatttttaatttccaaagaggaaaacaggtctcagagggttaagtaacttgtccgaagtggctgagctggggttaaactcctctgaccctgcaggccatgctcttgtcactgctcaaagaacatcttccttccctcccccacacccacattcccttattccttcacaccgtctgtcactcattcattcacccattcattcattcctcaaatgctgtgagcacaggctgggtatgaagctggggctgcatgctcagctacccagacacacgaagcagggtggccaccctcagtgagcccacagtctcacgggaggcagagcagctgggatgctcgcagaggggcc

SEQ ID NO: 77303 - DNA, 387 bp, Homo sapiens
caccctgaactatttcttggatgaaattaccaccctcccacttttggcaatgagacagcaagcttggaatttggagtccatgttaaatccaggtcccagccaggcacagtggctcacgcctgtaattccagcattttgggaggctgagatgggaggatcacttgagcccaggagtttgaggccagcctggtcaacacaaggagacttcatctctataaataataaaaaaattaaaaattagctgggtgtggtggtgcacacctgtagtcccagctactcaggaggctgagatgggaagatggcttgagcctgggaatttgaggctatagtgagccatgattgcaccactgcactccagactgggagacacagcaagaccttgtctca

SEQ ID NO: 77304 - DNA, 467 bp, Homo sapiens
gaaatatgatctatttttgccaagctgatctatatcagcttaaacttgaactttgagggcagacaaaacagaatcgtactatcatcctaaagactacttcctccctctagtgaccaggaatgggaatatcacagctacaggcatttagaaaacttgattctcaatgtatatgcatacctccctctaggggatatttgggaaattttcagtagtaattttggttattacgatgaatagggctgcagctggtattcattaagggcattagggatgctagacatcgtgaatgtgagggatagtgccctatataaaataattttccagctcaaaacattcatgtagatgaaaaattcattattttttaagtctagaacatagcagttcagtcatgtttcacttaacaatgagacattctgagaaatgtgtcattaggcaatttcatcattgtgcaaacatcatacaatata

SEQ ID NO: 77305 - DNA, 2272 bp, Homo sapiens
gaaagctggtgtggagggagaagcgagtgtggtccggagaaagaaggcgtggagaagagggagggagcgagagcgagagaataaatatataaataaatacgagaacgaaatccactccgcagtctccgggctcggaaactttggccccgagcgccagagcgccagagcgcgagagcgcggcgctcgccactctgaggctggcggcctcgattccggccgcgttcccccggcccccctccgtccgcggggcctggtctccgggttctgccaggcgcatcagcccgcacaacttctggccgaggccagccggcagaggcggacttggggttggagtgtttgtttgtttgaacttcctcgtcgtcgccaccttccctccccccaacctccaccccacctcacccccctccccagcttctggacgcgtttgactgcagccaggggtggggggtgggggtagggagtgtgtgtggaggggagggagaagaggttaaaaaaaagaagacgaagaagacggaaagaaagagatcgcagcaggggtgaagggagcggacgggaagcgatttttgccgactttggattcgtccccggcgtgcgcaagaatggcggcccttcccggcacggtaccgagaatgatgcggccggctccggggcagaactacccccgcacgggattccctttggaagtgtccaccccgcttggccaaggccgggtcaatcagctgggaggggtcttcatcaatgggcgacccctgcctaaccacatccgccacaagatagtggagatggcccaccatggcatccggccctgtgtcatctcccgacagctgcgtgtctcccacggctgcgtctccaagattctttgccgctaccaggagaccgggtccatccggcctggggccatcggcggcagcaagcccagacaggtggcgactccggatgtagagaaaaagattgaggagtacaagagggaaaacccaggcatgttcagctgggagatccgggacaggctgctgaaggatgggcactgtgaccgaagcactgtgccctcaggtttagtgagttcgattagccgcgtgctcagaatcaagttcgggaagaaagaggaggaggatgaagcggacaagaaggaggacgacggcgaaaagaaggccaaacacagcatcgacggcatcctgggcgacaaagggaaccggctggacgagggctcggatgtggagtcggaacctgacctcccactgaagcgcaagcagcgacgcagtcggaccacattcacggccgagcagctggaggagctggagaaggcctttgagaggacccactacccagacatatacacccgcgaggagctggcgcagaggaccaagctgacagaggcgcgtgtgcaggtctggttcagtaaccgccgcgcccgttggcgtaagcaggcaggagccaaccagctggcggcgttcaaccaccttctgccaggaggcttcccacccaccggcatgcccacgctgcccccctaccagctgccggactccacctaccccaccaccaccatctcccaagatgggggcagcactgtgcaccggcctcagcccctgccaccgtccaccatgcaccagggcgggctggctgcagcggctgcagccgccgacaccagctctgcctacggagcccgccacagcttctccagctactctgacagcttcatgaatccggcggcgccctccaaccacatgaacccggtcagcaacggcctgtctcctcaggtgatgagcatcttgggcaaccccagtgcggtgcccccgcagccacaggctgacttctccatctccccgctgcatggcggcctggactcggccacctccatctcagccagctgcagccagcgggccgactccatcaagccaggggacagcctgcccacctcccaggcctactgcccacccacctacagcaccaccggctacagcgtggaccccgtggccggctatcagtacggccagtacggccagagtgagtgcctggtgccctgggcgtcccccgtccccattccttctcccacccccagggcctcctgcttgtttatggagagctacaaggtggtgtcagggtggggaatgtccatttcacagatggaaaaattgaagtccagccagatggaacagttcacctaaaatgacactgagttgggcaaaacccaggacatctcctggctaagcctctgcttccgtactatggctccaacagaaataaaatacacagcacaaatatcaaaaaaaaaaaa

SEQ ID NO: 77306 - DNA, 914 bp, Homo sapiens
agtgaatattataaagatgttaattctctctatagtcactttttaaatacaataccaataaaaactctagcaagtgtatttacagtagtttaattttttcgaacacttctaaagatgaccctaacatttatattgaaatgtatatggtcaaaagtaactaaggcaatcatgaaggacatttcatgaatttcatttccagataaaaataaatgatatttaagataacttaatattagcttaagtgtatacaaaaagaccaatggaatagaataaggagtccagaaatatattcctaaatatatatggccaattaatttatcacaaaattgacactgcagtgtagtgggcaaagctttgatagttttcttaatgggtgttactaggtcaatttgatattcttatgggaaaaataaatcttgaacctgactcataccatacacaaattaactctggttaaatacagatttaattatgcaagtgaataatcataaaacttcttgaaaataccataggaaaatatcttcaaagtcttgaggatatacaactattttttaataagatacacatcccattgatcataatgaagagtttggtaaacaaggttgtattagaattaataaattcaattcatcaaaagacaccaataagagattttaaaaactagagagtgattgaaaatattagcaacagaaatatatatacataacaaaaaagacttgcatccagaacatataactctcaattattgacaaggaatagtcaggtcagataattttttttaaagatgaaatacttaagttggcatttcataaagatgatatcaaaatgactaataaacatatgaatagccccacctcattcatgttagaaaactacaaatgaaaacaataatgagatatcattttactcccatg

SEQ ID NO: 77307 - DNA, 352 bp, Homo sapiens
ccagcgggttagttactactgtttccctgttttacagataaggaaactgaatataagtaatgtatttgttggtacacagctaataaatgagagcaggatttacacccaggtagccccactccatggtctgtcctcttaaacactgtgctatgttatctcttaatacaatttacagaaaactaaaggattcaaaagcaaattcatggtgtgattaataaccagataatttggttatggccctgttctatctacacaataatctggaaaaaaaagattaagttctgtgttagagccagatcatggatgccatcttggtacccatcactcaagtataatatagtgtctggaagtc

SEQ ID NO: 77308 - DNA, 502 bp, Homo sapiens
aaaaaattcagagtccagaggcatctagtaaagtggacggggtgtggggaaggccctgccgcatctgccttctgctcttctcatgcgacatctcaacccagagcaggaggccccagggggaaaacccagcacctgccacagggaatcagggctgagaaaaggccggcatttcggccttcctgccgaatcatttccagctgccctggtcacctaagtgacaagatgatgcatcaatgtcaataatgctggaagggactatccacagacacggcgatattctccccaggaggcatgagggtggcctcgccaggcagctggagccactgagaattaaggggccctcttcaggatctctgtctccccttcccaatgaatatgtatttatgtgtgtgtgtgtgtgtgtgtatatatatatatatatttttttttttttttttgagccggagtctcgctgtgtcccccaggctggagtgcagtggtgcgatctcagctcactgcaacc

SEQ ID NO: 77309 - DNA, 900 bp, Homo sapiens
cccggctcttgctttcctcccacccggatctaggcgcgcaggggccaagcagggacgcagcccagtggctccagccacgccgtcctgcccccttctgcagaaactgatgctctgagaggccaagcagtttgcccaagattacacagtcatagccgtgcctgggagaaccttctcttcaactctgccgcaccactgtcaagctcacctttcttctaaggttttattttagagttaacatcctccaaaaagccttcctcaggagttgaaggtgcccctaatatcacagccatggcatcctgtacactggaccttattgtctgtctgcctgttgtaccttgtatgagtctataagcaaaacctataagaagccacatctggctattctatgtactcaaaaaataattggcaagtgaaagaatgaggaaaaggagaaaaaattcagaaggcccctaccccttccaatgggtcaagtcaggaatttcctacctgcatgtgattccctgtgtcctagagggttttatttactcctcagaccttggaaactgttaaccagagtctctgtttggagatcttatctgtgtgcttctccatgggtgttgtttccctgtctctgcagccatgcattcctcagctctttaagtggtggagcctgtctgcctggatagagtgcaaaagctacagtgtaatcttgctttctttcagggccactgaccagaggaaataaaaactggactgattgggctctcctgatgtagaccagccagtggccctctaagtttccttctatgtttaaaattccttatctgacattgctagctgatcagcaggcccacaggtcagctgagggcttatctccagggctggagcttcaaagagatacatgcacacgactcccctggg

SEQ ID NO: 77310 - DNA, 419 bp, Homo sapiens
  misc_feature (26)..(28): n is a, c, g, or t
ggggggggggggaaaaattagggggnnncacagagagggggctgctgccactgctgccaacactgcccagcttgtgaggccaggaggagcccctgtcccactcggtgctgctgctcttctgacccctgctgtgaggaatgggattcttggtcgaaaaaattggttttccttttttgtataaatgaaaagaatccaggagaagctgccaccctcccctcccagcgtgatgcgctaccttgcttcggcgtcttgtcgccctttccgcctttggtccagggacagcccagcagatcctcctggttctgacctggggggtgtttgcatcacccccttttacttgtattaaaaaaaaatgatgggttgaaaatgtactgaggattaaaaatgtacttttttataaataaagtgtttaaaacaaa

SEQ ID NO: 77311 - DNA, 352 bp, Homo sapiens
  misc_feature (23)..(23): n is a, c, g, or t
ggaggtttctctgatttctcccnttatctagcaacacgtgctgctgctcttctgacccctgctgtgaggaatgggattcttggtcgaaaaaattggttttccttttttgtataaatgaaaagaatccaggagaagctgccaccctcccctcccagcgtgatgcgctaccttgcttcggcgtcttgtcgccctttccgcctttggtccagggacagcccagcagatcctcctggttctgacctggggggtgtttgcatcacccccttttacttgtattaaaaaaaaatgatgggttgaaaatgtactgaggattaaaaatgtacttttttataaataaagtgtttaaaacaaa

SEQ ID NO: 77312 - DNA, 245 bp, Homo sapiens
aacaacccctcccctcccctccctggtgctgccaccctcccctcccagcgtgatgcgctaccttgcttcggcgtcttgtcgccctttccgcctttggtccagggacagcccagcagatcctcctggttctgacctggggggtgtttgcatcacccccttttacttgtattaaaaaaaaatgatgggttgaaaatgtactgaggattaaaaatgtacttttttataaataaagtgtttaaaacaaa

SEQ ID NO: 77313 - DNA, 2031 bp, Homo sapiens
gctccctggtgctgctattgaaccccctgccagctccatttctgccctggcaaccctgggcccagcaggtgggtcgtcgttgtctggccctcactgccctggccccagcccaggctgcccagtagccacgtagcagaagtctgaagccatgccagccctggtgcggctctcccctctacacatttggggtactggatagggtgaagttaggggagaaaattgtggagtctttccagccacagggcagagggaggtggaggagctgggctgcttttcccagcagtattagtgtcccccaggacaggggaccttttccacattacatcactgccccatcccaccttacaacactctggcccctctgcttggtccccttttcccccaggcaggaggcaatcccaggggcctgcctgatagaggcatttcctgtccctgtctcctcctgcatctcctttatcctgcactgccaccctctattccccattctgtgttggactttgaaggccccaagcccagccaaagcactgagttcccccttaagacacctccacaccctccccacaagcaaagcacaaattttggggtccatgtagcatgggccacgtaggaggctcctgacttgccaggggcccagcctcagcatacccaccgagcagctgccagcctgggctgagggtgggcatgaggcaggagtcagcacttggacctagggatgtgaggttttctgtgccccaagtttgtgggaaggtgggcactactgctgggcccacagacacagccagctggcaaaagggaggtctagcccagcagagagatgaggacattttgcttctccttcatgcccacagcatgagctgagcttctgctttgctggaaatgaaataaacttggtatgaattgtgccaaggcctccccagttgtcatcctgcctcttgttgccctccctgtccttgccccccaccccacacccatgcccctgtttccttacagattttgatattgttctaatgtgtaatagaaccagccgagtccccttttatcagaagggtctgaaaagcagcagcacagagtaggtgaacacaggcctgcaagtgcgaccacctcagacccagtacgtgtgcccacagtggacacactcacacctccaacacacccacgcgcaggcatgtgtacacgcatgtacacacgcatgcatgcacagccagatggccactcagcacagatgtggcagagggaatggtctgatcctgctgaaagccattaaggagaaacgaatttcccagtgcccgggctgcaagagagccttataggggccctgtttcctgggcatgcgcttcctctgccagccaacccccacttgcccaagtcactggtgcaataacttttctgccttcctcagagcagagaaattgggaattgtgttaggtgggtgtgggcagctctgctgagccaagcagacacggatgtcccctcttctgggaggagggtagtgctcccaggcctcaggagtccagacagagacccccaaagcctgactgccaacagaaaccctctcctagtgaggggcaggtgggtgtgccccaggtccccacacccacagggaggcttcacacactgcccagtaccggggatgccaggaggcaggcccctctgctgctgccactgctgccaacactgcccagcttgtgaggccaggaggagcccctgtcccactcggtgctgctgctcttctgacccctgctgtgaggaatgggattcttggtcgaaaaaattggttttccttttttgtataaatgaaaagaatccaggagaagctgccaccctcccctcccagcgtgatgcgctaccttgcttcggcgtcttgtcgccctttccgcctttggtccagggacagcccagcagatcctcctggttctgacctggggggtgtttgcatcacccccttttacttgtattaaaaaaaaatgatgggttgaaaatgtactgaggattaaaaatgtacttttttataaataaagtgtttaaaacaaa

SEQ ID NO: 77314 - DNA, 1990 bp, Homo sapiens
agctgactcttgagtatcccataaatctggatatcggagtttctggccctcactgccctggccccagcccaggctgcccagtagccacgtagcagaagtctgaagccatgccagccctggtgcggctctcccctctacacatttggggtactggatagggtgaagttaggggagaaaattgtggagtctttccagccacagggcagagggaggtggaggagctgggctgcttttcccagcagtattagtgtcccccaggacaggggaccttttccacattacatcactgccccatcccaccttacaacactctggcccctctgcttggtccccttttcccccaggcaggaggcaatcccaggggcctgcctgatagaggcatttcctgtccctgtctcctcctgcatctcctttatcctgcactgccaccctctattccccattctgtgttggactttgaaggccccaagcccagccaaagcactgagttcccccttaagacacctccacaccctccccacaagcaaagcacaaattttggggtccatgtagcatgggccacgtaggaggctcctgacttgccaggggcccagcctcagcatacccaccgagcagctgccagcctgggctgagggtgggcatgaggcaggagtcagcacttggacctagggatgtgaggttttctgtgccccaagtttgtgggaaggtgggcactactgctgggcccacagacacagccagctggcaaaagggaggtctagcccagcagagagatgaggacattttgcttctccttcatgcccacagcatgagctgagcttctgctttgctggaaatgaaataaacttggtatgaattgtgccaaggcctccccagttgtcatcctgcctcttgttgccctccctgtccttgccccccaccccacacccatgcccctgtttccttacagattttgatattgttctaatgtgtaatagaaccagccgagtccccttttatcagaagggtctgaaaagcagcagcacagagtaggtgaacacaggcctgcaagtgcgaccacctcagacccagtacgtgtgcccacagtggacacactcacacctccaacacacccacgcgcaggcatgtgtacacgcatgtacacacgcatgcatgcacagccagatggccactcagcacagatgtggcagagggaatggtctgatcctgctgaaagccattaaggagaaacgaatttcccagtgcccgggctgcaagagagccttataggggccctgtttcctgggcatgcgcttcctctgccagccaacccccacttgcccaagtcactggtgcaataacttttctgccttcctcagagcagagaaattgggaattgtgttaggtgggtgtgggcagctctgctgagccaagcagacacggatgtcccctcttctgggaggagggtagtgctcccaggcctcaggagtccagacagagacccccaaagcctgactgccaacagaaaccctctcctagtgaggggcaggtgggtgtgccccaggtccccacacccacagggaggcttcacacactgcccagtaccggggatgccaggaggcaggcccctctgctgctgccactgctgccaacactgcccagcttgtgaggccaggaggagcccctgtcccactcggtgctgctgctcttctgacccctgctgtgaggaatgggattcttggtcgaaaaaattggttttccttttttgtataaatgaaaagaatccaggagaagctgccaccctcccctcccagcgtgatgcgctaccttgcttcggcgtcttgtcgccctttccgcctttggtccagggacagcccagcagatcctcctggttctgacctggggggtgtttgcatcacccccttttacttgtattaaaaaaaaatgatgggttgaaaatgtactgaggattaaaaatgtacttttttataaataaagtgtttaaaacaaa

SEQ ID NO: 77315 - DNA, 1994 bp, Homo sapiens
gctccctggtgctgctattgaaccccctgccagctccatttctgccctggcaaccctgggcccagcaggtgggtcgtcgttgtctggccctcactgccctggccccagcccaggctgcccagtagccacgtagcagaagtctgaagccatgccagccctggtgcggctctcccctctacacatttggggtactggatagggtgaagttaggggagaaaattgtggagtctttccagccacagggcagagggaggtggaggagctgggctgcttttcccagcagtattagtgtcccccaggacaggggaccttttccacattacatcactgccccatcccaccttacaacactctggcaatcccaggggcctgcctgatagaggcatttcctgtccctgtctcctcctgcatctcctttatcctgcactgccaccctctattccccattctgtgttggactttgaaggccccaagcccagccaaagcactgagttcccccttaagacacctccacaccctccccacaagcaaagcacaaattttggggtccatgtagcatgggccacgtaggaggctcctgacttgccaggggcccagcctcagcatacccaccgagcagctgccagcctgggctgagggtgggcatgaggcaggagtcagcacttggacctagggatgtgaggttttctgtgccccaagtttgtgggaaggtgggcactactgctgggcccacagacacagccagctggcaaaagggaggtctagcccagcagagagatgaggacattttgcttctccttcatgcccacagcatgagctgagcttctgctttgctggaaatgaaataaacttggtatgaattgtgccaaggcctccccagttgtcatcctgcctcttgttgccctccctgtccttgccccccaccccacacccatgcccctgtttccttacagattttgatattgttctaatgtgtaatagaaccagccgagtccccttttatcagaagggtctgaaaagcagcagcacagagtaggtgaacacaggcctgcaagtgcgaccacctcagacccagtacgtgtgcccacagtggacacactcacacctccaacacacccacgcgcaggcatgtgtacacgcatgtacacacgcatgcatgcacagccagatggccactcagcacagatgtggcagagggaatggtctgatcctgctgaaagccattaaggagaaacgaatttcccagtgcccgggctgcaagagagccttataggggccctgtttcctgggcatgcgcttcctctgccagccaacccccacttgcccaagtcactggtgcaataacttttctgccttcctcagagcagagaaattgggaattgtgttaggtgggtgtgggcagctctgctgagccaagcagacacggatgtcccctcttctgggaggagggtagtgctcccaggcctcaggagtccagacagagacccccaaagcctgactgccaacagaaaccctctcctagtgaggggcaggtgggtgtgccccaggtccccacacccacagggaggcttcacacactgcccagtaccggggatgccaggaggcaggcccctctgctgctgccactgctgccaacactgcccagcttgtgaggccaggaggagcccctgtcccactcggtgctgctgctcttctgacccctgctgtgaggaatgggattcttggtcgaaaaaattggttttccttttttgtataaatgaaaagaatccaggagaagctgccaccctcccctcccagcgtgatgcgctaccttgcttcggcgtcttgtcgccctttccgcctttggtccagggacagcccagcagatcctcctggttctgacctggggggtgtttgcatcacccccttttacttgtattaaaaaaaaatgatgggttgaaaatgtactgaggattaaaaatgtacttttttataaataaagtgtttaaaacaaa

SEQ ID NO: 77316 - DNA, 2375 bp, Homo sapiens
gctccctggtgctgctattgaaccccctgccagctccatttctgccctggcaaccctgggcccagcaggtgggtcgtcgttgtctggccctcactgccctggccccagcccaggctgcccagtagccacgtagcagaagtctgaagccatgccagccctggtgcggctctcccctctacacatttggggtactggatagggtgaagttaggggagaaaattgtggagtctttccagccacagggcagagggaggtggaggagctgggctgcttttcccagcagtattagtgtcccccaggacaggggaccttttccacattacatcactgccccatcccaccttacaacactctggcccctctgcttggtccccttttcccccaggcaggaggcaatcccaggggcctgcctgatagaggcatttcctgtccctgtctcctcctgcatctcctttatcctgcactgccaccctctattccccattctgtgttggactttgaaggccccaagcccagccaaagcactgagttcccccttaagacacctccacaccctccccacaagcaaagcacaaattttggggtccatgtagcatgggccacgtaggaggctcctgacttgccaggggcccagcctcagcatacccaccgagcagctgccagcctgggctgagggtgggcatgaggcaggagtcagcacttggacctagggatgtgaggttttctgtgccccaagtttgtgggaaggtgggcactactgctgggcccacagacacagccagctggcaaaagggaggtctagcccagcagagagatgaggacattttgcttctccttcatgcccacagcatgagctgagcttctgctttgctggaaatgaaataaacttggtatgaattgtgccaaggcctccccagttgtcatcctgcctcttgttgccctccctgtccttgccccccaccccacacccatgcccctgtttccttacagattttgatattgttctaatgtgtaatagaaccagccgagtccccttttatcagaagggtctgaaaagcagcagcacagagtaggtgaacacaggcctgcaagtgcgaccacctcagacccagtacgtgtgcccacagtggacacactcacacctccaacacacccacgcgcaggcatgtgtacacgcatgtacacacgcatgcatgcacagccagatggccactcagcacagatgtggcagagggaatggtctgatcctgctgaaagccattaaggagaaacgaatttcccagtgcccgggctgcaagagagccttataggggccctgtttcctgggcatgcgcttcctctgccagccaacccccacttgcccaagtcactggtgcaataacttttctgccttcctcagagcagagaaattgggaattgtgttaggtgggtgtgggcagctctgctgagccaagcagacacggatgtcccctcttctgggaggagggtagtgctcccaggcctcaggagtccagacagagacccccaaagcctgactgccaacagaaaccctctcctagtgaggggcaggtgggtgtgccccaggtccccacacccacagggaggcttcacacactgcccagtaccggggatgccaggaggcaggcccctctgctgctgccactgctgccaacactgcccagcttgtgaggccaggaggagcccctgtcccactcggtgctgctgctcttctgacccctgctgtgaggaatgggattcttggtcgaaaaaattggttttccttttttgtataaatgaaaagaatccaggagaagctgccaccctcccctcccagcgtgatgcgctaccttgcttcggcgtcttgtcgccctttccgcctttggtccagggacagcccagcagatcctcctggttctgacctggggggtgtttgcatcacccccttttacttgtattaaaaaaaaatgatgggttgaaaatgtactgaggattaaaaatgtacttttttataaataaagtgtttaaaacaaaaaaacgacaaaagcaaagaaaagaaaagaaaaagacaagataaaagaaaaagaagaacagaagaagggaaaagacaaaacaaacaaagagaggcacaagcagaccacagggacggggcacagacagcgaacgcacgcggaggggcggcagagcgacgaggcgcgcagcgatacgcagaaaagggggacgaaagcaagagggcgcgcgcaccacagccggcagagcagggccggcgcgagcagacacgcaccccgaggcgaagcccagcggcacccggaccggggagacacacacacccgcgcggggaacacaaggccgccagacccacgacggaggacaggcaa

SEQ ID NO: 77317 - DNA, 1967 bp, Homo sapiens
gctccctggtgctgctattgaaccccctgccagctccatttctgccctggcaaccctgggcccagcaggtgggtcgtcgttgtctggccctcactgccctggccccagcccaggctgcccagtagccacgtagcagaagtctgaagccatgccagccctggtgcggctctcccctctacacatttggggtactggatagggtgaagttaggggagaaaattgtggagtctttccagccacagggcagagggaggtggaggagctgggctgcttttcccagcagtattagtgtcccccaggacaggggaccttttccacattacatcactgccccatcccaccttacaacactctggcccctctgcttggtccccttttcccccaggcaggaggcaatcccaggggcctgcctgatagaggcatttcctgtccctgtctcctcctgcatctcctttatcctgcactgccaccctctattccccattctgtgttggactttgaaggccccaagcccagccaaagcactgagttcccccttaagacacctccacaccctccccacaagcaaagcacaaattttggggtccatgtagcatgggccacgtaggaggctcctgacttgccaggggcccagcctcagcatacccaccgagcagctgccagcctgggctgagggtgggcatgaggcaggagtcagcacttggacctagggatgtgaggttttctgtgccccaagtttgtgggaaggtgggcactactgctgggcccacagacacagccagctggcaaaagggaggtctagcccagcagagagatgaggacattttgcttctccttcatgcccacagcatgagctgagcttctgctttgctggaaatgaaataaacttggtatgaattgtgccaaggcctccccagttgtcatcctgcctcttgttgccctccctgtccttgccccccaccccacacccatgcccctgtttccttacagattttgatattgttctaatgtgtaatagaaccagccgagtccccttttatcagaagggtctgaaaagcagcagcacagagtaggtgaacacaggcctgcaagtgcgaccacctcagacccagtacgtgtgcccacagtggacacactcacacctccaacacacccacgcgcaggcatgtgtacacgcatgtacacacgcatgcatgcacagccagatggccactcagcacagatgtggcagagggaatggtctgatcctgctgaaagccattaaggagaaacgaatttcccagtgcccgggctgcaagagagccttataggggccctgtttcctgggcatgcgcttcctctgccagccaacccccacttgcccaagtcactggtgcaataacttttctgccttcctcagagcagagaaattgggaattgtgttaggtgggtgtgggcagctctgctgagccaagcagacacggatgtcccctcttctgggaggagggtagtgctcccaggcctcaggagtccagacagagacccccaaagcctgactgccaacagaaaccctctcctagtgaggggcaggtgggtgtgccccaggtccccacacccacagggaggcttcacacactgcccagtaccggggatgccaggaggcaggcccctctgtgctgctgctcttctgacccctgctgtgaggaatgggattcttggtcgaaaaaattggttttccttttttgtataaatgaaaagaatccaggagaagctgccaccctcccctcccagcgtgatgcgctaccttgcttcggcgtcttgtcgccctttccgcctttggtccagggacagcccagcagatcctcctggttctgacctggggggtgtttgcatcacccccttttacttgtattaaaaaaaaatgatgggttgaaaatgtactgaggattaaaaatgtacttttttataaataaagtgtttaaaacaaa

SEQ ID NO: 77318 - DNA, 1869 bp, Homo sapiens
gctccctggtgctgctattgaaccccctgccagctccatttctgccctggcaaccctgggcccagcaggtgggtcgtcgttgtctggccctcactgccctggccccagcccaggctgcccagtagccacgtagcagaagtctgaagccatgccagccctggtgcggctctcccctctacacatttggggtactggatagggtgaagttaggggagaaaattgtggagtctttccagccacagggcagagggaggtggaggagctgggctgcttttcccagcagtattagtgtcccccaggacaggggaccttttccacattacatcactgccccatcccaccttacaacactctggcccctctgcttggtccccttttcccccaggcaggaggcaatcccaggggcctgcctgatagaggcatttcctgtccctgtctcctcctgcatctcctttatcctgcactgccaccctctattccccattctgtgttggactttgaaggccccaagcccagccaaagcactgagttcccccttaagacacctccacaccctccccacaagcaaagcacaaattttggggtccatgtagcatgggccacgtaggaggctcctgacttgccaggggcccagcctcagcatacccaccgagcagctgccagcctgggctgagggtgggcatgaggcaggagtcagcacttggacctagggatgtgaggttttctgtgccccaagtttgtgggaaggtgggcactactgctgggcccacagacacagccagctggcaaaagggaggtctagcccagcagagagatgaggacattttgcttctccttcatgcccacagcatgagctgagcttctgctttgctggaaatgaaataaacttggtatgaattgtgccaaggcctccccagttgtcatcctgcctcttgttgccctccctgtccttgccccccaccccacacccatgcccctgtttccttacagattttgatattgttctaatgtgtaatagaaccagccgagtccccttttatcagaagggtctgaaaagcagcagcacagagtaggtgaacacaggcctgcaagtgcgaccacctcagacccagtacgtgtgcccacagtggacacactcacacctccaacacacccacgcgcaggcatgtgtacacgcatgtacacacgcatgcatgcacagccagatggccactcagcacagatgtggcagagggaatggtctgatcctgctgaaagccattaaggagaaacgaatttcccagtgcccgggctgcaagagagccttataggggccctgtttcctgggcatgcgcttcctctgccagccaacccccacttgcccaagtcactggtgcaataacttttctgccttcctcagagcagagaaattgggaattgtgttaggtgggtgtgggcagctctgctgagccaagcagacacggatgtcccctcttctgggaggagggtagtgctcccaggcctcaggagtccagacagagacccccaaagcctgactgccaacagaaaccctctcctagtgaggggcaggtgggtgtgccccaggtccccacacccacagggaggcttcacacactgcccagtaccggggatgccaggaggcaggcccctctctgccaccctcccctcccagcgtgatgcgctaccttgcttcggcgtcttgtcgccctttccgcctttggtccagggacagcccagcagatcctcctggttctgacctggggggtgtttgcatcacccccttttacttgtattaaaaaaaaatgatgggttgaaaatgtactgaggattaaaaatgtacttttttataaataaagtgtttaaaacaaa

SEQ ID NO: 77319 - DNA, 803 bp, Homo sapiens
  misc_feature (82)..(82): n is a, c, g, or t
  misc_feature (88)..(88): n is a, c, g, or t
  misc_feature (162)..(162): n is a, c, g, or t
gcagcaagcaccaagtggaacaggggctcctccctggcctcacaagctgggcaattgttggcaagcagtggcagcaagcagnggcgcnttcctccctggcatccccggtactgggcagtgtgtgaagcctccctgtggttttggggacctggggcacacccnacctgcccctcactaggagagggtttctgttggcagtgggtgtgggcagctctgctgagccaagcagacacggatgtcccctcttctgggaggagggtagtgctcccaggcctcaggagtccagacagagacccccaaagcctgactgccaacagaaaccctctcctagtgaggggcaggtgggtgtgccccaggtccccacacccacagggaggcttcacacactgcccagtaccggggatgccaggaggcaggcccctctgctgctgccactgctgccaacactgcccagcttgtgaggccaggaggagcccctgtcccactcggtgctgctgctcttctgacccctgctgtgaggaatgggattcttggtcgaaaaaattggttttccttttttgtataaatgaaaagaatccaggagaagctgccaccctcccctcccagcgtgatgcgctaccttgcttcggcgtcttgtcgccctttccgcctttggtccagggacagcccagcagatcctcctggttctgacctggggggtgtttgcatcacccccttttacttgtattaaaaaaaaatgatgggttgaaaatgtactgaggattaaaaatgtacttttttataaataaagtgtttaaaacaaa

SEQ ID NO: 77320 - DNA, 413 bp, Homo sapiens
  misc_feature (14)..(15): n is a, c, g, or t
  misc_feature (95)..(95): n is a, c, g, or t
  misc_feature (128)..(129): n is a, c, g, or t
cccccccccacccnnaaatctgatgtggatgtatttattctggtggaagtctcccaacctggggaggagtgtaaatagtttctgccccccttttngggacggccccccacctgcaaaatgtgtagtannttgccccttgagccaggtggatgtttaccgtgtgttatataacttcctggctccttcactgaacatgcctagtccaacattttttcccagtgagtcacatcctgggatccagtgtataaatccaatatcatgtcttgtgcataattcttccaaaggatcttattttgtgaactatatcagtagtgtacattaccatataatgtaaaaagatctacatacaaacaatgcaaccaactatccaagtgttataccaactaaaacccccaataaaccttgaacagtga

SEQ ID NO: 77321 - DNA, 585 bp, Homo sapiens
  misc_feature (565)..(566): n is a, c, g, or t
  misc_feature (581)..(581): n is a, c, g, or t
ttgtagcctagacagtgaaatgctacaacaggattctaggtggaggttgtgcatgttgtcctttttatctgatctgtgattaaagcagtaatattttaagatggactgggaaaaacatcaactcctgaagttagaaataagaatggtttgtaaaatccacagctatatcctgatgctggatggtattaatcttgtgtagtcttcaactggttagtgtgaaatagttctgccacctctgacgcaccactgccaatgctgtacgtactgcatttgccccttgagccaggtggatgtttaccgtgtgttatataacttcctggctccttcactgaacatgcctagtccaacattttttcccagtgagtcacatcctgggatccagtgtataaatccaatatcatgtcttgtgcataattcttccaaaggatcttattttgtgaactatatcagtagtgtacattaccatataatgtaaaaagatctacatacaaacaatgcaaccaactatccaagtgttataccaactaaaacccccaataaaccttgaacagtgaaaaaaaaaaannaaaaaaaaaattttngggg

SEQ ID NO: 77322 - DNA, 659 bp, Homo sapiens
ccgcccgcgatctagaactagtctgaggaagaggcccgtttgaagaagagtgcagatacactttgggggatccaaaaggagctgcaattttaaagtcttctgatgtcatatcatttcactgtctaggctacaacaggattctaggtggaggttgtgcatgttgtcctttttatctgatctgtgattaaagcagtaatattttaagatggactgggaaaaacatcaactcctgaagttagaaataagaatggtttgtaaaatccacagctatatcctgatgctggatggtattaatcttgtgtagtcttcaactggttagtgtgaaatagttctgccacctctgacgcaccactgccaatgctgtacgtactgcatttgccccttgagccaggtggatgtttaccgtgtgttatataacttcctggctccttcactgaacatgcctagtccaacattttttcccagtgagtcacatcctgggatccagtgtataaatccaatatcatgtcttgtgcataattcttccaaaggatcttattttgtgaactatatcagtagtgtacattaccatataatgtaaaaagatctacatacaaacaatgcaaccaactatccaagtgttataccaactaaaacccccaataaaccttgaacagtga

SEQ ID NO: 77323 - DNA, 587 bp, Homo sapiens
cccacgcgtccggaaaaacatcatcttctgatgtcatatcatttcactgtctaggctacaacaggattctaggtggaggttgtgcatgttgtcctttttatctgatctgtgattaaagcagtaatattttaagatggactgggaaaaacatcaactcctgaagttagaaataagaatggtttgtaaaatccacagctatatcctgatgctggatggtattaatcttgtgtagtcttcaactggttagtgtgaaatagttctgccacctctgacgcaccactgccaatgctgtacgtactgcatttgccccttgagccaggtggatgtttaccgtgtgttatataacttcctggctccttcactgaacatgcctagtccaacattttttcccagtgagtcacatcctgggatccagtgtataaatccaatatcatgtcttgtgcataattcttccaaaggatcttattttgtgaactatatcagtagtgtacattaccatataatgtaaaaagatctacatacaaacaatgcaaccaactatccaagtgttataccaactaaaacccccaataaaccttgaacagtga

SEQ ID NO: 77324 - DNA, 213 bp, Homo sapiens
atatcgtcgacccacgcgtccggtcacatcctgggatccagtgtataaatccaatatcatgtcttgtgcataattcttccaaaggatcttattttgtgaactatatcagtagtgtacattaccatataatgtaaaaagatctacatacaaacaatgcaaccaactatccaagtgttataccaactaaaacccccaataaaccttgaacagtga

SEQ ID NO: 77325 - DNA, 253 bp, Homo sapiens
ccgatctagaggctcccccttctacgtctcatcacgcctagtccaacattttttcccagtgagtcacatcctgggatccagtgtataaatccaatatcatgtcttgtgcataattcttccaaaggatcttattttgtgaactatatcagtagtgtacattaccatataatgtaaaaagatctacatacaaacaatgcaaccaactatccaagtgttataccaactaaaacccccaataaaccttgaacagtga

SEQ ID NO: 77326 - DNA, 342 bp, Homo sapiens
ccatgttggcatcactccatgttggccactgccaatgctgtacgtactgcatttgccccttgagccaggtggatgtttaccgtgtgttatataacttcctggctccttcactgaacatgcctagtccaacattttttcccagtgagtcacatcctgggatccagtgtataaatccaatatcatgtcttgtgcataattcttccaaaggatcttattttgtgaactatatcagtagtgtacattaccatataatgtaaaaagatctacatacaaacaatgcaaccaactatccaaatgccccactggccgtgatgcccacctggcacgtgaagccccacactg

SEQ ID NO: 77327 - DNA, 706 bp, Homo sapiens
tgacctagaggatccccgaagcgcacgatgggcgtcccatgattaagggtctttacggaataaaggatgatgtcttccttagtgttccttgcattttgggacagaatggaatctcagaccttgtgaaggtgactctgacttctgaggaagaggcccgtttgaagaagagtgcagatacactttgggggatccaaaaggagctgcaattttaaagtcttctgatgtcatatcatttcactgtctaggctacaacaggattctaggtggaggttgtgcatgttgtcctttttatctgatctgtgattaaagcagtaatattttaagatggactgggaaaaacatcaactcctgaagttagaaataagaatggtttgtaaaatccacagctatatcctgatgctggatggtattaatcttgtgtagtcttcaactggttagtgtgaaatagttctgccacctctgacgcatcgtgcgcttcgaagcgcacgatggcgcgtccaattaggtgcatgagtaggtggcctgcagtaatgttagcggttaggcgtacggccagggctattggttgaatgagtcggctgatggtttcgataataactagtatggggataaggggtgtaggtgtcgcttgtggtaagaagtggctagggcatttttaatcttagagcgaagcctataatcatgcgccgtcataagggagcgcatg

SEQ ID NO: 77328 - DNA, 455 bp, Homo sapiens
tcctatagagctcgcttcagtggggagacagggctggagagagggtcagtgctatctatgtagggtgtaatctgtaagtcagcttttgaaatggggtgccctctactttgaatatctcgatactgtactaataaagtaacagaactctcctatgccagaaatatagaaatttttcatgctcttctaaaaatctagaagtggcaattttccatttaactaaagatttgatgtcttttaggacttggcagatgaacttgctcttgttgatgtcatcgaagacaaattgaagggagagatgatggatctccaacatggcagccttttccttagaacaccaaagattgtctctggcaaaggttgatttcaacaagtttatattataatccatgcttgacttaaattctttttccagatggtctccatttgttgcttagggtagagtgcagttgcacaat

SEQ ID NO: 77329 - DNA, 2062 bp, Homo sapiens
  misc_feature (1)..(3): n is a, c, g, or t
  misc_feature (12)..(12): n is a, c, g, or t
  misc_feature (14)..(15): n is a, c, g, or t
  misc_feature (29)..(29): n is a, c, g, or t
nnnttgaatccncnnctttgatggcctantgggtgctgcagccgctgccgccgattccggatctcattgccacgcgcccccgacgaccgcccgacgtgcattcccgattccttttggttccaagtccaatatggcaactctaaaggatcagctgatttataatcttctaaaggaagaacagaccccccagaataagattacagttgttggggttggtgctgttggcatggcctgtgccatcagtatcttaatgaaggacttggcagatgaacttgctcttgttgatgtcatcgaagacaaattgaagggagagatgatggatctccaacatggcagccttttccttagaacaccaaagattgtctctggcaaagactataatgtaactgcaaactccaagctggtcattatcacggctggggcacgtcagcaagagggagaaagccgtcttaatttggtccagcgtaacgtgaacatctttaaattcatcattcctaatgttgtaaaatacagcccgaactgcaagttgcttattgtttcaaatccagtggatatcttgacctacgtggcttggaagataagtggttttcccaaaaaccgtgttattggaagtggttgcaatctggattcagcccgattccgttacctgatgggggaaaggctgggagttcacccattaagctgtcatgggtgggtccttggggaacatggagattccagtgtgcctgtatggagtggaatgaatgttgctggtgtctctctgaagactctgcacccagatttagggactgataaagataaggaacagtggaaagaggttcacaagcaggtggttgagagtgcttatgaggtgatcaaactcaaaggctacacatcctgggctattggactctctgtagcagatttggcagagagtataatgaagaatcttaggcgggtgcacccagtttccaccatgattaagggtctttacggaataaaggatgatgtcttccttagtgttccttgcattttgggacagaatggaatctcagaccttgtgaaggtgactctgacttctgaggaagaggcccgtttgaagaagagtgcagatacactttgggggatccaaaaggagctgcaattttaaagtcttctgatgtcatatcatttcactgtctaggctacaacaggattctaggtggaggttgtgcatgttgtcctttttatctgatctgtgattaaagcagtaatattttaagatggactgggaaaaacatcaactcctgaagttagaaataagaatggtttgtaaaatccacagctatatcctgatgctggatggtattaatcttgtgtagtcttcaactggttagtgtgaaatagttctgccacctctgacgcaccactgccaatgctgtacgtactgcatttgccccttgagccaggtggatgtttaccgtgtgttatataacttcctggctccttcactgaacatgcctagtccaacattttttcccagtgagtcacatcctgggatccagtgtataaatccaatatcatgtcttgtgcataattcttccaaaggatcttattttgtgaactatatcagtagtgtacattaccatataatgtaaaaagatctacatacaaacaatgcaaccaactatccaagtgttataccaactaaaacccccaataaaccttgaacagtgagactactttggttaattcattatattaagatataaagtcataaagctgctagttattatattaatttggaaatattaggctattcttgggcaacctgcaacgattttttctaacagggatattattgactaatagcagaggatgtaatagtcaactgagttgtattggtaccacttccattgtaagtcccacgtattatatatttgataataatgctaatcataattggaaagtaacattctatatgtaaatgtaaaatttatttgccaactgaatataggcaatgatagtgtgtcactatagggaacacagatttttgagatcttgtcctctggaagctggtaacaattaaaaacaatcttaaggc

SEQ ID NO: 77330 - DNA, 1726 bp, Homo sapiens
  misc_feature (1)..(3): n is a, c, g, or t
  misc_feature (12)..(12): n is a, c, g, or t
  misc_feature (14)..(15): n is a, c, g, or t
  misc_feature (29)..(29): n is a, c, g, or t
  misc_feature (1706)..(1707): n is a, c, g, or t
  misc_feature (1722)..(1722): n is a, c, g, or t
nnnttgaatccncnnctttgatggcctantgggtgctgcagccgctgccgccgattccggatctcattgccacgcgcccccgacgaccgcccgacgtgcattcccgattccttttggttccaagtccaatatggcaactctaaaggatcagctgatttataatcttctaaaggaagaacagaccccccagaataagattacagttgttggggttggtgctgttggcatggcctgtgccatcagtatcttaatgaaggacttggcagatgaacttgctcttgttgatgtcatcgaagacaaattgaagggagagatgatggatctccaacatggcagccttttccttagaacaccaaagattgtctctggcaaagactataatgtaactgcaaactccaagctggtcattatcacggctggggcacgtcagcaagagggagaaagccgtcttaatttggtccagcgtaacgtgaacatctttaaattcatcattcctaatgttgtaaaatacagcccgaactgcaagttgcttattgtttcaaatccagtggatatcttgacctacgtggcttggaagataagtggttttcccaaaaaccgtgttattggaagtggttgcaatctggattcagcccgattccgttacctgatgggggaaaggctgggagttcacccattaagctgtcatgggtgggtccttggggaacatggagattccagtgtgcctgtatggagtggaatgaatgttgctggtgtctctctgaagactctgcacccagatttagggactgataaagataaggaacagtggaaagaggttcacaagcaggtggttgagagtgcttatgaggtgatcaaactcaaaggctacacatcctgggctattggactctctgtagcagatttggcagagagtataatgaagaatcttaggcgggtgcacccagtttccaccatgattaagggtctttacggaataaaggatgatgtcttccttagtgttccttgcattttgggacagaatggaatctcagaccttgtgaaggtgactctgacttctgaggaagaggcccgtttgaagaagagtgcagatacactttgggggatccaaaaggagctgcaattttaaagtcttctgatgtcatatcatttcactgtctaggctacaacaggattctaggtggaggttgtgcatgttgtcctttttatctgatctgtgattaaagcagtaatattttaagatggactgggaaaaacatcaactcctgaagttagaaataagaatggtttgtaaaatccacagctatatcctgatgctggatggtattaatcttgtgtagtcttcaactggttagtgtgaaatagttctgccacctctgacgcaccactgccaatgctgtacgtactgcatttgccccttgagccaggtggatgtttaccgtgtgttatataacttcctggctccttcactgaacatgcctagtccaacattttttcccagtgagtcacatcctgggatccagtgtataaatccaatatcatgtcttgtgcataattcttccaaaggatcttattttgtgaactatatcagtagtgtacattaccatataatgtaaaaagatctacatacaaacaatgcaaccaactatccaagtgttataccaactaaaacccccaataaaccttgaacagtgaaaaaaaaaaannaaaaaaaaaattttngggg

SEQ ID NO: 77331 - DNA, 1719 bp, Homo sapiens
  misc_feature (1)..(3): n is a, c, g, or t
  misc_feature (12)..(12): n is a, c, g, or t
  misc_feature (14)..(15): n is a, c, g, or t
  misc_feature (29)..(29): n is a, c, g, or t
nnnttgaatccncnnctttgatggcctantgggtgctgcagccgctgccgccgattccggatctcattgccacgcgcccccgacgaccgcccgacgtgcattcccgattccttttggttccaagtccaatatggcaactctaaaggatcagctgatttataatcttctaaaggaagaacagaccccccagaataagattacagttgttggggttggtgctgttggcatggcctgtgccatcagtatcttaatgaaggacttggcagatgaacttgctcttgttgatgtcatcgaagacaaattgaagggagagatgatggatctccaacatggcagccttttccttagaacaccaaagattgtctctggcaaagactataatgtaactgcaaactccaagctggtcattatcacggctggggcacgtcagcaagagggagaaagccgtcttaatttggtccagcgtaacgtgaacatctttaaattcatcattcctaatgttgtaaaatacagcccgaactgcaagttgcttattgtttcaaatccagtggatatcttgacctacgtggcttggaagataagtggttttcccaaaaaccgtgttattggaagtggttgcaatctggattcagcccgattccgttacctgatgggggaaaggctgggagttcacccattaagctgtcatgggtgggtccttggggaacatggagattccagtgtgcctgtatggagtggaatgaatgttgctggtgtctctctgaagactctgcacccagatttagggactgataaagataaggaacagtggaaagaggttcacaagcaggtggttgagagtgcttatgaggtgatcaaactcaaaggctacacatcctgggctattggactctctgtagcagatttggcagagagtataatgaagaatcttaggcgggtgcacccagtttccaccatgattaagggtctttacggaataaaggatgatgtcttccttagtgttccttgcattttgggacagaatggaatctcagaccttgtgaaggtgactctgacttctgaggaagaggcccgtttgaagaagagtgcagatacactttgggggatccaaaaggagctgcaattttaaagtcttctgatgtcatatcatttcactgtctaggctacaacaggattctaggtggaggttgtgcatgttgtcctttttatctgatctgtgattaaagcagtaatattttaagatggactgggaaaaacatcaactcctgaagttagaaataagaatggtttgtaaaatccacagctatatcctgatgctggatggtattaatcttgtgtagtcttcaactggttagtgtgaaatagttctgccacctctgacgcaccactgccaatgctgtacgtactgcatttgccccttgagccaggtggatgtttaccgtgtgttatataacttcctggctccttcactgaacatgcctagtccaacattttttcccagtgagtcacatcctgggatccagtgtataaatccaatatcatgtcttgtgcataattcttccaaaggatcttattttgtgaactatatcagtagtgtacattaccatataatgtaaaaagatctacatacaaacaatgcaaccaactatccaagtgttataccaactaaaacccccaataaaccttgaacagtgatgagacgtataagggtaccgagct

SEQ ID NO: 77332 - DNA, 1684 bp, Homo sapiens
  misc_feature (1)..(3): n is a, c, g, or t
  misc_feature (12)..(12): n is a, c, g, or t
  misc_feature (14)..(15): n is a, c, g, or t
  misc_feature (29)..(29): n is a, c, g, or t
  misc_feature (1684)..(1684): n is a, c, g, or t
nnnttgaatccncnnctttgatggcctantgggtgctgcagccgctgccgccgattccggatctcattgccacgcgcccccgacgaccgcccgacgtgcattcccgattccttttggttccaagtccaatatggcaactctaaaggatcagctgatttataatcttctaaaggaagaacagaccccccagaataagattacagttgttggggttggtgctgttggcatggcctgtgccatcagtatcttaatgaaggacttggcagatgaacttgctcttgttgatgtcatcgaagacaaattgaagggagagatgatggatctccaacatggcagccttttccttagaacaccaaagattgtctctggcaaagactataatgtaactgcaaactccaagctggtcattatcacggctggggcacgtcagcaagagggagaaagccgtcttaatttggtccagcgtaacgtgaacatctttaaattcatcattcctaatgttgtaaaatacagcccgaactgcaagttgcttattgtttcaaatccagtggatatcttgacctacgtggcttggaagataagtggttttcccaaaaaccgtgttattggaagtggttgcaatctggattcagcccgattccgttacctgatgggggaaaggctgggagttcacccattaagctgtcatgggtgggtccttggggaacatggagattccagtgtgcctgtatggagtggaatgaatgttgctggtgtctctctgaagactctgcacccagatttagggactgataaagataaggaacagtggaaagaggttcacaagcaggtggttgagagtgcttatgaggtgatcaaactcaaaggctacacatcctgggctattggactctctgtagcagatttggcagagagtataatgaagaatcttaggcgggtgcacccagtttccaccatgattaagggtctttacggaataaaggatgatgtcttccttagtgttccttgcattttgggacagaatggaatctcagaccttgtgaaggtgactctgacttctgaggaagaggcccgtttgaagaagagtgcagatacactttgggggatccaaaaggagctgcaattttaaagtcttctgatgtcatatcatttcactgtctaggctacaacaggattctaggtggaggttgtgcatgttgtcctttttatctgatctgtgattaaagcagtaatattttaagatggactgggaaaaacatcaactcctgaagttagaaataagaatggtttgtaaaatccacagctatatcctgatgctggatggtattaatcttgtgtagtcttcaactggttagtgtgaaatagttctgccacctctgacgcaccactgccaatgctgtacgtactgcatttgccccttgagccaggtggatgtttaccgtgtgttatataacttcctggctccttcactgaacatgcctagtccaacattttttcccagtgagtcacatcctgggatccagtgtataaatccaatatcatgtcttgtgcataattcttccaaaggatcttattttgtgaactatatcagtagtgtacattaccatataatgtaaaaagatctacatacaaacaatgcaaccaactatccaagtgaaatcacgtttgcgggggataatctagn

SEQ ID NO: 77333 - DNA, 2076 bp, Homo sapiens
  misc_feature (1)..(3): n is a, c, g, or t
  misc_feature (12)..(12): n is a, c, g, or t
  misc_feature (14)..(15): n is a, c, g, or t
  misc_feature (29)..(29): n is a, c, g, or t
nnnttgaatccncnnctttgatggcctantgggtgctgcagccgctgccgccgattccggatctcattgccacgcgcccccgacgaccgcccgacgtgcattcccggtacggtagggccctgcgcgcacggcgccagagggatgggcgggtagagccaactgcctctggttctgctggcctccgctgctcgcgaagggattcctgctcccgggaggtgtaggagccgctttccagaagcacagcccagagacgtctgggcggcggcccacacaacgcatgtgttcggagctcgccgcgctctgcttttgctctaagcgggaaccatggcttctggccacgctggggaaccgaggaggagccggagtagctcagagtgatcttgtctgaggaaaggccagccccacttggggttaataaaccgcgatgggtgaaccctcaggaggctatacttacacccaaacgtcgatattccttttccacgctaagattccttttggttccaagtccaatatggcaactctaaaggatcagctgatttataatcttctaaaggaagaacagaccccccagaataagattacagttgttggggttggtgctgttggcatggcctgtgccatcagtatcttaatgaaggacttggcagatgaacttgctcttgttgatgtcatcgaagacaaattgaagggagagatgatggatctccaacatggcagccttttccttagaacaccaaagattgtctctggcaaagactataatgtaactgcaaactccaagctggtcattatcacggctggggcacgtcagcaagagggagaaagccgtcttaatttggtccagcgtaacgtgaacatctttaaattcatcattcctaatgttgtaaaatacagcccgaactgcaagttgcttattgtttcaaatccagtggatatcttgacctacgtggcttggaagataagtggttttcccaaaaaccgtgttattggaagtggttgcaatctggattcagcccgattccgttacctgatgggggaaaggctgggagttcacccattaagctgtcatgggtgggtccttggggaacatggagattccagtgtgcctgtatggagtggaatgaatgttgctggtgtctctctgaagactctgcacccagatttagggactgataaagataaggaacagtggaaagaggttcacaagcaggtggttgagagtgcttatgaggtgatcaaactcaaaggctacacatcctgggctattggactctctgtagcagatttggcagagagtataatgaagaatcttaggcgggtgcacccagtttccaccatgattaagggtctttacggaataaaggatgatgtcttccttagtgttccttgcattttgggacagaatggaatctcagaccttgtgaaggtgactctgacttctgaggaagaggcccgtttgaagaagagtgcagatacactttgggggatccaaaaggagctgcaattttaaagtcttctgatgtcatatcatttcactgtctaggctacaacaggattctaggtggaggttgtgcatgttgtcctttttatctgatctgtgattaaagcagtaatattttaagatggactgggaaaaacatcaactcctgaagttagaaataagaatggtttgtaaaatccacagctatatcctgatgctggatggtattaatcttgtgtagtcttcaactggttagtgtgaaatagttctgccacctctgacgcaccactgccaatgctgtacgtactgcatttgccccttgagccaggtggatgtttaccgtgtgttatataacttcctggctccttcactgaacatgcctagtccaacattttttcccagtgagtcacatcctgggatccagtgtataaatccaatatcatgtcttgtgcataattcttccaaaggatcttattttgtgaactatatcagtagtgtacattaccatataatgtaaaaagatctacatacaaacaatgcaaccaactatccaagtgttataccaactaaaacccccaataaaccttgaacagtga

SEQ ID NO: 77334 - DNA, 2284 bp, Homo sapiens
  misc_feature (1)..(3): n is a, c, g, or t
  misc_feature (12)..(12): n is a, c, g, or t
  misc_feature (14)..(15): n is a, c, g, or t
  misc_feature (29)..(29): n is a, c, g, or t
nnnttgaatccncnnctttgatggcctantgggtgctgcagccgctgccgccgattccggatctcattgccacgcgcccccgacgaccgcccgacgtgcattcccggtacggtagggccctgcgcgcacggcgccagagggatgggcgggtagagccaactgcctctggttctgctggcctccgctgctcgcgaagggattcctgctcccgggaggtgtaggagccgctttccagaagcacagcccagagacgtctgggcggcggcccacacaacgcatgtgttcggagctcgccgcgctctgcttttgctctaagcgggaaccatggcttctggccacgctggggaaccgaggaggagccggagtagctcagagtgatcttgtctgaggaaaggccagccccacttggggttaataaaccgcgatgggtgaaccctcaggaggctatacttacacccaaacgtcgatattccttttccacgctaaggtatgggccttcactcttcacagaccctgtcattaggcctttcaactctcttttggcaaccattaggttttttcccctccctttttagtcatctctagtgatttatagtggcaaatacccccaaaggaagtaaaatagcttaaaaaaatctcttggttaataaacattaaagaagctgtagtgacactaaatgtttttcctcctatagattccttttggttccaagtccaatatggcaactctaaaggatcagctgatttataatcttctaaaggaagaacagaccccccagaataagattacagttgttggggttggtgctgttggcatggcctgtgccatcagtatcttaatgaaggacttggcagatgaacttgctcttgttgatgtcatcgaagacaaattgaagggagagatgatggatctccaacatggcagccttttccttagaacaccaaagattgtctctggcaaagactataatgtaactgcaaactccaagctggtcattatcacggctggggcacgtcagcaagagggagaaagccgtcttaatttggtccagcgtaacgtgaacatctttaaattcatcattcctaatgttgtaaaatacagcccgaactgcaagttgcttattgtttcaaatccagtggatatcttgacctacgtggcttggaagataagtggttttcccaaaaaccgtgttattggaagtggttgcaatctggattcagcccgattccgttacctgatgggggaaaggctgggagttcacccattaagctgtcatgggtgggtccttggggaacatggagattccagtgtgcctgtatggagtggaatgaatgttgctggtgtctctctgaagactctgcacccagatttagggactgataaagataaggaacagtggaaagaggttcacaagcaggtggttgagagtgcttatgaggtgatcaaactcaaaggctacacatcctgggctattggactctctgtagcagatttggcagagagtataatgaagaatcttaggcgggtgcacccagtttccaccatgattaagggtctttacggaataaaggatgatgtcttccttagtgttccttgcattttgggacagaatggaatctcagaccttgtgaaggtgactctgacttctgaggaagaggcccgtttgaagaagagtgcagatacactttgggggatccaaaaggagctgcaattttaaagtcttctgatgtcatatcatttcactgtctaggctacaacaggattctaggtggaggttgtgcatgttgtcctttttatctgatctgtgattaaagcagtaatattttaagatggactgggaaaaacatcaactcctgaagttagaaataagaatggtttgtaaaatccacagctatatcctgatgctggatggtattaatcttgtgtagtcttcaactggttagtgtgaaatagttctgccacctctgacgcaccactgccaatgctgtacgtactgcatttgccccttgagccaggtggatgtttaccgtgtgttatataacttcctggctccttcactgaacatgcctagtccaacattttttcccagtgagtcacatcctgggatccagtgtataaatccaatatcatgtcttgtgcataattcttccaaaggatcttattttgtgaactatatcagtagtgtacattaccatataatgtaaaaagatctacatacaaacaatgcaaccaactatccaagtgttataccaactaaaacccccaataaaccttgaacagtga

SEQ ID NO: 77335 - DNA, 1673 bp, Homo sapiens
  misc_feature (1)..(3): n is a, c, g, or t
  misc_feature (12)..(12): n is a, c, g, or t
  misc_feature (14)..(15): n is a, c, g, or t
  misc_feature (29)..(29): n is a, c, g, or t
nnnttgaatccncnnctttgatggcctantgggtgctgcagccgctgccgccgattccggatctcattgccacgcgcccccgacgaccgcccgacgtgcattcccgattccttttggttccaagtccaatatggcaactctaaaggatcagctgatttataatcttctaaaggaagaacagaccccccagaataagattacagttgttggggttggtgctgttggcatggcctgtgccatcagtatcttaatgaaggacttggcagatgaacttgctcttgttgatgtcatcgaagacaaattgaagggagagatgatggatctccaacatggcagccttttccttagaacaccaaagattgtctctggcaaagactataatgtaactgcaaactccaagctggtcattatcacggctggggcacgtcagcaagagggagaaagccgtcttaatttggtccagcgtaacgtgaacatctttaaattcatcattcctaatgttgtaaaatacagcccgaactgcaagttgcttattgtttcaaatccagtggatatcttgacctacgtggcttggaagataagtggttttcccaaaaaccgtgttattggaagtggttgcaatctggattcagcccgattccgttacctgatgggggaaaggctgggagttcacccattaagctgtcatgggtgggtccttggggaacatggagattccagtgtgcctgtatggagtggaatgaatgttgctggtgtctctctgaagactctgcacccagatttagggactgataaagataaggaacagtggaaagaggttcacaagcaggtggttgagagtgcttatgaggtgatcaaactcaaaggctacacatcctgggctattggactctctgtagcagatttggcagagagtataatgaagaatcttaggcgggtgcacccagtttccaccatgattaagggtctttacggaataaaggatgatgtcttccttagtgttccttgcattttgggacagaatggaatctcagaccttgtgaaggtgactctgacttctgaggaagaggcccgtttgaagaagagtgcagatacactttgggggatccaaaaggagctgcaattttaaagtcttctgatgtcatatcatttcactgtctaggctacaacaggattctaggtggaggttgtgcatgttgtcctttttatctgatctgtgattaaagcagtaatattttaagatggactgggaaaaacatcaactcctgaagttagaaataagaatggtttgtaaaatccacagctatatcctgatgctggatggtattaatcttgtgtagtcttcaactggttagtgtgaaatagttctgccacctctgacgcaccactgccaatgctgtacgtactgcatttgccccttgagccaggtggatgtttaccgtgtgttatataacttcctggctccttcactgaacatgcctagtccaacattttttcccagtgagtcacatcctgggatccagtgtataaatccaatatcatgtcttgtgcataattcttccaaaggatcttattttgtgaactatatcagtagtgtacattaccatataatgtaaaaagatctactggacttttatataccctacctacccagaggatcaaaattggccaag

SEQ ID NO: 77336 - DNA, 1571 bp, Homo sapiens
  misc_feature (1)..(3): n is a, c, g, or t
  misc_feature (12)..(12): n is a, c, g, or t
  misc_feature (14)..(15): n is a, c, g, or t
  misc_feature (29)..(29): n is a, c, g, or t
nnnttgaatccncnnctttgatggcctantgggtgctgcagccgctgccgccgattccggatctcattgccacgcgcccccgacgaccgcccgacgtgcattcccgattccttttggttccaagtccaatatggcaactctaaaggatcagctgatttataatcttctaaaggaagaacagaccccccagaataagattacagttgttggggttggtgctgttggcatggcctgtgccatcagtatcttaatgaaggacttggcagatgaacttgctcttgttgatgtcatcgaagacaaattgaagggagagatgatggatctccaacatggcagccttttccttagaacaccaaagattgtctctggcaaagactataatgtaactgcaaactccaagctggtcattatcacggctggggcacgtcagcaagagggagaaagccgtcttaatttggtccagcgtaacgtgaacatctttaaattcatcattcctaatgttgtaaaatacagcccgaactgcaagttgcttattgtttcaaatccagtggatatcttgacctacgtggcttggaagataagtggttttcccaaaaaccgtgttattggaagtggttgcaatctggattcagcccgattccgttacctgatgggggaaaggctgggagttcacccattaagctgtcatgggtgggtccttggggaacatggagattccagtgtgcctgtatggagtggaatgaatgttgctggtgtctctctgaagactctgcacccagatttagggactgataaagataaggaacagtggaaagaggttcacaagcaggtggttgagagggtctttacggaataaaggatgatgtcttccttagtgttccttgcattttgggacagaatggaatctcagaccttgtgaaggtgactctgacttctgaggaagaggcccgtttgaagaagagtgcagatacactttgggggatccaaaaggagctgcaattttaaagtcttctgatgtcatatcatttcactgtctaggctacaacaggattctaggtggaggttgtgcatgttgtcctttttatctgatctgtgattaaagcagtaatattttaagatggactgggaaaaacatcaactcctgaagttagaaataagaatggtttgtaaaatccacagctatatcctgatgctggatggtattaatcttgtgtagtcttcaactggttagtgtgaaatagttctgccacctctgacgcaccactgccaatgctgtacgtactgcatttgccccttgagccaggtggatgtttaccgtgtgttatataacttcctggctccttcactgaacatgcctagtccaacattttttcccagtgagtcacatcctgggatccagtgtataaatccaatatcatgtcttgtgcataattcttccaaaggatcttattttgtgaactatatcagtagtgtacattaccatataatgtaaaaagatctacatacaaacaatgcaaccaactatccaagtgttataccaactaaaacccccaataaaccttgaacagtga

SEQ ID NO: 77337 - DNA, 1610 bp, Homo sapiens
  misc_feature (1)..(3): n is a, c, g, or t
  misc_feature (12)..(12): n is a, c, g, or t
  misc_feature (14)..(15): n is a, c, g, or t
  misc_feature (29)..(29): n is a, c, g, or t
nnnttgaatccncnnctttgatggcctantgggtgctgcagccgctgccgccgattccggatctcattgccacgcgcccccgacgaccgcccgacgtgcattcccgattccttttggttccaagtccaatatggcaactctaaaggatcagctgatttataatcttctaaaggaagaacagaccccccagaataagattacagttgttggggttggtgctgttggcatggcctgtgccatcagtatcttaatgaaggacttggcagatgaacttgctcttgttgatgtcatcgaagacaaattgaagggagagatgatggatctccaacatggcagccttttccttagaacaccaaagattgtctctggcaaagactataatgtaactgcaaactccaagctggtcattatcacggctggggcacgtcagcaagagggagaaagccgtcttaatttggtccagcgtaacgtgaacatctttaaattcatcattcctaatgttgtaaaatacagcccgaactgcaagttgcttattgtttcaaatccagtggatatcttgacctacgtggcttggaagataagtggttttcccaaaaaccgtgttattggaagtggttgcaatctggattcagcccgattccgttacctgatgggggaaaggctgggagttcacccattaagctgtcatgggtgggtccttggggaacatggagattccagtgtgcctgtatggagtggaatgaatgttgctggtgtctctctgaagactctgcacccagatttagggactgataaagataaggaacagtggaaagaggttcacaagcaggtggttgagagtgcttatgaggtgatcaaactcaaaggctacacatcctgggctattggactctctgtagcagatttggcagagagtataatgaagaatcttaggcgggtgcacccagtttccaccatgattaagggtctttacggaataaaggatgatgtcttccttagtgttccttgcattttgggacagaatggaatctcagaccttgtgaaggtgactctgacttctgaggaagaggcccgtttgaagaagagtgcagatacactttgggggatccaaaaggagctgcaattttaaagtcttctgatgtcatatcatttcactgtctaggctacaacaggattctaggtggaggttgtgcatgttgtcctttttatctgatctgtgattaaagcagtaatattttaagatggactgggaaaaacatcaactcctgaagttagaaataagaatggtttgtaaaatccacagctatatcctgatgctggatggtattaatcttgtgtagtcttcaactggttagtgtgaaatagttctgccacctctgacgcaccactgccaatgctgtacgtactgcatttgccccttgagccaggtggatgtttaccgtgtgttatataacttcctggctccttcactgaacatgcctagtccaacattttttcccagtgagtcacatcctgggatccagtgtataaatccaatatcatgtcttgttaggtgtcaagatatacttctaaatatttagctacagtgatgaacgtagaaaagggtccgc

SEQ ID NO: 77338 - DNA, 1521 bp, Homo sapiens
  misc_feature (1)..(3): n is a, c, g, or t
  misc_feature (12)..(12): n is a, c, g, or t
  misc_feature (14)..(15): n is a, c, g, or t
  misc_feature (29)..(29): n is a, c, g, or t
nnnttgaatccncnnctttgatggcctantgggtgctgcagccgctgccgccgattccggatctcattgccacgcgcccccgacgaccgcccgacgtgcattcccgattccttttggttccaagtccaatatggcaactctaaaggatcagctgatttataatcttctaaaggaagaacagaccccccagaataagattacagttgttggggttggtgctgttggcatggcctgtgccatcagtatcttaatgaaggacttggcagatgaacttgctcttgttgatgtcatcgaagacaaattgaagggagagatgatggatctccaacatggcagccttttccttagaacaccaaagattgtctctggcaaagtggatatcttgacctacgtggcttggaagataagtggttttcccaaaaaccgtgttattggaagtggttgcaatctggattcagcccgattccgttacctgatgggggaaaggctgggagttcacccattaagctgtcatgggtgggtccttggggaacatggagattccagtgtgcctgtatggagtggaatgaatgttgctggtgtctctctgaagactctgcacccagatttagggactgataaagataaggaacagtggaaagaggttcacaagcaggtggttgagagtgcttatgaggtgatcaaactcaaaggctacacatcctgggctattggactctctgtagcagatttggcagagagtataatgaagaatcttaggcgggtgcacccagtttccaccatgattaagggtctttacggaataaaggatgatgtcttccttagtgttccttgcattttgggacagaatggaatctcagaccttgtgaaggtgactctgacttctgaggaagaggcccgtttgaagaagagtgcagatacactttgggggatccaaaaggagctgcaattttaaagtcttctgatgtcatatcatttcactgtctaggctacaacaggattctaggtggaggttgtgcatgttgtcctttttatctgatctgtgattaaagcagtaatattttaagatggactgggaaaaacatcaactcctgaagttagaaataagaatggtttgtaaaatccacagctatatcctgatgctggatggtattaatcttgtgtagtcttcaactggttagtgtgaaatagttctgccacctctgacgcaccactgccaatgctgtacgtactgcatttgccccttgagccaggtggatgtttaccgtgtgttatataacttcctggctccttcactgaacatgcctagtccaacattttttcccagtgagtcacatcctgggatccagtgtataaatccaatatcatgtcttgtgcataattcttccaaaggatcttattttgtgaactatatcagtagtgtacattaccatataatgtaaaaagatctacatacaaacaatgcaaccaactatccaagtgttataccaactaaaacccccaataaaccttgaacagtga

SEQ ID NO: 77339 - DNA, 1499 bp, Homo sapiens
  misc_feature (1)..(3): n is a, c, g, or t
  misc_feature (12)..(12): n is a, c, g, or t
  misc_feature (14)..(15): n is a, c, g, or t
  misc_feature (29)..(29): n is a, c, g, or t
nnnttgaatccncnnctttgatggcctantgggtgctgcagccgctgccgccgattccggatctcattgccacgcgcccccgacgaccgcccgacgtgcattcccgattccttttggttccaagtccaatatggcaactctaaaggatcagctgatttataatcttctaaaggaagaacagaccccccagaataagattacagttgttggggttggtgctgttggcatggcctgtgccatcagtatcttaatgaaggacttggcagatgaacttgctcttgttgatgtcatcgaagacaaattgaagggagagatgatggatctccaacatggcagccttttccttagaacaccaaagattgtctctggcaaagactataatgtaactgcaaactccaagctggtcattatcacggctggggcacgtcagcaagagggagaaagccgtcttaatttggtccagcgtaacgtgaacatctttaaattcatcattcctaatgttgtaaaatacagcccgaactgcaagttgcttattgtttcaaatccagtggatatcttgacctacgtggcttggaagataagtggttttcccaaaaaccgtgttattggaagtggttgcaatctggattcagcccgattccgttacctgatgggggaaaggctgggagttcacccattaagctgtcatgggtgggtccttggggaacatggagattccagtgtgcctgtatggagtggaatgaatgttgctggtgtctctctgaagactctgcacccagatttagggactgataaagataaggaacagtggaaagaggttcacaagcaggtggttgagagtgcttatgaggtgatcaaactcaaaggctacacatcctgggctattggactctctgtagcagatttggcagagagtataatgaagaatcttaggcgggtgcacccagtttccaccatgattaagggtctttacggaataaaggatgatgtcttccttagtgttccttgcattttgggacagaatggaatctcagaccttgtgaaggtgactctgacttctgaggaagaggcccgtttgaagaagagtgcagatacactttgggggatccaaaaggagctgcaattttaaagtcttctgatgtcatatcatttcactgtctaggctacaacaggattctaggtggaggttgtgcatgttgtcctttttatctgatctgtgattaaagcagtaatattttaagatggactgggaaaaacatcaactcctgaagttagaaataagaatggtttgtaaaatccacagctatatcctgatgctggatggtattaatcttgtgtagtcttcaactggttagtgtgaaatagttctgccacctctgacgcaccactgccaatgctgtacgtactgcatttgccccttgagccaggtggatgtttaccgtgtgttatataacttcctggctccttcactgaacatagtaacgggggagtcctctaga

SEQ ID NO: 77340 - DNA, 1520 bp, Homo sapiens
  misc_feature (1)..(3): n is a, c, g, or t
  misc_feature (12)..(12): n is a, c, g, or t
  misc_feature (14)..(15): n is a, c, g, or t
  misc_feature (29)..(29): n is a, c, g, or t
nnnttgaatccncnnctttgatggcctantgggtgctgcagccgctgccgccgattccggatctcattgccacgcgcccccgacgaccgcccgacgtgcattcccgattccttttggttccaagtccaatatggcaactctaaaggatcagctgatttataatcttctaaaggaagaacagaccccccagaataagattacagttgttggggttggtgctgttggcatggcctgtgccatcagtatcttaatgaaggacttggcagatgaacttgctcttgttgatgtcatcgaagacaaattgaagggagagatgatggatctccaacatggcagccttttccttagaacaccaaagattgtctctggcaaagactataatgtaactgcaaactccaagctggtcattatcacggctggggcacgtcagcaagagggagaaagccgtcttaatttggtccagcgtaacgtgaacatctttaaattcatcattcctaatgttgtaaaatacagcccgaactgcaagttgcttattgtttcaaatccagtggatatcttgacctacgtggcttggaagataagtggttttcccaaaaaccgtgttattggaagtggttgcaatctggattcagcccgattccgttacctgatgggggaaaggctgggagttcacccattaagctgtcatgggtgggtccttggggaacatggagattccagtgtgcctgtatggagtggaatgaatgttgctggtgtctctctgaagactctgcacccagatttagggactgataaagataaggaacagtggaaagaggttcacaagcaggtggttgagagtgcttatgaggtgatcaaactcaaaggctacacatcctgggctattggactctctgtagcagatttggcagagagtataatgaagaatcttaggcgggtgcacccagtttccaccatgattaagggtctttacggaataaaggatgatgtcttccttagtgttccttgcattttgggacagaatggaatctcagaccttgtgaaggtgactctgacttctgaggaagaggcccgtttgaagaagagtgcagatacactttgggggatccaaaaggagctgcaattttaaagtcttctgatgtcatatcatttcactgtctaggctacaacaggattctaggtggaggttgtgcatgttgtcctttttatctgatctgtgattaaagcagtaatattttaagatggactgggaaaaacatcaactcctgaagttagaaataagaatggtttgtaaaatccacagctatatcctgatgctggatggtattaatcttgtgtagtcttcaactggttagtgtgaaatagttctgccacctctgacgcaccactgccaatgctgtacgtactgcatttgccccttgagccaggtggatgtttaccgtgtgttatataacttcctggctccttcactgaacattatgccattcttgctggggatcctgtagaacgaccaacaagca

SEQ ID NO: 77341 - DNA, 1640 bp, Homo sapiens
  misc_feature (1)..(3): n is a, c, g, or t
  misc_feature (12)..(12): n is a, c, g, or t
  misc_feature (14)..(15): n is a, c, g, or t
  misc_feature (29)..(29): n is a, c, g, or t
nnnttgaatccncnnctttgatggcctantgggtgctgcagccgctgccgccgattccggatctcattgccacgcgcccccgacgaccgcccgacgtgcattcccgattccttttggttccaagtccaatatggcaactctaaaggatcagctgatttataatcttctaaaggaagaacagaccccccagaataagattacagttgttggggttggtgctgttggcatggcctgtgccatcagtatcttaatgaaggacttggcagatgaacttgctcttgttgatgtcatcgaagacaaattgaagggagagatgatggatctccaacatggcagccttttccttagaacaccaaagattgtctctggcaaagactataatgtaactgcaaactccaagctggtcattatcacggctggggcacgtcagcaagagggagaaagccgtcttaatttggtccagcgtaacgtgaacatctttaaattcatcattcctaatgttgtaaaatacagcccgaactgcaagttgcttattgtttcaaatccagtggatatcttgacctacgtggcttggaagataagtggttttcccaaaaaccgtgttattggaagtggttgcaatctggattcagcccgattccgttacctgatgggggaaaggctgggatgcctgtatggagtggaatgaatgttgctggtgtctctctgaagactctgcacccagatttagggactgataaagataaggaacagtggaaagaggttcacaagcaggtggttgagagtgcttatgaggtgatcaaactcaaaggctacacatcctgggctattggactctctgtagcagatttggcagagagtataatgaagaatcttaggcgggtgcacccagtttccaccatgattaagggtctttacggaataaaggatgatgtcttccttagtgttccttgcattttgggacagaatggaatctcagaccttgtgaaggtgactctgacttctgaggaagaggcccgtttgaagaagagtgcagatacactttgggggatccaaaaggagctgcaattttaaagtcttctgatgtcatatcatttcactgtctaggctacaacaggattctaggtggaggttgtgcatgttgtcctttttatctgatctgtgattaaagcagtaatattttaagatggactgggaaaaacatcaactcctgaagttagaaataagaatggtttgtaaaatccacagctatatcctgatgctggatggtattaatcttgtgtagtcttcaactggttagtgtgaaatagttctgccacctctgacgcaccactgccaatgctgtacgtactgcatttgccccttgagccaggtggatgtttaccgtgtgttatataacttcctggctccttcactgaacatgcctagtccaacattttttcccagtgagtcacatcctgggatccagtgtataaatccaatatcatgtcttgtgcataattcttccaaaggatcttattttgtgaactatatcagtagtgtacattaccatataatgtaaaaagatctacatacaaacaatgcaaccaactatccaagtgttataccaactaaaacccccaataaaccttgaacagtga

SEQ ID NO: 77342 - DNA, 1641 bp, Homo sapiens
  misc_feature (1)..(3): n is a, c, g, or t
  misc_feature (12)..(12): n is a, c, g, or t
  misc_feature (14)..(15): n is a, c, g, or t
  misc_feature (29)..(29): n is a, c, g, or t
nnnttgaatccncnnctttgatggcctantgggtgctgcagccgctgccgccgattccggatctcattgccacgcgcccccgacgaccgcccgacgtgcattcccgattccttttggttccaagtccaatatggcaactctaaaggatcagctgatttataatcttctaaaggaagaacagaccccccagaataagattacagttgttggggttggtgctgttggcatggcctgtgccatcagtatcttaatgaaggacttggcagatgaacttgctcttgttgatgtcatcgaagacaaattgaagggagagatgatggatctccaacatggcagccttttccttagaacaccaaagattgtctctggcaaagactataatgtaactgcaaactccaagctggtcattatcacggctggggcacgtcagcaagagggagaaagccgtcttaatttggtccagcgtaacgtgaacatctttaaattcatcattcctaatgttgtaaaatacagcccgaactgcaagttgcttattgtttcaaatccagtggatatcttgacctacgtggcttggaagataagtggttttcccaaaaaccgtgttattggaagtggttgcaatctggattcagcccgattccgttacctgatgggggaaaggctgggagttcacccattaagctgtcatgggtgggtccttggggaacatggagattccagtgtgcctgtatggagtggaatgaatgttgctggtgtctctctgaagactctgcacccagatttagggactgataaagataaggaacagtggaaagaggttcacaagcaggtggttgagagtgcttatgaggtgatcaaactcaaaggctacacatcctgggctattggactctctgtagcagatttggcagagagtataatgaagaatcttaggcgggtgcacccagtttccaccatgattaagggtctttacggaataaaggatgatgtcttccttagtgttccttgcattttgggacagaatggaatctcagaccttgtgaaggtgactctgacttctgaggaagaggcccgtttgaagaagagtgcagatacactttgggggatccaaaaggagctgcaattttaaagtcttctgatgtcatatcatttcactgtctaggctacaacaggattctaggtggaggttgtgcatgttgtcctttttatctgatctgtgattaaagcagtaatattttaagatggactgggaaaaacatcaactcctgaagttagaaataagaatggtttgtaatggttagtgtgaaatagttctgccacctctgacgcaccactgccaatgctgtacgtactgcatttgccccttgagccaggtggatgtttaccgtgtgttatataacttcctggctccttcactgaacatgcctagtccaacattttttcccagtgagtcacatcctgggatccagtgtataaatccaatatcatgtcttgtgcataattcttccaaaggatcttattttgtgaactatatcagtagtgtacattaccatataatgtaaaaagatctacatacaaacaatgcaaccaactatccaagtgttataccaactaaaacccccaataaaccttgaacagtga

SEQ ID NO: 77343 - DNA, 1538 bp, Homo sapiens
  misc_feature (1)..(3): n is a, c, g, or t
  misc_feature (12)..(12): n is a, c, g, or t
  misc_feature (14)..(15): n is a, c, g, or t
  misc_feature (29)..(29): n is a, c, g, or t
nnnttgaatccncnnctttgatggcctantgggtgctgcagccgctgccgccgattccggatctcattgccacgcgcccccgacgaccgcccgacgtgcattcccgattccttttggttccaagtccaatatggcaactctaaaggatcagctgatttataatcttctaaaggaagaacagaccccccagaataagattacagttgttggggttggtgctgttggcatggcctgtgccatcagtatcttaatgaaggacttggcagatgaacttgctcttgttgatgtcatcgaagacaaattgaagggagagatgatggatctccaacatggcagccttttccttagaacaccaaagattgtctctggcaaagactataatgtaactgcaaactccaagctggtcattatcacggctggggcacgtcagcaagagggagaaagccgtcttaatttggtccagcgtaacgtgaacatctttaaattcatcattcctaatgttgtaaaatacagcccgaactgcaagttgcttattgtttcaaatccagtggatatcttgacctacgtggcttggaagataagtggttttcccaaaaaccgtgttattggaagtggttgcaatctggattcagcccgattccgttacctgatgggggaaaggctgggagttcacccattaagctgtcatgggtgggtccttggggaacatggagattccagtgtgcctgtatggagtggaatgaatgttgctggtgtctctctgaagactctgcacccagatttagggactgataaagataaggaacagtggaaagaggttcacaagcaggtggttgagagtgcttatgaggtgatcaaactcaaaggctacacatcctgggctattggactctctgtagcagatttggcagagagtataatgaagaatcttaggcgggtgcacccagtttccaccatgattaagggtctttacggaataaaggatgatgtcttccttagtgttccttgcattttgggacagaatggaatctcagaccttgtgaaggtgactctgacttctgaggaagaggcccgtttgaagaagagtgcagatacactttgggggatccaaaaggagctgcaattttaaagtcttctgatgtcatatcatttcactgtctaggctacaacaggattctaggtggaggttgtgcatgttgtcctttttatctgatctgtgattaaagcagtaatattttaagatggactgggaaaaacatcaactcctgaagttagaaataagaatggtttgtaaaatccacagctatatcctgatgctggatggtattaatcttgtgtagtcttcaactggttcgatcgatcagatagttgttacgcctatgacgcagcattcgcgatcgggaacgcaacgcattcgcccattgacaccggtggatgcattcgctgctcatgatggcacattcgattggcccctatcatggtaacacccgaagattctaccactatatcgccggagagtcacatccgtcgtttaacct

SEQ ID NO: 77344 - DNA, 1336 bp, Homo sapiens
  misc_feature (1)..(3): n is a, c, g, or t
  misc_feature (12)..(12): n is a, c, g, or t
  misc_feature (14)..(15): n is a, c, g, or t
  misc_feature (29)..(29): n is a, c, g, or t
nnnttgaatccncnnctttgatggcctantgggtgctgcagccgctgccgccgattccggatctcattgccacgcgcccccgacgaccgcccgacgtgcattcccgattccttttggttccaagtccaatatggcaactctaaaggatcagctgatttataatcttctaaaggaagaacagaccccccagaataagattacagttgttggggttggtgctgttggcatggcctgtgccatcagtatcttaatgaaggacttggcagatgaacttgctcttgttgatgtcatcgaagacaaattgaagggagagatgatggatctccaacatggcagccttttccttagaacaccaaagattgtctctggcaaagactataatgtaactgcaaactccaagctggtcattatcacggctggggcacgtcagcaagagggagaaagccgtcttaatttggtccagcgtaacgtgaacatctttaaattcatcattcctaatgttgtaaaatacagcccgaactgcaagttgcttattgtttcaaatccagtggatatcttgacctacgtggcttggaagataagtggttttcccaaaaaccgtgttattggaagtggttgcaatctggattcagcccgattccgttacctgatgggggaaaggctgggagttcacccattaagctgtcatgggtgggtccttggggaacatggagattccagtgtgcctgtatggagtggaatgaatgttgctggtgtctctctgaagactctgcacccagatttagggactgataaagataaggaacagtggaaagaggttcacaagcaggtggttgagagtgcttatgaggtgatcaaactcaaaggctacacatcctgggctattggactctctgtagcagatttggcagagagtataatgaagaatcttaggcgggtgcacccagtttccaccatgattaagggtctttacggaataaaggatgatgtcttccttagtgttccttgcattttgggacagaatggaatctcagaccttgtgaaggtgactctgacttctgaggaagaggcccgtttgaagaagagtgcagatacactttgggggatccaaaaggagctgcaattttaaagtcttctgatgtcatatcatttcactgtctaggctacaacaggattctaggtggaggttgtgcatgttgtcctttttatctgatctgtgattaaagcagtaatattttaagatggactgggaaaaacatcaactcctgaagttagaaataagaatggtttgtaatccacaagggtttttcaaagcaagaacgtcaggttcgccagg

SEQ ID NO: 77345 - DNA, 1261 bp, Homo sapiens
  misc_feature (1)..(3): n is a, c, g, or t
  misc_feature (12)..(12): n is a, c, g, or t
  misc_feature (14)..(15): n is a, c, g, or t
  misc_feature (29)..(29): n is a, c, g, or t
  misc_feature (1241)..(1242): n is a, c, g, or t
  misc_feature (1257)..(1257): n is a, c, g, or t
nnnttgaatccncnnctttgatggcctantgggtgctgcagccgctgccgccgattccggatctcattgccacgcgcccccgacgaccgcccgacgtgcattcccgattccttttggttccaagtccaatatggcaactctaaaggatcagctgatttataatcttctaaaggaagaacagaccccccagaataagattacagttgttggggttggtgctgttggcatggcctgtgccatcagtatcttaatgaaggacttggcagatgaacttgctcttgttgatgtcatcgaagacaaattgaagggagagatgatggatctccaacatggcagccttttccttagaacaccaaagattgtctctggcaaagactataatgtaactgcaaactccaagctggtcattatcacggctggggcacgtcagcaagagggagaaagccgtcttaatttggtccagcgtaacgtgaacatctttaaattcatcattcctaatgttgtaaaatacagcccgaactgcaagttgcttattgtttcaaatccagtggatatcttgacctacgtggcttggaagataagtggttttcccaaaaaccgtgttattggaagtggttgcaatctggattcagcccgattccgttacctgatgggggaaaggctgggagttcacccattaagctgtcatgggtgggtccttggggaacatggagattccagtgtgcctgtatggagtggaatgaatgttgctggtgtctctctgaagactctgcacccagatttagggactgataaagataaggaacagtggaaagaggttcacaagcaggtggttgagagtgcttatgaggtgatcaaactcaaaggctacacatcctgggctattggactctctgtagcagatttggcagagagtataatgaagaatcttaggcgggtgcacccagtttccaccatgattaagggtctttacggaataaaggatgatgtcttccttagtgttccttgcattttgggacagaatggaatctcagaccttgtgaaggtgactctgacttctgaggaagaggcccgtttgaagaagagtgcagatacactttgggggatccaaaaggagctgcaattttaaagtcttctgatgtcatatcatttcactgtctaggctacaacaggattctaggtggaggttgtgcatgttgtcctttttatctgatctgtgattaaagcagtaaaaaaaaaannaaaaaaaaaattttngggg

SEQ ID NO: 77346 - DNA, 1561 bp, Homo sapiens
  misc_feature (1)..(3): n is a, c, g, or t
  misc_feature (12)..(12): n is a, c, g, or t
  misc_feature (14)..(15): n is a, c, g, or t
  misc_feature (29)..(29): n is a, c, g, or t
nnnttgaatccncnnctttgatggcctantgggtgctgcagccgctgccgccgattccggatctcattgccacgcgcccccgacgaccgcccgacgtgcattcccgattccttttggttccaagtccaatatggcaactctaaaggatcagctgatttataatcttctaaaggaagaacagaccccccagaataagattacagttgttggggttggtgctgttggcatggcctgtgccatcagtatcttaatgaaggacttggcagatgaacttgctcttgttgatgtcatcgaagacaaattgaagggagagatgatggatctccaacatggcagccttttccttagaacaccaaagattgtctctggcaaagactataatgtaactgcaaactccaagctggtcattatcacggctggggcacgtcagcaagagggagaaagccgtcttaatttggtccagcgtaacgtgaacatctttaaattcatcattcctaatgttgtaaaatacagcccgaactgcaagttgcttattgtttcaaatccagtggatatcttgacctacgtggcttggaagataagtggttttcccaaaaaccgtgttattggaagtggttgcaatctggattcagcccgattccgttacctgatgggggaaaggctgggagttcacccattaagctgtcatgggtgggtccttggggaacatggagattccagtgtgcctgtatggagtggaatgaatgttgctggtgtctctctgaagactctgcacccagatttagggactgataaagataaggaacagtggaaagaggttcacaagcaggtggttgagagggtctttacggaataaaggatgatgtcttccttagtgttccttgcattttgggacagaatggaatctcagaccttgtgaaggtgactctgacttctgaggaagaggcccgtttgaagaagagtgcagatacactttgggggatccaaaaggagctgcaattttaaagtcttctgatgtcatatcatttcactgtctaggctacaacaggattctaggtggaggttgtgcatgttgtcctttttatctgatctgtgattaaagcagtaatattttaagatggactgggaaaaacatcaactcctgaagttagaaataagaatggtttgtaaaatccacagctatatcctgatgctggatggtattaatcttgtgtagtcttcaactggttagtgtgaaatagttctgccacctctgacgcaccactgccaatgctgtacgtactgcatttgccccttgagccaggtggatgtttaccgtgtgttatataacttcctggctccttcactgaacatgcctagtccaacattttttcccagtgagtcacatcctgggatccagtgtataaatccaatatcatgtcttgtgcataattcttccaaaggatcttattttgtgaactatatcagtagtgtacattaccatataatgtaaaaagatctacatacaaacaatgcaaccaactatccaattgatcccagctaccccactttctttcttttc

SEQ ID NO: 77347 - DNA, 1003 bp, Homo sapiens
  misc_feature (1)..(3): n is a, c, g, or t
  misc_feature (12)..(12): n is a, c, g, or t
  misc_feature (14)..(15): n is a, c, g, or t
  misc_feature (29)..(29): n is a, c, g, or t
  misc_feature (981)..(981): n is a, c, g, or t
nnnttgaatccncnnctttgatggcctantgggtgctgcagccgctgccgccgattccggatctcattgccacgcgcccccgacgaccgcccgacgtgcattcccgattccttttggttccaagtccaatatggcaactctaaaggatcagctgatttataatcttctaaaggaagaacagaccccccagaataagattacagttgttggggttggtgctgttggcatggcctgtgccatcagtatcttaatgaaggacttggcagatgaacttgctcttgttgatgtcatcgaagacaaattgaagggagagatgatggatctccaacatggcagccttttccttagaacaccaaagattgtctctggcaaagactataatgtaactgcaaactccaagctggtcattatcacggctggggcacgtcagcaagagggagaaagccgtcttaatttggtccagcgtaacgtgaacatctttaaattcatcattcctaatgttgtaaaatacagcccgaactgcaagttgcttattgtttcaaatccagtggatatcttgacctacgtggcttggaagataagtggttttcccaaaaaccgtgttattggaagtggttgcaatctggattcagcccgattccgttacctgatgggggaaaggctgggagttcacccattaagctgtcatgggtgggtccttggggaacatggagattccagtgtgcctgtatggagtggaatgaatgttgctggtgtctctctgaagactctgcacccagatttagggactgataaagataaggaacagtggaaagaggttcacaagcaggtggttgagagtgcttatgaggtgatcaaactcaaaggctacacatcctgggctattggactctctgtagcagatttggcagagagtataatgaagaatcttaggcgggtgcacccagtttccaccatgattaaggtctttacggaataagnatgtgtgcgaggatgtagcgcg

SEQ ID NO: 77348 - DNA, 1173 bp, Homo sapiens
  misc_feature (1)..(3): n is a, c, g, or t
  misc_feature (12)..(12): n is a, c, g, or t
  misc_feature (14)..(15): n is a, c, g, or t
  misc_feature (29)..(29): n is a, c, g, or t
nnnttgaatccncnnctttgatggcctantgggtgctgcagccgctgccgccgattccggatctcattgccacgcgcccccgacgaccgcccgacgtgcattcccgattccttttggttccaagtccaatatggcaactctaaaggatcagctgatttataatcttctaaaggaagaacagaccccccagaataagattacagttgttggggttggtgctgttggcatggcctgtgccatcagtatcttaatgaaggacttggcagatgaacttgctcttgttgatgtcatcgaagacaaattgaagggagagatgatggatctccaacatggcagccttttccttagaacaccaaagattgtctctggcaaagactataatgtaactgcaaactccaagctggtcattatcacggctggggcacgtcagcaagagggagaaagccgtcttaatttggtccagcgtaacgtgaacatctttaaattcatcattcctaatgttgtaaaatacagcccgaactgcaagttgcttattgtttcaaatccagtggatatcttgacctacgtggcttggaagataagtggttttcccaaaaaccgtgttattggaagtggttgcaatctggattcagcccgattccgttacctgatgggggaaaggctgggagttcacccattaagctgtcatgggtgggtccttggggaacatggagattccagtgtgcctgtatggagtggaatgaatgttgctggtgtctctctgaagactctgcacccagatttagggactgataaagataaggaacagtggaaagaggttcacaagcaggtggttgagaggtaataaatctttcaatttggcaacacagaatattaacatttactatttttatttaaaaggttaaaattgtaatagtatttgcatttgagaactttttgttagaaaacttgtgtggtttttttgttttgttttgtttgagacagaatcttgccctttcgcacaggctgcagtgcagtggcgcaatcttggctcactgcaacctctgcctcccgggttcaggcgattctcctgcctcagcctcctgggtacctgggactacaggcatatgccatgacgcccggctaattttttgtatttttagtagagatgggtttcaccatgttagccaaaaa

SEQ ID NO: 77349 - DNA, 611 bp, Homo sapiens
  misc_feature (1)..(3): n is a, c, g, or t
  misc_feature (12)..(12): n is a, c, g, or t
  misc_feature (14)..(15): n is a, c, g, or t
  misc_feature (29)..(29): n is a, c, g, or t
nnnttgaatccncnnctttgatggcctantgggtgctgcagccgctgccgccgattccggatctcattgccacgcgcccccgacgaccgcccgacgtgcattcccgattccttttggttccaagtccaatatggcaactctaaaggatcagctgatttataatcttctaaaggaagaacagaccccccagaataagattacagttgttggggttggtgctgttggcatggcctgtgccatcagtatcttaatgaaggacttggcagatgaacttgctcttgttgatgtcatcgaagacaaattgaagggagagatgatggatctccaacatggcagccttttccttagaacaccaaagattgtctctggcaaagactataatgtaactgcaaactccaagctggtcattatcacggctggggcacgtcagcaagagggagaaagccgtcttaatttggtccagcgtaacgtgaacatctttaaattcatcattcctaatgttgtaaaatacagcccgaactgcaagttgcttattgtttcaaatccagcggatatcttgacctagctgccttcgcaggccgaatccgtctacccaatggcggcaacaggcg

SEQ ID NO: 77350 - DNA, 1428 bp, Homo sapiens
  misc_feature (1)..(3): n is a, c, g, or t
  misc_feature (12)..(12): n is a, c, g, or t
  misc_feature (14)..(15): n is a, c, g, or t
  misc_feature (29)..(29): n is a, c, g, or t
nnnttgaatccncnnctttgatggcctantgggtgctgcagccgctgccgccgattccggatctcattgccacgcgcccccgacgaccgcccgacgtgcattcccggtacggtagggccctgcgcgcacggcgccagagggatgggcgggtagagccaactgcctctggttctgctggcctccgctgctcgcgaagggattcctgctcccgggaggtgtaggagccgctttccagaagcacagcccagagacgtctgggcggcggcccacacaacgcatgtgttcggagctcgccgcgctctgcttttgctctaagcgggaaccatggcttctggccacgctggggaaccgaggaggagccggagtagctcagagtgatcttgtctgaggaaaggccagccccacttggggttaataaaccgcgatgggtgaaccctcaggaggctatacttacacccaaacgtcgatattccttttccacgctaaggtatgggccttcactcttcacagaccctgtcattaggcctttcaactctcttttggcaaccattaggttttttcccctccctttttagtcatctctagtgatttatagtggcaaatacccccaaaggaagtaaaatagcttaaaaaaatctcttggttaataaacattaaagaagctgtagtgacactaaatgtttttcctcctatagattccttttggttccaagtccaatatggcaactctaaaggatcagctgatttataatcttctaaaggaagaacagaccccccagaataagattacagttgttggggttggtgctgttggcatggcctgtgccatcagtatcttaatgaaggacttggcagatgaacttgctcttgttgatgtcatcgaagacaaattgaagggagagatgatggatctccaacatggcagccttttccttagaacaccaaagattgtctctggcaaagactataatgtaactgcaaactccaagctggtcattatcacggctggggcacgtcagcaagagggagaaagccgtcttaatttggtccagcgtaacgtgaacatctttaaattcatcattcctaatgttgtaaaatacagcccgaactgcaagttgcttattgtttcaaatccagtggatatcttgacctacgtggcttggaagataagtggttttcccaaaaaccgtgttattggaagtggttgcaatctggattcagcccgattccgttacctgatgggggaaaggctgggagttcacccattaagctgtcatgggtgggtccttggggaacatggagattccagtggatccgtgtgcctgttggagtggcattgatgtgctggtgccctcctgagactctcccccgatttggacggtaagataggaccggcgcggtcccaccgggttgactctttgcggccac

SEQ ID NO: 77351 - DNA, 659 bp, Homo sapiens
  misc_feature (1)..(3): n is a, c, g, or t
  misc_feature (12)..(12): n is a, c, g, or t
  misc_feature (14)..(15): n is a, c, g, or t
  misc_feature (29)..(29): n is a, c, g, or t
nnnttgaatccncnnctttgatggcctantgggtgctgcagccgctgccgccgattccggatctcattgccacgcgcccccgacgaccgcccgacgtgcattcccgattccttttggttccaagtccaatatggcaactctaaaggatcagctgatttataatcttctaaaggaagaacagaccccccagaataagattacagttgttggggttggtgctgttggcatggcctgtgccatcagtatcttaatgaaggtaagtgagagtctaccacactggaagcccataccttgaccccatcctctacccccactcctacccctagaactgtattattacatttcatgtaacagtatttagatttatgcactcattcggataactttctgtgaaacaaacttttgaaatatgataatacaccaaaagtgtatctgaaattaaaaagaatcaaaggttgtcaggctggagacccagttcctaaaattcattattctgtattaacatgcatggattgactaccaatgaaaaggaagggtccatgattttaaatgagccaaaattcttttaaagtgatttttgaattgaaaatgacaattcaaaaattgtcatttattggtaaaattatatgggaaatcataagttctcccactcaaatctc

SEQ ID NO: 77352 - DNA, 411 bp, Homo sapiens
cagtcctcccacctcagcctcccaaagtgttgggataacaggtgtgagttgtcatgcccagccaaaactactttttgaataattaatggacttgatatacatagtgtagaggcttaaaaatattaacaaaattattggttagccatgatcaatatcaagatcctgaaaagccatatatctggagtagcctattattatctaatgatcacctagtatctggttaagtgttttcttcatagtaggtatatcttttttgtgtgtagggagaggataatgggtgatttttattttctcctttttcatagtggatatcttgacctacgtggcttggaagataagtggttttcccaaaaaccgtgttattggaagtggttgcaatctggattcagcccgattccgttacctgatggg

SEQ ID NO: 77353 - DNA, 1695 bp, Homo sapiens
  misc_feature (1)..(3): n is a, c, g, or t
  misc_feature (12)..(12): n is a, c, g, or t
  misc_feature (14)..(15): n is a, c, g, or t
  misc_feature (29)..(29): n is a, c, g, or t
nnnttgaatccncnnctttgatggcctantgggtgctgcagccgctgccgccgattccggatctcattgccacgcgcccccgacgaccgcccgacgtgcattcccgattccttttggttccaagtccaatatggcaactctaaaggatcagctgatttataatcttctaaaggaagaacagaccccccagaataagattacagttgttggggttggtgctgttggcatggcctgtgccatcagtatcttaatgaaggacttggcagatgaacttgctcttgttgatgtcatcgaagacaaattgaagggagagatgatggatctccaacatggcagccttttccttagaacaccaaagattgtctctggcaaagactataatgtaactgcaaactccaagctggtcattatcacggctggggcacgtcagcaagagggagaaagccgtcttaatttggtccagcgtaacgtgaacatctttaaattcatcattcctaatgttgtaaaatacagcccgaactgcaagttgcttattgtttcaaatccagtggatatcttgacctacgtggcttggaagataagtggttttcccaaaaaccgtgttattggaagtggttgcaatctggattcagcccgattccgttacctgatgggggaaaggctgggagttcacccattaagctgtcatgggtgggtccttggggaacatggagattccagtgtgcctgtatggagtggaatgaatgttgctggtgtctctctgaagactctgcacccagatttagggactgataaagataaggaacagtggaaagaggttcacaagcaggtggttgagagtgcttatgaggtgatcaaactcaaaggctacacatcctgggctattggactctctgtagcagatttggcagagagtataatgaagaatcttaggcgggtgcacccagtttccaccatgattaagggtctttacggaataaaggatgatgtcttccttagtgttccttgcattttgggacagaatggaatctcagaccttgtgaaggtgactctgacttctgaggaagaggcccgtttgaagaagagtgcagatacactttgggggatccaaaaggagctgcaattttaaagtcttctgatgtcatatcatttcactgtctaggctacaacaggattctaggtggaggttgtgcatgttgtcctttttatctgatctgtgattaaagcagtaatattttaagatggactgggaaaaacatcaactcctgaagttagaaataagaatggtttgtaaaatccacagctatatcctgatgctggatggtattaatcttgtgtagtcttcaactggttagtgtgaaatagttctgccacctctgacgcaccactgccaatgctgtacgtactgcatttgccccttgagccaggtggatgtttaccgtgtgttatataacttcctggctccttcactgaacatgcctagtccaacattttttcccagtgagtcacatcctgggatccagtgtataaatccaatatcatgtcttgtgcataattcttccaaaggatcttattttgtgaactatatcagtagtgtacattaccatataatgtaaaaagatctacatacaaacaatgcaaccaactatccaagtgttataccaactaaaacccccaataaaccttgaacagtga

SEQ ID NO: 77354 - DNA, 2303 bp, Homo sapiens
  misc_feature (1)..(3): n is a, c, g, or t
  misc_feature (12)..(12): n is a, c, g, or t
  misc_feature (14)..(15): n is a, c, g, or t
  misc_feature (29)..(29): n is a, c, g, or t
nnnttgaatccncnnctttgatggcctantgggtgctgcagccgctgccgccgattccggatctcattgccacgcgcccccgacgaccgcccgacgtgcattcccgattccttttggttccaagtccaatatggcaactctaaaggatcagctgatttataatcttctaaaggaagaacagaccccccagaataagattacagttgttggggttggtgctgttggcatggcctgtgccatcagtatcttaatgaaggacttggcagatgaacttgctcttgttgatgtcatcgaagacaaattgaagggagagatgatggatctccaacatggcagccttttccttagaacaccaaagattgtctctggcaaagactataatgtaactgcaaactccaagctggtcattatcacggctggggcacgtcagcaagagggagaaagccgtcttaatttggtccagcgtaacgtgaacatctttaaattcatcattcctaatgttgtaaaatacagcccgaactgcaagttgcttattgtttcaaatccagtggatatcttgacctacgtggcttggaagataagtggttttcccaaaaaccgtgttattggaagtggttgcaatctggattcagcccgattccgttacctgatgggggaaaggctgggagttcacccattaagctgtcatgggtgggtccttggggaacatggagattccagtgtgcctgtatggagtggaatgaatgttgctggtgtctctctgaagactctgcacccagatttagggactgataaagataaggaacagtggaaagaggttcacaagcaggtggttgagagtgcttatgaggtgatcaaactcaaaggctacacatcctgggctattggactctctgtagcagatttggcagagagtataatgaagaatcttaggcgggtgcacccagtttccaccatgattaagggtctttacggaataaaggatgatgtcttccttagtgttccttgcattttgggacagaatggaatctcagaccttgtgaaggtgactctgacttctgaggaagaggcccgtttgaagaagagtgcagatacactttgggggatccaaaaggagctgcaattttaaagtcttctgatgtcatatcatttcactgtctaggctacaacaggattctaggtggaggttgtgcatgttgtcctttttatctgatctgtgattaaagcagtaatattttaagatggactgggaaaaacatcaactcctgaagttagaaataagaatggtttgtaaaatccacagctatatcctgatgctggatggtattaatcttgtgtagtcttcaactggttagtgtgaaatagttctgccacctctgacgcaccactgccaatgctgtacgtactgcatttgccccttgagccaggtggatgtttaccgtgtgttatataacttcctggctccttcactgaacatgcctagtccaacattttttcccagtgagtcacatcctgggatccagtgtataaatccaatatcatgtcttgtgcataattcttccaaaggatcttattttgtgaactatatcagtagtgtacattaccatataatgtaaaaagatctacatacaaacaatgcaaccaactatccaagtgttataccaactaaaacccccaataaaccttgaacagtgaaaaaaaaaaaaaaaaaaaaaaaaaaaaaaaagaaaaaaaaaaaaaaaaaaaaaaaaaaaaaaaaaaaaaaaaaaaaaaaaaaaaaaaaaagggggggggggggggttaacattctcccccgaggagggggcgagcacactacgcaccgacgcccaccacccgtactttgctacagacagaagggggggcaccactatatcagcgaggggctgatttaatacaagacgcgcaggccgcgcgccgagccgtattacaacaccacacattcgtgcgcgggcggacacaactcgacggctacctcgaggatctcctcgcgcgcggcgaacgcaccccctctccctccggcggggggggggccacaacaacttagtggcgccagcacccccccccccccccaccagagccaccccagcgaccgcccacgtgcggcgcaatacacctcaccaccccacctcctgccgcgtgtacccgcgcgggggtagcaacaccaaccaccgcgacacaacgctgcggccggccggcgcgcacccactcactgctccgcgcccccgggcgcatccgctaccgcagccaacacactctccaccaacggcgagcactctacccac

SEQ ID NO: 77355 - DNA, 1734 bp, Homo sapiens
  misc_feature (1)..(3): n is a, c, g, or t
  misc_feature (12)..(12): n is a, c, g, or t
  misc_feature (14)..(15): n is a, c, g, or t
  misc_feature (29)..(29): n is a, c, g, or t
nnnttgaatccncnnctttgatggcctantgggtgctgcagccgctgccgccgattccggatctcattgccacgcgcccccgacgaccgcccgacgtgcattcccgattccttttggttccaagtccaatatggcaactctaaaggatcagctgatttataatcttctaaaggaagaacagaccccccagaataagattacagttgttggggttggtgctgttggcatggcctgtgccatcagtatcttaatgaaggacttggcagatgaacttgctcttgttgatgtcatcgaagacaaattgaagggagagatgatggatctccaacatggcagccttttccttagaacaccaaagattgtctctggcaaagactataatgtaactgcaaactccaagctggtcattatcacggctggggcacgtcagcaagagggagaaagccgtcttaatttggtccagcgtaacgtgaacatctttaaattcatcattcctaatgttgtaaaatacagcccgaactgcaagttgcttattgtttcaaatccagtggatatcttgacctacgtggcttggaagataagtggttttcccaaaaaccgtgttattggaagtggttgcaatctggattcagcccgattccgttacctgatgggggaaaggctgggagttcacccattaagctgtcatgggtgggtccttggggaacatggagattccagtgtgcctgtatggagtggaatgaatgttgctggtgtctctctgaagactctgcacccagatttagggactgataaagataaggaacagtggaaagaggttcacaagcaggtggttgagagtgcttatgaggtgatcaaactcaaaggctacacatcctgggctattggactctctgtagcagatttggcagagagtataatgaagaatcttaggcgggtgcacccagtttccaccatgattaagggtctttacggaataaaggatgatgtcttccttagtgttccttgcattttgggacagaatggaatctcagaccttgtgaaggtgactctgacttctgaggaagaggcccgtttgaagaagagtgcagatacactttgggggatccaaaaggagctgcaattttaaagtcttctgatgtcatatcatttcactgtctaggctacaacaggattctaggtggaggttgtgcatgttgtcctttttatctgatctgtgattaaagcagtaatattttaagatggactgggaaaaacatcaactcctgaagttagaaataagaatggtttgtaaaatccacagctatatcctgatgctggatggtattaatcttgtgtagtcttcaactggttagtgtgaaatagttctgccacctctgacgcaccactgccaatgctgtacgtactgcatttgccccttgagccaggtggatgtttaccgtgtgttatataacttcctggctccttcactgaacatgcctagtccaacattttttcccagtgagtcacatcctgggatccagtgtataaatccaatatcatgtcttgtgcataattcttccaaaggatcttattttgtgaactatatcagtagtgtacattaccatataatgtaaaaagatctacatacaaacaatgcaaccaactatccaagtgttataccaactaaaacccccaataaaccttgaacagtgagtcgacgcggccgcgaatttagtagtagtaggcggccgc

SEQ ID NO: 77356 - DNA, 1742 bp, Homo sapiens
  misc_feature (1)..(3): n is a, c, g, or t
  misc_feature (12)..(12): n is a, c, g, or t
  misc_feature (14)..(15): n is a, c, g, or t
  misc_feature (29)..(29): n is a, c, g, or t
nnnttgaatccncnnctttgatggcctantgggtgctgcagccgctgccgccgattccggatctcattgccacgcgcccccgacgaccgcccgacgtgcattcccgattccttttggttccaagtccaatatggcaactctaaaggatcagctgatttataatcttctaaaggaagaacagaccccccagaataagattacagttgttggggttggtgctgttggcatggcctgtgccatcagtatcttaatgaaggacttggcagatgaacttgctcttgttgatgtcatcgaagacaaattgaagggagagatgatggatctccaacatggcagccttttccttagaacaccaaagattgtctctggcaaagactataatgtaactgcaaactccaagctggtcattatcacggctggggcacgtcagcaagagggagaaagccgtcttaatttggtccagcgtaacgtgaacatctttaaattcatcattcctaatgttgtaaaatacagcccgaactgcaagttgcttattgtttcaaatccagtggatatcttgacctacgtggcttggaagataagtggttttcccaaaaaccgtgttattggaagtggttgcaatctggattcagcccgattccgttacctgatgggggaaaggctgggagttcacccattaagctgtcatgggtgggtccttggggaacatggagattccagtgtgcctgtatggagtggaatgaatgttgctggtgtctctctgaagactctgcacccagatttagggactgataaagataaggaacagtggaaagaggttcacaagcaggtggttgagagtgcttatgaggtgatcaaactcaaaggctacacatcctgggctattggactctctgtagcagatttggcagagagtataatgaagaatcttaggcgggtgcacccagtttccaccatgattaagggtctttacggaataaaggatgatgtcttccttagtgttccttgcattttgggacagaatggaatctcagaccttgtgaaggtgactctgacttctgaggaagaggcccgtttgaagaagagtgcagatacactttgggggatccaaaaggagctgcaattttaaagtcttctgatgtcatatcatttcactgtctaggctacaacaggattctaggtggaggttgtgcatgttgtcctttttatctgatctgtgattaaagcagtaatattttaagatggactgggaaaaacatcaactcctgaagttagaaataagaatggtttgtaaaatccacagctatatcctgatgctggatggtattaatcttgtgtagtcttcaactggttagtgtgaaatagttctgccacctctgacgcaccactgccaatgctgtacgtactgcatttgccccttgagccaggtggatgtttaccgtgtgttatataacttcctggctccttcactgaacatgcctagtccaacattttttcccagtgagtcacatcctgggatccagtgtataaatccaatatcatgtcttgtgcataattcttccaaaggatcttattttgtgaactatatcagtagtgtacattaccatataatgtaaaaagatctacatacaaacaatgcaaccaactatccaagtgttataccaactaaaacccccaataaaccttgaacagtgaaaatattatctactgtacctcttattacatcatggcccgcctttccg

SEQ ID NO: 77357 - DNA, 2251 bp, Homo sapiens
  misc_feature (1)..(3): n is a, c, g, or t
  misc_feature (12)..(12): n is a, c, g, or t
  misc_feature (14)..(15): n is a, c, g, or t
  misc_feature (29)..(29): n is a, c, g, or t
nnnttgaatccncnnctttgatggcctantgggtgctgcagccgctgccgccgattccggatctcattgccacgcgcccccgacgaccgcccgacgtgcattcccgattccttttggttccaagtccaatatggcaactctaaaggatcagctgatttataatcttctaaaggaagaacagaccccccagaataagattacagttgttggggttggtgctgttggcatggcctgtgccatcagtatcttaatgaaggacttggcagatgaacttgctcttgttgatgtcatcgaagacaaattgaagggagagatgatggatctccaacatggcagccttttccttagaacaccaaagattgtctctggcaaagactataatgtaactgcaaactccaagctggtcattatcacggctggggcacgtcagcaagagggagaaagccgtcttaatttggtccagcgtaacgtgaacatctttaaattcatcattcctaatgttgtaaaatacagcccgaactgcaagttgcttattgtttcaaatccagtggatatcttgacctacgtggcttggaagataagtggttttcccaaaaaccgtgttattggaagtggttgcaatctggattcagcccgattccgttacctgatgggggaaaggctgggagttcacccattaagctgtcatgggtgggtccttggggaacatggagattccagtgtgcctgtatggagtggaatgaatgttgctggtgtctctctgaagactctgcacccagatttagggactgataaagataaggaacagtggaaagaggttcacaagcaggtggttgagagtgcttatgaggtgatcaaactcaaaggctacacatcctgggctattggactctctgtagcagatttggcagagagtataatgaagaatcttaggcgggtgcacccagtttccaccatgattaagggtctttacggaataaaggatgatgtcttccttagtgttccttgcattttgggacagaatggaatctcagaccttgtgaaggtgactctgacttctgaggaagaggcccgtttgaagaagagtgcagatacactttgggggatccaaaaggagctgcaattttaaagtcttctgatgtcatatcatttcactgtctaggctacaacaggattctaggtggaggttgtgcatgttgtcctttttatctgatctgtgattaaagcagtaatattttaagatggactgggaaaaacatcaactcctgaagttagaaataagaatggtttgtaaaatccacagctatatcctgatgctggatggtattaatcttgtgtagtcttcaactggttagtgtgaaatagttctgccacctctgacgcaccactgccaatgctgtacgtactgcatttgccccttgagccaggtggatgtttaccgtgtgttatataacttcctggctccttcactgaacatgcctagtccaacattttttcccagtgagtcacatcctgggatccagtgtataaatccaatatcatgtcttgtgcataattcttccaaaggatcttattttgtgaactatatcagtagtgtacattaccatataatgtaaaaagatctacatacaaacaatgcaaccaactatccaagtgttataccaactaaaacccccaataaaccttgaacagtgaaaaaaaaaaaaaaaaaaaaaaaaaaaaaaaaaaaaaaagggggggggggggggttaacattctcccccgaggagggggcgagcacactacgcaccgacgcccaccacccgtactttgctacagacagaagggggggcaccactatatcagcgaggggctgatttaatacaagacgcgcaggccgcgcgccgagccgtattacaacaccacacattcgtgcgcgggcggacacaactcgacggctacctcgaggatctcctcgcgcgcggcgaacgcaccccctctccctccggcggggggggggccacaacaacttagtggcgccagcacccccccccccccccaccagagccaccccagcgaccgcccacgtgcggcgcaatacacctcaccaccccacctcctgccgcgtgtacccgcgcgggggtagcaacaccaaccaccgcgacacaacgctgcggccggccggcgcgcacccactcactgctccgcgcccccgggcgcatccgctaccgcagccaacacactctccaccaacggcgagcactctacccac

SEQ ID NO: 77358 - DNA, 1749 bp, Homo sapiens
  misc_feature (1)..(3): n is a, c, g, or t
  misc_feature (12)..(12): n is a, c, g, or t
  misc_feature (14)..(15): n is a, c, g, or t
  misc_feature (29)..(29): n is a, c, g, or t
nnnttgaatccncnnctttgatggcctantgggtgctgcagccgctgccgccgattccggatctcattgccacgcgcccccgacgaccgcccgacgtgcattcccgattccttttggttccaagtccaatatggcaactctaaaggatcagctgatttataatcttctaaaggaagaacagaccccccagaataagattacagttgttggggttggtgctgttggcatggcctgtgccatcagtatcttaatgaaggacttggcagatgaacttgctcttgttgatgtcatcgaagacaaattgaagggagagatgatggatctccaacatggcagccttttccttagaacaccaaagattgtctctggcaaagactataatgtaactgcaaactccaagctggtcattatcacggctggggcacgtcagcaagagggagaaagccgtcttaatttggtccagcgtaacgtgaacatctttaaattcatcattcctaatgttgtaaaatacagcccgaactgcaagttgcttattgtttcaaatccagtggatatcttgacctacgtggcttggaagataagtggttttcccaaaaaccgtgttattggaagtggttgcaatctggattcagcccgattccgttacctgatgggggaaaggctgggagttcacccattaagctgtcatgggtgggtccttggggaacatggagattccagtgtgcctgtatggagtggaatgaatgttgctggtgtctctctgaagactctgcacccagatttagggactgataaagataaggaacagtggaaagaggttcacaagcaggtggttgagagtgcttatgaggtgatcaaactcaaaggctacacatcctgggctattggactctctgtagcagatttggcagagagtataatgaagaatcttaggcgggtgcacccagtttccaccatgattaagggtctttacggaataaaggatgatgtcttccttagtgttccttgcattttgggacagaatggaatctcagaccttgtgaaggtgactctgacttctgaggaagaggcccgtttgaagaagagtgcagatacactttgggggatccaaaaggagctgcaattttaaagtcttctgatgtcatatcatttcactgtctaggctacaacaggattctaggtggaggttgtgcatgttgtcctttttatctgatctgtgattaaagcagtaatattttaagatggactgggaaaaacatcaactcctgaagttagaaataagaatggtttgtaaaatccacagctatatcctgatgctggatggtattaatcttgtgtagtcttcaactggttagtgtgaaatagttctgccacctctgacgcaccactgccaatgctgtacgtactgcatttgccccttgagccaggtggatgtttaccgtgtgttatataacttcctggctccttcactgaacatgcctagtccaacattttttcccagtgagtcacatcctgggatccagtgtataaatccaatatcatgtcttgtgcataattcttccaaaggatcttattttgtgaactatatcagtagtgtacattaccatataatgtaaaaagatctacatacaaacaatgcaaccaactatccaagtgttataccaactaaaacccccaataaaccttgaacagtgaaaaaacaaaaacaaaccacacacaaccaccacaaaacaaaaaaaaaaagagggg

SEQ ID NO: 77359 - DNA, 1719 bp, Homo sapiens
  misc_feature (1)..(3): n is a, c, g, or t
  misc_feature (12)..(12): n is a, c, g, or t
  misc_feature (14)..(15): n is a, c, g, or t
  misc_feature (29)..(29): n is a, c, g, or t
nnnttgaatccncnnctttgatggcctantgggtgctgcagccgctgccgccgattccggatctcattgccacgcgcccccgacgaccgcccgacgtgcattcccgattccttttggttccaagtccaatatggcaactctaaaggatcagctgatttataatcttctaaaggaagaacagaccccccagaataagattacagttgttggggttggtgctgttggcatggcctgtgccatcagtatcttaatgaaggacttggcagatgaacttgctcttgttgatgtcatcgaagacaaattgaagggagagatgatggatctccaacatggcagccttttccttagaacaccaaagattgtctctggcaaagactataatgtaactgcaaactccaagctggtcattatcacggctggggcacgtcagcaagagggagaaagccgtcttaatttggtccagcgtaacgtgaacatctttaaattcatcattcctaatgttgtaaaatacagcccgaactgcaagttgcttattgtttcaaatccagtggatatcttgacctacgtggcttggaagataagtggttttcccaaaaaccgtgttattggaagtggttgcaatctggattcagcccgattccgttacctgatgggggaaaggctgggagttcacccattaagctgtcatgggtgggtccttggggaacatggagattccagtgtgcctgtatggagtggaatgaatgttgctggtgtctctctgaagactctgcacccagatttagggactgataaagataaggaacagtggaaagaggttcacaagcaggtggttgagagtgcttatgaggtgatcaaactcaaaggctacacatcctgggctattggactctctgtagcagatttggcagagagtataatgaagaatcttaggcgggtgcacccagtttccaccatgattaagggtctttacggaataaaggatgatgtcttccttagtgttccttgcattttgggacagaatggaatctcagaccttgtgaaggtgactctgacttctgaggaagaggcccgtttgaagaagagtgcagatacactttgggggatccaaaaggagctgcaattttaaagtcttctgatgtcatatcatttcactgtctaggctacaacaggattctaggtggaggttgtgcatgttgtcctttttatctgatctgtgattaaagcagtaatattttaagatggactgggaaaaacatcaactcctgaagttagaaataagaatggtttgtaaaatccacagctatatcctgatgctggatggtattaatcttgtgtagtcttcaactggttagtgtgaaatagttctgccacctctgacgcaccactgccaatgctgtacgtactgcatttgccccttgagccaggtggatgtttaccgtgtgttatataacttcctggctccttcactgaacatgcctagtccaacattttttcccagtgagtcacatcctgggatccagtgtataaatccaatatcatgtcttgtgcataattcttccaaaggatcttattttgtgaactatatcagtagtgtacattaccatataatgtaaaaagatctacatacaaacaatgcaaccaactatccaagtgttataccaactaaaacccccaataaaccttgaacagtgatgacacgtgcagcgggtactctga

SEQ ID NO: 77360 - DNA, 1701 bp, Homo sapiens
  misc_feature (1)..(3): n is a, c, g, or t
  misc_feature (12)..(12): n is a, c, g, or t
  misc_feature (14)..(15): n is a, c, g, or t
  misc_feature (29)..(29): n is a, c, g, or t
nnnttgaatccncnnctttgatggcctantgggtgctgcagccgctgccgccgattccggatctcattgccacgcgcccccgacgaccgcccgacgtgcattcccgattccttttggttccaagtccaatatggcaactctaaaggatcagctgatttataatcttctaaaggaagaacagaccccccagaataagattacagttgttggggttggtgctgttggcatggcctgtgccatcagtatcttaatgaaggacttggcagatgaacttgctcttgttgatgtcatcgaagacaaattgaagggagagatgatggatctccaacatggcagccttttccttagaacaccaaagattgtctctggcaaagactataatgtaactgcaaactccaagctggtcattatcacggctggggcacgtcagcaagagggagaaagccgtcttaatttggtccagcgtaacgtgaacatctttaaattcatcattcctaatgttgtaaaatacagcccgaactgcaagttgcttattgtttcaaatccagtggatatcttgacctacgtggcttggaagataagtggttttcccaaaaaccgtgttattggaagtggttgcaatctggattcagcccgattccgttacctgatgggggaaaggctgggagttcacccattaagctgtcatgggtgggtccttggggaacatggagattccagtgtgcctgtatggagtggaatgaatgttgctggtgtctctctgaagactctgcacccagatttagggactgataaagataaggaacagtggaaagaggttcacaagcaggtggttgagagtgcttatgaggtgatcaaactcaaaggctacacatcctgggctattggactctctgtagcagatttggcagagagtataatgaagaatcttaggcgggtgcacccagtttccaccatgattaagggtctttacggaataaaggatgatgtcttccttagtgttccttgcattttgggacagaatggaatctcagaccttgtgaaggtgactctgacttctgaggaagaggcccgtttgaagaagagtgcagatacactttgggggatccaaaaggagctgcaattttaaagtcttctgatgtcatatcatttcactgtctaggctacaacaggattctaggtggaggttgtgcatgttgtcctttttatctgatctgtgattaaagcagtaatattttaagatggactgggaaaaacatcaactcctgaagttagaaataagaatggtttgtaaaatccacagctatatcctgatgctggatggtattaatcttgtgtagtcttcaactggttagtgtgaaatagttctgccacctctgacgcaccactgccaatgctgtacgtactgcatttgccccttgagccaggtggatgtttaccgtgtgttatataacttcctggctccttcactgaacatgcctagtccaacattttttcccagtgagtcacatcctgggatccagtgtataaatccaatatcatgtcttgtgcataattcttccaaaggatcttattttgtgaactatatcagtagtgtacattaccatataatgtaaaaagatctacatacaaacaatgcaaccaactatccaaatgccccactggccgtgatgcccacctggcacgtgaagccccacactg

SEQ ID NO: 77361 - DNA, 1892 bp, Homo sapiens
ctagtgggcctggatcaatcggccgagggacgaccgcccgacgtgcattcccggtacggtagggccctgcgcgcacggcgccagagggatgggcgggtagagccaactgcctctggttctgctggcctccgctgctcgcgaagggattcctgctcccgggaggtgtaggagccgctttccagaagcacagcccagagacgtctgggcggcggcccacacaacgcatgtgttcggagctcgccgcgctctgcttttgctctaagcgggaaccatggcttctggccacgctggggaaccgaggagattccttttggttccaagtccaatatggcaactctaaaggatcagctgatttataatcttctaaaggaagaacagaccccccagaataagattacagttgttggggttggtgctgttggcatggcctgtgccatcagtatcttaatgaaggacttggcagatgaacttgctcttgttgatgtcatcgaagacaaattgaagggagagatgatggatctccaacatggcagccttttccttagaacaccaaagattgtctctggcaaagactataatgtaactgcaaactccaagctggtcattatcacggctggggcacgtcagcaagagggagaaagccgtcttaatttggtccagcgtaacgtgaacatctttaaattcatcattcctaatgttgtaaaatacagcccgaactgcaagttgcttattgtttcaaatccagtggatatcttgacctacgtggcttggaagataagtggttttcccaaaaaccgtgttattggaagtggttgcaatctggattcagcccgattccgttacctgatgggggaaaggctgggagttcacccattaagctgtcatgggtgggtccttggggaacatggagattccagtgtgcctgtatggagtggaatgaatgttgctggtgtctctctgaagactctgcacccagatttagggactgataaagataaggaacagtggaaagaggttcacaagcaggtggttgagagtgcttatgaggtgatcaaactcaaaggctacacatcctgggctattggactctctgtagcagatttggcagagagtataatgaagaatcttaggcgggtgcacccagtttccaccatgattaagggtctttacggaataaaggatgatgtcttccttagtgttccttgcattttgggacagaatggaatctcagaccttgtgaaggtgactctgacttctgaggaagaggcccgtttgaagaagagtgcagatacactttgggggatccaaaaggagctgcaattttaaagtcttctgatgtcatatcatttcactgtctaggctacaacaggattctaggtggaggttgtgcatgttgtcctttttatctgatctgtgattaaagcagtaatattttaagatggactgggaaaaacatcaactcctgaagttagaaataagaatggtttgtaaaatccacagctatatcctgatgctggatggtattaatcttgtgtagtcttcaactggttagtgtgaaatagttctgccacctctgacgcaccactgccaatgctgtacgtactgcatttgccccttgagccaggtggatgtttaccgtgtgttatataacttcctggctccttcactgaacatgcctagtccaacattttttcccagtgagtcacatcctgggatccagtgtataaatccaatatcatgtcttgtgcataattcttccaaaggatcttattttgtgaactatatcagtagtgtacattaccatataatgtaaaaagatctacatacaaacaatgcaaccaactatccaagtgttataccaactaaaacccccaataaaccttgaacagtga

SEQ ID NO: 77362 - DNA, 1666 bp, Homo sapiens
  misc_feature (1)..(3): n is a, c, g, or t
  misc_feature (12)..(12): n is a, c, g, or t
  misc_feature (14)..(15): n is a, c, g, or t
  misc_feature (29)..(29): n is a, c, g, or t
nnnttgaatccncnnctttgatggcctantgggtgctgcagccgctgccgccgattccggatctcattgccacgcgcccccgacgaccgcccgacgtgcattcccgattccttttggttccaagtccaatatggcaactctaaaggatcagctgatttataatcttctaaaggaagaacagaccccccagaataagattacagttgttggggttggtgctgttggcatggcctgtgccatcagtatcttaatgaaggacttggcagatgaacttgctcttgttgatgtcatcgaagacaaattgaagggagagatgatggatctccaacatggcagccttttccttagaacaccaaagattgtctctggcaaagactataatgtaactgcaaactccaagctggtcattatcacggctggggcacgtcagcaagagggagaaagccgtcttaatttggtccagcgtaacgtgaacatctttaaattcatcattcctaatgttgtaaaatacagcccgaactgcaagttgcttattgtttcaaatccagtggatatcttgacctacgtggcttggaagataagtggttttcccaaaaaccgtgttattggaagtggttgcaatctggattcagcccgattccgttacctgatgggggaaaggctgggagttcacccattaagctgtcatgggtgggtccttggggaacatggagattccagtgtgcctgtatggagtggaatgaatgttgctggtgtctctctgaagactctgcacccagatttagggactgataaagataaggaacagtggaaagaggttcacaagcaggtggttgagagtgcttatgaggtgatcaaactcaaaggctacacatcctgggctattggactctctgtagcagatttggcagagagtataatgaagaatcttaggcgggtgcacccagtttccaccatgattaagggtctttacggaataaaggatgatgtcttccttagtgttccttgcattttgggacagaatggaatctcagaccttgtgaaggtgactctgacttctgaggaagaggcccgtttgaagaagagtgcagatacactttgggggatccaaaaggagctgcaattttaaagtcttctgatgtcatatcatttcactgtctaggctacaacaggattctaggtggaggttgtgcatgttgtcctttttatctgatctgtgattaaagcagtaatattttaagatggactgggaaaaacatcaactcctgaagttagaaataagaatggtttgtaaaatccacagctatatcctgatgctggatggtattaatcttgtgtagtcttcaactggttagtgtgaaatagttctgccacctctgacgcaccactgccaatgctgtacgtactgcatttgccccttgagccaggtggatgtttaccgtgtgttatataacttcctggctccttcactgaacatgcctagtccaacattttttcccagtgagtcacatcctgggatccagtgtataaatccaatatcatgtcttgtgcataattcttccaaaggatcttattttgtgaactatatcagtagtgtacattaccatataatgtaaaaagatctaccacacccactatcccaatgatgcccacatgggggatcctt

SEQ ID NO: 77363 - DNA, 1642 bp, Homo sapiens
  misc_feature (1)..(3): n is a, c, g, or t
  misc_feature (12)..(12): n is a, c, g, or t
  misc_feature (14)..(15): n is a, c, g, or t
  misc_feature (29)..(29): n is a, c, g, or t
nnnttgaatccncnnctttgatggcctantgggtgctgcagccgctgccgccgattccggatctcattgccacgcgcccccgacgaccgcccgacgtgcattcccgattccttttggttccaagtccaatatggcaactctaaaggatcagctgatttataatcttctaaaggaagaacagaccccccagaataagattacagttgttggggttggtgctgttggcatggcctgtgccatcagtatcttaatgaaggacttggcagatgaacttgctcttgttgatgtcatcgaagacaaattgaagggagagatgatggatctccaacatggcagccttttccttagaacaccaaagattgtctctggcaaagactataatgtaactgcaaactccaagctggtcattatcacggctggggcacgtcagcaagagggagaaagccgtcttaatttggtccagcgtaacgtgaacatctttaaattcatcattcctaatgttgtaaaatacagcccgaactgcaagttgcttattgtttcaaatccagtggatatcttgacctacgtggcttggaagataagtggttttcccactgatgggggaaaggctgggagttcacccattaagctgtcatgggtgggtccttggggaacatggagattccagtgtgcctgtatggagtggaatgaatgttgctggtgtctctctgaagactctgcacccagatttagggactgataaagataaggaacagtggaaagaggttcacaagcaggtggttgagagtgcttatgaggtgatcaaactcaaaggctacacatcctgggctattggactctctgtagcagatttggcagagagtataatgaagaatcttaggcgggtgcacccagtttccaccatgattaagggtctttacggaataaaggatgatgtcttccttagtgttccttgcattttgggacagaatggaatctcagaccttgtgaaggtgactctgacttctgaggaagaggcccgtttgaagaagagtgcagatacactttgggggatccaaaaggagctgcaattttaaagtcttctgatgtcatatcatttcactgtctaggctacaacaggattctaggtggaggttgtgcatgttgtcctttttatctgatctgtgattaaagcagtaatattttaagatggactgggaaaaacatcaactcctgaagttagaaataagaatggtttgtaaaatccacagctatatcctgatgctggatggtattaatcttgtgtagtcttcaactggttagtgtgaaatagttctgccacctctgacgcaccactgccaatgctgtacgtactgcatttgccccttgagccaggtggatgtttaccgtgtgttatataacttcctggctccttcactgaacatgcctagtccaacattttttcccagtgagtcacatcctgggatccagtgtataaatccaatatcatgtcttgtgcataattcttccaaaggatcttattttgtgaactatatcagtagtgtacattaccatataatgtaaaaagatctacatacaaacaatgcaaccaactatccaagtgttataccaactaaaacccccaataaaccttgaacagtga

SEQ ID NO: 77364 - DNA, 1610 bp, Homo sapiens
  misc_feature (1)..(3): n is a, c, g, or t
  misc_feature (12)..(12): n is a, c, g, or t
  misc_feature (14)..(15): n is a, c, g, or t
  misc_feature (29)..(29): n is a, c, g, or t
nnnttgaatccncnnctttgatggcctantgggtgctgcagccgctgccgccgattccggatctcattgccacgcgcccccgacgaccgcccgacgtgcattcccgattccttttggttccaagtccaatatggcaactctaaaggatcagctgatttataatcttctaaaggaagaacagaccccccagaataagattacagttgttggggttggtgctgttggcatggcctgtgccatcagtatcttaatgaaggacttggcagatgaacttgctcttgttgatgtcatcgaagacaaattgaagggagagatgatggatctccaacatggcagccttttccttagaacaccaaagattgtctctggcaaagactataatgtaactgcaaactccaagctggtcattatcacggctggggcacgtcagcaagagggagaaagccgtcttaatttggtccagcgtaacgtgaacatctttaaattcatcattcctaatgttgtaaaatacagcccgaactgcaagttgcttattgtttcaaatccagtggatatcttgacctacgtggcttggaagataagtggttttcccaaaaaccgtgttattggaagtggttgcaatctggattcagcccgattccgttacctgatgggggaaaggctgggagttcacccattaagctgtcatgggtgggtccttggggaacatggagattccagtgtgcctgtatggagtggaatgaatgttgctggtgtctctctgaagactctgcacccagatttagggactgataaagataaggaacagtggaaagaggttcacaagcaggtggttgagagtgcttatgaggtgatcaaactcaaaggctacacatcctgggctattggactctctgtagcagatttggcagagagtataatgaagaatcttaggcgggtgcacccagtttccaccatgattaagggtctttacggaataaaggatgatgtcttccttagtgttccttgcattttgggacagaatggaatctcagaccttgtgaaggtgactctgacttctgaggaagaggcccgtttgaagaagagtgcagatacactttgggggatccaaaaggagctgcaattttaaagtcttctgatgtcatatcatttcactgtctaggctacaacaggattctaggtggaggttgtgcatgttgtcctttttatctgatctgtgattaaagcagtaatattttaagatggactgggaaaaacatcaactcctgaagttagaaataagaatggtttgtaaaatccacagctatatcctgatgctggatggtattaatcttgtgtagtcttcaactggttagtgtgaaatagttctgccacctctgacgcaccactgccaatgctgtacgtactgcatttgccccttgagccaggtggatgtttaccgtgtgttatataacttcctggctccttcactgaacatgaattgccccgaccccattggcaacaacagccaccacagccagcaccaccaccaccactgtttccacgacagcagcaggtacaggtgaacaaaggcagagtaaactgtcaccccagatgcaggtacatcaaga

SEQ ID NO: 77365 - DNA, 1446 bp, Homo sapiens
  misc_feature (1)..(3): n is a, c, g, or t
  misc_feature (12)..(12): n is a, c, g, or t
  misc_feature (14)..(15): n is a, c, g, or t
  misc_feature (29)..(29): n is a, c, g, or t
nnnttgaatccncnnctttgatggcctantgggtgctgcagccgctgccgccgattccggatctcattgccacgcgcccccgacgaccgcccgacgtgcattcccgattccttttggttccaagtccaatatggcaactctaaaggatcagctgatttataatcttctaaaggaagaacagaccccccagaataagattacagttgttggggttggtgctgttggcatggcctgtgccatcagtatcttaatgaaggacttggcagatgaacttgctcttgttgatgtcatcgaagacaaattgaagggagagatgatggatctccaacatggcagccttttccttagaacaccaaagattgtctctggcaaagactataatgtaactgcaaactccaagctggtcattatcacggctggggcacgtcagcaagagggagaaagccgtcttaatttggtccagcgtaacgtgaacatctttaaattcatcattcctaatgttgtaaaatacagcccgaactgcaagttgcttattgtttcaaatccagtggatatcttgacctacgtggcttggaagataagtggttttcccaaaaaccgtgttattggaagtggttgcaatctggattcagcccgattccgttacctgatgggggaaaggctgggagttcacccattaagctgtcatgggtgggtccttggggaacatggagattccagtgtgcctgtatggagtggaatgaatgttgctggtgtctctctgaagactctgcacccagatttagggactgataaagataaggaacagtggaaagaggttcacaagcaggtggttgagagtgcttatgaggtgatcaaactcaaaggctacacatcctgggctattggactctctgtagcagatttggcagagagtataatgaagaatcttaggcgggtgcacccagtttccaccatgattaagggtctttacggaataaaggatgatgtcttccttagtgttccttgcattttgggacagaatggaatctcagaccttgtgaaggtgactctgacttctgaggaagaggcccgtttgaagaagagtgcagatacactttgggggatccaaaaggagctgcaattttaaagtcttctgatgtcatatcatttcactgtctaggctacaacaggattctaggtggaggttgtgcatgttgtcctttttatctgatctgtgattaaagcagtaatattttaagatggactgggaaaaacatcaactcctgaagttagaaataagaatggtttgtaaaatccacagctatatcctgatgctggatggtattaatcttgtgtagtcttcaactggttagtgtgaaatagttctgccacctctgacgcaccactgccaatgctgtacgtactgcattgaagtccagatgccccgagtccagactagcggac

SEQ ID NO: 77366 - DNA, 1696 bp, Homo sapiens
  misc_feature (1)..(3): n is a, c, g, or t
  misc_feature (12)..(12): n is a, c, g, or t
  misc_feature (14)..(15): n is a, c, g, or t
  misc_feature (29)..(29): n is a, c, g, or t
nnnttgaatccncnnctttgatggcctantgggtgctgcagccgctgccgccgattccggatctcattgccacgcgcccccgacgaccgcccgacgtgcattcccgattccttttggttccaagtccaatatggcaactctaaaggatcagctgatttataatcttctaaaggaagaacagaccccccagaataagattacagttgttggggttggtgctgttggcatggcctgtgccatcagtatcttaatgaaggacttggcagatgaacttgctcttgttgatgtcatcgaagacaaattgaagggagagatgatggatctccaacatggcagccttttccttagaacaccaaagattgtctctggcaaagactataatgtaactgcaaactccaagctggtcattatcacggctggggcacgtcagcaagagggagaaagccgtcttaatttggtccagcgtaacgtgaacatctttaaattcatcattcctaatgttgtaaaatacagcccgaactgcaagttgcttattgtttcaaatccagtggatatcttgacctacgtggcttggaagataagtggttttcccaaaaaccgtgttattggaagtggttgcaatctggattcagcccgattccgttacctgatgggggaaaggctgggagttcacccattaagctgtcatgggtgggtccttggggaacatggagattccagtgtgcctgtatggagtggaatgaatgttgctggtgtctctctgaagactctgcacccagatttagggactgataaagataaggaacagtggaaagaggttcacaagcaggtggttgagagtgcttatgaggtgatcaaactcaaaggctacacatcctgggctattggactctctgtagcagatttggcagagagtataatgaagaatcttaggcgggtgcacccagtttccaccatgattaagggtctttacggaataaaggatgatgtcttccttagtgttccttgcattttgggacagaatggaatctcagaccttgtgaaggtgactctgacttctgaggaagaggcccgtttgaagaagagtgcagatacactttgggggatccaaaaggagctgcaattttaaagtcttctgatgtcatatcatttcactgtctaggctacaacaggattctaggtggaggttgtgcatgttgtcctttttatctgatctgtgattaaagcagtaatattttaagatggactgggaaaaacatcaactcctgaagttagaaataagaatggtttgtaatggttagtgtgaaatagttctgccacctctgacgcaccactgccaatgctgtacgtactgcatttgccccttgagccaggtggatgtttaccgtgtgttatataacttcctggctccttcactgaacatgcctagtccaacattttttcccagtgagtcacatcctgggatccagtgtataaatccaatatcatgtcttgtctcgcgctcctttttccaacgcattctattttgtgcccttttttactgaggaggcccttaccagttcccccctacagttctatttactatcttgttaccgatttttccaagtgttatactacctataaacctccatcaccctttaacttctcgccactctttcccttctcctatttattctttcttttattatttatatat

SEQ ID NO: 77367 - DNA, 1293 bp, Homo sapiens
  misc_feature (1)..(3): n is a, c, g, or t
  misc_feature (12)..(12): n is a, c, g, or t
  misc_feature (14)..(15): n is a, c, g, or t
  misc_feature (29)..(29): n is a, c, g, or t
nnnttgaatccncnnctttgatggcctantgggtgctgcagccgctgccgccgattccggatctcattgccacgcgcccccgacgaccgcccgacgtgcattcccgattccttttggttccaagtccaatatggcaactctaaaggatcagctgatttataatcttctaaaggaagaacagaccccccagaataagattacagttgttggggttggtgctgttggcatggcctgtgccatcagtatcttaatgaaggacttggcagatgaacttgctcttgttgatgtcatcgaagacaaattgaagggagagatgatggatctccaacatggcagccttttccttagaacaccaaagattgtctctggcaaagactataatgtaactgcaaactccaagctggtcattatcacggctggggcacgtcagcaagagggagaaagccgtcttaatttggtccagcgtaacgtgaacatctttaaattcatcattcctaatgttgtaaaatacagcccgaactgcaagttgcttattgtttcaaatccagtggatatcttgacctacgtggcttggaagataagtggttttcccaaaaaccgtgttattggaagtggttgcaatctggattcagcccgattccgttacctgatgggggaaaggctgggagttcacccattaagctgtcatgggtgggtccttggggaacatggagattccagtgtgcctgtatggagtggaatgaatgttgctggtgtctctctgaagactctgcacccagatttagggactgataaagataaggaacagtggaaagaggttcacaagcaggtggttgagagtgcttatgaggtgatcaaactcaaaggctacacatcctgggctattggactctctgtagcagatttggcagagagtataatgaagaatcttaggcgggtgcacccagtttccaccatgattaagggtctttacggaataaaggatgatgtcttccttagtgttccttgcattttgggacagaatggaatctcagaccttgtgaaggtgactctgacttctgaggaagaggcccgtttgaagaagagtgcagatacactttgggggatccaaaaggagctgcaattttaaagtcttctgatgtcatatcatttcactgtctaggctacaacaggattctaggtggaggttgtgcatgttgtcctttttatctgatctgtgattaaagcagtaatattttaagatggactgggaaaaacatcaactcctgaagattgttggtgggggtaccgagc

SEQ ID NO: 77368 - DNA, 1166 bp, Homo sapiens
  misc_feature (1)..(3): n is a, c, g, or t
  misc_feature (12)..(12): n is a, c, g, or t
  misc_feature (14)..(15): n is a, c, g, or t
  misc_feature (29)..(29): n is a, c, g, or t
nnnttgaatccncnnctttgatggcctantgggtgctgcagccgctgccgccgattccggatctcattgccacgcgcccccgacgaccgcccgacgtgcattcccgattccttttggttccaagtccaatatggcaactctaaaggatcagctgatttataatcttctaaaggaagaacagaccccccagaataagattacagttgttggggttggtgctgttggcatggcctgtgccatcagtatcttaatgaaggacttggcagatgaacttgctcttgttgatgtcatcgaagacaaattgaagggagagatgatggatctccaacatggcagccttttccttagaacaccaaagattgtctctggcaaagactataatgtaactgcaaactccaagctggtcattatcacggctggggcacgtcagcaagagggagaaagccgtcttaatttggtccagcgtaacgtgaacatctttaaattcatcattcctaatgttgtaaaatacagcccgaactgcaagttgcttattgtttcaaatccagtggatatcttgacctacgtggcttggaagataagtggttttcccaaaaaccgtgttattggaagtggttgcaatctggattcagcccgattccgttacctgatgggggaaaggctgggagttcacccattaagctgtcatgggtgggtccttggggaacatggagattccagtgtgcctgtatggagtggaatgaatgttgctggtgtctctctgaagactctgcacccagatttagggactgataaagataaggaacagtggaaagaggttcacaagcaggtggttgagagtgcttatgaggtgatcaaactcaaaggctacacatcctgggctattggactctctgtagcagatttggcagagagtataatgaagaatcttaggcgggtgcacccagtttccaccatgattaagggtctttacggaataaaggatgatgtcttccttagtgttccttgcattttgggacagcataattcttccaaaggatcttattttgtgaactatatcagtagtgtacattaccatataatgtaaaaagatctacatacaaacaatgcaaccaactatccaagtgttataccaactaaaacccccaataaaccttgaacagtga

SEQ ID NO: 77369 - DNA, 807 bp, Homo sapiens
  misc_feature (1)..(3): n is a, c, g, or t
  misc_feature (12)..(12): n is a, c, g, or t
  misc_feature (14)..(15): n is a, c, g, or t
  misc_feature (29)..(29): n is a, c, g, or t
  misc_feature (729)..(729): n is a, c, g, or t
  misc_feature (731)..(731): n is a, c, g, or t
  misc_feature (743)..(745): n is a, c, g, or t
nnnttgaatccncnnctttgatggcctantgggtgctgcagccgctgccgccgattccggatctcattgccacgcgcccccgacgaccgcccgacgtgcattcccgattccttttggttccaagtccaatatggcaactctaaaggatcagctgatttataatcttctaaaggaagaacagaccccccagaataagattacagttgttggggttggtgctgttggcatggcctgtgccatcagtatcttaatgaaggacttggcagatgaacttgctcttgttgatgtcatcgaagacaaattgaagggagagatgatggatctccaacatggcagccttttccttagaacaccaaagattgtctctggcaaagactataatgtaactgcaaactccaagctggtcattatcacggctggggcacgtcagcaagagggagaaagccgtcttaatttggtccagcgtaacgtgaacatctttaaattcatcattcctaatgttgtaaaatacagcccgaactgcaagttgcttattgtttcaaatccagtggatatcttgacctacgtggcttggaagataagtggttttcccaaaaaccgtgttattggaagtggttgcaatctggattcagcccgattccgttacctgatgggggaaaggctgggagttcacccattaagctgtcatgggtgggtccttggggaacatggagattccagtgtgcctgnanggagtggatgannntgccggggctcccggagaaccggacccagaataggggctgatggacccgccacaggttccgc

SEQ ID NO: 77370 - DNA, 615 bp, Homo sapiens
  misc_feature (1)..(3): n is a, c, g, or t
  misc_feature (12)..(12): n is a, c, g, or t
  misc_feature (14)..(15): n is a, c, g, or t
  misc_feature (29)..(29): n is a, c, g, or t
nnnttgaatccncnnctttgatggcctantgggtgctgcagccgctgccgccgattccggatctcattgccacgcgcccccgacgaccgcccgacgtgcattcccgattccttttggttccaagtccaatatggcaactctaaaggatcagctgatttataatcttctaaaggaagaacagaccccccagaataagattacagttgttggggttggtgctgttggcatggcctgtgccatcagtatcttaatgaaggacttggcagatgaacttgctcttgttgatgtcatcgaagacaaattgaagggagagatgatggatctccaacatggcagccttttccttagaacaccaaagattgtctctggcaaagactataatgtaactgcaaactccaagctggtcattatcacggctggggcacgtcagcaagagggagaaagccgtcttaatttggtccagcgtaacgtgaacatctttaaattcatcattcctaatgttgtaaaatacagcccgaactgcaagttgcttattgtttcaaatccagtggatatcttgacctacgtggcttggcagataagtggttttcccatgatgggggaaaggcttggagt

SEQ ID NO: 77371 - DNA, 1188 bp, Homo sapiens
  misc_feature (1)..(3): n is a, c, g, or t
  misc_feature (12)..(12): n is a, c, g, or t
  misc_feature (14)..(15): n is a, c, g, or t
  misc_feature (29)..(29): n is a, c, g, or t
  misc_feature (1110)..(1110): n is a, c, g, or t
  misc_feature (1112)..(1112): n is a, c, g, or t
  misc_feature (1124)..(1126): n is a, c, g, or t
nnnttgaatccncnnctttgatggcctantgggtgctgcagccgctgccgccgattccggatctcattgccacgcgcccccgacgaccgcccgacgtgcattcccggtacggtagggccctgcgcgcacggcgccagagggatgggcgggtagagccaactgcctctggttctgctggcctccgctgctcgcgaagggattcctgctcccgggaggtgtaggagccgctttccagaagcacagcccagagacgtctgggcggcggcccacacaacgcatgtgttcggagctcgccgcgctctgcttttgctctaagcgggaaccatggcttctggccacgctggggaaccgaggaggagccggagtagctcagagtgatcttgtctgaggaaaggccagccccacttggggttaataaaccgcgatgggtgaaccctcaggaggctatacttacacccaaacgtcgatattccttttccacgctaagattccttttggttccaagtccaatatggcaactctaaaggatcagctgatttataatcttctaaaggaagaacagaccccccagaataagattacagttgttggggttggtgctgttggcatggcctgtgccatcagtatcttaatgaaggacttggcagatgaacttgctcttgttgatgtcatcgaagacaaattgaagggagagatgatggatctccaacatggcagccttttccttagaacaccaaagattgtctctggcaaagactataatgtaactgcaaactccaagctggtcattatcacggctggggcacgtcagcaagagggagaaagccgtcttaatttggtccagcgtaacgtgaacatctttaaattcatcattcctaatgttgtaaaatacagcccgaactgcaagttgcttattgtttcaaatccagtggatatcttgacctacgtggcttggaagataagtggttttcccaaaaaccgtgttattggaagtggttgcaatctggattcagcccgattccgttacctgatgggggaaaggctgggagttcacccattaagctgtcatgggtgggtccttggggaacatggagattccagtgtgcctgnanggagtggatgannntgccggggctcccggagaaccggacccagaataggggctgatggacccgccacaggttccgc

SEQ ID NO: 77372 - DNA, 482 bp, Homo sapiens
aaggccagctctgcgtctggcttgctgggtggccttccccaggcctcaggttcctcatctgccagctcaacctctcaactcccaatgagggcctaccatgtggtaggccctgcaccaggtgctggggaagtagtcaaggccaggcaaaattccctgccctcacagagctcgactcttagtggatgagctggatcataaacaaatgaataacggagatgttggccaaagcgtatagagtttcagctatggagaatgaacaagctctagagtaatgcacagcaaggagactgtagttcataagactgcactgtatacttgaaatttgctaagagagtagttctcaccatacacagaaaggtaactatgaaaagagacggatatgttcattagcttgactgtgataatcaggccattatctatgtgtgtatcaagacatcacactgtataccttaaacatagacattttccattaaaacatttaa

SEQ ID NO: 77373 - DNA, 519 bp, Homo sapiens
aagtcctattatctaaaaagaaatagcagtagtgttttagaccattttatgctgccataacagaataccacagattgggtagtttataattaacagatatttggctcacagttctggaggcagggaagtccaagagcatggtgctggcatctggcaaggacctttgtgctccatcatcccttggtggagggcaagacgggtgagagcaagaagggccaaaccgacttttataacaaacccactcttgtgataaccaaccaactactgagacaaatatgttaatccactcatgagggcagagccctcatgacctaatcacctcttagaggtcccactttttaacatggttgcatttgggattaaattttcaacacatgaagcttgttggatacattcaaaccatagcagatggtaactcgaattcacatgaatgaaaaacacctataaaggcaatatataggtaaatataagactacacatatattttttatcttgatttaaaatacaactgcaaggaac

SEQ ID NO: 77374 - DNA, 534 bp, Homo sapiens
aaagtgtgctccctcagtcattcattctgcccatgaccagtgacaccaccttggaaaatgcaggtcacaccagtcaccaccatcaaaaacgcatttcaggcttctgtacatttaattttcttcaacattaccttggaaaccacagtaaatcaataacagaatagttaaataccacaggttctttgtgttttgttttagaaaatattgctcaaggctaagagtgagttctattgatgatttttatttgctgctgggatgcaaaacaatcagaattttcgaagagtttgcttcctttttgtgcatttccttttttaaaaaaggaggggtctgtttcagatggaaaacattggtcgctaatagcagaaacttgagaataattggtaattttcaatcctatagaaaactagactaggtctgatgactttgacctttgttacgctcttcttccaaattttccccagccagctccctgcactcctgaccctcagcagcccattccactgagggtcgggtaactctggaacatcacagctg

SEQ ID NO: 77375 - DNA, 250 bp, Homo sapiens
ctgtgttcagtctcttgcctatagattaaatgtgtgaaatctctaaacagttcccctctttccatgcccaggagcaccacttcagttcagacctccatgacctgtcacattgactgttgcagagtctttcctgatcacttccacacagctgccactgtgatcgtgtttttatcttgttcgaaacccctgaatggctccccatcacatctgctgtccattgtttgcaggcagcatcagggccctgaagggt

SEQ ID NO: 77376 - DNA, 326 bp, Homo sapiens
tttatttttaaatttttctcttccatatctggaatcacagttttgtttttctctgctatttaatggatattttagaagctagtttttattttccaagtatttgtcttttctgtttacacttttgtaacagttattagttttcattcaagcaatacttttttaatcttgtgaaatttgttatcttcgtacaattatatttgatttcttctaagtgcattttgaatgtttaaaatggactgtaacctctattttaggagttactattttaatgaaatttcactaatgcaaactgtcaactaatttattcacttcatttaaatacatac

SEQ ID NO: 77377 - DNA, 409 bp, Homo sapiens
gagactctgtctcaaaaaagacaaaaaaaaaaaaaaagagccaattttggggtggggagaaggagttaaggacctttctcaccccttatgcaaataatcccgttgatgtggaaactacactgttacctgggaccctttagaatccatttccaacctctctcttcaggctcttgtcacccacccaacccctgtgcctgtccttctagccacagtaaacttctaagcccacagcagtcctattcctgtggcacgccaggactcaccaaatgcaggcctccatgacaactgtttcagcactgaccgagtgcttaagtttaatgttaaaagccagtggaccttatacaaaggctgggaatgtaacaaaagcccaccaagagttttgcctagggcttttctggggcctcaaagc

SEQ ID NO: 77378 - DNA, 542 bp, Homo sapiens
tcaaaggccagatgtccatttggctggttcaggggtgatgtgtgaagatgagacaaaacaaagagatgggtaaaggacgagggaaaaagaatgagggggatttaacccctgacctcaaagctaaacctctacaagagcagccactttcccatgctgtgagtggacgggcttcccttatccaaacatgcctgaaattcttctctttaggaacgtttatgtgggggtaagcattgtttgttctttgttcttctttcaagattttgtaaaaagcttcaggagagacagttcaaggggaaagagatggctgggagcgccaaagtgtacctcagtaaggaaggaaacagaaccccaagaggaccctctgggattagcaaagttgcagacaagggctgcacaagaaaggaacattagtcactggctgagtttacgcaggtcctacagaggtcttaatcacagagctctctttccagctggcatctcgttcccaagaggcgagttcagtactaagtccctcctagagcaacatgccgggggagggggtt

SEQ ID NO: 77379 - DNA, 326 bp, Homo sapiens
tagaggaggttggacccagtggggcacacctgagggtgaatgtatattcccggccgttgacctccatgctgtttggggacagaccattggtttctgcttctctctccaacaccccaagggctgccatgtgcctaacctgaccccagaccccactccttcaccctggctcacagcctgaaagctccctgccctccacctgctctccagggcctggccccctgaattgatcaaccccgcggagggtccacacccctcattctcttctccggtctgccccacggcccgggggcaggggattgattctgcgtgggcccctgtcaggcccc

SEQ ID NO: 77380 - DNA, 410 bp, Homo sapiens
gcttctaacattcctatccaagcgtctcagagtttaccacttatttttaacgtgggcttctgggttaaactgatgtttttaatgggctacaggccatgacatcttaaaactactggcttctcctcattagtagtagatgcaacttcagtggtcactttcatcattcagttaacattttaggtagttgatatgtgcattttaaaagtaatgcaaaccctgtcacaggcattgtgttctaagcacagagagcatccccagccattctgtgcctgggtgtgggttaggcttagaggagggctctgcaagcacacttctgtagtcagcaggcacctgggagatattcatctttcagaggcctgtatccagagcagattatagaaaacccatttcttcagatggtatcagttcca

SEQ ID NO: 77381 - DNA, 253 bp, Homo sapiens
ctccccaaagtctactatggtgctgtgcaacagaaatataatacaagccacaaatcgaattttcaatttcctagtagcttttttaaaaagtaaaaagaggggccaggcacagtggctcagcctgtaatcccagcactttgggaggctgaggtgggcaggatcacctgagctcgggaagttgaggctaatagtgggctgagattgtgccactgcactccagcctgggtgacagggaaggagaccctgtctcaaa

SEQ ID NO: 77382 - DNA, 264 bp, Homo sapiens
ggtggggttgctgtgtttgaggaagaaggaagtggccatctccacagcgccctccattgtttccttagtgacttcctgccacagccaccagctctgtcatttgaatgcctttgtcctcaaggggcagagagactcccttagagggcatgaggaaaggcaggcagaatccacccccacactggagagggtggggagccagtttcatttacatatttaaatatcttcctcacaagcaataaatctcaaatcattttaattgaacat

SEQ ID NO: 77383 - DNA, 427 bp, Homo sapiens
tcaggtgatccacccacctctgcctcccaaagtgctgggattacaggcatgagccaccgcacctggccagaagaaatctttatcttggtgtgcagtgtctggtgagggacaaatgtcatctctcttggatctgaatctggaaggatcaaggcactgaagggatttttttgtttcagacagtatccctctgtcgccaggctggagtgcagtggcgcaatctcagctcacggcaacctctgcctcccgggctcaagggatcctcctgcctcagcctctcgagtagctgggactacaggcacgcgtcaccaggcccagctaatttttgtatttttagtagagacagggttttaccacggtggccaggatggtctcaatctcttgacatcatgatccacctgccttggcctcccaaagggctgggattaca

SEQ ID NO: 77384 - DNA, 353 bp, Homo sapiens
acatacacagcaagattttcttagaactagcattttgctaaagaaattcagatatgtgtatggctgaaaaatgtgtaatttctgaacatgtatagaatttaccatattttcaaaagtacctctaagcaataagtggctatgatactttttagcacaaatctttgtgatagttttaaaaattctgagcattatttcatcagttcagttttttaagatagaagaaaaagggtttgtatattcatttattaaataaacatatattgagcacctactacattctgctatgcttggcactggaaatacagttaaagaacaaatcttagataataagtgcatttgtgattcttctactg

SEQ ID NO: 77385 - DNA, 819 bp, Homo sapiens
gtgtgggagacatgtgtgctcgtgccgcacatacacatcctggccgtgcacggctctctcatgaccagctctctgcctcccttccaggaggctccatcccacactgttcacccaggctgcggagactcaccttcccgagctaacttaactactgtacataataatatgtattaaactggtatcgtggtgatataatgtggtgcagttacttatatattaaatatctattgtatccatagaataggcagcattatttcaaacatattcaagttgggagtggagatcattgcctagaagtcaatattcaataaatcttgtacataactatttcgatggcaaatgttaagccttctaaaaggaaagtgtagattggaaaatgattttttttccaaatgatgtttttgccttctaatatactgtaaggtaatgagcttcagaacaggcaacctgaccctgcagaggtcgcgtgctgtgggatgacagcgggacgggagctcacaagtgctttcactgaagatttgttcatatactgtgtattgattgttgtgtaatatatcatcattgcttttgtaaatacgtaaaactgtaattttttaatggtgtgcttcccttatacttttttgatcagagaattttggaaagtaccaaagaagcaggggaatcattggccagtgttacgttttcacattgtctgtctcccaccctcactgatcacgcctgccccagagcagtgtgtggcggtgacaccgtcacccagcatgcgccacgccgtggctcccaccagcagtgccaccgccaccacaccccagatcccaccca

SEQ ID NO: 77386 - DNA, 479 bp, Homo sapiens
tcgagatattaaccttataccctttgccaaaattaactcaaatagattacagacataaaatgcaaaactataaacctcatagaagatagcacagcagaaaatatagatgaaatcttgggtttagtgctgacattttaaattaaaagggaaaattcattaaaaaaaggatggatacaatggacttcattaaaattaaaaacttcccctctgtaaaaaggactatcaaaatttcagcactttgggaagctgaggcaggagtattgcttgaggccaagagttgtagactagcctggacaaggtagtaaaacactgtttataaaaacaaaaatttaaaactgggcatggcggcacatgcctgtaatcccagctacttaggagactgaggcaagagctgagctcaggagactgacactgtagtaagcttatgctgcgtcactgcactcaggcctggtgacagagtgagactctgtctctcagag

SEQ ID NO: 77387 - DNA, 198 bp, Homo sapiens
ctgtgaaaattcttcaagctatacattcataatctatgtacctttgtccatgtaaattacatatcagtaaaaaaaaaaaaaaaaaaaaagtactttaaaaaactgaacaggttggttaaacagcagattagaccagccggttgtgaattctatgagagaacttgaaaacagtcataatgtagcacagacagagaaaat

SEQ ID NO: 77388 - DNA, 817 bp, Homo sapiens
agatacactaaggtcagctatgctggcagcagtgacaccatattgtcctatgttccaattcataatcctacttccaaagagacattcattctccctgctctctgcctgggcttggagcatgacccccattatagacttggaaatcagggggcagagaagtgaaatgccttccaaaacattcatagcaattaagtcataggatgatagaggaattgcaatgttccaggacttacaatgttgctgtgtggatgttactctttttttaaaaaacagcttttacgaattacatatgcacaatcaagtgcagaccatggctacctctggctagactgccactgctaggggaagaaaagacatccatacccattgcttatgattgctgctgctgctgttgtctccaaagaagaaaatggattctattttctacccttatctggttgaggatgcttaaaaaccaaaagatggagatattttaaagttgaagcagatcctttccttagtagcgttaaactggaatgcctaaaacataaactaacaccctgtttttttttctcctggatttcactggtgcctgagtaagcgaatatgctgtgctgttttcctggacactcagaatcaaacaggccttccaccccatcccatcatgttgaattacaaagtattttgagcatcgtttggtttgtttctttccacccatacctgtgtagggcagcggtagcagtcttcaacaatgcatcctcttggacaatgcattgtaatatctctctttcaaattctgtttcacatagtcatttctcatgttctgttggagaccccc

SEQ ID NO: 77389 - DNA, 417 bp, Homo sapiens
gtgaaatgtgagaagtctggtaacagagaatgtgcttgaggagcacagtagagtgaaggtctactttaaccaagaagttggcactacagtaggcaccgttggagctgggtcttgaagtatgagcaggaatttgtttactgtgctatcctagtttaaaatacatgcacgtggcttaaaaaataagggacaaaggaaattaccctaaatagttgctgtcccaccttactgccaactcctagtcccccttcctagaggaaccttttcaaattattttaaatttttctgcctattaaatgcttataaaatgctgttccttgatttttccacttcagaaatttgagagatgatcatttagtttatattcactatctcccatggtacctccccctgcctttgccattttttgatagttatatt

SEQ ID NO: 77390 - DNA, 220 bp, Homo sapiens
tgaactgcaggcatgtgttaccgattcaaaaataggaaaggcctaaaaaataaatgaaggtagaagttctgataggagagggtggtgcgggtctgcctggcagaatgtgcaggagagcacctgtggccttgcccgtgggaggagctcaggtccagggtgagcaccaccatgtggggtttgcagggcgtcccagacgcggggatggaatgctagcgtgcac

SEQ ID NO: 77391 - DNA, 2042 bp, Homo sapiens
  misc_feature (1212)..(1212): n is a, c, g, or t
  misc_feature (1231)..(1231): n is a, c, g, or t
  misc_feature (1831)..(1831): n is a, c, g, or t
agaatcgcttgaacccgggaggcggaggttgcagtgagctctcacctgcctgtgatgaccaacagcatttgggatacccagtgtggcactcattccagtgagttttagtgacacccccaccacacacagcttcccagtcacttccactaataactccagcctgggtgacagagcaagacaaaaaaaaaaaaaaaaagggaaaggaaaaaggaagaaagaaaattgcagaaggaggtttcgcagtgaatttcagtggcaccatacccacaggcagtttcctagggagttccaccagttccccagagcatggcttcccagcaaattctcttggcatcaccctccaggtagcttccagagagttccactagcacactagaggccatcttccttataacgcccagaaagtgttgcaggcacccacagggtaactgtctagtgatttccaccagcacccccagaaagcaggcccctgcttgccagccaccacatggacacccccacaggcttccccactatccagtgggccgtgaccaaatcctgtttaatgaggtctggatctcggccctggggagccaccccattcctggatttgctccctcctgggtcccctgccttagcccagcagtcacagatgctcttgcaatttgctgcttatgttctctttagagtcctcagtccctctagcagctaatcccatgttaccagttgacgactcttctaggaaacttcacctgttggtgtaaattagtacaagctctatggaaaacagtatggagatttctcaaagaactaaacataaacccccattcaatccagcaagcccactacttggcatctacccaaaggaaaataaatcattctatcaaaaagacacctgccttgaacgtttatcacagcactattcacaatagcaaagatgtgcaaatcaagctaagcatccatcaccagatgacgggacaaagaaaatgtggtacgtacactatgggatactattcagccataaaaaagaatgaaatggccgggcatggtagtgcatgcctataatccaagcactttgggaggccgaggcgatggatcacttgagatcagtagttctagaccagcctggccaacatggcgaaacctcgtctctactaaaattataaaagttagccgggggcggtggtgcatgcctgtaatcccagctactcaggtggctgaggcacaagaatngcttgaacccgggaggcanaggttgcagtgagccgagatcatgccattgcactccagcttaggcaacagagtaagactctctcaaaaaaaaaaaaaaaaaaaaaaaaaaaaaaagaatgaaatgatgtcttttgcagcaacatggatgggattgggggctattgtctttatcatttgacgtaaaaaggcaaatgcggcatgtcctaacttacaagaggggctaaataataggtacacatggacatagaatgtgaggctaggtgcagtggctcactcctataatcccagcactttggaaggccgaggtgggcagatcacttgaggccaggagttcgagaccagcctggccaacatggtgaaaccctgtctctactaaaaatacaaaaatgagcctggtgtagtggcgggtgcctgtaatcccagttactagggaggctgaggcacgaaaatctcctgaacccaggaggcagagattactgtgagctgagattgcaccactgcactccagcctaggcgacagagtgagactctgtctcaaaacaaacaaacaaaaacatggtcatagagtgtgaaataacagacactggagactcaggggtgggaggcaggaggtgggtangggatgataaattacttcatgggtacaatgtacattatttgggtgatgagtacactaaaaccccagacttcaccaacaacaccgtatatccatgcaagaaaactatacttggcggggtgtggtggctcacgcctgtaatcccagcactttgggaggccgaggcgggcggatcacgaggtcaggagatcgagaccattctggccatctctac

SEQ ID NO: 77392 - DNA, 525 bp, Homo sapiens
agaatcgcttgaacccgggaggcggaggttgcagtgagctctcacctgcctgtgatgaccaacagcatttgggatacccagtgtggcactcattccagtgagttttagtgacacccccaccacacacagcttcccagtcacttccactaatactccagctggcttcccagcaagtcttatcgaagtcccagaaaattccagaaggggccaggtgcagtggctcacatatgtaatcccagcactttgggaggctgaggtgggaggatcgctggagcccaggcgtttgagacctgcctgggcaacatggcaagaccctgtctctacaaaatgcatatatatatacatttttacattggccttttttcttttttattattattttaaaaatatatatatcagctgggtgtggtggctcacacctgtaattccagcactctggtaggctgaggctggcggatcacctgaggccaggagtttgaaaccagcctggccaacatggtgaaaccccatctgtactaaaaatac

SEQ ID NO: 77393 - DNA, 1582 bp, Homo sapiens
agaatcgcttgaacccgggaggcggaggttgcagtgagctctcacctgcctgtgatgaccaacagcatttgggatacccagtgtggcactcattccagtgagttttagtgacacccccaccacacacagcttcccagtcacttccactaataactccagcctgggtgacagagcaagacaaaaaaaaaaaaaaaaagggaaaggaaaaaggaagaaagaaaattgcagaaggaggtttcgcagtgaatttcagtggcaccatacccacaggcagtttcctagggagttccaccagttccccagagcatggcttcccagcaaattctcttggcatcaccctccaggtagcttccagagagttccactagcacactagaggccatcttccttataacgcccagaaagtgttgcaggcacccacagggtaactgtctagtgatttccaccagcacccccagaaagcaggcccctgcttgccagccaccacatggacacccccacaggcttccccactatccagtgggccgtgaccaaatcctgtttaatgaggtctggatctcggccctggggagccaccccattcctggatttgctccctcctgggtcccctgccttagcccagcagtcacagatgctcttgcaatttgctgcttatgttctctttagagtcctcagtccctctagcagctaatcccatgttaccagttgacgactcttctaggaaacttcacctgttggtgtaaattagtacaagctctatggaaaacagtatggagatttctcaaagaactaaacataaacccccattcaatccagcaagcccactacttggcatctacccaaaggaaaataaatcattctatcaaaaagacacctgccttgaacgtttatcacagcactattcacaatagcaaagatgtgcaaatcaagctaagcatccatcaccagttcttaattaccagattaagtgttcttatagaagatgatgtggatcttggatcttctgctctgtggaaacttctgtattgatcactctttcttccttgatcccattttagagagccctgcatcaaggccagtgtattgctaaagacagtcaatgttggctcagtcacctccctcacccctcagttgtcactccacctacccatgtctttccataggcatgaagatgggaattaaaaaaaaaatacgctgggcatggtggcttgagcctgtaatcccagctacttgggaggctaaggtgggaggatcatttgagcccaggagtttgagaccagactgagcaacatagtaagaccctgtctctacaaaataaaataaaaataattttcaaaaatcctttgcagtgttttaaaaagctagataacaggctgggcacggtgactcacaccagctacttgggaggctgaggtgggtggatcacctgagatcaagagttcgagaccagcctggccaacatagtgaaactccgtctctactaaaactacaaaaattagtcgggcatggtggcaggcggctgtaatgccagctactcaggaggcagaggcaggagaattgcttgaacccaggaggcagaggt

SEQ ID NO: 77394 - DNA, 283 bp, Homo sapiens
ttcgtatactttaaaatagcctttgtaataaactgtaataaagagggggtcttgggaaatccatctaaaagctattcagtcagatgttttaggggccttggacttgcgactggtgggaaagagagggctgttttgtaaaactgaaccctcaacctgcggtttctgaggttatctctaggtagatggcatcagaattgaattgaattggaggcctcccagctggtgtctgctgcagaattgatgtgcttcctccagtgtgggaagagccccccgcccctcccca

SEQ ID NO: 77395 - DNA, 735 bp, Homo sapiens
gccactgtgcccgcagcctgatagcaacttttaacatcaccctttgtggatttcacgttttccccttaacctgattataatttggcttctaaatccttcagtaaatctccttacaagaagaaaataaaaatgcaatggctaagctgaaacatcgatctcatctgtgttatattttgcctctaaaaagataaacgggcatcctgatttgtttttatgtcttatgacattgtttatgaatttgtttaaactaagtccattccagagaaaataattccacatacaagaaacttttaaaaagtaaacaaacaaacaaaaaaactagcaggctttgattcttccaccaaagagcgtattggaatctatgggtatgtgtagttcaaaaagtgtaacagatgattccgataatgcagccagtctactaatgttctgaaatatcacaacacatgccaatatgaggccttgggaaccgaaaatgaaatgttgctgtaacaacatagctgttaatagctatgacactgatagcagagtctggaaagatgaagagtgtcatgttatgaaatgacagaaatgaaaaggaaccaaatccagaaacttgagaagctggagtaaatgaaacctacttaatactttttctaaacccattcaggtagactagattattatctccatcattcacaatctctcacctaagagaatatgtttttctggcccactgacatcagatttgatttgtga

SEQ ID NO: 77396 - DNA, 541 bp, Homo sapiens
gaaagataatgatatgatgttgtaatggattgaatattaatgtactccaaaactcctgttaaaatcctcgccctgaggtgatggtactaggaggtgggcctgatggtactaggaggtggttctttgtaggtgattagctcatgaatgagatccttgtacaagaggcctcagacagctgccttgccccttccaccaagtgaggacacagagaaaaggcagctgtgcaagaaccagagagcagccctcaccacacactgaatccgccggcacctggatcttggactccccaccctccagaacttgtaagaaattgattcctgtttacaagccacccagtctttcgcattttgttatagcagcccaaactgaccaagacagttagaaagatgggactggtggtaaggccctgaaacagggtagacgctgggactgagatgaagagacacatttactgaattttttttttttttttttttgagatggagtctcgctctgtcacccaggctggagtgcagtggcgcgatctcggctcactgcaacc

SEQ ID NO: 77397 - DNA, 790 bp, Homo sapiens
tgaagagcgatttttgaagctagtggtcttctagtatacagtaaggtcaacttattttgaaacacaaaagcacaatagagaattagcttccatcaatatacgtactatactgaatacagctggcttgaggaaacttctttttaagaacattctatgagtgactgctaaatcctatttctgatctttctacatgttggcccaaaagttttcctttgtcatattctcctatagctataatttaaccatcactgattggagcagttctattgttccaagctgaaattcattgcctcagatggaggtaggtcttactgagacactatttcatacaaatttagaagacagttatgtactgatgatcaattaataaatctcatgtgctgttactgcttgaggcagccaaattggaatgctgtaaaaaaatacccatattttttaaaacactgaaacatgggcttagagacaattatctttttattcttcactaaattttcagcaacgttagttttaacaaggacttggtttgtgggaagaaagaggaaaaaagagaaaaatgtaaatggagggttaggatttgcttcagagaaaatttaggcttggctttgctacaaataatgtatcatttttccataaacgaattaaataactttaaatttatttaattggtccagatcacattaatcttgatttcctgggaaaaatacatacatattaatgctgaaatatagtataaaagtcttcttgaactgtcaaaattcagtgtctgatattaaggatataaattactcag

SEQ ID NO: 77398 - DNA, 399 bp, Homo sapiens
  misc_feature (337)..(337): n is a, c, g, or t
  misc_feature (362)..(362): n is a, c, g, or t
aaaattcaagtaataatgatctaatattcaataatacattatcgacataattagtcatttaaaaatgtaaataaaaagtacaatgaaatactacttcactctcatgaagatggctataatttcaaagacaaaccataacaaatgatggccaagatgtgaagagtaccctatgacttaggtgctatgatttcctccgttttccaaatgatgaaattgaggcatggagaatttaagtaactttacccaggccacatgatgagtaaggagaagagttagcattcaaatccatgtctctctgaccacaaagccacaccttttaatcatttccttatacggncagcttcaggggtgtcatttgaggnggccatcctattctattgaggcaagcaggtaacaagg

SEQ ID NO: 77399 - DNA, 961 bp, Homo sapiens
tttccattttgcattactgaaatttcaataaatagtgctttagttagatgtaaatctctgtcatttgtggcagaggaacttaaatgtcggcctgcattttagggcacctttttgtatagagcagagagaagggaagtgctgtcccccagtggcctgattcttggtgagcttgaaggttcagacctgaaagtcatttaagaaatgagcatccattttgatggctgctaatagcgacagttaaccatttccgttttacacacaaactgtgggagcttttccatcagaggcattgtttttctcggaaggggtgaaacggtaaggctgcacacagcctaatgcagtggtgttcaacttgagcatatgtgggagttacctggaggctttgctgaaacatggatctctggcctgtgttaaccccgcagtttccgatgctgtagctttggggcgcggcccaggctgtgcatttctagtgagtctccgcataatgccgatgctgctggccgggggaccaccctgtgaggaccctgccccaggtgagactcacctggggaggattgaaaaattacctgttgggcctcaccccagacccgttgaagtgaaacatgagatggctaggaggcagggacggacatttttcagagttgtccaggtgatttgaatgtgcagccaggatttacaatcagtgctttggagaaaacaagggaaagacaaaaaacacaggtcttctcaagaacaattggataggagggtgcctggtattgttcttcccgttctgatcaaatatccatgaggagagagagctgatgcagaatgcagctggtggtgcattctggctgtctaaactttgaatggtgtttggggtcggggagatgagagggaaaggtgaatgctcaattcgggagactttatttaattttgtagctgttttctttgtagggttcctagcaggatagaggctttg

SEQ ID NO: 77400 - DNA, 619 bp, Homo sapiens
catgaaagaactcacactagagagaaaccctatgaatgtaaggaatgtggaaaagcctttatttaccttgcaagctttcaaagacacatgataatgcacagtggagatggaccttataaatgcgaggagtgtggaaaagcattcagttgtcctagttcatttcaagtacctgaacgaattcacactagagaaaaaccatatgaatgtaaacaatgtggtaaagccttcagttggcttggttcctttcgagtacatgaaagaactcacactggagagaaaccctgtgaatgtaacgaatgtgggaaagccttcatttatcgaactacgttaaaaggacacatgaatattcacactggagagaaaccttataaatgtgaacaatgtgagaaagccttcctttctcttgcaagctttcaaatgcacatgataatgcatactggagatgcaccttataaatgtaacgaatgtgggaaagcattcaattgtcttaattcatttcaaatccatgaaaggactcacactggagagaaaccgtatgaatgtaaacaatgtggtaaagccttcagttgttccagttcctttagaatacatgaaagaagtcatagtggagagaaacccc

SEQ ID NO: 77401 - DNA, 260 bp, Homo sapiens
tgtatttttagtagagatggggtttcactgtgttagccaggatggtctcaatctcctgacctcatgatctgcccgcttcggcctcccaaaatgctgggcttccaggcatgagccaccgtgcccggtctcagggtttaaaaaaaaaaattggtgaaatacacacaatataaaatttatcattttgcttttttttttttttaatgaggacagggttttgccctgtttctcaggctggcctcgaactcctgagctgaagtgat

SEQ ID NO: 77402 - DNA, 186 bp, Homo sapiens
caaaaaaaaaaaaaaaaaaaaaagtccaggaccagaagaattcacagctgaactctaccagacattcaaagaagaattggtaccaatctcaatgaaacaattccaaaagacagagaaagaggaaatcctccctagatcattctgtgaagccagtatcaccctaataccaaaacaaggaaaacacat

SEQ ID NO: 77403 - DNA, 333 bp, Homo sapiens
cccagcccggagtgaagtggtgtgatctcagctcactgcaacctccacccaccatattcaagtgattctcctgcctcagcctcctgagtagctagtattatgcaaccatcaccattttccagaattgtttccttatcctaaacagaagacctgtacccattaaacaatgtgctttttttcttaattttaatgttttcttttatcttcttttttttttttttttctgagacagagtctccatctgttgcccaggctggagtgcaatggcacagtcttggctcactgaaacctctacctcctgggtacaaatgattcttgcgcctcagcctccaa

SEQ ID NO: 77404 - DNA, 821 bp, Homo sapiens
agttacactaagttttattttaaactaaaattcaataaacagtgcagccagggaagatctgctaaaccatgccgttatttggaaaatcattgcaatatattaacaactgcttccttctatgatgtttactagatggagaaaaatactccatacctatattgcaattttatttttatctagaaaaagaaaatattaggcttcagacccaactgtgcaaatttcatttgctttccatctcttactactacctctgtgtcataatttaacacgtaacatacaactcctgtctcttaaggcagctaccatatggtgtttatgtcagactggatatatttatctaattttgtgaaattattttttagttcccaacacaattcttgaaagtaataccactgttgttactctttctccttacaatttttatgttgttgagatgtatcagttatgtattataatcatgaaattgtattggcctcaaacccaaattttctttgtagtctaggatagatttttcatgaaagctatatagttataactgtgattgtacagattgtttatttgttttacagctaacattaagcatgattccaggtttttaattatgttccagcaacactagtgtttctttataacttaaaatcataaccactttgataatttacctttggatctgaccagtgattcatttttttcttgaatatactttgtgtttgctttctcatccccgttaagtctgaaacattattgacaccccacatcacttactctgtttaaagactttacgagtagtgagtcacatgtttaggatgatcactttggga

SEQ ID NO: 77405 - DNA, 227 bp, Homo sapiens
cagaaatatctgaaaaggatgaccaaagtcagcacaactccgatgaagagccagagtcaaacgtctctgtggatcaagagattgacgcagaggaggttaatagtgtccaaaccgccgtgaaaaatctggccacagccttcatgataattcatcatccagagtcaaccccgcaccagtccaaagaaacccaacccgaaataggcagttctcaggagagtgctgacgcc

SEQ ID NO: 77406 - DNA, 440 bp, Homo sapiens
gagactgcaggtgaggcctcagggctctgcattcccatccccaaaagtcaccagcgtgtggccttgtgggtgtcactcccctctgtggagtcaactttgtgcagtgacatgcagaggctggactgctgccacctcatgcccctcctggcatgatggtcgcatgaggctgagtgatttgcaggtctatggggaaacccgcctcagagatgtggaggagaagccaggcagagcgctgttcattccatttctttctttttttaatctaaaggagggaaagagctttattaactcaaacaaagggatgccatacaacttcccaacgatactgtgcagtgatggtattagcttccacctgttcttccattctgggggcagggtgtgaggactggctgctctgggagacgctctgagctgagagagaagaaatagctatgctaata

SEQ ID NO: 77407 - DNA, 1853 bp, Homo sapiens
  misc_feature (596)..(596): n is a, c, g, or t
agcactttcaggctcacagtttctcatcttttcaacagtcagggaaaagaaacctatggaatagttcgcatttcacagaggaagaaactgagggccagagctaggggtctctgacacagccatgggatcctgcaccccacactggctctatgtgactctgtagtagtggctaatgtccatcagtcgccccctgctcccctgcctggccatttgcccccaaatagggcagtggtgggagtatatcctggaggagggggaagtgggatataggtagtacttggctgacttcacaattttgctacacccagtctggacctcctgacagtggagtgggatccctgtggcttcctttttcttgtttttgttttgttttgttttttttagatggagtctccctctatcatccaggctggagtgcaatggtgcgatttcagctcactgcaacttccacctcccaggttcaaacaattctcctgtctcagccacctgagtagcttggactacaggcacccgccaccaccccagctactaagttttgtatttttagtagagatggggtttcaccacatggccaggatggtcttgatctcttgacnttgtgatctgcccaccttggcctcgcaaagcactgggattacaggcgtgggccactacgcctggccaatttttttttgttttgtttttttgagatggagtcttgctccatctcccaggctggagagcaatggcgtgatctcagctcactgcaacctctgcctcctgggttcaagcgattctcctgcctcagcctcccaagtagctgggattacaggcacccaccatcatgcccgggttaatttttgtattttcttagagatggagtttcactatgttggccagcctcatctttgaactcctgacctccgatgatccacctgccttggcctcccaaagtgatgggattacaggcgtgagccaccgcacctggccccagtggcttcttcagacttgaaacacaaaatgtggccagctagggatagagagaattctgactttcaacactgctgagccatggcatgggctgcttctgggtagtgagctccctgtccttggggtagacacagccatcccttgggtccttcctccagaccttccaggtacagccctttgctgctcttccctgcctccaaacctttgccagtttttgagtttctttacccaggatgttccatcagatctctctgcttccgggaagtcctattccactgaccacctactgtgtgcacaggcttgtgctgagtggtgctgtggaggggcagaagggagctggaacctggtgatggagagaagtcatagcatgatgaataactcatgtccactgggcacgtgctaggcactgggcattgttctaagtgtatgtcttatctcatttactcctcacagcacgtatgagataagcaatcttacttatgtctaagtagcttccagatgaggaaactgaggctctgggaagtgaagtaacttgcctaaggaaacacaggatgggctatggaaccaggattcaaccacaaacacagtgacttagcatcatctactgcaaacatccactgcagttaaaatgcctggagtgggtggcctggtcactggaggtgagggtcggggctgggtcgtctgagagccaggcgggtcttcggggtgaggggagtgttggggtgaggaaacatgtgaacatgcctcagtctttggagaacttagttactgttaacctgaatgtcaccacccctgactcggagactggcaccaaatggattatgggttcaataaatgtttgttgaatgaataaacgagccccatttgcagaagggtatccacta

SEQ ID NO: 77408 - DNA, 433 bp, Homo sapiens
atctttaagaacttcaaatcagtaaattcaaatggccacaaataatctaccactttaaggtactatataaacttttttcctcttgcctttccttcttttcattgatggtgggttatttctctaaggtacaccaaaagataagcacgtattgagatataaaggggatatgaatacacagtattagtcacttatattcaaaatgaaaaataatgtttctcacaaaatacttatttgttcagaattcagtcagctcttcttattctaaatcaaaagaccactattcatcatgggtagatgtgaagcatggcccactttgatttcaggtatggaaaactgcaggactggctaaatccagcacatggttccctctctaggaagtggtatacagagagtaagaacacagatgtaaatgcattcataatgctcagatatc

SEQ ID NO: 77409 - DNA, 1187 bp, Homo sapiens
caagtctcccacgacgttcccacccactcctgagagcagagctggccgcagccatgaccccgcagcttctcctggcccttgtcctctgggccagctgcccgccctgcagtggaaggaaagggcccccagcagctctgacactgccccgggtgcaatgccgagcctctcggtacccgatcgccgtggattgctcctggaccctgccgcctgctccaaactccaccagccccgtgtccttcattgccacgtacaggctcggcatggctgcccggggccacagctggccctgcctgcagcagacgccaacgtccaccagctgcaccatcacggatgtccagctgttctccatggctccctacgtgctcaatgtcaccgccgtccacccctggggctccagcagcagcttcgtgcctttcataacagagcacatcatcaagcccgaccctccagaaggcgtgcgcctaagccccctcgctgagcgccagctacaggtgcagtgggagcctcccgggtcctggcccttcccagagatcttctcactgaagtactggatccgttacaagcgtcagggagctgcgcgcttccaccgggtggggcccattgaagccacgtccttcatcctcagggctgtgcggccccgagccaggtactacgtccaagtggcggctcaggacctcacagactacggggaactgagtgactggagtctccccgccactgccacaatgagcctgggcaagtagcaagggcttcccgctgcctccagacagcacctgggtcctcgccaccctaagccccgggacacctgttggagggcggatggggatctgccctagccctgggctggagtccttgctttgctgctgctgagctgccgggcaacctcagatgaccgacttttcccctttgagcctcagtttctctagctgagaaatggagatgtactactctctcctttacctttacctttaccacagtgcagggctgactgaactgtcactgtgagatattttttattgtttaattagaaaagaattgttgttgggctgggcgcagtggatcgcacctgtaatcccagtcactgggaagccgacgtgggagggtagcttgaggccaggagctcgaaaccagtccgggccacacagcaagaccccatctctaaaaaattaatataaatataaaataaa

SEQ ID NO: 77410 - DNA, 1524 bp, Homo sapiens
caagtctcccacgacgttcccacccactcctgagagcagagctggccgcagccatgaccccgcagcttctcctggcccttgtcctctgggccagctgcccgccctgcagtggaaggaaagggcccccagcagctctgacactgccccgggtgcaatgccgagcctctcggtacccgatcgccgtggattgctcctggaccctgccgcctgctccaaactccaccagccccgtgtccttcattgccacgtacaggctcggcatggctgcccggggccacagctggccctgcctgcagcagacgccaacgtccaccagctgcaccatcacggatgtccagctgttctccatggctccctacgtgctcaatgtcaccgccgtccacccctggggctccagcagcagcttcgtgcctttcataacagagcacatcatcaagcccgaccctccagaaggcgtgcgcctaagccccctcgctgagcgccagctacaggtgcagtgggagcctcccgggtcctggcccttcccagagatcttctcactgaagtactggatccgttacaagcgtcagggagctgcgcgcttccaccgggtggggcccattgaagccacgtccttcatcctcagggctgtgcggccccgagccaggtactacgtccaagtggcggctcaggacctcacagactacggggaactgagtgactggagtctccccgccactgccacaatgagcctgggcaagtagcaagggcttcccgctgcctccagacagcacctgggtcctcgccaccctaagccccgggacacctgttggagggcggatggggatctgccctagccctgggctggagtccttgctttgctgctgctgagctgccgggcaacctcagatgaccgacttttcccctttgagcctcagtttctctagctgagaaatggagatgtactactctctcctttacctttacctttaccacagtgcagggctgactgaactgtcactgtgagatattttttattgtttaattagaaaagaattgttgttgggctgggcgcagtggatcgcacctgtaatcccagtcactgggaagccgacgtgggagggtagcttgaggccaggagctcgaaaccagtccgggccacacagcaagaccccatctctaaaaaattaatataaatataaaataaaaaaaaaaaaaaaaaaaaaaaaaaaatcttttgtggggcacggcctcgaggaccctggagagaaaagttctcttgaagaccccctgccgttggtggcggagccgggggcccccagagatgggggcttaaggtgtgacaccaggggggccctataagcgtggggtcccccagaggagagcaaccggggggacgagcgaccacaggtgggccgggggaattctctccaacccgagattgtaaaaacaggcccgcggagaggaacaaccgagaggcgggtctttggaaacaaaaccaccgagacgtggagttcgcagggggacaaacaggggggctcatcg

SEQ ID NO: 77411 - DNA, 1574 bp, Homo sapiens
caagtctcccacgacgttcccacccactcctgagagcagagctggccgcagccatgaccccgcagcttctcctggcccttgtcctctgggccagctgcccgccctgcagtggaaggaaagggcccccagcagctctgacactgccccgggtgcaatgccgagcctctcggtacccgatcgccgtggattgctcctggaccctgccgcctgctccaaactccaccagccccgtgtccttcattgccacgtacaggctcggcatggctgcccggggccacagctggccctgcctgcagcagacgccaacgtccaccagctgcaccatcacggatgtccagctgttctccatggctccctacgtgctcaatgtcaccgccgtccacccctggggctccagcagcagcttcgtgcctttcataacagagcacatcatcaagcccgaccctccagaaggcgtgcgcctaagccccctcgctgagcgccagctacaggtgcagtgggagcctcccgggtcctggcccttcccagagatcttctcactgaagtactggatccgttacaagcgtcagggagctgcgcgcttccaccgggtggggcccattgaagccacgtccttcatcctcagggctgtgcggccccgagccaggtactacgtccaagtggcggctcaggacctcacagactacggggaactgagtgactggagtctccccgccactgccacaatgagcctgggcaagtagcaagggcttcccgctgcctccagacagcacctgggtcctcgccaccctaagccccgggacacctgttggagggcggatggggatctgccctagccctgggctggagtccttgctttgctgctgctgagctgccgggcaacctcagatgaccgacttttcccctttgagcctcagtttctctagctgagaaatggagatgtactactctctcctttacctttacctttaccacagtgcagggctgactgaactgtcactgtgagatattttttattgtttaattagaaaagaattgttgttgggctgggcgcagtggatcgcacctgtaatcccagtcactgggaagccgacgtgggagggtagcttgaggccaggagctcgaaaccagtccgggccacacagcaagaccccatctctaaaaaattaatataaatataaaataaattagccaggtgtgatgttgcgcgcccacagtcccaactacttgggaggctgaggtgggaggatcacttgagtccaggaggttaaggctgcagtgagctgtcgtcacaccactgccttcatgcctgggcaacagagcaagaccctggtttttttgtttgtttgtttgtttgttttaatcatagttgaggccgggtgcggtggctcgcgcctgtaatcccgacgccgaggcgggcagatcacgaggtcaggagttcgagaccagcctgaccaacatggtgaaacccggtctctactaaaaatacagaaattagctgggcatggtggcctgagcccgtaaccccagctactcaggaggctaaggcaggagaatcgcttgaacctgggagg

SEQ ID NO: 77412 - DNA, 1341 bp, Homo sapiens
caagtctcccacgacgttcccacccactcctgagagcagagctggccgcagccatgaccccgcagcttctcctggcccttgtcctctgggccagctgcccgccctgcagtggaaggaaagggcccccagcagctctgacactgccccgggtgcaatgccgagcctctcggtacccgatcgccgtggattgctcctggaccctgccgcctgctccaaactccaccagccccgtgtccttcattgccacgtacaggctcggcatggctgcccggggccacagctggccctgcctgcagcagacgccaacgtccaccagctgcaccatcacggatgtccagctgttctccatggctccctacgtgctcaatgtcaccgccgtccacccctggggctccagcagcagcttcgtgcctttcataacagagcacatcatcaagcccgaccctccagaaggcgtgcgcctaagccccctcgctgagcgccagctacaggtgcagtgggagcctcccgggtcctggcccttcccagagatcttctcactgaagtactggatccgttacaagcgtcagggagctgcgcgcttccaccgggtggggcccattgaagccacgtccttcatcctcagggctgtgcggccccgagccaggtactacgtccaagtggcggctcaggacctcacagactacggggaactgagtgactggagtctccccgccactgccacaatgagcctgggcaagtagcaagggcttcccgctgcctccagacagcacctgggtcctcgccaccctaagccccgggacacctgttggagggcggatggggatctgccctagccctgggctggagtccttgctttgctgctgctgagctgccgggcaacctcagatgaccgacttttcccctttgagcctcagtttctctagctgagaaatggagatgtactactctctcctttacctttacctttaccacagtgcagggctgactgaactgtcactgtgagatattttttattgtttaattagaaaagaattgttgttgggctgggcgcagtggatcgcacctgtaatcccagtcactggtagccgcgtagtcacgatctgactacgcggctggactggagaggatacactgtgtattcttggctttgagttccttgactgctttctgctgcgtgggagttttccaggcatgtttggagagcggacagggttcagccagctagacctacctggctgctctggagaaatttggttcacttgatccaagttcagatgcacaatttatggtgtccaacttgtccacacactcaggagctcctctaagctcaaagggtgg

SEQ ID NO: 77413 - DNA, 931 bp, Homo sapiens
ggcggtgcagcttgcatgctgtggtcgttctagaggttcccctcacgccctgtccaccagctgcaccatcacggatgtccagctgttctccatggctccctacgtgctcaatgtcaccgccgtccacccctggggctccagcagcagcttcgtgcctttcataacagagcacatcatcaagcccgaccctccagaaggcgtgcgcctaagccccctcgctgagcgccagctacaggtgcagtgggagcctcccgggtcctggcccttcccagagatcttctcactgaagtactggatccgttacaagcgtcagggagctgcgcgcttccaccgggtggggcccattgaagccacgtccttcatcctcagggctgtgcggccccgagccaggtactacgtccaagtggcggctcaggacctcacagactacggggaactgagtgactggagtctccccgccactgccacaatgagcctgggcaagtagcaagggcttcccgctgcctccagacagcacctgggtcctcgccaccctaagccccgggacacctgttggagggcggatggggatctgccctagccctgggctggagtccttgctttgctgctgctgagctgccgggcaacctcagatgaccgacttttcccctttgagcctcagtttctctagctgagaaatggagatgtactactctctcctttacctttacctttaccacagtgcagggctgactgaactgtcactgtgagatattttttattgtttaattagaaaagaattgttgttgggctgggcgcagtggatcgcacctgtaatcccagtcactgggaagccgacgtgggagggtagcttgaggccaggagctcgaaaccagtccgggccacacagcaagaccccatctctaaaaaattaatataaatataaaataaa

SEQ ID NO: 77414 - DNA, 1028 bp, Homo sapiens
  misc_feature (584)..(584): n is a, c, g, or t
ggaagatgtgatttcatggggaacctgggagaccatcagaccctgtctcctccctgctgtgtgactgtggggaggttccttcacctctctgggcgtgcttcctcttgtgcagctggatagagctcatgaaggcagagccctacacagtgcctctggcacacagcaagcagtgcataaatgcatacttgttagccctggaaaaaaaaaaaaaaaaaaaaaaaaaaaaaaaaaaaaaaaaaaaaagggggggcgcacggcaaaaaagatacccccggaggggcccaacatgaaccgcctgaccccgttctttggtgcaaaagggcggcccccaataaggaggggccgtataatataaagcaacaaaggagcacgggggaccgagcgttaaaacacacgggtgcgggctggggaaacacgcggcaagggggagacactttcgtggagaggaaaccccacatcctctggtgcggcggggacacaatttcggggacgcacacactcactcaacagaggagatattattaagcgggcgccaggcgaggaataattataacctgaagggggggctacgtgggtggcgtganacccccaagcggggcgaggaaaatattgcgtgctggcgcgcgggcagtgcgacaagataatatttagggcgcacacacgagcggaggagatggtagatgtttcttggtgggcgaacactatcttctttttcccggccgggcgtgccgttcccttggtcttctacataacatacaccaggggtactgtagatagatcgagcgaacaaacggacgaggacacgaaacgatgcagatagaaagtcgactcataacgagaaggcaaaggaaagcaacagaatggcagagtggataaaagacagcaggaacagataggactacatcagcagtagaggaggtaaaggagacgacatgccagtacagcaagagagtagggtacgacgaatacaaaacacaagagtagcgactacaggtaggactaacgtacgtgagaccagcaggaactat

SEQ ID NO: 77415 - DNA, 2037 bp, Homo sapiens
  misc_feature (9)..(9): n is a, c, g, or t
aagcgggcngggcgaaggcggagcgctaacgtctaacgctaacggcggtcgtgccccgccgctgctgtcacccccggccgctgctgccctccccgccgaggttctactgctctccttcttaagaagggtgggaggcactcggtctctccccacacctctcgcctgaggccaggcgccaggtgtcgcctgaagccagacagccggtttgggagcgagcctgaggccaaccaatcaatggctcagacagataagccaacatgcatcccgccggagctgccgaagatgctgaaggagtttgccaaagccgccattagggtgcagccgcaggacctcatccagtgggcagccgagtacgtgctcctttctcgccttcaccccttggaggacggccggagacagagggtcctgtaaaaccgcggaggttgtcatggctgcagctaggaagtccggactaactggcatcgtctttgttttagctcttgcattgctttgatgctttaaaatccacacataaatgctacatctagctgggcaaggatgggatgcctcccctaagggagccagattgagcagtaggacgccaggtcaataggccgtgtcctggggcaagcagcaagttagatgaccgcgtcacaccagcgtatgcacacccacctcctccctgcacgccttttcccactcccggtggaaagaagggctgggaatctccgaagcttaatctgcctttcttcgttctcctgtctcaccactagatggcagcagtgcagccgggggagggaagcgacagccctgggtggatggggtgggaccagtcctgctagttcactcctttaaggagacacttcctcccctgctgttaaaactcatacttggacccaaccaaagaccctttatatcttgtcttggaggaaattattgttattttctttagtgtttctctgaactgattttgttctgccaacataaagatgtccgcacagtacacactgcattctggggaaaggccaagcagagtgatggggtcctcaggcatggctgaaaacagtgtgcctcaaacacgggtgccttctttcaggagagacctccagaggctgctcagtagatggagcttacacaacaatcgctgcgggcctggattgaagtagctttgcacagaaagcctctcagctatgaaattgctccttggacaaacttgcctgcttgaaactggggaaccaggacttgagacaggagttggaagataactagacctcacggaccattttcaggctatttttactgtttgatgattccctgcttaggagggtttcagtgggaaagtgagagtgagagaggccgttgagagaaagccagtgagttggggaagggaagatgtcctcaggctgaggttgtgagtgggtgtcctgggcagatggtggggagagtgtggacacctttgagaagacacaaaatggcatctaagaggggcctttcggagtctctgggccagtgctgtgctcctggactggattaggatgtagcttttacaattggaaggaaaataagccagtggtgctcataaaaagaaacataaatgggggttgctttgcctagtaatgagccctgtttagttctccattttaaattttatatattgcctctaagattgaactttagcttcagaagactaatttattttggcatagtcagatagacagactttatcttatacgttagtttcaaacccatttgattgttcttgtgctgccgttttatagtaagcaaactgacattgcttagtattgtccctgacatttatggaagaggcattccactattgtagactgcttgctctcgtattgtatcacgtgctataatttttttagacatccatgaaaacttagtttgtagtttaaccacaatgaaaaaggagggcatgacctaagagccccctccattctatccagacatgaaaagcactgctcagatggttgtatgtgacttacttaaaacctgtagcattttagagaataaaactctgcaaagtgtttccaagac

SEQ ID NO: 77416 - DNA, 2082 bp, Homo sapiens
  misc_feature (9)..(9): n is a, c, g, or t
aagcgggcngggcgaaggcggagcgctaacgtctaacgctaacggcggtcgtgccccgccgctgctgtcacccccggccgctgctgccctccccgccgaggttctactgctctccttcttaagaagggtgggaggcactcggtctctccccacacctctcgcctgaggccaggcgccaggtgtcgcctgaagccagacagccggtttgggagcgagcctgagcaaattatctcaaaagctgcaagttcctgcatctacatgtgcccagccaaccaatcaatggctcagacagataagccaacatgcatcccgccggagctgccgaagatgctgaaggagtttgccaaagccgccattagggtgcagccgcaggacctcatccagtgggcagccgagtacgtgctcctttctcgccttcaccccttggaggacggccggagacagagggtcctgtaaaaccgcggaggttgtcatggctgcagctaggaagtccggactaactggcatcgtctttgttttagctcttgcattgctttgatgctttaaaatccacacataaatgctacatctagctgggcaaggatgggatgcctcccctaagggagccagattgagcagtaggacgccaggtcaataggccgtgtcctggggcaagcagcaagttagatgaccgcgtcacaccagcgtatgcacacccacctcctccctgcacgccttttcccactcccggtggaaagaagggctgggaatctccgaagcttaatctgcctttcttcgttctcctgtctcaccactagatggcagcagtgcagccgggggagggaagcgacagccctgggtggatggggtgggaccagtcctgctagttcactcctttaaggagacacttcctcccctgctgttaaaactcatacttggacccaaccaaagaccctttatatcttgtcttggaggaaattattgttattttctttagtgtttctctgaactgattttgttctgccaacataaagatgtccgcacagtacacactgcattctggggaaaggccaagcagagtgatggggtcctcaggcatggctgaaaacagtgtgcctcaaacacgggtgccttctttcaggagagacctccagaggctgctcagtagatggagcttacacaacaatcgctgcgggcctggattgaagtagctttgcacagaaagcctctcagctatgaaattgctccttggacaaacttgcctgcttgaaactggggaaccaggacttgagacaggagttggaagataactagacctcacggaccattttcaggctatttttactgtttgatgattccctgcttaggagggtttcagtgggaaagtgagagtgagagaggccgttgagagaaagccagtgagttggggaagggaagatgtcctcaggctgaggttgtgagtgggtgtcctgggcagatggtggggagagtgtggacacctttgagaagacacaaaatggcatctaagaggggcctttcggagtctctgggccagtgctgtgctcctggactggattaggatgtagcttttacaattggaaggaaaataagccagtggtgctcataaaaagaaacataaatgggggttgctttgcctagtaatgagccctgtttagttctccattttaaattttatatattgcctctaagattgaactttagcttcagaagactaatttattttggcatagtcagatagacagactttatcttatacgttagtttcaaacccatttgattgttcttgtgctgccgttttatagtaagcaaactgacattgcttagtattgtccctgacatttatggaagaggcattccactattgtagactgcttgctctcgtattgtatcacgtgctataatttttttagacatccatgaaaacttagtttgtagtttaaccacaatgaaaaaggagggcatgacctaagagccccctccattctatccagacatgaaaagcactgctcagatggttgtatgtgacttacttaaaacctgtagcattttagagaataaaactctgcaaagtgtttccaagac

SEQ ID NO: 77417 - DNA, 466 bp, Homo sapiens
cattgcaaaattcattgcagaagaattcatcacctaggcacatagtcatcagattatctgaagtcaagatgaaggaaaaatcttaagagctatgaggcaaaaatatcaggtaacctataaaggaaaacctatcagattaacagaagatttctcaacagaaaccctacaagccagaagagattgattagggtcctatctttagtctccttaaacaaaacaattatcagccaagaattttgtgtccagtgaaactaagcctcataaatgaaggaatgatacagtcttttacaggcaaacaaatgctgagagaattcgccactaccaagccagcactataagaactgctaaaaggagctctaagtcttgaaaaaaatcttcgaaatacaccaaaatagaacctccttaagacacaaatccaacagaacctctataacaataacaatgaaaaaaacagcatggtattcag

SEQ ID NO: 77418 - DNA, 549 bp, Homo sapiens
tgaccggcgccggagttttgagtccacagataaaatgtgtctcctttgtctctaccagaaaatgaaaggaattgaaattaagggagagattgaagtgtttcatgcgcgtccgtgtgaagagaccaccaaacaggctttgtgtgagcaacatggctgtttatttcacctgggtgcaggcgggctgagtccgaaaagagagtcagcaaagggtgtgggttatcattagttcttatgggtttgggatagccggtaaatataagagcaatgttttttggcaagaagtggatctcacaaagtacattctcaagagtggggagaattacaaagaaccttcttaagggtgggggagattacaaagtacattgatcagttcgggtggggcagaaacaaatcacaatggtggaatgtcatcagctaaggctatttttacttcttttgtggatcttcatttacttcaggccatctggatgtatacgtgcaagtcataggggatgcgatggcttggcttgggctcagaggcctgacattcctgccttcttatgttaataa

SEQ ID NO: 77419 - DNA, 600 bp, Homo sapiens
caaaaaaccccgcacagtaagtggaataacaaatacaacagcagcaaaacaatagagtgaaattttgctggataccccacccctgagcctgaggtgtgctctcttgtgaaagagctgttcgggctggacgtggtgattcttgcctgtaatcccagcacttagggaggctgaggcaggattgctttagcccagttgttcaagcccatttgggcaacacaatgaaaccccgtctgtacaaaaaattaaaaaaaatacaaagaattaactggatgtggtggcgggcacctgtagtcccagctactcgggaggctgagccaggagtatggcgtgaacccgggaggcagagcttgcagtgagccaagattgcaccactgcactccagcctgggcgacagagcaagactccatctcaaaagaaaaagaaaaagaaatacagaaggggaattgcagcggagttgtgttctgaccacgtgattcacgtgccttatgcttgtgttagctgccacgctgtgggaaatgcctcacggaaggcacgttgccttttcccttggggcccaccgccatgccctctgcagtctcgcctcttaggatcgggggatcc

SEQ ID NO: 77420 - DNA, 948 bp, Homo sapiens
caaaaaaccccgcacagtaagtggaataacaaatacaacagcagcaaaacaatagagtgaaattttgctggataccccacccctgagcctgaggtgtgctctcttgtgaaagagctgttcgggctggacgtggtgattcttgcctgtaatcccagcacttagggaggctgaggcaggattgctttagcccagttgttcaagcccatttgggcaacacaatgaaaccccgtctgtacaaaaaattaaattagccagtcatagcggtgcacacctgtagcccagctacttggtaggctgaggtgggaggatcacttaagtccaggagtttgaggctgcggtgagctatcatcagtgccgctgccctccagcctgggcaacagagcaagaccctgcctaaaaaaaacaaaaacaaagcctgtactatagtagtgcccacctggaagttccttcttgccagaataagaaatacagaagaggggccaggcgcggtggctcatgcctgtaatcccagcactttgggagggcgaggcgggcagatcacgaggtcaggagatcgagaccatcctggctaacacggtgaaaccgtgtctctgctaaaaatacaaagaattaactggatgtggtggcgggcacctgtagtcccagctactcgggaggctgagccaggagtatggcgtgaacccgggaggcagagcttgcagtgagccaagattgcaccactgcactccagcctgggcgacagagcaagactccatctcaaaagaaaaagaaaaagaaatacagaaggggaattgcagcggagttgtgttctgaccacgtgattcacgtgccttatgcttgtgttagctgccacgctgtgggaaatgcctcacggaaggcacgttgccttttcccttggggcccaccgccatgccctctgcagtctcgcctcttaggatcgggggatcc

SEQ ID NO: 77421 - DNA, 1521 bp, Homo sapiens
accgaccggagcgccgatcagagcacctgcccgggccacacatttcctcctggagcacagcaagtgccgcctaaattacccgagtgagcatctcttcccggcacgagaggcagggaggccaaagggccgccaagctggcctgggagaggcgtagggcggagcgagagtggagtgacattcccgagggcggagccccagggcctccgagacccgtagactcccgcctcccgcctcctctaggccgccggccgcgaagcgctgagtcacggtgaggcgactggacccacactctcttaacctgccctccctgcactcgctcccggcggctcttcgcgtcacccccgccgctaaggctccaggtgccgctaccgcagcgtgagtacctggggctcctgcaggggtccactagccctccatcctctacagctcagcatcagaacactctctttttagactccgatatggggtcctccaagaaagttactctctcagtgctcagccgggagcagtcggaaggggttggagcgagggtccggagaagcattggcagacccgagttaaaaaatctggatccgtttttactgtttgatgaatttaaaggaggtagaccaggaggatttcctgatcatccacatcgaggttttgaaacagtatcctacctcctggaagggggcagcatggcccatgaagacttctgtggacacactggtaaaatgaacccaggagatttgcagtggatgactgcgggccggggcattctgcacgctgagatgccttgctcagaggagccagcccatggcctacaactgtgggttaatttgaggagctcagagaagatggtggagcctcagtaccaggaactgaaaagtgaagaaatccctaaacccagtaaggatggtgtgacagttgctgtcatttctggagaagccctgggaataaagtccaaggtttacactcgcacaccaaccttatatttggacttcaaattggacccaggagccaaacattcccaacctatccctaaagggtggacaagcttcatttacacgatatctggagatgtgtatattgggcccgatgatgcacaacaaaaaatagaacctcatcacacagcagtgcttggagaaggtgacagtgtccaggtggagaacaaggatcccaagagaagccactttgtcttaattgctggggagccattaagagaaccagttatccaacatggtccatttgtgatgaacaccaatgaagagatttctcaagctattcttgatttcagaaacgcaaaaaatgggtttgaaagggccaaaacctggaaatcaaagattgggaactagtggaaagcggaagagcaggtcttgatgtgtcctagaattttgccatttctgagattgagccattgaaggcattccatttctaaagcttatttagccggtgcttctaaagaattccacactaacgtgataacatggtttttgtaacaataaatgtaggatatttcctggcacatgcaaataaacctaa

SEQ ID NO: 77422 - DNA, 405 bp, Homo sapiens
  misc_feature (28)..(28): n is a, c, g, or t
  misc_feature (31)..(31): n is a, c, g, or t
  misc_feature (37)..(38): n is a, c, g, or t
tctttcctccctgccgcctcccccgcgnccncccttnngatcccaagagaagccactttgtcttaattgctggggagccattaagagaaccagttatccaacatggtccatttgtgatgaacaccaatgaagagatttctcaagctattcttgatttcagaaacgcaaaaaatgggtttgaaagggccaaaacctggaaatcaaagattgggaactagtggaaagcggaagagcaggtcttgatgtgtcctagaattttgccatttctgagattgagccattgaaggcattccatttctaaagcttatttagccggtgcttctaaagaattccacactaacgtgataacatggtttttgtaacaataaatgtaggatatttcctggcacatgcaaataaacctaa

SEQ ID NO: 77423 - DNA, 415 bp, Homo sapiens
  misc_feature (20)..(20): n is a, c, g, or t
gtacatatgaatgtaatggntacatcgttccaaaatataaaaagtctagatcccaagagaagccactttgtcttaattgctggggagccattaagagaaccagttatccaacatggtccatttgtgatgaacaccaatgaagagatttctcaagctattcttgatttcagaaacgcaaaaaatgggtttgaaagggccaaaacctggaaatcaaagattgggaactagtggaaagcggaagagcaggtcttgatgtgtcctagaattttgccatttctgagattgagccattgaaggcattccatttctaaagcttatttagccggtgcttctaaagaattccacactaacgtgataacatggtttttgtaacaataaatgtaggatatttcctggcacatgcaaataaacctaa

SEQ ID NO: 77424 - DNA, 410 bp, Homo sapiens
  misc_feature (32)..(33): n is a, c, g, or t
  misc_feature (39)..(39): n is a, c, g, or t
ttactgactccacctctcatggaataaaaggnnggaggncctggatcccaagagaagccactttgtcttaattgctggggagccattaagagaaccagttatccaacatggtccatttgtgatgaacaccaatgaagagatttctcaagctattcttgatttcagaaacgcaaaaaatgggtttgaaagggccaaaacctggaaatcaaagattgggaactagtggaaagcggaagagcaggtcttgatgtgtcctagaattttgccatttctgagattgagccattgaaggcattccatttctaaagcttatttagccggtgcttctaaagaattccacactaacgtgataacatggtttttgtaacaataaatgtaggatatttcctggcacatgcaaataaacctaa

SEQ ID NO: 77425 - DNA, 430 bp, Homo sapiens
aataaacttttactcttcggatgtgcttggattttgttttaaattaagaactacagaaatatatatcatttctagtggtagaggaaaatattgccacccagaactttctgaatgtctctttctgccctaggtccatttgtgatgaacaccaatgaagagatttctcaagctattcttgatttcagaaacgcaaaaaatgggtttgaaagggccaaaacctggaaatcaaagattgggaactagtggaaagcggaagagcaggtcttgatgtgtcctagaattttgccatttctgagattgagccattgaaggcattccatttctaaagcttatttagccggtgcttctaaagaattccacactaacgtgataacatggtttttgtaacaataaatgtaggatatttcctggcacatgcaaataaacctaa

SEQ ID NO: 77426 - DNA, 790 bp, Homo sapiens
accgaccggagcgccgatcagagcacctgcccgggccacacatttcctcctggagcacagcaagtgccgcctaaattacccgagtgagcatctcttcccggcacgagaggcagggaggccaaagggccgccaagctggcctgggagaggcgtagggcggagcgagagtggagtgacattcccgagggcggagccccagggcctccgagacccgtagactcccgcctcccgcctcctctaggccgccggccgcgaagcgctgagtcacggtgaggcgactggacccacactctcttaacctgccctccctgcactcgctcccggcggctcttcgcgtcacccccgccgctaaggctccaggtgccgctaccgcagcccctccatcctctacagctcagcatcagaacactctctttttagactccgatatggggtcctccaagaaagttactctctcagtgctcagccgggagcagtcggaaggggttggagcgagggtccggagaagcattggcagacccgagttaaaaaatctggatccgtttttactgtttgatgaatttaaaggaggtagaccaggaggatttcctgatcatccacatcgaggttttgaaacattcccttctctgctaacacgttgaaggcgctgtggcttgctttgcagcaataatggaagccattcctttcacctaccctacactcatactggattctgaccctgttcctggaagatgtctccactctgtgctcctgctcgagctacttcttgtgtgctccatcccatagctcca

SEQ ID NO: 77427 - DNA, 2021 bp, Homo sapiens
  misc_feature (1547)..(1547): n is a, c, g, or t
  misc_feature (1553)..(1553): n is a, c, g, or t
accgaccggagcgccgatcagagcacctgcccgggccacacatttcctcctggagcacagcaagtgccgcctaaattacccgagtgagcatctcttcccggcacgagaggcagggaggccaaagggccgccaagctggcctgggagaggcgtagggcggagcgagagtggagtgacattcccgagggcggagccccagggcctccgagacccgtagactcccgcctcccgcctcctctaggccgccggccgcgaagcgctgagtcacggtgaggcgactggacccacactctcttaacctgccctccctgcactcgctcccggcggctcttcgcgtcacccccgccgctaaggctccaggtgccgctaccgcagcgtgagtacctggggctcctgcaggggtccactagccctccatcctctacagctcagcatcagaacactctctttttagactccgatatggggtcctccaagaaagttactctctcagtgctcagccgggagcagtcggaaggggttggagcgagggtccggagaagcattggcagacccgagttaaaaaatctggatccgtttttactgtttgatgaatttaaaggaggtagaccaggaggatttcctgatcatccacatcgaggttttgaaacagtatcctacctcctggaagggggcagcatggcccatgaagacttctgtggacacactggtaaaatgaacccaggagatttgcagtggatgactgcgggccggggcattctgcacgctgagatgccttgctcagaggagccagcccatggcctacaactgtgggttaatttgaggagctcagagaagatggtggagcctcagtaccaggaactgaaaagtgaagaaatccctaaacccagtaaggatggtgtgacagttgctgtcatttctggagaagccctgggaataaagtccaaggtttacactcgcacaccaaccttatatttggacttcaaattggacccaggagccaaacattcccaacctatccctaaagggtggacaagcttcatttacacgatatctggagatgtgtatattgggcccgatgatgcacaacaaaaaatagaacctcatcacacagcagtgcttggagaaggtgacagtgtccaggtggagaacaaggatcccaagagaagccactttgtcttaattgctggggagccattaagagaaccagttatccaacatggtccatttgtgatgaacaccaatgaagagatttctcaagctattcttgatttcagaaacgcaaaaaatgggtttgaaagggccaaaacctggaaatcaaagattgggaactagtggaaagcggaagagcaggtcttgatgtgtcctagaattttgccatttctgagattgagccattgaaggcattccatttctaaagcttatttagccggtgcttctaaagaattccacactaacgtgataacatggtttttgtaacaataaatgtaggatatttcctggcacatgcaaataaacctaatcattgtttctttaaaaaaaaaaaancacatnaacacaaacattaccctccacaatcccatattacaaaaccaccccgccattcttcttattcactatcatctataaaatccatttctttattcccaccatccacactactgtcctcttttctccccacacgggggacttctcgggctttttctacttggggggggtattatactccccccccacatcctcctttgacttttgtgggaggggggcagagcagactcctctctgcagggggagtttctttctccccgttagggagggctccgataaatacgtttcctcgtgctttgtgggtgccgcctcgaaggcgggcgggcgtatttttctttggtctccagccctgaatacaacacaagaagtgccgccgtgaagggcggcccgcgctaggaccaatgccccgctcgctcccgttagacccgcgtctgttcttcgagctccctgatgagactgatccgccgtattttg

SEQ ID NO: 77428 - DNA, 1487 bp, Homo sapiens
accgaccggagcgccgatcagagcacctgcccgggccacacatttcctcctggagcacagcaagtgccgcctaaattacccgagtgagcatctcttcccggcacgagaggcagggaggccaaagggccgccaagctggcctgggagaggcgtagggcggagcgagagtggagtgacattcccgagggcggagccccagggcctccgagacccgtagactcccgcctcccgcctcctctaggccgccggccgcgaagcgctgagtcacggtgaggcgactggacccacactctcttaacctgccctccctgcactcgctcccggcggctcttcgcgtcacccccgccgctaaggctccaggtgccgctaccgcagcccctccatcctctacagctcagcatcagaacactctctttttagactccgatatggggtcctccaagaaagttactctctcagtgctcagccgggagcagtcggaaggggttggagcgagggtccggagaagcattggcagacccgagttaaaaaatctggatccgtttttactgtttgatgaatttaaaggaggtagaccaggaggatttcctgatcatccacatcgaggttttgaaacagtatcctacctcctggaagggggcagcatggcccatgaagacttctgtggacacactggtaaaatgaacccaggagatttgcagtggatgactgcgggccggggcattctgcacgctgagatgccttgctcagaggagccagcccatggcctacaactgtgggttaatttgaggagctcagagaagatggtggagcctcagtaccaggaactgaaaagtgaagaaatccctaaacccagtaaggatggtgtgacagttgctgtcatttctggagaagccctgggaataaagtccaaggtttacactcgcacaccaaccttatatttggacttcaaattggacccaggagccaaacattcccaacctatccctaaagggtggacaagcttcatttacacgatatctggagatgtgtatattgggcccgatgatgcacaacaaaaaatagaacctcatcacacagcagtgcttggagaaggtgacagtgtccaggtggagaacaaggatcccaagagaagccactttgtcttaattgctggggagccattaagagaaccagttatccaacatggtccatttgtgatgaacaccaatgaagagatttctcaagctattcttgatttcagaaacgcaaaaaatgggtttgaaagggccaaaacctggaaatcaaagattgggaactagtggaaagcggaagagcaggtcttgatgtgtcctagaattttgccatttctgagattgagccattgaaggcattccatttctaaagcttatttagccggtgcttctaaagaattccacactaacgtgataacatggtttttgtaacaataaatgtaggatatttcctggcacatgcaaataaacctaa

SEQ ID NO: 77429 - DNA, 1287 bp, Homo sapiens
  misc_feature (813)..(813): n is a, c, g, or t
  misc_feature (819)..(819): n is a, c, g, or t
gcccatggcctacaactgtgggttggctcctctgagcaaggcatctcagaggagccagcccatggcctacaactgtgggttaatttgaggagctcagagaagatggtggagcctcagtaccaggaactgaaaagtgaagaaatccctaaacccagtaaggatggtgtgacagttgctgtcatttctggagaagccctgggaataaagtccaaggtttacactcgcacaccaaccttatatttggacttcaaattggacccaggagccaaacattcccaacctatccctaaagggtggacaagcttcatttacacgatatctggagatgtgtatattgggcccgatgatgcacaacaaaaaatagaacctcatcacacagcagtgcttggagaaggtgacagtgtccaggtggagaacaaggatcccaagagaagccactttgtcttaattgctggggagccattaagagaaccagttatccaacatggtccatttgtgatgaacaccaatgaagagatttctcaagctattcttgatttcagaaacgcaaaaaatgggtttgaaagggccaaaacctggaaatcaaagattgggaactagtggaaagcggaagagcaggtcttgatgtgtcctagaattttgccatttctgagattgagccattgaaggcattccatttctaaagcttatttagccggtgcttctaaagaattccacactaacgtgataacatggtttttgtaacaataaatgtaggatatttcctggcacatgcaaataaacctaatcattgtttctttaaaaaaaaaaaancacatnaacacaaacattaccctccacaatcccatattacaaaaccaccccgccattcttcttattcactatcatctataaaatccatttctttattcccaccatccacactactgtcctcttttctccccacacgggggacttctcgggctttttctacttggggggggtattatactccccccccacatcctcctttgacttttgtgggaggggggcagagcagactcctctctgcagggggagtttctttctccccgttagggagggctccgataaatacgtttcctcgtgctttgtgggtgccgcctcgaaggcgggcgggcgtatttttctttggtctccagccctgaatacaacacaagaagtgccgccgtgaagggcggcccgcgctaggaccaatgccccgctcgctcccgttagacccgcgtctgttcttcgagctccctgatgagactgatccgccgtattttg

SEQ ID NO: 77430 - DNA, 1579 bp, Homo sapiens
  misc_feature (1521)..(1521): n is a, c, g, or t
accgaccggagcgccgatcagagcacctgcccgggccacacatttcctcctggagcacagcaagtgccgcctaaattacccgagtgagcatctcttcccggcacgagaggcagggaggccaaagggccgccaagctggcctgggagaggcgtagggcggagcgagagtggagtgacattcccgagggcggagccccagggcctccgagacccgtagactcccgcctcccgcctcctctaggccgccggccgcgaagcgctgagtcacggtgaggcgactggacccacactctcttaacctgccctccctgcactcgctcccggcggctcttcgcgtcacccccgccgctaaggctccaggtgccgctaccgcagcccctccatcctctacagctcagcatcagaacactctctttttagactccgatatggggtcctccaagaaagttactctctcagtgctcagccgggagcagtcggaaggggttggagcgagggtccggagaagcattggcagacccgagttaaaaaatctggatccgtttttactgtttgatgaatttaaaggaggtagaccaggaggatttcctgatcatccacatcgaggttttgaaacagtatcctacctcctggaagggggcagcatggcccatgaagacttctgtggacacactggtaaaatgaacccaggagatttgcagtggatgactgcgggccggggcattctgcacgctgagatgccttgctcagaggagccagcccatggcctacaactgtgggttaatttgaggagctcagagaagatggtggagcctcagtaccaggaactgaaaagtgaagaaatccctaaacccagtaaggatggtgtgacagttgctgtcatttctggagaagccctgggaataaagtccaaggtttacactcgcacaccaaccttatatttggacttcaaattggacccaggagccaaacattcccaacctatccctaaagggtggacaagcttcatttacacgatatctggagatgtgtatattgggcccgatgatgcacaacaaaaaatagaacctcatcacacagcagtgcttggagaaggtgacagtgtccaggtggagaacaaggatcccaagagaagccactttgtcttaattgctggggagccattaagagaaccagttatccaacatgcgatcatctcagtccacattggaacgatctgaacagcagatcagggctgcttctagtttggaggaactacttcgaattactcactctgaggactggaagctgtggagatgcaggctgaggctcaaaagttttaccagtatggactctcgctcagcatcccatcggtccactaggtttgcggcaactttctatgacattgaaacactgttatagatgaagaatggcaaagaactcagtgcagccctagagaaacgtgcgtggaggtggccagtgagctggggaagagtccaacacattcttcaagcccccttgtgtgaacgtgttccgatgtggnggctgttgcaatgaagagagccttatctgtatgcaccagcacctcgtcatttcccgct

SEQ ID NO: 77431 - DNA, 1443 bp, Homo sapiens
accgaccggagcgccgatcagagcacctgcccgggccacacatttcctcctggagcacagcaagtgccgcctaaattacccgagtgagcatctcttcccggcacgagaggcagggaggccaaagggccgccaagctggcctgggagaggcgtagggcggagcgagagtggagtgacattcccgagggcggagccccagggcctccgagacccgtagactcccgcctcccgcctcctctaggccgccggccgcgaagcgctgagtcacggtgaggcgactggacccacactctcttaacctgccctccctgcactcgctcccggcggctcttcgcgtcacccccgccgctaaggctccaggtgccgctaccgcagcccctccatcctctacagctcagcatcagaacactctctttttagactccgatatggggtcctccaagaaagttactctctcagtgctcagccgggagcagtcggaaggggttggagcgagggtccggagaagcattggcagacccgagttaaaaaatctggatccgtttttactgtttgatgaatttaaaggaggtagaccaggaggatttcctgatcatccacatcgaggttttgaaacagtatcctacctcctggaagggggcagcatggcccatgaagacttctgtggacacactggtaaaatgaacccaggagatttgcagtggatgactgcgggccggggcattctgcacgctgagatgccttgctcagaggagccagcccatggcctacaactgtgggttaatttgaggagctcagagaagatggtggagcctcagtaccaggaactgaaaagtgaagaaatccctaaacccagtaaggatggtgtgacagttgctgtcatttctggagaagccctgggaataaagtccaaggtttacactcgcacaccaaccttatatttggacttcaaattggacccaggagccaaacattcccaacctatccctaaaggggcccgatgatgcacaacaaaaaatagaacctcatcacacagcagtgcttggagaaggtgacagtgtccaggtggagaacaaggatcccaagagaagccactttgtcttaattgctggggagccattaagagaaccagttatccaacatggtccatttgtgatgaacaccaatgaagagatttctcaagctattcttgatttcagaaacgcaaaaaatgggtttgaaagggccaaaacctggaaatcaaagattgggaactagtggaaagcggaagagcaggtcttgatgtgtcctagaattttgccatttctgagattgagccattgaaggcattccatttctaaagcttatttagccggtgcttctaaagaattccacactaacgtgataacatggtttttgtaacaataaatgtaggatatttcctggcacatgcaaataaacctaa

SEQ ID NO: 77432 - DNA, 913 bp, Homo sapiens
  misc_feature (31)..(34): n is a, c, g, or t
  misc_feature (38)..(38): n is a, c, g, or t
  misc_feature (439)..(439): n is a, c, g, or t
  misc_feature (445)..(445): n is a, c, g, or t
aaatgggttaaagcgctcggaaaaaaacaannnnaccntttgtgtggatcccaagagaagccactttgtcttaattgctggggagccattaagagaaccagttatccaacatggtccatttgtgatgaacaccaatgaagagatttctcaagctattcttgatttcagaaacgcaaaaaatgggtttgaaagggccaaaacctggaaatcaaagattgggaactagtggaaagcggaagagcaggtcttgatgtgtcctagaattttgccatttctgagattgagccattgaaggcattccatttctaaagcttatttagccggtgcttctaaagaattccacactaacgtgataacatggtttttgtaacaataaatgtaggatatttcctggcacatgcaaataaacctaatcattgtttctttaaaaaaaaaaaancacatnaacacaaacattaccctccacaatcccatattacaaaaccaccccgccattcttcttattcactatcatctataaaatccatttctttattcccaccatccacactactgtcctcttttctccccacacgggggacttctcgggctttttctacttggggggggtattatactccccccccacatcctcctttgacttttgtgggaggggggcagagcagactcctctctgcagggggagtttctttctccccgttagggagggctccgataaatacgtttcctcgtgctttgtgggtgccgcctcgaaggcgggcgggcgtatttttctttggtctccagccctgaatacaacacaagaagtgccgccgtgaagggcggcccgcgctaggaccaatgccccgctcgctcccgttagacccgcgtctgttcttcgagctccctgatgagactgatccgccgtattttg

SEQ ID NO: 77433 - DNA, 905 bp, Homo sapiens
  misc_feature (28)..(28): n is a, c, g, or t
  misc_feature (31)..(31): n is a, c, g, or t
  misc_feature (37)..(38): n is a, c, g, or t
  misc_feature (431)..(431): n is a, c, g, or t
  misc_feature (437)..(437): n is a, c, g, or t
tctttcctccctgccgcctcccccgcgnccncccttnngatcccaagagaagccactttgtcttaattgctggggagccattaagagaaccagttatccaacatggtccatttgtgatgaacaccaatgaagagatttctcaagctattcttgatttcagaaacgcaaaaaatgggtttgaaagggccaaaacctggaaatcaaagattgggaactagtggaaagcggaagagcaggtcttgatgtgtcctagaattttgccatttctgagattgagccattgaaggcattccatttctaaagcttatttagccggtgcttctaaagaattccacactaacgtgataacatggtttttgtaacaataaatgtaggatatttcctggcacatgcaaataaacctaatcattgtttctttaaaaaaaaaaaancacatnaacacaaacattaccctccacaatcccatattacaaaaccaccccgccattcttcttattcactatcatctataaaatccatttctttattcccaccatccacactactgtcctcttttctccccacacgggggacttctcgggctttttctacttggggggggtattatactccccccccacatcctcctttgacttttgtgggaggggggcagagcagactcctctctgcagggggagtttctttctccccgttagggagggctccgataaatacgtttcctcgtgctttgtgggtgccgcctcgaaggcgggcgggcgtatttttctttggtctccagccctgaatacaacacaagaagtgccgccgtgaagggcggcccgcgctaggaccaatgccccgctcgctcccgttagacccgcgtctgttcttcgagctccctgatgagactgatccgccgtattttg

SEQ ID NO: 77434 - DNA, 1987 bp, Homo sapiens
  misc_feature (1513)..(1513): n is a, c, g, or t
  misc_feature (1519)..(1519): n is a, c, g, or t
accgaccggagcgccgatcagagcacctgcccgggccacacatttcctcctggagcacagcaagtgccgcctaaattacccgagtgagcatctcttcccggcacgagaggcagggaggccaaagggccgccaagctggcctgggagaggcgtagggcggagcgagagtggagtgacattcccgagggcggagccccagggcctccgagacccgtagactcccgcctcccgcctcctctaggccgccggccgcgaagcgctgagtcacggtgaggcgactggacccacactctcttaacctgccctccctgcactcgctcccggcggctcttcgcgtcacccccgccgctaaggctccaggtgccgctaccgcagcccctccatcctctacagctcagcatcagaacactctctttttagactccgatatggggtcctccaagaaagttactctctcagtgctcagccgggagcagtcggaaggggttggagcgagggtccggagaagcattggcagacccgagttaaaaaatctggatccgtttttactgtttgatgaatttaaaggaggtagaccaggaggatttcctgatcatccacatcgaggttttgaaacagtatcctacctcctggaagggggcagcatggcccatgaagacttctgtggacacactggtaaaatgaacccaggagatttgcagtggatgactgcgggccggggcattctgcacgctgagatgccttgctcagaggagccagcccatggcctacaactgtgggttaatttgaggagctcagagaagatggtggagcctcagtaccaggaactgaaaagtgaagaaatccctaaacccagtaaggatggtgtgacagttgctgtcatttctggagaagccctgggaataaagtccaaggtttacactcgcacaccaaccttatatttggacttcaaattggacccaggagccaaacattcccaacctatccctaaagggtggacaagcttcatttacacgatatctggagatgtgtatattgggcccgatgatgcacaacaaaaaatagaacctcatcacacagcagtgcttggagaaggtgacagtgtccaggtggagaacaaggatcccaagagaagccactttgtcttaattgctggggagccattaagagaaccagttatccaacatggtccatttgtgatgaacaccaatgaagagatttctcaagctattcttgatttcagaaacgcaaaaaatgggtttgaaagggccaaaacctggaaatcaaagattgggaactagtggaaagcggaagagcaggtcttgatgtgtcctagaattttgccatttctgagattgagccattgaaggcattccatttctaaagcttatttagccggtgcttctaaagaattccacactaacgtgataacatggtttttgtaacaataaatgtaggatatttcctggcacatgcaaataaacctaatcattgtttctttaaaaaaaaaaaancacatnaacacaaacattaccctccacaatcccatattacaaaaccaccccgccattcttcttattcactatcatctataaaatccatttctttattcccaccatccacactactgtcctcttttctccccacacgggggacttctcgggctttttctacttggggggggtattatactccccccccacatcctcctttgacttttgtgggaggggggcagagcagactcctctctgcagggggagtttctttctccccgttagggagggctccgataaatacgtttcctcgtgctttgtgggtgccgcctcgaaggcgggcgggcgtatttttctttggtctccagccctgaatacaacacaagaagtgccgccgtgaagggcggcccgcgctaggaccaatgccccgctcgctcccgttagacccgcgtctgttcttcgagctccctgatgagactgatccgccgtattttg

SEQ ID NO: 77435 - DNA, 1518 bp, Homo sapiens
accgaccggagcgccgatcagagcacctgcccgggccacacatttcctcctggagcacagcaagtgccgcctaaattacccgagtgagcatctcttcccggcacgagaggcagggaggccaaagggccgccaagctggcctgggagaggcgtagggcggagcgagagtggagtgacattcccgagggcggagccccagggcctccgagacccgtagactcccgcctcccgcctcctctaggccgccggccgcgaagcgctgagtcacggtgaggcgactggacccacactctcttaacctgccctccctgcactcgctcccggcggctcttcgcgtcacccccgccgctaaggctccaggtgccgctaccgcagcccctccatcctctacagctcagcatcagaacactctctttttagactccgatatggggtcctccaagaaagttactctctcagtgctcagccgggagcagtcggaaggggttggagcgagggtccggagaagcattggcagacccgagttaaaaaatctggatccgtttttactgtttgatgaatttaaaggaggtagaccaggaggatttcctgatcatccacatcgaggttttgaaacagtatcctacctcctggaagggggcagcatggcccatgaagacttctgtggacacactggtaaaatgaacccaggagatttgcagtggatgactgcgggccggggcattctgcacgctgagatgccttgctcagaggagccagcccatggcctacaactgtgggttaatttgaggagctcagagaagatggtggagcctcagtaccaggaactgaaaagtgaagaaatccctaaacccagtaaggatggtgtgacagttgctgtcatttctggagaagccctgggaataaagtccaaggtttacactcgcacaccaaccttatatttggacttcaaattggacccaggagccaaacattcccaacctatccctaaagggtggacaagcttcatttacacgatatctggagatgtgtatattgggcccgatgatgcacaacaaaaaatagaacctcatcacacagcagtgcttggagaaggtgacagtgtccaggtggagaacaaggatcccaagagaagccactttgtcttaattgctggggagccattaagagaaccagttatccaacatggtccatttgtgatgaacaccaatgaagagatttctcaagctattcttgatttcagaaacgcaaaaaatgggtttgaaagggccaaaacctggaaatcaaagattgggaactagtggaaagcggaagagcaggtcttgatgtgtcctagaattttgccatttctgagattgagccattgaaggcattccatttctaaagcttatttagccggtgcttctaaagaattccacactaacgtgataacatggtttttgtaacaataaatgtaggatatttcctggcacatgcaaataaacctaaggaaaaaaaattggtctgtttgggtcttatg

SEQ ID NO: 77436 - DNA, 1015 bp, Homo sapiens
  misc_feature (541)..(541): n is a, c, g, or t
  misc_feature (547)..(547): n is a, c, g, or t
ggccggtaccatctctccacagtggacaagcttcatttacacgatatctggagatgtgtatattgggcccgatgatgcacaacaaaaaatagaacctcatcacacagcagtgcttggagaaggtgacagtgtccaggtggagaacaaggatcccaagagaagccactttgtcttaattgctggggagccattaagagaaccagttatccaacatggtccatttgtgatgaacaccaatgaagagatttctcaagctattcttgatttcagaaacgcaaaaaatgggtttgaaagggccaaaacctggaaatcaaagattgggaactagtggaaagcggaagagcaggtcttgatgtgtcctagaattttgccatttctgagattgagccattgaaggcattccatttctaaagcttatttagccggtgcttctaaagaattccacactaacgtgataacatggtttttgtaacaataaatgtaggatatttcctggcacatgcaaataaacctaatcattgtttctttaaaaaaaaaaaancacatnaacacaaacattaccctccacaatcccatattacaaaaccaccccgccattcttcttattcactatcatctataaaatccatttctttattcccaccatccacactactgtcctcttttctccccacacgggggacttctcgggctttttctacttggggggggtattatactccccccccacatcctcctttgacttttgtgggaggggggcagagcagactcctctctgcagggggagtttctttctccccgttagggagggctccgataaatacgtttcctcgtgctttgtgggtgccgcctcgaaggcgggcgggcgtatttttctttggtctccagccctgaatacaacacaagaagtgccgccgtgaagggcggcccgcgctaggaccaatgccccgctcgctcccgttagacccgcgtctgttcttcgagctccctgatgagactgatccgccgtattttg

SEQ ID NO: 77437 - DNA, 1408 bp, Homo sapiens
accgaccggagcgccgatcagagcacctgcccgggccacacatttcctcctggagcacagcaagtgccgcctaaattacccgagtgagcatctcttcccggcacgagaggcagggaggccaaagggccgccaagctggcctgggagaggcgtagggcggagcgagagtggagtgacattcccgagggcggagccccagggcctccgagacccgtagactcccgcctcccgcctcctctaggccgccggccgcgaagcgctgagtcacggtgaggcgactggacccacactctcttaacctgccctccctgcactcgctcccggcggctcttcgcgtcacccccgccgctaaggctccaggtgccgctaccgcagcccctccatcctctacagctcagcatcagaacactctctttttagactccgatatggggtcctccaagaaagttactctctcagtgctcagccgggagcagtcggaaggggttggagcgagggtccggagaagcattggcagacccgagttaaaaaatctggatccgtttttactgtttgatgaatttaaaggaggtagaccaggaggatttcctgatcatccacatcgaggttttgaaacagtatcctacctcctggaagggggcagcatggcccatgaagacttctgtggacacactggtaaaatgaacccaggagatttgcagtggatgactgcgggccggggcattctgcacgctgagatgccttgctcagaggagccagcccatggcctacaactgtgggttaatttgaggagctcagagaagatggtggagcctcagtaccaggaactgaaaagtgaagaaatccctaaacccagtaaggatggtgtgacagttgctgtcatttctggagaagccctgggaataaagtccaaggtttacactcgcacaccaaccttatatttggacttcaaattggacccaggagccaaacattcccaacctatccctaaagggtggacaagcttcatttacacgatatctggagatgtgtatattgggcccgatgatgcacaacaaaaaatagaacctcatcacacagcagtgcttggagaaggtgacagtgtccaggtggagaacaaggatcccaagagaagccactttgtcttaattgctggggagccattaagagaaccagttatccaacatgtaagaccaaaatgacaatgattttcttggttgattttccttttctttgaaaacagtatacatgtatactattgttgggaagaatagctggttttttttgtcctgtctctccatctataaatctgaggattgtttaatttttctgtcatcagagggaaatatatatgtgatgtttattcatctctttttttttaaagaaacatttcttagatacctattatg

SEQ ID NO: 77438 - DNA, 1232 bp, Homo sapiens
  misc_feature (1203)..(1203): n is a, c, g, or t
  misc_feature (1215)..(1215): n is a, c, g, or t
accgaccggagcgccgatcagagcacctgcccgggccacacatttcctcctggagcacagcaagtgccgcctaaattacccgagtgagcatctcttcccggcacgagaggcagggaggccaaagggccgccaagctggcctgggagaggcgtagggcggagcgagagtggagtgacattcccgagggcggagccccagggcctccgagacccgtagactcccgcctcccgcctcctctaggccgccggccgcgaagcgctgagtcacggtgaggcgactggacccacactctcttaacctgccctccctgcactcgctcccggcggctcttcgcgtcacccccgccgctaaggctccaggtgccgctaccgcagcccctccatcctctacagctcagcatcagaacactctctttttagactccgatatggggtcctccaagaaagttactctctcagtgctcagccgggagcagtcggaaggggttggagcgagggtccggagaagcattggcagacccgagttaaaaaatctggatccgtttttactgtttgatgaatttaaaggaggtagaccaggaggatttcctgatcatccacatcgaggttttgaaacagtatcctacctcctggaagggggcagcatggcccatgaagacttctgtggacacactggtaaaatgaacccaggagatttgcagtggatgactgcgggccggggcattctgcacgctgagatgccttgctcagaggagccagcccatggcctacaactgtgggttaatttgaggagctcagagaagatggtggagcctcagtaccaggaactgaaaagtgaagaaatccctaaacccagtaaggatggtgtgacagttgctgtcatttctggagaagccctgggaataaagtccaaggtttacactcgcacaccaaccttatatttggacttcaaattggacccaggagccaaacattcccaacctatccctaaagggtggacaagcttcatttacacgatatctggagatgtgtatattgggcccgatgatgcacaacaaaaaatagaacctcatcacacagcagtgcttggagaaggtgacagtgtccaggtggagaacaaggatcccaagagaagccactttgtcttaattgctggggagccattaagagaaccagttatccaacatgcattatggatcttggntaacctcaaaanagcaaggagaaagaagc

SEQ ID NO: 77439 - DNA, 309 bp, Homo sapiens
aagctaggagggctaacttccagaccaagacctttaagaggggctgttttagcagcccacctcggctttaacacttccctaggaggaactatatatataatggatccaggtccaggcctattacagaagggccagctgaaggaaagaagaaccttattcttagaaaaaaacactgatggtttccttttccttttcagtccaaggtttacactcgcacaccaaccttatatttggacttcaaattggacccaggagccaaacattcccaacctatccctaaagggtatgatgggttctggggtttagtag

SEQ ID NO: 77440 - DNA, 2660 bp, Homo sapiens
aagcccggcctggcggcggcggtggcggtagctgccgtggcggcctctgcgcatgctccgtcgcctgcccgccctggccgctcgccgcccgcccgcccgacggagacgcagtcccagctatctgacttcatgtgaaagatggctaatgcagaagtgagtgtcccagtgggggatgtggttgtggtacctactgaaggaaatgaaggggagaatcctgaagacactaaaacccaagtgattttgcagttacagcctgtgcaacaagggatttatgaagctgggtcggagaacaacacggcagttgtagcagtagaaactcacacgatacacaaaattgaagaagggattgatacaggcactatagaagcaaatgaggatatggaaattgcttaccccataacttgtggggagagcaaagccatcctcctctggaagaagtttgtatgtccaggaataaacgtgaagtgtgtcaagttcaatgatcagttgatcagccccaagcactttgttcatctggctggcaagtccactctgaaggactggaagagagctattcgtctgggtgggatcatgctcaggaaaatgatggactccggacagattgatttttaccaacatgacaaagtttgctccaatacctgcagaagcaccaaatttgatcttctgatcagcagtgcaagagctccagtgccaggacagcagacaagtgtggtgcagacacccacttcggctgatggtagcatcacgcagattgccatctcagaagagagcatggaagaggcagggctggaatggaactcagctctcaccgctgctgtcaccatggccacggaggagggtgtaaagaaagactcagaggaaatttcagaggacactttgatgttctggaaaggaatagctgatgtagggctgatggaagaggttgtctgcaatatacagaaggaaatagaggagctactcaggggagttcagcagcggctcatccaggctcccttccaagtcacagatgctgctgttctcaacaatgtagcacacacatttggcctaatggacacagtcaagaaggttttagacaacagaaggaaccaagtagagcagggagaagaacagtttctctatactctgacagacttggaacgccagttggaggagcagaagaagcaaggccaggatcacaggctgaaatctcagacagttcaaaatgtggtactgatgcctgtgagcactcctaagcctccaaaaaggccccggctccagcggccagcctccaccactgtcttgagcccttctcctcctgtccagcagcctcagttcacagtcatctcacccatcaccatcaccccagtgggtcagtcattttccatgggcaatattccagtggccaccctcagccagggctccagtcctgtgactgtccacacactgccttctggccctcagctcttccgctatgccacagtggtctcctctgccaagagcagctcaccagacacagtgaccatccacccttcatctagcttggcgctgctgagctctactgccatgcaggatgggagtacactgggcaacatgaccaccatggttagccctgtggaattggtggccatggagtccggcctaacctcggcaattcaggctgttgaaagcacctcagaggatgggcagaccatcattgagattgatccagccccggacccagaagctgaagatactgagggcaaagcagtcatcttggagacagagctgaggactgaggagaaagttgtggctgagatggaagaacaccagcatcaagttcacaatgtggagattgtggtcttagaggattaactggggatctcagggccaggagttatgttttgatttggaattttaattatttgtttatttttatcattgtcccactcatttccacataggacccttttttaaaaaaaaaaaaacaaaatcttattgttgtaactgaaaatgttgggttcttcccactccctcattgaaaaatggacaaaacaagctgcccttccagaagttgagagtaggtcattcaatgtcctaatcatcttacaccaagaaagtaatttcttttaggggaagtgtcaagataacaagtaaccctgtccagaaagccatttccaggctcgtctgtgtgtgtaggcatgtggttttattcttgtaaagatgcattgaccaaactctggaacacagatctgacactggaaggcaacccactcgcatgtggatgctgaagggcactttattttgtatcctgaaaagggcctacagaggccagtacaaaactctcaaacaaaaggaagttgactctgctttgaggggaaggtggcatgccagcactagcttaaaaagggaagtgctagccgggcgtggtggctcacgcctgcaatcccagcactttgggaggccgaggcgggtggatcacgaggtcaggagtttgagaccagcctggccaacatggtgaaaccccgtatctactaaaaatacgaaaaaaaaattagccgggtgtggtggcgggagcctgtaatcccagctattcaggaggccaaggcaggagaatcgcttgaacctgggaaggcagaggttgcagtgagccaagatcgcaccactgcactccagcctgggcaacaagagcgagactccatctc

SEQ ID NO: 77441 - DNA, 212 bp, Homo sapiens
  misc_feature (179)..(179): n is a, c, g, or t
tgtccatcccccttcgtggccatggtagcatcacgcagattgccatctcagaagagagcatggaagaggcagggctggaatggaactcagctctcaccgctgctgtcaccatggccacggaggagggtgtaaagaaagactcagaggaaatttcagagacactttatgttctggaaagnatagctgacgaaggggtatgacactaacctctg

SEQ ID NO: 77442 - DNA, 209 bp, Homo sapiens
aggctcagcagtgttgtccctatttttccctgaggcctagttcccactagatgaagtataggctgaactggtacttcttgtctccctttgcacaggaaaatgatggactccggacagattgatttttaccaacatgacaaagtttgttgcagtgagccgagatcgcgccactgcactccagcctgggcgactaagcaagactccatctc

SEQ ID NO: 77443 - DNA, 2690 bp, Homo sapiens
aagcccggcctggcggcggcggtggcggtagctgccgtggcggcctctgcgcatgctccgtcgcctgcccgccctggccgctcgccgcccgcccgcccgacggagacgcagtcccagctatctgacttcatgtgaaagatggctaatgcagaagtgagtgtcccagtgggggatgtggttgtggtacctactgaaggaaatgaaggggagaatcctgaagacactaaaacccaagtgattttgcagttacagcctgtgcaacaaggtttgtttatcgatggacacttttacaacaggatttatgaagctgggtcggagaacaacacggcagttgtagcagtagaaactcacacgatacacaaaattgaagaagggattgatacaggcactatagaagcaaatgaggatatggaaattgcttaccccataacttgtggggagagcaaagccatcctcctctggaagaagtttgtatgtccaggaataaacgtgaagtgtgtcaagttcaatgatcagttgatcagccccaagcactttgttcatctggctggcaagtccactctgaaggactggaagagagctattcgtctgggtgggatcatgctcaggaaaatgatggactccggacagattgatttttaccaacatgacaaagtttgctccaatacctgcagaagcaccaaatttgatcttctgatcagcagtgcaagagctccagtgccaggacagcagacaagtgtggtgcagacacccacttcggctgatggtagcatcacgcagattgccatctcagaagagagcatggaagaggcagggctggaatggaactcagctctcaccgctgctgtcaccatggccacggaggagggtgtaaagaaagactcagaggaaatttcagaggacactttgatgttctggaaaggaatagctgatgtagggctgatggaagaggttgtctgcaatatacagaaggaaatagaggagctactcaggggagttcagcagcggctcatccaggctcccttccaagtcacagatgctgctgttctcaacaatgtagcacacacatttggcctaatggacacagtcaagaaggttttagacaacagaaggaaccaagtagagcagggagaagaacagtttctctatactctgacagacttggaacgccagttggaggagcagaagaagcaaggccaggatcacaggctgaaatctcagacagttcaaaatgtggtactgatgcctgtgagcactcctaagcctccaaaaaggccccggctccagcggccagcctccaccactgtcttgagcccttctcctcctgtccagcagcctcagttcacagtcatctcacccatcaccatcaccccagtgggtcagtcattttccatgggcaatattccagtggccaccctcagccagggctccagtcctgtgactgtccacacactgccttctggccctcagctcttccgctatgccacagtggtctcctctgccaagagcagctcaccagacacagtgaccatccacccttcatctagcttggcgctgctgagctctactgccatgcaggatgggagtacactgggcaacatgaccaccatggttagccctgtggaattggtggccatggagtccggcctaacctcggcaattcaggctgttgaaagcacctcagaggatgggcagaccatcattgagattgatccagccccggacccagaagctgaagatactgagggcaaagcagtcatcttggagacagagctgaggactgaggagaaagttgtggctgagatggaagaacaccagcatcaagttcacaatgtggagattgtggtcttagaggattaactggggatctcagggccaggagttatgttttgatttggaattttaattatttgtttatttttatcattgtcccactcatttccacataggacccttttttaaaaaaaaaaaaacaaaatcttattgttgtaactgaaaatgttgggttcttcccactccctcattgaaaaatggacaaaacaagctgcccttccagaagttgagagtaggtcattcaatgtcctaatcatcttacaccaagaaagtaatttcttttaggggaagtgtcaagataacaagtaaccctgtccagaaagccatttccaggctcgtctgtgtgtgtaggcatgtggttttattcttgtaaagatgcattgaccaaactctggaacacagatctgacactggaaggcaacccactcgcatgtggatgctgaagggcactttattttgtatcctgaaaagggcctacagaggccagtacaaaactctcaaacaaaaggaagttgactctgctttgaggggaaggtggcatgccagcactagcttaaaaagggaagtgctagccgggcgtggtggctcacgcctgcaatcccagcactttgggaggccgaggcgggtggatcacgaggtcaggagtttgagaccagcctggccaacatggtgaaaccccgtatctactaaaaatacgaaaaaaaaattagccgggtgtggtggcgggagcctgtaatcccagctattcaggaggccaaggcaggagaatcgcttgaacctgggaaggcagaggttgcagtgagccaagatcgcaccactgcactccagcctgggcaacaagagcgagactccatctc

SEQ ID NO: 77444 - DNA, 751 bp, Homo sapiens
tgaggatgggttcccatggcatataacttacaaataattcaaaaggagaatgttatgaggttgcctccattgctacgtgactctgggagatatatatgtatatatatatatgtatgtatgttggtatacatgttggtatttatttaaaaaatttctttagttgaaatttcgagcatttgacctaagtggctgataatatctcataaaagctgacatttgttagtggattataatatgtcaggctcagtgctacctgctttctgtggattatctcagaatcctcgcactgatctgtatttttcattttatagagggatctatgtggaggtgctgagttgtcaaaggacactggcagagcttgattgcattcagggctgaattactttgctaaagtggcggggtctatttctctaccccttgaatctgagcagggctcgtgccttgctttggccactagaattcagggggatggcccgtgcaccagccctgtgcccagctctgaagaccctctgtgtttcctctttgcctcatgctgtctgcagccatgaggagaacacacccaagctaccggaggatggaaggcaagtggagaagatccgagtcgtgccaccaaggccagtctagatgagccaagagctagtagagccccggatatttaagtgagtctggctgggcgcggtggctcatgcctgtaattccagcactttgggaggctgaggcaggtggatcacgaggtcaggagatcgagacc

SEQ ID NO: 77445 - DNA, 1193 bp, Homo sapiens
gcagtgaagtcatggtctaaggccagggcggaggtggaagagctaccggtgtcatagccacatttacctggtttctgcagctgtgggagtgaactgtggatgttgtcactcacctggtggggggtgggggggggtcttcctaaaaaagcaggtgaaggacagaatagcgccagtgtggagagagccgaggaagaggaaactgcctgggtgaccaagaatacgtcgtgacagaggaggacaatacgcgatcacagacaccaggaaagaaaaaggtggctttctggagatagcgccccttccttcatcataacccattcattcagaccctgtctgtgagtatttcagggcaggaggaatggatggcagtcttcgtcaataccccttaaaatttctgaacataggggccattgaagtgcctgtgtgccattgcctgcttattaaaatgaattatgaacaaatatatttcttttaattcttatgcagttctctgagatatgtattccagtttacaaacagaagctggacctcggagaggggaaacgattctcccaaaattgtgtagccaagtggaagaaacattggaatctaggtgtgattccagactcttccactgtcccatattagtttcacaccagataattttctctgatcagacgttaggaagatgttgaaaacacctaaggaatggggcaggggtgatgaacagatatacctgaagcaggagggaagggaaggtttttatatgatgatgttcactggagcatcattgacatcatagacaaagcagtctaacaacagaggaaaggtatttcaaggccgtgaaccttcaaatctgtgtttgtaaaggctatatatggtcttttccagtggttctcaaacttcagcatgagttgcaagcgccgtcagagcttgccaagacacaattgttgggccttacctggagcttctgattcagcaggactgcggtcccaaaataggcatgtctaacaagctcccaggtgatgctgctgatcccaggatcacactttgaaaaccactggtctaatttagcctgcacaggtgatgggttctacttctaaaaatgagggatgaatgcatttggctttagattgctgaactagggattcctcctccgggaaaaatgggattcgaaccctttgaggagactcttcttcagagtggattatttaaaa

SEQ ID NO: 77446 - DNA, 2880 bp, Homo sapiens
ccctataggcagtctttagctctcatggattgggagctgggaaaggaatgagaagacagaagtcagagacaagaagaggctaacatgactgataccactataatttagtggatcagtgtctttcaatgatgtgactgtggacttcactcaggaggagtggcagcacctggatcatgctcagaagactctatatatggatgtgatgttggaaaactattgccacctcatctctgtggggtgtcacatgaccaaacctgatgtgatcctcaagttggaacgaggagaagagccatggacatcatttgcaggtcatacctgcttggaagaaaactggaaagctgaagactttttagtgaaattcaaggaacaccaagagaagtattctagatcagttgtaagcatcaaccacaaaaaactggtgaaggagaagagtaaaatatatgaaaagacatttactctaggcaaaaaccctgtgaattcaaaaaatctacctcctgaatatgatactcatggaaggattttgaaaaatgtttcagaattaatcatcagtaatctaaatcctgcaagaaagagacttagtgagtataatggatatgggaaatcactcctgagtactaaacaagagactactcatcctgaagtcaaatcccataatcaaagtgccagagctttcagtcataatgaagttcttatgcagtatcagaaaacggaaactccagcacagtcatttggatataatgactgtgagaaatcattccttcaaaggggaggcctgattacacatagtagaccttacaaaggagaaaacccatctgtatataataaaaaaagaagagcaaccaatattgaaaaaaaacatacatgcaatgaatgtgggaaatctttctgcaggaaatcagtattgattctgcatcagggaattcactcagaagaaaaaccctatcaatgtcatcaatgtggaaatgcatttagaaggaaatcatatctcattgatcatcagaggactcacacaggagagaaaccctttgtttgcaatgaatgtggtaagtccttccgcctcaagacagccctcactgatcatcagagaacacacacaggggagaaatcgtatgaatgtctgcaatgtaggaatgccttcagattgaagtcacacctcattcgtcatcagagaactcacacgggagagaaaccatatgagtgtaatgactgtgggaagtccttccgccagaagacaacactctctctacatcagagaatccatacaggtgagaaaccctatatttgtaaagaatgtgggaagtcctttcaccagaaggcaaatcttactgtacatcagagaactcatacaggggaaaagccctatatttgtaatgaatgtgggaaatccttctcccagaagacaacccttgctcttcatgagaaaactcataatgaggagaaaccctatatttgtagtgaatgtggaaagtccttccgccagaagacaacccttgtagcacatcagagaacacatacaggggagaaatcttatgaatgtcctcactgtgggaaggcctttagaatgaagtcatacctcattgatcatcaccgaactcacacaggagagaaaccatatgaatgtaatgaatgtggtaaatcattcagtcaaaagacaaatctcaatctacatcagagaattcatacaggggagaaaccctatgtttgtaatgaatgtgggaagtcctttcgccagaaagcaaccctcactgtacatcagaaaatacataccggccagaaatcctatgaatgtcctcagtgtgggaaagcctttagcaggaagtcatatctcattcatcatcaaagaactcatacgggagagaaaccatataaatgtagtgaatgtggaaagtgcttccgccagaagacaaatcttattgtacatcagagaactcacacaggctggagtacaatggtgcgatctcggctgactgcaacctctgcctcccgggttcaagcaattctcctgcctcagcctcccaagtagctgggattacaggtacgtgccaccacacccggctaattttgtatttttagtagagaaggggtttcctatgttggccaggctggtctcacaaactcctgatctcaagtgattggcctgcctcagcctcccaaagtgctgggattacaggcatgagccactgcggttggccaagtagagcaatttttttttttttttgagacggagtctcggtctatcacccaggctggaatgcagtggcgtgatctcaactcactgcaagctccacctcctgggttcatgccattctcctgcctcagctcccagctacttggaggctgaggcaggagaatggcgtgaatcgggaggcggagcttgcagtgagccgagatcgcgccactgctctccagcgtgggtgacagagcgagactccgtatcaaaaaaaaaaaaaaaattgtaacaagccagtcagagaacattggaataaataaataatacttcaatgcaaagacatcaatatacatccataagcaacatgcctaaagagggaaccgtgatctcaccaaatgaacaaagcaagaaaccagtaactcatcctaacaagatggcaatatgtgagctgtctgataaaaattgaaaatagcagttctaaagaaacttagtgatttccgagataagactgaaaagcaattcagaaatgtatcaaagaaatttaacaaagaaattgaaaaaaataaaaaaacggaaatcaaatcttgcaactaaaaaatgaaatttctaaacagaattcattataggctctcaatggcagaatgggtccaatagaagaaagaatccatgagctccaaaataagttatttgaaaacacaaagtcagagggg

SEQ ID NO: 77447 - DNA, 490 bp, Homo sapiens
ccctataggcagtctttagctctcatggattgggagctgggaaaggaatgagaagacagaagtcagagacaagaagaggctaacatgactgataccactataatttagtggatcagtgtctttcaatgatgtgactgtggacttcactcaggaggagtggcagcacctggatcatgctcagaagactctatatatggatgtgatgttggaaaactattgccacctcatctctgtggggtgtcacatgaccaaacctgatgtgatcctcaagttggaacgaggagaagagccatggacatcatttgcaggtcatacctgcttgggtggagaggatggcctaactggatgtttatcctagcgtcaacccaccaaagatttggggaacatgtgagtcacattctctgggacattctactcccctttgattttgcatttccagacatttcagtggctaccacaaaaaataaaaagtatctgtggcaaaaaaaaa

SEQ ID NO: 77448 - DNA, 2962 bp, Homo sapiens
gattacagttccatccattctagggatcagtgtctttcaatgatgtgactgtggacttcactcaggaggagtggcagcacctggatcatgctcagaagactctatatatggatgtgatgttggaaaactattgccacctcatctctgtggggtgtcacatgaccaaacctgatgtgatcctcaagttggaacgaggagaagagccatggacatcatttgcaggtcatacctgcttggaagaaaactggaaagctgaagactttttagtgaaattcaaggaacaccaagagaagtattctagatcagttgtaagcatcaaccacaaaaaactggtgaaggagaagagtaaaatatatgaaaagacatttactctaggcaaaaaccctgtgaattcaaaaaatctacctcctgaatatgatactcatggaaggattttgaaaaatgtttcagaattaatcatcagtaatctaaatcctgcaagaaagagacttagtgagtataatggatatgggaaatcactcctgagtactaaacaagagactactcatcctgaagtcaaatcccataatcaaagtgccagagctttcagtcataatgaagttcttatgcagtatcagaaaacggaaactccagcacagtcatttggatataatgactgtgagaaatcattccttcaaaggggaggcctgattacacatagtagaccttacaaaggagaaaacccatctgtatataataaaagtgccagagctttcagtcataatgaagtttttatgcagtatcagaaaacggaaactccagcacagtcatttggatataatgactgtgagaaatcattccttcaaaggggaggcctgattacacatagtagaccttacaaaggagaaaacccatctgtatataataaaaaaagaagagcaaccaatattgaaaaaaaacatacatgcaatgaatgtgggaaatctttctgcaggaaatcagtattgattctgcatcagggaattcactcagaagaaaaaccctatcaatgtcatcaatgtggaaatgcatttagaaggaaatcatatctcattgatcatcagaggactcacacaggagagaaaccctttgtttgcaatgaatgtggtaagtccttccgcctcaagacagccctcactgatcatcagagaacacacacaggggagaaatcgtatgaatgtctgcaatgtaggaatgccttcagattgaagtcacacctcattcgtcatcagagaactcacacgggagagaaaccatatgagtgtaatgactgtgggaagtccttccgccagaagacaacactctctctacatcagagaatccatacaggtgagaaaccctatatttgtaaagaatgtgggaagtcctttcaccagaaggcaaatcttactgtacatcagagaactcatacaggggaaaagccctatatttgtaatgaatgtgggaaatccttctcccagaagacaacccttgctcttcatgagaaaactcataatgaggagaaaccctatatttgtagtgaatgtggaaagtccttccgccagaagacaacccttgtagcacatcagagaacacatacaggggagaaatcttatgaatgtcctcactgtgggaaggcctttagaatgaagtcatacctcattgatcatcaccgaactcacacaggagagaaaccatatgaatgtaatgaatgtggtaaatcattcagtcaaaagacaaatctcaatctacatcagagaattcatacaggggagaaaccctatgtttgtaatgaatgtgggaagtcctttcgccagaaagcaaccctcactgtacatcagaaaatacataccggccagaaatcctatgaatgtcctcagtgtgggaaagcctttagcaggaagtcatatctcattcatcatcaaagaactcatacgggagagaaaccatataaatgtagtgaatgtggaaagtgcttccgccagaagacaaatcttattgtacatcagagaactcacacaggctggagtacaatggtgcgatctcggctgactgcaacctctgcctcccgggttcaagcaattctcctgcctcagcctcccaagtagctgggattacaggtacgtgccaccacacccggctaattttgtatttttagtagagaaggggtttcctatgttggccaggctggtctcacaaactcctgatctcaagtgattggcctgcctcagcctcccaaagtgctgggattacaggcatgagccactgcggttggccaagtagagcaatttttttttttttttgagacggagtctcggtctatcacccaggctggaatgcagtggcgtgatctcaactcactgcaagctccacctcctgggttcatgccattctcctgcctcagctcccagctacttggaggctgaggcaggagaatggcgtgaatcgggaggcggagcttgcagtgagccgagatcgcgccactgctctccagcgtgggtgacagagcgagactccgtatcaaaaaaaaaaaaaaaattgtaacaagccagtcagagaacattggaataaataaataatacttcaatgcaaagacatcaatatacatccataagcaacatgcctaaagagggaaccgtgatctcaccaaatgaacaaagcaagaaaccagtaactcatcctaacaagatggcaatatgtgagctgtctgataaaaattgaaaatagcagttctaaagaaacttagtgatttccgagataagactgaaaagcaattcagaaatgtatcaaagaaatttaacaaagaaattgaaaaaaataaaaaaacggaaatcaaatcttgcaactaaaaaatgaaatttctaaacagaattcattataggctctcaatggcagaatgggtccaatagaagaaagaatccatgagctccaaaataagttatttgaaaacacaaagtcagagggg

SEQ ID NO: 77449 - DNA, 586 bp, Homo sapiens
aaatgactaaatatttttatgtttctgtcagtatatggaatttttcttaaaggcggtcaataaataaaattctgtttatttaaaagaaaaaaagaaacagatccagacctatttagaattaaacggccatgatatctgcagtttattatctgtggttcagcaatataataatatcagtagccacagtgaccacaactatatatatatatatatagttcatgaatctggcatgttttctataagtctgaaagaatttcaaaaaaaaaatgttgaggcagagcagctacctgaggtagccaccaaacctacgtgcagagatcagaagaacacaaatacagtaaacgtgctgagggccaggggcagctgttcagagttgctgttctctgctgtctgctttggtgttccagaagggtgtggccccagtattagcttggcatggtggcgtacacctgtagtcccagctgctccaagaggctgaggcaggaagatagtttgagcccatgagttcaaggctgtagtgaagtatgatcctgcactccactccagcctgggcaacatagtgagaccctgtctcttaaaaaaaaaa

SEQ ID NO: 77450 - DNA, 289 bp, Homo sapiens
ggcaggatcagatgatacaccgggatgtgttttcagtgtgatggaaagattgtttccagtgatcttagtgatggtaaagatagaggagaagacacctaagaaatgtgtttttctggagttatattagtatttttgttgccagtatctaatagtgtttccagaactattctggaagcaagccagatctcgtaaacaataattaacagagctttttacctagctttattcattagagtaactaacaggagtttctatataaacaactccaaaaccctagtggcttattaaa

SEQ ID NO: 77451 - DNA, 818 bp, Homo sapiens
  misc_feature (699)..(699): n is a, c, g, or t
gcgccgtgcgggatgctgaccgtacccaggcgggagccgccgcgccgccgcctggcgctgcacctgggcccggcccggccgccaattggacggctcggggcgaccccgctgtatcgcgagacgagattggcagcggcggggcctcaagtgcccccgcgctggctttgtatgcggagccgcctgccggtcctttaacaatgggcggcgcgagcgtccaggcgctgggctctagctgaggccggcgcttagcggcccactgtccgcagcatgagcggggccggcgtccgccgcacgacggcggggctggggctgtgagggccgcggttccggactcgagttgccgcgtcgggctgggcgcgccgccgggtcccatggagctggaggggcagtggtggcgaggacagctggccgccgatattcaccaagcgcttcgctacaaggagctgaagttgccctcctataaaggccagtcccctcagttaagtctcagacggtattttgctgacttgattgccattgtgagcaatcgcttcacactctgcccttctgcccgccatcttgctgtctatttactggacctgtttatggaccgctatgacatctctatccagcagctgcatttagttgcgctttcctgcctgcttctagcaagtaagtatgaacgaaacacgaagacagctgtgcctaagtctggagcangtcaacagcctgggtttgttgactaactattgaatctagtttttaccaaacacaaattgtgcctacatattggacactcattatctcagaaacctttcaaggggaacctctggcttcca

SEQ ID NO: 77452 - DNA, 2139 bp, Homo sapiens
agcggggctggccgctccagcctcccggcccgcttgctggctgcccagctgctaggacagtttgcagagcagtggcgtgcggagcggcggcggaccacctccaggggctaagtgatggatcttgtactccgtgttgcagattactatttttttacaccatacgtgtatccagccacatggccagaagatgacatcttccgacaagctattagtcttctgattgtaacaaatgttggtgcttacatcctttatttcttctgtgcaacactgagctattattttgtcttcgatcatgcattaatgaaacatccacaatttttaaagaatcaagtccgtcgagagattaagtttactgtccaggcattgccatggataagtattcttactgttgcactgttcttgctggagataagaggttacagcaaattacatgatgacctaggagagtttccatatggattgtttgaacttgtcgttagtataatatctttcctctttttcactgacatgttcatctactggattcacagaggccttcatcatagactggtatataagcgcctacataaacctcaccatatttggaagattcctactccatttgcaagtcatgcttttcaccctattgatggctttcttcagagtctaccttaccatatatacccttttatctttccattacacaaggtggtttatttaagtctgtacatcttggttaatatctggacaatttccattcatgacggtgattttcgtgtcccccaaatcttacagccatttattaatggctcagctcatcatacagaccaccatatgttctttgactataattatggacaatatttcactttgtgggataggattggcggctcattcaaaaatccttcatcctttgaggggaagggaccgctcagttatgtgaaggagatgacagagggaaagcgcagcagccattcaggaaatggctgtaagaatgaaaaattattcaatggagagtttacaaagactgaatagattattgcccagttattcttaagtaaggacaaagaaggaaatatcatcgtatttcttttttttaataaggaaaaaataatctccatacagtcaagatacatagtaaatggtatcatttggaaatcagcatcgtgggcactgctgaggaatgatcctagtggtaggtcagaagaagatgctgtgaacaccaggactttaatcttatgcttaaaatgccagatgttgttcgggggacaacttgtatctttctagcagcagatctgtagtttgtatagcctcaacaacaattttaaataagatggagaataaattattgaggggactaggctatatgcatttgccttcatccacccatgtttattaagaatcattgtgcttaataataccaagactaagcaccataaccaagaaatactaatgtaaagattgtttcttgtttcaggaatggttaattcttcaacgttggtatgataatgataacttgttttgacttgaataaagtactacatcagtgtggaaaaaaattctgatacattagcagctatgtaaatgacctaattgatagcaggtgtaataagactatcgtcttcctacacataggaggctcattctctggacacactatcacctattacattttactgattaacaaataaattggaatttaaaaatatcgatatcaccatgatttaatccagatctgggattatgtagctaaacattgtgatgattattatttaaaaccattatttaataagagtaaaaatatgtgaatctggatatatttaaaaaaagaaatttgatgcccagataatatattaggcactactgattttttagttaaattgatgcactacacttttgatgtttgaagttacaaacctgtaatttttttgtaaaggaaataattgccaaatacctaggcccattgctgacgattagttctaaaatcttattcctcctcttctcccctcacttttccctacttcctctgcaaaaagatttaacaaatacattcataaggaaatgtgtgttgtaacaaatatattgcaaaaacatagtttgtaaaggcattctataagctatttatgtaaaatcaataaaagttgatcataattaaactgt

SEQ ID NO: 77453 - DNA, 2246 bp, Homo sapiens
gggccggggggcgatggaataaaagaagatggagagacttcagcgcctgggactcgggtgggcgaggcggaaggtgtcctcgcagcacggcttttctccgcgccgcggttggttagcgagtgccctctgggtgctaggcgttgggcggatggtaggatcgcggtagcatacggatccgagtcctgcgccgagtgagaggagaggctggcaggggctaagtgatggatcttgtactccgtgttgcagattactatttttttacaccatacgtgtatccagccacatggccagaagatgacatcttccgacaagctattagtcttctgattgtaacaaatgttggtgcttacatcctttatttcttctgtgcaacactgagctattattttgtcttcgatcatgcattaatgaaacatccacaatttttaaagaatcaagtccgtcgagagattaagtttactgtccaggcattgccatggataagtattcttactgttgcactgttcttgctggagataagaggttacagcaaattacatgatgacctaggagagtttccatatggattgtttgaacttgtcgttagtataatatctttcctctttttcactgacatgttcatctactggattcacagaggccttcatcatagactggtatataagcgcctacataaacctcaccatatttggaagattcctactccatttgcaagtcatgcttttcaccctattgatggctttcttcagagtctaccttaccatatatacccttttatctttccattacacaaggtggtttatttaagtctgtacatcttggttaatatctggacaatttccattcatgacggtgattttcgtgtcccccaaatcttacagccatttattaatggctcagctcatcatacagaccaccatatgttctttgactataattatggacaatatttcactttgtgggataggattggcggctcattcaaaaatccttcatcctttgaggggaagggaccgctcagttatgtgaaggagatgacagagggaaagcgcagcagccattcaggaaatggctgtaagaatgaaaaattattcaatggagagtttacaaagactgaatagattattgcccagttattcttaagtaaggacaaagaaggaaatatcatcgtatttcttttttttaataaggaaaaaataatctccatacagtcaagatacatagtaaatggtatcatttggaaatcagcatcgtgggcactgctgaggaatgatcctagtggtaggtcagaagaagatgctgtgaacaccaggactttaatcttatgcttaaaatgccagatgttgttcgggggacaacttgtatctttctagcagcagatctgtagtttgtatagcctcaacaacaattttaaataagatggagaataaattattgaggggactaggctatatgcatttgccttcatccacccatgtttattaagaatcattgtgcttaataataccaagactaagcaccataaccaagaaatactaatgtaaagattgtttcttgtttcaggaatggttaattcttcaacgttggtatgataatgataacttgttttgacttgaataaagtactacatcagtgtggaaaaaaattctgatacattagcagctatgtaaatgacctaattgatagcaggtgtaataagactatcgtcttcctacacataggaggctcattctctggacacactatcacctattacattttactgattaacaaataaattggaatttaaaaatatcgatatcaccatgatttaatccagatctgggattatgtagctaaacattgtgatgattattatttaaaaccattatttaataagagtaaaaatatgtgaatctggatatatttaaaaaaagaaatttgatgcccagataatatattaggcactactgattttttagttaaattgatgcactacacttttgatgtttgaagttacaaacctgtaatttttttgtaaaggaaataattgccaaatacctaggcccattgctgacgattagttctaaaatcttattcctcctcttctcccctcacttttccctacttcctctgcaaaaagatttaacaaatacattcataaggaaatgtgtgttgtaacaaatatattgcaaaaacatagtttgtaaaggcattctataagctatttatgtaaaatcaataaaagttgatcataattaaactgt

SEQ ID NO: 77454 - DNA, 2663 bp, Homo sapiens
tttggcctggaggcaatcggcacgaggggcgtgcggagcggcggcggaccacctccaggggctaagtgatggatcttgtactccgtgttgcagattactatttttttacaccatacgtgtatccagccacatggccagaagatgacatcttccgacaagctattagtcttctgattgtaacaaatgttggtgcttacatcctttatttcttctgtgcaacactgagctattattttgtcttcgatcatgcattaatgaaacatccacaatttttaaagaatcaagtccgtcgagagattaagtttactgtccaggcattgccatggataagtattcttactgttgcactgttcttgctggagataagaggttacagcaaattacatgatgacctaggagagtttccatatggattgtttgaacttgtcgttagtataatatctttcctctttttcactgacatgttcatctactggattcacagaggccttcatcatagactggtatataaggtaaagtcatttgtggtgaaaagagaaaaaaggttacacatttcagcaatgtatgattataaattctgttctctatttccaagaatttcctctacccatattaaatgtctaagtagccataatcataacaggtacagggtgcattttgttcatattcttctttatgggtctaaggggctgtcttaaaattcgtctgttccggtaacaggtacacatggacttacagagggaacaatagacattagagactccagaaggtgggaggatgggagaggagtgagggatgagacgctccctattgggtacaatgtgcactcttcaggtgctaggtacactaaaagccagacttcaccactgtgcagtatatccatggaacaccactgcacttgtactcataaatccatataaaattatactgttttagggcgaagaaggacattttgtagaataaataattttgctgatctctacaggatttgttaggttgtttccaacatgagtgtgagaagctaagttgaatgttgcacggggtaaagtttgcagtgctaattgtgtccttttctcctgcagcgcctacataaacctcaccatatttggaagattcctactccatttgcaagtcatgcttttcaccctattgatggctttcttcagagtctaccttaccatatatacccttttatctttccattacacaaggtggtttatttaagtctgtacatcttggttaatatctggacaatttccattcatgacggtgattttcgtgtcccccaaatcttacagccatttattaatggctcagctcatcatacagaccaccatatgttctttgactataattatggacaatatttcactttgtgggataggattggcggctcattcaaaaatccttcatcctttgaggggaagggaccgctcagttatgtgaaggagatgacagagggaaagcgcagcagccattcaggaaatggctgtaagaatgaaaaattattcaatggagagtttacaaagactgaatagattattgcccagttattcttaagtaaggacaaagaaggaaatatcatcgtatttcttttttttaataaggaaaaaataatctccatacagtcaagatacatagtaaatggtatcatttggaaatcagcatcgtgggcactgctgaggaatgatcctagtggtaggtcagaagaagatgctgtgaacaccaggactttaatcttatgcttaaaatgccagatgttgttcgggggacaacttgtatctttctagcagcagatctgtagtttgtatagcctcaacaacaattttaaataagatggagaataaattattgaggggactaggctatatgcatttgccttcatccacccatgtttattaagaatcattgtgcttaataataccaagactaagcaccataaccaagaaatactaatgtaaagattgtttcttgtttcaggaatggttaattcttcaacgttggtatgataatgataacttgttttgacttgaataaagtactacatcagtgtggaaaaaaattctgatacattagcagctatgtaaatgacctaattgatagcaggtgtaataagactatcgtcttcctacacataggaggctcattctctggacacactatcacctattacattttactgattaacaaataaattggaatttaaaaatatcgatatcaccatgatttaatccagatctgggattatgtagctaaacattgtgatgattattatttaaaaccattatttaataagagtaaaaatatgtgaatctggatatatttaaaaaaagaaatttgatgcccagataatatattaggcactactgattttttagttaaattgatgcactacacttttgatgtttgaagttacaaacctgtaatttttttgtaaaggaaataattgccaaatacctaggcccattgctgacgattagttctaaaatcttattcctcctcttctcccctcacttttccctacttcctctgcaaaaagatttaacaaatacattcataaggaaatgtgtgttgtaacaaatatattgcaaaaacatagtttgtaaaggcattctataagctatttatgtaaaatcaataaaagttgatcataattaaactgt

SEQ ID NO: 77455 - DNA, 889 bp, Homo sapiens
agcggggctggccgctccagcctcccggcccgcttgctggctgcccagctgctaggacagtttgcagagcagtggcgtgcggagcggcggcggaccacctccaggggctaagtgatggatcttgtactccgtgttgcagattactatttttttacaccatacgtgtatccagccacatggccagaagatgacatcttccgacaagctattagtcttctgattgtaacaaatgttggtgcttacatcctttatttcttctgtgcaacactgagctattattttgtcttcgatcatgcattaatgaaacatccacaatttttaaagaatcaagtccgtcgagagattaagtttactgtccaggcattgccatggataagtattcttactgttgcactgttcttgctggagataagaggttacagcaaattacatgatgacctaggagagtttccatatggtaagtaaataacacgagtgtcaggaagagagtagtctaagcacaggttagtttccttaaaaaaacaagtctgcccttttttttttcatcttttaaaataattacaaattattcagttgttttttaatgttctattttcatgtgttcatgtcttgccacatgtgcatttctttagtttttctatcaatctgaaagtctgctgtagatgagattgtgtctggcggaagattggagtgatcagagatgggtccttgcatttgttttctattaattattgaattcaaccttctaaaaaaaacttgagtagcttatgtcattgctgaaagttaaaaacagatttttaaaatgcattattctgcttcttagaaactgtaactcttctggcatacaaccacccacttttctgtgcctgtatacttcattgtttacatt

SEQ ID NO: 77456 - DNA, 2709 bp, Homo sapiens
agcggggctggccgctccagcctcccggcccgcttgctggctgcccagctgctaggacagtttgcagagcagtggcgtgcggagcggcggcggaccacctccaggggctaagtgatggatcttgtactccgtgttgcagattactatttttttacaccatacgtgtatccagccacatggccagaagatgacatcttccgacaagctattagtcttctgattgtaacaaatgttggtgcttacatcctttatttcttctgtgcaacactgagctattattttgtcttcgatcatgcattaatgaaacatccacaatttttaaagaatcaagtccgtcgagagattaagtttactgtccaggcattgccatggataagtattcttactgttgcactgttcttgctggagataagaggttacagcaaattacatgatgacctaggagagtttccatatggattgtttgaacttgtcgttagtataatatctttcctctttttcactgacatgttcatctactggattcacagaggccttcatcatagactggtatataaggtaaagtcatttgtggtgaaaagagaaaaaaggttacacatttcagcaatgtatgattataaattctgttctctatttccaagaatttcctctacccatattaaatgtctaagtagccataatcataacaggtacagggtgcattttgttcatattcttctttatgggtctaaggggctgtcttaaaattcgtctgttccggtaacaggtacacatggacttacagagggaacaatagacattagagactccagaaggtgggaggatgggagaggagtgagggatgagacgctccctattgggtacaatgtgcactcttcaggtgctaggtacactaaaagccagacttcaccactgtgcagtatatccatggaacaccactgcacttgtactcataaatccatataaaattatactgttttagggcgaagaaggacattttgtagaataaataattttgctgatctctacaggatttgttaggttgtttccaacatgagtgtgagaagctaagttgaatgttgcacggggtaaagtttgcagtgctaattgtgtccttttctcctgcagcgcctacataaacctcaccatatttggaagattcctactccatttgcaagtcatgcttttcaccctattgatggctttcttcagagtctaccttaccatatatacccttttatctttccattacacaaggtggtttatttaagtctgtacatcttggttaatatctggacaatttccattcatgacggtgattttcgtgtcccccaaatcttacagccatttattaatggctcagctcatcatacagaccaccatatgttctttgactataattatggacaatatttcactttgtgggataggattggcggctcattcaaaaatccttcatcctttgaggggaagggaccgctcagttatgtgaaggagatgacagagggaaagcgcagcagccattcaggaaatggctgtaagaatgaaaaattattcaatggagagtttacaaagactgaatagattattgcccagttattcttaagtaaggacaaagaaggaaatatcatcgtatttcttttttttaataaggaaaaaataatctccatacagtcaagatacatagtaaatggtatcatttggaaatcagcatcgtgggcactgctgaggaatgatcctagtggtaggtcagaagaagatgctgtgaacaccaggactttaatcttatgcttaaaatgccagatgttgttcgggggacaacttgtatctttctagcagcagatctgtagtttgtatagcctcaacaacaattttaaataagatggagaataaattattgaggggactaggctatatgcatttgccttcatccacccatgtttattaagaatcattgtgcttaataataccaagactaagcaccataaccaagaaatactaatgtaaagattgtttcttgtttcaggaatggttaattcttcaacgttggtatgataatgataacttgttttgacttgaataaagtactacatcagtgtggaaaaaaattctgatacattagcagctatgtaaatgacctaattgatagcaggtgtaataagactatcgtcttcctacacataggaggctcattctctggacacactatcacctattacattttactgattaacaaataaattggaatttaaaaatatcgatatcaccatgatttaatccagatctgggattatgtagctaaacattgtgatgattattatttaaaaccattatttaataagagtaaaaatatgtgaatctggatatatttaaaaaaagaaatttgatgcccagataatatattaggcactactgattttttagttaaattgatgcactacacttttgatgtttgaagttacaaacctgtaatttttttgtaaaggaaataattgccaaatacctaggcccattgctgacgattagttctaaaatcttattcctcctcttctcccctcacttttccctacttcctctgcaaaaagatttaacaaatacattcataaggaaatgtgtgttgtaacaaatatattgcaaaaacatagtttgtaaaggcattctataagctatttatgtaaaatcaataaaagttgatcataattaaactgt

SEQ ID NO: 77457 - DNA, 2084 bp, Homo sapiens
agcggggctggccgctccagcctcccggcccgcttgctggctgcccagctgctaggacagtttgcagagcagtggcgtgcggagcggcggcggaccacctccaggggctaagtgatggatcttgtactccgtgttgcagattactatttttttacaccatacgtgtatccagccacatggccagaagatgacatcttccgacaagctattagtcttctgattgtaacaaatgttggtgcttacatcctttatttcttctgtgcaacactgagctattattttgtcttcgatcatgcattaatgaaacatccacaatttttaaagaatcaagtccgtcgagagattaagtttactgtccaggcattgccatggataagtattcttactgttgcactgttcttgctggagataagaggttacagcaaattacatgatgacctaggagagtttccatatggattgtttgaacttgtcgttagtataatatctttcctctttttcactgacatgttcatctactggattcacagaggccttcatcatagactggtatataagcgcctacataaacctcaccatatttggaagattcctactccatttgcaagtcatgcttttcaccctattgatggctttcttcagagtctaccttaccatatatacccttttatctttccattacacaaggtggtttatttaagtctgtacatcttggttaatatctggacaatttccattcatgacggtgattttcgtgtcccccaaatcttacagccatttattaatggctcagctcatcatacagaccaccatatgttctttgactataattatggacaatatttcactttgtgggataggattggcggctcattcaaaaatccttcatcctttgaggggaagggaccgctcagttatgtgaaggagatgacagagggaaagcgcagcagccattcaggaaatggctgtaagaatgaaaaattattcaatggagagtttacaaagactgaatagattattgcccagttattcttaagtaaggacaaagaaggaaatatcatcgtatttcttttttttaataaggaacatcgtgggcactgctgaggaatgatcctagtggtaggtcagaagaagatgctgtgaacaccaggactttaatcttatgcttaaaatgccagatgttgttcgggggacaacttgtatctttctagcagcagatctgtagtttgtatagcctcaacaacaattttaaataagatggagaataaattattgaggggactaggctatatgcatttgccttcatccacccatgtttattaagaatcattgtgcttaataataccaagactaagcaccataaccaagaaatactaatgtaaagattgtttcttgtttcaggaatggttaattcttcaacgttggtatgataatgataacttgttttgacttgaataaagtactacatcagtgtggaaaaaaattctgatacattagcagctatgtaaatgacctaattgatagcaggtgtaataagactatcgtcttcctacacataggaggctcattctctggacacactatcacctattacattttactgattaacaaataaattggaatttaaaaatatcgatatcaccatgatttaatccagatctgggattatgtagctaaacattgtgatgattattatttaaaaccattatttaataagagtaaaaatatgtgaatctggatatatttaaaaaaagaaatttgatgcccagataatatattaggcactactgattttttagttaaattgatgcactacacttttgatgtttgaagttacaaacctgtaatttttttgtaaaggaaataattgccaaatacctaggcccattgctgacgattagttctaaaatcttattcctcctcttctcccctcacttttccctacttcctctgcaaaaagatttaacaaatacattcataaggaaatgtgtgttgtaacaaatatattgcaaaaacatagtttgtaaaggcattctataagctatttatgtaaaatcaataaaagttgatcataattaaactgt

SEQ ID NO: 77458 - DNA, 2020 bp, Homo sapiens
tttggcctggaggcaatcggcacgaggggcgtgcggagcggcggcggaccacctccaggggctaagtgatggatcttgtactccgtgttgcagattactatttttttacaccatacgtgtatccagccacatggccagaagatgacatcttccgacaagctattagtcttctgattgtaacaaatgttggtgcttacatcctttatttcttctgtgcaacactgagctattattttgtcttcgatcatgcattaatgaaacatccacaatttttaaagaatcaagtccgtcgagagattaagtttactgtccaggcattgccatggataagtattcttactgttgcactgttcttgctggagataagaggttacagcaaattacatgatgacctaggagagtttccatatgaggccttcatcatagactggtatataagcgcctacataaacctcaccatatttggaagattcctactccatttgcaagtcatgcttttcaccctattgatggctttcttcagagtctaccttaccatatatacccttttatctttccattacacaaggtggtttatttaagtctgtacatcttggttaatatctggacaatttccattcatgacggtgattttcgtgtcccccaaatcttacagccatttattaatggctcagctcatcatacagaccaccatatgttctttgactataattatggacaatatttcactttgtgggataggattggcggctcattcaaaaatccttcatcctttgaggggaagggaccgctcagttatgtgaaggagatgacagagggaaagcgcagcagccattcaggaaatggctgtaagaatgaaaaattattcaatggagagtttacaaagactgaatagattattgcccagttattcttaagtaaggacaaagaaggaaatatcatcgtatttcttttttttaataaggaaaaaataatctccatacagtcaagatacatagtaaatggtatcatttggaaatcagcatcgtgggcactgctgaggaatgatcctagtggtaggtcagaagaagatgctgtgaacaccaggactttaatcttatgcttaaaatgccagatgttgttcgggggacaacttgtatctttctagcagcagatctgtagtttgtatagcctcaacaacaattttaaataagatggagaataaattattgaggggactaggctatatgcatttgccttcatccacccatgtttattaagaatcattgtgcttaataataccaagactaagcaccataaccaagaaatactaatgtaaagattgtttcttgtttcaggaatggttaattcttcaacgttggtatgataatgataacttgttttgacttgaataaagtactacatcagtgtggaaaaaaattctgatacattagcagctatgtaaatgacctaattgatagcaggtgtaataagactatcgtcttcctacacataggaggctcattctctggacacactatcacctattacattttactgattaacaaataaattggaatttaaaaatatcgatatcaccatgatttaatccagatctgggattatgtagctaaacattgtgatgattattatttaaaaccattatttaataagagtaaaaatatgtgaatctggatatatttaaaaaaagaaatttgatgcccagataatatattaggcactactgattttttagttaaattgatgcactacacttttgatgtttgaagttacaaacctgtaatttttttgtaaaggaaataattgccaaatacctaggcccattgctgacgattagttctaaaatcttattcctcctcttctcccctcacttttccctacttcctctgcaaaaagatttaacaaatacattcataaggaaatgtgtgttgtaacaaatatattgcaaaaacatagtttgtaaaggcattctataagctatttatgtaaaatcaataaaagttgatcataattaaactgt

SEQ ID NO: 77459 - DNA, 2086 bp, Homo sapiens
agcggggctggccgctccagcctcccggcccgcttgctggctgcccagctgctaggacagtttgcagagcagtggcgtgcggagcggcggcggaccacctccaggggctaagtgatggatcttgtactccgtgttgcagattactatttttttacaccatacgtgtatccagccacatggccagaagatgacatcttccgacaagctattagtcttctgattgtaacaaatgttggtgcttacatcctttatttcttctgtgcaacactgagctattattttgtcttcgatcatgcattaatgaaacatccacaatttttaaagaatcaagtccgtcgagagattaagtttactgtccaggcattgccatggataagtattcttactgttgcactgttcttgctggagataagaggttacagcaaattacatgatgacctaggagagtttccatatggattgtttgaacttgtcgttagtataatatctttcctctttttcactgacatgttcatctactggattcacagaggccttcatcatagactggtatataagcgcctacataaacctcaccatatttggaagattcctactccatttgcaagtcatgcttttcaccctattgatggctttcttcagagtctaccttaccatatatacccttttatctttccattacacaaggtggtttatttaagtctgtacatcttggttaatatctggacaatttccattcatgacggtgattttcgtgtcccccaaatcttacagccatttattaatggctcagctcatcatacagaccaccatatgttctttgactataattatggacaatatttcactttgtgggataggattggcggctcattcaaaaatccttcatcctttgaggggaagggaccgctcagttatgtgaaggagatgacagagggaaagcgcagcagccattcaggaaatggctgtaagaatgaaaaattattcaatggagagtttacaaagactgaatagattattgcccagttattcttaagtaaggacaaagaaggaaatatcatcgtatttcttttttttaataaggaaaaaataatctccatacagtcaagatacatagtaaatggtatcatttggaaatcagcatcgtgggcactgctgaggaatgatcctagtggtaggtcagaagaagatgctgtgaacaccaggactttaatcttatgcttgtagtttgtatagcctcaacaacaattttaaataagatggagaataaattattgaggggactaggctatatgcatttgccttcatccacccatgtttattaagaatcattgtgcttaataataccaagactaagcaccataaccaagaaatactaatgtaaagattgtttcttgtttcaggaatggttaattcttcaacgttggtatgataatgataacttgttttgacttgaataaagtactacatcagtgtggaaaaaaattctgatacattagcagctatgtaaatgacctaattgatagcaggtgtaataagactatcgtcttcctacacataggaggctcattctctggacacactatcacctattacattttactgattaacaaataaattggaatttaaaaatatcgatatcaccatgatttaatccagatctgggattatgtagctaaacattgtgatgattattatttaaaaccattatttaataagagtaaaaatatgtgaatctggatatatttaaaaaaagaaatttgatgcccagataatatattaggcactactgattttttagttaaattgatgcactacacttttgatgtttgaagttacaaacctgtaatttttttgtaaaggaaataattgccaaatacctaggcccattgctgacgattagttctaaaatcttattcctcctcttctcccctcacttttccctacttcctctgcaaaaagatttaacaaatacattcataaggaaatgtgtgttgtaacaaatatattgcaaaaacatagtttgtaaaggcattctataagctatttatgtaaaatcaataaaagttgatcataattaaactgt

SEQ ID NO: 77460 - DNA, 2170 bp, Homo sapiens
agcggggctggccgctccagcctcccggcccgcttgctggctgcccagctgctaggacagtttgcagagcagtggcgtgcggagcggcggcggaccacctccaggggctaagtgatggatcttgtactccgtgttgcagattactatttttttacaccatacgtgtatccagccacatggccagaagatgacatcttccgacaagctattagtcttctgattgtaacaaatgttggtgcttacatcctttatttcttctgtgcaacactgagctattattttgtcttcgatcatgcattaatgaaacatccacaatttttaaagaatcaagtccgtcgagagattaagtttactgtccaggcattgccatggataagtattcttactgttgcactgttcttgctggagataagaggttacagcaaattacatgatgacctaggagagtttccatatggattgtttgaacttgtcgttagtataatatctttcctctttttcactgacatgttcatctactggattcacagaggccttcatcatagactggtatataagcgcctacataaacctcaccatatttggaagattcctactccatttgcaagtcatgcttttcaccctattgatggctttcttcagagtctaccttaccatatatacccttttatctttccattacacaaggtggtttatttaagtctgtacatcttggttaatatctggacaatttccattcatgacggtgattttcgtgtcccccaaatcttacagccatttattaatggctcagctcatcatacagaccaccatatgttctttgactataattatggacaatatttcactttgtgggataggattggcggctcattcaaaaatccttcatcctttgaggggaagggaccgctcagttatgtgaaggagatgacagagggaaagcgcagcagccattcaggaaatggctgtaagaatgaaaaattattcaatggagagtttacaaagactgaatagattattgcccagttattcttaagtaaggacaaagaaggaaatatcatcgtatttcttttttttaataaggaaaaaataatctccatacagtcaagatacatagtaaatggtatcatttggaaatcagcatcgtgggcactgctgaggaatgatcctagtggtaggtcagaagaagatgctgtgaacaccaggactttaatcttatgcttaaaatgccagatgttgttcgggggacaacttgtatctttctagcagcagatctgtagtttgtatagcctcaacaacaattttaaataagatggagaataaattattgaggggactaggctatatgcatttgccttcatccacccatgtttattaagaatcattgtgcttaataataccaagactaagcaccataaccaagaaatactaatgtaaagattgtttcttgtttcaggaatggttaattcttcaacgttggtatgataatgataacttgttttgacttgaataaagtactacatcagtgtggaaaaaaattctgatacattagcagctatgtaaatgacctaattgatagcaggtgtaataagactatcgtcttcctacacataggaggctcattctctggacacactatcacctattacattttactgattaacaaataaattggaatttaaaaatatcgatatcaccatgatttaatccagatctgggattatgtagctaaacattgtgatgattattatttaaaaccattatttaataagagtaaaaatatgtgaatctggatatatttaaaaaaagaaatttgatgcccagataatatattaggcactactgattttttagttaaattgatgcactacacttttgatgtttgaagttacaaacctgtaatttttttgtaaaggaaataattgccaaatacctaggcccattgctgacgattagttctaaaatcttattcctcctcttctcccctcacttttccctacttcctctgcaaaaagatttaacaaatacattcataaggaaatgtgtgttgtaacaaatatattgcaaaaacatagtttgtaaaggcattctataagctatttatgtaaaatcaataaaagttgatcataattaaactgtatcagttgagtattatagcagcaaaaaaaat

SEQ ID NO: 77461 - DNA, 2085 bp, Homo sapiens
agcggggctggccgctccagcctcccggcccgcttgctggctgcccagctgctaggacagtttgcagagcagtggcgtgcggagcggcggcggaccacctccaggggctaagtgatggatcttgtactccgtgttgcagattactatttttttacaccatacgtgtatccagccacatggccagaagatgacatcttccgacaagctattagtcttctgattgtaacaaatgttggtgcttacatcctttatttcttctgtgcaacactgagctattattttgtcttcgatcatgcattaatgaaacatccacaatttttaaagaatcaagtccgtcgagagattaagtttactgtccaggcattgccatggataagtattcttactgttgcactgttcttgctggagataagaggttacagcaaattacatgatgacctaggagagtttccatatggattgtttgaacttgtcgttagtataatatctttcctctttttcactgacatgttcatctactggattcacagaggccttcatcatagactggtatataagcgcctacataaacctcaccatatttggaagattcctactccatttgcaagtcatgcttttcaccctattgatggctttcttcagagtctaccttaccatatatacccttttatctttccattacacaaggtggtttatttaagtctgtacatcttggttaatatctggacaatttccattcatgacggtgattttcgtgtcccccaaatcttacagccatttattaatggctcagctcatcatacagaccaccatatgttctttgactataattatggacaatatttcactttgtgggataggattggcggctcattcaaaaatccttcatcctttgaggggaagggaccgctcagttatgtgaaggagatgacagagggaaagcgcagcagccattcaggaaatggctgtaagaatgaaaaattattcaatggagagtttacaaagactgaatagattattgcccagttattcttaagtaaggacaaagaaggaaatatcatcgtatttcttttttttaataaggaaaaaataatctccatacagtcaagatacatagtaaatggtatcatttggaaatcagcatcgtgggcactgctgaggaatgatcctagtggtaggtcagaagaagatgctgtgaacaccaggactttaatcttatgcttaaaatgccagatgttgttcgggggacaacttgtatctttctagcagcagatctgtagtttgtatagcctcaacaacaattttaaataagatggagaataaattattgaggggactaggctatatgcatttgccttcatccacccatgtttattaagaatcattgtgcttaataataccaagactaagcaccataaccaagaaatactaatgtaaagattgtttcttgtttcaggaatggttaattcttcaacgttggtatgataatgataacttgttttgacttgaataaagtactacatcagtgtggaaaaaaattctgatacattagcagctatgtaaatgacctaattgatagcaggtgtaataagactatcgtcttcctacacataggaggctcattctctggacacactatcacctattacattttactgattaacaaataaattggaatttaaaaatatcgatatcaccatgatttaatccagatctgggattatgtagctaaacattgtgatgattattatttaaaaccattatttaataagagtaaaaatatgtgaatctggatatatttaaaattgatgcactacacttttgatgtttgaagttacaaacctgtaatttttttgtaaaggaaataattgccaaatacctaggcccattgctgacgattagttctaaaatcttattcctcctcttctcccctcacttttccctacttcctctgcaaaaagatttaacaaatacattcataaggaaatgtgtgttgtaacaaatatattgcaaaaacatagtttgtaaaggcattctataagctatttatgtaaaatcaataaaagttgatcataattaaactgt

SEQ ID NO: 77462 - DNA, 1261 bp, Homo sapiens
cggacgcgtgggtcgcccacgcgtcggaccgctcagttatgtgaaggagatgacagagggaaagcgcagcagccattcaggaaatggctgtaagaatgaaaaattattcaatggagagtttacaaagactgaatagattattgcccagttattcttaagtaaggacaaagaaggaaatatcatcgtatttcttttttttaataaggaaaaaataatctccatacagtcaagatacatagtaaatggtatcatttggaaatcagcatcgtgggcactgctgaggaatgatcctagtggtaggtcagaagaagatgctgtgaacaccaggactttaatcttatgcttaaaatgccagatgttgttcgggggacaacttgtatctttctagcagcagatctgtagtttgtatagcctcaacaacaattttaaataagatggagaataaattattgaggggactaggctatatgcatttgccttcatccacccatgtttattaagaatcattgtgcttaataataccaagactaagcaccataaccaagaaatactaatgtaaagattgtttcttgtttcaggaatggttaattcttcaacgttggtatgataatgataacttgttttgacttgaataaagtactacatcagtgtggaaaaaaattctgatacattagcagctatgtaaatgacctaattgatagcaggtgtaataagactatcgtcttcctacacataggaggctcattctctggacacactatcacctattacattttactgattaacaaataaattggaatttaaaaatatcgatatcaccatgatttaatccagatctgggattatgtagctaaacattgtgatgattattatttaaaaccattatttaataagagtaaaaatatgtgaatctggatatatttaaaaaaagaaatttgatgcccagataatatattaggcactactgattttttagttaaattgatgcactacacttttgatgtttgaagttacaaacctgtaatttttttgtaaaggaaataattgccaaatacctaggcccattgctgacgattagttctaaaatcttattcctcctcttctcccctcacttttccctacttcctctgcaaaaagatttaacaaatacattcataaggaaatgtgtgttgtaacaaatatattgcaaaaacatagtttgtaaaggcattctataagctatttatgtaaaatcaataaaagttgatcataattaaactgt

SEQ ID NO: 77463 - DNA, 782 bp, Homo sapiens
gctgtaggaattcggctctaggaatcattgtgcttaataataccaagactaagcaccataaccaagaaatactaatgtaaagattgtttcttgtttcaggaatggttaattcttcaacgttggtatgataatgataacttgttttgacttgaataaagtactacatcagtgtggaaaaaaattctgatacattagcagctatgtaaatgacctaattgatagcaggtgtaataagactatcgtcttcctacacataggaggctcattctctggacacactatcacctattacattttactgattaacaaataaattggaatttaaaaatatcgatatcaccatgatttaatccagatctgggattatgtagctaaacattgtgatgattattatttaaaaccattatttaataagagtaaaaatatgtgaatctggatatatttaaaaaaagaaatttgatgcccagataatatattaggcactactgattttttagttaaattgatgcactacacttttgatgtttgaagttacaaacctgtaatttttttgtaaaggaaataattgccaaatacctaggcccattgctgacgattagttctaaaatcttattcctcctcttctcccctcacttttccctacttcctctgcaaaaagatttaacaaatacattcataaggaaatgtgtgttgtaacaaatatattgcaaaaacatagtttgtaaaggcattctataagctatttatgtaaaatcaataaaagttgatcataattaaactgt

SEQ ID NO: 77464 - DNA, 728 bp, Homo sapiens
acggatccgagtcctgcgccgagtgagaggagaggctggcaggtagcctggcatcccgaagactggcggcgagggctgggccgggggacctcggggcctggagggctgcgccacctgggagtccgggcggaggggccttccgctcgcgctgggagggatcgcggggccgatagggaggcctggacttgaaggagccgaccgtggacgggcttaaagaaaatgcagtgtttgatgttgggtgttgcagatctcttactcaagggaattctggtctggctgctgaacacgaatgctttacttttcccttcgttctgggagggtttttttcttttaaaggccagaagaatcaggctgaagaactggtcggtatcagaactcctgaccattgcaagcctctgttgctgcggcgtaattagaatgaagggacagcaatctggggctgaggagactgaaaggaaaagggaaataatctgttccttttgcatcataaaaggaaaaataatgtatactgacatccctgtgttacagcagagtagatttggaggtggtgtaagtgaagaaaacaagacctcagtacatagagtttccaaactggaaagtttgtggcagctcggtacttttagaggaaaccctctggaagttatttgtctttatatcactatcattttttaaagtttctaatgattgatacctagtaaataataactgatccttgatcatttacagag

SEQ ID NO: 77465 - DNA, 491 bp, Homo sapiens
gccccctcccctgtaggccccaccctgaatgtgacccgctgcaggtacagcccagactcaagtatgttgcattggtgctgcaatcagtctctaagaaaatgaatgaaaagagcaagaagtcggatcaaaaatacaagccaataacgactttacaagataaaacaagtaattttcaaaattgttggactgaaatgataataatatatacataaacaactctagatatggtctctcttccttttgtccctaaatgctacttttaaattttcttttctgagacccaacctgggcaagacagcaagactccatctctacaaaatgtaaaaatattagctgggcgcagtggcacatacacctgtagtcccagctactagggaggacgaggcgtaaggataccttgacaccaaaagttggaggccaccatgagctatgactgtgccactgcactccagcctagatgacaaaacaagaccttatctctccaaaaaaaa

SEQ ID NO: 77466 - DNA, 381 bp, Homo sapiens
gatgggaaatgtaactcctagctagccaggcacagcccaatcccagctgcatattatgtgtggaattaagtatgaatatttggtggacaactatttatgtctgccactacacttagataaggctccagtaagctgattgtgaggatttgaaaaactacgatgcatagtatcaacaaaattggcagcagtatgaacaattcaggcatgcaactactttttatgcagtaaagacaaaacaaaacatcaaaaatcaaagaaaccaaaacgtgttgagctatttcccattttatggtttagtttccgttttctgtttcttgctgcttgtgttttctttttgttttaagaaacattggaaatacaacctcaggctggcatattatg

SEQ ID NO: 77467 - DNA, 444 bp, Homo sapiens
ctagaagattggaactaagagactataaaatagaggcccccagcacaatgaaatcagtctgctataaaaggcgacacatgccagtttttcctccccaatggcagatgccacaccctaaagcagacagaaggcactgcagcctgtaggagaagcacaacacaaagccggcaggacttggttttgtcttttaaaccacggagaatgctaaaatacctttctaaagcatctttgctgaagataagaagtgcactcgaatttgctcaacttttcatacacacctcaggaaaacaaaataaaagcctgtttagtttcatttaaacatccagggcttaacaaacaaaacaccaattgtcaggggtctgttacaaagtgatgaaataggttcccattacacaaaagcacaatttcaaccacaggttcaaatttccattgtgttccttgcct

SEQ ID NO: 77468 - DNA, 510 bp, Homo sapiens
tattacatatgttttaatggacttttaaaacatgagaatgagaaaggagagaaatgtaaagcagatgagtctgtctaggtcaggatctggttaattctccctgtacctacacaaaagcaccaacccaaacagaaacaataaccaaactcaaattcttcagcctaaatgaggaaattcagtctggtcctaatcaagagagacagggaaagaccaaaaatgataaaggcaggaccaatgagtggaatttgtattgttttaaaatgacttttataatttctccaactccagttgaacaatgagaacacttggacacagggaggggaccatcacacaccggggcctgccagagggtgggggcaagggtagggagggcattaggacaaatacctaatgcatgcaggatttaaaacctagacaatgcattgatgggtgcattaaaccaccatggcacatgtatacctatgtaacaaacctgcacattctgcacttgtatcccagaatttaactaaa

SEQ ID NO: 77469 - DNA, 624 bp, Homo sapiens
tatttgtgtctaatgcatgttttaacatgatagacgtaatgcgttgtgtagctagttttctggaaaagttgatcttttaggaattgtttttcagatcttcaataaatttttttctttaaatttcaaagaaaaaaaataaaagcttaccatccataaattgtcaaattgcatattagctctggagaaactgagacagggtgaccacacagaagaaactagacaatctgaatttgacatgtggccttaaaaggctcctgaagagccatagaggaaagatattcataggtgacaaataatcattttactttttttttttttttttgagacagggtctcactctgtcacccaggctggagtgcagtggctcaatcatggctcactgcagcctcgacctcctgggctcaggcaatcctcccgcctcagcctcccaagtagctgggaccccaggtgtgcaccaccacaactgagcaatttttttgaaaaattatatgtagagatttctaaatacatttttatcagagagacactgtgtgccagccctgccttctaggaacaaagtctgatacaaccagacagttccagggtagtgagaacagcttccccagtctgctctgtggggagact

SEQ ID NO: 77470 - DNA, 552 bp, Homo sapiens
gggagattttccttcagacaattttctcagcctgattttgtcaggtatctaagttgaaccactttaaaaatgtagtaggtattaacaaaaaaaagagtggtcagccaagtgaccgaggtctgctattcggcattgctaagtcatgtctgactgtaggaagaataatacacagaggagagcaatctgcatacacgacaaaatagaatgaatactgaaaaatagcaaatgctgaaatatccttctgcagaatgagaaagaagagcagatgtaagacacaaacatcactttcaaaagataatcaagaacatgaaagatttgtggtattagtggcattattgacaataactttctgtacaaaccatttcttgttcaaattggtttaagtgctagatattaccaaaattatagcatcaggagacattcaaagggatcgtttaagggaaaagaagaaagcaaagcgcattaaaacaaaaaagatgagtatattagtttaattcaatgtaagcactgcttctgtatgataaaagcaacaaacagaaaaagaataacaac

SEQ ID NO: 77471 - DNA, 844 bp, Homo sapiens
atctctgaactgaaggctggaaataaagactgcttccttgggtcaagtgatcctcaggcttgaatcatccaggcaagagtgggtgttccattctcattgatcatcaaatagcagtttctgactagttttagagttttccaattttcttagtccgtgtccttggtgttaattaacaagagcagtttttacagattcacatcaatatagaaaaatgtaaaaagaaagttttgactgaagcaggaagagacaatagatgtgaaattcttttttgttgttgttgtctttttttttttgagacagggtctcactctgttgcccaggctggagtgcaatggcgtgatcatagctcactgcagcctcaacctcctgggcttaaacaatcctcctgcctcagcctcctgaatagctgagactacaggtgtgcactaccacaccaagataattaataggtgtgacattccaaaataagttgtcagagcaagaagcaaatcttaaaaggaaatatcctagccccttggtgactcttaaaagtgcctcacccaaaataggatcataaaagggcagaggaagtggagttcaggaaagaatctatgaagatgttttctctgaagaaagcaattctgttactcctacttctttgagacctttctccttaaactcactagagaggcagtgtcagtgaggcagaccatgaaggcaacttgatttgtgtcccctggtatttggagacaaatctcaagtggagaggctgaagatactggcttgaggcagcagtggggcagtggtggagagagagaacactgaagaccagtctgcacacagccagctgcacttttaccaacca

SEQ ID NO: 77472 - DNA, 1275 bp, Homo sapiens
acctgccttggcctcccaaagtgctgggattacaggtgtgagctaccgtgcccagcctttttttaatttttaatttttattgttttttaccttcaacaaactcacttttactctttacattctttatgtaactctactaccttttccatctgattgaattgctacagatggtgattgatactaataattttggtgtttgtgttcttgaagatccattttttttctttaaatgtatatgtcacggtgtgagaataatgttttctgccattctttctgttaaatgtggggttcagttttccggaagcagggggaatgtctcttgtaggtatctttgttctagcagtggtgtaggttctgcttagcattccatcattcataggaaccgggacacatagattttggtcattatattattcaccttggcctgccataacagaataccactgactacgtggcttaaacagcagaatattttacagttcttggaggctggaaatccgacataaagatgctggcaggtttggtttctggtgagaatcttttcctggtttgccgacagctgccttcttctggtctcacatggcttttgtgctatgcatgcacattcctggtgtctcttcctcttataaggacaccaattctattggattaggttcccactttatgacttcatttaaccataattgcctccttcaaggccctgtatccaaatacaattacactggggttagggcttcaagatacgagttttaaggggcacaattcagtccataacaattgtatttcctgtttatagtgttttcattcatttgttcagccagcatttattgagtatctactatgagccagacagtagggcctggagagtaaaaagtcttcaaagagattactgtttattgtgagagacatagataaacagatgattgcaaaatagtgtaatgataccatgacagtggtggtatgaaagcatctgaaagaggcatataacccatactgggtagggggagtcacagagggcttcccagggaatatcattccagaactgagtcctgaaaaataaggggcagaagataaccaccaaatgaaatgcatgatccttggtttgatcctgaattaaacaaagtataattataggacattttggaataattgggaaaatttcaatagtgactacgtgttaagtaatactgtgtcagtgttatgtattttgggtgtataaacccatgttgttgaaaaaagtttaagaaattaaaaaaatattttacatgtgaaaat

SEQ ID NO: 77473 - DNA, 380 bp, Homo sapiens
aaggagtaatgtcaagaagcacgtttttaaaaaatactttaacaaattacacaaaattattaacaatgccacaaaatatatacaagaaaagccagttggggcaatgggatatggcaaagatgaaaagagaggccattattgaagtcttctaatgaaatgtcagttttctatagataaatgtatgagattgatactagatgagaaggaagttactgaagaagagcagttttagataccttttcatttcatttgccttaaaagtaagaaaactaggagaaaacattagttgtgtagtcatttgataaaccacccctgtaattatgcctctccaggcaaacgtgttacattttctcagtggtaatttatgtagagggtatgcc

SEQ ID NO: 77474 - DNA, 643 bp, Homo sapiens
agagcacatgagcttcataccctgtgctccagctgtgctctcttgcttccagctcttaactttgccccattatttcttggctgggaatgccctttttcgaccctgtgcccccctaatattttctgcacgtggcttacagctacttattctttaagattagaagcccaaagagttactaccactactatgtgttcccattggttatctcaatcataaagacaatagcaattaaggattgcctgctctgtatcaacctcctttttttggtgccccacttaaatattttctaattcctaccttttcttttagccactgatgtggggaatctgttctatgcagacttgaccaacttctatgttgggtgtaactaggccagtacctaggtgggaggtctaagctatggacttcttcactccctggccttaggccttctcttttaatacttgcccctaattttttgtttcaagtgtggcaatttacttggtctgaagtagaatcctactaataaccagagagctgggttgtctgggaaaaaaaatagttgaccttataactaggtggagcttgccagaaggccaagtccactcccaaccatggccttttattcccacaacactctgtcagatctccacttacggctcag

SEQ ID NO: 77475 - DNA, 1197 bp, Homo sapiens
tacctatggcagctgtgttactcttgctacatttcaaattccttgggtaggatgacaccattgtagtttactggattctttcttctctgttttggtttgtgtgcttggtttttttggagagtgactggatgtgtctcctggtatataagccaacgtaaacagaactttcaatagctcatgcttaataaagacagaatggatgcgatcattctgttcaaattaaggtatcctatatgcctatgggttagattaaagggcattactctgatattaaccttgttttttcagtcgttcccagatttcctaaactttccagagaaaatggtcttctccctggctcagcaagaagatgaactttaaacactgagaaactggtcatctccctggctcaaccagaagatgaactttaaacactactctcaatgacttgatgttcccatcactactcctgtcataaagggaggggactcagatattgagaattttatgatagtgtgaactgtctggtatgtcatttaagtaagcccgttgctgaaatattttccatgttattagaaagagctgaagagagggattgagatggcttctttattttttgtcttttgggaattaaaggaacctggttcaacaagggcctacacctaagtctcttgttgtaccagagtacaatttaggactgctcctgaggaaggaattagctagaaatctagagagtaagggtaacagatttacatagaataacagcctcagtatttttggttcctctccagtaaagatcacaaagaatattgctaaatcgctaaaacacctttgcaataacgtaagggcttacaactatataccaatgtagctcagttactaaactggagtaaactaatttctcttgtgtagaaaaattggttggctgtggttttatagcagatctgcaattattaatagttatgccaataatcgtttaacagtgcatatgttaatatatatggaaagacaatgtgtatagacagatgtgtaaaattgaaaaataaacatataacaagagagaaacatctatcgaacagacaatatacatacacatcaaacacaacagcagttttagtgaccataatatttatttctcatttttacattgcttactttagtgacaactgaaaatgacagttggcaatgcagctaacagtttcaataaaagtataaaac

SEQ ID NO: 77476 - DNA, 834 bp, Homo sapiens
ctttagtagaaggataacatgacatagcaggaataatactgccttttctttctggcatggatcaagagaaaagaaaatacaagaaaacagacagaagcaaggcaaggtacttctatggaagggtgagccctcacagatggagcaatggggcgcgcacacctgaacaagggaggggaaggagttcttatccctgatgcatgtgacccctgctgctgtgtccttcccctattggctaaggttagaccacacagcctaaactaattccgattggctaattcaaagagagcgacgggggcttctgacagctttggagattgtgacattggaataaaggaaaaacgtacaggactcatgaagcgctgaaatgttcacaaatatcaagcaaaagtcaatgaaatttattttgagctatttacatcatttaataattgagcaaggtatactcctatgaacaaaatttggagcatgtttgtctctctctgcctggcgtcttcagaatttggaaactagttatggtttataatcagctatagaattttaacacgtgctctcaaatgcaagtttctgataactttggagattgtgacattggaataaaggaagagctggaatgttcatgaatatcaagcaaaagtcatggaaatttattttgagctatttacagcatttaataattgagcaaggtatactcctatgaacaaaatttggagcatgtttgtctctctctgtctgcctggcatctacagaatttggaaactagttgtgctgtactgcatgagaatgcctgcatttagtatgcgaactggaattggcaaaggacgatggctgctctcc

SEQ ID NO: 77477 - DNA, 343 bp, Homo sapiens
actatagtgaggattttaataatgacatgacttctcttttcattaattttgtccttcattctgaggtataaagatagtttaaaggtgagtttggagatgggtaaatgtgcaatatttgttagcttctgtcctaagaatatttggattcatgactagagctagttgattctattaccttttgagtgagaaacatctatcgaacagacaatatacatacacatcaaacacaacagcagttttagtgaccataatatttatttctcatttttacattgcttactttagtgacaactgaaaatgacagttggcaatgcagctaacagtttcaataaaagtataaaac

SEQ ID NO: 77478 - DNA, 1667 bp, Homo sapiens
ctttagtagaaggataacatgacatagcaggaataatactgccttttctttctggcatggatcaagagaaaagaaaatacaagaaaacagacagaagatcctatctgcgacaattaagagcactctaagaggaaaacacatcccaccacacaaggcaaggtacttctatggaagggtgagccctcacagatggagcaatggggcgcgcacacctgaacaagggaggggaaggagttcttatccctgatgcatgtgacccctgctgctgtgtccttcccctattggctaaggcttctgacagctttggagattgtgacattggaataaaggaaaaacgtacaggactcatgaagcgctgaaatgttcacaaatatcaagcaaaagtcaatgaaatttattttgagctatttacatcatttaataattgagcaaggtatactcctatgaacaaaatttggagcatgtttgtctctctctgcctggcgtcttcagaatttggaaactagttatggtttataatcagctatagaattttaacacgtgctctcaaatgcaagtttctgataactttggagattgtgacattggaataaaggaagagctggaatgttcatgaatatcaagcaaaagtcatggaaatttattttgagctatttacagcatttaataattgagcaaggtatactcctatgaacaaaatttggagcatgtttgtctctctctgtctgcctggcatctacagaatttggaaactagtttcgttcccagatttcctaaactttccagagaaaatggtcttctccctggctcagcaagaagatgaactttaaacactgagaaactggtcatctccctggctcaaccagaagatgaactttaaacactactctcaatgacttgatgttcccatcactactcctgtcataaagggaggggactcagatattgagaattttatgatagtgtgaactgtctggtatgtcatttaagtaagcccgttgctgaaatattttccatgttattagaaagagctgaagagagggattgagatggcttctttattttttgtcttttgggaattaaaggaacctggttcaacaagggcctacacctaagtctcttgttgtaccagagtacaatttaggactgctcctgaggaaggaattagctagaaatctagagagtaagggtaacagatttacatagaataacagcctcagtatttttggttcctctccagtaaagatcacaaagaatattgctaaatcgctaaaacacctttgcaataacgtaagggcttacaactatataccaatgtagctcagttactaaactggagtaaactaatttctcttgtgtagaaaaattggttggctgtggttttatagcagatctgcaattattaatagttatgccaataatcgtttaacagtgcatatgttaatatatatggaaagacaatgtgtatagacagatgtgtaaaattgaaaaataaacatataacaagagagaaacatctatcgaacagacaatatacatacacatcaaacacaacagcagttttagtgaccataatatttatttctcatttttacattgcttactttagtgacaactgaaaatgacagttggcaatgcagctaacagtttcaataaaagtataaaac

SEQ ID NO: 77479 - DNA, 1671 bp, Homo sapiens
ctttagtagaaggataacatgacatagcaggaataatactgccttttctttctggcatggatcaagagaaaagaaaatacaagaaaacagacagaagcaaggcaaggtacttctatggaagggtgagccctcacagatggagcaatggggcgcgcacacctgaacaagggaggggaaggagttcttatccctgatgcatgtgacccctgctgctgtgtccttcccctattggctaaggttagaccacacagcctaaactaattccgattggctaattcaaagagagcgacgggggcttctgacagctttggagattgtgacattggaataaaggaaaaacgtacaggactcatgaagcgctgaaatgttcacaaatatcaagcaaaagtcaatgaaatttattttgagctatttacatcatttaataattgagcaaggtatactcctatgaacaaaatttggagcatgtttgtctctctctgcctggcgtcttcagaatttggaaactagttatggtttataatcagctatagaattttaacacgtgctctcaaatgcaagtttctgataactttggagattgtgacattggaataaaggaagagctggaatgttcatgaatatcaagcaaaagtcatggaaatttattttgagctatttacagcatttaataattgagcaaggtatactcctatgaacaaaatttggagcatgtttgtctctctctgtctgcctggcatctacagaatttggaaactagtttcgttcccagatttcctaaactttccagagaaaatggtcttctccctggctcagcaagaagatgaactttaaacactgagaaactggtcatctccctggctcaaccagaagatgaactttaaacactactctcaatgacttgatgttcccatcactactcctgtcataaagggaggggactcagatattgagaattttatgatagtgtgaactgtctggtatgtcatttaagtaagcccgttgctgaaatattttccatgttattagaaagagctgaagagagggattgagatggcttctttattttttgtcttttgggaattaaaggaacctggttcaacaagggcctacacctaagtctcttgttgtaccagagtacaatttaggactgctcctgaggaaggaattagctagaaatctagagagtaagggtaacagatttacatagaataacagcctcagtatttttggttcctctccagtaaagatcacaaagaatattgctaaatcgctaaaacacctttgcaataacgtaagggcttacaactatataccaatgtagctcagttactaaactggagtaaactaatttctcttgtgtagaaaaattggttggctgtggttttatagcagatctgcaattattaatagttatgccaataatcgtttaacagtgcatatgttaatatatatggaaagacaatgtgtatagacagatgtgtaaaattgaaaaataaacatataacaagagagaaacatctatcgaacagacaatatacatacacatcaaacacaacagcagttttagtgaccataatatttatttctcatttttacattgcttactttagtgacaactgaaaatgacagttggcaatgcagctaacagtttcaataaaagtataaaac

SEQ ID NO: 77480 - DNA, 1655 bp, Homo sapiens
ctttagtagaaggataacatgacatagcaggaataatactgccttttctttctggcatggatcaagagaaaagaaaatacaagaaaacagacagaagcaaggcaaggtacttctatggaagggtgagccctcacagatggagcaatggggcgcgcacacctgaacaagggaggggaaggagttcttatccctgatgcatgtgacccctgctgctgtgtccttcccctattggctaaggcttctgacagctttggagattgtgacattggaataaaggaaaaacgtacaggactcatgaagcgctgaaatgttcacaaatatcaagcaaaagtcaatgaaatttattttgagctatttacatcatttaataattgagcaaggtatactcctatgaacaaaatttggagcatgtttgtctctctctgcctggcgtcttcagaatttggaaactagttagtcatggaaatttattttgagctatttacagcatttaataattgagcaaggtatactcctatgaacaaaatttggagcatgtttgtctctctctgtctgcctggcatctacagaatttggaaactagttgatgcaattggagaaactggttgttttaccaaggctttgactggaaggatatgcttccctttaagaaaccaagctcaacttacagagctgataaaacccctttgggaaaactggcctcataccttgtctacacagtccccatgcagggttcctaacgtgtgtcgttcccagatttcctaaactttccagagaaaatggtcttctccctggctcagcaagaagatgaactttaaacactgagaaactggtcatctccctggctcaaccagaagatgaactttaaacactactctcaatgacttgatgttcccatcactactcctgtcataaagggaggggactcagatattgagaattttatgatagtgtgaactgtctggtatgtcatttaagtaagcccgttgctgaaatattttccatgttattagaaagagctgaagagagggattgagatggcttctttattttttgtcttttgggaattaaaggaacctggttcaacaagggcctacacctaagtctcttgttgtaccagagtacaatttaggactgctcctgaggaaggaattagctagaaatctagagagtaagggtaacagatttacatagaataacagcctcagtatttttggttcctctccagtaaagatcacaaagaatattgctaaatcgctaaaacacctttgcaataacgtaagggcttacaactatataccaatgtagctcagttactaaactggagtaaactaatttctcttgtgtagaaaaattggttggctgtggttttatagcagatctgcaattattaatagttatgccaataatcgtttaacagtgcatatgttaatatatatggaaagacaatgtgtatagacagatgtgtaaaattgaaaaataaacatataacaagagagaaacatctatcgaacagacaatatacatacacatcaaacacaacagcagttttagtgaccataatatttatttctcatttttacattgcttactttagtgacaactgaaaatgacagttggcaatgcagctaacagtttcaataaaagtataaaac

SEQ ID NO: 77481 - DNA, 1648 bp, Homo sapiens
ctttagtagaaggataacatgacatagcaggaataatactgccttttctttctggcatggatcaagagaaaagaaaatacaagaaaacagacagaagcaaggcaaggtacttctatggaagggtgagccctcacagatggagcaatggggcgcgcacacctgaacaagggaggggaaggagttcttatccctgatgcatgtgacccctgctgctgtgtccttcccctattggctaaggcttctgacagctttggagattgtgacattggaataaaggaaaaacgtacaggactcatgaagcgctgaaatgttcacaaatatcaagcaaaagtcaatgaaatttattttgagctatttacatcatttaataattgagcaaggtatactcctatgaacaaaatttggagcatgtttgtctctctctgcctggcgtcttcagaatttggaaactagttaaaattgttgtcttattttcatcctctttaaaagatggtttataatcagctatagaattttaacacgtgctctcaaatgcaagtttctgataactttggagattgtgacattggaataaaggaagagctggaatgttcatgaatatcaagcaaaagtcatggaaatttattttgagctatttacagcatttaataattgagcaaggtatactcctatgaacaaaatttggagcatgtttgtctctctctgtctgcctggcatctacagaatttggaaactagtttcgttcccagatttcctaaactttccagagaaaatggtcttctccctggctcagcaagaagatgaactttaaacactgagaaactggtcatctccctggctcaaccagaagatgaactttaaacactactctcaatgacttgatgttcccatcactactcctgtcataaagggaggggactcagatattgagaattttatgatagtgtgaactgtctggtatgtcatttaagtaagcccgttgctgaaatattttccatgttattagaaagagctgaagagagggattgagatggcttctttattttttgtcttttgggaattaaaggaacctggttcaacaagggcctacacctaagtctcttgttgtaccagagtacaatttaggactgctcctgaggaaggaattagctagaaatctagagagtaagggtaacagatttacatagaataacagcctcagtatttttggttcctctccagtaaagatcacaaagaatattgctaaatcgctaaaacacctttgcaataacgtaagggcttacaactatataccaatgtagctcagttactaaactggagtaaactaatttctcttgtgtagaaaaattggttggctgtggttttatagcagatctgcaattattaatagttatgccaataatcgtttaacagtgcatatgttaatatatatggaaagacaatgtgtatagacagatgtgtaaaattgaaaaataaacatataacaagagagaaacatctatcgaacagacaatatacatacacatcaaacacaacagcagttttagtgaccataatatttatttctcatttttacattgcttactttagtgacaactgaaaatgacagttggcaatgcagctaacagtttcaataaaagtataaaac

SEQ ID NO: 77482 - DNA, 1614 bp, Homo sapiens
ctttagtagaaggataacatgacatagcaggaataatactgccttttctttctggcatggatcaagagaaaagaaaatacaagaaaacagacagaagcaaggcaaggtacttctatggaagggtgagccctcacagatggagcaatggggcgcgcacacctgaacaagggaggggaaggagttcttatccctgatgcatgtgacccctgctgctgtgtccttcccctattggctaaggcttctgacagctttggagattgtgacattggaataaaggaaaaacgtacaggactcatgaagcgctgaaatgttcacaaatatcaagcaaaagtcaatgaaatttattttgagctatttacatcatttaataattgagcaaggtatactcctatgaacaaaatttggagcatgtttgtctctctctgcctggcgtcttcagaatttggaaactagttatggtttataatcagctatagaattttaacacgtgctctcaaatgcaagtttctgataactttggagattgtgacattggaataaaggaagagctggaatgttcatgaatatcaagcaaaagtcatggaaatttattttgagctatttacagcatttaataattgagcaaggtatactcctatgaacaaaatttggagcatgtttgtctctctctgtctgcctggcatctacagaatttggaaactagtttcgttcccagatttcctaaactttccagagaaaatggtcttctccctggctcagcaagaagatgaactttaaacactgagaaactggtcatctccctggctcaaccagaagatgaactttaaacactactctcaatgacttgatgttcccatcactactcctgtcataaagggaggggactcagatattgagaattttatgatagtgtgaactgtctggtatgtcatttaagtaagcccgttgctgaaatattttccatgttattagaaagagctgaagagagggattgagatggcttctttattttttgtcttttgggaattaaaggaacctggttcaacaagggcctacacctaagtctcttgttgtaccagagtacaatttaggactgctcctgaggaaggaattagctagaaatctagagagtaagggtaacagatttacatagaataacagcctcagtatttttggttcctctccagtaaagatcacaaagaatattgctaaatcgctaaaacacctttgcaataacgtaagggcttacaactatataccaatgtagctcagttactaaactggagtaaactaatttctcttgtgtagaaaaattggttggctgtggttttatagcagatctgcaattattaatagttatgccaataatcgtttaacagtgcatatgttaatatatatggaaagacaatgtgtatagacagatgtgtaaaattgaaaaataaacatataacaagagagaaacatctatcgaacagacaatatacatacacatcaaacacaacagcagttttagtgaccataatatttatttctcatttttacattgcttactttagtgacaactgaaaatgacagttggcaatgcagctaacagtttcaataaaagtataaaac

SEQ ID NO: 77483 - DNA, 448 bp, Homo sapiens
tgatttgaagtaagctttccatgcttcacttagggtgggaaattttaaatatcagagctttctttgttagcagcatatagttatgcaatttatttaaatctgcagtgccaatctttttttgatgggtgtgcttagaccacacatttaagataattattaatatgttagaaccgaatatattttgatgattagtttttatgtgtcaatttgactgaattaagagatgcccagacaggtggttaaaacattatttctgggtatgtttgtgaggatgtttccagaaaaggctagcatttgaatcagcagactgagtaaagaagataaagataatacttgtcatgtgtacaggcatcatccaatctgctcaggacccaaatagaacaaaaaggtggaggaagagtgaattatgtctacctccttgagctgggacagccatcttttcatgccc

SEQ ID NO: 77484 - DNA, 713 bp, Homo sapiens
agctagtgaacttctgatagggtcttatttatgttgctcaaatgtttacataataacttgtgccaaaaatatagtgctcatgcttttcagttctcacccagaaatgtcctgtggcttctagttgtgtgcctgagatcagataataaaagaccatgccttgaattctctcagctaagtgtaaaggattccttcagagatttatttattccgagaatagagaccattctgatgatgtatacaaggaacaacctaaactgtgctgagccactgtttgaacaaaataactcacttaatgttaatttcaacacacaaaagaaaacagtctggcttattcacggatacagaccagtaggctccatcccattatggcttcagaacttcgtaaggattttgctgaatgaagaagatatgaatgtaattgtagtagactggagccggggtgctacaacttttatttataatagagcagttaaaaacaccagaaaagttgctgtgagtttgagtgtgcacattaaaaatcttttgaagcatggtgcatctcttgacaattttcatttcataggtgtgagcttaggggctcatatcagtggatttgttggaaagatatttcatggtcaacttggaagaataacaggtcttgaccctgctgggccaaggttctccagaaaaccaccatatagcagattagattacacggatgcaaagtttgtgga

SEQ ID NO: 77485 - DNA, 324 bp, Homo sapiens
actatcccagtactcagcttgactgacattttcttatttcagataataaaagaccatgccttgaattctctcagctaagtgtaaaggattccttcagagatttatttattccgagaatagagaccattctgatgatgtatacaaggaacaacctaaactgtgctgagccactgtttgaacaaaataactcacttaatgttaatttcaacacacaaaagaaaacagtctggcttattcacggatacagaccagtaggctccattacattcatatcttcttcattcagcaaaatccttacgaagttctgaagccataatgggatgt

SEQ ID NO: 77486 - DNA, 551 bp, Homo sapiens
aaggtgaaatttagtcaaagattggttctgaggttttctacccaggattaataattagtgttacattttctaaaccatctggttattttagagggaaacagggatagagcagtttcttcagtcctagatttaagtaatatctccattcttttggtttttatgttgtattgggtaagtgaggtatcaggaggcttggagcagaaacctatggatgctttagtctcccatggtttcagcaggaacttaaaatgacagaagttctacacttttgaatcaaaatcagtgtagtttttctgcttggtagcagcaggtaattattgacttgaaacctttgacttattcccttgtggcttatcagttcccgttttttgatggaaagtagcaaagaagtaattctaaagagtggtgtaaccaagtgattttcattttaagttaagttcttaaaatgtactttaccagtctggggtaacatggcaaagctccatctctacaaaaaaaaaaatatatatatatatatataaattatatatatatataatttatatatatat

SEQ ID NO: 77487 - DNA, 608 bp, Homo sapiens
aagaagtcataacagtttcctgagaacaataagtcatatacattgaagtctgtggataacttgagctttcctggtgtagaggaaaggggttgtagaaggttgttttcctctaaaatgcttgttatatgtggaagtggtatggaaaactctgctgtagatagtttggagtcttggctacttcataaaacatggaatgaaaaattcgtcttgaaaattactgataatggtaagtataactaggcattgcatgtttatttttaaaaagtcttattgctctaaaatatggaatactaatctatactccccatccaaagaatttgtttttggaaattcttacttatattctcctcttgccatcctgccatctctcttctctcccccgtttcccatccctgccaggtcgactcaccataagtagaaaaagtagaaaaatctcaccataagtagaaaaatctcttcattaaatcttatctgtaccatgctatcatccccatggttcttatatctgctacaaaatagctaatctaaaaaactaacttgtaccaatataatgtgttagtcctattttggttatcaatggctacataaaaacaaaacaaaacaccaaa

SEQ ID NO: 77488 - DNA, 290 bp, Homo sapiens
tggggttcctggagttggtgatacctggcctgagctttgaagaataagtgtgtgttagccaatgaagagagaacagggacatggaggccttaaaacaatatgttgtgcccaggagctacagattgaccatccctactctgaaaatccaaaattcaaaatgccccaaaatccaagtttttgagccccaatatgatgctcaaaaggaatactcactggagcactttggatttctgatttttggattagagatattcaactggagtgttattttgcatatattcccaaatcca

SEQ ID NO: 77489 - DNA, 221 bp, Homo sapiens
atttatgtttacaggtttattataggggatgttacaaaggacagataaagagatgtacagggcaccagagcctgcacatgttcagctatccagaagctctctgaacccagttcttttggatttttatggaacgttcattctgtaggcacaactaattaaaccacgggtcactggtgatcaacttaaccttcgcccttctcccctccctaaatgttgggggt

SEQ ID NO: 77490 - DNA, 472 bp, Homo sapiens
  misc_feature (236)..(236): n is a, c, g, or t
  misc_feature (265)..(265): n is a, c, g, or t
catctgtaacccactgttgtacatggtcaccatgtctccccaggtgtgttttctccttttgttgggtgtctatgggatggggtttgctggggccatggcccacacagcgtgcatgatgggtgtgaccttctgtgccaataaccttgtcaaccactacatgtgtgacatccttccccttcttgagtgtgcttgcaccagcacctatgtgaatgagcttgtagtgtttgttgttgtgngcattgatattggtgtgcccacagtcacnatcttcatttcctatgctctcattctctccagcatcttccacattgattccacggagggcaggtccaaagccttcagcacctgcagctcccacataattgcagtttctctgttctttgggtcaggagcattcatgtacctcaaacccttttctcttttagctatgaaccagggcaaggtgtcttccctattctataccactgtggtg

SEQ ID NO: 77491 - DNA, 503 bp, Homo sapiens
  misc_feature (461)..(461): n is a, c, g, or t
  misc_feature (475)..(475): n is a, c, g, or t
  misc_feature (492)..(492): n is a, c, g, or t
  misc_feature (502)..(502): n is a, c, g, or t
tatgctatgctgttgttgctgataattaaaattcactgagatttatttctgtatagagtgtgcattctagaaactaactaaaagtattacatatgcacaaaatacataaaagagttgcacaatgaatccaaagtgctgggattacaggcatgagccaccgtgcctgcctttcattgcctcttgaaaagagcttgtcttgtttatactgtagaaattccttgagctcataggcattgctcagggtcagatgacagttctgagacttcactgagttgctgggaacgaggggagaggctgccacggcccgacaaatgtccctgtgaggtgaagacttcctttgtctttcccttgaccccactatcctgctgtgggagagggcagcccccaccagccctggtttttccttctaggtctatcatctcatgaagaactgctgggagacagaggcgtcctttcggccnaaccttcgaggaancctcataccccattctnaagacagtcnt

SEQ ID NO: 77492 - DNA, 377 bp, Homo sapiens
agtagagacgaggtttcactatgttagccaggatggtcttgaccccctgacctcttgatccgcccgccttggcctcccaaagtgctgggattacaggcgtgagccagcatgcctggcctttttttttttttttttaacgaagttatttttctagagcattcatagtttgtttttatacagttaaggttctcatccatctggattttttggtaagtgtggggagaataaaatgaggagccgctgtttttttctccaaatggcatgtattgtcccaacacaatttattgaatcaataattcatctctcccatacgaatttaaactattgaactttcacatcaaatttggaactacaaagtaggttaacaaggtgagaac

SEQ ID NO: 77493 - DNA, 1056 bp, Homo sapiens
catactatcatgtgggctttttgttttattttaaagcatgtttttgttttctggcattataagataatggcatgcagatgtgtttttaatttcttgctcttcacaaattttatgcatgcacgagcgtgtacacacacagaattgttttcatagatgtaatccctaaagtgtcattgctgagtctatttgggggggctctatgtcttcacttctgaattaataacccattgcctgcccaatagattgcatgagtttggactttcacaagaattgttgtagttcatattggatggtgatctatttcaatacttagttttctcagactgaattttcttttctagtttgatagatgaaaaattgtggcttattgctatctttattacatttctttaattatgagtgaggctgagcatttttctacagttttgttggccatttttatgaccatctgttaatgcgtatttccatatttcctttcttgtttttgtttgtttgttttgcaggggttggggtgggcaacggcatgatttcgatcactgcaacctccacctccggggttcaagcaattctcctgcctcagcctccagggtagctaagattacaggtgtctgccaccaaatccagctaatttttgtattttcagtagaggcagggtttcatcatgttggccaagctggtctcaaacacctgaactcagcctcagcctcccaaagtgctgggattacaagcgtgagccaccgtacccagcctatatttccatgttttctgtttgaatactggttttttcttgttgacttccaagtactatttgtgttttaaagaaaaacaaatcaggcttttatcatgtgtagcagaagtttatttatttgtttatttgccaaattgtcatggtttttttttactgggtttgtgtgagttttttttcttaaggtagtatagatgttttacagttctgtgtaatcaaattggcattatttttctccatggcttagctcttttgtcttccaagatttgcagaaatacccatgttttcttctggcacatttattatttttc

SEQ ID NO: 77494 - DNA, 285 bp, Homo sapiens
ttatatggataactcattcacatacacacgtgtgcatgcacgcgcgcgcgcgtgtgtgtgtgtgtgtgtaaacttagaaagggccaagccataactgcaggctaaatttggctctcaaggggccaagttgtgacctctattttaaacaaagtacattattttggcaagagaaactagtttacaaggaaaacatgttgaaataggccctggatttatcttagttgtaatctttcctaatttgatctgagattttaagcatgaaatgagagttaaagaattgactag

SEQ ID NO: 77495 - DNA, 344 bp, Homo sapiens
ggaagccactgattttccctccagtatgatgatttactttaaaaatgaacccagagggacgggcatggtggcttatgcctctaatcccagcacttcaggaggctgaggcaggcagatcacctgaggtcaggagttcgagaccagcctggccaatatggtgaaacgcctgtctctactgaaaatataaaaattagccgggtgtggtggtgtgcacctgtagtcccagctactcaggaggctgaggcaggagactcacttgaaccctcgtggcggaggtcgcaatgagccgagattgcaccactgactccagcttgggcaacagagcaagactccgtctcaaaaaa

SEQ ID NO: 77496 - DNA, 273 bp, Homo sapiens
ttatcctccacacttgctataagtaacactccaattccaaaactagacaccattatactttatcataaaaaaaaaacagtgctggttatttgataaaatgtcccacgcactatgtagtgagaaaactaacactggctttttgtggcaaactggatgaatgtgctttaaaagtatcatcctttaaatgaatgcaaactcagggtagtaggaagacaaaaataatgcacaagatgttcctgggaaaggtagtttatatgctttgtaaaattcaag

SEQ ID NO: 77497 - DNA, 2841 bp, Homo sapiens
  misc_feature (1)..(1): n is a, c, g, or t
  misc_feature (6)..(6): n is a, c, g, or t
ngcaangctaaatccagaatcgtttcaattactgtgaggggaattctgaagttctcattaaacacacgaatgtctcaagctttgaaaagagccagatgccaaaggcaagaatcccagggcattgcccacctgggtgtgatcccctgataattgtctaacaaattcagcatgtgtcccctgggcatgaccatctgctgggaaaagttccaggaccctgagacatcttgggattcctgtggtttaggaaagacctttaactaccagctggtagttgtctcagcattcttcaaatagtccggtcttgtttaatattattattattattgttatttaattttattttattgcaactgtacttagagaatagtctggtcttgagaccttttcactgtggtctgttctggtgtacggctcccaccagtgtgaagcagaaggatgactttgctctgttgtcaggacaaccttgaaggaaggagccaaatgtgtggaggtctgtgggaagagagagccacctagcatgtccccactgaaccagtcagcagaaggccttccccaggaggcctccaacagatccctgaatgccacagaaacctcagaggcttgggatcccaggaccctccaggcgctcaagatctcccttgccgtggtcctttccgtcatcacactggccacagtcctctccaatgcctttgtactcaccaccatcttactcaccaggaagctccacacccctgccaactacctgattggctccctggccaccaccgacctcttggtttccatcttggtaatgcccatcagcatcgcctataccatcacccacacctggaactttggccaaatcttgtgtgacatctggctgtcctctgacatcacgtgctgcacagcctccatcctgcatctctgtgtcattgctctggacaggtactgggcaatcacagatgccctggaatacagtaaacgcaggacggctggccacgcggccaccatgatcgccattgtctgggccatctccatctgcatctccatccccccgctcttctggcggcaggccaaggcccaggaggagatgtcggactgtctggtgaacacctctcagatctcctacaccatctactccacctgtggggccttctacattccctcggtgttgctcatcatcctatatggccggatctaccgggctgcccggaaccgcatcctgaatccaccctcactctatgggaagcgcttcaccacggcccacctcatcacaggctctgccgggtcctcgctctgctcgctcaactccagcctccatgaggggcactcgcactcggctggctcccctctctttttcaaccacgtgaaaatcaagcttgctgacagtgccctggaacgcaagaggatttctgctgctcgagaaaggaaagccactaaaatcctgggcatcattctgggggcctttatcatctgctggctgcccttcttcgtggtgtctctggtcctccccatctgccgggactcctgctggatccacccggcgctctttgacttcttcacctggctaggctatttaaactccctcatcaatccaataatctacactgtgtttaatgaagagtttcggcaagcttttcagaaaattgtccctttccggaaggcctcctagtcttattcggtgatgactcttgttatcttttgtgtcctgtaacctcatcgggattgtcttttttttttttaattattttctgagacttggattaattcatggtatcttgagtcttggttcaatcaacagaattgttctttttcctgttgttttcttaacttctgaaagagctgtgggtggtggggggcggggggcaggactgaagatttcactacttagcataatattttctttctttttttttttttttgagacggagtcttgccctctcgccaggctggagtgtagtggcacaatctcagctcactgcaacctccgcatcccgggttcaagagattctgcctcagcctccagagtagctgggactacaaacgtgtgtcaccaggcccagctaatttttgtatttttaataaagacggggtttcatcatgttggccagggtggtctcgatctcttgacctcgtgatccgcccgcctcagcatcccaaagtgctgggattacaggcatgagccactgtgcctggccaacataatgttttcacagttcctctttgttggaagaagtgtgtgacctacaagattcctggttgatacagttcaggtgagaaactgtttgattatagaaaagaccccagactcagagggaaggctctctggtctacctgagatctatatggagcttaaaggagggtgaataagattaatgacctgaattgaaagagaatttggagccaggatgggtctccattctgtgtggcaccttgattggaaaataatatccatgcgtttcttccactgagtctttcttagattaaatctctcccagttgtccgtgaagagaaagacagtatttgcagtgccgatgatatagagtgacttggagagagattcagaagttaggggtagcgggggtaggatggttgggaccagattgactaccctgtacccttccttcttccccaatatgcctgcgccatcttcacattctgaagttgaaacccatgatcacccctttgaggtagattgaccggctttagacgcccaccccccacccaccgcaagctttgagtgggacaccattctgaattttttttctgaatttttttttaacatctctttctcattagagatctgaaaactcattagagatgttgagtcttatcaaataaaaagcatgagacatcatggcc

SEQ ID NO: 77498 - DNA, 369 bp, Homo sapiens
gattctcgctctgtcaccagactggagtgcagtagcatgatctcggctcactgcaacctccgactccctggttcaagcgattcccctgcttcagcctccccagtggctgggattataggcacatgccaccatgcccagccaatttttgtattttagtagagacagggcttcaccatattgtccaggagggtctcagtctcctgacctcatgatctgccctcttcagccatccaaagtgctgggattacaggcgtgagccactgcaccgggccaggattttttttaatgttgtgctaatatggtatattctgatggccagctcaaggaatgacacattcattacctatttccaggggctcagaggcagag

SEQ ID NO: 77499 - DNA, 5556 bp, Homo sapiens
ctcttccaaagcagacccatttggctcagaatataagagagcaaaattagctttctgggaattgatactctgttgatcttaattatccatccaaatcctgatcaacagtgctttctaaacagccttgcttgtattgagtcattgtcagctgttgacaatgttgcgtggaattagagatcaagagttgtcctgacctttacctatggactctttgaaccagttaatttctatttctgaaatcttaacattgctatagaagaaagtagtgtatgcctttttgaaattcatcatgtatggaactgagttttgtatgatccgtgccagtgcctctccagaagggcagatctgattacatgaatccaggagggatgcacctgagctagtctggatatattccttaaaggagacaagaacttttttgtgcaaaatgaacttttgtgtagtttgacatctgcatgcagtgaactgtctcacttaactttttcaactttgggcaaagatatacataaaccatagataatagacctacagtacagctgttttcatgttgcgttaagcactggaagacattaacaatgacttaccttaaagtaaaaggttccgtgaggggtatttagggccactgtatttttggtgccacaattttctacattgttggcattttaaaagttgttttctaaatgaacttaaagaaagaaagctcaaagccctaaagttttgatcaaattcaatagagttttcagaaaaaaatacaattttaagatagcactctttaaactagatgtgcaatgacttattcaaattatctttattcaagaaaagagaaaagaagaaagataagtcattagactataaatttccatttaaaaagacaagtcacaaaactaatcagtgactctaaacaaaaatttactggatgaattgtatatataaaattctaatcacttatgattcttagttaacattttataagctttgtattttacaggggcctctatttatccaaatttattgtttttgtccatttttctcagccttttgcaaaaaatatgcaagagtgctgaaacttggataaaacgggtcatgtatacagagaaaataatctaaaagttatctttaagagggttttagtagtgtcaactttttaaaaaagtactatgtgaccataacatacgtatattttaaagagggattaagattaaattaaaataaatggattcataaaattgctatttaaatacagtatttacttttgtaattgaagcatgattccacaaccagctgtggcattttatttcacttttctagatcagaggctttaatttgtagttaatcatgatgtggaaagtcatcttctctctactccatcaatttttttcatccgtttttgaacatgctgaagcactttgatcttgccataagtgttgtcctataccactaggtggtgttcactaatgggagggcctcagctcaccggctctccaatttgggaaaaagcaagtacctcctccctaccatcagcagaaactgaatgaaattaatctttgcaacttgaatctgttttaagtagcattaccaataagcatagtggtatctgaataaggaatgacatttacattacattttattaaataagagagaaagttaatgtgctacttgaaatgttatttggttctttgtccccctcattgcagagtatagataaggatgctcttaggtaaaatgcagccacaagttttccgagttcctttagtctgtagggtaggctatgaggtacagaatgattagaaactgaaatcctcattatttttctctcaaatacatttcacatacattgaaacagaaataggcaaaatttatgagggaaatctgatttcccaattctgatgaatagatatactaagacagtagccttgtttaaccagtgcctgtagaaggcactagaataaatagcatgtccaagagtataacaactttttttgtaaatttagttactagcctaatcaaactgtaaatataactcactaattggtaccatattttcatttttcttattgttcatctttaaggtttcattttattgcttttttgtagctctaagtaactaatcaatttaatttcaaaggaaagttaaagaaagtttaagcttttactgcatggattctgcccgcctagctaggttctgaactgacactgaagtatgacaagatacagattatagtccaaaactatcctttacagttcacaatttaagaacaaatttaactttatatacaaataataattgttatctaattatatttagttgttgctttggcaacaaaattacaacatggctacctttagacatttgtgtatgtgaacattttacttgtaaactataggtgatttgtgacagtatgagcctgtagaaaatacagctcaaaactatgaaaacagacatggttgagttcttttttaatcccaaaggcccatatataaaagctgaatttgtgtccttgtgtgactttttgtgaaaaagtttataacacatggattctagaatcaggctttatagtttatagaatttgttgtgtggatagggttattccacagtatttagacttcaaaacgcaatcattgcatttttaatacattacctaactttttttataacttaattcaaaattaccccattcaagtggcatagctgtagctgcaaaaattctgttttctggaattacatgagcaaatatagctatatgaggattaatgtatgactaaagcctcttttgaaattaattcatatttttaaaactatacataaagatactgtggaatgaccccttaacagtgtttaagaaacatatgctgcagttaattgactgtctcagttagggtgcggatgtgtgagacacaccttttttgcacttatgtacatagtccatgaaagcaatccttggagctttttttaaatgtaagaagtctgtgataatagtggaaaagttagtaagagagagttatttctaaggctttgaaaaggagggtgtttttgctctaagacttaactaaagcataatgttgctttgctgttacggaggctttctagtttgctacaggtcaccaaaagagaaggctagtaacaggtaacaggtcagcctcagctaacagcactgaacaagagtagaataacttcatcttttaacaagatcattagcaaagattgtttgctttttaaattaatcccccctataaacacacacacacgtgtgcacacacacacacacacacacacaccgggcagtttctagaacaagttttcctttttcagtggttgtaagcagtgaaatacctcatgtattacaagatagatattaccgttatgatagaataagatttcatctttcacagaaagtgatcagctgatatatgtgtcagttaaaatgtttatcaattaataggtatttaagtgacaaattgttaatgttgaccattgttcctcctttaagatccagtaaccaaaaccaaatcggtaaccattgaaagatgatatttaacagttaaggatggccagcatagggccgttcattcccttcaacaaagggaaaaaaaatgctcctggcacaactttataactggcttcatttacattatacctgttcagtggaagctgttttttgacctacctttaccagattacaaagtagttaactgtgccacttcagcctcccactgttttgttttaactaaacagaagagaaccagccaaaatcttacgtaacacaggagctggaagacaatgtttcaatctgaccatctctgccaattttagctcccacgccacctatagatagccagttaactttctttttgcccccaggcaatgaggcctagaagaggtcaaggttagaaaggttaagcatttgatcactacaggtacttgtagtacctagagaaggaacccatcctggggttggtggagttggtattgctactcgttttgatagttctcatttacagagaaagaaaaataagccaaagccagaaagcaatccaagccttacagttgtccaatacctcagggccagttggctagaattttcttttccctcagcccataatcacttagagttagccatacaacaaacagcctgacaatctgaccagcatttccattgatataaaatgtaagcattccttcattctgtagttaggaactccaacttcagccttatctccaacataatttcccaatttaacctatgtactgatatggacatttctttgtgaatatgccagattcaagaatgtatttttctaaggtcaatagagatacgacattttaagtcaggaaaaatcacctataaattagtaggaataactgtagaagcatcacaaaagataccccatgaatagatggcatggtgtgcatgctgacagccacggggtcatactctggagtttcaacatagaggctgtgtttcaataaataagacaaattggggaattaagtaaaacaaatggatgtaactgaggcccccccccaaaaaaagccctctattactaacctcaagaaaatatttagtttgactaatttgtgcagtttccagctcttctacttgttcttgcctgtaagagaatcactaatactcaaaagctggattattgaagagaaattttatctttaaatagaatccatccacaattatggtatatgtaaaaaaaatgtatgactatgaaataagtcgcagctctttgcagatattgcaaaatccttgctaggcatctacatcatattagttttttaaaaaatacctctgtaacaagacctaaaagtaacctaactattaagcagtgcttttttctctgaaaacacacaacctaaagatttatctgtcataaaactgcatggttccagagctttatttctgtgtagagatgctatttgttagtgatggaaacaaattactttgttgctatgtcttttgtgtctagcagttgagagaatgatatgaccatcatatcactggattatgggaatgaatgcccttttcaaaataaacttatttattaatattttaatattattttaatattataatattaataatattttaatattattgttgctgctttaacagaaaatgagccatttgtccccatgctcccaaattacaatgatttaaattaaaaaacttttgaaggattttcctaaatatattcttttttaaaggactaactttgtgcattcatataacaacaatttggaataatgtgaaaaatggaggcacataatttgggtggaaaatggcgattaaaaatatatataagaaaattattagccatgtgtaacatatttaaataatgaccagaatatttcatgagtaccaactcttcccatagtaattttcctccaaaatgcaatagctcattccctcaactgcagacgctttgattttttttcaagttatagtgctgtagtgcttgtttatgtttaaaagtgcacattatgcagctcattttagtatgctacttctatgtttattttttgttcttctaataaaatgcataaacttc

SEQ ID NO: 77500 - DNA, 5498 bp, Homo sapiens
ctcttccaaagcagacccatttggctcagaatataagagagcaaaattagctttctgggaattgatactctgttgatcttaattatccatccaaatcctgatcaacagtgctttctaaacagccttgcttgtattgagtcattgtcagctgttgacaatgttgcgtggaattagagatcaagagttgtcctgacctttacctatggactctttgaaccagttaatttctatttctgaaatcttaacattgctatagaagaaagtagtgtatgcctttttgaaattcatcatgtatggaactgagttttgtatgatccgtgccagtgcctctccagaagggcagatctgattacatgaatccaggagggatgcacctgagctagtctggatatattccttaaaggagacaagaacttttttgtgcaaaatgaacttttgtgtagtttgacatctgcatgcagtgaactgtctcacttaactttttcaactttgggcaaagatatacataaaccatagataatagacctacagtacagctgttttcatgttgcgttaagcactggaagacattaacaatgacttaccttaaagtaaaaggttccgtgaggggtatttagggccactgtatttttggtgccacaattttctacattgttggcattttaaaagttgttttctaaatgaacttaaagaaagaaagctcaaagccctaaagttttgatcaaattcaatagagttttcagaaaaaaatacaattttaagatagcactctttaaactagatgtgcaatgacttattcaaattatctttattcaagaaaagagaaaagaagaaagataagtcattagactataaatttccatttaaaaagacaagtcacaaaactaatcagtgactctaaacaaaaatttactggatgaattgtatatataaaattctaatcacttatgattcttagttaacattttataagctttgtattttacaggggcctctatttatccaaatttattgtttttgtccatttttctcagccttttgcaaaaaatatgcaagagtgctgaaacttggataaaacgggtcatgtatacagagaaaataatctaaaagttatctttaagagggttttagtagtgtcaactttttaaaaaagtactatgtgaccataacatacgtatattttaaagagggattaagattaaattaaaataaatggattcataaaattgctatttaaatacagtatttacttttgtaattgaagcatgattccacaaccagctgtggcattttatttcacttttctagatcagaggctttaatttgtagttaatcatgatgtggaaagtcatcttctctctactccatcaatttttttcatccgtttttgaacatgctgaagcactttgatcttgccataagtgttgtcctataccactaggtggtgttcactaatgggagggcctcagctcaccggctctccaatttgggaaaaagcaagtacctcctccctaccatcagcagaaactgaatgaaattaatctttgcaacttgaatctgttttaagtagcattaccaataagcatagtggtatctgaataaggaatgacatttacattacattttattaaataagagagaaagttaatgtgctacttgaaatgttatttggttctttgtccccctcattgcagagtatagataaggatgctcttaggtaaaatgcagccacaagttttccgagttcctttagtctgtagggtaggctatgaggtacagaatgattagaaactgaaatcctcattatttttctctcaaatacatttcacatacattgaaacagaaataggcaaaatttatgagggaaatctgatttcccaattctgatgaatagatatactaagacagtagccttgtttaaccagtgcctgtagaaggcactagaataaatagcatgtccaagagtataacaactttttttgtaaatttagttactagcctaatcaaactgtaaatataactcactaattggtaccatattttcatttttcttattgttcatctttaaggtttcattttattgcttttttgtagctctaagtaactaatcaatttaatttcaaaggaaagttaaagaaagtttaagcttttactgcatggattctgcccgcctagctaggttctgaactgacactgaagtatgacaagatacagattatagtccaaaactatcctttacagttcacaatttaagaacaaatttaactttatatacaaataataattgttatctaattatatttagttgttgctttggcaacaaaattacaacatggctacctttagacatttgtgtatgtgaacattttacttgtaaactataggtgatttgtgacagtatgagcctgtagaaaatacagctcaaaactatgaaaacagacatggttgagttcttttttaatcccaaaggcccatatataaaagctgaatttgtgtccttgtgtgactttttgtgaaaaagtttataacacatggattctagaatcaggctttatagtttatagaatttgttgtgtggatagggttattccacagtatttagacttcaaaacgcaatcattgcatttttaatacattacctaactttttttataacttaattcaaaattaccccattcaagtggcatagctgtagctgcaaaaattctgttttctggaattacatgagcaaatatagctatatgaggattaatgtatgactaaagcctcttttgaaattaattcatatttttaaaactatacataaagatactgtggaatgaccccttaacagtgtttaagaaacatatgctgcagttaattgactgtctcagttagggtgcggatgtgtgagacacaccttttttgcacttatgtacatagtccatgaaagcaatccttggagctttttttaaatgtaagaagtctgtgataatagtggaaaagttagtaagagagagttatttctaaggctttgaaaaggagggtgtttttgctctaagacttaactaaagcataatgttgctttgctgttacggaggctttctagtttgctacaggtcaccaaaagagaaggctagtaacaggtaacaggtcagcctcagctaacagcactgaacaagagtagaataacttcatcttttaacaagatcattagcaaagattgtttgctttttaaattaatcccccctataaacacacacacacgtgtgcacacacacacacacacacacacaccgggcagtttctagaacaagttttcctttttcagtggttgtaagcagtgaaatacctcatgtattacaagatagatattaccgttatgatagaataagatttcatctttcacagaaagtgatcagctgatatatgtgtcagttaaaatgtttatcaattaataggtatttaagtgacaaattgttaatgttgaccattgttcctcctttaagatccagtaaccaaaaccaaatcggtaaccattgaaagatgatatttaacagttaaggatggccagcatagggccgttcattcccttcaacaaagggatggaagctgttttttgacctacctttaccagattacaaagtagttaactgtgccacttcagcctcccactgttttgttttaactaaacagaagagaaccagccaaaatcttacgtaacacaggagctggaagacaatgtttcaatctgaccatctctgccaattttagctcccacgccacctatagatagccagttaactttctttttgcccccaggcaatgaggcctagaagaggtcaaggttagaaaggttaagcatttgatcactacaggtacttgtagtacctagagaaggaacccatcctggggttggtggagttggtattgctactcgttttgatagttctcatttacagagaaagaaaaataagccaaagccagaaagcaatccaagccttacagttgtccaatacctcagggccagttggctagaattttcttttccctcagcccataatcacttagagttagccatacaacaaacagcctgacaatctgaccagcatttccattgatataaaatgtaagcattccttcattctgtagttaggaactccaacttcagccttatctccaacataatttcccaatttaacctatgtactgatatggacatttctttgtgaatatgccagattcaagaatgtatttttctaaggtcaatagagatacgacattttaagtcaggaaaaatcacctataaattagtaggaataactgtagaagcatcacaaaagataccccatgaatagatggcatggtgtgcatgctgacagccacggggtcatactctggagtttcaacatagaggctgtgtttcaataaataagacaaattggggaattaagtaaaacaaatggatgtaactgaggcccccccccaaaaaaagccctctattactaacctcaagaaaatatttagtttgactaatttgtgcagtttccagctcttctacttgttcttgcctgtaagagaatcactaatactcaaaagctggattattgaagagaaattttatctttaaatagaatccatccacaattatggtatatgtaaaaaaaatgtatgactatgaaataagtcgcagctctttgcagatattgcaaaatccttgctaggcatctacatcatattagttttttaaaaaatacctctgtaacaagacctaaaagtaacctaactattaagcagtgcttttttctctgaaaacacacaacctaaagatttatctgtcataaaactgcatggttccagagctttatttctgtgtagagatgctatttgttagtgatggaaacaaattactttgttgctatgtcttttgtgtctagcagttgagagaatgatatgaccatcatatcactggattatgggaatgaatgcccttttcaaaataaacttatttattaatattttaatattattttaatattataatattaataatattttaatattattgttgctgctttaacagaaaatgagccatttgtccccatgctcccaaattacaatgatttaaattaaaaaacttttgaaggattttcctaaatatattcttttttaaaggactaactttgtgcattcatataacaacaatttggaataatgtgaaaaatggaggcacataatttgggtggaaaatggcgattaaaaatatatataagaaaattattagccatgtgtaacatatttaaataatgaccagaatatttcatgagtaccaactcttcccatagtaattttcctccaaaatgcaatagctcattccctcaactgcagacgctttgattttttttcaagttatagtgctgtagtgcttgtttatgtttaaaagtgcacattatgcagctcattttagtatgctacttctatgtttattttttgttcttctaataaaatgcataaacttc

SEQ ID NO: 77501 - DNA, 324 bp, Homo sapiens
gagtgtccagatgatggcagtgatggcccatctggagcggctgctgtaaggacactggctgcagcaggggaggcacagccaggcctgcgcactaggcagagctggtgtgggagccaggagcagatgagagccccgccttctaccaagttggcagtgcagaaggccgcactcccgggtgctgatgccgagttcagctccagaccctggcatccctgggctctcaggggcccaggaagcccccaacccctgcaggcttcaaagggcctgctcccactccttggcctctccctcctcctggcaaccattctggggcagagcaaagct

SEQ ID NO: 77502 - DNA, 97 bp, Homo sapiens
atgagaagtgccgttgcctcggcaaccccaaacccagtccaagcccggagagggggaagttcggggcgagtcccgggggcggtgcgtggcgccggtt

SEQ ID NO: 77503 - DNA, 569 bp, Homo sapiens
gctcacgaaatctaagtcgaggagaaatgtaaagcataactgaaaagcgtgcggtgtggaaagcggagtgctgaaagacaacgactagcgcgcgttccagaccaagagcaacttcaacaggacaacgaggaggaaccacgcgcaagcacttacaaatgcgccgcggtttctatcccagagccgccaacgggaggccgcccggggccaccaacctgctctggtccagggaggtccgtgcctcgcccttcggaccggacatcaaacttccacattttaacttttaaatacagcaggaagtatctcccatgtattatgctcctaaaccatcacattcttaagccacgtatgactggaagtagtgagggccaccatcaaattgattccacccagaacaagatcccgaagaaaagatccactgagtgcaaagttcacacccctagaatttggggaaacagcctattggtttctctcacaacaaatgatctgttaaaaaagttacaagggtatcaatacaagtaaaattctatctaaaacccactgaataaaatgagaatccgtgagtccagcct

SEQ ID NO: 77504 - DNA, 449 bp, Homo sapiens
tttccgttcactccagcccatcggatggcgtgcccaccttgtccttgggggctctgtgtcccctgggctgctgcccactgacttgcacgctccacgtccggcgggacaggtgcccgcacgcctggaacatggatgctccctgctctgaacatccatctgccggaagatgaggcagctgaggccgcgttcacgcagccggagcggggaccacctcaacgcgacgtgagggcctccaccgagaaaggacataaacggcagacggtccagtgagacgagacgggaaatcgtcctgagagcggtgatgccgtgatgcgcgcccttcgctgagcgtcagagagaagcccaggacggttggaaaccggcattgagatggtttaattcaactccagaacgttcagatgtattgtttctaatcctccaggtctctggaaaatttgcttctggttttc

SEQ ID NO: 77505 - DNA, 213 bp, Homo sapiens
acccggaggtctgcttcactggccacttagactcacaggacaaccagagccacactggcatcagatttacttagaagagtataggataagaaacagaatcccaacagggcagcttcttatcttcagtgggagcccttgcagtggtctacatagcatccaccaaattgactactacctgccctgagtgacagcttagctgtgggtgcaggatcc

SEQ ID NO: 77506 - DNA, 401 bp, Homo sapiens
atgctaaagtcaccatggtgacaagaagaactcagctggcttcctattcaatgcatctcagatgaaggtgctcactccaggaaacataaaggatatccattaatttttagctttttttgtgtgaagcaaagggtattgctaatatacaacctctggaatagacctgatcagttacccagtctctggaagagggtggtaattgaaaaactaataagggcaggccctagtctaagaaactaaatctaagacagccacctgaagtgtgaagatggaaattgcagagttgagtctggagtgttttataggcttatagctctaacttgcctaattgaacttttacaattgaacttttacaaagaaagtggggatttatttatactcctactctagggggccacaaa

SEQ ID NO: 77507 - DNA, 2012 bp, Homo sapiens
  misc_feature (1308)..(1308): n is a, c, g, or t
  misc_feature (1578)..(1578): n is a, c, g, or t
gaattctagagaatcctgaagaagactgtgcttccaccagtttgcacagcatagataatatgcttggttgcataattcatatgagaattaggtttttaagatgttaataactaagtaagttttaggagtctcattgtgatcatggtatcacggtattagtagatgctggtgttattttgtttgattttgggaaatgtattaatatatgtgtcaaacaaggaactgaaaactattacactttgtatttttgcttttgtcatcataatcatgttgaatttatgtaatcattgattttatttcatgtggaatagctaattgcttcttaaaattatgttatttaatgttttcattagctacactctacaatccacataacaccttttattttaaaattacgtaaatatatgcagaaagtagaattttttattaaaatacttttatgcttgaaatatgagaaccaagtacagttttctattcaaaattttcttattttaatactgtttggctaacaaagatagataaagtttcattcaaacacttttctccttaaaatttcaagataacgtacattaacttttctatgtctaaccctagcttatccttccctgttataaagttgattgcttaaacttactgagaaaatattcccatcattaacaaaaataaattattgaaataaaaaaggatagaggttcaacatatttagtcattatggaagtgcaaatcaaagtcatatgccacttcacaccaaccacatttgtcaaaataaaaaaaaaaaaacaggaaataggaattgttgataagaatgtggaggtattggaacccctgtacattgctggtgagaatgtaaaatggtggtgctaccacagaaaacacattggctctttgttaaaatgtaaacataaaatttccttacaagtcagtatgagtacttcttaattgtatacctgagataactgaaaacatatgttttttaaaataacttttgtccagatgttcatagcatcattttttactgtagttgaaaaatggaaacaaactaaatgtccatcacctactaaataaaatgtggcatagccatacaatggaatattgtaaatctgtgaaaatgaatgaacaaattacataagggattaacctcaaaaacattatactaagtgaaagaagccagatacaaaaggccaatattgtatgattctatttttgtgaagtgcccagaataggcaattttatatggaaagaaagcagagtagtggtttccaggggctgagtgagggaaaatggggaataaccacttaatgtgtacanagtttctttttaggatgatgaaaatgttctagaatcagtggtaatggtaataaaacattgggaatatactaaaagccactgaattgtaccctttaagatggttaaaatggttaattttatgttatgtaaacattatttctctaataaagtagattttcagcaacaaagggcccattagaatggaagcatactctgaagggttattagttatcaactcctaacatgcaaaatatttttaggtagcatttttatatagaagaaattatattnaggcatattaagcattgagtgtcattattattgatgtataatggattcccatccaacattatggtgtgattttaaaagaagagccaggaaatcaaaagtattttctctggggcttaatctttgatcagatcattgaaaaacttatggcttccagatttgtgggggacagatacttttactcattatccaatgctctaaggccacccagagagactggattatctacattgactattcacatttccttagatatatttatttgaatgatggcttctacaaagtagagaagtctgtcattatgagagataaagccagctgggcttctgggttgggtggggtcttggagaacttttctgtctagctaaaggattgtaagtgcacccatcagcactctgtaaaaacacaccaatcagcactctgtgtctagctaaagg

SEQ ID NO: 77508 - DNA, 362 bp, Homo sapiens
actctgttgcccaggctggagtgcagtggctgcaatctcggcccactgcaagctccgccttccgggttcatgccattctcctgcctcagcctccccagtagctggaactacaggcacccgccaccatgcccggctaattttttgtatttctcgtagagatggggtttcaccatgttagccagtatggtctccatctcctcacctcctgatccgcccaccttggcctcccaaagttctgggattacaggcatgagccaccgcaccaggcctttttcaactcttgataaggtcagccttttccatcttagccatcctaacaaaagtggttttactttgtatctacttaatgactaatgatgttg

SEQ ID NO: 77509 - DNA, 347 bp, Homo sapiens
ctcaccgaggcagtacctgaagggcatagtaagcttagacatgaggtaggcagtgggcactgacaagagtgctgagctgacttttgggtccagtagaagcagtaataactaagtcttgcagaatgcagtcccaggcagtaacaccctcatccctcggggtgggagtgggagtagtaaaaggaggggcctggggaatatgctcgtggtggtggtcaggcaaagggtgagagatacaaggaaaaaggcccgtactagagagaacccagcaagtggggatcaggtagaagcagagcatgggaggagagcctgggcccccactccaacaccccacatacctggtctgctgt

SEQ ID NO: 77510 - DNA, 879 bp, Homo sapiens
  misc_feature (401)..(403): n is a, c, g, or t
  misc_feature (407)..(408): n is a, c, g, or t
agctgtagctgtctccccggctggctggctcgctctctcctggggacacagaggtcggcaggcagcacacagagggacctacgggcagctgttccttcccccgactcaagaatccccggagcccggaggcctgcagcaggagcggccatgaagaagctgatggtggtgctgagtctgattgctgcagcctgggcagaggagcagaataagttggtgcatggcggaccctgcgacaagacatctcacccctaccaagctgccctctacacctcgggccacttgctctgtggtggggtccttatccatccactgtggtggtgctctctcacgagtgtgcccacagtgcaaaaaacgcgaatcttcaggtcttcctggggaagcataaccttcggcaaagggannnttcnnaggagcagagttctgttgtccgggctgtgatccaccctgactatgatgccgccagccatgaccaggacatcatgctgttgcgcctggcacgcccagccaaactctctgaactcatccagccccttcccctggagagggactgctcagccaacaccaccagctgccacatcctgggctggggcaagacagcagatggtgatttccctgacaccatccagtgtgcatacattccacctggtgtcccgtgaggagtgtgagcatgcctaccctgggcagatcacccagaacatgttgtgtgctggggatgagaagtacgggaaggattcctggccaggggtgattctggggggtccgctggtatgtggagaccaacttccggaggcttgtgtccatgggggtaacattcccctgtggatcaaaggagaagccaggagtctacacccaaggtctgcagatacccgaactgggatc

SEQ ID NO: 77511 - DNA, 825 bp, Homo sapiens
  misc_feature (347)..(349): n is a, c, g, or t
  misc_feature (353)..(354): n is a, c, g, or t
agctgtagctgtctccccggctggctggctcgctctctcctggggacacagaggtcggcaggcagcacacagagggacctacgggcagctgttccttcccccgactcaagaatccccggagcccggaggcctgcagcaggagcggccatgaagaagctgatggtggtgctgagtctgattgctgcagcctgggcagaggagcagaataagttggtgcatggcggaccctgcgacaagacatctcacccctaccaagctgccctctacacctcgggccacttgctctgtggtggggtccttatccatccactgtgggtcctcacagctgcccactgcaaaaaaccgannnttcnnaggagcagagttctgttgtccgggctgtgatccaccctgactatgatgccgccagccatgaccaggacatcatgctgttgcgcctggcacgcccagccaaactctctgaactcatccagccccttcccctggagagggactgctcagccaacaccaccagctgccacatcctgggctggggcaagacagcagatggtgatttccctgacaccatccagtgtgcatacattccacctggtgtcccgtgaggagtgtgagcatgcctaccctgggcagatcacccagaacatgttgtgtgctggggatgagaagtacgggaaggattcctggccaggggtgattctggggggtccgctggtatgtggagaccaacttccggaggcttgtgtccatgggggtaacattcccctgtggatcaaaggagaagccaggagtctacacccaaggtctgcagatacccgaactgggatc

SEQ ID NO: 77512 - DNA, 236 bp, Homo sapiens
gctgggagtgggggagggaagatcagcaggatgctcaagttccagtgaatggttcttggttatagagcacaagcttgcactcacacgaactctgttgaaactctgttaaagccaaataagcaaattacctgctttcttcttctctggagtgtgccttctgtgtaataaggcactaaacacacatgcctgatgaaatctcctctgagaaaaaactggtaattctgttcttcaggaat

SEQ ID NO: 77513 - DNA, 416 bp, Homo sapiens
tgaacatgtgtgagcttttctgttctttacataagagatggaatgattggaccttagagtacatcttcagtattattaggtaattccaaacagctttccaaagtcgctatatgaatttacacccacactagcatcataagcattcccattgcttcacatcatggtcagcacttcctaattttgccaattcgatgttttattgctacaagaaatattttcctaattactagtatagttgagcattggctttaattttttatctttaacattgtgttggagatagtagctaatggaaatagaaagcaattagaggcacaggaattggaaaataagtaaaaccatctttttttgggataatatagttatgtatcaagaaaatccaaaagcatccatgagaaaactactacaaacaaaat

SEQ ID NO: 77514 - DNA, 339 bp, Homo sapiens
acaatattgaagtattaatgcattcttaaatgatcttcaaatatgatcattatatctagagatattccaaaaatattcagtgaaaggaggaatcggtcttttttacctagtatcactgccatggaaagacgatatcactggatgggtgtcctggcagctctttctttcctggaacattgcacatgccctgctttaaatgaaggaagcttttactttaggcacttagtgttttttgaatatgctttctcatcctttcacgtgataaaattgatgttagactgggaacaatctagatccctttgacaggatatgccagaggtgggaagaaaaagtggttca

SEQ ID NO: 77515 - DNA, 487 bp, Homo sapiens
tttgtactctgtccctttatttctcaagctggccgacgcttaggaaaaatagaaaagaatctatgtgaatatcggggcaggttccccgataccaggagacagggataagaacgtccaagccatgctgttcacgagagcaaagctagcaaccactgaaatcgtgcttagcaggaaagagatggtcacgctctgaaatatcaggcagcagccagaatgaatggccggcagtcatgcgcaacaatatggatggatattagggatctcatagtaagtgaaaagtacaaagaaaagcccagaataatcacattgcatatttcaataaattaaaaacaagtaaatcggccagttgcggtggctcacacctataattccagcacttggggaggcggaggctaggagttcgagaccagcctggataatatggcaaaacccgtctcataattcggtctcaaaataaatgaataaataaaacaagtaaataaatata

SEQ ID NO: 77516 - DNA, 940 bp, Homo sapiens
tatgaaacaatacagttgaaaatgcaattttctgaatgtctgacttgatttgagcgtaaattttagactactgggaggaaggatgggcttacggtttcttcagggaatcctccatgactggagatcatttacttgttctctgtggcacctttcaatcattccacatcctggcatacatagaaaatgatacatttgccagtgtaaacttatgctaaggggttgtctgtagccagaagataactgtggctgggccccagtttccctaagaccccctcacctccacctcttccagggctgagtggatccatattttagcacatcatccctaattctttagtgttagtgtcccgcacagacactgggaagcttgaactctcattcgtaaagtttttcaagatgcctgtattgagtttaaatttctgtgaccttttgtgatatttatatagatgataggttgtacatagttatggagctgatagaaggagccccgcttggagagcatttcagttctttgaaggaaaaacatcaccattttactgaagaaagactatggaaaatatttatacagctgtgcttagctcttcgatacttacacaaggagaagaggattgtccatagagatctgacaccaaacaacattatgttgggggataaggacaaagtaaccgttactgactttggcctggcaaagcaaaaacaagaaaacagtaaactcacctctgtggttggaacaatcctgtattcttgtggtttcatgagaagatgcaaagaaactgtggcaggctaacatgtaccttgtaagctgcaagcttatatgatgtctacttatcctcttaacagtaaggctgacctactcgttactttctgagagaagaataattttcttttgtttcactgtgtactgtttttataaaataaacaataaaatttgatcataaaa

SEQ ID NO: 77517 - DNA, 668 bp, Homo sapiens
tatgaaacaatacagttgaaaatgcaattttctgaatgtctgacttgatttgagcgtaaattttagactactgggaggaaggatgggcttacggtttcttcagggaatcctccatgactggagatcatttacttgttctctgtggcacctttcaatcattccacatcctggcatacatagaaaatgatacatttgccagtgtaaacttatgctaaggggttgtctgtagccagaagataactgtggctgggccccagtttccctaagaccccctcacctccacctcttccagggctgagtggatccatattttagcacatcatccctaattctttagtgttagtgtcccgcacagacactgggaagcttgaactctcattcgtaaagtttttcaagatgcctgtattgagtttaaatttctgtgaccttttgtgatatttatatagatgataggttgtacatagttatggagctgatagaaggagccccgcttggagagcatttcagttctttgaaggaaaaacatcaccattttactgaagaaagactatggaaaatatttatacaggtatgcttttatcttcattaaatttttcttaaaacagtaatgttctgagctggcttcttaaagacgtgcagtagtcatctttggctatatgtatgttggg

SEQ ID NO: 77518 - DNA, 407 bp, Homo sapiens
atgttgatgtctgccactgtaatcacaattaaattggtggcaataaagagttctccacaagtatctctacactcgtcatcccatttattcccccaggcttcttgttcttgatccttcatttacattgtccaacagttttgatacaagctaaaaaaaagtgaagtgtccactgcaacccccacatttgttatatttttaaagataataataatatgtgtgtttctaggcatctttgtttttaaggactctccttacttcagggaagaatctcaccacaatgcttgctgcaaacacctgcagacatctcacattttattaatttcaaagatttgtttaaattaagttgatgaaattaattaaattgaaaacaaatgcacacaaaataaacttattggaacctttgaata

SEQ ID NO: 77519 - DNA, 806 bp, Homo sapiens
tgaagaaaaaaaatatacctccaaagaaaaaataccttcaatctgtcattcctccagatacttcttgagcaaagtctttgtgtatacaaatacccaccattaatgactgtttctcttgtgtttcccagcagcagtgttctccaatatttttaagtttctggaaaaaaatgcgacagttttataattattgacaacttctttttaatatttgcttctttaccatactctgagcttctaaaggttaggggtaggttatagtaggttttcccactatattcctagtgccaagcttattgccagtattgtataactgacactatatatatatttgttgagtatctgcagacaaaaataaaatttttttaaataaaaaattcatacctcatttaatatttttgtatgagaaaatagaatttttttgtctcctaaatgaaaaatttattataatctataatgtacttctgagactctcgttcttatgttgccttgaggttggggatatgtgcctctgtgtactgtttctgtttctccaaccccaaactaacacacacacactctctctctctctcccctccctacctcctgtgaataggggcattgataataaaggagcctatttttactgattataattagaaataaagtttcttcgcatctcagaagagttacataatgggaaaaatgaaactatccatcttgtggatcagggagatgttttggttattctgccaacctcccactgggtctagtcttaactcctttccagtttatagtgttccactttgaatactgctttaatcatgccc

SEQ ID NO: 77520 - DNA, 513 bp, Homo sapiens
gcacatagtagttgaacaataaatgtatagttgctgaatgtgtgagcaaatgtcgagtttttcagatatctgagttcaatatgttaaatagtgtaaatgtattaacgtgctagaaatttttatagacaactcaaaatttttcacttttgaaagaatgtagaagtatattgtcaaaactaagagaaactcaaaaggaaataacaagtcataaaattccacaactttttcttaaaatctgcattctaaattcattggtttaaaacattaaaatttagagaacagaataattgattatcgttcagtaaataataatacagttttggatatgtgaagttctgttttcatgatagtttaaaatttaccatcttaaccatttttatgtgtacgtttcagtagtgttattatatattcacactgttggacaaccaatctgcagaactttttcactttgcaaatctgaaacactgtattcgttaaacaacactatttccacttgccctcagtccctggcaa

SEQ ID NO: 77521 - DNA, 349 bp, Homo sapiens
gatggtcacgggtgtttattactggacatgctctatgcttacttgcttgaaaacgctccattagaaaatgaactctgaaaactatatgcccaatgctaatagtgggtatttattggtaacactctttatcaggtgctatgattgttgatggctttattttcttcttcatattttctataatttctacaatgaacatgtatgtataatcagacaaaaaagccaagaaacatccataagtttttctggtcattcattcatcccataaatacttgctgagcacctgctgtaagccaggctccgagccggctgctgggtagagtgccgcaccccagggaacgctcagccctcg

SEQ ID NO: 77522 - DNA, 655 bp, Homo sapiens
agcggaaaaaattacagagtatattgattaaaatatattctaacaaaatactgatgtatagggatttaaaaaatcctataaaatgtcatcttgtctgtaaaattagcctgacaggaaatttaaaaaagacgttatctacgtatttttgaggaaaatgatattcttcatgttttaagagtaaaatataagaaatacattctcaaaaacacaagaattatgaaaagatagaattttcttaaaaaatggttttaaacaagtaatcatgctaatacatttaagaaattacaaaagagcttttgtgttatgaaatatctgataatacgtattttgttaacctcctcaaaatatgtggttgtctctatgagttttgtgtctcttccatcatatataatcaagctgtagtgtgtctggcagaattctccctaaggatgtattttatattaagttgaaccatgtgaagttgccgtctttgaaggtcaaaaatgattgaattatagacaattcatgagattccatcatatagttaaaaaatatcacttctatgttgctgaaataatttcagccatctttgtcctttttttatcttttaggtcatattttcaaatatatccttgtaattgtattcttaacactactatattttcatgacatccat

SEQ ID NO: 77523 - DNA, 747 bp, Homo sapiens
ccctgcctcagcagcgcccctcactgccccatctcccagggcttacagtccccaccccctgcatcgcccagcgcctgagaggctgggctccgggtacctcccaagagacaagaggtgtgtcccacgccctgtgcagtgagaagccctggaactccaggaccctgcttttttaggcagaatgctatggatgggccactccaaagagaaacgcggctggggccttctcactggggttgcaggccgtgggatggtgtgaacactccatgtttattcacatcttggaccccccaacccccccaagggaggggtggccttgtctttgcaagaaggcttctgagtccttagaggtgaagctgtgtcctcattccactccccactgatacccaagccaacaaggagatgccctgacccactcatggccaaggacactcatggaaaaggccttcgtcctctcagtacagactgtgccaggcaggccaggaaaagccaagaaaatatggatggaacagataggttcctagcaaaatactaaagctgagccaaagtagaaaacttgaattaactaattgccaaaaaaaaaaacagattagagaggtgattaaaaagctaccattaagaaagctctagatggctccagatcacagctgagctctcaccaacctttagagatcagataatttgaaagttaattacaatcttccaagccacagaaaaagattaaaaacctcaattcactttaaaaaaaaa

SEQ ID NO: 77524 - DNA, 792 bp, Homo sapiens
cttcgagagacgcacggacatccccgaggccgaggatgtctatgccacacgccacttccaggctggtggggacgtgttcctgtgcctcacacgctacattggggactccatggtgaggctgggcctgggggcggggggctggcttttcagcactgacccaatcctgcacactaagcctctaaactctgacctaccctcacatgccgacctttgaaccaggaccccaccccacactgatgccaagactctgaccccctcaaggctggctgactccgaaccactccccagtccccgacactgatgctggccccaacatcctgattctacccccagatgctggctctgtgactcggatgcattccagacttcaccacagccacacctgtccccaccctgacactgagcccccaaggctgacgctagggttaagcactgcccactgtttctggagtgaggtgcaggcaggggagggttctgagtctggaagggccctgatctgactcaggtgttcacaaggtctctgggtggggaacagactgggggagcagggagaggagcctagaggccagggaagaggctgccaggatggtccaatcaggaggggatggagttcagccagaggcggtgggagaaatgtacaactgtagaaggtgaaactgacagagtccatggctgagtgcttctgtgtggggcgtgagggcagggaagggctcagaagcactccatgtgtgtggccgcaacaggtgggtggtgactatatgacgataacgaaacgtatggagtttggggacc

SEQ ID NO: 77525 - DNA, 270 bp, Homo sapiens
ccgagcagcagataaggacacagcccagctgacaccttgatctcagcctcatttgaccctgaaccaaagacccagcctcccaggctggacccctgacccacggaaacaaaaggtcatagaggcgtgtggctgtgagccacattcattatccagagatagatacagcagcattaataaagccgctgcatgtccagcacctccccttccacctccgtcaagtacggggaggtggctgagggtctcaggaacccctactgaggggggaaatga

SEQ ID NO: 77526 - DNA, 784 bp, Homo sapiens
tttagagagcacctaccatgtcccaggcactggggtgcgaaagttatttggcaaaccaaaccatatttccaatgctttgggaaagttactatttaaaggagttgtaagtcaagggatgatgccctgacttggtatctttatgcaaatctgtattatccagctttggtgttgctgaaagcgggctctggccaggtgagaaaagccaggatggtggctggactgctgggcataattgccagttcttgagcacagaacaatgcctgtccatagagggctggaagggctggggctgacctccttgtccttgcccctgggctcactctgcatggagggcattccaggagagagttctggaccaggcccatactgagtggcatcaggcacggggagccagctgattgcccaggagggttcacctggctgcaggaggacaaagcagtgagctggctcaccaaggcagcaccacttccaggctgggcctcctggaggcaggcagagagtgagaggaatcacagcattaggactgggagggactgagagaggacagcaccctggatgagcttgtggaggacagctgggggcaaagtattgccttggagattaattattaatcctgtttgggcattgcaggaaacaagccacggtgcccccacatgcttggttcaaacagtgtacaggttctagggtcctgtctagctttatgaacaggagcaaatcctttccagcatgagttggactgaaaaacagagtcaggatcggagcatgcttcagccaagacctaaaa

SEQ ID NO: 77527 - DNA, 597 bp, Homo sapiens
agtacaaaataatatcttatgtaataaatttgcaggtgctcaaaagagtgggaacgagccacaggataacgtctcagagacctaaccacctgacttggttagcgagtacagctttttcaaagctcagccaagatactaggggaagtagcctgagaaggtttattatctctgtcctgatttgtgttctactgccaatgttttgagcatggagcaagcactgtgtgtgattcaaaaacatgccatatgatttaaaattgtacccatcaactctagtaattactgtgggagcaagaagccagcagtagcaatgacagcagcaacagcagtaggatgaatccctgcttcaaagagtttgaaggaagaaaggcacactctccgaggtacttccttctgcaggcttggtctcctcatcctcgagccacacactgtcagttctaccatgtgctaggaggtcctcctacctcccgctgccagctccttcataacaaagaaaatgaatccgtgaattacagctggttgattggcatcctgttgctaggaaactataaaacgaatgtatcatatttcataataaaaatgtctctgacccattcctac

SEQ ID NO: 77528 - DNA, 802 bp, Homo sapiens
caaaaattagccagatgttgtggtgtgaccctgttgtcccagctacaagggaggccaaggtgggagaattgcttgagcctaggaggtcaagactgtagtgagctctgatcacactgctgcactccagcctaggtgacagagcaagaccctgtctcaaaacgaaacaagaaacccattattcgtgaaaggctatcttgccccagagtctggagatacagtgatgagcaacagacattccttaccctcatggagccaatattttagttgtaaaaataagcagggcaggaaaattaagtaattatatttttaagaaattattttcatttatttattttttttttaaagatagagatgaggtcttactatgttgcccaggctggtcttgaactcctggactcaagtgatcttcctgcctcccaaagtgctgagattacaggtgtgagctgctgtgcctggcctaaaattaagtaattctaaaagatgataatgccttgaaaaaaattaagtgttgagatagagaataatgggaaaggaagaaggtgagggcaggtgtagccaataaactaatacttaaattaaatgcaaaggtatgagggcatctccatggaaagaggtatagaaagaatattccaggtattcagattcagaaaaggttgtgaaataaaattttaaaaaattccaagaccaggcacggtggctcacacctgtaattccagcacttcgggtggctgaggcaggagaatcatttgagctcaggagttcaagaccagcctgggcaacatagggagacactgtctctaca

SEQ ID NO: 77529 - DNA, 362 bp, Homo sapiens
caaaaattagccagatgttgtggtgtgaccctgttgtcccagctacaagggaggccaaggtgggagaattgcttgagcctaggaggtcaagactgtagtgagctctgatcacactgctgcactccagcctaggtgacagagcaagaccctgtctcaaaacgaaacaagaaacccattattcgtgaaaggctatcttgccccagagtctggagatacagtgatgagcaacagacattccttaccctcatggagccaatattttagttgtaattccagcacttcgggtggctgaggcaggagaatcatttgagctcaggagttcaagaccagcctgggcaacatagggagacactgtctctaca

SEQ ID NO: 77530 - DNA, 439 bp, Homo sapiens
atgcatagtttgttgattaatgagaagcttacagaaaaataaatgaaacaatatgtcaaagtagaggaaataggtattaataattccaagggaagcagaaatttaccaggaattttgactctttgtgagtcaatggtgaaaaatgttttacgtgaactctgatcaattctatggccaaagtcttgagttttgattccatcagaattctgtgaaatatggagatttgtatagaaggggagtcaatccctggaaattgcatacgtttcaagtattggaagacagtctcggcattcaggaagctagctggccctttgtcagaaacagagaagacagccatttatgctagaagagtggcaggaccaactaaacacatgtgcctctaatttgtaaactgagtgtctataaattaagaatgttttaaatctgttttaacaggcat

SEQ ID NO: 77531 - DNA, 865 bp, Homo sapiens
aatttattgagaatgtgggaaaacatttgttctctaaaagaaagttgcagatcatactgcaaagtgacagctgagcaaaggctcccccttgagaagggcatgtgctactcagctcatggcatctgggctctcattgataatggggggtaggttggaagattcttggaagccacagcaagacacaccacacctgggctctcataatcattttgccaccctagagagctccagacacacgattggccctctaacagaggaacattttaatacaagtgtgtactgctcaaggactcatttgctaagttaggggcagactccttggtaccaccaaatcctatttttcctaaatcggtcaatgtattgtcatatcccctgtgtgcagttttaactctgtgagtctggatttgaatggaggcccagctttattctagctgtgcaactgtgggcaagttccatcttctccaaagttagcttcctcagggtattgcaagaattaaatagcaaaatgcacataagtgtctggcgtagagtaagtgatagcttcctttcttttcctcattttaatcaattacccagttggtggatgtgataacaaatgaacttcctgaagatcagagctgtgtgttagtgtagggctcagatcctctttatgtattcagtgaacactatgttctgtctaacaggcacctgctctaggttattagggccattaaaggcatgttatattctcaaagagtatacaatttagtaagagacacagaaaaaactgatgttcgattgttaggttggtttaagttgttgatacatacttggaatgactaagatcattgtttaacattggtgagtgcacactgcaatgggaact

SEQ ID NO: 77532 - DNA, 332 bp, Homo sapiens
ccttgggtaagaaaggatgaattaatgcctctccattggaagtgagtatgattgaagatgcagtgtctcttgtcttcttgctgaccaagtgaaaatgagagaatatggcccaaccactttggagagttatatagcagtacctagtaaatttcttctggtagacctggggcctactttagagaaactctcacatgttcagaaggaggtagatggaagaatattcatggcaactctgtgttaatagcaaataaccagaaacagcccaaatgtccatcaacagaaatgggctaatgaattcttacatagagtgaaattctttatagcagttacag

SEQ ID NO: 77533 - DNA, 468 bp, Homo sapiens
taagagattacttttttaaaaaaaatttttttccccttgcaatttcctgtttcaacaggaaattgcaaggggaaaaaaatccaagaacataatgtaaaaaatttaagagcccatgaaaagtcagctattcatttagtagcaccaacccagaggaaaaacatgttttaaaagacctgatactagccgggcgcagtggctcacgcctgtaatcccagcactttgggaggccgaggcgggcagatcacctgaggtcgggagtttgagaccggcctggctaacacggcgaaatcccgtctctattaaaaatacaaaaaaattagccgggcgtggtgtcacgtgcctataatcccagatactcaggaggctgaaagaggagaatcacttgaacccagaaggcggaggttgcagtgagccgggatcacgcctctgcactccagcctgggcaacagagtgagactgtctgaaaaa

SEQ ID NO: 77534 - DNA, 802 bp, Homo sapiens
agtgggagtgagagagagagagagagagagaatgagaattccatctggatattatcctggttatataactgtgtataaggcacttcttcatacagtatttaatttaatcttcacaagagccatcctagtgaaatagacgttaatatcactattatagatatgagcagactgaatatcatcaaaatctgactatgcatattaaaaaaaagaactggttctactaagtcctaagaaaaattccgctgttgcctcaaacatcacaactagcactcctagcccagtgtttgacacaaagttgtgttcagtaaagggtgaggtgcaccaaagtcccaaaagataatggacagctgtgtccaggaattcctatctagaggtttcagttcatgttccaattatttcgggggcaagctctttacagaaaaatttagatgatacatcctcttcaatctcattttcgaagacatttgtaggaaaaatgcatttgctgtaaagctttattttaaagaggatgcaaatctaaaaggttaaccatctaatttactattttttttaaatgggattgaaggttaagacatgtatgtaaaacagatttgcttcaaaatcttgagctgctgaactagatgagtaataagttttgaaaagtgaatattagccccttgggcaataataataagatgcacaacattatcgatcttgtatatgcctaataagtaggcatatacaataaactaacatgtgaattgcatatcatttaagagaaaaaaacgacaccacacttttctaaaacagaactctgattcca

SEQ ID NO: 77535 - DNA, 538 bp, Homo sapiens
gtgaaatggaacttttaaaatcttgtaaaagggacccacaaaaaaatctgcaggatacatcatgcattatggtaaaacgttgaaaacattatctttaagattaggaataagacaaggatgcctgctgtcactacttctattcagctttatagtggatgtcctagccagtgcagtaagacaaggaaaagaattaaagggtataagagctagaaagtaataaagcaatatatctgccattattaaatatgaaagggtgtctctttagaaagcctcaaaggattcacagattgattattaaattatttaaaatctaacatgattgctaaatacaaaagtcaacatacaaaattcaacagtatttgtttacagtagagcaattgtttagaaaagcagttcaggaaaaaaaaaattaaaatagcaggctagatgtagtggctcatgcttgtcatcttagcactttgggaggccaggacaggaggattgcttgaggccaggagtttgagaccagccttggcaatatagtgagaccccatctcta

SEQ ID NO: 77536 - DNA, 684 bp, Homo sapiens
ggcagcgttctggttttctggatggcagcagaggacagggagatgatggaagcccggggtgcgggagaaagttgcccgaccttccccaagatggtgcctggtgactccaagtctgaagggaagccaagggcttatctggaggcagagtcccagaagccagactcctcctatgactacttggaagagatggaagcttgtgaggacggaggctgccaagggccgcttaaatcgctgtcccccaagtcctgccgtgctaccaaaggccaggctggcgacggacccaaacccgcagagctgcccccgacccctgggactgagcgcaatcccgagatggagctggagaaggtgcgcatggagttcgagctcacgcggctcaagtacctgcatgagaagaaccagcggcagcggcagcacgaggtggtgatggagcagctgcagcgggagcggcagcacgaggtggtgatggagcagctgcagcaagaggcggcgccccgcctgttttcaggaggcctccagaacttcctgctgccccagaaccagtttgccatgttcctgtactgcttcatcttcattcacatcatctatgtcaccaaggagatggtcttctttctcttcgccaagcactacctattctgcattgcagccattttgctctgtttgattaaaactttctggtcataaatc

SEQ ID NO: 77537 - DNA, 330 bp, Homo sapiens
ttggaaatgggcactattaccctttctttaggtgaagatgatgacttgaggtcacatacaggcagggtcagagcaggactgaacctagatctgcctggcgccaacaatggcatcatcatctccactgtcttctctcccccacagttttcaggaggcctccagaacttcctgctgccccagaaccagtttgccatgttcctgtactgcttcatcttcattcacatcatctatgtcaccaaggagatggtcttctttctcttcgccaagcactacctattctgcattgcagccattttgctctgtttgattaaaactttctggtcataaatc

SEQ ID NO: 77538 - DNA, 722 bp, Homo sapiens
ggcagcgttctggttttctggatggcagcagaggacagggagatgatggaagcccggggtgcgggagaaagttgcccgaccttccccaagatggtgcctggtgactccaagtctgaagggaagccaagggcttatctggaggcagagtcccagaagccagactcctcctatgactacttggaagagatggaagcttgtgaggacggaggctgccaagggccgcttaaatcgctgtcccccaagtcctgccgtgctaccaaaggccaggctggcgacggacccaaacccgcagagctgcccccgacccctgggactgagcgcaatcccgagatggagctggagaaggtgcgcatggagttcgagctcacgcggctcaagtacctgcatgagaagaaccagcggcagcggcagcacgaggtggtgatggagcagctgcagcgggagcggcagcacgaggtggtgatggagcagctgcagcgggagcggcagcacgaggtggtgatggagcagctgcagcaagagcggcgccccgcctgttttcaggaggcctccagaacttcctgctgccccagaaccagtttgccatgttcctgtactgcttcatcttcattcacatcatctatgtcaccaaggagatggtcttctttctcttcgccaagcactacctattctgcattgcagccattttgctctgtttgattaaaactttctggtcataaatc

SEQ ID NO: 77539 - DNA, 153 bp, Homo sapiens
aaagacacaacaactaaaagcaacatatgaacctcatttggatagtgctctgaaaaacattatgtggcagtggataaatctgaatgtgaactatgtattacataatatattaataatacatttcttgagagtgatcattatattgtagtatat

SEQ ID NO: 77540 - DNA, 471 bp, Homo sapiens
attgggaagttttcatgagactgtggaatgtttcctctgcttaggggatttcctggacctttccaagtgcgttccagtctaaaagtctagaacttggattaacctgagggcatttatagcaaactctagctccagatatactcacctggttaattctgccaagctctttaagaaggtagtatcactactagaaagcgcatgggagaccttggggctgacctcggtttgaaattattcaaccatttactatgagactgactttggtggtactttgatttttttcttctgtaaaacaggaataatatttcatagacttttgagaatcaaatactaatgcatgtaagttaatacagtatctgatagcaagtgttctatataaagtagccaattgctttactgagtatctgttttaatgtgtattacataagatattgtgttctcttgtagaaggtaaatggtttttcatcctat

SEQ ID NO: 77541 - DNA, 391 bp, Homo sapiens
gcctctaaccaacaggctatcgtgaagatcatacgcactgcactggttacatggattacagctgcagacttctaacacaaaatccacacacaagtacacggacccaggtggaggcctcagccccttatttcctgcttctctccactgtcttattttcaagctgctactggtgcaccatgagaacctgatttaatactaagtgtccataccaaagcaccattcaactctgtgccacccaccaagaaacaagagagtttttacacaatggctacttgtagaacctccgaactacctacagagtccccgtggtgacatgctgtaaagtactccgtatttgtttccactaactgggtgattgaaaataataaaaatttattatctgacaaatttg

SEQ ID NO: 77542 - DNA, 496 bp, Homo sapiens
gcctctaaccaacaggctatcgtgaagatcatacgcactgcactggttacatggattacagctgcagacttctaacacaaaatccacacacaagtacacggacccaggtggaggcctcagccccttatttcctgcttctctccactgtcttattttcaagctgctactggtgcaccatgagaacctgatttaatactaagtgtccataccaaagttcaatgtctgtccctacagcataatataacatcggttatctcaaacaattgatctggcttagttcctggcccaggtgcatattagtttttggaagaaactgaatacatattgtaaaagtgtattagctctttcaagccaaaggggagtgattaaatagatgacttctccaggggtggaggccttcaagtggggcgagatgaggaggcagagaatcctaagcactctgtttcattttcttgtgagcaaaaaacatgagacagtgtcctttgtttttgattct

SEQ ID NO: 77543 - DNA, 527 bp, Homo sapiens
cttcaggagtggcagaggctcggtccccgcagaggagtctcatcgccgccggtgctctcgcactgtccattcccgcacccatgcattttctcttggttagagaccagaaggatgcagtggccgtctttcccgctgcctttcctttggtacttttgagaactccaaaagaggaccttatttttaactcttatttgtattatcgtgattgcaaatattatgttccagactaaggatgttctttcttattagtttgacttgtatgaaaaccagtccatacatttgatattaagttaatcttttcaattcaaaaaataggcactttgttgattcaatcagattcctccatttattcacttgagcttgtcgtctcttgagttggcgggagtttaatggtttaatccagtagaactatatataatttttcgcctaatttcttcctttttttcctctcctggatattaaaccgcatgcttagtggcaaaaattgaaaaaatagaataaagaataaggaaaaatgatcaatcata

SEQ ID NO: 77544 - DNA, 325 bp, Homo sapiens
atttttaattcatcttataggcatgaggatatatgtattttactgctttaaaataaagccaagtcctcagtgaaagagtatgttaacaatccagatgattgtggcactaacacattaaatagattacacttcttttaaactttctgactttttgctaataaggccagacattaagacagtcacaacttaatgagcttcattccattttttctttcattcccctgagcagccatgtgtcactcgctctgctggtgatggccctgctgctgccttggggctgcacctgctaggggccggggatgggagccactcaagagctcttaga

SEQ ID NO: 77545 - DNA, 798 bp, Homo sapiens
attcaagacccttgtaaacctaaggctatggttattttcagaaaaaaacaaaagttttaatctgtaaagtaagaggaatttggtttcaagcagttctttaaaagcatacagagaaagtcctgaagctttgtatgaaggcacattataagtcaaactgtattttgacatatgctaaaatttacttatctgagcccttaatagtaaatctgacatacttttaaatggagttttcatgaaaattctgggtttggaagagaccccaaaggctcaaaatagctattatttctacttatttaattttgtttttttctttttggccagctgttaaacttaattcattagttcttaagctgtccagagtgcagagcaccaggataagtcaagacaagacactctttgtagaacttcatgaatgttaacatagttaacttaaaattataaaataggtactttatgctaaattagaaatgatcttagattgagtgataagctaagcaagcagtagcaaacaaaattttgaggaaaaaaatttaagtaaaaactacggcaaactttttttttctatgaattgacagaacctcccatttaaaacatatgccagccttggcaacagagcaagaccttgactctacaaaaaatgaaaaaaattagccaggcatggtggtacatgccagtggtccttgctgcttgggatgctgaggtcgggggatcacttgagcccaggaagttgaggctacagtgagccatgattgcaccactgcactccagtctgggcaatagagcaaggcattgtctcaa

SEQ ID NO: 77546 - DNA, 413 bp, Homo sapiens
tgagagcttaaaacaagagttccacagatgaggagaagaaagaagctttcactccaggcaggaggaacagtgtgaggccctgagcaagaaagggtaacaaaccagccaacaaatgggaggtttttcctgagtgcatgatgagaaagaactgccaggaaagctgcagaacagaggtctgaaaacataagagaagccaggaaaatgcaagtccttcctcctgaccctagaaaatctctgctgccaaggctgggactctgctgccaacttcaggcctgggaaaaccaagactccaggagctctacctctaggattcttccaaacatctcaccatgtcctctgatacctctgtagtcatctgccacaacctacttctgaataaatcctacattccacctttctgtgcctgtacccaa

SEQ ID NO: 77547 - DNA, 344 bp, Homo sapiens
tgagagcttaaaacaagagttccacagatgaggagaagaaagaagctttcactccaggcaggaggaacagtgtgaggaactgccaggaaagctgcagaacagaggtctgaaaacataagagaagccaggaaaatgcaagtccttcctcctgaccctagaaaatctctgctgccaaggctgggactctgctgccaacttcaggcctgggaaaaccaagactccaggagctctacctctaggattcttccaaacatctcaccatgtcctctgatacctctgtagtcatctgccacaacctacttctgaataaatcctacattccacctttctgtgcctgtacccaa

SEQ ID NO: 77548 - DNA, 259 bp, Homo sapiens
tagtggagaaataacattgttcaataaatttataaaattatgatggaagaactttttctcccattggaagacaatgaatgtataatctacatccagttaaatttaattaaaatttgttgaaacatggcaaaagatacgtctgtttaaaaacctttttatggccgggcgcggtggctcacgcctgtaatcccagcactttgggaggccgaagcgggcggatcacgaggtcaggagatcgagaccatcccggctaaaacgg

SEQ ID NO: 77549 - DNA, 268 bp, Homo sapiens
ggagctcgcaggactgcaagttgctctggatgggtcagtgagtggtgagtgaatgggaaggcctaggacattactgcacactgctatagactttataaacactgtgcacttaggctacactaaatttacttttttaagcatatttttatttctttaataagttaaccttagcttactgtggcatttttgctttataaacttttaattttttttaactttttgacttttgtaataatacttagcttaaaatacaaacacattgtacagc

SEQ ID NO: 77550 - DNA, 451 bp, Homo sapiens
agtgggttttcatttgcactccagggttcagctgcagacccaccaggtgaagacccaccagcacaccttgccctgcttctgggccacgtctctccagtgcacctgcaggagacctctgtggatgcaccgtgtctcctaacactgtctccagcccacactgagcttgtcttgcgtggaaatctttgtctctgctgttgcctttgcctggagcgtccttgccccacaccctctcacagctgcctctctgtcatctttccaatgtctgtcctcagagagcccttcctggccactccatctaaaggagtcctgggccaggtgtggtggcccacacctgtaatctcagaactttgggagacggaggtgggaagatcacttgaggccaggggttcaagaccaacctgggcaacatactgaaacccccatgcctataacaataaaaaaggaaaaaaag

SEQ ID NO: 77551 - DNA, 281 bp, Homo sapiens
ccctttgaaggtttcaaagcacaggtatcactcagtaagatggattccagtcttcacccttcctgcagtgtgggtatcagtgttgggcacaccagcagtaaggatgctgactaataagtgagattaggactgagaagagaaaaaacaaaggttcccctggggacatgctggctgggagagacctgcagacctggaaggcaggagagtactgggaggagaggaaggacactaggtgtgcagcaggagcaccgaccccaaccgtggagtggcagtggccccag

SEQ ID NO: 77552 - DNA, 560 bp, Homo sapiens
aaacggccccctattactactaattcgcggccgcgtcgaccggtttttattttgattttttcagtataaaaaaagttgccttgatggcatattatgatgtaatgctaattgcttgtaggatagtaaatggtcagtattgaaacctaatctctagctgccgtcttgtagatatgaacgaatgttcaccaagcatgtattttgtattttgttgcattgtacactgcaactaataagccaaggaatcgacatatattaggtgcgtgtactgtttctaaaaaccacaaactaagaatgataaattatcaatatagtttagtatttgctaattttactacactcttttgttatgtatatgtagggaagtcatagggattataaattcaatttgagtaaaatttaaaaccatatattttatgataaagggcctttaacttaagatggccaaagcactgatattatatatttgctgtaaagagaattataagagttttatttttctgatattaaaagttacttaataaagacttgtttccattaaaaaaaaaagtcgacgccttggt

SEQ ID NO: 77553 - DNA, 637 bp, Homo sapiens
tgctgtacggaggggacgatgcccagggcatgatggcggcgatgctgtcccacgcctacggccccggcggttgtggggcggctgcggccgccctgaacggggagcaggcggccctgctccggagaaagagcgtcaacaccaccgagtgcgtcccggtgcccagctccgagcacgtcgccgagatcgtcggccgccagggtgagtgcaggggtggggaggtccagctgggcatggccccgggcgtgggtggggagacgagagaaaggagcgtgggacggaaaaggcgaacccggcgaggcccccaagtccaccgcgaaggggtctgggaggagccgagggtcgaccagatgtgaagatgggtcaccttgcgaaaacccacgcttttccgcccgtcttgcctggtaaaaagtgtgaagtttctcgggcgacccagtccggtggtgttcacgttacttgggctgtattcgtggaacaccaggctggcgtggcaccagaaacctcagtgaggtggtaaaaggtcgggctcgaggagttgtgggttcgctgttgggtacggaaagcttcgagattgcaagtttgcgccgccgagtgtcttctaaaagcgttcagcctcccttacaagaacttgttcagatgg

SEQ ID NO: 77554 - DNA, 3243 bp, Homo sapiens
tgctgtacggaggggacgatgcccagggcatgatggcggcgatgctgtcccacgcctacggccccggcggttgtggggcggctgcggccgccctgaacggggagcaggcggccctgctccggagaaagagcgtcaacaccaccgagtgcgtcccggtgcccagctccgagcacgtcgccgagatcgtcggccgccagggttgtaaaattaaagcactgagagccaagacaaacacgtatatcaagactcctgttcgtggtgaagagcccatttttgttgtcactggaaggaaagaagatgttgccatggccaaaagagagatcctctcagctgcagagcacttctccatgattcgtgcatctcgaaacaaaaatgggcctgccctgggaggattatcatgtagtcctaatctgcccggtcaaaccaccgtccaagtcagggtcccttatcgtgtggtaggattagtggttggacccaaaggagcaactattaaaagaattcagcagcagacccacacctacatagtaactccgagcagagataaggaacctgtctttgaagtgacagggatgcctgaaaatgttgaccgagcacgggaagaaatagaaatgcatattgccatgcgtacaggaaactatatagagctcaatgaagagaatgatttccattacaatggtaccgatgtaagctttgaaggtggcactcttggctctgcgtggctctcctccaatcctgttcctcctagccgcgcaagaatgatatccaattatcgaaatgatagttccagttctctaggaagtggctctacagattcctactttggaagcaataggctggctgactttagtccaacaagcccatttagcacaggaaacttctggtttggagatacactaccatctgtaggctcagaagacctagcagttgactctcctgcctttgactctttaccaacatctgctcaaactatctggactccattttgaaccagttaacccattctcgtggctttgggagtgatccttctggtaacatgaagactcagcgcagaggaagtcagccatctactcctcgtctgtctcctacatttcctgagagcatagaacatccacttgctcggagggttaggagcgacccacctagtacaggcaaccatgttggccttccaatatatatccctgctttttctaatggtaccaatagttactcctcttccaatggtggttccacctctagctcacctccagaatcaagacgaaagcacgactgtgtgatttgctttgagaatgaggttattgctgccctagttccatgtggccacaacctcttctgcatggaatgtgccaacaagatctgtgaaaagagaacgccatcatgtccagtttgccagacagctgttactcaggcaatccaaattcactcttaactatatatatatacataaatactatatctctatatggactcgtaaaggcatgggtataatggtaccccccagtaaacttcctaatgatttcttatgactgttatcaggctttattgggattaggctaaagttgttagtaaacttataaaaggctgctatggtaacactaaacctaagtggtctcttgtctattagtttggtttgaattattagtactatcctgtagacccagagacatagtttatataagaattgctaaagctgaagttcaacttggctgagtgaagataatcataggttgtgtgagcctatgaaaaagtgtatacgtctaagatttcaaaacaatgggtcccaaagcctaaccactttaagagtttatggagggtacttggcattacagacgattcatacacttccagtgctgccttctttacactgccagttttgacaaaacaggtttgttttttattttacaacaacatatgcctaattctgcaggattgcaagtaactttttaatgcattgtgattacttattggtaatgatagggctgatggcagtttactagatcactggttataatttgggacaaaaactgctacatcaactttcatctcgcccagagtgctcaaggctggtatgatcagtggatcaggaatgcaattgtgaattcctgcccattgcctctcttggtgaatgtggaaatggccacctgggttttcccatatcaggaagggctttgggatggcacctatattggctgataattgaggatgcaaacattccattcattagtgtgatcgagctgttaatttttagactatagatcaaaatgtgaaacattttatgttcaatccatatttgtcttgcacattataaatatatttttattttttagtaatttaggggagggaggagggagaaagggataatgatgcccttggcataattcacaaaagcagctgtgacaacctccaatcagtttacttcatttcaaaactatttccaatcacaaggaaagatttatttaaaatatactcgtacatttcacctgtggatgtctataacttcatcctcagtatgttcccaaatctgtgctggcattgaaaggacaaaacattatactagtgggtttttctactaattattttttgaagcattattttcccaacacaaaagagcttttttctcggtataatgaaaattgaaatcctatgtgtattcaatagtaaatagacaaattttattttttatttccacttgaagagttacatttcgtataaaagtttacaaataacggtttttattttgattttttcagtataaaaaaagttgccttgatggcatattatgatgtaatgctaattgcttgtaggatagtaaatggtcagtattgaaacctaatctctagctgccgtcttgtagatatgaacgaatgttcaccaagcatgtattttgtattttgttgcattgtacactgcaactaataagccaaggaatcgacatatattaggtgcgtgtactgtttctaaaaaccacaaactaagaatgataaattatcaatatagtttagtatttgctaattttactacactcttttgttatgtatatgtagggaagtcatagggattataaattcaatttgagtaaaatttaaaaccatatattttatgataaagggcctttaacttaagatggccaaagcactgatattatatatttgctgtaaagagaattataagagttttatttttctgatattaaaagttacttaataaagacttgtttccattaaaaaaaaaagtcgacgccttggt

SEQ ID NO: 77555 - DNA, 3120 bp, Homo sapiens
agcggatcacaactctgccactgccatcagcaggaacaacccagctttcaccttccactgcttgccatcccaaaggttgtaaaattaaagcactgagagccaagacaaacacgtatatcaagactcctgttcgtggtgaagagcccatttttgttgtcactggaaggaaagaagatgttgccatggccaaaagagagatcctctcagctgcagagcacttctccatgattcgtgcatctcgaaacaaaaatgggcctgccctgggaggattatcatgtagtcctaatctgcccggtcaaaccaccgtccaagtcagggtcccttatcgtgtggtaggattagtggttggacccaaaggagcaactattaaaagaattcagcagcagacccacacctacatagtaactccgagcagagataaggaacctgtctttgaagtgacagggatgcctgaaaatgttgaccgagcacgggaagaaatagaaatgcatattgccatgcgtacaggaaactatatagagctcaatgaagagaatgatttccattacaatggtaccgatgtaagctttgaaggtggcactcttggctctgcgtggctctcctccaatcctgttcctcctagccgcgcaagaatgatatccaattatcgaaatgatagttccagttctctaggaagtggctctacagattcctactttggaagcaataggctggctgactttagtccaacaagcccatttagcacaggaaacttctggtttggagatacactaccatctgtaggctcagaagacctagcagttgactctcctgcctttgactctttaccaacatctgctcaaactatctggactccattttgaaccagttaacccattctcgtggctttgggagtgatccttctggtaacatgaagactcagcgcagaggaagtcagccatctactcctcgtctgtctcctacatttcctgagagcatagaacatccacttgctcggagggttaggagcgacccacctagtacaggcaaccatgttggccttccaatatatatccctgctttttctaatggtaccaatagttactcctcttccaatggtggttccacctctagctcacctccagaatcaagacgaaagcacgactgtgtgatttgctttgagaatgaggttattgctgccctagttccatgtggccacaacctcttctgcatggaatgtgccaacaagatctgtgaaaagagaacgccatcatgtccagtttgccagacagctgttactcaggcaatccaaattcactcttaactatatatatatacataaatactatatctctatatggactcgtaaaggcatgggtataatggtaccccccagtaaacttcctaatgatttcttatgactgttatcaggctttattgggattaggctaaagttgttagtaaacttataaaaggctgctatggtaacactaaacctaagtggtctcttgtctattagtttggtttgaattattagtactatcctgtagacccagagacatagtttatataagaattgctaaagctgaagttcaacttggctgagtgaagataatcataggttgtgtgagcctatgaaaaagtgtatacgtctaagatttcaaaacaatgggtcccaaagcctaaccactttaagagtttatggagggtacttggcattacagacgattcatacacttccagtgctgccttctttacactgccagttttgacaaaacaggtttgttttttattttacaacaacatatgcctaattctgcaggattgcaagtaactttttaatgcattgtgattacttattggtaatgatagggctgatggcagtttactagatcactggttataatttgggacaaaaactgctacatcaactttcatctcgcccagagtgctcaaggctggtatgatcagtggatcaggaatgcaattgtgaattcctgcccattgcctctcttggtgaatgtggaaatggccacctgggttttcccatatcaggaagggctttgggatggcacctatattggctgataattgaggatgcaaacattccattcattagtgtgatcgagctgttaatttttagactatagatcaaaatgtgaaacattttatgttcaatccatatttgtcttgcacattataaatatatttttattttttagtaatttaggggagggaggagggagaaagggataatgatgcccttggcataattcacaaaagcagctgtgacaacctccaatcagtttacttcatttcaaaactatttccaatcacaaggaaagatttatttaaaatatactcgtacatttcacctgtggatgtctataacttcatcctcagtatgttcccaaatctgtgctggcattgaaaggacaaaacattatactagtgggtttttctactaattattttttgaagcattattttcccaacacaaaagagcttttttctcggtataatgaaaattgaaatcctatgtgtattcaatagtaaatagacaaattttattttttatttccacttgaagagttacatttcgtataaaagtttacaaataacggtttttattttgattttttcagtataaaaaaagttgccttgatggcatattatgatgtaatgctaattgcttgtaggatagtaaatggtcagtattgaaacctaatctctagctgccgtcttgtagatatgaacgaatgttcaccaagcatgtattttgtattttgttgcattgtacactgcaactaataagccaaggaatcgacatatattaggtgcgtgtactgtttctaaaaaccacaaactaagaatgataaattatcaatatagtttagtatttgctaattttactacactcttttgttatgtatatgtagggaagtcatagggattataaattcaatttgagtaaaatttaaaaccatatattttatgataaagggcctttaacttaagatggccaaagcactgatattatatatttgctgtaaagagaattataagagttttatttttctgatattaaaagttacttaataaagacttgtttccattaaaaaaaaaagtcgacgccttggt

SEQ ID NO: 77556 - DNA, 4205 bp, Homo sapiens
caggcatgcaccaccacgcccagctaatttttgtgtatttagtaaagacggggtttcaccatgttcaccatgttagtcagcctggtcttgaactcctgacctcaggttatccacctgcctcaccctcccaaagtgctgggattacagcacctagcttctttattttgacaaactaagaatagtatgatatattcatgagaacacatctatgctggcaagctcaagttagggtctttgaaaagtataaccccagagttttattccttggttgtgtacttgacattttaagttacagtttgaagccctctaatcttcacatagttggcactagtaatctgtgattactcaaaaaaaaaaaaaaaagttggttaaagtggagaattacgtaaagttatacatatgtgtcttagatgttttattttaacttaaatatacttaggatttggggtcatggccttttatttgaaattgtgtctgtcaatcagagcagtccttgaataaaaccacacccagcacccacattccatacaatctgcagtatctgtttcttttaaatggagcaggactttacaatgattacaaaatcattctatattacttttttttttattccagccctttacagctgtctcacctattcataattcagtagcagctttttctttaagatactcatcttttttgcattcatgtttcactagtttatgcagtaatttagataatttagttactagcgtgagtacacctaccacaaacaacatgggaataaacaaaactgaatcatagcaggcctagaatttaactggtgggagcagaagtgagatgacctactagccatgagcacggtgtttttgtcatcaattgagttttacagaggaaagagtaatgttaagttaaagtggtaagataattaggtggaagtcagtttaataacttctgtcagataattgtgaaaatcgaggttcttggactagcacaaagaccacagattttaagtcaaactaggttacttctggctctgccacttcctagctatgtgaaagactctaaaacttaacccataaccagatatttagcttaaaaggtgcattctgtgatttgtctttatatatatcattgaagtagatgttgattcttatgaaatgttttctttctaacaggttgtaaaattaaagcactgagagccaagacaaacacgtatatcaagactcctgttcgtggtgaagagcccatttttgttgtcactggaaggaaagaagatgttgccatggccaaaagagagatcctctcagctgcagagcacttctccatgattcgtgcatctcgaaacaaaaatgggcctgccctgggaggattatcatgtagtcctaatctgcccggtcaaaccaccgtccaagtcagggtcccttatcgtgtggtaggattagtggttggacccaaaggagcaactattaaaagaattcagcagcagacccacacctacatagtaactccgagcagagataaggaacctgtctttgaagtgacagggatgcctgaaaatgttgaccgagcacgggaagaaatagaaatgcatattgccatgcgtacaggaaactatatagagctcaatgaagagaatgatttccattacaatggtaccgatgtaagctttgaaggtggcactcttggctctgcgtggctctcctccaatcctgttcctcctagccgcgcaagaatgatatccaattatcgaaatgatagttccagttctctaggaagtggctctacagattcctactttggaagcaataggctggctgactttagtccaacaagcccatttagcacaggaaacttctggtttggagatacactaccatctgtaggctcagaagacctagcagttgactctcctgcctttgactctttaccaacatctgctcaaactatctggactccattttgaaccagttaacccattctcgtggctttgggagtgatccttctggtaacatgaagactcagcgcagaggaagtcagccatctactcctcgtctgtctcctacatttcctgagagcatagaacatccacttgctcggagggttaggagcgacccacctagtacaggcaaccatgttggccttccaatatatatccctgctttttctaatggtaccaatagttactcctcttccaatggtggttccacctctagctcacctccagaatcaagacgaaagcacgactgtgtgatttgctttgagaatgaggttattgctgccctagttccatgtggccacaacctcttctgcatggaatgtgccaacaagatctgtgaaaagagaacgccatcatgtccagtttgccagacagctgttactcaggcaatccaaattcactcttaactatatatatatacataaatactatatctctatatggactcgtaaaggcatgggtataatggtaccccccagtaaacttcctaatgatttcttatgactgttatcaggctttattgggattaggctaaagttgttagtaaacttataaaaggctgctatggtaacactaaacctaagtggtctcttgtctattagtttggtttgaattattagtactatcctgtagacccagagacatagtttatataagaattgctaaagctgaagttcaacttggctgagtgaagataatcataggttgtgtgagcctatgaaaaagtgtatacgtctaagatttcaaaacaatgggtcccaaagcctaaccactttaagagtttatggagggtacttggcattacagacgattcatacacttccagtgctgccttctttacactgccagttttgacaaaacaggtttgttttttattttacaacaacatatgcctaattctgcaggattgcaagtaactttttaatgcattgtgattacttattggtaatgatagggctgatggcagtttactagatcactggttataatttgggacaaaaactgctacatcaactttcatctcgcccagagtgctcaaggctggtatgatcagtggatcaggaatgcaattgtgaattcctgcccattgcctctcttggtgaatgtggaaatggccacctgggttttcccatatcaggaagggctttgggatggcacctatattggctgataattgaggatgcaaacattccattcattagtgtgatcgagctgttaatttttagactatagatcaaaatgtgaaacattttatgttcaatccatatttgtcttgcacattataaatatatttttattttttagtaatttaggggagggaggagggagaaagggataatgatgcccttggcataattcacaaaagcagctgtgacaacctccaatcagtttacttcatttcaaaactatttccaatcacaaggaaagatttatttaaaatatactcgtacatttcacctgtggatgtctataacttcatcctcagtatgttcccaaatctgtgctggcattgaaaggacaaaacattatactagtgggtttttctactaattattttttgaagcattattttcccaacacaaaagagcttttttctcggtataatgaaaattgaaatcctatgtgtattcaatagtaaatagacaaattttattttttatttccacttgaagagttacatttcgtataaaagtttacaaataacggtttttattttgattttttcagtataaaaaaagttgccttgatggcatattatgatgtaatgctaattgcttgtaggatagtaaatggtcagtattgaaacctaatctctagctgccgtcttgtagatatgaacgaatgttcaccaagcatgtattttgtattttgttgcattgtacactgcaactaataagccaaggaatcgacatatattaggtgcgtgtactgtttctaaaaaccacaaactaagaatgataaattatcaatatagtttagtatttgctaattttactacactcttttgttatgtatatgtagggaagtcatagggattataaattcaatttgagtaaaatttaaaaccatatattttatgataaagggcctttaacttaagatggccaaagcactgatattatatatttgctgtaaagagaattataagagttttatttttctgatattaaaagttacttaataaagacttgtttccattaaaaaaaaaagtcgacgccttggt

SEQ ID NO: 77557 - DNA, 3175 bp, Homo sapiens
  misc_feature (152)..(152): n is a, c, g, or t
  misc_feature (161)..(161): n is a, c, g, or t
  misc_feature (166)..(166): n is a, c, g, or t
agcggatcacaactctgccactgccatcagcaggaacaacccagctttcaccttccactgcttgccatcccaaaggttgtaaaattaaagcactgagagccaagacaaacacgtatatcaagactcctgttcgtggtgaagagcccattttnttttggttnttggnttccaacccgttgggggcaaaagggaaaaacgggaaacgaaacttgctttgcccaatgggccccaaaaaagacggagggatccctctcaggcctgcaagaaggccacttctccatgattcgtgcatctcgaaacaaaaatgggcctgccctgggaggattatcatgtagtcctaatctgcccggtcaaaccaccgtccaagtcagggtcccttatcgtgtggtaggattagtggttggacccaaaggagcaactattaaaagaattcagcagcagacccacacctacatagtaactccgagcagagataaggaacctgtctttgaagtgacagggatgcctgaaaatgttgaccgagcacgggaagaaatagaaatgcatattgccatgcgtacaggaaactatatagagctcaatgaagagaatgatttccattacaatggtaccgatgtaagctttgaaggtggcactcttggctctgcgtggctctcctccaatcctgttcctcctagccgcgcaagaatgatatccaattatcgaaatgatagttccagttctctaggaagtggctctacagattcctactttggaagcaataggctggctgactttagtccaacaagcccatttagcacaggaaacttctggtttggagatacactaccatctgtaggctcagaagacctagcagttgactctcctgcctttgactctttaccaacatctgctcaaactatctggactccattttgaaccagttaacccattctcgtggctttgggagtgatccttctggtaacatgaagactcagcgcagaggaagtcagccatctactcctcgtctgtctcctacatttcctgagagcatagaacatccacttgctcggagggttaggagcgacccacctagtacaggcaaccatgttggccttccaatatatatccctgctttttctaatggtaccaatagttactcctcttccaatggtggttccacctctagctcacctccagaatcaagacgaaagcacgactgtgtgatttgctttgagaatgaggttattgctgccctagttccatgtggccacaacctcttctgcatggaatgtgccaacaagatctgtgaaaagagaacgccatcatgtccagtttgccagacagctgttactcaggcaatccaaattcactcttaactatatatatatacataaatactatatctctatatggactcgtaaaggcatgggtataatggtaccccccagtaaacttcctaatgatttcttatgactgttatcaggctttattgggattaggctaaagttgttagtaaacttataaaaggctgctatggtaacactaaacctaagtggtctcttgtctattagtttggtttgaattattagtactatcctgtagacccagagacatagtttatataagaattgctaaagctgaagttcaacttggctgagtgaagataatcataggttgtgtgagcctatgaaaaagtgtatacgtctaagatttcaaaacaatgggtcccaaagcctaaccactttaagagtttatggagggtacttggcattacagacgattcatacacttccagtgctgccttctttacactgccagttttgacaaaacaggtttgttttttattttacaacaacatatgcctaattctgcaggattgcaagtaactttttaatgcattgtgattacttattggtaatgatagggctgatggcagtttactagatcactggttataatttgggacaaaaactgctacatcaactttcatctcgcccagagtgctcaaggctggtatgatcagtggatcaggaatgcaattgtgaattcctgcccattgcctctcttggtgaatgtggaaatggccacctgggttttcccatatcaggaagggctttgggatggcacctatattggctgataattgaggatgcaaacattccattcattagtgtgatcgagctgttaatttttagactatagatcaaaatgtgaaacattttatgttcaatccatatttgtcttgcacattataaatatatttttattttttagtaatttaggggagggaggagggagaaagggataatgatgcccttggcataattcacaaaagcagctgtgacaacctccaatcagtttacttcatttcaaaactatttccaatcacaaggaaagatttatttaaaatatactcgtacatttcacctgtggatgtctataacttcatcctcagtatgttcccaaatctgtgctggcattgaaaggacaaaacattatactagtgggtttttctactaattattttttgaagcattattttcccaacacaaaagagcttttttctcggtataatgaaaattgaaatcctatgtgtattcaatagtaaatagacaaattttattttttatttccacttgaagagttacatttcgtataaaagtttacaaataacggtttttattttgattttttcagtataaaaaaagttgccttgatggcatattatgatgtaatgctaattgcttgtaggatagtaaatggtcagtattgaaacctaatctctagctgccgtcttgtagatatgaacgaatgttcaccaagcatgtattttgtattttgttgcattgtacactgcaactaataagccaaggaatcgacatatattaggtgcgtgtactgtttctaaaaaccacaaactaagaatgataaattatcaatatagtttagtatttgctaattttactacactcttttgttatgtatatgtagggaagtcatagggattataaattcaatttgagtaaaatttaaaaccatatattttatgataaagggcctttaacttaagatggccaaagcactgatattatatatttgctgtaaagagaattataagagttttatttttctgatattaaaagttacttaataaagacttgtttccattaaaaaaaaaagtcgacgccttggt

SEQ ID NO: 77558 - DNA, 3079 bp, Homo sapiens
  misc_feature (3059)..(3060): n is a, c, g, or t
tgctgtacggaggggacgatgcccagggcatgatggcggcgatgctgtcccacgcctacggccccggcggttgtggggcggctgcggccgccctgaacggggagcaggcggccctgctccggagaaagagcgtcaacaccaccgagtgcgtcccggtgcccagctccgagcacgtcgccgagatcgtcggccgccagggttgtaaaattaaagcactgagagccaagacaaacacgtatatcaagactcctgttcgtggtgaagagcccatttttgttgtcactggaaggaaagaagatgttgccatggccaaaagagagatcctctcagctgcagagcacttctccatgattcgtgcatctcgaaacaaaaatgggcctgccctgggaggattatcatgtagtcctaatctgcccggtcaaaccaccgtccaagtcagggtcccttatcgtgtggtaggattagtggttggacccaaaggagcaactattaaaagaattcagcagcagacccacacctacatagtaactccgagcagagataaggaacctgtctttgaagtgacagggatgcctgaaaatgttgaccgagcacgggaagaaatagaaatgcatattgccatgcgtacaggaaactatatagagctcaatgaagagaatgatttccattacaatggtaccgatgtaagctttgaaggtggcactcttggctctgcgtggctctcctccaatcctgttcctcctagccgcgcaagaatgatatccaattatcgaaatgatagttccagttctctaggaagtggctctacagattcctactttggaagcaataggctggctgactttagtccaacaagcccatttagcacaggaaacttctggtttggagatacactaccatctgtaggctcagaagacctagcagttgactctcctgcctttgactctttaccaacatctgctcaaactatctggactccattttgaaccagttaacccattctcgtggctttgggagtgatccttctggtaacatgaagactcagcgcagaggaagtcagccatctactcctcgtctgtctcctacatttcctgagagcatagaacatccacttgctcggagggttaggagcgacccacctagtacaggcaaccatgttggccttccaatatatatccctgctttttctaatggtaccaatagttactcctcttccaatggtggttccacctctagctcacctccagaatcaagacgaaagcacgactgtgtgatttgctttgagaatgaggttattgctgccctagttccatgtggccacaacctcttctgcatggaatgtgccaacaagatctgtgaaaagagaacgccatcatgtccagtttgccagacagctgttactcaggcaatccaaattcactcttaactatatatatatacataaatactatatctctatatggactcgtaaaggcatgggtataatggtaccccccagtaaacttcctaatgatttcttatgactgttatcaggctttattgggattaggctaaagttgttagtaaacttataaaaggctgctatggtaacactaaacctaagtggtctcttgtctattagtttggtttgaattattagtactatcctgtagacccagagacatagtttatataagaattgctaaagctgaagttcaacttggctgagtgaagataatcataggttgtgtgagcctatgaaaaagtgtatacgtctaagatttcaaaacaatgggtcccaaagcctaaccactttaagagtttatggagggtacttggcattacagacgattcatacacttccagtgctgccttctttacactgccagttttgacaaaacaggtttgttttttattttacaacaacatatgcctaattctgcaggattgcaagtaactttttaatgcattgtgattacttattggtaatgatagggctgatggcagtttactagatcactggttataatttgggacaaaaactgctacatcaactttcatctcgcccagagtgctcaaggctggtatgatcagtggatcaggaatgcaattgtgaattcctgcccattgcctctcttggtgaatgtggaaatggccacctgggttttcccatatcaggaagggctttgggatggcacctatattggctgataattgaggatgcaaacattccattcattagtgtgatcgagctgttaatttttagactatagatcaaaatgtgaaacattttatgttcaatccatatttgtcttgcacattataaatatatttttattttttagtaatttaggggagggaggagggagaaagggataatgatgcccttggcataattcacaaaagcagctgtgacaacctccaatcagtttacttcatttcaaaactatttccaatcacaaggaaagatttatttaaaatatactcgtacatttcacctgtggatgtctataacttcatcctcagtatgttcccaaatctgtgctggcattgaaaggacaaaacattatactagtgggtttttctactaattattttttgaagcattattttcccaacacaaaagagcttttttctcggtataatgaaaattgaaatcctatgtgtattcaatagtaaatagacaaattttattttttatttccacttgaagagttacatttcgtataaaagtttacaaataacggtttttattttgattttttcagtataaaaaaagttgccttgatggcatattatgatgtaatgctaattgcttgtaggatagtaaatggtcagtattgaaacctaatctctagctgccgtcttgtagatatgaacgaatgttcaccaagcatgtattttgtattttgttgcattgtacactgcaactaataagccaaggaatcgacatatattaggtgcgtgtactgtttctaaaaaccacaaactaagaatgataaattatcaatatagtttagtatttgctaattttactacactcttttgttatgtatatgtagggaagtcatagctgtttnnctgggggatcctctggaga

SEQ ID NO: 77559 - DNA, 2061 bp, Homo sapiens
atggtgttctagaggatcccgtccactgttcgataatggtggttccacctctagctcacctccagaatcaagacgaaagcacgactgtgtgatttgctttgagaatgaggttattgctgccctagttccatgtggccacaacctcttctgcatggaatgtgccaacaagatctgtgaaaagagaacgccatcatgtccagtttgccagacagctgttactcaggcaatccaaattcactcttaactatatatatatacataaatactatatctctatatggactcgtaaaggcatgggtataatggtaccccccagtaaacttcctaatgatttcttatgactgttatcaggctttattgggattaggctaaagttgttagtaaacttataaaaggctgctatggtaacactaaacctaagtggtctcttgtctattagtttggtttgaattattagtactatcctgtagacccagagacatagtttatataagaattgctaaagctgaagttcaacttggctgagtgaagataatcataggttgtgtgagcctatgaaaaagtgtatacgtctaagatttcaaaacaatgggtcccaaagcctaaccactttaagagtttatggagggtacttggcattacagacgattcatacacttccagtgctgccttctttacactgccagttttgacaaaacaggtttgttttttattttacaacaacatatgcctaattctgcaggattgcaagtaactttttaatgcattgtgattacttattggtaatgatagggctgatggcagtttactagatcactggttataatttgggacaaaaactgctacatcaactttcatctcgcccagagtgctcaaggctggtatgatcagtggatcaggaatgcaattgtgaattcctgcccattgcctctcttggtgaatgtggaaatggccacctgggttttcccatatcaggaagggctttgggatggcacctatattggctgataattgaggatgcaaacattccattcattagtgtgatcgagctgttaatttttagactatagatcaaaatgtgaaacattttatgttcaatccatatttgtcttgcacattataaatatatttttattttttagtaatttaggggagggaggagggagaaagggataatgatgcccttggcataattcacaaaagcagctgtgacaacctccaatcagtttacttcatttcaaaactatttccaatcacaaggaaagatttatttaaaatatactcgtacatttcacctgtggatgtctataacttcatcctcagtatgttcccaaatctgtgctggcattgaaaggacaaaacattatactagtgggtttttctactaattattttttgaagcattattttcccaacacaaaagagcttttttctcggtataatgaaaattgaaatcctatgtgtattcaatagtaaatagacaaattttattttttatttccacttgaagagttacatttcgtataaaagtttacaaataacggtttttattttgattttttcagtataaaaaaagttgccttgatggcatattatgatgtaatgctaattgcttgtaggatagtaaatggtcagtattgaaacctaatctctagctgccgtcttgtagatatgaacgaatgttcaccaagcatgtattttgtattttgttgcattgtacactgcaactaataagccaaggaatcgacatatattaggtgcgtgtactgtttctaaaaaccacaaactaagaatgataaattatcaatatagtttagtatttgctaattttactacactcttttgttatgtatatgtagggaagtcatagggattataaattcaatttgagtaaaatttaaaaccatatattttatgataaagggcctttaacttaagatggccaaagcactgatattatatatttgctgtaaagagaattataagagttttatttttctgatattaaaagttacttaataaagacttgtttccattaaaaaaaaaagtcgacgccttggt

SEQ ID NO: 77560 - DNA, 1866 bp, Homo sapiens
aatctacaagtctcagtgtaaatcataatagagacttacctgttcaaaatggcagaaaaatacttctttactagaaatcacgtaatacagacgcacttacaaaagcaacagctactttccatctttaggaaaactagatttctctaaccttcatctgtagtataggaaaattgaaagcatatggaagaattgtagataacttagcagcaagaatgtaaaatctaattatctgcagagggatataccaatgataaaccaactgattcatcctgcagaatctgagataggcttaggaatcagaaattaggtattatggaagttggagtgtgattgtgagggagagatgatgtgggtggcatcgataaacaccggtgtatcgatgccaccaaaacaatgggtcccaaagcctaaccactttaagagtttatggagggtacttggcattacagacgattcatacacttccagtgctgccttctttacactgccagttttgacaaaacaggtttgttttttattttacaacaacatatgcctaattctgcaggattgcaagtaactttttaatgcattgtgattacttattggtaatgatagggctgatggcagtttactagatcactggttataatttgggacaaaaactgctacatcaactttcatctcgcccagagtgctcaaggctggtatgatcagtggatcaggaatgcaattgtgaattcctgcccattgcctctcttggtgaatgtggaaatggccacctgggttttcccatatcaggaagggctttgggatggcacctatattggctgataattgaggatgcaaacattccattcattagtgtgatcgagctgttaatttttagactatagatcaaaatgtgaaacattttatgttcaatccatatttgtcttgcacattataaatatatttttattttttagtaatttaggggagggaggagggagaaagggataatgatgcccttggcataattcacaaaagcagctgtgacaacctccaatcagtttacttcatttcaaaactatttccaatcacaaggaaagatttatttaaaatatactcgtacatttcacctgtggatgtctataacttcatcctcagtatgttcccaaatctgtgctggcattgaaaggacaaaacattatactagtgggtttttctactaattattttttgaagcattattttcccaacacaaaagagcttttttctcggtataatgaaaattgaaatcctatgtgtattcaatagtaaatagacaaattttattttttatttccacttgaagagttacatttcgtataaaagtttacaaataacggtttttattttgattttttcagtataaaaaaagttgccttgatggcatattatgatgtaatgctaattgcttgtaggatagtaaatggtcagtattgaaacctaatctctagctgccgtcttgtagatatgaacgaatgttcaccaagcatgtattttgtattttgttgcattgtacactgcaactaataagccaaggaatcgacatatattaggtgcgtgtactgtttctaaaaaccacaaactaagaatgataaattatcaatatagtttagtatttgctaattttactacactcttttgttatgtatatgtagggaagtcatagggattataaattcaatttgagtaaaatttaaaaccatatattttatgataaagggcctttaacttaagatggccaaagcactgatattatatatttgctgtaaagagaattataagagttttatttttctgatattaaaagttacttaataaagacttgtttccattaaaaaaaaaagtcgacgccttggt

SEQ ID NO: 77561 - DNA, 2388 bp, Homo sapiens
  misc_feature (2325)..(2325): n is a, c, g, or t
tgctgtacggaggggacgatgcccagggcatgatggcggcgatgctgtcccacgcctacggccccggcggttgtggggcggctgcggccgccctgaacggggagcaggcggccctgctccggagaaagagcgtcaacaccaccgagtgcgtcccggtgcccagctccgagcacgtcgccgagatcgtcggccgccagggttgtaaaattaaagcactgagagccaagacaaacacgtatatcaagactcctgttcgtggtgaagagcccatttttgttgtcactggaaggaaagaagatgttgccatggccaaaagagagatcctctcagctgcagagcacttctccatgattcgtgcatctcgaaacaaaaatgggcctgccctgggaggattatcatgtagtcctaatctgcccggtcaaaccaccgtccaagtcagggtcccttatcgtgtggtaggattagtggttggacccaaaggagcaactattaaaagaattcagcagcagacccacacctacatagtaactccgagcagagataaggaacctgtctttgaagtgacagggatgcctgaaaatgttgaccgagcacgggaagaaatagaaatgcatattgccatgcgtacaggaaactatatagagctcaatgaagagaatgatttccattacaatggtaccgatgtaagctttgaaggtggcactcttggctctgcgtggctctcctccaatcctgttcctcctagccgcgcaagaatgatatccaattatcgaaatgatagttccagttctctaggaagtggctctacagattcctactttggaagcaataggctggctgactttagtccaacaagcccatttagcacaggaaacttctggtttggagatacactaccatctgtaggctcagaagacctagcagttgactctcctgcctttgactctttaccaacatctgctcaaactatctggactccattttgaaccagttaacccattctcgtggctttgggagtgatccttctggtaacatgaagactcagcgcagaggaagtcagccatctactcctcgtctgtctcctacatttcctgagagcatagaacatccacttgctcggagggttaggagcgacccacctagtacaggcaaccatgttggccttccaatatatatccctgctttttctaatggtaccaatagttactcctcttccaatggtggttccacctctagctcacctccagaatcaagacgaaagcacgactgtgtgatttgctttgagaatgaggttattgctgccctagttccatgtggccacaacctcttctgcatggaatgtgccaacaagatctgtgaaaagagaacgccatcatgtccagtttgccagacagctgttactcaggcaatccaaattcactcttaactatatatatatacataaatactatatctctatatggactcgtaaaggcatgggtataatggtaccccccagtaaacttcctaatgatttcttatgactgttatcaggctttattgggattaggctaaagttgttagtaaacttataaaaggctgctatggtaacactaaacctaagtggtctcttgtctattagtttggtttgaattattagtactatcctgtagacccagagacatagtttatataagaattgctaaagctgaagttcaacttggctgagtgaagataatcataggttgtgtgagcctatgaaaaagtgtatacgtctaagatttcaaaacaatgggtcccaaagcctaaccactttaagagtttatggagggtacttggcattacagacgattcatacacttccagtgctgccttctttacactgccagttttgacaaaacaggtttgttttttattttacaacaacatatgcctaattctgcaggattgcaagtaactttttaatgcattgtgattacttattggtaatgatagggctgatggcagtttactagatcactggttataatttgggacaaaaactgctacatcaactttcatctcgcccagagtgctcaaggctggtatgatcagtggatcaggaatgcaattgtgaattcctgcccattgcctctcttggtgaatgtggaaatggccacctgggttttcccatatcaggaagggctttgggatggcacctatattggctgataattgaggatgcaaacattccattcattagtgtgatcgagctgttaatttttagactatagatcaaaatgtgaaacattttatgttcaatccatatttgtcttgcacattataaatatatttttattttttaancccatttaagggcggagggaggagttcccatttcttgcccttccttttataacttatgactgg
